United States Patent Application Publication US 2007/0042381 A1 - sequence listing, part 43

SEQ ID NO: 1925736 - RNA, 20 nt, Human
ccagaccuguuagcagacag

SEQ ID NO: 1925737 - RNA, 21 nt, Human
ccagaccuguuagcagacagg

SEQ ID NO: 1925738 - RNA, 23 nt, Human
ccagaccuguuagcagacaggcc

SEQ ID NO: 1925739 - RNA, 17 nt, Human
ccagacccggcugcgug

SEQ ID NO: 1925740 - RNA, 15 nt, Human
ccagaccugauccug

SEQ ID NO: 1925741 - RNA, 16 nt, Human
ccagaccugauccugg

SEQ ID NO: 1925742 - RNA, 17 nt, Human
ccagaccugauccugga

SEQ ID NO: 1925743 - RNA, 18 nt, Human
ccagaccugauccuggag

SEQ ID NO: 1925744 - RNA, 19 nt, Human
ccagaccugauccuggagg

SEQ ID NO: 1925745 - RNA, 20 nt, Human
ccagaccugauccuggaggc

SEQ ID NO: 1925746 - RNA, 21 nt, Human
ccagaccugauccuggaggcc

SEQ ID NO: 1925747 - RNA, 23 nt, Human
ccagaccugauccuggaggccca

SEQ ID NO: 1925748 - RNA, 22 nt, Human
ccacuuuuguucuugguuugua

SEQ ID NO: 1925749 - RNA, 21 nt, Human
ccacuuuuguucuugguuugu

SEQ ID NO: 1925750 - RNA, 15 nt, Human
ccacuuuuguucuug

SEQ ID NO: 1925751 - RNA, 14 nt, Human
ccacuuuuguucuu

SEQ ID NO: 1925752 - RNA, 19 nt, Human
ccacuuggucugugagaug

SEQ ID NO: 1925753 - RNA, 17 nt, Human
ccacuuggucugugaga

SEQ ID NO: 1925754 - RNA, 16 nt, Human
ccacuuggucugugag

SEQ ID NO: 1925755 - RNA, 15 nt, Human
ccacuuggucuguga

SEQ ID NO: 1925756 - RNA, 22 nt, Human
ccacuuggucugugagaugcua

SEQ ID NO: 1925757 - RNA, 20 nt, Human
ccacuuggucugugagaugc

SEQ ID NO: 1925758 - RNA, 20 nt, Human
ccacuuucuagccagaggag

SEQ ID NO: 1925759 - RNA, 18 nt, Human
ccacuuucuagccagagg

SEQ ID NO: 1925760 - RNA, 19 nt, Human
ccacuuucuagccagagga

SEQ ID NO: 1925761 - RNA, 13 nt, Human
ccacuuucuagcc

SEQ ID NO: 1925762 - RNA, 17 nt, Human
ccacugacugcagggac

SEQ ID NO: 1925763 - RNA, 16 nt, Human
ccacugacugcaggga

SEQ ID NO: 1925764 - RNA, 13 nt, Human
ccacugaccagaa

SEQ ID NO: 1925765 - RNA, 19 nt, Human
ccacugcaccgggccacag

SEQ ID NO: 1925766 - RNA, 17 nt, Human
ccacugcaccgggccac

SEQ ID NO: 1925767 - RNA, 14 nt, Human
ccacugcaccgggc

SEQ ID NO: 1925768 - RNA, 13 nt, Human
ccacugcaccggg

SEQ ID NO: 1925769 - RNA, 20 nt, Human
ccacugcacuauagccuagg

SEQ ID NO: 1925770 - RNA, 19 nt, Human
ccacugcacuauagccuag

SEQ ID NO: 1925771 - RNA, 18 nt, Human
ccacugcacuccagccug

SEQ ID NO: 1925772 - RNA, 23 nt, Human
ccacuucauucuugaaagcugug

SEQ ID NO: 1925773 - RNA, 12 nt, Human
ccacuuggucug

SEQ ID NO: 1925774 - RNA, 15 nt, Human
ccacuucuggguggg

SEQ ID NO: 1925775 - RNA, 19 nt, Human
ccagucaccccggccaccu

SEQ ID NO: 1925776 - RNA, 17 nt, Human
ccagucaccccggccac

SEQ ID NO: 1925777 - RNA, 18 nt, Human
ccagucaccccggccacc

SEQ ID NO: 1925778 - RNA, 13 nt, Human
ccaguccuuccac

SEQ ID NO: 1925779 - RNA, 17 nt, Human
ccaguccuuccaccucg

SEQ ID NO: 1925780 - RNA, 21 nt, Human
ccaggcugaccacagcacagc

SEQ ID NO: 1925781 - RNA, 23 nt, Human
ccaggcugaccacagcacagcca

SEQ ID NO: 1925782 - RNA, 20 nt, Human
ccaggggugggacacccugu

SEQ ID NO: 1925783 - RNA, 21 nt, Human
ccaggggugggacacccugug

SEQ ID NO: 1925784 - RNA, 22 nt, Human
ccaggggugggacacccuguga

SEQ ID NO: 1925785 - RNA, 13 nt, Human
ccaguaucuugaa

SEQ ID NO: 1925786 - RNA, 19 nt, Human
ccaguaucuugaagacuuu

SEQ ID NO: 1925787 - RNA, 22 nt, Human
ccaguaucuugaagacuuuucu

SEQ ID NO: 1925788 - RNA, 16 nt, Human
ccagucaccccggcca

SEQ ID NO: 1925789 - RNA, 19 nt, Human
ccaggcagggccaacccuu

SEQ ID NO: 1925790 - RNA, 23 nt, Human
ccaggcagggccaacccuucucc

SEQ ID NO: 1925791 - RNA, 13 nt, Human
ccaggcugaagca

SEQ ID NO: 1925792 - RNA, 20 nt, Human
ccaggcugaagcagguuccc

SEQ ID NO: 1925793 - RNA, 15 nt, Human
ccaggcugaccacag

SEQ ID NO: 1925794 - RNA, 16 nt, Human
ccaggcugaccacagc

SEQ ID NO: 1925795 - RNA, 17 nt, Human
ccaggcugaccacagca

SEQ ID NO: 1925796 - RNA, 18 nt, Human
ccaggcugaccacagcac

SEQ ID NO: 1925797 - RNA, 19 nt, Human
ccaggcugaccacagcaca

SEQ ID NO: 1925798 - RNA, 20 nt, Human
ccaggcugaccacagcacag

SEQ ID NO: 1925799 - RNA, 15 nt, Human
ccaggaguucugcuc

SEQ ID NO: 1925800 - RNA, 16 nt, Human
ccaggaguucugcuca

SEQ ID NO: 1925801 - RNA, 17 nt, Human
ccaggaguucugcucau

SEQ ID NO: 1925802 - RNA, 15 nt, Human
ccagcggacaguggc

SEQ ID NO: 1925803 - RNA, 16 nt, Human
ccagcggacaguggca

SEQ ID NO: 1925804 - RNA, 17 nt, Human
ccagcggacaguggcag

SEQ ID NO: 1925805 - RNA, 18 nt, Human
ccagcggacaguggcagg

SEQ ID NO: 1925806 - RNA, 19 nt, Human
ccagcggacaguggcagga

SEQ ID NO: 1925807 - RNA, 21 nt, Human
ccagcggacaguggcaggaca

SEQ ID NO: 1925808 - RNA, 17 nt, Human
ccagcgggaauggcagc

SEQ ID NO: 1925809 - RNA, 23 nt, Human
ccagcgggaauggcagcugccac

SEQ ID NO: 1925810 - RNA, 20 nt, Human
ccaggaaaggcuccaggagc

SEQ ID NO: 1925811 - RNA, 17 nt, Human
ccagcuuguuauuuaua

SEQ ID NO: 1925812 - RNA, 15 nt, Human
ccagcuuguuauuua

SEQ ID NO: 1925813 - RNA, 16 nt, Human
ccagcuuguuauuuau

SEQ ID NO: 1925814 - RNA, 17 nt, Human
ccaggaaaggcuccagg

SEQ ID NO: 1925815 - RNA, 18 nt, Human
ccaggaaaggcuccagga

SEQ ID NO: 1925816 - RNA, 19 nt, Human
ccaggaaaggcuccaggag

SEQ ID NO: 1925817 - RNA, 21 nt, Human
ccagcgagcccugguggcagu

SEQ ID NO: 1925818 - RNA, 18 nt, Human
ccagccccuucugaccca

SEQ ID NO: 1925819 - RNA, 18 nt, Human
ccagccccuggaugcagc

SEQ ID NO: 1925820 - RNA, 15 nt, Human
ccagccccuucugac

SEQ ID NO: 1925821 - RNA, 16 nt, Human
ccagccccuucugacc

SEQ ID NO: 1925822 - RNA, 17 nt, Human
ccagccccuucugaccc

SEQ ID NO: 1925823 - RNA, 13 nt, Human
ccagcagccugga

SEQ ID NO: 1925824 - RNA, 23 nt, Human
ccagccccauccucuguacagag

SEQ ID NO: 1925825 - RNA, 13 nt, Human
ccagccccuggau

SEQ ID NO: 1925826 - RNA, 14 nt, Human
ccagccccuggaug

SEQ ID NO: 1925827 - RNA, 15 nt, Human
ccagccccuggaugc

SEQ ID NO: 1925828 - RNA, 22 nt, Human
ccagcagaaaugccuuacccuc

SEQ ID NO: 1925829 - RNA, 17 nt, Human
ccagcagaaaugccuua

SEQ ID NO: 1925830 - RNA, 16 nt, Human
ccagcagaaaugccuu

SEQ ID NO: 1925831 - RNA, 11 nt, Human
ccagcagccug

SEQ ID NO: 1925832 - RNA, 12 nt, Human
ccagcagccugg

SEQ ID NO: 1925833 - RNA, 20 nt, Human
cccauccagucucccaacuu

SEQ ID NO: 1925834 - RNA, 13 nt, Human
cccauccagggcc

SEQ ID NO: 1925835 - RNA, 14 nt, Human
cccauccucuguac

SEQ ID NO: 1925836 - RNA, 20 nt, Human
cccaggcuggcgugcagugg

SEQ ID NO: 1925837 - RNA, 19 nt, Human
cccaggcuggcgugcagug

SEQ ID NO: 1925838 - RNA, 18 nt, Human
cccaggcuggcgugcagu

SEQ ID NO: 1925839 - RNA, 17 nt, Human
cccagcugggucaggca

SEQ ID NO: 1925840 - RNA, 19 nt, Human
cccagcugggucaggcagg

SEQ ID NO: 1925841 - RNA, 22 nt, Human
cccagcuggggccaggcugggu

SEQ ID NO: 1925842 - RNA, 23 nt, Human
cccagcuggggccaggcuggguc

SEQ ID NO: 1925843 - RNA, 20 nt, Human
cccauccucuguacagagcc

SEQ ID NO: 1925844 - RNA, 15 nt, Human
cccauccucuguaca

SEQ ID NO: 1925845 - RNA, 19 nt, Human
cccauccucuguacagagc

SEQ ID NO: 1925846 - RNA, 19 nt, Human
cccagcccacuucugccau

SEQ ID NO: 1925847 - RNA, 11 nt, Human
cccagcccaga

SEQ ID NO: 1925848 - RNA, 12 nt, Human
cccagcccagag

SEQ ID NO: 1925849 - RNA, 13 nt, Human
cccagcccagaga

SEQ ID NO: 1925850 - RNA, 14 nt, Human
cccagcccagagac

SEQ ID NO: 1925851 - RNA, 15 nt, Human
cccagcccagagaca

SEQ ID NO: 1925852 - RNA, 21 nt, Human
cccagccccaaaacucuccuc

SEQ ID NO: 1925853 - RNA, 16 nt, Human
cccagcccagagacau

SEQ ID NO: 1925854 - RNA, 23 nt, Human
cccagccccaaaacucuccucug

SEQ ID NO: 1925855 - RNA, 20 nt, Human
cccagcuggggccaggcugg

SEQ ID NO: 1925856 - RNA, 21 nt, Human
ccccaaaacucuccucugcug

SEQ ID NO: 1925857 - RNA, 20 nt, Human
ccccaaaacucuccucugcu

SEQ ID NO: 1925858 - RNA, 18 nt, Human
ccccagcaggugcugacu

SEQ ID NO: 1925859 - RNA, 18 nt, Human
ccccaaaacucuccucug

SEQ ID NO: 1925860 - RNA, 14 nt, Human
cccauugucccucu

SEQ ID NO: 1925861 - RNA, 14 nt, Human
cccauucuuuugua

SEQ ID NO: 1925862 - RNA, 17 nt, Human
cccauucuuuuguaauu

SEQ ID NO: 1925863 - RNA, 20 nt, Human
cccauucuuuuguaauuuaa

SEQ ID NO: 1925864 - RNA, 21 nt, Human
cccauucuuuuguaauuuaaa

SEQ ID NO: 1925865 - RNA, 22 nt, Human
cccauucuuuuguaauuuaaau

SEQ ID NO: 1925866 - RNA, 21 nt, Human
ccccauucugccugcccaggc

SEQ ID NO: 1925867 - RNA, 14 nt, Human
ccccagccccaucc

SEQ ID NO: 1925868 - RNA, 14 nt, Human
ccccagccccaaaa

SEQ ID NO: 1925869 - RNA, 10 nt, Human
ccccagcccc

SEQ ID NO: 1925870 - RNA, 12 nt, Human
ccccagccccaa

SEQ ID NO: 1925871 - RNA, 14 nt, Human
ccccggccaccugc

SEQ ID NO: 1925872 - RNA, 18 nt, Human
ccccggccaccugcggug

SEQ ID NO: 1925873 - RNA, 13 nt, Human
ccccggccaccug

SEQ ID NO: 1925874 - RNA, 14 nt, Human
ccccgcccaggcuu

SEQ ID NO: 1925875 - RNA, 21 nt, Human
ccccgcccccugcccuccccu

SEQ ID NO: 1925876 - RNA, 13 nt, Human
ccccgcccccugc

SEQ ID NO: 1925877 - RNA, 17 nt, Human
ccccgcccccugcccuc

SEQ ID NO: 1925878 - RNA, 18 nt, Human
ccccgcccccugcccucc

SEQ ID NO: 1925879 - RNA, 12 nt, Human
ccccgcccaggc

SEQ ID NO: 1925880 - RNA, 16 nt, Human
ccccgcauccccugcc

SEQ ID NO: 1925881 - RNA, 17 nt, Human
ccccgcauccccugccu

SEQ ID NO: 1925882 - RNA, 19 nt, Human
ccccgcauccccugccucc

SEQ ID NO: 1925883 - RNA, 14 nt, Human
cccccuuccaugga

SEQ ID NO: 1925884 - RNA, 11 nt, Human
cccccuuccac

SEQ ID NO: 1925885 - RNA, 15 nt, Human
ccccauuguggucac

SEQ ID NO: 1925886 - RNA, 15 nt, Human
ccccauucuuuugua

SEQ ID NO: 1925887 - RNA, 14 nt, Human
cccaagcagagaag

SEQ ID NO: 1925888 - RNA, 17 nt, Human
cccaagcucugcuccuc

SEQ ID NO: 1925889 - RNA, 12 nt, Human
cccaagcucaga

SEQ ID NO: 1925890 - RNA, 14 nt, Human
cccaagcuuagaac

SEQ ID NO: 1925891 - RNA, 18 nt, Human
cccacccaagggccuggc

SEQ ID NO: 1925892 - RNA, 15 nt, Human
cccacccaagggccu

SEQ ID NO: 1925893 - RNA, 22 nt, Human
ccauuguggucacaggaaguag

SEQ ID NO: 1925894 - RNA, 15 nt, Human
ccauugucccucugc

SEQ ID NO: 1925895 - RNA, 17 nt, Human
ccauugucccucugccc

SEQ ID NO: 1925896 - RNA, 19 nt, Human
ccauugucccucugcccca

SEQ ID NO: 1925897 - RNA, 22 nt, Human
ccauugucccucugccccaucc

SEQ ID NO: 1925898 - RNA, 13 nt, Human
ccauugguguuga

SEQ ID NO: 1925899 - RNA, 20 nt, Human
cccaacucuccccugaccug

SEQ ID NO: 1925900 - RNA, 15 nt, Human
cccaacucuccccug

SEQ ID NO: 1925901 - RNA, 11 nt, Human
cccaacugucu

SEQ ID NO: 1925902 - RNA, 15 nt, Human
cccaacugucuuuuu

SEQ ID NO: 1925903 - RNA, 13 nt, Human
cccaacugucuuu

SEQ ID NO: 1925904 - RNA, 15 nt, Human
ccauuuaaaaacagg

SEQ ID NO: 1925905 - RNA, 18 nt, Human
cccacuguacuugcucuu

SEQ ID NO: 1925906 - RNA, 19 nt, Human
cccacuguacuugcucuug

SEQ ID NO: 1925907 - RNA, 23 nt, Human
cccacuguacuugcucuugaugc

SEQ ID NO: 1925908 - RNA, 15 nt, Human
cccaccgcagacagg

SEQ ID NO: 1925909 - RNA, 18 nt, Human
cccaccgcagacaggacc

SEQ ID NO: 1925910 - RNA, 18 nt, Human
cccacccuggugggccaa

SEQ ID NO: 1925911 - RNA, 22 nt, Human
cccacuguccugggccugcaga

SEQ ID NO: 1925912 - RNA, 15 nt, Human
cccacuguccugggc

SEQ ID NO: 1925913 - RNA, 16 nt, Human
cccacuguccugggcc

SEQ ID NO: 1925914 - RNA, 13 nt, Human
ccaugagccucag

SEQ ID NO: 1925915 - RNA, 16 nt, Human
ccaugaggaacaaggc

SEQ ID NO: 1925916 - RNA, 17 nt, Human
ccaugaggaacaaggca

SEQ ID NO: 1925917 - RNA, 18 nt, Human
ccaugaggaacaaggcaa

SEQ ID NO: 1925918 - RNA, 21 nt, Human
ccaugggcacaaagggcccag

SEQ ID NO: 1925919 - RNA, 23 nt, Human
ccaugagaugauacauccaaagc

SEQ ID NO: 1925920 - RNA, 20 nt, Human
ccaugagauagcauuagcug

SEQ ID NO: 1925921 - RNA, 13 nt, Human
ccaugucugcauu

SEQ ID NO: 1925922 - RNA, 21 nt, Human
ccaugugaaaaggcaaaaagc

SEQ ID NO: 1925923 - RNA, 17 nt, Human
ccaugggccuccugugu

SEQ ID NO: 1925924 - RNA, 15 nt, Human
cgggcccagaggagc

SEQ ID NO: 1925925 - RNA, 14 nt, Human
cgggcccagaggag

SEQ ID NO: 1925926 - RNA, 18 nt, Human
cgggccagugcuccagcc

SEQ ID NO: 1925927 - RNA, 14 nt, Human
cgggccagugcucc

SEQ ID NO: 1925928 - RNA, 19 nt, Human
cgggcucagcaaaagaugc

SEQ ID NO: 1925929 - RNA, 12 nt, Human
cgggcucugccu

SEQ ID NO: 1925930 - RNA, 13 nt, Human
cgggcucugccuc

SEQ ID NO: 1925931 - RNA, 22 nt, Human
cguacacauuuuauuuuauuau

SEQ ID NO: 1925932 - RNA, 20 nt, Human
cgguggcucacgccuguaau

SEQ ID NO: 1925933 - RNA, 15 nt, Human
cggugggcacccacc

SEQ ID NO: 1925934 - RNA, 18 nt, Human
cggugggcacccacccug

SEQ ID NO: 1925935 - RNA, 12 nt, Human
cgggcugugccc

SEQ ID NO: 1925936 - RNA, 20 nt, Human
cgguggcuagucaagcuccu

SEQ ID NO: 1925937 - RNA, 21 nt, Human
cgguggcuagucaagcuccuc

SEQ ID NO: 1925938 - RNA, 22 nt, Human
cgguggcuagucaagcuccucc

SEQ ID NO: 1925939 - RNA, 17 nt, Human
cguaaagcuagaaauga

SEQ ID NO: 1925940 - RNA, 19 nt, Human
cggugggcacccacccugg

SEQ ID NO: 1925941 - RNA, 23 nt, Human
cggugggcacccacccugggacc

SEQ ID NO: 1925942 - RNA, 23 nt, Human
cggagucccaccuuggcugcagg

SEQ ID NO: 1925943 - RNA, 22 nt, Human
cggagucccaccuuggcugcag

SEQ ID NO: 1925944 - RNA, 21 nt, Human
cggagucccaccuuggcugca

SEQ ID NO: 1925945 - RNA, 17 nt, Human
cggagggauuccccuaa

SEQ ID NO: 1925946 - RNA, 17 nt, Human
cggagacggagucccac

SEQ ID NO: 1925947 - RNA, 20 nt, Human
cggagacggagucccaccuu

SEQ ID NO: 1925948 - RNA, 15 nt, Human
cgcaguggcccugag

SEQ ID NO: 1925949 - RNA, 17 nt, Human
cgcagugugcacuaagg

SEQ ID NO: 1925950 - RNA, 22 nt, Human
cgcagugugcacuaaggggccc

SEQ ID NO: 1925951 - RNA, 23 nt, Human
cgcagugugcacuaaggggcccg

SEQ ID NO: 1925952 - RNA, 14 nt, Human
cgccacagcccagc

SEQ ID NO: 1925953 - RNA, 21 nt, Human
cgccacagcccagccacggac

SEQ ID NO: 1925954 - RNA, 20 nt, Human
ccuuuucgcaggauucuucc

SEQ ID NO: 1925955 - RNA, 19 nt, Human
cgcugccccuggcagcccc

SEQ ID NO: 1925956 - RNA, 20 nt, Human
cgcugccccuggcagccccu

SEQ ID NO: 1925957 - RNA, 19 nt, Human
cgcucuguugcccaggcug

SEQ ID NO: 1925958 - RNA, 22 nt, Human
cgcucuguugcccaggcuggag

SEQ ID NO: 1925959 - RNA, 18 nt, Human
cgcuggagugcagugagc

SEQ ID NO: 1925960 - RNA, 17 nt, Human
cgcuggagugcagugag

SEQ ID NO: 1925961 - RNA, 20 nt, Human
cuaagaaauaugcacaauag

SEQ ID NO: 1925962 - RNA, 22 nt, Human
cuaagaaagcccuuaggaagaa

SEQ ID NO: 1925963 - RNA, 16 nt, Human
cuaacuuuccuucauu

SEQ ID NO: 1925964 - RNA, 14 nt, Human
cuaagaaccuggaa

SEQ ID NO: 1925965 - RNA, 15 nt, Human
cuaagaaccuggaac

SEQ ID NO: 1925966 - RNA, 16 nt, Human
cuaagaaccuggaacu

SEQ ID NO: 1925967 - RNA, 14 nt, Human
cuaacuugucuuug

SEQ ID NO: 1925968 - RNA, 22 nt, Human
cuaacuugucuuuggacccuga

SEQ ID NO: 1925969 - RNA, 15 nt, Human
cuaaaguaugaagca

SEQ ID NO: 1925970 - RNA, 19 nt, Human
cuaaagguguugucccuuc

SEQ ID NO: 1925971 - RNA, 20 nt, Human
cuaaagguguugucccuucu

SEQ ID NO: 1925972 - RNA, 23 nt, Human
cuaaaguaaaaacaaagaaauua

SEQ ID NO: 1925973 - RNA, 19 nt, Human
cuaaaguguauuuuuuuac

SEQ ID NO: 1925974 - RNA, 20 nt, Human
cuaacgaaguauccuucagc

SEQ ID NO: 1925975 - RNA, 15 nt, Human
cgugagugcagaccc

SEQ ID NO: 1925976 - RNA, 16 nt, Human
cgugaggccagagaca

SEQ ID NO: 1925977 - RNA, 14 nt, Human
cgugaucaaagcca

SEQ ID NO: 1925978 - RNA, 19 nt, Human
cgugaguccuggcauggga

SEQ ID NO: 1925979 - RNA, 18 nt, Human
cgugaguccuggcauggg

SEQ ID NO: 1925980 - RNA, 15 nt, Human
cguguuaugacucca

SEQ ID NO: 1925981 - RNA, 18 nt, Human
cgugaucaaagccacacu

SEQ ID NO: 1925982 - RNA, 21 nt, Human
cgugaucaaagccacacucug

SEQ ID NO: 1925983 - RNA, 19 nt, Human
cguguuaugacuccagaau

SEQ ID NO: 1925984 - RNA, 14 nt, Human
cuaaagcagccagc

SEQ ID NO: 1925985 - RNA, 11 nt, Human
cuaaagcugcc

SEQ ID NO: 1925986 - RNA, 15 nt, Human
cgugacaacacuugu

SEQ ID NO: 1925987 - RNA, 14 nt, Human
cgugacaacacuug

SEQ ID NO: 1925988 - RNA, 20 nt, Human
cgugagccacugcaccgggc

SEQ ID NO: 1925989 - RNA, 15 nt, Human
cgugagccacugcac

SEQ ID NO: 1925990 - RNA, 14 nt, Human
cgugagccacugca

SEQ ID NO: 1925991 - RNA, 14 nt, Human
cgugaggccagaga

SEQ ID NO: 1925992 - RNA, 22 nt, Human
cgugagccacugcaccgggcca

SEQ ID NO: 1925993 - RNA, 23 nt, Human
cuaauaaaauaucauucagcaac

SEQ ID NO: 1925994 - RNA, 22 nt, Human
cuaauaaaauaucauucagcaa

SEQ ID NO: 1925995 - RNA, 21 nt, Human
cuaauaaaauaucauucagca

SEQ ID NO: 1925996 - RNA, 20 nt, Human
cuaauaaaauaucauucagc

SEQ ID NO: 1925997 - RNA, 19 nt, Human
cuaauaaaauaucauucag

SEQ ID NO: 1925998 - RNA, 18 nt, Human
cuaauaaaauaucauuca

SEQ ID NO: 1925999 - RNA, 17 nt, Human
cuaauaaaauaucauuc

SEQ ID NO: 1926000 - RNA, 16 nt, Human
cuaauaaaauaucauu

SEQ ID NO: 1926001 - RNA, 15 nt, Human
cuaauaaaauaucau

SEQ ID NO: 1926002 - RNA, 14 nt, Human
cuaauaaaauauca

SEQ ID NO: 1926003 - RNA, 13 nt, Human
cuaauaaaauauc

SEQ ID NO: 1926004 - RNA, 20 nt, Human
cuaauaaaauuuaaaagucu

SEQ ID NO: 1926005 - RNA, 12 nt, Human
cuaauuugcauu

SEQ ID NO: 1926006 - RNA, 13 nt, Human
cuaauuugcauua

SEQ ID NO: 1926007 - RNA, 14 nt, Human
cuaauuugcauuaa

SEQ ID NO: 1926008 - RNA, 19 nt, Human
cuacaaaaagcauaaaaau

SEQ ID NO: 1926009 - RNA, 19 nt, Human
cuaauuugcauuaaauuca

SEQ ID NO: 1926010 - RNA, 21 nt, Human
cuaauuugcauuaaauucaca

SEQ ID NO: 1926011 - RNA, 22 nt, Human
cuaauuugcauuaaauucacaa

SEQ ID NO: 1926012 - RNA, 14 nt, Human
cuaaguuuuuaugg

SEQ ID NO: 1926013 - RNA, 17 nt, Human
cuaagaauucaaacugg

SEQ ID NO: 1926014 - RNA, 23 nt, Human
ccuuaggccuuccucucuccaga

SEQ ID NO: 1926015 - RNA, 13 nt, Human
ccuuaggccuucc

SEQ ID NO: 1926016 - RNA, 14 nt, Human
ccuuaggccuuccu

SEQ ID NO: 1926017 - RNA, 15 nt, Human
ccuuaggccuuccuc

SEQ ID NO: 1926018 - RNA, 12 nt, Human
ccuuauggaaca

SEQ ID NO: 1926019 - RNA, 16 nt, Human
ccuuaucuccaagacc

SEQ ID NO: 1926020 - RNA, 22 nt, Human
ccuuaucuccaagaccagagau

SEQ ID NO: 1926021 - RNA, 22 nt, Human
ccuuauggaacacucugagacu

SEQ ID NO: 1926022 - RNA, 19 nt, Human
ccuuaugcuucuuucaaau

SEQ ID NO: 1926023 - RNA, 19 nt, Human
ccuuauggaacacucugag

SEQ ID NO: 1926024 - RNA, 20 nt, Human
ccuuauggaacacucugaga

SEQ ID NO: 1926025 - RNA, 14 nt, Human
ccuuauggaacacu

SEQ ID NO: 1926026 - RNA, 16 nt, Human
ccuuauggaacacucu

SEQ ID NO: 1926027 - RNA, 17 nt, Human
ccuuauggaacacucug

SEQ ID NO: 1926028 - RNA, 18 nt, Human
ccuuauggaacacucuga

SEQ ID NO: 1926029 - RNA, 12 nt, Human
ccuucccaccuc

SEQ ID NO: 1926030 - RNA, 14 nt, Human
ccuucccaccucuc

SEQ ID NO: 1926031 - RNA, 19 nt, Human
ccuucccaccucucucacu

SEQ ID NO: 1926032 - RNA, 19 nt, Human
ccuguucagcuccagcuca

SEQ ID NO: 1926033 - RNA, 16 nt, Human
ccuguucagcuccagc

SEQ ID NO: 1926034 - RNA, 15 nt, Human
ccuguucagcuccag

SEQ ID NO: 1926035 - RNA, 14 nt, Human
ccuguucagcucca

SEQ ID NO: 1926036 - RNA, 21 nt, Human
ccuguucagcuccagcucacc

SEQ ID NO: 1926037 - RNA, 20 nt, Human
ccuguucagcuccagcucac

SEQ ID NO: 1926038 - RNA, 23 nt, Human
ccuguucagcuccagcucaccag

SEQ ID NO: 1926039 - RNA, 17 nt, Human
ccuguugacacaggucu

SEQ ID NO: 1926040 - RNA, 19 nt, Human
ccuguugacacaggucuuu

SEQ ID NO: 1926041 - RNA, 22 nt, Human
ccuguugacacaggucuuuccu

SEQ ID NO: 1926042 - RNA, 13 nt, Human
ccuguucugaacu

SEQ ID NO: 1926043 - RNA, 14 nt, Human
ccuguucugaacug

SEQ ID NO: 1926044 - RNA, 21 nt, Human
ccuguucugaacuguggggug

SEQ ID NO: 1926045 - RNA, 12 nt, Human
ccuguucuggca

SEQ ID NO: 1926046 - RNA, 17 nt, Human
ccuguucuggcagaguu

SEQ ID NO: 1926047 - RNA, 13 nt, Human
ccuguuccccaga

SEQ ID NO: 1926048 - RNA, 18 nt, Human
ccuguucccaugagauga

SEQ ID NO: 1926049 - RNA, 15 nt, Human
ccuguuccccagaga

SEQ ID NO: 1926050 - RNA, 16 nt, Human
ccuguuccccagagaa

SEQ ID NO: 1926051 - RNA, 23 nt, Human
ccuguuccccagagaaaggggag

SEQ ID NO: 1926052 - RNA, 16 nt, Human
ccuguugggccaggag

SEQ ID NO: 1926053 - RNA, 17 nt, Human
ccuguugggccaggagc

SEQ ID NO: 1926054 - RNA, 18 nt, Human
ccuguugggccaggagcc

SEQ ID NO: 1926055 - RNA, 19 nt, Human
ccuguugggccaggagccu

SEQ ID NO: 1926056 - RNA, 20 nt, Human
ccuguugggccaggagccuc

SEQ ID NO: 1926057 - RNA, 20 nt, Human
ccuuagcagggaaacagcua

SEQ ID NO: 1926058 - RNA, 19 nt, Human
ccuuagcagggaaacagcu

SEQ ID NO: 1926059 - RNA, 16 nt, Human
ccuuagcaaauucugu

SEQ ID NO: 1926060 - RNA, 13 nt, Human
ccuguucagcucc

SEQ ID NO: 1926061 - RNA, 15 nt, Human
ccuguuagcagacag

SEQ ID NO: 1926062 - RNA, 16 nt, Human
ccuguuagcagacagg

SEQ ID NO: 1926063 - RNA, 21 nt, Human
ccuucuguccuacucuguguc

SEQ ID NO: 1926064 - RNA, 20 nt, Human
ccuucuguccuacucugugu

SEQ ID NO: 1926065 - RNA, 17 nt, Human
ccuucucuucacaguca

SEQ ID NO: 1926066 - RNA, 22 nt, Human
ccuucuguccuacucuguguca

SEQ ID NO: 1926067 - RNA, 16 nt, Human
ccuucucugaaggaca

SEQ ID NO: 1926068 - RNA, 14 nt, Human
ccuucucugaagga

SEQ ID NO: 1926069 - RNA, 21 nt, Human
ccuucucuccagccccuggau

SEQ ID NO: 1926070 - RNA, 23 nt, Human
ccuucucuccagccccuggaugc

SEQ ID NO: 1926071 - RNA, 20 nt, Human
ccuucucuccagccccugga

SEQ ID NO: 1926072 - RNA, 24 nt, Human
ccuucccucaccuuggcaccagac

SEQ ID NO: 1926073 - RNA, 18 nt, Human
ccuucccugucugccagg

SEQ ID NO: 1926074 - RNA, 23 nt, Human
ccuucccucaccuuggcaccaga

SEQ ID NO: 1926075 - RNA, 15 nt, Human
ccuuucaauaggaaa

SEQ ID NO: 1926076 - RNA, 16 nt, Human
ccuuucaaagccauuu

SEQ ID NO: 1926077 - RNA, 23 nt, Human
ccuuuauuacccccuccuucaga

SEQ ID NO: 1926078 - RNA, 18 nt, Human
ccuuucaauaggaaaaac

SEQ ID NO: 1926079 - RNA, 17 nt, Human
ccuuucaauaggaaaaa

SEQ ID NO: 1926080 - RNA, 12 nt, Human
ccuugccagaga

SEQ ID NO: 1926081 - RNA, 13 nt, Human
ccuugccagagau

SEQ ID NO: 1926082 - RNA, 16 nt, Human
ccuugccagagaucca

SEQ ID NO: 1926083 - RNA, 14 nt, Human
ccuugcauaauggu

SEQ ID NO: 1926084 - RNA, 19 nt, Human
cucaauguuacuaucugcu

SEQ ID NO: 1926085 - RNA, 23 nt, Human
cucaauuauuuugcauuuuuucu

SEQ ID NO: 1926086 - RNA, 22 nt, Human
cucaauauuuuccaugaaaaug

SEQ ID NO: 1926087 - RNA, 21 nt, Human
cucaagugauucuccugccuc

SEQ ID NO: 1926088 - RNA, 20 nt, Human
cuauguuuacaaauggacau

SEQ ID NO: 1926089 - RNA, 19 nt, Human
cucaauauuuuccaugaaa

SEQ ID NO: 1926090 - RNA, 18 nt, Human
cucaauauuuuccaugaa

SEQ ID NO: 1926091 - RNA, 14 nt, Human
cuauguugcccagg

SEQ ID NO: 1926092 - RNA, 18 nt, Human
cuauguucuaagaaguga

SEQ ID NO: 1926093 - RNA, 17 nt, Human
cuaugugagcacaaagg

SEQ ID NO: 1926094 - RNA, 22 nt, Human
cuauguugcccaggcaggucuu

SEQ ID NO: 1926095 - RNA, 21 nt, Human
cuauguugcccaggcaggucu

SEQ ID NO: 1926096 - RNA, 19 nt, Human
cuauguugcccaggcaggu

SEQ ID NO: 1926097 - RNA, 18 nt, Human
cuauguugcccaggcagg

SEQ ID NO: 1926098 - RNA, 14 nt, Human
cuaugugagaccau

SEQ ID NO: 1926099 - RNA, 13 nt, Human
cuaugucuuguuu

SEQ ID NO: 1926100 - RNA, 13 nt, Human
cuaucucccccag

SEQ ID NO: 1926101 - RNA, 14 nt, Human
cuaucucccccagc

SEQ ID NO: 1926102 - RNA, 16 nt, Human
cuaucaccuauuucca

SEQ ID NO: 1926103 - RNA, 17 nt, Human
cuaucaccuauuuccau

SEQ ID NO: 1926104 - RNA, 20 nt, Human
cuacaaacaaaauuucuauu

SEQ ID NO: 1926105 - RNA, 17 nt, Human
cuacaaacaaaauuucu

SEQ ID NO: 1926106 - RNA, 15 nt, Human
cuacaaacaaaauuu

SEQ ID NO: 1926107 - RNA, 13 nt, Human
cuacaaacaaaau

SEQ ID NO: 1926108 - RNA, 16 nt, Human
cuacaaaaauuaacug

SEQ ID NO: 1926109 - RNA, 23 nt, Human
cucagaagacacugaugggcaac

SEQ ID NO: 1926110 - RNA, 16 nt, Human
cucagaccagcucuuc

SEQ ID NO: 1926111 - RNA, 14 nt, Human
cucagaccagcucu

SEQ ID NO: 1926112 - RNA, 15 nt, Human
cucagaccagcucuu

SEQ ID NO: 1926113 - RNA, 22 nt, Human
cucagccucccgaauagcuggg

SEQ ID NO: 1926114 - RNA, 21 nt, Human
cucagccucccgaauagcugg

SEQ ID NO: 1926115 - RNA, 19 nt, Human
cucagccucccgaauagcu

SEQ ID NO: 1926116 - RNA, 22 nt, Human
cucagaagacacugaugggcaa

SEQ ID NO: 1926117 - RNA, 20 nt, Human
cucagaagacacugaugggc

SEQ ID NO: 1926118 - RNA, 17 nt, Human
cucagaagacacugaug

SEQ ID NO: 1926119 - RNA, 15 nt, Human
cucagaagacacuga

SEQ ID NO: 1926120 - RNA, 13 nt, Human
cucagaagacacu

SEQ ID NO: 1926121 - RNA, 17 nt, Human
cucaccuuucccaucuu

SEQ ID NO: 1926122 - RNA, 22 nt, Human
cucaggccugggggcugggcag

SEQ ID NO: 1926123 - RNA, 11 nt, Human
cucaggccugg

SEQ ID NO: 1926124 - RNA, 20 nt, Human
cucaggccugacucucagca

SEQ ID NO: 1926125 - RNA, 13 nt, Human
cucaggccucugu

SEQ ID NO: 1926126 - RNA, 18 nt, Human
cucaggccucugugccgc

SEQ ID NO: 1926127 - RNA, 16 nt, Human
cucaggccagcugcuu

SEQ ID NO: 1926128 - RNA, 17 nt, Human
cucaggccagcugcuug

SEQ ID NO: 1926129 - RNA, 18 nt, Human
cucaggccagcugcuugg

SEQ ID NO: 1926130 - RNA, 23 nt, Human
cucaggccgaaggaggagucagg

SEQ ID NO: 1926131 - RNA, 21 nt, Human
cucaggccaaacucaccugcc

SEQ ID NO: 1926132 - RNA, 20 nt, Human
cucaggccaagaaacgucuu

SEQ ID NO: 1926133 - RNA, 19 nt, Human
cucaggccaaacucaccug

SEQ ID NO: 1926134 - RNA, 20 nt, Human
cucaggccaaacucaccugc

SEQ ID NO: 1926135 - RNA, 13 nt, Human
cucagccuggcca

SEQ ID NO: 1926136 - RNA, 14 nt, Human
cucagccuggccag

SEQ ID NO: 1926137 - RNA, 15 nt, Human
cucagccuggccaga

SEQ ID NO: 1926138 - RNA, 16 nt, Human
cucagccuggccagac

SEQ ID NO: 1926139 - RNA, 17 nt, Human
cucagccuggccagaca

SEQ ID NO: 1926140 - RNA, 19 nt, Human
cucagccuggccagacaca

SEQ ID NO: 1926141 - RNA, 20 nt, Human
cucagccuggccagacacag

SEQ ID NO: 1926142 - RNA, 23 nt, Human
cucagggaaaagcagcucucccc

SEQ ID NO: 1926143 - RNA, 17 nt, Human
cucagggaaaagcagcu

SEQ ID NO: 1926144 - RNA, 20 nt, Human
cucagggaaaagcagcucuc

SEQ ID NO: 1926145 - RNA, 22 nt, Human
cucagggaaaagcagcucuccc

SEQ ID NO: 1926146 - RNA, 17 nt, Human
cucaguccauagcagag

SEQ ID NO: 1926147 - RNA, 15 nt, Human
cucaguccauagcag

SEQ ID NO: 1926148 - RNA, 13 nt, Human
cucagucauaauc

SEQ ID NO: 1926149 - RNA, 16 nt, Human
cucaguccaugaagau

SEQ ID NO: 1926150 - RNA, 20 nt, Human
cucagucuggcccuuccuuu

SEQ ID NO: 1926151 - RNA, 22 nt, Human
cucagucuggcccuuccuuuuc

SEQ ID NO: 1926152 - RNA, 23 nt, Human
cucaugauagaaggcuaugggga

SEQ ID NO: 1926153 - RNA, 23 nt, Human
cucaggugucccugcacuugcag

SEQ ID NO: 1926154 - RNA, 14 nt, Human
cucugcacaugucu

SEQ ID NO: 1926155 - RNA, 13 nt, Human
cucugcacauguc

SEQ ID NO: 1926156 - RNA, 15 nt, Human
cucugcacuccccug

SEQ ID NO: 1926157 - RNA, 16 nt, Human
cucugcacuccccugc

SEQ ID NO: 1926158 - RNA, 20 nt, Human
cucugcacaagcugcacccu

SEQ ID NO: 1926159 - RNA, 21 nt, Human
cucugcacaagcugcacccuc

SEQ ID NO: 1926160 - RNA, 13 nt, Human
cucugcagggccg

SEQ ID NO: 1926161 - RNA, 19 nt, Human
cucugcagggccgccaggg

SEQ ID NO: 1926162 - RNA, 13 nt, Human
cucugcagguccc

SEQ ID NO: 1926163 - RNA, 21 nt, Human
cucugcuccucuccccagcaa

SEQ ID NO: 1926164 - RNA, 17 nt, Human
cucugcacuccccugcu

SEQ ID NO: 1926165 - RNA, 20 nt, Human
cucugcaggaaauggcugug

SEQ ID NO: 1926166 - RNA, 23 nt, Human
cucugcugacagacacaggcccg

SEQ ID NO: 1926167 - RNA, 13 nt, Human
cucugcugcuggc

SEQ ID NO: 1926168 - RNA, 20 nt, Human
cucugcugacagacacaggc

SEQ ID NO: 1926169 - RNA, 22 nt, Human
cucugcugacagacacaggccc

SEQ ID NO: 1926170 - RNA, 21 nt, Human
cucugcugacagacacaggcc

SEQ ID NO: 1926171 - RNA, 13 nt, Human
cucuguccuggga

SEQ ID NO: 1926172 - RNA, 23 nt, Human
cucuguccccuucucucaucucu

SEQ ID NO: 1926173 - RNA, 19 nt, Human
cucuuaggaagagaaacca

SEQ ID NO: 1926174 - RNA, 16 nt, Human
cucuuauagaauauuu

SEQ ID NO: 1926175 - RNA, 17 nt, Human
cucuuauagaauauuua

SEQ ID NO: 1926176 - RNA, 18 nt, Human
cucuuauagaauauuuau

SEQ ID NO: 1926177 - RNA, 20 nt, Human
cucuuauagaauauuuauua

SEQ ID NO: 1926178 - RNA, 21 nt, Human
cucuuauagaauauuuauuac

SEQ ID NO: 1926179 - RNA, 16 nt, Human
cucuguacagagccca

SEQ ID NO: 1926180 - RNA, 21 nt, Human
cucuguccccuucucucaucu

SEQ ID NO: 1926181 - RNA, 18 nt, Human
cucuguccccuucucuca

SEQ ID NO: 1926182 - RNA, 17 nt, Human
cucuguccccuucucuc

SEQ ID NO: 1926183 - RNA, 15 nt, Human
cucuguccccuucuc

SEQ ID NO: 1926184 - RNA, 14 nt, Human
cucuguccccuucu

SEQ ID NO: 1926185 - RNA, 16 nt, Human
cucugcugcuggcugg

SEQ ID NO: 1926186 - RNA, 14 nt, Human
cucugcugcuggcu

SEQ ID NO: 1926187 - RNA, 15 nt, Human
cucugcugcuggcug

SEQ ID NO: 1926188 - RNA, 14 nt, Human
cucuguacagagcc

SEQ ID NO: 1926189 - RNA, 15 nt, Human
cucuguacagagccc

SEQ ID NO: 1926190 - RNA, 13 nt, Human
cucuguacagagc

SEQ ID NO: 1926191 - RNA, 19 nt, Human
cucuauguucuaagaagug

SEQ ID NO: 1926192 - RNA, 16 nt, Human
cucucccccacccccu

SEQ ID NO: 1926193 - RNA, 13 nt, Human
cucucccccaccc

SEQ ID NO: 1926194 - RNA, 21 nt, Human
cucuccccucagagugcaagc

SEQ ID NO: 1926195 - RNA, 13 nt, Human
cucuccuccagag

SEQ ID NO: 1926196 - RNA, 15 nt, Human
cucuccuccagaguc

SEQ ID NO: 1926197 - RNA, 12 nt, Human
cucuccuccaga

SEQ ID NO: 1926198 - RNA, 12 nt, Human
cucucccugacc

SEQ ID NO: 1926199 - RNA, 13 nt, Human
cucucccugaccc

SEQ ID NO: 1926200 - RNA, 14 nt, Human
cucucccugacccu

SEQ ID NO: 1926201 - RNA, 20 nt, Human
cucucccugacccuguauau

SEQ ID NO: 1926202 - RNA, 16 nt, Human
cucuccuccagaguca

SEQ ID NO: 1926203 - RNA, 13 nt, Human
cucucuggccuuc

SEQ ID NO: 1926204 - RNA, 16 nt, Human
cucucuggccuucggc

SEQ ID NO: 1926205 - RNA, 14 nt, Human
cucucuggccuucg

SEQ ID NO: 1926206 - RNA, 18 nt, Human
cucucuuauagaauauuu

SEQ ID NO: 1926207 - RNA, 19 nt, Human
cucucuuauagaauauuua

SEQ ID NO: 1926208 - RNA, 21 nt, Human
cucucuuauagaauauuuauu

SEQ ID NO: 1926209 - RNA, 23 nt, Human
cucucuuauagaauauuuauuac

SEQ ID NO: 1926210 - RNA, 17 nt, Human
cucgguguggagaagcg

SEQ ID NO: 1926211 - RNA, 23 nt, Human
cucgguguggagaagcggcuggc

SEQ ID NO: 1926212 - RNA, 16 nt, Human
cucgguguggagaagc

SEQ ID NO: 1926213 - RNA, 13 nt, Human
cuccuuuguacuu

SEQ ID NO: 1926214 - RNA, 14 nt, Human
cuccuuuguacuuu

SEQ ID NO: 1926215 - RNA, 17 nt, Human
cuccuuuguacuuugug

SEQ ID NO: 1926216 - RNA, 20 nt, Human
cuccuuuguacuuugugcuu

SEQ ID NO: 1926217 - RNA, 17 nt, Human
cuccuuugugaggaagc

SEQ ID NO: 1926218 - RNA, 18 nt, Human
cuccuuugugaggaagcc

SEQ ID NO: 1926219 - RNA, 12 nt, Human
cucccaggacac

SEQ ID NO: 1926220 - RNA, 11 nt, Human
cucccaggaca

SEQ ID NO: 1926221 - RNA, 18 nt, Human
cucccccccaugcacugu

SEQ ID NO: 1926222 - RNA, 20 nt, Human
cucccccccaugcacuguga

SEQ ID NO: 1926223 - RNA, 21 nt, Human
cucccccccaugcacugugaa

SEQ ID NO: 1926224 - RNA, 16 nt, Human
cucccccuagccauuu

SEQ ID NO: 1926225 - RNA, 19 nt, Human
cucccucuacugggagccu

SEQ ID NO: 1926226 - RNA, 13 nt, Human
cucccucuacugg

SEQ ID NO: 1926227 - RNA, 18 nt, Human
cucccugaagccuuugca

SEQ ID NO: 1926228 - RNA, 20 nt, Human
cucccucuuucccucccuuc

SEQ ID NO: 1926229 - RNA, 14 nt, Human
cucccucuauuuau

SEQ ID NO: 1926230 - RNA, 20 nt, Human
cucccucuacugggagccua

SEQ ID NO: 1926231 - RNA, 22 nt, Human
cuccaggcuguaucccaugagc

SEQ ID NO: 1926232 - RNA, 20 nt, Human
cuccaggcuguaucccauga

SEQ ID NO: 1926233 - RNA, 23 nt, Human
cuccaggcuccuuuagcgcccag

SEQ ID NO: 1926234 - RNA, 15 nt, Human
cuccaggcuccuuua

SEQ ID NO: 1926235 - RNA, 23 nt, Human
cuccaggugcacaagcuccaagc

SEQ ID NO: 1926236 - RNA, 23 nt, Human
cucccacugggguccagggagca

SEQ ID NO: 1926237 - RNA, 12 nt, Human
cuccuggcccag

SEQ ID NO: 1926238 - RNA, 19 nt, Human
cuccuggcccacugcaucg

SEQ ID NO: 1926239 - RNA, 14 nt, Human
cuccuggcccaggu

SEQ ID NO: 1926240 - RNA, 19 nt, Human
cuccuggccucaagugauu

SEQ ID NO: 1926241 - RNA, 18 nt, Human
cuccugggcuaagugauc

SEQ ID NO: 1926242 - RNA, 15 nt, Human
cuccucugcugcugg

SEQ ID NO: 1926243 - RNA, 13 nt, Human
cuccucugcugcu

SEQ ID NO: 1926244 - RNA, 14 nt, Human
cuccucugcugcug

SEQ ID NO: 1926245 - RNA, 16 nt, Human
cuccuguaccucuuga

SEQ ID NO: 1926246 - RNA, 15 nt, Human
cuccuuucaccacau

SEQ ID NO: 1926247 - RNA, 15 nt, Human
cuccuuguuccuaga

SEQ ID NO: 1926248 - RNA, 12 nt, Human
cuccuuguuccu

SEQ ID NO: 1926249 - RNA, 13 nt, Human
cuccuuguuccua

SEQ ID NO: 1926250 - RNA, 14 nt, Human
cuccuuguuccuag

SEQ ID NO: 1926251 - RNA, 14 nt, Human
cuccuuguguuacu

SEQ ID NO: 1926252 - RNA, 21 nt, Human
cuccggcccuccuacccugcg

SEQ ID NO: 1926253 - RNA, 23 nt, Human
cuccgcuuucuacccagcgagcc

SEQ ID NO: 1926254 - RNA, 15 nt, Human
cuccuacccugcgcc

SEQ ID NO: 1926255 - RNA, 18 nt, Human
cuccuacccugcgcccag

SEQ ID NO: 1926256 - RNA, 20 nt, Human
aaauuaucaagcuaauaaaa

SEQ ID NO: 1926257 - RNA, 19 nt, Human
aaauuaucaagcuaauaaa

SEQ ID NO: 1926258 - RNA, 18 nt, Human
aaauuaucaagcuaauaa

SEQ ID NO: 1926259 - RNA, 17 nt, Human
aaauuaucaagcuaaua

SEQ ID NO: 1926260 - RNA, 16 nt, Human
aaauuaucaagcuaau

SEQ ID NO: 1926261 - RNA, 15 nt, Human
aaauuaucaagcuaa

SEQ ID NO: 1926262 - RNA, 14 nt, Human
aaauuagaugaacu

SEQ ID NO: 1926263 - RNA, 12 nt, Human
aaauuagaaaau

SEQ ID NO: 1926264 - RNA, 11 nt, Human
aaauuagaaaa

SEQ ID NO: 1926265 - RNA, 20 nt, Human
aaauuagaaaauguuauuua

SEQ ID NO: 1926266 - RNA, 14 nt, Human
aaauucaugcugcu

SEQ ID NO: 1926267 - RNA, 22 nt, Human
guauuggcuagagguucaaaga

SEQ ID NO: 1926268 - RNA, 20 nt, Human
guauuuaauagguuuggaca

SEQ ID NO: 1926269 - RNA, 16 nt, Human
guauuuaauucauguu

SEQ ID NO: 1926270 - RNA, 23 nt, Human
aaauuaacuuuuauaaacuuuac

SEQ ID NO: 1926271 - RNA, 22 nt, Human
aaauuaacuuuuauaaacuuua

SEQ ID NO: 1926272 - RNA, 20 nt, Human
aaauuacucaggaagaacac

SEQ ID NO: 1926273 - RNA, 14 nt, Human
aaauuacucuuucu

SEQ ID NO: 1926274 - RNA, 15 nt, Human
aaauuacucuuucuc

SEQ ID NO: 1926275 - RNA, 19 nt, Human
aaauuaacuuuuauaaacu

SEQ ID NO: 1926276 - RNA, 15 nt, Human
aaauguuauuuaaca

SEQ ID NO: 1926277 - RNA, 21 nt, Human
aaauuaacuuuuauaaacuuu

SEQ ID NO: 1926278 - RNA, 18 nt, Human
aaauuucagcagcugcag

SEQ ID NO: 1926279 - RNA, 17 nt, Human
aaauuucagcagcugca

SEQ ID NO: 1926280 - RNA, 20 nt, Human
aaauuuaguauuuuguuuca

SEQ ID NO: 1926281 - RNA, 14 nt, Human
aaauuccucuuugc

SEQ ID NO: 1926282 - RNA, 18 nt, Human
aaauuccucuuugcuuug

SEQ ID NO: 1926283 - RNA, 19 nt, Human
aaauuccucuuugcuuugc

SEQ ID NO: 1926284 - RNA, 20 nt, Human
aaauuccucuuugcuuugcu

SEQ ID NO: 1926285 - RNA, 14 nt, Human
aaauuuccacucag

SEQ ID NO: 1926286 - RNA, 22 nt, Human
aaauuuccacucaggucuguuu

SEQ ID NO: 1926287 - RNA, 15 nt, Human
guauuuuuuuacuaa

SEQ ID NO: 1926288 - RNA, 14 nt, Human
guauuuuuuuacua

SEQ ID NO: 1926289 - RNA, 22 nt, Human
aaauuuccugggagcuuuugua

SEQ ID NO: 1926290 - RNA, 20 nt, Human
gucacacaguauuacuucug

SEQ ID NO: 1926291 - RNA, 16 nt, Human
gucacacacuuuggcu

SEQ ID NO: 1926292 - RNA, 19 nt, Human
gucaacucauauuuucaug

SEQ ID NO: 1926293 - RNA, 13 nt, Human
gucacacacugau

SEQ ID NO: 1926294 - RNA, 22 nt, Human
gucaaaugguaggcauuuccua

SEQ ID NO: 1926295 - RNA, 21 nt, Human
guauuuuuuuacuaauagaca

SEQ ID NO: 1926296 - RNA, 17 nt, Human
guauuuuuuuacuaaua

SEQ ID NO: 1926297 - RNA, 15 nt, Human
guauuuuuuaaagcu

SEQ ID NO: 1926298 - RNA, 20 nt, Human
gucaaaaaguuugguucugu

SEQ ID NO: 1926299 - RNA, 19 nt, Human
gucaaaguggugagaggca

SEQ ID NO: 1926300 - RNA, 18 nt, Human
gucaaaguggugagaggc

SEQ ID NO: 1926301 - RNA, 23 nt, Human
gucaaaaaguuugguucuguguc

SEQ ID NO: 1926302 - RNA, 17 nt, Human
guauaaaagccuguuua

SEQ ID NO: 1926303 - RNA, 20 nt, Human
aaauguaccuucagaauaag

SEQ ID NO: 1926304 - RNA, 16 nt, Human
aaaugggggugcauuu

SEQ ID NO: 1926305 - RNA, 15 nt, Human
aaaugggggugcauu

SEQ ID NO: 1926306 - RNA, 13 nt, Human
aaauggggccaga

SEQ ID NO: 1926307 - RNA, 16 nt, Human
aaauggggccagaucc

SEQ ID NO: 1926308 - RNA, 17 nt, Human
aaauggggccagaucca

SEQ ID NO: 1926309 - RNA, 21 nt, Human
aaauggggccagauccagccu

SEQ ID NO: 1926310 - RNA, 22 nt, Human
aaauggggccagauccagccug

SEQ ID NO: 1926311 - RNA, 18 nt, Human
aaaugggggugcauuuga

SEQ ID NO: 1926312 - RNA, 17 nt, Human
aaaugggggugcauuug

SEQ ID NO: 1926313 - RNA, 19 nt, Human
aaaugggggugcauuugag

SEQ ID NO: 1926314 - RNA, 22 nt, Human
guauauugauccagaaagaaaa

SEQ ID NO: 1926315 - RNA, 18 nt, Human
guauaaaagggacugaga

SEQ ID NO: 1926316 - RNA, 14 nt, Human
guauaaacaaaguu

SEQ ID NO: 1926317 - RNA, 18 nt, Human
guauaaaagccuguuuaa

SEQ ID NO: 1926318 - RNA, 21 nt, Human
guauaaaagccuguuuaagag

SEQ ID NO: 1926319 - RNA, 15 nt, Human
guauucuuauuuaau

SEQ ID NO: 1926320 - RNA, 13 nt, Human
guaugguggcugg

SEQ ID NO: 1926321 - RNA, 15 nt, Human
guaugggagagaaga

SEQ ID NO: 1926322 - RNA, 15 nt, Human
guauguggaagugug

SEQ ID NO: 1926323 - RNA, 17 nt, Human
guauguggaaguguggg

SEQ ID NO: 1926324 - RNA, 16 nt, Human
guauguggaagugugg

SEQ ID NO: 1926325 - RNA, 20 nt, Human
guaugugggggucugugugu

SEQ ID NO: 1926326 - RNA, 19 nt, Human
guaugugggggucugugug

SEQ ID NO: 1926327 - RNA, 21 nt, Human
guauguggaagugugggucug

SEQ ID NO: 1926328 - RNA, 18 nt, Human
guauguggaagugugggu

SEQ ID NO: 1926329 - RNA, 15 nt, Human
guaucccuacuguaa

SEQ ID NO: 1926330 - RNA, 22 nt, Human
guaugaucacggcucacugcag

SEQ ID NO: 1926331 - RNA, 21 nt, Human
guaucacucugugucugagug

SEQ ID NO: 1926332 - RNA, 19 nt, Human
guaucaauaccaaauagcu

SEQ ID NO: 1926333 - RNA, 17 nt, Human
guaucacugucuuuccu

SEQ ID NO: 1926334 - RNA, 18 nt, Human
guaucacugucuuuccua

SEQ ID NO: 1926335 - RNA, 20 nt, Human
guaucacugucuuuccuaga

SEQ ID NO: 1926336 - RNA, 14 nt, Human
guaugggagagaag

SEQ ID NO: 1926337 - RNA, 18 nt, Human
guauggagagaaaacaga

SEQ ID NO: 1926338 - RNA, 16 nt, Human
aaauccuuuacuguua

SEQ ID NO: 1926339 - RNA, 13 nt, Human
aaaucgaugcagu

SEQ ID NO: 1926340 - RNA, 15 nt, Human
aaaucccauuuaaaa

SEQ ID NO: 1926341 - RNA, 18 nt, Human
aaaucccuuaccucggug

SEQ ID NO: 1926342 - RNA, 17 nt, Human
aaaugaaaaucgugaca

SEQ ID NO: 1926343 - RNA, 19 nt, Human
aaaucucaaauuucuaaau

SEQ ID NO: 1926344 - RNA, 17 nt, Human
aaaucucaaauuucuaa

SEQ ID NO: 1926345 - RNA, 16 nt, Human
aaaucucaaauuucua

SEQ ID NO: 1926346 - RNA, 15 nt, Human
aaaucucaaauuucu

SEQ ID NO: 1926347 - RNA, 19 nt, Human
aaaucuacacuccagugag

SEQ ID NO: 1926348 - RNA, 14 nt, Human
aaaucuacaguaca

SEQ ID NO: 1926349 - RNA, 22 nt, Human
aaaucggaucuggggcucuggg

SEQ ID NO: 1926350 - RNA, 23 nt, Human
aaaucggaucuggggcucuggga

SEQ ID NO: 1926351 - RNA, 16 nt, Human
aaaucuaggaaaauau

SEQ ID NO: 1926352 - RNA, 20 nt, Human
aaaucuaggaaaauauuuug

SEQ ID NO: 1926353 - RNA, 18 nt, Human
aaaucuaggaaaauauuu

SEQ ID NO: 1926354 - RNA, 16 nt, Human
aaaucuaugauuccag

SEQ ID NO: 1926355 - RNA, 14 nt, Human
aaaucuaugauucc

SEQ ID NO: 1926356 - RNA, 14 nt, Human
aaaucuauauuuug

SEQ ID NO: 1926357 - RNA, 18 nt, Human
guaggacccaagcagaga

SEQ ID NO: 1926358 - RNA, 15 nt, Human
guaggacuguagaaa

SEQ ID NO: 1926359 - RNA, 18 nt, Human
guaggaagguuaauguuc

SEQ ID NO: 1926360 - RNA, 15 nt, Human
guaggaagacuuugg

SEQ ID NO: 1926361 - RNA, 16 nt, Human
guaggaacugcugggc

SEQ ID NO: 1926362 - RNA, 14 nt, Human
guaggagcugccuu

SEQ ID NO: 1926363 - RNA, 22 nt, Human
guaggagcugccuuggcucaga

SEQ ID NO: 1926364 - RNA, 23 nt, Human
guaggagcugccuuggcucagac

SEQ ID NO: 1926365 - RNA, 13 nt, Human
guaggauuacuag

SEQ ID NO: 1926366 - RNA, 14 nt, Human
guaggcauuuccua

SEQ ID NO: 1926367 - RNA, 21 nt, Human
guagcugggacuacaggcacc

SEQ ID NO: 1926368 - RNA, 19 nt, Human
guagcugggacuacaggca

SEQ ID NO: 1926369 - RNA, 18 nt, Human
guagcugggacuacaggc

SEQ ID NO: 1926370 - RNA, 12 nt, Human
guagcugggacu

SEQ ID NO: 1926371 - RNA, 17 nt, Human
guagcuggauuacaggc

SEQ ID NO: 1926372 - RNA, 17 nt, Human
aaaggagagcuagcagc

SEQ ID NO: 1926373 - RNA, 16 nt, Human
aaaggagucaaaacua

SEQ ID NO: 1926374 - RNA, 17 nt, Human
guagcugcaaaggacag

SEQ ID NO: 1926375 - RNA, 19 nt, Human
aaaggaucuuuguggccaa

SEQ ID NO: 1926376 - RNA, 18 nt, Human
aaaggaucuuuguggcca

SEQ ID NO: 1926377 - RNA, 14 nt, Human
aaaugcauuucuaa

SEQ ID NO: 1926378 - RNA, 13 nt, Human
aaaugcccagccc

SEQ ID NO: 1926379 - RNA, 14 nt, Human
aaaugcccagcccc

SEQ ID NO: 1926380 - RNA, 15 nt, Human
aaaugcccagccccu

SEQ ID NO: 1926381 - RNA, 18 nt, Human
aaaugcccagccccuucu

SEQ ID NO: 1926382 - RNA, 13 nt, Human
aaaugcccagcuu

SEQ ID NO: 1926383 - RNA, 15 nt, Human
aaaugggcagagcag

SEQ ID NO: 1926384 - RNA, 16 nt, Human
aaaugggacuuaacuc

SEQ ID NO: 1926385 - RNA, 18 nt, Human
aaaugggcagagcagaga

SEQ ID NO: 1926386 - RNA, 20 nt, Human
aaaugggcagagcagagacc

SEQ ID NO: 1926387 - RNA, 14 nt, Human
aaaugcaccuggaa

SEQ ID NO: 1926388 - RNA, 16 nt, Human
aaaugcaacaacaugu

SEQ ID NO: 1926389 - RNA, 15 nt, Human
aaaugcaaaaaucuc

SEQ ID NO: 1926390 - RNA, 16 nt, Human
aaaugcaaaaaucucu

SEQ ID NO: 1926391 - RNA, 16 nt, Human
aaaugaucuuuucaag

SEQ ID NO: 1926392 - RNA, 18 nt, Human
aaaugauguguacccaaa

SEQ ID NO: 1926393 - RNA, 22 nt, Human
aaaugcaccuggaauauauaac

SEQ ID NO: 1926394 - RNA, 18 nt, Human
aaaugcaccuggaauaua

SEQ ID NO: 1926395 - RNA, 20 nt, Human
aaaugcacccaacuagcucu

SEQ ID NO: 1926396 - RNA, 13 nt, Human
aaaugcauguugc

SEQ ID NO: 1926397 - RNA, 20 nt, Human
aaaugcaugauuuuguaacc

SEQ ID NO: 1926398 - RNA, 21 nt, Human
aaaugcaugauuuuguaaccc

SEQ ID NO: 1926399 - RNA, 14 nt, Human
aaaugcaugauuuu

SEQ ID NO: 1926400 - RNA, 18 nt, Human
aaaugcaugauuuuguaa

SEQ ID NO: 1926401 - RNA, 14 nt, Human
aaaugaaagugaga

SEQ ID NO: 1926402 - RNA, 22 nt, Human
aaaugaaagcagggacuugaac

SEQ ID NO: 1926403 - RNA, 21 nt, Human
aaaugaaagcagggacuugaa

SEQ ID NO: 1926404 - RNA, 23 nt, Human
aaaugaacgauauguagcagaaa

SEQ ID NO: 1926405 - RNA, 22 nt, Human
aaaugaacgauauguagcagaa

SEQ ID NO: 1926406 - RNA, 19 nt, Human
aaaugaacgauauguagca

SEQ ID NO: 1926407 - RNA, 11 nt, Human
aaaugagaaau

SEQ ID NO: 1926408 - RNA, 19 nt, Human
aaaugaggucagagccugc

SEQ ID NO: 1926409 - RNA, 17 nt, Human
aaaugaggucagagccu

SEQ ID NO: 1926410 - RNA, 16 nt, Human
aaaugagguacucucc

SEQ ID NO: 1926411 - RNA, 23 nt, Human
aaaugagguacucuccuggaaau

SEQ ID NO: 1926412 - RNA, 23 nt, Human
aaaugauccccagcuguuuaugc

SEQ ID NO: 1926413 - RNA, 21 nt, Human
aaaugaguuaccuacauuuua

SEQ ID NO: 1926414 - RNA, 9 nt, Human
aaaugaggg

SEQ ID NO: 1926415 - RNA, 13 nt, Human
aaaugagaaaucu

SEQ ID NO: 1926416 - RNA, 14 nt, Human
aaaugagaaaucua

SEQ ID NO: 1926417 - RNA, 16 nt, Human
aaaugagaaaucuaaa

SEQ ID NO: 1926418 - RNA, 13 nt, Human
aaaugagccuggc

SEQ ID NO: 1926419 - RNA, 19 nt, Human
aaaugagccuggcaagaau

SEQ ID NO: 1926420 - RNA, 13 nt, Human
aaaugagccauga

SEQ ID NO: 1926421 - RNA, 17 nt, Human
aacccagucacugugag

SEQ ID NO: 1926422 - RNA, 17 nt, Human
aacccagcucuggucca

SEQ ID NO: 1926423 - RNA, 20 nt, Human
aacccauauuuguacaccaa

SEQ ID NO: 1926424 - RNA, 21 nt, Human
aacccauauuguaaaacaggu

SEQ ID NO: 1926425 - RNA, 17 nt, Human
aacccauauuguaaaac

SEQ ID NO: 1926426 - RNA, 13 nt, Human
aacccaaauguuc

SEQ ID NO: 1926427 - RNA, 16 nt, Human
aaccauggugcuuguu

SEQ ID NO: 1926428 - RNA, 13 nt, Human
aacccagcucugg

SEQ ID NO: 1926429 - RNA, 14 nt, Human
aacccagcucuggu

SEQ ID NO: 1926430 - RNA, 11 nt, Human
aacccagcucu

SEQ ID NO: 1926431 - RNA, 18 nt, Human
aacccaaauguucaucaa

SEQ ID NO: 1926432 - RNA, 15 nt, Human
aacccccagccugcu

SEQ ID NO: 1926433 - RNA, 14 nt, Human
aacccccagccugc

SEQ ID NO: 1926434 - RNA, 13 nt, Human
aacccccagccug

SEQ ID NO: 1926435 - RNA, 20 nt, Human
aacccccacuggacugaccu

SEQ ID NO: 1926436 - RNA, 15 nt, Human
aaccuauuuugaagu

SEQ ID NO: 1926437 - RNA, 15 nt, Human
aaccuauuucucuuu

SEQ ID NO: 1926438 - RNA, 18 nt, Human
aaccuauuucucuuucuu

SEQ ID NO: 1926439 - RNA, 12 nt, Human
aaccuauuucuc

SEQ ID NO: 1926440 - RNA, 14 nt, Human
aaccuccugggcua

SEQ ID NO: 1926441 - RNA, 17 nt, Human
aaccuccgccucuuggg

SEQ ID NO: 1926442 - RNA, 16 nt, Human
aaccucagccuggcca

SEQ ID NO: 1926443 - RNA, 13 nt, Human
aaccucagccugg

SEQ ID NO: 1926444 - RNA, 14 nt, Human
aaccucagccuggc

SEQ ID NO: 1926445 - RNA, 11 nt, Human
aaccucagccu

SEQ ID NO: 1926446 - RNA, 12 nt, Human
aaccucagccug

SEQ ID NO: 1926447 - RNA, 18 nt, Human
aaccacaucuugcucugc

SEQ ID NO: 1926448 - RNA, 21 nt, Human
aaccacaccacaucuaagccu

SEQ ID NO: 1926449 - RNA, 23 nt, Human
aaccacaccacaucuaagccuga

SEQ ID NO: 1926450 - RNA, 13 nt, Human
aaccacaccacau

SEQ ID NO: 1926451 - RNA, 16 nt, Human
aaccaaucuacaaucu

SEQ ID NO: 1926452 - RNA, 19 nt, Human
aaccaaagcgaauuuuaaa

SEQ ID NO: 1926453 - RNA, 22 nt, Human
aaccacaucuugcucugcugac

SEQ ID NO: 1926454 - RNA, 20 nt, Human
aaccacaucuugcucugcug

SEQ ID NO: 1926455 - RNA, 19 nt, Human
aaccaucauugaaaucuuu

SEQ ID NO: 1926456 - RNA, 20 nt, Human
aaccaucauugaaaucuuuu

SEQ ID NO: 1926457 - RNA, 23 nt, Human
aaccaucauugaaaucuuuuugc

SEQ ID NO: 1926458 - RNA, 21 nt, Human
aaccaucauugaaaucuuuuu

SEQ ID NO: 1926459 - RNA, 13 nt, Human
aacauuuuuggua

SEQ ID NO: 1926460 - RNA, 13 nt, Human
gucuccuggcggu

SEQ ID NO: 1926461 - RNA, 15 nt, Human
guccuucucauucau

SEQ ID NO: 1926462 - RNA, 18 nt, Human
aaccucucacuucacccu

SEQ ID NO: 1926463 - RNA, 21 nt, Human
aaccucuccucauguucugcu

SEQ ID NO: 1926464 - RNA, 17 nt, Human
aaccucuucuggcucaa

SEQ ID NO: 1926465 - RNA, 14 nt, Human
gucuggcugcagag

SEQ ID NO: 1926466 - RNA, 13 nt, Human
gucuggcugcaga

SEQ ID NO: 1926467 - RNA, 12 nt, Human
gucuggcugcag

SEQ ID NO: 1926468 - RNA, 15 nt, Human
gucuuagauguauau

SEQ ID NO: 1926469 - RNA, 24 nt, Human
gucuuuucuugcaugaggcuagug

SEQ ID NO: 1926470 - RNA, 14 nt, Human
gucuuuucuugcau

SEQ ID NO: 1926471 - RNA, 19 nt, Human
gucuuuucuugcaugaggc

SEQ ID NO: 1926472 - RNA, 18 nt, Human
gucuuuggacccugaggc

SEQ ID NO: 1926473 - RNA, 17 nt, Human
gucuuucuuuuuggaca

SEQ ID NO: 1926474 - RNA, 17 nt, Human
gucuuuggacccugagg

SEQ ID NO: 1926475 - RNA, 14 nt, Human
gucuuuggacccug

SEQ ID NO: 1926476 - RNA, 15 nt, Human
gucuuuggacccuga

SEQ ID NO: 1926477 - RNA, 15 nt, Human
aacguggcugcuuca

SEQ ID NO: 1926478 - RNA, 22 nt, Human
aacguggcugcuucaaggaucc

SEQ ID NO: 1926479 - RNA, 15 nt, Human
aacuaaacucauuua

SEQ ID NO: 1926480 - RNA, 16 nt, Human
aacuaaacucauuuau

SEQ ID NO: 1926481 - RNA, 16 nt, Human
aacguggcugcuucaa

SEQ ID NO: 1926482 - RNA, 19 nt, Human
aacguggcugcuucaagga

SEQ ID NO: 1926483 - RNA, 17 nt, Human
aacuaaacucauuuaua

SEQ ID NO: 1926484 - RNA, 18 nt, Human
aacuaaacucauuuauaa

SEQ ID NO: 1926485 - RNA, 19 nt, Human
aacuacaaacaaaauuucu

SEQ ID NO: 1926486 - RNA, 15 nt, Human
aacuacaaacaaaau

SEQ ID NO: 1926487 - RNA, 19 nt, Human
aacuacagaaaaaccagag

SEQ ID NO: 1926488 - RNA, 13 nt, Human
aacuacaaaucaa

SEQ ID NO: 1926489 - RNA, 13 nt, Human
aacuacaugagaa

SEQ ID NO: 1926490 - RNA, 14 nt, Human
aacuagauggugcu

SEQ ID NO: 1926491 - RNA, 17 nt, Human
aacuagauggugcugag

SEQ ID NO: 1926492 - RNA, 20 nt, Human
aacuagauggugcugagaag

SEQ ID NO: 1926493 - RNA, 18 nt, Human
aacuagcuuggaaacugg

SEQ ID NO: 1926494 - RNA, 20 nt, Human
aacuagcucuauguuuacaa

SEQ ID NO: 1926495 - RNA, 19 nt, Human
gugaaccaccacacccagc

SEQ ID NO: 1926496 - RNA, 23 nt, Human
aacucuagcugggggugggccag

SEQ ID NO: 1926497 - RNA, 12 nt, Human
aacucuagcugg

SEQ ID NO: 1926498 - RNA, 19 nt, Human
aacucuagcuggggguggg

SEQ ID NO: 1926499 - RNA, 14 nt, Human
aacucccuuucaac

SEQ ID NO: 1926500 - RNA, 13 nt, Human
aacucccuuucaa

SEQ ID NO: 1926501 - RNA, 22 nt, Human
gucauuugcugagcauguacug

SEQ ID NO: 1926502 - RNA, 21 nt, Human
gucauuugcugagcauguacu

SEQ ID NO: 1926503 - RNA, 22 nt, Human
gucauuugagcagggcucagcg

SEQ ID NO: 1926504 - RNA, 21 nt, Human
gucauuugagcagggcucagc

SEQ ID NO: 1926505 - RNA, 21 nt, Human
aacacuguucucugcccucca

SEQ ID NO: 1926506 - RNA, 12 nt, Human
guccaauguggc

SEQ ID NO: 1926507 - RNA, 22 nt, Human
guccauuuggcagggguggcug

SEQ ID NO: 1926508 - RNA, 15 nt, Human
guccaagcugggaga

SEQ ID NO: 1926509 - RNA, 15 nt, Human
aacacuguucucugc

SEQ ID NO: 1926510 - RNA, 20 nt, Human
aacacuguucucugcccucc

SEQ ID NO: 1926511 - RNA, 16 nt, Human
aacacugucuugaaga

SEQ ID NO: 1926512 - RNA, 14 nt, Human
aacacugcuugugu

SEQ ID NO: 1926513 - RNA, 23 nt, Human
aacacugauuuccccuuuugcau

SEQ ID NO: 1926514 - RNA, 17 nt, Human
aacacugcuuguguuuu

SEQ ID NO: 1926515 - RNA, 16 nt, Human
aacacucuuuugcuuu

SEQ ID NO: 1926516 - RNA, 19 nt, Human
aacacucuuuugcuuuauu

SEQ ID NO: 1926517 - RNA, 14 nt, Human
aacacugauuuccc

SEQ ID NO: 1926518 - RNA, 15 nt, Human
aacacugauuucccc

SEQ ID NO: 1926519 - RNA, 22 nt, Human
aacacugauuuccccuuuugca

SEQ ID NO: 1926520 - RNA, 14 nt, Human
aacacucugagacu

SEQ ID NO: 1926521 - RNA, 12 nt, Human
aacacucuuuug

SEQ ID NO: 1926522 - RNA, 12 nt, Human
aacacucugaga

SEQ ID NO: 1926523 - RNA, 13 nt, Human
aacacucugagac

SEQ ID NO: 1926524 - RNA, 12 nt, Human
aacacuccuuca

SEQ ID NO: 1926525 - RNA, 11 nt, Human
aacacucugag

SEQ ID NO: 1926526 - RNA, 21 nt, Human
aacacucauugaccugaggcc

SEQ ID NO: 1926527 - RNA, 21 nt, Human
aacaagccuccuuuuaaagua

SEQ ID NO: 1926528 - RNA, 20 nt, Human
aacaagaccacguuucuaaa

SEQ ID NO: 1926529 - RNA, 19 nt, Human
aacaagaccacguuucuaa

SEQ ID NO: 1926530 - RNA, 17 nt, Human
aacaagaccacguuucu

SEQ ID NO: 1926531 - RNA, 16 nt, Human
aacaagaccacguuuc

SEQ ID NO: 1926532 - RNA, 15 nt, Human
gucacaggcaggucc

SEQ ID NO: 1926533 - RNA, 13 nt, Human
gucacaggcaggu

SEQ ID NO: 1926534 - RNA, 16 nt, Human
gucacaggcaggucca

SEQ ID NO: 1926535 - RNA, 23 nt, Human
aaauuuuuaaucuuuaauuuuac

SEQ ID NO: 1926536 - RNA, 23 nt, Human
aacaauuuuaggaggaccagagc

SEQ ID NO: 1926537 - RNA, 20 nt, Human
aacaaugacuaauucuugca

SEQ ID NO: 1926538 - RNA, 21 nt, Human
aacaaugacuaauucuugcau

SEQ ID NO: 1926539 - RNA, 23 nt, Human
aacaaggcaaggcugucaauuac

SEQ ID NO: 1926540 - RNA, 15 nt, Human
aacaagucagucauu

SEQ ID NO: 1926541 - RNA, 18 nt, Human
aacaagucagucauucag

SEQ ID NO: 1926542 - RNA, 16 nt, Human
aacaauauugucugaa

SEQ ID NO: 1926543 - RNA, 18 nt, Human
aacaauaggcuguuccca

SEQ ID NO: 1926544 - RNA, 15 nt, Human
guccgaucuuugacu

SEQ ID NO: 1926545 - RNA, 13 nt, Human
guccgagcuuuga

SEQ ID NO: 1926546 - RNA, 19 nt, Human
gucccaaacagcugccucu

SEQ ID NO: 1926547 - RNA, 21 nt, Human
guccggucccugucccagugc

SEQ ID NO: 1926548 - RNA, 21 nt, Human
aacagaaauguacagcaagga

SEQ ID NO: 1926549 - RNA, 11 nt, Human
aacagaaaugu

SEQ ID NO: 1926550 - RNA, 10 nt, Human
aacagaaaug

SEQ ID NO: 1926551 - RNA, 18 nt, Human
aacagaccuaaugcuccu

SEQ ID NO: 1926552 - RNA, 22 nt, Human
aacaguagugauaguuguaccg

SEQ ID NO: 1926553 - RNA, 23 nt, Human
aacaggcugggcuucaguggcag

SEQ ID NO: 1926554 - RNA, 13 nt, Human
aacaggcugggcu

SEQ ID NO: 1926555 - RNA, 22 nt, Human
aacaggcugggcuucaguggca

SEQ ID NO: 1926556 - RNA, 19 nt, Human
aacagacuggaagcacagc

SEQ ID NO: 1926557 - RNA, 19 nt, Human
aacagacucgauucauauu

SEQ ID NO: 1926558 - RNA, 19 nt, Human
aacaguuguguuugaagca

SEQ ID NO: 1926559 - RNA, 17 nt, Human
aacauugcaauagaaau

SEQ ID NO: 1926560 - RNA, 20 nt, Human
aacauuuguucuauagcuuu

SEQ ID NO: 1926561 - RNA, 16 nt, Human
aacauugcaauagaaa

SEQ ID NO: 1926562 - RNA, 15 nt, Human
aacauugcaauagaa

SEQ ID NO: 1926563 - RNA, 14 nt, Human
aacauugcaauaga

SEQ ID NO: 1926564 - RNA, 14 nt, Human
aacauacucccauc

SEQ ID NO: 1926565 - RNA, 15 nt, Human
aacauacucccaucu

SEQ ID NO: 1926566 - RNA, 14 nt, Human
guccuuccaccucg

SEQ ID NO: 1926567 - RNA, 13 nt, Human
guccucugaauga

SEQ ID NO: 1926568 - RNA, 17 nt, Human
guccucugaaugaaccu

SEQ ID NO: 1926569 - RNA, 18 nt, Human
guccucugucagucacag

SEQ ID NO: 1926570 - RNA, 19 nt, Human
guccucugucagucacagc

SEQ ID NO: 1926571 - RNA, 20 nt, Human
guccucugucagucacagcc

SEQ ID NO: 1926572 - RNA, 23 nt, Human
guccucugucagucacagccacc

SEQ ID NO: 1926573 - RNA, 20 nt, Human
aagcuuauuaaugcuaaggg

SEQ ID NO: 1926574 - RNA, 18 nt, Human
aagcuuauuaaugcuaag

SEQ ID NO: 1926575 - RNA, 17 nt, Human
aagcuuauuaaugcuaa

SEQ ID NO: 1926576 - RNA, 16 nt, Human
aagcuuauuaaugcua

SEQ ID NO: 1926577 - RNA, 15 nt, Human
aagcuuauuaaugcu

SEQ ID NO: 1926578 - RNA, 14 nt, Human
aagcuuauuaaugc

SEQ ID NO: 1926579 - RNA, 19 nt, Human
aagcuuauuaaugcuaagg

SEQ ID NO: 1926580 - RNA, 15 nt, Human
aagcuuccaugauuc

SEQ ID NO: 1926581 - RNA, 20 nt, Human
aagcuuccaugauucuauuu

SEQ ID NO: 1926582 - RNA, 17 nt, Human
aagcuaucguaaaauua

SEQ ID NO: 1926583 - RNA, 22 nt, Human
aagcuauucaguaauaacucua

SEQ ID NO: 1926584 - RNA, 18 nt, Human
aagcuccucuccccagcc

SEQ ID NO: 1926585 - RNA, 21 nt, Human
aagcucuacugaggugcuaug

SEQ ID NO: 1926586 - RNA, 19 nt, Human
aagcuccucuccccagccc

SEQ ID NO: 1926587 - RNA, 20 nt, Human
aagcuccucuccccagccca

SEQ ID NO: 1926588 - RNA, 21 nt, Human
aagcuccucuccccagcccag

SEQ ID NO: 1926589 - RNA, 22 nt, Human
aagcuccucuccccagcccaga

SEQ ID NO: 1926590 - RNA, 23 nt, Human
aagcuccucuccccagcccagag

SEQ ID NO: 1926591 - RNA, 20 nt, Human
guuccauggccucuucagau

SEQ ID NO: 1926592 - RNA, 19 nt, Human
guucccaagcucagaggcg

SEQ ID NO: 1926593 - RNA, 21 nt, Human
guucccauccucuucuuuuag

SEQ ID NO: 1926594 - RNA, 17 nt, Human
guucccauguagccccc

SEQ ID NO: 1926595 - RNA, 16 nt, Human
aagcuuccaugauucu

SEQ ID NO: 1926596 - RNA, 15 nt, Human
aagcuuuaccagcug

SEQ ID NO: 1926597 - RNA, 20 nt, Human
guucccauuugcuccuuucu

SEQ ID NO: 1926598 - RNA, 16 nt, Human
guucccauuugcuccu

SEQ ID NO: 1926599 - RNA, 23 nt, Human
guucccauccucuucuuuuagca

SEQ ID NO: 1926600 - RNA, 18 nt, Human
guucccauguagcccccu

SEQ ID NO: 1926601 - RNA, 19 nt, Human
guucccauguagcccccug

SEQ ID NO: 1926602 - RNA, 13 nt, Human
guucucuccuucu

SEQ ID NO: 1926603 - RNA, 12 nt, Human
guucucuagaaa

SEQ ID NO: 1926604 - RNA, 14 nt, Human
guucucuagaaaga

SEQ ID NO: 1926605 - RNA, 15 nt, Human
guucucuagaaagaa

SEQ ID NO: 1926606 - RNA, 20 nt, Human
guucccuuugacgccauccc

SEQ ID NO: 1926607 - RNA, 21 nt, Human
guucccuuugacgccauccca

SEQ ID NO: 1926608 - RNA, 22 nt, Human
guucccuuugacgccaucccag

SEQ ID NO: 1926609 - RNA, 16 nt, Human
guucuacccaggugcu

SEQ ID NO: 1926610 - RNA, 22 nt, Human
guugaugaucuuugcagacagg

SEQ ID NO: 1926611 - RNA, 17 nt, Human
guucuuaguuugcaguu

SEQ ID NO: 1926612 - RNA, 19 nt, Human
guucuuaguugcuguaugu

SEQ ID NO: 1926613 - RNA, 21 nt, Human
guucuugguuuguaaauuaac

SEQ ID NO: 1926614 - RNA, 14 nt, Human
guucuucaucuaag

SEQ ID NO: 1926615 - RNA, 22 nt, Human
guucauauguaccauguacaug

SEQ ID NO: 1926616 - RNA, 15 nt, Human
aagccucgacacaga

SEQ ID NO: 1926617 - RNA, 21 nt, Human
aagccugaaggggcgucuguu

SEQ ID NO: 1926618 - RNA, 19 nt, Human
guucauauguaccauguac

SEQ ID NO: 1926619 - RNA, 19 nt, Human
aagccuccuccagccgcca

SEQ ID NO: 1926620 - RNA, 17 nt, Human
aagccugggauugacag

SEQ ID NO: 1926621 - RNA, 15 nt, Human
aagccuggucagccc

SEQ ID NO: 1926622 - RNA, 22 nt, Human
aagcuaggccuggccagaugca

SEQ ID NO: 1926623 - RNA, 17 nt, Human
aagccuggucagcccaa

SEQ ID NO: 1926624 - RNA, 21 nt, Human
aagcuauaaauuccucuuugc

SEQ ID NO: 1926625 - RNA, 18 nt, Human
aagcuaggccuggccaga

SEQ ID NO: 1926626 - RNA, 17 nt, Human
aagcuaggccuggccag

SEQ ID NO: 1926627 - RNA, 17 nt, Human
guucagcuccagcucac

SEQ ID NO: 1926628 - RNA, 16 nt, Human
guucagcuccagcuca

SEQ ID NO: 1926629 - RNA, 18 nt, Human
guucagcuccagcucacc

SEQ ID NO: 1926630 - RNA, 23 nt, Human
guuauuuaacagcugaauuaucu

SEQ ID NO: 1926631 - RNA, 19 nt, Human
guucaggguuggccccugc

SEQ ID NO: 1926632 - RNA, 18 nt, Human
guucaggguuggccccug

SEQ ID NO: 1926633 - RNA, 17 nt, Human
guucaggguuggccccu

SEQ ID NO: 1926634 - RNA, 18 nt, Human
guguuuuaaaaugagaaa

SEQ ID NO: 1926635 - RNA, 14 nt, Human
guuaagcuuugaca

SEQ ID NO: 1926636 - RNA, 11 nt, Human
guguuuguguu

SEQ ID NO: 1926637 - RNA, 16 nt, Human
guuaagcuuugacacu

SEQ ID NO: 1926638 - RNA, 18 nt, Human
guuaaugauagcuacugu

SEQ ID NO: 1926639 - RNA, 15 nt, Human
guuaaugcuuucuga

SEQ ID NO: 1926640 - RNA, 14 nt, Human
guuaaguucuauug

SEQ ID NO: 1926641 - RNA, 22 nt, Human
guuaaguuuuucccuucaucug

SEQ ID NO: 1926642 - RNA, 12 nt, Human
guuagucauuug

SEQ ID NO: 1926643 - RNA, 22 nt, Human
guuagucauuugcugagcaugu

SEQ ID NO: 1926644 - RNA, 20 nt, Human
guuaguaugaggcauuuguu

SEQ ID NO: 1926645 - RNA, 22 nt, Human
guuagucucuuguauuaaacuc

SEQ ID NO: 1926646 - RNA, 17 nt, Human
guuaguaugaggcauuu

SEQ ID NO: 1926647 - RNA, 23 nt, Human
guuaguaacaugaggggacauuu

SEQ ID NO: 1926648 - RNA, 17 nt, Human
guuacacagugugaaua

SEQ ID NO: 1926649 - RNA, 18 nt, Human
guuagcagacaggccccg

SEQ ID NO: 1926650 - RNA, 13 nt, Human
guuagcagacagg

SEQ ID NO: 1926651 - RNA, 13 nt, Human
guuaaugcuuucu

SEQ ID NO: 1926652 - RNA, 15 nt, Human
guuugauuucauuaa

SEQ ID NO: 1926653 - RNA, 22 nt, Human
guuugauucagacagcugccug

SEQ ID NO: 1926654 - RNA, 23 nt, Human
guuucuaaaggcuaccuuuguau

SEQ ID NO: 1926655 - RNA, 22 nt, Human
guuucuaaaggcuaccuuugua

SEQ ID NO: 1926656 - RNA, 16 nt, Human
guuugccucugccucu

SEQ ID NO: 1926657 - RNA, 13 nt, Human
guuugccucugcc

SEQ ID NO: 1926658 - RNA, 16 nt, Human
guuugggaccccuggu

SEQ ID NO: 1926659 - RNA, 19 nt, Human
guuugggauccuauugaac

SEQ ID NO: 1926660 - RNA, 22 nt, Human
guuugggaccccuggugguuca

SEQ ID NO: 1926661 - RNA, 18 nt, Human
guuugccgguggugcagg

SEQ ID NO: 1926662 - RNA, 19 nt, Human
guuugccgguggugcaggu

SEQ ID NO: 1926663 - RNA, 15 nt, Human
guuugcaaggaagcc

SEQ ID NO: 1926664 - RNA, 14 nt, Human
guuugcaaggaagc

SEQ ID NO: 1926665 - RNA, 13 nt, Human
guuugcaaggaag

SEQ ID NO: 1926666 - RNA, 22 nt, Human
guuugcaaggaagccacagcug

SEQ ID NO: 1926667 - RNA, 17 nt, Human
guuugcaaggaagccac

SEQ ID NO: 1926668 - RNA, 18 nt, Human
guuuggggaugagaaagg

SEQ ID NO: 1926669 - RNA, 22 nt, Human
guuuuaauuuauacuggcaugc

SEQ ID NO: 1926670 - RNA, 15 nt, Human
guuuuacugcagcuu

SEQ ID NO: 1926671 - RNA, 12 nt, Human
guuuuacauugu

SEQ ID NO: 1926672 - RNA, 21 nt, Human
guuuuacauuguugagcuauu

SEQ ID NO: 1926673 - RNA, 23 nt, Human
guuuuaggucuagccuaugugga

SEQ ID NO: 1926674 - RNA, 20 nt, Human
guuuucuuaaccagaucauu

SEQ ID NO: 1926675 - RNA, 12 nt, Human
guuuucuguucu

SEQ ID NO: 1926676 - RNA, 16 nt, Human
guuuucuuaacuuaaa

SEQ ID NO: 1926677 - RNA, 11 nt, Human
guuuucuguuc

SEQ ID NO: 1926678 - RNA, 16 nt, Human
aaggguaucaggugcu

SEQ ID NO: 1926679 - RNA, 17 nt, Human
aagguaauuucuugugc

SEQ ID NO: 1926680 - RNA, 13 nt, Human
aaguaaaaacaaa

SEQ ID NO: 1926681 - RNA, 20 nt, Human
aaguaaaaacaaagaaauua

SEQ ID NO: 1926682 - RNA, 22 nt, Human
aaguaaaaacaaagaaauuaug

SEQ ID NO: 1926683 - RNA, 12 nt, Human
aaguaauaugca

SEQ ID NO: 1926684 - RNA, 19 nt, Human
guuucuaaaggcuaccuuu

SEQ ID NO: 1926685 - RNA, 16 nt, Human
aaguaauaugcacaca

SEQ ID NO: 1926686 - RNA, 15 nt, Human
aaguaauaugcacac

SEQ ID NO: 1926687 - RNA, 13 nt, Human
aagggccuggccu

SEQ ID NO: 1926688 - RNA, 23 nt, Human
aaggggaauguuugccucugccu

SEQ ID NO: 1926689 - RNA, 22 nt, Human
aaggggaauguuugccucugcc

SEQ ID NO: 1926690 - RNA, 19 nt, Human
aagggccuggccugagcug

SEQ ID NO: 1926691 - RNA, 14 nt, Human
aagggccuggccug

SEQ ID NO: 1926692 - RNA, 17 nt, Human
aagggccuggccugagc

SEQ ID NO: 1926693 - RNA, 13 nt, Human
guuggguggaugc

SEQ ID NO: 1926694 - RNA, 21 nt, Human
guugcuguuuuccucccuucu

SEQ ID NO: 1926695 - RNA, 23 nt, Human
guugcuguuuuccucccuucugc

SEQ ID NO: 1926696 - RNA, 18 nt, Human
guuggucccccuuccaug

SEQ ID NO: 1926697 - RNA, 17 nt, Human
guugcuguuuuccuccc

SEQ ID NO: 1926698 - RNA, 18 nt, Human
guugcuguuuuccucccu

SEQ ID NO: 1926699 - RNA, 19 nt, Human
guugcuguuuuccucccuu

SEQ ID NO: 1926700 - RNA, 18 nt, Human
guuguaccgcaaugugac

SEQ ID NO: 1926701 - RNA, 14 nt, Human
guuguacuucauuu

SEQ ID NO: 1926702 - RNA, 23 nt, Human
guuguauacuuccuuaugcuucu

SEQ ID NO: 1926703 - RNA, 18 nt, Human
guuguaucagcacgugug

SEQ ID NO: 1926704 - RNA, 16 nt, Human
guuuaugugugugugu

SEQ ID NO: 1926705 - RNA, 13 nt, Human
guuuaugugugug

SEQ ID NO: 1926706 - RNA, 14 nt, Human
guuuaauuuaaagc

SEQ ID NO: 1926707 - RNA, 15 nt, Human
guuuaauuuaaagcc

SEQ ID NO: 1926708 - RNA, 19 nt, Human
guuuaauuuuauaaacaaa

SEQ ID NO: 1926709 - RNA, 20 nt, Human
guuuacaaauggacauagga

SEQ ID NO: 1926710 - RNA, 18 nt, Human
guuuacaagcccccccuu

SEQ ID NO: 1926711 - RNA, 19 nt, Human
guuuacaagcccccccuuc

SEQ ID NO: 1926712 - RNA, 22 nt, Human
guuuacaagcccccccuuccac

SEQ ID NO: 1926713 - RNA, 21 nt, Human
guugcccaggcuggcgugcag

SEQ ID NO: 1926714 - RNA, 19 nt, Human
guugcccaggcaggucuug

SEQ ID NO: 1926715 - RNA, 18 nt, Human
guugcccaggcaggucuu

SEQ ID NO: 1926716 - RNA, 17 nt, Human
guugcccaggcaggucu

SEQ ID NO: 1926717 - RNA, 14 nt, Human
aaggcuccaggagc

SEQ ID NO: 1926718 - RNA, 18 nt, Human
aaggccaaaggaagcaca

SEQ ID NO: 1926719 - RNA, 15 nt, Human
aaggaugugauugug

SEQ ID NO: 1926720 - RNA, 17 nt, Human
aaggaugugauugugga

SEQ ID NO: 1926721 - RNA, 22 nt, Human
aaggaugugauuguggaaugga

SEQ ID NO: 1926722 - RNA, 17 nt, Human
aaggccagaccugcaga

SEQ ID NO: 1926723 - RNA, 18 nt, Human
aaggccagaccugcagac

SEQ ID NO: 1926724 - RNA, 20 nt, Human
aaggccagaccugcagacgc

SEQ ID NO: 1926725 - RNA, 19 nt, Human
aaggcuaccuuuguauucu

SEQ ID NO: 1926726 - RNA, 23 nt, Human
aaggcuauggggauagaugugug

SEQ ID NO: 1926727 - RNA, 23 nt, Human
guugaugaucuuugcagacaggc

SEQ ID NO: 1926728 - RNA, 22 nt, Human
guugaucuggaacccagacuca

SEQ ID NO: 1926729 - RNA, 14 nt, Human
aaggauccugagcc

SEQ ID NO: 1926730 - RNA, 13 nt, Human
aaggauccugagc

SEQ ID NO: 1926731 - RNA, 15 nt, Human
aaggauccugagcca

SEQ ID NO: 1926732 - RNA, 17 nt, Human
aaggauccugagccaga

SEQ ID NO: 1926733 - RNA, 18 nt, Human
aaggaugaucuaggaaga

SEQ ID NO: 1926734 - RNA, 23 nt, Human
aaggaugaucuaggaagacuuug

SEQ ID NO: 1926735 - RNA, 19 nt, Human
aaggaugcuuguacauaau

SEQ ID NO: 1926736 - RNA, 17 nt, Human
aaggaugcuuguacaua

SEQ ID NO: 1926737 - RNA, 16 nt, Human
aaggaugcuuguacau

SEQ ID NO: 1926738 - RNA, 15 nt, Human
aaggaugcuuguaca

SEQ ID NO: 1926739 - RNA, 18 nt, Human
aaggaugcacagaguugu

SEQ ID NO: 1926740 - RNA, 15 nt, Human
aagaccucagggcac

SEQ ID NO: 1926741 - RNA, 17 nt, Human
aagaccucaccuagaaa

SEQ ID NO: 1926742 - RNA, 16 nt, Human
aagaccucaccuagaa

SEQ ID NO: 1926743 - RNA, 17 nt, Human
aagaccuggcagcucug

SEQ ID NO: 1926744 - RNA, 16 nt, Human
aagacuaucuaaaugu

SEQ ID NO: 1926745 - RNA, 17 nt, Human
aagacuaucuaaauguu

SEQ ID NO: 1926746 - RNA, 22 nt, Human
aagacccuuguggucccacccc

SEQ ID NO: 1926747 - RNA, 18 nt, Human
aagacccuugugguccca

SEQ ID NO: 1926748 - RNA, 21 nt, Human
aagacccuuguggucccaccc

SEQ ID NO: 1926749 - RNA, 22 nt, Human
aagacugaguacguugugcauu

SEQ ID NO: 1926750 - RNA, 21 nt, Human
aagacugaguacguugugcau

SEQ ID NO: 1926751 - RNA, 17 nt, Human
aagacuguacaaaguag

SEQ ID NO: 1926752 - RNA, 17 nt, Human
aagacugaguacguugu

SEQ ID NO: 1926753 - RNA, 18 nt, Human
aagacuaucuaaauguug

SEQ ID NO: 1926754 - RNA, 14 nt, Human
guggguacgggagg

SEQ ID NO: 1926755 - RNA, 20 nt, Human
gugggggaucacagccucug

SEQ ID NO: 1926756 - RNA, 16 nt, Human
guggggggcuucauac

SEQ ID NO: 1926757 - RNA, 15 nt, Human
guggggggcuucaua

SEQ ID NO: 1926758 - RNA, 14 nt, Human
guggugguuuucug

SEQ ID NO: 1926759 - RNA, 16 nt, Human
gugguuucagaaaugu

SEQ ID NO: 1926760 - RNA, 19 nt, Human
guggugguaacccuggugg

SEQ ID NO: 1926761 - RNA, 20 nt, Human
guggugguaacccugguggu

SEQ ID NO: 1926762 - RNA, 16 nt, Human
guggugguaacccugg

SEQ ID NO: 1926763 - RNA, 13 nt, Human
gugggucugugug

SEQ ID NO: 1926764 - RNA, 16 nt, Human
gugggucugugugugu

SEQ ID NO: 1926765 - RNA, 13 nt, Human
gugggagugggcc

SEQ ID NO: 1926766 - RNA, 14 nt, Human
gugggagugggccc

SEQ ID NO: 1926767 - RNA, 13 nt, Human
gugggauccucca

SEQ ID NO: 1926768 - RNA, 14 nt, Human
gugggaguguguaa

SEQ ID NO: 1926769 - RNA, 13 nt, Human
gugggagugugua

SEQ ID NO: 1926770 - RNA, 13 nt, Human
gugggagggggag

SEQ ID NO: 1926771 - RNA, 23 nt, Human
guggcgcagcauauucaggaagc

SEQ ID NO: 1926772 - RNA, 22 nt, Human
gugggacacccugugauggggc

SEQ ID NO: 1926773 - RNA, 13 nt, Human
aagcaagacugag

SEQ ID NO: 1926774 - RNA, 15 nt, Human
aagcaagauuucaga

SEQ ID NO: 1926775 - RNA, 12 nt, Human
aagcaaaggaga

SEQ ID NO: 1926776 - RNA, 13 nt, Human
aagcaaaggagau

SEQ ID NO: 1926777 - RNA, 14 nt, Human
aagcaaagggcucc

SEQ ID NO: 1926778 - RNA, 14 nt, Human
aagaugugacaugu

SEQ ID NO: 1926779 - RNA, 18 nt, Human
aagaugugacauguuuua

SEQ ID NO: 1926780 - RNA, 18 nt, Human
aagagguuuuaaaaaaau

SEQ ID NO: 1926781 - RNA, 18 nt, Human
aagagguuuuaaagcuuc

SEQ ID NO: 1926782 - RNA, 14 nt, Human
aagagguuuuaaag

SEQ ID NO: 1926783 - RNA, 17 nt, Human
gugguuuucuguucuuu

SEQ ID NO: 1926784 - RNA, 20 nt, Human
guggugguuuucuguucuuu

SEQ ID NO: 1926785 - RNA, 12 nt, Human
aagaugcagccg

SEQ ID NO: 1926786 - RNA, 20 nt, Human
aagaucuguuuugaaggcaa

SEQ ID NO: 1926787 - RNA, 21 nt, Human
aagaucuguuuugaaggcaaa

SEQ ID NO: 1926788 - RNA, 22 nt, Human
aagaucuguuuugaaggcaaaa

SEQ ID NO: 1926789 - RNA, 19 nt, Human
aagaucuguccucagccuu

SEQ ID NO: 1926790 - RNA, 20 nt, Human
aagaucuguccucagccuug

SEQ ID NO: 1926791 - RNA, 12 nt, Human
guguguaugugg

SEQ ID NO: 1926792 - RNA, 23 nt, Human
guguuuccuggcacugcuuccag

SEQ ID NO: 1926793 - RNA, 14 nt, Human
guguugucccuucu

SEQ ID NO: 1926794 - RNA, 15 nt, Human
guguuguguguggga

SEQ ID NO: 1926795 - RNA, 15 nt, Human
guguugccacaggac

SEQ ID NO: 1926796 - RNA, 17 nt, Human
guguugccacaggacac

SEQ ID NO: 1926797 - RNA, 18 nt, Human
guguugccacaggacaca

SEQ ID NO: 1926798 - RNA, 18 nt, Human
gugucuuuuuucacuaca

SEQ ID NO: 1926799 - RNA, 17 nt, Human
gugugacuacuccccca

SEQ ID NO: 1926800 - RNA, 14 nt, Human
guguguaauuuaaa

SEQ ID NO: 1926801 - RNA, 18 nt, Human
gugucuugcaauggcagc

SEQ ID NO: 1926802 - RNA, 17 nt, Human
gugucuugcaauggcag

SEQ ID NO: 1926803 - RNA, 17 nt, Human
gugucuuuccacuccuc

SEQ ID NO: 1926804 - RNA, 14 nt, Human
gugccucauugcuu

SEQ ID NO: 1926805 - RNA, 12 nt, Human
gugccucuggga

SEQ ID NO: 1926806 - RNA, 13 nt, Human
gugccucugggac

SEQ ID NO: 1926807 - RNA, 14 nt, Human
gugccucugggacu

SEQ ID NO: 1926808 - RNA, 14 nt, Human
gugccuuauggaac

SEQ ID NO: 1926809 - RNA, 21 nt, Human
gugccuuauggaacacucuga

SEQ ID NO: 1926810 - RNA, 23 nt, Human
gugccuuauggaacacucugaga

SEQ ID NO: 1926811 - RNA, 20 nt, Human
gugccguguguugcaugcag

SEQ ID NO: 1926812 - RNA, 15 nt, Human
gugccucaagagaag

SEQ ID NO: 1926813 - RNA, 21 nt, Human
gugaaccaccacacccagccc

SEQ ID NO: 1926814 - RNA, 13 nt, Human
aacuuuaccuuuu

SEQ ID NO: 1926815 - RNA, 13 nt, Human
aacuuuaaauuau

SEQ ID NO: 1926816 - RNA, 13 nt, Human
aacuuuaagagga

SEQ ID NO: 1926817 - RNA, 15 nt, Human
aacuuuaagaggaca

SEQ ID NO: 1926818 - RNA, 21 nt, Human
aacuuggggaguuaagaccug

SEQ ID NO: 1926819 - RNA, 22 nt, Human
aacuuggggaguuaagaccugg

SEQ ID NO: 1926820 - RNA, 11 nt, Human
gugccuuaugg

SEQ ID NO: 1926821 - RNA, 15 nt, Human
aacuuguauuaugug

SEQ ID NO: 1926822 - RNA, 23 nt, Human
aacuuggggaguuaagaccuggc

SEQ ID NO: 1926823 - RNA, 16 nt, Human
aacuuguauuaugugu

SEQ ID NO: 1926824 - RNA, 22 nt, Human
aacuugucuuuggacccugagg

SEQ ID NO: 1926825 - RNA, 20 nt, Human
aacuugucaaaaaacaaaaa

SEQ ID NO: 1926826 - RNA, 18 nt, Human
aacuugucuuuggacccu

SEQ ID NO: 1926827 - RNA, 18 nt, Human
gugcuaggaacacuccuu

SEQ ID NO: 1926828 - RNA, 22 nt, Human
gugcuaggaacacuccuucaca

SEQ ID NO: 1926829 - RNA, 21 nt, Human
gugcuaucucccccagcccca

SEQ ID NO: 1926830 - RNA, 22 nt, Human
aagaagugaaaaucuacacucc

SEQ ID NO: 1926831 - RNA, 16 nt, Human
aagaagugaaaaucua

SEQ ID NO: 1926832 - RNA, 19 nt, Human
aagaagugugucacccuua

SEQ ID NO: 1926833 - RNA, 19 nt, Human
aagaaggcagcagguggca

SEQ ID NO: 1926834 - RNA, 16 nt, Human
aagaaggcaaaaaugu

SEQ ID NO: 1926835 - RNA, 17 nt, Human
aagaaggaaaaggcagg

SEQ ID NO: 1926836 - RNA, 14 nt, Human
aagaaggcaaaaau

SEQ ID NO: 1926837 - RNA, 13 nt, Human
aagaaauauaccu

SEQ ID NO: 1926838 - RNA, 23 nt, Human
aagaaauaucugagcucuuugca

SEQ ID NO: 1926839 - RNA, 20 nt, Human
aagaaagacuaucuaaaugu

SEQ ID NO: 1926840 - RNA, 22 nt, Human
aagaaagacuaucuaaauguug

SEQ ID NO: 1926841 - RNA, 18 nt, Human
aagaaaaaggaugcacag

SEQ ID NO: 1926842 - RNA, 17 nt, Human
aagaaaaaggaugcaca

SEQ ID NO: 1926843 - RNA, 15 nt, Human
aagaaaaaggaugca

SEQ ID NO: 1926844 - RNA, 21 nt, Human
guggaugccugguggcagcug

SEQ ID NO: 1926845 - RNA, 17 nt, Human
guggauuauuucauuuu

SEQ ID NO: 1926846 - RNA, 21 nt, Human
guggaccuuaggccuuccucu

SEQ ID NO: 1926847 - RNA, 17 nt, Human
guggaccuuaggccuuc

SEQ ID NO: 1926848 - RNA, 18 nt, Human
guggaccuuaggccuucc

SEQ ID NO: 1926849 - RNA, 22 nt, Human
guggaccaucgcugucaugagu

SEQ ID NO: 1926850 - RNA, 22 nt, Human
guggacacagcucuucuccagg

SEQ ID NO: 1926851 - RNA, 18 nt, Human
guggacacagcucuucuc

SEQ ID NO: 1926852 - RNA, 23 nt, Human
guggacacagcucuucuccaggc

SEQ ID NO: 1926853 - RNA, 19 nt, Human
guggaauuauuuuaaaaga

SEQ ID NO: 1926854 - RNA, 22 nt, Human
guggaagugugggucugugugu

SEQ ID NO: 1926855 - RNA, 21 nt, Human
guggaagugugggucugugug

SEQ ID NO: 1926856 - RNA, 18 nt, Human
guggaauuauuuuaaaag

SEQ ID NO: 1926857 - RNA, 16 nt, Human
guggaauuauuuuaaa

SEQ ID NO: 1926858 - RNA, 15 nt, Human
guggaauuauuuuaa

SEQ ID NO: 1926859 - RNA, 20 nt, Human
gugcugggauuacaggugug

SEQ ID NO: 1926860 - RNA, 19 nt, Human
guggaaguaguggagcccc

SEQ ID NO: 1926861 - RNA, 20 nt, Human
guggaagugugggucugugu

SEQ ID NO: 1926862 - RNA, 19 nt, Human
guggaagugugggucugug

SEQ ID NO: 1926863 - RNA, 15 nt, Human
guggaaguguggguc

SEQ ID NO: 1926864 - RNA, 14 nt, Human
guggaagugugggu

SEQ ID NO: 1926865 - RNA, 22 nt, Human
gugcugggauuacaagcgugag

SEQ ID NO: 1926866 - RNA, 21 nt, Human
gugcugggauuacaagcguga

SEQ ID NO: 1926867 - RNA, 15 nt, Human
gugcucaggagcccu

SEQ ID NO: 1926868 - RNA, 12 nt, Human
gugcuauguucu

SEQ ID NO: 1926869 - RNA, 23 nt, Human
gugcuauuguagagccagagguc

SEQ ID NO: 1926870 - RNA, 22 nt, Human
gugcuaucucccccagccccau

SEQ ID NO: 1926871 - RNA, 19 nt, Human
guggauuuaacagaaaugu

SEQ ID NO: 1926872 - RNA, 18 nt, Human
guggauuuaacagaaaug

SEQ ID NO: 1926873 - RNA, 20 nt, Human
guggauuuaacagaaaugua

SEQ ID NO: 1926874 - RNA, 19 nt, Human
guggcaccagcagccugga

SEQ ID NO: 1926875 - RNA, 18 nt, Human
guggcaccagcagccugg

SEQ ID NO: 1926876 - RNA, 20 nt, Human
guggcagcucaccucucccu

SEQ ID NO: 1926877 - RNA, 14 nt, Human
guggcagcucaccu

SEQ ID NO: 1926878 - RNA, 16 nt, Human
guggcagcucaccucu

SEQ ID NO: 1926879 - RNA, 16 nt, Human
aagaauugaagcagga

SEQ ID NO: 1926880 - RNA, 16 nt, Human
aagacaaaaagcuacu

SEQ ID NO: 1926881 - RNA, 23 nt, Human
aagacaaaaagcuacuuauugua

SEQ ID NO: 1926882 - RNA, 20 nt, Human
aagacaaaaagcuacuuauu

SEQ ID NO: 1926883 - RNA, 20 nt, Human
aagaauugucuuucugucuc

SEQ ID NO: 1926884 - RNA, 19 nt, Human
aaugcagucuguccaggcu

SEQ ID NO: 1926885 - RNA, 20 nt, Human
aaugcagucuguccaggcuc

SEQ ID NO: 1926886 - RNA, 16 nt, Human
uacaaacaaaauuucu

SEQ ID NO: 1926887 - RNA, 14 nt, Human
aaugcccagccccu

SEQ ID NO: 1926888 - RNA, 15 nt, Human
aaugcccagccccuu

SEQ ID NO: 1926889 - RNA, 13 nt, Human
aaugcugugcccu

SEQ ID NO: 1926890 - RNA, 21 nt, Human
aaugccccugaauuuaaauag

SEQ ID NO: 1926891 - RNA, 21 nt, Human
aaugcugugcccuaaagugua

SEQ ID NO: 1926892 - RNA, 20 nt, Human
aaugcugugcccuaaagugu

SEQ ID NO: 1926893 - RNA, 20 nt, Human
aaugcccagccccuucugac

SEQ ID NO: 1926894 - RNA, 22 nt, Human
aaugcccagccccuucugaccc

SEQ ID NO: 1926895 - RNA, 23 nt, Human
aaugcccagccccuucugaccca

SEQ ID NO: 1926896 - RNA, 24 nt, Human
aaugcccagccccuucugacccau

SEQ ID NO: 1926897 - RNA, 16 nt, Human
aauggacguguuauga

SEQ ID NO: 1926898 - RNA, 19 nt, Human
aauggacauaggacucaaa

SEQ ID NO: 1926899 - RNA, 13 nt, Human
aaugcuuucugaa

SEQ ID NO: 1926900 - RNA, 17 nt, Human
aaugcuuucugaagcuu

SEQ ID NO: 1926901 - RNA, 19 nt, Human
aaugcuuuuuauuucugca

SEQ ID NO: 1926902 - RNA, 20 nt, Human
aaugcuuuuuauuucugcau

SEQ ID NO: 1926903 - RNA, 15 nt, Human
uaauuccacaccuuu

SEQ ID NO: 1926904 - RNA, 17 nt, Human
uaauuccacaccuuuua

SEQ ID NO: 1926905 - RNA, 23 nt, Human
uaauuuaucuugucucugggcuu

SEQ ID NO: 1926906 - RNA, 14 nt, Human
uaauuuauacuggc

SEQ ID NO: 1926907 - RNA, 16 nt, Human
uaauuuaaaauuguga

SEQ ID NO: 1926908 - RNA, 15 nt, Human
uaauuuaaaauugug

SEQ ID NO: 1926909 - RNA, 17 nt, Human
uaauuguuugucuuuaa

SEQ ID NO: 1926910 - RNA, 15 nt, Human
uacaaaagcauguga

SEQ ID NO: 1926911 - RNA, 12 nt, Human
uacaaaacuucc

SEQ ID NO: 1926912 - RNA, 20 nt, Human
uacaaaaagcauaaaaauua

SEQ ID NO: 1926913 - RNA, 15 nt, Human
uacaaaaagcauaaa

SEQ ID NO: 1926914 - RNA, 15 nt, Human
uaauuucaaaaugcu

SEQ ID NO: 1926915 - RNA, 16 nt, Human
uaauuucaaaaugcuu

SEQ ID NO: 1926916 - RNA, 20 nt, Human
uaauuucaaaaugcuuuuua

SEQ ID NO: 1926917 - RNA, 21 nt, Human
uaauuucagcuucuauauauu

SEQ ID NO: 1926918 - RNA, 20 nt, Human
uaauuuauuaauugcuuuga

SEQ ID NO: 1926919 - RNA, 19 nt, Human
uaauuuauacuggcaugcu

SEQ ID NO: 1926920 - RNA, 17 nt, Human
uaauuuauuaauugcuu

SEQ ID NO: 1926921 - RNA, 18 nt, Human
uaauuuauuaauugcuuu

SEQ ID NO: 1926922 - RNA, 19 nt, Human
uaauuuauuaauugcuuug

SEQ ID NO: 1926923 - RNA, 12 nt, Human
uaauuucaaaau

SEQ ID NO: 1926924 - RNA, 19 nt, Human
aauggacuuuuguacauag

SEQ ID NO: 1926925 - RNA, 21 nt, Human
aauggacguguuaugacucca

SEQ ID NO: 1926926 - RNA, 19 nt, Human
uacacauuuuucagauaua

SEQ ID NO: 1926927 - RNA, 21 nt, Human
uacacauuuuucagauauaaa

SEQ ID NO: 1926928 - RNA, 17 nt, Human
uacacauuuuucagaua

SEQ ID NO: 1926929 - RNA, 15 nt, Human
uacacauuuuucaga

SEQ ID NO: 1926930 - RNA, 20 nt, Human
aauggagauucaguuuucau

SEQ ID NO: 1926931 - RNA, 18 nt, Human
uacaccacuacauucugu

SEQ ID NO: 1926932 - RNA, 17 nt, Human
uacaccacuacauucug

SEQ ID NO: 1926933 - RNA, 16 nt, Human
uacaccacuacauucu

SEQ ID NO: 1926934 - RNA, 15 nt, Human
uacaccacuacauuc

SEQ ID NO: 1926935 - RNA, 20 nt, Human
uacaccacuacauucuguua

SEQ ID NO: 1926936 - RNA, 19 nt, Human
uacaccacuacauucuguu

SEQ ID NO: 1926937 - RNA, 17 nt, Human
uacaccagcauuccuuu

SEQ ID NO: 1926938 - RNA, 20 nt, Human
uacaccagcauuccuuuuga

SEQ ID NO: 1926939 - RNA, 18 nt, Human
uacaccagcauuccuuuu

SEQ ID NO: 1926940 - RNA, 18 nt, Human
uacagaggccaugggccu

SEQ ID NO: 1926941 - RNA, 18 nt, Human
uacagaggacaguauuug

SEQ ID NO: 1926942 - RNA, 23 nt, Human
uacagagcccacgcccccacugg

SEQ ID NO: 1926943 - RNA, 14 nt, Human
uacagaggacagua

SEQ ID NO: 1926944 - RNA, 14 nt, Human
uacacuccagugag

SEQ ID NO: 1926945 - RNA, 11 nt, Human
aaugugauaug

SEQ ID NO: 1926946 - RNA, 12 nt, Human
aauguggcuuga

SEQ ID NO: 1926947 - RNA, 16 nt, Human
aauguggcuugagaaa

SEQ ID NO: 1926948 - RNA, 21 nt, Human
aauguggcuugagaaauaugg

SEQ ID NO: 1926949 - RNA, 14 nt, Human
aaugugacucaaga

SEQ ID NO: 1926950 - RNA, 13 nt, Human
aauguauuuucuu

SEQ ID NO: 1926951 - RNA, 23 nt, Human
aauguauuuucuucaccucugcu

SEQ ID NO: 1926952 - RNA, 14 nt, Human
aauguacugcauau

SEQ ID NO: 1926953 - RNA, 18 nt, Human
aauguacugcauaugaaa

SEQ ID NO: 1926954 - RNA, 21 nt, Human
aauguaugcuucauacaggga

SEQ ID NO: 1926955 - RNA, 18 nt, Human
aauguaugcuucauacag

SEQ ID NO: 1926956 - RNA, 12 nt, Human
aauguaugugua

SEQ ID NO: 1926957 - RNA, 14 nt, Human
aauguauguguaag

SEQ ID NO: 1926958 - RNA, 17 nt, Human
uacauaaugcgugcaua

SEQ ID NO: 1926959 - RNA, 15 nt, Human
uacaguaucucaggg

SEQ ID NO: 1926960 - RNA, 20 nt, Human
uacauaaugcgugcauacca

SEQ ID NO: 1926961 - RNA, 19 nt, Human
uacauaaugcgugcauacc

SEQ ID NO: 1926962 - RNA, 23 nt, Human
uacauagcaugacauuucuuugu

SEQ ID NO: 1926963 - RNA, 12 nt, Human
aauguacugcau

SEQ ID NO: 1926964 - RNA, 20 nt, Human
aauguacuaggauacugcug

SEQ ID NO: 1926965 - RNA, 18 nt, Human
aauguacgaugagaaauu

SEQ ID NO: 1926966 - RNA, 19 nt, Human
uacauauaagugauugcug

SEQ ID NO: 1926967 - RNA, 20 nt, Human
aaugacucaggacauccccc

SEQ ID NO: 1926968 - RNA, 22 nt, Human
aaugacagguuugggaccccug

SEQ ID NO: 1926969 - RNA, 15 nt, Human
aaugaaaaccacauu

SEQ ID NO: 1926970 - RNA, 17 nt, Human
aaugacuuacuguacau

SEQ ID NO: 1926971 - RNA, 14 nt, Human
aaugacuuacugua

SEQ ID NO: 1926972 - RNA, 18 nt, Human
aaugacuuacuguacaug

SEQ ID NO: 1926973 - RNA, 13 nt, Human
aaugagaaucuac

SEQ ID NO: 1926974 - RNA, 15 nt, Human
aaugagccuggcaag

SEQ ID NO: 1926975 - RNA, 13 nt, Human
uaaugaggaaacu

SEQ ID NO: 1926976 - RNA, 15 nt, Human
uaaugguuugaauau

SEQ ID NO: 1926977 - RNA, 12 nt, Human
aaucuuuuacaa

SEQ ID NO: 1926978 - RNA, 21 nt, Human
aaucuuuuacaacugccucga

SEQ ID NO: 1926979 - RNA, 18 nt, Human
uaaucaauguuucuucua

SEQ ID NO: 1926980 - RNA, 14 nt, Human
uaaucaaguugaau

SEQ ID NO: 1926981 - RNA, 21 nt, Human
uaauagcgucauaacuagaac

SEQ ID NO: 1926982 - RNA, 14 nt, Human
uaauacuguauuug

SEQ ID NO: 1926983 - RNA, 14 nt, Human
uaauagguuuggac

SEQ ID NO: 1926984 - RNA, 19 nt, Human
uaauagguuuggacaaaau

SEQ ID NO: 1926985 - RNA, 13 nt, Human
aaucuucugaacu

SEQ ID NO: 1926986 - RNA, 20 nt, Human
aaucuucugaacuuggcgcu

SEQ ID NO: 1926987 - RNA, 20 nt, Human
aaucuuauuagggagaaaau

SEQ ID NO: 1926988 - RNA, 12 nt, Human
uaauacuguauu

SEQ ID NO: 1926989 - RNA, 14 nt, Human
uaauacuaccuuga

SEQ ID NO: 1926990 - RNA, 15 nt, Human
uaauacuaccuugaa

SEQ ID NO: 1926991 - RNA, 20 nt, Human
uaauacgaauuguuucacaa

SEQ ID NO: 1926992 - RNA, 12 nt, Human
uaauacuauauu

SEQ ID NO: 1926993 - RNA, 22 nt, Human
uaaucauauaauaaauguacau

SEQ ID NO: 1926994 - RNA, 20 nt, Human
uaaucauauaauaaauguac

SEQ ID NO: 1926995 - RNA, 15 nt, Human
uaaucauauaauaaa

SEQ ID NO: 1926996 - RNA, 14 nt, Human
uaaugaaacuugga

SEQ ID NO: 1926997 - RNA, 14 nt, Human
uaaugaaagacugu

SEQ ID NO: 1926998 - RNA, 17 nt, Human
uaaugaaagacuguaca

SEQ ID NO: 1926999 - RNA, 18 nt, Human
uaaugaaagacuguacaa

SEQ ID NO: 1927000 - RNA, 19 nt, Human
uaaugaaagacuguacaaa

SEQ ID NO: 1927001 - RNA, 20 nt, Human
uaaugaccacaccugccucu

SEQ ID NO: 1927002 - RNA, 15 nt, Human
uaaugacuuaagcac

SEQ ID NO: 1927003 - RNA, 21 nt, Human
uaaugacuuaagcacacuuga

SEQ ID NO: 1927004 - RNA, 22 nt, Human
uaaugaaagacuguacaaagua

SEQ ID NO: 1927005 - RNA, 23 nt, Human
uaaugaaagacuguacaaaguag

SEQ ID NO: 1927006 - RNA, 15 nt, Human
uaaugaaacuuggau

SEQ ID NO: 1927007 - RNA, 16 nt, Human
uaaguuugauuucauu

SEQ ID NO: 1927008 - RNA, 14 nt, Human
uaaguuucugggac

SEQ ID NO: 1927009 - RNA, 20 nt, Human
uaaguuuuuauggcuuuugu

SEQ ID NO: 1927010 - RNA, 14 nt, Human
aaucagacuaugaa

SEQ ID NO: 1927011 - RNA, 17 nt, Human
aaucagacuaugaaguu

SEQ ID NO: 1927012 - RNA, 18 nt, Human
uaauaaaauaucauucag

SEQ ID NO: 1927013 - RNA, 17 nt, Human
uaauaaaauaucauuca

SEQ ID NO: 1927014 - RNA, 16 nt, Human
uaauaaaauaucauuc

SEQ ID NO: 1927015 - RNA, 15 nt, Human
uaauaaaauaucauu

SEQ ID NO: 1927016 - RNA, 12 nt, Human
uaauaaaauauc

SEQ ID NO: 1927017 - RNA, 17 nt, Human
uaauaaaaguacauguu

SEQ ID NO: 1927018 - RNA, 21 nt, Human
uaauaaaauaucauucagcaa

SEQ ID NO: 1927019 - RNA, 20 nt, Human
uaauaaaauaucauucagca

SEQ ID NO: 1927020 - RNA, 15 nt, Human
aaucaucaagucuuu

SEQ ID NO: 1927021 - RNA, 17 nt, Human
aaucauggugcucagag

SEQ ID NO: 1927022 - RNA, 16 nt, Human
aaucuuauaauuuaaa

SEQ ID NO: 1927023 - RNA, 14 nt, Human
aaucuuauaauuua

SEQ ID NO: 1927024 - RNA, 14 nt, Human
aaucucaaauuucu

SEQ ID NO: 1927025 - RNA, 12 nt, Human
aaucucaaauuu

SEQ ID NO: 1927026 - RNA, 15 nt, Human
aaucucaaauaacua

SEQ ID NO: 1927027 - RNA, 16 nt, Human
aaucuaggaaaauauu

SEQ ID NO: 1927028 - RNA, 18 nt, Human
aaucuaggaaaauauuuu

SEQ ID NO: 1927029 - RNA, 17 nt, Human
aaucuacuaauuccaca

SEQ ID NO: 1927030 - RNA, 20 nt, Human
aaucuacugugguguuuugu

SEQ ID NO: 1927031 - RNA, 15 nt, Human
aaucuaaauggaacc

SEQ ID NO: 1927032 - RNA, 13 nt, Human
aaucuaaauggaa

SEQ ID NO: 1927033 - RNA, 18 nt, Human
aaucuaaauggaaccacu

SEQ ID NO: 1927034 - RNA, 15 nt, Human
aaucuacuaauucca

SEQ ID NO: 1927035 - RNA, 16 nt, Human
aaucuacuaauuccac

SEQ ID NO: 1927036 - RNA, 12 nt, Human
aaucuaaaugga

SEQ ID NO: 1927037 - RNA, 15 nt, Human
aauccuaccuguuuu

SEQ ID NO: 1927038 - RNA, 17 nt, Human
aauccuaccuguuuugu

SEQ ID NO: 1927039 - RNA, 16 nt, Human
aauaucauucagcaac

SEQ ID NO: 1927040 - RNA, 15 nt, Human
aauaucauucagcaa

SEQ ID NO: 1927041 - RNA, 14 nt, Human
aauaucauucagca

SEQ ID NO: 1927042 - RNA, 13 nt, Human
aauaucauucagc

SEQ ID NO: 1927043 - RNA, 14 nt, Human
uaacuaaaagguau

SEQ ID NO: 1927044 - RNA, 15 nt, Human
uaacuaaaagguaug

SEQ ID NO: 1927045 - RNA, 16 nt, Human
uaacauggaaguacua

SEQ ID NO: 1927046 - RNA, 15 nt, Human
uaacauggaaguacu

SEQ ID NO: 1927047 - RNA, 16 nt, Human
uaaccucuaaauucuu

SEQ ID NO: 1927048 - RNA, 14 nt, Human
uaacauggaaguac

SEQ ID NO: 1927049 - RNA, 14 nt, Human
uaacaugauuuggg

SEQ ID NO: 1927050 - RNA, 18 nt, Human
aauaggcguaacuaauuu

SEQ ID NO: 1927051 - RNA, 19 nt, Human
aauaggaaaaacugauuuu

SEQ ID NO: 1927052 - RNA, 24 nt, Human
aauagcuuuuuucucugauacaga

SEQ ID NO: 1927053 - RNA, 15 nt, Human
aauagcuuuuguguc

SEQ ID NO: 1927054 - RNA, 17 nt, Human
aauaggaaaaacugauu

SEQ ID NO: 1927055 - RNA, 18 nt, Human
aauaggaaaaacugauuu

SEQ ID NO: 1927056 - RNA, 15 nt, Human
aauaggaaaaacuga

SEQ ID NO: 1927057 - RNA, 16 nt, Human
aauaggaaaaacugau

SEQ ID NO: 1927058 - RNA, 18 nt, Human
aauagauacagcagaggc

SEQ ID NO: 1927059 - RNA, 23 nt, Human
aauagacaauuuauuauggcaca

SEQ ID NO: 1927060 - RNA, 23 nt, Human
aauagacacuccccgaagucuuu

SEQ ID NO: 1927061 - RNA, 22 nt, Human
aauagacacuccccgaagucuu

SEQ ID NO: 1927062 - RNA, 18 nt, Human
aauagacaauuuauuaug

SEQ ID NO: 1927063 - RNA, 15 nt, Human
uaaauuuugugucuc

SEQ ID NO: 1927064 - RNA, 14 nt, Human
aauagcugggacua

SEQ ID NO: 1927065 - RNA, 13 nt, Human
aauagcugggacu

SEQ ID NO: 1927066 - RNA, 20 nt, Human
aauagccugccucuucucua

SEQ ID NO: 1927067 - RNA, 23 nt, Human
aauagccacugcauaccaaccug

SEQ ID NO: 1927068 - RNA, 20 nt, Human
aauagccacauuuggaauac

SEQ ID NO: 1927069 - RNA, 22 nt, Human
aauagccacauuuggaauacuu

SEQ ID NO: 1927070 - RNA, 23 nt, Human
aauagccacauuuggaauacuuu

SEQ ID NO: 1927071 - RNA, 13 nt, Human
aauauuguacagu

SEQ ID NO: 1927072 - RNA, 21 nt, Human
aauauuuuccaugaaaaugca

SEQ ID NO: 1927073 - RNA, 11 nt, Human
aaucagaacuc

SEQ ID NO: 1927074 - RNA, 12 nt, Human
aaucagaacuca

SEQ ID NO: 1927075 - RNA, 23 nt, Human
aaucagaacucaaauggggccag

SEQ ID NO: 1927076 - RNA, 11 nt, Human
aauauugcuga

SEQ ID NO: 1927077 - RNA, 12 nt, Human
aauauugcugau

SEQ ID NO: 1927078 - RNA, 13 nt, Human
aauauugcugaug

SEQ ID NO: 1927079 - RNA, 15 nt, Human
aauauugcugauggu

SEQ ID NO: 1927080 - RNA, 18 nt, Human
aauauugcugauggugca

SEQ ID NO: 1927081 - RNA, 21 nt, Human
aauauugcugauggugcaaug

SEQ ID NO: 1927082 - RNA, 22 nt, Human
aauauugcugauggugcaauga

SEQ ID NO: 1927083 - RNA, 18 nt, Human
aauauugauaugcuuaua

SEQ ID NO: 1927084 - RNA, 17 nt, Human
aauauugauaugcuuau

SEQ ID NO: 1927085 - RNA, 15 nt, Human
aauaugcacacauuu

SEQ ID NO: 1927086 - RNA, 16 nt, Human
aauaucugaaaaugua

SEQ ID NO: 1927087 - RNA, 17 nt, Human
aauaucugaaaauguau

SEQ ID NO: 1927088 - RNA, 18 nt, Human
aauaucugaaaauguaug

SEQ ID NO: 1927089 - RNA, 19 nt, Human
aauaucugaaaauguaugu

SEQ ID NO: 1927090 - RNA, 21 nt, Human
aauaucuccgucaacucauau

SEQ ID NO: 1927091 - RNA, 16 nt, Human
aauaucuccgucaacu

SEQ ID NO: 1927092 - RNA, 12 nt, Human
aauauccuuugc

SEQ ID NO: 1927093 - RNA, 11 nt, Human
uaagaccuggc

SEQ ID NO: 1927094 - RNA, 13 nt, Human
uaagaccuggcag

SEQ ID NO: 1927095 - RNA, 20 nt, Human
aauaucugaaaauguaugug

SEQ ID NO: 1927096 - RNA, 19 nt, Human
aauaucuuuuuuuuaauaa

SEQ ID NO: 1927097 - RNA, 13 nt, Human
aauaugaaaacuu

SEQ ID NO: 1927098 - RNA, 14 nt, Human
aauaugaaaacuua

SEQ ID NO: 1927099 - RNA, 20 nt, Human
uaagacaugauuuccuugaa

SEQ ID NO: 1927100 - RNA, 21 nt, Human
uaagacaugauuuccuugaau

SEQ ID NO: 1927101 - RNA, 18 nt, Human
uaagaauauuugaaugua

SEQ ID NO: 1927102 - RNA, 18 nt, Human
uaacuuuuauaaacuuua

SEQ ID NO: 1927103 - RNA, 17 nt, Human
uaacuuuuauaaacuuu

SEQ ID NO: 1927104 - RNA, 15 nt, Human
uaacuuuuauaaacu

SEQ ID NO: 1927105 - RNA, 21 nt, Human
aauacaaagaaccaagaaaaa

SEQ ID NO: 1927106 - RNA, 13 nt, Human
aauacaaaacuuc

SEQ ID NO: 1927107 - RNA, 20 nt, Human
aauacaaaaauuagccgggc

SEQ ID NO: 1927108 - RNA, 12 nt, Human
aauacaaaacuu

SEQ ID NO: 1927109 - RNA, 12 nt, Human
uaaauaaaguuu

SEQ ID NO: 1927110 - RNA, 21 nt, Human
uaaauaaaguuuguugaaaca

SEQ ID NO: 1927111 - RNA, 19 nt, Human
uaaauaaugugaaacugga

SEQ ID NO: 1927112 - RNA, 12 nt, Human
aauaacuuuuuu

SEQ ID NO: 1927113 - RNA, 13 nt, Human
aauaagaauagaa

SEQ ID NO: 1927114 - RNA, 18 nt, Human
aauaagaauagaaauaaa

SEQ ID NO: 1927115 - RNA, 16 nt, Human
aauaauugcagaacua

SEQ ID NO: 1927116 - RNA, 21 nt, Human
aauaauugcagaacuaaacuc

SEQ ID NO: 1927117 - RNA, 18 nt, Human
uaaaucuccaaaauaaaa

SEQ ID NO: 1927118 - RNA, 15 nt, Human
uaaaucuccaaaaua

SEQ ID NO: 1927119 - RNA, 14 nt, Human
uaaaucuccaaaau

SEQ ID NO: 1927120 - RNA, 15 nt, Human
uaaaucugacccagu

SEQ ID NO: 1927121 - RNA, 16 nt, Human
uaaaucugacccagug

SEQ ID NO: 1927122 - RNA, 17 nt, Human
uaaaucugacccagugc

SEQ ID NO: 1927123 - RNA, 20 nt, Human
uaaaucugcuggaguuucau

SEQ ID NO: 1927124 - RNA, 14 nt, Human
uaaaucugacccag

SEQ ID NO: 1927125 - RNA, 23 nt, Human
uaaaugcaccuggaauauauaac

SEQ ID NO: 1927126 - RNA, 14 nt, Human
uaaaucuuuuacaa

SEQ ID NO: 1927127 - RNA, 15 nt, Human
uaaauguugaaagau

SEQ ID NO: 1927128 - RNA, 23 nt, Human
uaaauguuuuuuuuuaaagacuu

SEQ ID NO: 1927129 - RNA, 20 nt, Human
uaaauguugaaagaucaaaa

SEQ ID NO: 1927130 - RNA, 24 nt, Human
uaaauguuuuuuuuuaaagacuuu

SEQ ID NO: 1927131 - RNA, 14 nt, Human
uaaauuaacuuuua

SEQ ID NO: 1927132 - RNA, 12 nt, Human
uaaauuaacuuu

SEQ ID NO: 1927133 - RNA, 16 nt, Human
uaaauuaacuuuuaua

SEQ ID NO: 1927134 - RNA, 15 nt, Human
uaaauuaacuuuuau

SEQ ID NO: 1927135 - RNA, 17 nt, Human
uaaauuaacuuuuauaa

SEQ ID NO: 1927136 - RNA, 18 nt, Human
uaaauuaacuuuuauaaa

SEQ ID NO: 1927137 - RNA, 20 nt, Human
aauaaauuguaauuguaaag

SEQ ID NO: 1927138 - RNA, 21 nt, Human
aauaacaaugaaaguugauaa

SEQ ID NO: 1927139 - RNA, 20 nt, Human
aauaaauguaucuuauucac

SEQ ID NO: 1927140 - RNA, 21 nt, Human
aauaaauguaucuuauucaca

SEQ ID NO: 1927141 - RNA, 15 nt, Human
aauaacgauaaaaga

SEQ ID NO: 1927142 - RNA, 17 nt, Human
aauaaccggauauauac

SEQ ID NO: 1927143 - RNA, 17 nt, Human
aauaaccaaucuacaau

SEQ ID NO: 1927144 - RNA, 18 nt, Human
aauaaauuugguucuaau

SEQ ID NO: 1927145 - RNA, 18 nt, Human
aauaaaacuuuuuaaaau

SEQ ID NO: 1927146 - RNA, 15 nt, Human
aauaaaacuggcuuu

SEQ ID NO: 1927147 - RNA, 15 nt, Human
aauaaaacuuuuuaa

SEQ ID NO: 1927148 - RNA, 14 nt, Human
aauaaaacuuuuua

SEQ ID NO: 1927149 - RNA, 12 nt, Human
aauaaaacuuuu

SEQ ID NO: 1927150 - RNA, 16 nt, Human
aauaaaucauaaaacu

SEQ ID NO: 1927151 - RNA, 15 nt, Human
aauaaaucugaccca

SEQ ID NO: 1927152 - RNA, 23 nt, Human
aauaaauauugucuuuuuguaug

SEQ ID NO: 1927153 - RNA, 16 nt, Human
aauaaaucugacccag

SEQ ID NO: 1927154 - RNA, 17 nt, Human
aauaaaucugacccagu

SEQ ID NO: 1927155 - RNA, 20 nt, Human
aauaaaucugacccagugcc

SEQ ID NO: 1927156 - RNA, 19 nt, Human
aauaaaguuggucuuuuga

SEQ ID NO: 1927157 - RNA, 16 nt, Human
aauaaauauugucuuu

SEQ ID NO: 1927158 - RNA, 21 nt, Human
aauaaauauugucuuuuugua

SEQ ID NO: 1927159 - RNA, 15 nt, Human
aaguuuuguaaauuu

SEQ ID NO: 1927160 - RNA, 20 nt, Human
aaguuuuuauggcuuuugug

SEQ ID NO: 1927161 - RNA, 17 nt, Human
aauaaaacauuuucaca

SEQ ID NO: 1927162 - RNA, 19 nt, Human
aauaaaacauuuucacaca

SEQ ID NO: 1927163 - RNA, 22 nt, Human
uaaagguucaugcaaacuuuau

SEQ ID NO: 1927164 - RNA, 19 nt, Human
uaaaguaaaaacaaagaaa

SEQ ID NO: 1927165 - RNA, 21 nt, Human
uaaaguaaaaacaaagaaauu

SEQ ID NO: 1927166 - RNA, 22 nt, Human
uaaaguaaaaacaaagaaauua

SEQ ID NO: 1927167 - RNA, 18 nt, Human
guuuugaagcuacugugu

SEQ ID NO: 1927168 - RNA, 19 nt, Human
guuuugaagcuacugugug

SEQ ID NO: 1927169 - RNA, 15 nt, Human
guuuugaaggcaaaa

SEQ ID NO: 1927170 - RNA, 15 nt, Human
acaagcaaacccaga

SEQ ID NO: 1927171 - RNA, 14 nt, Human
acaagcccccccuu

SEQ ID NO: 1927172 - RNA, 17 nt, Human
acaagcccccccuucca

SEQ ID NO: 1927173 - RNA, 18 nt, Human
acaagcccccccuuccac

SEQ ID NO: 1927174 - RNA, 17 nt, Human
acaagcgugagccacug

SEQ ID NO: 1927175 - RNA, 13 nt, Human
acaagcuccaagc

SEQ ID NO: 1927176 - RNA, 17 nt, Human
acaagaccacguuucua

SEQ ID NO: 1927177 - RNA, 19 nt, Human
acaagaccaccacuucgaa

SEQ ID NO: 1927178 - RNA, 16 nt, Human
acaagaccacguuucu

SEQ ID NO: 1927179 - RNA, 22 nt, Human
acaagagcccaggccuccuaca

SEQ ID NO: 1927180 - RNA, 21 nt, Human
acaaauucugucucuggauua

SEQ ID NO: 1927181 - RNA, 15 nt, Human
acaaauggacauagg

SEQ ID NO: 1927182 - RNA, 17 nt, Human
acaaauuuacagagaca

SEQ ID NO: 1927183 - RNA, 13 nt, Human
acaaauguaugau

SEQ ID NO: 1927184 - RNA, 14 nt, Human
acaacauguauaau

SEQ ID NO: 1927185 - RNA, 17 nt, Human
acaacaucuuuuucuac

SEQ ID NO: 1927186 - RNA, 16 nt, Human
uagcuacuaauuuuaa

SEQ ID NO: 1927187 - RNA, 21 nt, Human
acaaucucccuucacaaguuu

SEQ ID NO: 1927188 - RNA, 16 nt, Human
uagcucaggugucccu

SEQ ID NO: 1927189 - RNA, 15 nt, Human
acaauauugacuuug

SEQ ID NO: 1927190 - RNA, 18 nt, Human
acaauauugacuuugucu

SEQ ID NO: 1927191 - RNA, 17 nt, Human
acaaucucccuucacaa

SEQ ID NO: 1927192 - RNA, 18 nt, Human
acaagcgugagccacugc

SEQ ID NO: 1927193 - RNA, 22 nt, Human
acaagcuccaagcucccaggca

SEQ ID NO: 1927194 - RNA, 15 nt, Human
acaagcuccaagcuc

SEQ ID NO: 1927195 - RNA, 16 nt, Human
acaagcuccaagcucc

SEQ ID NO: 1927196 - RNA, 17 nt, Human
acaagcuccaagcuccc

SEQ ID NO: 1927197 - RNA, 19 nt, Human
acaagcuccaagcucccag

SEQ ID NO: 1927198 - RNA, 15 nt, Human
uagaugaacucaacu

SEQ ID NO: 1927199 - RNA, 16 nt, Human
uagaugaaguuuuaca

SEQ ID NO: 1927200 - RNA, 22 nt, Human
uagauaggucagugcaaauacu

SEQ ID NO: 1927201 - RNA, 17 nt, Human
uagauaguuagaaccug

SEQ ID NO: 1927202 - RNA, 14 nt, Human
acaaaacuuuucua

SEQ ID NO: 1927203 - RNA, 11 nt, Human
acaaaacuucc

SEQ ID NO: 1927204 - RNA, 15 nt, Human
aauuuuuuuuuccuu

SEQ ID NO: 1927205 - RNA, 17 nt, Human
acaaaacuacaugagaa

SEQ ID NO: 1927206 - RNA, 23 nt, Human
acaaaacuacaugagaacaaaca

SEQ ID NO: 1927207 - RNA, 20 nt, Human
acaaagcccaagggaucugg

SEQ ID NO: 1927208 - RNA, 21 nt, Human
acaaagcgugguggacaugca

SEQ ID NO: 1927209 - RNA, 14 nt, Human
acaaagcagccacg

SEQ ID NO: 1927210 - RNA, 11 nt, Human
acaaagcccaa

SEQ ID NO: 1927211 - RNA, 13 nt, Human
acaaagcccaagg

SEQ ID NO: 1927212 - RNA, 21 nt, Human
acaaaguuacuagguaacuuc

SEQ ID NO: 1927213 - RNA, 23 nt, Human
acaaaguuacuagguaacuucau

SEQ ID NO: 1927214 - RNA, 19 nt, Human
acaaaguuccaaaaugcca

SEQ ID NO: 1927215 - RNA, 19 nt, Human
acaaaguggcauaaaaaac

SEQ ID NO: 1927216 - RNA, 22 nt, Human
aauuuuuaaucuuuaauuuuac

SEQ ID NO: 1927217 - RNA, 19 nt, Human
aauuuuguuuucuugauuu

SEQ ID NO: 1927218 - RNA, 22 nt, Human
aauuuuuuuaucgucacugcuu

SEQ ID NO: 1927219 - RNA, 14 nt, Human
aauuuuuguaauuu

SEQ ID NO: 1927220 - RNA, 16 nt, Human
aauuuguuauaaugaa

SEQ ID NO: 1927221 - RNA, 21 nt, Human
aauuugguuuucacauuggaa

SEQ ID NO: 1927222 - RNA, 15 nt, Human
aauuugguuuucaca

SEQ ID NO: 1927223 - RNA, 23 nt, Human
aauuugcauuaaauucacaaacu

SEQ ID NO: 1927224 - RNA, 13 nt, Human
aauuugguuuuca

SEQ ID NO: 1927225 - RNA, 22 nt, Human
aauuugguucuaauagaacuca

SEQ ID NO: 1927226 - RNA, 17 nt, Human
aauuugguucuaggccg

SEQ ID NO: 1927227 - RNA, 16 nt, Human
aauuugguucuaauag

SEQ ID NO: 1927228 - RNA, 13 nt, Human
uacuuuuuccugg

SEQ ID NO: 1927229 - RNA, 14 nt, Human
uacuuuguucugcu

SEQ ID NO: 1927230 - RNA, 22 nt, Human
uacuuuguucugcuguucucua

SEQ ID NO: 1927231 - RNA, 13 nt, Human
uacuuuuuguuau

SEQ ID NO: 1927232 - RNA, 15 nt, Human
aauuugcauuaaauu

SEQ ID NO: 1927233 - RNA, 17 nt, Human
aauuugcauuaaauuca

SEQ ID NO: 1927234 - RNA, 18 nt, Human
aauuugcauuaaauucac

SEQ ID NO: 1927235 - RNA, 21 nt, Human
aauuugcauuaaauucacaaa

SEQ ID NO: 1927236 - RNA, 22 nt, Human
aauuuauaaacuuuuuucuuac

SEQ ID NO: 1927237 - RNA, 22 nt, Human
aauuuauaaaaagguguuuuga

SEQ ID NO: 1927238 - RNA, 16 nt, Human
aauuuauaaaaaggug

SEQ ID NO: 1927239 - RNA, 17 nt, Human
aauuuauuaauugcuuu

SEQ ID NO: 1927240 - RNA, 18 nt, Human
aauuuauuaauugcuuug

SEQ ID NO: 1927241 - RNA, 19 nt, Human
aauuuauuaauugcuuuga

SEQ ID NO: 1927242 - RNA, 17 nt, Human
aauuucuaggacugaau

SEQ ID NO: 1927243 - RNA, 22 nt, Human
aauuucuaggacugaauuauga

SEQ ID NO: 1927244 - RNA, 18 nt, Human
aauuucuaggacugaauu

SEQ ID NO: 1927245 - RNA, 14 nt, Human
aauuuauuauggca

SEQ ID NO: 1927246 - RNA, 13 nt, Human
aauuuauuauggc

SEQ ID NO: 1927247 - RNA, 23 nt, Human
aauuucuaggacugaauuaugaa

SEQ ID NO: 1927248 - RNA, 13 nt, Human
aauuucuauuaaa

SEQ ID NO: 1927249 - RNA, 15 nt, Human
aauuuacauacucug

SEQ ID NO: 1927250 - RNA, 17 nt, Human
aauuuaccugaagucuu

SEQ ID NO: 1927251 - RNA, 18 nt, Human
aauuuacagagacagaaa

SEQ ID NO: 1927252 - RNA, 17 nt, Human
aauuuacagagacagaa

SEQ ID NO: 1927253 - RNA, 13 nt, Human
aauuuaguauuuu

SEQ ID NO: 1927254 - RNA, 11 nt, Human
aauugcuuuga

SEQ ID NO: 1927255 - RNA, 10 nt, Human
aauugcuuug

SEQ ID NO: 1927256 - RNA, 15 nt, Human
aauuugaaacacuuu

SEQ ID NO: 1927257 - RNA, 12 nt, Human
aauuugauugau

SEQ ID NO: 1927258 - RNA, 13 nt, Human
aauuugauugauu

SEQ ID NO: 1927259 - RNA, 14 nt, Human
aauuugauugauuu

SEQ ID NO: 1927260 - RNA, 15 nt, Human
aauuugauugauuug

SEQ ID NO: 1927261 - RNA, 16 nt, Human
aauuugauugauuuga

SEQ ID NO: 1927262 - RNA, 17 nt, Human
aauuugauugauuugaa

SEQ ID NO: 1927263 - RNA, 20 nt, Human
aauuugauugauuugaagaa

SEQ ID NO: 1927264 - RNA, 18 nt, Human
uacuucuccacccugcuc

SEQ ID NO: 1927265 - RNA, 13 nt, Human
uacuucuccaccc

SEQ ID NO: 1927266 - RNA, 22 nt, Human
uacuuccuuaugcuucuuucaa

SEQ ID NO: 1927267 - RNA, 15 nt, Human
uacuucugcuacaua

SEQ ID NO: 1927268 - RNA, 20 nt, Human
uacuucuccacccugcucuc

SEQ ID NO: 1927269 - RNA, 16 nt, Human
uacuucuuauacauuu

SEQ ID NO: 1927270 - RNA, 14 nt, Human
uacuucuugaaggu

SEQ ID NO: 1927271 - RNA, 14 nt, Human
uacuucuuauacau

SEQ ID NO: 1927272 - RNA, 15 nt, Human
uacuucuuauacauu

SEQ ID NO: 1927273 - RNA, 15 nt, Human
uacuugaaaauuaac

SEQ ID NO: 1927274 - RNA, 16 nt, Human
uacgucugacaggcaa

SEQ ID NO: 1927275 - RNA, 13 nt, Human
uacgugaguccug

SEQ ID NO: 1927276 - RNA, 14 nt, Human
uacuaaaaauacaa

SEQ ID NO: 1927277 - RNA, 18 nt, Human
uacuaaaaauacaaaaaa

SEQ ID NO: 1927278 - RNA, 18 nt, Human
uacuagggaaaugccuuu

SEQ ID NO: 1927279 - RNA, 15 nt, Human
uacuaggauacugcu

SEQ ID NO: 1927280 - RNA, 13 nt, Human
uacuagguaacuu

SEQ ID NO: 1927281 - RNA, 22 nt, Human
uacucuacccucuuagaaaaac

SEQ ID NO: 1927282 - RNA, 15 nt, Human
uacgucugacaggca

SEQ ID NO: 1927283 - RNA, 13 nt, Human
uacggacaccccc

SEQ ID NO: 1927284 - RNA, 14 nt, Human
uacggacacccccu

SEQ ID NO: 1927285 - RNA, 14 nt, Human
uacgcuuugauuca

SEQ ID NO: 1927286 - RNA, 15 nt, Human
uacgcuuugauucau

SEQ ID NO: 1927287 - RNA, 21 nt, Human
aauugaaucaguauaaacaaa

SEQ ID NO: 1927288 - RNA, 22 nt, Human
aaugugucuuucuuuuuggaca

SEQ ID NO: 1927289 - RNA, 16 nt, Human
aauguguggccugcac

SEQ ID NO: 1927290 - RNA, 19 nt, Human
uacuguacagacagaaaaa

SEQ ID NO: 1927291 - RNA, 13 nt, Human
uacuguaauuccu

SEQ ID NO: 1927292 - RNA, 15 nt, Human
uacuguaauuccuca

SEQ ID NO: 1927293 - RNA, 16 nt, Human
uacuguaauuccucaa

SEQ ID NO: 1927294 - RNA, 23 nt, Human
uacuguacagacagaaaaaacug

SEQ ID NO: 1927295 - RNA, 12 nt, Human
uacuguaauuuu

SEQ ID NO: 1927296 - RNA, 14 nt, Human
uacuguaauuuuau

SEQ ID NO: 1927297 - RNA, 20 nt, Human
uacuguaauuuuauaugaag

SEQ ID NO: 1927298 - RNA, 18 nt, Human
uacuguacaugaaaacac

SEQ ID NO: 1927299 - RNA, 21 nt, Human
aauugacuuauuuauauaaau

SEQ ID NO: 1927300 - RNA, 18 nt, Human
aauugagcugcagaaacg

SEQ ID NO: 1927301 - RNA, 11 nt, Human
aauugcauuga

SEQ ID NO: 1927302 - RNA, 14 nt, Human
aauugcagaacuaa

SEQ ID NO: 1927303 - RNA, 23 nt, Human
aauugauuugcauugaacacaaa

SEQ ID NO: 1927304 - RNA, 14 nt, Human
aauugcaaaucuug

SEQ ID NO: 1927305 - RNA, 18 nt, Human
aauugcaaaucuugaaau

SEQ ID NO: 1927306 - RNA, 13 nt, Human
aauugauuugcau

SEQ ID NO: 1927307 - RNA, 14 nt, Human
aauugauuugcauu

SEQ ID NO: 1927308 - RNA, 16 nt, Human
aauugauuugcauuga

SEQ ID NO: 1927309 - RNA, 20 nt, Human
aauugauuugcauugaacac

SEQ ID NO: 1927310 - RNA, 22 nt, Human
aauugauuugcauugaacacaa

SEQ ID NO: 1927311 - RNA, 17 nt, Human
aauugaggggauuaaua

SEQ ID NO: 1927312 - RNA, 15 nt, Human
uacuguaauuuguga

SEQ ID NO: 1927313 - RNA, 17 nt, Human
uacuguaauuugugaua

SEQ ID NO: 1927314 - RNA, 16 nt, Human
uacuguaauuugugau

SEQ ID NO: 1927315 - RNA, 19 nt, Human
uacugagagugaacaaauu

SEQ ID NO: 1927316 - RNA, 16 nt, Human
uacugggagccuaccc

SEQ ID NO: 1927317 - RNA, 20 nt, Human
uacugggccauguugugccu

SEQ ID NO: 1927318 - RNA, 17 nt, Human
uacugagagugaacaaa

SEQ ID NO: 1927319 - RNA, 17 nt, Human
uacugacugagaauaua

SEQ ID NO: 1927320 - RNA, 22 nt, Human
uacugaaauaaacgucuuaaau

SEQ ID NO: 1927321 - RNA, 19 nt, Human
uacugaaauaaacgucuua

SEQ ID NO: 1927322 - RNA, 14 nt, Human
uacucuagaugaag

SEQ ID NO: 1927323 - RNA, 13 nt, Human
uacucuuucugua

SEQ ID NO: 1927324 - RNA, 14 nt, Human
uacucuuucuguau

SEQ ID NO: 1927325 - RNA, 15 nt, Human
uacucuuucuguaua

SEQ ID NO: 1927326 - RNA, 16 nt, Human
uacucuuucuguauau

SEQ ID NO: 1927327 - RNA, 16 nt, Human
acacucuuuguaagag

SEQ ID NO: 1927328 - RNA, 12 nt, Human
acacucuuugua

SEQ ID NO: 1927329 - RNA, 20 nt, Human
acacucugggcuccagagug

SEQ ID NO: 1927330 - RNA, 21 nt, Human
acacucuuuugcuuuauucca

SEQ ID NO: 1927331 - RNA, 17 nt, Human
acacugaaauauacaca

SEQ ID NO: 1927332 - RNA, 18 nt, Human
acacugaaauauacacac

SEQ ID NO: 1927333 - RNA, 20 nt, Human
acacugaaauauacacacag

SEQ ID NO: 1927334 - RNA, 21 nt, Human
acacugaaauauacacacagc

SEQ ID NO: 1927335 - RNA, 14 nt, Human
acacuguucucugc

SEQ ID NO: 1927336 - RNA, 15 nt, Human
acacuguucucugcc

SEQ ID NO: 1927337 - RNA, 22 nt, Human
acacuguucucugcccuccaag

SEQ ID NO: 1927338 - RNA, 23 nt, Human
acacuguucucugcccuccaaga

SEQ ID NO: 1927339 - RNA, 22 nt, Human
acacugaaauauacacacagca

SEQ ID NO: 1927340 - RNA, 21 nt, Human
acacugaagcucuugaagaca

SEQ ID NO: 1927341 - RNA, 16 nt, Human
acacuguucucugccc

SEQ ID NO: 1927342 - RNA, 17 nt, Human
acacuguucucugcccu

SEQ ID NO: 1927343 - RNA, 18 nt, Human
acacuguucucugcccuc

SEQ ID NO: 1927344 - RNA, 20 nt, Human
acacuguucucugcccucca

SEQ ID NO: 1927345 - RNA, 11 nt, Human
acacucugaga

SEQ ID NO: 1927346 - RNA, 13 nt, Human
acacucugagacu

SEQ ID NO: 1927347 - RNA, 13 nt, Human
acacuccuucaca

SEQ ID NO: 1927348 - RNA, 14 nt, Human
acacuccagugaga

SEQ ID NO: 1927349 - RNA, 15 nt, Human
acacucacuucucuu

SEQ ID NO: 1927350 - RNA, 19 nt, Human
acacucaccucuaaaacag

SEQ ID NO: 1927351 - RNA, 18 nt, Human
acacucaccucuaaaaca

SEQ ID NO: 1927352 - RNA, 16 nt, Human
acacucagcacaaggc

SEQ ID NO: 1927353 - RNA, 13 nt, Human
acacucagcacaa

SEQ ID NO: 1927354 - RNA, 16 nt, Human
acacucacccaacaau

SEQ ID NO: 1927355 - RNA, 12 nt, Human
uauauuuacaaa

SEQ ID NO: 1927356 - RNA, 17 nt, Human
acagacacaggcccggc

SEQ ID NO: 1927357 - RNA, 19 nt, Human
acagaaagcagaacaguga

SEQ ID NO: 1927358 - RNA, 22 nt, Human
acagacacaggcccggcuccag

SEQ ID NO: 1927359 - RNA, 18 nt, Human
acagacacaggcccggcu

SEQ ID NO: 1927360 - RNA, 22 nt, Human
acagacuggaagcacagcuuca

SEQ ID NO: 1927361 - RNA, 21 nt, Human
acagacuggaagcacagcuuc

SEQ ID NO: 1927362 - RNA, 19 nt, Human
acagacuggaagcacagcu

SEQ ID NO: 1927363 - RNA, 17 nt, Human
acagacuggaagcacag

SEQ ID NO: 1927364 - RNA, 23 nt, Human
acacuguuucaaacuuuacuaug

SEQ ID NO: 1927365 - RNA, 15 nt, Human
acacuguuucaaacu

SEQ ID NO: 1927366 - RNA, 16 nt, Human
acacuguuucaaacuu

SEQ ID NO: 1927367 - RNA, 15 nt, Human
acacuuaaaaauggu

SEQ ID NO: 1927368 - RNA, 13 nt, Human
acacuuaaaaaug

SEQ ID NO: 1927369 - RNA, 18 nt, Human
acagaaaauucuucucca

SEQ ID NO: 1927370 - RNA, 15 nt, Human
acagaaaccuuuuua

SEQ ID NO: 1927371 - RNA, 20 nt, Human
acagaaaccuuuuuaaaaau

SEQ ID NO: 1927372 - RNA, 16 nt, Human
acagaugggcaaauua

SEQ ID NO: 1927373 - RNA, 20 nt, Human
acagauguaaaagacuuuuu

SEQ ID NO: 1927374 - RNA, 23 nt, Human
acagaugggugcuuggaggaagg

SEQ ID NO: 1927375 - RNA, 20 nt, Human
acagauacuccuccaagguu

SEQ ID NO: 1927376 - RNA, 20 nt, Human
acagauagauauaugcucug

SEQ ID NO: 1927377 - RNA, 22 nt, Human
acagaguuguuacauuuuuaag

SEQ ID NO: 1927378 - RNA, 21 nt, Human
acagaguuguuacauuuuuaa

SEQ ID NO: 1927379 - RNA, 15 nt, Human
acagaguuguuacau

SEQ ID NO: 1927380 - RNA, 18 nt, Human
uaucuuugauucuccuuc

SEQ ID NO: 1927381 - RNA, 17 nt, Human
uaucuuugauucuccuu

SEQ ID NO: 1927382 - RNA, 16 nt, Human
uaucuuugauucuccu

SEQ ID NO: 1927383 - RNA, 14 nt, Human
uaucuuuauuaauc

SEQ ID NO: 1927384 - RNA, 15 nt, Human
uaucuuuauuaauca

SEQ ID NO: 1927385 - RNA, 15 nt, Human
uaucuugucucuggg

SEQ ID NO: 1927386 - RNA, 17 nt, Human
uaucuugucucugggcu

SEQ ID NO: 1927387 - RNA, 16 nt, Human
acagcaaggagauuua

SEQ ID NO: 1927388 - RNA, 21 nt, Human
acagcccgggcucugccuccc

SEQ ID NO: 1927389 - RNA, 22 nt, Human
acagcccgggcucugccuccca

SEQ ID NO: 1927390 - RNA, 23 nt, Human
acagcccgggcucugccucccau

SEQ ID NO: 1927391 - RNA, 14 nt, Human
acagcaaccccagg

SEQ ID NO: 1927392 - RNA, 16 nt, Human
acagaguuguuacauu

SEQ ID NO: 1927393 - RNA, 21 nt, Human
acagagcugggauguuucugu

SEQ ID NO: 1927394 - RNA, 18 nt, Human
acagagcugggauguuuc

SEQ ID NO: 1927395 - RNA, 10 nt, Human
acagagcugg

SEQ ID NO: 1927396 - RNA, 14 nt, Human
acagagcugggaug

SEQ ID NO: 1927397 - RNA, 20 nt, Human
acagaguuguuacauuuuua

SEQ ID NO: 1927398 - RNA, 19 nt, Human
acagaguuguuacauuuuu

SEQ ID NO: 1927399 - RNA, 18 nt, Human
acagaguuguuacauuuu

SEQ ID NO: 1927400 - RNA, 17 nt, Human
acagaguuguuacauuu

SEQ ID NO: 1927401 - RNA, 21 nt, Human
acagagcaagugagacccugu

SEQ ID NO: 1927402 - RNA, 15 nt, Human
acagagcaagacucu

SEQ ID NO: 1927403 - RNA, 13 nt, Human
uaucucagggccu

SEQ ID NO: 1927404 - RNA, 15 nt, Human
uaucucagggccugg

SEQ ID NO: 1927405 - RNA, 20 nt, Human
uaucccuacuguaauuugug

SEQ ID NO: 1927406 - RNA, 19 nt, Human
uaucccuacuguaauuugu

SEQ ID NO: 1927407 - RNA, 16 nt, Human
uauauuuauacuguau

SEQ ID NO: 1927408 - RNA, 18 nt, Human
uaguucagguaacaggca

SEQ ID NO: 1927409 - RNA, 10 nt, Human
uaguuuuugu

SEQ ID NO: 1927410 - RNA, 12 nt, Human
uaguuuugcaua

SEQ ID NO: 1927411 - RNA, 20 nt, Human
uauaaaaauaaaaaacacug

SEQ ID NO: 1927412 - RNA, 21 nt, Human
uauaaaaauaaaaaacacugg

SEQ ID NO: 1927413 - RNA, 14 nt, Human
uauaaaagacugac

SEQ ID NO: 1927414 - RNA, 12 nt, Human
uauaaaacuucu

SEQ ID NO: 1927415 - RNA, 13 nt, Human
acacccagcccac

SEQ ID NO: 1927416 - RNA, 12 nt, Human
acacccagccca

SEQ ID NO: 1927417 - RNA, 13 nt, Human
acacauuuuauuu

SEQ ID NO: 1927418 - RNA, 21 nt, Human
acacauguccaagaagcccag

SEQ ID NO: 1927419 - RNA, 22 nt, Human
acacauguccaagaagcccagg

SEQ ID NO: 1927420 - RNA, 13 nt, Human
acacauguccaag

SEQ ID NO: 1927421 - RNA, 18 nt, Human
acacauguccaagaagcc

SEQ ID NO: 1927422 - RNA, 19 nt, Human
acacauguccaagaagccc

SEQ ID NO: 1927423 - RNA, 18 nt, Human
acaccucugcacaagcug

SEQ ID NO: 1927424 - RNA, 16 nt, Human
acaccuugacagggca

SEQ ID NO: 1927425 - RNA, 15 nt, Human
acaccuugacagggc

SEQ ID NO: 1927426 - RNA, 14 nt, Human
acaccuugacaggg

SEQ ID NO: 1927427 - RNA, 19 nt, Human
acaccucugcacaagcugc

SEQ ID NO: 1927428 - RNA, 19 nt, Human
acacuaaccacgcuggacc

SEQ ID NO: 1927429 - RNA, 17 nt, Human
acacuaaccacgcugga

SEQ ID NO: 1927430 - RNA, 16 nt, Human
acacuaaccacgcugg

SEQ ID NO: 1927431 - RNA, 22 nt, Human
uauaaccaguguuguggauuua

SEQ ID NO: 1927432 - RNA, 15 nt, Human
acaaugguuuucuug

SEQ ID NO: 1927433 - RNA, 13 nt, Human
acaauggcagaug

SEQ ID NO: 1927434 - RNA, 17 nt, Human
acaaugcugauuuggug

SEQ ID NO: 1927435 - RNA, 21 nt, Human
uagcuucaccccaaucccagc

SEQ ID NO: 1927436 - RNA, 21 nt, Human
acaaugguuuucuuguguguu

SEQ ID NO: 1927437 - RNA, 14 nt, Human
acacacacauacac

SEQ ID NO: 1927438 - RNA, 12 nt, Human
acacacagcucu

SEQ ID NO: 1927439 - RNA, 11 nt, Human
acacacagcuc

SEQ ID NO: 1927440 - RNA, 13 nt, Human
acacagugagucg

SEQ ID NO: 1927441 - RNA, 21 nt, Human
uagguuggcaaaaaggcagga

SEQ ID NO: 1927442 - RNA, 17 nt, Human
uaguaaggaguucauuu

SEQ ID NO: 1927443 - RNA, 11 nt, Human
acacagugagu

SEQ ID NO: 1927444 - RNA, 19 nt, Human
acacagucuuggcucacug

SEQ ID NO: 1927445 - RNA, 13 nt, Human
uaguagagacagg

SEQ ID NO: 1927446 - RNA, 18 nt, Human
uagucuagauggcuccuc

SEQ ID NO: 1927447 - RNA, 20 nt, Human
uagucuagauggcuccucuc

SEQ ID NO: 1927448 - RNA, 19 nt, Human
uagucuagauggcuccucu

SEQ ID NO: 1927449 - RNA, 20 nt, Human
accaaucauuuuaauuauua

SEQ ID NO: 1927450 - RNA, 13 nt, Human
accaaucauuuua

SEQ ID NO: 1927451 - RNA, 15 nt, Human
accaauugcuuuguc

SEQ ID NO: 1927452 - RNA, 22 nt, Human
accacacguaaugaaacuugga

SEQ ID NO: 1927453 - RNA, 13 nt, Human
accacacuggacu

SEQ ID NO: 1927454 - RNA, 16 nt, Human
accacacuggacuccg

SEQ ID NO: 1927455 - RNA, 21 nt, Human
accacacuggacuccggcccu

SEQ ID NO: 1927456 - RNA, 15 nt, Human
ucaauuccucuggga

SEQ ID NO: 1927457 - RNA, 16 nt, Human
ucaauuccucugggaa

SEQ ID NO: 1927458 - RNA, 11 nt, Human
ucacaaauaaa

SEQ ID NO: 1927459 - RNA, 15 nt, Human
ucaauucuugccaaa

SEQ ID NO: 1927460 - RNA, 15 nt, Human
ucaagugaaaaagga

SEQ ID NO: 1927461 - RNA, 15 nt, Human
ucaagucaaauuaau

SEQ ID NO: 1927462 - RNA, 23 nt, Human
ucaagugaaaaaggaggaagaga

SEQ ID NO: 1927463 - RNA, 19 nt, Human
accaacauacucccaucug

SEQ ID NO: 1927464 - RNA, 21 nt, Human
accaacauacucccaucugug

SEQ ID NO: 1927465 - RNA, 22 nt, Human
accaacauacucccaucuguga

SEQ ID NO: 1927466 - RNA, 17 nt, Human
accaauauuguacaguu

SEQ ID NO: 1927467 - RNA, 16 nt, Human
accaauauuguacagu

SEQ ID NO: 1927468 - RNA, 14 nt, Human
accaauauuguaca

SEQ ID NO: 1927469 - RNA, 15 nt, Human
accaauauuguacag

SEQ ID NO: 1927470 - RNA, 19 nt, Human
accaauauuguacaguuuu

SEQ ID NO: 1927471 - RNA, 18 nt, Human
accaauauuguacaguuu

SEQ ID NO: 1927472 - RNA, 15 nt, Human
accaauguucucucu

SEQ ID NO: 1927473 - RNA, 15 nt, Human
ucacaguucucuccu

SEQ ID NO: 1927474 - RNA, 15 nt, Human
ucacauaucugucau

SEQ ID NO: 1927475 - RNA, 12 nt, Human
ucacauaucugu

SEQ ID NO: 1927476 - RNA, 23 nt, Human
ucacacugagaauguaagaacua

SEQ ID NO: 1927477 - RNA, 21 nt, Human
ucacacugagaauguaagaac

SEQ ID NO: 1927478 - RNA, 20 nt, Human
ucacacugagaauguaagaa

SEQ ID NO: 1927479 - RNA, 19 nt, Human
ucacacugagaauguaaga

SEQ ID NO: 1927480 - RNA, 12 nt, Human
ucacacugagaa

SEQ ID NO: 1927481 - RNA, 11 nt, Human
ucacacugaga

SEQ ID NO: 1927482 - RNA, 15 nt, Human
ucaccccggccaccu

SEQ ID NO: 1927483 - RNA, 13 nt, Human
ucaccccagcccc

SEQ ID NO: 1927484 - RNA, 14 nt, Human
ucaccccagcccca

SEQ ID NO: 1927485 - RNA, 20 nt, Human
ucaccccagccccaaaacuc

SEQ ID NO: 1927486 - RNA, 16 nt, Human
ucaccuucaguaaccc

SEQ ID NO: 1927487 - RNA, 21 nt, Human
ucaccuguuuuuaagcuguuu

SEQ ID NO: 1927488 - RNA, 22 nt, Human
ucaccuguuuuuaagcuguuuc

SEQ ID NO: 1927489 - RNA, 18 nt, Human
ucaccuguuuuuaagcug

SEQ ID NO: 1927490 - RNA, 19 nt, Human
ucaccuguuuuuaagcugu

SEQ ID NO: 1927491 - RNA, 20 nt, Human
ucaccuguuuuuaagcuguu

SEQ ID NO: 1927492 - RNA, 21 nt, Human
ucacuacgggggggagaagga

SEQ ID NO: 1927493 - RNA, 22 nt, Human
ucacuacgggggggagaaggaa

SEQ ID NO: 1927494 - RNA, 20 nt, Human
ucacuauguugcccaggcag

SEQ ID NO: 1927495 - RNA, 19 nt, Human
ucacuauguugcccaggca

SEQ ID NO: 1927496 - RNA, 17 nt, Human
ucacuauguugcccagg

SEQ ID NO: 1927497 - RNA, 18 nt, Human
ucacuauguugcccaggc

SEQ ID NO: 1927498 - RNA, 17 nt, Human
accagagcccaccuugg

SEQ ID NO: 1927499 - RNA, 14 nt, Human
accagggacugagg

SEQ ID NO: 1927500 - RNA, 18 nt, Human
accaggcuugccugcagg

SEQ ID NO: 1927501 - RNA, 18 nt, Human
accaggcuggagugcagu

SEQ ID NO: 1927502 - RNA, 16 nt, Human
ucaccugaagacucau

SEQ ID NO: 1927503 - RNA, 17 nt, Human
ucaccuccugcugggca

SEQ ID NO: 1927504 - RNA, 15 nt, Human
ucaccucucccuugg

SEQ ID NO: 1927505 - RNA, 19 nt, Human
accaggcuugccugcaggc

SEQ ID NO: 1927506 - RNA, 20 nt, Human
ucaccucuaaaacaguccuu

SEQ ID NO: 1927507 - RNA, 15 nt, Human
ucaccugccccucaa

SEQ ID NO: 1927508 - RNA, 16 nt, Human
ucaccugccccaacuc

SEQ ID NO: 1927509 - RNA, 13 nt, Human
ucaccugccccuc

SEQ ID NO: 1927510 - RNA, 12 nt, Human
ucaccucugcua

SEQ ID NO: 1927511 - RNA, 11 nt, Human
accagacaggu

SEQ ID NO: 1927512 - RNA, 14 nt, Human
accagacaccuuga

SEQ ID NO: 1927513 - RNA, 16 nt, Human
accagacacccaggac

SEQ ID NO: 1927514 - RNA, 17 nt, Human
accagacacccaggacu

SEQ ID NO: 1927515 - RNA, 16 nt, Human
accagagcccaccuug

SEQ ID NO: 1927516 - RNA, 14 nt, Human
accagagcccaccu

SEQ ID NO: 1927517 - RNA, 12 nt, Human
accagagcccac

SEQ ID NO: 1927518 - RNA, 22 nt, Human
accacuuuuguucuugguuugu

SEQ ID NO: 1927519 - RNA, 13 nt, Human
accagaagcccag

SEQ ID NO: 1927520 - RNA, 16 nt, Human
accagaagcccagaau

SEQ ID NO: 1927521 - RNA, 14 nt, Human
accagaagcccaga

SEQ ID NO: 1927522 - RNA, 14 nt, Human
accagacacccagg

SEQ ID NO: 1927523 - RNA, 15 nt, Human
accagacacccagga

SEQ ID NO: 1927524 - RNA, 17 nt, Human
ucaccccggccaccugc

SEQ ID NO: 1927525 - RNA, 18 nt, Human
ucaccccggccaccugcg

SEQ ID NO: 1927526 - RNA, 17 nt, Human
accacugcacuccagcc

SEQ ID NO: 1927527 - RNA, 20 nt, Human
accacugcacuccagccugg

SEQ ID NO: 1927528 - RNA, 18 nt, Human
accacugcacucuagccu

SEQ ID NO: 1927529 - RNA, 21 nt, Human
accacugcacuccagccuggg

SEQ ID NO: 1927530 - RNA, 22 nt, Human
ucaccccggccaccugcggugc

SEQ ID NO: 1927531 - RNA, 21 nt, Human
accacuuuuguucuugguuug

SEQ ID NO: 1927532 - RNA, 16 nt, Human
accacuuuuguucuug

SEQ ID NO: 1927533 - RNA, 15 nt, Human
accacuuuuguucuu

SEQ ID NO: 1927534 - RNA, 13 nt, Human
accacuucauucu

SEQ ID NO: 1927535 - RNA, 17 nt, Human
accacuucauucuugaa

SEQ ID NO: 1927536 - RNA, 13 nt, Human
accacuucgaaac

SEQ ID NO: 1927537 - RNA, 21 nt, Human
ucagaagggagcuagccagag

SEQ ID NO: 1927538 - RNA, 23 nt, Human
ucagaagggagcuagccagagga

SEQ ID NO: 1927539 - RNA, 19 nt, Human
ucagaaguuucugccgcag

SEQ ID NO: 1927540 - RNA, 22 nt, Human
ucagaaguuucugccgcagccc

SEQ ID NO: 1927541 - RNA, 14 nt, Human
ucagaagacacuga

SEQ ID NO: 1927542 - RNA, 16 nt, Human
acccagccccuugaga

SEQ ID NO: 1927543 - RNA, 17 nt, Human
acccagccccuugagaa

SEQ ID NO: 1927544 - RNA, 20 nt, Human
acccagccccuugagaaacc

SEQ ID NO: 1927545 - RNA, 21 nt, Human
acccagccccuugagaaaccu

SEQ ID NO: 1927546 - RNA, 18 nt, Human
ucagagccugcaguuauu

SEQ ID NO: 1927547 - RNA, 15 nt, Human
ucagagccugcaguu

SEQ ID NO: 1927548 - RNA, 14 nt, Human
ucagagccugcagu

SEQ ID NO: 1927549 - RNA, 13 nt, Human
ucagagccugcag

SEQ ID NO: 1927550 - RNA, 12 nt, Human
ucagagccugca

SEQ ID NO: 1927551 - RNA, 23 nt, Human
ucagagagggugggagugggccc

SEQ ID NO: 1927552 - RNA, 16 nt, Human
ucagagagggugggag

SEQ ID NO: 1927553 - RNA, 21 nt, Human
ucagagagggugggagugggc

SEQ ID NO: 1927554 - RNA, 17 nt, Human
ucagaaucucucuucuu

SEQ ID NO: 1927555 - RNA, 18 nt, Human
ucagaaucucaaauaacu

SEQ ID NO: 1927556 - RNA, 19 nt, Human
ucagaaucucaaauaacua

SEQ ID NO: 1927557 - RNA, 21 nt, Human
ucagagacuccugcaggcagc

SEQ ID NO: 1927558 - RNA, 17 nt, Human
ucagagacuccugcagg

SEQ ID NO: 1927559 - RNA, 20 nt, Human
ucagagacuccugcaggcag

SEQ ID NO: 1927560 - RNA, 11 nt, Human
accauguacau

SEQ ID NO: 1927561 - RNA, 17 nt, Human
accauguacaugaagaa

SEQ ID NO: 1927562 - RNA, 22 nt, Human
accauggucggaaaacaugcua

SEQ ID NO: 1927563 - RNA, 18 nt, Human
ucacucuucucagccacu

SEQ ID NO: 1927564 - RNA, 17 nt, Human
ucacucuucucagccac

SEQ ID NO: 1927565 - RNA, 23 nt, Human
ucacucuuauugcccacgcugga

SEQ ID NO: 1927566 - RNA, 21 nt, Human
ucacucuuauugcccacgcug

SEQ ID NO: 1927567 - RNA, 13 nt, Human
ucacucuuggagc

SEQ ID NO: 1927568 - RNA, 13 nt, Human
ucacucuucucag

SEQ ID NO: 1927569 - RNA, 14 nt, Human
ucacucuucucagc

SEQ ID NO: 1927570 - RNA, 16 nt, Human
accauugaaggcuuaa

SEQ ID NO: 1927571 - RNA, 15 nt, Human
accauugaacuguac

SEQ ID NO: 1927572 - RNA, 21 nt, Human
accauucagugauuacuguca

SEQ ID NO: 1927573 - RNA, 13 nt, Human
accauugaaggcu

SEQ ID NO: 1927574 - RNA, 18 nt, Human
accauuaugaagaagaga

SEQ ID NO: 1927575 - RNA, 20 nt, Human
accauguuuguggcuauuaa

SEQ ID NO: 1927576 - RNA, 17 nt, Human
acccagacggcuccacu

SEQ ID NO: 1927577 - RNA, 22 nt, Human
acccagaccuguuagcagacag

SEQ ID NO: 1927578 - RNA, 21 nt, Human
acccagacggcuccacuagga

SEQ ID NO: 1927579 - RNA, 22 nt, Human
acccagacggcuccacuaggac

SEQ ID NO: 1927580 - RNA, 15 nt, Human
acccagacucagaca

SEQ ID NO: 1927581 - RNA, 11 nt, Human
acccacugcuu

SEQ ID NO: 1927582 - RNA, 15 nt, Human
acccacugcucuggu

SEQ ID NO: 1927583 - RNA, 14 nt, Human
acccacugcucugg

SEQ ID NO: 1927584 - RNA, 13 nt, Human
acccacugcucug

SEQ ID NO: 1927585 - RNA, 23 nt, Human
accauuucuugagguaaaagcau

SEQ ID NO: 1927586 - RNA, 11 nt, Human
acccacugcuc

SEQ ID NO: 1927587 - RNA, 10 nt, Human
acccacugcu

SEQ ID NO: 1927588 - RNA, 16 nt, Human
acccccaaauuuucuu

SEQ ID NO: 1927589 - RNA, 20 nt, Human
accccaggcugaagcagguu

SEQ ID NO: 1927590 - RNA, 23 nt, Human
accccagcuggggccaggcuggg

SEQ ID NO: 1927591 - RNA, 24 nt, Human
acccagcgagcccugguggcagug

SEQ ID NO: 1927592 - RNA, 17 nt, Human
acccaggaguguggcca

SEQ ID NO: 1927593 - RNA, 19 nt, Human
acccaggcuagagugcaau

SEQ ID NO: 1927594 - RNA, 22 nt, Human
ucagccaagaauucuuaaauau

SEQ ID NO: 1927595 - RNA, 14 nt, Human
ucagccagggccug

SEQ ID NO: 1927596 - RNA, 18 nt, Human
ucagcauugauauuugug

SEQ ID NO: 1927597 - RNA, 23 nt, Human
acccagcgagcccugguggcagu

SEQ ID NO: 1927598 - RNA, 19 nt, Human
acccagcgagcccuggugg

SEQ ID NO: 1927599 - RNA, 23 nt, Human
ucagccguguaaccauggaccca

SEQ ID NO: 1927600 - RNA, 22 nt, Human
ucagcccaaaccaccagaagcc

SEQ ID NO: 1927601 - RNA, 21 nt, Human
ucagcccaaaccaccagaagc

SEQ ID NO: 1927602 - RNA, 14 nt, Human
ucagcggggacagc

SEQ ID NO: 1927603 - RNA, 20 nt, Human
ucagcuuguaaauagcucag

SEQ ID NO: 1927604 - RNA, 12 nt, Human
ucagcucaugga

SEQ ID NO: 1927605 - RNA, 15 nt, Human
accccuucgcuccug

SEQ ID NO: 1927606 - RNA, 14 nt, Human
accccuucgcuccu

SEQ ID NO: 1927607 - RNA, 16 nt, Human
accccuucgcuccugu

SEQ ID NO: 1927608 - RNA, 14 nt, Human
ucagccuugccaga

SEQ ID NO: 1927609 - RNA, 15 nt, Human
ucagccuugccagag

SEQ ID NO: 1927610 - RNA, 16 nt, Human
ucagccuugccagaga

SEQ ID NO: 1927611 - RNA, 17 nt, Human
ucagccuugccagagau

SEQ ID NO: 1927612 - RNA, 12 nt, Human
acccccacccaa

SEQ ID NO: 1927613 - RNA, 14 nt, Human
accccccagcacug

SEQ ID NO: 1927614 - RNA, 13 nt, Human
accccccagcacu

SEQ ID NO: 1927615 - RNA, 19 nt, Human
accccccagcacugaggaa

SEQ ID NO: 1927616 - RNA, 17 nt, Human
accccccagcacugagg

SEQ ID NO: 1927617 - RNA, 15 nt, Human
accccccagcacuga

SEQ ID NO: 1927618 - RNA, 13 nt, Human
acccccgcccccu

SEQ ID NO: 1927619 - RNA, 22 nt, Human
accccugguucucaucuuucuu

SEQ ID NO: 1927620 - RNA, 20 nt, Human
accccugguucucaucuuuc

SEQ ID NO: 1927621 - RNA, 16 nt, Human
accccugguucucauc

SEQ ID NO: 1927622 - RNA, 15 nt, Human
accccugguucucau

SEQ ID NO: 1927623 - RNA, 14 nt, Human
accccugguucuca

SEQ ID NO: 1927624 - RNA, 22 nt, Human
ucaaaggagagucacagaacaa

SEQ ID NO: 1927625 - RNA, 14 nt, Human
ucaaaggccagacc

SEQ ID NO: 1927626 - RNA, 18 nt, Human
ucaaagcugcuuuauuca

SEQ ID NO: 1927627 - RNA, 12 nt, Human
ucaaaggccaga

SEQ ID NO: 1927628 - RNA, 14 nt, Human
ucaaagcugaaaug

SEQ ID NO: 1927629 - RNA, 15 nt, Human
ucaaagccacacucu

SEQ ID NO: 1927630 - RNA, 19 nt, Human
ucaaacaaacucucugaac

SEQ ID NO: 1927631 - RNA, 16 nt, Human
acaugaagaagcuaaa

SEQ ID NO: 1927632 - RNA, 13 nt, Human
acaugaagaagcu

SEQ ID NO: 1927633 - RNA, 18 nt, Human
ucaaauaacuaaaaggua

SEQ ID NO: 1927634 - RNA, 20 nt, Human
acaugagcaucaggccaggc

SEQ ID NO: 1927635 - RNA, 22 nt, Human
acaugcuacacacugcauguuu

SEQ ID NO: 1927636 - RNA, 15 nt, Human
acaugaucuucuuua

SEQ ID NO: 1927637 - RNA, 17 nt, Human
acaugaucuucuuuaua

SEQ ID NO: 1927638 - RNA, 17 nt, Human
acaugagcaucaggcca

SEQ ID NO: 1927639 - RNA, 18 nt, Human
acaugagcaucaggccag

SEQ ID NO: 1927640 - RNA, 19 nt, Human
acaugagcaucaggccagg

SEQ ID NO: 1927641 - RNA, 19 nt, Human
acaugauccugcaauucca

SEQ ID NO: 1927642 - RNA, 16 nt, Human
ucaaaauuguuacaaa

SEQ ID NO: 1927643 - RNA, 19 nt, Human
ucaaaauuguuacaaauug

SEQ ID NO: 1927644 - RNA, 12 nt, Human
ucaaaaugcuuu

SEQ ID NO: 1927645 - RNA, 17 nt, Human
ucaaaaugcuuuuuauu

SEQ ID NO: 1927646 - RNA, 19 nt, Human
ucaaaaugcuuuuuauuuc

SEQ ID NO: 1927647 - RNA, 18 nt, Human
ucaaaagaaagaaaauca

SEQ ID NO: 1927648 - RNA, 13 nt, Human
uauuuuuauuugu

SEQ ID NO: 1927649 - RNA, 17 nt, Human
uauuuuuaauuaaauaa

SEQ ID NO: 1927650 - RNA, 17 nt, Human
uauuuguguauuuaaca

SEQ ID NO: 1927651 - RNA, 18 nt, Human
uauuuguguauuuaacag

SEQ ID NO: 1927652 - RNA, 13 nt, Human
uauuuguguauuu

SEQ ID NO: 1927653 - RNA, 15 nt, Human
uauuuguguauuuaa

SEQ ID NO: 1927654 - RNA, 16 nt, Human
uauuuguaaauuuaug

SEQ ID NO: 1927655 - RNA, 22 nt, Human
uauuuguaaauuuaugugaugg

SEQ ID NO: 1927656 - RNA, 17 nt, Human
uauuuguaaauuuaugu

SEQ ID NO: 1927657 - RNA, 18 nt, Human
uauuugugauagcacuuu

SEQ ID NO: 1927658 - RNA, 13 nt, Human
uauuugugcauuu

SEQ ID NO: 1927659 - RNA, 17 nt, Human
uauuugugcauuuucua

SEQ ID NO: 1927660 - RNA, 13 nt, Human
acauucaggagcu

SEQ ID NO: 1927661 - RNA, 13 nt, Human
acauucaccugcc

SEQ ID NO: 1927662 - RNA, 14 nt, Human
acauucaccugccc

SEQ ID NO: 1927663 - RNA, 20 nt, Human
acauucaccugccccaacuc

SEQ ID NO: 1927664 - RNA, 21 nt, Human
acauguccaagaagcccagga

SEQ ID NO: 1927665 - RNA, 16 nt, Human
ucaacagguuuuccug

SEQ ID NO: 1927666 - RNA, 17 nt, Human
ucaaauuucuaaaucuc

SEQ ID NO: 1927667 - RNA, 12 nt, Human
acauucuguuaa

SEQ ID NO: 1927668 - RNA, 16 nt, Human
ucaaauuucuaaaucu

SEQ ID NO: 1927669 - RNA, 15 nt, Human
ucaaauuucuaaauc

SEQ ID NO: 1927670 - RNA, 15 nt, Human
acauucuguuaauca

SEQ ID NO: 1927671 - RNA, 13 nt, Human
acauucuuaaaaa

SEQ ID NO: 1927672 - RNA, 14 nt, Human
ucaaauuucuaaau

SEQ ID NO: 1927673 - RNA, 16 nt, Human
ucaagaucaaugaaau

SEQ ID NO: 1927674 - RNA, 22 nt, Human
ucaagaucaaugaaaugauguc

SEQ ID NO: 1927675 - RNA, 21 nt, Human
ucaagauacugcuacuguaau

SEQ ID NO: 1927676 - RNA, 22 nt, Human
ucaagauacugcuacuguaauu

SEQ ID NO: 1927677 - RNA, 15 nt, Human
ucaagauucccagga

SEQ ID NO: 1927678 - RNA, 17 nt, Human
ucaaggcugcuuagaau

SEQ ID NO: 1927679 - RNA, 18 nt, Human
ucaaggcugcuuagaauc

SEQ ID NO: 1927680 - RNA, 11 nt, Human
ucaaguauuau

SEQ ID NO: 1927681 - RNA, 15 nt, Human
ucaaguauuauaccu

SEQ ID NO: 1927682 - RNA, 13 nt, Human
ucaaguagcauuu

SEQ ID NO: 1927683 - RNA, 21 nt, Human
ucaaguauuauaccuuuuuua

SEQ ID NO: 1927684 - RNA, 16 nt, Human
ucaaguauuauaccuu

SEQ ID NO: 1927685 - RNA, 23 nt, Human
ucaaguauuauaccuuuuuuaga

SEQ ID NO: 1927686 - RNA, 12 nt, Human
ucaaguauuugg

SEQ ID NO: 1927687 - RNA, 15 nt, Human
ucaagacuuccagag

SEQ ID NO: 1927688 - RNA, 22 nt, Human
ucaagaaauaaaaggaagccaa

SEQ ID NO: 1927689 - RNA, 20 nt, Human
ucaagaaauaaaaggaagcc

SEQ ID NO: 1927690 - RNA, 21 nt, Human
ucaagaaauaaaaggaagcca

SEQ ID NO: 1927691 - RNA, 12 nt, Human
ucaacaucuuuu

SEQ ID NO: 1927692 - RNA, 14 nt, Human
ucaacauucuuugc

SEQ ID NO: 1927693 - RNA, 18 nt, Human
acauaugcaccuuguguc

SEQ ID NO: 1927694 - RNA, 17 nt, Human
acauaugcaccuugugu

SEQ ID NO: 1927695 - RNA, 16 nt, Human
acauaugcaccuugug

SEQ ID NO: 1927696 - RNA, 15 nt, Human
acauaugcaccuugu

SEQ ID NO: 1927697 - RNA, 20 nt, Human
acauaugcaccuugugucug

SEQ ID NO: 1927698 - RNA, 19 nt, Human
acauaugcaccuugugucu

SEQ ID NO: 1927699 - RNA, 23 nt, Human
acauauggacucugcacaugaau

SEQ ID NO: 1927700 - RNA, 14 nt, Human
acauaugaggggga

SEQ ID NO: 1927701 - RNA, 16 nt, Human
acauaucuuuauuaau

SEQ ID NO: 1927702 - RNA, 18 nt, Human
acauaucuuuauuaauca

SEQ ID NO: 1927703 - RNA, 19 nt, Human
acauaucuuuauuaaucac

SEQ ID NO: 1927704 - RNA, 15 nt, Human
acauaucuuuauuaa

SEQ ID NO: 1927705 - RNA, 16 nt, Human
acauauugauuuccgu

SEQ ID NO: 1927706 - RNA, 14 nt, Human
acauauugauuucc

SEQ ID NO: 1927707 - RNA, 23 nt, Human
acauauugauuuccguuaaaaua

SEQ ID NO: 1927708 - RNA, 22 nt, Human
acauauugauuuccguuaaaau

SEQ ID NO: 1927709 - RNA, 18 nt, Human
acauauugauuuccguua

SEQ ID NO: 1927710 - RNA, 23 nt, Human
acauauaauguuguuauuuaaag

SEQ ID NO: 1927711 - RNA, 16 nt, Human
acauaggacucaaagu

SEQ ID NO: 1927712 - RNA, 21 nt, Human
acauagcuuacaagccagcug

SEQ ID NO: 1927713 - RNA, 19 nt, Human
acauagcgaauacaaaauu

SEQ ID NO: 1927714 - RNA, 16 nt, Human
acauagcaugacauuu

SEQ ID NO: 1927715 - RNA, 18 nt, Human
acauagcaugacauuucu

SEQ ID NO: 1927716 - RNA, 19 nt, Human
acauagcaugacauuucuu

SEQ ID NO: 1927717 - RNA, 21 nt, Human
acauagcaugacauuucuuug

SEQ ID NO: 1927718 - RNA, 18 nt, Human
acauagaauuaacacaug

SEQ ID NO: 1927719 - RNA, 14 nt, Human
acauagaauuaaca

SEQ ID NO: 1927720 - RNA, 16 nt, Human
acaucaacaucuuggu

SEQ ID NO: 1927721 - RNA, 18 nt, Human
acaucaacaucuugguca

SEQ ID NO: 1927722 - RNA, 18 nt, Human
acaucaacccgagucauu

SEQ ID NO: 1927723 - RNA, 13 nt, Human
acaucaacagaua

SEQ ID NO: 1927724 - RNA, 12 nt, Human
acaucaaagagg

SEQ ID NO: 1927725 - RNA, 23 nt, Human
acaucuauuuuggauuguauauu

SEQ ID NO: 1927726 - RNA, 21 nt, Human
acaucuaagccugaaggggcg

SEQ ID NO: 1927727 - RNA, 14 nt, Human
acaucuauucucuc

SEQ ID NO: 1927728 - RNA, 18 nt, Human
acaucuauuuuggauugu

SEQ ID NO: 1927729 - RNA, 19 nt, Human
acaucuauuuuggauugua

SEQ ID NO: 1927730 - RNA, 14 nt, Human
acaucuugcucugc

SEQ ID NO: 1927731 - RNA, 13 nt, Human
acaucuugcucug

SEQ ID NO: 1927732 - RNA, 12 nt, Human
acaucugauaac

SEQ ID NO: 1927733 - RNA, 12 nt, Human
acaucucugcuu

SEQ ID NO: 1927734 - RNA, 15 nt, Human
acaucucugcuugag

SEQ ID NO: 1927735 - RNA, 19 nt, Human
acaucuugcucugcugaca

SEQ ID NO: 1927736 - RNA, 18 nt, Human
acaucuugcucugcugac

SEQ ID NO: 1927737 - RNA, 21 nt, Human
acaucuugcucugcugacaga

SEQ ID NO: 1927738 - RNA, 17 nt, Human
acaugaaaacacauuuu

SEQ ID NO: 1927739 - RNA, 19 nt, Human
acaugaaaacacauuuuuc

SEQ ID NO: 1927740 - RNA, 18 nt, Human
acaugaaaacacauuuuu

SEQ ID NO: 1927741 - RNA, 23 nt, Human
uauuuccuauauuguuuucagug

SEQ ID NO: 1927742 - RNA, 22 nt, Human
uauuucccucaccuuucccauc

SEQ ID NO: 1927743 - RNA, 22 nt, Human
uauuucccugaaggaaccaaag

SEQ ID NO: 1927744 - RNA, 18 nt, Human
uauuuccauucaacaaga

SEQ ID NO: 1927745 - RNA, 19 nt, Human
uaugaagauaaguguauuu

SEQ ID NO: 1927746 - RNA, 15 nt, Human
uaugaagaagagagu

SEQ ID NO: 1927747 - RNA, 20 nt, Human
acaguugaaaaacagcugag

SEQ ID NO: 1927748 - RNA, 22 nt, Human
acaguucuuugggccagacaug

SEQ ID NO: 1927749 - RNA, 15 nt, Human
acaguugaaaaacag

SEQ ID NO: 1927750 - RNA, 16 nt, Human
acaguugaaaaacagc

SEQ ID NO: 1927751 - RNA, 21 nt, Human
acaguucuuugggccagacau

SEQ ID NO: 1927752 - RNA, 14 nt, Human
acaguugggugaga

SEQ ID NO: 1927753 - RNA, 13 nt, Human
acauacuaaccag

SEQ ID NO: 1927754 - RNA, 16 nt, Human
acauaccuaagcaaac

SEQ ID NO: 1927755 - RNA, 10 nt, Human
acauacauug

SEQ ID NO: 1927756 - RNA, 12 nt, Human
acaguuuuuaaa

SEQ ID NO: 1927757 - RNA, 14 nt, Human
acaguuuuuaaacu

SEQ ID NO: 1927758 - RNA, 13 nt, Human
acauacucccauc

SEQ ID NO: 1927759 - RNA, 22 nt, Human
acauacuaaccagcagaaaugc

SEQ ID NO: 1927760 - RNA, 21 nt, Human
acauacuaaccagcagaaaug

SEQ ID NO: 1927761 - RNA, 17 nt, Human
acauacucccaucugug

SEQ ID NO: 1927762 - RNA, 14 nt, Human
acauacucugcuua

SEQ ID NO: 1927763 - RNA, 15 nt, Human
acauacuugaagggc

SEQ ID NO: 1927764 - RNA, 16 nt, Human
acauacuugaagggcc

SEQ ID NO: 1927765 - RNA, 17 nt, Human
acauacuugaagggcca

SEQ ID NO: 1927766 - RNA, 18 nt, Human
acauacuugaagggccag

SEQ ID NO: 1927767 - RNA, 19 nt, Human
acauacuugaagggccaga

SEQ ID NO: 1927768 - RNA, 20 nt, Human
acauacuugaagggccagag

SEQ ID NO: 1927769 - RNA, 21 nt, Human
acauacuugaagggccagagc

SEQ ID NO: 1927770 - RNA, 22 nt, Human
acauacuugaagggccagagcc

SEQ ID NO: 1927771 - RNA, 23 nt, Human
acauacuugaagggccagagcca

SEQ ID NO: 1927772 - RNA, 20 nt, Human
acaguuuguuaguaugaggc

SEQ ID NO: 1927773 - RNA, 16 nt, Human
acaguuuguuaguaug

SEQ ID NO: 1927774 - RNA, 15 nt, Human
acaguuuuuauugcu

SEQ ID NO: 1927775 - RNA, 13 nt, Human
acaguuuugugaa

SEQ ID NO: 1927776 - RNA, 22 nt, Human
accugccacccugggccuggca

SEQ ID NO: 1927777 - RNA, 12 nt, Human
accugccaggaa

SEQ ID NO: 1927778 - RNA, 14 nt, Human
accugccaggaagc

SEQ ID NO: 1927779 - RNA, 15 nt, Human
accugccaggaagcc

SEQ ID NO: 1927780 - RNA, 18 nt, Human
uccaaccccccagcacug

SEQ ID NO: 1927781 - RNA, 17 nt, Human
uccaaccccccagcacu

SEQ ID NO: 1927782 - RNA, 14 nt, Human
uccaaccccccagc

SEQ ID NO: 1927783 - RNA, 23 nt, Human
uccaacccucaucaccaacgucu

SEQ ID NO: 1927784 - RNA, 16 nt, Human
uccaacccucaucacc

SEQ ID NO: 1927785 - RNA, 17 nt, Human
uccaacccucaucacca

SEQ ID NO: 1927786 - RNA, 14 nt, Human
uccaacccucauca

SEQ ID NO: 1927787 - RNA, 22 nt, Human
uccaaccccccagcacugagga

SEQ ID NO: 1927788 - RNA, 21 nt, Human
uccaaccccccagcacugagg

SEQ ID NO: 1927789 - RNA, 20 nt, Human
uccaaccccccagcacugag

SEQ ID NO: 1927790 - RNA, 19 nt, Human
uccaaccccccagcacuga

SEQ ID NO: 1927791 - RNA, 23 nt, Human
uccaaccccccagcacugaggaa

SEQ ID NO: 1927792 - RNA, 21 nt, Human
uccaagcuggucccacucagu

SEQ ID NO: 1927793 - RNA, 19 nt, Human
uccaaguccacaguggaac

SEQ ID NO: 1927794 - RNA, 20 nt, Human
uccaagcuggucccacucag

SEQ ID NO: 1927795 - RNA, 16 nt, Human
uccaagcuggucccac

SEQ ID NO: 1927796 - RNA, 12 nt, Human
uccaagaagccc

SEQ ID NO: 1927797 - RNA, 21 nt, Human
uccaaccuggggggcaguggu

SEQ ID NO: 1927798 - RNA, 21 nt, Human
uccaaccugcaaagaucuguc

SEQ ID NO: 1927799 - RNA, 13 nt, Human
uccaaccuuccca

SEQ ID NO: 1927800 - RNA, 15 nt, Human
uccacccaggagccc

SEQ ID NO: 1927801 - RNA, 14 nt, Human
uccacccaggagcc

SEQ ID NO: 1927802 - RNA, 12 nt, Human
uccacccaggag

SEQ ID NO: 1927803 - RNA, 19 nt, Human
uccacccaccucagccucc

SEQ ID NO: 1927804 - RNA, 18 nt, Human
uccacccaccucagccuc

SEQ ID NO: 1927805 - RNA, 17 nt, Human
uccacccaccucagccu

SEQ ID NO: 1927806 - RNA, 14 nt, Human
accuggccucugca

SEQ ID NO: 1927807 - RNA, 17 nt, Human
accuggcagcucuggac

SEQ ID NO: 1927808 - RNA, 16 nt, Human
accuggccucugcacu

SEQ ID NO: 1927809 - RNA, 17 nt, Human
accuggccucugcacuc

SEQ ID NO: 1927810 - RNA, 14 nt, Human
accuggcagcucug

SEQ ID NO: 1927811 - RNA, 23 nt, Human
accuggccucugcacuccccugc

SEQ ID NO: 1927812 - RNA, 18 nt, Human
accuggccucugcacucc

SEQ ID NO: 1927813 - RNA, 20 nt, Human
accuggccucugcacucccc

SEQ ID NO: 1927814 - RNA, 19 nt, Human
accuguuucugcagccacu

SEQ ID NO: 1927815 - RNA, 16 nt, Human
accuguuuuuaagcug

SEQ ID NO: 1927816 - RNA, 18 nt, Human
accuguuuuuaagcuguu

SEQ ID NO: 1927817 - RNA, 19 nt, Human
accuguuuuuaagcuguuu

SEQ ID NO: 1927818 - RNA, 20 nt, Human
accuguuuuuaagcuguuuc

SEQ ID NO: 1927819 - RNA, 18 nt, Human
accuguuuuuuuucuuuu

SEQ ID NO: 1927820 - RNA, 18 nt, Human
accuuagacagucccugc

SEQ ID NO: 1927821 - RNA, 19 nt, Human
accuuagacagucccugcc

SEQ ID NO: 1927822 - RNA, 20 nt, Human
accuuagacagucccugcca

SEQ ID NO: 1927823 - RNA, 14 nt, Human
acgagaaaacaaua

SEQ ID NO: 1927824 - RNA, 22 nt, Human
accuuuuuuauacauaaacaag

SEQ ID NO: 1927825 - RNA, 21 nt, Human
accuuuuuuauacauaaacaa

SEQ ID NO: 1927826 - RNA, 21 nt, Human
uccaggcuguaucccaugagc

SEQ ID NO: 1927827 - RNA, 20 nt, Human
accuuuuuuauacauaaaca

SEQ ID NO: 1927828 - RNA, 19 nt, Human
accuuuuuuauacauaaac

SEQ ID NO: 1927829 - RNA, 16 nt, Human
acgagcaggcuucuuc

SEQ ID NO: 1927830 - RNA, 19 nt, Human
acgccagauucuuuccuga

SEQ ID NO: 1927831 - RNA, 17 nt, Human
acgccagauucuuuccu

SEQ ID NO: 1927832 - RNA, 14 nt, Human
uccagccccuggau

SEQ ID NO: 1927833 - RNA, 13 nt, Human
uccagccccugga

SEQ ID NO: 1927834 - RNA, 13 nt, Human
uccaggcagaucc

SEQ ID NO: 1927835 - RNA, 12 nt, Human
uccagccccugg

SEQ ID NO: 1927836 - RNA, 14 nt, Human
uccaggcuguaucc

SEQ ID NO: 1927837 - RNA, 18 nt, Human
uccaggccagggggccag

SEQ ID NO: 1927838 - RNA, 16 nt, Human
uccaggccagggggcc

SEQ ID NO: 1927839 - RNA, 14 nt, Human
uccaggcagaucca

SEQ ID NO: 1927840 - RNA, 15 nt, Human
uccaggcagauccag

SEQ ID NO: 1927841 - RNA, 16 nt, Human
uccaggcagauccagg

SEQ ID NO: 1927842 - RNA, 17 nt, Human
uccaggcagauccagga

SEQ ID NO: 1927843 - RNA, 18 nt, Human
uccaggcagauccaggac

SEQ ID NO: 1927844 - RNA, 19 nt, Human
uccaggcagauccaggacu

SEQ ID NO: 1927845 - RNA, 20 nt, Human
uccaggcagauccaggacua

SEQ ID NO: 1927846 - RNA, 21 nt, Human
uccaggcagauccaggacuau

SEQ ID NO: 1927847 - RNA, 14 nt, Human
accuuuugagugcc

SEQ ID NO: 1927848 - RNA, 17 nt, Human
accuuuugagugccuua

SEQ ID NO: 1927849 - RNA, 20 nt, Human
accuuuugagugccuuacac

SEQ ID NO: 1927850 - RNA, 20 nt, Human
accuuauuguaccucucuua

SEQ ID NO: 1927851 - RNA, 22 nt, Human
accuuauuguaccucucuuaua

SEQ ID NO: 1927852 - RNA, 17 nt, Human
accuuauuuaaguaacu

SEQ ID NO: 1927853 - RNA, 14 nt, Human
accuuauuguaccu

SEQ ID NO: 1927854 - RNA, 17 nt, Human
accuuauuguaccucuc

SEQ ID NO: 1927855 - RNA, 18 nt, Human
accuuauuguaccucucu

SEQ ID NO: 1927856 - RNA, 22 nt, Human
accuuuugggaauguuuuaaau

SEQ ID NO: 1927857 - RNA, 16 nt, Human
accuuuugggaauguu

SEQ ID NO: 1927858 - RNA, 19 nt, Human
accuuuugggaauguuuua

SEQ ID NO: 1927859 - RNA, 17 nt, Human
uccacucaggucuguuu

SEQ ID NO: 1927860 - RNA, 15 nt, Human
uccacucaguugcaa

SEQ ID NO: 1927861 - RNA, 18 nt, Human
uccacuccuccuagccac

SEQ ID NO: 1927862 - RNA, 15 nt, Human
uccacuccuccuagc

SEQ ID NO: 1927863 - RNA, 18 nt, Human
uccagacccggcugcgug

SEQ ID NO: 1927864 - RNA, 15 nt, Human
uccagacccggcugc

SEQ ID NO: 1927865 - RNA, 19 nt, Human
uccagacccggcugcgugg

SEQ ID NO: 1927866 - RNA, 11 nt, Human
uccagaccuga

SEQ ID NO: 1927867 - RNA, 14 nt, Human
uccagagacuggga

SEQ ID NO: 1927868 - RNA, 14 nt, Human
uccagacuuccuug

SEQ ID NO: 1927869 - RNA, 19 nt, Human
uccagacuuccuugagaca

SEQ ID NO: 1927870 - RNA, 20 nt, Human
uccagacuuccuugagacac

SEQ ID NO: 1927871 - RNA, 13 nt, Human
uccagaccugauc

SEQ ID NO: 1927872 - RNA, 18 nt, Human
uccagaccugauccugga

SEQ ID NO: 1927873 - RNA, 19 nt, Human
uccagaccugauccuggag

SEQ ID NO: 1927874 - RNA, 22 nt, Human
uccagaccugauccuggaggcc

SEQ ID NO: 1927875 - RNA, 16 nt, Human
uccagaauuucccaaa

SEQ ID NO: 1927876 - RNA, 21 nt, Human
uccacuccuccuagccaccca

SEQ ID NO: 1927877 - RNA, 20 nt, Human
uccagaauuucccaaagcag

SEQ ID NO: 1927878 - RNA, 22 nt, Human
uccagaauuucccaaagcagug

SEQ ID NO: 1927879 - RNA, 13 nt, Human
uccagacacaugu

SEQ ID NO: 1927880 - RNA, 14 nt, Human
uccagacccggcug

SEQ ID NO: 1927881 - RNA, 18 nt, Human
uccacuggggauugggcc

SEQ ID NO: 1927882 - RNA, 20 nt, Human
accuacaguguacagucuug

SEQ ID NO: 1927883 - RNA, 18 nt, Human
accuacaguguacagucu

SEQ ID NO: 1927884 - RNA, 17 nt, Human
accuacaguguacaguc

SEQ ID NO: 1927885 - RNA, 16 nt, Human
accuacaguguacagu

SEQ ID NO: 1927886 - RNA, 15 nt, Human
accuacaguguacag

SEQ ID NO: 1927887 - RNA, 20 nt, Human
accuaaugcuccuuguuccu

SEQ ID NO: 1927888 - RNA, 22 nt, Human
accuaauccaggcagauccagg

SEQ ID NO: 1927889 - RNA, 22 nt, Human
accucaaagcaccugaacaguu

SEQ ID NO: 1927890 - RNA, 12 nt, Human
ucaggaagcuca

SEQ ID NO: 1927891 - RNA, 13 nt, Human
ucaggaagcucag

SEQ ID NO: 1927892 - RNA, 14 nt, Human
ucaggaagcucagg

SEQ ID NO: 1927893 - RNA, 15 nt, Human
ucaggaagcucaggg

SEQ ID NO: 1927894 - RNA, 16 nt, Human
accuaaauaaccaauc

SEQ ID NO: 1927895 - RNA, 20 nt, Human
accgcgacuaauuucaaaau

SEQ ID NO: 1927896 - RNA, 16 nt, Human
accgcgacuaauuuca

SEQ ID NO: 1927897 - RNA, 17 nt, Human
accgcgacuaauuucaa

SEQ ID NO: 1927898 - RNA, 12 nt, Human
accuccugccuc

SEQ ID NO: 1927899 - RNA, 13 nt, Human
accuccugccucg

SEQ ID NO: 1927900 - RNA, 13 nt, Human
accucccugccuc

SEQ ID NO: 1927901 - RNA, 14 nt, Human
accucccugccucc

SEQ ID NO: 1927902 - RNA, 22 nt, Human
accucaacccccauuucuauuu

SEQ ID NO: 1927903 - RNA, 16 nt, Human
accucaaccaaugcca

SEQ ID NO: 1927904 - RNA, 19 nt, Human
accucaacccccauuucua

SEQ ID NO: 1927905 - RNA, 21 nt, Human
accucaacccccauuucuauu

SEQ ID NO: 1927906 - RNA, 11 nt, Human
accuccugcug

SEQ ID NO: 1927907 - RNA, 12 nt, Human
accuccugcugg

SEQ ID NO: 1927908 - RNA, 23 nt, Human
accuccugccucgaacuggcugc

SEQ ID NO: 1927909 - RNA, 17 nt, Human
ucauccccucacuugcc

SEQ ID NO: 1927910 - RNA, 15 nt, Human
ucauccuaagcuauu

SEQ ID NO: 1927911 - RNA, 18 nt, Human
ucauccuauucuuucgaa

SEQ ID NO: 1927912 - RNA, 14 nt, Human
ucauccuucuggaa

SEQ ID NO: 1927913 - RNA, 13 nt, Human
ucauccugcaggc

SEQ ID NO: 1927914 - RNA, 12 nt, Human
ucauccugcagg

SEQ ID NO: 1927915 - RNA, 18 nt, Human
ucauccucauacccaccc

SEQ ID NO: 1927916 - RNA, 13 nt, Human
ucauccuccucag

SEQ ID NO: 1927917 - RNA, 19 nt, Human
ucauccuccucagaucuuc

SEQ ID NO: 1927918 - RNA, 18 nt, Human
ucaucuagguaaauuaca

SEQ ID NO: 1927919 - RNA, 14 nt, Human
ucaucuaggauuuu

SEQ ID NO: 1927920 - RNA, 22 nt, Human
ucauccuucuggaauaaggaga

SEQ ID NO: 1927921 - RNA, 12 nt, Human
ucauucuucugu

SEQ ID NO: 1927922 - RNA, 17 nt, Human
ucauucuugaaagcugu

SEQ ID NO: 1927923 - RNA, 18 nt, Human
ucauucuugaaagcugug

SEQ ID NO: 1927924 - RNA, 12 nt, Human
ucauugaaaucu

SEQ ID NO: 1927925 - RNA, 13 nt, Human
ucauugaaaucuu

SEQ ID NO: 1927926 - RNA, 13 nt, Human
ucauuaauucuau

SEQ ID NO: 1927927 - RNA, 14 nt, Human
ucauuaauucuaua

SEQ ID NO: 1927928 - RNA, 13 nt, Human
ucauuaccacagg

SEQ ID NO: 1927929 - RNA, 14 nt, Human
accuccugcugggc

SEQ ID NO: 1927930 - RNA, 16 nt, Human
accuccugcugggcag

SEQ ID NO: 1927931 - RNA, 13 nt, Human
accuccugcuggg

SEQ ID NO: 1927932 - RNA, 23 nt, Human
ucauugcugagccucugcucccc

SEQ ID NO: 1927933 - RNA, 17 nt, Human
ucauugcugagccucug

SEQ ID NO: 1927934 - RNA, 22 nt, Human
ucauugcugagccucugcuccc

SEQ ID NO: 1927935 - RNA, 13 nt, Human
accuccugggcua

SEQ ID NO: 1927936 - RNA, 19 nt, Human
accucggugccuuccucuu

SEQ ID NO: 1927937 - RNA, 22 nt, Human
accuccuuucaagguaacugua

SEQ ID NO: 1927938 - RNA, 18 nt, Human
accucuaaaacaguccuu

SEQ ID NO: 1927939 - RNA, 22 nt, Human
ucauugaaaucuuuuugcuuug

SEQ ID NO: 1927940 - RNA, 12 nt, Human
ucauugaccuga

SEQ ID NO: 1927941 - RNA, 14 nt, Human
ucauugaccugagg

SEQ ID NO: 1927942 - RNA, 15 nt, Human
ucauugaccugaggc

SEQ ID NO: 1927943 - RNA, 18 nt, Human
ucauugaauuauaaaagc

SEQ ID NO: 1927944 - RNA, 20 nt, Human
ucauugaauuauaaaagcca

SEQ ID NO: 1927945 - RNA, 15 nt, Human
ucauugcugagccuc

SEQ ID NO: 1927946 - RNA, 16 nt, Human
ucauugcugagccucu

SEQ ID NO: 1927947 - RNA, 15 nt, Human
accugauugugucuc

SEQ ID NO: 1927948 - RNA, 17 nt, Human
accugauugugucucuu

SEQ ID NO: 1927949 - RNA, 18 nt, Human
accugauugugucucuug

SEQ ID NO: 1927950 - RNA, 22 nt, Human
accugaggcccuucucuccagc

SEQ ID NO: 1927951 - RNA, 15 nt, Human
accugaggcccuucu

SEQ ID NO: 1927952 - RNA, 16 nt, Human
accugaggcccuucuc

SEQ ID NO: 1927953 - RNA, 20 nt, Human
accugaggcccuucucucca

SEQ ID NO: 1927954 - RNA, 21 nt, Human
accugaggcccuucucuccag

SEQ ID NO: 1927955 - RNA, 14 nt, Human
accugaggcccuuc

SEQ ID NO: 1927956 - RNA, 19 nt, Human
accugacguagcugcaaag

SEQ ID NO: 1927957 - RNA, 13 nt, Human
accucucccaggg

SEQ ID NO: 1927958 - RNA, 14 nt, Human
accucuaaauucuu

SEQ ID NO: 1927959 - RNA, 17 nt, Human
acuaacauauaauguug

SEQ ID NO: 1927960 - RNA, 15 nt, Human
acuaacauauaaugu

SEQ ID NO: 1927961 - RNA, 12 nt, Human
acuaaccacgcu

SEQ ID NO: 1927962 - RNA, 21 nt, Human
acuacaaacaaaauuucuauu

SEQ ID NO: 1927963 - RNA, 22 nt, Human
acuacaaacaaaauuucuauua

SEQ ID NO: 1927964 - RNA, 11 nt, Human
acuacaaauca

SEQ ID NO: 1927965 - RNA, 13 nt, Human
acuacaaaucaag

SEQ ID NO: 1927966 - RNA, 19 nt, Human
acuacaaaucaaguauuug

SEQ ID NO: 1927967 - RNA, 11 nt, Human
acuacaggcac

SEQ ID NO: 1927968 - RNA, 22 nt, Human
acuacaauuuaaagcaaaggag

SEQ ID NO: 1927969 - RNA, 17 nt, Human
acuacaauuuaaagcaa

SEQ ID NO: 1927970 - RNA, 15 nt, Human
acuacaggcacccac

SEQ ID NO: 1927971 - RNA, 14 nt, Human
acuacaguuuguua

SEQ ID NO: 1927972 - RNA, 13 nt, Human
acuacaguuuguu

SEQ ID NO: 1927973 - RNA, 17 nt, Human
ucccagcugugcucugg

SEQ ID NO: 1927974 - RNA, 12 nt, Human
ucccagccccaa

SEQ ID NO: 1927975 - RNA, 14 nt, Human
acuacauucuguua

SEQ ID NO: 1927976 - RNA, 23 nt, Human
ucccagauuggcucacacugaga

SEQ ID NO: 1927977 - RNA, 12 nt, Human
ucccagcaauuu

SEQ ID NO: 1927978 - RNA, 16 nt, Human
ucccagcacuuuggga

SEQ ID NO: 1927979 - RNA, 18 nt, Human
ucccagcacuuugggagg

SEQ ID NO: 1927980 - RNA, 19 nt, Human
ucccagcacuuugggaggc

SEQ ID NO: 1927981 - RNA, 13 nt, Human
acuacauucuguu

SEQ ID NO: 1927982 - RNA, 12 nt, Human
acuacauucugu

SEQ ID NO: 1927983 - RNA, 11 nt, Human
acuacauucug

SEQ ID NO: 1927984 - RNA, 15 nt, Human
acuacaguuuguuag

SEQ ID NO: 1927985 - RNA, 21 nt, Human
uccccaccagugaaugaaagu

SEQ ID NO: 1927986 - RNA, 13 nt, Human
uccccaccaguga

SEQ ID NO: 1927987 - RNA, 15 nt, Human
ucccauccccugugg

SEQ ID NO: 1927988 - RNA, 18 nt, Human
ucccauccucuucuuuua

SEQ ID NO: 1927989 - RNA, 13 nt, Human
ucccauccagggc

SEQ ID NO: 1927990 - RNA, 14 nt, Human
ucccauccagggcc

SEQ ID NO: 1927991 - RNA, 15 nt, Human
ucccaucacccgcua

SEQ ID NO: 1927992 - RNA, 22 nt, Human
ucccauaugccugggcagaagg

SEQ ID NO: 1927993 - RNA, 15 nt, Human
acuacauucuguuaa

SEQ ID NO: 1927994 - RNA, 15 nt, Human
uccccauggagccag

SEQ ID NO: 1927995 - RNA, 16 nt, Human
uccccauggagccagc

SEQ ID NO: 1927996 - RNA, 22 nt, Human
uccccaccgcagacaggaccag

SEQ ID NO: 1927997 - RNA, 19 nt, Human
uccccaucuucuaaaccca

SEQ ID NO: 1927998 - RNA, 13 nt, Human
uccccauggagcc

SEQ ID NO: 1927999 - RNA, 17 nt, Human
uccccaccgcagacagg

SEQ ID NO: 1928000 - RNA, 18 nt, Human
uccccaccgcagacagga

SEQ ID NO: 1928001 - RNA, 21 nt, Human
uccccaccgcagacaggacca

SEQ ID NO: 1928002 - RNA, 17 nt, Human
acgggcagccuggcucc

SEQ ID NO: 1928003 - RNA, 22 nt, Human
acgggcagccuggcucccagga

SEQ ID NO: 1928004 - RNA, 13 nt, Human
ucccacagcgcug

SEQ ID NO: 1928005 - RNA, 20 nt, Human
acgggaggguaaggcugugg

SEQ ID NO: 1928006 - RNA, 16 nt, Human
ucccacaaaggagagc

SEQ ID NO: 1928007 - RNA, 15 nt, Human
ucccaccccacacac

SEQ ID NO: 1928008 - RNA, 20 nt, Human
ucccaccccacacacgccag

SEQ ID NO: 1928009 - RNA, 14 nt, Human
ucccacaaguggug

SEQ ID NO: 1928010 - RNA, 16 nt, Human
ucccacaagugguggu

SEQ ID NO: 1928011 - RNA, 19 nt, Human
acgugggcaaacaggcagu

SEQ ID NO: 1928012 - RNA, 23 nt, Human
acgugggcugggcccacaaaggc

SEQ ID NO: 1928013 - RNA, 20 nt, Human
acgugggcauucaaauguau

SEQ ID NO: 1928014 - RNA, 17 nt, Human
acgugggcauucaaaug

SEQ ID NO: 1928015 - RNA, 18 nt, Human
acguguacuacaauuuaa

SEQ ID NO: 1928016 - RNA, 14 nt, Human
acguuccuaagcug

SEQ ID NO: 1928017 - RNA, 16 nt, Human
acgugggcaaacaggc

SEQ ID NO: 1928018 - RNA, 23 nt, Human
acguggcugcuucaaggauccug

SEQ ID NO: 1928019 - RNA, 20 nt, Human
acguauguuuuuguguauuu

SEQ ID NO: 1928020 - RNA, 16 nt, Human
acguagcugcaaagga

SEQ ID NO: 1928021 - RNA, 20 nt, Human
acguagcugcaaaggacaga

SEQ ID NO: 1928022 - RNA, 22 nt, Human
acguauaaaagccuguuuaaga

SEQ ID NO: 1928023 - RNA, 15 nt, Human
acgguuuuacugcag

SEQ ID NO: 1928024 - RNA, 17 nt, Human
acgguuuuacugcagcu

SEQ ID NO: 1928025 - RNA, 16 nt, Human
ucccaaagcagugcau

SEQ ID NO: 1928026 - RNA, 15 nt, Human
ucccaaacgccuccc

SEQ ID NO: 1928027 - RNA, 21 nt, Human
ucccaaacgccuccccugccc

SEQ ID NO: 1928028 - RNA, 18 nt, Human
ucccaaacccuucagugc

SEQ ID NO: 1928029 - RNA, 23 nt, Human
uccauuuuuucaagguaauuucu

SEQ ID NO: 1928030 - RNA, 14 nt, Human
ucccaaagugcugg

SEQ ID NO: 1928031 - RNA, 13 nt, Human
ucccaaagugcug

SEQ ID NO: 1928032 - RNA, 20 nt, Human
ucccaaguagcugggauuac

SEQ ID NO: 1928033 - RNA, 21 nt, Human
ucccaaguagcugggauuaca

SEQ ID NO: 1928034 - RNA, 21 nt, Human
ucccaaagcagugcaugcugu

SEQ ID NO: 1928035 - RNA, 17 nt, Human
ucccaaagcagugcaug

SEQ ID NO: 1928036 - RNA, 18 nt, Human
ucccaaagcagugcaugc

SEQ ID NO: 1928037 - RNA, 22 nt, Human
acgccagauucuuuccugaggc

SEQ ID NO: 1928038 - RNA, 23 nt, Human
acgccagauucuuuccugaggcu

SEQ ID NO: 1928039 - RNA, 21 nt, Human
uccauccugaggcuccacuug

SEQ ID NO: 1928040 - RNA, 20 nt, Human
uccauccugaggcuccacuu

SEQ ID NO: 1928041 - RNA, 21 nt, Human
uccaugaagauguagaggaga

SEQ ID NO: 1928042 - RNA, 13 nt, Human
uccaugaagaugu

SEQ ID NO: 1928043 - RNA, 16 nt, Human
uccaugaaaaugcaac

SEQ ID NO: 1928044 - RNA, 15 nt, Human
uccaugaaaaugcaa

SEQ ID NO: 1928045 - RNA, 19 nt, Human
uccauucuuucugauaacu

SEQ ID NO: 1928046 - RNA, 12 nt, Human
uccauucuuucu

SEQ ID NO: 1928047 - RNA, 14 nt, Human
uccauucuuucuga

SEQ ID NO: 1928048 - RNA, 18 nt, Human
uccauucuuucugauaac

SEQ ID NO: 1928049 - RNA, 19 nt, Human
uccauucucaccuauccac

SEQ ID NO: 1928050 - RNA, 12 nt, Human
acucaccccagc

SEQ ID NO: 1928051 - RNA, 21 nt, Human
acuacucauacuuaagcaaaa

SEQ ID NO: 1928052 - RNA, 21 nt, Human
acuacuagggaaaugccuuug

SEQ ID NO: 1928053 - RNA, 17 nt, Human
acuacucccccaggugg

SEQ ID NO: 1928054 - RNA, 17 nt, Human
ucccgaguagcugggac

SEQ ID NO: 1928055 - RNA, 16 nt, Human
ucccgaguagcuggga

SEQ ID NO: 1928056 - RNA, 18 nt, Human
ucccgaguagcugggacu

SEQ ID NO: 1928057 - RNA, 15 nt, Human
ucccgaguagcuggg

SEQ ID NO: 1928058 - RNA, 20 nt, Human
ucccgaauagcugggacuac

SEQ ID NO: 1928059 - RNA, 17 nt, Human
uccccuuuauguacagg

SEQ ID NO: 1928060 - RNA, 20 nt, Human
uccccuuuauguacaggaug

SEQ ID NO: 1928061 - RNA, 16 nt, Human
uccccucuccuuccug

SEQ ID NO: 1928062 - RNA, 15 nt, Human
uccccucuccuuccu

SEQ ID NO: 1928063 - RNA, 20 nt, Human
uccccuugucugaacuggag

SEQ ID NO: 1928064 - RNA, 17 nt, Human
ucccugaaggccccgcc

SEQ ID NO: 1928065 - RNA, 16 nt, Human
ucccugaaggccccgc

SEQ ID NO: 1928066 - RNA, 11 nt, Human
ucccugaggca

SEQ ID NO: 1928067 - RNA, 22 nt, Human
ucccugaggcagguccccagac

SEQ ID NO: 1928068 - RNA, 21 nt, Human
ucccugaggcagguccccaga

SEQ ID NO: 1928069 - RNA, 20 nt, Human
ucccugaggcagguccccag

SEQ ID NO: 1928070 - RNA, 22 nt, Human
acucacuggggccuacagcuuu

SEQ ID NO: 1928071 - RNA, 11 nt, Human
ucccugaaggc

SEQ ID NO: 1928072 - RNA, 15 nt, Human
ucccugaaggccccg

SEQ ID NO: 1928073 - RNA, 21 nt, Human
ucccucuuucccucccuuccu

SEQ ID NO: 1928074 - RNA, 20 nt, Human
ucccugaaggaaccaaagcg

SEQ ID NO: 1928075 - RNA, 18 nt, Human
ucccucuuucccucccuu

SEQ ID NO: 1928076 - RNA, 20 nt, Human
ucccucuuucccucccuucc

SEQ ID NO: 1928077 - RNA, 14 nt, Human
ucccucuuucccuc

SEQ ID NO: 1928078 - RNA, 19 nt, Human
ucccuuuuaauccuggcug

SEQ ID NO: 1928079 - RNA, 23 nt, Human
ucccuuucuccccugcccccagg

SEQ ID NO: 1928080 - RNA, 12 nt, Human
ucccuuuuccuu

SEQ ID NO: 1928081 - RNA, 17 nt, Human
uccggucccugucccag

SEQ ID NO: 1928082 - RNA, 19 nt, Human
uccuaaauauauuuuaaga

SEQ ID NO: 1928083 - RNA, 16 nt, Human
uccuagaaauucccca

SEQ ID NO: 1928084 - RNA, 15 nt, Human
ucccugguggcagcu

SEQ ID NO: 1928085 - RNA, 12 nt, Human
ucccugucccag

SEQ ID NO: 1928086 - RNA, 21 nt, Human
acuccugcaggcagccaggcc

SEQ ID NO: 1928087 - RNA, 14 nt, Human
ucccuggggugggg

SEQ ID NO: 1928088 - RNA, 19 nt, Human
ucccuggugagagggccgg

SEQ ID NO: 1928089 - RNA, 21 nt, Human
ucccuggugagagggccgggc

SEQ ID NO: 1928090 - RNA, 23 nt, Human
ucccuggugagagggccgggcag

SEQ ID NO: 1928091 - RNA, 17 nt, Human
ucccuuacgugaguccu

SEQ ID NO: 1928092 - RNA, 18 nt, Human
ucccuuucuccccugccc

SEQ ID NO: 1928093 - RNA, 17 nt, Human
ucccuuucuccccugcc

SEQ ID NO: 1928094 - RNA, 16 nt, Human
ucccuuucuccccugc

SEQ ID NO: 1928095 - RNA, 15 nt, Human
ucccuuucuccccug

SEQ ID NO: 1928096 - RNA, 14 nt, Human
ucccuuucuccccu

SEQ ID NO: 1928097 - RNA, 15 nt, Human
acucauucuucugua

SEQ ID NO: 1928098 - RNA, 14 nt, Human
acucauugaccuga

SEQ ID NO: 1928099 - RNA, 15 nt, Human
acucauguuauuuuu

SEQ ID NO: 1928100 - RNA, 15 nt, Human
acucauugaccugag

SEQ ID NO: 1928101 - RNA, 15 nt, Human
acuccagaauuuccc

SEQ ID NO: 1928102 - RNA, 17 nt, Human
acuccagaauuucccaa

SEQ ID NO: 1928103 - RNA, 18 nt, Human
acuccugcaggcagccag

SEQ ID NO: 1928104 - RNA, 19 nt, Human
acuccugcaggcagccagg

SEQ ID NO: 1928105 - RNA, 15 nt, Human
acuccugaccucaag

SEQ ID NO: 1928106 - RNA, 17 nt, Human
acuccugcaggcagcca

SEQ ID NO: 1928107 - RNA, 23 nt, Human
acuccagaauuucccaaagcagu

SEQ ID NO: 1928108 - RNA, 12 nt, Human
acuccagccugg

SEQ ID NO: 1928109 - RNA, 13 nt, Human
acuccagccuggg

SEQ ID NO: 1928110 - RNA, 14 nt, Human
acuccuccuagcca

SEQ ID NO: 1928111 - RNA, 18 nt, Human
acuccuccuagccaccca

SEQ ID NO: 1928112 - RNA, 16 nt, Human
acuccuccuagccacc

SEQ ID NO: 1928113 - RNA, 15 nt, Human
acuccuccuagccac

SEQ ID NO: 1928114 - RNA, 20 nt, Human
ucuaaagccauuguaguccu

SEQ ID NO: 1928115 - RNA, 13 nt, Human
ucuaaagcugcca

SEQ ID NO: 1928116 - RNA, 14 nt, Human
ucuaaagcugccag

SEQ ID NO: 1928117 - RNA, 16 nt, Human
ucuaaagcugccagcc

SEQ ID NO: 1928118 - RNA, 15 nt, Human
ucuaaagcugccagc

SEQ ID NO: 1928119 - RNA, 21 nt, Human
acuguucucugcccuccaaga

SEQ ID NO: 1928120 - RNA, 15 nt, Human
acuguucucugcccu

SEQ ID NO: 1928121 - RNA, 20 nt, Human
acuguucucugcccuccaag

SEQ ID NO: 1928122 - RNA, 14 nt, Human
acuguucucugccc

SEQ ID NO: 1928123 - RNA, 19 nt, Human
acuguucccugagguggga

SEQ ID NO: 1928124 - RNA, 16 nt, Human
acuguucccugaggug

SEQ ID NO: 1928125 - RNA, 19 nt, Human
acuguuauccuauuuagau

SEQ ID NO: 1928126 - RNA, 17 nt, Human
acuuaauaauguguaca

SEQ ID NO: 1928127 - RNA, 13 nt, Human
acuuaauaaugug

SEQ ID NO: 1928128 - RNA, 17 nt, Human
acuuaauacuaccuuga

SEQ ID NO: 1928129 - RNA, 18 nt, Human
acuuaauacuaccuugaa

SEQ ID NO: 1928130 - RNA, 19 nt, Human
acuuaauacuaccuugaaa

SEQ ID NO: 1928131 - RNA, 21 nt, Human
acuuaauacuaccuugaaaau

SEQ ID NO: 1928132 - RNA, 15 nt, Human
acuuaaauaauguga

SEQ ID NO: 1928133 - RNA, 16 nt, Human
acuuaaauaaugugaa

SEQ ID NO: 1928134 - RNA, 18 nt, Human
acuuaaauaaugugaaac

SEQ ID NO: 1928135 - RNA, 17 nt, Human
acuuaaauaaugugaaa

SEQ ID NO: 1928136 - RNA, 18 nt, Human
acuguugcccaggcuggc

SEQ ID NO: 1928137 - RNA, 17 nt, Human
acuguugcccaggcugg

SEQ ID NO: 1928138 - RNA, 14 nt, Human
acuguugcccaggc

SEQ ID NO: 1928139 - RNA, 13 nt, Human
acuguugcccagg

SEQ ID NO: 1928140 - RNA, 12 nt, Human
acuguugcccag

SEQ ID NO: 1928141 - RNA, 16 nt, Human
acuuaaucuaaaugga

SEQ ID NO: 1928142 - RNA, 15 nt, Human
acuuaaucuaaaugg

SEQ ID NO: 1928143 - RNA, 13 nt, Human
acuuaaucuaaau

SEQ ID NO: 1928144 - RNA, 23 nt, Human
acuuacauuguucaauuagaaua

SEQ ID NO: 1928145 - RNA, 11 nt, Human
ucgggcaugac

SEQ ID NO: 1928146 - RNA, 12 nt, Human
ucgggcaugaca

SEQ ID NO: 1928147 - RNA, 17 nt, Human
ucgggaggucgaggcag

SEQ ID NO: 1928148 - RNA, 19 nt, Human
ucgggaggucgaggcagga

SEQ ID NO: 1928149 - RNA, 21 nt, Human
ucgggaggucgaggcaggagg

SEQ ID NO: 1928150 - RNA, 13 nt, Human
ucguaaaauuaag

SEQ ID NO: 1928151 - RNA, 22 nt, Human
ucguuuucaaaauuguuacaaa

SEQ ID NO: 1928152 - RNA, 16 nt, Human
ucguaaaauuaagaaa

SEQ ID NO: 1928153 - RNA, 11 nt, Human
ucuaaaagaaa

SEQ ID NO: 1928154 - RNA, 13 nt, Human
ucuaaaaugaguu

SEQ ID NO: 1928155 - RNA, 17 nt, Human
acuguccuacccacccu

SEQ ID NO: 1928156 - RNA, 23 nt, Human
acuguccuacccacccuccuuuc

SEQ ID NO: 1928157 - RNA, 18 nt, Human
acuguccuacccacccuc

SEQ ID NO: 1928158 - RNA, 16 nt, Human
acugggagaaaugaaa

SEQ ID NO: 1928159 - RNA, 24 nt, Human
acugucacucauugcugagccucu

SEQ ID NO: 1928160 - RNA, 23 nt, Human
acugucacucauugcugagccuc

SEQ ID NO: 1928161 - RNA, 15 nt, Human
acugugugcucagga

SEQ ID NO: 1928162 - RNA, 19 nt, Human
acugugugcucaggagccc

SEQ ID NO: 1928163 - RNA, 20 nt, Human
acugugugcucaggagcccu

SEQ ID NO: 1928164 - RNA, 21 nt, Human
acugugugcucaggagcccug

SEQ ID NO: 1928165 - RNA, 12 nt, Human
acugugugcuca

SEQ ID NO: 1928166 - RNA, 18 nt, Human
acuggaugcagaaacagu

SEQ ID NO: 1928167 - RNA, 17 nt, Human
acuggaugcagaaacag

SEQ ID NO: 1928168 - RNA, 15 nt, Human
acuggauuaaacuua

SEQ ID NO: 1928169 - RNA, 14 nt, Human
acugcuuuuggucu

SEQ ID NO: 1928170 - RNA, 18 nt, Human
acugcuuguguuuuuaac

SEQ ID NO: 1928171 - RNA, 21 nt, Human
acugcuugugaaaggaaagag

SEQ ID NO: 1928172 - RNA, 16 nt, Human
acugcuuguguuuuua

SEQ ID NO: 1928173 - RNA, 17 nt, Human
acugcuuccagugaggc

SEQ ID NO: 1928174 - RNA, 20 nt, Human
acugcuuaacuucacauauu

SEQ ID NO: 1928175 - RNA, 18 nt, Human
acugcuuaacuucacaua

SEQ ID NO: 1928176 - RNA, 18 nt, Human
acugcuaagaauauuuga

SEQ ID NO: 1928177 - RNA, 16 nt, Human
acugcuaagaauauuu

SEQ ID NO: 1928178 - RNA, 23 nt, Human
acugcuacaaauacucuuaggaa

SEQ ID NO: 1928179 - RNA, 13 nt, Human
acugcuacuguaa

SEQ ID NO: 1928180 - RNA, 15 nt, Human
acugccucucacagc

SEQ ID NO: 1928181 - RNA, 16 nt, Human
acugccuauuuuaaua

SEQ ID NO: 1928182 - RNA, 21 nt, Human
acugccuauuuuaauaaacac

SEQ ID NO: 1928183 - RNA, 17 nt, Human
acugccucgaaacacag

SEQ ID NO: 1928184 - RNA, 19 nt, Human
acugccucgaaacacagaa

SEQ ID NO: 1928185 - RNA, 22 nt, Human
acugccucucacagcugaguug

SEQ ID NO: 1928186 - RNA, 21 nt, Human
uccuagaaauuccccacccug

SEQ ID NO: 1928187 - RNA, 22 nt, Human
uccuagaaauuccccacccuga

SEQ ID NO: 1928188 - RNA, 16 nt, Human
acugcauaugaaagga

SEQ ID NO: 1928189 - RNA, 17 nt, Human
uccuagagggaggggcc

SEQ ID NO: 1928190 - RNA, 20 nt, Human
uccuagagggaggggccuag

SEQ ID NO: 1928191 - RNA, 21 nt, Human
uccuagagggaggggccuagg

SEQ ID NO: 1928192 - RNA, 22 nt, Human
acugcauaccaaccugggcaau

SEQ ID NO: 1928193 - RNA, 20 nt, Human
acugcaucaagaugugacau

SEQ ID NO: 1928194 - RNA, 22 nt, Human
acugcaucaagaugugacaugu

SEQ ID NO: 1928195 - RNA, 13 nt, Human
acugcaugcugcu

SEQ ID NO: 1928196 - RNA, 16 nt, Human
acugcaugcugcugga

SEQ ID NO: 1928197 - RNA, 17 nt, Human
acugcaugcugcuggac

SEQ ID NO: 1928198 - RNA, 16 nt, Human
acugcauguuugugau

SEQ ID NO: 1928199 - RNA, 15 nt, Human
acugcauguuuguga

SEQ ID NO: 1928200 - RNA, 15 nt, Human
uccuuccagcccaga

SEQ ID NO: 1928201 - RNA, 12 nt, Human
uccuuccaccuc

SEQ ID NO: 1928202 - RNA, 16 nt, Human
uccuucagugccuuau

SEQ ID NO: 1928203 - RNA, 17 nt, Human
uccuucagugccuuaug

SEQ ID NO: 1928204 - RNA, 21 nt, Human
uccuuccaguguccuuagaac

SEQ ID NO: 1928205 - RNA, 19 nt, Human
uccuuccuguucugaacug

SEQ ID NO: 1928206 - RNA, 14 nt, Human
uccuucagugccuu

SEQ ID NO: 1928207 - RNA, 15 nt, Human
uccuucagugccuua

SEQ ID NO: 1928208 - RNA, 23 nt, Human
acuggccaguggcuggaucugug

SEQ ID NO: 1928209 - RNA, 19 nt, Human
uccuuuagcgcccaguugg

SEQ ID NO: 1928210 - RNA, 15 nt, Human
uccuuuagcgcccag

SEQ ID NO: 1928211 - RNA, 21 nt, Human
uccuuuaauuuuuuacuauuu

SEQ ID NO: 1928212 - RNA, 23 nt, Human
uccuuguguuacuaaguuuuuau

SEQ ID NO: 1928213 - RNA, 14 nt, Human
uccuuguguuacua

SEQ ID NO: 1928214 - RNA, 14 nt, Human
uccuuguuccuaga

SEQ ID NO: 1928215 - RNA, 15 nt, Human
uccuuguagccuuuu

SEQ ID NO: 1928216 - RNA, 19 nt, Human
uccuuguagccuuuugacu

SEQ ID NO: 1928217 - RNA, 20 nt, Human
uccuuguagccuuuugacuu

SEQ ID NO: 1928218 - RNA, 17 nt, Human
ucgacuucgggcuggcc

SEQ ID NO: 1928219 - RNA, 22 nt, Human
ucgaauuuuguuuucuugauuu

SEQ ID NO: 1928220 - RNA, 18 nt, Human
ucgagaaacagccugugu

SEQ ID NO: 1928221 - RNA, 14 nt, Human
ucgagaacuuucau

SEQ ID NO: 1928222 - RNA, 20 nt, Human
ucgaaucuacuaauuccaca

SEQ ID NO: 1928223 - RNA, 13 nt, Human
ucgagaccagccu

SEQ ID NO: 1928224 - RNA, 16 nt, Human
ucgagaacuuucauuu

SEQ ID NO: 1928225 - RNA, 15 nt, Human
ucgagaacuuucauu

SEQ ID NO: 1928226 - RNA, 22 nt, Human
ucgagaacuuucauuuuuuucc

SEQ ID NO: 1928227 - RNA, 18 nt, Human
ucgagaccagccuggcca

SEQ ID NO: 1928228 - RNA, 14 nt, Human
ucgagaccagccug

SEQ ID NO: 1928229 - RNA, 17 nt, Human
ucgagaccagccuggcc

SEQ ID NO: 1928230 - RNA, 23 nt, Human
uccuuuagcgcccaguugggugg

SEQ ID NO: 1928231 - RNA, 22 nt, Human
uccuuuagcgcccaguugggug

SEQ ID NO: 1928232 - RNA, 13 nt, Human
ucgaggacaggga

SEQ ID NO: 1928233 - RNA, 16 nt, Human
ucgcgacaaugcaaac

SEQ ID NO: 1928234 - RNA, 19 nt, Human
ucgcgacaaugcaaaccau

SEQ ID NO: 1928235 - RNA, 16 nt, Human
ucgagcaugccuggau

SEQ ID NO: 1928236 - RNA, 18 nt, Human
ucgagcaugccuggaugg

SEQ ID NO: 1928237 - RNA, 16 nt, Human
ucgcggcggagcuggc

SEQ ID NO: 1928238 - RNA, 18 nt, Human
ucgcggcggagcuggccc

SEQ ID NO: 1928239 - RNA, 19 nt, Human
ucgcggcggagcuggcccc

SEQ ID NO: 1928240 - RNA, 20 nt, Human
ucgcggcggagcuggccccg

SEQ ID NO: 1928241 - RNA, 13 nt, Human
acuggcuuuggcu

SEQ ID NO: 1928242 - RNA, 15 nt, Human
acuggcuuuggcuuc

SEQ ID NO: 1928243 - RNA, 16 nt, Human
acuggcuuuggcuucu

SEQ ID NO: 1928244 - RNA, 18 nt, Human
acuggcuuuggcuucuug

SEQ ID NO: 1928245 - RNA, 13 nt, Human
agaaacaggaccg

SEQ ID NO: 1928246 - RNA, 16 nt, Human
agaaaccuuauuguac

SEQ ID NO: 1928247 - RNA, 18 nt, Human
agaaaccuuauuguaccu

SEQ ID NO: 1928248 - RNA, 20 nt, Human
agaaacgaagccaucuuucu

SEQ ID NO: 1928249 - RNA, 15 nt, Human
agaaacgucuucuaa

SEQ ID NO: 1928250 - RNA, 18 nt, Human
agaaaccuuuuuaaaaau

SEQ ID NO: 1928251 - RNA, 20 nt, Human
agaaaccuuauuguaccucu

SEQ ID NO: 1928252 - RNA, 16 nt, Human
agaaacgucuucuaaa

SEQ ID NO: 1928253 - RNA, 18 nt, Human
agaaacgucuucuaaacu

SEQ ID NO: 1928254 - RNA, 21 nt, Human
agaaacgucuucuaaacuucc

SEQ ID NO: 1928255 - RNA, 17 nt, Human
agaaaaaggaugcacag

SEQ ID NO: 1928256 - RNA, 15 nt, Human
agaaaaagaaaugca

SEQ ID NO: 1928257 - RNA, 21 nt, Human
agaaaacuuguauuaugugug

SEQ ID NO: 1928258 - RNA, 19 nt, Human
agaaaacuuguauuaugug

SEQ ID NO: 1928259 - RNA, 21 nt, Human
ucucuuuaaugucacaggcag

SEQ ID NO: 1928260 - RNA, 20 nt, Human
ucucuuuaaugucacaggca

SEQ ID NO: 1928261 - RNA, 13 nt, Human
agaaaaagaaaaa

SEQ ID NO: 1928262 - RNA, 19 nt, Human
agaaaaaccagaggcagcu

SEQ ID NO: 1928263 - RNA, 14 nt, Human
agaaaaagaaaugc

SEQ ID NO: 1928264 - RNA, 16 nt, Human
ucucuugggaacugaa

SEQ ID NO: 1928265 - RNA, 23 nt, Human
ucucuugggaacugaacucacuu

SEQ ID NO: 1928266 - RNA, 14 nt, Human
ucucuugauucaua

SEQ ID NO: 1928267 - RNA, 16 nt, Human
ucucuugauucauaau

SEQ ID NO: 1928268 - RNA, 18 nt, Human
ucucuugagccugggagg

SEQ ID NO: 1928269 - RNA, 17 nt, Human
ucucuugagccugggag

SEQ ID NO: 1928270 - RNA, 23 nt, Human
ucucuggccuucggccuccaucc

SEQ ID NO: 1928271 - RNA, 22 nt, Human
ucucuggccuucggccuccauc

SEQ ID NO: 1928272 - RNA, 21 nt, Human
ucucuggccuucggccuccau

SEQ ID NO: 1928273 - RNA, 15 nt, Human
ucucuggaauuugaa

SEQ ID NO: 1928274 - RNA, 18 nt, Human
ucucugcuugagucaggu

SEQ ID NO: 1928275 - RNA, 19 nt, Human
ucucugcuugagucagguu

SEQ ID NO: 1928276 - RNA, 14 nt, Human
ucucugcuuuaaag

SEQ ID NO: 1928277 - RNA, 19 nt, Human
ucucuggaauuugaaacac

SEQ ID NO: 1928278 - RNA, 12 nt, Human
ucucuggccuuc

SEQ ID NO: 1928279 - RNA, 17 nt, Human
ucucuccuguaccucuu

SEQ ID NO: 1928280 - RNA, 16 nt, Human
ucucuccuguaccucu

SEQ ID NO: 1928281 - RNA, 14 nt, Human
ucucuccuguaccu

SEQ ID NO: 1928282 - RNA, 11 nt, Human
ucucugcccuc

SEQ ID NO: 1928283 - RNA, 15 nt, Human
ucucugcccuccaag

SEQ ID NO: 1928284 - RNA, 16 nt, Human
ucucugcccuccaaga

SEQ ID NO: 1928285 - RNA, 17 nt, Human
ucucugcccuccaagac

SEQ ID NO: 1928286 - RNA, 13 nt, Human
ucucucacuccuu

SEQ ID NO: 1928287 - RNA, 15 nt, Human
ucucucacuccuuga

SEQ ID NO: 1928288 - RNA, 17 nt, Human
ucucucacuuguuuuau

SEQ ID NO: 1928289 - RNA, 18 nt, Human
acuuugaccucugcagca

SEQ ID NO: 1928290 - RNA, 16 nt, Human
acuuugaccucugcag

SEQ ID NO: 1928291 - RNA, 15 nt, Human
acuuugaccucugca

SEQ ID NO: 1928292 - RNA, 17 nt, Human
ucucuccagccccugga

SEQ ID NO: 1928293 - RNA, 16 nt, Human
ucucuccagccccugg

SEQ ID NO: 1928294 - RNA, 18 nt, Human
ucucuccagccccuggau

SEQ ID NO: 1928295 - RNA, 19 nt, Human
ucucuccagccccuggaug

SEQ ID NO: 1928296 - RNA, 22 nt, Human
ucucucaucucuuagcuccccu

SEQ ID NO: 1928297 - RNA, 23 nt, Human
ucucucaucucuuagcuccccuc

SEQ ID NO: 1928298 - RNA, 19 nt, Human
ucucucaucucuuagcucc

SEQ ID NO: 1928299 - RNA, 14 nt, Human
ucucucaucucuua

SEQ ID NO: 1928300 - RNA, 12 nt, Human
ucugacacacag

SEQ ID NO: 1928301 - RNA, 18 nt, Human
agaaaugaaaaaauauau

SEQ ID NO: 1928302 - RNA, 23 nt, Human
agaaaugaaaaaauauauaucaa

SEQ ID NO: 1928303 - RNA, 14 nt, Human
agaaaugaaagcag

SEQ ID NO: 1928304 - RNA, 14 nt, Human
agaaagaaaaucag

SEQ ID NO: 1928305 - RNA, 12 nt, Human
agaaaucuaaaa

SEQ ID NO: 1928306 - RNA, 15 nt, Human
agaaaucuaaaaaac

SEQ ID NO: 1928307 - RNA, 17 nt, Human
agaaaugaaaaaauaua

SEQ ID NO: 1928308 - RNA, 14 nt, Human
agaaauauaauuga

SEQ ID NO: 1928309 - RNA, 19 nt, Human
agaaauaucugaaaaugua

SEQ ID NO: 1928310 - RNA, 20 nt, Human
agaaauaucugaaaauguau

SEQ ID NO: 1928311 - RNA, 18 nt, Human
ucugauucccaagcucug

SEQ ID NO: 1928312 - RNA, 18 nt, Human
ucugcacuccccugcugg

SEQ ID NO: 1928313 - RNA, 19 nt, Human
ucugcacuccccugcuggg

SEQ ID NO: 1928314 - RNA, 22 nt, Human
ucugauaacuagauggugcuga

SEQ ID NO: 1928315 - RNA, 13 nt, Human
ucugauacagaaa

SEQ ID NO: 1928316 - RNA, 14 nt, Human
ucugauaacuagau

SEQ ID NO: 1928317 - RNA, 20 nt, Human
ucugauaacuagauggugcu

SEQ ID NO: 1928318 - RNA, 21 nt, Human
ucugauaacuagauggugcug

SEQ ID NO: 1928319 - RNA, 23 nt, Human
ucugagacucgcgacaaugcaaa

SEQ ID NO: 1928320 - RNA, 12 nt, Human
ucugagagcugu

SEQ ID NO: 1928321 - RNA, 14 nt, Human
ucugcaggucccua

SEQ ID NO: 1928322 - RNA, 18 nt, Human
ucugcaggucccuaauaa

SEQ ID NO: 1928323 - RNA, 13 nt, Human
agaaauuaugugc

SEQ ID NO: 1928324 - RNA, 21 nt, Human
agaaauuaugugccagauuua

SEQ ID NO: 1928325 - RNA, 22 nt, Human
agaaauuaugugccagauuuau

SEQ ID NO: 1928326 - RNA, 16 nt, Human
agaaauuuauaaacuu

SEQ ID NO: 1928327 - RNA, 17 nt, Human
agaaauuuauaaacuuu

SEQ ID NO: 1928328 - RNA, 15 nt, Human
ucugcaggucccuaa

SEQ ID NO: 1928329 - RNA, 16 nt, Human
ucugcaggucccuaau

SEQ ID NO: 1928330 - RNA, 17 nt, Human
ucugcaggucccuaaua

SEQ ID NO: 1928331 - RNA, 20 nt, Human
ucugcacuccccugcugggu

SEQ ID NO: 1928332 - RNA, 18 nt, Human
ucugcagcaauaaagcag

SEQ ID NO: 1928333 - RNA, 22 nt, Human
ucugcacuccccugcugggugu

SEQ ID NO: 1928334 - RNA, 14 nt, Human
acuucgggcuggcc

SEQ ID NO: 1928335 - RNA, 22 nt, Human
acuucgggaggucgaggcagga

SEQ ID NO: 1928336 - RNA, 18 nt, Human
acuuccuuaugcuucuuu

SEQ ID NO: 1928337 - RNA, 23 nt, Human
acuuccuguccagcuccaaccug

SEQ ID NO: 1928338 - RNA, 14 nt, Human
acuuccuugagaca

SEQ ID NO: 1928339 - RNA, 22 nt, Human
acuuccuugagacacggagccc

SEQ ID NO: 1928340 - RNA, 12 nt, Human
ucucacucuguc

SEQ ID NO: 1928341 - RNA, 16 nt, Human
ucucacucugucgccc

SEQ ID NO: 1928342 - RNA, 18 nt, Human
acuuccuguccagcucca

SEQ ID NO: 1928343 - RNA, 22 nt, Human
acuuccuguccagcuccaaccu

SEQ ID NO: 1928344 - RNA, 16 nt, Human
ucucacuauguugccc

SEQ ID NO: 1928345 - RNA, 13 nt, Human
ucucacuccuuga

SEQ ID NO: 1928346 - RNA, 14 nt, Human
acuucuccacccug

SEQ ID NO: 1928347 - RNA, 11 nt, Human
acuucagcuga

SEQ ID NO: 1928348 - RNA, 16 nt, Human
acuucagcugacuuuu

SEQ ID NO: 1928349 - RNA, 11 nt, Human
ucucacuccuu

SEQ ID NO: 1928350 - RNA, 19 nt, Human
ucucaccuccugcugggca

SEQ ID NO: 1928351 - RNA, 21 nt, Human
ucucacagcuccaagaauuuc

SEQ ID NO: 1928352 - RNA, 16 nt, Human
acuucuccacccugcu

SEQ ID NO: 1928353 - RNA, 15 nt, Human
acuucuccacccugc

SEQ ID NO: 1928354 - RNA, 20 nt, Human
acuugaacccgggaggcaga

SEQ ID NO: 1928355 - RNA, 19 nt, Human
acuugaacccgggaggcag

SEQ ID NO: 1928356 - RNA, 21 nt, Human
acuugaacccauauuuguaca

SEQ ID NO: 1928357 - RNA, 19 nt, Human
acuugagcccagagugaac

SEQ ID NO: 1928358 - RNA, 21 nt, Human
acuugaacccgggaggcagag

SEQ ID NO: 1928359 - RNA, 15 nt, Human
acuugaagggccaga

SEQ ID NO: 1928360 - RNA, 17 nt, Human
acuugaagggccagagc

SEQ ID NO: 1928361 - RNA, 18 nt, Human
acuugaagggccagagcc

SEQ ID NO: 1928362 - RNA, 19 nt, Human
acuugaagggccagagcca

SEQ ID NO: 1928363 - RNA, 20 nt, Human
acuugaagggccagagccag

SEQ ID NO: 1928364 - RNA, 21 nt, Human
acuugaagggccagagccagg

SEQ ID NO: 1928365 - RNA, 22 nt, Human
acuugaagggccagagccaggg

SEQ ID NO: 1928366 - RNA, 18 nt, Human
acuuguggacacagcucu

SEQ ID NO: 1928367 - RNA, 17 nt, Human
acuuguggacacagcuc

SEQ ID NO: 1928368 - RNA, 16 nt, Human
acuuguggacacagcu

SEQ ID NO: 1928369 - RNA, 14 nt, Human
acuugcucuugaug

SEQ ID NO: 1928370 - RNA, 16 nt, Human
acuugcucuggaccug

SEQ ID NO: 1928371 - RNA, 17 nt, Human
acuugcucuggaccugc

SEQ ID NO: 1928372 - RNA, 18 nt, Human
acuugcucuggaccugcc

SEQ ID NO: 1928373 - RNA, 19 nt, Human
acuugcucuggaccugccc

SEQ ID NO: 1928374 - RNA, 12 nt, Human
acuugcucugga

SEQ ID NO: 1928375 - RNA, 14 nt, Human
acuugcucuggacc

SEQ ID NO: 1928376 - RNA, 15 nt, Human
acuugcucuggaccu

SEQ ID NO: 1928377 - RNA, 21 nt, Human
ucuccagggucagaaacagga

SEQ ID NO: 1928378 - RNA, 18 nt, Human
ucuccagggucagaaaca

SEQ ID NO: 1928379 - RNA, 16 nt, Human
ucuccaggcuguaucc

SEQ ID NO: 1928380 - RNA, 22 nt, Human
ucuccaaaauaaaacuuuuuaa

SEQ ID NO: 1928381 - RNA, 19 nt, Human
ucuccaaaauaaaacuuuu

SEQ ID NO: 1928382 - RNA, 17 nt, Human
ucuccaaaauaaaacuu

SEQ ID NO: 1928383 - RNA, 22 nt, Human
ucuccaaccccccagcacugag

SEQ ID NO: 1928384 - RNA, 21 nt, Human
ucuccaaccccccagcacuga

SEQ ID NO: 1928385 - RNA, 23 nt, Human
ucuccaaccccccagcacugagg

SEQ ID NO: 1928386 - RNA, 20 nt, Human
ucuccaaccccccagcacug

SEQ ID NO: 1928387 - RNA, 19 nt, Human
ucuccaaccccccagcacu

SEQ ID NO: 1928388 - RNA, 18 nt, Human
ucuccaaccccccagcac

SEQ ID NO: 1928389 - RNA, 17 nt, Human
ucuccaaccccccagca

SEQ ID NO: 1928390 - RNA, 19 nt, Human
ucucagggccuggucguuu

SEQ ID NO: 1928391 - RNA, 14 nt, Human
ucucagggccuggu

SEQ ID NO: 1928392 - RNA, 15 nt, Human
ucucagggccugguc

SEQ ID NO: 1928393 - RNA, 20 nt, Human
ucucauugaauuauaaaagc

SEQ ID NO: 1928394 - RNA, 16 nt, Human
ucucauuccagaggaa

SEQ ID NO: 1928395 - RNA, 12 nt, Human
ucucagggccug

SEQ ID NO: 1928396 - RNA, 13 nt, Human
ucucagggccugg

SEQ ID NO: 1928397 - RNA, 21 nt, Human
ucuccuccuuuucacaguucu

SEQ ID NO: 1928398 - RNA, 14 nt, Human
acuuugaccucugc

SEQ ID NO: 1928399 - RNA, 16 nt, Human
acuuucuagccagagg

SEQ ID NO: 1928400 - RNA, 17 nt, Human
acuuucuagccagagga

SEQ ID NO: 1928401 - RNA, 14 nt, Human
acuuuaagaggaca

SEQ ID NO: 1928402 - RNA, 16 nt, Human
ucuccauguuugaugu

SEQ ID NO: 1928403 - RNA, 19 nt, Human
ucucccacuagacaagucc

SEQ ID NO: 1928404 - RNA, 14 nt, Human
ucucccaccuagca

SEQ ID NO: 1928405 - RNA, 18 nt, Human
ucucccauugucccucug

SEQ ID NO: 1928406 - RNA, 19 nt, Human
ucucccauugucccucugc

SEQ ID NO: 1928407 - RNA, 17 nt, Human
ucucccauugucccucu

SEQ ID NO: 1928408 - RNA, 17 nt, Human
ucugggguuaugauggc

SEQ ID NO: 1928409 - RNA, 19 nt, Human
ucugggcuuggggcuuccu

SEQ ID NO: 1928410 - RNA, 21 nt, Human
ucugggcuuggggcuuccuaa

SEQ ID NO: 1928411 - RNA, 20 nt, Human
agaauuauaauuaguuccuc

SEQ ID NO: 1928412 - RNA, 14 nt, Human
agaauuagcugcuu

SEQ ID NO: 1928413 - RNA, 20 nt, Human
agaauucucagaaucucaaa

SEQ ID NO: 1928414 - RNA, 14 nt, Human
agaauucucuaguu

SEQ ID NO: 1928415 - RNA, 13 nt, Human
ucugggcuccaga

SEQ ID NO: 1928416 - RNA, 19 nt, Human
agaauuaguggcacuugcu

SEQ ID NO: 1928417 - RNA, 16 nt, Human
agaauuagcugcuucu

SEQ ID NO: 1928418 - RNA, 21 nt, Human
agaauguguuuaaacuugguu

SEQ ID NO: 1928419 - RNA, 19 nt, Human
agaaugucaguauguggaa

SEQ ID NO: 1928420 - RNA, 17 nt, Human
agaaugucaguaugugg

SEQ ID NO: 1928421 - RNA, 22 nt, Human
agaaauuuccacucaggucugu

SEQ ID NO: 1928422 - RNA, 16 nt, Human
agaaauuuccacucag

SEQ ID NO: 1928423 - RNA, 23 nt, Human
agaaccccaggguccuguagccc

SEQ ID NO: 1928424 - RNA, 22 nt, Human
agaaccccuggcuccaggccag

SEQ ID NO: 1928425 - RNA, 16 nt, Human
agaaugucaguaugug

SEQ ID NO: 1928426 - RNA, 15 nt, Human
agaaugucaguaugu

SEQ ID NO: 1928427 - RNA, 18 nt, Human
ucuguacgucugacaggc

SEQ ID NO: 1928428 - RNA, 14 nt, Human
ucuguaucuuuucu

SEQ ID NO: 1928429 - RNA, 15 nt, Human
ucuguauauacuuuu

SEQ ID NO: 1928430 - RNA, 17 nt, Human
ucuguaucacucugugu

SEQ ID NO: 1928431 - RNA, 18 nt, Human
ucugugaauugagcugca

SEQ ID NO: 1928432 - RNA, 22 nt, Human
ucuguccccuucucucaucucu

SEQ ID NO: 1928433 - RNA, 21 nt, Human
ucuguccccuucucucaucuc

SEQ ID NO: 1928434 - RNA, 20 nt, Human
ucuguccccuucucucaucu

SEQ ID NO: 1928435 - RNA, 19 nt, Human
ucuguccccuucucucauc

SEQ ID NO: 1928436 - RNA, 15 nt, Human
ucuguccccuucucu

SEQ ID NO: 1928437 - RNA, 19 nt, Human
ucuguuuagauaauacacc

SEQ ID NO: 1928438 - RNA, 16 nt, Human
ucuguuuagauaauac

SEQ ID NO: 1928439 - RNA, 23 nt, Human
ucuguuuagauaauacaccacua

SEQ ID NO: 1928440 - RNA, 16 nt, Human
ucuguuuaugcuuuug

SEQ ID NO: 1928441 - RNA, 20 nt, Human
ucuuaaucuuuucacaaaua

SEQ ID NO: 1928442 - RNA, 19 nt, Human
ucuuaaucuuuucacaaau

SEQ ID NO: 1928443 - RNA, 20 nt, Human
agacaguugggugagaacaa

SEQ ID NO: 1928444 - RNA, 22 nt, Human
ucuuaaucuuuucacaaauaaa

SEQ ID NO: 1928445 - RNA, 21 nt, Human
ucuuaaucuuuucacaaauaa

SEQ ID NO: 1928446 - RNA, 14 nt, Human
ucuuacaaacaugu

SEQ ID NO: 1928447 - RNA, 13 nt, Human
agacagucccugc

SEQ ID NO: 1928448 - RNA, 14 nt, Human
agacagucccugcc

SEQ ID NO: 1928449 - RNA, 18 nt, Human
agacaguccuaacaauau

SEQ ID NO: 1928450 - RNA, 15 nt, Human
agacagcugccuggg

SEQ ID NO: 1928451 - RNA, 16 nt, Human
agacagcugccuggga

SEQ ID NO: 1928452 - RNA, 12 nt, Human
agacagucccug

SEQ ID NO: 1928453 - RNA, 19 nt, Human
ucuuacugucuuuuuucua

SEQ ID NO: 1928454 - RNA, 14 nt, Human
ucuuagauguauau

SEQ ID NO: 1928455 - RNA, 18 nt, Human
ucuuagauggauucucca

SEQ ID NO: 1928456 - RNA, 22 nt, Human
ucuuagauggauucuccacuca

SEQ ID NO: 1928457 - RNA, 17 nt, Human
ucuuauuagggagaaaa

SEQ ID NO: 1928458 - RNA, 12 nt, Human
ucuuagauguau

SEQ ID NO: 1928459 - RNA, 17 nt, Human
agacacaggcccggcuc

SEQ ID NO: 1928460 - RNA, 22 nt, Human
agacacaggcccggcuccaggc

SEQ ID NO: 1928461 - RNA, 21 nt, Human
agacacaggcccggcuccagg

SEQ ID NO: 1928462 - RNA, 20 nt, Human
agacacaggcccggcuccag

SEQ ID NO: 1928463 - RNA, 19 nt, Human
agacacaggcccggcucca

SEQ ID NO: 1928464 - RNA, 14 nt, Human
agacacaagccuuc

SEQ ID NO: 1928465 - RNA, 13 nt, Human
agacacaagccuu

SEQ ID NO: 1928466 - RNA, 19 nt, Human
agaauucucuaguuugauu

SEQ ID NO: 1928467 - RNA, 18 nt, Human
agaauucucuaguuugau

SEQ ID NO: 1928468 - RNA, 17 nt, Human
agaauucucuuauccaa

SEQ ID NO: 1928469 - RNA, 22 nt, Human
agacaccuugacagggcacacc

SEQ ID NO: 1928470 - RNA, 24 nt, Human
agacacauguccaagaagcccagg

SEQ ID NO: 1928471 - RNA, 19 nt, Human
agacaccuugacagggcac

SEQ ID NO: 1928472 - RNA, 23 nt, Human
agacacaggcccggcuccaggcu

SEQ ID NO: 1928473 - RNA, 13 nt, Human
agacacaggcccu

SEQ ID NO: 1928474 - RNA, 21 nt, Human
agacacauguccaagaagccc

SEQ ID NO: 1928475 - RNA, 22 nt, Human
agacacauguccaagaagccca

SEQ ID NO: 1928476 - RNA, 13 nt, Human
agacagcugccug

SEQ ID NO: 1928477 - RNA, 14 nt, Human
agacagcugccugg

SEQ ID NO: 1928478 - RNA, 12 nt, Human
agacagaaaaaa

SEQ ID NO: 1928479 - RNA, 21 nt, Human
agacacggagcccagcccucc

SEQ ID NO: 1928480 - RNA, 13 nt, Human
agaccucagggca

SEQ ID NO: 1928481 - RNA, 14 nt, Human
agaccucagggcac

SEQ ID NO: 1928482 - RNA, 15 nt, Human
agaccucagggcaca

SEQ ID NO: 1928483 - RNA, 14 nt, Human
agacccggcugcgu

SEQ ID NO: 1928484 - RNA, 19 nt, Human
agaccuggacacaggccug

SEQ ID NO: 1928485 - RNA, 13 nt, Human
agacucaaaugcu

SEQ ID NO: 1928486 - RNA, 20 nt, Human
agacucacaaccugaaccua

SEQ ID NO: 1928487 - RNA, 16 nt, Human
agaccuggacacaggc

SEQ ID NO: 1928488 - RNA, 18 nt, Human
agaccuggacacaggccu

SEQ ID NO: 1928489 - RNA, 15 nt, Human
agacucauucuucug

SEQ ID NO: 1928490 - RNA, 17 nt, Human
ucuugagccuugaacuu

SEQ ID NO: 1928491 - RNA, 15 nt, Human
agacucauauuacug

SEQ ID NO: 1928492 - RNA, 22 nt, Human
agacucauauuacugguaggaa

SEQ ID NO: 1928493 - RNA, 19 nt, Human
ucuugagccuugaacuuug

SEQ ID NO: 1928494 - RNA, 18 nt, Human
ucuugagccuugaacuuu

SEQ ID NO: 1928495 - RNA, 20 nt, Human
ucuugagccuugaacuuuga

SEQ ID NO: 1928496 - RNA, 23 nt, Human
ucuucuguacgucugacaggcaa

SEQ ID NO: 1928497 - RNA, 23 nt, Human
agacauacuaaccagcagaaaug

SEQ ID NO: 1928498 - RNA, 13 nt, Human
agacauacuugaa

SEQ ID NO: 1928499 - RNA, 14 nt, Human
agacauacuugaag

SEQ ID NO: 1928500 - RNA, 16 nt, Human
agacauacuugaaggg

SEQ ID NO: 1928501 - RNA, 17 nt, Human
agacauacuugaagggc

SEQ ID NO: 1928502 - RNA, 19 nt, Human
agacauacuugaagggcca

SEQ ID NO: 1928503 - RNA, 14 nt, Human
agacauagaauuaa

SEQ ID NO: 1928504 - RNA, 20 nt, Human
agacauacuugaagggccag

SEQ ID NO: 1928505 - RNA, 21 nt, Human
agacauacuugaagggccaga

SEQ ID NO: 1928506 - RNA, 23 nt, Human
agacauacuugaagggccagagc

SEQ ID NO: 1928507 - RNA, 15 nt, Human
agacaugauuuccuu

SEQ ID NO: 1928508 - RNA, 22 nt, Human
agacaugauuuccuugaaugug

SEQ ID NO: 1928509 - RNA, 19 nt, Human
agacaugcagccuaaggcu

SEQ ID NO: 1928510 - RNA, 23 nt, Human
agacaugccacaaggacuuccug

SEQ ID NO: 1928511 - RNA, 21 nt, Human
agacauuugcuaugagcuggg

SEQ ID NO: 1928512 - RNA, 22 nt, Human
ucuucugcuucagccucccgag

SEQ ID NO: 1928513 - RNA, 22 nt, Human
ucuucuguacgucugacaggca

SEQ ID NO: 1928514 - RNA, 21 nt, Human
ucuucuguacgucugacaggc

SEQ ID NO: 1928515 - RNA, 18 nt, Human
ucuucuggcucaaaaaga

SEQ ID NO: 1928516 - RNA, 21 nt, Human
ucuucuggcucaaaaagagaa

SEQ ID NO: 1928517 - RNA, 12 nt, Human
ucuucuggcuca

SEQ ID NO: 1928518 - RNA, 13 nt, Human
ucuucuggcucaa

SEQ ID NO: 1928519 - RNA, 17 nt, Human
ucuuauuuaaugaaaga

SEQ ID NO: 1928520 - RNA, 18 nt, Human
ucuuauucaaagaaauau

SEQ ID NO: 1928521 - RNA, 21 nt, Human
ucuuauucuuucguucaguua

SEQ ID NO: 1928522 - RNA, 14 nt, Human
ucuuauucuuucgu

SEQ ID NO: 1928523 - RNA, 15 nt, Human
agagacacaagccuu

SEQ ID NO: 1928524 - RNA, 24 nt, Human
agagacagaaagcagaacagugau

SEQ ID NO: 1928525 - RNA, 13 nt, Human
agagaaaaagaaa

SEQ ID NO: 1928526 - RNA, 14 nt, Human
agagaaaaagaaau

SEQ ID NO: 1928527 - RNA, 22 nt, Human
agagaaaaaauauuuuccugcc

SEQ ID NO: 1928528 - RNA, 20 nt, Human
agacucgcgacaaugcaaac

SEQ ID NO: 1928529 - RNA, 23 nt, Human
agacucgauucauauugaauaua

SEQ ID NO: 1928530 - RNA, 15 nt, Human
agacuguacaaagua

SEQ ID NO: 1928531 - RNA, 16 nt, Human
agacuguacaaaguag

SEQ ID NO: 1928532 - RNA, 15 nt, Human
agacuuccagagccu

SEQ ID NO: 1928533 - RNA, 14 nt, Human
agacuuaucaacau

SEQ ID NO: 1928534 - RNA, 14 nt, Human
agacuuccuugaga

SEQ ID NO: 1928535 - RNA, 16 nt, Human
agacuuccuugagaca

SEQ ID NO: 1928536 - RNA, 19 nt, Human
agacuguugucccugcacu

SEQ ID NO: 1928537 - RNA, 19 nt, Human
agacucgagaacuuucauu

SEQ ID NO: 1928538 - RNA, 20 nt, Human
agacucgauucauauugaau

SEQ ID NO: 1928539 - RNA, 18 nt, Human
agacucgagaacuuucau

SEQ ID NO: 1928540 - RNA, 15 nt, Human
agacucgagaacuuu

SEQ ID NO: 1928541 - RNA, 14 nt, Human
agacucgagaacuu

SEQ ID NO: 1928542 - RNA, 15 nt, Human
agacucgcgacaaug

SEQ ID NO: 1928543 - RNA, 17 nt, Human
agacucgcgacaaugca

SEQ ID NO: 1928544 - RNA, 18 nt, Human
agacucgcgacaaugcaa

SEQ ID NO: 1928545 - RNA, 19 nt, Human
agacucgcgacaaugcaaa

SEQ ID NO: 1928546 - RNA, 19 nt, Human
ucuuucuggcuaugcauuu

SEQ ID NO: 1928547 - RNA, 22 nt, Human
ucuuucugcagaaacagaaagg

SEQ ID NO: 1928548 - RNA, 18 nt, Human
ucuuucuggcuaugcauu

SEQ ID NO: 1928549 - RNA, 20 nt, Human
ucuuuauaauucuacuuuga

SEQ ID NO: 1928550 - RNA, 13 nt, Human
ucuuucugcuuug

SEQ ID NO: 1928551 - RNA, 14 nt, Human
ucuugguuuguaaa

SEQ ID NO: 1928552 - RNA, 19 nt, Human
ucuugguuccagccugcca

SEQ ID NO: 1928553 - RNA, 18 nt, Human
ucuugguuccagccugcc

SEQ ID NO: 1928554 - RNA, 17 nt, Human
ucuugguuccagccugc

SEQ ID NO: 1928555 - RNA, 19 nt, Human
ucuugaucaacaucuuuuc

SEQ ID NO: 1928556 - RNA, 18 nt, Human
ucuugaucaacaucuuuu

SEQ ID NO: 1928557 - RNA, 17 nt, Human
ucuugaucaacaucuuu

SEQ ID NO: 1928558 - RNA, 23 nt, Human
ucuugaucaacaucuuuucuugc

SEQ ID NO: 1928559 - RNA, 20 nt, Human
ucuugaucaacaucuuuucu

SEQ ID NO: 1928560 - RNA, 13 nt, Human
ucuugguuccagc

SEQ ID NO: 1928561 - RNA, 20 nt, Human
ucuuuaaugucacaggcagg

SEQ ID NO: 1928562 - RNA, 18 nt, Human
ucuuguaaauaaagcccu

SEQ ID NO: 1928563 - RNA, 16 nt, Human
ucuugguuuguaaauu

SEQ ID NO: 1928564 - RNA, 13 nt, Human
ucuuguaaauaaa

SEQ ID NO: 1928565 - RNA, 17 nt, Human
ucuuguaaauaaagccc

SEQ ID NO: 1928566 - RNA, 22 nt, Human
ucuuuaaugucacaggcagguc

SEQ ID NO: 1928567 - RNA, 14 nt, Human
ucuuuaauuuuaca

SEQ ID NO: 1928568 - RNA, 15 nt, Human
ucuuuaguuuuugug

SEQ ID NO: 1928569 - RNA, 21 nt, Human
agaucauccagaaguuccuca

SEQ ID NO: 1928570 - RNA, 12 nt, Human
agaucauuguga

SEQ ID NO: 1928571 - RNA, 18 nt, Human
agaucaguguaccauuug

SEQ ID NO: 1928572 - RNA, 21 nt, Human
agaucaguguaccauuugccu

SEQ ID NO: 1928573 - RNA, 13 nt, Human
agaucagccuggg

SEQ ID NO: 1928574 - RNA, 15 nt, Human
agaucagccugggca

SEQ ID NO: 1928575 - RNA, 15 nt, Human
agaucaguguaccau

SEQ ID NO: 1928576 - RNA, 21 nt, Human
ugacauuguuggccaaagcca

SEQ ID NO: 1928577 - RNA, 20 nt, Human
ugacauuguuggccaaagcc

SEQ ID NO: 1928578 - RNA, 18 nt, Human
ugaccaauauuguacagu

SEQ ID NO: 1928579 - RNA, 17 nt, Human
ugaccaauauuguacag

SEQ ID NO: 1928580 - RNA, 21 nt, Human
ugaccaauauuguacaguuuu

SEQ ID NO: 1928581 - RNA, 19 nt, Human
ugaccaauauuguacaguu

SEQ ID NO: 1928582 - RNA, 18 nt, Human
ugaccaaugauggucacc

SEQ ID NO: 1928583 - RNA, 20 nt, Human
ugacagggcacaccgggcac

SEQ ID NO: 1928584 - RNA, 21 nt, Human
ugacagggcacaccgggcacu

SEQ ID NO: 1928585 - RNA, 21 nt, Human
ugacaguggccgcccaaggcc

SEQ ID NO: 1928586 - RNA, 16 nt, Human
ugacagggcacaccgg

SEQ ID NO: 1928587 - RNA, 11 nt, Human
ugacagggcac

SEQ ID NO: 1928588 - RNA, 21 nt, Human
ugacacacagcucuguccugg

SEQ ID NO: 1928589 - RNA, 18 nt, Human
ugacacagaaaauguuga

SEQ ID NO: 1928590 - RNA, 19 nt, Human
ugacacagaaaauguugag

SEQ ID NO: 1928591 - RNA, 20 nt, Human
ugacaggcaaugcuggcugu

SEQ ID NO: 1928592 - RNA, 23 nt, Human
ugacagcugcuccuagagggagg

SEQ ID NO: 1928593 - RNA, 12 nt, Human
ugacagcugcuc

SEQ ID NO: 1928594 - RNA, 13 nt, Human
ugacagcugcucc

SEQ ID NO: 1928595 - RNA, 14 nt, Human
ugacagcugcuccu

SEQ ID NO: 1928596 - RNA, 15 nt, Human
ugacagcugcuccua

SEQ ID NO: 1928597 - RNA, 18 nt, Human
ugacagcugcuccuagag

SEQ ID NO: 1928598 - RNA, 21 nt, Human
ugacagcugcuccuagaggga

SEQ ID NO: 1928599 - RNA, 22 nt, Human
ugacagcugcuccuagagggag

SEQ ID NO: 1928600 - RNA, 15 nt, Human
agaugccugaagcca

SEQ ID NO: 1928601 - RNA, 15 nt, Human
agaugcuagaacucc

SEQ ID NO: 1928602 - RNA, 14 nt, Human
agaugcuagaacuc

SEQ ID NO: 1928603 - RNA, 23 nt, Human
agaugcuggcccagggcccagag

SEQ ID NO: 1928604 - RNA, 20 nt, Human
agaugcuggcccagggccca

SEQ ID NO: 1928605 - RNA, 21 nt, Human
agaugcuggcccagggcccag

SEQ ID NO: 1928606 - RNA, 22 nt, Human
agaugcuggcccagggcccaga

SEQ ID NO: 1928607 - RNA, 15 nt, Human
agaugcaccagcccu

SEQ ID NO: 1928608 - RNA, 14 nt, Human
agaugcaccagccc

SEQ ID NO: 1928609 - RNA, 16 nt, Human
agauccagggacugaa

SEQ ID NO: 1928610 - RNA, 19 nt, Human
agauccagggacagaggcc

SEQ ID NO: 1928611 - RNA, 22 nt, Human
agauccagggacagaggcccca

SEQ ID NO: 1928612 - RNA, 23 nt, Human
ugaccauucuccaccugccaggg

SEQ ID NO: 1928613 - RNA, 17 nt, Human
ugacccacaagaaauga

SEQ ID NO: 1928614 - RNA, 14 nt, Human
agauguucuacuuu

SEQ ID NO: 1928615 - RNA, 15 nt, Human
agauguucuacuuug

SEQ ID NO: 1928616 - RNA, 22 nt, Human
agauguucuacuuuguucugcu

SEQ ID NO: 1928617 - RNA, 13 nt, Human
ugacccacugcuu

SEQ ID NO: 1928618 - RNA, 12 nt, Human
ugacccacugcu

SEQ ID NO: 1928619 - RNA, 15 nt, Human
agaugcuucucacug

SEQ ID NO: 1928620 - RNA, 17 nt, Human
agauguggaaaagccaa

SEQ ID NO: 1928621 - RNA, 22 nt, Human
agauguggaaaagccaagaggc

SEQ ID NO: 1928622 - RNA, 18 nt, Human
agaucacgccacugcacu

SEQ ID NO: 1928623 - RNA, 17 nt, Human
agaucacgccacugcac

SEQ ID NO: 1928624 - RNA, 15 nt, Human
ugaauuucuuuugcc

SEQ ID NO: 1928625 - RNA, 16 nt, Human
ugaauuuuacauggcu

SEQ ID NO: 1928626 - RNA, 20 nt, Human
ugacacacagcucuguccug

SEQ ID NO: 1928627 - RNA, 16 nt, Human
agaucacgccacugca

SEQ ID NO: 1928628 - RNA, 15 nt, Human
agaucacgccacugc

SEQ ID NO: 1928629 - RNA, 14 nt, Human
agaucacgccacug

SEQ ID NO: 1928630 - RNA, 13 nt, Human
agauaugcaaaag

SEQ ID NO: 1928631 - RNA, 17 nt, Human
agauaaagguucaugca

SEQ ID NO: 1928632 - RNA, 12 nt, Human
agauaaauauua

SEQ ID NO: 1928633 - RNA, 12 nt, Human
agauaaaugugc

SEQ ID NO: 1928634 - RNA, 14 nt, Human
agauaaauauuaua

SEQ ID NO: 1928635 - RNA, 13 nt, Human
agauaaagccaga

SEQ ID NO: 1928636 - RNA, 23 nt, Human
agauacugcuacuguaauuuuau

SEQ ID NO: 1928637 - RNA, 19 nt, Human
agauacugcuacuguaauu

SEQ ID NO: 1928638 - RNA, 15 nt, Human
agauacugaaauaaa

SEQ ID NO: 1928639 - RNA, 13 nt, Human
agauacugaaaua

SEQ ID NO: 1928640 - RNA, 12 nt, Human
agauacugaaau

SEQ ID NO: 1928641 - RNA, 13 nt, Human
agauaaauuauaa

SEQ ID NO: 1928642 - RNA, 22 nt, Human
agaguugauacuacaguuuguu

SEQ ID NO: 1928643 - RNA, 20 nt, Human
agaguugauacuacaguuug

SEQ ID NO: 1928644 - RNA, 17 nt, Human
agaguugauacuacagu

SEQ ID NO: 1928645 - RNA, 20 nt, Human
agaguugaugguuguacaua

SEQ ID NO: 1928646 - RNA, 12 nt, Human
agaguuguuaca

SEQ ID NO: 1928647 - RNA, 16 nt, Human
agaguuguuacauuuu

SEQ ID NO: 1928648 - RNA, 20 nt, Human
agaguugugacaacuuccug

SEQ ID NO: 1928649 - RNA, 21 nt, Human
agaguuguuacauuuuuaagu

SEQ ID NO: 1928650 - RNA, 19 nt, Human
ugaaugucagugugacuga

SEQ ID NO: 1928651 - RNA, 20 nt, Human
ugaaugguuuucaaaauaaa

SEQ ID NO: 1928652 - RNA, 17 nt, Human
ugaagcacagaccccuu

SEQ ID NO: 1928653 - RNA, 18 nt, Human
ugaauguggcuugagaaa

SEQ ID NO: 1928654 - RNA, 17 nt, Human
ugaacucaacuuugaca

SEQ ID NO: 1928655 - RNA, 18 nt, Human
ugaacucacuuuccuccu

SEQ ID NO: 1928656 - RNA, 12 nt, Human
ugaacuccuggc

SEQ ID NO: 1928657 - RNA, 15 nt, Human
ugaacuccuggccuc

SEQ ID NO: 1928658 - RNA, 14 nt, Human
ugaacuccuggccu

SEQ ID NO: 1928659 - RNA, 21 nt, Human
ugaacuaggauuguaguccca

SEQ ID NO: 1928660 - RNA, 20 nt, Human
ugaacgauauguagcagaaa

SEQ ID NO: 1928661 - RNA, 21 nt, Human
ugaacgauauguagcagaaag

SEQ ID NO: 1928662 - RNA, 22 nt, Human
ugaaccgaugagaaauaaaguu

SEQ ID NO: 1928663 - RNA, 16 nt, Human
ugaaccuauuucucuu

SEQ ID NO: 1928664 - RNA, 21 nt, Human
ugaaccuaggagugccccauu

SEQ ID NO: 1928665 - RNA, 22 nt, Human
ugaaccuaggagugccccauuc

SEQ ID NO: 1928666 - RNA, 15 nt, Human
ugaaauuuuuauuaa

SEQ ID NO: 1928667 - RNA, 20 nt, Human
ugaacaaauuuacagagaca

SEQ ID NO: 1928668 - RNA, 19 nt, Human
ugaacaaauuuacagagac

SEQ ID NO: 1928669 - RNA, 14 nt, Human
agagcugcgggcug

SEQ ID NO: 1928670 - RNA, 22 nt, Human
ugaacuuugaccucugcagcaa

SEQ ID NO: 1928671 - RNA, 20 nt, Human
ugaacuuugaccucugcagc

SEQ ID NO: 1928672 - RNA, 19 nt, Human
ugaacuuugaccucugcag

SEQ ID NO: 1928673 - RNA, 24 nt, Human
agaggcagccccauucugccugcc

SEQ ID NO: 1928674 - RNA, 17 nt, Human
agaggcagcuucuuugc

SEQ ID NO: 1928675 - RNA, 19 nt, Human
agaggcagccccauucugc

SEQ ID NO: 1928676 - RNA, 13 nt, Human
agaggcagcccca

SEQ ID NO: 1928677 - RNA, 14 nt, Human
agagcuuucuuuca

SEQ ID NO: 1928678 - RNA, 12 nt, Human
agagcuuucuuu

SEQ ID NO: 1928679 - RNA, 16 nt, Human
agagcuuucuuucaca

SEQ ID NO: 1928680 - RNA, 13 nt, Human
agaggcagggucu

SEQ ID NO: 1928681 - RNA, 10 nt, Human
agaggcaggg

SEQ ID NO: 1928682 - RNA, 19 nt, Human
agaggccaugggccuccug

SEQ ID NO: 1928683 - RNA, 17 nt, Human
agaggcuaugugagcac

SEQ ID NO: 1928684 - RNA, 16 nt, Human
agaggcugaggcuggc

SEQ ID NO: 1928685 - RNA, 15 nt, Human
agagguugcagugag

SEQ ID NO: 1928686 - RNA, 22 nt, Human
ugaagcacagugaucaaguuau

SEQ ID NO: 1928687 - RNA, 17 nt, Human
agaguagaauugcauug

SEQ ID NO: 1928688 - RNA, 18 nt, Human
agaguagaauugcauuga

SEQ ID NO: 1928689 - RNA, 12 nt, Human
agagguuuuaaa

SEQ ID NO: 1928690 - RNA, 22 nt, Human
agagguuugacuagaugaugga

SEQ ID NO: 1928691 - RNA, 15 nt, Human
agaguagaauugcau

SEQ ID NO: 1928692 - RNA, 16 nt, Human
agaguagaauugcauu

SEQ ID NO: 1928693 - RNA, 23 nt, Human
ugaaagucuugugacuagugcug

SEQ ID NO: 1928694 - RNA, 22 nt, Human
ugaaagucuugugacuagugcu

SEQ ID NO: 1928695 - RNA, 21 nt, Human
ugaaagucuugugacuagugc

SEQ ID NO: 1928696 - RNA, 20 nt, Human
ugaaagucuugugacuagug

SEQ ID NO: 1928697 - RNA, 18 nt, Human
ugaaagucuugugacuag

SEQ ID NO: 1928698 - RNA, 23 nt, Human
ugaaauaagccagacaucaacag

SEQ ID NO: 1928699 - RNA, 20 nt, Human
ugaaauaagccagacaucaa

SEQ ID NO: 1928700 - RNA, 18 nt, Human
ugaaauaagccagacauc

SEQ ID NO: 1928701 - RNA, 17 nt, Human
ugaaauaagccagacau

SEQ ID NO: 1928702 - RNA, 17 nt, Human
ugaaagucuugugacua

SEQ ID NO: 1928703 - RNA, 18 nt, Human
agagcugccaccugccug

SEQ ID NO: 1928704 - RNA, 15 nt, Human
ugaaauuguauuaca

SEQ ID NO: 1928705 - RNA, 18 nt, Human
ugaaauaugcuggcugga

SEQ ID NO: 1928706 - RNA, 15 nt, Human
ugaaauauacacaca

SEQ ID NO: 1928707 - RNA, 16 nt, Human
ugaaauauacacacag

SEQ ID NO: 1928708 - RNA, 17 nt, Human
ugaaauauacacacagc

SEQ ID NO: 1928709 - RNA, 23 nt, Human
ugaaauuuccugggagcuuuugu

SEQ ID NO: 1928710 - RNA, 17 nt, Human
ucuuuggacccugaggc

SEQ ID NO: 1928711 - RNA, 21 nt, Human
ucuuuggacccugaggcccag

SEQ ID NO: 1928712 - RNA, 12 nt, Human
agagcagagacc

SEQ ID NO: 1928713 - RNA, 15 nt, Human
agagcaagacucugu

SEQ ID NO: 1928714 - RNA, 18 nt, Human
agagcaagacucugucua

SEQ ID NO: 1928715 - RNA, 21 nt, Human
agagcaagacucugucuaaaa

SEQ ID NO: 1928716 - RNA, 11 nt, Human
agagccuugcg

SEQ ID NO: 1928717 - RNA, 21 nt, Human
agagccuugcggaagguucua

SEQ ID NO: 1928718 - RNA, 20 nt, Human
agagccacaggucuuuaugu

SEQ ID NO: 1928719 - RNA, 17 nt, Human
agagccacaggucuuua

SEQ ID NO: 1928720 - RNA, 16 nt, Human
agagcagugggccugg

SEQ ID NO: 1928721 - RNA, 20 nt, Human
agagcagagaccaucccuga

SEQ ID NO: 1928722 - RNA, 17 nt, Human
agagcagagaccauccc

SEQ ID NO: 1928723 - RNA, 18 nt, Human
agagcagagaccaucccu

SEQ ID NO: 1928724 - RNA, 21 nt, Human
ugagugcagaccccuuggcca

SEQ ID NO: 1928725 - RNA, 19 nt, Human
ugagugcagccguuugaga

SEQ ID NO: 1928726 - RNA, 13 nt, Human
ugagugcagaccc

SEQ ID NO: 1928727 - RNA, 17 nt, Human
ugagugcagcucuggag

SEQ ID NO: 1928728 - RNA, 13 nt, Human
ugagugccuuaca

SEQ ID NO: 1928729 - RNA, 14 nt, Human
ugagugccuuacac

SEQ ID NO: 1928730 - RNA, 16 nt, Human
ugagugccuuacacaa

SEQ ID NO: 1928731 - RNA, 19 nt, Human
ugaguggcuucacuccugc

SEQ ID NO: 1928732 - RNA, 22 nt, Human
ugaguggcuucacuccugcugu

SEQ ID NO: 1928733 - RNA, 23 nt, Human
ugaguggcuucacuccugcugua

SEQ ID NO: 1928734 - RNA, 18 nt, Human
ugagucaccaagcccagu

SEQ ID NO: 1928735 - RNA, 20 nt, Human
ugaguacguugugcauuugg

SEQ ID NO: 1928736 - RNA, 14 nt, Human
ugaguacuacaguc

SEQ ID NO: 1928737 - RNA, 20 nt, Human
ugagucagguuugaguagag

SEQ ID NO: 1928738 - RNA, 18 nt, Human
ugaguucauacccuguua

SEQ ID NO: 1928739 - RNA, 16 nt, Human
ugaguuacagccuguu

SEQ ID NO: 1928740 - RNA, 23 nt, Human
ugaguuacaccagaccuguucug

SEQ ID NO: 1928741 - RNA, 18 nt, Human
ugaguuccuagccaccgc

SEQ ID NO: 1928742 - RNA, 24 nt, Human
ugaguuacuugcugcccugugcuc

SEQ ID NO: 1928743 - RNA, 14 nt, Human
ugaguuccuagcca

SEQ ID NO: 1928744 - RNA, 21 nt, Human
ugagugggggaucacagccuc

SEQ ID NO: 1928745 - RNA, 15 nt, Human
ugauacaaugcugug

SEQ ID NO: 1928746 - RNA, 14 nt, Human
ugauacaaugcugu

SEQ ID NO: 1928747 - RNA, 19 nt, Human
agcauaaaaauuagccaag

SEQ ID NO: 1928748 - RNA, 13 nt, Human
agcaguaaaauag

SEQ ID NO: 1928749 - RNA, 23 nt, Human
agcagguucccaagcucagaggc

SEQ ID NO: 1928750 - RNA, 16 nt, Human
agcagguucccaagcu

SEQ ID NO: 1928751 - RNA, 17 nt, Human
agcagguucccaagcuc

SEQ ID NO: 1928752 - RNA, 18 nt, Human
agcagguucccaagcuca

SEQ ID NO: 1928753 - RNA, 19 nt, Human
ugaguacguugugcauuug

SEQ ID NO: 1928754 - RNA, 18 nt, Human
ugaguacguugugcauuu

SEQ ID NO: 1928755 - RNA, 17 nt, Human
ugaguacguugugcauu

SEQ ID NO: 1928756 - RNA, 16 nt, Human
ugaguacguugugcau

SEQ ID NO: 1928757 - RNA, 23 nt, Human
agcauaaaaauuagccaagugug

SEQ ID NO: 1928758 - RNA, 22 nt, Human
agcaguuuucaagucaaauuaa

SEQ ID NO: 1928759 - RNA, 13 nt, Human
agcaguuuucaag

SEQ ID NO: 1928760 - RNA, 17 nt, Human
agcaguuuucaagucaa

SEQ ID NO: 1928761 - RNA, 18 nt, Human
agcaguuuucaagucaaa

SEQ ID NO: 1928762 - RNA, 21 nt, Human
agcaguuuucaagucaaauua

SEQ ID NO: 1928763 - RNA, 12 nt, Human
agcauacaacuu

SEQ ID NO: 1928764 - RNA, 16 nt, Human
agcagcagggagggcu

SEQ ID NO: 1928765 - RNA, 19 nt, Human
agcagcagccuuuaaugca

SEQ ID NO: 1928766 - RNA, 13 nt, Human
agcaggacaugga

SEQ ID NO: 1928767 - RNA, 15 nt, Human
agcagccacauuccu

SEQ ID NO: 1928768 - RNA, 11 nt, Human
agcagccacau

SEQ ID NO: 1928769 - RNA, 20 nt, Human
ugacccaugcugcccuguga

SEQ ID NO: 1928770 - RNA, 19 nt, Human
agcagcaccguucugugca

SEQ ID NO: 1928771 - RNA, 23 nt, Human
ugacccagccccuugagaaaccu

SEQ ID NO: 1928772 - RNA, 20 nt, Human
agcagcaccguucugugcac

SEQ ID NO: 1928773 - RNA, 17 nt, Human
ugacccaugcugcccug

SEQ ID NO: 1928774 - RNA, 18 nt, Human
ugacccagccccuugaga

SEQ ID NO: 1928775 - RNA, 19 nt, Human
ugacccagccccuugagaa

SEQ ID NO: 1928776 - RNA, 21 nt, Human
ugacccagccccuugagaaac

SEQ ID NO: 1928777 - RNA, 18 nt, Human
ugacccaugcugcccugu

SEQ ID NO: 1928778 - RNA, 19 nt, Human
ugacccaugcugcccugug

SEQ ID NO: 1928779 - RNA, 15 nt, Human
agcagggcucagcgg

SEQ ID NO: 1928780 - RNA, 14 nt, Human
agcagggcucagcg

SEQ ID NO: 1928781 - RNA, 13 nt, Human
agcagggcucagc

SEQ ID NO: 1928782 - RNA, 24 nt, Human
agcagggaugcccuggagguggcu

SEQ ID NO: 1928783 - RNA, 20 nt, Human
agcagggagggcuucugcca

SEQ ID NO: 1928784 - RNA, 21 nt, Human
agcagggaaaaugcagcaggg

SEQ ID NO: 1928785 - RNA, 17 nt, Human
agcagggaugcccugga

SEQ ID NO: 1928786 - RNA, 22 nt, Human
agcagggaugcccuggaggugg

SEQ ID NO: 1928787 - RNA, 22 nt, Human
agcagggcucagcggggacagc

SEQ ID NO: 1928788 - RNA, 21 nt, Human
agcagguccccagcuuuggcu

SEQ ID NO: 1928789 - RNA, 20 nt, Human
agcagguccccagcuuuggc

SEQ ID NO: 1928790 - RNA, 13 nt, Human
agcaggugcugac

SEQ ID NO: 1928791 - RNA, 15 nt, Human
agcagggaaacagcu

SEQ ID NO: 1928792 - RNA, 14 nt, Human
agcagggaaacagc

SEQ ID NO: 1928793 - RNA, 13 nt, Human
agcagggaaacag

SEQ ID NO: 1928794 - RNA, 21 nt, Human
agcaggcucucaggccagcug

SEQ ID NO: 1928795 - RNA, 22 nt, Human
agcaggcucucaggccagcugc

SEQ ID NO: 1928796 - RNA, 23 nt, Human
agcaggcucucaggccagcugcu

SEQ ID NO: 1928797 - RNA, 17 nt, Human
agcaggcucgggcuccc

SEQ ID NO: 1928798 - RNA, 13 nt, Human
agcaggcucucag

SEQ ID NO: 1928799 - RNA, 14 nt, Human
agcaggcucucagg

SEQ ID NO: 1928800 - RNA, 15 nt, Human
agcaggcucucaggc

SEQ ID NO: 1928801 - RNA, 16 nt, Human
agcaggcucucaggcc

SEQ ID NO: 1928802 - RNA, 17 nt, Human
agcaggcucucaggcca

SEQ ID NO: 1928803 - RNA, 18 nt, Human
agcaggcucucaggccag

SEQ ID NO: 1928804 - RNA, 19 nt, Human
agcaggcucucaggccagc

SEQ ID NO: 1928805 - RNA, 12 nt, Human
ugauggccacaa

SEQ ID NO: 1928806 - RNA, 17 nt, Human
ugauggcccauucuacu

SEQ ID NO: 1928807 - RNA, 18 nt, Human
ugauggcccauucuacuu

SEQ ID NO: 1928808 - RNA, 19 nt, Human
ugauggcccauucuacuug

SEQ ID NO: 1928809 - RNA, 23 nt, Human
ugauggcaacagaucuggaaccu

SEQ ID NO: 1928810 - RNA, 21 nt, Human
ugaugaucuuugcagacaggc

SEQ ID NO: 1928811 - RNA, 16 nt, Human
ugauggcaacagaucu

SEQ ID NO: 1928812 - RNA, 18 nt, Human
ugauggcaacagaucugg

SEQ ID NO: 1928813 - RNA, 19 nt, Human
ugauggcaacagaucugga

SEQ ID NO: 1928814 - RNA, 22 nt, Human
ugaugggcaacccccagccugc

SEQ ID NO: 1928815 - RNA, 13 nt, Human
ugauggggcccug

SEQ ID NO: 1928816 - RNA, 21 nt, Human
ugaugggcaacccccagccug

SEQ ID NO: 1928817 - RNA, 21 nt, Human
ugauggcccauucuacuugcu

SEQ ID NO: 1928818 - RNA, 20 nt, Human
ugauggcccauucuacuugc

SEQ ID NO: 1928819 - RNA, 20 nt, Human
ugaugaucuuugcagacagg

SEQ ID NO: 1928820 - RNA, 19 nt, Human
ugaugaucuuugcagacag

SEQ ID NO: 1928821 - RNA, 23 nt, Human
ugaugaaaugaggucagagccug

SEQ ID NO: 1928822 - RNA, 22 nt, Human
ugaugaaaugaggucagagccu

SEQ ID NO: 1928823 - RNA, 18 nt, Human
ugaugaaaauauuuaaag

SEQ ID NO: 1928824 - RNA, 14 nt, Human
ugaucuaggaagac

SEQ ID NO: 1928825 - RNA, 15 nt, Human
ugaucuaggaagacu

SEQ ID NO: 1928826 - RNA, 16 nt, Human
agccacggccaggcca

SEQ ID NO: 1928827 - RNA, 16 nt, Human
ugauuaaauucuugca

SEQ ID NO: 1928828 - RNA, 13 nt, Human
ugauuaaauucuu

SEQ ID NO: 1928829 - RNA, 17 nt, Human
ugauuaaauucuugcaa

SEQ ID NO: 1928830 - RNA, 23 nt, Human
ugauguuuuccaugaguccccug

SEQ ID NO: 1928831 - RNA, 19 nt, Human
ugauguuuuccaugagucc

SEQ ID NO: 1928832 - RNA, 21 nt, Human
ugauguuuuaaggaugcuugu

SEQ ID NO: 1928833 - RNA, 17 nt, Human
ugauguuuuccaugagu

SEQ ID NO: 1928834 - RNA, 22 nt, Human
ugauggggcccugccuccuuug

SEQ ID NO: 1928835 - RNA, 15 nt, Human
ugaugggucaguugu

SEQ ID NO: 1928836 - RNA, 23 nt, Human
ugauccagaaagaaaacuuguau

SEQ ID NO: 1928837 - RNA, 13 nt, Human
agccaccccugag

SEQ ID NO: 1928838 - RNA, 13 nt, Human
ugauccagaaaga

SEQ ID NO: 1928839 - RNA, 20 nt, Human
ugauccucccaccucagccu

SEQ ID NO: 1928840 - RNA, 19 nt, Human
ugauccucccaccucagcc

SEQ ID NO: 1928841 - RNA, 13 nt, Human
ugaucuaggaaga

SEQ ID NO: 1928842 - RNA, 18 nt, Human
ugauccucccaccucagc

SEQ ID NO: 1928843 - RNA, 21 nt, Human
agccacaggccugagauuuca

SEQ ID NO: 1928844 - RNA, 17 nt, Human
agccacaggccugagau

SEQ ID NO: 1928845 - RNA, 16 nt, Human
agccacaggccugaga

SEQ ID NO: 1928846 - RNA, 14 nt, Human
agccacaggccuga

SEQ ID NO: 1928847 - RNA, 23 nt, Human
agccacaggccugagauuucauc

SEQ ID NO: 1928848 - RNA, 22 nt, Human
agccacaggccugagauuucau

SEQ ID NO: 1928849 - RNA, 22 nt, Human
agccacagugagggagauccca

SEQ ID NO: 1928850 - RNA, 20 nt, Human
agccacagugagggagaucc

SEQ ID NO: 1928851 - RNA, 13 nt, Human
agccacaggccug

SEQ ID NO: 1928852 - RNA, 13 nt, Human
agccacagcuggu

SEQ ID NO: 1928853 - RNA, 21 nt, Human
agccacacucugggcuccaga

SEQ ID NO: 1928854 - RNA, 16 nt, Human
agccaauucagacagg

SEQ ID NO: 1928855 - RNA, 17 nt, Human
agccaauucagacaggc

SEQ ID NO: 1928856 - RNA, 18 nt, Human
agccaauucagacaggca

SEQ ID NO: 1928857 - RNA, 17 nt, Human
agccacaaccacauaca

SEQ ID NO: 1928858 - RNA, 16 nt, Human
agcauuugucaacaaa

SEQ ID NO: 1928859 - RNA, 14 nt, Human
agcauuuauaaauu

SEQ ID NO: 1928860 - RNA, 16 nt, Human
agcauuuacugugucu

SEQ ID NO: 1928861 - RNA, 12 nt, Human
agcauuuuccuc

SEQ ID NO: 1928862 - RNA, 13 nt, Human
agcauuuuccucu

SEQ ID NO: 1928863 - RNA, 18 nt, Human
agcauuuguguugaagag

SEQ ID NO: 1928864 - RNA, 17 nt, Human
agcauuuguguugaaga

SEQ ID NO: 1928865 - RNA, 16 nt, Human
agccaaaacagaucca

SEQ ID NO: 1928866 - RNA, 15 nt, Human
agcauuuuuuaaaaa

SEQ ID NO: 1928867 - RNA, 15 nt, Human
agcauuuugcuaaau

SEQ ID NO: 1928868 - RNA, 22 nt, Human
agcauuuuccucugcuuugaaa

SEQ ID NO: 1928869 - RNA, 14 nt, Human
agcauuuuccucug

SEQ ID NO: 1928870 - RNA, 17 nt, Human
agcauuuuccucugcuu

SEQ ID NO: 1928871 - RNA, 18 nt, Human
agcauuuuccucugcuuu

SEQ ID NO: 1928872 - RNA, 21 nt, Human
agcauuuuccucugcuuugaa

SEQ ID NO: 1928873 - RNA, 22 nt, Human
agcauuuugcuaaaugugaaug

SEQ ID NO: 1928874 - RNA, 15 nt, Human
agcauuuuguauuug

SEQ ID NO: 1928875 - RNA, 14 nt, Human
agcauuccuuuuga

SEQ ID NO: 1928876 - RNA, 19 nt, Human
agcauggcugccaauggga

SEQ ID NO: 1928877 - RNA, 16 nt, Human
agcauggguucauccu

SEQ ID NO: 1928878 - RNA, 19 nt, Human
agcauuaugauguggguca

SEQ ID NO: 1928879 - RNA, 14 nt, Human
ugaucacggcucac

SEQ ID NO: 1928880 - RNA, 13 nt, Human
ugaucacggcuca

SEQ ID NO: 1928881 - RNA, 15 nt, Human
ugaucacggcucacu

SEQ ID NO: 1928882 - RNA, 18 nt, Human
ugaucacggcucacugca

SEQ ID NO: 1928883 - RNA, 17 nt, Human
agcauauucaggaagcu

SEQ ID NO: 1928884 - RNA, 19 nt, Human
agcauauucaggaagcuca

SEQ ID NO: 1928885 - RNA, 21 nt, Human
agcauauucaggaagcucagg

SEQ ID NO: 1928886 - RNA, 18 nt, Human
ugauacaaugcugugccc

SEQ ID NO: 1928887 - RNA, 21 nt, Human
ugauacagaaaaguugaauuu

SEQ ID NO: 1928888 - RNA, 16 nt, Human
ugauacauccaaagca

SEQ ID NO: 1928889 - RNA, 22 nt, Human
ugauacauccaaagcagacagc

SEQ ID NO: 1928890 - RNA, 13 nt, Human
agcauggcugcca

SEQ ID NO: 1928891 - RNA, 15 nt, Human
agcauccuggaauau

SEQ ID NO: 1928892 - RNA, 14 nt, Human
agcauccuggaaua

SEQ ID NO: 1928893 - RNA, 13 nt, Human
agcauccuggaau

SEQ ID NO: 1928894 - RNA, 23 nt, Human
agcaucaggccaggcccucugcc

SEQ ID NO: 1928895 - RNA, 22 nt, Human
agcaucaggccaggcccucugc

SEQ ID NO: 1928896 - RNA, 21 nt, Human
agcaucaggccaggcccucug

SEQ ID NO: 1928897 - RNA, 17 nt, Human
agcaucacuugggauua

SEQ ID NO: 1928898 - RNA, 16 nt, Human
agcauauucaggaagc

SEQ ID NO: 1928899 - RNA, 23 nt, Human
ugcacaugucuuguacaugugua

SEQ ID NO: 1928900 - RNA, 16 nt, Human
agcccugggaucacug

SEQ ID NO: 1928901 - RNA, 18 nt, Human
agcccugggaucacugug

SEQ ID NO: 1928902 - RNA, 22 nt, Human
ugcacaugucuuguacaugugu

SEQ ID NO: 1928903 - RNA, 17 nt, Human
agcccugggaggcucug

SEQ ID NO: 1928904 - RNA, 18 nt, Human
agcccugggaggcucugg

SEQ ID NO: 1928905 - RNA, 20 nt, Human
agcccugggaggcucuggag

SEQ ID NO: 1928906 - RNA, 13 nt, Human
ugcaccagcccuu

SEQ ID NO: 1928907 - RNA, 21 nt, Human
ugcaccacugcacuccagccu

SEQ ID NO: 1928908 - RNA, 22 nt, Human
ugcagaagacaguauggcagcu

SEQ ID NO: 1928909 - RNA, 16 nt, Human
ugcacuccagccuggg

SEQ ID NO: 1928910 - RNA, 15 nt, Human
ugcacuccagccugg

SEQ ID NO: 1928911 - RNA, 17 nt, Human
ugcacuccagccugagc

SEQ ID NO: 1928912 - RNA, 14 nt, Human
ugcaccggcuggcc

SEQ ID NO: 1928913 - RNA, 15 nt, Human
ugcaccggcuggccu

SEQ ID NO: 1928914 - RNA, 16 nt, Human
ugcaccggcuggccug

SEQ ID NO: 1928915 - RNA, 14 nt, Human
ugcacucagcucuu

SEQ ID NO: 1928916 - RNA, 14 nt, Human
ugcacuccagccug

SEQ ID NO: 1928917 - RNA, 15 nt, Human
ugcacuccagccuga

SEQ ID NO: 1928918 - RNA, 18 nt, Human
agccccgugggguuccuc

SEQ ID NO: 1928919 - RNA, 20 nt, Human
agccccugucuagagaggga

SEQ ID NO: 1928920 - RNA, 21 nt, Human
agccccugucuagagagggag

SEQ ID NO: 1928921 - RNA, 22 nt, Human
agccccugucuagagagggagg

SEQ ID NO: 1928922 - RNA, 23 nt, Human
agccccugucuagagagggaggc

SEQ ID NO: 1928923 - RNA, 14 nt, Human
agccccgaggccuu

SEQ ID NO: 1928924 - RNA, 14 nt, Human
agcccaggccuccu

SEQ ID NO: 1928925 - RNA, 19 nt, Human
agcccaggccuccuacagc

SEQ ID NO: 1928926 - RNA, 16 nt, Human
agcccccuggccucug

SEQ ID NO: 1928927 - RNA, 17 nt, Human
agcccccuggccucugu

SEQ ID NO: 1928928 - RNA, 19 nt, Human
agcccccuggccucugugc

SEQ ID NO: 1928929 - RNA, 16 nt, Human
agcccgggcucugccu

SEQ ID NO: 1928930 - RNA, 18 nt, Human
agcccugaguuccuagcc

SEQ ID NO: 1928931 - RNA, 23 nt, Human
agcccugaguuccuagccaccgc

SEQ ID NO: 1928932 - RNA, 20 nt, Human
agcccugaguuccuagccac

SEQ ID NO: 1928933 - RNA, 14 nt, Human
agcccugcagaggg

SEQ ID NO: 1928934 - RNA, 15 nt, Human
agcccugcagagggc

SEQ ID NO: 1928935 - RNA, 16 nt, Human
agcccugcagagggca

SEQ ID NO: 1928936 - RNA, 19 nt, Human
agcccugcagagggcacag

SEQ ID NO: 1928937 - RNA, 14 nt, Human
agccccuucugacc

SEQ ID NO: 1928938 - RNA, 15 nt, Human
agccccuucugaccc

SEQ ID NO: 1928939 - RNA, 16 nt, Human
agccccuucugaccca

SEQ ID NO: 1928940 - RNA, 19 nt, Human
agccccuucugacccaugc

SEQ ID NO: 1928941 - RNA, 13 nt, Human
agcccgggcucug

SEQ ID NO: 1928942 - RNA, 14 nt, Human
agcccgggcucugc

SEQ ID NO: 1928943 - RNA, 15 nt, Human
agcccgggcucugcc

SEQ ID NO: 1928944 - RNA, 13 nt, Human
ugcaacaaaauuc

SEQ ID NO: 1928945 - RNA, 15 nt, Human
ugcaacaacauguau

SEQ ID NO: 1928946 - RNA, 13 nt, Human
ugcaacaacaugu

SEQ ID NO: 1928947 - RNA, 13 nt, Human
ugcaacaggcugg

SEQ ID NO: 1928948 - RNA, 14 nt, Human
ugcaaaucuugaaa

SEQ ID NO: 1928949 - RNA, 23 nt, Human
ugcaagccccugcuccagaagau

SEQ ID NO: 1928950 - RNA, 19 nt, Human
ugcaaggaagccacagcug

SEQ ID NO: 1928951 - RNA, 20 nt, Human
ugcaaggaagccacagcugg

SEQ ID NO: 1928952 - RNA, 15 nt, Human
ugcaaggucauuuuu

SEQ ID NO: 1928953 - RNA, 23 nt, Human
ugcaagguuuaggcugguggccc

SEQ ID NO: 1928954 - RNA, 21 nt, Human
ugcaagggacuguguguugcc

SEQ ID NO: 1928955 - RNA, 16 nt, Human
ugcaagggacugugug

SEQ ID NO: 1928956 - RNA, 13 nt, Human
ugcaaggcaaaga

SEQ ID NO: 1928957 - RNA, 12 nt, Human
agcccaggccuc

SEQ ID NO: 1928958 - RNA, 19 nt, Human
ugcaauaaaucugacccag

SEQ ID NO: 1928959 - RNA, 17 nt, Human
ugauuucauuucaacug

SEQ ID NO: 1928960 - RNA, 13 nt, Human
ugauuucauuuca

SEQ ID NO: 1928961 - RNA, 20 nt, Human
ugauuucagcaccuacagug

SEQ ID NO: 1928962 - RNA, 13 nt, Human
ugauuucauucaa

SEQ ID NO: 1928963 - RNA, 18 nt, Human
agccacggccaggccaga

SEQ ID NO: 1928964 - RNA, 17 nt, Human
agccacggccaggccag

SEQ ID NO: 1928965 - RNA, 23 nt, Human
ugauuuccccuuuugcauucucc

SEQ ID NO: 1928966 - RNA, 17 nt, Human
ugauuuccccuuuugca

SEQ ID NO: 1928967 - RNA, 12 nt, Human
ugauuugcauug

SEQ ID NO: 1928968 - RNA, 15 nt, Human
ugauuugcauugaac

SEQ ID NO: 1928969 - RNA, 13 nt, Human
ugauuugcauuga

SEQ ID NO: 1928970 - RNA, 14 nt, Human
ugauuugcauugaa

SEQ ID NO: 1928971 - RNA, 18 nt, Human
ugauuugcauugaacaca

SEQ ID NO: 1928972 - RNA, 12 nt, Human
ugcaaaccauca

SEQ ID NO: 1928973 - RNA, 13 nt, Human
ugcaaaccaucau

SEQ ID NO: 1928974 - RNA, 20 nt, Human
ugcaaaguaucccuacugua

SEQ ID NO: 1928975 - RNA, 21 nt, Human
ugcaaaggguaucaggugcug

SEQ ID NO: 1928976 - RNA, 13 nt, Human
ugcaaaggacaga

SEQ ID NO: 1928977 - RNA, 15 nt, Human
ugcaaaggacagauc

SEQ ID NO: 1928978 - RNA, 18 nt, Human
ugcaaaccaucauugaaa

SEQ ID NO: 1928979 - RNA, 20 nt, Human
ugcaaaccaucauugaaauc

SEQ ID NO: 1928980 - RNA, 23 nt, Human
ugcaaagaucuguccucagccuu

SEQ ID NO: 1928981 - RNA, 12 nt, Human
ugcaaagaucug

SEQ ID NO: 1928982 - RNA, 21 nt, Human
agccugugcauguaugucuug

SEQ ID NO: 1928983 - RNA, 17 nt, Human
agccugugccucuggga

SEQ ID NO: 1928984 - RNA, 18 nt, Human
agccugugccucugggac

SEQ ID NO: 1928985 - RNA, 19 nt, Human
agccugugccucugggacu

SEQ ID NO: 1928986 - RNA, 21 nt, Human
agccugguuuagccuggaugu

SEQ ID NO: 1928987 - RNA, 19 nt, Human
agccugagucaccugcaga

SEQ ID NO: 1928988 - RNA, 16 nt, Human
agccugagucaccugc

SEQ ID NO: 1928989 - RNA, 13 nt, Human
ugcauggacugug

SEQ ID NO: 1928990 - RNA, 14 nt, Human
agccuuaccacgca

SEQ ID NO: 1928991 - RNA, 22 nt, Human
agccuuagaagucacacaguau

SEQ ID NO: 1928992 - RNA, 20 nt, Human
agccuuagaagucacacagu

SEQ ID NO: 1928993 - RNA, 15 nt, Human
agccuguuuaagaga

SEQ ID NO: 1928994 - RNA, 13 nt, Human
agccuugaacuuu

SEQ ID NO: 1928995 - RNA, 18 nt, Human
agccuugaccauucucca

SEQ ID NO: 1928996 - RNA, 19 nt, Human
agccuugaccauucuccac

SEQ ID NO: 1928997 - RNA, 21 nt, Human
agccuugaccauucuccaccu

SEQ ID NO: 1928998 - RNA, 19 nt, Human
agccuugcggaagguucua

SEQ ID NO: 1928999 - RNA, 13 nt, Human
ugccauaauuacu

SEQ ID NO: 1929000 - RNA, 17 nt, Human
ugccagccgagauagcc

SEQ ID NO: 1929001 - RNA, 22 nt, Human
ugccagccgagauagccaaggc

SEQ ID NO: 1929002 - RNA, 12 nt, Human
ugccacaggaca

SEQ ID NO: 1929003 - RNA, 13 nt, Human
ugccacaggacac

SEQ ID NO: 1929004 - RNA, 14 nt, Human
ugccacaggacaca

SEQ ID NO: 1929005 - RNA, 18 nt, Human
ugccacaggacacaguca

SEQ ID NO: 1929006 - RNA, 20 nt, Human
ugccacaggacacagucaga

SEQ ID NO: 1929007 - RNA, 16 nt, Human
ugcauuuaaaagauac

SEQ ID NO: 1929008 - RNA, 18 nt, Human
ugccaaugggagcucaug

SEQ ID NO: 1929009 - RNA, 13 nt, Human
ugccaauggacua

SEQ ID NO: 1929010 - RNA, 14 nt, Human
ugccaaugggagcu

SEQ ID NO: 1929011 - RNA, 21 nt, Human
ugccaauauuaaaucugcugg

SEQ ID NO: 1929012 - RNA, 16 nt, Human
ugcaggugaaacccag

SEQ ID NO: 1929013 - RNA, 18 nt, Human
ugcagguagaccugucuc

SEQ ID NO: 1929014 - RNA, 22 nt, Human
ugcagguagaccugucuccugg

SEQ ID NO: 1929015 - RNA, 11 nt, Human
ugcaggucccu

SEQ ID NO: 1929016 - RNA, 15 nt, Human
ugcagguagaccugu

SEQ ID NO: 1929017 - RNA, 22 nt, Human
ugcaggucccuaauaaagcugu

SEQ ID NO: 1929018 - RNA, 18 nt, Human
ugcagccucacaguccuu

SEQ ID NO: 1929019 - RNA, 17 nt, Human
ugcagccucacaguccu

SEQ ID NO: 1929020 - RNA, 21 nt, Human
ugcagccucacaguccuuacc

SEQ ID NO: 1929021 - RNA, 21 nt, Human
ugcagacaggcaagcaccucc

SEQ ID NO: 1929022 - RNA, 13 nt, Human
ugcagacaggcaa

SEQ ID NO: 1929023 - RNA, 12 nt, Human
ugcagacaggca

SEQ ID NO: 1929024 - RNA, 13 nt, Human
agccuccugcccu

SEQ ID NO: 1929025 - RNA, 14 nt, Human
agccuccugcccuu

SEQ ID NO: 1929026 - RNA, 18 nt, Human
agccuccugcccuuaccu

SEQ ID NO: 1929027 - RNA, 18 nt, Human
agccucgacacagagugg

SEQ ID NO: 1929028 - RNA, 17 nt, Human
agccucgacacagagug

SEQ ID NO: 1929029 - RNA, 20 nt, Human
ugcauaccacuuuuguucuu

SEQ ID NO: 1929030 - RNA, 18 nt, Human
ugcauaccacuuuuguuc

SEQ ID NO: 1929031 - RNA, 16 nt, Human
ugcauaccacuuuugu

SEQ ID NO: 1929032 - RNA, 13 nt, Human
ugcaguaaaucuu

SEQ ID NO: 1929033 - RNA, 16 nt, Human
ugcaguaucaugcccu

SEQ ID NO: 1929034 - RNA, 21 nt, Human
ugcaguaucaugcccugugca

SEQ ID NO: 1929035 - RNA, 17 nt, Human
ugcauagaauaaaauuu

SEQ ID NO: 1929036 - RNA, 17 nt, Human
ugcauagagccacguau

SEQ ID NO: 1929037 - RNA, 19 nt, Human
ugcauacucauuaggaugg

SEQ ID NO: 1929038 - RNA, 13 nt, Human
ugcauacucauua

SEQ ID NO: 1929039 - RNA, 19 nt, Human
ugcauagagccacguaugu

SEQ ID NO: 1929040 - RNA, 18 nt, Human
ugcaucuagauuauggag

SEQ ID NO: 1929041 - RNA, 18 nt, Human
ugcaugaagguuucugaa

SEQ ID NO: 1929042 - RNA, 13 nt, Human
ugcaugaagguuu

SEQ ID NO: 1929043 - RNA, 21 nt, Human
ugcaugaagguuucugaaaau

SEQ ID NO: 1929044 - RNA, 19 nt, Human
ugcaugaagguuucugaaa

SEQ ID NO: 1929045 - RNA, 18 nt, Human
ugcaugcugucccuuacg

SEQ ID NO: 1929046 - RNA, 14 nt, Human
ugcaugauuuugua

SEQ ID NO: 1929047 - RNA, 18 nt, Human
ugcaugauuuuguaaccc

SEQ ID NO: 1929048 - RNA, 19 nt, Human
ugcaugcugucccuuacgu

SEQ ID NO: 1929049 - RNA, 21 nt, Human
ugcaugcugucccuuacguga

SEQ ID NO: 1929050 - RNA, 17 nt, Human
ugcaugcugcuggacag

SEQ ID NO: 1929051 - RNA, 15 nt, Human
aggacgugggcuggg

SEQ ID NO: 1929052 - RNA, 19 nt, Human
aggacgugggcugggccca

SEQ ID NO: 1929053 - RNA, 20 nt, Human
aggacuauauuugggccugc

SEQ ID NO: 1929054 - RNA, 14 nt, Human
aggacgcucucugg

SEQ ID NO: 1929055 - RNA, 13 nt, Human
aggacgcucucug

SEQ ID NO: 1929056 - RNA, 20 nt, Human
aggaccuucgggcugugccc

SEQ ID NO: 1929057 - RNA, 20 nt, Human
aggacgaacauccaaccuuc

SEQ ID NO: 1929058 - RNA, 20 nt, Human
aggacgcucucuggccuucg

SEQ ID NO: 1929059 - RNA, 19 nt, Human
aggacgcucucuggccuuc

SEQ ID NO: 1929060 - RNA, 17 nt, Human
aggacgcucucuggccu

SEQ ID NO: 1929061 - RNA, 16 nt, Human
aggacgcucucuggcc

SEQ ID NO: 1929062 - RNA, 19 nt, Human
aggaccuucgggcugugcc

SEQ ID NO: 1929063 - RNA, 18 nt, Human
aggaccuucgggcugugc

SEQ ID NO: 1929064 - RNA, 21 nt, Human
aggaccuguggccaaguucuu

SEQ ID NO: 1929065 - RNA, 13 nt, Human
aggacacagucag

SEQ ID NO: 1929066 - RNA, 17 nt, Human
aggagagucacagaaca

SEQ ID NO: 1929067 - RNA, 15 nt, Human
aggagcacacccagc

SEQ ID NO: 1929068 - RNA, 20 nt, Human
aggagauggaaguugcagug

SEQ ID NO: 1929069 - RNA, 12 nt, Human
aggagcagccac

SEQ ID NO: 1929070 - RNA, 13 nt, Human
aggagcagccaca

SEQ ID NO: 1929071 - RNA, 17 nt, Human
aggagccccgaggccuu

SEQ ID NO: 1929072 - RNA, 23 nt, Human
aggagcccugggaggcucuggag

SEQ ID NO: 1929073 - RNA, 16 nt, Human
aggagccuccugcccu

SEQ ID NO: 1929074 - RNA, 15 nt, Human
aggagccuaggccag

SEQ ID NO: 1929075 - RNA, 19 nt, Human
aggacuuuucuuuguggcu

SEQ ID NO: 1929076 - RNA, 17 nt, Human
aggacuuuucuuugugg

SEQ ID NO: 1929077 - RNA, 22 nt, Human
aggacuuuucuuuguggcuucc

SEQ ID NO: 1929078 - RNA, 19 nt, Human
aggagaaacuggaacucuc

SEQ ID NO: 1929079 - RNA, 18 nt, Human
aggagaaacuggaacucu

SEQ ID NO: 1929080 - RNA, 22 nt, Human
aggacuuccuguccagcuccaa

SEQ ID NO: 1929081 - RNA, 15 nt, Human
aggacugggccacuu

SEQ ID NO: 1929082 - RNA, 12 nt, Human
aggacugggcca

SEQ ID NO: 1929083 - RNA, 11 nt, Human
aggacugggcc

SEQ ID NO: 1929084 - RNA, 18 nt, Human
ugcuuuuggucuguguga

SEQ ID NO: 1929085 - RNA, 20 nt, Human
ugcuuuugucuaugggacuc

SEQ ID NO: 1929086 - RNA, 23 nt, Human
ugcuuuuuaauauugauaugcuu

SEQ ID NO: 1929087 - RNA, 22 nt, Human
ugcuuugugauuuuuguaauuu

SEQ ID NO: 1929088 - RNA, 17 nt, Human
ugcuuugugauuuuugu

SEQ ID NO: 1929089 - RNA, 17 nt, Human
ugcuuuggcuuacuugu

SEQ ID NO: 1929090 - RNA, 14 nt, Human
ugcuuuguguucuu

SEQ ID NO: 1929091 - RNA, 17 nt, Human
aggagccuccugcccuu

SEQ ID NO: 1929092 - RNA, 16 nt, Human
aggagccuaggccagg

SEQ ID NO: 1929093 - RNA, 15 nt, Human
ugcuugagcucagga

SEQ ID NO: 1929094 - RNA, 15 nt, Human
ugcuugacaacaucu

SEQ ID NO: 1929095 - RNA, 16 nt, Human
ugcuugacaacaucug

SEQ ID NO: 1929096 - RNA, 15 nt, Human
ugcuuugggaagccg

SEQ ID NO: 1929097 - RNA, 16 nt, Human
uggaagacagcucuua

SEQ ID NO: 1929098 - RNA, 15 nt, Human
uggaagagggcugca

SEQ ID NO: 1929099 - RNA, 21 nt, Human
uggaaauuuguuauaaugaau

SEQ ID NO: 1929100 - RNA, 23 nt, Human
uggaaauuuguuauaaugaauga

SEQ ID NO: 1929101 - RNA, 17 nt, Human
ugcuuuuucucaaaaug

SEQ ID NO: 1929102 - RNA, 18 nt, Human
ugcuuuuuauuucugcau

SEQ ID NO: 1929103 - RNA, 19 nt, Human
ugcuuuuuauuucugcaua

SEQ ID NO: 1929104 - RNA, 16 nt, Human
ugcuuuuuauggccug

SEQ ID NO: 1929105 - RNA, 15 nt, Human
ugcuuuuuauuucug

SEQ ID NO: 1929106 - RNA, 22 nt, Human
aggaugcacagaguuguuacau

SEQ ID NO: 1929107 - RNA, 22 nt, Human
aggaugaucuaggaagacuuug

SEQ ID NO: 1929108 - RNA, 23 nt, Human
aggaugaucuaggaagacuuugg

SEQ ID NO: 1929109 - RNA, 17 nt, Human
aggauucuuccucccuc

SEQ ID NO: 1929110 - RNA, 19 nt, Human
aggauucuuccucccuccc

SEQ ID NO: 1929111 - RNA, 13 nt, Human
aggaucagucuga

SEQ ID NO: 1929112 - RNA, 18 nt, Human
aggaucuuuugaacccag

SEQ ID NO: 1929113 - RNA, 15 nt, Human
aggauagaugcuggc

SEQ ID NO: 1929114 - RNA, 18 nt, Human
aggauagaugcuggccca

SEQ ID NO: 1929115 - RNA, 19 nt, Human
aggauagaugcuggcccag

SEQ ID NO: 1929116 - RNA, 20 nt, Human
aggauagaugcuggcccagg

SEQ ID NO: 1929117 - RNA, 21 nt, Human
aggauagaugcuggcccaggg

SEQ ID NO: 1929118 - RNA, 22 nt, Human
aggauagaugcuggcccagggc

SEQ ID NO: 1929119 - RNA, 23 nt, Human
aggcccaaauuaucaagcuaaua

SEQ ID NO: 1929120 - RNA, 22 nt, Human
aggcccaaauuaucaagcuaau

SEQ ID NO: 1929121 - RNA, 13 nt, Human
aggcccagagggc

SEQ ID NO: 1929122 - RNA, 13 nt, Human
aggcccggcucca

SEQ ID NO: 1929123 - RNA, 14 nt, Human
aggccccgcccagg

SEQ ID NO: 1929124 - RNA, 23 nt, Human
aggcccccgggugugaagcacag

SEQ ID NO: 1929125 - RNA, 20 nt, Human
uggcacccggccccugcugg

SEQ ID NO: 1929126 - RNA, 19 nt, Human
uggcacccggccccugcug

SEQ ID NO: 1929127 - RNA, 18 nt, Human
uggcacccggccccugcu

SEQ ID NO: 1929128 - RNA, 14 nt, Human
uggcaccagacacc

SEQ ID NO: 1929129 - RNA, 16 nt, Human
uggcaccagacaccca

SEQ ID NO: 1929130 - RNA, 13 nt, Human
uggcagcucagag

SEQ ID NO: 1929131 - RNA, 23 nt, Human
uggcagcucaccucucccuugga

SEQ ID NO: 1929132 - RNA, 21 nt, Human
uggcagcucaccucucccuug

SEQ ID NO: 1929133 - RNA, 22 nt, Human
uggcagcucaccucucccuugg

SEQ ID NO: 1929134 - RNA, 13 nt, Human
aggccagccuuga

SEQ ID NO: 1929135 - RNA, 12 nt, Human
aggccagcugcu

SEQ ID NO: 1929136 - RNA, 21 nt, Human
aggcccaaauuaucaagcuaa

SEQ ID NO: 1929137 - RNA, 13 nt, Human
aggccagcugccu

SEQ ID NO: 1929138 - RNA, 15 nt, Human
aggccagccuugacc

SEQ ID NO: 1929139 - RNA, 14 nt, Human
uggaguugaaaauc

SEQ ID NO: 1929140 - RNA, 13 nt, Human
uggaguggccacu

SEQ ID NO: 1929141 - RNA, 14 nt, Human
uggagugcagugag

SEQ ID NO: 1929142 - RNA, 17 nt, Human
uggagugcaaugacaca

SEQ ID NO: 1929143 - RNA, 16 nt, Human
aggcauuugcugaaua

SEQ ID NO: 1929144 - RNA, 20 nt, Human
aggcauuugcugaauacaga

SEQ ID NO: 1929145 - RNA, 15 nt, Human
uggaguucuugugcc

SEQ ID NO: 1929146 - RNA, 14 nt, Human
uggaguucuugugc

SEQ ID NO: 1929147 - RNA, 16 nt, Human
uggaguucuugugcca

SEQ ID NO: 1929148 - RNA, 15 nt, Human
uggaguugaucugga

SEQ ID NO: 1929149 - RNA, 17 nt, Human
uggaguugaucuggaac

SEQ ID NO: 1929150 - RNA, 19 nt, Human
uggaguugaucuggaaccc

SEQ ID NO: 1929151 - RNA, 23 nt, Human
uggaugccugguggcagcugcgg

SEQ ID NO: 1929152 - RNA, 21 nt, Human
uggaugccugguggcagcugc

SEQ ID NO: 1929153 - RNA, 23 nt, Human
uggaugcggaacccaaauuacgu

SEQ ID NO: 1929154 - RNA, 22 nt, Human
uggaguugaucuggaacccaga

SEQ ID NO: 1929155 - RNA, 13 nt, Human
uggauuauuucau

SEQ ID NO: 1929156 - RNA, 23 nt, Human
uggcacaucagcacgauuucugu

SEQ ID NO: 1929157 - RNA, 17 nt, Human
uggauucugagagcugu

SEQ ID NO: 1929158 - RNA, 16 nt, Human
uggauucugagagcug

SEQ ID NO: 1929159 - RNA, 17 nt, Human
aggcaagcaccuccugc

SEQ ID NO: 1929160 - RNA, 13 nt, Human
uggagccagcucc

SEQ ID NO: 1929161 - RNA, 19 nt, Human
aggcaagcaccuccugccu

SEQ ID NO: 1929162 - RNA, 18 nt, Human
aggcaagcaccuccugcc

SEQ ID NO: 1929163 - RNA, 20 nt, Human
aggcaagcaccuccugccuc

SEQ ID NO: 1929164 - RNA, 12 nt, Human
aggcaagcccug

SEQ ID NO: 1929165 - RNA, 17 nt, Human
aggcaaggcugucaauu

SEQ ID NO: 1929166 - RNA, 16 nt, Human
aggcaaggcugucaau

SEQ ID NO: 1929167 - RNA, 17 nt, Human
aggauugcuacuguccu

SEQ ID NO: 1929168 - RNA, 15 nt, Human
aggauugcuacuguc

SEQ ID NO: 1929169 - RNA, 18 nt, Human
aggauugcuacuguccua

SEQ ID NO: 1929170 - RNA, 16 nt, Human
uggacuguucccugag

SEQ ID NO: 1929171 - RNA, 14 nt, Human
uggagaaaauggac

SEQ ID NO: 1929172 - RNA, 17 nt, Human
uggacuguucccugagg

SEQ ID NO: 1929173 - RNA, 22 nt, Human
aggcauaaagucagggguuccc

SEQ ID NO: 1929174 - RNA, 18 nt, Human
aggcauugugggaagggg

SEQ ID NO: 1929175 - RNA, 20 nt, Human
aggcauuuaggccaugggac

SEQ ID NO: 1929176 - RNA, 12 nt, Human
aggcauuuccua

SEQ ID NO: 1929177 - RNA, 22 nt, Human
aggcaggucuugaacuccuggc

SEQ ID NO: 1929178 - RNA, 18 nt, Human
aggcaggugaauuguuug

SEQ ID NO: 1929179 - RNA, 12 nt, Human
aggcagggucuc

SEQ ID NO: 1929180 - RNA, 15 nt, Human
aggcauaaagucagg

SEQ ID NO: 1929181 - RNA, 17 nt, Human
aggcaggugggauggau

SEQ ID NO: 1929182 - RNA, 20 nt, Human
aggcagcuuuuucucuccca

SEQ ID NO: 1929183 - RNA, 16 nt, Human
ugccauagucacaugg

SEQ ID NO: 1929184 - RNA, 17 nt, Human
ugccauagucacauggc

SEQ ID NO: 1929185 - RNA, 18 nt, Human
ugccauacuguaugcagu

SEQ ID NO: 1929186 - RNA, 16 nt, Human
ugccaucauguuuaca

SEQ ID NO: 1929187 - RNA, 15 nt, Human
agcucccaggugcag

SEQ ID NO: 1929188 - RNA, 23 nt, Human
agcucccaggcauuccccaggag

SEQ ID NO: 1929189 - RNA, 20 nt, Human
agcucccaggugcagccaga

SEQ ID NO: 1929190 - RNA, 21 nt, Human
agcucccaggugcagccagag

SEQ ID NO: 1929191 - RNA, 22 nt, Human
agcucccaggugcagccagagg

SEQ ID NO: 1929192 - RNA, 15 nt, Human
agcuccuucuguccu

SEQ ID NO: 1929193 - RNA, 13 nt, Human
agcucccaggcau

SEQ ID NO: 1929194 - RNA, 13 nt, Human
agcuccaguucga

SEQ ID NO: 1929195 - RNA, 21 nt, Human
agcuccuucuguccuacucug

SEQ ID NO: 1929196 - RNA, 16 nt, Human
agcuccuucuguccua

SEQ ID NO: 1929197 - RNA, 13 nt, Human
agcucgcuaaagu

SEQ ID NO: 1929198 - RNA, 12 nt, Human
agcucuggucca

SEQ ID NO: 1929199 - RNA, 17 nt, Human
agcucugguccauagag

SEQ ID NO: 1929200 - RNA, 18 nt, Human
ugcccuuaccugccagga

SEQ ID NO: 1929201 - RNA, 13 nt, Human
ugccucagccucc

SEQ ID NO: 1929202 - RNA, 12 nt, Human
ugccucagccuc

SEQ ID NO: 1929203 - RNA, 12 nt, Human
ugccgcagcccu

SEQ ID NO: 1929204 - RNA, 14 nt, Human
ugccgcagcccugc

SEQ ID NO: 1929205 - RNA, 16 nt, Human
ugccucagcccugacc

SEQ ID NO: 1929206 - RNA, 17 nt, Human
ugccgcagagcuggccg

SEQ ID NO: 1929207 - RNA, 15 nt, Human
ugccgcagagcuggc

SEQ ID NO: 1929208 - RNA, 14 nt, Human
ugccgcagagcugg

SEQ ID NO: 1929209 - RNA, 13 nt, Human
ugccgcagagcug

SEQ ID NO: 1929210 - RNA, 21 nt, Human
ugccgauauacucuagaugaa

SEQ ID NO: 1929211 - RNA, 23 nt, Human
agcucuguccugggagugagcug

SEQ ID NO: 1929212 - RNA, 13 nt, Human
agcugcaaaggac

SEQ ID NO: 1929213 - RNA, 14 nt, Human
agcugcaaaggaca

SEQ ID NO: 1929214 - RNA, 15 nt, Human
agcugcaaaggacag

SEQ ID NO: 1929215 - RNA, 16 nt, Human
agcugcaaaggacaga

SEQ ID NO: 1929216 - RNA, 19 nt, Human
agcugcaaaggacagaucc

SEQ ID NO: 1929217 - RNA, 21 nt, Human
agcucuguccugggagugagc

SEQ ID NO: 1929218 - RNA, 16 nt, Human
agcucuguccugggag

SEQ ID NO: 1929219 - RNA, 11 nt, Human
agcugcacuga

SEQ ID NO: 1929220 - RNA, 17 nt, Human
agcugcacugaugcugc

SEQ ID NO: 1929221 - RNA, 19 nt, Human
agcugcacugaugcugccc

SEQ ID NO: 1929222 - RNA, 20 nt, Human
agcugccagccgagauagcc

SEQ ID NO: 1929223 - RNA, 20 nt, Human
agcugcacugaugcugcccc

SEQ ID NO: 1929224 - RNA, 22 nt, Human
agcugcacugaugcugccccuc

SEQ ID NO: 1929225 - RNA, 21 nt, Human
agcugcagaaacgaagccauc

SEQ ID NO: 1929226 - RNA, 14 nt, Human
agcugcaggggcau

SEQ ID NO: 1929227 - RNA, 19 nt, Human
agcuguuacugucuucagu

SEQ ID NO: 1929228 - RNA, 14 nt, Human
ugccuguggaacug

SEQ ID NO: 1929229 - RNA, 21 nt, Human
ugccuuacccucauguucuua

SEQ ID NO: 1929230 - RNA, 16 nt, Human
ugccuuggggacaaga

SEQ ID NO: 1929231 - RNA, 20 nt, Human
ugccuuacccucauguucuu

SEQ ID NO: 1929232 - RNA, 16 nt, Human
ugccuguugggccagg

SEQ ID NO: 1929233 - RNA, 17 nt, Human
ugccuguugggccagga

SEQ ID NO: 1929234 - RNA, 16 nt, Human
agcugggacuacaggu

SEQ ID NO: 1929235 - RNA, 20 nt, Human
agcugggguggggaccucag

SEQ ID NO: 1929236 - RNA, 23 nt, Human
agcugggacuacaggcacccacc

SEQ ID NO: 1929237 - RNA, 20 nt, Human
agcugggacuacaggcaccc

SEQ ID NO: 1929238 - RNA, 22 nt, Human
agcugggguggggaccucaggc

SEQ ID NO: 1929239 - RNA, 23 nt, Human
agcugggguggggaccucaggcc

SEQ ID NO: 1929240 - RNA, 19 nt, Human
agcugggguucaugacaau

SEQ ID NO: 1929241 - RNA, 14 nt, Human
agcugggucaggca

SEQ ID NO: 1929242 - RNA, 18 nt, Human
agcugugcucuggacagg

SEQ ID NO: 1929243 - RNA, 17 nt, Human
agcugugcucuggacag

SEQ ID NO: 1929244 - RNA, 18 nt, Human
agcuguuacugucuucag

SEQ ID NO: 1929245 - RNA, 16 nt, Human
agcugccuguucagcu

SEQ ID NO: 1929246 - RNA, 14 nt, Human
agcugccuguucag

SEQ ID NO: 1929247 - RNA, 18 nt, Human
agcugccuguucagcucc

SEQ ID NO: 1929248 - RNA, 19 nt, Human
agcugccuguucagcucca

SEQ ID NO: 1929249 - RNA, 16 nt, Human
ugccuggauggggcug

SEQ ID NO: 1929250 - RNA, 17 nt, Human
ugccuggauggggcugc

SEQ ID NO: 1929251 - RNA, 20 nt, Human
ugccuggauggggcugcacc

SEQ ID NO: 1929252 - RNA, 21 nt, Human
ugccuggauggggcugcaccg

SEQ ID NO: 1929253 - RNA, 20 nt, Human
agcugcuugggcuucauccu

SEQ ID NO: 1929254 - RNA, 16 nt, Human
agcugcuugggcuuca

SEQ ID NO: 1929255 - RNA, 22 nt, Human
agcuggccgcgccaaauaaugu

SEQ ID NO: 1929256 - RNA, 17 nt, Human
ugccucugccucugaca

SEQ ID NO: 1929257 - RNA, 21 nt, Human
ugccuccagggcuggacugag

SEQ ID NO: 1929258 - RNA, 20 nt, Human
ugccuccagggcuggacuga

SEQ ID NO: 1929259 - RNA, 19 nt, Human
ugccuccagggcuggacug

SEQ ID NO: 1929260 - RNA, 18 nt, Human
ugccuccagggcuggacu

SEQ ID NO: 1929261 - RNA, 20 nt, Human
ugccucugccucugacacac

SEQ ID NO: 1929262 - RNA, 18 nt, Human
ugccucugccucugacac

SEQ ID NO: 1929263 - RNA, 14 nt, Human
ugccucagccuccc

SEQ ID NO: 1929264 - RNA, 19 nt, Human
ugccucagcccugacccug

SEQ ID NO: 1929265 - RNA, 17 nt, Human
ugccuccagggcuggac

SEQ ID NO: 1929266 - RNA, 16 nt, Human
ugccuccagggcugga

SEQ ID NO: 1929267 - RNA, 15 nt, Human
ugccuccagggcugg

SEQ ID NO: 1929268 - RNA, 14 nt, Human
ugccuccagggcug

SEQ ID NO: 1929269 - RNA, 12 nt, Human
ugccuccagggc

SEQ ID NO: 1929270 - RNA, 19 nt, Human
ugccuccaggaaccacacc

SEQ ID NO: 1929271 - RNA, 20 nt, Human
ugccuccaggaaccacacca

SEQ ID NO: 1929272 - RNA, 14 nt, Human
ugccuccaggaacc

SEQ ID NO: 1929273 - RNA, 17 nt, Human
ugccuccaggaaccaca

SEQ ID NO: 1929274 - RNA, 23 nt, Human
ugccugcccaggccccugccacc

SEQ ID NO: 1929275 - RNA, 22 nt, Human
ugccugcccaggccccugccac

SEQ ID NO: 1929276 - RNA, 20 nt, Human
ugccugcccaggccccugcc

SEQ ID NO: 1929277 - RNA, 23 nt, Human
ugccuccagggcuggacugaggc

SEQ ID NO: 1929278 - RNA, 24 nt, Human
ugccugcccaggccccugccaccc

SEQ ID NO: 1929279 - RNA, 22 nt, Human
ugccugcuuuuuauggccugug

SEQ ID NO: 1929280 - RNA, 20 nt, Human
ugccugcuuuuuauggccug

SEQ ID NO: 1929281 - RNA, 21 nt, Human
ugccugcuuuuuauggccugu

SEQ ID NO: 1929282 - RNA, 21 nt, Human
aggaagaucucugcagggccg

SEQ ID NO: 1929283 - RNA, 20 nt, Human
aggaagaucucugcagggcc

SEQ ID NO: 1929284 - RNA, 13 nt, Human
aggaagccagcag

SEQ ID NO: 1929285 - RNA, 15 nt, Human
aggaagccaaagagu

SEQ ID NO: 1929286 - RNA, 13 nt, Human
aggaagcucaggg

SEQ ID NO: 1929287 - RNA, 14 nt, Human
aggaagcucagggc

SEQ ID NO: 1929288 - RNA, 23 nt, Human
aggaauuaaguuagggaauggca

SEQ ID NO: 1929289 - RNA, 16 nt, Human
aggaauguguggccug

SEQ ID NO: 1929290 - RNA, 15 nt, Human
aggaagcucagggcc

SEQ ID NO: 1929291 - RNA, 16 nt, Human
aggaagcucagggccu

SEQ ID NO: 1929292 - RNA, 16 nt, Human
aggaagccacagcugg

SEQ ID NO: 1929293 - RNA, 15 nt, Human
aggaagccacagcug

SEQ ID NO: 1929294 - RNA, 18 nt, Human
aggaagccacagcuggug

SEQ ID NO: 1929295 - RNA, 20 nt, Human
ugcugagccucugcucccca

SEQ ID NO: 1929296 - RNA, 16 nt, Human
ugcugagccucugcuc

SEQ ID NO: 1929297 - RNA, 17 nt, Human
ugcugagccucugcucc

SEQ ID NO: 1929298 - RNA, 12 nt, Human
ugcugagccucu

SEQ ID NO: 1929299 - RNA, 14 nt, Human
ugcugagccucugc

SEQ ID NO: 1929300 - RNA, 14 nt, Human
ugcugagagaaaua

SEQ ID NO: 1929301 - RNA, 17 nt, Human
ugcugagaagcuuuuga

SEQ ID NO: 1929302 - RNA, 23 nt, Human
ugcugagagaaauauggaacuua

SEQ ID NO: 1929303 - RNA, 16 nt, Human
ugcucugcugacagac

SEQ ID NO: 1929304 - RNA, 15 nt, Human
ugcucugcugacaga

SEQ ID NO: 1929305 - RNA, 14 nt, Human
ugcucugcugacag

SEQ ID NO: 1929306 - RNA, 14 nt, Human
ugcugagaagcuuu

SEQ ID NO: 1929307 - RNA, 21 nt, Human
ugcuccagcuguucagcuggu

SEQ ID NO: 1929308 - RNA, 16 nt, Human
aggaaaagcugcugac

SEQ ID NO: 1929309 - RNA, 14 nt, Human
aggaaacaacagcu

SEQ ID NO: 1929310 - RNA, 15 nt, Human
aggaaacaacagcuu

SEQ ID NO: 1929311 - RNA, 13 nt, Human
ugcuaucuccccc

SEQ ID NO: 1929312 - RNA, 14 nt, Human
ugcuaucuccccca

SEQ ID NO: 1929313 - RNA, 17 nt, Human
ugcuaucucccccagcc

SEQ ID NO: 1929314 - RNA, 18 nt, Human
ugcuaucucccccagccc

SEQ ID NO: 1929315 - RNA, 16 nt, Human
ugcuaugagcugggga

SEQ ID NO: 1929316 - RNA, 20 nt, Human
ugcuaugagcuggggauguc

SEQ ID NO: 1929317 - RNA, 19 nt, Human
ugcuaugagcuggggaugu

SEQ ID NO: 1929318 - RNA, 22 nt, Human
ugcuaugagcuggggaugucuc

SEQ ID NO: 1929319 - RNA, 13 nt, Human
ugcuauuugcaau

SEQ ID NO: 1929320 - RNA, 23 nt, Human
ugcuaaucagggaggucauuuug

SEQ ID NO: 1929321 - RNA, 22 nt, Human
ugcuaaucagggaggucauuuu

SEQ ID NO: 1929322 - RNA, 18 nt, Human
ugcgguagccagcacaca

SEQ ID NO: 1929323 - RNA, 21 nt, Human
ugcuaaugucaaacuugaguc

SEQ ID NO: 1929324 - RNA, 15 nt, Human
ugcgguccacccagg

SEQ ID NO: 1929325 - RNA, 14 nt, Human
ugcgguccacccag

SEQ ID NO: 1929326 - RNA, 15 nt, Human
ugcgguagccagcac

SEQ ID NO: 1929327 - RNA, 16 nt, Human
ugcgguagccagcaca

SEQ ID NO: 1929328 - RNA, 17 nt, Human
ugcgguagccagcacac

SEQ ID NO: 1929329 - RNA, 16 nt, Human
ugccuuggugugcugu

SEQ ID NO: 1929330 - RNA, 13 nt, Human
agcuguuuaugca

SEQ ID NO: 1929331 - RNA, 14 nt, Human
agcuguuuccauag

SEQ ID NO: 1929332 - RNA, 16 nt, Human
ugcuaauuuugaaaaa

SEQ ID NO: 1929333 - RNA, 18 nt, Human
ugcuaauuuugaaaaacu

SEQ ID NO: 1929334 - RNA, 19 nt, Human
ugcuaauuuugaaaaacug

SEQ ID NO: 1929335 - RNA, 20 nt, Human
ugcuaauuuugaaaaacugc

SEQ ID NO: 1929336 - RNA, 15 nt, Human
ugcuacaggggccag

SEQ ID NO: 1929337 - RNA, 21 nt, Human
ugcuacaggggccagaagaug

SEQ ID NO: 1929338 - RNA, 14 nt, Human
aggaaaagcugcug

SEQ ID NO: 1929339 - RNA, 20 nt, Human
aggaaaagcggacaucagcu

SEQ ID NO: 1929340 - RNA, 21 nt, Human
agcuuuggcuaugagggccuu

SEQ ID NO: 1929341 - RNA, 13 nt, Human
agcuuugcugcug

SEQ ID NO: 1929342 - RNA, 22 nt, Human
agcuuugcugcugaaggcucau

SEQ ID NO: 1929343 - RNA, 20 nt, Human
agcuuugcuucucucucuaa

SEQ ID NO: 1929344 - RNA, 20 nt, Human
agcuuuggcuaugagggccu

SEQ ID NO: 1929345 - RNA, 22 nt, Human
agcuuugagguggaagagggcu

SEQ ID NO: 1929346 - RNA, 19 nt, Human
agcuuacaagccagcugga

SEQ ID NO: 1929347 - RNA, 17 nt, Human
agcuuacaagccagcug

SEQ ID NO: 1929348 - RNA, 15 nt, Human
agcuuacaagccagc

SEQ ID NO: 1929349 - RNA, 20 nt, Human
agcuugaccgugaggccaga

SEQ ID NO: 1929350 - RNA, 22 nt, Human
agcuugaccgugaggccagaga

SEQ ID NO: 1929351 - RNA, 23 nt, Human
agcuugaccgugaggccagagac

SEQ ID NO: 1929352 - RNA, 20 nt, Human
agcuugcccuggugccucac

SEQ ID NO: 1929353 - RNA, 16 nt, Human
agcuuguuauuuauaa

SEQ ID NO: 1929354 - RNA, 12 nt, Human
ugguuaggaugg

SEQ ID NO: 1929355 - RNA, 22 nt, Human
ugguuaggauggcaggacgugg

SEQ ID NO: 1929356 - RNA, 14 nt, Human
ugguuauggagagg

SEQ ID NO: 1929357 - RNA, 15 nt, Human
ugguuuguaaauuaa

SEQ ID NO: 1929358 - RNA, 14 nt, Human
ugguuuucaaaaua

SEQ ID NO: 1929359 - RNA, 21 nt, Human
ugguuugccgguggugcaggu

SEQ ID NO: 1929360 - RNA, 15 nt, Human
ugguuuucaaaauaa

SEQ ID NO: 1929361 - RNA, 17 nt, Human
ugguuuucaaaauaaaa

SEQ ID NO: 1929362 - RNA, 16 nt, Human
uguaaaggaauuuaaa

SEQ ID NO: 1929363 - RNA, 16 nt, Human
uguaaaggagucaaaa

SEQ ID NO: 1929364 - RNA, 19 nt, Human
uguaaaggagucaaaacua

SEQ ID NO: 1929365 - RNA, 21 nt, Human
uguaaaggagucaaaacuaca

SEQ ID NO: 1929366 - RNA, 15 nt, Human
uguaaaguccccaga

SEQ ID NO: 1929367 - RNA, 13 nt, Human
uguaaauaaagcc

SEQ ID NO: 1929368 - RNA, 14 nt, Human
uguaaauaaagccc

SEQ ID NO: 1929369 - RNA, 21 nt, Human
uguaaaguuauucuugaaguc

SEQ ID NO: 1929370 - RNA, 14 nt, Human
uguaaauaaaaaga

SEQ ID NO: 1929371 - RNA, 17 nt, Human
uguaaauaaaggaacca

SEQ ID NO: 1929372 - RNA, 18 nt, Human
uguaaauaaagcccuggg

SEQ ID NO: 1929373 - RNA, 16 nt, Human
aggugauauauuuaaa

SEQ ID NO: 1929374 - RNA, 16 nt, Human
uguaaauagcucaggu

SEQ ID NO: 1929375 - RNA, 15 nt, Human
uguaaauagcucagg

SEQ ID NO: 1929376 - RNA, 20 nt, Human
aggugugcucugaucaucca

SEQ ID NO: 1929377 - RNA, 15 nt, Human
aggugugcucugauc

SEQ ID NO: 1929378 - RNA, 17 nt, Human
aggugugaaccaccaca

SEQ ID NO: 1929379 - RNA, 13 nt, Human
aggugucuguauc

SEQ ID NO: 1929380 - RNA, 19 nt, Human
agguggggucacucuggca

SEQ ID NO: 1929381 - RNA, 14 nt, Human
agguuuaagcuguu

SEQ ID NO: 1929382 - RNA, 20 nt, Human
aggugcauauuuauaaaaau

SEQ ID NO: 1929383 - RNA, 18 nt, Human
aggugauauauuuaaaaa

SEQ ID NO: 1929384 - RNA, 18 nt, Human
aggugauauccauucuuu

SEQ ID NO: 1929385 - RNA, 19 nt, Human
aggugauauccauucuuuc

SEQ ID NO: 1929386 - RNA, 22 nt, Human
aggugauauccauucuuucuga

SEQ ID NO: 1929387 - RNA, 20 nt, Human
aggugauccacccaccucag

SEQ ID NO: 1929388 - RNA, 14 nt, Human
aggugauccaccca

SEQ ID NO: 1929389 - RNA, 22 nt, Human
aggugcccagaaugaggcugcu

SEQ ID NO: 1929390 - RNA, 18 nt, Human
aggugcccagaaugaggc

SEQ ID NO: 1929391 - RNA, 23 nt, Human
agguggggcagcuugaggguugg

SEQ ID NO: 1929392 - RNA, 18 nt, Human
aggugggauccuccaggu

SEQ ID NO: 1929393 - RNA, 16 nt, Human
aggugggauccuccag

SEQ ID NO: 1929394 - RNA, 17 nt, Human
aggugggauccuccagg

SEQ ID NO: 1929395 - RNA, 15 nt, Human
aggugggauccucca

SEQ ID NO: 1929396 - RNA, 18 nt, Human
aggugccucaagagaagg

SEQ ID NO: 1929397 - RNA, 24 nt, Human
uggugccuggccuggcacacauca

SEQ ID NO: 1929398 - RNA, 23 nt, Human
uggugccuggccuggcacacauc

SEQ ID NO: 1929399 - RNA, 22 nt, Human
uggugccuggccuggcacacau

SEQ ID NO: 1929400 - RNA, 19 nt, Human
uggugccuggccuggcaca

SEQ ID NO: 1929401 - RNA, 18 nt, Human
uggugccuggccuggcac

SEQ ID NO: 1929402 - RNA, 17 nt, Human
uggugccuggccuggca

SEQ ID NO: 1929403 - RNA, 14 nt, Human
uggugccuggccug

SEQ ID NO: 1929404 - RNA, 13 nt, Human
uggugccuggccu

SEQ ID NO: 1929405 - RNA, 12 nt, Human
uggugccuggcc

SEQ ID NO: 1929406 - RNA, 20 nt, Human
aggugauaaaugucaguagu

SEQ ID NO: 1929407 - RNA, 19 nt, Human
uggugcugcugcugcugug

SEQ ID NO: 1929408 - RNA, 15 nt, Human
uggugcugagaagcu

SEQ ID NO: 1929409 - RNA, 13 nt, Human
uggugcugagaag

SEQ ID NO: 1929410 - RNA, 17 nt, Human
uggugcgaucuggguuc

SEQ ID NO: 1929411 - RNA, 16 nt, Human
uggugcgaucuggguu

SEQ ID NO: 1929412 - RNA, 12 nt, Human
ugguggcagugg

SEQ ID NO: 1929413 - RNA, 15 nt, Human
ugguggcagcugcgg

SEQ ID NO: 1929414 - RNA, 13 nt, Human
ugguggcagcugc

SEQ ID NO: 1929415 - RNA, 14 nt, Human
ugguggcagcugcg

SEQ ID NO: 1929416 - RNA, 18 nt, Human
ugguuaggcauuguggga

SEQ ID NO: 1929417 - RNA, 20 nt, Human
ugguuaggcauugugggaag

SEQ ID NO: 1929418 - RNA, 23 nt, Human
uggugugaccacugcagaagaca

SEQ ID NO: 1929419 - RNA, 20 nt, Human
uggugucuccaaccccccag

SEQ ID NO: 1929420 - RNA, 19 nt, Human
uggugucuccaacccccca

SEQ ID NO: 1929421 - RNA, 11 nt, Human
uggugucucca

SEQ ID NO: 1929422 - RNA, 18 nt, Human
aggucagagccugcaguu

SEQ ID NO: 1929423 - RNA, 17 nt, Human
aggucagagccugcagu

SEQ ID NO: 1929424 - RNA, 15 nt, Human
aggucagagccugca

SEQ ID NO: 1929425 - RNA, 14 nt, Human
aggucagagccugc

SEQ ID NO: 1929426 - RNA, 13 nt, Human
aggucagagccug

SEQ ID NO: 1929427 - RNA, 16 nt, Human
uggucagauuugaacu

SEQ ID NO: 1929428 - RNA, 15 nt, Human
uggucagauuugaac

SEQ ID NO: 1929429 - RNA, 16 nt, Human
aggucuugaacuccug

SEQ ID NO: 1929430 - RNA, 15 nt, Human
aggucaggaguuccu

SEQ ID NO: 1929431 - RNA, 20 nt, Human
aggucaggaguuccuaacca

SEQ ID NO: 1929432 - RNA, 16 nt, Human
aggucaggaguuccua

SEQ ID NO: 1929433 - RNA, 15 nt, Human
aggugacagagugag

SEQ ID NO: 1929434 - RNA, 13 nt, Human
aggugacagagug

SEQ ID NO: 1929435 - RNA, 17 nt, Human
aggucuugaacuccugg

SEQ ID NO: 1929436 - RNA, 18 nt, Human
aggucuugaacuccuggc

SEQ ID NO: 1929437 - RNA, 20 nt, Human
aggucuucaucgaaucuacu

SEQ ID NO: 1929438 - RNA, 21 nt, Human
aggucuucaucgaaucuacua

SEQ ID NO: 1929439 - RNA, 13 nt, Human
aggugaccccagg

SEQ ID NO: 1929440 - RNA, 22 nt, Human
aggugacagagugagacucugu

SEQ ID NO: 1929441 - RNA, 21 nt, Human
aggugagaagcagaggaagga

SEQ ID NO: 1929442 - RNA, 23 nt, Human
aggugagaagcagaggaaggaga

SEQ ID NO: 1929443 - RNA, 16 nt, Human
aggugagaagcagagg

SEQ ID NO: 1929444 - RNA, 19 nt, Human
uguaugucuuggacacugu

SEQ ID NO: 1929445 - RNA, 14 nt, Human
uguaugucuuggac

SEQ ID NO: 1929446 - RNA, 18 nt, Human
uguaugucucgugguagg

SEQ ID NO: 1929447 - RNA, 12 nt, Human
uguauguggggg

SEQ ID NO: 1929448 - RNA, 20 nt, Human
uguaugugggggucugugug

SEQ ID NO: 1929449 - RNA, 23 nt, Human
uguaucacucugugucugagugg

SEQ ID NO: 1929450 - RNA, 19 nt, Human
uguaucaguggauuuccca

SEQ ID NO: 1929451 - RNA, 17 nt, Human
uguaucaaugaguaaca

SEQ ID NO: 1929452 - RNA, 23 nt, Human
uguauauuugugauagcacuuuc

SEQ ID NO: 1929453 - RNA, 22 nt, Human
uguauauuugugauagcacuuu

SEQ ID NO: 1929454 - RNA, 13 nt, Human
uguauuacaaauc

SEQ ID NO: 1929455 - RNA, 19 nt, Human
uguauguucagaagaaauu

SEQ ID NO: 1929456 - RNA, 22 nt, Human
uguauuacaaauccaaugaaau

SEQ ID NO: 1929457 - RNA, 17 nt, Human
uguauucccaguuacuu

SEQ ID NO: 1929458 - RNA, 17 nt, Human
uguauguuuuuuuucug

SEQ ID NO: 1929459 - RNA, 20 nt, Human
uguauucucuccuguaccuc

SEQ ID NO: 1929460 - RNA, 19 nt, Human
uguauucucuccuguaccu

SEQ ID NO: 1929461 - RNA, 18 nt, Human
ugucaaggcugcuuagaa

SEQ ID NO: 1929462 - RNA, 19 nt, Human
ugucaaggcugcuuagaau

SEQ ID NO: 1929463 - RNA, 18 nt, Human
aguauuacuucugcuaca

SEQ ID NO: 1929464 - RNA, 17 nt, Human
aguaugguggcuggguu

SEQ ID NO: 1929465 - RNA, 15 nt, Human
aguauuacuucugcu

SEQ ID NO: 1929466 - RNA, 16 nt, Human
aguaugguggcugggu

SEQ ID NO: 1929467 - RNA, 15 nt, Human
aguaugguggcuggg

SEQ ID NO: 1929468 - RNA, 19 nt, Human
ugucaauuacaggaaguac

SEQ ID NO: 1929469 - RNA, 17 nt, Human
ugucaauuacaggaagu

SEQ ID NO: 1929470 - RNA, 14 nt, Human
ugucaauuacagga

SEQ ID NO: 1929471 - RNA, 15 nt, Human
ugucaauuacaggaa

SEQ ID NO: 1929472 - RNA, 23 nt, Human
agucacacagugagucgaggaca

SEQ ID NO: 1929473 - RNA, 15 nt, Human
agucacacagugagu

SEQ ID NO: 1929474 - RNA, 19 nt, Human
agucaccccggccaccugc

SEQ ID NO: 1929475 - RNA, 23 nt, Human
agucacacaguauuacuucugcu

SEQ ID NO: 1929476 - RNA, 13 nt, Human
aguaaaauccaca

SEQ ID NO: 1929477 - RNA, 19 nt, Human
aguaaaauaaauauugucu

SEQ ID NO: 1929478 - RNA, 13 nt, Human
agguuuuuauuag

SEQ ID NO: 1929479 - RNA, 15 nt, Human
agguuuuuauuagua

SEQ ID NO: 1929480 - RNA, 20 nt, Human
agguuuuuauuaguaccaua

SEQ ID NO: 1929481 - RNA, 15 nt, Human
aguaauaugcacaca

SEQ ID NO: 1929482 - RNA, 14 nt, Human
aguaauaugcacac

SEQ ID NO: 1929483 - RNA, 22 nt, Human
aguaaaauaaauauugucuuuu

SEQ ID NO: 1929484 - RNA, 20 nt, Human
aguaaaauaaauauugucuu

SEQ ID NO: 1929485 - RNA, 18 nt, Human
uguagagccagggucuca

SEQ ID NO: 1929486 - RNA, 16 nt, Human
uguagagccagggucu

SEQ ID NO: 1929487 - RNA, 23 nt, Human
uguagaaaagggaacugaacauu

SEQ ID NO: 1929488 - RNA, 23 nt, Human
agguuuguuuagaagaagugugu

SEQ ID NO: 1929489 - RNA, 16 nt, Human
uguagaggagaaacug

SEQ ID NO: 1929490 - RNA, 22 nt, Human
uguacuugcucuugaugccugg

SEQ ID NO: 1929491 - RNA, 23 nt, Human
uguacuugcucuugaugccuggc

SEQ ID NO: 1929492 - RNA, 18 nt, Human
agguuuaggcugguggcc

SEQ ID NO: 1929493 - RNA, 20 nt, Human
agguuuaggcugguggccca

SEQ ID NO: 1929494 - RNA, 21 nt, Human
agguuuaggcugguggcccag

SEQ ID NO: 1929495 - RNA, 21 nt, Human
uguagaaaagggaacugaaca

SEQ ID NO: 1929496 - RNA, 20 nt, Human
uguagaaaagggaacugaac

SEQ ID NO: 1929497 - RNA, 19 nt, Human
uguagaaaagggaacugaa

SEQ ID NO: 1929498 - RNA, 18 nt, Human
uguagaaaagggaacuga

SEQ ID NO: 1929499 - RNA, 11 nt, Human
uguacuuugug

SEQ ID NO: 1929500 - RNA, 17 nt, Human
uguaggcauaaagucag

SEQ ID NO: 1929501 - RNA, 20 nt, Human
uguaggcauaaagucagggg

SEQ ID NO: 1929502 - RNA, 19 nt, Human
uguaguaauugacaugugc

SEQ ID NO: 1929503 - RNA, 18 nt, Human
uguaguaauugacaugug

SEQ ID NO: 1929504 - RNA, 11 nt, Human
aguagagacag

SEQ ID NO: 1929505 - RNA, 14 nt, Human
aguagcauuuacug

SEQ ID NO: 1929506 - RNA, 14 nt, Human
aguagaauugcauu

SEQ ID NO: 1929507 - RNA, 15 nt, Human
aguagaauugcauug

SEQ ID NO: 1929508 - RNA, 22 nt, Human
aguagcauuuacugugucuuug

SEQ ID NO: 1929509 - RNA, 14 nt, Human
aguacauguuaaac

SEQ ID NO: 1929510 - RNA, 21 nt, Human
aguagaagucuuagauguaua

SEQ ID NO: 1929511 - RNA, 19 nt, Human
aguagaagucuuagaugua

SEQ ID NO: 1929512 - RNA, 20 nt, Human
aguagaagucuuagauguau

SEQ ID NO: 1929513 - RNA, 14 nt, Human
aguaccauuuauac

SEQ ID NO: 1929514 - RNA, 21 nt, Human
aguaccauuuauacaaauuag

SEQ ID NO: 1929515 - RNA, 18 nt, Human
ugggagaccuguaaucau

SEQ ID NO: 1929516 - RNA, 18 nt, Human
ugggagaaugucaguuca

SEQ ID NO: 1929517 - RNA, 19 nt, Human
ugggagagaagagaaugca

SEQ ID NO: 1929518 - RNA, 21 nt, Human
ugggagagaagagaaugcaca

SEQ ID NO: 1929519 - RNA, 18 nt, Human
ugggaggaucucuugagc

SEQ ID NO: 1929520 - RNA, 16 nt, Human
ugggagagccuuccag

SEQ ID NO: 1929521 - RNA, 20 nt, Human
ugggacucaaugcacugaca

SEQ ID NO: 1929522 - RNA, 21 nt, Human
ugggacguggcucagccagca

SEQ ID NO: 1929523 - RNA, 22 nt, Human
ugggagaaugucaguaugugga

SEQ ID NO: 1929524 - RNA, 20 nt, Human
ugggagaaugucaguaugug

SEQ ID NO: 1929525 - RNA, 19 nt, Human
ugggagaaugucaguaugu

SEQ ID NO: 1929526 - RNA, 23 nt, Human
agggacacgggcagccuggcucc

SEQ ID NO: 1929527 - RNA, 20 nt, Human
agggacacgggcagccuggc

SEQ ID NO: 1929528 - RNA, 19 nt, Human
agggacaaguggacucagg

SEQ ID NO: 1929529 - RNA, 16 nt, Human
agggacagaggcccca

SEQ ID NO: 1929530 - RNA, 19 nt, Human
agggagcaaguccuucccu

SEQ ID NO: 1929531 - RNA, 21 nt, Human
agggagcaaguccuucccuuu

SEQ ID NO: 1929532 - RNA, 15 nt, Human
agggagcugcagggg

SEQ ID NO: 1929533 - RNA, 16 nt, Human
ugggacuacaggcacc

SEQ ID NO: 1929534 - RNA, 15 nt, Human
ugggacuacaggcac

SEQ ID NO: 1929535 - RNA, 14 nt, Human
ugggacuacaggca

SEQ ID NO: 1929536 - RNA, 22 nt, Human
agggaggacgcucucuggccuu

SEQ ID NO: 1929537 - RNA, 21 nt, Human
agggaggacgcucucuggccu

SEQ ID NO: 1929538 - RNA, 23 nt, Human
agggaggacgcucucuggccuuc

SEQ ID NO: 1929539 - RNA, 13 nt, Human
agggaaauuucag

SEQ ID NO: 1929540 - RNA, 22 nt, Human
aggcccucccuguuccccagag

SEQ ID NO: 1929541 - RNA, 23 nt, Human
aggcccucccuguuccccagaga

SEQ ID NO: 1929542 - RNA, 22 nt, Human
aggcccuaucuguuuacagugu

SEQ ID NO: 1929543 - RNA, 20 nt, Human
aggcccucccuguuccccag

SEQ ID NO: 1929544 - RNA, 20 nt, Human
aggcccggcuccaggcuccu

SEQ ID NO: 1929545 - RNA, 18 nt, Human
aggcccggcuccaggcuc

SEQ ID NO: 1929546 - RNA, 21 nt, Human
aggcccggcuccaggcuccuu

SEQ ID NO: 1929547 - RNA, 22 nt, Human
agggaaggauacaaaagcaugu

SEQ ID NO: 1929548 - RNA, 15 nt, Human
agggaauggcacagc

SEQ ID NO: 1929549 - RNA, 16 nt, Human
agggaauugcagagua

SEQ ID NO: 1929550 - RNA, 13 nt, Human
agggacaaagagg

SEQ ID NO: 1929551 - RNA, 22 nt, Human
agggacaaguggacucagggca

SEQ ID NO: 1929552 - RNA, 13 nt, Human
agggaaguuuugu

SEQ ID NO: 1929553 - RNA, 17 nt, Human
agggcagcgccaggcug

SEQ ID NO: 1929554 - RNA, 23 nt, Human
agggcagcgggagccucccugcc

SEQ ID NO: 1929555 - RNA, 16 nt, Human
agggagggcuccagac

SEQ ID NO: 1929556 - RNA, 14 nt, Human
agggagggcuccag

SEQ ID NO: 1929557 - RNA, 15 nt, Human
agggagggcuccaga

SEQ ID NO: 1929558 - RNA, 23 nt, Human
agggcucagcggggacagcuccu

SEQ ID NO: 1929559 - RNA, 22 nt, Human
agggcucagcggggacagcucc

SEQ ID NO: 1929560 - RNA, 20 nt, Human
agggcucagcggggacagcu

SEQ ID NO: 1929561 - RNA, 19 nt, Human
agggcucagcggggacagc

SEQ ID NO: 1929562 - RNA, 11 nt, Human
agggccagagc

SEQ ID NO: 1929563 - RNA, 12 nt, Human
agggccagagcc

SEQ ID NO: 1929564 - RNA, 13 nt, Human
agggccagagcca

SEQ ID NO: 1929565 - RNA, 14 nt, Human
agggccagagccag

SEQ ID NO: 1929566 - RNA, 15 nt, Human
agggccagagccagg

SEQ ID NO: 1929567 - RNA, 16 nt, Human
agggccagagccaggg

SEQ ID NO: 1929568 - RNA, 20 nt, Human
ugggccccugccucucugca

SEQ ID NO: 1929569 - RNA, 15 nt, Human
ugggccccugccaga

SEQ ID NO: 1929570 - RNA, 13 nt, Human
agggaggcaagcc

SEQ ID NO: 1929571 - RNA, 14 nt, Human
agggaggcaagccc

SEQ ID NO: 1929572 - RNA, 16 nt, Human
agggaggcaagcccug

SEQ ID NO: 1929573 - RNA, 15 nt, Human
ugggccccugccucu

SEQ ID NO: 1929574 - RNA, 19 nt, Human
ugggccccugccucucugc

SEQ ID NO: 1929575 - RNA, 15 nt, Human
agggagggagggcuc

SEQ ID NO: 1929576 - RNA, 13 nt, Human
agggagggcucca

SEQ ID NO: 1929577 - RNA, 15 nt, Human
agggaggcaagcccu

SEQ ID NO: 1929578 - RNA, 16 nt, Human
ugggcccccaaaugga

SEQ ID NO: 1929579 - RNA, 21 nt, Human
ugggcccccaaauggaaaugg

SEQ ID NO: 1929580 - RNA, 12 nt, Human
ugggcagaagga

SEQ ID NO: 1929581 - RNA, 11 nt, Human
ugggcagagca

SEQ ID NO: 1929582 - RNA, 12 nt, Human
ugggcagagcag

SEQ ID NO: 1929583 - RNA, 18 nt, Human
ugggccaggagccuccug

SEQ ID NO: 1929584 - RNA, 13 nt, Human
ugggcagagcaga

SEQ ID NO: 1929585 - RNA, 20 nt, Human
ugggaggaucucuugagccu

SEQ ID NO: 1929586 - RNA, 21 nt, Human
ugggaggaucucuugagccug

SEQ ID NO: 1929587 - RNA, 22 nt, Human
ugggaggaucucuugagccugg

SEQ ID NO: 1929588 - RNA, 19 nt, Human
ugggaggccaaggugggag

SEQ ID NO: 1929589 - RNA, 20 nt, Human
ugggaggccaaggugggagg

SEQ ID NO: 1929590 - RNA, 12 nt, Human
ugggcacugaag

SEQ ID NO: 1929591 - RNA, 23 nt, Human
ugggguccuguggggcccccaca

SEQ ID NO: 1929592 - RNA, 22 nt, Human
ugggguccuguggggcccccac

SEQ ID NO: 1929593 - RNA, 19 nt, Human
ugggguccuggccauccca

SEQ ID NO: 1929594 - RNA, 15 nt, Human
ugggguccuggccau

SEQ ID NO: 1929595 - RNA, 16 nt, Human
ugggguccuggccauc

SEQ ID NO: 1929596 - RNA, 13 nt, Human
uggggucccucua

SEQ ID NO: 1929597 - RNA, 12 nt, Human
ugggguccuggc

SEQ ID NO: 1929598 - RNA, 13 nt, Human
uggggucaugccc

SEQ ID NO: 1929599 - RNA, 18 nt, Human
uggggucaugcccuccuc

SEQ ID NO: 1929600 - RNA, 20 nt, Human
uggggucaugcccuccucuc

SEQ ID NO: 1929601 - RNA, 14 nt, Human
ugggguccagggag

SEQ ID NO: 1929602 - RNA, 16 nt, Human
uggggucacucuggca

SEQ ID NO: 1929603 - RNA, 22 nt, Human
uggggucacucuggcagcucag

SEQ ID NO: 1929604 - RNA, 19 nt, Human
ugggguacccacugcucug

SEQ ID NO: 1929605 - RNA, 13 nt, Human
uggggucacucug

SEQ ID NO: 1929606 - RNA, 14 nt, Human
uggggucacucugg

SEQ ID NO: 1929607 - RNA, 18 nt, Human
ugggguacccacugcucu

SEQ ID NO: 1929608 - RNA, 17 nt, Human
ugggguacccacugcuc

SEQ ID NO: 1929609 - RNA, 14 nt, Human
uggggcuggccucc

SEQ ID NO: 1929610 - RNA, 13 nt, Human
aggggaaaagagg

SEQ ID NO: 1929611 - RNA, 18 nt, Human
uggggucuggcagccucc

SEQ ID NO: 1929612 - RNA, 14 nt, Human
uggggucuggcagc

SEQ ID NO: 1929613 - RNA, 17 nt, Human
uggggucuggcagccuc

SEQ ID NO: 1929614 - RNA, 21 nt, Human
uggggucuggaguugaucugg

SEQ ID NO: 1929615 - RNA, 14 nt, Human
aggggaacagacug

SEQ ID NO: 1929616 - RNA, 18 nt, Human
aggggaaaaucagccugc

SEQ ID NO: 1929617 - RNA, 22 nt, Human
aggggaaaaucagccugcucca

SEQ ID NO: 1929618 - RNA, 13 nt, Human
aggggaauguuug

SEQ ID NO: 1929619 - RNA, 12 nt, Human
uggggcccugcc

SEQ ID NO: 1929620 - RNA, 14 nt, Human
uggggccuccagaa

SEQ ID NO: 1929621 - RNA, 20 nt, Human
uggggccuccagaacucacu

SEQ ID NO: 1929622 - RNA, 21 nt, Human
uggggccaguuggucccccuu

SEQ ID NO: 1929623 - RNA, 22 nt, Human
uggggagggauuuggggcucag

SEQ ID NO: 1929624 - RNA, 22 nt, Human
uggggcugcaccggcuggccug

SEQ ID NO: 1929625 - RNA, 23 nt, Human
uggggcugcaccggcuggccugg

SEQ ID NO: 1929626 - RNA, 15 nt, Human
uggggcucagagugg

SEQ ID NO: 1929627 - RNA, 12 nt, Human
agggcuccagac

SEQ ID NO: 1929628 - RNA, 15 nt, Human
agggcuccagacaca

SEQ ID NO: 1929629 - RNA, 14 nt, Human
uggggaccucaggc

SEQ ID NO: 1929630 - RNA, 15 nt, Human
uggggaccucaggcc

SEQ ID NO: 1929631 - RNA, 16 nt, Human
uggggaccucaggccu

SEQ ID NO: 1929632 - RNA, 17 nt, Human
uggggaccucaggccug

SEQ ID NO: 1929633 - RNA, 16 nt, Human
uggggaggaaauagaa

SEQ ID NO: 1929634 - RNA, 14 nt, Human
uggggagggauuug

SEQ ID NO: 1929635 - RNA, 16 nt, Human
uggggagccaacagaa

SEQ ID NO: 1929636 - RNA, 22 nt, Human
uggggagccaacagaagcuucc

SEQ ID NO: 1929637 - RNA, 15 nt, Human
agggguaugucuuua

SEQ ID NO: 1929638 - RNA, 20 nt, Human
aggggguggccucccaacuc

SEQ ID NO: 1929639 - RNA, 18 nt, Human
aggggugggacacccugu

SEQ ID NO: 1929640 - RNA, 16 nt, Human
agggucucacucuguc

SEQ ID NO: 1929641 - RNA, 15 nt, Human
agggucucacucugu

SEQ ID NO: 1929642 - RNA, 14 nt, Human
agggucucacucug

SEQ ID NO: 1929643 - RNA, 15 nt, Human
aggguaaggcugugg

SEQ ID NO: 1929644 - RNA, 20 nt, Human
agggguggcugccucauuua

SEQ ID NO: 1929645 - RNA, 21 nt, Human
agggguggcugccucauuuag

SEQ ID NO: 1929646 - RNA, 21 nt, Human
aggggaauguuugccucugcc

SEQ ID NO: 1929647 - RNA, 20 nt, Human
aggggaauguuugccucugc

SEQ ID NO: 1929648 - RNA, 19 nt, Human
aggggaauguuugccucug

SEQ ID NO: 1929649 - RNA, 18 nt, Human
aggggagcaugggaagug

SEQ ID NO: 1929650 - RNA, 15 nt, Human
aggggaaucagaacu

SEQ ID NO: 1929651 - RNA, 16 nt, Human
aggggaaucagaacuc

SEQ ID NO: 1929652 - RNA, 12 nt, Human
aggggagcccac

SEQ ID NO: 1929653 - RNA, 13 nt, Human
aggggagcccacu

SEQ ID NO: 1929654 - RNA, 17 nt, Human
aggggagcccacugucc

SEQ ID NO: 1929655 - RNA, 21 nt, Human
aggggagcccacuguccuggg

SEQ ID NO: 1929656 - RNA, 24 nt, Human
aggggagcccacuguccugggccu

SEQ ID NO: 1929657 - RNA, 16 nt, Human
aggguggugaccucug

SEQ ID NO: 1929658 - RNA, 21 nt, Human
agggucuugguuccagccugc

SEQ ID NO: 1929659 - RNA, 16 nt, Human
ugggucgcccuggacu

SEQ ID NO: 1929660 - RNA, 18 nt, Human
ugggucgcccuggacugu

SEQ ID NO: 1929661 - RNA, 19 nt, Human
ugggugaaggcuggcauga

SEQ ID NO: 1929662 - RNA, 14 nt, Human
ugggugacagagca

SEQ ID NO: 1929663 - RNA, 17 nt, Human
ugggugacagagcaaga

SEQ ID NO: 1929664 - RNA, 13 nt, Human
ugggugagaacaa

SEQ ID NO: 1929665 - RNA, 16 nt, Human
ugggugagguaauaaa

SEQ ID NO: 1929666 - RNA, 20 nt, Human
ugguagagugugccugaagu

SEQ ID NO: 1929667 - RNA, 17 nt, Human
uggguggcaccagcagc

SEQ ID NO: 1929668 - RNA, 20 nt, Human
uggguggcaccagcagccug

SEQ ID NO: 1929669 - RNA, 21 nt, Human
uggguggcaccagcagccugg

SEQ ID NO: 1929670 - RNA, 18 nt, Human
uuaaguugcugaugaacu

SEQ ID NO: 1929671 - RNA, 17 nt, Human
uuaauaaacacucuuga

SEQ ID NO: 1929672 - RNA, 13 nt, Human
uuaauaaacacuc

SEQ ID NO: 1929673 - RNA, 14 nt, Human
uuaauaaagacagg

SEQ ID NO: 1929674 - RNA, 13 nt, Human
uuaauaaagacag

SEQ ID NO: 1929675 - RNA, 23 nt, Human
uuaaugaaagacuguacaaagua

SEQ ID NO: 1929676 - RNA, 20 nt, Human
uuaaugaaagacuguacaaa

SEQ ID NO: 1929677 - RNA, 15 nt, Human
uuaauucuuagcuca

SEQ ID NO: 1929678 - RNA, 14 nt, Human
uuaauuuaaagcca

SEQ ID NO: 1929679 - RNA, 15 nt, Human
uuaauuccuuuccag

SEQ ID NO: 1929680 - RNA, 20 nt, Human
auaaaauuuuuaaucuuuaa

SEQ ID NO: 1929681 - RNA, 15 nt, Human
auaaacaaaguuacu

SEQ ID NO: 1929682 - RNA, 22 nt, Human
auaaacaagaccacguuucuaa

SEQ ID NO: 1929683 - RNA, 15 nt, Human
auaaacaagaccacg

SEQ ID NO: 1929684 - RNA, 23 nt, Human
auaaacaagaccacguuucuaaa

SEQ ID NO: 1929685 - RNA, 19 nt, Human
uuaauuuuuuugagacaga

SEQ ID NO: 1929686 - RNA, 16 nt, Human
uuaauuuauacuggca

SEQ ID NO: 1929687 - RNA, 17 nt, Human
uuacaaaacuacaugag

SEQ ID NO: 1929688 - RNA, 18 nt, Human
uuacaaaacuacaugaga

SEQ ID NO: 1929689 - RNA, 20 nt, Human
uuacaaaacuacaugagaac

SEQ ID NO: 1929690 - RNA, 13 nt, Human
uuaagaggcaggg

SEQ ID NO: 1929691 - RNA, 12 nt, Human
uuaagaaggcaa

SEQ ID NO: 1929692 - RNA, 14 nt, Human
uuaagaaggcaaaa

SEQ ID NO: 1929693 - RNA, 16 nt, Human
uuaagaggcagggucu

SEQ ID NO: 1929694 - RNA, 15 nt, Human
uuaagaggcaggguc

SEQ ID NO: 1929695 - RNA, 18 nt, Human
uuaaguaaggaauuuuau

SEQ ID NO: 1929696 - RNA, 22 nt, Human
uuaagugcugcauuuaaaagau

SEQ ID NO: 1929697 - RNA, 22 nt, Human
uuaaguuacacauuuuucagau

SEQ ID NO: 1929698 - RNA, 18 nt, Human
uuaaguuagggaauggca

SEQ ID NO: 1929699 - RNA, 17 nt, Human
uuaaguacuauguauca

SEQ ID NO: 1929700 - RNA, 21 nt, Human
auaaaaguacauguuaaacuu

SEQ ID NO: 1929701 - RNA, 15 nt, Human
auaaaaguacauguu

SEQ ID NO: 1929702 - RNA, 17 nt, Human
auaaaaucugauaugua

SEQ ID NO: 1929703 - RNA, 18 nt, Human
uuaccugggcauucuugu

SEQ ID NO: 1929704 - RNA, 20 nt, Human
uuacauaagauaaaugugcu

SEQ ID NO: 1929705 - RNA, 18 nt, Human
uuacaucaaggcuucaaa

SEQ ID NO: 1929706 - RNA, 23 nt, Human
uuacucagaauucucuaguuuga

SEQ ID NO: 1929707 - RNA, 18 nt, Human
uuacucagaauucucuag

SEQ ID NO: 1929708 - RNA, 19 nt, Human
uuacugagcuucucuguga

SEQ ID NO: 1929709 - RNA, 13 nt, Human
uuacugagcuucu

SEQ ID NO: 1929710 - RNA, 14 nt, Human
uuacugagcuucuc

SEQ ID NO: 1929711 - RNA, 16 nt, Human
uuacugagcuucucug

SEQ ID NO: 1929712 - RNA, 17 nt, Human
uuacugagcuucucugu

SEQ ID NO: 1929713 - RNA, 18 nt, Human
uuacugagcuucucugug

SEQ ID NO: 1929714 - RNA, 11 nt, Human
uuagacagagu

SEQ ID NO: 1929715 - RNA, 12 nt, Human
uuagaacauuuu

SEQ ID NO: 1929716 - RNA, 15 nt, Human
uuagaagaagugugu

SEQ ID NO: 1929717 - RNA, 14 nt, Human
uuagaagaagugug

SEQ ID NO: 1929718 - RNA, 18 nt, Human
uuagaacauuuuaauuca

SEQ ID NO: 1929719 - RNA, 16 nt, Human
uuagaagaaguguguc

SEQ ID NO: 1929720 - RNA, 11 nt, Human
uuagaaauaua

SEQ ID NO: 1929721 - RNA, 12 nt, Human
uuagaaauauaa

SEQ ID NO: 1929722 - RNA, 14 nt, Human
uuagaaauauaauu

SEQ ID NO: 1929723 - RNA, 20 nt, Human
uuacugguaggaacuugaga

SEQ ID NO: 1929724 - RNA, 24 nt, Human
uuacugguaggaacuugagaacuu

SEQ ID NO: 1929725 - RNA, 15 nt, Human
auaaauguacauuaa

SEQ ID NO: 1929726 - RNA, 14 nt, Human
auaacuaaauaaag

SEQ ID NO: 1929727 - RNA, 16 nt, Human
auaacuaaaagguaug

SEQ ID NO: 1929728 - RNA, 15 nt, Human
auaaauguaucuuau

SEQ ID NO: 1929729 - RNA, 18 nt, Human
auaaauguaucuuauuca

SEQ ID NO: 1929730 - RNA, 19 nt, Human
auaacuagaacugaauuuu

SEQ ID NO: 1929731 - RNA, 19 nt, Human
auaacuagauggugcugag

SEQ ID NO: 1929732 - RNA, 20 nt, Human
auaacuagauggugcugaga

SEQ ID NO: 1929733 - RNA, 21 nt, Human
auaacuagauggugcugagaa

SEQ ID NO: 1929734 - RNA, 14 nt, Human
uuacaggaaguacu

SEQ ID NO: 1929735 - RNA, 15 nt, Human
uuacagucuauuuga

SEQ ID NO: 1929736 - RNA, 14 nt, Human
auaaauaacuuuuu

SEQ ID NO: 1929737 - RNA, 19 nt, Human
auaaaguuugcuuagaaaa

SEQ ID NO: 1929738 - RNA, 12 nt, Human
auaaaguuugcu

SEQ ID NO: 1929739 - RNA, 22 nt, Human
auaaauauuauauuauauauau

SEQ ID NO: 1929740 - RNA, 12 nt, Human
auaaauauuaua

SEQ ID NO: 1929741 - RNA, 20 nt, Human
aguugcguggacucugcaca

SEQ ID NO: 1929742 - RNA, 21 nt, Human
aguucuuaguugcuguauguc

SEQ ID NO: 1929743 - RNA, 20 nt, Human
aguucuuaguugcuguaugu

SEQ ID NO: 1929744 - RNA, 16 nt, Human
aguugcguggacucug

SEQ ID NO: 1929745 - RNA, 16 nt, Human
aguuggccagagagcc

SEQ ID NO: 1929746 - RNA, 16 nt, Human
aguuggcuaggacccc

SEQ ID NO: 1929747 - RNA, 21 nt, Human
aguuggguggaugccuggugg

SEQ ID NO: 1929748 - RNA, 18 nt, Human
aguuggucccccuuccau

SEQ ID NO: 1929749 - RNA, 21 nt, Human
aguuguuugauucagacagcu

SEQ ID NO: 1929750 - RNA, 23 nt, Human
aguuguuugauucagacagcugc

SEQ ID NO: 1929751 - RNA, 12 nt, Human
aguuuaaaaaaa

SEQ ID NO: 1929752 - RNA, 14 nt, Human
aguuuaaaaaaauu

SEQ ID NO: 1929753 - RNA, 17 nt, Human
aguuucacugccauaua

SEQ ID NO: 1929754 - RNA, 13 nt, Human
uuaacagggaggg

SEQ ID NO: 1929755 - RNA, 15 nt, Human
uuaaauuucuaccgc

SEQ ID NO: 1929756 - RNA, 20 nt, Human
uuaaauucuugcaaaguauc

SEQ ID NO: 1929757 - RNA, 13 nt, Human
uuaaauaauguga

SEQ ID NO: 1929758 - RNA, 12 nt, Human
uuaaaggaaaaa

SEQ ID NO: 1929759 - RNA, 18 nt, Human
uuaaaauugugauguguc

SEQ ID NO: 1929760 - RNA, 13 nt, Human
uuaaaauugugau

SEQ ID NO: 1929761 - RNA, 18 nt, Human
uguuucuuuguaaugaaa

SEQ ID NO: 1929762 - RNA, 19 nt, Human
uguuucuuuguaaugaaaa

SEQ ID NO: 1929763 - RNA, 17 nt, Human
uguuugauucagacagc

SEQ ID NO: 1929764 - RNA, 22 nt, Human
uguuugauucagacagcugccu

SEQ ID NO: 1929765 - RNA, 21 nt, Human
uguuugacgggaaacaaaacu

SEQ ID NO: 1929766 - RNA, 17 nt, Human
uguuuauugucaaagug

SEQ ID NO: 1929767 - RNA, 19 nt, Human
uguuuauugucaaaguggu

SEQ ID NO: 1929768 - RNA, 16 nt, Human
uguuuaugugugugug

SEQ ID NO: 1929769 - RNA, 13 nt, Human
uguuuaugugugu

SEQ ID NO: 1929770 - RNA, 19 nt, Human
uguugcccaggcaggucuu

SEQ ID NO: 1929771 - RNA, 19 nt, Human
uguugccuugcauaauggu

SEQ ID NO: 1929772 - RNA, 21 nt, Human
uguuuuauuuuaauucaguug

SEQ ID NO: 1929773 - RNA, 21 nt, Human
uguuuuauuuaaccucuaaau

SEQ ID NO: 1929774 - RNA, 20 nt, Human
uguuuuccaugaguccccug

SEQ ID NO: 1929775 - RNA, 12 nt, Human
uguuuucccuga

SEQ ID NO: 1929776 - RNA, 17 nt, Human
uguuuugaaggcaaaau

SEQ ID NO: 1929777 - RNA, 14 nt, Human
uguuuucuugauuu

SEQ ID NO: 1929778 - RNA, 16 nt, Human
uguuuucccugaccuc

SEQ ID NO: 1929779 - RNA, 14 nt, Human
aguucugguuccua

SEQ ID NO: 1929780 - RNA, 16 nt, Human
aguucuuaguugcugu

SEQ ID NO: 1929781 - RNA, 21 nt, Human
aguucugcucauucuaaugau

SEQ ID NO: 1929782 - RNA, 15 nt, Human
aguucugcucauucu

SEQ ID NO: 1929783 - RNA, 16 nt, Human
aguucugcagauaaac

SEQ ID NO: 1929784 - RNA, 21 nt, Human
aguucugcagauaaacaguag

SEQ ID NO: 1929785 - RNA, 16 nt, Human
agugcugaagcuuauu

SEQ ID NO: 1929786 - RNA, 15 nt, Human
agugcugaagcuuau

SEQ ID NO: 1929787 - RNA, 13 nt, Human
agugcugaagcuu

SEQ ID NO: 1929788 - RNA, 12 nt, Human
agugcugaagcu

SEQ ID NO: 1929789 - RNA, 22 nt, Human
agugcugaagcuuauuaaugcu

SEQ ID NO: 1929790 - RNA, 21 nt, Human
agugcugaagcuuauuaaugc

SEQ ID NO: 1929791 - RNA, 23 nt, Human
agugcugaagcuuauuaaugcua

SEQ ID NO: 1929792 - RNA, 13 nt, Human
agugcugcauuua

SEQ ID NO: 1929793 - RNA, 12 nt, Human
agugcugcauuu

SEQ ID NO: 1929794 - RNA, 22 nt, Human
agugaguugauagcacagaccc

SEQ ID NO: 1929795 - RNA, 23 nt, Human
agugaguugauagcacagacccu

SEQ ID NO: 1929796 - RNA, 21 nt, Human
agugcugggauuacaggugug

SEQ ID NO: 1929797 - RNA, 20 nt, Human
agugcugggauuacaggugu

SEQ ID NO: 1929798 - RNA, 19 nt, Human
agugcugcauuuaaaagau

SEQ ID NO: 1929799 - RNA, 17 nt, Human
agugcugcauuuaaaag

SEQ ID NO: 1929800 - RNA, 16 nt, Human
agugcugcauuuaaaa

SEQ ID NO: 1929801 - RNA, 16 nt, Human
uguggucccaccccac

SEQ ID NO: 1929802 - RNA, 13 nt, Human
uguggucccaccc

SEQ ID NO: 1929803 - RNA, 15 nt, Human
uguggucccacccca

SEQ ID NO: 1929804 - RNA, 20 nt, Human
ugugguguuuccuggcacug

SEQ ID NO: 1929805 - RNA, 21 nt, Human
ugugguguuuccugcaggcca

SEQ ID NO: 1929806 - RNA, 18 nt, Human
uguguaagacaaaaagcu

SEQ ID NO: 1929807 - RNA, 14 nt, Human
ugugguguuuccug

SEQ ID NO: 1929808 - RNA, 16 nt, Human
ugugguguuuccuggc

SEQ ID NO: 1929809 - RNA, 21 nt, Human
uguggguuucuaaagcugcca

SEQ ID NO: 1929810 - RNA, 23 nt, Human
uguggguuucuaaagcugccagc

SEQ ID NO: 1929811 - RNA, 20 nt, Human
uguggucacaggaaguagag

SEQ ID NO: 1929812 - RNA, 19 nt, Human
uguguguuuauugucaaag

SEQ ID NO: 1929813 - RNA, 23 nt, Human
uguguguuuauugucaaaguggu

SEQ ID NO: 1929814 - RNA, 13 nt, Human
ugugugugugaau

SEQ ID NO: 1929815 - RNA, 14 nt, Human
uguguguguaugug

SEQ ID NO: 1929816 - RNA, 20 nt, Human
ugugugugggaguguguaau

SEQ ID NO: 1929817 - RNA, 12 nt, Human
ugugugugggag

SEQ ID NO: 1929818 - RNA, 19 nt, Human
ugugucuuuaaaugcugcu

SEQ ID NO: 1929819 - RNA, 21 nt, Human
ugugucuugcaauggcagccu

SEQ ID NO: 1929820 - RNA, 21 nt, Human
ugugucucuugguccugcugc

SEQ ID NO: 1929821 - RNA, 22 nt, Human
ugugucucuugguccugcugca

SEQ ID NO: 1929822 - RNA, 17 nt, Human
ugugucucuugguccug

SEQ ID NO: 1929823 - RNA, 20 nt, Human
ugugucucuugguccugcug

SEQ ID NO: 1929824 - RNA, 13 nt, Human
uguguugaagagg

SEQ ID NO: 1929825 - RNA, 20 nt, Human
uguuccacaaguuaaauaaa

SEQ ID NO: 1929826 - RNA, 14 nt, Human
uguuccagcaguuu

SEQ ID NO: 1929827 - RNA, 20 nt, Human
agugugucuuagugugugca

SEQ ID NO: 1929828 - RNA, 21 nt, Human
agugugugauuuuuugcauuc

SEQ ID NO: 1929829 - RNA, 16 nt, Human
uguucugggacacagu

SEQ ID NO: 1929830 - RNA, 14 nt, Human
uguuccuagaguag

SEQ ID NO: 1929831 - RNA, 16 nt, Human
uguuccuagaguagag

SEQ ID NO: 1929832 - RNA, 18 nt, Human
uguucccauccucuucuu

SEQ ID NO: 1929833 - RNA, 21 nt, Human
uguuccgugguuaaacucgcu

SEQ ID NO: 1929834 - RNA, 18 nt, Human
uguuccaguaaucuaaua

SEQ ID NO: 1929835 - RNA, 17 nt, Human
uguucccaccugcugga

SEQ ID NO: 1929836 - RNA, 18 nt, Human
uguugcccaggcaggucu

SEQ ID NO: 1929837 - RNA, 17 nt, Human
uguugcccaggcagguc

SEQ ID NO: 1929838 - RNA, 16 nt, Human
uguugcccaggcaggu

SEQ ID NO: 1929839 - RNA, 15 nt, Human
uguugcccaggcagg

SEQ ID NO: 1929840 - RNA, 12 nt, Human
uguugcccaggc

SEQ ID NO: 1929841 - RNA, 13 nt, Human
uguugcccaggca

SEQ ID NO: 1929842 - RNA, 17 nt, Human
uguugcaagugcaauaa

SEQ ID NO: 1929843 - RNA, 15 nt, Human
uguucugugauauaa

SEQ ID NO: 1929844 - RNA, 18 nt, Human
uguucugugauauaagug

SEQ ID NO: 1929845 - RNA, 16 nt, Human
agugugguguuuccug

SEQ ID NO: 1929846 - RNA, 17 nt, Human
agugugcacuaaggggc

SEQ ID NO: 1929847 - RNA, 22 nt, Human
agugugcacuaaggggcccggc

SEQ ID NO: 1929848 - RNA, 23 nt, Human
agugugguguuuccugcaggcca

SEQ ID NO: 1929849 - RNA, 17 nt, Human
agugugguguuuccugg

SEQ ID NO: 1929850 - RNA, 19 nt, Human
agugugguguuuccuggca

SEQ ID NO: 1929851 - RNA, 20 nt, Human
agugugguguuuccuggcac

SEQ ID NO: 1929852 - RNA, 15 nt, Human
aguggugugaucuca

SEQ ID NO: 1929853 - RNA, 14 nt, Human
aguguacucccagg

SEQ ID NO: 1929854 - RNA, 15 nt, Human
aguguacucccaggg

SEQ ID NO: 1929855 - RNA, 21 nt, Human
agugguggugaacagaacaaa

SEQ ID NO: 1929856 - RNA, 20 nt, Human
aguggugguaacccuggugg

SEQ ID NO: 1929857 - RNA, 18 nt, Human
aguggugguaacccuggu

SEQ ID NO: 1929858 - RNA, 19 nt, Human
aguggugguaacccuggug

SEQ ID NO: 1929859 - RNA, 18 nt, Human
aguggugguuuucuguuc

SEQ ID NO: 1929860 - RNA, 17 nt, Human
aguggugguuuucuguu

SEQ ID NO: 1929861 - RNA, 23 nt, Human
aguggugguuuucuguucuuucu

SEQ ID NO: 1929862 - RNA, 21 nt, Human
aguggugguuuucuguucuuu

SEQ ID NO: 1929863 - RNA, 20 nt, Human
aguggugguuuucuguucuu

SEQ ID NO: 1929864 - RNA, 19 nt, Human
aguggugguuuucuguucu

SEQ ID NO: 1929865 - RNA, 17 nt, Human
aguggugcgaucugggu

SEQ ID NO: 1929866 - RNA, 17 nt, Human
aguggaaguaguggagc

SEQ ID NO: 1929867 - RNA, 14 nt, Human
uguuacaaauugua

SEQ ID NO: 1929868 - RNA, 13 nt, Human
ugucuuguacaug

SEQ ID NO: 1929869 - RNA, 19 nt, Human
ugucuuggacacuguacaa

SEQ ID NO: 1929870 - RNA, 22 nt, Human
ugucuuguacauguguagccug

SEQ ID NO: 1929871 - RNA, 20 nt, Human
ugucuuguacauguguagcc

SEQ ID NO: 1929872 - RNA, 17 nt, Human
ugucuuguacaugugua

SEQ ID NO: 1929873 - RNA, 16 nt, Human
ugucuuguacaugugu

SEQ ID NO: 1929874 - RNA, 15 nt, Human
ugugaaaggaaagag

SEQ ID NO: 1929875 - RNA, 18 nt, Human
ugugaaaggaaagaggcu

SEQ ID NO: 1929876 - RNA, 21 nt, Human
ugugaaaggaaagagggaggu

SEQ ID NO: 1929877 - RNA, 15 nt, Human
ugucuuguguuucuu

SEQ ID NO: 1929878 - RNA, 20 nt, Human
ugugaaauaaaacuggcuuu

SEQ ID NO: 1929879 - RNA, 21 nt, Human
ugugaaauaaaacuggcuuug

SEQ ID NO: 1929880 - RNA, 12 nt, Human
ugugaaauuauu

SEQ ID NO: 1929881 - RNA, 13 nt, Human
ugugaaauuccca

SEQ ID NO: 1929882 - RNA, 19 nt, Human
ugugacuagugcugaagcu

SEQ ID NO: 1929883 - RNA, 17 nt, Human
ugugacuagugcugaag

SEQ ID NO: 1929884 - RNA, 16 nt, Human
ugugacuagugcugaa

SEQ ID NO: 1929885 - RNA, 15 nt, Human
ugugacuagugcuga

SEQ ID NO: 1929886 - RNA, 14 nt, Human
ugugacuagugcug

SEQ ID NO: 1929887 - RNA, 19 nt, Human
ugugaccuugagaagauuc

SEQ ID NO: 1929888 - RNA, 23 nt, Human
ugugacuagugcugaagcuuauu

SEQ ID NO: 1929889 - RNA, 22 nt, Human
ugugacuagugcugaagcuuau

SEQ ID NO: 1929890 - RNA, 20 nt, Human
ugugacuagugcugaagcuu

SEQ ID NO: 1929891 - RNA, 14 nt, Human
ugugaagagaacca

SEQ ID NO: 1929892 - RNA, 18 nt, Human
ugugaacuuuauuaaaua

SEQ ID NO: 1929893 - RNA, 21 nt, Human
ugugaaccaccacacccagcc

SEQ ID NO: 1929894 - RNA, 20 nt, Human
ugugaaccaccacacccagc

SEQ ID NO: 1929895 - RNA, 19 nt, Human
ugugaaccaccacacccag

SEQ ID NO: 1929896 - RNA, 20 nt, Human
ugugaacaguuguguuugaa

SEQ ID NO: 1929897 - RNA, 15 nt, Human
ugugaacagcggcug

SEQ ID NO: 1929898 - RNA, 17 nt, Human
agucuugacgaguguga

SEQ ID NO: 1929899 - RNA, 14 nt, Human
agucuugcagcuga

SEQ ID NO: 1929900 - RNA, 18 nt, Human
agucuuguauuaaguugu

SEQ ID NO: 1929901 - RNA, 16 nt, Human
agucuuguauuaaguu

SEQ ID NO: 1929902 - RNA, 15 nt, Human
agucuuggcucacug

SEQ ID NO: 1929903 - RNA, 22 nt, Human
agucuuguauuaaguuguuaau

SEQ ID NO: 1929904 - RNA, 14 nt, Human
agucuuuguacaga

SEQ ID NO: 1929905 - RNA, 15 nt, Human
ugugacugaauuucu

SEQ ID NO: 1929906 - RNA, 16 nt, Human
ugugacugaauuucuu

SEQ ID NO: 1929907 - RNA, 15 nt, Human
ugugagagguuugac

SEQ ID NO: 1929908 - RNA, 16 nt, Human
ugugagagguuugacu

SEQ ID NO: 1929909 - RNA, 19 nt, Human
ugugagaugcuagaacucc

SEQ ID NO: 1929910 - RNA, 15 nt, Human
ugugagaugcuagaa

SEQ ID NO: 1929911 - RNA, 21 nt, Human
ugugccauagucacauggccu

SEQ ID NO: 1929912 - RNA, 18 nt, Human
ugugccauagucacaugg

SEQ ID NO: 1929913 - RNA, 16 nt, Human
ugugccauagucacau

SEQ ID NO: 1929914 - RNA, 18 nt, Human
ugugccagggcaaugaug

SEQ ID NO: 1929915 - RNA, 21 nt, Human
ugugccagggcaaugaugaau

SEQ ID NO: 1929916 - RNA, 20 nt, Human
ugugccagguuuuuggucug

SEQ ID NO: 1929917 - RNA, 20 nt, Human
ugugccagauuuaugcauau

SEQ ID NO: 1929918 - RNA, 16 nt, Human
ugugccaugugccagg

SEQ ID NO: 1929919 - RNA, 12 nt, Human
ugugccaugugc

SEQ ID NO: 1929920 - RNA, 16 nt, Human
ugugccauuuugcauu

SEQ ID NO: 1929921 - RNA, 23 nt, Human
ugugcccacccuccacucuccuc

SEQ ID NO: 1929922 - RNA, 14 nt, Human
ugugcccacccucc

SEQ ID NO: 1929923 - RNA, 18 nt, Human
ugugccagauuuaugcau

SEQ ID NO: 1929924 - RNA, 19 nt, Human
ugugccaaccuauuuugaa

SEQ ID NO: 1929925 - RNA, 19 nt, Human
ugugcauuuucuaaacaga

SEQ ID NO: 1929926 - RNA, 21 nt, Human
ugugcauuuucuaaacagaga

SEQ ID NO: 1929927 - RNA, 13 nt, Human
ugugcauuuucua

SEQ ID NO: 1929928 - RNA, 14 nt, Human
ugugcauuuucuaa

SEQ ID NO: 1929929 - RNA, 15 nt, Human
agugaaagaaaauaa

SEQ ID NO: 1929930 - RNA, 20 nt, Human
agugaacaaauuuacagaga

SEQ ID NO: 1929931 - RNA, 16 nt, Human
agugaacaaauuuaca

SEQ ID NO: 1929932 - RNA, 18 nt, Human
ugugaugagaggaaauca

SEQ ID NO: 1929933 - RNA, 19 nt, Human
ugugauggggcccugccuc

SEQ ID NO: 1929934 - RNA, 20 nt, Human
ugugauggggcccugccucc

SEQ ID NO: 1929935 - RNA, 14 nt, Human
ugugauuguggaau

SEQ ID NO: 1929936 - RNA, 14 nt, Human
ugugauugugccua

SEQ ID NO: 1929937 - RNA, 17 nt, Human
ugugauuguggaaugga

SEQ ID NO: 1929938 - RNA, 17 nt, Human
uguggaguucaucuuga

SEQ ID NO: 1929939 - RNA, 16 nt, Human
uguggagucauucuca

SEQ ID NO: 1929940 - RNA, 21 nt, Human
uguggaguucaucuugaauug

SEQ ID NO: 1929941 - RNA, 23 nt, Human
uguggcaguuuggcaaacucucc

SEQ ID NO: 1929942 - RNA, 21 nt, Human
ugugcccccauguaagcaccc

SEQ ID NO: 1929943 - RNA, 15 nt, Human
agugagucgaggaca

SEQ ID NO: 1929944 - RNA, 21 nt, Human
agugaguugauagcacagacc

SEQ ID NO: 1929945 - RNA, 16 nt, Human
agugagggagauccca

SEQ ID NO: 1929946 - RNA, 19 nt, Human
agugagggagggcugucau

SEQ ID NO: 1929947 - RNA, 21 nt, Human
agugaggcucugcccuugguu

SEQ ID NO: 1929948 - RNA, 19 nt, Human
agugaggcucugcccuugg

SEQ ID NO: 1929949 - RNA, 20 nt, Human
agugaggcucugcccuuggu

SEQ ID NO: 1929950 - RNA, 18 nt, Human
uguggccaaguucuuagu

SEQ ID NO: 1929951 - RNA, 15 nt, Human
uguggccaaggagcu

SEQ ID NO: 1929952 - RNA, 17 nt, Human
uguggccaaggagcugc

SEQ ID NO: 1929953 - RNA, 18 nt, Human
uguggccaaggagcugcu

SEQ ID NO: 1929954 - RNA, 19 nt, Human
uguggccaaggagcugcua

SEQ ID NO: 1929955 - RNA, 20 nt, Human
uguggccaaggagcugcuau

SEQ ID NO: 1929956 - RNA, 21 nt, Human
uguggccaaggagcugcuaua

SEQ ID NO: 1929957 - RNA, 14 nt, Human
uguggccaaggagc

SEQ ID NO: 1929958 - RNA, 15 nt, Human
agugaggcucugccc

SEQ ID NO: 1929959 - RNA, 14 nt, Human
agugaggcucugcc

SEQ ID NO: 1929960 - RNA, 16 nt, Human
agugaggcucugcccu

SEQ ID NO: 1929961 - RNA, 17 nt, Human
agugaggcucugcccuu

SEQ ID NO: 1929962 - RNA, 15 nt, Human
uucuagguucuaaaa

SEQ ID NO: 1929963 - RNA, 23 nt, Human
uucuaggacugaauuaugaaacu

SEQ ID NO: 1929964 - RNA, 13 nt, Human
uucuaggccuggg

SEQ ID NO: 1929965 - RNA, 23 nt, Human
uuccuuuugaacgccccccccca

SEQ ID NO: 1929966 - RNA, 15 nt, Human
uuccuuuugaaagaa

SEQ ID NO: 1929967 - RNA, 23 nt, Human
uuccuuuugaaagaaucagucuu

SEQ ID NO: 1929968 - RNA, 20 nt, Human
uuccuuuugaacgccccccc

SEQ ID NO: 1929969 - RNA, 13 nt, Human
uucuauaaggcca

SEQ ID NO: 1929970 - RNA, 19 nt, Human
uucuauaaaauacugguau

SEQ ID NO: 1929971 - RNA, 14 nt, Human
uucuauaaggccau

SEQ ID NO: 1929972 - RNA, 21 nt, Human
uucuauaaggccauaaaacag

SEQ ID NO: 1929973 - RNA, 23 nt, Human
uucuauaaggccauaaaacaggu

SEQ ID NO: 1929974 - RNA, 22 nt, Human
uucucaagauacugcuacugua

SEQ ID NO: 1929975 - RNA, 23 nt, Human
uucucagaaucucaaauaacuaa

SEQ ID NO: 1929976 - RNA, 19 nt, Human
uucucagaaucucaaauaa

SEQ ID NO: 1929977 - RNA, 22 nt, Human
uucucagaaucucaaauaacua

SEQ ID NO: 1929978 - RNA, 20 nt, Human
uucucacagcuccaagaauu

SEQ ID NO: 1929979 - RNA, 22 nt, Human
aucagaacucaaauggggccag

SEQ ID NO: 1929980 - RNA, 23 nt, Human
aucagaacucaaauggggccaga

SEQ ID NO: 1929981 - RNA, 19 nt, Human
aucagucauaacuaaauaa

SEQ ID NO: 1929982 - RNA, 13 nt, Human
aucagucaauauu

SEQ ID NO: 1929983 - RNA, 18 nt, Human
aucaguauaaacaaaguu

SEQ ID NO: 1929984 - RNA, 18 nt, Human
aucagcacgauuucuguu

SEQ ID NO: 1929985 - RNA, 17 nt, Human
aucagcacgauuucugu

SEQ ID NO: 1929986 - RNA, 16 nt, Human
aucagcacgauuucug

SEQ ID NO: 1929987 - RNA, 15 nt, Human
aucagcacgauuucu

SEQ ID NO: 1929988 - RNA, 15 nt, Human
aucaguggauuuccc

SEQ ID NO: 1929989 - RNA, 19 nt, Human
aucaguguaccauuugccu

SEQ ID NO: 1929990 - RNA, 18 nt, Human
aucaguggauuucccauc

SEQ ID NO: 1929991 - RNA, 16 nt, Human
aucagugucuuuccac

SEQ ID NO: 1929992 - RNA, 16 nt, Human
aucaguggauuuccca

SEQ ID NO: 1929993 - RNA, 17 nt, Human
aucaguggauuucccau

SEQ ID NO: 1929994 - RNA, 13 nt, Human
aucauucagcaac

SEQ ID NO: 1929995 - RNA, 12 nt, Human
aucauucagcaa

SEQ ID NO: 1929996 - RNA, 22 nt, Human
aucauucccuucgacagcauuu

SEQ ID NO: 1929997 - RNA, 14 nt, Human
aucauugaaaucuu

SEQ ID NO: 1929998 - RNA, 15 nt, Human
aucauugaaaucuuu

SEQ ID NO: 1929999 - RNA, 22 nt, Human
aucauuaaagccugaguuugcu

SEQ ID NO: 1930000 - RNA, 14 nt, Human
aucauucauuuucu

SEQ ID NO: 1930001 - RNA, 23 nt, Human
aucauaguggcuuaaaacaacac

SEQ ID NO: 1930002 - RNA, 23 nt, Human
aucauguuuacagaggacaguau

SEQ ID NO: 1930003 - RNA, 18 nt, Human
aucauguuuacagaggac

SEQ ID NO: 1930004 - RNA, 15 nt, Human
aucauuuuaauuauu

SEQ ID NO: 1930005 - RNA, 14 nt, Human
aucauuuuaauuau

SEQ ID NO: 1930006 - RNA, 16 nt, Human
auccagguucagcuug

SEQ ID NO: 1930007 - RNA, 15 nt, Human
auccagguucagcuu

SEQ ID NO: 1930008 - RNA, 15 nt, Human
aucccaacugucuuu

SEQ ID NO: 1930009 - RNA, 17 nt, Human
aucccaacugucuuuuu

SEQ ID NO: 1930010 - RNA, 23 nt, Human
aucccaacugucuuuuuuucccu

SEQ ID NO: 1930011 - RNA, 16 nt, Human
aucccauaugccuggg

SEQ ID NO: 1930012 - RNA, 17 nt, Human
aucccauaugccugggc

SEQ ID NO: 1930013 - RNA, 18 nt, Human
aucccucccccccaugca

SEQ ID NO: 1930014 - RNA, 19 nt, Human
aucccucccccccaugcac

SEQ ID NO: 1930015 - RNA, 21 nt, Human
aucccucccccccaugcacug

SEQ ID NO: 1930016 - RNA, 22 nt, Human
aucccucccccccaugcacugu

SEQ ID NO: 1930017 - RNA, 20 nt, Human
aucauugaaaucuuuuugcu

SEQ ID NO: 1930018 - RNA, 19 nt, Human
aucauugaaaucuuuuugc

SEQ ID NO: 1930019 - RNA, 12 nt, Human
uucucugugaac

SEQ ID NO: 1930020 - RNA, 20 nt, Human
uucucugugaacgauuuaga

SEQ ID NO: 1930021 - RNA, 15 nt, Human
uucugaaagggacgc

SEQ ID NO: 1930022 - RNA, 19 nt, Human
uucugaaaauuaacacugc

SEQ ID NO: 1930023 - RNA, 13 nt, Human
uucucuucacuca

SEQ ID NO: 1930024 - RNA, 21 nt, Human
uucugaaauuuccugggagcu

SEQ ID NO: 1930025 - RNA, 22 nt, Human
uucugggacacaguucaauucu

SEQ ID NO: 1930026 - RNA, 11 nt, Human
uucugggacac

SEQ ID NO: 1930027 - RNA, 10 nt, Human
uucugggaca

SEQ ID NO: 1930028 - RNA, 16 nt, Human
uucugccgcagcccug

SEQ ID NO: 1930029 - RNA, 23 nt, Human
uucugccgcagcccugcagaggg

SEQ ID NO: 1930030 - RNA, 19 nt, Human
uucuggguggggcaguggg

SEQ ID NO: 1930031 - RNA, 13 nt, Human
uucugggaagcaa

SEQ ID NO: 1930032 - RNA, 17 nt, Human
auauugcugauggugca

SEQ ID NO: 1930033 - RNA, 21 nt, Human
auauugcugauggugcaauga

SEQ ID NO: 1930034 - RNA, 22 nt, Human
auauugcugagagaaauaugga

SEQ ID NO: 1930035 - RNA, 13 nt, Human
auauuguguuugu

SEQ ID NO: 1930036 - RNA, 20 nt, Human
auauuguuuucaguguacau

SEQ ID NO: 1930037 - RNA, 17 nt, Human
auauuguguuuguguau

SEQ ID NO: 1930038 - RNA, 21 nt, Human
auauuguguuuguguauuuac

SEQ ID NO: 1930039 - RNA, 22 nt, Human
auauuuaaaggcccuaucuguu

SEQ ID NO: 1930040 - RNA, 20 nt, Human
auauuuguauuuaaaugaaa

SEQ ID NO: 1930041 - RNA, 20 nt, Human
auauuugugauagcacuuuc

SEQ ID NO: 1930042 - RNA, 21 nt, Human
auauuugugauagcacuuucu

SEQ ID NO: 1930043 - RNA, 22 nt, Human
auauuugugauagcacuuucua

SEQ ID NO: 1930044 - RNA, 14 nt, Human
auauuugugcauuu

SEQ ID NO: 1930045 - RNA, 17 nt, Human
auauuugugcauuuucu

SEQ ID NO: 1930046 - RNA, 21 nt, Human
auauuugugcauuuucuaaac

SEQ ID NO: 1930047 - RNA, 18 nt, Human
auauuugugcauuuucua

SEQ ID NO: 1930048 - RNA, 17 nt, Human
auauuuguguauuuaac

SEQ ID NO: 1930049 - RNA, 19 nt, Human
auauuugguuuuccuguau

SEQ ID NO: 1930050 - RNA, 20 nt, Human
auauuuguaaauuuauguga

SEQ ID NO: 1930051 - RNA, 24 nt, Human
auauuaagaaagacuaucuaaaug

SEQ ID NO: 1930052 - RNA, 22 nt, Human
auauuaaggaagacaaugugaa

SEQ ID NO: 1930053 - RNA, 12 nt, Human
auauuaaaucug

SEQ ID NO: 1930054 - RNA, 13 nt, Human
auauuaaaucugc

SEQ ID NO: 1930055 - RNA, 18 nt, Human
auauguuuuaagaggcag

SEQ ID NO: 1930056 - RNA, 20 nt, Human
auauguuuuaagaggcaggg

SEQ ID NO: 1930057 - RNA, 15 nt, Human
auauugauccagaaa

SEQ ID NO: 1930058 - RNA, 22 nt, Human
auauugauccagaaagaaaacu

SEQ ID NO: 1930059 - RNA, 22 nt, Human
auauugauuuccguuaaaauac

SEQ ID NO: 1930060 - RNA, 21 nt, Human
auauugauuuccguuaaaaua

SEQ ID NO: 1930061 - RNA, 13 nt, Human
auauugaugugug

SEQ ID NO: 1930062 - RNA, 18 nt, Human
auauugaauauaauauau

SEQ ID NO: 1930063 - RNA, 21 nt, Human
auauugaauauaauauauuug

SEQ ID NO: 1930064 - RNA, 19 nt, Human
auauugauuuccguuaaaa

SEQ ID NO: 1930065 - RNA, 16 nt, Human
auauucuguuggccag

SEQ ID NO: 1930066 - RNA, 23 nt, Human
auauucuggagucaucauucccu

SEQ ID NO: 1930067 - RNA, 21 nt, Human
auauucucacagcuccaagaa

SEQ ID NO: 1930068 - RNA, 23 nt, Human
auauucucacagcuccaagaauu

SEQ ID NO: 1930069 - RNA, 22 nt, Human
auauucucacagcuccaagaau

SEQ ID NO: 1930070 - RNA, 18 nt, Human
aucaaguauuauaccuuu

SEQ ID NO: 1930071 - RNA, 14 nt, Human
aucaaguauuauac

SEQ ID NO: 1930072 - RNA, 13 nt, Human
aucaaguauuaua

SEQ ID NO: 1930073 - RNA, 16 nt, Human
aucaaguauuugggaa

SEQ ID NO: 1930074 - RNA, 21 nt, Human
aucaagaguugugacaacuuc

SEQ ID NO: 1930075 - RNA, 18 nt, Human
auauuuucauuaaaagcu

SEQ ID NO: 1930076 - RNA, 18 nt, Human
auauuuucuuuaaugcuu

SEQ ID NO: 1930077 - RNA, 12 nt, Human
auauuuugaucu

SEQ ID NO: 1930078 - RNA, 15 nt, Human
auauuuugaucuuca

SEQ ID NO: 1930079 - RNA, 16 nt, Human
auauuuugaucuucaa

SEQ ID NO: 1930080 - RNA, 17 nt, Human
auauuuugaucuucaac

SEQ ID NO: 1930081 - RNA, 19 nt, Human
auauuuugaucuucaacaa

SEQ ID NO: 1930082 - RNA, 22 nt, Human
auauuuugaucuucaacaaauu

SEQ ID NO: 1930083 - RNA, 22 nt, Human
aucacggcucacugcagccuca

SEQ ID NO: 1930084 - RNA, 21 nt, Human
aucacguaaagcuagaaauga

SEQ ID NO: 1930085 - RNA, 14 nt, Human
aucacguaaagcua

SEQ ID NO: 1930086 - RNA, 20 nt, Human
uuccuuuuauuucuucacca

SEQ ID NO: 1930087 - RNA, 17 nt, Human
uuccuuuggaagaaaaa

SEQ ID NO: 1930088 - RNA, 21 nt, Human
aucacugucuuuccuagaugg

SEQ ID NO: 1930089 - RNA, 22 nt, Human
aucacugguugcacuuaugauu

SEQ ID NO: 1930090 - RNA, 12 nt, Human
aucacugucuuu

SEQ ID NO: 1930091 - RNA, 14 nt, Human
aucacugucuuucc

SEQ ID NO: 1930092 - RNA, 15 nt, Human
aucacugucuuuccu

SEQ ID NO: 1930093 - RNA, 16 nt, Human
aucacugucuuuccua

SEQ ID NO: 1930094 - RNA, 18 nt, Human
aucacugucuuuccuaga

SEQ ID NO: 1930095 - RNA, 19 nt, Human
aucacugucuuuccuagau

SEQ ID NO: 1930096 - RNA, 14 nt, Human
auauuuuaagacga

SEQ ID NO: 1930097 - RNA, 13 nt, Human
uuccuaauccucu

SEQ ID NO: 1930098 - RNA, 15 nt, Human
uuccuaauccucuag

SEQ ID NO: 1930099 - RNA, 15 nt, Human
uuccuccuuccaugg

SEQ ID NO: 1930100 - RNA, 12 nt, Human
uuccucugggaa

SEQ ID NO: 1930101 - RNA, 15 nt, Human
uuccucugcuuugaa

SEQ ID NO: 1930102 - RNA, 13 nt, Human
uuccucugcuuug

SEQ ID NO: 1930103 - RNA, 17 nt, Human
uuccuguucccaugaga

SEQ ID NO: 1930104 - RNA, 22 nt, Human
uuccuguguguccaaaacugcc

SEQ ID NO: 1930105 - RNA, 21 nt, Human
uuccuguguguccaaaacugc

SEQ ID NO: 1930106 - RNA, 11 nt, Human
uuccucuuucc

SEQ ID NO: 1930107 - RNA, 15 nt, Human
uuccugggagcuuuu

SEQ ID NO: 1930108 - RNA, 16 nt, Human
uuccugggagcuuuug

SEQ ID NO: 1930109 - RNA, 15 nt, Human
uuccuucagugccuu

SEQ ID NO: 1930110 - RNA, 21 nt, Human
auauuuucaugcuguucauga

SEQ ID NO: 1930111 - RNA, 18 nt, Human
auauuuucaugcuguuca

SEQ ID NO: 1930112 - RNA, 20 nt, Human
uuccuguucuuaagacguga

SEQ ID NO: 1930113 - RNA, 13 nt, Human
uuccuguucugaa

SEQ ID NO: 1930114 - RNA, 15 nt, Human
uuccuguucugaacu

SEQ ID NO: 1930115 - RNA, 11 nt, Human
uuccuucagug

SEQ ID NO: 1930116 - RNA, 14 nt, Human
uuccuucagugccu

SEQ ID NO: 1930117 - RNA, 18 nt, Human
auagcuacuaauuuuaaa

SEQ ID NO: 1930118 - RNA, 19 nt, Human
auagcucaggugucccugc

SEQ ID NO: 1930119 - RNA, 20 nt, Human
auagcuccccgcuucugccu

SEQ ID NO: 1930120 - RNA, 22 nt, Human
auagcucaggugucccugcacu

SEQ ID NO: 1930121 - RNA, 21 nt, Human
auagcucaggugucccugcac

SEQ ID NO: 1930122 - RNA, 20 nt, Human
auagcucaggugucccugca

SEQ ID NO: 1930123 - RNA, 23 nt, Human
auagcuccccgcuucugccugca

SEQ ID NO: 1930124 - RNA, 12 nt, Human
auagcugggacu

SEQ ID NO: 1930125 - RNA, 17 nt, Human
auagcuacuaauuuuaa

SEQ ID NO: 1930126 - RNA, 14 nt, Human
auagcuacuaauuu

SEQ ID NO: 1930127 - RNA, 18 nt, Human
auagcgucauaacuagaa

SEQ ID NO: 1930128 - RNA, 20 nt, Human
auagcgucauaacuagaacu

SEQ ID NO: 1930129 - RNA, 18 nt, Human
auagccugccucuucucu

SEQ ID NO: 1930130 - RNA, 13 nt, Human
auaagauaaaugu

SEQ ID NO: 1930131 - RNA, 17 nt, Human
auaagauaaaugugcug

SEQ ID NO: 1930132 - RNA, 22 nt, Human
uuauuuacugagcuucucugug

SEQ ID NO: 1930133 - RNA, 17 nt, Human
uuauuuacugagcuucu

SEQ ID NO: 1930134 - RNA, 21 nt, Human
uuauuuacugagcuucucugu

SEQ ID NO: 1930135 - RNA, 15 nt, Human
uuauuuacagaugaa

SEQ ID NO: 1930136 - RNA, 20 nt, Human
uuauuuacagaugaauguau

SEQ ID NO: 1930137 - RNA, 16 nt, Human
uuauuuaguuccuuga

SEQ ID NO: 1930138 - RNA, 17 nt, Human
auagcugggacuacagg

SEQ ID NO: 1930139 - RNA, 22 nt, Human
auagcuggucuuauuuguaaag

SEQ ID NO: 1930140 - RNA, 23 nt, Human
auagcuggucuuauuuguaaagc

SEQ ID NO: 1930141 - RNA, 18 nt, Human
uuauuuaaugaaagacug

SEQ ID NO: 1930142 - RNA, 22 nt, Human
uuauuuaaugaaagacuguaca

SEQ ID NO: 1930143 - RNA, 13 nt, Human
uuauuuaacagcu

SEQ ID NO: 1930144 - RNA, 23 nt, Human
uuauuuaacagcugaauuaucua

SEQ ID NO: 1930145 - RNA, 14 nt, Human
uuauuuaaauuuua

SEQ ID NO: 1930146 - RNA, 20 nt, Human
uuauuuaaacucuguugcaa

SEQ ID NO: 1930147 - RNA, 16 nt, Human
uucaaaauggagggaa

SEQ ID NO: 1930148 - RNA, 16 nt, Human
uucaaaauuguuacaa

SEQ ID NO: 1930149 - RNA, 17 nt, Human
uucaaaaugcuuuuuau

SEQ ID NO: 1930150 - RNA, 20 nt, Human
uucaaaaugcuuuuuauuau

SEQ ID NO: 1930151 - RNA, 15 nt, Human
uucaaacauuuacca

SEQ ID NO: 1930152 - RNA, 15 nt, Human
uucaaacuggggccu

SEQ ID NO: 1930153 - RNA, 16 nt, Human
uucaaacuggggccuc

SEQ ID NO: 1930154 - RNA, 21 nt, Human
uucaaacuggggccuccagaa

SEQ ID NO: 1930155 - RNA, 14 nt, Human
uuauuucuaaaaua

SEQ ID NO: 1930156 - RNA, 12 nt, Human
uuauuucugcau

SEQ ID NO: 1930157 - RNA, 13 nt, Human
uuauuucugcaua

SEQ ID NO: 1930158 - RNA, 15 nt, Human
uuauuucugcauaug

SEQ ID NO: 1930159 - RNA, 20 nt, Human
uuauuucugcauauguugaa

SEQ ID NO: 1930160 - RNA, 22 nt, Human
uuauuucugcauauguugaaua

SEQ ID NO: 1930161 - RNA, 16 nt, Human
uucaaaaaacuuguaa

SEQ ID NO: 1930162 - RNA, 21 nt, Human
uucaaaaaaaaaaaaaagaga

SEQ ID NO: 1930163 - RNA, 15 nt, Human
uucaaggauccugag

SEQ ID NO: 1930164 - RNA, 16 nt, Human
uucaaggauccugagc

SEQ ID NO: 1930165 - RNA, 18 nt, Human
uucaaggauccugagcca

SEQ ID NO: 1930166 - RNA, 19 nt, Human
uucaaggauccugagccag

SEQ ID NO: 1930167 - RNA, 21 nt, Human
uucaaggauccugagccagau

SEQ ID NO: 1930168 - RNA, 20 nt, Human
uucaagugauucuccugccu

SEQ ID NO: 1930169 - RNA, 17 nt, Human
uucaaguuaaauuuuau

SEQ ID NO: 1930170 - RNA, 16 nt, Human
uucaauaaagcauuua

SEQ ID NO: 1930171 - RNA, 23 nt, Human
uucaauaaaaaaaagaaaugaaa

SEQ ID NO: 1930172 - RNA, 18 nt, Human
uucaauaaagcauuuaua

SEQ ID NO: 1930173 - RNA, 14 nt, Human
uucaaguucaaucc

SEQ ID NO: 1930174 - RNA, 21 nt, Human
uucaauaaaaaaaagaaauga

SEQ ID NO: 1930175 - RNA, 17 nt, Human
uucaaggccauccuucc

SEQ ID NO: 1930176 - RNA, 16 nt, Human
uucaaggccauccuuc

SEQ ID NO: 1930177 - RNA, 22 nt, Human
auagcuuacaagccagcuggag

SEQ ID NO: 1930178 - RNA, 21 nt, Human
auagcuucaccccaaucccag

SEQ ID NO: 1930179 - RNA, 22 nt, Human
auagcuucaccccaaucccagc

SEQ ID NO: 1930180 - RNA, 19 nt, Human
auaggaacuuaaauaaugu

SEQ ID NO: 1930181 - RNA, 21 nt, Human
auaggaauugacccacaagaa

SEQ ID NO: 1930182 - RNA, 17 nt, Human
auaggcacaggaaacca

SEQ ID NO: 1930183 - RNA, 22 nt, Human
uucaccacaugugcacaugcac

SEQ ID NO: 1930184 - RNA, 14 nt, Human
uucacauuggaaac

SEQ ID NO: 1930185 - RNA, 19 nt, Human
uucacauuguauucagagu

SEQ ID NO: 1930186 - RNA, 13 nt, Human
uucacauuggaaa

SEQ ID NO: 1930187 - RNA, 17 nt, Human
uucacauauugauuucc

SEQ ID NO: 1930188 - RNA, 20 nt, Human
uucaauaaagcauuuauaaa

SEQ ID NO: 1930189 - RNA, 15 nt, Human
auaugcacaauagca

SEQ ID NO: 1930190 - RNA, 13 nt, Human
auaugcacacauu

SEQ ID NO: 1930191 - RNA, 14 nt, Human
auaugucaagccau

SEQ ID NO: 1930192 - RNA, 13 nt, Human
auaugugaacagu

SEQ ID NO: 1930193 - RNA, 18 nt, Human
uucauguaauccucaaga

SEQ ID NO: 1930194 - RNA, 21 nt, Human
uucauguacaagaugaaggag

SEQ ID NO: 1930195 - RNA, 17 nt, Human
uucauguacaagaugaa

SEQ ID NO: 1930196 - RNA, 21 nt, Human
uucauggccuuugauaaaugu

SEQ ID NO: 1930197 - RNA, 22 nt, Human
auaucugaaaauguauguguaa

SEQ ID NO: 1930198 - RNA, 20 nt, Human
auaugauuuaaaucagccgu

SEQ ID NO: 1930199 - RNA, 22 nt, Human
auaugauucaaaugucuauaaa

SEQ ID NO: 1930200 - RNA, 13 nt, Human
auaugauucaaau

SEQ ID NO: 1930201 - RNA, 12 nt, Human
auaugauucaaa

SEQ ID NO: 1930202 - RNA, 18 nt, Human
auauauucagccuggcuu

SEQ ID NO: 1930203 - RNA, 14 nt, Human
auauccuuugccuc

SEQ ID NO: 1930204 - RNA, 22 nt, Human
auaucuauauuuuacauaaauu

SEQ ID NO: 1930205 - RNA, 20 nt, Human
auaucuauauuuuacauaaa

SEQ ID NO: 1930206 - RNA, 16 nt, Human
auaucuauauuuuaca

SEQ ID NO: 1930207 - RNA, 17 nt, Human
auaucuauauuuuacau

SEQ ID NO: 1930208 - RNA, 18 nt, Human
uucaucauccuaagcuau

SEQ ID NO: 1930209 - RNA, 15 nt, Human
uucauauuucuuugg

SEQ ID NO: 1930210 - RNA, 14 nt, Human
uucauauuugcacu

SEQ ID NO: 1930211 - RNA, 15 nt, Human
uucauauuugcacua

SEQ ID NO: 1930212 - RNA, 21 nt, Human
uucaucauccuaagcuauuca

SEQ ID NO: 1930213 - RNA, 14 nt, Human
uucagccugccuuc

SEQ ID NO: 1930214 - RNA, 14 nt, Human
uucaguaauaacuc

SEQ ID NO: 1930215 - RNA, 13 nt, Human
uucagggucauag

SEQ ID NO: 1930216 - RNA, 16 nt, Human
uucauauuuacuucuu

SEQ ID NO: 1930217 - RNA, 21 nt, Human
uucauauuuacuucuuauaca

SEQ ID NO: 1930218 - RNA, 14 nt, Human
uucaguaggaacug

SEQ ID NO: 1930219 - RNA, 17 nt, Human
uucagaucucuaacuuc

SEQ ID NO: 1930220 - RNA, 23 nt, Human
uucagcaccuacaguguacaguc

SEQ ID NO: 1930221 - RNA, 22 nt, Human
uucagcaccuacaguguacagu

SEQ ID NO: 1930222 - RNA, 19 nt, Human
uucagccaagaauucuuaa

SEQ ID NO: 1930223 - RNA, 16 nt, Human
uucagcccucaccccu

SEQ ID NO: 1930224 - RNA, 12 nt, Human
uucagcccucac

SEQ ID NO: 1930225 - RNA, 16 nt, Human
uucagaauaagcuucc

SEQ ID NO: 1930226 - RNA, 22 nt, Human
auauauacauagcaugacauuu

SEQ ID NO: 1930227 - RNA, 14 nt, Human
auauauacauauau

SEQ ID NO: 1930228 - RNA, 22 nt, Human
auauaaauuuuuuuuguuucau

SEQ ID NO: 1930229 - RNA, 17 nt, Human
auauaaauuuuuuuugu

SEQ ID NO: 1930230 - RNA, 19 nt, Human
auauaaauguuaagaaaaa

SEQ ID NO: 1930231 - RNA, 15 nt, Human
auauaaacacuauau

SEQ ID NO: 1930232 - RNA, 13 nt, Human
auauaaacacuau

SEQ ID NO: 1930233 - RNA, 23 nt, Human
uuguaauucuaaaugaauguuua

SEQ ID NO: 1930234 - RNA, 17 nt, Human
uuguaauucuaaaugaa

SEQ ID NO: 1930235 - RNA, 14 nt, Human
uuguaauucuaaau

SEQ ID NO: 1930236 - RNA, 12 nt, Human
uuguaaugaaaa

SEQ ID NO: 1930237 - RNA, 20 nt, Human
uuguaagaguggaaccaaca

SEQ ID NO: 1930238 - RNA, 16 nt, Human
uuguaacccagauuuu

SEQ ID NO: 1930239 - RNA, 22 nt, Human
uuguaacccagauuuugcugua

SEQ ID NO: 1930240 - RNA, 14 nt, Human
uuguaaauuucucu

SEQ ID NO: 1930241 - RNA, 19 nt, Human
uuguaaauuuaugugaugg

SEQ ID NO: 1930242 - RNA, 15 nt, Human
uugguuuuccuguau

SEQ ID NO: 1930243 - RNA, 20 nt, Human
uugguuuucacauuggaaac

SEQ ID NO: 1930244 - RNA, 13 nt, Human
uugguuuuccugu

SEQ ID NO: 1930245 - RNA, 16 nt, Human
augaaugucaguguga

SEQ ID NO: 1930246 - RNA, 18 nt, Human
augaaugucagugugacu

SEQ ID NO: 1930247 - RNA, 19 nt, Human
uuggugguuucagaaaugu

SEQ ID NO: 1930248 - RNA, 18 nt, Human
uuggugguuucagaaaug

SEQ ID NO: 1930249 - RNA, 14 nt, Human
uugguuuguaaauu

SEQ ID NO: 1930250 - RNA, 19 nt, Human
uugguuaagcuuugacacu

SEQ ID NO: 1930251 - RNA, 20 nt, Human
uugguuaagcuuugacacug

SEQ ID NO: 1930252 - RNA, 22 nt, Human
uugguuaagcuuugacacugga

SEQ ID NO: 1930253 - RNA, 13 nt, Human
uugguguugacau

SEQ ID NO: 1930254 - RNA, 17 nt, Human
uuggugucgggcaugac

SEQ ID NO: 1930255 - RNA, 18 nt, Human
uuggugucgggcaugaca

SEQ ID NO: 1930256 - RNA, 19 nt, Human
uuggugucgggcaugacac

SEQ ID NO: 1930257 - RNA, 18 nt, Human
augaaucccacccacaug

SEQ ID NO: 1930258 - RNA, 21 nt, Human
augaaucccacccacauguga

SEQ ID NO: 1930259 - RNA, 15 nt, Human
augaagcaaugcuuc

SEQ ID NO: 1930260 - RNA, 15 nt, Human
augaagcaaacacau

SEQ ID NO: 1930261 - RNA, 17 nt, Human
augaaugaaacauuuug

SEQ ID NO: 1930262 - RNA, 15 nt, Human
augaauguauuuauu

SEQ ID NO: 1930263 - RNA, 17 nt, Human
augaauguauuuauuug

SEQ ID NO: 1930264 - RNA, 20 nt, Human
augaauguauuuauuuggga

SEQ ID NO: 1930265 - RNA, 14 nt, Human
augaagcaaugcuu

SEQ ID NO: 1930266 - RNA, 14 nt, Human
augaagcaaacaca

SEQ ID NO: 1930267 - RNA, 14 nt, Human
augaaccuucuggc

SEQ ID NO: 1930268 - RNA, 17 nt, Human
augaaccuucuggccuc

SEQ ID NO: 1930269 - RNA, 20 nt, Human
augaaagucuugugacuagu

SEQ ID NO: 1930270 - RNA, 19 nt, Human
augaaagucuugugacuag

SEQ ID NO: 1930271 - RNA, 18 nt, Human
augaaagucuugugacua

SEQ ID NO: 1930272 - RNA, 16 nt, Human
augaaagugagacuuu

SEQ ID NO: 1930273 - RNA, 18 nt, Human
uuggagccugcagagcug

SEQ ID NO: 1930274 - RNA, 22 nt, Human
augaaccacaucuugcucugcu

SEQ ID NO: 1930275 - RNA, 23 nt, Human
augaaccacaucuugcucugcug

SEQ ID NO: 1930276 - RNA, 15 nt, Human
aucuuauaauuuaaa

SEQ ID NO: 1930277 - RNA, 16 nt, Human
aucuuauaauuuaaaa

SEQ ID NO: 1930278 - RNA, 14 nt, Human
aucuugcucugcug

SEQ ID NO: 1930279 - RNA, 16 nt, Human
aucuugcucugcugac

SEQ ID NO: 1930280 - RNA, 15 nt, Human
aucuugcucugcuga

SEQ ID NO: 1930281 - RNA, 22 nt, Human
aucuuguggcuuugcaaccauu

SEQ ID NO: 1930282 - RNA, 22 nt, Human
aucugucauuugagcagggcuc

SEQ ID NO: 1930283 - RNA, 22 nt, Human
aucugugaggggcucucucaug

SEQ ID NO: 1930284 - RNA, 21 nt, Human
aucugugaggggcucucucau

SEQ ID NO: 1930285 - RNA, 17 nt, Human
aucugucauuugagcag

SEQ ID NO: 1930286 - RNA, 12 nt, Human
aucugucauuug

SEQ ID NO: 1930287 - RNA, 16 nt, Human
aucugugcacugccca

SEQ ID NO: 1930288 - RNA, 17 nt, Human
aucugugaauugagcug

SEQ ID NO: 1930289 - RNA, 17 nt, Human
uuggaaaauaaauuauu

SEQ ID NO: 1930290 - RNA, 15 nt, Human
uugcuuuguguucuu

SEQ ID NO: 1930291 - RNA, 20 nt, Human
uugcuuugugauuuuuguaa

SEQ ID NO: 1930292 - RNA, 16 nt, Human
uugcuuuguguucuuu

SEQ ID NO: 1930293 - RNA, 18 nt, Human
uuggagaguuuccugaaa

SEQ ID NO: 1930294 - RNA, 15 nt, Human
uuggagccugcagag

SEQ ID NO: 1930295 - RNA, 11 nt, Human
uuggagccugc

SEQ ID NO: 1930296 - RNA, 18 nt, Human
uuggagaauuuagguuuu

SEQ ID NO: 1930297 - RNA, 21 nt, Human
uuggagaguuuccugaaacaa

SEQ ID NO: 1930298 - RNA, 13 nt, Human
uuggagaauuuag

SEQ ID NO: 1930299 - RNA, 14 nt, Human
uugcucuugaugcc

SEQ ID NO: 1930300 - RNA, 17 nt, Human
uugcucuugaugccugg

SEQ ID NO: 1930301 - RNA, 18 nt, Human
uugcucuugaugccuggc

SEQ ID NO: 1930302 - RNA, 16 nt, Human
uugcucuggaccugcc

SEQ ID NO: 1930303 - RNA, 15 nt, Human
uugcuuugugauuuu

SEQ ID NO: 1930304 - RNA, 11 nt, Human
uugcuuugagc

SEQ ID NO: 1930305 - RNA, 15 nt, Human
uugcuuucugcucag

SEQ ID NO: 1930306 - RNA, 20 nt, Human
uugcuuucugcucagcuucu

SEQ ID NO: 1930307 - RNA, 15 nt, Human
uugcuuuauuccaga

SEQ ID NO: 1930308 - RNA, 19 nt, Human
aucugaaaaauacuuuugg

SEQ ID NO: 1930309 - RNA, 22 nt, Human
aucucuuuguucuaaagaugga

SEQ ID NO: 1930310 - RNA, 16 nt, Human
aucucuuguuuaaauu

SEQ ID NO: 1930311 - RNA, 14 nt, Human
aucugacccagugc

SEQ ID NO: 1930312 - RNA, 18 nt, Human
aucugacccagugccccc

SEQ ID NO: 1930313 - RNA, 15 nt, Human
aucucaccuccugcu

SEQ ID NO: 1930314 - RNA, 16 nt, Human
aucucaccuccugcug

SEQ ID NO: 1930315 - RNA, 17 nt, Human
aucucaaauuucuaaau

SEQ ID NO: 1930316 - RNA, 16 nt, Human
aucucaaauuucuaaa

SEQ ID NO: 1930317 - RNA, 23 nt, Human
aucucacacaugagcaucaggcc

SEQ ID NO: 1930318 - RNA, 21 nt, Human
uugauuaaauucuugcaaagu

SEQ ID NO: 1930319 - RNA, 20 nt, Human
uugauuaaauucuugcaaag

SEQ ID NO: 1930320 - RNA, 16 nt, Human
uugauuaaauucuugc

SEQ ID NO: 1930321 - RNA, 15 nt, Human
uugauuaaauucuug

SEQ ID NO: 1930322 - RNA, 16 nt, Human
uugcaacuuuguauaa

SEQ ID NO: 1930323 - RNA, 17 nt, Human
uugcaacuuuguauaaa

SEQ ID NO: 1930324 - RNA, 18 nt, Human
uugcaacuuuguauaaaa

SEQ ID NO: 1930325 - RNA, 23 nt, Human
uugauguucuuucacccuuuucu

SEQ ID NO: 1930326 - RNA, 20 nt, Human
aucugacccagugcccccac

SEQ ID NO: 1930327 - RNA, 21 nt, Human
aucugacccagugcccccacu

SEQ ID NO: 1930328 - RNA, 21 nt, Human
aucugagaaacaaugacuaau

SEQ ID NO: 1930329 - RNA, 23 nt, Human
uugcccaggcuggcgugcagugg

SEQ ID NO: 1930330 - RNA, 14 nt, Human
uugcccaggcuggc

SEQ ID NO: 1930331 - RNA, 12 nt, Human
uugcccaggcug

SEQ ID NO: 1930332 - RNA, 11 nt, Human
uugcccaggcu

SEQ ID NO: 1930333 - RNA, 18 nt, Human
uugcccaggcaggucuug

SEQ ID NO: 1930334 - RNA, 16 nt, Human
uugcccaggcaggucu

SEQ ID NO: 1930335 - RNA, 14 nt, Human
uugcccaggcaggu

SEQ ID NO: 1930336 - RNA, 13 nt, Human
uugcccaggcagg

SEQ ID NO: 1930337 - RNA, 18 nt, Human
uugccacaggacacaguc

SEQ ID NO: 1930338 - RNA, 14 nt, Human
uugcaauggcagcc

SEQ ID NO: 1930339 - RNA, 22 nt, Human
uugcaauagaaauccaauugga

SEQ ID NO: 1930340 - RNA, 15 nt, Human
uugcaauagaaaucc

SEQ ID NO: 1930341 - RNA, 21 nt, Human
uugcaccacugcacuccagcc

SEQ ID NO: 1930342 - RNA, 14 nt, Human
uugcaugaggcuag

SEQ ID NO: 1930343 - RNA, 12 nt, Human
uugcaugaggcu

SEQ ID NO: 1930344 - RNA, 17 nt, Human
uugccaagaccuuucaa

SEQ ID NO: 1930345 - RNA, 14 nt, Human
uugccaagaccuuu

SEQ ID NO: 1930346 - RNA, 15 nt, Human
uugccaagaccuuuc

SEQ ID NO: 1930347 - RNA, 16 nt, Human
uugacaucaacugcau

SEQ ID NO: 1930348 - RNA, 19 nt, Human
uugacagcuuugcugcuga

SEQ ID NO: 1930349 - RNA, 12 nt, Human
uugacagggcac

SEQ ID NO: 1930350 - RNA, 10 nt, Human
uugacagggc

SEQ ID NO: 1930351 - RNA, 19 nt, Human
uugacaggauuauuggaaa

SEQ ID NO: 1930352 - RNA, 22 nt, Human
aucccuuuauuacccccuccuu

SEQ ID NO: 1930353 - RNA, 13 nt, Human
uugacacaggucu

SEQ ID NO: 1930354 - RNA, 19 nt, Human
uugacacaggucuuuccua

SEQ ID NO: 1930355 - RNA, 22 nt, Human
uugacacaggucuuuccuaagg

SEQ ID NO: 1930356 - RNA, 14 nt, Human
uugacacaagugga

SEQ ID NO: 1930357 - RNA, 17 nt, Human
uugacacaaguggaccu

SEQ ID NO: 1930358 - RNA, 16 nt, Human
uugacacagaaaaugu

SEQ ID NO: 1930359 - RNA, 18 nt, Human
uugacacaaguggaccuu

SEQ ID NO: 1930360 - RNA, 13 nt, Human
aucccuuuauuac

SEQ ID NO: 1930361 - RNA, 14 nt, Human
aucccuuuauuacc

SEQ ID NO: 1930362 - RNA, 11 nt, Human
uugagacagag

SEQ ID NO: 1930363 - RNA, 22 nt, Human
uugagacacggagcccagcccu

SEQ ID NO: 1930364 - RNA, 23 nt, Human
uugagaaucccaaauuugauuga

SEQ ID NO: 1930365 - RNA, 23 nt, Human
uugagaaaccuuauuguaccucu

SEQ ID NO: 1930366 - RNA, 12 nt, Human
uugagcagggcu

SEQ ID NO: 1930367 - RNA, 16 nt, Human
uugagcagggcucagc

SEQ ID NO: 1930368 - RNA, 17 nt, Human
uugaccauucuccaccu

SEQ ID NO: 1930369 - RNA, 21 nt, Human
uugagaaaaaaagaauaguug

SEQ ID NO: 1930370 - RNA, 10 nt, Human
uugagaaacc

SEQ ID NO: 1930371 - RNA, 22 nt, Human
uugagaaaccuuauuguaccuc

SEQ ID NO: 1930372 - RNA, 14 nt, Human
uugacauugcguuu

SEQ ID NO: 1930373 - RNA, 18 nt, Human
uugacauugcguuugacc

SEQ ID NO: 1930374 - RNA, 11 nt, Human
uugagugccuu

SEQ ID NO: 1930375 - RNA, 21 nt, Human
uugagugcugucuccauguuu

SEQ ID NO: 1930376 - RNA, 17 nt, Human
uugaguguuuuaagaua

SEQ ID NO: 1930377 - RNA, 18 nt, Human
uugauagcacagacccug

SEQ ID NO: 1930378 - RNA, 17 nt, Human
uugauacuacaguuugu

SEQ ID NO: 1930379 - RNA, 15 nt, Human
uugauacuacaguuu

SEQ ID NO: 1930380 - RNA, 23 nt, Human
aucuaauauguaacaagccaccc

SEQ ID NO: 1930381 - RNA, 20 nt, Human
aucuaauauguaacaagcca

SEQ ID NO: 1930382 - RNA, 23 nt, Human
aucuaauuuauaaaaagguguuu

SEQ ID NO: 1930383 - RNA, 19 nt, Human
aucuaauuuauaaaaaggu

SEQ ID NO: 1930384 - RNA, 15 nt, Human
aucuaauuuauaaaa

SEQ ID NO: 1930385 - RNA, 14 nt, Human
aucuaauuuauaaa

SEQ ID NO: 1930386 - RNA, 13 nt, Human
aucuaauuuauaa

SEQ ID NO: 1930387 - RNA, 18 nt, Human
aucuagauacuguaucau

SEQ ID NO: 1930388 - RNA, 15 nt, Human
aucuacuaauuccac

SEQ ID NO: 1930389 - RNA, 19 nt, Human
aucuacuaauuccacaccu

SEQ ID NO: 1930390 - RNA, 19 nt, Human
aucuagauacuguaucaug

SEQ ID NO: 1930391 - RNA, 19 nt, Human
aucuagauuauggagcuuu

SEQ ID NO: 1930392 - RNA, 16 nt, Human
aucuaggaaaauauuu

SEQ ID NO: 1930393 - RNA, 17 nt, Human
aucuaggaagacuuugg

SEQ ID NO: 1930394 - RNA, 18 nt, Human
aucuaggaagacuuugga

SEQ ID NO: 1930395 - RNA, 19 nt, Human
aucuaggaagacuuuggaa

SEQ ID NO: 1930396 - RNA, 22 nt, Human
aucuauuuuggauuguauauug

SEQ ID NO: 1930397 - RNA, 20 nt, Human
aucuaggaaaauauuuugau

SEQ ID NO: 1930398 - RNA, 17 nt, Human
aucuaggaaaauauuuu

SEQ ID NO: 1930399 - RNA, 19 nt, Human
aucuaggaaaauauuuuga

SEQ ID NO: 1930400 - RNA, 22 nt, Human
aucuaggaaaauauuuugaucu

SEQ ID NO: 1930401 - RNA, 14 nt, Human
aucucaaauuucua

SEQ ID NO: 1930402 - RNA, 23 nt, Human
aucucaaauaacuaaaagguaug

SEQ ID NO: 1930403 - RNA, 14 nt, Human
aucucaaauaacua

SEQ ID NO: 1930404 - RNA, 21 nt, Human
aucucaaauaacuaaaaggua

SEQ ID NO: 1930405 - RNA, 20 nt, Human
augcgacacugggaggccag

SEQ ID NO: 1930406 - RNA, 20 nt, Human
uuuacccuucuuuucugacu

SEQ ID NO: 1930407 - RNA, 22 nt, Human
uuuaccugaagucuuuguacag

SEQ ID NO: 1930408 - RNA, 18 nt, Human
uuuaccugaagucuuugu

SEQ ID NO: 1930409 - RNA, 11 nt, Human
uuuacuuaaac

SEQ ID NO: 1930410 - RNA, 18 nt, Human
uuuacuguuauccuauuu

SEQ ID NO: 1930411 - RNA, 19 nt, Human
uuuacuguuauccuauuua

SEQ ID NO: 1930412 - RNA, 16 nt, Human
uuuacugcagcuuugu

SEQ ID NO: 1930413 - RNA, 14 nt, Human
uuuacugagcuucu

SEQ ID NO: 1930414 - RNA, 17 nt, Human
uuuacugagcuucucug

SEQ ID NO: 1930415 - RNA, 18 nt, Human
uuuacugagcuucucugu

SEQ ID NO: 1930416 - RNA, 21 nt, Human
uuuacugagcuucucugugaa

SEQ ID NO: 1930417 - RNA, 14 nt, Human
uuuacugaagccuu

SEQ ID NO: 1930418 - RNA, 13 nt, Human
uuuacuucuuaua

SEQ ID NO: 1930419 - RNA, 14 nt, Human
uuuacuucuuauac

SEQ ID NO: 1930420 - RNA, 15 nt, Human
uuuacuucuuauaca

SEQ ID NO: 1930421 - RNA, 17 nt, Human
uuuagggguagcauuug

SEQ ID NO: 1930422 - RNA, 20 nt, Human
uuuaggagggaguuaucuaa

SEQ ID NO: 1930423 - RNA, 18 nt, Human
uuuaggcugguggcccag

SEQ ID NO: 1930424 - RNA, 13 nt, Human
uuuauauguacau

SEQ ID NO: 1930425 - RNA, 14 nt, Human
uuuauauguacaug

SEQ ID NO: 1930426 - RNA, 17 nt, Human
uuuauauguacaugaga

SEQ ID NO: 1930427 - RNA, 20 nt, Human
uuuagggcuguaaaaugcau

SEQ ID NO: 1930428 - RNA, 18 nt, Human
augcuacaggauuugaaa

SEQ ID NO: 1930429 - RNA, 20 nt, Human
augcgugcauaccacuuuug

SEQ ID NO: 1930430 - RNA, 22 nt, Human
augcgugcauaccacuuuuguu

SEQ ID NO: 1930431 - RNA, 13 nt, Human
augccucucucag

SEQ ID NO: 1930432 - RNA, 14 nt, Human
augccucucucagg

SEQ ID NO: 1930433 - RNA, 17 nt, Human
augcccggcuaauuuuu

SEQ ID NO: 1930434 - RNA, 16 nt, Human
augccccuggcuggga

SEQ ID NO: 1930435 - RNA, 20 nt, Human
augccccuguacuccagccu

SEQ ID NO: 1930436 - RNA, 13 nt, Human
augcccuccucuc

SEQ ID NO: 1930437 - RNA, 15 nt, Human
augccucucucaggc

SEQ ID NO: 1930438 - RNA, 21 nt, Human
augccaugaggaacaaggcaa

SEQ ID NO: 1930439 - RNA, 15 nt, Human
augcccagccccuuc

SEQ ID NO: 1930440 - RNA, 16 nt, Human
augcccagccccuucu

SEQ ID NO: 1930441 - RNA, 20 nt, Human
augccccugaauuuaaauag

SEQ ID NO: 1930442 - RNA, 15 nt, Human
augccccugaauuua

SEQ ID NO: 1930443 - RNA, 17 nt, Human
augcccagccccuucug

SEQ ID NO: 1930444 - RNA, 21 nt, Human
uuuaaugaaagacuguacaaa

SEQ ID NO: 1930445 - RNA, 23 nt, Human
uuuaaugaaagacuguacaaagu

SEQ ID NO: 1930446 - RNA, 16 nt, Human
uuucccuauuagagaa

SEQ ID NO: 1930447 - RNA, 12 nt, Human
uuucccaacucu

SEQ ID NO: 1930448 - RNA, 12 nt, Human
uuucauguacaa

SEQ ID NO: 1930449 - RNA, 18 nt, Human
uuucauguacaagaugaa

SEQ ID NO: 1930450 - RNA, 12 nt, Human
uuucagaaaugu

SEQ ID NO: 1930451 - RNA, 11 nt, Human
uuucagaaaug

SEQ ID NO: 1930452 - RNA, 19 nt, Human
uuucaugcuguucaugaaa

SEQ ID NO: 1930453 - RNA, 19 nt, Human
uuucaucugcucuccuucc

SEQ ID NO: 1930454 - RNA, 18 nt, Human
uuucaucugcucuccuuc

SEQ ID NO: 1930455 - RNA, 21 nt, Human
uuucaugcuguucaugaaaga

SEQ ID NO: 1930456 - RNA, 20 nt, Human
uuucaucugcucuccuuccu

SEQ ID NO: 1930457 - RNA, 17 nt, Human
uuucaucugcucuccuu

SEQ ID NO: 1930458 - RNA, 16 nt, Human
uuucaucugcucuccu

SEQ ID NO: 1930459 - RNA, 15 nt, Human
uuucaucugcucucc

SEQ ID NO: 1930460 - RNA, 11 nt, Human
uuucaucugcu

SEQ ID NO: 1930461 - RNA, 15 nt, Human
uuucaaacuuuacua

SEQ ID NO: 1930462 - RNA, 12 nt, Human
uuucaaacuuua

SEQ ID NO: 1930463 - RNA, 13 nt, Human
auggaauugauuu

SEQ ID NO: 1930464 - RNA, 14 nt, Human
auggaauugauuug

SEQ ID NO: 1930465 - RNA, 15 nt, Human
auggaauugauuugc

SEQ ID NO: 1930466 - RNA, 16 nt, Human
auggaauugauuugca

SEQ ID NO: 1930467 - RNA, 17 nt, Human
auggaauugauuugcau

SEQ ID NO: 1930468 - RNA, 23 nt, Human
uuucaccuguuuuuaagcuguuu

SEQ ID NO: 1930469 - RNA, 19 nt, Human
uuucacauuggaaacaagu

SEQ ID NO: 1930470 - RNA, 14 nt, Human
uuucacauuggaaa

SEQ ID NO: 1930471 - RNA, 13 nt, Human
uuucacauuggaa

SEQ ID NO: 1930472 - RNA, 22 nt, Human
uuucaccuguuuuuaagcuguu

SEQ ID NO: 1930473 - RNA, 17 nt, Human
auggaagacagcucuua

SEQ ID NO: 1930474 - RNA, 18 nt, Human
auggaagacagcucuuau

SEQ ID NO: 1930475 - RNA, 16 nt, Human
augcuucucacugcca

SEQ ID NO: 1930476 - RNA, 20 nt, Human
augcuucucacugccaugcc

SEQ ID NO: 1930477 - RNA, 20 nt, Human
augcuggcuguuggcugggg

SEQ ID NO: 1930478 - RNA, 19 nt, Human
augcuggcuguuggcuggg

SEQ ID NO: 1930479 - RNA, 23 nt, Human
augcuguucaugaaagauucaau

SEQ ID NO: 1930480 - RNA, 18 nt, Human
augcuggcuguuggcugg

SEQ ID NO: 1930481 - RNA, 14 nt, Human
augcuccuggccca

SEQ ID NO: 1930482 - RNA, 19 nt, Human
augcuccuggcccacugca

SEQ ID NO: 1930483 - RNA, 14 nt, Human
uuuaucagaauucu

SEQ ID NO: 1930484 - RNA, 12 nt, Human
augcucagacca

SEQ ID NO: 1930485 - RNA, 14 nt, Human
augcucagaccagc

SEQ ID NO: 1930486 - RNA, 17 nt, Human
augcucagaccagcucu

SEQ ID NO: 1930487 - RNA, 15 nt, Human
uugugucuguacacg

SEQ ID NO: 1930488 - RNA, 14 nt, Human
uugugucuguacac

SEQ ID NO: 1930489 - RNA, 13 nt, Human
uugugucuguaca

SEQ ID NO: 1930490 - RNA, 13 nt, Human
uuguucaauuaga

SEQ ID NO: 1930491 - RNA, 15 nt, Human
uuguucaauuagaau

SEQ ID NO: 1930492 - RNA, 20 nt, Human
uuguguauuuacgcuuugau

SEQ ID NO: 1930493 - RNA, 22 nt, Human
uuguguauuuacgcuuugauuc

SEQ ID NO: 1930494 - RNA, 23 nt, Human
uuguguauuuacgcuuugauuca

SEQ ID NO: 1930495 - RNA, 22 nt, Human
uugugucaacaugaacaaauuu

SEQ ID NO: 1930496 - RNA, 19 nt, Human
uuguguauuuacgcuuuga

SEQ ID NO: 1930497 - RNA, 21 nt, Human
uuguguauuuaacagggaggg

SEQ ID NO: 1930498 - RNA, 13 nt, Human
uuguguauuuaac

SEQ ID NO: 1930499 - RNA, 14 nt, Human
uuguguauuuaaca

SEQ ID NO: 1930500 - RNA, 23 nt, Human
uugugaucagaccauaauguuac

SEQ ID NO: 1930501 - RNA, 21 nt, Human
uugugauagcacuuucuacaa

SEQ ID NO: 1930502 - RNA, 16 nt, Human
uugugauagcacuuuc

SEQ ID NO: 1930503 - RNA, 19 nt, Human
uugugauagcacuuucuac

SEQ ID NO: 1930504 - RNA, 12 nt, Human
uugugauguguc

SEQ ID NO: 1930505 - RNA, 18 nt, Human
uuguccccaccgcagaca

SEQ ID NO: 1930506 - RNA, 20 nt, Human
uuguccccaccgcagacagg

SEQ ID NO: 1930507 - RNA, 19 nt, Human
uuguccagcugagcgccag

SEQ ID NO: 1930508 - RNA, 15 nt, Human
uuguccccgacccuu

SEQ ID NO: 1930509 - RNA, 16 nt, Human
uuguccccgacccuug

SEQ ID NO: 1930510 - RNA, 20 nt, Human
uugugauacaaugcugugcc

SEQ ID NO: 1930511 - RNA, 15 nt, Human
uugugauagcacuuu

SEQ ID NO: 1930512 - RNA, 17 nt, Human
uugugaggaagccgcug

SEQ ID NO: 1930513 - RNA, 18 nt, Human
uugugaggaagccgcugg

SEQ ID NO: 1930514 - RNA, 13 nt, Human
uugugaggaagcc

SEQ ID NO: 1930515 - RNA, 13 nt, Human
augaguccccugu

SEQ ID NO: 1930516 - RNA, 23 nt, Human
augaguccccuguuuguuucuga

SEQ ID NO: 1930517 - RNA, 18 nt, Human
augaguuggcugggaaua

SEQ ID NO: 1930518 - RNA, 19 nt, Human
augaguuagaauaauaaau

SEQ ID NO: 1930519 - RNA, 23 nt, Human
augaguuagaauaauaaauauuu

SEQ ID NO: 1930520 - RNA, 21 nt, Human
uugucauauaagauucauauu

SEQ ID NO: 1930521 - RNA, 17 nt, Human
uugucacacacuuuggc

SEQ ID NO: 1930522 - RNA, 18 nt, Human
augaggucagagccugca

SEQ ID NO: 1930523 - RNA, 16 nt, Human
augaggucagagccug

SEQ ID NO: 1930524 - RNA, 15 nt, Human
augaggucagagccu

SEQ ID NO: 1930525 - RNA, 20 nt, Human
augaggucagagccugcagu

SEQ ID NO: 1930526 - RNA, 19 nt, Human
augaggucagagccugcag

SEQ ID NO: 1930527 - RNA, 22 nt, Human
augaggucagagccugcaguua

SEQ ID NO: 1930528 - RNA, 15 nt, Human
augagguacugagag

SEQ ID NO: 1930529 - RNA, 18 nt, Human
augagguacugagaguga

SEQ ID NO: 1930530 - RNA, 17 nt, Human
augagguacugagagug

SEQ ID NO: 1930531 - RNA, 18 nt, Human
uuguagcauccuggaaua

SEQ ID NO: 1930532 - RNA, 16 nt, Human
uuguagcauccuggaa

SEQ ID NO: 1930533 - RNA, 15 nt, Human
uuguagccuuuugac

SEQ ID NO: 1930534 - RNA, 16 nt, Human
uuguagccuuuugacu

SEQ ID NO: 1930535 - RNA, 19 nt, Human
uuguagccuuuugacuuuc

SEQ ID NO: 1930536 - RNA, 21 nt, Human
uuuaaauauaugcuaagucuu

SEQ ID NO: 1930537 - RNA, 21 nt, Human
uuuaaaugaaagugagacuuu

SEQ ID NO: 1930538 - RNA, 13 nt, Human
uuuaaaugaaagu

SEQ ID NO: 1930539 - RNA, 14 nt, Human
uuuaaaugcugcuu

SEQ ID NO: 1930540 - RNA, 11 nt, Human
uuuaaaugcac

SEQ ID NO: 1930541 - RNA, 23 nt, Human
uuuaaaaauacagauagauauau

SEQ ID NO: 1930542 - RNA, 14 nt, Human
uuuaagaggcaggg

SEQ ID NO: 1930543 - RNA, 11 nt, Human
uuuaagcuguu

SEQ ID NO: 1930544 - RNA, 14 nt, Human
uuuaagagacagcc

SEQ ID NO: 1930545 - RNA, 12 nt, Human
uuuaagagaaau

SEQ ID NO: 1930546 - RNA, 17 nt, Human
uuuaagacguguuugug

SEQ ID NO: 1930547 - RNA, 19 nt, Human
uuuaagacguguuuguguu

SEQ ID NO: 1930548 - RNA, 19 nt, Human
uuuaaggaugcuuguacau

SEQ ID NO: 1930549 - RNA, 21 nt, Human
uuuaagcuguuacugucuuca

SEQ ID NO: 1930550 - RNA, 12 nt, Human
uuuaagcuguuu

SEQ ID NO: 1930551 - RNA, 13 nt, Human
uuuaagcuguuuc

SEQ ID NO: 1930552 - RNA, 18 nt, Human
uuuaagcuguuuccauag

SEQ ID NO: 1930553 - RNA, 22 nt, Human
uuuaaggaugcuuguacauaau

SEQ ID NO: 1930554 - RNA, 21 nt, Human
uuuaaggaugcuuguacauaa

SEQ ID NO: 1930555 - RNA, 20 nt, Human
uuuaaggaugcuuguacaua

SEQ ID NO: 1930556 - RNA, 22 nt, Human
uuuaagggaguguacucccagg

SEQ ID NO: 1930557 - RNA, 16 nt, Human
uuuaaugaaagacugu

SEQ ID NO: 1930558 - RNA, 14 nt, Human
augauuucauuuca

SEQ ID NO: 1930559 - RNA, 13 nt, Human
augauuucauuca

SEQ ID NO: 1930560 - RNA, 13 nt, Human
augauuuccuuga

SEQ ID NO: 1930561 - RNA, 15 nt, Human
augauuuccuugaau

SEQ ID NO: 1930562 - RNA, 16 nt, Human
augauuuccuugaaug

SEQ ID NO: 1930563 - RNA, 17 nt, Human
augauuuccuugaaugu

SEQ ID NO: 1930564 - RNA, 18 nt, Human
augauuuccuugaaugug

SEQ ID NO: 1930565 - RNA, 19 nt, Human
augauuuccuugaaugugg

SEQ ID NO: 1930566 - RNA, 20 nt, Human
augauuuccuugaauguggc

SEQ ID NO: 1930567 - RNA, 11 nt, Human
augcaaaaauc

SEQ ID NO: 1930568 - RNA, 20 nt, Human
uuguucuugguuuguaaauu

SEQ ID NO: 1930569 - RNA, 16 nt, Human
augauuuacagagaag

SEQ ID NO: 1930570 - RNA, 19 nt, Human
uuguucuugguuuguaaau

SEQ ID NO: 1930571 - RNA, 17 nt, Human
uuguucuugguuuguaa

SEQ ID NO: 1930572 - RNA, 21 nt, Human
augcaccuugugucuguacac

SEQ ID NO: 1930573 - RNA, 21 nt, Human
augcacuuuguucuggcucuu

SEQ ID NO: 1930574 - RNA, 20 nt, Human
augcacugugaaggacccuu

SEQ ID NO: 1930575 - RNA, 18 nt, Human
augcacugugaaggaccc

SEQ ID NO: 1930576 - RNA, 19 nt, Human
augcacugugaaggacccu

SEQ ID NO: 1930577 - RNA, 12 nt, Human
augcacugugaa

SEQ ID NO: 1930578 - RNA, 13 nt, Human
augcacugugaag

SEQ ID NO: 1930579 - RNA, 14 nt, Human
augcacucagcucu

SEQ ID NO: 1930580 - RNA, 18 nt, Human
uuuaaaaaaauuccaagu

SEQ ID NO: 1930581 - RNA, 23 nt, Human
augcacuuuguucuggcucuucc

SEQ ID NO: 1930582 - RNA, 15 nt, Human
auuucaugauuucau

SEQ ID NO: 1930583 - RNA, 21 nt, Human
auuucaucugcucuccuuccu

SEQ ID NO: 1930584 - RNA, 20 nt, Human
auuucaucugcucuccuucc

SEQ ID NO: 1930585 - RNA, 19 nt, Human
auuucaucugcucuccuuc

SEQ ID NO: 1930586 - RNA, 18 nt, Human
auuucaucugcucuccuu

SEQ ID NO: 1930587 - RNA, 21 nt, Human
auuuccuaaauauauuuuaag

SEQ ID NO: 1930588 - RNA, 18 nt, Human
auuuccuaucaccuauuu

SEQ ID NO: 1930589 - RNA, 14 nt, Human
auuuccuaaauaua

SEQ ID NO: 1930590 - RNA, 17 nt, Human
auuuccguuaaaauacc

SEQ ID NO: 1930591 - RNA, 14 nt, Human
auuucccaaagcag

SEQ ID NO: 1930592 - RNA, 16 nt, Human
auuucccaaagcagug

SEQ ID NO: 1930593 - RNA, 17 nt, Human
auuucuaaaauauaaga

SEQ ID NO: 1930594 - RNA, 23 nt, Human
auuuccuugaauguggcuugaga

SEQ ID NO: 1930595 - RNA, 23 nt, Human
auuuauuggccccccgaccuugu

SEQ ID NO: 1930596 - RNA, 14 nt, Human
auuuauuaccucug

SEQ ID NO: 1930597 - RNA, 15 nt, Human
auuuauuaccucuga

SEQ ID NO: 1930598 - RNA, 16 nt, Human
auuguaguccuguaau

SEQ ID NO: 1930599 - RNA, 17 nt, Human
auuguagagccagaggu

SEQ ID NO: 1930600 - RNA, 17 nt, Human
auuguagcauccuggaa

SEQ ID NO: 1930601 - RNA, 18 nt, Human
auuguagagccagagguc

SEQ ID NO: 1930602 - RNA, 17 nt, Human
auuguuuucaguguaca

SEQ ID NO: 1930603 - RNA, 20 nt, Human
auuguagcauccuggaauau

SEQ ID NO: 1930604 - RNA, 17 nt, Human
auuuaaaaaaaaaccug

SEQ ID NO: 1930605 - RNA, 18 nt, Human
auuguuuucaguguacau

SEQ ID NO: 1930606 - RNA, 19 nt, Human
auuguuuucaguguacaug

SEQ ID NO: 1930607 - RNA, 14 nt, Human
auuuaaaaaaaauc

SEQ ID NO: 1930608 - RNA, 15 nt, Human
auuuaaaauugugau

SEQ ID NO: 1930609 - RNA, 16 nt, Human
auuuaaauagcuuuuu

SEQ ID NO: 1930610 - RNA, 16 nt, Human
auuuacagagaaguga

SEQ ID NO: 1930611 - RNA, 19 nt, Human
auuuacagaugaauguauu

SEQ ID NO: 1930612 - RNA, 13 nt, Human
auuuacugagcuu

SEQ ID NO: 1930613 - RNA, 20 nt, Human
auuuacugagcuucucugug

SEQ ID NO: 1930614 - RNA, 21 nt, Human
auuuacugagcuucucuguga

SEQ ID NO: 1930615 - RNA, 22 nt, Human
auuuauaaauauauuuaagaua

SEQ ID NO: 1930616 - RNA, 15 nt, Human
auuuauaaacuuuuu

SEQ ID NO: 1930617 - RNA, 21 nt, Human
auuuauaaaacuucucaagau

SEQ ID NO: 1930618 - RNA, 14 nt, Human
auuuauaaaacuuc

SEQ ID NO: 1930619 - RNA, 15 nt, Human
auuuauaaaacuucu

SEQ ID NO: 1930620 - RNA, 17 nt, Human
auuuauaaagcuaaaau

SEQ ID NO: 1930621 - RNA, 21 nt, Human
auuuauaaagcuaaaauaacc

SEQ ID NO: 1930622 - RNA, 13 nt, Human
auuuauguuugca

SEQ ID NO: 1930623 - RNA, 16 nt, Human
auuuauuaauugcuuu

SEQ ID NO: 1930624 - RNA, 17 nt, Human
auuuauuaauugcuuug

SEQ ID NO: 1930625 - RNA, 18 nt, Human
auuuauuaauugcuuuga

SEQ ID NO: 1930626 - RNA, 16 nt, Human
auuuaguguucauaaa

SEQ ID NO: 1930627 - RNA, 19 nt, Human
auuuacuucuuauacauuu

SEQ ID NO: 1930628 - RNA, 20 nt, Human
auuuacuucuuauacauuug

SEQ ID NO: 1930629 - RNA, 17 nt, Human
auuuaguguucauaaau

SEQ ID NO: 1930630 - RNA, 23 nt, Human
auuuauaaaaauaaaaaacacug

SEQ ID NO: 1930631 - RNA, 21 nt, Human
auuuggugguuucagaaaugu

SEQ ID NO: 1930632 - RNA, 16 nt, Human
auuugguucauuaauu

SEQ ID NO: 1930633 - RNA, 21 nt, Human
auuugguucauuaauucuaua

SEQ ID NO: 1930634 - RNA, 18 nt, Human
auuugguuuagaacauaa

SEQ ID NO: 1930635 - RNA, 15 nt, Human
auuugguucuaauag

SEQ ID NO: 1930636 - RNA, 18 nt, Human
auuugguucuaggccggg

SEQ ID NO: 1930637 - RNA, 14 nt, Human
auuugguuuucaca

SEQ ID NO: 1930638 - RNA, 12 nt, Human
auuugguuuuca

SEQ ID NO: 1930639 - RNA, 21 nt, Human
auuugaggucuguucuuucca

SEQ ID NO: 1930640 - RNA, 19 nt, Human
auuugauaugugaacaguu

SEQ ID NO: 1930641 - RNA, 18 nt, Human
auuugauaugugaacagu

SEQ ID NO: 1930642 - RNA, 20 nt, Human
auuugauaguauugugcaua

SEQ ID NO: 1930643 - RNA, 16 nt, Human
auuugagcagggcuca

SEQ ID NO: 1930644 - RNA, 15 nt, Human
auuugagcagggcuc

SEQ ID NO: 1930645 - RNA, 18 nt, Human
auuugaggucuguucuuu

SEQ ID NO: 1930646 - RNA, 17 nt, Human
auuugaggucuguucuu

SEQ ID NO: 1930647 - RNA, 14 nt, Human
auuugagaauauaa

SEQ ID NO: 1930648 - RNA, 21 nt, Human
auuugagaauauaaaaaacuu

SEQ ID NO: 1930649 - RNA, 16 nt, Human
auuucuuccacaagag

SEQ ID NO: 1930650 - RNA, 20 nt, Human
auuucuugagguaaaagcau

SEQ ID NO: 1930651 - RNA, 16 nt, Human
auuucuucaccagauu

SEQ ID NO: 1930652 - RNA, 23 nt, Human
auuugaauguaugcuucauacag

SEQ ID NO: 1930653 - RNA, 13 nt, Human
auuucuucaccag

SEQ ID NO: 1930654 - RNA, 13 nt, Human
auuucuugugccu

SEQ ID NO: 1930655 - RNA, 20 nt, Human
auugccuucauuuuaugaua

SEQ ID NO: 1930656 - RNA, 13 nt, Human
auugccuucauuu

SEQ ID NO: 1930657 - RNA, 13 nt, Human
auuggaaacaagu

SEQ ID NO: 1930658 - RNA, 14 nt, Human
auuggaaacaaguc

SEQ ID NO: 1930659 - RNA, 15 nt, Human
auuggaacagugaau

SEQ ID NO: 1930660 - RNA, 11 nt, Human
auugcauugac

SEQ ID NO: 1930661 - RNA, 16 nt, Human
auugcauauauacaua

SEQ ID NO: 1930662 - RNA, 22 nt, Human
auuggcuagagguucaaagaua

SEQ ID NO: 1930663 - RNA, 20 nt, Human
auuggcuagagguucaaaga

SEQ ID NO: 1930664 - RNA, 19 nt, Human
auuggcuagagguucaaag

SEQ ID NO: 1930665 - RNA, 23 nt, Human
auuggcuagagguucaaagauau

SEQ ID NO: 1930666 - RNA, 16 nt, Human
auuggcucacacugag

SEQ ID NO: 1930667 - RNA, 15 nt, Human
auuggcucacacuga

SEQ ID NO: 1930668 - RNA, 13 nt, Human
auuggcucacacu

SEQ ID NO: 1930669 - RNA, 14 nt, Human
auugauuugaagaa

SEQ ID NO: 1930670 - RNA, 16 nt, Human
auugauuugaagaaca

SEQ ID NO: 1930671 - RNA, 12 nt, Human
auugauuugcau

SEQ ID NO: 1930672 - RNA, 13 nt, Human
auugauuugcauu

SEQ ID NO: 1930673 - RNA, 15 nt, Human
auugauuugcauuga

SEQ ID NO: 1930674 - RNA, 16 nt, Human
auugauuugcauugaa

SEQ ID NO: 1930675 - RNA, 20 nt, Human
auugauuugcauugaacaca

SEQ ID NO: 1930676 - RNA, 19 nt, Human
auugcaacaggcugggcuu

SEQ ID NO: 1930677 - RNA, 12 nt, Human
auugcaccacug

SEQ ID NO: 1930678 - RNA, 18 nt, Human
auugcaacaggcugggcu

SEQ ID NO: 1930679 - RNA, 17 nt, Human
auugcaacaggcugggc

SEQ ID NO: 1930680 - RNA, 14 nt, Human
auugaacacaaacu

SEQ ID NO: 1930681 - RNA, 19 nt, Human
auugaaggcuuaaacccau

SEQ ID NO: 1930682 - RNA, 15 nt, Human
auugaaggcuuaaac

SEQ ID NO: 1930683 - RNA, 15 nt, Human
auugaacacaaacug

SEQ ID NO: 1930684 - RNA, 16 nt, Human
auugaacacaaacugu

SEQ ID NO: 1930685 - RNA, 17 nt, Human
auugaacacaaacugua

SEQ ID NO: 1930686 - RNA, 18 nt, Human
auugaacacaaacuguaa

SEQ ID NO: 1930687 - RNA, 19 nt, Human
auugaacacaaacuguaaa

SEQ ID NO: 1930688 - RNA, 20 nt, Human
auugaacacaaacuguaaau

SEQ ID NO: 1930689 - RNA, 14 nt, Human
auugaacagcaaag

SEQ ID NO: 1930690 - RNA, 10 nt, Human
auugaaucua

SEQ ID NO: 1930691 - RNA, 14 nt, Human
auugaaucuauuua

SEQ ID NO: 1930692 - RNA, 16 nt, Human
auugaaucuauuuaag

SEQ ID NO: 1930693 - RNA, 23 nt, Human
auugaauauaauauauuugugua

SEQ ID NO: 1930694 - RNA, 13 nt, Human
auugaaucaguau

SEQ ID NO: 1930695 - RNA, 20 nt, Human
auugaaucaguauaaacaaa

SEQ ID NO: 1930696 - RNA, 17 nt, Human
auuggcucacacugaga

SEQ ID NO: 1930697 - RNA, 18 nt, Human
auugaaucuauuuaagua

SEQ ID NO: 1930698 - RNA, 13 nt, Human
auuacuguuugga

SEQ ID NO: 1930699 - RNA, 13 nt, Human
auuaaguuguuaa

SEQ ID NO: 1930700 - RNA, 13 nt, Human
auuaaucacuauu

SEQ ID NO: 1930701 - RNA, 16 nt, Human
auuaaucacuauuguu

SEQ ID NO: 1930702 - RNA, 13 nt, Human
auuacuucugcua

SEQ ID NO: 1930703 - RNA, 12 nt, Human
auuacuucugcu

SEQ ID NO: 1930704 - RNA, 14 nt, Human
auuacuucugcuac

SEQ ID NO: 1930705 - RNA, 13 nt, Human
auuagagaagaga

SEQ ID NO: 1930706 - RNA, 15 nt, Human
uuuuugaagcuguau

SEQ ID NO: 1930707 - RNA, 16 nt, Human
uuuuucaauauuuauu

SEQ ID NO: 1930708 - RNA, 12 nt, Human
uuuuuauuucug

SEQ ID NO: 1930709 - RNA, 19 nt, Human
uuuuuauuuguuugugcau

SEQ ID NO: 1930710 - RNA, 13 nt, Human
uuuuuggacauuu

SEQ ID NO: 1930711 - RNA, 12 nt, Human
uuuuuguauguu

SEQ ID NO: 1930712 - RNA, 15 nt, Human
auuaagccuuccaca

SEQ ID NO: 1930713 - RNA, 13 nt, Human
auuaaggaagaca

SEQ ID NO: 1930714 - RNA, 18 nt, Human
auuaaguacuauguauca

SEQ ID NO: 1930715 - RNA, 19 nt, Human
auuaaguacuauguaucaa

SEQ ID NO: 1930716 - RNA, 12 nt, Human
uuuuuaauuauu

SEQ ID NO: 1930717 - RNA, 16 nt, Human
uuuuguuuuugucuua

SEQ ID NO: 1930718 - RNA, 23 nt, Human
uuuuguucgcauggucacacacu

SEQ ID NO: 1930719 - RNA, 19 nt, Human
uuuuguuccccuccuccac

SEQ ID NO: 1930720 - RNA, 15 nt, Human
uuuuguuccccuccu

SEQ ID NO: 1930721 - RNA, 14 nt, Human
uuuuguuccccucc

SEQ ID NO: 1930722 - RNA, 22 nt, Human
uuuuguucccauccucuucuuu

SEQ ID NO: 1930723 - RNA, 21 nt, Human
uuuugugaaguuuaauugacu

SEQ ID NO: 1930724 - RNA, 17 nt, Human
auuccaagugauugaaa

SEQ ID NO: 1930725 - RNA, 17 nt, Human
auucccaagcucugcuc

SEQ ID NO: 1930726 - RNA, 20 nt, Human
auuccagaaugcuguacauc

SEQ ID NO: 1930727 - RNA, 23 nt, Human
auuccagaaugcuguacaucuau

SEQ ID NO: 1930728 - RNA, 14 nt, Human
auuccagaaugcug

SEQ ID NO: 1930729 - RNA, 15 nt, Human
auuccagaaugcugu

SEQ ID NO: 1930730 - RNA, 19 nt, Human
auuccagaaugcuguacau

SEQ ID NO: 1930731 - RNA, 19 nt, Human
auucccaagcucugcuccu

SEQ ID NO: 1930732 - RNA, 18 nt, Human
auucccaagcucugcucc

SEQ ID NO: 1930733 - RNA, 20 nt, Human
auuccccaggaggccagccu

SEQ ID NO: 1930734 - RNA, 22 nt, Human
auuccccaggaggccagccuug

SEQ ID NO: 1930735 - RNA, 14 nt, Human
auucagccuggcuu

SEQ ID NO: 1930736 - RNA, 13 nt, Human
auucacuucacgc

SEQ ID NO: 1930737 - RNA, 12 nt, Human
auucacuucacg

SEQ ID NO: 1930738 - RNA, 15 nt, Human
auucagugauuacug

SEQ ID NO: 1930739 - RNA, 17 nt, Human
auucagugauuacuguc

SEQ ID NO: 1930740 - RNA, 19 nt, Human
auucagugauuacugucaa

SEQ ID NO: 1930741 - RNA, 19 nt, Human
auucaguggcgagaaauaa

SEQ ID NO: 1930742 - RNA, 20 nt, Human
auuauauggcuugaguuuaa

SEQ ID NO: 1930743 - RNA, 18 nt, Human
auuaguuuugcauaauuu

SEQ ID NO: 1930744 - RNA, 19 nt, Human
auucaccugccccaacucu

SEQ ID NO: 1930745 - RNA, 23 nt, Human
auucaccuuccagugucucggag

SEQ ID NO: 1930746 - RNA, 17 nt, Human
auucaaacuggggccuc

SEQ ID NO: 1930747 - RNA, 19 nt, Human
auucaaacuggggccucca

SEQ ID NO: 1930748 - RNA, 22 nt, Human
auucaaacuggggccuccagaa

SEQ ID NO: 1930749 - RNA, 14 nt, Human
auucaaagaaauau

SEQ ID NO: 1930750 - RNA, 16 nt, Human
auucaaagaaauaucu

SEQ ID NO: 1930751 - RNA, 15 nt, Human
auucagccuggcuuc

SEQ ID NO: 1930752 - RNA, 13 nt, Human
uuugagacaggag

SEQ ID NO: 1930753 - RNA, 13 nt, Human
uuugagacagagu

SEQ ID NO: 1930754 - RNA, 14 nt, Human
uuugagaagaaaac

SEQ ID NO: 1930755 - RNA, 18 nt, Human
uuugagaagaaaacaucu

SEQ ID NO: 1930756 - RNA, 18 nt, Human
uuugaccucugcagcaau

SEQ ID NO: 1930757 - RNA, 23 nt, Human
uuugaccuguugggagugaggau

SEQ ID NO: 1930758 - RNA, 13 nt, Human
uuugaccuuuuau

SEQ ID NO: 1930759 - RNA, 14 nt, Human
uuugacuuucauug

SEQ ID NO: 1930760 - RNA, 15 nt, Human
uuugauccaagcugg

SEQ ID NO: 1930761 - RNA, 12 nt, Human
uuugaucuucaa

SEQ ID NO: 1930762 - RNA, 15 nt, Human
uuugaucuucaacaa

SEQ ID NO: 1930763 - RNA, 18 nt, Human
uuugaucuucaacaaauu

SEQ ID NO: 1930764 - RNA, 15 nt, Human
uuugauucagacagc

SEQ ID NO: 1930765 - RNA, 18 nt, Human
uuugacaaagguaaauca

SEQ ID NO: 1930766 - RNA, 14 nt, Human
uuugacaaggggca

SEQ ID NO: 1930767 - RNA, 21 nt, Human
uuugaccucugcagcaauaaa

SEQ ID NO: 1930768 - RNA, 19 nt, Human
uuugaccucugcagcaaua

SEQ ID NO: 1930769 - RNA, 23 nt, Human
uuucccucccuuccucuuuccau

SEQ ID NO: 1930770 - RNA, 13 nt, Human
uuucccugaccuc

SEQ ID NO: 1930771 - RNA, 22 nt, Human
uuucccugcuuaaugaaaagcu

SEQ ID NO: 1930772 - RNA, 15 nt, Human
uuucccuugaggaaa

SEQ ID NO: 1930773 - RNA, 14 nt, Human
uuucccuucaucug

SEQ ID NO: 1930774 - RNA, 14 nt, Human
uuugauuucauuaa

SEQ ID NO: 1930775 - RNA, 18 nt, Human
uuugauucagacagcugc

SEQ ID NO: 1930776 - RNA, 15 nt, Human
uuugauugauuugaa

SEQ ID NO: 1930777 - RNA, 22 nt, Human
uuugcuggggccgaaagaacag

SEQ ID NO: 1930778 - RNA, 19 nt, Human
uuugcuggggccgaaagaa

SEQ ID NO: 1930779 - RNA, 20 nt, Human
uuugcuggagcucugcccau

SEQ ID NO: 1930780 - RNA, 22 nt, Human
uuugcuaacuagcuuggaaacu

SEQ ID NO: 1930781 - RNA, 22 nt, Human
uuuggauuggaugaauuccaaa

SEQ ID NO: 1930782 - RNA, 20 nt, Human
uuuggauuggggucccucua

SEQ ID NO: 1930783 - RNA, 14 nt, Human
uuuggauuguauau

SEQ ID NO: 1930784 - RNA, 16 nt, Human
uuuggauuugacauug

SEQ ID NO: 1930785 - RNA, 22 nt, Human
uuugggguacccacugcucugg

SEQ ID NO: 1930786 - RNA, 21 nt, Human
uuugggguacccacugcucug

SEQ ID NO: 1930787 - RNA, 13 nt, Human
uuuggggaagaac

SEQ ID NO: 1930788 - RNA, 23 nt, Human
auguauaauauuuuuaauuaaau

SEQ ID NO: 1930789 - RNA, 14 nt, Human
auguauaauauuuu

SEQ ID NO: 1930790 - RNA, 17 nt, Human
auguauauaaacaugcu

SEQ ID NO: 1930791 - RNA, 12 nt, Human
uuuggcugcuga

SEQ ID NO: 1930792 - RNA, 13 nt, Human
uuuggcugcugaa

SEQ ID NO: 1930793 - RNA, 14 nt, Human
uuuggauuugacau

SEQ ID NO: 1930794 - RNA, 18 nt, Human
uuuggcaaacucuccacc

SEQ ID NO: 1930795 - RNA, 11 nt, Human
augugacacau

SEQ ID NO: 1930796 - RNA, 18 nt, Human
augugacauucuuaaaaa

SEQ ID NO: 1930797 - RNA, 23 nt, Human
augugacauucuuaaaaaaagaa

SEQ ID NO: 1930798 - RNA, 23 nt, Human
augucgucaaagcugaaauggac

SEQ ID NO: 1930799 - RNA, 14 nt, Human
augugagacugguu

SEQ ID NO: 1930800 - RNA, 16 nt, Human
augugagagguuugac

SEQ ID NO: 1930801 - RNA, 13 nt, Human
augugagaccauu

SEQ ID NO: 1930802 - RNA, 17 nt, Human
augugagagguuugacu

SEQ ID NO: 1930803 - RNA, 16 nt, Human
auguccaagaagccca

SEQ ID NO: 1930804 - RNA, 17 nt, Human
auguccaagaagcccag

SEQ ID NO: 1930805 - RNA, 12 nt, Human
auguaucaauga

SEQ ID NO: 1930806 - RNA, 19 nt, Human
auguauauuuuauaucaau

SEQ ID NO: 1930807 - RNA, 22 nt, Human
auguauauauuuuuuaaaaauc

SEQ ID NO: 1930808 - RNA, 15 nt, Human
augugaugagaggaa

SEQ ID NO: 1930809 - RNA, 16 nt, Human
uuuguaauuuuuuuau

SEQ ID NO: 1930810 - RNA, 14 nt, Human
uuuguacagacaac

SEQ ID NO: 1930811 - RNA, 14 nt, Human
uuuguuucugaaag

SEQ ID NO: 1930812 - RNA, 16 nt, Human
uuuguuucugaaaggg

SEQ ID NO: 1930813 - RNA, 15 nt, Human
uuuguuuguuuuccu

SEQ ID NO: 1930814 - RNA, 13 nt, Human
uuuguuucauauu

SEQ ID NO: 1930815 - RNA, 22 nt, Human
uuugugcauuaucuagauacug

SEQ ID NO: 1930816 - RNA, 13 nt, Human
uuugugcauuuuc

SEQ ID NO: 1930817 - RNA, 15 nt, Human
uuugugcauuuucua

SEQ ID NO: 1930818 - RNA, 19 nt, Human
uuugugcauuaucuagaua

SEQ ID NO: 1930819 - RNA, 15 nt, Human
uuugugauacaaugc

SEQ ID NO: 1930820 - RNA, 22 nt, Human
uuugugauacaaugcugugccc

SEQ ID NO: 1930821 - RNA, 16 nt, Human
uuugugauacaaugcu

SEQ ID NO: 1930822 - RNA, 23 nt, Human
uuugucuuaaaaaguggaaaaau

SEQ ID NO: 1930823 - RNA, 13 nt, Human
uuugucuuaaaaa

SEQ ID NO: 1930824 - RNA, 14 nt, Human
uuugucuuaaaaag

SEQ ID NO: 1930825 - RNA, 18 nt, Human
uuuucuggaauguaauca

SEQ ID NO: 1930826 - RNA, 21 nt, Human
uuuucuuaaccagaucauugu

SEQ ID NO: 1930827 - RNA, 13 nt, Human
uuuucuguucuuu

SEQ ID NO: 1930828 - RNA, 23 nt, Human
uuuucuguuacuuuguuuuuuaa

SEQ ID NO: 1930829 - RNA, 21 nt, Human
auguuuacacucuuuguaaga

SEQ ID NO: 1930830 - RNA, 19 nt, Human
auguuuacacucuuuguaa

SEQ ID NO: 1930831 - RNA, 18 nt, Human
auguuuacacucuuugua

SEQ ID NO: 1930832 - RNA, 16 nt, Human
auguuuacacucuuug

SEQ ID NO: 1930833 - RNA, 16 nt, Human
auguuuacaaauggac

SEQ ID NO: 1930834 - RNA, 17 nt, Human
auguuggccaggcuggu

SEQ ID NO: 1930835 - RNA, 19 nt, Human
auuaaaacacaacaucuuu

SEQ ID NO: 1930836 - RNA, 23 nt, Human
auuaaaaaucucaaauuucuaaa

SEQ ID NO: 1930837 - RNA, 15 nt, Human
auguuuuuuuuuaaa

SEQ ID NO: 1930838 - RNA, 22 nt, Human
auguuuuuuaaaauauuuaucu

SEQ ID NO: 1930839 - RNA, 14 nt, Human
auuaaaaaaaaaga

SEQ ID NO: 1930840 - RNA, 20 nt, Human
auuaaaaaaaaagaucuguu

SEQ ID NO: 1930841 - RNA, 16 nt, Human
uuuucuauaauuuaaa

SEQ ID NO: 1930842 - RNA, 15 nt, Human
uuuucuacuguuuua

SEQ ID NO: 1930843 - RNA, 12 nt, Human
uuuuccaggcug

SEQ ID NO: 1930844 - RNA, 17 nt, Human
uuuucucugauacagaa

SEQ ID NO: 1930845 - RNA, 14 nt, Human
uuuucaguguacau

SEQ ID NO: 1930846 - RNA, 15 nt, Human
uuuuaguagagacag

SEQ ID NO: 1930847 - RNA, 21 nt, Human
uuuuagacagucucacuuugu

SEQ ID NO: 1930848 - RNA, 19 nt, Human
uuuuauggcuuuugugcau

SEQ ID NO: 1930849 - RNA, 18 nt, Human
uuuuauggcuuuugugca

SEQ ID NO: 1930850 - RNA, 21 nt, Human
uuuuauggcuuuugugcauua

SEQ ID NO: 1930851 - RNA, 12 nt, Human
uuuuauuaaauu

SEQ ID NO: 1930852 - RNA, 16 nt, Human
uuuuauugacacagaa

SEQ ID NO: 1930853 - RNA, 19 nt, Human
uuuuauugaaucuauuuaa

SEQ ID NO: 1930854 - RNA, 18 nt, Human
uuuuauugacacagaaaa

SEQ ID NO: 1930855 - RNA, 20 nt, Human
auguuauuuuuuaauuauua

SEQ ID NO: 1930856 - RNA, 12 nt, Human
auguugaaagau

SEQ ID NO: 1930857 - RNA, 15 nt, Human
auguugcccaggcag

SEQ ID NO: 1930858 - RNA, 14 nt, Human
auguugcccaggca

SEQ ID NO: 1930859 - RNA, 13 nt, Human
auguugcccaggc

SEQ ID NO: 1930860 - RNA, 18 nt, Human
auguugaaagaucaaaag

SEQ ID NO: 1930861 - RNA, 17 nt, Human
uuuuagaguugauacua

SEQ ID NO: 1930862 - RNA, 21 nt, Human
uuuuagacccuauugcugcuu

SEQ ID NO: 1930863 - RNA, 16 nt, Human
auguugcccaggcagg

SEQ ID NO: 1930864 - RNA, 20 nt, Human
auguugcugugcacggugga

SEQ ID NO: 1930865 - RNA, 19 nt, Human
auguuauuuuuuaauuauu

SEQ ID NO: 1930866 - RNA, 17 nt, Human
auguuauuuuuuaauua

SEQ ID NO: 1930867 - RNA, 13 nt, Human
auguuauuuaaca

SEQ ID NO: 1930868 - RNA, 23 nt, Human
auguuauuuaacagcugaauuau

SEQ ID NO: 1930869 - RNA, 14 nt, Human
auguuacauuauua

SEQ ID NO: 1930870 - RNA, 20 nt, Human
auguuacauaagauaaaugu

SEQ ID NO: 1930871 - RNA, 14 nt, Human
auguuacauuguuu

SEQ ID NO: 1930872 - RNA, 19 nt, Human
auguuacauaagauaaaug

SEQ ID NO: 1930873 - RNA, 15 nt, Human
auguguguuuuaaaa

SEQ ID NO: 1930874 - RNA, 18 nt, Human
auguguuuaugugagcug

SEQ ID NO: 1930875 - RNA, 23 nt, Human
auguguguguguuguguguggga

SEQ ID NO: 1930876 - RNA, 22 nt, Human
auguguguguguuguguguggg

SEQ ID NO: 1930877 - RNA, 23 nt, Human
auguggaaaagccaagaggcugc

SEQ ID NO: 1930878 - RNA, 14 nt, Human
auguguggccugca

SEQ ID NO: 1930879 - RNA, 21 nt, Human
augugccagguuuuuggucug

SEQ ID NO: 1930880 - RNA, 20 nt, Human
augugccagggcaaugauga

SEQ ID NO: 1930881 - RNA, 21 nt, Human
augugccagggcaaugaugaa

SEQ ID NO: 1930882 - RNA, 21 nt, Human
uuuuaaaaaacugcugacugu

SEQ ID NO: 1930883 - RNA, 18 nt, Human
uuuuaaaaaacugcugac

SEQ ID NO: 1930884 - RNA, 20 nt, Human
cacccaagaccucagggcac

SEQ ID NO: 1930885 - RNA, 13 nt, Human
cacccaagggccu

SEQ ID NO: 1930886 - RNA, 17 nt, Human
caccauuuaaaaacagg

SEQ ID NO: 1930887 - RNA, 16 nt, Human
caccauugaaggcuua

SEQ ID NO: 1930888 - RNA, 15 nt, Human
caccauugaacugua

SEQ ID NO: 1930889 - RNA, 15 nt, Human
caccauugaaggcuu

SEQ ID NO: 1930890 - RNA, 14 nt, Human
caccauugaaggcu

SEQ ID NO: 1930891 - RNA, 13 nt, Human
caccauucagguc

SEQ ID NO: 1930892 - RNA, 13 nt, Human
caccauugaaggc

SEQ ID NO: 1930893 - RNA, 23 nt, Human
cacagcccagccacggacgcugg

SEQ ID NO: 1930894 - RNA, 16 nt, Human
cacagcccagccacgg

SEQ ID NO: 1930895 - RNA, 13 nt, Human
cacagcccagcca

SEQ ID NO: 1930896 - RNA, 12 nt, Human
cacagcccagcc

SEQ ID NO: 1930897 - RNA, 18 nt, Human
cacagcucuucuccaggc

SEQ ID NO: 1930898 - RNA, 19 nt, Human
cacagcccaaagaaggaaa

SEQ ID NO: 1930899 - RNA, 12 nt, Human
cacagcacagcc

SEQ ID NO: 1930900 - RNA, 15 nt, Human
cacagcacagccaac

SEQ ID NO: 1930901 - RNA, 22 nt, Human
cacacggacacucaaaagcugg

SEQ ID NO: 1930902 - RNA, 17 nt, Human
cacacgccucccacugg

SEQ ID NO: 1930903 - RNA, 20 nt, Human
cacacgccucccacuggggu

SEQ ID NO: 1930904 - RNA, 14 nt, Human
cacagcaaccccag

SEQ ID NO: 1930905 - RNA, 17 nt, Human
cacagcaaccccaggcu

SEQ ID NO: 1930906 - RNA, 18 nt, Human
cacagcaaccccaggcug

SEQ ID NO: 1930907 - RNA, 20 nt, Human
cacacguaaugaaacuugga

SEQ ID NO: 1930908 - RNA, 19 nt, Human
cacacguaaugaaacuugg

SEQ ID NO: 1930909 - RNA, 20 nt, Human
cacagcucuucuccaggcug

SEQ ID NO: 1930910 - RNA, 19 nt, Human
cacagcucuucuccaggcu

SEQ ID NO: 1930911 - RNA, 21 nt, Human
cacagcucuucuccaggcugu

SEQ ID NO: 1930912 - RNA, 16 nt, Human
cacaggacacagucag

SEQ ID NO: 1930913 - RNA, 17 nt, Human
cacaggacacagucaga

SEQ ID NO: 1930914 - RNA, 19 nt, Human
cacaggacacagucagauu

SEQ ID NO: 1930915 - RNA, 20 nt, Human
cacaggacaugcgguagcca

SEQ ID NO: 1930916 - RNA, 22 nt, Human
cacaggacaugcgguagccagc

SEQ ID NO: 1930917 - RNA, 23 nt, Human
cacaggacaugcgguagccagca

SEQ ID NO: 1930918 - RNA, 17 nt, Human
cacaggaucagucugau

SEQ ID NO: 1930919 - RNA, 16 nt, Human
cacaggaugaagcauu

SEQ ID NO: 1930920 - RNA, 14 nt, Human
cacaggcccggcuc

SEQ ID NO: 1930921 - RNA, 23 nt, Human
cacaguccuuaccagcagagcac

SEQ ID NO: 1930922 - RNA, 19 nt, Human
cacaggcagguccaggguu

SEQ ID NO: 1930923 - RNA, 24 nt, Human
cacaugaaucccacccacauguga

SEQ ID NO: 1930924 - RNA, 15 nt, Human
cacaugagauaauau

SEQ ID NO: 1930925 - RNA, 13 nt, Human
cacaugagcauca

SEQ ID NO: 1930926 - RNA, 17 nt, Human
cacaugagcaucaggcc

SEQ ID NO: 1930927 - RNA, 18 nt, Human
cacaugagcaucaggcca

SEQ ID NO: 1930928 - RNA, 19 nt, Human
cacaugagcaucaggccag

SEQ ID NO: 1930929 - RNA, 20 nt, Human
cacaugagcaucaggccagg

SEQ ID NO: 1930930 - RNA, 21 nt, Human
cacaugagcaucaggccaggc

SEQ ID NO: 1930931 - RNA, 19 nt, Human
cacagugagggagauccca

SEQ ID NO: 1930932 - RNA, 15 nt, Human
cacagugaagugcug

SEQ ID NO: 1930933 - RNA, 21 nt, Human
cacaugccucucucaggccaa

SEQ ID NO: 1930934 - RNA, 20 nt, Human
cacaugccucucucaggcca

SEQ ID NO: 1930935 - RNA, 18 nt, Human
cacaugcccuaaugucug

SEQ ID NO: 1930936 - RNA, 19 nt, Human
cacaugcccuaaugucugu

SEQ ID NO: 1930937 - RNA, 20 nt, Human
cacaugcccuaaugucugua

SEQ ID NO: 1930938 - RNA, 16 nt, Human
cacauguccaagaagc

SEQ ID NO: 1930939 - RNA, 17 nt, Human
cacauguccaagaagcc

SEQ ID NO: 1930940 - RNA, 18 nt, Human
cacaugcacgugugugca

SEQ ID NO: 1930941 - RNA, 20 nt, Human
cacaugcaaggucauuuuuu

SEQ ID NO: 1930942 - RNA, 19 nt, Human
cacaugcaaggucauuuuu

SEQ ID NO: 1930943 - RNA, 17 nt, Human
cacaugcaaggucauuu

SEQ ID NO: 1930944 - RNA, 16 nt, Human
cacaugagauaauaug

SEQ ID NO: 1930945 - RNA, 22 nt, Human
caccagugaaugaaagucuugu

SEQ ID NO: 1930946 - RNA, 20 nt, Human
caccagugaaugaaagucuu

SEQ ID NO: 1930947 - RNA, 16 nt, Human
caccagguagaacaca

SEQ ID NO: 1930948 - RNA, 16 nt, Human
caccagucauuuuuca

SEQ ID NO: 1930949 - RNA, 13 nt, Human
caccaucaagcca

SEQ ID NO: 1930950 - RNA, 14 nt, Human
caccaucaagccac

SEQ ID NO: 1930951 - RNA, 15 nt, Human
caccaucaagccacc

SEQ ID NO: 1930952 - RNA, 21 nt, Human
caccauauuaccacagacaua

SEQ ID NO: 1930953 - RNA, 18 nt, Human
caccaguuccuuucaaug

SEQ ID NO: 1930954 - RNA, 18 nt, Human
caccaucaugucuggcua

SEQ ID NO: 1930955 - RNA, 17 nt, Human
caccaucaugucuggcu

SEQ ID NO: 1930956 - RNA, 15 nt, Human
caccaucaugucugg

SEQ ID NO: 1930957 - RNA, 16 nt, Human
caccaucaagccacca

SEQ ID NO: 1930958 - RNA, 17 nt, Human
caccaucaagccaccaa

SEQ ID NO: 1930959 - RNA, 19 nt, Human
caccaucaagccaccaaca

SEQ ID NO: 1930960 - RNA, 24 nt, Human
caccaucaagccaccaacauacuc

SEQ ID NO: 1930961 - RNA, 19 nt, Human
caccauguuggccaggcug

SEQ ID NO: 1930962 - RNA, 20 nt, Human
caccauguugcccaggcugg

SEQ ID NO: 1930963 - RNA, 15 nt, Human
caccagagcccaccu

SEQ ID NO: 1930964 - RNA, 19 nt, Human
caccagacacccaggacuu

SEQ ID NO: 1930965 - RNA, 20 nt, Human
caccagacacccaggacuua

SEQ ID NO: 1930966 - RNA, 22 nt, Human
caccagagcccaccuuggcuca

SEQ ID NO: 1930967 - RNA, 20 nt, Human
caccagagcccaccuuggcu

SEQ ID NO: 1930968 - RNA, 18 nt, Human
caccagagcccaccuugg

SEQ ID NO: 1930969 - RNA, 17 nt, Human
caccagagcccaccuug

SEQ ID NO: 1930970 - RNA, 19 nt, Human
caccacacccagcccacuu

SEQ ID NO: 1930971 - RNA, 14 nt, Human
caccacacucagcc

SEQ ID NO: 1930972 - RNA, 19 nt, Human
caccacacugauccagccc

SEQ ID NO: 1930973 - RNA, 15 nt, Human
caccacacucagccc

SEQ ID NO: 1930974 - RNA, 15 nt, Human
caccagacacccagg

SEQ ID NO: 1930975 - RNA, 16 nt, Human
caccagacacccagga

SEQ ID NO: 1930976 - RNA, 17 nt, Human
caccagacacccaggac

SEQ ID NO: 1930977 - RNA, 18 nt, Human
caccagacacccaggacu

SEQ ID NO: 1930978 - RNA, 23 nt, Human
cacauguccaagaagcccaggaa

SEQ ID NO: 1930979 - RNA, 17 nt, Human
caccaacgucugugcca

SEQ ID NO: 1930980 - RNA, 13 nt, Human
caccaagcacagc

SEQ ID NO: 1930981 - RNA, 14 nt, Human
caccaagcacagca

SEQ ID NO: 1930982 - RNA, 15 nt, Human
caccaagcacagcag

SEQ ID NO: 1930983 - RNA, 16 nt, Human
caccaagcacagcagc

SEQ ID NO: 1930984 - RNA, 17 nt, Human
caccaagcacagcagcc

SEQ ID NO: 1930985 - RNA, 18 nt, Human
cacauguccaagaagccc

SEQ ID NO: 1930986 - RNA, 19 nt, Human
cacauguccaagaagccca

SEQ ID NO: 1930987 - RNA, 21 nt, Human
cacauguccaagaagcccagg

SEQ ID NO: 1930988 - RNA, 22 nt, Human
cacauguccaagaagcccagga

SEQ ID NO: 1930989 - RNA, 12 nt, Human
caccaagcccag

SEQ ID NO: 1930990 - RNA, 18 nt, Human
caccaagcacagcagccu

SEQ ID NO: 1930991 - RNA, 19 nt, Human
caccaagcacagcagccug

SEQ ID NO: 1930992 - RNA, 13 nt, Human
caccaagcccagu

SEQ ID NO: 1930993 - RNA, 10 nt, Human
cacaaauaaa

SEQ ID NO: 1930994 - RNA, 13 nt, Human
cacaaaguggcau

SEQ ID NO: 1930995 - RNA, 13 nt, Human
cacaaacuguaaa

SEQ ID NO: 1930996 - RNA, 17 nt, Human
cacaaagguagcuuuuc

SEQ ID NO: 1930997 - RNA, 15 nt, Human
cacaagaaaugaaag

SEQ ID NO: 1930998 - RNA, 13 nt, Human
cacaagaaaugaa

SEQ ID NO: 1930999 - RNA, 13 nt, Human
cacaagugguggu

SEQ ID NO: 1931000 - RNA, 23 nt, Human
cacaagacccaaaaggcagaagc

SEQ ID NO: 1931001 - RNA, 23 nt, Human
cacaagaaaugaaagcagggacu

SEQ ID NO: 1931002 - RNA, 14 nt, Human
caaugcacuuuguu

SEQ ID NO: 1931003 - RNA, 18 nt, Human
caaugguuuucuugugug

SEQ ID NO: 1931004 - RNA, 18 nt, Human
caaugguuugcaaggaag

SEQ ID NO: 1931005 - RNA, 17 nt, Human
caaugguuugcaaggaa

SEQ ID NO: 1931006 - RNA, 16 nt, Human
caaugguuugcaagga

SEQ ID NO: 1931007 - RNA, 13 nt, Human
caaugguuugcaa

SEQ ID NO: 1931008 - RNA, 20 nt, Human
caaugguuugcaaggaagcc

SEQ ID NO: 1931009 - RNA, 19 nt, Human
caaugguuugcaaggaagc

SEQ ID NO: 1931010 - RNA, 17 nt, Human
cacaaacgggcucagca

SEQ ID NO: 1931011 - RNA, 12 nt, Human
cacaaacuguaa

SEQ ID NO: 1931012 - RNA, 14 nt, Human
cacacacuuuggcu

SEQ ID NO: 1931013 - RNA, 14 nt, Human
cacacacugaugcu

SEQ ID NO: 1931014 - RNA, 21 nt, Human
cacacagaggcugccucuccc

SEQ ID NO: 1931015 - RNA, 20 nt, Human
cacacaccagagcccaccuu

SEQ ID NO: 1931016 - RNA, 16 nt, Human
cacacaccagagccca

SEQ ID NO: 1931017 - RNA, 15 nt, Human
cacacaccagagccc

SEQ ID NO: 1931018 - RNA, 22 nt, Human
cacaaucucauugaggagcauu

SEQ ID NO: 1931019 - RNA, 19 nt, Human
cacacaaggauagaugcug

SEQ ID NO: 1931020 - RNA, 15 nt, Human
cacacagcucugucc

SEQ ID NO: 1931021 - RNA, 14 nt, Human
cacacagcucuguc

SEQ ID NO: 1931022 - RNA, 13 nt, Human
cacacagcucugu

SEQ ID NO: 1931023 - RNA, 19 nt, Human
cacacagcaagucaggguu

SEQ ID NO: 1931024 - RNA, 22 nt, Human
cacaccagagcccaccuuggcu

SEQ ID NO: 1931025 - RNA, 21 nt, Human
cacaccagagcccaccuuggc

SEQ ID NO: 1931026 - RNA, 16 nt, Human
cacacagcucuguccu

SEQ ID NO: 1931027 - RNA, 20 nt, Human
cacacccagcccacuucugc

SEQ ID NO: 1931028 - RNA, 14 nt, Human
cacacccagcccac

SEQ ID NO: 1931029 - RNA, 14 nt, Human
caauauuauaauuu

SEQ ID NO: 1931030 - RNA, 22 nt, Human
caauauuauaauuuuuuucaau

SEQ ID NO: 1931031 - RNA, 14 nt, Human
caauaucagacuuu

SEQ ID NO: 1931032 - RNA, 14 nt, Human
caauauuaaaucug

SEQ ID NO: 1931033 - RNA, 15 nt, Human
caauauuaaaucugc

SEQ ID NO: 1931034 - RNA, 13 nt, Human
caauauuauaauu

SEQ ID NO: 1931035 - RNA, 14 nt, Human
caaugcacugacau

SEQ ID NO: 1931036 - RNA, 13 nt, Human
caaugcacuuugu

SEQ ID NO: 1931037 - RNA, 23 nt, Human
caaugcaaaccaucauugaaauc

SEQ ID NO: 1931038 - RNA, 14 nt, Human
caaugauggucacc

SEQ ID NO: 1931039 - RNA, 14 nt, Human
caaugcaaaccauc

SEQ ID NO: 1931040 - RNA, 21 nt, Human
caaugcaaaccaucauugaaa

SEQ ID NO: 1931041 - RNA, 22 nt, Human
caaugcaaaccaucauugaaau

SEQ ID NO: 1931042 - RNA, 14 nt, Human
caaugaccuuucaa

SEQ ID NO: 1931043 - RNA, 13 nt, Human
caaugauggucac

SEQ ID NO: 1931044 - RNA, 15 nt, Human
caaugaccuuucaau

SEQ ID NO: 1931045 - RNA, 16 nt, Human
caaugaccuuucaaua

SEQ ID NO: 1931046 - RNA, 20 nt, Human
caaaggagagucacagaaca

SEQ ID NO: 1931047 - RNA, 14 nt, Human
caaaggagauugga

SEQ ID NO: 1931048 - RNA, 20 nt, Human
caaaggagauuggaaggaac

SEQ ID NO: 1931049 - RNA, 23 nt, Human
caaaggguaucaggugcugccau

SEQ ID NO: 1931050 - RNA, 19 nt, Human
caaagugguauagaaaugc

SEQ ID NO: 1931051 - RNA, 18 nt, Human
caaagugguauagaaaug

SEQ ID NO: 1931052 - RNA, 16 nt, Human
caaaguggugagaggc

SEQ ID NO: 1931053 - RNA, 17 nt, Human
caaaguggugagaggca

SEQ ID NO: 1931054 - RNA, 21 nt, Human
caaaggguaucaggugcugcc

SEQ ID NO: 1931055 - RNA, 20 nt, Human
caaaggguaucaggugcugc

SEQ ID NO: 1931056 - RNA, 12 nt, Human
caaagggcccag

SEQ ID NO: 1931057 - RNA, 14 nt, Human
caaagggcccagau

SEQ ID NO: 1931058 - RNA, 22 nt, Human
caaagggcuccucuccagucug

SEQ ID NO: 1931059 - RNA, 16 nt, Human
caaaggguccagaagg

SEQ ID NO: 1931060 - RNA, 19 nt, Human
caaaguggugagaggcauc

SEQ ID NO: 1931061 - RNA, 13 nt, Human
caaauauuccaga

SEQ ID NO: 1931062 - RNA, 17 nt, Human
caaauauuccagagacu

SEQ ID NO: 1931063 - RNA, 19 nt, Human
caaauugccuucauuuuau

SEQ ID NO: 1931064 - RNA, 17 nt, Human
caaauuguaagcaugca

SEQ ID NO: 1931065 - RNA, 16 nt, Human
caaauuaauaaucuua

SEQ ID NO: 1931066 - RNA, 17 nt, Human
caaauuaauaaucuuau

SEQ ID NO: 1931067 - RNA, 15 nt, Human
caaauuaauaaucuu

SEQ ID NO: 1931068 - RNA, 18 nt, Human
caaauucugucucuggau

SEQ ID NO: 1931069 - RNA, 13 nt, Human
caaagaaauuaug

SEQ ID NO: 1931070 - RNA, 15 nt, Human
caaagaaauuaugug

SEQ ID NO: 1931071 - RNA, 12 nt, Human
caaagaaauuau

SEQ ID NO: 1931072 - RNA, 17 nt, Human
caaagcccaaaguggua

SEQ ID NO: 1931073 - RNA, 15 nt, Human
caaagagaaaaagaa

SEQ ID NO: 1931074 - RNA, 16 nt, Human
caaagagaaaaagaaa

SEQ ID NO: 1931075 - RNA, 14 nt, Human
caaagaguagaauu

SEQ ID NO: 1931076 - RNA, 19 nt, Human
caaagcccaaagugguaua

SEQ ID NO: 1931077 - RNA, 14 nt, Human
caaagcccaaggga

SEQ ID NO: 1931078 - RNA, 14 nt, Human
caaagagguuuuaa

SEQ ID NO: 1931079 - RNA, 21 nt, Human
caaagagguuuuaaaaaaauc

SEQ ID NO: 1931080 - RNA, 14 nt, Human
auuuuaaucaaguu

SEQ ID NO: 1931081 - RNA, 18 nt, Human
auuuuaaucaaguugaau

SEQ ID NO: 1931082 - RNA, 21 nt, Human
auuuuaaugcaccugaauguu

SEQ ID NO: 1931083 - RNA, 21 nt, Human
auuuuaagacguguuuguguu

SEQ ID NO: 1931084 - RNA, 20 nt, Human
caacaggcugggcuucagug

SEQ ID NO: 1931085 - RNA, 15 nt, Human
caaacuggggccucc

SEQ ID NO: 1931086 - RNA, 22 nt, Human
caacaguuuuuuaugcuaauca

SEQ ID NO: 1931087 - RNA, 14 nt, Human
caacauacucccau

SEQ ID NO: 1931088 - RNA, 15 nt, Human
caacauacucccauc

SEQ ID NO: 1931089 - RNA, 16 nt, Human
caacauacucccaucu

SEQ ID NO: 1931090 - RNA, 13 nt, Human
caaccuaaauuug

SEQ ID NO: 1931091 - RNA, 15 nt, Human
caaccuauuuugaag

SEQ ID NO: 1931092 - RNA, 16 nt, Human
caaccuauuuugaagu

SEQ ID NO: 1931093 - RNA, 14 nt, Human
caacaggcugggcu

SEQ ID NO: 1931094 - RNA, 23 nt, Human
caaauuuacagagacagaaagca

SEQ ID NO: 1931095 - RNA, 17 nt, Human
caaauuuacagagacag

SEQ ID NO: 1931096 - RNA, 16 nt, Human
caaauuuacagagaca

SEQ ID NO: 1931097 - RNA, 17 nt, Human
caacaggcugggcuuca

SEQ ID NO: 1931098 - RNA, 17 nt, Human
caacugcaucaagaugu

SEQ ID NO: 1931099 - RNA, 20 nt, Human
caacugcaucaagaugugac

SEQ ID NO: 1931100 - RNA, 23 nt, Human
caacugcaucaagaugugacaug

SEQ ID NO: 1931101 - RNA, 17 nt, Human
caaccugauugugucuc

SEQ ID NO: 1931102 - RNA, 19 nt, Human
caaccugauugugucucuu

SEQ ID NO: 1931103 - RNA, 21 nt, Human
caaccugauugugucucuugg

SEQ ID NO: 1931104 - RNA, 16 nt, Human
caacucuugauuaucc

SEQ ID NO: 1931105 - RNA, 18 nt, Human
caacucuugauuauccau

SEQ ID NO: 1931106 - RNA, 17 nt, Human
caaccugcaaagaucug

SEQ ID NO: 1931107 - RNA, 12 nt, Human
caacucuugauu

SEQ ID NO: 1931108 - RNA, 18 nt, Human
caagccagggugugucuc

SEQ ID NO: 1931109 - RNA, 14 nt, Human
caagccagggugug

SEQ ID NO: 1931110 - RNA, 20 nt, Human
caagcccaguucagcuuggg

SEQ ID NO: 1931111 - RNA, 14 nt, Human
caagcccccccuuc

SEQ ID NO: 1931112 - RNA, 16 nt, Human
caagcccccccuucca

SEQ ID NO: 1931113 - RNA, 17 nt, Human
caaggauccugagccag

SEQ ID NO: 1931114 - RNA, 15 nt, Human
caaggauccugagcc

SEQ ID NO: 1931115 - RNA, 16 nt, Human
caaggauccugagcca

SEQ ID NO: 1931116 - RNA, 21 nt, Human
caaggcugggggaagaagcuc

SEQ ID NO: 1931117 - RNA, 13 nt, Human
caaggcugucaau

SEQ ID NO: 1931118 - RNA, 14 nt, Human
caaggcugucaauu

SEQ ID NO: 1931119 - RNA, 21 nt, Human
caaggcugucaauuacaggaa

SEQ ID NO: 1931120 - RNA, 14 nt, Human
caaggauccugagc

SEQ ID NO: 1931121 - RNA, 17 nt, Human
caagcccccccuuccac

SEQ ID NO: 1931122 - RNA, 14 nt, Human
caagaaaguuuccc

SEQ ID NO: 1931123 - RNA, 23 nt, Human
caagacccuuguggucccacccc

SEQ ID NO: 1931124 - RNA, 21 nt, Human
caagaaauaaaaggaagccaa

SEQ ID NO: 1931125 - RNA, 13 nt, Human
caagaaaguuucc

SEQ ID NO: 1931126 - RNA, 13 nt, Human
caagaaauaaaag

SEQ ID NO: 1931127 - RNA, 19 nt, Human
caagaaauaaaaggaagcc

SEQ ID NO: 1931128 - RNA, 20 nt, Human
caagaaauaaaaggaagcca

SEQ ID NO: 1931129 - RNA, 13 nt, Human
caagaaaugaaag

SEQ ID NO: 1931130 - RNA, 15 nt, Human
caagaccucagggca

SEQ ID NO: 1931131 - RNA, 16 nt, Human
caagaccucagggcac

SEQ ID NO: 1931132 - RNA, 23 nt, Human
caagaccucagggcacaaagaug

SEQ ID NO: 1931133 - RNA, 24 nt, Human
caagaccucagggcacaaagaugg

SEQ ID NO: 1931134 - RNA, 13 nt, Human
caagaccuucucc

SEQ ID NO: 1931135 - RNA, 20 nt, Human
caagacgcugugcugcccug

SEQ ID NO: 1931136 - RNA, 21 nt, Human
caagacgcugugcugcccugc

SEQ ID NO: 1931137 - RNA, 22 nt, Human
caagacgcugugcugcccugcc

SEQ ID NO: 1931138 - RNA, 17 nt, Human
caagagggucugaggaa

SEQ ID NO: 1931139 - RNA, 16 nt, Human
caagagggucugagga

SEQ ID NO: 1931140 - RNA, 12 nt, Human
caagagggucug

SEQ ID NO: 1931141 - RNA, 21 nt, Human
caagcagccugagcaacucuu

SEQ ID NO: 1931142 - RNA, 17 nt, Human
caagagcccaggccucc

SEQ ID NO: 1931143 - RNA, 13 nt, Human
caagagccugaga

SEQ ID NO: 1931144 - RNA, 11 nt, Human
caagagccuga

SEQ ID NO: 1931145 - RNA, 16 nt, Human
caagacuguuagcccu

SEQ ID NO: 1931146 - RNA, 23 nt, Human
caagagccugagagugaggugga

SEQ ID NO: 1931147 - RNA, 21 nt, Human
caaggggaauguuugccucug

SEQ ID NO: 1931148 - RNA, 15 nt, Human
caagggccuggccug

SEQ ID NO: 1931149 - RNA, 13 nt, Human
caagggccuggcc

SEQ ID NO: 1931150 - RNA, 14 nt, Human
caagggccuggccu

SEQ ID NO: 1931151 - RNA, 17 nt, Human
caagggaucugguccua

SEQ ID NO: 1931152 - RNA, 20 nt, Human
caagggaucugguccuaccc

SEQ ID NO: 1931153 - RNA, 21 nt, Human
caagggaucugguccuaccca

SEQ ID NO: 1931154 - RNA, 13 nt, Human
caaggucauuuuu

SEQ ID NO: 1931155 - RNA, 21 nt, Human
caagguuauaugcacuuucuc

SEQ ID NO: 1931156 - RNA, 23 nt, Human
caaggggaauguuugccucugcc

SEQ ID NO: 1931157 - RNA, 18 nt, Human
caaggggaaucagaacuc

SEQ ID NO: 1931158 - RNA, 16 nt, Human
caagguaacuguacug

SEQ ID NO: 1931159 - RNA, 22 nt, Human
caagguaacuguacugggccau

SEQ ID NO: 1931160 - RNA, 22 nt, Human
caagguaauuucuugugccucu

SEQ ID NO: 1931161 - RNA, 18 nt, Human
caagugauucuccugccu

SEQ ID NO: 1931162 - RNA, 19 nt, Human
caagugauucuccugccuc

SEQ ID NO: 1931163 - RNA, 15 nt, Human
caagugagacccugu

SEQ ID NO: 1931164 - RNA, 19 nt, Human
caagugagacccugucuca

SEQ ID NO: 1931165 - RNA, 20 nt, Human
caagugauucuccugccuca

SEQ ID NO: 1931166 - RNA, 22 nt, Human
caagugaaaaaggaggaagaga

SEQ ID NO: 1931167 - RNA, 20 nt, Human
caagguuuaggcugguggcc

SEQ ID NO: 1931168 - RNA, 23 nt, Human
caagugaaaaaggaggaagagaa

SEQ ID NO: 1931169 - RNA, 17 nt, Human
caagguuuaggcuggug

SEQ ID NO: 1931170 - RNA, 14 nt, Human
caagugagacccug

SEQ ID NO: 1931171 - RNA, 16 nt, Human
caagggccuggccuga

SEQ ID NO: 1931172 - RNA, 16 nt, Human
ccaaacagcugccucu

SEQ ID NO: 1931173 - RNA, 17 nt, Human
ccaaacucaccugcccc

SEQ ID NO: 1931174 - RNA, 18 nt, Human
cauuuuucagauauaaaa

SEQ ID NO: 1931175 - RNA, 21 nt, Human
cauuuuucagaccuuuuaacu

SEQ ID NO: 1931176 - RNA, 23 nt, Human
cauuucuauuuauuuacugagcu

SEQ ID NO: 1931177 - RNA, 20 nt, Human
cauuuuucagauauaaaaga

SEQ ID NO: 1931178 - RNA, 23 nt, Human
cauuuuucuuagggaaggauaca

SEQ ID NO: 1931179 - RNA, 19 nt, Human
cauuuuguaacaaaugaac

SEQ ID NO: 1931180 - RNA, 19 nt, Human
cauuuuagggguagcauuu

SEQ ID NO: 1931181 - RNA, 23 nt, Human
cauuuuaggaaaaaaaaaagcau

SEQ ID NO: 1931182 - RNA, 16 nt, Human
cauuuguuuguuuucc

SEQ ID NO: 1931183 - RNA, 18 nt, Human
cauuuguuuguuuuccuu

SEQ ID NO: 1931184 - RNA, 18 nt, Human
cauuugagcagggcucag

SEQ ID NO: 1931185 - RNA, 17 nt, Human
cauuugagcagggcuca

SEQ ID NO: 1931186 - RNA, 20 nt, Human
cauuugagcagggcucagcg

SEQ ID NO: 1931187 - RNA, 20 nt, Human
cauuugcuaacuagcuugga

SEQ ID NO: 1931188 - RNA, 22 nt, Human
cauuuguuugaacugauaaaga

SEQ ID NO: 1931189 - RNA, 20 nt, Human
cauuuguuugaacugauaaa

SEQ ID NO: 1931190 - RNA, 13 nt, Human
cauuugcugaaua

SEQ ID NO: 1931191 - RNA, 17 nt, Human
cauuuguuugaacugau

SEQ ID NO: 1931192 - RNA, 13 nt, Human
cauuugcuccuuu

SEQ ID NO: 1931193 - RNA, 14 nt, Human
cauuugcuccuuuc

SEQ ID NO: 1931194 - RNA, 20 nt, Human
cauuugaaaauuuugauguu

SEQ ID NO: 1931195 - RNA, 22 nt, Human
cauuugaaaauuuugauguuuu

SEQ ID NO: 1931196 - RNA, 19 nt, Human
cauuuccugagaccacaga

SEQ ID NO: 1931197 - RNA, 15 nt, Human
cauuuccuaaauaua

SEQ ID NO: 1931198 - RNA, 23 nt, Human
cauuuccuaucaccuauuuccau

SEQ ID NO: 1931199 - RNA, 17 nt, Human
cauuuaggccaugggac

SEQ ID NO: 1931200 - RNA, 22 nt, Human
cauuuagcuaaacggauuccaa

SEQ ID NO: 1931201 - RNA, 20 nt, Human
cauuuagagaggaaaaguaa

SEQ ID NO: 1931202 - RNA, 21 nt, Human
cauuuagagaggaaaaguaac

SEQ ID NO: 1931203 - RNA, 16 nt, Human
cauuuaaaagauacag

SEQ ID NO: 1931204 - RNA, 15 nt, Human
cauuuaaaagauaca

SEQ ID NO: 1931205 - RNA, 12 nt, Human
cauuuaaaagau

SEQ ID NO: 1931206 - RNA, 18 nt, Human
cauuguuugucugucuuc

SEQ ID NO: 1931207 - RNA, 22 nt, Human
cauuguuugucugucuucauag

SEQ ID NO: 1931208 - RNA, 13 nt, Human
cauuuccuguguc

SEQ ID NO: 1931209 - RNA, 12 nt, Human
cauuuccugugu

SEQ ID NO: 1931210 - RNA, 21 nt, Human
cauuucgguggcuagucaagc

SEQ ID NO: 1931211 - RNA, 13 nt, Human
cauuucuauuuau

SEQ ID NO: 1931212 - RNA, 14 nt, Human
cauuucuauuuauu

SEQ ID NO: 1931213 - RNA, 18 nt, Human
cauuucuauuuauuuacu

SEQ ID NO: 1931214 - RNA, 15 nt, Human
cauuucgguggcuag

SEQ ID NO: 1931215 - RNA, 17 nt, Human
cauuguuggccaaagcc

SEQ ID NO: 1931216 - RNA, 13 nt, Human
cauuguugagcua

SEQ ID NO: 1931217 - RNA, 20 nt, Human
cauuguugagcuauugcugu

SEQ ID NO: 1931218 - RNA, 18 nt, Human
cauuguucaauuagaaua

SEQ ID NO: 1931219 - RNA, 18 nt, Human
cauuguuggccaaagcca

SEQ ID NO: 1931220 - RNA, 23 nt, Human
cauuguauucagaguugaugguu

SEQ ID NO: 1931221 - RNA, 15 nt, Human
cauuguauuagaucu

SEQ ID NO: 1931222 - RNA, 19 nt, Human
cauugucccucugccccau

SEQ ID NO: 1931223 - RNA, 21 nt, Human
cauugucccucugccccaucc

SEQ ID NO: 1931224 - RNA, 19 nt, Human
cauugucccugaagagaag

SEQ ID NO: 1931225 - RNA, 13 nt, Human
cauugucccucug

SEQ ID NO: 1931226 - RNA, 14 nt, Human
cauugucccucugc

SEQ ID NO: 1931227 - RNA, 15 nt, Human
cauugucccucugcc

SEQ ID NO: 1931228 - RNA, 18 nt, Human
cauugucccucugcccca

SEQ ID NO: 1931229 - RNA, 14 nt, Human
cacccaagggccug

SEQ ID NO: 1931230 - RNA, 15 nt, Human
cacccaagggccugg

SEQ ID NO: 1931231 - RNA, 15 nt, Human
ccaagcaagacugag

SEQ ID NO: 1931232 - RNA, 12 nt, Human
ccaagcacagca

SEQ ID NO: 1931233 - RNA, 13 nt, Human
ccaagcacagcag

SEQ ID NO: 1931234 - RNA, 14 nt, Human
ccaagcacagcagc

SEQ ID NO: 1931235 - RNA, 15 nt, Human
ccaagcacagcagcc

SEQ ID NO: 1931236 - RNA, 17 nt, Human
ccaagcacagcagccug

SEQ ID NO: 1931237 - RNA, 18 nt, Human
ccaagcacagcagccugg

SEQ ID NO: 1931238 - RNA, 13 nt, Human
ccaaguauuuugc

SEQ ID NO: 1931239 - RNA, 20 nt, Human
ccaagucaagugaaaaagga

SEQ ID NO: 1931240 - RNA, 20 nt, Human
ccaaguagcugggauuacag

SEQ ID NO: 1931241 - RNA, 18 nt, Human
ccaaggugggaggauugc

SEQ ID NO: 1931242 - RNA, 13 nt, Human
ccaaggugggagg

SEQ ID NO: 1931243 - RNA, 23 nt, Human
ccaagguuuggggaagaacgaag

SEQ ID NO: 1931244 - RNA, 22 nt, Human
ccaaggggaauguuugccucug

SEQ ID NO: 1931245 - RNA, 19 nt, Human
ccaaggggaaucagaacuc

SEQ ID NO: 1931246 - RNA, 19 nt, Human
ccaagggccuggccugagc

SEQ ID NO: 1931247 - RNA, 16 nt, Human
ccaagggccuggccug

SEQ ID NO: 1931248 - RNA, 18 nt, Human
ccaagggccuggccugag

SEQ ID NO: 1931249 - RNA, 15 nt, Human
ccaagggccuggccu

SEQ ID NO: 1931250 - RNA, 13 nt, Human
ccaagggaucugg

SEQ ID NO: 1931251 - RNA, 21 nt, Human
ccaagggaucugguccuaccc

SEQ ID NO: 1931252 - RNA, 18 nt, Human
ccaaggccaaaggaagca

SEQ ID NO: 1931253 - RNA, 21 nt, Human
ccaaggccaaaggaagcacau

SEQ ID NO: 1931254 - RNA, 12 nt, Human
ccaagccacuga

SEQ ID NO: 1931255 - RNA, 13 nt, Human
ccaagccugacca

SEQ ID NO: 1931256 - RNA, 19 nt, Human
ccaagccuuggcucuaccc

SEQ ID NO: 1931257 - RNA, 20 nt, Human
ccaagccuggucagcccaaa

SEQ ID NO: 1931258 - RNA, 19 nt, Human
ccaagccuggucagcccaa

SEQ ID NO: 1931259 - RNA, 14 nt, Human
ccaagcucccaggc

SEQ ID NO: 1931260 - RNA, 15 nt, Human
ccaagcucccaggca

SEQ ID NO: 1931261 - RNA, 16 nt, Human
ccaagcucccaggcau

SEQ ID NO: 1931262 - RNA, 22 nt, Human
ccaagcucccaggcauucccca

SEQ ID NO: 1931263 - RNA, 17 nt, Human
ccaaggccaaaggaagc

SEQ ID NO: 1931264 - RNA, 13 nt, Human
ccaacacgcagga

SEQ ID NO: 1931265 - RNA, 20 nt, Human
ccaacacgcaccugccucag

SEQ ID NO: 1931266 - RNA, 21 nt, Human
ccaacacgcaccugccucagg

SEQ ID NO: 1931267 - RNA, 13 nt, Human
ccaacaccaagca

SEQ ID NO: 1931268 - RNA, 16 nt, Human
ccaacaccaagcacag

SEQ ID NO: 1931269 - RNA, 17 nt, Human
ccaacaccaagcacagc

SEQ ID NO: 1931270 - RNA, 19 nt, Human
ccaacaccaagcacagcag

SEQ ID NO: 1931271 - RNA, 22 nt, Human
ccaacaccaagcacagcagccu

SEQ ID NO: 1931272 - RNA, 23 nt, Human
ccaacaccaagcacagcagccug

SEQ ID NO: 1931273 - RNA, 18 nt, Human
ccaaaguacacuguuuca

SEQ ID NO: 1931274 - RNA, 15 nt, Human
ccaaaguacacuguu

SEQ ID NO: 1931275 - RNA, 17 nt, Human
ccaaauuuucuuuuuau

SEQ ID NO: 1931276 - RNA, 15 nt, Human
ccaaauuugauugau

SEQ ID NO: 1931277 - RNA, 20 nt, Human
ccaaauuugauugauuugaa

SEQ ID NO: 1931278 - RNA, 19 nt, Human
ccaacaaagaacacuaacu

SEQ ID NO: 1931279 - RNA, 20 nt, Human
ccaaaguacacuguuucaaa

SEQ ID NO: 1931280 - RNA, 13 nt, Human
ccaacaucaacau

SEQ ID NO: 1931281 - RNA, 21 nt, Human
ccaacauacucccaucuguga

SEQ ID NO: 1931282 - RNA, 22 nt, Human
ccaacauacucccaucugugaa

SEQ ID NO: 1931283 - RNA, 17 nt, Human
ccaacauacucccaucu

SEQ ID NO: 1931284 - RNA, 18 nt, Human
ccaacauacucccaucug

SEQ ID NO: 1931285 - RNA, 19 nt, Human
ccaacauacucccaucugu

SEQ ID NO: 1931286 - RNA, 20 nt, Human
ccaacauacucccaucugug

SEQ ID NO: 1931287 - RNA, 16 nt, Human
ccaacauacucccauc

SEQ ID NO: 1931288 - RNA, 19 nt, Human
ccaacagaagaacuguguu

SEQ ID NO: 1931289 - RNA, 19 nt, Human
ccaaagccaaagcuaggcc

SEQ ID NO: 1931290 - RNA, 23 nt, Human
ccaaagcagugcaugcugucccu

SEQ ID NO: 1931291 - RNA, 19 nt, Human
ccaaagcagugcaugcugu

SEQ ID NO: 1931292 - RNA, 17 nt, Human
ccaaagccuccuccagc

SEQ ID NO: 1931293 - RNA, 22 nt, Human
ccaaagccuccuccagccgcca

SEQ ID NO: 1931294 - RNA, 14 nt, Human
ccaaagccaaugug

SEQ ID NO: 1931295 - RNA, 20 nt, Human
ccaaacucaccugccccuca

SEQ ID NO: 1931296 - RNA, 15 nt, Human
ccaaagcuaggccug

SEQ ID NO: 1931297 - RNA, 17 nt, Human
ccaaagcgaauuuuaaa

SEQ ID NO: 1931298 - RNA, 17 nt, Human
ccaaagcuaggccuggc

SEQ ID NO: 1931299 - RNA, 16 nt, Human
ccaaagcuaggccugg

SEQ ID NO: 1931300 - RNA, 21 nt, Human
ccaaagcuaggccuggccaga

SEQ ID NO: 1931301 - RNA, 15 nt, Human
ccaaaggaagcacau

SEQ ID NO: 1931302 - RNA, 23 nt, Human
ccaaaggaagcacaugccucucu

SEQ ID NO: 1931303 - RNA, 15 nt, Human
ccaagaagcccagga

SEQ ID NO: 1931304 - RNA, 12 nt, Human
ccaacccucauc

SEQ ID NO: 1931305 - RNA, 20 nt, Human
ccaaccccccagcacugagg

SEQ ID NO: 1931306 - RNA, 19 nt, Human
ccaaccccccagcacugag

SEQ ID NO: 1931307 - RNA, 18 nt, Human
ccaaccccccagcacuga

SEQ ID NO: 1931308 - RNA, 17 nt, Human
ccaaccccccagcacug

SEQ ID NO: 1931309 - RNA, 15 nt, Human
ccaaccccccagcac

SEQ ID NO: 1931310 - RNA, 14 nt, Human
ccaaccccccagca

SEQ ID NO: 1931311 - RNA, 13 nt, Human
ccaaccccccagc

SEQ ID NO: 1931312 - RNA, 21 nt, Human
ccaaccccccagcacugagga

SEQ ID NO: 1931313 - RNA, 19 nt, Human
ccaagaagcccaggaaagg

SEQ ID NO: 1931314 - RNA, 20 nt, Human
ccaagaagcccaggaaaggc

SEQ ID NO: 1931315 - RNA, 15 nt, Human
ccaagaggcugcagc

SEQ ID NO: 1931316 - RNA, 14 nt, Human
ccaagaggcugcag

SEQ ID NO: 1931317 - RNA, 16 nt, Human
ccaagaggcugcagcc

SEQ ID NO: 1931318 - RNA, 11 nt, Human
ccacagggcac

SEQ ID NO: 1931319 - RNA, 19 nt, Human
ccacagggcaccugccacc

SEQ ID NO: 1931320 - RNA, 15 nt, Human
ccacaguagucuuga

SEQ ID NO: 1931321 - RNA, 17 nt, Human
ccacaguagucuugaug

SEQ ID NO: 1931322 - RNA, 12 nt, Human
ccacaggccuga

SEQ ID NO: 1931323 - RNA, 11 nt, Human
ccacaggccug

SEQ ID NO: 1931324 - RNA, 19 nt, Human
ccacaggccugagauuuca

SEQ ID NO: 1931325 - RNA, 14 nt, Human
ccacaggccugaga

SEQ ID NO: 1931326 - RNA, 22 nt, Human
ccacaggccugagauuucaucu

SEQ ID NO: 1931327 - RNA, 20 nt, Human
ccacaguggaaccagcccag

SEQ ID NO: 1931328 - RNA, 19 nt, Human
ccacauacaacacaaagag

SEQ ID NO: 1931329 - RNA, 15 nt, Human
ccacaucuaagccug

SEQ ID NO: 1931330 - RNA, 22 nt, Human
ccacaucuaagccugaaggggc

SEQ ID NO: 1931331 - RNA, 23 nt, Human
ccacaucuaagccugaaggggcg

SEQ ID NO: 1931332 - RNA, 19 nt, Human
ccacaugugacacauaugc

SEQ ID NO: 1931333 - RNA, 15 nt, Human
ccacaugugacacau

SEQ ID NO: 1931334 - RNA, 16 nt, Human
ccacaugugcacaugc

SEQ ID NO: 1931335 - RNA, 16 nt, Human
ccacauuccugaugcu

SEQ ID NO: 1931336 - RNA, 17 nt, Human
ccacaucuugcucugcu

SEQ ID NO: 1931337 - RNA, 18 nt, Human
ccacaucuugcucugcug

SEQ ID NO: 1931338 - RNA, 19 nt, Human
ccacaucuugcucugcuga

SEQ ID NO: 1931339 - RNA, 20 nt, Human
ccacaucuugcucugcugac

SEQ ID NO: 1931340 - RNA, 21 nt, Human
ccaccaagccuggucagccca

SEQ ID NO: 1931341 - RNA, 21 nt, Human
ccaccaacauacucccaucug

SEQ ID NO: 1931342 - RNA, 22 nt, Human
ccacauuuggaauacuuuuugu

SEQ ID NO: 1931343 - RNA, 19 nt, Human
ccacauuuggaauacuuuu

SEQ ID NO: 1931344 - RNA, 13 nt, Human
ccacauuuggaau

SEQ ID NO: 1931345 - RNA, 16 nt, Human
ccacaggaucagucug

SEQ ID NO: 1931346 - RNA, 16 nt, Human
ccacaggacacaguca

SEQ ID NO: 1931347 - RNA, 17 nt, Human
ccacaggacacagucag

SEQ ID NO: 1931348 - RNA, 16 nt, Human
ccacaggccgcccugc

SEQ ID NO: 1931349 - RNA, 17 nt, Human
ccacaggccgcccugcg

SEQ ID NO: 1931350 - RNA, 14 nt, Human
ccacacucagcaca

SEQ ID NO: 1931351 - RNA, 22 nt, Human
ccacacguaaugaaacuuggau

SEQ ID NO: 1931352 - RNA, 22 nt, Human
ccacacccagcccacuucugcc

SEQ ID NO: 1931353 - RNA, 21 nt, Human
ccacacccagcccacuucugc

SEQ ID NO: 1931354 - RNA, 16 nt, Human
ccacacccucacugcu

SEQ ID NO: 1931355 - RNA, 15 nt, Human
ccacacccagcccac

SEQ ID NO: 1931356 - RNA, 20 nt, Human
ccacacccagcccacuucug

SEQ ID NO: 1931357 - RNA, 13 nt, Human
ccacaccacaucu

SEQ ID NO: 1931358 - RNA, 15 nt, Human
ccaauauuaaaucug

SEQ ID NO: 1931359 - RNA, 18 nt, Human
ccaauauuaaaucugcug

SEQ ID NO: 1931360 - RNA, 12 nt, Human
ccaauauuauaa

SEQ ID NO: 1931361 - RNA, 20 nt, Human
ccacacagacuugggcaggg

SEQ ID NO: 1931362 - RNA, 13 nt, Human
ccaauauuauaau

SEQ ID NO: 1931363 - RNA, 16 nt, Human
ccaauauucauagcag

SEQ ID NO: 1931364 - RNA, 21 nt, Human
ccacccaggagccccgaggcc

SEQ ID NO: 1931365 - RNA, 23 nt, Human
ccacccaggagccccgaggccuu

SEQ ID NO: 1931366 - RNA, 17 nt, Human
ccacccccacccaaggg

SEQ ID NO: 1931367 - RNA, 18 nt, Human
ccacugcagaagacagua

SEQ ID NO: 1931368 - RNA, 13 nt, Human
ccacugcagaaga

SEQ ID NO: 1931369 - RNA, 13 nt, Human
ccacuucagcuga

SEQ ID NO: 1931370 - RNA, 14 nt, Human
ccacuucagcugac

SEQ ID NO: 1931371 - RNA, 21 nt, Human
ccacuucauucuugaaagcug

SEQ ID NO: 1931372 - RNA, 23 nt, Human
ccagaaguuugagaucagccugg

SEQ ID NO: 1931373 - RNA, 22 nt, Human
ccagaauaaacuggcagcucag

SEQ ID NO: 1931374 - RNA, 22 nt, Human
ccagaaguuugagaucagccug

SEQ ID NO: 1931375 - RNA, 15 nt, Human
ccagaagcccagaau

SEQ ID NO: 1931376 - RNA, 14 nt, Human
ccagaagcccagaa

SEQ ID NO: 1931377 - RNA, 22 nt, Human
ccagaagauagcuucaccccaa

SEQ ID NO: 1931378 - RNA, 18 nt, Human
ccagaagaugaacagacu

SEQ ID NO: 1931379 - RNA, 23 nt, Human
ccagaagaugaacagacugaccu

SEQ ID NO: 1931380 - RNA, 19 nt, Human
ccagaagaugaacagacug

SEQ ID NO: 1931381 - RNA, 20 nt, Human
ccagaagaugaacagacuga

SEQ ID NO: 1931382 - RNA, 13 nt, Human
ccagaagcccaga

SEQ ID NO: 1931383 - RNA, 12 nt, Human
ccagaagcccag

SEQ ID NO: 1931384 - RNA, 18 nt, Human
ccagaauuucccaaagca

SEQ ID NO: 1931385 - RNA, 21 nt, Human
ccagacaccuugacagggcac

SEQ ID NO: 1931386 - RNA, 21 nt, Human
ccagaauuucccaaagcagug

SEQ ID NO: 1931387 - RNA, 12 nt, Human
ccagaauuuccc

SEQ ID NO: 1931388 - RNA, 19 nt, Human
ccagaauuucccaaagcag

SEQ ID NO: 1931389 - RNA, 17 nt, Human
ccagacagacaacacug

SEQ ID NO: 1931390 - RNA, 14 nt, Human
ccagacacaggccc

SEQ ID NO: 1931391 - RNA, 18 nt, Human
ccacucaguccauagcag

SEQ ID NO: 1931392 - RNA, 16 nt, Human
ccacucaggucuguuu

SEQ ID NO: 1931393 - RNA, 11 nt, Human
ccacucagguc

SEQ ID NO: 1931394 - RNA, 16 nt, Human
ccacucaaaggccaga

SEQ ID NO: 1931395 - RNA, 14 nt, Human
ccacucaaaggcca

SEQ ID NO: 1931396 - RNA, 15 nt, Human
ccacucaaaggccag

SEQ ID NO: 1931397 - RNA, 14 nt, Human
ccacuacauucugu

SEQ ID NO: 1931398 - RNA, 15 nt, Human
ccacuacauucuguu

SEQ ID NO: 1931399 - RNA, 11 nt, Human
ccacuacauuc

SEQ ID NO: 1931400 - RNA, 17 nt, Human
ccacuacauucuguuaa

SEQ ID NO: 1931401 - RNA, 16 nt, Human
ccacuacauucuguua

SEQ ID NO: 1931402 - RNA, 16 nt, Human
ccacgcuggagugcag

SEQ ID NO: 1931403 - RNA, 15 nt, Human
ccacccccacccaag

SEQ ID NO: 1931404 - RNA, 18 nt, Human
ccacggccaggccagagg

SEQ ID NO: 1931405 - RNA, 16 nt, Human
ccacggccaggccaga

SEQ ID NO: 1931406 - RNA, 19 nt, Human
ccacgcuggagugcaguga

SEQ ID NO: 1931407 - RNA, 18 nt, Human
ccacgcuggagugcagug

SEQ ID NO: 1931408 - RNA, 23 nt, Human
ccacggccaggccagagggagug

SEQ ID NO: 1931409 - RNA, 14 nt, Human
ccacgguguucugu

SEQ ID NO: 1931410 - RNA, 15 nt, Human
ccaccccacacacgc

SEQ ID NO: 1931411 - RNA, 19 nt, Human
ccacuaagcagaggagggg

SEQ ID NO: 1931412 - RNA, 21 nt, Human
ccacuaagcagaggaggggcc

SEQ ID NO: 1931413 - RNA, 22 nt, Human
ccacuaagcagaggaggggccg

SEQ ID NO: 1931414 - RNA, 21 nt, Human
cccaaauuaucaagcuaauaa

SEQ ID NO: 1931415 - RNA, 20 nt, Human
cccaaauuaucaagcuaaua

SEQ ID NO: 1931416 - RNA, 19 nt, Human
cccaaauuaucaagcuaau

SEQ ID NO: 1931417 - RNA, 19 nt, Human
cccaaauuugauugauuug

SEQ ID NO: 1931418 - RNA, 16 nt, Human
cccaaauuugauugau

SEQ ID NO: 1931419 - RNA, 17 nt, Human
cccaagggccuggccug

SEQ ID NO: 1931420 - RNA, 18 nt, Human
cccaacacgcaggagcac

SEQ ID NO: 1931421 - RNA, 23 nt, Human
cccaagggccuggccugagcugg

SEQ ID NO: 1931422 - RNA, 18 nt, Human
cccaagggccuggccuga

SEQ ID NO: 1931423 - RNA, 19 nt, Human
cccaagggccuggccugag

SEQ ID NO: 1931424 - RNA, 23 nt, Human
cccaaugcacuuuguucuggcuc

SEQ ID NO: 1931425 - RNA, 19 nt, Human
cccaaucccagcuaccuca

SEQ ID NO: 1931426 - RNA, 12 nt, Human
cccaauauuaua

SEQ ID NO: 1931427 - RNA, 15 nt, Human
cccaauauuauaauu

SEQ ID NO: 1931428 - RNA, 17 nt, Human
cccaauauuauaauuuu

SEQ ID NO: 1931429 - RNA, 11 nt, Human
cccaauauuau

SEQ ID NO: 1931430 - RNA, 21 nt, Human
cccaauucuuacaaacaugug

SEQ ID NO: 1931431 - RNA, 15 nt, Human
cccaauuucagacuc

SEQ ID NO: 1931432 - RNA, 20 nt, Human
cccaaucccagcuaccucaa

SEQ ID NO: 1931433 - RNA, 16 nt, Human
cccaauguaggagcug

SEQ ID NO: 1931434 - RNA, 18 nt, Human
cccagcaagugagagcug

SEQ ID NO: 1931435 - RNA, 16 nt, Human
cccagcaagugagagc

SEQ ID NO: 1931436 - RNA, 22 nt, Human
cccagauugcaacaggcugggc

SEQ ID NO: 1931437 - RNA, 21 nt, Human
cccagauugcaacaggcuggg

SEQ ID NO: 1931438 - RNA, 20 nt, Human
cccagauugcaacaggcugg

SEQ ID NO: 1931439 - RNA, 20 nt, Human
cccagagggccugcaaggga

SEQ ID NO: 1931440 - RNA, 18 nt, Human
cccagagggccugcaagg

SEQ ID NO: 1931441 - RNA, 22 nt, Human
cccagccuggccacgcagccag

SEQ ID NO: 1931442 - RNA, 23 nt, Human
cccagccuggccacgcagccagg

SEQ ID NO: 1931443 - RNA, 21 nt, Human
cccagccuggccacgcagcca

SEQ ID NO: 1931444 - RNA, 20 nt, Human
cccagccuggccacgcagcc

SEQ ID NO: 1931445 - RNA, 15 nt, Human
cccagcgagcccugg

SEQ ID NO: 1931446 - RNA, 18 nt, Human
cccagcgagcccuggugg

SEQ ID NO: 1931447 - RNA, 17 nt, Human
cccagcgagcccuggug

SEQ ID NO: 1931448 - RNA, 23 nt, Human
cccagcgagcccugguggcagug

SEQ ID NO: 1931449 - RNA, 19 nt, Human
cccagcgagcccugguggc

SEQ ID NO: 1931450 - RNA, 23 nt, Human
cccagcggacaguggcaggacag

SEQ ID NO: 1931451 - RNA, 18 nt, Human
cccagcggacaguggcag

SEQ ID NO: 1931452 - RNA, 20 nt, Human
cccagcggacaguggcagga

SEQ ID NO: 1931453 - RNA, 17 nt, Human
cccagcuccggccuguc

SEQ ID NO: 1931454 - RNA, 16 nt, Human
cccagcuaagaaccug

SEQ ID NO: 1931455 - RNA, 17 nt, Human
cccagcuaagaaccugg

SEQ ID NO: 1931456 - RNA, 18 nt, Human
cccagcuaagaaccugga

SEQ ID NO: 1931457 - RNA, 19 nt, Human
cccagcuaagaaccuggaa

SEQ ID NO: 1931458 - RNA, 20 nt, Human
cccagcuaagaaccuggaac

SEQ ID NO: 1931459 - RNA, 22 nt, Human
cccagcuaagaaccuggaacuu

SEQ ID NO: 1931460 - RNA, 14 nt, Human
cccagcuaccucaa

SEQ ID NO: 1931461 - RNA, 22 nt, Human
cccagcuaccucaaccaaugcc

SEQ ID NO: 1931462 - RNA, 11 nt, Human
cccagccccuu

SEQ ID NO: 1931463 - RNA, 23 nt, Human
cccagauugcaacaggcugggcu

SEQ ID NO: 1931464 - RNA, 23 nt, Human
cccagcaagugagagcugggugu

SEQ ID NO: 1931465 - RNA, 22 nt, Human
cccagcaagugagagcugggug

SEQ ID NO: 1931466 - RNA, 21 nt, Human
cccagcaagugagagcugggu

SEQ ID NO: 1931467 - RNA, 20 nt, Human
cccagcaagugagagcuggg

SEQ ID NO: 1931468 - RNA, 19 nt, Human
cccagcaagugagagcugg

SEQ ID NO: 1931469 - RNA, 12 nt, Human
cccagccugcua

SEQ ID NO: 1931470 - RNA, 18 nt, Human
cccagccccuucugaccc

SEQ ID NO: 1931471 - RNA, 21 nt, Human
cccaggugcagccagaggcac

SEQ ID NO: 1931472 - RNA, 23 nt, Human
cccaggugcuaggaacacuccuu

SEQ ID NO: 1931473 - RNA, 15 nt, Human
cccaggugcagccag

SEQ ID NO: 1931474 - RNA, 20 nt, Human
cccaggugcagccagaggca

SEQ ID NO: 1931475 - RNA, 22 nt, Human
cccaggugcuaggaacacuccu

SEQ ID NO: 1931476 - RNA, 20 nt, Human
cccagucuggaaugcagugg

SEQ ID NO: 1931477 - RNA, 13 nt, Human
cccagugcccaca

SEQ ID NO: 1931478 - RNA, 17 nt, Human
cccaggccuccuacagc

SEQ ID NO: 1931479 - RNA, 18 nt, Human
cccaggccuccuacagcu

SEQ ID NO: 1931480 - RNA, 18 nt, Human
cccaggagccccgaggcc

SEQ ID NO: 1931481 - RNA, 21 nt, Human
cccaggagccccgaggccuuc

SEQ ID NO: 1931482 - RNA, 13 nt, Human
cccaggaggccag

SEQ ID NO: 1931483 - RNA, 22 nt, Human
cccaggaggccagccuugacca

SEQ ID NO: 1931484 - RNA, 14 nt, Human
cccaggaguucugc

SEQ ID NO: 1931485 - RNA, 15 nt, Human
cccaggaguucugcu

SEQ ID NO: 1931486 - RNA, 13 nt, Human
cccaggcaggucu

SEQ ID NO: 1931487 - RNA, 11 nt, Human
cccaggcaggu

SEQ ID NO: 1931488 - RNA, 17 nt, Human
cccaggaguucugcuca

SEQ ID NO: 1931489 - RNA, 18 nt, Human
cccaggaguucugcucau

SEQ ID NO: 1931490 - RNA, 21 nt, Human
cccaggaguucugcucauucu

SEQ ID NO: 1931491 - RNA, 23 nt, Human
cccaggaguucugcucauucuaa

SEQ ID NO: 1931492 - RNA, 22 nt, Human
cccaggccccugccacccuggg

SEQ ID NO: 1931493 - RNA, 21 nt, Human
cccaggccccugccacccugg

SEQ ID NO: 1931494 - RNA, 18 nt, Human
cccaggccccugccaccc

SEQ ID NO: 1931495 - RNA, 16 nt, Human
cccaggccccugccac

SEQ ID NO: 1931496 - RNA, 11 nt, Human
cccaggccccu

SEQ ID NO: 1931497 - RNA, 17 nt, Human
cccaggcaggucuugaa

SEQ ID NO: 1931498 - RNA, 15 nt, Human
cccaggcagggccaa

SEQ ID NO: 1931499 - RNA, 23 nt, Human
cccaggcagggccaacccuucuc

SEQ ID NO: 1931500 - RNA, 20 nt, Human
cccaggcauuccccaggagg

SEQ ID NO: 1931501 - RNA, 21 nt, Human
cccaggcauuccccaggaggc

SEQ ID NO: 1931502 - RNA, 22 nt, Human
cccaggcauuccccaggaggcc

SEQ ID NO: 1931503 - RNA, 23 nt, Human
cccaggcauuccccaggaggcca

SEQ ID NO: 1931504 - RNA, 14 nt, Human
ccccacccaagggc

SEQ ID NO: 1931505 - RNA, 20 nt, Human
ccccacccaagggccuggcc

SEQ ID NO: 1931506 - RNA, 13 nt, Human
cccauucugccug

SEQ ID NO: 1931507 - RNA, 22 nt, Human
ccccaaauggaaaugggcagag

SEQ ID NO: 1931508 - RNA, 13 nt, Human
cccauucuacuug

SEQ ID NO: 1931509 - RNA, 14 nt, Human
cccauucuacuugc

SEQ ID NO: 1931510 - RNA, 15 nt, Human
cccauucuacuugcu

SEQ ID NO: 1931511 - RNA, 17 nt, Human
cccauucuacuugcucu

SEQ ID NO: 1931512 - RNA, 18 nt, Human
cccauucuacuugcucug

SEQ ID NO: 1931513 - RNA, 19 nt, Human
cccauucuacuugcucugg

SEQ ID NO: 1931514 - RNA, 20 nt, Human
cccauucuacuugcucugga

SEQ ID NO: 1931515 - RNA, 21 nt, Human
cccauucuacuugcucuggac

SEQ ID NO: 1931516 - RNA, 22 nt, Human
cccauucuacuugcucuggacc

SEQ ID NO: 1931517 - RNA, 23 nt, Human
cccauucuacuugcucuggaccu

SEQ ID NO: 1931518 - RNA, 24 nt, Human
cccauucuacuugcucuggaccug

SEQ ID NO: 1931519 - RNA, 20 nt, Human
cccagugcccacaggaucag

SEQ ID NO: 1931520 - RNA, 15 nt, Human
cccagugcccacagg

SEQ ID NO: 1931521 - RNA, 18 nt, Human
cccagugccgagaaggaa

SEQ ID NO: 1931522 - RNA, 17 nt, Human
cccagugccgagaagga

SEQ ID NO: 1931523 - RNA, 15 nt, Human
cccaugcugcccugu

SEQ ID NO: 1931524 - RNA, 16 nt, Human
cccaugcugcccugug

SEQ ID NO: 1931525 - RNA, 17 nt, Human
cccaugcugcccuguga

SEQ ID NO: 1931526 - RNA, 18 nt, Human
cccaugcugcccugugag

SEQ ID NO: 1931527 - RNA, 13 nt, Human
cccauggagccag

SEQ ID NO: 1931528 - RNA, 19 nt, Human
cccauggagccagcucccu

SEQ ID NO: 1931529 - RNA, 21 nt, Human
cccauucgguguggugcagug

SEQ ID NO: 1931530 - RNA, 17 nt, Human
ccccaggaggccagccu

SEQ ID NO: 1931531 - RNA, 22 nt, Human
ccccucagggucccugguggca

SEQ ID NO: 1931532 - RNA, 18 nt, Human
ccaggacaccgggcaggg

SEQ ID NO: 1931533 - RNA, 14 nt, Human
ccaggacaccgggc

SEQ ID NO: 1931534 - RNA, 20 nt, Human
ccaggacuauauuugggccu

SEQ ID NO: 1931535 - RNA, 21 nt, Human
ccaggacuauauuugggccug

SEQ ID NO: 1931536 - RNA, 17 nt, Human
ccagcuggggccaggcu

SEQ ID NO: 1931537 - RNA, 18 nt, Human
ccagcuggggccaggcug

SEQ ID NO: 1931538 - RNA, 19 nt, Human
ccagcuggggccaggcugg

SEQ ID NO: 1931539 - RNA, 20 nt, Human
ccagcuggggccaggcuggg

SEQ ID NO: 1931540 - RNA, 21 nt, Human
ccagcuggggccaggcugggu

SEQ ID NO: 1931541 - RNA, 22 nt, Human
ccagcuggggccaggcuggguc

SEQ ID NO: 1931542 - RNA, 23 nt, Human
ccagcuggggccaggcugggucg

SEQ ID NO: 1931543 - RNA, 22 nt, Human
ccaggaagccagcaggcucuca

SEQ ID NO: 1931544 - RNA, 20 nt, Human
ccaggaagccagcaggcucu

SEQ ID NO: 1931545 - RNA, 14 nt, Human
ccaggaauuuccca

SEQ ID NO: 1931546 - RNA, 16 nt, Human
ccaggaauuucccagg

SEQ ID NO: 1931547 - RNA, 17 nt, Human
ccaggaauuucccagga

SEQ ID NO: 1931548 - RNA, 18 nt, Human
ccaggaauuucccaggac

SEQ ID NO: 1931549 - RNA, 19 nt, Human
ccaggaauuucccaggacc

SEQ ID NO: 1931550 - RNA, 20 nt, Human
ccaggaauuucccaggaccc

SEQ ID NO: 1931551 - RNA, 21 nt, Human
ccaggaauuucccaggacccu

SEQ ID NO: 1931552 - RNA, 23 nt, Human
ccaggaauuucccaggacccuga

SEQ ID NO: 1931553 - RNA, 22 nt, Human
ccaggaauuucccaggacccug

SEQ ID NO: 1931554 - RNA, 16 nt, Human
ccagcgagcccuggug

SEQ ID NO: 1931555 - RNA, 15 nt, Human
ccagcgagcccuggu

SEQ ID NO: 1931556 - RNA, 14 nt, Human
ccagcgagcccugg

SEQ ID NO: 1931557 - RNA, 22 nt, Human
ccagccuugaccauucuccacc

SEQ ID NO: 1931558 - RNA, 11 nt, Human
ccagcucuggu

SEQ ID NO: 1931559 - RNA, 12 nt, Human
ccagcucugguc

SEQ ID NO: 1931560 - RNA, 13 nt, Human
ccagcucuggucc

SEQ ID NO: 1931561 - RNA, 16 nt, Human
ccagagcccaccuugg

SEQ ID NO: 1931562 - RNA, 22 nt, Human
ccagagcccaccuuggcucaag

SEQ ID NO: 1931563 - RNA, 11 nt, Human
ccagagcccag

SEQ ID NO: 1931564 - RNA, 19 nt, Human
ccagccuugaccauucucc

SEQ ID NO: 1931565 - RNA, 20 nt, Human
ccagccuugaccauucucca

SEQ ID NO: 1931566 - RNA, 12 nt, Human
ccagagcccagc

SEQ ID NO: 1931567 - RNA, 13 nt, Human
ccagagcccagcu

SEQ ID NO: 1931568 - RNA, 14 nt, Human
ccagagcccagcuc

SEQ ID NO: 1931569 - RNA, 15 nt, Human
ccagagcccagcucc

SEQ ID NO: 1931570 - RNA, 20 nt, Human
ccagcugcuugggcuucauc

SEQ ID NO: 1931571 - RNA, 23 nt, Human
ccagcugcuugggcuucauccuc

SEQ ID NO: 1931572 - RNA, 24 nt, Human
ccagcuggagaaauaugguacuca

SEQ ID NO: 1931573 - RNA, 14 nt, Human
ccagcucuggucca

SEQ ID NO: 1931574 - RNA, 17 nt, Human
ccagcucugguccauag

SEQ ID NO: 1931575 - RNA, 21 nt, Human
ccagcucugguccauagagag

SEQ ID NO: 1931576 - RNA, 22 nt, Human
ccagcucugguccauagagagc

SEQ ID NO: 1931577 - RNA, 12 nt, Human
ccagcugccucc

SEQ ID NO: 1931578 - RNA, 14 nt, Human
ccagcugcacugau

SEQ ID NO: 1931579 - RNA, 18 nt, Human
ccagcugcacugaugcug

SEQ ID NO: 1931580 - RNA, 19 nt, Human
ccagcugcacugaugcugc

SEQ ID NO: 1931581 - RNA, 20 nt, Human
ccaggcauccuccacaauag

SEQ ID NO: 1931582 - RNA, 17 nt, Human
ccaggcauuccccagga

SEQ ID NO: 1931583 - RNA, 14 nt, Human
ccaggcauucccca

SEQ ID NO: 1931584 - RNA, 13 nt, Human
ccaggcauggugg

SEQ ID NO: 1931585 - RNA, 24 nt, Human
ccaggcauuccccaggaggccagc

SEQ ID NO: 1931586 - RNA, 23 nt, Human
ccaggcauuccccaggaggccag

SEQ ID NO: 1931587 - RNA, 22 nt, Human
ccaggcauuccccaggaggcca

SEQ ID NO: 1931588 - RNA, 19 nt, Human
ccaggagccuccugcccuu

SEQ ID NO: 1931589 - RNA, 18 nt, Human
ccaggagccuccugcccu

SEQ ID NO: 1931590 - RNA, 13 nt, Human
ccaggagccuccu

SEQ ID NO: 1931591 - RNA, 14 nt, Human
ccaggagccuccug

SEQ ID NO: 1931592 - RNA, 12 nt, Human
ccaggaggccag

SEQ ID NO: 1931593 - RNA, 14 nt, Human
ccaggaggccagcc

SEQ ID NO: 1931594 - RNA, 13 nt, Human
ccaggaggccagc

SEQ ID NO: 1931595 - RNA, 15 nt, Human
ccaggagccccgagg

SEQ ID NO: 1931596 - RNA, 15 nt, Human
ccaggagcagccaca

SEQ ID NO: 1931597 - RNA, 16 nt, Human
ccaggagcagccacau

SEQ ID NO: 1931598 - RNA, 12 nt, Human
ccaggcuuggaa

SEQ ID NO: 1931599 - RNA, 21 nt, Human
ccaggcugguuucgaacuccu

SEQ ID NO: 1931600 - RNA, 18 nt, Human
ccaggcuugccugcaggc

SEQ ID NO: 1931601 - RNA, 19 nt, Human
ccaggcuuuuuuaucaugu

SEQ ID NO: 1931602 - RNA, 13 nt, Human
ccaggccccugcc

SEQ ID NO: 1931603 - RNA, 19 nt, Human
ccaggcuggucucaaacuc

SEQ ID NO: 1931604 - RNA, 20 nt, Human
ccaggcuguaucccaugagc

SEQ ID NO: 1931605 - RNA, 17 nt, Human
ccaggcuugccugcagg

SEQ ID NO: 1931606 - RNA, 21 nt, Human
ccaggugaguccuagagcuac

SEQ ID NO: 1931607 - RNA, 19 nt, Human
ccaggugcuaggaacacuc

SEQ ID NO: 1931608 - RNA, 18 nt, Human
ccaggugcaaccagggag

SEQ ID NO: 1931609 - RNA, 15 nt, Human
ccagguucagcuugu

SEQ ID NO: 1931610 - RNA, 14 nt, Human
ccagguucagcuug

SEQ ID NO: 1931611 - RNA, 17 nt, Human
ccagguguuacuguaau

SEQ ID NO: 1931612 - RNA, 21 nt, Human
ccagguguuacuguaauuccu

SEQ ID NO: 1931613 - RNA, 22 nt, Human
ccaguauaaaacaccuaaauaa

SEQ ID NO: 1931614 - RNA, 22 nt, Human
ccaucugguuaggauggcagga

SEQ ID NO: 1931615 - RNA, 23 nt, Human
ccaucugguuaggauggcaggac

SEQ ID NO: 1931616 - RNA, 12 nt, Human
ccaucugggcuc

SEQ ID NO: 1931617 - RNA, 16 nt, Human
ccaucugggcuccucc

SEQ ID NO: 1931618 - RNA, 14 nt, Human
ccaugaagauguag

SEQ ID NO: 1931619 - RNA, 19 nt, Human
ccaugaagaggaugcugug

SEQ ID NO: 1931620 - RNA, 21 nt, Human
ccaugaagaggaugcugugaa

SEQ ID NO: 1931621 - RNA, 14 nt, Human
ccaugauggcaaca

SEQ ID NO: 1931622 - RNA, 15 nt, Human
ccaugauggcaacag

SEQ ID NO: 1931623 - RNA, 16 nt, Human
ccaugauggcaacaga

SEQ ID NO: 1931624 - RNA, 19 nt, Human
ccaugauggcaacagaucu

SEQ ID NO: 1931625 - RNA, 21 nt, Human
ccaugauggcaacagaucugg

SEQ ID NO: 1931626 - RNA, 19 nt, Human
ccaugauuaaccacuucag

SEQ ID NO: 1931627 - RNA, 21 nt, Human
ccaugauuaaccacuucagcu

SEQ ID NO: 1931628 - RNA, 18 nt, Human
ccaugauguuuuccauga

SEQ ID NO: 1931629 - RNA, 23 nt, Human
ccaugauucuauuuauauguaca

SEQ ID NO: 1931630 - RNA, 11 nt, Human
ccaugcacugu

SEQ ID NO: 1931631 - RNA, 13 nt, Human
ccaugcacuguga

SEQ ID NO: 1931632 - RNA, 15 nt, Human
ccaugcacugugaag

SEQ ID NO: 1931633 - RNA, 16 nt, Human
ccaugcacugugaagg

SEQ ID NO: 1931634 - RNA, 17 nt, Human
ccaugcacugugaagga

SEQ ID NO: 1931635 - RNA, 14 nt, Human
ccaugcugcccugu

SEQ ID NO: 1931636 - RNA, 11 nt, Human
ccaugcugccc

SEQ ID NO: 1931637 - RNA, 13 nt, Human
ccaugcugcccug

SEQ ID NO: 1931638 - RNA, 23 nt, Human
ccaugccucccccuagccauuuu

SEQ ID NO: 1931639 - RNA, 21 nt, Human
ccaugccucagcccugacccu

SEQ ID NO: 1931640 - RNA, 15 nt, Human
ccaugccucagcccu

SEQ ID NO: 1931641 - RNA, 16 nt, Human
ccaugccucagcccug

SEQ ID NO: 1931642 - RNA, 12 nt, Human
ccaugccucagc

SEQ ID NO: 1931643 - RNA, 14 nt, Human
ccaugccucagccc

SEQ ID NO: 1931644 - RNA, 21 nt, Human
ccaugcacugugaaggacccu

SEQ ID NO: 1931645 - RNA, 19 nt, Human
ccaugcacugugaaggacc

SEQ ID NO: 1931646 - RNA, 20 nt, Human
ccaugcacugugaaggaccc

SEQ ID NO: 1931647 - RNA, 22 nt, Human
ccaucauugaaaucuuuuugcu

SEQ ID NO: 1931648 - RNA, 12 nt, Human
ccauccucugua

SEQ ID NO: 1931649 - RNA, 19 nt, Human
ccauccucuguacagagcc

SEQ ID NO: 1931650 - RNA, 13 nt, Human
ccaucaccagaca

SEQ ID NO: 1931651 - RNA, 18 nt, Human
ccauauccuuacccuccu

SEQ ID NO: 1931652 - RNA, 20 nt, Human
ccagugaggcucugcccuug

SEQ ID NO: 1931653 - RNA, 17 nt, Human
ccagugaggcucugccc

SEQ ID NO: 1931654 - RNA, 18 nt, Human
ccagugaggcucugcccu

SEQ ID NO: 1931655 - RNA, 19 nt, Human
ccagugaggcucugcccuu

SEQ ID NO: 1931656 - RNA, 20 nt, Human
ccauccucuguacagagccc

SEQ ID NO: 1931657 - RNA, 18 nt, Human
cccaaaaggcagaagcaa

SEQ ID NO: 1931658 - RNA, 13 nt, Human
cccaaaaggcaga

SEQ ID NO: 1931659 - RNA, 20 nt, Human
ccauuuugggguacccacug

SEQ ID NO: 1931660 - RNA, 23 nt, Human
ccauuuuggauucuuauggacaa

SEQ ID NO: 1931661 - RNA, 22 nt, Human
ccauuuugggguacccacugcu

SEQ ID NO: 1931662 - RNA, 16 nt, Human
cccaaagcagugcaug

SEQ ID NO: 1931663 - RNA, 12 nt, Human
cccaaagaugca

SEQ ID NO: 1931664 - RNA, 15 nt, Human
cccaaagaugcagcc

SEQ ID NO: 1931665 - RNA, 12 nt, Human
cccaaagaagga

SEQ ID NO: 1931666 - RNA, 22 nt, Human
cccaaaccaccagaagcccaga

SEQ ID NO: 1931667 - RNA, 18 nt, Human
cccaaaccaccagaagcc

SEQ ID NO: 1931668 - RNA, 17 nt, Human
cccaaaccaccagaagc

SEQ ID NO: 1931669 - RNA, 18 nt, Human
ccauucugccugcccagg

SEQ ID NO: 1931670 - RNA, 17 nt, Human
ccauucugccugcccag

SEQ ID NO: 1931671 - RNA, 17 nt, Human
ccauucuccaccugcca

SEQ ID NO: 1931672 - RNA, 16 nt, Human
ccauucugccugccca

SEQ ID NO: 1931673 - RNA, 20 nt, Human
ccauucugccugcccaggcc

SEQ ID NO: 1931674 - RNA, 19 nt, Human
ccauucugccugcccaggc

SEQ ID NO: 1931675 - RNA, 21 nt, Human
ccauucugccugcccaggccc

SEQ ID NO: 1931676 - RNA, 13 nt, Human
ccauggacuuugu

SEQ ID NO: 1931677 - RNA, 14 nt, Human
ccauggacuuuguu

SEQ ID NO: 1931678 - RNA, 15 nt, Human
ccauucuccaccugc

SEQ ID NO: 1931679 - RNA, 16 nt, Human
ccauucuccaccugcc

SEQ ID NO: 1931680 - RNA, 16 nt, Human
ccauggacaggcuggc

SEQ ID NO: 1931681 - RNA, 18 nt, Human
ccauggacaggcuggcuc

SEQ ID NO: 1931682 - RNA, 19 nt, Human
ccauggacaggcuggcucc

SEQ ID NO: 1931683 - RNA, 21 nt, Human
cccacaaaggagagcuagcag

SEQ ID NO: 1931684 - RNA, 14 nt, Human
cgcgaccuuggccg

SEQ ID NO: 1931685 - RNA, 15 nt, Human
cgcgacuaauuucaa

SEQ ID NO: 1931686 - RNA, 22 nt, Human
cgcgacuaauuucaaaaugcuu

SEQ ID NO: 1931687 - RNA, 20 nt, Human
cgcgugcacacaccagagcc

SEQ ID NO: 1931688 - RNA, 19 nt, Human
cgcgugcacacaccagagc

SEQ ID NO: 1931689 - RNA, 16 nt, Human
cgcgugcacacaccag

SEQ ID NO: 1931690 - RNA, 21 nt, Human
cgcuaagagggagggagggcu

SEQ ID NO: 1931691 - RNA, 15 nt, Human
cgcuaagagggaggg

SEQ ID NO: 1931692 - RNA, 16 nt, Human
cgcuaagagggaggga

SEQ ID NO: 1931693 - RNA, 14 nt, Human
cgcuaagagggagg

SEQ ID NO: 1931694 - RNA, 16 nt, Human
cgcgacaaugcaaacc

SEQ ID NO: 1931695 - RNA, 17 nt, Human
cgcgacaaugcaaacca

SEQ ID NO: 1931696 - RNA, 12 nt, Human
cgcccucccagg

SEQ ID NO: 1931697 - RNA, 13 nt, Human
cgcccucccaggc

SEQ ID NO: 1931698 - RNA, 12 nt, Human
cgcccccugccc

SEQ ID NO: 1931699 - RNA, 15 nt, Human
cgcccccacugguga

SEQ ID NO: 1931700 - RNA, 19 nt, Human
cgcccccacccugagcgcc

SEQ ID NO: 1931701 - RNA, 13 nt, Human
cgcagacaggacc

SEQ ID NO: 1931702 - RNA, 14 nt, Human
cgcagacaggacca

SEQ ID NO: 1931703 - RNA, 20 nt, Human
cgaggaaacgaaacccacuc

SEQ ID NO: 1931704 - RNA, 22 nt, Human
cgaggaaacgaaacccacucua

SEQ ID NO: 1931705 - RNA, 12 nt, Human
cgaggacaggga

SEQ ID NO: 1931706 - RNA, 13 nt, Human
cgaggacagggag

SEQ ID NO: 1931707 - RNA, 14 nt, Human
cgaggacagggagg

SEQ ID NO: 1931708 - RNA, 19 nt, Human
cgaggccuucucugaagga

SEQ ID NO: 1931709 - RNA, 18 nt, Human
cgaggccuucucugaagg

SEQ ID NO: 1931710 - RNA, 17 nt, Human
cgagggcagcgggagcc

SEQ ID NO: 1931711 - RNA, 20 nt, Human
ccuuuguauucucuccugua

SEQ ID NO: 1931712 - RNA, 18 nt, Human
ccuuuguauucucuccug

SEQ ID NO: 1931713 - RNA, 15 nt, Human
ccuuuguauucucuc

SEQ ID NO: 1931714 - RNA, 11 nt, Human
cgcaaugugac

SEQ ID NO: 1931715 - RNA, 12 nt, Human
cgauuucuguuu

SEQ ID NO: 1931716 - RNA, 23 nt, Human
cgauugcaggagucccugccauc

SEQ ID NO: 1931717 - RNA, 21 nt, Human
cgauuucccugguuuuagucu

SEQ ID NO: 1931718 - RNA, 19 nt, Human
cgauucuucugcuucagcc

SEQ ID NO: 1931719 - RNA, 13 nt, Human
cgauucuucugcu

SEQ ID NO: 1931720 - RNA, 21 nt, Human
cgauucuucugcuucagccuc

SEQ ID NO: 1931721 - RNA, 21 nt, Human
cgauugcaggagucccugcca

SEQ ID NO: 1931722 - RNA, 19 nt, Human
cgaucuggguucacugcaa

SEQ ID NO: 1931723 - RNA, 19 nt, Human
cgaucgcggcggagcuggc

SEQ ID NO: 1931724 - RNA, 15 nt, Human
ccuuggccgcaccua

SEQ ID NO: 1931725 - RNA, 12 nt, Human
ccuuggcucaga

SEQ ID NO: 1931726 - RNA, 15 nt, Human
ccuuggcucagacau

SEQ ID NO: 1931727 - RNA, 13 nt, Human
ccuuggcugcagg

SEQ ID NO: 1931728 - RNA, 12 nt, Human
ccuuggcugcag

SEQ ID NO: 1931729 - RNA, 14 nt, Human
ccuuggcugcaggg

SEQ ID NO: 1931730 - RNA, 20 nt, Human
ccuuguggucccaccccaca

SEQ ID NO: 1931731 - RNA, 16 nt, Human
ccuuguggucccaccc

SEQ ID NO: 1931732 - RNA, 19 nt, Human
ccuuguggucccaccccac

SEQ ID NO: 1931733 - RNA, 14 nt, Human
ccuuucuggcucuc

SEQ ID NO: 1931734 - RNA, 14 nt, Human
ccuuuaagagaaau

SEQ ID NO: 1931735 - RNA, 14 nt, Human
ccuuucuccuuugu

SEQ ID NO: 1931736 - RNA, 15 nt, Human
ccuuucuccuuugua

SEQ ID NO: 1931737 - RNA, 13 nt, Human
ccuuuaagagaaa

SEQ ID NO: 1931738 - RNA, 16 nt, Human
ccuuugcuugaaagaa

SEQ ID NO: 1931739 - RNA, 15 nt, Human
ccuuuggcagaguuc

SEQ ID NO: 1931740 - RNA, 14 nt, Human
ccuuugauaaaugu

SEQ ID NO: 1931741 - RNA, 23 nt, Human
ccuuugacgccaucccagcccca

SEQ ID NO: 1931742 - RNA, 14 nt, Human
ccuuugacaaaggu

SEQ ID NO: 1931743 - RNA, 17 nt, Human
cgggcagggcucccaca

SEQ ID NO: 1931744 - RNA, 23 nt, Human
cgggcaggggagggucagccagg

SEQ ID NO: 1931745 - RNA, 16 nt, Human
cgggcagggcucccac

SEQ ID NO: 1931746 - RNA, 15 nt, Human
cgggcagggcuccca

SEQ ID NO: 1931747 - RNA, 12 nt, Human
cgggcaugacac

SEQ ID NO: 1931748 - RNA, 15 nt, Human
cgggcaugacacgaa

SEQ ID NO: 1931749 - RNA, 15 nt, Human
cggggagggugacag

SEQ ID NO: 1931750 - RNA, 22 nt, Human
cggggagggugacaguggccgc

SEQ ID NO: 1931751 - RNA, 23 nt, Human
cgggcagccuggcucccaggaca

SEQ ID NO: 1931752 - RNA, 22 nt, Human
cgggcagccuggcucccaggac

SEQ ID NO: 1931753 - RNA, 18 nt, Human
cgggcagccuggcuccca

SEQ ID NO: 1931754 - RNA, 16 nt, Human
cgggcagccuggcucc

SEQ ID NO: 1931755 - RNA, 14 nt, Human
cgggcagccuggcu

SEQ ID NO: 1931756 - RNA, 13 nt, Human
cgggcagccuggc

SEQ ID NO: 1931757 - RNA, 17 nt, Human
cgggaggucgaggcagg

SEQ ID NO: 1931758 - RNA, 16 nt, Human
cgggaggucgaggcag

SEQ ID NO: 1931759 - RNA, 20 nt, Human
cgggaggauguucugggaca

SEQ ID NO: 1931760 - RNA, 21 nt, Human
cgggaggauguucugggacac

SEQ ID NO: 1931761 - RNA, 20 nt, Human
cggcugggcacacgccuccc

SEQ ID NO: 1931762 - RNA, 16 nt, Human
cggcugggcacacgcc

SEQ ID NO: 1931763 - RNA, 17 nt, Human
cggcugggcacacgccu

SEQ ID NO: 1931764 - RNA, 12 nt, Human
cggcugggcaca

SEQ ID NO: 1931765 - RNA, 17 nt, Human
cggccuccauccugagg

SEQ ID NO: 1931766 - RNA, 16 nt, Human
cggccuccauccugag

SEQ ID NO: 1931767 - RNA, 20 nt, Human
cggcccauccccaggcaccu

SEQ ID NO: 1931768 - RNA, 14 nt, Human
cggccucccaaagu

SEQ ID NO: 1931769 - RNA, 15 nt, Human
cggccuuuggcuuca

SEQ ID NO: 1931770 - RNA, 21 nt, Human
cggccuguccuccaacaccaa

SEQ ID NO: 1931771 - RNA, 12 nt, Human
cggccuguccuc

SEQ ID NO: 1931772 - RNA, 15 nt, Human
cggccuguccuccaa

SEQ ID NO: 1931773 - RNA, 15 nt, Human
cggcuggccuggccc

SEQ ID NO: 1931774 - RNA, 16 nt, Human
cggcuggccuggcccc

SEQ ID NO: 1931775 - RNA, 18 nt, Human
cggcuggccuggccccuc

SEQ ID NO: 1931776 - RNA, 15 nt, Human
cggacgcuggcuccc

SEQ ID NO: 1931777 - RNA, 14 nt, Human
cggacgcuggcucc

SEQ ID NO: 1931778 - RNA, 20 nt, Human
cggacagccacggccaggcc

SEQ ID NO: 1931779 - RNA, 16 nt, Human
cggaucuuuggacaga

SEQ ID NO: 1931780 - RNA, 19 nt, Human
cggaucuuuggacagaagc

SEQ ID NO: 1931781 - RNA, 24 nt, Human
cggauuccaaagaguagaauugca

SEQ ID NO: 1931782 - RNA, 15 nt, Human
cggauuuggggugga

SEQ ID NO: 1931783 - RNA, 12 nt, Human
cggcaacaucaa

SEQ ID NO: 1931784 - RNA, 17 nt, Human
cggaaagcccugugcuc

SEQ ID NO: 1931785 - RNA, 19 nt, Human
cggaacccaagcuuagaac

SEQ ID NO: 1931786 - RNA, 17 nt, Human
cggaacccaagcuuaga

SEQ ID NO: 1931787 - RNA, 13 nt, Human
cgcuccugugucu

SEQ ID NO: 1931788 - RNA, 22 nt, Human
cgcucaccuuuguuuagaacac

SEQ ID NO: 1931789 - RNA, 18 nt, Human
cggacagccacggccagg

SEQ ID NO: 1931790 - RNA, 16 nt, Human
cggacagccacggcca

SEQ ID NO: 1931791 - RNA, 15 nt, Human
cggacagccacggcc

SEQ ID NO: 1931792 - RNA, 12 nt, Human
cggacacccccu

SEQ ID NO: 1931793 - RNA, 14 nt, Human
cggacacccccucg

SEQ ID NO: 1931794 - RNA, 20 nt, Human
cggaaugaaccacaucuugc

SEQ ID NO: 1931795 - RNA, 17 nt, Human
cggaacugcaugcugcu

SEQ ID NO: 1931796 - RNA, 18 nt, Human
cggaacugcaugcugcug

SEQ ID NO: 1931797 - RNA, 16 nt, Human
cggaacugcaugcugc

SEQ ID NO: 1931798 - RNA, 14 nt, Human
cggggcagggcagc

SEQ ID NO: 1931799 - RNA, 23 nt, Human
cggugcuaucucccccagcccca

SEQ ID NO: 1931800 - RNA, 22 nt, Human
cggugcuguccucagguggcca

SEQ ID NO: 1931801 - RNA, 16 nt, Human
cgguggacccagacac

SEQ ID NO: 1931802 - RNA, 16 nt, Human
cggugcuguccucagg

SEQ ID NO: 1931803 - RNA, 17 nt, Human
cggugcuguccucaggu

SEQ ID NO: 1931804 - RNA, 21 nt, Human
cggugcuguccucagguggcc

SEQ ID NO: 1931805 - RNA, 16 nt, Human
cguauaaaagccuguu

SEQ ID NO: 1931806 - RNA, 17 nt, Human
cguauaaaagccuguuu

SEQ ID NO: 1931807 - RNA, 21 nt, Human
cguauaaaagccuguuuaaga

SEQ ID NO: 1931808 - RNA, 22 nt, Human
cguauaaaagccuguuuaagag

SEQ ID NO: 1931809 - RNA, 16 nt, Human
cguagcugcaaaggac

SEQ ID NO: 1931810 - RNA, 20 nt, Human
cguaugaguuagaauaauaa

SEQ ID NO: 1931811 - RNA, 20 nt, Human
cgucaacucauauuuucaug

SEQ ID NO: 1931812 - RNA, 16 nt, Human
cgucaacucauauuuu

SEQ ID NO: 1931813 - RNA, 11 nt, Human
cgucaacaaau

SEQ ID NO: 1931814 - RNA, 11 nt, Human
cguccagggag

SEQ ID NO: 1931815 - RNA, 19 nt, Human
cgucauuacagggcacagg

SEQ ID NO: 1931816 - RNA, 17 nt, Human
cgucauaacuagaacug

SEQ ID NO: 1931817 - RNA, 16 nt, Human
cgucauaacuagaacu

SEQ ID NO: 1931818 - RNA, 14 nt, Human
cgucauaacuagaa

SEQ ID NO: 1931819 - RNA, 14 nt, Human
cgucugacaggcaa

SEQ ID NO: 1931820 - RNA, 13 nt, Human
cgucugacaggca

SEQ ID NO: 1931821 - RNA, 15 nt, Human
cgucuggaaguccaa

SEQ ID NO: 1931822 - RNA, 14 nt, Human
cgucuaccugaggg

SEQ ID NO: 1931823 - RNA, 11 nt, Human
cguccccuguc

SEQ ID NO: 1931824 - RNA, 14 nt, Human
cguccccugucccc

SEQ ID NO: 1931825 - RNA, 15 nt, Human
cgucgcccucccagg

SEQ ID NO: 1931826 - RNA, 16 nt, Human
cgucgcccucccaggc

SEQ ID NO: 1931827 - RNA, 22 nt, Human
cgugcacacaccagagcccacc

SEQ ID NO: 1931828 - RNA, 18 nt, Human
cgugcauaccacuuuugu

SEQ ID NO: 1931829 - RNA, 14 nt, Human
cgugcauaccacuu

SEQ ID NO: 1931830 - RNA, 19 nt, Human
cgugcauaccacuuuuguu

SEQ ID NO: 1931831 - RNA, 21 nt, Human
cgugcacacaccagagcccac

SEQ ID NO: 1931832 - RNA, 20 nt, Human
cgugcacacaccagagccca

SEQ ID NO: 1931833 - RNA, 12 nt, Human
cgugacaacacu

SEQ ID NO: 1931834 - RNA, 14 nt, Human
cgucuguucccccu

SEQ ID NO: 1931835 - RNA, 12 nt, Human
cguucucugccu

SEQ ID NO: 1931836 - RNA, 12 nt, Human
cguucucccugg

SEQ ID NO: 1931837 - RNA, 13 nt, Human
cguucucccuggg

SEQ ID NO: 1931838 - RNA, 12 nt, Human
cguucugugcac

SEQ ID NO: 1931839 - RNA, 21 nt, Human
cguuucuaaaggcuaccuuug

SEQ ID NO: 1931840 - RNA, 19 nt, Human
cguuucuaaaggcuaccuu

SEQ ID NO: 1931841 - RNA, 20 nt, Human
cguuucuaugacacaugcaa

SEQ ID NO: 1931842 - RNA, 16 nt, Human
cguuuuguuuugugcc

SEQ ID NO: 1931843 - RNA, 13 nt, Human
cguuuugaagcua

SEQ ID NO: 1931844 - RNA, 20 nt, Human
cguuuugaagcuacugugug

SEQ ID NO: 1931845 - RNA, 17 nt, Human
cguuugaccuuuuaugu

SEQ ID NO: 1931846 - RNA, 20 nt, Human
cguuugaagacauugcacca

SEQ ID NO: 1931847 - RNA, 16 nt, Human
cguuugagaagaaaac

SEQ ID NO: 1931848 - RNA, 21 nt, Human
cguuugagaagaaaacaucua

SEQ ID NO: 1931849 - RNA, 14 nt, Human
cguggcucagccag

SEQ ID NO: 1931850 - RNA, 15 nt, Human
cguggcucagccagc

SEQ ID NO: 1931851 - RNA, 18 nt, Human
cguggcucagccagcacu

SEQ ID NO: 1931852 - RNA, 12 nt, Human
cguggcugcuuc

SEQ ID NO: 1931853 - RNA, 14 nt, Human
cguggcugcuucaa

SEQ ID NO: 1931854 - RNA, 15 nt, Human
cguggcugcuucaag

SEQ ID NO: 1931855 - RNA, 17 nt, Human
cguggcugcuucaagga

SEQ ID NO: 1931856 - RNA, 16 nt, Human
ccuucaguaaccccca

SEQ ID NO: 1931857 - RNA, 22 nt, Human
ccuucaguaacccccacuggac

SEQ ID NO: 1931858 - RNA, 12 nt, Human
ccuucacaaagc

SEQ ID NO: 1931859 - RNA, 18 nt, Human
ccuucacaaagcccaagg

SEQ ID NO: 1931860 - RNA, 10 nt, Human
ccuucagugc

SEQ ID NO: 1931861 - RNA, 13 nt, Human
ccuucagugccuu

SEQ ID NO: 1931862 - RNA, 14 nt, Human
ccuucagugccuua

SEQ ID NO: 1931863 - RNA, 20 nt, Human
ccuucagugccuuauggaac

SEQ ID NO: 1931864 - RNA, 15 nt, Human
ccuucagugccuuau

SEQ ID NO: 1931865 - RNA, 14 nt, Human
ccuuccucuuucca

SEQ ID NO: 1931866 - RNA, 15 nt, Human
ccuuccagggguggg

SEQ ID NO: 1931867 - RNA, 16 nt, Human
ccuuccagggguggga

SEQ ID NO: 1931868 - RNA, 18 nt, Human
ccuuccaggggugggaca

SEQ ID NO: 1931869 - RNA, 22 nt, Human
ccuuccaggggugggacacccu

SEQ ID NO: 1931870 - RNA, 20 nt, Human
ccuguggccaaguucuuagu

SEQ ID NO: 1931871 - RNA, 14 nt, Human
ccuuaccagcagag

SEQ ID NO: 1931872 - RNA, 17 nt, Human
ccuuaccagcagagcac

SEQ ID NO: 1931873 - RNA, 17 nt, Human
ccuuacccuccuuggga

SEQ ID NO: 1931874 - RNA, 15 nt, Human
ccuuaccagcagagc

SEQ ID NO: 1931875 - RNA, 16 nt, Human
ccuuaccagcagagca

SEQ ID NO: 1931876 - RNA, 20 nt, Human
ccuuaccucggugccuuccu

SEQ ID NO: 1931877 - RNA, 14 nt, Human
ccuuaccugccagg

SEQ ID NO: 1931878 - RNA, 15 nt, Human
ccuuauuguaccucu

SEQ ID NO: 1931879 - RNA, 16 nt, Human
ccuuauuguaccucuc

SEQ ID NO: 1931880 - RNA, 21 nt, Human
ccuuagacagucccugccaau

SEQ ID NO: 1931881 - RNA, 20 nt, Human
ccuuagaacauuuuaauuca

SEQ ID NO: 1931882 - RNA, 18 nt, Human
ccuuagacagucccugcc

SEQ ID NO: 1931883 - RNA, 19 nt, Human
ccuuagacagucccugcca

SEQ ID NO: 1931884 - RNA, 16 nt, Human
ccuuagacagucccug

SEQ ID NO: 1931885 - RNA, 17 nt, Human
ccuuagacagucccugc

SEQ ID NO: 1931886 - RNA, 19 nt, Human
ccuucagugccuuauggaa

SEQ ID NO: 1931887 - RNA, 16 nt, Human
ccuugaacuggguacu

SEQ ID NO: 1931888 - RNA, 17 nt, Human
ccuugaacuuugaccuc

SEQ ID NO: 1931889 - RNA, 17 nt, Human
ccuugaaugaugccaug

SEQ ID NO: 1931890 - RNA, 19 nt, Human
ccuugaacuuugaccucug

SEQ ID NO: 1931891 - RNA, 14 nt, Human
ccuugaacugggua

SEQ ID NO: 1931892 - RNA, 22 nt, Human
ccuugaaaacacuguucucugc

SEQ ID NO: 1931893 - RNA, 19 nt, Human
ccuugaaaacacuguucuc

SEQ ID NO: 1931894 - RNA, 21 nt, Human
ccuugaaaacacuguucucug

SEQ ID NO: 1931895 - RNA, 18 nt, Human
ccuucgcuccugugucuu

SEQ ID NO: 1931896 - RNA, 15 nt, Human
ccuucgcuccugugu

SEQ ID NO: 1931897 - RNA, 14 nt, Human
ccuucgcuccugug

SEQ ID NO: 1931898 - RNA, 13 nt, Human
ccuucgcuccugu

SEQ ID NO: 1931899 - RNA, 15 nt, Human
ccuugaaaacacugu

SEQ ID NO: 1931900 - RNA, 17 nt, Human
ccuugacagggcacacc

SEQ ID NO: 1931901 - RNA, 15 nt, Human
ccuugacagggcaca

SEQ ID NO: 1931902 - RNA, 19 nt, Human
ccuugaccauucuccaccu

SEQ ID NO: 1931903 - RNA, 20 nt, Human
ccuugaccauucuccaccug

SEQ ID NO: 1931904 - RNA, 14 nt, Human
ccuugacagggcac

SEQ ID NO: 1931905 - RNA, 12 nt, Human
ccuugaaugugg

SEQ ID NO: 1931906 - RNA, 23 nt, Human
ccuugacaaagucaagccacaug

SEQ ID NO: 1931907 - RNA, 21 nt, Human
ccuugacaaagucaagccaca

SEQ ID NO: 1931908 - RNA, 21 nt, Human
ccuugaccauucuccaccugc

SEQ ID NO: 1931909 - RNA, 22 nt, Human
ccuugaguugauucagcucugc

SEQ ID NO: 1931910 - RNA, 23 nt, Human
ccuugaguugauucagcucugca

SEQ ID NO: 1931911 - RNA, 19 nt, Human
ccuuggauuguccccgacc

SEQ ID NO: 1931912 - RNA, 15 nt, Human
ccuuggcaccagaca

SEQ ID NO: 1931913 - RNA, 20 nt, Human
ccuuggcaccagacacccag

SEQ ID NO: 1931914 - RNA, 21 nt, Human
ccuuggcaccagacacccagg

SEQ ID NO: 1931915 - RNA, 22 nt, Human
ccuuggcaccagacacccagga

SEQ ID NO: 1931916 - RNA, 23 nt, Human
ccuuggcaccagacacccaggac

SEQ ID NO: 1931917 - RNA, 13 nt, Human
ccuugacagggca

SEQ ID NO: 1931918 - RNA, 11 nt, Human
ccuuuggcuuc

SEQ ID NO: 1931919 - RNA, 20 nt, Human
ccuguaguugcguggacucu

SEQ ID NO: 1931920 - RNA, 19 nt, Human
ccuguaguugcguggacuc

SEQ ID NO: 1931921 - RNA, 18 nt, Human
ccuguaguugcguggacu

SEQ ID NO: 1931922 - RNA, 18 nt, Human
ccuguaggauuuuuuucu

SEQ ID NO: 1931923 - RNA, 21 nt, Human
ccuguagagugggagcugagu

SEQ ID NO: 1931924 - RNA, 19 nt, Human
ccuguagagugggagcuga

SEQ ID NO: 1931925 - RNA, 23 nt, Human
ccuguagagugggagcugagugg

SEQ ID NO: 1931926 - RNA, 13 nt, Human
ccuggugcugcug

SEQ ID NO: 1931927 - RNA, 12 nt, Human
ccuggugcugcu

SEQ ID NO: 1931928 - RNA, 13 nt, Human
ccugguggcagcu

SEQ ID NO: 1931929 - RNA, 12 nt, Human
ccugguggcagc

SEQ ID NO: 1931930 - RNA, 14 nt, Human
ccugguggcagcuc

SEQ ID NO: 1931931 - RNA, 16 nt, Human
ccugguggcagcucac

SEQ ID NO: 1931932 - RNA, 17 nt, Human
ccugguggcagcucacc

SEQ ID NO: 1931933 - RNA, 18 nt, Human
ccugguggcagcucaccu

SEQ ID NO: 1931934 - RNA, 20 nt, Human
ccuguaauccuagcacuuug

SEQ ID NO: 1931935 - RNA, 23 nt, Human
ccuguaaucccagcacuuuggga

SEQ ID NO: 1931936 - RNA, 13 nt, Human
ccuguccucccag

SEQ ID NO: 1931937 - RNA, 22 nt, Human
ccuguccucccagcuccucacu

SEQ ID NO: 1931938 - RNA, 21 nt, Human
ccuguccuccaacaccaagca

SEQ ID NO: 1931939 - RNA, 22 nt, Human
ccuguccuccaacaccaagcac

SEQ ID NO: 1931940 - RNA, 13 nt, Human
ccuguccuccaac

SEQ ID NO: 1931941 - RNA, 22 nt, Human
ccugugagcuaggaauuguguu

SEQ ID NO: 1931942 - RNA, 15 nt, Human
ccugugagcccagcu

SEQ ID NO: 1931943 - RNA, 17 nt, Human
ccugugagcccagcugg

SEQ ID NO: 1931944 - RNA, 20 nt, Human
ccugugaguacuacaguccu

SEQ ID NO: 1931945 - RNA, 20 nt, Human
ccugugagcccagcuggguc

SEQ ID NO: 1931946 - RNA, 16 nt, Human
ccugucccccugacaa

SEQ ID NO: 1931947 - RNA, 19 nt, Human
ccuguccagcuccaaccug

SEQ ID NO: 1931948 - RNA, 17 nt, Human
ccugucccccugacaac

SEQ ID NO: 1931949 - RNA, 18 nt, Human
ccuguccccgcacugggc

SEQ ID NO: 1931950 - RNA, 13 nt, Human
ccuguccagcucc

SEQ ID NO: 1931951 - RNA, 14 nt, Human
ccuguccagcucca

SEQ ID NO: 1931952 - RNA, 15 nt, Human
ccuguccagcuccaa

SEQ ID NO: 1931953 - RNA, 20 nt, Human
ccugugcauguaugucuugg

SEQ ID NO: 1931954 - RNA, 17 nt, Human
ccugugcauguaugucu

SEQ ID NO: 1931955 - RNA, 14 nt, Human
ccugugcauguaug

SEQ ID NO: 1931956 - RNA, 16 nt, Human
ccugugccuccaucag

SEQ ID NO: 1931957 - RNA, 19 nt, Human
ccugugccucugggacugg

SEQ ID NO: 1931958 - RNA, 15 nt, Human
ccugugccucuggga

SEQ ID NO: 1931959 - RNA, 17 nt, Human
ccugugccucugggacu

SEQ ID NO: 1931960 - RNA, 22 nt, Human
ccugugauggggcccugccucc

SEQ ID NO: 1931961 - RNA, 20 nt, Human
ccugugauggggcccugccu

SEQ ID NO: 1931962 - RNA, 21 nt, Human
ccugugauggggcccugccuc

SEQ ID NO: 1931963 - RNA, 17 nt, Human
ccugugauggggcccug

SEQ ID NO: 1931964 - RNA, 18 nt, Human
ccugugauggggcccugc

SEQ ID NO: 1931965 - RNA, 19 nt, Human
ccugugauggggcccugcc

SEQ ID NO: 1931966 - RNA, 18 nt, Human
ccuggcaugggaaugaau

SEQ ID NO: 1931967 - RNA, 23 nt, Human
ccuggcaugggaaugaaugucag

SEQ ID NO: 1931968 - RNA, 15 nt, Human
ccuggccaucccaca

SEQ ID NO: 1931969 - RNA, 14 nt, Human
ccuggccaucccac

SEQ ID NO: 1931970 - RNA, 12 nt, Human
ccuggcggggug

SEQ ID NO: 1931971 - RNA, 14 nt, Human
ccuggccccucagg

SEQ ID NO: 1931972 - RNA, 16 nt, Human
ccuggccccucagggu

SEQ ID NO: 1931973 - RNA, 12 nt, Human
ccugggcagaag

SEQ ID NO: 1931974 - RNA, 14 nt, Human
ccugggcagaagga

SEQ ID NO: 1931975 - RNA, 13 nt, Human
ccugggaggcucu

SEQ ID NO: 1931976 - RNA, 21 nt, Human
ccugggaggcucuggagccca

SEQ ID NO: 1931977 - RNA, 20 nt, Human
ccugggaggucaaggcugca

SEQ ID NO: 1931978 - RNA, 23 nt, Human
ccugggaggcgggcgcacugccu

SEQ ID NO: 1931979 - RNA, 16 nt, Human
ccugggaucccucauc

SEQ ID NO: 1931980 - RNA, 20 nt, Human
ccugggaucccucauccuca

SEQ ID NO: 1931981 - RNA, 21 nt, Human
ccuggcacugcuuccagugag

SEQ ID NO: 1931982 - RNA, 16 nt, Human
ccuggcagccccuguu

SEQ ID NO: 1931983 - RNA, 14 nt, Human
ccuggcagccccug

SEQ ID NO: 1931984 - RNA, 16 nt, Human
ccuggcaugggaauga

SEQ ID NO: 1931985 - RNA, 17 nt, Human
ccuggcaugggaaugaa

SEQ ID NO: 1931986 - RNA, 20 nt, Human
ccuggcacugcuuccaguga

SEQ ID NO: 1931987 - RNA, 17 nt, Human
ccuggcacugcuuccag

SEQ ID NO: 1931988 - RNA, 17 nt, Human
ccuggagcccagaggag

SEQ ID NO: 1931989 - RNA, 14 nt, Human
ccuggagcccagag

SEQ ID NO: 1931990 - RNA, 13 nt, Human
ccuggagcccaga

SEQ ID NO: 1931991 - RNA, 15 nt, Human
ccuggacuagaggga

SEQ ID NO: 1931992 - RNA, 22 nt, Human
ccuggacuagagggaccucucc

SEQ ID NO: 1931993 - RNA, 17 nt, Human
ccuggacugugugcuca

SEQ ID NO: 1931994 - RNA, 20 nt, Human
ccuggacugugugcucagga

SEQ ID NO: 1931995 - RNA, 13 nt, Human
ccuggacccugug

SEQ ID NO: 1931996 - RNA, 14 nt, Human
ccuggacccugugg

SEQ ID NO: 1931997 - RNA, 19 nt, Human
ccugcugguucaggguugg

SEQ ID NO: 1931998 - RNA, 21 nt, Human
ccugcuguaaauuuggcuucu

SEQ ID NO: 1931999 - RNA, 15 nt, Human
ccugcuuccauggcc

SEQ ID NO: 1932000 - RNA, 13 nt, Human
ccugcugguucag

SEQ ID NO: 1932001 - RNA, 20 nt, Human
ccugcuuuuuauggccugug

SEQ ID NO: 1932002 - RNA, 17 nt, Human
ccugcuaauuccccaga

SEQ ID NO: 1932003 - RNA, 16 nt, Human
ccugcuccagaccuga

SEQ ID NO: 1932004 - RNA, 22 nt, Human
ccugcuccagaccugauccugg

SEQ ID NO: 1932005 - RNA, 12 nt, Human
ccugcuccagcu

SEQ ID NO: 1932006 - RNA, 13 nt, Human
ccugcuccagcug

SEQ ID NO: 1932007 - RNA, 14 nt, Human
ccugcuccagcugu

SEQ ID NO: 1932008 - RNA, 22 nt, Human
ccugcuccagcuguucagcugg

SEQ ID NO: 1932009 - RNA, 18 nt, Human
ccugcaacaccuuguuuc

SEQ ID NO: 1932010 - RNA, 18 nt, Human
ccugauuuaggagaagcc

SEQ ID NO: 1932011 - RNA, 19 nt, Human
ccugauuuaggagaagcca

SEQ ID NO: 1932012 - RNA, 20 nt, Human
ccugauuuaggagaagccag

SEQ ID NO: 1932013 - RNA, 21 nt, Human
ccugauuuaggagaagccagg

SEQ ID NO: 1932014 - RNA, 22 nt, Human
ccugauuuaggagaagccagga

SEQ ID NO: 1932015 - RNA, 18 nt, Human
ccugauuuagauaugcaa

SEQ ID NO: 1932016 - RNA, 19 nt, Human
ccugcaacaccuuguuucc

SEQ ID NO: 1932017 - RNA, 16 nt, Human
ccugcaaccugauugu

SEQ ID NO: 1932018 - RNA, 23 nt, Human
ccugcgucucauacucaccucac

SEQ ID NO: 1932019 - RNA, 15 nt, Human
ccuccuggcccaggu

SEQ ID NO: 1932020 - RNA, 13 nt, Human
ccuccugggcuaa

SEQ ID NO: 1932021 - RNA, 17 nt, Human
ccuccugggaaugaagc

SEQ ID NO: 1932022 - RNA, 22 nt, Human
ccuccugugugugcgccuacag

SEQ ID NO: 1932023 - RNA, 15 nt, Human
ccuccugugugugcg

SEQ ID NO: 1932024 - RNA, 13 nt, Human
ccuccugugugug

SEQ ID NO: 1932025 - RNA, 13 nt, Human
ccuccugccucga

SEQ ID NO: 1932026 - RNA, 16 nt, Human
ccuccccucucugcac

SEQ ID NO: 1932027 - RNA, 17 nt, Human
ccuccccucuccuuccu

SEQ ID NO: 1932028 - RNA, 13 nt, Human
ccucccucccucu

SEQ ID NO: 1932029 - RNA, 15 nt, Human
ccucccucccucuuu

SEQ ID NO: 1932030 - RNA, 16 nt, Human
ccucccucccucuuuc

SEQ ID NO: 1932031 - RNA, 19 nt, Human
ccucccugaagccuuugca

SEQ ID NO: 1932032 - RNA, 14 nt, Human
ccucccugcaucug

SEQ ID NO: 1932033 - RNA, 20 nt, Human
ccucccugcaucugaccagc

SEQ ID NO: 1932034 - RNA, 21 nt, Human
ccucccugcaucugaccagca

SEQ ID NO: 1932035 - RNA, 22 nt, Human
ccucccugcaucugaccagcag

SEQ ID NO: 1932036 - RNA, 13 nt, Human
ccuccucccugca

SEQ ID NO: 1932037 - RNA, 14 nt, Human
ccuccucccugcau

SEQ ID NO: 1932038 - RNA, 17 nt, Human
ccuccucccugcaucug

SEQ ID NO: 1932039 - RNA, 16 nt, Human
ccuccucccugcaucu

SEQ ID NO: 1932040 - RNA, 11 nt, Human
ccucagggcac

SEQ ID NO: 1932041 - RNA, 23 nt, Human
ccucaggccugggggcugggcag

SEQ ID NO: 1932042 - RNA, 19 nt, Human
ccucaggccucugugccgc

SEQ ID NO: 1932043 - RNA, 14 nt, Human
ccucagggucccug

SEQ ID NO: 1932044 - RNA, 11 nt, Human
ccucaggccug

SEQ ID NO: 1932045 - RNA, 11 nt, Human
ccucagccaga

SEQ ID NO: 1932046 - RNA, 15 nt, Human
ccucagccagagaag

SEQ ID NO: 1932047 - RNA, 17 nt, Human
ccucagccagagaagcu

SEQ ID NO: 1932048 - RNA, 16 nt, Human
ccucagccagagaagc

SEQ ID NO: 1932049 - RNA, 14 nt, Human
ccucaggccucugu

SEQ ID NO: 1932050 - RNA, 14 nt, Human
ccucaggccugggg

SEQ ID NO: 1932051 - RNA, 21 nt, Human
ccucaggccugggggcugggc

SEQ ID NO: 1932052 - RNA, 14 nt, Human
ccucagcauccugg

SEQ ID NO: 1932053 - RNA, 17 nt, Human
ccucagcauccuggcac

SEQ ID NO: 1932054 - RNA, 16 nt, Human
ccucagcauccuggca

SEQ ID NO: 1932055 - RNA, 19 nt, Human
ccucaggugauccacccac

SEQ ID NO: 1932056 - RNA, 17 nt, Human
ccucaggugauccaccc

SEQ ID NO: 1932057 - RNA, 22 nt, Human
ccucaggugauccacccaccuc

SEQ ID NO: 1932058 - RNA, 11 nt, Human
ccucagguggc

SEQ ID NO: 1932059 - RNA, 16 nt, Human
ccucaggugagaagca

SEQ ID NO: 1932060 - RNA, 15 nt, Human
ccucagggucccugg

SEQ ID NO: 1932061 - RNA, 15 nt, Human
ccucagucuggcccu

SEQ ID NO: 1932062 - RNA, 12 nt, Human
ccucagguggcc

SEQ ID NO: 1932063 - RNA, 15 nt, Human
ccucagguggccaug

SEQ ID NO: 1932064 - RNA, 16 nt, Human
ccucagguggccaugc

SEQ ID NO: 1932065 - RNA, 18 nt, Human
ccucagguggccaugccu

SEQ ID NO: 1932066 - RNA, 21 nt, Human
ccucagguggccaugccucag

SEQ ID NO: 1932067 - RNA, 19 nt, Human
ccucucccauugucccucu

SEQ ID NO: 1932068 - RNA, 19 nt, Human
ccucuccccauucggugug

SEQ ID NO: 1932069 - RNA, 16 nt, Human
ccucugacacacagcu

SEQ ID NO: 1932070 - RNA, 23 nt, Human
ccucugaaaaccaauguucucuc

SEQ ID NO: 1932071 - RNA, 20 nt, Human
ccucucuuauagaauauuua

SEQ ID NO: 1932072 - RNA, 12 nt, Human
ccucucccaggg

SEQ ID NO: 1932073 - RNA, 12 nt, Human
ccucucccauca

SEQ ID NO: 1932074 - RNA, 18 nt, Human
ccucuccccagcccagag

SEQ ID NO: 1932075 - RNA, 19 nt, Human
ccucuccccagcccagaga

SEQ ID NO: 1932076 - RNA, 20 nt, Human
ccucuccccagcccagagac

SEQ ID NO: 1932077 - RNA, 21 nt, Human
ccucuccccagcccagagaca

SEQ ID NO: 1932078 - RNA, 23 nt, Human
ccuccugugugugcgccuacagg

SEQ ID NO: 1932079 - RNA, 12 nt, Human
ccuccuucagac

SEQ ID NO: 1932080 - RNA, 13 nt, Human
ccuccuucagaca

SEQ ID NO: 1932081 - RNA, 12 nt, Human
ccucugggacug

SEQ ID NO: 1932082 - RNA, 14 nt, Human
ccucugcuuugaaa

SEQ ID NO: 1932083 - RNA, 16 nt, Human
ccucuggaaagcaaag

SEQ ID NO: 1932084 - RNA, 13 nt, Human
ccucuggaguggc

SEQ ID NO: 1932085 - RNA, 14 nt, Human
ccucuggaguggcc

SEQ ID NO: 1932086 - RNA, 15 nt, Human
ccucuggaguggcca

SEQ ID NO: 1932087 - RNA, 16 nt, Human
ccucuggaguggccac

SEQ ID NO: 1932088 - RNA, 21 nt, Human
ccucuggaguggccacuaagc

SEQ ID NO: 1932089 - RNA, 18 nt, Human
ccucugacacacagcucu

SEQ ID NO: 1932090 - RNA, 17 nt, Human
ccucugacacacagcuc

SEQ ID NO: 1932091 - RNA, 11 nt, Human
ccucugcacaa

SEQ ID NO: 1932092 - RNA, 15 nt, Human
ccucugcacaagcug

SEQ ID NO: 1932093 - RNA, 20 nt, Human
ccucugcacaagcugcaccc

SEQ ID NO: 1932094 - RNA, 17 nt, Human
ccucugcacaagcugca

SEQ ID NO: 1932095 - RNA, 19 nt, Human
ccucugcacaagcugcacc

SEQ ID NO: 1932096 - RNA, 22 nt, Human
ccucugcacuccccugcugggu

SEQ ID NO: 1932097 - RNA, 14 nt, Human
ccucugcacucccc

SEQ ID NO: 1932098 - RNA, 19 nt, Human
ccucugcacuccccugcug

SEQ ID NO: 1932099 - RNA, 15 nt, Human
ccucugcacuccccu

SEQ ID NO: 1932100 - RNA, 20 nt, Human
ccucugcacuccccugcugg

SEQ ID NO: 1932101 - RNA, 21 nt, Human
ccucugcacuccccugcuggg

SEQ ID NO: 1932102 - RNA, 15 nt, Human
ccucucaguacuuug

SEQ ID NO: 1932103 - RNA, 19 nt, Human
ccucugugugcuccuccuu

SEQ ID NO: 1932104 - RNA, 14 nt, Human
ccucugugccuucu

SEQ ID NO: 1932105 - RNA, 21 nt, Human
ccucugugccuucuuuugauu

SEQ ID NO: 1932106 - RNA, 14 nt, Human
ccucuuagaaaaac

SEQ ID NO: 1932107 - RNA, 15 nt, Human
ccucuuaugggcugg

SEQ ID NO: 1932108 - RNA, 16 nt, Human
ccucuuaugggcuggg

SEQ ID NO: 1932109 - RNA, 14 nt, Human
ccucuuaugggcug

SEQ ID NO: 1932110 - RNA, 15 nt, Human
ccucugucagucaca

SEQ ID NO: 1932111 - RNA, 16 nt, Human
ccucugucagucacag

SEQ ID NO: 1932112 - RNA, 18 nt, Human
ccucugucagucacagcc

SEQ ID NO: 1932113 - RNA, 19 nt, Human
ccucugucagucacagcca

SEQ ID NO: 1932114 - RNA, 21 nt, Human
ccucugucagucacagccacc

SEQ ID NO: 1932115 - RNA, 19 nt, Human
ccucuguccccuucucuca

SEQ ID NO: 1932116 - RNA, 18 nt, Human
ccucuguccccuucucuc

SEQ ID NO: 1932117 - RNA, 17 nt, Human
ccucuguccccuucucu

SEQ ID NO: 1932118 - RNA, 14 nt, Human
ccucuguccccuuc

SEQ ID NO: 1932119 - RNA, 22 nt, Human
ccucuguccccuucucucaucu

SEQ ID NO: 1932120 - RNA, 21 nt, Human
ccucuguccccuucucucauc

SEQ ID NO: 1932121 - RNA, 14 nt, Human
ccucuguacagagc

SEQ ID NO: 1932122 - RNA, 15 nt, Human
ccucuguacagagcc

SEQ ID NO: 1932123 - RNA, 16 nt, Human
ccucuguacagagccc

SEQ ID NO: 1932124 - RNA, 17 nt, Human
ccucuguacagagccca

SEQ ID NO: 1932125 - RNA, 18 nt, Human
ccucuguacagagcccac

SEQ ID NO: 1932126 - RNA, 23 nt, Human
ccucuguacagagcccacgcccc

SEQ ID NO: 1932127 - RNA, 24 nt, Human
ccucugguuugccgguggugcagg

SEQ ID NO: 1932128 - RNA, 17 nt, Human
ccugaagucacacagug

SEQ ID NO: 1932129 - RNA, 16 nt, Human
ccugaagucacacagu

SEQ ID NO: 1932130 - RNA, 15 nt, Human
ccugaagucacacag

SEQ ID NO: 1932131 - RNA, 13 nt, Human
ccugaaggccccg

SEQ ID NO: 1932132 - RNA, 21 nt, Human
ccugaagacucauucuucugu

SEQ ID NO: 1932133 - RNA, 20 nt, Human
ccugaagcuaucguaaaauu

SEQ ID NO: 1932134 - RNA, 17 nt, Human
ccugaagaaccaguccc

SEQ ID NO: 1932135 - RNA, 22 nt, Human
ccugaagcuaucguaaaauuaa

SEQ ID NO: 1932136 - RNA, 23 nt, Human
ccugaagcuaucguaaaauuaag

SEQ ID NO: 1932137 - RNA, 20 nt, Human
ccugaacaggauauucucac

SEQ ID NO: 1932138 - RNA, 17 nt, Human
ccugaacugaacaccau

SEQ ID NO: 1932139 - RNA, 13 nt, Human
ccugaagaaccag

SEQ ID NO: 1932140 - RNA, 16 nt, Human
ccugaagaaccagucc

SEQ ID NO: 1932141 - RNA, 13 nt, Human
ccugaaccuagga

SEQ ID NO: 1932142 - RNA, 18 nt, Human
ccugaaagaggaaugaag

SEQ ID NO: 1932143 - RNA, 14 nt, Human
ccucuuuucucugc

SEQ ID NO: 1932144 - RNA, 23 nt, Human
ccugaaagaggaaugaaguacuc

SEQ ID NO: 1932145 - RNA, 22 nt, Human
ccucuuuggucuacacugugcu

SEQ ID NO: 1932146 - RNA, 17 nt, Human
ccucuuaugggcugggu

SEQ ID NO: 1932147 - RNA, 22 nt, Human
ccucucccauugucccucugcc

SEQ ID NO: 1932148 - RNA, 23 nt, Human
ccugauugugucucuugguccug

SEQ ID NO: 1932149 - RNA, 17 nt, Human
ccugaugcuucuucaga

SEQ ID NO: 1932150 - RNA, 18 nt, Human
ccugaugcuucuucagag

SEQ ID NO: 1932151 - RNA, 23 nt, Human
ccugaugcugacauucaccugcc

SEQ ID NO: 1932152 - RNA, 13 nt, Human
ccugaugcugaca

SEQ ID NO: 1932153 - RNA, 21 nt, Human
ccugaugcugacauucaccug

SEQ ID NO: 1932154 - RNA, 14 nt, Human
ccugaugcuucuuc

SEQ ID NO: 1932155 - RNA, 20 nt, Human
ccugaggcuccacuuggucu

SEQ ID NO: 1932156 - RNA, 18 nt, Human
ccugaggcuccacuuggu

SEQ ID NO: 1932157 - RNA, 12 nt, Human
ccugaggcccag

SEQ ID NO: 1932158 - RNA, 18 nt, Human
ccugaggcagguccccag

SEQ ID NO: 1932159 - RNA, 13 nt, Human
ccugaggcccaga

SEQ ID NO: 1932160 - RNA, 14 nt, Human
ccugaggcccagag

SEQ ID NO: 1932161 - RNA, 12 nt, Human
ccugacaacacu

SEQ ID NO: 1932162 - RNA, 14 nt, Human
ccugacaacacuca

SEQ ID NO: 1932163 - RNA, 15 nt, Human
ccugacaacacucau

SEQ ID NO: 1932164 - RNA, 16 nt, Human
ccugacaacacucauu

SEQ ID NO: 1932165 - RNA, 23 nt, Human
ccugaggcccuucucuccagccc

SEQ ID NO: 1932166 - RNA, 19 nt, Human
ccugaggcagguccccaga

SEQ ID NO: 1932167 - RNA, 21 nt, Human
ccugaggcccuucucuccagc

SEQ ID NO: 1932168 - RNA, 22 nt, Human
ccugaggcccuucucuccagcc

SEQ ID NO: 1932169 - RNA, 16 nt, Human
ccugaggcccuucucu

SEQ ID NO: 1932170 - RNA, 17 nt, Human
ccugaggcccuucucuc

SEQ ID NO: 1932171 - RNA, 19 nt, Human
ccugaggcccuucucucca

SEQ ID NO: 1932172 - RNA, 20 nt, Human
ccugaggcccuucucuccag

SEQ ID NO: 1932173 - RNA, 12 nt, Human
ccccacuggacu

SEQ ID NO: 1932174 - RNA, 19 nt, Human
ccccacuggacugaccugg

SEQ ID NO: 1932175 - RNA, 20 nt, Human
ccccacuggacugaccuggu

SEQ ID NO: 1932176 - RNA, 15 nt, Human
ccccacugaccagaa

SEQ ID NO: 1932177 - RNA, 19 nt, Human
ccccaccccugggggcucu

SEQ ID NO: 1932178 - RNA, 12 nt, Human
ccccaccccugg

SEQ ID NO: 1932179 - RNA, 20 nt, Human
ccccaccccugggggcucuc

SEQ ID NO: 1932180 - RNA, 14 nt, Human
ccccacugaccaga

SEQ ID NO: 1932181 - RNA, 12 nt, Human
ccccacugguga

SEQ ID NO: 1932182 - RNA, 13 nt, Human
ccccacuggugac

SEQ ID NO: 1932183 - RNA, 14 nt, Human
ccccacuggugaca

SEQ ID NO: 1932184 - RNA, 13 nt, Human
ccccagccucccu

SEQ ID NO: 1932185 - RNA, 15 nt, Human
ccccagccucccuga

SEQ ID NO: 1932186 - RNA, 17 nt, Human
ccccagcuaagaaccug

SEQ ID NO: 1932187 - RNA, 19 nt, Human
ccccagcuaagaaccugga

SEQ ID NO: 1932188 - RNA, 21 nt, Human
ccccagcuaagaaccuggaac

SEQ ID NO: 1932189 - RNA, 13 nt, Human
ccccaggaggcca

SEQ ID NO: 1932190 - RNA, 13 nt, Human
ccccaggaccagc

SEQ ID NO: 1932191 - RNA, 15 nt, Human
ccccaggaccagcuc

SEQ ID NO: 1932192 - RNA, 11 nt, Human
ccccaggacca

SEQ ID NO: 1932193 - RNA, 13 nt, Human
ccccagcuccggc

SEQ ID NO: 1932194 - RNA, 11 nt, Human
ccccagcuccg

SEQ ID NO: 1932195 - RNA, 14 nt, Human
ccccaggaggccag

SEQ ID NO: 1932196 - RNA, 15 nt, Human
ccccaggaggccagc

SEQ ID NO: 1932197 - RNA, 21 nt, Human
ccccaggaggccagccuugac

SEQ ID NO: 1932198 - RNA, 22 nt, Human
ccccaggaggccagccuugacc

SEQ ID NO: 1932199 - RNA, 16 nt, Human
ccccaggaccagcuca

SEQ ID NO: 1932200 - RNA, 12 nt, Human
cccccagcccca

SEQ ID NO: 1932201 - RNA, 15 nt, Human
cccccaggacugggc

SEQ ID NO: 1932202 - RNA, 13 nt, Human
cccccaggacugg

SEQ ID NO: 1932203 - RNA, 12 nt, Human
cccccaggacug

SEQ ID NO: 1932204 - RNA, 11 nt, Human
cccccaggacu

SEQ ID NO: 1932205 - RNA, 13 nt, Human
cccccagcacuga

SEQ ID NO: 1932206 - RNA, 18 nt, Human
cccccagcacugaggaag

SEQ ID NO: 1932207 - RNA, 17 nt, Human
cccccagcacugaggaa

SEQ ID NO: 1932208 - RNA, 15 nt, Human
cccccagcacugagg

SEQ ID NO: 1932209 - RNA, 18 nt, Human
cccccaugcacugugaag

SEQ ID NO: 1932210 - RNA, 17 nt, Human
cccccaggacugggcca

SEQ ID NO: 1932211 - RNA, 14 nt, Human
ccccccagcacuga

SEQ ID NO: 1932212 - RNA, 13 nt, Human
ccccccagcacug

SEQ ID NO: 1932213 - RNA, 14 nt, Human
ccccccaugcacug

SEQ ID NO: 1932214 - RNA, 12 nt, Human
cccccccuucca

SEQ ID NO: 1932215 - RNA, 13 nt, Human
cccccccuuccac

SEQ ID NO: 1932216 - RNA, 12 nt, Human
ccccccagcacu

SEQ ID NO: 1932217 - RNA, 14 nt, Human
cccccaugcacugu

SEQ ID NO: 1932218 - RNA, 12 nt, Human
ccccccaccccu

SEQ ID NO: 1932219 - RNA, 13 nt, Human
ccccccaccccug

SEQ ID NO: 1932220 - RNA, 14 nt, Human
ccccgucucuacua

SEQ ID NO: 1932221 - RNA, 15 nt, Human
cccccuggccucugu

SEQ ID NO: 1932222 - RNA, 19 nt, Human
cccccuggccucugugccu

SEQ ID NO: 1932223 - RNA, 22 nt, Human
cccccuggccucugugccuucu

SEQ ID NO: 1932224 - RNA, 13 nt, Human
cccccugcccucc

SEQ ID NO: 1932225 - RNA, 21 nt, Human
cccccgcugucagccauuccu

SEQ ID NO: 1932226 - RNA, 11 nt, Human
ccccccuucca

SEQ ID NO: 1932227 - RNA, 12 nt, Human
ccccccuuccac

SEQ ID NO: 1932228 - RNA, 13 nt, Human
ccccccuuccacu

SEQ ID NO: 1932229 - RNA, 15 nt, Human
cccccgcauccccug

SEQ ID NO: 1932230 - RNA, 18 nt, Human
cccccgcauccccugccu

SEQ ID NO: 1932231 - RNA, 12 nt, Human
cccccgcccccu

SEQ ID NO: 1932232 - RNA, 13 nt, Human
cccccgcccccug

SEQ ID NO: 1932233 - RNA, 14 nt, Human
cccccgcccccugc

SEQ ID NO: 1932234 - RNA, 16 nt, Human
cccccgcccccugccc

SEQ ID NO: 1932235 - RNA, 16 nt, Human
cccuguuuguuucuga

SEQ ID NO: 1932236 - RNA, 15 nt, Human
cccuguuuguuucug

SEQ ID NO: 1932237 - RNA, 18 nt, Human
cccugugggcccccaaau

SEQ ID NO: 1932238 - RNA, 21 nt, Human
cccuguagagugggagcugag

SEQ ID NO: 1932239 - RNA, 16 nt, Human
cccugugggcccccaa

SEQ ID NO: 1932240 - RNA, 19 nt, Human
cccugguggcagugggagc

SEQ ID NO: 1932241 - RNA, 16 nt, Human
cccugguggcaguggg

SEQ ID NO: 1932242 - RNA, 21 nt, Human
cccugguggcagugggagcug

SEQ ID NO: 1932243 - RNA, 17 nt, Human
ccccucagggucccugg

SEQ ID NO: 1932244 - RNA, 14 nt, Human
ccccuagccauuuu

SEQ ID NO: 1932245 - RNA, 19 nt, Human
ccccuagccauuuuuacug

SEQ ID NO: 1932246 - RNA, 18 nt, Human
ccccucagggucccuggu

SEQ ID NO: 1932247 - RNA, 20 nt, Human
ccccucagggucccuggugg

SEQ ID NO: 1932248 - RNA, 16 nt, Human
ccgcccgggcccagag

SEQ ID NO: 1932249 - RNA, 15 nt, Human
ccgcccgggcccaga

SEQ ID NO: 1932250 - RNA, 14 nt, Human
ccgcccgggcccag

SEQ ID NO: 1932251 - RNA, 18 nt, Human
ccgagaucacgccacugc

SEQ ID NO: 1932252 - RNA, 16 nt, Human
ccgagccuggcuccaa

SEQ ID NO: 1932253 - RNA, 19 nt, Human
ccgagccuggcuccaaacc

SEQ ID NO: 1932254 - RNA, 17 nt, Human
ccgaggccuucucugaa

SEQ ID NO: 1932255 - RNA, 19 nt, Human
cccuuuuuuggcugcugaa

SEQ ID NO: 1932256 - RNA, 17 nt, Human
ccgagaaggaagccucc

SEQ ID NO: 1932257 - RNA, 18 nt, Human
ccgagauagccaaggcca

SEQ ID NO: 1932258 - RNA, 19 nt, Human
ccgagauagccaaggccaa

SEQ ID NO: 1932259 - RNA, 22 nt, Human
ccgagauagccaaggccaaagg

SEQ ID NO: 1932260 - RNA, 17 nt, Human
cccuuuuuuggcugcug

SEQ ID NO: 1932261 - RNA, 18 nt, Human
cccuuuuuuggcugcuga

SEQ ID NO: 1932262 - RNA, 11 nt, Human
cccuuuuccuu

SEQ ID NO: 1932263 - RNA, 13 nt, Human
cccuuuucuguuu

SEQ ID NO: 1932264 - RNA, 17 nt, Human
cccuuuugcauucuccc

SEQ ID NO: 1932265 - RNA, 14 nt, Human
cccuuucuggcucu

SEQ ID NO: 1932266 - RNA, 22 nt, Human
cccuuucuccccugcccccagg

SEQ ID NO: 1932267 - RNA, 14 nt, Human
cccuuucuccccug

SEQ ID NO: 1932268 - RNA, 20 nt, Human
cccuuugacgccaucccagc

SEQ ID NO: 1932269 - RNA, 20 nt, Human
cccuuguggucccaccccac

SEQ ID NO: 1932270 - RNA, 18 nt, Human
cccuuguggucccacccc

SEQ ID NO: 1932271 - RNA, 18 nt, Human
cccuuggggagcaggcuc

SEQ ID NO: 1932272 - RNA, 14 nt, Human
cccuugugguccca

SEQ ID NO: 1932273 - RNA, 16 nt, Human
cccuuguggucccacc

SEQ ID NO: 1932274 - RNA, 14 nt, Human
cccuuggcugggac

SEQ ID NO: 1932275 - RNA, 22 nt, Human
cccuugccgucuaccugagggg

SEQ ID NO: 1932276 - RNA, 17 nt, Human
cccuugccgucuaccug

SEQ ID NO: 1932277 - RNA, 18 nt, Human
cccuugccgucuaccuga

SEQ ID NO: 1932278 - RNA, 19 nt, Human
cccuuaccucggugccuuc

SEQ ID NO: 1932279 - RNA, 14 nt, Human
ccuaaagcagccag

SEQ ID NO: 1932280 - RNA, 15 nt, Human
ccuaaagcagccagc

SEQ ID NO: 1932281 - RNA, 14 nt, Human
ccuaaaguguauuu

SEQ ID NO: 1932282 - RNA, 23 nt, Human
ccguuuccuuucauuuacugugg

SEQ ID NO: 1932283 - RNA, 22 nt, Human
ccguuugagaagaaaacaucua

SEQ ID NO: 1932284 - RNA, 21 nt, Human
ccuaaaccaaaaacugaaagu

SEQ ID NO: 1932285 - RNA, 10 nt, Human
ccgggcccag

SEQ ID NO: 1932286 - RNA, 16 nt, Human
ccgggcccagaggagc

SEQ ID NO: 1932287 - RNA, 13 nt, Human
ccgggcccagagg

SEQ ID NO: 1932288 - RNA, 20 nt, Human
ccgggcccagaggagcuggg

SEQ ID NO: 1932289 - RNA, 20 nt, Human
ccgggcacucagaagacacu

SEQ ID NO: 1932290 - RNA, 22 nt, Human
ccggcugcauacccgggcaggg

SEQ ID NO: 1932291 - RNA, 18 nt, Human
ccggcugcauacccgggc

SEQ ID NO: 1932292 - RNA, 12 nt, Human
ccggcuggccug

SEQ ID NO: 1932293 - RNA, 15 nt, Human
ccgggcacucagaag

SEQ ID NO: 1932294 - RNA, 13 nt, Human
ccggcuggccugg

SEQ ID NO: 1932295 - RNA, 22 nt, Human
ccgggaggcagagguugcagug

SEQ ID NO: 1932296 - RNA, 15 nt, Human
ccgcuucugccugca

SEQ ID NO: 1932297 - RNA, 23 nt, Human
ccgcuuucuacccagcgagcccu

SEQ ID NO: 1932298 - RNA, 13 nt, Human
ccuagaggcccca

SEQ ID NO: 1932299 - RNA, 13 nt, Human
ccuagagggaggg

SEQ ID NO: 1932300 - RNA, 15 nt, Human
ccuagagggaggggc

SEQ ID NO: 1932301 - RNA, 16 nt, Human
ccuagagggaggggcc

SEQ ID NO: 1932302 - RNA, 16 nt, Human
ccuaucaccuauuucc

SEQ ID NO: 1932303 - RNA, 17 nt, Human
ccuaucaccuauuucca

SEQ ID NO: 1932304 - RNA, 17 nt, Human
ccucacaguccuuacca

SEQ ID NO: 1932305 - RNA, 15 nt, Human
ccucacaggccccag

SEQ ID NO: 1932306 - RNA, 22 nt, Human
ccucacacacagacucauauua

SEQ ID NO: 1932307 - RNA, 16 nt, Human
ccuauguaguccgugc

SEQ ID NO: 1932308 - RNA, 18 nt, Human
ccuauguaguccgugcug

SEQ ID NO: 1932309 - RNA, 15 nt, Human
ccucaccccacugug

SEQ ID NO: 1932310 - RNA, 15 nt, Human
ccucaccccugguuc

SEQ ID NO: 1932311 - RNA, 20 nt, Human
ccucacaguccuuaccagca

SEQ ID NO: 1932312 - RNA, 22 nt, Human
ccucacaguccuuaccagcaga

SEQ ID NO: 1932313 - RNA, 12 nt, Human
ccucaccccacu

SEQ ID NO: 1932314 - RNA, 17 nt, Human
ccucaccuuucccaucu

SEQ ID NO: 1932315 - RNA, 15 nt, Human
ccucaccuuggcacc

SEQ ID NO: 1932316 - RNA, 16 nt, Human
ccucaccuuggcacca

SEQ ID NO: 1932317 - RNA, 21 nt, Human
ccucaccuuggcaccagacac

SEQ ID NO: 1932318 - RNA, 23 nt, Human
ccucaccccugguucucaucuuu

SEQ ID NO: 1932319 - RNA, 22 nt, Human
ccucaccccugguucucaucuu

SEQ ID NO: 1932320 - RNA, 21 nt, Human
ccucaccccugguucucaucu

SEQ ID NO: 1932321 - RNA, 20 nt, Human
ccucaccccugguucucauc

SEQ ID NO: 1932322 - RNA, 17 nt, Human
ccuagagggaggggccu

SEQ ID NO: 1932323 - RNA, 18 nt, Human
cugcagggccgccaggga

SEQ ID NO: 1932324 - RNA, 19 nt, Human
cugcagggccgccagggag

SEQ ID NO: 1932325 - RNA, 16 nt, Human
cugcaggggcauggga

SEQ ID NO: 1932326 - RNA, 20 nt, Human
cugccacccuggggagaaag

SEQ ID NO: 1932327 - RNA, 16 nt, Human
cugccacccuggggag

SEQ ID NO: 1932328 - RNA, 15 nt, Human
cugccacccugggga

SEQ ID NO: 1932329 - RNA, 14 nt, Human
cugccacccaccuc

SEQ ID NO: 1932330 - RNA, 15 nt, Human
cugccacccaccucc

SEQ ID NO: 1932331 - RNA, 17 nt, Human
cugccacccaccucccu

SEQ ID NO: 1932332 - RNA, 19 nt, Human
cugccacccaccucccugc

SEQ ID NO: 1932333 - RNA, 18 nt, Human
cugccacccaccucccug

SEQ ID NO: 1932334 - RNA, 17 nt, Human
cugccaugccagcuuau

SEQ ID NO: 1932335 - RNA, 19 nt, Human
cugccaugccagcuuaucu

SEQ ID NO: 1932336 - RNA, 19 nt, Human
cugccagccgagauagcca

SEQ ID NO: 1932337 - RNA, 15 nt, Human
cugccaggaagccag

SEQ ID NO: 1932338 - RNA, 16 nt, Human
cugccaggaagccagc

SEQ ID NO: 1932339 - RNA, 18 nt, Human
cugccaggaagccagcag

SEQ ID NO: 1932340 - RNA, 19 nt, Human
cugccaggaagccagcagg

SEQ ID NO: 1932341 - RNA, 16 nt, Human
cugccauuucugagau

SEQ ID NO: 1932342 - RNA, 17 nt, Human
cugcccaacccuucccu

SEQ ID NO: 1932343 - RNA, 20 nt, Human
cugcccaacccuucccucac

SEQ ID NO: 1932344 - RNA, 13 nt, Human
cugcccaggcccc

SEQ ID NO: 1932345 - RNA, 14 nt, Human
cugccccuggcagc

SEQ ID NO: 1932346 - RNA, 15 nt, Human
cugccccuggcagcc

SEQ ID NO: 1932347 - RNA, 16 nt, Human
cugccccuggcagccc

SEQ ID NO: 1932348 - RNA, 17 nt, Human
cugccccuggcagcccc

SEQ ID NO: 1932349 - RNA, 15 nt, Human
cugcccggcugcgga

SEQ ID NO: 1932350 - RNA, 19 nt, Human
cugcccuccaagaccuucu

SEQ ID NO: 1932351 - RNA, 11 nt, Human
cugcccggcug

SEQ ID NO: 1932352 - RNA, 14 nt, Human
cugcccuccccucu

SEQ ID NO: 1932353 - RNA, 22 nt, Human
cugcccuccagcucuuuccucc

SEQ ID NO: 1932354 - RNA, 10 nt, Human
cugcccuccc

SEQ ID NO: 1932355 - RNA, 20 nt, Human
cugcccuccccucucugcac

SEQ ID NO: 1932356 - RNA, 13 nt, Human
cugcccugcccac

SEQ ID NO: 1932357 - RNA, 14 nt, Human
cugcccugcccacc

SEQ ID NO: 1932358 - RNA, 15 nt, Human
cugcccugcccaccu

SEQ ID NO: 1932359 - RNA, 16 nt, Human
cugcccugcccaccug

SEQ ID NO: 1932360 - RNA, 21 nt, Human
cugcuccccucugcacggacc

SEQ ID NO: 1932361 - RNA, 15 nt, Human
cugcuccagcuguuc

SEQ ID NO: 1932362 - RNA, 21 nt, Human
cugcuccagaccugauccugg

SEQ ID NO: 1932363 - RNA, 22 nt, Human
cugcuccagaccugauccugga

SEQ ID NO: 1932364 - RNA, 17 nt, Human
cugcuccucuccccagc

SEQ ID NO: 1932365 - RNA, 16 nt, Human
cugcuccucuccccag

SEQ ID NO: 1932366 - RNA, 14 nt, Human
cugcuccuagaggg

SEQ ID NO: 1932367 - RNA, 20 nt, Human
cugcucucuuuuucuccagg

SEQ ID NO: 1932368 - RNA, 24 nt, Human
cugcucucuuuuucuccaggguca

SEQ ID NO: 1932369 - RNA, 20 nt, Human
cugcucuccuuccuggagcc

SEQ ID NO: 1932370 - RNA, 19 nt, Human
cugcucuccuuccuggagc

SEQ ID NO: 1932371 - RNA, 17 nt, Human
cugcucuccuuccugga

SEQ ID NO: 1932372 - RNA, 16 nt, Human
cugcucuccuuccugg

SEQ ID NO: 1932373 - RNA, 18 nt, Human
cugcuccucuccccagca

SEQ ID NO: 1932374 - RNA, 14 nt, Human
cugcuccagcuguu

SEQ ID NO: 1932375 - RNA, 13 nt, Human
cugcuccagaccu

SEQ ID NO: 1932376 - RNA, 14 nt, Human
cugcuccagaccug

SEQ ID NO: 1932377 - RNA, 15 nt, Human
cugcuccagaccuga

SEQ ID NO: 1932378 - RNA, 16 nt, Human
cugcgguccacccagg

SEQ ID NO: 1932379 - RNA, 17 nt, Human
cugcgguccacccagga

SEQ ID NO: 1932380 - RNA, 21 nt, Human
cugcggaaugaaccacaucuu

SEQ ID NO: 1932381 - RNA, 15 nt, Human
cugcgguccacccag

SEQ ID NO: 1932382 - RNA, 22 nt, Human
cugcgguagaugggagggaggc

SEQ ID NO: 1932383 - RNA, 20 nt, Human
cugcggaaugaaccacaucu

SEQ ID NO: 1932384 - RNA, 13 nt, Human
cugccucagccuc

SEQ ID NO: 1932385 - RNA, 14 nt, Human
cugccucagccucc

SEQ ID NO: 1932386 - RNA, 12 nt, Human
cugccucaggac

SEQ ID NO: 1932387 - RNA, 11 nt, Human
cugccucagga

SEQ ID NO: 1932388 - RNA, 13 nt, Human
cugccucaggacu

SEQ ID NO: 1932389 - RNA, 14 nt, Human
cugccucaggacug

SEQ ID NO: 1932390 - RNA, 23 nt, Human
cugccucaggaggcaggaccuuc

SEQ ID NO: 1932391 - RNA, 22 nt, Human
cugccucaggaggcaggaccuu

SEQ ID NO: 1932392 - RNA, 15 nt, Human
cugccucaggccucu

SEQ ID NO: 1932393 - RNA, 16 nt, Human
cugccucaggccucug

SEQ ID NO: 1932394 - RNA, 17 nt, Human
cugccucaggccucugu

SEQ ID NO: 1932395 - RNA, 12 nt, Human
cugccucauuua

SEQ ID NO: 1932396 - RNA, 13 nt, Human
cugccucauuuag

SEQ ID NO: 1932397 - RNA, 13 nt, Human
cugccuauuuuaa

SEQ ID NO: 1932398 - RNA, 15 nt, Human
cugccuaagugcagc

SEQ ID NO: 1932399 - RNA, 15 nt, Human
cugccugcccaggcc

SEQ ID NO: 1932400 - RNA, 14 nt, Human
cugccugcccaggc

SEQ ID NO: 1932401 - RNA, 13 nt, Human
cugccugcccagg

SEQ ID NO: 1932402 - RNA, 12 nt, Human
cugccucucugc

SEQ ID NO: 1932403 - RNA, 13 nt, Human
cugccucucugca

SEQ ID NO: 1932404 - RNA, 14 nt, Human
cugccucucugcag

SEQ ID NO: 1932405 - RNA, 13 nt, Human
cugccucuucucu

SEQ ID NO: 1932406 - RNA, 14 nt, Human
cugccucuucucua

SEQ ID NO: 1932407 - RNA, 20 nt, Human
cugcagggacacgggcagcc

SEQ ID NO: 1932408 - RNA, 15 nt, Human
cugcagggacacggg

SEQ ID NO: 1932409 - RNA, 22 nt, Human
cugcagggaguccgaaagggac

SEQ ID NO: 1932410 - RNA, 20 nt, Human
cugcagccucaaccuccugg

SEQ ID NO: 1932411 - RNA, 19 nt, Human
cugcagccucaaccuccug

SEQ ID NO: 1932412 - RNA, 22 nt, Human
cugcagccucaaccuccugggc

SEQ ID NO: 1932413 - RNA, 11 nt, Human
cugcagccuca

SEQ ID NO: 1932414 - RNA, 23 nt, Human
cugcagccaggccacuggccccu

SEQ ID NO: 1932415 - RNA, 22 nt, Human
cugcagccaggccacuggcccc

SEQ ID NO: 1932416 - RNA, 17 nt, Human
cugcagccaggccacug

SEQ ID NO: 1932417 - RNA, 16 nt, Human
cugcagccaggccacu

SEQ ID NO: 1932418 - RNA, 15 nt, Human
cugcagccaggccac

SEQ ID NO: 1932419 - RNA, 23 nt, Human
cugcagaagacaguauggcagcu

SEQ ID NO: 1932420 - RNA, 13 nt, Human
cugcagaagacag

SEQ ID NO: 1932421 - RNA, 18 nt, Human
cugcagagcagugggccu

SEQ ID NO: 1932422 - RNA, 23 nt, Human
cugcagagcagugggccuggcca

SEQ ID NO: 1932423 - RNA, 21 nt, Human
cugcagagcagugggccuggc

SEQ ID NO: 1932424 - RNA, 23 nt, Human
cugcagagcugcgggcugggugu

SEQ ID NO: 1932425 - RNA, 21 nt, Human
cugcagagcugcgggcugggu

SEQ ID NO: 1932426 - RNA, 12 nt, Human
cugcagagcugc

SEQ ID NO: 1932427 - RNA, 17 nt, Human
cugcacuugcagacucu

SEQ ID NO: 1932428 - RNA, 16 nt, Human
cugcacuugcagacuc

SEQ ID NO: 1932429 - RNA, 14 nt, Human
cugcacuugcagac

SEQ ID NO: 1932430 - RNA, 17 nt, Human
cugcaccggcuggccug

SEQ ID NO: 1932431 - RNA, 18 nt, Human
cugcaccggcuggccugg

SEQ ID NO: 1932432 - RNA, 19 nt, Human
cugcaccggcuggccuggc

SEQ ID NO: 1932433 - RNA, 20 nt, Human
cugcaccggcuggccuggcc

SEQ ID NO: 1932434 - RNA, 22 nt, Human
cugcacaagccagggugugucu

SEQ ID NO: 1932435 - RNA, 19 nt, Human
cugcacaagccagggugug

SEQ ID NO: 1932436 - RNA, 18 nt, Human
cugcacaagccagggugu

SEQ ID NO: 1932437 - RNA, 18 nt, Human
cugcacaagcugcacccu

SEQ ID NO: 1932438 - RNA, 13 nt, Human
cugcacaagcugc

SEQ ID NO: 1932439 - RNA, 14 nt, Human
cugcacaagcugca

SEQ ID NO: 1932440 - RNA, 15 nt, Human
cugcacaagcugcac

SEQ ID NO: 1932441 - RNA, 16 nt, Human
cugcacaagcugcacc

SEQ ID NO: 1932442 - RNA, 17 nt, Human
cugcacccucaggcagg

SEQ ID NO: 1932443 - RNA, 18 nt, Human
cugcacccucaggcaggu

SEQ ID NO: 1932444 - RNA, 18 nt, Human
cugcaccauuuaaaaaca

SEQ ID NO: 1932445 - RNA, 15 nt, Human
cugcacaagccaggg

SEQ ID NO: 1932446 - RNA, 15 nt, Human
cugauucccaagcuc

SEQ ID NO: 1932447 - RNA, 18 nt, Human
cugauucccaagcucugc

SEQ ID NO: 1932448 - RNA, 17 nt, Human
cugauucccaagcucug

SEQ ID NO: 1932449 - RNA, 20 nt, Human
cugauucccaagcucugcuc

SEQ ID NO: 1932450 - RNA, 19 nt, Human
cugauucccaagcucugcu

SEQ ID NO: 1932451 - RNA, 22 nt, Human
cugauucccaagcucugcuccu

SEQ ID NO: 1932452 - RNA, 21 nt, Human
cugauuaaguugucuaaacaa

SEQ ID NO: 1932453 - RNA, 22 nt, Human
cugauguuccuuuggaagaaaa

SEQ ID NO: 1932454 - RNA, 14 nt, Human
cugaucucucguga

SEQ ID NO: 1932455 - RNA, 19 nt, Human
cugauccuggaggcccagu

SEQ ID NO: 1932456 - RNA, 21 nt, Human
cugauccuggaggcccaguuc

SEQ ID NO: 1932457 - RNA, 21 nt, Human
cugauaaagaugagugagcau

SEQ ID NO: 1932458 - RNA, 12 nt, Human
cugauaccucaa

SEQ ID NO: 1932459 - RNA, 20 nt, Human
cugauccagcccugaguucc

SEQ ID NO: 1932460 - RNA, 13 nt, Human
cugauaaagauga

SEQ ID NO: 1932461 - RNA, 22 nt, Human
cugagugggggaucacagccuc

SEQ ID NO: 1932462 - RNA, 13 nt, Human
cugaguggcuuca

SEQ ID NO: 1932463 - RNA, 15 nt, Human
cugaguggcuucacu

SEQ ID NO: 1932464 - RNA, 23 nt, Human
cugaguggcuucacuccugcugu

SEQ ID NO: 1932465 - RNA, 16 nt, Human
cugaguggcuucacuc

SEQ ID NO: 1932466 - RNA, 19 nt, Human
cugaguggcuucacuccug

SEQ ID NO: 1932467 - RNA, 21 nt, Human
cugaguggcuucacuccugcu

SEQ ID NO: 1932468 - RNA, 22 nt, Human
cugaguggcuucacuccugcug

SEQ ID NO: 1932469 - RNA, 19 nt, Human
cugagugcagccguuugag

SEQ ID NO: 1932470 - RNA, 17 nt, Human
cugagucugaaggcugg

SEQ ID NO: 1932471 - RNA, 18 nt, Human
cugagugaaccuguauaa

SEQ ID NO: 1932472 - RNA, 13 nt, Human
cugagucugaagg

SEQ ID NO: 1932473 - RNA, 14 nt, Human
cugagucugaaggc

SEQ ID NO: 1932474 - RNA, 15 nt, Human
cugagucugaaggcu

SEQ ID NO: 1932475 - RNA, 16 nt, Human
cugagucugaaggcug

SEQ ID NO: 1932476 - RNA, 10 nt, Human
cugacccagu

SEQ ID NO: 1932477 - RNA, 12 nt, Human
cugacccagugc

SEQ ID NO: 1932478 - RNA, 13 nt, Human
cugacccagugcc

SEQ ID NO: 1932479 - RNA, 18 nt, Human
cugacccagugcccccac

SEQ ID NO: 1932480 - RNA, 23 nt, Human
cugacccagugcccccacugacc

SEQ ID NO: 1932481 - RNA, 20 nt, Human
cugacccagugcccccacug

SEQ ID NO: 1932482 - RNA, 21 nt, Human
cugacccagugcccccacuga

SEQ ID NO: 1932483 - RNA, 14 nt, Human
cugaggcuuuggau

SEQ ID NO: 1932484 - RNA, 15 nt, Human
cugaggcuuuggauu

SEQ ID NO: 1932485 - RNA, 17 nt, Human
cugaggcuuuggauuug

SEQ ID NO: 1932486 - RNA, 18 nt, Human
cugaggcuuuggauuuga

SEQ ID NO: 1932487 - RNA, 21 nt, Human
cugaggcuuuggauuugacau

SEQ ID NO: 1932488 - RNA, 21 nt, Human
cugggcacccucccacccggc

SEQ ID NO: 1932489 - RNA, 17 nt, Human
cugggcacccucccacc

SEQ ID NO: 1932490 - RNA, 16 nt, Human
cugggcacccucccac

SEQ ID NO: 1932491 - RNA, 12 nt, Human
cugggccccugc

SEQ ID NO: 1932492 - RNA, 16 nt, Human
cugggccccugccucu

SEQ ID NO: 1932493 - RNA, 17 nt, Human
cugggccccugccucuc

SEQ ID NO: 1932494 - RNA, 10 nt, Human
cugggccccu

SEQ ID NO: 1932495 - RNA, 20 nt, Human
cugggcaaugugauaaaacc

SEQ ID NO: 1932496 - RNA, 16 nt, Human
cugggcacacgccucc

SEQ ID NO: 1932497 - RNA, 17 nt, Human
cugggcacacgccuccc

SEQ ID NO: 1932498 - RNA, 22 nt, Human
cugggcacacgccucccacugg

SEQ ID NO: 1932499 - RNA, 23 nt, Human
cugggcacacgccucccacuggg

SEQ ID NO: 1932500 - RNA, 12 nt, Human
cugggagugagc

SEQ ID NO: 1932501 - RNA, 13 nt, Human
cugggagugagcu

SEQ ID NO: 1932502 - RNA, 16 nt, Human
cugggagugagcuggu

SEQ ID NO: 1932503 - RNA, 14 nt, Human
cugggaggccagug

SEQ ID NO: 1932504 - RNA, 17 nt, Human
cugggaggcgggcgcac

SEQ ID NO: 1932505 - RNA, 18 nt, Human
cugggaggucaaggcugc

SEQ ID NO: 1932506 - RNA, 15 nt, Human
cugggaggcucugga

SEQ ID NO: 1932507 - RNA, 16 nt, Human
cugggaggcucuggag

SEQ ID NO: 1932508 - RNA, 16 nt, Human
cugggagcuuuuguag

SEQ ID NO: 1932509 - RNA, 17 nt, Human
cuggcucuuccaggcug

SEQ ID NO: 1932510 - RNA, 13 nt, Human
cuggccugagcug

SEQ ID NO: 1932511 - RNA, 14 nt, Human
cuggccucugugcc

SEQ ID NO: 1932512 - RNA, 15 nt, Human
cuggccucugugccu

SEQ ID NO: 1932513 - RNA, 16 nt, Human
cuggccucugugccuu

SEQ ID NO: 1932514 - RNA, 20 nt, Human
cuggccucugugccuucuuu

SEQ ID NO: 1932515 - RNA, 20 nt, Human
cuggcucuuccaggcuggga

SEQ ID NO: 1932516 - RNA, 18 nt, Human
cuggcucuuccaggcugg

SEQ ID NO: 1932517 - RNA, 19 nt, Human
cuggcucuuccaggcuggg

SEQ ID NO: 1932518 - RNA, 19 nt, Human
cuggcuguuggcugggggc

SEQ ID NO: 1932519 - RNA, 22 nt, Human
cuggcuggguggcaccagcagc

SEQ ID NO: 1932520 - RNA, 21 nt, Human
cuggcuggguggcaccagcag

SEQ ID NO: 1932521 - RNA, 20 nt, Human
cuggcuguuggcugggggcc

SEQ ID NO: 1932522 - RNA, 13 nt, Human
cuggcuucucuga

SEQ ID NO: 1932523 - RNA, 14 nt, Human
cuggugcugcugcu

SEQ ID NO: 1932524 - RNA, 18 nt, Human
cuggucucaaacuccuga

SEQ ID NO: 1932525 - RNA, 23 nt, Human
cugguggcagugggagcugccug

SEQ ID NO: 1932526 - RNA, 19 nt, Human
cugguggcagugggagcug

SEQ ID NO: 1932527 - RNA, 13 nt, Human
cugguggcccagg

SEQ ID NO: 1932528 - RNA, 14 nt, Human
cugguggcccagga

SEQ ID NO: 1932529 - RNA, 11 nt, Human
cugguggccca

SEQ ID NO: 1932530 - RNA, 12 nt, Human
cugguggcccag

SEQ ID NO: 1932531 - RNA, 13 nt, Human
cuggugggccaac

SEQ ID NO: 1932532 - RNA, 20 nt, Human
cugguucucaucuuucuuga

SEQ ID NO: 1932533 - RNA, 16 nt, Human
cugguucucaucuuuc

SEQ ID NO: 1932534 - RNA, 15 nt, Human
cugguucucaucuuu

SEQ ID NO: 1932535 - RNA, 14 nt, Human
cugguucucaucuu

SEQ ID NO: 1932536 - RNA, 12 nt, Human
cugguucucauc

SEQ ID NO: 1932537 - RNA, 18 nt, Human
cuggucccacucagucca

SEQ ID NO: 1932538 - RNA, 15 nt, Human
cuggucccacucagu

SEQ ID NO: 1932539 - RNA, 18 nt, Human
cugguccauagagagcaa

SEQ ID NO: 1932540 - RNA, 21 nt, Human
cugguccauagagagcaagac

SEQ ID NO: 1932541 - RNA, 19 nt, Human
cuggguucuacccaggugc

SEQ ID NO: 1932542 - RNA, 13 nt, Human
cuggguuggaggg

SEQ ID NO: 1932543 - RNA, 15 nt, Human
cugguccauagagag

SEQ ID NO: 1932544 - RNA, 17 nt, Human
cugguccauagagagca

SEQ ID NO: 1932545 - RNA, 19 nt, Human
cugggcucccuucccaccu

SEQ ID NO: 1932546 - RNA, 21 nt, Human
cugggcuuggggaccagagcu

SEQ ID NO: 1932547 - RNA, 17 nt, Human
cugggcuuggggaccag

SEQ ID NO: 1932548 - RNA, 20 nt, Human
cugggcuuggggaccagagc

SEQ ID NO: 1932549 - RNA, 23 nt, Human
cugggcuucaguggcagcugcuu

SEQ ID NO: 1932550 - RNA, 13 nt, Human
cugggcuugggga

SEQ ID NO: 1932551 - RNA, 22 nt, Human
cugggcuucaguggcagcugcu

SEQ ID NO: 1932552 - RNA, 21 nt, Human
cugggcuucaguggcagcugc

SEQ ID NO: 1932553 - RNA, 20 nt, Human
cugggcuucaguggcagcug

SEQ ID NO: 1932554 - RNA, 19 nt, Human
cugggcuucaguggcagcu

SEQ ID NO: 1932555 - RNA, 17 nt, Human
cugggcuucaguggcag

SEQ ID NO: 1932556 - RNA, 18 nt, Human
cugggcuucaguggcagc

SEQ ID NO: 1932557 - RNA, 23 nt, Human
cugggcguaguggcucacaccug

SEQ ID NO: 1932558 - RNA, 18 nt, Human
cugggggccucagugcca

SEQ ID NO: 1932559 - RNA, 17 nt, Human
cugggggccucagugcc

SEQ ID NO: 1932560 - RNA, 13 nt, Human
cugggggccucag

SEQ ID NO: 1932561 - RNA, 17 nt, Human
cugggguggggaccuca

SEQ ID NO: 1932562 - RNA, 18 nt, Human
cugggguggggaccucag

SEQ ID NO: 1932563 - RNA, 19 nt, Human
cugggguggggaccucagg

SEQ ID NO: 1932564 - RNA, 20 nt, Human
cuggguacuuguggacacag

SEQ ID NO: 1932565 - RNA, 23 nt, Human
cugggguggggaccucaggccug

SEQ ID NO: 1932566 - RNA, 21 nt, Human
cugggguggggaccucaggcc

SEQ ID NO: 1932567 - RNA, 22 nt, Human
cugggguggggaccucaggccu

SEQ ID NO: 1932568 - RNA, 23 nt, Human
cuggguacuuguggacacagcuc

SEQ ID NO: 1932569 - RNA, 21 nt, Human
cuggguacuuguggacacagc

SEQ ID NO: 1932570 - RNA, 20 nt, Human
cugggguggggauagggagc

SEQ ID NO: 1932571 - RNA, 20 nt, Human
cuggcacugacugggcauag

SEQ ID NO: 1932572 - RNA, 18 nt, Human
cuggcacugcuuccagug

SEQ ID NO: 1932573 - RNA, 17 nt, Human
cuggcacugcuuccagu

SEQ ID NO: 1932574 - RNA, 15 nt, Human
cuggcacugcuucca

SEQ ID NO: 1932575 - RNA, 16 nt, Human
cuggcacugcuuccag

SEQ ID NO: 1932576 - RNA, 16 nt, Human
cuggccagaugcacca

SEQ ID NO: 1932577 - RNA, 16 nt, Human
cuggccaacgggguga

SEQ ID NO: 1932578 - RNA, 20 nt, Human
cuggccagaugcaccagccc

SEQ ID NO: 1932579 - RNA, 19 nt, Human
cuggccagaugcaccagcc

SEQ ID NO: 1932580 - RNA, 18 nt, Human
cuggccagaugcaccagc

SEQ ID NO: 1932581 - RNA, 17 nt, Human
cuggccagaugcaccag

SEQ ID NO: 1932582 - RNA, 21 nt, Human
cuggccagaugcaccagcccu

SEQ ID NO: 1932583 - RNA, 22 nt, Human
cuggccagaugcaccagcccuu

SEQ ID NO: 1932584 - RNA, 17 nt, Human
cuggccaacaugguaaa

SEQ ID NO: 1932585 - RNA, 22 nt, Human
cuggccucaagugauucuccug

SEQ ID NO: 1932586 - RNA, 17 nt, Human
cuggccucccacagacu

SEQ ID NO: 1932587 - RNA, 19 nt, Human
cuggccucccacagacuca

SEQ ID NO: 1932588 - RNA, 23 nt, Human
cuggccuagcauacguacacauu

SEQ ID NO: 1932589 - RNA, 11 nt, Human
cuggccucugu

SEQ ID NO: 1932590 - RNA, 13 nt, Human
cuggccucugugc

SEQ ID NO: 1932591 - RNA, 12 nt, Human
cuggcccacugc

SEQ ID NO: 1932592 - RNA, 13 nt, Human
cuggcccacugca

SEQ ID NO: 1932593 - RNA, 17 nt, Human
cuggccuagcauacgua

SEQ ID NO: 1932594 - RNA, 13 nt, Human
cuggcccagggcc

SEQ ID NO: 1932595 - RNA, 14 nt, Human
cuggcccagggccc

SEQ ID NO: 1932596 - RNA, 15 nt, Human
cuggcccagggccca

SEQ ID NO: 1932597 - RNA, 12 nt, Human
cuggcccagggc

SEQ ID NO: 1932598 - RNA, 11 nt, Human
cuggcccaggg

SEQ ID NO: 1932599 - RNA, 12 nt, Human
cuggcacacauc

SEQ ID NO: 1932600 - RNA, 19 nt, Human
cuggcaauguuuauuucau

SEQ ID NO: 1932601 - RNA, 21 nt, Human
cuggcacacaucaggaguuca

SEQ ID NO: 1932602 - RNA, 19 nt, Human
cuggcaaagcuuuuagaaa

SEQ ID NO: 1932603 - RNA, 20 nt, Human
cuggcaaagcuuuuagaaau

SEQ ID NO: 1932604 - RNA, 19 nt, Human
cuggcaaaaggaucuuugu

SEQ ID NO: 1932605 - RNA, 20 nt, Human
cuggcaaaaggaucuuugug

SEQ ID NO: 1932606 - RNA, 23 nt, Human
cuggcaaaaggaucuuuguggcc

SEQ ID NO: 1932607 - RNA, 21 nt, Human
cuggcaaaaggaucuuugugg

SEQ ID NO: 1932608 - RNA, 13 nt, Human
cuggcacugcuuc

SEQ ID NO: 1932609 - RNA, 14 nt, Human
cuggcacugcuucc

SEQ ID NO: 1932610 - RNA, 23 nt, Human
cuggcacuauaauguaagcucua

SEQ ID NO: 1932611 - RNA, 15 nt, Human
cuggauggggcugca

SEQ ID NO: 1932612 - RNA, 16 nt, Human
cuggauggggcugcac

SEQ ID NO: 1932613 - RNA, 23 nt, Human
cuggauuaaacuuaaucuaaaug

SEQ ID NO: 1932614 - RNA, 13 nt, Human
cuggauuaaacuu

SEQ ID NO: 1932615 - RNA, 17 nt, Human
cuggauuauauuaugaa

SEQ ID NO: 1932616 - RNA, 21 nt, Human
cuggaauguaaucaauguuuc

SEQ ID NO: 1932617 - RNA, 13 nt, Human
cuggacagcccca

SEQ ID NO: 1932618 - RNA, 14 nt, Human
cuggacagccccac

SEQ ID NO: 1932619 - RNA, 15 nt, Human
cuggacagccccacc

SEQ ID NO: 1932620 - RNA, 16 nt, Human
cuggacagccccaccc

SEQ ID NO: 1932621 - RNA, 18 nt, Human
cuggacagccccacccug

SEQ ID NO: 1932622 - RNA, 19 nt, Human
cuggacagccccacccugg

SEQ ID NO: 1932623 - RNA, 20 nt, Human
cuggaauguaaucaauguuu

SEQ ID NO: 1932624 - RNA, 15 nt, Human
cuggaauguaaucaa

SEQ ID NO: 1932625 - RNA, 14 nt, Human
cuggaauguaauca

SEQ ID NO: 1932626 - RNA, 15 nt, Human
cuggaaugcaguggu

SEQ ID NO: 1932627 - RNA, 14 nt, Human
cuggaaugcagugg

SEQ ID NO: 1932628 - RNA, 23 nt, Human
cuggaauaauccuaaacauauga

SEQ ID NO: 1932629 - RNA, 21 nt, Human
cuggaagugcuaauuuugaaa

SEQ ID NO: 1932630 - RNA, 18 nt, Human
cuggaagcacagcuucau

SEQ ID NO: 1932631 - RNA, 15 nt, Human
cuggaagcacagcuu

SEQ ID NO: 1932632 - RNA, 17 nt, Human
cugcuuuccaaagccaa

SEQ ID NO: 1932633 - RNA, 15 nt, Human
cugcuuuccaaagcc

SEQ ID NO: 1932634 - RNA, 21 nt, Human
cuggagcccacuguacuugcu

SEQ ID NO: 1932635 - RNA, 17 nt, Human
cuggagcccagaggagg

SEQ ID NO: 1932636 - RNA, 16 nt, Human
cuggagcccagaggag

SEQ ID NO: 1932637 - RNA, 22 nt, Human
cuggagcuagaauuugauaugu

SEQ ID NO: 1932638 - RNA, 17 nt, Human
cuggagcuagaauuuga

SEQ ID NO: 1932639 - RNA, 16 nt, Human
cuggagcuagaauuug

SEQ ID NO: 1932640 - RNA, 13 nt, Human
cuggagcccacug

SEQ ID NO: 1932641 - RNA, 15 nt, Human
cuggagccaugggca

SEQ ID NO: 1932642 - RNA, 21 nt, Human
cuggagccaugggcacaaagg

SEQ ID NO: 1932643 - RNA, 15 nt, Human
cuggagcccacugua

SEQ ID NO: 1932644 - RNA, 16 nt, Human
cuggagcccacuguac

SEQ ID NO: 1932645 - RNA, 17 nt, Human
cuggagcccacuguacu

SEQ ID NO: 1932646 - RNA, 20 nt, Human
cuggagcccacuguacuugc

SEQ ID NO: 1932647 - RNA, 20 nt, Human
cuggacuagagggaccucuc

SEQ ID NO: 1932648 - RNA, 21 nt, Human
cuggacuagagggaccucucc

SEQ ID NO: 1932649 - RNA, 23 nt, Human
cuggacuagagggaccucuccca

SEQ ID NO: 1932650 - RNA, 19 nt, Human
cuggacaguaucacugucu

SEQ ID NO: 1932651 - RNA, 20 nt, Human
cuggacaguaucacugucuu

SEQ ID NO: 1932652 - RNA, 22 nt, Human
cuggagaggcccucuggagugg

SEQ ID NO: 1932653 - RNA, 17 nt, Human
cuccucacucaccuuca

SEQ ID NO: 1932654 - RNA, 12 nt, Human
cuccucagaucu

SEQ ID NO: 1932655 - RNA, 14 nt, Human
cuccucagaucuuc

SEQ ID NO: 1932656 - RNA, 13 nt, Human
cuccucccugcau

SEQ ID NO: 1932657 - RNA, 14 nt, Human
cuccucccugcauc

SEQ ID NO: 1932658 - RNA, 15 nt, Human
cuccucccugcaucu

SEQ ID NO: 1932659 - RNA, 16 nt, Human
cuccucccugcaucug

SEQ ID NO: 1932660 - RNA, 18 nt, Human
cuccucccugcaucugac

SEQ ID NO: 1932661 - RNA, 23 nt, Human
cuccucccugcaucugaccagca

SEQ ID NO: 1932662 - RNA, 13 nt, Human
cuccucucaguac

SEQ ID NO: 1932663 - RNA, 12 nt, Human
cuccucuuguaa

SEQ ID NO: 1932664 - RNA, 13 nt, Human
cuccucuuguaaa

SEQ ID NO: 1932665 - RNA, 14 nt, Human
cuccucuuguaaau

SEQ ID NO: 1932666 - RNA, 20 nt, Human
cuccucuuguaaauaaagcc

SEQ ID NO: 1932667 - RNA, 21 nt, Human
cuccucuuguaaauaaagccc

SEQ ID NO: 1932668 - RNA, 21 nt, Human
cuccugaguagcuggauuaca

SEQ ID NO: 1932669 - RNA, 12 nt, Human
cuccugcaggca

SEQ ID NO: 1932670 - RNA, 13 nt, Human
cuccugcaggcag

SEQ ID NO: 1932671 - RNA, 14 nt, Human
cuccugcaggcagc

SEQ ID NO: 1932672 - RNA, 17 nt, Human
cuccugaggcuuuggau

SEQ ID NO: 1932673 - RNA, 16 nt, Human
cuccugaggcuuugga

SEQ ID NO: 1932674 - RNA, 16 nt, Human
cucccuucucuucaca

SEQ ID NO: 1932675 - RNA, 13 nt, Human
cucccuucugcua

SEQ ID NO: 1932676 - RNA, 14 nt, Human
cucccuucugcuac

SEQ ID NO: 1932677 - RNA, 15 nt, Human
cucccuucugcuacu

SEQ ID NO: 1932678 - RNA, 16 nt, Human
cucccuucugcuacug

SEQ ID NO: 1932679 - RNA, 14 nt, Human
cucccuuccucuuu

SEQ ID NO: 1932680 - RNA, 13 nt, Human
cucccuuccucuu

SEQ ID NO: 1932681 - RNA, 17 nt, Human
cucccuuucuucccuac

SEQ ID NO: 1932682 - RNA, 23 nt, Human
cucccuuucuccccugcccccag

SEQ ID NO: 1932683 - RNA, 15 nt, Human
cucccuuucuccccu

SEQ ID NO: 1932684 - RNA, 17 nt, Human
cucccuuggauuguccc

SEQ ID NO: 1932685 - RNA, 20 nt, Human
cucccuuggauuguccccga

SEQ ID NO: 1932686 - RNA, 13 nt, Human
cucccuuucaaca

SEQ ID NO: 1932687 - RNA, 14 nt, Human
cucccuuucucccc

SEQ ID NO: 1932688 - RNA, 12 nt, Human
cucccuuucucc

SEQ ID NO: 1932689 - RNA, 10 nt, Human
cucccuuccu

SEQ ID NO: 1932690 - RNA, 23 nt, Human
cucccuucccaccucucucacuc

SEQ ID NO: 1932691 - RNA, 19 nt, Human
cucccuggugagagggccg

SEQ ID NO: 1932692 - RNA, 14 nt, Human
cucccaucacccgc

SEQ ID NO: 1932693 - RNA, 14 nt, Human
cucccaucucacac

SEQ ID NO: 1932694 - RNA, 23 nt, Human
cucccaggugcagccagaggcac

SEQ ID NO: 1932695 - RNA, 21 nt, Human
cucccaucucacacaugagca

SEQ ID NO: 1932696 - RNA, 15 nt, Human
cucccaucucacaca

SEQ ID NO: 1932697 - RNA, 18 nt, Human
cucccaucucacacauga

SEQ ID NO: 1932698 - RNA, 20 nt, Human
cucgaguuacagacaaagcg

SEQ ID NO: 1932699 - RNA, 16 nt, Human
cucgaguuacagacaa

SEQ ID NO: 1932700 - RNA, 17 nt, Human
cucgagguuucucaaag

SEQ ID NO: 1932701 - RNA, 12 nt, Human
cucgaauuuugu

SEQ ID NO: 1932702 - RNA, 23 nt, Human
cucgacguuuacaagcccccccu

SEQ ID NO: 1932703 - RNA, 13 nt, Human
cucgcgacaaugc

SEQ ID NO: 1932704 - RNA, 15 nt, Human
cucgcgacaaugcaa

SEQ ID NO: 1932705 - RNA, 14 nt, Human
cucgcauugacaca

SEQ ID NO: 1932706 - RNA, 14 nt, Human
cucgccccagcagg

SEQ ID NO: 1932707 - RNA, 18 nt, Human
cucggccucccaaagugc

SEQ ID NO: 1932708 - RNA, 20 nt, Human
cucggccucccaaagugcug

SEQ ID NO: 1932709 - RNA, 15 nt, Human
cucggccucccaaag

SEQ ID NO: 1932710 - RNA, 17 nt, Human
cucuaaauucuuucauu

SEQ ID NO: 1932711 - RNA, 13 nt, Human
cucuaaauucuuu

SEQ ID NO: 1932712 - RNA, 18 nt, Human
cucuaacagcucaggauc

SEQ ID NO: 1932713 - RNA, 22 nt, Human
cucuaacagcucaggaucucuu

SEQ ID NO: 1932714 - RNA, 18 nt, Human
cucuaaaugggaaaguau

SEQ ID NO: 1932715 - RNA, 21 nt, Human
cucuaacaauguauuuucuuc

SEQ ID NO: 1932716 - RNA, 14 nt, Human
cucuaacagcucag

SEQ ID NO: 1932717 - RNA, 16 nt, Human
cucuaacagcucagga

SEQ ID NO: 1932718 - RNA, 22 nt, Human
cucgcuuggacggcugggcaca

SEQ ID NO: 1932719 - RNA, 22 nt, Human
cucggaacugcaugcugcugga

SEQ ID NO: 1932720 - RNA, 19 nt, Human
cucggaacugcaugcugcu

SEQ ID NO: 1932721 - RNA, 21 nt, Human
cucggaacugcaugcugcugg

SEQ ID NO: 1932722 - RNA, 20 nt, Human
cuccuucuguccuacucugu

SEQ ID NO: 1932723 - RNA, 15 nt, Human
cuccuucuguccuac

SEQ ID NO: 1932724 - RNA, 14 nt, Human
cuccuucuguccua

SEQ ID NO: 1932725 - RNA, 20 nt, Human
cuccuucagcccucaccccu

SEQ ID NO: 1932726 - RNA, 17 nt, Human
cuccuucagcccucacc

SEQ ID NO: 1932727 - RNA, 15 nt, Human
cuccuucagcccuca

SEQ ID NO: 1932728 - RNA, 14 nt, Human
cuccuucagcccuc

SEQ ID NO: 1932729 - RNA, 14 nt, Human
cuccuuccaguguc

SEQ ID NO: 1932730 - RNA, 13 nt, Human
cuccuucagcccu

SEQ ID NO: 1932731 - RNA, 19 nt, Human
cuccuucagacacccucaa

SEQ ID NO: 1932732 - RNA, 13 nt, Human
cuccuucagacac

SEQ ID NO: 1932733 - RNA, 14 nt, Human
cuccuucagacacc

SEQ ID NO: 1932734 - RNA, 12 nt, Human
cuccuucagaca

SEQ ID NO: 1932735 - RNA, 16 nt, Human
cucgaacuggcugcaa

SEQ ID NO: 1932736 - RNA, 11 nt, Human
cuccuucuucc

SEQ ID NO: 1932737 - RNA, 21 nt, Human
cuccuugaaaacacuguucuc

SEQ ID NO: 1932738 - RNA, 11 nt, Human
cuccugugugu

SEQ ID NO: 1932739 - RNA, 23 nt, Human
cuccugugucuugcaauggcagc

SEQ ID NO: 1932740 - RNA, 15 nt, Human
cuccugugucuugca

SEQ ID NO: 1932741 - RNA, 22 nt, Human
cuccugcaggcagccaggccac

SEQ ID NO: 1932742 - RNA, 15 nt, Human
cuccugcaggcagcc

SEQ ID NO: 1932743 - RNA, 21 nt, Human
cuccugcaggcagccaggcca

SEQ ID NO: 1932744 - RNA, 14 nt, Human
cuccugugugugcg

SEQ ID NO: 1932745 - RNA, 14 nt, Human
cuccuucaccuuug

SEQ ID NO: 1932746 - RNA, 16 nt, Human
cuccuucaccuuuguc

SEQ ID NO: 1932747 - RNA, 19 nt, Human
cuccuucaccuuugucccc

SEQ ID NO: 1932748 - RNA, 21 nt, Human
cuccuucaccuuuguccccac

SEQ ID NO: 1932749 - RNA, 20 nt, Human
cucauugcuuggaauucagc

SEQ ID NO: 1932750 - RNA, 18 nt, Human
cucaucucuaacagcuca

SEQ ID NO: 1932751 - RNA, 16 nt, Human
cucauugaccugaggc

SEQ ID NO: 1932752 - RNA, 20 nt, Human
cucauugcugagccucugcu

SEQ ID NO: 1932753 - RNA, 19 nt, Human
cucauugcugagccucugc

SEQ ID NO: 1932754 - RNA, 23 nt, Human
cucauucuucuguacgucugaca

SEQ ID NO: 1932755 - RNA, 17 nt, Human
cucauugaauuauaaaa

SEQ ID NO: 1932756 - RNA, 13 nt, Human
cucauugaccuga

SEQ ID NO: 1932757 - RNA, 15 nt, Human
cucauugaccugagg

SEQ ID NO: 1932758 - RNA, 14 nt, Human
cucauucuucugua

SEQ ID NO: 1932759 - RNA, 13 nt, Human
cucauucuucugu

SEQ ID NO: 1932760 - RNA, 15 nt, Human
cucauuccagaggaa

SEQ ID NO: 1932761 - RNA, 17 nt, Human
cucauuccagaggaagg

SEQ ID NO: 1932762 - RNA, 21 nt, Human
cucaucuagguaaauuacagu

SEQ ID NO: 1932763 - RNA, 14 nt, Human
cucauccugcaggc

SEQ ID NO: 1932764 - RNA, 17 nt, Human
cucaucgccagacaacu

SEQ ID NO: 1932765 - RNA, 17 nt, Human
cucaucuccccaucauu

SEQ ID NO: 1932766 - RNA, 21 nt, Human
cucauuagcauuuugcuaaau

SEQ ID NO: 1932767 - RNA, 18 nt, Human
cucauuaggauggcuagu

SEQ ID NO: 1932768 - RNA, 17 nt, Human
cucauuaggauggcuag

SEQ ID NO: 1932769 - RNA, 13 nt, Human
cucauccugcagg

SEQ ID NO: 1932770 - RNA, 14 nt, Human
cucauauuuucaug

SEQ ID NO: 1932771 - RNA, 19 nt, Human
cucauaguaugguggcugg

SEQ ID NO: 1932772 - RNA, 18 nt, Human
cucauaguaugguggcug

SEQ ID NO: 1932773 - RNA, 20 nt, Human
cucauaguaugguggcuggg

SEQ ID NO: 1932774 - RNA, 19 nt, Human
cucaggugucccugcacuu

SEQ ID NO: 1932775 - RNA, 14 nt, Human
cucaggugagaagc

SEQ ID NO: 1932776 - RNA, 20 nt, Human
cucagugucuggcugcagag

SEQ ID NO: 1932777 - RNA, 18 nt, Human
cucaggugucccugcacu

SEQ ID NO: 1932778 - RNA, 17 nt, Human
cucaggugucccugcac

SEQ ID NO: 1932779 - RNA, 22 nt, Human
cucagugucuggcugcagagca

SEQ ID NO: 1932780 - RNA, 21 nt, Human
cucagugucuggcugcagagc

SEQ ID NO: 1932781 - RNA, 16 nt, Human
cucaggugucccugca

SEQ ID NO: 1932782 - RNA, 15 nt, Human
cucaggugucccugc

SEQ ID NO: 1932783 - RNA, 22 nt, Human
cucagguggggucacucuggca

SEQ ID NO: 1932784 - RNA, 23 nt, Human
cucagguggggucacucuggcag

SEQ ID NO: 1932785 - RNA, 15 nt, Human
cucaggucuguuuuc

SEQ ID NO: 1932786 - RNA, 20 nt, Human
cucaggucccuggggcuagg

SEQ ID NO: 1932787 - RNA, 14 nt, Human
cucagggucccugg

SEQ ID NO: 1932788 - RNA, 23 nt, Human
cuaaaagguaugcaaucaaaucu

SEQ ID NO: 1932789 - RNA, 12 nt, Human
cuaaaagcacac

SEQ ID NO: 1932790 - RNA, 12 nt, Human
cucagggucccu

SEQ ID NO: 1932791 - RNA, 19 nt, Human
cuaaaagugggcuugauuc

SEQ ID NO: 1932792 - RNA, 11 nt, Human
cuccaggcucc

SEQ ID NO: 1932793 - RNA, 20 nt, Human
cuccauccugaggcuccacu

SEQ ID NO: 1932794 - RNA, 21 nt, Human
cuccauccugaggcuccacuu

SEQ ID NO: 1932795 - RNA, 23 nt, Human
cuccauccugaggcuccacuugg

SEQ ID NO: 1932796 - RNA, 18 nt, Human
cuccagcuguucagcugg

SEQ ID NO: 1932797 - RNA, 19 nt, Human
cuccagcuguucagcuggu

SEQ ID NO: 1932798 - RNA, 13 nt, Human
cuccagcuguuca

SEQ ID NO: 1932799 - RNA, 15 nt, Human
cucccaggcauuccc

SEQ ID NO: 1932800 - RNA, 22 nt, Human
cucccaaguagcugggauuaca

SEQ ID NO: 1932801 - RNA, 21 nt, Human
cucccaaggggcccaaauucu

SEQ ID NO: 1932802 - RNA, 22 nt, Human
cucccaaggggcccaaauucuu

SEQ ID NO: 1932803 - RNA, 14 nt, Human
cuccaugugggcua

SEQ ID NO: 1932804 - RNA, 24 nt, Human
cuccauucccguggaacguuuuuc

SEQ ID NO: 1932805 - RNA, 17 nt, Human
cuccauugguguugaca

SEQ ID NO: 1932806 - RNA, 17 nt, Human
cucccaggcauucccca

SEQ ID NO: 1932807 - RNA, 19 nt, Human
cucccaggcauuccccagg

SEQ ID NO: 1932808 - RNA, 20 nt, Human
cucccaggcauuccccagga

SEQ ID NO: 1932809 - RNA, 21 nt, Human
cucccaggcauuccccaggag

SEQ ID NO: 1932810 - RNA, 22 nt, Human
cucccaggcauuccccaggagg

SEQ ID NO: 1932811 - RNA, 12 nt, Human
cuccacccugcu

SEQ ID NO: 1932812 - RNA, 18 nt, Human
cuccaccugccagggaca

SEQ ID NO: 1932813 - RNA, 21 nt, Human
cuccaccugccagggacagag

SEQ ID NO: 1932814 - RNA, 17 nt, Human
cuccaccugccagggac

SEQ ID NO: 1932815 - RNA, 15 nt, Human
cuccaccugccaggg

SEQ ID NO: 1932816 - RNA, 11 nt, Human
cuccacccugc

SEQ ID NO: 1932817 - RNA, 14 nt, Human
cucauuuaaaguau

SEQ ID NO: 1932818 - RNA, 19 nt, Human
cucauuuaaaguauuuuau

SEQ ID NO: 1932819 - RNA, 20 nt, Human
cucauuuaaaguauuuuauu

SEQ ID NO: 1932820 - RNA, 11 nt, Human
cucauuuacug

SEQ ID NO: 1932821 - RNA, 16 nt, Human
cuccacagcaacccca

SEQ ID NO: 1932822 - RNA, 19 nt, Human
cuccacagcaaccccaggc

SEQ ID NO: 1932823 - RNA, 20 nt, Human
cuccagcucaccagccccag

SEQ ID NO: 1932824 - RNA, 19 nt, Human
cuccagcucaccagcccca

SEQ ID NO: 1932825 - RNA, 21 nt, Human
cuccacucuccucuuccaggc

SEQ ID NO: 1932826 - RNA, 19 nt, Human
cucugccacugacugcagg

SEQ ID NO: 1932827 - RNA, 12 nt, Human
cucugcccuugg

SEQ ID NO: 1932828 - RNA, 14 nt, Human
cucugcccuccaag

SEQ ID NO: 1932829 - RNA, 15 nt, Human
cucugcccuccaaga

SEQ ID NO: 1932830 - RNA, 16 nt, Human
cucugcccuccaagac

SEQ ID NO: 1932831 - RNA, 23 nt, Human
cucugcccuccaagaccuucucc

SEQ ID NO: 1932832 - RNA, 16 nt, Human
cucugccucugacaca

SEQ ID NO: 1932833 - RNA, 14 nt, Human
cucugccucugaca

SEQ ID NO: 1932834 - RNA, 13 nt, Human
cucuggaaagcaa

SEQ ID NO: 1932835 - RNA, 14 nt, Human
cucuggaauuugaa

SEQ ID NO: 1932836 - RNA, 14 nt, Human
cucuggacaggcau

SEQ ID NO: 1932837 - RNA, 18 nt, Human
cucuggacagccccaccc

SEQ ID NO: 1932838 - RNA, 15 nt, Human
cucuggacagcccca

SEQ ID NO: 1932839 - RNA, 12 nt, Human
cucuggaccugc

SEQ ID NO: 1932840 - RNA, 13 nt, Human
cucuggaccugcc

SEQ ID NO: 1932841 - RNA, 21 nt, Human
cucuggaccugcccccgcauc

SEQ ID NO: 1932842 - RNA, 14 nt, Human
cucuggaccugccc

SEQ ID NO: 1932843 - RNA, 12 nt, Human
cucuggagccca

SEQ ID NO: 1932844 - RNA, 12 nt, Human
cucuggacugug

SEQ ID NO: 1932845 - RNA, 23 nt, Human
cucugcauacucauuaggauggc

SEQ ID NO: 1932846 - RNA, 23 nt, Human
cucugcaggucccuaauaaagcu

SEQ ID NO: 1932847 - RNA, 10 nt, Human
cucugcacaa

SEQ ID NO: 1932848 - RNA, 22 nt, Human
cucugcaagaauugaagcagga

SEQ ID NO: 1932849 - RNA, 20 nt, Human
cucugagacucgcgacaaug

SEQ ID NO: 1932850 - RNA, 14 nt, Human
cucucccauuuccu

SEQ ID NO: 1932851 - RNA, 16 nt, Human
cucucccauugucccu

SEQ ID NO: 1932852 - RNA, 18 nt, Human
cucucccauugucccucu

SEQ ID NO: 1932853 - RNA, 19 nt, Human
cucucccauugucccucug

SEQ ID NO: 1932854 - RNA, 13 nt, Human
cucuccccagcaa

SEQ ID NO: 1932855 - RNA, 21 nt, Human
cucucccauugucccucugcc

SEQ ID NO: 1932856 - RNA, 15 nt, Human
cucuccuguaccucu

SEQ ID NO: 1932857 - RNA, 14 nt, Human
cucuccuguaccuc

SEQ ID NO: 1932858 - RNA, 13 nt, Human
cucuccuguaccu

SEQ ID NO: 1932859 - RNA, 18 nt, Human
cucuccuguaccucuuga

SEQ ID NO: 1932860 - RNA, 17 nt, Human
cucuccuguaccucuug

SEQ ID NO: 1932861 - RNA, 22 nt, Human
cucuccuguaccucuugagccu

SEQ ID NO: 1932862 - RNA, 11 nt, Human
cucuccccagc

SEQ ID NO: 1932863 - RNA, 12 nt, Human
cucucggaacug

SEQ ID NO: 1932864 - RNA, 16 nt, Human
cucucggaacugcaug

SEQ ID NO: 1932865 - RNA, 19 nt, Human
cucucggaacugcaugcug

SEQ ID NO: 1932866 - RNA, 20 nt, Human
cucucggaacugcaugcugc

SEQ ID NO: 1932867 - RNA, 21 nt, Human
cucucggaacugcaugcugcu

SEQ ID NO: 1932868 - RNA, 23 nt, Human
cucucggaacugcaugcugcugg

SEQ ID NO: 1932869 - RNA, 12 nt, Human
cucucugcaggu

SEQ ID NO: 1932870 - RNA, 18 nt, Human
cucucugcaccguacugu

SEQ ID NO: 1932871 - RNA, 13 nt, Human
cucucugcagguc

SEQ ID NO: 1932872 - RNA, 14 nt, Human
cucucugcaggucc

SEQ ID NO: 1932873 - RNA, 16 nt, Human
cucucugcaggucccu

SEQ ID NO: 1932874 - RNA, 17 nt, Human
cucucugcaggucccua

SEQ ID NO: 1932875 - RNA, 19 nt, Human
cucucugcaggucccuaau

SEQ ID NO: 1932876 - RNA, 22 nt, Human
cucucugcaggucccuaauaaa

SEQ ID NO: 1932877 - RNA, 14 nt, Human
cucucucacuccuu

SEQ ID NO: 1932878 - RNA, 15 nt, Human
cucucucacuccuug

SEQ ID NO: 1932879 - RNA, 16 nt, Human
cucucucacuccuuga

SEQ ID NO: 1932880 - RNA, 12 nt, Human
cucucucaggcc

SEQ ID NO: 1932881 - RNA, 15 nt, Human
cucuaauaucagcaa

SEQ ID NO: 1932882 - RNA, 22 nt, Human
cucucaggccagcugcuugggc

SEQ ID NO: 1932883 - RNA, 23 nt, Human
cucucaggccagcugcuugggcu

SEQ ID NO: 1932884 - RNA, 18 nt, Human
cucucaguacuuuggagg

SEQ ID NO: 1932885 - RNA, 19 nt, Human
cucucaguacuuuggaggc

SEQ ID NO: 1932886 - RNA, 17 nt, Human
cucucaucucuuagcuc

SEQ ID NO: 1932887 - RNA, 18 nt, Human
cucucaucgccagacaac

SEQ ID NO: 1932888 - RNA, 21 nt, Human
cucuccauucccguggaacgu

SEQ ID NO: 1932889 - RNA, 12 nt, Human
cucuccagcccc

SEQ ID NO: 1932890 - RNA, 13 nt, Human
cucuccagccccu

SEQ ID NO: 1932891 - RNA, 20 nt, Human
cucuccagauguuuccagac

SEQ ID NO: 1932892 - RNA, 13 nt, Human
cucucccaucacu

SEQ ID NO: 1932893 - RNA, 11 nt, Human
cucucccaggg

SEQ ID NO: 1932894 - RNA, 20 nt, Human
cucucccaucacuucccuac

SEQ ID NO: 1932895 - RNA, 14 nt, Human
cucucccaucacuu

SEQ ID NO: 1932896 - RNA, 18 nt, Human
cucucccaucacuucccu

SEQ ID NO: 1932897 - RNA, 21 nt, Human
cugacauuguuggccaaagcc

SEQ ID NO: 1932898 - RNA, 12 nt, Human
cugaccacagca

SEQ ID NO: 1932899 - RNA, 14 nt, Human
cugaccacagcaca

SEQ ID NO: 1932900 - RNA, 15 nt, Human
cugaccacagcacag

SEQ ID NO: 1932901 - RNA, 18 nt, Human
cugaccacagcacagcca

SEQ ID NO: 1932902 - RNA, 22 nt, Human
cugaccacgcuuucuagcuguu

SEQ ID NO: 1932903 - RNA, 11 nt, Human
cugacccacug

SEQ ID NO: 1932904 - RNA, 13 nt, Human
cugaccagaacua

SEQ ID NO: 1932905 - RNA, 13 nt, Human
cugaccagcagcg

SEQ ID NO: 1932906 - RNA, 14 nt, Human
cugaccagcagcgc

SEQ ID NO: 1932907 - RNA, 15 nt, Human
cugaccagcagcgcc

SEQ ID NO: 1932908 - RNA, 16 nt, Human
cugaccagcagcgccu

SEQ ID NO: 1932909 - RNA, 19 nt, Human
cugacaggcaaugcuggcu

SEQ ID NO: 1932910 - RNA, 18 nt, Human
cugacaggcaaugcuggc

SEQ ID NO: 1932911 - RNA, 17 nt, Human
cugacaggcaaugcugg

SEQ ID NO: 1932912 - RNA, 16 nt, Human
cugacaggcaaugcug

SEQ ID NO: 1932913 - RNA, 20 nt, Human
cugacaggcaaugcuggcug

SEQ ID NO: 1932914 - RNA, 16 nt, Human
cugacauucaccugcc

SEQ ID NO: 1932915 - RNA, 22 nt, Human
cugacagcugcuccuagaggga

SEQ ID NO: 1932916 - RNA, 17 nt, Human
cugacauuguuggccaa

SEQ ID NO: 1932917 - RNA, 17 nt, Human
cugacauucaccugccc

SEQ ID NO: 1932918 - RNA, 23 nt, Human
cugacauucaccugccccaacuc

SEQ ID NO: 1932919 - RNA, 21 nt, Human
cugacagacacaggcccggcu

SEQ ID NO: 1932920 - RNA, 11 nt, Human
cugacaggcaa

SEQ ID NO: 1932921 - RNA, 19 nt, Human
cugacagcugcuccuagag

SEQ ID NO: 1932922 - RNA, 23 nt, Human
cugacagcugcuccuagagggag

SEQ ID NO: 1932923 - RNA, 19 nt, Human
cugacagacacaggcccgg

SEQ ID NO: 1932924 - RNA, 23 nt, Human
cugaauuuaaauagcuuuuuucu

SEQ ID NO: 1932925 - RNA, 18 nt, Human
cugaauuuaaauagcuuu

SEQ ID NO: 1932926 - RNA, 14 nt, Human
cugaauuuaaauag

SEQ ID NO: 1932927 - RNA, 22 nt, Human
cugaaugaaccuucuggccucc

SEQ ID NO: 1932928 - RNA, 16 nt, Human
cugaagucacacagug

SEQ ID NO: 1932929 - RNA, 15 nt, Human
cugaagucacacagu

SEQ ID NO: 1932930 - RNA, 14 nt, Human
cugaagucacacag

SEQ ID NO: 1932931 - RNA, 24 nt, Human
cugaagucuuuguacagacaacaa

SEQ ID NO: 1932932 - RNA, 16 nt, Human
cugaauacagaggcaa

SEQ ID NO: 1932933 - RNA, 21 nt, Human
cugaagacucauucuucugua

SEQ ID NO: 1932934 - RNA, 21 nt, Human
cugaagagaagggcagggcug

SEQ ID NO: 1932935 - RNA, 15 nt, Human
cugaacuuggcgcug

SEQ ID NO: 1932936 - RNA, 16 nt, Human
cugaacuuggcgcugc

SEQ ID NO: 1932937 - RNA, 21 nt, Human
cugaacuuggcgcugccccug

SEQ ID NO: 1932938 - RNA, 21 nt, Human
cugaaccuggguaacuaggga

SEQ ID NO: 1932939 - RNA, 18 nt, Human
cucuuugggccuggcucc

SEQ ID NO: 1932940 - RNA, 20 nt, Human
cucuuugcuuugcuuucugc

SEQ ID NO: 1932941 - RNA, 22 nt, Human
cucuuugcuuugcuuucugcuc

SEQ ID NO: 1932942 - RNA, 19 nt, Human
cucuuuggucuacacugug

SEQ ID NO: 1932943 - RNA, 21 nt, Human
cucuuuggucuacacugugcu

SEQ ID NO: 1932944 - RNA, 12 nt, Human
cucuucuccagg

SEQ ID NO: 1932945 - RNA, 23 nt, Human
cucuuccaggcugggagagccuu

SEQ ID NO: 1932946 - RNA, 22 nt, Human
cucuuccaggcugggagagccu

SEQ ID NO: 1932947 - RNA, 21 nt, Human
cucuuccaggcugggagagcc

SEQ ID NO: 1932948 - RNA, 11 nt, Human
cucuucuggcu

SEQ ID NO: 1932949 - RNA, 14 nt, Human
cucuucuggcucaa

SEQ ID NO: 1932950 - RNA, 15 nt, Human
cucuggagcccacug

SEQ ID NO: 1932951 - RNA, 17 nt, Human
cucuggcagcucagaga

SEQ ID NO: 1932952 - RNA, 18 nt, Human
cucuggcagcucagagag

SEQ ID NO: 1932953 - RNA, 20 nt, Human
cucuggcagcucagagaggg

SEQ ID NO: 1932954 - RNA, 19 nt, Human
cucuggcagcucagagagg

SEQ ID NO: 1932955 - RNA, 13 nt, Human
cucuuaaaaccca

SEQ ID NO: 1932956 - RNA, 24 nt, Human
cucuuaaaacccaagugccuuagc

SEQ ID NO: 1932957 - RNA, 20 nt, Human
cucuguugcaagugcaauaa

SEQ ID NO: 1932958 - RNA, 19 nt, Human
cucuucagguuguaaaaaa

SEQ ID NO: 1932959 - RNA, 15 nt, Human
cucuuuggacacuca

SEQ ID NO: 1932960 - RNA, 18 nt, Human
cucuuuggacacucacac

SEQ ID NO: 1932961 - RNA, 11 nt, Human
cucuuucugua

SEQ ID NO: 1932962 - RNA, 13 nt, Human
cucuuucuguaua

SEQ ID NO: 1932963 - RNA, 14 nt, Human
cucuuucuguauau

SEQ ID NO: 1932964 - RNA, 12 nt, Human
cucuuugcuuug

SEQ ID NO: 1932965 - RNA, 13 nt, Human
cucuuugcuuugc

SEQ ID NO: 1932966 - RNA, 14 nt, Human
cucuuugcuuugcu

SEQ ID NO: 1932967 - RNA, 15 nt, Human
cucuuugcuuugcuu

SEQ ID NO: 1932968 - RNA, 16 nt, Human
cucuuugcuuugcuuu

SEQ ID NO: 1932969 - RNA, 18 nt, Human
cucuuugcuuugcuuucu

SEQ ID NO: 1932970 - RNA, 17 nt, Human
cucuuuccaucuacccu

SEQ ID NO: 1932971 - RNA, 15 nt, Human
cucuuguauuaaacu

SEQ ID NO: 1932972 - RNA, 17 nt, Human
cucuuguaaauaaagcc

SEQ ID NO: 1932973 - RNA, 18 nt, Human
cucuuguaaauaaagccc

SEQ ID NO: 1932974 - RNA, 19 nt, Human
cucuuguaaauaaagcccu

SEQ ID NO: 1932975 - RNA, 20 nt, Human
cucuuguaaauaaagcccug

SEQ ID NO: 1932976 - RNA, 23 nt, Human
cucuuguaaauaaagcccuggga

SEQ ID NO: 1932977 - RNA, 24 nt, Human
cucuuguaaauaaagcccugggau

SEQ ID NO: 1932978 - RNA, 15 nt, Human
cucuugaccucaggu

SEQ ID NO: 1932979 - RNA, 13 nt, Human
cucuugaccucag

SEQ ID NO: 1932980 - RNA, 16 nt, Human
cucuugaccucaggug

SEQ ID NO: 1932981 - RNA, 17 nt, Human
cucuugaacugagcuug

SEQ ID NO: 1932982 - RNA, 16 nt, Human
cucuugaacugagcuu

SEQ ID NO: 1932983 - RNA, 19 nt, Human
cucuugaacugagcuugga

SEQ ID NO: 1932984 - RNA, 20 nt, Human
cucuugaagacacugaaaua

SEQ ID NO: 1932985 - RNA, 21 nt, Human
cucuugaagacacugaaauau

SEQ ID NO: 1932986 - RNA, 18 nt, Human
cucuugguccugcugcag

SEQ ID NO: 1932987 - RNA, 19 nt, Human
cucuugguccugcugcagu

SEQ ID NO: 1932988 - RNA, 12 nt, Human
cucuuguaaaua

SEQ ID NO: 1932989 - RNA, 14 nt, Human
cucuuguaaauaaa

SEQ ID NO: 1932990 - RNA, 22 nt, Human
cucuuggagccugcagagcugc

SEQ ID NO: 1932991 - RNA, 19 nt, Human
cucuuggaggugucuguau

SEQ ID NO: 1932992 - RNA, 16 nt, Human
cucuuggccugaucag

SEQ ID NO: 1932993 - RNA, 14 nt, Human
cucuuggcuccacu

SEQ ID NO: 1932994 - RNA, 21 nt, Human
cucuugggaacugaacucacu

SEQ ID NO: 1932995 - RNA, 14 nt, Human
cuuauaauuuaaaa

SEQ ID NO: 1932996 - RNA, 15 nt, Human
cuuauacauuugaua

SEQ ID NO: 1932997 - RNA, 19 nt, Human
cuuauaggaauugacccac

SEQ ID NO: 1932998 - RNA, 13 nt, Human
cuuauaauuuaaa

SEQ ID NO: 1932999 - RNA, 17 nt, Human
cuuagguuggcaaaaag

SEQ ID NO: 1933000 - RNA, 22 nt, Human
cuuaggugugauuauaaaauca

SEQ ID NO: 1933001 - RNA, 19 nt, Human
cuuaucaagaguugugaca

SEQ ID NO: 1933002 - RNA, 16 nt, Human
cuuaucuccaagacca

SEQ ID NO: 1933003 - RNA, 13 nt, Human
cuuaucuccaaga

SEQ ID NO: 1933004 - RNA, 14 nt, Human
cuuaucuccaagac

SEQ ID NO: 1933005 - RNA, 15 nt, Human
cuuauuuaaugaaag

SEQ ID NO: 1933006 - RNA, 20 nt, Human
cuuauuuaaguaacuuuaaa

SEQ ID NO: 1933007 - RNA, 15 nt, Human
cuuacgugaguccug

SEQ ID NO: 1933008 - RNA, 19 nt, Human
cuuacuaguuucccuugca

SEQ ID NO: 1933009 - RNA, 15 nt, Human
cuuacggcccuggcc

SEQ ID NO: 1933010 - RNA, 16 nt, Human
cuuacggcccuggccu

SEQ ID NO: 1933011 - RNA, 17 nt, Human
cuuacggcccuggccuu

SEQ ID NO: 1933012 - RNA, 16 nt, Human
cuuacuguacaugaaa

SEQ ID NO: 1933013 - RNA, 14 nt, Human
cuuacuccaggaga

SEQ ID NO: 1933014 - RNA, 14 nt, Human
cuuacuuaguguua

SEQ ID NO: 1933015 - RNA, 15 nt, Human
cuuagaagucacaca

SEQ ID NO: 1933016 - RNA, 14 nt, Human
cuuagacagucccu

SEQ ID NO: 1933017 - RNA, 15 nt, Human
cuuagacagucccug

SEQ ID NO: 1933018 - RNA, 16 nt, Human
cuuagacagucccugc

SEQ ID NO: 1933019 - RNA, 12 nt, Human
cuuagaacauuu

SEQ ID NO: 1933020 - RNA, 15 nt, Human
cuuagaacauuuuaa

SEQ ID NO: 1933021 - RNA, 16 nt, Human
cuuagaacauuuuaau

SEQ ID NO: 1933022 - RNA, 19 nt, Human
cuuagaacauuuuaauuca

SEQ ID NO: 1933023 - RNA, 11 nt, Human
cuuagacaguc

SEQ ID NO: 1933024 - RNA, 19 nt, Human
cuuagacagucccugccaa

SEQ ID NO: 1933025 - RNA, 17 nt, Human
cuuagacagucccugcc

SEQ ID NO: 1933026 - RNA, 18 nt, Human
cuuagacagucccugcca

SEQ ID NO: 1933027 - RNA, 12 nt, Human
cuguuuagauaa

SEQ ID NO: 1933028 - RNA, 15 nt, Human
cuguuuacaguguuc

SEQ ID NO: 1933029 - RNA, 13 nt, Human
cuguuuacagugu

SEQ ID NO: 1933030 - RNA, 18 nt, Human
cuguuuguuucugaaagg

SEQ ID NO: 1933031 - RNA, 15 nt, Human
cuguuuaugcuuuug

SEQ ID NO: 1933032 - RNA, 17 nt, Human
cuguuuucucuugagag

SEQ ID NO: 1933033 - RNA, 23 nt, Human
cuguuuuaauuuauacuggcaug

SEQ ID NO: 1933034 - RNA, 17 nt, Human
cuguuuugaaggcaaaa

SEQ ID NO: 1933035 - RNA, 21 nt, Human
cuguuuuguaaaguccccaga

SEQ ID NO: 1933036 - RNA, 20 nt, Human
cuguuuuguggucagcugua

SEQ ID NO: 1933037 - RNA, 14 nt, Human
cuguuuuguaaagu

SEQ ID NO: 1933038 - RNA, 16 nt, Human
cuguuuuguaaagucc

SEQ ID NO: 1933039 - RNA, 17 nt, Human
cuguuuuguaaaguccc

SEQ ID NO: 1933040 - RNA, 13 nt, Human
cuguuuucucuug

SEQ ID NO: 1933041 - RNA, 14 nt, Human
cuguuuucucuuga

SEQ ID NO: 1933042 - RNA, 21 nt, Human
cuguuuuauuuuaauucaguu

SEQ ID NO: 1933043 - RNA, 21 nt, Human
cuguuuguuucugaaagggac

SEQ ID NO: 1933044 - RNA, 23 nt, Human
cuguuuguuucugaaagggacgc

SEQ ID NO: 1933045 - RNA, 19 nt, Human
cuuaauauucuggagucau

SEQ ID NO: 1933046 - RNA, 14 nt, Human
cuuaauauucugga

SEQ ID NO: 1933047 - RNA, 16 nt, Human
cuuaaucuaaauggaa

SEQ ID NO: 1933048 - RNA, 14 nt, Human
cuuaaucuaaaugg

SEQ ID NO: 1933049 - RNA, 18 nt, Human
cuuaaugccacuaaauug

SEQ ID NO: 1933050 - RNA, 18 nt, Human
cuuaauccagcugaugag

SEQ ID NO: 1933051 - RNA, 22 nt, Human
cuuaacuucacauauugauuuc

SEQ ID NO: 1933052 - RNA, 17 nt, Human
cuuaacuucacauauug

SEQ ID NO: 1933053 - RNA, 16 nt, Human
cuuaacuucacauauu

SEQ ID NO: 1933054 - RNA, 15 nt, Human
cuuaacuucacauau

SEQ ID NO: 1933055 - RNA, 14 nt, Human
cuuaacuucacaua

SEQ ID NO: 1933056 - RNA, 12 nt, Human
cuuaacuucaca

SEQ ID NO: 1933057 - RNA, 17 nt, Human
cuuaacuccuuccagug

SEQ ID NO: 1933058 - RNA, 13 nt, Human
cuuccagcccaga

SEQ ID NO: 1933059 - RNA, 22 nt, Human
cuuccaggggugggacacccug

SEQ ID NO: 1933060 - RNA, 24 nt, Human
cuuccaggggugggacacccugug

SEQ ID NO: 1933061 - RNA, 14 nt, Human
cuuccagugaggcu

SEQ ID NO: 1933062 - RNA, 16 nt, Human
cuuccagguguuacug

SEQ ID NO: 1933063 - RNA, 19 nt, Human
cuuccagguguuacuguaa

SEQ ID NO: 1933064 - RNA, 20 nt, Human
cuuccagguguuacuguaau

SEQ ID NO: 1933065 - RNA, 22 nt, Human
cuuccagguguuacuguaauuc

SEQ ID NO: 1933066 - RNA, 15 nt, Human
cuuccagugaggcuc

SEQ ID NO: 1933067 - RNA, 17 nt, Human
cuucccucaccuuggca

SEQ ID NO: 1933068 - RNA, 18 nt, Human
cuucauuuccugugucuu

SEQ ID NO: 1933069 - RNA, 13 nt, Human
cuucagugccuua

SEQ ID NO: 1933070 - RNA, 14 nt, Human
cuucagugccuuau

SEQ ID NO: 1933071 - RNA, 11 nt, Human
cuucagugccu

SEQ ID NO: 1933072 - RNA, 12 nt, Human
cuucagugccuu

SEQ ID NO: 1933073 - RNA, 18 nt, Human
cuucaggucaggaguucg

SEQ ID NO: 1933074 - RNA, 14 nt, Human
cuuccaagagccug

SEQ ID NO: 1933075 - RNA, 23 nt, Human
cuuccacaagagcccaggccucc

SEQ ID NO: 1933076 - RNA, 22 nt, Human
cuuccacaagagcccaggccuc

SEQ ID NO: 1933077 - RNA, 15 nt, Human
cuuccaagagccuga

SEQ ID NO: 1933078 - RNA, 11 nt, Human
cuucagcugac

SEQ ID NO: 1933079 - RNA, 19 nt, Human
cuucagcccucaccccugg

SEQ ID NO: 1933080 - RNA, 17 nt, Human
cuucagcccucaccccu

SEQ ID NO: 1933081 - RNA, 16 nt, Human
cuucagcccucacccc

SEQ ID NO: 1933082 - RNA, 15 nt, Human
cuucagcccucaccc

SEQ ID NO: 1933083 - RNA, 19 nt, Human
cuucgggcuggccaucugg

SEQ ID NO: 1933084 - RNA, 19 nt, Human
cuucuaaacccaauccaaa

SEQ ID NO: 1933085 - RNA, 18 nt, Human
cuucuaaacuuccccauc

SEQ ID NO: 1933086 - RNA, 19 nt, Human
cuucuaaacuuccccaucu

SEQ ID NO: 1933087 - RNA, 22 nt, Human
cuucuaaacuuccccaucuucu

SEQ ID NO: 1933088 - RNA, 15 nt, Human
cuucuaaagguguug

SEQ ID NO: 1933089 - RNA, 21 nt, Human
cuucuaaagguguugucccuu

SEQ ID NO: 1933090 - RNA, 22 nt, Human
cuucuaaagguguugucccuuc

SEQ ID NO: 1933091 - RNA, 21 nt, Human
cuucucauuucaccccucccu

SEQ ID NO: 1933092 - RNA, 12 nt, Human
cuucucagccac

SEQ ID NO: 1933093 - RNA, 16 nt, Human
cuucgcuccugugucu

SEQ ID NO: 1933094 - RNA, 17 nt, Human
cuucggccuccauccug

SEQ ID NO: 1933095 - RNA, 19 nt, Human
cuucggccuccauccugag

SEQ ID NO: 1933096 - RNA, 18 nt, Human
cuucggccuccauccuga

SEQ ID NO: 1933097 - RNA, 20 nt, Human
cuucgggaggucgaggcagg

SEQ ID NO: 1933098 - RNA, 21 nt, Human
cuucgggaggucgaggcagga

SEQ ID NO: 1933099 - RNA, 15 nt, Human
cuucgggcugugccc

SEQ ID NO: 1933100 - RNA, 14 nt, Human
cuucgggcugugcc

SEQ ID NO: 1933101 - RNA, 13 nt, Human
cuucgcuccugug

SEQ ID NO: 1933102 - RNA, 21 nt, Human
cuucgacagcauuuuccucug

SEQ ID NO: 1933103 - RNA, 15 nt, Human
cuucgcuccuguguc

SEQ ID NO: 1933104 - RNA, 14 nt, Human
cuucgcuccugugu

SEQ ID NO: 1933105 - RNA, 15 nt, Human
cuucgaaaccuggga

SEQ ID NO: 1933106 - RNA, 15 nt, Human
cuuccuuuugaggga

SEQ ID NO: 1933107 - RNA, 14 nt, Human
cuucgacagcauuu

SEQ ID NO: 1933108 - RNA, 15 nt, Human
cuucgacagcauuuu

SEQ ID NO: 1933109 - RNA, 17 nt, Human
cuucgacagcauuuucc

SEQ ID NO: 1933110 - RNA, 17 nt, Human
cuuccuugcuuaaggua

SEQ ID NO: 1933111 - RNA, 18 nt, Human
cuuccuugagacacggag

SEQ ID NO: 1933112 - RNA, 20 nt, Human
cuuccuugagacacggagcc

SEQ ID NO: 1933113 - RNA, 23 nt, Human
cuuccuugagacacggagcccag

SEQ ID NO: 1933114 - RNA, 17 nt, Human
cuucugccauauucugu

SEQ ID NO: 1933115 - RNA, 15 nt, Human
cuucugccauauucu

SEQ ID NO: 1933116 - RNA, 21 nt, Human
cuucugccauauucuguuggc

SEQ ID NO: 1933117 - RNA, 20 nt, Human
cuucugccauuucugagauc

SEQ ID NO: 1933118 - RNA, 16 nt, Human
cuucucucaucucuua

SEQ ID NO: 1933119 - RNA, 14 nt, Human
cuucucucaucucu

SEQ ID NO: 1933120 - RNA, 11 nt, Human
cuucugcuacu

SEQ ID NO: 1933121 - RNA, 13 nt, Human
cuucugcuacugg

SEQ ID NO: 1933122 - RNA, 19 nt, Human
cuucugcuacuggcaaaag

SEQ ID NO: 1933123 - RNA, 17 nt, Human
cuucugcuucagccucc

SEQ ID NO: 1933124 - RNA, 16 nt, Human
cuucugcuucagccuc

SEQ ID NO: 1933125 - RNA, 14 nt, Human
cuucugcucagcuc

SEQ ID NO: 1933126 - RNA, 15 nt, Human
cuucugcucagcucu

SEQ ID NO: 1933127 - RNA, 16 nt, Human
cuucugcucagcucug

SEQ ID NO: 1933128 - RNA, 18 nt, Human
cuucugcucagcucuggg

SEQ ID NO: 1933129 - RNA, 18 nt, Human
cuucugcuucagccuccc

SEQ ID NO: 1933130 - RNA, 20 nt, Human
cuucugcuacuggcaaaagg

SEQ ID NO: 1933131 - RNA, 22 nt, Human
cuucuccuucaccuuugucccc

SEQ ID NO: 1933132 - RNA, 15 nt, Human
cuucuccacccugcu

SEQ ID NO: 1933133 - RNA, 14 nt, Human
cuucuccacccugc

SEQ ID NO: 1933134 - RNA, 14 nt, Human
cuucuccaggcugu

SEQ ID NO: 1933135 - RNA, 16 nt, Human
cuucuccacccugcuc

SEQ ID NO: 1933136 - RNA, 17 nt, Human
cuucuccaggcuguauc

SEQ ID NO: 1933137 - RNA, 22 nt, Human
cuucucauuucaccccucccuu

SEQ ID NO: 1933138 - RNA, 20 nt, Human
cuuucugaagccucacuuau

SEQ ID NO: 1933139 - RNA, 21 nt, Human
cuuucugauaacuagauggug

SEQ ID NO: 1933140 - RNA, 23 nt, Human
cuuucugauaacuagauggugcu

SEQ ID NO: 1933141 - RNA, 13 nt, Human
cuuucugaaauaa

SEQ ID NO: 1933142 - RNA, 16 nt, Human
cuuuccucuuuggucu

SEQ ID NO: 1933143 - RNA, 16 nt, Human
cuuuccuccuuccaug

SEQ ID NO: 1933144 - RNA, 13 nt, Human
cuuuccuccuucc

SEQ ID NO: 1933145 - RNA, 14 nt, Human
cuuuccuccuucca

SEQ ID NO: 1933146 - RNA, 19 nt, Human
cuuuccucaaaacuucaga

SEQ ID NO: 1933147 - RNA, 21 nt, Human
cuuuaggagggaguuaucuaa

SEQ ID NO: 1933148 - RNA, 15 nt, Human
cuuucugcagaaaca

SEQ ID NO: 1933149 - RNA, 19 nt, Human
cuuucuguauauacuuuuu

SEQ ID NO: 1933150 - RNA, 20 nt, Human
cuuucuguauauacuuuuuu

SEQ ID NO: 1933151 - RNA, 13 nt, Human
cuuucugcucagc

SEQ ID NO: 1933152 - RNA, 14 nt, Human
cuuucugcucagcu

SEQ ID NO: 1933153 - RNA, 16 nt, Human
cuuucugcucagcuuc

SEQ ID NO: 1933154 - RNA, 17 nt, Human
cuuucugcucagcuucu

SEQ ID NO: 1933155 - RNA, 18 nt, Human
cuuucuguauauacuuuu

SEQ ID NO: 1933156 - RNA, 14 nt, Human
cuuucugucucucu

SEQ ID NO: 1933157 - RNA, 17 nt, Human
cuuugacaaagguaaau

SEQ ID NO: 1933158 - RNA, 19 nt, Human
cuuugaaagccccagaaau

SEQ ID NO: 1933159 - RNA, 20 nt, Human
cuuugaaagccccagaaauc

SEQ ID NO: 1933160 - RNA, 22 nt, Human
cuuucuugaucaacaucuuuuc

SEQ ID NO: 1933161 - RNA, 21 nt, Human
cuuucuugaucaacaucuuuu

SEQ ID NO: 1933162 - RNA, 12 nt, Human
cuuuggaaagac

SEQ ID NO: 1933163 - RNA, 17 nt, Human
cuuugcuuugcuuucug

SEQ ID NO: 1933164 - RNA, 17 nt, Human
cuuugcuuucugcucag

SEQ ID NO: 1933165 - RNA, 19 nt, Human
cuuugcuuucugcucagcu

SEQ ID NO: 1933166 - RNA, 21 nt, Human
cuuugcuuucugcucagcuuc

SEQ ID NO: 1933167 - RNA, 11 nt, Human
cuuugcuuugc

SEQ ID NO: 1933168 - RNA, 23 nt, Human
cuuuggaaagacuuuuccaaccc

SEQ ID NO: 1933169 - RNA, 14 nt, Human
cuuugcuugaaaga

SEQ ID NO: 1933170 - RNA, 12 nt, Human
cuuugcuuucug

SEQ ID NO: 1933171 - RNA, 13 nt, Human
cuuugcuuucugc

SEQ ID NO: 1933172 - RNA, 14 nt, Human
cuuugcuuucugcu

SEQ ID NO: 1933173 - RNA, 15 nt, Human
cuuugcuuucugcuc

SEQ ID NO: 1933174 - RNA, 16 nt, Human
cuuugcuuucugcuca

SEQ ID NO: 1933175 - RNA, 19 nt, Human
cuuugacaaagguaaauca

SEQ ID NO: 1933176 - RNA, 14 nt, Human
cuuugcauuuugga

SEQ ID NO: 1933177 - RNA, 16 nt, Human
cuuugccaagaccuuu

SEQ ID NO: 1933178 - RNA, 17 nt, Human
cuuugccaagaccuuuc

SEQ ID NO: 1933179 - RNA, 20 nt, Human
cuuugccaagaccuuucaaa

SEQ ID NO: 1933180 - RNA, 13 nt, Human
cuuuguggcuucc

SEQ ID NO: 1933181 - RNA, 11 nt, Human
cuuuguggcca

SEQ ID NO: 1933182 - RNA, 12 nt, Human
cuuuguggccaa

SEQ ID NO: 1933183 - RNA, 13 nt, Human
cuuuguggccaag

SEQ ID NO: 1933184 - RNA, 12 nt, Human
cuuugugauuuu

SEQ ID NO: 1933185 - RNA, 19 nt, Human
cuuugugaggaagccgcug

SEQ ID NO: 1933186 - RNA, 16 nt, Human
cuuuguucuggcucuu

SEQ ID NO: 1933187 - RNA, 21 nt, Human
cuuuguucuggcucuuccagg

SEQ ID NO: 1933188 - RNA, 22 nt, Human
cuuuguggccaaggagcugcua

SEQ ID NO: 1933189 - RNA, 14 nt, Human
cuuuguggccaagg

SEQ ID NO: 1933190 - RNA, 15 nt, Human
cuuuguggccaagga

SEQ ID NO: 1933191 - RNA, 16 nt, Human
cuuuguggccaaggag

SEQ ID NO: 1933192 - RNA, 18 nt, Human
cuuuguggccaaggagcu

SEQ ID NO: 1933193 - RNA, 20 nt, Human
cuuuguggccaaggagcugc

SEQ ID NO: 1933194 - RNA, 21 nt, Human
cuuuguggccaaggagcugcu

SEQ ID NO: 1933195 - RNA, 23 nt, Human
cuuugggaggccaaggugggagg

SEQ ID NO: 1933196 - RNA, 14 nt, Human
cuuuggcagaguuc

SEQ ID NO: 1933197 - RNA, 13 nt, Human
cuuuggauuugac

SEQ ID NO: 1933198 - RNA, 15 nt, Human
cuuuggauuugacau

SEQ ID NO: 1933199 - RNA, 16 nt, Human
cuuuggauuugacauu

SEQ ID NO: 1933200 - RNA, 17 nt, Human
cuuuggauuugacauug

SEQ ID NO: 1933201 - RNA, 17 nt, Human
cuuugggccuggcuccc

SEQ ID NO: 1933202 - RNA, 23 nt, Human
cuuugugaggaagccgcuggggc

SEQ ID NO: 1933203 - RNA, 12 nt, Human
cuuugggccaga

SEQ ID NO: 1933204 - RNA, 13 nt, Human
cuuugggccagac

SEQ ID NO: 1933205 - RNA, 21 nt, Human
cuuugggccagacaugccaca

SEQ ID NO: 1933206 - RNA, 19 nt, Human
gaaaauaacaauaaaagac

SEQ ID NO: 1933207 - RNA, 19 nt, Human
gaaaacaugcuacacacug

SEQ ID NO: 1933208 - RNA, 14 nt, Human
gaaaacguggcugc

SEQ ID NO: 1933209 - RNA, 13 nt, Human
gaaaacggagcug

SEQ ID NO: 1933210 - RNA, 14 nt, Human
gaaaacggagcuga

SEQ ID NO: 1933211 - RNA, 22 nt, Human
gaaaacgcucucuacucugcuu

SEQ ID NO: 1933212 - RNA, 13 nt, Human
gaaaaccucuccu

SEQ ID NO: 1933213 - RNA, 18 nt, Human
gaaaagggaacugaacau

SEQ ID NO: 1933214 - RNA, 19 nt, Human
gaaaacacuguucucugcc

SEQ ID NO: 1933215 - RNA, 18 nt, Human
gaaaacaugcuacacacu

SEQ ID NO: 1933216 - RNA, 16 nt, Human
gaaaacaugcuacaca

SEQ ID NO: 1933217 - RNA, 20 nt, Human
gaaaacacuguucucugccc

SEQ ID NO: 1933218 - RNA, 21 nt, Human
gaaaacacuguucucugcccu

SEQ ID NO: 1933219 - RNA, 16 nt, Human
cuuuuuuagaguugau

SEQ ID NO: 1933220 - RNA, 21 nt, Human
cuuuguuuguugucagcugaa

SEQ ID NO: 1933221 - RNA, 15 nt, Human
cuuuucuguuugcua

SEQ ID NO: 1933222 - RNA, 13 nt, Human
cuuuugaacccag

SEQ ID NO: 1933223 - RNA, 14 nt, Human
cuuuugaacccagg

SEQ ID NO: 1933224 - RNA, 22 nt, Human
cuuuuguucuugguuuguaaau

SEQ ID NO: 1933225 - RNA, 18 nt, Human
cuuuugaacccaggaguu

SEQ ID NO: 1933226 - RNA, 20 nt, Human
cuuuugaacccaggaguuca

SEQ ID NO: 1933227 - RNA, 21 nt, Human
cuuuugaacgcccccccccac

SEQ ID NO: 1933228 - RNA, 21 nt, Human
cuuuugaauaaaaacuuugcu

SEQ ID NO: 1933229 - RNA, 19 nt, Human
cuuuuuaaaaauagacacu

SEQ ID NO: 1933230 - RNA, 13 nt, Human
cuuuuuaaaaaua

SEQ ID NO: 1933231 - RNA, 13 nt, Human
cuuuuuauuucug

SEQ ID NO: 1933232 - RNA, 16 nt, Human
cuuuuuauuucugcau

SEQ ID NO: 1933233 - RNA, 22 nt, Human
cuuuuugauuacaguguagcuu

SEQ ID NO: 1933234 - RNA, 13 nt, Human
cuuggacacugua

SEQ ID NO: 1933235 - RNA, 15 nt, Human
cuuggaagcuucugg

SEQ ID NO: 1933236 - RNA, 18 nt, Human
cuugggccacugugaaga

SEQ ID NO: 1933237 - RNA, 20 nt, Human
cuugggccacugugaagaga

SEQ ID NO: 1933238 - RNA, 15 nt, Human
cuugggcccucuggu

SEQ ID NO: 1933239 - RNA, 23 nt, Human
cuuguaauucuaaaugaauguuu

SEQ ID NO: 1933240 - RNA, 16 nt, Human
cuuguaauucuaaaug

SEQ ID NO: 1933241 - RNA, 17 nt, Human
cuuguacuuuauuuucu

SEQ ID NO: 1933242 - RNA, 15 nt, Human
cuuguaauucuaaau

SEQ ID NO: 1933243 - RNA, 13 nt, Human
cuuguaauucuaa

SEQ ID NO: 1933244 - RNA, 20 nt, Human
cuugguuuguaaauuaacuu

SEQ ID NO: 1933245 - RNA, 15 nt, Human
cuugguuuguaaauu

SEQ ID NO: 1933246 - RNA, 14 nt, Human
cuugguuuguaaau

SEQ ID NO: 1933247 - RNA, 14 nt, Human
cuuggggcuuccua

SEQ ID NO: 1933248 - RNA, 14 nt, Human
cuugggcccucugg

SEQ ID NO: 1933249 - RNA, 12 nt, Human
cuuguuucaauu

SEQ ID NO: 1933250 - RNA, 22 nt, Human
cuuguuucaauuccaccugcaa

SEQ ID NO: 1933251 - RNA, 17 nt, Human
cuuuaccuuuuuuauac

SEQ ID NO: 1933252 - RNA, 20 nt, Human
cuuuaccuuuuuuauacaua

SEQ ID NO: 1933253 - RNA, 19 nt, Human
cuuuaccuuuuuuauacau

SEQ ID NO: 1933254 - RNA, 16 nt, Human
cuuguuaagauaguua

SEQ ID NO: 1933255 - RNA, 16 nt, Human
cuuguggucccacccc

SEQ ID NO: 1933256 - RNA, 19 nt, Human
cuuguggucccaccccaca

SEQ ID NO: 1933257 - RNA, 22 nt, Human
cuuguguuuuuaacucaauauu

SEQ ID NO: 1933258 - RNA, 17 nt, Human
cuuguuaaugcuuucug

SEQ ID NO: 1933259 - RNA, 18 nt, Human
cuuguuaaugcuuucuga

SEQ ID NO: 1933260 - RNA, 15 nt, Human
cuuguggucccaccc

SEQ ID NO: 1933261 - RNA, 17 nt, Human
cuuguagccuuuugacu

SEQ ID NO: 1933262 - RNA, 14 nt, Human
cuuguagccuuuug

SEQ ID NO: 1933263 - RNA, 16 nt, Human
cuuguagccuuuugac

SEQ ID NO: 1933264 - RNA, 12 nt, Human
cuuguagccuuu

SEQ ID NO: 1933265 - RNA, 20 nt, Human
cuugcuugauuguauggugg

SEQ ID NO: 1933266 - RNA, 14 nt, Human
cuuggaagcuccgc

SEQ ID NO: 1933267 - RNA, 20 nt, Human
cuuggaagcuccgcuuucua

SEQ ID NO: 1933268 - RNA, 20 nt, Human
cuugcugcccugugcuccuc

SEQ ID NO: 1933269 - RNA, 22 nt, Human
cuugcucugcugacagacacag

SEQ ID NO: 1933270 - RNA, 23 nt, Human
cuugcucugcuugacaacaucug

SEQ ID NO: 1933271 - RNA, 13 nt, Human
cuugcucuggacc

SEQ ID NO: 1933272 - RNA, 14 nt, Human
cuugcucuggaccu

SEQ ID NO: 1933273 - RNA, 15 nt, Human
cuugcucuggaccug

SEQ ID NO: 1933274 - RNA, 16 nt, Human
cuugcucuggaccugc

SEQ ID NO: 1933275 - RNA, 17 nt, Human
cuugcucuggaccugcc

SEQ ID NO: 1933276 - RNA, 19 nt, Human
cuugcucuugaugccuggc

SEQ ID NO: 1933277 - RNA, 18 nt, Human
cuugcucuggaccugccc

SEQ ID NO: 1933278 - RNA, 17 nt, Human
cuugcucuugaugccug

SEQ ID NO: 1933279 - RNA, 18 nt, Human
cuugcucuugaugccugg

SEQ ID NO: 1933280 - RNA, 17 nt, Human
cuugcaugaggcuagug

SEQ ID NO: 1933281 - RNA, 13 nt, Human
cuugcaugaggcu

SEQ ID NO: 1933282 - RNA, 14 nt, Human
cuugcaugaggcua

SEQ ID NO: 1933283 - RNA, 18 nt, Human
cuugcccuggugccucac

SEQ ID NO: 1933284 - RNA, 17 nt, Human
cuugaggguugggcugg

SEQ ID NO: 1933285 - RNA, 15 nt, Human
cuugaggguugggcu

SEQ ID NO: 1933286 - RNA, 12 nt, Human
cuugagccuggg

SEQ ID NO: 1933287 - RNA, 15 nt, Human
cuugagccugggagg

SEQ ID NO: 1933288 - RNA, 12 nt, Human
cuucuggcucaa

SEQ ID NO: 1933289 - RNA, 16 nt, Human
cuucuggccucccaca

SEQ ID NO: 1933290 - RNA, 19 nt, Human
cuucuggccucccacagac

SEQ ID NO: 1933291 - RNA, 15 nt, Human
cuucuggccucccac

SEQ ID NO: 1933292 - RNA, 14 nt, Human
cuucuggccuccca

SEQ ID NO: 1933293 - RNA, 15 nt, Human
cuugagaaaaaaaga

SEQ ID NO: 1933294 - RNA, 12 nt, Human
cuugagaaaccu

SEQ ID NO: 1933295 - RNA, 13 nt, Human
cuugagaaaccuu

SEQ ID NO: 1933296 - RNA, 16 nt, Human
cuugagaaaaaaagaa

SEQ ID NO: 1933297 - RNA, 22 nt, Human
cuugagaaaaaaagaauaguug

SEQ ID NO: 1933298 - RNA, 11 nt, Human
cuugagaaacc

SEQ ID NO: 1933299 - RNA, 22 nt, Human
cuugagaaauauggacacuuaa

SEQ ID NO: 1933300 - RNA, 19 nt, Human
cuugagaacuuuauuucca

SEQ ID NO: 1933301 - RNA, 23 nt, Human
cuugagaagaccucaccuagaaa

SEQ ID NO: 1933302 - RNA, 17 nt, Human
cuugagaagauucuucc

SEQ ID NO: 1933303 - RNA, 21 nt, Human
cuugagaagauucuucccauu

SEQ ID NO: 1933304 - RNA, 17 nt, Human
cuugagacacggagccc

SEQ ID NO: 1933305 - RNA, 22 nt, Human
cuugagacacggagcccagccc

SEQ ID NO: 1933306 - RNA, 20 nt, Human
cuugcagacucuacagaggc

SEQ ID NO: 1933307 - RNA, 21 nt, Human
cuugcagacucuacagaggcc

SEQ ID NO: 1933308 - RNA, 18 nt, Human
cuugcaauggcagccuug

SEQ ID NO: 1933309 - RNA, 17 nt, Human
cuugcaauggcagccuu

SEQ ID NO: 1933310 - RNA, 16 nt, Human
cuugcaauggcagccu

SEQ ID NO: 1933311 - RNA, 15 nt, Human
cuugcaauggcagcc

SEQ ID NO: 1933312 - RNA, 21 nt, Human
cuugaguugauucagcucugc

SEQ ID NO: 1933313 - RNA, 20 nt, Human
cuugaguugauucagcucug

SEQ ID NO: 1933314 - RNA, 18 nt, Human
cuugaguugauucagcuc

SEQ ID NO: 1933315 - RNA, 19 nt, Human
cuugaguugauucagcucu

SEQ ID NO: 1933316 - RNA, 17 nt, Human
gacacgggcagccuggc

SEQ ID NO: 1933317 - RNA, 20 nt, Human
gacacgggcagccuggcucc

SEQ ID NO: 1933318 - RNA, 15 nt, Human
gacacggagcccagc

SEQ ID NO: 1933319 - RNA, 22 nt, Human
gacagacacaggcccggcucca

SEQ ID NO: 1933320 - RNA, 20 nt, Human
gacagacacaggcccggcuc

SEQ ID NO: 1933321 - RNA, 17 nt, Human
gacagacacaggcccgg

SEQ ID NO: 1933322 - RNA, 16 nt, Human
gacacuagaagauuuu

SEQ ID NO: 1933323 - RNA, 22 nt, Human
gacacgaauauugcugauggug

SEQ ID NO: 1933324 - RNA, 14 nt, Human
gaauuucccaggac

SEQ ID NO: 1933325 - RNA, 15 nt, Human
gaauuucccaggacc

SEQ ID NO: 1933326 - RNA, 16 nt, Human
gaauuucccaggaccc

SEQ ID NO: 1933327 - RNA, 17 nt, Human
gaauuucccaggacccu

SEQ ID NO: 1933328 - RNA, 22 nt, Human
gaauuucccaggacccugaagg

SEQ ID NO: 1933329 - RNA, 22 nt, Human
gaauuucccaaagcagugcaug

SEQ ID NO: 1933330 - RNA, 16 nt, Human
gaauuucccaaagcag

SEQ ID NO: 1933331 - RNA, 18 nt, Human
gaauuucccaaagcagug

SEQ ID NO: 1933332 - RNA, 16 nt, Human
gacagagugagacucu

SEQ ID NO: 1933333 - RNA, 21 nt, Human
gacagagucucacuguugccc

SEQ ID NO: 1933334 - RNA, 19 nt, Human
gacagagugagacucuguc

SEQ ID NO: 1933335 - RNA, 23 nt, Human
gacagaggcagccccauucugcc

SEQ ID NO: 1933336 - RNA, 13 nt, Human
gacagaggcccca

SEQ ID NO: 1933337 - RNA, 18 nt, Human
gacagaggccccagccuc

SEQ ID NO: 1933338 - RNA, 19 nt, Human
gacagaggccccagccucc

SEQ ID NO: 1933339 - RNA, 13 nt, Human
gacagagggggug

SEQ ID NO: 1933340 - RNA, 12 nt, Human
gacagaggcagc

SEQ ID NO: 1933341 - RNA, 20 nt, Human
gacagagcuacacaggggaa

SEQ ID NO: 1933342 - RNA, 23 nt, Human
gacagacucacaaccugaaccua

SEQ ID NO: 1933343 - RNA, 17 nt, Human
gacaguucauauguacc

SEQ ID NO: 1933344 - RNA, 15 nt, Human
gacaguucauaugua

SEQ ID NO: 1933345 - RNA, 19 nt, Human
gacaguugggugagaacaa

SEQ ID NO: 1933346 - RNA, 18 nt, Human
gacaguugggugagaaca

SEQ ID NO: 1933347 - RNA, 22 nt, Human
gacaggcauguucucugaggac

SEQ ID NO: 1933348 - RNA, 16 nt, Human
gacaggcaaauaaaag

SEQ ID NO: 1933349 - RNA, 23 nt, Human
gacaucaacugcaucaagaugug

SEQ ID NO: 1933350 - RNA, 16 nt, Human
gacaucaacugcauca

SEQ ID NO: 1933351 - RNA, 18 nt, Human
gacaggcaagcaccuccu

SEQ ID NO: 1933352 - RNA, 17 nt, Human
gacaggcaagcaccucc

SEQ ID NO: 1933353 - RNA, 13 nt, Human
gacaggcaagcac

SEQ ID NO: 1933354 - RNA, 19 nt, Human
gacaggcaaugcuggcugu

SEQ ID NO: 1933355 - RNA, 18 nt, Human
gacaggcaaugcuggcug

SEQ ID NO: 1933356 - RNA, 21 nt, Human
gacaggcaagcaccuccugcc

SEQ ID NO: 1933357 - RNA, 20 nt, Human
gacaggcaagcaccuccugc

SEQ ID NO: 1933358 - RNA, 21 nt, Human
gacaggcauguucucugagga

SEQ ID NO: 1933359 - RNA, 20 nt, Human
gacaggcauguucucugagg

SEQ ID NO: 1933360 - RNA, 23 nt, Human
gacaggcaaugcuggcuguuggc

SEQ ID NO: 1933361 - RNA, 24 nt, Human
gacaggcaaugcuggcuguuggcu

SEQ ID NO: 1933362 - RNA, 16 nt, Human
gaccacaccugccucu

SEQ ID NO: 1933363 - RNA, 12 nt, Human
gaccacaccugc

SEQ ID NO: 1933364 - RNA, 12 nt, Human
gaccacagcaca

SEQ ID NO: 1933365 - RNA, 14 nt, Human
gaccacagcacagc

SEQ ID NO: 1933366 - RNA, 15 nt, Human
gaccacagcacagcc

SEQ ID NO: 1933367 - RNA, 16 nt, Human
gaccacagcacagcca

SEQ ID NO: 1933368 - RNA, 21 nt, Human
gaccaauauuguacaguuuuu

SEQ ID NO: 1933369 - RNA, 19 nt, Human
gaccaauauuguacaguuu

SEQ ID NO: 1933370 - RNA, 18 nt, Human
gaccaauauuguacaguu

SEQ ID NO: 1933371 - RNA, 17 nt, Human
gaccaauauuguacagu

SEQ ID NO: 1933372 - RNA, 18 nt, Human
gaccacaaaacuuuucua

SEQ ID NO: 1933373 - RNA, 13 nt, Human
gacaucagcuggu

SEQ ID NO: 1933374 - RNA, 16 nt, Human
gaccaaggagaugaag

SEQ ID NO: 1933375 - RNA, 16 nt, Human
gaccacguuucuaaag

SEQ ID NO: 1933376 - RNA, 21 nt, Human
gaccagacaccuugacagggc

SEQ ID NO: 1933377 - RNA, 22 nt, Human
gaccagacaccuugacagggca

SEQ ID NO: 1933378 - RNA, 18 nt, Human
gaccacugcagaagacag

SEQ ID NO: 1933379 - RNA, 16 nt, Human
gaccacugcagaagac

SEQ ID NO: 1933380 - RNA, 24 nt, Human
gaccagacaccuugacagggcaca

SEQ ID NO: 1933381 - RNA, 23 nt, Human
gaccagacaccuugacagggcac

SEQ ID NO: 1933382 - RNA, 21 nt, Human
gaccagagcugccaccugccu

SEQ ID NO: 1933383 - RNA, 20 nt, Human
gaccagcaccaucucuccuc

SEQ ID NO: 1933384 - RNA, 21 nt, Human
gaccagcaccaucucuccucc

SEQ ID NO: 1933385 - RNA, 13 nt, Human
gaccagcaaauac

SEQ ID NO: 1933386 - RNA, 21 nt, Human
gaccccgacgccacagcccag

SEQ ID NO: 1933387 - RNA, 10 nt, Human
gacccugagg

SEQ ID NO: 1933388 - RNA, 18 nt, Human
gaccccgacgccacagcc

SEQ ID NO: 1933389 - RNA, 17 nt, Human
gaccccgacgccacagc

SEQ ID NO: 1933390 - RNA, 19 nt, Human
gacccccgcccccugcccu

SEQ ID NO: 1933391 - RNA, 12 nt, Human
gacccccuggag

SEQ ID NO: 1933392 - RNA, 11 nt, Human
gacccugaggc

SEQ ID NO: 1933393 - RNA, 12 nt, Human
gacccugaggcc

SEQ ID NO: 1933394 - RNA, 16 nt, Human
gacccugaggcccaga

SEQ ID NO: 1933395 - RNA, 17 nt, Human
gacccugcccugugggc

SEQ ID NO: 1933396 - RNA, 20 nt, Human
gacccugcccugugggcccc

SEQ ID NO: 1933397 - RNA, 22 nt, Human
gacccugcccugugggccccca

SEQ ID NO: 1933398 - RNA, 13 nt, Human
gacccccagcucc

SEQ ID NO: 1933399 - RNA, 17 nt, Human
gacccccagcuccggcc

SEQ ID NO: 1933400 - RNA, 23 nt, Human
gacccccagcuccggccuguccu

SEQ ID NO: 1933401 - RNA, 11 nt, Human
gacccccgccc

SEQ ID NO: 1933402 - RNA, 15 nt, Human
gacccccgcccccug

SEQ ID NO: 1933403 - RNA, 16 nt, Human
gacccccgcccccugc

SEQ ID NO: 1933404 - RNA, 18 nt, Human
gacccccgcccccugccc

SEQ ID NO: 1933405 - RNA, 19 nt, Human
gacccaaaaggcagaagca

SEQ ID NO: 1933406 - RNA, 18 nt, Human
gacccaaaaggcagaagc

SEQ ID NO: 1933407 - RNA, 23 nt, Human
gaccagcagcgccuuucccaacu

SEQ ID NO: 1933408 - RNA, 16 nt, Human
gaccagcagcgccuuu

SEQ ID NO: 1933409 - RNA, 20 nt, Human
gaccagcagcgccuuuccca

SEQ ID NO: 1933410 - RNA, 13 nt, Human
gaccagcagcgcc

SEQ ID NO: 1933411 - RNA, 14 nt, Human
gaccagcagcgccu

SEQ ID NO: 1933412 - RNA, 20 nt, Human
gacccaaaaggcagaagcaa

SEQ ID NO: 1933413 - RNA, 17 nt, Human
gacccagacacaucgca

SEQ ID NO: 1933414 - RNA, 13 nt, Human
gacccaugcugcc

SEQ ID NO: 1933415 - RNA, 23 nt, Human
gacccaugaguuggggucuggca

SEQ ID NO: 1933416 - RNA, 18 nt, Human
gacccaugcugcccugug

SEQ ID NO: 1933417 - RNA, 19 nt, Human
gacccaugcugcccuguga

SEQ ID NO: 1933418 - RNA, 20 nt, Human
gacccaugcugcccugugag

SEQ ID NO: 1933419 - RNA, 15 nt, Human
gacccagugccccca

SEQ ID NO: 1933420 - RNA, 23 nt, Human
gacccagccccuugagaaaccuu

SEQ ID NO: 1933421 - RNA, 22 nt, Human
gacccagccccuugagaaaccu

SEQ ID NO: 1933422 - RNA, 16 nt, Human
gacccagugcccccac

SEQ ID NO: 1933423 - RNA, 17 nt, Human
gacccagugcccccacu

SEQ ID NO: 1933424 - RNA, 20 nt, Human
gacccagugcccccacugac

SEQ ID NO: 1933425 - RNA, 15 nt, Human
gacugaccuggucca

SEQ ID NO: 1933426 - RNA, 22 nt, Human
gacugaccaauauuguacaguu

SEQ ID NO: 1933427 - RNA, 21 nt, Human
gacugaccaauauuguacagu

SEQ ID NO: 1933428 - RNA, 19 nt, Human
gacugaccugguccacagg

SEQ ID NO: 1933429 - RNA, 20 nt, Human
gacugaccugguccacaggg

SEQ ID NO: 1933430 - RNA, 22 nt, Human
gacugaccugguccacagggca

SEQ ID NO: 1933431 - RNA, 23 nt, Human
gacugaccugguccacagggcac

SEQ ID NO: 1933432 - RNA, 11 nt, Human
gacugagaaau

SEQ ID NO: 1933433 - RNA, 15 nt, Human
gacucuacagaggcc

SEQ ID NO: 1933434 - RNA, 16 nt, Human
gacugaauuucuuuug

SEQ ID NO: 1933435 - RNA, 21 nt, Human
gacucuacagaggccaugggc

SEQ ID NO: 1933436 - RNA, 15 nt, Human
gacuacaggcaccca

SEQ ID NO: 1933437 - RNA, 13 nt, Human
gacuacaggcacc

SEQ ID NO: 1933438 - RNA, 18 nt, Human
gacuacaggcacccacca

SEQ ID NO: 1933439 - RNA, 18 nt, Human
gacuccugcaggcagcca

SEQ ID NO: 1933440 - RNA, 19 nt, Human
gacuccugcaggcagccag

SEQ ID NO: 1933441 - RNA, 20 nt, Human
gacuccugcaggcagccagg

SEQ ID NO: 1933442 - RNA, 21 nt, Human
gacuccugcaggcagccaggc

SEQ ID NO: 1933443 - RNA, 15 nt, Human
gacugaucaggaccu

SEQ ID NO: 1933444 - RNA, 13 nt, Human
gacugagaaauuu

SEQ ID NO: 1933445 - RNA, 19 nt, Human
gacugaccuugaugagcug

SEQ ID NO: 1933446 - RNA, 14 nt, Human
gacugaggccugag

SEQ ID NO: 1933447 - RNA, 13 nt, Human
gacugaggccuga

SEQ ID NO: 1933448 - RNA, 18 nt, Human
gacugaguacguugugca

SEQ ID NO: 1933449 - RNA, 16 nt, Human
gacugaggggagggga

SEQ ID NO: 1933450 - RNA, 23 nt, Human
gacugaggccugagcgcuccugc

SEQ ID NO: 1933451 - RNA, 21 nt, Human
gacugaggccugagcgcuccu

SEQ ID NO: 1933452 - RNA, 23 nt, Human
gacuggccaagguuuggggaaga

SEQ ID NO: 1933453 - RNA, 12 nt, Human
gacuucaucccu

SEQ ID NO: 1933454 - RNA, 20 nt, Human
gacuucaucccucuggggcu

SEQ ID NO: 1933455 - RNA, 16 nt, Human
gacuuauuuauauaaa

SEQ ID NO: 1933456 - RNA, 23 nt, Human
gacuuacuguacaugaaaacaca

SEQ ID NO: 1933457 - RNA, 18 nt, Human
gacuuacuguacaugaaa

SEQ ID NO: 1933458 - RNA, 12 nt, Human
gacuuacuguac

SEQ ID NO: 1933459 - RNA, 16 nt, Human
gacuuacuguacauga

SEQ ID NO: 1933460 - RNA, 15 nt, Human
gacuuacuguacaug

SEQ ID NO: 1933461 - RNA, 22 nt, Human
gaccuggcacuggaugcagaaa

SEQ ID NO: 1933462 - RNA, 18 nt, Human
gaccuggcacuggaugca

SEQ ID NO: 1933463 - RNA, 10 nt, Human
gaccuggcag

SEQ ID NO: 1933464 - RNA, 15 nt, Human
gaccuggcagcucug

SEQ ID NO: 1933465 - RNA, 15 nt, Human
gacccuugugguccc

SEQ ID NO: 1933466 - RNA, 16 nt, Human
gaccuggcagcucugg

SEQ ID NO: 1933467 - RNA, 19 nt, Human
gacccuugccgucuaccug

SEQ ID NO: 1933468 - RNA, 20 nt, Human
gacccuugccgucuaccuga

SEQ ID NO: 1933469 - RNA, 23 nt, Human
gacccuugccgucuaccugaggg

SEQ ID NO: 1933470 - RNA, 12 nt, Human
gaccuguaauca

SEQ ID NO: 1933471 - RNA, 15 nt, Human
gaccugucuccuggc

SEQ ID NO: 1933472 - RNA, 16 nt, Human
gaccugucuccuggcg

SEQ ID NO: 1933473 - RNA, 17 nt, Human
gaccugguccacagggc

SEQ ID NO: 1933474 - RNA, 18 nt, Human
gaccugguccacagggca

SEQ ID NO: 1933475 - RNA, 19 nt, Human
gaccugguccacagggcac

SEQ ID NO: 1933476 - RNA, 19 nt, Human
gaccuguggccaaguucuu

SEQ ID NO: 1933477 - RNA, 23 nt, Human
gaccugugagcccagcuggguca

SEQ ID NO: 1933478 - RNA, 15 nt, Human
gaccugugagcccag

SEQ ID NO: 1933479 - RNA, 16 nt, Human
gaccugugagcccagc

SEQ ID NO: 1933480 - RNA, 19 nt, Human
gaccugugagcccagcugg

SEQ ID NO: 1933481 - RNA, 18 nt, Human
gaccuguuagcagacagg

SEQ ID NO: 1933482 - RNA, 19 nt, Human
gaccuguuagcagacaggc

SEQ ID NO: 1933483 - RNA, 17 nt, Human
gaccuguuagcagacag

SEQ ID NO: 1933484 - RNA, 14 nt, Human
gaccuugaacuggg

SEQ ID NO: 1933485 - RNA, 15 nt, Human
gaccuucuaggaagc

SEQ ID NO: 1933486 - RNA, 20 nt, Human
gaccuucuccuucaccuuug

SEQ ID NO: 1933487 - RNA, 21 nt, Human
gaccuucuccuucaccuuugu

SEQ ID NO: 1933488 - RNA, 14 nt, Human
gaccuucuccuuca

SEQ ID NO: 1933489 - RNA, 19 nt, Human
gaccuucgggcugugcccg

SEQ ID NO: 1933490 - RNA, 18 nt, Human
gaccuucgggcugugccc

SEQ ID NO: 1933491 - RNA, 15 nt, Human
gaccuucuccuucac

SEQ ID NO: 1933492 - RNA, 16 nt, Human
gaccuucuccuucacc

SEQ ID NO: 1933493 - RNA, 16 nt, Human
gaccuucgggcugugc

SEQ ID NO: 1933494 - RNA, 18 nt, Human
gaccuuccaagagccuga

SEQ ID NO: 1933495 - RNA, 17 nt, Human
gaccuuccaagagccug

SEQ ID NO: 1933496 - RNA, 16 nt, Human
gaccuuccaagagccu

SEQ ID NO: 1933497 - RNA, 13 nt, Human
gaccuuaggccuu

SEQ ID NO: 1933498 - RNA, 15 nt, Human
gaccuuaggccuucc

SEQ ID NO: 1933499 - RNA, 16 nt, Human
gaccuuaggccuuccu

SEQ ID NO: 1933500 - RNA, 18 nt, Human
gaccuuaggccuuccucu

SEQ ID NO: 1933501 - RNA, 21 nt, Human
gaccuuaggccuuccucucuc

SEQ ID NO: 1933502 - RNA, 12 nt, Human
gacggcuccacu

SEQ ID NO: 1933503 - RNA, 18 nt, Human
gacggcuccacuaggacu

SEQ ID NO: 1933504 - RNA, 12 nt, Human
gacggcugggca

SEQ ID NO: 1933505 - RNA, 13 nt, Human
gacggcugggcac

SEQ ID NO: 1933506 - RNA, 18 nt, Human
gacggcugggcacacgcc

SEQ ID NO: 1933507 - RNA, 17 nt, Human
gacgugauuuugcugua

SEQ ID NO: 1933508 - RNA, 12 nt, Human
gacguggcucag

SEQ ID NO: 1933509 - RNA, 14 nt, Human
gacguggcucagcc

SEQ ID NO: 1933510 - RNA, 16 nt, Human
gacgugauuuugcugu

SEQ ID NO: 1933511 - RNA, 13 nt, Human
gacggagucccac

SEQ ID NO: 1933512 - RNA, 21 nt, Human
gacgcugugcugcccugccca

SEQ ID NO: 1933513 - RNA, 22 nt, Human
gacgcugugcugcccugcccac

SEQ ID NO: 1933514 - RNA, 22 nt, Human
gaccuuuaagagaaaugagcug

SEQ ID NO: 1933515 - RNA, 11 nt, Human
gaccuuucaau

SEQ ID NO: 1933516 - RNA, 19 nt, Human
gaccuuucaauaggaaaaa

SEQ ID NO: 1933517 - RNA, 20 nt, Human
gaccuuucaauaggaaaaac

SEQ ID NO: 1933518 - RNA, 13 nt, Human
gacgugggcuggg

SEQ ID NO: 1933519 - RNA, 20 nt, Human
gacgugggcugggcccacaa

SEQ ID NO: 1933520 - RNA, 15 nt, Human
gacguggcucagcca

SEQ ID NO: 1933521 - RNA, 16 nt, Human
gacguggcucagccag

SEQ ID NO: 1933522 - RNA, 11 nt, Human
gacguguuaug

SEQ ID NO: 1933523 - RNA, 14 nt, Human
gacguguuaugacu

SEQ ID NO: 1933524 - RNA, 15 nt, Human
gacguguuaugacuc

SEQ ID NO: 1933525 - RNA, 18 nt, Human
gacguuuacaagcccccc

SEQ ID NO: 1933526 - RNA, 16 nt, Human
gacuaacuugucuuug

SEQ ID NO: 1933527 - RNA, 23 nt, Human
gacuaacuugucuuuggacccug

SEQ ID NO: 1933528 - RNA, 12 nt, Human
gacuaaaugaaa

SEQ ID NO: 1933529 - RNA, 18 nt, Human
gacuaacuaucaaauaga

SEQ ID NO: 1933530 - RNA, 18 nt, Human
gacuaaccccaccacacc

SEQ ID NO: 1933531 - RNA, 18 nt, Human
gaaauuguauuacaaauc

SEQ ID NO: 1933532 - RNA, 16 nt, Human
gaaauuuauaaacuuu

SEQ ID NO: 1933533 - RNA, 17 nt, Human
gaaauuuauaaacuuuu

SEQ ID NO: 1933534 - RNA, 13 nt, Human
gaacacucugaga

SEQ ID NO: 1933535 - RNA, 14 nt, Human
gaacacucugagac

SEQ ID NO: 1933536 - RNA, 16 nt, Human
gaaauuguauuacaaa

SEQ ID NO: 1933537 - RNA, 15 nt, Human
gaacacucugagacu

SEQ ID NO: 1933538 - RNA, 16 nt, Human
gaacacucuuuugcuu

SEQ ID NO: 1933539 - RNA, 18 nt, Human
gaacacucuuuugcuuua

SEQ ID NO: 1933540 - RNA, 20 nt, Human
gaacagugauuaccagggac

SEQ ID NO: 1933541 - RNA, 16 nt, Human
gaacagugauuaccag

SEQ ID NO: 1933542 - RNA, 21 nt, Human
gaacagcggcuggacuuggag

SEQ ID NO: 1933543 - RNA, 15 nt, Human
gaacauaaagcaaau

SEQ ID NO: 1933544 - RNA, 17 nt, Human
gaacauccaaccuuccc

SEQ ID NO: 1933545 - RNA, 18 nt, Human
gaacauccaaccuuccca

SEQ ID NO: 1933546 - RNA, 22 nt, Human
gaacauaaagcaaauagacaca

SEQ ID NO: 1933547 - RNA, 16 nt, Human
gaacucaacuuugaca

SEQ ID NO: 1933548 - RNA, 13 nt, Human
gaacucagaucca

SEQ ID NO: 1933549 - RNA, 14 nt, Human
gaacucagauccag

SEQ ID NO: 1933550 - RNA, 14 nt, Human
gaacucacuggggc

SEQ ID NO: 1933551 - RNA, 16 nt, Human
gaacucacuggggccu

SEQ ID NO: 1933552 - RNA, 15 nt, Human
gaacucagauccagg

SEQ ID NO: 1933553 - RNA, 16 nt, Human
gaacucagauccaggg

SEQ ID NO: 1933554 - RNA, 18 nt, Human
gaacucagauccagggac

SEQ ID NO: 1933555 - RNA, 19 nt, Human
gaacucagauccagggaca

SEQ ID NO: 1933556 - RNA, 21 nt, Human
gaacucagauccagggacaga

SEQ ID NO: 1933557 - RNA, 14 nt, Human
gaacuacugaggau

SEQ ID NO: 1933558 - RNA, 23 nt, Human
gaacuacaaacaaaauuucuauu

SEQ ID NO: 1933559 - RNA, 22 nt, Human
gaacuacaaacaaaauuucuau

SEQ ID NO: 1933560 - RNA, 22 nt, Human
gaaccuuuugagugccuuacac

SEQ ID NO: 1933561 - RNA, 18 nt, Human
gaacgauauguagcagaa

SEQ ID NO: 1933562 - RNA, 21 nt, Human
gaacgauauguagcagaaagg

SEQ ID NO: 1933563 - RNA, 18 nt, Human
gaacgauuuagaaagaag

SEQ ID NO: 1933564 - RNA, 15 nt, Human
gaacguuuuuccugu

SEQ ID NO: 1933565 - RNA, 17 nt, Human
gaacuaaacucauuuau

SEQ ID NO: 1933566 - RNA, 12 nt, Human
gaacguuuuucc

SEQ ID NO: 1933567 - RNA, 18 nt, Human
gaacgcccccccccaccc

SEQ ID NO: 1933568 - RNA, 19 nt, Human
gaacgcccccccccacccc

SEQ ID NO: 1933569 - RNA, 20 nt, Human
gaacgcccccccccaccccu

SEQ ID NO: 1933570 - RNA, 18 nt, Human
gaaccuuuugagugccuu

SEQ ID NO: 1933571 - RNA, 19 nt, Human
gaaccuuuugagugccuua

SEQ ID NO: 1933572 - RNA, 21 nt, Human
gaaccuuuugagugccuuaca

SEQ ID NO: 1933573 - RNA, 14 nt, Human
gaaccucagccugg

SEQ ID NO: 1933574 - RNA, 15 nt, Human
gaaccucagccuggc

SEQ ID NO: 1933575 - RNA, 17 nt, Human
gaaccucagccuggcca

SEQ ID NO: 1933576 - RNA, 18 nt, Human
gaaccucagccuggccag

SEQ ID NO: 1933577 - RNA, 19 nt, Human
gaaccucagccuggccaga

SEQ ID NO: 1933578 - RNA, 21 nt, Human
gaaccucagccuggccagaca

SEQ ID NO: 1933579 - RNA, 17 nt, Human
gaacauugcaauagaaa

SEQ ID NO: 1933580 - RNA, 15 nt, Human
gaacauugcaauaga

SEQ ID NO: 1933581 - RNA, 13 nt, Human
gaacauugcaaua

SEQ ID NO: 1933582 - RNA, 14 nt, Human
gaacaucccuccug

SEQ ID NO: 1933583 - RNA, 12 nt, Human
gaaccucagccu

SEQ ID NO: 1933584 - RNA, 13 nt, Human
gaaccucagccug

SEQ ID NO: 1933585 - RNA, 11 nt, Human
gaaccaaagcg

SEQ ID NO: 1933586 - RNA, 16 nt, Human
gaaccuauuucucuuu

SEQ ID NO: 1933587 - RNA, 17 nt, Human
gaaccuauuucucuuuc

SEQ ID NO: 1933588 - RNA, 21 nt, Human
gaaccuauuucucuuucuuua

SEQ ID NO: 1933589 - RNA, 18 nt, Human
gaaccuauuucucuuucu

SEQ ID NO: 1933590 - RNA, 18 nt, Human
gaagauguagaggagaaa

SEQ ID NO: 1933591 - RNA, 15 nt, Human
gaagauacugaaaua

SEQ ID NO: 1933592 - RNA, 20 nt, Human
gaagauaauauuaaggaaga

SEQ ID NO: 1933593 - RNA, 21 nt, Human
gaagauaaguguauuuuucaa

SEQ ID NO: 1933594 - RNA, 20 nt, Human
gaagagguuuuaaagcuucc

SEQ ID NO: 1933595 - RNA, 12 nt, Human
gaagagggcugc

SEQ ID NO: 1933596 - RNA, 18 nt, Human
gaagcauuuacuuugugu

SEQ ID NO: 1933597 - RNA, 16 nt, Human
gaagccacaggccuga

SEQ ID NO: 1933598 - RNA, 15 nt, Human
gaagccacaggccug

SEQ ID NO: 1933599 - RNA, 20 nt, Human
gaagccaauucagacaggca

SEQ ID NO: 1933600 - RNA, 18 nt, Human
gaagccaauucagacagg

SEQ ID NO: 1933601 - RNA, 17 nt, Human
gaagcauuuacuuugug

SEQ ID NO: 1933602 - RNA, 20 nt, Human
gaagccagcaggcucucagg

SEQ ID NO: 1933603 - RNA, 18 nt, Human
gaagccacaggccugaga

SEQ ID NO: 1933604 - RNA, 17 nt, Human
gaagccacaggccugag

SEQ ID NO: 1933605 - RNA, 19 nt, Human
gaagccagcaggcucucag

SEQ ID NO: 1933606 - RNA, 21 nt, Human
gaagccagcaggcucucaggc

SEQ ID NO: 1933607 - RNA, 22 nt, Human
gaagccagcaggcucucaggcc

SEQ ID NO: 1933608 - RNA, 13 nt, Human
gaagcccaggaaa

SEQ ID NO: 1933609 - RNA, 15 nt, Human
gaagcccaggaaagg

SEQ ID NO: 1933610 - RNA, 16 nt, Human
gaagcccaggaaaggc

SEQ ID NO: 1933611 - RNA, 19 nt, Human
gaagcccaggaaaggcucc

SEQ ID NO: 1933612 - RNA, 23 nt, Human
gaagcccuucuaccuuccugcaa

SEQ ID NO: 1933613 - RNA, 22 nt, Human
gaagcccccagcuaagaaccug

SEQ ID NO: 1933614 - RNA, 20 nt, Human
gaagcccccaccgugggcag

SEQ ID NO: 1933615 - RNA, 14 nt, Human
gaagcccccagcua

SEQ ID NO: 1933616 - RNA, 17 nt, Human
gaagcccccagcuaaga

SEQ ID NO: 1933617 - RNA, 21 nt, Human
gaagcccccagcuaagaaccu

SEQ ID NO: 1933618 - RNA, 14 nt, Human
gaagacuuuggaaa

SEQ ID NO: 1933619 - RNA, 17 nt, Human
gaagacuuuggaaagag

SEQ ID NO: 1933620 - RNA, 20 nt, Human
gaagacuuuucuuucagcca

SEQ ID NO: 1933621 - RNA, 12 nt, Human
gaagagaaacca

SEQ ID NO: 1933622 - RNA, 19 nt, Human
gaagagaaugcacaaacag

SEQ ID NO: 1933623 - RNA, 17 nt, Human
gaagagaagggcagggc

SEQ ID NO: 1933624 - RNA, 12 nt, Human
gaagagccacag

SEQ ID NO: 1933625 - RNA, 13 nt, Human
gaagagccacagu

SEQ ID NO: 1933626 - RNA, 21 nt, Human
gaagagaguccauauuucaau

SEQ ID NO: 1933627 - RNA, 22 nt, Human
gaacucaucuagguaaauuaca

SEQ ID NO: 1933628 - RNA, 19 nt, Human
gaagaaccaguccccccac

SEQ ID NO: 1933629 - RNA, 22 nt, Human
gaagaaccaguccccccacccu

SEQ ID NO: 1933630 - RNA, 19 nt, Human
gaagaaaaaaggccuugaa

SEQ ID NO: 1933631 - RNA, 20 nt, Human
gaacucaucuagguaaauua

SEQ ID NO: 1933632 - RNA, 21 nt, Human
gaacucaucuagguaaauuac

SEQ ID NO: 1933633 - RNA, 23 nt, Human
gaacuuugaccucugcagcaaua

SEQ ID NO: 1933634 - RNA, 11 nt, Human
gaagacuuugg

SEQ ID NO: 1933635 - RNA, 13 nt, Human
gaagacuuuggaa

SEQ ID NO: 1933636 - RNA, 15 nt, Human
gaagacuggaagcua

SEQ ID NO: 1933637 - RNA, 16 nt, Human
gaagacuggaagcuaa

SEQ ID NO: 1933638 - RNA, 17 nt, Human
gaagacuggaagcuaau

SEQ ID NO: 1933639 - RNA, 23 nt, Human
gaagaacggggcucuucucauuu

SEQ ID NO: 1933640 - RNA, 22 nt, Human
gaagaacggggcucuucucauu

SEQ ID NO: 1933641 - RNA, 20 nt, Human
gaagaacggggcucuucuca

SEQ ID NO: 1933642 - RNA, 13 nt, Human
gaagaacggggcu

SEQ ID NO: 1933643 - RNA, 23 nt, Human
gaagucucuuuuuuuggcccagg

SEQ ID NO: 1933644 - RNA, 21 nt, Human
gaaguuucugccgcagcccug

SEQ ID NO: 1933645 - RNA, 15 nt, Human
gaagucuuagaugua

SEQ ID NO: 1933646 - RNA, 20 nt, Human
gaaguuucugccgcagcccu

SEQ ID NO: 1933647 - RNA, 23 nt, Human
gaaguaguggagccccugcucug

SEQ ID NO: 1933648 - RNA, 14 nt, Human
gaaguauccuucag

SEQ ID NO: 1933649 - RNA, 16 nt, Human
gaaguauccuucagcc

SEQ ID NO: 1933650 - RNA, 12 nt, Human
gaaguaugggaa

SEQ ID NO: 1933651 - RNA, 15 nt, Human
gaaguacuggagaaa

SEQ ID NO: 1933652 - RNA, 18 nt, Human
gaaguacuauaauuuacc

SEQ ID NO: 1933653 - RNA, 22 nt, Human
gaaguaauaugcacacauuuuu

SEQ ID NO: 1933654 - RNA, 18 nt, Human
gaaggugcugacggccag

SEQ ID NO: 1933655 - RNA, 19 nt, Human
gaaggugcugacggccagg

SEQ ID NO: 1933656 - RNA, 21 nt, Human
gaaggugcugacggccaggga

SEQ ID NO: 1933657 - RNA, 16 nt, Human
gaagggggcugggaca

SEQ ID NO: 1933658 - RNA, 19 nt, Human
gaagggggcugggacaugg

SEQ ID NO: 1933659 - RNA, 22 nt, Human
gaagggguaggauuacuaggug

SEQ ID NO: 1933660 - RNA, 19 nt, Human
gaaggggguggugucucca

SEQ ID NO: 1933661 - RNA, 12 nt, Human
gaaggggguggu

SEQ ID NO: 1933662 - RNA, 14 nt, Human
gaagcuaagcugca

SEQ ID NO: 1933663 - RNA, 14 nt, Human
gaagcggcuggcag

SEQ ID NO: 1933664 - RNA, 22 nt, Human
gaauagcugggacuacaggugu

SEQ ID NO: 1933665 - RNA, 20 nt, Human
gaauacucuuauaucuauau

SEQ ID NO: 1933666 - RNA, 23 nt, Human
gaauagcugggacuacaggugug

SEQ ID NO: 1933667 - RNA, 13 nt, Human
gaauaccuguccc

SEQ ID NO: 1933668 - RNA, 15 nt, Human
gaauaccuguccccc

SEQ ID NO: 1933669 - RNA, 13 nt, Human
gaauaccuguggu

SEQ ID NO: 1933670 - RNA, 17 nt, Human
gaauauuugaauguaug

SEQ ID NO: 1933671 - RNA, 19 nt, Human
gaauauuugguuuuccugu

SEQ ID NO: 1933672 - RNA, 20 nt, Human
gaauauuuucauuaaaagcu

SEQ ID NO: 1933673 - RNA, 21 nt, Human
gaauauuuucauuaaaagcua

SEQ ID NO: 1933674 - RNA, 21 nt, Human
gaauacagaggcaacugcauu

SEQ ID NO: 1933675 - RNA, 17 nt, Human
gaauaauacaguaucuc

SEQ ID NO: 1933676 - RNA, 16 nt, Human
gaauaauaaauauuua

SEQ ID NO: 1933677 - RNA, 20 nt, Human
gaaguuugagaucagccugg

SEQ ID NO: 1933678 - RNA, 13 nt, Human
gaaguuuuacauu

SEQ ID NO: 1933679 - RNA, 18 nt, Human
gaauaacauguaauuaag

SEQ ID NO: 1933680 - RNA, 19 nt, Human
gaauaacauguaauuaagu

SEQ ID NO: 1933681 - RNA, 16 nt, Human
gaauaaaaacuuugcu

SEQ ID NO: 1933682 - RNA, 23 nt, Human
gaaugaaccacaucuugcucugc

SEQ ID NO: 1933683 - RNA, 15 nt, Human
gaaugaaccuucugg

SEQ ID NO: 1933684 - RNA, 17 nt, Human
gaaugaaccuucuggcc

SEQ ID NO: 1933685 - RNA, 18 nt, Human
gaaugaaccacaucuugc

SEQ ID NO: 1933686 - RNA, 22 nt, Human
gaaugaaccacaucuugcucug

SEQ ID NO: 1933687 - RNA, 11 nt, Human
gaaugcagugg

SEQ ID NO: 1933688 - RNA, 19 nt, Human
gaaugaagauacugaaaua

SEQ ID NO: 1933689 - RNA, 21 nt, Human
gaaugaagauacugaaauaaa

SEQ ID NO: 1933690 - RNA, 18 nt, Human
gaaugaagauacugaaau

SEQ ID NO: 1933691 - RNA, 17 nt, Human
gaaugaagauacugaaa

SEQ ID NO: 1933692 - RNA, 14 nt, Human
gaaugucaguguga

SEQ ID NO: 1933693 - RNA, 13 nt, Human
gaauguauuuauu

SEQ ID NO: 1933694 - RNA, 16 nt, Human
gaauguauuuauuugg

SEQ ID NO: 1933695 - RNA, 23 nt, Human
gaauguauuuauuugggagaccg

SEQ ID NO: 1933696 - RNA, 21 nt, Human
gaauguaugcuucauacaggg

SEQ ID NO: 1933697 - RNA, 22 nt, Human
gaaugguuuucaaaauaaaaau

SEQ ID NO: 1933698 - RNA, 18 nt, Human
gaauguaagaacuacaaa

SEQ ID NO: 1933699 - RNA, 18 nt, Human
gaauguaugcuucauaca

SEQ ID NO: 1933700 - RNA, 16 nt, Human
gaauguaugcuucaua

SEQ ID NO: 1933701 - RNA, 17 nt, Human
gaauggcacagcccaaa

SEQ ID NO: 1933702 - RNA, 23 nt, Human
gaaugggagguugaucagaucug

SEQ ID NO: 1933703 - RNA, 17 nt, Human
gaauucucuaguuugau

SEQ ID NO: 1933704 - RNA, 17 nt, Human
gaauucucagaaucuca

SEQ ID NO: 1933705 - RNA, 20 nt, Human
gaaugucagugugacugauc

SEQ ID NO: 1933706 - RNA, 21 nt, Human
gaaugucagugugacugaucu

SEQ ID NO: 1933707 - RNA, 19 nt, Human
gaauucucuaguuugauua

SEQ ID NO: 1933708 - RNA, 14 nt, Human
gaauugaaaaacca

SEQ ID NO: 1933709 - RNA, 14 nt, Human
gaauugaagcagga

SEQ ID NO: 1933710 - RNA, 22 nt, Human
gaauugaggggauuaauaugaa

SEQ ID NO: 1933711 - RNA, 14 nt, Human
gaauugagcugcag

SEQ ID NO: 1933712 - RNA, 16 nt, Human
gaauugagcugcagaa

SEQ ID NO: 1933713 - RNA, 18 nt, Human
gaauugaggggauuaaua

SEQ ID NO: 1933714 - RNA, 15 nt, Human
gaauuucccaaagca

SEQ ID NO: 1933715 - RNA, 23 nt, Human
gaauuuauucaauuccucuggga

SEQ ID NO: 1933716 - RNA, 19 nt, Human
gaauuuagguuuuuauuag

SEQ ID NO: 1933717 - RNA, 16 nt, Human
gaauuuagguuuuuau

SEQ ID NO: 1933718 - RNA, 13 nt, Human
gaauuuauucaau

SEQ ID NO: 1933719 - RNA, 17 nt, Human
gaauuuauucaauuccu

SEQ ID NO: 1933720 - RNA, 22 nt, Human
gaauuguaaggaaugauuaauu

SEQ ID NO: 1933721 - RNA, 12 nt, Human
gaauugauuugc

SEQ ID NO: 1933722 - RNA, 13 nt, Human
gaauugauuugca

SEQ ID NO: 1933723 - RNA, 14 nt, Human
gaauugauuugcau

SEQ ID NO: 1933724 - RNA, 15 nt, Human
gaauugauuugcauu

SEQ ID NO: 1933725 - RNA, 17 nt, Human
gaauugauuugcauuga

SEQ ID NO: 1933726 - RNA, 15 nt, Human
gaauuguguuuauaa

SEQ ID NO: 1933727 - RNA, 23 nt, Human
gaauuguguuuauaauuuuaaau

SEQ ID NO: 1933728 - RNA, 22 nt, Human
gaauuuaaauagcuuuuuucuc

SEQ ID NO: 1933729 - RNA, 22 nt, Human
gaguucaauaaaugucuguuga

SEQ ID NO: 1933730 - RNA, 18 nt, Human
gaguucgagaccagccug

SEQ ID NO: 1933731 - RNA, 18 nt, Human
gacuuccuguccagcucc

SEQ ID NO: 1933732 - RNA, 19 nt, Human
gacuuccuguccagcucca

SEQ ID NO: 1933733 - RNA, 20 nt, Human
gacuuccuguccagcuccaa

SEQ ID NO: 1933734 - RNA, 21 nt, Human
gacuuccuguccagcuccaac

SEQ ID NO: 1933735 - RNA, 22 nt, Human
gacuuccuguccagcuccaacc

SEQ ID NO: 1933736 - RNA, 22 nt, Human
gaguguguaauuuaaaauugug

SEQ ID NO: 1933737 - RNA, 21 nt, Human
gaguguguaauuuaaaauugu

SEQ ID NO: 1933738 - RNA, 14 nt, Human
gacuuccuugagac

SEQ ID NO: 1933739 - RNA, 24 nt, Human
gacuucaucucccaccuagcagca

SEQ ID NO: 1933740 - RNA, 13 nt, Human
gauaaacaguagu

SEQ ID NO: 1933741 - RNA, 13 nt, Human
gaguucugguucc

SEQ ID NO: 1933742 - RNA, 20 nt, Human
gaguucugcucauucuaaug

SEQ ID NO: 1933743 - RNA, 21 nt, Human
gaguucugcucauucuaauga

SEQ ID NO: 1933744 - RNA, 16 nt, Human
gaguucugcucauucu

SEQ ID NO: 1933745 - RNA, 12 nt, Human
gauaaauuauaa

SEQ ID NO: 1933746 - RNA, 13 nt, Human
gauaaauuauaag

SEQ ID NO: 1933747 - RNA, 24 nt, Human
gauaauacaccacuacauucuguu

SEQ ID NO: 1933748 - RNA, 23 nt, Human
gauaauacaccacuacauucugu

SEQ ID NO: 1933749 - RNA, 12 nt, Human
gauaauacacca

SEQ ID NO: 1933750 - RNA, 17 nt, Human
gauaacuagauggugcu

SEQ ID NO: 1933751 - RNA, 13 nt, Human
gauaacuagaugg

SEQ ID NO: 1933752 - RNA, 14 nt, Human
gauaauuauaauau

SEQ ID NO: 1933753 - RNA, 17 nt, Human
gauaggucagugcaaau

SEQ ID NO: 1933754 - RNA, 16 nt, Human
gauacaaaagcaugug

SEQ ID NO: 1933755 - RNA, 17 nt, Human
gauacaaaagcauguga

SEQ ID NO: 1933756 - RNA, 18 nt, Human
gauauaugcucugcaugu

SEQ ID NO: 1933757 - RNA, 14 nt, Human
gauauauacauagc

SEQ ID NO: 1933758 - RNA, 15 nt, Human
gauauaaauaaaaca

SEQ ID NO: 1933759 - RNA, 18 nt, Human
gauauaaaagacugacca

SEQ ID NO: 1933760 - RNA, 13 nt, Human
gauauaaauaaaa

SEQ ID NO: 1933761 - RNA, 20 nt, Human
gauagugucccacggugccu

SEQ ID NO: 1933762 - RNA, 23 nt, Human
gauaguggggagacuucuuggcu

SEQ ID NO: 1933763 - RNA, 20 nt, Human
gaucacggcucacugcagcc

SEQ ID NO: 1933764 - RNA, 23 nt, Human
gaucacggcucacugcagccuca

SEQ ID NO: 1933765 - RNA, 14 nt, Human
gaucacagccucug

SEQ ID NO: 1933766 - RNA, 15 nt, Human
gauauccauucuuuc

SEQ ID NO: 1933767 - RNA, 16 nt, Human
gauauccauucuuucu

SEQ ID NO: 1933768 - RNA, 19 nt, Human
gauauccauucuuucugau

SEQ ID NO: 1933769 - RNA, 13 nt, Human
gaugaacagacug

SEQ ID NO: 1933770 - RNA, 22 nt, Human
gaugaaguuuuacauuguugag

SEQ ID NO: 1933771 - RNA, 23 nt, Human
gaugaaguuuuacauuguugagc

SEQ ID NO: 1933772 - RNA, 13 nt, Human
gaugaaugagaau

SEQ ID NO: 1933773 - RNA, 14 nt, Human
gaugaauguauuua

SEQ ID NO: 1933774 - RNA, 18 nt, Human
gaugacaacuacagaaaa

SEQ ID NO: 1933775 - RNA, 21 nt, Human
gaugaaaugaggucagagccu

SEQ ID NO: 1933776 - RNA, 15 nt, Human
gaugaaaugagguca

SEQ ID NO: 1933777 - RNA, 19 nt, Human
gaucuucuuuauaauucua

SEQ ID NO: 1933778 - RNA, 22 nt, Human
gaucuucuguggguuucuaaag

SEQ ID NO: 1933779 - RNA, 15 nt, Human
gaucuguccucagcc

SEQ ID NO: 1933780 - RNA, 16 nt, Human
gaucuguccucagccu

SEQ ID NO: 1933781 - RNA, 17 nt, Human
gaucuguccucagccuu

SEQ ID NO: 1933782 - RNA, 18 nt, Human
gaucuguccucagccuug

SEQ ID NO: 1933783 - RNA, 14 nt, Human
gaucuguccucagc

SEQ ID NO: 1933784 - RNA, 23 nt, Human
gaugcaccagcccuuagcaggga

SEQ ID NO: 1933785 - RNA, 15 nt, Human
gaugcaccagcccuu

SEQ ID NO: 1933786 - RNA, 14 nt, Human
gaugcaccagcccu

SEQ ID NO: 1933787 - RNA, 14 nt, Human
gaugagaggaaauc

SEQ ID NO: 1933788 - RNA, 18 nt, Human
gaugaccuugaaugaugc

SEQ ID NO: 1933789 - RNA, 23 nt, Human
gaugagaaauaaaguuucuguug

SEQ ID NO: 1933790 - RNA, 20 nt, Human
gaugaccuugaaugaugcca

SEQ ID NO: 1933791 - RNA, 16 nt, Human
gaugccugguggcagc

SEQ ID NO: 1933792 - RNA, 15 nt, Human
gaugccugguggcag

SEQ ID NO: 1933793 - RNA, 14 nt, Human
gaugccugguggca

SEQ ID NO: 1933794 - RNA, 14 nt, Human
gaugcagugcuucc

SEQ ID NO: 1933795 - RNA, 16 nt, Human
gaugagaggaaaucac

SEQ ID NO: 1933796 - RNA, 14 nt, Human
gaugcagggcaguc

SEQ ID NO: 1933797 - RNA, 15 nt, Human
gaugcagggcaguca

SEQ ID NO: 1933798 - RNA, 12 nt, Human
gauccugagcca

SEQ ID NO: 1933799 - RNA, 12 nt, Human
gauccuggaggc

SEQ ID NO: 1933800 - RNA, 15 nt, Human
gauccuggaggccca

SEQ ID NO: 1933801 - RNA, 16 nt, Human
gauccuggaggcccag

SEQ ID NO: 1933802 - RNA, 17 nt, Human
gauccuggaggcccagu

SEQ ID NO: 1933803 - RNA, 13 nt, Human
gaucuaggaagac

SEQ ID NO: 1933804 - RNA, 14 nt, Human
gaucuaggaagacu

SEQ ID NO: 1933805 - RNA, 18 nt, Human
gaucuaggaagacuuugg

SEQ ID NO: 1933806 - RNA, 20 nt, Human
gaucuaggaagacuuuggaa

SEQ ID NO: 1933807 - RNA, 15 nt, Human
gaucugguccuaccc

SEQ ID NO: 1933808 - RNA, 16 nt, Human
gaucugguccuaccca

SEQ ID NO: 1933809 - RNA, 13 nt, Human
gaucauccacugu

SEQ ID NO: 1933810 - RNA, 21 nt, Human
gaucccucccccccaugcacu

SEQ ID NO: 1933811 - RNA, 23 nt, Human
gaucccucccccccaugcacugu

SEQ ID NO: 1933812 - RNA, 13 nt, Human
gaucccucccccc

SEQ ID NO: 1933813 - RNA, 19 nt, Human
gaucccucccccccaugca

SEQ ID NO: 1933814 - RNA, 18 nt, Human
gauccucccaccucagcc

SEQ ID NO: 1933815 - RNA, 17 nt, Human
gauccucccaccucagc

SEQ ID NO: 1933816 - RNA, 16 nt, Human
gauccucccaccucag

SEQ ID NO: 1933817 - RNA, 14 nt, Human
gauccuccaggugc

SEQ ID NO: 1933818 - RNA, 18 nt, Human
gauccuaggcauuugcug

SEQ ID NO: 1933819 - RNA, 15 nt, Human
gcaaacccagacggc

SEQ ID NO: 1933820 - RNA, 18 nt, Human
gcaaacuuuauuuugugu

SEQ ID NO: 1933821 - RNA, 16 nt, Human
gcaaaccaucauugaa

SEQ ID NO: 1933822 - RNA, 17 nt, Human
gcaaaccaucauugaaa

SEQ ID NO: 1933823 - RNA, 19 nt, Human
gcaaaccaucauugaaauc

SEQ ID NO: 1933824 - RNA, 20 nt, Human
gcaaaccaucauugaaaucu

SEQ ID NO: 1933825 - RNA, 21 nt, Human
gcaaaccaucauugaaaucuu

SEQ ID NO: 1933826 - RNA, 12 nt, Human
gcaaauaaaagu

SEQ ID NO: 1933827 - RNA, 22 nt, Human
gcaaagugaaguugcuucuucu

SEQ ID NO: 1933828 - RNA, 20 nt, Human
gcaaacuuuauuuuguguuu

SEQ ID NO: 1933829 - RNA, 22 nt, Human
gcaaagacuauucccuucuaac

SEQ ID NO: 1933830 - RNA, 21 nt, Human
gcaaagacuauucccuucuaa

SEQ ID NO: 1933831 - RNA, 18 nt, Human
gcaacugcauuggcuuug

SEQ ID NO: 1933832 - RNA, 15 nt, Human
gcaacucuugauuau

SEQ ID NO: 1933833 - RNA, 12 nt, Human
gcaaaugugaau

SEQ ID NO: 1933834 - RNA, 23 nt, Human
gcaaaugcuaaugucaaacuuga

SEQ ID NO: 1933835 - RNA, 12 nt, Human
gcaaaucuugaa

SEQ ID NO: 1933836 - RNA, 17 nt, Human
gcaauccugcaagaaca

SEQ ID NO: 1933837 - RNA, 18 nt, Human
gcaagguccggcccaucc

SEQ ID NO: 1933838 - RNA, 20 nt, Human
gcaagguuuaggcugguggc

SEQ ID NO: 1933839 - RNA, 21 nt, Human
gcaagguuuaggcugguggcc

SEQ ID NO: 1933840 - RNA, 22 nt, Human
gcaagguuuaggcugguggccc

SEQ ID NO: 1933841 - RNA, 24 nt, Human
gcaagguuuaggcugguggcccag

SEQ ID NO: 1933842 - RNA, 23 nt, Human
gcaagguuuaggcugguggccca

SEQ ID NO: 1933843 - RNA, 12 nt, Human
gcaagggacugu

SEQ ID NO: 1933844 - RNA, 14 nt, Human
gcaaggcugucaau

SEQ ID NO: 1933845 - RNA, 18 nt, Human
gcaaggcugucaauuaca

SEQ ID NO: 1933846 - RNA, 16 nt, Human
gcaaggaaaaacaggu

SEQ ID NO: 1933847 - RNA, 20 nt, Human
gcaagcaccuccugccucga

SEQ ID NO: 1933848 - RNA, 18 nt, Human
gcaagcaccuccugccuc

SEQ ID NO: 1933849 - RNA, 16 nt, Human
gcaagcaccuccugcc

SEQ ID NO: 1933850 - RNA, 15 nt, Human
gcaagcaccuccugc

SEQ ID NO: 1933851 - RNA, 22 nt, Human
gcaacuuuguauaaaagggacu

SEQ ID NO: 1933852 - RNA, 21 nt, Human
gauuucauuucaacuguuugc

SEQ ID NO: 1933853 - RNA, 18 nt, Human
gauuugaagaacauguga

SEQ ID NO: 1933854 - RNA, 13 nt, Human
gauuucaugauuu

SEQ ID NO: 1933855 - RNA, 20 nt, Human
gauuucauuucaacuguuug

SEQ ID NO: 1933856 - RNA, 21 nt, Human
gauuucuguuuagauaauaca

SEQ ID NO: 1933857 - RNA, 22 nt, Human
gauuucuguuuagauaauacac

SEQ ID NO: 1933858 - RNA, 16 nt, Human
gauugggaauccgccc

SEQ ID NO: 1933859 - RNA, 18 nt, Human
gauuguucgggugugcaa

SEQ ID NO: 1933860 - RNA, 15 nt, Human
gauugggccccugcc

SEQ ID NO: 1933861 - RNA, 17 nt, Human
gauuucaucugcucucc

SEQ ID NO: 1933862 - RNA, 16 nt, Human
gauuuaaacaaacaaa

SEQ ID NO: 1933863 - RNA, 22 nt, Human
gauuucaucugcucuccuuccu

SEQ ID NO: 1933864 - RNA, 21 nt, Human
gauuucaucugcucuccuucc

SEQ ID NO: 1933865 - RNA, 20 nt, Human
gauuucaucugcucuccuuc

SEQ ID NO: 1933866 - RNA, 16 nt, Human
gauugcaacaggcugg

SEQ ID NO: 1933867 - RNA, 20 nt, Human
gauucuuuccugaggcuggg

SEQ ID NO: 1933868 - RNA, 22 nt, Human
gauucuuuccugaggcugggcu

SEQ ID NO: 1933869 - RNA, 18 nt, Human
gauucccaagcucugcuc

SEQ ID NO: 1933870 - RNA, 19 nt, Human
gauucuuuccugaggcugg

SEQ ID NO: 1933871 - RNA, 17 nt, Human
gauucccaagcucugcu

SEQ ID NO: 1933872 - RNA, 16 nt, Human
gauucccaagcucugc

SEQ ID NO: 1933873 - RNA, 18 nt, Human
gauugcuugagcucagga

SEQ ID NO: 1933874 - RNA, 20 nt, Human
gauuggcucacacugagaau

SEQ ID NO: 1933875 - RNA, 18 nt, Human
gauuggcucacacugaga

SEQ ID NO: 1933876 - RNA, 17 nt, Human
gauuggcucacacugag

SEQ ID NO: 1933877 - RNA, 18 nt, Human
gauugcaacaggcugggc

SEQ ID NO: 1933878 - RNA, 17 nt, Human
gauugcaacaggcuggg

SEQ ID NO: 1933879 - RNA, 17 nt, Human
gaugccugguggcagcu

SEQ ID NO: 1933880 - RNA, 20 nt, Human
gaugcgggccagugcuccag

SEQ ID NO: 1933881 - RNA, 16 nt, Human
gaugcuagaacucccu

SEQ ID NO: 1933882 - RNA, 22 nt, Human
gaugcgggccagugcuccagcc

SEQ ID NO: 1933883 - RNA, 21 nt, Human
gauguucuacuuuguucugcu

SEQ ID NO: 1933884 - RNA, 18 nt, Human
gauguucuagcauggcug

SEQ ID NO: 1933885 - RNA, 23 nt, Human
gauguucuacuuuguucugcugu

SEQ ID NO: 1933886 - RNA, 12 nt, Human
gauguuuccaga

SEQ ID NO: 1933887 - RNA, 13 nt, Human
gauguuuccagac

SEQ ID NO: 1933888 - RNA, 19 nt, Human
gauguuuccagacuuccuu

SEQ ID NO: 1933889 - RNA, 21 nt, Human
gauguuuuaaggaugcuugua

SEQ ID NO: 1933890 - RNA, 18 nt, Human
gauuaauauggggaugca

SEQ ID NO: 1933891 - RNA, 14 nt, Human
gauuaauaugaaaa

SEQ ID NO: 1933892 - RNA, 18 nt, Human
gauuaauaugaaaacuua

SEQ ID NO: 1933893 - RNA, 21 nt, Human
gauuacaagcgugagccacug

SEQ ID NO: 1933894 - RNA, 13 nt, Human
gauuacaagcgug

SEQ ID NO: 1933895 - RNA, 15 nt, Human
gauuaauuccuuucc

SEQ ID NO: 1933896 - RNA, 13 nt, Human
gauucagacagcu

SEQ ID NO: 1933897 - RNA, 14 nt, Human
gauucagacagcug

SEQ ID NO: 1933898 - RNA, 17 nt, Human
gauucagacagcugccu

SEQ ID NO: 1933899 - RNA, 18 nt, Human
gauucagacagcugccug

SEQ ID NO: 1933900 - RNA, 15 nt, Human
gauucccaagcucug

SEQ ID NO: 1933901 - RNA, 18 nt, Human
gauuccaaagaguagaau

SEQ ID NO: 1933902 - RNA, 19 nt, Human
gauuccaaagaguagaauu

SEQ ID NO: 1933903 - RNA, 23 nt, Human
gauuccaaagaguagaauugcau

SEQ ID NO: 1933904 - RNA, 15 nt, Human
gauucaguuuucauu

SEQ ID NO: 1933905 - RNA, 22 nt, Human
gauucaguuuucauuugguuca

SEQ ID NO: 1933906 - RNA, 16 nt, Human
gauucauaguaacuuc

SEQ ID NO: 1933907 - RNA, 13 nt, Human
gauucaggaaugu

SEQ ID NO: 1933908 - RNA, 20 nt, Human
gcagccuggcucccaggaca

SEQ ID NO: 1933909 - RNA, 19 nt, Human
gcagccuggcucccaggac

SEQ ID NO: 1933910 - RNA, 13 nt, Human
gcagccuggcucc

SEQ ID NO: 1933911 - RNA, 14 nt, Human
gcagccuggacccu

SEQ ID NO: 1933912 - RNA, 23 nt, Human
gcagccugcgccaccgcccagag

SEQ ID NO: 1933913 - RNA, 22 nt, Human
gcagccucaaccuccugggcua

SEQ ID NO: 1933914 - RNA, 21 nt, Human
gcagccucaaccuccugggcu

SEQ ID NO: 1933915 - RNA, 18 nt, Human
gcagccguuugagaagaa

SEQ ID NO: 1933916 - RNA, 22 nt, Human
gcagccguuugagaagaaaaca

SEQ ID NO: 1933917 - RNA, 20 nt, Human
gcagccucaaccuccugggc

SEQ ID NO: 1933918 - RNA, 19 nt, Human
gcagccucaaccuccuggg

SEQ ID NO: 1933919 - RNA, 20 nt, Human
gcagcagguggcagaauggg

SEQ ID NO: 1933920 - RNA, 15 nt, Human
gcagcagggaugccc

SEQ ID NO: 1933921 - RNA, 17 nt, Human
gcagcagggaugcccug

SEQ ID NO: 1933922 - RNA, 19 nt, Human
gcagcagggaugcccugga

SEQ ID NO: 1933923 - RNA, 20 nt, Human
gcagcagggaugcccuggag

SEQ ID NO: 1933924 - RNA, 13 nt, Human
gcagcagaagggg

SEQ ID NO: 1933925 - RNA, 12 nt, Human
gcagcagaaggg

SEQ ID NO: 1933926 - RNA, 16 nt, Human
gcaggagcacacccag

SEQ ID NO: 1933927 - RNA, 17 nt, Human
gcaggagcacacccagc

SEQ ID NO: 1933928 - RNA, 20 nt, Human
gcaggagcacacccagcccc

SEQ ID NO: 1933929 - RNA, 11 nt, Human
gcaggaggaag

SEQ ID NO: 1933930 - RNA, 20 nt, Human
gcaggaguuucguuuucaaa

SEQ ID NO: 1933931 - RNA, 21 nt, Human
gcaggaguuucguuuucaaaa

SEQ ID NO: 1933932 - RNA, 20 nt, Human
gcaggaccuucgggcugugc

SEQ ID NO: 1933933 - RNA, 13 nt, Human
gcagcgccaggcu

SEQ ID NO: 1933934 - RNA, 14 nt, Human
gcagcgccaggcug

SEQ ID NO: 1933935 - RNA, 13 nt, Human
gcagcgccuuucc

SEQ ID NO: 1933936 - RNA, 12 nt, Human
gcagcaauaaag

SEQ ID NO: 1933937 - RNA, 17 nt, Human
gcagauggaaaggagcc

SEQ ID NO: 1933938 - RNA, 17 nt, Human
gcagcaccguucugugc

SEQ ID NO: 1933939 - RNA, 18 nt, Human
gcagcaccguucugugca

SEQ ID NO: 1933940 - RNA, 19 nt, Human
gcagcaccguucugugcac

SEQ ID NO: 1933941 - RNA, 19 nt, Human
gcagaguugaagacagagc

SEQ ID NO: 1933942 - RNA, 16 nt, Human
gcagaguugaagacag

SEQ ID NO: 1933943 - RNA, 17 nt, Human
gcagaguugaagacaga

SEQ ID NO: 1933944 - RNA, 19 nt, Human
gcagauuuugcccuugaca

SEQ ID NO: 1933945 - RNA, 20 nt, Human
gcagaugcuagcacaugccc

SEQ ID NO: 1933946 - RNA, 13 nt, Human
gcagaugcaauga

SEQ ID NO: 1933947 - RNA, 19 nt, Human
gcagaugcaaugacucagg

SEQ ID NO: 1933948 - RNA, 15 nt, Human
gcagaguugaagaca

SEQ ID NO: 1933949 - RNA, 14 nt, Human
gcagagaccauccc

SEQ ID NO: 1933950 - RNA, 15 nt, Human
gcagagaccaucccu

SEQ ID NO: 1933951 - RNA, 17 nt, Human
gcagagaccaucccuga

SEQ ID NO: 1933952 - RNA, 19 nt, Human
gcagagaccaucccugaag

SEQ ID NO: 1933953 - RNA, 23 nt, Human
gcagagaaugaaagggcccagag

SEQ ID NO: 1933954 - RNA, 22 nt, Human
gcagagaaugaaagggcccaga

SEQ ID NO: 1933955 - RNA, 21 nt, Human
gcagagaauucucuuauccaa

SEQ ID NO: 1933956 - RNA, 21 nt, Human
gcagagaaugaaagggcccag

SEQ ID NO: 1933957 - RNA, 20 nt, Human
gcagagaaugaaagggccca

SEQ ID NO: 1933958 - RNA, 19 nt, Human
gcagagaaugaaagggccc

SEQ ID NO: 1933959 - RNA, 18 nt, Human
gcagaaggaagacuucau

SEQ ID NO: 1933960 - RNA, 20 nt, Human
gcacaugucuuguacaugug

SEQ ID NO: 1933961 - RNA, 13 nt, Human
gcacaugucuugu

SEQ ID NO: 1933962 - RNA, 21 nt, Human
gcacaugucuuguacaugugu

SEQ ID NO: 1933963 - RNA, 19 nt, Human
gcaccacugcacuccagcc

SEQ ID NO: 1933964 - RNA, 13 nt, Human
gcacccacccugg

SEQ ID NO: 1933965 - RNA, 14 nt, Human
gcacccacccuggg

SEQ ID NO: 1933966 - RNA, 17 nt, Human
gcacccacccugggacc

SEQ ID NO: 1933967 - RNA, 15 nt, Human
gcaccuccugccucg

SEQ ID NO: 1933968 - RNA, 14 nt, Human
gcaccuccugccuc

SEQ ID NO: 1933969 - RNA, 17 nt, Human
gcacccggccccugcug

SEQ ID NO: 1933970 - RNA, 15 nt, Human
gcacccggccccugc

SEQ ID NO: 1933971 - RNA, 14 nt, Human
gcacccggccccug

SEQ ID NO: 1933972 - RNA, 16 nt, Human
gcacagcuucauuucc

SEQ ID NO: 1933973 - RNA, 21 nt, Human
gcacaggacaugcgguagcca

SEQ ID NO: 1933974 - RNA, 22 nt, Human
gcacaggacaugcgguagccag

SEQ ID NO: 1933975 - RNA, 19 nt, Human
gcacagcuaacauggaagu

SEQ ID NO: 1933976 - RNA, 13 nt, Human
gcaaugaccuuuc

SEQ ID NO: 1933977 - RNA, 14 nt, Human
gcaaugaccuuuca

SEQ ID NO: 1933978 - RNA, 18 nt, Human
gcacccggccccugcugg

SEQ ID NO: 1933979 - RNA, 17 nt, Human
gcacuaaggugugcucu

SEQ ID NO: 1933980 - RNA, 12 nt, Human
gcaccugccuca

SEQ ID NO: 1933981 - RNA, 13 nt, Human
gcaccugccucag

SEQ ID NO: 1933982 - RNA, 14 nt, Human
gcaccugccucagg

SEQ ID NO: 1933983 - RNA, 15 nt, Human
gcaccugccucagga

SEQ ID NO: 1933984 - RNA, 16 nt, Human
gcaccugccucaggac

SEQ ID NO: 1933985 - RNA, 18 nt, Human
gcacuaaggugugcucug

SEQ ID NO: 1933986 - RNA, 19 nt, Human
gcacuaaggugugcucuga

SEQ ID NO: 1933987 - RNA, 15 nt, Human
gcacuaagauauuuc

SEQ ID NO: 1933988 - RNA, 14 nt, Human
gcacuaaggggccc

SEQ ID NO: 1933989 - RNA, 23 nt, Human
gcacuaaggggcccggccagcca

SEQ ID NO: 1933990 - RNA, 13 nt, Human
gcacugaugcugc

SEQ ID NO: 1933991 - RNA, 22 nt, Human
gcacugggcuuggggaccagag

SEQ ID NO: 1933992 - RNA, 23 nt, Human
gcacugggcuuggggaccagagc

SEQ ID NO: 1933993 - RNA, 22 nt, Human
gcacugaugcugccccucaucu

SEQ ID NO: 1933994 - RNA, 18 nt, Human
gcacugaugcugccccuc

SEQ ID NO: 1933995 - RNA, 19 nt, Human
gcacugaugcugccccuca

SEQ ID NO: 1933996 - RNA, 12 nt, Human
gcagaaggaaga

SEQ ID NO: 1933997 - RNA, 13 nt, Human
gcagaaggaagac

SEQ ID NO: 1933998 - RNA, 14 nt, Human
gcagaaggaagacu

SEQ ID NO: 1933999 - RNA, 14 nt, Human
gcagaagacaguau

SEQ ID NO: 1934000 - RNA, 13 nt, Human
gcauucuaguacu

SEQ ID NO: 1934001 - RNA, 12 nt, Human
gcauuccccagg

SEQ ID NO: 1934002 - RNA, 12 nt, Human
gcauuccccacu

SEQ ID NO: 1934003 - RNA, 23 nt, Human
gcauuugcugaauacagaggcaa

SEQ ID NO: 1934004 - RNA, 21 nt, Human
gcauuuggugguuucagaaau

SEQ ID NO: 1934005 - RNA, 16 nt, Human
gcauuuggauuggggu

SEQ ID NO: 1934006 - RNA, 22 nt, Human
gcauuuggauuggggucccucu

SEQ ID NO: 1934007 - RNA, 16 nt, Human
gcauuuuacuguacag

SEQ ID NO: 1934008 - RNA, 23 nt, Human
gcauuuggauuggggucccucua

SEQ ID NO: 1934009 - RNA, 17 nt, Human
gcauuuuacuguacaga

SEQ ID NO: 1934010 - RNA, 22 nt, Human
gcauuuugcuaaaugugaauga

SEQ ID NO: 1934011 - RNA, 22 nt, Human
gcauuuuggagaguuuccugaa

SEQ ID NO: 1934012 - RNA, 23 nt, Human
gcauuuuggagaguuuccugaaa

SEQ ID NO: 1934013 - RNA, 16 nt, Human
gcauuuucuaaacaga

SEQ ID NO: 1934014 - RNA, 18 nt, Human
gcauuuuccucugcuuug

SEQ ID NO: 1934015 - RNA, 21 nt, Human
gcauuuuccucugcuuugaaa

SEQ ID NO: 1934016 - RNA, 20 nt, Human
gcauuuuccuccaucgcagu

SEQ ID NO: 1934017 - RNA, 13 nt, Human
gcauuuuccucug

SEQ ID NO: 1934018 - RNA, 15 nt, Human
gcauuuuccucugcu

SEQ ID NO: 1934019 - RNA, 14 nt, Human
gcauuuuguauuug

SEQ ID NO: 1934020 - RNA, 23 nt, Human
gcauuuuguauuugucuaacugg

SEQ ID NO: 1934021 - RNA, 14 nt, Human
gccaaaagcugcuc

SEQ ID NO: 1934022 - RNA, 15 nt, Human
gccaaaagcugcuca

SEQ ID NO: 1934023 - RNA, 21 nt, Human
gccaaacucaccugccccuca

SEQ ID NO: 1934024 - RNA, 19 nt, Human
gccaaacucaccugccccu

SEQ ID NO: 1934025 - RNA, 14 nt, Human
gccaaaggaagcac

SEQ ID NO: 1934026 - RNA, 16 nt, Human
gccaaaggaagcacau

SEQ ID NO: 1934027 - RNA, 20 nt, Human
gccaaaggaagcacaugccu

SEQ ID NO: 1934028 - RNA, 13 nt, Human
gcaucaggccagg

SEQ ID NO: 1934029 - RNA, 15 nt, Human
gcaucaggccaggcc

SEQ ID NO: 1934030 - RNA, 16 nt, Human
gcaucaggccaggccc

SEQ ID NO: 1934031 - RNA, 17 nt, Human
gcaucaggccaggcccu

SEQ ID NO: 1934032 - RNA, 15 nt, Human
gcaugaauuugugaa

SEQ ID NO: 1934033 - RNA, 23 nt, Human
gcaugaaguaauaugcacacauu

SEQ ID NO: 1934034 - RNA, 20 nt, Human
gcaugacacgaauauugcug

SEQ ID NO: 1934035 - RNA, 17 nt, Human
gcaugaauuugugaagg

SEQ ID NO: 1934036 - RNA, 17 nt, Human
gcaugccuggauggggc

SEQ ID NO: 1934037 - RNA, 22 nt, Human
gcaugccuggauggggcugcac

SEQ ID NO: 1934038 - RNA, 17 nt, Human
gcauguuugugauugac

SEQ ID NO: 1934039 - RNA, 18 nt, Human
gcauggagauagccccac

SEQ ID NO: 1934040 - RNA, 15 nt, Human
gcaugcugucccuua

SEQ ID NO: 1934041 - RNA, 18 nt, Human
gcagugggagcugccugu

SEQ ID NO: 1934042 - RNA, 17 nt, Human
gcagugggagcugccug

SEQ ID NO: 1934043 - RNA, 15 nt, Human
gcagugggccuggcc

SEQ ID NO: 1934044 - RNA, 20 nt, Human
gcagugugcacuaaggggcc

SEQ ID NO: 1934045 - RNA, 21 nt, Human
gcagugugcacuaaggggccc

SEQ ID NO: 1934046 - RNA, 19 nt, Human
gcauauuuauaaaaauaaa

SEQ ID NO: 1934047 - RNA, 21 nt, Human
gcaucaagaugugacauguuu

SEQ ID NO: 1934048 - RNA, 17 nt, Human
gcauauucaggaagcuc

SEQ ID NO: 1934049 - RNA, 18 nt, Human
gcauauucaggaagcuca

SEQ ID NO: 1934050 - RNA, 20 nt, Human
gcauauucaggaagcucagg

SEQ ID NO: 1934051 - RNA, 18 nt, Human
gcauauuauuuuauguug

SEQ ID NO: 1934052 - RNA, 18 nt, Human
gcauauguugaauacuuu

SEQ ID NO: 1934053 - RNA, 19 nt, Human
gcauauguugaauacuuuu

SEQ ID NO: 1934054 - RNA, 20 nt, Human
gcauauguugaauacuuuuu

SEQ ID NO: 1934055 - RNA, 21 nt, Human
gcauauguugaauacuuuuua

SEQ ID NO: 1934056 - RNA, 23 nt, Human
gcauauuauuuuauguugcauag

SEQ ID NO: 1934057 - RNA, 15 nt, Human
gcauauucaggaagc

SEQ ID NO: 1934058 - RNA, 12 nt, Human
gcauauguugaa

SEQ ID NO: 1934059 - RNA, 23 nt, Human
gcauauauuggguuccauucuca

SEQ ID NO: 1934060 - RNA, 14 nt, Human
gcauauguugaaua

SEQ ID NO: 1934061 - RNA, 17 nt, Human
gcauauguugaauacuu

SEQ ID NO: 1934062 - RNA, 12 nt, Human
gcagggcucagc

SEQ ID NO: 1934063 - RNA, 14 nt, Human
gcagggcucagcgg

SEQ ID NO: 1934064 - RNA, 16 nt, Human
gcagggagggcuucug

SEQ ID NO: 1934065 - RNA, 20 nt, Human
gcaggauucuuccucccucc

SEQ ID NO: 1934066 - RNA, 16 nt, Human
gcagugggagcugccu

SEQ ID NO: 1934067 - RNA, 23 nt, Human
gcagugcuuccaaggauggacca

SEQ ID NO: 1934068 - RNA, 12 nt, Human
gcaggucccuaa

SEQ ID NO: 1934069 - RNA, 13 nt, Human
gcaggucccuaau

SEQ ID NO: 1934070 - RNA, 23 nt, Human
gcagguccccagacuccaccaag

SEQ ID NO: 1934071 - RNA, 10 nt, Human
gcaggucccu

SEQ ID NO: 1934072 - RNA, 11 nt, Human
gcaggucccua

SEQ ID NO: 1934073 - RNA, 18 nt, Human
gcagggguggcugccuca

SEQ ID NO: 1934074 - RNA, 22 nt, Human
gcagggguggcugccucauuua

SEQ ID NO: 1934075 - RNA, 16 nt, Human
gccagcguggcgcagu

SEQ ID NO: 1934076 - RNA, 14 nt, Human
gccagcguggcgca

SEQ ID NO: 1934077 - RNA, 19 nt, Human
gccagcgggaauggcagcu

SEQ ID NO: 1934078 - RNA, 14 nt, Human
gccagccuugacca

SEQ ID NO: 1934079 - RNA, 20 nt, Human
gccagccuugaccauucucc

SEQ ID NO: 1934080 - RNA, 21 nt, Human
gccagccuugaccauucucca

SEQ ID NO: 1934081 - RNA, 22 nt, Human
gccagccuugaccauucuccac

SEQ ID NO: 1934082 - RNA, 14 nt, Human
gccagcugcuuggg

SEQ ID NO: 1934083 - RNA, 13 nt, Human
gccagcucccucu

SEQ ID NO: 1934084 - RNA, 16 nt, Human
gccagcugcuugggcu

SEQ ID NO: 1934085 - RNA, 15 nt, Human
gccagcugcuugggc

SEQ ID NO: 1934086 - RNA, 18 nt, Human
gccagcuuguuauuuaua

SEQ ID NO: 1934087 - RNA, 20 nt, Human
gccagagggagugacagagg

SEQ ID NO: 1934088 - RNA, 19 nt, Human
gccagagggagugacagag

SEQ ID NO: 1934089 - RNA, 16 nt, Human
gccagauucuuuccug

SEQ ID NO: 1934090 - RNA, 17 nt, Human
gccagauucuuuccuga

SEQ ID NO: 1934091 - RNA, 21 nt, Human
gccagccgagauagccaaggc

SEQ ID NO: 1934092 - RNA, 20 nt, Human
gccagccgagauagccaagg

SEQ ID NO: 1934093 - RNA, 12 nt, Human
gccagccuugac

SEQ ID NO: 1934094 - RNA, 14 nt, Human
gccagccccuggcc

SEQ ID NO: 1934095 - RNA, 19 nt, Human
gccagccccuggccccagg

SEQ ID NO: 1934096 - RNA, 20 nt, Human
gccagccccuggccccagga

SEQ ID NO: 1934097 - RNA, 18 nt, Human
gccacugacugcagggac

SEQ ID NO: 1934098 - RNA, 22 nt, Human
gccacucaggcccaaagccucg

SEQ ID NO: 1934099 - RNA, 14 nt, Human
gccacucaggccca

SEQ ID NO: 1934100 - RNA, 19 nt, Human
gccacugacugcagggaca

SEQ ID NO: 1934101 - RNA, 19 nt, Human
gccacugcaccgggccaca

SEQ ID NO: 1934102 - RNA, 13 nt, Human
gccagagaagcua

SEQ ID NO: 1934103 - RNA, 18 nt, Human
gccacugcaccgggccac

SEQ ID NO: 1934104 - RNA, 17 nt, Human
gccacugcaccgggcca

SEQ ID NO: 1934105 - RNA, 18 nt, Human
gccagagggagugacaga

SEQ ID NO: 1934106 - RNA, 22 nt, Human
gccagagcuacccgcagaguuc

SEQ ID NO: 1934107 - RNA, 12 nt, Human
gccagagacaca

SEQ ID NO: 1934108 - RNA, 15 nt, Human
gccagagacacaagc

SEQ ID NO: 1934109 - RNA, 12 nt, Human
gccagagccagg

SEQ ID NO: 1934110 - RNA, 14 nt, Human
gccagagccagggg

SEQ ID NO: 1934111 - RNA, 23 nt, Human
gccagagauccaaaagaagcccc

SEQ ID NO: 1934112 - RNA, 21 nt, Human
gccacgugggcaaacaggcag

SEQ ID NO: 1934113 - RNA, 16 nt, Human
gccacggccaggccag

SEQ ID NO: 1934114 - RNA, 22 nt, Human
gccacguucuuacuaguuuccc

SEQ ID NO: 1934115 - RNA, 21 nt, Human
gccacuauuguuagucucuug

SEQ ID NO: 1934116 - RNA, 20 nt, Human
gccacuauuguuagucucuu

SEQ ID NO: 1934117 - RNA, 15 nt, Human
gccacggccaggcca

SEQ ID NO: 1934118 - RNA, 14 nt, Human
gccacggccaggcc

SEQ ID NO: 1934119 - RNA, 22 nt, Human
gccaaaugguuuaacuucugcc

SEQ ID NO: 1934120 - RNA, 16 nt, Human
gccaaauaaugucucu

SEQ ID NO: 1934121 - RNA, 22 nt, Human
gccaaauaaugucucugugaga

SEQ ID NO: 1934122 - RNA, 18 nt, Human
gccaaauaaugucucugu

SEQ ID NO: 1934123 - RNA, 15 nt, Human
gcccaccccucaaca

SEQ ID NO: 1934124 - RNA, 18 nt, Human
gcccacaggaucagucug

SEQ ID NO: 1934125 - RNA, 13 nt, Human
gcccacaggauca

SEQ ID NO: 1934126 - RNA, 19 nt, Human
gcccacaggaucagucuga

SEQ ID NO: 1934127 - RNA, 20 nt, Human
gcccaaauuaucaagcuaau

SEQ ID NO: 1934128 - RNA, 19 nt, Human
gcccaaauuaucaagcuaa

SEQ ID NO: 1934129 - RNA, 17 nt, Human
gcccaaauuaucaagcu

SEQ ID NO: 1934130 - RNA, 23 nt, Human
gcccacaaaggcaaaggguccag

SEQ ID NO: 1934131 - RNA, 19 nt, Human
gcccaaagugguauagaaa

SEQ ID NO: 1934132 - RNA, 16 nt, Human
gccauuuguguuuaua

SEQ ID NO: 1934133 - RNA, 15 nt, Human
gcccaaagaugcagc

SEQ ID NO: 1934134 - RNA, 16 nt, Human
gcccaaagaugcagcc

SEQ ID NO: 1934135 - RNA, 17 nt, Human
gccauuucuuccacaag

SEQ ID NO: 1934136 - RNA, 20 nt, Human
gccauuucuuccacaagagc

SEQ ID NO: 1934137 - RNA, 22 nt, Human
gccauuucuuccacaagagccc

SEQ ID NO: 1934138 - RNA, 19 nt, Human
gccaugggacagggaggac

SEQ ID NO: 1934139 - RNA, 14 nt, Human
gccaugggacaggg

SEQ ID NO: 1934140 - RNA, 23 nt, Human
gccauggauggaaaacgcucucu

SEQ ID NO: 1934141 - RNA, 20 nt, Human
gccauccagguucagcuugu

SEQ ID NO: 1934142 - RNA, 19 nt, Human
gccauccagguucagcuug

SEQ ID NO: 1934143 - RNA, 20 nt, Human
gccagucuugacgaguguga

SEQ ID NO: 1934144 - RNA, 18 nt, Human
gccaggugcaaccaggga

SEQ ID NO: 1934145 - RNA, 13 nt, Human
gccaucccagccc

SEQ ID NO: 1934146 - RNA, 14 nt, Human
gccaucccagcccc

SEQ ID NO: 1934147 - RNA, 15 nt, Human
gccaucccagcccca

SEQ ID NO: 1934148 - RNA, 16 nt, Human
gccaucccagccccaa

SEQ ID NO: 1934149 - RNA, 17 nt, Human
gccaucccagccccaau

SEQ ID NO: 1934150 - RNA, 17 nt, Human
gccaggggaaaaucagc

SEQ ID NO: 1934151 - RNA, 16 nt, Human
gccagggccugcgagg

SEQ ID NO: 1934152 - RNA, 14 nt, Human
gccagggccugcga

SEQ ID NO: 1934153 - RNA, 21 nt, Human
gccaggggaaaaucagccugc

SEQ ID NO: 1934154 - RNA, 22 nt, Human
gccaggggaaaaucagccugcu

SEQ ID NO: 1934155 - RNA, 23 nt, Human
gccaggggaaaaucagccugcuc

SEQ ID NO: 1934156 - RNA, 20 nt, Human
gccaggaagccagcaggcuc

SEQ ID NO: 1934157 - RNA, 19 nt, Human
gccaggaagccagcaggcu

SEQ ID NO: 1934158 - RNA, 13 nt, Human
gccagggccugcg

SEQ ID NO: 1934159 - RNA, 11 nt, Human
gccaggaagcc

SEQ ID NO: 1934160 - RNA, 17 nt, Human
gccaggaagccagcagg

SEQ ID NO: 1934161 - RNA, 18 nt, Human
gccaggaagccagcaggc

SEQ ID NO: 1934162 - RNA, 21 nt, Human
gcccaggugaguccuagagcu

SEQ ID NO: 1934163 - RNA, 22 nt, Human
gcccagucuggaaugcaguggu

SEQ ID NO: 1934164 - RNA, 18 nt, Human
gcccauccccaggcaccu

SEQ ID NO: 1934165 - RNA, 19 nt, Human
gcccaguucacccugauuu

SEQ ID NO: 1934166 - RNA, 15 nt, Human
gcccaggcuggcgug

SEQ ID NO: 1934167 - RNA, 14 nt, Human
gcccaggcuggcgu

SEQ ID NO: 1934168 - RNA, 16 nt, Human
gcccaggcuggcgugc

SEQ ID NO: 1934169 - RNA, 14 nt, Human
gcccagggcccaga

SEQ ID NO: 1934170 - RNA, 15 nt, Human
gcccagggcccagag

SEQ ID NO: 1934171 - RNA, 16 nt, Human
gcccagggcccagagc

SEQ ID NO: 1934172 - RNA, 17 nt, Human
gcccagggcccagagcc

SEQ ID NO: 1934173 - RNA, 18 nt, Human
gcccagggcccagagccc

SEQ ID NO: 1934174 - RNA, 19 nt, Human
gcccagggcccagagccca

SEQ ID NO: 1934175 - RNA, 20 nt, Human
gcccagggcccagagcccag

SEQ ID NO: 1934176 - RNA, 21 nt, Human
gcccagggcccagagcccagc

SEQ ID NO: 1934177 - RNA, 23 nt, Human
gcccagggcccagagcccagcuc

SEQ ID NO: 1934178 - RNA, 11 nt, Human
gcccaggcugg

SEQ ID NO: 1934179 - RNA, 12 nt, Human
gcccaggaaagg

SEQ ID NO: 1934180 - RNA, 15 nt, Human
gcccaggaaaggcuc

SEQ ID NO: 1934181 - RNA, 16 nt, Human
gcccaggaaaggcucc

SEQ ID NO: 1934182 - RNA, 18 nt, Human
gcccaggccuccuacagc

SEQ ID NO: 1934183 - RNA, 12 nt, Human
gcccagcuccaa

SEQ ID NO: 1934184 - RNA, 15 nt, Human
gcccagcuccaaggg

SEQ ID NO: 1934185 - RNA, 21 nt, Human
gccccauucugccugcccagg

SEQ ID NO: 1934186 - RNA, 20 nt, Human
gccccauucugccugcccag

SEQ ID NO: 1934187 - RNA, 18 nt, Human
gccccauucugccugccc

SEQ ID NO: 1934188 - RNA, 17 nt, Human
gccccauucugccugcc

SEQ ID NO: 1934189 - RNA, 23 nt, Human
gccccauccucuguacagagccc

SEQ ID NO: 1934190 - RNA, 21 nt, Human
gccccagugcccacaggauca

SEQ ID NO: 1934191 - RNA, 17 nt, Human
gccccagugcccacagg

SEQ ID NO: 1934192 - RNA, 16 nt, Human
gccccagugcccacag

SEQ ID NO: 1934193 - RNA, 22 nt, Human
gccccaggcagggccaacccuu

SEQ ID NO: 1934194 - RNA, 15 nt, Human
gccccagugcccaca

SEQ ID NO: 1934195 - RNA, 12 nt, Human
gccccaggacca

SEQ ID NO: 1934196 - RNA, 14 nt, Human
gccccaggaccagc

SEQ ID NO: 1934197 - RNA, 15 nt, Human
gccccaggaccagcu

SEQ ID NO: 1934198 - RNA, 16 nt, Human
gccccaggaccagcuc

SEQ ID NO: 1934199 - RNA, 17 nt, Human
gccccaggaccagcuca

SEQ ID NO: 1934200 - RNA, 18 nt, Human
gccccaggaccagcucag

SEQ ID NO: 1934201 - RNA, 19 nt, Human
gccccaggaccagcucagg

SEQ ID NO: 1934202 - RNA, 22 nt, Human
gccccaggaccagcucaggaca

SEQ ID NO: 1934203 - RNA, 23 nt, Human
gccccaggaccagcucaggacag

SEQ ID NO: 1934204 - RNA, 24 nt, Human
gccccaggaccagcucaggacaga

SEQ ID NO: 1934205 - RNA, 20 nt, Human
gccccaggaccuggcugcca

SEQ ID NO: 1934206 - RNA, 21 nt, Human
gccccaggaccuggcugccau

SEQ ID NO: 1934207 - RNA, 22 nt, Human
gccccaggaccuggcugccaua

SEQ ID NO: 1934208 - RNA, 21 nt, Human
gccccaggcagggccaacccu

SEQ ID NO: 1934209 - RNA, 22 nt, Human
gcccaucugggggccucuucug

SEQ ID NO: 1934210 - RNA, 19 nt, Human
gcccauggacaggcuggcu

SEQ ID NO: 1934211 - RNA, 20 nt, Human
gcccauggacaggcuggcuc

SEQ ID NO: 1934212 - RNA, 21 nt, Human
gcccauggacaggcuggcucc

SEQ ID NO: 1934213 - RNA, 23 nt, Human
gcccauggacaggcuggcuccag

SEQ ID NO: 1934214 - RNA, 22 nt, Human
gccccaggaaaggcccagccac

SEQ ID NO: 1934215 - RNA, 11 nt, Human
gccccaggacc

SEQ ID NO: 1934216 - RNA, 15 nt, Human
gccccaggaaaggcc

SEQ ID NO: 1934217 - RNA, 21 nt, Human
gccccagccucccugaagccu

SEQ ID NO: 1934218 - RNA, 16 nt, Human
gccccagccucccuga

SEQ ID NO: 1934219 - RNA, 18 nt, Human
gccccagccucccugaag

SEQ ID NO: 1934220 - RNA, 17 nt, Human
gccccgugggguuccuc

SEQ ID NO: 1934221 - RNA, 13 nt, Human
gccccgugaggca

SEQ ID NO: 1934222 - RNA, 23 nt, Human
gccccgaggccuucucugaagga

SEQ ID NO: 1934223 - RNA, 20 nt, Human
gccccauucuuuuguaauuu

SEQ ID NO: 1934224 - RNA, 23 nt, Human
gccccauucugccugcccaggcc

SEQ ID NO: 1934225 - RNA, 22 nt, Human
gccccauucugccugcccaggc

SEQ ID NO: 1934226 - RNA, 14 nt, Human
gccccgcccaggcu

SEQ ID NO: 1934227 - RNA, 22 nt, Human
gccccauucuuuuguaauuuaa

SEQ ID NO: 1934228 - RNA, 13 nt, Human
gccccgccgccug

SEQ ID NO: 1934229 - RNA, 19 nt, Human
gccccucagggucccuggu

SEQ ID NO: 1934230 - RNA, 21 nt, Human
gccccucagggucccuggugg

SEQ ID NO: 1934231 - RNA, 21 nt, Human
gccccucaucucucugcccaa

SEQ ID NO: 1934232 - RNA, 20 nt, Human
gccccuauguaguccgugcu

SEQ ID NO: 1934233 - RNA, 23 nt, Human
gccccucaacucuccuccagagu

SEQ ID NO: 1934234 - RNA, 16 nt, Human
gccccuggcugggacg

SEQ ID NO: 1934235 - RNA, 23 nt, Human
gccccuggcugggacguggcuca

SEQ ID NO: 1934236 - RNA, 14 nt, Human
gccccuggccccag

SEQ ID NO: 1934237 - RNA, 12 nt, Human
gccccuggcugg

SEQ ID NO: 1934238 - RNA, 14 nt, Human
gccccuggcuggga

SEQ ID NO: 1934239 - RNA, 13 nt, Human
gccccuggcccca

SEQ ID NO: 1934240 - RNA, 18 nt, Human
gccccucccacagcgcug

SEQ ID NO: 1934241 - RNA, 23 nt, Human
gccccuggcagccccuguucugg

SEQ ID NO: 1934242 - RNA, 19 nt, Human
gccccugcacuccagccug

SEQ ID NO: 1934243 - RNA, 19 nt, Human
gcccuccuacccugcgccc

SEQ ID NO: 1934244 - RNA, 24 nt, Human
gcccuccuacccugcgcccagucc

SEQ ID NO: 1934245 - RNA, 15 nt, Human
gcccuccccucucug

SEQ ID NO: 1934246 - RNA, 18 nt, Human
gcccuccccucucugcac

SEQ ID NO: 1934247 - RNA, 19 nt, Human
gcccuccccucucugcacc

SEQ ID NO: 1934248 - RNA, 21 nt, Human
gcccgggcucugccucccauc

SEQ ID NO: 1934249 - RNA, 19 nt, Human
gcccuccccauggagccag

SEQ ID NO: 1934250 - RNA, 19 nt, Human
gcccgggcucugccuccca

SEQ ID NO: 1934251 - RNA, 20 nt, Human
gcccgggcucugccucccau

SEQ ID NO: 1934252 - RNA, 22 nt, Human
gcccucugcccacucccugcaa

SEQ ID NO: 1934253 - RNA, 14 nt, Human
gcccucuggagugg

SEQ ID NO: 1934254 - RNA, 16 nt, Human
gcccucuggaguggcc

SEQ ID NO: 1934255 - RNA, 17 nt, Human
gcccucuggaguggcca

SEQ ID NO: 1934256 - RNA, 18 nt, Human
gcccucuggaguggccac

SEQ ID NO: 1934257 - RNA, 19 nt, Human
gcccucuggaguggccacu

SEQ ID NO: 1934258 - RNA, 20 nt, Human
gcccucuggaguggccacua

SEQ ID NO: 1934259 - RNA, 22 nt, Human
gcccucuggaguggccacuaag

SEQ ID NO: 1934260 - RNA, 12 nt, Human
gcccuccucucc

SEQ ID NO: 1934261 - RNA, 14 nt, Human
gcccuccucuccca

SEQ ID NO: 1934262 - RNA, 17 nt, Human
gcccuccucucccauug

SEQ ID NO: 1934263 - RNA, 20 nt, Human
gcccuccucucccauugucc

SEQ ID NO: 1934264 - RNA, 15 nt, Human
gcccggcuccaggcu

SEQ ID NO: 1934265 - RNA, 12 nt, Human
gcccgggcucug

SEQ ID NO: 1934266 - RNA, 14 nt, Human
gcccggcuccaggc

SEQ ID NO: 1934267 - RNA, 13 nt, Human
gcccggcuccagg

SEQ ID NO: 1934268 - RNA, 13 nt, Human
gcccgggcucugc

SEQ ID NO: 1934269 - RNA, 14 nt, Human
gcccgggcucugcc

SEQ ID NO: 1934270 - RNA, 15 nt, Human
gcccgggcucugccu

SEQ ID NO: 1934271 - RNA, 18 nt, Human
gcccgggcucugccuccc

SEQ ID NO: 1934272 - RNA, 20 nt, Human
gccccuucugacccaugcug

SEQ ID NO: 1934273 - RNA, 19 nt, Human
gccccuucugacccaugcu

SEQ ID NO: 1934274 - RNA, 12 nt, Human
gcccggcuccag

SEQ ID NO: 1934275 - RNA, 18 nt, Human
gcccgcggggacauuggg

SEQ ID NO: 1934276 - RNA, 12 nt, Human
gccgggguggau

SEQ ID NO: 1934277 - RNA, 19 nt, Human
gccgcagcccugcagaggg

SEQ ID NO: 1934278 - RNA, 22 nt, Human
gccgcaaaccacacuggacucc

SEQ ID NO: 1934279 - RNA, 13 nt, Human
gccgggcagaggg

SEQ ID NO: 1934280 - RNA, 15 nt, Human
gccgcagcccugcag

SEQ ID NO: 1934281 - RNA, 16 nt, Human
gccgcaaaccacacug

SEQ ID NO: 1934282 - RNA, 17 nt, Human
gccgcaaaccacacugg

SEQ ID NO: 1934283 - RNA, 19 nt, Human
gccgcaaaccacacuggac

SEQ ID NO: 1934284 - RNA, 21 nt, Human
gccgcaaaccacacuggacuc

SEQ ID NO: 1934285 - RNA, 16 nt, Human
gccgcagcccugcaga

SEQ ID NO: 1934286 - RNA, 17 nt, Human
gccgcagcccugcagag

SEQ ID NO: 1934287 - RNA, 17 nt, Human
gccgagauagccaaggc

SEQ ID NO: 1934288 - RNA, 19 nt, Human
gccgagauagccaaggcca

SEQ ID NO: 1934289 - RNA, 17 nt, Human
gccgauauacucuagau

SEQ ID NO: 1934290 - RNA, 22 nt, Human
gccgauauacucuagaugaagu

SEQ ID NO: 1934291 - RNA, 14 nt, Human
gccgaguccaagcu

SEQ ID NO: 1934292 - RNA, 15 nt, Human
gccgaguccaagcug

SEQ ID NO: 1934293 - RNA, 18 nt, Human
gccgaguccaagcuggga

SEQ ID NO: 1934294 - RNA, 16 nt, Human
gccgagauagccaagg

SEQ ID NO: 1934295 - RNA, 13 nt, Human
gcccuucucucca

SEQ ID NO: 1934296 - RNA, 23 nt, Human
gccuaaaagugggcuugauucug

SEQ ID NO: 1934297 - RNA, 19 nt, Human
gccguugauucacuucacg

SEQ ID NO: 1934298 - RNA, 23 nt, Human
gccguuugagaagaaaacaucua

SEQ ID NO: 1934299 - RNA, 18 nt, Human
gccgucuaccugaggggc

SEQ ID NO: 1934300 - RNA, 20 nt, Human
gccgucuaccugaggggccu

SEQ ID NO: 1934301 - RNA, 22 nt, Human
gccgucuaccugaggggccucu

SEQ ID NO: 1934302 - RNA, 23 nt, Human
gccgucuaccugaggggccucuu

SEQ ID NO: 1934303 - RNA, 17 nt, Human
gccuauuuuaauaaaca

SEQ ID NO: 1934304 - RNA, 22 nt, Human
gccuaaaagugggcuugauucu

SEQ ID NO: 1934305 - RNA, 21 nt, Human
gccucagcauccuggcacccg

SEQ ID NO: 1934306 - RNA, 13 nt, Human
gccucagccagag

SEQ ID NO: 1934307 - RNA, 14 nt, Human
gccucagccagaga

SEQ ID NO: 1934308 - RNA, 15 nt, Human
gccucagccagagaa

SEQ ID NO: 1934309 - RNA, 16 nt, Human
gccucagccagagaag

SEQ ID NO: 1934310 - RNA, 17 nt, Human
gccucagcauccuggca

SEQ ID NO: 1934311 - RNA, 18 nt, Human
gccucagcauccuggcac

SEQ ID NO: 1934312 - RNA, 24 nt, Human
gccucaagugauucuccugccuca

SEQ ID NO: 1934313 - RNA, 22 nt, Human
gccucaagugauucuccugccu

SEQ ID NO: 1934314 - RNA, 15 nt, Human
gccucugacacacag

SEQ ID NO: 1934315 - RNA, 16 nt, Human
gccucugacacacagc

SEQ ID NO: 1934316 - RNA, 16 nt, Human
gccucugcacuccccu

SEQ ID NO: 1934317 - RNA, 17 nt, Human
gccucugcacuccccug

SEQ ID NO: 1934318 - RNA, 18 nt, Human
gccucugcacuccccugc

SEQ ID NO: 1934319 - RNA, 19 nt, Human
gccucugcacuccccugcu

SEQ ID NO: 1934320 - RNA, 20 nt, Human
gccucugcacuccccugcug

SEQ ID NO: 1934321 - RNA, 15 nt, Human
gccugaagucacaca

SEQ ID NO: 1934322 - RNA, 20 nt, Human
gccugaagaguccucugaau

SEQ ID NO: 1934323 - RNA, 18 nt, Human
gccugaagaguccucuga

SEQ ID NO: 1934324 - RNA, 17 nt, Human
gccugaaggggcgucug

SEQ ID NO: 1934325 - RNA, 18 nt, Human
gccugaaggggcgucugu

SEQ ID NO: 1934326 - RNA, 22 nt, Human
gccugaaggggcgucuguuccc

SEQ ID NO: 1934327 - RNA, 22 nt, Human
gccugagauuucaucugcucuc

SEQ ID NO: 1934328 - RNA, 18 nt, Human
gccugagauuucaucugc

SEQ ID NO: 1934329 - RNA, 16 nt, Human
gccugagauuucaucu

SEQ ID NO: 1934330 - RNA, 21 nt, Human
gccucugcacuccccugcugg

SEQ ID NO: 1934331 - RNA, 12 nt, Human
gccugcccaggc

SEQ ID NO: 1934332 - RNA, 11 nt, Human
gccugcccagg

SEQ ID NO: 1934333 - RNA, 14 nt, Human
gccuggacccugug

SEQ ID NO: 1934334 - RNA, 20 nt, Human
gccugcagagcugcgggcug

SEQ ID NO: 1934335 - RNA, 23 nt, Human
gccugagauuucaucugcucucc

SEQ ID NO: 1934336 - RNA, 18 nt, Human
gccugagcaacucuugau

SEQ ID NO: 1934337 - RNA, 20 nt, Human
gccucccgaauagcugggac

SEQ ID NO: 1934338 - RNA, 23 nt, Human
gccucccgaguagcugggacuac

SEQ ID NO: 1934339 - RNA, 21 nt, Human
gccucccgaguagcugggacu

SEQ ID NO: 1934340 - RNA, 19 nt, Human
gccucccgaauagcuggga

SEQ ID NO: 1934341 - RNA, 18 nt, Human
gccucccgaauagcuggg

SEQ ID NO: 1934342 - RNA, 22 nt, Human
gccucagccucccaaagugcug

SEQ ID NO: 1934343 - RNA, 17 nt, Human
gccucagcccugacccu

SEQ ID NO: 1934344 - RNA, 22 nt, Human
gccucagcccugacccugugga

SEQ ID NO: 1934345 - RNA, 14 nt, Human
gccucagccuccca

SEQ ID NO: 1934346 - RNA, 12 nt, Human
gccucagccucc

SEQ ID NO: 1934347 - RNA, 15 nt, Human
gccucccauccaggg

SEQ ID NO: 1934348 - RNA, 22 nt, Human
gccucccauccagggcccccau

SEQ ID NO: 1934349 - RNA, 18 nt, Human
gccucccccuagccauuu

SEQ ID NO: 1934350 - RNA, 21 nt, Human
gccucccccuagccauuuuua

SEQ ID NO: 1934351 - RNA, 10 nt, Human
gccucucugc

SEQ ID NO: 1934352 - RNA, 14 nt, Human
gccucucugcaggu

SEQ ID NO: 1934353 - RNA, 16 nt, Human
gccucucugcaggucc

SEQ ID NO: 1934354 - RNA, 17 nt, Human
gccucucugcagguccc

SEQ ID NO: 1934355 - RNA, 15 nt, Human
gccucucccaucacu

SEQ ID NO: 1934356 - RNA, 17 nt, Human
gccucccugccucaggc

SEQ ID NO: 1934357 - RNA, 13 nt, Human
gccucccugaagc

SEQ ID NO: 1934358 - RNA, 18 nt, Human
gccucccugaagccuuug

SEQ ID NO: 1934359 - RNA, 14 nt, Human
gccucccugccuca

SEQ ID NO: 1934360 - RNA, 16 nt, Human
gccucccugccucagg

SEQ ID NO: 1934361 - RNA, 15 nt, Human
gcgaccuuggccgca

SEQ ID NO: 1934362 - RNA, 13 nt, Human
gcgacuaauuuca

SEQ ID NO: 1934363 - RNA, 21 nt, Human
gcgacuaauuucaaaaugcuu

SEQ ID NO: 1934364 - RNA, 23 nt, Human
gcgacuaauuucaaaaugcuuuu

SEQ ID NO: 1934365 - RNA, 21 nt, Human
gcgacucuauagacucuagga

SEQ ID NO: 1934366 - RNA, 18 nt, Human
gcgccuacaggagugagc

SEQ ID NO: 1934367 - RNA, 17 nt, Human
gcgcccaguccuuccac

SEQ ID NO: 1934368 - RNA, 22 nt, Human
gcgccaggcugaccacagcaca

SEQ ID NO: 1934369 - RNA, 21 nt, Human
gcgccaggauggaacacggcc

SEQ ID NO: 1934370 - RNA, 22 nt, Human
gcgccaggauggaacacggcca

SEQ ID NO: 1934371 - RNA, 15 nt, Human
gcgccaggcugacca

SEQ ID NO: 1934372 - RNA, 20 nt, Human
gcgccaggcugaccacagca

SEQ ID NO: 1934373 - RNA, 17 nt, Human
gcgcugccccuggcagc

SEQ ID NO: 1934374 - RNA, 19 nt, Human
gcgcuggccgggaccccga

SEQ ID NO: 1934375 - RNA, 14 nt, Human
gcgcugccccuggc

SEQ ID NO: 1934376 - RNA, 21 nt, Human
gcgccuacaggagugagcacu

SEQ ID NO: 1934377 - RNA, 20 nt, Human
gcgccuacaggagugagcac

SEQ ID NO: 1934378 - RNA, 21 nt, Human
gcgcuccugccgcagagcugg

SEQ ID NO: 1934379 - RNA, 20 nt, Human
gcgcuccugccgcagagcug

SEQ ID NO: 1934380 - RNA, 19 nt, Human
gcgcuccugccgcagagcu

SEQ ID NO: 1934381 - RNA, 19 nt, Human
gcgcccaguccuuccaccu

SEQ ID NO: 1934382 - RNA, 23 nt, Human
gcgguccacccaggagccccgag

SEQ ID NO: 1934383 - RNA, 20 nt, Human
gcgguccacccaggagcccc

SEQ ID NO: 1934384 - RNA, 23 nt, Human
gcggggacagcuccuucuguccu

SEQ ID NO: 1934385 - RNA, 19 nt, Human
gcggggacagcuccuucug

SEQ ID NO: 1934386 - RNA, 16 nt, Human
gcggacaguggcagga

SEQ ID NO: 1934387 - RNA, 19 nt, Human
gcggacaguggcaggacag

SEQ ID NO: 1934388 - RNA, 16 nt, Human
gcggacaucagcuggu

SEQ ID NO: 1934389 - RNA, 18 nt, Human
gcggggacagcuccuucu

SEQ ID NO: 1934390 - RNA, 23 nt, Human
gcggacagccacggccaggccag

SEQ ID NO: 1934391 - RNA, 14 nt, Human
gcggacaguggcag

SEQ ID NO: 1934392 - RNA, 15 nt, Human
gcggacaguggcagg

SEQ ID NO: 1934393 - RNA, 19 nt, Human
gcggacagccacggccagg

SEQ ID NO: 1934394 - RNA, 16 nt, Human
gcggacagccacggcc

SEQ ID NO: 1934395 - RNA, 19 nt, Human
gcggaaugaaccacaucuu

SEQ ID NO: 1934396 - RNA, 21 nt, Human
gcuagacgagcaggcuucuuc

SEQ ID NO: 1934397 - RNA, 22 nt, Human
gcuagacgagcaggcuucuucc

SEQ ID NO: 1934398 - RNA, 15 nt, Human
gcgugagccacugca

SEQ ID NO: 1934399 - RNA, 16 nt, Human
gcgugagccacugcac

SEQ ID NO: 1934400 - RNA, 14 nt, Human
gcgugagccacugc

SEQ ID NO: 1934401 - RNA, 16 nt, Human
gcgucgcccucccagg

SEQ ID NO: 1934402 - RNA, 17 nt, Human
gcgucgcccucccaggc

SEQ ID NO: 1934403 - RNA, 17 nt, Human
gcuaacauggaaguacu

SEQ ID NO: 1934404 - RNA, 18 nt, Human
gcuaacauggaaguacua

SEQ ID NO: 1934405 - RNA, 14 nt, Human
gcuaacauggaagu

SEQ ID NO: 1934406 - RNA, 22 nt, Human
gcuacacaggggaaaagaggag

SEQ ID NO: 1934407 - RNA, 13 nt, Human
gcuacaccuuucu

SEQ ID NO: 1934408 - RNA, 15 nt, Human
gcuacaccuuucucc

SEQ ID NO: 1934409 - RNA, 20 nt, Human
gcuacaccuuucuccuuugu

SEQ ID NO: 1934410 - RNA, 21 nt, Human
gcuaacuagcuuggaaacugg

SEQ ID NO: 1934411 - RNA, 23 nt, Human
gcuaagaaccuggaacuugggga

SEQ ID NO: 1934412 - RNA, 16 nt, Human
gcuaagaauauuugaa

SEQ ID NO: 1934413 - RNA, 14 nt, Human
gcuaagaauauuug

SEQ ID NO: 1934414 - RNA, 16 nt, Human
gcuaagaaccuggaac

SEQ ID NO: 1934415 - RNA, 17 nt, Human
gcuaagaaccuggaacu

SEQ ID NO: 1934416 - RNA, 14 nt, Human
gcuaagaaaagauu

SEQ ID NO: 1934417 - RNA, 19 nt, Human
gccuucggccuccauccug

SEQ ID NO: 1934418 - RNA, 17 nt, Human
gccuugggcccucuggu

SEQ ID NO: 1934419 - RNA, 18 nt, Human
gccuucggccuccauccu

SEQ ID NO: 1934420 - RNA, 16 nt, Human
gccuuuuauuucuuaa

SEQ ID NO: 1934421 - RNA, 12 nt, Human
gccuuuucuauu

SEQ ID NO: 1934422 - RNA, 16 nt, Human
gccuuuugacuuucau

SEQ ID NO: 1934423 - RNA, 17 nt, Human
gccugguggcagcugcg

SEQ ID NO: 1934424 - RNA, 16 nt, Human
gccugguggcagcugc

SEQ ID NO: 1934425 - RNA, 18 nt, Human
gccuguaaucacagcuac

SEQ ID NO: 1934426 - RNA, 14 nt, Human
gccugguuuagccu

SEQ ID NO: 1934427 - RNA, 14 nt, Human
gccuguaaucccag

SEQ ID NO: 1934428 - RNA, 18 nt, Human
gccuguaaucccagcacu

SEQ ID NO: 1934429 - RNA, 15 nt, Human
gccugguggcagcug

SEQ ID NO: 1934430 - RNA, 21 nt, Human
gccuuauggaacacucugaga

SEQ ID NO: 1934431 - RNA, 22 nt, Human
gccuuauggaacacucugagac

SEQ ID NO: 1934432 - RNA, 23 nt, Human
gccuuauggaacacucugagacu

SEQ ID NO: 1934433 - RNA, 20 nt, Human
gccuuagaagucacacagua

SEQ ID NO: 1934434 - RNA, 19 nt, Human
gccuuacccucauguucuu

SEQ ID NO: 1934435 - RNA, 22 nt, Human
gccuguccuccaacaccaagca

SEQ ID NO: 1934436 - RNA, 18 nt, Human
ggucagaaacaggaccgg

SEQ ID NO: 1934437 - RNA, 13 nt, Human
ggucaggcagggu

SEQ ID NO: 1934438 - RNA, 21 nt, Human
ggucaggaguuccuaaccagc

SEQ ID NO: 1934439 - RNA, 15 nt, Human
ggucagaaacaggac

SEQ ID NO: 1934440 - RNA, 16 nt, Human
ggucagaaacaggacc

SEQ ID NO: 1934441 - RNA, 17 nt, Human
ggucagaaacaggaccg

SEQ ID NO: 1934442 - RNA, 11 nt, Human
ggucagagccu

SEQ ID NO: 1934443 - RNA, 15 nt, Human
ggucccaccccacac

SEQ ID NO: 1934444 - RNA, 16 nt, Human
ggucccaccccacaca

SEQ ID NO: 1934445 - RNA, 19 nt, Human
ggucaacauggugaaaccc

SEQ ID NO: 1934446 - RNA, 12 nt, Human
ggucacucuggc

SEQ ID NO: 1934447 - RNA, 17 nt, Human
gguacuuguggacacag

SEQ ID NO: 1934448 - RNA, 16 nt, Human
gguacuuguggacaca

SEQ ID NO: 1934449 - RNA, 20 nt, Human
gguacuuguggacacagcuc

SEQ ID NO: 1934450 - RNA, 19 nt, Human
gguacuucuugaaggugcu

SEQ ID NO: 1934451 - RNA, 22 nt, Human
gguagaaauaucugaaaaugua

SEQ ID NO: 1934452 - RNA, 13 nt, Human
gguacccacugcu

SEQ ID NO: 1934453 - RNA, 16 nt, Human
gguacccacugcucug

SEQ ID NO: 1934454 - RNA, 15 nt, Human
gguacuucuugaagg

SEQ ID NO: 1934455 - RNA, 16 nt, Human
gguacuucuugaaggu

SEQ ID NO: 1934456 - RNA, 11 nt, Human
gguacccacug

SEQ ID NO: 1934457 - RNA, 20 nt, Human
gguaccaguugaaauuuuug

SEQ ID NO: 1934458 - RNA, 23 nt, Human
gguagaaauaucugaaaauguau

SEQ ID NO: 1934459 - RNA, 22 nt, Human
gguagaagcccuucuaccuucc

SEQ ID NO: 1934460 - RNA, 11 nt, Human
gguagaacaca

SEQ ID NO: 1934461 - RNA, 21 nt, Human
gguagccagcacacagggcag

SEQ ID NO: 1934462 - RNA, 18 nt, Human
gguagcauuuguguugaa

SEQ ID NO: 1934463 - RNA, 13 nt, Human
gguagccagcaca

SEQ ID NO: 1934464 - RNA, 16 nt, Human
gguagccagcacacag

SEQ ID NO: 1934465 - RNA, 12 nt, Human
gggugaaggcug

SEQ ID NO: 1934466 - RNA, 13 nt, Human
gggugaaggcugg

SEQ ID NO: 1934467 - RNA, 14 nt, Human
gggugaaggcuggc

SEQ ID NO: 1934468 - RNA, 15 nt, Human
gggugaaggcuggca

SEQ ID NO: 1934469 - RNA, 17 nt, Human
gggugaagugaagacaa

SEQ ID NO: 1934470 - RNA, 19 nt, Human
gggugacagagcaagugag

SEQ ID NO: 1934471 - RNA, 20 nt, Human
gggucuugguuccagccugc

SEQ ID NO: 1934472 - RNA, 20 nt, Human
gggugaacaaagcagccacg

SEQ ID NO: 1934473 - RNA, 17 nt, Human
gggugagaacaaccaaa

SEQ ID NO: 1934474 - RNA, 14 nt, Human
gggugaggagcugg

SEQ ID NO: 1934475 - RNA, 15 nt, Human
gggugaggagcuggg

SEQ ID NO: 1934476 - RNA, 23 nt, Human
gggugcaguaucaugcccugugc

SEQ ID NO: 1934477 - RNA, 21 nt, Human
ggguuggagcaguagcuggag

SEQ ID NO: 1934478 - RNA, 12 nt, Human
ggguucuaccca

SEQ ID NO: 1934479 - RNA, 23 nt, Human
ggguucaagcgauucuucugcuu

SEQ ID NO: 1934480 - RNA, 20 nt, Human
ggguucaccugggcugaggc

SEQ ID NO: 1934481 - RNA, 22 nt, Human
ggguucaagcgauucuucugcu

SEQ ID NO: 1934482 - RNA, 17 nt, Human
gggugcugggccccugc

SEQ ID NO: 1934483 - RNA, 14 nt, Human
gggucucacucugu

SEQ ID NO: 1934484 - RNA, 17 nt, Human
ggguaagugagagaggg

SEQ ID NO: 1934485 - RNA, 16 nt, Human
gggguggggucaugcc

SEQ ID NO: 1934486 - RNA, 21 nt, Human
gggucugaggaauccagaccc

SEQ ID NO: 1934487 - RNA, 12 nt, Human
gggucugaggaa

SEQ ID NO: 1934488 - RNA, 22 nt, Human
gggucuggaguugaucuggaac

SEQ ID NO: 1934489 - RNA, 22 nt, Human
gggucuggcagccucccaucca

SEQ ID NO: 1934490 - RNA, 20 nt, Human
gggucuggaguugaucugga

SEQ ID NO: 1934491 - RNA, 12 nt, Human
gggguggccucc

SEQ ID NO: 1934492 - RNA, 18 nt, Human
ggggugcugggccccugc

SEQ ID NO: 1934493 - RNA, 22 nt, Human
gggggagccccuucugcucagc

SEQ ID NO: 1934494 - RNA, 20 nt, Human
gggguggggggggugcuggg

SEQ ID NO: 1934495 - RNA, 14 nt, Human
ggggugggccaggc

SEQ ID NO: 1934496 - RNA, 17 nt, Human
ggggugggccaggcuga

SEQ ID NO: 1934497 - RNA, 17 nt, Human
gggguggggaccucagg

SEQ ID NO: 1934498 - RNA, 13 nt, Human
ggggugggccagg

SEQ ID NO: 1934499 - RNA, 22 nt, Human
gggggaggugggauccuccagg

SEQ ID NO: 1934500 - RNA, 23 nt, Human
ggggcugcaccggcuggccuggc

SEQ ID NO: 1934501 - RNA, 19 nt, Human
ggggcugaggugggaggau

SEQ ID NO: 1934502 - RNA, 12 nt, Human
ggggcugcaccg

SEQ ID NO: 1934503 - RNA, 21 nt, Human
ggggcugcaccggcuggccug

SEQ ID NO: 1934504 - RNA, 22 nt, Human
ggggcugcaccggcuggccugg

SEQ ID NO: 1934505 - RNA, 14 nt, Human
ggggagggugacag

SEQ ID NO: 1934506 - RNA, 21 nt, Human
ggggaaaaucagccugcucca

SEQ ID NO: 1934507 - RNA, 15 nt, Human
ggggaaaagagauga

SEQ ID NO: 1934508 - RNA, 22 nt, Human
gggcuuggggaccagagcugcc

SEQ ID NO: 1934509 - RNA, 16 nt, Human
ggggaaaaucagccug

SEQ ID NO: 1934510 - RNA, 17 nt, Human
ggggaaaaucagccugc

SEQ ID NO: 1934511 - RNA, 19 nt, Human
ggggaaaaucagccugcuc

SEQ ID NO: 1934512 - RNA, 17 nt, Human
ggggcugaggugggagg

SEQ ID NO: 1934513 - RNA, 14 nt, Human
ggggcucuucucau

SEQ ID NO: 1934514 - RNA, 12 nt, Human
ggggcucuggga

SEQ ID NO: 1934515 - RNA, 24 nt, Human
ggggcucucauguuuucaacugcc

SEQ ID NO: 1934516 - RNA, 20 nt, Human
ggggcgucuguucccccuuc

SEQ ID NO: 1934517 - RNA, 18 nt, Human
ggggcgucuguucccccu

SEQ ID NO: 1934518 - RNA, 16 nt, Human
ggggcaacccugguga

SEQ ID NO: 1934519 - RNA, 13 nt, Human
gguugagguuuca

SEQ ID NO: 1934520 - RNA, 23 nt, Human
gguucacucuuggagccugcaga

SEQ ID NO: 1934521 - RNA, 21 nt, Human
gguucacucuuggagccugca

SEQ ID NO: 1934522 - RNA, 21 nt, Human
gguucaaagauauuuugcuuu

SEQ ID NO: 1934523 - RNA, 20 nt, Human
gguucacucuuggagccugc

SEQ ID NO: 1934524 - RNA, 19 nt, Human
gguucacucuuggagccug

SEQ ID NO: 1934525 - RNA, 13 nt, Human
gguucaaagauau

SEQ ID NO: 1934526 - RNA, 21 nt, Human
gguuacccaguuagcucucaa

SEQ ID NO: 1934527 - RNA, 17 nt, Human
gguuaggcauuguggga

SEQ ID NO: 1934528 - RNA, 13 nt, Human
gguuauggagagg

SEQ ID NO: 1934529 - RNA, 17 nt, Human
ggugucaagagggucug

SEQ ID NO: 1934530 - RNA, 19 nt, Human
ggugucaagagggucugag

SEQ ID NO: 1934531 - RNA, 19 nt, Human
ggugucaccugaagacuca

SEQ ID NO: 1934532 - RNA, 18 nt, Human
ggugguuucagaaaugug

SEQ ID NO: 1934533 - RNA, 17 nt, Human
ggugguuucagaaaugu

SEQ ID NO: 1934534 - RNA, 21 nt, Human
ggugguuauggagaggguguc

SEQ ID NO: 1934535 - RNA, 23 nt, Human
ggugguucacucuuggagccugc

SEQ ID NO: 1934536 - RNA, 22 nt, Human
ggugguucacucuuggagccug

SEQ ID NO: 1934537 - RNA, 18 nt, Human
ggugguuuucuguucuuu

SEQ ID NO: 1934538 - RNA, 15 nt, Human
ggugguuuucuguuc

SEQ ID NO: 1934539 - RNA, 21 nt, Human
gguggugucuccaacccccca

SEQ ID NO: 1934540 - RNA, 21 nt, Human
ggugguugcuguuuuccuccc

SEQ ID NO: 1934541 - RNA, 23 nt, Human
ggugguugcuguuuuccucccuu

SEQ ID NO: 1934542 - RNA, 15 nt, Human
gguggugaccucugc

SEQ ID NO: 1934543 - RNA, 14 nt, Human
gguggugaccucug

SEQ ID NO: 1934544 - RNA, 16 nt, Human
gguggugaccucugcc

SEQ ID NO: 1934545 - RNA, 21 nt, Human
gguggugcagguagaccuguc

SEQ ID NO: 1934546 - RNA, 14 nt, Human
ggugguaacccugg

SEQ ID NO: 1934547 - RNA, 23 nt, Human
gguggggucaugcccuccucucc

SEQ ID NO: 1934548 - RNA, 21 nt, Human
gguggcuagucaagcuccucc

SEQ ID NO: 1934549 - RNA, 22 nt, Human
gguggcuagucaagcuccuccu

SEQ ID NO: 1934550 - RNA, 23 nt, Human
gguggcuagucaagcuccuccuc

SEQ ID NO: 1934551 - RNA, 16 nt, Human
ggugagaggggaacag

SEQ ID NO: 1934552 - RNA, 20 nt, Human
ggugagagggccgggcagag

SEQ ID NO: 1934553 - RNA, 21 nt, Human
ggugagagggccgggcagagg

SEQ ID NO: 1934554 - RNA, 15 nt, Human
ggugagaagcagagg

SEQ ID NO: 1934555 - RNA, 16 nt, Human
ggugcuaucuccccca

SEQ ID NO: 1934556 - RNA, 17 nt, Human
ggugcuaucucccccag

SEQ ID NO: 1934557 - RNA, 19 nt, Human
ggugcuaucucccccagcc

SEQ ID NO: 1934558 - RNA, 20 nt, Human
ggugcuaucucccccagccc

SEQ ID NO: 1934559 - RNA, 22 nt, Human
gguggcagugggagcugccugu

SEQ ID NO: 1934560 - RNA, 19 nt, Human
gguggcagugggagcugcc

SEQ ID NO: 1934561 - RNA, 21 nt, Human
ggugcugccauccagguucag

SEQ ID NO: 1934562 - RNA, 15 nt, Human
ggugcugccauccag

SEQ ID NO: 1934563 - RNA, 21 nt, Human
ggugcugacuucaucucccac

SEQ ID NO: 1934564 - RNA, 13 nt, Human
ggugcugagaagc

SEQ ID NO: 1934565 - RNA, 21 nt, Human
ggugcuaucucccccagcccc

SEQ ID NO: 1934566 - RNA, 15 nt, Human
ggugcugacggccag

SEQ ID NO: 1934567 - RNA, 16 nt, Human
ggugcugacggccagg

SEQ ID NO: 1934568 - RNA, 17 nt, Human
ggugcugacggccaggg

SEQ ID NO: 1934569 - RNA, 20 nt, Human
ggugcugacggccagggaga

SEQ ID NO: 1934570 - RNA, 23 nt, Human
gguggccucccaacucaccccag

SEQ ID NO: 1934571 - RNA, 17 nt, Human
gguggccaugccucagc

SEQ ID NO: 1934572 - RNA, 20 nt, Human
gguggccaugccucagcccu

SEQ ID NO: 1934573 - RNA, 20 nt, Human
gguggcuagucaagcuccuc

SEQ ID NO: 1934574 - RNA, 21 nt, Human
gguggcgacucuauagacucu

SEQ ID NO: 1934575 - RNA, 10 nt, Human
gguggccaug

SEQ ID NO: 1934576 - RNA, 22 nt, Human
gguggccucccaacucacccca

SEQ ID NO: 1934577 - RNA, 22 nt, Human
ggugaccagcaccaucucuccu

SEQ ID NO: 1934578 - RNA, 19 nt, Human
ggugaccuuccaagagccu

SEQ ID NO: 1934579 - RNA, 21 nt, Human
ggugaccuuccaagagccuga

SEQ ID NO: 1934580 - RNA, 20 nt, Human
ggugaccuuccaagagccug

SEQ ID NO: 1934581 - RNA, 14 nt, Human
ggucugacccacug

SEQ ID NO: 1934582 - RNA, 21 nt, Human
ggugacagagugagacucugu

SEQ ID NO: 1934583 - RNA, 12 nt, Human
ggugacaguggc

SEQ ID NO: 1934584 - RNA, 23 nt, Human
ggucucacucugucgcccagucu

SEQ ID NO: 1934585 - RNA, 22 nt, Human
ggucucacucugucgcccaguc

SEQ ID NO: 1934586 - RNA, 17 nt, Human
ggucucaaacuccugac

SEQ ID NO: 1934587 - RNA, 17 nt, Human
ggucccaccccacacac

SEQ ID NO: 1934588 - RNA, 14 nt, Human
ggucccaccccaca

SEQ ID NO: 1934589 - RNA, 14 nt, Human
gggcccagaggagc

SEQ ID NO: 1934590 - RNA, 12 nt, Human
gggcccagagga

SEQ ID NO: 1934591 - RNA, 20 nt, Human
gggcccagagcccagcucca

SEQ ID NO: 1934592 - RNA, 17 nt, Human
gggcccagagcccagcu

SEQ ID NO: 1934593 - RNA, 19 nt, Human
gggcccagagcccagcucc

SEQ ID NO: 1934594 - RNA, 11 nt, Human
gggcccagagc

SEQ ID NO: 1934595 - RNA, 12 nt, Human
gggcccagagcc

SEQ ID NO: 1934596 - RNA, 13 nt, Human
gggcccagagccc

SEQ ID NO: 1934597 - RNA, 15 nt, Human
gggcccagagcccag

SEQ ID NO: 1934598 - RNA, 16 nt, Human
gggcccagagcccagc

SEQ ID NO: 1934599 - RNA, 17 nt, Human
gggcccagagagggugg

SEQ ID NO: 1934600 - RNA, 16 nt, Human
gggccacagagaaagu

SEQ ID NO: 1934601 - RNA, 23 nt, Human
gggccacagagaaaguacuucuc

SEQ ID NO: 1934602 - RNA, 12 nt, Human
gggcaugacacg

SEQ ID NO: 1934603 - RNA, 18 nt, Human
gggcagugggucccagau

SEQ ID NO: 1934604 - RNA, 20 nt, Human
gggcagugguguggagaagc

SEQ ID NO: 1934605 - RNA, 19 nt, Human
gggccuggccugagcuggg

SEQ ID NO: 1934606 - RNA, 14 nt, Human
gggccuggccugag

SEQ ID NO: 1934607 - RNA, 18 nt, Human
gggccuggccugagcugg

SEQ ID NO: 1934608 - RNA, 17 nt, Human
gggccuggcucaggugg

SEQ ID NO: 1934609 - RNA, 13 nt, Human
gggccuggcuccc

SEQ ID NO: 1934610 - RNA, 22 nt, Human
gggccccugccucucugcaggu

SEQ ID NO: 1934611 - RNA, 13 nt, Human
gggcccugccucc

SEQ ID NO: 1934612 - RNA, 13 nt, Human
gggccuggccuga

SEQ ID NO: 1934613 - RNA, 14 nt, Human
gggcccccaucuca

SEQ ID NO: 1934614 - RNA, 13 nt, Human
gggccccugccuc

SEQ ID NO: 1934615 - RNA, 15 nt, Human
gggccccugccucuc

SEQ ID NO: 1934616 - RNA, 13 nt, Human
gggccccugccag

SEQ ID NO: 1934617 - RNA, 17 nt, Human
gggccccugccucucug

SEQ ID NO: 1934618 - RNA, 18 nt, Human
gggccccugccucucugc

SEQ ID NO: 1934619 - RNA, 19 nt, Human
gggccccugccucucugca

SEQ ID NO: 1934620 - RNA, 21 nt, Human
gggccccugccucucugcagg

SEQ ID NO: 1934621 - RNA, 22 nt, Human
gggcagggccgcccgggcccag

SEQ ID NO: 1934622 - RNA, 14 nt, Human
gggcagggccgccc

SEQ ID NO: 1934623 - RNA, 13 nt, Human
gggcagggcagcc

SEQ ID NO: 1934624 - RNA, 18 nt, Human
gggcagggcucccacaga

SEQ ID NO: 1934625 - RNA, 23 nt, Human
gggcaggggagggucagccaggg

SEQ ID NO: 1934626 - RNA, 15 nt, Human
gggcagggcucccac

SEQ ID NO: 1934627 - RNA, 23 nt, Human
gggcagggccgcccgggcccaga

SEQ ID NO: 1934628 - RNA, 11 nt, Human
gggcagagcag

SEQ ID NO: 1934629 - RNA, 12 nt, Human
gggcagagcaga

SEQ ID NO: 1934630 - RNA, 17 nt, Human
gggcagguugguggggg

SEQ ID NO: 1934631 - RNA, 20 nt, Human
gggcacucagaagacacuga

SEQ ID NO: 1934632 - RNA, 14 nt, Human
gggcagaaggaaga

SEQ ID NO: 1934633 - RNA, 18 nt, Human
gggcagaaggaagacuuc

SEQ ID NO: 1934634 - RNA, 23 nt, Human
gggcacaggugucugcccccucu

SEQ ID NO: 1934635 - RNA, 13 nt, Human
gggcacagggucu

SEQ ID NO: 1934636 - RNA, 16 nt, Human
gggcacagggucucua

SEQ ID NO: 1934637 - RNA, 14 nt, Human
gggcacccucccac

SEQ ID NO: 1934638 - RNA, 12 nt, Human
gggcacccaccc

SEQ ID NO: 1934639 - RNA, 12 nt, Human
gggcaccugcca

SEQ ID NO: 1934640 - RNA, 19 nt, Human
gggcacucagaagacacug

SEQ ID NO: 1934641 - RNA, 16 nt, Human
gggcacucagaagaca

SEQ ID NO: 1934642 - RNA, 23 nt, Human
gggcacaccgggcacucagaaga

SEQ ID NO: 1934643 - RNA, 15 nt, Human
gggcacacgccuccc

SEQ ID NO: 1934644 - RNA, 18 nt, Human
gggcacagaaaauggaag

SEQ ID NO: 1934645 - RNA, 19 nt, Human
gggcacacgccucccacug

SEQ ID NO: 1934646 - RNA, 20 nt, Human
gggcacagaaaauggaagac

SEQ ID NO: 1934647 - RNA, 21 nt, Human
gggcacagaaaauggaagaca

SEQ ID NO: 1934648 - RNA, 14 nt, Human
gggcacaggccaug

SEQ ID NO: 1934649 - RNA, 16 nt, Human
gggcacaggccaugga

SEQ ID NO: 1934650 - RNA, 14 nt, Human
gggagugagcuggu

SEQ ID NO: 1934651 - RNA, 11 nt, Human
gggagugagcu

SEQ ID NO: 1934652 - RNA, 18 nt, Human
gggagugacagaggcagc

SEQ ID NO: 1934653 - RNA, 17 nt, Human
gggaguuaagaccuggc

SEQ ID NO: 1934654 - RNA, 20 nt, Human
gggaguuaagaccuggcagc

SEQ ID NO: 1934655 - RNA, 23 nt, Human
gggaguuaagaccuggcagcucu

SEQ ID NO: 1934656 - RNA, 19 nt, Human
gggaguggggaagugaucu

SEQ ID NO: 1934657 - RNA, 11 nt, Human
gggagugugua

SEQ ID NO: 1934658 - RNA, 17 nt, Human
gggaguguacucccagg

SEQ ID NO: 1934659 - RNA, 18 nt, Human
gggaguguacucccaggg

SEQ ID NO: 1934660 - RNA, 15 nt, Human
gggaguuaagaccug

SEQ ID NO: 1934661 - RNA, 16 nt, Human
gggaguuaagaccugg

SEQ ID NO: 1934662 - RNA, 16 nt, Human
gggaggugaccccagg

SEQ ID NO: 1934663 - RNA, 15 nt, Human
gggacugaagccaaa

SEQ ID NO: 1934664 - RNA, 18 nt, Human
gggacugaagccaaaguu

SEQ ID NO: 1934665 - RNA, 18 nt, Human
gggacugaaaaccucucc

SEQ ID NO: 1934666 - RNA, 19 nt, Human
gggacugaaaaccucuccu

SEQ ID NO: 1934667 - RNA, 17 nt, Human
gggaggugggauccucc

SEQ ID NO: 1934668 - RNA, 13 nt, Human
gggacugagaaau

SEQ ID NO: 1934669 - RNA, 13 nt, Human
gggauagagagag

SEQ ID NO: 1934670 - RNA, 13 nt, Human
gggauagaugugu

SEQ ID NO: 1934671 - RNA, 21 nt, Human
gggauaugauuuaaaucagcc

SEQ ID NO: 1934672 - RNA, 14 nt, Human
gggauagaugugug

SEQ ID NO: 1934673 - RNA, 15 nt, Human
gggauccuccaggug

SEQ ID NO: 1934674 - RNA, 16 nt, Human
gggauccuccaggugc

SEQ ID NO: 1934675 - RNA, 22 nt, Human
gggaucaaccagcuaagaaaag

SEQ ID NO: 1934676 - RNA, 23 nt, Human
gggauccuggaguucugguuccu

SEQ ID NO: 1934677 - RNA, 20 nt, Human
gggaucccucccccccaugc

SEQ ID NO: 1934678 - RNA, 18 nt, Human
gggcaacccuggugacca

SEQ ID NO: 1934679 - RNA, 20 nt, Human
gggcaacccccagccugcua

SEQ ID NO: 1934680 - RNA, 20 nt, Human
gggaugacaugcacucagcu

SEQ ID NO: 1934681 - RNA, 19 nt, Human
gggaucugguccuacccau

SEQ ID NO: 1934682 - RNA, 23 nt, Human
gggaucugguccuacccaucccc

SEQ ID NO: 1934683 - RNA, 15 nt, Human
gggcacaaagggccc

SEQ ID NO: 1934684 - RNA, 16 nt, Human
gggcacaaagggccca

SEQ ID NO: 1934685 - RNA, 17 nt, Human
gggcacaaagggcccag

SEQ ID NO: 1934686 - RNA, 22 nt, Human
ggcuugaguuuaaauuguaaua

SEQ ID NO: 1934687 - RNA, 21 nt, Human
ggcuuggggaccagagcugcc

SEQ ID NO: 1934688 - RNA, 19 nt, Human
ggcuuggggaccagagcug

SEQ ID NO: 1934689 - RNA, 15 nt, Human
ggcuuggggcuuccu

SEQ ID NO: 1934690 - RNA, 10 nt, Human
ggcuuuugug

SEQ ID NO: 1934691 - RNA, 12 nt, Human
ggcugggcuuca

SEQ ID NO: 1934692 - RNA, 18 nt, Human
ggcugggcucccuuccca

SEQ ID NO: 1934693 - RNA, 17 nt, Human
ggcugggcucccuuccc

SEQ ID NO: 1934694 - RNA, 17 nt, Human
ggcugggcuucaguggc

SEQ ID NO: 1934695 - RNA, 13 nt, Human
ggcugggcuucag

SEQ ID NO: 1934696 - RNA, 18 nt, Human
ggcugggcuucaguggca

SEQ ID NO: 1934697 - RNA, 23 nt, Human
ggcuuaaacccauauuguaaaac

SEQ ID NO: 1934698 - RNA, 21 nt, Human
ggcuuagucacugagacagcc

SEQ ID NO: 1934699 - RNA, 13 nt, Human
ggcuuacacccac

SEQ ID NO: 1934700 - RNA, 16 nt, Human
ggcuuacggcccuggc

SEQ ID NO: 1934701 - RNA, 17 nt, Human
ggcuuacggcccuggcc

SEQ ID NO: 1934702 - RNA, 21 nt, Human
ggcuugagaaauauggacacu

SEQ ID NO: 1934703 - RNA, 20 nt, Human
ggcuugagcccccgcgccca

SEQ ID NO: 1934704 - RNA, 16 nt, Human
gggacucaaugcacug

SEQ ID NO: 1934705 - RNA, 17 nt, Human
gggacuacaggcaccca

SEQ ID NO: 1934706 - RNA, 22 nt, Human
gggacguggcucagccagcacu

SEQ ID NO: 1934707 - RNA, 20 nt, Human
gggacguggcucagccagca

SEQ ID NO: 1934708 - RNA, 19 nt, Human
gggacguggcucagccagc

SEQ ID NO: 1934709 - RNA, 19 nt, Human
gggaccuauaacugcccag

SEQ ID NO: 1934710 - RNA, 12 nt, Human
gggaccucuccc

SEQ ID NO: 1934711 - RNA, 16 nt, Human
gggaccucucccaggg

SEQ ID NO: 1934712 - RNA, 23 nt, Human
gggaccucucccagggucccugg

SEQ ID NO: 1934713 - RNA, 12 nt, Human
gggaccucaggc

SEQ ID NO: 1934714 - RNA, 17 nt, Human
gggaccuauaacugccc

SEQ ID NO: 1934715 - RNA, 13 nt, Human
gggaccucaggcc

SEQ ID NO: 1934716 - RNA, 15 nt, Human
gggaccucaggccug

SEQ ID NO: 1934717 - RNA, 22 nt, Human
gggacaaagaggccuuuaacca

SEQ ID NO: 1934718 - RNA, 15 nt, Human
gggacaaagaggccu

SEQ ID NO: 1934719 - RNA, 16 nt, Human
gggacaaagaggccuu

SEQ ID NO: 1934720 - RNA, 15 nt, Human
gggaauggcagcugc

SEQ ID NO: 1934721 - RNA, 18 nt, Human
gggaccccgagccuggcu

SEQ ID NO: 1934722 - RNA, 20 nt, Human
gggaccccgagccuggcucc

SEQ ID NO: 1934723 - RNA, 18 nt, Human
gggacaaguggacucagg

SEQ ID NO: 1934724 - RNA, 20 nt, Human
gggaccccuggugguucacu

SEQ ID NO: 1934725 - RNA, 23 nt, Human
gggaaggauacaaaagcauguga

SEQ ID NO: 1934726 - RNA, 21 nt, Human
gggaaggauacaaaagcaugu

SEQ ID NO: 1934727 - RNA, 14 nt, Human
ggcuuuugugcauu

SEQ ID NO: 1934728 - RNA, 17 nt, Human
gggaagggggcugggac

SEQ ID NO: 1934729 - RNA, 18 nt, Human
gggaaggggacccccgcc

SEQ ID NO: 1934730 - RNA, 14 nt, Human
gggaagggggcugg

SEQ ID NO: 1934731 - RNA, 16 nt, Human
gggaagggggcuggga

SEQ ID NO: 1934732 - RNA, 13 nt, Human
gggaaugaagaua

SEQ ID NO: 1934733 - RNA, 22 nt, Human
gggaauggcacagcccaaagaa

SEQ ID NO: 1934734 - RNA, 16 nt, Human
gggaauggcacagccc

SEQ ID NO: 1934735 - RNA, 18 nt, Human
ggcugcaaaggguaucag

SEQ ID NO: 1934736 - RNA, 23 nt, Human
ggcugcaaaggguaucaggugcu

SEQ ID NO: 1934737 - RNA, 22 nt, Human
ggcugcaaaggguaucaggugc

SEQ ID NO: 1934738 - RNA, 15 nt, Human
ggcugauggaguaaa

SEQ ID NO: 1934739 - RNA, 24 nt, Human
ggcugcaaaggguaucaggugcug

SEQ ID NO: 1934740 - RNA, 17 nt, Human
ggcugcaccggcuggcc

SEQ ID NO: 1934741 - RNA, 18 nt, Human
ggcugcaccggcuggccu

SEQ ID NO: 1934742 - RNA, 19 nt, Human
ggcugcaccggcuggccug

SEQ ID NO: 1934743 - RNA, 22 nt, Human
ggcugcaagguuuaggcuggug

SEQ ID NO: 1934744 - RNA, 22 nt, Human
ggcugcagccaggccacuggcc

SEQ ID NO: 1934745 - RNA, 16 nt, Human
ggcugcagccaggcca

SEQ ID NO: 1934746 - RNA, 13 nt, Human
ggcugagguggga

SEQ ID NO: 1934747 - RNA, 15 nt, Human
ggcugaggugggagg

SEQ ID NO: 1934748 - RNA, 17 nt, Human
ggccccugcccggcugc

SEQ ID NO: 1934749 - RNA, 16 nt, Human
ggccccugcccggcug

SEQ ID NO: 1934750 - RNA, 20 nt, Human
ggccccugcccggcugcgga

SEQ ID NO: 1934751 - RNA, 17 nt, Human
ggcucugccucccauca

SEQ ID NO: 1934752 - RNA, 13 nt, Human
ggcucuggagccc

SEQ ID NO: 1934753 - RNA, 14 nt, Human
ggcucuggagccca

SEQ ID NO: 1934754 - RNA, 20 nt, Human
ggccccugccagacccccug

SEQ ID NO: 1934755 - RNA, 13 nt, Human
ggcugcagggagu

SEQ ID NO: 1934756 - RNA, 14 nt, Human
ggcugcugaaggcu

SEQ ID NO: 1934757 - RNA, 12 nt, Human
ggcugcagggag

SEQ ID NO: 1934758 - RNA, 18 nt, Human
ggcugcugaaggcucgag

SEQ ID NO: 1934759 - RNA, 15 nt, Human
ggcugcugaaggcuc

SEQ ID NO: 1934760 - RNA, 17 nt, Human
ggcugcugaaggcucga

SEQ ID NO: 1934761 - RNA, 11 nt, Human
ggcugcuucaa

SEQ ID NO: 1934762 - RNA, 12 nt, Human
ggcugcuucaag

SEQ ID NO: 1934763 - RNA, 14 nt, Human
ggcugcuucaagga

SEQ ID NO: 1934764 - RNA, 22 nt, Human
ggcugcuucaaggauccugagc

SEQ ID NO: 1934765 - RNA, 18 nt, Human
ggcugggagagccuucca

SEQ ID NO: 1934766 - RNA, 15 nt, Human
ggcugggcagaggaa

SEQ ID NO: 1934767 - RNA, 19 nt, Human
ggcugggcagaggaaagca

SEQ ID NO: 1934768 - RNA, 13 nt, Human
ggcugggcagagg

SEQ ID NO: 1934769 - RNA, 14 nt, Human
ggcugggcagagga

SEQ ID NO: 1934770 - RNA, 20 nt, Human
ggcugggagagccuuccagg

SEQ ID NO: 1934771 - RNA, 23 nt, Human
ggcugggagagccuuccaggggu

SEQ ID NO: 1934772 - RNA, 19 nt, Human
ggcugggagagccuuccag

SEQ ID NO: 1934773 - RNA, 23 nt, Human
ggcugcuucaaggauccugagcc

SEQ ID NO: 1934774 - RNA, 14 nt, Human
ggcugcuuagaauc

SEQ ID NO: 1934775 - RNA, 15 nt, Human
ggcugcuuuccaaag

SEQ ID NO: 1934776 - RNA, 20 nt, Human
ggaaaaaauaacaaugaaag

SEQ ID NO: 1934777 - RNA, 14 nt, Human
gcuuuuacuuaaac

SEQ ID NO: 1934778 - RNA, 21 nt, Human
gcuuuuacugaagccuuucuu

SEQ ID NO: 1934779 - RNA, 15 nt, Human
ggaaaaauagccugc

SEQ ID NO: 1934780 - RNA, 14 nt, Human
ggaaaacgcucucu

SEQ ID NO: 1934781 - RNA, 13 nt, Human
ggaaaaauagccu

SEQ ID NO: 1934782 - RNA, 19 nt, Human
ggaaaaaccacccccaaau

SEQ ID NO: 1934783 - RNA, 14 nt, Human
ggaaaaacugauuu

SEQ ID NO: 1934784 - RNA, 13 nt, Human
gcuuuggcuucuu

SEQ ID NO: 1934785 - RNA, 15 nt, Human
gcuuugggagaaugu

SEQ ID NO: 1934786 - RNA, 17 nt, Human
gcuuuggauuugacauu

SEQ ID NO: 1934787 - RNA, 15 nt, Human
gcuuuggagaagagu

SEQ ID NO: 1934788 - RNA, 17 nt, Human
gcuuuauuccagaaugc

SEQ ID NO: 1934789 - RNA, 13 nt, Human
gcuuuaugcugaa

SEQ ID NO: 1934790 - RNA, 14 nt, Human
gcuuuaugcugaaa

SEQ ID NO: 1934791 - RNA, 13 nt, Human
gcuuuaauaaugu

SEQ ID NO: 1934792 - RNA, 14 nt, Human
gcuugauucugcag

SEQ ID NO: 1934793 - RNA, 22 nt, Human
gcuugaggguugggcugguguc

SEQ ID NO: 1934794 - RNA, 19 nt, Human
gcuucuggugaccuuccaa

SEQ ID NO: 1934795 - RNA, 14 nt, Human
gcuuggaggaagga

SEQ ID NO: 1934796 - RNA, 15 nt, Human
gcuuggaggaaggaa

SEQ ID NO: 1934797 - RNA, 13 nt, Human
gcuuggaggaagg

SEQ ID NO: 1934798 - RNA, 19 nt, Human
gcuugcccuggugccucac

SEQ ID NO: 1934799 - RNA, 17 nt, Human
gcuugcccuggugccuc

SEQ ID NO: 1934800 - RNA, 17 nt, Human
gcuucucacugccaugc

SEQ ID NO: 1934801 - RNA, 15 nt, Human
gcuucuccuguguga

SEQ ID NO: 1934802 - RNA, 19 nt, Human
gcuucucugugaacgauuu

SEQ ID NO: 1934803 - RNA, 21 nt, Human
gcuuccagugaggcucugccc

SEQ ID NO: 1934804 - RNA, 19 nt, Human
gcuuccagugaggcucugc

SEQ ID NO: 1934805 - RNA, 20 nt, Human
gcuuccagugaggcucugcc

SEQ ID NO: 1934806 - RNA, 13 nt, Human
gcuguucagcugg

SEQ ID NO: 1934807 - RNA, 19 nt, Human
ggaagaucucugcagggcc

SEQ ID NO: 1934808 - RNA, 20 nt, Human
ggaagaucucugcagggccg

SEQ ID NO: 1934809 - RNA, 17 nt, Human
ggaagcacagcuucauu

SEQ ID NO: 1934810 - RNA, 13 nt, Human
ggaagcacaugcc

SEQ ID NO: 1934811 - RNA, 14 nt, Human
ggaagcacaugccu

SEQ ID NO: 1934812 - RNA, 15 nt, Human
ggaagcacaugccuc

SEQ ID NO: 1934813 - RNA, 17 nt, Human
ggaagcacaugccucuc

SEQ ID NO: 1934814 - RNA, 13 nt, Human
ggaagagccuugc

SEQ ID NO: 1934815 - RNA, 23 nt, Human
ggaagcacaugccucucucaggc

SEQ ID NO: 1934816 - RNA, 21 nt, Human
ggaagcacaugccucucucag

SEQ ID NO: 1934817 - RNA, 22 nt, Human
ggaagcacaugccucucucagg

SEQ ID NO: 1934818 - RNA, 15 nt, Human
ggaagccagcaggcu

SEQ ID NO: 1934819 - RNA, 16 nt, Human
ggaagccagcaggcuc

SEQ ID NO: 1934820 - RNA, 17 nt, Human
ggaagccagcaggcucu

SEQ ID NO: 1934821 - RNA, 18 nt, Human
ggaagccagcaggcucuc

SEQ ID NO: 1934822 - RNA, 13 nt, Human
ggaagccagcagg

SEQ ID NO: 1934823 - RNA, 14 nt, Human
ggaagccagcaggc

SEQ ID NO: 1934824 - RNA, 14 nt, Human
ggaagccaaagagu

SEQ ID NO: 1934825 - RNA, 16 nt, Human
ggaaccguaggaccca

SEQ ID NO: 1934826 - RNA, 21 nt, Human
ggaaccguaggacccaagcag

SEQ ID NO: 1934827 - RNA, 12 nt, Human
ggaaccucagcc

SEQ ID NO: 1934828 - RNA, 13 nt, Human
ggaaccucagccu

SEQ ID NO: 1934829 - RNA, 20 nt, Human
ggaacagacuggaagcacag

SEQ ID NO: 1934830 - RNA, 19 nt, Human
ggaacagacuggaagcaca

SEQ ID NO: 1934831 - RNA, 21 nt, Human
ggaaccccggggugcccacag

SEQ ID NO: 1934832 - RNA, 13 nt, Human
ggaacucagaucc

SEQ ID NO: 1934833 - RNA, 15 nt, Human
ggaacucagauccag

SEQ ID NO: 1934834 - RNA, 16 nt, Human
ggaacucagauccagg

SEQ ID NO: 1934835 - RNA, 17 nt, Human
ggaacucagauccaggg

SEQ ID NO: 1934836 - RNA, 19 nt, Human
ggaacucagauccagggac

SEQ ID NO: 1934837 - RNA, 20 nt, Human
ggaacucagauccagggaca

SEQ ID NO: 1934838 - RNA, 22 nt, Human
ggaaccucagccuggccagaca

SEQ ID NO: 1934839 - RNA, 14 nt, Human
ggaaccucagccug

SEQ ID NO: 1934840 - RNA, 15 nt, Human
ggaaccucagccugg

SEQ ID NO: 1934841 - RNA, 16 nt, Human
ggaaccucagccuggc

SEQ ID NO: 1934842 - RNA, 19 nt, Human
ggaaccucagccuggccag

SEQ ID NO: 1934843 - RNA, 20 nt, Human
ggaaccucagccuggccaga

SEQ ID NO: 1934844 - RNA, 21 nt, Human
ggaaccucagccuggccagac

SEQ ID NO: 1934845 - RNA, 23 nt, Human
ggaaccucagccuggccagacac

SEQ ID NO: 1934846 - RNA, 15 nt, Human
ggaaaaucagccugc

SEQ ID NO: 1934847 - RNA, 12 nt, Human
ggaaaauauuuu

SEQ ID NO: 1934848 - RNA, 14 nt, Human
ggaaaauauuuuga

SEQ ID NO: 1934849 - RNA, 14 nt, Human
ggaaaauaaauuau

SEQ ID NO: 1934850 - RNA, 17 nt, Human
ggaacagacuggaagca

SEQ ID NO: 1934851 - RNA, 20 nt, Human
gcuggucccacucaguccau

SEQ ID NO: 1934852 - RNA, 12 nt, Human
gcugguggccca

SEQ ID NO: 1934853 - RNA, 13 nt, Human
gcugguggcccag

SEQ ID NO: 1934854 - RNA, 18 nt, Human
gcuggugucaccugaaga

SEQ ID NO: 1934855 - RNA, 16 nt, Human
gcuggugucaccugaa

SEQ ID NO: 1934856 - RNA, 14 nt, Human
gcugguggcccagg

SEQ ID NO: 1934857 - RNA, 15 nt, Human
gcugguggcccagga

SEQ ID NO: 1934858 - RNA, 22 nt, Human
gcugguucaggguuggccccug

SEQ ID NO: 1934859 - RNA, 16 nt, Human
gcugucaauuacagga

SEQ ID NO: 1934860 - RNA, 13 nt, Human
gcuguauuuugaa

SEQ ID NO: 1934861 - RNA, 15 nt, Human
gcugguucaggguug

SEQ ID NO: 1934862 - RNA, 21 nt, Human
gcugguuagagguucccuuug

SEQ ID NO: 1934863 - RNA, 17 nt, Human
gcugucuccauguuuga

SEQ ID NO: 1934864 - RNA, 19 nt, Human
gcugucccuuacgugaguc

SEQ ID NO: 1934865 - RNA, 22 nt, Human
gcugucccuuacgugaguccug

SEQ ID NO: 1934866 - RNA, 21 nt, Human
gcugucccuuacgugaguccu

SEQ ID NO: 1934867 - RNA, 17 nt, Human
gcugucaauuacaggaa

SEQ ID NO: 1934868 - RNA, 19 nt, Human
gcugucaauuacaggaagu

SEQ ID NO: 1934869 - RNA, 22 nt, Human
gcugucaauuacaggaaguacu

SEQ ID NO: 1934870 - RNA, 23 nt, Human
gcugucaauuacaggaaguacug

SEQ ID NO: 1934871 - RNA, 17 nt, Human
gcugggcuucaguggca

SEQ ID NO: 1934872 - RNA, 21 nt, Human
gcugggaugauuggagggggg

SEQ ID NO: 1934873 - RNA, 19 nt, Human
gcugggagagccuuccagg

SEQ ID NO: 1934874 - RNA, 22 nt, Human
gcugggagagccuuccaggggu

SEQ ID NO: 1934875 - RNA, 12 nt, Human
gcugggagagcc

SEQ ID NO: 1934876 - RNA, 13 nt, Human
gcugggagagccu

SEQ ID NO: 1934877 - RNA, 17 nt, Human
gcugggagagccuucca

SEQ ID NO: 1934878 - RNA, 18 nt, Human
gcugggagagccuuccag

SEQ ID NO: 1934879 - RNA, 20 nt, Human
gcugggggccucagugccac

SEQ ID NO: 1934880 - RNA, 19 nt, Human
gcugggggccucagugcca

SEQ ID NO: 1934881 - RNA, 19 nt, Human
gcuggucccacucagucca

SEQ ID NO: 1934882 - RNA, 15 nt, Human
gcuggucccacucag

SEQ ID NO: 1934883 - RNA, 13 nt, Human
gcugggggccuca

SEQ ID NO: 1934884 - RNA, 19 nt, Human
gcugggggugggccaggcu

SEQ ID NO: 1934885 - RNA, 15 nt, Human
gcugggggugggcca

SEQ ID NO: 1934886 - RNA, 18 nt, Human
gcugggggugggccaggc

SEQ ID NO: 1934887 - RNA, 19 nt, Human
gcugggcuucaguggcagc

SEQ ID NO: 1934888 - RNA, 18 nt, Human
gcugggcuucaguggcag

SEQ ID NO: 1934889 - RNA, 16 nt, Human
gcuggggccaggcugg

SEQ ID NO: 1934890 - RNA, 19 nt, Human
gcuggggccaggcuggguc

SEQ ID NO: 1934891 - RNA, 12 nt, Human
gcuggggccagu

SEQ ID NO: 1934892 - RNA, 23 nt, Human
gcugggggaagaagcucucuccu

SEQ ID NO: 1934893 - RNA, 16 nt, Human
gcuagcacaugcccua

SEQ ID NO: 1934894 - RNA, 12 nt, Human
gcugcccuguga

SEQ ID NO: 1934895 - RNA, 14 nt, Human
gcugcccugugagu

SEQ ID NO: 1934896 - RNA, 16 nt, Human
gcugcgguccacccag

SEQ ID NO: 1934897 - RNA, 21 nt, Human
gcugccuuggcucagacaugu

SEQ ID NO: 1934898 - RNA, 23 nt, Human
gcugccuuggcucagacauguuu

SEQ ID NO: 1934899 - RNA, 16 nt, Human
gcugccuuggcucaga

SEQ ID NO: 1934900 - RNA, 17 nt, Human
gcugccuuggcucagac

SEQ ID NO: 1934901 - RNA, 19 nt, Human
gcugccuuggcucagacau

SEQ ID NO: 1934902 - RNA, 11 nt, Human
gcugcccugug

SEQ ID NO: 1934903 - RNA, 22 nt, Human
gcuagcagcagggagggcuucu

SEQ ID NO: 1934904 - RNA, 18 nt, Human
gcugcgguccacccagga

SEQ ID NO: 1934905 - RNA, 17 nt, Human
gcugcgguccacccagg

SEQ ID NO: 1934906 - RNA, 19 nt, Human
gcugcgguccacccaggag

SEQ ID NO: 1934907 - RNA, 13 nt, Human
gcugcuucaagga

SEQ ID NO: 1934908 - RNA, 21 nt, Human
gcugcucagggaaaagcagcu

SEQ ID NO: 1934909 - RNA, 15 nt, Human
gcugcuauagccugg

SEQ ID NO: 1934910 - RNA, 16 nt, Human
gcugcuauagccuggg

SEQ ID NO: 1934911 - RNA, 20 nt, Human
gcugcucagggaaaagcagc

SEQ ID NO: 1934912 - RNA, 17 nt, Human
gcugcuauagccugggg

SEQ ID NO: 1934913 - RNA, 23 nt, Human
gcugcuucaaggauccugagcca

SEQ ID NO: 1934914 - RNA, 20 nt, Human
gcugcuuagaauccaaacuu

SEQ ID NO: 1934915 - RNA, 21 nt, Human
gcugcuucaaggauccugagc

SEQ ID NO: 1934916 - RNA, 22 nt, Human
gcugcuucaaggauccugagcc

SEQ ID NO: 1934917 - RNA, 16 nt, Human
gcugcuugggcuucau

SEQ ID NO: 1934918 - RNA, 22 nt, Human
gcuggaccuugaacuggguacu

SEQ ID NO: 1934919 - RNA, 21 nt, Human
gcuggaccuugaacuggguac

SEQ ID NO: 1934920 - RNA, 18 nt, Human
gcuggaccuugaacuggg

SEQ ID NO: 1934921 - RNA, 17 nt, Human
gcugcuugggcuucauc

SEQ ID NO: 1934922 - RNA, 22 nt, Human
gcugcuugggcuucauccuccu

SEQ ID NO: 1934923 - RNA, 16 nt, Human
gcuggauuacaggcau

SEQ ID NO: 1934924 - RNA, 13 nt, Human
gcuggcccagggc

SEQ ID NO: 1934925 - RNA, 15 nt, Human
gcuggcccagggccc

SEQ ID NO: 1934926 - RNA, 16 nt, Human
gcuggcccagggccca

SEQ ID NO: 1934927 - RNA, 17 nt, Human
gcuggcccagggcccag

SEQ ID NO: 1934928 - RNA, 21 nt, Human
gcuggcccagggcccagagcc

SEQ ID NO: 1934929 - RNA, 18 nt, Human
gcuggcccagggcccaga

SEQ ID NO: 1934930 - RNA, 19 nt, Human
gcuggcccagggcccagag

SEQ ID NO: 1934931 - RNA, 20 nt, Human
gcuggcccagggcccagagc

SEQ ID NO: 1934932 - RNA, 13 nt, Human
gcuggccccgccg

SEQ ID NO: 1934933 - RNA, 22 nt, Human
gcuggccccgccgccugguacu

SEQ ID NO: 1934934 - RNA, 23 nt, Human
gcuggccccgccgccugguacuc

SEQ ID NO: 1934935 - RNA, 24 nt, Human
gcuggccccgccgccugguacuca

SEQ ID NO: 1934936 - RNA, 20 nt, Human
gcugggacuacaggcaccca

SEQ ID NO: 1934937 - RNA, 19 nt, Human
gcugggacuacaggcaccc

SEQ ID NO: 1934938 - RNA, 18 nt, Human
gcugggacuacaggcacc

SEQ ID NO: 1934939 - RNA, 13 nt, Human
gcugggacuacag

SEQ ID NO: 1934940 - RNA, 19 nt, Human
gcugggacuacagguguga

SEQ ID NO: 1934941 - RNA, 21 nt, Human
gcugggacguggcucagccag

SEQ ID NO: 1934942 - RNA, 22 nt, Human
gcugggacguggcucagccagc

SEQ ID NO: 1934943 - RNA, 13 nt, Human
gcuggccgggacc

SEQ ID NO: 1934944 - RNA, 21 nt, Human
gcuggccucccaaaugagcca

SEQ ID NO: 1934945 - RNA, 22 nt, Human
gcuggccucccaaaugagccau

SEQ ID NO: 1934946 - RNA, 20 nt, Human
gcugggacaugggaaagggg

SEQ ID NO: 1934947 - RNA, 17 nt, Human
gcugggacguggcucag

SEQ ID NO: 1934948 - RNA, 19 nt, Human
gcugggacguggcucagcc

SEQ ID NO: 1934949 - RNA, 20 nt, Human
gcugggacguggcucagcca

SEQ ID NO: 1934950 - RNA, 13 nt, Human
ggagauggaguuc

SEQ ID NO: 1934951 - RNA, 20 nt, Human
ggagauggaaguugcaguga

SEQ ID NO: 1934952 - RNA, 15 nt, Human
ggagaggggcacagg

SEQ ID NO: 1934953 - RNA, 20 nt, Human
ggagauuuacaacuggggga

SEQ ID NO: 1934954 - RNA, 13 nt, Human
ggagcccugggag

SEQ ID NO: 1934955 - RNA, 12 nt, Human
ggagcccuggga

SEQ ID NO: 1934956 - RNA, 20 nt, Human
ggagcaaaaucgaugcagug

SEQ ID NO: 1934957 - RNA, 18 nt, Human
ggagccccuucugcucag

SEQ ID NO: 1934958 - RNA, 19 nt, Human
ggagccccuucugcucagc

SEQ ID NO: 1934959 - RNA, 21 nt, Human
ggagccccuucugcucagcuc

SEQ ID NO: 1934960 - RNA, 21 nt, Human
ggagaccuggacacaggccug

SEQ ID NO: 1934961 - RNA, 20 nt, Human
ggagaccgggguauccuggg

SEQ ID NO: 1934962 - RNA, 17 nt, Human
ggagagcuagcagcagg

SEQ ID NO: 1934963 - RNA, 21 nt, Human
ggagagcuagcagcagggagg

SEQ ID NO: 1934964 - RNA, 21 nt, Human
ggagaccccuuggggagcagg

SEQ ID NO: 1934965 - RNA, 23 nt, Human
ggacugggccacuucuggguggg

SEQ ID NO: 1934966 - RNA, 13 nt, Human
ggacucugcacau

SEQ ID NO: 1934967 - RNA, 20 nt, Human
ggacucugcacaugucuugu

SEQ ID NO: 1934968 - RNA, 15 nt, Human
ggacucugcacauga

SEQ ID NO: 1934969 - RNA, 21 nt, Human
ggacucugcacaugucuugua

SEQ ID NO: 1934970 - RNA, 18 nt, Human
ggaccuuaggccuuccuc

SEQ ID NO: 1934971 - RNA, 21 nt, Human
ggaccuuaggccuuccucucu

SEQ ID NO: 1934972 - RNA, 14 nt, Human
ggaccuggcugcca

SEQ ID NO: 1934973 - RNA, 22 nt, Human
ggaccugcccccgcauccccug

SEQ ID NO: 1934974 - RNA, 10 nt, Human
ggaccugccc

SEQ ID NO: 1934975 - RNA, 11 nt, Human
ggaccugcccc

SEQ ID NO: 1934976 - RNA, 23 nt, Human
ggaccugcccccgcauccccugc

SEQ ID NO: 1934977 - RNA, 20 nt, Human
ggaagccagcaggcucucag

SEQ ID NO: 1934978 - RNA, 19 nt, Human
ggaccagcucaggacagau

SEQ ID NO: 1934979 - RNA, 22 nt, Human
ggaccagcucaggacagaugcc

SEQ ID NO: 1934980 - RNA, 16 nt, Human
ggaccagcucaggaca

SEQ ID NO: 1934981 - RNA, 18 nt, Human
ggaccagcucaggacaga

SEQ ID NO: 1934982 - RNA, 12 nt, Human
ggaccucuccca

SEQ ID NO: 1934983 - RNA, 14 nt, Human
ggaccucucccagg

SEQ ID NO: 1934984 - RNA, 15 nt, Human
ggaccucucccaggg

SEQ ID NO: 1934985 - RNA, 22 nt, Human
ggacccaugaguuggggucugg

SEQ ID NO: 1934986 - RNA, 21 nt, Human
ggaggacgcucucuggccuuc

SEQ ID NO: 1934987 - RNA, 20 nt, Human
ggaggacgcucucuggccuu

SEQ ID NO: 1934988 - RNA, 19 nt, Human
ggaggacgcucucuggccu

SEQ ID NO: 1934989 - RNA, 15 nt, Human
ggaggauguucuggg

SEQ ID NO: 1934990 - RNA, 22 nt, Human
ggagggacaaguggacucaggg

SEQ ID NO: 1934991 - RNA, 23 nt, Human
ggaggaucacuugaguccagaag

SEQ ID NO: 1934992 - RNA, 17 nt, Human
ggaggaucucuugagcc

SEQ ID NO: 1934993 - RNA, 21 nt, Human
ggaggaucucuugagccuggg

SEQ ID NO: 1934994 - RNA, 20 nt, Human
ggaggaucuuuugaacccag

SEQ ID NO: 1934995 - RNA, 12 nt, Human
ggagggcuccag

SEQ ID NO: 1934996 - RNA, 13 nt, Human
ggagggcuccaga

SEQ ID NO: 1934997 - RNA, 12 nt, Human
ggagggagggcu

SEQ ID NO: 1934998 - RNA, 15 nt, Human
ggagggaggcucagg

SEQ ID NO: 1934999 - RNA, 16 nt, Human
ggagggaggcucaggu

SEQ ID NO: 1935000 - RNA, 16 nt, Human
ggagggcagcagaagg

SEQ ID NO: 1935001 - RNA, 12 nt, Human
ggagggauuugg

SEQ ID NO: 1935002 - RNA, 14 nt, Human
ggagugagcugguu

SEQ ID NO: 1935003 - RNA, 21 nt, Human
ggagugaguugauagcacaga

SEQ ID NO: 1935004 - RNA, 12 nt, Human
ggagugagcugg

SEQ ID NO: 1935005 - RNA, 19 nt, Human
ggagugagaggucucucuu

SEQ ID NO: 1935006 - RNA, 21 nt, Human
ggagugacagaggcagcccca

SEQ ID NO: 1935007 - RNA, 19 nt, Human
ggagugacagaggcagccc

SEQ ID NO: 1935008 - RNA, 18 nt, Human
ggagugacagaggcagcc

SEQ ID NO: 1935009 - RNA, 17 nt, Human
ggagugacagaggcagc

SEQ ID NO: 1935010 - RNA, 16 nt, Human
ggaucacagccucuga

SEQ ID NO: 1935011 - RNA, 23 nt, Human
ggagugaguugauagcacagacc

SEQ ID NO: 1935012 - RNA, 18 nt, Human
ggauagaugcuggcccag

SEQ ID NO: 1935013 - RNA, 19 nt, Human
ggauagaugcuggcccagg

SEQ ID NO: 1935014 - RNA, 20 nt, Human
ggauagaugcuggcccaggg

SEQ ID NO: 1935015 - RNA, 13 nt, Human
ggauagaugugug

SEQ ID NO: 1935016 - RNA, 21 nt, Human
ggauagaugcuggcccagggc

SEQ ID NO: 1935017 - RNA, 15 nt, Human
ggauagaugugugga

SEQ ID NO: 1935018 - RNA, 14 nt, Human
ggauagaugugugg

SEQ ID NO: 1935019 - RNA, 17 nt, Human
ggagggcuccagacaca

SEQ ID NO: 1935020 - RNA, 14 nt, Human
ggagggcuccagac

SEQ ID NO: 1935021 - RNA, 15 nt, Human
ggagggcuccagaca

SEQ ID NO: 1935022 - RNA, 22 nt, Human
ggagggcugucaucugugcacu

SEQ ID NO: 1935023 - RNA, 21 nt, Human
ggagucccaccuuggcugcag

SEQ ID NO: 1935024 - RNA, 20 nt, Human
ggagucccaccuuggcugca

SEQ ID NO: 1935025 - RNA, 16 nt, Human
ggagugacagaggcag

SEQ ID NO: 1935026 - RNA, 11 nt, Human
ggagugacaga

SEQ ID NO: 1935027 - RNA, 19 nt, Human
ggccacgcagccaggacac

SEQ ID NO: 1935028 - RNA, 18 nt, Human
ggccacgcagccaggaca

SEQ ID NO: 1935029 - RNA, 16 nt, Human
ggccacgcagccagga

SEQ ID NO: 1935030 - RNA, 15 nt, Human
ggccacgcagccagg

SEQ ID NO: 1935031 - RNA, 14 nt, Human
ggccacgcagccag

SEQ ID NO: 1935032 - RNA, 13 nt, Human
ggccacgcagcca

SEQ ID NO: 1935033 - RNA, 11 nt, Human
ggccacuguga

SEQ ID NO: 1935034 - RNA, 16 nt, Human
ggccaggagccuccug

SEQ ID NO: 1935035 - RNA, 16 nt, Human
ggccacugugaagaga

SEQ ID NO: 1935036 - RNA, 14 nt, Human
ggccaggagccucc

SEQ ID NO: 1935037 - RNA, 11 nt, Human
ggccaggcugg

SEQ ID NO: 1935038 - RNA, 15 nt, Human
ggccaggccagcugc

SEQ ID NO: 1935039 - RNA, 17 nt, Human
ggccaggccagcugccu

SEQ ID NO: 1935040 - RNA, 18 nt, Human
ggccaggcugggucgccc

SEQ ID NO: 1935041 - RNA, 22 nt, Human
ggccaggcugggucgcccugga

SEQ ID NO: 1935042 - RNA, 16 nt, Human
ggccaggccagaggga

SEQ ID NO: 1935043 - RNA, 14 nt, Human
ggccaggccagagg

SEQ ID NO: 1935044 - RNA, 23 nt, Human
ggcauguucucugaggacacuaa

SEQ ID NO: 1935045 - RNA, 16 nt, Human
ggcagugagggagggc

SEQ ID NO: 1935046 - RNA, 21 nt, Human
ggcagugagggagggcuguca

SEQ ID NO: 1935047 - RNA, 15 nt, Human
ggcagguuggugggg

SEQ ID NO: 1935048 - RNA, 16 nt, Human
ggccaccugcggugcu

SEQ ID NO: 1935049 - RNA, 22 nt, Human
ggccaccugcggugcuaucucc

SEQ ID NO: 1935050 - RNA, 12 nt, Human
ggccaaguucuu

SEQ ID NO: 1935051 - RNA, 15 nt, Human
ggcauuccccaggag

SEQ ID NO: 1935052 - RNA, 16 nt, Human
ggccacaagacccuug

SEQ ID NO: 1935053 - RNA, 17 nt, Human
ggccacaagacccuugu

SEQ ID NO: 1935054 - RNA, 13 nt, Human
ggccaugggccuc

SEQ ID NO: 1935055 - RNA, 22 nt, Human
ggccaugggacagggaggacgc

SEQ ID NO: 1935056 - RNA, 12 nt, Human
ggccaggcuggu

SEQ ID NO: 1935057 - RNA, 15 nt, Human
ggcccccaucucaug

SEQ ID NO: 1935058 - RNA, 21 nt, Human
ggcccccaucucaugccccug

SEQ ID NO: 1935059 - RNA, 14 nt, Human
ggcccccaucucau

SEQ ID NO: 1935060 - RNA, 14 nt, Human
ggccccgccgccug

SEQ ID NO: 1935061 - RNA, 15 nt, Human
ggccccgccgccugg

SEQ ID NO: 1935062 - RNA, 18 nt, Human
ggccccgccgccugguac

SEQ ID NO: 1935063 - RNA, 12 nt, Human
ggccccugccac

SEQ ID NO: 1935064 - RNA, 21 nt, Human
ggccccugagaucucugcagg

SEQ ID NO: 1935065 - RNA, 17 nt, Human
ggccccugagaucucug

SEQ ID NO: 1935066 - RNA, 16 nt, Human
ggccccugccacccug

SEQ ID NO: 1935067 - RNA, 13 nt, Human
ggccccugccacc

SEQ ID NO: 1935068 - RNA, 13 nt, Human
ggccccugcccgg

SEQ ID NO: 1935069 - RNA, 19 nt, Human
ggccccugccagacccccu

SEQ ID NO: 1935070 - RNA, 17 nt, Human
ggccccugccagacccc

SEQ ID NO: 1935071 - RNA, 18 nt, Human
ggccccugccacccuggg

SEQ ID NO: 1935072 - RNA, 17 nt, Human
ggccccugccacccugg

SEQ ID NO: 1935073 - RNA, 16 nt, Human
ggccccucaggguccc

SEQ ID NO: 1935074 - RNA, 19 nt, Human
ggccccucagggucccugg

SEQ ID NO: 1935075 - RNA, 20 nt, Human
ggccccucagggucccuggu

SEQ ID NO: 1935076 - RNA, 21 nt, Human
ggccccucagggucccuggug

SEQ ID NO: 1935077 - RNA, 22 nt, Human
ggccccuauguaguccgugcug

SEQ ID NO: 1935078 - RNA, 22 nt, Human
ggcaccugccacccugggccug

SEQ ID NO: 1935079 - RNA, 12 nt, Human
ggcagagcagag

SEQ ID NO: 1935080 - RNA, 19 nt, Human
ggcaccucacaggccccag

SEQ ID NO: 1935081 - RNA, 16 nt, Human
ggcaccucacaggccc

SEQ ID NO: 1935082 - RNA, 22 nt, Human
ggcaccuaauccaggcagaucc

SEQ ID NO: 1935083 - RNA, 20 nt, Human
ggcagagcagagaccauccc

SEQ ID NO: 1935084 - RNA, 15 nt, Human
ggcagagcagagacc

SEQ ID NO: 1935085 - RNA, 16 nt, Human
ggcagagcagagacca

SEQ ID NO: 1935086 - RNA, 16 nt, Human
ggcacccggccccugc

SEQ ID NO: 1935087 - RNA, 15 nt, Human
ggcacccggccccug

SEQ ID NO: 1935088 - RNA, 17 nt, Human
ggcacccggccccugcu

SEQ ID NO: 1935089 - RNA, 17 nt, Human
ggcaccuaauccaggca

SEQ ID NO: 1935090 - RNA, 18 nt, Human
ggcaccuaauccaggcag

SEQ ID NO: 1935091 - RNA, 19 nt, Human
ggcaccuaauccaggcaga

SEQ ID NO: 1935092 - RNA, 16 nt, Human
ggcaaggcugucaauu

SEQ ID NO: 1935093 - RNA, 19 nt, Human
ggcaacccccagccugcua

SEQ ID NO: 1935094 - RNA, 19 nt, Human
ggaucaucugccgugccug

SEQ ID NO: 1935095 - RNA, 21 nt, Human
ggaucagucugauucccaagc

SEQ ID NO: 1935096 - RNA, 12 nt, Human
ggaucagaauag

SEQ ID NO: 1935097 - RNA, 18 nt, Human
ggcaacugcauuggcuuu

SEQ ID NO: 1935098 - RNA, 15 nt, Human
ggcaaggcugucaau

SEQ ID NO: 1935099 - RNA, 19 nt, Human
ggcaacugcauuggcuuug

SEQ ID NO: 1935100 - RNA, 23 nt, Human
ggcagauacaggaaaagcugcug

SEQ ID NO: 1935101 - RNA, 23 nt, Human
ggcagaguugaagacagagcuac

SEQ ID NO: 1935102 - RNA, 17 nt, Human
ggcagaggaaagcaaag

SEQ ID NO: 1935103 - RNA, 18 nt, Human
ggcagcagaagggggugg

SEQ ID NO: 1935104 - RNA, 14 nt, Human
ggcagauccaggac

SEQ ID NO: 1935105 - RNA, 16 nt, Human
ggcagauccaggacua

SEQ ID NO: 1935106 - RNA, 13 nt, Human
ggcagguccaggg

SEQ ID NO: 1935107 - RNA, 11 nt, Human
ggcaggaaaag

SEQ ID NO: 1935108 - RNA, 23 nt, Human
ggcaggucuugaacuccuggccu

SEQ ID NO: 1935109 - RNA, 19 nt, Human
ggcagguccccagacucca

SEQ ID NO: 1935110 - RNA, 14 nt, Human
ggcagguccccaga

SEQ ID NO: 1935111 - RNA, 19 nt, Human
ggcagcugcgguccaccca

SEQ ID NO: 1935112 - RNA, 21 nt, Human
ggcagcuugaggguugggcug

SEQ ID NO: 1935113 - RNA, 22 nt, Human
ggcagcucaccucucccuugga

SEQ ID NO: 1935114 - RNA, 18 nt, Human
ggcagcucaccucucccu

SEQ ID NO: 1935115 - RNA, 21 nt, Human
ggcagcucaccucucccuugg

SEQ ID NO: 1935116 - RNA, 15 nt, Human
uauaaauauauuuaa

SEQ ID NO: 1935117 - RNA, 20 nt, Human
uauaaugaaugaaacauuuu

SEQ ID NO: 1935118 - RNA, 18 nt, Human
uauaaugaaugaaacauu

SEQ ID NO: 1935119 - RNA, 21 nt, Human
uauaaauuuuuuuuguuucau

SEQ ID NO: 1935120 - RNA, 17 nt, Human
uauaaauuuuuuuuguu

SEQ ID NO: 1935121 - RNA, 21 nt, Human
uauaaauuccucuuugcuuug

SEQ ID NO: 1935122 - RNA, 16 nt, Human
uauacuauauuuaugg

SEQ ID NO: 1935123 - RNA, 18 nt, Human
uauacucuagaugaaguu

SEQ ID NO: 1935124 - RNA, 16 nt, Human
uauacucuuucuguau

SEQ ID NO: 1935125 - RNA, 17 nt, Human
uauacucuuucuguaua

SEQ ID NO: 1935126 - RNA, 19 nt, Human
uauacucuuucuguauaua

SEQ ID NO: 1935127 - RNA, 22 nt, Human
uauacucuuucuguauauacuu

SEQ ID NO: 1935128 - RNA, 14 nt, Human
uauaauguaagcuc

SEQ ID NO: 1935129 - RNA, 19 nt, Human
uauaauguaagcucuacug

SEQ ID NO: 1935130 - RNA, 20 nt, Human
uauaauguaagcucuacuga

SEQ ID NO: 1935131 - RNA, 20 nt, Human
uauaauucacauuguauuca

SEQ ID NO: 1935132 - RNA, 17 nt, Human
uauaauucuacuuugag

SEQ ID NO: 1935133 - RNA, 19 nt, Human
uagugcugaagcuuauuaa

SEQ ID NO: 1935134 - RNA, 22 nt, Human
uagugcugaagcuuauuaaugc

SEQ ID NO: 1935135 - RNA, 18 nt, Human
uagugcugaagcuuauua

SEQ ID NO: 1935136 - RNA, 17 nt, Human
uagugcugaagcuuauu

SEQ ID NO: 1935137 - RNA, 15 nt, Human
uagugcugaagcuua

SEQ ID NO: 1935138 - RNA, 14 nt, Human
uagugcugaagcuu

SEQ ID NO: 1935139 - RNA, 12 nt, Human
uagugcugaagc

SEQ ID NO: 1935140 - RNA, 21 nt, Human
uagucacauggccuaugcaca

SEQ ID NO: 1935141 - RNA, 13 nt, Human
uagucaagcuccu

SEQ ID NO: 1935142 - RNA, 14 nt, Human
uagucaagcuccuc

SEQ ID NO: 1935143 - RNA, 15 nt, Human
uagucaagcuccucc

SEQ ID NO: 1935144 - RNA, 15 nt, Human
uaguggauguucuga

SEQ ID NO: 1935145 - RNA, 13 nt, Human
uaguuucuccaag

SEQ ID NO: 1935146 - RNA, 23 nt, Human
uaguuugauuaaauucuugcaaa

SEQ ID NO: 1935147 - RNA, 12 nt, Human
uaguuugcaguu

SEQ ID NO: 1935148 - RNA, 21 nt, Human
uaguuguaccgcaaugugacu

SEQ ID NO: 1935149 - RNA, 17 nt, Human
uauauggccucaagauc

SEQ ID NO: 1935150 - RNA, 12 nt, Human
uauauguacaug

SEQ ID NO: 1935151 - RNA, 21 nt, Human
uauauuucccugaaggaacca

SEQ ID NO: 1935152 - RNA, 13 nt, Human
uauauuuuaagac

SEQ ID NO: 1935153 - RNA, 16 nt, Human
uauauuuguguauuua

SEQ ID NO: 1935154 - RNA, 20 nt, Human
uauauuuguguauuuaacag

SEQ ID NO: 1935155 - RNA, 14 nt, Human
uauauuuuaagacg

SEQ ID NO: 1935156 - RNA, 14 nt, Human
uauauuuuaauuug

SEQ ID NO: 1935157 - RNA, 23 nt, Human
uauauuugugauagcacuuucua

SEQ ID NO: 1935158 - RNA, 20 nt, Human
uauaugcucugcauguuaca

SEQ ID NO: 1935159 - RNA, 17 nt, Human
uauaugauuuuuaucca

SEQ ID NO: 1935160 - RNA, 15 nt, Human
uauauacauauauau

SEQ ID NO: 1935161 - RNA, 23 nt, Human
uauauaauacugacugagaauau

SEQ ID NO: 1935162 - RNA, 23 nt, Human
uauacuugcuuuguguucuuugu

SEQ ID NO: 1935163 - RNA, 19 nt, Human
uaucgucacugcuuaacuu

SEQ ID NO: 1935164 - RNA, 15 nt, Human
uaucuaaauguugaa

SEQ ID NO: 1935165 - RNA, 14 nt, Human
uaucuaaaagaaau

SEQ ID NO: 1935166 - RNA, 17 nt, Human
uaucaugugaaaucauu

SEQ ID NO: 1935167 - RNA, 22 nt, Human
uaucaugugaaaucauucauuu

SEQ ID NO: 1935168 - RNA, 22 nt, Human
uauccugcuucugauaugcagu

SEQ ID NO: 1935169 - RNA, 22 nt, Human
uauccugggggacccaauguag

SEQ ID NO: 1935170 - RNA, 16 nt, Human
uaucaugacaaagacu

SEQ ID NO: 1935171 - RNA, 17 nt, Human
uaucaggugcugccauc

SEQ ID NO: 1935172 - RNA, 19 nt, Human
uauauuuuuuguuaaauga

SEQ ID NO: 1935173 - RNA, 21 nt, Human
uauauuuuauacauuaacuuc

SEQ ID NO: 1935174 - RNA, 15 nt, Human
uagcagacaguguuu

SEQ ID NO: 1935175 - RNA, 13 nt, Human
uagcagacaggcc

SEQ ID NO: 1935176 - RNA, 19 nt, Human
uagcagacaggccccguga

SEQ ID NO: 1935177 - RNA, 14 nt, Human
uagcagauuuuaau

SEQ ID NO: 1935178 - RNA, 20 nt, Human
uagcagauuuuaauuuugaa

SEQ ID NO: 1935179 - RNA, 23 nt, Human
uagcagagaaugaaagggcccag

SEQ ID NO: 1935180 - RNA, 19 nt, Human
uagcagagaaugaaagggc

SEQ ID NO: 1935181 - RNA, 19 nt, Human
uagcagcaccguucugugc

SEQ ID NO: 1935182 - RNA, 18 nt, Human
uagcagauuuuaauuuug

SEQ ID NO: 1935183 - RNA, 20 nt, Human
uagcagcaccguucugugca

SEQ ID NO: 1935184 - RNA, 20 nt, Human
uagcagcagccuuuaaugca

SEQ ID NO: 1935185 - RNA, 16 nt, Human
uagcacuuugggaggc

SEQ ID NO: 1935186 - RNA, 11 nt, Human
uagcagacagg

SEQ ID NO: 1935187 - RNA, 12 nt, Human
uagauguuuccu

SEQ ID NO: 1935188 - RNA, 15 nt, Human
uagauguucuacuuu

SEQ ID NO: 1935189 - RNA, 18 nt, Human
uagauaauacaccacuac

SEQ ID NO: 1935190 - RNA, 12 nt, Human
uagauguauaua

SEQ ID NO: 1935191 - RNA, 16 nt, Human
uagauggugcugagaa

SEQ ID NO: 1935192 - RNA, 19 nt, Human
uagauggugcugagaagcu

SEQ ID NO: 1935193 - RNA, 21 nt, Human
uagaugggagggaggcucagg

SEQ ID NO: 1935194 - RNA, 14 nt, Human
uagauggugcugag

SEQ ID NO: 1935195 - RNA, 15 nt, Human
uagauggugcugaga

SEQ ID NO: 1935196 - RNA, 18 nt, Human
uagauguuccaguaaucu

SEQ ID NO: 1935197 - RNA, 11 nt, Human
uagaugugugg

SEQ ID NO: 1935198 - RNA, 21 nt, Human
uagaaccucgagguuucucaa

SEQ ID NO: 1935199 - RNA, 16 nt, Human
uagagagagaccacuu

SEQ ID NO: 1935200 - RNA, 13 nt, Human
uagagaggaaaag

SEQ ID NO: 1935201 - RNA, 21 nt, Human
uagagguucaaagauauuuug

SEQ ID NO: 1935202 - RNA, 16 nt, Human
uagagguucaaagaua

SEQ ID NO: 1935203 - RNA, 19 nt, Human
uagagguucaaagauauuu

SEQ ID NO: 1935204 - RNA, 22 nt, Human
uagaguuucaaccaugaagucu

SEQ ID NO: 1935205 - RNA, 21 nt, Human
uagcuccccgcuucugccugc

SEQ ID NO: 1935206 - RNA, 14 nt, Human
uagcuccccuccaa

SEQ ID NO: 1935207 - RNA, 22 nt, Human
uagcucauucuccuuguguuac

SEQ ID NO: 1935208 - RNA, 17 nt, Human
uagccugccucuucucu

SEQ ID NO: 1935209 - RNA, 21 nt, Human
uagcucuaggagggcuggcaa

SEQ ID NO: 1935210 - RNA, 17 nt, Human
uagcucuauguuuacaa

SEQ ID NO: 1935211 - RNA, 20 nt, Human
uagcugggacuacaggcacc

SEQ ID NO: 1935212 - RNA, 12 nt, Human
uagcugggacua

SEQ ID NO: 1935213 - RNA, 18 nt, Human
uagcugggacuacaggug

SEQ ID NO: 1935214 - RNA, 11 nt, Human
uagcugggacu

SEQ ID NO: 1935215 - RNA, 14 nt, Human
uagcccaaaaccaa

SEQ ID NO: 1935216 - RNA, 16 nt, Human
uagccauuuuuacugu

SEQ ID NO: 1935217 - RNA, 13 nt, Human
uagcaguaaaaua

SEQ ID NO: 1935218 - RNA, 17 nt, Human
uagccauuuuuacuguu

SEQ ID NO: 1935219 - RNA, 16 nt, Human
uagccccacaggaggu

SEQ ID NO: 1935220 - RNA, 20 nt, Human
uagccuauguggauuuuuuc

SEQ ID NO: 1935221 - RNA, 15 nt, Human
uaggaagguuaaugu

SEQ ID NO: 1935222 - RNA, 14 nt, Human
uaggaauuguguuu

SEQ ID NO: 1935223 - RNA, 20 nt, Human
uaggaauugacccacaagaa

SEQ ID NO: 1935224 - RNA, 23 nt, Human
uaggaauugacccacaagaaaug

SEQ ID NO: 1935225 - RNA, 13 nt, Human
uaggccuggccag

SEQ ID NO: 1935226 - RNA, 14 nt, Human
uaggccucagccag

SEQ ID NO: 1935227 - RNA, 22 nt, Human
uaggccaggugcaaccagggag

SEQ ID NO: 1935228 - RNA, 14 nt, Human
uaggccuggccaga

SEQ ID NO: 1935229 - RNA, 16 nt, Human
uaggccucagccagag

SEQ ID NO: 1935230 - RNA, 18 nt, Human
uaggccucagccagagaa

SEQ ID NO: 1935231 - RNA, 22 nt, Human
uaggccucagccagagaagcua

SEQ ID NO: 1935232 - RNA, 13 nt, Human
uaggccaugggac

SEQ ID NO: 1935233 - RNA, 17 nt, Human
uaggaacacuccuucac

SEQ ID NO: 1935234 - RNA, 21 nt, Human
uaggaacuuaaauaaugugaa

SEQ ID NO: 1935235 - RNA, 18 nt, Human
uaggaacugcugggcuug

SEQ ID NO: 1935236 - RNA, 15 nt, Human
uaggaacugcugggc

SEQ ID NO: 1935237 - RNA, 13 nt, Human
uaggaacacuccu

SEQ ID NO: 1935238 - RNA, 14 nt, Human
uaggaacacuccuu

SEQ ID NO: 1935239 - RNA, 18 nt, Human
uagcugggggugggccag

SEQ ID NO: 1935240 - RNA, 15 nt, Human
uagcugggauuacag

SEQ ID NO: 1935241 - RNA, 13 nt, Human
uaggaagacuuug

SEQ ID NO: 1935242 - RNA, 16 nt, Human
uaggaacuugagaacu

SEQ ID NO: 1935243 - RNA, 14 nt, Human
uaggaagacuuugg

SEQ ID NO: 1935244 - RNA, 15 nt, Human
uaggaagacuuugga

SEQ ID NO: 1935245 - RNA, 16 nt, Human
uaggaagacuuuggaa

SEQ ID NO: 1935246 - RNA, 17 nt, Human
uaggaagacuuuggaaa

SEQ ID NO: 1935247 - RNA, 14 nt, Human
uaggaagagaaacc

SEQ ID NO: 1935248 - RNA, 15 nt, Human
uaggaagagaaacca

SEQ ID NO: 1935249 - RNA, 19 nt, Human
uaggaagagaaaccaggga

SEQ ID NO: 1935250 - RNA, 15 nt, Human
uacacacauccacgc

SEQ ID NO: 1935251 - RNA, 17 nt, Human
uacacacugcauguuug

SEQ ID NO: 1935252 - RNA, 18 nt, Human
uacacaccuuauauuuac

SEQ ID NO: 1935253 - RNA, 15 nt, Human
uacacacacauacac

SEQ ID NO: 1935254 - RNA, 21 nt, Human
uacacacacacgcgugcacac

SEQ ID NO: 1935255 - RNA, 17 nt, Human
uacacaaugguuuucuu

SEQ ID NO: 1935256 - RNA, 21 nt, Human
uacacaaugguuuucuugugu

SEQ ID NO: 1935257 - RNA, 23 nt, Human
uacacaaugguuuucuugugugu

SEQ ID NO: 1935258 - RNA, 22 nt, Human
uacacacugcauguuugugauu

SEQ ID NO: 1935259 - RNA, 14 nt, Human
uacacuguuucaaa

SEQ ID NO: 1935260 - RNA, 16 nt, Human
uacacugugcugaguc

SEQ ID NO: 1935261 - RNA, 24 nt, Human
uacaagaugaaggagaggcaacau

SEQ ID NO: 1935262 - RNA, 13 nt, Human
uaauuuugaaaaa

SEQ ID NO: 1935263 - RNA, 17 nt, Human
uaauuuugaaaaacugc

SEQ ID NO: 1935264 - RNA, 15 nt, Human
uaauuuugaauaaau

SEQ ID NO: 1935265 - RNA, 14 nt, Human
uacaggauuugaaa

SEQ ID NO: 1935266 - RNA, 16 nt, Human
uacaggcacccaccau

SEQ ID NO: 1935267 - RNA, 19 nt, Human
uacaggaaaagcugcugac

SEQ ID NO: 1935268 - RNA, 19 nt, Human
uacagcuuugaucccugac

SEQ ID NO: 1935269 - RNA, 16 nt, Human
uacaguguacagucuu

SEQ ID NO: 1935270 - RNA, 15 nt, Human
uacaguguacagucu

SEQ ID NO: 1935271 - RNA, 22 nt, Human
uacaguguacagucuuguauua

SEQ ID NO: 1935272 - RNA, 13 nt, Human
uacaguguacagu

SEQ ID NO: 1935273 - RNA, 18 nt, Human
uacaggaaaagcugcuga

SEQ ID NO: 1935274 - RNA, 17 nt, Human
uacaggaaaagcugcug

SEQ ID NO: 1935275 - RNA, 23 nt, Human
uacagcuugaccgugaggccaga

SEQ ID NO: 1935276 - RNA, 22 nt, Human
uacagcuugaccgugaggccag

SEQ ID NO: 1935277 - RNA, 17 nt, Human
uacagcccaccuggcuu

SEQ ID NO: 1935278 - RNA, 21 nt, Human
uacagcuugaccgugaggcca

SEQ ID NO: 1935279 - RNA, 22 nt, Human
uacacugugacuuaagaagccu

SEQ ID NO: 1935280 - RNA, 13 nt, Human
uacacuuuaugca

SEQ ID NO: 1935281 - RNA, 22 nt, Human
uacagaaaaguugaauuuuaca

SEQ ID NO: 1935282 - RNA, 18 nt, Human
uacagaaaaguugaauuu

SEQ ID NO: 1935283 - RNA, 19 nt, Human
uacacuguuucaaacuuua

SEQ ID NO: 1935284 - RNA, 18 nt, Human
uacacuguuucaaacuuu

SEQ ID NO: 1935285 - RNA, 17 nt, Human
uacacuguuucaaacuu

SEQ ID NO: 1935286 - RNA, 13 nt, Human
uacagaauuuuau

SEQ ID NO: 1935287 - RNA, 24 nt, Human
uacagcaaggagauuuacaacugg

SEQ ID NO: 1935288 - RNA, 20 nt, Human
uaccaaucauuuuaauuauu

SEQ ID NO: 1935289 - RNA, 19 nt, Human
uaccaaucauuuuaauuau

SEQ ID NO: 1935290 - RNA, 15 nt, Human
uaccaaucauuuuaa

SEQ ID NO: 1935291 - RNA, 13 nt, Human
uaccaaucauauu

SEQ ID NO: 1935292 - RNA, 22 nt, Human
uaccaaucauauuaauacaaug

SEQ ID NO: 1935293 - RNA, 22 nt, Human
uaccaaucauuuuaauuauuau

SEQ ID NO: 1935294 - RNA, 13 nt, Human
uaccacagacaua

SEQ ID NO: 1935295 - RNA, 23 nt, Human
uaccauuuugggguacccacugc

SEQ ID NO: 1935296 - RNA, 21 nt, Human
uaccauuuauacaaauuagaa

SEQ ID NO: 1935297 - RNA, 15 nt, Human
uaccauuugccuccc

SEQ ID NO: 1935298 - RNA, 14 nt, Human
uaccauuuauacaa

SEQ ID NO: 1935299 - RNA, 15 nt, Human
uaccauuuauacaaa

SEQ ID NO: 1935300 - RNA, 17 nt, Human
uaccauuuauacaaauu

SEQ ID NO: 1935301 - RNA, 18 nt, Human
uaccauuuauacaaauua

SEQ ID NO: 1935302 - RNA, 18 nt, Human
uacccagcgagcccuggu

SEQ ID NO: 1935303 - RNA, 22 nt, Human
uacccaggugcuaggaacacuc

SEQ ID NO: 1935304 - RNA, 16 nt, Human
uacccagcgagcccug

SEQ ID NO: 1935305 - RNA, 14 nt, Human
uacccacugcucug

SEQ ID NO: 1935306 - RNA, 13 nt, Human
uacccacugcucu

SEQ ID NO: 1935307 - RNA, 12 nt, Human
uacccacugcuc

SEQ ID NO: 1935308 - RNA, 11 nt, Human
uacccacugcu

SEQ ID NO: 1935309 - RNA, 12 nt, Human
uacccaccccca

SEQ ID NO: 1935310 - RNA, 15 nt, Human
uacccacccccaccc

SEQ ID NO: 1935311 - RNA, 15 nt, Human
uacccaaauuaagag

SEQ ID NO: 1935312 - RNA, 23 nt, Human
uacccacccccacccaagggccu

SEQ ID NO: 1935313 - RNA, 17 nt, Human
uacccacccccacccaa

SEQ ID NO: 1935314 - RNA, 19 nt, Human
uacccacccccacccaagg

SEQ ID NO: 1935315 - RNA, 21 nt, Human
uacauuuuguauauuuguauu

SEQ ID NO: 1935316 - RNA, 18 nt, Human
uaccaaauagcuucuguu

SEQ ID NO: 1935317 - RNA, 22 nt, Human
uacaugagguacugagagugaa

SEQ ID NO: 1935318 - RNA, 21 nt, Human
uacaugagguacugagaguga

SEQ ID NO: 1935319 - RNA, 22 nt, Human
uacauaagauaaaugugcugaa

SEQ ID NO: 1935320 - RNA, 18 nt, Human
uacaucuauuuuggauug

SEQ ID NO: 1935321 - RNA, 19 nt, Human
uacaucuauuuuggauugu

SEQ ID NO: 1935322 - RNA, 20 nt, Human
uacaucuauuuuggauugua

SEQ ID NO: 1935323 - RNA, 22 nt, Human
uacaucuauuuuggauuguaua

SEQ ID NO: 1935324 - RNA, 23 nt, Human
uacaucuauuuuggauuguauau

SEQ ID NO: 1935325 - RNA, 17 nt, Human
uacaugagaacaaacag

SEQ ID NO: 1935326 - RNA, 18 nt, Human
uacaugagaacaaacaga

SEQ ID NO: 1935327 - RNA, 16 nt, Human
uacaugagaaggaacu

SEQ ID NO: 1935328 - RNA, 23 nt, Human
uacaguuacucagaauucucuag

SEQ ID NO: 1935329 - RNA, 19 nt, Human
uacaguuacucagaauucu

SEQ ID NO: 1935330 - RNA, 18 nt, Human
uacaguuccuagguauaa

SEQ ID NO: 1935331 - RNA, 18 nt, Human
uacauaagauaaaugugc

SEQ ID NO: 1935332 - RNA, 19 nt, Human
uacauaagauaaaugugcu

SEQ ID NO: 1935333 - RNA, 18 nt, Human
uacugagccuuguaauuc

SEQ ID NO: 1935334 - RNA, 15 nt, Human
uacugagccuuguaa

SEQ ID NO: 1935335 - RNA, 23 nt, Human
uacugagccuuguaauucuaaau

SEQ ID NO: 1935336 - RNA, 19 nt, Human
uacugagccuuguaauucu

SEQ ID NO: 1935337 - RNA, 14 nt, Human
uacugagcuucucu

SEQ ID NO: 1935338 - RNA, 17 nt, Human
uacugagcuucucugug

SEQ ID NO: 1935339 - RNA, 15 nt, Human
uacugaggugcuaug

SEQ ID NO: 1935340 - RNA, 17 nt, Human
uacugauguuccuuugg

SEQ ID NO: 1935341 - RNA, 18 nt, Human
uacugauguuccuuugga

SEQ ID NO: 1935342 - RNA, 18 nt, Human
uacugagcuucucuguga

SEQ ID NO: 1935343 - RNA, 12 nt, Human
uacucccaucug

SEQ ID NO: 1935344 - RNA, 14 nt, Human
uacucccaucugug

SEQ ID NO: 1935345 - RNA, 16 nt, Human
uacucccaucugugaa

SEQ ID NO: 1935346 - RNA, 17 nt, Human
uacucccaucugugaaa

SEQ ID NO: 1935347 - RNA, 22 nt, Human
uacucagaauucucuaguuuga

SEQ ID NO: 1935348 - RNA, 16 nt, Human
uacucagaauucucua

SEQ ID NO: 1935349 - RNA, 13 nt, Human
uacucaggaagaa

SEQ ID NO: 1935350 - RNA, 14 nt, Human
uacucaggaagaac

SEQ ID NO: 1935351 - RNA, 14 nt, Human
uacucaccucaccc

SEQ ID NO: 1935352 - RNA, 12 nt, Human
uacucaccucac

SEQ ID NO: 1935353 - RNA, 16 nt, Human
uacuaccuugaaaaua

SEQ ID NO: 1935354 - RNA, 20 nt, Human
uacuaccuugaaaauaagaa

SEQ ID NO: 1935355 - RNA, 20 nt, Human
uacuacaguccucccaucuc

SEQ ID NO: 1935356 - RNA, 20 nt, Human
uacuacaguuuguuaguaug

SEQ ID NO: 1935357 - RNA, 13 nt, Human
uacuaccuugaaa

SEQ ID NO: 1935358 - RNA, 14 nt, Human
uacuaccuugaaaa

SEQ ID NO: 1935359 - RNA, 22 nt, Human
uacccaucccauaugccugggc

SEQ ID NO: 1935360 - RNA, 17 nt, Human
uacccauccccgcagug

SEQ ID NO: 1935361 - RNA, 22 nt, Human
uaccuugaaaauaagaauagaa

SEQ ID NO: 1935362 - RNA, 22 nt, Human
uacccauccccgcagugugcac

SEQ ID NO: 1935363 - RNA, 19 nt, Human
uaccuuugacaaagguaaa

SEQ ID NO: 1935364 - RNA, 20 nt, Human
uaccuuuguauucucuccug

SEQ ID NO: 1935365 - RNA, 20 nt, Human
uaccuuuuuuauacauaaac

SEQ ID NO: 1935366 - RNA, 19 nt, Human
uaccuuuuuuauacauaaa

SEQ ID NO: 1935367 - RNA, 18 nt, Human
uaccuuuuuuauacauaa

SEQ ID NO: 1935368 - RNA, 15 nt, Human
uacgacaacuugcac

SEQ ID NO: 1935369 - RNA, 14 nt, Human
uacgacaacuugca

SEQ ID NO: 1935370 - RNA, 22 nt, Human
uaccuuuuuuauacauaaacaa

SEQ ID NO: 1935371 - RNA, 18 nt, Human
uacuaaccagcagaaaug

SEQ ID NO: 1935372 - RNA, 17 nt, Human
uacuaaccagcagaaau

SEQ ID NO: 1935373 - RNA, 19 nt, Human
uacuaaccagcagaaaugc

SEQ ID NO: 1935374 - RNA, 17 nt, Human
uacuaauagacaauuua

SEQ ID NO: 1935375 - RNA, 15 nt, Human
uacuaauagacaauu

SEQ ID NO: 1935376 - RNA, 22 nt, Human
uacuaauaaaauuuaaaagucu

SEQ ID NO: 1935377 - RNA, 13 nt, Human
uacuaacuuuccu

SEQ ID NO: 1935378 - RNA, 12 nt, Human
uacuacaguccu

SEQ ID NO: 1935379 - RNA, 17 nt, Human
uacuacaguccucccau

SEQ ID NO: 1935380 - RNA, 23 nt, Human
uacuugggagaccuguaaucaua

SEQ ID NO: 1935381 - RNA, 12 nt, Human
uacuugggaggc

SEQ ID NO: 1935382 - RNA, 21 nt, Human
uacuugggagaccuguaauca

SEQ ID NO: 1935383 - RNA, 22 nt, Human
uacuugcucuggaccugccccc

SEQ ID NO: 1935384 - RNA, 14 nt, Human
uacuugcuuugugu

SEQ ID NO: 1935385 - RNA, 16 nt, Human
uacuugcucuggaccu

SEQ ID NO: 1935386 - RNA, 17 nt, Human
uacuugcucuggaccug

SEQ ID NO: 1935387 - RNA, 18 nt, Human
uacuugcucuggaccugc

SEQ ID NO: 1935388 - RNA, 20 nt, Human
uacuugcucuggaccugccc

SEQ ID NO: 1935389 - RNA, 18 nt, Human
uacuuguggacacagcuc

SEQ ID NO: 1935390 - RNA, 15 nt, Human
uacuuguggacacag

SEQ ID NO: 1935391 - RNA, 19 nt, Human
uacuuguggacacagcucu

SEQ ID NO: 1935392 - RNA, 13 nt, Human
uacuuuaauaaau

SEQ ID NO: 1935393 - RNA, 21 nt, Human
uacuugcucuugaugccuggc

SEQ ID NO: 1935394 - RNA, 12 nt, Human
uacuugcucugg

SEQ ID NO: 1935395 - RNA, 14 nt, Human
uacuugcucuggac

SEQ ID NO: 1935396 - RNA, 15 nt, Human
uacuugcucuggacc

SEQ ID NO: 1935397 - RNA, 21 nt, Human
uacuugaagggccagagccag

SEQ ID NO: 1935398 - RNA, 22 nt, Human
uacuugaagggccagagccagg

SEQ ID NO: 1935399 - RNA, 15 nt, Human
uacuguggcuucuua

SEQ ID NO: 1935400 - RNA, 16 nt, Human
uacugugguguuuugu

SEQ ID NO: 1935401 - RNA, 14 nt, Human
uacuguguguguga

SEQ ID NO: 1935402 - RNA, 23 nt, Human
uacugugucuuugguuugugcua

SEQ ID NO: 1935403 - RNA, 17 nt, Human
uacugugugugugaaug

SEQ ID NO: 1935404 - RNA, 18 nt, Human
uacugugugugugaauga

SEQ ID NO: 1935405 - RNA, 19 nt, Human
uacugugugugugaaugaa

SEQ ID NO: 1935406 - RNA, 21 nt, Human
uacugugugugugaaugaaca

SEQ ID NO: 1935407 - RNA, 13 nt, Human
uacugugucuuug

SEQ ID NO: 1935408 - RNA, 21 nt, Human
uacuguaucaugacaaagacu

SEQ ID NO: 1935409 - RNA, 12 nt, Human
uacuguauuuga

SEQ ID NO: 1935410 - RNA, 17 nt, Human
uacugcauaugaaagga

SEQ ID NO: 1935411 - RNA, 15 nt, Human
uagaaauauaauuga

SEQ ID NO: 1935412 - RNA, 20 nt, Human
uagaaauaucugaaaaugua

SEQ ID NO: 1935413 - RNA, 21 nt, Human
uagaaauaucugaaaauguau

SEQ ID NO: 1935414 - RNA, 23 nt, Human
uagaaauaucugaaaauguaugu

SEQ ID NO: 1935415 - RNA, 16 nt, Human
uagaacauaaagcaaa

SEQ ID NO: 1935416 - RNA, 17 nt, Human
uagaacauaaagcaaau

SEQ ID NO: 1935417 - RNA, 18 nt, Human
uagaacauaaagcaaaua

SEQ ID NO: 1935418 - RNA, 22 nt, Human
uagaacauaaagcaaauagaca

SEQ ID NO: 1935419 - RNA, 15 nt, Human
uagaaagaagaugaa

SEQ ID NO: 1935420 - RNA, 14 nt, Human
uagaaagaagccca

SEQ ID NO: 1935421 - RNA, 17 nt, Human
uagaaagacagagcugg

SEQ ID NO: 1935422 - RNA, 23 nt, Human
uagaaagaauauuugguuuuccu

SEQ ID NO: 1935423 - RNA, 21 nt, Human
uagaaagaagcccaauauuau

SEQ ID NO: 1935424 - RNA, 23 nt, Human
uagaaagaagcccaauauuauaa

SEQ ID NO: 1935425 - RNA, 20 nt, Human
uagaaauaaaggaugugauu

SEQ ID NO: 1935426 - RNA, 19 nt, Human
uagaaauaaaggaugugau

SEQ ID NO: 1935427 - RNA, 22 nt, Human
uagaaaggggcaguuuaaagca

SEQ ID NO: 1935428 - RNA, 17 nt, Human
uagaaagugccagaaag

SEQ ID NO: 1935429 - RNA, 18 nt, Human
uagaaagugccagaaagu

SEQ ID NO: 1935430 - RNA, 18 nt, Human
uaauugguccgaucuuug

SEQ ID NO: 1935431 - RNA, 12 nt, Human
uaauugcuuuga

SEQ ID NO: 1935432 - RNA, 18 nt, Human
uaauuugugauacaaugc

SEQ ID NO: 1935433 - RNA, 15 nt, Human
uaauuugugauacaa

SEQ ID NO: 1935434 - RNA, 14 nt, Human
uaauuugugauaca

SEQ ID NO: 1935435 - RNA, 12 nt, Human
uaauuuggcagg

SEQ ID NO: 1935436 - RNA, 18 nt, Human
uaauuugguuuucacauu

SEQ ID NO: 1935437 - RNA, 17 nt, Human
uaauuugguuuucacau

SEQ ID NO: 1935438 - RNA, 15 nt, Human
uaauuugguuuucac

SEQ ID NO: 1935439 - RNA, 22 nt, Human
uaauuugugauacaaugcugug

SEQ ID NO: 1935440 - RNA, 19 nt, Human
uaauuugugauacaaugcu

SEQ ID NO: 1935441 - RNA, 18 nt, Human
uaauucuuagcucauucu

SEQ ID NO: 1935442 - RNA, 12 nt, Human
uaauucugggaa

SEQ ID NO: 1935443 - RNA, 22 nt, Human
uaauugacaggauuauuggaaa

SEQ ID NO: 1935444 - RNA, 20 nt, Human
uaauugacaggauuauugga

SEQ ID NO: 1935445 - RNA, 20 nt, Human
uaauucuucaccuuaggaau

SEQ ID NO: 1935446 - RNA, 14 nt, Human
uaauucuuauucuu

SEQ ID NO: 1935447 - RNA, 15 nt, Human
uaauucuugcauauu

SEQ ID NO: 1935448 - RNA, 19 nt, Human
uaauucuugcauauuuugu

SEQ ID NO: 1935449 - RNA, 19 nt, Human
uaauucuuugaccuguugg

SEQ ID NO: 1935450 - RNA, 14 nt, Human
uaaugcgugcauac

SEQ ID NO: 1935451 - RNA, 17 nt, Human
uaauuaaaacacaacau

SEQ ID NO: 1935452 - RNA, 15 nt, Human
uaauuaaauagcuuu

SEQ ID NO: 1935453 - RNA, 21 nt, Human
uaauuaaauaaaaaucugugg

SEQ ID NO: 1935454 - RNA, 19 nt, Human
uaauaaauguacauuaauu

SEQ ID NO: 1935455 - RNA, 17 nt, Human
uaauaaauguacauuaa

SEQ ID NO: 1935456 - RNA, 11 nt, Human
uaauaaagcug

SEQ ID NO: 1935457 - RNA, 20 nt, Human
uaagugguacuaacuuuccu

SEQ ID NO: 1935458 - RNA, 15 nt, Human
uaaguggaggcacuu

SEQ ID NO: 1935459 - RNA, 16 nt, Human
uaaguggaggcacuuu

SEQ ID NO: 1935460 - RNA, 17 nt, Human
uaaguggaggcacuuua

SEQ ID NO: 1935461 - RNA, 19 nt, Human
uaaguggaggcacuuuagg

SEQ ID NO: 1935462 - RNA, 13 nt, Human
uaauaaagacagg

SEQ ID NO: 1935463 - RNA, 21 nt, Human
uaauaguucagguaacaggca

SEQ ID NO: 1935464 - RNA, 14 nt, Human
uaauacaccacuac

SEQ ID NO: 1935465 - RNA, 20 nt, Human
uaauacaaugaugcuauuug

SEQ ID NO: 1935466 - RNA, 19 nt, Human
uaauauaaaguuggaugcg

SEQ ID NO: 1935467 - RNA, 14 nt, Human
uaauauaaaguugg

SEQ ID NO: 1935468 - RNA, 21 nt, Human
uaauauaaaaagcuuccauga

SEQ ID NO: 1935469 - RNA, 16 nt, Human
uaauauacuauauuua

SEQ ID NO: 1935470 - RNA, 20 nt, Human
uaauauauuuguguauuuaa

SEQ ID NO: 1935471 - RNA, 19 nt, Human
uaauauauuuguguauuua

SEQ ID NO: 1935472 - RNA, 16 nt, Human
uaauauggggaugcag

SEQ ID NO: 1935473 - RNA, 19 nt, Human
uaaugccacuaaauugaca

SEQ ID NO: 1935474 - RNA, 22 nt, Human
uaaugcaucuagauuauggagc

SEQ ID NO: 1935475 - RNA, 14 nt, Human
uaaugauggcccau

SEQ ID NO: 1935476 - RNA, 18 nt, Human
uaaugauggcccauucua

SEQ ID NO: 1935477 - RNA, 22 nt, Human
uaaugauggcccauucuacuug

SEQ ID NO: 1935478 - RNA, 18 nt, Human
uaaucuuaucaagaguug

SEQ ID NO: 1935479 - RNA, 13 nt, Human
uaaucuuauuagg

SEQ ID NO: 1935480 - RNA, 21 nt, Human
uaaucuuauuagggagaaaau

SEQ ID NO: 1935481 - RNA, 11 nt, Human
uaaucuaaaug

SEQ ID NO: 1935482 - RNA, 14 nt, Human
uaaucugagaaaca

SEQ ID NO: 1935483 - RNA, 13 nt, Human
uaagauaauuaua

SEQ ID NO: 1935484 - RNA, 12 nt, Human
uaagauaauuau

SEQ ID NO: 1935485 - RNA, 16 nt, Human
uaagauaaaugugcug

SEQ ID NO: 1935486 - RNA, 17 nt, Human
uaagauaaaugugcuga

SEQ ID NO: 1935487 - RNA, 18 nt, Human
uaagaucguucucugccu

SEQ ID NO: 1935488 - RNA, 14 nt, Human
uaagauaaaugugc

SEQ ID NO: 1935489 - RNA, 12 nt, Human
uaagagggaggg

SEQ ID NO: 1935490 - RNA, 22 nt, Human
uaagagggagggagggcuccag

SEQ ID NO: 1935491 - RNA, 23 nt, Human
uaagagggagggagggcuccaga

SEQ ID NO: 1935492 - RNA, 22 nt, Human
uaagaggcagggucucacucug

SEQ ID NO: 1935493 - RNA, 17 nt, Human
uaagagagucuauuuac

SEQ ID NO: 1935494 - RNA, 21 nt, Human
uaagaacuacaaacaaaauuu

SEQ ID NO: 1935495 - RNA, 22 nt, Human
uaagaaccuuuugagugccuua

SEQ ID NO: 1935496 - RNA, 22 nt, Human
uaacuuuuauaaacuuuaccuu

SEQ ID NO: 1935497 - RNA, 21 nt, Human
uaacuuuuauaaacuuuaccu

SEQ ID NO: 1935498 - RNA, 19 nt, Human
uaacuuuuauaaacuuuac

SEQ ID NO: 1935499 - RNA, 15 nt, Human
uaagcaugcacaaau

SEQ ID NO: 1935500 - RNA, 13 nt, Human
uaagaucucagug

SEQ ID NO: 1935501 - RNA, 19 nt, Human
uaagaucucagugguuaag

SEQ ID NO: 1935502 - RNA, 13 nt, Human
uaagccagacauc

SEQ ID NO: 1935503 - RNA, 21 nt, Human
uaagccagacaucaacagaua

SEQ ID NO: 1935504 - RNA, 20 nt, Human
uaagccagacaucaacagau

SEQ ID NO: 1935505 - RNA, 19 nt, Human
uaaggaugcuuguacauaa

SEQ ID NO: 1935506 - RNA, 15 nt, Human
uaaggcaaucauggu

SEQ ID NO: 1935507 - RNA, 18 nt, Human
uaaggaugcuuguacaua

SEQ ID NO: 1935508 - RNA, 23 nt, Human
uaaggaugcuuguacauaaugcg

SEQ ID NO: 1935509 - RNA, 22 nt, Human
uaaggaugcuuguacauaaugc

SEQ ID NO: 1935510 - RNA, 21 nt, Human
uaaggaugcuuguacauaaug

SEQ ID NO: 1935511 - RNA, 20 nt, Human
uaaggaugcuuguacauaau

SEQ ID NO: 1935512 - RNA, 14 nt, Human
uaacaauguauuuu

SEQ ID NO: 1935513 - RNA, 16 nt, Human
uaacaauguauuuucu

SEQ ID NO: 1935514 - RNA, 14 nt, Human
uaaauuuaguauuu

SEQ ID NO: 1935515 - RNA, 13 nt, Human
uaacagaaaugua

SEQ ID NO: 1935516 - RNA, 15 nt, Human
uaacagaaauguaca

SEQ ID NO: 1935517 - RNA, 14 nt, Human
uaacagaaauguac

SEQ ID NO: 1935518 - RNA, 13 nt, Human
uaacagcucagga

SEQ ID NO: 1935519 - RNA, 14 nt, Human
uaacagcucaggau

SEQ ID NO: 1935520 - RNA, 12 nt, Human
uaacagcugaau

SEQ ID NO: 1935521 - RNA, 15 nt, Human
uaacagcugaauuau

SEQ ID NO: 1935522 - RNA, 19 nt, Human
uaacagcugaauuaucuau

SEQ ID NO: 1935523 - RNA, 19 nt, Human
uaacaggcagauacaggaa

SEQ ID NO: 1935524 - RNA, 19 nt, Human
uaaccagcagaaaugccuu

SEQ ID NO: 1935525 - RNA, 16 nt, Human
uaaccagcagaaaugc

SEQ ID NO: 1935526 - RNA, 14 nt, Human
uaaccagcagaaau

SEQ ID NO: 1935527 - RNA, 14 nt, Human
uaaccaaucuacaa

SEQ ID NO: 1935528 - RNA, 15 nt, Human
uaaccaaucuacaau

SEQ ID NO: 1935529 - RNA, 22 nt, Human
uaaccaaucuacaaucucccuu

SEQ ID NO: 1935530 - RNA, 19 nt, Human
uaacugcaaagugaaguug

SEQ ID NO: 1935531 - RNA, 17 nt, Human
uaacugcccagcggaca

SEQ ID NO: 1935532 - RNA, 23 nt, Human
uaacugcccagcggacaguggca

SEQ ID NO: 1935533 - RNA, 20 nt, Human
uaacuuuuauaaacuuuacc

SEQ ID NO: 1935534 - RNA, 22 nt, Human
uaaauauauuuaagauaauuau

SEQ ID NO: 1935535 - RNA, 17 nt, Human
uaaauauauuuaagaua

SEQ ID NO: 1935536 - RNA, 18 nt, Human
uaaauauaugcuaagucu

SEQ ID NO: 1935537 - RNA, 16 nt, Human
uaaauauauuuuaaga

SEQ ID NO: 1935538 - RNA, 22 nt, Human
uaaauauauuuuaagacgaaac

SEQ ID NO: 1935539 - RNA, 20 nt, Human
uaaaucagacuaugaaguuu

SEQ ID NO: 1935540 - RNA, 19 nt, Human
uaaaucagccguguaacca

SEQ ID NO: 1935541 - RNA, 13 nt, Human
uaaauauugucuu

SEQ ID NO: 1935542 - RNA, 15 nt, Human
uaaauauugucuuuu

SEQ ID NO: 1935543 - RNA, 16 nt, Human
uaaauauugucuuuuu

SEQ ID NO: 1935544 - RNA, 17 nt, Human
uaaauauugucuuuuug

SEQ ID NO: 1935545 - RNA, 20 nt, Human
uaaauauugucuuuuuguau

SEQ ID NO: 1935546 - RNA, 23 nt, Human
uaaauauugucuuuuuguauguc

SEQ ID NO: 1935547 - RNA, 10 nt, Human
uaaauauuua

SEQ ID NO: 1935548 - RNA, 17 nt, Human
uaaauaaaaauaauccu

SEQ ID NO: 1935549 - RNA, 21 nt, Human
uaaauaaaacauuuucacaca

SEQ ID NO: 1935550 - RNA, 22 nt, Human
uaaauaaaacauuuucacacaa

SEQ ID NO: 1935551 - RNA, 14 nt, Human
uaaaguuuguugaa

SEQ ID NO: 1935552 - RNA, 14 nt, Human
uaaaguuugcuuag

SEQ ID NO: 1935553 - RNA, 17 nt, Human
uaaaguuugcuuagaaa

SEQ ID NO: 1935554 - RNA, 13 nt, Human
uaaaguuucuguu

SEQ ID NO: 1935555 - RNA, 21 nt, Human
uaaaguguauuuuuuuacuaa

SEQ ID NO: 1935556 - RNA, 16 nt, Human
uaaaggaugugauugu

SEQ ID NO: 1935557 - RNA, 22 nt, Human
uaaaggaugugauuguggaaug

SEQ ID NO: 1935558 - RNA, 23 nt, Human
uaaaguguauuuuuuuacuaaua

SEQ ID NO: 1935559 - RNA, 22 nt, Human
uaaaguguauuuuuuuacuaau

SEQ ID NO: 1935560 - RNA, 14 nt, Human
uaaaggaauuuaaa

SEQ ID NO: 1935561 - RNA, 14 nt, Human
uaaagcuagaaaug

SEQ ID NO: 1935562 - RNA, 15 nt, Human
uaaagcuagaaauga

SEQ ID NO: 1935563 - RNA, 15 nt, Human
uaaagcuaaaauaac

SEQ ID NO: 1935564 - RNA, 13 nt, Human
uaaagcauuuaua

SEQ ID NO: 1935565 - RNA, 12 nt, Human
uaaagcauuuau

SEQ ID NO: 1935566 - RNA, 20 nt, Human
uaaacuuuuuucuuacuguc

SEQ ID NO: 1935567 - RNA, 13 nt, Human
uaaaaugagaaau

SEQ ID NO: 1935568 - RNA, 22 nt, Human
uaaaaucugauauguauuguuu

SEQ ID NO: 1935569 - RNA, 23 nt, Human
uaaaaucugauauguauuguuug

SEQ ID NO: 1935570 - RNA, 15 nt, Human
uaaaaugagaaaucu

SEQ ID NO: 1935571 - RNA, 16 nt, Human
uaaaaugagaaaucua

SEQ ID NO: 1935572 - RNA, 20 nt, Human
uaaaaucugauauguauugu

SEQ ID NO: 1935573 - RNA, 21 nt, Human
uaaaaucugauauguauuguu

SEQ ID NO: 1935574 - RNA, 15 nt, Human
uaaaaaugguuuaaa

SEQ ID NO: 1935575 - RNA, 16 nt, Human
uaaaagaugcaaugua

SEQ ID NO: 1935576 - RNA, 17 nt, Human
uaaaagggacugagaaa

SEQ ID NO: 1935577 - RNA, 19 nt, Human
uaaaagggacugagaaauu

SEQ ID NO: 1935578 - RNA, 20 nt, Human
uaaaagggacugagaaauuu

SEQ ID NO: 1935579 - RNA, 21 nt, Human
uaaaagggacugagaaauuua

SEQ ID NO: 1935580 - RNA, 19 nt, Human
uaaacuuaaucuaaaugga

SEQ ID NO: 1935581 - RNA, 18 nt, Human
uaaacuuaaucuaaaugg

SEQ ID NO: 1935582 - RNA, 13 nt, Human
uaaacuuaaucua

SEQ ID NO: 1935583 - RNA, 14 nt, Human
uaaacuuaaucuaa

SEQ ID NO: 1935584 - RNA, 16 nt, Human
uaaacuuuaccuuuuu

SEQ ID NO: 1935585 - RNA, 22 nt, Human
uaaacuuuaccuuuuuuauaca

SEQ ID NO: 1935586 - RNA, 20 nt, Human
uaaacugguauuuuaucuuu

SEQ ID NO: 1935587 - RNA, 18 nt, Human
uaaacaagaccacguuuc

SEQ ID NO: 1935588 - RNA, 19 nt, Human
uaaacaaauguaugauuac

SEQ ID NO: 1935589 - RNA, 12 nt, Human
uaaacaaaugua

SEQ ID NO: 1935590 - RNA, 16 nt, Human
uaaaaugcaugauuuu

SEQ ID NO: 1935591 - RNA, 19 nt, Human
uaaaaugcaugauuuugua

SEQ ID NO: 1935592 - RNA, 19 nt, Human
uaaacaagaccacguuucu

SEQ ID NO: 1935593 - RNA, 23 nt, Human
uaaacaagaccacguuucuaaag

SEQ ID NO: 1935594 - RNA, 18 nt, Human
uaaacaauaucagacuuu

SEQ ID NO: 1935595 - RNA, 21 nt, Human
uaaacaaugcugauuugguga

SEQ ID NO: 1935596 - RNA, 21 nt, Human
uaaacacucuugaaaaaugca

SEQ ID NO: 1935597 - RNA, 17 nt, Human
guuuccuuccagcccag

SEQ ID NO: 1935598 - RNA, 20 nt, Human
guuuccuuucauuuacugug

SEQ ID NO: 1935599 - RNA, 17 nt, Human
guuuccuuucauuuacu

SEQ ID NO: 1935600 - RNA, 23 nt, Human
guuuccuuucauuuacuguggcu

SEQ ID NO: 1935601 - RNA, 20 nt, Human
guuucuaaagcugccagccg

SEQ ID NO: 1935602 - RNA, 16 nt, Human
guuucuaaagcugcca

SEQ ID NO: 1935603 - RNA, 14 nt, Human
guuucuaaagcugc

SEQ ID NO: 1935604 - RNA, 15 nt, Human
guuucuaaagcugcc

SEQ ID NO: 1935605 - RNA, 16 nt, Human
guuugaaccaagaacu

SEQ ID NO: 1935606 - RNA, 17 nt, Human
guuugaauauaaacacu

SEQ ID NO: 1935607 - RNA, 19 nt, Human
guuugaauauaaacacuau

SEQ ID NO: 1935608 - RNA, 13 nt, Human
guuugaauauaaa

SEQ ID NO: 1935609 - RNA, 17 nt, Human
guuucuuuguaaugaaa

SEQ ID NO: 1935610 - RNA, 14 nt, Human
guuucuuuguaaug

SEQ ID NO: 1935611 - RNA, 22 nt, Human
guuugauuaaauucuugcaaag

SEQ ID NO: 1935612 - RNA, 19 nt, Human
guuugauuaaauucuugca

SEQ ID NO: 1935613 - RNA, 17 nt, Human
guuugauuaaauucuug

SEQ ID NO: 1935614 - RNA, 21 nt, Human
guuugaaucuauuuaucuuca

SEQ ID NO: 1935615 - RNA, 19 nt, Human
guuuguaaauuaacuuuua

SEQ ID NO: 1935616 - RNA, 17 nt, Human
guuuguaaauuaacuuu

SEQ ID NO: 1935617 - RNA, 18 nt, Human
guuugucugucuucauag

SEQ ID NO: 1935618 - RNA, 15 nt, Human
guuugucugucuuca

SEQ ID NO: 1935619 - RNA, 21 nt, Human
gguuggccccugcccggcugc

SEQ ID NO: 1935620 - RNA, 17 nt, Human
guuuagaaagcuugccc

SEQ ID NO: 1935621 - RNA, 13 nt, Human
guuuagaaagcuu

SEQ ID NO: 1935622 - RNA, 19 nt, Human
gguugggagaaugucagua

SEQ ID NO: 1935623 - RNA, 20 nt, Human
guuuaggauguugaaaaagu

SEQ ID NO: 1935624 - RNA, 23 nt, Human
guuuagcagcagccuuuaaugca

SEQ ID NO: 1935625 - RNA, 12 nt, Human
guuuagccugga

SEQ ID NO: 1935626 - RNA, 17 nt, Human
guuuagcagcagccuuu

SEQ ID NO: 1935627 - RNA, 16 nt, Human
guuuaguaaucauauu

SEQ ID NO: 1935628 - RNA, 18 nt, Human
guuuaggcugguggccca

SEQ ID NO: 1935629 - RNA, 21 nt, Human
guuuaggcugguggcccagga

SEQ ID NO: 1935630 - RNA, 18 nt, Human
guuucagaaauguguuau

SEQ ID NO: 1935631 - RNA, 14 nt, Human
guuucagaaaugug

SEQ ID NO: 1935632 - RNA, 19 nt, Human
guuuccagacuuccuugag

SEQ ID NO: 1935633 - RNA, 20 nt, Human
guuuccagacuuccuugaga

SEQ ID NO: 1935634 - RNA, 23 nt, Human
guuuccaguacaccuuucagcca

SEQ ID NO: 1935635 - RNA, 16 nt, Human
guuuccugcaggccag

SEQ ID NO: 1935636 - RNA, 16 nt, Human
guuuccuuauauuaug

SEQ ID NO: 1935637 - RNA, 21 nt, Human
guuuccuggcacugcuuccag

SEQ ID NO: 1935638 - RNA, 22 nt, Human
guuuccuggcacugcuuccagu

SEQ ID NO: 1935639 - RNA, 22 nt, Human
guuuccugaaacaacuuggaaa

SEQ ID NO: 1935640 - RNA, 14 nt, Human
guuuccugcaggcc

SEQ ID NO: 1935641 - RNA, 16 nt, Human
guuuccuggcacugcu

SEQ ID NO: 1935642 - RNA, 20 nt, Human
guuuccuggcacugcuucca

SEQ ID NO: 1935643 - RNA, 12 nt, Human
uaaaaaacacug

SEQ ID NO: 1935644 - RNA, 11 nt, Human
uaaaaaacaac

SEQ ID NO: 1935645 - RNA, 23 nt, Human
uaaaaaacaugugguuacacagu

SEQ ID NO: 1935646 - RNA, 20 nt, Human
uaaaaaacugcugacuguuu

SEQ ID NO: 1935647 - RNA, 23 nt, Human
uaaaaaacugcugacuguuuucu

SEQ ID NO: 1935648 - RNA, 15 nt, Human
uaaaaaagcugugug

SEQ ID NO: 1935649 - RNA, 14 nt, Human
uaaaaacuuugcua

SEQ ID NO: 1935650 - RNA, 15 nt, Human
uaaaaacaggcagcu

SEQ ID NO: 1935651 - RNA, 11 nt, Human
uaaaaaacacu

SEQ ID NO: 1935652 - RNA, 13 nt, Human
uaaaaaaauuggu

SEQ ID NO: 1935653 - RNA, 17 nt, Human
uaaaaaaagaagagaaa

SEQ ID NO: 1935654 - RNA, 16 nt, Human
uaaaaaaaagaaauga

SEQ ID NO: 1935655 - RNA, 12 nt, Human
uaaaaaaaagaa

SEQ ID NO: 1935656 - RNA, 12 nt, Human
guuuuucaguuu

SEQ ID NO: 1935657 - RNA, 19 nt, Human
uaaaaaaaaagaucuguuu

SEQ ID NO: 1935658 - RNA, 14 nt, Human
guuuuuauuaguac

SEQ ID NO: 1935659 - RNA, 12 nt, Human
guuuucucuuga

SEQ ID NO: 1935660 - RNA, 19 nt, Human
guuuucucuugagagggug

SEQ ID NO: 1935661 - RNA, 19 nt, Human
guuuuguggaggagcucag

SEQ ID NO: 1935662 - RNA, 23 nt, Human
guuuuuauggcuuuugugcauua

SEQ ID NO: 1935663 - RNA, 22 nt, Human
guuuuuauggcuuuugugcauu

SEQ ID NO: 1935664 - RNA, 19 nt, Human
guuuuuauggcuuuugugc

SEQ ID NO: 1935665 - RNA, 19 nt, Human
guuuuuaacucaauauuuu

SEQ ID NO: 1935666 - RNA, 15 nt, Human
guuuuuaacucaaua

SEQ ID NO: 1935667 - RNA, 17 nt, Human
guuuucaguguacaugg

SEQ ID NO: 1935668 - RNA, 16 nt, Human
guuuucaguguacaug

SEQ ID NO: 1935669 - RNA, 20 nt, Human
guuuuccuuuuauuucuuca

SEQ ID NO: 1935670 - RNA, 18 nt, Human
guuuuccuguauaggaau

SEQ ID NO: 1935671 - RNA, 17 nt, Human
guuuucauuugguucau

SEQ ID NO: 1935672 - RNA, 16 nt, Human
guuuucauuugguuca

SEQ ID NO: 1935673 - RNA, 23 nt, Human
ucaagcuaauaaaauaucauuca

SEQ ID NO: 1935674 - RNA, 22 nt, Human
ucaagcuaauaaaauaucauuc

SEQ ID NO: 1935675 - RNA, 20 nt, Human
ucaagcuaauaaaauaucau

SEQ ID NO: 1935676 - RNA, 19 nt, Human
ucaagcuaauaaaauauca

SEQ ID NO: 1935677 - RNA, 13 nt, Human
ucaagcuaauaaa

SEQ ID NO: 1935678 - RNA, 17 nt, Human
ucaagcgauucuucugc

SEQ ID NO: 1935679 - RNA, 16 nt, Human
ucaagcgauucuucug

SEQ ID NO: 1935680 - RNA, 15 nt, Human
ucaagcgauucuccu

SEQ ID NO: 1935681 - RNA, 16 nt, Human
ucaagcccgcggggac

SEQ ID NO: 1935682 - RNA, 22 nt, Human
ucaagugauucuccugccucag

SEQ ID NO: 1935683 - RNA, 23 nt, Human
ucaaggauccugagccagauuuc

SEQ ID NO: 1935684 - RNA, 20 nt, Human
ucaaggauccugagccagau

SEQ ID NO: 1935685 - RNA, 18 nt, Human
ucaaggauccugagccag

SEQ ID NO: 1935686 - RNA, 19 nt, Human
ucaaggauccugagccaga

SEQ ID NO: 1935687 - RNA, 13 nt, Human
ucaagcuccuccu

SEQ ID NO: 1935688 - RNA, 14 nt, Human
ucaagcuccuccuc

SEQ ID NO: 1935689 - RNA, 15 nt, Human
ucaagcuccuccucc

SEQ ID NO: 1935690 - RNA, 16 nt, Human
ucaagcuccuccuccc

SEQ ID NO: 1935691 - RNA, 18 nt, Human
ucaagcuccuccucccug

SEQ ID NO: 1935692 - RNA, 20 nt, Human
ucaagcuccuccucccugca

SEQ ID NO: 1935693 - RNA, 14 nt, Human
ucaaccuccugggc

SEQ ID NO: 1935694 - RNA, 13 nt, Human
ucaaccuccuggg

SEQ ID NO: 1935695 - RNA, 15 nt, Human
ucaacguauuguuuc

SEQ ID NO: 1935696 - RNA, 15 nt, Human
ucaacguuaauaauu

SEQ ID NO: 1935697 - RNA, 22 nt, Human
ucaaacucuugaccucagguga

SEQ ID NO: 1935698 - RNA, 13 nt, Human
ucaaacuuuacua

SEQ ID NO: 1935699 - RNA, 15 nt, Human
ucaaacuuuacuaug

SEQ ID NO: 1935700 - RNA, 16 nt, Human
ucaaacuuuacuaugg

SEQ ID NO: 1935701 - RNA, 14 nt, Human
ucaaagaaauaucu

SEQ ID NO: 1935702 - RNA, 11 nt, Human
ucacaggcagg

SEQ ID NO: 1935703 - RNA, 19 nt, Human
ucacaggaaguagaggagg

SEQ ID NO: 1935704 - RNA, 14 nt, Human
ucacaggaaguaga

SEQ ID NO: 1935705 - RNA, 23 nt, Human
ucacacagugagucgaggacagg

SEQ ID NO: 1935706 - RNA, 22 nt, Human
ucacacagugagucgaggacag

SEQ ID NO: 1935707 - RNA, 21 nt, Human
ucacacaugagcaucaggcca

SEQ ID NO: 1935708 - RNA, 23 nt, Human
ucacacacagacucauauuacug

SEQ ID NO: 1935709 - RNA, 14 nt, Human
ucacacacagacug

SEQ ID NO: 1935710 - RNA, 13 nt, Human
ucacacagugagu

SEQ ID NO: 1935711 - RNA, 22 nt, Human
ucacacaguauuacuucugcua

SEQ ID NO: 1935712 - RNA, 21 nt, Human
ucacacaguauuacuucugcu

SEQ ID NO: 1935713 - RNA, 19 nt, Human
ucacacaauacaauaaguu

SEQ ID NO: 1935714 - RNA, 19 nt, Human
ucaauuacaggaaguacug

SEQ ID NO: 1935715 - RNA, 20 nt, Human
ucaauuacaggaaguacugg

SEQ ID NO: 1935716 - RNA, 17 nt, Human
ucacaaguuuuuuuacu

SEQ ID NO: 1935717 - RNA, 13 nt, Human
ucacaauacuguu

SEQ ID NO: 1935718 - RNA, 18 nt, Human
ucaaugcacugacauugu

SEQ ID NO: 1935719 - RNA, 13 nt, Human
ucaauuacaggaa

SEQ ID NO: 1935720 - RNA, 18 nt, Human
ucaauuacaggaaguacu

SEQ ID NO: 1935721 - RNA, 17 nt, Human
ucaaugguuugcaagga

SEQ ID NO: 1935722 - RNA, 13 nt, Human
ucaauuaacaaua

SEQ ID NO: 1935723 - RNA, 14 nt, Human
ucaaugcacugaca

SEQ ID NO: 1935724 - RNA, 14 nt, Human
ucaauaggaaaaac

SEQ ID NO: 1935725 - RNA, 13 nt, Human
ucaauaggaaaaa

SEQ ID NO: 1935726 - RNA, 15 nt, Human
uauuuuuuaauuauu

SEQ ID NO: 1935727 - RNA, 12 nt, Human
uauuuuuuaauu

SEQ ID NO: 1935728 - RNA, 12 nt, Human
uauuuuuuaaag

SEQ ID NO: 1935729 - RNA, 14 nt, Human
uauuuucuuuaaug

SEQ ID NO: 1935730 - RNA, 15 nt, Human
uauuuuauguugcau

SEQ ID NO: 1935731 - RNA, 16 nt, Human
uauuuuauguugcaua

SEQ ID NO: 1935732 - RNA, 23 nt, Human
uauuuuaucuuugauucuccuuc

SEQ ID NO: 1935733 - RNA, 16 nt, Human
uauuuuauacauuaac

SEQ ID NO: 1935734 - RNA, 22 nt, Human
ucaaaacgguuuuacugcagcu

SEQ ID NO: 1935735 - RNA, 16 nt, Human
ucaaaacuacaaauca

SEQ ID NO: 1935736 - RNA, 14 nt, Human
ucaaacucuuaaaa

SEQ ID NO: 1935737 - RNA, 21 nt, Human
ucaaacuaggggacaaagcaa

SEQ ID NO: 1935738 - RNA, 15 nt, Human
ucaaaaacauucuua

SEQ ID NO: 1935739 - RNA, 22 nt, Human
uauuuuuuucugaauuauuuuc

SEQ ID NO: 1935740 - RNA, 17 nt, Human
uauuuuuuucugaaauu

SEQ ID NO: 1935741 - RNA, 16 nt, Human
uauuuuuuucugaaau

SEQ ID NO: 1935742 - RNA, 15 nt, Human
uauuuuuuuacuaau

SEQ ID NO: 1935743 - RNA, 14 nt, Human
uaucugaaaaugua

SEQ ID NO: 1935744 - RNA, 15 nt, Human
uaucugaaaauguau

SEQ ID NO: 1935745 - RNA, 20 nt, Human
uaucugaaaauguaugugua

SEQ ID NO: 1935746 - RNA, 23 nt, Human
uauuuauuaaaugcccagccccu

SEQ ID NO: 1935747 - RNA, 19 nt, Human
uaucugagcucuuugcacu

SEQ ID NO: 1935748 - RNA, 20 nt, Human
uaucugagcucuuugcacua

SEQ ID NO: 1935749 - RNA, 15 nt, Human
uauuuauuaccucug

SEQ ID NO: 1935750 - RNA, 16 nt, Human
uauuuauuaccucuga

SEQ ID NO: 1935751 - RNA, 13 nt, Human
uauuuauuaccuc

SEQ ID NO: 1935752 - RNA, 23 nt, Human
uauuugggccugcuccagaccug

SEQ ID NO: 1935753 - RNA, 14 nt, Human
uauuugggaaguga

SEQ ID NO: 1935754 - RNA, 15 nt, Human
uauuugggaagugaa

SEQ ID NO: 1935755 - RNA, 13 nt, Human
uauuucucuuucu

SEQ ID NO: 1935756 - RNA, 16 nt, Human
uauuucucuuucuuua

SEQ ID NO: 1935757 - RNA, 15 nt, Human
uauuucucuuucuuu

SEQ ID NO: 1935758 - RNA, 20 nt, Human
uauuucuuaaacaaauguau

SEQ ID NO: 1935759 - RNA, 17 nt, Human
uauuucugcauauguug

SEQ ID NO: 1935760 - RNA, 14 nt, Human
uauuugagaauaua

SEQ ID NO: 1935761 - RNA, 17 nt, Human
ucacuugugcaguguug

SEQ ID NO: 1935762 - RNA, 23 nt, Human
ucagaaagugugcuuuaugcuga

SEQ ID NO: 1935763 - RNA, 16 nt, Human
ucacucugucgcccag

SEQ ID NO: 1935764 - RNA, 12 nt, Human
ucacucugucgc

SEQ ID NO: 1935765 - RNA, 19 nt, Human
ucacucugucgcccagucu

SEQ ID NO: 1935766 - RNA, 22 nt, Human
ucacucugucgcccagucugga

SEQ ID NO: 1935767 - RNA, 20 nt, Human
ucacugcuuaacuucacaua

SEQ ID NO: 1935768 - RNA, 18 nt, Human
ucacugcuuaacuucaca

SEQ ID NO: 1935769 - RNA, 17 nt, Human
ucacugcuuaacuucac

SEQ ID NO: 1935770 - RNA, 15 nt, Human
ucacugcuuaacuuc

SEQ ID NO: 1935771 - RNA, 16 nt, Human
ucagaggcgcacugug

SEQ ID NO: 1935772 - RNA, 22 nt, Human
ucagaguugaugguuguacaua

SEQ ID NO: 1935773 - RNA, 23 nt, Human
ucagagugcaagccccugcucca

SEQ ID NO: 1935774 - RNA, 19 nt, Human
ucagcacgauuucuguuua

SEQ ID NO: 1935775 - RNA, 13 nt, Human
ucagcacaaggcc

SEQ ID NO: 1935776 - RNA, 18 nt, Human
ucagcacgauuucuguuu

SEQ ID NO: 1935777 - RNA, 15 nt, Human
ucagacagcugccug

SEQ ID NO: 1935778 - RNA, 16 nt, Human
ucagacagcugccugg

SEQ ID NO: 1935779 - RNA, 17 nt, Human
ucagacagcugccuggg

SEQ ID NO: 1935780 - RNA, 18 nt, Human
ucagacagcugccuggga

SEQ ID NO: 1935781 - RNA, 19 nt, Human
ucagacagcugccugggau

SEQ ID NO: 1935782 - RNA, 20 nt, Human
ucagacagcugccugggauc

SEQ ID NO: 1935783 - RNA, 19 nt, Human
ucagacauagaauuaacac

SEQ ID NO: 1935784 - RNA, 22 nt, Human
ucagacauagaauuaacacaug

SEQ ID NO: 1935785 - RNA, 14 nt, Human
ucagacauguuuuc

SEQ ID NO: 1935786 - RNA, 15 nt, Human
ucagacauguuuucc

SEQ ID NO: 1935787 - RNA, 20 nt, Human
ucagacauguuuuccgugaa

SEQ ID NO: 1935788 - RNA, 14 nt, Human
ucagaccacggcuc

SEQ ID NO: 1935789 - RNA, 14 nt, Human
ucagaccagcucuu

SEQ ID NO: 1935790 - RNA, 19 nt, Human
ucagacucccauuccugaa

SEQ ID NO: 1935791 - RNA, 21 nt, Human
ucagacucccauuccugaaga

SEQ ID NO: 1935792 - RNA, 22 nt, Human
ucagacucccauuccugaagaa

SEQ ID NO: 1935793 - RNA, 12 nt, Human
ucacuccugcug

SEQ ID NO: 1935794 - RNA, 13 nt, Human
ucacuccugcugu

SEQ ID NO: 1935795 - RNA, 14 nt, Human
ucacuccugcugua

SEQ ID NO: 1935796 - RNA, 15 nt, Human
ucacuccugcuguaa

SEQ ID NO: 1935797 - RNA, 16 nt, Human
ucacuccugcuguaaa

SEQ ID NO: 1935798 - RNA, 19 nt, Human
ucacuccugcuguaaauuu

SEQ ID NO: 1935799 - RNA, 13 nt, Human
ucacuccuugaaa

SEQ ID NO: 1935800 - RNA, 20 nt, Human
ucacggcucacugcagccuc

SEQ ID NO: 1935801 - RNA, 15 nt, Human
ucacggcucacugca

SEQ ID NO: 1935802 - RNA, 13 nt, Human
ucacggcucacug

SEQ ID NO: 1935803 - RNA, 14 nt, Human
ucacggaagagccu

SEQ ID NO: 1935804 - RNA, 16 nt, Human
ucacggaagagccuug

SEQ ID NO: 1935805 - RNA, 17 nt, Human
ucacggaagagccuugc

SEQ ID NO: 1935806 - RNA, 14 nt, Human
ucacucuggcagcu

SEQ ID NO: 1935807 - RNA, 15 nt, Human
ucacucuggcagcuc

SEQ ID NO: 1935808 - RNA, 16 nt, Human
ucacucuggcagcuca

SEQ ID NO: 1935809 - RNA, 17 nt, Human
ucacucuggcagcucag

SEQ ID NO: 1935810 - RNA, 18 nt, Human
ucacucuggcagcucaga

SEQ ID NO: 1935811 - RNA, 19 nt, Human
ucacucuggcagcucagag

SEQ ID NO: 1935812 - RNA, 20 nt, Human
ucacucuggcagcucagaga

SEQ ID NO: 1935813 - RNA, 22 nt, Human
ucacucuggcagcucagagagg

SEQ ID NO: 1935814 - RNA, 23 nt, Human
ucacucuccuuggugucgggcau

SEQ ID NO: 1935815 - RNA, 12 nt, Human
ucacucuggcag

SEQ ID NO: 1935816 - RNA, 13 nt, Human
ucacucuggcagc

SEQ ID NO: 1935817 - RNA, 12 nt, Human
ucacucuccuug

SEQ ID NO: 1935818 - RNA, 14 nt, Human
ucacucuccuuggu

SEQ ID NO: 1935819 - RNA, 23 nt, Human
ucaccuuggcaccagacacccag

SEQ ID NO: 1935820 - RNA, 18 nt, Human
ucaccuuggcaccagaca

SEQ ID NO: 1935821 - RNA, 19 nt, Human
ucaccuuggcaccagacac

SEQ ID NO: 1935822 - RNA, 14 nt, Human
ucaccuuucccauc

SEQ ID NO: 1935823 - RNA, 12 nt, Human
ucaccuuugucc

SEQ ID NO: 1935824 - RNA, 20 nt, Human
ucaccuauuuccauucaaca

SEQ ID NO: 1935825 - RNA, 15 nt, Human
ucacaggcaggucca

SEQ ID NO: 1935826 - RNA, 12 nt, Human
ucacaggcaggu

SEQ ID NO: 1935827 - RNA, 19 nt, Human
ucacaggccccaggaaagg

SEQ ID NO: 1935828 - RNA, 23 nt, Human
ucacagggacugaaaaccucucc

SEQ ID NO: 1935829 - RNA, 15 nt, Human
ucaccuagaaauuga

SEQ ID NO: 1935830 - RNA, 22 nt, Human
ucaccuuuguccccaccgcaga

SEQ ID NO: 1935831 - RNA, 14 nt, Human
ucaccuuugucccc

SEQ ID NO: 1935832 - RNA, 15 nt, Human
ucaccuuugucccca

SEQ ID NO: 1935833 - RNA, 17 nt, Human
ucaccuuuguccccacc

SEQ ID NO: 1935834 - RNA, 18 nt, Human
ucaccuuuguccccaccg

SEQ ID NO: 1935835 - RNA, 14 nt, Human
ucacgccacugcac

SEQ ID NO: 1935836 - RNA, 13 nt, Human
ucacgccacugca

SEQ ID NO: 1935837 - RNA, 16 nt, Human
ucacgccacugcacua

SEQ ID NO: 1935838 - RNA, 19 nt, Human
ucacgccuguaauccuagc

SEQ ID NO: 1935839 - RNA, 20 nt, Human
ucacgccuguaauccuagca

SEQ ID NO: 1935840 - RNA, 13 nt, Human
ucagcagacugau

SEQ ID NO: 1935841 - RNA, 24 nt, Human
ucagucugauucccaagcucugcu

SEQ ID NO: 1935842 - RNA, 22 nt, Human
ucagucuuuaaucugagaggcc

SEQ ID NO: 1935843 - RNA, 20 nt, Human
ucagucuucucucacuuuga

SEQ ID NO: 1935844 - RNA, 15 nt, Human
ucagucuggcccuuc

SEQ ID NO: 1935845 - RNA, 23 nt, Human
ucagugguuggcaauuguuucaa

SEQ ID NO: 1935846 - RNA, 11 nt, Human
ucaguguacau

SEQ ID NO: 1935847 - RNA, 13 nt, Human
ucagugugacuga

SEQ ID NO: 1935848 - RNA, 17 nt, Human
ucagugugacugaucuc

SEQ ID NO: 1935849 - RNA, 13 nt, Human
ucauacccacccc

SEQ ID NO: 1935850 - RNA, 15 nt, Human
ucauaauuauuauuu

SEQ ID NO: 1935851 - RNA, 17 nt, Human
ucaguuguuaguguguc

SEQ ID NO: 1935852 - RNA, 13 nt, Human
ucauaaugacuua

SEQ ID NO: 1935853 - RNA, 20 nt, Human
ucaguucuugccacuuuuuu

SEQ ID NO: 1935854 - RNA, 22 nt, Human
ucauuaggugugacugaauuuc

SEQ ID NO: 1935855 - RNA, 21 nt, Human
ucauuaggugugacugaauuu

SEQ ID NO: 1935856 - RNA, 18 nt, Human
ucauuaggugugacugaa

SEQ ID NO: 1935857 - RNA, 15 nt, Human
ucauguaauccucaa

SEQ ID NO: 1935858 - RNA, 16 nt, Human
ucauuaggugugacug

SEQ ID NO: 1935859 - RNA, 16 nt, Human
ucaugccccuggcugg

SEQ ID NO: 1935860 - RNA, 13 nt, Human
ucaugcccuccuc

SEQ ID NO: 1935861 - RNA, 14 nt, Human
ucaugcccuccucu

SEQ ID NO: 1935862 - RNA, 15 nt, Human
ucaugcccugugcaa

SEQ ID NO: 1935863 - RNA, 15 nt, Human
ucaugcccuccucuc

SEQ ID NO: 1935864 - RNA, 21 nt, Human
ucauacccacccccacccaag

SEQ ID NO: 1935865 - RNA, 20 nt, Human
ucauacccacccccacccaa

SEQ ID NO: 1935866 - RNA, 14 nt, Human
ucauacccaccccc

SEQ ID NO: 1935867 - RNA, 15 nt, Human
ucauacccaccccca

SEQ ID NO: 1935868 - RNA, 21 nt, Human
ucauaguaacuucuuauggaa

SEQ ID NO: 1935869 - RNA, 14 nt, Human
ucauaguaacuucu

SEQ ID NO: 1935870 - RNA, 15 nt, Human
ucauaguaacuucuu

SEQ ID NO: 1935871 - RNA, 16 nt, Human
ucauaguaacuucuua

SEQ ID NO: 1935872 - RNA, 18 nt, Human
ucauaguaacuucuuaug

SEQ ID NO: 1935873 - RNA, 12 nt, Human
ucaucugugcac

SEQ ID NO: 1935874 - RNA, 13 nt, Human
ucaucucuuagcu

SEQ ID NO: 1935875 - RNA, 16 nt, Human
ucaucucucuuuaaua

SEQ ID NO: 1935876 - RNA, 14 nt, Human
ucaucucucugccc

SEQ ID NO: 1935877 - RNA, 16 nt, Human
ucaucucucugcccaa

SEQ ID NO: 1935878 - RNA, 21 nt, Human
ucaucucuuagcuccccucca

SEQ ID NO: 1935879 - RNA, 20 nt, Human
ucaucucuuagcuccccucc

SEQ ID NO: 1935880 - RNA, 19 nt, Human
ucaucucuuagcuccccuc

SEQ ID NO: 1935881 - RNA, 14 nt, Human
ucaucucuuagcuc

SEQ ID NO: 1935882 - RNA, 20 nt, Human
uccacuucuuucagcagacu

SEQ ID NO: 1935883 - RNA, 14 nt, Human
uccacuuggucugu

SEQ ID NO: 1935884 - RNA, 22 nt, Human
uccagaacucacuggggccuac

SEQ ID NO: 1935885 - RNA, 13 nt, Human
uccaccugccagg

SEQ ID NO: 1935886 - RNA, 13 nt, Human
uccacuuggucug

SEQ ID NO: 1935887 - RNA, 12 nt, Human
uccacuuggucu

SEQ ID NO: 1935888 - RNA, 14 nt, Human
uccagaaggagaca

SEQ ID NO: 1935889 - RNA, 19 nt, Human
uccagaaggagacaggcag

SEQ ID NO: 1935890 - RNA, 23 nt, Human
uccagccaaagccuccuccagcc

SEQ ID NO: 1935891 - RNA, 14 nt, Human
uccagcaguuuuca

SEQ ID NO: 1935892 - RNA, 12 nt, Human
uccagcagggaa

SEQ ID NO: 1935893 - RNA, 15 nt, Human
uccacaagagcccag

SEQ ID NO: 1935894 - RNA, 14 nt, Human
uccacaagagccca

SEQ ID NO: 1935895 - RNA, 12 nt, Human
uccaccugccag

SEQ ID NO: 1935896 - RNA, 18 nt, Human
uccaccucgacguuuaca

SEQ ID NO: 1935897 - RNA, 14 nt, Human
uccaccuacaugag

SEQ ID NO: 1935898 - RNA, 10 nt, Human
ucauucagca

SEQ ID NO: 1935899 - RNA, 22 nt, Human
ucauucagauaugauucaaaug

SEQ ID NO: 1935900 - RNA, 17 nt, Human
uccaaaauaaaacuuuu

SEQ ID NO: 1935901 - RNA, 16 nt, Human
uccaaaauaaaacuuu

SEQ ID NO: 1935902 - RNA, 23 nt, Human
uccaaagaguagaauugcauuga

SEQ ID NO: 1935903 - RNA, 22 nt, Human
uccaaagaguagaauugcauug

SEQ ID NO: 1935904 - RNA, 22 nt, Human
uccaaacuuggauuuuugacuc

SEQ ID NO: 1935905 - RNA, 19 nt, Human
uccaagaccuucuccuuca

SEQ ID NO: 1935906 - RNA, 13 nt, Human
uccaagcaaaugu

SEQ ID NO: 1935907 - RNA, 22 nt, Human
uccaagaagcccaggaaaggcu

SEQ ID NO: 1935908 - RNA, 14 nt, Human
uccaagaauuucua

SEQ ID NO: 1935909 - RNA, 20 nt, Human
uccaagaagcccaggaaagg

SEQ ID NO: 1935910 - RNA, 17 nt, Human
uccaaagccaaugugaa

SEQ ID NO: 1935911 - RNA, 14 nt, Human
uccaaagcagacag

SEQ ID NO: 1935912 - RNA, 15 nt, Human
uccaaagcagacagc

SEQ ID NO: 1935913 - RNA, 18 nt, Human
uccaaacuuggauuuuug

SEQ ID NO: 1935914 - RNA, 11 nt, Human
ucccuaauaaa

SEQ ID NO: 1935915 - RNA, 12 nt, Human
ucccuaauaaag

SEQ ID NO: 1935916 - RNA, 13 nt, Human
ucccuaauaaagc

SEQ ID NO: 1935917 - RNA, 15 nt, Human
ucccuacuguaauuu

SEQ ID NO: 1935918 - RNA, 17 nt, Human
ucccucccucuuucccu

SEQ ID NO: 1935919 - RNA, 15 nt, Human
ucccucccucuuucc

SEQ ID NO: 1935920 - RNA, 24 nt, Human
uccccugcuggguguggcgcagca

SEQ ID NO: 1935921 - RNA, 19 nt, Human
uccccuguagagugggagc

SEQ ID NO: 1935922 - RNA, 22 nt, Human
uccccuguagagugggagcuga

SEQ ID NO: 1935923 - RNA, 23 nt, Human
uccccuguccccgcacugggcuu

SEQ ID NO: 1935924 - RNA, 14 nt, Human
uccccugcugggug

SEQ ID NO: 1935925 - RNA, 15 nt, Human
uccccugcugggugu

SEQ ID NO: 1935926 - RNA, 20 nt, Human
uccccugcuggguguggcgc

SEQ ID NO: 1935927 - RNA, 21 nt, Human
uccccugcuggguguggcgca

SEQ ID NO: 1935928 - RNA, 22 nt, Human
uccccugccccuuuacggacac

SEQ ID NO: 1935929 - RNA, 12 nt, Human
uccccugccucc

SEQ ID NO: 1935930 - RNA, 13 nt, Human
uccccugccucca

SEQ ID NO: 1935931 - RNA, 15 nt, Human
uccccugccuccauc

SEQ ID NO: 1935932 - RNA, 17 nt, Human
uccccugccuccauccu

SEQ ID NO: 1935933 - RNA, 20 nt, Human
uccccgcacugggcuugggg

SEQ ID NO: 1935934 - RNA, 15 nt, Human
uccccgcccuuuuuu

SEQ ID NO: 1935935 - RNA, 13 nt, Human
uccccgcccuuuu

SEQ ID NO: 1935936 - RNA, 21 nt, Human
uccccgcagugugcacuaagg

SEQ ID NO: 1935937 - RNA, 22 nt, Human
uccccgcagugugcacuaaggg

SEQ ID NO: 1935938 - RNA, 19 nt, Human
uccccgcagugugcacuaa

SEQ ID NO: 1935939 - RNA, 20 nt, Human
uccccgcagugugcacuaag

SEQ ID NO: 1935940 - RNA, 21 nt, Human
ucccccuuccauggacuuugu

SEQ ID NO: 1935941 - RNA, 15 nt, Human
uccccugcccccagg

SEQ ID NO: 1935942 - RNA, 14 nt, Human
uccccugcccccag

SEQ ID NO: 1935943 - RNA, 13 nt, Human
uccccugccccca

SEQ ID NO: 1935944 - RNA, 19 nt, Human
uccccugcccccaggacug

SEQ ID NO: 1935945 - RNA, 18 nt, Human
uccccugcccccaggacu

SEQ ID NO: 1935946 - RNA, 17 nt, Human
uccccugcccccaggac

SEQ ID NO: 1935947 - RNA, 16 nt, Human
uccccugcccccagga

SEQ ID NO: 1935948 - RNA, 22 nt, Human
uccccugcccccaggacugggc

SEQ ID NO: 1935949 - RNA, 20 nt, Human
uccccugcccccaggacugg

SEQ ID NO: 1935950 - RNA, 14 nt, Human
uccccagcuguuua

SEQ ID NO: 1935951 - RNA, 10 nt, Human
uccccagaga

SEQ ID NO: 1935952 - RNA, 11 nt, Human
uccccagagaa

SEQ ID NO: 1935953 - RNA, 17 nt, Human
uccccagagaaagcgca

SEQ ID NO: 1935954 - RNA, 23 nt, Human
uccccagagaaagcgcagaugcu

SEQ ID NO: 1935955 - RNA, 15 nt, Human
uccccagcuguuuau

SEQ ID NO: 1935956 - RNA, 13 nt, Human
uccccaggaggcc

SEQ ID NO: 1935957 - RNA, 15 nt, Human
ucccccuagccauuu

SEQ ID NO: 1935958 - RNA, 14 nt, Human
ucccccuagccauu

SEQ ID NO: 1935959 - RNA, 16 nt, Human
ucccccuccaccugcu

SEQ ID NO: 1935960 - RNA, 16 nt, Human
ucccccuagccauuuu

SEQ ID NO: 1935961 - RNA, 22 nt, Human
uccccacuugagaauuacccuu

SEQ ID NO: 1935962 - RNA, 22 nt, Human
ucccauguagcccccuggccuc

SEQ ID NO: 1935963 - RNA, 17 nt, Human
ucccauugucccucugc

SEQ ID NO: 1935964 - RNA, 13 nt, Human
ucccauugucccu

SEQ ID NO: 1935965 - RNA, 16 nt, Human
ucccauugucccucug

SEQ ID NO: 1935966 - RNA, 22 nt, Human
uccccagacuccaccaagccug

SEQ ID NO: 1935967 - RNA, 13 nt, Human
ucccauguagccc

SEQ ID NO: 1935968 - RNA, 15 nt, Human
ucccauguagccccc

SEQ ID NO: 1935969 - RNA, 21 nt, Human
ucccauguagcccccuggccu

SEQ ID NO: 1935970 - RNA, 16 nt, Human
ucccauucuccauuug

SEQ ID NO: 1935971 - RNA, 15 nt, Human
ucccauuccugaaga

SEQ ID NO: 1935972 - RNA, 19 nt, Human
ucccauucuccauuuguua

SEQ ID NO: 1935973 - RNA, 13 nt, Human
ucccauuccugaa

SEQ ID NO: 1935974 - RNA, 14 nt, Human
ucccauuccugaag

SEQ ID NO: 1935975 - RNA, 17 nt, Human
ucccauuccugaagaac

SEQ ID NO: 1935976 - RNA, 23 nt, Human
ucccaucucacacaugagcauca

SEQ ID NO: 1935977 - RNA, 21 nt, Human
ucccaggcucucaacagggga

SEQ ID NO: 1935978 - RNA, 20 nt, Human
ucccaucucacacaugagca

SEQ ID NO: 1935979 - RNA, 15 nt, Human
ucccaccucagccuc

SEQ ID NO: 1935980 - RNA, 14 nt, Human
ucccaccucagccu

SEQ ID NO: 1935981 - RNA, 13 nt, Human
ucccaggacccug

SEQ ID NO: 1935982 - RNA, 17 nt, Human
ucccaccuagcagcacc

SEQ ID NO: 1935983 - RNA, 19 nt, Human
ucccaggacccugaagggg

SEQ ID NO: 1935984 - RNA, 14 nt, Human
ucccaggacccuga

SEQ ID NO: 1935985 - RNA, 16 nt, Human
ucccaggacccugaag

SEQ ID NO: 1935986 - RNA, 13 nt, Human
ucccaccucagcc

SEQ ID NO: 1935987 - RNA, 20 nt, Human
ucccaggcauuccccaggag

SEQ ID NO: 1935988 - RNA, 21 nt, Human
ucccaggcauuccccaggagg

SEQ ID NO: 1935989 - RNA, 15 nt, Human
ucccaggaguucugc

SEQ ID NO: 1935990 - RNA, 18 nt, Human
ucccaggaguucugcuca

SEQ ID NO: 1935991 - RNA, 19 nt, Human
ucccaggaguucugcucau

SEQ ID NO: 1935992 - RNA, 22 nt, Human
ucccaggcauuccccaggaggc

SEQ ID NO: 1935993 - RNA, 15 nt, Human
ucccaagcucugcuc

SEQ ID NO: 1935994 - RNA, 14 nt, Human
ucccaagcucugcu

SEQ ID NO: 1935995 - RNA, 13 nt, Human
ucccaagcucugc

SEQ ID NO: 1935996 - RNA, 12 nt, Human
ucccaagcucug

SEQ ID NO: 1935997 - RNA, 17 nt, Human
ucccaagcucugcuccu

SEQ ID NO: 1935998 - RNA, 16 nt, Human
ucccaacucaccccag

SEQ ID NO: 1935999 - RNA, 20 nt, Human
ucccaaauuugauugauuug

SEQ ID NO: 1936000 - RNA, 22 nt, Human
ucccaaauuugauugauuugaa

SEQ ID NO: 1936001 - RNA, 16 nt, Human
ucccaagcucagaggc

SEQ ID NO: 1936002 - RNA, 19 nt, Human
ucccaacaaacauugaugc

SEQ ID NO: 1936003 - RNA, 14 nt, Human
ucccaacucacccc

SEQ ID NO: 1936004 - RNA, 15 nt, Human
ucccaacucacccca

SEQ ID NO: 1936005 - RNA, 13 nt, Human
ucccaacucaccc

SEQ ID NO: 1936006 - RNA, 14 nt, Human
ucccaaaugagcca

SEQ ID NO: 1936007 - RNA, 17 nt, Human
ucccaaauuugauugau

SEQ ID NO: 1936008 - RNA, 19 nt, Human
ucccaaauuugauugauuu

SEQ ID NO: 1936009 - RNA, 23 nt, Human
uccagcucaccagccccagugcc

SEQ ID NO: 1936010 - RNA, 12 nt, Human
uccagcuccaac

SEQ ID NO: 1936011 - RNA, 16 nt, Human
uccagcuccaaccugc

SEQ ID NO: 1936012 - RNA, 18 nt, Human
uccagcuccaaccugcaa

SEQ ID NO: 1936013 - RNA, 19 nt, Human
uccagcuccaaccugcaaa

SEQ ID NO: 1936014 - RNA, 13 nt, Human
uccauggacuuug

SEQ ID NO: 1936015 - RNA, 22 nt, Human
uccauggccguguagaagcaug

SEQ ID NO: 1936016 - RNA, 14 nt, Human
uccauggacuuugu

SEQ ID NO: 1936017 - RNA, 15 nt, Human
uccauggacuuuguu

SEQ ID NO: 1936018 - RNA, 20 nt, Human
ucugcacaugucuuguacau

SEQ ID NO: 1936019 - RNA, 19 nt, Human
ucugcacaagcugcacccu

SEQ ID NO: 1936020 - RNA, 14 nt, Human
ucugcacaagcugc

SEQ ID NO: 1936021 - RNA, 23 nt, Human
ucugauucccaagcucugcuccu

SEQ ID NO: 1936022 - RNA, 23 nt, Human
ucugaggacacuaaccacgcugg

SEQ ID NO: 1936023 - RNA, 20 nt, Human
ucugaggacacuaaccacgc

SEQ ID NO: 1936024 - RNA, 17 nt, Human
ucugaggaauccagacc

SEQ ID NO: 1936025 - RNA, 16 nt, Human
ucugaggaauccagac

SEQ ID NO: 1936026 - RNA, 18 nt, Human
ucugagcucuuugcacua

SEQ ID NO: 1936027 - RNA, 19 nt, Human
ucugacccagugcccccac

SEQ ID NO: 1936028 - RNA, 22 nt, Human
ucugacccagugcccccacuga

SEQ ID NO: 1936029 - RNA, 23 nt, Human
ucugacccagugcccccacugac

SEQ ID NO: 1936030 - RNA, 15 nt, Human
ucugacccaugcugc

SEQ ID NO: 1936031 - RNA, 16 nt, Human
ucugacccaugcugcc

SEQ ID NO: 1936032 - RNA, 17 nt, Human
ucugacccaugcugccc

SEQ ID NO: 1936033 - RNA, 18 nt, Human
ucugacccaugcugcccu

SEQ ID NO: 1936034 - RNA, 14 nt, Human
ucugacccaugcug

SEQ ID NO: 1936035 - RNA, 13 nt, Human
ucugacccagugc

SEQ ID NO: 1936036 - RNA, 14 nt, Human
ucugacccagugcc

SEQ ID NO: 1936037 - RNA, 15 nt, Human
ucugacccagugccc

SEQ ID NO: 1936038 - RNA, 11 nt, Human
ucugacccagu

SEQ ID NO: 1936039 - RNA, 13 nt, Human
ucugaccagcagc

SEQ ID NO: 1936040 - RNA, 16 nt, Human
ucugaccagcagcgcc

SEQ ID NO: 1936041 - RNA, 21 nt, Human
ucugaacuuggcgcugccccu

SEQ ID NO: 1936042 - RNA, 20 nt, Human
ucugaacuggagccaugggc

SEQ ID NO: 1936043 - RNA, 20 nt, Human
ucugaacuuggcgcugcccc

SEQ ID NO: 1936044 - RNA, 18 nt, Human
ucugacaugauuccuucc

SEQ ID NO: 1936045 - RNA, 19 nt, Human
ucugacaugauuccuuccu

SEQ ID NO: 1936046 - RNA, 22 nt, Human
ucugacaugauuccuuccuguu

SEQ ID NO: 1936047 - RNA, 13 nt, Human
ucucuuucuuuac

SEQ ID NO: 1936048 - RNA, 18 nt, Human
ucucuuucuuuacaagau

SEQ ID NO: 1936049 - RNA, 18 nt, Human
ucucuucacagucacauu

SEQ ID NO: 1936050 - RNA, 11 nt, Human
ucucugcaggu

SEQ ID NO: 1936051 - RNA, 18 nt, Human
ucucugcaccguacugug

SEQ ID NO: 1936052 - RNA, 16 nt, Human
ucugaaaauguaugug

SEQ ID NO: 1936053 - RNA, 16 nt, Human
ucucuuuucaaaacau

SEQ ID NO: 1936054 - RNA, 15 nt, Human
ucucuuuucaaaaca

SEQ ID NO: 1936055 - RNA, 17 nt, Human
ucucuuuguucuaaaga

SEQ ID NO: 1936056 - RNA, 23 nt, Human
ucugaaaauguauguguaaguau

SEQ ID NO: 1936057 - RNA, 17 nt, Human
ucugaaaauuaacacug

SEQ ID NO: 1936058 - RNA, 13 nt, Human
ucugaaagggacg

SEQ ID NO: 1936059 - RNA, 19 nt, Human
ucugaaaauuaacacugcu

SEQ ID NO: 1936060 - RNA, 18 nt, Human
ucugaaaauuaacacugc

SEQ ID NO: 1936061 - RNA, 14 nt, Human
ucugaaauuuccug

SEQ ID NO: 1936062 - RNA, 14 nt, Human
ucugaacuggagcc

SEQ ID NO: 1936063 - RNA, 15 nt, Human
ucugaacuggagcca

SEQ ID NO: 1936064 - RNA, 22 nt, Human
ucuccugccucagccucccaaa

SEQ ID NO: 1936065 - RNA, 15 nt, Human
ucucccugacccugu

SEQ ID NO: 1936066 - RNA, 13 nt, Human
ucuccucuuguaa

SEQ ID NO: 1936067 - RNA, 14 nt, Human
ucuccucuuguaaa

SEQ ID NO: 1936068 - RNA, 15 nt, Human
ucuccucuuguaaau

SEQ ID NO: 1936069 - RNA, 23 nt, Human
ucuccucuuguaaauaaagcccu

SEQ ID NO: 1936070 - RNA, 21 nt, Human
ucuccucuuguaaauaaagcc

SEQ ID NO: 1936071 - RNA, 17 nt, Human
ucuccugaaguucagcc

SEQ ID NO: 1936072 - RNA, 22 nt, Human
ucucccccagccccauccucug

SEQ ID NO: 1936073 - RNA, 18 nt, Human
ucucccccagccccaucc

SEQ ID NO: 1936074 - RNA, 20 nt, Human
ucucccccagccccauccuc

SEQ ID NO: 1936075 - RNA, 23 nt, Human
ucuccccugcccccaggacuggg

SEQ ID NO: 1936076 - RNA, 22 nt, Human
ucuccccugcccccaggacugg

SEQ ID NO: 1936077 - RNA, 21 nt, Human
ucuccccugcccccaggacug

SEQ ID NO: 1936078 - RNA, 20 nt, Human
ucuccccugcccccaggacu

SEQ ID NO: 1936079 - RNA, 14 nt, Human
ucucccccagcccc

SEQ ID NO: 1936080 - RNA, 15 nt, Human
ucucccccagcccca

SEQ ID NO: 1936081 - RNA, 17 nt, Human
ucucccccagccccauc

SEQ ID NO: 1936082 - RNA, 22 nt, Human
ucucagguuaagugugaguaau

SEQ ID NO: 1936083 - RNA, 17 nt, Human
ucucaguacuuuggagg

SEQ ID NO: 1936084 - RNA, 21 nt, Human
ucucagugucaaugcagcccc

SEQ ID NO: 1936085 - RNA, 22 nt, Human
ucucagugguuaagauuccuaa

SEQ ID NO: 1936086 - RNA, 19 nt, Human
ucucuaguuugauuaaauu

SEQ ID NO: 1936087 - RNA, 18 nt, Human
ucucuaguuugauuaaau

SEQ ID NO: 1936088 - RNA, 21 nt, Human
ucucuacugucucaguuuaca

SEQ ID NO: 1936089 - RNA, 13 nt, Human
ucucuacucugcu

SEQ ID NO: 1936090 - RNA, 18 nt, Human
ucucuacagguuugggua

SEQ ID NO: 1936091 - RNA, 13 nt, Human
ucuccuguaccuc

SEQ ID NO: 1936092 - RNA, 15 nt, Human
ucucuacaaaaagca

SEQ ID NO: 1936093 - RNA, 13 nt, Human
ucucugaggacac

SEQ ID NO: 1936094 - RNA, 18 nt, Human
ucucugaggaagcugggg

SEQ ID NO: 1936095 - RNA, 11 nt, Human
ucucugaaccc

SEQ ID NO: 1936096 - RNA, 15 nt, Human
ucucucgugaguaua

SEQ ID NO: 1936097 - RNA, 22 nt, Human
ucuaguacuugggagaccugua

SEQ ID NO: 1936098 - RNA, 18 nt, Human
ucuaggguuauugcauuu

SEQ ID NO: 1936099 - RNA, 14 nt, Human
ucucaaacuccuga

SEQ ID NO: 1936100 - RNA, 21 nt, Human
ucucaaacucuugaccucagg

SEQ ID NO: 1936101 - RNA, 13 nt, Human
ucucaaacucuug

SEQ ID NO: 1936102 - RNA, 22 nt, Human
ucucaaacucuugaccucaggu

SEQ ID NO: 1936103 - RNA, 17 nt, Human
ucucaaagaaauuucca

SEQ ID NO: 1936104 - RNA, 17 nt, Human
ucucacucugucgccca

SEQ ID NO: 1936105 - RNA, 22 nt, Human
ucucacucugucgcccagucug

SEQ ID NO: 1936106 - RNA, 18 nt, Human
ucucacucugucgcccag

SEQ ID NO: 1936107 - RNA, 21 nt, Human
ucucacuguugcccaggcugg

SEQ ID NO: 1936108 - RNA, 20 nt, Human
ucucacuguugcccaggcug

SEQ ID NO: 1936109 - RNA, 19 nt, Human
ucucacuguugcccaggcu

SEQ ID NO: 1936110 - RNA, 18 nt, Human
ucucacuguugcccaggc

SEQ ID NO: 1936111 - RNA, 17 nt, Human
ucucagaaucucaaaua

SEQ ID NO: 1936112 - RNA, 21 nt, Human
ucucagaaucucaaauaacua

SEQ ID NO: 1936113 - RNA, 22 nt, Human
ucuaaaucuccaaaauaaaacu

SEQ ID NO: 1936114 - RNA, 16 nt, Human
ucuaaauucuuucauu

SEQ ID NO: 1936115 - RNA, 23 nt, Human
ucuaaaugggaaaguauucugua

SEQ ID NO: 1936116 - RNA, 16 nt, Human
ucuaacuucaccauau

SEQ ID NO: 1936117 - RNA, 15 nt, Human
ucuaacuucaccaua

SEQ ID NO: 1936118 - RNA, 22 nt, Human
ucuaacuucaccauauuaccac

SEQ ID NO: 1936119 - RNA, 22 nt, Human
ucuacugaggugcuauguucuu

SEQ ID NO: 1936120 - RNA, 22 nt, Human
ucuagggaaaaaccagcgugug

SEQ ID NO: 1936121 - RNA, 21 nt, Human
ucuacacugugcugagucuga

SEQ ID NO: 1936122 - RNA, 15 nt, Human
ucuacacugugcuga

SEQ ID NO: 1936123 - RNA, 18 nt, Human
ucuacugaggugcuaugu

SEQ ID NO: 1936124 - RNA, 19 nt, Human
ucuacugaggugcuauguu

SEQ ID NO: 1936125 - RNA, 12 nt, Human
ucuacacugugc

SEQ ID NO: 1936126 - RNA, 14 nt, Human
ucuacacugugcug

SEQ ID NO: 1936127 - RNA, 17 nt, Human
ucuacacuccagugaga

SEQ ID NO: 1936128 - RNA, 23 nt, Human
uccuguaguugcguggacucugc

SEQ ID NO: 1936129 - RNA, 22 nt, Human
uccuguaguugcguggacucug

SEQ ID NO: 1936130 - RNA, 21 nt, Human
uccuguaguugcguggacucu

SEQ ID NO: 1936131 - RNA, 15 nt, Human
uccugguguggaaga

SEQ ID NO: 1936132 - RNA, 10 nt, Human
ucccucccuu

SEQ ID NO: 1936133 - RNA, 22 nt, Human
uccuggcaugggaaugaauguc

SEQ ID NO: 1936134 - RNA, 17 nt, Human
uccuggcccacugcauc

SEQ ID NO: 1936135 - RNA, 17 nt, Human
uccuggcaguuuaaaaa

SEQ ID NO: 1936136 - RNA, 20 nt, Human
uccuggcaguuuaaaaaaau

SEQ ID NO: 1936137 - RNA, 11 nt, Human
uccuggccauc

SEQ ID NO: 1936138 - RNA, 14 nt, Human
uccuggccauccca

SEQ ID NO: 1936139 - RNA, 20 nt, Human
uccuggccaucccacaagug

SEQ ID NO: 1936140 - RNA, 15 nt, Human
uccuggccaucccac

SEQ ID NO: 1936141 - RNA, 16 nt, Human
uccuggccaucccaca

SEQ ID NO: 1936142 - RNA, 19 nt, Human
uccuucuguccuacucugu

SEQ ID NO: 1936143 - RNA, 12 nt, Human
uccuucuguccu

SEQ ID NO: 1936144 - RNA, 14 nt, Human
uccuuaccagcaga

SEQ ID NO: 1936145 - RNA, 17 nt, Human
uccuuaauccagcugau

SEQ ID NO: 1936146 - RNA, 15 nt, Human
ucgaguuacagacaa

SEQ ID NO: 1936147 - RNA, 17 nt, Human
ucgaguuacagacaaag

SEQ ID NO: 1936148 - RNA, 22 nt, Human
uccuuuuuuguuccuuuuuccu

SEQ ID NO: 1936149 - RNA, 14 nt, Human
uccuuuuuuaaaag

SEQ ID NO: 1936150 - RNA, 21 nt, Human
uccuuuuuuuccaucuuuaca

SEQ ID NO: 1936151 - RNA, 15 nt, Human
ucgauuucuccagga

SEQ ID NO: 1936152 - RNA, 19 nt, Human
ucgcccaggcuggagugca

SEQ ID NO: 1936153 - RNA, 18 nt, Human
ucggaacugcaugcugcu

SEQ ID NO: 1936154 - RNA, 22 nt, Human
ucggaacugcaugcugcuggac

SEQ ID NO: 1936155 - RNA, 19 nt, Human
ucggaacccaagcuuagaa

SEQ ID NO: 1936156 - RNA, 20 nt, Human
ucggaacccaagcuuagaac

SEQ ID NO: 1936157 - RNA, 21 nt, Human
ugaacucuuaaucaaauagca

SEQ ID NO: 1936158 - RNA, 18 nt, Human
ugaacucuucaaucucuu

SEQ ID NO: 1936159 - RNA, 14 nt, Human
ugaacugaacacca

SEQ ID NO: 1936160 - RNA, 13 nt, Human
ugaacugaacacc

SEQ ID NO: 1936161 - RNA, 12 nt, Human
ugaacugaacac

SEQ ID NO: 1936162 - RNA, 22 nt, Human
ugaaccacaucuugcucugcug

SEQ ID NO: 1936163 - RNA, 15 nt, Human
ugaacucuucaaucu

SEQ ID NO: 1936164 - RNA, 21 nt, Human
ugaaccacaucuugcucugcu

SEQ ID NO: 1936165 - RNA, 20 nt, Human
ugaaccacaucuugcucugc

SEQ ID NO: 1936166 - RNA, 15 nt, Human
ugaacugauaaagau

SEQ ID NO: 1936167 - RNA, 16 nt, Human
ugaacugagcuuggaa

SEQ ID NO: 1936168 - RNA, 22 nt, Human
ugaacugaacaccauugaaggc

SEQ ID NO: 1936169 - RNA, 13 nt, Human
ugaacugauaaag

SEQ ID NO: 1936170 - RNA, 15 nt, Human
ugaacugagcuugga

SEQ ID NO: 1936171 - RNA, 12 nt, Human
ugaacugagcuu

SEQ ID NO: 1936172 - RNA, 19 nt, Human
ugaaauggacuuuuguaca

SEQ ID NO: 1936173 - RNA, 19 nt, Human
ugaacacaaacuguaaaua

SEQ ID NO: 1936174 - RNA, 20 nt, Human
ugaacaccauugaaggcuua

SEQ ID NO: 1936175 - RNA, 17 nt, Human
ugaacaccauugaaggc

SEQ ID NO: 1936176 - RNA, 17 nt, Human
ugaacauugcaauagaa

SEQ ID NO: 1936177 - RNA, 15 nt, Human
ugaacauugcaauag

SEQ ID NO: 1936178 - RNA, 14 nt, Human
ugaacauuccagag

SEQ ID NO: 1936179 - RNA, 13 nt, Human
ugaacauuccaga

SEQ ID NO: 1936180 - RNA, 17 nt, Human
ugaacagacugaccuug

SEQ ID NO: 1936181 - RNA, 18 nt, Human
ugaacagacugaccuuga

SEQ ID NO: 1936182 - RNA, 11 nt, Human
ugaaggcuggc

SEQ ID NO: 1936183 - RNA, 12 nt, Human
ugaaggcuggca

SEQ ID NO: 1936184 - RNA, 13 nt, Human
ugaaggcuggcau

SEQ ID NO: 1936185 - RNA, 16 nt, Human
ugaaggcuggcaugau

SEQ ID NO: 1936186 - RNA, 21 nt, Human
ugaaggcucgagcaugccugg

SEQ ID NO: 1936187 - RNA, 20 nt, Human
ugaaggcucgagcaugccug

SEQ ID NO: 1936188 - RNA, 16 nt, Human
ugaaggcaaaauugca

SEQ ID NO: 1936189 - RNA, 17 nt, Human
ugaaggcaaaauugcaa

SEQ ID NO: 1936190 - RNA, 14 nt, Human
ugaaggcaaaauug

SEQ ID NO: 1936191 - RNA, 22 nt, Human
ugaaggagaggcaacauccaaa

SEQ ID NO: 1936192 - RNA, 22 nt, Human
ugaacuuguaaaggaauuuaaa

SEQ ID NO: 1936193 - RNA, 14 nt, Human
ugaagacagagcua

SEQ ID NO: 1936194 - RNA, 16 nt, Human
ugaagacagagcuaca

SEQ ID NO: 1936195 - RNA, 19 nt, Human
ugaacuggguacuugugga

SEQ ID NO: 1936196 - RNA, 14 nt, Human
ugaacuuggcgcug

SEQ ID NO: 1936197 - RNA, 12 nt, Human
ugaacuugguuc

SEQ ID NO: 1936198 - RNA, 23 nt, Human
ugaacuggguacuuguggacaca

SEQ ID NO: 1936199 - RNA, 14 nt, Human
ugaagacuuuucuu

SEQ ID NO: 1936200 - RNA, 18 nt, Human
ugaagacuggaagcuaau

SEQ ID NO: 1936201 - RNA, 17 nt, Human
ugaagacuuuucuuuca

SEQ ID NO: 1936202 - RNA, 22 nt, Human
ugaagacuuuucuuucagccaa

SEQ ID NO: 1936203 - RNA, 16 nt, Human
ugaagaggaugcugug

SEQ ID NO: 1936204 - RNA, 21 nt, Human
ucuuucaauaaacuaaagaaa

SEQ ID NO: 1936205 - RNA, 20 nt, Human
ucuuucaauaaacuaaagaa

SEQ ID NO: 1936206 - RNA, 19 nt, Human
ucuuucaauaaacuaaaga

SEQ ID NO: 1936207 - RNA, 15 nt, Human
ucuuucacaaaaaag

SEQ ID NO: 1936208 - RNA, 19 nt, Human
ucuuuucuggaauguaauc

SEQ ID NO: 1936209 - RNA, 21 nt, Human
ucuuuucucccuuuuaauccu

SEQ ID NO: 1936210 - RNA, 20 nt, Human
ucuuuucuugccucuguccc

SEQ ID NO: 1936211 - RNA, 16 nt, Human
ucuuuucuugccucug

SEQ ID NO: 1936212 - RNA, 19 nt, Human
ucuuuugccguuauuaaaa

SEQ ID NO: 1936213 - RNA, 17 nt, Human
ucuuuugccguuauuaa

SEQ ID NO: 1936214 - RNA, 16 nt, Human
ucuuuuuauacuauua

SEQ ID NO: 1936215 - RNA, 16 nt, Human
ucuuuugauuauguuu

SEQ ID NO: 1936216 - RNA, 16 nt, Human
ucuuuuugcuuugcuu

SEQ ID NO: 1936217 - RNA, 15 nt, Human
ucuuuuuauugaauc

SEQ ID NO: 1936218 - RNA, 15 nt, Human
ucuuuuguaauuuaa

SEQ ID NO: 1936219 - RNA, 13 nt, Human
ucuuuuuauugaa

SEQ ID NO: 1936220 - RNA, 14 nt, Human
ucuuuuuauugaau

SEQ ID NO: 1936221 - RNA, 15 nt, Human
ugaaaagaaaaauga

SEQ ID NO: 1936222 - RNA, 19 nt, Human
ugaaaacuuuaugcuaagu

SEQ ID NO: 1936223 - RNA, 12 nt, Human
ugaaaggaaaga

SEQ ID NO: 1936224 - RNA, 11 nt, Human
ugaaagcugug

SEQ ID NO: 1936225 - RNA, 13 nt, Human
ugaaagauucaau

SEQ ID NO: 1936226 - RNA, 17 nt, Human
ugaaaggaaagaggcuc

SEQ ID NO: 1936227 - RNA, 23 nt, Human
ugaaagcagggacuugaacccau

SEQ ID NO: 1936228 - RNA, 19 nt, Human
ugaaagcagggacuugaac

SEQ ID NO: 1936229 - RNA, 18 nt, Human
ugaaagcagggacuugaa

SEQ ID NO: 1936230 - RNA, 18 nt, Human
ugaaacccugucucuacu

SEQ ID NO: 1936231 - RNA, 22 nt, Human
ugaaaagaggugugcaagagag

SEQ ID NO: 1936232 - RNA, 13 nt, Human
ugaaaagaggugu

SEQ ID NO: 1936233 - RNA, 18 nt, Human
ugaaagggcccagagagg

SEQ ID NO: 1936234 - RNA, 17 nt, Human
ugaaagggcccagagag

SEQ ID NO: 1936235 - RNA, 16 nt, Human
ugaaagggcccagaga

SEQ ID NO: 1936236 - RNA, 15 nt, Human
ugaaagggcccagag

SEQ ID NO: 1936237 - RNA, 15 nt, Human
ugaaaucauucauuu

SEQ ID NO: 1936238 - RNA, 17 nt, Human
ugaaaucuuuuugcuuu

SEQ ID NO: 1936239 - RNA, 20 nt, Human
ugaaaugaggucagagccug

SEQ ID NO: 1936240 - RNA, 19 nt, Human
ugaaaugaggucagagccu

SEQ ID NO: 1936241 - RNA, 22 nt, Human
ugaaaugaggucagagccugca

SEQ ID NO: 1936242 - RNA, 21 nt, Human
ugaaaugaggucagagccugc

SEQ ID NO: 1936243 - RNA, 23 nt, Human
ugaaaugaggucagagccugcag

SEQ ID NO: 1936244 - RNA, 19 nt, Human
ugaaaugcagagucaauga

SEQ ID NO: 1936245 - RNA, 22 nt, Human
ucugcacaugucuuguacaugu

SEQ ID NO: 1936246 - RNA, 21 nt, Human
ucugcacaugucuuguacaug

SEQ ID NO: 1936247 - RNA, 23 nt, Human
ucuggagcccacuguacuugcuc

SEQ ID NO: 1936248 - RNA, 21 nt, Human
ucuggagaccagggagccuuu

SEQ ID NO: 1936249 - RNA, 15 nt, Human
ucuggagaccaggga

SEQ ID NO: 1936250 - RNA, 19 nt, Human
ucuggagaccagggagccu

SEQ ID NO: 1936251 - RNA, 20 nt, Human
ucuggagaccagggagccuu

SEQ ID NO: 1936252 - RNA, 17 nt, Human
ucuggcuaugcauuuga

SEQ ID NO: 1936253 - RNA, 14 nt, Human
ucuggcuaugcauu

SEQ ID NO: 1936254 - RNA, 23 nt, Human
ucuguacagagcccacgccccca

SEQ ID NO: 1936255 - RNA, 12 nt, Human
ucugggacacag

SEQ ID NO: 1936256 - RNA, 13 nt, Human
ucugggacacagu

SEQ ID NO: 1936257 - RNA, 17 nt, Human
ucuggcucuuccaggcu

SEQ ID NO: 1936258 - RNA, 15 nt, Human
ucuggcucuuccagg

SEQ ID NO: 1936259 - RNA, 16 nt, Human
ucuggcucuuccaggc

SEQ ID NO: 1936260 - RNA, 22 nt, Human
ucuguggguuucuaaagcugcc

SEQ ID NO: 1936261 - RNA, 19 nt, Human
ucuguccgagcuuugaaaa

SEQ ID NO: 1936262 - RNA, 17 nt, Human
ucuguacgucugacagg

SEQ ID NO: 1936263 - RNA, 23 nt, Human
ucuguggguuucuaaagcugcca

SEQ ID NO: 1936264 - RNA, 22 nt, Human
ucugugucagguggggcagcuu

SEQ ID NO: 1936265 - RNA, 13 nt, Human
ucugugucugugu

SEQ ID NO: 1936266 - RNA, 15 nt, Human
ucugugucuguguuu

SEQ ID NO: 1936267 - RNA, 16 nt, Human
ucugugucugaguggc

SEQ ID NO: 1936268 - RNA, 12 nt, Human
ucugugucugug

SEQ ID NO: 1936269 - RNA, 21 nt, Human
ucuguguguguguaugugggg

SEQ ID NO: 1936270 - RNA, 19 nt, Human
ucuguguguguguaugugg

SEQ ID NO: 1936271 - RNA, 18 nt, Human
ucuguguguguguaugug

SEQ ID NO: 1936272 - RNA, 15 nt, Human
ucuguguguguguau

SEQ ID NO: 1936273 - RNA, 18 nt, Human
ucuuaaaaaguggaaaaa

SEQ ID NO: 1936274 - RNA, 13 nt, Human
ucuguguuuuaau

SEQ ID NO: 1936275 - RNA, 20 nt, Human
ucuguguguuuaugugugug

SEQ ID NO: 1936276 - RNA, 19 nt, Human
ucuguguguuuaugugugu

SEQ ID NO: 1936277 - RNA, 22 nt, Human
ucuguguguguguauguggggg

SEQ ID NO: 1936278 - RNA, 16 nt, Human
ucuguguguuuaugug

SEQ ID NO: 1936279 - RNA, 15 nt, Human
ucuguguguuuaugu

SEQ ID NO: 1936280 - RNA, 14 nt, Human
ucuugugacuagug

SEQ ID NO: 1936281 - RNA, 11 nt, Human
ucuugugacua

SEQ ID NO: 1936282 - RNA, 14 nt, Human
ucuugucucugggc

SEQ ID NO: 1936283 - RNA, 15 nt, Human
ucuugucucugggcu

SEQ ID NO: 1936284 - RNA, 12 nt, Human
ucuugucucugg

SEQ ID NO: 1936285 - RNA, 13 nt, Human
ucuugucucuggg

SEQ ID NO: 1936286 - RNA, 22 nt, Human
ucuugugacuagugcugaagcu

SEQ ID NO: 1936287 - RNA, 21 nt, Human
ucuugugacuagugcugaagc

SEQ ID NO: 1936288 - RNA, 19 nt, Human
ucuugugacuagugcugaa

SEQ ID NO: 1936289 - RNA, 18 nt, Human
ucuugugacuagugcuga

SEQ ID NO: 1936290 - RNA, 16 nt, Human
ucuugugacuagugcu

SEQ ID NO: 1936291 - RNA, 11 nt, Human
ucuugcucugc

SEQ ID NO: 1936292 - RNA, 13 nt, Human
ucuugcucugcug

SEQ ID NO: 1936293 - RNA, 12 nt, Human
ucuugcucugcu

SEQ ID NO: 1936294 - RNA, 22 nt, Human
ucuuguauuaaguuguuaauaa

SEQ ID NO: 1936295 - RNA, 18 nt, Human
ucuuguauuaaguuguua

SEQ ID NO: 1936296 - RNA, 16 nt, Human
ucuuguauuaaguugu

SEQ ID NO: 1936297 - RNA, 12 nt, Human
ucuucuccaggc

SEQ ID NO: 1936298 - RNA, 14 nt, Human
ucuucuccaggcug

SEQ ID NO: 1936299 - RNA, 13 nt, Human
ucuucuccaggcu

SEQ ID NO: 1936300 - RNA, 18 nt, Human
ucuugaacuccuggccuc

SEQ ID NO: 1936301 - RNA, 17 nt, Human
ucuugaacuccuggccu

SEQ ID NO: 1936302 - RNA, 16 nt, Human
ucuugaacuccuggcc

SEQ ID NO: 1936303 - RNA, 15 nt, Human
ucuucuccaggcugu

SEQ ID NO: 1936304 - RNA, 21 nt, Human
ucuugaauuguaaggaaugau

SEQ ID NO: 1936305 - RNA, 15 nt, Human
ucuugaacugagcuu

SEQ ID NO: 1936306 - RNA, 21 nt, Human
ucuugccucuguccccuucuc

SEQ ID NO: 1936307 - RNA, 16 nt, Human
ucuugccucugucccc

SEQ ID NO: 1936308 - RNA, 22 nt, Human
ucuugccucuguccccuucucu

SEQ ID NO: 1936309 - RNA, 20 nt, Human
ucuugacgagugugaagcuu

SEQ ID NO: 1936310 - RNA, 14 nt, Human
ucuucucagccacu

SEQ ID NO: 1936311 - RNA, 17 nt, Human
ucuucuagguucuaaaa

SEQ ID NO: 1936312 - RNA, 19 nt, Human
ucuucuccacuuucuagcc

SEQ ID NO: 1936313 - RNA, 21 nt, Human
ucuucuccacuuucuagccag

SEQ ID NO: 1936314 - RNA, 21 nt, Human
ucuuccacaagagcccaggcc

SEQ ID NO: 1936315 - RNA, 16 nt, Human
ucuucaguaagccgug

SEQ ID NO: 1936316 - RNA, 14 nt, Human
ucuuccaggcuggg

SEQ ID NO: 1936317 - RNA, 13 nt, Human
ucuucuaaacuuc

SEQ ID NO: 1936318 - RNA, 22 nt, Human
ucuucuaaacuuccccaucuuc

SEQ ID NO: 1936319 - RNA, 14 nt, Human
ucuuagugugugca

SEQ ID NO: 1936320 - RNA, 16 nt, Human
ucuuaguggauguucu

SEQ ID NO: 1936321 - RNA, 15 nt, Human
ucuuauacauuugau

SEQ ID NO: 1936322 - RNA, 14 nt, Human
ucuuauacauuuga

SEQ ID NO: 1936323 - RNA, 13 nt, Human
ucuuaugggcugg

SEQ ID NO: 1936324 - RNA, 15 nt, Human
ucuucaguaagccgu

SEQ ID NO: 1936325 - RNA, 14 nt, Human
ucuuauggaauuga

SEQ ID NO: 1936326 - RNA, 15 nt, Human
ucuuauggaauugau

SEQ ID NO: 1936327 - RNA, 17 nt, Human
ucuuauggaauugauuu

SEQ ID NO: 1936328 - RNA, 18 nt, Human
ucuuauggaauugauuug

SEQ ID NO: 1936329 - RNA, 21 nt, Human
ucuuauggaauugauuugcau

SEQ ID NO: 1936330 - RNA, 22 nt, Human
ucuuauggaauugauuugcauu

SEQ ID NO: 1936331 - RNA, 19 nt, Human
ucuuauagaauauuuauua

SEQ ID NO: 1936332 - RNA, 20 nt, Human
ucuuauagaauauuuauuac

SEQ ID NO: 1936333 - RNA, 22 nt, Human
ugcguggacucugcacaugucu

SEQ ID NO: 1936334 - RNA, 18 nt, Human
ugcguggacucugcacau

SEQ ID NO: 1936335 - RNA, 23 nt, Human
ugcgugguguggagugugugucu

SEQ ID NO: 1936336 - RNA, 18 nt, Human
ugcuagaacucccuuuca

SEQ ID NO: 1936337 - RNA, 19 nt, Human
ugcuagaacucccuuucaa

SEQ ID NO: 1936338 - RNA, 17 nt, Human
ugcguggacucugcaca

SEQ ID NO: 1936339 - RNA, 16 nt, Human
ugcguggacucugcac

SEQ ID NO: 1936340 - RNA, 15 nt, Human
ugcgugcauaccacu

SEQ ID NO: 1936341 - RNA, 20 nt, Human
ugcgucauuacagggcacag

SEQ ID NO: 1936342 - RNA, 16 nt, Human
ugcuaggaacacuccu

SEQ ID NO: 1936343 - RNA, 20 nt, Human
ugcuagccggccacuuugga

SEQ ID NO: 1936344 - RNA, 17 nt, Human
ugcuaggaacacuccuu

SEQ ID NO: 1936345 - RNA, 19 nt, Human
ugcuaggaacacuccuuca

SEQ ID NO: 1936346 - RNA, 21 nt, Human
ugcuagaacucccuuucaaca

SEQ ID NO: 1936347 - RNA, 20 nt, Human
ugcuagaacucccuuucaac

SEQ ID NO: 1936348 - RNA, 12 nt, Human
ugcuagcacaug

SEQ ID NO: 1936349 - RNA, 16 nt, Human
ugcuagcacaugcccu

SEQ ID NO: 1936350 - RNA, 19 nt, Human
ugcuccucuccccagcaag

SEQ ID NO: 1936351 - RNA, 14 nt, Human
ugcucaggagcccu

SEQ ID NO: 1936352 - RNA, 21 nt, Human
ugcucagcuucuccuguguga

SEQ ID NO: 1936353 - RNA, 20 nt, Human
ugcucaggagaccuggagga

SEQ ID NO: 1936354 - RNA, 18 nt, Human
ugcucagcucugggccau

SEQ ID NO: 1936355 - RNA, 20 nt, Human
ugcucagcucugggccauuc

SEQ ID NO: 1936356 - RNA, 15 nt, Human
ugcucagcuucuccu

SEQ ID NO: 1936357 - RNA, 20 nt, Human
ugcucagcuucuccugugug

SEQ ID NO: 1936358 - RNA, 12 nt, Human
ugcucagcuucu

SEQ ID NO: 1936359 - RNA, 21 nt, Human
ugcugaugaacucuuaaucaa

SEQ ID NO: 1936360 - RNA, 15 nt, Human
ugcugaguugguguu

SEQ ID NO: 1936361 - RNA, 19 nt, Human
ugcugacagacacaggccc

SEQ ID NO: 1936362 - RNA, 16 nt, Human
ugcugacagacacagg

SEQ ID NO: 1936363 - RNA, 15 nt, Human
ugcugacagacacag

SEQ ID NO: 1936364 - RNA, 15 nt, Human
ugcugcaguugccag

SEQ ID NO: 1936365 - RNA, 16 nt, Human
ugcugcaguugccagu

SEQ ID NO: 1936366 - RNA, 21 nt, Human
ugcugcaggacuugagaagac

SEQ ID NO: 1936367 - RNA, 20 nt, Human
ugcugauggugcaaugaccu

SEQ ID NO: 1936368 - RNA, 23 nt, Human
ugcugauggugcaaugaccuuuc

SEQ ID NO: 1936369 - RNA, 17 nt, Human
ugcugaaugguuuucaa

SEQ ID NO: 1936370 - RNA, 18 nt, Human
ugcugaaugguuuucaaa

SEQ ID NO: 1936371 - RNA, 22 nt, Human
ugcugaaugguuuucaaaauaa

SEQ ID NO: 1936372 - RNA, 18 nt, Human
ugcugaauacagaggcaa

SEQ ID NO: 1936373 - RNA, 23 nt, Human
ugcugaauacagaggcaacugca

SEQ ID NO: 1936374 - RNA, 19 nt, Human
ugcuccuggcccacugcau

SEQ ID NO: 1936375 - RNA, 14 nt, Human
ugcuccuuguuccu

SEQ ID NO: 1936376 - RNA, 15 nt, Human
ugcuccuuguuccua

SEQ ID NO: 1936377 - RNA, 16 nt, Human
ugcuccuuguuccuag

SEQ ID NO: 1936378 - RNA, 16 nt, Human
ugccuggccuggcaca

SEQ ID NO: 1936379 - RNA, 20 nt, Human
ugccuggccuggcacacauc

SEQ ID NO: 1936380 - RNA, 17 nt, Human
ugccuggccuggcacac

SEQ ID NO: 1936381 - RNA, 18 nt, Human
ugccuuauggaacacucu

SEQ ID NO: 1936382 - RNA, 20 nt, Human
ugccuuauggaacacucuga

SEQ ID NO: 1936383 - RNA, 21 nt, Human
ugccuuauggaacacucugag

SEQ ID NO: 1936384 - RNA, 22 nt, Human
ugccuuauggaacacucugaga

SEQ ID NO: 1936385 - RNA, 22 nt, Human
ugccuggccuggcacacaucag

SEQ ID NO: 1936386 - RNA, 13 nt, Human
ugcgccuacagga

SEQ ID NO: 1936387 - RNA, 23 nt, Human
ugcggugcuaucucccccagccc

SEQ ID NO: 1936388 - RNA, 17 nt, Human
ugcgcccaguccuucca

SEQ ID NO: 1936389 - RNA, 18 nt, Human
ugcgcccaguccuuccac

SEQ ID NO: 1936390 - RNA, 15 nt, Human
ugccuagaggcccca

SEQ ID NO: 1936391 - RNA, 17 nt, Human
ugccuccccucuccuuc

SEQ ID NO: 1936392 - RNA, 23 nt, Human
ugcccaggcuggcgugcaguggu

SEQ ID NO: 1936393 - RNA, 11 nt, Human
ugcccagcccc

SEQ ID NO: 1936394 - RNA, 16 nt, Human
ugccuccuuugugagg

SEQ ID NO: 1936395 - RNA, 18 nt, Human
ugccuccccucuccuucc

SEQ ID NO: 1936396 - RNA, 17 nt, Human
ugccuccuuugugagga

SEQ ID NO: 1936397 - RNA, 18 nt, Human
ugccuccuuugugaggaa

SEQ ID NO: 1936398 - RNA, 14 nt, Human
ugccucugggacug

SEQ ID NO: 1936399 - RNA, 15 nt, Human
ugccucuguccccuu

SEQ ID NO: 1936400 - RNA, 14 nt, Human
ugccucuguccccu

SEQ ID NO: 1936401 - RNA, 13 nt, Human
ugccucugucccc

SEQ ID NO: 1936402 - RNA, 21 nt, Human
ugccucuguccccuucucuca

SEQ ID NO: 1936403 - RNA, 20 nt, Human
ugccucuguccccuucucuc

SEQ ID NO: 1936404 - RNA, 17 nt, Human
ugccucuguccccuucu

SEQ ID NO: 1936405 - RNA, 16 nt, Human
ugccucuguccccuuc

SEQ ID NO: 1936406 - RNA, 17 nt, Human
ugccugaagucacacag

SEQ ID NO: 1936407 - RNA, 18 nt, Human
ugccugaagucacacagu

SEQ ID NO: 1936408 - RNA, 22 nt, Human
ugccugaagucacacagugagu

SEQ ID NO: 1936409 - RNA, 19 nt, Human
ugcauuuuuuaaaacaaga

SEQ ID NO: 1936410 - RNA, 17 nt, Human
ugcauuuuuuaaaacaa

SEQ ID NO: 1936411 - RNA, 15 nt, Human
ugcauuuuuuaaaac

SEQ ID NO: 1936412 - RNA, 20 nt, Human
ugccaaaaaaagacagggcu

SEQ ID NO: 1936413 - RNA, 17 nt, Human
ugccaaccuauuuugaa

SEQ ID NO: 1936414 - RNA, 19 nt, Human
ugcauguuacauaagauaa

SEQ ID NO: 1936415 - RNA, 13 nt, Human
ugcauuaaauuca

SEQ ID NO: 1936416 - RNA, 14 nt, Human
ugcauuaaauucac

SEQ ID NO: 1936417 - RNA, 15 nt, Human
ugcauuaaauucaca

SEQ ID NO: 1936418 - RNA, 16 nt, Human
ugcauuaaauucacaa

SEQ ID NO: 1936419 - RNA, 17 nt, Human
ugcauuaaauucacaaa

SEQ ID NO: 1936420 - RNA, 19 nt, Human
ugcauuaaauucacaaacu

SEQ ID NO: 1936421 - RNA, 20 nt, Human
ugcauuaaauucacaaacuu

SEQ ID NO: 1936422 - RNA, 21 nt, Human
ugcauuaaauucacaaacuuu

SEQ ID NO: 1936423 - RNA, 16 nt, Human
ugcaggcagccaggcc

SEQ ID NO: 1936424 - RNA, 13 nt, Human
ugcaggacuugag

SEQ ID NO: 1936425 - RNA, 15 nt, Human
ugcaggacuugagaa

SEQ ID NO: 1936426 - RNA, 18 nt, Human
ugcaggacuugagaagac

SEQ ID NO: 1936427 - RNA, 17 nt, Human
ugcaggcagccaggcca

SEQ ID NO: 1936428 - RNA, 18 nt, Human
ugcaggcagccaggccac

SEQ ID NO: 1936429 - RNA, 19 nt, Human
ugcaggcagccaggccaca

SEQ ID NO: 1936430 - RNA, 17 nt, Human
ugcaucguuucaucuuc

SEQ ID NO: 1936431 - RNA, 15 nt, Human
ugcaucguuucaucu

SEQ ID NO: 1936432 - RNA, 24 nt, Human
ugccagguuuuuggucugacccac

SEQ ID NO: 1936433 - RNA, 14 nt, Human
ugccaguaaaaaaa

SEQ ID NO: 1936434 - RNA, 22 nt, Human
ugccaguaaaaaaaaaaaaugg

SEQ ID NO: 1936435 - RNA, 14 nt, Human
ugccagucaccccg

SEQ ID NO: 1936436 - RNA, 11 nt, Human
ugccagggaca

SEQ ID NO: 1936437 - RNA, 22 nt, Human
ugccagggacagaggggguggc

SEQ ID NO: 1936438 - RNA, 17 nt, Human
ugccagggcaaugauga

SEQ ID NO: 1936439 - RNA, 22 nt, Human
ugccagggcaaugaugaaugag

SEQ ID NO: 1936440 - RNA, 17 nt, Human
ugccacccaccucccug

SEQ ID NO: 1936441 - RNA, 18 nt, Human
ugccacccaccucccugc

SEQ ID NO: 1936442 - RNA, 19 nt, Human
ugccacccaccucccugcc

SEQ ID NO: 1936443 - RNA, 22 nt, Human
ugccacccaccucccugccucc

SEQ ID NO: 1936444 - RNA, 20 nt, Human
ugccacccaccucccugccu

SEQ ID NO: 1936445 - RNA, 21 nt, Human
ugccacccaccucccugccuc

SEQ ID NO: 1936446 - RNA, 20 nt, Human
ugccaucucaccuccugcug

SEQ ID NO: 1936447 - RNA, 21 nt, Human
ugccaucucaccuccugcugg

SEQ ID NO: 1936448 - RNA, 22 nt, Human
ugccaucucaccuccugcuggg

SEQ ID NO: 1936449 - RNA, 23 nt, Human
ugccaucucaccuccugcugggc

SEQ ID NO: 1936450 - RNA, 20 nt, Human
ugccauggacagaagaaggc

SEQ ID NO: 1936451 - RNA, 18 nt, Human
ugccauggacagaagaag

SEQ ID NO: 1936452 - RNA, 23 nt, Human
ugccauggacagaagaaggcagc

SEQ ID NO: 1936453 - RNA, 15 nt, Human
ugcccaccuggccuc

SEQ ID NO: 1936454 - RNA, 17 nt, Human
ugcccaccuggccucug

SEQ ID NO: 1936455 - RNA, 18 nt, Human
ugcccaccuggccucugc

SEQ ID NO: 1936456 - RNA, 10 nt, Human
ugcccagccc

SEQ ID NO: 1936457 - RNA, 11 nt, Human
ugcagccagag

SEQ ID NO: 1936458 - RNA, 13 nt, Human
ugcagccagaggc

SEQ ID NO: 1936459 - RNA, 14 nt, Human
ugcagccagaggca

SEQ ID NO: 1936460 - RNA, 16 nt, Human
ugcagcaauaaagcag

SEQ ID NO: 1936461 - RNA, 15 nt, Human
ugcagcaauaaagca

SEQ ID NO: 1936462 - RNA, 14 nt, Human
ugcagcaauaaagc

SEQ ID NO: 1936463 - RNA, 18 nt, Human
ugcaggaccucaggugag

SEQ ID NO: 1936464 - RNA, 15 nt, Human
ugcaggaccucaggu

SEQ ID NO: 1936465 - RNA, 16 nt, Human
ugcaggaccucaggug

SEQ ID NO: 1936466 - RNA, 17 nt, Human
ugcaggaaauggcugug

SEQ ID NO: 1936467 - RNA, 14 nt, Human
ugcaggaccucagg

SEQ ID NO: 1936468 - RNA, 16 nt, Human
ugcacguacacacaca

SEQ ID NO: 1936469 - RNA, 19 nt, Human
ugcacguacacacacauac

SEQ ID NO: 1936470 - RNA, 16 nt, Human
ugcacuugcagacucu

SEQ ID NO: 1936471 - RNA, 21 nt, Human
ugcacuugcagacucuacaga

SEQ ID NO: 1936472 - RNA, 17 nt, Human
ugcacuugugauuauuu

SEQ ID NO: 1936473 - RNA, 20 nt, Human
ugcacuugugauuauuuauu

SEQ ID NO: 1936474 - RNA, 21 nt, Human
ugcacuugugauuauuuauua

SEQ ID NO: 1936475 - RNA, 15 nt, Human
ugcacuuuguucugg

SEQ ID NO: 1936476 - RNA, 18 nt, Human
ugcacuuuguucuggcuc

SEQ ID NO: 1936477 - RNA, 19 nt, Human
ugcacuuuguucuggcucu

SEQ ID NO: 1936478 - RNA, 20 nt, Human
ugcacuuuguucuggcucuu

SEQ ID NO: 1936479 - RNA, 17 nt, Human
ugcagauaaacaguagu

SEQ ID NO: 1936480 - RNA, 16 nt, Human
ugcagauaaacaguag

SEQ ID NO: 1936481 - RNA, 20 nt, Human
ugaaggcuggcaugauccaa

SEQ ID NO: 1936482 - RNA, 16 nt, Human
ugaaggcuggguucug

SEQ ID NO: 1936483 - RNA, 17 nt, Human
ugaagucuuuguacaga

SEQ ID NO: 1936484 - RNA, 20 nt, Human
ugaagucuuuguacagacaa

SEQ ID NO: 1936485 - RNA, 22 nt, Human
ugaagucuuuguacagacaaca

SEQ ID NO: 1936486 - RNA, 22 nt, Human
ugcacagaguuguuacauuuuu

SEQ ID NO: 1936487 - RNA, 21 nt, Human
ugcacagaguuguuacauuuu

SEQ ID NO: 1936488 - RNA, 23 nt, Human
ugcacagaguuguuacauuuuua

SEQ ID NO: 1936489 - RNA, 17 nt, Human
ugcacagcuaacaugga

SEQ ID NO: 1936490 - RNA, 18 nt, Human
ugcacauauggacucugc

SEQ ID NO: 1936491 - RNA, 17 nt, Human
ugcacauauggacucug

SEQ ID NO: 1936492 - RNA, 15 nt, Human
ugcacauauggacuc

SEQ ID NO: 1936493 - RNA, 14 nt, Human
ugcacauauggacu

SEQ ID NO: 1936494 - RNA, 19 nt, Human
ugcacauauggacucugca

SEQ ID NO: 1936495 - RNA, 15 nt, Human
ugcacaucucugcuu

SEQ ID NO: 1936496 - RNA, 14 nt, Human
ugcacaucucugcu

SEQ ID NO: 1936497 - RNA, 18 nt, Human
ugcacagcuaacauggaa

SEQ ID NO: 1936498 - RNA, 20 nt, Human
ugcacagcuaacauggaagu

SEQ ID NO: 1936499 - RNA, 23 nt, Human
ugcacagcuaacauggaaguacu

SEQ ID NO: 1936500 - RNA, 14 nt, Human
uggaauguaaucaa

SEQ ID NO: 1936501 - RNA, 17 nt, Human
uggaaucuggagaccag

SEQ ID NO: 1936502 - RNA, 18 nt, Human
uggaaucuggagaccagg

SEQ ID NO: 1936503 - RNA, 15 nt, Human
uggaauuauuuuaaa

SEQ ID NO: 1936504 - RNA, 16 nt, Human
uggaauaucuccguca

SEQ ID NO: 1936505 - RNA, 23 nt, Human
uggaagugugggucugugugugu

SEQ ID NO: 1936506 - RNA, 14 nt, Human
uggaagacagcucu

SEQ ID NO: 1936507 - RNA, 15 nt, Human
uggaagacagcucuu

SEQ ID NO: 1936508 - RNA, 21 nt, Human
uggaagugugggucugugugu

SEQ ID NO: 1936509 - RNA, 16 nt, Human
uggaauacucuuauau

SEQ ID NO: 1936510 - RNA, 12 nt, Human
uggaauacuuuu

SEQ ID NO: 1936511 - RNA, 13 nt, Human
uggaauacuuuuu

SEQ ID NO: 1936512 - RNA, 18 nt, Human
uggaauacuuuuuguuau

SEQ ID NO: 1936513 - RNA, 15 nt, Human
uggaaccaggcuugg

SEQ ID NO: 1936514 - RNA, 12 nt, Human
uggaacccagac

SEQ ID NO: 1936515 - RNA, 14 nt, Human
uggaacccagacuc

SEQ ID NO: 1936516 - RNA, 15 nt, Human
uggaacccagacuca

SEQ ID NO: 1936517 - RNA, 22 nt, Human
uggaacccagacucagacauug

SEQ ID NO: 1936518 - RNA, 16 nt, Human
uggaacccagacucag

SEQ ID NO: 1936519 - RNA, 17 nt, Human
uggaacccagacucaga

SEQ ID NO: 1936520 - RNA, 15 nt, Human
uggaaaauaaauuau

SEQ ID NO: 1936521 - RNA, 16 nt, Human
uggaaaauaaauuauu

SEQ ID NO: 1936522 - RNA, 20 nt, Human
uggaaaaaccacccccaaau

SEQ ID NO: 1936523 - RNA, 17 nt, Human
uggaaaaaaaaaagaca

SEQ ID NO: 1936524 - RNA, 16 nt, Human
uggaaaaaaaaaagac

SEQ ID NO: 1936525 - RNA, 14 nt, Human
uggaacucucgagc

SEQ ID NO: 1936526 - RNA, 15 nt, Human
uggaaccucagccug

SEQ ID NO: 1936527 - RNA, 16 nt, Human
uggaaccucagccugg

SEQ ID NO: 1936528 - RNA, 11 nt, Human
uggaagacagc

SEQ ID NO: 1936529 - RNA, 12 nt, Human
uggaagacagcu

SEQ ID NO: 1936530 - RNA, 16 nt, Human
uggaacuuacauuguu

SEQ ID NO: 1936531 - RNA, 17 nt, Human
ugcuugaacccaggaga

SEQ ID NO: 1936532 - RNA, 20 nt, Human
ugcuuguuaaugcuuucuga

SEQ ID NO: 1936533 - RNA, 14 nt, Human
ugcuuguuggauuu

SEQ ID NO: 1936534 - RNA, 13 nt, Human
ugcuuuaugcuga

SEQ ID NO: 1936535 - RNA, 14 nt, Human
ugcuuuccaaagcc

SEQ ID NO: 1936536 - RNA, 15 nt, Human
ugcuuuauuccagaa

SEQ ID NO: 1936537 - RNA, 17 nt, Human
ugcuuuauuccagaaug

SEQ ID NO: 1936538 - RNA, 14 nt, Human
ugcuuuauuccaga

SEQ ID NO: 1936539 - RNA, 14 nt, Human
ugcuuuaugcugaa

SEQ ID NO: 1936540 - RNA, 15 nt, Human
ugcuuuaugcugaaa

SEQ ID NO: 1936541 - RNA, 17 nt, Human
ugcuuuaugcugaaaca

SEQ ID NO: 1936542 - RNA, 16 nt, Human
ugcuucuucagagacu

SEQ ID NO: 1936543 - RNA, 12 nt, Human
ugcuucucacug

SEQ ID NO: 1936544 - RNA, 21 nt, Human
ugcuuccagugaggcucugcc

SEQ ID NO: 1936545 - RNA, 19 nt, Human
ugcuuccagugaggcucug

SEQ ID NO: 1936546 - RNA, 20 nt, Human
ugcuuccagugaggcucugc

SEQ ID NO: 1936547 - RNA, 18 nt, Human
ugcuuccagugaggcucu

SEQ ID NO: 1936548 - RNA, 23 nt, Human
uggccagagagccuggugcugcu

SEQ ID NO: 1936549 - RNA, 13 nt, Human
uggccagagagcc

SEQ ID NO: 1936550 - RNA, 12 nt, Human
uggccagacaca

SEQ ID NO: 1936551 - RNA, 13 nt, Human
uggccagacacag

SEQ ID NO: 1936552 - RNA, 18 nt, Human
uggccagacacaggcccu

SEQ ID NO: 1936553 - RNA, 20 nt, Human
uggcagugggagcugccugu

SEQ ID NO: 1936554 - RNA, 19 nt, Human
uggcagugggagcugccug

SEQ ID NO: 1936555 - RNA, 16 nt, Human
uggcagugggagcugc

SEQ ID NO: 1936556 - RNA, 15 nt, Human
uggcagugggagcug

SEQ ID NO: 1936557 - RNA, 14 nt, Human
uggcagugggagcu

SEQ ID NO: 1936558 - RNA, 14 nt, Human
uggaugccuggugg

SEQ ID NO: 1936559 - RNA, 20 nt, Human
uggaugccaauauuaaaucu

SEQ ID NO: 1936560 - RNA, 21 nt, Human
uggaugccaauauuaaaucug

SEQ ID NO: 1936561 - RNA, 14 nt, Human
uggcacugcuucca

SEQ ID NO: 1936562 - RNA, 16 nt, Human
uggcacugcuuccagu

SEQ ID NO: 1936563 - RNA, 18 nt, Human
uggcacugcuuccaguga

SEQ ID NO: 1936564 - RNA, 22 nt, Human
uggcagcugcgguccacccagg

SEQ ID NO: 1936565 - RNA, 21 nt, Human
uggcagcugcgguccacccag

SEQ ID NO: 1936566 - RNA, 23 nt, Human
uggcagcugcgguccacccagga

SEQ ID NO: 1936567 - RNA, 22 nt, Human
uggaggcaugugaugagaggaa

SEQ ID NO: 1936568 - RNA, 13 nt, Human
uggaggcacuuua

SEQ ID NO: 1936569 - RNA, 14 nt, Human
uggaggcacuuuag

SEQ ID NO: 1936570 - RNA, 12 nt, Human
uggaggcccagu

SEQ ID NO: 1936571 - RNA, 15 nt, Human
uggaggcccaguuca

SEQ ID NO: 1936572 - RNA, 19 nt, Human
uggauacgacaacuugcac

SEQ ID NO: 1936573 - RNA, 18 nt, Human
uggauacauacaccagca

SEQ ID NO: 1936574 - RNA, 12 nt, Human
uggagagaaaac

SEQ ID NO: 1936575 - RNA, 16 nt, Human
uggacaggcauguucu

SEQ ID NO: 1936576 - RNA, 12 nt, Human
uggacaggcaug

SEQ ID NO: 1936577 - RNA, 19 nt, Human
uggaauuauuuuaaaagau

SEQ ID NO: 1936578 - RNA, 17 nt, Human
uggaauuauuuuaaaag

SEQ ID NO: 1936579 - RNA, 16 nt, Human
uggagaggcccucugg

SEQ ID NO: 1936580 - RNA, 18 nt, Human
uggagaggcccucuggag

SEQ ID NO: 1936581 - RNA, 13 nt, Human
uggagauguuuag

SEQ ID NO: 1936582 - RNA, 17 nt, Human
uggcgccuccgagggac

SEQ ID NO: 1936583 - RNA, 15 nt, Human
uggcgcugccccugg

SEQ ID NO: 1936584 - RNA, 14 nt, Human
uggcgcugccccug

SEQ ID NO: 1936585 - RNA, 22 nt, Human
uggcgugcaguggugcgaucug

SEQ ID NO: 1936586 - RNA, 15 nt, Human
uggccagaugcacca

SEQ ID NO: 1936587 - RNA, 18 nt, Human
uggccuucggccuccauc

SEQ ID NO: 1936588 - RNA, 17 nt, Human
uggccuucggccuccau

SEQ ID NO: 1936589 - RNA, 20 nt, Human
uggccuucggccuccauccu

SEQ ID NO: 1936590 - RNA, 18 nt, Human
uggccuugggcccucugg

SEQ ID NO: 1936591 - RNA, 12 nt, Human
uggcugggggcc

SEQ ID NO: 1936592 - RNA, 16 nt, Human
uggcucuuccaggcug

SEQ ID NO: 1936593 - RNA, 13 nt, Human
uggcucuuccagg

SEQ ID NO: 1936594 - RNA, 15 nt, Human
uggcucuuccaggcu

SEQ ID NO: 1936595 - RNA, 16 nt, Human
uggcuccaaacccucg

SEQ ID NO: 1936596 - RNA, 18 nt, Human
uggcuccaaacccucgag

SEQ ID NO: 1936597 - RNA, 20 nt, Human
uggcuccaaacccucgaggc

SEQ ID NO: 1936598 - RNA, 22 nt, Human
uggcucagguggggucacucug

SEQ ID NO: 1936599 - RNA, 20 nt, Human
uggcucagguggggucacuc

SEQ ID NO: 1936600 - RNA, 15 nt, Human
uggcugggggccuca

SEQ ID NO: 1936601 - RNA, 14 nt, Human
uggcugggggccuc

SEQ ID NO: 1936602 - RNA, 22 nt, Human
uggcugguuagagguucccuuu

SEQ ID NO: 1936603 - RNA, 22 nt, Human
ugggaaugaaugucagugugac

SEQ ID NO: 1936604 - RNA, 16 nt, Human
ugggacaugggaaagg

SEQ ID NO: 1936605 - RNA, 23 nt, Human
ugggagcugccuguucagcucca

SEQ ID NO: 1936606 - RNA, 16 nt, Human
ugggagcugaggccac

SEQ ID NO: 1936607 - RNA, 21 nt, Human
ugggguggggggggugcuggg

SEQ ID NO: 1936608 - RNA, 22 nt, Human
ugggguggggggggugcugggc

SEQ ID NO: 1936609 - RNA, 13 nt, Human
ugggucaggcagg

SEQ ID NO: 1936610 - RNA, 20 nt, Human
uggguccaggauuccucuuu

SEQ ID NO: 1936611 - RNA, 19 nt, Human
ugggguggggggggugcug

SEQ ID NO: 1936612 - RNA, 17 nt, Human
ugggguggggaccucag

SEQ ID NO: 1936613 - RNA, 21 nt, Human
uggguucauccuauucuuucg

SEQ ID NO: 1936614 - RNA, 15 nt, Human
uggguuccauucuca

SEQ ID NO: 1936615 - RNA, 21 nt, Human
uggguucugccugccagcugc

SEQ ID NO: 1936616 - RNA, 22 nt, Human
uggguucugccugccagcugca

SEQ ID NO: 1936617 - RNA, 16 nt, Human
uggguucacugcaacc

SEQ ID NO: 1936618 - RNA, 23 nt, Human
uggguucaagcgauucuucugcu

SEQ ID NO: 1936619 - RNA, 14 nt, Human
uggguguggcgcag

SEQ ID NO: 1936620 - RNA, 23 nt, Human
ugggugucaagagggucugagga

SEQ ID NO: 1936621 - RNA, 21 nt, Human
ugggugucaagagggucugag

SEQ ID NO: 1936622 - RNA, 16 nt, Human
uggggcagcuugaggg

SEQ ID NO: 1936623 - RNA, 21 nt, Human
ugggcuuggggaccagagcug

SEQ ID NO: 1936624 - RNA, 20 nt, Human
ugggcuucaguggcagcugc

SEQ ID NO: 1936625 - RNA, 19 nt, Human
ugggcuuggggaccagagc

SEQ ID NO: 1936626 - RNA, 19 nt, Human
ugggcuucaguggcagcug

SEQ ID NO: 1936627 - RNA, 18 nt, Human
ugggcuucaguggcagcu

SEQ ID NO: 1936628 - RNA, 17 nt, Human
ugggcgggcaggggagg

SEQ ID NO: 1936629 - RNA, 22 nt, Human
ugggcgggcaggggagggucag

SEQ ID NO: 1936630 - RNA, 24 nt, Human
ugggagcugccuguucagcuccag

SEQ ID NO: 1936631 - RNA, 16 nt, Human
ugggagcuuuuguaga

SEQ ID NO: 1936632 - RNA, 22 nt, Human
ugggccuccugugugugcgccu

SEQ ID NO: 1936633 - RNA, 16 nt, Human
ugggccuccugugugu

SEQ ID NO: 1936634 - RNA, 14 nt, Human
ugggccuccugugu

SEQ ID NO: 1936635 - RNA, 20 nt, Human
uuaaaacaagaaaguuuccc

SEQ ID NO: 1936636 - RNA, 19 nt, Human
uuaaaacaagaaaguuucc

SEQ ID NO: 1936637 - RNA, 11 nt, Human
uuaaaacaaga

SEQ ID NO: 1936638 - RNA, 13 nt, Human
uguuuuugucuua

SEQ ID NO: 1936639 - RNA, 23 nt, Human
uguuuuaaaaugagaaaucuaaa

SEQ ID NO: 1936640 - RNA, 12 nt, Human
uguuuuguaaag

SEQ ID NO: 1936641 - RNA, 20 nt, Human
uguuuccuggcacugcuucc

SEQ ID NO: 1936642 - RNA, 21 nt, Human
uguuuccuggcacugcuucca

SEQ ID NO: 1936643 - RNA, 22 nt, Human
uguuuccuggcacugcuuccag

SEQ ID NO: 1936644 - RNA, 17 nt, Human
uguuuguugucagcuga

SEQ ID NO: 1936645 - RNA, 16 nt, Human
uguuuguugucagcug

SEQ ID NO: 1936646 - RNA, 18 nt, Human
uguuuuaaaaugagaaau

SEQ ID NO: 1936647 - RNA, 12 nt, Human
uuaaaugcugcu

SEQ ID NO: 1936648 - RNA, 19 nt, Human
uuaaauggaaacugaaacu

SEQ ID NO: 1936649 - RNA, 17 nt, Human
uuaaaugcccagccccu

SEQ ID NO: 1936650 - RNA, 13 nt, Human
uuaaaugcccagc

SEQ ID NO: 1936651 - RNA, 18 nt, Human
uuaaaugcccagccccuu

SEQ ID NO: 1936652 - RNA, 19 nt, Human
uuaaauagcuuuuuucucu

SEQ ID NO: 1936653 - RNA, 15 nt, Human
uuaaauagcuuuugu

SEQ ID NO: 1936654 - RNA, 20 nt, Human
uuaaagcuuccauuguuguc

SEQ ID NO: 1936655 - RNA, 15 nt, Human
uuaaagcuuccauug

SEQ ID NO: 1936656 - RNA, 18 nt, Human
uuaaaugcaccuggaaua

SEQ ID NO: 1936657 - RNA, 17 nt, Human
uuaaaugcaccuggaau

SEQ ID NO: 1936658 - RNA, 16 nt, Human
uuaaaugcaccuggaa

SEQ ID NO: 1936659 - RNA, 14 nt, Human
uuaaagacuuuuau

SEQ ID NO: 1936660 - RNA, 22 nt, Human
uuaaacuuaaucuaaauggaac

SEQ ID NO: 1936661 - RNA, 20 nt, Human
uuaaacuuaaucuaaaugga

SEQ ID NO: 1936662 - RNA, 14 nt, Human
uuaaagcaaaggag

SEQ ID NO: 1936663 - RNA, 18 nt, Human
uuaaacuuaaucuaaaug

SEQ ID NO: 1936664 - RNA, 16 nt, Human
uuaaacuuaaucuaaa

SEQ ID NO: 1936665 - RNA, 18 nt, Human
uuaaaagauaaauauuau

SEQ ID NO: 1936666 - RNA, 21 nt, Human
uuaaugcuaagggcaggccca

SEQ ID NO: 1936667 - RNA, 13 nt, Human
uuaaugcuaaggg

SEQ ID NO: 1936668 - RNA, 22 nt, Human
uuaauauggggaugcagcauua

SEQ ID NO: 1936669 - RNA, 16 nt, Human
uuaauauggggaugca

SEQ ID NO: 1936670 - RNA, 12 nt, Human
uuaauaugaaaa

SEQ ID NO: 1936671 - RNA, 14 nt, Human
uuaauaugaaaacu

SEQ ID NO: 1936672 - RNA, 15 nt, Human
uuaauaugaaaacuu

SEQ ID NO: 1936673 - RNA, 16 nt, Human
uuaauaugaaaacuua

SEQ ID NO: 1936674 - RNA, 17 nt, Human
uuaauaugaaaacuuau

SEQ ID NO: 1936675 - RNA, 21 nt, Human
uuaauagguuuggacaaaaug

SEQ ID NO: 1936676 - RNA, 14 nt, Human
uuaauuauuauuua

SEQ ID NO: 1936677 - RNA, 17 nt, Human
uuaauuauuauucuuca

SEQ ID NO: 1936678 - RNA, 14 nt, Human
uuaauuauuauucu

SEQ ID NO: 1936679 - RNA, 18 nt, Human
uuaaugucacaggcaggu

SEQ ID NO: 1936680 - RNA, 22 nt, Human
uuaaugucaauucuugccaaau

SEQ ID NO: 1936681 - RNA, 17 nt, Human
uuaaugucacaggcagg

SEQ ID NO: 1936682 - RNA, 18 nt, Human
uuaaugcuuuuauauuuu

SEQ ID NO: 1936683 - RNA, 22 nt, Human
uuaaggaugcuuguacauaaug

SEQ ID NO: 1936684 - RNA, 16 nt, Human
uuaauagguuuggaca

SEQ ID NO: 1936685 - RNA, 21 nt, Human
uuaaggaagacaaugugaaaa

SEQ ID NO: 1936686 - RNA, 20 nt, Human
uuaaggaugcuuguacauaa

SEQ ID NO: 1936687 - RNA, 19 nt, Human
uuaaggaugcuuguacaua

SEQ ID NO: 1936688 - RNA, 18 nt, Human
uuaaggaugcuuguacau

SEQ ID NO: 1936689 - RNA, 17 nt, Human
uuaaggaugcuuguaca

SEQ ID NO: 1936690 - RNA, 12 nt, Human
uuacauggcucu

SEQ ID NO: 1936691 - RNA, 22 nt, Human
uuacauggcuggagcuagaauu

SEQ ID NO: 1936692 - RNA, 20 nt, Human
uuacagaugaauguauuuau

SEQ ID NO: 1936693 - RNA, 23 nt, Human
uuacauggcuggagcuagaauuu

SEQ ID NO: 1936694 - RNA, 14 nt, Human
uuacauuuccuaaa

SEQ ID NO: 1936695 - RNA, 20 nt, Human
uuacagagacagaaagcaga

SEQ ID NO: 1936696 - RNA, 15 nt, Human
uuacagaggacagua

SEQ ID NO: 1936697 - RNA, 20 nt, Human
uuacgguuuuccagguuuaa

SEQ ID NO: 1936698 - RNA, 16 nt, Human
uuacggacacccccuc

SEQ ID NO: 1936699 - RNA, 18 nt, Human
uuacggcccuggccuugg

SEQ ID NO: 1936700 - RNA, 16 nt, Human
uuacggaacucaaaua

SEQ ID NO: 1936701 - RNA, 15 nt, Human
uuacgcuuugauuca

SEQ ID NO: 1936702 - RNA, 16 nt, Human
uuacgcuuugauucau

SEQ ID NO: 1936703 - RNA, 13 nt, Human
uuacgcuuugauu

SEQ ID NO: 1936704 - RNA, 22 nt, Human
uuaccuuuuuuauacauaaaca

SEQ ID NO: 1936705 - RNA, 23 nt, Human
uuaccuuuuugaaaaagaaaaca

SEQ ID NO: 1936706 - RNA, 20 nt, Human
uuaccuuuuuuauacauaaa

SEQ ID NO: 1936707 - RNA, 19 nt, Human
uuaccuuuuuuauacauaa

SEQ ID NO: 1936708 - RNA, 23 nt, Human
uuacauuuuuaagugcugcauuu

SEQ ID NO: 1936709 - RNA, 22 nt, Human
uuacauuuuuaagugcugcauu

SEQ ID NO: 1936710 - RNA, 21 nt, Human
uuacauuuuuaagugcugcau

SEQ ID NO: 1936711 - RNA, 20 nt, Human
uuacauuuuuaagugcugca

SEQ ID NO: 1936712 - RNA, 14 nt, Human
uuaccagcagagca

SEQ ID NO: 1936713 - RNA, 18 nt, Human
uguuuacacucuuuguaa

SEQ ID NO: 1936714 - RNA, 16 nt, Human
uguuuacacucuuugu

SEQ ID NO: 1936715 - RNA, 19 nt, Human
uguuuacacucuuuguaag

SEQ ID NO: 1936716 - RNA, 14 nt, Human
uguuuacagaggac

SEQ ID NO: 1936717 - RNA, 21 nt, Human
uguuuacagaggacaguauuu

SEQ ID NO: 1936718 - RNA, 14 nt, Human
uguuggccaggcug

SEQ ID NO: 1936719 - RNA, 11 nt, Human
uguuggccagg

SEQ ID NO: 1936720 - RNA, 20 nt, Human
uguuggauuuuugucuugug

SEQ ID NO: 1936721 - RNA, 17 nt, Human
uguuggauuuuugucuu

SEQ ID NO: 1936722 - RNA, 13 nt, Human
uguugagcuguuu

SEQ ID NO: 1936723 - RNA, 19 nt, Human
uguugaagagguuuuaaag

SEQ ID NO: 1936724 - RNA, 19 nt, Human
uguucucugcccuccaaga

SEQ ID NO: 1936725 - RNA, 23 nt, Human
uguucucuugggaacugaacuca

SEQ ID NO: 1936726 - RNA, 15 nt, Human
uguucugacccugcu

SEQ ID NO: 1936727 - RNA, 13 nt, Human
uguucugaacugu

SEQ ID NO: 1936728 - RNA, 15 nt, Human
uguucugaacugugg

SEQ ID NO: 1936729 - RNA, 18 nt, Human
uguucugacccugcuuca

SEQ ID NO: 1936730 - RNA, 23 nt, Human
uguucugcaaaaauauuuauaaa

SEQ ID NO: 1936731 - RNA, 14 nt, Human
uguucuuucuggcu

SEQ ID NO: 1936732 - RNA, 22 nt, Human
uguucuuucuggcuaugcauuu

SEQ ID NO: 1936733 - RNA, 20 nt, Human
uguucuuucuggcuaugcau

SEQ ID NO: 1936734 - RNA, 23 nt, Human
uguucugcccaaugccuuuuuga

SEQ ID NO: 1936735 - RNA, 11 nt, Human
uguugaaagau

SEQ ID NO: 1936736 - RNA, 18 nt, Human
uguucucugaggacacua

SEQ ID NO: 1936737 - RNA, 12 nt, Human
uguucucugccc

SEQ ID NO: 1936738 - RNA, 16 nt, Human
uguucucugaggacac

SEQ ID NO: 1936739 - RNA, 13 nt, Human
uguucucugagga

SEQ ID NO: 1936740 - RNA, 12 nt, Human
uguucuauagcu

SEQ ID NO: 1936741 - RNA, 13 nt, Human
uguucauaaauaa

SEQ ID NO: 1936742 - RNA, 20 nt, Human
uguucaugaaagauucaaug

SEQ ID NO: 1936743 - RNA, 15 nt, Human
uguuacauuauuauc

SEQ ID NO: 1936744 - RNA, 13 nt, Human
uguuacauuuuua

SEQ ID NO: 1936745 - RNA, 22 nt, Human
uguuacauuuuuaagugcugca

SEQ ID NO: 1936746 - RNA, 15 nt, Human
uguuacugucuucag

SEQ ID NO: 1936747 - RNA, 16 nt, Human
uguuacugucuucagu

SEQ ID NO: 1936748 - RNA, 15 nt, Human
uguuacuguaauucc

SEQ ID NO: 1936749 - RNA, 15 nt, Human
uguguuuguguauuu

SEQ ID NO: 1936750 - RNA, 10 nt, Human
uguguuuguu

SEQ ID NO: 1936751 - RNA, 20 nt, Human
uguguuuguucuuuuuauug

SEQ ID NO: 1936752 - RNA, 14 nt, Human
uguucagcuccagc

SEQ ID NO: 1936753 - RNA, 18 nt, Human
uguucagcuccagcucac

SEQ ID NO: 1936754 - RNA, 11 nt, Human
uguucagcugg

SEQ ID NO: 1936755 - RNA, 16 nt, Human
uguucagcuccagcuc

SEQ ID NO: 1936756 - RNA, 15 nt, Human
uguucagcuccagcu

SEQ ID NO: 1936757 - RNA, 14 nt, Human
uguguagccugugc

SEQ ID NO: 1936758 - RNA, 23 nt, Human
uguguaugugggggucugugugu

SEQ ID NO: 1936759 - RNA, 14 nt, Human
uguguauguggggg

SEQ ID NO: 1936760 - RNA, 12 nt, Human
ugugugaaugaa

SEQ ID NO: 1936761 - RNA, 16 nt, Human
ugugugaaugaacacu

SEQ ID NO: 1936762 - RNA, 17 nt, Human
ugugugaaugaacacuc

SEQ ID NO: 1936763 - RNA, 18 nt, Human
ugugugaaugaacacucu

SEQ ID NO: 1936764 - RNA, 22 nt, Human
ugugugaaugaacacucuuuug

SEQ ID NO: 1936765 - RNA, 15 nt, Human
uguguauuuacgcuu

SEQ ID NO: 1936766 - RNA, 13 nt, Human
uguguauuuaaca

SEQ ID NO: 1936767 - RNA, 18 nt, Human
uguguauuuaacagggag

SEQ ID NO: 1936768 - RNA, 20 nt, Human
uguguauuuaacagggaggg

SEQ ID NO: 1936769 - RNA, 22 nt, Human
uguguauuuaacagggagggga

SEQ ID NO: 1936770 - RNA, 22 nt, Human
uguguuuaggaacuacugagga

SEQ ID NO: 1936771 - RNA, 13 nt, Human
uguguuuaugugu

SEQ ID NO: 1936772 - RNA, 17 nt, Human
uguguuuaugugagcug

SEQ ID NO: 1936773 - RNA, 13 nt, Human
uguguuuauuguc

SEQ ID NO: 1936774 - RNA, 15 nt, Human
uguguuuaugugugu

SEQ ID NO: 1936775 - RNA, 23 nt, Human
uguguugugugugggagugugua

SEQ ID NO: 1936776 - RNA, 14 nt, Human
uguguugugugugg

SEQ ID NO: 1936777 - RNA, 19 nt, Human
uguguguccaaaacugccu

SEQ ID NO: 1936778 - RNA, 16 nt, Human
uguguguccaaaacug

SEQ ID NO: 1936779 - RNA, 11 nt, Human
uguguguaugu

SEQ ID NO: 1936780 - RNA, 21 nt, Human
uguauuuauaaauauauuuaa

SEQ ID NO: 1936781 - RNA, 14 nt, Human
uguauuuauaaaua

SEQ ID NO: 1936782 - RNA, 21 nt, Human
uguauuuacgcuuugauucau

SEQ ID NO: 1936783 - RNA, 23 nt, Human
uguauuuacgcuuugauucauag

SEQ ID NO: 1936784 - RNA, 20 nt, Human
uguauuuacgcuuugauuca

SEQ ID NO: 1936785 - RNA, 18 nt, Human
uguauuuaacagggaggg

SEQ ID NO: 1936786 - RNA, 19 nt, Human
uguauugcauauauacaua

SEQ ID NO: 1936787 - RNA, 15 nt, Human
uguauuuaaaugaaa

SEQ ID NO: 1936788 - RNA, 23 nt, Human
uguaucccaugagccucagcauc

SEQ ID NO: 1936789 - RNA, 19 nt, Human
uguaucccaugagccucag

SEQ ID NO: 1936790 - RNA, 16 nt, Human
uguauaaguggaggca

SEQ ID NO: 1936791 - RNA, 19 nt, Human
uguauaaguggaggcacuu

SEQ ID NO: 1936792 - RNA, 20 nt, Human
uguauaaguggaggcacuuu

SEQ ID NO: 1936793 - RNA, 13 nt, Human
uguagcagaaagg

SEQ ID NO: 1936794 - RNA, 15 nt, Human
uguauaauauuuuua

SEQ ID NO: 1936795 - RNA, 21 nt, Human
uguauaaguggaggcacuuua

SEQ ID NO: 1936796 - RNA, 23 nt, Human
uguauaaguggaggcacuuuagg

SEQ ID NO: 1936797 - RNA, 12 nt, Human
uguagcagaaag

SEQ ID NO: 1936798 - RNA, 12 nt, Human
ugucagugugac

SEQ ID NO: 1936799 - RNA, 20 nt, Human
ugucagugugacugaucucu

SEQ ID NO: 1936800 - RNA, 16 nt, Human
ugucagucacagccac

SEQ ID NO: 1936801 - RNA, 17 nt, Human
ugucagucacagccacc

SEQ ID NO: 1936802 - RNA, 18 nt, Human
ugucagucacagccaccc

SEQ ID NO: 1936803 - RNA, 22 nt, Human
ugucagucacagccaccccuga

SEQ ID NO: 1936804 - RNA, 17 nt, Human
ugucauagaaagugcca

SEQ ID NO: 1936805 - RNA, 22 nt, Human
ugucauagaaagugccagaaag

SEQ ID NO: 1936806 - RNA, 20 nt, Human
ugucacguuuuguuuugugc

SEQ ID NO: 1936807 - RNA, 15 nt, Human
ugucacucauugcug

SEQ ID NO: 1936808 - RNA, 16 nt, Human
ugucacucauugcuga

SEQ ID NO: 1936809 - RNA, 14 nt, Human
ugucagucacagcc

SEQ ID NO: 1936810 - RNA, 15 nt, Human
ugucagucacagcca

SEQ ID NO: 1936811 - RNA, 21 nt, Human
ugucacucauugcugagccuc

SEQ ID NO: 1936812 - RNA, 22 nt, Human
ugucacucauugcugagccucu

SEQ ID NO: 1936813 - RNA, 23 nt, Human
ugucacucauugcugagccucug

SEQ ID NO: 1936814 - RNA, 20 nt, Human
uguauuuguuaaugguuuga

SEQ ID NO: 1936815 - RNA, 18 nt, Human
uguauuuguuaaugguuu

SEQ ID NO: 1936816 - RNA, 23 nt, Human
ugucccaaaaagaaaggagggga

SEQ ID NO: 1936817 - RNA, 18 nt, Human
ugucauauagcugguuau

SEQ ID NO: 1936818 - RNA, 20 nt, Human
uguacugagccuuguaauuc

SEQ ID NO: 1936819 - RNA, 19 nt, Human
uguacugagccuuguaauu

SEQ ID NO: 1936820 - RNA, 22 nt, Human
uguacugagccuuguaauucua

SEQ ID NO: 1936821 - RNA, 17 nt, Human
uguacugagccuuguaa

SEQ ID NO: 1936822 - RNA, 12 nt, Human
uguacucccagg

SEQ ID NO: 1936823 - RNA, 17 nt, Human
uguagauaauacaguuc

SEQ ID NO: 1936824 - RNA, 16 nt, Human
uguacgucugacaggc

SEQ ID NO: 1936825 - RNA, 17 nt, Human
uguacgucugacaggca

SEQ ID NO: 1936826 - RNA, 12 nt, Human
uguacuacaauu

SEQ ID NO: 1936827 - RNA, 18 nt, Human
uguacuaggauacugcug

SEQ ID NO: 1936828 - RNA, 17 nt, Human
uguacagucuuguauua

SEQ ID NO: 1936829 - RNA, 15 nt, Human
uguacagucuuguau

SEQ ID NO: 1936830 - RNA, 14 nt, Human
uguacagucuugua

SEQ ID NO: 1936831 - RNA, 12 nt, Human
uguacagucuug

SEQ ID NO: 1936832 - RNA, 19 nt, Human
uguacaggaugcuuugguu

SEQ ID NO: 1936833 - RNA, 23 nt, Human
uguaccucuugagccuugaacuu

SEQ ID NO: 1936834 - RNA, 14 nt, Human
uguaccucuugagc

SEQ ID NO: 1936835 - RNA, 22 nt, Human
uguaccucuugagccuugaacu

SEQ ID NO: 1936836 - RNA, 15 nt, Human
uguaccgcaauguga

SEQ ID NO: 1936837 - RNA, 14 nt, Human
uguaccauuugccu

SEQ ID NO: 1936838 - RNA, 17 nt, Human
uguaaaauuucacuuaa

SEQ ID NO: 1936839 - RNA, 18 nt, Human
ugguaggacuguagaaaa

SEQ ID NO: 1936840 - RNA, 17 nt, Human
ugguaggacuguagaaa

SEQ ID NO: 1936841 - RNA, 16 nt, Human
ugguaggcauuuccua

SEQ ID NO: 1936842 - RNA, 17 nt, Human
uguaaauuaacuuuuau

SEQ ID NO: 1936843 - RNA, 16 nt, Human
uguaaauuaacuuuua

SEQ ID NO: 1936844 - RNA, 15 nt, Human
uguaaauuaacuuuu

SEQ ID NO: 1936845 - RNA, 14 nt, Human
uguaaauuaacuuu

SEQ ID NO: 1936846 - RNA, 13 nt, Human
uguaaauuaacuu

SEQ ID NO: 1936847 - RNA, 13 nt, Human
uguaaaucugcuc

SEQ ID NO: 1936848 - RNA, 16 nt, Human
uguaaaucugcucagg

SEQ ID NO: 1936849 - RNA, 17 nt, Human
uguaaucauauaauaaa

SEQ ID NO: 1936850 - RNA, 15 nt, Human
uguaaucccagcacu

SEQ ID NO: 1936851 - RNA, 22 nt, Human
uguaaucccagcacuuugggag

SEQ ID NO: 1936852 - RNA, 16 nt, Human
uguaaucccagcuacu

SEQ ID NO: 1936853 - RNA, 15 nt, Human
uguaaucacagcuac

SEQ ID NO: 1936854 - RNA, 16 nt, Human
uguaaauuuaugugau

SEQ ID NO: 1936855 - RNA, 17 nt, Human
uguaaauugaaucagua

SEQ ID NO: 1936856 - RNA, 22 nt, Human
uguaaauugaaucaguauaaac

SEQ ID NO: 1936857 - RNA, 15 nt, Human
uguaaauuuauguga

SEQ ID NO: 1936858 - RNA, 13 nt, Human
ugucugcccccuc

SEQ ID NO: 1936859 - RNA, 13 nt, Human
ugucugccagggc

SEQ ID NO: 1936860 - RNA, 17 nt, Human
ugucuggcugcagagca

SEQ ID NO: 1936861 - RNA, 16 nt, Human
ugucuggcugcagagc

SEQ ID NO: 1936862 - RNA, 14 nt, Human
ugucuggcugcaga

SEQ ID NO: 1936863 - RNA, 22 nt, Human
ugucucaguccaugaagaugua

SEQ ID NO: 1936864 - RNA, 21 nt, Human
ugucucaguccaugaagaugu

SEQ ID NO: 1936865 - RNA, 13 nt, Human
ugucugcauuucg

SEQ ID NO: 1936866 - RNA, 21 nt, Human
ugucugcauuucgguggcuag

SEQ ID NO: 1936867 - RNA, 14 nt, Human
ugucucacauggga

SEQ ID NO: 1936868 - RNA, 13 nt, Human
uguccccaccgca

SEQ ID NO: 1936869 - RNA, 16 nt, Human
ugucuuuuuucacuac

SEQ ID NO: 1936870 - RNA, 14 nt, Human
ugucuuuuuucuaa

SEQ ID NO: 1936871 - RNA, 19 nt, Human
ugucuuuggacccugaggc

SEQ ID NO: 1936872 - RNA, 22 nt, Human
ugucuuuggacccugaggccca

SEQ ID NO: 1936873 - RNA, 17 nt, Human
ugucuuuggacccugag

SEQ ID NO: 1936874 - RNA, 18 nt, Human
ugucuuuggacccugagg

SEQ ID NO: 1936875 - RNA, 13 nt, Human
ugugaaacauguu

SEQ ID NO: 1936876 - RNA, 13 nt, Human
ugugaaaggaaag

SEQ ID NO: 1936877 - RNA, 14 nt, Human
ugugaaaggaaaga

SEQ ID NO: 1936878 - RNA, 22 nt, Human
ugugacacauaugcaccuugug

SEQ ID NO: 1936879 - RNA, 17 nt, Human
ugugacacauaugcacc

SEQ ID NO: 1936880 - RNA, 15 nt, Human
ugugacauguuuuau

SEQ ID NO: 1936881 - RNA, 22 nt, Human
ugugaccacugcagaagacagu

SEQ ID NO: 1936882 - RNA, 21 nt, Human
ugugacaaggauugcuacugu

SEQ ID NO: 1936883 - RNA, 14 nt, Human
ugugaaugaacacu

SEQ ID NO: 1936884 - RNA, 23 nt, Human
ugugaaugaacacucuuuugcuu

SEQ ID NO: 1936885 - RNA, 17 nt, Human
ugugaaugaacacucuu

SEQ ID NO: 1936886 - RNA, 16 nt, Human
ugugaaucauuuuacc

SEQ ID NO: 1936887 - RNA, 21 nt, Human
ugugauacaaugcugugcccu

SEQ ID NO: 1936888 - RNA, 14 nt, Human
ugugauagcacuuu

SEQ ID NO: 1936889 - RNA, 15 nt, Human
ugugauagcacuuuc

SEQ ID NO: 1936890 - RNA, 17 nt, Human
ugugauagcacuuucua

SEQ ID NO: 1936891 - RNA, 13 nt, Human
ugugauauaagug

SEQ ID NO: 1936892 - RNA, 14 nt, Human
ugugcaagagaggg

SEQ ID NO: 1936893 - RNA, 17 nt, Human
ugugcaauaauuuacau

SEQ ID NO: 1936894 - RNA, 18 nt, Human
ugugaguacuacaguccu

SEQ ID NO: 1936895 - RNA, 18 nt, Human
ugugaggggcucucucau

SEQ ID NO: 1936896 - RNA, 15 nt, Human
ugugacccccagcuc

SEQ ID NO: 1936897 - RNA, 16 nt, Human
ugugacccccagcucc

SEQ ID NO: 1936898 - RNA, 20 nt, Human
ugugacccccagcuccggcc

SEQ ID NO: 1936899 - RNA, 17 nt, Human
ugugacccccagcuccg

SEQ ID NO: 1936900 - RNA, 19 nt, Human
ugugaguacuacaguccuc

SEQ ID NO: 1936901 - RNA, 20 nt, Human
ugugaguacuacaguccucc

SEQ ID NO: 1936902 - RNA, 23 nt, Human
ugugaguacuacaguccucccau

SEQ ID NO: 1936903 - RNA, 16 nt, Human
ugugaguaaucugaga

SEQ ID NO: 1936904 - RNA, 19 nt, Human
ugugaguaaucugagaaac

SEQ ID NO: 1936905 - RNA, 22 nt, Human
uguggcuucuuaaucuuuucac

SEQ ID NO: 1936906 - RNA, 12 nt, Human
ugugggaagggg

SEQ ID NO: 1936907 - RNA, 23 nt, Human
uguggggaaccaauugcuuuguc

SEQ ID NO: 1936908 - RNA, 22 nt, Human
uguggggugugcacaucucugc

SEQ ID NO: 1936909 - RNA, 15 nt, Human
ugugggucaaggaau

SEQ ID NO: 1936910 - RNA, 16 nt, Human
ugugggggucugugug

SEQ ID NO: 1936911 - RNA, 20 nt, Human
ugugggucugugugugugua

SEQ ID NO: 1936912 - RNA, 15 nt, Human
uguggguaccuguau

SEQ ID NO: 1936913 - RNA, 16 nt, Human
ugugggucugugugug

SEQ ID NO: 1936914 - RNA, 14 nt, Human
ugugggucugugug

SEQ ID NO: 1936915 - RNA, 15 nt, Human
uguguacccaaacgu

SEQ ID NO: 1936916 - RNA, 13 nt, Human
uguggacacagcu

SEQ ID NO: 1936917 - RNA, 14 nt, Human
uguggacacagcuc

SEQ ID NO: 1936918 - RNA, 23 nt, Human
uguggaaaagccaagaggcugca

SEQ ID NO: 1936919 - RNA, 21 nt, Human
uguggaaaagccaagaggcug

SEQ ID NO: 1936920 - RNA, 19 nt, Human
uguggaaaagccaagaggc

SEQ ID NO: 1936921 - RNA, 15 nt, Human
uguggaaaagaaaca

SEQ ID NO: 1936922 - RNA, 20 nt, Human
uguggaaaagaaacacgcac

SEQ ID NO: 1936923 - RNA, 16 nt, Human
uguggacacagcucuu

SEQ ID NO: 1936924 - RNA, 15 nt, Human
uguggacacagcucu

SEQ ID NO: 1936925 - RNA, 19 nt, Human
uguggagaagccacaggcc

SEQ ID NO: 1936926 - RNA, 12 nt, Human
uguggagaagcg

SEQ ID NO: 1936927 - RNA, 21 nt, Human
uguggagaagcggcuggcagc

SEQ ID NO: 1936928 - RNA, 23 nt, Human
ugugcauguaugucuuggacacu

SEQ ID NO: 1936929 - RNA, 20 nt, Human
ugugcauguaugucuuggac

SEQ ID NO: 1936930 - RNA, 12 nt, Human
ugugcaguguug

SEQ ID NO: 1936931 - RNA, 19 nt, Human
ugugcauagagccacguau

SEQ ID NO: 1936932 - RNA, 13 nt, Human
ugugccucuggga

SEQ ID NO: 1936933 - RNA, 15 nt, Human
ugugccucugggacu

SEQ ID NO: 1936934 - RNA, 16 nt, Human
ugugccucugggacug

SEQ ID NO: 1936935 - RNA, 22 nt, Human
ugugcacaugcacgugugugca

SEQ ID NO: 1936936 - RNA, 16 nt, Human
ugugcacaugcacgug

SEQ ID NO: 1936937 - RNA, 14 nt, Human
ugugcacaaagugg

SEQ ID NO: 1936938 - RNA, 17 nt, Human
ugugcacaaaguggcau

SEQ ID NO: 1936939 - RNA, 13 nt, Human
ugugcagacuuca

SEQ ID NO: 1936940 - RNA, 15 nt, Human
ugugcuacaggggcc

SEQ ID NO: 1936941 - RNA, 17 nt, Human
ugugcuacaggggccag

SEQ ID NO: 1936942 - RNA, 18 nt, Human
ugugcuacaggggccaga

SEQ ID NO: 1936943 - RNA, 20 nt, Human
ugugcuacaggggccagaag

SEQ ID NO: 1936944 - RNA, 17 nt, Human
ugugccucugggacugg

SEQ ID NO: 1936945 - RNA, 20 nt, Human
ugugcgugcauguguguuca

SEQ ID NO: 1936946 - RNA, 14 nt, Human
uucugagcauuuaa

SEQ ID NO: 1936947 - RNA, 17 nt, Human
uucuguccgagcuuuga

SEQ ID NO: 1936948 - RNA, 21 nt, Human
uucuguccgagcuuugaaaau

SEQ ID NO: 1936949 - RNA, 17 nt, Human
uucuguccuacucugug

SEQ ID NO: 1936950 - RNA, 19 nt, Human
uucuguccuacucuguguc

SEQ ID NO: 1936951 - RNA, 23 nt, Human
uucuguggguuucuaaagcugcc

SEQ ID NO: 1936952 - RNA, 16 nt, Human
uucuugguuuguaaau

SEQ ID NO: 1936953 - RNA, 13 nt, Human
uucuugguuugua

SEQ ID NO: 1936954 - RNA, 22 nt, Human
uucuucacuguccuccaagcca

SEQ ID NO: 1936955 - RNA, 23 nt, Human
uucuugguuuguaaauuaacuuu

SEQ ID NO: 1936956 - RNA, 18 nt, Human
uucuugguuuguaaauua

SEQ ID NO: 1936957 - RNA, 17 nt, Human
uucuugguuuguaaauu

SEQ ID NO: 1936958 - RNA, 11 nt, Human
uucuguucuuu

SEQ ID NO: 1936959 - RNA, 19 nt, Human
uucuuauuuaaugaaagac

SEQ ID NO: 1936960 - RNA, 23 nt, Human
uucuuauuuaaugaaagacugua

SEQ ID NO: 1936961 - RNA, 19 nt, Human
uugaagacuuuucuuucag

SEQ ID NO: 1936962 - RNA, 22 nt, Human
uugaagacacugaaauauacac

SEQ ID NO: 1936963 - RNA, 17 nt, Human
uugaagacagagcuaca

SEQ ID NO: 1936964 - RNA, 13 nt, Human
uugaagacacuga

SEQ ID NO: 1936965 - RNA, 15 nt, Human
uugaagacacugaaa

SEQ ID NO: 1936966 - RNA, 17 nt, Human
uugaaucuauuuaucuu

SEQ ID NO: 1936967 - RNA, 20 nt, Human
uugaaucuauuuaucuucau

SEQ ID NO: 1936968 - RNA, 19 nt, Human
uugaacucuucaaucucuu

SEQ ID NO: 1936969 - RNA, 16 nt, Human
uugaacugauaaagau

SEQ ID NO: 1936970 - RNA, 16 nt, Human
uugaacugagcuugga

SEQ ID NO: 1936971 - RNA, 15 nt, Human
uugaacugagcuugg

SEQ ID NO: 1936972 - RNA, 22 nt, Human
uugaacuuugaccucugcagca

SEQ ID NO: 1936973 - RNA, 15 nt, Human
uugaaaaaugcaugu

SEQ ID NO: 1936974 - RNA, 19 nt, Human
uugaaaacacuguucucug

SEQ ID NO: 1936975 - RNA, 21 nt, Human
uugaaaacacuguucucugcc

SEQ ID NO: 1936976 - RNA, 18 nt, Human
uucuuuauaauucuacuu

SEQ ID NO: 1936977 - RNA, 22 nt, Human
uugaaaacacuguucucugccc

SEQ ID NO: 1936978 - RNA, 22 nt, Human
uugcauaguaccaaucauuuua

SEQ ID NO: 1936979 - RNA, 14 nt, Human
uugcauagaauaaa

SEQ ID NO: 1936980 - RNA, 22 nt, Human
uugcagacaggcaagcaccucc

SEQ ID NO: 1936981 - RNA, 16 nt, Human
uugcagacaggcaagc

SEQ ID NO: 1936982 - RNA, 19 nt, Human
uugcagaacuaaacucauu

SEQ ID NO: 1936983 - RNA, 21 nt, Human
uugcagaacuaaacucauuua

SEQ ID NO: 1936984 - RNA, 17 nt, Human
uugcaacaggcugggcu

SEQ ID NO: 1936985 - RNA, 14 nt, Human
uugcaacaggcugg

SEQ ID NO: 1936986 - RNA, 18 nt, Human
uugauuuccguuaaaaua

SEQ ID NO: 1936987 - RNA, 20 nt, Human
uugauuuuuacguuugaaga

SEQ ID NO: 1936988 - RNA, 21 nt, Human
uugauagcacagacccugccc

SEQ ID NO: 1936989 - RNA, 23 nt, Human
uugauagcacagacccugcccug

SEQ ID NO: 1936990 - RNA, 11 nt, Human
uugaucuucaa

SEQ ID NO: 1936991 - RNA, 13 nt, Human
uugaucuucaaca

SEQ ID NO: 1936992 - RNA, 15 nt, Human
uugaucuucaacaaa

SEQ ID NO: 1936993 - RNA, 16 nt, Human
uugaucuucaacaaau

SEQ ID NO: 1936994 - RNA, 17 nt, Human
uugaucuucaacaaauu

SEQ ID NO: 1936995 - RNA, 15 nt, Human
uugaucuggaaccca

SEQ ID NO: 1936996 - RNA, 16 nt, Human
uugaucuggaacccag

SEQ ID NO: 1936997 - RNA, 17 nt, Human
uugaucuggaacccaga

SEQ ID NO: 1936998 - RNA, 19 nt, Human
uugaucuggaacccagacu

SEQ ID NO: 1936999 - RNA, 20 nt, Human
uugauuguucgggugugcaa

SEQ ID NO: 1937000 - RNA, 15 nt, Human
uugacgccaucccag

SEQ ID NO: 1937001 - RNA, 21 nt, Human
uugaccuuuuauguaguaauu

SEQ ID NO: 1937002 - RNA, 22 nt, Human
uugacgccaucccagccccaau

SEQ ID NO: 1937003 - RNA, 14 nt, Human
uugacgccauccca

SEQ ID NO: 1937004 - RNA, 12 nt, Human
uugaccugaggc

SEQ ID NO: 1937005 - RNA, 19 nt, Human
uugaccugaggcccuucuc

SEQ ID NO: 1937006 - RNA, 22 nt, Human
uugaccugaggcccuucucucc

SEQ ID NO: 1937007 - RNA, 15 nt, Human
uugaccucaggugau

SEQ ID NO: 1937008 - RNA, 20 nt, Human
uugaccgugaggccagagac

SEQ ID NO: 1937009 - RNA, 21 nt, Human
uugaccgugaggccagagaca

SEQ ID NO: 1937010 - RNA, 18 nt, Human
uugaauguaugcuucaua

SEQ ID NO: 1937011 - RNA, 19 nt, Human
uugauagcacagacccugc

SEQ ID NO: 1937012 - RNA, 20 nt, Human
uugauagcacagacccugcc

SEQ ID NO: 1937013 - RNA, 19 nt, Human
uugaggggagagggaacgg

SEQ ID NO: 1937014 - RNA, 15 nt, Human
uugaggggauuaaua

SEQ ID NO: 1937015 - RNA, 16 nt, Human
uugaggggauuaauau

SEQ ID NO: 1937016 - RNA, 20 nt, Human
uugaggggauuaauaugaaa

SEQ ID NO: 1937017 - RNA, 22 nt, Human
uugaggggauuaauaugaaaac

SEQ ID NO: 1937018 - RNA, 18 nt, Human
uugaggaaacaacagcuu

SEQ ID NO: 1937019 - RNA, 18 nt, Human
uugagcuguuuucccuga

SEQ ID NO: 1937020 - RNA, 12 nt, Human
uugagcuguuuu

SEQ ID NO: 1937021 - RNA, 23 nt, Human
uugacuagaugauggaugccaau

SEQ ID NO: 1937022 - RNA, 23 nt, Human
uugacgagugugaagcuuccuug

SEQ ID NO: 1937023 - RNA, 16 nt, Human
uuguaaaggaauuuaa

SEQ ID NO: 1937024 - RNA, 18 nt, Human
uuguaaauaaaggaacca

SEQ ID NO: 1937025 - RNA, 16 nt, Human
uuguaaaguccccaga

SEQ ID NO: 1937026 - RNA, 22 nt, Human
uuguaaaguccccagagaaagc

SEQ ID NO: 1937027 - RNA, 22 nt, Human
uuggucccccuuccauggacuu

SEQ ID NO: 1937028 - RNA, 16 nt, Human
uuggucccccuuccau

SEQ ID NO: 1937029 - RNA, 12 nt, Human
uugguccugcug

SEQ ID NO: 1937030 - RNA, 13 nt, Human
uugguccugcugc

SEQ ID NO: 1937031 - RNA, 12 nt, Human
uuguacagacaa

SEQ ID NO: 1937032 - RNA, 13 nt, Human
uuguacagacaac

SEQ ID NO: 1937033 - RNA, 19 nt, Human
uuguacacaccuuauauuu

SEQ ID NO: 1937034 - RNA, 14 nt, Human
uuguauuacaaauc

SEQ ID NO: 1937035 - RNA, 14 nt, Human
uuguauucagaguu

SEQ ID NO: 1937036 - RNA, 21 nt, Human
uuguauucucuccuguaccuc

SEQ ID NO: 1937037 - RNA, 15 nt, Human
uuguagagccagggu

SEQ ID NO: 1937038 - RNA, 14 nt, Human
uuguagagccaggg

SEQ ID NO: 1937039 - RNA, 13 nt, Human
uuguacaguuuuu

SEQ ID NO: 1937040 - RNA, 12 nt, Human
uuguacaguuuu

SEQ ID NO: 1937041 - RNA, 16 nt, Human
uuguacaguuuuuauu

SEQ ID NO: 1937042 - RNA, 14 nt, Human
uuguacauaaugcg

SEQ ID NO: 1937043 - RNA, 16 nt, Human
uuggguggaugccugg

SEQ ID NO: 1937044 - RNA, 19 nt, Human
uuggguggggggcuucaua

SEQ ID NO: 1937045 - RNA, 17 nt, Human
uuggguggggggcuuca

SEQ ID NO: 1937046 - RNA, 22 nt, Human
uuggguggggggcuucauacac

SEQ ID NO: 1937047 - RNA, 17 nt, Human
uugggugggcaggaaaa

SEQ ID NO: 1937048 - RNA, 21 nt, Human
uuggguggggggcuucauaca

SEQ ID NO: 1937049 - RNA, 20 nt, Human
uuggguggggggcuucauac

SEQ ID NO: 1937050 - RNA, 12 nt, Human
uugguaaaccuu

SEQ ID NO: 1937051 - RNA, 16 nt, Human
uuggguuccauucuca

SEQ ID NO: 1937052 - RNA, 14 nt, Human
uugguaaaccuuuu

SEQ ID NO: 1937053 - RNA, 16 nt, Human
uugggaggccauuugu

SEQ ID NO: 1937054 - RNA, 18 nt, Human
uugggaacugaacucacu

SEQ ID NO: 1937055 - RNA, 12 nt, Human
uugggaggcuga

SEQ ID NO: 1937056 - RNA, 22 nt, Human
uuggcuuuggguugcaggaccu

SEQ ID NO: 1937057 - RNA, 22 nt, Human
uuggcugggggccucagugcca

SEQ ID NO: 1937058 - RNA, 21 nt, Human
uuggcugggggccucagugcc

SEQ ID NO: 1937059 - RNA, 16 nt, Human
uuggcugcugaaggcu

SEQ ID NO: 1937060 - RNA, 18 nt, Human
uuggcugggggccucagu

SEQ ID NO: 1937061 - RNA, 24 nt, Human
uuggccaaagccaaagcuaggccu

SEQ ID NO: 1937062 - RNA, 15 nt, Human
uuggccaaacaagug

SEQ ID NO: 1937063 - RNA, 14 nt, Human
uuggccaggcuggu

SEQ ID NO: 1937064 - RNA, 13 nt, Human
uuggcauucccca

SEQ ID NO: 1937065 - RNA, 23 nt, Human
uuggcaaacucuccaccacacgu

SEQ ID NO: 1937066 - RNA, 16 nt, Human
uuggauuuuugacucu

SEQ ID NO: 1937067 - RNA, 18 nt, Human
uugcguggacucugcaca

SEQ ID NO: 1937068 - RNA, 15 nt, Human
uugcguggacucugc

SEQ ID NO: 1937069 - RNA, 21 nt, Human
uugcguggaauugugcugagu

SEQ ID NO: 1937070 - RNA, 12 nt, Human
uugccugcaggc

SEQ ID NO: 1937071 - RNA, 20 nt, Human
uugcugauggugcaaugacc

SEQ ID NO: 1937072 - RNA, 22 nt, Human
uugcugauggugcaaugaccuu

SEQ ID NO: 1937073 - RNA, 11 nt, Human
uugcccaggca

SEQ ID NO: 1937074 - RNA, 23 nt, Human
uugcccacgcuggagugcaguga

SEQ ID NO: 1937075 - RNA, 13 nt, Human
uugccagucaccc

SEQ ID NO: 1937076 - RNA, 18 nt, Human
uugccagucaccccggcc

SEQ ID NO: 1937077 - RNA, 14 nt, Human
uugccucugccucu

SEQ ID NO: 1937078 - RNA, 11 nt, Human
uugccucugcc

SEQ ID NO: 1937079 - RNA, 18 nt, Human
uugccucugccucugaca

SEQ ID NO: 1937080 - RNA, 16 nt, Human
uugccucugccucuga

SEQ ID NO: 1937081 - RNA, 20 nt, Human
uugccucuguccccuucucu

SEQ ID NO: 1937082 - RNA, 19 nt, Human
uugccucuguccccuucuc

SEQ ID NO: 1937083 - RNA, 18 nt, Human
uugccucuguccccuucu

SEQ ID NO: 1937084 - RNA, 17 nt, Human
uugccucuguccccuuc

SEQ ID NO: 1937085 - RNA, 11 nt, Human
uuggaaggaac

SEQ ID NO: 1937086 - RNA, 19 nt, Human
uuggaaggaacguccccug

SEQ ID NO: 1937087 - RNA, 16 nt, Human
uuggaagaaaaaaucu

SEQ ID NO: 1937088 - RNA, 18 nt, Human
uuggauuuuugucuugug

SEQ ID NO: 1937089 - RNA, 14 nt, Human
uuggauuguauauu

SEQ ID NO: 1937090 - RNA, 18 nt, Human
uuggauuguauauugugu

SEQ ID NO: 1937091 - RNA, 14 nt, Human
uuggauuguccccg

SEQ ID NO: 1937092 - RNA, 17 nt, Human
uuggcaaaaaggcagga

SEQ ID NO: 1937093 - RNA, 20 nt, Human
uuggcaaacucuccaccaca

SEQ ID NO: 1937094 - RNA, 16 nt, Human
uuggcaaacucuccac

SEQ ID NO: 1937095 - RNA, 14 nt, Human
uuggauuggggucc

SEQ ID NO: 1937096 - RNA, 17 nt, Human
uuggauucugagagcug

SEQ ID NO: 1937097 - RNA, 15 nt, Human
uuggauucugagagc

SEQ ID NO: 1937098 - RNA, 20 nt, Human
uugcuguagaagauggcacu

SEQ ID NO: 1937099 - RNA, 20 nt, Human
uugcuggggccgaaagaaca

SEQ ID NO: 1937100 - RNA, 11 nt, Human
uugcuguauau

SEQ ID NO: 1937101 - RNA, 14 nt, Human
uugcuguuuuccuc

SEQ ID NO: 1937102 - RNA, 16 nt, Human
uugcuguuuuccuccc

SEQ ID NO: 1937103 - RNA, 18 nt, Human
uugcuguuuuccucccuu

SEQ ID NO: 1937104 - RNA, 19 nt, Human
uugcuguuuuccucccuuc

SEQ ID NO: 1937105 - RNA, 20 nt, Human
uugcuguuuuccucccuucu

SEQ ID NO: 1937106 - RNA, 22 nt, Human
uugcuguuuuccucccuucugc

SEQ ID NO: 1937107 - RNA, 14 nt, Human
uucuccagggucag

SEQ ID NO: 1937108 - RNA, 13 nt, Human
uucuccacccugc

SEQ ID NO: 1937109 - RNA, 16 nt, Human
uucuccaagcaggaca

SEQ ID NO: 1937110 - RNA, 11 nt, Human
uucuccaggcu

SEQ ID NO: 1937111 - RNA, 22 nt, Human
uucuccacagcaaccccaggcu

SEQ ID NO: 1937112 - RNA, 15 nt, Human
uucuccacagcaacc

SEQ ID NO: 1937113 - RNA, 18 nt, Human
uucucuccagccccugga

SEQ ID NO: 1937114 - RNA, 16 nt, Human
uucugacccaugcugc

SEQ ID NO: 1937115 - RNA, 18 nt, Human
uucugacccaugcugccc

SEQ ID NO: 1937116 - RNA, 20 nt, Human
uucugacccaugcugcccug

SEQ ID NO: 1937117 - RNA, 21 nt, Human
uucugacccaugcugcccugu

SEQ ID NO: 1937118 - RNA, 17 nt, Human
uucucugauacagaaaa

SEQ ID NO: 1937119 - RNA, 16 nt, Human
uucucugauacagaaa

SEQ ID NO: 1937120 - RNA, 15 nt, Human
uucucugauacagaa

SEQ ID NO: 1937121 - RNA, 14 nt, Human
uucucugauacaga

SEQ ID NO: 1937122 - RNA, 17 nt, Human
uucuaugacacaugcaa

SEQ ID NO: 1937123 - RNA, 16 nt, Human
uucuaugacacaugca

SEQ ID NO: 1937124 - RNA, 16 nt, Human
uucuaaugauggccca

SEQ ID NO: 1937125 - RNA, 23 nt, Human
uucuaaugauggcccauucuacu

SEQ ID NO: 1937126 - RNA, 18 nt, Human
uucuaauagaacucaguu

SEQ ID NO: 1937127 - RNA, 12 nt, Human
uucuaauagaac

SEQ ID NO: 1937128 - RNA, 14 nt, Human
uucuaauagaacuc

SEQ ID NO: 1937129 - RNA, 14 nt, Human
uucuauuguuucuu

SEQ ID NO: 1937130 - RNA, 18 nt, Human
uucuauuuauauguacau

SEQ ID NO: 1937131 - RNA, 19 nt, Human
uucuauuuauauguacaug

SEQ ID NO: 1937132 - RNA, 15 nt, Human
uucuauuuauuuacu

SEQ ID NO: 1937133 - RNA, 17 nt, Human
uucucaugauuuacaga

SEQ ID NO: 1937134 - RNA, 20 nt, Human
uucucaugauuuacagagaa

SEQ ID NO: 1937135 - RNA, 15 nt, Human
uucucaucuuucuug

SEQ ID NO: 1937136 - RNA, 18 nt, Human
uucucaucuuucuugauc

SEQ ID NO: 1937137 - RNA, 20 nt, Human
uucucaaagaaauuuccacu

SEQ ID NO: 1937138 - RNA, 19 nt, Human
uucucaaagaaauuuccac

SEQ ID NO: 1937139 - RNA, 15 nt, Human
uucucaaagaaauuu

SEQ ID NO: 1937140 - RNA, 13 nt, Human
uucucaaagaaau

SEQ ID NO: 1937141 - RNA, 15 nt, Human
uucucauccugcagg

SEQ ID NO: 1937142 - RNA, 18 nt, Human
uuccugccgcaacaguuu

SEQ ID NO: 1937143 - RNA, 14 nt, Human
uuccuuccagccca

SEQ ID NO: 1937144 - RNA, 21 nt, Human
uuccuuucauuuacuguggcu

SEQ ID NO: 1937145 - RNA, 15 nt, Human
uuccuuccuguucug

SEQ ID NO: 1937146 - RNA, 16 nt, Human
uuccuucagugccuua

SEQ ID NO: 1937147 - RNA, 19 nt, Human
uuccuucagugccuuaugg

SEQ ID NO: 1937148 - RNA, 23 nt, Human
uuccuucagugccuuauggaaca

SEQ ID NO: 1937149 - RNA, 19 nt, Human
uuccuucauucaacccacc

SEQ ID NO: 1937150 - RNA, 13 nt, Human
uucuaaagaugga

SEQ ID NO: 1937151 - RNA, 16 nt, Human
uucuaaaggcuaccuu

SEQ ID NO: 1937152 - RNA, 18 nt, Human
uucuaaacccaauccaaa

SEQ ID NO: 1937153 - RNA, 19 nt, Human
uucuaaacccaauccaaau

SEQ ID NO: 1937154 - RNA, 23 nt, Human
uucuaaacccaauccaaauggcg

SEQ ID NO: 1937155 - RNA, 14 nt, Human
uucuaaacagagau

SEQ ID NO: 1937156 - RNA, 18 nt, Human
uucuaaaggcuaccuuug

SEQ ID NO: 1937157 - RNA, 17 nt, Human
uucuaaaggcuaccuuu

SEQ ID NO: 1937158 - RNA, 19 nt, Human
uucggccuccauccugagg

SEQ ID NO: 1937159 - RNA, 18 nt, Human
uucggccuccauccugag

SEQ ID NO: 1937160 - RNA, 22 nt, Human
uucggccuccauccugaggcuc

SEQ ID NO: 1937161 - RNA, 16 nt, Human
uuccuuuggaagaaaa

SEQ ID NO: 1937162 - RNA, 18 nt, Human
uuccuuuccagguauuuu

SEQ ID NO: 1937163 - RNA, 20 nt, Human
uuccuuucauuuacuguggc

SEQ ID NO: 1937164 - RNA, 21 nt, Human
uuccccaccagugaaugaaag

SEQ ID NO: 1937165 - RNA, 22 nt, Human
uuccccacuugagaauuacccu

SEQ ID NO: 1937166 - RNA, 11 nt, Human
uuccccagaga

SEQ ID NO: 1937167 - RNA, 12 nt, Human
uuccccagagaa

SEQ ID NO: 1937168 - RNA, 19 nt, Human
uucccuuugacgccauccc

SEQ ID NO: 1937169 - RNA, 19 nt, Human
uuccuagauggcagucacu

SEQ ID NO: 1937170 - RNA, 22 nt, Human
uuccuagauggcagucacugaa

SEQ ID NO: 1937171 - RNA, 14 nt, Human
uuccuagccaccgc

SEQ ID NO: 1937172 - RNA, 21 nt, Human
uuccuagccaccgccuccuac

SEQ ID NO: 1937173 - RNA, 15 nt, Human
uuccuagccaccgcc

SEQ ID NO: 1937174 - RNA, 23 nt, Human
uuccucauaguaugguggcuggg

SEQ ID NO: 1937175 - RNA, 20 nt, Human
uuccuagguauaauucacau

SEQ ID NO: 1937176 - RNA, 22 nt, Human
uuccuagccaccgccuccuaca

SEQ ID NO: 1937177 - RNA, 22 nt, Human
uuccucccucccucuuucccuc

SEQ ID NO: 1937178 - RNA, 11 nt, Human
uuccucccuuc

SEQ ID NO: 1937179 - RNA, 12 nt, Human
uuccucccuucu

SEQ ID NO: 1937180 - RNA, 14 nt, Human
uuccucccuucugc

SEQ ID NO: 1937181 - RNA, 15 nt, Human
uuccucccuucugcu

SEQ ID NO: 1937182 - RNA, 16 nt, Human
uuccucccuucugcua

SEQ ID NO: 1937183 - RNA, 18 nt, Human
uuccucccuucugcuacu

SEQ ID NO: 1937184 - RNA, 12 nt, Human
uuccucccuccc

SEQ ID NO: 1937185 - RNA, 19 nt, Human
uuccucccucccucuuucc

SEQ ID NO: 1937186 - RNA, 21 nt, Human
uuccucccucccucuuucccu

SEQ ID NO: 1937187 - RNA, 15 nt, Human
uucauuucaacuguu

SEQ ID NO: 1937188 - RNA, 22 nt, Human
uucauuugguucauuaauucua

SEQ ID NO: 1937189 - RNA, 17 nt, Human
uucaugauuucauuuca

SEQ ID NO: 1937190 - RNA, 16 nt, Human
uucaugaguuuuuccc

SEQ ID NO: 1937191 - RNA, 23 nt, Human
uucaugauuucauuucaacuguu

SEQ ID NO: 1937192 - RNA, 19 nt, Human
uucauuuaggugaggaagc

SEQ ID NO: 1937193 - RNA, 17 nt, Human
uucaucuugaauuguaa

SEQ ID NO: 1937194 - RNA, 12 nt, Human
uucaucuugaau

SEQ ID NO: 1937195 - RNA, 18 nt, Human
uucaugaaagauucaaug

SEQ ID NO: 1937196 - RNA, 20 nt, Human
uucaucuuccaacucaaacu

SEQ ID NO: 1937197 - RNA, 11 nt, Human
uucaucuugaa

SEQ ID NO: 1937198 - RNA, 22 nt, Human
uucaucucccaccuagcagcac

SEQ ID NO: 1937199 - RNA, 13 nt, Human
uucaguggcagcu

SEQ ID NO: 1937200 - RNA, 19 nt, Human
uucagugccuuauggaaca

SEQ ID NO: 1937201 - RNA, 21 nt, Human
uucagugccuuauggaacacu

SEQ ID NO: 1937202 - RNA, 12 nt, Human
uucaguuuucag

SEQ ID NO: 1937203 - RNA, 14 nt, Human
uucauaaucuuugc

SEQ ID NO: 1937204 - RNA, 21 nt, Human
uucaguuuucauuugguucau

SEQ ID NO: 1937205 - RNA, 15 nt, Human
uucaucuaggauuuu

SEQ ID NO: 1937206 - RNA, 13 nt, Human
uucauaaugacuu

SEQ ID NO: 1937207 - RNA, 23 nt, Human
uucauaaugacuuaagcacacuu

SEQ ID NO: 1937208 - RNA, 19 nt, Human
uuccacuuauaggaauuga

SEQ ID NO: 1937209 - RNA, 15 nt, Human
uucauuuuaugaaga

SEQ ID NO: 1937210 - RNA, 16 nt, Human
uuccagccugccacuc

SEQ ID NO: 1937211 - RNA, 14 nt, Human
uuccagccugccac

SEQ ID NO: 1937212 - RNA, 12 nt, Human
uuccagccugcc

SEQ ID NO: 1937213 - RNA, 20 nt, Human
uuccacuuuuuuuuguaugu

SEQ ID NO: 1937214 - RNA, 23 nt, Human
uuccaugugaggguuuucagcau

SEQ ID NO: 1937215 - RNA, 18 nt, Human
uuccccaaccacuucauu

SEQ ID NO: 1937216 - RNA, 16 nt, Human
uucccaaacgccuccc

SEQ ID NO: 1937217 - RNA, 17 nt, Human
uuccaugaguccccugu

SEQ ID NO: 1937218 - RNA, 17 nt, Human
uuccaugauucuauuua

SEQ ID NO: 1937219 - RNA, 18 nt, Human
uuccaugauucuauuuau

SEQ ID NO: 1937220 - RNA, 24 nt, Human
uuccaugaaaaugcaacaacaugu

SEQ ID NO: 1937221 - RNA, 15 nt, Human
uuccaugaaaaugca

SEQ ID NO: 1937222 - RNA, 13 nt, Human
uuccaucuuuaca

SEQ ID NO: 1937223 - RNA, 18 nt, Human
uuccaucuuuacaaaacu

SEQ ID NO: 1937224 - RNA, 18 nt, Human
uucaauucucauuuguca

SEQ ID NO: 1937225 - RNA, 12 nt, Human
uucaauuccucu

SEQ ID NO: 1937226 - RNA, 16 nt, Human
uucaauuccucuggga

SEQ ID NO: 1937227 - RNA, 20 nt, Human
uucaauguuuuuaaaaaucu

SEQ ID NO: 1937228 - RNA, 19 nt, Human
uucaaugccccugaauuua

SEQ ID NO: 1937229 - RNA, 23 nt, Human
uucaaugguuugcaaggaagcca

SEQ ID NO: 1937230 - RNA, 22 nt, Human
uucaaugguuugcaaggaagcc

SEQ ID NO: 1937231 - RNA, 20 nt, Human
uucaaugguuugcaaggaag

SEQ ID NO: 1937232 - RNA, 21 nt, Human
uucaacagguuuuccugaaga

SEQ ID NO: 1937233 - RNA, 23 nt, Human
uucaaauuguaagcaugcacaaa

SEQ ID NO: 1937234 - RNA, 21 nt, Human
uucaaauugugugugcucugc

SEQ ID NO: 1937235 - RNA, 14 nt, Human
uucaaauugugugu

SEQ ID NO: 1937236 - RNA, 13 nt, Human
uucaaagauauuu

SEQ ID NO: 1937237 - RNA, 13 nt, Human
uuacgugaguccu

SEQ ID NO: 1937238 - RNA, 14 nt, Human
uuacgugaguccug

SEQ ID NO: 1937239 - RNA, 15 nt, Human
uucagagacuccugc

SEQ ID NO: 1937240 - RNA, 20 nt, Human
uucagacucccauuccugaa

SEQ ID NO: 1937241 - RNA, 21 nt, Human
uucagacucccauuccugaag

SEQ ID NO: 1937242 - RNA, 14 nt, Human
uucacucuccuugg

SEQ ID NO: 1937243 - RNA, 12 nt, Human
uucaccccuccc

SEQ ID NO: 1937244 - RNA, 14 nt, Human
uucacucuuggagc

SEQ ID NO: 1937245 - RNA, 19 nt, Human
uucacucuuggagccugca

SEQ ID NO: 1937246 - RNA, 18 nt, Human
uucacucuuggagccugc

SEQ ID NO: 1937247 - RNA, 17 nt, Human
uucaccccaaucccagc

SEQ ID NO: 1937248 - RNA, 23 nt, Human
uucagcuccagcucaccagcccc

SEQ ID NO: 1937249 - RNA, 17 nt, Human
uucagcucugcaagaau

SEQ ID NO: 1937250 - RNA, 24 nt, Human
uucagcucugcaagaauugaagca

SEQ ID NO: 1937251 - RNA, 21 nt, Human
uucagcugguugagguuucaa

SEQ ID NO: 1937252 - RNA, 16 nt, Human
uucaggaagcucaggg

SEQ ID NO: 1937253 - RNA, 18 nt, Human
uucagcugcauacaguuu

SEQ ID NO: 1937254 - RNA, 17 nt, Human
uucagcugacuuuucug

SEQ ID NO: 1937255 - RNA, 19 nt, Human
uucaggaauguguggccug

SEQ ID NO: 1937256 - RNA, 20 nt, Human
uucaggaagcucagggccug

SEQ ID NO: 1937257 - RNA, 15 nt, Human
uucaggaagcucagg

SEQ ID NO: 1937258 - RNA, 17 nt, Human
uucaggaagcucagggc

SEQ ID NO: 1937259 - RNA, 19 nt, Human
uucaggaagcucagggccu

SEQ ID NO: 1937260 - RNA, 20 nt, Human
uuuaucuaauaccucugugu

SEQ ID NO: 1937261 - RNA, 21 nt, Human
uuuaucgucacugcuuaacuu

SEQ ID NO: 1937262 - RNA, 16 nt, Human
uuuauaaacuuuaccu

SEQ ID NO: 1937263 - RNA, 16 nt, Human
uuuaucgucacugcuu

SEQ ID NO: 1937264 - RNA, 14 nt, Human
uuuauaaacuuuac

SEQ ID NO: 1937265 - RNA, 14 nt, Human
uuuauaaaacuucu

SEQ ID NO: 1937266 - RNA, 19 nt, Human
uuuaucuuugauucuccuu

SEQ ID NO: 1937267 - RNA, 18 nt, Human
uuuaucuuugauucuccu

SEQ ID NO: 1937268 - RNA, 13 nt, Human
uuuauugcuuguu

SEQ ID NO: 1937269 - RNA, 18 nt, Human
uuuauuccagaaugcugu

SEQ ID NO: 1937270 - RNA, 19 nt, Human
uuuauuccagaaugcugua

SEQ ID NO: 1937271 - RNA, 22 nt, Human
uuuauuccagaaugcuguacau

SEQ ID NO: 1937272 - RNA, 23 nt, Human
uuuauuccagaaugcuguacauc

SEQ ID NO: 1937273 - RNA, 14 nt, Human
uuuaugcauauuau

SEQ ID NO: 1937274 - RNA, 17 nt, Human
uuuauucaauuccucug

SEQ ID NO: 1937275 - RNA, 17 nt, Human
uuuauuauuuucaccug

SEQ ID NO: 1937276 - RNA, 14 nt, Human
uuuauugucaaagu

SEQ ID NO: 1937277 - RNA, 16 nt, Human
uuuauugucaaagugg

SEQ ID NO: 1937278 - RNA, 20 nt, Human
uuguauuuuacuaauaaaau

SEQ ID NO: 1937279 - RNA, 23 nt, Human
uuguauuuaaaugaaagugagac

SEQ ID NO: 1937280 - RNA, 21 nt, Human
uuuaaucuccaccagucauuu

SEQ ID NO: 1937281 - RNA, 17 nt, Human
uuuacauggcuggagcu

SEQ ID NO: 1937282 - RNA, 15 nt, Human
uuuacaagccccccc

SEQ ID NO: 1937283 - RNA, 21 nt, Human
uuuacaagcccccccuuccac

SEQ ID NO: 1937284 - RNA, 15 nt, Human
uuuacuuuguguuca

SEQ ID NO: 1937285 - RNA, 22 nt, Human
uuuacauggcuggagcuagaau

SEQ ID NO: 1937286 - RNA, 15 nt, Human
uuuagagaggaaaag

SEQ ID NO: 1937287 - RNA, 17 nt, Human
uuuagaagaaguguguc

SEQ ID NO: 1937288 - RNA, 19 nt, Human
uuuagaagaagugugucac

SEQ ID NO: 1937289 - RNA, 15 nt, Human
uuucagcagcugcag

SEQ ID NO: 1937290 - RNA, 21 nt, Human
uuucaaugguuugcaaggaag

SEQ ID NO: 1937291 - RNA, 16 nt, Human
uuucagagaccauugc

SEQ ID NO: 1937292 - RNA, 17 nt, Human
uuucagagaccauugca

SEQ ID NO: 1937293 - RNA, 20 nt, Human
uuucaauaggaaaaacugau

SEQ ID NO: 1937294 - RNA, 22 nt, Human
uuucaauaggaaaaacugauuu

SEQ ID NO: 1937295 - RNA, 13 nt, Human
uuuauuucuuaaa

SEQ ID NO: 1937296 - RNA, 20 nt, Human
uuuauuuguuugugcauuug

SEQ ID NO: 1937297 - RNA, 16 nt, Human
uuuauuucugcauaug

SEQ ID NO: 1937298 - RNA, 14 nt, Human
uuuauuuauuuaca

SEQ ID NO: 1937299 - RNA, 15 nt, Human
uuuccaaaguacacu

SEQ ID NO: 1937300 - RNA, 12 nt, Human
uuuccaaaguac

SEQ ID NO: 1937301 - RNA, 22 nt, Human
uuucauuggaaauuaggaugua

SEQ ID NO: 1937302 - RNA, 13 nt, Human
uuuccaggaaggc

SEQ ID NO: 1937303 - RNA, 18 nt, Human
uuuccagacuuccuugag

SEQ ID NO: 1937304 - RNA, 19 nt, Human
uuuccagacuuccuugaga

SEQ ID NO: 1937305 - RNA, 15 nt, Human
uuucagccaagaauu

SEQ ID NO: 1937306 - RNA, 16 nt, Human
uuucagccaagaauuc

SEQ ID NO: 1937307 - RNA, 14 nt, Human
uuucagcauugaua

SEQ ID NO: 1937308 - RNA, 15 nt, Human
uuucagcauugauau

SEQ ID NO: 1937309 - RNA, 20 nt, Human
uuucagcauugauauuugug

SEQ ID NO: 1937310 - RNA, 22 nt, Human
uuucauugcugggcuugucugu

SEQ ID NO: 1937311 - RNA, 20 nt, Human
uuuccugagaccacagagag

SEQ ID NO: 1937312 - RNA, 14 nt, Human
uuucuaaaggcuac

SEQ ID NO: 1937313 - RNA, 14 nt, Human
uuucuaaagcugcc

SEQ ID NO: 1937314 - RNA, 17 nt, Human
uuucuaaagcugccagc

SEQ ID NO: 1937315 - RNA, 18 nt, Human
uuucuaaaggcuaccuuu

SEQ ID NO: 1937316 - RNA, 17 nt, Human
uuuccucuuccugccua

SEQ ID NO: 1937317 - RNA, 22 nt, Human
uuuccucaaaacuucagacaua

SEQ ID NO: 1937318 - RNA, 21 nt, Human
uuuccugaaacaacuuggaaa

SEQ ID NO: 1937319 - RNA, 21 nt, Human
uuuccucuuuggucuacacug

SEQ ID NO: 1937320 - RNA, 15 nt, Human
uuuccaggcugguuc

SEQ ID NO: 1937321 - RNA, 22 nt, Human
uuuccaggcugguucggauuug

SEQ ID NO: 1937322 - RNA, 23 nt, Human
uuuccuagauggcagucacugaa

SEQ ID NO: 1937323 - RNA, 15 nt, Human
uuucuagccagagga

SEQ ID NO: 1937324 - RNA, 19 nt, Human
uuucuagcuguugagcugu

SEQ ID NO: 1937325 - RNA, 21 nt, Human
uuucuagcuguugagcuguuu

SEQ ID NO: 1937326 - RNA, 16 nt, Human
uuucuaggacugaauu

SEQ ID NO: 1937327 - RNA, 24 nt, Human
uuucuccccugcccccaggacugg

SEQ ID NO: 1937328 - RNA, 23 nt, Human
uuucuccccugcccccaggacug

SEQ ID NO: 1937329 - RNA, 22 nt, Human
uuucuccccugcccccaggacu

SEQ ID NO: 1937330 - RNA, 12 nt, Human
uuucucuuucuu

SEQ ID NO: 1937331 - RNA, 14 nt, Human
uuucucuuucuuua

SEQ ID NO: 1937332 - RNA, 14 nt, Human
uuuucacaaauaaa

SEQ ID NO: 1937333 - RNA, 23 nt, Human
uuuucacacaauacaauaaguua

SEQ ID NO: 1937334 - RNA, 13 nt, Human
uuuucacaaauaa

SEQ ID NO: 1937335 - RNA, 15 nt, Human
uuuucacaguucucu

SEQ ID NO: 1937336 - RNA, 14 nt, Human
uuuucaauauuuau

SEQ ID NO: 1937337 - RNA, 16 nt, Human
uuuucaauauuuauua

SEQ ID NO: 1937338 - RNA, 13 nt, Human
uuuuaugcauguu

SEQ ID NO: 1937339 - RNA, 13 nt, Human
uuuucaacugcca

SEQ ID NO: 1937340 - RNA, 23 nt, Human
uuuucaacugccaaaaugcucua

SEQ ID NO: 1937341 - RNA, 14 nt, Human
uuuucuucucccuc

SEQ ID NO: 1937342 - RNA, 17 nt, Human
uuuucuugcaugaggcu

SEQ ID NO: 1937343 - RNA, 15 nt, Human
uuuuccuucagugcc

SEQ ID NO: 1937344 - RNA, 18 nt, Human
uuuuccaugaguccccug

SEQ ID NO: 1937345 - RNA, 19 nt, Human
uuuuccaugaguccccugu

SEQ ID NO: 1937346 - RNA, 14 nt, Human
uuuuccucccuucu

SEQ ID NO: 1937347 - RNA, 17 nt, Human
uuuuccucccuucugcu

SEQ ID NO: 1937348 - RNA, 20 nt, Human
uuuuccucccuucugcuacu

SEQ ID NO: 1937349 - RNA, 21 nt, Human
uuuuccucccuucugcuacug

SEQ ID NO: 1937350 - RNA, 19 nt, Human
uuuuaucauuuucaaaaug

SEQ ID NO: 1937351 - RNA, 18 nt, Human
uuuuaucgucacugcuua

SEQ ID NO: 1937352 - RNA, 16 nt, Human
uuuuaugauacuugaa

SEQ ID NO: 1937353 - RNA, 20 nt, Human
uuuuaugauacuugaaaauu

SEQ ID NO: 1937354 - RNA, 14 nt, Human
uuuuacuguacaga

SEQ ID NO: 1937355 - RNA, 15 nt, Human
uuuuacugaagccuu

SEQ ID NO: 1937356 - RNA, 19 nt, Human
uuuuacugaagccuuucuu

SEQ ID NO: 1937357 - RNA, 20 nt, Human
uuuuauaucaauuuaaaaaa

SEQ ID NO: 1937358 - RNA, 22 nt, Human
uuuuauaugaagauaaguguau

SEQ ID NO: 1937359 - RNA, 15 nt, Human
uuuuaaaaugagaaa

SEQ ID NO: 1937360 - RNA, 22 nt, Human
uuuuaaaaugagaaaucuaaaa

SEQ ID NO: 1937361 - RNA, 22 nt, Human
uuuuacauaaauuuaguauuuu

SEQ ID NO: 1937362 - RNA, 21 nt, Human
uuuuaauuugguuuucacauu

SEQ ID NO: 1937363 - RNA, 17 nt, Human
uuuuaauuugguuuuca

SEQ ID NO: 1937364 - RNA, 13 nt, Human
uuuuaauuugaua

SEQ ID NO: 1937365 - RNA, 23 nt, Human
uuugcauaguaccaaucauuuua

SEQ ID NO: 1937366 - RNA, 19 nt, Human
uuugcauaauaaaugcuuc

SEQ ID NO: 1937367 - RNA, 18 nt, Human
uuugccauguuggccagg

SEQ ID NO: 1937368 - RNA, 14 nt, Human
uuugcagacaggca

SEQ ID NO: 1937369 - RNA, 21 nt, Human
uuugcacuugugauuauuuau

SEQ ID NO: 1937370 - RNA, 18 nt, Human
uuugauaguauugugcau

SEQ ID NO: 1937371 - RNA, 19 nt, Human
uuugcauaacguauaaaag

SEQ ID NO: 1937372 - RNA, 23 nt, Human
uuugcauaacguauaaaagccug

SEQ ID NO: 1937373 - RNA, 15 nt, Human
uuugagcagggcuca

SEQ ID NO: 1937374 - RNA, 16 nt, Human
uuugagcauggguuca

SEQ ID NO: 1937375 - RNA, 22 nt, Human
uuucuuacugucuuuuuucuaa

SEQ ID NO: 1937376 - RNA, 22 nt, Human
uuugaggucuguucuuuccaaa

SEQ ID NO: 1937377 - RNA, 17 nt, Human
uuugaggucuguucuuu

SEQ ID NO: 1937378 - RNA, 13 nt, Human
uuugagugccuua

SEQ ID NO: 1937379 - RNA, 16 nt, Human
uuugagguggaagagg

SEQ ID NO: 1937380 - RNA, 16 nt, Human
uuuguugucagcugaa

SEQ ID NO: 1937381 - RNA, 15 nt, Human
uuuguuccccuccuc

SEQ ID NO: 1937382 - RNA, 13 nt, Human
uuuguuccccucc

SEQ ID NO: 1937383 - RNA, 12 nt, Human
uuuguuccccuc

SEQ ID NO: 1937384 - RNA, 23 nt, Human
uuuguucccauccucuucuuuua

SEQ ID NO: 1937385 - RNA, 18 nt, Human
uuuguuccccuccuccac

SEQ ID NO: 1937386 - RNA, 16 nt, Human
uuuguuccccuccucc

SEQ ID NO: 1937387 - RNA, 14 nt, Human
uuuguucccauccu

SEQ ID NO: 1937388 - RNA, 13 nt, Human
uuuguccccaccg

SEQ ID NO: 1937389 - RNA, 21 nt, Human
uuuguccccaccgcagacagg

SEQ ID NO: 1937390 - RNA, 13 nt, Human
uuuguguucuuug

SEQ ID NO: 1937391 - RNA, 17 nt, Human
uuuguccuaaaacaccu

SEQ ID NO: 1937392 - RNA, 22 nt, Human
uuuguaaauuaacuuuuauaaa

SEQ ID NO: 1937393 - RNA, 19 nt, Human
uuuggugguuucagaaaug

SEQ ID NO: 1937394 - RNA, 15 nt, Human
uuuggaauacuuuuu

SEQ ID NO: 1937395 - RNA, 17 nt, Human
uuuggaauacuuuuugu

SEQ ID NO: 1937396 - RNA, 13 nt, Human
uuuggaauacuuu

SEQ ID NO: 1937397 - RNA, 16 nt, Human
uuugguuaagcuuuga

SEQ ID NO: 1937398 - RNA, 17 nt, Human
uuuguaaauuaacuuuu

SEQ ID NO: 1937399 - RNA, 16 nt, Human
uuuguaaauuaacuuu

SEQ ID NO: 1937400 - RNA, 15 nt, Human
uuuguaaauuaacuu

SEQ ID NO: 1937401 - RNA, 16 nt, Human
uuuuuuaugcuaauca

SEQ ID NO: 1937402 - RNA, 12 nt, Human
uuuuuucugaaa

SEQ ID NO: 1937403 - RNA, 13 nt, Human
uuuuuuaugcuaa

SEQ ID NO: 1937404 - RNA, 17 nt, Human
uuuuuuccuucagugcc

SEQ ID NO: 1937405 - RNA, 20 nt, Human
uuuuuuauacaggaugauga

SEQ ID NO: 1937406 - RNA, 12 nt, Human
uuuuuuacuaau

SEQ ID NO: 1937407 - RNA, 13 nt, Human
uuuugaaaaacug

SEQ ID NO: 1937408 - RNA, 21 nt, Human
uuuucuugccucuguccccuu

SEQ ID NO: 1937409 - RNA, 19 nt, Human
uuuucuugccucugucccc

SEQ ID NO: 1937410 - RNA, 18 nt, Human
uuuucuugccucuguccc

SEQ ID NO: 1937411 - RNA, 13 nt, Human
uuuuuucuuacug

SEQ ID NO: 1937412 - RNA, 14 nt, Human
cuggcagcucagcu

SEQ ID NO: 1937413 - RNA, 18 nt, Human
gugccauagucacauggc

SEQ ID NO: 1937414 - RNA, 20 nt, Human
gugcugcugcugcuguggcg

SEQ ID NO: 1937415 - RNA, 19 nt, Human
ggcuccaacacugcugcuc

SEQ ID NO: 1937416 - RNA, 13 nt, Human
ggacgugggcugg

SEQ ID NO: 1937417 - RNA, 21 nt, Human
ggagggcacaggugucugccc

SEQ ID NO: 1937418 - RNA, 20 nt, Human
cccaggugaguccuagagcu

SEQ ID NO: 1937419 - RNA, 19 nt, Human
ccuuucauuuacuguggcu

SEQ ID NO: 1937420 - RNA, 17 nt, Human
gcugcuccagugcagga

SEQ ID NO: 1937421 - RNA, 23 nt, Human
ugcaguuugagacaggagaccug

SEQ ID NO: 1937422 - RNA, 14 nt, Human
aaauuaaggcauaa

SEQ ID NO: 1937423 - RNA, 12 nt, Human
aaaaauugugau

SEQ ID NO: 1937424 - RNA, 17 nt, Human
acccaggaguguggcca

SEQ ID NO: 1937425 - RNA, 23 nt, Human
agacaggagaccuggcacuggau

SEQ ID NO: 1937426 - RNA, 15 nt, Human
agccuggugcugcug

SEQ ID NO: 1937427 - RNA, 16 nt, Human
acuuugacaaccauga

SEQ ID NO: 1937428 - RNA, 13 nt, Human
gguccacagggca

SEQ ID NO: 1937429 - RNA, 18 nt, Human
gggucgacuucgggcugg

SEQ ID NO: 1937430 - RNA, 16 nt, Human
gcugcuguggcgugag

SEQ ID NO: 1937431 - RNA, 18 nt, Human
gcccagccacggacgcug

SEQ ID NO: 1937432 - RNA, 21 nt, Human
ggcacccaagaccucagggca

SEQ ID NO: 1937433 - RNA, 22 nt, Human
gcuuccccaacacgcaggagca

SEQ ID NO: 1937434 - RNA, 14 nt, Human
uacccauauuacag

SEQ ID NO: 1937435 - RNA, 17 nt, Human
ucaccuugaagaaccuc

SEQ ID NO: 1937436 - RNA, 17 nt, Human
cuuucauuuacuguggc

SEQ ID NO: 1937437 - RNA, 16 nt, Human
uccugagggagcucca

SEQ ID NO: 1937438 - RNA, 17 nt, Human
gugucuguacacguguc

SEQ ID NO: 1937439 - RNA, 12 nt, Human
uaaguugcugau

SEQ ID NO: 1937440 - RNA, 14 nt, Human
gcccagaggagcug

SEQ ID NO: 1937441 - RNA, 15 nt, Human
gccagagagccuggu

SEQ ID NO: 1937442 - RNA, 19 nt, Human
ugcauacccgggcagggcu

SEQ ID NO: 1937443 - RNA, 20 nt, Human
aaauugugaucagaccauaa

SEQ ID NO: 1937444 - RNA, 16 nt, Human
aaguugcugaugaacu

SEQ ID NO: 1937445 - RNA, 22 nt, Human
acaagcuaaaauuagaugaacu

SEQ ID NO: 1937446 - RNA, 14 nt, Human
cugcugcuguggcg

SEQ ID NO: 1937447 - RNA, 11 nt, Human
cgggcagggcc

SEQ ID NO: 1937448 - RNA, 12 nt, Human
cggggcagggca

SEQ ID NO: 1937449 - RNA, 17 nt, Human
cugccacccugggccug

SEQ ID NO: 1937450 - RNA, 17 nt, Human
cccccacauccugugcc

SEQ ID NO: 1937451 - RNA, 22 nt, Human
cagcccccacauccugugccuc

SEQ ID NO: 1937452 - RNA, 23 nt, Human
ccaagcagagaagcucucgggcu

SEQ ID NO: 1937453 - RNA, 18 nt, Human
ccacccaggaguguggcc

SEQ ID NO: 1937454 - RNA, 16 nt, Human
cagugaggcugcaccc

SEQ ID NO: 1937455 - RNA, 18 nt, Human
caguuggccagagagccu

SEQ ID NO: 1937456 - RNA, 17 nt, Human
auuuuaggaggaccaga

SEQ ID NO: 1937457 - RNA, 14 nt, Human
agucauuugcugag

SEQ ID NO: 1937458 - RNA, 22 nt, Human
uaaucauauaauaaauguacau

SEQ ID NO: 1937459 - RNA, 12 nt, Human
uaccauguacau

SEQ ID NO: 1937460 - RNA, 17 nt, Human
auugugaucagaccaua

SEQ ID NO: 1937461 - RNA, 18 nt, Human
acucaauguuacuaucug

SEQ ID NO: 1937462 - RNA, 21 nt, Human
gagucgcaucucagugcagga

SEQ ID NO: 1937463 - RNA, 16 nt, Human
gcagacuugaccccga

SEQ ID NO: 1937464 - RNA, 15 nt, Human
cuucugccugcaccc

SEQ ID NO: 1937465 - RNA, 19 nt, Human
acucuucaaggacuuucug

SEQ ID NO: 1937466 - RNA, 17 nt, Human
accugccacccugggcc

SEQ ID NO: 1937467 - RNA, 22 nt, Human
aacucuuaaucaaauagcauaa

SEQ ID NO: 1937468 - RNA, 21 nt, Human herpesvirus 4 [Epstein-Barr virus]
acaggccuggcggguggagau

SEQ ID NO: 1937469 - RNA, 13 nt, Human herpesvirus 4 [Epstein-Barr virus]
ugccgucccaggg

SEQ ID NO: 1937470 - RNA, 23 nt, Human herpesvirus 4 [Epstein-Barr virus]
ggcuucuuagaugaggagcaggc

SEQ ID NO: 1937471 - RNA, 14 nt, Human herpesvirus 4 [Epstein-Barr virus]
acucugaaaaugau

SEQ ID NO: 1937472 - RNA, 12 nt, Human herpesvirus 4 [Epstein-Barr virus]
ugaaucaggguc

SEQ ID NO: 1937473 - RNA, 19 nt, Human herpesvirus 4 [Epstein-Barr virus]
cugccaacuuugagcuggg

SEQ ID NO: 1937474 - RNA, 14 nt, Human herpesvirus 4 [Epstein-Barr virus]
augaacccuggggc

SEQ ID NO: 1937475 - RNA, 16 nt, Human herpesvirus 4 [Epstein-Barr virus]
cccgagaccggcuccg

SEQ ID NO: 1937476 - RNA, 15 nt, Human herpesvirus 4 [Epstein-Barr virus]
ugugaccgucuacau

SEQ ID NO: 1937477 - RNA, 22 nt, Human herpesvirus 4 [Epstein-Barr virus]
agcuacacucuggggucucagg

SEQ ID NO: 1937478 - RNA, 16 nt, Human herpesvirus 4 [Epstein-Barr virus]
cucucuggcugugcug

SEQ ID NO: 1937479 - RNA, 12 nt, Human herpesvirus 4 [Epstein-Barr virus]
gucccccuccau

SEQ ID NO: 1937480 - RNA, 13 nt, Human herpesvirus 4 [Epstein-Barr virus]
ccacacagcgcca

SEQ ID NO: 1937481 - RNA, 21 nt, Human herpesvirus 4 [Epstein-Barr virus]
cugggcauaaauucuccugcc

SEQ ID NO: 1937482 - RNA, 15 nt, Human herpesvirus 4 [Epstein-Barr virus]
aucccaggccucagc

SEQ ID NO: 1937483 - RNA, 14 nt, Human herpesvirus 4 [Epstein-Barr virus]
gcagagagccacau

SEQ ID NO: 1937484 - RNA, 20 nt, Human herpesvirus 4 [Epstein-Barr virus]
gggccagguacaggaccugg

SEQ ID NO: 1937485 - RNA, 15 nt, Human herpesvirus 4 [Epstein-Barr virus]
ucugacauuucucau

SEQ ID NO: 1937486 - RNA, 23 nt, Human herpesvirus 4 [Epstein-Barr virus]
cgcuucagcuccuugugcagcuu

SEQ ID NO: 1937487 - RNA, 23 nt, Human herpesvirus 4 [Epstein-Barr virus]
uguuucucagagagcauuucagg

SEQ ID NO: 1937488 - RNA, 18 nt, Human herpesvirus 4 [Epstein-Barr virus]
uccaugacgcugcugcua

SEQ ID NO: 1937489 - RNA, 15 nt, Human herpesvirus 4 [Epstein-Barr virus]
gcugguggccuggga

SEQ ID NO: 1937490 - RNA, 18 nt, Human herpesvirus 4 [Epstein-Barr virus]
gggcugguggccugggag

SEQ ID NO: 1937491 - RNA, 15 nt, Human herpesvirus 4 [Epstein-Barr virus]
cugcuacuacugccu

SEQ ID NO: 1937492 - RNA, 23 nt, Human herpesvirus 4 [Epstein-Barr virus]
gaaaggguuggcaguguggcccg

SEQ ID NO: 1937493 - RNA, 17 nt, Human herpesvirus 4 [Epstein-Barr virus]
cacauacaucccugucu

SEQ ID NO: 1937494 - RNA, 17 nt, Human herpesvirus 4 [Epstein-Barr virus]
agggagacacaucugga

SEQ ID NO: 1937495 - RNA, 13 nt, Human herpesvirus 4 [Epstein-Barr virus]
cgcugggccaggu

SEQ ID NO: 1937496 - RNA, 17 nt, Human herpesvirus 4 [Epstein-Barr virus]
cgccaugcucagggcca

SEQ ID NO: 1937497 - RNA, 17 nt, Human herpesvirus 4 [Epstein-Barr virus]
cgugcaaccaggcccac

SEQ ID NO: 1937498 - RNA, 14 nt, Human herpesvirus 4 [Epstein-Barr virus]
cucccguacccacc

SEQ ID NO: 1937499 - RNA, 23 nt, Human herpesvirus 4 [Epstein-Barr virus]
cugcccuagagguuuugcuaggg

SEQ ID NO: 1937500 - RNA, 14 nt, Human herpesvirus 4 [Epstein-Barr virus]
agccauuggcaugg

SEQ ID NO: 1937501 - RNA, 21 nt, Human herpesvirus 4 [Epstein-Barr virus]
ccugucucuuucuggccaacc

SEQ ID NO: 1937502 - RNA, 13 nt, Human herpesvirus 4 [Epstein-Barr virus]
agacuccugccug

SEQ ID NO: 1937503 - RNA, 23 nt, Human herpesvirus 4 [Epstein-Barr virus]
uggcuguacgccgccgccagcag

SEQ ID NO: 1937504 - RNA, 13 nt, Human herpesvirus 4 [Epstein-Barr virus]
acgacuguuccua

SEQ ID NO: 1937505 - RNA, 23 nt, Human herpesvirus 4 [Epstein-Barr virus]
gacacaggacuaaccaugccauc

SEQ ID NO: 1937506 - RNA, 22 nt, Human herpesvirus 4 [Epstein-Barr virus]
ugguguauuucuggccaucugu

SEQ ID NO: 1937507 - RNA, 10 nt, Human herpesvirus 4 [Epstein-Barr virus]
ucggcgccgc

SEQ ID NO: 1937508 - RNA, 18 nt, Human herpesvirus 4 [Epstein-Barr virus]
acaugcugaugugcugcc

SEQ ID NO: 1937509 - RNA, 22 nt, Human herpesvirus 4 [Epstein-Barr virus]
ccagccgggugcacacgcucag

SEQ ID NO: 1937510 - RNA, 13 nt, Human herpesvirus 4 [Epstein-Barr virus]
cagagccucugcc

SEQ ID NO: 1937511 - RNA, 18 nt, Human herpesvirus 4 [Epstein-Barr virus]
cccucugccuccggccgc

SEQ ID NO: 1937512 - RNA, 16 nt, Human herpesvirus 4 [Epstein-Barr virus]
cuccgcauccuaggca

SEQ ID NO: 1937513 - RNA, 22 nt, Human herpesvirus 4 [Epstein-Barr virus]
ugucuaacacgcuuuugucugc

SEQ ID NO: 1937514 - RNA, 16 nt, Human herpesvirus 4 [Epstein-Barr virus]
gucaaguaccagcugg

SEQ ID NO: 1937515 - RNA, 20 nt, Human herpesvirus 4 [Epstein-Barr virus]
ccgcauccuaggcacggccu

SEQ ID NO: 1937516 - RNA, 14 nt, Human herpesvirus 4 [Epstein-Barr virus]
ggugggguggugua

SEQ ID NO: 1937517 - RNA, 16 nt, Human herpesvirus 4 [Epstein-Barr virus]
gagaccaaggcggcug

SEQ ID NO: 1937518 - RNA, 14 nt, Human herpesvirus 4 [Epstein-Barr virus]
auggugcuggucuc

SEQ ID NO: 1937519 - RNA, 21 nt, Human herpesvirus 4 [Epstein-Barr virus]
gauggggcgcgcuucagcucc

SEQ ID NO: 1937520 - RNA, 16 nt, Human herpesvirus 4 [Epstein-Barr virus]
ggccucaaaguccugc

SEQ ID NO: 1937521 - RNA, 16 nt, Human herpesvirus 4 [Epstein-Barr virus]
cuggcagaaaggcugg

SEQ ID NO: 1937522 - RNA, 13 nt, Human herpesvirus 4 [Epstein-Barr virus]
auccaguggggcu

SEQ ID NO: 1937523 - RNA, 13 nt, Human herpesvirus 4 [Epstein-Barr virus]
caggcagaggaag

SEQ ID NO: 1937524 - RNA, 22 nt, Human herpesvirus 4 [Epstein-Barr virus]
ccaacgagggcagacaccaccu

SEQ ID NO: 1937525 - RNA, 14 nt, Human herpesvirus 4 [Epstein-Barr virus]
aggggcgagcagcg

SEQ ID NO: 1937526 - RNA, 19 nt, Human herpesvirus 4 [Epstein-Barr virus]
cucagcgucaggagagggc

SEQ ID NO: 1937527 - RNA, 13 nt, Human herpesvirus 4 [Epstein-Barr virus]
aaaaauucagacc

SEQ ID NO: 1937528 - RNA, 22 nt, Human herpesvirus 4 [Epstein-Barr virus]
aucuggcuggggcauuaacuaa

SEQ ID NO: 1937529 - RNA, 23 nt, Human herpesvirus 4 [Epstein-Barr virus]
acagcaauggcacggaugccugg

SEQ ID NO: 1937530 - RNA, 20 nt, Human herpesvirus 4 [Epstein-Barr virus]
accgcgcccuccucugggcc

SEQ ID NO: 1937531 - RNA, 16 nt, Human herpesvirus 4 [Epstein-Barr virus]
cugcugccgucccagg

SEQ ID NO: 1937532 - RNA, 11 nt, Human herpesvirus 4 [Epstein-Barr virus]
cuccauuccac

SEQ ID NO: 1937533 - RNA, 19 nt, Human herpesvirus 4 [Epstein-Barr virus]
guaggcuugauagcaguga

SEQ ID NO: 1937534 - RNA, 21 nt, Human herpesvirus 4 [Epstein-Barr virus]
caaguuuaagcaacugcugca

SEQ ID NO: 1937535 - RNA, 15 nt, Human herpesvirus 4 [Epstein-Barr virus]
aaauaaauguuacuu

SEQ ID NO: 1937536 - RNA, 17 nt, Human herpesvirus 4 [Epstein-Barr virus]
ugacuacaauguuccuu

SEQ ID NO: 1937537 - RNA, 21 nt, Human herpesvirus 4 [Epstein-Barr virus]
cccacugucacugugcacucu

SEQ ID NO: 1937538 - RNA, 19 nt, Human herpesvirus 4 [Epstein-Barr virus]
agcagauagccggccaggc

SEQ ID NO: 1937539 - RNA, 13 nt, Human herpesvirus 4 [Epstein-Barr virus]
aggcccaggaccu

SEQ ID NO: 1937540 - RNA, 23 nt, Human herpesvirus 4 [Epstein-Barr virus]
aguccugucucuuuguguucuug

SEQ ID NO: 1937541 - RNA, 14 nt, Human herpesvirus 4 [Epstein-Barr virus]
agacaccaggcgcc

SEQ ID NO: 1937542 - RNA, 22 nt, Human herpesvirus 4 [Epstein-Barr virus]
aggucugcgaugaggcgguggg

SEQ ID NO: 1937543 - RNA, 20 nt, Human herpesvirus 4 [Epstein-Barr virus]
cgugaauugugcccaccaga

SEQ ID NO: 1937544 - RNA, 14 nt, Human herpesvirus 4 [Epstein-Barr virus]
gccccggcuggcca

SEQ ID NO: 1937545 - RNA, 23 nt, Human herpesvirus 4 [Epstein-Barr virus]
accugucugauugcacccuggcc

SEQ ID NO: 1937546 - RNA, 21 nt, Human herpesvirus 4 [Epstein-Barr virus]
acagggguauguggugccaug

SEQ ID NO: 1937547 - RNA, 19 nt, Human herpesvirus 4 [Epstein-Barr virus]
ucuugauagggauccgcua

SEQ ID NO: 1937548 - RNA, 20 nt, Human herpesvirus 4 [Epstein-Barr virus]
gauuugcucuucgugcucuu

SEQ ID NO: 1937549 - RNA, 13 nt, Human herpesvirus 4 [Epstein-Barr virus]
uguuuuuggcaug

SEQ ID NO: 1937550 - RNA, 16 nt, Human herpesvirus 4 [Epstein-Barr virus]
cagcccggccgaggcc

SEQ ID NO: 1937551 - RNA, 23 nt, Human herpesvirus 4 [Epstein-Barr virus]
cauccugaagcgaagcagcuccg

SEQ ID NO: 1937552 - RNA, 21 nt, Human herpesvirus 4 [Epstein-Barr virus]
cggcccacgccauaccugcac

SEQ ID NO: 1937553 - RNA, 16 nt, Human herpesvirus 4 [Epstein-Barr virus]
cgacgcggugcugacc

SEQ ID NO: 1937554 - RNA, 17 nt, Human herpesvirus 4 [Epstein-Barr virus]
gacuacaauguuccuuc

SEQ ID NO: 1937555 - RNA, 19 nt, Human herpesvirus 4 [Epstein-Barr virus]
cacagaaacuacacggccu

SEQ ID NO: 1937556 - RNA, 17 nt, Human herpesvirus 4 [Epstein-Barr virus]
cagaccugaucagggaa

SEQ ID NO: 1937557 - RNA, 12 nt, Human herpesvirus 4 [Epstein-Barr virus]
cagggcaacacc

SEQ ID NO: 1937558 - RNA, 18 nt, Human herpesvirus 4 [Epstein-Barr virus]
accgaauggggcagugga

SEQ ID NO: 1937559 - RNA, 19 nt, Human herpesvirus 4 [Epstein-Barr virus]
cgggcaaacagggcagaga

SEQ ID NO: 1937560 - RNA, 13 nt, Human herpesvirus 4 [Epstein-Barr virus]
cuccuugugcagc

SEQ ID NO: 1937561 - RNA, 21 nt, Human herpesvirus 4 [Epstein-Barr virus]
gucucuuucuggccaaccugc

SEQ ID NO: 1937562 - RNA, 14 nt, Human herpesvirus 4 [Epstein-Barr virus]
gccacacuggggac

SEQ ID NO: 1937563 - RNA, 20 nt, Human herpesvirus 4 [Epstein-Barr virus]
gaccacauacaucccugucu

SEQ ID NO: 1937564 - RNA, 13 nt, Human herpesvirus 4 [Epstein-Barr virus]
ucgugcucuucau

SEQ ID NO: 1937565 - RNA, 21 nt, Human herpesvirus 4 [Epstein-Barr virus]
aucaaccugauucccccugcu

SEQ ID NO: 1937566 - RNA, 21 nt, Human herpesvirus 4 [Epstein-Barr virus]
ggcgccgcccgggggccaguc

SEQ ID NO: 1937567 - RNA, 13 nt, Human herpesvirus 4 [Epstein-Barr virus]
gccgcggcccagg

SEQ ID NO: 1937568 - RNA, 13 nt, Human herpesvirus 4 [Epstein-Barr virus]
gccggggcccacg

SEQ ID NO: 1937569 - RNA, 14 nt, Human herpesvirus 4 [Epstein-Barr virus]
ccucauuggcuuug

SEQ ID NO: 1937570 - RNA, 13 nt, Human herpesvirus 4 [Epstein-Barr virus]
ggcucauggaggg

SEQ ID NO: 1937571 - RNA, 15 nt, Human herpesvirus 4 [Epstein-Barr virus]
gauugaggcaauggc

SEQ ID NO: 1937572 - RNA, 19 nt, Human herpesvirus 4 [Epstein-Barr virus]
agaagugugucccccucca

SEQ ID NO: 1937573 - RNA, 16 nt, Human herpesvirus 4 [Epstein-Barr virus]
cauuuucguccuccca

SEQ ID NO: 1937574 - RNA, 18 nt, Human herpesvirus 4 [Epstein-Barr virus]
ggugaacacuugggcacg

SEQ ID NO: 1937575 - RNA, 23 nt, Human herpesvirus 4 [Epstein-Barr virus]
guagcccuuggaacugacgggca

SEQ ID NO: 1937576 - RNA, 16 nt, Human herpesvirus 4 [Epstein-Barr virus]
augaaaauguguauuc

SEQ ID NO: 1937577 - RNA, 22 nt, Human herpesvirus 4 [Epstein-Barr virus]
guggcagaaucaccagagccca

SEQ ID NO: 1937578 - RNA, 23 nt, Human herpesvirus 4 [Epstein-Barr virus]
cuuuccuagaaacugugccaugg

SEQ ID NO: 1937579 - RNA, 11 nt, Human herpesvirus 4 [Epstein-Barr virus]
cugacagagcc

SEQ ID NO: 1937580 - RNA, 20 nt, Human herpesvirus 4 [Epstein-Barr virus]
ucccguggagaguagggagg

SEQ ID NO: 1937581 - RNA, 19 nt, Human herpesvirus 4 [Epstein-Barr virus]
gcauuuuuggugcugccug

SEQ ID NO: 1937582 - RNA, 14 nt, Human herpesvirus 4 [Epstein-Barr virus]
gccagccaccccag

SEQ ID NO: 1937583 - RNA, 14 nt, Human herpesvirus 4 [Epstein-Barr virus]
ugagcuauguggaa

SEQ ID NO: 1937584 - RNA, 19 nt, Human herpesvirus 4 [Epstein-Barr virus]
ucacuaaaguuggucaggc

SEQ ID NO: 1937585 - RNA, 22 nt, Human herpesvirus 4 [Epstein-Barr virus]
agccacggcgucaaacagguga

SEQ ID NO: 1937586 - RNA, 14 nt, Human herpesvirus 4 [Epstein-Barr virus]
cgauaccgggucag

SEQ ID NO: 1937587 - RNA, 22 nt, Human herpesvirus 4 [Epstein-Barr virus]
caauaaaguugaugauauugaa

SEQ ID NO: 1937588 - RNA, 15 nt, Human herpesvirus 4 [Epstein-Barr virus]
uggcuguagccaccc

SEQ ID NO: 1937589 - RNA, 21 nt, Human herpesvirus 4 [Epstein-Barr virus]
gucgcuggcauacucuucauu

SEQ ID NO: 1937590 - RNA, 15 nt, Human herpesvirus 4 [Epstein-Barr virus]
cucuaucaaggaaac

SEQ ID NO: 1937591 - RNA, 18 nt, Human herpesvirus 4 [Epstein-Barr virus]
aggccccuuacuuccaca

SEQ ID NO: 1937592 - RNA, 15 nt, Human herpesvirus 4 [Epstein-Barr virus]
gaggaggaccuggug

SEQ ID NO: 1937593 - RNA, 19 nt, Human herpesvirus 4 [Epstein-Barr virus]
aguuacaccgucaacagau

SEQ ID NO: 1937594 - RNA, 15 nt, Human herpesvirus 4 [Epstein-Barr virus]
gacaccugcacgaga

SEQ ID NO: 1937595 - RNA, 13 nt, Human herpesvirus 4 [Epstein-Barr virus]
gaggagacgugug

SEQ ID NO: 1937596 - RNA, 22 nt, Human herpesvirus 4 [Epstein-Barr virus]
acaugggccacugcaggcugga

SEQ ID NO: 1937597 - RNA, 16 nt, Human herpesvirus 4 [Epstein-Barr virus]
cggcaccgccaggugg

SEQ ID NO: 1937598 - RNA, 15 nt, Human herpesvirus 4 [Epstein-Barr virus]
uggugggcuccuuag

SEQ ID NO: 1937599 - RNA, 20 nt, Human herpesvirus 4 [Epstein-Barr virus]
gggccacugcaggcuggacg

SEQ ID NO: 1937600 - RNA, 19 nt, Human herpesvirus 4 [Epstein-Barr virus]
caccauagcaugucacaca

SEQ ID NO: 1937601 - RNA, 18 nt, Human herpesvirus 4 [Epstein-Barr virus]
gaggauaaucugggcagc

SEQ ID NO: 1937602 - RNA, 19 nt, Human herpesvirus 4 [Epstein-Barr virus]
agaggccucugggguccag

SEQ ID NO: 1937603 - RNA, 18 nt, Human herpesvirus 4 [Epstein-Barr virus]
auagccggccaggcagag

SEQ ID NO: 1937604 - RNA, 20 nt, Human herpesvirus 4 [Epstein-Barr virus]
aggcuccuggaucuggggcu

SEQ ID NO: 1937605 - RNA, 21 nt, Human herpesvirus 4 [Epstein-Barr virus]
ggguggacagcagcguccugg

SEQ ID NO: 1937606 - RNA, 19 nt, Human herpesvirus 4 [Epstein-Barr virus]
cccggggguggaggcugcg

SEQ ID NO: 1937607 - RNA, 19 nt, Human herpesvirus 4 [Epstein-Barr virus]
gacuucauauguaugccuu

SEQ ID NO: 1937608 - RNA, 19 nt, Human herpesvirus 4 [Epstein-Barr virus]
aaugaacacucauggugug

SEQ ID NO: 1937609 - RNA, 15 nt, Human herpesvirus 4 [Epstein-Barr virus]
gaccaauacccagga

SEQ ID NO: 1937610 - RNA, 18 nt, Human herpesvirus 4 [Epstein-Barr virus]
cuccauuccacccacuga

SEQ ID NO: 1937611 - RNA, 18 nt, Human herpesvirus 4 [Epstein-Barr virus]
uggccuccagcucggcca

SEQ ID NO: 1937612 - RNA, 20 nt, Human herpesvirus 4 [Epstein-Barr virus]
cggagaucaucccacuggga

SEQ ID NO: 1937613 - RNA, 15 nt, Human herpesvirus 4 [Epstein-Barr virus]
gaaggacagggggac

SEQ ID NO: 1937614 - RNA, 13 nt, Human herpesvirus 4 [Epstein-Barr virus]
gucccugcugccc

SEQ ID NO: 1937615 - RNA, 22 nt, Human herpesvirus 4 [Epstein-Barr virus]
gcgacauguuucuggugagcca

SEQ ID NO: 1937616 - RNA, 14 nt, Human herpesvirus 4 [Epstein-Barr virus]
ccuggaagcaggag

SEQ ID NO: 1937617 - RNA, 20 nt, Human herpesvirus 4 [Epstein-Barr virus]
uccacgggaugacucaucuc

SEQ ID NO: 1937618 - RNA, 21 nt, Human herpesvirus 4 [Epstein-Barr virus]
cagugacgaagacccaucuga

SEQ ID NO: 1937619 - RNA, 16 nt, Human herpesvirus 4 [Epstein-Barr virus]
gggugaccuggcucag

SEQ ID NO: 1937620 - RNA, 13 nt, Human herpesvirus 4 [Epstein-Barr virus]
cuuuccaguuccc

SEQ ID NO: 1937621 - RNA, 18 nt, Human herpesvirus 4 [Epstein-Barr virus]
cguccccgggagcgggag

SEQ ID NO: 1937622 - RNA, 23 nt, Human herpesvirus 4 [Epstein-Barr virus]
gaagaagcccaccuaugugaccg

SEQ ID NO: 1937623 - RNA, 11 nt, Human herpesvirus 4 [Epstein-Barr virus]
gaaaaaccaga

SEQ ID NO: 1937624 - RNA, 16 nt, Human herpesvirus 4 [Epstein-Barr virus]
augccuuggcaugacg

SEQ ID NO: 1937625 - RNA, 11 nt, Human herpesvirus 4 [Epstein-Barr virus]
agagagccaca

SEQ ID NO: 1937626 - RNA, 18 nt, Human herpesvirus 4 [Epstein-Barr virus]
ugaccacucaggaagcug

SEQ ID NO: 1937627 - RNA, 15 nt, Human herpesvirus 4 [Epstein-Barr virus]
ccaccaccuccacca

SEQ ID NO: 1937628 - RNA, 17 nt, Human herpesvirus 4 [Epstein-Barr virus]
aguaccguugugaccgc

SEQ ID NO: 1937629 - RNA, 19 nt, Human herpesvirus 4 [Epstein-Barr virus]
auaauacgcccgacaauaa

SEQ ID NO: 1937630 - RNA, 21 nt, Human herpesvirus 4 [Epstein-Barr virus]
caggaggggcaggaggggcag

SEQ ID NO: 1937631 - RNA, 15 nt, Human herpesvirus 4 [Epstein-Barr virus]
agaucgugaggccug

SEQ ID NO: 1937632 - RNA, 23 nt, Human herpesvirus 4 [Epstein-Barr virus]
cagauuuccgucagccaggguga

SEQ ID NO: 1937633 - RNA, 16 nt, Human herpesvirus 4 [Epstein-Barr virus]
gcuccagggccagcaa

SEQ ID NO: 1937634 - RNA, 23 nt, Human herpesvirus 4 [Epstein-Barr virus]
gcccggggaaaagagagcugaug

SEQ ID NO: 1937635 - RNA, 13 nt, Human herpesvirus 4 [Epstein-Barr virus]
cuuguuucucaga

SEQ ID NO: 1937636 - RNA, 14 nt, Human herpesvirus 4 [Epstein-Barr virus]
cgccguccacucua

SEQ ID NO: 1937637 - RNA, 20 nt, Human herpesvirus 4 [Epstein-Barr virus]
ccaggcacaucuggcaccug

SEQ ID NO: 1937638 - RNA, 11 nt, Human herpesvirus 4 [Epstein-Barr virus]
aagcccaccua

SEQ ID NO: 1937639 - RNA, 17 nt, Human herpesvirus 4 [Epstein-Barr virus]
caucuacaauggcuggu

SEQ ID NO: 1937640 - RNA, 22 nt, Human herpesvirus 4 [Epstein-Barr virus]
uggucuccuucuuuaucuccau

SEQ ID NO: 1937641 - RNA, 21 nt, Human herpesvirus 4 [Epstein-Barr virus]
auccagugcgucagcaacugc

SEQ ID NO: 1937642 - RNA, 20 nt, Human herpesvirus 4 [Epstein-Barr virus]
gucgggagaacgaaggcgug

SEQ ID NO: 1937643 - RNA, 17 nt, Human herpesvirus 4 [Epstein-Barr virus]
cgagggugaggcccagc

SEQ ID NO: 1937644 - RNA, 18 nt, Human herpesvirus 4 [Epstein-Barr virus]
gcagugggccucucuggc

SEQ ID NO: 1937645 - RNA, 16 nt, Human herpesvirus 4 [Epstein-Barr virus]
cucauaccuccacuua

SEQ ID NO: 1937646 - RNA, 23 nt, Human herpesvirus 4 [Epstein-Barr virus]
gguuucaauuuugggagcuccag

SEQ ID NO: 1937647 - RNA, 22 nt, Human herpesvirus 4 [Epstein-Barr virus]
cauacgucuagccacauagcag

SEQ ID NO: 1937648 - RNA, 23 nt, Human herpesvirus 4 [Epstein-Barr virus]
acuuggaggcugcuaagccagga

SEQ ID NO: 1937649 - RNA, 18 nt, Human herpesvirus 4 [Epstein-Barr virus]
ccuggaagcaggagaugg

SEQ ID NO: 1937650 - RNA, 17 nt, Human herpesvirus 4 [Epstein-Barr virus]
gguguagccggggugga

SEQ ID NO: 1937651 - RNA, 20 nt, Human herpesvirus 4 [Epstein-Barr virus]
ugaaaccacgccugcuucac

SEQ ID NO: 1937652 - RNA, 16 nt, Human herpesvirus 4 [Epstein-Barr virus]
gucccugcugcccaug

SEQ ID NO: 1937653 - RNA, 14 nt, Human herpesvirus 4 [Epstein-Barr virus]
auucaucagaagcu

SEQ ID NO: 1937654 - RNA, 17 nt, Human herpesvirus 4 [Epstein-Barr virus]
aagcaacagguccucag

SEQ ID NO: 1937655 - RNA, 12 nt, Human herpesvirus 4 [Epstein-Barr virus]
gucacagcugcu

SEQ ID NO: 1937656 - RNA, 15 nt, Human herpesvirus 4 [Epstein-Barr virus]
cacaucuggcaccug

SEQ ID NO: 1937657 - RNA, 22 nt, Human herpesvirus 4 [Epstein-Barr virus]
cagagucuacucgaccagcacg

SEQ ID NO: 1937658 - RNA, 18 nt, Human herpesvirus 4 [Epstein-Barr virus]
uaucacccauggccaggc

SEQ ID NO: 1937659 - RNA, 15 nt, Human herpesvirus 4 [Epstein-Barr virus]
ugguugucuucccag

SEQ ID NO: 1937660 - RNA, 13 nt, Human herpesvirus 4 [Epstein-Barr virus]
gacccccccaagc

SEQ ID NO: 1937661 - RNA, 14 nt, Human herpesvirus 4 [Epstein-Barr virus]
cuggcccccaaccc

SEQ ID NO: 1937662 - RNA, 17 nt, Human herpesvirus 4 [Epstein-Barr virus]
ccaggucuugccguggc

SEQ ID NO: 1937663 - RNA, 23 nt, Human herpesvirus 4 [Epstein-Barr virus]
acgcucccgggcaaacagggcag

SEQ ID NO: 1937664 - RNA, 20 nt, Human herpesvirus 4 [Epstein-Barr virus]
cgguggaacaggagcaggag

SEQ ID NO: 1937665 - RNA, 21 nt, Human herpesvirus 4 [Epstein-Barr virus]
ggggaguaaggccgcugccag

SEQ ID NO: 1937666 - RNA, 13 nt, Human herpesvirus 4 [Epstein-Barr virus]
aguaggcgguggg

SEQ ID NO: 1937667 - RNA, 15 nt, Human herpesvirus 4 [Epstein-Barr virus]
uucucaaacaguccc

SEQ ID NO: 1937668 - RNA, 13 nt, Human herpesvirus 4 [Epstein-Barr virus]
aaugucaccacua

SEQ ID NO: 1937669 - RNA, 14 nt, Human herpesvirus 4 [Epstein-Barr virus]
uggugcuguccugc

SEQ ID NO: 1937670 - RNA, 21 nt, Human herpesvirus 4 [Epstein-Barr virus]
cgcggugguggcccucggugg

SEQ ID NO: 1937671 - RNA, 19 nt, Human herpesvirus 4 [Epstein-Barr virus]
ccagcaaaaccagcccggg

SEQ ID NO: 1937672 - RNA, 14 nt, Human herpesvirus 4 [Epstein-Barr virus]
ccgcagguggcugc

SEQ ID NO: 1937673 - RNA, 14 nt, Human herpesvirus 4 [Epstein-Barr virus]
uuugcuagggagga

SEQ ID NO: 1937674 - RNA, 14 nt, Human herpesvirus 4 [Epstein-Barr virus]
uguccagcagggcc

SEQ ID NO: 1937675 - RNA, 21 nt, Human herpesvirus 4 [Epstein-Barr virus]
cuggccuccuuaaauucaccu

SEQ ID NO: 1937676 - RNA, 14 nt, Human herpesvirus 4 [Epstein-Barr virus]
agccggggguugcu

SEQ ID NO: 1937677 - RNA, 15 nt, Human herpesvirus 4 [Epstein-Barr virus]
ucagccugcuccuga

SEQ ID NO: 1937678 - RNA, 20 nt, Human herpesvirus 4 [Epstein-Barr virus]
cucccuuagccacacugucu

SEQ ID NO: 1937679 - RNA, 18 nt, Human herpesvirus 4 [Epstein-Barr virus]
aguacuagcauggagagg

SEQ ID NO: 1937680 - RNA, 14 nt, Human herpesvirus 4 [Epstein-Barr virus]
cugcagguaaaccu

SEQ ID NO: 1937681 - RNA, 17 nt, Human herpesvirus 4 [Epstein-Barr virus]
ggcacgccguggcccug

SEQ ID NO: 1937682 - RNA, 13 nt, Human herpesvirus 4 [Epstein-Barr virus]
ccccaccaccccc

SEQ ID NO: 1937683 - RNA, 15 nt, Human herpesvirus 4 [Epstein-Barr virus]
cuuaugcuaacauuu

SEQ ID NO: 1937684 - RNA, 13 nt, Human herpesvirus 4 [Epstein-Barr virus]
gagccguggccuu

SEQ ID NO: 1937685 - RNA, 13 nt, Human herpesvirus 4 [Epstein-Barr virus]
ccgagaccaaggc

SEQ ID NO: 1937686 - RNA, 11 nt, Human herpesvirus 4 [Epstein-Barr virus]
gggccaggacc

SEQ ID NO: 1937687 - RNA, 19 nt, Human herpesvirus 4 [Epstein-Barr virus]
ccacuuuuaccccaguccc

SEQ ID NO: 1937688 - RNA, 12 nt, Human herpesvirus 4 [Epstein-Barr virus]
cggcguggagcu

SEQ ID NO: 1937689 - RNA, 15 nt, Human herpesvirus 4 [Epstein-Barr virus]
ggaccuguugcuuca

SEQ ID NO: 1937690 - RNA, 16 nt, Human herpesvirus 4 [Epstein-Barr virus]
aggacgcugcugucca

SEQ ID NO: 1937691 - RNA, 14 nt, Human herpesvirus 4 [Epstein-Barr virus]
gaucgauuggaaaa

SEQ ID NO: 1937692 - RNA, 18 nt, Human herpesvirus 4 [Epstein-Barr virus]
gcagguggcugcugccaa

SEQ ID NO: 1937693 - RNA, 19 nt, Human herpesvirus 4 [Epstein-Barr virus]
ccacugagcaagauccuuc

SEQ ID NO: 1937694 - RNA, 18 nt, Human herpesvirus 4 [Epstein-Barr virus]
auggggccaggacgcugc

SEQ ID NO: 1937695 - RNA, 17 nt, Human herpesvirus 4 [Epstein-Barr virus]
auuacggugcuggagau

SEQ ID NO: 1937696 - RNA, 12 nt, Human herpesvirus 4 [Epstein-Barr virus]
uggggcaauggc

SEQ ID NO: 1937697 - RNA, 21 nt, Human herpesvirus 4 [Epstein-Barr virus]
ccuccgcauccuaggcacggc

SEQ ID NO: 1937698 - RNA, 15 nt, Human herpesvirus 4 [Epstein-Barr virus]
ugggcgguccuccac

SEQ ID NO: 1937699 - RNA, 18 nt, Human herpesvirus 4 [Epstein-Barr virus]
ugccuggcgcuuugcuau

SEQ ID NO: 1937700 - RNA, 20 nt, Human herpesvirus 4 [Epstein-Barr virus]
cgccaucuacccaacagucu

SEQ ID NO: 1937701 - RNA, 16 nt, Human herpesvirus 4 [Epstein-Barr virus]
gugccucgguggccug

SEQ ID NO: 1937702 - RNA, 18 nt, Human herpesvirus 4 [Epstein-Barr virus]
cggccgccccgggcccgg

SEQ ID NO: 1937703 - RNA, 21 nt, Human herpesvirus 4 [Epstein-Barr virus]
cuugacgugcaaggauggaag

SEQ ID NO: 1937704 - RNA, 18 nt, Human herpesvirus 4 [Epstein-Barr virus]
cuacugccuuguccacug

SEQ ID NO: 1937705 - RNA, 13 nt, Human herpesvirus 4 [Epstein-Barr virus]
ugcagugggugag

SEQ ID NO: 1937706 - RNA, 19 nt, Human herpesvirus 4 [Epstein-Barr virus]
ccauaccuacaccacccca

SEQ ID NO: 1937707 - RNA, 17 nt, Human herpesvirus 4 [Epstein-Barr virus]
cuugugaaccagaaaga

SEQ ID NO: 1937708 - RNA, 18 nt, Human herpesvirus 4 [Epstein-Barr virus]
cugauggcaaagguccca

SEQ ID NO: 1937709 - RNA, 23 nt, Human herpesvirus 4 [Epstein-Barr virus]
cagagcugagugcccagggcaga

SEQ ID NO: 1937710 - RNA, 16 nt, Human herpesvirus 4 [Epstein-Barr virus]
acccaaugugcauggg

SEQ ID NO: 1937711 - RNA, 23 nt, Human herpesvirus 4 [Epstein-Barr virus]
aggggcgagcagcgcggcagagg

SEQ ID NO: 1937712 - RNA, 11 nt, Human herpesvirus 4 [Epstein-Barr virus]
ggugggcuggu

SEQ ID NO: 1937713 - RNA, 14 nt, Human herpesvirus 4 [Epstein-Barr virus]
gucuauccaggagg

SEQ ID NO: 1937714 - RNA, 18 nt, Human herpesvirus 4 [Epstein-Barr virus]
gucauggcggacugcgcc

SEQ ID NO: 1937715 - RNA, 13 nt, Human herpesvirus 4 [Epstein-Barr virus]
agagaggccucug

SEQ ID NO: 1937716 - RNA, 21 nt, Human herpesvirus 4 [Epstein-Barr virus]
cgggaguauggggccagaggc

SEQ ID NO: 1937717 - RNA, 20 nt, Human herpesvirus 4 [Epstein-Barr virus]
caguaugcucgaagcauugg

SEQ ID NO: 1937718 - RNA, 16 nt, Human herpesvirus 4 [Epstein-Barr virus]
ccucgguggugggcug

SEQ ID NO: 1937719 - RNA, 18 nt, Human herpesvirus 4 [Epstein-Barr virus]
cuaccucuuuuggcuggc

SEQ ID NO: 1937720 - RNA, 20 nt, Human herpesvirus 4 [Epstein-Barr virus]
caagaguuuaagcagcacug

SEQ ID NO: 1937721 - RNA, 22 nt, Human herpesvirus 4 [Epstein-Barr virus]
agcaggaggaggggcaggagca

SEQ ID NO: 1937722 - RNA, 21 nt, Human herpesvirus 4 [Epstein-Barr virus]
gcuguccgccaggacggagaa

SEQ ID NO: 1937723 - RNA, 16 nt, Human herpesvirus 4 [Epstein-Barr virus]
gucuauccaggaggag

SEQ ID NO: 1937724 - RNA, 12 nt, Human herpesvirus 4 [Epstein-Barr virus]
cggcacccaggc

SEQ ID NO: 1937725 - RNA, 18 nt, Human herpesvirus 4 [Epstein-Barr virus]
guuuguacuucuucucug

SEQ ID NO: 1937726 - RNA, 21 nt, Human herpesvirus 4 [Epstein-Barr virus]
cugccuggaucugagcuaugu

SEQ ID NO: 1937727 - RNA, 14 nt, Human herpesvirus 4 [Epstein-Barr virus]
cgccgccagcaugg

SEQ ID NO: 1937728 - RNA, 15 nt, Human herpesvirus 4 [Epstein-Barr virus]
ugguggguguggagc

SEQ ID NO: 1937729 - RNA, 22 nt, Human herpesvirus 4 [Epstein-Barr virus]
acuggucaccagcuucgagagc

SEQ ID NO: 1937730 - RNA, 18 nt, Human herpesvirus 4 [Epstein-Barr virus]
cucuucauguccacugag

SEQ ID NO: 1937731 - RNA, 15 nt, Human herpesvirus 4 [Epstein-Barr virus]
gaaacuggcuucugu

SEQ ID NO: 1937732 - RNA, 20 nt, Human herpesvirus 4 [Epstein-Barr virus]
ccgcagccgcugaagccagg

SEQ ID NO: 1937733 - RNA, 14 nt, Human herpesvirus 4 [Epstein-Barr virus]
gcguugccagacuc

SEQ ID NO: 1937734 - RNA, 16 nt, Human herpesvirus 4 [Epstein-Barr virus]
gcuucuggaccgugcc

SEQ ID NO: 1937735 - RNA, 17 nt, Human herpesvirus 4 [Epstein-Barr virus]
cggccaugcgcuuuguc

SEQ ID NO: 1937736 - RNA, 22 nt, Human herpesvirus 4 [Epstein-Barr virus]
agaccccggguugguggcacug

SEQ ID NO: 1937737 - RNA, 13 nt, Human herpesvirus 4 [Epstein-Barr virus]
caaggcccuagcc

SEQ ID NO: 1937738 - RNA, 17 nt, Human herpesvirus 4 [Epstein-Barr virus]
agcgugugcacccggcu

SEQ ID NO: 1937739 - RNA, 22 nt, Human herpesvirus 4 [Epstein-Barr virus]
gaugaggcugaugauggccacg

SEQ ID NO: 1937740 - RNA, 18 nt, Human herpesvirus 4 [Epstein-Barr virus]
gccuucuccucagccucc

SEQ ID NO: 1937741 - RNA, 12 nt, Human herpesvirus 4 [Epstein-Barr virus]
ggaggaagaugg

SEQ ID NO: 1937742 - RNA, 23 nt, Human herpesvirus 4 [Epstein-Barr virus]
ugagccacuccggacgcagaggc

SEQ ID NO: 1937743 - RNA, 22 nt, Human herpesvirus 4 [Epstein-Barr virus]
gagcaggagcgggaggggcagg

SEQ ID NO: 1937744 - RNA, 21 nt, Human herpesvirus 4 [Epstein-Barr virus]
cauauucuauuucaaaacaag

SEQ ID NO: 1937745 - RNA, 23 nt, Human herpesvirus 4 [Epstein-Barr virus]
aggggccagguacaggaccugga

SEQ ID NO: 1937746 - RNA, 22 nt, Human herpesvirus 4 [Epstein-Barr virus]
agcaguagcuugggaacaccgg

SEQ ID NO: 1937747 - RNA, 13 nt, Human herpesvirus 4 [Epstein-Barr virus]
agaaccccagcaa

SEQ ID NO: 1937748 - RNA, 15 nt, Human herpesvirus 4 [Epstein-Barr virus]
uuuccgucagccagg

SEQ ID NO: 1937749 - RNA, 21 nt, Human herpesvirus 4 [Epstein-Barr virus]
cagccuacucuccacucccag

SEQ ID NO: 1937750 - RNA, 14 nt, Human herpesvirus 4 [Epstein-Barr virus]
agacucuccgcuuu

SEQ ID NO: 1937751 - RNA, 12 nt, Human herpesvirus 4 [Epstein-Barr virus]
uuucuguacaau

SEQ ID NO: 1937752 - RNA, 13 nt, Human herpesvirus 4 [Epstein-Barr virus]
gcuagcgucacug

SEQ ID NO: 1937753 - RNA, 21 nt, Human herpesvirus 4 [Epstein-Barr virus]
accgcgaccaagacucaauuu

SEQ ID NO: 1937754 - RNA, 16 nt, Human herpesvirus 4 [Epstein-Barr virus]
aacuggucaccagcuu

SEQ ID NO: 1937755 - RNA, 17 nt, Human herpesvirus 4 [Epstein-Barr virus]
ggggcaggaggggcagg

SEQ ID NO: 1937756 - RNA, 19 nt, Human herpesvirus 4 [Epstein-Barr virus]
uugaagguggaggggggcg

SEQ ID NO: 1937757 - RNA, 19 nt, Human herpesvirus 4 [Epstein-Barr virus]
aggucgacccuccugucac

SEQ ID NO: 1937758 - RNA, 17 nt, Human herpesvirus 4 [Epstein-Barr virus]
accuucaccaccacccc

SEQ ID NO: 1937759 - RNA, 11 nt, Human herpesvirus 4 [Epstein-Barr virus]
cggacacaccg

SEQ ID NO: 1937760 - RNA, 22 nt, Human herpesvirus 4 [Epstein-Barr virus]
guucaguggacacccaccacac

SEQ ID NO: 1937761 - RNA, 20 nt, Human herpesvirus 4 [Epstein-Barr virus]
ccucgugcaaccaggcccac

SEQ ID NO: 1937762 - RNA, 17 nt, Human herpesvirus 4 [Epstein-Barr virus]
ggcuggugggcucccuc

SEQ ID NO: 1937763 - RNA, 14 nt, Human herpesvirus 4 [Epstein-Barr virus]
gccuccagagcccc

SEQ ID NO: 1937764 - RNA, 22 nt, Human herpesvirus 4 [Epstein-Barr virus]
gcaccuguccuugucugcugcc

SEQ ID NO: 1937765 - RNA, 20 nt, Human herpesvirus 4 [Epstein-Barr virus]
ccacgcuccgcgcucggccu

SEQ ID NO: 1937766 - RNA, 16 nt, Human herpesvirus 4 [Epstein-Barr virus]
ggaggccccggccgcc

SEQ ID NO: 1937767 - RNA, 22 nt, Human herpesvirus 4 [Epstein-Barr virus]
gagccugccggaguuuucuccc

SEQ ID NO: 1937768 - RNA, 16 nt, Human herpesvirus 4 [Epstein-Barr virus]
augaaggugucauuga

SEQ ID NO: 1937769 - RNA, 19 nt, Human herpesvirus 4 [Epstein-Barr virus]
caaggauggaagagagggg

SEQ ID NO: 1937770 - RNA, 17 nt, Human herpesvirus 4 [Epstein-Barr virus]
cguuggcuucugcugcu

SEQ ID NO: 1937771 - RNA, 15 nt, Human herpesvirus 4 [Epstein-Barr virus]
uugugcuuguacuga

SEQ ID NO: 1937772 - RNA, 21 nt, Human herpesvirus 4 [Epstein-Barr virus]
uacacucuggggucucaggcc

SEQ ID NO: 1937773 - RNA, 15 nt, Human herpesvirus 4 [Epstein-Barr virus]
guccagauguccagg

SEQ ID NO: 1937774 - RNA, 22 nt, Human herpesvirus 4 [Epstein-Barr virus]
accgcagccacguccagacucc

SEQ ID NO: 1937775 - RNA, 20 nt, Human herpesvirus 4 [Epstein-Barr virus]
gcccgcaccccccgccacca

SEQ ID NO: 1937776 - RNA, 16 nt, Human herpesvirus 4 [Epstein-Barr virus]
ucuagcaggugcacca

SEQ ID NO: 1937777 - RNA, 19 nt, Human herpesvirus 4 [Epstein-Barr virus]
cugcgaugagggccuucca

SEQ ID NO: 1937778 - RNA, 21 nt, Human herpesvirus 4 [Epstein-Barr virus]
caccuguccuugucugcugcc

SEQ ID NO: 1937779 - RNA, 13 nt, Human herpesvirus 4 [Epstein-Barr virus]
uuccuugccaucu

SEQ ID NO: 1937780 - RNA, 15 nt, Human herpesvirus 4 [Epstein-Barr virus]
gucacugugcacucu

SEQ ID NO: 1937781 - RNA, 20 nt, Human herpesvirus 4 [Epstein-Barr virus]
gccucucuuaugccuguggc

SEQ ID NO: 1937782 - RNA, 14 nt, Human herpesvirus 4 [Epstein-Barr virus]
uacggcuuuccagu

SEQ ID NO: 1937783 - RNA, 14 nt, Human herpesvirus 4 [Epstein-Barr virus]
gggucagugaugga

SEQ ID NO: 1937784 - RNA, 20 nt, Human herpesvirus 4 [Epstein-Barr virus]
gacguguguggcuguagcca

SEQ ID NO: 1937785 - RNA, 15 nt, Human herpesvirus 4 [Epstein-Barr virus]
cccagccccuccucu

SEQ ID NO: 1937786 - RNA, 17 nt, Human herpesvirus 4 [Epstein-Barr virus]
cuccacaccaaauaaac

SEQ ID NO: 1937787 - RNA, 23 nt, Human herpesvirus 4 [Epstein-Barr virus]
gccaaaauuggugccuugcucuc

SEQ ID NO: 1937788 - RNA, 14 nt, Human herpesvirus 4 [Epstein-Barr virus]
gcaccagggccagg

SEQ ID NO: 1937789 - RNA, 16 nt, Human herpesvirus 4 [Epstein-Barr virus]
gugguuucggacacac

SEQ ID NO: 1937790 - RNA, 18 nt, Human herpesvirus 4 [Epstein-Barr virus]
gcugacccuucugcugcu

SEQ ID NO: 1937791 - RNA, 18 nt, Human herpesvirus 4 [Epstein-Barr virus]
uccgcgcuaaucgcuggu

SEQ ID NO: 1937792 - RNA, 17 nt, Human herpesvirus 4 [Epstein-Barr virus]
gcaccuugccggccacc

SEQ ID NO: 1937793 - RNA, 17 nt, Human herpesvirus 4 [Epstein-Barr virus]
uggcagaaaggcuggcc

SEQ ID NO: 1937794 - RNA, 16 nt, Human herpesvirus 4 [Epstein-Barr virus]
uguaaucgcagcucua

SEQ ID NO: 1937795 - RNA, 21 nt, Human herpesvirus 4 [Epstein-Barr virus]
gcccugagcuggacgaggucc

SEQ ID NO: 1937796 - RNA, 18 nt, Human herpesvirus 4 [Epstein-Barr virus]
aggccaaauggagacugc

SEQ ID NO: 1937797 - RNA, 23 nt, Human herpesvirus 4 [Epstein-Barr virus]
cguccaucuugagcgccguggcc

SEQ ID NO: 1937798 - RNA, 13 nt, Human herpesvirus 4 [Epstein-Barr virus]
ugggcuuggguca

SEQ ID NO: 1937799 - RNA, 18 nt, Human herpesvirus 4 [Epstein-Barr virus]
cggccugaauuccccugc

SEQ ID NO: 1937800 - RNA, 18 nt, Human herpesvirus 4 [Epstein-Barr virus]
gcgcugggacugccuggg

SEQ ID NO: 1937801 - RNA, 21 nt, Human herpesvirus 4 [Epstein-Barr virus]
uccccgagggugaggcccagc

SEQ ID NO: 1937802 - RNA, 14 nt, Human herpesvirus 4 [Epstein-Barr virus]
acagcgccagcagg

SEQ ID NO: 1937803 - RNA, 16 nt, Human herpesvirus 4 [Epstein-Barr virus]
ugaagauccaacuccg

SEQ ID NO: 1937804 - RNA, 16 nt, Human herpesvirus 4 [Epstein-Barr virus]
acccugguacaggacc

SEQ ID NO: 1937805 - RNA, 17 nt, Human herpesvirus 4 [Epstein-Barr virus]
cagcuggugguccgcau

SEQ ID NO: 1937806 - RNA, 15 nt, Human herpesvirus 4 [Epstein-Barr virus]
ccgccgccagcagcc

SEQ ID NO: 1937807 - RNA, 15 nt, Human herpesvirus 4 [Epstein-Barr virus]
agaaguguguccccc

SEQ ID NO: 1937808 - RNA, 21 nt, Human herpesvirus 4 [Epstein-Barr virus]
auuccccggggacaccugcac

SEQ ID NO: 1937809 - RNA, 16 nt, Human herpesvirus 4 [Epstein-Barr virus]
gcauccgcaccacaga

SEQ ID NO: 1937810 - RNA, 18 nt, Human herpesvirus 4 [Epstein-Barr virus]
gacacgcuccuucuuggc

SEQ ID NO: 1937811 - RNA, 15 nt, Human herpesvirus 4 [Epstein-Barr virus]
uacaaacccaacaau

SEQ ID NO: 1937812 - RNA, 17 nt, Human herpesvirus 4 [Epstein-Barr virus]
gccgcaccacgggaggc

SEQ ID NO: 1937813 - RNA, 14 nt, Human herpesvirus 4 [Epstein-Barr virus]
gagcuauguggaaa

SEQ ID NO: 1937814 - RNA, 15 nt, Human herpesvirus 4 [Epstein-Barr virus]
acagauacaaaaacu

SEQ ID NO: 1937815 - RNA, 17 nt, Human herpesvirus 4 [Epstein-Barr virus]
cacucccuuagccacac

SEQ ID NO: 1937816 - RNA, 18 nt, Human herpesvirus 4 [Epstein-Barr virus]
cccgccagcgccuccucg

SEQ ID NO: 1937817 - RNA, 16 nt, Human herpesvirus 4 [Epstein-Barr virus]
aggccagguagcccag

SEQ ID NO: 1937818 - RNA, 13 nt, Human herpesvirus 4 [Epstein-Barr virus]
cgccagcgccucc

SEQ ID NO: 1937819 - RNA, 16 nt, Human herpesvirus 4 [Epstein-Barr virus]
gccugccaaagagcca

SEQ ID NO: 1937820 - RNA, 17 nt, Human herpesvirus 4 [Epstein-Barr virus]
ccgacgagcagaggacu

SEQ ID NO: 1937821 - RNA, 20 nt, Human herpesvirus 4 [Epstein-Barr virus]
gggucaagcaaacggccugg

SEQ ID NO: 1937822 - RNA, 13 nt, Human herpesvirus 4 [Epstein-Barr virus]
cacuccaccugcc

SEQ ID NO: 1937823 - RNA, 14 nt, Human herpesvirus 4 [Epstein-Barr virus]
aauguccagugggg

SEQ ID NO: 1937824 - RNA, 21 nt, Human herpesvirus 4 [Epstein-Barr virus]
uguuucucagagagcauuuca

SEQ ID NO: 1937825 - RNA, 16 nt, Human herpesvirus 4 [Epstein-Barr virus]
ucuacucgaccagcac

SEQ ID NO: 1937826 - RNA, 17 nt, Human herpesvirus 4 [Epstein-Barr virus]
agacacggcucugucag

SEQ ID NO: 1937827 - RNA, 23 nt, Human herpesvirus 4 [Epstein-Barr virus]
cagaccccggguugguggcacug

SEQ ID NO: 1937828 - RNA, 18 nt, Human herpesvirus 4 [Epstein-Barr virus]
cccacugaaaaaccagac

SEQ ID NO: 1937829 - RNA, 14 nt, Human herpesvirus 4 [Epstein-Barr virus]
uggcauucagauuu

SEQ ID NO: 1937830 - RNA, 14 nt, Human herpesvirus 4 [Epstein-Barr virus]
cauguuuuuggcau

SEQ ID NO: 1937831 - RNA, 14 nt, Human herpesvirus 4 [Epstein-Barr virus]
ccuucuuccuagcc

SEQ ID NO: 1937832 - RNA, 19 nt, Human herpesvirus 4 [Epstein-Barr virus]
uacugcgaugagggccuuc

SEQ ID NO: 1937833 - RNA, 17 nt, Human herpesvirus 4 [Epstein-Barr virus]
gcaaacagggcagagag

SEQ ID NO: 1937834 - RNA, 21 nt, Human herpesvirus 4 [Epstein-Barr virus]
cgcccgccuggcucgccugga

SEQ ID NO: 1937835 - RNA, 17 nt, Human herpesvirus 4 [Epstein-Barr virus]
caacccuaacacucuuu

SEQ ID NO: 1937836 - RNA, 19 nt, Human herpesvirus 4 [Epstein-Barr virus]
cucgaagcggucucagaca

SEQ ID NO: 1937837 - RNA, 19 nt, Human herpesvirus 4 [Epstein-Barr virus]
gaacguggagguugucaaa

SEQ ID NO: 1937838 - RNA, 18 nt, Human herpesvirus 4 [Epstein-Barr virus]
caggcacaucuggcaccu

SEQ ID NO: 1937839 - RNA, 15 nt, Human herpesvirus 4 [Epstein-Barr virus]
cgggagccggcggcc

SEQ ID NO: 1937840 - RNA, 21 nt, Human herpesvirus 4 [Epstein-Barr virus]
cgugggaaaauaguuccaggu

SEQ ID NO: 1937841 - RNA, 13 nt, Human herpesvirus 4 [Epstein-Barr virus]
agcggcugugagc

SEQ ID NO: 1937842 - RNA, 13 nt, Human herpesvirus 4 [Epstein-Barr virus]
gcaacugcugcag

SEQ ID NO: 1937843 - RNA, 23 nt, Human herpesvirus 4 [Epstein-Barr virus]
cauucacggggccgugcaccugc

SEQ ID NO: 1937844 - RNA, 16 nt, Human herpesvirus 4 [Epstein-Barr virus]
agcucaccuaugguca

SEQ ID NO: 1937845 - RNA, 19 nt, Human herpesvirus 4 [Epstein-Barr virus]
uguaacugugguuuccaug

SEQ ID NO: 1937846 - RNA, 23 nt, Human herpesvirus 4 [Epstein-Barr virus]
ucucuaaucccucugggagaagg

SEQ ID NO: 1937847 - RNA, 16 nt, Human herpesvirus 4 [Epstein-Barr virus]
aggccaauuggcacuc

SEQ ID NO: 1937848 - RNA, 20 nt, Human herpesvirus 4 [Epstein-Barr virus]
aggugguuauuuugggccag

SEQ ID NO: 1937849 - RNA, 16 nt, Human herpesvirus 4 [Epstein-Barr virus]
uugucggagguggaga

SEQ ID NO: 1937850 - RNA, 12 nt, Human herpesvirus 4 [Epstein-Barr virus]
gcgcugggacug

SEQ ID NO: 1937851 - RNA, 14 nt, Human herpesvirus 4 [Epstein-Barr virus]
cacaucuggaccug

SEQ ID NO: 1937852 - RNA, 17 nt, Human herpesvirus 4 [Epstein-Barr virus]
cccagacucugcuuucu

SEQ ID NO: 1937853 - RNA, 18 nt, Human herpesvirus 4 [Epstein-Barr virus]
ggguauucucagaugcag

SEQ ID NO: 1937854 - RNA, 14 nt, Human herpesvirus 4 [Epstein-Barr virus]
uggacacccacccu

SEQ ID NO: 1937855 - RNA, 15 nt, Human herpesvirus 4 [Epstein-Barr virus]
auauccuagagggac

SEQ ID NO: 1937856 - RNA, 16 nt, Human herpesvirus 4 [Epstein-Barr virus]
caugcuugggcaugcu

SEQ ID NO: 1937857 - RNA, 19 nt, Human herpesvirus 4 [Epstein-Barr virus]
auccaguaugccugccugu

SEQ ID NO: 1937858 - RNA, 15 nt, Human herpesvirus 4 [Epstein-Barr virus]
acucccgaggcacuu

SEQ ID NO: 1937859 - RNA, 20 nt, Human herpesvirus 4 [Epstein-Barr virus]
agcaagauccuucuggcacg

SEQ ID NO: 1937860 - RNA, 16 nt, Human herpesvirus 4 [Epstein-Barr virus]
aaucuaaugaagagcc

SEQ ID NO: 1937861 - RNA, 19 nt, Human herpesvirus 4 [Epstein-Barr virus]
gggccauucgugaguccag

SEQ ID NO: 1937862 - RNA, 12 nt, Human herpesvirus 4 [Epstein-Barr virus]
acgcgauggcac

SEQ ID NO: 1937863 - RNA, 16 nt, Human herpesvirus 4 [Epstein-Barr virus]
acccccaccaccucca

SEQ ID NO: 1937864 - RNA, 18 nt, Human herpesvirus 4 [Epstein-Barr virus]
uccucugggccgcccggc

SEQ ID NO: 1937865 - RNA, 15 nt, Human herpesvirus 4 [Epstein-Barr virus]
agaagacuccugccu

SEQ ID NO: 1937866 - RNA, 23 nt, Human herpesvirus 4 [Epstein-Barr virus]
gucacugagaaucuccugugcuu

SEQ ID NO: 1937867 - RNA, 17 nt, Human herpesvirus 4 [Epstein-Barr virus]
gcaggagcaggagcggg

SEQ ID NO: 1937868 - RNA, 21 nt, Human herpesvirus 4 [Epstein-Barr virus]
cccugaacaucucauccccag

SEQ ID NO: 1937869 - RNA, 16 nt, Human herpesvirus 4 [Epstein-Barr virus]
caauggucgccagggu

SEQ ID NO: 1937870 - RNA, 15 nt, Human herpesvirus 4 [Epstein-Barr virus]
caggacgcugcuguc

SEQ ID NO: 1937871 - RNA, 15 nt, Human herpesvirus 4 [Epstein-Barr virus]
ugaggcugaugaugg

SEQ ID NO: 1937872 - RNA, 14 nt, Human herpesvirus 4 [Epstein-Barr virus]
gaggcccacugcag

SEQ ID NO: 1937873 - RNA, 16 nt, Human herpesvirus 4 [Epstein-Barr virus]
acugaccacucaggaa

SEQ ID NO: 1937874 - RNA, 22 nt, Human herpesvirus 4 [Epstein-Barr virus]
gucugccgcguguuugcugcuc

SEQ ID NO: 1937875 - RNA, 16 nt, Human herpesvirus 4 [Epstein-Barr virus]
gccuugggggccugga

SEQ ID NO: 1937876 - RNA, 17 nt, Human herpesvirus 4 [Epstein-Barr virus]
uggggucucaggccucc

SEQ ID NO: 1937877 - RNA, 22 nt, Human herpesvirus 4 [Epstein-Barr virus]
gaacugggaugaacccuggggc

SEQ ID NO: 1937878 - RNA, 17 nt, Human herpesvirus 4 [Epstein-Barr virus]
ccugcacggcccuccag

SEQ ID NO: 1937879 - RNA, 19 nt, Human herpesvirus 4 [Epstein-Barr virus]
gcagcggacgguggggcuc

SEQ ID NO: 1937880 - RNA, 22 nt, Human herpesvirus 4 [Epstein-Barr virus]
augaauccaguaugccugccug

SEQ ID NO: 1937881 - RNA, 14 nt, Human herpesvirus 4 [Epstein-Barr virus]
uccccggccucccg

SEQ ID NO: 1937882 - RNA, 24 nt, Human herpesvirus 4 [Epstein-Barr virus]
cccccugcaggacacgugacaugu

SEQ ID NO: 1937883 - RNA, 16 nt, Human herpesvirus 4 [Epstein-Barr virus]
aucuggaccagaaggc

SEQ ID NO: 1937884 - RNA, 19 nt, Human herpesvirus 4 [Epstein-Barr virus]
cugaacaucucauccccag

SEQ ID NO: 1937885 - RNA, 18 nt, Human herpesvirus 4 [Epstein-Barr virus]
aguagcacugguggugga

SEQ ID NO: 1937886 - RNA, 21 nt, Human herpesvirus 4 [Epstein-Barr virus]
caggugcaccagcuccaggga

SEQ ID NO: 1937887 - RNA, 19 nt, Human herpesvirus 4 [Epstein-Barr virus]
gccucugccgcgcugcucg

SEQ ID NO: 1937888 - RNA, 14 nt, Human herpesvirus 4 [Epstein-Barr virus]
gcaggccuggacag

SEQ ID NO: 1937889 - RNA, 22 nt, Human herpesvirus 4 [Epstein-Barr virus]
ugcgcgcccugucaccaggccu

SEQ ID NO: 1937890 - RNA, 13 nt, Human herpesvirus 4 [Epstein-Barr virus]
ugaggacucugaa

SEQ ID NO: 1937891 - RNA, 17 nt, Human herpesvirus 4 [Epstein-Barr virus]
cuauagugagccaggcu

SEQ ID NO: 1937892 - RNA, 20 nt, Human herpesvirus 4 [Epstein-Barr virus]
ccuggccagggcggaggaga

SEQ ID NO: 1937893 - RNA, 20 nt, Human herpesvirus 4 [Epstein-Barr virus]
acgcucucuauguugucaca

SEQ ID NO: 1937894 - RNA, 15 nt, Human herpesvirus 4 [Epstein-Barr virus]
gcggagagggauggg

SEQ ID NO: 1937895 - RNA, 18 nt, Human herpesvirus 4 [Epstein-Barr virus]
ucucccacccuguacacc

SEQ ID NO: 1937896 - RNA, 19 nt, Human herpesvirus 4 [Epstein-Barr virus]
aucucauccccagagggcg

SEQ ID NO: 1937897 - RNA, 24 nt, Human herpesvirus 4 [Epstein-Barr virus]
ggcccagugcacccagguggucuu

SEQ ID NO: 1937898 - RNA, 18 nt, Human herpesvirus 4 [Epstein-Barr virus]
gcacuuucuuugcuucac

SEQ ID NO: 1937899 - RNA, 19 nt, Human herpesvirus 4 [Epstein-Barr virus]
guccaagagaaugacagca

SEQ ID NO: 1937900 - RNA, 19 nt, Human herpesvirus 4 [Epstein-Barr virus]
uccugcucauuauugcucu

SEQ ID NO: 1937901 - RNA, 17 nt, Human herpesvirus 4 [Epstein-Barr virus]
caagcaaacggccuggc

SEQ ID NO: 1937902 - RNA, 16 nt, Human herpesvirus 4 [Epstein-Barr virus]
cagccgcugaagccag

SEQ ID NO: 1937903 - RNA, 17 nt, Human herpesvirus 4 [Epstein-Barr virus]
ccaaggacaacagcuag

SEQ ID NO: 1937904 - RNA, 17 nt, Human herpesvirus 4 [Epstein-Barr virus]
guagccccuaggccugc

SEQ ID NO: 1937905 - RNA, 18 nt, Human herpesvirus 4 [Epstein-Barr virus]
ggcgauaccuugggcauc

SEQ ID NO: 1937906 - RNA, 14 nt, Human herpesvirus 4 [Epstein-Barr virus]
uggaaacccucagu

SEQ ID NO: 1937907 - RNA, 23 nt, Human herpesvirus 4 [Epstein-Barr virus]
cgucccagggccggaaccugagc

SEQ ID NO: 1937908 - RNA, 15 nt, Human herpesvirus 4 [Epstein-Barr virus]
cuaaggcaguccagg

SEQ ID NO: 1937909 - RNA, 19 nt, Human herpesvirus 4 [Epstein-Barr virus]
gccuagccaucggggcacg

SEQ ID NO: 1937910 - RNA, 14 nt, Human herpesvirus 4 [Epstein-Barr virus]
cggccgaggccugc

SEQ ID NO: 1937911 - RNA, 17 nt, Human herpesvirus 4 [Epstein-Barr virus]
cgagccccgccuggcgg

SEQ ID NO: 1937912 - RNA, 21 nt, Human herpesvirus 4 [Epstein-Barr virus]
cgagccugucgauaucccugc

SEQ ID NO: 1937913 - RNA, 22 nt, Human herpesvirus 4 [Epstein-Barr virus]
gacauccccagacucaccccca

SEQ ID NO: 1937914 - RNA, 21 nt, Human herpesvirus 4 [Epstein-Barr virus]
ggacaugcugaugugcugccc

SEQ ID NO: 1937915 - RNA, 18 nt, Human herpesvirus 4 [Epstein-Barr virus]
gacgggguggugccuggu

SEQ ID NO: 1937916 - RNA, 20 nt, Human herpesvirus 4 [Epstein-Barr virus]
gccccgaaagcggcccagca

SEQ ID NO: 1937917 - RNA, 13 nt, Human herpesvirus 4 [Epstein-Barr virus]
uuguucuuuggag

SEQ ID NO: 1937918 - RNA, 15 nt, Human herpesvirus 4 [Epstein-Barr virus]
uagcccacuccccuc

SEQ ID NO: 1937919 - RNA, 20 nt, Human herpesvirus 4 [Epstein-Barr virus]
caccagcuaacaggacaugu

SEQ ID NO: 1937920 - RNA, 18 nt, Human herpesvirus 4 [Epstein-Barr virus]
gcaguagcuugggaacac

SEQ ID NO: 1937921 - RNA, 20 nt, Human herpesvirus 4 [Epstein-Barr virus]
cgaugccucuacgccccaga

SEQ ID NO: 1937922 - RNA, 13 nt, Human herpesvirus 4 [Epstein-Barr virus]
uuucuuugcuuca

SEQ ID NO: 1937923 - RNA, 18 nt, Human herpesvirus 4 [Epstein-Barr virus]
gcgucgggaaacacagcu

SEQ ID NO: 1937924 - RNA, 15 nt, Human herpesvirus 4 [Epstein-Barr virus]
auggcaaagguccca

SEQ ID NO: 1937925 - RNA, 13 nt, Human herpesvirus 4 [Epstein-Barr virus]
ccugagccacacc

SEQ ID NO: 1937926 - RNA, 13 nt, Human herpesvirus 4 [Epstein-Barr virus]
uuucugaccuuua

SEQ ID NO: 1937927 - RNA, 21 nt, Human herpesvirus 4 [Epstein-Barr virus]
cugauaaaguuguccugggcu

SEQ ID NO: 1937928 - RNA, 14 nt, Human herpesvirus 4 [Epstein-Barr virus]
uaccaggcauacag

SEQ ID NO: 1937929 - RNA, 16 nt, Human herpesvirus 4 [Epstein-Barr virus]
cgcggaaucaggacca

SEQ ID NO: 1937930 - RNA, 23 nt, Human herpesvirus 4 [Epstein-Barr virus]
cggggcuaaccaaggacaacagc

SEQ ID NO: 1937931 - RNA, 15 nt, Human herpesvirus 4 [Epstein-Barr virus]
aagaguucucuggug

SEQ ID NO: 1937932 - RNA, 17 nt, Human herpesvirus 4 [Epstein-Barr virus]
ggcaaacagggcagaga

SEQ ID NO: 1937933 - RNA, 14 nt, Human herpesvirus 4 [Epstein-Barr virus]
ggaaugugugacau

SEQ ID NO: 1937934 - RNA, 17 nt, Human herpesvirus 4 [Epstein-Barr virus]
gugcccaccagagggug

SEQ ID NO: 1937935 - RNA, 20 nt, Human herpesvirus 4 [Epstein-Barr virus]
aggucgugguacuugaccag

SEQ ID NO: 1937936 - RNA, 19 nt, Human herpesvirus 4 [Epstein-Barr virus]
ugguuauuuugggccagga

SEQ ID NO: 1937937 - RNA, 16 nt, Human herpesvirus 4 [Epstein-Barr virus]
cuggccaggcugguga

SEQ ID NO: 1937938 - RNA, 12 nt, Human herpesvirus 4 [Epstein-Barr virus]
ggcuugccaaaa

SEQ ID NO: 1937939 - RNA, 14 nt, Human herpesvirus 4 [Epstein-Barr virus]
aggacggagaagcg

SEQ ID NO: 1937940 - RNA, 21 nt, Human herpesvirus 4 [Epstein-Barr virus]
cgaggaggaagagacuucaca

SEQ ID NO: 1937941 - RNA, 18 nt, Human herpesvirus 4 [Epstein-Barr virus]
aucagaugagacuuuguu

SEQ ID NO: 1937942 - RNA, 17 nt, Human herpesvirus 4 [Epstein-Barr virus]
gaggagaagagaggcuu

SEQ ID NO: 1937943 - RNA, 14 nt, Human herpesvirus 4 [Epstein-Barr virus]
agacuccugccuga

SEQ ID NO: 1937944 - RNA, 21 nt, Human herpesvirus 4 [Epstein-Barr virus]
aggcacggucgccccuccgag

SEQ ID NO: 1937945 - RNA, 15 nt, Human herpesvirus 4 [Epstein-Barr virus]
cccuuuuaacauugg

SEQ ID NO: 1937946 - RNA, 15 nt, Human herpesvirus 4 [Epstein-Barr virus]
ccagagcccagagga

SEQ ID NO: 1937947 - RNA, 14 nt, Human herpesvirus 4 [Epstein-Barr virus]
aacacagcucuggc

SEQ ID NO: 1937948 - RNA, 12 nt, Human herpesvirus 4 [Epstein-Barr virus]
ugagucagccuu

SEQ ID NO: 1937949 - RNA, 20 nt, Human herpesvirus 4 [Epstein-Barr virus]
ccucguguuucacggccuca

SEQ ID NO: 1937950 - RNA, 17 nt, Human herpesvirus 4 [Epstein-Barr virus]
acuacaagcagcuagag

SEQ ID NO: 1937951 - RNA, 15 nt, Human herpesvirus 4 [Epstein-Barr virus]
cauacucuucauucu

SEQ ID NO: 1937952 - RNA, 14 nt, Human herpesvirus 4 [Epstein-Barr virus]
auggcgaccgucac

SEQ ID NO: 1937953 - RNA, 22 nt, Human herpesvirus 4 [Epstein-Barr virus]
gguagccggcgcuguguggcug

SEQ ID NO: 1937954 - RNA, 22 nt, Human herpesvirus 4 [Epstein-Barr virus]
cagaggacuaauguucucuaac

SEQ ID NO: 1937955 - RNA, 12 nt, Human herpesvirus 4 [Epstein-Barr virus]
uccacagcccca

SEQ ID NO: 1937956 - RNA, 17 nt, Human herpesvirus 4 [Epstein-Barr virus]
cauggaaaccacucaga

SEQ ID NO: 1937957 - RNA, 20 nt, Human herpesvirus 4 [Epstein-Barr virus]
gcaugagcuccucuccaaau

SEQ ID NO: 1937958 - RNA, 13 nt, Human herpesvirus 4 [Epstein-Barr virus]
uguccggucaggu

SEQ ID NO: 1937959 - RNA, 22 nt, Human herpesvirus 4 [Epstein-Barr virus]
cuuggaggcugcuaagccagga

SEQ ID NO: 1937960 - RNA, 18 nt, Human herpesvirus 4 [Epstein-Barr virus]
caggagggcagagagggg

SEQ ID NO: 1937961 - RNA, 12 nt, Human herpesvirus 4 [Epstein-Barr virus]
cacagcgccagc

SEQ ID NO: 1937962 - RNA, 14 nt, Human herpesvirus 4 [Epstein-Barr virus]
gagcaggaggggca

SEQ ID NO: 1937963 - RNA, 13 nt, Human herpesvirus 4 [Epstein-Barr virus]
ugacuaugaggag

SEQ ID NO: 1937964 - RNA, 12 nt, Human herpesvirus 4 [Epstein-Barr virus]
gacccuucugcu

SEQ ID NO: 1937965 - RNA, 13 nt, Human herpesvirus 4 [Epstein-Barr virus]
cggcccagcccga

SEQ ID NO: 1937966 - RNA, 15 nt, Human herpesvirus 4 [Epstein-Barr virus]
ccgcccgccuggcuc

SEQ ID NO: 1937967 - RNA, 15 nt, Human herpesvirus 4 [Epstein-Barr virus]
agcugagugcccagg

SEQ ID NO: 1937968 - RNA, 16 nt, Human herpesvirus 4 [Epstein-Barr virus]
gcccguccccugaccg

SEQ ID NO: 1937969 - RNA, 22 nt, Human herpesvirus 4 [Epstein-Barr virus]
uuuacuaauggaauauuaauaa

SEQ ID NO: 1937970 - RNA, 17 nt, Human herpesvirus 4 [Epstein-Barr virus]
auaaggcucugaagcaa

SEQ ID NO: 1937971 - RNA, 17 nt, Human herpesvirus 4 [Epstein-Barr virus]
cgaggaacuggcucagc

SEQ ID NO: 1937972 - RNA, 21 nt, Human herpesvirus 4 [Epstein-Barr virus]
aaucagaccacccggacccgg

SEQ ID NO: 1937973 - RNA, 19 nt, Human herpesvirus 4 [Epstein-Barr virus]
auuaagagucccuccucac

SEQ ID NO: 1937974 - RNA, 18 nt, Human herpesvirus 4 [Epstein-Barr virus]
ucgccgcuaguuggucca

SEQ ID NO: 1937975 - RNA, 22 nt, Human herpesvirus 4 [Epstein-Barr virus]
cggcgccgcccgggggccaguc

SEQ ID NO: 1937976 - RNA, 14 nt, Human herpesvirus 4 [Epstein-Barr virus]
guccgugagagccu

SEQ ID NO: 1937977 - RNA, 14 nt, Human herpesvirus 4 [Epstein-Barr virus]
gccucuaccuucca

SEQ ID NO: 1937978 - RNA, 19 nt, Human herpesvirus 4 [Epstein-Barr virus]
caggccucacgaucuucaa

SEQ ID NO: 1937979 - RNA, 20 nt, Human herpesvirus 4 [Epstein-Barr virus]
cauugcuggccgcagcuggc

SEQ ID NO: 1937980 - RNA, 13 nt, Human herpesvirus 4 [Epstein-Barr virus]
ucuacuuuaaaaa

SEQ ID NO: 1937981 - RNA, 15 nt, Human herpesvirus 4 [Epstein-Barr virus]
gugcacccggcugga

SEQ ID NO: 1937982 - RNA, 17 nt, Human herpesvirus 4 [Epstein-Barr virus]
gacacagacuuggccuu

SEQ ID NO: 1937983 - RNA, 17 nt, Human herpesvirus 4 [Epstein-Barr virus]
uuguuaaggaacacggu

SEQ ID NO: 1937984 - RNA, 19 nt, Human herpesvirus 4 [Epstein-Barr virus]
acccuccccaugggauggc

SEQ ID NO: 1937985 - RNA, 16 nt, Human herpesvirus 4 [Epstein-Barr virus]
ggaagcucagcaguug

SEQ ID NO: 1937986 - RNA, 16 nt, Human herpesvirus 4 [Epstein-Barr virus]
ccuuuccuaagaccua

SEQ ID NO: 1937987 - RNA, 19 nt, Human herpesvirus 4 [Epstein-Barr virus]
acacauuacggugcuggag

SEQ ID NO: 1937988 - RNA, 22 nt, Human herpesvirus 4 [Epstein-Barr virus]
uugccucuuguguucuugccgc

SEQ ID NO: 1937989 - RNA, 23 nt, Human herpesvirus 4 [Epstein-Barr virus]
ggccccccgcaccagggccaggc

SEQ ID NO: 1937990 - RNA, 18 nt, Human herpesvirus 4 [Epstein-Barr virus]
ggucauuagaugcugccg

SEQ ID NO: 1937991 - RNA, 20 nt, Human herpesvirus 4 [Epstein-Barr virus]
ggccugggaggugcugaggc

SEQ ID NO: 1937992 - RNA, 15 nt, Human herpesvirus 4 [Epstein-Barr virus]
ggacgaggaggaaga

SEQ ID NO: 1937993 - RNA, 21 nt, Human herpesvirus 4 [Epstein-Barr virus]
cagaucccuacuacugcagca

SEQ ID NO: 1937994 - RNA, 22 nt, Human herpesvirus 4 [Epstein-Barr virus]
ucgggauccgcaggggcgccga

SEQ ID NO: 1937995 - RNA, 15 nt, Human herpesvirus 4 [Epstein-Barr virus]
uggccaggcugguga

SEQ ID NO: 1937996 - RNA, 22 nt, Human herpesvirus 4 [Epstein-Barr virus]
caggguggcuacuugcucaggu

SEQ ID NO: 1937997 - RNA, 15 nt, Human herpesvirus 4 [Epstein-Barr virus]
cuggacguggcugcg

SEQ ID NO: 1937998 - RNA, 16 nt, Human herpesvirus 4 [Epstein-Barr virus]
auggcacgggcagagg

SEQ ID NO: 1937999 - RNA, 14 nt, Human herpesvirus 4 [Epstein-Barr virus]
guggucuccuucuu

SEQ ID NO: 1938000 - RNA, 15 nt, Human herpesvirus 4 [Epstein-Barr virus]
cacucugaccaggac

SEQ ID NO: 1938001 - RNA, 17 nt, Human herpesvirus 4 [Epstein-Barr virus]
cagagcuguguuucccg

SEQ ID NO: 1938002 - RNA, 14 nt, Human herpesvirus 4 [Epstein-Barr virus]
ggaugcuguagugg

SEQ ID NO: 1938003 - RNA, 15 nt, Human herpesvirus 4 [Epstein-Barr virus]
cugguuggggcugcu

SEQ ID NO: 1938004 - RNA, 16 nt, Human herpesvirus 4 [Epstein-Barr virus]
cuuccgugccucgggc

SEQ ID NO: 1938005 - RNA, 15 nt, Human herpesvirus 4 [Epstein-Barr virus]
ucuccaccuguguaa

SEQ ID NO: 1938006 - RNA, 19 nt, Human herpesvirus 4 [Epstein-Barr virus]
guagccgaauaucuggagg

SEQ ID NO: 1938007 - RNA, 13 nt, Human herpesvirus 4 [Epstein-Barr virus]
uagacgaggcaca

SEQ ID NO: 1938008 - RNA, 13 nt, Human herpesvirus 4 [Epstein-Barr virus]
ccgggcccagccc

SEQ ID NO: 1938009 - RNA, 16 nt, Human herpesvirus 4 [Epstein-Barr virus]
acuuuagagcucugga

SEQ ID NO: 1938010 - RNA, 19 nt, Human herpesvirus 4 [Epstein-Barr virus]
acccccuggagccagcgcu

SEQ ID NO: 1938011 - RNA, 17 nt, Human herpesvirus 4 [Epstein-Barr virus]
uguuugcugcucggggc

SEQ ID NO: 1938012 - RNA, 16 nt, Human herpesvirus 4 [Epstein-Barr virus]
ugcauggccugggccc

SEQ ID NO: 1938013 - RNA, 14 nt, Human herpesvirus 4 [Epstein-Barr virus]
accuuuugucuccc

SEQ ID NO: 1938014 - RNA, 20 nt, Human herpesvirus 4 [Epstein-Barr virus]
acguuguagguguccagcgc

SEQ ID NO: 1938015 - RNA, 12 nt, Human herpesvirus 4 [Epstein-Barr virus]
cugcccauccau

SEQ ID NO: 1938016 - RNA, 16 nt, Human herpesvirus 4 [Epstein-Barr virus]
ggccaaaagggcucug

SEQ ID NO: 1938017 - RNA, 22 nt, Human herpesvirus 4 [Epstein-Barr virus]
uccucaaauguuccagaagucg

SEQ ID NO: 1938018 - RNA, 19 nt, Human herpesvirus 4 [Epstein-Barr virus]
gggccgucacuccagccau

SEQ ID NO: 1938019 - RNA, 17 nt, Human herpesvirus 4 [Epstein-Barr virus]
agagagcggcugugagc

SEQ ID NO: 1938020 - RNA, 16 nt, Human herpesvirus 4 [Epstein-Barr virus]
cugcuagcgucacuga

SEQ ID NO: 1938021 - RNA, 14 nt, Human herpesvirus 4 [Epstein-Barr virus]
gaccacucaggaag

SEQ ID NO: 1938022 - RNA, 20 nt, Human herpesvirus 4 [Epstein-Barr virus]
cucaccgggaacgcccagua

SEQ ID NO: 1938023 - RNA, 17 nt, Human herpesvirus 4 [Epstein-Barr virus]
ccgugcauggcagcaga

SEQ ID NO: 1938024 - RNA, 12 nt, Human herpesvirus 4 [Epstein-Barr virus]
gccccagccccu

SEQ ID NO: 1938025 - RNA, 20 nt, Human herpesvirus 4 [Epstein-Barr virus]
uggagagauuucauccucag

SEQ ID NO: 1938026 - RNA, 14 nt, Human herpesvirus 4 [Epstein-Barr virus]
gcucuggcaguuau

SEQ ID NO: 1938027 - RNA, 22 nt, Human herpesvirus 4 [Epstein-Barr virus]
cugcgccugagcugccugguga

SEQ ID NO: 1938028 - RNA, 18 nt, Human herpesvirus 4 [Epstein-Barr virus]
uaugcauacacugaauuu

SEQ ID NO: 1938029 - RNA, 17 nt, Human herpesvirus 4 [Epstein-Barr virus]
ugaacaucucaucccca

SEQ ID NO: 1938030 - RNA, 22 nt, Human herpesvirus 4 [Epstein-Barr virus]
uccugauacuagcguacagaag

SEQ ID NO: 1938031 - RNA, 23 nt, Human herpesvirus 4 [Epstein-Barr virus]
gagggggccugagacuggacccu

SEQ ID NO: 1938032 - RNA, 16 nt, Human herpesvirus 4 [Epstein-Barr virus]
accauccacagcccca

SEQ ID NO: 1938033 - RNA, 15 nt, Human herpesvirus 4 [Epstein-Barr virus]
gcacggaugccuggc

SEQ ID NO: 1938034 - RNA, 14 nt, Human herpesvirus 4 [Epstein-Barr virus]
ggcuucugcugcug

SEQ ID NO: 1938035 - RNA, 11 nt, Human herpesvirus 4 [Epstein-Barr virus]
uguugggugaa

SEQ ID NO: 1938036 - RNA, 21 nt, Human herpesvirus 4 [Epstein-Barr virus]
caacagcgaccggcagauccc

SEQ ID NO: 1938037 - RNA, 18 nt, Human herpesvirus 4 [Epstein-Barr virus]
gggguguagugggugggc

SEQ ID NO: 1938038 - RNA, 17 nt, Human herpesvirus 4 [Epstein-Barr virus]
cacgcuuuugucugccu

SEQ ID NO: 1938039 - RNA, 20 nt, Human herpesvirus 4 [Epstein-Barr virus]
caccggggaggccagguagc

SEQ ID NO: 1938040 - RNA, 18 nt, Human herpesvirus 4 [Epstein-Barr virus]
ucgacuuuaugccccccg

SEQ ID NO: 1938041 - RNA, 21 nt, Human herpesvirus 4 [Epstein-Barr virus]
acggcaaggccggaggcagac

SEQ ID NO: 1938042 - RNA, 14 nt, Human herpesvirus 4 [Epstein-Barr virus]
cgacggccucggcg

SEQ ID NO: 1938043 - RNA, 17 nt, Human herpesvirus 4 [Epstein-Barr virus]
gcuuuugucugccugga

SEQ ID NO: 1938044 - RNA, 14 nt, Human herpesvirus 4 [Epstein-Barr virus]
agaccuauguauaa

SEQ ID NO: 1938045 - RNA, 17 nt, Human herpesvirus 4 [Epstein-Barr virus]
ccacggccguagcccag

SEQ ID NO: 1938046 - RNA, 11 nt, Human herpesvirus 4 [Epstein-Barr virus]
cggagaggcgg

SEQ ID NO: 1938047 - RNA, 16 nt, Human herpesvirus 4 [Epstein-Barr virus]
ccgcggugguggcccu

SEQ ID NO: 1938048 - RNA, 16 nt, Human herpesvirus 4 [Epstein-Barr virus]
cuuggucaagguguca

SEQ ID NO: 1938049 - RNA, 18 nt, Human herpesvirus 4 [Epstein-Barr virus]
gcccgacaauaaaguuga

SEQ ID NO: 1938050 - RNA, 22 nt, Human herpesvirus 4 [Epstein-Barr virus]
caugcccagacucaucucaagg

SEQ ID NO: 1938051 - RNA, 16 nt, Human herpesvirus 4 [Epstein-Barr virus]
gaacaacugucagaca

SEQ ID NO: 1938052 - RNA, 13 nt, Human herpesvirus 4 [Epstein-Barr virus]
caucgcaagcucc

SEQ ID NO: 1938053 - RNA, 23 nt, Human herpesvirus 4 [Epstein-Barr virus]
aggcuguugacaugagcauggaa

SEQ ID NO: 1938054 - RNA, 15 nt, Human herpesvirus 4 [Epstein-Barr virus]
gucagcaaaccagcu

SEQ ID NO: 1938055 - RNA, 12 nt, Human herpesvirus 4 [Epstein-Barr virus]
ugcggggaacug

SEQ ID NO: 1938056 - RNA, 14 nt, Human herpesvirus 4 [Epstein-Barr virus]
ggaacgaggggagg

SEQ ID NO: 1938057 - RNA, 14 nt, Human herpesvirus 4 [Epstein-Barr virus]
ucccauaccuacac

SEQ ID NO: 1938058 - RNA, 19 nt, Human herpesvirus 4 [Epstein-Barr virus]
acccgaggucaagucccgg

SEQ ID NO: 1938059 - RNA, 16 nt, Human herpesvirus 4 [Epstein-Barr virus]
ugcuagcuucagggaa

SEQ ID NO: 1938060 - RNA, 23 nt, Human herpesvirus 4 [Epstein-Barr virus]
ggccagggcggaggagauccgcc

SEQ ID NO: 1938061 - RNA, 15 nt, Human herpesvirus 4 [Epstein-Barr virus]
aggaaggggccucgg

SEQ ID NO: 1938062 - RNA, 19 nt, Human herpesvirus 4 [Epstein-Barr virus]
ggaaauggccuaggagaga

SEQ ID NO: 1938063 - RNA, 15 nt, Human herpesvirus 4 [Epstein-Barr virus]
ucaccuacaugucaa

SEQ ID NO: 1938064 - RNA, 23 nt, Human herpesvirus 4 [Epstein-Barr virus]
cuuccuggccggccgcccccuga

SEQ ID NO: 1938065 - RNA, 19 nt, Human herpesvirus 4 [Epstein-Barr virus]
gcaacgccggccugcuggc

SEQ ID NO: 1938066 - RNA, 19 nt, Human herpesvirus 4 [Epstein-Barr virus]
ucgauuggaaaagggccca

SEQ ID NO: 1938067 - RNA, 18 nt, Human herpesvirus 4 [Epstein-Barr virus]
gccggcgcuguguggcug

SEQ ID NO: 1938068 - RNA, 14 nt, Human herpesvirus 4 [Epstein-Barr virus]
gcucucgcacucuu

SEQ ID NO: 1938069 - RNA, 20 nt, Human herpesvirus 4 [Epstein-Barr virus]
cgucgcggagagggaugggc

SEQ ID NO: 1938070 - RNA, 13 nt, Human herpesvirus 4 [Epstein-Barr virus]
gagauuaggggua

SEQ ID NO: 1938071 - RNA, 14 nt, Human herpesvirus 4 [Epstein-Barr virus]
agcagcuacacucu

SEQ ID NO: 1938072 - RNA, 13 nt, Human herpesvirus 4 [Epstein-Barr virus]
ucggugggccaga

SEQ ID NO: 1938073 - RNA, 13 nt, Human herpesvirus 4 [Epstein-Barr virus]
ucaucccugaccc

SEQ ID NO: 1938074 - RNA, 14 nt, Human herpesvirus 4 [Epstein-Barr virus]
gccgucuggcaggg

SEQ ID NO: 1938075 - RNA, 16 nt, Human herpesvirus 4 [Epstein-Barr virus]
guggccgaguggcaga

SEQ ID NO: 1938076 - RNA, 14 nt, Human herpesvirus 4 [Epstein-Barr virus]
cggcucgaccggga

SEQ ID NO: 1938077 - RNA, 13 nt, Human herpesvirus 4 [Epstein-Barr virus]
cgcaccagggcca

SEQ ID NO: 1938078 - RNA, 15 nt, Human herpesvirus 4 [Epstein-Barr virus]
caucagcucgcccac

SEQ ID NO: 1938079 - RNA, 18 nt, Human herpesvirus 4 [Epstein-Barr virus]
cagcuggcggacuacaag

SEQ ID NO: 1938080 - RNA, 20 nt, Human herpesvirus 4 [Epstein-Barr virus]
gcuuuguugggucugauguu

SEQ ID NO: 1938081 - RNA, 15 nt, Human herpesvirus 4 [Epstein-Barr virus]
guucuggugaugcuu

SEQ ID NO: 1938082 - RNA, 22 nt, Human herpesvirus 4 [Epstein-Barr virus]
cuggacacaagagccaucaccu

SEQ ID NO: 1938083 - RNA, 18 nt, Human herpesvirus 4 [Epstein-Barr virus]
gcuaaucgcugguggcag

SEQ ID NO: 1938084 - RNA, 19 nt, Human herpesvirus 4 [Epstein-Barr virus]
gaaugccaagagccccucc

SEQ ID NO: 1938085 - RNA, 23 nt, Human herpesvirus 4 [Epstein-Barr virus]
auguccaaaaggucaaagaacaa

SEQ ID NO: 1938086 - RNA, 12 nt, Human herpesvirus 4 [Epstein-Barr virus]
aagaccaaggcc

SEQ ID NO: 1938087 - RNA, 20 nt, Human herpesvirus 4 [Epstein-Barr virus]
cagaggcgacgcuccugggu

SEQ ID NO: 1938088 - RNA, 20 nt, Human herpesvirus 4 [Epstein-Barr virus]
ggcccagcagauccagggcc

SEQ ID NO: 1938089 - RNA, 16 nt, Human herpesvirus 4 [Epstein-Barr virus]
gcaaugcccacccacu

SEQ ID NO: 1938090 - RNA, 14 nt, Human herpesvirus 4 [Epstein-Barr virus]
gcccaccagccagc

SEQ ID NO: 1938091 - RNA, 15 nt, Human herpesvirus 4 [Epstein-Barr virus]
cagggcuucacuaga

SEQ ID NO: 1938092 - RNA, 22 nt, Human herpesvirus 4 [Epstein-Barr virus]
ugccuaaacgugauggugcugg

SEQ ID NO: 1938093 - RNA, 23 nt, Human herpesvirus 4 [Epstein-Barr virus]
ccugaucugggagaugagauaga

SEQ ID NO: 1938094 - RNA, 21 nt, Human herpesvirus 4 [Epstein-Barr virus]
ugcugccagagccucugccac

SEQ ID NO: 1938095 - RNA, 18 nt, Human herpesvirus 4 [Epstein-Barr virus]
ucacucucaguaauuccc

SEQ ID NO: 1938096 - RNA, 12 nt, Human herpesvirus 4 [Epstein-Barr virus]
ucccccuagccc

SEQ ID NO: 1938097 - RNA, 16 nt, Human herpesvirus 4 [Epstein-Barr virus]
caggaaguacagccgg

SEQ ID NO: 1938098 - RNA, 15 nt, Human herpesvirus 4 [Epstein-Barr virus]
ugcccucuccagcaa

SEQ ID NO: 1938099 - RNA, 21 nt, Human herpesvirus 4 [Epstein-Barr virus]
ggaaccugagccugagccaca

SEQ ID NO: 1938100 - RNA, 14 nt, Human herpesvirus 4 [Epstein-Barr virus]
agggcccuggucag

SEQ ID NO: 1938101 - RNA, 14 nt, Human herpesvirus 4 [Epstein-Barr virus]
guggugggcuccuu

SEQ ID NO: 1938102 - RNA, 17 nt, Human herpesvirus 4 [Epstein-Barr virus]
gagacgagcugcgacag

SEQ ID NO: 1938103 - RNA, 22 nt, Human herpesvirus 4 [Epstein-Barr virus]
ccaggcagcacacgaagccugc

SEQ ID NO: 1938104 - RNA, 18 nt, Human herpesvirus 4 [Epstein-Barr virus]
gacgcuguccgccaggac

SEQ ID NO: 1938105 - RNA, 20 nt, Human herpesvirus 4 [Epstein-Barr virus]
ugagggcuuugccugccuaa

SEQ ID NO: 1938106 - RNA, 15 nt, Human herpesvirus 4 [Epstein-Barr virus]
aauugugcccaccag

SEQ ID NO: 1938107 - RNA, 13 nt, Human herpesvirus 4 [Epstein-Barr virus]
gagcggcaagggc

SEQ ID NO: 1938108 - RNA, 17 nt, Human herpesvirus 4 [Epstein-Barr virus]
gcacccggcuggacccc

SEQ ID NO: 1938109 - RNA, 14 nt, Human herpesvirus 4 [Epstein-Barr virus]
ccuugcguggugcu

SEQ ID NO: 1938110 - RNA, 16 nt, Human herpesvirus 4 [Epstein-Barr virus]
caacuucagcuccagg

SEQ ID NO: 1938111 - RNA, 20 nt, Human herpesvirus 4 [Epstein-Barr virus]
cggcucaggaucagggccaa

SEQ ID NO: 1938112 - RNA, 14 nt, Human herpesvirus 4 [Epstein-Barr virus]
gcaaggacgggggu

SEQ ID NO: 1938113 - RNA, 18 nt, Human herpesvirus 4 [Epstein-Barr virus]
agccccuuuugccccccu

SEQ ID NO: 1938114 - RNA, 22 nt, Human herpesvirus 4 [Epstein-Barr virus]
uggucgucaucuggcucuccug

SEQ ID NO: 1938115 - RNA, 15 nt, Human herpesvirus 4 [Epstein-Barr virus]
ugccugugccucguc

SEQ ID NO: 1938116 - RNA, 18 nt, Human herpesvirus 4 [Epstein-Barr virus]
ugggucagugauggaaag

SEQ ID NO: 1938117 - RNA, 13 nt, Human herpesvirus 4 [Epstein-Barr virus]
ugguuucagccuc

SEQ ID NO: 1938118 - RNA, 20 nt, Human herpesvirus 4 [Epstein-Barr virus]
ccugacugacucucccucca

SEQ ID NO: 1938119 - RNA, 17 nt, Human herpesvirus 4 [Epstein-Barr virus]
guaauuguugcgcccua

SEQ ID NO: 1938120 - RNA, 20 nt, Human herpesvirus 4 [Epstein-Barr virus]
gcucgcccacacagcgccag

SEQ ID NO: 1938121 - RNA, 18 nt, Human herpesvirus 4 [Epstein-Barr virus]
aaacauggugucuguaau

SEQ ID NO: 1938122 - RNA, 13 nt, Human herpesvirus 4 [Epstein-Barr virus]
caucuuccaggug

SEQ ID NO: 1938123 - RNA, 14 nt, Human herpesvirus 4 [Epstein-Barr virus]
ccgggggccuuguc

SEQ ID NO: 1938124 - RNA, 15 nt, Human herpesvirus 4 [Epstein-Barr virus]
cugucagacacucca

SEQ ID NO: 1938125 - RNA, 21 nt, Human herpesvirus 4 [Epstein-Barr virus]
aggcccccgggugggcugguu

SEQ ID NO: 1938126 - RNA, 13 nt, Human herpesvirus 4 [Epstein-Barr virus]
ccuuaacacacca

SEQ ID NO: 1938127 - RNA, 14 nt, Human herpesvirus 4 [Epstein-Barr virus]
aucccauaccuaca

SEQ ID NO: 1938128 - RNA, 22 nt, Human herpesvirus 4 [Epstein-Barr virus]
agcugggccucuaaguacaggu

SEQ ID NO: 1938129 - RNA, 17 nt, Human herpesvirus 4 [Epstein-Barr virus]
uugugcggucuguuuuc

SEQ ID NO: 1938130 - RNA, 14 nt, Human herpesvirus 4 [Epstein-Barr virus]
cgcggcagaggccu

SEQ ID NO: 1938131 - RNA, 23 nt, Human herpesvirus 4 [Epstein-Barr virus]
ccuagaaacugugccauggugcc

SEQ ID NO: 1938132 - RNA, 15 nt, Human herpesvirus 4 [Epstein-Barr virus]
cgaaacuauggcaga

SEQ ID NO: 1938133 - RNA, 14 nt, Human herpesvirus 4 [Epstein-Barr virus]
cagucgcuggcugg

SEQ ID NO: 1938134 - RNA, 19 nt, Human herpesvirus 4 [Epstein-Barr virus]
caggagcaggagcaggagc

SEQ ID NO: 1938135 - RNA, 16 nt, Human herpesvirus 4 [Epstein-Barr virus]
ugaaaacugccuccuc

SEQ ID NO: 1938136 - RNA, 13 nt, Human herpesvirus 4 [Epstein-Barr virus]
cuggcucagcuug

SEQ ID NO: 1938137 - RNA, 14 nt, Human herpesvirus 4 [Epstein-Barr virus]
aucugggcugggac

SEQ ID NO: 1938138 - RNA, 22 nt, Human herpesvirus 4 [Epstein-Barr virus]
cacaaccacggugacauucacu

SEQ ID NO: 1938139 - RNA, 15 nt, Human herpesvirus 4 [Epstein-Barr virus]
aguaccagcuggugg

SEQ ID NO: 1938140 - RNA, 18 nt, Human herpesvirus 4 [Epstein-Barr virus]
ggccgagcagggacuggc

SEQ ID NO: 1938141 - RNA, 22 nt, Human herpesvirus 4 [Epstein-Barr virus]
aagcuaccgaugauucuggcca

SEQ ID NO: 1938142 - RNA, 13 nt, Human herpesvirus 4 [Epstein-Barr virus]
cuugcacccaccc

SEQ ID NO: 1938143 - RNA, 14 nt, Human herpesvirus 4 [Epstein-Barr virus]
ggcagaaaggcugg

SEQ ID NO: 1938144 - RNA, 14 nt, Human herpesvirus 4 [Epstein-Barr virus]
uccaucugcuucug

SEQ ID NO: 1938145 - RNA, 18 nt, Human herpesvirus 4 [Epstein-Barr virus]
ucaacuucagcuccaggg

SEQ ID NO: 1938146 - RNA, 18 nt, Human herpesvirus 4 [Epstein-Barr virus]
cagaguucccggcugcuc

SEQ ID NO: 1938147 - RNA, 18 nt, Human herpesvirus 4 [Epstein-Barr virus]
caacguccgugagagccu

SEQ ID NO: 1938148 - RNA, 16 nt, Human herpesvirus 4 [Epstein-Barr virus]
uucuggaaugcuucua

SEQ ID NO: 1938149 - RNA, 13 nt, Human herpesvirus 4 [Epstein-Barr virus]
cuggcucuccugu

SEQ ID NO: 1938150 - RNA, 14 nt, Human herpesvirus 4 [Epstein-Barr virus]
augcuccuauggac

SEQ ID NO: 1938151 - RNA, 22 nt, Human herpesvirus 4 [Epstein-Barr virus]
cuagauuuccuacaacucagcc

SEQ ID NO: 1938152 - RNA, 20 nt, Human herpesvirus 4 [Epstein-Barr virus]
uccacccccuggagccagcg

SEQ ID NO: 1938153 - RNA, 21 nt, Human herpesvirus 4 [Epstein-Barr virus]
ugaccacucaggaagcuggcc

SEQ ID NO: 1938154 - RNA, 22 nt, Human herpesvirus 4 [Epstein-Barr virus]
ccucggcgcugggacugccugg

SEQ ID NO: 1938155 - RNA, 19 nt, Human herpesvirus 4 [Epstein-Barr virus]
uggcagccgcggccaucac

SEQ ID NO: 1938156 - RNA, 19 nt, Human herpesvirus 4 [Epstein-Barr virus]
acaagaguucucuggugaa

SEQ ID NO: 1938157 - RNA, 17 nt, Human herpesvirus 4 [Epstein-Barr virus]
ccggucgcaugguggcu

SEQ ID NO: 1938158 - RNA, 16 nt, Human herpesvirus 4 [Epstein-Barr virus]
agccuacccaugacca

SEQ ID NO: 1938159 - RNA, 20 nt, Human herpesvirus 4 [Epstein-Barr virus]
cggaggcacuggagcagaag

SEQ ID NO: 1938160 - RNA, 19 nt, Human herpesvirus 4 [Epstein-Barr virus]
cauaaguccucauggcagg

SEQ ID NO: 1938161 - RNA, 18 nt, Human herpesvirus 4 [Epstein-Barr virus]
ccaguuccccccagccug

SEQ ID NO: 1938162 - RNA, 14 nt, Human herpesvirus 4 [Epstein-Barr virus]
acaccagucccaac

SEQ ID NO: 1938163 - RNA, 21 nt, Human herpesvirus 4 [Epstein-Barr virus]
cuuggaggcugcuaagccagg

SEQ ID NO: 1938164 - RNA, 20 nt, Human herpesvirus 4 [Epstein-Barr virus]
ccgacaucgccgccccaggg

SEQ ID NO: 1938165 - RNA, 18 nt, Human herpesvirus 4 [Epstein-Barr virus]
guggauggggucauuuau

SEQ ID NO: 1938166 - RNA, 20 nt, Human herpesvirus 4 [Epstein-Barr virus]
cccgaaagcggcccagcaga

SEQ ID NO: 1938167 - RNA, 14 nt, Human herpesvirus 4 [Epstein-Barr virus]
ugcaaugcccaccc

SEQ ID NO: 1938168 - RNA, 15 nt, Human herpesvirus 4 [Epstein-Barr virus]
ccaggcgacacuugg

SEQ ID NO: 1938169 - RNA, 12 nt, Human herpesvirus 4 [Epstein-Barr virus]
agguccgcuccu

SEQ ID NO: 1938170 - RNA, 19 nt, Human herpesvirus 4 [Epstein-Barr virus]
uggggcugagaccaugcuc

SEQ ID NO: 1938171 - RNA, 15 nt, Human herpesvirus 4 [Epstein-Barr virus]
aacuccuccagcagu

SEQ ID NO: 1938172 - RNA, 16 nt, Human herpesvirus 4 [Epstein-Barr virus]
uacuaauggaauauua

SEQ ID NO: 1938173 - RNA, 18 nt, Human herpesvirus 4 [Epstein-Barr virus]
gcccagaggcgcugugga

SEQ ID NO: 1938174 - RNA, 13 nt, Human herpesvirus 4 [Epstein-Barr virus]
gaaugugguaaca

SEQ ID NO: 1938175 - RNA, 12 nt, Human herpesvirus 4 [Epstein-Barr virus]
ucucuggcugug

SEQ ID NO: 1938176 - RNA, 17 nt, Human herpesvirus 4 [Epstein-Barr virus]
ugccccucagccugcuc

SEQ ID NO: 1938177 - RNA, 14 nt, Human herpesvirus 4 [Epstein-Barr virus]
cuggcggcccagcc

SEQ ID NO: 1938178 - RNA, 23 nt, Human herpesvirus 4 [Epstein-Barr virus]
gacccaucugagggcagugauag

SEQ ID NO: 1938179 - RNA, 12 nt, Human herpesvirus 4 [Epstein-Barr virus]
cagcccuccuca

SEQ ID NO: 1938180 - RNA, 19 nt, Human herpesvirus 4 [Epstein-Barr virus]
gagacacaucuggaccaga

SEQ ID NO: 1938181 - RNA, 21 nt, Human herpesvirus 4 [Epstein-Barr virus]
gaggaggcuggugccuuggcu

SEQ ID NO: 1938182 - RNA, 14 nt, Human herpesvirus 4 [Epstein-Barr virus]
gacgggguggugcc

SEQ ID NO: 1938183 - RNA, 16 nt, Human herpesvirus 4 [Epstein-Barr virus]
cggaaaccacaacagc

SEQ ID NO: 1938184 - RNA, 10 nt, Human herpesvirus 4 [Epstein-Barr virus]
uuucugcccc

SEQ ID NO: 1938185 - RNA, 22 nt, Human herpesvirus 4 [Epstein-Barr virus]
auuugaggaggcacacaaaaug

SEQ ID NO: 1938186 - RNA, 23 nt, Human herpesvirus 4 [Epstein-Barr virus]
agcacgguagccuugggggccug

SEQ ID NO: 1938187 - RNA, 17 nt, Human herpesvirus 4 [Epstein-Barr virus]
cugcguccaccuggcca

SEQ ID NO: 1938188 - RNA, 13 nt, Human herpesvirus 4 [Epstein-Barr virus]
cccugucuccccu

SEQ ID NO: 1938189 - RNA, 16 nt, Human herpesvirus 4 [Epstein-Barr virus]
gcuaaucgcugguggc

SEQ ID NO: 1938190 - RNA, 15 nt, Human herpesvirus 4 [Epstein-Barr virus]
agcggggcugggugg

SEQ ID NO: 1938191 - RNA, 16 nt, Human herpesvirus 4 [Epstein-Barr virus]
cuuggacccugcugcg

SEQ ID NO: 1938192 - RNA, 15 nt, Human herpesvirus 4 [Epstein-Barr virus]
cuccagagagggagu

SEQ ID NO: 1938193 - RNA, 15 nt, Human herpesvirus 4 [Epstein-Barr virus]
ucugccuccggccgc

SEQ ID NO: 1938194 - RNA, 18 nt, Human herpesvirus 4 [Epstein-Barr virus]
caccacccccaccaccuc

SEQ ID NO: 1938195 - RNA, 20 nt, Human herpesvirus 4 [Epstein-Barr virus]
gucaaacauggugucuguaa

SEQ ID NO: 1938196 - RNA, 21 nt, Human herpesvirus 4 [Epstein-Barr virus]
acuugcucagguuucugggca

SEQ ID NO: 1938197 - RNA, 20 nt, Human herpesvirus 4 [Epstein-Barr virus]
uauggcugcggaguugagcc

SEQ ID NO: 1938198 - RNA, 19 nt, Human herpesvirus 4 [Epstein-Barr virus]
cucgccuucuccucagccu

SEQ ID NO: 1938199 - RNA, 16 nt, Human herpesvirus 4 [Epstein-Barr virus]
ggccgcagcuggcgga

SEQ ID NO: 1938200 - RNA, 17 nt, Human herpesvirus 4 [Epstein-Barr virus]
cagaaaaucgcagcagg

SEQ ID NO: 1938201 - RNA, 18 nt, Human herpesvirus 4 [Epstein-Barr virus]
gagcagaaggaacagagg

SEQ ID NO: 1938202 - RNA, 12 nt, Human herpesvirus 4 [Epstein-Barr virus]
gugagucagccu

SEQ ID NO: 1938203 - RNA, 15 nt, Human herpesvirus 4 [Epstein-Barr virus]
cauucuaucagcuua

SEQ ID NO: 1938204 - RNA, 16 nt, Human herpesvirus 4 [Epstein-Barr virus]
agggcagacugcacag

SEQ ID NO: 1938205 - RNA, 17 nt, Human herpesvirus 4 [Epstein-Barr virus]
gugaauugugcccacca

SEQ ID NO: 1938206 - RNA, 23 nt, Human herpesvirus 4 [Epstein-Barr virus]
cggagagugcccuggaggccuca

SEQ ID NO: 1938207 - RNA, 23 nt, Human herpesvirus 4 [Epstein-Barr virus]
gucagccuugcccccgccagcgc

SEQ ID NO: 1938208 - RNA, 18 nt, Human herpesvirus 4 [Epstein-Barr virus]
gaccaucacauggggcau

SEQ ID NO: 1938209 - RNA, 22 nt, Human herpesvirus 4 [Epstein-Barr virus]
ugccucuacgccccagaugaaa

SEQ ID NO: 1938210 - RNA, 23 nt, Human herpesvirus 4 [Epstein-Barr virus]
uccccaaagucaagggaaaggaa

SEQ ID NO: 1938211 - RNA, 15 nt, Human herpesvirus 4 [Epstein-Barr virus]
ugccuuuuugccaca

SEQ ID NO: 1938212 - RNA, 19 nt, Human herpesvirus 4 [Epstein-Barr virus]
ucuagcaggugcaccagcu

SEQ ID NO: 1938213 - RNA, 20 nt, Human herpesvirus 4 [Epstein-Barr virus]
cgggaaugacgggcucccuc

SEQ ID NO: 1938214 - RNA, 23 nt, Human herpesvirus 4 [Epstein-Barr virus]
ugagucugcuggacuccgaggac

SEQ ID NO: 1938215 - RNA, 15 nt, Human herpesvirus 4 [Epstein-Barr virus]
ucaagagcuuccugg

SEQ ID NO: 1938216 - RNA, 15 nt, Human herpesvirus 4 [Epstein-Barr virus]
cggcguggagcuggg

SEQ ID NO: 1938217 - RNA, 12 nt, Human herpesvirus 4 [Epstein-Barr virus]
cuaugacaccua

SEQ ID NO: 1938218 - RNA, 15 nt, Human herpesvirus 4 [Epstein-Barr virus]
cucuggcacugcuag

SEQ ID NO: 1938219 - RNA, 14 nt, Human herpesvirus 4 [Epstein-Barr virus]
cuaccucuuuuggc

SEQ ID NO: 1938220 - RNA, 16 nt, Human herpesvirus 4 [Epstein-Barr virus]
ccagcauggcagccgg

SEQ ID NO: 1938221 - RNA, 15 nt, Human herpesvirus 4 [Epstein-Barr virus]
cagaaaaucgcagca

SEQ ID NO: 1938222 - RNA, 22 nt, Human herpesvirus 4 [Epstein-Barr virus]
agaaaggcuggccguguucacu

SEQ ID NO: 1938223 - RNA, 16 nt, Human herpesvirus 4 [Epstein-Barr virus]
cugacccuucugcugc

SEQ ID NO: 1938224 - RNA, 17 nt, Human herpesvirus 4 [Epstein-Barr virus]
uagcauggccgccagag

SEQ ID NO: 1938225 - RNA, 15 nt, Human herpesvirus 4 [Epstein-Barr virus]
cggugucggcaccua

SEQ ID NO: 1938226 - RNA, 18 nt, Human herpesvirus 4 [Epstein-Barr virus]
cugcgguugucacuuucu

SEQ ID NO: 1938227 - RNA, 16 nt, Human herpesvirus 4 [Epstein-Barr virus]
cugacacacaggccug

SEQ ID NO: 1938228 - RNA, 13 nt, Human herpesvirus 4 [Epstein-Barr virus]
cuccagggccagc

SEQ ID NO: 1938229 - RNA, 16 nt, Human herpesvirus 4 [Epstein-Barr virus]
ccagcagauccagggc

SEQ ID NO: 1938230 - RNA, 13 nt, Human herpesvirus 4 [Epstein-Barr virus]
agggaggccuggg

SEQ ID NO: 1938231 - RNA, 16 nt, Human herpesvirus 4 [Epstein-Barr virus]
uaaaaggggcagcaau

SEQ ID NO: 1938232 - RNA, 17 nt, Human herpesvirus 4 [Epstein-Barr virus]
ccaggggcgagcagcgc

SEQ ID NO: 1938233 - RNA, 20 nt, Human herpesvirus 4 [Epstein-Barr virus]
cuccguccuuguccaggaga

SEQ ID NO: 1938234 - RNA, 14 nt, Human herpesvirus 4 [Epstein-Barr virus]
guagacgaggcaca

SEQ ID NO: 1938235 - RNA, 22 nt, Human herpesvirus 4 [Epstein-Barr virus]
gcccaggcacaucuggcaccug

SEQ ID NO: 1938236 - RNA, 12 nt, Human herpesvirus 4 [Epstein-Barr virus]
gaggaggcacac

SEQ ID NO: 1938237 - RNA, 18 nt, Human herpesvirus 4 [Epstein-Barr virus]
gcgguuauaacugccaga

SEQ ID NO: 1938238 - RNA, 17 nt, Human herpesvirus 4 [Epstein-Barr virus]
augcuugugcuccugau

SEQ ID NO: 1938239 - RNA, 15 nt, Human herpesvirus 4 [Epstein-Barr virus]
ugcuggccgagcugg

SEQ ID NO: 1938240 - RNA, 21 nt, Human herpesvirus 4 [Epstein-Barr virus]
cagcccucgagaaccccagca

SEQ ID NO: 1938241 - RNA, 13 nt, Human herpesvirus 4 [Epstein-Barr virus]
caaauaaauguua

SEQ ID NO: 1938242 - RNA, 23 nt, Human herpesvirus 4 [Epstein-Barr virus]
gacuugaggugggcugacacaga

SEQ ID NO: 1938243 - RNA, 21 nt, Human herpesvirus 4 [Epstein-Barr virus]
ccugugcagggacgaggacga

SEQ ID NO: 1938244 - RNA, 19 nt, Human herpesvirus 4 [Epstein-Barr virus]
agcuccgagagcuccgcca

SEQ ID NO: 1938245 - RNA, 22 nt, Human herpesvirus 4 [Epstein-Barr virus]
cacccucggagaucaucccacu

SEQ ID NO: 1938246 - RNA, 17 nt, Human herpesvirus 4 [Epstein-Barr virus]
caggcauuuuuggugcu

SEQ ID NO: 1938247 - RNA, 14 nt, Human herpesvirus 4 [Epstein-Barr virus]
cugcugcugcuggu

SEQ ID NO: 1938248 - RNA, 18 nt, Human herpesvirus 4 [Epstein-Barr virus]
ggcagugauaagucauga

SEQ ID NO: 1938249 - RNA, 15 nt, Human herpesvirus 4 [Epstein-Barr virus]
cuggccgcagcuggc

SEQ ID NO: 1938250 - RNA, 14 nt, Human herpesvirus 4 [Epstein-Barr virus]
gucaaggugucaau

SEQ ID NO: 1938251 - RNA, 13 nt, Human herpesvirus 4 [Epstein-Barr virus]
gcaaccuuggggg

SEQ ID NO: 1938252 - RNA, 17 nt, Human herpesvirus 4 [Epstein-Barr virus]
gagggcgcucugcgcca

SEQ ID NO: 1938253 - RNA, 12 nt, Human herpesvirus 4 [Epstein-Barr virus]
ugcucaaggcag

SEQ ID NO: 1938254 - RNA, 20 nt, Human herpesvirus 4 [Epstein-Barr virus]
cuggucuccuuguugaccuc

SEQ ID NO: 1938255 - RNA, 13 nt, Human herpesvirus 4 [Epstein-Barr virus]
cucagguuucugg

SEQ ID NO: 1938256 - RNA, 12 nt, Human herpesvirus 4 [Epstein-Barr virus]
uggacaugcuga

SEQ ID NO: 1938257 - RNA, 13 nt, Human herpesvirus 4 [Epstein-Barr virus]
gccccagccccuc

SEQ ID NO: 1938258 - RNA, 13 nt, Human herpesvirus 4 [Epstein-Barr virus]
gccucagcccccc

SEQ ID NO: 1938259 - RNA, 13 nt, Human herpesvirus 4 [Epstein-Barr virus]
aaaggaagggggc

SEQ ID NO: 1938260 - RNA, 20 nt, Human herpesvirus 4 [Epstein-Barr virus]
cuguuuguccagcagggccu

SEQ ID NO: 1938261 - RNA, 14 nt, Human herpesvirus 4 [Epstein-Barr virus]
gguugucuucccag

SEQ ID NO: 1938262 - RNA, 12 nt, Human herpesvirus 4 [Epstein-Barr virus]
caucucagggac

SEQ ID NO: 1938263 - RNA, 13 nt, Human herpesvirus 4 [Epstein-Barr virus]
gcucucucuggag

SEQ ID NO: 1938264 - RNA, 14 nt, Human herpesvirus 4 [Epstein-Barr virus]
cacugaaaaaccag

SEQ ID NO: 1938265 - RNA, 13 nt, Human herpesvirus 4 [Epstein-Barr virus]
cgacuccaggccc

SEQ ID NO: 1938266 - RNA, 15 nt, Human herpesvirus 4 [Epstein-Barr virus]
cuacucgaccagcac

SEQ ID NO: 1938267 - RNA, 15 nt, Human herpesvirus 4 [Epstein-Barr virus]
cgucaucuggcucuc

SEQ ID NO: 1938268 - RNA, 12 nt, Human herpesvirus 4 [Epstein-Barr virus]
auggagaugugc

SEQ ID NO: 1938269 - RNA, 13 nt, Human herpesvirus 4 [Epstein-Barr virus]
caauaauuucagu

SEQ ID NO: 1938270 - RNA, 23 nt, Human herpesvirus 4 [Epstein-Barr virus]
cuccgccgccugcggcccacuga

SEQ ID NO: 1938271 - RNA, 19 nt, Human herpesvirus 4 [Epstein-Barr virus]
gcagcaguggccagcucau

SEQ ID NO: 1938272 - RNA, 23 nt, Human herpesvirus 4 [Epstein-Barr virus]
caggagccccgggcggcucagga

SEQ ID NO: 1938273 - RNA, 17 nt, Human herpesvirus 4 [Epstein-Barr virus]
gugaagggcagggcucg

SEQ ID NO: 1938274 - RNA, 14 nt, Human herpesvirus 4 [Epstein-Barr virus]
cuugcucucagcac

SEQ ID NO: 1938275 - RNA, 15 nt, Human herpesvirus 4 [Epstein-Barr virus]
agaccucugugucca

SEQ ID NO: 1938276 - RNA, 19 nt, Human herpesvirus 4 [Epstein-Barr virus]
guccaggggcuuguucuug

SEQ ID NO: 1938277 - RNA, 19 nt, Human herpesvirus 4 [Epstein-Barr virus]
gggaacgaggggaggcggg

SEQ ID NO: 1938278 - RNA, 13 nt, Human herpesvirus 4 [Epstein-Barr virus]
cccaggcagccuu

SEQ ID NO: 1938279 - RNA, 22 nt, Human herpesvirus 4 [Epstein-Barr virus]
gccggcauccagugcgucagca

SEQ ID NO: 1938280 - RNA, 18 nt, Human herpesvirus 4 [Epstein-Barr virus]
gcaagaauuggggcuggg

SEQ ID NO: 1938281 - RNA, 21 nt, Human herpesvirus 4 [Epstein-Barr virus]
aggaacacggucuggucacua

SEQ ID NO: 1938282 - RNA, 14 nt, Human herpesvirus 4 [Epstein-Barr virus]
auaccugcacggcc

SEQ ID NO: 1938283 - RNA, 18 nt, Human herpesvirus 4 [Epstein-Barr virus]
auagcagaagacuccugc

SEQ ID NO: 1938284 - RNA, 16 nt, Human herpesvirus 4 [Epstein-Barr virus]
uucugcugcugcuggu

SEQ ID NO: 1938285 - RNA, 13 nt, Human herpesvirus 4 [Epstein-Barr virus]
cggaccaggguca

SEQ ID NO: 1938286 - RNA, 23 nt, Human herpesvirus 4 [Epstein-Barr virus]
gacaaaauggggucuguggcagu

SEQ ID NO: 1938287 - RNA, 17 nt, Human herpesvirus 4 [Epstein-Barr virus]
gacggaaaucugcucuu

SEQ ID NO: 1938288 - RNA, 20 nt, Human herpesvirus 4 [Epstein-Barr virus]
aacuuccaacgcauccacca

SEQ ID NO: 1938289 - RNA, 21 nt, Human herpesvirus 4 [Epstein-Barr virus]
guucuccccacgggaaaaaga

SEQ ID NO: 1938290 - RNA, 13 nt, Human herpesvirus 4 [Epstein-Barr virus]
gaacgguggccag

SEQ ID NO: 1938291 - RNA, 21 nt, Human herpesvirus 4 [Epstein-Barr virus]
agccugagccacacccaccua

SEQ ID NO: 1938292 - RNA, 13 nt, Human herpesvirus 4 [Epstein-Barr virus]
guggagaggcccg

SEQ ID NO: 1938293 - RNA, 17 nt, Human herpesvirus 4 [Epstein-Barr virus]
augauugagaaugccaa

SEQ ID NO: 1938294 - RNA, 18 nt, Human herpesvirus 4 [Epstein-Barr virus]
cuggacgagguccuggac

SEQ ID NO: 1938295 - RNA, 23 nt, Human herpesvirus 4 [Epstein-Barr virus]
ucgaugauugagaaugccaagag

SEQ ID NO: 1938296 - RNA, 23 nt, Human herpesvirus 4 [Epstein-Barr virus]
uggagauuuucccacugugccua

SEQ ID NO: 1938297 - RNA, 16 nt, Human herpesvirus 4 [Epstein-Barr virus]
cgccaugcucagggcc

SEQ ID NO: 1938298 - RNA, 19 nt, Human herpesvirus 4 [Epstein-Barr virus]
gggaaaaacuggccaugca

SEQ ID NO: 1938299 - RNA, 21 nt, Human herpesvirus 4 [Epstein-Barr virus]
cuuauguuucaagcagcucac

SEQ ID NO: 1938300 - RNA, 16 nt, Human herpesvirus 4 [Epstein-Barr virus]
ucaguggcccucagaa

SEQ ID NO: 1938301 - RNA, 15 nt, Human herpesvirus 4 [Epstein-Barr virus]
cauuugaggaggcac

SEQ ID NO: 1938302 - RNA, 15 nt, Human herpesvirus 4 [Epstein-Barr virus]
uaacuugacuacaau

SEQ ID NO: 1938303 - RNA, 16 nt, Human herpesvirus 4 [Epstein-Barr virus]
uggaucuggggcuggc

SEQ ID NO: 1938304 - RNA, 12 nt, Human herpesvirus 4 [Epstein-Barr virus]
cugcaggcugga

SEQ ID NO: 1938305 - RNA, 13 nt, Human herpesvirus 4 [Epstein-Barr virus]
ggacgugaaccuc

SEQ ID NO: 1938306 - RNA, 17 nt, Human herpesvirus 4 [Epstein-Barr virus]
agcucggccagcaggcc

SEQ ID NO: 1938307 - RNA, 16 nt, Human herpesvirus 4 [Epstein-Barr virus]
ggucauuagaugcugc

SEQ ID NO: 1938308 - RNA, 11 nt, Human herpesvirus 4 [Epstein-Barr virus]
gaccuggaaau

SEQ ID NO: 1938309 - RNA, 19 nt, Human herpesvirus 4 [Epstein-Barr virus]
ucguccgccuacugguugu

SEQ ID NO: 1938310 - RNA, 14 nt, Human herpesvirus 4 [Epstein-Barr virus]
cugaccgacgggca

SEQ ID NO: 1938311 - RNA, 13 nt, Human herpesvirus 4 [Epstein-Barr virus]
gaagaccaggagc

SEQ ID NO: 1938312 - RNA, 14 nt, Human herpesvirus 4 [Epstein-Barr virus]
cuccaucagggcca

SEQ ID NO: 1938313 - RNA, 21 nt, Human herpesvirus 4 [Epstein-Barr virus]
agcguggucgugcugcuagcc

SEQ ID NO: 1938314 - RNA, 17 nt, Human herpesvirus 4 [Epstein-Barr virus]
ccccuggcggcccagcc

SEQ ID NO: 1938315 - RNA, 17 nt, Human herpesvirus 4 [Epstein-Barr virus]
acuggccaugcaggccu

SEQ ID NO: 1938316 - RNA, 17 nt, Human herpesvirus 4 [Epstein-Barr virus]
auugaugugacuuguga

SEQ ID NO: 1938317 - RNA, 12 nt, Human herpesvirus 4 [Epstein-Barr virus]
gcuuaaaaaugu

SEQ ID NO: 1938318 - RNA, 18 nt, Human herpesvirus 4 [Epstein-Barr virus]
caaggcggcugcugagac

SEQ ID NO: 1938319 - RNA, 21 nt, Human herpesvirus 4 [Epstein-Barr virus]
cagauuucuaguuaccacagg

SEQ ID NO: 1938320 - RNA, 22 nt, Human herpesvirus 4 [Epstein-Barr virus]
uacuugcucagguuucugggca

SEQ ID NO: 1938321 - RNA, 14 nt, Human herpesvirus 4 [Epstein-Barr virus]
gaaggaaaggccug

SEQ ID NO: 1938322 - RNA, 17 nt, Human herpesvirus 4 [Epstein-Barr virus]
ucggucaaguaccagcu

SEQ ID NO: 1938323 - RNA, 13 nt, Human herpesvirus 4 [Epstein-Barr virus]
gcaucucuuuuac

SEQ ID NO: 1938324 - RNA, 14 nt, Human herpesvirus 4 [Epstein-Barr virus]
cagcccuuaacaca

SEQ ID NO: 1938325 - RNA, 15 nt, Human herpesvirus 4 [Epstein-Barr virus]
ucacagaccagcccc

SEQ ID NO: 1938326 - RNA, 15 nt, Human herpesvirus 4 [Epstein-Barr virus]
ccucacgcgaaggga

SEQ ID NO: 1938327 - RNA, 21 nt, Human herpesvirus 4 [Epstein-Barr virus]
uuccugucggcucucuuugaa

SEQ ID NO: 1938328 - RNA, 14 nt, Human herpesvirus 4 [Epstein-Barr virus]
caggccgccaugcu

SEQ ID NO: 1938329 - RNA, 20 nt, Human herpesvirus 4 [Epstein-Barr virus]
ucuguuaaggcuguugacau

SEQ ID NO: 1938330 - RNA, 15 nt, Human herpesvirus 4 [Epstein-Barr virus]
agcaggugagggugc

SEQ ID NO: 1938331 - RNA, 13 nt, Human herpesvirus 4 [Epstein-Barr virus]
gaugguggggcuu

SEQ ID NO: 1938332 - RNA, 20 nt, Human herpesvirus 4 [Epstein-Barr virus]
uagcgucccaaacauaaaug

SEQ ID NO: 1938333 - RNA, 15 nt, Human herpesvirus 4 [Epstein-Barr virus]
ugcagcgcaucaggc

SEQ ID NO: 1938334 - RNA, 15 nt, Human herpesvirus 4 [Epstein-Barr virus]
cgggggagagaaaga

SEQ ID NO: 1938335 - RNA, 23 nt, Human herpesvirus 4 [Epstein-Barr virus]
ccuccgagugaccagucaccuuc

SEQ ID NO: 1938336 - RNA, 21 nt, Human herpesvirus 4 [Epstein-Barr virus]
gguacucuuggugcagcccuu

SEQ ID NO: 1938337 - RNA, 22 nt, Human herpesvirus 4 [Epstein-Barr virus]
gaagcccaagaagaagcccacc

SEQ ID NO: 1938338 - RNA, 23 nt, Human herpesvirus 4 [Epstein-Barr virus]
gcgcaaccagcacgucgucagag

SEQ ID NO: 1938339 - RNA, 15 nt, Human herpesvirus 4 [Epstein-Barr virus]
ccaggagucugcugc

SEQ ID NO: 1938340 - RNA, 16 nt, Human herpesvirus 4 [Epstein-Barr virus]
ggauccuccaccgccg

SEQ ID NO: 1938341 - RNA, 19 nt, Human herpesvirus 4 [Epstein-Barr virus]
cuugugaacuuuaacauug

SEQ ID NO: 1938342 - RNA, 22 nt, Human herpesvirus 4 [Epstein-Barr virus]
uucacggggccgugcaccugcc

SEQ ID NO: 1938343 - RNA, 23 nt, Human herpesvirus 4 [Epstein-Barr virus]
ggauagccucgcgacucguggga

SEQ ID NO: 1938344 - RNA, 15 nt, Human herpesvirus 4 [Epstein-Barr virus]
acuuuuugccaccca

SEQ ID NO: 1938345 - RNA, 14 nt, Human herpesvirus 4 [Epstein-Barr virus]
gcugcgguggugcg

SEQ ID NO: 1938346 - RNA, 18 nt, Human herpesvirus 4 [Epstein-Barr virus]
gcaccagcuccagggaca

SEQ ID NO: 1938347 - RNA, 19 nt, Human herpesvirus 4 [Epstein-Barr virus]
uuggagaaaacgggggugg

SEQ ID NO: 1938348 - RNA, 23 nt, Human herpesvirus 4 [Epstein-Barr virus]
ggaacccuagccaccguggccag

SEQ ID NO: 1938349 - RNA, 12 nt, Human herpesvirus 4 [Epstein-Barr virus]
gccagguacagg

SEQ ID NO: 1938350 - RNA, 17 nt, Human herpesvirus 4 [Epstein-Barr virus]
gaacaggagcaggagca

SEQ ID NO: 1938351 - RNA, 19 nt, Human herpesvirus 4 [Epstein-Barr virus]
cuggccgagcuggaggcca

SEQ ID NO: 1938352 - RNA, 16 nt, Human herpesvirus 4 [Epstein-Barr virus]
auuccaggugugcuuc

SEQ ID NO: 1938353 - RNA, 18 nt, Human herpesvirus 4 [Epstein-Barr virus]
ggcccuuugccuggggcu

SEQ ID NO: 1938354 - RNA, 17 nt, Human herpesvirus 4 [Epstein-Barr virus]
acccaccgcaaccgcug

SEQ ID NO: 1938355 - RNA, 23 nt, Human herpesvirus 4 [Epstein-Barr virus]
gucuucugucucggccuccuggc

SEQ ID NO: 1938356 - RNA, 21 nt, Human herpesvirus 4 [Epstein-Barr virus]
gggguucuccaggcuccugga

SEQ ID NO: 1938357 - RNA, 22 nt, Human herpesvirus 4 [Epstein-Barr virus]
cugcuugugaucauggaaacca

SEQ ID NO: 1938358 - RNA, 23 nt, Human herpesvirus 4 [Epstein-Barr virus]
cuuguuucucagagagcauuuca

SEQ ID NO: 1938359 - RNA, 20 nt, Human herpesvirus 4 [Epstein-Barr virus]
gguauucucagaugcagugg

SEQ ID NO: 1938360 - RNA, 21 nt, Human herpesvirus 4 [Epstein-Barr virus]
gacauuucucauaauggugcc

SEQ ID NO: 1938361 - RNA, 21 nt, Human herpesvirus 4 [Epstein-Barr virus]
gcugcuuuuagccuaauugug

SEQ ID NO: 1938362 - RNA, 19 nt, Human herpesvirus 4 [Epstein-Barr virus]
aaagaucuaccccagcugc

SEQ ID NO: 1938363 - RNA, 13 nt, Human herpesvirus 4 [Epstein-Barr virus]
ccagguagcccag

SEQ ID NO: 1938364 - RNA, 14 nt, Human herpesvirus 4 [Epstein-Barr virus]
ccuccucugggccg

SEQ ID NO: 1938365 - RNA, 21 nt, Human herpesvirus 4 [Epstein-Barr virus]
ugaggcugaugauggccacga

SEQ ID NO: 1938366 - RNA, 21 nt, Human herpesvirus 4 [Epstein-Barr virus]
ggaagcguucuucacugucca

SEQ ID NO: 1938367 - RNA, 23 nt, Human herpesvirus 4 [Epstein-Barr virus]
ccagacuccggggguccagccgg

SEQ ID NO: 1938368 - RNA, 21 nt, Human herpesvirus 4 [Epstein-Barr virus]
cgaaagcacuuugaaagaugu

SEQ ID NO: 1938369 - RNA, 18 nt, Human herpesvirus 4 [Epstein-Barr virus]
gucaauaauuucagugaa

SEQ ID NO: 1938370 - RNA, 16 nt, Human herpesvirus 4 [Epstein-Barr virus]
uaggcguaacuugucu

SEQ ID NO: 1938371 - RNA, 15 nt, Human herpesvirus 4 [Epstein-Barr virus]
guggccacacugggg

SEQ ID NO: 1938372 - RNA, 18 nt, Human herpesvirus 4 [Epstein-Barr virus]
aggagacuggcaacuccu

SEQ ID NO: 1938373 - RNA, 18 nt, Human herpesvirus 4 [Epstein-Barr virus]
ggaagagaggggcaggga

SEQ ID NO: 1938374 - RNA, 15 nt, Human herpesvirus 4 [Epstein-Barr virus]
uccaagugcaacaau

SEQ ID NO: 1938375 - RNA, 18 nt, Human herpesvirus 4 [Epstein-Barr virus]
gugcgcaacgccggccug

SEQ ID NO: 1938376 - RNA, 14 nt, Human herpesvirus 4 [Epstein-Barr virus]
uugugcuccugaua

SEQ ID NO: 1938377 - RNA, 18 nt, Human herpesvirus 4 [Epstein-Barr virus]
ggcuacaacaggcugcug

SEQ ID NO: 1938378 - RNA, 13 nt, Human herpesvirus 4 [Epstein-Barr virus]
cuggcacacacuc

SEQ ID NO: 1938379 - RNA, 19 nt, Human herpesvirus 4 [Epstein-Barr virus]
uggagagauuucauccuca

SEQ ID NO: 1938380 - RNA, 16 nt, Human herpesvirus 4 [Epstein-Barr virus]
cuugcacccaccccca

SEQ ID NO: 1938381 - RNA, 13 nt, Human herpesvirus 4 [Epstein-Barr virus]
uggcggccuggca

SEQ ID NO: 1938382 - RNA, 19 nt, Human herpesvirus 4 [Epstein-Barr virus]
cgggucaggucgcggacca

SEQ ID NO: 1938383 - RNA, 22 nt, Human herpesvirus 4 [Epstein-Barr virus]
gugauaaccauggacgaggacg

SEQ ID NO: 1938384 - RNA, 23 nt, Human herpesvirus 4 [Epstein-Barr virus]
guaguaggcacaucuggaccugg

SEQ ID NO: 1938385 - RNA, 17 nt, Human herpesvirus 4 [Epstein-Barr virus]
ccacagccugcaccagu

SEQ ID NO: 1938386 - RNA, 15 nt, Human herpesvirus 4 [Epstein-Barr virus]
aggcgcgggucuggg

SEQ ID NO: 1938387 - RNA, 23 nt, Human herpesvirus 4 [Epstein-Barr virus]
aauuauccaagaaaccccacgga

SEQ ID NO: 1938388 - RNA, 21 nt, Human herpesvirus 4 [Epstein-Barr virus]
cggggccuuggcaucaucagc

SEQ ID NO: 1938389 - RNA, 13 nt, Human herpesvirus 4 [Epstein-Barr virus]
ccccucugcagag

SEQ ID NO: 1938390 - RNA, 16 nt, Human herpesvirus 4 [Epstein-Barr virus]
cagggcaaagccacaa

SEQ ID NO: 1938391 - RNA, 21 nt, Human herpesvirus 4 [Epstein-Barr virus]
ccacggcccggggguggcagc

SEQ ID NO: 1938392 - RNA, 18 nt, Human herpesvirus 4 [Epstein-Barr virus]
cccagacucaucucaagg

SEQ ID NO: 1938393 - RNA, 20 nt, Human herpesvirus 4 [Epstein-Barr virus]
caacacaacuaccaggcaga

SEQ ID NO: 1938394 - RNA, 13 nt, Human herpesvirus 4 [Epstein-Barr virus]
agcucuggcacug

SEQ ID NO: 1938395 - RNA, 21 nt, Human herpesvirus 4 [Epstein-Barr virus]
ggacguuggcgggacuggcac

SEQ ID NO: 1938396 - RNA, 14 nt, Human herpesvirus 4 [Epstein-Barr virus]
cucugaccaggaca

SEQ ID NO: 1938397 - RNA, 20 nt, Human herpesvirus 4 [Epstein-Barr virus]
ggcgugcccgaacccggguu

SEQ ID NO: 1938398 - RNA, 21 nt, Human herpesvirus 4 [Epstein-Barr virus]
caaugagagccaaaaauuuga

SEQ ID NO: 1938399 - RNA, 16 nt, Human herpesvirus 4 [Epstein-Barr virus]
ggugggggugggugca

SEQ ID NO: 1938400 - RNA, 14 nt, Human herpesvirus 4 [Epstein-Barr virus]
agucaccugcacag

SEQ ID NO: 1938401 - RNA, 14 nt, Human herpesvirus 4 [Epstein-Barr virus]
caagaguucucugg

SEQ ID NO: 1938402 - RNA, 14 nt, Human herpesvirus 4 [Epstein-Barr virus]
caauggggccagga

SEQ ID NO: 1938403 - RNA, 12 nt, Human herpesvirus 4 [Epstein-Barr virus]
cggcugcucccg

SEQ ID NO: 1938404 - RNA, 20 nt, Human herpesvirus 4 [Epstein-Barr virus]
agaggccguguuucucccac

SEQ ID NO: 1938405 - RNA, 20 nt, Human herpesvirus 4 [Epstein-Barr virus]
ggacccuugucuuuggugga

SEQ ID NO: 1938406 - RNA, 17 nt, Human herpesvirus 4 [Epstein-Barr virus]
ggcacaucuggcaccug

SEQ ID NO: 1938407 - RNA, 17 nt, Human herpesvirus 4 [Epstein-Barr virus]
uccagaaaaugccgggc

SEQ ID NO: 1938408 - RNA, 21 nt, Human herpesvirus 4 [Epstein-Barr virus]
aguggcagaaucaccagagcc

SEQ ID NO: 1938409 - RNA, 20 nt, Human herpesvirus 4 [Epstein-Barr virus]
gagcaggagcgggaggggca

SEQ ID NO: 1938410 - RNA, 16 nt, Human herpesvirus 4 [Epstein-Barr virus]
gaucccaggccucagc

SEQ ID NO: 1938411 - RNA, 17 nt, Human herpesvirus 4 [Epstein-Barr virus]
ccuugcguggugcuguc

SEQ ID NO: 1938412 - RNA, 23 nt, Human herpesvirus 4 [Epstein-Barr virus]
uaccaggggcgagcagcgcggca

SEQ ID NO: 1938413 - RNA, 16 nt, Human herpesvirus 4 [Epstein-Barr virus]
ggagaugggugcauuu

SEQ ID NO: 1938414 - RNA, 17 nt, Human herpesvirus 4 [Epstein-Barr virus]
acacacauggcacucau

SEQ ID NO: 1938415 - RNA, 16 nt, Human herpesvirus 4 [Epstein-Barr virus]
cgugaccaccuggcca

SEQ ID NO: 1938416 - RNA, 17 nt, Human herpesvirus 4 [Epstein-Barr virus]
cuggccaaccugccucu

SEQ ID NO: 1938417 - RNA, 20 nt, Human herpesvirus 4 [Epstein-Barr virus]
ucguguuggauuggcuguca

SEQ ID NO: 1938418 - RNA, 11 nt, Human herpesvirus 4 [Epstein-Barr virus]
ccucugggugc

SEQ ID NO: 1938419 - RNA, 21 nt, Human herpesvirus 4 [Epstein-Barr virus]
acuugucuacaucccauaccu

SEQ ID NO: 1938420 - RNA, 14 nt, Human herpesvirus 4 [Epstein-Barr virus]
gacgcuccaggauc

SEQ ID NO: 1938421 - RNA, 14 nt, Human herpesvirus 4 [Epstein-Barr virus]
gccuucgcccccuc

SEQ ID NO: 1938422 - RNA, 14 nt, Human herpesvirus 4 [Epstein-Barr virus]
gucagaccugaaga

SEQ ID NO: 1938423 - RNA, 13 nt, Human herpesvirus 4 [Epstein-Barr virus]
ggcccgggaccgc

SEQ ID NO: 1938424 - RNA, 17 nt, Human herpesvirus 4 [Epstein-Barr virus]
gucuccagagggcagac

SEQ ID NO: 1938425 - RNA, 15 nt, Human herpesvirus 4 [Epstein-Barr virus]
ucuggucgcccccuc

SEQ ID NO: 1938426 - RNA, 15 nt, Human herpesvirus 4 [Epstein-Barr virus]
gccuucuccucagcc

SEQ ID NO: 1938427 - RNA, 13 nt, Human herpesvirus 4 [Epstein-Barr virus]
gaggaaggggccu

SEQ ID NO: 1938428 - RNA, 23 nt, Human herpesvirus 4 [Epstein-Barr virus]
ccugcccuccuccacccagcagc

SEQ ID NO: 1938429 - RNA, 18 nt, Human herpesvirus 4 [Epstein-Barr virus]
gggccacugcaggcugga

SEQ ID NO: 1938430 - RNA, 19 nt, Human herpesvirus 4 [Epstein-Barr virus]
aggaccugggagggccauc

SEQ ID NO: 1938431 - RNA, 21 nt, Human herpesvirus 4 [Epstein-Barr virus]
cgucguucaggaacagccucc

SEQ ID NO: 1938432 - RNA, 16 nt, Human herpesvirus 4 [Epstein-Barr virus]
gaccuggcucaggucc

SEQ ID NO: 1938433 - RNA, 15 nt, Human herpesvirus 4 [Epstein-Barr virus]
ggccuccagcucggc

SEQ ID NO: 1938434 - RNA, 17 nt, Human herpesvirus 4 [Epstein-Barr virus]
cucggaggugcccgggu

SEQ ID NO: 1938435 - RNA, 22 nt, Human herpesvirus 4 [Epstein-Barr virus]
ccccuccauuccacccacugau

SEQ ID NO: 1938436 - RNA, 14 nt, Human herpesvirus 4 [Epstein-Barr virus]
gcgccagcagggca

SEQ ID NO: 1938437 - RNA, 17 nt, Human herpesvirus 4 [Epstein-Barr virus]
augcuuacucaauccau

SEQ ID NO: 1938438 - RNA, 21 nt, Human herpesvirus 4 [Epstein-Barr virus]
acgaggcccugcaagccaaga

SEQ ID NO: 1938439 - RNA, 22 nt, Human herpesvirus 4 [Epstein-Barr virus]
cucgccgcuaguugguccaggg

SEQ ID NO: 1938440 - RNA, 14 nt, Human herpesvirus 4 [Epstein-Barr virus]
gcgagaauuggcag

SEQ ID NO: 1938441 - RNA, 18 nt, Human herpesvirus 4 [Epstein-Barr virus]
caacgccggccugcuggc

SEQ ID NO: 1938442 - RNA, 17 nt, Human herpesvirus 4 [Epstein-Barr virus]
cccuacucuccacggga

SEQ ID NO: 1938443 - RNA, 13 nt, Human herpesvirus 4 [Epstein-Barr virus]
uuuggugcugccu

SEQ ID NO: 1938444 - RNA, 13 nt, Human herpesvirus 4 [Epstein-Barr virus]
ugucccacuccac

SEQ ID NO: 1938445 - RNA, 19 nt, Human herpesvirus 4 [Epstein-Barr virus]
cccacacagcgccagcagg

SEQ ID NO: 1938446 - RNA, 18 nt, Human herpesvirus 4 [Epstein-Barr virus]
agagguuuugcuagggag

SEQ ID NO: 1938447 - RNA, 20 nt, Human herpesvirus 4 [Epstein-Barr virus]
gaacacccccaccccaccga

SEQ ID NO: 1938448 - RNA, 20 nt, Human herpesvirus 4 [Epstein-Barr virus]
acucccauguaagccugccu

SEQ ID NO: 1938449 - RNA, 19 nt, Human herpesvirus 4 [Epstein-Barr virus]
cuguacaaacccaacaaug

SEQ ID NO: 1938450 - RNA, 16 nt, Human herpesvirus 4 [Epstein-Barr virus]
gccuccagcucggcca

SEQ ID NO: 1938451 - RNA, 22 nt, Human herpesvirus 4 [Epstein-Barr virus]
cagcuccagggccagcaaaacc

SEQ ID NO: 1938452 - RNA, 16 nt, Human herpesvirus 4 [Epstein-Barr virus]
augaggaaggggccuc

SEQ ID NO: 1938453 - RNA, 12 nt, Human herpesvirus 4 [Epstein-Barr virus]
gauggugcuggu

SEQ ID NO: 1938454 - RNA, 14 nt, Human herpesvirus 4 [Epstein-Barr virus]
cugcucgccccugg

SEQ ID NO: 1938455 - RNA, 16 nt, Human herpesvirus 4 [Epstein-Barr virus]
gucucggccuccuggc

SEQ ID NO: 1938456 - RNA, 15 nt, Human herpesvirus 4 [Epstein-Barr virus]
caggaucagaaucaa

SEQ ID NO: 1938457 - RNA, 16 nt, Human herpesvirus 4 [Epstein-Barr virus]
gcguccuuugggaaca

SEQ ID NO: 1938458 - RNA, 19 nt, Human herpesvirus 4 [Epstein-Barr virus]
cccgaaagcggcccagcag

SEQ ID NO: 1938459 - RNA, 17 nt, Human herpesvirus 4 [Epstein-Barr virus]
gcgccagcagggcacag

SEQ ID NO: 1938460 - RNA, 22 nt, Human herpesvirus 4 [Epstein-Barr virus]
cgggccaaguuuaagcaacugc

SEQ ID NO: 1938461 - RNA, 22 nt, Human herpesvirus 4 [Epstein-Barr virus]
cugccuauggauagauagccac

SEQ ID NO: 1938462 - RNA, 12 nt, Human herpesvirus 4 [Epstein-Barr virus]
gucaaggccucg

SEQ ID NO: 1938463 - RNA, 18 nt, Human herpesvirus 4 [Epstein-Barr virus]
cagagcaaaagcaauaaa

SEQ ID NO: 1938464 - RNA, 14 nt, Human herpesvirus 4 [Epstein-Barr virus]
gaaacccucaguca

SEQ ID NO: 1938465 - RNA, 20 nt, Human herpesvirus 4 [Epstein-Barr virus]
caggcagaugaggccccuua

SEQ ID NO: 1938466 - RNA, 17 nt, Human herpesvirus 4 [Epstein-Barr virus]
cgccugcuucacgccuc

SEQ ID NO: 1938467 - RNA, 17 nt, Human herpesvirus 4 [Epstein-Barr virus]
uccacagauggagagau

SEQ ID NO: 1938468 - RNA, 15 nt, Human herpesvirus 4 [Epstein-Barr virus]
gggcguacaccuggc

SEQ ID NO: 1938469 - RNA, 23 nt, Human herpesvirus 4 [Epstein-Barr virus]
cugauucccccugcucauaccuc

SEQ ID NO: 1938470 - RNA, 13 nt, Human herpesvirus 4 [Epstein-Barr virus]
caugguggcuucu

SEQ ID NO: 1938471 - RNA, 12 nt, Human herpesvirus 4 [Epstein-Barr virus]
uacaaccaagcc

SEQ ID NO: 1938472 - RNA, 16 nt, Human herpesvirus 4 [Epstein-Barr virus]
ugcaggccuggacagc

SEQ ID NO: 1938473 - RNA, 22 nt, Human herpesvirus 4 [Epstein-Barr virus]
agccuugcguggugcuguccug

SEQ ID NO: 1938474 - RNA, 17 nt, Human herpesvirus 4 [Epstein-Barr virus]
gcccggccucgccuucu

SEQ ID NO: 1938475 - RNA, 24 nt, Human herpesvirus 4 [Epstein-Barr virus]
cggaguugaugaaaggggccgagg

SEQ ID NO: 1938476 - RNA, 23 nt, Human herpesvirus 4 [Epstein-Barr virus]
ccuggacgagggggcgcggcugg

SEQ ID NO: 1938477 - RNA, 16 nt, Human herpesvirus 4 [Epstein-Barr virus]
cuuguccgcuauuuuu

SEQ ID NO: 1938478 - RNA, 16 nt, Human herpesvirus 4 [Epstein-Barr virus]
uggcuugcuccaccag

SEQ ID NO: 1938479 - RNA, 17 nt, Human herpesvirus 4 [Epstein-Barr virus]
augcgugaccaccuggc

SEQ ID NO: 1938480 - RNA, 20 nt, Human herpesvirus 4 [Epstein-Barr virus]
gcuggcucgccucauccugg

SEQ ID NO: 1938481 - RNA, 15 nt, Human herpesvirus 4 [Epstein-Barr virus]
gcugcgguggugcgc

SEQ ID NO: 1938482 - RNA, 18 nt, Human herpesvirus 4 [Epstein-Barr virus]
cugagugcccagggcaga

SEQ ID NO: 1938483 - RNA, 22 nt, Human herpesvirus 4 [Epstein-Barr virus]
cagaggaaggccacaaagaggg

SEQ ID NO: 1938484 - RNA, 21 nt, Human herpesvirus 4 [Epstein-Barr virus]
ccucucgccuuguuucucaga

SEQ ID NO: 1938485 - RNA, 15 nt, Human herpesvirus 4 [Epstein-Barr virus]
caggaggaggggcag

SEQ ID NO: 1938486 - RNA, 20 nt, Human herpesvirus 4 [Epstein-Barr virus]
ggcacguuuaccagugugcc

SEQ ID NO: 1938487 - RNA, 16 nt, Human herpesvirus 4 [Epstein-Barr virus]
ucccgccccuguccac

SEQ ID NO: 1938488 - RNA, 15 nt, Human herpesvirus 4 [Epstein-Barr virus]
cuacccggucgcaug

SEQ ID NO: 1938489 - RNA, 14 nt, Human herpesvirus 4 [Epstein-Barr virus]
cggcaccgccaggu

SEQ ID NO: 1938490 - RNA, 16 nt, Human herpesvirus 4 [Epstein-Barr virus]
cacugucacugugcac

SEQ ID NO: 1938491 - RNA, 19 nt, Human herpesvirus 4 [Epstein-Barr virus]
ugcauuuccugcccuccca

SEQ ID NO: 1938492 - RNA, 14 nt, Human herpesvirus 4 [Epstein-Barr virus]
cugcguagaugagc

SEQ ID NO: 1938493 - RNA, 23 nt, Human herpesvirus 4 [Epstein-Barr virus]
cgugccucagauagccggaccuc

SEQ ID NO: 1938494 - RNA, 23 nt, Human herpesvirus 4 [Epstein-Barr virus]
uccuguacaaacccaacaaugug

SEQ ID NO: 1938495 - RNA, 23 nt, Human herpesvirus 4 [Epstein-Barr virus]
cguggaguccaugaccagggggc

SEQ ID NO: 1938496 - RNA, 22 nt, Human herpesvirus 4 [Epstein-Barr virus]
gccgcuccguggccccgggagc

SEQ ID NO: 1938497 - RNA, 18 nt, Human herpesvirus 4 [Epstein-Barr virus]
uccagcucggccagcagg

SEQ ID NO: 1938498 - RNA, 23 nt, Human herpesvirus 4 [Epstein-Barr virus]
uuagccuaauuguguauugcucu

SEQ ID NO: 1938499 - RNA, 20 nt, Human herpesvirus 4 [Epstein-Barr virus]
uggcagcagcucuggcacug

SEQ ID NO: 1938500 - RNA, 20 nt, Human herpesvirus 4 [Epstein-Barr virus]
aggagaagagaggcuucccg

SEQ ID NO: 1938501 - RNA, 17 nt, Human herpesvirus 4 [Epstein-Barr virus]
aaacaaggggaaaggag

SEQ ID NO: 1938502 - RNA, 17 nt, Human herpesvirus 4 [Epstein-Barr virus]
ccaucuaaacgccugau

SEQ ID NO: 1938503 - RNA, 18 nt, Human herpesvirus 4 [Epstein-Barr virus]
guccaccuggccaccaca

SEQ ID NO: 1938504 - RNA, 22 nt, Human herpesvirus 4 [Epstein-Barr virus]
gugugucccccuccauuccacc

SEQ ID NO: 1938505 - RNA, 21 nt, Human herpesvirus 4 [Epstein-Barr virus]
agagaggcgggaauggccgcc

SEQ ID NO: 1938506 - RNA, 16 nt, Human herpesvirus 4 [Epstein-Barr virus]
uaacacgaaugcccag

SEQ ID NO: 1938507 - RNA, 23 nt, Human herpesvirus 4 [Epstein-Barr virus]
cuacgggcgcaccuguguccugg

SEQ ID NO: 1938508 - RNA, 19 nt, Human herpesvirus 4 [Epstein-Barr virus]
augccucacgcgaagggaa

SEQ ID NO: 1938509 - RNA, 22 nt, Human herpesvirus 4 [Epstein-Barr virus]
ggaaagaggucccauguacagc

SEQ ID NO: 1938510 - RNA, 12 nt, Human herpesvirus 4 [Epstein-Barr virus]
ucuuggcagcag

SEQ ID NO: 1938511 - RNA, 19 nt, Human herpesvirus 4 [Epstein-Barr virus]
ccucggacauccagugucc

SEQ ID NO: 1938512 - RNA, 19 nt, Human herpesvirus 4 [Epstein-Barr virus]
ccagcuggucaucagccgc

SEQ ID NO: 1938513 - RNA, 17 nt, Human herpesvirus 4 [Epstein-Barr virus]
gccacggcgucaaacag

SEQ ID NO: 1938514 - RNA, 16 nt, Human herpesvirus 4 [Epstein-Barr virus]
acuggaugcaggaccu

SEQ ID NO: 1938515 - RNA, 22 nt, Human herpesvirus 4 [Epstein-Barr virus]
ggaagagacuucacagagcagc

SEQ ID NO: 1938516 - RNA, 22 nt, Human herpesvirus 4 [Epstein-Barr virus]
gcgucccaaacauaaaugcccc

SEQ ID NO: 1938517 - RNA, 14 nt, Human herpesvirus 4 [Epstein-Barr virus]
gugauuaggagcag

SEQ ID NO: 1938518 - RNA, 16 nt, Human herpesvirus 4 [Epstein-Barr virus]
ggcccuuagcauggga

SEQ ID NO: 1938519 - RNA, 16 nt, Human herpesvirus 4 [Epstein-Barr virus]
cagaacaucacugcca

SEQ ID NO: 1938520 - RNA, 19 nt, Human herpesvirus 4 [Epstein-Barr virus]
ucgugcucuucauguccac

SEQ ID NO: 1938521 - RNA, 14 nt, Human herpesvirus 4 [Epstein-Barr virus]
gaaagaggcucugc

SEQ ID NO: 1938522 - RNA, 19 nt, Human herpesvirus 4 [Epstein-Barr virus]
aggaggauggccuccagcu

SEQ ID NO: 1938523 - RNA, 23 nt, Human herpesvirus 4 [Epstein-Barr virus]
uccacaccauccacagccccacu

SEQ ID NO: 1938524 - RNA, 22 nt, Human herpesvirus 4 [Epstein-Barr virus]
cuccugccugccucugcucugg

SEQ ID NO: 1938525 - RNA, 21 nt, Human herpesvirus 4 [Epstein-Barr virus]
ccggugguggguguggagccg

SEQ ID NO: 1938526 - RNA, 16 nt, Human herpesvirus 4 [Epstein-Barr virus]
ugcaccgauagcaugg

SEQ ID NO: 1938527 - RNA, 12 nt, Human herpesvirus 4 [Epstein-Barr virus]
gaggaaacagga

SEQ ID NO: 1938528 - RNA, 23 nt, Human herpesvirus 4 [Epstein-Barr virus]
gcugcaccuggacauagaggggc

SEQ ID NO: 1938529 - RNA, 13 nt, Human herpesvirus 4 [Epstein-Barr virus]
cagggggccgggc

SEQ ID NO: 1938530 - RNA, 15 nt, Human herpesvirus 4 [Epstein-Barr virus]
gugaguccagggccc

SEQ ID NO: 1938531 - RNA, 19 nt, Human herpesvirus 4 [Epstein-Barr virus]
cgccugcggacucaggcca

SEQ ID NO: 1938532 - RNA, 23 nt, Human herpesvirus 4 [Epstein-Barr virus]
ucagggguguagugggugggcau

SEQ ID NO: 1938533 - RNA, 15 nt, Human herpesvirus 4 [Epstein-Barr virus]
gaaucucugccaacu

SEQ ID NO: 1938534 - RNA, 16 nt, Human herpesvirus 4 [Epstein-Barr virus]
ggcaggaggggcagga

SEQ ID NO: 1938535 - RNA, 20 nt, Human herpesvirus 4 [Epstein-Barr virus]
gccaggcagaggaaggccac

SEQ ID NO: 1938536 - RNA, 22 nt, Human herpesvirus 4 [Epstein-Barr virus]
gugagguggugcuugugaaggu

SEQ ID NO: 1938537 - RNA, 15 nt, Human herpesvirus 4 [Epstein-Barr virus]
gucccugcugcccau

SEQ ID NO: 1938538 - RNA, 22 nt, Human herpesvirus 4 [Epstein-Barr virus]
ucccaguuguuauucccaccuc

SEQ ID NO: 1938539 - RNA, 20 nt, Human herpesvirus 4 [Epstein-Barr virus]
aacuugacuacaauguuccu

SEQ ID NO: 1938540 - RNA, 16 nt, Human herpesvirus 4 [Epstein-Barr virus]
cucugggguccaggag

SEQ ID NO: 1938541 - RNA, 20 nt, Human herpesvirus 4 [Epstein-Barr virus]
ugaggacggugucugugguu

SEQ ID NO: 1938542 - RNA, 21 nt, Human herpesvirus 4 [Epstein-Barr virus]
ucucgccuuguuucucagaga

SEQ ID NO: 1938543 - RNA, 19 nt, Human herpesvirus 4 [Epstein-Barr virus]
acuacgagggccucuggca

SEQ ID NO: 1938544 - RNA, 15 nt, Human herpesvirus 4 [Epstein-Barr virus]
ccuccuacacacauc

SEQ ID NO: 1938545 - RNA, 16 nt, Human herpesvirus 4 [Epstein-Barr virus]
cgagcagaaggccaug

SEQ ID NO: 1938546 - RNA, 19 nt, Human herpesvirus 4 [Epstein-Barr virus]
agcaugucacacauucccc

SEQ ID NO: 1938547 - RNA, 16 nt, Human herpesvirus 4 [Epstein-Barr virus]
cuuguuggaauggggc

SEQ ID NO: 1938548 - RNA, 18 nt, Human herpesvirus 4 [Epstein-Barr virus]
cggacaugucacgugucc

SEQ ID NO: 1938549 - RNA, 21 nt, Human herpesvirus 4 [Epstein-Barr virus]
caucugaaaaugacaggcugc

SEQ ID NO: 1938550 - RNA, 17 nt, Human herpesvirus 4 [Epstein-Barr virus]
aggccgcugccaggccg

SEQ ID NO: 1938551 - RNA, 13 nt, Human herpesvirus 4 [Epstein-Barr virus]
ggccucugggguc

SEQ ID NO: 1938552 - RNA, 15 nt, Human herpesvirus 4 [Epstein-Barr virus]
ccggccgaggccugc

SEQ ID NO: 1938553 - RNA, 16 nt, Human herpesvirus 4 [Epstein-Barr virus]
uggccgcggcccaggu

SEQ ID NO: 1938554 - RNA, 12 nt, Human herpesvirus 4 [Epstein-Barr virus]
ggcggcugcugc

SEQ ID NO: 1938555 - RNA, 15 nt, Human herpesvirus 4 [Epstein-Barr virus]
aggagcuccgugagc

SEQ ID NO: 1938556 - RNA, 21 nt, Human herpesvirus 4 [Epstein-Barr virus]
ggcuuccagagaggcgcagcc

SEQ ID NO: 1938557 - RNA, 19 nt, Human herpesvirus 4 [Epstein-Barr virus]
cuucccagacucugcuuuc

SEQ ID NO: 1938558 - RNA, 20 nt, Human herpesvirus 4 [Epstein-Barr virus]
agucagccuugcccccgcca

SEQ ID NO: 1938559 - RNA, 15 nt, Human herpesvirus 4 [Epstein-Barr virus]
caugccuccccagca

SEQ ID NO: 1938560 - RNA, 13 nt, Human herpesvirus 4 [Epstein-Barr virus]
ggcgaagcuggcu

SEQ ID NO: 1938561 - RNA, 15 nt, Human herpesvirus 4 [Epstein-Barr virus]
ucuccauucccagcc

SEQ ID NO: 1938562 - RNA, 13 nt, Human herpesvirus 4 [Epstein-Barr virus]
ccagagcccagag

SEQ ID NO: 1938563 - RNA, 22 nt, Human herpesvirus 4 [Epstein-Barr virus]
auaaagcuguccuucugucaca

SEQ ID NO: 1938564 - RNA, 16 nt, Human herpesvirus 4 [Epstein-Barr virus]
cuggggcuggccugcc

SEQ ID NO: 1938565 - RNA, 20 nt, Human herpesvirus 4 [Epstein-Barr virus]
ccugaguucuacaaugccag

SEQ ID NO: 1938566 - RNA, 16 nt, Human herpesvirus 4 [Epstein-Barr virus]
cgagaccggcuccgga

SEQ ID NO: 1938567 - RNA, 18 nt, Human herpesvirus 4 [Epstein-Barr virus]
ucgugcaaccaggcccac

SEQ ID NO: 1938568 - RNA, 16 nt, Human herpesvirus 4 [Epstein-Barr virus]
cgugcaagcagcaccu

SEQ ID NO: 1938569 - RNA, 15 nt, Human herpesvirus 4 [Epstein-Barr virus]
cccuucugcugcugc

SEQ ID NO: 1938570 - RNA, 18 nt, Human herpesvirus 4 [Epstein-Barr virus]
aggcaauggucgccaggg

SEQ ID NO: 1938571 - RNA, 14 nt, Human herpesvirus 4 [Epstein-Barr virus]
ucggcccuccgcau

SEQ ID NO: 1938572 - RNA, 20 nt, Human herpesvirus 4 [Epstein-Barr virus]
gacggugggcaugacacagg

SEQ ID NO: 1938573 - RNA, 12 nt, Human herpesvirus 4 [Epstein-Barr virus]
ugguggcagcag

SEQ ID NO: 1938574 - RNA, 12 nt, Human herpesvirus 4 [Epstein-Barr virus]
cacucagcuccg

SEQ ID NO: 1938575 - RNA, 16 nt, Human herpesvirus 4 [Epstein-Barr virus]
cuucugcugcugcugg

SEQ ID NO: 1938576 - RNA, 15 nt, Human herpesvirus 4 [Epstein-Barr virus]
gucacggaugcugca

SEQ ID NO: 1938577 - RNA, 16 nt, Human herpesvirus 4 [Epstein-Barr virus]
ccaggccgccaugcuc

SEQ ID NO: 1938578 - RNA, 13 nt, Human herpesvirus 4 [Epstein-Barr virus]
cgggcucccuccc

SEQ ID NO: 1938579 - RNA, 15 nt, Human herpesvirus 4 [Epstein-Barr virus]
gccuccaacaggugc

SEQ ID NO: 1938580 - RNA, 15 nt, Human herpesvirus 4 [Epstein-Barr virus]
gcacugcguccaccu

SEQ ID NO: 1938581 - RNA, 21 nt, Human herpesvirus 4 [Epstein-Barr virus]
gaugaccaugauggugcagag

SEQ ID NO: 1938582 - RNA, 19 nt, Human herpesvirus 4 [Epstein-Barr virus]
aguaccagcccuuuuucca

SEQ ID NO: 1938583 - RNA, 18 nt, Human herpesvirus 4 [Epstein-Barr virus]
cagacuuuuggcaauggg

SEQ ID NO: 1938584 - RNA, 16 nt, Human herpesvirus 4 [Epstein-Barr virus]
uccggcugcccgucuc

SEQ ID NO: 1938585 - RNA, 16 nt, Human herpesvirus 4 [Epstein-Barr virus]
gcucccucccccuccc

SEQ ID NO: 1938586 - RNA, 15 nt, Human herpesvirus 4 [Epstein-Barr virus]
uacaaacacuacaau

SEQ ID NO: 1938587 - RNA, 22 nt, Human herpesvirus 4 [Epstein-Barr virus]
ccugauuuuuguccgcaggugg

SEQ ID NO: 1938588 - RNA, 16 nt, Human herpesvirus 4 [Epstein-Barr virus]
aggacccauauugggg

SEQ ID NO: 1938589 - RNA, 18 nt, Human herpesvirus 4 [Epstein-Barr virus]
gccuugguuucagccuca

SEQ ID NO: 1938590 - RNA, 17 nt, Human herpesvirus 4 [Epstein-Barr virus]
ugccuggauucuuacag

SEQ ID NO: 1938591 - RNA, 14 nt, Human herpesvirus 4 [Epstein-Barr virus]
ucaugcgugaccac

SEQ ID NO: 1938592 - RNA, 24 nt, Human herpesvirus 4 [Epstein-Barr virus]
cacugccaagguugaagagcagau

SEQ ID NO: 1938593 - RNA, 16 nt, Human herpesvirus 4 [Epstein-Barr virus]
cuagagguuuugcuag

SEQ ID NO: 1938594 - RNA, 22 nt, Human herpesvirus 4 [Epstein-Barr virus]
ccuccgguuugaacaucagacc

SEQ ID NO: 1938595 - RNA, 19 nt, Human herpesvirus 4 [Epstein-Barr virus]
cuuucuggccaaccugccu

SEQ ID NO: 1938596 - RNA, 19 nt, Human herpesvirus 4 [Epstein-Barr virus]
ggggccagguacaggaccu

SEQ ID NO: 1938597 - RNA, 20 nt, Human herpesvirus 4 [Epstein-Barr virus]
agcgcccugucccuggagcu

SEQ ID NO: 1938598 - RNA, 19 nt, Human herpesvirus 4 [Epstein-Barr virus]
ugccugaagcuugcugggg

SEQ ID NO: 1938599 - RNA, 11 nt, Human herpesvirus 4 [Epstein-Barr virus]
caggcuccugg

SEQ ID NO: 1938600 - RNA, 13 nt, Human herpesvirus 4 [Epstein-Barr virus]
gggcaccguggga

SEQ ID NO: 1938601 - RNA, 18 nt, Human herpesvirus 4 [Epstein-Barr virus]
cgacauguuucuggugag

SEQ ID NO: 1938602 - RNA, 16 nt, Human herpesvirus 4 [Epstein-Barr virus]
guccagggguccccga

SEQ ID NO: 1938603 - RNA, 13 nt, Human herpesvirus 4 [Epstein-Barr virus]
agagcuccgccac

SEQ ID NO: 1938604 - RNA, 17 nt, Human herpesvirus 4 [Epstein-Barr virus]
ccagaucgccugccacu

SEQ ID NO: 1938605 - RNA, 15 nt, Human herpesvirus 4 [Epstein-Barr virus]
ggugccggggcccac

SEQ ID NO: 1938606 - RNA, 14 nt, Human herpesvirus 4 [Epstein-Barr virus]
gcuccagggccagc

SEQ ID NO: 1938607 - RNA, 14 nt, Human herpesvirus 4 [Epstein-Barr virus]
ccuggccggccgcc

SEQ ID NO: 1938608 - RNA, 13 nt, Human herpesvirus 4 [Epstein-Barr virus]
cagcgcuggcucc

SEQ ID NO: 1938609 - RNA, 21 nt, Human herpesvirus 4 [Epstein-Barr virus]
gguccaagaguaaaagcagaa

SEQ ID NO: 1938610 - RNA, 22 nt, Human herpesvirus 4 [Epstein-Barr virus]
uccagcucggccagcaggccgg

SEQ ID NO: 1938611 - RNA, 20 nt, Human herpesvirus 4 [Epstein-Barr virus]
caaagacgccggaugccugc

SEQ ID NO: 1938612 - RNA, 13 nt, Human herpesvirus 4 [Epstein-Barr virus]
cuguacgccgccg

SEQ ID NO: 1938613 - RNA, 19 nt, Human herpesvirus 4 [Epstein-Barr virus]
cugguggccugggaggugc

SEQ ID NO: 1938614 - RNA, 20 nt, Human herpesvirus 4 [Epstein-Barr virus]
cucaggaucagggccaagac

SEQ ID NO: 1938615 - RNA, 22 nt, Human herpesvirus 4 [Epstein-Barr virus]
aacucucucaucuccaaaaagu

SEQ ID NO: 1938616 - RNA, 19 nt, Human herpesvirus 4 [Epstein-Barr virus]
cuugggcaugcuguaccug

SEQ ID NO: 1938617 - RNA, 22 nt, Human herpesvirus 4 [Epstein-Barr virus]
caaggugucaauaauuucagug

SEQ ID NO: 1938618 - RNA, 14 nt, Human herpesvirus 4 [Epstein-Barr virus]
guggccugcucacc

SEQ ID NO: 1938619 - RNA, 13 nt, Human herpesvirus 4 [Epstein-Barr virus]
augcaaugcccac

SEQ ID NO: 1938620 - RNA, 23 nt, Human herpesvirus 4 [Epstein-Barr virus]
cugugugcgcgccgccagcaugg

SEQ ID NO: 1938621 - RNA, 18 nt, Human herpesvirus 4 [Epstein-Barr virus]
cuuggccccuguguacau

SEQ ID NO: 1938622 - RNA, 16 nt, Human herpesvirus 4 [Epstein-Barr virus]
cuggccguggccaggu

SEQ ID NO: 1938623 - RNA, 15 nt, Human herpesvirus 4 [Epstein-Barr virus]
uaauguacagacuac

SEQ ID NO: 1938624 - RNA, 22 nt, Human herpesvirus 4 [Epstein-Barr virus]
ugaccucuacacgcuuggaguc

SEQ ID NO: 1938625 - RNA, 14 nt, Human herpesvirus 4 [Epstein-Barr virus]
cacgaaugcccagg

SEQ ID NO: 1938626 - RNA, 22 nt, Human herpesvirus 4 [Epstein-Barr virus]
acuuacagcacauuuuguucua

SEQ ID NO: 1938627 - RNA, 17 nt, Human herpesvirus 4 [Epstein-Barr virus]
aagcgggugcaguaaca

SEQ ID NO: 1938628 - RNA, 15 nt, Human herpesvirus 4 [Epstein-Barr virus]
aaggagggcugguug

SEQ ID NO: 1938629 - RNA, 17 nt, Human herpesvirus 4 [Epstein-Barr virus]
gcuccagugccuccgcc

SEQ ID NO: 1938630 - RNA, 16 nt, Human herpesvirus 4 [Epstein-Barr virus]
cgugccucgggccuca

SEQ ID NO: 1938631 - RNA, 15 nt, Human herpesvirus 4 [Epstein-Barr virus]
cagggccgugcaugg

SEQ ID NO: 1938632 - RNA, 15 nt, Human herpesvirus 4 [Epstein-Barr virus]
uguguacauuccagu

SEQ ID NO: 1938633 - RNA, 19 nt, Human herpesvirus 4 [Epstein-Barr virus]
uguauugggacuugaaggu

SEQ ID NO: 1938634 - RNA, 14 nt, Human herpesvirus 4 [Epstein-Barr virus]
agaugcucuggcga

SEQ ID NO: 1938635 - RNA, 23 nt, Human herpesvirus 4 [Epstein-Barr virus]
acgaggaggcggaagaccaggag

SEQ ID NO: 1938636 - RNA, 22 nt, Human herpesvirus 4 [Epstein-Barr virus]
gauggcgacuuuguuuagggac

SEQ ID NO: 1938637 - RNA, 16 nt, Human herpesvirus 4 [Epstein-Barr virus]
caccgucagccacaca

SEQ ID NO: 1938638 - RNA, 14 nt, Human herpesvirus 4 [Epstein-Barr virus]
uggcaggagaggcg

SEQ ID NO: 1938639 - RNA, 14 nt, Human herpesvirus 4 [Epstein-Barr virus]
cgugaacucugccc

SEQ ID NO: 1938640 - RNA, 19 nt, Human herpesvirus 4 [Epstein-Barr virus]
agugccaagagcugccucc

SEQ ID NO: 1938641 - RNA, 15 nt, Human herpesvirus 4 [Epstein-Barr virus]
ugccaagagcugccu

SEQ ID NO: 1938642 - RNA, 18 nt, Human herpesvirus 4 [Epstein-Barr virus]
caccagggaggccuggga

SEQ ID NO: 1938643 - RNA, 18 nt, Human herpesvirus 4 [Epstein-Barr virus]
acacgguuauggcagagc

SEQ ID NO: 1938644 - RNA, 16 nt, Human herpesvirus 4 [Epstein-Barr virus]
acuccacagauggaga

SEQ ID NO: 1938645 - RNA, 19 nt, Human herpesvirus 4 [Epstein-Barr virus]
gcgggggaccacauacauc

SEQ ID NO: 1938646 - RNA, 17 nt, Human herpesvirus 4 [Epstein-Barr virus]
gccaaccugcucucucu

SEQ ID NO: 1938647 - RNA, 19 nt, Human herpesvirus 4 [Epstein-Barr virus]
ccgggcagguccgugagaa

SEQ ID NO: 1938648 - RNA, 11 nt, Human herpesvirus 4 [Epstein-Barr virus]
aaaggggagau

SEQ ID NO: 1938649 - RNA, 15 nt, Human herpesvirus 4 [Epstein-Barr virus]
ugccaugugugucca

SEQ ID NO: 1938650 - RNA, 14 nt, Human herpesvirus 4 [Epstein-Barr virus]
ugaaaagccacauu

SEQ ID NO: 1938651 - RNA, 20 nt, Human herpesvirus 4 [Epstein-Barr virus]
gggcagacaccaccugcucg

SEQ ID NO: 1938652 - RNA, 20 nt, Human herpesvirus 4 [Epstein-Barr virus]
augagcacguguggaagagg

SEQ ID NO: 1938653 - RNA, 13 nt, Human herpesvirus 4 [Epstein-Barr virus]
ccucuacgcccca

SEQ ID NO: 1938654 - RNA, 15 nt, Human herpesvirus 4 [Epstein-Barr virus]
gccgaagaagggagg

SEQ ID NO: 1938655 - RNA, 13 nt, Human herpesvirus 4 [Epstein-Barr virus]
cgggaggcggugc

SEQ ID NO: 1938656 - RNA, 19 nt, Human herpesvirus 4 [Epstein-Barr virus]
auggcuauacacaggagcc

SEQ ID NO: 1938657 - RNA, 15 nt, Human herpesvirus 4 [Epstein-Barr virus]
gcugccagccucagc

SEQ ID NO: 1938658 - RNA, 17 nt, Human herpesvirus 4 [Epstein-Barr virus]
ugcauacgcugagugag

SEQ ID NO: 1938659 - RNA, 13 nt, Human herpesvirus 4 [Epstein-Barr virus]
gcgcccugcgagu

SEQ ID NO: 1938660 - RNA, 20 nt, Human herpesvirus 4 [Epstein-Barr virus]
cuguaaacuauggaggcccc

SEQ ID NO: 1938661 - RNA, 19 nt, Human herpesvirus 4 [Epstein-Barr virus]
gcaggagcaggaggagggg

SEQ ID NO: 1938662 - RNA, 16 nt, Human herpesvirus 4 [Epstein-Barr virus]
ccccuggcggcccagc

SEQ ID NO: 1938663 - RNA, 14 nt, Human herpesvirus 4 [Epstein-Barr virus]
cagguacaggaccu

SEQ ID NO: 1938664 - RNA, 22 nt, Human herpesvirus 4 [Epstein-Barr virus]
ccagcccucgagaaccccagca

SEQ ID NO: 1938665 - RNA, 20 nt, Human herpesvirus 4 [Epstein-Barr virus]
gucggacgaggaggaagaga

SEQ ID NO: 1938666 - RNA, 22 nt, Human herpesvirus 4 [Epstein-Barr virus]
agcggcgugucuuggccagcgg

SEQ ID NO: 1938667 - RNA, 16 nt, Human herpesvirus 4 [Epstein-Barr virus]
cccccgggcgccccca

SEQ ID NO: 1938668 - RNA, 11 nt, Human herpesvirus 4 [Epstein-Barr virus]
agcugcugguu

SEQ ID NO: 1938669 - RNA, 23 nt, Human herpesvirus 4 [Epstein-Barr virus]
uccccccgccuuugggcacccca

SEQ ID NO: 1938670 - RNA, 18 nt, Human herpesvirus 4 [Epstein-Barr virus]
agugguuucggacacacc

SEQ ID NO: 1938671 - RNA, 14 nt, Human herpesvirus 4 [Epstein-Barr virus]
augagcggggagau

SEQ ID NO: 1938672 - RNA, 21 nt, Human herpesvirus 4 [Epstein-Barr virus]
ccgaaagcggcccagcagauc

SEQ ID NO: 1938673 - RNA, 19 nt, Human herpesvirus 4 [Epstein-Barr virus]
ccaaaacuauaccaaagcu

SEQ ID NO: 1938674 - RNA, 16 nt, Human herpesvirus 4 [Epstein-Barr virus]
uggcgucucaggcuau

SEQ ID NO: 1938675 - RNA, 20 nt, Human herpesvirus 4 [Epstein-Barr virus]
uacagccgggcuaugcucua

SEQ ID NO: 1938676 - RNA, 16 nt, Human herpesvirus 4 [Epstein-Barr virus]
cacggcgucaaacagg

SEQ ID NO: 1938677 - RNA, 18 nt, Human herpesvirus 4 [Epstein-Barr virus]
caagucccggguggugag

SEQ ID NO: 1938678 - RNA, 21 nt, Human herpesvirus 4 [Epstein-Barr virus]
gagcaggaggggcaggagcag

SEQ ID NO: 1938679 - RNA, 14 nt, Human herpesvirus 4 [Epstein-Barr virus]
gccaggcuggugac

SEQ ID NO: 1938680 - RNA, 16 nt, Human herpesvirus 4 [Epstein-Barr virus]
gccaucucugauuaua

SEQ ID NO: 1938681 - RNA, 20 nt, Human herpesvirus 4 [Epstein-Barr virus]
gcaagcagcaccugucccug

SEQ ID NO: 1938682 - RNA, 12 nt, Human herpesvirus 4 [Epstein-Barr virus]
guggccugggag

SEQ ID NO: 1938683 - RNA, 16 nt, Human herpesvirus 4 [Epstein-Barr virus]
cacuuuagagcucugg

SEQ ID NO: 1938684 - RNA, 22 nt, Human herpesvirus 4 [Epstein-Barr virus]
cgggagggcgcucugcgccagc

SEQ ID NO: 1938685 - RNA, 17 nt, Human herpesvirus 4 [Epstein-Barr virus]
ccggggguccagccggg

SEQ ID NO: 1938686 - RNA, 21 nt, Human herpesvirus 4 [Epstein-Barr virus]
ccagguagcccagcgucagga

SEQ ID NO: 1938687 - RNA, 14 nt, Human herpesvirus 4 [Epstein-Barr virus]
ccgaaagcacuuug

SEQ ID NO: 1938688 - RNA, 19 nt, Human herpesvirus 4 [Epstein-Barr virus]
uugacacccccagcgcugg

SEQ ID NO: 1938689 - RNA, 14 nt, Human herpesvirus 4 [Epstein-Barr virus]
acuauguucucuac

SEQ ID NO: 1938690 - RNA, 20 nt, Human herpesvirus 4 [Epstein-Barr virus]
gccccuguccacugccccgg

SEQ ID NO: 1938691 - RNA, 15 nt, Human herpesvirus 4 [Epstein-Barr virus]
ccugggccccccgga

SEQ ID NO: 1938692 - RNA, 13 nt, Human herpesvirus 4 [Epstein-Barr virus]
cagaggaaggcca

SEQ ID NO: 1938693 - RNA, 21 nt, Human herpesvirus 4 [Epstein-Barr virus]
acgcccgacaauaaaguugau

SEQ ID NO: 1938694 - RNA, 14 nt, Human herpesvirus 4 [Epstein-Barr virus]
ggaaggaggauggc

SEQ ID NO: 1938695 - RNA, 17 nt, Human herpesvirus 4 [Epstein-Barr virus]
ccagcccuuaacacacc

SEQ ID NO: 1938696 - RNA, 22 nt, Human herpesvirus 4 [Epstein-Barr virus]
augcucaguggccgucuggcag

SEQ ID NO: 1938697 - RNA, 21 nt, Human herpesvirus 4 [Epstein-Barr virus]
ccagggacauccccagacuca

SEQ ID NO: 1938698 - RNA, 13 nt, Human herpesvirus 4 [Epstein-Barr virus]
gcuggccaggcug

SEQ ID NO: 1938699 - RNA, 20 nt, Human herpesvirus 4 [Epstein-Barr virus]
cggcauuccuaggagaagga

SEQ ID NO: 1938700 - RNA, 19 nt, Human herpesvirus 4 [Epstein-Barr virus]
ggacccuauggagggcagc

SEQ ID NO: 1938701 - RNA, 12 nt, Human herpesvirus 4 [Epstein-Barr virus]
cgagaaggagga

SEQ ID NO: 1938702 - RNA, 17 nt, Human herpesvirus 4 [Epstein-Barr virus]
gaugaacccuggggcaa

SEQ ID NO: 1938703 - RNA, 17 nt, Human herpesvirus 4 [Epstein-Barr virus]
uggugcuguccugcuga

SEQ ID NO: 1938704 - RNA, 14 nt, Human herpesvirus 4 [Epstein-Barr virus]
caaguaccagcugg

SEQ ID NO: 1938705 - RNA, 17 nt, Human herpesvirus 4 [Epstein-Barr virus]
ggcagcgaagaacacuc

SEQ ID NO: 1938706 - RNA, 18 nt, Human herpesvirus 4 [Epstein-Barr virus]
ccuguuucggcgccgccc

SEQ ID NO: 1938707 - RNA, 18 nt, Human herpesvirus 4 [Epstein-Barr virus]
ucuugagcgccguggcca

SEQ ID NO: 1938708 - RNA, 23 nt, Human herpesvirus 4 [Epstein-Barr virus]
ccauccaucaacuucagcuccag

SEQ ID NO: 1938709 - RNA, 21 nt, Human herpesvirus 4 [Epstein-Barr virus]
gcugcaccggagccugccgga

SEQ ID NO: 1938710 - RNA, 18 nt, Human herpesvirus 4 [Epstein-Barr virus]
uaagaaugggagcaacca

SEQ ID NO: 1938711 - RNA, 20 nt, Human herpesvirus 4 [Epstein-Barr virus]
cguuugaguccaaacagcua

SEQ ID NO: 1938712 - RNA, 15 nt, Human herpesvirus 4 [Epstein-Barr virus]
cacggcccuccagcg

SEQ ID NO: 1938713 - RNA, 16 nt, Human herpesvirus 4 [Epstein-Barr virus]
uggguccccucugccg

SEQ ID NO: 1938714 - RNA, 15 nt, Human herpesvirus 4 [Epstein-Barr virus]
cugugugaccccuca

SEQ ID NO: 1938715 - RNA, 22 nt, Human herpesvirus 4 [Epstein-Barr virus]
gggcagaaccaucagcucgccc

SEQ ID NO: 1938716 - RNA, 14 nt, Human herpesvirus 4 [Epstein-Barr virus]
cuacaacucagccc

SEQ ID NO: 1938717 - RNA, 13 nt, Human herpesvirus 4 [Epstein-Barr virus]
gugcagcuucucc

SEQ ID NO: 1938718 - RNA, 16 nt, Human herpesvirus 4 [Epstein-Barr virus]
gggcaaacagggcaga

SEQ ID NO: 1938719 - RNA, 17 nt, Human herpesvirus 4 [Epstein-Barr virus]
cuucucauuagucagga

SEQ ID NO: 1938720 - RNA, 15 nt, Human herpesvirus 4 [Epstein-Barr virus]
aucugggcagccaga

SEQ ID NO: 1938721 - RNA, 16 nt, Human herpesvirus 4 [Epstein-Barr virus]
gggacaguaccacaag

SEQ ID NO: 1938722 - RNA, 14 nt, Human herpesvirus 4 [Epstein-Barr virus]
ccaacgcucagugc

SEQ ID NO: 1938723 - RNA, 21 nt, Human herpesvirus 4 [Epstein-Barr virus]
agccugcaccaguggcugccc

SEQ ID NO: 1938724 - RNA, 17 nt, Human herpesvirus 4 [Epstein-Barr virus]
aacuuggaggcugcuaa

SEQ ID NO: 1938725 - RNA, 13 nt, Human herpesvirus 4 [Epstein-Barr virus]
uggcagcaguggc

SEQ ID NO: 1938726 - RNA, 21 nt, Human herpesvirus 4 [Epstein-Barr virus]
ggggccaaaagggcucugacc

SEQ ID NO: 1938727 - RNA, 15 nt, Human herpesvirus 4 [Epstein-Barr virus]
ucacuggcaaagggc

SEQ ID NO: 1938728 - RNA, 18 nt, Human herpesvirus 4 [Epstein-Barr virus]
gcaggaggggcaggagca

SEQ ID NO: 1938729 - RNA, 19 nt, Human herpesvirus 4 [Epstein-Barr virus]
cggcgaugucggggcugcu

SEQ ID NO: 1938730 - RNA, 23 nt, Human herpesvirus 4 [Epstein-Barr virus]
gggcauuaacuaagcuuaugagc

SEQ ID NO: 1938731 - RNA, 15 nt, Human herpesvirus 4 [Epstein-Barr virus]
cuugucuacauccca

SEQ ID NO: 1938732 - RNA, 12 nt, Human herpesvirus 4 [Epstein-Barr virus]
uacaggaggaaa

SEQ ID NO: 1938733 - RNA, 21 nt, Human herpesvirus 4 [Epstein-Barr virus]
aacaguagaagaacugcaaga

SEQ ID NO: 1938734 - RNA, 18 nt, Human herpesvirus 4 [Epstein-Barr virus]
ccccuggcggcccagccc

SEQ ID NO: 1938735 - RNA, 13 nt, Human herpesvirus 4 [Epstein-Barr virus]
uggacugugguau

SEQ ID NO: 1938736 - RNA, 18 nt, Human herpesvirus 4 [Epstein-Barr virus]
uguugaagcagaugugcc

SEQ ID NO: 1938737 - RNA, 14 nt, Human herpesvirus 4 [Epstein-Barr virus]
cggggcaugcugcc

SEQ ID NO: 1938738 - RNA, 19 nt, Human herpesvirus 4 [Epstein-Barr virus]
aggagugccucugggugcu

SEQ ID NO: 1938739 - RNA, 19 nt, Human herpesvirus 4 [Epstein-Barr virus]
ugccuccucaaauguucca

SEQ ID NO: 1938740 - RNA, 19 nt, Human herpesvirus 4 [Epstein-Barr virus]
gcgcggcuggaugcccuca

SEQ ID NO: 1938741 - RNA, 22 nt, Human herpesvirus 4 [Epstein-Barr virus]
gauguacuuuccuagaaacugu

SEQ ID NO: 1938742 - RNA, 14 nt, Human herpesvirus 4 [Epstein-Barr virus]
ugcgagggggccug

SEQ ID NO: 1938743 - RNA, 15 nt, Human herpesvirus 4 [Epstein-Barr virus]
agcagauccagggcc

SEQ ID NO: 1938744 - RNA, 22 nt, Human herpesvirus 4 [Epstein-Barr virus]
gacauuucucauaauggugccu

SEQ ID NO: 1938745 - RNA, 13 nt, Human herpesvirus 4 [Epstein-Barr virus]
aggccucuggggu

SEQ ID NO: 1938746 - RNA, 23 nt, Human herpesvirus 4 [Epstein-Barr virus]
gaguccaaacagcuaauuucuac

SEQ ID NO: 1938747 - RNA, 12 nt, Human herpesvirus 4 [Epstein-Barr virus]
acauaaaugccc

SEQ ID NO: 1938748 - RNA, 14 nt, Human herpesvirus 4 [Epstein-Barr virus]
augacccacuccag

SEQ ID NO: 1938749 - RNA, 21 nt, Human herpesvirus 4 [Epstein-Barr virus]
ugcagguaaaccuucugucug

SEQ ID NO: 1938750 - RNA, 16 nt, Human herpesvirus 4 [Epstein-Barr virus]
agcuagugcagggggc

SEQ ID NO: 1938751 - RNA, 11 nt, Human herpesvirus 4 [Epstein-Barr virus]
cccccuccauu

SEQ ID NO: 1938752 - RNA, 23 nt, Human herpesvirus 4 [Epstein-Barr virus]
gcugaggggcaaccugaacuuua

SEQ ID NO: 1938753 - RNA, 22 nt, Human herpesvirus 4 [Epstein-Barr virus]
cucccagucuauccaggaggag

SEQ ID NO: 1938754 - RNA, 17 nt, Human herpesvirus 4 [Epstein-Barr virus]
ggacucucuguuucugu

SEQ ID NO: 1938755 - RNA, 22 nt, Human herpesvirus 4 [Epstein-Barr virus]
gccuagccaucggggcacguuu

SEQ ID NO: 1938756 - RNA, 22 nt, Human herpesvirus 4 [Epstein-Barr virus]
gcugcacaaaggaaacugcuga

SEQ ID NO: 1938757 - RNA, 16 nt, Human herpesvirus 4 [Epstein-Barr virus]
cguucaggaacagccu

SEQ ID NO: 1938758 - RNA, 13 nt, Human herpesvirus 4 [Epstein-Barr virus]
ucuggcugugcug

SEQ ID NO: 1938759 - RNA, 23 nt, Human herpesvirus 4 [Epstein-Barr virus]
agaagugugucccccuccauucc

SEQ ID NO: 1938760 - RNA, 12 nt, Human herpesvirus 4 [Epstein-Barr virus]
gcucccucuggg

SEQ ID NO: 1938761 - RNA, 19 nt, Human herpesvirus 4 [Epstein-Barr virus]
cuuaaaaaugugcagcuuc

SEQ ID NO: 1938762 - RNA, 14 nt, Human herpesvirus 4 [Epstein-Barr virus]
cuggggcugguggc

SEQ ID NO: 1938763 - RNA, 17 nt, Human herpesvirus 4 [Epstein-Barr virus]
aggugcaccagcuccag

SEQ ID NO: 1938764 - RNA, 16 nt, Human herpesvirus 4 [Epstein-Barr virus]
ugccauguguguccag

SEQ ID NO: 1938765 - RNA, 22 nt, Human herpesvirus 4 [Epstein-Barr virus]
acucgaccagcacguggguuuc

SEQ ID NO: 1938766 - RNA, 12 nt, Human herpesvirus 4 [Epstein-Barr virus]
cggugcugccag

SEQ ID NO: 1938767 - RNA, 14 nt, Human herpesvirus 4 [Epstein-Barr virus]
cuacucuccacggg

SEQ ID NO: 1938768 - RNA, 17 nt, Human herpesvirus 4 [Epstein-Barr virus]
cucagagggggugccug

SEQ ID NO: 1938769 - RNA, 16 nt, Human herpesvirus 4 [Epstein-Barr virus]
gccuggauucuuacag

SEQ ID NO: 1938770 - RNA, 23 nt, Human herpesvirus 4 [Epstein-Barr virus]
agggccacggcgugccagaggcc

SEQ ID NO: 1938771 - RNA, 17 nt, Human herpesvirus 4 [Epstein-Barr virus]
aguuccaauagaggagc

SEQ ID NO: 1938772 - RNA, 12 nt, Human herpesvirus 4 [Epstein-Barr virus]
gcugccagccuc

SEQ ID NO: 1938773 - RNA, 14 nt, Human herpesvirus 4 [Epstein-Barr virus]
agagacaaggcagg

SEQ ID NO: 1938774 - RNA, 13 nt, Human herpesvirus 4 [Epstein-Barr virus]
cagucuccggguc

SEQ ID NO: 1938775 - RNA, 11 nt, Human herpesvirus 4 [Epstein-Barr virus]
cucaaggaggg

SEQ ID NO: 1938776 - RNA, 22 nt, Human herpesvirus 4 [Epstein-Barr virus]
gggagcacauuccccccgccuu

SEQ ID NO: 1938777 - RNA, 16 nt, Human herpesvirus 4 [Epstein-Barr virus]
caaaaguagaggcuca

SEQ ID NO: 1938778 - RNA, 17 nt, Human herpesvirus 4 [Epstein-Barr virus]
cuggcuucugugacuuu

SEQ ID NO: 1938779 - RNA, 17 nt, Human herpesvirus 4 [Epstein-Barr virus]
cuucuccucagccucca

SEQ ID NO: 1938780 - RNA, 20 nt, Human herpesvirus 4 [Epstein-Barr virus]
ucccgugcuuuuugccaggc

SEQ ID NO: 1938781 - RNA, 14 nt, Human herpesvirus 4 [Epstein-Barr virus]
gaucccaggccuca

SEQ ID NO: 1938782 - RNA, 15 nt, Human herpesvirus 4 [Epstein-Barr virus]
ucagccgggaggaag

SEQ ID NO: 1938783 - RNA, 15 nt, Human herpesvirus 4 [Epstein-Barr virus]
ggcaugggaccggga

SEQ ID NO: 1938784 - RNA, 16 nt, Human herpesvirus 4 [Epstein-Barr virus]
gcucuccagccacggc

SEQ ID NO: 1938785 - RNA, 19 nt, Human herpesvirus 4 [Epstein-Barr virus]
uuaacccacccaaaaugca

SEQ ID NO: 1938786 - RNA, 18 nt, Human herpesvirus 4 [Epstein-Barr virus]
caagagucucgccaucua

SEQ ID NO: 1938787 - RNA, 14 nt, Human herpesvirus 4 [Epstein-Barr virus]
cggcggcugcugcc

SEQ ID NO: 1938788 - RNA, 20 nt, Human herpesvirus 4 [Epstein-Barr virus]
cccgugcuuuuugccaggcc

SEQ ID NO: 1938789 - RNA, 15 nt, Human herpesvirus 4 [Epstein-Barr virus]
cccucgguggugggc

SEQ ID NO: 1938790 - RNA, 20 nt, Human herpesvirus 4 [Epstein-Barr virus]
agauagggaccagaggacua

SEQ ID NO: 1938791 - RNA, 21 nt, Human herpesvirus 4 [Epstein-Barr virus]
cucaccagggaggccugggag

SEQ ID NO: 1938792 - RNA, 19 nt, Human herpesvirus 4 [Epstein-Barr virus]
agccugcaccaguggcugc

SEQ ID NO: 1938793 - RNA, 17 nt, Human herpesvirus 4 [Epstein-Barr virus]
cagcuuuuggccuucuu

SEQ ID NO: 1938794 - RNA, 13 nt, Human herpesvirus 4 [Epstein-Barr virus]
gugcugaggcccg

SEQ ID NO: 1938795 - RNA, 21 nt, Human herpesvirus 4 [Epstein-Barr virus]
auggacgaggacggggaagag

SEQ ID NO: 1938796 - RNA, 21 nt, Human herpesvirus 4 [Epstein-Barr virus]
ggaaaaucucgcucagagcug

SEQ ID NO: 1938797 - RNA, 22 nt, Human herpesvirus 4 [Epstein-Barr virus]
accaagaccaauacccaggauc

SEQ ID NO: 1938798 - RNA, 21 nt, Human herpesvirus 4 [Epstein-Barr virus]
ggcaccuguccuugucugcug

SEQ ID NO: 1938799 - RNA, 13 nt, Human herpesvirus 4 [Epstein-Barr virus]
gccuuacacugga

SEQ ID NO: 1938800 - RNA, 16 nt, Human herpesvirus 4 [Epstein-Barr virus]
ucaggacccugggccg

SEQ ID NO: 1938801 - RNA, 21 nt, Human herpesvirus 4 [Epstein-Barr virus]
ccagacacgucguucaugaga

SEQ ID NO: 1938802 - RNA, 22 nt, Human herpesvirus 4 [Epstein-Barr virus]
cguggccaccuucuccaucucc

SEQ ID NO: 1938803 - RNA, 22 nt, Human herpesvirus 4 [Epstein-Barr virus]
cuuccagagaggcgcagcccag

SEQ ID NO: 1938804 - RNA, 16 nt, Human herpesvirus 4 [Epstein-Barr virus]
acagcaaggacggucc

SEQ ID NO: 1938805 - RNA, 14 nt, Human herpesvirus 4 [Epstein-Barr virus]
ccauaccaggugcc

SEQ ID NO: 1938806 - RNA, 17 nt, Human herpesvirus 4 [Epstein-Barr virus]
gguauucucagaugcag

SEQ ID NO: 1938807 - RNA, 23 nt, Human herpesvirus 4 [Epstein-Barr virus]
caacucggcccgucuuacugccc

SEQ ID NO: 1938808 - RNA, 19 nt, Human herpesvirus 4 [Epstein-Barr virus]
cggcccuuugccuggggcu

SEQ ID NO: 1938809 - RNA, 18 nt, Human herpesvirus 4 [Epstein-Barr virus]
ggcugcugccgucccagg

SEQ ID NO: 1938810 - RNA, 14 nt, Human herpesvirus 4 [Epstein-Barr virus]
gcucccgccucagg

SEQ ID NO: 1938811 - RNA, 19 nt, Human herpesvirus 4 [Epstein-Barr virus]
ugccgucuucggucaagua

SEQ ID NO: 1938812 - RNA, 15 nt, Human herpesvirus 4 [Epstein-Barr virus]
gccaucgggacagau

SEQ ID NO: 1938813 - RNA, 19 nt, Human herpesvirus 4 [Epstein-Barr virus]
gcaccgggaugagcuggag

SEQ ID NO: 1938814 - RNA, 22 nt, Human herpesvirus 4 [Epstein-Barr virus]
caaagucaagggaaaggaaggg

SEQ ID NO: 1938815 - RNA, 20 nt, Human herpesvirus 4 [Epstein-Barr virus]
gccaaugggggaggagagac

SEQ ID NO: 1938816 - RNA, 20 nt, Human herpesvirus 4 [Epstein-Barr virus]
ggcagaaugaccgugcaugc

SEQ ID NO: 1938817 - RNA, 15 nt, Human herpesvirus 4 [Epstein-Barr virus]
cucgcagcuggagga

SEQ ID NO: 1938818 - RNA, 16 nt, Human herpesvirus 4 [Epstein-Barr virus]
ccgagugaccagucac

SEQ ID NO: 1938819 - RNA, 14 nt, Human herpesvirus 4 [Epstein-Barr virus]
cucaggccgccgca

SEQ ID NO: 1938820 - RNA, 20 nt, Human herpesvirus 4 [Epstein-Barr virus]
gguaacauuguacagagcug

SEQ ID NO: 1938821 - RNA, 15 nt, Human herpesvirus 4 [Epstein-Barr virus]
cuccauuccacccac

SEQ ID NO: 1938822 - RNA, 19 nt, Human herpesvirus 4 [Epstein-Barr virus]
ccagcagauccagggcccg

SEQ ID NO: 1938823 - RNA, 17 nt, Human herpesvirus 4 [Epstein-Barr virus]
acaagggaagagggaaa

SEQ ID NO: 1938824 - RNA, 15 nt, Human herpesvirus 4 [Epstein-Barr virus]
auggcggacugcgcc

SEQ ID NO: 1938825 - RNA, 22 nt, Human herpesvirus 4 [Epstein-Barr virus]
cggcaagggcucaccagggagg

SEQ ID NO: 1938826 - RNA, 14 nt, Human herpesvirus 4 [Epstein-Barr virus]
agcgccguggccac

SEQ ID NO: 1938827 - RNA, 21 nt, Human herpesvirus 4 [Epstein-Barr virus]
acccuucugcugcugcugguc

SEQ ID NO: 1938828 - RNA, 16 nt, Human herpesvirus 4 [Epstein-Barr virus]
cccucuuccgugccuc

SEQ ID NO: 1938829 - RNA, 18 nt, Human herpesvirus 4 [Epstein-Barr virus]
gccuccagcucggccagc

SEQ ID NO: 1938830 - RNA, 13 nt, Human herpesvirus 4 [Epstein-Barr virus]
gacucugcuuucu

SEQ ID NO: 1938831 - RNA, 20 nt, Human herpesvirus 4 [Epstein-Barr virus]
uggacauucuucugaaggaa

SEQ ID NO: 1938832 - RNA, 17 nt, Human herpesvirus 4 [Epstein-Barr virus]
ucagcuccagggccagc

SEQ ID NO: 1938833 - RNA, 20 nt, Human herpesvirus 4 [Epstein-Barr virus]
cucggcucaccgggaacgcc

SEQ ID NO: 1938834 - RNA, 14 nt, Human herpesvirus 4 [Epstein-Barr virus]
agaaguuaccuggu

SEQ ID NO: 1938835 - RNA, 20 nt, Human herpesvirus 4 [Epstein-Barr virus]
gcccaccagccagcgacuga

SEQ ID NO: 1938836 - RNA, 23 nt, Human herpesvirus 4 [Epstein-Barr virus]
gcuggaggcaauggucgccaggg

SEQ ID NO: 1938837 - RNA, 18 nt, Human herpesvirus 4 [Epstein-Barr virus]
cgccuacgcagaggccau

SEQ ID NO: 1938838 - RNA, 12 nt, Human herpesvirus 4 [Epstein-Barr virus]
gggccuggggcc

SEQ ID NO: 1938839 - RNA, 13 nt, Human herpesvirus 4 [Epstein-Barr virus]
cccuggccaccua

SEQ ID NO: 1938840 - RNA, 18 nt, Human herpesvirus 4 [Epstein-Barr virus]
gucucacgagggucugcc

SEQ ID NO: 1938841 - RNA, 18 nt, Human herpesvirus 4 [Epstein-Barr virus]
cuggcagaaaggcuggcc

SEQ ID NO: 1938842 - RNA, 20 nt, Human herpesvirus 4 [Epstein-Barr virus]
caggcauuuuuggugcugcc

SEQ ID NO: 1938843 - RNA, 17 nt, Human herpesvirus 4 [Epstein-Barr virus]
cgugaucaugagggcuu

SEQ ID NO: 1938844 - RNA, 16 nt, Human herpesvirus 4 [Epstein-Barr virus]
acuuuauuaauaaaca

SEQ ID NO: 1938845 - RNA, 19 nt, Human herpesvirus 4 [Epstein-Barr virus]
ggccuugguuucagccuca

SEQ ID NO: 1938846 - RNA, 24 nt, Human herpesvirus 4 [Epstein-Barr virus]
cugggagguagauagguggucgca

SEQ ID NO: 1938847 - RNA, 12 nt, Human herpesvirus 4 [Epstein-Barr virus]
ggagcaggagca

SEQ ID NO: 1938848 - RNA, 20 nt, Human herpesvirus 4 [Epstein-Barr virus]
ugcuggacuccgaggaccag

SEQ ID NO: 1938849 - RNA, 19 nt, Human herpesvirus 4 [Epstein-Barr virus]
ccggacgcagaggccugca

SEQ ID NO: 1938850 - RNA, 21 nt, Human herpesvirus 4 [Epstein-Barr virus]
cauucguacaucuccaggcga

SEQ ID NO: 1938851 - RNA, 15 nt, Human herpesvirus 4 [Epstein-Barr virus]
gcacgagauggccca

SEQ ID NO: 1938852 - RNA, 11 nt, Human herpesvirus 4 [Epstein-Barr virus]
ucagccaccuc

SEQ ID NO: 1938853 - RNA, 13 nt, Human herpesvirus 4 [Epstein-Barr virus]
ucagcuguguacg

SEQ ID NO: 1938854 - RNA, 20 nt, Human herpesvirus 4 [Epstein-Barr virus]
gccaaugacccacuccagug

SEQ ID NO: 1938855 - RNA, 15 nt, Human herpesvirus 4 [Epstein-Barr virus]
cuggcaccuguccuu

SEQ ID NO: 1938856 - RNA, 13 nt, Human herpesvirus 4 [Epstein-Barr virus]
uguucuccgagag

SEQ ID NO: 1938857 - RNA, 17 nt, Human herpesvirus 4 [Epstein-Barr virus]
agggccuuccagagcuc

SEQ ID NO: 1938858 - RNA, 20 nt, Human herpesvirus 4 [Epstein-Barr virus]
ugcaagucaggauucucuaa

SEQ ID NO: 1938859 - RNA, 14 nt, Human herpesvirus 4 [Epstein-Barr virus]
ucagagaggccucu

SEQ ID NO: 1938860 - RNA, 22 nt, Human herpesvirus 4 [Epstein-Barr virus]
ccgcaccagcuaacaggacaug

SEQ ID NO: 1938861 - RNA, 22 nt, Human herpesvirus 4 [Epstein-Barr virus]
uggccaccacaucggacgggca

SEQ ID NO: 1938862 - RNA, 13 nt, Human herpesvirus 4 [Epstein-Barr virus]
gcgacacuugggu

SEQ ID NO: 1938863 - RNA, 23 nt, Human herpesvirus 4 [Epstein-Barr virus]
gccucuacgccaggcucgcuuuu

SEQ ID NO: 1938864 - RNA, 19 nt, Human herpesvirus 4 [Epstein-Barr virus]
cgguggaacaggagcagga

SEQ ID NO: 1938865 - RNA, 20 nt, Human herpesvirus 4 [Epstein-Barr virus]
ugguggccggcagccuggcu

SEQ ID NO: 1938866 - RNA, 15 nt, Human herpesvirus 4 [Epstein-Barr virus]
caagcuaccagaguc

SEQ ID NO: 1938867 - RNA, 15 nt, Human herpesvirus 4 [Epstein-Barr virus]
ugauggcaaaggucc

SEQ ID NO: 1938868 - RNA, 15 nt, Human herpesvirus 4 [Epstein-Barr virus]
cagccgggaggaaga

SEQ ID NO: 1938869 - RNA, 21 nt, Human herpesvirus 4 [Epstein-Barr virus]
gaggggcaggaggggcaggag

SEQ ID NO: 1938870 - RNA, 23 nt, Human herpesvirus 4 [Epstein-Barr virus]
cuucaggggaaucucugccaacu

SEQ ID NO: 1938871 - RNA, 19 nt, Human herpesvirus 4 [Epstein-Barr virus]
auggucgucaucuggcucu

SEQ ID NO: 1938872 - RNA, 18 nt, Human herpesvirus 4 [Epstein-Barr virus]
gauugucacagcugcugg

SEQ ID NO: 1938873 - RNA, 16 nt, Human herpesvirus 4 [Epstein-Barr virus]
cggagaggcgggaccc

SEQ ID NO: 1938874 - RNA, 20 nt, Human herpesvirus 4 [Epstein-Barr virus]
cgccugagcugccuggugag

SEQ ID NO: 1938875 - RNA, 12 nt, Human herpesvirus 4 [Epstein-Barr virus]
gugccucagaua

SEQ ID NO: 1938876 - RNA, 11 nt, Human herpesvirus 4 [Epstein-Barr virus]
ucccuuccuuu

SEQ ID NO: 1938877 - RNA, 19 nt, Human herpesvirus 4 [Epstein-Barr virus]
cugucuacuucgccaugcu

SEQ ID NO: 1938878 - RNA, 19 nt, Human herpesvirus 4 [Epstein-Barr virus]
gcggggcuccccagccaca

SEQ ID NO: 1938879 - RNA, 15 nt, Human herpesvirus 4 [Epstein-Barr virus]
cacuacuuguuucug

SEQ ID NO: 1938880 - RNA, 20 nt, Human herpesvirus 4 [Epstein-Barr virus]
cugggcauaaauucuccugc

SEQ ID NO: 1938881 - RNA, 16 nt, Human herpesvirus 4 [Epstein-Barr virus]
gacgaggacggggaag

SEQ ID NO: 1938882 - RNA, 14 nt, Human herpesvirus 4 [Epstein-Barr virus]
cauaacccagaauc

SEQ ID NO: 1938883 - RNA, 19 nt, Human herpesvirus 4 [Epstein-Barr virus]
ccgugcauggcagcagaca

SEQ ID NO: 1938884 - RNA, 19 nt, Human herpesvirus 4 [Epstein-Barr virus]
cgaguaggugccuccagag

SEQ ID NO: 1938885 - RNA, 14 nt, Human herpesvirus 4 [Epstein-Barr virus]
agucuccgggucag

SEQ ID NO: 1938886 - RNA, 16 nt, Human herpesvirus 4 [Epstein-Barr virus]
gccuugcguggugcug

SEQ ID NO: 1938887 - RNA, 15 nt, Human herpesvirus 4 [Epstein-Barr virus]
caccuagcccacucc

SEQ ID NO: 1938888 - RNA, 13 nt, Human herpesvirus 4 [Epstein-Barr virus]
gugcacucucucc

SEQ ID NO: 1938889 - RNA, 16 nt, Human herpesvirus 4 [Epstein-Barr virus]
cagcccuuaacacacc

SEQ ID NO: 1938890 - RNA, 12 nt, Human herpesvirus 4 [Epstein-Barr virus]
cagagcugagug

SEQ ID NO: 1938891 - RNA, 20 nt, Human herpesvirus 4 [Epstein-Barr virus]
ugcgccagagcggcauccuc

SEQ ID NO: 1938892 - RNA, 18 nt, Human herpesvirus 4 [Epstein-Barr virus]
gggcugccccgggcccac

SEQ ID NO: 1938893 - RNA, 21 nt, Human herpesvirus 4 [Epstein-Barr virus]
caagaacccccugcaggacac

SEQ ID NO: 1938894 - RNA, 16 nt, Human herpesvirus 4 [Epstein-Barr virus]
caacuacaagcagcua

SEQ ID NO: 1938895 - RNA, 21 nt, Human herpesvirus 4 [Epstein-Barr virus]
ggcguaguugaaucaccgccg

SEQ ID NO: 1938896 - RNA, 23 nt, Human herpesvirus 4 [Epstein-Barr virus]
guccccguggaggaccgcccacc

SEQ ID NO: 1938897 - RNA, 22 nt, Human herpesvirus 4 [Epstein-Barr virus]
acgccggccugcuggccgagcu

SEQ ID NO: 1938898 - RNA, 19 nt, Human herpesvirus 4 [Epstein-Barr virus]
aggcggaagaccaggagcc

SEQ ID NO: 1938899 - RNA, 15 nt, Human herpesvirus 4 [Epstein-Barr virus]
cgggucccccuagcc

SEQ ID NO: 1938900 - RNA, 16 nt, Human herpesvirus 4 [Epstein-Barr virus]
caccggugacagugcu

SEQ ID NO: 1938901 - RNA, 20 nt, Human herpesvirus 4 [Epstein-Barr virus]
ccuccacccagcagcagccc

SEQ ID NO: 1938902 - RNA, 19 nt, Human herpesvirus 4 [Epstein-Barr virus]
aguaggugccuccagagcc

SEQ ID NO: 1938903 - RNA, 20 nt, Human herpesvirus 4 [Epstein-Barr virus]
cagaagcuacaaacacgggc

SEQ ID NO: 1938904 - RNA, 23 nt, Human herpesvirus 4 [Epstein-Barr virus]
uggaggagaugaccuccuacacg

SEQ ID NO: 1938905 - RNA, 13 nt, Human herpesvirus 4 [Epstein-Barr virus]
ccuaucacaggga

SEQ ID NO: 1938906 - RNA, 20 nt, Human herpesvirus 4 [Epstein-Barr virus]
cgccaggugguuacaggaga

SEQ ID NO: 1938907 - RNA, 15 nt, Human herpesvirus 4 [Epstein-Barr virus]
ccuauuugcacguug

SEQ ID NO: 1938908 - RNA, 21 nt, Human herpesvirus 4 [Epstein-Barr virus]
uuccuacaacucagccccauc

SEQ ID NO: 1938909 - RNA, 16 nt, Human herpesvirus 4 [Epstein-Barr virus]
ugcguugaacccaccc

SEQ ID NO: 1938910 - RNA, 15 nt, Human herpesvirus 4 [Epstein-Barr virus]
gccaguaggauauua

SEQ ID NO: 1938911 - RNA, 15 nt, Human herpesvirus 4 [Epstein-Barr virus]
guuccaggcucucca

SEQ ID NO: 1938912 - RNA, 14 nt, Human herpesvirus 4 [Epstein-Barr virus]
caccacggugcagc

SEQ ID NO: 1938913 - RNA, 17 nt, Human herpesvirus 4 [Epstein-Barr virus]
ccagacgcgauggcaca

SEQ ID NO: 1938914 - RNA, 19 nt, Human herpesvirus 4 [Epstein-Barr virus]
uccaacauuaaagccuccu

SEQ ID NO: 1938915 - RNA, 17 nt, Human herpesvirus 4 [Epstein-Barr virus]
ucugcugccaugcacgg

SEQ ID NO: 1938916 - RNA, 14 nt, Human herpesvirus 4 [Epstein-Barr virus]
cugguacaggacca

SEQ ID NO: 1938917 - RNA, 22 nt, Human herpesvirus 4 [Epstein-Barr virus]
gcccaccagagggugagcccac

SEQ ID NO: 1938918 - RNA, 16 nt, Human herpesvirus 4 [Epstein-Barr virus]
uaauguccaguggggu

SEQ ID NO: 1938919 - RNA, 18 nt, Human herpesvirus 4 [Epstein-Barr virus]
uccgcggugguggcccuc

SEQ ID NO: 1938920 - RNA, 14 nt, Human herpesvirus 4 [Epstein-Barr virus]
acuccccucuccau

SEQ ID NO: 1938921 - RNA, 17 nt, Human herpesvirus 4 [Epstein-Barr virus]
cgugcaaggauggaaga

SEQ ID NO: 1938922 - RNA, 22 nt, Human herpesvirus 4 [Epstein-Barr virus]
acuggugcuuguggugugggag

SEQ ID NO: 1938923 - RNA, 19 nt, Human herpesvirus 4 [Epstein-Barr virus]
ccucugccacaaggccagc

SEQ ID NO: 1938924 - RNA, 14 nt, Human herpesvirus 4 [Epstein-Barr virus]
caucccaauucaca

SEQ ID NO: 1938925 - RNA, 15 nt, Human herpesvirus 4 [Epstein-Barr virus]
cggaagacaacgagg

SEQ ID NO: 1938926 - RNA, 17 nt, Human herpesvirus 4 [Epstein-Barr virus]
cguggccagguacgggc

SEQ ID NO: 1938927 - RNA, 19 nt, Human herpesvirus 4 [Epstein-Barr virus]
cagauagccggccaggcag

SEQ ID NO: 1938928 - RNA, 14 nt, Human herpesvirus 4 [Epstein-Barr virus]
cugaccacggccca

SEQ ID NO: 1938929 - RNA, 20 nt, Human herpesvirus 4 [Epstein-Barr virus]
gcccguuccaggcucuccag

SEQ ID NO: 1938930 - RNA, 15 nt, Human herpesvirus 4 [Epstein-Barr virus]
ccggguacaaguccc

SEQ ID NO: 1938931 - RNA, 22 nt, Human herpesvirus 4 [Epstein-Barr virus]
aguggaugcaucuaagguccau

SEQ ID NO: 1938932 - RNA, 21 nt, Human herpesvirus 4 [Epstein-Barr virus]
ucucuguuucuguacaauggg

SEQ ID NO: 1938933 - RNA, 14 nt, Human herpesvirus 4 [Epstein-Barr virus]
cagguuugacuuca

SEQ ID NO: 1938934 - RNA, 20 nt, Human herpesvirus 4 [Epstein-Barr virus]
gaagauugucacagcugcug

SEQ ID NO: 1938935 - RNA, 16 nt, Human herpesvirus 4 [Epstein-Barr virus]
gaagaggacgaggacg

SEQ ID NO: 1938936 - RNA, 12 nt, Human herpesvirus 4 [Epstein-Barr virus]
caccauccacag

SEQ ID NO: 1938937 - RNA, 13 nt, Human herpesvirus 4 [Epstein-Barr virus]
ucccaaguacaga

SEQ ID NO: 1938938 - RNA, 17 nt, Human herpesvirus 4 [Epstein-Barr virus]
cugugcacucucucccc

SEQ ID NO: 1938939 - RNA, 15 nt, Human herpesvirus 4 [Epstein-Barr virus]
ggacaaggcaguaga

SEQ ID NO: 1938940 - RNA, 19 nt, Human herpesvirus 4 [Epstein-Barr virus]
cacugcguccaccuggcca

SEQ ID NO: 1938941 - RNA, 14 nt, Human herpesvirus 4 [Epstein-Barr virus]
cugcggggaaacca

SEQ ID NO: 1938942 - RNA, 21 nt, Human herpesvirus 4 [Epstein-Barr virus]
augcaauaaauaaaaguacag

SEQ ID NO: 1938943 - RNA, 15 nt, Human herpesvirus 4 [Epstein-Barr virus]
aggggcaggaggggc

SEQ ID NO: 1938944 - RNA, 15 nt, Human herpesvirus 4 [Epstein-Barr virus]
ugggaccuacaggac

SEQ ID NO: 1938945 - RNA, 19 nt, Human herpesvirus 4 [Epstein-Barr virus]
caggcuacaacaggcugcu

SEQ ID NO: 1938946 - RNA, 14 nt, Human herpesvirus 4 [Epstein-Barr virus]
ucaaggccucggag

SEQ ID NO: 1938947 - RNA, 18 nt, Human herpesvirus 4 [Epstein-Barr virus]
ggucauggcggacugcgc

SEQ ID NO: 1938948 - RNA, 14 nt, Human herpesvirus 4 [Epstein-Barr virus]
uccaggguccagga

SEQ ID NO: 1938949 - RNA, 22 nt, Human herpesvirus 4 [Epstein-Barr virus]
gacuccgugaccaaccggcacg

SEQ ID NO: 1938950 - RNA, 20 nt, Human herpesvirus 4 [Epstein-Barr virus]
uguuacccucauugugcuga

SEQ ID NO: 1938951 - RNA, 17 nt, Human herpesvirus 4 [Epstein-Barr virus]
uggcgaagauucccaac

SEQ ID NO: 1938952 - RNA, 19 nt, Human herpesvirus 4 [Epstein-Barr virus]
cugagccugagccacaccc

SEQ ID NO: 1938953 - RNA, 15 nt, Human herpesvirus 4 [Epstein-Barr virus]
cuggcagaaaggcug

SEQ ID NO: 1938954 - RNA, 20 nt, Human herpesvirus 4 [Epstein-Barr virus]
ccacugagcaagauccuucu

SEQ ID NO: 1938955 - RNA, 17 nt, Human herpesvirus 4 [Epstein-Barr virus]
ggaggagcuccgugagc

SEQ ID NO: 1938956 - RNA, 20 nt, Human herpesvirus 4 [Epstein-Barr virus]
cccugccccucggugggcca

SEQ ID NO: 1938957 - RNA, 21 nt, Human herpesvirus 4 [Epstein-Barr virus]
ccaguggccggggccguggag

SEQ ID NO: 1938958 - RNA, 20 nt, Human herpesvirus 4 [Epstein-Barr virus]
ucguagucauccgaggcuga

SEQ ID NO: 1938959 - RNA, 20 nt, Human herpesvirus 4 [Epstein-Barr virus]
agcccggggaaaagagagcu

SEQ ID NO: 1938960 - RNA, 20 nt, Human herpesvirus 4 [Epstein-Barr virus]
cuccaccagcuucucaaagg

SEQ ID NO: 1938961 - RNA, 13 nt, Human herpesvirus 4 [Epstein-Barr virus]
ggaaaaggcccua

SEQ ID NO: 1938962 - RNA, 23 nt, Human herpesvirus 4 [Epstein-Barr virus]
gaacucugcccuucagugucugg

SEQ ID NO: 1938963 - RNA, 20 nt, Human herpesvirus 4 [Epstein-Barr virus]
agaaaacucugcauggagaa

SEQ ID NO: 1938964 - RNA, 18 nt, Human herpesvirus 4 [Epstein-Barr virus]
gcccaagaagaagcccac

SEQ ID NO: 1938965 - RNA, 14 nt, Human herpesvirus 4 [Epstein-Barr virus]
caccagggccaggc

SEQ ID NO: 1938966 - RNA, 21 nt, Human herpesvirus 4 [Epstein-Barr virus]
augucaaggcucugcacagga

SEQ ID NO: 1938967 - RNA, 20 nt, Human herpesvirus 4 [Epstein-Barr virus]
ugauguucaaaccggaggau

SEQ ID NO: 1938968 - RNA, 12 nt, Human herpesvirus 4 [Epstein-Barr virus]
ggaggcagacac

SEQ ID NO: 1938969 - RNA, 23 nt, Human herpesvirus 4 [Epstein-Barr virus]
cuguuucuguacaauggggccag

SEQ ID NO: 1938970 - RNA, 19 nt, Human herpesvirus 4 [Epstein-Barr virus]
augccaagagccccuccau

SEQ ID NO: 1938971 - RNA, 20 nt, Human herpesvirus 4 [Epstein-Barr virus]
ggcucaccagggaggccugg

SEQ ID NO: 1938972 - RNA, 13 nt, Human herpesvirus 4 [Epstein-Barr virus]
ugcugcccaugga

SEQ ID NO: 1938973 - RNA, 17 nt, Human herpesvirus 4 [Epstein-Barr virus]
uacuaaagaaauaacug

SEQ ID NO: 1938974 - RNA, 16 nt, Human herpesvirus 4 [Epstein-Barr virus]
guccacggggagacuu

SEQ ID NO: 1938975 - RNA, 17 nt, Human herpesvirus 4 [Epstein-Barr virus]
gccuacgaggcccuggc

SEQ ID NO: 1938976 - RNA, 20 nt, Human herpesvirus 4 [Epstein-Barr virus]
gacuuuguuuagggacagac

SEQ ID NO: 1938977 - RNA, 16 nt, Human herpesvirus 4 [Epstein-Barr virus]
cgugcaaccaggccca

SEQ ID NO: 1938978 - RNA, 16 nt, Human herpesvirus 4 [Epstein-Barr virus]
ccaagccgggggagaa

SEQ ID NO: 1938979 - RNA, 15 nt, Human herpesvirus 4 [Epstein-Barr virus]
cggacgugcccagcu

SEQ ID NO: 1938980 - RNA, 15 nt, Human herpesvirus 4 [Epstein-Barr virus]
ggggcaggagcagga

SEQ ID NO: 1938981 - RNA, 17 nt, Human herpesvirus 4 [Epstein-Barr virus]
cagaaugaccgugcaug

SEQ ID NO: 1938982 - RNA, 20 nt, Human herpesvirus 4 [Epstein-Barr virus]
cggcaucaccguggagccgg

SEQ ID NO: 1938983 - RNA, 18 nt, Human herpesvirus 4 [Epstein-Barr virus]
ugucugugguugucuucc

SEQ ID NO: 1938984 - RNA, 19 nt, Human herpesvirus 4 [Epstein-Barr virus]
cuguggccccggcuggcca

SEQ ID NO: 1938985 - RNA, 17 nt, Human herpesvirus 4 [Epstein-Barr virus]
cguaaucuguggugggc

SEQ ID NO: 1938986 - RNA, 21 nt, Human herpesvirus 4 [Epstein-Barr virus]
cuccgcuuuaagaccaaggcc

SEQ ID NO: 1938987 - RNA, 16 nt, Human herpesvirus 4 [Epstein-Barr virus]
acgaggacgaggaggc

SEQ ID NO: 1938988 - RNA, 22 nt, Human herpesvirus 4 [Epstein-Barr virus]
cagacgcgauggcacacgccag

SEQ ID NO: 1938989 - RNA, 20 nt, Human herpesvirus 4 [Epstein-Barr virus]
auaugcucucgcacucuugu

SEQ ID NO: 1938990 - RNA, 19 nt, Human herpesvirus 4 [Epstein-Barr virus]
gagucaguuacacacacag

SEQ ID NO: 1938991 - RNA, 11 nt, Human herpesvirus 4 [Epstein-Barr virus]
aaaaugagcca

SEQ ID NO: 1938992 - RNA, 18 nt, Human herpesvirus 4 [Epstein-Barr virus]
gaggagcaccggagccac

SEQ ID NO: 1938993 - RNA, 21 nt, Human herpesvirus 4 [Epstein-Barr virus]
ugccuuucccccacccuggaa

SEQ ID NO: 1938994 - RNA, 15 nt, Human herpesvirus 4 [Epstein-Barr virus]
cucagaggaggagga

SEQ ID NO: 1938995 - RNA, 20 nt, Human herpesvirus 4 [Epstein-Barr virus]
aucucagaauugucacugag

SEQ ID NO: 1938996 - RNA, 19 nt, Human herpesvirus 4 [Epstein-Barr virus]
uccaggcucuccagcccca

SEQ ID NO: 1938997 - RNA, 15 nt, Human herpesvirus 4 [Epstein-Barr virus]
agcauaugccggugg

SEQ ID NO: 1938998 - RNA, 13 nt, Human herpesvirus 4 [Epstein-Barr virus]
cugcugcagcacu

SEQ ID NO: 1938999 - RNA, 19 nt, Human herpesvirus 4 [Epstein-Barr virus]
uacccgaaacaagagacga

SEQ ID NO: 1939000 - RNA, 16 nt, Human herpesvirus 4 [Epstein-Barr virus]
aggcaguagaggacac

SEQ ID NO: 1939001 - RNA, 13 nt, Human herpesvirus 4 [Epstein-Barr virus]
uccaucauguguu

SEQ ID NO: 1939002 - RNA, 16 nt, Human herpesvirus 4 [Epstein-Barr virus]
gcagggcaaagccaca

SEQ ID NO: 1939003 - RNA, 18 nt, Human herpesvirus 4 [Epstein-Barr virus]
ccuagauauaccccuccu

SEQ ID NO: 1939004 - RNA, 17 nt, Human herpesvirus 4 [Epstein-Barr virus]
gaaugcccaggcggcua

SEQ ID NO: 1939005 - RNA, 21 nt, Human herpesvirus 4 [Epstein-Barr virus]
cccgggcccagcccuccucag

SEQ ID NO: 1939006 - RNA, 13 nt, Human herpesvirus 4 [Epstein-Barr virus]
ggcgccuggggau

SEQ ID NO: 1939007 - RNA, 13 nt, Human herpesvirus 4 [Epstein-Barr virus]
ucaccagccaccu

SEQ ID NO: 1939008 - RNA, 22 nt, Human herpesvirus 4 [Epstein-Barr virus]
uucccagccccaauucuugcac

SEQ ID NO: 1939009 - RNA, 18 nt, Human herpesvirus 4 [Epstein-Barr virus]
gacgaagacccaucugag

SEQ ID NO: 1939010 - RNA, 14 nt, Human herpesvirus 4 [Epstein-Barr virus]
ccuauggagggcag

SEQ ID NO: 1939011 - RNA, 18 nt, Human herpesvirus 4 [Epstein-Barr virus]
aauucagccaccuccccu

SEQ ID NO: 1939012 - RNA, 22 nt, Human herpesvirus 4 [Epstein-Barr virus]
aaccuuaaaaguccccccaucu

SEQ ID NO: 1939013 - RNA, 24 nt, Human herpesvirus 4 [Epstein-Barr virus]
caagauugggugguggcagcaggc

SEQ ID NO: 1939014 - RNA, 21 nt, Human herpesvirus 4 [Epstein-Barr virus]
ccugccucucuuaugccugug

SEQ ID NO: 1939015 - RNA, 11 nt, Human herpesvirus 4 [Epstein-Barr virus]
ggccuggggcc

SEQ ID NO: 1939016 - RNA, 15 nt, Human herpesvirus 4 [Epstein-Barr virus]
ccugcauggccaggc

SEQ ID NO: 1939017 - RNA, 22 nt, Human herpesvirus 4 [Epstein-Barr virus]
cacgacuguuccuauaugcucu

SEQ ID NO: 1939018 - RNA, 19 nt, Human herpesvirus 4 [Epstein-Barr virus]
cauuccccccgccuuuggg

SEQ ID NO: 1939019 - RNA, 20 nt, Human herpesvirus 4 [Epstein-Barr virus]
cucagcuguucccagucucc

SEQ ID NO: 1939020 - RNA, 16 nt, Human herpesvirus 4 [Epstein-Barr virus]
uguguggcuguagcca

SEQ ID NO: 1939021 - RNA, 22 nt, Human herpesvirus 4 [Epstein-Barr virus]
gcacugcguccaccuggccacc

SEQ ID NO: 1939022 - RNA, 13 nt, Human herpesvirus 4 [Epstein-Barr virus]
ggaaugaacacuc

SEQ ID NO: 1939023 - RNA, 22 nt, Human herpesvirus 4 [Epstein-Barr virus]
cuggugcgguuauaacugccag

SEQ ID NO: 1939024 - RNA, 18 nt, Human herpesvirus 4 [Epstein-Barr virus]
cucgcccacacagcgcca

SEQ ID NO: 1939025 - RNA, 21 nt, Human herpesvirus 4 [Epstein-Barr virus]
gugguguucuaacgggaagug

SEQ ID NO: 1939026 - RNA, 23 nt, Human herpesvirus 4 [Epstein-Barr virus]
cugccuggauucuuacagcagga

SEQ ID NO: 1939027 - RNA, 18 nt, Human herpesvirus 4 [Epstein-Barr virus]
gggcaggaggggcaggag

SEQ ID NO: 1939028 - RNA, 21 nt, Human herpesvirus 4 [Epstein-Barr virus]
ugccacauguuuucuggacac

SEQ ID NO: 1939029 - RNA, 19 nt, Human herpesvirus 4 [Epstein-Barr virus]
agcagacaaggacaggugc

SEQ ID NO: 1939030 - RNA, 21 nt, Human herpesvirus 4 [Epstein-Barr virus]
acgcucccgggcaaacagggc

SEQ ID NO: 1939031 - RNA, 16 nt, Human herpesvirus 4 [Epstein-Barr virus]
gaaugacgggcucccu

SEQ ID NO: 1939032 - RNA, 19 nt, Human herpesvirus 4 [Epstein-Barr virus]
aggagauccgccaggaccu

SEQ ID NO: 1939033 - RNA, 20 nt, Human herpesvirus 4 [Epstein-Barr virus]
aggacacgcuggucuugaau

SEQ ID NO: 1939034 - RNA, 14 nt, Human herpesvirus 4 [Epstein-Barr virus]
cagagggugagccc

SEQ ID NO: 1939035 - RNA, 18 nt, Human herpesvirus 4 [Epstein-Barr virus]
gcagcaguggccagcuca

SEQ ID NO: 1939036 - RNA, 21 nt, Human herpesvirus 4 [Epstein-Barr virus]
ucucucccccgggcgcugccu

SEQ ID NO: 1939037 - RNA, 23 nt, Human herpesvirus 4 [Epstein-Barr virus]
guacagacuaccggcgagcauga

SEQ ID NO: 1939038 - RNA, 16 nt, Human herpesvirus 4 [Epstein-Barr virus]
uccuacgcgcuaccuc

SEQ ID NO: 1939039 - RNA, 16 nt, Human herpesvirus 4 [Epstein-Barr virus]
auguuacuucuuuugc

SEQ ID NO: 1939040 - RNA, 21 nt, Human herpesvirus 4 [Epstein-Barr virus]
augcauuuccugcccucccac

SEQ ID NO: 1939041 - RNA, 22 nt, Human herpesvirus 4 [Epstein-Barr virus]
cguggacaguuugauacucacc

SEQ ID NO: 1939042 - RNA, 20 nt, Human herpesvirus 4 [Epstein-Barr virus]
cgacgaggcccugcaagcca

SEQ ID NO: 1939043 - RNA, 15 nt, Human herpesvirus 4 [Epstein-Barr virus]
gcucggcccuccgca

SEQ ID NO: 1939044 - RNA, 21 nt, Human herpesvirus 4 [Epstein-Barr virus]
uccucauuggcuuugcccucu

SEQ ID NO: 1939045 - RNA, 17 nt, Human herpesvirus 4 [Epstein-Barr virus]
ucagccacacaaucagc

SEQ ID NO: 1939046 - RNA, 12 nt, Human herpesvirus 4 [Epstein-Barr virus]
acucugcuuucu

SEQ ID NO: 1939047 - RNA, 19 nt, Human herpesvirus 4 [Epstein-Barr virus]
accaaggcggcugcugaga

SEQ ID NO: 1939048 - RNA, 17 nt, Human herpesvirus 4 [Epstein-Barr virus]
uagccuauuugcacguu

SEQ ID NO: 1939049 - RNA, 16 nt, Human herpesvirus 4 [Epstein-Barr virus]
gccgccaugcucaggg

SEQ ID NO: 1939050 - RNA, 12 nt, Human herpesvirus 4 [Epstein-Barr virus]
acaggagcagga

SEQ ID NO: 1939051 - RNA, 13 nt, Human herpesvirus 4 [Epstein-Barr virus]
uuugacuguuugu

SEQ ID NO: 1939052 - RNA, 23 nt, Human herpesvirus 4 [Epstein-Barr virus]
ccugccacuuccacagcaauggc

SEQ ID NO: 1939053 - RNA, 21 nt, Human herpesvirus 4 [Epstein-Barr virus]
ggaggaagagacuucacagag

SEQ ID NO: 1939054 - RNA, 16 nt, Human herpesvirus 4 [Epstein-Barr virus]
cguuggcuucugcugc

SEQ ID NO: 1939055 - RNA, 22 nt, Human herpesvirus 4 [Epstein-Barr virus]
aggcucggcccuccgcauccua

SEQ ID NO: 1939056 - RNA, 23 nt, Human herpesvirus 4 [Epstein-Barr virus]
ccguaccaugagugccaugugug

SEQ ID NO: 1939057 - RNA, 22 nt, Human herpesvirus 4 [Epstein-Barr virus]
cugccucccugccccucggugg

SEQ ID NO: 1939058 - RNA, 15 nt, Human herpesvirus 4 [Epstein-Barr virus]
ugcauggccugggcc

SEQ ID NO: 1939059 - RNA, 19 nt, Human herpesvirus 4 [Epstein-Barr virus]
agcccccucccgccccugu

SEQ ID NO: 1939060 - RNA, 14 nt, Human herpesvirus 4 [Epstein-Barr virus]
cgguggaacaggag

SEQ ID NO: 1939061 - RNA, 14 nt, Human herpesvirus 4 [Epstein-Barr virus]
cuacgcagaggcca

SEQ ID NO: 1939062 - RNA, 13 nt, Human herpesvirus 4 [Epstein-Barr virus]
ccagccacagcac

SEQ ID NO: 1939063 - RNA, 17 nt, Human herpesvirus 4 [Epstein-Barr virus]
cccgccagcgccuccuc

SEQ ID NO: 1939064 - RNA, 12 nt, Human herpesvirus 4 [Epstein-Barr virus]
cuacugcugcua

SEQ ID NO: 1939065 - RNA, 17 nt, Human herpesvirus 4 [Epstein-Barr virus]
aaacauggugucuguaa

SEQ ID NO: 1939066 - RNA, 22 nt, Human herpesvirus 4 [Epstein-Barr virus]
ggaugccucacgcgaagggaaa

SEQ ID NO: 1939067 - RNA, 16 nt, Human herpesvirus 4 [Epstein-Barr virus]
gcuccgagagcuccgc

SEQ ID NO: 1939068 - RNA, 13 nt, Human herpesvirus 4 [Epstein-Barr virus]
uccuuagacugag

SEQ ID NO: 1939069 - RNA, 19 nt, Human herpesvirus 4 [Epstein-Barr virus]
acccccggcucucaggccu

SEQ ID NO: 1939070 - RNA, 18 nt, Human herpesvirus 4 [Epstein-Barr virus]
acccccguccagcaggcu

SEQ ID NO: 1939071 - RNA, 19 nt, Human herpesvirus 4 [Epstein-Barr virus]
gcucugguacguuggcuuc

SEQ ID NO: 1939072 - RNA, 17 nt, Human herpesvirus 4 [Epstein-Barr virus]
gagccagaucuaaggcc

SEQ ID NO: 1939073 - RNA, 18 nt, Human herpesvirus 4 [Epstein-Barr virus]
ggccgccuauggggccug

SEQ ID NO: 1939074 - RNA, 19 nt, Human herpesvirus 4 [Epstein-Barr virus]
cggguggaggagcuccgug

SEQ ID NO: 1939075 - RNA, 16 nt, Human herpesvirus 4 [Epstein-Barr virus]
uaguaugaaggcuggc

SEQ ID NO: 1939076 - RNA, 20 nt, Human herpesvirus 4 [Epstein-Barr virus]
caucaggcgaaggcggagaa

SEQ ID NO: 1939077 - RNA, 18 nt, Human herpesvirus 4 [Epstein-Barr virus]
ucaaguaccagcuggugg

SEQ ID NO: 1939078 - RNA, 21 nt, Human herpesvirus 4 [Epstein-Barr virus]
cugccaggccgccaugcucag

SEQ ID NO: 1939079 - RNA, 19 nt, Human herpesvirus 4 [Epstein-Barr virus]
cucagaaaacucugcaugg

SEQ ID NO: 1939080 - RNA, 17 nt, Human herpesvirus 4 [Epstein-Barr virus]
uccuuugcggcaucacc

SEQ ID NO: 1939081 - RNA, 16 nt, Human herpesvirus 4 [Epstein-Barr virus]
auuauauuguaagaca

SEQ ID NO: 1939082 - RNA, 20 nt, Human herpesvirus 4 [Epstein-Barr virus]
cccaccuuuuaauucucuuc

SEQ ID NO: 1939083 - RNA, 16 nt, Human herpesvirus 4 [Epstein-Barr virus]
caccuccaccaccuuc

SEQ ID NO: 1939084 - RNA, 12 nt, Human herpesvirus 4 [Epstein-Barr virus]
ccucugccggga

SEQ ID NO: 1939085 - RNA, 13 nt, Human herpesvirus 4 [Epstein-Barr virus]
ccccaccaccacc

SEQ ID NO: 1939086 - RNA, 15 nt, Human herpesvirus 4 [Epstein-Barr virus]
uggaacaggagcagg

SEQ ID NO: 1939087 - RNA, 23 nt, Human herpesvirus 4 [Epstein-Barr virus]
gacacaccgccaacgcucagugc

SEQ ID NO: 1939088 - RNA, 23 nt, Human herpesvirus 4 [Epstein-Barr virus]
cuuuucuccucagucuuugcaau

SEQ ID NO: 1939089 - RNA, 14 nt, Human herpesvirus 4 [Epstein-Barr virus]
cacucccaccaccc

SEQ ID NO: 1939090 - RNA, 18 nt, Human herpesvirus 4 [Epstein-Barr virus]
gcccagcccgacccccgg

SEQ ID NO: 1939091 - RNA, 21 nt, Human herpesvirus 4 [Epstein-Barr virus]
agcaccggagccaccacagca

SEQ ID NO: 1939092 - RNA, 17 nt, Human herpesvirus 4 [Epstein-Barr virus]
gccuacgcagaggccau

SEQ ID NO: 1939093 - RNA, 15 nt, Human herpesvirus 4 [Epstein-Barr virus]
acgaggaggaagaga

SEQ ID NO: 1939094 - RNA, 13 nt, Human herpesvirus 4 [Epstein-Barr virus]
ucugccacaaggc

SEQ ID NO: 1939095 - RNA, 15 nt, Human herpesvirus 4 [Epstein-Barr virus]
ucgacuucugaagau

SEQ ID NO: 1939096 - RNA, 16 nt, Human herpesvirus 4 [Epstein-Barr virus]
cagcccccuccuccag

SEQ ID NO: 1939097 - RNA, 15 nt, Human herpesvirus 4 [Epstein-Barr virus]
guguauuucuggcca

SEQ ID NO: 1939098 - RNA, 13 nt, Human herpesvirus 4 [Epstein-Barr virus]
auaugcucucgca

SEQ ID NO: 1939099 - RNA, 20 nt, Human herpesvirus 4 [Epstein-Barr virus]
uccaacauuaaagccuccuc

SEQ ID NO: 1939100 - RNA, 19 nt, Human herpesvirus 4 [Epstein-Barr virus]
cuucuucaggggaaucucu

SEQ ID NO: 1939101 - RNA, 15 nt, Human herpesvirus 4 [Epstein-Barr virus]
cgcuguccgccagga

SEQ ID NO: 1939102 - RNA, 21 nt, Human herpesvirus 4 [Epstein-Barr virus]
ggagauuuucccacugugccu

SEQ ID NO: 1939103 - RNA, 20 nt, Human herpesvirus 4 [Epstein-Barr virus]
gacccccgggcgcccccaaa

SEQ ID NO: 1939104 - RNA, 19 nt, Human herpesvirus 4 [Epstein-Barr virus]
guucccuucucccacccug

SEQ ID NO: 1939105 - RNA, 15 nt, Human herpesvirus 4 [Epstein-Barr virus]
acacagccugacucu

SEQ ID NO: 1939106 - RNA, 22 nt, Human herpesvirus 4 [Epstein-Barr virus]
cagccugcaccaguggcugccc

SEQ ID NO: 1939107 - RNA, 22 nt, Human herpesvirus 4 [Epstein-Barr virus]
caccacuaagguuacugcacag

SEQ ID NO: 1939108 - RNA, 17 nt, Human herpesvirus 4 [Epstein-Barr virus]
agacguguguggcugua

SEQ ID NO: 1939109 - RNA, 22 nt, Human herpesvirus 4 [Epstein-Barr virus]
gucggcuaaugccaugcagcgg

SEQ ID NO: 1939110 - RNA, 16 nt, Human herpesvirus 4 [Epstein-Barr virus]
cuacgcgggccacagg

SEQ ID NO: 1939111 - RNA, 15 nt, Human herpesvirus 4 [Epstein-Barr virus]
ucaggccucccaguc

SEQ ID NO: 1939112 - RNA, 22 nt, Human herpesvirus 4 [Epstein-Barr virus]
caucaugcugaauauugccagc

SEQ ID NO: 1939113 - RNA, 15 nt, Human herpesvirus 4 [Epstein-Barr virus]
gggggccuggugcca

SEQ ID NO: 1939114 - RNA, 21 nt, Human herpesvirus 4 [Epstein-Barr virus]
ggcaaagauccccaguggagc

SEQ ID NO: 1939115 - RNA, 12 nt, Human herpesvirus 4 [Epstein-Barr virus]
ccagcagcagcc

SEQ ID NO: 1939116 - RNA, 19 nt, Human herpesvirus 4 [Epstein-Barr virus]
gaauaaggcucugaagcaa

SEQ ID NO: 1939117 - RNA, 17 nt, Human herpesvirus 4 [Epstein-Barr virus]
ccugauauugucccccu

SEQ ID NO: 1939118 - RNA, 18 nt, Human herpesvirus 4 [Epstein-Barr virus]
cuucugaaaacugccucc

SEQ ID NO: 1939119 - RNA, 20 nt, Human herpesvirus 4 [Epstein-Barr virus]
caguagccgaauaucuggag

SEQ ID NO: 1939120 - RNA, 17 nt, Human herpesvirus 4 [Epstein-Barr virus]
ucacaggacauguuugg

SEQ ID NO: 1939121 - RNA, 22 nt, Human herpesvirus 4 [Epstein-Barr virus]
gugggccucucuggcugugcug

SEQ ID NO: 1939122 - RNA, 19 nt, Human herpesvirus 4 [Epstein-Barr virus]
ccacucaggaagcuggcca

SEQ ID NO: 1939123 - RNA, 21 nt, Human herpesvirus 4 [Epstein-Barr virus]
acuaauguucucuaacugugu

SEQ ID NO: 1939124 - RNA, 22 nt, Human herpesvirus 4 [Epstein-Barr virus]
cuggcuguacgccgccgccagc

SEQ ID NO: 1939125 - RNA, 20 nt, Human herpesvirus 4 [Epstein-Barr virus]
gcgcccuccucugggccgcc

SEQ ID NO: 1939126 - RNA, 21 nt, Human herpesvirus 4 [Epstein-Barr virus]
gccucugccgggaggugcugg

SEQ ID NO: 1939127 - RNA, 17 nt, Human herpesvirus 4 [Epstein-Barr virus]
gggagaacgguggccag

SEQ ID NO: 1939128 - RNA, 18 nt, Human herpesvirus 4 [Epstein-Barr virus]
cuacaccggccaguggcc

SEQ ID NO: 1939129 - RNA, 16 nt, Human herpesvirus 4 [Epstein-Barr virus]
cagccgggucgugaaa

SEQ ID NO: 1939130 - RNA, 19 nt, Human herpesvirus 4 [Epstein-Barr virus]
gaaaccacgccugcuucac

SEQ ID NO: 1939131 - RNA, 15 nt, Human herpesvirus 4 [Epstein-Barr virus]
uggcaaagggcaugc

SEQ ID NO: 1939132 - RNA, 14 nt, Human herpesvirus 4 [Epstein-Barr virus]
gaggccguguuucu

SEQ ID NO: 1939133 - RNA, 21 nt, Human herpesvirus 4 [Epstein-Barr virus]
augggggaaugagggaaaagg

SEQ ID NO: 1939134 - RNA, 19 nt, Human herpesvirus 4 [Epstein-Barr virus]
aacccccggcucucaggcc

SEQ ID NO: 1939135 - RNA, 14 nt, Human herpesvirus 4 [Epstein-Barr virus]
ugauaaaccuuaaa

SEQ ID NO: 1939136 - RNA, 16 nt, Human herpesvirus 4 [Epstein-Barr virus]
agucggccacagggga

SEQ ID NO: 1939137 - RNA, 16 nt, Human herpesvirus 4 [Epstein-Barr virus]
ccuacgaggcccuggc

SEQ ID NO: 1939138 - RNA, 21 nt, Human herpesvirus 4 [Epstein-Barr virus]
gcucagcucaaccgccagggc

SEQ ID NO: 1939139 - RNA, 16 nt, Human herpesvirus 4 [Epstein-Barr virus]
ggcccgggaccgcgcc

SEQ ID NO: 1939140 - RNA, 14 nt, Human herpesvirus 4 [Epstein-Barr virus]
cuguaaucacuggc

SEQ ID NO: 1939141 - RNA, 14 nt, Human herpesvirus 4 [Epstein-Barr virus]
ucguucaggaacag

SEQ ID NO: 1939142 - RNA, 16 nt, Human herpesvirus 4 [Epstein-Barr virus]
cagaugcaguggguga

SEQ ID NO: 1939143 - RNA, 17 nt, Human herpesvirus 4 [Epstein-Barr virus]
gugaggagcgcccaccg

SEQ ID NO: 1939144 - RNA, 23 nt, Human herpesvirus 4 [Epstein-Barr virus]
ggaggccaccgacgagcagagga

SEQ ID NO: 1939145 - RNA, 18 nt, Human herpesvirus 4 [Epstein-Barr virus]
cuucucuagagccaggcu

SEQ ID NO: 1939146 - RNA, 17 nt, Human herpesvirus 4 [Epstein-Barr virus]
cagccugcuccugagaa

SEQ ID NO: 1939147 - RNA, 15 nt, Human herpesvirus 4 [Epstein-Barr virus]
ucccggguggugagg

SEQ ID NO: 1939148 - RNA, 21 nt, Human herpesvirus 4 [Epstein-Barr virus]
ccgagugaccagucaccuucc

SEQ ID NO: 1939149 - RNA, 17 nt, Human herpesvirus 4 [Epstein-Barr virus]
gcgagcucuccagccac

SEQ ID NO: 1939150 - RNA, 21 nt, Human herpesvirus 4 [Epstein-Barr virus]
accggccaagguccugggccu

SEQ ID NO: 1939151 - RNA, 14 nt, Human herpesvirus 4 [Epstein-Barr virus]
aucaccagccaccu

SEQ ID NO: 1939152 - RNA, 13 nt, Human herpesvirus 4 [Epstein-Barr virus]
gucacugauuuug

SEQ ID NO: 1939153 - RNA, 19 nt, Human herpesvirus 4 [Epstein-Barr virus]
gucugcaccccaguggaca

SEQ ID NO: 1939154 - RNA, 15 nt, Human herpesvirus 4 [Epstein-Barr virus]
gagguugggccacgc

SEQ ID NO: 1939155 - RNA, 19 nt, Human herpesvirus 4 [Epstein-Barr virus]
guaugcagaaggggcccug

SEQ ID NO: 1939156 - RNA, 19 nt, Human herpesvirus 4 [Epstein-Barr virus]
ugcccaccagccagcgacu

SEQ ID NO: 1939157 - RNA, 21 nt, Human herpesvirus 4 [Epstein-Barr virus]
uguccacuggggugcagacga

SEQ ID NO: 1939158 - RNA, 19 nt, Human herpesvirus 4 [Epstein-Barr virus]
guuccucaacaaggagugc

SEQ ID NO: 1939159 - RNA, 20 nt, Human herpesvirus 4 [Epstein-Barr virus]
ccgccuagagcauuugcaag

SEQ ID NO: 1939160 - RNA, 16 nt, Human herpesvirus 4 [Epstein-Barr virus]
uauucaaucaaccuga

SEQ ID NO: 1939161 - RNA, 20 nt, Human herpesvirus 4 [Epstein-Barr virus]
aacugccuaucauguuucaa

SEQ ID NO: 1939162 - RNA, 13 nt, Human herpesvirus 4 [Epstein-Barr virus]
auggaggggcggc

SEQ ID NO: 1939163 - RNA, 14 nt, Human herpesvirus 4 [Epstein-Barr virus]
ugcauggccaggcc

SEQ ID NO: 1939164 - RNA, 20 nt, Human herpesvirus 4 [Epstein-Barr virus]
ccggcggcaguggaccucaa

SEQ ID NO: 1939165 - RNA, 17 nt, Human herpesvirus 4 [Epstein-Barr virus]
gagcaggaggaggggca

SEQ ID NO: 1939166 - RNA, 21 nt, Human herpesvirus 4 [Epstein-Barr virus]
gaguuggcaucuuccuccuug

SEQ ID NO: 1939167 - RNA, 15 nt, Human herpesvirus 4 [Epstein-Barr virus]
ccaugccaucucuga

SEQ ID NO: 1939168 - RNA, 13 nt, Human herpesvirus 4 [Epstein-Barr virus]
cagcccccccugu

SEQ ID NO: 1939169 - RNA, 19 nt, Human herpesvirus 4 [Epstein-Barr virus]
gccgcguguuugcugcucg

SEQ ID NO: 1939170 - RNA, 13 nt, Human herpesvirus 4 [Epstein-Barr virus]
agguuauuuugcc

SEQ ID NO: 1939171 - RNA, 15 nt, Human herpesvirus 4 [Epstein-Barr virus]
acauugguguuccac

SEQ ID NO: 1939172 - RNA, 21 nt, Human herpesvirus 4 [Epstein-Barr virus]
accagagggugagcccaccug

SEQ ID NO: 1939173 - RNA, 18 nt, Human herpesvirus 4 [Epstein-Barr virus]
cuuugccaaccugcucuc

SEQ ID NO: 1939174 - RNA, 20 nt, Human herpesvirus 4 [Epstein-Barr virus]
uccucuuacaccagaggcca

SEQ ID NO: 1939175 - RNA, 15 nt, Human herpesvirus 4 [Epstein-Barr virus]
cagcggacggugggg

SEQ ID NO: 1939176 - RNA, 21 nt, Human herpesvirus 4 [Epstein-Barr virus]
guggccuuccucugccuggcc

SEQ ID NO: 1939177 - RNA, 15 nt, Human herpesvirus 4 [Epstein-Barr virus]
cccgcaccagggcca

SEQ ID NO: 1939178 - RNA, 20 nt, Human herpesvirus 4 [Epstein-Barr virus]
gcuugccuuuuugccacaug

SEQ ID NO: 1939179 - RNA, 15 nt, Human herpesvirus 4 [Epstein-Barr virus]
aagcaacugcugcag

SEQ ID NO: 1939180 - RNA, 17 nt, Human herpesvirus 4 [Epstein-Barr virus]
agcucacuuucagugga

SEQ ID NO: 1939181 - RNA, 16 nt, Human herpesvirus 4 [Epstein-Barr virus]
augcaggccuggacag

SEQ ID NO: 1939182 - RNA, 15 nt, Human herpesvirus 4 [Epstein-Barr virus]
cguggucgugcugcu

SEQ ID NO: 1939183 - RNA, 20 nt, Human herpesvirus 4 [Epstein-Barr virus]
cucuggggucucaggccucc

SEQ ID NO: 1939184 - RNA, 18 nt, Human herpesvirus 4 [Epstein-Barr virus]
gcuauugccgccucgugu

SEQ ID NO: 1939185 - RNA, 22 nt, Human herpesvirus 4 [Epstein-Barr virus]
uuccuagaaacugugccauggu

SEQ ID NO: 1939186 - RNA, 17 nt, Human herpesvirus 4 [Epstein-Barr virus]
cuccccugacgcugugg

SEQ ID NO: 1939187 - RNA, 14 nt, Human herpesvirus 4 [Epstein-Barr virus]
cugaugugcugccc

SEQ ID NO: 1939188 - RNA, 18 nt, Human herpesvirus 4 [Epstein-Barr virus]
ucauuuuuagccccagcc

SEQ ID NO: 1939189 - RNA, 12 nt, Human herpesvirus 4 [Epstein-Barr virus]
cguuaacaugga

SEQ ID NO: 1939190 - RNA, 13 nt, Human herpesvirus 4 [Epstein-Barr virus]
cggcucaggauca

SEQ ID NO: 1939191 - RNA, 15 nt, Human herpesvirus 4 [Epstein-Barr virus]
aggauggcacggucc

SEQ ID NO: 1939192 - RNA, 15 nt, Human herpesvirus 4 [Epstein-Barr virus]
gcaggaggggcagga

SEQ ID NO: 1939193 - RNA, 21 nt, Human herpesvirus 4 [Epstein-Barr virus]
gauggcccugaucugggagau

SEQ ID NO: 1939194 - RNA, 14 nt, Human herpesvirus 4 [Epstein-Barr virus]
gccagcgccuugau

SEQ ID NO: 1939195 - RNA, 12 nt, Human herpesvirus 4 [Epstein-Barr virus]
aguggcugggau

SEQ ID NO: 1939196 - RNA, 16 nt, Human herpesvirus 4 [Epstein-Barr virus]
cucuucugggaacacc

SEQ ID NO: 1939197 - RNA, 16 nt, Human herpesvirus 4 [Epstein-Barr virus]
aucagacggggaggug

SEQ ID NO: 1939198 - RNA, 18 nt, Human herpesvirus 4 [Epstein-Barr virus]
guuuguccagcagggccu

SEQ ID NO: 1939199 - RNA, 18 nt, Human herpesvirus 4 [Epstein-Barr virus]
cgaggauaaucugggcag

SEQ ID NO: 1939200 - RNA, 17 nt, Human herpesvirus 4 [Epstein-Barr virus]
aguccaggggccacaca

SEQ ID NO: 1939201 - RNA, 14 nt, Human herpesvirus 4 [Epstein-Barr virus]
ccugcccucccacu

SEQ ID NO: 1939202 - RNA, 14 nt, Human herpesvirus 4 [Epstein-Barr virus]
gcagguggcugcug

SEQ ID NO: 1939203 - RNA, 13 nt, Human herpesvirus 4 [Epstein-Barr virus]
gugaggccugaga

SEQ ID NO: 1939204 - RNA, 19 nt, Human herpesvirus 4 [Epstein-Barr virus]
uguggccuuccucugccug

SEQ ID NO: 1939205 - RNA, 12 nt, Human herpesvirus 4 [Epstein-Barr virus]
guggcugcugcc

SEQ ID NO: 1939206 - RNA, 21 nt, Human herpesvirus 4 [Epstein-Barr virus]
gguugucuucccagacucugc

SEQ ID NO: 1939207 - RNA, 15 nt, Human herpesvirus 4 [Epstein-Barr virus]
ccagcggggagaggg

SEQ ID NO: 1939208 - RNA, 16 nt, Human herpesvirus 4 [Epstein-Barr virus]
cgcguagcucugguag

SEQ ID NO: 1939209 - RNA, 21 nt, Human herpesvirus 4 [Epstein-Barr virus]
aaaccaguagugcgcgugagu

SEQ ID NO: 1939210 - RNA, 15 nt, Human herpesvirus 4 [Epstein-Barr virus]
gccugacggugccgc

SEQ ID NO: 1939211 - RNA, 16 nt, Human herpesvirus 4 [Epstein-Barr virus]
ucagguuucugggcau

SEQ ID NO: 1939212 - RNA, 16 nt, Human herpesvirus 4 [Epstein-Barr virus]
aauuccccggggacac

SEQ ID NO: 1939213 - RNA, 19 nt, Human herpesvirus 4 [Epstein-Barr virus]
acagcugucacccaugccu

SEQ ID NO: 1939214 - RNA, 23 nt, Human herpesvirus 4 [Epstein-Barr virus]
ucuggaacauuugaggaggcaca

SEQ ID NO: 1939215 - RNA, 17 nt, Human herpesvirus 4 [Epstein-Barr virus]
caggaggggcaggagca

SEQ ID NO: 1939216 - RNA, 14 nt, Human herpesvirus 4 [Epstein-Barr virus]
cuccgggggcacug

SEQ ID NO: 1939217 - RNA, 21 nt, Human herpesvirus 4 [Epstein-Barr virus]
ugggcaauauaaauuacuggc

SEQ ID NO: 1939218 - RNA, 17 nt, Human herpesvirus 4 [Epstein-Barr virus]
cccagggacauccccag

SEQ ID NO: 1939219 - RNA, 18 nt, Human herpesvirus 4 [Epstein-Barr virus]
agacucaucucaagggag

SEQ ID NO: 1939220 - RNA, 17 nt, Human herpesvirus 4 [Epstein-Barr virus]
ucacagaccagccccuc

SEQ ID NO: 1939221 - RNA, 15 nt, Human herpesvirus 4 [Epstein-Barr virus]
uguccagauguccag

SEQ ID NO: 1939222 - RNA, 21 nt, Human herpesvirus 4 [Epstein-Barr virus]
acaggaggcccgaccccaacu

SEQ ID NO: 1939223 - RNA, 19 nt, Human herpesvirus 4 [Epstein-Barr virus]
uccaaucaccagccaccuu

SEQ ID NO: 1939224 - RNA, 22 nt, Human herpesvirus 4 [Epstein-Barr virus]
gggcaucaugcagggugcacag

SEQ ID NO: 1939225 - RNA, 18 nt, Human herpesvirus 4 [Epstein-Barr virus]
cacugauaauacgcccga

SEQ ID NO: 1939226 - RNA, 23 nt, Human herpesvirus 4 [Epstein-Barr virus]
cucagaugccggccaugcgcuuu

SEQ ID NO: 1939227 - RNA, 23 nt, Human herpesvirus 4 [Epstein-Barr virus]
ccuagagguuuugcuagggagga

SEQ ID NO: 1939228 - RNA, 23 nt, Human herpesvirus 4 [Epstein-Barr virus]
cgucgacgcuguuuugcagcuga

SEQ ID NO: 1939229 - RNA, 18 nt, Human herpesvirus 4 [Epstein-Barr virus]
acaagggaagagggaaaa

SEQ ID NO: 1939230 - RNA, 22 nt, Human herpesvirus 4 [Epstein-Barr virus]
ccaguucccuucucccacccug

SEQ ID NO: 1939231 - RNA, 16 nt, Human herpesvirus 4 [Epstein-Barr virus]
cgccagcagccccgac

SEQ ID NO: 1939232 - RNA, 17 nt, Human herpesvirus 4 [Epstein-Barr virus]
caccuagaaagagccau

SEQ ID NO: 1939233 - RNA, 17 nt, Human herpesvirus 4 [Epstein-Barr virus]
acuugggggcaggcuac

SEQ ID NO: 1939234 - RNA, 16 nt, Human herpesvirus 4 [Epstein-Barr virus]
agcucggccagcaggc

SEQ ID NO: 1939235 - RNA, 13 nt, Human herpesvirus 4 [Epstein-Barr virus]
acauuggcagcag

SEQ ID NO: 1939236 - RNA, 16 nt, Human herpesvirus 4 [Epstein-Barr virus]
ugccaggccugucauu

SEQ ID NO: 1939237 - RNA, 16 nt, Human herpesvirus 4 [Epstein-Barr virus]
cagcgucaggagaggg

SEQ ID NO: 1939238 - RNA, 12 nt, Human herpesvirus 4 [Epstein-Barr virus]
gcugugcugacc

SEQ ID NO: 1939239 - RNA, 12 nt, Human herpesvirus 4 [Epstein-Barr virus]
aggcaccccauc

SEQ ID NO: 1939240 - RNA, 18 nt, Human herpesvirus 4 [Epstein-Barr virus]
acgcugcccuagagguuu

SEQ ID NO: 1939241 - RNA, 19 nt, Human herpesvirus 4 [Epstein-Barr virus]
uaaguaauuuguugccguu

SEQ ID NO: 1939242 - RNA, 14 nt, Human herpesvirus 4 [Epstein-Barr virus]
uccucaaggauggc

SEQ ID NO: 1939243 - RNA, 16 nt, Human herpesvirus 4 [Epstein-Barr virus]
cagcucuaacuuggca

SEQ ID NO: 1939244 - RNA, 17 nt, Human herpesvirus 4 [Epstein-Barr virus]
aggccagguagcccagc

SEQ ID NO: 1939245 - RNA, 23 nt, Human herpesvirus 4 [Epstein-Barr virus]
accuacgcugcccuagagguuuu

SEQ ID NO: 1939246 - RNA, 14 nt, Human herpesvirus 4 [Epstein-Barr virus]
cugccuggauucuu

SEQ ID NO: 1939247 - RNA, 22 nt, Human herpesvirus 4 [Epstein-Barr virus]
cagcuggcccaccuaaagagag

SEQ ID NO: 1939248 - RNA, 11 nt, Human herpesvirus 4 [Epstein-Barr virus]
ucaccagagcc

SEQ ID NO: 1939249 - RNA, 16 nt, Human herpesvirus 4 [Epstein-Barr virus]
aggggguacggagagg

SEQ ID NO: 1939250 - RNA, 23 nt, Human herpesvirus 4 [Epstein-Barr virus]
gugaaugcacgccaacagcgacc

SEQ ID NO: 1939251 - RNA, 22 nt, Human herpesvirus 4 [Epstein-Barr virus]
gcccuccucugggccgcccggc

SEQ ID NO: 1939252 - RNA, 22 nt, Human herpesvirus 4 [Epstein-Barr virus]
uacggugauaacugacagagcc

SEQ ID NO: 1939253 - RNA, 23 nt, Human herpesvirus 4 [Epstein-Barr virus]
uacauguuuuucguuaacaugga

SEQ ID NO: 1939254 - RNA, 13 nt, Human herpesvirus 4 [Epstein-Barr virus]
gagguagauaggu

SEQ ID NO: 1939255 - RNA, 14 nt, Human herpesvirus 4 [Epstein-Barr virus]
gggccucggccugg

SEQ ID NO: 1939256 - RNA, 17 nt, Human herpesvirus 4 [Epstein-Barr virus]
uagaugaggagcaggca

SEQ ID NO: 1939257 - RNA, 21 nt, Human herpesvirus 4 [Epstein-Barr virus]
ccaagccacuacggccacguc

SEQ ID NO: 1939258 - RNA, 18 nt, Human herpesvirus 4 [Epstein-Barr virus]
ucccauaccuacaccacc

SEQ ID NO: 1939259 - RNA, 19 nt, Human herpesvirus 4 [Epstein-Barr virus]
cucaaggauggcacgggca

SEQ ID NO: 1939260 - RNA, 22 nt, Human herpesvirus 4 [Epstein-Barr virus]
cagaugcaccgggaugagcugg

SEQ ID NO: 1939261 - RNA, 12 nt, Human herpesvirus 4 [Epstein-Barr virus]
cgccaccugcag

SEQ ID NO: 1939262 - RNA, 20 nt, Human herpesvirus 4 [Epstein-Barr virus]
gaggauccaaacccccuccc

SEQ ID NO: 1939263 - RNA, 15 nt, Human herpesvirus 4 [Epstein-Barr virus]
gagcgcacgugacag

SEQ ID NO: 1939264 - RNA, 19 nt, Human herpesvirus 4 [Epstein-Barr virus]
gugcgguuauaacugccag

SEQ ID NO: 1939265 - RNA, 20 nt, Human herpesvirus 4 [Epstein-Barr virus]
gaggccugggagggggcgag

SEQ ID NO: 1939266 - RNA, 16 nt, Human herpesvirus 4 [Epstein-Barr virus]
gguuauggcagagcuu

SEQ ID NO: 1939267 - RNA, 21 nt, Human herpesvirus 4 [Epstein-Barr virus]
auuugcacuuucuuugcuuca

SEQ ID NO: 1939268 - RNA, 13 nt, Human herpesvirus 4 [Epstein-Barr virus]
cauggcagcagac

SEQ ID NO: 1939269 - RNA, 21 nt, Human herpesvirus 4 [Epstein-Barr virus]
cacacggaaaccacaacagcc

SEQ ID NO: 1939270 - RNA, 19 nt, Human herpesvirus 4 [Epstein-Barr virus]
gacuccggggguccagccg

SEQ ID NO: 1939271 - RNA, 20 nt, Human herpesvirus 4 [Epstein-Barr virus]
auuuugggcacacuuaacuu

SEQ ID NO: 1939272 - RNA, 15 nt, Human herpesvirus 4 [Epstein-Barr virus]
agggugaggcccagc

SEQ ID NO: 1939273 - RNA, 21 nt, Human herpesvirus 4 [Epstein-Barr virus]
ccacuccaccugccggaggga

SEQ ID NO: 1939274 - RNA, 16 nt, Human herpesvirus 4 [Epstein-Barr virus]
caaucaccagccaccu

SEQ ID NO: 1939275 - RNA, 15 nt, Human herpesvirus 4 [Epstein-Barr virus]
guuuacaucugcccg

SEQ ID NO: 1939276 - RNA, 17 nt, Human herpesvirus 4 [Epstein-Barr virus]
agcaggugcaccagcuc

SEQ ID NO: 1939277 - RNA, 16 nt, Human herpesvirus 4 [Epstein-Barr virus]
gcuccggcugccgcac

SEQ ID NO: 1939278 - RNA, 15 nt, Human herpesvirus 4 [Epstein-Barr virus]
cgcggcgacgagcgg

SEQ ID NO: 1939279 - RNA, 20 nt, Human herpesvirus 4 [Epstein-Barr virus]
uccugaagcgaagcagcucc

SEQ ID NO: 1939280 - RNA, 22 nt, Human herpesvirus 4 [Epstein-Barr virus]
gcagaggaugagaccaguggca

SEQ ID NO: 1939281 - RNA, 12 nt, Human herpesvirus 4 [Epstein-Barr virus]
aaacgugauggu

SEQ ID NO: 1939282 - RNA, 16 nt, Human herpesvirus 4 [Epstein-Barr virus]
gccccuguccacugcc

SEQ ID NO: 1939283 - RNA, 17 nt, Human herpesvirus 4 [Epstein-Barr virus]
auugcugaacuggggcu

SEQ ID NO: 1939284 - RNA, 16 nt, Human herpesvirus 4 [Epstein-Barr virus]
uuuuugccacauguuu

SEQ ID NO: 1939285 - RNA, 17 nt, Human herpesvirus 4 [Epstein-Barr virus]
gcugccccgggcccacc

SEQ ID NO: 1939286 - RNA, 13 nt, Human herpesvirus 4 [Epstein-Barr virus]
cgccugagcugcc

SEQ ID NO: 1939287 - RNA, 22 nt, Human herpesvirus 4 [Epstein-Barr virus]
cuaccugucggcccugcgcuac

SEQ ID NO: 1939288 - RNA, 19 nt, Human herpesvirus 4 [Epstein-Barr virus]
ugucuuccacaccauccac

SEQ ID NO: 1939289 - RNA, 23 nt, Human herpesvirus 4 [Epstein-Barr virus]
cagccagguguacgcccuggcgg

SEQ ID NO: 1939290 - RNA, 16 nt, Human herpesvirus 4 [Epstein-Barr virus]
ugggugcacagguggc

SEQ ID NO: 1939291 - RNA, 17 nt, Human herpesvirus 4 [Epstein-Barr virus]
gcacacgcucagcucaa

SEQ ID NO: 1939292 - RNA, 23 nt, Human herpesvirus 4 [Epstein-Barr virus]
cucuggucgcccccucugccucc

SEQ ID NO: 1939293 - RNA, 15 nt, Human herpesvirus 4 [Epstein-Barr virus]
cuguccuugucugcu

SEQ ID NO: 1939294 - RNA, 19 nt, Human herpesvirus 4 [Epstein-Barr virus]
acuuacaucgacuuuaugc

SEQ ID NO: 1939295 - RNA, 15 nt, Human herpesvirus 4 [Epstein-Barr virus]
ccccuguccacugcc

SEQ ID NO: 1939296 - RNA, 19 nt, Human herpesvirus 4 [Epstein-Barr virus]
ccgacgccguccucgaagg

SEQ ID NO: 1939297 - RNA, 13 nt, Human herpesvirus 4 [Epstein-Barr virus]
uccucagccucca

SEQ ID NO: 1939298 - RNA, 19 nt, Human herpesvirus 4 [Epstein-Barr virus]
uugugaagguaaacaagcu

SEQ ID NO: 1939299 - RNA, 18 nt, Human herpesvirus 4 [Epstein-Barr virus]
cugugcagggacgaggac

SEQ ID NO: 1939300 - RNA, 23 nt, Human herpesvirus 4 [Epstein-Barr virus]
aauguagccccuaggccugccac

SEQ ID NO: 1939301 - RNA, 22 nt, Human herpesvirus 4 [Epstein-Barr virus]
ggucacuggcuuaugcguggga

SEQ ID NO: 1939302 - RNA, 15 nt, Human herpesvirus 4 [Epstein-Barr virus]
ccgcguguuugcugc

SEQ ID NO: 1939303 - RNA, 14 nt, Human herpesvirus 4 [Epstein-Barr virus]
gccucuacccuccc

SEQ ID NO: 1939304 - RNA, 21 nt, Human herpesvirus 4 [Epstein-Barr virus]
ccaggaggaggacgugaguga

SEQ ID NO: 1939305 - RNA, 17 nt, Human herpesvirus 4 [Epstein-Barr virus]
gccugccucugcucugg

SEQ ID NO: 1939306 - RNA, 21 nt, Human herpesvirus 4 [Epstein-Barr virus]
auguuuuuggcauguguacuu

SEQ ID NO: 1939307 - RNA, 20 nt, Human herpesvirus 4 [Epstein-Barr virus]
ccgagggugaggcccagccc

SEQ ID NO: 1939308 - RNA, 14 nt, Human herpesvirus 4 [Epstein-Barr virus]
acugccagagcugu

SEQ ID NO: 1939309 - RNA, 15 nt, Human herpesvirus 4 [Epstein-Barr virus]
caucucauccccaga

SEQ ID NO: 1939310 - RNA, 20 nt, Human herpesvirus 4 [Epstein-Barr virus]
cuggaggccucaggcaacaa

SEQ ID NO: 1939311 - RNA, 12 nt, Human herpesvirus 4 [Epstein-Barr virus]
cuauacggccac

SEQ ID NO: 1939312 - RNA, 18 nt, Human herpesvirus 4 [Epstein-Barr virus]
gcaccuguguccugggca

SEQ ID NO: 1939313 - RNA, 15 nt, Human herpesvirus 4 [Epstein-Barr virus]
cacccgucccgggua

SEQ ID NO: 1939314 - RNA, 14 nt, Human herpesvirus 4 [Epstein-Barr virus]
augcacgccaacag

SEQ ID NO: 1939315 - RNA, 23 nt, Human herpesvirus 4 [Epstein-Barr virus]
caacuucagcuccagggccagca

SEQ ID NO: 1939316 - RNA, 18 nt, Human herpesvirus 4 [Epstein-Barr virus]
gaugcccaguuaugggua

SEQ ID NO: 1939317 - RNA, 18 nt, Human herpesvirus 4 [Epstein-Barr virus]
ugcaacaaucuggacucu

SEQ ID NO: 1939318 - RNA, 23 nt, Human herpesvirus 4 [Epstein-Barr virus]
ccugguaugcagaaggggcccug

SEQ ID NO: 1939319 - RNA, 12 nt, Human herpesvirus 4 [Epstein-Barr virus]
ucaaacagcagc

SEQ ID NO: 1939320 - RNA, 22 nt, Human herpesvirus 4 [Epstein-Barr virus]
gguuucauuuaagcaggugagg

SEQ ID NO: 1939321 - RNA, 13 nt, Human herpesvirus 4 [Epstein-Barr virus]
aggaugagaccag

SEQ ID NO: 1939322 - RNA, 16 nt, Human herpesvirus 4 [Epstein-Barr virus]
auggccgccacccucc

SEQ ID NO: 1939323 - RNA, 22 nt, Human herpesvirus 4 [Epstein-Barr virus]
gcucgccuggagucugagaaua

SEQ ID NO: 1939324 - RNA, 12 nt, Human herpesvirus 4 [Epstein-Barr virus]
accuacaccacc

SEQ ID NO: 1939325 - RNA, 13 nt, Human herpesvirus 4 [Epstein-Barr virus]
ccucauccugcuc

SEQ ID NO: 1939326 - RNA, 15 nt, Human herpesvirus 4 [Epstein-Barr virus]
gcuagggaggagacg

SEQ ID NO: 1939327 - RNA, 18 nt, Human herpesvirus 4 [Epstein-Barr virus]
auuccuaggagaaggagc

SEQ ID NO: 1939328 - RNA, 14 nt, Human herpesvirus 4 [Epstein-Barr virus]
gcuugugaacuuua

SEQ ID NO: 1939329 - RNA, 15 nt, Human herpesvirus 4 [Epstein-Barr virus]
cacuuucuuugcaau

SEQ ID NO: 1939330 - RNA, 18 nt, Human herpesvirus 4 [Epstein-Barr virus]
agaggacacgcuggucuu

SEQ ID NO: 1939331 - RNA, 13 nt, Human herpesvirus 4 [Epstein-Barr virus]
cagcccuccucag

SEQ ID NO: 1939332 - RNA, 15 nt, Human herpesvirus 4 [Epstein-Barr virus]
cgaaggagagcugga

SEQ ID NO: 1939333 - RNA, 19 nt, Human herpesvirus 4 [Epstein-Barr virus]
cuccggcugcccgucucgg

SEQ ID NO: 1939334 - RNA, 15 nt, Human herpesvirus 4 [Epstein-Barr virus]
gccugagcugccugg

SEQ ID NO: 1939335 - RNA, 19 nt, Human herpesvirus 4 [Epstein-Barr virus]
ccauagucacggaugcugc

SEQ ID NO: 1939336 - RNA, 13 nt, Human herpesvirus 4 [Epstein-Barr virus]
ccacuacaccccu

SEQ ID NO: 1939337 - RNA, 13 nt, Human herpesvirus 4 [Epstein-Barr virus]
agggcagagaggc

SEQ ID NO: 1939338 - RNA, 20 nt, Human herpesvirus 4 [Epstein-Barr virus]
gugauuaggagcagggccca

SEQ ID NO: 1939339 - RNA, 14 nt, Human herpesvirus 4 [Epstein-Barr virus]
cuucuggcucuucu

SEQ ID NO: 1939340 - RNA, 20 nt, Human herpesvirus 4 [Epstein-Barr virus]
aaggcuccggcggcagugga

SEQ ID NO: 1939341 - RNA, 13 nt, Human herpesvirus 4 [Epstein-Barr virus]
cucccccuggaca

SEQ ID NO: 1939342 - RNA, 14 nt, Human herpesvirus 4 [Epstein-Barr virus]
ggcgaaggcggaga

SEQ ID NO: 1939343 - RNA, 13 nt, Human herpesvirus 4 [Epstein-Barr virus]
ccuggagccagcg

SEQ ID NO: 1939344 - RNA, 17 nt, Human herpesvirus 4 [Epstein-Barr virus]
gugcccuggaggccuca

SEQ ID NO: 1939345 - RNA, 13 nt, Human herpesvirus 4 [Epstein-Barr virus]
auuccacccacug

SEQ ID NO: 1939346 - RNA, 17 nt, Human herpesvirus 4 [Epstein-Barr virus]
gggcuggccugccugga

SEQ ID NO: 1939347 - RNA, 19 nt, Human herpesvirus 4 [Epstein-Barr virus]
ggggcuaugguaguggcug

SEQ ID NO: 1939348 - RNA, 21 nt, Human herpesvirus 4 [Epstein-Barr virus]
cagcgcucuggucgcccccuc

SEQ ID NO: 1939349 - RNA, 16 nt, Human herpesvirus 4 [Epstein-Barr virus]
cauccggugccugaga

SEQ ID NO: 1939350 - RNA, 17 nt, Human herpesvirus 4 [Epstein-Barr virus]
gugggccucucuggcug

SEQ ID NO: 1939351 - RNA, 17 nt, Human herpesvirus 4 [Epstein-Barr virus]
cccugcauggccaggcc

SEQ ID NO: 1939352 - RNA, 14 nt, Human herpesvirus 4 [Epstein-Barr virus]
gagcuggagacccg

SEQ ID NO: 1939353 - RNA, 14 nt, Human herpesvirus 4 [Epstein-Barr virus]
agugcgaggaacug

SEQ ID NO: 1939354 - RNA, 13 nt, Human herpesvirus 4 [Epstein-Barr virus]
ggacacaccgcca

SEQ ID NO: 1939355 - RNA, 15 nt, Human herpesvirus 4 [Epstein-Barr virus]
uccaggggccacaca

SEQ ID NO: 1939356 - RNA, 17 nt, Human herpesvirus 4 [Epstein-Barr virus]
caggaagcuggccaggc

SEQ ID NO: 1939357 - RNA, 16 nt, Human herpesvirus 4 [Epstein-Barr virus]
gaaagaggcucugcau

SEQ ID NO: 1939358 - RNA, 19 nt, Human herpesvirus 4 [Epstein-Barr virus]
cguacccauaacugggcau

SEQ ID NO: 1939359 - RNA, 17 nt, Human herpesvirus 4 [Epstein-Barr virus]
cucuacaaccccuucca

SEQ ID NO: 1939360 - RNA, 12 nt, Human herpesvirus 4 [Epstein-Barr virus]
gcaacugcugca

SEQ ID NO: 1939361 - RNA, 22 nt, Human herpesvirus 4 [Epstein-Barr virus]
ucaagauugggugguggcagca

SEQ ID NO: 1939362 - RNA, 20 nt, Human herpesvirus 4 [Epstein-Barr virus]
gggugaaagcuacuaucucc

SEQ ID NO: 1939363 - RNA, 18 nt, Human herpesvirus 4 [Epstein-Barr virus]
aggagcaggaggaggggc

SEQ ID NO: 1939364 - RNA, 16 nt, Human herpesvirus 4 [Epstein-Barr virus]
augcgcgcccugucac

SEQ ID NO: 1939365 - RNA, 10 nt, Human herpesvirus 4 [Epstein-Barr virus]
aagcucagca

SEQ ID NO: 1939366 - RNA, 21 nt, Human herpesvirus 4 [Epstein-Barr virus]
ggcacucucgagggugccugu

SEQ ID NO: 1939367 - RNA, 18 nt, Human herpesvirus 4 [Epstein-Barr virus]
cauugguguuccacagcc

SEQ ID NO: 1939368 - RNA, 19 nt, Human herpesvirus 4 [Epstein-Barr virus]
cuagcgucacugauuuugg

SEQ ID NO: 1939369 - RNA, 19 nt, Human herpesvirus 4 [Epstein-Barr virus]
cccucugaugguggccggc

SEQ ID NO: 1939370 - RNA, 16 nt, Human herpesvirus 4 [Epstein-Barr virus]
agggguaacccuguag

SEQ ID NO: 1939371 - RNA, 13 nt, Human herpesvirus 4 [Epstein-Barr virus]
acgggacuucuuc

SEQ ID NO: 1939372 - RNA, 21 nt, Human herpesvirus 4 [Epstein-Barr virus]
cugucccugggggccuguguc

SEQ ID NO: 1939373 - RNA, 16 nt, Human herpesvirus 4 [Epstein-Barr virus]
guuaacauggacaugc

SEQ ID NO: 1939374 - RNA, 17 nt, Human herpesvirus 4 [Epstein-Barr virus]
aacgaucccaggccuca

SEQ ID NO: 1939375 - RNA, 13 nt, Human herpesvirus 4 [Epstein-Barr virus]
uacucggggucuc

SEQ ID NO: 1939376 - RNA, 15 nt, Human herpesvirus 4 [Epstein-Barr virus]
gggagguggccacac

SEQ ID NO: 1939377 - RNA, 19 nt, Human herpesvirus 4 [Epstein-Barr virus]
gcccucgguggugggcugc

SEQ ID NO: 1939378 - RNA, 22 nt, Human herpesvirus 4 [Epstein-Barr virus]
cugacccuucugcugcugcugg

SEQ ID NO: 1939379 - RNA, 12 nt, Human herpesvirus 4 [Epstein-Barr virus]
cacaggacaugu

SEQ ID NO: 1939380 - RNA, 21 nt, Human herpesvirus 4 [Epstein-Barr virus]
uguagccccuaggccugccac

SEQ ID NO: 1939381 - RNA, 11 nt, Human herpesvirus 4 [Epstein-Barr virus]
agaucuucuca

SEQ ID NO: 1939382 - RNA, 23 nt, Human herpesvirus 4 [Epstein-Barr virus]
ucaagcagcucaccuauggucac

SEQ ID NO: 1939383 - RNA, 17 nt, Human herpesvirus 4 [Epstein-Barr virus]
gagugggcagcagagag

SEQ ID NO: 1939384 - RNA, 21 nt, Human herpesvirus 4 [Epstein-Barr virus]
gacguuugaguccaaacagcu

SEQ ID NO: 1939385 - RNA, 12 nt, Human herpesvirus 4 [Epstein-Barr virus]
auccccagccca

SEQ ID NO: 1939386 - RNA, 18 nt, Human herpesvirus 4 [Epstein-Barr virus]
gccugaauuccccugccu

SEQ ID NO: 1939387 - RNA, 21 nt, Human herpesvirus 4 [Epstein-Barr virus]
gcggcaagggcucaccaggga

SEQ ID NO: 1939388 - RNA, 21 nt, Human herpesvirus 4 [Epstein-Barr virus]
cagcagugguguuugcuugcc

SEQ ID NO: 1939389 - RNA, 22 nt, Human herpesvirus 4 [Epstein-Barr virus]
agucagccuugcccccgccagc

SEQ ID NO: 1939390 - RNA, 23 nt, Human herpesvirus 4 [Epstein-Barr virus]
cagcgucaggagagggccagaga

SEQ ID NO: 1939391 - RNA, 11 nt, Human herpesvirus 4 [Epstein-Barr virus]
uugcagcugga

SEQ ID NO: 1939392 - RNA, 15 nt, Human herpesvirus 4 [Epstein-Barr virus]
uuaggcacuggacac

SEQ ID NO: 1939393 - RNA, 19 nt, Human herpesvirus 4 [Epstein-Barr virus]
ccccaccaccuccaccacc

SEQ ID NO: 1939394 - RNA, 13 nt, Human herpesvirus 4 [Epstein-Barr virus]
uucugaaggaacg

SEQ ID NO: 1939395 - RNA, 23 nt, Human herpesvirus 4 [Epstein-Barr virus]
guuaugcacucugaccaggacau

SEQ ID NO: 1939396 - RNA, 19 nt, Human herpesvirus 4 [Epstein-Barr virus]
ugcgaugagggccuuccag

SEQ ID NO: 1939397 - RNA, 12 nt, Human herpesvirus 4 [Epstein-Barr virus]
gagucugcugcg

SEQ ID NO: 1939398 - RNA, 14 nt, Human herpesvirus 4 [Epstein-Barr virus]
ccugucggcucucu

SEQ ID NO: 1939399 - RNA, 22 nt, Human herpesvirus 4 [Epstein-Barr virus]
ccgcucggguaagugcuuuuuc

SEQ ID NO: 1939400 - RNA, 14 nt, Human herpesvirus 4 [Epstein-Barr virus]
ccgccgccagcagc

SEQ ID NO: 1939401 - RNA, 11 nt, Human herpesvirus 4 [Epstein-Barr virus]
uacugcugcua

SEQ ID NO: 1939402 - RNA, 18 nt, Human herpesvirus 4 [Epstein-Barr virus]
ggcugugguaaccggugg

SEQ ID NO: 1939403 - RNA, 13 nt, Human herpesvirus 4 [Epstein-Barr virus]
ggcgaaggguggg

SEQ ID NO: 1939404 - RNA, 18 nt, Human herpesvirus 4 [Epstein-Barr virus]
ucaggaagcuggccaggc

SEQ ID NO: 1939405 - RNA, 15 nt, Human herpesvirus 4 [Epstein-Barr virus]
gcauacgcugaguga

SEQ ID NO: 1939406 - RNA, 19 nt, Human herpesvirus 4 [Epstein-Barr virus]
acacgaggaucucuuaaau

SEQ ID NO: 1939407 - RNA, 23 nt, Human herpesvirus 4 [Epstein-Barr virus]
ggggauuacccgacccagccacu

SEQ ID NO: 1939408 - RNA, 18 nt, Human herpesvirus 4 [Epstein-Barr virus]
gagaaccugaugugggac

SEQ ID NO: 1939409 - RNA, 14 nt, Human herpesvirus 4 [Epstein-Barr virus]
cgcucagagcuggg

SEQ ID NO: 1939410 - RNA, 17 nt, Human herpesvirus 4 [Epstein-Barr virus]
caccggcuuggcccucu

SEQ ID NO: 1939411 - RNA, 21 nt, Human herpesvirus 4 [Epstein-Barr virus]
ugagcgugugcacccggcugg

SEQ ID NO: 1939412 - RNA, 19 nt, Human herpesvirus 4 [Epstein-Barr virus]
cuaccuccuaucacaggga

SEQ ID NO: 1939413 - RNA, 16 nt, Human herpesvirus 4 [Epstein-Barr virus]
cacagaccagccccuc

SEQ ID NO: 1939414 - RNA, 16 nt, Human herpesvirus 4 [Epstein-Barr virus]
agcagcgcggcagagg

SEQ ID NO: 1939415 - RNA, 16 nt, Human herpesvirus 4 [Epstein-Barr virus]
ugagucugcuggacuc

SEQ ID NO: 1939416 - RNA, 13 nt, Human herpesvirus 4 [Epstein-Barr virus]
agugaccagucac

SEQ ID NO: 1939417 - RNA, 23 nt, Human herpesvirus 4 [Epstein-Barr virus]
gggccucucuggcugugcugacc

SEQ ID NO: 1939418 - RNA, 13 nt, Human herpesvirus 4 [Epstein-Barr virus]
accauccacagcc

SEQ ID NO: 1939419 - RNA, 16 nt, Human herpesvirus 4 [Epstein-Barr virus]
caugacgcugcugcua

SEQ ID NO: 1939420 - RNA, 13 nt, Human herpesvirus 4 [Epstein-Barr virus]
cgccgccagcagc

SEQ ID NO: 1939421 - RNA, 14 nt, Human herpesvirus 4 [Epstein-Barr virus]
cuggagcuggugca

SEQ ID NO: 1939422 - RNA, 16 nt, Human herpesvirus 4 [Epstein-Barr virus]
agguggcugcugccaa

SEQ ID NO: 1939423 - RNA, 18 nt, Human herpesvirus 4 [Epstein-Barr virus]
uguggccgacuucuggaa

SEQ ID NO: 1939424 - RNA, 17 nt, Human herpesvirus 4 [Epstein-Barr virus]
gauucaccggcaccgcc

SEQ ID NO: 1939425 - RNA, 16 nt, Human herpesvirus 4 [Epstein-Barr virus]
gccuugcccccgccag

SEQ ID NO: 1939426 - RNA, 22 nt, Human herpesvirus 4 [Epstein-Barr virus]
uccccgagggugaggcccagcc

SEQ ID NO: 1939427 - RNA, 22 nt, Human herpesvirus 4 [Epstein-Barr virus]
ccagggacagggcgcugcaugc

SEQ ID NO: 1939428 - RNA, 21 nt, Human herpesvirus 4 [Epstein-Barr virus]
gaugugaauauggcugcggag

SEQ ID NO: 1939429 - RNA, 14 nt, Human herpesvirus 4 [Epstein-Barr virus]
cgcccccaccaccc

SEQ ID NO: 1939430 - RNA, 20 nt, Human herpesvirus 4 [Epstein-Barr virus]
aggagugccucugggugcug

SEQ ID NO: 1939431 - RNA, 12 nt, Human herpesvirus 4 [Epstein-Barr virus]
ugggggcuacag

SEQ ID NO: 1939432 - RNA, 14 nt, Human herpesvirus 4 [Epstein-Barr virus]
gccccgggcggcuc

SEQ ID NO: 1939433 - RNA, 17 nt, Human herpesvirus 4 [Epstein-Barr virus]
ugcuagcgucacugauu

SEQ ID NO: 1939434 - RNA, 15 nt, Human herpesvirus 4 [Epstein-Barr virus]
cagcucggccagcag

SEQ ID NO: 1939435 - RNA, 21 nt, Human herpesvirus 4 [Epstein-Barr virus]
guaacccuguagucaccugca

SEQ ID NO: 1939436 - RNA, 19 nt, Human herpesvirus 4 [Epstein-Barr virus]
agggaugggcuugauggcc

SEQ ID NO: 1939437 - RNA, 14 nt, Human herpesvirus 4 [Epstein-Barr virus]
gccgagccugucga

SEQ ID NO: 1939438 - RNA, 16 nt, Human herpesvirus 4 [Epstein-Barr virus]
ugcucucguugccaaa

SEQ ID NO: 1939439 - RNA, 19 nt, Human herpesvirus 4 [Epstein-Barr virus]
uaccuucuuucuccuucaa

SEQ ID NO: 1939440 - RNA, 15 nt, Human herpesvirus 4 [Epstein-Barr virus]
caguccgccaugacc

SEQ ID NO: 1939441 - RNA, 18 nt, Human herpesvirus 4 [Epstein-Barr virus]
gaggggcaggagcaggag

SEQ ID NO: 1939442 - RNA, 23 nt, Human herpesvirus 4 [Epstein-Barr virus]
cuaaggcaguccaggggccacac

SEQ ID NO: 1939443 - RNA, 12 nt, Human herpesvirus 4 [Epstein-Barr virus]
ccgggggcggga

SEQ ID NO: 1939444 - RNA, 13 nt, Human herpesvirus 4 [Epstein-Barr virus]
uggcuugcuccac

SEQ ID NO: 1939445 - RNA, 18 nt, Human herpesvirus 4 [Epstein-Barr virus]
ugccauguguguccagug

SEQ ID NO: 1939446 - RNA, 18 nt, Human herpesvirus 4 [Epstein-Barr virus]
gcagaguaauugcagugg

SEQ ID NO: 1939447 - RNA, 21 nt, Human herpesvirus 4 [Epstein-Barr virus]
ugcuucgcauuacaccauccc

SEQ ID NO: 1939448 - RNA, 19 nt, Human herpesvirus 4 [Epstein-Barr virus]
cugcucuucaaccuuggca

SEQ ID NO: 1939449 - RNA, 16 nt, Human herpesvirus 4 [Epstein-Barr virus]
cgggggagagaaagag

SEQ ID NO: 1939450 - RNA, 17 nt, Human herpesvirus 4 [Epstein-Barr virus]
ccucuacgccaggcucg

SEQ ID NO: 1939451 - RNA, 23 nt, Human herpesvirus 4 [Epstein-Barr virus]
cugucauucuaucaauuaaacaa

SEQ ID NO: 1939452 - RNA, 20 nt, Human herpesvirus 4 [Epstein-Barr virus]
cagaagacuccugccugaau

SEQ ID NO: 1939453 - RNA, 18 nt, Human herpesvirus 4 [Epstein-Barr virus]
acaagguucggaaaucug

SEQ ID NO: 1939454 - RNA, 14 nt, Human herpesvirus 4 [Epstein-Barr virus]
gcugaacuggggcu

SEQ ID NO: 1939455 - RNA, 20 nt, Human herpesvirus 4 [Epstein-Barr virus]
cggccugcuggccgagcugg

SEQ ID NO: 1939456 - RNA, 19 nt, Human herpesvirus 4 [Epstein-Barr virus]
gcaggagcgggaggggcag

SEQ ID NO: 1939457 - RNA, 18 nt, Human herpesvirus 4 [Epstein-Barr virus]
cccgcaccagggccaggc

SEQ ID NO: 1939458 - RNA, 18 nt, Human herpesvirus 4 [Epstein-Barr virus]
cuaacaggacauguuugg

SEQ ID NO: 1939459 - RNA, 15 nt, Human herpesvirus 4 [Epstein-Barr virus]
cuccaggcuccugga

SEQ ID NO: 1939460 - RNA, 16 nt, Human herpesvirus 4 [Epstein-Barr virus]
cacucugaccaggaca

SEQ ID NO: 1939461 - RNA, 13 nt, Human herpesvirus 4 [Epstein-Barr virus]
agcuuggggccac

SEQ ID NO: 1939462 - RNA, 22 nt, Human herpesvirus 4 [Epstein-Barr virus]
gcacucuuaccuuccucugccc

SEQ ID NO: 1939463 - RNA, 14 nt, Human herpesvirus 4 [Epstein-Barr virus]
ggucgggggcacuc

SEQ ID NO: 1939464 - RNA, 22 nt, Human herpesvirus 4 [Epstein-Barr virus]
auguucccggcacaccagacau

SEQ ID NO: 1939465 - RNA, 18 nt, Human herpesvirus 4 [Epstein-Barr virus]
agcuuugaugaggcugaa

SEQ ID NO: 1939466 - RNA, 15 nt, Human herpesvirus 4 [Epstein-Barr virus]
uccuugugcagcuua

SEQ ID NO: 1939467 - RNA, 16 nt, Human herpesvirus 4 [Epstein-Barr virus]
ucacccauggccaggc

SEQ ID NO: 1939468 - RNA, 14 nt, Human herpesvirus 4 [Epstein-Barr virus]
cggcucggccacgc

SEQ ID NO: 1939469 - RNA, 23 nt, Human herpesvirus 4 [Epstein-Barr virus]
gccacauguuuucuggacacagg

SEQ ID NO: 1939470 - RNA, 16 nt, Human herpesvirus 4 [Epstein-Barr virus]
guggacucggccacac

SEQ ID NO: 1939471 - RNA, 12 nt, Human herpesvirus 4 [Epstein-Barr virus]
ccugccuggauc

SEQ ID NO: 1939472 - RNA, 15 nt, Human herpesvirus 4 [Epstein-Barr virus]
gggcaggagcaggag

SEQ ID NO: 1939473 - RNA, 20 nt, Human herpesvirus 4 [Epstein-Barr virus]
cuuuacccagcccuuaacac

SEQ ID NO: 1939474 - RNA, 22 nt, Human herpesvirus 4 [Epstein-Barr virus]
gagccgugucuccugacgccaa

SEQ ID NO: 1939475 - RNA, 14 nt, Human herpesvirus 4 [Epstein-Barr virus]
ggagccgggcuuca

SEQ ID NO: 1939476 - RNA, 16 nt, Human herpesvirus 4 [Epstein-Barr virus]
ggcagccagagccagc

SEQ ID NO: 1939477 - RNA, 19 nt, Human herpesvirus 4 [Epstein-Barr virus]
cuucucauuagucaggagg

SEQ ID NO: 1939478 - RNA, 15 nt, Human herpesvirus 4 [Epstein-Barr virus]
gaucuggggcuggcc

SEQ ID NO: 1939479 - RNA, 12 nt, Human herpesvirus 4 [Epstein-Barr virus]
ccugcaaacuga

SEQ ID NO: 1939480 - RNA, 19 nt, Human herpesvirus 4 [Epstein-Barr virus]
ggcccagggucacuggcuu

SEQ ID NO: 1939481 - RNA, 18 nt, Human herpesvirus 4 [Epstein-Barr virus]
acccaucugagggcagug

SEQ ID NO: 1939482 - RNA, 20 nt, Human herpesvirus 4 [Epstein-Barr virus]
gcccuccuccacccagcagc

SEQ ID NO: 1939483 - RNA, 16 nt, Human herpesvirus 4 [Epstein-Barr virus]
uuuccaugacaguccc

SEQ ID NO: 1939484 - RNA, 19 nt, Human herpesvirus 4 [Epstein-Barr virus]
auugcugagaaccugcugc

SEQ ID NO: 1939485 - RNA, 20 nt, Human herpesvirus 4 [Epstein-Barr virus]
gcugcaucuuaccccuggcu

SEQ ID NO: 1939486 - RNA, 21 nt, Human herpesvirus 4 [Epstein-Barr virus]
ggcccuguacacuacacucua

SEQ ID NO: 1939487 - RNA, 19 nt, Human herpesvirus 4 [Epstein-Barr virus]
cauucgacaggccauuaga

SEQ ID NO: 1939488 - RNA, 21 nt, Human herpesvirus 4 [Epstein-Barr virus]
ugcgucagcaacugcguccuc

SEQ ID NO: 1939489 - RNA, 12 nt, Human herpesvirus 4 [Epstein-Barr virus]
ucccucugggag

SEQ ID NO: 1939490 - RNA, 14 nt, Human herpesvirus 4 [Epstein-Barr virus]
ccaagacucccuga

SEQ ID NO: 1939491 - RNA, 14 nt, Human herpesvirus 4 [Epstein-Barr virus]
cuuguccaggagac

SEQ ID NO: 1939492 - RNA, 18 nt, Human herpesvirus 4 [Epstein-Barr virus]
ugggaauaacaagggaag

SEQ ID NO: 1939493 - RNA, 12 nt, Human herpesvirus 4 [Epstein-Barr virus]
agagcucuggag

SEQ ID NO: 1939494 - RNA, 13 nt, Human herpesvirus 4 [Epstein-Barr virus]
gaacugauggcaa

SEQ ID NO: 1939495 - RNA, 15 nt, Human herpesvirus 4 [Epstein-Barr virus]
gaggcuucccgccua

SEQ ID NO: 1939496 - RNA, 23 nt, Human herpesvirus 4 [Epstein-Barr virus]
ccccacggggugcucccccugga

SEQ ID NO: 1939497 - RNA, 16 nt, Human herpesvirus 4 [Epstein-Barr virus]
ccuugggggccuggac

SEQ ID NO: 1939498 - RNA, 19 nt, Human herpesvirus 4 [Epstein-Barr virus]
ucaucaguaaaucugucuc

SEQ ID NO: 1939499 - RNA, 11 nt, Human herpesvirus 4 [Epstein-Barr virus]
aucuggcucuc

SEQ ID NO: 1939500 - RNA, 22 nt, Human herpesvirus 4 [Epstein-Barr virus]
gcccccugucucuuucuggcca

SEQ ID NO: 1939501 - RNA, 16 nt, Human herpesvirus 4 [Epstein-Barr virus]
cagacucucuucagug

SEQ ID NO: 1939502 - RNA, 12 nt, Human herpesvirus 4 [Epstein-Barr virus]
agggcagacugc

SEQ ID NO: 1939503 - RNA, 17 nt, Human herpesvirus 4 [Epstein-Barr virus]
ccagcaaccaauguauc

SEQ ID NO: 1939504 - RNA, 13 nt, Human herpesvirus 4 [Epstein-Barr virus]
gccuucuuccuag

SEQ ID NO: 1939505 - RNA, 12 nt, Human herpesvirus 4 [Epstein-Barr virus]
gacggugucugu

SEQ ID NO: 1939506 - RNA, 16 nt, Human herpesvirus 4 [Epstein-Barr virus]
cucaaacagucccgag

SEQ ID NO: 1939507 - RNA, 21 nt, Human herpesvirus 4 [Epstein-Barr virus]
agacguguguggcuguagcca

SEQ ID NO: 1939508 - RNA, 19 nt, Human herpesvirus 4 [Epstein-Barr virus]
gcacacacucccuuagcca

SEQ ID NO: 1939509 - RNA, 22 nt, Human herpesvirus 4 [Epstein-Barr virus]
ucucaugggggaaugagggaaa

SEQ ID NO: 1939510 - RNA, 19 nt, Human herpesvirus 4 [Epstein-Barr virus]
cuucacuaaggcaguccag

SEQ ID NO: 1939511 - RNA, 17 nt, Human herpesvirus 4 [Epstein-Barr virus]
cugcaccaguggcugcc

SEQ ID NO: 1939512 - RNA, 18 nt, Human herpesvirus 4 [Epstein-Barr virus]
ugaggaggcacacaaaau

SEQ ID NO: 1939513 - RNA, 20 nt, Human herpesvirus 4 [Epstein-Barr virus]
gccucuacgccccagaugaa

SEQ ID NO: 1939514 - RNA, 18 nt, Human herpesvirus 4 [Epstein-Barr virus]
caaacaugggcugcuaua

SEQ ID NO: 1939515 - RNA, 18 nt, Human herpesvirus 4 [Epstein-Barr virus]
ggcagcacacgaagccug

SEQ ID NO: 1939516 - RNA, 20 nt, Human herpesvirus 4 [Epstein-Barr virus]
gccaggccgccaugcucagg

SEQ ID NO: 1939517 - RNA, 18 nt, Human herpesvirus 4 [Epstein-Barr virus]
acccggaccaaugccaaa

SEQ ID NO: 1939518 - RNA, 19 nt, Human herpesvirus 4 [Epstein-Barr virus]
uagaauccagccagugguc

SEQ ID NO: 1939519 - RNA, 19 nt, Human herpesvirus 4 [Epstein-Barr virus]
acugcagugggccucucug

SEQ ID NO: 1939520 - RNA, 16 nt, Human herpesvirus 4 [Epstein-Barr virus]
aagauguaaagaucua

SEQ ID NO: 1939521 - RNA, 15 nt, Human herpesvirus 4 [Epstein-Barr virus]
guugcaguauguaca

SEQ ID NO: 1939522 - RNA, 19 nt, Human herpesvirus 4 [Epstein-Barr virus]
gccuaaacgugauggugcu

SEQ ID NO: 1939523 - RNA, 20 nt, Human herpesvirus 4 [Epstein-Barr virus]
guauuccucaagcccuucuu

SEQ ID NO: 1939524 - RNA, 12 nt, Human herpesvirus 4 [Epstein-Barr virus]
agggccaagaca

SEQ ID NO: 1939525 - RNA, 19 nt, Human herpesvirus 4 [Epstein-Barr virus]
ugguggguguccucuacug

SEQ ID NO: 1939526 - RNA, 22 nt, Human herpesvirus 4 [Epstein-Barr virus]
ggaauuugugguuuggggcagg

SEQ ID NO: 1939527 - RNA, 13 nt, Human herpesvirus 4 [Epstein-Barr virus]
ggcgcaggggagg

SEQ ID NO: 1939528 - RNA, 13 nt, Human herpesvirus 4 [Epstein-Barr virus]
gucuacccagagg

SEQ ID NO: 1939529 - RNA, 16 nt, Human herpesvirus 4 [Epstein-Barr virus]
cccgaguccaaggccc

SEQ ID NO: 1939530 - RNA, 17 nt, Human herpesvirus 4 [Epstein-Barr virus]
accuuccagacuaugca

SEQ ID NO: 1939531 - RNA, 18 nt, Human herpesvirus 4 [Epstein-Barr virus]
gaaccugagccugagcca

SEQ ID NO: 1939532 - RNA, 19 nt, Human herpesvirus 4 [Epstein-Barr virus]
ucuuuugcucuuaaccauu

SEQ ID NO: 1939533 - RNA, 18 nt, Human herpesvirus 4 [Epstein-Barr virus]
cugauucccccugcucau

SEQ ID NO: 1939534 - RNA, 23 nt, Human herpesvirus 4 [Epstein-Barr virus]
cagacaugguguagacagauccc

SEQ ID NO: 1939535 - RNA, 17 nt, Human herpesvirus 4 [Epstein-Barr virus]
ccagacucugcuuucug

SEQ ID NO: 1939536 - RNA, 16 nt, Human herpesvirus 4 [Epstein-Barr virus]
gcgccagcagggcaca

SEQ ID NO: 1939537 - RNA, 13 nt, Human herpesvirus 4 [Epstein-Barr virus]
acgcuccuggguu

SEQ ID NO: 1939538 - RNA, 17 nt, Human herpesvirus 4 [Epstein-Barr virus]
cgcccugagcuggacga

SEQ ID NO: 1939539 - RNA, 22 nt, Human herpesvirus 4 [Epstein-Barr virus]
uguucccuaagcagcugagggg

SEQ ID NO: 1939540 - RNA, 20 nt, Human herpesvirus 4 [Epstein-Barr virus]
aggccauacgucuagccaca

SEQ ID NO: 1939541 - RNA, 19 nt, Human herpesvirus 4 [Epstein-Barr virus]
caguggaccucaaagaaga

SEQ ID NO: 1939542 - RNA, 14 nt, Human herpesvirus 4 [Epstein-Barr virus]
aucuggggccaagg

SEQ ID NO: 1939543 - RNA, 23 nt, Human herpesvirus 4 [Epstein-Barr virus]
aguggaccucaaagaagaggggg

SEQ ID NO: 1939544 - RNA, 12 nt, Human herpesvirus 4 [Epstein-Barr virus]
cuggccagcacc

SEQ ID NO: 1939545 - RNA, 11 nt, Human herpesvirus 4 [Epstein-Barr virus]
cagccauggcc

SEQ ID NO: 1939546 - RNA, 14 nt, Human herpesvirus 4 [Epstein-Barr virus]
cagccccucauccc

SEQ ID NO: 1939547 - RNA, 16 nt, Human herpesvirus 4 [Epstein-Barr virus]
aacacuccacagaugg

SEQ ID NO: 1939548 - RNA, 23 nt, Human herpesvirus 4 [Epstein-Barr virus]
cagggcucuguucacgcgauggu

SEQ ID NO: 1939549 - RNA, 17 nt, Human herpesvirus 4 [Epstein-Barr virus]
ugcacaggcuuggaaac

SEQ ID NO: 1939550 - RNA, 22 nt, Human herpesvirus 4 [Epstein-Barr virus]
cacagaggugauguagaggcgc

SEQ ID NO: 1939551 - RNA, 13 nt, Human herpesvirus 4 [Epstein-Barr virus]
cugguaguaggca

SEQ ID NO: 1939552 - RNA, 22 nt, Human herpesvirus 4 [Epstein-Barr virus]
augggaauaacaagggaagagg

SEQ ID NO: 1939553 - RNA, 18 nt, Human herpesvirus 4 [Epstein-Barr virus]
acgccguggcccugagca

SEQ ID NO: 1939554 - RNA, 16 nt, Human herpesvirus 4 [Epstein-Barr virus]
ccaugccuccccagca

SEQ ID NO: 1939555 - RNA, 13 nt, Human herpesvirus 4 [Epstein-Barr virus]
augacacaggaca

SEQ ID NO: 1939556 - RNA, 17 nt, Human herpesvirus 4 [Epstein-Barr virus]
acgaggacgagaaggag

SEQ ID NO: 1939557 - RNA, 23 nt, Human herpesvirus 4 [Epstein-Barr virus]
cuaacacgcuuuugucugccugg

SEQ ID NO: 1939558 - RNA, 17 nt, Human herpesvirus 4 [Epstein-Barr virus]
gcacggucgccccuccg

SEQ ID NO: 1939559 - RNA, 14 nt, Human herpesvirus 4 [Epstein-Barr virus]
cugcuggucauggc

SEQ ID NO: 1939560 - RNA, 19 nt, Human herpesvirus 4 [Epstein-Barr virus]
cccucgguggugggcugcu

SEQ ID NO: 1939561 - RNA, 16 nt, Human herpesvirus 4 [Epstein-Barr virus]
ugagaacuuucuucua

SEQ ID NO: 1939562 - RNA, 24 nt, Human herpesvirus 4 [Epstein-Barr virus]
gaggauggcacgguccagaagcag

SEQ ID NO: 1939563 - RNA, 22 nt, Human herpesvirus 4 [Epstein-Barr virus]
agacgagucugacuacagcgag

SEQ ID NO: 1939564 - RNA, 23 nt, Human herpesvirus 4 [Epstein-Barr virus]
gcccuuggaacugacgggcacug

SEQ ID NO: 1939565 - RNA, 15 nt, Human herpesvirus 4 [Epstein-Barr virus]
gaccuacgcugcccu

SEQ ID NO: 1939566 - RNA, 21 nt, Human herpesvirus 4 [Epstein-Barr virus]
cugcacaaaggaaacugcuga

SEQ ID NO: 1939567 - RNA, 20 nt, Human herpesvirus 4 [Epstein-Barr virus]
cagauagccggccaggcaga

SEQ ID NO: 1939568 - RNA, 18 nt, Human herpesvirus 4 [Epstein-Barr virus]
cuucagcuccagggccag

SEQ ID NO: 1939569 - RNA, 19 nt, Human herpesvirus 4 [Epstein-Barr virus]
gacaugagcauggaagaca

SEQ ID NO: 1939570 - RNA, 16 nt, Human herpesvirus 4 [Epstein-Barr virus]
auuguucuacuccugg

SEQ ID NO: 1939571 - RNA, 16 nt, Human herpesvirus 4 [Epstein-Barr virus]
cgugggauggcggggc

SEQ ID NO: 1939572 - RNA, 20 nt, Human herpesvirus 4 [Epstein-Barr virus]
cggccucgccuucuccucag

SEQ ID NO: 1939573 - RNA, 19 nt, Human herpesvirus 4 [Epstein-Barr virus]
gcgaacauuuauucauuau

SEQ ID NO: 1939574 - RNA, 18 nt, Human herpesvirus 4 [Epstein-Barr virus]
cauuggcagcagcucugg

SEQ ID NO: 1939575 - RNA, 22 nt, Human herpesvirus 4 [Epstein-Barr virus]
ucccgugcuuuuugccaggccu

SEQ ID NO: 1939576 - RNA, 18 nt, Human herpesvirus 4 [Epstein-Barr virus]
gggugaccacugagggag

SEQ ID NO: 1939577 - RNA, 19 nt, Human herpesvirus 4 [Epstein-Barr virus]
ccagaaucgguaaggaggg

SEQ ID NO: 1939578 - RNA, 19 nt, Human herpesvirus 4 [Epstein-Barr virus]
ggagggagccugcccaucc

SEQ ID NO: 1939579 - RNA, 15 nt, Human herpesvirus 4 [Epstein-Barr virus]
ggugaucgacuccag

SEQ ID NO: 1939580 - RNA, 20 nt, Human herpesvirus 4 [Epstein-Barr virus]
agcagcccggccgaggccug

SEQ ID NO: 1939581 - RNA, 21 nt, Human herpesvirus 4 [Epstein-Barr virus]
aaaaggggcagcaaucucggc

SEQ ID NO: 1939582 - RNA, 19 nt, Human herpesvirus 4 [Epstein-Barr virus]
caggccgccaugcucaggg

SEQ ID NO: 1939583 - RNA, 12 nt, Human herpesvirus 4 [Epstein-Barr virus]
cuggaggccuca

SEQ ID NO: 1939584 - RNA, 20 nt, Human herpesvirus 4 [Epstein-Barr virus]
gauuuccuacaacucagccc

SEQ ID NO: 1939585 - RNA, 18 nt, Human herpesvirus 4 [Epstein-Barr virus]
ggccaggcagaggaaggc

SEQ ID NO: 1939586 - RNA, 21 nt, Human herpesvirus 4 [Epstein-Barr virus]
gccccaauucuugcacccacc

SEQ ID NO: 1939587 - RNA, 20 nt, Human herpesvirus 4 [Epstein-Barr virus]
gagcugggcaaagauuuucu

SEQ ID NO: 1939588 - RNA, 15 nt, Human herpesvirus 4 [Epstein-Barr virus]
ugcaugagccacagg

SEQ ID NO: 1939589 - RNA, 19 nt, Human herpesvirus 4 [Epstein-Barr virus]
caacacaaccacggugaca

SEQ ID NO: 1939590 - RNA, 20 nt, Human herpesvirus 4 [Epstein-Barr virus]
gccuauggguuaccaggcau

SEQ ID NO: 1939591 - RNA, 18 nt, Human herpesvirus 4 [Epstein-Barr virus]
guacccgggucccgccuc

SEQ ID NO: 1939592 - RNA, 19 nt, Human herpesvirus 4 [Epstein-Barr virus]
gcccacacagcgccagcag

SEQ ID NO: 1939593 - RNA, 21 nt, Human herpesvirus 4 [Epstein-Barr virus]
ggaaagaggucccauguacag

SEQ ID NO: 1939594 - RNA, 17 nt, Human herpesvirus 4 [Epstein-Barr virus]
ggccaugcgcgcccugu

SEQ ID NO: 1939595 - RNA, 21 nt, Human herpesvirus 4 [Epstein-Barr virus]
caagccgggggagaagcaccu

SEQ ID NO: 1939596 - RNA, 14 nt, Human herpesvirus 4 [Epstein-Barr virus]
gcgacgcucccggg

SEQ ID NO: 1939597 - RNA, 19 nt, Human herpesvirus 4 [Epstein-Barr virus]
uggcuucuuagaugaggag

SEQ ID NO: 1939598 - RNA, 22 nt, Human herpesvirus 4 [Epstein-Barr virus]
cugugcugacccuucugcugcu

SEQ ID NO: 1939599 - RNA, 23 nt, Human herpesvirus 4 [Epstein-Barr virus]
cccaccauaugaugacgccgaga

SEQ ID NO: 1939600 - RNA, 22 nt, Human herpesvirus 4 [Epstein-Barr virus]
gccugagacagaggugcucaag

SEQ ID NO: 1939601 - RNA, 19 nt, Human herpesvirus 4 [Epstein-Barr virus]
gucggacgaggaggaagag

SEQ ID NO: 1939602 - RNA, 20 nt, Human herpesvirus 4 [Epstein-Barr virus]
aaggugguuauuuugggcca

SEQ ID NO: 1939603 - RNA, 14 nt, Human herpesvirus 4 [Epstein-Barr virus]
caggaggggcagga

SEQ ID NO: 1939604 - RNA, 14 nt, Human herpesvirus 4 [Epstein-Barr virus]
ggccaggcagagga

SEQ ID NO: 1939605 - RNA, 21 nt, Human herpesvirus 4 [Epstein-Barr virus]
gacugaggggguacggagagg

SEQ ID NO: 1939606 - RNA, 22 nt, Human herpesvirus 4 [Epstein-Barr virus]
uguucagggccgugcauggcag

SEQ ID NO: 1939607 - RNA, 15 nt, Human herpesvirus 4 [Epstein-Barr virus]
cugcaaagggaccca

SEQ ID NO: 1939608 - RNA, 23 nt, Human herpesvirus 4 [Epstein-Barr virus]
gcggcccagcagauccagggccc

SEQ ID NO: 1939609 - RNA, 17 nt, Human herpesvirus 4 [Epstein-Barr virus]
ccgccccgggcccggga

SEQ ID NO: 1939610 - RNA, 18 nt, Human herpesvirus 4 [Epstein-Barr virus]
gacacuuuagagcucugg

SEQ ID NO: 1939611 - RNA, 14 nt, Human herpesvirus 4 [Epstein-Barr virus]
ccggccaggcagag

SEQ ID NO: 1939612 - RNA, 12 nt, Human herpesvirus 4 [Epstein-Barr virus]
ugccagaggccc

SEQ ID NO: 1939613 - RNA, 15 nt, Human herpesvirus 4 [Epstein-Barr virus]
aagacuauguucucu

SEQ ID NO: 1939614 - RNA, 23 nt, Human herpesvirus 4 [Epstein-Barr virus]
auugggugguggcagcaggcgcu

SEQ ID NO: 1939615 - RNA, 19 nt, Human herpesvirus 4 [Epstein-Barr virus]
uucucuaaucccucuggga

SEQ ID NO: 1939616 - RNA, 23 nt, Human herpesvirus 4 [Epstein-Barr virus]
uccugugugaccccucacuuugu

SEQ ID NO: 1939617 - RNA, 17 nt, Human herpesvirus 4 [Epstein-Barr virus]
gugcuuuccaccggugg

SEQ ID NO: 1939618 - RNA, 22 nt, Human herpesvirus 4 [Epstein-Barr virus]
acccggucgcaugguggcuucu

SEQ ID NO: 1939619 - RNA, 17 nt, Human herpesvirus 4 [Epstein-Barr virus]
aggagggcugguugggg

SEQ ID NO: 1939620 - RNA, 19 nt, Human herpesvirus 4 [Epstein-Barr virus]
acucaccaagauuguucca

SEQ ID NO: 1939621 - RNA, 14 nt, Human herpesvirus 4 [Epstein-Barr virus]
auuuugggccagga

SEQ ID NO: 1939622 - RNA, 21 nt, Human herpesvirus 4 [Epstein-Barr virus]
gacgccugcggacucaggcca

SEQ ID NO: 1939623 - RNA, 18 nt, Human herpesvirus 4 [Epstein-Barr virus]
cccugcucauaccuccac

SEQ ID NO: 1939624 - RNA, 21 nt, Human herpesvirus 4 [Epstein-Barr virus]
gcccugucaccaggccugcca

SEQ ID NO: 1939625 - RNA, 22 nt, Human herpesvirus 4 [Epstein-Barr virus]
gcuggacgugaaccuccccccc

SEQ ID NO: 1939626 - RNA, 18 nt, Human herpesvirus 4 [Epstein-Barr virus]
cugacucucauguacuuu

SEQ ID NO: 1939627 - RNA, 16 nt, Human herpesvirus 4 [Epstein-Barr virus]
gcccagugcacccagg

SEQ ID NO: 1939628 - RNA, 22 nt, Human herpesvirus 4 [Epstein-Barr virus]
gagucugacuacucagaugaag

SEQ ID NO: 1939629 - RNA, 14 nt, Human herpesvirus 4 [Epstein-Barr virus]
gccggcagccuggc

SEQ ID NO: 1939630 - RNA, 15 nt, Human herpesvirus 4 [Epstein-Barr virus]
gcugaugugcugccc

SEQ ID NO: 1939631 - RNA, 17 nt, Human herpesvirus 4 [Epstein-Barr virus]
cuugugguucuccugau

SEQ ID NO: 1939632 - RNA, 24 nt, Human herpesvirus 4 [Epstein-Barr virus]
ccugcagaguaauugcaguggacc

SEQ ID NO: 1939633 - RNA, 20 nt, Human herpesvirus 4 [Epstein-Barr virus]
cucgccgcuaguugguccag

SEQ ID NO: 1939634 - RNA, 19 nt, Human herpesvirus 4 [Epstein-Barr virus]
ggccagcaaaaccagcccg

SEQ ID NO: 1939635 - RNA, 15 nt, Human herpesvirus 4 [Epstein-Barr virus]
ugcccgccgugaacu

SEQ ID NO: 1939636 - RNA, 22 nt, Human herpesvirus 4 [Epstein-Barr virus]
cauagagaugguguccggagac

SEQ ID NO: 1939637 - RNA, 21 nt, Human herpesvirus 4 [Epstein-Barr virus]
cccaccagaucgccugccacu

SEQ ID NO: 1939638 - RNA, 15 nt, Human herpesvirus 4 [Epstein-Barr virus]
ucuccugccugccuc

SEQ ID NO: 1939639 - RNA, 20 nt, Human herpesvirus 4 [Epstein-Barr virus]
cuuuaggcguaacuugucua

SEQ ID NO: 1939640 - RNA, 16 nt, Human herpesvirus 4 [Epstein-Barr virus]
ucaauuuugggagcuc

SEQ ID NO: 1939641 - RNA, 13 nt, Human herpesvirus 4 [Epstein-Barr virus]
gaauuauuuacca

SEQ ID NO: 1939642 - RNA, 16 nt, Human herpesvirus 4 [Epstein-Barr virus]
cuuagccacacugucu

SEQ ID NO: 1939643 - RNA, 16 nt, Human herpesvirus 4 [Epstein-Barr virus]
ucuggcugugcugacc

SEQ ID NO: 1939644 - RNA, 14 nt, Human herpesvirus 4 [Epstein-Barr virus]
cggguccuagcaca

SEQ ID NO: 1939645 - RNA, 19 nt, Human herpesvirus 4 [Epstein-Barr virus]
ccacuuccacagcaauggc

SEQ ID NO: 1939646 - RNA, 23 nt, Human herpesvirus 4 [Epstein-Barr virus]
agcuccgcgcucaacaccuucuc

SEQ ID NO: 1939647 - RNA, 23 nt, Human herpesvirus 4 [Epstein-Barr virus]
cuggcaaagauccccaguggagc

SEQ ID NO: 1939648 - RNA, 22 nt, Human herpesvirus 4 [Epstein-Barr virus]
ccacgggaaaaagaauagcuuc

SEQ ID NO: 1939649 - RNA, 20 nt, Human herpesvirus 4 [Epstein-Barr virus]
guggcacacauuacggugcu

SEQ ID NO: 1939650 - RNA, 17 nt, Human herpesvirus 4 [Epstein-Barr virus]
gccagcgccuccucgca

SEQ ID NO: 1939651 - RNA, 14 nt, Human herpesvirus 4 [Epstein-Barr virus]
ugcaccagcuccag

SEQ ID NO: 1939652 - RNA, 16 nt, Human herpesvirus 4 [Epstein-Barr virus]
aagaccaauacccagg

SEQ ID NO: 1939653 - RNA, 23 nt, Human herpesvirus 4 [Epstein-Barr virus]
gcaccuguccuugucugcugcca

SEQ ID NO: 1939654 - RNA, 21 nt, Human herpesvirus 4 [Epstein-Barr virus]
uggagaugauucaugggcugg

SEQ ID NO: 1939655 - RNA, 20 nt, Human herpesvirus 4 [Epstein-Barr virus]
ccagcagggccuugagccca

SEQ ID NO: 1939656 - RNA, 15 nt, Human herpesvirus 4 [Epstein-Barr virus]
gcgccguccacggcc

SEQ ID NO: 1939657 - RNA, 12 nt, Human herpesvirus 4 [Epstein-Barr virus]
cccuucugcugc

SEQ ID NO: 1939658 - RNA, 19 nt, Human herpesvirus 4 [Epstein-Barr virus]
gccagagaggcccacugca

SEQ ID NO: 1939659 - RNA, 15 nt, Human herpesvirus 4 [Epstein-Barr virus]
uccucaagcccuucu

SEQ ID NO: 1939660 - RNA, 15 nt, Human herpesvirus 4 [Epstein-Barr virus]
cuccgugguccugag

SEQ ID NO: 1939661 - RNA, 17 nt, Human herpesvirus 4 [Epstein-Barr virus]
gccaggcccgaccugcc

SEQ ID NO: 1939662 - RNA, 23 nt, Human herpesvirus 4 [Epstein-Barr virus]
gggaugaacccuggggcaacaga

SEQ ID NO: 1939663 - RNA, 22 nt, Human herpesvirus 4 [Epstein-Barr virus]
aaucucucccacggaccccccu

SEQ ID NO: 1939664 - RNA, 17 nt, Human herpesvirus 4 [Epstein-Barr virus]
gcccagaggcgcugugg

SEQ ID NO: 1939665 - RNA, 14 nt, Human herpesvirus 4 [Epstein-Barr virus]
augucacguguccu

SEQ ID NO: 1939666 - RNA, 22 nt, Human herpesvirus 4 [Epstein-Barr virus]
cugccuccggccgccccgggcc

SEQ ID NO: 1939667 - RNA, 22 nt, Human herpesvirus 4 [Epstein-Barr virus]
guaccagcccuuuuuccagugg

SEQ ID NO: 1939668 - RNA, 16 nt, Human herpesvirus 4 [Epstein-Barr virus]
ccuaugccuggaagaa

SEQ ID NO: 1939669 - RNA, 17 nt, Human herpesvirus 4 [Epstein-Barr virus]
gggcggcguggagcugg

SEQ ID NO: 1939670 - RNA, 23 nt, Human herpesvirus 4 [Epstein-Barr virus]
cacaccuaaauuuagcacguccc

SEQ ID NO: 1939671 - RNA, 21 nt, Human herpesvirus 4 [Epstein-Barr virus]
gaaggcgugggugucagaccu

SEQ ID NO: 1939672 - RNA, 23 nt, Human herpesvirus 4 [Epstein-Barr virus]
uccaaguugcauuggcugcaaag

SEQ ID NO: 1939673 - RNA, 16 nt, Human herpesvirus 4 [Epstein-Barr virus]
uaacugugucccacuc

SEQ ID NO: 1939674 - RNA, 12 nt, Human herpesvirus 4 [Epstein-Barr virus]
aucgcagcucua

SEQ ID NO: 1939675 - RNA, 14 nt, Human herpesvirus 4 [Epstein-Barr virus]
acucccaccacccc

SEQ ID NO: 1939676 - RNA, 15 nt, Human herpesvirus 4 [Epstein-Barr virus]
gccagguacaggacc

SEQ ID NO: 1939677 - RNA, 22 nt, Human herpesvirus 4 [Epstein-Barr virus]
acacuucugaaaacugccuccu

SEQ ID NO: 1939678 - RNA, 17 nt, Human herpesvirus 4 [Epstein-Barr virus]
agccccauggugugaga

SEQ ID NO: 1939679 - RNA, 14 nt, Human herpesvirus 4 [Epstein-Barr virus]
cuccaaaaaguugg

SEQ ID NO: 1939680 - RNA, 18 nt, Human herpesvirus 4 [Epstein-Barr virus]
acccccagcgcuggcucc

SEQ ID NO: 1939681 - RNA, 13 nt, Human herpesvirus 4 [Epstein-Barr virus]
ggcgaaggcgugc

SEQ ID NO: 1939682 - RNA, 17 nt, Human herpesvirus 4 [Epstein-Barr virus]
uccucugccuggccggc

SEQ ID NO: 1939683 - RNA, 19 nt, Human herpesvirus 4 [Epstein-Barr virus]
aacauuugaggaggcacac

SEQ ID NO: 1939684 - RNA, 13 nt, Human herpesvirus 4 [Epstein-Barr virus]
cgguugagcugag

SEQ ID NO: 1939685 - RNA, 12 nt, Human herpesvirus 4 [Epstein-Barr virus]
ggguacuggcau

SEQ ID NO: 1939686 - RNA, 21 nt, Human herpesvirus 4 [Epstein-Barr virus]
ugacuguaaucacuggcaaag

SEQ ID NO: 1939687 - RNA, 15 nt, Human herpesvirus 4 [Epstein-Barr virus]
ccaccacucccacca

SEQ ID NO: 1939688 - RNA, 11 nt, Human herpesvirus 4 [Epstein-Barr virus]
ggccaggaccc

SEQ ID NO: 1939689 - RNA, 20 nt, Human herpesvirus 4 [Epstein-Barr virus]
ccaugcaaguggaugcaucu

SEQ ID NO: 1939690 - RNA, 22 nt, Human herpesvirus 4 [Epstein-Barr virus]
ccgggcgcccccaaacuuuguc

SEQ ID NO: 1939691 - RNA, 12 nt, Human herpesvirus 4 [Epstein-Barr virus]
gcggcugugagc

SEQ ID NO: 1939692 - RNA, 13 nt, Human herpesvirus 4 [Epstein-Barr virus]
gcugcgccuccug

SEQ ID NO: 1939693 - RNA, 14 nt, Human herpesvirus 4 [Epstein-Barr virus]
cauaucgcaacacu

SEQ ID NO: 1939694 - RNA, 15 nt, Human herpesvirus 4 [Epstein-Barr virus]
ucucccacugucacu

SEQ ID NO: 1939695 - RNA, 22 nt, Human herpesvirus 4 [Epstein-Barr virus]
gcaucggggcggacgccuccuc

SEQ ID NO: 1939696 - RNA, 16 nt, Human herpesvirus 4 [Epstein-Barr virus]
ccugguacaggaccau

SEQ ID NO: 1939697 - RNA, 22 nt, Human herpesvirus 4 [Epstein-Barr virus]
ggagacguggguccccucugcc

SEQ ID NO: 1939698 - RNA, 15 nt, Human herpesvirus 4 [Epstein-Barr virus]
cuugaggugggcuga

SEQ ID NO: 1939699 - RNA, 20 nt, Human herpesvirus 4 [Epstein-Barr virus]
gcuguggccggugcugccag

SEQ ID NO: 1939700 - RNA, 20 nt, Human herpesvirus 4 [Epstein-Barr virus]
acagcagcagugugugaaga

SEQ ID NO: 1939701 - RNA, 16 nt, Human herpesvirus 4 [Epstein-Barr virus]
ggcaaacagggcagag

SEQ ID NO: 1939702 - RNA, 19 nt, Human herpesvirus 4 [Epstein-Barr virus]
uacuuauuggagaugcucu

SEQ ID NO: 1939703 - RNA, 18 nt, Human herpesvirus 4 [Epstein-Barr virus]
ggucaaguaccagcuggu

SEQ ID NO: 1939704 - RNA, 15 nt, Human herpesvirus 4 [Epstein-Barr virus]
accccugggcucuca

SEQ ID NO: 1939705 - RNA, 14 nt, Human herpesvirus 4 [Epstein-Barr virus]
gcugaagcccaaga

SEQ ID NO: 1939706 - RNA, 22 nt, Human herpesvirus 4 [Epstein-Barr virus]
cucuucauuagauucacguucc

SEQ ID NO: 1939707 - RNA, 19 nt, Human herpesvirus 4 [Epstein-Barr virus]
aggcgcuguggagagaggc

SEQ ID NO: 1939708 - RNA, 23 nt, Human herpesvirus 4 [Epstein-Barr virus]
ggccggaaccugagccugagcca

SEQ ID NO: 1939709 - RNA, 12 nt, Human herpesvirus 4 [Epstein-Barr virus]
agcaauggcacg

SEQ ID NO: 1939710 - RNA, 19 nt, Human herpesvirus 4 [Epstein-Barr virus]
ucaccccgaguccaaggcc

SEQ ID NO: 1939711 - RNA, 15 nt, Human herpesvirus 4 [Epstein-Barr virus]
cuacuucgccaugcu

SEQ ID NO: 1939712 - RNA, 23 nt, Human herpesvirus 4 [Epstein-Barr virus]
cgcgcugcucgccccugguagaa

SEQ ID NO: 1939713 - RNA, 20 nt, Human herpesvirus 4 [Epstein-Barr virus]
caugaggagguaauuagcac

SEQ ID NO: 1939714 - RNA, 17 nt, Human herpesvirus 4 [Epstein-Barr virus]
cgcaguccgccaugacc

SEQ ID NO: 1939715 - RNA, 18 nt, Human herpesvirus 4 [Epstein-Barr virus]
uacccugcauggccaggc

SEQ ID NO: 1939716 - RNA, 23 nt, Human herpesvirus 4 [Epstein-Barr virus]
gggaguaaggccgcugccaggcc

SEQ ID NO: 1939717 - RNA, 14 nt, Human herpesvirus 4 [Epstein-Barr virus]
gcgagggggccugg

SEQ ID NO: 1939718 - RNA, 17 nt, Human herpesvirus 4 [Epstein-Barr virus]
cuaucacagggacaucu

SEQ ID NO: 1939719 - RNA, 22 nt, Human herpesvirus 4 [Epstein-Barr virus]
augauaaugaugaggagcaccg

SEQ ID NO: 1939720 - RNA, 21 nt, Human herpesvirus 4 [Epstein-Barr virus]
cggcggacccgaucagagccc

SEQ ID NO: 1939721 - RNA, 18 nt, Human herpesvirus 4 [Epstein-Barr virus]
acuaugacaccuaucugu

SEQ ID NO: 1939722 - RNA, 16 nt, Human herpesvirus 4 [Epstein-Barr virus]
aaucccucugggagaa

SEQ ID NO: 1939723 - RNA, 22 nt, Human herpesvirus 4 [Epstein-Barr virus]
cucuggucgcccccucugccuc

SEQ ID NO: 1939724 - RNA, 10 nt, Human herpesvirus 4 [Epstein-Barr virus]
ggugcucccc

SEQ ID NO: 1939725 - RNA, 12 nt, Human herpesvirus 4 [Epstein-Barr virus]
uucaaccuaauu

SEQ ID NO: 1939726 - RNA, 15 nt, Human herpesvirus 4 [Epstein-Barr virus]
aguccaggggccaca

SEQ ID NO: 1939727 - RNA, 14 nt, Human herpesvirus 4 [Epstein-Barr virus]
ggguccgugcggcu

SEQ ID NO: 1939728 - RNA, 12 nt, Human herpesvirus 4 [Epstein-Barr virus]
caccaccacccc

SEQ ID NO: 1939729 - RNA, 14 nt, Human herpesvirus 4 [Epstein-Barr virus]
ugaggcccagcccc

SEQ ID NO: 1939730 - RNA, 20 nt, Human herpesvirus 4 [Epstein-Barr virus]
auuuggacgagagcaugcca

SEQ ID NO: 1939731 - RNA, 16 nt, Human herpesvirus 4 [Epstein-Barr virus]
cuccggcugcccgucu

SEQ ID NO: 1939732 - RNA, 18 nt, Human herpesvirus 4 [Epstein-Barr virus]
cucuaacuuggcaucucu

SEQ ID NO: 1939733 - RNA, 22 nt, Human herpesvirus 4 [Epstein-Barr virus]
ggucacuaaaguuggucaggcu

SEQ ID NO: 1939734 - RNA, 23 nt, Human herpesvirus 4 [Epstein-Barr virus]
caggagcgggaggggcaggagca

SEQ ID NO: 1939735 - RNA, 18 nt, Human herpesvirus 4 [Epstein-Barr virus]
gguagauagguggucgca

SEQ ID NO: 1939736 - RNA, 18 nt, Human herpesvirus 4 [Epstein-Barr virus]
ucaggaucagggccaaga

SEQ ID NO: 1939737 - RNA, 21 nt, Human herpesvirus 4 [Epstein-Barr virus]
caugacgcugcugcuacuggc

SEQ ID NO: 1939738 - RNA, 20 nt, Human herpesvirus 4 [Epstein-Barr virus]
gccccgaugcggaggacugc

SEQ ID NO: 1939739 - RNA, 12 nt, Human herpesvirus 4 [Epstein-Barr virus]
cucuccagcccc

SEQ ID NO: 1939740 - RNA, 19 nt, Human herpesvirus 4 [Epstein-Barr virus]
aguuggcaucuuccuccuu

SEQ ID NO: 1939741 - RNA, 16 nt, Human herpesvirus 4 [Epstein-Barr virus]
cauuggcgucaggaga

SEQ ID NO: 1939742 - RNA, 18 nt, Human herpesvirus 4 [Epstein-Barr virus]
gcaggaggaggggcagga

SEQ ID NO: 1939743 - RNA, 21 nt, Human herpesvirus 4 [Epstein-Barr virus]
gggcacucucgagggugccug

SEQ ID NO: 1939744 - RNA, 18 nt, Human herpesvirus 4 [Epstein-Barr virus]
gcagccuguucauagaga

SEQ ID NO: 1939745 - RNA, 16 nt, Human herpesvirus 4 [Epstein-Barr virus]
uucugccccucagccu

SEQ ID NO: 1939746 - RNA, 16 nt, Human herpesvirus 4 [Epstein-Barr virus]
acucuuggugcagccc

SEQ ID NO: 1939747 - RNA, 16 nt, Human herpesvirus 4 [Epstein-Barr virus]
aguuuaccugguacau

SEQ ID NO: 1939748 - RNA, 12 nt, Human herpesvirus 4 [Epstein-Barr virus]
uaagccugccuc

SEQ ID NO: 1939749 - RNA, 17 nt, Human herpesvirus 4 [Epstein-Barr virus]
ucaucuggcucuccugu

SEQ ID NO: 1939750 - RNA, 14 nt, Human herpesvirus 4 [Epstein-Barr virus]
gacgcagaggccug

SEQ ID NO: 1939751 - RNA, 17 nt, Human herpesvirus 4 [Epstein-Barr virus]
aauggggguuggagaaa

SEQ ID NO: 1939752 - RNA, 12 nt, Human herpesvirus 4 [Epstein-Barr virus]
aauuuaaccaaa

SEQ ID NO: 1939753 - RNA, 23 nt, Human herpesvirus 4 [Epstein-Barr virus]
guggccagcucauaugccgcugc

SEQ ID NO: 1939754 - RNA, 19 nt, Human herpesvirus 4 [Epstein-Barr virus]
acgccugcuucacgccucg

SEQ ID NO: 1939755 - RNA, 20 nt, Human herpesvirus 4 [Epstein-Barr virus]
cccggguggugaggacggug

SEQ ID NO: 1939756 - RNA, 13 nt, Human herpesvirus 4 [Epstein-Barr virus]
ggccuccuggcca

SEQ ID NO: 1939757 - RNA, 19 nt, Human herpesvirus 4 [Epstein-Barr virus]
augggggaaugagggaaaa

SEQ ID NO: 1939758 - RNA, 21 nt, Human herpesvirus 4 [Epstein-Barr virus]
ucugaggaccuguugcuucag

SEQ ID NO: 1939759 - RNA, 15 nt, Human herpesvirus 4 [Epstein-Barr virus]
aacuuggaggcugcu

SEQ ID NO: 1939760 - RNA, 19 nt, Human herpesvirus 4 [Epstein-Barr virus]
cuccggggguccagccggg

SEQ ID NO: 1939761 - RNA, 16 nt, Human herpesvirus 4 [Epstein-Barr virus]
gcccagcccccucccg

SEQ ID NO: 1939762 - RNA, 18 nt, Human herpesvirus 4 [Epstein-Barr virus]
gaagcccaagaagaagcc

SEQ ID NO: 1939763 - RNA, 23 nt, Human herpesvirus 4 [Epstein-Barr virus]
ggugccugguaugcagaaggggc

SEQ ID NO: 1939764 - RNA, 19 nt, Human herpesvirus 4 [Epstein-Barr virus]
cgagcagcgcggcagaggc

SEQ ID NO: 1939765 - RNA, 22 nt, Human herpesvirus 4 [Epstein-Barr virus]
gggacgcagaaugugcagggau

SEQ ID NO: 1939766 - RNA, 17 nt, Human herpesvirus 4 [Epstein-Barr virus]
uuuaaacgagagaagag

SEQ ID NO: 1939767 - RNA, 23 nt, Human herpesvirus 4 [Epstein-Barr virus]
cugccucgaguaggugccuccag

SEQ ID NO: 1939768 - RNA, 16 nt, Human herpesvirus 4 [Epstein-Barr virus]
ccgcgcucggccuaga

SEQ ID NO: 1939769 - RNA, 15 nt, Human herpesvirus 4 [Epstein-Barr virus]
acccaaugugcaugg

SEQ ID NO: 1939770 - RNA, 19 nt, Human herpesvirus 4 [Epstein-Barr virus]
gcucgaccgggaugugaug

SEQ ID NO: 1939771 - RNA, 12 nt, Human herpesvirus 4 [Epstein-Barr virus]
ucuucugaagga

SEQ ID NO: 1939772 - RNA, 18 nt, Human herpesvirus 4 [Epstein-Barr virus]
ggccaccggggaggccag

SEQ ID NO: 1939773 - RNA, 17 nt, Human herpesvirus 4 [Epstein-Barr virus]
agugcuaugaccaugcc

SEQ ID NO: 1939774 - RNA, 13 nt, Human herpesvirus 4 [Epstein-Barr virus]
agauccaacuccg

SEQ ID NO: 1939775 - RNA, 21 nt, Human herpesvirus 4 [Epstein-Barr virus]
guccagaguucccggcugcuc

SEQ ID NO: 1939776 - RNA, 15 nt, Human herpesvirus 4 [Epstein-Barr virus]
cccugagcuggacga

SEQ ID NO: 1939777 - RNA, 18 nt, Human herpesvirus 4 [Epstein-Barr virus]
agcgccuccucgcaggcc

SEQ ID NO: 1939778 - RNA, 15 nt, Human herpesvirus 4 [Epstein-Barr virus]
uagauauagaggcuc

SEQ ID NO: 1939779 - RNA, 21 nt, Human herpesvirus 4 [Epstein-Barr virus]
ccggagacugaggccuuuguc

SEQ ID NO: 1939780 - RNA, 14 nt, Human herpesvirus 4 [Epstein-Barr virus]
acgccggccugcug

SEQ ID NO: 1939781 - RNA, 11 nt, Human herpesvirus 4 [Epstein-Barr virus]
gccccucagcc

SEQ ID NO: 1939782 - RNA, 13 nt, Human herpesvirus 4 [Epstein-Barr virus]
ccucccccugccc

SEQ ID NO: 1939783 - RNA, 13 nt, Human herpesvirus 4 [Epstein-Barr virus]
ugauaaugaugag

SEQ ID NO: 1939784 - RNA, 16 nt, Human herpesvirus 4 [Epstein-Barr virus]
cgggggugggcaccuc

SEQ ID NO: 1939785 - RNA, 12 nt, Human herpesvirus 4 [Epstein-Barr virus]
cuguaacugugg

SEQ ID NO: 1939786 - RNA, 17 nt, Human herpesvirus 4 [Epstein-Barr virus]
gaggacacgcuggucuu

SEQ ID NO: 1939787 - RNA, 15 nt, Human herpesvirus 4 [Epstein-Barr virus]
auacccagagcaaaa

SEQ ID NO: 1939788 - RNA, 14 nt, Human herpesvirus 4 [Epstein-Barr virus]
ggcugccgaagcag

SEQ ID NO: 1939789 - RNA, 18 nt, Human herpesvirus 4 [Epstein-Barr virus]
gcccagcagauccagggc

SEQ ID NO: 1939790 - RNA, 22 nt, Human herpesvirus 4 [Epstein-Barr virus]
ucaagcuuaugcagcaccucag

SEQ ID NO: 1939791 - RNA, 13 nt, Human herpesvirus 4 [Epstein-Barr virus]
uagccccagcccc

SEQ ID NO: 1939792 - RNA, 21 nt, Human herpesvirus 4 [Epstein-Barr virus]
ggccagcucauaugccgcugc

SEQ ID NO: 1939793 - RNA, 15 nt, Human herpesvirus 4 [Epstein-Barr virus]
cucuggacuuccaug

SEQ ID NO: 1939794 - RNA, 14 nt, Human herpesvirus 4 [Epstein-Barr virus]
uggacccugcugcg

SEQ ID NO: 1939795 - RNA, 16 nt, Human herpesvirus 4 [Epstein-Barr virus]
uccgggcuccaugucc

SEQ ID NO: 1939796 - RNA, 15 nt, Human herpesvirus 4 [Epstein-Barr virus]
guuugcuugccccgg

SEQ ID NO: 1939797 - RNA, 16 nt, Human herpesvirus 4 [Epstein-Barr virus]
gcgggauagcaggacg

SEQ ID NO: 1939798 - RNA, 24 nt, Human herpesvirus 4 [Epstein-Barr virus]
uaauacgcccgacaauaaaguuga

SEQ ID NO: 1939799 - RNA, 15 nt, Human herpesvirus 4 [Epstein-Barr virus]
gcugcugcuggucau

SEQ ID NO: 1939800 - RNA, 14 nt, Human herpesvirus 4 [Epstein-Barr virus]
cggcaguggaccuc

SEQ ID NO: 1939801 - RNA, 21 nt, Human herpesvirus 4 [Epstein-Barr virus]
acaugguuuaaggaaugaaca

SEQ ID NO: 1939802 - RNA, 16 nt, Human herpesvirus 4 [Epstein-Barr virus]
ugcacaggaugacagc

SEQ ID NO: 1939803 - RNA, 16 nt, Human herpesvirus 4 [Epstein-Barr virus]
guagagaucaggccaa

SEQ ID NO: 1939804 - RNA, 23 nt, Human herpesvirus 4 [Epstein-Barr virus]
gaagcccaagaagaagcccaccu

SEQ ID NO: 1939805 - RNA, 15 nt, Human herpesvirus 4 [Epstein-Barr virus]
ugccgugaaugcacg

SEQ ID NO: 1939806 - RNA, 18 nt, Human herpesvirus 4 [Epstein-Barr virus]
gacaccggugacagugcu

SEQ ID NO: 1939807 - RNA, 23 nt, Human herpesvirus 4 [Epstein-Barr virus]
ucugggcauaaauucuccugccu

SEQ ID NO: 1939808 - RNA, 18 nt, Human herpesvirus 4 [Epstein-Barr virus]
ccuugcguggugcugucc

SEQ ID NO: 1939809 - RNA, 13 nt, Human herpesvirus 4 [Epstein-Barr virus]
gguccccucugcc

SEQ ID NO: 1939810 - RNA, 18 nt, Human herpesvirus 4 [Epstein-Barr virus]
uaacccaauucccgccuc

SEQ ID NO: 1939811 - RNA, 15 nt, Human herpesvirus 4 [Epstein-Barr virus]
cgguggaacaggagc

SEQ ID NO: 1939812 - RNA, 14 nt, Human herpesvirus 4 [Epstein-Barr virus]
ggauauagcucugc

SEQ ID NO: 1939813 - RNA, 22 nt, Human herpesvirus 4 [Epstein-Barr virus]
gcacacacucccuuagccacac

SEQ ID NO: 1939814 - RNA, 16 nt, Human herpesvirus 4 [Epstein-Barr virus]
ggaaaagagagcugau

SEQ ID NO: 1939815 - RNA, 21 nt, Human herpesvirus 4 [Epstein-Barr virus]
cuucaagauugggugguggca

SEQ ID NO: 1939816 - RNA, 15 nt, Human herpesvirus 4 [Epstein-Barr virus]
cauugcagggcucug

SEQ ID NO: 1939817 - RNA, 21 nt, Human herpesvirus 4 [Epstein-Barr virus]
gcccgccuggcucgccuggag

SEQ ID NO: 1939818 - RNA, 16 nt, Human herpesvirus 4 [Epstein-Barr virus]
gcaucaugcgugacca

SEQ ID NO: 1939819 - RNA, 13 nt, Human herpesvirus 4 [Epstein-Barr virus]
acugaccacucag

SEQ ID NO: 1939820 - RNA, 16 nt, Human herpesvirus 4 [Epstein-Barr virus]
cggcucucaggccuca

SEQ ID NO: 1939821 - RNA, 14 nt, Human herpesvirus 4 [Epstein-Barr virus]
aagcuccggcugcc

SEQ ID NO: 1939822 - RNA, 19 nt, Human herpesvirus 4 [Epstein-Barr virus]
gcccccgccagcgccuccu

SEQ ID NO: 1939823 - RNA, 19 nt, Human herpesvirus 4 [Epstein-Barr virus]
cagcagauagugaacgugg

SEQ ID NO: 1939824 - RNA, 18 nt, Human herpesvirus 4 [Epstein-Barr virus]
gcagcaacgcccagggac

SEQ ID NO: 1939825 - RNA, 18 nt, Human herpesvirus 4 [Epstein-Barr virus]
gccauggccgagaagcuu

SEQ ID NO: 1939826 - RNA, 11 nt, Human herpesvirus 4 [Epstein-Barr virus]
aaagggcccag

SEQ ID NO: 1939827 - RNA, 19 nt, Human herpesvirus 4 [Epstein-Barr virus]
ucacauauccagagcugag

SEQ ID NO: 1939828 - RNA, 21 nt, Human herpesvirus 4 [Epstein-Barr virus]
aucucugauuauagcucuggc

SEQ ID NO: 1939829 - RNA, 15 nt, Human herpesvirus 4 [Epstein-Barr virus]
cuacgcugcccuaga

SEQ ID NO: 1939830 - RNA, 18 nt, Human herpesvirus 4 [Epstein-Barr virus]
cgugaguccagggcccug

SEQ ID NO: 1939831 - RNA, 23 nt, Human herpesvirus 4 [Epstein-Barr virus]
cacuccggacgcagaggccugca

SEQ ID NO: 1939832 - RNA, 17 nt, Human herpesvirus 4 [Epstein-Barr virus]
cgccugacccucuugca

SEQ ID NO: 1939833 - RNA, 16 nt, Human herpesvirus 4 [Epstein-Barr virus]
ccccuuccacguggcc

SEQ ID NO: 1939834 - RNA, 16 nt, Human herpesvirus 4 [Epstein-Barr virus]
gucaggagggcagaga

SEQ ID NO: 1939835 - RNA, 20 nt, Human herpesvirus 4 [Epstein-Barr virus]
gaacauccugcguggcugga

SEQ ID NO: 1939836 - RNA, 13 nt, Human herpesvirus 4 [Epstein-Barr virus]
gucacuccagcca

SEQ ID NO: 1939837 - RNA, 14 nt, Human herpesvirus 4 [Epstein-Barr virus]
cucggcacccaggc

SEQ ID NO: 1939838 - RNA, 17 nt, Human herpesvirus 4 [Epstein-Barr virus]
cggccuacgaggcccug

SEQ ID NO: 1939839 - RNA, 14 nt, Human herpesvirus 4 [Epstein-Barr virus]
gaccgcgcccuccu

SEQ ID NO: 1939840 - RNA, 22 nt, Human herpesvirus 4 [Epstein-Barr virus]
cuggcuuucguccucuggcucu

SEQ ID NO: 1939841 - RNA, 20 nt, Human herpesvirus 4 [Epstein-Barr virus]
ugcccuagagguuuugcuag

SEQ ID NO: 1939842 - RNA, 18 nt, Human herpesvirus 4 [Epstein-Barr virus]
ugcacgccaacagcgacc

SEQ ID NO: 1939843 - RNA, 15 nt, Human herpesvirus 4 [Epstein-Barr virus]
aauaaaguugaugau

SEQ ID NO: 1939844 - RNA, 16 nt, Human herpesvirus 4 [Epstein-Barr virus]
ggugaccuggccaggc

SEQ ID NO: 1939845 - RNA, 17 nt, Human herpesvirus 4 [Epstein-Barr virus]
ugcuccagugccuccgc

SEQ ID NO: 1939846 - RNA, 17 nt, Human herpesvirus 4 [Epstein-Barr virus]
cggcguggagcugggcc

SEQ ID NO: 1939847 - RNA, 18 nt, Human herpesvirus 4 [Epstein-Barr virus]
gaagaucgugaggccuga

SEQ ID NO: 1939848 - RNA, 17 nt, Human herpesvirus 4 [Epstein-Barr virus]
gcuacgcgggccacagg

SEQ ID NO: 1939849 - RNA, 20 nt, Human herpesvirus 4 [Epstein-Barr virus]
cgagaauuggcagacaccuu

SEQ ID NO: 1939850 - RNA, 14 nt, Human herpesvirus 4 [Epstein-Barr virus]
aaauaaauguuacu

SEQ ID NO: 1939851 - RNA, 15 nt, Human herpesvirus 4 [Epstein-Barr virus]
caggccucccagucu

SEQ ID NO: 1939852 - RNA, 21 nt, Human herpesvirus 4 [Epstein-Barr virus]
auugaaaccacgccugcuuca

SEQ ID NO: 1939853 - RNA, 21 nt, Human herpesvirus 4 [Epstein-Barr virus]
gcaugagccacaggcauugcu

SEQ ID NO: 1939854 - RNA, 22 nt, Human herpesvirus 4 [Epstein-Barr virus]
caugcacaccuuggcgggucau

SEQ ID NO: 1939855 - RNA, 12 nt, Human herpesvirus 4 [Epstein-Barr virus]
caucuggaccug

SEQ ID NO: 1939856 - RNA, 16 nt, Human herpesvirus 4 [Epstein-Barr virus]
caucaucagcgccguc

SEQ ID NO: 1939857 - RNA, 13 nt, Human herpesvirus 4 [Epstein-Barr virus]
acuuggaggcugc

SEQ ID NO: 1939858 - RNA, 21 nt, Human herpesvirus 4 [Epstein-Barr virus]
cgaccccauaucgcaacacug

SEQ ID NO: 1939859 - RNA, 16 nt, Human herpesvirus 4 [Epstein-Barr virus]
ccggagacugaggccu

SEQ ID NO: 1939860 - RNA, 18 nt, Human herpesvirus 4 [Epstein-Barr virus]
gcggcccagcagauccag

SEQ ID NO: 1939861 - RNA, 13 nt, Human herpesvirus 4 [Epstein-Barr virus]
ccuccucaccacu

SEQ ID NO: 1939862 - RNA, 20 nt, Human herpesvirus 4 [Epstein-Barr virus]
gagcaggaggggcaggagca

SEQ ID NO: 1939863 - RNA, 19 nt, Human herpesvirus 4 [Epstein-Barr virus]
cggggagcggcaagggcuc

SEQ ID NO: 1939864 - RNA, 23 nt, Human herpesvirus 4 [Epstein-Barr virus]
cacugaugagucugacuacucag

SEQ ID NO: 1939865 - RNA, 20 nt, Human herpesvirus 4 [Epstein-Barr virus]
uugucuacaucccauaccua

SEQ ID NO: 1939866 - RNA, 14 nt, Human herpesvirus 4 [Epstein-Barr virus]
ccgugcaccugcca

SEQ ID NO: 1939867 - RNA, 20 nt, Human herpesvirus 4 [Epstein-Barr virus]
ugcaggccuggacagcacaa

SEQ ID NO: 1939868 - RNA, 23 nt, Human herpesvirus 4 [Epstein-Barr virus]
gaccaaugccaaagcugaagaac

SEQ ID NO: 1939869 - RNA, 18 nt, Human herpesvirus 4 [Epstein-Barr virus]
cccaucugagggcaguga

SEQ ID NO: 1939870 - RNA, 16 nt, Human herpesvirus 4 [Epstein-Barr virus]
cugacauauguacaau

SEQ ID NO: 1939871 - RNA, 13 nt, Human herpesvirus 4 [Epstein-Barr virus]
gugcccaagccug

SEQ ID NO: 1939872 - RNA, 21 nt, Human herpesvirus 4 [Epstein-Barr virus]
acggcccggggguggcagccc

SEQ ID NO: 1939873 - RNA, 18 nt, Human herpesvirus 4 [Epstein-Barr virus]
ggacguaucugggcacuu

SEQ ID NO: 1939874 - RNA, 17 nt, Human herpesvirus 4 [Epstein-Barr virus]
gcagugucccugcugcc

SEQ ID NO: 1939875 - RNA, 20 nt, Human herpesvirus 4 [Epstein-Barr virus]
cugcacgagaccccugggcu

SEQ ID NO: 1939876 - RNA, 11 nt, Human herpesvirus 4 [Epstein-Barr virus]
auucucagaug

SEQ ID NO: 1939877 - RNA, 13 nt, Human herpesvirus 4 [Epstein-Barr virus]
aggagcaggaggg

SEQ ID NO: 1939878 - RNA, 17 nt, Human herpesvirus 4 [Epstein-Barr virus]
uacugauugucgcuggc

SEQ ID NO: 1939879 - RNA, 16 nt, Human herpesvirus 4 [Epstein-Barr virus]
auuuugggagcuccag

SEQ ID NO: 1939880 - RNA, 19 nt, Human herpesvirus 4 [Epstein-Barr virus]
gucaagagcuuccuggccg

SEQ ID NO: 1939881 - RNA, 14 nt, Human herpesvirus 4 [Epstein-Barr virus]
uuguccgcugggcc

SEQ ID NO: 1939882 - RNA, 13 nt, Human herpesvirus 4 [Epstein-Barr virus]
acaucucagggac

SEQ ID NO: 1939883 - RNA, 17 nt, Human herpesvirus 4 [Epstein-Barr virus]
gugaccugacuggcaga

SEQ ID NO: 1939884 - RNA, 18 nt, Human herpesvirus 4 [Epstein-Barr virus]
agccccuaggccugccac

SEQ ID NO: 1939885 - RNA, 16 nt, Human herpesvirus 4 [Epstein-Barr virus]
guguguggcuguagcc

SEQ ID NO: 1939886 - RNA, 18 nt, Human herpesvirus 4 [Epstein-Barr virus]
ggcacaucuggaccugga

SEQ ID NO: 1939887 - RNA, 16 nt, Human herpesvirus 4 [Epstein-Barr virus]
cuagccguccugucca

SEQ ID NO: 1939888 - RNA, 23 nt, Human herpesvirus 4 [Epstein-Barr virus]
gcagcuuuuggccuucuuccuag

SEQ ID NO: 1939889 - RNA, 23 nt, Human herpesvirus 4 [Epstein-Barr virus]
gcuccggcggcaguggaccucaa

SEQ ID NO: 1939890 - RNA, 23 nt, Human herpesvirus 4 [Epstein-Barr virus]
agaggcgggaauggccgccaccc

SEQ ID NO: 1939891 - RNA, 17 nt, Human herpesvirus 4 [Epstein-Barr virus]
ccaggcuccuggaucug

SEQ ID NO: 1939892 - RNA, 15 nt, Human herpesvirus 4 [Epstein-Barr virus]
ccuuuacccagcccu

SEQ ID NO: 1939893 - RNA, 21 nt, Human herpesvirus 4 [Epstein-Barr virus]
cgcccugucccuggagcuggu

SEQ ID NO: 1939894 - RNA, 20 nt, Human herpesvirus 4 [Epstein-Barr virus]
ggcgggaguauggggccaga

SEQ ID NO: 1939895 - RNA, 20 nt, Human herpesvirus 4 [Epstein-Barr virus]
cccaccacccccaccaccuc

SEQ ID NO: 1939896 - RNA, 14 nt, Human herpesvirus 4 [Epstein-Barr virus]
caggaccuagaaug

SEQ ID NO: 1939897 - RNA, 15 nt, Human herpesvirus 4 [Epstein-Barr virus]
caggucgaccaccuc

SEQ ID NO: 1939898 - RNA, 20 nt, Human herpesvirus 4 [Epstein-Barr virus]
gaaggcuagacgcagcugug

SEQ ID NO: 1939899 - RNA, 21 nt, Human herpesvirus 4 [Epstein-Barr virus]
cucugcuuucgcgcagagccc

SEQ ID NO: 1939900 - RNA, 17 nt, Human herpesvirus 4 [Epstein-Barr virus]
gccacugcaggcuggac

SEQ ID NO: 1939901 - RNA, 17 nt, Human herpesvirus 4 [Epstein-Barr virus]
cucccauguaagccugc

SEQ ID NO: 1939902 - RNA, 19 nt, Human herpesvirus 4 [Epstein-Barr virus]
uggaggcccccggcuggcc

SEQ ID NO: 1939903 - RNA, 14 nt, Human herpesvirus 4 [Epstein-Barr virus]
aacccccugcagga

SEQ ID NO: 1939904 - RNA, 16 nt, Human herpesvirus 4 [Epstein-Barr virus]
cuaagcagcugagggg

SEQ ID NO: 1939905 - RNA, 22 nt, Human herpesvirus 4 [Epstein-Barr virus]
acaaccuuggacccugcugcga

SEQ ID NO: 1939906 - RNA, 16 nt, Human herpesvirus 4 [Epstein-Barr virus]
ccggcgagacuuggac

SEQ ID NO: 1939907 - RNA, 14 nt, Human herpesvirus 4 [Epstein-Barr virus]
uccugcccucccac

SEQ ID NO: 1939908 - RNA, 18 nt, Human herpesvirus 4 [Epstein-Barr virus]
caccaucuggcagcuuuu

SEQ ID NO: 1939909 - RNA, 14 nt, Human herpesvirus 4 [Epstein-Barr virus]
guaaaacugccaca

SEQ ID NO: 1939910 - RNA, 15 nt, Human herpesvirus 4 [Epstein-Barr virus]
guuauugaaaccacg

SEQ ID NO: 1939911 - RNA, 23 nt, Human herpesvirus 4 [Epstein-Barr virus]
gaaucaugucugacgaggggcca

SEQ ID NO: 1939912 - RNA, 16 nt, Human herpesvirus 4 [Epstein-Barr virus]
aaccucacugucauuc

SEQ ID NO: 1939913 - RNA, 16 nt, Human herpesvirus 4 [Epstein-Barr virus]
cugugcugacccuucu

SEQ ID NO: 1939914 - RNA, 17 nt, Human herpesvirus 4 [Epstein-Barr virus]
uagccccgggcccagcc

SEQ ID NO: 1939915 - RNA, 21 nt, Human herpesvirus 4 [Epstein-Barr virus]
uucugcauguuauuacugauu

SEQ ID NO: 1939916 - RNA, 17 nt, Human herpesvirus 4 [Epstein-Barr virus]
agaguacgugcagagga

SEQ ID NO: 1939917 - RNA, 13 nt, Human herpesvirus 4 [Epstein-Barr virus]
uuccuggccaugg

SEQ ID NO: 1939918 - RNA, 19 nt, Human herpesvirus 4 [Epstein-Barr virus]
cucaucguucgguggggug

SEQ ID NO: 1939919 - RNA, 19 nt, Human herpesvirus 4 [Epstein-Barr virus]
ugcccucaugcgccagagc

SEQ ID NO: 1939920 - RNA, 18 nt, Human herpesvirus 4 [Epstein-Barr virus]
ucuugauaaaacagguua

SEQ ID NO: 1939921 - RNA, 20 nt, Human herpesvirus 4 [Epstein-Barr virus]
auuugcugacauauguacaa

SEQ ID NO: 1939922 - RNA, 15 nt, Human herpesvirus 4 [Epstein-Barr virus]
aguuuuaacaccuga

SEQ ID NO: 1939923 - RNA, 18 nt, Human herpesvirus 4 [Epstein-Barr virus]
caugcagggugcacagac

SEQ ID NO: 1939924 - RNA, 16 nt, Human herpesvirus 4 [Epstein-Barr virus]
ucccccuagccccggc

SEQ ID NO: 1939925 - RNA, 15 nt, Human herpesvirus 4 [Epstein-Barr virus]
ugccucugggugcug

SEQ ID NO: 1939926 - RNA, 21 nt, Human herpesvirus 4 [Epstein-Barr virus]
agcagagguugggccacgcug

SEQ ID NO: 1939927 - RNA, 14 nt, Human herpesvirus 4 [Epstein-Barr virus]
acccagcagcagcc

SEQ ID NO: 1939928 - RNA, 12 nt, Human herpesvirus 4 [Epstein-Barr virus]
accagcuccagg

SEQ ID NO: 1939929 - RNA, 20 nt, Human herpesvirus 4 [Epstein-Barr virus]
agcaacccccggcucucagg

SEQ ID NO: 1939930 - RNA, 22 nt, Human herpesvirus 4 [Epstein-Barr virus]
gguacaugggccacugcaggcu

SEQ ID NO: 1939931 - RNA, 15 nt, Human herpesvirus 4 [Epstein-Barr virus]
uggcggcccagcccg

SEQ ID NO: 1939932 - RNA, 17 nt, Human herpesvirus 4 [Epstein-Barr virus]
gcaucacaagucacauc

SEQ ID NO: 1939933 - RNA, 23 nt, Human herpesvirus 4 [Epstein-Barr virus]
uagguaucuggaucuacuuauug

SEQ ID NO: 1939934 - RNA, 23 nt, Human herpesvirus 4 [Epstein-Barr virus]
aacccuguagucaccugcacaga

SEQ ID NO: 1939935 - RNA, 17 nt, Human herpesvirus 4 [Epstein-Barr virus]
cuuggcuauggucaugg

SEQ ID NO: 1939936 - RNA, 15 nt, Human herpesvirus 4 [Epstein-Barr virus]
caccgagcagaaggc

SEQ ID NO: 1939937 - RNA, 21 nt, Human herpesvirus 4 [Epstein-Barr virus]
ccaucugcuucuggcucuucu

SEQ ID NO: 1939938 - RNA, 19 nt, Human herpesvirus 4 [Epstein-Barr virus]
gaaaaccggcgagacuugg

SEQ ID NO: 1939939 - RNA, 15 nt, Human herpesvirus 4 [Epstein-Barr virus]
uguaaccuaugccug

SEQ ID NO: 1939940 - RNA, 17 nt, Human herpesvirus 4 [Epstein-Barr virus]
ucgccuuguuucucaga

SEQ ID NO: 1939941 - RNA, 13 nt, Human herpesvirus 4 [Epstein-Barr virus]
ugugguucuccug

SEQ ID NO: 1939942 - RNA, 14 nt, Human herpesvirus 4 [Epstein-Barr virus]
ugauccuguacaaa

SEQ ID NO: 1939943 - RNA, 18 nt, Human herpesvirus 4 [Epstein-Barr virus]
agagggugagcccaccug

SEQ ID NO: 1939944 - RNA, 16 nt, Human herpesvirus 4 [Epstein-Barr virus]
uuugggagcuccagag

SEQ ID NO: 1939945 - RNA, 16 nt, Human herpesvirus 4 [Epstein-Barr virus]
cugagaccaugcucag

SEQ ID NO: 1939946 - RNA, 18 nt, Human herpesvirus 4 [Epstein-Barr virus]
acgugaacauccugcgug

SEQ ID NO: 1939947 - RNA, 13 nt, Human herpesvirus 4 [Epstein-Barr virus]
aaacaugguguau

SEQ ID NO: 1939948 - RNA, 18 nt, Human herpesvirus 4 [Epstein-Barr virus]
ucaugcagggugcacaga

SEQ ID NO: 1939949 - RNA, 17 nt, Human herpesvirus 4 [Epstein-Barr virus]
ccuugcccucuccagca

SEQ ID NO: 1939950 - RNA, 16 nt, Human herpesvirus 4 [Epstein-Barr virus]
cugagcugccugguga

SEQ ID NO: 1939951 - RNA, 16 nt, Human herpesvirus 4 [Epstein-Barr virus]
agucaucccguggaga

SEQ ID NO: 1939952 - RNA, 17 nt, Human herpesvirus 4 [Epstein-Barr virus]
ugacccuucugcugcug

SEQ ID NO: 1939953 - RNA, 18 nt, Human herpesvirus 4 [Epstein-Barr virus]
ccucgggucucgccgcua

SEQ ID NO: 1939954 - RNA, 14 nt, Human herpesvirus 4 [Epstein-Barr virus]
gaccucgggaggga

SEQ ID NO: 1939955 - RNA, 17 nt, Human herpesvirus 4 [Epstein-Barr virus]
cugggaguccggcccuu

SEQ ID NO: 1939956 - RNA, 14 nt, Human herpesvirus 4 [Epstein-Barr virus]
ggcccgucccucuu

SEQ ID NO: 1939957 - RNA, 20 nt, Human herpesvirus 4 [Epstein-Barr virus]
cccccagaccugugugcugu

SEQ ID NO: 1939958 - RNA, 21 nt, Human herpesvirus 4 [Epstein-Barr virus]
ggcaggcauuuuuggugcugc

SEQ ID NO: 1939959 - RNA, 24 nt, Human herpesvirus 4 [Epstein-Barr virus]
uggaccgaacugauggcaaagguc

SEQ ID NO: 1939960 - RNA, 18 nt, Human herpesvirus 4 [Epstein-Barr virus]
uccuacaacucagcccca

SEQ ID NO: 1939961 - RNA, 18 nt, Human herpesvirus 4 [Epstein-Barr virus]
agugcaacaaucuggacu

SEQ ID NO: 1939962 - RNA, 11 nt, Human herpesvirus 4 [Epstein-Barr virus]
cggcccagccc

SEQ ID NO: 1939963 - RNA, 22 nt, Human herpesvirus 4 [Epstein-Barr virus]
gcccagcagauccagggcccgu

SEQ ID NO: 1939964 - RNA, 17 nt, Human herpesvirus 4 [Epstein-Barr virus]
ccagccuacucuccacu

SEQ ID NO: 1939965 - RNA, 21 nt, Human herpesvirus 4 [Epstein-Barr virus]
cugcccccggagcccugcccu

SEQ ID NO: 1939966 - RNA, 13 nt, Human herpesvirus 4 [Epstein-Barr virus]
ccuacgcagaggc

SEQ ID NO: 1939967 - RNA, 18 nt, Human herpesvirus 4 [Epstein-Barr virus]
ugcgcggaaucaggacca

SEQ ID NO: 1939968 - RNA, 17 nt, Human herpesvirus 4 [Epstein-Barr virus]
acgccggaugccugccu

SEQ ID NO: 1939969 - RNA, 17 nt, Human herpesvirus 4 [Epstein-Barr virus]
uaggagcagggcccagu

SEQ ID NO: 1939970 - RNA, 17 nt, Human herpesvirus 4 [Epstein-Barr virus]
gcgugaccaccuggcca

SEQ ID NO: 1939971 - RNA, 15 nt, Human herpesvirus 4 [Epstein-Barr virus]
cuccccagccacagc

SEQ ID NO: 1939972 - RNA, 14 nt, Human herpesvirus 4 [Epstein-Barr virus]
gccggcgcugugug

SEQ ID NO: 1939973 - RNA, 13 nt, Human herpesvirus 4 [Epstein-Barr virus]
cagauugccuucu

SEQ ID NO: 1939974 - RNA, 21 nt, Human herpesvirus 4 [Epstein-Barr virus]
ggcauaaauucuccugccugc

SEQ ID NO: 1939975 - RNA, 20 nt, Human herpesvirus 4 [Epstein-Barr virus]
cagggugaccuggcucaggu

SEQ ID NO: 1939976 - RNA, 23 nt, Human herpesvirus 4 [Epstein-Barr virus]
gccuggccggcuaucugcuucug

SEQ ID NO: 1939977 - RNA, 23 nt, Human herpesvirus 4 [Epstein-Barr virus]
ggccacgcugauaaaguuguccu

SEQ ID NO: 1939978 - RNA, 23 nt, Human herpesvirus 4 [Epstein-Barr virus]
gucuuacugcccagccuacucuc

SEQ ID NO: 1939979 - RNA, 23 nt, Human herpesvirus 4 [Epstein-Barr virus]
ggcugugagcgcacgugacagau

SEQ ID NO: 1939980 - RNA, 18 nt, Human herpesvirus 4 [Epstein-Barr virus]
gcuacuacugccuuacac

SEQ ID NO: 1939981 - RNA, 19 nt, Human herpesvirus 4 [Epstein-Barr virus]
cgucuuguaaaacuuggag

SEQ ID NO: 1939982 - RNA, 21 nt, Human herpesvirus 4 [Epstein-Barr virus]
ccugaccgaauggggcagugg

SEQ ID NO: 1939983 - RNA, 15 nt, Human herpesvirus 4 [Epstein-Barr virus]
ucaccaggccugcca

SEQ ID NO: 1939984 - RNA, 13 nt, Human herpesvirus 4 [Epstein-Barr virus]
gccuugcccccgc

SEQ ID NO: 1939985 - RNA, 14 nt, Human herpesvirus 4 [Epstein-Barr virus]
agaagugcugggag

SEQ ID NO: 1939986 - RNA, 14 nt, Human herpesvirus 4 [Epstein-Barr virus]
gagagcuccgccac

SEQ ID NO: 1939987 - RNA, 12 nt, Human herpesvirus 4 [Epstein-Barr virus]
guaccagcuggu

SEQ ID NO: 1939988 - RNA, 14 nt, Human herpesvirus 4 [Epstein-Barr virus]
ggccugcugucauc

SEQ ID NO: 1939989 - RNA, 22 nt, Human herpesvirus 4 [Epstein-Barr virus]
cuucggucaaguaccagcuggu

SEQ ID NO: 1939990 - RNA, 15 nt, Human herpesvirus 4 [Epstein-Barr virus]
cauaauggugccuga

SEQ ID NO: 1939991 - RNA, 12 nt, Human herpesvirus 4 [Epstein-Barr virus]
ucuguuuucccc

SEQ ID NO: 1939992 - RNA, 20 nt, Human herpesvirus 4 [Epstein-Barr virus]
gauauagcucugcacaggcu

SEQ ID NO: 1939993 - RNA, 22 nt, Human herpesvirus 4 [Epstein-Barr virus]
aauguaacacuacuuguuucug

SEQ ID NO: 1939994 - RNA, 19 nt, Human herpesvirus 4 [Epstein-Barr virus]
cuaggcaaaccuccaauca

SEQ ID NO: 1939995 - RNA, 20 nt, Human herpesvirus 4 [Epstein-Barr virus]
gggcaaaacucacaggacau

SEQ ID NO: 1939996 - RNA, 19 nt, Human herpesvirus 4 [Epstein-Barr virus]
auggcccugaucugggaga

SEQ ID NO: 1939997 - RNA, 14 nt, Human herpesvirus 4 [Epstein-Barr virus]
ucauccgccacccc

SEQ ID NO: 1939998 - RNA, 17 nt, Human herpesvirus 4 [Epstein-Barr virus]
gcacacauuacggugcu

SEQ ID NO: 1939999 - RNA, 19 nt, Human herpesvirus 4 [Epstein-Barr virus]
cugcuccgcguggagcugg

SEQ ID NO: 1940000 - RNA, 19 nt, Human herpesvirus 4 [Epstein-Barr virus]
cgcccccucugccuccggc

SEQ ID NO: 1940001 - RNA, 19 nt, Human herpesvirus 4 [Epstein-Barr virus]
cguccacucuaucccgcug

SEQ ID NO: 1940002 - RNA, 16 nt, Human herpesvirus 4 [Epstein-Barr virus]
ggcugcuaagccagga

SEQ ID NO: 1940003 - RNA, 17 nt, Human herpesvirus 4 [Epstein-Barr virus]
cugcccccggagcccug

SEQ ID NO: 1940004 - RNA, 15 nt, Human herpesvirus 4 [Epstein-Barr virus]
cuacgaaacugacca

SEQ ID NO: 1940005 - RNA, 19 nt, Human herpesvirus 4 [Epstein-Barr virus]
cuguaguggccuucucuga

SEQ ID NO: 1940006 - RNA, 14 nt, Human herpesvirus 4 [Epstein-Barr virus]
aacuggccaugcag

SEQ ID NO: 1940007 - RNA, 18 nt, Human herpesvirus 4 [Epstein-Barr virus]
caccagcuucgagagcca

SEQ ID NO: 1940008 - RNA, 18 nt, Human herpesvirus 4 [Epstein-Barr virus]
cacguguggaagaggaaa

SEQ ID NO: 1940009 - RNA, 22 nt, Human herpesvirus 4 [Epstein-Barr virus]
cgagcuccgugggcccagagug

SEQ ID NO: 1940010 - RNA, 13 nt, Human herpesvirus 4 [Epstein-Barr virus]
guauguauuggga

SEQ ID NO: 1940011 - RNA, 19 nt, Human herpesvirus 4 [Epstein-Barr virus]
agugggcuucgggggccug

SEQ ID NO: 1940012 - RNA, 12 nt, Human herpesvirus 4 [Epstein-Barr virus]
gcucugcacagg

SEQ ID NO: 1940013 - RNA, 22 nt, Human herpesvirus 4 [Epstein-Barr virus]
ggcggcagcggaugguggggcu

SEQ ID NO: 1940014 - RNA, 18 nt, Human herpesvirus 4 [Epstein-Barr virus]
ccaauucacaucucaggg

SEQ ID NO: 1940015 - RNA, 15 nt, Human herpesvirus 4 [Epstein-Barr virus]
acccccaccaccucc

SEQ ID NO: 1940016 - RNA, 23 nt, Human herpesvirus 4 [Epstein-Barr virus]
gcccgacccccgggcgcccccaa

SEQ ID NO: 1940017 - RNA, 21 nt, Human herpesvirus 4 [Epstein-Barr virus]
cauggagaacguccacgggga

SEQ ID NO: 1940018 - RNA, 17 nt, Human herpesvirus 4 [Epstein-Barr virus]
ccagggcguacaccugg

SEQ ID NO: 1940019 - RNA, 20 nt, Human herpesvirus 4 [Epstein-Barr virus]
ccgcgguuucagcaucacag

SEQ ID NO: 1940020 - RNA, 14 nt, Human herpesvirus 4 [Epstein-Barr virus]
ggacauucuucuga

SEQ ID NO: 1940021 - RNA, 18 nt, Human herpesvirus 4 [Epstein-Barr virus]
ccacgguggaacaggagc

SEQ ID NO: 1940022 - RNA, 23 nt, Human herpesvirus 4 [Epstein-Barr virus]
ccaggaccuggaugcuguagugg

SEQ ID NO: 1940023 - RNA, 19 nt, Human herpesvirus 4 [Epstein-Barr virus]
ggugccaagcucagccccu

SEQ ID NO: 1940024 - RNA, 19 nt, Human herpesvirus 4 [Epstein-Barr virus]
gcuaucuuugcugaagaug

SEQ ID NO: 1940025 - RNA, 19 nt, Human herpesvirus 4 [Epstein-Barr virus]
cuccccugacgcuguggcc

SEQ ID NO: 1940026 - RNA, 17 nt, Human herpesvirus 4 [Epstein-Barr virus]
cccauguaagccugccu

SEQ ID NO: 1940027 - RNA, 15 nt, Human herpesvirus 4 [Epstein-Barr virus]
ucugcugcugcuggu

SEQ ID NO: 1940028 - RNA, 11 nt, Human herpesvirus 4 [Epstein-Barr virus]
ccuuuugcaac

SEQ ID NO: 1940029 - RNA, 18 nt, Human herpesvirus 4 [Epstein-Barr virus]
gugccauaccacaccccc

SEQ ID NO: 1940030 - RNA, 21 nt, Human herpesvirus 4 [Epstein-Barr virus]
gagaucucuugcgcccaggca

SEQ ID NO: 1940031 - RNA, 14 nt, Human herpesvirus 4 [Epstein-Barr virus]
ggagcagggcccag

SEQ ID NO: 1940032 - RNA, 15 nt, Human herpesvirus 4 [Epstein-Barr virus]
gagcaggagcaggag

SEQ ID NO: 1940033 - RNA, 18 nt, Human herpesvirus 4 [Epstein-Barr virus]
caccccccccaccaccac

SEQ ID NO: 1940034 - RNA, 16 nt, Human herpesvirus 4 [Epstein-Barr virus]
uggccggugcugccag

SEQ ID NO: 1940035 - RNA, 12 nt, Human herpesvirus 4 [Epstein-Barr virus]
cagggcaauggg

SEQ ID NO: 1940036 - RNA, 20 nt, Human herpesvirus 4 [Epstein-Barr virus]
accuguccuugucugcugcc

SEQ ID NO: 1940037 - RNA, 18 nt, Human herpesvirus 4 [Epstein-Barr virus]
ugucccccuagccccggg

SEQ ID NO: 1940038 - RNA, 17 nt, Human herpesvirus 4 [Epstein-Barr virus]
cuucucaaaggccuugg

SEQ ID NO: 1940039 - RNA, 14 nt, Human herpesvirus 4 [Epstein-Barr virus]
cgacaucgccgccc

SEQ ID NO: 1940040 - RNA, 12 nt, Human herpesvirus 4 [Epstein-Barr virus]
ugaggcccagcc

SEQ ID NO: 1940041 - RNA, 13 nt, Human herpesvirus 4 [Epstein-Barr virus]
ccucuggcacgcc

SEQ ID NO: 1940042 - RNA, 14 nt, Human herpesvirus 4 [Epstein-Barr virus]
cgcguggagcugga

SEQ ID NO: 1940043 - RNA, 13 nt, Human herpesvirus 4 [Epstein-Barr virus]
ucaccaggccugc

SEQ ID NO: 1940044 - RNA, 21 nt, Human herpesvirus 4 [Epstein-Barr virus]
accuguccuugucugcugcca

SEQ ID NO: 1940045 - RNA, 13 nt, Human herpesvirus 4 [Epstein-Barr virus]
ccagggaggccug

SEQ ID NO: 1940046 - RNA, 23 nt, Human herpesvirus 4 [Epstein-Barr virus]
ccaucaugcugaauauugccagc

SEQ ID NO: 1940047 - RNA, 22 nt, Human herpesvirus 4 [Epstein-Barr virus]
agagcuggaugguguuggagac

SEQ ID NO: 1940048 - RNA, 21 nt, Human herpesvirus 4 [Epstein-Barr virus]
cuguacuugggauugcaacac

SEQ ID NO: 1940049 - RNA, 22 nt, Human herpesvirus 4 [Epstein-Barr virus]
ucuaacacgcuuuugucugccu

SEQ ID NO: 1940050 - RNA, 20 nt, Human herpesvirus 4 [Epstein-Barr virus]
cagaggccguguuucuccca

SEQ ID NO: 1940051 - RNA, 21 nt, Human herpesvirus 4 [Epstein-Barr virus]
ggaagcaggagaugggugcau

SEQ ID NO: 1940052 - RNA, 15 nt, Human herpesvirus 4 [Epstein-Barr virus]
aacccuguagucacc

SEQ ID NO: 1940053 - RNA, 21 nt, Human herpesvirus 4 [Epstein-Barr virus]
ccccuauauccuagagggaca

SEQ ID NO: 1940054 - RNA, 17 nt, Human herpesvirus 4 [Epstein-Barr virus]
ccggcaccgccaggugg

SEQ ID NO: 1940055 - RNA, 17 nt, Human herpesvirus 4 [Epstein-Barr virus]
gagaaugacagcaagga

SEQ ID NO: 1940056 - RNA, 13 nt, Human herpesvirus 4 [Epstein-Barr virus]
gagggccucuggc

SEQ ID NO: 1940057 - RNA, 14 nt, Human herpesvirus 4 [Epstein-Barr virus]
gaaacuacacggcc

SEQ ID NO: 1940058 - RNA, 16 nt, Human herpesvirus 4 [Epstein-Barr virus]
gcucggggcuggggag

SEQ ID NO: 1940059 - RNA, 19 nt, Human herpesvirus 4 [Epstein-Barr virus]
uacacacaucagaccucug

SEQ ID NO: 1940060 - RNA, 21 nt, Human herpesvirus 4 [Epstein-Barr virus]
gcgaugucggggcugcuggcg

SEQ ID NO: 1940061 - RNA, 24 nt, Human herpesvirus 4 [Epstein-Barr virus]
cccaaacucgacuucugaagaugu

SEQ ID NO: 1940062 - RNA, 18 nt, Human herpesvirus 4 [Epstein-Barr virus]
ugucaauaauuucaguga

SEQ ID NO: 1940063 - RNA, 14 nt, Human herpesvirus 4 [Epstein-Barr virus]
gccagguagcccag

SEQ ID NO: 1940064 - RNA, 21 nt, Human herpesvirus 4 [Epstein-Barr virus]
ugcccccgccagcgccuccuc

SEQ ID NO: 1940065 - RNA, 16 nt, Human herpesvirus 4 [Epstein-Barr virus]
caggcccccagcuucu

SEQ ID NO: 1940066 - RNA, 17 nt, Human herpesvirus 4 [Epstein-Barr virus]
gccauguguguccagug

SEQ ID NO: 1940067 - RNA, 14 nt, Human herpesvirus 4 [Epstein-Barr virus]
cuaauucagccacc

SEQ ID NO: 1940068 - RNA, 21 nt, Human herpesvirus 4 [Epstein-Barr virus]
ucucaugggggaaugagggaa

SEQ ID NO: 1940069 - RNA, 14 nt, Human herpesvirus 4 [Epstein-Barr virus]
uaugaaggcuggca

SEQ ID NO: 1940070 - RNA, 22 nt, Human herpesvirus 4 [Epstein-Barr virus]
uccagcaaccaauguaucccaa

SEQ ID NO: 1940071 - RNA, 23 nt, Human herpesvirus 4 [Epstein-Barr virus]
gaggcugagaacugacgcuccag

SEQ ID NO: 1940072 - RNA, 16 nt, Human herpesvirus 4 [Epstein-Barr virus]
gcccccaccaccccca

SEQ ID NO: 1940073 - RNA, 15 nt, Human herpesvirus 4 [Epstein-Barr virus]
cccagaggaggcccc

SEQ ID NO: 1940074 - RNA, 17 nt, Human herpesvirus 4 [Epstein-Barr virus]
uagccggccaggcagag

SEQ ID NO: 1940075 - RNA, 23 nt, Human herpesvirus 4 [Epstein-Barr virus]
cuuuguggugggacugagauuua

SEQ ID NO: 1940076 - RNA, 23 nt, Human herpesvirus 4 [Epstein-Barr virus]
cccgacuuauggcuagauuuccu

SEQ ID NO: 1940077 - RNA, 22 nt, Human herpesvirus 4 [Epstein-Barr virus]
cccgggaccgcgcccuccucug

SEQ ID NO: 1940078 - RNA, 22 nt, Human herpesvirus 4 [Epstein-Barr virus]
uccccugccugcaugcuuagug

SEQ ID NO: 1940079 - RNA, 17 nt, Human herpesvirus 4 [Epstein-Barr virus]
acccugcauggccaggc

SEQ ID NO: 1940080 - RNA, 16 nt, Human herpesvirus 4 [Epstein-Barr virus]
gauacucaucugugag

SEQ ID NO: 1940081 - RNA, 16 nt, Human herpesvirus 4 [Epstein-Barr virus]
ugagucagccuugccc

SEQ ID NO: 1940082 - RNA, 15 nt, Human herpesvirus 4 [Epstein-Barr virus]
cagcuaacaggacau

SEQ ID NO: 1940083 - RNA, 19 nt, Human herpesvirus 4 [Epstein-Barr virus]
guuugagaaucugggcugg

SEQ ID NO: 1940084 - RNA, 22 nt, Human herpesvirus 4 [Epstein-Barr virus]
cacugccaagguugaagagcag

SEQ ID NO: 1940085 - RNA, 21 nt, Human herpesvirus 4 [Epstein-Barr virus]
gcccucgguggugggcugcug

SEQ ID NO: 1940086 - RNA, 19 nt, Human herpesvirus 4 [Epstein-Barr virus]
gcugcgaggcauacagcau

SEQ ID NO: 1940087 - RNA, 17 nt, Human herpesvirus 4 [Epstein-Barr virus]
cuccauaggccucugcc

SEQ ID NO: 1940088 - RNA, 15 nt, Human herpesvirus 4 [Epstein-Barr virus]
guccuuugggaacac

SEQ ID NO: 1940089 - RNA, 21 nt, Human herpesvirus 4 [Epstein-Barr virus]
ccagcucggccagcaggccgg

SEQ ID NO: 1940090 - RNA, 13 nt, Human herpesvirus 4 [Epstein-Barr virus]
cuuggaggcugcu

SEQ ID NO: 1940091 - RNA, 15 nt, Human herpesvirus 4 [Epstein-Barr virus]
gagucgaagcucuug

SEQ ID NO: 1940092 - RNA, 22 nt, Human herpesvirus 4 [Epstein-Barr virus]
gcacaucuggaccuggacuggg

SEQ ID NO: 1940093 - RNA, 14 nt, Human herpesvirus 4 [Epstein-Barr virus]
cgcccuccucuggg

SEQ ID NO: 1940094 - RNA, 18 nt, Human herpesvirus 4 [Epstein-Barr virus]
augauucaucagaagcua

SEQ ID NO: 1940095 - RNA, 20 nt, Human herpesvirus 4 [Epstein-Barr virus]
ucuccugccugccucugcuc

SEQ ID NO: 1940096 - RNA, 21 nt, Human herpesvirus 4 [Epstein-Barr virus]
aguggccgucuggcagggggc

SEQ ID NO: 1940097 - RNA, 21 nt, Human herpesvirus 4 [Epstein-Barr virus]
gaagacuguuggguagauggc

SEQ ID NO: 1940098 - RNA, 20 nt, Human herpesvirus 4 [Epstein-Barr virus]
cuguucaaacagcagcagca

SEQ ID NO: 1940099 - RNA, 23 nt, Human herpesvirus 4 [Epstein-Barr virus]
cccagguggucuuagggcgccag

SEQ ID NO: 1940100 - RNA, 20 nt, Human herpesvirus 4 [Epstein-Barr virus]
uuuuggugaaauaaaaacag

SEQ ID NO: 1940101 - RNA, 22 nt, Human herpesvirus 4 [Epstein-Barr virus]
ccugcgacgcggugcugaccgg

SEQ ID NO: 1940102 - RNA, 20 nt, Human herpesvirus 4 [Epstein-Barr virus]
ccugagcauggcggccuggc

SEQ ID NO: 1940103 - RNA, 14 nt, Human herpesvirus 4 [Epstein-Barr virus]
ucuucucugacaaa

SEQ ID NO: 1940104 - RNA, 17 nt, Human herpesvirus 4 [Epstein-Barr virus]
uaucagagaggccucug

SEQ ID NO: 1940105 - RNA, 21 nt, Human herpesvirus 4 [Epstein-Barr virus]
gcuaauagcuuucuguugcug

SEQ ID NO: 1940106 - RNA, 20 nt, Human herpesvirus 4 [Epstein-Barr virus]
cugccacgugggucucaugg

SEQ ID NO: 1940107 - RNA, 18 nt, Human herpesvirus 4 [Epstein-Barr virus]
gcgagcuccgugggccca

SEQ ID NO: 1940108 - RNA, 13 nt, Human herpesvirus 4 [Epstein-Barr virus]
aaaagcagccacc

SEQ ID NO: 1940109 - RNA, 24 nt, Human herpesvirus 4 [Epstein-Barr virus]
gagcggcauccucaaggggcacga

SEQ ID NO: 1940110 - RNA, 21 nt, Human herpesvirus 4 [Epstein-Barr virus]
guaguaacgcauucccuugcu

SEQ ID NO: 1940111 - RNA, 23 nt, Human herpesvirus 4 [Epstein-Barr virus]
uugguggauugcugaacuggggc

SEQ ID NO: 1940112 - RNA, 19 nt, Human herpesvirus 4 [Epstein-Barr virus]
aucuacaacaaaacuggug

SEQ ID NO: 1940113 - RNA, 13 nt, Human herpesvirus 4 [Epstein-Barr virus]
cgccaccuccggg

SEQ ID NO: 1940114 - RNA, 15 nt, Human herpesvirus 4 [Epstein-Barr virus]
uacuucuuuugcucu

SEQ ID NO: 1940115 - RNA, 14 nt, Human herpesvirus 4 [Epstein-Barr virus]
aacugccagagcug

SEQ ID NO: 1940116 - RNA, 14 nt, Human herpesvirus 4 [Epstein-Barr virus]
acaugguagauaaa

SEQ ID NO: 1940117 - RNA, 15 nt, Human herpesvirus 4 [Epstein-Barr virus]
cuuugaugaggcuga

SEQ ID NO: 1940118 - RNA, 17 nt, Human herpesvirus 4 [Epstein-Barr virus]
ccugggcaaggagcugu

SEQ ID NO: 1940119 - RNA, 12 nt, Human herpesvirus 4 [Epstein-Barr virus]
ucccaacauggg

SEQ ID NO: 1940120 - RNA, 12 nt, Human herpesvirus 4 [Epstein-Barr virus]
acagcucuggca

SEQ ID NO: 1940121 - RNA, 13 nt, Human herpesvirus 4 [Epstein-Barr virus]
acuuuauuaauaa

SEQ ID NO: 1940122 - RNA, 13 nt, Human herpesvirus 4 [Epstein-Barr virus]
caagcagcuagag

SEQ ID NO: 1940123 - RNA, 22 nt, Human herpesvirus 4 [Epstein-Barr virus]
caaggauggcacgggcagagga

SEQ ID NO: 1940124 - RNA, 17 nt, Human herpesvirus 4 [Epstein-Barr virus]
aucacagaggaggcugg

SEQ ID NO: 1940125 - RNA, 22 nt, Human herpesvirus 4 [Epstein-Barr virus]
ccagcgccuccucgcaggcccc

SEQ ID NO: 1940126 - RNA, 14 nt, Human herpesvirus 4 [Epstein-Barr virus]
ggugaggcccagcc

SEQ ID NO: 1940127 - RNA, 12 nt, Human herpesvirus 4 [Epstein-Barr virus]
cauuggcagcag

SEQ ID NO: 1940128 - RNA, 19 nt, Human herpesvirus 4 [Epstein-Barr virus]
uggcaguauuuugcaaaca

SEQ ID NO: 1940129 - RNA, 13 nt, Human herpesvirus 4 [Epstein-Barr virus]
uauagcucuggca

SEQ ID NO: 1940130 - RNA, 16 nt, Human herpesvirus 4 [Epstein-Barr virus]
ccuucuccaucuccau

SEQ ID NO: 1940131 - RNA, 19 nt, Human herpesvirus 4 [Epstein-Barr virus]
ccugaagcgaagcagcucc

SEQ ID NO: 1940132 - RNA, 15 nt, Human herpesvirus 4 [Epstein-Barr virus]
gcaagaauuggggcu

SEQ ID NO: 1940133 - RNA, 15 nt, Human herpesvirus 4 [Epstein-Barr virus]
uccccggccucccgc

SEQ ID NO: 1940134 - RNA, 20 nt, Human herpesvirus 4 [Epstein-Barr virus]
cgacgcuguuuugcagcuga

SEQ ID NO: 1940135 - RNA, 15 nt, Human herpesvirus 4 [Epstein-Barr virus]
uccgcuccuacacca

SEQ ID NO: 1940136 - RNA, 18 nt, Human herpesvirus 4 [Epstein-Barr virus]
uauccaggucuugccgug

SEQ ID NO: 1940137 - RNA, 18 nt, Human herpesvirus 4 [Epstein-Barr virus]
cucucuauguugucacau

SEQ ID NO: 1940138 - RNA, 21 nt, Human herpesvirus 4 [Epstein-Barr virus]
gccucucuggcugugcugacc

SEQ ID NO: 1940139 - RNA, 22 nt, Human herpesvirus 4 [Epstein-Barr virus]
uguaucccaaauaaauguuacu

SEQ ID NO: 1940140 - RNA, 17 nt, Human herpesvirus 4 [Epstein-Barr virus]
acucgagagaggccucu

SEQ ID NO: 1940141 - RNA, 20 nt, Human herpesvirus 4 [Epstein-Barr virus]
ggaggccugggagggggcga

SEQ ID NO: 1940142 - RNA, 14 nt, Human herpesvirus 4 [Epstein-Barr virus]
gaccuggcucaggu

SEQ ID NO: 1940143 - RNA, 15 nt, Human herpesvirus 4 [Epstein-Barr virus]
auggaugugaaugcc

SEQ ID NO: 1940144 - RNA, 14 nt, Human herpesvirus 4 [Epstein-Barr virus]
uggcucgccucauc

SEQ ID NO: 1940145 - RNA, 19 nt, Human herpesvirus 4 [Epstein-Barr virus]
cggguaguagcacuggugg

SEQ ID NO: 1940146 - RNA, 22 nt, Human herpesvirus 4 [Epstein-Barr virus]
cauggugagacaccuggcccac

SEQ ID NO: 1940147 - RNA, 18 nt, Human herpesvirus 4 [Epstein-Barr virus]
ccagagccucugccacaa

SEQ ID NO: 1940148 - RNA, 14 nt, Human herpesvirus 4 [Epstein-Barr virus]
ggggcuguagaagg

SEQ ID NO: 1940149 - RNA, 10 nt, Human herpesvirus 4 [Epstein-Barr virus]
accuccacca

SEQ ID NO: 1940150 - RNA, 14 nt, Human herpesvirus 4 [Epstein-Barr virus]
cugacacuuuagag

SEQ ID NO: 1940151 - RNA, 14 nt, Human herpesvirus 4 [Epstein-Barr virus]
ccuucuccucagcc

SEQ ID NO: 1940152 - RNA, 18 nt, Human herpesvirus 4 [Epstein-Barr virus]
cccaagaucaaagucugu

SEQ ID NO: 1940153 - RNA, 16 nt, Human herpesvirus 4 [Epstein-Barr virus]
cucaucgcacgggggu

SEQ ID NO: 1940154 - RNA, 17 nt, Human herpesvirus 4 [Epstein-Barr virus]
cacccggacccggacca

SEQ ID NO: 1940155 - RNA, 20 nt, Human herpesvirus 4 [Epstein-Barr virus]
ggccgggagaggcagcccca

SEQ ID NO: 1940156 - RNA, 13 nt, Human herpesvirus 4 [Epstein-Barr virus]
ccgggagccacgg

SEQ ID NO: 1940157 - RNA, 18 nt, Human herpesvirus 4 [Epstein-Barr virus]
augcucagaccccggguu

SEQ ID NO: 1940158 - RNA, 21 nt, Human herpesvirus 4 [Epstein-Barr virus]
gagugcccuggaggccucagg

SEQ ID NO: 1940159 - RNA, 23 nt, Human herpesvirus 4 [Epstein-Barr virus]
gacuacaaggcauuuacguucug

SEQ ID NO: 1940160 - RNA, 16 nt, Human herpesvirus 4 [Epstein-Barr virus]
gcugguggccugggag

SEQ ID NO: 1940161 - RNA, 17 nt, Human herpesvirus 4 [Epstein-Barr virus]
ccaaagcgggugcagua

SEQ ID NO: 1940162 - RNA, 17 nt, Human herpesvirus 4 [Epstein-Barr virus]
uuugcuaucuuugcuga

SEQ ID NO: 1940163 - RNA, 13 nt, Human herpesvirus 4 [Epstein-Barr virus]
cccucuugucccu

SEQ ID NO: 1940164 - RNA, 21 nt, Human herpesvirus 4 [Epstein-Barr virus]
agggcagacugcacaggauga

SEQ ID NO: 1940165 - RNA, 16 nt, Human herpesvirus 4 [Epstein-Barr virus]
ccucuccagcaaccaa

SEQ ID NO: 1940166 - RNA, 19 nt, Human herpesvirus 4 [Epstein-Barr virus]
guaugaggaaggggccucg

SEQ ID NO: 1940167 - RNA, 14 nt, Human herpesvirus 4 [Epstein-Barr virus]
cgguguccaggugu

SEQ ID NO: 1940168 - RNA, 15 nt, Human herpesvirus 4 [Epstein-Barr virus]
gugccucagauagcc

SEQ ID NO: 1940169 - RNA, 17 nt, Human herpesvirus 4 [Epstein-Barr virus]
agcgaagaacacuccac

SEQ ID NO: 1940170 - RNA, 20 nt, Human herpesvirus 4 [Epstein-Barr virus]
gcuccccagccacagcaccc

SEQ ID NO: 1940171 - RNA, 16 nt, Human herpesvirus 4 [Epstein-Barr virus]
cuuggcagcaguggcc

SEQ ID NO: 1940172 - RNA, 20 nt, Human herpesvirus 4 [Epstein-Barr virus]
accacucaggaagcuggcca

SEQ ID NO: 1940173 - RNA, 20 nt, Human herpesvirus 4 [Epstein-Barr virus]
ggugccauuguuuaccgcca

SEQ ID NO: 1940174 - RNA, 15 nt, Human herpesvirus 4 [Epstein-Barr virus]
ccaguguggcugggg

SEQ ID NO: 1940175 - RNA, 23 nt, Human herpesvirus 4 [Epstein-Barr virus]
guacccuuucuaccaggggcgag

SEQ ID NO: 1940176 - RNA, 16 nt, Human herpesvirus 4 [Epstein-Barr virus]
augcagggugcacaga

SEQ ID NO: 1940177 - RNA, 19 nt, Human herpesvirus 4 [Epstein-Barr virus]
cauggugucuguaaucucu

SEQ ID NO: 1940178 - RNA, 17 nt, Human herpesvirus 4 [Epstein-Barr virus]
cauugcuaauguaccuc

SEQ ID NO: 1940179 - RNA, 22 nt, Human herpesvirus 4 [Epstein-Barr virus]
auagcaggacggggggcuggcg

SEQ ID NO: 1940180 - RNA, 23 nt, Human herpesvirus 4 [Epstein-Barr virus]
cucggcggggaacgugacaggca

SEQ ID NO: 1940181 - RNA, 13 nt, Human herpesvirus 4 [Epstein-Barr virus]
gauggccuggaga

SEQ ID NO: 1940182 - RNA, 19 nt, Human herpesvirus 4 [Epstein-Barr virus]
gaaggggccucggccuggg

SEQ ID NO: 1940183 - RNA, 12 nt, Human herpesvirus 4 [Epstein-Barr virus]
aaacggccuggc

SEQ ID NO: 1940184 - RNA, 17 nt, Human herpesvirus 4 [Epstein-Barr virus]
acucucucccccgggcg

SEQ ID NO: 1940185 - RNA, 16 nt, Human herpesvirus 4 [Epstein-Barr virus]
caggcccgaccugcca

SEQ ID NO: 1940186 - RNA, 16 nt, Human herpesvirus 4 [Epstein-Barr virus]
cagccccucaucccug

SEQ ID NO: 1940187 - RNA, 13 nt, Human herpesvirus 4 [Epstein-Barr virus]
cagaaccaucagc

SEQ ID NO: 1940188 - RNA, 22 nt, Human herpesvirus 4 [Epstein-Barr virus]
acaugagaaaauacuucucuag

SEQ ID NO: 1940189 - RNA, 18 nt, Human herpesvirus 4 [Epstein-Barr virus]
aagguguagaaguguguc

SEQ ID NO: 1940190 - RNA, 21 nt, Human herpesvirus 4 [Epstein-Barr virus]
aggagcaggagcgggaggggc

SEQ ID NO: 1940191 - RNA, 16 nt, Human herpesvirus 4 [Epstein-Barr virus]
cuggugagccacguag

SEQ ID NO: 1940192 - RNA, 18 nt, Human herpesvirus 4 [Epstein-Barr virus]
gcacuggugguggaggag

SEQ ID NO: 1940193 - RNA, 13 nt, Human herpesvirus 4 [Epstein-Barr virus]
uggcagcagcucu

SEQ ID NO: 1940194 - RNA, 14 nt, Human herpesvirus 4 [Epstein-Barr virus]
uggcauccuucaga

SEQ ID NO: 1940195 - RNA, 16 nt, Human herpesvirus 4 [Epstein-Barr virus]
gcaggugcaccagcuc

SEQ ID NO: 1940196 - RNA, 17 nt, Human herpesvirus 4 [Epstein-Barr virus]
ugccaaagagccagauc

SEQ ID NO: 1940197 - RNA, 17 nt, Human herpesvirus 4 [Epstein-Barr virus]
acuccggcccacgccau

SEQ ID NO: 1940198 - RNA, 17 nt, Human herpesvirus 4 [Epstein-Barr virus]
cccucugggagaagggu

SEQ ID NO: 1940199 - RNA, 16 nt, Human herpesvirus 4 [Epstein-Barr virus]
gacagaaauuggguga

SEQ ID NO: 1940200 - RNA, 14 nt, Human herpesvirus 4 [Epstein-Barr virus]
agaggaugaggcug

SEQ ID NO: 1940201 - RNA, 13 nt, Human herpesvirus 4 [Epstein-Barr virus]
guuccacagccug

SEQ ID NO: 1940202 - RNA, 14 nt, Human herpesvirus 4 [Epstein-Barr virus]
ucuggcugugcuga

SEQ ID NO: 1940203 - RNA, 21 nt, Human herpesvirus 4 [Epstein-Barr virus]
gcgcccugucccuggagcugg

SEQ ID NO: 1940204 - RNA, 14 nt, Human herpesvirus 4 [Epstein-Barr virus]
cugucuugucacca

SEQ ID NO: 1940205 - RNA, 17 nt, Human herpesvirus 4 [Epstein-Barr virus]
caccaagauagugacca

SEQ ID NO: 1940206 - RNA, 23 nt, Human herpesvirus 4 [Epstein-Barr virus]
cugagcuggacgagguccuggac

SEQ ID NO: 1940207 - RNA, 19 nt, Human herpesvirus 4 [Epstein-Barr virus]
cgcaacgccggccugcugg

SEQ ID NO: 1940208 - RNA, 19 nt, Human herpesvirus 4 [Epstein-Barr virus]
cgacuuuguuuagggacag

SEQ ID NO: 1940209 - RNA, 19 nt, Human herpesvirus 4 [Epstein-Barr virus]
cgaugauugagaaugccaa

SEQ ID NO: 1940210 - RNA, 18 nt, Human herpesvirus 4 [Epstein-Barr virus]
agcaccggagccaccaca

SEQ ID NO: 1940211 - RNA, 13 nt, Human herpesvirus 4 [Epstein-Barr virus]
cagcgccuccucg

SEQ ID NO: 1940212 - RNA, 14 nt, Human herpesvirus 4 [Epstein-Barr virus]
gaggacgugaguga

SEQ ID NO: 1940213 - RNA, 19 nt, Human herpesvirus 4 [Epstein-Barr virus]
ggcuccuuagacugagcca

SEQ ID NO: 1940214 - RNA, 17 nt, Human herpesvirus 4 [Epstein-Barr virus]
gucuggcagggggccgg

SEQ ID NO: 1940215 - RNA, 14 nt, Human herpesvirus 4 [Epstein-Barr virus]
cgcccgggggccag

SEQ ID NO: 1940216 - RNA, 21 nt, Human herpesvirus 4 [Epstein-Barr virus]
cauggguaaugauucaucaga

SEQ ID NO: 1940217 - RNA, 17 nt, Human herpesvirus 4 [Epstein-Barr virus]
gcugggaauggagaggg

SEQ ID NO: 1940218 - RNA, 23 nt, Human herpesvirus 4 [Epstein-Barr virus]
auagcucugcacaggcuuggaaa

SEQ ID NO: 1940219 - RNA, 24 nt, Human herpesvirus 4 [Epstein-Barr virus]
uaaacgccugauuuuuguccgcag

SEQ ID NO: 1940220 - RNA, 16 nt, Human herpesvirus 4 [Epstein-Barr virus]
gacaagacagucacau

SEQ ID NO: 1940221 - RNA, 17 nt, Human herpesvirus 4 [Epstein-Barr virus]
accuguguccugggcaa

SEQ ID NO: 1940222 - RNA, 20 nt, Human herpesvirus 4 [Epstein-Barr virus]
cgcgagcuccgugggcccag

SEQ ID NO: 1940223 - RNA, 14 nt, Human herpesvirus 4 [Epstein-Barr virus]
gguggugggugugg

SEQ ID NO: 1940224 - RNA, 18 nt, Human herpesvirus 4 [Epstein-Barr virus]
gccgcuccguggccccgg

SEQ ID NO: 1940225 - RNA, 18 nt, Human herpesvirus 4 [Epstein-Barr virus]
ucuuuugcucuuaaccau

SEQ ID NO: 1940226 - RNA, 21 nt, Human herpesvirus 4 [Epstein-Barr virus]
gaagcggggcugggugggaga

SEQ ID NO: 1940227 - RNA, 14 nt, Human herpesvirus 4 [Epstein-Barr virus]
gccgccccgggccc

SEQ ID NO: 1940228 - RNA, 12 nt, Human herpesvirus 4 [Epstein-Barr virus]
gagcaaccagcu

SEQ ID NO: 1940229 - RNA, 22 nt, Human herpesvirus 4 [Epstein-Barr virus]
gucugacgaggggccagguaca

SEQ ID NO: 1940230 - RNA, 17 nt, Human herpesvirus 4 [Epstein-Barr virus]
aagagccauggugagac

SEQ ID NO: 1940231 - RNA, 12 nt, Human herpesvirus 4 [Epstein-Barr virus]
cuaccgccacgc

SEQ ID NO: 1940232 - RNA, 21 nt, Human herpesvirus 4 [Epstein-Barr virus]
ggcagccgcggccaucaccug

SEQ ID NO: 1940233 - RNA, 18 nt, Human herpesvirus 4 [Epstein-Barr virus]
cuaacacgaaugcccagg

SEQ ID NO: 1940234 - RNA, 23 nt, Human herpesvirus 4 [Epstein-Barr virus]
cucaggcacggucgccccuccga

SEQ ID NO: 1940235 - RNA, 21 nt, Human herpesvirus 4 [Epstein-Barr virus]
aaaguacaggauuauugccaa

SEQ ID NO: 1940236 - RNA, 21 nt, Human herpesvirus 4 [Epstein-Barr virus]
ugcagaggaugagaccagugg

SEQ ID NO: 1940237 - RNA, 12 nt, Human herpesvirus 4 [Epstein-Barr virus]
uggccucaaagu

SEQ ID NO: 1940238 - RNA, 18 nt, Human herpesvirus 4 [Epstein-Barr virus]
cugcucccgccucaggga

SEQ ID NO: 1940239 - RNA, 18 nt, Human herpesvirus 4 [Epstein-Barr virus]
caggagcgggaggggcag

SEQ ID NO: 1940240 - RNA, 15 nt, Human herpesvirus 4 [Epstein-Barr virus]
aggaaacugcugaca

SEQ ID NO: 1940241 - RNA, 17 nt, Human herpesvirus 4 [Epstein-Barr virus]
gucaaguaccagcuggu

SEQ ID NO: 1940242 - RNA, 19 nt, Human herpesvirus 4 [Epstein-Barr virus]
cagccggguccgugcggcu

SEQ ID NO: 1940243 - RNA, 14 nt, Human herpesvirus 4 [Epstein-Barr virus]
cucagaugcagugg

SEQ ID NO: 1940244 - RNA, 18 nt, Human herpesvirus 4 [Epstein-Barr virus]
ggaggccgagcagggacu

SEQ ID NO: 1940245 - RNA, 12 nt, Human herpesvirus 4 [Epstein-Barr virus]
cgcccccucugc

SEQ ID NO: 1940246 - RNA, 16 nt, Human herpesvirus 4 [Epstein-Barr virus]
cccucuguuucuucau

SEQ ID NO: 1940247 - RNA, 19 nt, Human herpesvirus 4 [Epstein-Barr virus]
augcucuggcgacuuggug

SEQ ID NO: 1940248 - RNA, 14 nt, Human herpesvirus 4 [Epstein-Barr virus]
caaacauguccugu

SEQ ID NO: 1940249 - RNA, 13 nt, Human herpesvirus 4 [Epstein-Barr virus]
aaagcugaagaac

SEQ ID NO: 1940250 - RNA, 12 nt, Human herpesvirus 4 [Epstein-Barr virus]
gaauaugaugag

SEQ ID NO: 1940251 - RNA, 16 nt, Human herpesvirus 4 [Epstein-Barr virus]
gacgagaaggaggaga

SEQ ID NO: 1940252 - RNA, 12 nt, Human herpesvirus 4 [Epstein-Barr virus]
gcggcugcugcc

SEQ ID NO: 1940253 - RNA, 21 nt, Human herpesvirus 4 [Epstein-Barr virus]
ccaucccaauucacaucucag

SEQ ID NO: 1940254 - RNA, 21 nt, Human herpesvirus 4 [Epstein-Barr virus]
ggaucgaaggagagcuggaug

SEQ ID NO: 1940255 - RNA, 14 nt, Human herpesvirus 4 [Epstein-Barr virus]
cauccccagagggc

SEQ ID NO: 1940256 - RNA, 16 nt, Human herpesvirus 4 [Epstein-Barr virus]
ucugcagagagccaca

SEQ ID NO: 1940257 - RNA, 18 nt, Human herpesvirus 4 [Epstein-Barr virus]
ccuauagauccugggccc

SEQ ID NO: 1940258 - RNA, 18 nt, Human herpesvirus 4 [Epstein-Barr virus]
gaugauauugaauuccac

SEQ ID NO: 1940259 - RNA, 16 nt, Human herpesvirus 4 [Epstein-Barr virus]
cguccuuguccaggag

SEQ ID NO: 1940260 - RNA, 13 nt, Human herpesvirus 4 [Epstein-Barr virus]
uagaaugugguaa

SEQ ID NO: 1940261 - RNA, 22 nt, Human herpesvirus 4 [Epstein-Barr virus]
caauucuacuguucaaacagca

SEQ ID NO: 1940262 - RNA, 12 nt, Human herpesvirus 4 [Epstein-Barr virus]
gugugcuguauu

SEQ ID NO: 1940263 - RNA, 22 nt, Human herpesvirus 4 [Epstein-Barr virus]
aguugguccaggguccaggaga

SEQ ID NO: 1940264 - RNA, 20 nt, Human herpesvirus 4 [Epstein-Barr virus]
cugcgagggggccuggugcc

SEQ ID NO: 1940265 - RNA, 15 nt, Human herpesvirus 4 [Epstein-Barr virus]
acacugaugagucug

SEQ ID NO: 1940266 - RNA, 13 nt, Human herpesvirus 4 [Epstein-Barr virus]
gugaaugcacgcc

SEQ ID NO: 1940267 - RNA, 22 nt, Human herpesvirus 4 [Epstein-Barr virus]
gugguugucuucccagacucug

SEQ ID NO: 1940268 - RNA, 16 nt, Human herpesvirus 4 [Epstein-Barr virus]
caguaacacagggugg

SEQ ID NO: 1940269 - RNA, 16 nt, Human herpesvirus 4 [Epstein-Barr virus]
ugucgagcaugagcuc

SEQ ID NO: 1940270 - RNA, 19 nt, Human herpesvirus 4 [Epstein-Barr virus]
ccuuggcaucaucagcgcc

SEQ ID NO: 1940271 - RNA, 16 nt, Human herpesvirus 4 [Epstein-Barr virus]
ucucggccuacgaggc

SEQ ID NO: 1940272 - RNA, 22 nt, Human herpesvirus 4 [Epstein-Barr virus]
uagugcgcgugaguucuuuagg

SEQ ID NO: 1940273 - RNA, 16 nt, Human herpesvirus 4 [Epstein-Barr virus]
gcuggccaggcuggug

SEQ ID NO: 1940274 - RNA, 17 nt, Human herpesvirus 4 [Epstein-Barr virus]
ugggaacaccgggcagg

SEQ ID NO: 1940275 - RNA, 21 nt, Human herpesvirus 4 [Epstein-Barr virus]
cucaauccauuaucuuggcac

SEQ ID NO: 1940276 - RNA, 21 nt, Human herpesvirus 4 [Epstein-Barr virus]
ucucggcacccaggcagccuu

SEQ ID NO: 1940277 - RNA, 19 nt, Human herpesvirus 4 [Epstein-Barr virus]
gcagcccggccgaggccug

SEQ ID NO: 1940278 - RNA, 23 nt, Human herpesvirus 4 [Epstein-Barr virus]
uccagacuccggggguccagccg

SEQ ID NO: 1940279 - RNA, 17 nt, Human herpesvirus 4 [Epstein-Barr virus]
uaccagaagagucauac

SEQ ID NO: 1940280 - RNA, 20 nt, Human herpesvirus 4 [Epstein-Barr virus]
ggggcugagaccaugcucag

SEQ ID NO: 1940281 - RNA, 17 nt, Human herpesvirus 4 [Epstein-Barr virus]
agggugaggcccagccc

SEQ ID NO: 1940282 - RNA, 17 nt, Human herpesvirus 4 [Epstein-Barr virus]
gguggccgcggcccagg

SEQ ID NO: 1940283 - RNA, 20 nt, Human herpesvirus 4 [Epstein-Barr virus]
gcgcaggggagggggcagga

SEQ ID NO: 1940284 - RNA, 20 nt, Human herpesvirus 4 [Epstein-Barr virus]
caggccgccuauggggccug

SEQ ID NO: 1940285 - RNA, 15 nt, Human herpesvirus 4 [Epstein-Barr virus]
agucuguacuuggga

SEQ ID NO: 1940286 - RNA, 21 nt, Human herpesvirus 4 [Epstein-Barr virus]
agccacacaaucagccgggag

SEQ ID NO: 1940287 - RNA, 23 nt, Human herpesvirus 4 [Epstein-Barr virus]
ucagggccacggcgugccagagg

SEQ ID NO: 1940288 - RNA, 22 nt, Human herpesvirus 4 [Epstein-Barr virus]
uuaaaacaguagaagaacugca

SEQ ID NO: 1940289 - RNA, 19 nt, Human herpesvirus 4 [Epstein-Barr virus]
caguacucggcuagccuga

SEQ ID NO: 1940290 - RNA, 18 nt, Human herpesvirus 4 [Epstein-Barr virus]
ccagaguucccggcugcu

SEQ ID NO: 1940291 - RNA, 17 nt, Human herpesvirus 4 [Epstein-Barr virus]
caaguguuuccagacac

SEQ ID NO: 1940292 - RNA, 17 nt, Human herpesvirus 4 [Epstein-Barr virus]
caccuugccggccaccu

SEQ ID NO: 1940293 - RNA, 17 nt, Human herpesvirus 4 [Epstein-Barr virus]
cgaacuccuccagcagu

SEQ ID NO: 1940294 - RNA, 17 nt, Human herpesvirus 4 [Epstein-Barr virus]
ggcguggagcugggccu

SEQ ID NO: 1940295 - RNA, 16 nt, Human herpesvirus 4 [Epstein-Barr virus]
acaauagaaguggaaa

SEQ ID NO: 1940296 - RNA, 19 nt, Human herpesvirus 4 [Epstein-Barr virus]
caauauccaucugcuucug

SEQ ID NO: 1940297 - RNA, 22 nt, Human herpesvirus 4 [Epstein-Barr virus]
uaaggccgggagaggcagcccc

SEQ ID NO: 1940298 - RNA, 13 nt, Human herpesvirus 4 [Epstein-Barr virus]
gugaggcccagcc

SEQ ID NO: 1940299 - RNA, 17 nt, Human herpesvirus 4 [Epstein-Barr virus]
ggaaaagagagcugaug

SEQ ID NO: 1940300 - RNA, 12 nt, Human herpesvirus 4 [Epstein-Barr virus]
agcauuugcaag

SEQ ID NO: 1940301 - RNA, 23 nt, Human herpesvirus 4 [Epstein-Barr virus]
accgcgcccuccucugggccgcc

SEQ ID NO: 1940302 - RNA, 20 nt, Human herpesvirus 4 [Epstein-Barr virus]
aggugucaauaauuucagug

SEQ ID NO: 1940303 - RNA, 14 nt, Human herpesvirus 4 [Epstein-Barr virus]
gucugacuuggccc

SEQ ID NO: 1940304 - RNA, 20 nt, Human herpesvirus 4 [Epstein-Barr virus]
uauccagagcugagugccca

SEQ ID NO: 1940305 - RNA, 14 nt, Human herpesvirus 4 [Epstein-Barr virus]
ccggacgcagaggc

SEQ ID NO: 1940306 - RNA, 19 nt, Human herpesvirus 4 [Epstein-Barr virus]
cugcacaaaggaaacugcu

SEQ ID NO: 1940307 - RNA, 12 nt, Human herpesvirus 4 [Epstein-Barr virus]
gagaaugacagc

SEQ ID NO: 1940308 - RNA, 12 nt, Human herpesvirus 4 [Epstein-Barr virus]
ggcugcugccaa

SEQ ID NO: 1940309 - RNA, 14 nt, Human herpesvirus 4 [Epstein-Barr virus]
ucgggggccugugu

SEQ ID NO: 1940310 - RNA, 13 nt, Human herpesvirus 4 [Epstein-Barr virus]
aggaugaggcuga

SEQ ID NO: 1940311 - RNA, 16 nt, Human herpesvirus 4 [Epstein-Barr virus]
cgccugacccucuugc

SEQ ID NO: 1940312 - RNA, 22 nt, Human herpesvirus 4 [Epstein-Barr virus]
uccacggggagacuuaugcuaa

SEQ ID NO: 1940313 - RNA, 17 nt, Human herpesvirus 4 [Epstein-Barr virus]
cgacaauaaaguugaug

SEQ ID NO: 1940314 - RNA, 13 nt, Human herpesvirus 4 [Epstein-Barr virus]
gccgcugccaggc

SEQ ID NO: 1940315 - RNA, 12 nt, Human herpesvirus 4 [Epstein-Barr virus]
aggcggaggcac

SEQ ID NO: 1940316 - RNA, 20 nt, Human herpesvirus 4 [Epstein-Barr virus]
cgucccugaguucuacaaug

SEQ ID NO: 1940317 - RNA, 13 nt, Human herpesvirus 4 [Epstein-Barr virus]
gaugaggcugaug

SEQ ID NO: 1940318 - RNA, 20 nt, Human herpesvirus 4 [Epstein-Barr virus]
uauuaauaaauaucuuccug

SEQ ID NO: 1940319 - RNA, 14 nt, Human herpesvirus 4 [Epstein-Barr virus]
gggcgaaggguggg

SEQ ID NO: 1940320 - RNA, 14 nt, Human herpesvirus 4 [Epstein-Barr virus]
aggcuaugaagaag

SEQ ID NO: 1940321 - RNA, 16 nt, Human herpesvirus 4 [Epstein-Barr virus]
ccccagacucaccccc

SEQ ID NO: 1940322 - RNA, 21 nt, Human herpesvirus 4 [Epstein-Barr virus]
acucuaaaaaucaaaacuuua

SEQ ID NO: 1940323 - RNA, 18 nt, Human herpesvirus 4 [Epstein-Barr virus]
cggucaaguaccagcugg

SEQ ID NO: 1940324 - RNA, 14 nt, Human herpesvirus 4 [Epstein-Barr virus]
gccgucccagggcc

SEQ ID NO: 1940325 - RNA, 20 nt, Human herpesvirus 4 [Epstein-Barr virus]
gcugcccauggaaugcucag

SEQ ID NO: 1940326 - RNA, 20 nt, Human herpesvirus 4 [Epstein-Barr virus]
cuggcugugcugacccuucu

SEQ ID NO: 1940327 - RNA, 18 nt, Human herpesvirus 4 [Epstein-Barr virus]
agugcuaugaccaugccc

SEQ ID NO: 1940328 - RNA, 12 nt, Human herpesvirus 4 [Epstein-Barr virus]
agcuccagggac

SEQ ID NO: 1940329 - RNA, 20 nt, Human herpesvirus 4 [Epstein-Barr virus]
ggccuccauccaguggggcu

SEQ ID NO: 1940330 - RNA, 11 nt, Human herpesvirus 4 [Epstein-Barr virus]
guagacagauc

SEQ ID NO: 1940331 - RNA, 19 nt, Human herpesvirus 4 [Epstein-Barr virus]
guccgccaggacggagaag

SEQ ID NO: 1940332 - RNA, 21 nt, Human herpesvirus 4 [Epstein-Barr virus]
gucuccccucugcagagagcc

SEQ ID NO: 1940333 - RNA, 19 nt, Human herpesvirus 4 [Epstein-Barr virus]
agagguugcgcugcuugcc

SEQ ID NO: 1940334 - RNA, 13 nt, Human herpesvirus 4 [Epstein-Barr virus]
cauggccaggcuc

SEQ ID NO: 1940335 - RNA, 17 nt, Human herpesvirus 4 [Epstein-Barr virus]
aggcuuucuaugccuga

SEQ ID NO: 1940336 - RNA, 20 nt, Human herpesvirus 4 [Epstein-Barr virus]
gcuucgaggucuccccugac

SEQ ID NO: 1940337 - RNA, 20 nt, Human herpesvirus 4 [Epstein-Barr virus]
ccuggcggcccagcccgacc

SEQ ID NO: 1940338 - RNA, 17 nt, Human herpesvirus 4 [Epstein-Barr virus]
uucaacacgaccaccua

SEQ ID NO: 1940339 - RNA, 22 nt, Human herpesvirus 4 [Epstein-Barr virus]
ugagccaggcuuucuaugccug

SEQ ID NO: 1940340 - RNA, 13 nt, Human herpesvirus 4 [Epstein-Barr virus]
ugaucagggagaa

SEQ ID NO: 1940341 - RNA, 18 nt, Human herpesvirus 4 [Epstein-Barr virus]
augacgcugcugcuacug

SEQ ID NO: 1940342 - RNA, 14 nt, Human herpesvirus 4 [Epstein-Barr virus]
gguggccggcagcc

SEQ ID NO: 1940343 - RNA, 23 nt, Human herpesvirus 4 [Epstein-Barr virus]
ugagaauaaggcucugaagcaac

SEQ ID NO: 1940344 - RNA, 15 nt, Human herpesvirus 4 [Epstein-Barr virus]
uugguaaaacaaggg

SEQ ID NO: 1940345 - RNA, 20 nt, Human herpesvirus 4 [Epstein-Barr virus]
cucacuucuacucuuggcag

SEQ ID NO: 1940346 - RNA, 19 nt, Human herpesvirus 4 [Epstein-Barr virus]
agguccuggacgagggggc

SEQ ID NO: 1940347 - RNA, 21 nt, Human herpesvirus 4 [Epstein-Barr virus]
cgaggcagacaaggccccgcc

SEQ ID NO: 1940348 - RNA, 14 nt, Human herpesvirus 4 [Epstein-Barr virus]
gacucaauuuccaa

SEQ ID NO: 1940349 - RNA, 17 nt, Human herpesvirus 4 [Epstein-Barr virus]
cccccuccauuccaccc

SEQ ID NO: 1940350 - RNA, 11 nt, Human herpesvirus 4 [Epstein-Barr virus]
cuccaccaccu

SEQ ID NO: 1940351 - RNA, 23 nt, Human herpesvirus 4 [Epstein-Barr virus]
agcccauucucguccaucucgau

SEQ ID NO: 1940352 - RNA, 23 nt, Human herpesvirus 4 [Epstein-Barr virus]
cgggcacgccuucgcccccucuu

SEQ ID NO: 1940353 - RNA, 15 nt, Human herpesvirus 4 [Epstein-Barr virus]
gcuggccugccugga

SEQ ID NO: 1940354 - RNA, 14 nt, Human herpesvirus 4 [Epstein-Barr virus]
cuccucgugcaccu

SEQ ID NO: 1940355 - RNA, 14 nt, Human herpesvirus 4 [Epstein-Barr virus]
caggggucucuaga

SEQ ID NO: 1940356 - RNA, 14 nt, Human herpesvirus 4 [Epstein-Barr virus]
acgcuggucuugaa

SEQ ID NO: 1940357 - RNA, 20 nt, Human herpesvirus 4 [Epstein-Barr virus]
uaaauucuccugccugccuc

SEQ ID NO: 1940358 - RNA, 20 nt, Human herpesvirus 4 [Epstein-Barr virus]
cuggccggccgcccccugac

SEQ ID NO: 1940359 - RNA, 13 nt, Human herpesvirus 4 [Epstein-Barr virus]
gggcggcggugga

SEQ ID NO: 1940360 - RNA, 20 nt, Human herpesvirus 4 [Epstein-Barr virus]
aaaaugucauaaccuggagu

SEQ ID NO: 1940361 - RNA, 20 nt, Human herpesvirus 4 [Epstein-Barr virus]
acaaaauggggguuggagaa

SEQ ID NO: 1940362 - RNA, 19 nt, Human herpesvirus 4 [Epstein-Barr virus]
cuugggauugcaacacgac

SEQ ID NO: 1940363 - RNA, 22 nt, Human herpesvirus 4 [Epstein-Barr virus]
ccugaguccaacauuaaagccu

SEQ ID NO: 1940364 - RNA, 20 nt, Human herpesvirus 4 [Epstein-Barr virus]
uucuguuaaggcuguugaca

SEQ ID NO: 1940365 - RNA, 22 nt, Human herpesvirus 4 [Epstein-Barr virus]
caggagacacacguggcuucca

SEQ ID NO: 1940366 - RNA, 17 nt, Human herpesvirus 4 [Epstein-Barr virus]
uagauggcgcgggugag

SEQ ID NO: 1940367 - RNA, 19 nt, Human herpesvirus 4 [Epstein-Barr virus]
ggggcucauggaggggcgg

SEQ ID NO: 1940368 - RNA, 19 nt, Human herpesvirus 4 [Epstein-Barr virus]
cuaggcuuuccugcaaggc

SEQ ID NO: 1940369 - RNA, 13 nt, Human herpesvirus 4 [Epstein-Barr virus]
gcagcauuuacaa

SEQ ID NO: 1940370 - RNA, 18 nt, Human herpesvirus 4 [Epstein-Barr virus]
ccagaagucggccacagg

SEQ ID NO: 1940371 - RNA, 15 nt, Human herpesvirus 4 [Epstein-Barr virus]
acugaauuuauaccc

SEQ ID NO: 1940372 - RNA, 19 nt, Human herpesvirus 4 [Epstein-Barr virus]
cgugagugacacugaugag

SEQ ID NO: 1940373 - RNA, 15 nt, Human herpesvirus 4 [Epstein-Barr virus]
ugcauacacugaauu

SEQ ID NO: 1940374 - RNA, 21 nt, Human herpesvirus 4 [Epstein-Barr virus]
uggaggcugcgccugagcugc

SEQ ID NO: 1940375 - RNA, 15 nt, Human herpesvirus 4 [Epstein-Barr virus]
agaggacuguucucu

SEQ ID NO: 1940376 - RNA, 22 nt, Human herpesvirus 4 [Epstein-Barr virus]
acugccuggggaaaauguaccc

SEQ ID NO: 1940377 - RNA, 14 nt, Human herpesvirus 4 [Epstein-Barr virus]
gguagccggcgcug

SEQ ID NO: 1940378 - RNA, 17 nt, Human herpesvirus 4 [Epstein-Barr virus]
accaagggcagggcaau

SEQ ID NO: 1940379 - RNA, 14 nt, Human herpesvirus 4 [Epstein-Barr virus]
cccagccccuccuc

SEQ ID NO: 1940380 - RNA, 14 nt, Human herpesvirus 4 [Epstein-Barr virus]
gcccuccucugggc

SEQ ID NO: 1940381 - RNA, 15 nt, Human herpesvirus 4 [Epstein-Barr virus]
cgaucccaggccuca

SEQ ID NO: 1940382 - RNA, 14 nt, Human herpesvirus 4 [Epstein-Barr virus]
gcggcuguggccuc

SEQ ID NO: 1940383 - RNA, 14 nt, Human herpesvirus 4 [Epstein-Barr virus]
cugagaaucuccug

SEQ ID NO: 1940384 - RNA, 19 nt, Human herpesvirus 4 [Epstein-Barr virus]
cggccguagcccaguccgc

SEQ ID NO: 1940385 - RNA, 15 nt, Human herpesvirus 4 [Epstein-Barr virus]
ggcucucaggccuca

SEQ ID NO: 1940386 - RNA, 16 nt, Human herpesvirus 4 [Epstein-Barr virus]
cuugccaauuggggug

SEQ ID NO: 1940387 - RNA, 18 nt, Human herpesvirus 4 [Epstein-Barr virus]
cccggggguggaggcugc

SEQ ID NO: 1940388 - RNA, 13 nt, Human herpesvirus 4 [Epstein-Barr virus]
cgcuacugcugcu

SEQ ID NO: 1940389 - RNA, 14 nt, Human herpesvirus 4 [Epstein-Barr virus]
ccggcuaucugcuu

SEQ ID NO: 1940390 - RNA, 11 nt, Human herpesvirus 4 [Epstein-Barr virus]
accagcuccag

SEQ ID NO: 1940391 - RNA, 13 nt, Human herpesvirus 4 [Epstein-Barr virus]
caggcuaugaaga

SEQ ID NO: 1940392 - RNA, 19 nt, Human herpesvirus 4 [Epstein-Barr virus]
gacaugugcauggccuggg

SEQ ID NO: 1940393 - RNA, 21 nt, Human herpesvirus 4 [Epstein-Barr virus]
cugugugcgcgccgccagcau

SEQ ID NO: 1940394 - RNA, 16 nt, Human herpesvirus 4 [Epstein-Barr virus]
gccccaauaugccaac

SEQ ID NO: 1940395 - RNA, 13 nt, Human herpesvirus 4 [Epstein-Barr virus]
cagcagcaguggu

SEQ ID NO: 1940396 - RNA, 17 nt, Human herpesvirus 4 [Epstein-Barr virus]
gugaugcuugugcuccu

SEQ ID NO: 1940397 - RNA, 17 nt, Human herpesvirus 4 [Epstein-Barr virus]
uuccuacaacucagccc

SEQ ID NO: 1940398 - RNA, 23 nt, Human herpesvirus 4 [Epstein-Barr virus]
gccugcaccaguggcugccccgg

SEQ ID NO: 1940399 - RNA, 19 nt, Human herpesvirus 4 [Epstein-Barr virus]
auuagcacgguagccuugg

SEQ ID NO: 1940400 - RNA, 22 nt, Human herpesvirus 4 [Epstein-Barr virus]
agccacacccaccuaugccaau

SEQ ID NO: 1940401 - RNA, 18 nt, Human herpesvirus 4 [Epstein-Barr virus]
ccugucucuuucuggcca

SEQ ID NO: 1940402 - RNA, 15 nt, Human herpesvirus 4 [Epstein-Barr virus]
gucggggcugcuggc

SEQ ID NO: 1940403 - RNA, 18 nt, Human herpesvirus 4 [Epstein-Barr virus]
gaggacggugucuguggu

SEQ ID NO: 1940404 - RNA, 21 nt, Human herpesvirus 4 [Epstein-Barr virus]
auuggacgucccuuuggagga

SEQ ID NO: 1940405 - RNA, 20 nt, Human herpesvirus 4 [Epstein-Barr virus]
cccgcgccgcaagcaugggc

SEQ ID NO: 1940406 - RNA, 15 nt, Human herpesvirus 4 [Epstein-Barr virus]
gugcagacgagcaug

SEQ ID NO: 1940407 - RNA, 20 nt, Human herpesvirus 4 [Epstein-Barr virus]
cucugcccuucagugucugg

SEQ ID NO: 1940408 - RNA, 22 nt, Human herpesvirus 4 [Epstein-Barr virus]
ggggcacucucgagggugccug

SEQ ID NO: 1940409 - RNA, 20 nt, Human herpesvirus 4 [Epstein-Barr virus]
caagcuuaugcagcaccuca

SEQ ID NO: 1940410 - RNA, 13 nt, Human herpesvirus 4 [Epstein-Barr virus]
ugaccaugcccag

SEQ ID NO: 1940411 - RNA, 18 nt, Human herpesvirus 4 [Epstein-Barr virus]
ccaccggggaggccaggu

SEQ ID NO: 1940412 - RNA, 19 nt, Human herpesvirus 4 [Epstein-Barr virus]
ggccucucuggcugugcug

SEQ ID NO: 1940413 - RNA, 23 nt, Human herpesvirus 4 [Epstein-Barr virus]
ggagauugauuuggaggaagagu

SEQ ID NO: 1940414 - RNA, 22 nt, Human herpesvirus 4 [Epstein-Barr virus]
ccggguuugauguuucuguggc

SEQ ID NO: 1940415 - RNA, 22 nt, Human herpesvirus 4 [Epstein-Barr virus]
cgagcagcgcggcagaggccuc

SEQ ID NO: 1940416 - RNA, 21 nt, Human herpesvirus 4 [Epstein-Barr virus]
ggccugccuggaucugagcua

SEQ ID NO: 1940417 - RNA, 17 nt, Human herpesvirus 4 [Epstein-Barr virus]
gcucgcccacacagcgc

SEQ ID NO: 1940418 - RNA, 16 nt, Human herpesvirus 4 [Epstein-Barr virus]
gucugcaccccagugg

SEQ ID NO: 1940419 - RNA, 23 nt, Human herpesvirus 4 [Epstein-Barr virus]
cccgccgugaacucugcccuuca

SEQ ID NO: 1940420 - RNA, 14 nt, Human herpesvirus 4 [Epstein-Barr virus]
gccgccgccagcag

SEQ ID NO: 1940421 - RNA, 21 nt, Human herpesvirus 4 [Epstein-Barr virus]
acgguggcuugggcuguggua

SEQ ID NO: 1940422 - RNA, 16 nt, Human herpesvirus 4 [Epstein-Barr virus]
ugaguccaacauuaaa

SEQ ID NO: 1940423 - RNA, 12 nt, Human herpesvirus 4 [Epstein-Barr virus]
ggcccagcccuc

SEQ ID NO: 1940424 - RNA, 14 nt, Human herpesvirus 4 [Epstein-Barr virus]
agggcaugcuuggg

SEQ ID NO: 1940425 - RNA, 14 nt, Human herpesvirus 4 [Epstein-Barr virus]
cccggccucccgcu

SEQ ID NO: 1940426 - RNA, 20 nt, Human herpesvirus 4 [Epstein-Barr virus]
auaauggugccugagggagg

SEQ ID NO: 1940427 - RNA, 18 nt, Human herpesvirus 4 [Epstein-Barr virus]
caaacucgacuucugaag

SEQ ID NO: 1940428 - RNA, 15 nt, Human herpesvirus 4 [Epstein-Barr virus]
auuuggaggaagagu

SEQ ID NO: 1940429 - RNA, 20 nt, Human herpesvirus 4 [Epstein-Barr virus]
ggggcgauaccuugggcauc

SEQ ID NO: 1940430 - RNA, 19 nt, Human herpesvirus 4 [Epstein-Barr virus]
gaacacucauggugugaga

SEQ ID NO: 1940431 - RNA, 17 nt, Human herpesvirus 4 [Epstein-Barr virus]
ggacaucauuagcccag

SEQ ID NO: 1940432 - RNA, 20 nt, Human herpesvirus 4 [Epstein-Barr virus]
acaugagaaaauacuucucu

SEQ ID NO: 1940433 - RNA, 18 nt, Human herpesvirus 4 [Epstein-Barr virus]
gaggcugaugauggccac

SEQ ID NO: 1940434 - RNA, 13 nt, Human herpesvirus 4 [Epstein-Barr virus]
ggcaggagcagga

SEQ ID NO: 1940435 - RNA, 18 nt, Human herpesvirus 4 [Epstein-Barr virus]
augucugacgaggggcca

SEQ ID NO: 1940436 - RNA, 14 nt, Human herpesvirus 4 [Epstein-Barr virus]
ggcgacgcggagag

SEQ ID NO: 1940437 - RNA, 21 nt, Human herpesvirus 4 [Epstein-Barr virus]
uuuccugcccucccacuuuua

SEQ ID NO: 1940438 - RNA, 23 nt, Human herpesvirus 4 [Epstein-Barr virus]
ucccagggccggaaccugagccu

SEQ ID NO: 1940439 - RNA, 18 nt, Human herpesvirus 4 [Epstein-Barr virus]
caucgccgccccaggggu

SEQ ID NO: 1940440 - RNA, 22 nt, Human herpesvirus 4 [Epstein-Barr virus]
auucccuaggaauuauuuacca

SEQ ID NO: 1940441 - RNA, 21 nt, Human herpesvirus 4 [Epstein-Barr virus]
cgauggucgucaucuggcucu

SEQ ID NO: 1940442 - RNA, 16 nt, Human herpesvirus 4 [Epstein-Barr virus]
cgugagucugcuggac

SEQ ID NO: 1940443 - RNA, 17 nt, Human herpesvirus 4 [Epstein-Barr virus]
gugcagccuaccgccac

SEQ ID NO: 1940444 - RNA, 22 nt, Human herpesvirus 4 [Epstein-Barr virus]
cuguugcgcccggcccuguaca

SEQ ID NO: 1940445 - RNA, 17 nt, Human herpesvirus 4 [Epstein-Barr virus]
guccaggguccaggaga

SEQ ID NO: 1940446 - RNA, 18 nt, Human herpesvirus 4 [Epstein-Barr virus]
cucuggggucucaggccu

SEQ ID NO: 1940447 - RNA, 18 nt, Human herpesvirus 4 [Epstein-Barr virus]
cuuuuacccccuggccac

SEQ ID NO: 1940448 - RNA, 23 nt, Human herpesvirus 4 [Epstein-Barr virus]
cucaagcuacucaaugagaggga

SEQ ID NO: 1940449 - RNA, 17 nt, Human herpesvirus 4 [Epstein-Barr virus]
cagauagccggccaggc

SEQ ID NO: 1940450 - RNA, 18 nt, Human herpesvirus 4 [Epstein-Barr virus]
ccuacgcugcccuagagg

SEQ ID NO: 1940451 - RNA, 14 nt, Human herpesvirus 4 [Epstein-Barr virus]
cgucacucagcucc

SEQ ID NO: 1940452 - RNA, 15 nt, Human herpesvirus 4 [Epstein-Barr virus]
ucuucauucuugcua

SEQ ID NO: 1940453 - RNA, 23 nt, Human herpesvirus 4 [Epstein-Barr virus]
aaccugagccugagccacaccca

SEQ ID NO: 1940454 - RNA, 13 nt, Human herpesvirus 4 [Epstein-Barr virus]
aggcugagaacug

SEQ ID NO: 1940455 - RNA, 21 nt, Human herpesvirus 4 [Epstein-Barr virus]
agaaggcuccggcggcagugg

SEQ ID NO: 1940456 - RNA, 20 nt, Human herpesvirus 4 [Epstein-Barr virus]
ugagagccaaaaauuugaua

SEQ ID NO: 1940457 - RNA, 18 nt, Human herpesvirus 4 [Epstein-Barr virus]
ugcacccacccccacccu

SEQ ID NO: 1940458 - RNA, 19 nt, Human herpesvirus 4 [Epstein-Barr virus]
gaacaucuggcuggggcau

SEQ ID NO: 1940459 - RNA, 17 nt, Human herpesvirus 4 [Epstein-Barr virus]
caagacucccugacggu

SEQ ID NO: 1940460 - RNA, 13 nt, Human herpesvirus 4 [Epstein-Barr virus]
guguuccacagcc

SEQ ID NO: 1940461 - RNA, 13 nt, Human herpesvirus 4 [Epstein-Barr virus]
gacaagaggcaga

SEQ ID NO: 1940462 - RNA, 23 nt, Human herpesvirus 4 [Epstein-Barr virus]
gcggguggaggagcuccgugagc

SEQ ID NO: 1940463 - RNA, 13 nt, Human herpesvirus 4 [Epstein-Barr virus]
gcccuuugccugg

SEQ ID NO: 1940464 - RNA, 21 nt, Human herpesvirus 4 [Epstein-Barr virus]
ugggcgcgggucccccuagcc

SEQ ID NO: 1940465 - RNA, 16 nt, Human herpesvirus 4 [Epstein-Barr virus]
gacgggguggugccug

SEQ ID NO: 1940466 - RNA, 15 nt, Human herpesvirus 4 [Epstein-Barr virus]
ggaugcaggaccuag

SEQ ID NO: 1940467 - RNA, 17 nt, Human herpesvirus 4 [Epstein-Barr virus]
guggcagccgcggccau

SEQ ID NO: 1940468 - RNA, 19 nt, Human herpesvirus 4 [Epstein-Barr virus]
uggcucgccucauccuggc

SEQ ID NO: 1940469 - RNA, 13 nt, Human herpesvirus 4 [Epstein-Barr virus]
cucgaccagcacg

SEQ ID NO: 1940470 - RNA, 15 nt, Human herpesvirus 4 [Epstein-Barr virus]
caagaggcagagagc

SEQ ID NO: 1940471 - RNA, 16 nt, Human herpesvirus 4 [Epstein-Barr virus]
cacucagacucuccgc

SEQ ID NO: 1940472 - RNA, 22 nt, Human herpesvirus 4 [Epstein-Barr virus]
aggcacaucuggaccuggacug

SEQ ID NO: 1940473 - RNA, 14 nt, Human herpesvirus 4 [Epstein-Barr virus]
auuuacaaacacua

SEQ ID NO: 1940474 - RNA, 22 nt, Human herpesvirus 4 [Epstein-Barr virus]
ggggcuaaccaaggacaacagc

SEQ ID NO: 1940475 - RNA, 18 nt, Human herpesvirus 4 [Epstein-Barr virus]
acgaucuucaagagucuc

SEQ ID NO: 1940476 - RNA, 20 nt, Human herpesvirus 4 [Epstein-Barr virus]
uggggccugugacuggugcu

SEQ ID NO: 1940477 - RNA, 11 nt, Human herpesvirus 4 [Epstein-Barr virus]
ccagaagcccc

SEQ ID NO: 1940478 - RNA, 17 nt, Human herpesvirus 4 [Epstein-Barr virus]
acgugagugacacugau

SEQ ID NO: 1940479 - RNA, 16 nt, Human herpesvirus 4 [Epstein-Barr virus]
cccaucuuggcccguc

SEQ ID NO: 1940480 - RNA, 22 nt, Human herpesvirus 4 [Epstein-Barr virus]
acuagcggcgagacccgaggca

SEQ ID NO: 1940481 - RNA, 14 nt, Human herpesvirus 4 [Epstein-Barr virus]
caggacacgugaca

SEQ ID NO: 1940482 - RNA, 21 nt, Human herpesvirus 4 [Epstein-Barr virus]
ccacgggaugacucaucucaa

SEQ ID NO: 1940483 - RNA, 16 nt, Human herpesvirus 4 [Epstein-Barr virus]
ccaccacgaugacucc

SEQ ID NO: 1940484 - RNA, 18 nt, Human herpesvirus 4 [Epstein-Barr virus]
uggaggcugcgccugagc

SEQ ID NO: 1940485 - RNA, 21 nt, Human herpesvirus 4 [Epstein-Barr virus]
augggggaggagagaccaaga

SEQ ID NO: 1940486 - RNA, 21 nt, Human herpesvirus 4 [Epstein-Barr virus]
ugaccuccuacacguuugccc

SEQ ID NO: 1940487 - RNA, 13 nt, Human herpesvirus 4 [Epstein-Barr virus]
gcagggcaaagcc

SEQ ID NO: 1940488 - RNA, 19 nt, Human herpesvirus 4 [Epstein-Barr virus]
gucccagggccggaaccug

SEQ ID NO: 1940489 - RNA, 18 nt, Human herpesvirus 4 [Epstein-Barr virus]
cagggccaggcgacgcuc

SEQ ID NO: 1940490 - RNA, 18 nt, Human herpesvirus 4 [Epstein-Barr virus]
ccgaggucagaaagaggc

SEQ ID NO: 1940491 - RNA, 20 nt, Human herpesvirus 4 [Epstein-Barr virus]
caagaacccccugcaggaca

SEQ ID NO: 1940492 - RNA, 11 nt, Human herpesvirus 4 [Epstein-Barr virus]
ugcauggccag

SEQ ID NO: 1940493 - RNA, 19 nt, Human herpesvirus 4 [Epstein-Barr virus]
cagaggccaucauggccga

SEQ ID NO: 1940494 - RNA, 15 nt, Human herpesvirus 4 [Epstein-Barr virus]
aggaggggcaggagc

SEQ ID NO: 1940495 - RNA, 14 nt, Human herpesvirus 4 [Epstein-Barr virus]
ccgccaccuccggg

SEQ ID NO: 1940496 - RNA, 17 nt, Human herpesvirus 4 [Epstein-Barr virus]
ccgcguguuugcugcuc

SEQ ID NO: 1940497 - RNA, 22 nt, Human herpesvirus 4 [Epstein-Barr virus]
gggaccggcuacgcgggccaca

SEQ ID NO: 1940498 - RNA, 20 nt, Human herpesvirus 4 [Epstein-Barr virus]
ugucggcuaaugccaugcag

SEQ ID NO: 1940499 - RNA, 15 nt, Human herpesvirus 4 [Epstein-Barr virus]
accucuguuccuucu

SEQ ID NO: 1940500 - RNA, 15 nt, Human herpesvirus 4 [Epstein-Barr virus]
aaugaacccaggggu

SEQ ID NO: 1940501 - RNA, 16 nt, Human herpesvirus 4 [Epstein-Barr virus]
aggauggaaagggcau

SEQ ID NO: 1940502 - RNA, 14 nt, Human herpesvirus 4 [Epstein-Barr virus]
cugacgcuccagga

SEQ ID NO: 1940503 - RNA, 21 nt, Human herpesvirus 4 [Epstein-Barr virus]
agcgaagcuagugcagggggc

SEQ ID NO: 1940504 - RNA, 12 nt, Human herpesvirus 4 [Epstein-Barr virus]
gcucuggcacug

SEQ ID NO: 1940505 - RNA, 21 nt, Human herpesvirus 4 [Epstein-Barr virus]
acaggccgccuauggggccug

SEQ ID NO: 1940506 - RNA, 12 nt, Human herpesvirus 4 [Epstein-Barr virus]
cgcccugucacc

SEQ ID NO: 1940507 - RNA, 23 nt, Human herpesvirus 4 [Epstein-Barr virus]
gcaccuguguccugggcaaggag

SEQ ID NO: 1940508 - RNA, 17 nt, Human herpesvirus 4 [Epstein-Barr virus]
uuacccucauugugcug

SEQ ID NO: 1940509 - RNA, 14 nt, Human herpesvirus 4 [Epstein-Barr virus]
gaugcugcagaggu

SEQ ID NO: 1940510 - RNA, 16 nt, Human herpesvirus 4 [Epstein-Barr virus]
cuccgccaccuccggg

SEQ ID NO: 1940511 - RNA, 15 nt, Human herpesvirus 4 [Epstein-Barr virus]
gccaagacauagaga

SEQ ID NO: 1940512 - RNA, 21 nt, Human herpesvirus 4 [Epstein-Barr virus]
ccuccacuuacaaccaagcca

SEQ ID NO: 1940513 - RNA, 13 nt, Human herpesvirus 4 [Epstein-Barr virus]
acagacccugggc

SEQ ID NO: 1940514 - RNA, 20 nt, Human herpesvirus 4 [Epstein-Barr virus]
gaaagucuauacggccacaa

SEQ ID NO: 1940515 - RNA, 14 nt, Human herpesvirus 4 [Epstein-Barr virus]
gucacagcugcugg

SEQ ID NO: 1940516 - RNA, 16 nt, Human herpesvirus 4 [Epstein-Barr virus]
uagugagccaggcuuu

SEQ ID NO: 1940517 - RNA, 23 nt, Human herpesvirus 4 [Epstein-Barr virus]
ccugcggcccacugaaaaaccag

SEQ ID NO: 1940518 - RNA, 15 nt, Human herpesvirus 4 [Epstein-Barr virus]
uucugcugcugcugg

SEQ ID NO: 1940519 - RNA, 19 nt, Human herpesvirus 4 [Epstein-Barr virus]
aggccccccgcaccagggc

SEQ ID NO: 1940520 - RNA, 16 nt, Human herpesvirus 4 [Epstein-Barr virus]
aucaucgggaaaggcg

SEQ ID NO: 1940521 - RNA, 14 nt, Human herpesvirus 4 [Epstein-Barr virus]
caggucuugccgug

SEQ ID NO: 1940522 - RNA, 19 nt, Human herpesvirus 4 [Epstein-Barr virus]
cgcagaccccagagcagcc

SEQ ID NO: 1940523 - RNA, 12 nt, Human herpesvirus 4 [Epstein-Barr virus]
auccuggccccc

SEQ ID NO: 1940524 - RNA, 21 nt, Human herpesvirus 4 [Epstein-Barr virus]
aggcuacaacaggcugcugaa

SEQ ID NO: 1940525 - RNA, 13 nt, Human herpesvirus 4 [Epstein-Barr virus]
agguugggccacg

SEQ ID NO: 1940526 - RNA, 19 nt, Human herpesvirus 4 [Epstein-Barr virus]
gccuuguucuuugaccuuu

SEQ ID NO: 1940527 - RNA, 17 nt, Human herpesvirus 4 [Epstein-Barr virus]
gguccaggagucugcug

SEQ ID NO: 1940528 - RNA, 16 nt, Human herpesvirus 4 [Epstein-Barr virus]
cugcuauucugagcac

SEQ ID NO: 1940529 - RNA, 13 nt, Human herpesvirus 4 [Epstein-Barr virus]
agucugcuggacu

SEQ ID NO: 1940530 - RNA, 20 nt, Human herpesvirus 4 [Epstein-Barr virus]
uagagugccgggcccgggac

SEQ ID NO: 1940531 - RNA, 13 nt, Human herpesvirus 4 [Epstein-Barr virus]
ccucugggccgcc

SEQ ID NO: 1940532 - RNA, 20 nt, Human herpesvirus 4 [Epstein-Barr virus]
gugguaacaggugggacaaa

SEQ ID NO: 1940533 - RNA, 19 nt, Human herpesvirus 4 [Epstein-Barr virus]
cgccagagacaaggcaggc

SEQ ID NO: 1940534 - RNA, 15 nt, Human herpesvirus 4 [Epstein-Barr virus]
cuccugccugccucu

SEQ ID NO: 1940535 - RNA, 19 nt, Human herpesvirus 4 [Epstein-Barr virus]
ggguauagagcauaugccg

SEQ ID NO: 1940536 - RNA, 14 nt, Human herpesvirus 4 [Epstein-Barr virus]
ugggagcacauucc

SEQ ID NO: 1940537 - RNA, 21 nt, Human herpesvirus 4 [Epstein-Barr virus]
caccagagggugagcccaccu

SEQ ID NO: 1940538 - RNA, 15 nt, Human herpesvirus 4 [Epstein-Barr virus]
ucaggcggaggcacu

SEQ ID NO: 1940539 - RNA, 22 nt, Human herpesvirus 4 [Epstein-Barr virus]
ugauuaggcacuggacacacau

SEQ ID NO: 1940540 - RNA, 18 nt, Human herpesvirus 4 [Epstein-Barr virus]
uaauucucuucuguuugc

SEQ ID NO: 1940541 - RNA, 23 nt, Human herpesvirus 4 [Epstein-Barr virus]
gcuacucuccgccguuccuucag

SEQ ID NO: 1940542 - RNA, 17 nt, Human herpesvirus 4 [Epstein-Barr virus]
aggcauuaccaugucau

SEQ ID NO: 1940543 - RNA, 16 nt, Human herpesvirus 4 [Epstein-Barr virus]
gugucgcguagcucug

SEQ ID NO: 1940544 - RNA, 16 nt, Human herpesvirus 4 [Epstein-Barr virus]
ccugggaggugcugag

SEQ ID NO: 1940545 - RNA, 23 nt, Human herpesvirus 4 [Epstein-Barr virus]
accugacuggcagaaaggcuggc

SEQ ID NO: 1940546 - RNA, 18 nt, Human herpesvirus 4 [Epstein-Barr virus]
gguagugauuuggacccg

SEQ ID NO: 1940547 - RNA, 18 nt, Human herpesvirus 4 [Epstein-Barr virus]
aggccgggagaggcagcc

SEQ ID NO: 1940548 - RNA, 9 nt, Human herpesvirus 4 [Epstein-Barr virus]
cuuccuguc

SEQ ID NO: 1940549 - RNA, 16 nt, Human herpesvirus 4 [Epstein-Barr virus]
gcaggagcaggagggg

SEQ ID NO: 1940550 - RNA, 23 nt, Human herpesvirus 4 [Epstein-Barr virus]
auucuccugccugccucugcucu

SEQ ID NO: 1940551 - RNA, 15 nt, Human herpesvirus 4 [Epstein-Barr virus]
cucccauguaagccu

SEQ ID NO: 1940552 - RNA, 21 nt, Human herpesvirus 4 [Epstein-Barr virus]
ggagauugauuuggaggaaga

SEQ ID NO: 1940553 - RNA, 15 nt, Human herpesvirus 4 [Epstein-Barr virus]
ggcagccuugcgugg

SEQ ID NO: 1940554 - RNA, 24 nt, Human herpesvirus 4 [Epstein-Barr virus]
ccuucgauuuuacgaugaaggagg

SEQ ID NO: 1940555 - RNA, 14 nt, Human herpesvirus 4 [Epstein-Barr virus]
cgccagcagggcac

SEQ ID NO: 1940556 - RNA, 14 nt, Human herpesvirus 4 [Epstein-Barr virus]
augaggagcaggca

SEQ ID NO: 1940557 - RNA, 15 nt, Human herpesvirus 4 [Epstein-Barr virus]
ugucacguguccugc

SEQ ID NO: 1940558 - RNA, 19 nt, Human herpesvirus 4 [Epstein-Barr virus]
agaucaucccacugggacg

SEQ ID NO: 1940559 - RNA, 18 nt, Human herpesvirus 4 [Epstein-Barr virus]
gcauccucaaggggcacg

SEQ ID NO: 1940560 - RNA, 18 nt, Human herpesvirus 4 [Epstein-Barr virus]
cagcuguucccagucucc

SEQ ID NO: 1940561 - RNA, 21 nt, Human herpesvirus 4 [Epstein-Barr virus]
ugggguccaggagucugcugc

SEQ ID NO: 1940562 - RNA, 15 nt, Human herpesvirus 4 [Epstein-Barr virus]
ugucuucccagacuc

SEQ ID NO: 1940563 - RNA, 23 nt, Human herpesvirus 4 [Epstein-Barr virus]
gauaucacacccucggagaucau

SEQ ID NO: 1940564 - RNA, 14 nt, Human herpesvirus 4 [Epstein-Barr virus]
caugagggcaccga

SEQ ID NO: 1940565 - RNA, 17 nt, Human herpesvirus 4 [Epstein-Barr virus]
ugucccuuucagugguc

SEQ ID NO: 1940566 - RNA, 14 nt, Human herpesvirus 4 [Epstein-Barr virus]
uguuucuggaaugc

SEQ ID NO: 1940567 - RNA, 20 nt, Human herpesvirus 4 [Epstein-Barr virus]
gagcuccgagagcuccgcca

SEQ ID NO: 1940568 - RNA, 15 nt, Human herpesvirus 4 [Epstein-Barr virus]
ccaggguccaggaga

SEQ ID NO: 1940569 - RNA, 15 nt, Human herpesvirus 4 [Epstein-Barr virus]
ggcacccccucugag

SEQ ID NO: 1940570 - RNA, 16 nt, Human herpesvirus 4 [Epstein-Barr virus]
ccccagaagcccccaa

SEQ ID NO: 1940571 - RNA, 13 nt, Human herpesvirus 4 [Epstein-Barr virus]
cuugugcuccuga

SEQ ID NO: 1940572 - RNA, 13 nt, Human herpesvirus 4 [Epstein-Barr virus]
ccuucugcugcug

SEQ ID NO: 1940573 - RNA, 13 nt, Human herpesvirus 4 [Epstein-Barr virus]
cugaguucuacaa

SEQ ID NO: 1940574 - RNA, 18 nt, Human herpesvirus 4 [Epstein-Barr virus]
gcauucagauuucuaguu

SEQ ID NO: 1940575 - RNA, 15 nt, Human herpesvirus 4 [Epstein-Barr virus]
aggauaaucaggcga

SEQ ID NO: 1940576 - RNA, 17 nt, Human herpesvirus 4 [Epstein-Barr virus]
gugacauucacugggac

SEQ ID NO: 1940577 - RNA, 15 nt, Human herpesvirus 4 [Epstein-Barr virus]
uggccccuguguaca

SEQ ID NO: 1940578 - RNA, 20 nt, Human herpesvirus 4 [Epstein-Barr virus]
uggcagggggccgggcgcgc

SEQ ID NO: 1940579 - RNA, 20 nt, Human herpesvirus 4 [Epstein-Barr virus]
gguuauaacugccagagcug

SEQ ID NO: 1940580 - RNA, 12 nt, Human herpesvirus 4 [Epstein-Barr virus]
cagagcaaaagc

SEQ ID NO: 1940581 - RNA, 20 nt, Human herpesvirus 4 [Epstein-Barr virus]
uggggauuacccgacccagc

SEQ ID NO: 1940582 - RNA, 21 nt, Human herpesvirus 4 [Epstein-Barr virus]
gaagagccgcuccguggcccc

SEQ ID NO: 1940583 - RNA, 13 nt, Human herpesvirus 4 [Epstein-Barr virus]
ugucccccuagcc

SEQ ID NO: 1940584 - RNA, 19 nt, Human herpesvirus 4 [Epstein-Barr virus]
ggcccacgugaacauccug

SEQ ID NO: 1940585 - RNA, 19 nt, Human herpesvirus 4 [Epstein-Barr virus]
gagcaggaggaggggcagg

SEQ ID NO: 1940586 - RNA, 20 nt, Human herpesvirus 4 [Epstein-Barr virus]
gauacaaaaacuugagucuc

SEQ ID NO: 1940587 - RNA, 19 nt, Human herpesvirus 4 [Epstein-Barr virus]
gagccggggguugcuucau

SEQ ID NO: 1940588 - RNA, 16 nt, Human herpesvirus 4 [Epstein-Barr virus]
ggcccccagcuucuga

SEQ ID NO: 1940589 - RNA, 14 nt, Human herpesvirus 4 [Epstein-Barr virus]
ccacaaaaaaugca

SEQ ID NO: 1940590 - RNA, 15 nt, Human herpesvirus 4 [Epstein-Barr virus]
agggcagcgaagaac

SEQ ID NO: 1940591 - RNA, 14 nt, Human herpesvirus 4 [Epstein-Barr virus]
agacucaggcccuc

SEQ ID NO: 1940592 - RNA, 22 nt, Human herpesvirus 4 [Epstein-Barr virus]
agagucuaucaggaccugggag

SEQ ID NO: 1940593 - RNA, 12 nt, Human herpesvirus 4 [Epstein-Barr virus]
guggagggccga

SEQ ID NO: 1940594 - RNA, 13 nt, Human herpesvirus 4 [Epstein-Barr virus]
auggccugggccc

SEQ ID NO: 1940595 - RNA, 22 nt, Human herpesvirus 4 [Epstein-Barr virus]
gauggcacgguccagaagcaga

SEQ ID NO: 1940596 - RNA, 16 nt, Human herpesvirus 4 [Epstein-Barr virus]
ugcguccucuaccugg

SEQ ID NO: 1940597 - RNA, 20 nt, Human herpesvirus 4 [Epstein-Barr virus]
ugggcaaaacucacaggaca

SEQ ID NO: 1940598 - RNA, 13 nt, Human herpesvirus 4 [Epstein-Barr virus]
ccgcugggccagg

SEQ ID NO: 1940599 - RNA, 18 nt, Human herpesvirus 4 [Epstein-Barr virus]
ucuaacugugucccacuc

SEQ ID NO: 1940600 - RNA, 23 nt, Human herpesvirus 4 [Epstein-Barr virus]
gacuguuuguggcggcaucaugu

SEQ ID NO: 1940601 - RNA, 14 nt, Human herpesvirus 4 [Epstein-Barr virus]
agacggggagguga

SEQ ID NO: 1940602 - RNA, 18 nt, Human herpesvirus 4 [Epstein-Barr virus]
cugagacagaggugcuca

SEQ ID NO: 1940603 - RNA, 14 nt, Human herpesvirus 4 [Epstein-Barr virus]
cgaaagcggcccag

SEQ ID NO: 1940604 - RNA, 21 nt, Human herpesvirus 4 [Epstein-Barr virus]
cagagccccuuuugccccccu

SEQ ID NO: 1940605 - RNA, 17 nt, Human herpesvirus 4 [Epstein-Barr virus]
acuggcacacacucccu

SEQ ID NO: 1940606 - RNA, 19 nt, Human herpesvirus 4 [Epstein-Barr virus]
ucaucucgcuggcucgccu

SEQ ID NO: 1940607 - RNA, 16 nt, Human herpesvirus 4 [Epstein-Barr virus]
gccucgugcaaccagg

SEQ ID NO: 1940608 - RNA, 14 nt, Human herpesvirus 4 [Epstein-Barr virus]
gcagggguggugga

SEQ ID NO: 1940609 - RNA, 16 nt, Human herpesvirus 4 [Epstein-Barr virus]
gccgcgcugcucgccc

SEQ ID NO: 1940610 - RNA, 19 nt, Human herpesvirus 4 [Epstein-Barr virus]
caggcacaucuggcaccug

SEQ ID NO: 1940611 - RNA, 12 nt, Human herpesvirus 4 [Epstein-Barr virus]
agagggaugggc

SEQ ID NO: 1940612 - RNA, 21 nt, Human herpesvirus 4 [Epstein-Barr virus]
acguccgugagagccuaccca

SEQ ID NO: 1940613 - RNA, 13 nt, Human herpesvirus 4 [Epstein-Barr virus]
cccggcggcugcu

SEQ ID NO: 1940614 - RNA, 14 nt, Human herpesvirus 4 [Epstein-Barr virus]
acucugaccaggac

SEQ ID NO: 1940615 - RNA, 19 nt, Human herpesvirus 4 [Epstein-Barr virus]
aucucggcuguuuguacuu

SEQ ID NO: 1940616 - RNA, 15 nt, Human herpesvirus 4 [Epstein-Barr virus]
uuaccagugugccag

SEQ ID NO: 1940617 - RNA, 22 nt, Human herpesvirus 4 [Epstein-Barr virus]
gguaaguuuucccuuccuuuaa

SEQ ID NO: 1940618 - RNA, 14 nt, Human herpesvirus 4 [Epstein-Barr virus]
ugaggugccacaga

SEQ ID NO: 1940619 - RNA, 22 nt, Human herpesvirus 4 [Epstein-Barr virus]
uucccgccuagagcauuugcaa

SEQ ID NO: 1940620 - RNA, 14 nt, Human herpesvirus 4 [Epstein-Barr virus]
cccugacgcugugg

SEQ ID NO: 1940621 - RNA, 23 nt, Human herpesvirus 4 [Epstein-Barr virus]
ccgccgcagaagagccgcuccgu

SEQ ID NO: 1940622 - RNA, 17 nt, Human herpesvirus 4 [Epstein-Barr virus]
agccgucgauaccgggu

SEQ ID NO: 1940623 - RNA, 20 nt, Human herpesvirus 4 [Epstein-Barr virus]
ccguugguggucagcagcag

SEQ ID NO: 1940624 - RNA, 14 nt, Human herpesvirus 4 [Epstein-Barr virus]
cacggaugccuggc

SEQ ID NO: 1940625 - RNA, 16 nt, Human herpesvirus 4 [Epstein-Barr virus]
ccagucaccuuccaga

SEQ ID NO: 1940626 - RNA, 22 nt, Human herpesvirus 4 [Epstein-Barr virus]
gcagauuuccgucagccagggu

SEQ ID NO: 1940627 - RNA, 12 nt, Human herpesvirus 4 [Epstein-Barr virus]
aggagcaggagc

SEQ ID NO: 1940628 - RNA, 15 nt, Human herpesvirus 4 [Epstein-Barr virus]
caccgggaugagcug

SEQ ID NO: 1940629 - RNA, 16 nt, Human herpesvirus 4 [Epstein-Barr virus]
uacuaacacgcaauaa

SEQ ID NO: 1940630 - RNA, 23 nt, Human herpesvirus 4 [Epstein-Barr virus]
auccuagagggacagcugacggu

SEQ ID NO: 1940631 - RNA, 14 nt, Human herpesvirus 4 [Epstein-Barr virus]
caugguguagacag

SEQ ID NO: 1940632 - RNA, 13 nt, Human herpesvirus 4 [Epstein-Barr virus]
ggcugaugauggc

SEQ ID NO: 1940633 - RNA, 12 nt, Human herpesvirus 4 [Epstein-Barr virus]
ggcagaggccuc

SEQ ID NO: 1940634 - RNA, 16 nt, Human herpesvirus 4 [Epstein-Barr virus]
cacucacccccgagga

SEQ ID NO: 1940635 - RNA, 16 nt, Human herpesvirus 4 [Epstein-Barr virus]
ccuagguacucuuggu

SEQ ID NO: 1940636 - RNA, 13 nt, Human herpesvirus 4 [Epstein-Barr virus]
caucuaaggucca

SEQ ID NO: 1940637 - RNA, 16 nt, Human herpesvirus 4 [Epstein-Barr virus]
cauugacccgaggauc

SEQ ID NO: 1940638 - RNA, 16 nt, Human herpesvirus 4 [Epstein-Barr virus]
uaaccuaugccuggaa

SEQ ID NO: 1940639 - RNA, 18 nt, Human herpesvirus 4 [Epstein-Barr virus]
gcccagggacauccccag

SEQ ID NO: 1940640 - RNA, 18 nt, Human herpesvirus 4 [Epstein-Barr virus]
ccuugggugaccuggcca

SEQ ID NO: 1940641 - RNA, 16 nt, Human herpesvirus 4 [Epstein-Barr virus]
cacagaggaggcuggu

SEQ ID NO: 1940642 - RNA, 13 nt, Human herpesvirus 4 [Epstein-Barr virus]
guggccaggcccg

SEQ ID NO: 1940643 - RNA, 20 nt, Human herpesvirus 4 [Epstein-Barr virus]
auucccucgaaucccuacca

SEQ ID NO: 1940644 - RNA, 17 nt, Human herpesvirus 4 [Epstein-Barr virus]
cuggccgccggauggcc

SEQ ID NO: 1940645 - RNA, 13 nt, Human herpesvirus 4 [Epstein-Barr virus]
aagguccaucccg

SEQ ID NO: 1940646 - RNA, 13 nt, Human herpesvirus 4 [Epstein-Barr virus]
ugcugccuggggg

SEQ ID NO: 1940647 - RNA, 15 nt, Human herpesvirus 4 [Epstein-Barr virus]
gugaggcggugccug

SEQ ID NO: 1940648 - RNA, 18 nt, Human herpesvirus 4 [Epstein-Barr virus]
agagauuucauccucaga

SEQ ID NO: 1940649 - RNA, 14 nt, Human herpesvirus 4 [Epstein-Barr virus]
uaauaaauaucuuc

SEQ ID NO: 1940650 - RNA, 19 nt, Human herpesvirus 4 [Epstein-Barr virus]
aucgcugguggcaguauuu

SEQ ID NO: 1940651 - RNA, 11 nt, Human herpesvirus 4 [Epstein-Barr virus]
cuuggaccaag

SEQ ID NO: 1940652 - RNA, 22 nt, Human herpesvirus 4 [Epstein-Barr virus]
gucccccuccauuccacccacu

SEQ ID NO: 1940653 - RNA, 14 nt, Human herpesvirus 4 [Epstein-Barr virus]
cagcgccagcaggg

SEQ ID NO: 1940654 - RNA, 18 nt, Human herpesvirus 4 [Epstein-Barr virus]
cauggagagguuugagaa

SEQ ID NO: 1940655 - RNA, 21 nt, Human herpesvirus 4 [Epstein-Barr virus]
caagaguuuaagcagcacuga

SEQ ID NO: 1940656 - RNA, 20 nt, Human herpesvirus 4 [Epstein-Barr virus]
cugagaccucuguguccaag

SEQ ID NO: 1940657 - RNA, 15 nt, Human herpesvirus 4 [Epstein-Barr virus]
acccagcccucgaga

SEQ ID NO: 1940658 - RNA, 14 nt, Human herpesvirus 4 [Epstein-Barr virus]
cagaaaagugagcc

SEQ ID NO: 1940659 - RNA, 12 nt, Human herpesvirus 4 [Epstein-Barr virus]
augggugcauuu

SEQ ID NO: 1940660 - RNA, 23 nt, Human herpesvirus 4 [Epstein-Barr virus]
ccuggagagcaugcaggucaggu

SEQ ID NO: 1940661 - RNA, 22 nt, Human herpesvirus 4 [Epstein-Barr virus]
ggguaggccauacgucuagcca

SEQ ID NO: 1940662 - RNA, 12 nt, Human herpesvirus 4 [Epstein-Barr virus]
gccacacccacc

SEQ ID NO: 1940663 - RNA, 21 nt, Human herpesvirus 4 [Epstein-Barr virus]
aauguuccuucucaugcuccu

SEQ ID NO: 1940664 - RNA, 22 nt, Human herpesvirus 4 [Epstein-Barr virus]
cugauaaugucuucaauagaca

SEQ ID NO: 1940665 - RNA, 12 nt, Human herpesvirus 4 [Epstein-Barr virus]
ugguugucuucc

SEQ ID NO: 1940666 - RNA, 22 nt, Human herpesvirus 4 [Epstein-Barr virus]
cuuaaaaaugugcagcuucucc

SEQ ID NO: 1940667 - RNA, 17 nt, Human herpesvirus 4 [Epstein-Barr virus]
cucgcucagagcuggga

SEQ ID NO: 1940668 - RNA, 14 nt, Human herpesvirus 4 [Epstein-Barr virus]
gcaucagaugagac

SEQ ID NO: 1940669 - RNA, 15 nt, Human herpesvirus 4 [Epstein-Barr virus]
uaacgggaagugugu

SEQ ID NO: 1940670 - RNA, 14 nt, Human herpesvirus 4 [Epstein-Barr virus]
ccucgugcaccuau

SEQ ID NO: 1940671 - RNA, 13 nt, Human herpesvirus 4 [Epstein-Barr virus]
acauggggcauua

SEQ ID NO: 1940672 - RNA, 16 nt, Human herpesvirus 4 [Epstein-Barr virus]
ggcgggaauggccgcc

SEQ ID NO: 1940673 - RNA, 16 nt, Human herpesvirus 4 [Epstein-Barr virus]
cagccgcggccaucac

SEQ ID NO: 1940674 - RNA, 14 nt, Human herpesvirus 4 [Epstein-Barr virus]
ccuggcggcccagc

SEQ ID NO: 1940675 - RNA, 18 nt, Human herpesvirus 4 [Epstein-Barr virus]
acaucuggaccuggacug

SEQ ID NO: 1940676 - RNA, 20 nt, Human herpesvirus 4 [Epstein-Barr virus]
cacgcuuuugucugccugga

SEQ ID NO: 1940677 - RNA, 13 nt, Human herpesvirus 4 [Epstein-Barr virus]
gguguccagcgcu

SEQ ID NO: 1940678 - RNA, 20 nt, Human herpesvirus 4 [Epstein-Barr virus]
cccggguacccuuucuacca

SEQ ID NO: 1940679 - RNA, 15 nt, Human herpesvirus 4 [Epstein-Barr virus]
ccacccccaccaccu

SEQ ID NO: 1940680 - RNA, 19 nt, Human herpesvirus 4 [Epstein-Barr virus]
cucagccugcuccugagaa

SEQ ID NO: 1940681 - RNA, 14 nt, Human herpesvirus 4 [Epstein-Barr virus]
ucgacgcuguuuug

SEQ ID NO: 1940682 - RNA, 23 nt, Human herpesvirus 4 [Epstein-Barr virus]
agcuccagggacagggcgcugca

SEQ ID NO: 1940683 - RNA, 24 nt, Human herpesvirus 4 [Epstein-Barr virus]
ccuguuccggccucgguggcagug

SEQ ID NO: 1940684 - RNA, 18 nt, Human herpesvirus 4 [Epstein-Barr virus]
agaugaagacgaggagau

SEQ ID NO: 1940685 - RNA, 13 nt, Human herpesvirus 4 [Epstein-Barr virus]
gccuggacugugg

SEQ ID NO: 1940686 - RNA, 13 nt, Human herpesvirus 4 [Epstein-Barr virus]
uauuuugggccag

SEQ ID NO: 1940687 - RNA, 20 nt, Human herpesvirus 4 [Epstein-Barr virus]
cugggaugaacccuggggca

SEQ ID NO: 1940688 - RNA, 15 nt, Human herpesvirus 4 [Epstein-Barr virus]
auccuaggcacggcc

SEQ ID NO: 1940689 - RNA, 16 nt, Human herpesvirus 4 [Epstein-Barr virus]
acgguggaacaggagc

SEQ ID NO: 1940690 - RNA, 23 nt, Human herpesvirus 4 [Epstein-Barr virus]
ccugagaaugcuuaucaagcuua

SEQ ID NO: 1940691 - RNA, 16 nt, Human herpesvirus 4 [Epstein-Barr virus]
cccucauugugcugaa

SEQ ID NO: 1940692 - RNA, 18 nt, Human herpesvirus 4 [Epstein-Barr virus]
cuggcaaagauccccagu

SEQ ID NO: 1940693 - RNA, 15 nt, Human herpesvirus 4 [Epstein-Barr virus]
cgcgacauguuucug

SEQ ID NO: 1940694 - RNA, 14 nt, Human herpesvirus 4 [Epstein-Barr virus]
ugagagccuaccca

SEQ ID NO: 1940695 - RNA, 14 nt, Human herpesvirus 4 [Epstein-Barr virus]
cggaguugagcccg

SEQ ID NO: 1940696 - RNA, 21 nt, Human herpesvirus 4 [Epstein-Barr virus]
cuagcuauaaaagaggccggg

SEQ ID NO: 1940697 - RNA, 14 nt, Human herpesvirus 4 [Epstein-Barr virus]
caacauuaaagccu

SEQ ID NO: 1940698 - RNA, 17 nt, Human herpesvirus 4 [Epstein-Barr virus]
acgguggaacaggagca

SEQ ID NO: 1940699 - RNA, 19 nt, Human herpesvirus 4 [Epstein-Barr virus]
gccucaaaguccugcacua

SEQ ID NO: 1940700 - RNA, 15 nt, Human herpesvirus 4 [Epstein-Barr virus]
ccucacgaccugugu

SEQ ID NO: 1940701 - RNA, 16 nt, Human herpesvirus 4 [Epstein-Barr virus]
uccauucccagcccca

SEQ ID NO: 1940702 - RNA, 13 nt, Human herpesvirus 4 [Epstein-Barr virus]
cccagcagaucca

SEQ ID NO: 1940703 - RNA, 18 nt, Human herpesvirus 4 [Epstein-Barr virus]
caacagcuagcagacauu

SEQ ID NO: 1940704 - RNA, 14 nt, Human herpesvirus 4 [Epstein-Barr virus]
cagggcagagaggc

SEQ ID NO: 1940705 - RNA, 21 nt, Human herpesvirus 4 [Epstein-Barr virus]
ccuggcuguacgccgccgcca

SEQ ID NO: 1940706 - RNA, 16 nt, Human herpesvirus 4 [Epstein-Barr virus]
ucuuccccugcagagu

SEQ ID NO: 1940707 - RNA, 17 nt, Human herpesvirus 4 [Epstein-Barr virus]
cggggagaacgguggcc

SEQ ID NO: 1940708 - RNA, 15 nt, Human herpesvirus 4 [Epstein-Barr virus]
ugccaauccaugcca

SEQ ID NO: 1940709 - RNA, 21 nt, Human herpesvirus 4 [Epstein-Barr virus]
agggcagacaccaccugcucg

SEQ ID NO: 1940710 - RNA, 17 nt, Human herpesvirus 4 [Epstein-Barr virus]
acugccuggggaaaaug

SEQ ID NO: 1940711 - RNA, 17 nt, Human herpesvirus 4 [Epstein-Barr virus]
cggaagaccaggagccc

SEQ ID NO: 1940712 - RNA, 17 nt, Human herpesvirus 4 [Epstein-Barr virus]
aagcuuuugaccaagcu

SEQ ID NO: 1940713 - RNA, 21 nt, Human herpesvirus 4 [Epstein-Barr virus]
ugucauaaccuggagucugca

SEQ ID NO: 1940714 - RNA, 12 nt, Human herpesvirus 4 [Epstein-Barr virus]
ugaacaccacca

SEQ ID NO: 1940715 - RNA, 17 nt, Human herpesvirus 4 [Epstein-Barr virus]
cuccucaaauguuccag

SEQ ID NO: 1940716 - RNA, 21 nt, Human herpesvirus 4 [Epstein-Barr virus]
gggcuggugggcucccucugg

SEQ ID NO: 1940717 - RNA, 22 nt, Human herpesvirus 4 [Epstein-Barr virus]
uuugggcacacuuaacuugacu

SEQ ID NO: 1940718 - RNA, 13 nt, Human herpesvirus 4 [Epstein-Barr virus]
ugcaccagcucca

SEQ ID NO: 1940719 - RNA, 19 nt, Human herpesvirus 4 [Epstein-Barr virus]
cucaaacggggaaggagga

SEQ ID NO: 1940720 - RNA, 23 nt, Human herpesvirus 4 [Epstein-Barr virus]
agagguuuugcuagggaggagac

SEQ ID NO: 1940721 - RNA, 18 nt, Human herpesvirus 4 [Epstein-Barr virus]
guggucuuagggcgccag

SEQ ID NO: 1940722 - RNA, 12 nt, Human herpesvirus 4 [Epstein-Barr virus]
uggcggcccagc

SEQ ID NO: 1940723 - RNA, 17 nt, Human herpesvirus 4 [Epstein-Barr virus]
gaagauugucacagcug

SEQ ID NO: 1940724 - RNA, 15 nt, Human herpesvirus 4 [Epstein-Barr virus]
caccccacacucccu

SEQ ID NO: 1940725 - RNA, 13 nt, Human herpesvirus 4 [Epstein-Barr virus]
ugaggugggcuga

SEQ ID NO: 1940726 - RNA, 13 nt, Human herpesvirus 4 [Epstein-Barr virus]
ccaucagcucgcc

SEQ ID NO: 1940727 - RNA, 16 nt, Human herpesvirus 4 [Epstein-Barr virus]
agcaccucaaccugga

SEQ ID NO: 1940728 - RNA, 16 nt, Human herpesvirus 4 [Epstein-Barr virus]
ugacuaggcaccacuu

SEQ ID NO: 1940729 - RNA, 19 nt, Human herpesvirus 4 [Epstein-Barr virus]
ccagucaccuuccagacua

SEQ ID NO: 1940730 - RNA, 23 nt, Human herpesvirus 4 [Epstein-Barr virus]
gguccuccacggggacacgcucc

SEQ ID NO: 1940731 - RNA, 14 nt, Human herpesvirus 4 [Epstein-Barr virus]
cuacaggcccgggc

SEQ ID NO: 1940732 - RNA, 14 nt, Human herpesvirus 4 [Epstein-Barr virus]
cccaccagccagcg

SEQ ID NO: 1940733 - RNA, 23 nt, Human herpesvirus 4 [Epstein-Barr virus]
ccagcaacagaucuugcugaggu

SEQ ID NO: 1940734 - RNA, 18 nt, Human herpesvirus 4 [Epstein-Barr virus]
uucuuagaugaggagcag

SEQ ID NO: 1940735 - RNA, 20 nt, Human herpesvirus 4 [Epstein-Barr virus]
uuccagacuaugcauacacu

SEQ ID NO: 1940736 - RNA, 18 nt, Human herpesvirus 4 [Epstein-Barr virus]
cagcagauccagggcccg

SEQ ID NO: 1940737 - RNA, 17 nt, Human herpesvirus 4 [Epstein-Barr virus]
uucccggacaauacacc

SEQ ID NO: 1940738 - RNA, 21 nt, Human herpesvirus 4 [Epstein-Barr virus]
gggcugguuggggagcuacag

SEQ ID NO: 1940739 - RNA, 17 nt, Human herpesvirus 4 [Epstein-Barr virus]
gacguguguggcuguag

SEQ ID NO: 1940740 - RNA, 19 nt, Human herpesvirus 4 [Epstein-Barr virus]
ugaggcugaugauggccac

SEQ ID NO: 1940741 - RNA, 15 nt, Human herpesvirus 4 [Epstein-Barr virus]
ugcucucgcacucuu

SEQ ID NO: 1940742 - RNA, 19 nt, Human herpesvirus 4 [Epstein-Barr virus]
cuuuugcaacgccuuuuuc

SEQ ID NO: 1940743 - RNA, 21 nt, Human herpesvirus 4 [Epstein-Barr virus]
ccccuccgagugaccagucac

SEQ ID NO: 1940744 - RNA, 21 nt, Human herpesvirus 4 [Epstein-Barr virus]
ggcgacuuuguuuagggacag

SEQ ID NO: 1940745 - RNA, 19 nt, Human herpesvirus 4 [Epstein-Barr virus]
ccuagugguuucggacaca

SEQ ID NO: 1940746 - RNA, 23 nt, Human herpesvirus 4 [Epstein-Barr virus]
uggauugcugaacuggggcuggu

SEQ ID NO: 1940747 - RNA, 22 nt, Human herpesvirus 4 [Epstein-Barr virus]
gagcggggagauaauguacaga

SEQ ID NO: 1940748 - RNA, 19 nt, Human herpesvirus 4 [Epstein-Barr virus]
ccaggcuuucuaugccuga

SEQ ID NO: 1940749 - RNA, 17 nt, Human herpesvirus 4 [Epstein-Barr virus]
cucugauggccuggaga

SEQ ID NO: 1940750 - RNA, 20 nt, Human herpesvirus 4 [Epstein-Barr virus]
ccagcagauccagggcccgu

SEQ ID NO: 1940751 - RNA, 22 nt, Human herpesvirus 4 [Epstein-Barr virus]
ucgcccacacagcgccagcagg

SEQ ID NO: 1940752 - RNA, 14 nt, Human herpesvirus 4 [Epstein-Barr virus]
cgcucccgggcaaa

SEQ ID NO: 1940753 - RNA, 17 nt, Human herpesvirus 4 [Epstein-Barr virus]
gugugcucuuucuucau

SEQ ID NO: 1940754 - RNA, 22 nt, Human herpesvirus 4 [Epstein-Barr virus]
agggagacacaucuggaccaga

SEQ ID NO: 1940755 - RNA, 19 nt, Human herpesvirus 4 [Epstein-Barr virus]
gguggaacaggagcaggag

SEQ ID NO: 1940756 - RNA, 23 nt, Human herpesvirus 4 [Epstein-Barr virus]
agcucuaacuuggcaucucuuuu

SEQ ID NO: 1940757 - RNA, 22 nt, Human herpesvirus 4 [Epstein-Barr virus]
cgcgccgcaagcaugggcgagg

SEQ ID NO: 1940758 - RNA, 19 nt, Human herpesvirus 4 [Epstein-Barr virus]
cggcucaggaucagggcca

SEQ ID NO: 1940759 - RNA, 21 nt, Human herpesvirus 4 [Epstein-Barr virus]
cacgugaacauccugcguggc

SEQ ID NO: 1940760 - RNA, 20 nt, Human herpesvirus 4 [Epstein-Barr virus]
cugauaaaguuguccugggc

SEQ ID NO: 1940761 - RNA, 18 nt, Human herpesvirus 4 [Epstein-Barr virus]
gcgucaggagacacggcu

SEQ ID NO: 1940762 - RNA, 20 nt, Human herpesvirus 4 [Epstein-Barr virus]
gcucuucgugcucuucaugu

SEQ ID NO: 1940763 - RNA, 16 nt, Human herpesvirus 4 [Epstein-Barr virus]
cucuacgccaggcucg

SEQ ID NO: 1940764 - RNA, 19 nt, Human herpesvirus 4 [Epstein-Barr virus]
caauaaauaaaaguacaga

SEQ ID NO: 1940765 - RNA, 17 nt, Human herpesvirus 4 [Epstein-Barr virus]
gaguucuacaaugccag

SEQ ID NO: 1940766 - RNA, 18 nt, Human herpesvirus 4 [Epstein-Barr virus]
ggaacuggcucagcuugg

SEQ ID NO: 1940767 - RNA, 22 nt, Human herpesvirus 4 [Epstein-Barr virus]
uguucucgugcaagcagcaccu

SEQ ID NO: 1940768 - RNA, 11 nt, Human herpesvirus 4 [Epstein-Barr virus]
uugaggaccca

SEQ ID NO: 1940769 - RNA, 16 nt, Human herpesvirus 4 [Epstein-Barr virus]
gccccgguccccccag

SEQ ID NO: 1940770 - RNA, 14 nt, Human herpesvirus 4 [Epstein-Barr virus]
gucuuguaaaacuu

SEQ ID NO: 1940771 - RNA, 19 nt, Human herpesvirus 4 [Epstein-Barr virus]
gacaaaauggggucugugg

SEQ ID NO: 1940772 - RNA, 17 nt, Human herpesvirus 4 [Epstein-Barr virus]
gaccucauccugcucau

SEQ ID NO: 1940773 - RNA, 15 nt, Human herpesvirus 4 [Epstein-Barr virus]
uuucagcaucacagg

SEQ ID NO: 1940774 - RNA, 19 nt, Human herpesvirus 4 [Epstein-Barr virus]
aggacccccgcgucacugu

SEQ ID NO: 1940775 - RNA, 14 nt, Human herpesvirus 4 [Epstein-Barr virus]
cccacucuugccuc

SEQ ID NO: 1940776 - RNA, 15 nt, Human herpesvirus 4 [Epstein-Barr virus]
acgccaaugccaacu

SEQ ID NO: 1940777 - RNA, 22 nt, Human herpesvirus 4 [Epstein-Barr virus]
acucacccccgaggagagggga

SEQ ID NO: 1940778 - RNA, 13 nt, Human herpesvirus 4 [Epstein-Barr virus]
cuuaugcagcacc

SEQ ID NO: 1940779 - RNA, 12 nt, Human herpesvirus 4 [Epstein-Barr virus]
caguauguacag

SEQ ID NO: 1940780 - RNA, 13 nt, Human herpesvirus 4 [Epstein-Barr virus]
gguaaaugcaccu

SEQ ID NO: 1940781 - RNA, 19 nt, Human herpesvirus 4 [Epstein-Barr virus]
uacccuuucuaccaggggc

SEQ ID NO: 1940782 - RNA, 16 nt, Human herpesvirus 4 [Epstein-Barr virus]
gaccaauacccaggau

SEQ ID NO: 1940783 - RNA, 12 nt, Human herpesvirus 4 [Epstein-Barr virus]
acgccaaugcca

SEQ ID NO: 1940784 - RNA, 23 nt, Human herpesvirus 4 [Epstein-Barr virus]
gucucaugggggaaugagggaaa

SEQ ID NO: 1940785 - RNA, 22 nt, Human herpesvirus 4 [Epstein-Barr virus]
cuucagcaguagcuugggaaca

SEQ ID NO: 1940786 - RNA, 13 nt, Human herpesvirus 4 [Epstein-Barr virus]
ccccuaggccugc

SEQ ID NO: 1940787 - RNA, 23 nt, Human herpesvirus 4 [Epstein-Barr virus]
agcuucagggaaaaacuggccau

SEQ ID NO: 1940788 - RNA, 20 nt, Human herpesvirus 4 [Epstein-Barr virus]
gauguccuggccgggcgccu

SEQ ID NO: 1940789 - RNA, 22 nt, Human herpesvirus 4 [Epstein-Barr virus]
gcagacuccgaauauccccaaa

SEQ ID NO: 1940790 - RNA, 13 nt, Human herpesvirus 4 [Epstein-Barr virus]
cgagcaugagcuc

SEQ ID NO: 1940791 - RNA, 15 nt, Human herpesvirus 4 [Epstein-Barr virus]
aggggggaccuuaac

SEQ ID NO: 1940792 - RNA, 14 nt, Human herpesvirus 4 [Epstein-Barr virus]
uggcacgacuguuc

SEQ ID NO: 1940793 - RNA, 17 nt, Human herpesvirus 4 [Epstein-Barr virus]
gcugcugcuacuggcuu

SEQ ID NO: 1940794 - RNA, 23 nt, Human herpesvirus 4 [Epstein-Barr virus]
caagccgggggagaagcaccuca

SEQ ID NO: 1940795 - RNA, 15 nt, Human herpesvirus 4 [Epstein-Barr virus]
acuccacagauggag

SEQ ID NO: 1940796 - RNA, 14 nt, Human herpesvirus 4 [Epstein-Barr virus]
uccgugggcccaga

SEQ ID NO: 1940797 - RNA, 20 nt, Human herpesvirus 4 [Epstein-Barr virus]
ccuccaacaggugcccgagc

SEQ ID NO: 1940798 - RNA, 23 nt, Human herpesvirus 4 [Epstein-Barr virus]
gccguccucuggacgcugguacc

SEQ ID NO: 1940799 - RNA, 18 nt, Human herpesvirus 4 [Epstein-Barr virus]
aggagacacggcucuguc

SEQ ID NO: 1940800 - RNA, 13 nt, Human herpesvirus 4 [Epstein-Barr virus]
cucugcauggaga

SEQ ID NO: 1940801 - RNA, 15 nt, Human herpesvirus 4 [Epstein-Barr virus]
gaaagcggcccagca

SEQ ID NO: 1940802 - RNA, 16 nt, Human herpesvirus 4 [Epstein-Barr virus]
ccguggccaggcccga

SEQ ID NO: 1940803 - RNA, 20 nt, Human herpesvirus 4 [Epstein-Barr virus]
gcggggcuccccagccacag

SEQ ID NO: 1940804 - RNA, 16 nt, Human herpesvirus 4 [Epstein-Barr virus]
cccagcccgccagcca

SEQ ID NO: 1940805 - RNA, 17 nt, Human herpesvirus 4 [Epstein-Barr virus]
cuaacacgaaugcccag

SEQ ID NO: 1940806 - RNA, 20 nt, Human herpesvirus 4 [Epstein-Barr virus]
cugccaacuuugagcugggc

SEQ ID NO: 1940807 - RNA, 15 nt, Human herpesvirus 4 [Epstein-Barr virus]
gaggcauaacggugg

SEQ ID NO: 1940808 - RNA, 15 nt, Human herpesvirus 4 [Epstein-Barr virus]
cgagcucuccagcca

SEQ ID NO: 1940809 - RNA, 21 nt, Human herpesvirus 4 [Epstein-Barr virus]
cacuugguaaguuuucccuuc

SEQ ID NO: 1940810 - RNA, 18 nt, Human herpesvirus 4 [Epstein-Barr virus]
uggaugcaucuaaggucc

SEQ ID NO: 1940811 - RNA, 20 nt, Human herpesvirus 4 [Epstein-Barr virus]
uggccuuccucugccuggcc

SEQ ID NO: 1940812 - RNA, 17 nt, Human herpesvirus 4 [Epstein-Barr virus]
gacugcgaucuggaccc

SEQ ID NO: 1940813 - RNA, 15 nt, Human herpesvirus 4 [Epstein-Barr virus]
caauggucgccaggg

SEQ ID NO: 1940814 - RNA, 16 nt, Human herpesvirus 4 [Epstein-Barr virus]
gccugaguccaacauu

SEQ ID NO: 1940815 - RNA, 16 nt, Human herpesvirus 4 [Epstein-Barr virus]
guccuugucugcugcc

SEQ ID NO: 1940816 - RNA, 20 nt, Human herpesvirus 4 [Epstein-Barr virus]
agcucugcacaggcuuggaa

SEQ ID NO: 1940817 - RNA, 11 nt, Human herpesvirus 4 [Epstein-Barr virus]
cucacaggaca

SEQ ID NO: 1940818 - RNA, 14 nt, Human herpesvirus 4 [Epstein-Barr virus]
ggugguggcagcag

SEQ ID NO: 1940819 - RNA, 18 nt, Human herpesvirus 4 [Epstein-Barr virus]
gccugcggacucaggcca

SEQ ID NO: 1940820 - RNA, 17 nt, Human herpesvirus 4 [Epstein-Barr virus]
ugggguccggucuugca

SEQ ID NO: 1940821 - RNA, 15 nt, Human herpesvirus 4 [Epstein-Barr virus]
ggccaugcgcuuugu

SEQ ID NO: 1940822 - RNA, 23 nt, Human herpesvirus 4 [Epstein-Barr virus]
cgcaggccccccgcaccagggcc

SEQ ID NO: 1940823 - RNA, 13 nt, Human herpesvirus 4 [Epstein-Barr virus]
caggcccccagcu

SEQ ID NO: 1940824 - RNA, 16 nt, Human herpesvirus 4 [Epstein-Barr virus]
cccaugccuccccagc

SEQ ID NO: 1940825 - RNA, 22 nt, Human herpesvirus 4 [Epstein-Barr virus]
cgcucuguuugaaacacaguuu

SEQ ID NO: 1940826 - RNA, 13 nt, Human herpesvirus 4 [Epstein-Barr virus]
caacagccagaau

SEQ ID NO: 1940827 - RNA, 17 nt, Human herpesvirus 4 [Epstein-Barr virus]
ccucuccauucccagcc

SEQ ID NO: 1940828 - RNA, 15 nt, Human herpesvirus 4 [Epstein-Barr virus]
ucguagagaucaggc

SEQ ID NO: 1940829 - RNA, 21 nt, Human herpesvirus 4 [Epstein-Barr virus]
caguugaaauaucuagcacgg

SEQ ID NO: 1940830 - RNA, 18 nt, Human herpesvirus 4 [Epstein-Barr virus]
ggccuccuggccagcacc

SEQ ID NO: 1940831 - RNA, 17 nt, Human herpesvirus 4 [Epstein-Barr virus]
acagucccgagaccggc

SEQ ID NO: 1940832 - RNA, 23 nt, Human herpesvirus 4 [Epstein-Barr virus]
ccgacuuauggcuagauuuccua

SEQ ID NO: 1940833 - RNA, 21 nt, Human herpesvirus 4 [Epstein-Barr virus]
agcccaagaagaagcccaccu

SEQ ID NO: 1940834 - RNA, 23 nt, Human herpesvirus 4 [Epstein-Barr virus]
gaacacggcaccgucagccacac

SEQ ID NO: 1940835 - RNA, 14 nt, Human herpesvirus 4 [Epstein-Barr virus]
agggcgccaucuag

SEQ ID NO: 1940836 - RNA, 16 nt, Human herpesvirus 4 [Epstein-Barr virus]
ggaaggaaaggccugc

SEQ ID NO: 1940837 - RNA, 17 nt, Human herpesvirus 4 [Epstein-Barr virus]
ucucuggcugugcugac

SEQ ID NO: 1940838 - RNA, 23 nt, Human herpesvirus 4 [Epstein-Barr virus]
aggcauuuuuggugcugccuggg

SEQ ID NO: 1940839 - RNA, 15 nt, Human herpesvirus 4 [Epstein-Barr virus]
cugauaaugucuuca

SEQ ID NO: 1940840 - RNA, 16 nt, Human herpesvirus 4 [Epstein-Barr virus]
cacggucauucugccg

SEQ ID NO: 1940841 - RNA, 19 nt, Human herpesvirus 4 [Epstein-Barr virus]
agggggacaagagcacaaa

SEQ ID NO: 1940842 - RNA, 21 nt, Human herpesvirus 4 [Epstein-Barr virus]
gaaacaggagauuggugugaa

SEQ ID NO: 1940843 - RNA, 22 nt, Human herpesvirus 4 [Epstein-Barr virus]
augcaauaaauaaaaguacaga

SEQ ID NO: 1940844 - RNA, 17 nt, Human herpesvirus 4 [Epstein-Barr virus]
uaucccugcugucucug

SEQ ID NO: 1940845 - RNA, 22 nt, Human herpesvirus 4 [Epstein-Barr virus]
aggagaaaaucugcuucucccc

SEQ ID NO: 1940846 - RNA, 18 nt, Human herpesvirus 4 [Epstein-Barr virus]
aauuguuaguuuaaacag

SEQ ID NO: 1940847 - RNA, 17 nt, Human herpesvirus 4 [Epstein-Barr virus]
caaugccaacuccccca

SEQ ID NO: 1940848 - RNA, 23 nt, Human herpesvirus 4 [Epstein-Barr virus]
cagagggcgaaugggcugcagca

SEQ ID NO: 1940849 - RNA, 13 nt, Human herpesvirus 4 [Epstein-Barr virus]
ugcugcagcacua

SEQ ID NO: 1940850 - RNA, 15 nt, Human herpesvirus 4 [Epstein-Barr virus]
agcuggccaggcugg

SEQ ID NO: 1940851 - RNA, 22 nt, Human herpesvirus 4 [Epstein-Barr virus]
ucaggcgacaguaacacagggu

SEQ ID NO: 1940852 - RNA, 13 nt, Human herpesvirus 4 [Epstein-Barr virus]
caggaacagccuc

SEQ ID NO: 1940853 - RNA, 22 nt, Human herpesvirus 4 [Epstein-Barr virus]
gagacguguguggcuguagcca

SEQ ID NO: 1940854 - RNA, 15 nt, Human herpesvirus 4 [Epstein-Barr virus]
ucccaaauaaauguu

SEQ ID NO: 1940855 - RNA, 21 nt, Human herpesvirus 4 [Epstein-Barr virus]
ccgcagaagagccgcuccgug

SEQ ID NO: 1940856 - RNA, 20 nt, Human herpesvirus 4 [Epstein-Barr virus]
ccuguggccccggcuggcca

SEQ ID NO: 1940857 - RNA, 16 nt, Human herpesvirus 4 [Epstein-Barr virus]
uggaaaagggcccagg

SEQ ID NO: 1940858 - RNA, 15 nt, Human herpesvirus 4 [Epstein-Barr virus]
ugcacggcccuccag

SEQ ID NO: 1940859 - RNA, 16 nt, Human herpesvirus 4 [Epstein-Barr virus]
ccccugccugcaugcu

SEQ ID NO: 1940860 - RNA, 19 nt, Human herpesvirus 4 [Epstein-Barr virus]
uaacggggaaugugugaca

SEQ ID NO: 1940861 - RNA, 18 nt, Human herpesvirus 4 [Epstein-Barr virus]
gacgccaaugccaacucc

SEQ ID NO: 1940862 - RNA, 23 nt, Human herpesvirus 4 [Epstein-Barr virus]
caugcuccuauggacacuuggua

SEQ ID NO: 1940863 - RNA, 13 nt, Human herpesvirus 4 [Epstein-Barr virus]
accagcugguggu

SEQ ID NO: 1940864 - RNA, 15 nt, Human herpesvirus 4 [Epstein-Barr virus]
cucccgcacccucaa

SEQ ID NO: 1940865 - RNA, 19 nt, Human herpesvirus 4 [Epstein-Barr virus]
aggucugacacccacgccu

SEQ ID NO: 1940866 - RNA, 19 nt, Human herpesvirus 4 [Epstein-Barr virus]
cgggcccagcccuccucag

SEQ ID NO: 1940867 - RNA, 13 nt, Human herpesvirus 4 [Epstein-Barr virus]
cgcucagagcugg

SEQ ID NO: 1940868 - RNA, 12 nt, Human herpesvirus 4 [Epstein-Barr virus]
cugguggcccag

SEQ ID NO: 1940869 - RNA, 14 nt, Human herpesvirus 4 [Epstein-Barr virus]
cuggccgcagcugg

SEQ ID NO: 1940870 - RNA, 16 nt, Human herpesvirus 4 [Epstein-Barr virus]
cuccugccugccucug

SEQ ID NO: 1940871 - RNA, 15 nt, Human herpesvirus 4 [Epstein-Barr virus]
ucuuacugcccagcc

SEQ ID NO: 1940872 - RNA, 22 nt, Human herpesvirus 4 [Epstein-Barr virus]
ucccgggcaaacagggcagaga

SEQ ID NO: 1940873 - RNA, 22 nt, Human herpesvirus 4 [Epstein-Barr virus]
agcccuucuucguuaugcacuc

SEQ ID NO: 1940874 - RNA, 21 nt, Human herpesvirus 4 [Epstein-Barr virus]
cugcccggacggccuagccau

SEQ ID NO: 1940875 - RNA, 16 nt, Human herpesvirus 4 [Epstein-Barr virus]
caccccggcgccaccu

SEQ ID NO: 1940876 - RNA, 21 nt, Human herpesvirus 4 [Epstein-Barr virus]
acuucaagaguuuaagcagca

SEQ ID NO: 1940877 - RNA, 15 nt, Human herpesvirus 4 [Epstein-Barr virus]
cagcaccugucccug

SEQ ID NO: 1940878 - RNA, 16 nt, Human herpesvirus 4 [Epstein-Barr virus]
acuucuacucuuggca

SEQ ID NO: 1940879 - RNA, 16 nt, Human herpesvirus 4 [Epstein-Barr virus]
gugguugucuucccag

SEQ ID NO: 1940880 - RNA, 17 nt, Human herpesvirus 4 [Epstein-Barr virus]
ucaccagggaggccugg

SEQ ID NO: 1940881 - RNA, 16 nt, Human herpesvirus 4 [Epstein-Barr virus]
gaggugcugaggcccg

SEQ ID NO: 1940882 - RNA, 22 nt, Human herpesvirus 4 [Epstein-Barr virus]
ucuccugccugccucugcucug

SEQ ID NO: 1940883 - RNA, 20 nt, Human herpesvirus 4 [Epstein-Barr virus]
uuugccaaccugcucucucu

SEQ ID NO: 1940884 - RNA, 20 nt, Human herpesvirus 4 [Epstein-Barr virus]
acgugcaaggauggaagaga

SEQ ID NO: 1940885 - RNA, 22 nt, Human herpesvirus 4 [Epstein-Barr virus]
ccuccaagcggcacagauuaga

SEQ ID NO: 1940886 - RNA, 21 nt, Human herpesvirus 4 [Epstein-Barr virus]
agagguagacgaggcacaggc

SEQ ID NO: 1940887 - RNA, 19 nt, Human herpesvirus 4 [Epstein-Barr virus]
ggcccagcccuccucagaa

SEQ ID NO: 1940888 - RNA, 15 nt, Human herpesvirus 4 [Epstein-Barr virus]
ggcugccagccucag

SEQ ID NO: 1940889 - RNA, 18 nt, Human herpesvirus 4 [Epstein-Barr virus]
ggugccuguggagauuag

SEQ ID NO: 1940890 - RNA, 18 nt, Human herpesvirus 4 [Epstein-Barr virus]
agagcauaugccgguggc

SEQ ID NO: 1940891 - RNA, 15 nt, Human herpesvirus 4 [Epstein-Barr virus]
cguccuuguccagga

SEQ ID NO: 1940892 - RNA, 15 nt, Human herpesvirus 4 [Epstein-Barr virus]
accacuaggaaccca

SEQ ID NO: 1940893 - RNA, 14 nt, Human herpesvirus 4 [Epstein-Barr virus]
cuggcugugcugac

SEQ ID NO: 1940894 - RNA, 14 nt, Human herpesvirus 4 [Epstein-Barr virus]
ccgcgccgcaagca

SEQ ID NO: 1940895 - RNA, 18 nt, Human herpesvirus 4 [Epstein-Barr virus]
gcucgucguucaggaaca

SEQ ID NO: 1940896 - RNA, 22 nt, Human herpesvirus 4 [Epstein-Barr virus]
ccugcaaacugacacacaggcc

SEQ ID NO: 1940897 - RNA, 19 nt, Human herpesvirus 4 [Epstein-Barr virus]
acugaauuuauacccagug

SEQ ID NO: 1940898 - RNA, 22 nt, Human herpesvirus 4 [Epstein-Barr virus]
ggcggguggagauagggaccag

SEQ ID NO: 1940899 - RNA, 18 nt, Human herpesvirus 4 [Epstein-Barr virus]
gucuacaucccauaccua

SEQ ID NO: 1940900 - RNA, 17 nt, Human herpesvirus 4 [Epstein-Barr virus]
caccagcuaacaggaca

SEQ ID NO: 1940901 - RNA, 16 nt, Human herpesvirus 4 [Epstein-Barr virus]
aaaaacuugagucucu

SEQ ID NO: 1940902 - RNA, 20 nt, Human herpesvirus 4 [Epstein-Barr virus]
uuagccccagccccuccucu

SEQ ID NO: 1940903 - RNA, 20 nt, Human herpesvirus 4 [Epstein-Barr virus]
cgagcagcgcggcagaggcc

SEQ ID NO: 1940904 - RNA, 16 nt, Human herpesvirus 4 [Epstein-Barr virus]
uaguuccaggugacag

SEQ ID NO: 1940905 - RNA, 16 nt, Human herpesvirus 4 [Epstein-Barr virus]
gacacaucuggaccag

SEQ ID NO: 1940906 - RNA, 19 nt, Human herpesvirus 4 [Epstein-Barr virus]
ucuaggacgcuguccgcca

SEQ ID NO: 1940907 - RNA, 18 nt, Human herpesvirus 4 [Epstein-Barr virus]
ugggcaugacacaggaca

SEQ ID NO: 1940908 - RNA, 14 nt, Human herpesvirus 4 [Epstein-Barr virus]
guggcuugggcugu

SEQ ID NO: 1940909 - RNA, 12 nt, Human herpesvirus 4 [Epstein-Barr virus]
cugaucagggaa

SEQ ID NO: 1940910 - RNA, 16 nt, Human herpesvirus 4 [Epstein-Barr virus]
caccaugguagccggc

SEQ ID NO: 1940911 - RNA, 14 nt, Human herpesvirus 4 [Epstein-Barr virus]
ugcggagggucaga

SEQ ID NO: 1940912 - RNA, 16 nt, Human herpesvirus 4 [Epstein-Barr virus]
aaggccugcugucauc

SEQ ID NO: 1940913 - RNA, 11 nt, Human herpesvirus 4 [Epstein-Barr virus]
uccccauggga

SEQ ID NO: 1940914 - RNA, 16 nt, Human herpesvirus 4 [Epstein-Barr virus]
ccaccgaccccauauc

SEQ ID NO: 1940915 - RNA, 20 nt, Human herpesvirus 4 [Epstein-Barr virus]
acccaucccggcccucuucc

SEQ ID NO: 1940916 - RNA, 15 nt, Human herpesvirus 4 [Epstein-Barr virus]
uaaaccuucugucug

SEQ ID NO: 1940917 - RNA, 21 nt, Human herpesvirus 4 [Epstein-Barr virus]
aacuagcggcgagacccgagg

SEQ ID NO: 1940918 - RNA, 16 nt, Human herpesvirus 4 [Epstein-Barr virus]
cucccgggguccagag

SEQ ID NO: 1940919 - RNA, 15 nt, Human herpesvirus 4 [Epstein-Barr virus]
gcaguccaggggcca

SEQ ID NO: 1940920 - RNA, 14 nt, Human herpesvirus 4 [Epstein-Barr virus]
gccgccagcagccc

SEQ ID NO: 1940921 - RNA, 12 nt, Human herpesvirus 4 [Epstein-Barr virus]
gauggguggaga

SEQ ID NO: 1940922 - RNA, 14 nt, Human herpesvirus 4 [Epstein-Barr virus]
caggcugcgccucc

SEQ ID NO: 1940923 - RNA, 14 nt, Human herpesvirus 4 [Epstein-Barr virus]
cgcucuggucgccc

SEQ ID NO: 1940924 - RNA, 15 nt, Human herpesvirus 4 [Epstein-Barr virus]
cacagcgccagcagg

SEQ ID NO: 1940925 - RNA, 21 nt, Human herpesvirus 4 [Epstein-Barr virus]
gaggggggcggcguggagcug

SEQ ID NO: 1940926 - RNA, 22 nt, Human herpesvirus 4 [Epstein-Barr virus]
cugggaggugauguagguugua

SEQ ID NO: 1940927 - RNA, 13 nt, Human herpesvirus 4 [Epstein-Barr virus]
gggggugggcacc

SEQ ID NO: 1940928 - RNA, 14 nt, Human herpesvirus 4 [Epstein-Barr virus]
guggugcuguccug

SEQ ID NO: 1940929 - RNA, 15 nt, Human herpesvirus 4 [Epstein-Barr virus]
acccccaccaccuca

SEQ ID NO: 1940930 - RNA, 11 nt, Human herpesvirus 4 [Epstein-Barr virus]
gagggggacaa

SEQ ID NO: 1940931 - RNA, 12 nt, Human herpesvirus 4 [Epstein-Barr virus]
cggcuguggccu

SEQ ID NO: 1940932 - RNA, 15 nt, Human herpesvirus 4 [Epstein-Barr virus]
ucgccugccacuucc

SEQ ID NO: 1940933 - RNA, 14 nt, Human herpesvirus 4 [Epstein-Barr virus]
caaccaauguaucc

SEQ ID NO: 1940934 - RNA, 15 nt, Human herpesvirus 4 [Epstein-Barr virus]
uuccacccacugaua

SEQ ID NO: 1940935 - RNA, 14 nt, Human herpesvirus 4 [Epstein-Barr virus]
agcuccgugggccc

SEQ ID NO: 1940936 - RNA, 21 nt, Human herpesvirus 4 [Epstein-Barr virus]
aucuuccugucggcucucuuu

SEQ ID NO: 1940937 - RNA, 17 nt, Human herpesvirus 4 [Epstein-Barr virus]
cauugaugaacugguca

SEQ ID NO: 1940938 - RNA, 16 nt, Human herpesvirus 4 [Epstein-Barr virus]
gaacaucuggcugggg

SEQ ID NO: 1940939 - RNA, 16 nt, Human herpesvirus 4 [Epstein-Barr virus]
uccaguaugccugccu

SEQ ID NO: 1940940 - RNA, 16 nt, Human herpesvirus 4 [Epstein-Barr virus]
gcucccgggcaaacag

SEQ ID NO: 1940941 - RNA, 23 nt, Human herpesvirus 4 [Epstein-Barr virus]
cccgggggaggagaagagaggcu

SEQ ID NO: 1940942 - RNA, 18 nt, Human herpesvirus 4 [Epstein-Barr virus]
gaugcauacgcugaguga

SEQ ID NO: 1940943 - RNA, 18 nt, Human herpesvirus 4 [Epstein-Barr virus]
cgggagggacgggccucu

SEQ ID NO: 1940944 - RNA, 16 nt, Human herpesvirus 4 [Epstein-Barr virus]
ccaugacgcugcugcu

SEQ ID NO: 1940945 - RNA, 15 nt, Human herpesvirus 4 [Epstein-Barr virus]
ccgcagguggcugcu

SEQ ID NO: 1940946 - RNA, 21 nt, Human herpesvirus 4 [Epstein-Barr virus]
ucggguccuagcacaaaccag

SEQ ID NO: 1940947 - RNA, 19 nt, Human herpesvirus 4 [Epstein-Barr virus]
ggugccgacaccggggugc

SEQ ID NO: 1940948 - RNA, 13 nt, Human herpesvirus 4 [Epstein-Barr virus]
ccagggccagcaa

SEQ ID NO: 1940949 - RNA, 22 nt, Human herpesvirus 4 [Epstein-Barr virus]
gaacuggggcugguggccuggg

SEQ ID NO: 1940950 - RNA, 19 nt, Human herpesvirus 4 [Epstein-Barr virus]
uguucuuggcggacaucau

SEQ ID NO: 1940951 - RNA, 22 nt, Human herpesvirus 4 [Epstein-Barr virus]
agcagauuuccgucagccaggg

SEQ ID NO: 1940952 - RNA, 17 nt, Human herpesvirus 4 [Epstein-Barr virus]
auccgccaggaccugga

SEQ ID NO: 1940953 - RNA, 15 nt, Human herpesvirus 4 [Epstein-Barr virus]
gcauacggcuuucca

SEQ ID NO: 1940954 - RNA, 18 nt, Human herpesvirus 4 [Epstein-Barr virus]
caagcuuaugcagcaccu

SEQ ID NO: 1940955 - RNA, 21 nt, Human herpesvirus 4 [Epstein-Barr virus]
caaauaaacauuuuauuggua

SEQ ID NO: 1940956 - RNA, 15 nt, Human herpesvirus 4 [Epstein-Barr virus]
gauugggugguggca

SEQ ID NO: 1940957 - RNA, 19 nt, Human herpesvirus 4 [Epstein-Barr virus]
ggccgccacccucccccug

SEQ ID NO: 1940958 - RNA, 13 nt, Human herpesvirus 4 [Epstein-Barr virus]
ugaaucuccaccu

SEQ ID NO: 1940959 - RNA, 21 nt, Human herpesvirus 4 [Epstein-Barr virus]
acuccuaugcauuuccugccc

SEQ ID NO: 1940960 - RNA, 22 nt, Human herpesvirus 4 [Epstein-Barr virus]
caagggaggagugcugcaggua

SEQ ID NO: 1940961 - RNA, 20 nt, Human herpesvirus 4 [Epstein-Barr virus]
ucaaccugauucccccugcu

SEQ ID NO: 1940962 - RNA, 20 nt, Human herpesvirus 4 [Epstein-Barr virus]
guccaguuuuuaugugccuc

SEQ ID NO: 1940963 - RNA, 21 nt, Human herpesvirus 4 [Epstein-Barr virus]
ugccccgguccccccagaagc

SEQ ID NO: 1940964 - RNA, 21 nt, Human herpesvirus 4 [Epstein-Barr virus]
agcaggaggaggggcaggagg

SEQ ID NO: 1940965 - RNA, 18 nt, Human herpesvirus 4 [Epstein-Barr virus]
ucaucauaacugagcagg

SEQ ID NO: 1940966 - RNA, 12 nt, Human herpesvirus 4 [Epstein-Barr virus]
cugccgccgccu

SEQ ID NO: 1940967 - RNA, 14 nt, Human herpesvirus 4 [Epstein-Barr virus]
ggaggaugccagcc

SEQ ID NO: 1940968 - RNA, 19 nt, Human herpesvirus 4 [Epstein-Barr virus]
ccaaugacccacuccagug

SEQ ID NO: 1940969 - RNA, 22 nt, Human herpesvirus 4 [Epstein-Barr virus]
ucccccaaacauguccuguuag

SEQ ID NO: 1940970 - RNA, 16 nt, Human herpesvirus 4 [Epstein-Barr virus]
gaccaucacauggggc

SEQ ID NO: 1940971 - RNA, 23 nt, Human herpesvirus 4 [Epstein-Barr virus]
cgaccagucaugucgagcaugag

SEQ ID NO: 1940972 - RNA, 21 nt, Human herpesvirus 4 [Epstein-Barr virus]
agccccgggcccagcccuccu

SEQ ID NO: 1940973 - RNA, 13 nt, Human herpesvirus 4 [Epstein-Barr virus]
cccagcccucgag

SEQ ID NO: 1940974 - RNA, 14 nt, Human herpesvirus 4 [Epstein-Barr virus]
gccgcuucagacag

SEQ ID NO: 1940975 - RNA, 17 nt, Human herpesvirus 4 [Epstein-Barr virus]
cugcucccgccucaggg

SEQ ID NO: 1940976 - RNA, 20 nt, Human herpesvirus 4 [Epstein-Barr virus]
gccccaauucuugcacccac

SEQ ID NO: 1940977 - RNA, 13 nt, Human herpesvirus 4 [Epstein-Barr virus]
aggucgcggacca

SEQ ID NO: 1940978 - RNA, 16 nt, Human herpesvirus 4 [Epstein-Barr virus]
ccccagcccgccagcc

SEQ ID NO: 1940979 - RNA, 19 nt, Human herpesvirus 4 [Epstein-Barr virus]
agaacugcaagauaucaca

SEQ ID NO: 1940980 - RNA, 21 nt, Human herpesvirus 4 [Epstein-Barr virus]
uaacacuacuuguuucuggaa

SEQ ID NO: 1940981 - RNA, 21 nt, Human herpesvirus 4 [Epstein-Barr virus]
agugcauggauauagcucugc

SEQ ID NO: 1940982 - RNA, 17 nt, Human herpesvirus 4 [Epstein-Barr virus]
ucccgccccuguccacu

SEQ ID NO: 1940983 - RNA, 14 nt, Human herpesvirus 4 [Epstein-Barr virus]
cccaaugugcaugg

SEQ ID NO: 1940984 - RNA, 19 nt, Human herpesvirus 4 [Epstein-Barr virus]
gcgccgcccgggggccagu

SEQ ID NO: 1940985 - RNA, 17 nt, Human herpesvirus 4 [Epstein-Barr virus]
cucguaaaaguccagcg

SEQ ID NO: 1940986 - RNA, 14 nt, Human herpesvirus 4 [Epstein-Barr virus]
cagcccgcaccccc

SEQ ID NO: 1940987 - RNA, 22 nt, Human herpesvirus 4 [Epstein-Barr virus]
cuaucaggaccugggagggcca

SEQ ID NO: 1940988 - RNA, 12 nt, Human herpesvirus 4 [Epstein-Barr virus]
accacugaggga

SEQ ID NO: 1940989 - RNA, 18 nt, Human herpesvirus 4 [Epstein-Barr virus]
ggccugugucuucugucu

SEQ ID NO: 1940990 - RNA, 15 nt, Human herpesvirus 4 [Epstein-Barr virus]
gaccuguugcuucag

SEQ ID NO: 1940991 - RNA, 19 nt, Human herpesvirus 4 [Epstein-Barr virus]
ccaucuuaggagcccgggc

SEQ ID NO: 1940992 - RNA, 20 nt, Human herpesvirus 4 [Epstein-Barr virus]
cccccuggcggcccagcccg

SEQ ID NO: 1940993 - RNA, 21 nt, Human herpesvirus 4 [Epstein-Barr virus]
ccugauauugucccccuagcc

SEQ ID NO: 1940994 - RNA, 19 nt, Human herpesvirus 4 [Epstein-Barr virus]
uccagggcccguuccaggc

SEQ ID NO: 1940995 - RNA, 14 nt, Human herpesvirus 4 [Epstein-Barr virus]
gccgcuccguggcc

SEQ ID NO: 1940996 - RNA, 20 nt, Human herpesvirus 4 [Epstein-Barr virus]
cagaaaacucugcauggaga

SEQ ID NO: 1940997 - RNA, 17 nt, Human herpesvirus 4 [Epstein-Barr virus]
cagacaugguguagaca

SEQ ID NO: 1940998 - RNA, 15 nt, Human herpesvirus 4 [Epstein-Barr virus]
agucccgagcggccu

SEQ ID NO: 1940999 - RNA, 14 nt, Human herpesvirus 4 [Epstein-Barr virus]
aaggaggggcggca

SEQ ID NO: 1941000 - RNA, 14 nt, Human herpesvirus 4 [Epstein-Barr virus]
gcaugacacaggac

SEQ ID NO: 1941001 - RNA, 17 nt, Human herpesvirus 4 [Epstein-Barr virus]
gaagcguucuucacugu

SEQ ID NO: 1941002 - RNA, 23 nt, Human herpesvirus 4 [Epstein-Barr virus]
ugguggcccagcaacuaagagcc

SEQ ID NO: 1941003 - RNA, 15 nt, Human herpesvirus 4 [Epstein-Barr virus]
agagguucagggacu

SEQ ID NO: 1941004 - RNA, 21 nt, Human herpesvirus 4 [Epstein-Barr virus]
gagcaugaucaggacccuggg

SEQ ID NO: 1941005 - RNA, 21 nt, Human herpesvirus 4 [Epstein-Barr virus]
ugccuacgggcgcaccugugu

SEQ ID NO: 1941006 - RNA, 19 nt, Human herpesvirus 4 [Epstein-Barr virus]
caacaaggagugccucugg

SEQ ID NO: 1941007 - RNA, 19 nt, Human herpesvirus 4 [Epstein-Barr virus]
cuugacuguaaucacuggc

SEQ ID NO: 1941008 - RNA, 19 nt, Human herpesvirus 4 [Epstein-Barr virus]
cgacugggggcaaagccag

SEQ ID NO: 1941009 - RNA, 16 nt, Human herpesvirus 4 [Epstein-Barr virus]
cagucaccuuccagac

SEQ ID NO: 1941010 - RNA, 21 nt, Human herpesvirus 4 [Epstein-Barr virus]
caggaggaggggcaggagcag

SEQ ID NO: 1941011 - RNA, 19 nt, Human herpesvirus 4 [Epstein-Barr virus]
cugaggaccuguugcuuca

SEQ ID NO: 1941012 - RNA, 14 nt, Human herpesvirus 4 [Epstein-Barr virus]
gcccccgccagcgc

SEQ ID NO: 1941013 - RNA, 16 nt, Human herpesvirus 4 [Epstein-Barr virus]
uccggcccuuugccug

SEQ ID NO: 1941014 - RNA, 13 nt, Human herpesvirus 4 [Epstein-Barr virus]
ugauggugcagag

SEQ ID NO: 1941015 - RNA, 22 nt, Human herpesvirus 4 [Epstein-Barr virus]
cugggcugccccgggcccaccc

SEQ ID NO: 1941016 - RNA, 15 nt, Human herpesvirus 4 [Epstein-Barr virus]
augcgauucugaacu

SEQ ID NO: 1941017 - RNA, 13 nt, Human herpesvirus 4 [Epstein-Barr virus]
cccaaugugcaug

SEQ ID NO: 1941018 - RNA, 12 nt, Human herpesvirus 4 [Epstein-Barr virus]
ccgcugggccag

SEQ ID NO: 1941019 - RNA, 16 nt, Human herpesvirus 4 [Epstein-Barr virus]
aguucuacaaugccag

SEQ ID NO: 1941020 - RNA, 16 nt, Human herpesvirus 4 [Epstein-Barr virus]
ugggaccuacaggaca

SEQ ID NO: 1941021 - RNA, 13 nt, Human herpesvirus 4 [Epstein-Barr virus]
cuggccugccugg

SEQ ID NO: 1941022 - RNA, 21 nt, Human herpesvirus 4 [Epstein-Barr virus]
caccuugacuguaaucacugg

SEQ ID NO: 1941023 - RNA, 22 nt, Human herpesvirus 4 [Epstein-Barr virus]
ccccccgccuuugggcacccca

SEQ ID NO: 1941024 - RNA, 14 nt, Human herpesvirus 4 [Epstein-Barr virus]
ggaggugaagaugg

SEQ ID NO: 1941025 - RNA, 16 nt, Human herpesvirus 4 [Epstein-Barr virus]
cugcaccaguggcugc

SEQ ID NO: 1941026 - RNA, 16 nt, Human herpesvirus 4 [Epstein-Barr virus]
auuugggagggaccac

SEQ ID NO: 1941027 - RNA, 13 nt, Human herpesvirus 4 [Epstein-Barr virus]
ucagauugccuuc

SEQ ID NO: 1941028 - RNA, 12 nt, Human herpesvirus 4 [Epstein-Barr virus]
acucacaggaca

SEQ ID NO: 1941029 - RNA, 15 nt, Human herpesvirus 4 [Epstein-Barr virus]
agggaggacacugcc

SEQ ID NO: 1941030 - RNA, 18 nt, Human herpesvirus 4 [Epstein-Barr virus]
gccgccagcauggcagcc

SEQ ID NO: 1941031 - RNA, 13 nt, Human herpesvirus 4 [Epstein-Barr virus]
guuuaaggaauga

SEQ ID NO: 1941032 - RNA, 15 nt, Human herpesvirus 4 [Epstein-Barr virus]
cacgccguggcccug

SEQ ID NO: 1941033 - RNA, 15 nt, Human herpesvirus 4 [Epstein-Barr virus]
gagccggcggccucg

SEQ ID NO: 1941034 - RNA, 23 nt, Human herpesvirus 4 [Epstein-Barr virus]
ggcgcucugcgccagccccgccc

SEQ ID NO: 1941035 - RNA, 20 nt, Human herpesvirus 4 [Epstein-Barr virus]
cccuccauuccacccacuga

SEQ ID NO: 1941036 - RNA, 22 nt, Human herpesvirus 4 [Epstein-Barr virus]
aagccgggggagaagcaccuca

SEQ ID NO: 1941037 - RNA, 18 nt, Human herpesvirus 4 [Epstein-Barr virus]
gucuucaaucuucuucau

SEQ ID NO: 1941038 - RNA, 19 nt, Human herpesvirus 4 [Epstein-Barr virus]
ggaugaggcugaugauggc

SEQ ID NO: 1941039 - RNA, 16 nt, Human herpesvirus 4 [Epstein-Barr virus]
gcucucguugccaaaa

SEQ ID NO: 1941040 - RNA, 18 nt, Human herpesvirus 4 [Epstein-Barr virus]
ccauauuggggcaauggc

SEQ ID NO: 1941041 - RNA, 13 nt, Human herpesvirus 4 [Epstein-Barr virus]
aguccggggagaa

SEQ ID NO: 1941042 - RNA, 13 nt, Human herpesvirus 4 [Epstein-Barr virus]
cugcuuucugccg

SEQ ID NO: 1941043 - RNA, 19 nt, Human herpesvirus 4 [Epstein-Barr virus]
gcucaggaucagggccaag

SEQ ID NO: 1941044 - RNA, 22 nt, Human herpesvirus 4 [Epstein-Barr virus]
gaucccauuuuucacuacggga

SEQ ID NO: 1941045 - RNA, 13 nt, Human herpesvirus 4 [Epstein-Barr virus]
gccagaggcgacg

SEQ ID NO: 1941046 - RNA, 21 nt, Human herpesvirus 4 [Epstein-Barr virus]
gugccagaugugccugggcua

SEQ ID NO: 1941047 - RNA, 14 nt, Human herpesvirus 4 [Epstein-Barr virus]
cugggcagccagag

SEQ ID NO: 1941048 - RNA, 12 nt, Human herpesvirus 4 [Epstein-Barr virus]
ucaagagcuucc

SEQ ID NO: 1941049 - RNA, 20 nt, Human herpesvirus 4 [Epstein-Barr virus]
cugucucggccuccuggcca

SEQ ID NO: 1941050 - RNA, 21 nt, Human herpesvirus 4 [Epstein-Barr virus]
gcagcccgcaccccccgccac

SEQ ID NO: 1941051 - RNA, 13 nt, Human herpesvirus 4 [Epstein-Barr virus]
ccuaagcagcuga

SEQ ID NO: 1941052 - RNA, 14 nt, Human herpesvirus 4 [Epstein-Barr virus]
agcuccuugugcag

SEQ ID NO: 1941053 - RNA, 18 nt, Human herpesvirus 4 [Epstein-Barr virus]
uucccagcuaguagcccu

SEQ ID NO: 1941054 - RNA, 18 nt, Human herpesvirus 4 [Epstein-Barr virus]
caggcagaggaaggccac

SEQ ID NO: 1941055 - RNA, 23 nt, Human herpesvirus 4 [Epstein-Barr virus]
cuggcauacuuuuugccacccag

SEQ ID NO: 1941056 - RNA, 16 nt, Human herpesvirus 4 [Epstein-Barr virus]
aggccgguuuugcagu

SEQ ID NO: 1941057 - RNA, 15 nt, Human herpesvirus 4 [Epstein-Barr virus]
caaugagagggacuu

SEQ ID NO: 1941058 - RNA, 21 nt, Human herpesvirus 4 [Epstein-Barr virus]
cacccggggaaccggccccgu

SEQ ID NO: 1941059 - RNA, 19 nt, Human herpesvirus 4 [Epstein-Barr virus]
ccacccgucccggguacaa

SEQ ID NO: 1941060 - RNA, 15 nt, Human herpesvirus 4 [Epstein-Barr virus]
accacaacagccaga

SEQ ID NO: 1941061 - RNA, 23 nt, Human herpesvirus 4 [Epstein-Barr virus]
cuggaggacggucuggcacugga

SEQ ID NO: 1941062 - RNA, 15 nt, Human herpesvirus 4 [Epstein-Barr virus]
ggccccggcuggcca

SEQ ID NO: 1941063 - RNA, 12 nt, Human herpesvirus 4 [Epstein-Barr virus]
uuuggcaacgag

SEQ ID NO: 1941064 - RNA, 22 nt, Human herpesvirus 4 [Epstein-Barr virus]
gggcggcucaggaucagggcca

SEQ ID NO: 1941065 - RNA, 17 nt, Human herpesvirus 4 [Epstein-Barr virus]
cccgccuagagcauuug

SEQ ID NO: 1941066 - RNA, 13 nt, Human herpesvirus 4 [Epstein-Barr virus]
cgcaccaccgcag

SEQ ID NO: 1941067 - RNA, 16 nt, Human herpesvirus 4 [Epstein-Barr virus]
agcuccgugggcccag

SEQ ID NO: 1941068 - RNA, 18 nt, Human herpesvirus 4 [Epstein-Barr virus]
uggaagagaggggcaggg

SEQ ID NO: 1941069 - RNA, 17 nt, Human herpesvirus 4 [Epstein-Barr virus]
ccagcauggcagccggg

SEQ ID NO: 1941070 - RNA, 14 nt, Human herpesvirus 4 [Epstein-Barr virus]
ccauuccacccacu

SEQ ID NO: 1941071 - RNA, 17 nt, Human herpesvirus 4 [Epstein-Barr virus]
cguguuucucccacugu

SEQ ID NO: 1941072 - RNA, 15 nt, Human herpesvirus 4 [Epstein-Barr virus]
aaaaaaugcaacaau

SEQ ID NO: 1941073 - RNA, 20 nt, Human herpesvirus 4 [Epstein-Barr virus]
cgucgggaaacacagcucug

SEQ ID NO: 1941074 - RNA, 22 nt, Human herpesvirus 4 [Epstein-Barr virus]
acgugucgcguagcucugguag

SEQ ID NO: 1941075 - RNA, 22 nt, Human herpesvirus 4 [Epstein-Barr virus]
gagaggcgggaauggccgccac

SEQ ID NO: 1941076 - RNA, 18 nt, Human herpesvirus 4 [Epstein-Barr virus]
ggagcuccgagagcuccg

SEQ ID NO: 1941077 - RNA, 17 nt, Human herpesvirus 4 [Epstein-Barr virus]
aacugacacacaggccu

SEQ ID NO: 1941078 - RNA, 21 nt, Human herpesvirus 4 [Epstein-Barr virus]
uugucuucccagacucugcuu

SEQ ID NO: 1941079 - RNA, 22 nt, Human herpesvirus 4 [Epstein-Barr virus]
gguccucauaaggcgguggggg

SEQ ID NO: 1941080 - RNA, 17 nt, Human herpesvirus 4 [Epstein-Barr virus]
uggcggggccuugucug

SEQ ID NO: 1941081 - RNA, 13 nt, Human herpesvirus 4 [Epstein-Barr virus]
ggaugaagaucca

SEQ ID NO: 1941082 - RNA, 16 nt, Human herpesvirus 4 [Epstein-Barr virus]
caacgaucccaggccu

SEQ ID NO: 1941083 - RNA, 23 nt, Human herpesvirus 4 [Epstein-Barr virus]
gcuuaaaaaugugcagcuucucc

SEQ ID NO: 1941084 - RNA, 13 nt, Human herpesvirus 4 [Epstein-Barr virus]
aauguaucccaaa

SEQ ID NO: 1941085 - RNA, 19 nt, Human herpesvirus 4 [Epstein-Barr virus]
cucaucugugagacaagcc

SEQ ID NO: 1941086 - RNA, 21 nt, Human herpesvirus 4 [Epstein-Barr virus]
ugccauggccauucgacaggc

SEQ ID NO: 1941087 - RNA, 17 nt, Human herpesvirus 4 [Epstein-Barr virus]
ccagcgcuggcuccagg

SEQ ID NO: 1941088 - RNA, 22 nt, Human herpesvirus 4 [Epstein-Barr virus]
gccagagcggcauccucaaggg

SEQ ID NO: 1941089 - RNA, 20 nt, Human herpesvirus 4 [Epstein-Barr virus]
gcccccaaaaguagaggcuc

SEQ ID NO: 1941090 - RNA, 18 nt, Human herpesvirus 4 [Epstein-Barr virus]
gcccccaccacucccacc

SEQ ID NO: 1941091 - RNA, 21 nt, Human herpesvirus 4 [Epstein-Barr virus]
ggaggagaagagaggcuuccc

SEQ ID NO: 1941092 - RNA, 10 nt, Human herpesvirus 4 [Epstein-Barr virus]
caggagcagg

SEQ ID NO: 1941093 - RNA, 21 nt, Human herpesvirus 4 [Epstein-Barr virus]
ugcacagaucugaccacggcc

SEQ ID NO: 1941094 - RNA, 20 nt, Human herpesvirus 4 [Epstein-Barr virus]
caguggaccucaaagaagag

SEQ ID NO: 1941095 - RNA, 16 nt, Human herpesvirus 4 [Epstein-Barr virus]
uauugaaaccacgccu

SEQ ID NO: 1941096 - RNA, 13 nt, Human herpesvirus 4 [Epstein-Barr virus]
guugguggcacug

SEQ ID NO: 1941097 - RNA, 21 nt, Human herpesvirus 4 [Epstein-Barr virus]
gggacgcagaaugugcaggga

SEQ ID NO: 1941098 - RNA, 18 nt, Human herpesvirus 4 [Epstein-Barr virus]
ggcccacuggaugcagga

SEQ ID NO: 1941099 - RNA, 20 nt, Human herpesvirus 4 [Epstein-Barr virus]
aggccccccgcaccagggcc

SEQ ID NO: 1941100 - RNA, 20 nt, Human herpesvirus 4 [Epstein-Barr virus]
gucccgccucuccguacccc

SEQ ID NO: 1941101 - RNA, 15 nt, Human herpesvirus 4 [Epstein-Barr virus]
cgccaaugccaacuc

SEQ ID NO: 1941102 - RNA, 14 nt, Human herpesvirus 4 [Epstein-Barr virus]
acgccagagacaag

SEQ ID NO: 1941103 - RNA, 21 nt, Human herpesvirus 4 [Epstein-Barr virus]
acaaccuuggacccugcugcg

SEQ ID NO: 1941104 - RNA, 20 nt, Human herpesvirus 4 [Epstein-Barr virus]
gaaaauaguuccaggugaca

SEQ ID NO: 1941105 - RNA, 17 nt, Human herpesvirus 4 [Epstein-Barr virus]
caugcuguaccugauga

SEQ ID NO: 1941106 - RNA, 17 nt, Human herpesvirus 4 [Epstein-Barr virus]
aggucuucucugacaaa

SEQ ID NO: 1941107 - RNA, 13 nt, Human herpesvirus 4 [Epstein-Barr virus]
agagguuuugcua

SEQ ID NO: 1941108 - RNA, 14 nt, Human herpesvirus 4 [Epstein-Barr virus]
ggggcuggccugcc

SEQ ID NO: 1941109 - RNA, 15 nt, Human herpesvirus 4 [Epstein-Barr virus]
uugaucuucuucucc

SEQ ID NO: 1941110 - RNA, 19 nt, Human herpesvirus 4 [Epstein-Barr virus]
aaaugaacccagggguggc

SEQ ID NO: 1941111 - RNA, 12 nt, Human herpesvirus 4 [Epstein-Barr virus]
uguguacauaau

SEQ ID NO: 1941112 - RNA, 15 nt, Human herpesvirus 4 [Epstein-Barr virus]
gacuggcggcacugu

SEQ ID NO: 1941113 - RNA, 15 nt, Human herpesvirus 4 [Epstein-Barr virus]
uuguaagacaaucac

SEQ ID NO: 1941114 - RNA, 20 nt, Human herpesvirus 4 [Epstein-Barr virus]
uccucguuaguccaagagaa

SEQ ID NO: 1941115 - RNA, 14 nt, Human herpesvirus 4 [Epstein-Barr virus]
cugcauggccaggc

SEQ ID NO: 1941116 - RNA, 11 nt, Human herpesvirus 4 [Epstein-Barr virus]
uagucagucug

SEQ ID NO: 1941117 - RNA, 23 nt, Human herpesvirus 4 [Epstein-Barr virus]
gaagcgccgguacuuguuaagga

SEQ ID NO: 1941118 - RNA, 15 nt, Human herpesvirus 4 [Epstein-Barr virus]
ggagagggccagaga

SEQ ID NO: 1941119 - RNA, 21 nt, Human herpesvirus 4 [Epstein-Barr virus]
cgcgacauguuucuggugagc

SEQ ID NO: 1941120 - RNA, 14 nt, Human herpesvirus 4 [Epstein-Barr virus]
cugucaccaggccu

SEQ ID NO: 1941121 - RNA, 18 nt, Human herpesvirus 4 [Epstein-Barr virus]
ucacugagaaucuccugu

SEQ ID NO: 1941122 - RNA, 20 nt, Human herpesvirus 4 [Epstein-Barr virus]
auguacccaucccggcccuc

SEQ ID NO: 1941123 - RNA, 12 nt, Human herpesvirus 4 [Epstein-Barr virus]
cucggaggugcc

SEQ ID NO: 1941124 - RNA, 12 nt, Human herpesvirus 4 [Epstein-Barr virus]
uugccuggggcu

SEQ ID NO: 1941125 - RNA, 16 nt, Human herpesvirus 4 [Epstein-Barr virus]
gcagguggcugcugcc

SEQ ID NO: 1941126 - RNA, 17 nt, Human herpesvirus 4 [Epstein-Barr virus]
cagaggacuaauguucu

SEQ ID NO: 1941127 - RNA, 15 nt, Human herpesvirus 4 [Epstein-Barr virus]
cagcggauggugggg

SEQ ID NO: 1941128 - RNA, 13 nt, Human herpesvirus 4 [Epstein-Barr virus]
cugcccuccucca

SEQ ID NO: 1941129 - RNA, 16 nt, Human herpesvirus 4 [Epstein-Barr virus]
acuucuucucugcucg

SEQ ID NO: 1941130 - RNA, 22 nt, Human herpesvirus 4 [Epstein-Barr virus]
aggcacaucuggcaccuguccu

SEQ ID NO: 1941131 - RNA, 15 nt, Human herpesvirus 4 [Epstein-Barr virus]
gccuccagcucggcc

SEQ ID NO: 1941132 - RNA, 15 nt, Human herpesvirus 4 [Epstein-Barr virus]
accaaugccaaagcu

SEQ ID NO: 1941133 - RNA, 17 nt, Human herpesvirus 4 [Epstein-Barr virus]
ucaaucuucuucauagc

SEQ ID NO: 1941134 - RNA, 16 nt, Human herpesvirus 4 [Epstein-Barr virus]
cuuucgacugucauuu

SEQ ID NO: 1941135 - RNA, 14 nt, Human herpesvirus 4 [Epstein-Barr virus]
cccccgccuuuggg

SEQ ID NO: 1941136 - RNA, 16 nt, Human herpesvirus 4 [Epstein-Barr virus]
aaaccacgccugcuuc

SEQ ID NO: 1941137 - RNA, 23 nt, Human herpesvirus 4 [Epstein-Barr virus]
cacaaaaugaggaacggugauua

SEQ ID NO: 1941138 - RNA, 13 nt, Human herpesvirus 4 [Epstein-Barr virus]
ccaccccacacuc

SEQ ID NO: 1941139 - RNA, 14 nt, Human herpesvirus 4 [Epstein-Barr virus]
auagcauggccgcc

SEQ ID NO: 1941140 - RNA, 18 nt, Human herpesvirus 4 [Epstein-Barr virus]
cgaagaacacuccacaga

SEQ ID NO: 1941141 - RNA, 17 nt, Human herpesvirus 4 [Epstein-Barr virus]
gccaccguggccaggcc

SEQ ID NO: 1941142 - RNA, 18 nt, Human herpesvirus 4 [Epstein-Barr virus]
gccagucuccgggucagg

SEQ ID NO: 1941143 - RNA, 18 nt, Human herpesvirus 4 [Epstein-Barr virus]
gaggccucugggguccag

SEQ ID NO: 1941144 - RNA, 14 nt, Human herpesvirus 4 [Epstein-Barr virus]
uuaggcacuggaca

SEQ ID NO: 1941145 - RNA, 13 nt, Human herpesvirus 4 [Epstein-Barr virus]
gugccuccagagc

SEQ ID NO: 1941146 - RNA, 18 nt, Human herpesvirus 4 [Epstein-Barr virus]
gguggcccucgguggugg

SEQ ID NO: 1941147 - RNA, 20 nt, Human herpesvirus 4 [Epstein-Barr virus]
cacccucccccugccccguu

SEQ ID NO: 1941148 - RNA, 14 nt, Human herpesvirus 4 [Epstein-Barr virus]
ugcugaugugcugc

SEQ ID NO: 1941149 - RNA, 16 nt, Human herpesvirus 4 [Epstein-Barr virus]
gucacucagcuccgcg

SEQ ID NO: 1941150 - RNA, 20 nt, Human herpesvirus 4 [Epstein-Barr virus]
uuugacugacacauaaacau

SEQ ID NO: 1941151 - RNA, 23 nt, Human herpesvirus 4 [Epstein-Barr virus]
ggccgaggcugagggggcgguca

SEQ ID NO: 1941152 - RNA, 16 nt, Human herpesvirus 4 [Epstein-Barr virus]
ugcaaugcccacccac

SEQ ID NO: 1941153 - RNA, 13 nt, Human herpesvirus 4 [Epstein-Barr virus]
gacucuugaagau

SEQ ID NO: 1941154 - RNA, 19 nt, Human herpesvirus 4 [Epstein-Barr virus]
cccacuaucacccauggcc

SEQ ID NO: 1941155 - RNA, 23 nt, Human herpesvirus 4 [Epstein-Barr virus]
cacucuuuuuucaacgcagucuu

SEQ ID NO: 1941156 - RNA, 18 nt, Human herpesvirus 4 [Epstein-Barr virus]
aggacauguuugggggag

SEQ ID NO: 1941157 - RNA, 15 nt, Human herpesvirus 4 [Epstein-Barr virus]
gcuguugacaugagc

SEQ ID NO: 1941158 - RNA, 15 nt, Human herpesvirus 4 [Epstein-Barr virus]
cagcgcuggcuccag

SEQ ID NO: 1941159 - RNA, 23 nt, Human herpesvirus 4 [Epstein-Barr virus]
caggguggcuacuugcucagguu

SEQ ID NO: 1941160 - RNA, 12 nt, Human herpesvirus 4 [Epstein-Barr virus]
cucccaccaccc

SEQ ID NO: 1941161 - RNA, 18 nt, Human herpesvirus 4 [Epstein-Barr virus]
caugcucuuugaugggga

SEQ ID NO: 1941162 - RNA, 17 nt, Human herpesvirus 4 [Epstein-Barr virus]
auagaggggagcagagg

SEQ ID NO: 1941163 - RNA, 14 nt, Human herpesvirus 4 [Epstein-Barr virus]
gacaguaacacagg

SEQ ID NO: 1941164 - RNA, 15 nt, Human herpesvirus 4 [Epstein-Barr virus]
cccagcuucugaggc

SEQ ID NO: 1941165 - RNA, 16 nt, Human herpesvirus 4 [Epstein-Barr virus]
agaccucgaguccggg

SEQ ID NO: 1941166 - RNA, 21 nt, Human herpesvirus 4 [Epstein-Barr virus]
aacuggccaugcaggccugga

SEQ ID NO: 1941167 - RNA, 22 nt, Human herpesvirus 4 [Epstein-Barr virus]
cuuccacccccuggagccagcg

SEQ ID NO: 1941168 - RNA, 21 nt, Human herpesvirus 4 [Epstein-Barr virus]
ccuagccaccguggccaggcc

SEQ ID NO: 1941169 - RNA, 19 nt, Human herpesvirus 4 [Epstein-Barr virus]
ggcgacaguaacacagggu

SEQ ID NO: 1941170 - RNA, 18 nt, Human herpesvirus 4 [Epstein-Barr virus]
ggugcccgagccccgccu

SEQ ID NO: 1941171 - RNA, 16 nt, Human herpesvirus 4 [Epstein-Barr virus]
uggucuuuuaugagcc

SEQ ID NO: 1941172 - RNA, 18 nt, Human herpesvirus 4 [Epstein-Barr virus]
cccauauuggggcaaugg

SEQ ID NO: 1941173 - RNA, 23 nt, Human herpesvirus 4 [Epstein-Barr virus]
ugacuguuuguggcggcaucaug

SEQ ID NO: 1941174 - RNA, 17 nt, Human herpesvirus 4 [Epstein-Barr virus]
aacaaggagugccucug

SEQ ID NO: 1941175 - RNA, 22 nt, Human herpesvirus 4 [Epstein-Barr virus]
gccucgccuucuccucagccuc

SEQ ID NO: 1941176 - RNA, 14 nt, Human herpesvirus 4 [Epstein-Barr virus]
ggaucucccgcgcc

SEQ ID NO: 1941177 - RNA, 17 nt, Human herpesvirus 4 [Epstein-Barr virus]
ggccacugcaggcugga

SEQ ID NO: 1941178 - RNA, 17 nt, Human herpesvirus 4 [Epstein-Barr virus]
gccaugcacggcccuga

SEQ ID NO: 1941179 - RNA, 15 nt, Human herpesvirus 4 [Epstein-Barr virus]
gcccaccagccagcg

SEQ ID NO: 1941180 - RNA, 16 nt, Human herpesvirus 4 [Epstein-Barr virus]
acaaaaccacugaccu

SEQ ID NO: 1941181 - RNA, 17 nt, Human herpesvirus 4 [Epstein-Barr virus]
uccuacaacucagcccc

SEQ ID NO: 1941182 - RNA, 16 nt, Human herpesvirus 4 [Epstein-Barr virus]
uuguuggggaaaacac

SEQ ID NO: 1941183 - RNA, 20 nt, Human herpesvirus 4 [Epstein-Barr virus]
ccagccgggugcacacgcuc

SEQ ID NO: 1941184 - RNA, 20 nt, Human herpesvirus 4 [Epstein-Barr virus]
gcuggacgugaaccuccccc

SEQ ID NO: 1941185 - RNA, 13 nt, Human herpesvirus 4 [Epstein-Barr virus]
aguugggguccuc

SEQ ID NO: 1941186 - RNA, 17 nt, Human herpesvirus 4 [Epstein-Barr virus]
guccuaggugggauaua

SEQ ID NO: 1941187 - RNA, 18 nt, Human herpesvirus 4 [Epstein-Barr virus]
gcaccagcuaacaggaca

SEQ ID NO: 1941188 - RNA, 14 nt, Human herpesvirus 4 [Epstein-Barr virus]
uucgacugucauuu

SEQ ID NO: 1941189 - RNA, 15 nt, Human herpesvirus 4 [Epstein-Barr virus]
accguggccaggccc

SEQ ID NO: 1941190 - RNA, 17 nt, Human herpesvirus 4 [Epstein-Barr virus]
cgaaggcguggguguca

SEQ ID NO: 1941191 - RNA, 23 nt, Human herpesvirus 4 [Epstein-Barr virus]
uggggccaccggggaggccaggu

SEQ ID NO: 1941192 - RNA, 16 nt, Human herpesvirus 4 [Epstein-Barr virus]
uggcacgggcagagga

SEQ ID NO: 1941193 - RNA, 16 nt, Human herpesvirus 4 [Epstein-Barr virus]
cgccagcagggcacag

SEQ ID NO: 1941194 - RNA, 21 nt, Human herpesvirus 4 [Epstein-Barr virus]
cagcagcagcccggccgaggc

SEQ ID NO: 1941195 - RNA, 16 nt, Human herpesvirus 4 [Epstein-Barr virus]
ucggggcaugcugccc

SEQ ID NO: 1941196 - RNA, 19 nt, Human herpesvirus 4 [Epstein-Barr virus]
gacuccgaauauccccaaa

SEQ ID NO: 1941197 - RNA, 17 nt, Human herpesvirus 4 [Epstein-Barr virus]
aucuggcucuccugugu

SEQ ID NO: 1941198 - RNA, 17 nt, Human herpesvirus 4 [Epstein-Barr virus]
acgggguggugccuggu

SEQ ID NO: 1941199 - RNA, 14 nt, Human herpesvirus 4 [Epstein-Barr virus]
ugcacucucucccc

SEQ ID NO: 1941200 - RNA, 18 nt, Human herpesvirus 4 [Epstein-Barr virus]
gggacgggguggugccug

SEQ ID NO: 1941201 - RNA, 17 nt, Human herpesvirus 4 [Epstein-Barr virus]
gccacccucccccugcc

SEQ ID NO: 1941202 - RNA, 19 nt, Human herpesvirus 4 [Epstein-Barr virus]
gacaugcugaugugcugcc

SEQ ID NO: 1941203 - RNA, 22 nt, Human herpesvirus 4 [Epstein-Barr virus]
aagcaugggggaaaccugcgaa

SEQ ID NO: 1941204 - RNA, 17 nt, Human herpesvirus 4 [Epstein-Barr virus]
ugauauugaauuccaca

SEQ ID NO: 1941205 - RNA, 14 nt, Human herpesvirus 4 [Epstein-Barr virus]
agcuuuugaccaag

SEQ ID NO: 1941206 - RNA, 13 nt, Human herpesvirus 4 [Epstein-Barr virus]
caucagcucgccc

SEQ ID NO: 1941207 - RNA, 18 nt, Human herpesvirus 4 [Epstein-Barr virus]
ccguggagccgggggcau

SEQ ID NO: 1941208 - RNA, 16 nt, Human herpesvirus 4 [Epstein-Barr virus]
uuauggcagagcuuug

SEQ ID NO: 1941209 - RNA, 22 nt, Human herpesvirus 4 [Epstein-Barr virus]
uaacacuacuuguuucuggaau

SEQ ID NO: 1941210 - RNA, 12 nt, Human herpesvirus 4 [Epstein-Barr virus]
cuccucagccuc

SEQ ID NO: 1941211 - RNA, 15 nt, Human herpesvirus 4 [Epstein-Barr virus]
cuccuuagacugagc

SEQ ID NO: 1941212 - RNA, 14 nt, Human herpesvirus 4 [Epstein-Barr virus]
caccugcuagagaa

SEQ ID NO: 1941213 - RNA, 20 nt, Human herpesvirus 4 [Epstein-Barr virus]
gaagcuggccaggcugguga

SEQ ID NO: 1941214 - RNA, 15 nt, Human herpesvirus 4 [Epstein-Barr virus]
uaaauaucuuccugu

SEQ ID NO: 1941215 - RNA, 13 nt, Human herpesvirus 4 [Epstein-Barr virus]
auaggccucugcc

SEQ ID NO: 1941216 - RNA, 14 nt, Human herpesvirus 4 [Epstein-Barr virus]
cauccgagaggaug

SEQ ID NO: 1941217 - RNA, 18 nt, Human herpesvirus 4 [Epstein-Barr virus]
ggacgggguggugccugg

SEQ ID NO: 1941218 - RNA, 14 nt, Human herpesvirus 4 [Epstein-Barr virus]
ggaaaaacuggcca

SEQ ID NO: 1941219 - RNA, 22 nt, Human herpesvirus 4 [Epstein-Barr virus]
cgucgacgcuguuuugcagcug

SEQ ID NO: 1941220 - RNA, 16 nt, Human herpesvirus 4 [Epstein-Barr virus]
cuggucuuuuaugagc

SEQ ID NO: 1941221 - RNA, 20 nt, Human herpesvirus 4 [Epstein-Barr virus]
cacucaggaagcuggccagg

SEQ ID NO: 1941222 - RNA, 23 nt, Human herpesvirus 4 [Epstein-Barr virus]
ggcggacugcgccuuuaggcgua

SEQ ID NO: 1941223 - RNA, 16 nt, Human herpesvirus 4 [Epstein-Barr virus]
aggacgauagcccagg

SEQ ID NO: 1941224 - RNA, 16 nt, Human herpesvirus 4 [Epstein-Barr virus]
cacaacagccagaauc

SEQ ID NO: 1941225 - RNA, 13 nt, Human herpesvirus 4 [Epstein-Barr virus]
cauguccacugag

SEQ ID NO: 1941226 - RNA, 14 nt, Human herpesvirus 4 [Epstein-Barr virus]
ucucagaugcagug

SEQ ID NO: 1941227 - RNA, 17 nt, Human herpesvirus 4 [Epstein-Barr virus]
gggcgggcuugugcuug

SEQ ID NO: 1941228 - RNA, 15 nt, Human herpesvirus 4 [Epstein-Barr virus]
ugacagcugucaccc

SEQ ID NO: 1941229 - RNA, 14 nt, Human herpesvirus 4 [Epstein-Barr virus]
cugugguugucuuc

SEQ ID NO: 1941230 - RNA, 22 nt, Human herpesvirus 4 [Epstein-Barr virus]
agggucagcacagccagagagg

SEQ ID NO: 1941231 - RNA, 19 nt, Human herpesvirus 4 [Epstein-Barr virus]
caauuaggcuaaaagcagc

SEQ ID NO: 1941232 - RNA, 16 nt, Human herpesvirus 4 [Epstein-Barr virus]
ggugcaccagcuccag

SEQ ID NO: 1941233 - RNA, 17 nt, Human herpesvirus 4 [Epstein-Barr virus]
cuccugauuugcucuuc

SEQ ID NO: 1941234 - RNA, 18 nt, Human herpesvirus 4 [Epstein-Barr virus]
uacguuggcuucugcugc

SEQ ID NO: 1941235 - RNA, 14 nt, Human herpesvirus 4 [Epstein-Barr virus]
gucaaguaccagcu

SEQ ID NO: 1941236 - RNA, 23 nt, Human herpesvirus 4 [Epstein-Barr virus]
cuggcacugcuagcgucacugau

SEQ ID NO: 1941237 - RNA, 18 nt, Human herpesvirus 4 [Epstein-Barr virus]
ggcgagacuuggaccaag

SEQ ID NO: 1941238 - RNA, 15 nt, Human herpesvirus 4 [Epstein-Barr virus]
gcuccagggccagca

SEQ ID NO: 1941239 - RNA, 21 nt, Human herpesvirus 4 [Epstein-Barr virus]
cugacagagccgugucuccug

SEQ ID NO: 1941240 - RNA, 17 nt, Human herpesvirus 4 [Epstein-Barr virus]
cuggcugugcugacccu

SEQ ID NO: 1941241 - RNA, 16 nt, Human herpesvirus 4 [Epstein-Barr virus]
acaaguaccagcccuu

SEQ ID NO: 1941242 - RNA, 13 nt, Human herpesvirus 4 [Epstein-Barr virus]
accgucagccaca

SEQ ID NO: 1941243 - RNA, 19 nt, Human herpesvirus 4 [Epstein-Barr virus]
cugcgagggggccuggugc

SEQ ID NO: 1941244 - RNA, 22 nt, Human herpesvirus 4 [Epstein-Barr virus]
cucgugcaaccaggcccacugc

SEQ ID NO: 1941245 - RNA, 23 nt, Human herpesvirus 4 [Epstein-Barr virus]
gcgcgcccugucaccaggccugc

SEQ ID NO: 1941246 - RNA, 20 nt, Human herpesvirus 4 [Epstein-Barr virus]
cguuauugaaaccacgccug

SEQ ID NO: 1941247 - RNA, 13 nt, Human herpesvirus 4 [Epstein-Barr virus]
gcaccggagccac

SEQ ID NO: 1941248 - RNA, 20 nt, Human herpesvirus 4 [Epstein-Barr virus]
ggaccggaucgaaggagagc

SEQ ID NO: 1941249 - RNA, 14 nt, Human herpesvirus 4 [Epstein-Barr virus]
ccucauccuggccc

SEQ ID NO: 1941250 - RNA, 12 nt, Human herpesvirus 4 [Epstein-Barr virus]
ccugauuuuccu

SEQ ID NO: 1941251 - RNA, 20 nt, Human herpesvirus 4 [Epstein-Barr virus]
cggccuccuggccagcaccc

SEQ ID NO: 1941252 - RNA, 15 nt, Human herpesvirus 4 [Epstein-Barr virus]
cuuacuccccuaccc

SEQ ID NO: 1941253 - RNA, 21 nt, Human herpesvirus 4 [Epstein-Barr virus]
uggcuccccauagacucccau

SEQ ID NO: 1941254 - RNA, 23 nt, Human herpesvirus 4 [Epstein-Barr virus]
agggaagagggaaaagagacugc

SEQ ID NO: 1941255 - RNA, 17 nt, Human herpesvirus 4 [Epstein-Barr virus]
caaugggggaggagaga

SEQ ID NO: 1941256 - RNA, 22 nt, Human herpesvirus 4 [Epstein-Barr virus]
cccaauauccaucugcuucugg

SEQ ID NO: 1941257 - RNA, 21 nt, Human herpesvirus 4 [Epstein-Barr virus]
cugcgaaacuugggggcaggc

SEQ ID NO: 1941258 - RNA, 15 nt, Human herpesvirus 4 [Epstein-Barr virus]
cuggccguggccagg

SEQ ID NO: 1941259 - RNA, 15 nt, Human herpesvirus 4 [Epstein-Barr virus]
gaggacuaauguucu

SEQ ID NO: 1941260 - RNA, 18 nt, Human herpesvirus 4 [Epstein-Barr virus]
agggggccuggugccaga

SEQ ID NO: 1941261 - RNA, 20 nt, Human herpesvirus 4 [Epstein-Barr virus]
acacgggggugcccccacca

SEQ ID NO: 1941262 - RNA, 19 nt, Human herpesvirus 4 [Epstein-Barr virus]
ugagucaucccguggagag

SEQ ID NO: 1941263 - RNA, 13 nt, Human herpesvirus 4 [Epstein-Barr virus]
gugggguggugua

SEQ ID NO: 1941264 - RNA, 12 nt, Human herpesvirus 4 [Epstein-Barr virus]
ccuguugauggu

SEQ ID NO: 1941265 - RNA, 16 nt, Human herpesvirus 4 [Epstein-Barr virus]
uccgccaugaccagca

SEQ ID NO: 1941266 - RNA, 18 nt, Human herpesvirus 4 [Epstein-Barr virus]
cugacacagacuuggccu

SEQ ID NO: 1941267 - RNA, 21 nt, Human herpesvirus 4 [Epstein-Barr virus]
cccauaaaaauaagugcaugg

SEQ ID NO: 1941268 - RNA, 22 nt, Human herpesvirus 4 [Epstein-Barr virus]
acacuuauguuucaagcagcuc

SEQ ID NO: 1941269 - RNA, 15 nt, Human herpesvirus 4 [Epstein-Barr virus]
caaucaccagccacc

SEQ ID NO: 1941270 - RNA, 15 nt, Human herpesvirus 4 [Epstein-Barr virus]
aggccgcugccaggc

SEQ ID NO: 1941271 - RNA, 21 nt, Human herpesvirus 4 [Epstein-Barr virus]
agccuugcguggugcuguccu

SEQ ID NO: 1941272 - RNA, 17 nt, Human herpesvirus 4 [Epstein-Barr virus]
cugagccugagccacac

SEQ ID NO: 1941273 - RNA, 18 nt, Human herpesvirus 4 [Epstein-Barr virus]
caggucccccuccacggg

SEQ ID NO: 1941274 - RNA, 22 nt, Human herpesvirus 4 [Epstein-Barr virus]
gguuucaauuuugggagcucca

SEQ ID NO: 1941275 - RNA, 17 nt, Human herpesvirus 4 [Epstein-Barr virus]
aauccgcgcagccuguu

SEQ ID NO: 1941276 - RNA, 15 nt, Human herpesvirus 4 [Epstein-Barr virus]
ggcugagaacugacg

SEQ ID NO: 1941277 - RNA, 14 nt, Human herpesvirus 4 [Epstein-Barr virus]
cucugggugcugag

SEQ ID NO: 1941278 - RNA, 22 nt, Human herpesvirus 4 [Epstein-Barr virus]
uaccggcgagcaugaucaggac

SEQ ID NO: 1941279 - RNA, 22 nt, Human herpesvirus 4 [Epstein-Barr virus]
caaccaauguaucccaaauaaa

SEQ ID NO: 1941280 - RNA, 14 nt, Human herpesvirus 4 [Epstein-Barr virus]
cauccgaggcugag

SEQ ID NO: 1941281 - RNA, 14 nt, Human herpesvirus 4 [Epstein-Barr virus]
acugcaaacccugg

SEQ ID NO: 1941282 - RNA, 20 nt, Human herpesvirus 4 [Epstein-Barr virus]
gugucauuuagaaaccuugc

SEQ ID NO: 1941283 - RNA, 14 nt, Human herpesvirus 4 [Epstein-Barr virus]
gaagcgaagcagcu

SEQ ID NO: 1941284 - RNA, 23 nt, Human herpesvirus 4 [Epstein-Barr virus]
cuccacagaguacgcgacugagg

SEQ ID NO: 1941285 - RNA, 15 nt, Human herpesvirus 4 [Epstein-Barr virus]
cuggccgccguggcc

SEQ ID NO: 1941286 - RNA, 23 nt, Human herpesvirus 4 [Epstein-Barr virus]
agccccaauucuugcacccaccc

SEQ ID NO: 1941287 - RNA, 14 nt, Human herpesvirus 4 [Epstein-Barr virus]
gaagauugaagaca

SEQ ID NO: 1941288 - RNA, 15 nt, Human herpesvirus 4 [Epstein-Barr virus]
gcugccccgggccca

SEQ ID NO: 1941289 - RNA, 21 nt, Human herpesvirus 4 [Epstein-Barr virus]
auagcaggacggggggcuggc

SEQ ID NO: 1941290 - RNA, 19 nt, Human herpesvirus 4 [Epstein-Barr virus]
uccguccuuguccaggaga

SEQ ID NO: 1941291 - RNA, 14 nt, Human herpesvirus 4 [Epstein-Barr virus]
uaaaauucuggauc

SEQ ID NO: 1941292 - RNA, 14 nt, Human herpesvirus 4 [Epstein-Barr virus]
ccgccagcagcccc

SEQ ID NO: 1941293 - RNA, 18 nt, Human herpesvirus 4 [Epstein-Barr virus]
agcccccucccgccccug

SEQ ID NO: 1941294 - RNA, 14 nt, Human herpesvirus 4 [Epstein-Barr virus]
gcaaguuuugcccg

SEQ ID NO: 1941295 - RNA, 15 nt, Human herpesvirus 4 [Epstein-Barr virus]
ccggggcggcggugg

SEQ ID NO: 1941296 - RNA, 14 nt, Human herpesvirus 4 [Epstein-Barr virus]
gcgggugaggccac

SEQ ID NO: 1941297 - RNA, 19 nt, Human herpesvirus 4 [Epstein-Barr virus]
accugcuaaccagauguga

SEQ ID NO: 1941298 - RNA, 21 nt, Human herpesvirus 4 [Epstein-Barr virus]
cugaccggcucggccacgcug

SEQ ID NO: 1941299 - RNA, 13 nt, Human herpesvirus 4 [Epstein-Barr virus]
cugagugcccagg

SEQ ID NO: 1941300 - RNA, 18 nt, Human herpesvirus 4 [Epstein-Barr virus]
cuaaggccgggagaggca

SEQ ID NO: 1941301 - RNA, 13 nt, Human herpesvirus 4 [Epstein-Barr virus]
ccagcaggcucag

SEQ ID NO: 1941302 - RNA, 21 nt, Human herpesvirus 4 [Epstein-Barr virus]
cucgaguaggugccuccagag

SEQ ID NO: 1941303 - RNA, 22 nt, Human herpesvirus 4 [Epstein-Barr virus]
guccaguuuuuaugugccucgg

SEQ ID NO: 1941304 - RNA, 22 nt, Human herpesvirus 4 [Epstein-Barr virus]
cgggcagaggacacgcuggucu

SEQ ID NO: 1941305 - RNA, 11 nt, Human herpesvirus 4 [Epstein-Barr virus]
gcccacccacu

SEQ ID NO: 1941306 - RNA, 16 nt, Human herpesvirus 4 [Epstein-Barr virus]
gcccgucuuacugccc

SEQ ID NO: 1941307 - RNA, 23 nt, Human herpesvirus 4 [Epstein-Barr virus]
augcccccuuuguggugggacug

SEQ ID NO: 1941308 - RNA, 14 nt, Human herpesvirus 4 [Epstein-Barr virus]
cucugcauggagaa

SEQ ID NO: 1941309 - RNA, 19 nt, Human herpesvirus 4 [Epstein-Barr virus]
gucuccccucugcagagag

SEQ ID NO: 1941310 - RNA, 22 nt, Human herpesvirus 4 [Epstein-Barr virus]
ugugucccccuccauuccaccc

SEQ ID NO: 1941311 - RNA, 21 nt, Human herpesvirus 4 [Epstein-Barr virus]
gugcgcaacgccggccugcug

SEQ ID NO: 1941312 - RNA, 18 nt, Human herpesvirus 4 [Epstein-Barr virus]
auuugccuaacauggagg

SEQ ID NO: 1941313 - RNA, 22 nt, Human herpesvirus 4 [Epstein-Barr virus]
aggccaugcgcgcccugucacc

SEQ ID NO: 1941314 - RNA, 15 nt, Human herpesvirus 4 [Epstein-Barr virus]
uuugauaaaccuuaa

SEQ ID NO: 1941315 - RNA, 17 nt, Human herpesvirus 4 [Epstein-Barr virus]
auaaugucuucaauaga

SEQ ID NO: 1941316 - RNA, 15 nt, Human herpesvirus 4 [Epstein-Barr virus]
cagccacggcgaccu

SEQ ID NO: 1941317 - RNA, 13 nt, Human herpesvirus 4 [Epstein-Barr virus]
ucugcuggacucc

SEQ ID NO: 1941318 - RNA, 19 nt, Human herpesvirus 4 [Epstein-Barr virus]
gcuacaaacacgggccugg

SEQ ID NO: 1941319 - RNA, 15 nt, Human herpesvirus 4 [Epstein-Barr virus]
gcuugccaaaauugg

SEQ ID NO: 1941320 - RNA, 24 nt, Human herpesvirus 4 [Epstein-Barr virus]
aacccuugcccucuccagcaacca

SEQ ID NO: 1941321 - RNA, 16 nt, Human herpesvirus 4 [Epstein-Barr virus]
guccuccacggggaca

SEQ ID NO: 1941322 - RNA, 21 nt, Human herpesvirus 4 [Epstein-Barr virus]
ucccgggcaaacagggcagag

SEQ ID NO: 1941323 - RNA, 20 nt, Human herpesvirus 4 [Epstein-Barr virus]
ccaaguguuuccagacacca

SEQ ID NO: 1941324 - RNA, 11 nt, Human herpesvirus 4 [Epstein-Barr virus]
cagcucaccua

SEQ ID NO: 1941325 - RNA, 17 nt, Human herpesvirus 4 [Epstein-Barr virus]
cuauagauccugggccc

SEQ ID NO: 1941326 - RNA, 18 nt, Human herpesvirus 4 [Epstein-Barr virus]
aaguaccagcuggugguc

SEQ ID NO: 1941327 - RNA, 21 nt, Human herpesvirus 4 [Epstein-Barr virus]
gcugcucggggcaugcugccc

SEQ ID NO: 1941328 - RNA, 20 nt, Human herpesvirus 4 [Epstein-Barr virus]
uggucauggccagcuuugag

SEQ ID NO: 1941329 - RNA, 19 nt, Human herpesvirus 4 [Epstein-Barr virus]
cccgggucccgccucuccg

SEQ ID NO: 1941330 - RNA, 12 nt, Human herpesvirus 4 [Epstein-Barr virus]
acaggacauguu

SEQ ID NO: 1941331 - RNA, 21 nt, Human herpesvirus 4 [Epstein-Barr virus]
gacgggcaucuuaucagagag

SEQ ID NO: 1941332 - RNA, 22 nt, Human herpesvirus 4 [Epstein-Barr virus]
guuauuacugauugucgcuggc

SEQ ID NO: 1941333 - RNA, 19 nt, Human herpesvirus 4 [Epstein-Barr virus]
aggcgguuagggaggacac

SEQ ID NO: 1941334 - RNA, 20 nt, Human herpesvirus 4 [Epstein-Barr virus]
aaucucgcucagagcuggga

SEQ ID NO: 1941335 - RNA, 20 nt, Human herpesvirus 4 [Epstein-Barr virus]
gauucucuaaucccucuggg

SEQ ID NO: 1941336 - RNA, 16 nt, Human herpesvirus 4 [Epstein-Barr virus]
gcugaugugcugcccc

SEQ ID NO: 1941337 - RNA, 13 nt, Human herpesvirus 4 [Epstein-Barr virus]
auuucauccucag

SEQ ID NO: 1941338 - RNA, 16 nt, Human herpesvirus 4 [Epstein-Barr virus]
ggccucaaaggccucg

SEQ ID NO: 1941339 - RNA, 23 nt, Human herpesvirus 4 [Epstein-Barr virus]
ccagcuaguagcccuuggaacug

SEQ ID NO: 1941340 - RNA, 12 nt, Human herpesvirus 4 [Epstein-Barr virus]
auguacccaucc

SEQ ID NO: 1941341 - RNA, 13 nt, Human herpesvirus 4 [Epstein-Barr virus]
cuuucuaugccug

SEQ ID NO: 1941342 - RNA, 18 nt, Human herpesvirus 4 [Epstein-Barr virus]
agucccgggggaggagaa

SEQ ID NO: 1941343 - RNA, 19 nt, Human herpesvirus 4 [Epstein-Barr virus]
gcagcagugugugaagauu

SEQ ID NO: 1941344 - RNA, 19 nt, Human herpesvirus 4 [Epstein-Barr virus]
gccccccgcaccagggcca

SEQ ID NO: 1941345 - RNA, 16 nt, Human herpesvirus 4 [Epstein-Barr virus]
gagacguguguggcug

SEQ ID NO: 1941346 - RNA, 18 nt, Human herpesvirus 4 [Epstein-Barr virus]
cguuggcuucugcugcug

SEQ ID NO: 1941347 - RNA, 18 nt, Human herpesvirus 4 [Epstein-Barr virus]
aaaucaacuacaagcagc

SEQ ID NO: 1941348 - RNA, 23 nt, Human herpesvirus 4 [Epstein-Barr virus]
gaacuguacuaaauuugcugaca

SEQ ID NO: 1941349 - RNA, 16 nt, Human herpesvirus 4 [Epstein-Barr virus]
ggcgcgggucugggau

SEQ ID NO: 1941350 - RNA, 22 nt, Human herpesvirus 4 [Epstein-Barr virus]
ccacaaacaccaguguccagag

SEQ ID NO: 1941351 - RNA, 14 nt, Human herpesvirus 4 [Epstein-Barr virus]
cacucuuaccuucc

SEQ ID NO: 1941352 - RNA, 19 nt, Human herpesvirus 4 [Epstein-Barr virus]
uucaggggaaucucugcca

SEQ ID NO: 1941353 - RNA, 15 nt, Human herpesvirus 4 [Epstein-Barr virus]
cuuucuaccaggggc

SEQ ID NO: 1941354 - RNA, 19 nt, Human herpesvirus 4 [Epstein-Barr virus]
cgaucuggacccuauggag

SEQ ID NO: 1941355 - RNA, 14 nt, Human herpesvirus 4 [Epstein-Barr virus]
gcagggugcacaga

SEQ ID NO: 1941356 - RNA, 12 nt, Human herpesvirus 4 [Epstein-Barr virus]
ggcggcccagcc

SEQ ID NO: 1941357 - RNA, 21 nt, Human herpesvirus 4 [Epstein-Barr virus]
ugcugcagguaaaccuucugu

SEQ ID NO: 1941358 - RNA, 23 nt, Human herpesvirus 4 [Epstein-Barr virus]
augugccucgguggccugcucac

SEQ ID NO: 1941359 - RNA, 14 nt, Human herpesvirus 4 [Epstein-Barr virus]
cugacgaggggcca

SEQ ID NO: 1941360 - RNA, 16 nt, Human herpesvirus 4 [Epstein-Barr virus]
agaugucaaacauggu

SEQ ID NO: 1941361 - RNA, 14 nt, Human herpesvirus 4 [Epstein-Barr virus]
aggcguccgccccg

SEQ ID NO: 1941362 - RNA, 19 nt, Human herpesvirus 4 [Epstein-Barr virus]
ucccacugggacggggugg

SEQ ID NO: 1941363 - RNA, 15 nt, Human herpesvirus 4 [Epstein-Barr virus]
cgccugagcugccug

SEQ ID NO: 1941364 - RNA, 14 nt, Human herpesvirus 4 [Epstein-Barr virus]
gcucucaggccuca

SEQ ID NO: 1941365 - RNA, 23 nt, Human herpesvirus 4 [Epstein-Barr virus]
uccagcgcucuggucgcccccuc

SEQ ID NO: 1941366 - RNA, 12 nt, Human herpesvirus 4 [Epstein-Barr virus]
cuucaccaccac

SEQ ID NO: 1941367 - RNA, 19 nt, Human herpesvirus 4 [Epstein-Barr virus]
agcgggaggggcaggagca

SEQ ID NO: 1941368 - RNA, 14 nt, Human herpesvirus 4 [Epstein-Barr virus]
gacaguaccacaag

SEQ ID NO: 1941369 - RNA, 17 nt, Human herpesvirus 4 [Epstein-Barr virus]
accuuccuguguucucc

SEQ ID NO: 1941370 - RNA, 15 nt, Human herpesvirus 4 [Epstein-Barr virus]
gcaccugucccuggg

SEQ ID NO: 1941371 - RNA, 18 nt, Human herpesvirus 4 [Epstein-Barr virus]
agguguuguguccuguau

SEQ ID NO: 1941372 - RNA, 22 nt, Human herpesvirus 4 [Epstein-Barr virus]
cucauggaggggcggcagcgga

SEQ ID NO: 1941373 - RNA, 17 nt, Human herpesvirus 4 [Epstein-Barr virus]
gguguagugggugggca

SEQ ID NO: 1941374 - RNA, 21 nt, Human herpesvirus 4 [Epstein-Barr virus]
acucuccgcuuuaagaccaag

SEQ ID NO: 1941375 - RNA, 15 nt, Human herpesvirus 4 [Epstein-Barr virus]
gcaccaccgcagcca

SEQ ID NO: 1941376 - RNA, 23 nt, Human herpesvirus 4 [Epstein-Barr virus]
cacggggccgugcaccugccauc

SEQ ID NO: 1941377 - RNA, 16 nt, Human herpesvirus 4 [Epstein-Barr virus]
cacgggccuggggcca

SEQ ID NO: 1941378 - RNA, 16 nt, Human herpesvirus 4 [Epstein-Barr virus]
gccaucaccucuugau

SEQ ID NO: 1941379 - RNA, 22 nt, Human herpesvirus 4 [Epstein-Barr virus]
gcguccucuaccuggucaagag

SEQ ID NO: 1941380 - RNA, 17 nt, Human herpesvirus 4 [Epstein-Barr virus]
aucaacuucagcuccag

SEQ ID NO: 1941381 - RNA, 17 nt, Human herpesvirus 4 [Epstein-Barr virus]
gacggugggcaugacac

SEQ ID NO: 1941382 - RNA, 17 nt, Human herpesvirus 4 [Epstein-Barr virus]
agccggcggccucggag

SEQ ID NO: 1941383 - RNA, 18 nt, Human herpesvirus 4 [Epstein-Barr virus]
cccagcagauccagggcc

SEQ ID NO: 1941384 - RNA, 15 nt, Human herpesvirus 4 [Epstein-Barr virus]
cauucccccaugaga

SEQ ID NO: 1941385 - RNA, 18 nt, Human herpesvirus 4 [Epstein-Barr virus]
aauggccguccucuggac

SEQ ID NO: 1941386 - RNA, 13 nt, Human herpesvirus 4 [Epstein-Barr virus]
uggaucuggggcu

SEQ ID NO: 1941387 - RNA, 19 nt, Human herpesvirus 4 [Epstein-Barr virus]
gggcacgagauggcccagu

SEQ ID NO: 1941388 - RNA, 14 nt, Human herpesvirus 4 [Epstein-Barr virus]
uuucuaugccugaa

SEQ ID NO: 1941389 - RNA, 19 nt, Human herpesvirus 4 [Epstein-Barr virus]
ccaccggcuuggcccucuc

SEQ ID NO: 1941390 - RNA, 17 nt, Human herpesvirus 4 [Epstein-Barr virus]
guagaggcucaggccau

SEQ ID NO: 1941391 - RNA, 15 nt, Human herpesvirus 4 [Epstein-Barr virus]
ucgugaguccagggc

SEQ ID NO: 1941392 - RNA, 24 nt, Human herpesvirus 4 [Epstein-Barr virus]
gguuggcaugguauuggucgucuu

SEQ ID NO: 1941393 - RNA, 23 nt, Human herpesvirus 4 [Epstein-Barr virus]
cggcuguggccucuacgccaggc

SEQ ID NO: 1941394 - RNA, 18 nt, Human herpesvirus 4 [Epstein-Barr virus]
uccccccagaagccccca

SEQ ID NO: 1941395 - RNA, 21 nt, Human herpesvirus 4 [Epstein-Barr virus]
gaugcugccgcuacugcugcu

SEQ ID NO: 1941396 - RNA, 22 nt, Human herpesvirus 4 [Epstein-Barr virus]
cgggucaggucgcggaccaggg

SEQ ID NO: 1941397 - RNA, 16 nt, Human herpesvirus 4 [Epstein-Barr virus]
ggugccggggcccacg

SEQ ID NO: 1941398 - RNA, 18 nt, Human herpesvirus 4 [Epstein-Barr virus]
cuacaccccugagaaccc

SEQ ID NO: 1941399 - RNA, 23 nt, Human herpesvirus 4 [Epstein-Barr virus]
ccaucaccuggguacccaaacca

SEQ ID NO: 1941400 - RNA, 23 nt, Human herpesvirus 4 [Epstein-Barr virus]
caguugacggacgugcccagcuc

SEQ ID NO: 1941401 - RNA, 15 nt, Human herpesvirus 4 [Epstein-Barr virus]
caccgcagccacguc

SEQ ID NO: 1941402 - RNA, 19 nt, Human herpesvirus 4 [Epstein-Barr virus]
gagcagagguugggccacg

SEQ ID NO: 1941403 - RNA, 20 nt, Human herpesvirus 4 [Epstein-Barr virus]
uccagcccuugcgccgccuc

SEQ ID NO: 1941404 - RNA, 21 nt, Human herpesvirus 4 [Epstein-Barr virus]
uuaucagagaggccucugggg

SEQ ID NO: 1941405 - RNA, 22 nt, Human herpesvirus 4 [Epstein-Barr virus]
cacggagcagggcaacauugca

SEQ ID NO: 1941406 - RNA, 14 nt, Human herpesvirus 4 [Epstein-Barr virus]
cgggaggggcagga

SEQ ID NO: 1941407 - RNA, 19 nt, Human herpesvirus 4 [Epstein-Barr virus]
aacucccccaaacaugucc

SEQ ID NO: 1941408 - RNA, 16 nt, Human herpesvirus 4 [Epstein-Barr virus]
accucauccugcucau

SEQ ID NO: 1941409 - RNA, 14 nt, Human herpesvirus 4 [Epstein-Barr virus]
uucugucucggccu

SEQ ID NO: 1941410 - RNA, 16 nt, Human herpesvirus 4 [Epstein-Barr virus]
caagguugaagagcag

SEQ ID NO: 1941411 - RNA, 14 nt, Human herpesvirus 4 [Epstein-Barr virus]
cugccacaaggcca

SEQ ID NO: 1941412 - RNA, 13 nt, Human herpesvirus 4 [Epstein-Barr virus]
uccgcugggccag

SEQ ID NO: 1941413 - RNA, 16 nt, Human herpesvirus 4 [Epstein-Barr virus]
gagcgcacgugacaga

SEQ ID NO: 1941414 - RNA, 17 nt, Human herpesvirus 4 [Epstein-Barr virus]
ggagccagcgcuggggg

SEQ ID NO: 1941415 - RNA, 17 nt, Human herpesvirus 4 [Epstein-Barr virus]
uuugccuugugugcugu

SEQ ID NO: 1941416 - RNA, 19 nt, Human herpesvirus 4 [Epstein-Barr virus]
agccaccccagacaggaga

SEQ ID NO: 1941417 - RNA, 14 nt, Human herpesvirus 4 [Epstein-Barr virus]
ccuggaucugagcu

SEQ ID NO: 1941418 - RNA, 19 nt, Human herpesvirus 4 [Epstein-Barr virus]
cucagaauuucugcuagcu

SEQ ID NO: 1941419 - RNA, 19 nt, Human herpesvirus 4 [Epstein-Barr virus]
cucccgggcaaacagggca

SEQ ID NO: 1941420 - RNA, 12 nt, Human herpesvirus 4 [Epstein-Barr virus]
aguggcggugga

SEQ ID NO: 1941421 - RNA, 22 nt, Human herpesvirus 4 [Epstein-Barr virus]
gcaggccccccgcaccagggcc

SEQ ID NO: 1941422 - RNA, 16 nt, Human herpesvirus 4 [Epstein-Barr virus]
agcgucaggagagggc

SEQ ID NO: 1941423 - RNA, 23 nt, Human herpesvirus 4 [Epstein-Barr virus]
caacgcauccaccaucaauguca

SEQ ID NO: 1941424 - RNA, 15 nt, Human herpesvirus 4 [Epstein-Barr virus]
cgaagcgagacagua

SEQ ID NO: 1941425 - RNA, 15 nt, Human herpesvirus 4 [Epstein-Barr virus]
uccuaggagaaggag

SEQ ID NO: 1941426 - RNA, 19 nt, Human herpesvirus 4 [Epstein-Barr virus]
aaguugaugauauugaauu

SEQ ID NO: 1941427 - RNA, 22 nt, Human herpesvirus 4 [Epstein-Barr virus]
ucgucguucaggaacagccucc

SEQ ID NO: 1941428 - RNA, 20 nt, Human herpesvirus 4 [Epstein-Barr virus]
agaugagauagaggaccgga

SEQ ID NO: 1941429 - RNA, 18 nt, Human herpesvirus 4 [Epstein-Barr virus]
ugguccaggguccaggag

SEQ ID NO: 1941430 - RNA, 16 nt, Human herpesvirus 4 [Epstein-Barr virus]
auuggcagcagcucug

SEQ ID NO: 1941431 - RNA, 17 nt, Human herpesvirus 4 [Epstein-Barr virus]
uguguuccuaaaaaaug

SEQ ID NO: 1941432 - RNA, 15 nt, Human herpesvirus 4 [Epstein-Barr virus]
aaaucugacacuuua

SEQ ID NO: 1941433 - RNA, 19 nt, Human herpesvirus 4 [Epstein-Barr virus]
gugguuauuuugggccagg

SEQ ID NO: 1941434 - RNA, 17 nt, Human herpesvirus 4 [Epstein-Barr virus]
acagguacuaacacgca

SEQ ID NO: 1941435 - RNA, 17 nt, Human herpesvirus 4 [Epstein-Barr virus]
ccaaacuuuguccagau

SEQ ID NO: 1941436 - RNA, 13 nt, Human herpesvirus 4 [Epstein-Barr virus]
gcgccaccugcag

SEQ ID NO: 1941437 - RNA, 22 nt, Human herpesvirus 4 [Epstein-Barr virus]
ccccaaaaguagaggcucaggc

SEQ ID NO: 1941438 - RNA, 22 nt, Human herpesvirus 4 [Epstein-Barr virus]
acgcauccaccaucaaugucac

SEQ ID NO: 1941439 - RNA, 20 nt, Human herpesvirus 4 [Epstein-Barr virus]
uccucauuucaguggcccuc

SEQ ID NO: 1941440 - RNA, 16 nt, Human herpesvirus 4 [Epstein-Barr virus]
gccaugaccagcagca

SEQ ID NO: 1941441 - RNA, 15 nt, Human herpesvirus 4 [Epstein-Barr virus]
ggggcugguggccug

SEQ ID NO: 1941442 - RNA, 17 nt, Human herpesvirus 4 [Epstein-Barr virus]
agccacuacggccacgu

SEQ ID NO: 1941443 - RNA, 17 nt, Human herpesvirus 4 [Epstein-Barr virus]
cucagguuucugggcau

SEQ ID NO: 1941444 - RNA, 17 nt, Human herpesvirus 4 [Epstein-Barr virus]
cagcugaguccccuccu

SEQ ID NO: 1941445 - RNA, 20 nt, Human herpesvirus 4 [Epstein-Barr virus]
auuuggacaucuaguggcag

SEQ ID NO: 1941446 - RNA, 15 nt, Human herpesvirus 4 [Epstein-Barr virus]
cugaccaucacaugg

SEQ ID NO: 1941447 - RNA, 14 nt, Human herpesvirus 4 [Epstein-Barr virus]
gcucuuggucaagg

SEQ ID NO: 1941448 - RNA, 14 nt, Human herpesvirus 4 [Epstein-Barr virus]
ucugauuauagcuc

SEQ ID NO: 1941449 - RNA, 13 nt, Human herpesvirus 4 [Epstein-Barr virus]
auccgccaggacc

SEQ ID NO: 1941450 - RNA, 20 nt, Human herpesvirus 4 [Epstein-Barr virus]
ccagcuaacaggacauguuu

SEQ ID NO: 1941451 - RNA, 12 nt, Human herpesvirus 4 [Epstein-Barr virus]
gauccgccagga

SEQ ID NO: 1941452 - RNA, 14 nt, Human herpesvirus 4 [Epstein-Barr virus]
caagcugacagaag

SEQ ID NO: 1941453 - RNA, 15 nt, Human herpesvirus 4 [Epstein-Barr virus]
uggggcaauggcgac

SEQ ID NO: 1941454 - RNA, 16 nt, Human herpesvirus 4 [Epstein-Barr virus]
cuuccagagaggcgca

SEQ ID NO: 1941455 - RNA, 11 nt, Human herpesvirus 4 [Epstein-Barr virus]
caguauuuugc

SEQ ID NO: 1941456 - RNA, 23 nt, Human herpesvirus 4 [Epstein-Barr virus]
cccaaacucgacuucugaagaug

SEQ ID NO: 1941457 - RNA, 13 nt, Human herpesvirus 4 [Epstein-Barr virus]
cgcauccuaggca

SEQ ID NO: 1941458 - RNA, 18 nt, Human herpesvirus 4 [Epstein-Barr virus]
agggccacggcgugccag

SEQ ID NO: 1941459 - RNA, 15 nt, Human herpesvirus 4 [Epstein-Barr virus]
aacuuugagcugggc

SEQ ID NO: 1941460 - RNA, 14 nt, Human herpesvirus 4 [Epstein-Barr virus]
uggggcugagacca

SEQ ID NO: 1941461 - RNA, 14 nt, Human herpesvirus 4 [Epstein-Barr virus]
gcaaagggacccac

SEQ ID NO: 1941462 - RNA, 22 nt, Human herpesvirus 4 [Epstein-Barr virus]
gcccuuuuaacauuggcagcag

SEQ ID NO: 1941463 - RNA, 17 nt, Human herpesvirus 4 [Epstein-Barr virus]
cagcaacgcccagggac

SEQ ID NO: 1941464 - RNA, 16 nt, Human herpesvirus 4 [Epstein-Barr virus]
cgcuuacagccagaga

SEQ ID NO: 1941465 - RNA, 14 nt, Human herpesvirus 4 [Epstein-Barr virus]
aacacgaaugccca

SEQ ID NO: 1941466 - RNA, 19 nt, Human herpesvirus 4 [Epstein-Barr virus]
acacgcuuuugucugccug

SEQ ID NO: 1941467 - RNA, 16 nt, Human herpesvirus 4 [Epstein-Barr virus]
cccucccgcacccuca

SEQ ID NO: 1941468 - RNA, 22 nt, Human herpesvirus 4 [Epstein-Barr virus]
ucugcgccagccccgcccuccc

SEQ ID NO: 1941469 - RNA, 17 nt, Human herpesvirus 4 [Epstein-Barr virus]
uggccagguacgggcug

SEQ ID NO: 1941470 - RNA, 21 nt, Human herpesvirus 4 [Epstein-Barr virus]
gagcagaaggccauggagaac

SEQ ID NO: 1941471 - RNA, 15 nt, Human herpesvirus 4 [Epstein-Barr virus]
ucccgugcuuuuugc

SEQ ID NO: 1941472 - RNA, 13 nt, Human herpesvirus 4 [Epstein-Barr virus]
gaaaccccacgga

SEQ ID NO: 1941473 - RNA, 19 nt, Human herpesvirus 4 [Epstein-Barr virus]
ucugaccgacgggcaucuu

SEQ ID NO: 1941474 - RNA, 20 nt, Human herpesvirus 4 [Epstein-Barr virus]
gcagugguguuugcuugccc

SEQ ID NO: 1941475 - RNA, 19 nt, Human herpesvirus 4 [Epstein-Barr virus]
gccacugcaggcuggacgu

SEQ ID NO: 1941476 - RNA, 16 nt, Human herpesvirus 4 [Epstein-Barr virus]
gcugaccggcucggcc

SEQ ID NO: 1941477 - RNA, 23 nt, Human herpesvirus 4 [Epstein-Barr virus]
caaggucuggaggacggucuggc

SEQ ID NO: 1941478 - RNA, 21 nt, Human herpesvirus 4 [Epstein-Barr virus]
caccuugaggugccacagagc

SEQ ID NO: 1941479 - RNA, 14 nt, Human herpesvirus 4 [Epstein-Barr virus]
uccaaggcccaaca

SEQ ID NO: 1941480 - RNA, 19 nt, Human herpesvirus 4 [Epstein-Barr virus]
uagacagaaauugggugac

SEQ ID NO: 1941481 - RNA, 20 nt, Human herpesvirus 4 [Epstein-Barr virus]
gcuucaaguuaccuucuuuc

SEQ ID NO: 1941482 - RNA, 16 nt, Human herpesvirus 4 [Epstein-Barr virus]
cauuccuaggagaagg

SEQ ID NO: 1941483 - RNA, 12 nt, Human herpesvirus 4 [Epstein-Barr virus]
ggugaggcccag

SEQ ID NO: 1941484 - RNA, 20 nt, Human herpesvirus 4 [Epstein-Barr virus]
ugggagcaaccagcugguca

SEQ ID NO: 1941485 - RNA, 14 nt, Human herpesvirus 4 [Epstein-Barr virus]
cacgucgucagaga

SEQ ID NO: 1941486 - RNA, 22 nt, Human herpesvirus 4 [Epstein-Barr virus]
cgcccuaccucuuuuggcuggc

SEQ ID NO: 1941487 - RNA, 15 nt, Human herpesvirus 4 [Epstein-Barr virus]
ugaugacgccgagac

SEQ ID NO: 1941488 - RNA, 16 nt, Human herpesvirus 4 [Epstein-Barr virus]
cgggggugggcgguga

SEQ ID NO: 1941489 - RNA, 17 nt, Human herpesvirus 4 [Epstein-Barr virus]
uguggccggugcugcca

SEQ ID NO: 1941490 - RNA, 14 nt, Human herpesvirus 4 [Epstein-Barr virus]
caccucgggcucaa

SEQ ID NO: 1941491 - RNA, 23 nt, Human herpesvirus 4 [Epstein-Barr virus]
auuaaaggccaauuggcacucac

SEQ ID NO: 1941492 - RNA, 15 nt, Human herpesvirus 4 [Epstein-Barr virus]
ccaugcgcgcccugu

SEQ ID NO: 1941493 - RNA, 22 nt, Human herpesvirus 4 [Epstein-Barr virus]
gaugcugcagagguucagggac

SEQ ID NO: 1941494 - RNA, 17 nt, Human herpesvirus 4 [Epstein-Barr virus]
ggccacaaagagggggc

SEQ ID NO: 1941495 - RNA, 21 nt, Human herpesvirus 4 [Epstein-Barr virus]
gaccauggaugugaaugcccc

SEQ ID NO: 1941496 - RNA, 18 nt, Human herpesvirus 4 [Epstein-Barr virus]
uacaacucagccccaucu

SEQ ID NO: 1941497 - RNA, 12 nt, Human herpesvirus 4 [Epstein-Barr virus]
uggggggggugg

SEQ ID NO: 1941498 - RNA, 17 nt, Human herpesvirus 4 [Epstein-Barr virus]
aggcccagcccccuccc

SEQ ID NO: 1941499 - RNA, 16 nt, Human herpesvirus 4 [Epstein-Barr virus]
aucugagggcagugau

SEQ ID NO: 1941500 - RNA, 21 nt, Human herpesvirus 4 [Epstein-Barr virus]
guauugcgcuggccgagccug

SEQ ID NO: 1941501 - RNA, 13 nt, Human herpesvirus 4 [Epstein-Barr virus]
gaagacgaggaga

SEQ ID NO: 1941502 - RNA, 17 nt, Human herpesvirus 4 [Epstein-Barr virus]
gaccugugugcuguauu

SEQ ID NO: 1941503 - RNA, 22 nt, Human herpesvirus 4 [Epstein-Barr virus]
gaaucuccugugcuucagcagu

SEQ ID NO: 1941504 - RNA, 17 nt, Human herpesvirus 4 [Epstein-Barr virus]
augcauccgcaccacag

SEQ ID NO: 1941505 - RNA, 17 nt, Human herpesvirus 4 [Epstein-Barr virus]
cgagcuccgugggccca

SEQ ID NO: 1941506 - RNA, 19 nt, Human herpesvirus 4 [Epstein-Barr virus]
ggcugcgccugagcugccu

SEQ ID NO: 1941507 - RNA, 23 nt, Human herpesvirus 4 [Epstein-Barr virus]
ucugcuggacuccgaggaccagg

SEQ ID NO: 1941508 - RNA, 11 nt, Human herpesvirus 4 [Epstein-Barr virus]
gguauuccuca

SEQ ID NO: 1941509 - RNA, 23 nt, Human herpesvirus 4 [Epstein-Barr virus]
guuggagagauucgagaggauga

SEQ ID NO: 1941510 - RNA, 13 nt, Human herpesvirus 4 [Epstein-Barr virus]
cuuucuccuucaa

SEQ ID NO: 1941511 - RNA, 14 nt, Human herpesvirus 4 [Epstein-Barr virus]
gacccugguacagg

SEQ ID NO: 1941512 - RNA, 16 nt, Human herpesvirus 4 [Epstein-Barr virus]
cagguggcugcugcca

SEQ ID NO: 1941513 - RNA, 20 nt, Human herpesvirus 4 [Epstein-Barr virus]
auaccuauagauccugggcc

SEQ ID NO: 1941514 - RNA, 15 nt, Human herpesvirus 4 [Epstein-Barr virus]
caaccaagccacuac

SEQ ID NO: 1941515 - RNA, 16 nt, Human herpesvirus 4 [Epstein-Barr virus]
gucauggcggacugcg

SEQ ID NO: 1941516 - RNA, 16 nt, Human herpesvirus 4 [Epstein-Barr virus]
gcauccuaggcacggc

SEQ ID NO: 1941517 - RNA, 16 nt, Human herpesvirus 4 [Epstein-Barr virus]
auggauuacuggucuu

SEQ ID NO: 1941518 - RNA, 20 nt, Human herpesvirus 4 [Epstein-Barr virus]
ugcuggucauggcggacugc

SEQ ID NO: 1941519 - RNA, 21 nt, Human herpesvirus 4 [Epstein-Barr virus]
ugugcugaagcccaagaagaa

SEQ ID NO: 1941520 - RNA, 15 nt, Human herpesvirus 4 [Epstein-Barr virus]
ccaucagcucgccca

SEQ ID NO: 1941521 - RNA, 19 nt, Human herpesvirus 4 [Epstein-Barr virus]
gcgucaggagagggccaga

SEQ ID NO: 1941522 - RNA, 18 nt, Human herpesvirus 4 [Epstein-Barr virus]
aucccugucucccaccca

SEQ ID NO: 1941523 - RNA, 16 nt, Human herpesvirus 4 [Epstein-Barr virus]
cacuuuguacagacuu

SEQ ID NO: 1941524 - RNA, 18 nt, Human herpesvirus 4 [Epstein-Barr virus]
cacuugugguucuccuga

SEQ ID NO: 1941525 - RNA, 21 nt, Human herpesvirus 4 [Epstein-Barr virus]
cuaccucuguuccuucugcuc

SEQ ID NO: 1941526 - RNA, 19 nt, Human herpesvirus 4 [Epstein-Barr virus]
ccucucuggcugugcugac

SEQ ID NO: 1941527 - RNA, 15 nt, Human herpesvirus 4 [Epstein-Barr virus]
ucucccucagagucu

SEQ ID NO: 1941528 - RNA, 22 nt, Human herpesvirus 4 [Epstein-Barr virus]
cuggacgcgcagugccaagagc

SEQ ID NO: 1941529 - RNA, 21 nt, Human herpesvirus 4 [Epstein-Barr virus]
agucugacuacucagaugaag

SEQ ID NO: 1941530 - RNA, 15 nt, Human herpesvirus 4 [Epstein-Barr virus]
gucaaguaccagcug

SEQ ID NO: 1941531 - RNA, 16 nt, Human herpesvirus 4 [Epstein-Barr virus]
auaccgagauguacau

SEQ ID NO: 1941532 - RNA, 15 nt, Human herpesvirus 4 [Epstein-Barr virus]
cccaagccuggaugu

SEQ ID NO: 1941533 - RNA, 12 nt, Human herpesvirus 4 [Epstein-Barr virus]
auuccacccacu

SEQ ID NO: 1941534 - RNA, 18 nt, Human herpesvirus 4 [Epstein-Barr virus]
ggcaggcuacaacaggcu

SEQ ID NO: 1941535 - RNA, 17 nt, Human herpesvirus 4 [Epstein-Barr virus]
uggcacgacuguuccua

SEQ ID NO: 1941536 - RNA, 20 nt, Human herpesvirus 4 [Epstein-Barr virus]
gcucaaggcagucuccaccu

SEQ ID NO: 1941537 - RNA, 19 nt, Human herpesvirus 4 [Epstein-Barr virus]
caaggugucaauaauuuca

SEQ ID NO: 1941538 - RNA, 18 nt, Human herpesvirus 4 [Epstein-Barr virus]
aauucuugcacccacccc

SEQ ID NO: 1941539 - RNA, 19 nt, Human herpesvirus 4 [Epstein-Barr virus]
gcccagaggaggccccggc

SEQ ID NO: 1941540 - RNA, 22 nt, Human herpesvirus 4 [Epstein-Barr virus]
ugcuggagauuuucccacugug

SEQ ID NO: 1941541 - RNA, 21 nt, Human herpesvirus 4 [Epstein-Barr virus]
gaaccugagccugagccacac

SEQ ID NO: 1941542 - RNA, 21 nt, Human herpesvirus 4 [Epstein-Barr virus]
gcuugaggccagagacgagcu

SEQ ID NO: 1941543 - RNA, 23 nt, Human herpesvirus 4 [Epstein-Barr virus]
acauuaaccucaaccacaaaaug

SEQ ID NO: 1941544 - RNA, 19 nt, Human herpesvirus 4 [Epstein-Barr virus]
aucuguugacgguguaacu

SEQ ID NO: 1941545 - RNA, 23 nt, Human herpesvirus 4 [Epstein-Barr virus]
gagguaaugauuacgcaggccac

SEQ ID NO: 1941546 - RNA, 15 nt, Human herpesvirus 4 [Epstein-Barr virus]
aguuggucaggcuga

SEQ ID NO: 1941547 - RNA, 14 nt, Human herpesvirus 4 [Epstein-Barr virus]
uggcagcagcucug

SEQ ID NO: 1941548 - RNA, 15 nt, Human herpesvirus 4 [Epstein-Barr virus]
acggaaaucugcucu

SEQ ID NO: 1941549 - RNA, 13 nt, Human herpesvirus 4 [Epstein-Barr virus]
caccuggccaggg

SEQ ID NO: 1941550 - RNA, 19 nt, Human herpesvirus 4 [Epstein-Barr virus]
cacuugggcacggagagug

SEQ ID NO: 1941551 - RNA, 15 nt, Human herpesvirus 4 [Epstein-Barr virus]
aggggguacggagag

SEQ ID NO: 1941552 - RNA, 17 nt, Human herpesvirus 4 [Epstein-Barr virus]
auggccguccucuggac

SEQ ID NO: 1941553 - RNA, 22 nt, Human herpesvirus 4 [Epstein-Barr virus]
uggccuccagcucggccagcag

SEQ ID NO: 1941554 - RNA, 23 nt, Human herpesvirus 4 [Epstein-Barr virus]
gaagacccaucugagggcaguga

SEQ ID NO: 1941555 - RNA, 20 nt, Human herpesvirus 4 [Epstein-Barr virus]
cagcagggcacagaggugau

SEQ ID NO: 1941556 - RNA, 12 nt, Human herpesvirus 4 [Epstein-Barr virus]
ggugggcugcug

SEQ ID NO: 1941557 - RNA, 13 nt, Human herpesvirus 4 [Epstein-Barr virus]
auuguacagagcu

SEQ ID NO: 1941558 - RNA, 14 nt, Human herpesvirus 4 [Epstein-Barr virus]
ugucuuccacacca

SEQ ID NO: 1941559 - RNA, 24 nt, Human herpesvirus 4 [Epstein-Barr virus]
gcaaccagcacgucgucagagagg

SEQ ID NO: 1941560 - RNA, 22 nt, Human herpesvirus 4 [Epstein-Barr virus]
gcagcugugugcgcgccgccag

SEQ ID NO: 1941561 - RNA, 15 nt, Human herpesvirus 4 [Epstein-Barr virus]
aucaucgggaaaggc

SEQ ID NO: 1941562 - RNA, 15 nt, Human herpesvirus 4 [Epstein-Barr virus]
acacagcucuggcag

SEQ ID NO: 1941563 - RNA, 20 nt, Human herpesvirus 4 [Epstein-Barr virus]
cagcuggacgcgcagugcca

SEQ ID NO: 1941564 - RNA, 19 nt, Human herpesvirus 4 [Epstein-Barr virus]
gccacggcgucaaacaggu

SEQ ID NO: 1941565 - RNA, 17 nt, Human herpesvirus 4 [Epstein-Barr virus]
ugccugccucugcucug

SEQ ID NO: 1941566 - RNA, 19 nt, Human herpesvirus 4 [Epstein-Barr virus]
ugccuccggccgccccggg

SEQ ID NO: 1941567 - RNA, 23 nt, Human herpesvirus 4 [Epstein-Barr virus]
cuauuggguuaacggguggaagc

SEQ ID NO: 1941568 - RNA, 20 nt, Human herpesvirus 4 [Epstein-Barr virus]
ccccacaaacaccagugucc

SEQ ID NO: 1941569 - RNA, 18 nt, Human herpesvirus 4 [Epstein-Barr virus]
uagguguccagcgcucug

SEQ ID NO: 1941570 - RNA, 22 nt, Human herpesvirus 4 [Epstein-Barr virus]
caaacugacacacaggccuggc

SEQ ID NO: 1941571 - RNA, 11 nt, Human herpesvirus 4 [Epstein-Barr virus]
gaccacccgga

SEQ ID NO: 1941572 - RNA, 20 nt, Human herpesvirus 4 [Epstein-Barr virus]
cccggcuggccgccguggcc

SEQ ID NO: 1941573 - RNA, 17 nt, Human herpesvirus 4 [Epstein-Barr virus]
gagcuuccuggccggcc

SEQ ID NO: 1941574 - RNA, 16 nt, Human herpesvirus 4 [Epstein-Barr virus]
cuacucuuggcagcag

SEQ ID NO: 1941575 - RNA, 19 nt, Human herpesvirus 4 [Epstein-Barr virus]
gccagucuccgggucaggu

SEQ ID NO: 1941576 - RNA, 17 nt, Human herpesvirus 4 [Epstein-Barr virus]
acuccuggcauacuuuu

SEQ ID NO: 1941577 - RNA, 21 nt, Human herpesvirus 4 [Epstein-Barr virus]
cucgccgcuaguugguccagg

SEQ ID NO: 1941578 - RNA, 15 nt, Human herpesvirus 4 [Epstein-Barr virus]
cgcuguaacgugucg

SEQ ID NO: 1941579 - RNA, 18 nt, Human herpesvirus 4 [Epstein-Barr virus]
agcccccuccuccagguc

SEQ ID NO: 1941580 - RNA, 20 nt, Human herpesvirus 4 [Epstein-Barr virus]
cugcucggggcaugcugccc

SEQ ID NO: 1941581 - RNA, 12 nt, Human herpesvirus 4 [Epstein-Barr virus]
uaaacaagcuga

SEQ ID NO: 1941582 - RNA, 12 nt, Human herpesvirus 4 [Epstein-Barr virus]
uguccucccggg

SEQ ID NO: 1941583 - RNA, 16 nt, Human herpesvirus 4 [Epstein-Barr virus]
cugccccguugcaccg

SEQ ID NO: 1941584 - RNA, 14 nt, Human herpesvirus 4 [Epstein-Barr virus]
ucggcaccuccucg

SEQ ID NO: 1941585 - RNA, 14 nt, Human herpesvirus 4 [Epstein-Barr virus]
auugccuucuguua

SEQ ID NO: 1941586 - RNA, 12 nt, Human herpesvirus 4 [Epstein-Barr virus]
gugcucuucaug

SEQ ID NO: 1941587 - RNA, 14 nt, Human herpesvirus 4 [Epstein-Barr virus]
ugugcgcccugcuc

SEQ ID NO: 1941588 - RNA, 21 nt, Human herpesvirus 4 [Epstein-Barr virus]
gcagcugaggggcaaccugaa

SEQ ID NO: 1941589 - RNA, 23 nt, Human herpesvirus 4 [Epstein-Barr virus]
ucagaccucugcacaacacaacu

SEQ ID NO: 1941590 - RNA, 15 nt, Human herpesvirus 4 [Epstein-Barr virus]
cgguggccugcucac

SEQ ID NO: 1941591 - RNA, 16 nt, Human herpesvirus 4 [Epstein-Barr virus]
guggaacagaugcugu

SEQ ID NO: 1941592 - RNA, 15 nt, Human herpesvirus 4 [Epstein-Barr virus]
uggggccauaguggc

SEQ ID NO: 1941593 - RNA, 15 nt, Human herpesvirus 4 [Epstein-Barr virus]
agguaaucucuggua

SEQ ID NO: 1941594 - RNA, 22 nt, Human herpesvirus 4 [Epstein-Barr virus]
gccagcgccuccucgcaggccc

SEQ ID NO: 1941595 - RNA, 14 nt, Human herpesvirus 4 [Epstein-Barr virus]
caccguggccaggc

SEQ ID NO: 1941596 - RNA, 23 nt, Human herpesvirus 4 [Epstein-Barr virus]
gccgguuuugcagucgcugcugc

SEQ ID NO: 1941597 - RNA, 11 nt, Human herpesvirus 4 [Epstein-Barr virus]
aaaauaugcaa

SEQ ID NO: 1941598 - RNA, 12 nt, Human herpesvirus 4 [Epstein-Barr virus]
aagcugaagaac

SEQ ID NO: 1941599 - RNA, 19 nt, Human herpesvirus 4 [Epstein-Barr virus]
caagcuuuugaccaagcua

SEQ ID NO: 1941600 - RNA, 20 nt, Human herpesvirus 4 [Epstein-Barr virus]
uggcagaaucaccagagccc

SEQ ID NO: 1941601 - RNA, 11 nt, Human herpesvirus 4 [Epstein-Barr virus]
ccaaguacaga

SEQ ID NO: 1941602 - RNA, 14 nt, Human herpesvirus 4 [Epstein-Barr virus]
gggaagcucagcag

SEQ ID NO: 1941603 - RNA, 14 nt, Human herpesvirus 4 [Epstein-Barr virus]
gcgccguggccacc

SEQ ID NO: 1941604 - RNA, 14 nt, Human herpesvirus 4 [Epstein-Barr virus]
aaccacugaccugg

SEQ ID NO: 1941605 - RNA, 19 nt, Human herpesvirus 4 [Epstein-Barr virus]
ugucaaggcucugcacagg

SEQ ID NO: 1941606 - RNA, 16 nt, Human herpesvirus 4 [Epstein-Barr virus]
ccuucuccucagccuc

SEQ ID NO: 1941607 - RNA, 16 nt, Human herpesvirus 4 [Epstein-Barr virus]
accccccccaccacca

SEQ ID NO: 1941608 - RNA, 16 nt, Human herpesvirus 4 [Epstein-Barr virus]
auugaggacccaccuu

SEQ ID NO: 1941609 - RNA, 12 nt, Human herpesvirus 4 [Epstein-Barr virus]
ugcaguccuccg

SEQ ID NO: 1941610 - RNA, 15 nt, Human herpesvirus 4 [Epstein-Barr virus]
cagucgcuggcuggu

SEQ ID NO: 1941611 - RNA, 16 nt, Human herpesvirus 4 [Epstein-Barr virus]
guggcagcaggcgcug

SEQ ID NO: 1941612 - RNA, 21 nt, Human herpesvirus 4 [Epstein-Barr virus]
cggccaggcagaggaaggcca

SEQ ID NO: 1941613 - RNA, 19 nt, Human herpesvirus 4 [Epstein-Barr virus]
ccugaugagucacacccca

SEQ ID NO: 1941614 - RNA, 17 nt, Human herpesvirus 4 [Epstein-Barr virus]
acugacucucccuccau

SEQ ID NO: 1941615 - RNA, 13 nt, Human herpesvirus 4 [Epstein-Barr virus]
cugucucccaccc

SEQ ID NO: 1941616 - RNA, 15 nt, Human herpesvirus 4 [Epstein-Barr virus]
cucuccagccacggc

SEQ ID NO: 1941617 - RNA, 12 nt, Human herpesvirus 4 [Epstein-Barr virus]
ugacgguggugg

SEQ ID NO: 1941618 - RNA, 23 nt, Human herpesvirus 4 [Epstein-Barr virus]
aaauccucacgaccugugucugu

SEQ ID NO: 1941619 - RNA, 14 nt, Human herpesvirus 4 [Epstein-Barr virus]
uguuucaagcagcu

SEQ ID NO: 1941620 - RNA, 21 nt, Human herpesvirus 4 [Epstein-Barr virus]
ggcacacauuacggugcugga

SEQ ID NO: 1941621 - RNA, 17 nt, Human herpesvirus 4 [Epstein-Barr virus]
uguggugggacugagau

SEQ ID NO: 1941622 - RNA, 14 nt, Human herpesvirus 4 [Epstein-Barr virus]
uccgucagccaggg

SEQ ID NO: 1941623 - RNA, 11 nt, Human herpesvirus 4 [Epstein-Barr virus]
cucauuucagu

SEQ ID NO: 1941624 - RNA, 13 nt, Human herpesvirus 4 [Epstein-Barr virus]
uacccaucccggc

SEQ ID NO: 1941625 - RNA, 14 nt, Human herpesvirus 4 [Epstein-Barr virus]
gucccggguacaag

SEQ ID NO: 1941626 - RNA, 18 nt, Human herpesvirus 4 [Epstein-Barr virus]
cuuugaugaggcugaaau

SEQ ID NO: 1941627 - RNA, 18 nt, Human herpesvirus 4 [Epstein-Barr virus]
acagcgccagcagggcac

SEQ ID NO: 1941628 - RNA, 20 nt, Human herpesvirus 4 [Epstein-Barr virus]
ugugcugacccuucugcugc

SEQ ID NO: 1941629 - RNA, 11 nt, Human herpesvirus 4 [Epstein-Barr virus]
augccaaagcu

SEQ ID NO: 1941630 - RNA, 17 nt, Human herpesvirus 4 [Epstein-Barr virus]
cgacugccgccgccucc

SEQ ID NO: 1941631 - RNA, 16 nt, Human herpesvirus 4 [Epstein-Barr virus]
uguagccacccguccc

SEQ ID NO: 1941632 - RNA, 17 nt, Human herpesvirus 4 [Epstein-Barr virus]
cacgguuauggcagagc

SEQ ID NO: 1941633 - RNA, 16 nt, Human herpesvirus 4 [Epstein-Barr virus]
agcaacgcccagggac

SEQ ID NO: 1941634 - RNA, 21 nt, Human herpesvirus 4 [Epstein-Barr virus]
gccaaccugcucucucuggag

SEQ ID NO: 1941635 - RNA, 13 nt, Human herpesvirus 4 [Epstein-Barr virus]
ucuucucugcucg

SEQ ID NO: 1941636 - RNA, 20 nt, Human herpesvirus 4 [Epstein-Barr virus]
uggcuugcuccaccagcuuc

SEQ ID NO: 1941637 - RNA, 13 nt, Human herpesvirus 4 [Epstein-Barr virus]
gcgggaggggcag

SEQ ID NO: 1941638 - RNA, 18 nt, Human herpesvirus 4 [Epstein-Barr virus]
cggggaaaagagagcuga

SEQ ID NO: 1941639 - RNA, 16 nt, Human herpesvirus 4 [Epstein-Barr virus]
gcgagcaugaucagga

SEQ ID NO: 1941640 - RNA, 20 nt, Human herpesvirus 4 [Epstein-Barr virus]
agcucgcccacacagcgcca

SEQ ID NO: 1941641 - RNA, 23 nt, Human herpesvirus 4 [Epstein-Barr virus]
gccacgcgucagcaaaccagcuu

SEQ ID NO: 1941642 - RNA, 22 nt, Human herpesvirus 4 [Epstein-Barr virus]
uguaacacuacuuguuucugga

SEQ ID NO: 1941643 - RNA, 17 nt, Human herpesvirus 4 [Epstein-Barr virus]
cgagcagcgcggcagag

SEQ ID NO: 1941644 - RNA, 21 nt, Human herpesvirus 4 [Epstein-Barr virus]
uacccaauuuguucugcaugu

SEQ ID NO: 1941645 - RNA, 18 nt, Human herpesvirus 4 [Epstein-Barr virus]
ggucaagcaaacggccug

SEQ ID NO: 1941646 - RNA, 12 nt, Human herpesvirus 4 [Epstein-Barr virus]
agcgccuccucg

SEQ ID NO: 1941647 - RNA, 22 nt, Human herpesvirus 4 [Epstein-Barr virus]
acggccucgugcaaccaggccc

SEQ ID NO: 1941648 - RNA, 16 nt, Human herpesvirus 4 [Epstein-Barr virus]
uuguuaguuuaaacag

SEQ ID NO: 1941649 - RNA, 19 nt, Human herpesvirus 4 [Epstein-Barr virus]
ccagagcagcccgcacccc

SEQ ID NO: 1941650 - RNA, 14 nt, Human herpesvirus 4 [Epstein-Barr virus]
ggccugagagccgg

SEQ ID NO: 1941651 - RNA, 21 nt, Human herpesvirus 4 [Epstein-Barr virus]
cauaggcuugccugacugacu

SEQ ID NO: 1941652 - RNA, 19 nt, Human herpesvirus 4 [Epstein-Barr virus]
ccgguccccccagaagccc

SEQ ID NO: 1941653 - RNA, 13 nt, Human herpesvirus 4 [Epstein-Barr virus]
gguccgugcggcu

SEQ ID NO: 1941654 - RNA, 13 nt, Human herpesvirus 4 [Epstein-Barr virus]
cgagauggcccag

SEQ ID NO: 1941655 - RNA, 16 nt, Human herpesvirus 4 [Epstein-Barr virus]
gcugacauauguacaa

SEQ ID NO: 1941656 - RNA, 14 nt, Human herpesvirus 4 [Epstein-Barr virus]
gguggaggcugcgc

SEQ ID NO: 1941657 - RNA, 16 nt, Human herpesvirus 4 [Epstein-Barr virus]
gccaggacgcugcugu

SEQ ID NO: 1941658 - RNA, 14 nt, Human herpesvirus 4 [Epstein-Barr virus]
uuccuuuucaucau

SEQ ID NO: 1941659 - RNA, 14 nt, Human herpesvirus 4 [Epstein-Barr virus]
cacccacuacaccc

SEQ ID NO: 1941660 - RNA, 23 nt, Human herpesvirus 4 [Epstein-Barr virus]
caucugcuucuggcucuucuggg

SEQ ID NO: 1941661 - RNA, 19 nt, Human herpesvirus 4 [Epstein-Barr virus]
cgugcuuuuugccaggccu

SEQ ID NO: 1941662 - RNA, 20 nt, Human herpesvirus 4 [Epstein-Barr virus]
ucccggcgcucgucguucag

SEQ ID NO: 1941663 - RNA, 18 nt, Human herpesvirus 4 [Epstein-Barr virus]
ugacuggcagaaaggcug

SEQ ID NO: 1941664 - RNA, 14 nt, Human herpesvirus 4 [Epstein-Barr virus]
cugccuaacggucg

SEQ ID NO: 1941665 - RNA, 15 nt, Human herpesvirus 4 [Epstein-Barr virus]
gggagggacgggccu

SEQ ID NO: 1941666 - RNA, 14 nt, Human herpesvirus 4 [Epstein-Barr virus]
acucuuggcagcag

SEQ ID NO: 1941667 - RNA, 19 nt, Human herpesvirus 4 [Epstein-Barr virus]
cuuuuauuuauugcaucac

SEQ ID NO: 1941668 - RNA, 19 nt, Human herpesvirus 4 [Epstein-Barr virus]
ugccucagauagccggacc

SEQ ID NO: 1941669 - RNA, 24 nt, Human herpesvirus 4 [Epstein-Barr virus]
gaaggcuccggcggcaguggaccu

SEQ ID NO: 1941670 - RNA, 22 nt, Human herpesvirus 4 [Epstein-Barr virus]
agagcugagugcccagggcaga

SEQ ID NO: 1941671 - RNA, 11 nt, Human herpesvirus 4 [Epstein-Barr virus]
agaccaaggcc

SEQ ID NO: 1941672 - RNA, 22 nt, Human herpesvirus 4 [Epstein-Barr virus]
caccugucugacuuggccccug

SEQ ID NO: 1941673 - RNA, 14 nt, Human herpesvirus 4 [Epstein-Barr virus]
caccagcuccaggg

SEQ ID NO: 1941674 - RNA, 22 nt, Human herpesvirus 4 [Epstein-Barr virus]
ugguaguaggcacaucuggacc

SEQ ID NO: 1941675 - RNA, 19 nt, Human herpesvirus 4 [Epstein-Barr virus]
gcaagauccuucuggcacg

SEQ ID NO: 1941676 - RNA, 15 nt, Human herpesvirus 4 [Epstein-Barr virus]
aaacaggagauuggu

SEQ ID NO: 1941677 - RNA, 12 nt, Human herpesvirus 4 [Epstein-Barr virus]
agaccccaaaaa

SEQ ID NO: 1941678 - RNA, 21 nt, Human herpesvirus 4 [Epstein-Barr virus]
ggcucucccaacacaauagaa

SEQ ID NO: 1941679 - RNA, 15 nt, Human herpesvirus 4 [Epstein-Barr virus]
acucgugggaaaaug

SEQ ID NO: 1941680 - RNA, 18 nt, Human herpesvirus 4 [Epstein-Barr virus]
gacuaucaaccacuagga

SEQ ID NO: 1941681 - RNA, 13 nt, Human herpesvirus 4 [Epstein-Barr virus]
acucuucauucuu

SEQ ID NO: 1941682 - RNA, 17 nt, Human herpesvirus 4 [Epstein-Barr virus]
guggcagugauguucug

SEQ ID NO: 1941683 - RNA, 15 nt, Human herpesvirus 4 [Epstein-Barr virus]
cuccuaucacaggga

SEQ ID NO: 1941684 - RNA, 22 nt, Human herpesvirus 4 [Epstein-Barr virus]
caggagcgggaggggcaggagc

SEQ ID NO: 1941685 - RNA, 12 nt, Human herpesvirus 4 [Epstein-Barr virus]
cucccacuguca

SEQ ID NO: 1941686 - RNA, 16 nt, Human herpesvirus 4 [Epstein-Barr virus]
auacucaucugugaga

SEQ ID NO: 1941687 - RNA, 18 nt, Human herpesvirus 4 [Epstein-Barr virus]
gaaggcgcaggggagggg

SEQ ID NO: 1941688 - RNA, 14 nt, Human herpesvirus 4 [Epstein-Barr virus]
ccugccuggaucug

SEQ ID NO: 1941689 - RNA, 12 nt, Human herpesvirus 4 [Epstein-Barr virus]
ggcggugccugu

SEQ ID NO: 1941690 - RNA, 15 nt, Human herpesvirus 4 [Epstein-Barr virus]
ucuccaucagggcca

SEQ ID NO: 1941691 - RNA, 14 nt, Human herpesvirus 4 [Epstein-Barr virus]
aacagucuucaggu

SEQ ID NO: 1941692 - RNA, 17 nt, Human herpesvirus 4 [Epstein-Barr virus]
cuuuaaaggggagaugu

SEQ ID NO: 1941693 - RNA, 16 nt, Human herpesvirus 4 [Epstein-Barr virus]
aggagaauagagggga

SEQ ID NO: 1941694 - RNA, 22 nt, Human herpesvirus 4 [Epstein-Barr virus]
gacucccauguaagccugccuc

SEQ ID NO: 1941695 - RNA, 22 nt, Human herpesvirus 4 [Epstein-Barr virus]
uccacugccccgguccccccag

SEQ ID NO: 1941696 - RNA, 14 nt, Human herpesvirus 4 [Epstein-Barr virus]
agccaccccagaca

SEQ ID NO: 1941697 - RNA, 23 nt, Human herpesvirus 4 [Epstein-Barr virus]
ugcagcaccucagcuguucccag

SEQ ID NO: 1941698 - RNA, 17 nt, Human herpesvirus 4 [Epstein-Barr virus]
ggccaccgacgagcaga

SEQ ID NO: 1941699 - RNA, 17 nt, Human herpesvirus 4 [Epstein-Barr virus]
gcuggggcuggugcuca

SEQ ID NO: 1941700 - RNA, 15 nt, Human herpesvirus 4 [Epstein-Barr virus]
ggccagcaggccggc

SEQ ID NO: 1941701 - RNA, 14 nt, Human herpesvirus 4 [Epstein-Barr virus]
cucaugcgccagag

SEQ ID NO: 1941702 - RNA, 21 nt, Human herpesvirus 4 [Epstein-Barr virus]
agagugccgggcccgggacag

SEQ ID NO: 1941703 - RNA, 21 nt, Human herpesvirus 4 [Epstein-Barr virus]
gugucuggcggccgcugcgcc

SEQ ID NO: 1941704 - RNA, 16 nt, Human herpesvirus 4 [Epstein-Barr virus]
caggacauguuugggg

SEQ ID NO: 1941705 - RNA, 14 nt, Human herpesvirus 4 [Epstein-Barr virus]
ccuggcccacugga

SEQ ID NO: 1941706 - RNA, 20 nt, Human herpesvirus 4 [Epstein-Barr virus]
gagggacaguaccacaagcu

SEQ ID NO: 1941707 - RNA, 19 nt, Human herpesvirus 4 [Epstein-Barr virus]
ggugagaaguugguggugg

SEQ ID NO: 1941708 - RNA, 16 nt, Human herpesvirus 4 [Epstein-Barr virus]
ggugcguggucgggag

SEQ ID NO: 1941709 - RNA, 15 nt, Human herpesvirus 4 [Epstein-Barr virus]
cagcagacaaggaca

SEQ ID NO: 1941710 - RNA, 15 nt, Human herpesvirus 4 [Epstein-Barr virus]
cgacgagcagaggac

SEQ ID NO: 1941711 - RNA, 13 nt, Human herpesvirus 4 [Epstein-Barr virus]
cgccccgggcccg

SEQ ID NO: 1941712 - RNA, 19 nt, Human herpesvirus 4 [Epstein-Barr virus]
guugccgugguugggcaga

SEQ ID NO: 1941713 - RNA, 19 nt, Human herpesvirus 4 [Epstein-Barr virus]
cuguccuugucugcugcca

SEQ ID NO: 1941714 - RNA, 13 nt, Human herpesvirus 4 [Epstein-Barr virus]
gccguccucugga

SEQ ID NO: 1941715 - RNA, 13 nt, Human herpesvirus 4 [Epstein-Barr virus]
cccuucugcugcu

SEQ ID NO: 1941716 - RNA, 18 nt, Human herpesvirus 4 [Epstein-Barr virus]
gucgugguuuucugcccc

SEQ ID NO: 1941717 - RNA, 13 nt, Human herpesvirus 4 [Epstein-Barr virus]
cgaguccaagcug

SEQ ID NO: 1941718 - RNA, 21 nt, Human herpesvirus 4 [Epstein-Barr virus]
gagccauuggcaugggcggga

SEQ ID NO: 1941719 - RNA, 15 nt, Human herpesvirus 4 [Epstein-Barr virus]
ggaggggcggcagcg

SEQ ID NO: 1941720 - RNA, 15 nt, Human herpesvirus 4 [Epstein-Barr virus]
augccaauccaugcc

SEQ ID NO: 1941721 - RNA, 17 nt, Human herpesvirus 4 [Epstein-Barr virus]
gaacaucuggcuggggc

SEQ ID NO: 1941722 - RNA, 12 nt, Human herpesvirus 4 [Epstein-Barr virus]
uaggaauuauuu

SEQ ID NO: 1941723 - RNA, 13 nt, Human herpesvirus 4 [Epstein-Barr virus]
gagcggcugugag

SEQ ID NO: 1941724 - RNA, 24 nt, Human herpesvirus 4 [Epstein-Barr virus]
uaccagcccuuuuuccaguggcau

SEQ ID NO: 1941725 - RNA, 18 nt, Human herpesvirus 4 [Epstein-Barr virus]
gacauuucucauaauggu

SEQ ID NO: 1941726 - RNA, 20 nt, Human herpesvirus 4 [Epstein-Barr virus]
ccagugcgaggaacuggcuc

SEQ ID NO: 1941727 - RNA, 16 nt, Human herpesvirus 4 [Epstein-Barr virus]
cacucccgaggcacuu

SEQ ID NO: 1941728 - RNA, 15 nt, Human herpesvirus 4 [Epstein-Barr virus]
cggcaccuagcccac

SEQ ID NO: 1941729 - RNA, 23 nt, Human herpesvirus 4 [Epstein-Barr virus]
aaucaccgccguaaucuguggug

SEQ ID NO: 1941730 - RNA, 16 nt, Human herpesvirus 4 [Epstein-Barr virus]
ggccacacuggggacc

SEQ ID NO: 1941731 - RNA, 23 nt, Human herpesvirus 4 [Epstein-Barr virus]
cauggaggauugaggacccaccu

SEQ ID NO: 1941732 - RNA, 15 nt, Human herpesvirus 4 [Epstein-Barr virus]
ccuguguccugggca

SEQ ID NO: 1941733 - RNA, 20 nt, Human herpesvirus 4 [Epstein-Barr virus]
cgcccagggacauccccaga

SEQ ID NO: 1941734 - RNA, 22 nt, Human herpesvirus 4 [Epstein-Barr virus]
gcaucaugcgugaccaccuggc

SEQ ID NO: 1941735 - RNA, 22 nt, Human herpesvirus 4 [Epstein-Barr virus]
accuuaacuggcacacacuccc

SEQ ID NO: 1941736 - RNA, 18 nt, Human herpesvirus 4 [Epstein-Barr virus]
auagacaagaggcagaga

SEQ ID NO: 1941737 - RNA, 13 nt, Human herpesvirus 4 [Epstein-Barr virus]
accauaugaugac

SEQ ID NO: 1941738 - RNA, 16 nt, Human herpesvirus 4 [Epstein-Barr virus]
gcuacaaacacgggcc

SEQ ID NO: 1941739 - RNA, 19 nt, Human herpesvirus 4 [Epstein-Barr virus]
gccccuaggccugccacgu

SEQ ID NO: 1941740 - RNA, 15 nt, Human herpesvirus 4 [Epstein-Barr virus]
cagguggcugcugcc

SEQ ID NO: 1941741 - RNA, 22 nt, Human herpesvirus 4 [Epstein-Barr virus]
ccgucucggugcgcagacccca

SEQ ID NO: 1941742 - RNA, 14 nt, Human herpesvirus 4 [Epstein-Barr virus]
gucuucaauagaca

SEQ ID NO: 1941743 - RNA, 18 nt, Human herpesvirus 4 [Epstein-Barr virus]
ugcagcaacgcccaggga

SEQ ID NO: 1941744 - RNA, 16 nt, Human herpesvirus 4 [Epstein-Barr virus]
cccggggguggcagcc

SEQ ID NO: 1941745 - RNA, 19 nt, Human herpesvirus 4 [Epstein-Barr virus]
cacuggugguggaggagga

SEQ ID NO: 1941746 - RNA, 22 nt, Human herpesvirus 4 [Epstein-Barr virus]
gagcccauucucguccaucucg

SEQ ID NO: 1941747 - RNA, 18 nt, Human herpesvirus 4 [Epstein-Barr virus]
ggacagcacaacaagaaa

SEQ ID NO: 1941748 - RNA, 15 nt, Human herpesvirus 4 [Epstein-Barr virus]
cacaggcauugcuaa

SEQ ID NO: 1941749 - RNA, 19 nt, Human herpesvirus 4 [Epstein-Barr virus]
ugcgaaacuugggggcagg

SEQ ID NO: 1941750 - RNA, 13 nt, Human herpesvirus 4 [Epstein-Barr virus]
auguccuguggug

SEQ ID NO: 1941751 - RNA, 13 nt, Human herpesvirus 4 [Epstein-Barr virus]
uguccagaugucc

SEQ ID NO: 1941752 - RNA, 12 nt, Human herpesvirus 4 [Epstein-Barr virus]
gucugcugccau

SEQ ID NO: 1941753 - RNA, 13 nt, Human herpesvirus 4 [Epstein-Barr virus]
auaacgcaggucc

SEQ ID NO: 1941754 - RNA, 19 nt, Human herpesvirus 4 [Epstein-Barr virus]
ugccgcguguuugcugcuc

SEQ ID NO: 1941755 - RNA, 20 nt, Human herpesvirus 4 [Epstein-Barr virus]
gggauugcaacacgacggga

SEQ ID NO: 1941756 - RNA, 21 nt, Human herpesvirus 4 [Epstein-Barr virus]
cacuaucacccauggccaggc

SEQ ID NO: 1941757 - RNA, 15 nt, Human herpesvirus 4 [Epstein-Barr virus]
ccaggaccuggaugc

SEQ ID NO: 1941758 - RNA, 12 nt, Human herpesvirus 4 [Epstein-Barr virus]
uucuccugauuu

SEQ ID NO: 1941759 - RNA, 14 nt, Human herpesvirus 4 [Epstein-Barr virus]
uacaccuggcugua

SEQ ID NO: 1941760 - RNA, 18 nt, Human herpesvirus 4 [Epstein-Barr virus]
cggggaaggaggauggcc

SEQ ID NO: 1941761 - RNA, 22 nt, Human herpesvirus 4 [Epstein-Barr virus]
ccacucaggaagcuggccaggc

SEQ ID NO: 1941762 - RNA, 11 nt, Human herpesvirus 4 [Epstein-Barr virus]
cuccaggcucc

SEQ ID NO: 1941763 - RNA, 12 nt, Human herpesvirus 4 [Epstein-Barr virus]
acuccgccacca

SEQ ID NO: 1941764 - RNA, 19 nt, Human herpesvirus 4 [Epstein-Barr virus]
cugcagugggccucucugg

SEQ ID NO: 1941765 - RNA, 14 nt, Human herpesvirus 4 [Epstein-Barr virus]
gccugggaggugcu

SEQ ID NO: 1941766 - RNA, 13 nt, Human herpesvirus 4 [Epstein-Barr virus]
cggcgccucuugu

SEQ ID NO: 1941767 - RNA, 19 nt, Human herpesvirus 4 [Epstein-Barr virus]
auguggugccauguggcau

SEQ ID NO: 1941768 - RNA, 19 nt, Human herpesvirus 4 [Epstein-Barr virus]
gggucucggcacccaggca

SEQ ID NO: 1941769 - RNA, 17 nt, Human herpesvirus 4 [Epstein-Barr virus]
cccgagaccggcuccgg

SEQ ID NO: 1941770 - RNA, 17 nt, Human herpesvirus 4 [Epstein-Barr virus]
cacacacucccuuagcc

SEQ ID NO: 1941771 - RNA, 22 nt, Human herpesvirus 4 [Epstein-Barr virus]
ccagccccaauucuugcaccca

SEQ ID NO: 1941772 - RNA, 15 nt, Human herpesvirus 4 [Epstein-Barr virus]
guggggcugagacca

SEQ ID NO: 1941773 - RNA, 19 nt, Human herpesvirus 4 [Epstein-Barr virus]
ugggucgccugacccucuu

SEQ ID NO: 1941774 - RNA, 17 nt, Human herpesvirus 4 [Epstein-Barr virus]
cuccagcggcuaccugu

SEQ ID NO: 1941775 - RNA, 16 nt, Human herpesvirus 4 [Epstein-Barr virus]
ggcgaaugggcugcag

SEQ ID NO: 1941776 - RNA, 17 nt, Human herpesvirus 4 [Epstein-Barr virus]
cuggggugugaagggca

SEQ ID NO: 1941777 - RNA, 19 nt, Human herpesvirus 4 [Epstein-Barr virus]
agaugagccucucaaaggc

SEQ ID NO: 1941778 - RNA, 23 nt, Human herpesvirus 4 [Epstein-Barr virus]
gaagcccccaaaaguagaggcuc

SEQ ID NO: 1941779 - RNA, 15 nt, Human herpesvirus 4 [Epstein-Barr virus]
agaaugcccaccaga

SEQ ID NO: 1941780 - RNA, 21 nt, Human herpesvirus 4 [Epstein-Barr virus]
ugacuggcagaaaggcuggcc

SEQ ID NO: 1941781 - RNA, 17 nt, Human herpesvirus 4 [Epstein-Barr virus]
ugggugcacagguggcc

SEQ ID NO: 1941782 - RNA, 14 nt, Human herpesvirus 4 [Epstein-Barr virus]
ccuaugccuggaag

SEQ ID NO: 1941783 - RNA, 19 nt, Human herpesvirus 4 [Epstein-Barr virus]
ggcuccggauucaccggca

SEQ ID NO: 1941784 - RNA, 17 nt, Human herpesvirus 4 [Epstein-Barr virus]
ggccucgugcaaccagg

SEQ ID NO: 1941785 - RNA, 16 nt, Human herpesvirus 4 [Epstein-Barr virus]
gguuagcguggacagu

SEQ ID NO: 1941786 - RNA, 19 nt, Human herpesvirus 4 [Epstein-Barr virus]
cgcccucacgggccaucuc

SEQ ID NO: 1941787 - RNA, 16 nt, Human herpesvirus 4 [Epstein-Barr virus]
ccaugaaucugacucu

SEQ ID NO: 1941788 - RNA, 16 nt, Human herpesvirus 4 [Epstein-Barr virus]
ccuccuggccagcacc

SEQ ID NO: 1941789 - RNA, 20 nt, Human herpesvirus 4 [Epstein-Barr virus]
aggauggaagagaggggcag

SEQ ID NO: 1941790 - RNA, 18 nt, Human herpesvirus 4 [Epstein-Barr virus]
cuggggucucaggccucc

SEQ ID NO: 1941791 - RNA, 16 nt, Human herpesvirus 4 [Epstein-Barr virus]
agggcucaccagggag

SEQ ID NO: 1941792 - RNA, 16 nt, Human herpesvirus 4 [Epstein-Barr virus]
gccugagccacaccca

SEQ ID NO: 1941793 - RNA, 21 nt, Human herpesvirus 4 [Epstein-Barr virus]
gccagacucucuucagugacc

SEQ ID NO: 1941794 - RNA, 15 nt, Human herpesvirus 4 [Epstein-Barr virus]
cauuggcagcagcuc

SEQ ID NO: 1941795 - RNA, 13 nt, Human herpesvirus 4 [Epstein-Barr virus]
cugcggggaggag

SEQ ID NO: 1941796 - RNA, 16 nt, Human herpesvirus 4 [Epstein-Barr virus]
ugaaugcacgccaaca

SEQ ID NO: 1941797 - RNA, 23 nt, Human herpesvirus 4 [Epstein-Barr virus]
gaaacccaaguuuccuugccauc

SEQ ID NO: 1941798 - RNA, 16 nt, Human herpesvirus 4 [Epstein-Barr virus]
cucagguuucugggca

SEQ ID NO: 1941799 - RNA, 21 nt, Human herpesvirus 4 [Epstein-Barr virus]
cccuagagguuuugcuaggga

SEQ ID NO: 1941800 - RNA, 14 nt, Human herpesvirus 4 [Epstein-Barr virus]
gcgggggccucagc

SEQ ID NO: 1941801 - RNA, 13 nt, Human herpesvirus 4 [Epstein-Barr virus]
ggcagggggccgg

SEQ ID NO: 1941802 - RNA, 19 nt, Human herpesvirus 4 [Epstein-Barr virus]
gccgucucaaacggggaag

SEQ ID NO: 1941803 - RNA, 16 nt, Human herpesvirus 4 [Epstein-Barr virus]
aauauuaauaaauauc

SEQ ID NO: 1941804 - RNA, 13 nt, Human herpesvirus 4 [Epstein-Barr virus]
gcagaaggggccc

SEQ ID NO: 1941805 - RNA, 15 nt, Human herpesvirus 4 [Epstein-Barr virus]
acagguagcaaggac

SEQ ID NO: 1941806 - RNA, 16 nt, Human herpesvirus 4 [Epstein-Barr virus]
gggugaggcggugccu

SEQ ID NO: 1941807 - RNA, 19 nt, Human herpesvirus 4 [Epstein-Barr virus]
gauuggaaaagggcccagg

SEQ ID NO: 1941808 - RNA, 12 nt, Human herpesvirus 4 [Epstein-Barr virus]
caagcagcucac

SEQ ID NO: 1941809 - RNA, 14 nt, Human herpesvirus 4 [Epstein-Barr virus]
cugcguggcaccaa

SEQ ID NO: 1941810 - RNA, 18 nt, Human herpesvirus 4 [Epstein-Barr virus]
ccaugcccagacucaucu

SEQ ID NO: 1941811 - RNA, 12 nt, Human herpesvirus 4 [Epstein-Barr virus]
acccaacaaagc

SEQ ID NO: 1941812 - RNA, 21 nt, Human herpesvirus 4 [Epstein-Barr virus]
cuccggcggcaguggaccuca

SEQ ID NO: 1941813 - RNA, 15 nt, Human herpesvirus 4 [Epstein-Barr virus]
ccgccucccccagcc

SEQ ID NO: 1941814 - RNA, 17 nt, Human herpesvirus 4 [Epstein-Barr virus]
ccugcggacucaggcca

SEQ ID NO: 1941815 - RNA, 18 nt, Human herpesvirus 4 [Epstein-Barr virus]
ggccugugacuggugcuu

SEQ ID NO: 1941816 - RNA, 15 nt, Human herpesvirus 4 [Epstein-Barr virus]
aagguccugggccuc

SEQ ID NO: 1941817 - RNA, 18 nt, Human herpesvirus 4 [Epstein-Barr virus]
cgagggccucuggcacgc

SEQ ID NO: 1941818 - RNA, 14 nt, Human herpesvirus 4 [Epstein-Barr virus]
gccagacuccgcca

SEQ ID NO: 1941819 - RNA, 19 nt, Human herpesvirus 4 [Epstein-Barr virus]
uacucuucauucuugcuau

SEQ ID NO: 1941820 - RNA, 15 nt, Human herpesvirus 4 [Epstein-Barr virus]
caaggacaggugcca

SEQ ID NO: 1941821 - RNA, 16 nt, Human herpesvirus 4 [Epstein-Barr virus]
aggcuccuggaucugg

SEQ ID NO: 1941822 - RNA, 13 nt, Human herpesvirus 4 [Epstein-Barr virus]
ggguggacaugag

SEQ ID NO: 1941823 - RNA, 16 nt, Human herpesvirus 4 [Epstein-Barr virus]
guucccuaagcagcug

SEQ ID NO: 1941824 - RNA, 22 nt, Human herpesvirus 4 [Epstein-Barr virus]
cacaggguggggguggacauga

SEQ ID NO: 1941825 - RNA, 16 nt, Human herpesvirus 4 [Epstein-Barr virus]
gcccuccucugggccg

SEQ ID NO: 1941826 - RNA, 14 nt, Human herpesvirus 4 [Epstein-Barr virus]
gacuggcggcacug

SEQ ID NO: 1941827 - RNA, 11 nt, Human herpesvirus 4 [Epstein-Barr virus]
gcggcccagca

SEQ ID NO: 1941828 - RNA, 22 nt, Human herpesvirus 4 [Epstein-Barr virus]
ucuggggcuggccugccuggau

SEQ ID NO: 1941829 - RNA, 23 nt, Human herpesvirus 4 [Epstein-Barr virus]
aggcccuaauucagccaccuccc

SEQ ID NO: 1941830 - RNA, 15 nt, Human herpesvirus 4 [Epstein-Barr virus]
cugggccgcccggcc

SEQ ID NO: 1941831 - RNA, 11 nt, Human herpesvirus 4 [Epstein-Barr virus]
aucuguugacg

SEQ ID NO: 1941832 - RNA, 19 nt, Human herpesvirus 4 [Epstein-Barr virus]
ggcccguuccaggcucucc

SEQ ID NO: 1941833 - RNA, 12 nt, Human herpesvirus 4 [Epstein-Barr virus]
caagcagcaccu

SEQ ID NO: 1941834 - RNA, 21 nt, Human herpesvirus 4 [Epstein-Barr virus]
ugccccccuggcggcccagcc

SEQ ID NO: 1941835 - RNA, 13 nt, Human herpesvirus 4 [Epstein-Barr virus]
cugaccaggacau

SEQ ID NO: 1941836 - RNA, 14 nt, Human herpesvirus 4 [Epstein-Barr virus]
cgagaauuggcaga

SEQ ID NO: 1941837 - RNA, 17 nt, Human herpesvirus 4 [Epstein-Barr virus]
ggcggacaucauuagcc

SEQ ID NO: 1941838 - RNA, 16 nt, Human herpesvirus 4 [Epstein-Barr virus]
gggcaugcuugggcau

SEQ ID NO: 1941839 - RNA, 17 nt, Human herpesvirus 4 [Epstein-Barr virus]
cgcagaggccugcacca

SEQ ID NO: 1941840 - RNA, 18 nt, Human herpesvirus 4 [Epstein-Barr virus]
acgcucagugcggugcua

SEQ ID NO: 1941841 - RNA, 19 nt, Human herpesvirus 4 [Epstein-Barr virus]
cacucaugguacggugaua

SEQ ID NO: 1941842 - RNA, 22 nt, Human herpesvirus 4 [Epstein-Barr virus]
cggcgaugucggggcugcuggc

SEQ ID NO: 1941843 - RNA, 12 nt, Human herpesvirus 4 [Epstein-Barr virus]
gccacacugggg

SEQ ID NO: 1941844 - RNA, 22 nt, Human herpesvirus 4 [Epstein-Barr virus]
ccagaaagauacccagagcaaa

SEQ ID NO: 1941845 - RNA, 16 nt, Human herpesvirus 4 [Epstein-Barr virus]
gauuuccgucagccag

SEQ ID NO: 1941846 - RNA, 17 nt, Human herpesvirus 4 [Epstein-Barr virus]
aggucgaccaccucaac

SEQ ID NO: 1941847 - RNA, 20 nt, Human herpesvirus 4 [Epstein-Barr virus]
cucgcgccccaucuuggccc

SEQ ID NO: 1941848 - RNA, 20 nt, Human herpesvirus 4 [Epstein-Barr virus]
aggauauuaggcaaggguga

SEQ ID NO: 1941849 - RNA, 16 nt, Human herpesvirus 4 [Epstein-Barr virus]
accucccccccagacc

SEQ ID NO: 1941850 - RNA, 21 nt, Human herpesvirus 4 [Epstein-Barr virus]
ggccaccuucuccaucuccau

SEQ ID NO: 1941851 - RNA, 21 nt, Human herpesvirus 4 [Epstein-Barr virus]
caacaggugcccgagccccgc

SEQ ID NO: 1941852 - RNA, 22 nt, Human herpesvirus 4 [Epstein-Barr virus]
cagaggaggacaugugcauggc

SEQ ID NO: 1941853 - RNA, 12 nt, Human herpesvirus 4 [Epstein-Barr virus]
gccugccucugc

SEQ ID NO: 1941854 - RNA, 17 nt, Human herpesvirus 4 [Epstein-Barr virus]
gaggcggaagaccagga

SEQ ID NO: 1941855 - RNA, 12 nt, Human herpesvirus 4 [Epstein-Barr virus]
acauauguacaa

SEQ ID NO: 1941856 - RNA, 13 nt, Human herpesvirus 4 [Epstein-Barr virus]
caguccuccgcau

SEQ ID NO: 1941857 - RNA, 19 nt, Human herpesvirus 4 [Epstein-Barr virus]
uagccaccguggccaggcc

SEQ ID NO: 1941858 - RNA, 17 nt, Human herpesvirus 4 [Epstein-Barr virus]
ggcgcucugcgccagcc

SEQ ID NO: 1941859 - RNA, 18 nt, Human herpesvirus 4 [Epstein-Barr virus]
uggucgcccccucugccu

SEQ ID NO: 1941860 - RNA, 23 nt, Human herpesvirus 4 [Epstein-Barr virus]
ccugcgcuacuaugacaccuauc

SEQ ID NO: 1941861 - RNA, 15 nt, Human herpesvirus 4 [Epstein-Barr virus]
cagaccugugugcug

SEQ ID NO: 1941862 - RNA, 17 nt, Human herpesvirus 4 [Epstein-Barr virus]
cucccgcccugagcugg

SEQ ID NO: 1941863 - RNA, 14 nt, Human herpesvirus 4 [Epstein-Barr virus]
acaggggagguggc

SEQ ID NO: 1941864 - RNA, 21 nt, Human herpesvirus 4 [Epstein-Barr virus]
agccagguguacgcccuggcg

SEQ ID NO: 1941865 - RNA, 13 nt, Human herpesvirus 4 [Epstein-Barr virus]
cccgacaauaaag

SEQ ID NO: 1941866 - RNA, 17 nt, Human herpesvirus 4 [Epstein-Barr virus]
cuccaagugcaacaauc

SEQ ID NO: 1941867 - RNA, 14 nt, Human herpesvirus 4 [Epstein-Barr virus]
ggcucaggccgccg

SEQ ID NO: 1941868 - RNA, 17 nt, Human herpesvirus 4 [Epstein-Barr virus]
gacuggcacgguggcuu

SEQ ID NO: 1941869 - RNA, 17 nt, Human herpesvirus 4 [Epstein-Barr virus]
cugacccuucugcugcu

SEQ ID NO: 1941870 - RNA, 18 nt, Human herpesvirus 4 [Epstein-Barr virus]
caacagacuaaccaagcc

SEQ ID NO: 1941871 - RNA, 18 nt, Human herpesvirus 4 [Epstein-Barr virus]
gcaccgaacauggguaau

SEQ ID NO: 1941872 - RNA, 15 nt, Human herpesvirus 4 [Epstein-Barr virus]
ccagggguggcagug

SEQ ID NO: 1941873 - RNA, 17 nt, Human herpesvirus 4 [Epstein-Barr virus]
acuguuccuauaugcuc

SEQ ID NO: 1941874 - RNA, 19 nt, Human herpesvirus 4 [Epstein-Barr virus]
gcccgacgaacuccuccag

SEQ ID NO: 1941875 - RNA, 22 nt, Human herpesvirus 4 [Epstein-Barr virus]
ccggguacccuuucuaccaggg

SEQ ID NO: 1941876 - RNA, 21 nt, Human herpesvirus 4 [Epstein-Barr virus]
caaggaaacaaaaccacugac

SEQ ID NO: 1941877 - RNA, 19 nt, Human herpesvirus 4 [Epstein-Barr virus]
gaaucuugauaaaacaggu

SEQ ID NO: 1941878 - RNA, 20 nt, Human herpesvirus 4 [Epstein-Barr virus]
cggaggacgauagcccaggc

SEQ ID NO: 1941879 - RNA, 19 nt, Human herpesvirus 4 [Epstein-Barr virus]
cucugcauggagaagcugg

SEQ ID NO: 1941880 - RNA, 17 nt, Human herpesvirus 4 [Epstein-Barr virus]
ccccagcugcaucuucc

SEQ ID NO: 1941881 - RNA, 13 nt, Human herpesvirus 4 [Epstein-Barr virus]
guguuugcuugcc

SEQ ID NO: 1941882 - RNA, 14 nt, Human herpesvirus 4 [Epstein-Barr virus]
uaaaacuccacaga

SEQ ID NO: 1941883 - RNA, 16 nt, Human herpesvirus 4 [Epstein-Barr virus]
aggagauccgccagga

SEQ ID NO: 1941884 - RNA, 18 nt, Human herpesvirus 4 [Epstein-Barr virus]
auggccacgacuauccag

SEQ ID NO: 1941885 - RNA, 22 nt, Human herpesvirus 4 [Epstein-Barr virus]
ccuccccaauggggcuggcagu

SEQ ID NO: 1941886 - RNA, 17 nt, Human herpesvirus 4 [Epstein-Barr virus]
gucaggagggcagagag

SEQ ID NO: 1941887 - RNA, 21 nt, Human herpesvirus 4 [Epstein-Barr virus]
uggccgugcuggaugagguua

SEQ ID NO: 1941888 - RNA, 19 nt, Human herpesvirus 4 [Epstein-Barr virus]
ggucaaguaccagcuggug

SEQ ID NO: 1941889 - RNA, 14 nt, Human herpesvirus 4 [Epstein-Barr virus]
cugucacugugcac

SEQ ID NO: 1941890 - RNA, 21 nt, Human herpesvirus 4 [Epstein-Barr virus]
guggccucuacgccaggcucg

SEQ ID NO: 1941891 - RNA, 22 nt, Human herpesvirus 4 [Epstein-Barr virus]
ugcggcagaaauugaaagugcu

SEQ ID NO: 1941892 - RNA, 15 nt, Human herpesvirus 4 [Epstein-Barr virus]
ucagugcggugcuac

SEQ ID NO: 1941893 - RNA, 13 nt, Human herpesvirus 4 [Epstein-Barr virus]
cccaagccuggau

SEQ ID NO: 1941894 - RNA, 14 nt, Human herpesvirus 4 [Epstein-Barr virus]
ucacccauggccag

SEQ ID NO: 1941895 - RNA, 16 nt, Human herpesvirus 4 [Epstein-Barr virus]
ugccugccucugcucu

SEQ ID NO: 1941896 - RNA, 12 nt, Human herpesvirus 4 [Epstein-Barr virus]
cuggcugugcug

SEQ ID NO: 1941897 - RNA, 17 nt, Human herpesvirus 4 [Epstein-Barr virus]
gcuggccgcagcuggcg

SEQ ID NO: 1941898 - RNA, 18 nt, Human herpesvirus 4 [Epstein-Barr virus]
auugaaaccacgccugcu

SEQ ID NO: 1941899 - RNA, 22 nt, Human herpesvirus 4 [Epstein-Barr virus]
cuguaacugugguuuccaugac

SEQ ID NO: 1941900 - RNA, 18 nt, Human herpesvirus 4 [Epstein-Barr virus]
cgcagguggcugcugcca

SEQ ID NO: 1941901 - RNA, 16 nt, Human herpesvirus 4 [Epstein-Barr virus]
gcaggaggaggggcag

SEQ ID NO: 1941902 - RNA, 14 nt, Human herpesvirus 4 [Epstein-Barr virus]
auauugucccccua

SEQ ID NO: 1941903 - RNA, 12 nt, Human herpesvirus 4 [Epstein-Barr virus]
gaggcgcagccc

SEQ ID NO: 1941904 - RNA, 18 nt, Human herpesvirus 4 [Epstein-Barr virus]
cccagguaccuuccugug

SEQ ID NO: 1941905 - RNA, 18 nt, Human herpesvirus 4 [Epstein-Barr virus]
cugaucugggagaugaga

SEQ ID NO: 1941906 - RNA, 18 nt, Human herpesvirus 4 [Epstein-Barr virus]
gugaguccagggcccugg

SEQ ID NO: 1941907 - RNA, 19 nt, Human herpesvirus 4 [Epstein-Barr virus]
agcggcauccucaaggggc

SEQ ID NO: 1941908 - RNA, 18 nt, Human herpesvirus 4 [Epstein-Barr virus]
cgcagcccagcccuccgc

SEQ ID NO: 1941909 - RNA, 15 nt, Human herpesvirus 4 [Epstein-Barr virus]
ggcgguuagggagga

SEQ ID NO: 1941910 - RNA, 20 nt, Human herpesvirus 4 [Epstein-Barr virus]
gacucccauguaagccugcc

SEQ ID NO: 1941911 - RNA, 16 nt, Human herpesvirus 4 [Epstein-Barr virus]
ggcugcaaagggaccc

SEQ ID NO: 1941912 - RNA, 13 nt, Human herpesvirus 4 [Epstein-Barr virus]
uucacuuccucug

SEQ ID NO: 1941913 - RNA, 12 nt, Human herpesvirus 4 [Epstein-Barr virus]
gccuuccucugc

SEQ ID NO: 1941914 - RNA, 13 nt, Human herpesvirus 4 [Epstein-Barr virus]
ccgugucuccuga

SEQ ID NO: 1941915 - RNA, 19 nt, Human herpesvirus 4 [Epstein-Barr virus]
ggcagcagcucuggcacug

SEQ ID NO: 1941916 - RNA, 16 nt, Human herpesvirus 4 [Epstein-Barr virus]
gcuccgugagcaggag

SEQ ID NO: 1941917 - RNA, 17 nt, Human herpesvirus 4 [Epstein-Barr virus]
cuuccagagaggcgcag

SEQ ID NO: 1941918 - RNA, 17 nt, Human herpesvirus 4 [Epstein-Barr virus]
auuggacacccacccug

SEQ ID NO: 1941919 - RNA, 18 nt, Human herpesvirus 4 [Epstein-Barr virus]
cuagagcauuugcaaguc

SEQ ID NO: 1941920 - RNA, 16 nt, Human herpesvirus 4 [Epstein-Barr virus]
ggggcaggaggggcag

SEQ ID NO: 1941921 - RNA, 12 nt, Human herpesvirus 4 [Epstein-Barr virus]
acuguccagaca

SEQ ID NO: 1941922 - RNA, 23 nt, Human herpesvirus 4 [Epstein-Barr virus]
uucggucaaguaccagcuggugg

SEQ ID NO: 1941923 - RNA, 12 nt, Human herpesvirus 4 [Epstein-Barr virus]
ccccagccacag

SEQ ID NO: 1941924 - RNA, 14 nt, Human herpesvirus 4 [Epstein-Barr virus]
agcagcagcccggc

SEQ ID NO: 1941925 - RNA, 19 nt, Human herpesvirus 4 [Epstein-Barr virus]
gaggcggaagaccaggagc

SEQ ID NO: 1941926 - RNA, 19 nt, Human herpesvirus 4 [Epstein-Barr virus]
cuaggcugaaaagccacau

SEQ ID NO: 1941927 - RNA, 14 nt, Human herpesvirus 4 [Epstein-Barr virus]
guaccagcuggugg

SEQ ID NO: 1941928 - RNA, 21 nt, Human herpesvirus 4 [Epstein-Barr virus]
guggagguugucaaaaucaaa

SEQ ID NO: 1941929 - RNA, 23 nt, Human herpesvirus 4 [Epstein-Barr virus]
ccuccacuuacaaccaagccacu

SEQ ID NO: 1941930 - RNA, 16 nt, Human herpesvirus 4 [Epstein-Barr virus]
acgacaucugggagug

SEQ ID NO: 1941931 - RNA, 21 nt, Human herpesvirus 4 [Epstein-Barr virus]
cacuuucuuugcaauuugccu

SEQ ID NO: 1941932 - RNA, 19 nt, Human herpesvirus 4 [Epstein-Barr virus]
acaucuggcuggggcauua

SEQ ID NO: 1941933 - RNA, 13 nt, Human herpesvirus 4 [Epstein-Barr virus]
cgagaaggaggag

SEQ ID NO: 1941934 - RNA, 16 nt, Human herpesvirus 4 [Epstein-Barr virus]
caccagggaggccugg

SEQ ID NO: 1941935 - RNA, 14 nt, Human herpesvirus 4 [Epstein-Barr virus]
acgccugcuucacg

SEQ ID NO: 1941936 - RNA, 16 nt, Human herpesvirus 4 [Epstein-Barr virus]
caggcagccuugcgug

SEQ ID NO: 1941937 - RNA, 17 nt, Human herpesvirus 4 [Epstein-Barr virus]
cgucaucuggcucuccu

SEQ ID NO: 1941938 - RNA, 22 nt, Human herpesvirus 4 [Epstein-Barr virus]
cauccaucaacuucagcuccag

SEQ ID NO: 1941939 - RNA, 19 nt, Human herpesvirus 4 [Epstein-Barr virus]
ggcgccgcagggguggugg

SEQ ID NO: 1941940 - RNA, 23 nt, Human herpesvirus 4 [Epstein-Barr virus]
cccaguugacggacgugcccagc

SEQ ID NO: 1941941 - RNA, 17 nt, Human herpesvirus 4 [Epstein-Barr virus]
cgccgcagaagagccgc

SEQ ID NO: 1941942 - RNA, 15 nt, Human herpesvirus 4 [Epstein-Barr virus]
cucccgccucaggga

SEQ ID NO: 1941943 - RNA, 21 nt, Human herpesvirus 4 [Epstein-Barr virus]
cauguugucacgucacucagc

SEQ ID NO: 1941944 - RNA, 14 nt, Human herpesvirus 4 [Epstein-Barr virus]
uccuccuguuucug

SEQ ID NO: 1941945 - RNA, 12 nt, Human herpesvirus 4 [Epstein-Barr virus]
ucccaggccuca

SEQ ID NO: 1941946 - RNA, 15 nt, Human herpesvirus 4 [Epstein-Barr virus]
gcccccggagcccug

SEQ ID NO: 1941947 - RNA, 16 nt, Human herpesvirus 4 [Epstein-Barr virus]
gcuccguggccccggg

SEQ ID NO: 1941948 - RNA, 18 nt, Human herpesvirus 4 [Epstein-Barr virus]
uggagagaggcaaauguc

SEQ ID NO: 1941949 - RNA, 15 nt, Human herpesvirus 4 [Epstein-Barr virus]
ccagcucggccagca

SEQ ID NO: 1941950 - RNA, 21 nt, Human herpesvirus 4 [Epstein-Barr virus]
agcaacccccggcucucaggc

SEQ ID NO: 1941951 - RNA, 15 nt, Human herpesvirus 4 [Epstein-Barr virus]
acggcaugccuaaug

SEQ ID NO: 1941952 - RNA, 22 nt, Human herpesvirus 4 [Epstein-Barr virus]
agaggcgggggguaugugcugc

SEQ ID NO: 1941953 - RNA, 22 nt, Human herpesvirus 4 [Epstein-Barr virus]
gccuccaacaggugcccgagcc

SEQ ID NO: 1941954 - RNA, 15 nt, Human herpesvirus 4 [Epstein-Barr virus]
ugucucggccuccug

SEQ ID NO: 1941955 - RNA, 19 nt, Human herpesvirus 4 [Epstein-Barr virus]
cggcccgucuuacugccca

SEQ ID NO: 1941956 - RNA, 17 nt, Human herpesvirus 4 [Epstein-Barr virus]
cgccaggcucgcuuuuc

SEQ ID NO: 1941957 - RNA, 21 nt, Human herpesvirus 4 [Epstein-Barr virus]
ccgggucaggucgcggaccag

SEQ ID NO: 1941958 - RNA, 17 nt, Human herpesvirus 4 [Epstein-Barr virus]
aggcuacaacaggcugc

SEQ ID NO: 1941959 - RNA, 17 nt, Human herpesvirus 4 [Epstein-Barr virus]
aguaggugccuccagag

SEQ ID NO: 1941960 - RNA, 18 nt, Human herpesvirus 4 [Epstein-Barr virus]
ggacagacccugggccuu

SEQ ID NO: 1941961 - RNA, 17 nt, Human herpesvirus 4 [Epstein-Barr virus]
uggccgccguggccaac

SEQ ID NO: 1941962 - RNA, 13 nt, Human herpesvirus 4 [Epstein-Barr virus]
gacgcugcugcua

SEQ ID NO: 1941963 - RNA, 13 nt, Human herpesvirus 4 [Epstein-Barr virus]
ggguaagaggagg

SEQ ID NO: 1941964 - RNA, 16 nt, Human herpesvirus 4 [Epstein-Barr virus]
ccucgccuucuccuca

SEQ ID NO: 1941965 - RNA, 19 nt, Human herpesvirus 4 [Epstein-Barr virus]
gcugccccaauaugccaac

SEQ ID NO: 1941966 - RNA, 13 nt, Human herpesvirus 4 [Epstein-Barr virus]
gacgaggaggaag

SEQ ID NO: 1941967 - RNA, 20 nt, Human herpesvirus 4 [Epstein-Barr virus]
cccgggcccagcccuccuca

SEQ ID NO: 1941968 - RNA, 23 nt, Human herpesvirus 4 [Epstein-Barr virus]
agagaggccucugccgcgcugcu

SEQ ID NO: 1941969 - RNA, 11 nt, Human herpesvirus 4 [Epstein-Barr virus]
cuaagcagcug

SEQ ID NO: 1941970 - RNA, 15 nt, Human herpesvirus 4 [Epstein-Barr virus]
gcaccuguguccugg

SEQ ID NO: 1941971 - RNA, 15 nt, Human herpesvirus 4 [Epstein-Barr virus]
gaaucugggcuggga

SEQ ID NO: 1941972 - RNA, 21 nt, Human herpesvirus 4 [Epstein-Barr virus]
agaugaccaugauggugcaga

SEQ ID NO: 1941973 - RNA, 13 nt, Human herpesvirus 4 [Epstein-Barr virus]
cccucccccugcc

SEQ ID NO: 1941974 - RNA, 18 nt, Human herpesvirus 4 [Epstein-Barr virus]
cgccaccacggugcagcc

SEQ ID NO: 1941975 - RNA, 21 nt, Human herpesvirus 4 [Epstein-Barr virus]
ccaacaggugcccgagccccg

SEQ ID NO: 1941976 - RNA, 19 nt, Human herpesvirus 4 [Epstein-Barr virus]
acugcgagggggccuggug

SEQ ID NO: 1941977 - RNA, 22 nt, Human herpesvirus 4 [Epstein-Barr virus]
guauccaccuagaaagagccau

SEQ ID NO: 1941978 - RNA, 15 nt, Human herpesvirus 4 [Epstein-Barr virus]
uaacacaccacacag

SEQ ID NO: 1941979 - RNA, 19 nt, Human herpesvirus 4 [Epstein-Barr virus]
caccgucuacccagaggag

SEQ ID NO: 1941980 - RNA, 14 nt, Human herpesvirus 4 [Epstein-Barr virus]
guaagcauggggcu

SEQ ID NO: 1941981 - RNA, 13 nt, Human herpesvirus 4 [Epstein-Barr virus]
ccucggagucuuc

SEQ ID NO: 1941982 - RNA, 13 nt, Human herpesvirus 4 [Epstein-Barr virus]
cgauagcccaggc

SEQ ID NO: 1941983 - RNA, 16 nt, Human herpesvirus 4 [Epstein-Barr virus]
ugacuuggccccugug

SEQ ID NO: 1941984 - RNA, 17 nt, Human herpesvirus 4 [Epstein-Barr virus]
acacccccacuuuucca

SEQ ID NO: 1941985 - RNA, 14 nt, Human herpesvirus 4 [Epstein-Barr virus]
agcacuuugaaaga

SEQ ID NO: 1941986 - RNA, 19 nt, Human herpesvirus 4 [Epstein-Barr virus]
gcuccguccuuguccagga

SEQ ID NO: 1941987 - RNA, 20 nt, Human herpesvirus 4 [Epstein-Barr virus]
ccuucucugauggccuggag

SEQ ID NO: 1941988 - RNA, 21 nt, Human herpesvirus 4 [Epstein-Barr virus]
ugccucgaguaggugccucca

SEQ ID NO: 1941989 - RNA, 23 nt, Human herpesvirus 4 [Epstein-Barr virus]
cacccgucccggguacaaguccc

SEQ ID NO: 1941990 - RNA, 15 nt, Human herpesvirus 4 [Epstein-Barr virus]
ccaccagcuucucaa

SEQ ID NO: 1941991 - RNA, 14 nt, Human herpesvirus 4 [Epstein-Barr virus]
ucuagcaucugcua

SEQ ID NO: 1941992 - RNA, 15 nt, Human herpesvirus 4 [Epstein-Barr virus]
uggcuacuugcucag

SEQ ID NO: 1941993 - RNA, 16 nt, Human herpesvirus 4 [Epstein-Barr virus]
agacacaucuggacca

SEQ ID NO: 1941994 - RNA, 12 nt, Human herpesvirus 4 [Epstein-Barr virus]
uagagcauuugc

SEQ ID NO: 1941995 - RNA, 15 nt, Human herpesvirus 4 [Epstein-Barr virus]
aauucagccaccucc

SEQ ID NO: 1941996 - RNA, 19 nt, Human herpesvirus 4 [Epstein-Barr virus]
caccacccccaccaccucc

SEQ ID NO: 1941997 - RNA, 21 nt, Human herpesvirus 4 [Epstein-Barr virus]
auccaucugcuucuggcucuu

SEQ ID NO: 1941998 - RNA, 15 nt, Human herpesvirus 4 [Epstein-Barr virus]
cguuggaugcagucc

SEQ ID NO: 1941999 - RNA, 21 nt, Human herpesvirus 4 [Epstein-Barr virus]
caucgacacacgagccauaga

SEQ ID NO: 1942000 - RNA, 15 nt, Human herpesvirus 4 [Epstein-Barr virus]
cacuggugguggagg

SEQ ID NO: 1942001 - RNA, 12 nt, Human herpesvirus 4 [Epstein-Barr virus]
uggagaggccac

SEQ ID NO: 1942002 - RNA, 14 nt, Human herpesvirus 4 [Epstein-Barr virus]
ggcgcucugcgcca

SEQ ID NO: 1942003 - RNA, 17 nt, Human herpesvirus 4 [Epstein-Barr virus]
agccccuaggccugcca

SEQ ID NO: 1942004 - RNA, 15 nt, Human herpesvirus 4 [Epstein-Barr virus]
gccuugcguggugcu

SEQ ID NO: 1942005 - RNA, 15 nt, Human herpesvirus 4 [Epstein-Barr virus]
ucaggaucagggcca

SEQ ID NO: 1942006 - RNA, 21 nt, Human herpesvirus 4 [Epstein-Barr virus]
caccuuaacuggcacacacuc

SEQ ID NO: 1942007 - RNA, 17 nt, Human herpesvirus 4 [Epstein-Barr virus]
gacgccgagaccuaugu

SEQ ID NO: 1942008 - RNA, 15 nt, Human herpesvirus 4 [Epstein-Barr virus]
auaaaagaggccggg

SEQ ID NO: 1942009 - RNA, 13 nt, Human herpesvirus 4 [Epstein-Barr virus]
gcccucuccagca

SEQ ID NO: 1942010 - RNA, 12 nt, Human herpesvirus 4 [Epstein-Barr virus]
cuacaguauuuu

SEQ ID NO: 1942011 - RNA, 22 nt, Human herpesvirus 4 [Epstein-Barr virus]
agauuguuccaggucagaccua

SEQ ID NO: 1942012 - RNA, 21 nt, Human herpesvirus 4 [Epstein-Barr virus]
gaagcccaagaagaagcccac

SEQ ID NO: 1942013 - RNA, 15 nt, Human herpesvirus 4 [Epstein-Barr virus]
ucccgggcaaacagg

SEQ ID NO: 1942014 - RNA, 22 nt, Human herpesvirus 4 [Epstein-Barr virus]
cucagagucuacucgaccagca

SEQ ID NO: 1942015 - RNA, 14 nt, Human herpesvirus 4 [Epstein-Barr virus]
gcgaccccucgugg

SEQ ID NO: 1942016 - RNA, 22 nt, Human herpesvirus 4 [Epstein-Barr virus]
cauaacaaucuugugaaccaga

SEQ ID NO: 1942017 - RNA, 21 nt, Human herpesvirus 4 [Epstein-Barr virus]
guggccaacgcaggcacggcc

SEQ ID NO: 1942018 - RNA, 17 nt, Human herpesvirus 4 [Epstein-Barr virus]
ccccccagaagccccca

SEQ ID NO: 1942019 - RNA, 14 nt, Human herpesvirus 4 [Epstein-Barr virus]
auugagaucagaaa

SEQ ID NO: 1942020 - RNA, 15 nt, Human herpesvirus 4 [Epstein-Barr virus]
cugacccuucugcug

SEQ ID NO: 1942021 - RNA, 23 nt, Human herpesvirus 4 [Epstein-Barr virus]
cuggccaccacaucggacgggca

SEQ ID NO: 1942022 - RNA, 18 nt, Human herpesvirus 4 [Epstein-Barr virus]
ggacagcagcguccuggc

SEQ ID NO: 1942023 - RNA, 18 nt, Human herpesvirus 4 [Epstein-Barr virus]
uucugaggcggcuguggc

SEQ ID NO: 1942024 - RNA, 17 nt, Human herpesvirus 4 [Epstein-Barr virus]
cucgucguucaggaaca

SEQ ID NO: 1942025 - RNA, 20 nt, Human herpesvirus 4 [Epstein-Barr virus]
aggccugccaaagagccaga

SEQ ID NO: 1942026 - RNA, 20 nt, Human herpesvirus 4 [Epstein-Barr virus]
cacggcgucaaacaggugag

SEQ ID NO: 1942027 - RNA, 17 nt, Human herpesvirus 4 [Epstein-Barr virus]
aaaguugaugauauuga

SEQ ID NO: 1942028 - RNA, 13 nt, Human herpesvirus 4 [Epstein-Barr virus]
cacagcugcuggu

SEQ ID NO: 1942029 - RNA, 17 nt, Human herpesvirus 4 [Epstein-Barr virus]
ugcacuauauucuccag

SEQ ID NO: 1942030 - RNA, 13 nt, Human herpesvirus 4 [Epstein-Barr virus]
uccauuucauugc

SEQ ID NO: 1942031 - RNA, 23 nt, Human herpesvirus 4 [Epstein-Barr virus]
ccuccaaucaccagccaccuucc

SEQ ID NO: 1942032 - RNA, 13 nt, Human herpesvirus 4 [Epstein-Barr virus]
cggggaagaggac

SEQ ID NO: 1942033 - RNA, 13 nt, Human herpesvirus 4 [Epstein-Barr virus]
ccggccgaggccu

SEQ ID NO: 1942034 - RNA, 19 nt, Human herpesvirus 4 [Epstein-Barr virus]
aguaggcacaucuggaccu

SEQ ID NO: 1942035 - RNA, 14 nt, Human herpesvirus 4 [Epstein-Barr virus]
ugguggucagcagc

SEQ ID NO: 1942036 - RNA, 11 nt, Human herpesvirus 4 [Epstein-Barr virus]
cuacaccaccc

SEQ ID NO: 1942037 - RNA, 13 nt, Human herpesvirus 4 [Epstein-Barr virus]
uguuacuucuuuu

SEQ ID NO: 1942038 - RNA, 17 nt, Human herpesvirus 4 [Epstein-Barr virus]
acuuuuauuucaguucu

SEQ ID NO: 1942039 - RNA, 13 nt, Human herpesvirus 4 [Epstein-Barr virus]
auuguugcgcccu

SEQ ID NO: 1942040 - RNA, 14 nt, Human herpesvirus 4 [Epstein-Barr virus]
ccugagcugccugg

SEQ ID NO: 1942041 - RNA, 16 nt, Human herpesvirus 4 [Epstein-Barr virus]
ugcugcugcuggucau

SEQ ID NO: 1942042 - RNA, 17 nt, Human herpesvirus 4 [Epstein-Barr virus]
cgguggaacaggagcag

SEQ ID NO: 1942043 - RNA, 19 nt, Human herpesvirus 4 [Epstein-Barr virus]
gugguggcagcaggcgcug

SEQ ID NO: 1942044 - RNA, 22 nt, Human herpesvirus 4 [Epstein-Barr virus]
uccacccccuggagccagcgcu

SEQ ID NO: 1942045 - RNA, 19 nt, Human herpesvirus 4 [Epstein-Barr virus]
agucuacucgaccagcacg

SEQ ID NO: 1942046 - RNA, 16 nt, Human herpesvirus 4 [Epstein-Barr virus]
cugcaccccaguggac

SEQ ID NO: 1942047 - RNA, 22 nt, Human herpesvirus 4 [Epstein-Barr virus]
ccuuuggcuccuccuguuucug

SEQ ID NO: 1942048 - RNA, 17 nt, Human herpesvirus 4 [Epstein-Barr virus]
aggccaccguggcccgc

SEQ ID NO: 1942049 - RNA, 18 nt, Human herpesvirus 4 [Epstein-Barr virus]
cuaauguucucuaacugu

SEQ ID NO: 1942050 - RNA, 22 nt, Human herpesvirus 4 [Epstein-Barr virus]
uaggugccgacaccggggugcc

SEQ ID NO: 1942051 - RNA, 12 nt, Human herpesvirus 4 [Epstein-Barr virus]
uccgccaccucc

SEQ ID NO: 1942052 - RNA, 20 nt, Human herpesvirus 4 [Epstein-Barr virus]
cucccaccaccguuaugccu

SEQ ID NO: 1942053 - RNA, 12 nt, Human herpesvirus 4 [Epstein-Barr virus]
gggacaccugca

SEQ ID NO: 1942054 - RNA, 16 nt, Human herpesvirus 4 [Epstein-Barr virus]
gugaccacugagggag

SEQ ID NO: 1942055 - RNA, 18 nt, Human herpesvirus 4 [Epstein-Barr virus]
cgcggacuccgugaccaa

SEQ ID NO: 1942056 - RNA, 19 nt, Human herpesvirus 4 [Epstein-Barr virus]
agcucugguaguaggcaca

SEQ ID NO: 1942057 - RNA, 13 nt, Human herpesvirus 4 [Epstein-Barr virus]
cgggccaucuccg

SEQ ID NO: 1942058 - RNA, 23 nt, Human herpesvirus 4 [Epstein-Barr virus]
cccacuaucacccauggccaggc

SEQ ID NO: 1942059 - RNA, 20 nt, Human herpesvirus 4 [Epstein-Barr virus]
uccgcagguggcugcugcca

SEQ ID NO: 1942060 - RNA, 16 nt, Human herpesvirus 4 [Epstein-Barr virus]
cguuggcauucuacua

SEQ ID NO: 1942061 - RNA, 15 nt, Human herpesvirus 4 [Epstein-Barr virus]
ccucagaggaggagg

SEQ ID NO: 1942062 - RNA, 14 nt, Human herpesvirus 4 [Epstein-Barr virus]
ugagccacacccac

SEQ ID NO: 1942063 - RNA, 21 nt, Human herpesvirus 4 [Epstein-Barr virus]
gggccaggucacagaccagcc

SEQ ID NO: 1942064 - RNA, 22 nt, Human herpesvirus 4 [Epstein-Barr virus]
guccucaaggauggcacgggca

SEQ ID NO: 1942065 - RNA, 13 nt, Human herpesvirus 4 [Epstein-Barr virus]
aacauaaaugccc

SEQ ID NO: 1942066 - RNA, 23 nt, Human herpesvirus 4 [Epstein-Barr virus]
cacaggacaacggcauucccgug

SEQ ID NO: 1942067 - RNA, 22 nt, Human herpesvirus 4 [Epstein-Barr virus]
cccacgugaacauccugcgugg

SEQ ID NO: 1942068 - RNA, 18 nt, Human herpesvirus 4 [Epstein-Barr virus]
cauguguacuuguccuca

SEQ ID NO: 1942069 - RNA, 13 nt, Human herpesvirus 4 [Epstein-Barr virus]
caccagaucgccu

SEQ ID NO: 1942070 - RNA, 17 nt, Human herpesvirus 4 [Epstein-Barr virus]
agggaaaggaagggggc

SEQ ID NO: 1942071 - RNA, 15 nt, Human herpesvirus 4 [Epstein-Barr virus]
cagggguguaguggg

SEQ ID NO: 1942072 - RNA, 16 nt, Human herpesvirus 4 [Epstein-Barr virus]
ggucgcccccucugcc

SEQ ID NO: 1942073 - RNA, 18 nt, Human herpesvirus 4 [Epstein-Barr virus]
gguccuccacggggacac

SEQ ID NO: 1942074 - RNA, 19 nt, Human herpesvirus 4 [Epstein-Barr virus]
ggagacacaucuggaccag

SEQ ID NO: 1942075 - RNA, 15 nt, Human herpesvirus 4 [Epstein-Barr virus]
cagacucugcuuucu

SEQ ID NO: 1942076 - RNA, 19 nt, Human herpesvirus 4 [Epstein-Barr virus]
cucugauggccuggagagc

SEQ ID NO: 1942077 - RNA, 17 nt, Human herpesvirus 4 [Epstein-Barr virus]
cuacaccaccccaccau

SEQ ID NO: 1942078 - RNA, 20 nt, Human herpesvirus 4 [Epstein-Barr virus]
ugggaacacggagaucucag

SEQ ID NO: 1942079 - RNA, 15 nt, Human herpesvirus 4 [Epstein-Barr virus]
augcgaaacuacagg

SEQ ID NO: 1942080 - RNA, 15 nt, Human herpesvirus 4 [Epstein-Barr virus]
cgccucauccuggcc

SEQ ID NO: 1942081 - RNA, 24 nt, Human herpesvirus 4 [Epstein-Barr virus]
cacuuuguacagacuuuuggcaau

SEQ ID NO: 1942082 - RNA, 17 nt, Human herpesvirus 4 [Epstein-Barr virus]
cggagcccugcccuccu

SEQ ID NO: 1942083 - RNA, 18 nt, Human herpesvirus 4 [Epstein-Barr virus]
gagaggcccgggggccuu

SEQ ID NO: 1942084 - RNA, 20 nt, Human herpesvirus 4 [Epstein-Barr virus]
uuccaugacgcugcugcuac

SEQ ID NO: 1942085 - RNA, 18 nt, Human herpesvirus 4 [Epstein-Barr virus]
gcaggcauuuuuggugcu

SEQ ID NO: 1942086 - RNA, 22 nt, Human herpesvirus 4 [Epstein-Barr virus]
acgccugcuucacgccucguuu

SEQ ID NO: 1942087 - RNA, 17 nt, Human herpesvirus 4 [Epstein-Barr virus]
uguauaaugacuaugag

SEQ ID NO: 1942088 - RNA, 17 nt, Human herpesvirus 4 [Epstein-Barr virus]
ccuccauuccacccacu

SEQ ID NO: 1942089 - RNA, 13 nt, Human herpesvirus 4 [Epstein-Barr virus]
guugggguccuca

SEQ ID NO: 1942090 - RNA, 17 nt, Human herpesvirus 4 [Epstein-Barr virus]
gcacgguccagaagcag

SEQ ID NO: 1942091 - RNA, 18 nt, Human herpesvirus 4 [Epstein-Barr virus]
uuaaggugguuauuuugg

SEQ ID NO: 1942092 - RNA, 21 nt, Human herpesvirus 4 [Epstein-Barr virus]
cggguggagauagggaccaga

SEQ ID NO: 1942093 - RNA, 21 nt, Human herpesvirus 4 [Epstein-Barr virus]
cuucugaggcggcuguggccu

SEQ ID NO: 1942094 - RNA, 15 nt, Human herpesvirus 4 [Epstein-Barr virus]
acgcuccuucuuggc

SEQ ID NO: 1942095 - RNA, 19 nt, Human herpesvirus 4 [Epstein-Barr virus]
ccuccaaucaccagccacc

SEQ ID NO: 1942096 - RNA, 14 nt, Human herpesvirus 4 [Epstein-Barr virus]
cggggcggcggugg

SEQ ID NO: 1942097 - RNA, 12 nt, Human herpesvirus 4 [Epstein-Barr virus]
cccgggagccac

SEQ ID NO: 1942098 - RNA, 19 nt, Human herpesvirus 4 [Epstein-Barr virus]
cuugaucuucuucucccuc

SEQ ID NO: 1942099 - RNA, 15 nt, Human herpesvirus 4 [Epstein-Barr virus]
uuccuucucaugcuc

SEQ ID NO: 1942100 - RNA, 23 nt, Human herpesvirus 4 [Epstein-Barr virus]
cccguccagcaggcucaggccgc

SEQ ID NO: 1942101 - RNA, 17 nt, Human herpesvirus 4 [Epstein-Barr virus]
agcgccuccucgcaggc

SEQ ID NO: 1942102 - RNA, 17 nt, Human herpesvirus 4 [Epstein-Barr virus]
gagcuugaggccagaga

SEQ ID NO: 1942103 - RNA, 21 nt, Human herpesvirus 4 [Epstein-Barr virus]
ccccggggacaccugcacgag

SEQ ID NO: 1942104 - RNA, 15 nt, Human herpesvirus 4 [Epstein-Barr virus]
ggccacacagccuga

SEQ ID NO: 1942105 - RNA, 15 nt, Human herpesvirus 4 [Epstein-Barr virus]
accaggcgccgcagg

SEQ ID NO: 1942106 - RNA, 16 nt, Human herpesvirus 4 [Epstein-Barr virus]
cauguaacaagaacug

SEQ ID NO: 1942107 - RNA, 11 nt, Human herpesvirus 4 [Epstein-Barr virus]
ccgaacauggg

SEQ ID NO: 1942108 - RNA, 14 nt, Human herpesvirus 4 [Epstein-Barr virus]
agauccugggcccc

SEQ ID NO: 1942109 - RNA, 22 nt, Human herpesvirus 4 [Epstein-Barr virus]
ccgaugcccaccagccagcgac

SEQ ID NO: 1942110 - RNA, 12 nt, Human herpesvirus 4 [Epstein-Barr virus]
cacaccauccca

SEQ ID NO: 1942111 - RNA, 21 nt, Human herpesvirus 4 [Epstein-Barr virus]
ucuuccugucggcucucuuug

SEQ ID NO: 1942112 - RNA, 20 nt, Human herpesvirus 4 [Epstein-Barr virus]
gggcaucuuaucagagaggc

SEQ ID NO: 1942113 - RNA, 18 nt, Human herpesvirus 4 [Epstein-Barr virus]
gccgcuuacagccagaga

SEQ ID NO: 1942114 - RNA, 14 nt, Human herpesvirus 4 [Epstein-Barr virus]
cggcucucaggccu

SEQ ID NO: 1942115 - RNA, 16 nt, Human herpesvirus 4 [Epstein-Barr virus]
cagcuccagggccagc

SEQ ID NO: 1942116 - RNA, 13 nt, Human herpesvirus 4 [Epstein-Barr virus]
cgaccugccaaag

SEQ ID NO: 1942117 - RNA, 22 nt, Human herpesvirus 4 [Epstein-Barr virus]
ccucugaugguggccggcagcc

SEQ ID NO: 1942118 - RNA, 17 nt, Human herpesvirus 4 [Epstein-Barr virus]
cgccuggggauaagaaa

SEQ ID NO: 1942119 - RNA, 14 nt, Human herpesvirus 4 [Epstein-Barr virus]
ccgccagcgccucc

SEQ ID NO: 1942120 - RNA, 22 nt, Human herpesvirus 4 [Epstein-Barr virus]
gagacggugaccugacuggcag

SEQ ID NO: 1942121 - RNA, 14 nt, Human herpesvirus 4 [Epstein-Barr virus]
cagucgcugcugca

SEQ ID NO: 1942122 - RNA, 13 nt, Human herpesvirus 4 [Epstein-Barr virus]
cugcugcugcugg

SEQ ID NO: 1942123 - RNA, 14 nt, Human herpesvirus 4 [Epstein-Barr virus]
gcugagcgugugca

SEQ ID NO: 1942124 - RNA, 23 nt, Human herpesvirus 4 [Epstein-Barr virus]
aacauuugaggaggcacacaaaa

SEQ ID NO: 1942125 - RNA, 17 nt, Human herpesvirus 4 [Epstein-Barr virus]
gccguggcgccugggga

SEQ ID NO: 1942126 - RNA, 22 nt, Human herpesvirus 4 [Epstein-Barr virus]
uguccucccgggguccagaguu

SEQ ID NO: 1942127 - RNA, 13 nt, Human herpesvirus 4 [Epstein-Barr virus]
cuacaacaggcug

SEQ ID NO: 1942128 - RNA, 14 nt, Human herpesvirus 4 [Epstein-Barr virus]
acuacuuguuucug

SEQ ID NO: 1942129 - RNA, 13 nt, Human herpesvirus 4 [Epstein-Barr virus]
cacauucggguga

SEQ ID NO: 1942130 - RNA, 19 nt, Human herpesvirus 4 [Epstein-Barr virus]
ucccccaaacauguccugu

SEQ ID NO: 1942131 - RNA, 15 nt, Human herpesvirus 4 [Epstein-Barr virus]
uacuuugggguauuc

SEQ ID NO: 1942132 - RNA, 19 nt, Human herpesvirus 4 [Epstein-Barr virus]
cccaggcagccuugcgugg

SEQ ID NO: 1942133 - RNA, 18 nt, Human herpesvirus 4 [Epstein-Barr virus]
agcucaaccgccagggcg

SEQ ID NO: 1942134 - RNA, 13 nt, Human herpesvirus 4 [Epstein-Barr virus]
ucgaguucucuag

SEQ ID NO: 1942135 - RNA, 17 nt, Human herpesvirus 4 [Epstein-Barr virus]
cccggcccucuuccgug

SEQ ID NO: 1942136 - RNA, 21 nt, Human herpesvirus 4 [Epstein-Barr virus]
cgaggcugagaacugacgcuc

SEQ ID NO: 1942137 - RNA, 20 nt, Human herpesvirus 4 [Epstein-Barr virus]
ccuagagguuuugcuaggga

SEQ ID NO: 1942138 - RNA, 17 nt, Human herpesvirus 4 [Epstein-Barr virus]
uucuggccaaccugccu

SEQ ID NO: 1942139 - RNA, 23 nt, Human herpesvirus 4 [Epstein-Barr virus]
ucuuguaacggcauagggggagg

SEQ ID NO: 1942140 - RNA, 22 nt, Human herpesvirus 4 [Epstein-Barr virus]
aguaaccacauauacuggagau

SEQ ID NO: 1942141 - RNA, 14 nt, Human herpesvirus 4 [Epstein-Barr virus]
cagcgcuggcucca

SEQ ID NO: 1942142 - RNA, 12 nt, Human herpesvirus 4 [Epstein-Barr virus]
cccucuccagca

SEQ ID NO: 1942143 - RNA, 14 nt, Human herpesvirus 4 [Epstein-Barr virus]
caugacacaggaca

SEQ ID NO: 1942144 - RNA, 18 nt, Human herpesvirus 4 [Epstein-Barr virus]
cagcagcccggccgaggc

SEQ ID NO: 1942145 - RNA, 20 nt, Human herpesvirus 4 [Epstein-Barr virus]
cucuucagugaccggacggg

SEQ ID NO: 1942146 - RNA, 17 nt, Human herpesvirus 4 [Epstein-Barr virus]
gaugucggggcugcugg

SEQ ID NO: 1942147 - RNA, 22 nt, Human herpesvirus 4 [Epstein-Barr virus]
accucuguuccuucugcuccag

SEQ ID NO: 1942148 - RNA, 21 nt, Human herpesvirus 4 [Epstein-Barr virus]
cggccugcuggccgagcugga

SEQ ID NO: 1942149 - RNA, 16 nt, Human herpesvirus 4 [Epstein-Barr virus]
guuaacuuucuccccu

SEQ ID NO: 1942150 - RNA, 20 nt, Human herpesvirus 4 [Epstein-Barr virus]
ugcugccagagccucugcca

SEQ ID NO: 1942151 - RNA, 15 nt, Human herpesvirus 4 [Epstein-Barr virus]
ugccugccuguaauu

SEQ ID NO: 1942152 - RNA, 18 nt, Human herpesvirus 4 [Epstein-Barr virus]
ugaagcaacccccggcuc

SEQ ID NO: 1942153 - RNA, 17 nt, Human herpesvirus 4 [Epstein-Barr virus]
gccauucgacaggccau

SEQ ID NO: 1942154 - RNA, 13 nt, Human herpesvirus 4 [Epstein-Barr virus]
cguggagguuguc

SEQ ID NO: 1942155 - RNA, 17 nt, Human herpesvirus 4 [Epstein-Barr virus]
guguccagguguggaaa

SEQ ID NO: 1942156 - RNA, 16 nt, Human herpesvirus 4 [Epstein-Barr virus]
acugcgagggggccug

SEQ ID NO: 1942157 - RNA, 15 nt, Human herpesvirus 4 [Epstein-Barr virus]
cguccuuugggaaca

SEQ ID NO: 1942158 - RNA, 18 nt, Human herpesvirus 4 [Epstein-Barr virus]
cacaccaucccaauucac

SEQ ID NO: 1942159 - RNA, 14 nt, Human herpesvirus 4 [Epstein-Barr virus]
ccagcagggcacag

SEQ ID NO: 1942160 - RNA, 17 nt, Human herpesvirus 4 [Epstein-Barr virus]
gagaagggagacacauc

SEQ ID NO: 1942161 - RNA, 13 nt, Human herpesvirus 4 [Epstein-Barr virus]
ccaugaccagcag

SEQ ID NO: 1942162 - RNA, 17 nt, Human herpesvirus 4 [Epstein-Barr virus]
uaaaauuuacaccugac

SEQ ID NO: 1942163 - RNA, 22 nt, Human herpesvirus 4 [Epstein-Barr virus]
ccacuaucacccauggccaggc

SEQ ID NO: 1942164 - RNA, 21 nt, Human herpesvirus 4 [Epstein-Barr virus]
cucuggucgcccccucugccu

SEQ ID NO: 1942165 - RNA, 13 nt, Human herpesvirus 4 [Epstein-Barr virus]
gaaccagaaagau

SEQ ID NO: 1942166 - RNA, 16 nt, Human herpesvirus 4 [Epstein-Barr virus]
aggauaaucugggcag

SEQ ID NO: 1942167 - RNA, 19 nt, Human herpesvirus 4 [Epstein-Barr virus]
auacuucucuagagccagg

SEQ ID NO: 1942168 - RNA, 23 nt, Human herpesvirus 4 [Epstein-Barr virus]
aauaaauaucuuccugucggcuc

SEQ ID NO: 1942169 - RNA, 18 nt, Human herpesvirus 4 [Epstein-Barr virus]
ggcugcuauagugagcca

SEQ ID NO: 1942170 - RNA, 14 nt, Human herpesvirus 4 [Epstein-Barr virus]
auguccacugagca

SEQ ID NO: 1942171 - RNA, 16 nt, Human herpesvirus 4 [Epstein-Barr virus]
auugccauguccaagu

SEQ ID NO: 1942172 - RNA, 23 nt, Human herpesvirus 4 [Epstein-Barr virus]
cccagccuacucuccacucccag

SEQ ID NO: 1942173 - RNA, 20 nt, Human herpesvirus 4 [Epstein-Barr virus]
ugcugcucggggcaugcugc

SEQ ID NO: 1942174 - RNA, 14 nt, Human herpesvirus 4 [Epstein-Barr virus]
uuuacaucugcccg

SEQ ID NO: 1942175 - RNA, 18 nt, Human herpesvirus 4 [Epstein-Barr virus]
ggagccaccacagcacaa

SEQ ID NO: 1942176 - RNA, 21 nt, Human herpesvirus 4 [Epstein-Barr virus]
uccgggucaggucgcggacca

SEQ ID NO: 1942177 - RNA, 15 nt, Human herpesvirus 4 [Epstein-Barr virus]
ggaggacgugaguga

SEQ ID NO: 1942178 - RNA, 21 nt, Human herpesvirus 4 [Epstein-Barr virus]
gccgccggauggccuaugggu

SEQ ID NO: 1942179 - RNA, 15 nt, Human herpesvirus 4 [Epstein-Barr virus]
cucccgccccugucc

SEQ ID NO: 1942180 - RNA, 19 nt, Human herpesvirus 4 [Epstein-Barr virus]
cugccgcuacugcugcuac

SEQ ID NO: 1942181 - RNA, 16 nt, Human herpesvirus 4 [Epstein-Barr virus]
cccagcccuccucaga

SEQ ID NO: 1942182 - RNA, 14 nt, Human herpesvirus 4 [Epstein-Barr virus]
gcacccggggaacc

SEQ ID NO: 1942183 - RNA, 22 nt, Human herpesvirus 4 [Epstein-Barr virus]
auuuacgguuagugugccucug

SEQ ID NO: 1942184 - RNA, 13 nt, Human herpesvirus 4 [Epstein-Barr virus]
ccgccagcagccc

SEQ ID NO: 1942185 - RNA, 14 nt, Human herpesvirus 4 [Epstein-Barr virus]
caugagcuccucuc

SEQ ID NO: 1942186 - RNA, 22 nt, Human herpesvirus 4 [Epstein-Barr virus]
cacucauggugugagacuggaa

SEQ ID NO: 1942187 - RNA, 23 nt, Human herpesvirus 4 [Epstein-Barr virus]
cagcgagagcgacgaggaugaag

SEQ ID NO: 1942188 - RNA, 19 nt, Human herpesvirus 4 [Epstein-Barr virus]
cgcccugucccuggagcug

SEQ ID NO: 1942189 - RNA, 20 nt, Human herpesvirus 4 [Epstein-Barr virus]
uagcagaagacuccugccug

SEQ ID NO: 1942190 - RNA, 16 nt, Human herpesvirus 4 [Epstein-Barr virus]
acgacuauccaggucu

SEQ ID NO: 1942191 - RNA, 19 nt, Human herpesvirus 4 [Epstein-Barr virus]
uccuacacacaucagaccu

SEQ ID NO: 1942192 - RNA, 16 nt, Human herpesvirus 4 [Epstein-Barr virus]
cugcguccucuaccug

SEQ ID NO: 1942193 - RNA, 18 nt, Human herpesvirus 4 [Epstein-Barr virus]
ggagggcacucgcccacu

SEQ ID NO: 1942194 - RNA, 24 nt, Human herpesvirus 4 [Epstein-Barr virus]
cucugaugguggccggcagccugg

SEQ ID NO: 1942195 - RNA, 14 nt, Human herpesvirus 4 [Epstein-Barr virus]
aaggccgcugccag

SEQ ID NO: 1942196 - RNA, 22 nt, Human herpesvirus 4 [Epstein-Barr virus]
gcuccgugagcaggagcuugag

SEQ ID NO: 1942197 - RNA, 15 nt, Human herpesvirus 4 [Epstein-Barr virus]
ggcaggaggggcagg

SEQ ID NO: 1942198 - RNA, 14 nt, Human herpesvirus 4 [Epstein-Barr virus]
gaacccuagccacc

SEQ ID NO: 1942199 - RNA, 21 nt, Human herpesvirus 4 [Epstein-Barr virus]
agggaguguuccacaguaaug

SEQ ID NO: 1942200 - RNA, 12 nt, Human herpesvirus 4 [Epstein-Barr virus]
auguucagagcu

SEQ ID NO: 1942201 - RNA, 17 nt, Human herpesvirus 4 [Epstein-Barr virus]
cgccuuaugaggaccca

SEQ ID NO: 1942202 - RNA, 21 nt, Human herpesvirus 4 [Epstein-Barr virus]
ggcccugagcauggcggccug

SEQ ID NO: 1942203 - RNA, 19 nt, Human herpesvirus 4 [Epstein-Barr virus]
cuccguccuuguccaggag

SEQ ID NO: 1942204 - RNA, 17 nt, Human herpesvirus 4 [Epstein-Barr virus]
uccacaccauccacagc

SEQ ID NO: 1942205 - RNA, 12 nt, Human herpesvirus 4 [Epstein-Barr virus]
agcuucaaguua

SEQ ID NO: 1942206 - RNA, 20 nt, Human herpesvirus 4 [Epstein-Barr virus]
ugcugaggcccguccccuga

SEQ ID NO: 1942207 - RNA, 17 nt, Human herpesvirus 4 [Epstein-Barr virus]
guggguccccucugccg

SEQ ID NO: 1942208 - RNA, 13 nt, Human herpesvirus 4 [Epstein-Barr virus]
ccccgccaccacg

SEQ ID NO: 1942209 - RNA, 17 nt, Human herpesvirus 4 [Epstein-Barr virus]
aacuuugagcugggcaa

SEQ ID NO: 1942210 - RNA, 17 nt, Human herpesvirus 4 [Epstein-Barr virus]
caaacagcagcagcagu

SEQ ID NO: 1942211 - RNA, 16 nt, Human herpesvirus 4 [Epstein-Barr virus]
cgaaucugacauuucu

SEQ ID NO: 1942212 - RNA, 23 nt, Human herpesvirus 4 [Epstein-Barr virus]
aggccucucucgaguucucuagc

SEQ ID NO: 1942213 - RNA, 22 nt, Human herpesvirus 4 [Epstein-Barr virus]
ugacgcuccaggaucucccgcg

SEQ ID NO: 1942214 - RNA, 15 nt, Human herpesvirus 4 [Epstein-Barr virus]
ucagccuccaacagg

SEQ ID NO: 1942215 - RNA, 19 nt, Human herpesvirus 4 [Epstein-Barr virus]
gcauuaauguccagugggg

SEQ ID NO: 1942216 - RNA, 18 nt, Human herpesvirus 4 [Epstein-Barr virus]
cagugccuccgccugagc

SEQ ID NO: 1942217 - RNA, 13 nt, Human herpesvirus 4 [Epstein-Barr virus]
cccagacucugcu

SEQ ID NO: 1942218 - RNA, 19 nt, Human herpesvirus 4 [Epstein-Barr virus]
cgaggcugagggggcgguc

SEQ ID NO: 1942219 - RNA, 18 nt, Human herpesvirus 4 [Epstein-Barr virus]
acuuccacagcaauggca

SEQ ID NO: 1942220 - RNA, 18 nt, Human herpesvirus 4 [Epstein-Barr virus]
gcuccggauucaccggca

SEQ ID NO: 1942221 - RNA, 13 nt, Human herpesvirus 4 [Epstein-Barr virus]
ggccuuagcccag

SEQ ID NO: 1942222 - RNA, 15 nt, Human herpesvirus 4 [Epstein-Barr virus]
gggaugaacccuggg

SEQ ID NO: 1942223 - RNA, 11 nt, Human herpesvirus 4 [Epstein-Barr virus]
cgggagccacg

SEQ ID NO: 1942224 - RNA, 23 nt, Human herpesvirus 4 [Epstein-Barr virus]
cagauuuccgaaccuugucuuca

SEQ ID NO: 1942225 - RNA, 19 nt, Human herpesvirus 4 [Epstein-Barr virus]
ccgcuccguggccccggga

SEQ ID NO: 1942226 - RNA, 17 nt, Human herpesvirus 4 [Epstein-Barr virus]
ugcccauggaaugcuca

SEQ ID NO: 1942227 - RNA, 23 nt, Human herpesvirus 4 [Epstein-Barr virus]
guggcacacauuacggugcugga

SEQ ID NO: 1942228 - RNA, 23 nt, Human herpesvirus 4 [Epstein-Barr virus]
aggggcucgaauaugaugaggac

SEQ ID NO: 1942229 - RNA, 17 nt, Human herpesvirus 4 [Epstein-Barr virus]
guuauguuuuccccaug

SEQ ID NO: 1942230 - RNA, 21 nt, Human herpesvirus 4 [Epstein-Barr virus]
gucaggucgcggaccaggguc

SEQ ID NO: 1942231 - RNA, 21 nt, Human herpesvirus 4 [Epstein-Barr virus]
ugguuccccccaucuuugagg

SEQ ID NO: 1942232 - RNA, 13 nt, Human herpesvirus 4 [Epstein-Barr virus]
ucuccccugacgc

SEQ ID NO: 1942233 - RNA, 19 nt, Human herpesvirus 4 [Epstein-Barr virus]
ccgggcccagcccuccuca

SEQ ID NO: 1942234 - RNA, 18 nt, Human herpesvirus 4 [Epstein-Barr virus]
gcuguugacaugagcaug

SEQ ID NO: 1942235 - RNA, 19 nt, Human herpesvirus 4 [Epstein-Barr virus]
cucagagagcauuucaggc

SEQ ID NO: 1942236 - RNA, 19 nt, Human herpesvirus 4 [Epstein-Barr virus]
gauuaggcacuggacacac

SEQ ID NO: 1942237 - RNA, 16 nt, Human herpesvirus 4 [Epstein-Barr virus]
gcaaccuugggggcaa

SEQ ID NO: 1942238 - RNA, 22 nt, Human herpesvirus 4 [Epstein-Barr virus]
gcaccuccucgaaggugcagcu

SEQ ID NO: 1942239 - RNA, 23 nt, Human herpesvirus 4 [Epstein-Barr virus]
gguugucuucccagacucugcuu

SEQ ID NO: 1942240 - RNA, 17 nt, Human herpesvirus 4 [Epstein-Barr virus]
uaggagcccgggccagc

SEQ ID NO: 1942241 - RNA, 14 nt, Human herpesvirus 4 [Epstein-Barr virus]
ccucuaaguacagg

SEQ ID NO: 1942242 - RNA, 13 nt, Human herpesvirus 4 [Epstein-Barr virus]
ugcguggcuggac

SEQ ID NO: 1942243 - RNA, 19 nt, Human herpesvirus 4 [Epstein-Barr virus]
cguggugcuguccugcuga

SEQ ID NO: 1942244 - RNA, 14 nt, Human herpesvirus 4 [Epstein-Barr virus]
agccuccgggccgc

SEQ ID NO: 1942245 - RNA, 20 nt, Human herpesvirus 4 [Epstein-Barr virus]
cuucagcuccagggccagca

SEQ ID NO: 1942246 - RNA, 18 nt, Human herpesvirus 4 [Epstein-Barr virus]
ugccgugguugggcagaa

SEQ ID NO: 1942247 - RNA, 21 nt, Human herpesvirus 4 [Epstein-Barr virus]
cagggcccguuccaggcucuc

SEQ ID NO: 1942248 - RNA, 15 nt, Human herpesvirus 4 [Epstein-Barr virus]
agugguucuccugau

SEQ ID NO: 1942249 - RNA, 14 nt, Human herpesvirus 4 [Epstein-Barr virus]
uaagcuuaugagcg

SEQ ID NO: 1942250 - RNA, 17 nt, Human herpesvirus 4 [Epstein-Barr virus]
ggacccccggagucugg

SEQ ID NO: 1942251 - RNA, 18 nt, Human herpesvirus 4 [Epstein-Barr virus]
auagaggggagcagaggu

SEQ ID NO: 1942252 - RNA, 12 nt, Human herpesvirus 4 [Epstein-Barr virus]
gcguggguguca

SEQ ID NO: 1942253 - RNA, 18 nt, Human herpesvirus 4 [Epstein-Barr virus]
uaaacauugcaccuugcc

SEQ ID NO: 1942254 - RNA, 15 nt, Human herpesvirus 4 [Epstein-Barr virus]
cccaauucacaucuc

SEQ ID NO: 1942255 - RNA, 19 nt, Human herpesvirus 4 [Epstein-Barr virus]
gauggccuccagcucggcc

SEQ ID NO: 1942256 - RNA, 20 nt, Human herpesvirus 4 [Epstein-Barr virus]
cccgacaaugagcggggaga

SEQ ID NO: 1942257 - RNA, 16 nt, Human herpesvirus 4 [Epstein-Barr virus]
aacuugggggcaggcu

SEQ ID NO: 1942258 - RNA, 16 nt, Human herpesvirus 4 [Epstein-Barr virus]
uaaaugcaccuugacu

SEQ ID NO: 1942259 - RNA, 15 nt, Human herpesvirus 4 [Epstein-Barr virus]
ugauaaugucuucaa

SEQ ID NO: 1942260 - RNA, 17 nt, Human herpesvirus 4 [Epstein-Barr virus]
cugcggcccacugaaaa

SEQ ID NO: 1942261 - RNA, 20 nt, Human herpesvirus 4 [Epstein-Barr virus]
gucuugccguggcgccuggg

SEQ ID NO: 1942262 - RNA, 16 nt, Human herpesvirus 4 [Epstein-Barr virus]
gaccaaugccaaagcu

SEQ ID NO: 1942263 - RNA, 15 nt, Human herpesvirus 4 [Epstein-Barr virus]
aggggcaggagcagg

SEQ ID NO: 1942264 - RNA, 16 nt, Human herpesvirus 4 [Epstein-Barr virus]
cccuccucugggccgc

SEQ ID NO: 1942265 - RNA, 19 nt, Human herpesvirus 4 [Epstein-Barr virus]
ccagcuccgugguccugag

SEQ ID NO: 1942266 - RNA, 21 nt, Human herpesvirus 4 [Epstein-Barr virus]
cggcaucaccguggagccggg

SEQ ID NO: 1942267 - RNA, 13 nt, Human herpesvirus 4 [Epstein-Barr virus]
cuuccaugucuac

SEQ ID NO: 1942268 - RNA, 21 nt, Human herpesvirus 4 [Epstein-Barr virus]
cuccucgcaggccccccgcac

SEQ ID NO: 1942269 - RNA, 16 nt, Human herpesvirus 4 [Epstein-Barr virus]
uuagccccagccccuc

SEQ ID NO: 1942270 - RNA, 15 nt, Human herpesvirus 4 [Epstein-Barr virus]
cugagcaccaacaca

SEQ ID NO: 1942271 - RNA, 17 nt, Human herpesvirus 4 [Epstein-Barr virus]
gcuccaccagcuucuca

SEQ ID NO: 1942272 - RNA, 19 nt, Human herpesvirus 4 [Epstein-Barr virus]
acguacccauaacugggca

SEQ ID NO: 1942273 - RNA, 16 nt, Human herpesvirus 4 [Epstein-Barr virus]
auuacuggcgugaauu

SEQ ID NO: 1942274 - RNA, 9 nt, Human herpesvirus 4 [Epstein-Barr virus]
cuggcucuc

SEQ ID NO: 1942275 - RNA, 15 nt, Human herpesvirus 4 [Epstein-Barr virus]
guucccggcacacca

SEQ ID NO: 1942276 - RNA, 22 nt, Human herpesvirus 4 [Epstein-Barr virus]
gcagccacguccagacuccggg

SEQ ID NO: 1942277 - RNA, 19 nt, Human herpesvirus 4 [Epstein-Barr virus]
ggagcacauuccccccgcc

SEQ ID NO: 1942278 - RNA, 14 nt, Human herpesvirus 4 [Epstein-Barr virus]
gcuaauagcuuucu

SEQ ID NO: 1942279 - RNA, 14 nt, Human herpesvirus 4 [Epstein-Barr virus]
gaccggcgcgggag

SEQ ID NO: 1942280 - RNA, 15 nt, Human herpesvirus 4 [Epstein-Barr virus]
ugguucuccugauuu

SEQ ID NO: 1942281 - RNA, 16 nt, Human herpesvirus 4 [Epstein-Barr virus]
uccauuccacccacug

SEQ ID NO: 1942282 - RNA, 15 nt, Human herpesvirus 4 [Epstein-Barr virus]
caggguccaggagaa

SEQ ID NO: 1942283 - RNA, 13 nt, Human herpesvirus 4 [Epstein-Barr virus]
gaccugugucugu

SEQ ID NO: 1942284 - RNA, 20 nt, Human herpesvirus 4 [Epstein-Barr virus]
caggccccccgcaccagggc

SEQ ID NO: 1942285 - RNA, 20 nt, Human herpesvirus 4 [Epstein-Barr virus]
gaugcccaccagccagcgac

SEQ ID NO: 1942286 - RNA, 15 nt, Human herpesvirus 4 [Epstein-Barr virus]
caccugcacagaucu

SEQ ID NO: 1942287 - RNA, 21 nt, Human herpesvirus 4 [Epstein-Barr virus]
cagaccagccccucaucccug

SEQ ID NO: 1942288 - RNA, 20 nt, Human herpesvirus 4 [Epstein-Barr virus]
gccaaccugcucucucugga

SEQ ID NO: 1942289 - RNA, 18 nt, Human herpesvirus 4 [Epstein-Barr virus]
gccccgaaagcggcccag

SEQ ID NO: 1942290 - RNA, 14 nt, Human herpesvirus 4 [Epstein-Barr virus]
ggcccuggcccacc

SEQ ID NO: 1942291 - RNA, 23 nt, Human herpesvirus 4 [Epstein-Barr virus]
cagcgaccggcagaucccgcauu

SEQ ID NO: 1942292 - RNA, 18 nt, Human herpesvirus 4 [Epstein-Barr virus]
uagccaccguggccaggc

SEQ ID NO: 1942293 - RNA, 23 nt, Human herpesvirus 4 [Epstein-Barr virus]
gacgaagacccaucugagggcag

SEQ ID NO: 1942294 - RNA, 14 nt, Human herpesvirus 4 [Epstein-Barr virus]
cuccucgcaggccc

SEQ ID NO: 1942295 - RNA, 17 nt, Human herpesvirus 4 [Epstein-Barr virus]
cgcaacgccggccugcu

SEQ ID NO: 1942296 - RNA, 15 nt, Human herpesvirus 4 [Epstein-Barr virus]
gacuggggugugaag

SEQ ID NO: 1942297 - RNA, 15 nt, Human herpesvirus 4 [Epstein-Barr virus]
ucgcugcugcagcua

SEQ ID NO: 1942298 - RNA, 12 nt, Human herpesvirus 4 [Epstein-Barr virus]
gaagugggaccu

SEQ ID NO: 1942299 - RNA, 22 nt, Human herpesvirus 4 [Epstein-Barr virus]
gggcugguuggggagcuacaga

SEQ ID NO: 1942300 - RNA, 18 nt, Human herpesvirus 4 [Epstein-Barr virus]
guggaggggggcggcgug

SEQ ID NO: 1942301 - RNA, 17 nt, Human herpesvirus 4 [Epstein-Barr virus]
ugcccagacucaucuca

SEQ ID NO: 1942302 - RNA, 22 nt, Human herpesvirus 4 [Epstein-Barr virus]
aaaacucugcauggagaagcug

SEQ ID NO: 1942303 - RNA, 22 nt, Human herpesvirus 4 [Epstein-Barr virus]
uugcccucuccagcaaccaaug

SEQ ID NO: 1942304 - RNA, 19 nt, Human herpesvirus 4 [Epstein-Barr virus]
caugucugacgaggggcca

SEQ ID NO: 1942305 - RNA, 12 nt, Human herpesvirus 4 [Epstein-Barr virus]
cccggcucucag

SEQ ID NO: 1942306 - RNA, 14 nt, Human herpesvirus 4 [Epstein-Barr virus]
accacgcucuguuu

SEQ ID NO: 1942307 - RNA, 13 nt, Human herpesvirus 4 [Epstein-Barr virus]
agaagcuggacgu

SEQ ID NO: 1942308 - RNA, 21 nt, Human herpesvirus 4 [Epstein-Barr virus]
cagcccuuuuaacauuggcag

SEQ ID NO: 1942309 - RNA, 22 nt, Human herpesvirus 4 [Epstein-Barr virus]
uggcauugcggguggauagccu

SEQ ID NO: 1942310 - RNA, 14 nt, Human herpesvirus 4 [Epstein-Barr virus]
cuuccacagcaaug

SEQ ID NO: 1942311 - RNA, 21 nt, Human herpesvirus 4 [Epstein-Barr virus]
ugcugaauauugccagcgccu

SEQ ID NO: 1942312 - RNA, 19 nt, Human herpesvirus 4 [Epstein-Barr virus]
uggacuggggugugaaggg

SEQ ID NO: 1942313 - RNA, 16 nt, Human herpesvirus 4 [Epstein-Barr virus]
aggaggggcaggaggg

SEQ ID NO: 1942314 - RNA, 19 nt, Human herpesvirus 4 [Epstein-Barr virus]
cggaucgaaggagagcugg

SEQ ID NO: 1942315 - RNA, 15 nt, Human herpesvirus 4 [Epstein-Barr virus]
cggaaaucugcucuu

SEQ ID NO: 1942316 - RNA, 12 nt, Human herpesvirus 4 [Epstein-Barr virus]
agucgcugcugc

SEQ ID NO: 1942317 - RNA, 18 nt, Human herpesvirus 4 [Epstein-Barr virus]
aggcggaagaccaggagc

SEQ ID NO: 1942318 - RNA, 21 nt, Human herpesvirus 4 [Epstein-Barr virus]
gcagauagccggccaggcaga

SEQ ID NO: 1942319 - RNA, 23 nt, Human herpesvirus 4 [Epstein-Barr virus]
cucuaaaaaucaaaacuuuagag

SEQ ID NO: 1942320 - RNA, 15 nt, Human herpesvirus 4 [Epstein-Barr virus]
cucgugcaagcagca

SEQ ID NO: 1942321 - RNA, 17 nt, Human herpesvirus 4 [Epstein-Barr virus]
uuaagagucccuccuca

SEQ ID NO: 1942322 - RNA, 18 nt, Human herpesvirus 4 [Epstein-Barr virus]
acucccauguaagccugc

SEQ ID NO: 1942323 - RNA, 17 nt, Human herpesvirus 4 [Epstein-Barr virus]
ggacccggaccaaugcc

SEQ ID NO: 1942324 - RNA, 19 nt, Human herpesvirus 4 [Epstein-Barr virus]
aaaguuguccugggcugcc

SEQ ID NO: 1942325 - RNA, 12 nt, Human herpesvirus 4 [Epstein-Barr virus]
aucaucugaaaa

SEQ ID NO: 1942326 - RNA, 16 nt, Human herpesvirus 4 [Epstein-Barr virus]
gggaggcccaggaccu

SEQ ID NO: 1942327 - RNA, 22 nt, Human herpesvirus 4 [Epstein-Barr virus]
cuugcguggugcuguccugcug

SEQ ID NO: 1942328 - RNA, 18 nt, Human herpesvirus 4 [Epstein-Barr virus]
cagugaugaacaccacca

SEQ ID NO: 1942329 - RNA, 14 nt, Human herpesvirus 4 [Epstein-Barr virus]
cguguguggcugua

SEQ ID NO: 1942330 - RNA, 16 nt, Human herpesvirus 4 [Epstein-Barr virus]
acgcugguacccgcca

SEQ ID NO: 1942331 - RNA, 20 nt, Human herpesvirus 4 [Epstein-Barr virus]
cuaauggccguccucuggac

SEQ ID NO: 1942332 - RNA, 23 nt, Human herpesvirus 4 [Epstein-Barr virus]
ugcaagauaucacacccucggag

SEQ ID NO: 1942333 - RNA, 22 nt, Human herpesvirus 4 [Epstein-Barr virus]
cugaggguugguguccucccgg

SEQ ID NO: 1942334 - RNA, 21 nt, Human herpesvirus 4 [Epstein-Barr virus]
ugguggcauuaauguccagug

SEQ ID NO: 1942335 - RNA, 20 nt, Human herpesvirus 4 [Epstein-Barr virus]
cccagaccugugugcuguau

SEQ ID NO: 1942336 - RNA, 18 nt, Human herpesvirus 4 [Epstein-Barr virus]
aauucccucgaaucccua

SEQ ID NO: 1942337 - RNA, 14 nt, Human herpesvirus 4 [Epstein-Barr virus]
cacccccaccaccu

SEQ ID NO: 1942338 - RNA, 16 nt, Human herpesvirus 4 [Epstein-Barr virus]
aggcucuccagcccca

SEQ ID NO: 1942339 - RNA, 13 nt, Human herpesvirus 4 [Epstein-Barr virus]
gcguugccagacu

SEQ ID NO: 1942340 - RNA, 16 nt, Human herpesvirus 4 [Epstein-Barr virus]
gaccagcguguuucau

SEQ ID NO: 1942341 - RNA, 21 nt, Human herpesvirus 4 [Epstein-Barr virus]
gccucgaguaggugccuccag

SEQ ID NO: 1942342 - RNA, 15 nt, Human herpesvirus 4 [Epstein-Barr virus]
ccagcccuccucaga

SEQ ID NO: 1942343 - RNA, 13 nt, Human herpesvirus 4 [Epstein-Barr virus]
ggccaccaacguc

SEQ ID NO: 1942344 - RNA, 12 nt, Human herpesvirus 4 [Epstein-Barr virus]
guagaugagccu

SEQ ID NO: 1942345 - RNA, 17 nt, Human herpesvirus 4 [Epstein-Barr virus]
uccuagaaacugugcca

SEQ ID NO: 1942346 - RNA, 14 nt, Human herpesvirus 4 [Epstein-Barr virus]
ucagcacagccaga

SEQ ID NO: 1942347 - RNA, 22 nt, Human herpesvirus 4 [Epstein-Barr virus]
aaggugucaauaauuucaguga

SEQ ID NO: 1942348 - RNA, 23 nt, Human herpesvirus 4 [Epstein-Barr virus]
gaucgauuggaaaagggcccagg

SEQ ID NO: 1942349 - RNA, 19 nt, Human herpesvirus 4 [Epstein-Barr virus]
cagccgcuucagacagccg

SEQ ID NO: 1942350 - RNA, 22 nt, Human herpesvirus 4 [Epstein-Barr virus]
agaagcuacaaacacgggccug

SEQ ID NO: 1942351 - RNA, 21 nt, Human herpesvirus 4 [Epstein-Barr virus]
ugcccagacucaucucaaggg

SEQ ID NO: 1942352 - RNA, 17 nt, Human herpesvirus 4 [Epstein-Barr virus]
gcccccggagcccugcc

SEQ ID NO: 1942353 - RNA, 15 nt, Human herpesvirus 4 [Epstein-Barr virus]
gugcuguugggccuu

SEQ ID NO: 1942354 - RNA, 14 nt, Human herpesvirus 4 [Epstein-Barr virus]
cgaguggcagaauc

SEQ ID NO: 1942355 - RNA, 16 nt, Human herpesvirus 4 [Epstein-Barr virus]
ucuccugugugacccc

SEQ ID NO: 1942356 - RNA, 21 nt, Human herpesvirus 4 [Epstein-Barr virus]
ugcaucuuaccccuggcuucc

SEQ ID NO: 1942357 - RNA, 13 nt, Human herpesvirus 4 [Epstein-Barr virus]
ggaggagugcugc

SEQ ID NO: 1942358 - RNA, 16 nt, Human herpesvirus 4 [Epstein-Barr virus]
uccaggggccacacag

SEQ ID NO: 1942359 - RNA, 12 nt, Human herpesvirus 4 [Epstein-Barr virus]
gcccuggucagg

SEQ ID NO: 1942360 - RNA, 13 nt, Human herpesvirus 4 [Epstein-Barr virus]
cgggucucgccgc

SEQ ID NO: 1942361 - RNA, 16 nt, Human herpesvirus 4 [Epstein-Barr virus]
uggcacgguccagaag

SEQ ID NO: 1942362 - RNA, 15 nt, Human herpesvirus 4 [Epstein-Barr virus]
ccaccguggccaggc

SEQ ID NO: 1942363 - RNA, 23 nt, Human herpesvirus 4 [Epstein-Barr virus]
cuuggcagcaguggccagcucau

SEQ ID NO: 1942364 - RNA, 16 nt, Human herpesvirus 4 [Epstein-Barr virus]
caggaggggcaggagc

SEQ ID NO: 1942365 - RNA, 14 nt, Human herpesvirus 4 [Epstein-Barr virus]
cucuaaucccucug

SEQ ID NO: 1942366 - RNA, 23 nt, Human herpesvirus 4 [Epstein-Barr virus]
gcccugcccuccuccacccagca

SEQ ID NO: 1942367 - RNA, 12 nt, Human herpesvirus 4 [Epstein-Barr virus]
uggcagcagugg

SEQ ID NO: 1942368 - RNA, 16 nt, Human herpesvirus 4 [Epstein-Barr virus]
cggggguggaggcugc

SEQ ID NO: 1942369 - RNA, 19 nt, Human herpesvirus 4 [Epstein-Barr virus]
cucccaauauccaucugcu

SEQ ID NO: 1942370 - RNA, 12 nt, Human herpesvirus 4 [Epstein-Barr virus]
caacgccccugc

SEQ ID NO: 1942371 - RNA, 14 nt, Human herpesvirus 4 [Epstein-Barr virus]
ggacaugugcaugg

SEQ ID NO: 1942372 - RNA, 19 nt, Human herpesvirus 4 [Epstein-Barr virus]
accgccuuaugaggaccca

SEQ ID NO: 1942373 - RNA, 15 nt, Human herpesvirus 4 [Epstein-Barr virus]
agguagacgaggcac

SEQ ID NO: 1942374 - RNA, 22 nt, Human herpesvirus 4 [Epstein-Barr virus]
cccgcuuuugcgaccccucuga

SEQ ID NO: 1942375 - RNA, 12 nt, Human herpesvirus 4 [Epstein-Barr virus]
accggugggcuc

SEQ ID NO: 1942376 - RNA, 15 nt, Human herpesvirus 4 [Epstein-Barr virus]
ugcagucgcugcugc

SEQ ID NO: 1942377 - RNA, 18 nt, Human herpesvirus 4 [Epstein-Barr virus]
gugccugacggugccgcu

SEQ ID NO: 1942378 - RNA, 22 nt, Human herpesvirus 4 [Epstein-Barr virus]
cggggcgauaccuugggcauca

SEQ ID NO: 1942379 - RNA, 14 nt, Human herpesvirus 4 [Epstein-Barr virus]
gaagaucgugaggc

SEQ ID NO: 1942380 - RNA, 17 nt, Human herpesvirus 4 [Epstein-Barr virus]
ucacauugcaucgcuca

SEQ ID NO: 1942381 - RNA, 13 nt, Human herpesvirus 4 [Epstein-Barr virus]
acuacaccagucc

SEQ ID NO: 1942382 - RNA, 17 nt, Human herpesvirus 4 [Epstein-Barr virus]
ccgucaaggccucggag

SEQ ID NO: 1942383 - RNA, 14 nt, Human herpesvirus 4 [Epstein-Barr virus]
uuaaagccuccucg

SEQ ID NO: 1942384 - RNA, 13 nt, Human herpesvirus 4 [Epstein-Barr virus]
gccacguccccgg

SEQ ID NO: 1942385 - RNA, 18 nt, Human herpesvirus 4 [Epstein-Barr virus]
aagggcccagggucacug

SEQ ID NO: 1942386 - RNA, 15 nt, Human herpesvirus 4 [Epstein-Barr virus]
cuuuaaaggggagau

SEQ ID NO: 1942387 - RNA, 15 nt, Human herpesvirus 4 [Epstein-Barr virus]
gcccuggaggccuca

SEQ ID NO: 1942388 - RNA, 17 nt, Human herpesvirus 4 [Epstein-Barr virus]
cgagcagaaggccaugg

SEQ ID NO: 1942389 - RNA, 16 nt, Human herpesvirus 4 [Epstein-Barr virus]
cugcucucucuggaga

SEQ ID NO: 1942390 - RNA, 17 nt, Human herpesvirus 4 [Epstein-Barr virus]
caaggcagucuccaccu

SEQ ID NO: 1942391 - RNA, 16 nt, Human herpesvirus 4 [Epstein-Barr virus]
gccacacugucugucu

SEQ ID NO: 1942392 - RNA, 19 nt, Human herpesvirus 4 [Epstein-Barr virus]
auuugcugacauauguaca

SEQ ID NO: 1942393 - RNA, 16 nt, Human herpesvirus 4 [Epstein-Barr virus]
gguugcgcugcuugcc

SEQ ID NO: 1942394 - RNA, 19 nt, Human herpesvirus 4 [Epstein-Barr virus]
ggggcucaaggaggggcgg

SEQ ID NO: 1942395 - RNA, 17 nt, Human herpesvirus 4 [Epstein-Barr virus]
cuuggccccuguguaca

SEQ ID NO: 1942396 - RNA, 16 nt, Human herpesvirus 4 [Epstein-Barr virus]
gccacagagcaucaga

SEQ ID NO: 1942397 - RNA, 18 nt, Human herpesvirus 4 [Epstein-Barr virus]
cugacaccggugacagug

SEQ ID NO: 1942398 - RNA, 14 nt, Human herpesvirus 4 [Epstein-Barr virus]
gagucccuccucac

SEQ ID NO: 1942399 - RNA, 17 nt, Human herpesvirus 4 [Epstein-Barr virus]
acugauuuugggcacac

SEQ ID NO: 1942400 - RNA, 22 nt, Human herpesvirus 4 [Epstein-Barr virus]
gcggcccagcagauccagggcc

SEQ ID NO: 1942401 - RNA, 15 nt, Human herpesvirus 4 [Epstein-Barr virus]
caaacauaaaugccc

SEQ ID NO: 1942402 - RNA, 18 nt, Human herpesvirus 4 [Epstein-Barr virus]
ccgcccccaccaccccca

SEQ ID NO: 1942403 - RNA, 13 nt, Human herpesvirus 4 [Epstein-Barr virus]
accccacggagca

SEQ ID NO: 1942404 - RNA, 13 nt, Human herpesvirus 4 [Epstein-Barr virus]
ugggugggcauug

SEQ ID NO: 1942405 - RNA, 19 nt, Human herpesvirus 4 [Epstein-Barr virus]
ggcagcggacgguggggcu

SEQ ID NO: 1942406 - RNA, 19 nt, Human herpesvirus 4 [Epstein-Barr virus]
gagcagucgcauggcggga

SEQ ID NO: 1942407 - RNA, 15 nt, Human herpesvirus 4 [Epstein-Barr virus]
ccaugacgcugcugc

SEQ ID NO: 1942408 - RNA, 18 nt, Human herpesvirus 4 [Epstein-Barr virus]
acugcuagcgucacugau

SEQ ID NO: 1942409 - RNA, 17 nt, Human herpesvirus 4 [Epstein-Barr virus]
cagcucaaccgccaggg

SEQ ID NO: 1942410 - RNA, 20 nt, Human herpesvirus 4 [Epstein-Barr virus]
uugguccaggguccaggaga

SEQ ID NO: 1942411 - RNA, 14 nt, Human herpesvirus 4 [Epstein-Barr virus]
acuguucucugcuc

SEQ ID NO: 1942412 - RNA, 16 nt, Human herpesvirus 4 [Epstein-Barr virus]
ucacgucacucagcuc

SEQ ID NO: 1942413 - RNA, 18 nt, Human herpesvirus 4 [Epstein-Barr virus]
guuucuggaaugcuucua

SEQ ID NO: 1942414 - RNA, 15 nt, Human herpesvirus 4 [Epstein-Barr virus]
aaaggggagauguua

SEQ ID NO: 1942415 - RNA, 16 nt, Human herpesvirus 4 [Epstein-Barr virus]
ccccucccgccccugu

SEQ ID NO: 1942416 - RNA, 11 nt, Human herpesvirus 4 [Epstein-Barr virus]
cccagccacag

SEQ ID NO: 1942417 - RNA, 11 nt, Human herpesvirus 4 [Epstein-Barr virus]
uugggguccuc

SEQ ID NO: 1942418 - RNA, 21 nt, Human herpesvirus 4 [Epstein-Barr virus]
ggggcacucucgagggugccu

SEQ ID NO: 1942419 - RNA, 11 nt, Human herpesvirus 4 [Epstein-Barr virus]
guggaggcucg

SEQ ID NO: 1942420 - RNA, 20 nt, Human herpesvirus 4 [Epstein-Barr virus]
cagcuuaacgggaagagaag

SEQ ID NO: 1942421 - RNA, 22 nt, Human herpesvirus 4 [Epstein-Barr virus]
caacgccuuuuuccuagcuuau

SEQ ID NO: 1942422 - RNA, 24 nt, Human herpesvirus 4 [Epstein-Barr virus]
ggccagacggcgcuugcgucugcc

SEQ ID NO: 1942423 - RNA, 22 nt, Human herpesvirus 4 [Epstein-Barr virus]
cuccggauucaccggcaccgcc

SEQ ID NO: 1942424 - RNA, 21 nt, Human herpesvirus 4 [Epstein-Barr virus]
cuccaacgaggaucccgcagg

SEQ ID NO: 1942425 - RNA, 22 nt, Human herpesvirus 4 [Epstein-Barr virus]
guguauugcucucguugccaaa

SEQ ID NO: 1942426 - RNA, 13 nt, Human herpesvirus 4 [Epstein-Barr virus]
ggccugcugucau

SEQ ID NO: 1942427 - RNA, 18 nt, Human herpesvirus 4 [Epstein-Barr virus]
gccucuccguacccccuc

SEQ ID NO: 1942428 - RNA, 17 nt, Human herpesvirus 4 [Epstein-Barr virus]
gucuccuuguugaccuc

SEQ ID NO: 1942429 - RNA, 20 nt, Human herpesvirus 4 [Epstein-Barr virus]
auacucaucugugagacaag

SEQ ID NO: 1942430 - RNA, 23 nt, Human herpesvirus 4 [Epstein-Barr virus]
gucacgugaccuuuuccgccggc

SEQ ID NO: 1942431 - RNA, 21 nt, Human herpesvirus 4 [Epstein-Barr virus]
ggcgcaggggagggggcagga

SEQ ID NO: 1942432 - RNA, 20 nt, Human herpesvirus 4 [Epstein-Barr virus]
cuggccaugaaucugacucu

SEQ ID NO: 1942433 - RNA, 15 nt, Human herpesvirus 4 [Epstein-Barr virus]
uaugccauggccauu

SEQ ID NO: 1942434 - RNA, 16 nt, Human herpesvirus 4 [Epstein-Barr virus]
acauauccagagcuga

SEQ ID NO: 1942435 - RNA, 20 nt, Human herpesvirus 4 [Epstein-Barr virus]
uagccggcgcuguguggcug

SEQ ID NO: 1942436 - RNA, 21 nt, Human herpesvirus 4 [Epstein-Barr virus]
agaccccugggcucucaggaa

SEQ ID NO: 1942437 - RNA, 14 nt, Human herpesvirus 4 [Epstein-Barr virus]
ggacccugcugcga

SEQ ID NO: 1942438 - RNA, 13 nt, Human herpesvirus 4 [Epstein-Barr virus]
gcucgcagcugga

SEQ ID NO: 1942439 - RNA, 13 nt, Human herpesvirus 4 [Epstein-Barr virus]
ugauugagaucag

SEQ ID NO: 1942440 - RNA, 17 nt, Human herpesvirus 4 [Epstein-Barr virus]
gucgugguuuucugccc

SEQ ID NO: 1942441 - RNA, 21 nt, Human herpesvirus 4 [Epstein-Barr virus]
acgcaauuagagugccgggcc

SEQ ID NO: 1942442 - RNA, 17 nt, Human herpesvirus 4 [Epstein-Barr virus]
cccauauuggggcaaug

SEQ ID NO: 1942443 - RNA, 16 nt, Human herpesvirus 4 [Epstein-Barr virus]
ccugauuugcucuucg

SEQ ID NO: 1942444 - RNA, 22 nt, Human herpesvirus 4 [Epstein-Barr virus]
cuggacccuauggagggcagcg

SEQ ID NO: 1942445 - RNA, 14 nt, Human herpesvirus 4 [Epstein-Barr virus]
ggaaucucugccaa

SEQ ID NO: 1942446 - RNA, 19 nt, Human herpesvirus 4 [Epstein-Barr virus]
auguaagccugccucgagu

SEQ ID NO: 1942447 - RNA, 17 nt, Human herpesvirus 4 [Epstein-Barr virus]
ggaggcacuggagcaga

SEQ ID NO: 1942448 - RNA, 18 nt, Human herpesvirus 4 [Epstein-Barr virus]
uacgccgccgccagcagc

SEQ ID NO: 1942449 - RNA, 16 nt, Human herpesvirus 4 [Epstein-Barr virus]
gauauugaauuccaca

SEQ ID NO: 1942450 - RNA, 18 nt, Human herpesvirus 4 [Epstein-Barr virus]
augcugccgcuacugcug

SEQ ID NO: 1942451 - RNA, 15 nt, Human herpesvirus 4 [Epstein-Barr virus]
augcaggccuggaca

SEQ ID NO: 1942452 - RNA, 15 nt, Human herpesvirus 4 [Epstein-Barr virus]
ccagaaagucccgag

SEQ ID NO: 1942453 - RNA, 23 nt, Human herpesvirus 4 [Epstein-Barr virus]
agacuucagguggucauguuucc

SEQ ID NO: 1942454 - RNA, 20 nt, Human herpesvirus 4 [Epstein-Barr virus]
cuauaaagacaagccugcgu

SEQ ID NO: 1942455 - RNA, 20 nt, Human herpesvirus 4 [Epstein-Barr virus]
auagagaugguguccggaga

SEQ ID NO: 1942456 - RNA, 17 nt, Human herpesvirus 4 [Epstein-Barr virus]
gucuccagcggcuaccu

SEQ ID NO: 1942457 - RNA, 20 nt, Human herpesvirus 4 [Epstein-Barr virus]
acccgaaaucugacacuuua

SEQ ID NO: 1942458 - RNA, 13 nt, Human herpesvirus 4 [Epstein-Barr virus]
gccauccuccuuc

SEQ ID NO: 1942459 - RNA, 15 nt, Human herpesvirus 4 [Epstein-Barr virus]
caguggcccucagaa

SEQ ID NO: 1942460 - RNA, 13 nt, Human herpesvirus 4 [Epstein-Barr virus]
cggggggcuggcg

SEQ ID NO: 1942461 - RNA, 13 nt, Human herpesvirus 4 [Epstein-Barr virus]
uagccggccaggc

SEQ ID NO: 1942462 - RNA, 18 nt, Human herpesvirus 4 [Epstein-Barr virus]
ucugggccgcccggccuc

SEQ ID NO: 1942463 - RNA, 13 nt, Human herpesvirus 4 [Epstein-Barr virus]
caugucucagagg

SEQ ID NO: 1942464 - RNA, 12 nt, Human herpesvirus 4 [Epstein-Barr virus]
aucuccuaggcu

SEQ ID NO: 1942465 - RNA, 13 nt, Human herpesvirus 4 [Epstein-Barr virus]
ugguccugagggg

SEQ ID NO: 1942466 - RNA, 21 nt, Human herpesvirus 4 [Epstein-Barr virus]
cccagacucugcuuucugccg

SEQ ID NO: 1942467 - RNA, 17 nt, Human herpesvirus 4 [Epstein-Barr virus]
aggaggcggaagaccag

SEQ ID NO: 1942468 - RNA, 16 nt, Human herpesvirus 4 [Epstein-Barr virus]
acuggggcugguggcc

SEQ ID NO: 1942469 - RNA, 22 nt, Human herpesvirus 4 [Epstein-Barr virus]
cuagcggcgagacccgaggcag

SEQ ID NO: 1942470 - RNA, 16 nt, Human herpesvirus 4 [Epstein-Barr virus]
ccccgcaccagggcca

SEQ ID NO: 1942471 - RNA, 23 nt, Human herpesvirus 4 [Epstein-Barr virus]
gcaggccccccgcaccagggcca

SEQ ID NO: 1942472 - RNA, 18 nt, Human herpesvirus 4 [Epstein-Barr virus]
gcaccggagccaccacag

SEQ ID NO: 1942473 - RNA, 17 nt, Human herpesvirus 4 [Epstein-Barr virus]
cugcgaugaggcggugg

SEQ ID NO: 1942474 - RNA, 18 nt, Human herpesvirus 4 [Epstein-Barr virus]
ugacggucgccauugccc

SEQ ID NO: 1942475 - RNA, 14 nt, Human herpesvirus 4 [Epstein-Barr virus]
caggagagggccag

SEQ ID NO: 1942476 - RNA, 16 nt, Human herpesvirus 4 [Epstein-Barr virus]
aucuuugacugacaca

SEQ ID NO: 1942477 - RNA, 17 nt, Human herpesvirus 4 [Epstein-Barr virus]
uccuuggagcuguaacu

SEQ ID NO: 1942478 - RNA, 13 nt, Human herpesvirus 4 [Epstein-Barr virus]
gaggccugcacca

SEQ ID NO: 1942479 - RNA, 15 nt, Human herpesvirus 4 [Epstein-Barr virus]
augcaaugcccaccc

SEQ ID NO: 1942480 - RNA, 18 nt, Human herpesvirus 4 [Epstein-Barr virus]
ggaggaggacgugaguga

SEQ ID NO: 1942481 - RNA, 19 nt, Human herpesvirus 4 [Epstein-Barr virus]
cgaacgaugaggaacguga

SEQ ID NO: 1942482 - RNA, 20 nt, Human herpesvirus 4 [Epstein-Barr virus]
ucaggagguacaugggccac

SEQ ID NO: 1942483 - RNA, 23 nt, Human herpesvirus 4 [Epstein-Barr virus]
guuccccccagccugaggaacau

SEQ ID NO: 1942484 - RNA, 15 nt, Human herpesvirus 4 [Epstein-Barr virus]
acgggcuggugggcu

SEQ ID NO: 1942485 - RNA, 16 nt, Human herpesvirus 4 [Epstein-Barr virus]
agccuccaacaggugc

SEQ ID NO: 1942486 - RNA, 13 nt, Human herpesvirus 4 [Epstein-Barr virus]
ugcaagcagcacc

SEQ ID NO: 1942487 - RNA, 18 nt, Human herpesvirus 4 [Epstein-Barr virus]
ggugcuugugguguggga

SEQ ID NO: 1942488 - RNA, 23 nt, Human herpesvirus 4 [Epstein-Barr virus]
aagugauuaggagcagggcccag

SEQ ID NO: 1942489 - RNA, 15 nt, Human herpesvirus 4 [Epstein-Barr virus]
aggagcaggaggggc

SEQ ID NO: 1942490 - RNA, 14 nt, Human herpesvirus 4 [Epstein-Barr virus]
gaugagcuggagac

SEQ ID NO: 1942491 - RNA, 17 nt, Human herpesvirus 4 [Epstein-Barr virus]
caccacccccaccaccu

SEQ ID NO: 1942492 - RNA, 16 nt, Human herpesvirus 4 [Epstein-Barr virus]
gagucccuccucacca

SEQ ID NO: 1942493 - RNA, 14 nt, Human herpesvirus 4 [Epstein-Barr virus]
agguucucggucag

SEQ ID NO: 1942494 - RNA, 18 nt, Human herpesvirus 4 [Epstein-Barr virus]
agcgcacgugacagauuu

SEQ ID NO: 1942495 - RNA, 21 nt, Human herpesvirus 4 [Epstein-Barr virus]
acuacaccaucaccgucggca

SEQ ID NO: 1942496 - RNA, 21 nt, Human herpesvirus 4 [Epstein-Barr virus]
uggugggcuccuuagacugag

SEQ ID NO: 1942497 - RNA, 12 nt, Human herpesvirus 4 [Epstein-Barr virus]
ggcucucuuuga

SEQ ID NO: 1942498 - RNA, 19 nt, Human herpesvirus 4 [Epstein-Barr virus]
agcgcucuggucgcccccu

SEQ ID NO: 1942499 - RNA, 18 nt, Human herpesvirus 4 [Epstein-Barr virus]
cguuuaaacgagagaaga

SEQ ID NO: 1942500 - RNA, 19 nt, Human herpesvirus 4 [Epstein-Barr virus]
cagcugacggugggcauga

SEQ ID NO: 1942501 - RNA, 23 nt, Human herpesvirus 4 [Epstein-Barr virus]
uccagcucggccagcaggccggc

SEQ ID NO: 1942502 - RNA, 21 nt, Human herpesvirus 4 [Epstein-Barr virus]
agggcgcucugcgccagcccc

SEQ ID NO: 1942503 - RNA, 18 nt, Human herpesvirus 4 [Epstein-Barr virus]
gcugcagguaaaccuucu

SEQ ID NO: 1942504 - RNA, 18 nt, Human herpesvirus 4 [Epstein-Barr virus]
uuuccgauagaauagcug

SEQ ID NO: 1942505 - RNA, 12 nt, Human herpesvirus 4 [Epstein-Barr virus]
aggacauguuug

SEQ ID NO: 1942506 - RNA, 15 nt, Human herpesvirus 4 [Epstein-Barr virus]
ucgcaacacuguaua

SEQ ID NO: 1942507 - RNA, 22 nt, Human herpesvirus 4 [Epstein-Barr virus]
agguguacgcccuggcgguuga

SEQ ID NO: 1942508 - RNA, 20 nt, Human herpesvirus 4 [Epstein-Barr virus]
augguggccggcagccuggc

SEQ ID NO: 1942509 - RNA, 13 nt, Human herpesvirus 4 [Epstein-Barr virus]
cccgcaccagggc

SEQ ID NO: 1942510 - RNA, 15 nt, Human herpesvirus 4 [Epstein-Barr virus]
gaucuccuuuggcuc

SEQ ID NO: 1942511 - RNA, 13 nt, Human herpesvirus 4 [Epstein-Barr virus]
agucaccugcaca

SEQ ID NO: 1942512 - RNA, 13 nt, Human herpesvirus 4 [Epstein-Barr virus]
cucaccaugguag

SEQ ID NO: 1942513 - RNA, 19 nt, Human herpesvirus 4 [Epstein-Barr virus]
guguggcuguagccacccg

SEQ ID NO: 1942514 - RNA, 15 nt, Human herpesvirus 4 [Epstein-Barr virus]
uggcauaauuuccuc

SEQ ID NO: 1942515 - RNA, 16 nt, Human herpesvirus 4 [Epstein-Barr virus]
ugcaccagcuccaggg

SEQ ID NO: 1942516 - RNA, 23 nt, Human herpesvirus 4 [Epstein-Barr virus]
ccugccggaguuuucucccccag

SEQ ID NO: 1942517 - RNA, 15 nt, Human herpesvirus 4 [Epstein-Barr virus]
uuauacccaauuugu

SEQ ID NO: 1942518 - RNA, 19 nt, Human herpesvirus 4 [Epstein-Barr virus]
uccaccagcuucucaaagg

SEQ ID NO: 1942519 - RNA, 19 nt, Human herpesvirus 4 [Epstein-Barr virus]
cuucuggcucuucugggaa

SEQ ID NO: 1942520 - RNA, 21 nt, Human herpesvirus 4 [Epstein-Barr virus]
uaaagagacucaggcccucau

SEQ ID NO: 1942521 - RNA, 14 nt, Human herpesvirus 4 [Epstein-Barr virus]
ucuccagcaaccaa

SEQ ID NO: 1942522 - RNA, 18 nt, Human herpesvirus 4 [Epstein-Barr virus]
aagagacuucacagagca

SEQ ID NO: 1942523 - RNA, 15 nt, Human herpesvirus 4 [Epstein-Barr virus]
uggaccaagggcagg

SEQ ID NO: 1942524 - RNA, 20 nt, Human herpesvirus 4 [Epstein-Barr virus]
ccaucaacuucagcuccagg

SEQ ID NO: 1942525 - RNA, 18 nt, Human herpesvirus 4 [Epstein-Barr virus]
caagagccaucaccucuu

SEQ ID NO: 1942526 - RNA, 18 nt, Human herpesvirus 4 [Epstein-Barr virus]
ggcuuacaagaauaacau

SEQ ID NO: 1942527 - RNA, 21 nt, Human herpesvirus 4 [Epstein-Barr virus]
gagucagccuugcccccgcca

SEQ ID NO: 1942528 - RNA, 14 nt, Human herpesvirus 4 [Epstein-Barr virus]
ucucuggcugugcu

SEQ ID NO: 1942529 - RNA, 21 nt, Human herpesvirus 4 [Epstein-Barr virus]
cuggcucuucugggaacaccc

SEQ ID NO: 1942530 - RNA, 24 nt, Human herpesvirus 4 [Epstein-Barr virus]
uggucgggagaacgaaggcguggg

SEQ ID NO: 1942531 - RNA, 12 nt, Human herpesvirus 4 [Epstein-Barr virus]
gcagaggccugc

SEQ ID NO: 1942532 - RNA, 19 nt, Human herpesvirus 4 [Epstein-Barr virus]
gaccaggucgaccaccuca

SEQ ID NO: 1942533 - RNA, 12 nt, Human herpesvirus 4 [Epstein-Barr virus]
gagcaggagcag

SEQ ID NO: 1942534 - RNA, 14 nt, Human herpesvirus 4 [Epstein-Barr virus]
gcagcggccuuacu

SEQ ID NO: 1942535 - RNA, 15 nt, Human herpesvirus 4 [Epstein-Barr virus]
cuacccucuuaggga

SEQ ID NO: 1942536 - RNA, 12 nt, Human herpesvirus 4 [Epstein-Barr virus]
cauggugugaga

SEQ ID NO: 1942537 - RNA, 20 nt, Human herpesvirus 4 [Epstein-Barr virus]
guuaaacugaaucuccaccu

SEQ ID NO: 1942538 - RNA, 14 nt, Human herpesvirus 4 [Epstein-Barr virus]
agcagcucaccuau

SEQ ID NO: 1942539 - RNA, 16 nt, Human herpesvirus 4 [Epstein-Barr virus]
cuccaacaggugcccg

SEQ ID NO: 1942540 - RNA, 16 nt, Human herpesvirus 4 [Epstein-Barr virus]
accugagccugagcca

SEQ ID NO: 1942541 - RNA, 14 nt, Human herpesvirus 4 [Epstein-Barr virus]
ucuuugcaauuugc

SEQ ID NO: 1942542 - RNA, 15 nt, Human herpesvirus 4 [Epstein-Barr virus]
gccggccugcuggcc

SEQ ID NO: 1942543 - RNA, 12 nt, Human herpesvirus 4 [Epstein-Barr virus]
caccuuugcuau

SEQ ID NO: 1942544 - RNA, 21 nt, Human herpesvirus 4 [Epstein-Barr virus]
gcgacuucgggggcgacugcc

SEQ ID NO: 1942545 - RNA, 18 nt, Human herpesvirus 4 [Epstein-Barr virus]
cucuuuguggccuuccuc

SEQ ID NO: 1942546 - RNA, 22 nt, Human herpesvirus 4 [Epstein-Barr virus]
aagcuuaugcagcaccucagcu

SEQ ID NO: 1942547 - RNA, 13 nt, Human herpesvirus 4 [Epstein-Barr virus]
ucacagcugcugg

SEQ ID NO: 1942548 - RNA, 22 nt, Human herpesvirus 4 [Epstein-Barr virus]
augcaacagaggauuggcugca

SEQ ID NO: 1942549 - RNA, 22 nt, Human herpesvirus 4 [Epstein-Barr virus]
caccaguguccagagaggaaga

SEQ ID NO: 1942550 - RNA, 14 nt, Human herpesvirus 4 [Epstein-Barr virus]
ugacugacucuccc

SEQ ID NO: 1942551 - RNA, 23 nt, Human herpesvirus 4 [Epstein-Barr virus]
cgucacucggacuaucaaccacu

SEQ ID NO: 1942552 - RNA, 15 nt, Human herpesvirus 4 [Epstein-Barr virus]
cgcuccguccuuguc

SEQ ID NO: 1942553 - RNA, 22 nt, Human herpesvirus 4 [Epstein-Barr virus]
agccacacaaucagccgggagg

SEQ ID NO: 1942554 - RNA, 18 nt, Human herpesvirus 4 [Epstein-Barr virus]
cccggguucgggcacgcc

SEQ ID NO: 1942555 - RNA, 13 nt, Human herpesvirus 4 [Epstein-Barr virus]
gcgucucauuccc

SEQ ID NO: 1942556 - RNA, 24 nt, Human herpesvirus 4 [Epstein-Barr virus]
ggcuccauguccuguggugugcuu

SEQ ID NO: 1942557 - RNA, 14 nt, Human herpesvirus 4 [Epstein-Barr virus]
agaaucugggcugg

SEQ ID NO: 1942558 - RNA, 17 nt, Human herpesvirus 4 [Epstein-Barr virus]
auggucgaugaacaagu

SEQ ID NO: 1942559 - RNA, 20 nt, Human herpesvirus 4 [Epstein-Barr virus]
uuuggcauguguacuugucc

SEQ ID NO: 1942560 - RNA, 14 nt, Human herpesvirus 4 [Epstein-Barr virus]
ccauucucguccau

SEQ ID NO: 1942561 - RNA, 17 nt, Human herpesvirus 4 [Epstein-Barr virus]
ugcacacgcucagcuca

SEQ ID NO: 1942562 - RNA, 18 nt, Human herpesvirus 4 [Epstein-Barr virus]
aggaugagaccaguggca

SEQ ID NO: 1942563 - RNA, 19 nt, Human herpesvirus 4 [Epstein-Barr virus]
uaccugguauuucugacau

SEQ ID NO: 1942564 - RNA, 14 nt, Human herpesvirus 4 [Epstein-Barr virus]
uaacuggcacacac

SEQ ID NO: 1942565 - RNA, 18 nt, Human herpesvirus 4 [Epstein-Barr virus]
gcgagaauuggcagacac

SEQ ID NO: 1942566 - RNA, 14 nt, Human herpesvirus 4 [Epstein-Barr virus]
gaggagauccgcca

SEQ ID NO: 1942567 - RNA, 17 nt, Human herpesvirus 4 [Epstein-Barr virus]
caaggcaguagaggaca

SEQ ID NO: 1942568 - RNA, 15 nt, Human herpesvirus 4 [Epstein-Barr virus]
agggggccuggugcc

SEQ ID NO: 1942569 - RNA, 23 nt, Human herpesvirus 4 [Epstein-Barr virus]
cugccggaguuuucucccccaga

SEQ ID NO: 1942570 - RNA, 14 nt, Human herpesvirus 4 [Epstein-Barr virus]
uggcugugcugacc

SEQ ID NO: 1942571 - RNA, 19 nt, Human herpesvirus 4 [Epstein-Barr virus]
gccugccaaagagccagau

SEQ ID NO: 1942572 - RNA, 18 nt, Human herpesvirus 4 [Epstein-Barr virus]
gcgcccugucaccaggcc

SEQ ID NO: 1942573 - RNA, 20 nt, Human herpesvirus 4 [Epstein-Barr virus]
aaauguuacuucuuuugcuc

SEQ ID NO: 1942574 - RNA, 20 nt, Human herpesvirus 4 [Epstein-Barr virus]
agagauuucauccucagagg

SEQ ID NO: 1942575 - RNA, 13 nt, Human herpesvirus 4 [Epstein-Barr virus]
agcuaacaggaca

SEQ ID NO: 1942576 - RNA, 22 nt, Human herpesvirus 4 [Epstein-Barr virus]
caggaggaggggcaggagcagg

SEQ ID NO: 1942577 - RNA, 15 nt, Human herpesvirus 4 [Epstein-Barr virus]
cacccaccuaugcca

SEQ ID NO: 1942578 - RNA, 20 nt, Human herpesvirus 4 [Epstein-Barr virus]
cucuaagacccgucgggcca

SEQ ID NO: 1942579 - RNA, 15 nt, Human herpesvirus 4 [Epstein-Barr virus]
gcccccgccagcgcc

SEQ ID NO: 1942580 - RNA, 19 nt, Human herpesvirus 4 [Epstein-Barr virus]
ucgccuucuccucagccuc

SEQ ID NO: 1942581 - RNA, 16 nt, Human herpesvirus 4 [Epstein-Barr virus]
guguuccacagccugc

SEQ ID NO: 1942582 - RNA, 23 nt, Human herpesvirus 4 [Epstein-Barr virus]
gugugaagauugucacagcugcu

SEQ ID NO: 1942583 - RNA, 18 nt, Human herpesvirus 4 [Epstein-Barr virus]
ccucauucccccaugaga

SEQ ID NO: 1942584 - RNA, 23 nt, Human herpesvirus 4 [Epstein-Barr virus]
gcucuucguuaaaauaacacaag

SEQ ID NO: 1942585 - RNA, 21 nt, Human herpesvirus 4 [Epstein-Barr virus]
gacaggcacaacggcugugac

SEQ ID NO: 1942586 - RNA, 22 nt, Human herpesvirus 4 [Epstein-Barr virus]
ggacggaggacgauagcccagg

SEQ ID NO: 1942587 - RNA, 19 nt, Human herpesvirus 4 [Epstein-Barr virus]
cccgggggaggagaagaga

SEQ ID NO: 1942588 - RNA, 16 nt, Human herpesvirus 4 [Epstein-Barr virus]
aauacaagaguucucu

SEQ ID NO: 1942589 - RNA, 21 nt, Human herpesvirus 4 [Epstein-Barr virus]
cugcgagggggccuggugcca

SEQ ID NO: 1942590 - RNA, 19 nt, Human herpesvirus 4 [Epstein-Barr virus]
ugccuugcucucagcacuu

SEQ ID NO: 1942591 - RNA, 19 nt, Human herpesvirus 4 [Epstein-Barr virus]
aagauacccagagcaaaag

SEQ ID NO: 1942592 - RNA, 13 nt, Human herpesvirus 4 [Epstein-Barr virus]
ggcgggcgggcuu

SEQ ID NO: 1942593 - RNA, 22 nt, Human herpesvirus 4 [Epstein-Barr virus]
accuccgggggcacugucgaga

SEQ ID NO: 1942594 - RNA, 19 nt, Human herpesvirus 4 [Epstein-Barr virus]
gccucuuguguucuugccg

SEQ ID NO: 1942595 - RNA, 15 nt, Human herpesvirus 4 [Epstein-Barr virus]
gucuuuuaugagcca

SEQ ID NO: 1942596 - RNA, 20 nt, Human herpesvirus 4 [Epstein-Barr virus]
gugaaacuggcuucugugac

SEQ ID NO: 1942597 - RNA, 20 nt, Human herpesvirus 4 [Epstein-Barr virus]
uuaaaaggggcagcaaucuc

SEQ ID NO: 1942598 - RNA, 18 nt, Human herpesvirus 4 [Epstein-Barr virus]
gcuguccuucugucacaa

SEQ ID NO: 1942599 - RNA, 15 nt, Human herpesvirus 4 [Epstein-Barr virus]
ggcgacugggggcaa

SEQ ID NO: 1942600 - RNA, 18 nt, Human herpesvirus 4 [Epstein-Barr virus]
cuuguccuuggugugcac

SEQ ID NO: 1942601 - RNA, 23 nt, Human herpesvirus 4 [Epstein-Barr virus]
gcauggcgggaguauggggccag

SEQ ID NO: 1942602 - RNA, 14 nt, Human herpesvirus 4 [Epstein-Barr virus]
acugucacugugca

SEQ ID NO: 1942603 - RNA, 12 nt, Human herpesvirus 4 [Epstein-Barr virus]
acuauaccaaag

SEQ ID NO: 1942604 - RNA, 17 nt, Human herpesvirus 4 [Epstein-Barr virus]
guggucaccgcgaccaa

SEQ ID NO: 1942605 - RNA, 14 nt, Human herpesvirus 4 [Epstein-Barr virus]
uggccggggccgug

SEQ ID NO: 1942606 - RNA, 18 nt, Human herpesvirus 4 [Epstein-Barr virus]
gagggcagcgaagaacac

SEQ ID NO: 1942607 - RNA, 22 nt, Human herpesvirus 4 [Epstein-Barr virus]
ugcucucagcacuuugccagca

SEQ ID NO: 1942608 - RNA, 19 nt, Human herpesvirus 4 [Epstein-Barr virus]
caggcacggucgccccucc

SEQ ID NO: 1942609 - RNA, 21 nt, Human herpesvirus 4 [Epstein-Barr virus]
uauuaauaaauaucuuccugu

SEQ ID NO: 1942610 - RNA, 20 nt, Human herpesvirus 4 [Epstein-Barr virus]
gaugguggggcuuguuucaa

SEQ ID NO: 1942611 - RNA, 18 nt, Human herpesvirus 4 [Epstein-Barr virus]
ucaugcuccuauggacac

SEQ ID NO: 1942612 - RNA, 20 nt, Human herpesvirus 4 [Epstein-Barr virus]
gguccuccacggggacacgc

SEQ ID NO: 1942613 - RNA, 15 nt, Human herpesvirus 4 [Epstein-Barr virus]
ccugggagggccauc

SEQ ID NO: 1942614 - RNA, 16 nt, Human herpesvirus 4 [Epstein-Barr virus]
gcaggcuacaacaggc

SEQ ID NO: 1942615 - RNA, 22 nt, Human herpesvirus 4 [Epstein-Barr virus]
agccagggugaccuggcucagg

SEQ ID NO: 1942616 - RNA, 16 nt, Human herpesvirus 4 [Epstein-Barr virus]
cgugccagaggcccuc

SEQ ID NO: 1942617 - RNA, 23 nt, Human herpesvirus 4 [Epstein-Barr virus]
uuaacgggaagagaaguggggag

SEQ ID NO: 1942618 - RNA, 19 nt, Human herpesvirus 4 [Epstein-Barr virus]
cccagggcagacugcacag

SEQ ID NO: 1942619 - RNA, 16 nt, Human herpesvirus 4 [Epstein-Barr virus]
agcagaugugcccaag

SEQ ID NO: 1942620 - RNA, 12 nt, Human herpesvirus 4 [Epstein-Barr virus]
ccucugggagaa

SEQ ID NO: 1942621 - RNA, 18 nt, Human herpesvirus 4 [Epstein-Barr virus]
uguuggauuggcugucau

SEQ ID NO: 1942622 - RNA, 16 nt, Human herpesvirus 4 [Epstein-Barr virus]
gaagcagaugugccca

SEQ ID NO: 1942623 - RNA, 14 nt, Human herpesvirus 4 [Epstein-Barr virus]
gccgggcgcgcucc

SEQ ID NO: 1942624 - RNA, 19 nt, Human herpesvirus 4 [Epstein-Barr virus]
ucggucaaguaccagcugg

SEQ ID NO: 1942625 - RNA, 17 nt, Human herpesvirus 4 [Epstein-Barr virus]
cugauaaugucuucaau

SEQ ID NO: 1942626 - RNA, 21 nt, Human herpesvirus 4 [Epstein-Barr virus]
caucccauaccuacaccaccc

SEQ ID NO: 1942627 - RNA, 23 nt, Human herpesvirus 4 [Epstein-Barr virus]
gccguccacggccguagcccagu

SEQ ID NO: 1942628 - RNA, 21 nt, Human herpesvirus 4 [Epstein-Barr virus]
ucaaccugauucccccugcuc

SEQ ID NO: 1942629 - RNA, 15 nt, Human herpesvirus 4 [Epstein-Barr virus]
ggggagagaaagaga

SEQ ID NO: 1942630 - RNA, 20 nt, Human herpesvirus 4 [Epstein-Barr virus]
gcgucuguuuguguagugag

SEQ ID NO: 1942631 - RNA, 15 nt, Human herpesvirus 4 [Epstein-Barr virus]
auucuggcacgucau

SEQ ID NO: 1942632 - RNA, 19 nt, Human herpesvirus 4 [Epstein-Barr virus]
cucggccuccuggccagca

SEQ ID NO: 1942633 - RNA, 13 nt, Human herpesvirus 4 [Epstein-Barr virus]
gcaaccagcacgu

SEQ ID NO: 1942634 - RNA, 15 nt, Human herpesvirus 4 [Epstein-Barr virus]
gcggcccacugaaaa

SEQ ID NO: 1942635 - RNA, 22 nt, Human herpesvirus 4 [Epstein-Barr virus]
cguuugugauucccagaaagaa

SEQ ID NO: 1942636 - RNA, 18 nt, Human herpesvirus 4 [Epstein-Barr virus]
aaucaccuuaacuggcac

SEQ ID NO: 1942637 - RNA, 16 nt, Human herpesvirus 4 [Epstein-Barr virus]
uccaggguccaggaga

SEQ ID NO: 1942638 - RNA, 13 nt, Human herpesvirus 4 [Epstein-Barr virus]
gucguuugauucu

SEQ ID NO: 1942639 - RNA, 16 nt, Human herpesvirus 4 [Epstein-Barr virus]
uuacuucuuuugcucu

SEQ ID NO: 1942640 - RNA, 19 nt, Human herpesvirus 4 [Epstein-Barr virus]
uucauccucagaggaggag

SEQ ID NO: 1942641 - RNA, 21 nt, Human herpesvirus 4 [Epstein-Barr virus]
uccugcaggggguucuugcua

SEQ ID NO: 1942642 - RNA, 13 nt, Human herpesvirus 4 [Epstein-Barr virus]
aggucuaugggga

SEQ ID NO: 1942643 - RNA, 14 nt, Human herpesvirus 4 [Epstein-Barr virus]
gcauuuuuggugcu

SEQ ID NO: 1942644 - RNA, 16 nt, Human herpesvirus 4 [Epstein-Barr virus]
gcccacacagcgccag

SEQ ID NO: 1942645 - RNA, 13 nt, Human herpesvirus 4 [Epstein-Barr virus]
ugcauggccaggc

SEQ ID NO: 1942646 - RNA, 22 nt, Human herpesvirus 4 [Epstein-Barr virus]
gaagcagauagccggccaggca

SEQ ID NO: 1942647 - RNA, 22 nt, Human herpesvirus 4 [Epstein-Barr virus]
gaauacccugcauggccaggcc

SEQ ID NO: 1942648 - RNA, 14 nt, Human herpesvirus 4 [Epstein-Barr virus]
gcacuguugcgccc

SEQ ID NO: 1942649 - RNA, 20 nt, Human herpesvirus 4 [Epstein-Barr virus]
gggaaagaggucccauguac

SEQ ID NO: 1942650 - RNA, 22 nt, Human herpesvirus 4 [Epstein-Barr virus]
ccaggcuggugacaaacucucu

SEQ ID NO: 1942651 - RNA, 15 nt, Human herpesvirus 4 [Epstein-Barr virus]
acaggacuaaccaug

SEQ ID NO: 1942652 - RNA, 21 nt, Human herpesvirus 4 [Epstein-Barr virus]
cuucuaggcauuaccauguca

SEQ ID NO: 1942653 - RNA, 13 nt, Human herpesvirus 4 [Epstein-Barr virus]
auuagcagccucc

SEQ ID NO: 1942654 - RNA, 15 nt, Human herpesvirus 4 [Epstein-Barr virus]
ggccggugcugccag

SEQ ID NO: 1942655 - RNA, 18 nt, Human herpesvirus 4 [Epstein-Barr virus]
cagagccucugccacaag

SEQ ID NO: 1942656 - RNA, 14 nt, Human herpesvirus 4 [Epstein-Barr virus]
gaaggcuugccaaa

SEQ ID NO: 1942657 - RNA, 21 nt, Human herpesvirus 4 [Epstein-Barr virus]
gugccuaaacgugauggugcu

SEQ ID NO: 1942658 - RNA, 19 nt, Human herpesvirus 4 [Epstein-Barr virus]
accagcccuuuuuccagug

SEQ ID NO: 1942659 - RNA, 18 nt, Human herpesvirus 4 [Epstein-Barr virus]
aggcccuaauucagccac

SEQ ID NO: 1942660 - RNA, 17 nt, Human herpesvirus 4 [Epstein-Barr virus]
cuccuggaucuggggcu

SEQ ID NO: 1942661 - RNA, 20 nt, Human herpesvirus 4 [Epstein-Barr virus]
uccaugacgcugcugcuacu

SEQ ID NO: 1942662 - RNA, 14 nt, Human herpesvirus 4 [Epstein-Barr virus]
guacgugccucaga

SEQ ID NO: 1942663 - RNA, 15 nt, Human herpesvirus 4 [Epstein-Barr virus]
uuccuauaugcucuc

SEQ ID NO: 1942664 - RNA, 14 nt, Human herpesvirus 4 [Epstein-Barr virus]
gauagccggccagg

SEQ ID NO: 1942665 - RNA, 18 nt, Human herpesvirus 4 [Epstein-Barr virus]
aagguggaggggggcggc

SEQ ID NO: 1942666 - RNA, 15 nt, Human herpesvirus 4 [Epstein-Barr virus]
ccugaggggcggugg

SEQ ID NO: 1942667 - RNA, 18 nt, Human herpesvirus 4 [Epstein-Barr virus]
cucuggucgcccccucug

SEQ ID NO: 1942668 - RNA, 16 nt, Human herpesvirus 4 [Epstein-Barr virus]
aucccaaauaaauguu

SEQ ID NO: 1942669 - RNA, 15 nt, Human herpesvirus 4 [Epstein-Barr virus]
gcaggccccccgcac

SEQ ID NO: 1942670 - RNA, 22 nt, Human herpesvirus 4 [Epstein-Barr virus]
uggacacuugugguucuccuga

SEQ ID NO: 1942671 - RNA, 21 nt, Human herpesvirus 4 [Epstein-Barr virus]
gcugagaacugacgcuccagg

SEQ ID NO: 1942672 - RNA, 18 nt, Human herpesvirus 4 [Epstein-Barr virus]
cagccugcaccaguggcu

SEQ ID NO: 1942673 - RNA, 22 nt, Human herpesvirus 4 [Epstein-Barr virus]
cuccgaugcccaccagccagcg

SEQ ID NO: 1942674 - RNA, 16 nt, Human herpesvirus 4 [Epstein-Barr virus]
cucaccguggcagaca

SEQ ID NO: 1942675 - RNA, 13 nt, Human herpesvirus 4 [Epstein-Barr virus]
aguaccagcuggu

SEQ ID NO: 1942676 - RNA, 22 nt, Human herpesvirus 4 [Epstein-Barr virus]
auaaauuaagagucccuccuca

SEQ ID NO: 1942677 - RNA, 13 nt, Human herpesvirus 4 [Epstein-Barr virus]
ggcaccccacggg

SEQ ID NO: 1942678 - RNA, 21 nt, Human herpesvirus 4 [Epstein-Barr virus]
cacccuggccgugcuggauga

SEQ ID NO: 1942679 - RNA, 21 nt, Human herpesvirus 4 [Epstein-Barr virus]
ccuaucacgggggucaagcaa

SEQ ID NO: 1942680 - RNA, 19 nt, Human herpesvirus 4 [Epstein-Barr virus]
ggagcuccgugagcaggag

SEQ ID NO: 1942681 - RNA, 15 nt, Human herpesvirus 4 [Epstein-Barr virus]
cagauguccaggggu

SEQ ID NO: 1942682 - RNA, 12 nt, Human herpesvirus 4 [Epstein-Barr virus]
cuggucagggga

SEQ ID NO: 1942683 - RNA, 17 nt, Human herpesvirus 4 [Epstein-Barr virus]
gucuaccucuguuccuu

SEQ ID NO: 1942684 - RNA, 18 nt, Human herpesvirus 4 [Epstein-Barr virus]
uaaaguuggucaggcuga

SEQ ID NO: 1942685 - RNA, 17 nt, Human herpesvirus 4 [Epstein-Barr virus]
aggacaacagcuagcag

SEQ ID NO: 1942686 - RNA, 18 nt, Human herpesvirus 4 [Epstein-Barr virus]
acugcguccaccuggcca

SEQ ID NO: 1942687 - RNA, 23 nt, Human herpesvirus 4 [Epstein-Barr virus]
gcagauagccggccaggcagagg

SEQ ID NO: 1942688 - RNA, 19 nt, Human herpesvirus 4 [Epstein-Barr virus]
agauuuucccacugugccu

SEQ ID NO: 1942689 - RNA, 23 nt, Human herpesvirus 4 [Epstein-Barr virus]
cauaacgguggugggaggcccag

SEQ ID NO: 1942690 - RNA, 19 nt, Human herpesvirus 4 [Epstein-Barr virus]
gauuucuaguuaccacagg

SEQ ID NO: 1942691 - RNA, 21 nt, Human herpesvirus 4 [Epstein-Barr virus]
aaaaucaacuacaagcagcua

SEQ ID NO: 1942692 - RNA, 20 nt, Human herpesvirus 4 [Epstein-Barr virus]
accagggggcagucugagaa

SEQ ID NO: 1942693 - RNA, 15 nt, Human herpesvirus 4 [Epstein-Barr virus]
aaugcgauucugaac

SEQ ID NO: 1942694 - RNA, 10 nt, Human herpesvirus 4 [Epstein-Barr virus]
gcagcuccgc

SEQ ID NO: 1942695 - RNA, 13 nt, Human herpesvirus 4 [Epstein-Barr virus]
cccagcagcagcc

SEQ ID NO: 1942696 - RNA, 18 nt, Human herpesvirus 4 [Epstein-Barr virus]
gaugacugagcgcacggc

SEQ ID NO: 1942697 - RNA, 19 nt, Human herpesvirus 4 [Epstein-Barr virus]
ucugcggaucagucgcugg

SEQ ID NO: 1942698 - RNA, 18 nt, Human herpesvirus 4 [Epstein-Barr virus]
cacuguugcgcccggccc

SEQ ID NO: 1942699 - RNA, 22 nt, Human herpesvirus 4 [Epstein-Barr virus]
aguugacggacgugcccagcuc

SEQ ID NO: 1942700 - RNA, 19 nt, Human herpesvirus 4 [Epstein-Barr virus]
gacgcgcagugccaagagc

SEQ ID NO: 1942701 - RNA, 14 nt, Human herpesvirus 4 [Epstein-Barr virus]
ccuggagccagcgc

SEQ ID NO: 1942702 - RNA, 14 nt, Human herpesvirus 4 [Epstein-Barr virus]
cgcugaagccaggc

SEQ ID NO: 1942703 - RNA, 14 nt, Human herpesvirus 4 [Epstein-Barr virus]
auguauugggacuu

SEQ ID NO: 1942704 - RNA, 15 nt, Human herpesvirus 4 [Epstein-Barr virus]
uggaucuggggcugg

SEQ ID NO: 1942705 - RNA, 13 nt, Human herpesvirus 4 [Epstein-Barr virus]
cucucccacggac

SEQ ID NO: 1942706 - RNA, 11 nt, Human herpesvirus 4 [Epstein-Barr virus]
ggccuccuggc

SEQ ID NO: 1942707 - RNA, 21 nt, Human herpesvirus 4 [Epstein-Barr virus]
accuccaccaccuucaccacc

SEQ ID NO: 1942708 - RNA, 22 nt, Human herpesvirus 4 [Epstein-Barr virus]
cgaguaggugccuccagagccc

SEQ ID NO: 1942709 - RNA, 15 nt, Human herpesvirus 4 [Epstein-Barr virus]
cuguauuuacaaaca

SEQ ID NO: 1942710 - RNA, 20 nt, Human herpesvirus 4 [Epstein-Barr virus]
agccugucgauaucccugcu

SEQ ID NO: 1942711 - RNA, 16 nt, Human herpesvirus 4 [Epstein-Barr virus]
cacauauacuggagau

SEQ ID NO: 1942712 - RNA, 17 nt, Human herpesvirus 4 [Epstein-Barr virus]
cuacacggccucaaagg

SEQ ID NO: 1942713 - RNA, 12 nt, Human herpesvirus 4 [Epstein-Barr virus]
ggcgaggggcgc

SEQ ID NO: 1942714 - RNA, 21 nt, Human herpesvirus 4 [Epstein-Barr virus]
ggagauccgccaggaccugga

SEQ ID NO: 1942715 - RNA, 21 nt, Human herpesvirus 4 [Epstein-Barr virus]
gggagacacaucuggaccaga

SEQ ID NO: 1942716 - RNA, 21 nt, Human herpesvirus 4 [Epstein-Barr virus]
auucuaugggaauaacaaggg

SEQ ID NO: 1942717 - RNA, 13 nt, Human herpesvirus 4 [Epstein-Barr virus]
cggcguggagcug

SEQ ID NO: 1942718 - RNA, 20 nt, Human herpesvirus 4 [Epstein-Barr virus]
agccuacucuccacucccag

SEQ ID NO: 1942719 - RNA, 21 nt, Human herpesvirus 4 [Epstein-Barr virus]
acggccacguccccggccucc

SEQ ID NO: 1942720 - RNA, 16 nt, Human herpesvirus 4 [Epstein-Barr virus]
guccagcggggccgca

SEQ ID NO: 1942721 - RNA, 23 nt, Human herpesvirus 4 [Epstein-Barr virus]
gccacaaccgccgugucagcugu

SEQ ID NO: 1942722 - RNA, 21 nt, Human herpesvirus 4 [Epstein-Barr virus]
aggaagaguaccccagugacg

SEQ ID NO: 1942723 - RNA, 15 nt, Human herpesvirus 4 [Epstein-Barr virus]
gcccagugcacccag

SEQ ID NO: 1942724 - RNA, 18 nt, Human herpesvirus 4 [Epstein-Barr virus]
caucuauuagcagccucc

SEQ ID NO: 1942725 - RNA, 17 nt, Human herpesvirus 4 [Epstein-Barr virus]
cagcuccagggccagca

SEQ ID NO: 1942726 - RNA, 22 nt, Human herpesvirus 4 [Epstein-Barr virus]
cucuggcugugcugacccuucu

SEQ ID NO: 1942727 - RNA, 19 nt, Human herpesvirus 4 [Epstein-Barr virus]
gggccugugacuggugcuu

SEQ ID NO: 1942728 - RNA, 22 nt, Human herpesvirus 4 [Epstein-Barr virus]
ccaccauaugaugacgccgaga

SEQ ID NO: 1942729 - RNA, 24 nt, Human herpesvirus 4 [Epstein-Barr virus]
acaacugcuauucugagcaccaac

SEQ ID NO: 1942730 - RNA, 20 nt, Human herpesvirus 4 [Epstein-Barr virus]
ucuggccgguggauccucca

SEQ ID NO: 1942731 - RNA, 12 nt, Human herpesvirus 4 [Epstein-Barr virus]
uacccaucacac

SEQ ID NO: 1942732 - RNA, 14 nt, Human herpesvirus 4 [Epstein-Barr virus]
augauauugaauuc

SEQ ID NO: 1942733 - RNA, 16 nt, Human herpesvirus 4 [Epstein-Barr virus]
gcacacgcucagcuca

SEQ ID NO: 1942734 - RNA, 15 nt, Human herpesvirus 4 [Epstein-Barr virus]
ugggagggagccugc

SEQ ID NO: 1942735 - RNA, 16 nt, Human herpesvirus 4 [Epstein-Barr virus]
gucuuugccaaccugc

SEQ ID NO: 1942736 - RNA, 15 nt, Human herpesvirus 4 [Epstein-Barr virus]
uucuacgaugaggaa

SEQ ID NO: 1942737 - RNA, 23 nt, Human herpesvirus 4 [Epstein-Barr virus]
caccccaguggacaaggcaguag

SEQ ID NO: 1942738 - RNA, 19 nt, Human herpesvirus 4 [Epstein-Barr virus]
gcaccggagccaccacagc

SEQ ID NO: 1942739 - RNA, 14 nt, Human herpesvirus 4 [Epstein-Barr virus]
ugugucuucugucu

SEQ ID NO: 1942740 - RNA, 16 nt, Human herpesvirus 4 [Epstein-Barr virus]
caggacggagaagcgg

SEQ ID NO: 1942741 - RNA, 19 nt, Human herpesvirus 4 [Epstein-Barr virus]
cagggcccguuccaggcuc

SEQ ID NO: 1942742 - RNA, 22 nt, Human herpesvirus 4 [Epstein-Barr virus]
auccaggaggaggacgugagug

SEQ ID NO: 1942743 - RNA, 12 nt, Human herpesvirus 4 [Epstein-Barr virus]
gcccccaccacc

SEQ ID NO: 1942744 - RNA, 16 nt, Human herpesvirus 4 [Epstein-Barr virus]
uuuccgucagccaggg

SEQ ID NO: 1942745 - RNA, 15 nt, Human herpesvirus 4 [Epstein-Barr virus]
acuacaauguuccuu

SEQ ID NO: 1942746 - RNA, 15 nt, Human herpesvirus 4 [Epstein-Barr virus]
gaguucccggcugcu

SEQ ID NO: 1942747 - RNA, 13 nt, Human herpesvirus 4 [Epstein-Barr virus]
aggacccugggcc

SEQ ID NO: 1942748 - RNA, 17 nt, Human herpesvirus 4 [Epstein-Barr virus]
gagggcagacaccaccu

SEQ ID NO: 1942749 - RNA, 22 nt, Human herpesvirus 4 [Epstein-Barr virus]
cuuuuacagugguucuccugau

SEQ ID NO: 1942750 - RNA, 14 nt, Human herpesvirus 4 [Epstein-Barr virus]
cugaaucuccaccu

SEQ ID NO: 1942751 - RNA, 10 nt, Human herpesvirus 4 [Epstein-Barr virus]
cagcccagcc

SEQ ID NO: 1942752 - RNA, 14 nt, Human herpesvirus 4 [Epstein-Barr virus]
ccgggcaaacaggg

SEQ ID NO: 1942753 - RNA, 16 nt, Human herpesvirus 4 [Epstein-Barr virus]
ucagcaucacagguua

SEQ ID NO: 1942754 - RNA, 20 nt, Human herpesvirus 4 [Epstein-Barr virus]
cugaccgaauggggcagugg

SEQ ID NO: 1942755 - RNA, 12 nt, Human herpesvirus 4 [Epstein-Barr virus]
gauguauuacca

SEQ ID NO: 1942756 - RNA, 19 nt, Human herpesvirus 4 [Epstein-Barr virus]
ggaauauuaauaaauaucu

SEQ ID NO: 1942757 - RNA, 17 nt, Human herpesvirus 4 [Epstein-Barr virus]
caccccacggccaugcu

SEQ ID NO: 1942758 - RNA, 14 nt, Human herpesvirus 4 [Epstein-Barr virus]
ggugcuugugaagg

SEQ ID NO: 1942759 - RNA, 14 nt, Human herpesvirus 4 [Epstein-Barr virus]
ccgcgcccuccucu

SEQ ID NO: 1942760 - RNA, 11 nt, Human herpesvirus 4 [Epstein-Barr virus]
ggaggcugcua

SEQ ID NO: 1942761 - RNA, 13 nt, Human herpesvirus 4 [Epstein-Barr virus]
gaggcggugccug

SEQ ID NO: 1942762 - RNA, 23 nt, Human herpesvirus 4 [Epstein-Barr virus]
gcugguggccugggaggugcuga

SEQ ID NO: 1942763 - RNA, 15 nt, Human herpesvirus 4 [Epstein-Barr virus]
uggcacgguccagaa

SEQ ID NO: 1942764 - RNA, 12 nt, Human herpesvirus 4 [Epstein-Barr virus]
cagaacaucacu

SEQ ID NO: 1942765 - RNA, 21 nt, Human herpesvirus 4 [Epstein-Barr virus]
cagaaaaucgcagcagggucc

SEQ ID NO: 1942766 - RNA, 15 nt, Human herpesvirus 4 [Epstein-Barr virus]
gaggugauguagagg

SEQ ID NO: 1942767 - RNA, 22 nt, Human herpesvirus 4 [Epstein-Barr virus]
acaggagacguggguccccucu

SEQ ID NO: 1942768 - RNA, 21 nt, Human herpesvirus 4 [Epstein-Barr virus]
gagguacaugggccacugcag

SEQ ID NO: 1942769 - RNA, 15 nt, Human herpesvirus 4 [Epstein-Barr virus]
accgcgcccuccucu

SEQ ID NO: 1942770 - RNA, 17 nt, Human herpesvirus 4 [Epstein-Barr virus]
agaccaauacccaggau

SEQ ID NO: 1942771 - RNA, 16 nt, Human herpesvirus 4 [Epstein-Barr virus]
ucgccuucuccucagc

SEQ ID NO: 1942772 - RNA, 18 nt, Human herpesvirus 4 [Epstein-Barr virus]
ugcugggucgccugaccc

SEQ ID NO: 1942773 - RNA, 21 nt, Human herpesvirus 4 [Epstein-Barr virus]
ccaggcgguuagggaggacac

SEQ ID NO: 1942774 - RNA, 17 nt, Human herpesvirus 4 [Epstein-Barr virus]
caugcaggucagguccc

SEQ ID NO: 1942775 - RNA, 18 nt, Human herpesvirus 4 [Epstein-Barr virus]
agggaagcguucuucacu

SEQ ID NO: 1942776 - RNA, 22 nt, Human herpesvirus 4 [Epstein-Barr virus]
acugcagugggccucucuggcu

SEQ ID NO: 1942777 - RNA, 18 nt, Human herpesvirus 4 [Epstein-Barr virus]
cugcacuauauucuccag

SEQ ID NO: 1942778 - RNA, 22 nt, Human herpesvirus 4 [Epstein-Barr virus]
ugggugcaagaauuggggcugg

SEQ ID NO: 1942779 - RNA, 13 nt, Human herpesvirus 4 [Epstein-Barr virus]
gauguagacaagu

SEQ ID NO: 1942780 - RNA, 17 nt, Human herpesvirus 4 [Epstein-Barr virus]
cucggggcaugcugccc

SEQ ID NO: 1942781 - RNA, 22 nt, Human herpesvirus 4 [Epstein-Barr virus]
cugcccuccuccacccagcagc

SEQ ID NO: 1942782 - RNA, 18 nt, Human herpesvirus 4 [Epstein-Barr virus]
cguuuacuaauggaauau

SEQ ID NO: 1942783 - RNA, 14 nt, Human herpesvirus 4 [Epstein-Barr virus]
gccgggagaggcag

SEQ ID NO: 1942784 - RNA, 19 nt, Human herpesvirus 4 [Epstein-Barr virus]
gcucgucguucaggaacag

SEQ ID NO: 1942785 - RNA, 12 nt, Human herpesvirus 4 [Epstein-Barr virus]
aauaaaaacagc

SEQ ID NO: 1942786 - RNA, 21 nt, Human herpesvirus 4 [Epstein-Barr virus]
ggcacugcguccaccuggcca

SEQ ID NO: 1942787 - RNA, 18 nt, Human herpesvirus 4 [Epstein-Barr virus]
auguagcuauacuuucuu

SEQ ID NO: 1942788 - RNA, 14 nt, Human herpesvirus 4 [Epstein-Barr virus]
gucaagcaaacggc

SEQ ID NO: 1942789 - RNA, 14 nt, Human herpesvirus 4 [Epstein-Barr virus]
gacaccagauguuu

SEQ ID NO: 1942790 - RNA, 12 nt, Human herpesvirus 4 [Epstein-Barr virus]
cuagagggacag

SEQ ID NO: 1942791 - RNA, 17 nt, Human herpesvirus 4 [Epstein-Barr virus]
ugcacccacccccaccc

SEQ ID NO: 1942792 - RNA, 17 nt, Human herpesvirus 4 [Epstein-Barr virus]
cagagucuacucgacca

SEQ ID NO: 1942793 - RNA, 16 nt, Human herpesvirus 4 [Epstein-Barr virus]
gaauauuaauaaauau

SEQ ID NO: 1942794 - RNA, 16 nt, Human herpesvirus 4 [Epstein-Barr virus]
ccuggcggcccagccc

SEQ ID NO: 1942795 - RNA, 15 nt, Human herpesvirus 4 [Epstein-Barr virus]
ggcugcgguggugcg

SEQ ID NO: 1942796 - RNA, 15 nt, Human herpesvirus 4 [Epstein-Barr virus]
cuggcacacacuccc

SEQ ID NO: 1942797 - RNA, 14 nt, Human herpesvirus 4 [Epstein-Barr virus]
guuaacauggacau

SEQ ID NO: 1942798 - RNA, 22 nt, Human herpesvirus 4 [Epstein-Barr virus]
ugcgaaaacgaaagugcuugaa

SEQ ID NO: 1942799 - RNA, 21 nt, Human herpesvirus 4 [Epstein-Barr virus]
acaggacuaaccaugccaucu

SEQ ID NO: 1942800 - RNA, 17 nt, Human herpesvirus 4 [Epstein-Barr virus]
gcgccgguggggaaggc

SEQ ID NO: 1942801 - RNA, 19 nt, Human herpesvirus 4 [Epstein-Barr virus]
uccucauuggcuuugcccu

SEQ ID NO: 1942802 - RNA, 19 nt, Human herpesvirus 4 [Epstein-Barr virus]
ccagagggcgaaugggcug

SEQ ID NO: 1942803 - RNA, 20 nt, Human herpesvirus 4 [Epstein-Barr virus]
caccgucagccacacaauca

SEQ ID NO: 1942804 - RNA, 22 nt, Human herpesvirus 4 [Epstein-Barr virus]
agggauaugaaggugucauuga

SEQ ID NO: 1942805 - RNA, 17 nt, Human herpesvirus 4 [Epstein-Barr virus]
gugccauaccacacccc

SEQ ID NO: 1942806 - RNA, 15 nt, Human herpesvirus 4 [Epstein-Barr virus]
ugaguccagggcccu

SEQ ID NO: 1942807 - RNA, 12 nt, Human herpesvirus 4 [Epstein-Barr virus]
ccaucugcuucu

SEQ ID NO: 1942808 - RNA, 14 nt, Human herpesvirus 4 [Epstein-Barr virus]
agcagcaguggugu

SEQ ID NO: 1942809 - RNA, 15 nt, Human herpesvirus 4 [Epstein-Barr virus]
gagucugcuggacuc

SEQ ID NO: 1942810 - RNA, 20 nt, Human herpesvirus 4 [Epstein-Barr virus]
caacaggugcccgagccccg

SEQ ID NO: 1942811 - RNA, 19 nt, Human herpesvirus 4 [Epstein-Barr virus]
gcuggacuccgaggaccag

SEQ ID NO: 1942812 - RNA, 14 nt, Human herpesvirus 4 [Epstein-Barr virus]
cuugaacgugugcu

SEQ ID NO: 1942813 - RNA, 12 nt, Human herpesvirus 4 [Epstein-Barr virus]
ggcgcggcugga

SEQ ID NO: 1942814 - RNA, 14 nt, Human herpesvirus 4 [Epstein-Barr virus]
ggagccguggccuu

SEQ ID NO: 1942815 - RNA, 16 nt, Human herpesvirus 4 [Epstein-Barr virus]
ggcucaggccaugcgc

SEQ ID NO: 1942816 - RNA, 18 nt, Human herpesvirus 4 [Epstein-Barr virus]
gccaccggggaggccagg

SEQ ID NO: 1942817 - RNA, 15 nt, Human herpesvirus 4 [Epstein-Barr virus]
aaaaucaaaacuuua

SEQ ID NO: 1942818 - RNA, 20 nt, Human herpesvirus 4 [Epstein-Barr virus]
guggcgguggaacacggcac

SEQ ID NO: 1942819 - RNA, 16 nt, Human herpesvirus 4 [Epstein-Barr virus]
ggcacaccagacaugg

SEQ ID NO: 1942820 - RNA, 20 nt, Human herpesvirus 4 [Epstein-Barr virus]
gucccccuccauuccaccca

SEQ ID NO: 1942821 - RNA, 15 nt, Human herpesvirus 4 [Epstein-Barr virus]
gcagucgcugcugca

SEQ ID NO: 1942822 - RNA, 14 nt, Human herpesvirus 4 [Epstein-Barr virus]
accuaugccuggaa

SEQ ID NO: 1942823 - RNA, 20 nt, Human herpesvirus 4 [Epstein-Barr virus]
cagcccuuaacacaccacac

SEQ ID NO: 1942824 - RNA, 14 nt, Human herpesvirus 4 [Epstein-Barr virus]
ugugugcuguauuu

SEQ ID NO: 1942825 - RNA, 14 nt, Human herpesvirus 4 [Epstein-Barr virus]
gcuuaaaaaugugc

SEQ ID NO: 1942826 - RNA, 22 nt, Human herpesvirus 4 [Epstein-Barr virus]
ggaggccagguagcccagcguc

SEQ ID NO: 1942827 - RNA, 17 nt, Human herpesvirus 4 [Epstein-Barr virus]
aucccccggacaccaga

SEQ ID NO: 1942828 - RNA, 18 nt, Human herpesvirus 4 [Epstein-Barr virus]
ucagaccugaucagggaa

SEQ ID NO: 1942829 - RNA, 19 nt, Human herpesvirus 4 [Epstein-Barr virus]
caucucaagggaggagugc

SEQ ID NO: 1942830 - RNA, 22 nt, Human herpesvirus 4 [Epstein-Barr virus]
gcaggagcaggaggaggggcag

SEQ ID NO: 1942831 - RNA, 15 nt, Human herpesvirus 4 [Epstein-Barr virus]
gucaccaggccugcc

SEQ ID NO: 1942832 - RNA, 17 nt, Human herpesvirus 4 [Epstein-Barr virus]
accacucccaccacccc

SEQ ID NO: 1942833 - RNA, 20 nt, Human herpesvirus 4 [Epstein-Barr virus]
gcagcccggccgaggccugc

SEQ ID NO: 1942834 - RNA, 15 nt, Human herpesvirus 4 [Epstein-Barr virus]
ugcagggugcacaga

SEQ ID NO: 1942835 - RNA, 15 nt, Human herpesvirus 4 [Epstein-Barr virus]
ugaggaaaggccuuu

SEQ ID NO: 1942836 - RNA, 11 nt, Human herpesvirus 4 [Epstein-Barr virus]
acccuggggca

SEQ ID NO: 1942837 - RNA, 20 nt, Human herpesvirus 4 [Epstein-Barr virus]
ggccagguacaggaccugga

SEQ ID NO: 1942838 - RNA, 18 nt, Human herpesvirus 4 [Epstein-Barr virus]
aucuuaccccuggcuucc

SEQ ID NO: 1942839 - RNA, 16 nt, Human herpesvirus 4 [Epstein-Barr virus]
uuauugaaaccacgcc

SEQ ID NO: 1942840 - RNA, 15 nt, Human herpesvirus 4 [Epstein-Barr virus]
ccgaucagagcccca

SEQ ID NO: 1942841 - RNA, 14 nt, Human herpesvirus 4 [Epstein-Barr virus]
ugccuccagagccc

SEQ ID NO: 1942842 - RNA, 13 nt, Human herpesvirus 4 [Epstein-Barr virus]
gccgccgccagca

SEQ ID NO: 1942843 - RNA, 22 nt, Human herpesvirus 4 [Epstein-Barr virus]
gccuguuuguccagcagggccu

SEQ ID NO: 1942844 - RNA, 20 nt, Human herpesvirus 4 [Epstein-Barr virus]
caaacaggugagucagccuu

SEQ ID NO: 1942845 - RNA, 23 nt, Human herpesvirus 4 [Epstein-Barr virus]
cagggugaacacuugggcacgga

SEQ ID NO: 1942846 - RNA, 18 nt, Human herpesvirus 4 [Epstein-Barr virus]
guccaggagucugcugcg

SEQ ID NO: 1942847 - RNA, 14 nt, Human herpesvirus 4 [Epstein-Barr virus]
ucugaggcggcugu

SEQ ID NO: 1942848 - RNA, 18 nt, Human herpesvirus 4 [Epstein-Barr virus]
cgggcacugcguccaccu

SEQ ID NO: 1942849 - RNA, 13 nt, Human herpesvirus 4 [Epstein-Barr virus]
cuucagugucugg

SEQ ID NO: 1942850 - RNA, 16 nt, Human herpesvirus 4 [Epstein-Barr virus]
cggcguggagcugggc

SEQ ID NO: 1942851 - RNA, 19 nt, Human herpesvirus 4 [Epstein-Barr virus]
gccucagcgucaggagagg

SEQ ID NO: 1942852 - RNA, 19 nt, Human herpesvirus 4 [Epstein-Barr virus]
ucgcuggcauacucuucau

SEQ ID NO: 1942853 - RNA, 16 nt, Human herpesvirus 4 [Epstein-Barr virus]
gaagcaugggggaaac

SEQ ID NO: 1942854 - RNA, 14 nt, Human herpesvirus 4 [Epstein-Barr virus]
cgccgcaagcaugg

SEQ ID NO: 1942855 - RNA, 16 nt, Human herpesvirus 4 [Epstein-Barr virus]
agcaccggagccacca

SEQ ID NO: 1942856 - RNA, 18 nt, Human herpesvirus 4 [Epstein-Barr virus]
gaccgggagccucagugu

SEQ ID NO: 1942857 - RNA, 20 nt, Human herpesvirus 4 [Epstein-Barr virus]
ucccaggccuuagcccagag

SEQ ID NO: 1942858 - RNA, 20 nt, Human herpesvirus 4 [Epstein-Barr virus]
agcgccgcgguuucagcauc

SEQ ID NO: 1942859 - RNA, 17 nt, Human herpesvirus 4 [Epstein-Barr virus]
aauaaauguuacuucuu

SEQ ID NO: 1942860 - RNA, 18 nt, Human herpesvirus 4 [Epstein-Barr virus]
cucuuucuggccaaccug

SEQ ID NO: 1942861 - RNA, 13 nt, Human herpesvirus 4 [Epstein-Barr virus]
ccugcuucacgcc

SEQ ID NO: 1942862 - RNA, 17 nt, Human herpesvirus 4 [Epstein-Barr virus]
cgauguacccccgggga

SEQ ID NO: 1942863 - RNA, 17 nt, Human herpesvirus 4 [Epstein-Barr virus]
cugccuuacacuggaaa

SEQ ID NO: 1942864 - RNA, 16 nt, Human herpesvirus 4 [Epstein-Barr virus]
ccaagcaccacccagc

SEQ ID NO: 1942865 - RNA, 12 nt, Human herpesvirus 4 [Epstein-Barr virus]
agauagggacca

SEQ ID NO: 1942866 - RNA, 13 nt, Human herpesvirus 4 [Epstein-Barr virus]
cugacgcuccagg

SEQ ID NO: 1942867 - RNA, 20 nt, Human herpesvirus 4 [Epstein-Barr virus]
ugccccgguccccccagaag

SEQ ID NO: 1942868 - RNA, 17 nt, Human herpesvirus 4 [Epstein-Barr virus]
ccuccuggccagcaccc

SEQ ID NO: 1942869 - RNA, 13 nt, Human herpesvirus 4 [Epstein-Barr virus]
gccgcgcugcucg

SEQ ID NO: 1942870 - RNA, 13 nt, Human herpesvirus 4 [Epstein-Barr virus]
gccggagggacag

SEQ ID NO: 1942871 - RNA, 13 nt, Human herpesvirus 4 [Epstein-Barr virus]
uucugucuguaaa

SEQ ID NO: 1942872 - RNA, 17 nt, Human herpesvirus 4 [Epstein-Barr virus]
gccaugaccagcagcag

SEQ ID NO: 1942873 - RNA, 16 nt, Human herpesvirus 4 [Epstein-Barr virus]
cacacgaagccugccu

SEQ ID NO: 1942874 - RNA, 23 nt, Human herpesvirus 4 [Epstein-Barr virus]
caggccgccaugcucagggccac

SEQ ID NO: 1942875 - RNA, 14 nt, Human herpesvirus 4 [Epstein-Barr virus]
cuccauuccaccca

SEQ ID NO: 1942876 - RNA, 20 nt, Human herpesvirus 4 [Epstein-Barr virus]
gcggcucaggaucagggcca

SEQ ID NO: 1942877 - RNA, 12 nt, Human herpesvirus 4 [Epstein-Barr virus]
cagguggcugcu

SEQ ID NO: 1942878 - RNA, 14 nt, Human herpesvirus 4 [Epstein-Barr virus]
aguacagacuuuga

SEQ ID NO: 1942879 - RNA, 20 nt, Human herpesvirus 4 [Epstein-Barr virus]
acacuccauuaauuccacua

SEQ ID NO: 1942880 - RNA, 14 nt, Human herpesvirus 4 [Epstein-Barr virus]
aggcuucccgccua

SEQ ID NO: 1942881 - RNA, 15 nt, Human herpesvirus 4 [Epstein-Barr virus]
acaacggcugugacu

SEQ ID NO: 1942882 - RNA, 18 nt, Human herpesvirus 4 [Epstein-Barr virus]
gcuaucuuugcugaagau

SEQ ID NO: 1942883 - RNA, 22 nt, Human herpesvirus 4 [Epstein-Barr virus]
ccagugacgaagacccaucuga

SEQ ID NO: 1942884 - RNA, 15 nt, Human herpesvirus 4 [Epstein-Barr virus]
cagagcggcauccuc

SEQ ID NO: 1942885 - RNA, 16 nt, Human herpesvirus 4 [Epstein-Barr virus]
cccauguacagcacaa

SEQ ID NO: 1942886 - RNA, 13 nt, Human herpesvirus 4 [Epstein-Barr virus]
ccgagagcuccgc

SEQ ID NO: 1942887 - RNA, 17 nt, Human herpesvirus 4 [Epstein-Barr virus]
ugggagcaaccagcugg

SEQ ID NO: 1942888 - RNA, 17 nt, Human herpesvirus 4 [Epstein-Barr virus]
ccuugcucgcagcugga

SEQ ID NO: 1942889 - RNA, 13 nt, Human herpesvirus 4 [Epstein-Barr virus]
ucguuaugcacuc

SEQ ID NO: 1942890 - RNA, 15 nt, Human herpesvirus 4 [Epstein-Barr virus]
gcuuaugcagcaccu

SEQ ID NO: 1942891 - RNA, 15 nt, Human herpesvirus 4 [Epstein-Barr virus]
acugucacugugcac

SEQ ID NO: 1942892 - RNA, 22 nt, Human herpesvirus 4 [Epstein-Barr virus]
ucgugcucuucauguccacuga

SEQ ID NO: 1942893 - RNA, 22 nt, Human herpesvirus 4 [Epstein-Barr virus]
accugcacgagaccccugggcu

SEQ ID NO: 1942894 - RNA, 16 nt, Human herpesvirus 4 [Epstein-Barr virus]
gcugcgccugagcugc

SEQ ID NO: 1942895 - RNA, 20 nt, Human herpesvirus 4 [Epstein-Barr virus]
gacacuuuagagcucuggag

SEQ ID NO: 1942896 - RNA, 18 nt, Human herpesvirus 4 [Epstein-Barr virus]
gaggaggacaugugcaug

SEQ ID NO: 1942897 - RNA, 21 nt, Human herpesvirus 4 [Epstein-Barr virus]
ggcugugguaaccggugggcu

SEQ ID NO: 1942898 - RNA, 14 nt, Human herpesvirus 4 [Epstein-Barr virus]
gggagggagccugc

SEQ ID NO: 1942899 - RNA, 14 nt, Human herpesvirus 4 [Epstein-Barr virus]
gggcaggagcagga

SEQ ID NO: 1942900 - RNA, 19 nt, Human herpesvirus 4 [Epstein-Barr virus]
cgccagccaccccagacag

SEQ ID NO: 1942901 - RNA, 18 nt, Human herpesvirus 4 [Epstein-Barr virus]
cugucucugaaggaucca

SEQ ID NO: 1942902 - RNA, 20 nt, Human herpesvirus 4 [Epstein-Barr virus]
gugggccucucuggcugugc

SEQ ID NO: 1942903 - RNA, 20 nt, Human herpesvirus 4 [Epstein-Barr virus]
gcguugcgcaccaccgcagc

SEQ ID NO: 1942904 - RNA, 16 nt, Human herpesvirus 4 [Epstein-Barr virus]
uccuugucugcugcca

SEQ ID NO: 1942905 - RNA, 13 nt, Human herpesvirus 4 [Epstein-Barr virus]
uaacauccgagac

SEQ ID NO: 1942906 - RNA, 17 nt, Human herpesvirus 4 [Epstein-Barr virus]
uuacaaccaagccacua

SEQ ID NO: 1942907 - RNA, 15 nt, Human herpesvirus 4 [Epstein-Barr virus]
cagaaagaggcucug

SEQ ID NO: 1942908 - RNA, 18 nt, Human herpesvirus 4 [Epstein-Barr virus]
ugccuaauggccguccuc

SEQ ID NO: 1942909 - RNA, 13 nt, Human herpesvirus 4 [Epstein-Barr virus]
augaacccugggg

SEQ ID NO: 1942910 - RNA, 18 nt, Human herpesvirus 4 [Epstein-Barr virus]
ccagccagcgacugaucc

SEQ ID NO: 1942911 - RNA, 16 nt, Human herpesvirus 4 [Epstein-Barr virus]
cgguggaacaggagca

SEQ ID NO: 1942912 - RNA, 21 nt, Human herpesvirus 4 [Epstein-Barr virus]
cgggcaggcauuuuuggugcu

SEQ ID NO: 1942913 - RNA, 13 nt, Human herpesvirus 4 [Epstein-Barr virus]
cagccacgcagga

SEQ ID NO: 1942914 - RNA, 18 nt, Human herpesvirus 4 [Epstein-Barr virus]
ggggcaggaggggcagga

SEQ ID NO: 1942915 - RNA, 20 nt, Human herpesvirus 4 [Epstein-Barr virus]
gacccuucugcugcugcugg

SEQ ID NO: 1942916 - RNA, 23 nt, Human herpesvirus 4 [Epstein-Barr virus]
gccgagaucucuugcgcccaggc

SEQ ID NO: 1942917 - RNA, 22 nt, Human herpesvirus 4 [Epstein-Barr virus]
gccaggcucgcggaagagccca

SEQ ID NO: 1942918 - RNA, 21 nt, Human herpesvirus 4 [Epstein-Barr virus]
ggcgacuuggugccaccaucu

SEQ ID NO: 1942919 - RNA, 22 nt, Human herpesvirus 4 [Epstein-Barr virus]
uccacagccccacucuugccuc

SEQ ID NO: 1942920 - RNA, 13 nt, Human herpesvirus 4 [Epstein-Barr virus]
gcaggagcaggag

SEQ ID NO: 1942921 - RNA, 17 nt, Human herpesvirus 4 [Epstein-Barr virus]
aggugauguagaggcgc

SEQ ID NO: 1942922 - RNA, 14 nt, Human herpesvirus 4 [Epstein-Barr virus]
uaacauugaugaac

SEQ ID NO: 1942923 - RNA, 18 nt, Human herpesvirus 4 [Epstein-Barr virus]
uagaagugugucccccuc

SEQ ID NO: 1942924 - RNA, 22 nt, Human herpesvirus 4 [Epstein-Barr virus]
aggugggacaaaauggggucug

SEQ ID NO: 1942925 - RNA, 17 nt, Human herpesvirus 4 [Epstein-Barr virus]
ucagagaggccucuggg

SEQ ID NO: 1942926 - RNA, 23 nt, Human herpesvirus 4 [Epstein-Barr virus]
cgccagggcguacaccuggcugu

SEQ ID NO: 1942927 - RNA, 15 nt, Human herpesvirus 4 [Epstein-Barr virus]
cauccucagaggagg

SEQ ID NO: 1942928 - RNA, 23 nt, Human herpesvirus 4 [Epstein-Barr virus]
accuggaaauggccuaggagaga

SEQ ID NO: 1942929 - RNA, 22 nt, Human herpesvirus 4 [Epstein-Barr virus]
uauuaauaaacaauuacagaua

SEQ ID NO: 1942930 - RNA, 17 nt, Human herpesvirus 4 [Epstein-Barr virus]
cuaugcaugagccacag

SEQ ID NO: 1942931 - RNA, 22 nt, Human herpesvirus 4 [Epstein-Barr virus]
uugccugaagcuugcuggggcg

SEQ ID NO: 1942932 - RNA, 20 nt, Human herpesvirus 4 [Epstein-Barr virus]
gauuccugauuuuccucauu

SEQ ID NO: 1942933 - RNA, 13 nt, Human herpesvirus 4 [Epstein-Barr virus]
gacguggcugcgg

SEQ ID NO: 1942934 - RNA, 15 nt, Human herpesvirus 4 [Epstein-Barr virus]
cgaagcggucucaga

SEQ ID NO: 1942935 - RNA, 14 nt, Human herpesvirus 4 [Epstein-Barr virus]
agcuccggcugccc

SEQ ID NO: 1942936 - RNA, 20 nt, Human herpesvirus 4 [Epstein-Barr virus]
guuaucaccguaccaugagu

SEQ ID NO: 1942937 - RNA, 19 nt, Human herpesvirus 4 [Epstein-Barr virus]
acccuugguauugcgcugg

SEQ ID NO: 1942938 - RNA, 21 nt, Human herpesvirus 4 [Epstein-Barr virus]
uggugcgguuauaacugccag

SEQ ID NO: 1942939 - RNA, 10 nt, Human herpesvirus 4 [Epstein-Barr virus]
uggggagcua

SEQ ID NO: 1942940 - RNA, 18 nt, Human herpesvirus 4 [Epstein-Barr virus]
uaggugccuccagagccc

SEQ ID NO: 1942941 - RNA, 20 nt, Human herpesvirus 4 [Epstein-Barr virus]
accuccaaucaccagccacc

SEQ ID NO: 1942942 - RNA, 16 nt, Human herpesvirus 4 [Epstein-Barr virus]
aggccaccgucuaccc

SEQ ID NO: 1942943 - RNA, 16 nt, Human herpesvirus 4 [Epstein-Barr virus]
ucuacaaugccagggg

SEQ ID NO: 1942944 - RNA, 19 nt, Human herpesvirus 4 [Epstein-Barr virus]
gcugccgcuacugcugcua

SEQ ID NO: 1942945 - RNA, 21 nt, Human herpesvirus 4 [Epstein-Barr virus]
cacugaccugguuaacagacu

SEQ ID NO: 1942946 - RNA, 16 nt, Human herpesvirus 4 [Epstein-Barr virus]
gagcaggaggggcagg

SEQ ID NO: 1942947 - RNA, 19 nt, Human herpesvirus 4 [Epstein-Barr virus]
cugacccuucugcugcugc

SEQ ID NO: 1942948 - RNA, 16 nt, Human herpesvirus 4 [Epstein-Barr virus]
gcccccaccacuccca

SEQ ID NO: 1942949 - RNA, 16 nt, Human herpesvirus 4 [Epstein-Barr virus]
cauggcggacugcgcc

SEQ ID NO: 1942950 - RNA, 16 nt, Human herpesvirus 4 [Epstein-Barr virus]
gcaacauugcagggcu

SEQ ID NO: 1942951 - RNA, 12 nt, Human herpesvirus 4 [Epstein-Barr virus]
augcuaucuugu

SEQ ID NO: 1942952 - RNA, 15 nt, Human herpesvirus 4 [Epstein-Barr virus]
ccuggccaggcaccc

SEQ ID NO: 1942953 - RNA, 19 nt, Human herpesvirus 4 [Epstein-Barr virus]
agguacuaacacgcaauaa

SEQ ID NO: 1942954 - RNA, 16 nt, Human herpesvirus 4 [Epstein-Barr virus]
guuauaacugccagag

SEQ ID NO: 1942955 - RNA, 21 nt, Human herpesvirus 4 [Epstein-Barr virus]
cugccccucagccugcuccug

SEQ ID NO: 1942956 - RNA, 21 nt, Human herpesvirus 4 [Epstein-Barr virus]
cucccacuuuuaccccagucc

SEQ ID NO: 1942957 - RNA, 18 nt, Human herpesvirus 4 [Epstein-Barr virus]
acacgcuggucuugaauu

SEQ ID NO: 1942958 - RNA, 12 nt, Human herpesvirus 4 [Epstein-Barr virus]
ucuuugcuucac

SEQ ID NO: 1942959 - RNA, 14 nt, Human herpesvirus 4 [Epstein-Barr virus]
caggcuccuggauc

SEQ ID NO: 1942960 - RNA, 16 nt, Human herpesvirus 4 [Epstein-Barr virus]
uuagacagguaacuca

SEQ ID NO: 1942961 - RNA, 22 nt, Human herpesvirus 4 [Epstein-Barr virus]
ccuagugguuucggacacaccg

SEQ ID NO: 1942962 - RNA, 11 nt, Human herpesvirus 4 [Epstein-Barr virus]
guggcauugcg

SEQ ID NO: 1942963 - RNA, 18 nt, Human herpesvirus 4 [Epstein-Barr virus]
uccccggggacaccugca

SEQ ID NO: 1942964 - RNA, 14 nt, Human herpesvirus 4 [Epstein-Barr virus]
acuucagcuccagg

SEQ ID NO: 1942965 - RNA, 17 nt, Human herpesvirus 4 [Epstein-Barr virus]
cucuccagcaaccaaug

SEQ ID NO: 1942966 - RNA, 17 nt, Human herpesvirus 4 [Epstein-Barr virus]
cauccgccacccccguc

SEQ ID NO: 1942967 - RNA, 21 nt, Human herpesvirus 4 [Epstein-Barr virus]
cuugaccaguguguacauucc

SEQ ID NO: 1942968 - RNA, 16 nt, Human herpesvirus 4 [Epstein-Barr virus]
gugaggagcgcccacc

SEQ ID NO: 1942969 - RNA, 15 nt, Human herpesvirus 4 [Epstein-Barr virus]
acugccgccgccucc

SEQ ID NO: 1942970 - RNA, 15 nt, Human herpesvirus 4 [Epstein-Barr virus]
acauggugucuguaa

SEQ ID NO: 1942971 - RNA, 18 nt, Human herpesvirus 4 [Epstein-Barr virus]
cuuggcccucucacuucu

SEQ ID NO: 1942972 - RNA, 15 nt, Human herpesvirus 4 [Epstein-Barr virus]
acccagcagcagccc

SEQ ID NO: 1942973 - RNA, 17 nt, Human herpesvirus 4 [Epstein-Barr virus]
uacccggucgcauggug

SEQ ID NO: 1942974 - RNA, 16 nt, Human herpesvirus 4 [Epstein-Barr virus]
accugccggagggaca

SEQ ID NO: 1942975 - RNA, 16 nt, Human herpesvirus 4 [Epstein-Barr virus]
gggcugguggccuggg

SEQ ID NO: 1942976 - RNA, 17 nt, Human herpesvirus 4 [Epstein-Barr virus]
uacagugguucuccuga

SEQ ID NO: 1942977 - RNA, 15 nt, Human herpesvirus 4 [Epstein-Barr virus]
cuguguccugggcaa

SEQ ID NO: 1942978 - RNA, 17 nt, Human herpesvirus 4 [Epstein-Barr virus]
cggcugugagcgcacgu

SEQ ID NO: 1942979 - RNA, 23 nt, Human herpesvirus 4 [Epstein-Barr virus]
uauccagagcugagugcccaggg

SEQ ID NO: 1942980 - RNA, 22 nt, Human herpesvirus 4 [Epstein-Barr virus]
acuaggaaacggcgagcagggu

SEQ ID NO: 1942981 - RNA, 21 nt, Human herpesvirus 4 [Epstein-Barr virus]
gaaucuaguaugaaggcuggc

SEQ ID NO: 1942982 - RNA, 18 nt, Human herpesvirus 4 [Epstein-Barr virus]
caaugggagcacauuccc

SEQ ID NO: 1942983 - RNA, 20 nt, Human herpesvirus 4 [Epstein-Barr virus]
cugaacaucucauccccaga

SEQ ID NO: 1942984 - RNA, 21 nt, Human herpesvirus 4 [Epstein-Barr virus]
acaauagaauuuuugcagcua

SEQ ID NO: 1942985 - RNA, 19 nt, Human herpesvirus 4 [Epstein-Barr virus]
gcugcgacaggcccucgag

SEQ ID NO: 1942986 - RNA, 15 nt, Human herpesvirus 4 [Epstein-Barr virus]
uagaggcucaggcca

SEQ ID NO: 1942987 - RNA, 15 nt, Human herpesvirus 4 [Epstein-Barr virus]
gcaccagggccaggc

SEQ ID NO: 1942988 - RNA, 13 nt, Human herpesvirus 4 [Epstein-Barr virus]
aaggaggggcggc

SEQ ID NO: 1942989 - RNA, 18 nt, Human herpesvirus 4 [Epstein-Barr virus]
ggaggaggggggcaguga

SEQ ID NO: 1942990 - RNA, 21 nt, Human herpesvirus 4 [Epstein-Barr virus]
ugcuuuuugccaggccuguca

SEQ ID NO: 1942991 - RNA, 20 nt, Human herpesvirus 4 [Epstein-Barr virus]
gcagcucaccuauggucacu

SEQ ID NO: 1942992 - RNA, 15 nt, Human herpesvirus 4 [Epstein-Barr virus]
gaugacaccauggcc

SEQ ID NO: 1942993 - RNA, 20 nt, Human herpesvirus 4 [Epstein-Barr virus]
ccagccuguuuguccagcag

SEQ ID NO: 1942994 - RNA, 14 nt, Human herpesvirus 4 [Epstein-Barr virus]
gcacagccagagag

SEQ ID NO: 1942995 - RNA, 20 nt, Human herpesvirus 4 [Epstein-Barr virus]
ucuugucggacgaggaggaa

SEQ ID NO: 1942996 - RNA, 17 nt, Human herpesvirus 4 [Epstein-Barr virus]
aucuaguaugaaggcug

SEQ ID NO: 1942997 - RNA, 19 nt, Human herpesvirus 4 [Epstein-Barr virus]
ugccagaugugccugggcu

SEQ ID NO: 1942998 - RNA, 16 nt, Human herpesvirus 4 [Epstein-Barr virus]
accaggcccacugcaa

SEQ ID NO: 1942999 - RNA, 12 nt, Human herpesvirus 4 [Epstein-Barr virus]
aggaacagccuc

SEQ ID NO: 1943000 - RNA, 19 nt, Human herpesvirus 4 [Epstein-Barr virus]
gugggauggcggggccuug

SEQ ID NO: 1943001 - RNA, 18 nt, Human herpesvirus 4 [Epstein-Barr virus]
gcacaggaugacagcugu

SEQ ID NO: 1943002 - RNA, 14 nt, Human herpesvirus 4 [Epstein-Barr virus]
gauccgcaggggcg

SEQ ID NO: 1943003 - RNA, 21 nt, Human herpesvirus 4 [Epstein-Barr virus]
ccuucggacccugguacagga

SEQ ID NO: 1943004 - RNA, 21 nt, Human herpesvirus 4 [Epstein-Barr virus]
agggagacacaucuggaccag

SEQ ID NO: 1943005 - RNA, 18 nt, Human herpesvirus 4 [Epstein-Barr virus]
cgugugcacccggcugga

SEQ ID NO: 1943006 - RNA, 17 nt, Human herpesvirus 4 [Epstein-Barr virus]
accugauucccccugcu

SEQ ID NO: 1943007 - RNA, 14 nt, Human herpesvirus 4 [Epstein-Barr virus]
gcuggccgcagcug

SEQ ID NO: 1943008 - RNA, 21 nt, Human herpesvirus 4 [Epstein-Barr virus]
cacuuuguacagacuuuuggc

SEQ ID NO: 1943009 - RNA, 21 nt, Human herpesvirus 4 [Epstein-Barr virus]
gcaacugcguccucuaccugg

SEQ ID NO: 1943010 - RNA, 15 nt, Human herpesvirus 4 [Epstein-Barr virus]
caguguggcccgauc

SEQ ID NO: 1943011 - RNA, 13 nt, Human herpesvirus 4 [Epstein-Barr virus]
cugcuggucaugg

SEQ ID NO: 1943012 - RNA, 18 nt, Human herpesvirus 4 [Epstein-Barr virus]
acgccgccgccagcagcc

SEQ ID NO: 1943013 - RNA, 14 nt, Human herpesvirus 4 [Epstein-Barr virus]
cagggccgugcaug

SEQ ID NO: 1943014 - RNA, 13 nt, Human herpesvirus 4 [Epstein-Barr virus]
aucgccugccacu

SEQ ID NO: 1943015 - RNA, 23 nt, Human herpesvirus 4 [Epstein-Barr virus]
caaagcugaagaacggacugcgg

SEQ ID NO: 1943016 - RNA, 17 nt, Human herpesvirus 4 [Epstein-Barr virus]
ccuuguccgcugggcca

SEQ ID NO: 1943017 - RNA, 16 nt, Human herpesvirus 4 [Epstein-Barr virus]
guaaccuaugccugga

SEQ ID NO: 1943018 - RNA, 13 nt, Human herpesvirus 4 [Epstein-Barr virus]
gggguggaggcug

SEQ ID NO: 1943019 - RNA, 12 nt, Human herpesvirus 4 [Epstein-Barr virus]
cggccucaaagg

SEQ ID NO: 1943020 - RNA, 14 nt, Human herpesvirus 4 [Epstein-Barr virus]
auuuugccugaagc

SEQ ID NO: 1943021 - RNA, 21 nt, Human herpesvirus 4 [Epstein-Barr virus]
aagccuucuccuggacccugg

SEQ ID NO: 1943022 - RNA, 20 nt, Human herpesvirus 4 [Epstein-Barr virus]
cgagcagaaggccauggaga

SEQ ID NO: 1943023 - RNA, 13 nt, Human herpesvirus 4 [Epstein-Barr virus]
uuugcgaccccuc

SEQ ID NO: 1943024 - RNA, 17 nt, Human herpesvirus 4 [Epstein-Barr virus]
cgccuuguuucucagag

SEQ ID NO: 1943025 - RNA, 16 nt, Human herpesvirus 4 [Epstein-Barr virus]
cucuaaucccucuggg

SEQ ID NO: 1943026 - RNA, 18 nt, Human herpesvirus 4 [Epstein-Barr virus]
agaaggggcccuguacau

SEQ ID NO: 1943027 - RNA, 17 nt, Human herpesvirus 4 [Epstein-Barr virus]
caccucaaccuggagac

SEQ ID NO: 1943028 - RNA, 14 nt, Human herpesvirus 4 [Epstein-Barr virus]
agcuccucuccaaa

SEQ ID NO: 1943029 - RNA, 23 nt, Human herpesvirus 4 [Epstein-Barr virus]
agccuguucauagagaaagggaa

SEQ ID NO: 1943030 - RNA, 18 nt, Human herpesvirus 4 [Epstein-Barr virus]
ugggaggcccaggaccuu

SEQ ID NO: 1943031 - RNA, 22 nt, Human herpesvirus 4 [Epstein-Barr virus]
gguccagaagcagauagccggc

SEQ ID NO: 1943032 - RNA, 17 nt, Human herpesvirus 4 [Epstein-Barr virus]
gaggccagguagcccag

SEQ ID NO: 1943033 - RNA, 20 nt, Human herpesvirus 4 [Epstein-Barr virus]
agaggaggaggaugaagauc

SEQ ID NO: 1943034 - RNA, 15 nt, Human herpesvirus 4 [Epstein-Barr virus]
agcacgguagccuug

SEQ ID NO: 1943035 - RNA, 17 nt, Human herpesvirus 4 [Epstein-Barr virus]
gcacugugggggucggg

SEQ ID NO: 1943036 - RNA, 13 nt, Human herpesvirus 4 [Epstein-Barr virus]
cacaucucaggga

SEQ ID NO: 1943037 - RNA, 17 nt, Human herpesvirus 4 [Epstein-Barr virus]
ggcacaccagacauggu

SEQ ID NO: 1943038 - RNA, 15 nt, Human herpesvirus 4 [Epstein-Barr virus]
gaguccagggcccug

SEQ ID NO: 1943039 - RNA, 18 nt, Human herpesvirus 4 [Epstein-Barr virus]
cagcucaaccgccagggc

SEQ ID NO: 1943040 - RNA, 17 nt, Human herpesvirus 4 [Epstein-Barr virus]
ggacacacauggcacuc

SEQ ID NO: 1943041 - RNA, 17 nt, Human herpesvirus 4 [Epstein-Barr virus]
gccuugagggcaaagac

SEQ ID NO: 1943042 - RNA, 17 nt, Human herpesvirus 4 [Epstein-Barr virus]
agguggcugcugccaaa

SEQ ID NO: 1943043 - RNA, 20 nt, Human herpesvirus 4 [Epstein-Barr virus]
cagauagugaacguggaggu

SEQ ID NO: 1943044 - RNA, 22 nt, Human herpesvirus 4 [Epstein-Barr virus]
agccccuuuugccccccuggcg

SEQ ID NO: 1943045 - RNA, 17 nt, Human herpesvirus 4 [Epstein-Barr virus]
gccgugguugggcagaa

SEQ ID NO: 1943046 - RNA, 15 nt, Human herpesvirus 4 [Epstein-Barr virus]
cccagcccccucccg

SEQ ID NO: 1943047 - RNA, 18 nt, Human herpesvirus 4 [Epstein-Barr virus]
uuggugcugccugggggc

SEQ ID NO: 1943048 - RNA, 21 nt, Human herpesvirus 4 [Epstein-Barr virus]
guggccggugcugccagagcc

SEQ ID NO: 1943049 - RNA, 17 nt, Human herpesvirus 4 [Epstein-Barr virus]
cacccauggccaggcuc

SEQ ID NO: 1943050 - RNA, 23 nt, Human herpesvirus 4 [Epstein-Barr virus]
agaaucaccagagcccagaggag

SEQ ID NO: 1943051 - RNA, 23 nt, Human herpesvirus 4 [Epstein-Barr virus]
gacugcaaacccuggccgccgga

SEQ ID NO: 1943052 - RNA, 17 nt, Human herpesvirus 4 [Epstein-Barr virus]
ugcuggccgcagcuggc

SEQ ID NO: 1943053 - RNA, 19 nt, Human herpesvirus 4 [Epstein-Barr virus]
agacaugcagacuccaggu

SEQ ID NO: 1943054 - RNA, 23 nt, Human herpesvirus 4 [Epstein-Barr virus]
gucuaccucuguuccuucugcuc

SEQ ID NO: 1943055 - RNA, 22 nt, Human herpesvirus 4 [Epstein-Barr virus]
ccaaaaguagaggcucaggcca

SEQ ID NO: 1943056 - RNA, 22 nt, Human herpesvirus 4 [Epstein-Barr virus]
gcagcuagagcggguggaggag

SEQ ID NO: 1943057 - RNA, 17 nt, Human herpesvirus 4 [Epstein-Barr virus]
auugaaaccacgccugc

SEQ ID NO: 1943058 - RNA, 20 nt, Human herpesvirus 4 [Epstein-Barr virus]
cagacuccgaauauccccaa

SEQ ID NO: 1943059 - RNA, 17 nt, Human herpesvirus 4 [Epstein-Barr virus]
cucagcacuuugccagc

SEQ ID NO: 1943060 - RNA, 20 nt, Human herpesvirus 4 [Epstein-Barr virus]
caagcagguauugcagcugg

SEQ ID NO: 1943061 - RNA, 16 nt, Human herpesvirus 4 [Epstein-Barr virus]
uagagguuuugcuagg

SEQ ID NO: 1943062 - RNA, 17 nt, Human herpesvirus 4 [Epstein-Barr virus]
uccagccaguggucuac

SEQ ID NO: 1943063 - RNA, 23 nt, Human herpesvirus 4 [Epstein-Barr virus]
gaagcuagugcagggggcucggc

SEQ ID NO: 1943064 - RNA, 22 nt, Human herpesvirus 4 [Epstein-Barr virus]
cuugcuccaccagcuucucaaa

SEQ ID NO: 1943065 - RNA, 21 nt, Human herpesvirus 4 [Epstein-Barr virus]
cggcuagccugacuaagggug

SEQ ID NO: 1943066 - RNA, 15 nt, Human herpesvirus 4 [Epstein-Barr virus]
caggcucuccagccc

SEQ ID NO: 1943067 - RNA, 18 nt, Human herpesvirus 4 [Epstein-Barr virus]
auaugguuccccccaucu

SEQ ID NO: 1943068 - RNA, 15 nt, Human herpesvirus 4 [Epstein-Barr virus]
caccuugaggugcca

SEQ ID NO: 1943069 - RNA, 17 nt, Human herpesvirus 4 [Epstein-Barr virus]
guccuugucugcugcca

SEQ ID NO: 1943070 - RNA, 17 nt, Human herpesvirus 4 [Epstein-Barr virus]
gaaaaucugcuucuccc

SEQ ID NO: 1943071 - RNA, 21 nt, Human herpesvirus 4 [Epstein-Barr virus]
cggggugccuuagagucccug

SEQ ID NO: 1943072 - RNA, 13 nt, Human herpesvirus 4 [Epstein-Barr virus]
gguauuuggacga

SEQ ID NO: 1943073 - RNA, 21 nt, Human herpesvirus 4 [Epstein-Barr virus]
ugcggaucagucgcuggcugg

SEQ ID NO: 1943074 - RNA, 16 nt, Human herpesvirus 4 [Epstein-Barr virus]
cugccaucgggacaga

SEQ ID NO: 1943075 - RNA, 18 nt, Human herpesvirus 4 [Epstein-Barr virus]
aggcuccggcggcagugg

SEQ ID NO: 1943076 - RNA, 19 nt, Human herpesvirus 4 [Epstein-Barr virus]
guccccgagggugaggccc

SEQ ID NO: 1943077 - RNA, 21 nt, Human herpesvirus 4 [Epstein-Barr virus]
cagcaaccaauguaucccaaa

SEQ ID NO: 1943078 - RNA, 22 nt, Human herpesvirus 4 [Epstein-Barr virus]
guaaaaagcgggccugagucca

SEQ ID NO: 1943079 - RNA, 21 nt, Human herpesvirus 4 [Epstein-Barr virus]
ucccagaaagaagugggaccu

SEQ ID NO: 1943080 - RNA, 18 nt, Human herpesvirus 4 [Epstein-Barr virus]
aacggugauuaggcacug

SEQ ID NO: 1943081 - RNA, 16 nt, Human herpesvirus 4 [Epstein-Barr virus]
aaagcggcccagcaga

SEQ ID NO: 1943082 - RNA, 15 nt, Human herpesvirus 4 [Epstein-Barr virus]
ugaccaagcuaccag

SEQ ID NO: 1943083 - RNA, 13 nt, Human herpesvirus 4 [Epstein-Barr virus]
cuguagccacccg

SEQ ID NO: 1943084 - RNA, 18 nt, Human herpesvirus 4 [Epstein-Barr virus]
guguccagguguggaaaa

SEQ ID NO: 1943085 - RNA, 19 nt, Human herpesvirus 4 [Epstein-Barr virus]
cccgcaccccccgccacca

SEQ ID NO: 1943086 - RNA, 21 nt, Human herpesvirus 4 [Epstein-Barr virus]
augauagcagaagacuccugc

SEQ ID NO: 1943087 - RNA, 13 nt, Human herpesvirus 4 [Epstein-Barr virus]
ucacuguccagac

SEQ ID NO: 1943088 - RNA, 16 nt, Human herpesvirus 4 [Epstein-Barr virus]
cuuguccgcugggcca

SEQ ID NO: 1943089 - RNA, 23 nt, Human herpesvirus 4 [Epstein-Barr virus]
uuaacgggaggaaacaggaggag

SEQ ID NO: 1943090 - RNA, 16 nt, Human herpesvirus 4 [Epstein-Barr virus]
ccccaaaaacguccaa

SEQ ID NO: 1943091 - RNA, 21 nt, Human herpesvirus 4 [Epstein-Barr virus]
ugacagcuacgaaacugacca

SEQ ID NO: 1943092 - RNA, 16 nt, Human herpesvirus 4 [Epstein-Barr virus]
cucaggaucagggcca

SEQ ID NO: 1943093 - RNA, 14 nt, Human herpesvirus 4 [Epstein-Barr virus]
cuaguuaccacagg

SEQ ID NO: 1943094 - RNA, 22 nt, Human herpesvirus 4 [Epstein-Barr virus]
cuggcuccccauagacucccau

SEQ ID NO: 1943095 - RNA, 21 nt, Human herpesvirus 4 [Epstein-Barr virus]
uggacccuauggagggcagcg

SEQ ID NO: 1943096 - RNA, 17 nt, Human herpesvirus 4 [Epstein-Barr virus]
uauugaaaccacgccug

SEQ ID NO: 1943097 - RNA, 15 nt, Human herpesvirus 4 [Epstein-Barr virus]
agcuccagggccagc

SEQ ID NO: 1943098 - RNA, 12 nt, Human herpesvirus 4 [Epstein-Barr virus]
ccuggcucgccu

SEQ ID NO: 1943099 - RNA, 22 nt, Human herpesvirus 4 [Epstein-Barr virus]
ucagcuucgaggucuccccuga

SEQ ID NO: 1943100 - RNA, 13 nt, Human herpesvirus 4 [Epstein-Barr virus]
aauucccgccucc

SEQ ID NO: 1943101 - RNA, 20 nt, Human herpesvirus 4 [Epstein-Barr virus]
cucccauguaagccugccuc

SEQ ID NO: 1943102 - RNA, 17 nt, Human herpesvirus 4 [Epstein-Barr virus]
ccagcccuccucagaaa

SEQ ID NO: 1943103 - RNA, 12 nt, Human herpesvirus 4 [Epstein-Barr virus]
gucccuccucac

SEQ ID NO: 1943104 - RNA, 20 nt, Human herpesvirus 4 [Epstein-Barr virus]
aaugggcgcgggucccccua

SEQ ID NO: 1943105 - RNA, 17 nt, Human herpesvirus 4 [Epstein-Barr virus]
aggacauguuuggggag

SEQ ID NO: 1943106 - RNA, 20 nt, Human herpesvirus 4 [Epstein-Barr virus]
gaaguuuuaacaccugacca

SEQ ID NO: 1943107 - RNA, 18 nt, Human herpesvirus 4 [Epstein-Barr virus]
cuaaucgcugguggcagu

SEQ ID NO: 1943108 - RNA, 15 nt, Human herpesvirus 4 [Epstein-Barr virus]
guccaggggccacac

SEQ ID NO: 1943109 - RNA, 23 nt, Human herpesvirus 4 [Epstein-Barr virus]
uaccgccacgcgucagcaaacca

SEQ ID NO: 1943110 - RNA, 16 nt, Human herpesvirus 4 [Epstein-Barr virus]
uccucaccacucgaaa

SEQ ID NO: 1943111 - RNA, 18 nt, Human herpesvirus 4 [Epstein-Barr virus]
gcccuggaggccucaggc

SEQ ID NO: 1943112 - RNA, 21 nt, Human herpesvirus 4 [Epstein-Barr virus]
gcauuggcugcaaagggaccc

SEQ ID NO: 1943113 - RNA, 14 nt, Human herpesvirus 4 [Epstein-Barr virus]
ugccucugggugcu

SEQ ID NO: 1943114 - RNA, 22 nt, Human herpesvirus 4 [Epstein-Barr virus]
gcccccucuuuguggccuuccu

SEQ ID NO: 1943115 - RNA, 23 nt, Human herpesvirus 4 [Epstein-Barr virus]
caauuggcacucacccccgagga

SEQ ID NO: 1943116 - RNA, 23 nt, Human herpesvirus 4 [Epstein-Barr virus]
caggugccuuuuguacaagcuuu

SEQ ID NO: 1943117 - RNA, 12 nt, Human herpesvirus 4 [Epstein-Barr virus]
agugcagggggc

SEQ ID NO: 1943118 - RNA, 15 nt, Human herpesvirus 4 [Epstein-Barr virus]
aaacugaaucuccac

SEQ ID NO: 1943119 - RNA, 13 nt, Human herpesvirus 4 [Epstein-Barr virus]
ccgaggcacuugc

SEQ ID NO: 1943120 - RNA, 12 nt, Human herpesvirus 4 [Epstein-Barr virus]
gccccucagccu

SEQ ID NO: 1943121 - RNA, 22 nt, Human herpesvirus 4 [Epstein-Barr virus]
ugagggacguaucugggcacuu

SEQ ID NO: 1943122 - RNA, 18 nt, Human herpesvirus 4 [Epstein-Barr virus]
aucaccuggguacccaaa

SEQ ID NO: 1943123 - RNA, 15 nt, Human herpesvirus 4 [Epstein-Barr virus]
caugcacggcccuga

SEQ ID NO: 1943124 - RNA, 15 nt, Human herpesvirus 4 [Epstein-Barr virus]
acaucugcccggcua

SEQ ID NO: 1943125 - RNA, 16 nt, Human herpesvirus 4 [Epstein-Barr virus]
ggccccggucacccca

SEQ ID NO: 1943126 - RNA, 11 nt, Human herpesvirus 4 [Epstein-Barr virus]
acuuccuggga

SEQ ID NO: 1943127 - RNA, 17 nt, Human herpesvirus 4 [Epstein-Barr virus]
cagccccgcccucccca

SEQ ID NO: 1943128 - RNA, 22 nt, Human herpesvirus 4 [Epstein-Barr virus]
acgugccucagauagccggacc

SEQ ID NO: 1943129 - RNA, 21 nt, Human herpesvirus 4 [Epstein-Barr virus]
caugacagucccguugguggu

SEQ ID NO: 1943130 - RNA, 15 nt, Human herpesvirus 4 [Epstein-Barr virus]
ugguggcagcaggcg

SEQ ID NO: 1943131 - RNA, 17 nt, Human herpesvirus 4 [Epstein-Barr virus]
ggcuagacgcagcugug

SEQ ID NO: 1943132 - RNA, 16 nt, Human herpesvirus 4 [Epstein-Barr virus]
gcacucugaccaggac

SEQ ID NO: 1943133 - RNA, 15 nt, Human herpesvirus 4 [Epstein-Barr virus]
cgccaccggcuuggc

SEQ ID NO: 1943134 - RNA, 20 nt, Human herpesvirus 4 [Epstein-Barr virus]
cucagaauugucacugagaa

SEQ ID NO: 1943135 - RNA, 18 nt, Human herpesvirus 4 [Epstein-Barr virus]
cagaucccauuuuucacu

SEQ ID NO: 1943136 - RNA, 14 nt, Human herpesvirus 4 [Epstein-Barr virus]
caaccaggcccacu

SEQ ID NO: 1943137 - RNA, 17 nt, Human herpesvirus 4 [Epstein-Barr virus]
gcugaccggcucggcca

SEQ ID NO: 1943138 - RNA, 14 nt, Human herpesvirus 4 [Epstein-Barr virus]
ggccggugcugcca

SEQ ID NO: 1943139 - RNA, 16 nt, Human herpesvirus 4 [Epstein-Barr virus]
gaugagcacgugugga

SEQ ID NO: 1943140 - RNA, 23 nt, Human herpesvirus 4 [Epstein-Barr virus]
cuagauuuccuacaacucagccc

SEQ ID NO: 1943141 - RNA, 20 nt, Human herpesvirus 4 [Epstein-Barr virus]
gagaggccucugccgcgcug

SEQ ID NO: 1943142 - RNA, 19 nt, Human herpesvirus 4 [Epstein-Barr virus]
acacggaaaccacaacagc

SEQ ID NO: 1943143 - RNA, 12 nt, Human herpesvirus 4 [Epstein-Barr virus]
gcccccugaccu

SEQ ID NO: 1943144 - RNA, 12 nt, Human herpesvirus 4 [Epstein-Barr virus]
gcaggggcgccg

SEQ ID NO: 1943145 - RNA, 18 nt, Human herpesvirus 4 [Epstein-Barr virus]
aacauaaaugccccaucu

SEQ ID NO: 1943146 - RNA, 23 nt, Human herpesvirus 4 [Epstein-Barr virus]
ccucagcgcagggaugccuggac

SEQ ID NO: 1943147 - RNA, 15 nt, Human herpesvirus 4 [Epstein-Barr virus]
uggccgccggauggc

SEQ ID NO: 1943148 - RNA, 15 nt, Human herpesvirus 4 [Epstein-Barr virus]
cgcuccgcgcucggc

SEQ ID NO: 1943149 - RNA, 17 nt, Human herpesvirus 4 [Epstein-Barr virus]
acccagccacuuacagc

SEQ ID NO: 1943150 - RNA, 20 nt, Human herpesvirus 4 [Epstein-Barr virus]
gaaucgguaaggaggggcuc

SEQ ID NO: 1943151 - RNA, 15 nt, Human herpesvirus 4 [Epstein-Barr virus]
caggugcacgcuccc

SEQ ID NO: 1943152 - RNA, 22 nt, Human herpesvirus 4 [Epstein-Barr virus]
cuccuuggagcuguaacugugg

SEQ ID NO: 1943153 - RNA, 14 nt, Human herpesvirus 4 [Epstein-Barr virus]
cggggaggccaggu

SEQ ID NO: 1943154 - RNA, 22 nt, Human herpesvirus 4 [Epstein-Barr virus]
ugcccccuuuguggugggacug

SEQ ID NO: 1943155 - RNA, 18 nt, Human herpesvirus 4 [Epstein-Barr virus]
gcacagaucugaccacgg

SEQ ID NO: 1943156 - RNA, 23 nt, Human herpesvirus 4 [Epstein-Barr virus]
ggguggcagcccccuccuccagg

SEQ ID NO: 1943157 - RNA, 21 nt, Human herpesvirus 4 [Epstein-Barr virus]
ggagggcgcucugcgccagcc

SEQ ID NO: 1943158 - RNA, 17 nt, Human herpesvirus 4 [Epstein-Barr virus]
cgcuuccacccccugga

SEQ ID NO: 1943159 - RNA, 12 nt, Human herpesvirus 4 [Epstein-Barr virus]
gcugcuggucau

SEQ ID NO: 1943160 - RNA, 20 nt, Human herpesvirus 4 [Epstein-Barr virus]
ggcccuccagcguggucaua

SEQ ID NO: 1943161 - RNA, 15 nt, Human herpesvirus 4 [Epstein-Barr virus]
ggaggaggggcagga

SEQ ID NO: 1943162 - RNA, 20 nt, Human herpesvirus 4 [Epstein-Barr virus]
ccagugccuccgccugagcc

SEQ ID NO: 1943163 - RNA, 17 nt, Human herpesvirus 4 [Epstein-Barr virus]
cugucucuuucuggcca

SEQ ID NO: 1943164 - RNA, 18 nt, Human herpesvirus 4 [Epstein-Barr virus]
guggccccggcuggccau

SEQ ID NO: 1943165 - RNA, 23 nt, Human herpesvirus 4 [Epstein-Barr virus]
ccacugagcaagauccuucuggc

SEQ ID NO: 1943166 - RNA, 22 nt, Human herpesvirus 4 [Epstein-Barr virus]
aaggagugccucugggugcuga

SEQ ID NO: 1943167 - RNA, 21 nt, Human herpesvirus 4 [Epstein-Barr virus]
guaauccuugggugaccuggc

SEQ ID NO: 1943168 - RNA, 14 nt, Human herpesvirus 4 [Epstein-Barr virus]
gcuuacagccagag

SEQ ID NO: 1943169 - RNA, 20 nt, Human herpesvirus 4 [Epstein-Barr virus]
gcgagcagcgcggcagaggc

SEQ ID NO: 1943170 - RNA, 23 nt, Human herpesvirus 4 [Epstein-Barr virus]
cuggcuuucguccucuggcucuc

SEQ ID NO: 1943171 - RNA, 22 nt, Human herpesvirus 4 [Epstein-Barr virus]
aggggucaccuuggauccccuu

SEQ ID NO: 1943172 - RNA, 23 nt, Human herpesvirus 4 [Epstein-Barr virus]
ccuaaacgugauggugcuggucu

SEQ ID NO: 1943173 - RNA, 20 nt, Human herpesvirus 4 [Epstein-Barr virus]
ugagcagggcuucguccagg

SEQ ID NO: 1943174 - RNA, 23 nt, Human herpesvirus 4 [Epstein-Barr virus]
acacugccaagguugaagagcag

SEQ ID NO: 1943175 - RNA, 19 nt, Human herpesvirus 4 [Epstein-Barr virus]
gugaugguacggaugauca

SEQ ID NO: 1943176 - RNA, 15 nt, Human herpesvirus 4 [Epstein-Barr virus]
cuaacacgcaauaaa

SEQ ID NO: 1943177 - RNA, 17 nt, Human herpesvirus 4 [Epstein-Barr virus]
ucauccgaggcugagaa

SEQ ID NO: 1943178 - RNA, 20 nt, Human herpesvirus 4 [Epstein-Barr virus]
aucgggcuuuguugggucug

SEQ ID NO: 1943179 - RNA, 13 nt, Human herpesvirus 4 [Epstein-Barr virus]
cuggucaucagcc

SEQ ID NO: 1943180 - RNA, 12 nt, Human herpesvirus 4 [Epstein-Barr virus]
cuugcuggggcg

SEQ ID NO: 1943181 - RNA, 20 nt, Human herpesvirus 4 [Epstein-Barr virus]
gcacguuuaccagugugcca

SEQ ID NO: 1943182 - RNA, 14 nt, Human herpesvirus 4 [Epstein-Barr virus]
ucuacaaugccagg

SEQ ID NO: 1943183 - RNA, 17 nt, Human herpesvirus 4 [Epstein-Barr virus]
agcagcuggauguacag

SEQ ID NO: 1943184 - RNA, 20 nt, Human herpesvirus 4 [Epstein-Barr virus]
uacgcccgacaauaaaguug

SEQ ID NO: 1943185 - RNA, 18 nt, Human herpesvirus 4 [Epstein-Barr virus]
cagaggacuguucucugc

SEQ ID NO: 1943186 - RNA, 22 nt, Human herpesvirus 4 [Epstein-Barr virus]
cuggaggucuucucugacaaau

SEQ ID NO: 1943187 - RNA, 13 nt, Human herpesvirus 4 [Epstein-Barr virus]
ggugcccccacca

SEQ ID NO: 1943188 - RNA, 12 nt, Human herpesvirus 4 [Epstein-Barr virus]
gugggaggccca

SEQ ID NO: 1943189 - RNA, 12 nt, Human herpesvirus 4 [Epstein-Barr virus]
gcccagcccccu

SEQ ID NO: 1943190 - RNA, 12 nt, Human herpesvirus 4 [Epstein-Barr virus]
cagaugugccug

SEQ ID NO: 1943191 - RNA, 22 nt, Human herpesvirus 4 [Epstein-Barr virus]
gcggcaagggcucaccagggag

SEQ ID NO: 1943192 - RNA, 14 nt, Human herpesvirus 4 [Epstein-Barr virus]
ccaggccucagcgu

SEQ ID NO: 1943193 - RNA, 22 nt, Human herpesvirus 4 [Epstein-Barr virus]
cggcgcucgucguucaggaaca

SEQ ID NO: 1943194 - RNA, 22 nt, Human herpesvirus 4 [Epstein-Barr virus]
cucuugucggacgaggaggaag

SEQ ID NO: 1943195 - RNA, 15 nt, Human herpesvirus 4 [Epstein-Barr virus]
acccuucugcugcug

SEQ ID NO: 1943196 - RNA, 16 nt, Human herpesvirus 4 [Epstein-Barr virus]
gcuggacgagguccug

SEQ ID NO: 1943197 - RNA, 21 nt, Human herpesvirus 4 [Epstein-Barr virus]
ccuagccccgggcccagcccu

SEQ ID NO: 1943198 - RNA, 14 nt, Human herpesvirus 4 [Epstein-Barr virus]
ccuccagagccccu

SEQ ID NO: 1943199 - RNA, 23 nt, Human herpesvirus 4 [Epstein-Barr virus]
gcgcaacgccggccugcuggccg

SEQ ID NO: 1943200 - RNA, 13 nt, Human herpesvirus 4 [Epstein-Barr virus]
cuuucuaccaggg

SEQ ID NO: 1943201 - RNA, 21 nt, Human herpesvirus 4 [Epstein-Barr virus]
agacacgucguucaugagagg

SEQ ID NO: 1943202 - RNA, 18 nt, Human herpesvirus 4 [Epstein-Barr virus]
acagggguauguggugcc

SEQ ID NO: 1943203 - RNA, 22 nt, Human herpesvirus 4 [Epstein-Barr virus]
cuccuggaucuggggcuggccu

SEQ ID NO: 1943204 - RNA, 18 nt, Human herpesvirus 4 [Epstein-Barr virus]
gcagaccccagagcagcc

SEQ ID NO: 1943205 - RNA, 14 nt, Human herpesvirus 4 [Epstein-Barr virus]
uguuuguacuucuu

SEQ ID NO: 1943206 - RNA, 20 nt, Human herpesvirus 4 [Epstein-Barr virus]
gccuacugauggccaucuuu

SEQ ID NO: 1943207 - RNA, 14 nt, Human herpesvirus 4 [Epstein-Barr virus]
cuagcuucagggaa

SEQ ID NO: 1943208 - RNA, 12 nt, Human herpesvirus 4 [Epstein-Barr virus]
gggaugagcugg

SEQ ID NO: 1943209 - RNA, 14 nt, Human herpesvirus 4 [Epstein-Barr virus]
agccccacucuugc

SEQ ID NO: 1943210 - RNA, 17 nt, Human herpesvirus 4 [Epstein-Barr virus]
ugagcccaccugucuga

SEQ ID NO: 1943211 - RNA, 23 nt, Human herpesvirus 4 [Epstein-Barr virus]
caauccauuaucuuggcaccccg

SEQ ID NO: 1943212 - RNA, 12 nt, Human herpesvirus 4 [Epstein-Barr virus]
agcccuccucag

SEQ ID NO: 1943213 - RNA, 14 nt, Human herpesvirus 4 [Epstein-Barr virus]
uccuugucugcugc

SEQ ID NO: 1943214 - RNA, 15 nt, Human herpesvirus 4 [Epstein-Barr virus]
gguggagauagggac

SEQ ID NO: 1943215 - RNA, 23 nt, Human herpesvirus 4 [Epstein-Barr virus]
uccuggccgggcgccugcuccac

SEQ ID NO: 1943216 - RNA, 18 nt, Human herpesvirus 4 [Epstein-Barr virus]
cucgcggaagagcccaaa

SEQ ID NO: 1943217 - RNA, 21 nt, Human herpesvirus 4 [Epstein-Barr virus]
cgcgcugcucgccccugguag

SEQ ID NO: 1943218 - RNA, 12 nt, Human herpesvirus 4 [Epstein-Barr virus]
cuggccaaccug

SEQ ID NO: 1943219 - RNA, 20 nt, Human herpesvirus 4 [Epstein-Barr virus]
ccacuuacaaccaagccacu

SEQ ID NO: 1943220 - RNA, 23 nt, Human herpesvirus 4 [Epstein-Barr virus]
ggggcaaagccagcgcacccggg

SEQ ID NO: 1943221 - RNA, 15 nt, Human herpesvirus 4 [Epstein-Barr virus]
ugaggcaauggccac

SEQ ID NO: 1943222 - RNA, 14 nt, Human herpesvirus 4 [Epstein-Barr virus]
aagaagauugaaga

SEQ ID NO: 1943223 - RNA, 23 nt, Human herpesvirus 4 [Epstein-Barr virus]
gcccagcccuccucagaaaacuc

SEQ ID NO: 1943224 - RNA, 16 nt, Human herpesvirus 4 [Epstein-Barr virus]
agccccagccccuccu

SEQ ID NO: 1943225 - RNA, 13 nt, Human herpesvirus 4 [Epstein-Barr virus]
uauugaauuccac

SEQ ID NO: 1943226 - RNA, 13 nt, Human herpesvirus 4 [Epstein-Barr virus]
gagaucaggccaa

SEQ ID NO: 1943227 - RNA, 14 nt, Human herpesvirus 4 [Epstein-Barr virus]
gucacugugcacuc

SEQ ID NO: 1943228 - RNA, 16 nt, Human herpesvirus 4 [Epstein-Barr virus]
ccgggaggugcugggu

SEQ ID NO: 1943229 - RNA, 22 nt, Human herpesvirus 4 [Epstein-Barr virus]
guggcccucgguggugggcugc

SEQ ID NO: 1943230 - RNA, 16 nt, Human herpesvirus 4 [Epstein-Barr virus]
uguuucccgacgccaa

SEQ ID NO: 1943231 - RNA, 20 nt, Human herpesvirus 4 [Epstein-Barr virus]
ccagguacaggaccuggaaa

SEQ ID NO: 1943232 - RNA, 18 nt, Human herpesvirus 4 [Epstein-Barr virus]
ucgggcaagauggagagg

SEQ ID NO: 1943233 - RNA, 22 nt, Human herpesvirus 4 [Epstein-Barr virus]
uguggaaaaucucgcucagagc

SEQ ID NO: 1943234 - RNA, 22 nt, Human herpesvirus 4 [Epstein-Barr virus]
ccgcugggccaggucacagacc

SEQ ID NO: 1943235 - RNA, 15 nt, Human herpesvirus 4 [Epstein-Barr virus]
ucggugcgcagaccc

SEQ ID NO: 1943236 - RNA, 19 nt, Human herpesvirus 4 [Epstein-Barr virus]
cacuacuacaccgagcaga

SEQ ID NO: 1943237 - RNA, 19 nt, Human herpesvirus 4 [Epstein-Barr virus]
ggagcacucggggcccuuu

SEQ ID NO: 1943238 - RNA, 17 nt, Human herpesvirus 4 [Epstein-Barr virus]
gggacgaggacgagaag

SEQ ID NO: 1943239 - RNA, 15 nt, Human herpesvirus 4 [Epstein-Barr virus]
gcaguccuugugucu

SEQ ID NO: 1943240 - RNA, 15 nt, Human herpesvirus 4 [Epstein-Barr virus]
accaugccaucucug

SEQ ID NO: 1943241 - RNA, 19 nt, Human herpesvirus 4 [Epstein-Barr virus]
uuggcaacgagagcaauac

SEQ ID NO: 1943242 - RNA, 16 nt, Human herpesvirus 4 [Epstein-Barr virus]
gccucuacgccccaga

SEQ ID NO: 1943243 - RNA, 14 nt, Human herpesvirus 4 [Epstein-Barr virus]
gggaguaaggccgc

SEQ ID NO: 1943244 - RNA, 23 nt, Human herpesvirus 4 [Epstein-Barr virus]
agcuccgugagcaggagcuugag

SEQ ID NO: 1943245 - RNA, 16 nt, Human herpesvirus 4 [Epstein-Barr virus]
ccuggcuuccacucac

SEQ ID NO: 1943246 - RNA, 12 nt, Human herpesvirus 4 [Epstein-Barr virus]
cuuuauaugaaa

SEQ ID NO: 1943247 - RNA, 16 nt, Human herpesvirus 4 [Epstein-Barr virus]
cuccgccguccacucu

SEQ ID NO: 1943248 - RNA, 15 nt, Human herpesvirus 4 [Epstein-Barr virus]
uaccuuccucugccc

SEQ ID NO: 1943249 - RNA, 19 nt, Human herpesvirus 4 [Epstein-Barr virus]
gcccacgucuuuaccaccu

SEQ ID NO: 1943250 - RNA, 16 nt, Human herpesvirus 4 [Epstein-Barr virus]
aaggcucugcacagga

SEQ ID NO: 1943251 - RNA, 18 nt, Human herpesvirus 4 [Epstein-Barr virus]
cuucaggggaaucucugc

SEQ ID NO: 1943252 - RNA, 12 nt, Human herpesvirus 4 [Epstein-Barr virus]
cauacagcagcu

SEQ ID NO: 1943253 - RNA, 15 nt, Human herpesvirus 4 [Epstein-Barr virus]
acggaugcugcagag

SEQ ID NO: 1943254 - RNA, 16 nt, Human herpesvirus 4 [Epstein-Barr virus]
acuacaauguuccuuc

SEQ ID NO: 1943255 - RNA, 22 nt, Human herpesvirus 4 [Epstein-Barr virus]
ggguaacauuguacagagcugu

SEQ ID NO: 1943256 - RNA, 17 nt, Human herpesvirus 4 [Epstein-Barr virus]
gccaaugggggaggaga

SEQ ID NO: 1943257 - RNA, 15 nt, Human herpesvirus 4 [Epstein-Barr virus]
auguggugggggcua

SEQ ID NO: 1943258 - RNA, 13 nt, Human herpesvirus 4 [Epstein-Barr virus]
caugucagcucca

SEQ ID NO: 1943259 - RNA, 19 nt, Human herpesvirus 4 [Epstein-Barr virus]
agaccucgaguccggggag

SEQ ID NO: 1943260 - RNA, 15 nt, Human herpesvirus 4 [Epstein-Barr virus]
gaggaggggcaggag

SEQ ID NO: 1943261 - RNA, 12 nt, Human herpesvirus 4 [Epstein-Barr virus]
aacaggcugcug

SEQ ID NO: 1943262 - RNA, 23 nt, Human herpesvirus 4 [Epstein-Barr virus]
aacuggggcugguggccugggag

SEQ ID NO: 1943263 - RNA, 15 nt, Human herpesvirus 4 [Epstein-Barr virus]
ugguucaguggacac

SEQ ID NO: 1943264 - RNA, 22 nt, Human herpesvirus 4 [Epstein-Barr virus]
ugcgacggcuuuagccuggccu

SEQ ID NO: 1943265 - RNA, 15 nt, Human herpesvirus 4 [Epstein-Barr virus]
gcucauaccuccacu

SEQ ID NO: 1943266 - RNA, 18 nt, Human herpesvirus 4 [Epstein-Barr virus]
cgggaggggcaggagcag

SEQ ID NO: 1943267 - RNA, 21 nt, Human herpesvirus 4 [Epstein-Barr virus]
gacccuccugucaccaccucc

SEQ ID NO: 1943268 - RNA, 16 nt, Human herpesvirus 4 [Epstein-Barr virus]
gcucaccccugugcag

SEQ ID NO: 1943269 - RNA, 18 nt, Human herpesvirus 4 [Epstein-Barr virus]
cucggggcuggggagaug

SEQ ID NO: 1943270 - RNA, 20 nt, Human herpesvirus 4 [Epstein-Barr virus]
ucugcccccugucucuuucu

SEQ ID NO: 1943271 - RNA, 14 nt, Human herpesvirus 4 [Epstein-Barr virus]
acccccaccacccc

SEQ ID NO: 1943272 - RNA, 13 nt, Human herpesvirus 4 [Epstein-Barr virus]
cgcagaggccauc

SEQ ID NO: 1943273 - RNA, 23 nt, Human herpesvirus 4 [Epstein-Barr virus]
accaacaagcagguauugcagcu

SEQ ID NO: 1943274 - RNA, 17 nt, Human herpesvirus 4 [Epstein-Barr virus]
gccagccggcucgaccg

SEQ ID NO: 1943275 - RNA, 15 nt, Human herpesvirus 4 [Epstein-Barr virus]
ucucuuaugccugug

SEQ ID NO: 1943276 - RNA, 21 nt, Human herpesvirus 4 [Epstein-Barr virus]
caggcagccuugcguggugcu

SEQ ID NO: 1943277 - RNA, 20 nt, Human herpesvirus 4 [Epstein-Barr virus]
accagcuucgagagccacga

SEQ ID NO: 1943278 - RNA, 14 nt, Human herpesvirus 4 [Epstein-Barr virus]
ccugccucugcucu

SEQ ID NO: 1943279 - RNA, 20 nt, Human herpesvirus 4 [Epstein-Barr virus]
gccuccagcucggccagcag

SEQ ID NO: 1943280 - RNA, 19 nt, Human herpesvirus 4 [Epstein-Barr virus]
aaauaaauguuacuucuuu

SEQ ID NO: 1943281 - RNA, 18 nt, Human herpesvirus 4 [Epstein-Barr virus]
cgggcccagcccuccuca

SEQ ID NO: 1943282 - RNA, 11 nt, Human herpesvirus 4 [Epstein-Barr virus]
aaccugagccu

SEQ ID NO: 1943283 - RNA, 22 nt, Human herpesvirus 4 [Epstein-Barr virus]
ugccauuguuuaccgccaucgc

SEQ ID NO: 1943284 - RNA, 21 nt, Human herpesvirus 4 [Epstein-Barr virus]
acugggaugaacccuggggca

SEQ ID NO: 1943285 - RNA, 13 nt, Human herpesvirus 4 [Epstein-Barr virus]
cgaggggccaggu

SEQ ID NO: 1943286 - RNA, 13 nt, Human herpesvirus 4 [Epstein-Barr virus]
ggcauucagauuu

SEQ ID NO: 1943287 - RNA, 13 nt, Human herpesvirus 4 [Epstein-Barr virus]
auucacaucucag

SEQ ID NO: 1943288 - RNA, 21 nt, Human herpesvirus 4 [Epstein-Barr virus]
guaucccaaauaaauguuacu

SEQ ID NO: 1943289 - RNA, 18 nt, Human herpesvirus 4 [Epstein-Barr virus]
ccgccaggaccuggaugc

SEQ ID NO: 1943290 - RNA, 22 nt, Human herpesvirus 4 [Epstein-Barr virus]
gcggaggccgagcagggacugg

SEQ ID NO: 1943291 - RNA, 16 nt, Human herpesvirus 4 [Epstein-Barr virus]
cuguuccuucugcucc

SEQ ID NO: 1943292 - RNA, 22 nt, Human herpesvirus 4 [Epstein-Barr virus]
cccacgguggaacaggagcagg

SEQ ID NO: 1943293 - RNA, 14 nt, Human herpesvirus 4 [Epstein-Barr virus]
acuccaccugccgg

SEQ ID NO: 1943294 - RNA, 20 nt, Human herpesvirus 4 [Epstein-Barr virus]
uagcgacauuuaccugguga

SEQ ID NO: 1943295 - RNA, 14 nt, Human herpesvirus 4 [Epstein-Barr virus]
caucacaagucaca

SEQ ID NO: 1943296 - RNA, 20 nt, Human herpesvirus 4 [Epstein-Barr virus]
cacuuccacagcaauggcac

SEQ ID NO: 1943297 - RNA, 16 nt, Human herpesvirus 4 [Epstein-Barr virus]
ugucggggcugcuggc

SEQ ID NO: 1943298 - RNA, 18 nt, Human herpesvirus 4 [Epstein-Barr virus]
aucacaucaagcagaaag

SEQ ID NO: 1943299 - RNA, 17 nt, Human herpesvirus 4 [Epstein-Barr virus]
guccgccaugaccagca

SEQ ID NO: 1943300 - RNA, 19 nt, Human herpesvirus 4 [Epstein-Barr virus]
guauaaagaaugcccacca

SEQ ID NO: 1943301 - RNA, 19 nt, Human herpesvirus 4 [Epstein-Barr virus]
acgaacuccuccagcagug

SEQ ID NO: 1943302 - RNA, 21 nt, Human herpesvirus 4 [Epstein-Barr virus]
caucaggcgaaggcggagaag

SEQ ID NO: 1943303 - RNA, 17 nt, Human herpesvirus 4 [Epstein-Barr virus]
gcagagguugggccacg

SEQ ID NO: 1943304 - RNA, 17 nt, Human herpesvirus 4 [Epstein-Barr virus]
aggcagaggaaggccac

SEQ ID NO: 1943305 - RNA, 13 nt, Human herpesvirus 4 [Epstein-Barr virus]
ucuggcacugcua

SEQ ID NO: 1943306 - RNA, 16 nt, Human herpesvirus 4 [Epstein-Barr virus]
cggguagaccacuggc

SEQ ID NO: 1943307 - RNA, 15 nt, Human herpesvirus 4 [Epstein-Barr virus]
guaaccuaugccugg

SEQ ID NO: 1943308 - RNA, 13 nt, Human herpesvirus 4 [Epstein-Barr virus]
cccacccuggaac

SEQ ID NO: 1943309 - RNA, 23 nt, Human herpesvirus 4 [Epstein-Barr virus]
gugggccucucuggcugugcuga

SEQ ID NO: 1943310 - RNA, 16 nt, Human herpesvirus 4 [Epstein-Barr virus]
ugcugaugugcugccc

SEQ ID NO: 1943311 - RNA, 20 nt, Human herpesvirus 4 [Epstein-Barr virus]
gucccaaacauaaaugcccc

SEQ ID NO: 1943312 - RNA, 15 nt, Human herpesvirus 4 [Epstein-Barr virus]
ggugaaggcucgacg

SEQ ID NO: 1943313 - RNA, 13 nt, Human herpesvirus 4 [Epstein-Barr virus]
gcaggaggggcag

SEQ ID NO: 1943314 - RNA, 15 nt, Human herpesvirus 4 [Epstein-Barr virus]
ugaacuuuaacauug

SEQ ID NO: 1943315 - RNA, 11 nt, Human herpesvirus 4 [Epstein-Barr virus]
ugaccaacaug

SEQ ID NO: 1943316 - RNA, 15 nt, Human herpesvirus 4 [Epstein-Barr virus]
cccaacagucuucag

SEQ ID NO: 1943317 - RNA, 20 nt, Human herpesvirus 4 [Epstein-Barr virus]
ggcugacguccaccccaccc

SEQ ID NO: 1943318 - RNA, 13 nt, Human herpesvirus 4 [Epstein-Barr virus]
agacccaucugag

SEQ ID NO: 1943319 - RNA, 19 nt, Human herpesvirus 4 [Epstein-Barr virus]
gcacguggguuucugcccc

SEQ ID NO: 1943320 - RNA, 18 nt, Human herpesvirus 4 [Epstein-Barr virus]
gcuaguugguccaggguc

SEQ ID NO: 1943321 - RNA, 22 nt, Human herpesvirus 4 [Epstein-Barr virus]
caccaggccugccaaagagcca

SEQ ID NO: 1943322 - RNA, 16 nt, Human herpesvirus 4 [Epstein-Barr virus]
uccugcacuauauucu

SEQ ID NO: 1943323 - RNA, 13 nt, Human herpesvirus 4 [Epstein-Barr virus]
gacaggcugcgcc

SEQ ID NO: 1943324 - RNA, 18 nt, Human herpesvirus 4 [Epstein-Barr virus]
gacccaaagugagggggc

SEQ ID NO: 1943325 - RNA, 12 nt, Human herpesvirus 4 [Epstein-Barr virus]
ccccccagccug

SEQ ID NO: 1943326 - RNA, 21 nt, Human herpesvirus 4 [Epstein-Barr virus]
ccuugaucuucuucucccuca

SEQ ID NO: 1943327 - RNA, 13 nt, Human herpesvirus 4 [Epstein-Barr virus]
ucuaacaguucac

SEQ ID NO: 1943328 - RNA, 20 nt, Human herpesvirus 4 [Epstein-Barr virus]
aagcaacccccggcucucag

SEQ ID NO: 1943329 - RNA, 18 nt, Human herpesvirus 4 [Epstein-Barr virus]
acucaggaagcuggccag

SEQ ID NO: 1943330 - RNA, 14 nt, Human herpesvirus 4 [Epstein-Barr virus]
augucggggcugcu

SEQ ID NO: 1943331 - RNA, 16 nt, Human herpesvirus 4 [Epstein-Barr virus]
uaagagucccuccuca

SEQ ID NO: 1943332 - RNA, 15 nt, Human herpesvirus 4 [Epstein-Barr virus]
gcgcucgucguucag

SEQ ID NO: 1943333 - RNA, 18 nt, Human herpesvirus 4 [Epstein-Barr virus]
caaggcaguagaggacac

SEQ ID NO: 1943334 - RNA, 15 nt, Human herpesvirus 4 [Epstein-Barr virus]
ucagcacagccagag

SEQ ID NO: 1943335 - RNA, 15 nt, Human herpesvirus 4 [Epstein-Barr virus]
cuugcccucuccagc

SEQ ID NO: 1943336 - RNA, 22 nt, Human herpesvirus 4 [Epstein-Barr virus]
gcaggcauuuuuggugcugccu

SEQ ID NO: 1943337 - RNA, 20 nt, Human herpesvirus 4 [Epstein-Barr virus]
gaggggcucgaauaugauga

SEQ ID NO: 1943338 - RNA, 19 nt, Human herpesvirus 4 [Epstein-Barr virus]
gugucccccuccauuccac

SEQ ID NO: 1943339 - RNA, 23 nt, Human herpesvirus 4 [Epstein-Barr virus]
ugagguaaaaagcgggccugagu

SEQ ID NO: 1943340 - RNA, 14 nt, Human herpesvirus 4 [Epstein-Barr virus]
cccugugcuucuac

SEQ ID NO: 1943341 - RNA, 14 nt, Human herpesvirus 4 [Epstein-Barr virus]
cccugcugucucug

SEQ ID NO: 1943342 - RNA, 23 nt, Human herpesvirus 4 [Epstein-Barr virus]
cuuggacuucucauuagucagga

SEQ ID NO: 1943343 - RNA, 15 nt, Human herpesvirus 4 [Epstein-Barr virus]
uaccuccacuuacaa

SEQ ID NO: 1943344 - RNA, 22 nt, Human herpesvirus 4 [Epstein-Barr virus]
aucccaguuguuauucccaccu

SEQ ID NO: 1943345 - RNA, 13 nt, Human herpesvirus 4 [Epstein-Barr virus]
cuucugcugcugc

SEQ ID NO: 1943346 - RNA, 17 nt, Human herpesvirus 4 [Epstein-Barr virus]
agaaaagagagcggcug

SEQ ID NO: 1943347 - RNA, 18 nt, Human herpesvirus 4 [Epstein-Barr virus]
cacccccuggagccagcg

SEQ ID NO: 1943348 - RNA, 14 nt, Human herpesvirus 4 [Epstein-Barr virus]
caggacggagaagc

SEQ ID NO: 1943349 - RNA, 16 nt, Human herpesvirus 4 [Epstein-Barr virus]
cugggaggaaguuuua

SEQ ID NO: 1943350 - RNA, 16 nt, Human herpesvirus 4 [Epstein-Barr virus]
aggccggcugacaugg

SEQ ID NO: 1943351 - RNA, 20 nt, Human herpesvirus 4 [Epstein-Barr virus]
gaauuccccugccugcaugc

SEQ ID NO: 1943352 - RNA, 22 nt, Human herpesvirus 4 [Epstein-Barr virus]
uuugaucuuugacugacacaua

SEQ ID NO: 1943353 - RNA, 13 nt, Human herpesvirus 4 [Epstein-Barr virus]
augauccuguaca

SEQ ID NO: 1943354 - RNA, 13 nt, Human herpesvirus 4 [Epstein-Barr virus]
aggaucagggcca

SEQ ID NO: 1943355 - RNA, 23 nt, Human herpesvirus 4 [Epstein-Barr virus]
gcacaacaagaaaucccaguugu

SEQ ID NO: 1943356 - RNA, 17 nt, Human herpesvirus 4 [Epstein-Barr virus]
acccucauugugcugaa

SEQ ID NO: 1943357 - RNA, 20 nt, Human herpesvirus 4 [Epstein-Barr virus]
ucucaggccucccagucuau

SEQ ID NO: 1943358 - RNA, 13 nt, Human herpesvirus 4 [Epstein-Barr virus]
acacagugggcuu

SEQ ID NO: 1943359 - RNA, 14 nt, Human herpesvirus 4 [Epstein-Barr virus]
ggccgcugccaggc

SEQ ID NO: 1943360 - RNA, 11 nt, Human herpesvirus 4 [Epstein-Barr virus]
acggccuggca

SEQ ID NO: 1943361 - RNA, 15 nt, Human herpesvirus 4 [Epstein-Barr virus]
cagcuccagggacag

SEQ ID NO: 1943362 - RNA, 12 nt, Human herpesvirus 4 [Epstein-Barr virus]
ggguaggggagu

SEQ ID NO: 1943363 - RNA, 14 nt, Human herpesvirus 4 [Epstein-Barr virus]
uugcccguggggau

SEQ ID NO: 1943364 - RNA, 19 nt, Human herpesvirus 4 [Epstein-Barr virus]
guacagacuuuuggcaaug

SEQ ID NO: 1943365 - RNA, 15 nt, Human herpesvirus 4 [Epstein-Barr virus]
gacgcggugcugacc

SEQ ID NO: 1943366 - RNA, 24 nt, Human herpesvirus 4 [Epstein-Barr virus]
gcagaagagccgcuccguggcccc

SEQ ID NO: 1943367 - RNA, 13 nt, Human herpesvirus 4 [Epstein-Barr virus]
gacguguguggcu

SEQ ID NO: 1943368 - RNA, 21 nt, Human herpesvirus 4 [Epstein-Barr virus]
caggugcccgagccccgccug

SEQ ID NO: 1943369 - RNA, 19 nt, Human herpesvirus 4 [Epstein-Barr virus]
gaggacggugucugugguu

SEQ ID NO: 1943370 - RNA, 18 nt, Human herpesvirus 4 [Epstein-Barr virus]
cugcagcuaugggguccc

SEQ ID NO: 1943371 - RNA, 21 nt, Human herpesvirus 4 [Epstein-Barr virus]
ucuguacaauggggccaggac

SEQ ID NO: 1943372 - RNA, 19 nt, Human herpesvirus 4 [Epstein-Barr virus]
gccuguuuguccagcaggg

SEQ ID NO: 1943373 - RNA, 18 nt, Human herpesvirus 4 [Epstein-Barr virus]
gucacauauccagagcug

SEQ ID NO: 1943374 - RNA, 13 nt, Human herpesvirus 4 [Epstein-Barr virus]
gcgccgccagcau

SEQ ID NO: 1943375 - RNA, 21 nt, Human herpesvirus 4 [Epstein-Barr virus]
ucagaagcuacaaacacgggc

SEQ ID NO: 1943376 - RNA, 19 nt, Human herpesvirus 4 [Epstein-Barr virus]
gaggagcuccgugagcagg

SEQ ID NO: 1943377 - RNA, 19 nt, Human herpesvirus 4 [Epstein-Barr virus]
ggcgagacuuggaccaagg

SEQ ID NO: 1943378 - RNA, 14 nt, Human herpesvirus 4 [Epstein-Barr virus]
caggggcgagcagc

SEQ ID NO: 1943379 - RNA, 16 nt, Human herpesvirus 4 [Epstein-Barr virus]
gaaaagagagcugaug

SEQ ID NO: 1943380 - RNA, 20 nt, Human herpesvirus 4 [Epstein-Barr virus]
ugucugugguugucuuccca

SEQ ID NO: 1943381 - RNA, 16 nt, Human herpesvirus 4 [Epstein-Barr virus]
gagcgggaggggcagg

SEQ ID NO: 1943382 - RNA, 18 nt, Human herpesvirus 4 [Epstein-Barr virus]
ggacccggaccaaugcca

SEQ ID NO: 1943383 - RNA, 18 nt, Human herpesvirus 4 [Epstein-Barr virus]
ccucgaguccggggagaa

SEQ ID NO: 1943384 - RNA, 13 nt, Human herpesvirus 4 [Epstein-Barr virus]
agccugaggaaca

SEQ ID NO: 1943385 - RNA, 12 nt, Human herpesvirus 4 [Epstein-Barr virus]
gaggggccaggu

SEQ ID NO: 1943386 - RNA, 21 nt, Human herpesvirus 4 [Epstein-Barr virus]
ccuccggccgccccgggcccg

SEQ ID NO: 1943387 - RNA, 21 nt, Human herpesvirus 4 [Epstein-Barr virus]
ccgcagccacguccagacucc

SEQ ID NO: 1943388 - RNA, 19 nt, Human herpesvirus 4 [Epstein-Barr virus]
cgcccuggcgguugagcug

SEQ ID NO: 1943389 - RNA, 22 nt, Human herpesvirus 4 [Epstein-Barr virus]
ccagcuggugguccgcauguuu

SEQ ID NO: 1943390 - RNA, 21 nt, Human herpesvirus 4 [Epstein-Barr virus]
ugccuguggccccggcuggcc

SEQ ID NO: 1943391 - RNA, 23 nt, Human herpesvirus 4 [Epstein-Barr virus]
guaacuugucuacaucccauacc

SEQ ID NO: 1943392 - RNA, 16 nt, Human herpesvirus 4 [Epstein-Barr virus]
ccaagauagugaccaa

SEQ ID NO: 1943393 - RNA, 15 nt, Human herpesvirus 4 [Epstein-Barr virus]
cagcgccagcagggc

SEQ ID NO: 1943394 - RNA, 20 nt, Human herpesvirus 4 [Epstein-Barr virus]
caggggaaucucugccaacu

SEQ ID NO: 1943395 - RNA, 14 nt, Human herpesvirus 4 [Epstein-Barr virus]
gggugcucccccug

SEQ ID NO: 1943396 - RNA, 17 nt, Human herpesvirus 4 [Epstein-Barr virus]
ccucagcuguucccagu

SEQ ID NO: 1943397 - RNA, 17 nt, Human herpesvirus 4 [Epstein-Barr virus]
cauaaguccucauggca

SEQ ID NO: 1943398 - RNA, 19 nt, Human herpesvirus 4 [Epstein-Barr virus]
gagcagggcaaagccacaa

SEQ ID NO: 1943399 - RNA, 16 nt, Human herpesvirus 4 [Epstein-Barr virus]
ccucagauagccggac

SEQ ID NO: 1943400 - RNA, 13 nt, Human herpesvirus 4 [Epstein-Barr virus]
gcugcuggucaug

SEQ ID NO: 1943401 - RNA, 11 nt, Human herpesvirus 4 [Epstein-Barr virus]
cccggacggcc

SEQ ID NO: 1943402 - RNA, 18 nt, Human herpesvirus 4 [Epstein-Barr virus]
gacugggggcaaagccag

SEQ ID NO: 1943403 - RNA, 18 nt, Human herpesvirus 4 [Epstein-Barr virus]
gagcuccgugagcaggag

SEQ ID NO: 1943404 - RNA, 17 nt, Human herpesvirus 4 [Epstein-Barr virus]
uguggaagaggaaacag

SEQ ID NO: 1943405 - RNA, 20 nt, Human herpesvirus 4 [Epstein-Barr virus]
gccucucaaaggccuuggac

SEQ ID NO: 1943406 - RNA, 21 nt, Human herpesvirus 4 [Epstein-Barr virus]
cacgucguucaugagaggcgu

SEQ ID NO: 1943407 - RNA, 13 nt, Human herpesvirus 4 [Epstein-Barr virus]
uauagaggcucuc

SEQ ID NO: 1943408 - RNA, 16 nt, Human herpesvirus 4 [Epstein-Barr virus]
acguggcugcgguggu

SEQ ID NO: 1943409 - RNA, 19 nt, Human herpesvirus 4 [Epstein-Barr virus]
gccaaccuuuccaucacug

SEQ ID NO: 1943410 - RNA, 20 nt, Human herpesvirus 4 [Epstein-Barr virus]
aucuggcagcuuuuggccuu

SEQ ID NO: 1943411 - RNA, 14 nt, Human herpesvirus 4 [Epstein-Barr virus]
aguccucauggcag

SEQ ID NO: 1943412 - RNA, 19 nt, Human herpesvirus 4 [Epstein-Barr virus]
cacguuugcccgcuuccuc

SEQ ID NO: 1943413 - RNA, 17 nt, Human herpesvirus 4 [Epstein-Barr virus]
aagggacccacggugga

SEQ ID NO: 1943414 - RNA, 16 nt, Human herpesvirus 4 [Epstein-Barr virus]
cgcugcugcuacuggc

SEQ ID NO: 1943415 - RNA, 17 nt, Human herpesvirus 4 [Epstein-Barr virus]
acccucuugcacuccaa

SEQ ID NO: 1943416 - RNA, 14 nt, Human herpesvirus 4 [Epstein-Barr virus]
uacccaacagucuu

SEQ ID NO: 1943417 - RNA, 22 nt, Human herpesvirus 4 [Epstein-Barr virus]
cugccaacuuugagcugggcaa

SEQ ID NO: 1943418 - RNA, 16 nt, Human herpesvirus 4 [Epstein-Barr virus]
caucggagucgguggg

SEQ ID NO: 1943419 - RNA, 23 nt, Human herpesvirus 4 [Epstein-Barr virus]
agcuuugccccaaucgcgugcca

SEQ ID NO: 1943420 - RNA, 14 nt, Human herpesvirus 4 [Epstein-Barr virus]
gaccucuacacgcu

SEQ ID NO: 1943421 - RNA, 11 nt, Human herpesvirus 4 [Epstein-Barr virus]
guccagugggg

SEQ ID NO: 1943422 - RNA, 20 nt, Human herpesvirus 4 [Epstein-Barr virus]
gggccaggcugucgccagcc

SEQ ID NO: 1943423 - RNA, 19 nt, Human herpesvirus 4 [Epstein-Barr virus]
cacuguauaaagaaugccc

SEQ ID NO: 1943424 - RNA, 16 nt, Human herpesvirus 4 [Epstein-Barr virus]
gaggcagagagccagu

SEQ ID NO: 1943425 - RNA, 23 nt, Human herpesvirus 4 [Epstein-Barr virus]
cugauaauacgcccgacaauaaa

SEQ ID NO: 1943426 - RNA, 17 nt, Human herpesvirus 4 [Epstein-Barr virus]
agcauggcggccuggca

SEQ ID NO: 1943427 - RNA, 15 nt, Human herpesvirus 4 [Epstein-Barr virus]
caccccaccauauga

SEQ ID NO: 1943428 - RNA, 14 nt, Human herpesvirus 4 [Epstein-Barr virus]
gcaagcaugggcga

SEQ ID NO: 1943429 - RNA, 16 nt, Human herpesvirus 4 [Epstein-Barr virus]
acccgucccggguaca

SEQ ID NO: 1943430 - RNA, 23 nt, Human herpesvirus 4 [Epstein-Barr virus]
uguagguguccagcgcucugguc

SEQ ID NO: 1943431 - RNA, 20 nt, Human herpesvirus 4 [Epstein-Barr virus]
gcauuuuuggugcugccugg

SEQ ID NO: 1943432 - RNA, 14 nt, Human herpesvirus 4 [Epstein-Barr virus]
uguuccuucucaug

SEQ ID NO: 1943433 - RNA, 22 nt, Human herpesvirus 4 [Epstein-Barr virus]
ggccaugcaggccuggacagca

SEQ ID NO: 1943434 - RNA, 24 nt, Human herpesvirus 4 [Epstein-Barr virus]
ggcagcagcucuggcacugcuagc

SEQ ID NO: 1943435 - RNA, 14 nt, Human herpesvirus 4 [Epstein-Barr virus]
cauggccugggccc

SEQ ID NO: 1943436 - RNA, 18 nt, Human herpesvirus 4 [Epstein-Barr virus]
caccacccccaccacccc

SEQ ID NO: 1943437 - RNA, 18 nt, Human herpesvirus 4 [Epstein-Barr virus]
ggccaaaagggcucugac

SEQ ID NO: 1943438 - RNA, 18 nt, Human herpesvirus 4 [Epstein-Barr virus]
cuaguaugaaggcuggca

SEQ ID NO: 1943439 - RNA, 21 nt, Human herpesvirus 4 [Epstein-Barr virus]
agcccuccucagaaaacucug

SEQ ID NO: 1943440 - RNA, 12 nt, Human herpesvirus 4 [Epstein-Barr virus]
ugagaaugccaa

SEQ ID NO: 1943441 - RNA, 20 nt, Human herpesvirus 4 [Epstein-Barr virus]
gucagcuguguacgugccuc

SEQ ID NO: 1943442 - RNA, 14 nt, Human herpesvirus 4 [Epstein-Barr virus]
cgggcuugugcuug

SEQ ID NO: 1943443 - RNA, 16 nt, Human herpesvirus 4 [Epstein-Barr virus]
agcccgccagccaccc

SEQ ID NO: 1943444 - RNA, 19 nt, Human herpesvirus 4 [Epstein-Barr virus]
gccugaauuccccugccug

SEQ ID NO: 1943445 - RNA, 12 nt, Human herpesvirus 4 [Epstein-Barr virus]
gaaaagccacau

SEQ ID NO: 1943446 - RNA, 13 nt, Human herpesvirus 4 [Epstein-Barr virus]
acucccuccagaa

SEQ ID NO: 1943447 - RNA, 20 nt, Human herpesvirus 4 [Epstein-Barr virus]
aguaacagguaaucucuggu

SEQ ID NO: 1943448 - RNA, 14 nt, Human herpesvirus 4 [Epstein-Barr virus]
ccucaucccugacc

SEQ ID NO: 1943449 - RNA, 21 nt, Human herpesvirus 4 [Epstein-Barr virus]
gugacaugcuauggugccggg

SEQ ID NO: 1943450 - RNA, 18 nt, Human herpesvirus 4 [Epstein-Barr virus]
uucacuuccucugcuuuu

SEQ ID NO: 1943451 - RNA, 21 nt, Human herpesvirus 4 [Epstein-Barr virus]
cgagaggaugaggcugaugau

SEQ ID NO: 1943452 - RNA, 19 nt, Human herpesvirus 4 [Epstein-Barr virus]
cggugccgcuccuuugcgg

SEQ ID NO: 1943453 - RNA, 18 nt, Human herpesvirus 4 [Epstein-Barr virus]
gccgguggauccuccacc

SEQ ID NO: 1943454 - RNA, 19 nt, Human herpesvirus 4 [Epstein-Barr virus]
cugccccaauaugccaacc

SEQ ID NO: 1943455 - RNA, 20 nt, Human herpesvirus 4 [Epstein-Barr virus]
uguagcgccgcgguuucagc

SEQ ID NO: 1943456 - RNA, 16 nt, Human herpesvirus 4 [Epstein-Barr virus]
aggagagcuggauggu

SEQ ID NO: 1943457 - RNA, 18 nt, Human herpesvirus 4 [Epstein-Barr virus]
uccaguuuuuaugugccu

SEQ ID NO: 1943458 - RNA, 18 nt, Human herpesvirus 4 [Epstein-Barr virus]
ccagcaaaaccagcccgg

SEQ ID NO: 1943459 - RNA, 17 nt, Human herpesvirus 4 [Epstein-Barr virus]
gccucucuggcugugcu

SEQ ID NO: 1943460 - RNA, 19 nt, Human herpesvirus 4 [Epstein-Barr virus]
cgucacugauuuugggcac

SEQ ID NO: 1943461 - RNA, 16 nt, Human herpesvirus 4 [Epstein-Barr virus]
cuccauuccacccacu

SEQ ID NO: 1943462 - RNA, 22 nt, Human herpesvirus 4 [Epstein-Barr virus]
cugcuucuggcucuucugggaa

SEQ ID NO: 1943463 - RNA, 12 nt, Human herpesvirus 4 [Epstein-Barr virus]
ugcaggcuggac

SEQ ID NO: 1943464 - RNA, 16 nt, Human herpesvirus 4 [Epstein-Barr virus]
cugagacagaggugcu

SEQ ID NO: 1943465 - RNA, 14 nt, Human herpesvirus 4 [Epstein-Barr virus]
aagccgggggagaa

SEQ ID NO: 1943466 - RNA, 21 nt, Human herpesvirus 4 [Epstein-Barr virus]
cugguuguaaccuaugccugg

SEQ ID NO: 1943467 - RNA, 19 nt, Human herpesvirus 4 [Epstein-Barr virus]
gguuuccaugacgcugcug

SEQ ID NO: 1943468 - RNA, 18 nt, Human herpesvirus 4 [Epstein-Barr virus]
gcuucccgccuagagcau

SEQ ID NO: 1943469 - RNA, 17 nt, Human herpesvirus 4 [Epstein-Barr virus]
caccggagccaccacag

SEQ ID NO: 1943470 - RNA, 15 nt, Human herpesvirus 4 [Epstein-Barr virus]
gucccuuuggaggac

SEQ ID NO: 1943471 - RNA, 12 nt, Human herpesvirus 4 [Epstein-Barr virus]
ggacgcugcugu

SEQ ID NO: 1943472 - RNA, 15 nt, Human herpesvirus 4 [Epstein-Barr virus]
cucugccgcgcugcu

SEQ ID NO: 1943473 - RNA, 19 nt, Human herpesvirus 4 [Epstein-Barr virus]
cuuauguuucaagcagcuc

SEQ ID NO: 1943474 - RNA, 20 nt, Human herpesvirus 4 [Epstein-Barr virus]
ccagccuacucuccacuccc

SEQ ID NO: 1943475 - RNA, 13 nt, Human herpesvirus 4 [Epstein-Barr virus]
gaugcaacagagg

SEQ ID NO: 1943476 - RNA, 14 nt, Human herpesvirus 4 [Epstein-Barr virus]
accgcgcccuccuc

SEQ ID NO: 1943477 - RNA, 17 nt, Human herpesvirus 4 [Epstein-Barr virus]
ucucuagagccaggcua

SEQ ID NO: 1943478 - RNA, 21 nt, Human herpesvirus 4 [Epstein-Barr virus]
ccaggcaccggucucguccau

SEQ ID NO: 1943479 - RNA, 13 nt, Human herpesvirus 4 [Epstein-Barr virus]
guacuaacacgca

SEQ ID NO: 1943480 - RNA, 14 nt, Human herpesvirus 4 [Epstein-Barr virus]
cgcccugagcugga

SEQ ID NO: 1943481 - RNA, 16 nt, Human herpesvirus 4 [Epstein-Barr virus]
gacaugcuauggugcc

SEQ ID NO: 1943482 - RNA, 15 nt, Human herpesvirus 4 [Epstein-Barr virus]
gccccgggcccagcc

SEQ ID NO: 1943483 - RNA, 20 nt, Human herpesvirus 4 [Epstein-Barr virus]
aggggcuuguucuuggcgga

SEQ ID NO: 1943484 - RNA, 14 nt, Human herpesvirus 4 [Epstein-Barr virus]
gcaaacccuggccg

SEQ ID NO: 1943485 - RNA, 17 nt, Human herpesvirus 4 [Epstein-Barr virus]
augucggcuaaugccau

SEQ ID NO: 1943486 - RNA, 18 nt, Human herpesvirus 4 [Epstein-Barr virus]
aggagcuccgagagcucc

SEQ ID NO: 1943487 - RNA, 18 nt, Human herpesvirus 4 [Epstein-Barr virus]
cuggccaggcuggugaca

SEQ ID NO: 1943488 - RNA, 19 nt, Human herpesvirus 4 [Epstein-Barr virus]
cugagaauaaggcucugaa

SEQ ID NO: 1943489 - RNA, 19 nt, Human herpesvirus 4 [Epstein-Barr virus]
caacagacugcggggagga

SEQ ID NO: 1943490 - RNA, 22 nt, Human herpesvirus 4 [Epstein-Barr virus]
uguagccacccgucccggguac

SEQ ID NO: 1943491 - RNA, 21 nt, Human herpesvirus 4 [Epstein-Barr virus]
cuucggucaaguaccagcugg

SEQ ID NO: 1943492 - RNA, 22 nt, Human herpesvirus 4 [Epstein-Barr virus]
cuguacgccgccgccagcagcc

SEQ ID NO: 1943493 - RNA, 15 nt, Human herpesvirus 4 [Epstein-Barr virus]
caccggggaggccag

SEQ ID NO: 1943494 - RNA, 15 nt, Human herpesvirus 4 [Epstein-Barr virus]
caccgugggaaaaua

SEQ ID NO: 1943495 - RNA, 22 nt, Human herpesvirus 4 [Epstein-Barr virus]
gcaccgauagcauggccgccag

SEQ ID NO: 1943496 - RNA, 13 nt, Human herpesvirus 4 [Epstein-Barr virus]
cggacugcgccuu

SEQ ID NO: 1943497 - RNA, 17 nt, Human herpesvirus 4 [Epstein-Barr virus]
cggaggucgacccuccu

SEQ ID NO: 1943498 - RNA, 18 nt, Human herpesvirus 4 [Epstein-Barr virus]
acuguucaaacagcagca

SEQ ID NO: 1943499 - RNA, 13 nt, Human herpesvirus 4 [Epstein-Barr virus]
cccggcgccaccu

SEQ ID NO: 1943500 - RNA, 22 nt, Human herpesvirus 4 [Epstein-Barr virus]
cgccccugcguugaacccaccc

SEQ ID NO: 1943501 - RNA, 17 nt, Human herpesvirus 4 [Epstein-Barr virus]
gggugaggccacgcuuu

SEQ ID NO: 1943502 - RNA, 19 nt, Human herpesvirus 4 [Epstein-Barr virus]
gguuguauguucagagcuc

SEQ ID NO: 1943503 - RNA, 19 nt, Human herpesvirus 4 [Epstein-Barr virus]
cggcaucggguccuagcac

SEQ ID NO: 1943504 - RNA, 17 nt, Human herpesvirus 4 [Epstein-Barr virus]
cagagcugagugcccag

SEQ ID NO: 1943505 - RNA, 22 nt, Human herpesvirus 4 [Epstein-Barr virus]
ccguuccaggcucuccagcccc

SEQ ID NO: 1943506 - RNA, 23 nt, Human herpesvirus 4 [Epstein-Barr virus]
uagauaaauuaagagucccuccu

SEQ ID NO: 1943507 - RNA, 19 nt, Human herpesvirus 4 [Epstein-Barr virus]
ucaucugaaaaugacaggc

SEQ ID NO: 1943508 - RNA, 22 nt, Human herpesvirus 4 [Epstein-Barr virus]
ggcgcucugcgccagccccgcc

SEQ ID NO: 1943509 - RNA, 17 nt, Human herpesvirus 4 [Epstein-Barr virus]
uacuccuggcauacuuu

SEQ ID NO: 1943510 - RNA, 11 nt, Human herpesvirus 4 [Epstein-Barr virus]
caccugccauc

SEQ ID NO: 1943511 - RNA, 18 nt, Human herpesvirus 4 [Epstein-Barr virus]
ugaagauggccucaaagu

SEQ ID NO: 1943512 - RNA, 24 nt, Human herpesvirus 4 [Epstein-Barr virus]
cgaugaacgccuacgcagaggcca

SEQ ID NO: 1943513 - RNA, 19 nt, Human herpesvirus 4 [Epstein-Barr virus]
acuaauggaauauuaauaa

SEQ ID NO: 1943514 - RNA, 17 nt, Human herpesvirus 4 [Epstein-Barr virus]
uccaguuccccccagcc

SEQ ID NO: 1943515 - RNA, 23 nt, Human herpesvirus 4 [Epstein-Barr virus]
caggcacccccucugaggaccug

SEQ ID NO: 1943516 - RNA, 19 nt, Human herpesvirus 4 [Epstein-Barr virus]
guccagccacgcaggaugu

SEQ ID NO: 1943517 - RNA, 16 nt, Human herpesvirus 4 [Epstein-Barr virus]
gcgagcucuccagcca

SEQ ID NO: 1943518 - RNA, 21 nt, Human herpesvirus 4 [Epstein-Barr virus]
auccacagccccacucuugcc

SEQ ID NO: 1943519 - RNA, 17 nt, Human herpesvirus 4 [Epstein-Barr virus]
gccccggucaccccaga

SEQ ID NO: 1943520 - RNA, 16 nt, Human herpesvirus 4 [Epstein-Barr virus]
agcagcucuggcacug

SEQ ID NO: 1943521 - RNA, 23 nt, Human herpesvirus 4 [Epstein-Barr virus]
aguaggcgguggggcugagacca

SEQ ID NO: 1943522 - RNA, 20 nt, Human herpesvirus 4 [Epstein-Barr virus]
caggccaccgucuacccaga

SEQ ID NO: 1943523 - RNA, 17 nt, Human herpesvirus 4 [Epstein-Barr virus]
ccagaugacugagcgca

SEQ ID NO: 1943524 - RNA, 21 nt, Human herpesvirus 4 [Epstein-Barr virus]
gaggagcuccgugagcaggag

SEQ ID NO: 1943525 - RNA, 23 nt, Human herpesvirus 4 [Epstein-Barr virus]
ccgccguaaucuguggugggcuc

SEQ ID NO: 1943526 - RNA, 16 nt, Human herpesvirus 4 [Epstein-Barr virus]
aucuccaucagggcca

SEQ ID NO: 1943527 - RNA, 13 nt, Human herpesvirus 4 [Epstein-Barr virus]
cucucaggccuca

SEQ ID NO: 1943528 - RNA, 15 nt, Human herpesvirus 4 [Epstein-Barr virus]
uguccugcugaaggg

SEQ ID NO: 1943529 - RNA, 12 nt, Human herpesvirus 4 [Epstein-Barr virus]
gccgucauucca

SEQ ID NO: 1943530 - RNA, 13 nt, Human herpesvirus 4 [Epstein-Barr virus]
cugaguaggcuug

SEQ ID NO: 1943531 - RNA, 21 nt, Human herpesvirus 4 [Epstein-Barr virus]
caggauuucugcguccuggua

SEQ ID NO: 1943532 - RNA, 20 nt, Human herpesvirus 4 [Epstein-Barr virus]
agaucacggcugucuagacg

SEQ ID NO: 1943533 - RNA, 10 nt, Human herpesvirus 4 [Epstein-Barr virus]
ccgcagcugg

SEQ ID NO: 1943534 - RNA, 17 nt, Human herpesvirus 4 [Epstein-Barr virus]
gcccaccagccagcgac

SEQ ID NO: 1943535 - RNA, 21 nt, Human herpesvirus 4 [Epstein-Barr virus]
ggcgggacuggcacgguggcu

SEQ ID NO: 1943536 - RNA, 22 nt, Human herpesvirus 4 [Epstein-Barr virus]
guacgugcgugaucaugagggc

SEQ ID NO: 1943537 - RNA, 22 nt, Human herpesvirus 4 [Epstein-Barr virus]
ggcccacgucuuuaccaccuca

SEQ ID NO: 1943538 - RNA, 22 nt, Human herpesvirus 4 [Epstein-Barr virus]
guggugggcuccuuagacugag

SEQ ID NO: 1943539 - RNA, 17 nt, Human herpesvirus 4 [Epstein-Barr virus]
gcgcaacgccggccugc

SEQ ID NO: 1943540 - RNA, 22 nt, Human herpesvirus 4 [Epstein-Barr virus]
ugaggguugguguccucccggg

SEQ ID NO: 1943541 - RNA, 11 nt, Human herpesvirus 4 [Epstein-Barr virus]
caccuccacca

SEQ ID NO: 1943542 - RNA, 23 nt, Human herpesvirus 4 [Epstein-Barr virus]
uauaauuuaaccaaacagugguc

SEQ ID NO: 1943543 - RNA, 12 nt, Human herpesvirus 4 [Epstein-Barr virus]
caaucucuccca

SEQ ID NO: 1943544 - RNA, 17 nt, Human herpesvirus 4 [Epstein-Barr virus]
ccuuggggguggugggc

SEQ ID NO: 1943545 - RNA, 20 nt, Human herpesvirus 4 [Epstein-Barr virus]
gcuuaacgggaagagaagug

SEQ ID NO: 1943546 - RNA, 17 nt, Human herpesvirus 4 [Epstein-Barr virus]
gcagaggccaucauggc

SEQ ID NO: 1943547 - RNA, 12 nt, Human herpesvirus 4 [Epstein-Barr virus]
uggccuggagag

SEQ ID NO: 1943548 - RNA, 13 nt, Human herpesvirus 4 [Epstein-Barr virus]
cguaucugggcac

SEQ ID NO: 1943549 - RNA, 22 nt, Human herpesvirus 4 [Epstein-Barr virus]
aaagugguucaguggacaccca

SEQ ID NO: 1943550 - RNA, 17 nt, Human herpesvirus 4 [Epstein-Barr virus]
acccagggguggcagug

SEQ ID NO: 1943551 - RNA, 15 nt, Human herpesvirus 4 [Epstein-Barr virus]
accucauccugcuca

SEQ ID NO: 1943552 - RNA, 17 nt, Human herpesvirus 4 [Epstein-Barr virus]
gcccagggacaucccca

SEQ ID NO: 1943553 - RNA, 21 nt, Human herpesvirus 4 [Epstein-Barr virus]
gcuccguccuuguccaggaga

SEQ ID NO: 1943554 - RNA, 18 nt, Human herpesvirus 4 [Epstein-Barr virus]
gccaggcugucgccagcc

SEQ ID NO: 1943555 - RNA, 22 nt, Human herpesvirus 4 [Epstein-Barr virus]
gcucuggucgcccccucugccu

SEQ ID NO: 1943556 - RNA, 20 nt, Human herpesvirus 4 [Epstein-Barr virus]
ggacaugucacguguccugc

SEQ ID NO: 1943557 - RNA, 22 nt, Human herpesvirus 4 [Epstein-Barr virus]
ccuggacacaagagccaucacc

SEQ ID NO: 1943558 - RNA, 19 nt, Human herpesvirus 4 [Epstein-Barr virus]
agggccgucacuccagcca

SEQ ID NO: 1943559 - RNA, 23 nt, Human herpesvirus 4 [Epstein-Barr virus]
gcacuccaagugcaacaaucugg

SEQ ID NO: 1943560 - RNA, 14 nt, Human herpesvirus 4 [Epstein-Barr virus]
aagaaucggguggc

SEQ ID NO: 1943561 - RNA, 17 nt, Human herpesvirus 4 [Epstein-Barr virus]
agcccggccgaggccug

SEQ ID NO: 1943562 - RNA, 14 nt, Human herpesvirus 4 [Epstein-Barr virus]
aggagaaggagccu

SEQ ID NO: 1943563 - RNA, 16 nt, Human herpesvirus 4 [Epstein-Barr virus]
guccgcuccuacacca

SEQ ID NO: 1943564 - RNA, 18 nt, Human herpesvirus 4 [Epstein-Barr virus]
gcgagacuuggaccaagg

SEQ ID NO: 1943565 - RNA, 16 nt, Human herpesvirus 4 [Epstein-Barr virus]
gggcagccagagccag

SEQ ID NO: 1943566 - RNA, 23 nt, Human herpesvirus 4 [Epstein-Barr virus]
caauguaucccaaauaaauguua

SEQ ID NO: 1943567 - RNA, 15 nt, Human herpesvirus 4 [Epstein-Barr virus]
uacgcgacugagggg

SEQ ID NO: 1943568 - RNA, 17 nt, Human herpesvirus 4 [Epstein-Barr virus]
auguuuuccccauguug

SEQ ID NO: 1943569 - RNA, 18 nt, Human herpesvirus 4 [Epstein-Barr virus]
cacagccugcaccagugg

SEQ ID NO: 1943570 - RNA, 12 nt, Human herpesvirus 4 [Epstein-Barr virus]
ggcaugcugccc

SEQ ID NO: 1943571 - RNA, 16 nt, Human herpesvirus 4 [Epstein-Barr virus]
gccugaagcuugcugg

SEQ ID NO: 1943572 - RNA, 16 nt, Human herpesvirus 4 [Epstein-Barr virus]
cccggccgaggccugc

SEQ ID NO: 1943573 - RNA, 15 nt, Human herpesvirus 4 [Epstein-Barr virus]
cacacucccuccaga

SEQ ID NO: 1943574 - RNA, 21 nt, Human herpesvirus 4 [Epstein-Barr virus]
gcaauggcacggaugccuggc

SEQ ID NO: 1943575 - RNA, 19 nt, Human herpesvirus 4 [Epstein-Barr virus]
ggccacggcgugccagagg

SEQ ID NO: 1943576 - RNA, 14 nt, Human herpesvirus 4 [Epstein-Barr virus]
aagcuuaugagcga

SEQ ID NO: 1943577 - RNA, 21 nt, Human herpesvirus 4 [Epstein-Barr virus]
uccggcugcccgucucggccu

SEQ ID NO: 1943578 - RNA, 18 nt, Human herpesvirus 4 [Epstein-Barr virus]
agcugccgcgauguaccc

SEQ ID NO: 1943579 - RNA, 18 nt, Human herpesvirus 4 [Epstein-Barr virus]
gaugguguuggagacggu

SEQ ID NO: 1943580 - RNA, 20 nt, Human herpesvirus 4 [Epstein-Barr virus]
gaguuggcaucuuccuccuu

SEQ ID NO: 1943581 - RNA, 17 nt, Human herpesvirus 4 [Epstein-Barr virus]
gucuccccucgagcgcc

SEQ ID NO: 1943582 - RNA, 15 nt, Human herpesvirus 4 [Epstein-Barr virus]
acguggcuuccagag

SEQ ID NO: 1943583 - RNA, 22 nt, Human herpesvirus 4 [Epstein-Barr virus]
acgcuguccgccaggacggaga

SEQ ID NO: 1943584 - RNA, 11 nt, Human herpesvirus 4 [Epstein-Barr virus]
cucucaggccu

SEQ ID NO: 1943585 - RNA, 14 nt, Human herpesvirus 4 [Epstein-Barr virus]
gcggugccugugga

SEQ ID NO: 1943586 - RNA, 16 nt, Human herpesvirus 4 [Epstein-Barr virus]
gccaugcuaucuugua

SEQ ID NO: 1943587 - RNA, 17 nt, Human herpesvirus 4 [Epstein-Barr virus]
ggugaggacggugucug

SEQ ID NO: 1943588 - RNA, 14 nt, Human herpesvirus 4 [Epstein-Barr virus]
gaagaagcccaccu

SEQ ID NO: 1943589 - RNA, 18 nt, Human herpesvirus 4 [Epstein-Barr virus]
uugcaaucccaaguacag

SEQ ID NO: 1943590 - RNA, 15 nt, Human herpesvirus 4 [Epstein-Barr virus]
gcgucauuucuucca

SEQ ID NO: 1943591 - RNA, 14 nt, Human herpesvirus 4 [Epstein-Barr virus]
cagcagggcacaga

SEQ ID NO: 1943592 - RNA, 21 nt, Human herpesvirus 4 [Epstein-Barr virus]
ccaccuagaaagagccauggu

SEQ ID NO: 1943593 - RNA, 17 nt, Human herpesvirus 4 [Epstein-Barr virus]
ugaugcuugugcuccug

SEQ ID NO: 1943594 - RNA, 14 nt, Human herpesvirus 4 [Epstein-Barr virus]
gauagaauagcugc

SEQ ID NO: 1943595 - RNA, 22 nt, Human herpesvirus 4 [Epstein-Barr virus]
cuaagcuaauagcggccgaaga

SEQ ID NO: 1943596 - RNA, 12 nt, Human herpesvirus 4 [Epstein-Barr virus]
cccaaguacaga

SEQ ID NO: 1943597 - RNA, 17 nt, Human herpesvirus 4 [Epstein-Barr virus]
cugagcaccaacacaac

SEQ ID NO: 1943598 - RNA, 14 nt, Human herpesvirus 4 [Epstein-Barr virus]
caugacgcugcugc

SEQ ID NO: 1943599 - RNA, 14 nt, Human herpesvirus 4 [Epstein-Barr virus]
cacucugaccagga

SEQ ID NO: 1943600 - RNA, 20 nt, Human herpesvirus 4 [Epstein-Barr virus]
ugcccagcuccgugguccug

SEQ ID NO: 1943601 - RNA, 22 nt, Human herpesvirus 4 [Epstein-Barr virus]
cuuugcugaagaugauggaccc

SEQ ID NO: 1943602 - RNA, 15 nt, Human herpesvirus 4 [Epstein-Barr virus]
acugaaaaaccagac

SEQ ID NO: 1943603 - RNA, 17 nt, Human herpesvirus 4 [Epstein-Barr virus]
acucuggggucucaggc

SEQ ID NO: 1943604 - RNA, 21 nt, Human herpesvirus 4 [Epstein-Barr virus]
uccugaagcgaagcagcuccg

SEQ ID NO: 1943605 - RNA, 23 nt, Human herpesvirus 4 [Epstein-Barr virus]
ccccaucuuccagcgcaagcuug

SEQ ID NO: 1943606 - RNA, 20 nt, Human herpesvirus 4 [Epstein-Barr virus]
cucugcauggagaagcugga

SEQ ID NO: 1943607 - RNA, 15 nt, Human herpesvirus 4 [Epstein-Barr virus]
ucaagagaucagcaa

SEQ ID NO: 1943608 - RNA, 21 nt, Human herpesvirus 4 [Epstein-Barr virus]
gcuuugccggcauccagugcg

SEQ ID NO: 1943609 - RNA, 17 nt, Human herpesvirus 4 [Epstein-Barr virus]
auuucugcuagcuucag

SEQ ID NO: 1943610 - RNA, 14 nt, Human herpesvirus 4 [Epstein-Barr virus]
agagaggccucugg

SEQ ID NO: 1943611 - RNA, 22 nt, Human herpesvirus 4 [Epstein-Barr virus]
gaacaauuccccggggacaccu

SEQ ID NO: 1943612 - RNA, 23 nt, Human herpesvirus 4 [Epstein-Barr virus]
cucagagggggugccugugccuc

SEQ ID NO: 1943613 - RNA, 15 nt, Human herpesvirus 4 [Epstein-Barr virus]
cuggcaacuccucuu

SEQ ID NO: 1943614 - RNA, 14 nt, Human herpesvirus 4 [Epstein-Barr virus]
gacguguguggcug

SEQ ID NO: 1943615 - RNA, 22 nt, Human herpesvirus 4 [Epstein-Barr virus]
gacaauacacccaucuggaguu

SEQ ID NO: 1943616 - RNA, 16 nt, Human herpesvirus 4 [Epstein-Barr virus]
ggcucaggccgccgca

SEQ ID NO: 1943617 - RNA, 17 nt, Human herpesvirus 4 [Epstein-Barr virus]
cacuggcuuaugcgugg

SEQ ID NO: 1943618 - RNA, 15 nt, Human herpesvirus 4 [Epstein-Barr virus]
cagaggaaggccaca

SEQ ID NO: 1943619 - RNA, 17 nt, Human herpesvirus 4 [Epstein-Barr virus]
gugcaaggauggaagag

SEQ ID NO: 1943620 - RNA, 21 nt, Human herpesvirus 4 [Epstein-Barr virus]
ugcucaaggcagucuccaccu

SEQ ID NO: 1943621 - RNA, 23 nt, Human herpesvirus 4 [Epstein-Barr virus]
ccugcguugaacccaccccuccu

SEQ ID NO: 1943622 - RNA, 19 nt, Human herpesvirus 4 [Epstein-Barr virus]
ccagagaggcccacugcag

SEQ ID NO: 1943623 - RNA, 12 nt, Human herpesvirus 4 [Epstein-Barr virus]
ucuaaugauguc

SEQ ID NO: 1943624 - RNA, 15 nt, Human herpesvirus 4 [Epstein-Barr virus]
cggguucgggcacgc

SEQ ID NO: 1943625 - RNA, 15 nt, Human herpesvirus 4 [Epstein-Barr virus]
gaugcaacagaggau

SEQ ID NO: 1943626 - RNA, 12 nt, Human herpesvirus 4 [Epstein-Barr virus]
cucucgcacucu

SEQ ID NO: 1943627 - RNA, 14 nt, Human herpesvirus 4 [Epstein-Barr virus]
ggaggaggggcagg

SEQ ID NO: 1943628 - RNA, 16 nt, Human herpesvirus 4 [Epstein-Barr virus]
uguuucucagagagca

SEQ ID NO: 1943629 - RNA, 17 nt, Human herpesvirus 4 [Epstein-Barr virus]
ccugucggcucucuuug

SEQ ID NO: 1943630 - RNA, 23 nt, Human herpesvirus 4 [Epstein-Barr virus]
aggaacuccgcccaggucuugcc

SEQ ID NO: 1943631 - RNA, 12 nt, Human herpesvirus 4 [Epstein-Barr virus]
ucucauccccag

SEQ ID NO: 1943632 - RNA, 21 nt, Human herpesvirus 4 [Epstein-Barr virus]
acggccucaaaggccucggcg

SEQ ID NO: 1943633 - RNA, 22 nt, Human herpesvirus 4 [Epstein-Barr virus]
ucagcuguguacgugccucaga

SEQ ID NO: 1943634 - RNA, 15 nt, Human herpesvirus 4 [Epstein-Barr virus]
aaacaugggcugcua

SEQ ID NO: 1943635 - RNA, 18 nt, Human herpesvirus 4 [Epstein-Barr virus]
caccacucccaccacccc

SEQ ID NO: 1943636 - RNA, 12 nt, Human herpesvirus 4 [Epstein-Barr virus]
gagaggccucug

SEQ ID NO: 1943637 - RNA, 18 nt, Human herpesvirus 4 [Epstein-Barr virus]
ggagcuguaacugugguu

SEQ ID NO: 1943638 - RNA, 13 nt, Human herpesvirus 4 [Epstein-Barr virus]
augaggaaggggc

SEQ ID NO: 1943639 - RNA, 11 nt, Human herpesvirus 4 [Epstein-Barr virus]
auccagggccc

SEQ ID NO: 1943640 - RNA, 15 nt, Human herpesvirus 4 [Epstein-Barr virus]
agcgacgaggaugaa

SEQ ID NO: 1943641 - RNA, 20 nt, Human herpesvirus 4 [Epstein-Barr virus]
auacgcccgacaauaaaguu

SEQ ID NO: 1943642 - RNA, 12 nt, Human herpesvirus 4 [Epstein-Barr virus]
ccaagagcugcc

SEQ ID NO: 1943643 - RNA, 16 nt, Human herpesvirus 4 [Epstein-Barr virus]
gcaccggagccaccac

SEQ ID NO: 1943644 - RNA, 15 nt, Human herpesvirus 4 [Epstein-Barr virus]
cagcgcggcagaggc

SEQ ID NO: 1943645 - RNA, 20 nt, Human herpesvirus 4 [Epstein-Barr virus]
agaugccgugaaugcacgcc

SEQ ID NO: 1943646 - RNA, 21 nt, Human herpesvirus 4 [Epstein-Barr virus]
aggguggacagcagcguccug

SEQ ID NO: 1943647 - RNA, 13 nt, Human herpesvirus 4 [Epstein-Barr virus]
ugucagaccugaa

SEQ ID NO: 1943648 - RNA, 17 nt, Human herpesvirus 4 [Epstein-Barr virus]
gcaaacugacacacagg

SEQ ID NO: 1943649 - RNA, 12 nt, Human herpesvirus 4 [Epstein-Barr virus]
ccggugcugcca

SEQ ID NO: 1943650 - RNA, 22 nt, Human herpesvirus 4 [Epstein-Barr virus]
aaaccuccaaucaccagccacc

SEQ ID NO: 1943651 - RNA, 21 nt, Human herpesvirus 4 [Epstein-Barr virus]
ugcccuccuccacccagcagc

SEQ ID NO: 1943652 - RNA, 14 nt, Human herpesvirus 4 [Epstein-Barr virus]
ucacauauccagag

SEQ ID NO: 1943653 - RNA, 16 nt, Human herpesvirus 4 [Epstein-Barr virus]
cuggugggcucccucu

SEQ ID NO: 1943654 - RNA, 17 nt, Human herpesvirus 4 [Epstein-Barr virus]
gccucggccugggguaa

SEQ ID NO: 1943655 - RNA, 23 nt, Human herpesvirus 4 [Epstein-Barr virus]
aggcuugccugacugacucuccc

SEQ ID NO: 1943656 - RNA, 15 nt, Human herpesvirus 4 [Epstein-Barr virus]
cugucaccaccuccc

SEQ ID NO: 1943657 - RNA, 18 nt, Human herpesvirus 4 [Epstein-Barr virus]
gcugccgaagcagauggc

SEQ ID NO: 1943658 - RNA, 21 nt, Human herpesvirus 4 [Epstein-Barr virus]
ugcaauaaauaaaaguacaga

SEQ ID NO: 1943659 - RNA, 11 nt, Human herpesvirus 4 [Epstein-Barr virus]
ucacagcugcu

SEQ ID NO: 1943660 - RNA, 17 nt, Human herpesvirus 4 [Epstein-Barr virus]
gacauguuucuggugag

SEQ ID NO: 1943661 - RNA, 16 nt, Human herpesvirus 4 [Epstein-Barr virus]
cccagggguggcagug

SEQ ID NO: 1943662 - RNA, 15 nt, Human herpesvirus 4 [Epstein-Barr virus]
cacaccuuggcgggu

SEQ ID NO: 1943663 - RNA, 19 nt, Human herpesvirus 4 [Epstein-Barr virus]
ugugccucgucuaccucug

SEQ ID NO: 1943664 - RNA, 18 nt, Human herpesvirus 4 [Epstein-Barr virus]
gggacgcagaaugugcag

SEQ ID NO: 1943665 - RNA, 14 nt, Human herpesvirus 4 [Epstein-Barr virus]
caacugucacacca

SEQ ID NO: 1943666 - RNA, 15 nt, Human herpesvirus 4 [Epstein-Barr virus]
guggcauugcgggug

SEQ ID NO: 1943667 - RNA, 14 nt, Human herpesvirus 4 [Epstein-Barr virus]
gagggccucuggca

SEQ ID NO: 1943668 - RNA, 15 nt, Human herpesvirus 4 [Epstein-Barr virus]
agccaccacagcaca

SEQ ID NO: 1943669 - RNA, 21 nt, Human herpesvirus 4 [Epstein-Barr virus]
auugcugagaaccugcugcua

SEQ ID NO: 1943670 - RNA, 20 nt, Human herpesvirus 4 [Epstein-Barr virus]
cgaaucugacauuucucaua

SEQ ID NO: 1943671 - RNA, 16 nt, Human herpesvirus 4 [Epstein-Barr virus]
ucagauugccuucugu

SEQ ID NO: 1943672 - RNA, 15 nt, Human herpesvirus 4 [Epstein-Barr virus]
guaccagcugguggu

SEQ ID NO: 1943673 - RNA, 20 nt, Human herpesvirus 4 [Epstein-Barr virus]
aauguuccagaagucggcca

SEQ ID NO: 1943674 - RNA, 24 nt, Human herpesvirus 4 [Epstein-Barr virus]
aacuuuacuuuuauuucaguucug

SEQ ID NO: 1943675 - RNA, 20 nt, Human herpesvirus 4 [Epstein-Barr virus]
cacacgccagagacaaggca

SEQ ID NO: 1943676 - RNA, 13 nt, Human herpesvirus 4 [Epstein-Barr virus]
ccgccaggaccug

SEQ ID NO: 1943677 - RNA, 17 nt, Human herpesvirus 4 [Epstein-Barr virus]
caucagccgcugcgcaa

SEQ ID NO: 1943678 - RNA, 17 nt, Human herpesvirus 4 [Epstein-Barr virus]
agauucagacgagucug

SEQ ID NO: 1943679 - RNA, 20 nt, Human herpesvirus 4 [Epstein-Barr virus]
acgggcaucuuaucagagag

SEQ ID NO: 1943680 - RNA, 18 nt, Human herpesvirus 4 [Epstein-Barr virus]
cuggccguggccagguac

SEQ ID NO: 1943681 - RNA, 16 nt, Human herpesvirus 4 [Epstein-Barr virus]
gacggugucugugguu

SEQ ID NO: 1943682 - RNA, 20 nt, Human herpesvirus 4 [Epstein-Barr virus]
ugcugccgcuacugcugcua

SEQ ID NO: 1943683 - RNA, 18 nt, Human herpesvirus 4 [Epstein-Barr virus]
ggaacaaacaugggcugc

SEQ ID NO: 1943684 - RNA, 11 nt, Human herpesvirus 4 [Epstein-Barr virus]
cggagggacag

SEQ ID NO: 1943685 - RNA, 21 nt, Human herpesvirus 4 [Epstein-Barr virus]
auccuagagggacagcugacg

SEQ ID NO: 1943686 - RNA, 19 nt, Human herpesvirus 4 [Epstein-Barr virus]
ggccugcuggccgagcugg

SEQ ID NO: 1943687 - RNA, 20 nt, Human herpesvirus 4 [Epstein-Barr virus]
agcuuaaagagacucaggcc

SEQ ID NO: 1943688 - RNA, 23 nt, Human herpesvirus 4 [Epstein-Barr virus]
cucagggccacggcgugccagag

SEQ ID NO: 1943689 - RNA, 15 nt, Human herpesvirus 4 [Epstein-Barr virus]
ggcaaggagcuguuu

SEQ ID NO: 1943690 - RNA, 17 nt, Human herpesvirus 4 [Epstein-Barr virus]
gccccgguccccccaga

SEQ ID NO: 1943691 - RNA, 22 nt, Human herpesvirus 4 [Epstein-Barr virus]
agucccaacccaaaaccacaca

SEQ ID NO: 1943692 - RNA, 17 nt, Human herpesvirus 4 [Epstein-Barr virus]
uugucccugagauguga

SEQ ID NO: 1943693 - RNA, 14 nt, Human herpesvirus 4 [Epstein-Barr virus]
agcagguggcacac

SEQ ID NO: 1943694 - RNA, 15 nt, Human herpesvirus 4 [Epstein-Barr virus]
ccagagcaaaagcaa

SEQ ID NO: 1943695 - RNA, 13 nt, Human herpesvirus 4 [Epstein-Barr virus]
ggugaggcccagc

SEQ ID NO: 1943696 - RNA, 16 nt, Human herpesvirus 4 [Epstein-Barr virus]
cucuuggcagcagugg

SEQ ID NO: 1943697 - RNA, 18 nt, Human herpesvirus 4 [Epstein-Barr virus]
uguuuacaucugcccggc

SEQ ID NO: 1943698 - RNA, 22 nt, Human herpesvirus 4 [Epstein-Barr virus]
ugccccggggcuaaccaaggac

SEQ ID NO: 1943699 - RNA, 16 nt, Human herpesvirus 4 [Epstein-Barr virus]
cgacaucgccgcccca

SEQ ID NO: 1943700 - RNA, 23 nt, Human herpesvirus 4 [Epstein-Barr virus]
ucuaacacgcuuuugucugccug

SEQ ID NO: 1943701 - RNA, 13 nt, Human herpesvirus 4 [Epstein-Barr virus]
gguauugcagcug

SEQ ID NO: 1943702 - RNA, 17 nt, Human herpesvirus 4 [Epstein-Barr virus]
gugggacguuuagaaac

SEQ ID NO: 1943703 - RNA, 19 nt, Human herpesvirus 4 [Epstein-Barr virus]
cccauacaugucucagagg

SEQ ID NO: 1943704 - RNA, 19 nt, Human herpesvirus 4 [Epstein-Barr virus]
agguguccagcgcucuggu

SEQ ID NO: 1943705 - RNA, 15 nt, Human herpesvirus 4 [Epstein-Barr virus]
gccgccgccagcagc

SEQ ID NO: 1943706 - RNA, 13 nt, Human herpesvirus 4 [Epstein-Barr virus]
caggcagccuugc

SEQ ID NO: 1943707 - RNA, 20 nt, Human herpesvirus 4 [Epstein-Barr virus]
cuccggacgcagaggccugc

SEQ ID NO: 1943708 - RNA, 23 nt, Human herpesvirus 4 [Epstein-Barr virus]
uggagagauuucauccucagagg

SEQ ID NO: 1943709 - RNA, 23 nt, Human herpesvirus 4 [Epstein-Barr virus]
agaggagaauagaggggagcaga

SEQ ID NO: 1943710 - RNA, 21 nt, Human herpesvirus 4 [Epstein-Barr virus]
caaaaucaaaguaguuggagc

SEQ ID NO: 1943711 - RNA, 17 nt, Human herpesvirus 4 [Epstein-Barr virus]
cugcccuccuccaccca

SEQ ID NO: 1943712 - RNA, 17 nt, Human herpesvirus 4 [Epstein-Barr virus]
cauccacagccccacuc

SEQ ID NO: 1943713 - RNA, 22 nt, Human herpesvirus 4 [Epstein-Barr virus]
gcuuccacccccuggagccagc

SEQ ID NO: 1943714 - RNA, 19 nt, Human herpesvirus 4 [Epstein-Barr virus]
uaaagaucuaccccagcug

SEQ ID NO: 1943715 - RNA, 22 nt, Human herpesvirus 4 [Epstein-Barr virus]
ggcggcagcggacgguggggcu

SEQ ID NO: 1943716 - RNA, 16 nt, Human herpesvirus 4 [Epstein-Barr virus]
cucggccuccuggcca

SEQ ID NO: 1943717 - RNA, 14 nt, Human herpesvirus 4 [Epstein-Barr virus]
ggcagucuccaccu

SEQ ID NO: 1943718 - RNA, 18 nt, Human herpesvirus 4 [Epstein-Barr virus]
cauuuuauuuacagccau

SEQ ID NO: 1943719 - RNA, 14 nt, Human herpesvirus 4 [Epstein-Barr virus]
gaguguagaggugg

SEQ ID NO: 1943720 - RNA, 23 nt, Human herpesvirus 4 [Epstein-Barr virus]
ccuuaaauucaccuaagaauggg

SEQ ID NO: 1943721 - RNA, 17 nt, Human herpesvirus 4 [Epstein-Barr virus]
ccagcucggccagcagg

SEQ ID NO: 1943722 - RNA, 12 nt, Human herpesvirus 4 [Epstein-Barr virus]
cacaacagccag

SEQ ID NO: 1943723 - RNA, 16 nt, Human herpesvirus 4 [Epstein-Barr virus]
cugcacagaacaucac

SEQ ID NO: 1943724 - RNA, 13 nt, Human herpesvirus 4 [Epstein-Barr virus]
guccaucccggag

SEQ ID NO: 1943725 - RNA, 18 nt, Human herpesvirus 4 [Epstein-Barr virus]
ccccgaaagcggcccagc

SEQ ID NO: 1943726 - RNA, 15 nt, Human herpesvirus 4 [Epstein-Barr virus]
cacacagcgccagca

SEQ ID NO: 1943727 - RNA, 18 nt, Human herpesvirus 4 [Epstein-Barr virus]
aucacccauggccaggcu

SEQ ID NO: 1943728 - RNA, 16 nt, Human herpesvirus 4 [Epstein-Barr virus]
agcuccgccaccuccg

SEQ ID NO: 1943729 - RNA, 23 nt, Human herpesvirus 4 [Epstein-Barr virus]
ucgaugccgcuuacagccagaga

SEQ ID NO: 1943730 - RNA, 18 nt, Human herpesvirus 4 [Epstein-Barr virus]
ugacccauaccaggugcc

SEQ ID NO: 1943731 - RNA, 15 nt, Human herpesvirus 4 [Epstein-Barr virus]
accccuaccucggca

SEQ ID NO: 1943732 - RNA, 15 nt, Human herpesvirus 4 [Epstein-Barr virus]
aacucagccccaucu

SEQ ID NO: 1943733 - RNA, 13 nt, Human herpesvirus 4 [Epstein-Barr virus]
ggccgcugccagg

SEQ ID NO: 1943734 - RNA, 15 nt, Human herpesvirus 4 [Epstein-Barr virus]
ucuauccaggaggag

SEQ ID NO: 1943735 - RNA, 19 nt, Human herpesvirus 4 [Epstein-Barr virus]
ggaggacacugccaagguu

SEQ ID NO: 1943736 - RNA, 15 nt, Human herpesvirus 4 [Epstein-Barr virus]
uucccgccuccccuc

SEQ ID NO: 1943737 - RNA, 18 nt, Human herpesvirus 4 [Epstein-Barr virus]
aaaacucugcauggagaa

SEQ ID NO: 1943738 - RNA, 16 nt, Human herpesvirus 4 [Epstein-Barr virus]
ugggcugcuauaguga

SEQ ID NO: 1943739 - RNA, 23 nt, Human herpesvirus 4 [Epstein-Barr virus]
ggcuggacgucuuguccuuggug

SEQ ID NO: 1943740 - RNA, 15 nt, Human herpesvirus 4 [Epstein-Barr virus]
aagauacccagagca

SEQ ID NO: 1943741 - RNA, 17 nt, Human herpesvirus 4 [Epstein-Barr virus]
auaccuugggcaucaug

SEQ ID NO: 1943742 - RNA, 18 nt, Human herpesvirus 4 [Epstein-Barr virus]
ggccauucgacaggccau

SEQ ID NO: 1943743 - RNA, 15 nt, Human herpesvirus 4 [Epstein-Barr virus]
ggauggccuccagcu

SEQ ID NO: 1943744 - RNA, 22 nt, Human herpesvirus 4 [Epstein-Barr virus]
cuugaccaguguguacauucca

SEQ ID NO: 1943745 - RNA, 20 nt, Human herpesvirus 4 [Epstein-Barr virus]
caaacugacacacaggccug

SEQ ID NO: 1943746 - RNA, 13 nt, Human herpesvirus 4 [Epstein-Barr virus]
cucacaggacaug

SEQ ID NO: 1943747 - RNA, 14 nt, Human herpesvirus 4 [Epstein-Barr virus]
ggccagcuuugagc

SEQ ID NO: 1943748 - RNA, 16 nt, Human herpesvirus 4 [Epstein-Barr virus]
aggcccagcccccucu

SEQ ID NO: 1943749 - RNA, 13 nt, Human herpesvirus 4 [Epstein-Barr virus]
ccuccuggccagc

SEQ ID NO: 1943750 - RNA, 23 nt, Human herpesvirus 4 [Epstein-Barr virus]
cacagaucugaccacggcccacg

SEQ ID NO: 1943751 - RNA, 16 nt, Human herpesvirus 4 [Epstein-Barr virus]
cagccaccuccccugu

SEQ ID NO: 1943752 - RNA, 13 nt, Human herpesvirus 4 [Epstein-Barr virus]
gcuaaccagaugu

SEQ ID NO: 1943753 - RNA, 11 nt, Human herpesvirus 4 [Epstein-Barr virus]
agggaggagac

SEQ ID NO: 1943754 - RNA, 21 nt, Human herpesvirus 4 [Epstein-Barr virus]
gcgacauguuucuggugagcc

SEQ ID NO: 1943755 - RNA, 14 nt, Human herpesvirus 4 [Epstein-Barr virus]
ccuggugccagacu

SEQ ID NO: 1943756 - RNA, 12 nt, Human herpesvirus 4 [Epstein-Barr virus]
gcagggcccagu

SEQ ID NO: 1943757 - RNA, 19 nt, Human herpesvirus 4 [Epstein-Barr virus]
acucauuacuuguucuuuu

SEQ ID NO: 1943758 - RNA, 14 nt, Human herpesvirus 4 [Epstein-Barr virus]
gcagcaccucagcu

SEQ ID NO: 1943759 - RNA, 14 nt, Human herpesvirus 4 [Epstein-Barr virus]
ugcucucucuggag

SEQ ID NO: 1943760 - RNA, 18 nt, Human herpesvirus 4 [Epstein-Barr virus]
aaccuuggacccugcugc

SEQ ID NO: 1943761 - RNA, 16 nt, Human herpesvirus 4 [Epstein-Barr virus]
aguagcccuuggaacu

SEQ ID NO: 1943762 - RNA, 12 nt, Human herpesvirus 4 [Epstein-Barr virus]
acaggcugcgcc

SEQ ID NO: 1943763 - RNA, 14 nt, Human herpesvirus 4 [Epstein-Barr virus]
gcuacucuccgccg

SEQ ID NO: 1943764 - RNA, 13 nt, Human herpesvirus 4 [Epstein-Barr virus]
gcauaaugggagg

SEQ ID NO: 1943765 - RNA, 16 nt, Human herpesvirus 4 [Epstein-Barr virus]
gugugaagggcagggc

SEQ ID NO: 1943766 - RNA, 22 nt, Human herpesvirus 4 [Epstein-Barr virus]
ucgagauuguuuacaucugccc

SEQ ID NO: 1943767 - RNA, 23 nt, Human herpesvirus 4 [Epstein-Barr virus]
guggccuucucugauggccugga

SEQ ID NO: 1943768 - RNA, 19 nt, Human herpesvirus 4 [Epstein-Barr virus]
ccugccaaagagccagauc

SEQ ID NO: 1943769 - RNA, 14 nt, Human herpesvirus 4 [Epstein-Barr virus]
cgggcuccaugucc

SEQ ID NO: 1943770 - RNA, 13 nt, Human herpesvirus 4 [Epstein-Barr virus]
gccgaguggcaga

SEQ ID NO: 1943771 - RNA, 20 nt, Human herpesvirus 4 [Epstein-Barr virus]
ccuacaccaagauagugacc

SEQ ID NO: 1943772 - RNA, 21 nt, Human herpesvirus 4 [Epstein-Barr virus]
gagugccgggcccgggacagc

SEQ ID NO: 1943773 - RNA, 17 nt, Human herpesvirus 4 [Epstein-Barr virus]
gagacuggcaacuccuc

SEQ ID NO: 1943774 - RNA, 15 nt, Human herpesvirus 4 [Epstein-Barr virus]
caucuauuagcagcc

SEQ ID NO: 1943775 - RNA, 22 nt, Human herpesvirus 4 [Epstein-Barr virus]
ggccucgucaggagggcagaga

SEQ ID NO: 1943776 - RNA, 14 nt, Human herpesvirus 4 [Epstein-Barr virus]
caccaacacaacca

SEQ ID NO: 1943777 - RNA, 17 nt, Human herpesvirus 4 [Epstein-Barr virus]
aucuuugcugaagauga

SEQ ID NO: 1943778 - RNA, 19 nt, Human herpesvirus 4 [Epstein-Barr virus]
uccccgagggugaggccca

SEQ ID NO: 1943779 - RNA, 14 nt, Human herpesvirus 4 [Epstein-Barr virus]
gugguucuccugau

SEQ ID NO: 1943780 - RNA, 23 nt, Human herpesvirus 4 [Epstein-Barr virus]
uaacgggggaaggaaaggccugc

SEQ ID NO: 1943781 - RNA, 14 nt, Human herpesvirus 4 [Epstein-Barr virus]
cugggugcugagcg

SEQ ID NO: 1943782 - RNA, 18 nt, Human herpesvirus 4 [Epstein-Barr virus]
gccagagcggcauccuca

SEQ ID NO: 1943783 - RNA, 23 nt, Human herpesvirus 4 [Epstein-Barr virus]
aucccaguuguuauucccaccuc

SEQ ID NO: 1943784 - RNA, 18 nt, Human herpesvirus 4 [Epstein-Barr virus]
cucgacgcgggcccgggu

SEQ ID NO: 1943785 - RNA, 17 nt, Human herpesvirus 4 [Epstein-Barr virus]
ccuugucuuugguggau

SEQ ID NO: 1943786 - RNA, 22 nt, Human herpesvirus 4 [Epstein-Barr virus]
ccuuucccccacccuggaacaa

SEQ ID NO: 1943787 - RNA, 14 nt, Human herpesvirus 4 [Epstein-Barr virus]
gugccauggugcca

SEQ ID NO: 1943788 - RNA, 20 nt, Human herpesvirus 4 [Epstein-Barr virus]
gaacaguaaacacugccaua

SEQ ID NO: 1943789 - RNA, 16 nt, Human herpesvirus 4 [Epstein-Barr virus]
ucggacgaggaggaag

SEQ ID NO: 1943790 - RNA, 15 nt, Human herpesvirus 4 [Epstein-Barr virus]
caccagcuccaggga

SEQ ID NO: 1943791 - RNA, 13 nt, Human herpesvirus 4 [Epstein-Barr virus]
cagagggugagcc

SEQ ID NO: 1943792 - RNA, 21 nt, Human herpesvirus 4 [Epstein-Barr virus]
ccaccuguguaaccucacugu

SEQ ID NO: 1943793 - RNA, 15 nt, Human herpesvirus 4 [Epstein-Barr virus]
ugagugcccagggca

SEQ ID NO: 1943794 - RNA, 13 nt, Human herpesvirus 4 [Epstein-Barr virus]
acggggaaggagg

SEQ ID NO: 1943795 - RNA, 21 nt, Human herpesvirus 4 [Epstein-Barr virus]
agggacccacgguggaacagg

SEQ ID NO: 1943796 - RNA, 14 nt, Human herpesvirus 4 [Epstein-Barr virus]
cuaaccaaggacaa

SEQ ID NO: 1943797 - RNA, 20 nt, Human herpesvirus 4 [Epstein-Barr virus]
ggcacgggcagaggacacgc

SEQ ID NO: 1943798 - RNA, 16 nt, Human herpesvirus 4 [Epstein-Barr virus]
acagucuucaggucug

SEQ ID NO: 1943799 - RNA, 20 nt, Human herpesvirus 4 [Epstein-Barr virus]
ucugcuucgcguccuuuggg

SEQ ID NO: 1943800 - RNA, 16 nt, Human herpesvirus 4 [Epstein-Barr virus]
gccuaucauguuucaa

SEQ ID NO: 1943801 - RNA, 21 nt, Human herpesvirus 4 [Epstein-Barr virus]
ucccugggggccugugucuuc

SEQ ID NO: 1943802 - RNA, 13 nt, Human herpesvirus 4 [Epstein-Barr virus]
gcuggccgagcug

SEQ ID NO: 1943803 - RNA, 18 nt, Human herpesvirus 4 [Epstein-Barr virus]
cucacuucuacucuuggc

SEQ ID NO: 1943804 - RNA, 18 nt, Human herpesvirus 4 [Epstein-Barr virus]
gccgcuaguugguccagg

SEQ ID NO: 1943805 - RNA, 19 nt, Human herpesvirus 4 [Epstein-Barr virus]
ggcgccgaaagcaggaaug

SEQ ID NO: 1943806 - RNA, 15 nt, Human herpesvirus 4 [Epstein-Barr virus]
ucugacgaggggcca

SEQ ID NO: 1943807 - RNA, 20 nt, Human herpesvirus 4 [Epstein-Barr virus]
aggcauuuuuggugcugccu

SEQ ID NO: 1943808 - RNA, 23 nt, Human herpesvirus 4 [Epstein-Barr virus]
gagaggcuucccgccuagagcau

SEQ ID NO: 1943809 - RNA, 13 nt, Human herpesvirus 4 [Epstein-Barr virus]
ggcauccuucaga

SEQ ID NO: 1943810 - RNA, 17 nt, Human herpesvirus 4 [Epstein-Barr virus]
cugaucugggagaugag

SEQ ID NO: 1943811 - RNA, 20 nt, Human herpesvirus 4 [Epstein-Barr virus]
gcggacccgaucagagcccc

SEQ ID NO: 1943812 - RNA, 13 nt, Human herpesvirus 4 [Epstein-Barr virus]
auccuggccccca

SEQ ID NO: 1943813 - RNA, 17 nt, Human herpesvirus 4 [Epstein-Barr virus]
agugccaagagcugccu

SEQ ID NO: 1943814 - RNA, 18 nt, Human herpesvirus 4 [Epstein-Barr virus]
acagaggaggcuggugcc

SEQ ID NO: 1943815 - RNA, 23 nt, Human herpesvirus 4 [Epstein-Barr virus]
gaagcuacaaacacgggccuggg

SEQ ID NO: 1943816 - RNA, 19 nt, Human herpesvirus 4 [Epstein-Barr virus]
aggcgggaauggccgccac

SEQ ID NO: 1943817 - RNA, 19 nt, Human herpesvirus 4 [Epstein-Barr virus]
uggcagcccccuccuccag

SEQ ID NO: 1943818 - RNA, 18 nt, Human herpesvirus 4 [Epstein-Barr virus]
cuuggaccaagggcaggg

SEQ ID NO: 1943819 - RNA, 22 nt, Human herpesvirus 4 [Epstein-Barr virus]
gcccugcaaacugacacacagg

SEQ ID NO: 1943820 - RNA, 17 nt, Human herpesvirus 4 [Epstein-Barr virus]
aaggccgcugccaggcc

SEQ ID NO: 1943821 - RNA, 15 nt, Human herpesvirus 4 [Epstein-Barr virus]
augaacccuggggca

SEQ ID NO: 1943822 - RNA, 16 nt, Human herpesvirus 4 [Epstein-Barr virus]
cggccgcugcgcccug

SEQ ID NO: 1943823 - RNA, 16 nt, Human herpesvirus 4 [Epstein-Barr virus]
gaucuucuucucccuc

SEQ ID NO: 1943824 - RNA, 14 nt, Human herpesvirus 4 [Epstein-Barr virus]
auggcggccuggca

SEQ ID NO: 1943825 - RNA, 19 nt, Human herpesvirus 4 [Epstein-Barr virus]
ggaacggugggaagcucag

SEQ ID NO: 1943826 - RNA, 22 nt, Human herpesvirus 4 [Epstein-Barr virus]
gcauggcagcagacaaggacag

SEQ ID NO: 1943827 - RNA, 13 nt, Human herpesvirus 4 [Epstein-Barr virus]
caccagcuccagg

SEQ ID NO: 1943828 - RNA, 17 nt, Human herpesvirus 4 [Epstein-Barr virus]
ccgcagaagagccgcuc

SEQ ID NO: 1943829 - RNA, 17 nt, Human herpesvirus 4 [Epstein-Barr virus]
ccggggguggaggcugc

SEQ ID NO: 1943830 - RNA, 10 nt, Human herpesvirus 4 [Epstein-Barr virus]
guccacugcc

SEQ ID NO: 1943831 - RNA, 20 nt, Human herpesvirus 4 [Epstein-Barr virus]
cacccacugauaauacgccc

SEQ ID NO: 1943832 - RNA, 16 nt, Human herpesvirus 4 [Epstein-Barr virus]
ccacgauguagccgcu

SEQ ID NO: 1943833 - RNA, 21 nt, Human herpesvirus 4 [Epstein-Barr virus]
ucugguugauaaucucaaaga

SEQ ID NO: 1943834 - RNA, 22 nt, Human herpesvirus 4 [Epstein-Barr virus]
ugucaccaggccugccaaagag

SEQ ID NO: 1943835 - RNA, 15 nt, Human herpesvirus 4 [Epstein-Barr virus]
caugacgcugcugcu

SEQ ID NO: 1943836 - RNA, 17 nt, Human herpesvirus 4 [Epstein-Barr virus]
caggaggaggggcagga

SEQ ID NO: 1943837 - RNA, 17 nt, Human herpesvirus 4 [Epstein-Barr virus]
agcgcggcagaggccuc

SEQ ID NO: 1943838 - RNA, 22 nt, Human herpesvirus 4 [Epstein-Barr virus]
caguccaggggccacacagccu

SEQ ID NO: 1943839 - RNA, 18 nt, Human herpesvirus 4 [Epstein-Barr virus]
ccauggugagacaccugg

SEQ ID NO: 1943840 - RNA, 15 nt, Human herpesvirus 4 [Epstein-Barr virus]
accagagcccagagg

SEQ ID NO: 1943841 - RNA, 16 nt, Human herpesvirus 4 [Epstein-Barr virus]
gccacaaagagggggc

SEQ ID NO: 1943842 - RNA, 14 nt, Human herpesvirus 4 [Epstein-Barr virus]
cuccuucuuggccu

SEQ ID NO: 1943843 - RNA, 23 nt, Human herpesvirus 4 [Epstein-Barr virus]
gcuaugaagaagauugaagacaa

SEQ ID NO: 1943844 - RNA, 18 nt, Human herpesvirus 4 [Epstein-Barr virus]
aggcagacaaggccccgc

SEQ ID NO: 1943845 - RNA, 17 nt, Human herpesvirus 4 [Epstein-Barr virus]
cucuccacucccagucc

SEQ ID NO: 1943846 - RNA, 13 nt, Human herpesvirus 4 [Epstein-Barr virus]
cgcgcccuccucu

SEQ ID NO: 1943847 - RNA, 20 nt, Human herpesvirus 4 [Epstein-Barr virus]
cgucaggagacacggcucug

SEQ ID NO: 1943848 - RNA, 20 nt, Human herpesvirus 4 [Epstein-Barr virus]
ucuuacaccagaggccacaa

SEQ ID NO: 1943849 - RNA, 23 nt, Human herpesvirus 4 [Epstein-Barr virus]
cauucucaucuacaauggcuggu

SEQ ID NO: 1943850 - RNA, 22 nt, Human herpesvirus 4 [Epstein-Barr virus]
agcagaugugcccaagccugga

SEQ ID NO: 1943851 - RNA, 16 nt, Human herpesvirus 4 [Epstein-Barr virus]
gggccuuccagagcuc

SEQ ID NO: 1943852 - RNA, 13 nt, Human herpesvirus 4 [Epstein-Barr virus]
uggagaugcucug

SEQ ID NO: 1943853 - RNA, 15 nt, Human herpesvirus 4 [Epstein-Barr virus]
acaccgggcaggucc

SEQ ID NO: 1943854 - RNA, 16 nt, Human herpesvirus 4 [Epstein-Barr virus]
cucuaccuuccacgac

SEQ ID NO: 1943855 - RNA, 23 nt, Human herpesvirus 4 [Epstein-Barr virus]
cuaccucuguuccuucugcucca

SEQ ID NO: 1943856 - RNA, 22 nt, Human herpesvirus 4 [Epstein-Barr virus]
cacuccuaugcauuuccugccc

SEQ ID NO: 1943857 - RNA, 23 nt, Human herpesvirus 4 [Epstein-Barr virus]
acgaggggccagguacaggaccu

SEQ ID NO: 1943858 - RNA, 23 nt, Human herpesvirus 4 [Epstein-Barr virus]
aggagucugcugcggcuaugcag

SEQ ID NO: 1943859 - RNA, 16 nt, Human herpesvirus 4 [Epstein-Barr virus]
cucaggcggaggcacu

SEQ ID NO: 1943860 - RNA, 22 nt, Human herpesvirus 4 [Epstein-Barr virus]
cagacuuagggccggggccgag

SEQ ID NO: 1943861 - RNA, 18 nt, Human herpesvirus 4 [Epstein-Barr virus]
cuacugccuuacacugga

SEQ ID NO: 1943862 - RNA, 18 nt, Human herpesvirus 4 [Epstein-Barr virus]
cugacccuucugcugcug

SEQ ID NO: 1943863 - RNA, 14 nt, Human herpesvirus 4 [Epstein-Barr virus]
gacgaggggccagg

SEQ ID NO: 1943864 - RNA, 24 nt, Human herpesvirus 4 [Epstein-Barr virus]
uccgacgccugcggacucaggcca

SEQ ID NO: 1943865 - RNA, 17 nt, Human herpesvirus 4 [Epstein-Barr virus]
cucagcuccgcgcucaa

SEQ ID NO: 1943866 - RNA, 19 nt, Human herpesvirus 4 [Epstein-Barr virus]
cuugaagguggaggggggc

SEQ ID NO: 1943867 - RNA, 19 nt, Human herpesvirus 4 [Epstein-Barr virus]
caguccuugugucucuauc

SEQ ID NO: 1943868 - RNA, 17 nt, Human herpesvirus 4 [Epstein-Barr virus]
ccacgucaaggcccgga

SEQ ID NO: 1943869 - RNA, 16 nt, Human herpesvirus 4 [Epstein-Barr virus]
gccaccguggccaggc

SEQ ID NO: 1943870 - RNA, 19 nt, Human herpesvirus 4 [Epstein-Barr virus]
uccaguuuuuaugugccuc

SEQ ID NO: 1943871 - RNA, 15 nt, Human herpesvirus 4 [Epstein-Barr virus]
cuccacccagcagca

SEQ ID NO: 1943872 - RNA, 15 nt, Human herpesvirus 4 [Epstein-Barr virus]
ccauccccagcccag

SEQ ID NO: 1943873 - RNA, 16 nt, Human herpesvirus 4 [Epstein-Barr virus]
caggcacaucuggcac

SEQ ID NO: 1943874 - RNA, 16 nt, Human herpesvirus 4 [Epstein-Barr virus]
ggaagcuggccaggcu

SEQ ID NO: 1943875 - RNA, 15 nt, Human herpesvirus 4 [Epstein-Barr virus]
ggaacacccccaccc

SEQ ID NO: 1943876 - RNA, 12 nt, Human herpesvirus 4 [Epstein-Barr virus]
cccgucgggcca

SEQ ID NO: 1943877 - RNA, 19 nt, Human herpesvirus 4 [Epstein-Barr virus]
aguccagggcccuggucag

SEQ ID NO: 1943878 - RNA, 16 nt, Human herpesvirus 4 [Epstein-Barr virus]
gccaggauaaucaggc

SEQ ID NO: 1943879 - RNA, 17 nt, Human herpesvirus 4 [Epstein-Barr virus]
ccaaucaccagccaccu

SEQ ID NO: 1943880 - RNA, 14 nt, Human herpesvirus 4 [Epstein-Barr virus]
acaaucuugugaac

SEQ ID NO: 1943881 - RNA, 22 nt, Human herpesvirus 4 [Epstein-Barr virus]
acgcaggauguucacgugggcc

SEQ ID NO: 1943882 - RNA, 19 nt, Human herpesvirus 4 [Epstein-Barr virus]
cccgucccggguacaaguc

SEQ ID NO: 1943883 - RNA, 18 nt, Human herpesvirus 4 [Epstein-Barr virus]
gcacauauaccgcucggc

SEQ ID NO: 1943884 - RNA, 17 nt, Human herpesvirus 4 [Epstein-Barr virus]
gucccauguacagcaca

SEQ ID NO: 1943885 - RNA, 15 nt, Human herpesvirus 4 [Epstein-Barr virus]
gccgagaccuaugua

SEQ ID NO: 1943886 - RNA, 16 nt, Human herpesvirus 4 [Epstein-Barr virus]
gccuggcggguggaga

SEQ ID NO: 1943887 - RNA, 19 nt, Human herpesvirus 4 [Epstein-Barr virus]
uucuguacaauggggccag

SEQ ID NO: 1943888 - RNA, 15 nt, Human herpesvirus 4 [Epstein-Barr virus]
cagaauugucacuga

SEQ ID NO: 1943889 - RNA, 22 nt, Human herpesvirus 4 [Epstein-Barr virus]
accuuggccgguggcuguggac

SEQ ID NO: 1943890 - RNA, 22 nt, Human herpesvirus 4 [Epstein-Barr virus]
uucccggcugcucccgccucag

SEQ ID NO: 1943891 - RNA, 22 nt, Human herpesvirus 4 [Epstein-Barr virus]
uuaugagcgauuuuaucacagg

SEQ ID NO: 1943892 - RNA, 17 nt, Human herpesvirus 4 [Epstein-Barr virus]
gcugcuguccacccugg

SEQ ID NO: 1943893 - RNA, 23 nt, Human herpesvirus 4 [Epstein-Barr virus]
cagggccaagacauagagauggu

SEQ ID NO: 1943894 - RNA, 23 nt, Human herpesvirus 4 [Epstein-Barr virus]
uccuauggacacuugugguucuc

SEQ ID NO: 1943895 - RNA, 22 nt, Human herpesvirus 4 [Epstein-Barr virus]
gcccguuccaggcucuccagcc

SEQ ID NO: 1943896 - RNA, 18 nt, Human herpesvirus 4 [Epstein-Barr virus]
guucuccaggcuccugga

SEQ ID NO: 1943897 - RNA, 15 nt, Human herpesvirus 4 [Epstein-Barr virus]
gcgugaauugugccc

SEQ ID NO: 1943898 - RNA, 16 nt, Human herpesvirus 4 [Epstein-Barr virus]
ugggcgcgugcacaua

SEQ ID NO: 1943899 - RNA, 22 nt, Human herpesvirus 4 [Epstein-Barr virus]
gucaaacaggugagucagccuu

SEQ ID NO: 1943900 - RNA, 19 nt, Human herpesvirus 4 [Epstein-Barr virus]
uggcccugcaaacugacac

SEQ ID NO: 1943901 - RNA, 16 nt, Human herpesvirus 4 [Epstein-Barr virus]
uccaggagucugcugc

SEQ ID NO: 1943902 - RNA, 14 nt, Human herpesvirus 4 [Epstein-Barr virus]
acacgaaugcccag

SEQ ID NO: 1943903 - RNA, 14 nt, Human herpesvirus 4 [Epstein-Barr virus]
ugguugucuuccca

SEQ ID NO: 1943904 - RNA, 18 nt, Human herpesvirus 4 [Epstein-Barr virus]
gagccugagccacaccca

SEQ ID NO: 1943905 - RNA, 14 nt, Human herpesvirus 4 [Epstein-Barr virus]
augacgcugcugcu

SEQ ID NO: 1943906 - RNA, 22 nt, Human herpesvirus 4 [Epstein-Barr virus]
ggauccccgccggggcuagggg

SEQ ID NO: 1943907 - RNA, 16 nt, Human herpesvirus 4 [Epstein-Barr virus]
ggacgggguggugccu

SEQ ID NO: 1943908 - RNA, 14 nt, Human herpesvirus 4 [Epstein-Barr virus]
gagcagaaggccau

SEQ ID NO: 1943909 - RNA, 18 nt, Human herpesvirus 4 [Epstein-Barr virus]
cccagacucugcuuucug

SEQ ID NO: 1943910 - RNA, 17 nt, Human herpesvirus 4 [Epstein-Barr virus]
ccccaaaaguagaggcu

SEQ ID NO: 1943911 - RNA, 20 nt, Human herpesvirus 4 [Epstein-Barr virus]
ccuucugcugcugcugguca

SEQ ID NO: 1943912 - RNA, 16 nt, Human herpesvirus 4 [Epstein-Barr virus]
cggcugcugagaccuc

SEQ ID NO: 1943913 - RNA, 19 nt, Human herpesvirus 4 [Epstein-Barr virus]
uggcgccguuugacuguuu

SEQ ID NO: 1943914 - RNA, 15 nt, Human herpesvirus 4 [Epstein-Barr virus]
cgggcaagauggaga

SEQ ID NO: 1943915 - RNA, 13 nt, Human herpesvirus 4 [Epstein-Barr virus]
gggacaccugcac

SEQ ID NO: 1943916 - RNA, 20 nt, Human herpesvirus 4 [Epstein-Barr virus]
auggaagagaggggcaggga

SEQ ID NO: 1943917 - RNA, 14 nt, Human herpesvirus 4 [Epstein-Barr virus]
cuccuggccagcac

SEQ ID NO: 1943918 - RNA, 17 nt, Human herpesvirus 4 [Epstein-Barr virus]
ggagcuggugcaccugc

SEQ ID NO: 1943919 - RNA, 14 nt, Human herpesvirus 4 [Epstein-Barr virus]
gaccgugccauccu

SEQ ID NO: 1943920 - RNA, 14 nt, Human herpesvirus 4 [Epstein-Barr virus]
agaccaaggcccua

SEQ ID NO: 1943921 - RNA, 13 nt, Human herpesvirus 4 [Epstein-Barr virus]
ccaucauguguuu

SEQ ID NO: 1943922 - RNA, 23 nt, Human herpesvirus 4 [Epstein-Barr virus]
gcuucuucguauauguguugaga

SEQ ID NO: 1943923 - RNA, 18 nt, Human herpesvirus 4 [Epstein-Barr virus]
gucaaggcucugcacagg

SEQ ID NO: 1943924 - RNA, 20 nt, Human herpesvirus 4 [Epstein-Barr virus]
ggccgcccgccuggcucgcc

SEQ ID NO: 1943925 - RNA, 20 nt, Human herpesvirus 4 [Epstein-Barr virus]
gugacgaagacccaucugag

SEQ ID NO: 1943926 - RNA, 19 nt, Human herpesvirus 4 [Epstein-Barr virus]
ggacaugcugaugugcugc

SEQ ID NO: 1943927 - RNA, 18 nt, Human herpesvirus 4 [Epstein-Barr virus]
aaguaguuggagcucaag

SEQ ID NO: 1943928 - RNA, 22 nt, Human herpesvirus 4 [Epstein-Barr virus]
gccaccggggaggccagguagc

SEQ ID NO: 1943929 - RNA, 18 nt, Human herpesvirus 4 [Epstein-Barr virus]
ccucgaaggugcagcugg

SEQ ID NO: 1943930 - RNA, 22 nt, Human herpesvirus 4 [Epstein-Barr virus]
ccagggguggcaguggaugggg

SEQ ID NO: 1943931 - RNA, 19 nt, Human herpesvirus 4 [Epstein-Barr virus]
cgggcggcucaggaucagg

SEQ ID NO: 1943932 - RNA, 14 nt, Human herpesvirus 4 [Epstein-Barr virus]
cugcuucuggcucu

SEQ ID NO: 1943933 - RNA, 23 nt, Human herpesvirus 4 [Epstein-Barr virus]
cagggugcacagacuagcgagga

SEQ ID NO: 1943934 - RNA, 20 nt, Human herpesvirus 4 [Epstein-Barr virus]
gcacucucgagggugccugu

SEQ ID NO: 1943935 - RNA, 17 nt, Human herpesvirus 4 [Epstein-Barr virus]
uuugccagcaacuuaua

SEQ ID NO: 1943936 - RNA, 19 nt, Human herpesvirus 4 [Epstein-Barr virus]
cuucucccacccuguacac

SEQ ID NO: 1943937 - RNA, 20 nt, Human herpesvirus 4 [Epstein-Barr virus]
ugcagugggccucucuggcu

SEQ ID NO: 1943938 - RNA, 13 nt, Human herpesvirus 4 [Epstein-Barr virus]
cgacgcucccggg

SEQ ID NO: 1943939 - RNA, 18 nt, Human herpesvirus 4 [Epstein-Barr virus]
ggcggcgaugucggggcu

SEQ ID NO: 1943940 - RNA, 17 nt, Human herpesvirus 4 [Epstein-Barr virus]
acaaggagugccucugg

SEQ ID NO: 1943941 - RNA, 14 nt, Human herpesvirus 4 [Epstein-Barr virus]
aucagggccaggcu

SEQ ID NO: 1943942 - RNA, 17 nt, Human herpesvirus 4 [Epstein-Barr virus]
cuccagcucggccagca

SEQ ID NO: 1943943 - RNA, 16 nt, Human herpesvirus 4 [Epstein-Barr virus]
ugucuccugacgccaa

SEQ ID NO: 1943944 - RNA, 16 nt, Human herpesvirus 4 [Epstein-Barr virus]
aggggggaaucuuguu

SEQ ID NO: 1943945 - RNA, 12 nt, Human herpesvirus 4 [Epstein-Barr virus]
ccagagcugagu

SEQ ID NO: 1943946 - RNA, 17 nt, Human herpesvirus 4 [Epstein-Barr virus]
gcuccgagagcuccgcc

SEQ ID NO: 1943947 - RNA, 19 nt, Human herpesvirus 4 [Epstein-Barr virus]
gucuguaaucucuaaagau

SEQ ID NO: 1943948 - RNA, 20 nt, Human herpesvirus 4 [Epstein-Barr virus]
uccgcuuuaagaccaaggcc

SEQ ID NO: 1943949 - RNA, 23 nt, Human herpesvirus 4 [Epstein-Barr virus]
ugcuucuggaccgugccauccuc

SEQ ID NO: 1943950 - RNA, 16 nt, Human herpesvirus 4 [Epstein-Barr virus]
gagaagagaggcuucc

SEQ ID NO: 1943951 - RNA, 18 nt, Human herpesvirus 4 [Epstein-Barr virus]
ccagucuccgggucaggu

SEQ ID NO: 1943952 - RNA, 17 nt, Human herpesvirus 4 [Epstein-Barr virus]
gcucgcagcuggaggaa

SEQ ID NO: 1943953 - RNA, 23 nt, Human herpesvirus 4 [Epstein-Barr virus]
ccacaacugcuauucugagcacc

SEQ ID NO: 1943954 - RNA, 21 nt, Human herpesvirus 4 [Epstein-Barr virus]
caggcauuuuuggugcugccu

SEQ ID NO: 1943955 - RNA, 18 nt, Human herpesvirus 4 [Epstein-Barr virus]
auccaaacccccuccccu

SEQ ID NO: 1943956 - RNA, 16 nt, Human herpesvirus 4 [Epstein-Barr virus]
gggcuggccugccugg

SEQ ID NO: 1943957 - RNA, 18 nt, Human herpesvirus 4 [Epstein-Barr virus]
gugcuggagauuuuccca

SEQ ID NO: 1943958 - RNA, 16 nt, Human herpesvirus 4 [Epstein-Barr virus]
uauagcucugcacagg

SEQ ID NO: 1943959 - RNA, 13 nt, Human herpesvirus 4 [Epstein-Barr virus]
aggacgcuguccg

SEQ ID NO: 1943960 - RNA, 17 nt, Human herpesvirus 4 [Epstein-Barr virus]
caggcuuggaaacaccc

SEQ ID NO: 1943961 - RNA, 13 nt, Human herpesvirus 4 [Epstein-Barr virus]
gaccgcccaccga

SEQ ID NO: 1943962 - RNA, 14 nt, Human herpesvirus 4 [Epstein-Barr virus]
agcuccagggccag

SEQ ID NO: 1943963 - RNA, 18 nt, Human herpesvirus 4 [Epstein-Barr virus]
cugacacacaggccuggc

SEQ ID NO: 1943964 - RNA, 18 nt, Human herpesvirus 4 [Epstein-Barr virus]
ggcccggggguggcagcc

SEQ ID NO: 1943965 - RNA, 16 nt, Human herpesvirus 4 [Epstein-Barr virus]
gccaugcucagggcca

SEQ ID NO: 1943966 - RNA, 15 nt, Human herpesvirus 4 [Epstein-Barr virus]
gccaaagcugaagaa

SEQ ID NO: 1943967 - RNA, 18 nt, Human herpesvirus 4 [Epstein-Barr virus]
cgggcgccugcuccaccg

SEQ ID NO: 1943968 - RNA, 19 nt, Human herpesvirus 4 [Epstein-Barr virus]
ggcgaccuguuccgcuucu

SEQ ID NO: 1943969 - RNA, 22 nt, Human herpesvirus 4 [Epstein-Barr virus]
gugccagacucucuucagugac

SEQ ID NO: 1943970 - RNA, 19 nt, Human herpesvirus 4 [Epstein-Barr virus]
cuccugccugccucugcuc

SEQ ID NO: 1943971 - RNA, 11 nt, Human herpesvirus 4 [Epstein-Barr virus]
aguaccagcug

SEQ ID NO: 1943972 - RNA, 22 nt, Human herpesvirus 4 [Epstein-Barr virus]
gugcgguuauaacugccagagc

SEQ ID NO: 1943973 - RNA, 12 nt, Human herpesvirus 4 [Epstein-Barr virus]
gguugggcagaa

SEQ ID NO: 1943974 - RNA, 21 nt, Human herpesvirus 4 [Epstein-Barr virus]
ccggaucgaaggagagcugga

SEQ ID NO: 1943975 - RNA, 20 nt, Human herpesvirus 4 [Epstein-Barr virus]
cugacccucgcgccccaucu

SEQ ID NO: 1943976 - RNA, 15 nt, Human herpesvirus 4 [Epstein-Barr virus]
ccacuacaccccuga

SEQ ID NO: 1943977 - RNA, 22 nt, Human herpesvirus 4 [Epstein-Barr virus]
gucuucggucaaguaccagcug

SEQ ID NO: 1943978 - RNA, 14 nt, Human herpesvirus 4 [Epstein-Barr virus]
ucugccacaaggcc

SEQ ID NO: 1943979 - RNA, 19 nt, Human herpesvirus 4 [Epstein-Barr virus]
gcacagaacaucacugcca

SEQ ID NO: 1943980 - RNA, 15 nt, Human herpesvirus 4 [Epstein-Barr virus]
caugcucagggccac

SEQ ID NO: 1943981 - RNA, 15 nt, Human herpesvirus 4 [Epstein-Barr virus]
cggcgccucuugucg

SEQ ID NO: 1943982 - RNA, 23 nt, Human herpesvirus 4 [Epstein-Barr virus]
cacuccuaugcauuuccugcccu

SEQ ID NO: 1943983 - RNA, 15 nt, Human herpesvirus 4 [Epstein-Barr virus]
ucuacccuccccaug

SEQ ID NO: 1943984 - RNA, 22 nt, Human herpesvirus 4 [Epstein-Barr virus]
gcuaguggcgcugcguggcacc

SEQ ID NO: 1943985 - RNA, 17 nt, Human herpesvirus 4 [Epstein-Barr virus]
cgcagccacguccagac

SEQ ID NO: 1943986 - RNA, 18 nt, Human herpesvirus 4 [Epstein-Barr virus]
cucagaggaggaggauga

SEQ ID NO: 1943987 - RNA, 15 nt, Human herpesvirus 4 [Epstein-Barr virus]
acuugaggugggcug

SEQ ID NO: 1943988 - RNA, 21 nt, Human herpesvirus 4 [Epstein-Barr virus]
cccgggaccgcgcccuccucu

SEQ ID NO: 1943989 - RNA, 23 nt, Human herpesvirus 4 [Epstein-Barr virus]
agaacccccugcaggacacguga

SEQ ID NO: 1943990 - RNA, 22 nt, Human herpesvirus 4 [Epstein-Barr virus]
gcggcgaugucggggcugcugg

SEQ ID NO: 1943991 - RNA, 19 nt, Human herpesvirus 4 [Epstein-Barr virus]
gguagccuugggggccugg

SEQ ID NO: 1943992 - RNA, 16 nt, Human herpesvirus 4 [Epstein-Barr virus]
gccugccucugcucug

SEQ ID NO: 1943993 - RNA, 14 nt, Human herpesvirus 4 [Epstein-Barr virus]
cuugugcuuguacu

SEQ ID NO: 1943994 - RNA, 21 nt, Human herpesvirus 4 [Epstein-Barr virus]
auauggcuauacacaggagcc

SEQ ID NO: 1943995 - RNA, 15 nt, Human herpesvirus 4 [Epstein-Barr virus]
accaagggcagggca

SEQ ID NO: 1943996 - RNA, 12 nt, Human herpesvirus 4 [Epstein-Barr virus]
ggagaggggagu

SEQ ID NO: 1943997 - RNA, 20 nt, Human herpesvirus 4 [Epstein-Barr virus]
cgacuacgagggccucuggc

SEQ ID NO: 1943998 - RNA, 18 nt, Human herpesvirus 4 [Epstein-Barr virus]
uggcugccgaagcagaug

SEQ ID NO: 1943999 - RNA, 15 nt, Human herpesvirus 4 [Epstein-Barr virus]
uccaagcggcacaga

SEQ ID NO: 1944000 - RNA, 10 nt, Human herpesvirus 4 [Epstein-Barr virus]
ucagcuccag

SEQ ID NO: 1944001 - RNA, 22 nt, Human herpesvirus 4 [Epstein-Barr virus]
ugauacucaccaagauuguucc

SEQ ID NO: 1944002 - RNA, 15 nt, Human herpesvirus 4 [Epstein-Barr virus]
cuuguuucucagaga

SEQ ID NO: 1944003 - RNA, 16 nt, Human herpesvirus 4 [Epstein-Barr virus]
uuuccuucuugaccuu

SEQ ID NO: 1944004 - RNA, 19 nt, Human herpesvirus 4 [Epstein-Barr virus]
ugcaucuaagguccauccc

SEQ ID NO: 1944005 - RNA, 21 nt, Human herpesvirus 4 [Epstein-Barr virus]
aguugguccaggguccaggag

SEQ ID NO: 1944006 - RNA, 21 nt, Human herpesvirus 4 [Epstein-Barr virus]
gugucugugguugucuuccca

SEQ ID NO: 1944007 - RNA, 21 nt, Human herpesvirus 4 [Epstein-Barr virus]
ggcccucgguggugggcugcu

SEQ ID NO: 1944008 - RNA, 20 nt, Human herpesvirus 4 [Epstein-Barr virus]
ucagcucgcccacacagcgc

SEQ ID NO: 1944009 - RNA, 16 nt, Human herpesvirus 4 [Epstein-Barr virus]
ucaggcuaugaagaag

SEQ ID NO: 1944010 - RNA, 15 nt, Human herpesvirus 4 [Epstein-Barr virus]
ggcggaggcacugga

SEQ ID NO: 1944011 - RNA, 13 nt, Human herpesvirus 4 [Epstein-Barr virus]
uccagagccccuu

SEQ ID NO: 1944012 - RNA, 16 nt, Human herpesvirus 4 [Epstein-Barr virus]
acugauugucgcuggc

SEQ ID NO: 1944013 - RNA, 18 nt, Human herpesvirus 4 [Epstein-Barr virus]
uagggacagacccugggc

SEQ ID NO: 1944014 - RNA, 23 nt, Human herpesvirus 4 [Epstein-Barr virus]
cugcagugggccucucuggcugu

SEQ ID NO: 1944015 - RNA, 11 nt, Human herpesvirus 4 [Epstein-Barr virus]
ucuguggcagu

SEQ ID NO: 1944016 - RNA, 15 nt, Human herpesvirus 4 [Epstein-Barr virus]
aggccaauuggcacu

SEQ ID NO: 1944017 - RNA, 17 nt, Human herpesvirus 4 [Epstein-Barr virus]
cucgguggugggcugcu

SEQ ID NO: 1944018 - RNA, 18 nt, Human herpesvirus 4 [Epstein-Barr virus]
cauucugccgucucaaac

SEQ ID NO: 1944019 - RNA, 11 nt, Human herpesvirus 4 [Epstein-Barr virus]
cguccuggccc

SEQ ID NO: 1944020 - RNA, 18 nt, Human herpesvirus 4 [Epstein-Barr virus]
gaaucaccagagcccaga

SEQ ID NO: 1944021 - RNA, 21 nt, Human herpesvirus 4 [Epstein-Barr virus]
ugcgagaauuggcagacaccu

SEQ ID NO: 1944022 - RNA, 17 nt, Human herpesvirus 4 [Epstein-Barr virus]
accccuccuaugcgccc

SEQ ID NO: 1944023 - RNA, 13 nt, Human herpesvirus 4 [Epstein-Barr virus]
acauacaucccug

SEQ ID NO: 1944024 - RNA, 15 nt, Human herpesvirus 4 [Epstein-Barr virus]
ucucgcccaagcugc

SEQ ID NO: 1944025 - RNA, 16 nt, Human herpesvirus 4 [Epstein-Barr virus]
guccgacgccugcgga

SEQ ID NO: 1944026 - RNA, 16 nt, Human herpesvirus 4 [Epstein-Barr virus]
aguugguccagggucc

SEQ ID NO: 1944027 - RNA, 20 nt, Human herpesvirus 4 [Epstein-Barr virus]
acugccacauuggacaccca

SEQ ID NO: 1944028 - RNA, 16 nt, Human herpesvirus 4 [Epstein-Barr virus]
ggccucggccuggggu

SEQ ID NO: 1944029 - RNA, 15 nt, Human herpesvirus 4 [Epstein-Barr virus]
gaagucgguguccag

SEQ ID NO: 1944030 - RNA, 22 nt, Human herpesvirus 4 [Epstein-Barr virus]
gucacccaugccuccccagcaa

SEQ ID NO: 1944031 - RNA, 19 nt, Human herpesvirus 4 [Epstein-Barr virus]
acugcgggugucucaagcu

SEQ ID NO: 1944032 - RNA, 15 nt, Human herpesvirus 4 [Epstein-Barr virus]
agguggcugcugcca

SEQ ID NO: 1944033 - RNA, 18 nt, Human herpesvirus 4 [Epstein-Barr virus]
agaucgugaggccugaga

SEQ ID NO: 1944034 - RNA, 19 nt, Human herpesvirus 4 [Epstein-Barr virus]
ggccaaggugguagcguug

SEQ ID NO: 1944035 - RNA, 14 nt, Human herpesvirus 4 [Epstein-Barr virus]
cgccgccgccagca

SEQ ID NO: 1944036 - RNA, 15 nt, Human herpesvirus 4 [Epstein-Barr virus]
acccggacccggacc

SEQ ID NO: 1944037 - RNA, 15 nt, Human herpesvirus 4 [Epstein-Barr virus]
gccacccgucccggg

SEQ ID NO: 1944038 - RNA, 23 nt, Human herpesvirus 4 [Epstein-Barr virus]
caaagguguagaagugugucccc

SEQ ID NO: 1944039 - RNA, 18 nt, Human herpesvirus 4 [Epstein-Barr virus]
cucguagagaucaggcca

SEQ ID NO: 1944040 - RNA, 20 nt, Human herpesvirus 4 [Epstein-Barr virus]
gcgcaacgccggccugcugg

SEQ ID NO: 1944041 - RNA, 15 nt, Human herpesvirus 4 [Epstein-Barr virus]
cucuucaaccuuggc

SEQ ID NO: 1944042 - RNA, 16 nt, Human herpesvirus 4 [Epstein-Barr virus]
cccucggugggccaga

SEQ ID NO: 1944043 - RNA, 14 nt, Human herpesvirus 4 [Epstein-Barr virus]
cggucaaguaccag

SEQ ID NO: 1944044 - RNA, 13 nt, Human herpesvirus 4 [Epstein-Barr virus]
uggcugccccggc

SEQ ID NO: 1944045 - RNA, 19 nt, Human herpesvirus 4 [Epstein-Barr virus]
gcccccucuuuguggccuu

SEQ ID NO: 1944046 - RNA, 15 nt, Human herpesvirus 4 [Epstein-Barr virus]
aaccccuauauccua

SEQ ID NO: 1944047 - RNA, 21 nt, Human herpesvirus 4 [Epstein-Barr virus]
accuccacuuacaaccaagcc

SEQ ID NO: 1944048 - RNA, 15 nt, Human herpesvirus 4 [Epstein-Barr virus]
gggugacacagugcc

SEQ ID NO: 1944049 - RNA, 14 nt, Human herpesvirus 4 [Epstein-Barr virus]
gcugcaccuggaca

SEQ ID NO: 1944050 - RNA, 19 nt, Human herpesvirus 4 [Epstein-Barr virus]
agagccccuuuugcccccc

SEQ ID NO: 1944051 - RNA, 14 nt, Human herpesvirus 4 [Epstein-Barr virus]
gccuggggcucaga

SEQ ID NO: 1944052 - RNA, 22 nt, Human herpesvirus 4 [Epstein-Barr virus]
guugccgugguugggcagaacc

SEQ ID NO: 1944053 - RNA, 11 nt, Human herpesvirus 4 [Epstein-Barr virus]
ggacaugucac

SEQ ID NO: 1944054 - RNA, 15 nt, Human herpesvirus 4 [Epstein-Barr virus]
caaggacaacagcua

SEQ ID NO: 1944055 - RNA, 18 nt, Human herpesvirus 4 [Epstein-Barr virus]
ucgcgugacggcauucgu

SEQ ID NO: 1944056 - RNA, 19 nt, Human herpesvirus 4 [Epstein-Barr virus]
uccaagaaaccccacggag

SEQ ID NO: 1944057 - RNA, 22 nt, Human herpesvirus 4 [Epstein-Barr virus]
ccucgaguaggugccuccagag

SEQ ID NO: 1944058 - RNA, 17 nt, Human herpesvirus 4 [Epstein-Barr virus]
cgaggcccugcaagcca

SEQ ID NO: 1944059 - RNA, 14 nt, Human herpesvirus 4 [Epstein-Barr virus]
ggagagaagggaga

SEQ ID NO: 1944060 - RNA, 19 nt, Human herpesvirus 4 [Epstein-Barr virus]
gccaaccugccucucuuau

SEQ ID NO: 1944061 - RNA, 18 nt, Human herpesvirus 4 [Epstein-Barr virus]
uagcauggccgccagagu

SEQ ID NO: 1944062 - RNA, 15 nt, Human herpesvirus 4 [Epstein-Barr virus]
gcagguaauaaagcu

SEQ ID NO: 1944063 - RNA, 16 nt, Human herpesvirus 4 [Epstein-Barr virus]
gaggcguccgccccga

SEQ ID NO: 1944064 - RNA, 13 nt, Human herpesvirus 4 [Epstein-Barr virus]
aagcauggggcuc

SEQ ID NO: 1944065 - RNA, 19 nt, Human herpesvirus 4 [Epstein-Barr virus]
gaaaauguacccaucccgg

SEQ ID NO: 1944066 - RNA, 18 nt, Human herpesvirus 4 [Epstein-Barr virus]
cccuccauaggccucugc

SEQ ID NO: 1944067 - RNA, 20 nt, Human herpesvirus 4 [Epstein-Barr virus]
cccagguaccuuccuguguu

SEQ ID NO: 1944068 - RNA, 16 nt, Human herpesvirus 4 [Epstein-Barr virus]
cugucccuggagcugg

SEQ ID NO: 1944069 - RNA, 17 nt, Human herpesvirus 4 [Epstein-Barr virus]
cugugcuucagcaguag

SEQ ID NO: 1944070 - RNA, 22 nt, Human herpesvirus 4 [Epstein-Barr virus]
agcccccucccgccccugucca

SEQ ID NO: 1944071 - RNA, 18 nt, Human herpesvirus 4 [Epstein-Barr virus]
gagcgggaggggcaggag

SEQ ID NO: 1944072 - RNA, 20 nt, Human herpesvirus 4 [Epstein-Barr virus]
auguuuggguuauugacauc

SEQ ID NO: 1944073 - RNA, 20 nt, Human herpesvirus 4 [Epstein-Barr virus]
cgggucaggucgcggaccag

SEQ ID NO: 1944074 - RNA, 19 nt, Human herpesvirus 4 [Epstein-Barr virus]
gcacgguggcuugggcugu

SEQ ID NO: 1944075 - RNA, 17 nt, Human herpesvirus 4 [Epstein-Barr virus]
acuucauucucaaacag

SEQ ID NO: 1944076 - RNA, 22 nt, Human herpesvirus 4 [Epstein-Barr virus]
ugccggcccuuacaacagguuu

SEQ ID NO: 1944077 - RNA, 14 nt, Human herpesvirus 4 [Epstein-Barr virus]
uggcuacuugcuca

SEQ ID NO: 1944078 - RNA, 20 nt, Human herpesvirus 4 [Epstein-Barr virus]
cccgggugggcugguugggg

SEQ ID NO: 1944079 - RNA, 19 nt, Human herpesvirus 4 [Epstein-Barr virus]
gacgcacacggaaaccaca

SEQ ID NO: 1944080 - RNA, 15 nt, Human herpesvirus 4 [Epstein-Barr virus]
gauggugcuggucuc

SEQ ID NO: 1944081 - RNA, 12 nt, Human herpesvirus 4 [Epstein-Barr virus]
cacccgucccgg

SEQ ID NO: 1944082 - RNA, 15 nt, Human herpesvirus 4 [Epstein-Barr virus]
gccagguagcccagc

SEQ ID NO: 1944083 - RNA, 18 nt, Human herpesvirus 4 [Epstein-Barr virus]
ucagggaaaaacuggcca

SEQ ID NO: 1944084 - RNA, 17 nt, Human herpesvirus 4 [Epstein-Barr virus]
ugccucugggugcugag

SEQ ID NO: 1944085 - RNA, 17 nt, Human herpesvirus 4 [Epstein-Barr virus]
guugggguccucaagga

SEQ ID NO: 1944086 - RNA, 13 nt, Human herpesvirus 4 [Epstein-Barr virus]
aaggagggcuggu

SEQ ID NO: 1944087 - RNA, 20 nt, Human herpesvirus 4 [Epstein-Barr virus]
gcucccgggcaaacagggca

SEQ ID NO: 1944088 - RNA, 17 nt, Human herpesvirus 4 [Epstein-Barr virus]
ugcaacaaucuggacuc

SEQ ID NO: 1944089 - RNA, 23 nt, Human herpesvirus 4 [Epstein-Barr virus]
cuggaggcaauggucgccagggu

SEQ ID NO: 1944090 - RNA, 14 nt, Human herpesvirus 4 [Epstein-Barr virus]
agcaguagcuuggg

SEQ ID NO: 1944091 - RNA, 15 nt, Human herpesvirus 4 [Epstein-Barr virus]
caggcggaggcacug

SEQ ID NO: 1944092 - RNA, 15 nt, Human herpesvirus 4 [Epstein-Barr virus]
ccgcaccagggccag

SEQ ID NO: 1944093 - RNA, 14 nt, Human herpesvirus 4 [Epstein-Barr virus]
caaccuggagacaa

SEQ ID NO: 1944094 - RNA, 15 nt, Human herpesvirus 4 [Epstein-Barr virus]
gcucuucugggaaca

SEQ ID NO: 1944095 - RNA, 14 nt, Human herpesvirus 4 [Epstein-Barr virus]
uucccagacucugc

SEQ ID NO: 1944096 - RNA, 18 nt, Human herpesvirus 4 [Epstein-Barr virus]
cacgccugcuucacgccu

SEQ ID NO: 1944097 - RNA, 14 nt, Human herpesvirus 4 [Epstein-Barr virus]
caggucaggucccc

SEQ ID NO: 1944098 - RNA, 18 nt, Human herpesvirus 4 [Epstein-Barr virus]
gccaagguccugggccuc

SEQ ID NO: 1944099 - RNA, 17 nt, Human herpesvirus 4 [Epstein-Barr virus]
augggaccucuuuccca

SEQ ID NO: 1944100 - RNA, 14 nt, Human herpesvirus 4 [Epstein-Barr virus]
uuaacaccugcagc

SEQ ID NO: 1944101 - RNA, 18 nt, Human herpesvirus 4 [Epstein-Barr virus]
cugcguccaccuggccac

SEQ ID NO: 1944102 - RNA, 21 nt, Human herpesvirus 4 [Epstein-Barr virus]
gugugacaugcuauggugccg

SEQ ID NO: 1944103 - RNA, 20 nt, Human herpesvirus 4 [Epstein-Barr virus]
cggacccugguacaggacca

SEQ ID NO: 1944104 - RNA, 12 nt, Human herpesvirus 4 [Epstein-Barr virus]
ggucauggcgga

SEQ ID NO: 1944105 - RNA, 22 nt, Human herpesvirus 4 [Epstein-Barr virus]
uaccuugggcaucaugcagggu

SEQ ID NO: 1944106 - RNA, 22 nt, Human herpesvirus 4 [Epstein-Barr virus]
uagcccaggcacaucuggcacc

SEQ ID NO: 1944107 - RNA, 13 nt, Human herpesvirus 4 [Epstein-Barr virus]
gauccccagugga

SEQ ID NO: 1944108 - RNA, 17 nt, Human herpesvirus 4 [Epstein-Barr virus]
ggccauaguggcggcag

SEQ ID NO: 1944109 - RNA, 19 nt, Human herpesvirus 4 [Epstein-Barr virus]
cacgcuccgcgcucggccu

SEQ ID NO: 1944110 - RNA, 15 nt, Human herpesvirus 4 [Epstein-Barr virus]
auucagauuucuagu

SEQ ID NO: 1944111 - RNA, 16 nt, Human herpesvirus 4 [Epstein-Barr virus]
cucaggaagcuggcca

SEQ ID NO: 1944112 - RNA, 19 nt, Human herpesvirus 4 [Epstein-Barr virus]
uaccucuguuccuucugcu

SEQ ID NO: 1944113 - RNA, 14 nt, Human herpesvirus 4 [Epstein-Barr virus]
uagaugcugccgcu

SEQ ID NO: 1944114 - RNA, 16 nt, Human herpesvirus 4 [Epstein-Barr virus]
ucauaaccccuaccuc

SEQ ID NO: 1944115 - RNA, 21 nt, Human herpesvirus 4 [Epstein-Barr virus]
cagccuugcguggugcugucc

SEQ ID NO: 1944116 - RNA, 12 nt, Human herpesvirus 4 [Epstein-Barr virus]
gaacgcccagua

SEQ ID NO: 1944117 - RNA, 16 nt, Human herpesvirus 4 [Epstein-Barr virus]
gggacuggcggcacug

SEQ ID NO: 1944118 - RNA, 14 nt, Human herpesvirus 4 [Epstein-Barr virus]
gccggccaggcaga

SEQ ID NO: 1944119 - RNA, 15 nt, Human herpesvirus 4 [Epstein-Barr virus]
aguaaggccgcugcc

SEQ ID NO: 1944120 - RNA, 19 nt, Human herpesvirus 4 [Epstein-Barr virus]
gcgcagugccaagagcugc

SEQ ID NO: 1944121 - RNA, 12 nt, Human herpesvirus 4 [Epstein-Barr virus]
ccaggcucucca

SEQ ID NO: 1944122 - RNA, 13 nt, Human herpesvirus 4 [Epstein-Barr virus]
agcagggcccagu

SEQ ID NO: 1944123 - RNA, 20 nt, Human herpesvirus 4 [Epstein-Barr virus]
cugagcagggcaaagccaca

SEQ ID NO: 1944124 - RNA, 18 nt, Human herpesvirus 4 [Epstein-Barr virus]
auuggacacccacccugc

SEQ ID NO: 1944125 - RNA, 17 nt, Human herpesvirus 4 [Epstein-Barr virus]
agccugacucucaugua

SEQ ID NO: 1944126 - RNA, 15 nt, Human herpesvirus 4 [Epstein-Barr virus]
uugauuuggaggaag

SEQ ID NO: 1944127 - RNA, 22 nt, Human herpesvirus 4 [Epstein-Barr virus]
ggcucaggcggaggcacuggag

SEQ ID NO: 1944128 - RNA, 19 nt, Human herpesvirus 4 [Epstein-Barr virus]
cguaggucuauggggaccc

SEQ ID NO: 1944129 - RNA, 19 nt, Human herpesvirus 4 [Epstein-Barr virus]
gucaauaauuucagugaaa

SEQ ID NO: 1944130 - RNA, 22 nt, Human herpesvirus 4 [Epstein-Barr virus]
cgcagcugugugcgcgccgcca

SEQ ID NO: 1944131 - RNA, 19 nt, Human herpesvirus 4 [Epstein-Barr virus]
gagcugcaccggagccugc

SEQ ID NO: 1944132 - RNA, 17 nt, Human herpesvirus 4 [Epstein-Barr virus]
uuccgugccucgggccu

SEQ ID NO: 1944133 - RNA, 22 nt, Human herpesvirus 4 [Epstein-Barr virus]
cagcucuaacuuggcaucucuu

SEQ ID NO: 1944134 - RNA, 18 nt, Human herpesvirus 4 [Epstein-Barr virus]
gcccacacagcgccagca

SEQ ID NO: 1944135 - RNA, 22 nt, Human herpesvirus 4 [Epstein-Barr virus]
ggcugcugccgucccagggccg

SEQ ID NO: 1944136 - RNA, 21 nt, Human herpesvirus 4 [Epstein-Barr virus]
acaugucacguguccugcagg

SEQ ID NO: 1944137 - RNA, 22 nt, Human herpesvirus 4 [Epstein-Barr virus]
ggcacguuuaccagugugccag

SEQ ID NO: 1944138 - RNA, 17 nt, Human herpesvirus 4 [Epstein-Barr virus]
uccccucguucccccga

SEQ ID NO: 1944139 - RNA, 22 nt, Human herpesvirus 4 [Epstein-Barr virus]
cagggaaaaacuggccaugcag

SEQ ID NO: 1944140 - RNA, 17 nt, Human herpesvirus 4 [Epstein-Barr virus]
caucuacgcggagcugc

SEQ ID NO: 1944141 - RNA, 23 nt, Human herpesvirus 4 [Epstein-Barr virus]
ucaacaagcuaccgaugauucug

SEQ ID NO: 1944142 - RNA, 14 nt, Human herpesvirus 4 [Epstein-Barr virus]
aagcaacugcugca

SEQ ID NO: 1944143 - RNA, 18 nt, Human herpesvirus 4 [Epstein-Barr virus]
caacauuaaagccuccuc

SEQ ID NO: 1944144 - RNA, 14 nt, Human herpesvirus 4 [Epstein-Barr virus]
gggaggggcaggag

SEQ ID NO: 1944145 - RNA, 13 nt, Human herpesvirus 4 [Epstein-Barr virus]
gcugccaggccgc

SEQ ID NO: 1944146 - RNA, 16 nt, Human herpesvirus 4 [Epstein-Barr virus]
ccccuggagccagcgc

SEQ ID NO: 1944147 - RNA, 16 nt, Human herpesvirus 4 [Epstein-Barr virus]
caucauuagcccagcc

SEQ ID NO: 1944148 - RNA, 13 nt, Human herpesvirus 4 [Epstein-Barr virus]
acgugcccagcuc

SEQ ID NO: 1944149 - RNA, 18 nt, Human herpesvirus 4 [Epstein-Barr virus]
uggggccagaggcgacgc

SEQ ID NO: 1944150 - RNA, 19 nt, Human herpesvirus 4 [Epstein-Barr virus]
cugcguccucuaccugguc

SEQ ID NO: 1944151 - RNA, 11 nt, Human herpesvirus 4 [Epstein-Barr virus]
acaccauccca

SEQ ID NO: 1944152 - RNA, 16 nt, Human herpesvirus 4 [Epstein-Barr virus]
caguggacacccacca

SEQ ID NO: 1944153 - RNA, 20 nt, Human herpesvirus 4 [Epstein-Barr virus]
uguaucccaaauaaauguua

SEQ ID NO: 1944154 - RNA, 14 nt, Human herpesvirus 4 [Epstein-Barr virus]
gcguggugcugucc

SEQ ID NO: 1944155 - RNA, 17 nt, Human herpesvirus 4 [Epstein-Barr virus]
gcaauugggcauaccca

SEQ ID NO: 1944156 - RNA, 20 nt, Human herpesvirus 4 [Epstein-Barr virus]
cacgacuacgagggccucug

SEQ ID NO: 1944157 - RNA, 17 nt, Human herpesvirus 4 [Epstein-Barr virus]
cucuucauguccacuga

SEQ ID NO: 1944158 - RNA, 13 nt, Human herpesvirus 4 [Epstein-Barr virus]
gcauccucaaggg

SEQ ID NO: 1944159 - RNA, 13 nt, Human herpesvirus 4 [Epstein-Barr virus]
guagccuuggggg

SEQ ID NO: 1944160 - RNA, 18 nt, Human herpesvirus 4 [Epstein-Barr virus]
gcgccagcagggcacaga

SEQ ID NO: 1944161 - RNA, 20 nt, Human herpesvirus 4 [Epstein-Barr virus]
gacacccacggaagcccucu

SEQ ID NO: 1944162 - RNA, 13 nt, Human herpesvirus 4 [Epstein-Barr virus]
auuccccugccug

SEQ ID NO: 1944163 - RNA, 16 nt, Human herpesvirus 4 [Epstein-Barr virus]
agaagauugaagacaa

SEQ ID NO: 1944164 - RNA, 20 nt, Human herpesvirus 4 [Epstein-Barr virus]
ugaagaucgugaggccugag

SEQ ID NO: 1944165 - RNA, 15 nt, Human herpesvirus 4 [Epstein-Barr virus]
gggcugguggccugg

SEQ ID NO: 1944166 - RNA, 18 nt, Human herpesvirus 4 [Epstein-Barr virus]
gcaggaccuagaaugugg

SEQ ID NO: 1944167 - RNA, 23 nt, Human herpesvirus 4 [Epstein-Barr virus]
cuaggcgggcgggcuugugcuug

SEQ ID NO: 1944168 - RNA, 15 nt, Human herpesvirus 4 [Epstein-Barr virus]
cucccuuagccacac

SEQ ID NO: 1944169 - RNA, 21 nt, Human herpesvirus 4 [Epstein-Barr virus]
aaaaagcgggccugaguccaa

SEQ ID NO: 1944170 - RNA, 19 nt, Human herpesvirus 4 [Epstein-Barr virus]
cccucguggcauccuucag

SEQ ID NO: 1944171 - RNA, 22 nt, Human herpesvirus 4 [Epstein-Barr virus]
uguuuguggcggcaucauguuu

SEQ ID NO: 1944172 - RNA, 20 nt, Human herpesvirus 4 [Epstein-Barr virus]
ccaacaggugcccgagcccc

SEQ ID NO: 1944173 - RNA, 20 nt, Human herpesvirus 4 [Epstein-Barr virus]
agggcccagggucacuggcu

SEQ ID NO: 1944174 - RNA, 20 nt, Human herpesvirus 4 [Epstein-Barr virus]
agcagcguccuggccccauu

SEQ ID NO: 1944175 - RNA, 23 nt, Human herpesvirus 4 [Epstein-Barr virus]
auagcaggucuccagagggcaga

SEQ ID NO: 1944176 - RNA, 14 nt, Human herpesvirus 4 [Epstein-Barr virus]
gccuaggagagaag

SEQ ID NO: 1944177 - RNA, 18 nt, Human herpesvirus 4 [Epstein-Barr virus]
aaggauggcacgggcaga

SEQ ID NO: 1944178 - RNA, 13 nt, Human herpesvirus 4 [Epstein-Barr virus]
gaagggcagggcu

SEQ ID NO: 1944179 - RNA, 13 nt, Human herpesvirus 4 [Epstein-Barr virus]
acuuccucugcuu

SEQ ID NO: 1944180 - RNA, 22 nt, Human herpesvirus 4 [Epstein-Barr virus]
accuacgccauuaagaacaagu

SEQ ID NO: 1944181 - RNA, 18 nt, Human herpesvirus 4 [Epstein-Barr virus]
ccugagccugagccacac

SEQ ID NO: 1944182 - RNA, 18 nt, Human herpesvirus 4 [Epstein-Barr virus]
cauuuuuagccccagccc

SEQ ID NO: 1944183 - RNA, 16 nt, Human herpesvirus 4 [Epstein-Barr virus]
cgcuaguugguccagg

SEQ ID NO: 1944184 - RNA, 20 nt, Human herpesvirus 4 [Epstein-Barr virus]
gaacacggcaccgucagcca

SEQ ID NO: 1944185 - RNA, 15 nt, Human herpesvirus 4 [Epstein-Barr virus]
cuugcucgcagcugg

SEQ ID NO: 1944186 - RNA, 18 nt, Human herpesvirus 4 [Epstein-Barr virus]
ggaggcaauggucgccag

SEQ ID NO: 1944187 - RNA, 16 nt, Human herpesvirus 4 [Epstein-Barr virus]
gccaugcuucuuacac

SEQ ID NO: 1944188 - RNA, 21 nt, Human herpesvirus 4 [Epstein-Barr virus]
cucauggaggggcggcagcgg

SEQ ID NO: 1944189 - RNA, 16 nt, Human herpesvirus 4 [Epstein-Barr virus]
ggcaguagaggacacc

SEQ ID NO: 1944190 - RNA, 18 nt, Human herpesvirus 4 [Epstein-Barr virus]
ucagcuccagggccagca

SEQ ID NO: 1944191 - RNA, 18 nt, Human herpesvirus 4 [Epstein-Barr virus]
acagacuuggccuugggg

SEQ ID NO: 1944192 - RNA, 16 nt, Human herpesvirus 4 [Epstein-Barr virus]
gcaauugggcauaccc

SEQ ID NO: 1944193 - RNA, 11 nt, Human herpesvirus 4 [Epstein-Barr virus]
acgggccucua

SEQ ID NO: 1944194 - RNA, 12 nt, Human herpesvirus 4 [Epstein-Barr virus]
cgccuagagcau

SEQ ID NO: 1944195 - RNA, 18 nt, Human herpesvirus 4 [Epstein-Barr virus]
cuggagcuggugcaccug

SEQ ID NO: 1944196 - RNA, 23 nt, Human herpesvirus 4 [Epstein-Barr virus]
ccgcugcacaaaggaaacugcug

SEQ ID NO: 1944197 - RNA, 20 nt, Human herpesvirus 4 [Epstein-Barr virus]
uuggggguggugggcuccuu

SEQ ID NO: 1944198 - RNA, 20 nt, Human herpesvirus 4 [Epstein-Barr virus]
cgucauggcauccgccgcga

SEQ ID NO: 1944199 - RNA, 18 nt, Human herpesvirus 4 [Epstein-Barr virus]
caccgagcagaaggccau

SEQ ID NO: 1944200 - RNA, 16 nt, Human herpesvirus 4 [Epstein-Barr virus]
aauaaauaucuuccug

SEQ ID NO: 1944201 - RNA, 14 nt, Human herpesvirus 4 [Epstein-Barr virus]
aacugacagagccg

SEQ ID NO: 1944202 - RNA, 22 nt, Human herpesvirus 4 [Epstein-Barr virus]
cucuucgggcaagauggagagg

SEQ ID NO: 1944203 - RNA, 19 nt, Human herpesvirus 4 [Epstein-Barr virus]
ccgcagccgcugaagccag

SEQ ID NO: 1944204 - RNA, 21 nt, Human herpesvirus 4 [Epstein-Barr virus]
guucaaaccggaggaugcccc

SEQ ID NO: 1944205 - RNA, 20 nt, Human herpesvirus 4 [Epstein-Barr virus]
acugcuagcgucacugauuu

SEQ ID NO: 1944206 - RNA, 12 nt, Human herpesvirus 4 [Epstein-Barr virus]
uugggggggugg

SEQ ID NO: 1944207 - RNA, 15 nt, Human herpesvirus 4 [Epstein-Barr virus]
cuggggcugguggcc

SEQ ID NO: 1944208 - RNA, 18 nt, Human herpesvirus 4 [Epstein-Barr virus]
ggccaggcgacgcucccg

SEQ ID NO: 1944209 - RNA, 18 nt, Human herpesvirus 4 [Epstein-Barr virus]
cccagcgcuggcuccagg

SEQ ID NO: 1944210 - RNA, 13 nt, Human herpesvirus 4 [Epstein-Barr virus]
gggggaggagaga

SEQ ID NO: 1944211 - RNA, 13 nt, Human herpesvirus 4 [Epstein-Barr virus]
cuuacagccagag

SEQ ID NO: 1944212 - RNA, 22 nt, Human herpesvirus 4 [Epstein-Barr virus]
uucugcuccagugccuccgccu

SEQ ID NO: 1944213 - RNA, 22 nt, Human herpesvirus 4 [Epstein-Barr virus]
agagggugagcccaccugucug

SEQ ID NO: 1944214 - RNA, 21 nt, Human herpesvirus 4 [Epstein-Barr virus]
acugguuguaaccuaugccug

SEQ ID NO: 1944215 - RNA, 22 nt, Human herpesvirus 4 [Epstein-Barr virus]
gcugcucggggcaugcugcccg

SEQ ID NO: 1944216 - RNA, 15 nt, Human herpesvirus 4 [Epstein-Barr virus]
ggagcaggagcggga

SEQ ID NO: 1944217 - RNA, 15 nt, Human herpesvirus 4 [Epstein-Barr virus]
gcucaaccgccaggg

SEQ ID NO: 1944218 - RNA, 18 nt, Human herpesvirus 4 [Epstein-Barr virus]
ggccccgggagccacggc

SEQ ID NO: 1944219 - RNA, 15 nt, Human herpesvirus 4 [Epstein-Barr virus]
cgcugggacugccug

SEQ ID NO: 1944220 - RNA, 21 nt, Human herpesvirus 4 [Epstein-Barr virus]
aggggcaggagcaggaggagg

SEQ ID NO: 1944221 - RNA, 19 nt, Human herpesvirus 4 [Epstein-Barr virus]
cagggccaagacauagaga

SEQ ID NO: 1944222 - RNA, 13 nt, Human herpesvirus 4 [Epstein-Barr virus]
gccggggccgaga

SEQ ID NO: 1944223 - RNA, 14 nt, Human herpesvirus 4 [Epstein-Barr virus]
gugcaccugcuaga

SEQ ID NO: 1944224 - RNA, 13 nt, Human herpesvirus 4 [Epstein-Barr virus]
guacgugccucag

SEQ ID NO: 1944225 - RNA, 19 nt, Human herpesvirus 4 [Epstein-Barr virus]
cccagcccgccagccaccc

SEQ ID NO: 1944226 - RNA, 22 nt, Human herpesvirus 4 [Epstein-Barr virus]
gagccagaucuaaggccgggag

SEQ ID NO: 1944227 - RNA, 20 nt, Human herpesvirus 4 [Epstein-Barr virus]
gacgcagaaugugcagggau

SEQ ID NO: 1944228 - RNA, 13 nt, Human herpesvirus 4 [Epstein-Barr virus]
guguccugggcaa

SEQ ID NO: 1944229 - RNA, 17 nt, Human herpesvirus 4 [Epstein-Barr virus]
caaacugacacacaggc

SEQ ID NO: 1944230 - RNA, 17 nt, Human herpesvirus 4 [Epstein-Barr virus]
uggcagcaguggccagc

SEQ ID NO: 1944231 - RNA, 13 nt, Human herpesvirus 4 [Epstein-Barr virus]
augucagcuccac

SEQ ID NO: 1944232 - RNA, 15 nt, Human herpesvirus 4 [Epstein-Barr virus]
gaggacggugucugu

SEQ ID NO: 1944233 - RNA, 16 nt, Human herpesvirus 4 [Epstein-Barr virus]
ggaguccaugaccagg

SEQ ID NO: 1944234 - RNA, 15 nt, Human herpesvirus 4 [Epstein-Barr virus]
agcgagacaguacuc

SEQ ID NO: 1944235 - RNA, 15 nt, Human herpesvirus 4 [Epstein-Barr virus]
ccucguuuacuaaug

SEQ ID NO: 1944236 - RNA, 20 nt, Human herpesvirus 4 [Epstein-Barr virus]
cugaggcggcuguggccucu

SEQ ID NO: 1944237 - RNA, 15 nt, Human herpesvirus 4 [Epstein-Barr virus]
gucuuugccaaccug

SEQ ID NO: 1944238 - RNA, 13 nt, Human herpesvirus 4 [Epstein-Barr virus]
ucaaggauggcac

SEQ ID NO: 1944239 - RNA, 16 nt, Human herpesvirus 4 [Epstein-Barr virus]
cuagcgaggauaaucu

SEQ ID NO: 1944240 - RNA, 14 nt, Human herpesvirus 4 [Epstein-Barr virus]
cugcacaacacaac

SEQ ID NO: 1944241 - RNA, 12 nt, Human herpesvirus 4 [Epstein-Barr virus]
ucggugggccag

SEQ ID NO: 1944242 - RNA, 21 nt, Human herpesvirus 4 [Epstein-Barr virus]
gcugcccggacggccuagcca

SEQ ID NO: 1944243 - RNA, 17 nt, Human herpesvirus 4 [Epstein-Barr virus]
caguaaacacugccaua

SEQ ID NO: 1944244 - RNA, 22 nt, Human herpesvirus 4 [Epstein-Barr virus]
cacugaauuuauacccagugag

SEQ ID NO: 1944245 - RNA, 22 nt, Human herpesvirus 4 [Epstein-Barr virus]
aucaucagcgccguccacggcc

SEQ ID NO: 1944246 - RNA, 21 nt, Human herpesvirus 4 [Epstein-Barr virus]
gaaaccugcgaaacuuggggg

SEQ ID NO: 1944247 - RNA, 14 nt, Human herpesvirus 4 [Epstein-Barr virus]
agugccucugggug

SEQ ID NO: 1944248 - RNA, 20 nt, Human herpesvirus 4 [Epstein-Barr virus]
caccuugaggugccacagag

SEQ ID NO: 1944249 - RNA, 15 nt, Human herpesvirus 4 [Epstein-Barr virus]
gauugucacagcugc

SEQ ID NO: 1944250 - RNA, 15 nt, Human herpesvirus 4 [Epstein-Barr virus]
ugugaucauggaaac

SEQ ID NO: 1944251 - RNA, 21 nt, Human herpesvirus 4 [Epstein-Barr virus]
ggaggcccccggcuggccgcc

SEQ ID NO: 1944252 - RNA, 14 nt, Human herpesvirus 4 [Epstein-Barr virus]
ccggguggugagga

SEQ ID NO: 1944253 - RNA, 19 nt, Human herpesvirus 4 [Epstein-Barr virus]
cgauuggaaaagggcccag

SEQ ID NO: 1944254 - RNA, 22 nt, Human herpesvirus 4 [Epstein-Barr virus]
uucuaugggaauaacaagggaa

SEQ ID NO: 1944255 - RNA, 14 nt, Human herpesvirus 4 [Epstein-Barr virus]
gcgccgccagcaug

SEQ ID NO: 1944256 - RNA, 16 nt, Human herpesvirus 4 [Epstein-Barr virus]
cgggucccccuagccc

SEQ ID NO: 1944257 - RNA, 10 nt, Human herpesvirus 4 [Epstein-Barr virus]
cuacaggaca

SEQ ID NO: 1944258 - RNA, 15 nt, Human herpesvirus 4 [Epstein-Barr virus]
uggaacccuagccac

SEQ ID NO: 1944259 - RNA, 17 nt, Human herpesvirus 4 [Epstein-Barr virus]
auggccgccacccuccc

SEQ ID NO: 1944260 - RNA, 12 nt, Human herpesvirus 4 [Epstein-Barr virus]
cagaagccccca

SEQ ID NO: 1944261 - RNA, 16 nt, Human herpesvirus 4 [Epstein-Barr virus]
gcugcucgccccuggu

SEQ ID NO: 1944262 - RNA, 16 nt, Human herpesvirus 4 [Epstein-Barr virus]
cuugcccucuccagca

SEQ ID NO: 1944263 - RNA, 19 nt, Human herpesvirus 4 [Epstein-Barr virus]
ccggugucggcaccuagcc

SEQ ID NO: 1944264 - RNA, 22 nt, Human herpesvirus 4 [Epstein-Barr virus]
aggccgccaugcucagggccac

SEQ ID NO: 1944265 - RNA, 18 nt, Human herpesvirus 4 [Epstein-Barr virus]
uaccgaugauucuggcca

SEQ ID NO: 1944266 - RNA, 17 nt, Human herpesvirus 4 [Epstein-Barr virus]
aacuugucuacauccca

SEQ ID NO: 1944267 - RNA, 13 nt, Human herpesvirus 4 [Epstein-Barr virus]
agcgggugcagua

SEQ ID NO: 1944268 - RNA, 14 nt, Human herpesvirus 4 [Epstein-Barr virus]
acgcagaggccugc

SEQ ID NO: 1944269 - RNA, 22 nt, Human herpesvirus 4 [Epstein-Barr virus]
gaaaauaguuccaggugacagc

SEQ ID NO: 1944270 - RNA, 13 nt, Human herpesvirus 4 [Epstein-Barr virus]
cuggccagcaccc

SEQ ID NO: 1944271 - RNA, 14 nt, Human herpesvirus 4 [Epstein-Barr virus]
ugccccucagccug

SEQ ID NO: 1944272 - RNA, 19 nt, Human herpesvirus 4 [Epstein-Barr virus]
ccguguuucucccacuguc

SEQ ID NO: 1944273 - RNA, 18 nt, Human herpesvirus 4 [Epstein-Barr virus]
agccacggcgucaaacag

SEQ ID NO: 1944274 - RNA, 17 nt, Human herpesvirus 4 [Epstein-Barr virus]
cugccacaaggccagcu

SEQ ID NO: 1944275 - RNA, 21 nt, Human herpesvirus 4 [Epstein-Barr virus]
ugcaauuugccuaacauggag

SEQ ID NO: 1944276 - RNA, 14 nt, Human herpesvirus 4 [Epstein-Barr virus]
cucaucucaaggga

SEQ ID NO: 1944277 - RNA, 23 nt, Human herpesvirus 4 [Epstein-Barr virus]
cccaugaccaacaugagggcacc

SEQ ID NO: 1944278 - RNA, 19 nt, Human herpesvirus 4 [Epstein-Barr virus]
cugaaaaugacaggcugcg

SEQ ID NO: 1944279 - RNA, 19 nt, Human herpesvirus 4 [Epstein-Barr virus]
aggacacccaccaccaggc

SEQ ID NO: 1944280 - RNA, 20 nt, Human herpesvirus 4 [Epstein-Barr virus]
aagcccaagaagaagcccac

SEQ ID NO: 1944281 - RNA, 16 nt, Human herpesvirus 4 [Epstein-Barr virus]
ugccuguggccccggc

SEQ ID NO: 1944282 - RNA, 17 nt, Human herpesvirus 4 [Epstein-Barr virus]
uuucccccacccuggaa

SEQ ID NO: 1944283 - RNA, 14 nt, Human herpesvirus 4 [Epstein-Barr virus]
acaauguuccuucu

SEQ ID NO: 1944284 - RNA, 17 nt, Human herpesvirus 4 [Epstein-Barr virus]
ucgcccccucugccucc

SEQ ID NO: 1944285 - RNA, 15 nt, Human herpesvirus 4 [Epstein-Barr virus]
aucuauuagcagccu

SEQ ID NO: 1944286 - RNA, 20 nt, Human herpesvirus 4 [Epstein-Barr virus]
ggucccuagaaauggugcca

SEQ ID NO: 1944287 - RNA, 19 nt, Human herpesvirus 4 [Epstein-Barr virus]
cacggcgugccagaggccc

SEQ ID NO: 1944288 - RNA, 11 nt, Human herpesvirus 4 [Epstein-Barr virus]
ucucagggaca

SEQ ID NO: 1944289 - RNA, 15 nt, Human herpesvirus 4 [Epstein-Barr virus]
uuuaaggaaugaaca

SEQ ID NO: 1944290 - RNA, 20 nt, Human herpesvirus 4 [Epstein-Barr virus]
aggcaauggccaccgcagag

SEQ ID NO: 1944291 - RNA, 12 nt, Human herpesvirus 4 [Epstein-Barr virus]
cucgcucagagc

SEQ ID NO: 1944292 - RNA, 19 nt, Human herpesvirus 4 [Epstein-Barr virus]
acgggaacaucaaccagug

SEQ ID NO: 1944293 - RNA, 15 nt, Human herpesvirus 4 [Epstein-Barr virus]
aggagugcugcaggu

SEQ ID NO: 1944294 - RNA, 16 nt, Human herpesvirus 4 [Epstein-Barr virus]
gccagagccucugcca

SEQ ID NO: 1944295 - RNA, 20 nt, Human herpesvirus 4 [Epstein-Barr virus]
gcagauuuccgucagccagg

SEQ ID NO: 1944296 - RNA, 16 nt, Human herpesvirus 4 [Epstein-Barr virus]
ugccucccugccccuc

SEQ ID NO: 1944297 - RNA, 13 nt, Human herpesvirus 4 [Epstein-Barr virus]
acaugcugaugug

SEQ ID NO: 1944298 - RNA, 14 nt, Human herpesvirus 4 [Epstein-Barr virus]
cauggccgagaagc

SEQ ID NO: 1944299 - RNA, 18 nt, Human herpesvirus 4 [Epstein-Barr virus]
accaggccugccaaagag

SEQ ID NO: 1944300 - RNA, 23 nt, Human herpesvirus 4 [Epstein-Barr virus]
guugucacgucacucagcuccgc

SEQ ID NO: 1944301 - RNA, 16 nt, Human herpesvirus 4 [Epstein-Barr virus]
acgcuuccacccccug

SEQ ID NO: 1944302 - RNA, 15 nt, Human herpesvirus 4 [Epstein-Barr virus]
auagccggccaggca

SEQ ID NO: 1944303 - RNA, 17 nt, Human herpesvirus 4 [Epstein-Barr virus]
ccaggccucagcgucag

SEQ ID NO: 1944304 - RNA, 20 nt, Human herpesvirus 4 [Epstein-Barr virus]
aacacauauacgaagaagcg

SEQ ID NO: 1944305 - RNA, 14 nt, Human herpesvirus 4 [Epstein-Barr virus]
gcucugucaguuau

SEQ ID NO: 1944306 - RNA, 13 nt, Human herpesvirus 4 [Epstein-Barr virus]
aaggcucugaagc

SEQ ID NO: 1944307 - RNA, 14 nt, Human herpesvirus 4 [Epstein-Barr virus]
ggcucaccagggag

SEQ ID NO: 1944308 - RNA, 14 nt, Human herpesvirus 4 [Epstein-Barr virus]
aagcuacaaacacg

SEQ ID NO: 1944309 - RNA, 18 nt, Human herpesvirus 4 [Epstein-Barr virus]
cucuuggugcagcccuuu

SEQ ID NO: 1944310 - RNA, 23 nt, Human herpesvirus 4 [Epstein-Barr virus]
acagccccacucuugccucggcg

SEQ ID NO: 1944311 - RNA, 20 nt, Human herpesvirus 4 [Epstein-Barr virus]
uccgagagcuccgccaccuc

SEQ ID NO: 1944312 - RNA, 16 nt, Human herpesvirus 4 [Epstein-Barr virus]
aagucaggauucucua

SEQ ID NO: 1944313 - RNA, 13 nt, Human herpesvirus 4 [Epstein-Barr virus]
cugcgccuuuagg

SEQ ID NO: 1944314 - RNA, 18 nt, Human herpesvirus 4 [Epstein-Barr virus]
cgccgccagcauggcagc

SEQ ID NO: 1944315 - RNA, 16 nt, Human herpesvirus 4 [Epstein-Barr virus]
cuggauucuuacagca

SEQ ID NO: 1944316 - RNA, 21 nt, Human herpesvirus 4 [Epstein-Barr virus]
gggaacaugagaaaauacuuc

SEQ ID NO: 1944317 - RNA, 14 nt, Human herpesvirus 4 [Epstein-Barr virus]
gagcuguuuggcuc

SEQ ID NO: 1944318 - RNA, 20 nt, Human herpesvirus 4 [Epstein-Barr virus]
acgggucucacgagggucug

SEQ ID NO: 1944319 - RNA, 14 nt, Human herpesvirus 4 [Epstein-Barr virus]
cacccccaccaccc

SEQ ID NO: 1944320 - RNA, 20 nt, Human herpesvirus 4 [Epstein-Barr virus]
augaugacgccgagaccuau

SEQ ID NO: 1944321 - RNA, 14 nt, Human herpesvirus 4 [Epstein-Barr virus]
gcaugcaggucagg

SEQ ID NO: 1944322 - RNA, 16 nt, Human herpesvirus 4 [Epstein-Barr virus]
uugaugugacuuguga

SEQ ID NO: 1944323 - RNA, 13 nt, Human herpesvirus 4 [Epstein-Barr virus]
ccacguccagacu

SEQ ID NO: 1944324 - RNA, 22 nt, Human herpesvirus 4 [Epstein-Barr virus]
aacacgacgggaaugacgggcu

SEQ ID NO: 1944325 - RNA, 23 nt, Human herpesvirus 4 [Epstein-Barr virus]
aucaaggaaacaaaaccacugac

SEQ ID NO: 1944326 - RNA, 19 nt, Human herpesvirus 4 [Epstein-Barr virus]
accugcacagaucugacca

SEQ ID NO: 1944327 - RNA, 23 nt, Human herpesvirus 4 [Epstein-Barr virus]
gcuucagcaguagcuugggaaca

SEQ ID NO: 1944328 - RNA, 14 nt, Human herpesvirus 4 [Epstein-Barr virus]
uccagaaaaugccg

SEQ ID NO: 1944329 - RNA, 23 nt, Human herpesvirus 4 [Epstein-Barr virus]
aucaccccgaguccaaggcccaa

SEQ ID NO: 1944330 - RNA, 17 nt, Human herpesvirus 4 [Epstein-Barr virus]
acaggugggacaaaaug

SEQ ID NO: 1944331 - RNA, 21 nt, Human herpesvirus 4 [Epstein-Barr virus]
aggcccuaauucagccaccuc

SEQ ID NO: 1944332 - RNA, 22 nt, Human herpesvirus 4 [Epstein-Barr virus]
agugccauguguguccagugcc

SEQ ID NO: 1944333 - RNA, 22 nt, Human herpesvirus 4 [Epstein-Barr virus]
caguagcuugggaacaccgggc

SEQ ID NO: 1944334 - RNA, 15 nt, Human herpesvirus 4 [Epstein-Barr virus]
ucgugagucugcugg

SEQ ID NO: 1944335 - RNA, 16 nt, Human herpesvirus 4 [Epstein-Barr virus]
cgaggucuccccugac

SEQ ID NO: 1944336 - RNA, 17 nt, Human herpesvirus 4 [Epstein-Barr virus]
cggggcagcgccggugg

SEQ ID NO: 1944337 - RNA, 22 nt, Human herpesvirus 4 [Epstein-Barr virus]
ggggcaggagcaggaggggcag

SEQ ID NO: 1944338 - RNA, 15 nt, Human herpesvirus 4 [Epstein-Barr virus]
gucuacuucgccaug

SEQ ID NO: 1944339 - RNA, 18 nt, Human herpesvirus 4 [Epstein-Barr virus]
agugcccuggaggccuca

SEQ ID NO: 1944340 - RNA, 16 nt, Human herpesvirus 4 [Epstein-Barr virus]
agaacugacgcuccag

SEQ ID NO: 1944341 - RNA, 14 nt, Human herpesvirus 4 [Epstein-Barr virus]
ucugcuucuggacc

SEQ ID NO: 1944342 - RNA, 16 nt, Human herpesvirus 4 [Epstein-Barr virus]
ugccuccagagccccu

SEQ ID NO: 1944343 - RNA, 16 nt, Human herpesvirus 4 [Epstein-Barr virus]
ucaucccacugggacg

SEQ ID NO: 1944344 - RNA, 17 nt, Human herpesvirus 4 [Epstein-Barr virus]
caggagcuugaggccag

SEQ ID NO: 1944345 - RNA, 13 nt, Human herpesvirus 4 [Epstein-Barr virus]
cugaccacucagg

SEQ ID NO: 1944346 - RNA, 15 nt, Human herpesvirus 4 [Epstein-Barr virus]
uacaaccccuuccac

SEQ ID NO: 1944347 - RNA, 22 nt, Human herpesvirus 4 [Epstein-Barr virus]
guaccagcuggugguccgcaug

SEQ ID NO: 1944348 - RNA, 20 nt, Human herpesvirus 4 [Epstein-Barr virus]
gagaugugcgcccugcucuc

SEQ ID NO: 1944349 - RNA, 13 nt, Human herpesvirus 4 [Epstein-Barr virus]
guccgcugggcca

SEQ ID NO: 1944350 - RNA, 17 nt, Human herpesvirus 4 [Epstein-Barr virus]
cagugucccugcugccc

SEQ ID NO: 1944351 - RNA, 14 nt, Human herpesvirus 4 [Epstein-Barr virus]
gcaaaacucacagg

SEQ ID NO: 1944352 - RNA, 19 nt, Human herpesvirus 4 [Epstein-Barr virus]
ggguggaacgcuccagcuu

SEQ ID NO: 1944353 - RNA, 14 nt, Human herpesvirus 4 [Epstein-Barr virus]
caggcucggcaccu

SEQ ID NO: 1944354 - RNA, 17 nt, Human herpesvirus 4 [Epstein-Barr virus]
gggcccgcuucauucac

SEQ ID NO: 1944355 - RNA, 17 nt, Human herpesvirus 4 [Epstein-Barr virus]
cagucccaccacaaagg

SEQ ID NO: 1944356 - RNA, 15 nt, Human herpesvirus 4 [Epstein-Barr virus]
ccacccccaccaccc

SEQ ID NO: 1944357 - RNA, 16 nt, Human herpesvirus 4 [Epstein-Barr virus]
cgggaugacucaucuc

SEQ ID NO: 1944358 - RNA, 19 nt, Human herpesvirus 4 [Epstein-Barr virus]
acccauaccaggugccuuu

SEQ ID NO: 1944359 - RNA, 16 nt, Human herpesvirus 4 [Epstein-Barr virus]
uaggcacaucuggacc

SEQ ID NO: 1944360 - RNA, 17 nt, Human herpesvirus 4 [Epstein-Barr virus]
ugggccacugcaggcug

SEQ ID NO: 1944361 - RNA, 17 nt, Human herpesvirus 4 [Epstein-Barr virus]
gcauucuacuaggaaac

SEQ ID NO: 1944362 - RNA, 16 nt, Human herpesvirus 4 [Epstein-Barr virus]
aauaccgagauguaca

SEQ ID NO: 1944363 - RNA, 17 nt, Human herpesvirus 4 [Epstein-Barr virus]
cacaacggcugugacua

SEQ ID NO: 1944364 - RNA, 18 nt, Human herpesvirus 4 [Epstein-Barr virus]
aucaaccuguauaaugac

SEQ ID NO: 1944365 - RNA, 22 nt, Human herpesvirus 4 [Epstein-Barr virus]
gucaaggccaacucagaccccg

SEQ ID NO: 1944366 - RNA, 20 nt, Human herpesvirus 4 [Epstein-Barr virus]
gcuucuuagaugaggagcag

SEQ ID NO: 1944367 - RNA, 16 nt, Human herpesvirus 4 [Epstein-Barr virus]
guacccgccaagcacg

SEQ ID NO: 1944368 - RNA, 13 nt, Human herpesvirus 4 [Epstein-Barr virus]
auaaaaguacaga

SEQ ID NO: 1944369 - RNA, 17 nt, Human herpesvirus 4 [Epstein-Barr virus]
ucucggcuguuuguacu

SEQ ID NO: 1944370 - RNA, 14 nt, Human herpesvirus 4 [Epstein-Barr virus]
uggcaaagggcaug

SEQ ID NO: 1944371 - RNA, 23 nt, Human herpesvirus 4 [Epstein-Barr virus]
ucagccuccaacaggugcccgag

SEQ ID NO: 1944372 - RNA, 18 nt, Human herpesvirus 4 [Epstein-Barr virus]
ccagcagauccagggccc

SEQ ID NO: 1944373 - RNA, 20 nt, Human herpesvirus 4 [Epstein-Barr virus]
gcuuagugccccccuugaga

SEQ ID NO: 1944374 - RNA, 17 nt, Human herpesvirus 4 [Epstein-Barr virus]
gacuuuuggcaauggga

SEQ ID NO: 1944375 - RNA, 18 nt, Human herpesvirus 4 [Epstein-Barr virus]
cuucccagacucugcuuu

SEQ ID NO: 1944376 - RNA, 15 nt, Human herpesvirus 4 [Epstein-Barr virus]
gugccucugggugcu

SEQ ID NO: 1944377 - RNA, 14 nt, Human herpesvirus 4 [Epstein-Barr virus]
ccuuggcaugacgu

SEQ ID NO: 1944378 - RNA, 17 nt, Human herpesvirus 4 [Epstein-Barr virus]
ucaucaucgggaaaggc

SEQ ID NO: 1944379 - RNA, 21 nt, Human herpesvirus 4 [Epstein-Barr virus]
acacucuggggucucaggccu

SEQ ID NO: 1944380 - RNA, 15 nt, Human herpesvirus 4 [Epstein-Barr virus]
cccuggaggccucag

SEQ ID NO: 1944381 - RNA, 22 nt, Human herpesvirus 4 [Epstein-Barr virus]
ccguccccugaccggcgcggga

SEQ ID NO: 1944382 - RNA, 21 nt, Human herpesvirus 4 [Epstein-Barr virus]
agcgcucuggucgcccccucu

SEQ ID NO: 1944383 - RNA, 20 nt, Human herpesvirus 4 [Epstein-Barr virus]
ucuacaaccccuuccacgug

SEQ ID NO: 1944384 - RNA, 23 nt, Human herpesvirus 4 [Epstein-Barr virus]
cgguagccuugggggccuggacu

SEQ ID NO: 1944385 - RNA, 15 nt, Human herpesvirus 4 [Epstein-Barr virus]
cagggacauccccag

SEQ ID NO: 1944386 - RNA, 16 nt, Human herpesvirus 4 [Epstein-Barr virus]
ccaggucuugccgugg

SEQ ID NO: 1944387 - RNA, 17 nt, Human herpesvirus 4 [Epstein-Barr virus]
gaccaaugccaaagcug

SEQ ID NO: 1944388 - RNA, 14 nt, Human herpesvirus 4 [Epstein-Barr virus]
gcgcgccgccagca

SEQ ID NO: 1944389 - RNA, 18 nt, Human herpesvirus 4 [Epstein-Barr virus]
cgaggaacuggcucagcu

SEQ ID NO: 1944390 - RNA, 23 nt, Human herpesvirus 4 [Epstein-Barr virus]
uugggccugcggggaacugagcc

SEQ ID NO: 1944391 - RNA, 22 nt, Human herpesvirus 4 [Epstein-Barr virus]
aucggguggcuuccagaaaaug

SEQ ID NO: 1944392 - RNA, 18 nt, Human herpesvirus 4 [Epstein-Barr virus]
ggaggagacguguguggc

SEQ ID NO: 1944393 - RNA, 22 nt, Human herpesvirus 4 [Epstein-Barr virus]
ccccuggacacuuauguuucaa

SEQ ID NO: 1944394 - RNA, 14 nt, Human herpesvirus 4 [Epstein-Barr virus]
guggucgugcugcu

SEQ ID NO: 1944395 - RNA, 21 nt, Human herpesvirus 4 [Epstein-Barr virus]
gcauccaacgcuuccaccccc

SEQ ID NO: 1944396 - RNA, 22 nt, Human herpesvirus 4 [Epstein-Barr virus]
uaggggcgaagggugggggugg

SEQ ID NO: 1944397 - RNA, 19 nt, Human herpesvirus 4 [Epstein-Barr virus]
uacuggcuuucguccucug

SEQ ID NO: 1944398 - RNA, 15 nt, Human herpesvirus 4 [Epstein-Barr virus]
cgucacucagcuccg

SEQ ID NO: 1944399 - RNA, 13 nt, Human herpesvirus 4 [Epstein-Barr virus]
ccugacugacucu

SEQ ID NO: 1944400 - RNA, 22 nt, Human herpesvirus 4 [Epstein-Barr virus]
cagcgaagaacacuccacagau

SEQ ID NO: 1944401 - RNA, 21 nt, Human herpesvirus 4 [Epstein-Barr virus]
gccuugguuucagccucacug

SEQ ID NO: 1944402 - RNA, 13 nt, Human herpesvirus 4 [Epstein-Barr virus]
cgcggcuggaugc

SEQ ID NO: 1944403 - RNA, 14 nt, Human herpesvirus 4 [Epstein-Barr virus]
aucuuccugucggc

SEQ ID NO: 1944404 - RNA, 17 nt, Human herpesvirus 4 [Epstein-Barr virus]
ccggcccuuugccuggg

SEQ ID NO: 1944405 - RNA, 22 nt, Human herpesvirus 4 [Epstein-Barr virus]
agcacaagugauuaggagcagg

SEQ ID NO: 1944406 - RNA, 14 nt, Human herpesvirus 4 [Epstein-Barr virus]
caguagaggacacc

SEQ ID NO: 1944407 - RNA, 13 nt, Human herpesvirus 4 [Epstein-Barr virus]
ccaccuccccugu

SEQ ID NO: 1944408 - RNA, 12 nt, Human herpesvirus 4 [Epstein-Barr virus]
agccacauucau

SEQ ID NO: 1944409 - RNA, 15 nt, Human herpesvirus 4 [Epstein-Barr virus]
ccagcagauccaggg

SEQ ID NO: 1944410 - RNA, 17 nt, Human herpesvirus 4 [Epstein-Barr virus]
agacuaugcauacacug

SEQ ID NO: 1944411 - RNA, 21 nt, Human herpesvirus 4 [Epstein-Barr virus]
cccugcagaguaauugcagug

SEQ ID NO: 1944412 - RNA, 19 nt, Human herpesvirus 4 [Epstein-Barr virus]
cucuccagcaaccaaugua

SEQ ID NO: 1944413 - RNA, 13 nt, Human herpesvirus 4 [Epstein-Barr virus]
gccggugcugcca

SEQ ID NO: 1944414 - RNA, 20 nt, Human herpesvirus 4 [Epstein-Barr virus]
cccagcuaguagcccuugga

SEQ ID NO: 1944415 - RNA, 15 nt, Human herpesvirus 4 [Epstein-Barr virus]
gcguguuugcugcuc

SEQ ID NO: 1944416 - RNA, 15 nt, Human herpesvirus 4 [Epstein-Barr virus]
cgcuugcgucugccc

SEQ ID NO: 1944417 - RNA, 13 nt, Human herpesvirus 4 [Epstein-Barr virus]
gcuagggaggaga

SEQ ID NO: 1944418 - RNA, 20 nt, Human herpesvirus 4 [Epstein-Barr virus]
gggguccggucuugcaggga

SEQ ID NO: 1944419 - RNA, 12 nt, Human herpesvirus 4 [Epstein-Barr virus]
gcagccuggcuc

SEQ ID NO: 1944420 - RNA, 16 nt, Human herpesvirus 4 [Epstein-Barr virus]
agcacuuugccagcaa

SEQ ID NO: 1944421 - RNA, 14 nt, Human herpesvirus 4 [Epstein-Barr virus]
ccagagcccagagg

SEQ ID NO: 1944422 - RNA, 19 nt, Human herpesvirus 4 [Epstein-Barr virus]
ccacugugccuaaacguga

SEQ ID NO: 1944423 - RNA, 12 nt, Human herpesvirus 4 [Epstein-Barr virus]
caaacaugggcu

SEQ ID NO: 1944424 - RNA, 19 nt, Human herpesvirus 4 [Epstein-Barr virus]
ucagcucaaccgccagggc

SEQ ID NO: 1944425 - RNA, 22 nt, Human herpesvirus 4 [Epstein-Barr virus]
ggccucgccuucuccucagccu

SEQ ID NO: 1944426 - RNA, 18 nt, Human herpesvirus 4 [Epstein-Barr virus]
gccacggcgugccagagg

SEQ ID NO: 1944427 - RNA, 13 nt, Human herpesvirus 4 [Epstein-Barr virus]
caguggcccucag

SEQ ID NO: 1944428 - RNA, 20 nt, Human herpesvirus 4 [Epstein-Barr virus]
aaagcuaacuguacauacug

SEQ ID NO: 1944429 - RNA, 16 nt, Human herpesvirus 4 [Epstein-Barr virus]
cagaccccagagcagc

SEQ ID NO: 1944430 - RNA, 21 nt, Human herpesvirus 4 [Epstein-Barr virus]
aagaggaggagggcggguggc

SEQ ID NO: 1944431 - RNA, 21 nt, Human herpesvirus 4 [Epstein-Barr virus]
uaccucuguuccuucugcucc

SEQ ID NO: 1944432 - RNA, 21 nt, Human herpesvirus 4 [Epstein-Barr virus]
ggaugagguuagcguggacag

SEQ ID NO: 1944433 - RNA, 15 nt, Human herpesvirus 4 [Epstein-Barr virus]
cacccuguacacccc

SEQ ID NO: 1944434 - RNA, 13 nt, Human herpesvirus 4 [Epstein-Barr virus]
caacccaaaacca

SEQ ID NO: 1944435 - RNA, 20 nt, Human herpesvirus 4 [Epstein-Barr virus]
cucugccaacuuugagcugg

SEQ ID NO: 1944436 - RNA, 23 nt, Human herpesvirus 4 [Epstein-Barr virus]
gggccuggugccagacucucuuc

SEQ ID NO: 1944437 - RNA, 16 nt, Human herpesvirus 4 [Epstein-Barr virus]
cuccaucagggccagg

SEQ ID NO: 1944438 - RNA, 17 nt, Human herpesvirus 4 [Epstein-Barr virus]
gcccuggaggccucagg

SEQ ID NO: 1944439 - RNA, 23 nt, Human herpesvirus 4 [Epstein-Barr virus]
ggaaucuuguuggaauggggcgu

SEQ ID NO: 1944440 - RNA, 16 nt, Human herpesvirus 4 [Epstein-Barr virus]
ucccauguuuguaacu

SEQ ID NO: 1944441 - RNA, 12 nt, Human herpesvirus 4 [Epstein-Barr virus]
gaauuggggcug

SEQ ID NO: 1944442 - RNA, 22 nt, Human herpesvirus 4 [Epstein-Barr virus]
acccugggccggggccuccauc

SEQ ID NO: 1944443 - RNA, 19 nt, Human herpesvirus 4 [Epstein-Barr virus]
gggaaugacgggcucccuc

SEQ ID NO: 1944444 - RNA, 15 nt, Human herpesvirus 4 [Epstein-Barr virus]
aucggacgggcaggc

SEQ ID NO: 1944445 - RNA, 15 nt, Human herpesvirus 4 [Epstein-Barr virus]
aggcagccuugcgug

SEQ ID NO: 1944446 - RNA, 15 nt, Human herpesvirus 4 [Epstein-Barr virus]
ggccguccucuggac

SEQ ID NO: 1944447 - RNA, 14 nt, Human herpesvirus 4 [Epstein-Barr virus]
cacuggaugcagga

SEQ ID NO: 1944448 - RNA, 20 nt, Human herpesvirus 4 [Epstein-Barr virus]
augcaauaaauaaaaguaca

SEQ ID NO: 1944449 - RNA, 21 nt, Human herpesvirus 4 [Epstein-Barr virus]
agucaggagguacaugggcca

SEQ ID NO: 1944450 - RNA, 23 nt, Human herpesvirus 4 [Epstein-Barr virus]
acucucucccccgggcgcugccu

SEQ ID NO: 1944451 - RNA, 20 nt, Human herpesvirus 4 [Epstein-Barr virus]
gccgcagaagagccgcuccg

SEQ ID NO: 1944452 - RNA, 23 nt, Human herpesvirus 4 [Epstein-Barr virus]
cgcgcuaccuccuaucacaggga

SEQ ID NO: 1944453 - RNA, 19 nt, Human herpesvirus 4 [Epstein-Barr virus]
aucagggccaagacauaga

SEQ ID NO: 1944454 - RNA, 15 nt, Human herpesvirus 4 [Epstein-Barr virus]
guuccccccagccug

SEQ ID NO: 1944455 - RNA, 17 nt, Human herpesvirus 4 [Epstein-Barr virus]
aggccaugcgcgcccug

SEQ ID NO: 1944456 - RNA, 23 nt, Human herpesvirus 4 [Epstein-Barr virus]
gacgggcaucuuaucagagaggc

SEQ ID NO: 1944457 - RNA, 21 nt, Human herpesvirus 4 [Epstein-Barr virus]
uggugcuguccugcugaaggg

SEQ ID NO: 1944458 - RNA, 23 nt, Human herpesvirus 4 [Epstein-Barr virus]
gcgugacggcauucgugagcagg

SEQ ID NO: 1944459 - RNA, 15 nt, Human herpesvirus 4 [Epstein-Barr virus]
cugauaauacgcccg

SEQ ID NO: 1944460 - RNA, 15 nt, Human herpesvirus 4 [Epstein-Barr virus]
cgccgccagcagccc

SEQ ID NO: 1944461 - RNA, 15 nt, Human herpesvirus 4 [Epstein-Barr virus]
gccaacgcucagugc

SEQ ID NO: 1944462 - RNA, 21 nt, Human herpesvirus 4 [Epstein-Barr virus]
agagggcagacguuaguaaca

SEQ ID NO: 1944463 - RNA, 22 nt, Human herpesvirus 4 [Epstein-Barr virus]
ugauucaucagaagcuacaaac

SEQ ID NO: 1944464 - RNA, 13 nt, Human herpesvirus 4 [Epstein-Barr virus]
acgccggccugcu

SEQ ID NO: 1944465 - RNA, 20 nt, Human herpesvirus 4 [Epstein-Barr virus]
ggcuggugacaaacucucuc

SEQ ID NO: 1944466 - RNA, 17 nt, Human herpesvirus 4 [Epstein-Barr virus]
ccuuacacuggaaagug

SEQ ID NO: 1944467 - RNA, 19 nt, Human herpesvirus 4 [Epstein-Barr virus]
cgcccugucaccaggccug

SEQ ID NO: 1944468 - RNA, 22 nt, Human herpesvirus 4 [Epstein-Barr virus]
ucuucauucuugcuauccugac

SEQ ID NO: 1944469 - RNA, 13 nt, Human herpesvirus 4 [Epstein-Barr virus]
cugcguccucuac

SEQ ID NO: 1944470 - RNA, 14 nt, Human herpesvirus 4 [Epstein-Barr virus]
cgugcaugcagcgc

SEQ ID NO: 1944471 - RNA, 13 nt, Human herpesvirus 4 [Epstein-Barr virus]
uccccggccuccc

SEQ ID NO: 1944472 - RNA, 12 nt, Human herpesvirus 4 [Epstein-Barr virus]
gugcccagggca

SEQ ID NO: 1944473 - RNA, 21 nt, Human herpesvirus 4 [Epstein-Barr virus]
gucuucggucaaguaccagcu

SEQ ID NO: 1944474 - RNA, 15 nt, Human herpesvirus 4 [Epstein-Barr virus]
aucaccagagcccag

SEQ ID NO: 1944475 - RNA, 17 nt, Human herpesvirus 4 [Epstein-Barr virus]
agauuagaagaugaugc

SEQ ID NO: 1944476 - RNA, 18 nt, Human herpesvirus 4 [Epstein-Barr virus]
ccucugccuccggccgcc

SEQ ID NO: 1944477 - RNA, 12 nt, Human herpesvirus 4 [Epstein-Barr virus]
gaggggcaggag

SEQ ID NO: 1944478 - RNA, 15 nt, Human herpesvirus 4 [Epstein-Barr virus]
agcaucagaugagac

SEQ ID NO: 1944479 - RNA, 15 nt, Human herpesvirus 4 [Epstein-Barr virus]
gaagauugucacagc

SEQ ID NO: 1944480 - RNA, 17 nt, Human herpesvirus 4 [Epstein-Barr virus]
caaaacuuuagaggcga

SEQ ID NO: 1944481 - RNA, 14 nt, Human herpesvirus 4 [Epstein-Barr virus]
ucccacugugccua

SEQ ID NO: 1944482 - RNA, 16 nt, Human herpesvirus 4 [Epstein-Barr virus]
cucggggcuggggaga

SEQ ID NO: 1944483 - RNA, 16 nt, Human herpesvirus 4 [Epstein-Barr virus]
aaagucccgagcggcc

SEQ ID NO: 1944484 - RNA, 14 nt, Human herpesvirus 4 [Epstein-Barr virus]
ggugacacagugcc

SEQ ID NO: 1944485 - RNA, 18 nt, Human herpesvirus 4 [Epstein-Barr virus]
ccuugcccucuccagcaa

SEQ ID NO: 1944486 - RNA, 20 nt, Human herpesvirus 4 [Epstein-Barr virus]
cagggcaacauugcagggcu

SEQ ID NO: 1944487 - RNA, 21 nt, Human herpesvirus 4 [Epstein-Barr virus]
gaaucaaaaucagaccacccg

SEQ ID NO: 1944488 - RNA, 21 nt, Human herpesvirus 4 [Epstein-Barr virus]
aguacugcagugggccucucu

SEQ ID NO: 1944489 - RNA, 21 nt, Human herpesvirus 4 [Epstein-Barr virus]
ggccuccagcucggccagcag

SEQ ID NO: 1944490 - RNA, 21 nt, Human herpesvirus 4 [Epstein-Barr virus]
cucacuucuacucuuggcagc

SEQ ID NO: 1944491 - RNA, 18 nt, Human herpesvirus 4 [Epstein-Barr virus]
gugcccgagccccgccug

SEQ ID NO: 1944492 - RNA, 15 nt, Human herpesvirus 4 [Epstein-Barr virus]
caucagcgccgucca

SEQ ID NO: 1944493 - RNA, 21 nt, Human herpesvirus 4 [Epstein-Barr virus]
gaggcggaagaccaggagccc

SEQ ID NO: 1944494 - RNA, 15 nt, Human herpesvirus 4 [Epstein-Barr virus]
cuuggcagcaguggc

SEQ ID NO: 1944495 - RNA, 21 nt, Human herpesvirus 4 [Epstein-Barr virus]
uguccgcagguggcugcugcc

SEQ ID NO: 1944496 - RNA, 21 nt, Human herpesvirus 4 [Epstein-Barr virus]
auggcauaaugggagggagcc

SEQ ID NO: 1944497 - RNA, 18 nt, Human herpesvirus 4 [Epstein-Barr virus]
cuagccguccuguccaag

SEQ ID NO: 1944498 - RNA, 16 nt, Human herpesvirus 4 [Epstein-Barr virus]
ccugcguugaacccac

SEQ ID NO: 1944499 - RNA, 19 nt, Human herpesvirus 4 [Epstein-Barr virus]
cucagaauugucacugaga

SEQ ID NO: 1944500 - RNA, 23 nt, Human herpesvirus 4 [Epstein-Barr virus]
caggugcccgagccccgccuggc

SEQ ID NO: 1944501 - RNA, 13 nt, Human herpesvirus 4 [Epstein-Barr virus]
augcagaaggggc

SEQ ID NO: 1944502 - RNA, 22 nt, Human herpesvirus 4 [Epstein-Barr virus]
gccaaugacccacuccagugcg

SEQ ID NO: 1944503 - RNA, 16 nt, Human herpesvirus 4 [Epstein-Barr virus]
gaccaaggcccuagcc

SEQ ID NO: 1944504 - RNA, 22 nt, Human herpesvirus 4 [Epstein-Barr virus]
cucaacaaggagugccucuggg

SEQ ID NO: 1944505 - RNA, 19 nt, Human herpesvirus 4 [Epstein-Barr virus]
gugccuaaacgugauggug

SEQ ID NO: 1944506 - RNA, 17 nt, Human herpesvirus 4 [Epstein-Barr virus]
gcucaggaucagggcca

SEQ ID NO: 1944507 - RNA, 18 nt, Human herpesvirus 4 [Epstein-Barr virus]
gcagcagacaaggacagg

SEQ ID NO: 1944508 - RNA, 14 nt, Human herpesvirus 4 [Epstein-Barr virus]
ggccguccucugga

SEQ ID NO: 1944509 - RNA, 19 nt, Human herpesvirus 4 [Epstein-Barr virus]
agagauuucauccucagag

SEQ ID NO: 1944510 - RNA, 18 nt, Human herpesvirus 4 [Epstein-Barr virus]
aggauggaagagaggggc

SEQ ID NO: 1944511 - RNA, 22 nt, Human herpesvirus 4 [Epstein-Barr virus]
gcucccgggcaaacagggcaga

SEQ ID NO: 1944512 - RNA, 14 nt, Human herpesvirus 4 [Epstein-Barr virus]
ccuaagcagcugag

SEQ ID NO: 1944513 - RNA, 16 nt, Human herpesvirus 4 [Epstein-Barr virus]
cuuccagaaaaugccg

SEQ ID NO: 1944514 - RNA, 16 nt, Human herpesvirus 4 [Epstein-Barr virus]
uccagccgggugcaca

SEQ ID NO: 1944515 - RNA, 12 nt, Human herpesvirus 4 [Epstein-Barr virus]
cggccugcuggc

SEQ ID NO: 1944516 - RNA, 14 nt, Human herpesvirus 4 [Epstein-Barr virus]
cuuccagagcucua

SEQ ID NO: 1944517 - RNA, 16 nt, Human herpesvirus 4 [Epstein-Barr virus]
cucgagagaggccucu

SEQ ID NO: 1944518 - RNA, 18 nt, Human herpesvirus 4 [Epstein-Barr virus]
gcucagacuuagggccgg

SEQ ID NO: 1944519 - RNA, 14 nt, Human herpesvirus 4 [Epstein-Barr virus]
gcagcagcucuggc

SEQ ID NO: 1944520 - RNA, 18 nt, Human herpesvirus 4 [Epstein-Barr virus]
acggcgucaaacagguga

SEQ ID NO: 1944521 - RNA, 17 nt, Human herpesvirus 4 [Epstein-Barr virus]
ccgccgccugcggccca

SEQ ID NO: 1944522 - RNA, 14 nt, Human herpesvirus 4 [Epstein-Barr virus]
auucucuucuguuu

SEQ ID NO: 1944523 - RNA, 21 nt, Human herpesvirus 4 [Epstein-Barr virus]
cagagcccagaggaggccccg

SEQ ID NO: 1944524 - RNA, 17 nt, Human herpesvirus 4 [Epstein-Barr virus]
aggggcucgaauaugau

SEQ ID NO: 1944525 - RNA, 17 nt, Human herpesvirus 4 [Epstein-Barr virus]
cccgguccccccagaag

SEQ ID NO: 1944526 - RNA, 17 nt, Human herpesvirus 4 [Epstein-Barr virus]
ggagacguguguggcug

SEQ ID NO: 1944527 - RNA, 16 nt, Human herpesvirus 4 [Epstein-Barr virus]
aggcugcgccugagcu

SEQ ID NO: 1944528 - RNA, 15 nt, Human herpesvirus 4 [Epstein-Barr virus]
uaaaaaugugcagcu

SEQ ID NO: 1944529 - RNA, 14 nt, Human herpesvirus 4 [Epstein-Barr virus]
gcaaggauggaaga

SEQ ID NO: 1944530 - RNA, 16 nt, Human herpesvirus 4 [Epstein-Barr virus]
ggccaccggggaggcc

SEQ ID NO: 1944531 - RNA, 16 nt, Human herpesvirus 4 [Epstein-Barr virus]
cacagcgccagcaggg

SEQ ID NO: 1944532 - RNA, 15 nt, Human herpesvirus 4 [Epstein-Barr virus]
ugggcuugauggccc

SEQ ID NO: 1944533 - RNA, 22 nt, Human herpesvirus 4 [Epstein-Barr virus]
ggccaggcgacgcucccgggca

SEQ ID NO: 1944534 - RNA, 16 nt, Human herpesvirus 4 [Epstein-Barr virus]
aggcgacgcuccuggg

SEQ ID NO: 1944535 - RNA, 23 nt, Human herpesvirus 4 [Epstein-Barr virus]
gcagucucaaucucucccacgga

SEQ ID NO: 1944536 - RNA, 18 nt, Human herpesvirus 4 [Epstein-Barr virus]
cuggaucuggggcuggcc

SEQ ID NO: 1944537 - RNA, 17 nt, Human herpesvirus 4 [Epstein-Barr virus]
ugggccucucuggcugu

SEQ ID NO: 1944538 - RNA, 15 nt, Human herpesvirus 4 [Epstein-Barr virus]
ggguacaagucccgg

SEQ ID NO: 1944539 - RNA, 16 nt, Human herpesvirus 4 [Epstein-Barr virus]
cgaaaguaggcggugg

SEQ ID NO: 1944540 - RNA, 20 nt, Human herpesvirus 4 [Epstein-Barr virus]
gcaauaaauaaaaguacaga

SEQ ID NO: 1944541 - RNA, 18 nt, Human herpesvirus 4 [Epstein-Barr virus]
uaugcaugagccacaggc

SEQ ID NO: 1944542 - RNA, 13 nt, Human herpesvirus 4 [Epstein-Barr virus]
gauggcacgggca

SEQ ID NO: 1944543 - RNA, 15 nt, Human herpesvirus 4 [Epstein-Barr virus]
cgagggcagacacca

SEQ ID NO: 1944544 - RNA, 21 nt, Human herpesvirus 4 [Epstein-Barr virus]
ccuucucugauggccuggaga

SEQ ID NO: 1944545 - RNA, 21 nt, Human herpesvirus 4 [Epstein-Barr virus]
gcuaugaccaugcccagacuc

SEQ ID NO: 1944546 - RNA, 20 nt, Human herpesvirus 4 [Epstein-Barr virus]
guuaagcugcaccuggacau

SEQ ID NO: 1944547 - RNA, 21 nt, Human herpesvirus 4 [Epstein-Barr virus]
gguggcagcccccuccuccag

SEQ ID NO: 1944548 - RNA, 13 nt, Human herpesvirus 4 [Epstein-Barr virus]
cuuacugcccagc

SEQ ID NO: 1944549 - RNA, 13 nt, Human herpesvirus 4 [Epstein-Barr virus]
cuccaucagggcc

SEQ ID NO: 1944550 - RNA, 22 nt, Human herpesvirus 4 [Epstein-Barr virus]
cgagaggaugauccuguacaaa

SEQ ID NO: 1944551 - RNA, 21 nt, Human herpesvirus 4 [Epstein-Barr virus]
aggaacggugauuaggcacug

SEQ ID NO: 1944552 - RNA, 21 nt, Human herpesvirus 4 [Epstein-Barr virus]
ggcagcgaagaacacuccaca

SEQ ID NO: 1944553 - RNA, 16 nt, Human herpesvirus 4 [Epstein-Barr virus]
cagggcagagaggcgg

SEQ ID NO: 1944554 - RNA, 17 nt, Human herpesvirus 4 [Epstein-Barr virus]
agccaggcucgcggaag

SEQ ID NO: 1944555 - RNA, 14 nt, Human herpesvirus 4 [Epstein-Barr virus]
uuggcgucucaggc

SEQ ID NO: 1944556 - RNA, 21 nt, Human herpesvirus 4 [Epstein-Barr virus]
acucaccaagauuguuccagg

SEQ ID NO: 1944557 - RNA, 22 nt, Human herpesvirus 4 [Epstein-Barr virus]
gcagacaccuuuacccagcccu

SEQ ID NO: 1944558 - RNA, 19 nt, Human herpesvirus 4 [Epstein-Barr virus]
ggcagcggaugguggggcu

SEQ ID NO: 1944559 - RNA, 15 nt, Human herpesvirus 4 [Epstein-Barr virus]
gaguaauugcagugg

SEQ ID NO: 1944560 - RNA, 15 nt, Human herpesvirus 4 [Epstein-Barr virus]
ggcagcuuuuggccu

SEQ ID NO: 1944561 - RNA, 16 nt, Human herpesvirus 4 [Epstein-Barr virus]
cacgagauggcccagu

SEQ ID NO: 1944562 - RNA, 15 nt, Human herpesvirus 4 [Epstein-Barr virus]
cucaagcccuucuuc

SEQ ID NO: 1944563 - RNA, 15 nt, Human herpesvirus 4 [Epstein-Barr virus]
cugcugcugcugguc

SEQ ID NO: 1944564 - RNA, 18 nt, Human herpesvirus 4 [Epstein-Barr virus]
uagcuauuugaucuuuga

SEQ ID NO: 1944565 - RNA, 22 nt, Human herpesvirus 4 [Epstein-Barr virus]
ugcccuggaggccucaggcaac

SEQ ID NO: 1944566 - RNA, 17 nt, Human herpesvirus 4 [Epstein-Barr virus]
ggcgacaguaacacagg

SEQ ID NO: 1944567 - RNA, 23 nt, Human herpesvirus 4 [Epstein-Barr virus]
cuuggcccucucacuucuacucu

SEQ ID NO: 1944568 - RNA, 15 nt, Human herpesvirus 4 [Epstein-Barr virus]
caugagcauggaaga

SEQ ID NO: 1944569 - RNA, 21 nt, Human herpesvirus 4 [Epstein-Barr virus]
cugugucccacuccaccugcc

SEQ ID NO: 1944570 - RNA, 17 nt, Human herpesvirus 4 [Epstein-Barr virus]
cacguagccuauuugca

SEQ ID NO: 1944571 - RNA, 21 nt, Human herpesvirus 4 [Epstein-Barr virus]
caggugccugacggugccgcu

SEQ ID NO: 1944572 - RNA, 18 nt, Human herpesvirus 4 [Epstein-Barr virus]
gggcggcguggagcuggg

SEQ ID NO: 1944573 - RNA, 14 nt, Human herpesvirus 4 [Epstein-Barr virus]
ggcgacugccgccg

SEQ ID NO: 1944574 - RNA, 14 nt, Human herpesvirus 4 [Epstein-Barr virus]
cucagccugcuccu

SEQ ID NO: 1944575 - RNA, 12 nt, Human herpesvirus 4 [Epstein-Barr virus]
ccgcccugagcu

SEQ ID NO: 1944576 - RNA, 17 nt, Human herpesvirus 4 [Epstein-Barr virus]
gccaccacggugcagcc

SEQ ID NO: 1944577 - RNA, 18 nt, Human herpesvirus 4 [Epstein-Barr virus]
gcagcugaguccccuccu

SEQ ID NO: 1944578 - RNA, 21 nt, Human herpesvirus 4 [Epstein-Barr virus]
gggccacggcgugccagaggc

SEQ ID NO: 1944579 - RNA, 12 nt, Human herpesvirus 4 [Epstein-Barr virus]
cuccggcugccc

SEQ ID NO: 1944580 - RNA, 15 nt, Human herpesvirus 4 [Epstein-Barr virus]
cagggcaaagccaca

SEQ ID NO: 1944581 - RNA, 21 nt, Human herpesvirus 4 [Epstein-Barr virus]
uaaacauugcaccuugccggc

SEQ ID NO: 1944582 - RNA, 19 nt, Human herpesvirus 4 [Epstein-Barr virus]
cugaggcccguccccugac

SEQ ID NO: 1944583 - RNA, 20 nt, Human herpesvirus 4 [Epstein-Barr virus]
cggguggagauagggaccag

SEQ ID NO: 1944584 - RNA, 20 nt, Human herpesvirus 4 [Epstein-Barr virus]
gggcgcaccuguguccuggg

SEQ ID NO: 1944585 - RNA, 24 nt, Human herpesvirus 4 [Epstein-Barr virus]
gaugaggcugaugauggccacgac

SEQ ID NO: 1944586 - RNA, 22 nt, Human herpesvirus 4 [Epstein-Barr virus]
uaaggugguuauuuugggccag

SEQ ID NO: 1944587 - RNA, 16 nt, Human herpesvirus 4 [Epstein-Barr virus]
aggccgcugccaggcc

SEQ ID NO: 1944588 - RNA, 21 nt, Human herpesvirus 4 [Epstein-Barr virus]
auggcacggaugccuggcgcu

SEQ ID NO: 1944589 - RNA, 17 nt, Human herpesvirus 4 [Epstein-Barr virus]
ccugaccgaauggggca

SEQ ID NO: 1944590 - RNA, 18 nt, Human herpesvirus 4 [Epstein-Barr virus]
gacccccgggcgccccca

SEQ ID NO: 1944591 - RNA, 22 nt, Human herpesvirus 4 [Epstein-Barr virus]
agccaggcuuucuaugccugaa

SEQ ID NO: 1944592 - RNA, 18 nt, Human herpesvirus 4 [Epstein-Barr virus]
cccaaagggacucaaugg

SEQ ID NO: 1944593 - RNA, 16 nt, Human herpesvirus 4 [Epstein-Barr virus]
gcgcccuccucugggc

SEQ ID NO: 1944594 - RNA, 14 nt, Human herpesvirus 4 [Epstein-Barr virus]
acaccauggccucg

SEQ ID NO: 1944595 - RNA, 18 nt, Human herpesvirus 4 [Epstein-Barr virus]
cacccacugauaauacgc

SEQ ID NO: 1944596 - RNA, 15 nt, Human herpesvirus 4 [Epstein-Barr virus]
uggccguccucugga

SEQ ID NO: 1944597 - RNA, 19 nt, Human herpesvirus 4 [Epstein-Barr virus]
acugugguuuccaugacgc

SEQ ID NO: 1944598 - RNA, 18 nt, Human herpesvirus 4 [Epstein-Barr virus]
ggcggcgguggauagaga

SEQ ID NO: 1944599 - RNA, 21 nt, Human herpesvirus 4 [Epstein-Barr virus]
cucaggccaccgucuacccag

SEQ ID NO: 1944600 - RNA, 21 nt, Human herpesvirus 4 [Epstein-Barr virus]
ugcccgcuuccuccgcagucc

SEQ ID NO: 1944601 - RNA, 18 nt, Human herpesvirus 4 [Epstein-Barr virus]
gauacucaucugugagac

SEQ ID NO: 1944602 - RNA, 14 nt, Human herpesvirus 4 [Epstein-Barr virus]
ccugugccauacca

SEQ ID NO: 1944603 - RNA, 17 nt, Human herpesvirus 4 [Epstein-Barr virus]
cugcugcugcuggucau

SEQ ID NO: 1944604 - RNA, 20 nt, Human herpesvirus 4 [Epstein-Barr virus]
guguauuucuggccaucugu

SEQ ID NO: 1944605 - RNA, 21 nt, Human herpesvirus 4 [Epstein-Barr virus]
cugccacuuccacagcaaugg

SEQ ID NO: 1944606 - RNA, 23 nt, Human herpesvirus 4 [Epstein-Barr virus]
ugcccuccuccacccagcagcag

SEQ ID NO: 1944607 - RNA, 19 nt, Human herpesvirus 4 [Epstein-Barr virus]
cuuuaggcguaacuugucu

SEQ ID NO: 1944608 - RNA, 17 nt, Human herpesvirus 4 [Epstein-Barr virus]
aaaauauauugcaaaau

SEQ ID NO: 1944609 - RNA, 14 nt, Human herpesvirus 4 [Epstein-Barr virus]
cggcccguggccug

SEQ ID NO: 1944610 - RNA, 20 nt, Human herpesvirus 4 [Epstein-Barr virus]
ccuugcccucuccagcaacc

SEQ ID NO: 1944611 - RNA, 18 nt, Human herpesvirus 4 [Epstein-Barr virus]
acuccaggcccccgggug

SEQ ID NO: 1944612 - RNA, 11 nt, Human herpesvirus 4 [Epstein-Barr virus]
gggaggacacu

SEQ ID NO: 1944613 - RNA, 16 nt, Human herpesvirus 4 [Epstein-Barr virus]
aaaggaaacugcugac

SEQ ID NO: 1944614 - RNA, 15 nt, Human herpesvirus 4 [Epstein-Barr virus]
gcauggcggccuggc

SEQ ID NO: 1944615 - RNA, 22 nt, Human herpesvirus 4 [Epstein-Barr virus]
caguaugcucgaagcauugggc

SEQ ID NO: 1944616 - RNA, 17 nt, Human herpesvirus 4 [Epstein-Barr virus]
gcauuggcugcaaaggg

SEQ ID NO: 1944617 - RNA, 11 nt, Human herpesvirus 4 [Epstein-Barr virus]
cugcaggacac

SEQ ID NO: 1944618 - RNA, 11 nt, Human herpesvirus 4 [Epstein-Barr virus]
gcagcuccgcc

SEQ ID NO: 1944619 - RNA, 18 nt, Human herpesvirus 4 [Epstein-Barr virus]
uuaagagucccuccucac

SEQ ID NO: 1944620 - RNA, 13 nt, Human herpesvirus 4 [Epstein-Barr virus]
ucuucuucucccu

SEQ ID NO: 1944621 - RNA, 12 nt, Human herpesvirus 4 [Epstein-Barr virus]
ccagcaggcuca

SEQ ID NO: 1944622 - RNA, 12 nt, Human herpesvirus 4 [Epstein-Barr virus]
cugggaggugcu

SEQ ID NO: 1944623 - RNA, 20 nt, Human herpesvirus 4 [Epstein-Barr virus]
gacuuuuggcaaugggagca

SEQ ID NO: 1944624 - RNA, 18 nt, Human herpesvirus 4 [Epstein-Barr virus]
cagcgggggaccacauac

SEQ ID NO: 1944625 - RNA, 17 nt, Human herpesvirus 4 [Epstein-Barr virus]
gcaugguggcuucuuag

SEQ ID NO: 1944626 - RNA, 21 nt, Human herpesvirus 4 [Epstein-Barr virus]
gcaggagcgggaggggcagga

SEQ ID NO: 1944627 - RNA, 21 nt, Human herpesvirus 4 [Epstein-Barr virus]
cuucuggcacgacuguuccua

SEQ ID NO: 1944628 - RNA, 19 nt, Human herpesvirus 4 [Epstein-Barr virus]
uggccgguggauccuccac

SEQ ID NO: 1944629 - RNA, 21 nt, Human herpesvirus 4 [Epstein-Barr virus]
gucucggccuacgaggcccug

SEQ ID NO: 1944630 - RNA, 17 nt, Human herpesvirus 4 [Epstein-Barr virus]
agcaccucaaccuggag

SEQ ID NO: 1944631 - RNA, 16 nt, Human herpesvirus 4 [Epstein-Barr virus]
ccagcggggagagggu

SEQ ID NO: 1944632 - RNA, 14 nt, Human herpesvirus 4 [Epstein-Barr virus]
ugagugcccagggc

SEQ ID NO: 1944633 - RNA, 19 nt, Human herpesvirus 4 [Epstein-Barr virus]
uugcgccgccuaaugcauc

SEQ ID NO: 1944634 - RNA, 15 nt, Human herpesvirus 4 [Epstein-Barr virus]
cgacaauaaaguuga

SEQ ID NO: 1944635 - RNA, 22 nt, Human herpesvirus 4 [Epstein-Barr virus]
ggugaccacugagggaguguuc

SEQ ID NO: 1944636 - RNA, 18 nt, Human herpesvirus 4 [Epstein-Barr virus]
uagcgccccuauaaccac

SEQ ID NO: 1944637 - RNA, 20 nt, Human herpesvirus 4 [Epstein-Barr virus]
gcacugcguccaccuggcca

SEQ ID NO: 1944638 - RNA, 13 nt, Human herpesvirus 4 [Epstein-Barr virus]
cggagucuucaag

SEQ ID NO: 1944639 - RNA, 18 nt, Human herpesvirus 4 [Epstein-Barr virus]
aggccaugcgcgcccugu

SEQ ID NO: 1944640 - RNA, 12 nt, Human herpesvirus 4 [Epstein-Barr virus]
gcaagauggaga

SEQ ID NO: 1944641 - RNA, 11 nt, Human herpesvirus 4 [Epstein-Barr virus]
cuacugcugcu

SEQ ID NO: 1944642 - RNA, 21 nt, Human herpesvirus 4 [Epstein-Barr virus]
ccggugcugccagagccucug

SEQ ID NO: 1944643 - RNA, 16 nt, Human herpesvirus 4 [Epstein-Barr virus]
ugcugcuggucauggc

SEQ ID NO: 1944644 - RNA, 20 nt, Human herpesvirus 4 [Epstein-Barr virus]
caccuguccuugucugcugc

SEQ ID NO: 1944645 - RNA, 20 nt, Human herpesvirus 4 [Epstein-Barr virus]
agcauggccgccagaguucc

SEQ ID NO: 1944646 - RNA, 16 nt, Human herpesvirus 4 [Epstein-Barr virus]
cauucccuugcucgca

SEQ ID NO: 1944647 - RNA, 15 nt, Human herpesvirus 4 [Epstein-Barr virus]
gccuccucccaacgc

SEQ ID NO: 1944648 - RNA, 20 nt, Human herpesvirus 4 [Epstein-Barr virus]
cguuaaaacaguagaagaac

SEQ ID NO: 1944649 - RNA, 15 nt, Human herpesvirus 4 [Epstein-Barr virus]
ggacgaggaggcgga

SEQ ID NO: 1944650 - RNA, 13 nt, Human herpesvirus 4 [Epstein-Barr virus]
gagggggccuggu

SEQ ID NO: 1944651 - RNA, 18 nt, Human herpesvirus 4 [Epstein-Barr virus]
cggcggccucggaggugc

SEQ ID NO: 1944652 - RNA, 16 nt, Human herpesvirus 4 [Epstein-Barr virus]
acucgaaacuauggca

SEQ ID NO: 1944653 - RNA, 10 nt, Human herpesvirus 4 [Epstein-Barr virus]
cuuguuucaa

SEQ ID NO: 1944654 - RNA, 12 nt, Human herpesvirus 4 [Epstein-Barr virus]
cgaggggccagg

SEQ ID NO: 1944655 - RNA, 18 nt, Human herpesvirus 4 [Epstein-Barr virus]
gccagcaaaaccagcccg

SEQ ID NO: 1944656 - RNA, 17 nt, Human herpesvirus 4 [Epstein-Barr virus]
ugguccaggguccagga

SEQ ID NO: 1944657 - RNA, 19 nt, Human herpesvirus 4 [Epstein-Barr virus]
cagaaucaccagagcccag

SEQ ID NO: 1944658 - RNA, 21 nt, Human herpesvirus 4 [Epstein-Barr virus]
cccaccuaugccaauccaugc

SEQ ID NO: 1944659 - RNA, 14 nt, Human herpesvirus 4 [Epstein-Barr virus]
guuggcgggacugg

SEQ ID NO: 1944660 - RNA, 20 nt, Human herpesvirus 4 [Epstein-Barr virus]
uugagcgccguggccaccuu

SEQ ID NO: 1944661 - RNA, 15 nt, Human herpesvirus 4 [Epstein-Barr virus]
gacuucugaagaugu

SEQ ID NO: 1944662 - RNA, 14 nt, Human herpesvirus 4 [Epstein-Barr virus]
ugcaccggagccug

SEQ ID NO: 1944663 - RNA, 17 nt, Human herpesvirus 4 [Epstein-Barr virus]
ucuucaagauugggugg

SEQ ID NO: 1944664 - RNA, 17 nt, Human herpesvirus 4 [Epstein-Barr virus]
gcguuucugcggaucag

SEQ ID NO: 1944665 - RNA, 21 nt, Human herpesvirus 4 [Epstein-Barr virus]
gcucaccagggaggccuggga

SEQ ID NO: 1944666 - RNA, 14 nt, Human herpesvirus 4 [Epstein-Barr virus]
gccuccgccugagc

SEQ ID NO: 1944667 - RNA, 23 nt, Human herpesvirus 4 [Epstein-Barr virus]
agcggcccagcagauccagggcc

SEQ ID NO: 1944668 - RNA, 19 nt, Human herpesvirus 4 [Epstein-Barr virus]
cgcaccuguguccugggca

SEQ ID NO: 1944669 - RNA, 16 nt, Human herpesvirus 4 [Epstein-Barr virus]
cuguucaaacagcagc

SEQ ID NO: 1944670 - RNA, 21 nt, Human herpesvirus 4 [Epstein-Barr virus]
gcgaugccucuacgccccaga

SEQ ID NO: 1944671 - RNA, 22 nt, Human herpesvirus 4 [Epstein-Barr virus]
acgaggaggcggaagaccagga

SEQ ID NO: 1944672 - RNA, 18 nt, Human herpesvirus 4 [Epstein-Barr virus]
acucuuguugcuagccuc

SEQ ID NO: 1944673 - RNA, 12 nt, Human herpesvirus 4 [Epstein-Barr virus]
ggcccagccccc

SEQ ID NO: 1944674 - RNA, 14 nt, Human herpesvirus 4 [Epstein-Barr virus]
cagggacuggcggc

SEQ ID NO: 1944675 - RNA, 15 nt, Human herpesvirus 4 [Epstein-Barr virus]
ccagcagcagcccgg

SEQ ID NO: 1944676 - RNA, 22 nt, Human herpesvirus 4 [Epstein-Barr virus]
cgcucagcucaaccgccagggc

SEQ ID NO: 1944677 - RNA, 18 nt, Human herpesvirus 4 [Epstein-Barr virus]
gacccaucugagggcagu

SEQ ID NO: 1944678 - RNA, 15 nt, Human herpesvirus 4 [Epstein-Barr virus]
cuggagagcaugcag

SEQ ID NO: 1944679 - RNA, 17 nt, Human herpesvirus 4 [Epstein-Barr virus]
agcacuuugaaagaugu

SEQ ID NO: 1944680 - RNA, 16 nt, Human herpesvirus 4 [Epstein-Barr virus]
agggucagcacagcca

SEQ ID NO: 1944681 - RNA, 15 nt, Human herpesvirus 4 [Epstein-Barr virus]
cggugaucagggaga

SEQ ID NO: 1944682 - RNA, 22 nt, Human herpesvirus 4 [Epstein-Barr virus]
cgugaaccucccccccagaccu

SEQ ID NO: 1944683 - RNA, 15 nt, Human herpesvirus 4 [Epstein-Barr virus]
cugggcagccagagc

SEQ ID NO: 1944684 - RNA, 15 nt, Human herpesvirus 4 [Epstein-Barr virus]
accauggacgaggac

SEQ ID NO: 1944685 - RNA, 13 nt, Human herpesvirus 4 [Epstein-Barr virus]
ugcuugccccggg

SEQ ID NO: 1944686 - RNA, 19 nt, Human herpesvirus 4 [Epstein-Barr virus]
ucagagcugggaagaaugg

SEQ ID NO: 1944687 - RNA, 18 nt, Human herpesvirus 4 [Epstein-Barr virus]
acugauggccaucuuuca

SEQ ID NO: 1944688 - RNA, 22 nt, Human herpesvirus 4 [Epstein-Barr virus]
aucaucucgcuggcucgccuca

SEQ ID NO: 1944689 - RNA, 18 nt, Human herpesvirus 4 [Epstein-Barr virus]
gcgcacccggggaaccgg

SEQ ID NO: 1944690 - RNA, 14 nt, Human herpesvirus 4 [Epstein-Barr virus]
aggcugcgccugag

SEQ ID NO: 1944691 - RNA, 14 nt, Human herpesvirus 4 [Epstein-Barr virus]
aaaaucagaccacc

SEQ ID NO: 1944692 - RNA, 12 nt, Human herpesvirus 4 [Epstein-Barr virus]
gaggccugagag

SEQ ID NO: 1944693 - RNA, 20 nt, Human herpesvirus 4 [Epstein-Barr virus]
gccggaugccugccuaugga

SEQ ID NO: 1944694 - RNA, 16 nt, Human herpesvirus 4 [Epstein-Barr virus]
caucuagcgggagaug

SEQ ID NO: 1944695 - RNA, 19 nt, Human herpesvirus 4 [Epstein-Barr virus]
aggaggggcaggagcagga

SEQ ID NO: 1944696 - RNA, 15 nt, Human herpesvirus 4 [Epstein-Barr virus]
cagcagcagcagugg

SEQ ID NO: 1944697 - RNA, 20 nt, Human herpesvirus 4 [Epstein-Barr virus]
acggggccgugcaccugcca

SEQ ID NO: 1944698 - RNA, 13 nt, Human herpesvirus 4 [Epstein-Barr virus]
ugcccgagccccg

SEQ ID NO: 1944699 - RNA, 17 nt, Human herpesvirus 4 [Epstein-Barr virus]
ccaucuggcagcuuuug

SEQ ID NO: 1944700 - RNA, 18 nt, Human herpesvirus 4 [Epstein-Barr virus]
ggagauagggaccagagg

SEQ ID NO: 1944701 - RNA, 15 nt, Human herpesvirus 4 [Epstein-Barr virus]
aagaugucaaacaug

SEQ ID NO: 1944702 - RNA, 20 nt, Human herpesvirus 4 [Epstein-Barr virus]
cacauuggacacccacccug

SEQ ID NO: 1944703 - RNA, 13 nt, Human herpesvirus 4 [Epstein-Barr virus]
cagcucggccagc

SEQ ID NO: 1944704 - RNA, 20 nt, Human herpesvirus 4 [Epstein-Barr virus]
caccagcuccagggacaggg

SEQ ID NO: 1944705 - RNA, 15 nt, Human herpesvirus 4 [Epstein-Barr virus]
cugcuucuggcucuu

SEQ ID NO: 1944706 - RNA, 22 nt, Human herpesvirus 4 [Epstein-Barr virus]
uccccuuguauuugcuauucaa

SEQ ID NO: 1944707 - RNA, 20 nt, Human herpesvirus 4 [Epstein-Barr virus]
ucgucaggagggcagagagg

SEQ ID NO: 1944708 - RNA, 17 nt, Human herpesvirus 4 [Epstein-Barr virus]
ugccaugcacggcccug

SEQ ID NO: 1944709 - RNA, 22 nt, Human herpesvirus 4 [Epstein-Barr virus]
uccaauagaggagcuccgagag

SEQ ID NO: 1944710 - RNA, 17 nt, Human herpesvirus 4 [Epstein-Barr virus]
guacccauaacugggca

SEQ ID NO: 1944711 - RNA, 17 nt, Human herpesvirus 4 [Epstein-Barr virus]
gcugccguuauugccug

SEQ ID NO: 1944712 - RNA, 15 nt, Human herpesvirus 4 [Epstein-Barr virus]
cgccucguguuucac

SEQ ID NO: 1944713 - RNA, 21 nt, Human herpesvirus 4 [Epstein-Barr virus]
ucgauuggaaaagggcccagg

SEQ ID NO: 1944714 - RNA, 20 nt, Human herpesvirus 4 [Epstein-Barr virus]
ccgagaccaaggcggcugcu

SEQ ID NO: 1944715 - RNA, 15 nt, Human herpesvirus 4 [Epstein-Barr virus]
gugucauuuagaaac

SEQ ID NO: 1944716 - RNA, 19 nt, Human herpesvirus 4 [Epstein-Barr virus]
cacucaggaagcuggccag

SEQ ID NO: 1944717 - RNA, 12 nt, Human herpesvirus 4 [Epstein-Barr virus]
caucuuccuccu

SEQ ID NO: 1944718 - RNA, 17 nt, Human herpesvirus 4 [Epstein-Barr virus]
ggccaggacgcugcugu

SEQ ID NO: 1944719 - RNA, 15 nt, Human herpesvirus 4 [Epstein-Barr virus]
gcacggcacccuccc

SEQ ID NO: 1944720 - RNA, 14 nt, Human herpesvirus 4 [Epstein-Barr virus]
gccaacucccccaa

SEQ ID NO: 1944721 - RNA, 20 nt, Human herpesvirus 4 [Epstein-Barr virus]
cacugauuuugggcacacuu

SEQ ID NO: 1944722 - RNA, 13 nt, Human herpesvirus 4 [Epstein-Barr virus]
uccauuccaccca

SEQ ID NO: 1944723 - RNA, 23 nt, Human herpesvirus 4 [Epstein-Barr virus]
aaagcggcccagcagauccaggg

SEQ ID NO: 1944724 - RNA, 17 nt, Human herpesvirus 4 [Epstein-Barr virus]
gccuccuggccagcacc

SEQ ID NO: 1944725 - RNA, 23 nt, Human herpesvirus 4 [Epstein-Barr virus]
uuccucaucguucgguggggugg

SEQ ID NO: 1944726 - RNA, 19 nt, Human herpesvirus 4 [Epstein-Barr virus]
ggccuuguccgcugggcca

SEQ ID NO: 1944727 - RNA, 20 nt, Human herpesvirus 4 [Epstein-Barr virus]
ccacauacaucccugucucc

SEQ ID NO: 1944728 - RNA, 20 nt, Human herpesvirus 4 [Epstein-Barr virus]
cgcuccgcgcucggccuaga

SEQ ID NO: 1944729 - RNA, 20 nt, Human herpesvirus 4 [Epstein-Barr virus]
acuggggugugaagggcagg

SEQ ID NO: 1944730 - RNA, 14 nt, Human herpesvirus 4 [Epstein-Barr virus]
uccggaggggacca

SEQ ID NO: 1944731 - RNA, 18 nt, Human herpesvirus 4 [Epstein-Barr virus]
cagacuccggggguccag

SEQ ID NO: 1944732 - RNA, 14 nt, Human herpesvirus 4 [Epstein-Barr virus]
gagacguggguccc

SEQ ID NO: 1944733 - RNA, 23 nt, Human herpesvirus 4 [Epstein-Barr virus]
accuuuuaauucucuucuguuug

SEQ ID NO: 1944734 - RNA, 15 nt, Human herpesvirus 4 [Epstein-Barr virus]
caggagucugcugcg

SEQ ID NO: 1944735 - RNA, 21 nt, Human herpesvirus 4 [Epstein-Barr virus]
cuccaccgccgguuaacuuua

SEQ ID NO: 1944736 - RNA, 15 nt, Human herpesvirus 4 [Epstein-Barr virus]
uugugugccuccuca

SEQ ID NO: 1944737 - RNA, 19 nt, Human herpesvirus 4 [Epstein-Barr virus]
ccucggcgccaacgcgcca

SEQ ID NO: 1944738 - RNA, 17 nt, Human herpesvirus 4 [Epstein-Barr virus]
gcccauggaaugcucag

SEQ ID NO: 1944739 - RNA, 15 nt, Human herpesvirus 4 [Epstein-Barr virus]
caccgucagccacac

SEQ ID NO: 1944740 - RNA, 22 nt, Human herpesvirus 4 [Epstein-Barr virus]
cagacggcgcuugcgucugccc

SEQ ID NO: 1944741 - RNA, 13 nt, Human herpesvirus 4 [Epstein-Barr virus]
guuagugugccuc

SEQ ID NO: 1944742 - RNA, 20 nt, Human herpesvirus 4 [Epstein-Barr virus]
uacagcaggauuccugauuu

SEQ ID NO: 1944743 - RNA, 23 nt, Human herpesvirus 4 [Epstein-Barr virus]
ucuccucagccuccaacaggugc

SEQ ID NO: 1944744 - RNA, 15 nt, Human herpesvirus 4 [Epstein-Barr virus]
gcaagucaggauucu

SEQ ID NO: 1944745 - RNA, 19 nt, Human herpesvirus 4 [Epstein-Barr virus]
cuccccaauggggcuggca

SEQ ID NO: 1944746 - RNA, 15 nt, Human herpesvirus 4 [Epstein-Barr virus]
ccuaucauguuucaa

SEQ ID NO: 1944747 - RNA, 13 nt, Human herpesvirus 4 [Epstein-Barr virus]
cuccccagccaca

SEQ ID NO: 1944748 - RNA, 18 nt, Human herpesvirus 4 [Epstein-Barr virus]
aaagagacucaggcccuc

SEQ ID NO: 1944749 - RNA, 16 nt, Human herpesvirus 4 [Epstein-Barr virus]
agggaaaggaaggggg

SEQ ID NO: 1944750 - RNA, 15 nt, Human herpesvirus 4 [Epstein-Barr virus]
gcuccggcugcccgu

SEQ ID NO: 1944751 - RNA, 17 nt, Human herpesvirus 4 [Epstein-Barr virus]
caauaaaguugaugaua

SEQ ID NO: 1944752 - RNA, 23 nt, Human herpesvirus 4 [Epstein-Barr virus]
cggcauccucaaggggcacgaga

SEQ ID NO: 1944753 - RNA, 21 nt, Human herpesvirus 4 [Epstein-Barr virus]
ugaagcagaugugcccaagcc

SEQ ID NO: 1944754 - RNA, 21 nt, Human herpesvirus 4 [Epstein-Barr virus]
agcuacgaaacugaccagaug

SEQ ID NO: 1944755 - RNA, 23 nt, Human herpesvirus 4 [Epstein-Barr virus]
cucaggccaugcgcgcccuguca

SEQ ID NO: 1944756 - RNA, 20 nt, Human herpesvirus 4 [Epstein-Barr virus]
accuggacauagaggggcau

SEQ ID NO: 1944757 - RNA, 22 nt, Human herpesvirus 4 [Epstein-Barr virus]
gccuggggauaagaaacacgcu

SEQ ID NO: 1944758 - RNA, 14 nt, Human herpesvirus 4 [Epstein-Barr virus]
uuacaauaaaauga

SEQ ID NO: 1944759 - RNA, 21 nt, Human herpesvirus 4 [Epstein-Barr virus]
cguguucccuaagcagcugag

SEQ ID NO: 1944760 - RNA, 21 nt, Human herpesvirus 4 [Epstein-Barr virus]
ggucccaggccuuagcccaga

SEQ ID NO: 1944761 - RNA, 15 nt, Human herpesvirus 4 [Epstein-Barr virus]
gcucggggcaugcug

SEQ ID NO: 1944762 - RNA, 20 nt, Human herpesvirus 4 [Epstein-Barr virus]
cagugggccucucuggcugu

SEQ ID NO: 1944763 - RNA, 17 nt, Human herpesvirus 4 [Epstein-Barr virus]
caccccuccuacacaca

SEQ ID NO: 1944764 - RNA, 19 nt, Human herpesvirus 4 [Epstein-Barr virus]
gcgcuguggagagaggcaa

SEQ ID NO: 1944765 - RNA, 21 nt, Human herpesvirus 4 [Epstein-Barr virus]
ugcuuuuaacucuuaaaacuu

SEQ ID NO: 1944766 - RNA, 21 nt, Human herpesvirus 4 [Epstein-Barr virus]
ucguagcuuugaugaggcuga

SEQ ID NO: 1944767 - RNA, 18 nt, Human herpesvirus 4 [Epstein-Barr virus]
uaacacgaaugcccaggc

SEQ ID NO: 1944768 - RNA, 18 nt, Human herpesvirus 4 [Epstein-Barr virus]
ccuugcccccgccagcgc

SEQ ID NO: 1944769 - RNA, 16 nt, Human herpesvirus 4 [Epstein-Barr virus]
ugugaaccagaaagau

SEQ ID NO: 1944770 - RNA, 22 nt, Human herpesvirus 4 [Epstein-Barr virus]
accggugacagugcuuacugcg

SEQ ID NO: 1944771 - RNA, 18 nt, Human herpesvirus 4 [Epstein-Barr virus]
ucacgucacucagcuccg

SEQ ID NO: 1944772 - RNA, 21 nt, Human herpesvirus 4 [Epstein-Barr virus]
cagaccucugcacaacacaac

SEQ ID NO: 1944773 - RNA, 18 nt, Human herpesvirus 4 [Epstein-Barr virus]
agaggagggggauccgga

SEQ ID NO: 1944774 - RNA, 23 nt, Human herpesvirus 4 [Epstein-Barr virus]
cacccggacccggaccaaugcca

SEQ ID NO: 1944775 - RNA, 16 nt, Human herpesvirus 4 [Epstein-Barr virus]
ggcgcuguuauggcca

SEQ ID NO: 1944776 - RNA, 20 nt, Human herpesvirus 4 [Epstein-Barr virus]
gaguaaggccgcugccaggc

SEQ ID NO: 1944777 - RNA, 23 nt, Human herpesvirus 4 [Epstein-Barr virus]
agaucagaaaauaaaaagaaugu

SEQ ID NO: 1944778 - RNA, 19 nt, Human herpesvirus 4 [Epstein-Barr virus]
ugcugcuagccgcccuggc

SEQ ID NO: 1944779 - RNA, 15 nt, Human herpesvirus 4 [Epstein-Barr virus]
cguccaccuggccac

SEQ ID NO: 1944780 - RNA, 23 nt, Human herpesvirus 4 [Epstein-Barr virus]
ucagccagggugaccuggcucag

SEQ ID NO: 1944781 - RNA, 14 nt, Human herpesvirus 4 [Epstein-Barr virus]
accuacaccacccc

SEQ ID NO: 1944782 - RNA, 19 nt, Human herpesvirus 4 [Epstein-Barr virus]
ggccccccgcaccagggcc

SEQ ID NO: 1944783 - RNA, 18 nt, Human herpesvirus 4 [Epstein-Barr virus]
acguuggcuucugcugcu

SEQ ID NO: 1944784 - RNA, 17 nt, Human herpesvirus 4 [Epstein-Barr virus]
ccgggcccagcccuccu

SEQ ID NO: 1944785 - RNA, 21 nt, Human herpesvirus 4 [Epstein-Barr virus]
acugcagugggccucucuggc

SEQ ID NO: 1944786 - RNA, 20 nt, Human herpesvirus 4 [Epstein-Barr virus]
ggguccaagguugugcugua

SEQ ID NO: 1944787 - RNA, 21 nt, Human herpesvirus 4 [Epstein-Barr virus]
gaccggaucgaaggagagcug

SEQ ID NO: 1944788 - RNA, 14 nt, Human herpesvirus 4 [Epstein-Barr virus]
cucgagagaggccu

SEQ ID NO: 1944789 - RNA, 16 nt, Human herpesvirus 4 [Epstein-Barr virus]
acauuggcagcagcuc

SEQ ID NO: 1944790 - RNA, 20 nt, Human herpesvirus 4 [Epstein-Barr virus]
cagugggcuucgggggccug

SEQ ID NO: 1944791 - RNA, 12 nt, Human herpesvirus 4 [Epstein-Barr virus]
cuucugcugcug

SEQ ID NO: 1944792 - RNA, 23 nt, Human herpesvirus 4 [Epstein-Barr virus]
ggaacacggcaccgucagccaca

SEQ ID NO: 1944793 - RNA, 23 nt, Human herpesvirus 4 [Epstein-Barr virus]
ccccuguccacugccccgguccc

SEQ ID NO: 1944794 - RNA, 14 nt, Human herpesvirus 4 [Epstein-Barr virus]
uccgagaggauggc

SEQ ID NO: 1944795 - RNA, 22 nt, Human herpesvirus 4 [Epstein-Barr virus]
aucccaauucacaucucaggga

SEQ ID NO: 1944796 - RNA, 12 nt, Human herpesvirus 4 [Epstein-Barr virus]
aguuaccuucuu

SEQ ID NO: 1944797 - RNA, 19 nt, Human herpesvirus 4 [Epstein-Barr virus]
acguggcuuccagagaggc

SEQ ID NO: 1944798 - RNA, 14 nt, Human herpesvirus 4 [Epstein-Barr virus]
uuuggcuugcucca

SEQ ID NO: 1944799 - RNA, 19 nt, Human herpesvirus 4 [Epstein-Barr virus]
ucccauguaagccugccuc

SEQ ID NO: 1944800 - RNA, 20 nt, Human herpesvirus 4 [Epstein-Barr virus]
gacggcgcuugcgucugccc

SEQ ID NO: 1944801 - RNA, 20 nt, Human herpesvirus 4 [Epstein-Barr virus]
acugcgguugucacuuucuu

SEQ ID NO: 1944802 - RNA, 12 nt, Human herpesvirus 4 [Epstein-Barr virus]
gugagcccaccu

SEQ ID NO: 1944803 - RNA, 13 nt, Human herpesvirus 4 [Epstein-Barr virus]
auucuccugccug

SEQ ID NO: 1944804 - RNA, 20 nt, Human herpesvirus 4 [Epstein-Barr virus]
gucacaaccucacugucauu

SEQ ID NO: 1944805 - RNA, 17 nt, Human herpesvirus 4 [Epstein-Barr virus]
ggacaggugccagaugu

SEQ ID NO: 1944806 - RNA, 18 nt, Human herpesvirus 4 [Epstein-Barr virus]
cacuuccacagcaauggc

SEQ ID NO: 1944807 - RNA, 12 nt, Human herpesvirus 4 [Epstein-Barr virus]
cagccaccuccc

SEQ ID NO: 1944808 - RNA, 23 nt, Human herpesvirus 4 [Epstein-Barr virus]
cuucugcugcugcuggucauggc

SEQ ID NO: 1944809 - RNA, 17 nt, Human herpesvirus 4 [Epstein-Barr virus]
acacuccauuaauucca

SEQ ID NO: 1944810 - RNA, 19 nt, Human herpesvirus 4 [Epstein-Barr virus]
ucucagggacaacagguca

SEQ ID NO: 1944811 - RNA, 23 nt, Human herpesvirus 4 [Epstein-Barr virus]
acuggaacuguacuaaauuugcu

SEQ ID NO: 1944812 - RNA, 20 nt, Human herpesvirus 4 [Epstein-Barr virus]
agcuggaggccauccuccuu

SEQ ID NO: 1944813 - RNA, 21 nt, Human herpesvirus 4 [Epstein-Barr virus]
gauuaggagcagggcccagug

SEQ ID NO: 1944814 - RNA, 16 nt, Human herpesvirus 4 [Epstein-Barr virus]
aggcccaacagcaccg

SEQ ID NO: 1944815 - RNA, 14 nt, Human herpesvirus 4 [Epstein-Barr virus]
gcuggcaguccuug

SEQ ID NO: 1944816 - RNA, 23 nt, Human herpesvirus 4 [Epstein-Barr virus]
gugguuuccaugacgcugcugcu

SEQ ID NO: 1944817 - RNA, 22 nt, Human herpesvirus 4 [Epstein-Barr virus]
cugcgaugagggccuuccagag

SEQ ID NO: 1944818 - RNA, 14 nt, Human herpesvirus 4 [Epstein-Barr virus]
gguacgauggcgga

SEQ ID NO: 1944819 - RNA, 14 nt, Human herpesvirus 4 [Epstein-Barr virus]
cgccaggaccugga

SEQ ID NO: 1944820 - RNA, 14 nt, Human herpesvirus 4 [Epstein-Barr virus]
uaugaaaaugugua

SEQ ID NO: 1944821 - RNA, 22 nt, Human herpesvirus 4 [Epstein-Barr virus]
acaaucuugugaaccagaaaga

SEQ ID NO: 1944822 - RNA, 16 nt, Human herpesvirus 4 [Epstein-Barr virus]
gaagaguacgugcaga

SEQ ID NO: 1944823 - RNA, 23 nt, Human herpesvirus 4 [Epstein-Barr virus]
ccuucugcugcugcuggucaugg

SEQ ID NO: 1944824 - RNA, 19 nt, Human herpesvirus 4 [Epstein-Barr virus]
uguagccacccgucccggg

SEQ ID NO: 1944825 - RNA, 17 nt, Human herpesvirus 4 [Epstein-Barr virus]
auugggugaccacugag

SEQ ID NO: 1944826 - RNA, 16 nt, Human herpesvirus 4 [Epstein-Barr virus]
gucagcacagccagag

SEQ ID NO: 1944827 - RNA, 22 nt, Human herpesvirus 4 [Epstein-Barr virus]
ggucgcuagauggcgcggguga

SEQ ID NO: 1944828 - RNA, 12 nt, Human herpesvirus 4 [Epstein-Barr virus]
cucuguuccuuc

SEQ ID NO: 1944829 - RNA, 22 nt, Human herpesvirus 4 [Epstein-Barr virus]
agcccaagaagaagcccaccua

SEQ ID NO: 1944830 - RNA, 16 nt, Human herpesvirus 4 [Epstein-Barr virus]
ucacuuucuuugcaau

SEQ ID NO: 1944831 - RNA, 16 nt, Human herpesvirus 4 [Epstein-Barr virus]
ccaagcggcacagauu

SEQ ID NO: 1944832 - RNA, 21 nt, Human herpesvirus 4 [Epstein-Barr virus]
gaacacggagaucucagaauu

SEQ ID NO: 1944833 - RNA, 13 nt, Human herpesvirus 4 [Epstein-Barr virus]
ggugggcugcuga

SEQ ID NO: 1944834 - RNA, 18 nt, Human herpesvirus 4 [Epstein-Barr virus]
gugcugcguugggaacug

SEQ ID NO: 1944835 - RNA, 21 nt, Human herpesvirus 4 [Epstein-Barr virus]
ccagcccccucccgccccugu

SEQ ID NO: 1944836 - RNA, 20 nt, Human herpesvirus 4 [Epstein-Barr virus]
ccugaccgaauggggcagug

SEQ ID NO: 1944837 - RNA, 16 nt, Human herpesvirus 4 [Epstein-Barr virus]
gaugugcccaagccug

SEQ ID NO: 1944838 - RNA, 14 nt, Human herpesvirus 4 [Epstein-Barr virus]
cuggcacacacucc

SEQ ID NO: 1944839 - RNA, 10 nt, Human herpesvirus 4 [Epstein-Barr virus]
aggggcggca

SEQ ID NO: 1944840 - RNA, 19 nt, Human herpesvirus 4 [Epstein-Barr virus]
ugggaagcucagcaguugu

SEQ ID NO: 1944841 - RNA, 18 nt, Human herpesvirus 4 [Epstein-Barr virus]
aaauuuagcacgucccaa

SEQ ID NO: 1944842 - RNA, 22 nt, Human herpesvirus 4 [Epstein-Barr virus]
auggagagauuucauccucaga

SEQ ID NO: 1944843 - RNA, 17 nt, Human herpesvirus 4 [Epstein-Barr virus]
augcuugugcuccugau

SEQ ID NO: 1944844 - RNA, 13 nt, Human herpesvirus 4 [Epstein-Barr virus]
auggguccucaua

SEQ ID NO: 1944845 - RNA, 20 nt, Human herpesvirus 4 [Epstein-Barr virus]
cauuagcccagccgcaaaua

SEQ ID NO: 1944846 - RNA, 15 nt, Human herpesvirus 4 [Epstein-Barr virus]
ccccagaagccccca

SEQ ID NO: 1944847 - RNA, 20 nt, Human herpesvirus 4 [Epstein-Barr virus]
ccccggagcccugcccuccu

SEQ ID NO: 1944848 - RNA, 15 nt, Human herpesvirus 4 [Epstein-Barr virus]
ucauauguaugccuu

SEQ ID NO: 1944849 - RNA, 11 nt, Human herpesvirus 4 [Epstein-Barr virus]
gggcugccccg

SEQ ID NO: 1944850 - RNA, 16 nt, Human herpesvirus 4 [Epstein-Barr virus]
ccgccagcgccuccuc

SEQ ID NO: 1944851 - RNA, 23 nt, Human herpesvirus 4 [Epstein-Barr virus]
ccuagaaacugugccauggugcc

SEQ ID NO: 1944852 - RNA, 16 nt, Human herpesvirus 4 [Epstein-Barr virus]
agacguggguccccuc

SEQ ID NO: 1944853 - RNA, 17 nt, Human herpesvirus 4 [Epstein-Barr virus]
agaagugugucccccuc

SEQ ID NO: 1944854 - RNA, 15 nt, Human herpesvirus 4 [Epstein-Barr virus]
acgcagaaugugcag

SEQ ID NO: 1944855 - RNA, 16 nt, Human herpesvirus 4 [Epstein-Barr virus]
aggucaggucccccuc

SEQ ID NO: 1944856 - RNA, 20 nt, Human herpesvirus 4 [Epstein-Barr virus]
agccugauauugucccccua

SEQ ID NO: 1944857 - RNA, 14 nt, Human herpesvirus 4 [Epstein-Barr virus]
agccucugccacaa

SEQ ID NO: 1944858 - RNA, 18 nt, Human herpesvirus 4 [Epstein-Barr virus]
agccccgcccuccccauc

SEQ ID NO: 1944859 - RNA, 14 nt, Human herpesvirus 4 [Epstein-Barr virus]
agcccacuccccuc

SEQ ID NO: 1944860 - RNA, 14 nt, Human herpesvirus 4 [Epstein-Barr virus]
caguggcugccccg

SEQ ID NO: 1944861 - RNA, 21 nt, Human herpesvirus 4 [Epstein-Barr virus]
cgccucagggaucguggacuc

SEQ ID NO: 1944862 - RNA, 21 nt, Human herpesvirus 4 [Epstein-Barr virus]
cgccacccucccccugccccg

SEQ ID NO: 1944863 - RNA, 19 nt, Human herpesvirus 4 [Epstein-Barr virus]
gcccucauuccacggcccg

SEQ ID NO: 1944864 - RNA, 21 nt, Human herpesvirus 4 [Epstein-Barr virus]
gcccuccucugggccgcccgg

SEQ ID NO: 1944865 - RNA, 19 nt, Human herpesvirus 4 [Epstein-Barr virus]
gcagaggccugcaccaguu

SEQ ID NO: 1944866 - RNA, 12 nt, Human herpesvirus 4 [Epstein-Barr virus]
cugcgccuccug

SEQ ID NO: 1944867 - RNA, 15 nt, Human herpesvirus 4 [Epstein-Barr virus]
cuguccacugccccg

SEQ ID NO: 1944868 - RNA, 23 nt, Human herpesvirus 4 [Epstein-Barr virus]
cugccucgaguaggugccuccag

SEQ ID NO: 1944869 - RNA, 17 nt, Human herpesvirus 4 [Epstein-Barr virus]
ucgugcuaagcguccug

SEQ ID NO: 1944870 - RNA, 14 nt, Human herpesvirus 4 [Epstein-Barr virus]
ucguccgccuacug

SEQ ID NO: 1944871 - RNA, 15 nt, Human herpesvirus 4 [Epstein-Barr virus]
uccugccugccucug

SEQ ID NO: 1944872 - RNA, 14 nt, Human herpesvirus 4 [Epstein-Barr virus]
uccccggccucccg

SEQ ID NO: 1944873 - RNA, 23 nt, Human herpesvirus 4 [Epstein-Barr virus]
ucccgagcggccuccgccgucca

SEQ ID NO: 1944874 - RNA, 15 nt, Human herpesvirus 4 [Epstein-Barr virus]
gagcuggacgagguc

SEQ ID NO: 1944875 - RNA, 17 nt, Human herpesvirus 4 [Epstein-Barr virus]
acuggcaacuccucuua

SEQ ID NO: 1944876 - RNA, 17 nt, Human herpesvirus 4 [Epstein-Barr virus]
uugucacuuucuuugca

SEQ ID NO: 1944877 - RNA, 19 nt, Human herpesvirus 4 [Epstein-Barr virus]
uugccggccaccuuugcua

SEQ ID NO: 1944878 - RNA, 20 nt, Human herpesvirus 4 [Epstein-Barr virus]
uugcucucagcacuuugcca

SEQ ID NO: 1944879 - RNA, 15 nt, Human herpesvirus 4 [Epstein-Barr virus]
uugcucucguugcca

SEQ ID NO: 1944880 - RNA, 19 nt, Human herpesvirus 4 [Epstein-Barr virus]
uuccucauuggcuuugccc

SEQ ID NO: 1944881 - RNA, 15 nt, Human herpesvirus 4 [Epstein-Barr virus]
uggcucucuucgcca

SEQ ID NO: 1944882 - RNA, 19 nt, Human herpesvirus 4 [Epstein-Barr virus]
guggacucggccacacagu

SEQ ID NO: 1944883 - RNA, 17 nt, Human herpesvirus 4 [Epstein-Barr virus]
uacguguccauguacaa

SEQ ID NO: 1944884 - RNA, 15 nt, Human herpesvirus 4 [Epstein-Barr virus]
uaccgagauguacau

SEQ ID NO: 1944885 - RNA, 19 nt, Human herpesvirus 4 [Epstein-Barr virus]
uaggcacuggacacacaug

SEQ ID NO: 1944886 - RNA, 23 nt, Human herpesvirus 4 [Epstein-Barr virus]
ucuaccuggucaagagcuuccug

SEQ ID NO: 1944887 - RNA, 14 nt, Human herpesvirus 4 [Epstein-Barr virus]
ucuccaggcuccug

SEQ ID NO: 1944888 - RNA, 18 nt, Human herpesvirus 4 [Epstein-Barr virus]
ucugaaaacugccuccuc

SEQ ID NO: 1944889 - RNA, 22 nt, Human herpesvirus 4 [Epstein-Barr virus]
ucugccccucagccugcuccug

SEQ ID NO: 1944890 - RNA, 17 nt, Human herpesvirus 4 [Epstein-Barr virus]
ugccuggcgcuuugcua

SEQ ID NO: 1944891 - RNA, 12 nt, Human herpesvirus 4 [Epstein-Barr virus]
gcuccuuugccu

SEQ ID NO: 1944892 - RNA, 16 nt, Human herpesvirus 4 [Epstein-Barr virus]
gccugcuucacgccuc

SEQ ID NO: 1944893 - RNA, 17 nt, Human herpesvirus 4 [Epstein-Barr virus]
gccuccggccgccccgg

SEQ ID NO: 1944894 - RNA, 21 nt, Human herpesvirus 4 [Epstein-Barr virus]
ggaacacccccaccccaccga

SEQ ID NO: 1944895 - RNA, 15 nt, Human herpesvirus 4 [Epstein-Barr virus]
cugcacggcccucca

SEQ ID NO: 1944896 - RNA, 13 nt, Human herpesvirus 4 [Epstein-Barr virus]
cuuucuaugccug

SEQ ID NO: 1944897 - RNA, 19 nt, Human herpesvirus 4 [Epstein-Barr virus]
gacgggcucccucccccuc

SEQ ID NO: 1944898 - RNA, 15 nt, Human herpesvirus 4 [Epstein-Barr virus]
aggcccagcccccuc

SEQ ID NO: 1944899 - RNA, 20 nt, Human herpesvirus 4 [Epstein-Barr virus]
acagagccgugucuccugac

SEQ ID NO: 1944900 - RNA, 20 nt, Human herpesvirus 4 [Epstein-Barr virus]
acacuugugguucuccugau

SEQ ID NO: 1944901 - RNA, 13 nt, Human herpesvirus 4 [Epstein-Barr virus]
ccuccgccgccug

SEQ ID NO: 1944902 - RNA, 13 nt, Human herpesvirus 4 [Epstein-Barr virus]
ccucccgccccug

SEQ ID NO: 1944903 - RNA, 23 nt, Human herpesvirus 4 [Epstein-Barr virus]
cgaggcugagaacugacgcucca

SEQ ID NO: 1944904 - RNA, 15 nt, Human herpesvirus 4 [Epstein-Barr virus]
ccccgggcgccccca

SEQ ID NO: 1944905 - RNA, 22 nt, Human herpesvirus 4 [Epstein-Barr virus]
cucagucuuugcaauuugccua

SEQ ID NO: 1944906 - RNA, 14 nt, Human herpesvirus 4 [Epstein-Barr virus]
cucauaauggugcc

SEQ ID NO: 1944907 - RNA, 13 nt, Human herpesvirus 4 [Epstein-Barr virus]
gagcccccaccgc

SEQ ID NO: 1944908 - RNA, 13 nt, Human herpesvirus 4 [Epstein-Barr virus]
gagcgcccaccga

SEQ ID NO: 1944909 - RNA, 15 nt, Human herpesvirus 4 [Epstein-Barr virus]
gcgcgggucccccua

SEQ ID NO: 1944910 - RNA, 19 nt, Human herpesvirus 4 [Epstein-Barr virus]
uccuaggcacggccucgug

SEQ ID NO: 1944911 - RNA, 18 nt, Human herpesvirus 4 [Epstein-Barr virus]
ucgcccccucugccuccg

SEQ ID NO: 1944912 - RNA, 21 nt, Human herpesvirus 4 [Epstein-Barr virus]
uggaggggggcggcguggagc

SEQ ID NO: 1944913 - RNA, 14 nt, Human herpesvirus 4 [Epstein-Barr virus]
gccccggucccccc

SEQ ID NO: 1944914 - RNA, 18 nt, Human herpesvirus 4 [Epstein-Barr virus]
gccccgaaagcggcccag

SEQ ID NO: 1944915 - RNA, 19 nt, Human herpesvirus 4 [Epstein-Barr virus]
cgguggguggaacgcucca

SEQ ID NO: 1944916 - RNA, 20 nt, Human herpesvirus 4 [Epstein-Barr virus]
cggcgcuugcgucugccccc

SEQ ID NO: 1944917 - RNA, 20 nt, Human herpesvirus 4 [Epstein-Barr virus]
uacagcagcuggauguacag

SEQ ID NO: 1944918 - RNA, 13 nt, Human herpesvirus 4 [Epstein-Barr virus]
uaaccuaugccug

SEQ ID NO: 1944919 - RNA, 14 nt, Human herpesvirus 4 [Epstein-Barr virus]
ugcaguauguacag

SEQ ID NO: 1944920 - RNA, 14 nt, Human herpesvirus 4 [Epstein-Barr virus]
ugacauauguacaa

SEQ ID NO: 1944921 - RNA, 17 nt, Human herpesvirus 4 [Epstein-Barr virus]
ugcugccagagccucug

SEQ ID NO: 1944922 - RNA, 20 nt, Human herpesvirus 4 [Epstein-Barr virus]
ggucgugguuuucugccccu

SEQ ID NO: 1944923 - RNA, 20 nt, Human herpesvirus 4 [Epstein-Barr virus]
ggucgcccccucugccuccg

SEQ ID NO: 1944924 - RNA, 17 nt, Human herpesvirus 4 [Epstein-Barr virus]
gcguccucuaccugguc

SEQ ID NO: 1944925 - RNA, 17 nt, Human herpesvirus 4 [Epstein-Barr virus]
aacccaauucccgccuc

SEQ ID NO: 1944926 - RNA, 16 nt, Human herpesvirus 4 [Epstein-Barr virus]
aaccugauucccccug

SEQ ID NO: 1944927 - RNA, 18 nt, Human herpesvirus 4 [Epstein-Barr virus]
acaaaggaaacugcugac

SEQ ID NO: 1944928 - RNA, 22 nt, Human herpesvirus 4 [Epstein-Barr virus]
accccacggggugcucccccug

SEQ ID NO: 1944929 - RNA, 12 nt, Human herpesvirus 4 [Epstein-Barr virus]
acccucccccug

SEQ ID NO: 1944930 - RNA, 17 nt, Human herpesvirus 4 [Epstein-Barr virus]
aggcacggucgccccuc

SEQ ID NO: 1944931 - RNA, 20 nt, Human herpesvirus 4 [Epstein-Barr virus]
aguggccggggccguggagc

SEQ ID NO: 1944932 - RNA, 21 nt, Human herpesvirus 4 [Epstein-Barr virus]
cauccaucaacuucagcucca

SEQ ID NO: 1944933 - RNA, 21 nt, Human herpesvirus 4 [Epstein-Barr virus]
auuagauucacguuccucauc

SEQ ID NO: 1944934 - RNA, 15 nt, Human herpesvirus 4 [Epstein-Barr virus]
auaagaaacacgcug

SEQ ID NO: 1944935 - RNA, 21 nt, Human herpesvirus 4 [Epstein-Barr virus]
ggccuuggggguggugggcuc

SEQ ID NO: 1944936 - RNA, 14 nt, Human
aaaaacacaaaagu

SEQ ID NO: 1944937 - RNA, 11 nt, Human
aaaaacaaaag

SEQ ID NO: 1944938 - RNA, 12 nt, Human
aaaaacaaagag

SEQ ID NO: 1944939 - RNA, 15 nt, Human
aaaaacaaauaauau

SEQ ID NO: 1944940 - RNA, 11 nt, Human
aaaaacagcuu

SEQ ID NO: 1944941 - RNA, 12 nt, Human
aaaacacauuuu

SEQ ID NO: 1944942 - RNA, 17 nt, Human
aaaacaauaggaugggc

SEQ ID NO: 1944943 - RNA, 18 nt, Human
aaaacaauaggaugggcu

SEQ ID NO: 1944944 - RNA, 14 nt, Human
aaaaauuuguuuaa

SEQ ID NO: 1944945 - RNA, 16 nt, Human
aaaaauuuguuuaaag

SEQ ID NO: 1944946 - RNA, 21 nt, Human
aaaaauuuacuacaauaugua

SEQ ID NO: 1944947 - RNA, 13 nt, Human
aaaacaaauaaua

SEQ ID NO: 1944948 - RNA, 16 nt, Human
aaaacaaauaauaucu

SEQ ID NO: 1944949 - RNA, 13 nt, Human
aaaacaaaaggca

SEQ ID NO: 1944950 - RNA, 13 nt, Human
aaaacaaaaccaa

SEQ ID NO: 1944951 - RNA, 13 nt, Human
aaaaacugauuuu

SEQ ID NO: 1944952 - RNA, 14 nt, Human
aaaaacauggccuu

SEQ ID NO: 1944953 - RNA, 13 nt, Human
aaaaacauguaug

SEQ ID NO: 1944954 - RNA, 16 nt, Human
aaaaacauguaugugc

SEQ ID NO: 1944955 - RNA, 20 nt, Human
aaaaacauguaugugcauuu

SEQ ID NO: 1944956 - RNA, 19 nt, Human
aaaaacuuucuacucauuu

SEQ ID NO: 1944957 - RNA, 18 nt, Human
aaaaacuuucuacucauu

SEQ ID NO: 1944958 - RNA, 15 nt, Human
aaaaacugauuuuuu

SEQ ID NO: 1944959 - RNA, 19 nt, Human
aaaaauucaauaguaauau

SEQ ID NO: 1944960 - RNA, 17 nt, Human
aaaaauucaauaguaau

SEQ ID NO: 1944961 - RNA, 18 nt, Human
aaaaauucaauaguaaua

SEQ ID NO: 1944962 - RNA, 17 nt, Human
aaaaagauaccuuaaaa

SEQ ID NO: 1944963 - RNA, 14 nt, Human
aaaaagacagggcu

SEQ ID NO: 1944964 - RNA, 12 nt, Human
aaaaagaggcua

SEQ ID NO: 1944965 - RNA, 15 nt, Human
aggaaaaacugauuu

SEQ ID NO: 1944966 - RNA, 13 nt, Human
aggaaaaacugau

SEQ ID NO: 1944967 - RNA, 15 nt, Human
agcuuuucccuuuuu

SEQ ID NO: 1944968 - RNA, 16 nt, Human
agcuuuucccuucuuu

SEQ ID NO: 1944969 - RNA, 21 nt, Human
agcuuuuaugugaaacauguu

SEQ ID NO: 1944970 - RNA, 13 nt, Human
agcuuuucccuuc

SEQ ID NO: 1944971 - RNA, 14 nt, Human
agcuuuucauugcu

SEQ ID NO: 1944972 - RNA, 23 nt, Human
agcuucuguugcugccucaugcu

SEQ ID NO: 1944973 - RNA, 20 nt, Human
aggaaauggcuguggagugu

SEQ ID NO: 1944974 - RNA, 21 nt, Human
aggaaaugcugacccaugggc

SEQ ID NO: 1944975 - RNA, 22 nt, Human
aggaaaugcugacccaugggca

SEQ ID NO: 1944976 - RNA, 23 nt, Human
aggaaaugcugacccaugggcag

SEQ ID NO: 1944977 - RNA, 22 nt, Human
aggaacguaaucguguccccua

SEQ ID NO: 1944978 - RNA, 20 nt, Human
aggaaccuuccuuccugcuu

SEQ ID NO: 1944979 - RNA, 22 nt, Human
aggaaccuuccuuccugcuuga

SEQ ID NO: 1944980 - RNA, 13 nt, Human
aggaaccuguccu

SEQ ID NO: 1944981 - RNA, 14 nt, Human
aggaaccuuccuuc

SEQ ID NO: 1944982 - RNA, 19 nt, Human
aggaaccuuccuuccugcu

SEQ ID NO: 1944983 - RNA, 15 nt, Human
aggaaauccagggug

SEQ ID NO: 1944984 - RNA, 17 nt, Human
aggaaauccaggguggu

SEQ ID NO: 1944985 - RNA, 12 nt, Human
aggaaaaagaac

SEQ ID NO: 1944986 - RNA, 16 nt, Human
aggaaaaagaacuucc

SEQ ID NO: 1944987 - RNA, 13 nt, Human
aggaaaaauaugu

SEQ ID NO: 1944988 - RNA, 14 nt, Human
aggaaaaauaugug

SEQ ID NO: 1944989 - RNA, 15 nt, Human
aggaaaaauauguga

SEQ ID NO: 1944990 - RNA, 16 nt, Human
aggaaaaauaugugaa

SEQ ID NO: 1944991 - RNA, 17 nt, Human
aggaaaaauaugugaag

SEQ ID NO: 1944992 - RNA, 20 nt, Human
agcuucuguugcugccucau

SEQ ID NO: 1944993 - RNA, 21 nt, Human
agcuucuguugcugccucaug

SEQ ID NO: 1944994 - RNA, 22 nt, Human
agcuucuguugcugccucaugc

SEQ ID NO: 1944995 - RNA, 16 nt, Human
agcuucauacuucaug

SEQ ID NO: 1944996 - RNA, 13 nt, Human
agcuucacuucug

SEQ ID NO: 1944997 - RNA, 14 nt, Human
agcuucacuucuga

SEQ ID NO: 1944998 - RNA, 23 nt, Human
agcuucacuucugacucuucccc

SEQ ID NO: 1944999 - RNA, 13 nt, Human
agcuguaaggcau

SEQ ID NO: 1945000 - RNA, 17 nt, Human
agcuguaaggcaugaag

SEQ ID NO: 1945001 - RNA, 18 nt, Human
agcuguaaggcaugaagg

SEQ ID NO: 1945002 - RNA, 19 nt, Human
agcuguaaggcaugaagga

SEQ ID NO: 1945003 - RNA, 17 nt, Human
agcugggugucaagagg

SEQ ID NO: 1945004 - RNA, 22 nt, Human
agcugggugucaagagggucug

SEQ ID NO: 1945005 - RNA, 21 nt, Human
agcuggucccacucaguccau

SEQ ID NO: 1945006 - RNA, 15 nt, Human
agcugaauugagccu

SEQ ID NO: 1945007 - RNA, 20 nt, Human
agcugaauugagccuaaaaa

SEQ ID NO: 1945008 - RNA, 21 nt, Human
agcugaauugagccuaaaaau

SEQ ID NO: 1945009 - RNA, 20 nt, Human
aggauucacaccccaccugc

SEQ ID NO: 1945010 - RNA, 21 nt, Human
aggauucacaccccaccugcg

SEQ ID NO: 1945011 - RNA, 22 nt, Human
aggauucacaccccaccugcgc

SEQ ID NO: 1945012 - RNA, 22 nt, Human
aggauucucaccagcugugucc

SEQ ID NO: 1945013 - RNA, 18 nt, Human
aggauucucaccagcugu

SEQ ID NO: 1945014 - RNA, 20 nt, Human
aggauucucaccagcugugu

SEQ ID NO: 1945015 - RNA, 12 nt, Human
aggauucuuccu

SEQ ID NO: 1945016 - RNA, 16 nt, Human
aggauucuuccucccu

SEQ ID NO: 1945017 - RNA, 17 nt, Human
aggaggggauagagaga

SEQ ID NO: 1945018 - RNA, 20 nt, Human
aggagaggugauaaugaaug

SEQ ID NO: 1945019 - RNA, 17 nt, Human
aggauguugaaaaaguu

SEQ ID NO: 1945020 - RNA, 18 nt, Human
aggauucacaccccaccu

SEQ ID NO: 1945021 - RNA, 19 nt, Human
aggauucacaccccaccug

SEQ ID NO: 1945022 - RNA, 14 nt, Human
aggauguugaaaaa

SEQ ID NO: 1945023 - RNA, 20 nt, Human
aggauguucugggacacagu

SEQ ID NO: 1945024 - RNA, 14 nt, Human
aggcacugcugccc

SEQ ID NO: 1945025 - RNA, 16 nt, Human
aggcacugcugcccag

SEQ ID NO: 1945026 - RNA, 22 nt, Human
aggcacugcugcccagccucca

SEQ ID NO: 1945027 - RNA, 17 nt, Human
aggcagaaggaagcagg

SEQ ID NO: 1945028 - RNA, 16 nt, Human
aggaacugcugggcuu

SEQ ID NO: 1945029 - RNA, 15 nt, Human
aggaacuacugagga

SEQ ID NO: 1945030 - RNA, 14 nt, Human
aggaccagcccacg

SEQ ID NO: 1945031 - RNA, 18 nt, Human
aggaccagcccacgcuga

SEQ ID NO: 1945032 - RNA, 18 nt, Human
aggaccagcacacucccg

SEQ ID NO: 1945033 - RNA, 12 nt, Human
aggaccagccca

SEQ ID NO: 1945034 - RNA, 13 nt, Human
aggaccagcccac

SEQ ID NO: 1945035 - RNA, 20 nt, Human
aggaccccuccaugugggcu

SEQ ID NO: 1945036 - RNA, 18 nt, Human
aggagaggggcacagggu

SEQ ID NO: 1945037 - RNA, 16 nt, Human
aggagaggggcacagg

SEQ ID NO: 1945038 - RNA, 14 nt, Human
aggagaggggcaca

SEQ ID NO: 1945039 - RNA, 15 nt, Human
aggagagcuagcagc

SEQ ID NO: 1945040 - RNA, 20 nt, Human
aggaccccugcaguuccccu

SEQ ID NO: 1945041 - RNA, 15 nt, Human
aggagaacuugcugc

SEQ ID NO: 1945042 - RNA, 16 nt, Human
aggagaacuugcugcc

SEQ ID NO: 1945043 - RNA, 17 nt, Human
aggagaacuugcugccu

SEQ ID NO: 1945044 - RNA, 18 nt, Human
aggagaacuugcugccuc

SEQ ID NO: 1945045 - RNA, 19 nt, Human
aggagaacuugcugccucg

SEQ ID NO: 1945046 - RNA, 13 nt, Human
aggagaagaaaau

SEQ ID NO: 1945047 - RNA, 20 nt, Human
aggaccucaggugagaagca

SEQ ID NO: 1945048 - RNA, 14 nt, Human
aggaccucagguga

SEQ ID NO: 1945049 - RNA, 17 nt, Human
aggacccggaggggccu

SEQ ID NO: 1945050 - RNA, 18 nt, Human
aggcugcagccaggccac

SEQ ID NO: 1945051 - RNA, 14 nt, Human
aggcugagugcagg

SEQ ID NO: 1945052 - RNA, 15 nt, Human
aggcugagugcaggc

SEQ ID NO: 1945053 - RNA, 17 nt, Human
aggcugagugcaggccc

SEQ ID NO: 1945054 - RNA, 18 nt, Human
aggcugagugcaggccca

SEQ ID NO: 1945055 - RNA, 19 nt, Human
aggcugagugcaggcccac

SEQ ID NO: 1945056 - RNA, 20 nt, Human
aggcugagugcaggcccacc

SEQ ID NO: 1945057 - RNA, 21 nt, Human
aggcugagugcaggcccaccc

SEQ ID NO: 1945058 - RNA, 23 nt, Human
aggcugagugcaggcccacccug

SEQ ID NO: 1945059 - RNA, 24 nt, Human
aggcugagugcaggcccacccugc

SEQ ID NO: 1945060 - RNA, 20 nt, Human
aggcugaacuuguuuucugg

SEQ ID NO: 1945061 - RNA, 21 nt, Human
aggcugaacuuguuuucuggg

SEQ ID NO: 1945062 - RNA, 14 nt, Human
aggcucuucuccuu

SEQ ID NO: 1945063 - RNA, 21 nt, Human
aggcuauggggauagaugugu

SEQ ID NO: 1945064 - RNA, 22 nt, Human
aggcuauggggauagaugugug

SEQ ID NO: 1945065 - RNA, 19 nt, Human
aggcuauggggauagaugu

SEQ ID NO: 1945066 - RNA, 16 nt, Human
aggcuaugagugggau

SEQ ID NO: 1945067 - RNA, 23 nt, Human
aggcuagugugguguuuccuggc

SEQ ID NO: 1945068 - RNA, 20 nt, Human
agggacagaggggguggccu

SEQ ID NO: 1945069 - RNA, 13 nt, Human
agggacagagggg

SEQ ID NO: 1945070 - RNA, 12 nt, Human
agggacagaggg

SEQ ID NO: 1945071 - RNA, 17 nt, Human
agggacgcuacccggga

SEQ ID NO: 1945072 - RNA, 21 nt, Human
agggacgcuacccgggaaggg

SEQ ID NO: 1945073 - RNA, 18 nt, Human
aggcugccucucccauca

SEQ ID NO: 1945074 - RNA, 16 nt, Human
aggcugucuguuguau

SEQ ID NO: 1945075 - RNA, 14 nt, Human
aggggcagccugcc

SEQ ID NO: 1945076 - RNA, 18 nt, Human
aggggcagccugccuugc

SEQ ID NO: 1945077 - RNA, 12 nt, Human
aggggcccugca

SEQ ID NO: 1945078 - RNA, 13 nt, Human
aggggcagccugc

SEQ ID NO: 1945079 - RNA, 15 nt, Human
aggggcagaggaggc

SEQ ID NO: 1945080 - RNA, 15 nt, Human
aggggcacagggucu

SEQ ID NO: 1945081 - RNA, 17 nt, Human
aggggaugugugugugc

SEQ ID NO: 1945082 - RNA, 15 nt, Human
aggggauuacaguuc

SEQ ID NO: 1945083 - RNA, 21 nt, Human
aggggauagagagagaccacu

SEQ ID NO: 1945084 - RNA, 18 nt, Human
agggccuggccugagcug

SEQ ID NO: 1945085 - RNA, 16 nt, Human
agggcacagggccugg

SEQ ID NO: 1945086 - RNA, 17 nt, Human
agggcacagggccuggc

SEQ ID NO: 1945087 - RNA, 18 nt, Human
agggcacagggccuggcc

SEQ ID NO: 1945088 - RNA, 19 nt, Human
agggcgggaggauguucug

SEQ ID NO: 1945089 - RNA, 17 nt, Human
agggccuggccugagcu

SEQ ID NO: 1945090 - RNA, 16 nt, Human
agggccuggccugagc

SEQ ID NO: 1945091 - RNA, 13 nt, Human
agggcacagggcc

SEQ ID NO: 1945092 - RNA, 14 nt, Human
agggcacagggccu

SEQ ID NO: 1945093 - RNA, 15 nt, Human
agggcacagggccug

SEQ ID NO: 1945094 - RNA, 15 nt, Human
agggccuggccugag

SEQ ID NO: 1945095 - RNA, 22 nt, Human
agggcacagaaaauggaagaca

SEQ ID NO: 1945096 - RNA, 20 nt, Human
agggcacaccgggcacucag

SEQ ID NO: 1945097 - RNA, 21 nt, Human
agggcacaccgggcacucaga

SEQ ID NO: 1945098 - RNA, 17 nt, Human
agggcacaccgggcacu

SEQ ID NO: 1945099 - RNA, 16 nt, Human
agguggaagagggcug

SEQ ID NO: 1945100 - RNA, 15 nt, Human
agguggaaauaaacu

SEQ ID NO: 1945101 - RNA, 14 nt, Human
aggucgaggcagga

SEQ ID NO: 1945102 - RNA, 20 nt, Human
aggucgcuugggaauuuuau

SEQ ID NO: 1945103 - RNA, 14 nt, Human
agguccuuuagaaa

SEQ ID NO: 1945104 - RNA, 19 nt, Human
agguccugcucagcaguga

SEQ ID NO: 1945105 - RNA, 15 nt, Human
agguccuuuagaaac

SEQ ID NO: 1945106 - RNA, 16 nt, Human
aggugcugccauccag

SEQ ID NO: 1945107 - RNA, 17 nt, Human
aggugcugccauccagg

SEQ ID NO: 1945108 - RNA, 22 nt, Human
agguggcaucagugucuuucca

SEQ ID NO: 1945109 - RNA, 23 nt, Human
agguggcaucagugucuuuccac

SEQ ID NO: 1945110 - RNA, 17 nt, Human
agguggcaggugagcaa

SEQ ID NO: 1945111 - RNA, 15 nt, Human
agguuaauaaaguaa

SEQ ID NO: 1945112 - RNA, 14 nt, Human
agguuaauguucau

SEQ ID NO: 1945113 - RNA, 17 nt, Human
agguucaaagauauuuu

SEQ ID NO: 1945114 - RNA, 17 nt, Human
agguucaugcaaacuuu

SEQ ID NO: 1945115 - RNA, 13 nt, Human
agguucagcuugu

SEQ ID NO: 1945116 - RNA, 18 nt, Human
agguuccacagaggacac

SEQ ID NO: 1945117 - RNA, 17 nt, Human
agguaaggaauaccugu

SEQ ID NO: 1945118 - RNA, 17 nt, Human
agguaaucgaccugccu

SEQ ID NO: 1945119 - RNA, 18 nt, Human
agguaaucgaccugccuc

SEQ ID NO: 1945120 - RNA, 20 nt, Human
aggucccuaauaaagcugug

SEQ ID NO: 1945121 - RNA, 19 nt, Human
aggucccuaauaaagcugu

SEQ ID NO: 1945122 - RNA, 18 nt, Human
aggucccuaauaaagcug

SEQ ID NO: 1945123 - RNA, 17 nt, Human
aggucccuaauaaagcu

SEQ ID NO: 1945124 - RNA, 13 nt, Human
agauguaauuuug

SEQ ID NO: 1945125 - RNA, 21 nt, Human
agaugggagaaucacuugaac

SEQ ID NO: 1945126 - RNA, 14 nt, Human
agauguagaggaga

SEQ ID NO: 1945127 - RNA, 14 nt, Human
agauguaauuuugu

SEQ ID NO: 1945128 - RNA, 15 nt, Human
agauguaauuuugug

SEQ ID NO: 1945129 - RNA, 17 nt, Human
agauguaauuuugugua

SEQ ID NO: 1945130 - RNA, 19 nt, Human
agauguaauuuuguguaag

SEQ ID NO: 1945131 - RNA, 15 nt, Human
agauguacuauaaca

SEQ ID NO: 1945132 - RNA, 22 nt, Human
agauguacuauaacauagaauu

SEQ ID NO: 1945133 - RNA, 21 nt, Human
agcagccacauuccugaugcu

SEQ ID NO: 1945134 - RNA, 20 nt, Human
agcacuaaggugugcucuga

SEQ ID NO: 1945135 - RNA, 19 nt, Human
agcacuaaggugugcucug

SEQ ID NO: 1945136 - RNA, 12 nt, Human
agcagccagcca

SEQ ID NO: 1945137 - RNA, 21 nt, Human
agcagccagccaaacacacag

SEQ ID NO: 1945138 - RNA, 20 nt, Human
agcagucuuaugcuuccaga

SEQ ID NO: 1945139 - RNA, 22 nt, Human
agcagucuuaugcuuccagaaa

SEQ ID NO: 1945140 - RNA, 13 nt, Human
agcagucugccug

SEQ ID NO: 1945141 - RNA, 15 nt, Human
agcagucugccugga

SEQ ID NO: 1945142 - RNA, 19 nt, Human
agcagucuuaugcuuccag

SEQ ID NO: 1945143 - RNA, 16 nt, Human
agcagugagagcagau

SEQ ID NO: 1945144 - RNA, 15 nt, Human
agcagugauauucuu

SEQ ID NO: 1945145 - RNA, 19 nt, Human
agcagugauauucuuuguu

SEQ ID NO: 1945146 - RNA, 17 nt, Human
agccauucugacucaua

SEQ ID NO: 1945147 - RNA, 17 nt, Human
agcaugccaauuucucu

SEQ ID NO: 1945148 - RNA, 23 nt, Human
agccaaggccaaaggaagcacau

SEQ ID NO: 1945149 - RNA, 22 nt, Human
agccaaggccaaaggaagcaca

SEQ ID NO: 1945150 - RNA, 13 nt, Human
agccagaggucug

SEQ ID NO: 1945151 - RNA, 20 nt, Human
agccagaggagagaggaccc

SEQ ID NO: 1945152 - RNA, 20 nt, Human
agcaugauuuauacucauuu

SEQ ID NO: 1945153 - RNA, 23 nt, Human
agcaugaggcagcacgugcacaa

SEQ ID NO: 1945154 - RNA, 20 nt, Human
agcaugagagggaugaggca

SEQ ID NO: 1945155 - RNA, 12 nt, Human
agcaugccugga

SEQ ID NO: 1945156 - RNA, 14 nt, Human
agcaugcacaaauu

SEQ ID NO: 1945157 - RNA, 19 nt, Human
agccaaagcuaggccuggc

SEQ ID NO: 1945158 - RNA, 20 nt, Human
agccaaagcuaggccuggcc

SEQ ID NO: 1945159 - RNA, 23 nt, Human
agccaaagcuaggccuggccaga

SEQ ID NO: 1945160 - RNA, 16 nt, Human
agcaugaacagugcac

SEQ ID NO: 1945161 - RNA, 21 nt, Human
agcagugauauucuuuguuaa

SEQ ID NO: 1945162 - RNA, 16 nt, Human
agcaguugcugguaaa

SEQ ID NO: 1945163 - RNA, 17 nt, Human
agcaguugcugguaaaa

SEQ ID NO: 1945164 - RNA, 20 nt, Human
agcaguugcugguaaaauga

SEQ ID NO: 1945165 - RNA, 21 nt, Human
agcaguugcugguaaaaugaa

SEQ ID NO: 1945166 - RNA, 22 nt, Human
agcaguugcugguaaaaugaag

SEQ ID NO: 1945167 - RNA, 14 nt, Human
agcaguuucaauaa

SEQ ID NO: 1945168 - RNA, 23 nt, Human
agcaguugcugguaaaaugaaga

SEQ ID NO: 1945169 - RNA, 12 nt, Human
agcaguuucaau

SEQ ID NO: 1945170 - RNA, 13 nt, Human
agcaguuucaaua

SEQ ID NO: 1945171 - RNA, 15 nt, Human
agcccaaccucuucc

SEQ ID NO: 1945172 - RNA, 16 nt, Human
agcccaaccucuuccu

SEQ ID NO: 1945173 - RNA, 11 nt, Human
agcccaaccuc

SEQ ID NO: 1945174 - RNA, 11 nt, Human
agccccauccu

SEQ ID NO: 1945175 - RNA, 20 nt, Human
agccccaucccaaacccuuc

SEQ ID NO: 1945176 - RNA, 16 nt, Human
agccccagugcccaca

SEQ ID NO: 1945177 - RNA, 23 nt, Human
agccccauaauuuuuuuuuuccu

SEQ ID NO: 1945178 - RNA, 16 nt, Human
agcccuauuucuugau

SEQ ID NO: 1945179 - RNA, 15 nt, Human
agcccugagcuuucu

SEQ ID NO: 1945180 - RNA, 17 nt, Human
agcccugaggaggccuu

SEQ ID NO: 1945181 - RNA, 19 nt, Human
agccgagaucacgccacug

SEQ ID NO: 1945182 - RNA, 20 nt, Human
agccgagaucacgccacugc

SEQ ID NO: 1945183 - RNA, 21 nt, Human
agccccacucucagaggcccc

SEQ ID NO: 1945184 - RNA, 22 nt, Human
agccccacucucagaggcccca

SEQ ID NO: 1945185 - RNA, 14 nt, Human
agccccacucucag

SEQ ID NO: 1945186 - RNA, 15 nt, Human
agccccacucucaga

SEQ ID NO: 1945187 - RNA, 16 nt, Human
agccccacucucagag

SEQ ID NO: 1945188 - RNA, 17 nt, Human
agccccacucucagagg

SEQ ID NO: 1945189 - RNA, 19 nt, Human
agccccacucucagaggcc

SEQ ID NO: 1945190 - RNA, 20 nt, Human
agccucccaaagugcuggga

SEQ ID NO: 1945191 - RNA, 18 nt, Human
agccucccgaauagcugg

SEQ ID NO: 1945192 - RNA, 19 nt, Human
agccucccgaauagcuggg

SEQ ID NO: 1945193 - RNA, 20 nt, Human
agccucccgaauagcuggga

SEQ ID NO: 1945194 - RNA, 22 nt, Human
agccucccgaauagcugggacu

SEQ ID NO: 1945195 - RNA, 17 nt, Human
agccucccgaguagcug

SEQ ID NO: 1945196 - RNA, 22 nt, Human
agccucccgaguagcugggacu

SEQ ID NO: 1945197 - RNA, 22 nt, Human
agccgcuggggccaguuggucc

SEQ ID NO: 1945198 - RNA, 14 nt, Human
agccgcuggggcca

SEQ ID NO: 1945199 - RNA, 14 nt, Human
agcccugaguuccu

SEQ ID NO: 1945200 - RNA, 18 nt, Human
agcccugaggaggccuug

SEQ ID NO: 1945201 - RNA, 22 nt, Human
agcccugagguuugaaucugac

SEQ ID NO: 1945202 - RNA, 20 nt, Human
agccgagauugcaccacugc

SEQ ID NO: 1945203 - RNA, 19 nt, Human
agccgagauugcaccacug

SEQ ID NO: 1945204 - RNA, 21 nt, Human
agccgagaucacgccacugca

SEQ ID NO: 1945205 - RNA, 18 nt, Human
agccucccaaagugcugg

SEQ ID NO: 1945206 - RNA, 19 nt, Human
agccucccaaagugcuggg

SEQ ID NO: 1945207 - RNA, 17 nt, Human
agccguaaaaacugaag

SEQ ID NO: 1945208 - RNA, 20 nt, Human
agccguaaaaacugaaguuc

SEQ ID NO: 1945209 - RNA, 16 nt, Human
agccguaaaaacugaa

SEQ ID NO: 1945210 - RNA, 13 nt, Human
agaggagaggggc

SEQ ID NO: 1945211 - RNA, 12 nt, Human
agaggagcccug

SEQ ID NO: 1945212 - RNA, 13 nt, Human
agaggagcccugc

SEQ ID NO: 1945213 - RNA, 14 nt, Human
agaggagcccugcc

SEQ ID NO: 1945214 - RNA, 15 nt, Human
agaggagcccugccu

SEQ ID NO: 1945215 - RNA, 23 nt, Human
agaggagcccugccucuccgccc

SEQ ID NO: 1945216 - RNA, 16 nt, Human
agaggggaaaagagau

SEQ ID NO: 1945217 - RNA, 19 nt, Human
agaggauggcccaggguga

SEQ ID NO: 1945218 - RNA, 22 nt, Human
agaggauuggcucccaucuuuu

SEQ ID NO: 1945219 - RNA, 14 nt, Human
agaggauuuugcgu

SEQ ID NO: 1945220 - RNA, 22 nt, Human
agaggauuuugcgucagagaaa

SEQ ID NO: 1945221 - RNA, 16 nt, Human
agaggggaagagacuu

SEQ ID NO: 1945222 - RNA, 18 nt, Human
agaggggaaaagagauga

SEQ ID NO: 1945223 - RNA, 18 nt, Human
agaggggaaaagcugaac

SEQ ID NO: 1945224 - RNA, 19 nt, Human
agaggggaaaagcugaaca

SEQ ID NO: 1945225 - RNA, 22 nt, Human
agaggggaacagacuggaagca

SEQ ID NO: 1945226 - RNA, 18 nt, Human
agaggggagagcugaaca

SEQ ID NO: 1945227 - RNA, 13 nt, Human
agaggggaggcca

SEQ ID NO: 1945228 - RNA, 15 nt, Human
agaggggaggccaag

SEQ ID NO: 1945229 - RNA, 23 nt, Human
agaggguggugaccucugccuga

SEQ ID NO: 1945230 - RNA, 22 nt, Human
agauacuuggggggcugaggug

SEQ ID NO: 1945231 - RNA, 11 nt, Human
agauacuuugu

SEQ ID NO: 1945232 - RNA, 22 nt, Human
agauacuuggucacagccaggc

SEQ ID NO: 1945233 - RNA, 21 nt, Human
agauacuuggucacagccagg

SEQ ID NO: 1945234 - RNA, 12 nt, Human
agauacuuugua

SEQ ID NO: 1945235 - RNA, 13 nt, Human
agauacuuuguau

SEQ ID NO: 1945236 - RNA, 15 nt, Human
agauacuuuguauug

SEQ ID NO: 1945237 - RNA, 16 nt, Human
agauacuuuguauugu

SEQ ID NO: 1945238 - RNA, 13 nt, Human
agauagccaaggc

SEQ ID NO: 1945239 - RNA, 20 nt, Human
agauacuuuguauuguccua

SEQ ID NO: 1945240 - RNA, 22 nt, Human
agauacuuuguauuguccuauu

SEQ ID NO: 1945241 - RNA, 20 nt, Human
agaugaccccugcccagauc

SEQ ID NO: 1945242 - RNA, 23 nt, Human
agaugaccccugcccagaucagc

SEQ ID NO: 1945243 - RNA, 17 nt, Human
agaugagaacagauaaa

SEQ ID NO: 1945244 - RNA, 21 nt, Human
agaugagaacagauaaagauu

SEQ ID NO: 1945245 - RNA, 23 nt, Human
agaugagaggggagagcugaaca

SEQ ID NO: 1945246 - RNA, 23 nt, Human
agauggcugugccucugccuguc

SEQ ID NO: 1945247 - RNA, 14 nt, Human
agaugagcacuucu

SEQ ID NO: 1945248 - RNA, 19 nt, Human
agaugagcacuucuaaguu

SEQ ID NO: 1945249 - RNA, 23 nt, Human
agauaguccauaauguucugcua

SEQ ID NO: 1945250 - RNA, 20 nt, Human
agauaguccauaauguucug

SEQ ID NO: 1945251 - RNA, 21 nt, Human
agauaguccauaauguucugc

SEQ ID NO: 1945252 - RNA, 16 nt, Human
agauagccaaggccaa

SEQ ID NO: 1945253 - RNA, 15 nt, Human
agauagccaaggcca

SEQ ID NO: 1945254 - RNA, 21 nt, Human
agauaggucagugcaaauacu

SEQ ID NO: 1945255 - RNA, 21 nt, Human
agagaagagauugugguuuca

SEQ ID NO: 1945256 - RNA, 10 nt, Human
agagaagaga

SEQ ID NO: 1945257 - RNA, 13 nt, Human
agagaagagcccc

SEQ ID NO: 1945258 - RNA, 18 nt, Human
agagaaaguacuucucca

SEQ ID NO: 1945259 - RNA, 14 nt, Human
agagaagagcccca

SEQ ID NO: 1945260 - RNA, 15 nt, Human
agagaagagccccac

SEQ ID NO: 1945261 - RNA, 16 nt, Human
agagaagagccccacu

SEQ ID NO: 1945262 - RNA, 18 nt, Human
agagaagagccccacucu

SEQ ID NO: 1945263 - RNA, 21 nt, Human
agagaagagccccacucucag

SEQ ID NO: 1945264 - RNA, 21 nt, Human
agagaagauggauaugaccag

SEQ ID NO: 1945265 - RNA, 20 nt, Human
agagagcuucuguugcugcc

SEQ ID NO: 1945266 - RNA, 23 nt, Human
agagagcuucuguugcugccuca

SEQ ID NO: 1945267 - RNA, 16 nt, Human
agagagcuucuguugc

SEQ ID NO: 1945268 - RNA, 23 nt, Human
agagaggguggugaccucugccu

SEQ ID NO: 1945269 - RNA, 14 nt, Human
agagaguggcuccu

SEQ ID NO: 1945270 - RNA, 16 nt, Human
agagaguggcuccucc

SEQ ID NO: 1945271 - RNA, 13 nt, Human
agagcccugcucc

SEQ ID NO: 1945272 - RNA, 14 nt, Human
agagcccugcuccc

SEQ ID NO: 1945273 - RNA, 13 nt, Human
agagccccacucu

SEQ ID NO: 1945274 - RNA, 15 nt, Human
agagccccacucuca

SEQ ID NO: 1945275 - RNA, 16 nt, Human
agagccccacucucag

SEQ ID NO: 1945276 - RNA, 17 nt, Human
agagccccacucucaga

SEQ ID NO: 1945277 - RNA, 20 nt, Human
agagccccacucucagaggc

SEQ ID NO: 1945278 - RNA, 21 nt, Human
agagccccacucucagaggcc

SEQ ID NO: 1945279 - RNA, 22 nt, Human
agagccccacucucagaggccc

SEQ ID NO: 1945280 - RNA, 23 nt, Human
agagccccacucucagaggcccc

SEQ ID NO: 1945281 - RNA, 13 nt, Human
agagccuuaaaac

SEQ ID NO: 1945282 - RNA, 16 nt, Human
agagcccugcucccuc

SEQ ID NO: 1945283 - RNA, 18 nt, Human
agagcccugcucccuccg

SEQ ID NO: 1945284 - RNA, 14 nt, Human
agagccuuaaaaca

SEQ ID NO: 1945285 - RNA, 15 nt, Human
agagccuuaaaacau

SEQ ID NO: 1945286 - RNA, 16 nt, Human
agagccuuaaaacauc

SEQ ID NO: 1945287 - RNA, 23 nt, Human
agacugaguacguugugcauuug

SEQ ID NO: 1945288 - RNA, 11 nt, Human
agacugaucuc

SEQ ID NO: 1945289 - RNA, 13 nt, Human
agacaaugacuua

SEQ ID NO: 1945290 - RNA, 17 nt, Human
agacaaugacuuacugu

SEQ ID NO: 1945291 - RNA, 13 nt, Human
agacaaucuucug

SEQ ID NO: 1945292 - RNA, 14 nt, Human
agacaaucuucugu

SEQ ID NO: 1945293 - RNA, 19 nt, Human
agacaaugacuuacuguac

SEQ ID NO: 1945294 - RNA, 15 nt, Human
agacaauuuauuaug

SEQ ID NO: 1945295 - RNA, 21 nt, Human
agacaauuuauuauggcacau

SEQ ID NO: 1945296 - RNA, 15 nt, Human
agacaaucuucuguu

SEQ ID NO: 1945297 - RNA, 22 nt, Human
agaccaauuuuuugugugugaa

SEQ ID NO: 1945298 - RNA, 17 nt, Human
agacagcccgggcucug

SEQ ID NO: 1945299 - RNA, 16 nt, Human
agacagcccgggcucu

SEQ ID NO: 1945300 - RNA, 20 nt, Human
agacagcccgggcucugccu

SEQ ID NO: 1945301 - RNA, 18 nt, Human
agacagcccgggcucugc

SEQ ID NO: 1945302 - RNA, 21 nt, Human
agaccaucccugaaggccccg

SEQ ID NO: 1945303 - RNA, 18 nt, Human
agaccaucccugaaggcc

SEQ ID NO: 1945304 - RNA, 17 nt, Human
agaccaucccugaaggc

SEQ ID NO: 1945305 - RNA, 14 nt, Human
agaccaucccugaa

SEQ ID NO: 1945306 - RNA, 13 nt, Human
agaccaucccuga

SEQ ID NO: 1945307 - RNA, 18 nt, Human
agacgggggcagagaggg

SEQ ID NO: 1945308 - RNA, 19 nt, Human
agacggagucccaccuugg

SEQ ID NO: 1945309 - RNA, 18 nt, Human
agacgggaggccuggccu

SEQ ID NO: 1945310 - RNA, 21 nt, Human
agacuaagaucgguuaacaaa

SEQ ID NO: 1945311 - RNA, 22 nt, Human
agacuaagaucgguuaacaaau

SEQ ID NO: 1945312 - RNA, 15 nt, Human
agacuacuguucagc

SEQ ID NO: 1945313 - RNA, 22 nt, Human
agacuacuguucagcuuuuauu

SEQ ID NO: 1945314 - RNA, 14 nt, Human
aucaucuguaagcu

SEQ ID NO: 1945315 - RNA, 16 nt, Human
aucaucuguaagcugu

SEQ ID NO: 1945316 - RNA, 17 nt, Human
aucaucuguaagcuguu

SEQ ID NO: 1945317 - RNA, 23 nt, Human
aucagcugcuacuacuccuguag

SEQ ID NO: 1945318 - RNA, 13 nt, Human
aucagcugcuacu

SEQ ID NO: 1945319 - RNA, 12 nt, Human
aucagcugcuac

SEQ ID NO: 1945320 - RNA, 21 nt, Human
aucagccugggcaaugugaua

SEQ ID NO: 1945321 - RNA, 20 nt, Human
aucagccugggcaaugugau

SEQ ID NO: 1945322 - RNA, 11 nt, Human
aucagccuggg

SEQ ID NO: 1945323 - RNA, 20 nt, Human
aucagcccaaucccugaucc

SEQ ID NO: 1945324 - RNA, 12 nt, Human
aucaccugcccu

SEQ ID NO: 1945325 - RNA, 13 nt, Human
aucaccugcccug

SEQ ID NO: 1945326 - RNA, 22 nt, Human
auccucauacccacccccaccc

SEQ ID NO: 1945327 - RNA, 19 nt, Human
auccucauacccaccccca

SEQ ID NO: 1945328 - RNA, 18 nt, Human
auccucauacccaccccc

SEQ ID NO: 1945329 - RNA, 15 nt, Human
aucccuacuguaauu

SEQ ID NO: 1945330 - RNA, 14 nt, Human
aucccggcugcccu

SEQ ID NO: 1945331 - RNA, 18 nt, Human
auccacccaccucagccu

SEQ ID NO: 1945332 - RNA, 20 nt, Human
auccacccaccucagccucc

SEQ ID NO: 1945333 - RNA, 16 nt, Human
auccacccauguuauc

SEQ ID NO: 1945334 - RNA, 22 nt, Human
auccuccaggugcacaagcucc

SEQ ID NO: 1945335 - RNA, 19 nt, Human
auccuccaggugcacaagc

SEQ ID NO: 1945336 - RNA, 14 nt, Human
auccuccaggugca

SEQ ID NO: 1945337 - RNA, 13 nt, Human
auccuccaggugc

SEQ ID NO: 1945338 - RNA, 11 nt, Human
auccuccucag

SEQ ID NO: 1945339 - RNA, 23 nt, Human
auccucauacccacccccaccca

SEQ ID NO: 1945340 - RNA, 12 nt, Human
auccucccaggc

SEQ ID NO: 1945341 - RNA, 15 nt, Human
auccuccccuggacu

SEQ ID NO: 1945342 - RNA, 16 nt, Human
auccuccccuggacuc

SEQ ID NO: 1945343 - RNA, 22 nt, Human
auccuccccuggacucccgugu

SEQ ID NO: 1945344 - RNA, 13 nt, Human
aucgaugcagugc

SEQ ID NO: 1945345 - RNA, 12 nt, Human
auccuuuucugu

SEQ ID NO: 1945346 - RNA, 16 nt, Human
auccuuuucuguguuu

SEQ ID NO: 1945347 - RNA, 21 nt, Human
aucgagugccgcaucucacag

SEQ ID NO: 1945348 - RNA, 22 nt, Human
aucgagugccgcaucucacagc

SEQ ID NO: 1945349 - RNA, 14 nt, Human
auccuccucagauc

SEQ ID NO: 1945350 - RNA, 17 nt, Human
auccuuuuagucugcau

SEQ ID NO: 1945351 - RNA, 19 nt, Human
auccuuuuagucugcauau

SEQ ID NO: 1945352 - RNA, 20 nt, Human
aucgcacucuggcagcaccg

SEQ ID NO: 1945353 - RNA, 17 nt, Human
aucgcacucuggcagca

SEQ ID NO: 1945354 - RNA, 14 nt, Human
augagccuggcaag

SEQ ID NO: 1945355 - RNA, 13 nt, Human
augagccuggcaa

SEQ ID NO: 1945356 - RNA, 18 nt, Human
augacucuugacucuugc

SEQ ID NO: 1945357 - RNA, 14 nt, Human
augaccccugccca

SEQ ID NO: 1945358 - RNA, 12 nt, Human
augacccagugg

SEQ ID NO: 1945359 - RNA, 13 nt, Human
augacccccccag

SEQ ID NO: 1945360 - RNA, 16 nt, Human
augacccccccagcuu

SEQ ID NO: 1945361 - RNA, 21 nt, Human
augaagcuuuuaugugaaaca

SEQ ID NO: 1945362 - RNA, 20 nt, Human
augaagcuuuuaugugaaac

SEQ ID NO: 1945363 - RNA, 19 nt, Human
augaagcuuuuaugugaaa

SEQ ID NO: 1945364 - RNA, 18 nt, Human
augaagcuuuuaugugaa

SEQ ID NO: 1945365 - RNA, 19 nt, Human
augacucaggacauccccc

SEQ ID NO: 1945366 - RNA, 16 nt, Human
augacuccagaauuuc

SEQ ID NO: 1945367 - RNA, 12 nt, Human
augacuccagaa

SEQ ID NO: 1945368 - RNA, 17 nt, Human
augacuccagaauuucc

SEQ ID NO: 1945369 - RNA, 18 nt, Human
augaaaagcuuuguuugu

SEQ ID NO: 1945370 - RNA, 23 nt, Human
augaaaagcuuuguuuguucuug

SEQ ID NO: 1945371 - RNA, 15 nt, Human
augaaaauuguguua

SEQ ID NO: 1945372 - RNA, 17 nt, Human
augaaaaaauauauauc

SEQ ID NO: 1945373 - RNA, 14 nt, Human
augaaaaaauauau

SEQ ID NO: 1945374 - RNA, 22 nt, Human
augaaaaaauauauaucaaaua

SEQ ID NO: 1945375 - RNA, 17 nt, Human
aucuucuuuauaauucu

SEQ ID NO: 1945376 - RNA, 17 nt, Human
aucuugaagacuuuucu

SEQ ID NO: 1945377 - RNA, 22 nt, Human
aucucucgugauugauaagaac

SEQ ID NO: 1945378 - RNA, 17 nt, Human
aucucuauuauuggaaa

SEQ ID NO: 1945379 - RNA, 17 nt, Human
aucucuauuccccaccc

SEQ ID NO: 1945380 - RNA, 12 nt, Human
aucugcugucuu

SEQ ID NO: 1945381 - RNA, 13 nt, Human
aucugcugucuuu

SEQ ID NO: 1945382 - RNA, 21 nt, Human
aucugcugucuuuucuuugcc

SEQ ID NO: 1945383 - RNA, 22 nt, Human
aucugcugucuuuucuuugcca

SEQ ID NO: 1945384 - RNA, 16 nt, Human
aucugcugcagagcag

SEQ ID NO: 1945385 - RNA, 17 nt, Human
aucugcugcagagcagu

SEQ ID NO: 1945386 - RNA, 14 nt, Human
aucuuaucucagau

SEQ ID NO: 1945387 - RNA, 18 nt, Human
aucuuaucucagauauuu

SEQ ID NO: 1945388 - RNA, 19 nt, Human
aucuuaucucagauauuug

SEQ ID NO: 1945389 - RNA, 20 nt, Human
aucuuaucucagauauuugc

SEQ ID NO: 1945390 - RNA, 21 nt, Human
aucuuaucucagauauuugca

SEQ ID NO: 1945391 - RNA, 13 nt, Human
aucuuauuaaagu

SEQ ID NO: 1945392 - RNA, 19 nt, Human
aucuuccaacucaaacucu

SEQ ID NO: 1945393 - RNA, 23 nt, Human
aucuucaucugagagaggcuaaa

SEQ ID NO: 1945394 - RNA, 21 nt, Human
aucuggaauugguuuagccca

SEQ ID NO: 1945395 - RNA, 13 nt, Human
aucuggaagagcu

SEQ ID NO: 1945396 - RNA, 21 nt, Human
aucuggaagagcuaggcaggg

SEQ ID NO: 1945397 - RNA, 15 nt, Human
aucugggccagaauu

SEQ ID NO: 1945398 - RNA, 19 nt, Human
aucuggaccccaucuguga

SEQ ID NO: 1945399 - RNA, 21 nt, Human
aucuggaccccaucugugaau

SEQ ID NO: 1945400 - RNA, 22 nt, Human
aucuuauaauuuaaaauaugcu

SEQ ID NO: 1945401 - RNA, 17 nt, Human
aucugggccagaauuuc

SEQ ID NO: 1945402 - RNA, 16 nt, Human
augugggggucugugu

SEQ ID NO: 1945403 - RNA, 17 nt, Human
augugggggucugugug

SEQ ID NO: 1945404 - RNA, 18 nt, Human
augugggggucugugugu

SEQ ID NO: 1945405 - RNA, 19 nt, Human
auguggucguuagagacag

SEQ ID NO: 1945406 - RNA, 23 nt, Human
auguggucguuagagacagagcg

SEQ ID NO: 1945407 - RNA, 21 nt, Human
augugguuaauuuugcauauc

SEQ ID NO: 1945408 - RNA, 14 nt, Human
auguguaaguauuc

SEQ ID NO: 1945409 - RNA, 13 nt, Human
auuaaauucuugc

SEQ ID NO: 1945410 - RNA, 11 nt, Human
auuaaauuaug

SEQ ID NO: 1945411 - RNA, 16 nt, Human
auuaaaugcccagccc

SEQ ID NO: 1945412 - RNA, 15 nt, Human
auuaaaugcccagcc

SEQ ID NO: 1945413 - RNA, 14 nt, Human
auuaaaugcccagc

SEQ ID NO: 1945414 - RNA, 16 nt, Human
auuaaaguuucaaaaa

SEQ ID NO: 1945415 - RNA, 18 nt, Human
auuaaaguuucaaaaauc

SEQ ID NO: 1945416 - RNA, 19 nt, Human
auuaaaguuucaaaaaucu

SEQ ID NO: 1945417 - RNA, 20 nt, Human
auuaaaguuucaaaaaucug

SEQ ID NO: 1945418 - RNA, 21 nt, Human
auuaaaguuucaaaaaucuga

SEQ ID NO: 1945419 - RNA, 23 nt, Human
auuaaaguuucaaaaaucugaag

SEQ ID NO: 1945420 - RNA, 16 nt, Human
auguuuuaagaggcag

SEQ ID NO: 1945421 - RNA, 18 nt, Human
auguuuuaagaggcaggg

SEQ ID NO: 1945422 - RNA, 12 nt, Human
auuaaaguuuca

SEQ ID NO: 1945423 - RNA, 13 nt, Human
auuaaaguuucaa

SEQ ID NO: 1945424 - RNA, 14 nt, Human
auuaaaguuucaaa

SEQ ID NO: 1945425 - RNA, 15 nt, Human
auuaaaguuucaaaa

SEQ ID NO: 1945426 - RNA, 22 nt, Human
auguucugacccugcuucaaau

SEQ ID NO: 1945427 - RNA, 20 nt, Human
auguucuuaguggauguucu

SEQ ID NO: 1945428 - RNA, 15 nt, Human
auguucuuaauucuu

SEQ ID NO: 1945429 - RNA, 20 nt, Human
auguucuuucacccuuuucu

SEQ ID NO: 1945430 - RNA, 14 nt, Human
auguucuuccaguu

SEQ ID NO: 1945431 - RNA, 13 nt, Human
auguuucuuugau

SEQ ID NO: 1945432 - RNA, 21 nt, Human
auguuucuuugaucaugaaua

SEQ ID NO: 1945433 - RNA, 11 nt, Human
auguucuucca

SEQ ID NO: 1945434 - RNA, 13 nt, Human
auguucuuccagu

SEQ ID NO: 1945435 - RNA, 18 nt, Human
auguuucuuuguaaugaa

SEQ ID NO: 1945436 - RNA, 18 nt, Human
auguucucugaggacacu

SEQ ID NO: 1945437 - RNA, 19 nt, Human
augugucugccacauuaac

SEQ ID NO: 1945438 - RNA, 12 nt, Human
augugucuuuau

SEQ ID NO: 1945439 - RNA, 15 nt, Human
auguguccauuuccu

SEQ ID NO: 1945440 - RNA, 17 nt, Human
auguguccucagggagc

SEQ ID NO: 1945441 - RNA, 18 nt, Human
auguguccucagggagca

SEQ ID NO: 1945442 - RNA, 12 nt, Human
auguguauguga

SEQ ID NO: 1945443 - RNA, 19 nt, Human
auguguaugugaguauucu

SEQ ID NO: 1945444 - RNA, 19 nt, Human
auguguaauuuuucuguau

SEQ ID NO: 1945445 - RNA, 20 nt, Human
auguguaauuuuucuguaua

SEQ ID NO: 1945446 - RNA, 12 nt, Human
auguguaauuuu

SEQ ID NO: 1945447 - RNA, 15 nt, Human
auguguaauuuuucu

SEQ ID NO: 1945448 - RNA, 18 nt, Human
auguguaauuuuucugua

SEQ ID NO: 1945449 - RNA, 22 nt, Human
auguguaauuuuucuguauaga

SEQ ID NO: 1945450 - RNA, 15 nt, Human
augucacaggcaggu

SEQ ID NO: 1945451 - RNA, 14 nt, Human
augucacaggcagg

SEQ ID NO: 1945452 - RNA, 16 nt, Human
augucacaggcagguc

SEQ ID NO: 1945453 - RNA, 17 nt, Human
augucacaggcaggucc

SEQ ID NO: 1945454 - RNA, 16 nt, Human
augucaauaacaguau

SEQ ID NO: 1945455 - RNA, 13 nt, Human
augucagcaguug

SEQ ID NO: 1945456 - RNA, 16 nt, Human
augucagcaguugcug

SEQ ID NO: 1945457 - RNA, 19 nt, Human
augucaaauauuuagaugu

SEQ ID NO: 1945458 - RNA, 23 nt, Human
augucaaauauuuagauguaauu

SEQ ID NO: 1945459 - RNA, 14 nt, Human
augucaaaugugaa

SEQ ID NO: 1945460 - RNA, 17 nt, Human
auguacauguacugauu

SEQ ID NO: 1945461 - RNA, 23 nt, Human
auggugacuuuugaaaagaggug

SEQ ID NO: 1945462 - RNA, 16 nt, Human
auggugaacugucauu

SEQ ID NO: 1945463 - RNA, 18 nt, Human
auggucuuauauuuacaa

SEQ ID NO: 1945464 - RNA, 14 nt, Human
auggucuaauguuu

SEQ ID NO: 1945465 - RNA, 16 nt, Human
auggucuaauguuuaa

SEQ ID NO: 1945466 - RNA, 17 nt, Human
auguaagcucuacugag

SEQ ID NO: 1945467 - RNA, 16 nt, Human
auguaaguaaacgguc

SEQ ID NO: 1945468 - RNA, 13 nt, Human
auguaagguauau

SEQ ID NO: 1945469 - RNA, 22 nt, Human
auguaagguauaucauucuaaa

SEQ ID NO: 1945470 - RNA, 20 nt, Human
augucagcaguugcugguaa

SEQ ID NO: 1945471 - RNA, 21 nt, Human
augccuuuguacuuuagggaa

SEQ ID NO: 1945472 - RNA, 16 nt, Human
augaugugugaaaacu

SEQ ID NO: 1945473 - RNA, 15 nt, Human
augcaauccuuacaa

SEQ ID NO: 1945474 - RNA, 16 nt, Human
augcaauccuuacaaa

SEQ ID NO: 1945475 - RNA, 17 nt, Human
augcaauccuuacaaau

SEQ ID NO: 1945476 - RNA, 18 nt, Human
augcaauccuuacaaaug

SEQ ID NO: 1945477 - RNA, 19 nt, Human
augcaauccuuacaaauga

SEQ ID NO: 1945478 - RNA, 21 nt, Human
augcaauccuuacaaaugauu

SEQ ID NO: 1945479 - RNA, 23 nt, Human
augauguauguugaagccuuugu

SEQ ID NO: 1945480 - RNA, 18 nt, Human
augaugugccugcuucag

SEQ ID NO: 1945481 - RNA, 14 nt, Human
augaugugccugcu

SEQ ID NO: 1945482 - RNA, 17 nt, Human
augcacacauuuuuuaa

SEQ ID NO: 1945483 - RNA, 19 nt, Human
augcacacauuuuuuaaau

SEQ ID NO: 1945484 - RNA, 22 nt, Human
augcacacauuuuuuaaaugca

SEQ ID NO: 1945485 - RNA, 14 nt, Human
augcacagcuaaca

SEQ ID NO: 1945486 - RNA, 23 nt, Human
augcacacauuuuuuaaaugcac

SEQ ID NO: 1945487 - RNA, 21 nt, Human
augcacagcuaacauggaagu

SEQ ID NO: 1945488 - RNA, 17 nt, Human
augccugggcagaagga

SEQ ID NO: 1945489 - RNA, 17 nt, Human
augccuggugagcauua

SEQ ID NO: 1945490 - RNA, 23 nt, Human
augccuggauggggcugcaccgg

SEQ ID NO: 1945491 - RNA, 21 nt, Human
augccuggauggggcugcacc

SEQ ID NO: 1945492 - RNA, 15 nt, Human
augccugguggcagc

SEQ ID NO: 1945493 - RNA, 16 nt, Human
augccugguggcagcu

SEQ ID NO: 1945494 - RNA, 17 nt, Human
augccugguggcagcug

SEQ ID NO: 1945495 - RNA, 10 nt, Human
augcauuuga

SEQ ID NO: 1945496 - RNA, 12 nt, Human
augcauuugaaa

SEQ ID NO: 1945497 - RNA, 18 nt, Human
augcauuugaaaauuuug

SEQ ID NO: 1945498 - RNA, 23 nt, Human
augcaugaaguaauaugcacaca

SEQ ID NO: 1945499 - RNA, 20 nt, Human
augcaugaaguaauaugcac

SEQ ID NO: 1945500 - RNA, 20 nt, Human
augcaugauugcagaauugu

SEQ ID NO: 1945501 - RNA, 15 nt, Human
augcaugcuuuccau

SEQ ID NO: 1945502 - RNA, 16 nt, Human
augcaugcuuuccaua

SEQ ID NO: 1945503 - RNA, 17 nt, Human
augcaugcuuuccauau

SEQ ID NO: 1945504 - RNA, 19 nt, Human
augcaugcuuuccauauuu

SEQ ID NO: 1945505 - RNA, 20 nt, Human
augcaugcuuuccauauuuu

SEQ ID NO: 1945506 - RNA, 21 nt, Human
augcaugcuuuccauauuuuu

SEQ ID NO: 1945507 - RNA, 14 nt, Human
augcuucuuuaaaa

SEQ ID NO: 1945508 - RNA, 19 nt, Human
augcuugcauauauuucau

SEQ ID NO: 1945509 - RNA, 12 nt, Human
augcuucuuuaa

SEQ ID NO: 1945510 - RNA, 14 nt, Human
augcuuuucucaaa

SEQ ID NO: 1945511 - RNA, 15 nt, Human
augcuuugugaacaa

SEQ ID NO: 1945512 - RNA, 20 nt, Human
auggaaaugggcagagcaga

SEQ ID NO: 1945513 - RNA, 19 nt, Human
auggaaaugggcagagcag

SEQ ID NO: 1945514 - RNA, 13 nt, Human
auggaaauguuua

SEQ ID NO: 1945515 - RNA, 18 nt, Human
auggaaaugcaaacuggg

SEQ ID NO: 1945516 - RNA, 20 nt, Human
auggaucgauauuaauguau

SEQ ID NO: 1945517 - RNA, 16 nt, Human
auggaugaacugaaag

SEQ ID NO: 1945518 - RNA, 18 nt, Human
auggagcuauuuuaaacc

SEQ ID NO: 1945519 - RNA, 23 nt, Human
auggcugccaaugggagcucaug

SEQ ID NO: 1945520 - RNA, 17 nt, Human
auggcugcauaguauuc

SEQ ID NO: 1945521 - RNA, 15 nt, Human
augggaaugaauguc

SEQ ID NO: 1945522 - RNA, 21 nt, Human
augggaaugaaugucagugug

SEQ ID NO: 1945523 - RNA, 22 nt, Human
augggaauauaauauugucucu

SEQ ID NO: 1945524 - RNA, 20 nt, Human
aguccagaaacuguucccac

SEQ ID NO: 1945525 - RNA, 13 nt, Human
agugauccuccca

SEQ ID NO: 1945526 - RNA, 20 nt, Human
agugauauucuuuguuaauu

SEQ ID NO: 1945527 - RNA, 12 nt, Human
agugauauucuu

SEQ ID NO: 1945528 - RNA, 15 nt, Human
agugauauucuuugu

SEQ ID NO: 1945529 - RNA, 17 nt, Human
agugauauucuuuguua

SEQ ID NO: 1945530 - RNA, 18 nt, Human
agugauauucuuuguuaa

SEQ ID NO: 1945531 - RNA, 19 nt, Human
agugauauucuuuguuaau

SEQ ID NO: 1945532 - RNA, 15 nt, Human
agucauucagauaug

SEQ ID NO: 1945533 - RNA, 20 nt, Human
agucauucagauaugauuca

SEQ ID NO: 1945534 - RNA, 23 nt, Human
agucauucagauaugauucaaau

SEQ ID NO: 1945535 - RNA, 18 nt, Human
agucauuauguuaauauu

SEQ ID NO: 1945536 - RNA, 12 nt, Human
agucauuauguu

SEQ ID NO: 1945537 - RNA, 23 nt, Human
aguccaagggguccccuccagga

SEQ ID NO: 1945538 - RNA, 21 nt, Human
aguccaagggguccccuccag

SEQ ID NO: 1945539 - RNA, 22 nt, Human
aguccaagggguccccuccagg

SEQ ID NO: 1945540 - RNA, 20 nt, Human
agucaagugaaaaaggagga

SEQ ID NO: 1945541 - RNA, 19 nt, Human
agucaagacgaacauguag

SEQ ID NO: 1945542 - RNA, 16 nt, Human
agucaagugaaaaagg

SEQ ID NO: 1945543 - RNA, 18 nt, Human
agucaaggguaggguggg

SEQ ID NO: 1945544 - RNA, 20 nt, Human
aguuguaucagcacgugugg

SEQ ID NO: 1945545 - RNA, 23 nt, Human
aguuguaucagcacguguggccu

SEQ ID NO: 1945546 - RNA, 21 nt, Human
aguuguaggcgaaucauuugu

SEQ ID NO: 1945547 - RNA, 22 nt, Human
aguuguaggcgaaucauuuguu

SEQ ID NO: 1945548 - RNA, 18 nt, Human
aguuguaugaucugugcc

SEQ ID NO: 1945549 - RNA, 15 nt, Human
aguuguaugaucugu

SEQ ID NO: 1945550 - RNA, 17 nt, Human
aguuguaugaucugugc

SEQ ID NO: 1945551 - RNA, 15 nt, Human
aguugaauuuuacau

SEQ ID NO: 1945552 - RNA, 18 nt, Human
aguuguaccgcaauguga

SEQ ID NO: 1945553 - RNA, 19 nt, Human
aguuguaccgcaaugugac

SEQ ID NO: 1945554 - RNA, 13 nt, Human
aguuguacuuuaa

SEQ ID NO: 1945555 - RNA, 19 nt, Human
aguuguacuuuaaaaauuu

SEQ ID NO: 1945556 - RNA, 20 nt, Human
aguuguacuuuaaaaauuua

SEQ ID NO: 1945557 - RNA, 23 nt, Human
aguuguacuuuaaaaauuuacua

SEQ ID NO: 1945558 - RNA, 20 nt, Human
aguuacauauguauacaugu

SEQ ID NO: 1945559 - RNA, 21 nt, Human
aguuacauauguauacaugug

SEQ ID NO: 1945560 - RNA, 18 nt, Human
aguuacagacaaagcgug

SEQ ID NO: 1945561 - RNA, 16 nt, Human
aguuguuacauuuuua

SEQ ID NO: 1945562 - RNA, 13 nt, Human
aguuguuacauuu

SEQ ID NO: 1945563 - RNA, 15 nt, Human
aguuguuacauuuuu

SEQ ID NO: 1945564 - RNA, 13 nt, Human
agugugaauacug

SEQ ID NO: 1945565 - RNA, 14 nt, Human
agugugaauacugc

SEQ ID NO: 1945566 - RNA, 16 nt, Human
agugugaauacugcuu

SEQ ID NO: 1945567 - RNA, 23 nt, Human
agugugacaaggauugcuacugu

SEQ ID NO: 1945568 - RNA, 16 nt, Human
agugucuuuccacucc

SEQ ID NO: 1945569 - RNA, 18 nt, Human
agugauuaccagggacug

SEQ ID NO: 1945570 - RNA, 15 nt, Human
agugauuaccaggga

SEQ ID NO: 1945571 - RNA, 18 nt, Human
agugauucucaugccuca

SEQ ID NO: 1945572 - RNA, 19 nt, Human
agugauucucaugccucag

SEQ ID NO: 1945573 - RNA, 16 nt, Human
auaacagccgcuccag

SEQ ID NO: 1945574 - RNA, 17 nt, Human
auaacagccgcuccaga

SEQ ID NO: 1945575 - RNA, 19 nt, Human
auaacagggauugauuuua

SEQ ID NO: 1945576 - RNA, 20 nt, Human
auaacagggauugauuuuaa

SEQ ID NO: 1945577 - RNA, 21 nt, Human
auaacagggauugauuuuaaa

SEQ ID NO: 1945578 - RNA, 22 nt, Human
auaacagggauugauuuuaaaa

SEQ ID NO: 1945579 - RNA, 15 nt, Human
auaacaguaguguua

SEQ ID NO: 1945580 - RNA, 17 nt, Human
auaacacugugaagagc

SEQ ID NO: 1945581 - RNA, 16 nt, Human
auaacacugugaagag

SEQ ID NO: 1945582 - RNA, 15 nt, Human
auaaguggugugugu

SEQ ID NO: 1945583 - RNA, 16 nt, Human
auaaguauuuggaauu

SEQ ID NO: 1945584 - RNA, 14 nt, Human
auaaguauuuggaa

SEQ ID NO: 1945585 - RNA, 19 nt, Human
auaaguauuuaauucaugu

SEQ ID NO: 1945586 - RNA, 19 nt, Human
auaaugugaaacuggauua

SEQ ID NO: 1945587 - RNA, 21 nt, Human
auaaugugaaacuggauuaaa

SEQ ID NO: 1945588 - RNA, 20 nt, Human
auaauuaaccaagguagaau

SEQ ID NO: 1945589 - RNA, 22 nt, Human
auaaguguguguuuuucauaaa

SEQ ID NO: 1945590 - RNA, 19 nt, Human
auaaguguguguuuuucau

SEQ ID NO: 1945591 - RNA, 18 nt, Human
auaaugugaaacuggauu

SEQ ID NO: 1945592 - RNA, 17 nt, Human
auacuuaaauguuaugu

SEQ ID NO: 1945593 - RNA, 20 nt, Human
auacuuaaauguuauguaua

SEQ ID NO: 1945594 - RNA, 21 nt, Human
auacuuaaauguuauguauau

SEQ ID NO: 1945595 - RNA, 14 nt, Human
auaauuacuauguc

SEQ ID NO: 1945596 - RNA, 21 nt, Human
auaauuaaccaagguagaaug

SEQ ID NO: 1945597 - RNA, 22 nt, Human
auaauuacagugccuaaaauaa

SEQ ID NO: 1945598 - RNA, 14 nt, Human
auacacaaaaucaa

SEQ ID NO: 1945599 - RNA, 16 nt, Human
auacacaaaaucaaau

SEQ ID NO: 1945600 - RNA, 22 nt, Human
auacccccugcaaagcccagcu

SEQ ID NO: 1945601 - RNA, 18 nt, Human
auacacaaaaucaaauaa

SEQ ID NO: 1945602 - RNA, 12 nt, Human
auaccugucccc

SEQ ID NO: 1945603 - RNA, 13 nt, Human
auaccuguccccc

SEQ ID NO: 1945604 - RNA, 18 nt, Human
auauagcauuuaugguaa

SEQ ID NO: 1945605 - RNA, 20 nt, Human
auauagcauuuaugguaauc

SEQ ID NO: 1945606 - RNA, 23 nt, Human
auauacauuuuuagccuguguca

SEQ ID NO: 1945607 - RNA, 15 nt, Human
auauacauguuuaug

SEQ ID NO: 1945608 - RNA, 16 nt, Human
auauacauguuuaugu

SEQ ID NO: 1945609 - RNA, 18 nt, Human
auauacauguuuauguaa

SEQ ID NO: 1945610 - RNA, 21 nt, Human
auauacauguuuauguaaaca

SEQ ID NO: 1945611 - RNA, 16 nt, Human
auauaggaacuuaaau

SEQ ID NO: 1945612 - RNA, 21 nt, Human
auacuucaugaaauccugggu

SEQ ID NO: 1945613 - RNA, 16 nt, Human
auacuugaaaauuaac

SEQ ID NO: 1945614 - RNA, 15 nt, Human
auacuugaaaauuaa

SEQ ID NO: 1945615 - RNA, 15 nt, Human
auaguaugguggcug

SEQ ID NO: 1945616 - RNA, 15 nt, Human
auauaagugauugcu

SEQ ID NO: 1945617 - RNA, 16 nt, Human
auaguaugguggcugg

SEQ ID NO: 1945618 - RNA, 15 nt, Human
auauaaguguguguu

SEQ ID NO: 1945619 - RNA, 16 nt, Human
auauuuauaaaaauaa

SEQ ID NO: 1945620 - RNA, 18 nt, Human
auauuuaguguucauaaa

SEQ ID NO: 1945621 - RNA, 13 nt, Human
auauucaggaagc

SEQ ID NO: 1945622 - RNA, 22 nt, Human
auauuagacuucuguuuucaau

SEQ ID NO: 1945623 - RNA, 19 nt, Human
auauuagcgacaacagauu

SEQ ID NO: 1945624 - RNA, 22 nt, Human
auauuagcgacaacagauugga

SEQ ID NO: 1945625 - RNA, 16 nt, Human
auauucaggaagcuca

SEQ ID NO: 1945626 - RNA, 14 nt, Human
auauucaggaagcu

SEQ ID NO: 1945627 - RNA, 17 nt, Human
auauucaggaagcucag

SEQ ID NO: 1945628 - RNA, 22 nt, Human
auauuuagauguaauuuugugu

SEQ ID NO: 1945629 - RNA, 20 nt, Human
auauuuagauguaauuuugu

SEQ ID NO: 1945630 - RNA, 15 nt, Human
auauuuauuaaauuu

SEQ ID NO: 1945631 - RNA, 13 nt, Human
auauuuauuuuua

SEQ ID NO: 1945632 - RNA, 17 nt, Human
auauuucaaguacacug

SEQ ID NO: 1945633 - RNA, 18 nt, Human
auauuucaaguacacuga

SEQ ID NO: 1945634 - RNA, 20 nt, Human
auauuucagaaauacagaua

SEQ ID NO: 1945635 - RNA, 19 nt, Human
auauuucaaguacacugaa

SEQ ID NO: 1945636 - RNA, 12 nt, Human
auauuucagaaa

SEQ ID NO: 1945637 - RNA, 14 nt, Human
auauuucagaaaua

SEQ ID NO: 1945638 - RNA, 15 nt, Human
auauuucagaaauac

SEQ ID NO: 1945639 - RNA, 19 nt, Human
auaucccuuggacauuuua

SEQ ID NO: 1945640 - RNA, 18 nt, Human
auauccccuauuuaacag

SEQ ID NO: 1945641 - RNA, 17 nt, Human
auauccauagugacuuu

SEQ ID NO: 1945642 - RNA, 21 nt, Human
auauccacuuguccaugugaa

SEQ ID NO: 1945643 - RNA, 19 nt, Human
auaucaccaggacuguuac

SEQ ID NO: 1945644 - RNA, 15 nt, Human
auaucaauuuaaaaa

SEQ ID NO: 1945645 - RNA, 22 nt, Human
auaugccugggcagaaggaaga

SEQ ID NO: 1945646 - RNA, 18 nt, Human
auaugcauauauauaugu

SEQ ID NO: 1945647 - RNA, 19 nt, Human
auaugcauauauauaugug

SEQ ID NO: 1945648 - RNA, 22 nt, Human
auaugcauauauauaugugugu

SEQ ID NO: 1945649 - RNA, 14 nt, Human
auaugccugcucuu

SEQ ID NO: 1945650 - RNA, 15 nt, Human
auaugccugcucuuu

SEQ ID NO: 1945651 - RNA, 15 nt, Human
auaugcauauauaua

SEQ ID NO: 1945652 - RNA, 20 nt, Human
auauccucugcuuaaaaacu

SEQ ID NO: 1945653 - RNA, 19 nt, Human
auaugcuuauacacuuaca

SEQ ID NO: 1945654 - RNA, 16 nt, Human
auaugcuuauacacuu

SEQ ID NO: 1945655 - RNA, 14 nt, Human
auaugcuuauacac

SEQ ID NO: 1945656 - RNA, 13 nt, Human
auaugcuucuuua

SEQ ID NO: 1945657 - RNA, 15 nt, Human
auaugcuucuuuaaa

SEQ ID NO: 1945658 - RNA, 19 nt, Human
auaugcuuguaacuaaaau

SEQ ID NO: 1945659 - RNA, 15 nt, Human
auauuagacuucugu

SEQ ID NO: 1945660 - RNA, 16 nt, Human
auauuagacuucuguu

SEQ ID NO: 1945661 - RNA, 20 nt, Human
auauuagacuucuguuuuca

SEQ ID NO: 1945662 - RNA, 21 nt, Human
auauuagacuucuguuuucaa

SEQ ID NO: 1945663 - RNA, 20 nt, Human
accccucaacaccucugcac

SEQ ID NO: 1945664 - RNA, 14 nt, Human
accaucaugucugg

SEQ ID NO: 1945665 - RNA, 15 nt, Human
acccaagcuccaacc

SEQ ID NO: 1945666 - RNA, 22 nt, Human
accaucccugaaggccccgccc

SEQ ID NO: 1945667 - RNA, 21 nt, Human
accaucccugaaggccccgcc

SEQ ID NO: 1945668 - RNA, 18 nt, Human
accaucccugaaggcccc

SEQ ID NO: 1945669 - RNA, 16 nt, Human
accaucaugucuggcu

SEQ ID NO: 1945670 - RNA, 17 nt, Human
accaucaugucuggcua

SEQ ID NO: 1945671 - RNA, 16 nt, Human
acccaugcugcccugu

SEQ ID NO: 1945672 - RNA, 13 nt, Human
acccaugggcagg

SEQ ID NO: 1945673 - RNA, 14 nt, Human
acccaugggcagga

SEQ ID NO: 1945674 - RNA, 19 nt, Human
acccaugcugcccugugag

SEQ ID NO: 1945675 - RNA, 22 nt, Human
acccaugaaagaaaacuuuuau

SEQ ID NO: 1945676 - RNA, 18 nt, Human
acccaugcugcccuguga

SEQ ID NO: 1945677 - RNA, 17 nt, Human
acccaugcugcccugug

SEQ ID NO: 1945678 - RNA, 15 nt, Human
acccacaagaaauga

SEQ ID NO: 1945679 - RNA, 16 nt, Human
acccaugaaagaaaac

SEQ ID NO: 1945680 - RNA, 16 nt, Human
acccaagggccuggcc

SEQ ID NO: 1945681 - RNA, 13 nt, Human
acccaagggccug

SEQ ID NO: 1945682 - RNA, 15 nt, Human
accccggccaccugc

SEQ ID NO: 1945683 - RNA, 22 nt, Human
accccuaaagagauacuuugau

SEQ ID NO: 1945684 - RNA, 22 nt, Human
accccgcaagcaccauccccuc

SEQ ID NO: 1945685 - RNA, 18 nt, Human
accccgaccaccugccca

SEQ ID NO: 1945686 - RNA, 15 nt, Human
accaacugucacugu

SEQ ID NO: 1945687 - RNA, 17 nt, Human
acauuugguaauguuuu

SEQ ID NO: 1945688 - RNA, 19 nt, Human
acauuugguaauguuuuua

SEQ ID NO: 1945689 - RNA, 14 nt, Human
acauuugguaaugu

SEQ ID NO: 1945690 - RNA, 18 nt, Human
accagcagucugccugga

SEQ ID NO: 1945691 - RNA, 17 nt, Human
accagcagccuggaccc

SEQ ID NO: 1945692 - RNA, 14 nt, Human
accagcagccugga

SEQ ID NO: 1945693 - RNA, 13 nt, Human
accagcagccugg

SEQ ID NO: 1945694 - RNA, 15 nt, Human
accacguuucuaaag

SEQ ID NO: 1945695 - RNA, 19 nt, Human
accacguuucuaaaggcua

SEQ ID NO: 1945696 - RNA, 14 nt, Human
accacuacauucug

SEQ ID NO: 1945697 - RNA, 19 nt, Human
accaagccuggucagccca

SEQ ID NO: 1945698 - RNA, 20 nt, Human
accaagccuggucagcccaa

SEQ ID NO: 1945699 - RNA, 12 nt, Human
accaacuuucaa

SEQ ID NO: 1945700 - RNA, 13 nt, Human
accaacuuucaag

SEQ ID NO: 1945701 - RNA, 20 nt, Human
accaacugugaugucacuga

SEQ ID NO: 1945702 - RNA, 14 nt, Human
accaacuuucaaga

SEQ ID NO: 1945703 - RNA, 15 nt, Human
accaacuuucaagaa

SEQ ID NO: 1945704 - RNA, 20 nt, Human
accaacuuucaagaacuugu

SEQ ID NO: 1945705 - RNA, 20 nt, Human
accacgcccggcuaauuuuu

SEQ ID NO: 1945706 - RNA, 14 nt, Human
accacgcccggcua

SEQ ID NO: 1945707 - RNA, 13 nt, Human
acauguuacaaca

SEQ ID NO: 1945708 - RNA, 21 nt, Human
acauguuuuucuucucccuca

SEQ ID NO: 1945709 - RNA, 23 nt, Human
acaugcacagcuaacauggaagu

SEQ ID NO: 1945710 - RNA, 15 nt, Human
acaugcacacucaug

SEQ ID NO: 1945711 - RNA, 20 nt, Human
acaugcacagcuaacaugga

SEQ ID NO: 1945712 - RNA, 19 nt, Human
acaugcaaggucauuuuuu

SEQ ID NO: 1945713 - RNA, 14 nt, Human
acauguuuauguaa

SEQ ID NO: 1945714 - RNA, 15 nt, Human
acagguuugggaccc

SEQ ID NO: 1945715 - RNA, 18 nt, Human
acagguuugggaccccug

SEQ ID NO: 1945716 - RNA, 18 nt, Human
acagguuuuaaaagccuu

SEQ ID NO: 1945717 - RNA, 11 nt, Human
acauaaacauc

SEQ ID NO: 1945718 - RNA, 12 nt, Human
acauaaacauca

SEQ ID NO: 1945719 - RNA, 23 nt, Human
acauaaacaagaccacguuucua

SEQ ID NO: 1945720 - RNA, 20 nt, Human
acaucagcacgauuucuguu

SEQ ID NO: 1945721 - RNA, 21 nt, Human
acaucagcacgauuucuguuu

SEQ ID NO: 1945722 - RNA, 22 nt, Human
acaucagcacgauuucuguuua

SEQ ID NO: 1945723 - RNA, 19 nt, Human
acaucagcacgauuucugu

SEQ ID NO: 1945724 - RNA, 15 nt, Human
acauccacagucucc

SEQ ID NO: 1945725 - RNA, 19 nt, Human
acauccacagucuccccca

SEQ ID NO: 1945726 - RNA, 13 nt, Human
acauccacucucu

SEQ ID NO: 1945727 - RNA, 19 nt, Human
acauccacucucucuuguu

SEQ ID NO: 1945728 - RNA, 22 nt, Human
acauccacucucucuuguucuu

SEQ ID NO: 1945729 - RNA, 20 nt, Human
acaucccaccccauccucca

SEQ ID NO: 1945730 - RNA, 21 nt, Human
acaucccaccccauccuccag

SEQ ID NO: 1945731 - RNA, 22 nt, Human
acauccugucaucugagaauga

SEQ ID NO: 1945732 - RNA, 23 nt, Human
acauccugucaucugagaaugaa

SEQ ID NO: 1945733 - RNA, 12 nt, Human
acagcuccuucu

SEQ ID NO: 1945734 - RNA, 13 nt, Human
acagcuccuucug

SEQ ID NO: 1945735 - RNA, 14 nt, Human
acagcuccuucugu

SEQ ID NO: 1945736 - RNA, 23 nt, Human
acagcugccugggaucccucauc

SEQ ID NO: 1945737 - RNA, 14 nt, Human
acagcugccuggga

SEQ ID NO: 1945738 - RNA, 20 nt, Human
acagcucugcauacucauua

SEQ ID NO: 1945739 - RNA, 15 nt, Human
acagcuccuuuucca

SEQ ID NO: 1945740 - RNA, 20 nt, Human
acagcuccuuuuccagagca

SEQ ID NO: 1945741 - RNA, 21 nt, Human
acagcuccuuuuccagagcau

SEQ ID NO: 1945742 - RNA, 15 nt, Human
acagcuccuucuguc

SEQ ID NO: 1945743 - RNA, 15 nt, Human
acagguaccaguucu

SEQ ID NO: 1945744 - RNA, 17 nt, Human
acagguaccaguucuuu

SEQ ID NO: 1945745 - RNA, 14 nt, Human
acagguacuuuguc

SEQ ID NO: 1945746 - RNA, 23 nt, Human
acagggucucuagugcugugaaa

SEQ ID NO: 1945747 - RNA, 21 nt, Human
acagggucucuagugcuguga

SEQ ID NO: 1945748 - RNA, 19 nt, Human
acagggucucuagugcugu

SEQ ID NO: 1945749 - RNA, 15 nt, Human
acagguacuuugucu

SEQ ID NO: 1945750 - RNA, 20 nt, Human
acaggugugaaccaccacac

SEQ ID NO: 1945751 - RNA, 23 nt, Human
acaggugugaaccaccacaccca

SEQ ID NO: 1945752 - RNA, 22 nt, Human
acaggugugagccaccacgccc

SEQ ID NO: 1945753 - RNA, 21 nt, Human
acaggugugagccaccacgcc

SEQ ID NO: 1945754 - RNA, 15 nt, Human
acaggggcaggagga

SEQ ID NO: 1945755 - RNA, 16 nt, Human
acagggggccagaaca

SEQ ID NO: 1945756 - RNA, 21 nt, Human
acagggguuccuucugggcau

SEQ ID NO: 1945757 - RNA, 12 nt, Human
acagggguuccu

SEQ ID NO: 1945758 - RNA, 13 nt, Human
acagggguuccuu

SEQ ID NO: 1945759 - RNA, 16 nt, Human
acagggguuccuucug

SEQ ID NO: 1945760 - RNA, 19 nt, Human
acaggcaagcaccuccugc

SEQ ID NO: 1945761 - RNA, 21 nt, Human
acagcugcucaauaaaguaca

SEQ ID NO: 1945762 - RNA, 18 nt, Human
acaggcaagcaccuccug

SEQ ID NO: 1945763 - RNA, 15 nt, Human
acaggcaagcaccuc

SEQ ID NO: 1945764 - RNA, 16 nt, Human
acaggcaagcaccucc

SEQ ID NO: 1945765 - RNA, 15 nt, Human
acagccaugauucuu

SEQ ID NO: 1945766 - RNA, 20 nt, Human
acagccauaggcccuuucag

SEQ ID NO: 1945767 - RNA, 23 nt, Human
acagcauuuguguguuacaaugu

SEQ ID NO: 1945768 - RNA, 12 nt, Human
acagccacucag

SEQ ID NO: 1945769 - RNA, 19 nt, Human
acagccacggccaggccag

SEQ ID NO: 1945770 - RNA, 17 nt, Human
acagcauuuguguguua

SEQ ID NO: 1945771 - RNA, 20 nt, Human
acagccagaacucugugucc

SEQ ID NO: 1945772 - RNA, 14 nt, Human
acagccacucagaa

SEQ ID NO: 1945773 - RNA, 16 nt, Human
acagaagugacugaug

SEQ ID NO: 1945774 - RNA, 15 nt, Human
acagaguaaucuugu

SEQ ID NO: 1945775 - RNA, 22 nt, Human
acagaggggguggccucccaac

SEQ ID NO: 1945776 - RNA, 12 nt, Human
acagagucucac

SEQ ID NO: 1945777 - RNA, 14 nt, Human
acagagucucacug

SEQ ID NO: 1945778 - RNA, 17 nt, Human
acagagucucacuguug

SEQ ID NO: 1945779 - RNA, 19 nt, Human
acagagucucacuguugcc

SEQ ID NO: 1945780 - RNA, 20 nt, Human
acagcagucuuaugcuucca

SEQ ID NO: 1945781 - RNA, 22 nt, Human
acagcagucuuaugcuuccaga

SEQ ID NO: 1945782 - RNA, 15 nt, Human
acacugauccagccc

SEQ ID NO: 1945783 - RNA, 19 nt, Human
acacugagagccuuuuuga

SEQ ID NO: 1945784 - RNA, 17 nt, Human
acacugaagucaguucu

SEQ ID NO: 1945785 - RNA, 16 nt, Human
acacugaauuuuuaug

SEQ ID NO: 1945786 - RNA, 20 nt, Human
acacugaauuuuuaugugug

SEQ ID NO: 1945787 - RNA, 21 nt, Human
acacugaauuuuuauguguga

SEQ ID NO: 1945788 - RNA, 22 nt, Human
acacugaauuuuuaugugugau

SEQ ID NO: 1945789 - RNA, 21 nt, Human
acagaacacauaauucaggaa

SEQ ID NO: 1945790 - RNA, 18 nt, Human
acacuguccuauuauauu

SEQ ID NO: 1945791 - RNA, 16 nt, Human
acacugugacaucucu

SEQ ID NO: 1945792 - RNA, 21 nt, Human
acacugugacaucucuauucc

SEQ ID NO: 1945793 - RNA, 22 nt, Human
acacugugaagagcuggacucc

SEQ ID NO: 1945794 - RNA, 23 nt, Human
acagaaauugguaccuugcacac

SEQ ID NO: 1945795 - RNA, 15 nt, Human
acacugccugccuua

SEQ ID NO: 1945796 - RNA, 16 nt, Human
acacugccugccuuaa

SEQ ID NO: 1945797 - RNA, 20 nt, Human
acacugccugccuuaaguga

SEQ ID NO: 1945798 - RNA, 17 nt, Human
acaaugugacuuugaaa

SEQ ID NO: 1945799 - RNA, 20 nt, Human
acaaugugacuuugaaaaua

SEQ ID NO: 1945800 - RNA, 18 nt, Human
acacaaacgggcucagca

SEQ ID NO: 1945801 - RNA, 21 nt, Human
acaauuuucagauuugcacaa

SEQ ID NO: 1945802 - RNA, 22 nt, Human
acaauuuucagauuugcacaaa

SEQ ID NO: 1945803 - RNA, 13 nt, Human
acaauuuucagau

SEQ ID NO: 1945804 - RNA, 14 nt, Human
acaauuuucagauu

SEQ ID NO: 1945805 - RNA, 15 nt, Human
acaauuuucagauuu

SEQ ID NO: 1945806 - RNA, 16 nt, Human
acaauuuucagauuug

SEQ ID NO: 1945807 - RNA, 17 nt, Human
acaauuuucagauuugc

SEQ ID NO: 1945808 - RNA, 18 nt, Human
acaauuuucagauuugca

SEQ ID NO: 1945809 - RNA, 19 nt, Human
acaauuuucagauuugcac

SEQ ID NO: 1945810 - RNA, 20 nt, Human
acaauuuucagauuugcaca

SEQ ID NO: 1945811 - RNA, 16 nt, Human
acaauuuauuauggca

SEQ ID NO: 1945812 - RNA, 16 nt, Human
acaauuacuuuagaaa

SEQ ID NO: 1945813 - RNA, 13 nt, Human
acaauuucuuuug

SEQ ID NO: 1945814 - RNA, 16 nt, Human
acaauuucuuuugguu

SEQ ID NO: 1945815 - RNA, 13 nt, Human
acaauuucugugu

SEQ ID NO: 1945816 - RNA, 15 nt, Human
acaauuuauuauggc

SEQ ID NO: 1945817 - RNA, 13 nt, Human
acaauguuuacaa

SEQ ID NO: 1945818 - RNA, 16 nt, Human
acaauguuuuaacaag

SEQ ID NO: 1945819 - RNA, 15 nt, Human
acacggacacucaaa

SEQ ID NO: 1945820 - RNA, 18 nt, Human
acacuaaauguuaaagau

SEQ ID NO: 1945821 - RNA, 19 nt, Human
acacuaaauguuaaagaug

SEQ ID NO: 1945822 - RNA, 20 nt, Human
acacuaaauguuaaagaugu

SEQ ID NO: 1945823 - RNA, 21 nt, Human
acacuaaauguuaaagaugua

SEQ ID NO: 1945824 - RNA, 23 nt, Human
acacggagcggauugcaaagcaa

SEQ ID NO: 1945825 - RNA, 12 nt, Human
acacuaaauguu

SEQ ID NO: 1945826 - RNA, 13 nt, Human
acacuaaauguua

SEQ ID NO: 1945827 - RNA, 15 nt, Human
acacuaaauguuaaa

SEQ ID NO: 1945828 - RNA, 14 nt, Human
acacuaaccacgcu

SEQ ID NO: 1945829 - RNA, 15 nt, Human
acacuaaccacgcug

SEQ ID NO: 1945830 - RNA, 23 nt, Human
acacagaaggggacugccaccuc

SEQ ID NO: 1945831 - RNA, 20 nt, Human
acaccaaucuuacuuuguaa

SEQ ID NO: 1945832 - RNA, 22 nt, Human
acaccaaucuuacuuuguaaau

SEQ ID NO: 1945833 - RNA, 23 nt, Human
acaccaaucuuacuuuguaaauu

SEQ ID NO: 1945834 - RNA, 11 nt, Human
acacagcucug

SEQ ID NO: 1945835 - RNA, 12 nt, Human
acacagcucugu

SEQ ID NO: 1945836 - RNA, 14 nt, Human
acaccagacagaca

SEQ ID NO: 1945837 - RNA, 21 nt, Human
acaccacuacauucuguuaau

SEQ ID NO: 1945838 - RNA, 14 nt, Human
acaccacuacauuc

SEQ ID NO: 1945839 - RNA, 12 nt, Human
acaccagagccc

SEQ ID NO: 1945840 - RNA, 17 nt, Human
acacgcuccuuccucug

SEQ ID NO: 1945841 - RNA, 19 nt, Human
acacgcuccuuccucugag

SEQ ID NO: 1945842 - RNA, 23 nt, Human
acacgcugcucugccccagcuug

SEQ ID NO: 1945843 - RNA, 12 nt, Human
acacgcugccuu

SEQ ID NO: 1945844 - RNA, 17 nt, Human
acacgcugcucugcccc

SEQ ID NO: 1945845 - RNA, 18 nt, Human
acacgcugcucugcccca

SEQ ID NO: 1945846 - RNA, 22 nt, Human
acacgcugcucugccccagcuu

SEQ ID NO: 1945847 - RNA, 20 nt, Human
acaagucagucauucagaua

SEQ ID NO: 1945848 - RNA, 21 nt, Human
acaaguaugaauaaagacacc

SEQ ID NO: 1945849 - RNA, 23 nt, Human
acaaguaugaauaaagacaccua

SEQ ID NO: 1945850 - RNA, 16 nt, Human
acaagucccuguaauu

SEQ ID NO: 1945851 - RNA, 17 nt, Human
acaagucccuguaauug

SEQ ID NO: 1945852 - RNA, 16 nt, Human
acaaguaguucuguau

SEQ ID NO: 1945853 - RNA, 17 nt, Human
acaaguaguucuguauu

SEQ ID NO: 1945854 - RNA, 18 nt, Human
acaaguaguucuguauuu

SEQ ID NO: 1945855 - RNA, 19 nt, Human
acaaguaguucuguauuug

SEQ ID NO: 1945856 - RNA, 20 nt, Human
acaaguaguucuguauuuga

SEQ ID NO: 1945857 - RNA, 21 nt, Human
acaaguaguucuguauuugaa

SEQ ID NO: 1945858 - RNA, 22 nt, Human
acaaguaguucuguauuugaaa

SEQ ID NO: 1945859 - RNA, 23 nt, Human
acaaguaguucuguauuugaaag

SEQ ID NO: 1945860 - RNA, 15 nt, Human
acaaaauggaauacu

SEQ ID NO: 1945861 - RNA, 19 nt, Human
acaaaauggaauacucuua

SEQ ID NO: 1945862 - RNA, 16 nt, Human
aauuuugauaguggga

SEQ ID NO: 1945863 - RNA, 22 nt, Human
aauuuugaaaaguaauauuuau

SEQ ID NO: 1945864 - RNA, 12 nt, Human
aauuuucuuuca

SEQ ID NO: 1945865 - RNA, 13 nt, Human
aauuuugaaaagu

SEQ ID NO: 1945866 - RNA, 20 nt, Human
aauuuugaaaaguaauauuu

SEQ ID NO: 1945867 - RNA, 21 nt, Human
aauuuugaaaaguaauauuua

SEQ ID NO: 1945868 - RNA, 20 nt, Human
acaaaauggaauacucuuau

SEQ ID NO: 1945869 - RNA, 12 nt, Human
acaaaauguaac

SEQ ID NO: 1945870 - RNA, 13 nt, Human
acaaaauguaacu

SEQ ID NO: 1945871 - RNA, 20 nt, Human
acaaaauguaggguuauaau

SEQ ID NO: 1945872 - RNA, 14 nt, Human
acaaaauguaacug

SEQ ID NO: 1945873 - RNA, 16 nt, Human
acaaaauguaacuguu

SEQ ID NO: 1945874 - RNA, 17 nt, Human
acaaaauguaacuguua

SEQ ID NO: 1945875 - RNA, 20 nt, Human
acaaaauguaacuguuacca

SEQ ID NO: 1945876 - RNA, 23 nt, Human
acaaaauguaacuguuaccauug

SEQ ID NO: 1945877 - RNA, 15 nt, Human
acaaacgggcucagc

SEQ ID NO: 1945878 - RNA, 21 nt, Human
acaaaccuguuucugcagcca

SEQ ID NO: 1945879 - RNA, 20 nt, Human
acaaagagcguugaaguuga

SEQ ID NO: 1945880 - RNA, 18 nt, Human
acaacuaugauuuggaaa

SEQ ID NO: 1945881 - RNA, 13 nt, Human
acaaagacugagu

SEQ ID NO: 1945882 - RNA, 21 nt, Human
aauuuuauaaggacuuccuga

SEQ ID NO: 1945883 - RNA, 13 nt, Human
aauuuugaaaaac

SEQ ID NO: 1945884 - RNA, 20 nt, Human
aauuauaaacucauuuugcu

SEQ ID NO: 1945885 - RNA, 12 nt, Human
aauuauaaugua

SEQ ID NO: 1945886 - RNA, 13 nt, Human
aauuauaauguau

SEQ ID NO: 1945887 - RNA, 14 nt, Human
aauuauaauguauu

SEQ ID NO: 1945888 - RNA, 18 nt, Human
agaaauaaaguuucuguu

SEQ ID NO: 1945889 - RNA, 15 nt, Human
agaaauaaaguuucu

SEQ ID NO: 1945890 - RNA, 20 nt, Human
agaaaggaggggauagagag

SEQ ID NO: 1945891 - RNA, 23 nt, Human
agaaaggaggggauagagagaga

SEQ ID NO: 1945892 - RNA, 16 nt, Human
agaaaggaccugcaaa

SEQ ID NO: 1945893 - RNA, 17 nt, Human
acuuuagugcuacagaa

SEQ ID NO: 1945894 - RNA, 22 nt, Human
acuuucauauuuuaaacagagg

SEQ ID NO: 1945895 - RNA, 23 nt, Human
acuuuagggaaguacuuuuggca

SEQ ID NO: 1945896 - RNA, 17 nt, Human
acuuuccaauucuccuu

SEQ ID NO: 1945897 - RNA, 18 nt, Human
acuuuccaauucuccuuu

SEQ ID NO: 1945898 - RNA, 19 nt, Human
acuuuccaauucuccuuua

SEQ ID NO: 1945899 - RNA, 23 nt, Human
acuuuccuucauucaacccaccu

SEQ ID NO: 1945900 - RNA, 17 nt, Human
acuuucuacucauuuua

SEQ ID NO: 1945901 - RNA, 23 nt, Human
acuuuguucuggcucuuccaggc

SEQ ID NO: 1945902 - RNA, 19 nt, Human
acuuucuacucauuuuaau

SEQ ID NO: 1945903 - RNA, 14 nt, Human
acuuuuccuugcau

SEQ ID NO: 1945904 - RNA, 15 nt, Human
acuuuuccuugcaua

SEQ ID NO: 1945905 - RNA, 18 nt, Human
acuuuuccuugcauacaa

SEQ ID NO: 1945906 - RNA, 21 nt, Human
acuuuuccuugcauacaaaca

SEQ ID NO: 1945907 - RNA, 22 nt, Human
acuuuuccuugcauacaaacaa

SEQ ID NO: 1945908 - RNA, 23 nt, Human
acuuuucuaaacuaggcuccuuc

SEQ ID NO: 1945909 - RNA, 15 nt, Human
acuuuuauaaacuuu

SEQ ID NO: 1945910 - RNA, 19 nt, Human
acuuuuauaaacuuuaccu

SEQ ID NO: 1945911 - RNA, 22 nt, Human
acuuuuauaaacuuuaccuuuu

SEQ ID NO: 1945912 - RNA, 18 nt, Human
agaaaaguugaauuuuac

SEQ ID NO: 1945913 - RNA, 21 nt, Human
agaaaaguugaauuuuacaug

SEQ ID NO: 1945914 - RNA, 21 nt, Human
agaaaaggugauaaaaucaua

SEQ ID NO: 1945915 - RNA, 13 nt, Human
agaaaaggucuug

SEQ ID NO: 1945916 - RNA, 16 nt, Human
agaaaaggugauaaaa

SEQ ID NO: 1945917 - RNA, 16 nt, Human
agaaaauaaaaaaaag

SEQ ID NO: 1945918 - RNA, 17 nt, Human
agaaaauaaaaaaaaga

SEQ ID NO: 1945919 - RNA, 18 nt, Human
agaaaauaaaaaaaagaa

SEQ ID NO: 1945920 - RNA, 19 nt, Human
agaaaauaaaaaaaagaaa

SEQ ID NO: 1945921 - RNA, 20 nt, Human
agaaaauaaaaaaaagaaaa

SEQ ID NO: 1945922 - RNA, 21 nt, Human
agaaaauaaaaaaaagaaaaa

SEQ ID NO: 1945923 - RNA, 22 nt, Human
agaaaauaaaaaaaagaaaaaa

SEQ ID NO: 1945924 - RNA, 15 nt, Human
agaaacaaacaaaag

SEQ ID NO: 1945925 - RNA, 16 nt, Human
agaaaauguucuucca

SEQ ID NO: 1945926 - RNA, 23 nt, Human
agaaaauggacguguuaugacuc

SEQ ID NO: 1945927 - RNA, 22 nt, Human
agaaaauggacguguuaugacu

SEQ ID NO: 1945928 - RNA, 20 nt, Human
agaaaauggacguguuauga

SEQ ID NO: 1945929 - RNA, 15 nt, Human
agaaaauggacgugu

SEQ ID NO: 1945930 - RNA, 23 nt, Human
agaaaauggaagacagcucuuau

SEQ ID NO: 1945931 - RNA, 14 nt, Human
agaaaauauguauu

SEQ ID NO: 1945932 - RNA, 22 nt, Human
agaaaauaugucccagaaaugu

SEQ ID NO: 1945933 - RNA, 16 nt, Human
acugcauuuagggagu

SEQ ID NO: 1945934 - RNA, 14 nt, Human
acugccaaccucgc

SEQ ID NO: 1945935 - RNA, 18 nt, Human
acugccaaccucgcucca

SEQ ID NO: 1945936 - RNA, 14 nt, Human
acugcauuuaggga

SEQ ID NO: 1945937 - RNA, 19 nt, Human
acugcauuuagggaguauu

SEQ ID NO: 1945938 - RNA, 15 nt, Human
acugccacaaggaag

SEQ ID NO: 1945939 - RNA, 17 nt, Human
acugccacaaggaagaa

SEQ ID NO: 1945940 - RNA, 18 nt, Human
acugccacaaggaagaaa

SEQ ID NO: 1945941 - RNA, 20 nt, Human
acugccacaaggaagaaauu

SEQ ID NO: 1945942 - RNA, 19 nt, Human
acugccaacugaucuguua

SEQ ID NO: 1945943 - RNA, 17 nt, Human
acugccaacugaucugu

SEQ ID NO: 1945944 - RNA, 15 nt, Human
acugaagucaguucu

SEQ ID NO: 1945945 - RNA, 13 nt, Human
acugaaggccacu

SEQ ID NO: 1945946 - RNA, 21 nt, Human
acugaaggccacuugaguugg

SEQ ID NO: 1945947 - RNA, 16 nt, Human
acuggaagcacagcuu

SEQ ID NO: 1945948 - RNA, 15 nt, Human
acuggaagcacagcu

SEQ ID NO: 1945949 - RNA, 14 nt, Human
acuggaagcacagc

SEQ ID NO: 1945950 - RNA, 19 nt, Human
acugcccccucugcccugc

SEQ ID NO: 1945951 - RNA, 18 nt, Human
acugcccccucugcccug

SEQ ID NO: 1945952 - RNA, 11 nt, Human
acugccaccuc

SEQ ID NO: 1945953 - RNA, 12 nt, Human
acugccaccucc

SEQ ID NO: 1945954 - RNA, 13 nt, Human
acugccaccuccc

SEQ ID NO: 1945955 - RNA, 23 nt, Human
acugccaccuccccuugccagcu

SEQ ID NO: 1945956 - RNA, 20 nt, Human
acugcccccucugcccugcg

SEQ ID NO: 1945957 - RNA, 14 nt, Human
acuggagaaaaugg

SEQ ID NO: 1945958 - RNA, 21 nt, Human
acugucuaagauuaauagcau

SEQ ID NO: 1945959 - RNA, 17 nt, Human
acugucuagcacuuccu

SEQ ID NO: 1945960 - RNA, 18 nt, Human
acugucuagcacuuccuu

SEQ ID NO: 1945961 - RNA, 19 nt, Human
acugucuagcacuuccuug

SEQ ID NO: 1945962 - RNA, 21 nt, Human
acugucuagcacuuccuugcc

SEQ ID NO: 1945963 - RNA, 24 nt, Human
acugucuagcacuuccuugccagu

SEQ ID NO: 1945964 - RNA, 23 nt, Human
acugguggcccgacagccuggca

SEQ ID NO: 1945965 - RNA, 21 nt, Human
acugguggcccgacagccugg

SEQ ID NO: 1945966 - RNA, 22 nt, Human
acugguggcccgacagccuggc

SEQ ID NO: 1945967 - RNA, 20 nt, Human
acugguggcccgacagccug

SEQ ID NO: 1945968 - RNA, 16 nt, Human
acugugccaugugcca

SEQ ID NO: 1945969 - RNA, 13 nt, Human
acugugauuugaa

SEQ ID NO: 1945970 - RNA, 12 nt, Human
acugucugucug

SEQ ID NO: 1945971 - RNA, 12 nt, Human
acugucuucagu

SEQ ID NO: 1945972 - RNA, 20 nt, Human
acuuauuguagcauccugga

SEQ ID NO: 1945973 - RNA, 23 nt, Human
acuuauuguagcauccuggaaua

SEQ ID NO: 1945974 - RNA, 19 nt, Human
acuucacauauugauuucc

SEQ ID NO: 1945975 - RNA, 15 nt, Human
acuguuguauaaauu

SEQ ID NO: 1945976 - RNA, 19 nt, Human
acuguuguauaaauuuauu

SEQ ID NO: 1945977 - RNA, 16 nt, Human
acuguuuaagacacuu

SEQ ID NO: 1945978 - RNA, 14 nt, Human
acuguuuagaugaa

SEQ ID NO: 1945979 - RNA, 13 nt, Human
acuguuuagauuu

SEQ ID NO: 1945980 - RNA, 22 nt, Human
acuguuuguuccagaaucugua

SEQ ID NO: 1945981 - RNA, 13 nt, Human
acuguuucaaacu

SEQ ID NO: 1945982 - RNA, 19 nt, Human
acuguuuagauuugccaua

SEQ ID NO: 1945983 - RNA, 20 nt, Human
acuguuuagauuugccauag

SEQ ID NO: 1945984 - RNA, 21 nt, Human
acuuggucugugagaugcuag

SEQ ID NO: 1945985 - RNA, 20 nt, Human
acuuguaaaugugguaaaga

SEQ ID NO: 1945986 - RNA, 12 nt, Human
acuucuuucacu

SEQ ID NO: 1945987 - RNA, 18 nt, Human
acuuguaaaugugguaaa

SEQ ID NO: 1945988 - RNA, 19 nt, Human
acuuguaaaggaauuuaaa

SEQ ID NO: 1945989 - RNA, 20 nt, Human
acuuguaaaggaauuuaaaa

SEQ ID NO: 1945990 - RNA, 14 nt, Human
acuuggucugugag

SEQ ID NO: 1945991 - RNA, 15 nt, Human
acuuggucugugaga

SEQ ID NO: 1945992 - RNA, 18 nt, Human
acuuguaaaggaauuuaa

SEQ ID NO: 1945993 - RNA, 23 nt, Human
acuucacauauugauuuccguua

SEQ ID NO: 1945994 - RNA, 18 nt, Human
acuucugacucuucccca

SEQ ID NO: 1945995 - RNA, 16 nt, Human
acuucugacucuuccc

SEQ ID NO: 1945996 - RNA, 12 nt, Human
acuucugccaga

SEQ ID NO: 1945997 - RNA, 19 nt, Human
acuucugccagauguccua

SEQ ID NO: 1945998 - RNA, 22 nt, Human
acuucugccagcauaauacuug

SEQ ID NO: 1945999 - RNA, 18 nt, Human
acuucugccauauucugu

SEQ ID NO: 1946000 - RNA, 19 nt, Human
acuucugccauauucuguu

SEQ ID NO: 1946001 - RNA, 12 nt, Human
acuucuuucccu

SEQ ID NO: 1946002 - RNA, 17 nt, Human
acuucuuucccuuccuc

SEQ ID NO: 1946003 - RNA, 18 nt, Human
acuucuuucccuuccucc

SEQ ID NO: 1946004 - RNA, 19 nt, Human
acuucuuucccuuccucca

SEQ ID NO: 1946005 - RNA, 14 nt, Human
acuucuuugcaguu

SEQ ID NO: 1946006 - RNA, 21 nt, Human
acuucuuugcaguucccaucu

SEQ ID NO: 1946007 - RNA, 18 nt, Human
acucuacccucuuagaaa

SEQ ID NO: 1946008 - RNA, 13 nt, Human
acucuacccucuu

SEQ ID NO: 1946009 - RNA, 21 nt, Human
acucuacccucuuagaaaaac

SEQ ID NO: 1946010 - RNA, 16 nt, Human
acucuaccugcacacu

SEQ ID NO: 1946011 - RNA, 18 nt, Human
acucuuaaaacccaagug

SEQ ID NO: 1946012 - RNA, 11 nt, Human
acucuuaaaac

SEQ ID NO: 1946013 - RNA, 16 nt, Human
acucugugucaggugg

SEQ ID NO: 1946014 - RNA, 16 nt, Human
acucugggcuccagag

SEQ ID NO: 1946015 - RNA, 14 nt, Human
acucugggcuccag

SEQ ID NO: 1946016 - RNA, 22 nt, Human
acucugggaacuucuuugcagu

SEQ ID NO: 1946017 - RNA, 11 nt, Human
acucugggaac

SEQ ID NO: 1946018 - RNA, 16 nt, Human
acucuaucaaguauua

SEQ ID NO: 1946019 - RNA, 14 nt, Human
acucuaucaaguau

SEQ ID NO: 1946020 - RNA, 12 nt, Human
acucccuuucaa

SEQ ID NO: 1946021 - RNA, 13 nt, Human
acucccuuucaac

SEQ ID NO: 1946022 - RNA, 21 nt, Human
acucccgagacggcacugaga

SEQ ID NO: 1946023 - RNA, 22 nt, Human
acucccguguaggaaccugcac

SEQ ID NO: 1946024 - RNA, 14 nt, Human
acucagcaccacuc

SEQ ID NO: 1946025 - RNA, 17 nt, Human
acucagcaccacucaag

SEQ ID NO: 1946026 - RNA, 21 nt, Human
acucagcaccacucaagacca

SEQ ID NO: 1946027 - RNA, 22 nt, Human
acucagcaccacucaagaccaa

SEQ ID NO: 1946028 - RNA, 19 nt, Human
acucaaagcaaaagugcug

SEQ ID NO: 1946029 - RNA, 16 nt, Human
acucaaacucuuaaaa

SEQ ID NO: 1946030 - RNA, 17 nt, Human
acucaaacucuuaaaac

SEQ ID NO: 1946031 - RNA, 11 nt, Human
acuauaaugua

SEQ ID NO: 1946032 - RNA, 18 nt, Human
acucaaaagcugggcagg

SEQ ID NO: 1946033 - RNA, 19 nt, Human
acuauaacauagaauugca

SEQ ID NO: 1946034 - RNA, 23 nt, Human
acuauaacauagaauugcaaucu

SEQ ID NO: 1946035 - RNA, 17 nt, Human
acuccccagccagccug

SEQ ID NO: 1946036 - RNA, 21 nt, Human
acuccccagccagccuggcug

SEQ ID NO: 1946037 - RNA, 14 nt, Human
acucccccaggugg

SEQ ID NO: 1946038 - RNA, 19 nt, Human
acuccccgccguacaguuc

SEQ ID NO: 1946039 - RNA, 17 nt, Human
acuccccugcugggugu

SEQ ID NO: 1946040 - RNA, 13 nt, Human
acuccccugcugg

SEQ ID NO: 1946041 - RNA, 12 nt, Human
acuccccuccuu

SEQ ID NO: 1946042 - RNA, 22 nt, Human
acucagcucuuggcuccacugg

SEQ ID NO: 1946043 - RNA, 17 nt, Human
acucaggcccaaagccu

SEQ ID NO: 1946044 - RNA, 13 nt, Human
acucagucuuuaa

SEQ ID NO: 1946045 - RNA, 14 nt, Human
acucaguggggagg

SEQ ID NO: 1946046 - RNA, 15 nt, Human
acuaggaaggcacuu

SEQ ID NO: 1946047 - RNA, 16 nt, Human
acuaggguccugggga

SEQ ID NO: 1946048 - RNA, 15 nt, Human
acuaggguccugggg

SEQ ID NO: 1946049 - RNA, 14 nt, Human
acuagcuauggugu

SEQ ID NO: 1946050 - RNA, 21 nt, Human
acuagccaacggccccagcuu

SEQ ID NO: 1946051 - RNA, 23 nt, Human
acuagccaacggccccagcuucu

SEQ ID NO: 1946052 - RNA, 13 nt, Human
acgauuuaauuua

SEQ ID NO: 1946053 - RNA, 14 nt, Human
acgauuuaauuuau

SEQ ID NO: 1946054 - RNA, 12 nt, Human
acgauuucuguu

SEQ ID NO: 1946055 - RNA, 13 nt, Human
acgauuucuguuu

SEQ ID NO: 1946056 - RNA, 14 nt, Human
acgauuucuguuua

SEQ ID NO: 1946057 - RNA, 17 nt, Human
acgauuucuguuuagau

SEQ ID NO: 1946058 - RNA, 18 nt, Human
acgccacugcacuauagc

SEQ ID NO: 1946059 - RNA, 15 nt, Human
acuaaguuuuuaugg

SEQ ID NO: 1946060 - RNA, 22 nt, Human
acuaaguuuuuauggcuuuugu

SEQ ID NO: 1946061 - RNA, 18 nt, Human
acgcugugcugcccugcc

SEQ ID NO: 1946062 - RNA, 17 nt, Human
acgcugugcugcccugc

SEQ ID NO: 1946063 - RNA, 16 nt, Human
acgcugugcugcccug

SEQ ID NO: 1946064 - RNA, 15 nt, Human
acgcugugcugcccu

SEQ ID NO: 1946065 - RNA, 15 nt, Human
acguggcugcuucaa

SEQ ID NO: 1946066 - RNA, 14 nt, Human
acguggcugcuuca

SEQ ID NO: 1946067 - RNA, 13 nt, Human
acguggcugcuuc

SEQ ID NO: 1946068 - RNA, 19 nt, Human
acgugcacaaauucaugug

SEQ ID NO: 1946069 - RNA, 20 nt, Human
acuaagaggaaaguacauuu

SEQ ID NO: 1946070 - RNA, 21 nt, Human
acuaagaggaaaguacauuuu

SEQ ID NO: 1946071 - RNA, 11 nt, Human
acguggcugcu

SEQ ID NO: 1946072 - RNA, 17 nt, Human
acuaagaucgguuaaca

SEQ ID NO: 1946073 - RNA, 19 nt, Human
acuaagaucgguuaacaaa

SEQ ID NO: 1946074 - RNA, 20 nt, Human
acuaagaucgguuaacaaau

SEQ ID NO: 1946075 - RNA, 21 nt, Human
acuaagaucgguuaacaaaua

SEQ ID NO: 1946076 - RNA, 22 nt, Human
acuaagaucgguuaacaaauaa

SEQ ID NO: 1946077 - RNA, 21 nt, Human
accugcccaaccugcucuccu

SEQ ID NO: 1946078 - RNA, 13 nt, Human
accugcccaaccu

SEQ ID NO: 1946079 - RNA, 17 nt, Human
accucuuccuggccggu

SEQ ID NO: 1946080 - RNA, 23 nt, Human
accugccccucaacucuccucca

SEQ ID NO: 1946081 - RNA, 14 nt, Human
accugccccuccuc

SEQ ID NO: 1946082 - RNA, 18 nt, Human
accugccccuccucucug

SEQ ID NO: 1946083 - RNA, 18 nt, Human
accucugcacaagcugca

SEQ ID NO: 1946084 - RNA, 16 nt, Human
accucugcacaagcug

SEQ ID NO: 1946085 - RNA, 21 nt, Human
accucugcacaagcugcaccc

SEQ ID NO: 1946086 - RNA, 23 nt, Human
accuuucaauaggaaaaacugau

SEQ ID NO: 1946087 - RNA, 21 nt, Human
accuuucaauaggaaaaacug

SEQ ID NO: 1946088 - RNA, 17 nt, Human
accuuucaauaggaaaa

SEQ ID NO: 1946089 - RNA, 20 nt, Human
accugccccuccucucugcc

SEQ ID NO: 1946090 - RNA, 22 nt, Human
accugccccuccucucugcccu

SEQ ID NO: 1946091 - RNA, 15 nt, Human
accuguaaugacagg

SEQ ID NO: 1946092 - RNA, 20 nt, Human
accuguaaugacaggccugu

SEQ ID NO: 1946093 - RNA, 14 nt, Human
accuuggcucaagu

SEQ ID NO: 1946094 - RNA, 12 nt, Human
accuuggcugca

SEQ ID NO: 1946095 - RNA, 12 nt, Human
accuuggcucaa

SEQ ID NO: 1946096 - RNA, 16 nt, Human
accuuucaauaggaaa

SEQ ID NO: 1946097 - RNA, 12 nt, Human
accuuuauucug

SEQ ID NO: 1946098 - RNA, 13 nt, Human
accuuuauucugg

SEQ ID NO: 1946099 - RNA, 14 nt, Human
accuuggcugcagg

SEQ ID NO: 1946100 - RNA, 16 nt, Human
accuuguaauguaacu

SEQ ID NO: 1946101 - RNA, 17 nt, Human
accuuguaauguaacug

SEQ ID NO: 1946102 - RNA, 22 nt, Human
accuuguaauguaacugcucuu

SEQ ID NO: 1946103 - RNA, 18 nt, Human
accuugucauuuuggucu

SEQ ID NO: 1946104 - RNA, 13 nt, Human
aacuuugaccucu

SEQ ID NO: 1946105 - RNA, 11 nt, Human
aacuuugaaau

SEQ ID NO: 1946106 - RNA, 13 nt, Human
aacuuugaaauau

SEQ ID NO: 1946107 - RNA, 14 nt, Human
aacuuugaaauaua

SEQ ID NO: 1946108 - RNA, 21 nt, Human
aacuuucuuaauauuuuuaca

SEQ ID NO: 1946109 - RNA, 14 nt, Human
aacuuugaccucug

SEQ ID NO: 1946110 - RNA, 17 nt, Human
aacuuugaccucugcag

SEQ ID NO: 1946111 - RNA, 12 nt, Human
aacuuuuauaaa

SEQ ID NO: 1946112 - RNA, 15 nt, Human
aacuuuuauaaacuu

SEQ ID NO: 1946113 - RNA, 13 nt, Human
aacuuuguauagu

SEQ ID NO: 1946114 - RNA, 14 nt, Human
aacuuuguauaguu

SEQ ID NO: 1946115 - RNA, 15 nt, Human
aacuuuguauaguua

SEQ ID NO: 1946116 - RNA, 20 nt, Human
aacuuuguuaggccaaagac

SEQ ID NO: 1946117 - RNA, 20 nt, Human
aacuuuguauaguuauguaa

SEQ ID NO: 1946118 - RNA, 21 nt, Human
aacuuuguauaguuauguaaa

SEQ ID NO: 1946119 - RNA, 22 nt, Human
aacuuuguauaguuauguaaau

SEQ ID NO: 1946120 - RNA, 19 nt, Human
aacuuugaccucugcagca

SEQ ID NO: 1946121 - RNA, 20 nt, Human
aacuuugaccucugcagcaa

SEQ ID NO: 1946122 - RNA, 16 nt, Human
aacuuugaaauauaug

SEQ ID NO: 1946123 - RNA, 16 nt, Human
aacuuugagaucuaaa

SEQ ID NO: 1946124 - RNA, 16 nt, Human
aacuuuuauaaacuuu

SEQ ID NO: 1946125 - RNA, 19 nt, Human
aacuuuuauaaacuuuacc

SEQ ID NO: 1946126 - RNA, 16 nt, Human
aacuuuuuuuucuuuu

SEQ ID NO: 1946127 - RNA, 20 nt, Human
aagaaaaaaaaaaagaaaga

SEQ ID NO: 1946128 - RNA, 21 nt, Human
aagaaaaaaaaaaagaaagaa

SEQ ID NO: 1946129 - RNA, 17 nt, Human
aacuuuuuuuucuuuuu

SEQ ID NO: 1946130 - RNA, 18 nt, Human
aacuuuuuuuucuuuuuu

SEQ ID NO: 1946131 - RNA, 14 nt, Human
aagaaaucuauaga

SEQ ID NO: 1946132 - RNA, 16 nt, Human
aagaaaucuauagaaa

SEQ ID NO: 1946133 - RNA, 20 nt, Human
aagaaaucuauagaaagugu

SEQ ID NO: 1946134 - RNA, 12 nt, Human
aagaaaugaaga

SEQ ID NO: 1946135 - RNA, 13 nt, Human
aagaaaugaagag

SEQ ID NO: 1946136 - RNA, 13 nt, Human
aacuucacauauu

SEQ ID NO: 1946137 - RNA, 16 nt, Human
aacucaccugccccuc

SEQ ID NO: 1946138 - RNA, 15 nt, Human
aacucaccugccccu

SEQ ID NO: 1946139 - RNA, 15 nt, Human
aacucaccccagccc

SEQ ID NO: 1946140 - RNA, 12 nt, Human
aacucaccccag

SEQ ID NO: 1946141 - RNA, 23 nt, Human
aacugaacucugacaacagacuu

SEQ ID NO: 1946142 - RNA, 19 nt, Human
aacugaacucugacaacag

SEQ ID NO: 1946143 - RNA, 20 nt, Human
aacugaacucugacaacaga

SEQ ID NO: 1946144 - RNA, 16 nt, Human
aacugaacucugacaa

SEQ ID NO: 1946145 - RNA, 12 nt, Human
aacuuaguuuug

SEQ ID NO: 1946146 - RNA, 16 nt, Human
aacuuaguuuugcaua

SEQ ID NO: 1946147 - RNA, 15 nt, Human
aacuuauauuguaag

SEQ ID NO: 1946148 - RNA, 19 nt, Human
aacuuauauuguaagaaau

SEQ ID NO: 1946149 - RNA, 20 nt, Human
aacuuauauuguaagaaaua

SEQ ID NO: 1946150 - RNA, 21 nt, Human
aacuuauauuguaagaaauac

SEQ ID NO: 1946151 - RNA, 17 nt, Human
aacuuaaauaaugugaa

SEQ ID NO: 1946152 - RNA, 19 nt, Human
aacuuaaauaaugugaaac

SEQ ID NO: 1946153 - RNA, 14 nt, Human
aacugaccagccuc

SEQ ID NO: 1946154 - RNA, 19 nt, Human
aacugaccagccuccaugc

SEQ ID NO: 1946155 - RNA, 17 nt, Human
aacugauuuuuuuuucc

SEQ ID NO: 1946156 - RNA, 18 nt, Human
aacugauuaguaagucuu

SEQ ID NO: 1946157 - RNA, 13 nt, Human
aacugaucuguua

SEQ ID NO: 1946158 - RNA, 15 nt, Human
aacugaucuguuaua

SEQ ID NO: 1946159 - RNA, 19 nt, Human
aacugauuuuuuuuuccuu

SEQ ID NO: 1946160 - RNA, 14 nt, Human
aacccuggugacca

SEQ ID NO: 1946161 - RNA, 17 nt, Human
aacccugucaaacauua

SEQ ID NO: 1946162 - RNA, 19 nt, Human
aacccugucaaacauuagu

SEQ ID NO: 1946163 - RNA, 23 nt, Human
aacccugucaaacauuaguacuu

SEQ ID NO: 1946164 - RNA, 12 nt, Human
aaccagaucauu

SEQ ID NO: 1946165 - RNA, 14 nt, Human
aaccagaucauugu

SEQ ID NO: 1946166 - RNA, 11 nt, Human
aaccacugaau

SEQ ID NO: 1946167 - RNA, 13 nt, Human
aaccacugaaucu

SEQ ID NO: 1946168 - RNA, 17 nt, Human
aaccacugaaucuggac

SEQ ID NO: 1946169 - RNA, 21 nt, Human
aacauguaauuaaguacuaug

SEQ ID NO: 1946170 - RNA, 14 nt, Human
aacauguaauuaag

SEQ ID NO: 1946171 - RNA, 23 nt, Human
aacauguaauuaaguacuaugua

SEQ ID NO: 1946172 - RNA, 22 nt, Human
aaccacucuaucaaguauuaua

SEQ ID NO: 1946173 - RNA, 21 nt, Human
aaccagucuuucaacucauug

SEQ ID NO: 1946174 - RNA, 13 nt, Human
aacaugauuuggg

SEQ ID NO: 1946175 - RNA, 21 nt, Human
aacaucauagaaacugucuag

SEQ ID NO: 1946176 - RNA, 21 nt, Human
aacaucagguuaggcaguaua

SEQ ID NO: 1946177 - RNA, 22 nt, Human
aacaucagguuaggcaguauaa

SEQ ID NO: 1946178 - RNA, 13 nt, Human
aacaucauuccuu

SEQ ID NO: 1946179 - RNA, 14 nt, Human
aacaucauuccuuu

SEQ ID NO: 1946180 - RNA, 17 nt, Human
aacaugagguucucucu

SEQ ID NO: 1946181 - RNA, 13 nt, Human
aacagcucgacuu

SEQ ID NO: 1946182 - RNA, 19 nt, Human
aacaccuucuauagcauca

SEQ ID NO: 1946183 - RNA, 21 nt, Human
aacaaaaccaaaaguuauuaa

SEQ ID NO: 1946184 - RNA, 21 nt, Human
aacaaaagcgacccauucaga

SEQ ID NO: 1946185 - RNA, 11 nt, Human
aacaaaaggca

SEQ ID NO: 1946186 - RNA, 13 nt, Human
aacaaaauacauu

SEQ ID NO: 1946187 - RNA, 14 nt, Human
aacaaaauacauuc

SEQ ID NO: 1946188 - RNA, 17 nt, Human
aacaaaauacauucuuu

SEQ ID NO: 1946189 - RNA, 17 nt, Human
aacaaagaaauuaugug

SEQ ID NO: 1946190 - RNA, 15 nt, Human
aacaaagaaauuaug

SEQ ID NO: 1946191 - RNA, 18 nt, Human
aacaaaauacauucuuuu

SEQ ID NO: 1946192 - RNA, 21 nt, Human
aacaaacugcacaugauuuca

SEQ ID NO: 1946193 - RNA, 22 nt, Human
aacaaacugcacaugauuucac

SEQ ID NO: 1946194 - RNA, 24 nt, Human
aacaaacugcacaugauuucacaa

SEQ ID NO: 1946195 - RNA, 18 nt, Human
aaauugauguugaugcaa

SEQ ID NO: 1946196 - RNA, 12 nt, Human
aaauugauguug

SEQ ID NO: 1946197 - RNA, 13 nt, Human
aaauugauguuga

SEQ ID NO: 1946198 - RNA, 14 nt, Human
aaauugauguugau

SEQ ID NO: 1946199 - RNA, 15 nt, Human
aaauugauguugaug

SEQ ID NO: 1946200 - RNA, 18 nt, Human
aaauugcauuuccugaca

SEQ ID NO: 1946201 - RNA, 13 nt, Human
aaauugcuuuuga

SEQ ID NO: 1946202 - RNA, 23 nt, Human
aaauuggaguuggaguagaaugu

SEQ ID NO: 1946203 - RNA, 16 nt, Human
aacaccaaaaaauauc

SEQ ID NO: 1946204 - RNA, 17 nt, Human
aacaccaaaaaauaucu

SEQ ID NO: 1946205 - RNA, 15 nt, Human
aacaccugacagccc

SEQ ID NO: 1946206 - RNA, 18 nt, Human
aacaccugacagccccuc

SEQ ID NO: 1946207 - RNA, 19 nt, Human
aacacauuuuucuuaggga

SEQ ID NO: 1946208 - RNA, 22 nt, Human
aacaccaaaaaaauccagaaac

SEQ ID NO: 1946209 - RNA, 15 nt, Human
aacaccaaaaaauau

SEQ ID NO: 1946210 - RNA, 23 nt, Human
aacaagaauaaaggcagcuguug

SEQ ID NO: 1946211 - RNA, 22 nt, Human
aacaaagcauuugacuuucugu

SEQ ID NO: 1946212 - RNA, 14 nt, Human
aacaaagaccaauu

SEQ ID NO: 1946213 - RNA, 16 nt, Human
aacaaagaccaauuuu

SEQ ID NO: 1946214 - RNA, 21 nt, Human
aacaaagaccaauuuuuugug

SEQ ID NO: 1946215 - RNA, 15 nt, Human
aacaacuuuuuuuuc

SEQ ID NO: 1946216 - RNA, 13 nt, Human
aaaacacauuuuu

SEQ ID NO: 1946217 - RNA, 15 nt, Human
aaaacacauuuuucu

SEQ ID NO: 1946218 - RNA, 13 nt, Human
aaaauucagugga

SEQ ID NO: 1946219 - RNA, 18 nt, Human
aaacacuguucucugccc

SEQ ID NO: 1946220 - RNA, 17 nt, Human
aaacacucuugaaaaau

SEQ ID NO: 1946221 - RNA, 14 nt, Human
aaacacucuugaaa

SEQ ID NO: 1946222 - RNA, 13 nt, Human
aaacacucuugaa

SEQ ID NO: 1946223 - RNA, 12 nt, Human
aaaauugccuuu

SEQ ID NO: 1946224 - RNA, 22 nt, Human
aaaauugccuuucuguguuuau

SEQ ID NO: 1946225 - RNA, 22 nt, Human
aaaauugcuuuugagagaacau

SEQ ID NO: 1946226 - RNA, 22 nt, Human
aaacagacuuguauauucuauu

SEQ ID NO: 1946227 - RNA, 18 nt, Human
aaacacuucauugaaaau

SEQ ID NO: 1946228 - RNA, 23 nt, Human
aaacacuguuuguuccagaaucu

SEQ ID NO: 1946229 - RNA, 22 nt, Human
aaacacuguucucugcccucca

SEQ ID NO: 1946230 - RNA, 19 nt, Human
aaacacuguucucugcccu

SEQ ID NO: 1946231 - RNA, 17 nt, Human
aaacagauuuggaaaga

SEQ ID NO: 1946232 - RNA, 13 nt, Human
aaacagaggacca

SEQ ID NO: 1946233 - RNA, 16 nt, Human
aaacagaggaccagca

SEQ ID NO: 1946234 - RNA, 17 nt, Human
aaacagaguaaucuugu

SEQ ID NO: 1946235 - RNA, 18 nt, Human
aaacagaguaaucuuguu

SEQ ID NO: 1946236 - RNA, 14 nt, Human
aaacagaugcucug

SEQ ID NO: 1946237 - RNA, 13 nt, Human
aaagaaauuaugu

SEQ ID NO: 1946238 - RNA, 12 nt, Human
aaagaaauaauu

SEQ ID NO: 1946239 - RNA, 13 nt, Human
aaagaaauaauuu

SEQ ID NO: 1946240 - RNA, 15 nt, Human
aaagaaagaggaaaa

SEQ ID NO: 1946241 - RNA, 16 nt, Human
aaagaaagaggaaaag

SEQ ID NO: 1946242 - RNA, 22 nt, Human
aaagaaauuagggcucuaauuu

SEQ ID NO: 1946243 - RNA, 15 nt, Human
aaagaaauuaugugc

SEQ ID NO: 1946244 - RNA, 11 nt, Human
aaagaacaucc

SEQ ID NO: 1946245 - RNA, 11 nt, Human
aaagagguuuu

SEQ ID NO: 1946246 - RNA, 17 nt, Human
aaagauaccuuaaaauu

SEQ ID NO: 1946247 - RNA, 18 nt, Human
aaagauaccuuaaaauuu

SEQ ID NO: 1946248 - RNA, 19 nt, Human
aaagauaccuuaaaauuug

SEQ ID NO: 1946249 - RNA, 20 nt, Human
aaagauaccuuaaaauuuga

SEQ ID NO: 1946250 - RNA, 21 nt, Human
aaagauaccuuaaaauuugaa

SEQ ID NO: 1946251 - RNA, 22 nt, Human
aaagauaccuuaaaauuugaaa

SEQ ID NO: 1946252 - RNA, 12 nt, Human
aaagaguacucu

SEQ ID NO: 1946253 - RNA, 16 nt, Human
aaagauaccuuaaaau

SEQ ID NO: 1946254 - RNA, 17 nt, Human
aaagaguacucuuguuu

SEQ ID NO: 1946255 - RNA, 20 nt, Human
aaagaaaacuuguauuaugu

SEQ ID NO: 1946256 - RNA, 12 nt, Human
aaagaaaacuug

SEQ ID NO: 1946257 - RNA, 13 nt, Human
aaagaaaaauauu

SEQ ID NO: 1946258 - RNA, 20 nt, Human
aaacugccaguuuuguuucc

SEQ ID NO: 1946259 - RNA, 18 nt, Human
aaagaaaaauauuuaaug

SEQ ID NO: 1946260 - RNA, 14 nt, Human
aaagaaaacaaaac

SEQ ID NO: 1946261 - RNA, 12 nt, Human
aaagaaaauaaa

SEQ ID NO: 1946262 - RNA, 21 nt, Human
aaagaaaauaaaaaaaagaaa

SEQ ID NO: 1946263 - RNA, 10 nt, Human
aaagaaagaa

SEQ ID NO: 1946264 - RNA, 20 nt, Human
aaauaacaacuuuuuuuucu

SEQ ID NO: 1946265 - RNA, 11 nt, Human
aaagugcuggg

SEQ ID NO: 1946266 - RNA, 20 nt, Human
aaagugcugcagggcuuuaa

SEQ ID NO: 1946267 - RNA, 19 nt, Human
aaauaaaaggacugugauu

SEQ ID NO: 1946268 - RNA, 21 nt, Human
aaagugcugcagggcuuuaaa

SEQ ID NO: 1946269 - RNA, 22 nt, Human
aaagugcugcagggcuuuaaaa

SEQ ID NO: 1946270 - RNA, 14 nt, Human
aaagugcugggauu

SEQ ID NO: 1946271 - RNA, 17 nt, Human
aaauaaacgucuuaaau

SEQ ID NO: 1946272 - RNA, 13 nt, Human
aaauaaacuuucu

SEQ ID NO: 1946273 - RNA, 21 nt, Human
aaauaaacuuucuuaauauuu

SEQ ID NO: 1946274 - RNA, 22 nt, Human
aaauaaaauuaaagcugaaaac

SEQ ID NO: 1946275 - RNA, 12 nt, Human
aaauaacaauga

SEQ ID NO: 1946276 - RNA, 13 nt, Human
aaauaaaggaacc

SEQ ID NO: 1946277 - RNA, 22 nt, Human
aaagucucuggaauuugaaaca

SEQ ID NO: 1946278 - RNA, 20 nt, Human
aaagucucuggaauuugaaa

SEQ ID NO: 1946279 - RNA, 18 nt, Human
aaagucuguugauuaaag

SEQ ID NO: 1946280 - RNA, 19 nt, Human
aaagucuguugauuaaaga

SEQ ID NO: 1946281 - RNA, 20 nt, Human
aaagucuguugauuaaagau

SEQ ID NO: 1946282 - RNA, 20 nt, Human
aaagugaaaguccagaaacu

SEQ ID NO: 1946283 - RNA, 18 nt, Human
aaagucuugaauguugaa

SEQ ID NO: 1946284 - RNA, 13 nt, Human
aaagucuuuuaaa

SEQ ID NO: 1946285 - RNA, 14 nt, Human
aaagucuuuuaaaa

SEQ ID NO: 1946286 - RNA, 15 nt, Human
aaagucuuuuaaaaa

SEQ ID NO: 1946287 - RNA, 16 nt, Human
aaagucuuuuaaaaag

SEQ ID NO: 1946288 - RNA, 20 nt, Human
aaagucuuuuaaaaaguauu

SEQ ID NO: 1946289 - RNA, 21 nt, Human
aaagucuuuuaaaaaguauug

SEQ ID NO: 1946290 - RNA, 17 nt, Human
aaaggcuuauaaaacag

SEQ ID NO: 1946291 - RNA, 17 nt, Human
aaaggcuugcagaacuu

SEQ ID NO: 1946292 - RNA, 14 nt, Human
aaaggcuuauaaaa

SEQ ID NO: 1946293 - RNA, 16 nt, Human
aaagggacugagaaau

SEQ ID NO: 1946294 - RNA, 13 nt, Human
aaagggaaauuga

SEQ ID NO: 1946295 - RNA, 19 nt, Human
aaagucucuggaauuugaa

SEQ ID NO: 1946296 - RNA, 23 nt, Human
aaaucuuccuggucgaaaguuag

SEQ ID NO: 1946297 - RNA, 20 nt, Human
aaaucuuauuaaaguuucaa

SEQ ID NO: 1946298 - RNA, 21 nt, Human
aaaucuuauuaaaguuucaaa

SEQ ID NO: 1946299 - RNA, 22 nt, Human
aaaucuuauuaaaguuucaaaa

SEQ ID NO: 1946300 - RNA, 16 nt, Human
aaaucaaauguaaagu

SEQ ID NO: 1946301 - RNA, 22 nt, Human
aaaucaaauguaaaguuuaauu

SEQ ID NO: 1946302 - RNA, 22 nt, Human
aaauggacguguuaugacucca

SEQ ID NO: 1946303 - RNA, 21 nt, Human
aaauggacguguuaugacucc

SEQ ID NO: 1946304 - RNA, 20 nt, Human
aaauggacguguuaugacuc

SEQ ID NO: 1946305 - RNA, 14 nt, Human
aaauggaaacagag

SEQ ID NO: 1946306 - RNA, 18 nt, Human
aaaucuuuccauauccau

SEQ ID NO: 1946307 - RNA, 18 nt, Human
aaauggaagacagcucuu

SEQ ID NO: 1946308 - RNA, 16 nt, Human
aaauggaaaugggcag

SEQ ID NO: 1946309 - RNA, 14 nt, Human
aaauauaauugaca

SEQ ID NO: 1946310 - RNA, 20 nt, Human
aaauauuuuaauuuuuaaau

SEQ ID NO: 1946311 - RNA, 21 nt, Human
aaauauuuuaauuuuuaaaug

SEQ ID NO: 1946312 - RNA, 22 nt, Human
aaauauuuuaauuuuuaaaugc

SEQ ID NO: 1946313 - RNA, 23 nt, Human
aaauaguaggcaagauggcacag

SEQ ID NO: 1946314 - RNA, 13 nt, Human
aaauaguaggcaa

SEQ ID NO: 1946315 - RNA, 22 nt, Human
aaauaguaggcaagauggcaca

SEQ ID NO: 1946316 - RNA, 13 nt, Human
aaauaguaaaaau

SEQ ID NO: 1946317 - RNA, 16 nt, Human
aaauaguaaaaauaaa

SEQ ID NO: 1946318 - RNA, 17 nt, Human
aaauagacagcaugaga

SEQ ID NO: 1946319 - RNA, 15 nt, Human
aaauacuuaaauguu

SEQ ID NO: 1946320 - RNA, 16 nt, Human
aaauacuuaaauguua

SEQ ID NO: 1946321 - RNA, 18 nt, Human
aaauacuuaaauguuaug

SEQ ID NO: 1946322 - RNA, 19 nt, Human
aaauacuuaaauguuaugu

SEQ ID NO: 1946323 - RNA, 20 nt, Human
aaauacuuaaauguuaugua

SEQ ID NO: 1946324 - RNA, 19 nt, Human
aaauacuuaacuacuguuu

SEQ ID NO: 1946325 - RNA, 22 nt, Human
aaauacuguuuuuaacaacuau

SEQ ID NO: 1946326 - RNA, 13 nt, Human
aaauacuuaaaug

SEQ ID NO: 1946327 - RNA, 15 nt, Human
aaauacuguagauaa

SEQ ID NO: 1946328 - RNA, 16 nt, Human
aaauacuguagauaau

SEQ ID NO: 1946329 - RNA, 17 nt, Human
aaauacuguagauaauu

SEQ ID NO: 1946330 - RNA, 18 nt, Human
aaauacuguagauaauua

SEQ ID NO: 1946331 - RNA, 20 nt, Human
aaauacuguagauaauuaac

SEQ ID NO: 1946332 - RNA, 23 nt, Human
aaauacuguagauaauuaaccaa

SEQ ID NO: 1946333 - RNA, 11 nt, Human
aaauacuguag

SEQ ID NO: 1946334 - RNA, 14 nt, Human
aaauacuguagaua

SEQ ID NO: 1946335 - RNA, 18 nt, Human
aauuaguggcacuugcuu

SEQ ID NO: 1946336 - RNA, 18 nt, Human
aauuaaaacacaacaucu

SEQ ID NO: 1946337 - RNA, 14 nt, Human
aauguuuugcuuuu

SEQ ID NO: 1946338 - RNA, 13 nt, Human
aauguuuuguaaa

SEQ ID NO: 1946339 - RNA, 14 nt, Human
aauguuuuguaaac

SEQ ID NO: 1946340 - RNA, 15 nt, Human
aauguuuuguaaacu

SEQ ID NO: 1946341 - RNA, 17 nt, Human
aauguuuuguaaacuuu

SEQ ID NO: 1946342 - RNA, 18 nt, Human
aauguuuuguaaacuuug

SEQ ID NO: 1946343 - RNA, 19 nt, Human
aauguuuuguaaacuuuga

SEQ ID NO: 1946344 - RNA, 20 nt, Human
aauguuuuguaaacuuugaa

SEQ ID NO: 1946345 - RNA, 21 nt, Human
aauguuuuguaaacuuugaaa

SEQ ID NO: 1946346 - RNA, 22 nt, Human
aauguuuuguaaacuuugaaau

SEQ ID NO: 1946347 - RNA, 23 nt, Human
aauguuuuguaaacuuugaaaua

SEQ ID NO: 1946348 - RNA, 22 nt, Human
aauguuuuuaagaugaucaucu

SEQ ID NO: 1946349 - RNA, 18 nt, Human
aauguuugccucugccuc

SEQ ID NO: 1946350 - RNA, 16 nt, Human
aauguuuuaacaagaa

SEQ ID NO: 1946351 - RNA, 14 nt, Human
aauguuuucagcua

SEQ ID NO: 1946352 - RNA, 19 nt, Human
aauguuugccucugccucu

SEQ ID NO: 1946353 - RNA, 13 nt, Human
aauuaaagaaaua

SEQ ID NO: 1946354 - RNA, 12 nt, Human
aaugguaguuuc

SEQ ID NO: 1946355 - RNA, 13 nt, Human
aaugguaguuucu

SEQ ID NO: 1946356 - RNA, 14 nt, Human
aaugguaguuuuac

SEQ ID NO: 1946357 - RNA, 14 nt, Human
aaugguaguuucug

SEQ ID NO: 1946358 - RNA, 17 nt, Human
aaugguaguuucugugg

SEQ ID NO: 1946359 - RNA, 18 nt, Human
aaugguaguuucuguggu

SEQ ID NO: 1946360 - RNA, 20 nt, Human
aaugguaguuucugugguug

SEQ ID NO: 1946361 - RNA, 22 nt, Human
aaugguacaaaaccacagugua

SEQ ID NO: 1946362 - RNA, 20 nt, Human
aaugguacuccacauauuuc

SEQ ID NO: 1946363 - RNA, 13 nt, Human
aaugggcagagca

SEQ ID NO: 1946364 - RNA, 15 nt, Human
aaugggcagagcaga

SEQ ID NO: 1946365 - RNA, 16 nt, Human
aaugucaguaugugga

SEQ ID NO: 1946366 - RNA, 22 nt, Human
aaugucaguauguggaagugug

SEQ ID NO: 1946367 - RNA, 13 nt, Human
aaugucaguguga

SEQ ID NO: 1946368 - RNA, 16 nt, Human
aaugucagugugacug

SEQ ID NO: 1946369 - RNA, 15 nt, Human
aaugucagugugacu

SEQ ID NO: 1946370 - RNA, 22 nt, Human
aauggucuuucuaaugugugaa

SEQ ID NO: 1946371 - RNA, 22 nt, Human
aauggugaacugucauuacaga

SEQ ID NO: 1946372 - RNA, 12 nt, Human
aauggugauuuu

SEQ ID NO: 1946373 - RNA, 13 nt, Human
aauggugauuuua

SEQ ID NO: 1946374 - RNA, 15 nt, Human
aauggugauuuuaaa

SEQ ID NO: 1946375 - RNA, 21 nt, Human
aaugucagugugacugaucuc

SEQ ID NO: 1946376 - RNA, 17 nt, Human
aaugucagugugacuga

SEQ ID NO: 1946377 - RNA, 22 nt, Human
aaugucuaguuguaacaccaug

SEQ ID NO: 1946378 - RNA, 19 nt, Human
aaugucaguuguuauuuau

SEQ ID NO: 1946379 - RNA, 20 nt, Human
aaugucaguuguuauuuauu

SEQ ID NO: 1946380 - RNA, 22 nt, Human
aaugucaguuguuauuuauuga

SEQ ID NO: 1946381 - RNA, 20 nt, Human
aaugucucuuuaaugucaca

SEQ ID NO: 1946382 - RNA, 14 nt, Human
aauauguacauuuc

SEQ ID NO: 1946383 - RNA, 15 nt, Human
aauauguacauuucu

SEQ ID NO: 1946384 - RNA, 16 nt, Human
aauauguacauuucua

SEQ ID NO: 1946385 - RNA, 18 nt, Human
aauauguacauuucuaag

SEQ ID NO: 1946386 - RNA, 18 nt, Human
aauauggucuuuugguua

SEQ ID NO: 1946387 - RNA, 13 nt, Human
aauaugggagaaa

SEQ ID NO: 1946388 - RNA, 21 nt, Human
aauauguauucuguaaaagaa

SEQ ID NO: 1946389 - RNA, 16 nt, Human
aauauguauuaacacu

SEQ ID NO: 1946390 - RNA, 19 nt, Human
aauauguacauuucuaagu

SEQ ID NO: 1946391 - RNA, 21 nt, Human
aaucaacauggcuacuugcuu

SEQ ID NO: 1946392 - RNA, 16 nt, Human
aaucaacuaguauuug

SEQ ID NO: 1946393 - RNA, 14 nt, Human
aaucaagaaacaaa

SEQ ID NO: 1946394 - RNA, 12 nt, Human
aaucacaggcug

SEQ ID NO: 1946395 - RNA, 13 nt, Human
aaucacaggcugg

SEQ ID NO: 1946396 - RNA, 21 nt, Human
aaucacaggcugggcugggca

SEQ ID NO: 1946397 - RNA, 20 nt, Human
aauauaggaacuuaaauaau

SEQ ID NO: 1946398 - RNA, 21 nt, Human
aauauaggaacuuaaauaaug

SEQ ID NO: 1946399 - RNA, 17 nt, Human
aauauaauacacaaaau

SEQ ID NO: 1946400 - RNA, 18 nt, Human
aauauaggaacuuaaaua

SEQ ID NO: 1946401 - RNA, 13 nt, Human
aauauaauauugu

SEQ ID NO: 1946402 - RNA, 14 nt, Human
aauauaauauuguc

SEQ ID NO: 1946403 - RNA, 19 nt, Human
aaugaugccaugaggaaca

SEQ ID NO: 1946404 - RNA, 13 nt, Human
aaucuccaaaaua

SEQ ID NO: 1946405 - RNA, 14 nt, Human
aaucuccaaaauaa

SEQ ID NO: 1946406 - RNA, 18 nt, Human
aaucuccaaaauaaaacu

SEQ ID NO: 1946407 - RNA, 18 nt, Human
aauccaggguggugguga

SEQ ID NO: 1946408 - RNA, 16 nt, Human
aaugaaccacaucuug

SEQ ID NO: 1946409 - RNA, 14 nt, Human
aaugaacauuaaca

SEQ ID NO: 1946410 - RNA, 23 nt, Human
aaucuggaccccaucugugaaua

SEQ ID NO: 1946411 - RNA, 22 nt, Human
aaucuggaccccaucugugaau

SEQ ID NO: 1946412 - RNA, 17 nt, Human
aaugaaccacaucuugc

SEQ ID NO: 1946413 - RNA, 23 nt, Human
aaugaaccacaucuugcucugcu

SEQ ID NO: 1946414 - RNA, 21 nt, Human
aaucuggaccccaucugugaa

SEQ ID NO: 1946415 - RNA, 22 nt, Human
aaucugcuuuuuaaagaaugcu

SEQ ID NO: 1946416 - RNA, 23 nt, Human
aaucugcaaagcauguuuugcau

SEQ ID NO: 1946417 - RNA, 16 nt, Human
aaucugcaaagcaugu

SEQ ID NO: 1946418 - RNA, 19 nt, Human
aaucugcaaagcauguuuu

SEQ ID NO: 1946419 - RNA, 21 nt, Human
aaucugcaaagcauguuuugc

SEQ ID NO: 1946420 - RNA, 12 nt, Human
aaugaagauacu

SEQ ID NO: 1946421 - RNA, 20 nt, Human
aaugaagagcuguugauggg

SEQ ID NO: 1946422 - RNA, 17 nt, Human
aaugaagaauuuaaaga

SEQ ID NO: 1946423 - RNA, 18 nt, Human
aaugaagaauuuaaagaa

SEQ ID NO: 1946424 - RNA, 15 nt, Human
aaugaagaauucaga

SEQ ID NO: 1946425 - RNA, 13 nt, Human
aaugaagaauuua

SEQ ID NO: 1946426 - RNA, 14 nt, Human
aaugaagaauuuaa

SEQ ID NO: 1946427 - RNA, 15 nt, Human
aaugaagaauuuaaa

SEQ ID NO: 1946428 - RNA, 16 nt, Human
aaugaagaauuuaaag

SEQ ID NO: 1946429 - RNA, 17 nt, Human
aaugaagauacugaaau

SEQ ID NO: 1946430 - RNA, 21 nt, Human
aaugaugauccuaggcauuug

SEQ ID NO: 1946431 - RNA, 18 nt, Human
aaggcaaggcugucaauu

SEQ ID NO: 1946432 - RNA, 17 nt, Human
aaggcaaggcugucaau

SEQ ID NO: 1946433 - RNA, 13 nt, Human
aagcugggcaggu

SEQ ID NO: 1946434 - RNA, 15 nt, Human
aagcugggcagguug

SEQ ID NO: 1946435 - RNA, 14 nt, Human
aagcuggccugaga

SEQ ID NO: 1946436 - RNA, 18 nt, Human
aagcuggcuuacacuggc

SEQ ID NO: 1946437 - RNA, 18 nt, Human
aaggacauugcggacagc

SEQ ID NO: 1946438 - RNA, 11 nt, Human
aagcugggcag

SEQ ID NO: 1946439 - RNA, 13 nt, Human
aagcuggccugag

SEQ ID NO: 1946440 - RNA, 18 nt, Human
aaggacccggaggggccu

SEQ ID NO: 1946441 - RNA, 15 nt, Human
aaggacuaggguccu

SEQ ID NO: 1946442 - RNA, 21 nt, Human
aaggacccggaggggccuggc

SEQ ID NO: 1946443 - RNA, 18 nt, Human
aaggacuaggguccuggg

SEQ ID NO: 1946444 - RNA, 20 nt, Human
aaggacuaggguccugggga

SEQ ID NO: 1946445 - RNA, 12 nt, Human
aaggacugacug

SEQ ID NO: 1946446 - RNA, 19 nt, Human
aaggacugacugaggcagu

SEQ ID NO: 1946447 - RNA, 16 nt, Human
aaggauuuguguuuua

SEQ ID NO: 1946448 - RNA, 14 nt, Human
aaggcaaaaacaaa

SEQ ID NO: 1946449 - RNA, 12 nt, Human
aagcguggugga

SEQ ID NO: 1946450 - RNA, 23 nt, Human
aagcugccuccccucuccuuccu

SEQ ID NO: 1946451 - RNA, 22 nt, Human
aagcugcacccucaggcaggug

SEQ ID NO: 1946452 - RNA, 20 nt, Human
aagcugcacccucaggcagg

SEQ ID NO: 1946453 - RNA, 21 nt, Human
aagcugcacccucaggcaggu

SEQ ID NO: 1946454 - RNA, 17 nt, Human
aagcuaagguuuagaua

SEQ ID NO: 1946455 - RNA, 22 nt, Human
aagcuaacagcaguuucaggua

SEQ ID NO: 1946456 - RNA, 21 nt, Human
aagcuaacagcaguuucaggu

SEQ ID NO: 1946457 - RNA, 18 nt, Human
aagccauaauuguucuua

SEQ ID NO: 1946458 - RNA, 14 nt, Human
aagccaugagaaug

SEQ ID NO: 1946459 - RNA, 16 nt, Human
aagccaugagaauguu

SEQ ID NO: 1946460 - RNA, 22 nt, Human
aagaaauuaugugccagauuua

SEQ ID NO: 1946461 - RNA, 13 nt, Human
aagaaauuaacuu

SEQ ID NO: 1946462 - RNA, 21 nt, Human
aagaaauuagggcucuaauuu

SEQ ID NO: 1946463 - RNA, 13 nt, Human
aagaaauuaugug

SEQ ID NO: 1946464 - RNA, 20 nt, Human
aagauuguuuaucuagaugu

SEQ ID NO: 1946465 - RNA, 22 nt, Human
aagauuguuuaucuagauguaa

SEQ ID NO: 1946466 - RNA, 13 nt, Human
aagauuguuuauc

SEQ ID NO: 1946467 - RNA, 15 nt, Human
aagauuguuuaucua

SEQ ID NO: 1946468 - RNA, 19 nt, Human
aagauuguuuaucuagaug

SEQ ID NO: 1946469 - RNA, 17 nt, Human
aagauugugugguguuu

SEQ ID NO: 1946470 - RNA, 17 nt, Human
aagauugucauuaguga

SEQ ID NO: 1946471 - RNA, 18 nt, Human
aagcaggcuucuaugaaa

SEQ ID NO: 1946472 - RNA, 23 nt, Human
aagccagacucugccaaaaccaa

SEQ ID NO: 1946473 - RNA, 14 nt, Human
aagcagcucucccc

SEQ ID NO: 1946474 - RNA, 17 nt, Human
aagcagcucuccccuca

SEQ ID NO: 1946475 - RNA, 11 nt, Human
aagcaggaggc

SEQ ID NO: 1946476 - RNA, 23 nt, Human
aagcaggcgcaagggaggcccag

SEQ ID NO: 1946477 - RNA, 16 nt, Human
aagcagaauuggaaaa

SEQ ID NO: 1946478 - RNA, 19 nt, Human
aagcagaauuggaaaagac

SEQ ID NO: 1946479 - RNA, 14 nt, Human
aagcagaggaagga

SEQ ID NO: 1946480 - RNA, 21 nt, Human
aagcagaauuggaaaagacua

SEQ ID NO: 1946481 - RNA, 22 nt, Human
aagugcugggauuacaggugug

SEQ ID NO: 1946482 - RNA, 16 nt, Human
aauaaugugaaacugg

SEQ ID NO: 1946483 - RNA, 19 nt, Human
aauaauguaagacaaauau

SEQ ID NO: 1946484 - RNA, 12 nt, Human
aauaauguaaga

SEQ ID NO: 1946485 - RNA, 13 nt, Human
aauaaucauugga

SEQ ID NO: 1946486 - RNA, 20 nt, Human
aauaauaaagaauagcuuua

SEQ ID NO: 1946487 - RNA, 11 nt, Human
aauaaucaaga

SEQ ID NO: 1946488 - RNA, 13 nt, Human
aauaaucaagagc

SEQ ID NO: 1946489 - RNA, 15 nt, Human
aauaaucaagagccu

SEQ ID NO: 1946490 - RNA, 12 nt, Human
aauaauaaagaa

SEQ ID NO: 1946491 - RNA, 17 nt, Human
aauaauaaaaaauuuca

SEQ ID NO: 1946492 - RNA, 15 nt, Human
aauaaugagaaaugu

SEQ ID NO: 1946493 - RNA, 14 nt, Human
aauaauccugcaaa

SEQ ID NO: 1946494 - RNA, 19 nt, Human
aauaauccugcaaaguaca

SEQ ID NO: 1946495 - RNA, 14 nt, Human
aauaaucucauugg

SEQ ID NO: 1946496 - RNA, 21 nt, Human
aauaauccuaaacauaugaau

SEQ ID NO: 1946497 - RNA, 22 nt, Human
aaguuguaugaucugugccuuu

SEQ ID NO: 1946498 - RNA, 22 nt, Human
aaguuguaggcauaaagucagg

SEQ ID NO: 1946499 - RNA, 14 nt, Human
aagugguuuuaaua

SEQ ID NO: 1946500 - RNA, 17 nt, Human
aauaaacgucuuaaaua

SEQ ID NO: 1946501 - RNA, 16 nt, Human
aauaaacgucuuaaau

SEQ ID NO: 1946502 - RNA, 23 nt, Human
aauaaaauuaaagcugaaaacug

SEQ ID NO: 1946503 - RNA, 17 nt, Human
aauaagugccaggaugg

SEQ ID NO: 1946504 - RNA, 19 nt, Human
aauaaacuauuuguaaagu

SEQ ID NO: 1946505 - RNA, 18 nt, Human
aauaaacuggcagcucag

SEQ ID NO: 1946506 - RNA, 11 nt, Human
aaggugggagg

SEQ ID NO: 1946507 - RNA, 16 nt, Human
aagguuaauaaaguaa

SEQ ID NO: 1946508 - RNA, 15 nt, Human
aagguuaauaaagua

SEQ ID NO: 1946509 - RNA, 15 nt, Human
aagguguuugaaaau

SEQ ID NO: 1946510 - RNA, 20 nt, Human
aagguguuugaaaauaguuu

SEQ ID NO: 1946511 - RNA, 21 nt, Human
aagguguuugaaaauaguuua

SEQ ID NO: 1946512 - RNA, 20 nt, Human
aagguuaauguucaucaucc

SEQ ID NO: 1946513 - RNA, 16 nt, Human
aaguaucccuacugua

SEQ ID NO: 1946514 - RNA, 23 nt, Human
aaguccaggcuuuuuuaucaugu

SEQ ID NO: 1946515 - RNA, 15 nt, Human
aaguagaacuuugua

SEQ ID NO: 1946516 - RNA, 16 nt, Human
aaguagaacuuuguau

SEQ ID NO: 1946517 - RNA, 15 nt, Human
aaguacuuuuggcau

SEQ ID NO: 1946518 - RNA, 14 nt, Human
aaguacuuuuggca

SEQ ID NO: 1946519 - RNA, 11 nt, Human
aaguacuucuu

SEQ ID NO: 1946520 - RNA, 16 nt, Human
aagucuuagauguaua

SEQ ID NO: 1946521 - RNA, 19 nt, Human
aagucucuggaauuugaaa

SEQ ID NO: 1946522 - RNA, 23 nt, Human
cucguguuauuuuaaucucagaa

SEQ ID NO: 1946523 - RNA, 21 nt, Human
cucuaaaauauuuaugaagaa

SEQ ID NO: 1946524 - RNA, 11 nt, Human
cucuaaaauau

SEQ ID NO: 1946525 - RNA, 19 nt, Human
cucuaaaauauuuaugaag

SEQ ID NO: 1946526 - RNA, 18 nt, Human
cucguuggaagaggaaca

SEQ ID NO: 1946527 - RNA, 15 nt, Human
cucuaucaccaagga

SEQ ID NO: 1946528 - RNA, 15 nt, Human
cucuauccugggcuu

SEQ ID NO: 1946529 - RNA, 16 nt, Human
cucuauccugggcuuu

SEQ ID NO: 1946530 - RNA, 18 nt, Human
cucucacagacaggaccc

SEQ ID NO: 1946531 - RNA, 20 nt, Human
cucucacagacaggaccccu

SEQ ID NO: 1946532 - RNA, 19 nt, Human
cucucaaugcuguuugggu

SEQ ID NO: 1946533 - RNA, 13 nt, Human
cucucaauuuuug

SEQ ID NO: 1946534 - RNA, 14 nt, Human
cucucaauuuuugg

SEQ ID NO: 1946535 - RNA, 19 nt, Human
cucucaauuuuugguugaa

SEQ ID NO: 1946536 - RNA, 22 nt, Human
cucucaauuuuugguugaauaa

SEQ ID NO: 1946537 - RNA, 14 nt, Human
cucucacagacagg

SEQ ID NO: 1946538 - RNA, 17 nt, Human
cucucacagacaggacc

SEQ ID NO: 1946539 - RNA, 18 nt, Human
cucucaccuugguuccug

SEQ ID NO: 1946540 - RNA, 23 nt, Human
cucucaccuugguuccuggggca

SEQ ID NO: 1946541 - RNA, 19 nt, Human
cucucaggaaaugcugacc

SEQ ID NO: 1946542 - RNA, 20 nt, Human
cucucaggaaaugcugaccc

SEQ ID NO: 1946543 - RNA, 21 nt, Human
cucucaggaaaugcugaccca

SEQ ID NO: 1946544 - RNA, 13 nt, Human
cucgaacuggcug

SEQ ID NO: 1946545 - RNA, 14 nt, Human
cucgaacuggcugc

SEQ ID NO: 1946546 - RNA, 15 nt, Human
cucgaacuggcugca

SEQ ID NO: 1946547 - RNA, 23 nt, Human
cuccuggggguucuuucuuccuc

SEQ ID NO: 1946548 - RNA, 14 nt, Human
cuccuggggguucu

SEQ ID NO: 1946549 - RNA, 18 nt, Human
cuccuggggguucuuucu

SEQ ID NO: 1946550 - RNA, 20 nt, Human
cuccuggggguucuuucuuc

SEQ ID NO: 1946551 - RNA, 22 nt, Human
cuccuggggguucuuucuuccu

SEQ ID NO: 1946552 - RNA, 16 nt, Human
cuccuaaaaggcccag

SEQ ID NO: 1946553 - RNA, 12 nt, Human
cuccuacagccc

SEQ ID NO: 1946554 - RNA, 21 nt, Human
cuccucuccugacaauacugu

SEQ ID NO: 1946555 - RNA, 17 nt, Human
cuccuaaaaggcccaga

SEQ ID NO: 1946556 - RNA, 18 nt, Human
cuccuaaaaggcccagag

SEQ ID NO: 1946557 - RNA, 19 nt, Human
cuccuaaaaggcccagaga

SEQ ID NO: 1946558 - RNA, 13 nt, Human
cuccucucugccc

SEQ ID NO: 1946559 - RNA, 14 nt, Human
cuccucucugcccu

SEQ ID NO: 1946560 - RNA, 15 nt, Human
cuccucucugcccua

SEQ ID NO: 1946561 - RNA, 18 nt, Human
cuccucugcugcuggcug

SEQ ID NO: 1946562 - RNA, 16 nt, Human
cuccucugcugcuggc

SEQ ID NO: 1946563 - RNA, 19 nt, Human
cuccucucugcccuaaugc

SEQ ID NO: 1946564 - RNA, 18 nt, Human
cuccuggcccacugcauc

SEQ ID NO: 1946565 - RNA, 16 nt, Human
cuccuggcccacugca

SEQ ID NO: 1946566 - RNA, 14 nt, Human
cuccucuuccaggc

SEQ ID NO: 1946567 - RNA, 15 nt, Human
cuccuggacuccugc

SEQ ID NO: 1946568 - RNA, 18 nt, Human
cuccucuucaacugacca

SEQ ID NO: 1946569 - RNA, 23 nt, Human
cuccucuucaacugaccagccuc

SEQ ID NO: 1946570 - RNA, 20 nt, Human
cucccccagccccauccucu

SEQ ID NO: 1946571 - RNA, 15 nt, Human
cucccccagccccau

SEQ ID NO: 1946572 - RNA, 13 nt, Human
cucccccagccac

SEQ ID NO: 1946573 - RNA, 22 nt, Human
cucccccagccccauccucugu

SEQ ID NO: 1946574 - RNA, 14 nt, Human
cucccccagccacu

SEQ ID NO: 1946575 - RNA, 16 nt, Human
cucccccagccacucc

SEQ ID NO: 1946576 - RNA, 12 nt, Human
cucccccauccu

SEQ ID NO: 1946577 - RNA, 13 nt, Human
cucccccauccua

SEQ ID NO: 1946578 - RNA, 13 nt, Human
cucccccaucucu

SEQ ID NO: 1946579 - RNA, 10 nt, Human
cuccagggcu

SEQ ID NO: 1946580 - RNA, 21 nt, Human
cuccagggcucaacacuguga

SEQ ID NO: 1946581 - RNA, 15 nt, Human
cucccaccuuuaauc

SEQ ID NO: 1946582 - RNA, 23 nt, Human
cuccacuuggucugugagaugcu

SEQ ID NO: 1946583 - RNA, 19 nt, Human
cuccacuuucuagccagag

SEQ ID NO: 1946584 - RNA, 16 nt, Human
cuccacuuucuagcca

SEQ ID NO: 1946585 - RNA, 20 nt, Human
cuccacuuucuagccagagg

SEQ ID NO: 1946586 - RNA, 13 nt, Human
cucagucucccuc

SEQ ID NO: 1946587 - RNA, 15 nt, Human
cucagucucccuccc

SEQ ID NO: 1946588 - RNA, 16 nt, Human
cucagucucccucccu

SEQ ID NO: 1946589 - RNA, 17 nt, Human
cucagucucccucccuu

SEQ ID NO: 1946590 - RNA, 14 nt, Human
cucagucucacauu

SEQ ID NO: 1946591 - RNA, 21 nt, Human
cucaucuggaguucucaaaga

SEQ ID NO: 1946592 - RNA, 17 nt, Human
cucaucuggaguucuca

SEQ ID NO: 1946593 - RNA, 13 nt, Human
cuccacuuggucu

SEQ ID NO: 1946594 - RNA, 15 nt, Human
cuccacuuggucugu

SEQ ID NO: 1946595 - RNA, 16 nt, Human
cuccacuggauggagg

SEQ ID NO: 1946596 - RNA, 16 nt, Human
cuccacuuggucugug

SEQ ID NO: 1946597 - RNA, 17 nt, Human
cuccacuuggucuguga

SEQ ID NO: 1946598 - RNA, 21 nt, Human
cuccacuuggucugugagaug

SEQ ID NO: 1946599 - RNA, 22 nt, Human
cuccacuuggucugugagaugc

SEQ ID NO: 1946600 - RNA, 16 nt, Human
cuccaagcucccaggc

SEQ ID NO: 1946601 - RNA, 15 nt, Human
cuccaagcucccagg

SEQ ID NO: 1946602 - RNA, 14 nt, Human
cuccaagcucccag

SEQ ID NO: 1946603 - RNA, 13 nt, Human
cuccaagcuccca

SEQ ID NO: 1946604 - RNA, 13 nt, Human
cuccaagccagcg

SEQ ID NO: 1946605 - RNA, 13 nt, Human
cuccaagccagca

SEQ ID NO: 1946606 - RNA, 15 nt, Human
cuccaagccagcaag

SEQ ID NO: 1946607 - RNA, 23 nt, Human
cuccaagcccaguucagcuuggg

SEQ ID NO: 1946608 - RNA, 16 nt, Human
cuccaagccagcaagc

SEQ ID NO: 1946609 - RNA, 18 nt, Human
cuccaagcuccaucucca

SEQ ID NO: 1946610 - RNA, 19 nt, Human
cuccaagcuccaucuccac

SEQ ID NO: 1946611 - RNA, 14 nt, Human
cuccaagcuccauc

SEQ ID NO: 1946612 - RNA, 24 nt, Human
cuccaagcaggacauggacaagga

SEQ ID NO: 1946613 - RNA, 22 nt, Human
cuccaagcaggacauggacaag

SEQ ID NO: 1946614 - RNA, 14 nt, Human
cuccaagcaggaca

SEQ ID NO: 1946615 - RNA, 13 nt, Human
cuccaagcaggac

SEQ ID NO: 1946616 - RNA, 22 nt, Human
cuccaagaccuucuccuucacc

SEQ ID NO: 1946617 - RNA, 14 nt, Human
cuccaagaauuucu

SEQ ID NO: 1946618 - RNA, 15 nt, Human
cuccaagaccuucuc

SEQ ID NO: 1946619 - RNA, 21 nt, Human
cuccaagaccuucuccuucac

SEQ ID NO: 1946620 - RNA, 12 nt, Human
cucaugccucag

SEQ ID NO: 1946621 - RNA, 16 nt, Human
cucaugccucagccuc

SEQ ID NO: 1946622 - RNA, 15 nt, Human
cucauguucugcuuu

SEQ ID NO: 1946623 - RNA, 14 nt, Human
cucaugugauuuac

SEQ ID NO: 1946624 - RNA, 16 nt, Human
cucauguucugcuuuc

SEQ ID NO: 1946625 - RNA, 13 nt, Human
cuccaagaauuuc

SEQ ID NO: 1946626 - RNA, 12 nt, Human
cuccaacuccaa

SEQ ID NO: 1946627 - RNA, 18 nt, Human
cuccaacuccaacaucca

SEQ ID NO: 1946628 - RNA, 15 nt, Human
cugacaacagacuuc

SEQ ID NO: 1946629 - RNA, 18 nt, Human
cugacaacagacuucuga

SEQ ID NO: 1946630 - RNA, 19 nt, Human
cugacaacagacuucugaa

SEQ ID NO: 1946631 - RNA, 17 nt, Human
cugacaauacuguaugu

SEQ ID NO: 1946632 - RNA, 22 nt, Human
cugagacucgcgacaaugcaaa

SEQ ID NO: 1946633 - RNA, 17 nt, Human
cugagagcccagaaaag

SEQ ID NO: 1946634 - RNA, 11 nt, Human
cugagagcaaa

SEQ ID NO: 1946635 - RNA, 23 nt, Human
cugagagaggcuaaaauguuuuc

SEQ ID NO: 1946636 - RNA, 16 nt, Human
cugagagagcgcagcc

SEQ ID NO: 1946637 - RNA, 19 nt, Human
cugagagaggcuaaaaugu

SEQ ID NO: 1946638 - RNA, 20 nt, Human
cugagagaggcuaaaauguu

SEQ ID NO: 1946639 - RNA, 21 nt, Human
cugagagaggcuaaaauguuu

SEQ ID NO: 1946640 - RNA, 17 nt, Human
cugagaguagagucacu

SEQ ID NO: 1946641 - RNA, 15 nt, Human
cugagagucuagagg

SEQ ID NO: 1946642 - RNA, 14 nt, Human
cugagaggggaagc

SEQ ID NO: 1946643 - RNA, 12 nt, Human
cugagaggccac

SEQ ID NO: 1946644 - RNA, 14 nt, Human
cugagaggcugucu

SEQ ID NO: 1946645 - RNA, 21 nt, Human
cugagaggacuuuucuuugug

SEQ ID NO: 1946646 - RNA, 22 nt, Human
cugagaggacuuuucuuugugg

SEQ ID NO: 1946647 - RNA, 22 nt, Human
cugacccaugcugcccugugag

SEQ ID NO: 1946648 - RNA, 21 nt, Human
cugacccaugcugcccuguga

SEQ ID NO: 1946649 - RNA, 13 nt, Human
cugacccaugggc

SEQ ID NO: 1946650 - RNA, 17 nt, Human
cugacccaugggcagga

SEQ ID NO: 1946651 - RNA, 19 nt, Human
cugacccaugggcaggaga

SEQ ID NO: 1946652 - RNA, 21 nt, Human
cugagacucgcgacaaugcaa

SEQ ID NO: 1946653 - RNA, 23 nt, Human
cugagacagcccgggcucugccu

SEQ ID NO: 1946654 - RNA, 14 nt, Human
cugaguagcuggga

SEQ ID NO: 1946655 - RNA, 15 nt, Human
cugaguagcugggau

SEQ ID NO: 1946656 - RNA, 20 nt, Human
cugaguagcugggauuacag

SEQ ID NO: 1946657 - RNA, 17 nt, Human
cugaguagcucugccuu

SEQ ID NO: 1946658 - RNA, 18 nt, Human
cugaguagcucugccuuu

SEQ ID NO: 1946659 - RNA, 18 nt, Human
cugaguacguugugcauu

SEQ ID NO: 1946660 - RNA, 17 nt, Human
cugaguacguugugcau

SEQ ID NO: 1946661 - RNA, 19 nt, Human
cugaguacguugugcauuu

SEQ ID NO: 1946662 - RNA, 20 nt, Human
cugaguacguugugcauuug

SEQ ID NO: 1946663 - RNA, 12 nt, Human
cugaggugggag

SEQ ID NO: 1946664 - RNA, 21 nt, Human
cugaguacguugugcauuugg

SEQ ID NO: 1946665 - RNA, 22 nt, Human
cugaggacuuaaaauauuccug

SEQ ID NO: 1946666 - RNA, 19 nt, Human
cugaggacauggcuucuga

SEQ ID NO: 1946667 - RNA, 14 nt, Human
cugaggaccagcca

SEQ ID NO: 1946668 - RNA, 23 nt, Human
cugaggaggccuugggcucugcu

SEQ ID NO: 1946669 - RNA, 22 nt, Human
cugaggugaugaagacagcccg

SEQ ID NO: 1946670 - RNA, 15 nt, Human
cugagcuuucugcua

SEQ ID NO: 1946671 - RNA, 14 nt, Human
cugagcuuucugcu

SEQ ID NO: 1946672 - RNA, 21 nt, Human
cugagaugagaggggagagcu

SEQ ID NO: 1946673 - RNA, 20 nt, Human
cugagaugccuggugagcau

SEQ ID NO: 1946674 - RNA, 16 nt, Human
cugagaucucugcagg

SEQ ID NO: 1946675 - RNA, 17 nt, Human
cugagaucucugcagga

SEQ ID NO: 1946676 - RNA, 18 nt, Human
cugagaucucugcaggaa

SEQ ID NO: 1946677 - RNA, 21 nt, Human
cugagaucaaaacgguuuuac

SEQ ID NO: 1946678 - RNA, 23 nt, Human
cugaggacacuaaccacgcugga

SEQ ID NO: 1946679 - RNA, 23 nt, Human
cugaggacaagagaaaaaagcca

SEQ ID NO: 1946680 - RNA, 21 nt, Human
cugaggaauccagacccggcu

SEQ ID NO: 1946681 - RNA, 20 nt, Human
cugaggacacuaaccacgcu

SEQ ID NO: 1946682 - RNA, 17 nt, Human
cugaggaauccagaccc

SEQ ID NO: 1946683 - RNA, 20 nt, Human
cugaggaauccagacccggc

SEQ ID NO: 1946684 - RNA, 14 nt, Human
cugaggaauccaga

SEQ ID NO: 1946685 - RNA, 13 nt, Human
cucuucagcacaa

SEQ ID NO: 1946686 - RNA, 18 nt, Human
cucuuagcaaaaacaugu

SEQ ID NO: 1946687 - RNA, 14 nt, Human
cucuuauugcccac

SEQ ID NO: 1946688 - RNA, 15 nt, Human
cucuuauugcccacg

SEQ ID NO: 1946689 - RNA, 19 nt, Human
cucuuauugcccacgcugg

SEQ ID NO: 1946690 - RNA, 20 nt, Human
cucuuauugcccacgcugga

SEQ ID NO: 1946691 - RNA, 16 nt, Human
cucuuagcccaugcug

SEQ ID NO: 1946692 - RNA, 13 nt, Human
cucuuauugccca

SEQ ID NO: 1946693 - RNA, 18 nt, Human
cucuucagaucucuaacu

SEQ ID NO: 1946694 - RNA, 19 nt, Human
cucuucagaucucuaacuu

SEQ ID NO: 1946695 - RNA, 14 nt, Human
cucuucaaucucuu

SEQ ID NO: 1946696 - RNA, 20 nt, Human
cucuucaacugaccagccuc

SEQ ID NO: 1946697 - RNA, 16 nt, Human
cucuucaacugaccag

SEQ ID NO: 1946698 - RNA, 17 nt, Human
cucuucaacugaccagc

SEQ ID NO: 1946699 - RNA, 20 nt, Human
cucugcacuccccugcuggg

SEQ ID NO: 1946700 - RNA, 18 nt, Human
cucugcacuccccugcug

SEQ ID NO: 1946701 - RNA, 21 nt, Human
cucugcacuccccugcugggu

SEQ ID NO: 1946702 - RNA, 13 nt, Human
cucugcagcaaua

SEQ ID NO: 1946703 - RNA, 17 nt, Human
cucugcaggucccuaau

SEQ ID NO: 1946704 - RNA, 16 nt, Human
cucugcaggucccuaa

SEQ ID NO: 1946705 - RNA, 15 nt, Human
cucugcaggucccua

SEQ ID NO: 1946706 - RNA, 14 nt, Human
cucugcaggucccu

SEQ ID NO: 1946707 - RNA, 13 nt, Human
cucugcuccucuc

SEQ ID NO: 1946708 - RNA, 18 nt, Human
cucugcuccucuccccag

SEQ ID NO: 1946709 - RNA, 20 nt, Human
cucugcuccucuccccagca

SEQ ID NO: 1946710 - RNA, 14 nt, Human
cucugguccauaga

SEQ ID NO: 1946711 - RNA, 16 nt, Human
cucugcucccccuuuu

SEQ ID NO: 1946712 - RNA, 13 nt, Human
cucugcucuugca

SEQ ID NO: 1946713 - RNA, 12 nt, Human
cucugcuccccc

SEQ ID NO: 1946714 - RNA, 13 nt, Human
cucugcucccccu

SEQ ID NO: 1946715 - RNA, 13 nt, Human
cucugcugacaga

SEQ ID NO: 1946716 - RNA, 14 nt, Human
cucugcugacagac

SEQ ID NO: 1946717 - RNA, 16 nt, Human
cucugcugacagacac

SEQ ID NO: 1946718 - RNA, 12 nt, Human
cucuguccaggc

SEQ ID NO: 1946719 - RNA, 17 nt, Human
cucugguacaauuucuu

SEQ ID NO: 1946720 - RNA, 20 nt, Human
cucugguacaauuucuuuug

SEQ ID NO: 1946721 - RNA, 22 nt, Human
cucugguacaauuucuuuuggu

SEQ ID NO: 1946722 - RNA, 14 nt, Human
cucugguaucuaau

SEQ ID NO: 1946723 - RNA, 19 nt, Human
cucugguaucuaauucuuu

SEQ ID NO: 1946724 - RNA, 21 nt, Human
cucugguaucuaauucuuuaa

SEQ ID NO: 1946725 - RNA, 16 nt, Human
cucuggugcugcagua

SEQ ID NO: 1946726 - RNA, 23 nt, Human
cucuugagccuugaacuuugacc

SEQ ID NO: 1946727 - RNA, 18 nt, Human
cucuugagccuugaacuu

SEQ ID NO: 1946728 - RNA, 16 nt, Human
cucuugagccuugaac

SEQ ID NO: 1946729 - RNA, 17 nt, Human
cucuugagccuugaacu

SEQ ID NO: 1946730 - RNA, 11 nt, Human
cucuuuuccua

SEQ ID NO: 1946731 - RNA, 21 nt, Human
cucuugaugccuggcggggug

SEQ ID NO: 1946732 - RNA, 16 nt, Human
cucuugaugccuggcg

SEQ ID NO: 1946733 - RNA, 15 nt, Human
cucuugaugccuggc

SEQ ID NO: 1946734 - RNA, 13 nt, Human
cucuugaugccug

SEQ ID NO: 1946735 - RNA, 20 nt, Human
cugaaaccuaguacugcccc

SEQ ID NO: 1946736 - RNA, 15 nt, Human
cugaaaauugccuuu

SEQ ID NO: 1946737 - RNA, 19 nt, Human
cugaaaauugccuuucugu

SEQ ID NO: 1946738 - RNA, 20 nt, Human
cugaaaauugccuuucugug

SEQ ID NO: 1946739 - RNA, 22 nt, Human
cugaaaauugaugggauuuggu

SEQ ID NO: 1946740 - RNA, 22 nt, Human
cugaagcuaucguaaaauuaag

SEQ ID NO: 1946741 - RNA, 21 nt, Human
cugaagcuaucguaaaauuaa

SEQ ID NO: 1946742 - RNA, 23 nt, Human
cugaaggacauugcggacagcca

SEQ ID NO: 1946743 - RNA, 21 nt, Human
cugaaggccccgcccaggcuu

SEQ ID NO: 1946744 - RNA, 17 nt, Human
cugaaggcuggguucug

SEQ ID NO: 1946745 - RNA, 19 nt, Human
cugaaggccccgcccaggc

SEQ ID NO: 1946746 - RNA, 13 nt, Human
cugaaggaggcca

SEQ ID NO: 1946747 - RNA, 15 nt, Human
cugaaggaggccacc

SEQ ID NO: 1946748 - RNA, 23 nt, Human
cugacaacacucauugaccugag

SEQ ID NO: 1946749 - RNA, 22 nt, Human
cugacaacacucauugaccuga

SEQ ID NO: 1946750 - RNA, 16 nt, Human
cugaauuuuuaugugu

SEQ ID NO: 1946751 - RNA, 18 nt, Human
cugaauuuuuauguguga

SEQ ID NO: 1946752 - RNA, 20 nt, Human
cugaauuuuuaugugugauu

SEQ ID NO: 1946753 - RNA, 15 nt, Human
cuagccagaggagag

SEQ ID NO: 1946754 - RNA, 13 nt, Human
cuagccagaggag

SEQ ID NO: 1946755 - RNA, 19 nt, Human
cuagccaccgccuccuaca

SEQ ID NO: 1946756 - RNA, 12 nt, Human
cuagccagagga

SEQ ID NO: 1946757 - RNA, 23 nt, Human
cuaguuguuugauucagacagcu

SEQ ID NO: 1946758 - RNA, 22 nt, Human
cuaguuguuugauucagacagc

SEQ ID NO: 1946759 - RNA, 13 nt, Human
cuaguuugauuaa

SEQ ID NO: 1946760 - RNA, 15 nt, Human
cuaguuugauuaaau

SEQ ID NO: 1946761 - RNA, 22 nt, Human
cuaguuugauuaaauucuugca

SEQ ID NO: 1946762 - RNA, 21 nt, Human
cuaguuugauuaaauucuugc

SEQ ID NO: 1946763 - RNA, 15 nt, Human
cuaucucccccagcc

SEQ ID NO: 1946764 - RNA, 14 nt, Human
cuaucuaaauguug

SEQ ID NO: 1946765 - RNA, 17 nt, Human
cuaucguaaaauuaaga

SEQ ID NO: 1946766 - RNA, 18 nt, Human
cuaucguaaaauuaagaa

SEQ ID NO: 1946767 - RNA, 18 nt, Human
cuaucaugucaaacguga

SEQ ID NO: 1946768 - RNA, 17 nt, Human
cucaaaaaaagaaaaag

SEQ ID NO: 1946769 - RNA, 18 nt, Human
cucaaaagcugggcaggu

SEQ ID NO: 1946770 - RNA, 17 nt, Human
cuaucucccccagcccc

SEQ ID NO: 1946771 - RNA, 16 nt, Human
cuaucucccccagccc

SEQ ID NO: 1946772 - RNA, 18 nt, Human
cuaucucccccagcccca

SEQ ID NO: 1946773 - RNA, 14 nt, Human
cucaaugcuguuug

SEQ ID NO: 1946774 - RNA, 13 nt, Human
cucaaugcacuga

SEQ ID NO: 1946775 - RNA, 15 nt, Human
cucaaugcacugaca

SEQ ID NO: 1946776 - RNA, 11 nt, Human
cucacaaaaga

SEQ ID NO: 1946777 - RNA, 12 nt, Human
cucaauuuuugg

SEQ ID NO: 1946778 - RNA, 21 nt, Human
cucaauuuuugguugaauaaa

SEQ ID NO: 1946779 - RNA, 14 nt, Human
cucaauuucucuau

SEQ ID NO: 1946780 - RNA, 17 nt, Human
cucaaugcuguuugggu

SEQ ID NO: 1946781 - RNA, 12 nt, Human
cucaauuucaau

SEQ ID NO: 1946782 - RNA, 14 nt, Human
cucaauaaaguaca

SEQ ID NO: 1946783 - RNA, 20 nt, Human
cucaaacucuugaccucagg

SEQ ID NO: 1946784 - RNA, 12 nt, Human
cucaaaccccug

SEQ ID NO: 1946785 - RNA, 16 nt, Human
cucaaaccccugaccu

SEQ ID NO: 1946786 - RNA, 13 nt, Human
cuaauucuuuaau

SEQ ID NO: 1946787 - RNA, 15 nt, Human
cuaauucuuuaauga

SEQ ID NO: 1946788 - RNA, 12 nt, Human
cuaauucuuugc

SEQ ID NO: 1946789 - RNA, 14 nt, Human
cuaauucuuugcaa

SEQ ID NO: 1946790 - RNA, 15 nt, Human
cuaauucuuugcaaa

SEQ ID NO: 1946791 - RNA, 16 nt, Human
cuaauucuuugcaaaa

SEQ ID NO: 1946792 - RNA, 17 nt, Human
cuaauucuuugcaaaaa

SEQ ID NO: 1946793 - RNA, 18 nt, Human
cuaauucuuugcaaaaau

SEQ ID NO: 1946794 - RNA, 21 nt, Human
cuaauucuuugaccuguuggg

SEQ ID NO: 1946795 - RNA, 22 nt, Human
cuaauucuuugaccuguuggga

SEQ ID NO: 1946796 - RNA, 15 nt, Human
cuaauucuaugccug

SEQ ID NO: 1946797 - RNA, 23 nt, Human
cuaaguuuuuauggcuuuugugc

SEQ ID NO: 1946798 - RNA, 21 nt, Human
cuaagugguacuaacuuuccu

SEQ ID NO: 1946799 - RNA, 17 nt, Human
cuaaguaaaucucuucu

SEQ ID NO: 1946800 - RNA, 20 nt, Human
cuaaguuuuuauggcuuuug

SEQ ID NO: 1946801 - RNA, 23 nt, Human
cuaagugauccucccaccucagc

SEQ ID NO: 1946802 - RNA, 11 nt, Human
cgugugugugu

SEQ ID NO: 1946803 - RNA, 19 nt, Human
cuacaguccucccaucuca

SEQ ID NO: 1946804 - RNA, 22 nt, Human
cuacaguugaaaaacagcugag

SEQ ID NO: 1946805 - RNA, 21 nt, Human
cuacaguugaaaaacagcuga

SEQ ID NO: 1946806 - RNA, 19 nt, Human
cuacaguugaaaaacagcu

SEQ ID NO: 1946807 - RNA, 20 nt, Human
cuacaguccucccaucucac

SEQ ID NO: 1946808 - RNA, 20 nt, Human
cuacaugagguacugagagu

SEQ ID NO: 1946809 - RNA, 18 nt, Human
cuacaugagguacugaga

SEQ ID NO: 1946810 - RNA, 12 nt, Human
cuacauauugaa

SEQ ID NO: 1946811 - RNA, 14 nt, Human
cuacauauugaaua

SEQ ID NO: 1946812 - RNA, 17 nt, Human
cuaccuuuguauucucu

SEQ ID NO: 1946813 - RNA, 23 nt, Human
cuacgaguaauugcauuugcuuu

SEQ ID NO: 1946814 - RNA, 17 nt, Human
cuacguuaccaggcagg

SEQ ID NO: 1946815 - RNA, 21 nt, Human
cuacguuuacucacagccagc

SEQ ID NO: 1946816 - RNA, 12 nt, Human
cuagaacucccu

SEQ ID NO: 1946817 - RNA, 13 nt, Human
cuagaacucccuu

SEQ ID NO: 1946818 - RNA, 22 nt, Human
cuagaagauuuugaaauuuuua

SEQ ID NO: 1946819 - RNA, 22 nt, Human
cuagaaguaacuggugauauau

SEQ ID NO: 1946820 - RNA, 23 nt, Human
cuagaauuugauaugugaacagu

SEQ ID NO: 1946821 - RNA, 12 nt, Human
cuagacacacaa

SEQ ID NO: 1946822 - RNA, 12 nt, Human
cuagaauuuuaa

SEQ ID NO: 1946823 - RNA, 14 nt, Human
cuagaauuuuaagc

SEQ ID NO: 1946824 - RNA, 15 nt, Human
cuagaauuuuaagcc

SEQ ID NO: 1946825 - RNA, 16 nt, Human
cuagaauuuuaagccu

SEQ ID NO: 1946826 - RNA, 21 nt, Human
cuagcauacguacacauuuua

SEQ ID NO: 1946827 - RNA, 23 nt, Human
cuagcauacguacacauuuuauu

SEQ ID NO: 1946828 - RNA, 17 nt, Human
cuagacacacaaagcag

SEQ ID NO: 1946829 - RNA, 15 nt, Human
cuagcauauaugugu

SEQ ID NO: 1946830 - RNA, 13 nt, Human
cuagacacacaaa

SEQ ID NO: 1946831 - RNA, 14 nt, Human
cuagacacacaaag

SEQ ID NO: 1946832 - RNA, 16 nt, Human
ccuugccgucuaccug

SEQ ID NO: 1946833 - RNA, 19 nt, Human
ccuuuaaucagguccugcu

SEQ ID NO: 1946834 - RNA, 20 nt, Human
ccuuuaaucagguccugcuc

SEQ ID NO: 1946835 - RNA, 21 nt, Human
ccuuuaaucagguccugcuca

SEQ ID NO: 1946836 - RNA, 21 nt, Human
ccuuucaauaggaaaaacuga

SEQ ID NO: 1946837 - RNA, 17 nt, Human
ccuuuacuugucuuucu

SEQ ID NO: 1946838 - RNA, 18 nt, Human
ccuuuacuugucuuucug

SEQ ID NO: 1946839 - RNA, 15 nt, Human
ccuuucacaaccuuc

SEQ ID NO: 1946840 - RNA, 15 nt, Human
ccuuucacuucuuuc

SEQ ID NO: 1946841 - RNA, 17 nt, Human
ccuuucacuucuuuccc

SEQ ID NO: 1946842 - RNA, 18 nt, Human
ccuuucacuucuuucccu

SEQ ID NO: 1946843 - RNA, 22 nt, Human
ccuuucacuucuuucccuuccu

SEQ ID NO: 1946844 - RNA, 16 nt, Human
ccuuucagcaggcagc

SEQ ID NO: 1946845 - RNA, 17 nt, Human
ccuuuugagugccuuac

SEQ ID NO: 1946846 - RNA, 15 nt, Human
ccuuuugagugccuu

SEQ ID NO: 1946847 - RNA, 17 nt, Human
ccuuucagcaggcagcc

SEQ ID NO: 1946848 - RNA, 19 nt, Human
ccuuucauuugcuaucucu

SEQ ID NO: 1946849 - RNA, 15 nt, Human
ccuuucauuuugcuu

SEQ ID NO: 1946850 - RNA, 16 nt, Human
cgaauuuuaaaagaug

SEQ ID NO: 1946851 - RNA, 21 nt, Human
ccuuuuuuagaguugauacua

SEQ ID NO: 1946852 - RNA, 13 nt, Human
ccuuuuugcuuga

SEQ ID NO: 1946853 - RNA, 12 nt, Human
ccuuuuuauuua

SEQ ID NO: 1946854 - RNA, 13 nt, Human
ccuuuuuauuuau

SEQ ID NO: 1946855 - RNA, 16 nt, Human
ccuuuuuauuuauaug

SEQ ID NO: 1946856 - RNA, 18 nt, Human
ccuuuuuauuuauaugua

SEQ ID NO: 1946857 - RNA, 20 nt, Human
ccuuuuuauuuauauguaug

SEQ ID NO: 1946858 - RNA, 22 nt, Human
ccuuuuuauuuauauguaugug

SEQ ID NO: 1946859 - RNA, 12 nt, Human
cgacaaugcaaa

SEQ ID NO: 1946860 - RNA, 14 nt, Human
cgacaaaucugucu

SEQ ID NO: 1946861 - RNA, 15 nt, Human
cgacaaaucugucug

SEQ ID NO: 1946862 - RNA, 16 nt, Human
cgacaaaucugucugc

SEQ ID NO: 1946863 - RNA, 17 nt, Human
cgacaacagauuggauu

SEQ ID NO: 1946864 - RNA, 20 nt, Human
cgacaacagauuggauuuua

SEQ ID NO: 1946865 - RNA, 13 nt, Human
cgacaaugcaaac

SEQ ID NO: 1946866 - RNA, 18 nt, Human
cgacacggucucggauca

SEQ ID NO: 1946867 - RNA, 16 nt, Human
cgacaagcacagucag

SEQ ID NO: 1946868 - RNA, 20 nt, Human
cgacacgugggcuccccucu

SEQ ID NO: 1946869 - RNA, 11 nt, Human
cgacagagcag

SEQ ID NO: 1946870 - RNA, 18 nt, Human
cgacagagcaguugagag

SEQ ID NO: 1946871 - RNA, 12 nt, Human
cgacagccuggc

SEQ ID NO: 1946872 - RNA, 13 nt, Human
cgacagccuggca

SEQ ID NO: 1946873 - RNA, 14 nt, Human
cgacagccuggcac

SEQ ID NO: 1946874 - RNA, 17 nt, Human
cgacugcccggcagggu

SEQ ID NO: 1946875 - RNA, 15 nt, Human
cgacuagacacacaa

SEQ ID NO: 1946876 - RNA, 16 nt, Human
cgacuagacacacaaa

SEQ ID NO: 1946877 - RNA, 17 nt, Human
cgacuagacacacaaag

SEQ ID NO: 1946878 - RNA, 20 nt, Human
cgacuagacacacaaagcag

SEQ ID NO: 1946879 - RNA, 20 nt, Human
cgacccuugccgucuaccug

SEQ ID NO: 1946880 - RNA, 19 nt, Human
cgacccuugccgucuaccu

SEQ ID NO: 1946881 - RNA, 19 nt, Human
cgccuggcugcagccugcg

SEQ ID NO: 1946882 - RNA, 22 nt, Human
cgccuccaaccccucgcccagu

SEQ ID NO: 1946883 - RNA, 13 nt, Human
cgccucugcauuc

SEQ ID NO: 1946884 - RNA, 19 nt, Human
cgccuccaaccccucgccc

SEQ ID NO: 1946885 - RNA, 21 nt, Human
cgccuccaaccccucgcccag

SEQ ID NO: 1946886 - RNA, 17 nt, Human
cgagucauccagaaugu

SEQ ID NO: 1946887 - RNA, 16 nt, Human
cgauaguuuacugaga

SEQ ID NO: 1946888 - RNA, 19 nt, Human
cgaucacaaaugacuuuau

SEQ ID NO: 1946889 - RNA, 21 nt, Human
cgaucacaaaugacuuuauua

SEQ ID NO: 1946890 - RNA, 14 nt, Human
cgaucacaaaugac

SEQ ID NO: 1946891 - RNA, 15 nt, Human
cgaucacaaaugacu

SEQ ID NO: 1946892 - RNA, 17 nt, Human
cgaucacaaaugacuuu

SEQ ID NO: 1946893 - RNA, 18 nt, Human
cgaucacaaaugacuuua

SEQ ID NO: 1946894 - RNA, 14 nt, Human
cgauagugguggug

SEQ ID NO: 1946895 - RNA, 13 nt, Human
cgcaggcuggccc

SEQ ID NO: 1946896 - RNA, 16 nt, Human
cgcaggccucccugcc

SEQ ID NO: 1946897 - RNA, 18 nt, Human
cgcaggccucccugccag

SEQ ID NO: 1946898 - RNA, 19 nt, Human
cgcaggccucccugccagu

SEQ ID NO: 1946899 - RNA, 22 nt, Human
cgcaggauucuuccucccuccc

SEQ ID NO: 1946900 - RNA, 16 nt, Human
cgguuuuacugcagcu

SEQ ID NO: 1946901 - RNA, 16 nt, Human
cguaaaaacugaaguu

SEQ ID NO: 1946902 - RNA, 14 nt, Human
cgguuaacaaauaa

SEQ ID NO: 1946903 - RNA, 19 nt, Human
cgguuaacaaauaacaacu

SEQ ID NO: 1946904 - RNA, 23 nt, Human
cgguguuuaagacauuuuuggaa

SEQ ID NO: 1946905 - RNA, 22 nt, Human
cgguuuaucgcccuggcaggca

SEQ ID NO: 1946906 - RNA, 14 nt, Human
cguaaaauuaagaa

SEQ ID NO: 1946907 - RNA, 17 nt, Human
cguaaaaacugaaguuc

SEQ ID NO: 1946908 - RNA, 16 nt, Human
cgugaguccuggcaug

SEQ ID NO: 1946909 - RNA, 17 nt, Human
cgugaggccagagacac

SEQ ID NO: 1946910 - RNA, 17 nt, Human
cgugaguccuggcaugg

SEQ ID NO: 1946911 - RNA, 20 nt, Human
cguguaaccauggacccaau

SEQ ID NO: 1946912 - RNA, 17 nt, Human
cguguaggaaccugcac

SEQ ID NO: 1946913 - RNA, 12 nt, Human
cgugugcugugu

SEQ ID NO: 1946914 - RNA, 14 nt, Human
cgugugcuguguuu

SEQ ID NO: 1946915 - RNA, 21 nt, Human
cgugguugggaacacagcauu

SEQ ID NO: 1946916 - RNA, 22 nt, Human
cgugaucaaagccacacucugg

SEQ ID NO: 1946917 - RNA, 14 nt, Human
cgugcacacaccag

SEQ ID NO: 1946918 - RNA, 23 nt, Human
cgccuggugaugcgcaguugcug

SEQ ID NO: 1946919 - RNA, 13 nt, Human
cgcugauguucac

SEQ ID NO: 1946920 - RNA, 13 nt, Human
cggaggaccaggg

SEQ ID NO: 1946921 - RNA, 16 nt, Human
cggagucccaccuugg

SEQ ID NO: 1946922 - RNA, 15 nt, Human
cggaggaccagggcu

SEQ ID NO: 1946923 - RNA, 18 nt, Human
cggagucccaccuuggcu

SEQ ID NO: 1946924 - RNA, 20 nt, Human
cggagucccaccuuggcugc

SEQ ID NO: 1946925 - RNA, 15 nt, Human
cggcucacugcagcc

SEQ ID NO: 1946926 - RNA, 14 nt, Human
cggcucacugcagc

SEQ ID NO: 1946927 - RNA, 16 nt, Human
cggcucacugcagccu

SEQ ID NO: 1946928 - RNA, 17 nt, Human
cggcucacugcagccuc

SEQ ID NO: 1946929 - RNA, 12 nt, Human
cggcuccaggcu

SEQ ID NO: 1946930 - RNA, 13 nt, Human
cggcuccaggcuc

SEQ ID NO: 1946931 - RNA, 14 nt, Human
cggcuccaggcucc

SEQ ID NO: 1946932 - RNA, 15 nt, Human
cggcuccaggcuccu

SEQ ID NO: 1946933 - RNA, 16 nt, Human
cggcuccaggcuccuu

SEQ ID NO: 1946934 - RNA, 12 nt, Human
cgggccacagag

SEQ ID NO: 1946935 - RNA, 14 nt, Human
cgggccacagagaa

SEQ ID NO: 1946936 - RNA, 20 nt, Human
cggcuccaguccccagaacu

SEQ ID NO: 1946937 - RNA, 19 nt, Human
cggcuccaguccccagaac

SEQ ID NO: 1946938 - RNA, 14 nt, Human
cggggacagcuccu

SEQ ID NO: 1946939 - RNA, 17 nt, Human
cgggcucugccucccau

SEQ ID NO: 1946940 - RNA, 20 nt, Human
cggugugggggccccgucuc

SEQ ID NO: 1946941 - RNA, 23 nt, Human
cggugugggggccccgucucagg

SEQ ID NO: 1946942 - RNA, 13 nt, Human
cggugugggggcc

SEQ ID NO: 1946943 - RNA, 18 nt, Human
cgguguggagaagcggcu

SEQ ID NO: 1946944 - RNA, 15 nt, Human
cggggacagcuccuu

SEQ ID NO: 1946945 - RNA, 13 nt, Human
cgguguggagaag

SEQ ID NO: 1946946 - RNA, 16 nt, Human
cgggcucugccuccca

SEQ ID NO: 1946947 - RNA, 14 nt, Human
cgggcucugccucc

SEQ ID NO: 1946948 - RNA, 15 nt, Human
cgggcucagcaaaag

SEQ ID NO: 1946949 - RNA, 11 nt, Human
cgggcucagca

SEQ ID NO: 1946950 - RNA, 17 nt, Human
cgggccacagagaaagu

SEQ ID NO: 1946951 - RNA, 15 nt, Human
cccucagagugcaag

SEQ ID NO: 1946952 - RNA, 13 nt, Human
cccucagagccac

SEQ ID NO: 1946953 - RNA, 21 nt, Human
cccucagaaggucuguuuuga

SEQ ID NO: 1946954 - RNA, 20 nt, Human
cccucagaaaaugaguaaca

SEQ ID NO: 1946955 - RNA, 12 nt, Human
ccccuugccagc

SEQ ID NO: 1946956 - RNA, 17 nt, Human
ccccuucugacccaugc

SEQ ID NO: 1946957 - RNA, 12 nt, Human
cccgggaagggg

SEQ ID NO: 1946958 - RNA, 22 nt, Human
cccuauccuacuuccccuuccu

SEQ ID NO: 1946959 - RNA, 12 nt, Human
cccgggaagcaa

SEQ ID NO: 1946960 - RNA, 15 nt, Human
cccgggaagcaaaug

SEQ ID NO: 1946961 - RNA, 14 nt, Human
ccccuugccagcug

SEQ ID NO: 1946962 - RNA, 12 nt, Human
cccggcugcgga

SEQ ID NO: 1946963 - RNA, 12 nt, Human
cccggcugcccu

SEQ ID NO: 1946964 - RNA, 13 nt, Human
cccggcugcccuu

SEQ ID NO: 1946965 - RNA, 18 nt, Human
ccccaugaggaaggaaca

SEQ ID NO: 1946966 - RNA, 13 nt, Human
ccccaucugugaa

SEQ ID NO: 1946967 - RNA, 14 nt, Human
ccccaucugugaau

SEQ ID NO: 1946968 - RNA, 15 nt, Human
ccccaugaggaagga

SEQ ID NO: 1946969 - RNA, 15 nt, Human
ccccauucugccugc

SEQ ID NO: 1946970 - RNA, 13 nt, Human
ccccauucugccu

SEQ ID NO: 1946971 - RNA, 14 nt, Human
ccccauucugccug

SEQ ID NO: 1946972 - RNA, 18 nt, Human
ccccugcacuccagccug

SEQ ID NO: 1946973 - RNA, 16 nt, Human
ccccugcaaagcccag

SEQ ID NO: 1946974 - RNA, 17 nt, Human
ccccugcaaagcccagc

SEQ ID NO: 1946975 - RNA, 15 nt, Human
ccccugagcccacug

SEQ ID NO: 1946976 - RNA, 15 nt, Human
ccccugcaaagccca

SEQ ID NO: 1946977 - RNA, 11 nt, Human
ccccugagccc

SEQ ID NO: 1946978 - RNA, 12 nt, Human
ccccugagccca

SEQ ID NO: 1946979 - RNA, 13 nt, Human
ccccugagcccac

SEQ ID NO: 1946980 - RNA, 14 nt, Human
ccccugagcccacu

SEQ ID NO: 1946981 - RNA, 19 nt, Human
ccccuuccuguguccaugu

SEQ ID NO: 1946982 - RNA, 19 nt, Human
ccccuucgcuccugugucu

SEQ ID NO: 1946983 - RNA, 14 nt, Human
ccccuuccugggca

SEQ ID NO: 1946984 - RNA, 14 nt, Human
ccccuucgcuccug

SEQ ID NO: 1946985 - RNA, 20 nt, Human
ccccugcaguuccccuggaa

SEQ ID NO: 1946986 - RNA, 15 nt, Human
ccccuucgcuccugu

SEQ ID NO: 1946987 - RNA, 17 nt, Human
ccccuucgcuccugugu

SEQ ID NO: 1946988 - RNA, 13 nt, Human
cccaguuguauuu

SEQ ID NO: 1946989 - RNA, 22 nt, Human
cccauaauuuuuuuuuuccuuu

SEQ ID NO: 1946990 - RNA, 23 nt, Human
cccauaauuuuuuuuuuccuuuu

SEQ ID NO: 1946991 - RNA, 16 nt, Human
cccauacaaauaagca

SEQ ID NO: 1946992 - RNA, 12 nt, Human
cccauuuagaau

SEQ ID NO: 1946993 - RNA, 22 nt, Human
cccauuuagaauggugauuuua

SEQ ID NO: 1946994 - RNA, 21 nt, Human
ccccagauugcaacaggcugg

SEQ ID NO: 1946995 - RNA, 22 nt, Human
ccccagauugcaacaggcuggg

SEQ ID NO: 1946996 - RNA, 23 nt, Human
ccccagauugcaacaggcugggc

SEQ ID NO: 1946997 - RNA, 17 nt, Human
ccccagcaagugagagc

SEQ ID NO: 1946998 - RNA, 21 nt, Human
ccccauccucuguacagagcc

SEQ ID NO: 1946999 - RNA, 19 nt, Human
ccccauccucuguacagag

SEQ ID NO: 1947000 - RNA, 22 nt, Human
ccccauccucuguacagagccc

SEQ ID NO: 1947001 - RNA, 12 nt, Human
ccccaucuguga

SEQ ID NO: 1947002 - RNA, 19 nt, Human
ccccagcaagugagagcug

SEQ ID NO: 1947003 - RNA, 20 nt, Human
ccccagcaagugagagcugg

SEQ ID NO: 1947004 - RNA, 17 nt, Human
ccccauccucuguacag

SEQ ID NO: 1947005 - RNA, 20 nt, Human
cccauucugccugcccaggc

SEQ ID NO: 1947006 - RNA, 21 nt, Human
cccauucugccugcccaggcc

SEQ ID NO: 1947007 - RNA, 22 nt, Human
cccauucugccugcccaggccc

SEQ ID NO: 1947008 - RNA, 12 nt, Human
cccagcagccag

SEQ ID NO: 1947009 - RNA, 14 nt, Human
cccagcagccagcc

SEQ ID NO: 1947010 - RNA, 15 nt, Human
cccagcagccagcca

SEQ ID NO: 1947011 - RNA, 17 nt, Human
cccagcccacuucugcc

SEQ ID NO: 1947012 - RNA, 14 nt, Human
cccagcccacuucu

SEQ ID NO: 1947013 - RNA, 16 nt, Human
cccagcccaccccaug

SEQ ID NO: 1947014 - RNA, 21 nt, Human
cccaggcuggcgugcaguggu

SEQ ID NO: 1947015 - RNA, 20 nt, Human
cccaggcuuagucacugaga

SEQ ID NO: 1947016 - RNA, 15 nt, Human
cccaggcuuagucac

SEQ ID NO: 1947017 - RNA, 22 nt, Human
cccaggaaaggcuccaggagca

SEQ ID NO: 1947018 - RNA, 21 nt, Human
cccaggaaaggcuccaggagc

SEQ ID NO: 1947019 - RNA, 23 nt, Human
cccaggaaaggcuccaggagcag

SEQ ID NO: 1947020 - RNA, 19 nt, Human
cccaggaaaggcuccagga

SEQ ID NO: 1947021 - RNA, 22 nt, Human
cccagcuuaaaggggcuagagu

SEQ ID NO: 1947022 - RNA, 21 nt, Human
cccagcugugcucuggacagg

SEQ ID NO: 1947023 - RNA, 23 nt, Human
cccagcugugcucuggacaggca

SEQ ID NO: 1947024 - RNA, 11 nt, Human
ccauccccucc

SEQ ID NO: 1947025 - RNA, 22 nt, Human
ccauccccuguagagugggagc

SEQ ID NO: 1947026 - RNA, 16 nt, Human
ccauccccuguagagu

SEQ ID NO: 1947027 - RNA, 14 nt, Human
ccaugagccucagc

SEQ ID NO: 1947028 - RNA, 18 nt, Human
ccaugagccucagcaucc

SEQ ID NO: 1947029 - RNA, 13 nt, Human
ccaugaguccccu

SEQ ID NO: 1947030 - RNA, 19 nt, Human
ccaugagccucagcauccu

SEQ ID NO: 1947031 - RNA, 15 nt, Human
ccaugaguccccugu

SEQ ID NO: 1947032 - RNA, 14 nt, Human
ccaugaguccccug

SEQ ID NO: 1947033 - RNA, 16 nt, Human
ccaugaguccccuguu

SEQ ID NO: 1947034 - RNA, 13 nt, Human
ccaugggccuccu

SEQ ID NO: 1947035 - RNA, 12 nt, Human
ccaucccagccc

SEQ ID NO: 1947036 - RNA, 23 nt, Human
ccaucccaaacccuucagugcca

SEQ ID NO: 1947037 - RNA, 20 nt, Human
ccauaauuuuuuuuuuccuu

SEQ ID NO: 1947038 - RNA, 19 nt, Human
ccauaagcaacaauuuuca

SEQ ID NO: 1947039 - RNA, 18 nt, Human
ccauacacacgcugccuu

SEQ ID NO: 1947040 - RNA, 20 nt, Human
ccauacacacgcugccuucg

SEQ ID NO: 1947041 - RNA, 20 nt, Human
ccauaagcaacaauuuucag

SEQ ID NO: 1947042 - RNA, 12 nt, Human
ccauacacacgc

SEQ ID NO: 1947043 - RNA, 14 nt, Human
ccauacacacgcug

SEQ ID NO: 1947044 - RNA, 14 nt, Human
ccaugggccuccug

SEQ ID NO: 1947045 - RNA, 15 nt, Human
ccaugggccuccugu

SEQ ID NO: 1947046 - RNA, 14 nt, Human
ccaugggcaggaga

SEQ ID NO: 1947047 - RNA, 15 nt, Human
ccauugaacucugag

SEQ ID NO: 1947048 - RNA, 20 nt, Human
ccauuuaauggggaggacaa

SEQ ID NO: 1947049 - RNA, 16 nt, Human
ccauuuacugcauucu

SEQ ID NO: 1947050 - RNA, 23 nt, Human
ccauuuacugcauucuucugauc

SEQ ID NO: 1947051 - RNA, 22 nt, Human
ccauugagaccgugaagauacu

SEQ ID NO: 1947052 - RNA, 15 nt, Human
ccauuuccccagggc

SEQ ID NO: 1947053 - RNA, 16 nt, Human
ccauuuccccagggca

SEQ ID NO: 1947054 - RNA, 13 nt, Human
ccauuuagaaugg

SEQ ID NO: 1947055 - RNA, 22 nt, Human
ccauuuagaauggugauuuuaa

SEQ ID NO: 1947056 - RNA, 17 nt, Human
ccauuuccccagggcac

SEQ ID NO: 1947057 - RNA, 13 nt, Human
ccauuuccuuaug

SEQ ID NO: 1947058 - RNA, 17 nt, Human
ccauuuccuuaugcugu

SEQ ID NO: 1947059 - RNA, 22 nt, Human
ccagggggccagucccugaggc

SEQ ID NO: 1947060 - RNA, 21 nt, Human
ccagucaccccggccaccugc

SEQ ID NO: 1947061 - RNA, 20 nt, Human
ccagucaccccggccaccug

SEQ ID NO: 1947062 - RNA, 13 nt, Human
ccagucaccccgg

SEQ ID NO: 1947063 - RNA, 12 nt, Human
ccagucaccccg

SEQ ID NO: 1947064 - RNA, 14 nt, Human
ccagucccccugcc

SEQ ID NO: 1947065 - RNA, 15 nt, Human
ccaguccccagaacu

SEQ ID NO: 1947066 - RNA, 16 nt, Human
ccaguccccagaacuc

SEQ ID NO: 1947067 - RNA, 21 nt, Human
ccaguccccagaacucugccu

SEQ ID NO: 1947068 - RNA, 13 nt, Human
ccagucccagcag

SEQ ID NO: 1947069 - RNA, 14 nt, Human
ccagucccagcagc

SEQ ID NO: 1947070 - RNA, 15 nt, Human
ccagucccagcagcc

SEQ ID NO: 1947071 - RNA, 17 nt, Human
ccagucccagcagccag

SEQ ID NO: 1947072 - RNA, 18 nt, Human
ccagucccagcagccagc

SEQ ID NO: 1947073 - RNA, 20 nt, Human
ccagucccagcagccagcca

SEQ ID NO: 1947074 - RNA, 22 nt, Human
ccaggcugggagagccuuccag

SEQ ID NO: 1947075 - RNA, 16 nt, Human
ccaggggccuuugggu

SEQ ID NO: 1947076 - RNA, 23 nt, Human
ccaggggccuuugggugcuguuu

SEQ ID NO: 1947077 - RNA, 21 nt, Human
ccaggcugggagagccuucca

SEQ ID NO: 1947078 - RNA, 18 nt, Human
ccaggcugggagagccuu

SEQ ID NO: 1947079 - RNA, 17 nt, Human
ccaggcugggagagccu

SEQ ID NO: 1947080 - RNA, 15 nt, Human
ccaggcugggagagc

SEQ ID NO: 1947081 - RNA, 14 nt, Human
ccaggcugggagag

SEQ ID NO: 1947082 - RNA, 13 nt, Human
ccaggcugggaga

SEQ ID NO: 1947083 - RNA, 17 nt, Human
ccaggcaacuugggaac

SEQ ID NO: 1947084 - RNA, 23 nt, Human
ccaggagucccacuccaagccag

SEQ ID NO: 1947085 - RNA, 22 nt, Human
ccaggauguacaaggacagccc

SEQ ID NO: 1947086 - RNA, 19 nt, Human
ccaggagucccacuccaag

SEQ ID NO: 1947087 - RNA, 17 nt, Human
ccaggagggagcagagg

SEQ ID NO: 1947088 - RNA, 21 nt, Human
ccacucucucuuguucuuacu

SEQ ID NO: 1947089 - RNA, 22 nt, Human
ccacucucucuuguucuuacuu

SEQ ID NO: 1947090 - RNA, 11 nt, Human
ccacucuggau

SEQ ID NO: 1947091 - RNA, 18 nt, Human
ccacucuggauucagccu

SEQ ID NO: 1947092 - RNA, 19 nt, Human
ccacucuggauucagccuu

SEQ ID NO: 1947093 - RNA, 20 nt, Human
ccacucuggauucagccuuc

SEQ ID NO: 1947094 - RNA, 21 nt, Human
ccacucuggauucagccuucu

SEQ ID NO: 1947095 - RNA, 19 nt, Human
ccagcagagcaccuuagac

SEQ ID NO: 1947096 - RNA, 23 nt, Human
ccagcagagcaccuuagacaguc

SEQ ID NO: 1947097 - RNA, 23 nt, Human
ccaggaaaggcuccaggagcagc

SEQ ID NO: 1947098 - RNA, 22 nt, Human
ccaggaaaggcuccaggagcag

SEQ ID NO: 1947099 - RNA, 21 nt, Human
ccaggaaaggcuccaggagca

SEQ ID NO: 1947100 - RNA, 18 nt, Human
ccagcuugaaaccuucac

SEQ ID NO: 1947101 - RNA, 13 nt, Human
ccagcuuccagca

SEQ ID NO: 1947102 - RNA, 20 nt, Human
ccagcuucacuucugacucu

SEQ ID NO: 1947103 - RNA, 14 nt, Human
ccagcuuccagcag

SEQ ID NO: 1947104 - RNA, 15 nt, Human
ccagcuuccagcagg

SEQ ID NO: 1947105 - RNA, 14 nt, Human
ccagcuucacuucu

SEQ ID NO: 1947106 - RNA, 15 nt, Human
ccagcuucacuucug

SEQ ID NO: 1947107 - RNA, 16 nt, Human
ccagcuucacuucuga

SEQ ID NO: 1947108 - RNA, 19 nt, Human
ccagcuucacuucugacuc

SEQ ID NO: 1947109 - RNA, 16 nt, Human
ccagcuuaucucaggg

SEQ ID NO: 1947110 - RNA, 16 nt, Human
ccagcuuccagcagga

SEQ ID NO: 1947111 - RNA, 17 nt, Human
ccagcuuccagcaggag

SEQ ID NO: 1947112 - RNA, 21 nt, Human
ccagccccuggaugcagccuc

SEQ ID NO: 1947113 - RNA, 10 nt, Human
ccagccccuu

SEQ ID NO: 1947114 - RNA, 14 nt, Human
ccagcagccuggac

SEQ ID NO: 1947115 - RNA, 15 nt, Human
ccagcagccuggacc

SEQ ID NO: 1947116 - RNA, 20 nt, Human
ccagcagccuggacccugug

SEQ ID NO: 1947117 - RNA, 19 nt, Human
ccagcagccuggacccugu

SEQ ID NO: 1947118 - RNA, 23 nt, Human
cccugucucaaaaaaagaaaaag

SEQ ID NO: 1947119 - RNA, 20 nt, Human
cccugucucaaaaaaagaaa

SEQ ID NO: 1947120 - RNA, 13 nt, Human
cccugucuaauga

SEQ ID NO: 1947121 - RNA, 16 nt, Human
cccugucuaaugaaac

SEQ ID NO: 1947122 - RNA, 17 nt, Human
cccugugauggggcccu

SEQ ID NO: 1947123 - RNA, 19 nt, Human
cccugugauggggcccugc

SEQ ID NO: 1947124 - RNA, 18 nt, Human
cccugugauggggcccug

SEQ ID NO: 1947125 - RNA, 20 nt, Human
cccugugauggggcccugcc

SEQ ID NO: 1947126 - RNA, 13 nt, Human
cccuucgcuccug

SEQ ID NO: 1947127 - RNA, 13 nt, Human
ccggccccugcug

SEQ ID NO: 1947128 - RNA, 11 nt, Human
ccgcaguguuu

SEQ ID NO: 1947129 - RNA, 16 nt, Human
ccgcaguguuugugug

SEQ ID NO: 1947130 - RNA, 19 nt, Human
ccgcaucagcugcucagau

SEQ ID NO: 1947131 - RNA, 14 nt, Human
ccgcaucucacagc

SEQ ID NO: 1947132 - RNA, 22 nt, Human
cccuucucuccagccccuggau

SEQ ID NO: 1947133 - RNA, 21 nt, Human
cccuucucuccagccccugga

SEQ ID NO: 1947134 - RNA, 14 nt, Human
cccuucgcuccugu

SEQ ID NO: 1947135 - RNA, 15 nt, Human
cccuucgcuccugug

SEQ ID NO: 1947136 - RNA, 14 nt, Human
ccggccccugcugg

SEQ ID NO: 1947137 - RNA, 13 nt, Human
ccucagcuucccc

SEQ ID NO: 1947138 - RNA, 11 nt, Human
ccucaggacca

SEQ ID NO: 1947139 - RNA, 13 nt, Human
ccucaggaccagg

SEQ ID NO: 1947140 - RNA, 15 nt, Human
ccucagcuuccccag

SEQ ID NO: 1947141 - RNA, 18 nt, Human
ccucagcuuccccaguag

SEQ ID NO: 1947142 - RNA, 21 nt, Human
ccucagcuuccccaguagcug

SEQ ID NO: 1947143 - RNA, 14 nt, Human
ccucaaagaggcag

SEQ ID NO: 1947144 - RNA, 14 nt, Human
ccucaaaacaaagg

SEQ ID NO: 1947145 - RNA, 13 nt, Human
ccucccaucucac

SEQ ID NO: 1947146 - RNA, 16 nt, Human
ccucccaucucacaca

SEQ ID NO: 1947147 - RNA, 23 nt, Human
ccuccccaaggcccccugccugc

SEQ ID NO: 1947148 - RNA, 22 nt, Human
ccuccccaaggcccccugccug

SEQ ID NO: 1947149 - RNA, 20 nt, Human
ccuccccaaggcccccugcc

SEQ ID NO: 1947150 - RNA, 21 nt, Human
ccuccccaaggcccccugccu

SEQ ID NO: 1947151 - RNA, 16 nt, Human
ccuccaaccccucgcc

SEQ ID NO: 1947152 - RNA, 20 nt, Human
ccuccaaccccucgcccagu

SEQ ID NO: 1947153 - RNA, 23 nt, Human
ccucauuuuugaauacaggcaua

SEQ ID NO: 1947154 - RNA, 15 nt, Human
ccucccaccucagcc

SEQ ID NO: 1947155 - RNA, 17 nt, Human
ccucccaccucagccuc

SEQ ID NO: 1947156 - RNA, 21 nt, Human
ccuggccucugcacuccccug

SEQ ID NO: 1947157 - RNA, 20 nt, Human
ccuggccucugcacuccccu

SEQ ID NO: 1947158 - RNA, 22 nt, Human
ccuggccuagcauacguacaca

SEQ ID NO: 1947159 - RNA, 23 nt, Human
ccuggccggugugggggccccgu

SEQ ID NO: 1947160 - RNA, 21 nt, Human
ccuggccggugugggggcccc

SEQ ID NO: 1947161 - RNA, 22 nt, Human
ccuggccggugugggggccccg

SEQ ID NO: 1947162 - RNA, 22 nt, Human
ccuggccucugcacuccccugc

SEQ ID NO: 1947163 - RNA, 20 nt, Human
ccugggccccaguuguauuu

SEQ ID NO: 1947164 - RNA, 18 nt, Human
ccuggccggugugggggc

SEQ ID NO: 1947165 - RNA, 13 nt, Human
ccugucugcucca

SEQ ID NO: 1947166 - RNA, 14 nt, Human
ccugucugcuccag

SEQ ID NO: 1947167 - RNA, 15 nt, Human
ccugucugcuccagc

SEQ ID NO: 1947168 - RNA, 18 nt, Human
ccugucugcuccagcucu

SEQ ID NO: 1947169 - RNA, 19 nt, Human
ccugucugugaagagcaag

SEQ ID NO: 1947170 - RNA, 14 nt, Human
ccugucuucugcuu

SEQ ID NO: 1947171 - RNA, 15 nt, Human
ccugucuucugcuuu

SEQ ID NO: 1947172 - RNA, 16 nt, Human
ccugucuucugcuuug

SEQ ID NO: 1947173 - RNA, 17 nt, Human
ccugucuucugcuuugu

SEQ ID NO: 1947174 - RNA, 13 nt, Human
ccugucuucugcu

SEQ ID NO: 1947175 - RNA, 21 nt, Human
ccugucuucugcuuuguugug

SEQ ID NO: 1947176 - RNA, 19 nt, Human
ccugucugaauguaccugu

SEQ ID NO: 1947177 - RNA, 22 nt, Human
ccugucuaaugaaaccuguguc

SEQ ID NO: 1947178 - RNA, 15 nt, Human
ccugucuaaugaaac

SEQ ID NO: 1947179 - RNA, 16 nt, Human
ccugugaacugaacuc

SEQ ID NO: 1947180 - RNA, 17 nt, Human
ccugugaacugaacucu

SEQ ID NO: 1947181 - RNA, 21 nt, Human
ccugugaagaaaggaccugca

SEQ ID NO: 1947182 - RNA, 19 nt, Human
ccugggccuggcucccuca

SEQ ID NO: 1947183 - RNA, 15 nt, Human
ccugggccuggcucc

SEQ ID NO: 1947184 - RNA, 16 nt, Human
ccugggccuggcuccc

SEQ ID NO: 1947185 - RNA, 12 nt, Human
ccugggccuggc

SEQ ID NO: 1947186 - RNA, 13 nt, Human
ccugggccuggcu

SEQ ID NO: 1947187 - RNA, 14 nt, Human
ccugggccuggcuc

SEQ ID NO: 1947188 - RNA, 12 nt, Human
ccuggggcaucc

SEQ ID NO: 1947189 - RNA, 17 nt, Human
ccuggggcauccauggg

SEQ ID NO: 1947190 - RNA, 18 nt, Human
ccuggggcauccaugggg

SEQ ID NO: 1947191 - RNA, 21 nt, Human
ccuggggcauccauggggucu

SEQ ID NO: 1947192 - RNA, 21 nt, Human
ccugguggcagugggagcugc

SEQ ID NO: 1947193 - RNA, 15 nt, Human
ccugggggcuggagc

SEQ ID NO: 1947194 - RNA, 15 nt, Human
ccugguuuccugccc

SEQ ID NO: 1947195 - RNA, 13 nt, Human
ccugguuuccugc

SEQ ID NO: 1947196 - RNA, 14 nt, Human
ccugguuuccugcc

SEQ ID NO: 1947197 - RNA, 16 nt, Human
ccugguuguguguccc

SEQ ID NO: 1947198 - RNA, 17 nt, Human
ccuguccugccuaaggc

SEQ ID NO: 1947199 - RNA, 15 nt, Human
ccuguaaucacagcu

SEQ ID NO: 1947200 - RNA, 19 nt, Human
ccuguccugccuaaggcug

SEQ ID NO: 1947201 - RNA, 11 nt, Human
ccucuuucccu

SEQ ID NO: 1947202 - RNA, 13 nt, Human
ccucuuucccucc

SEQ ID NO: 1947203 - RNA, 16 nt, Human
ccucuuucccucccuu

SEQ ID NO: 1947204 - RNA, 11 nt, Human
ccucuuucagu

SEQ ID NO: 1947205 - RNA, 21 nt, Human
ccugaguagcugggauuacag

SEQ ID NO: 1947206 - RNA, 16 nt, Human
ccugcacuugcagacu

SEQ ID NO: 1947207 - RNA, 17 nt, Human
ccugcacuugcagacuc

SEQ ID NO: 1947208 - RNA, 18 nt, Human
ccugcacuugcagacucu

SEQ ID NO: 1947209 - RNA, 19 nt, Human
ccugcacuugcagacucua

SEQ ID NO: 1947210 - RNA, 20 nt, Human
ccugcccaccuggccucugc

SEQ ID NO: 1947211 - RNA, 14 nt, Human
ccugcccaccuggc

SEQ ID NO: 1947212 - RNA, 13 nt, Human
ccugcccaccugg

SEQ ID NO: 1947213 - RNA, 12 nt, Human
ccugcccaccug

SEQ ID NO: 1947214 - RNA, 13 nt, Human
ccugcccaggccc

SEQ ID NO: 1947215 - RNA, 14 nt, Human
ccugcccagaucag

SEQ ID NO: 1947216 - RNA, 19 nt, Human
ccugcccagaucagccaga

SEQ ID NO: 1947217 - RNA, 22 nt, Human
ccugcccagaucagccagaagc

SEQ ID NO: 1947218 - RNA, 18 nt, Human
ccugcccagcccccuggu

SEQ ID NO: 1947219 - RNA, 14 nt, Human
ccugccccagcgcu

SEQ ID NO: 1947220 - RNA, 17 nt, Human
ccugccccagggcuccc

SEQ ID NO: 1947221 - RNA, 12 nt, Human
ccugccccagcg

SEQ ID NO: 1947222 - RNA, 13 nt, Human
ccugccccagcgc

SEQ ID NO: 1947223 - RNA, 20 nt, Human
ccugcugcaguugccaguca

SEQ ID NO: 1947224 - RNA, 21 nt, Human
ccugcugcaguugccagucac

SEQ ID NO: 1947225 - RNA, 19 nt, Human
ccugcugcaguugccaguc

SEQ ID NO: 1947226 - RNA, 17 nt, Human
ccugcugcaguugccag

SEQ ID NO: 1947227 - RNA, 21 nt, Human
ccugccucgaacuggcugcaa

SEQ ID NO: 1947228 - RNA, 23 nt, Human
ccugccucgaacuggcugcaaag

SEQ ID NO: 1947229 - RNA, 19 nt, Human
ccugccucgaacuggcugc

SEQ ID NO: 1947230 - RNA, 14 nt, Human
ccacuccuccuagc

SEQ ID NO: 1947231 - RNA, 11 nt, Human
ccacucucaga

SEQ ID NO: 1947232 - RNA, 13 nt, Human
ccacucucagagg

SEQ ID NO: 1947233 - RNA, 15 nt, Human
ccacucucagaggcc

SEQ ID NO: 1947234 - RNA, 16 nt, Human
ccacucucagaggccc

SEQ ID NO: 1947235 - RNA, 17 nt, Human
ccacucucagaggcccc

SEQ ID NO: 1947236 - RNA, 18 nt, Human
ccacucucagaggcccca

SEQ ID NO: 1947237 - RNA, 17 nt, Human
ccacucccugcaaccug

SEQ ID NO: 1947238 - RNA, 14 nt, Human
ccaccaucaagcca

SEQ ID NO: 1947239 - RNA, 13 nt, Human
ccaccaucaagcc

SEQ ID NO: 1947240 - RNA, 20 nt, Human
ccaccacaguccccagagug

SEQ ID NO: 1947241 - RNA, 21 nt, Human
ccaccacacugauccagcccu

SEQ ID NO: 1947242 - RNA, 17 nt, Human
ccaccacacccagccca

SEQ ID NO: 1947243 - RNA, 14 nt, Human
ccacagcuccuuuu

SEQ ID NO: 1947244 - RNA, 15 nt, Human
ccacagcuccuuuuc

SEQ ID NO: 1947245 - RNA, 16 nt, Human
ccacagcuccuuuucc

SEQ ID NO: 1947246 - RNA, 15 nt, Human
ccaccaucaagccac

SEQ ID NO: 1947247 - RNA, 15 nt, Human
ccacccugugcagaa

SEQ ID NO: 1947248 - RNA, 15 nt, Human
ccacccuuguuccag

SEQ ID NO: 1947249 - RNA, 22 nt, Human
ccacagcaacgaucacaaauga

SEQ ID NO: 1947250 - RNA, 19 nt, Human
ccacgcccccacuggugac

SEQ ID NO: 1947251 - RNA, 18 nt, Human
ccacgcccccacugguga

SEQ ID NO: 1947252 - RNA, 13 nt, Human
ccacgcccggcua

SEQ ID NO: 1947253 - RNA, 17 nt, Human
ccacgcccccacuggug

SEQ ID NO: 1947254 - RNA, 16 nt, Human
ccacgcccccacuggu

SEQ ID NO: 1947255 - RNA, 22 nt, Human
ccaccgcagacaggaccaggga

SEQ ID NO: 1947256 - RNA, 18 nt, Human
ccaccgaagccgccugug

SEQ ID NO: 1947257 - RNA, 12 nt, Human
ccacccuuucua

SEQ ID NO: 1947258 - RNA, 13 nt, Human
ccaccgcagacag

SEQ ID NO: 1947259 - RNA, 13 nt, Human
ccaccgccuccua

SEQ ID NO: 1947260 - RNA, 17 nt, Human
ccaccgcccagagaccc

SEQ ID NO: 1947261 - RNA, 13 nt, Human
ccaccgcccagag

SEQ ID NO: 1947262 - RNA, 17 nt, Human
ccaccgccuccuacagc

SEQ ID NO: 1947263 - RNA, 21 nt, Human
ccaccuuugaagaaguaagga

SEQ ID NO: 1947264 - RNA, 20 nt, Human
cauuuguguugaagagguuu

SEQ ID NO: 1947265 - RNA, 20 nt, Human
cauuuuuuauauauaugcau

SEQ ID NO: 1947266 - RNA, 22 nt, Human
cauuuuuuauggcugcauagua

SEQ ID NO: 1947267 - RNA, 16 nt, Human
cauuuuuuccuguuug

SEQ ID NO: 1947268 - RNA, 14 nt, Human
cauuuuuugaaaug

SEQ ID NO: 1947269 - RNA, 20 nt, Human
cauuuuuugaaaugcugaaa

SEQ ID NO: 1947270 - RNA, 16 nt, Human
cauuuguguugaagag

SEQ ID NO: 1947271 - RNA, 21 nt, Human
ccaaaacucuccucugcugcu

SEQ ID NO: 1947272 - RNA, 11 nt, Human
ccaaaagaaaa

SEQ ID NO: 1947273 - RNA, 12 nt, Human
ccaaaagaaaaa

SEQ ID NO: 1947274 - RNA, 20 nt, Human
ccaaaacucuccucugcugc

SEQ ID NO: 1947275 - RNA, 22 nt, Human
cauuuuuuuuaagaaaaaggau

SEQ ID NO: 1947276 - RNA, 19 nt, Human
ccaaugugaacagcggcug

SEQ ID NO: 1947277 - RNA, 17 nt, Human
ccaaugggagcucaugg

SEQ ID NO: 1947278 - RNA, 17 nt, Human
ccaaauguucaucaaug

SEQ ID NO: 1947279 - RNA, 14 nt, Human
ccaacucaccccag

SEQ ID NO: 1947280 - RNA, 23 nt, Human
ccaaauggaaaugggcagagcag

SEQ ID NO: 1947281 - RNA, 19 nt, Human
ccaaauggauuccuguuuc

SEQ ID NO: 1947282 - RNA, 14 nt, Human
ccaaaugguacaaa

SEQ ID NO: 1947283 - RNA, 15 nt, Human
ccaacugaucuguua

SEQ ID NO: 1947284 - RNA, 19 nt, Human
ccaaaugugugcccagcuu

SEQ ID NO: 1947285 - RNA, 20 nt, Human
ccaaaugugugcccagcuua

SEQ ID NO: 1947286 - RNA, 18 nt, Human
ccaacucaccccagcccc

SEQ ID NO: 1947287 - RNA, 17 nt, Human
ccaacucaccccagccc

SEQ ID NO: 1947288 - RNA, 16 nt, Human
ccaacucaccccagcc

SEQ ID NO: 1947289 - RNA, 23 nt, Human
ccaagcugccuccccucuccuuc

SEQ ID NO: 1947290 - RNA, 18 nt, Human
ccaagcucugcuccucuc

SEQ ID NO: 1947291 - RNA, 12 nt, Human
ccaagcucugcu

SEQ ID NO: 1947292 - RNA, 17 nt, Human
ccaagcucugcuccucu

SEQ ID NO: 1947293 - RNA, 13 nt, Human
ccaagcucugcuc

SEQ ID NO: 1947294 - RNA, 14 nt, Human
ccaaugcacuuugu

SEQ ID NO: 1947295 - RNA, 15 nt, Human
ccaaugauggucacc

SEQ ID NO: 1947296 - RNA, 21 nt, Human
ccaaugagacucuagggucca

SEQ ID NO: 1947297 - RNA, 23 nt, Human
ccaaugagacucuaggguccagu

SEQ ID NO: 1947298 - RNA, 17 nt, Human
ccaauauuuaccagacc

SEQ ID NO: 1947299 - RNA, 22 nt, Human
ccaaucaguagcuuaagaaaaa

SEQ ID NO: 1947300 - RNA, 12 nt, Human
caucuggagagc

SEQ ID NO: 1947301 - RNA, 14 nt, Human
caucugugaauaag

SEQ ID NO: 1947302 - RNA, 22 nt, Human
caucuggaagagcuaggcaggg

SEQ ID NO: 1947303 - RNA, 12 nt, Human
caucugcugucu

SEQ ID NO: 1947304 - RNA, 14 nt, Human
caucugcugucuuu

SEQ ID NO: 1947305 - RNA, 21 nt, Human
caucugcugucuuuucuuugc

SEQ ID NO: 1947306 - RNA, 12 nt, Human
cauccuggaaua

SEQ ID NO: 1947307 - RNA, 22 nt, Human
cauccuggcacccggccccugc

SEQ ID NO: 1947308 - RNA, 21 nt, Human
cauccccuguagagugggagc

SEQ ID NO: 1947309 - RNA, 15 nt, Human
caucacuuaaaacac

SEQ ID NO: 1947310 - RNA, 14 nt, Human
caucacuucccuac

SEQ ID NO: 1947311 - RNA, 12 nt, Human
caucacuucccu

SEQ ID NO: 1947312 - RNA, 15 nt, Human
cauccuggcacccgg

SEQ ID NO: 1947313 - RNA, 15 nt, Human
cauauuacaauauuu

SEQ ID NO: 1947314 - RNA, 16 nt, Human
cauauuacaauauuug

SEQ ID NO: 1947315 - RNA, 17 nt, Human
cauauuacaauauuugu

SEQ ID NO: 1947316 - RNA, 21 nt, Human
cauauuaaguaagucucaagg

SEQ ID NO: 1947317 - RNA, 16 nt, Human
cauauuaccacagaca

SEQ ID NO: 1947318 - RNA, 19 nt, Human
cauauuacaauauuugugu

SEQ ID NO: 1947319 - RNA, 22 nt, Human
cauauuacaauauuugugugcu

SEQ ID NO: 1947320 - RNA, 17 nt, Human
cauauucuguuggccag

SEQ ID NO: 1947321 - RNA, 18 nt, Human
cauauucuguuggccagu

SEQ ID NO: 1947322 - RNA, 19 nt, Human
caguggugguuuucuguuc

SEQ ID NO: 1947323 - RNA, 20 nt, Human
caguggugguuuucuguucu

SEQ ID NO: 1947324 - RNA, 21 nt, Human
caguggugguuuucuguucuu

SEQ ID NO: 1947325 - RNA, 22 nt, Human
caguggugguuuucuguucuuu

SEQ ID NO: 1947326 - RNA, 15 nt, Human
cauaugcuucuuuaa

SEQ ID NO: 1947327 - RNA, 14 nt, Human
caucacuggcaugg

SEQ ID NO: 1947328 - RNA, 13 nt, Human
caucacuuaaaac

SEQ ID NO: 1947329 - RNA, 14 nt, Human
caucacuuaaaaca

SEQ ID NO: 1947330 - RNA, 14 nt, Human
caugcuacacacug

SEQ ID NO: 1947331 - RNA, 20 nt, Human
caugcuacacacugcauguu

SEQ ID NO: 1947332 - RNA, 23 nt, Human
caugcuacacacugcauguuugu

SEQ ID NO: 1947333 - RNA, 22 nt, Human
caugauuucacaaauauuaaaa

SEQ ID NO: 1947334 - RNA, 18 nt, Human
caugauuucacaaauauu

SEQ ID NO: 1947335 - RNA, 19 nt, Human
caugauuucacaaauauua

SEQ ID NO: 1947336 - RNA, 12 nt, Human
caugauuucaca

SEQ ID NO: 1947337 - RNA, 14 nt, Human
caugauuucacaaa

SEQ ID NO: 1947338 - RNA, 15 nt, Human
caugauuucacaaau

SEQ ID NO: 1947339 - RNA, 16 nt, Human
caugauuucacaaaua

SEQ ID NO: 1947340 - RNA, 17 nt, Human
caugauuucacaaauau

SEQ ID NO: 1947341 - RNA, 13 nt, Human
caugauguuuucc

SEQ ID NO: 1947342 - RNA, 17 nt, Human
caugggaaugaauguca

SEQ ID NO: 1947343 - RNA, 16 nt, Human
caugggaaugaauguc

SEQ ID NO: 1947344 - RNA, 15 nt, Human
caugggaaugaaugu

SEQ ID NO: 1947345 - RNA, 14 nt, Human
caugggaaugaaug

SEQ ID NO: 1947346 - RNA, 17 nt, Human
cauggcucccccuccac

SEQ ID NO: 1947347 - RNA, 17 nt, Human
cauggcugccaauggga

SEQ ID NO: 1947348 - RNA, 18 nt, Human
cauggcuacuugcuuuga

SEQ ID NO: 1947349 - RNA, 16 nt, Human
cauguuggccaggcug

SEQ ID NO: 1947350 - RNA, 14 nt, Human
cauguuggccaggc

SEQ ID NO: 1947351 - RNA, 15 nt, Human
cauguuggccaggcu

SEQ ID NO: 1947352 - RNA, 16 nt, Human
caugucccuaccgagu

SEQ ID NO: 1947353 - RNA, 22 nt, Human
caugucccuaccgagucucuuc

SEQ ID NO: 1947354 - RNA, 14 nt, Human
caugucaaacguga

SEQ ID NO: 1947355 - RNA, 19 nt, Human
caugucaaacgugaaaaug

SEQ ID NO: 1947356 - RNA, 23 nt, Human
caugucccuaccgagucucuucu

SEQ ID NO: 1947357 - RNA, 14 nt, Human
cauguccuguguca

SEQ ID NO: 1947358 - RNA, 14 nt, Human
cauuaguuuugaag

SEQ ID NO: 1947359 - RNA, 15 nt, Human
cauuaguuuugaaga

SEQ ID NO: 1947360 - RNA, 16 nt, Human
cauuaguuuugaagau

SEQ ID NO: 1947361 - RNA, 18 nt, Human
cauuauaaucaccagggc

SEQ ID NO: 1947362 - RNA, 23 nt, Human
cauucgggccccaccugcagcuc

SEQ ID NO: 1947363 - RNA, 17 nt, Human
cauucguacauaauacu

SEQ ID NO: 1947364 - RNA, 19 nt, Human
cauucguacauaauacuga

SEQ ID NO: 1947365 - RNA, 16 nt, Human
cauucuccaccugcca

SEQ ID NO: 1947366 - RNA, 14 nt, Human
cauucuccaccugc

SEQ ID NO: 1947367 - RNA, 13 nt, Human
cauucuccaccug

SEQ ID NO: 1947368 - RNA, 20 nt, Human
cagccgagauagccaaggcc

SEQ ID NO: 1947369 - RNA, 19 nt, Human
cagccgagauagccaaggc

SEQ ID NO: 1947370 - RNA, 17 nt, Human
cagccucugaaaaccaa

SEQ ID NO: 1947371 - RNA, 19 nt, Human
cagccugcuaauuccccag

SEQ ID NO: 1947372 - RNA, 13 nt, Human
cagccucugggcc

SEQ ID NO: 1947373 - RNA, 21 nt, Human
cagccucugggcccacauccg

SEQ ID NO: 1947374 - RNA, 15 nt, Human
cagccugcuccagcu

SEQ ID NO: 1947375 - RNA, 12 nt, Human
cagccugcucca

SEQ ID NO: 1947376 - RNA, 18 nt, Human
cagcggggacagcuccuu

SEQ ID NO: 1947377 - RNA, 19 nt, Human
cagcggggacagcuccuuc

SEQ ID NO: 1947378 - RNA, 21 nt, Human
cagcggggacagcuccuucug

SEQ ID NO: 1947379 - RNA, 18 nt, Human
caggaaaagcugcugaca

SEQ ID NO: 1947380 - RNA, 15 nt, Human
caggaaaagcugcug

SEQ ID NO: 1947381 - RNA, 16 nt, Human
caggaaaagcugcuga

SEQ ID NO: 1947382 - RNA, 15 nt, Human
cagcucccuucuguu

SEQ ID NO: 1947383 - RNA, 17 nt, Human
cagcucccuucuguuga

SEQ ID NO: 1947384 - RNA, 22 nt, Human
cagcuccggcguguguucagug

SEQ ID NO: 1947385 - RNA, 12 nt, Human
cagcucccuucu

SEQ ID NO: 1947386 - RNA, 13 nt, Human
cagcucccuucug

SEQ ID NO: 1947387 - RNA, 14 nt, Human
cagcucccuucugu

SEQ ID NO: 1947388 - RNA, 20 nt, Human
cagcucccgcuccgggcucc

SEQ ID NO: 1947389 - RNA, 23 nt, Human
cagcucccgcuccgggcuccgac

SEQ ID NO: 1947390 - RNA, 21 nt, Human
cagcucccucaaagaggcagu

SEQ ID NO: 1947391 - RNA, 14 nt, Human
cagcucccccagcu

SEQ ID NO: 1947392 - RNA, 15 nt, Human
cagcucccccagcuc

SEQ ID NO: 1947393 - RNA, 16 nt, Human
cagcucccccagcucc

SEQ ID NO: 1947394 - RNA, 14 nt, Human
cagcugccugggau

SEQ ID NO: 1947395 - RNA, 13 nt, Human
cagcugccuggga

SEQ ID NO: 1947396 - RNA, 12 nt, Human
cagcugccuggg

SEQ ID NO: 1947397 - RNA, 12 nt, Human
cagcugccugca

SEQ ID NO: 1947398 - RNA, 19 nt, Human
cagcugagggugagugggu

SEQ ID NO: 1947399 - RNA, 14 nt, Human
cagcuguugucucu

SEQ ID NO: 1947400 - RNA, 17 nt, Human
cagcuguugucucuucu

SEQ ID NO: 1947401 - RNA, 19 nt, Human
cagcuguugucucuucucc

SEQ ID NO: 1947402 - RNA, 21 nt, Human
cagcuguugucucuucuccuu

SEQ ID NO: 1947403 - RNA, 23 nt, Human
cagcuguugacucuaguacugug

SEQ ID NO: 1947404 - RNA, 14 nt, Human
cagcuguugacucu

SEQ ID NO: 1947405 - RNA, 19 nt, Human
cagcuguugacucuaguac

SEQ ID NO: 1947406 - RNA, 22 nt, Human
cagcuguugucucuucuccuua

SEQ ID NO: 1947407 - RNA, 23 nt, Human
cagcuguuucuagaguuccuacc

SEQ ID NO: 1947408 - RNA, 24 nt, Human
cagcuguuucuagaguuccuacca

SEQ ID NO: 1947409 - RNA, 24 nt, Human
cagcugugcucuggacaggcaugu

SEQ ID NO: 1947410 - RNA, 19 nt, Human
cagcugugcucuggacagg

SEQ ID NO: 1947411 - RNA, 20 nt, Human
cagcugugcucuggacaggc

SEQ ID NO: 1947412 - RNA, 19 nt, Human
cagauucuuuccugaggcu

SEQ ID NO: 1947413 - RNA, 18 nt, Human
cagauucuuuccugaggc

SEQ ID NO: 1947414 - RNA, 17 nt, Human
cagauucuuuccugagg

SEQ ID NO: 1947415 - RNA, 15 nt, Human
cagauucuuuccuga

SEQ ID NO: 1947416 - RNA, 17 nt, Human
cagagguugcagugagc

SEQ ID NO: 1947417 - RNA, 16 nt, Human
cagagguugcagugag

SEQ ID NO: 1947418 - RNA, 15 nt, Human
cagagguccacaaca

SEQ ID NO: 1947419 - RNA, 20 nt, Human
cagagguccacaacacacag

SEQ ID NO: 1947420 - RNA, 21 nt, Human
cagaguaauccaagcaaaugu

SEQ ID NO: 1947421 - RNA, 19 nt, Human
cagaucaagggccuaucuu

SEQ ID NO: 1947422 - RNA, 23 nt, Human
cagaggggguggccucccaacuc

SEQ ID NO: 1947423 - RNA, 22 nt, Human
cagaggggguggccucccaacu

SEQ ID NO: 1947424 - RNA, 13 nt, Human
cagaucagccaga

SEQ ID NO: 1947425 - RNA, 15 nt, Human
cagaucagccagaag

SEQ ID NO: 1947426 - RNA, 23 nt, Human
cagaucauuaucagccugugcca

SEQ ID NO: 1947427 - RNA, 19 nt, Human
cagauccccaagccuggca

SEQ ID NO: 1947428 - RNA, 15 nt, Human
cagauccccaagccu

SEQ ID NO: 1947429 - RNA, 16 nt, Human
cagcacgauuucuguu

SEQ ID NO: 1947430 - RNA, 18 nt, Human
cagcacgauuucuguuua

SEQ ID NO: 1947431 - RNA, 19 nt, Human
cagcacgauuucuguuuag

SEQ ID NO: 1947432 - RNA, 20 nt, Human
cagcacgauuucuguuuaga

SEQ ID NO: 1947433 - RNA, 22 nt, Human
cagauucuuuccugaggcuggg

SEQ ID NO: 1947434 - RNA, 20 nt, Human
cagauucuuuccugaggcug

SEQ ID NO: 1947435 - RNA, 17 nt, Human
cagauugcaacaggcug

SEQ ID NO: 1947436 - RNA, 12 nt, Human
cagauucuuuua

SEQ ID NO: 1947437 - RNA, 18 nt, Human
cagauucuuuuaugugau

SEQ ID NO: 1947438 - RNA, 17 nt, Human
cagcauagaaguaacuu

SEQ ID NO: 1947439 - RNA, 12 nt, Human
cagcauaaagaa

SEQ ID NO: 1947440 - RNA, 21 nt, Human
cagcaguuuucuuuuaauuuu

SEQ ID NO: 1947441 - RNA, 20 nt, Human
cagcaguugcugguaaaaug

SEQ ID NO: 1947442 - RNA, 21 nt, Human
cagcaguugcugguaaaauga

SEQ ID NO: 1947443 - RNA, 22 nt, Human
cagcaguugcugguaaaaugaa

SEQ ID NO: 1947444 - RNA, 23 nt, Human
cagcaguugcugguaaaaugaag

SEQ ID NO: 1947445 - RNA, 13 nt, Human
cagcauaauacuu

SEQ ID NO: 1947446 - RNA, 16 nt, Human
cagcagugagagcaga

SEQ ID NO: 1947447 - RNA, 17 nt, Human
cagcaguugcugguaaa

SEQ ID NO: 1947448 - RNA, 20 nt, Human
cagcaucauggagguuugaa

SEQ ID NO: 1947449 - RNA, 13 nt, Human
cagccagccuggc

SEQ ID NO: 1947450 - RNA, 22 nt, Human
cagccagggaaagacuggcaag

SEQ ID NO: 1947451 - RNA, 23 nt, Human
cagccagggaaagacuggcaaga

SEQ ID NO: 1947452 - RNA, 14 nt, Human
cagccagccuggcu

SEQ ID NO: 1947453 - RNA, 15 nt, Human
cagccagccuggcug

SEQ ID NO: 1947454 - RNA, 16 nt, Human
cagccagccuggcugg

SEQ ID NO: 1947455 - RNA, 14 nt, Human
cagugggccuggcc

SEQ ID NO: 1947456 - RNA, 15 nt, Human
cagugggccuggcca

SEQ ID NO: 1947457 - RNA, 21 nt, Human
cagugggccuggccagcaggu

SEQ ID NO: 1947458 - RNA, 14 nt, Human
caguggggaaugaa

SEQ ID NO: 1947459 - RNA, 20 nt, Human
caguggugcgaucuggguuc

SEQ ID NO: 1947460 - RNA, 20 nt, Human
caguggggccugaggcuccu

SEQ ID NO: 1947461 - RNA, 21 nt, Human
caguggggccugaggcuccuu

SEQ ID NO: 1947462 - RNA, 20 nt, Human
caguggggaggggcuguggg

SEQ ID NO: 1947463 - RNA, 18 nt, Human
caguggugguuuucuguu

SEQ ID NO: 1947464 - RNA, 21 nt, Human
caguggugcgaucuggguuca

SEQ ID NO: 1947465 - RNA, 17 nt, Human
cagugcaugcugucccu

SEQ ID NO: 1947466 - RNA, 16 nt, Human
cagugcaugcuguccc

SEQ ID NO: 1947467 - RNA, 13 nt, Human
cagugcccacagg

SEQ ID NO: 1947468 - RNA, 15 nt, Human
cagugcccacaggau

SEQ ID NO: 1947469 - RNA, 17 nt, Human
cagugcccacaggauca

SEQ ID NO: 1947470 - RNA, 20 nt, Human
cagugggagcugccuguuca

SEQ ID NO: 1947471 - RNA, 23 nt, Human
cagugggagcugccuguucagcu

SEQ ID NO: 1947472 - RNA, 14 nt, Human
cagugcaugcuguc

SEQ ID NO: 1947473 - RNA, 13 nt, Human
cagugcaugcugu

SEQ ID NO: 1947474 - RNA, 15 nt, Human
cagugcaucucagcc

SEQ ID NO: 1947475 - RNA, 16 nt, Human
cagugcaucucagccc

SEQ ID NO: 1947476 - RNA, 17 nt, Human
cagugcaucucagccca

SEQ ID NO: 1947477 - RNA, 18 nt, Human
cagugcaucucagcccac

SEQ ID NO: 1947478 - RNA, 15 nt, Human
cagucuggaaugcag

SEQ ID NO: 1947479 - RNA, 17 nt, Human
cagucuggaaugcagug

SEQ ID NO: 1947480 - RNA, 12 nt, Human
cagugcaucuca

SEQ ID NO: 1947481 - RNA, 14 nt, Human
cagucaauuacaug

SEQ ID NO: 1947482 - RNA, 17 nt, Human
caguaaacuuagaguuu

SEQ ID NO: 1947483 - RNA, 13 nt, Human
caguaaaccuguc

SEQ ID NO: 1947484 - RNA, 16 nt, Human
caguaaaccugucuga

SEQ ID NO: 1947485 - RNA, 15 nt, Human
cagucacauuccaag

SEQ ID NO: 1947486 - RNA, 16 nt, Human
cagucacaaauuucuc

SEQ ID NO: 1947487 - RNA, 21 nt, Human
caggugauccacccaccucag

SEQ ID NO: 1947488 - RNA, 20 nt, Human
caggugcacaagcuccaagc

SEQ ID NO: 1947489 - RNA, 19 nt, Human
caggugcacaagcuccaag

SEQ ID NO: 1947490 - RNA, 18 nt, Human
caggugcacaagcuccaa

SEQ ID NO: 1947491 - RNA, 17 nt, Human
caggugcacaagcucca

SEQ ID NO: 1947492 - RNA, 23 nt, Human
caggugaucugcugcagagcagu

SEQ ID NO: 1947493 - RNA, 15 nt, Human
caggugcacaagcuc

SEQ ID NO: 1947494 - RNA, 22 nt, Human
caggugauccacccaccucagc

SEQ ID NO: 1947495 - RNA, 23 nt, Human
caggugauccacccaccucagcc

SEQ ID NO: 1947496 - RNA, 16 nt, Human
cagguuuuccugaaga

SEQ ID NO: 1947497 - RNA, 17 nt, Human
cagguuuuaaaagccuu

SEQ ID NO: 1947498 - RNA, 12 nt, Human
cagguuuuccug

SEQ ID NO: 1947499 - RNA, 14 nt, Human
cagguuuaagcugu

SEQ ID NO: 1947500 - RNA, 23 nt, Human
caguaaagaacaucccuccuggg

SEQ ID NO: 1947501 - RNA, 12 nt, Human
caguaaacacug

SEQ ID NO: 1947502 - RNA, 14 nt, Human
caguaaacacugug

SEQ ID NO: 1947503 - RNA, 15 nt, Human
caguaaacacugugu

SEQ ID NO: 1947504 - RNA, 21 nt, Human
caguaaacacuguguauuguu

SEQ ID NO: 1947505 - RNA, 14 nt, Human
cagguuuugcacuc

SEQ ID NO: 1947506 - RNA, 21 nt, Human
cagguuggugggggccucggu

SEQ ID NO: 1947507 - RNA, 22 nt, Human
cagguugucugaagucacugca

SEQ ID NO: 1947508 - RNA, 23 nt, Human
cagguugucugaagucacugcac

SEQ ID NO: 1947509 - RNA, 21 nt, Human
caggugcacaagcuccaagcu

SEQ ID NO: 1947510 - RNA, 22 nt, Human
caggugcacaagcuccaagcuc

SEQ ID NO: 1947511 - RNA, 14 nt, Human
caggugcccgccac

SEQ ID NO: 1947512 - RNA, 18 nt, Human
caggugcccgccaccaca

SEQ ID NO: 1947513 - RNA, 15 nt, Human
caggccacuugauga

SEQ ID NO: 1947514 - RNA, 18 nt, Human
caggcagauacaggaaaa

SEQ ID NO: 1947515 - RNA, 13 nt, Human
caggccagaggga

SEQ ID NO: 1947516 - RNA, 15 nt, Human
caggccagagggagu

SEQ ID NO: 1947517 - RNA, 18 nt, Human
caggcacaggcagggcag

SEQ ID NO: 1947518 - RNA, 19 nt, Human
caggcacaggcagggcagg

SEQ ID NO: 1947519 - RNA, 14 nt, Human
caggcagagcccag

SEQ ID NO: 1947520 - RNA, 12 nt, Human
caggcacaggca

SEQ ID NO: 1947521 - RNA, 13 nt, Human
caggcacaggcag

SEQ ID NO: 1947522 - RNA, 14 nt, Human
caggcacaggcagg

SEQ ID NO: 1947523 - RNA, 15 nt, Human
caggcacaggcaggg

SEQ ID NO: 1947524 - RNA, 16 nt, Human
caggcacaggcagggc

SEQ ID NO: 1947525 - RNA, 17 nt, Human
caggcacaggcagggca

SEQ ID NO: 1947526 - RNA, 23 nt, Human
caggccagcugcuugggcuucau

SEQ ID NO: 1947527 - RNA, 21 nt, Human
caggccagcugcuugggcuuc

SEQ ID NO: 1947528 - RNA, 19 nt, Human
caggccagcugcuugggcu

SEQ ID NO: 1947529 - RNA, 17 nt, Human
caggccagcugcuuggg

SEQ ID NO: 1947530 - RNA, 18 nt, Human
caggccaggcccucugcc

SEQ ID NO: 1947531 - RNA, 17 nt, Human
caggccaggcccucugc

SEQ ID NO: 1947532 - RNA, 19 nt, Human
caggccaggcccucugccc

SEQ ID NO: 1947533 - RNA, 20 nt, Human
caggccaggcccucugccca

SEQ ID NO: 1947534 - RNA, 16 nt, Human
caggccagagggagug

SEQ ID NO: 1947535 - RNA, 21 nt, Human
caggcugggcuucaguggcag

SEQ ID NO: 1947536 - RNA, 22 nt, Human
caggcugggcuucaguggcagc

SEQ ID NO: 1947537 - RNA, 14 nt, Human
caggcugggagagc

SEQ ID NO: 1947538 - RNA, 12 nt, Human
caggcugggaga

SEQ ID NO: 1947539 - RNA, 15 nt, Human
caggcugggagagcc

SEQ ID NO: 1947540 - RNA, 20 nt, Human
caggcugggcuucaguggca

SEQ ID NO: 1947541 - RNA, 18 nt, Human
cagggauaacaaagaacc

SEQ ID NO: 1947542 - RNA, 16 nt, Human
cagggaugguguucaa

SEQ ID NO: 1947543 - RNA, 21 nt, Human
cagggcucagcggggacagcu

SEQ ID NO: 1947544 - RNA, 23 nt, Human
cagggcucagcggggacagcucc

SEQ ID NO: 1947545 - RNA, 19 nt, Human
caggggaaaaucagccugc

SEQ ID NO: 1947546 - RNA, 20 nt, Human
caggggaaaaucagccugcu

SEQ ID NO: 1947547 - RNA, 18 nt, Human
cagggcugaggccucuca

SEQ ID NO: 1947548 - RNA, 16 nt, Human
cagggcugaggccucu

SEQ ID NO: 1947549 - RNA, 14 nt, Human
caggggaaccugcc

SEQ ID NO: 1947550 - RNA, 15 nt, Human
caggggaaccugcca

SEQ ID NO: 1947551 - RNA, 16 nt, Human
caggggaaccugccau

SEQ ID NO: 1947552 - RNA, 16 nt, Human
caggggacacccagaa

SEQ ID NO: 1947553 - RNA, 18 nt, Human
caggggacacccagaaac

SEQ ID NO: 1947554 - RNA, 15 nt, Human
cagaacacauaauuc

SEQ ID NO: 1947555 - RNA, 14 nt, Human
cagaaguuuaaaua

SEQ ID NO: 1947556 - RNA, 13 nt, Human
cagaagugacuga

SEQ ID NO: 1947557 - RNA, 16 nt, Human
cagaaguccagagucu

SEQ ID NO: 1947558 - RNA, 17 nt, Human
cagaaauguguuaucac

SEQ ID NO: 1947559 - RNA, 14 nt, Human
cagaaauucuguuu

SEQ ID NO: 1947560 - RNA, 17 nt, Human
cagaaauucuguuuuua

SEQ ID NO: 1947561 - RNA, 18 nt, Human
cagaaauucuguuuuuaa

SEQ ID NO: 1947562 - RNA, 19 nt, Human
cagaaauucuguuuuuaaa

SEQ ID NO: 1947563 - RNA, 20 nt, Human
cagaaauucuguuuuuaaaa

SEQ ID NO: 1947564 - RNA, 22 nt, Human
cagaaauucuguuuuuaaaaau

SEQ ID NO: 1947565 - RNA, 23 nt, Human
cagaaauugguaccuugcacaca

SEQ ID NO: 1947566 - RNA, 11 nt, Human
cagaaauuggu

SEQ ID NO: 1947567 - RNA, 15 nt, Human
cagaaauugguaccu

SEQ ID NO: 1947568 - RNA, 17 nt, Human
cagaaauugguaccuug

SEQ ID NO: 1947569 - RNA, 19 nt, Human
cagaaauugguaccuugca

SEQ ID NO: 1947570 - RNA, 20 nt, Human
cagaaauugguaccuugcac

SEQ ID NO: 1947571 - RNA, 21 nt, Human
cagaaauugguaccuugcaca

SEQ ID NO: 1947572 - RNA, 15 nt, Human
cagaauacugaugga

SEQ ID NO: 1947573 - RNA, 22 nt, Human
cagaauauuagugaccucagcu

SEQ ID NO: 1947574 - RNA, 21 nt, Human
cagaauaaacuggcagcucag

SEQ ID NO: 1947575 - RNA, 21 nt, Human
cagaaguuucugccgcagccc

SEQ ID NO: 1947576 - RNA, 20 nt, Human
cagaaguuucugccgcagcc

SEQ ID NO: 1947577 - RNA, 22 nt, Human
cagaaguuucugccgcagcccu

SEQ ID NO: 1947578 - RNA, 16 nt, Human
cagaaguuuaaauauu

SEQ ID NO: 1947579 - RNA, 22 nt, Human
cagaaguuuaaauauuaagcau

SEQ ID NO: 1947580 - RNA, 14 nt, Human
cacuuuccaaguca

SEQ ID NO: 1947581 - RNA, 13 nt, Human
cacuuuauugcca

SEQ ID NO: 1947582 - RNA, 20 nt, Human
cacuuuauugccaaaaccca

SEQ ID NO: 1947583 - RNA, 22 nt, Human
cacugggcuuggggaccagagc

SEQ ID NO: 1947584 - RNA, 15 nt, Human
cacuggggauugggc

SEQ ID NO: 1947585 - RNA, 16 nt, Human
cacuggggauugggcc

SEQ ID NO: 1947586 - RNA, 17 nt, Human
cacuggggauugggccc

SEQ ID NO: 1947587 - RNA, 18 nt, Human
cacuggggauugggcccc

SEQ ID NO: 1947588 - RNA, 23 nt, Human
cacugggcuuggggaccagagcu

SEQ ID NO: 1947589 - RNA, 23 nt, Human
cacuggggauugggccccugcca

SEQ ID NO: 1947590 - RNA, 17 nt, Human
cacuggugacaugucuu

SEQ ID NO: 1947591 - RNA, 14 nt, Human
cacuguugcccagg

SEQ ID NO: 1947592 - RNA, 22 nt, Human
cacugguggcccgacagccugg

SEQ ID NO: 1947593 - RNA, 13 nt, Human
cacugguggcccg

SEQ ID NO: 1947594 - RNA, 21 nt, Human
cacugguggcccgacagccug

SEQ ID NO: 1947595 - RNA, 15 nt, Human
cacuguugcccaggc

SEQ ID NO: 1947596 - RNA, 16 nt, Human
cacuguugcccaggcu

SEQ ID NO: 1947597 - RNA, 21 nt, Human
cacuugugacuuuugcuuuaa

SEQ ID NO: 1947598 - RNA, 21 nt, Human
cacuugucggcuccagucccc

SEQ ID NO: 1947599 - RNA, 13 nt, Human
cacuugugacuuu

SEQ ID NO: 1947600 - RNA, 14 nt, Human
cacuugugacuuuu

SEQ ID NO: 1947601 - RNA, 17 nt, Human
cacuugugacuuuugcu

SEQ ID NO: 1947602 - RNA, 18 nt, Human
cacuugugacuuuugcuu

SEQ ID NO: 1947603 - RNA, 20 nt, Human
cacuugugacuuuugcuuua

SEQ ID NO: 1947604 - RNA, 16 nt, Human
cacuuguccaugugaa

SEQ ID NO: 1947605 - RNA, 17 nt, Human
cacuugucggcuccagu

SEQ ID NO: 1947606 - RNA, 17 nt, Human
cacuuggucugugagau

SEQ ID NO: 1947607 - RNA, 20 nt, Human
cacuuggucugugagaugcu

SEQ ID NO: 1947608 - RNA, 20 nt, Human
cacuuagaaauugcauuucc

SEQ ID NO: 1947609 - RNA, 19 nt, Human
cacuguuucaaacuuuacu

SEQ ID NO: 1947610 - RNA, 23 nt, Human
cacuguuuagauuugccauagag

SEQ ID NO: 1947611 - RNA, 15 nt, Human
cacuguuuagauuug

SEQ ID NO: 1947612 - RNA, 20 nt, Human
cacuguuuagauuugccaua

SEQ ID NO: 1947613 - RNA, 17 nt, Human
cacuguugcccaggcug

SEQ ID NO: 1947614 - RNA, 17 nt, Human
cacuggugccaugucag

SEQ ID NO: 1947615 - RNA, 12 nt, Human
cacuguuuagau

SEQ ID NO: 1947616 - RNA, 17 nt, Human
cacuuagaaauugcauu

SEQ ID NO: 1947617 - RNA, 19 nt, Human
cacuuagaaauugcauuuc

SEQ ID NO: 1947618 - RNA, 17 nt, Human
cacucuuggagccugca

SEQ ID NO: 1947619 - RNA, 19 nt, Human
cacucuuggagccugcaga

SEQ ID NO: 1947620 - RNA, 20 nt, Human
cacugaaccugggaaagaga

SEQ ID NO: 1947621 - RNA, 14 nt, Human
cacucuuggagccu

SEQ ID NO: 1947622 - RNA, 15 nt, Human
cacucuuggagccug

SEQ ID NO: 1947623 - RNA, 16 nt, Human
cacucuuggagccugc

SEQ ID NO: 1947624 - RNA, 17 nt, Human
cacucuugaaaaaugca

SEQ ID NO: 1947625 - RNA, 22 nt, Human
cacucuuagcccaugcuguuuu

SEQ ID NO: 1947626 - RNA, 20 nt, Human
cacuccccgccguacaguuc

SEQ ID NO: 1947627 - RNA, 17 nt, Human
cacucuuauugcccacg

SEQ ID NO: 1947628 - RNA, 18 nt, Human
cacucuuauugcccacgc

SEQ ID NO: 1947629 - RNA, 19 nt, Human
cacucuuauugcccacgcu

SEQ ID NO: 1947630 - RNA, 12 nt, Human
cacucccagcau

SEQ ID NO: 1947631 - RNA, 14 nt, Human
cacuccccagccag

SEQ ID NO: 1947632 - RNA, 16 nt, Human
cacuccccagccagcc

SEQ ID NO: 1947633 - RNA, 21 nt, Human
cacuccccagccagccuggcu

SEQ ID NO: 1947634 - RNA, 22 nt, Human
cacuccccagccagccuggcug

SEQ ID NO: 1947635 - RNA, 14 nt, Human
cacggccaggccag

SEQ ID NO: 1947636 - RNA, 15 nt, Human
cacggccaggccaga

SEQ ID NO: 1947637 - RNA, 16 nt, Human
cacggccaggccagag

SEQ ID NO: 1947638 - RNA, 22 nt, Human
cacggagcggauugcaaagcaa

SEQ ID NO: 1947639 - RNA, 20 nt, Human
cacggagggugacgggggug

SEQ ID NO: 1947640 - RNA, 23 nt, Human
cacuacggaauaguuggcuagga

SEQ ID NO: 1947641 - RNA, 13 nt, Human
cacuaccuggcug

SEQ ID NO: 1947642 - RNA, 21 nt, Human
caccuacaugagguacugaga

SEQ ID NO: 1947643 - RNA, 20 nt, Human
caccuaccaccacgcccggc

SEQ ID NO: 1947644 - RNA, 16 nt, Human
caccugccagggacag

SEQ ID NO: 1947645 - RNA, 14 nt, Human
caccugccagggac

SEQ ID NO: 1947646 - RNA, 13 nt, Human
caccugccaggga

SEQ ID NO: 1947647 - RNA, 17 nt, Human
caccugccagggacaga

SEQ ID NO: 1947648 - RNA, 19 nt, Human
caccuugacagggcacacc

SEQ ID NO: 1947649 - RNA, 13 nt, Human
caccuuggcucaa

SEQ ID NO: 1947650 - RNA, 15 nt, Human
caccuuuguccccac

SEQ ID NO: 1947651 - RNA, 14 nt, Human
caccuuugucccca

SEQ ID NO: 1947652 - RNA, 17 nt, Human
caccuuuguccccaccg

SEQ ID NO: 1947653 - RNA, 14 nt, Human
caccuuugaagaag

SEQ ID NO: 1947654 - RNA, 14 nt, Human
caccuuuauucugg

SEQ ID NO: 1947655 - RNA, 14 nt, Human
caccuugguuccug

SEQ ID NO: 1947656 - RNA, 22 nt, Human
caccuugguuccuggggcaucc

SEQ ID NO: 1947657 - RNA, 16 nt, Human
cacagcuaacauggaa

SEQ ID NO: 1947658 - RNA, 15 nt, Human
cacagcuaacaugga

SEQ ID NO: 1947659 - RNA, 22 nt, Human
cacagacccugcccugugggcc

SEQ ID NO: 1947660 - RNA, 21 nt, Human
cacagacccugcccugugggc

SEQ ID NO: 1947661 - RNA, 20 nt, Human
cacagacccugcccuguggg

SEQ ID NO: 1947662 - RNA, 19 nt, Human
cacagacccugcccugugg

SEQ ID NO: 1947663 - RNA, 17 nt, Human
cacagacaggaccccug

SEQ ID NO: 1947664 - RNA, 22 nt, Human
cacagacaggaccccugcaguu

SEQ ID NO: 1947665 - RNA, 10 nt, Human
cacagacagg

SEQ ID NO: 1947666 - RNA, 13 nt, Human
cacagacaggacc

SEQ ID NO: 1947667 - RNA, 14 nt, Human
cacagacaggaccc

SEQ ID NO: 1947668 - RNA, 15 nt, Human
cacagacaggacccc

SEQ ID NO: 1947669 - RNA, 19 nt, Human
cacagaaggggacugccac

SEQ ID NO: 1947670 - RNA, 22 nt, Human
cacagaaggggacugccaccuc

SEQ ID NO: 1947671 - RNA, 23 nt, Human
cacagaaggggacugccaccucc

SEQ ID NO: 1947672 - RNA, 18 nt, Human
cacagaaggggacugcca

SEQ ID NO: 1947673 - RNA, 13 nt, Human
cacaggucaggcu

SEQ ID NO: 1947674 - RNA, 14 nt, Human
cacaggucaggcua

SEQ ID NO: 1947675 - RNA, 19 nt, Human
cacagggccuggcccaugu

SEQ ID NO: 1947676 - RNA, 17 nt, Human
cacagggccuggcccau

SEQ ID NO: 1947677 - RNA, 18 nt, Human
cacagggccuggcccaug

SEQ ID NO: 1947678 - RNA, 13 nt, Human
cacagggccuggc

SEQ ID NO: 1947679 - RNA, 14 nt, Human
cacagggccuggcc

SEQ ID NO: 1947680 - RNA, 15 nt, Human
cacagggccuggccc

SEQ ID NO: 1947681 - RNA, 16 nt, Human
cacagggccuggccca

SEQ ID NO: 1947682 - RNA, 17 nt, Human
cacagggcaugaaauga

SEQ ID NO: 1947683 - RNA, 22 nt, Human
cacagcuaacauggaaguacua

SEQ ID NO: 1947684 - RNA, 22 nt, Human
cacagcguuaugugucugccac

SEQ ID NO: 1947685 - RNA, 13 nt, Human
cacagcucccuuc

SEQ ID NO: 1947686 - RNA, 20 nt, Human
cacagcucuguccugggagu

SEQ ID NO: 1947687 - RNA, 23 nt, Human
cacagcucuguccugggagugag

SEQ ID NO: 1947688 - RNA, 10 nt, Human
cacagcucuu

SEQ ID NO: 1947689 - RNA, 16 nt, Human
cacagcucccuucugu

SEQ ID NO: 1947690 - RNA, 17 nt, Human
cacagcucccuucuguu

SEQ ID NO: 1947691 - RNA, 16 nt, Human
cacaguauuacuucug

SEQ ID NO: 1947692 - RNA, 18 nt, Human
cacaguauuacuucugcu

SEQ ID NO: 1947693 - RNA, 19 nt, Human
cacaguauuacuucugcua

SEQ ID NO: 1947694 - RNA, 16 nt, Human
caccaggccccccugu

SEQ ID NO: 1947695 - RNA, 14 nt, Human
caccagcugugucc

SEQ ID NO: 1947696 - RNA, 16 nt, Human
cacccagcccacuucu

SEQ ID NO: 1947697 - RNA, 17 nt, Human
cacccagcccacuucug

SEQ ID NO: 1947698 - RNA, 17 nt, Human
caccaggccccccuguc

SEQ ID NO: 1947699 - RNA, 12 nt, Human
caccagcagccu

SEQ ID NO: 1947700 - RNA, 14 nt, Human
caccagcagccugg

SEQ ID NO: 1947701 - RNA, 23 nt, Human
caccaacauacucccaucuguga

SEQ ID NO: 1947702 - RNA, 19 nt, Human
caccaaaaaaauccagaaa

SEQ ID NO: 1947703 - RNA, 20 nt, Human
caccaaaaaaauccagaaac

SEQ ID NO: 1947704 - RNA, 12 nt, Human
caccaaaaaaua

SEQ ID NO: 1947705 - RNA, 13 nt, Human
caccaaaaaauau

SEQ ID NO: 1947706 - RNA, 14 nt, Human
caccaaaaaauauc

SEQ ID NO: 1947707 - RNA, 17 nt, Human
caccaaaaaauaucuag

SEQ ID NO: 1947708 - RNA, 15 nt, Human
caccagcagccugga

SEQ ID NO: 1947709 - RNA, 21 nt, Human
caccagcccuuagcagggaaa

SEQ ID NO: 1947710 - RNA, 24 nt, Human
cacccaggagccccgaggccuucu

SEQ ID NO: 1947711 - RNA, 19 nt, Human
cacccagcccacuucugcc

SEQ ID NO: 1947712 - RNA, 20 nt, Human
cacccaggagccccgaggcc

SEQ ID NO: 1947713 - RNA, 23 nt, Human
cacccaggagccccgaggccuuc

SEQ ID NO: 1947714 - RNA, 21 nt, Human
caccaacauacucccaucugu

SEQ ID NO: 1947715 - RNA, 20 nt, Human
caccaacauacucccaucug

SEQ ID NO: 1947716 - RNA, 17 nt, Human
caccaacauacucccau

SEQ ID NO: 1947717 - RNA, 13 nt, Human
cacauuuuucuua

SEQ ID NO: 1947718 - RNA, 14 nt, Human
cacauuuuucuuag

SEQ ID NO: 1947719 - RNA, 17 nt, Human
cacauuuuuuaaaugca

SEQ ID NO: 1947720 - RNA, 21 nt, Human
cacauuuuuuaaaugcaccug

SEQ ID NO: 1947721 - RNA, 15 nt, Human
cacauuuuauuuuau

SEQ ID NO: 1947722 - RNA, 19 nt, Human
cacauuuuaaaaaauuugu

SEQ ID NO: 1947723 - RNA, 17 nt, Human
cacauuuuuauaccugu

SEQ ID NO: 1947724 - RNA, 21 nt, Human
cacauuuuuauaccuguuuaa

SEQ ID NO: 1947725 - RNA, 23 nt, Human
cacauuuuuauaccuguuuaaau

SEQ ID NO: 1947726 - RNA, 21 nt, Human
cacauuuucuuaauccagucu

SEQ ID NO: 1947727 - RNA, 18 nt, Human
cacauuugguaauguuuu

SEQ ID NO: 1947728 - RNA, 20 nt, Human
cacauuugguaauguuuuua

SEQ ID NO: 1947729 - RNA, 21 nt, Human
cacauuucuuuuuaaaaaaag

SEQ ID NO: 1947730 - RNA, 18 nt, Human
cacauuucucaacaaggc

SEQ ID NO: 1947731 - RNA, 13 nt, Human
cacauuucuuuuu

SEQ ID NO: 1947732 - RNA, 19 nt, Human
cacaucuugcucugcugac

SEQ ID NO: 1947733 - RNA, 18 nt, Human
cacaucuugcucugcuga

SEQ ID NO: 1947734 - RNA, 20 nt, Human
cacaucagcacgauuucugu

SEQ ID NO: 1947735 - RNA, 21 nt, Human
cacaucagcacgauuucuguu

SEQ ID NO: 1947736 - RNA, 22 nt, Human
cacaucagcacgauuucuguuu

SEQ ID NO: 1947737 - RNA, 19 nt, Human
cacauccggggccagcucc

SEQ ID NO: 1947738 - RNA, 20 nt, Human
cacauccggggccagcuccg

SEQ ID NO: 1947739 - RNA, 19 nt, Human
cacauccuugacuuuuuag

SEQ ID NO: 1947740 - RNA, 21 nt, Human
cacauccuugacuuuuuagau

SEQ ID NO: 1947741 - RNA, 16 nt, Human
cacaucuugcucugcu

SEQ ID NO: 1947742 - RNA, 17 nt, Human
cacaucuugcucugcug

SEQ ID NO: 1947743 - RNA, 17 nt, Human
caaguagacuacuguuc

SEQ ID NO: 1947744 - RNA, 16 nt, Human
caaguagaccaugguc

SEQ ID NO: 1947745 - RNA, 16 nt, Human
caaguacaguacuuug

SEQ ID NO: 1947746 - RNA, 15 nt, Human
caaguacacugagag

SEQ ID NO: 1947747 - RNA, 13 nt, Human
caaguuuugugaa

SEQ ID NO: 1947748 - RNA, 14 nt, Human
caaguuuugugaaa

SEQ ID NO: 1947749 - RNA, 16 nt, Human
caaguuuugugaaauu

SEQ ID NO: 1947750 - RNA, 17 nt, Human
caaguuuugugaaauuu

SEQ ID NO: 1947751 - RNA, 18 nt, Human
caaguuuugugaaauuuu

SEQ ID NO: 1947752 - RNA, 19 nt, Human
caaguuuugugaaauuuuu

SEQ ID NO: 1947753 - RNA, 20 nt, Human
caaguuuugugaaauuuuuc

SEQ ID NO: 1947754 - RNA, 21 nt, Human
caaguuuugugaaauuuuuca

SEQ ID NO: 1947755 - RNA, 22 nt, Human
caaguuuugugaaauuuuucau

SEQ ID NO: 1947756 - RNA, 19 nt, Human
caaguugagcuaugacuua

SEQ ID NO: 1947757 - RNA, 18 nt, Human
caacccccagcucccgcu

SEQ ID NO: 1947758 - RNA, 13 nt, Human
caaguaguucugu

SEQ ID NO: 1947759 - RNA, 12 nt, Human
caaguauuauaa

SEQ ID NO: 1947760 - RNA, 22 nt, Human
caaguauuauaaacaagaauga

SEQ ID NO: 1947761 - RNA, 22 nt, Human
caaugcugugcccuaaagugua

SEQ ID NO: 1947762 - RNA, 17 nt, Human
caauucuccugccucag

SEQ ID NO: 1947763 - RNA, 19 nt, Human
caauucuccugccucagcc

SEQ ID NO: 1947764 - RNA, 13 nt, Human
caauucuccuuua

SEQ ID NO: 1947765 - RNA, 22 nt, Human
caaugcuggcuguuggcugggg

SEQ ID NO: 1947766 - RNA, 23 nt, Human
caaugcuggcuguuggcuggggg

SEQ ID NO: 1947767 - RNA, 16 nt, Human
cacaagacccuugugg

SEQ ID NO: 1947768 - RNA, 14 nt, Human
cacaagacccuugu

SEQ ID NO: 1947769 - RNA, 12 nt, Human
caauuuaaaaaa

SEQ ID NO: 1947770 - RNA, 17 nt, Human
caauuuaaaauauagau

SEQ ID NO: 1947771 - RNA, 14 nt, Human
cacaagccuucggc

SEQ ID NO: 1947772 - RNA, 20 nt, Human
caacaccuuguuucccucuc

SEQ ID NO: 1947773 - RNA, 22 nt, Human
caacaccucugcacaagcugca

SEQ ID NO: 1947774 - RNA, 13 nt, Human
caacacaaagauu

SEQ ID NO: 1947775 - RNA, 21 nt, Human
caaaguacacuguuucaaacu

SEQ ID NO: 1947776 - RNA, 16 nt, Human
caaaguacacuguuuc

SEQ ID NO: 1947777 - RNA, 20 nt, Human
caaaguacacuguuucaaac

SEQ ID NO: 1947778 - RNA, 14 nt, Human
caaagaugcagccg

SEQ ID NO: 1947779 - RNA, 13 nt, Human
caaagaugcagcc

SEQ ID NO: 1947780 - RNA, 16 nt, Human
caaagucaagccacau

SEQ ID NO: 1947781 - RNA, 17 nt, Human
caaaucagcugcuacua

SEQ ID NO: 1947782 - RNA, 20 nt, Human
caaauccuugugggaaaaga

SEQ ID NO: 1947783 - RNA, 14 nt, Human
caaauccaggaccc

SEQ ID NO: 1947784 - RNA, 22 nt, Human
caaauccagccugcugccugcu

SEQ ID NO: 1947785 - RNA, 20 nt, Human
caaauccaggacccugccag

SEQ ID NO: 1947786 - RNA, 17 nt, Human
caaauccaggacccugc

SEQ ID NO: 1947787 - RNA, 18 nt, Human
caaauccaggacccugcc

SEQ ID NO: 1947788 - RNA, 22 nt, Human
caaaugagggucuugguuccag

SEQ ID NO: 1947789 - RNA, 18 nt, Human
caaaucugcaaagcaugu

SEQ ID NO: 1947790 - RNA, 20 nt, Human
caaaucugcaaagcauguuu

SEQ ID NO: 1947791 - RNA, 21 nt, Human
caaaucugcuuuuuaaagaau

SEQ ID NO: 1947792 - RNA, 13 nt, Human
caaaugcagcuuu

SEQ ID NO: 1947793 - RNA, 22 nt, Human
caaaugauugcuuuuaaaauuu

SEQ ID NO: 1947794 - RNA, 23 nt, Human
caaaugauugcuuuuaaaauuuu

SEQ ID NO: 1947795 - RNA, 17 nt, Human
caaaugaugugccugcu

SEQ ID NO: 1947796 - RNA, 20 nt, Human
caaaugaugugccugcuuca

SEQ ID NO: 1947797 - RNA, 21 nt, Human
caaaugaugugccugcuucag

SEQ ID NO: 1947798 - RNA, 12 nt, Human
caaaugauugcu

SEQ ID NO: 1947799 - RNA, 14 nt, Human
caaaugauugcuuu

SEQ ID NO: 1947800 - RNA, 15 nt, Human
caaaugauugcuuuu

SEQ ID NO: 1947801 - RNA, 17 nt, Human
caaaugauugcuuuuaa

SEQ ID NO: 1947802 - RNA, 18 nt, Human
caaaugauugcuuuuaaa

SEQ ID NO: 1947803 - RNA, 19 nt, Human
caaaugauugcuuuuaaaa

SEQ ID NO: 1947804 - RNA, 20 nt, Human
caaaugauugcuuuuaaaau

SEQ ID NO: 1947805 - RNA, 21 nt, Human
caaaugauugcuuuuaaaauu

SEQ ID NO: 1947806 - RNA, 23 nt, Human
caacaauuuucagauuugcacaa

SEQ ID NO: 1947807 - RNA, 20 nt, Human
caacaauuuagaaggaaaac

SEQ ID NO: 1947808 - RNA, 12 nt, Human
caacaauuuuca

SEQ ID NO: 1947809 - RNA, 13 nt, Human
caacaauuuucag

SEQ ID NO: 1947810 - RNA, 15 nt, Human
caacaauuuucagau

SEQ ID NO: 1947811 - RNA, 18 nt, Human
caacaauuuucagauuug

SEQ ID NO: 1947812 - RNA, 19 nt, Human
caacaauuuucagauuugc

SEQ ID NO: 1947813 - RNA, 23 nt, Human
caacaaaccuguuucugcagcca

SEQ ID NO: 1947814 - RNA, 21 nt, Human
caacaaacugcacaugauuuc

SEQ ID NO: 1947815 - RNA, 22 nt, Human
caacaaacugcacaugauuuca

SEQ ID NO: 1947816 - RNA, 13 nt, Human
caacaaaauacau

SEQ ID NO: 1947817 - RNA, 14 nt, Human
caacaaaauacauu

SEQ ID NO: 1947818 - RNA, 16 nt, Human
caacaaacugcacaug

SEQ ID NO: 1947819 - RNA, 17 nt, Human
caacaaacugcacauga

SEQ ID NO: 1947820 - RNA, 12 nt, Human
caacaaaauaca

SEQ ID NO: 1947821 - RNA, 18 nt, Human
caaccacugcgaccacaa

SEQ ID NO: 1947822 - RNA, 23 nt, Human
caagaauuucuaggacugaauua

SEQ ID NO: 1947823 - RNA, 13 nt, Human
caagacacaguga

SEQ ID NO: 1947824 - RNA, 22 nt, Human
caagaauaaaggcagcuguugu

SEQ ID NO: 1947825 - RNA, 16 nt, Human
caagacaacauuguaa

SEQ ID NO: 1947826 - RNA, 19 nt, Human
caagacccuugugguccca

SEQ ID NO: 1947827 - RNA, 18 nt, Human
caagacccuugugguccc

SEQ ID NO: 1947828 - RNA, 22 nt, Human
caagacccuuguggucccaccc

SEQ ID NO: 1947829 - RNA, 15 nt, Human
caacucaccccagcc

SEQ ID NO: 1947830 - RNA, 13 nt, Human
caacucaccccag

SEQ ID NO: 1947831 - RNA, 16 nt, Human
caacucaccccagccc

SEQ ID NO: 1947832 - RNA, 15 nt, Human
caacccccagcuccc

SEQ ID NO: 1947833 - RNA, 16 nt, Human
caacccccagcucccg

SEQ ID NO: 1947834 - RNA, 19 nt, Human
caagaauaaaggcagcugu

SEQ ID NO: 1947835 - RNA, 21 nt, Human
caagaauaaaggcagcuguug

SEQ ID NO: 1947836 - RNA, 21 nt, Human
caagaaguucuuugauucugu

SEQ ID NO: 1947837 - RNA, 15 nt, Human
caagaaguuuaagga

SEQ ID NO: 1947838 - RNA, 15 nt, Human
caagaauaaaggcag

SEQ ID NO: 1947839 - RNA, 17 nt, Human
caagaauaaaggcagcu

SEQ ID NO: 1947840 - RNA, 18 nt, Human
caagaauaaaggcagcug

SEQ ID NO: 1947841 - RNA, 21 nt, Human
caaccacguugggacagggag

SEQ ID NO: 1947842 - RNA, 19 nt, Human
caacccaaauguucaucaa

SEQ ID NO: 1947843 - RNA, 14 nt, Human
caaccauuccccau

SEQ ID NO: 1947844 - RNA, 13 nt, Human
caaccauuuaucu

SEQ ID NO: 1947845 - RNA, 16 nt, Human
caaccauuuaucuuga

SEQ ID NO: 1947846 - RNA, 17 nt, Human
caaccauuuaucuugaa

SEQ ID NO: 1947847 - RNA, 22 nt, Human
caaccauuuaucuugaaggaaa

SEQ ID NO: 1947848 - RNA, 14 nt, Human
caaccauuugaaac

SEQ ID NO: 1947849 - RNA, 15 nt, Human
caacccccagccugc

SEQ ID NO: 1947850 - RNA, 16 nt, Human
caacccccagccugcu

SEQ ID NO: 1947851 - RNA, 17 nt, Human
caacccccagccugcua

SEQ ID NO: 1947852 - RNA, 18 nt, Human
caacuaugauuuggaaaa

SEQ ID NO: 1947853 - RNA, 19 nt, Human
caacuaugauuuggaaaau

SEQ ID NO: 1947854 - RNA, 22 nt, Human
caacuaugauuuggaaaauaaa

SEQ ID NO: 1947855 - RNA, 17 nt, Human
caacuaugauuuggaaa

SEQ ID NO: 1947856 - RNA, 14 nt, Human
caacccccagcucc

SEQ ID NO: 1947857 - RNA, 15 nt, Human
caaaccaccagaagc

SEQ ID NO: 1947858 - RNA, 16 nt, Human
caaaccaccagaagcc

SEQ ID NO: 1947859 - RNA, 20 nt, Human
caaaccaccagaagcccaga

SEQ ID NO: 1947860 - RNA, 22 nt, Human
caaaccaccagaagcccagaau

SEQ ID NO: 1947861 - RNA, 13 nt, Human
caaaaguggucag

SEQ ID NO: 1947862 - RNA, 15 nt, Human
caaaagcugggcagg

SEQ ID NO: 1947863 - RNA, 14 nt, Human
caaaagcugcucag

SEQ ID NO: 1947864 - RNA, 21 nt, Human
caaaagcugaacacauuucuu

SEQ ID NO: 1947865 - RNA, 14 nt, Human
caaaaguagaacuu

SEQ ID NO: 1947866 - RNA, 18 nt, Human
caaaaguagaacuuugua

SEQ ID NO: 1947867 - RNA, 19 nt, Human
caaaaguagaacuuuguau

SEQ ID NO: 1947868 - RNA, 20 nt, Human
caaaaguagaacuuuguaua

SEQ ID NO: 1947869 - RNA, 21 nt, Human
caaaaguagaacuuuguauag

SEQ ID NO: 1947870 - RNA, 22 nt, Human
caaaaguagaacuuuguauagu

SEQ ID NO: 1947871 - RNA, 13 nt, Human
auuuuuaagugcu

SEQ ID NO: 1947872 - RNA, 16 nt, Human
auuuuuacaguuauag

SEQ ID NO: 1947873 - RNA, 16 nt, Human
auuuuuuuuuccuuca

SEQ ID NO: 1947874 - RNA, 13 nt, Human
auuuuuuuuuccu

SEQ ID NO: 1947875 - RNA, 12 nt, Human
auuuuuuuuucc

SEQ ID NO: 1947876 - RNA, 12 nt, Human
caaaagcugcuc

SEQ ID NO: 1947877 - RNA, 20 nt, Human
caaaagcugaacacauuucu

SEQ ID NO: 1947878 - RNA, 16 nt, Human
caaaagcugaacacau

SEQ ID NO: 1947879 - RNA, 22 nt, Human
caaaaaaaguuguaugaucugu

SEQ ID NO: 1947880 - RNA, 12 nt, Human
caaaaaaaguug

SEQ ID NO: 1947881 - RNA, 13 nt, Human
caaaaaaaguugu

SEQ ID NO: 1947882 - RNA, 14 nt, Human
caaaaaaaguugua

SEQ ID NO: 1947883 - RNA, 15 nt, Human
caaaaaaaguuguau

SEQ ID NO: 1947884 - RNA, 16 nt, Human
caaaaaaaguuguaug

SEQ ID NO: 1947885 - RNA, 18 nt, Human
caaaaaaaguuguaugau

SEQ ID NO: 1947886 - RNA, 21 nt, Human
caaaaaaaguuguaugaucug

SEQ ID NO: 1947887 - RNA, 17 nt, Human
auuuuuuuuuccuucag

SEQ ID NO: 1947888 - RNA, 19 nt, Human
auuuuuaaaugcaguuaca

SEQ ID NO: 1947889 - RNA, 20 nt, Human
auuuuuaaaugcaguuacaa

SEQ ID NO: 1947890 - RNA, 11 nt, Human
auuuuuaaaug

SEQ ID NO: 1947891 - RNA, 13 nt, Human
auuuguuugaacu

SEQ ID NO: 1947892 - RNA, 20 nt, Human
auuuuauaaggacuuccuga

SEQ ID NO: 1947893 - RNA, 15 nt, Human
auuuuauaaauguau

SEQ ID NO: 1947894 - RNA, 18 nt, Human
auuuuauaaggacuuccu

SEQ ID NO: 1947895 - RNA, 20 nt, Human
auuuguuugaacugauaaag

SEQ ID NO: 1947896 - RNA, 18 nt, Human
auuuguuucuuucucuga

SEQ ID NO: 1947897 - RNA, 20 nt, Human
auuuguuucuuucucugagg

SEQ ID NO: 1947898 - RNA, 14 nt, Human
auuuguuugaacug

SEQ ID NO: 1947899 - RNA, 16 nt, Human
auuuguuugaacugau

SEQ ID NO: 1947900 - RNA, 18 nt, Human
auuuugauccaagcuggu

SEQ ID NO: 1947901 - RNA, 14 nt, Human
auuuugauaguggg

SEQ ID NO: 1947902 - RNA, 14 nt, Human
auuccaaacauggu

SEQ ID NO: 1947903 - RNA, 16 nt, Human
auucauuuucucuuua

SEQ ID NO: 1947904 - RNA, 15 nt, Human
auucauuuucucuuu

SEQ ID NO: 1947905 - RNA, 19 nt, Human
auucauauuuacuucuuau

SEQ ID NO: 1947906 - RNA, 18 nt, Human
auucauauuuacuucuua

SEQ ID NO: 1947907 - RNA, 22 nt, Human
auucauauuuguacuuucuguu

SEQ ID NO: 1947908 - RNA, 23 nt, Human
auucauauuuguacuuucuguua

SEQ ID NO: 1947909 - RNA, 15 nt, Human
auucauauuuguacu

SEQ ID NO: 1947910 - RNA, 17 nt, Human
auucauauuuguacuuu

SEQ ID NO: 1947911 - RNA, 19 nt, Human
auucauauuuguacuuucu

SEQ ID NO: 1947912 - RNA, 21 nt, Human
auucauauuuguacuuucugu

SEQ ID NO: 1947913 - RNA, 20 nt, Human
auucauauuuacuucuuaua

SEQ ID NO: 1947914 - RNA, 12 nt, Human
auucauauuugu

SEQ ID NO: 1947915 - RNA, 13 nt, Human
auucauauuugua

SEQ ID NO: 1947916 - RNA, 15 nt, Human
auuauguguguuuua

SEQ ID NO: 1947917 - RNA, 21 nt, Human
auuauguguguuuuaaaauga

SEQ ID NO: 1947918 - RNA, 20 nt, Human
auuauguguguuuuaaaaug

SEQ ID NO: 1947919 - RNA, 20 nt, Human
auuaaauucuugcaaaguau

SEQ ID NO: 1947920 - RNA, 14 nt, Human
auuaaauucuugca

SEQ ID NO: 1947921 - RNA, 18 nt, Human
auuaaauucuugcaaagu

SEQ ID NO: 1947922 - RNA, 18 nt, Human
auucacaagacccaaaag

SEQ ID NO: 1947923 - RNA, 12 nt, Human
auucaagaacau

SEQ ID NO: 1947924 - RNA, 16 nt, Human
auucaacuuuccaaau

SEQ ID NO: 1947925 - RNA, 21 nt, Human
auucaacuuuccaaauaaaag

SEQ ID NO: 1947926 - RNA, 22 nt, Human
auugagccuaaaaauaaagcac

SEQ ID NO: 1947927 - RNA, 17 nt, Human
auugauccagaaagaaa

SEQ ID NO: 1947928 - RNA, 16 nt, Human
auugauccagaaagaa

SEQ ID NO: 1947929 - RNA, 17 nt, Human
auugagagagaugugua

SEQ ID NO: 1947930 - RNA, 19 nt, Human
auugagagagauguguaau

SEQ ID NO: 1947931 - RNA, 21 nt, Human
auugagaccgugaagauacuu

SEQ ID NO: 1947932 - RNA, 22 nt, Human
auugagaccgugaagauacuuu

SEQ ID NO: 1947933 - RNA, 23 nt, Human
auugagaccgugaagauacuuug

SEQ ID NO: 1947934 - RNA, 17 nt, Human
auugagaccgugaagau

SEQ ID NO: 1947935 - RNA, 20 nt, Human
auugagaccgugaagauacu

SEQ ID NO: 1947936 - RNA, 17 nt, Human
auugagccuaaaaauaa

SEQ ID NO: 1947937 - RNA, 21 nt, Human
auugagccuaaaaauaaagca

SEQ ID NO: 1947938 - RNA, 15 nt, Human
auugagccuaaaaau

SEQ ID NO: 1947939 - RNA, 20 nt, Human
auugagagagauguguaauu

SEQ ID NO: 1947940 - RNA, 21 nt, Human
auugagagagauguguaauuu

SEQ ID NO: 1947941 - RNA, 19 nt, Human
auucuuugaccuguuggga

SEQ ID NO: 1947942 - RNA, 14 nt, Human
auucuuucuccuuu

SEQ ID NO: 1947943 - RNA, 22 nt, Human
auucuuuccugaggcugggcuc

SEQ ID NO: 1947944 - RNA, 17 nt, Human
auucuuuccugaggcug

SEQ ID NO: 1947945 - RNA, 22 nt, Human
auuccugacgagauaagcaguu

SEQ ID NO: 1947946 - RNA, 13 nt, Human
auuccugaacagg

SEQ ID NO: 1947947 - RNA, 21 nt, Human
auuccugaugcuucuucagag

SEQ ID NO: 1947948 - RNA, 19 nt, Human
auucucuccuguaccucuu

SEQ ID NO: 1947949 - RNA, 21 nt, Human
auucucuccuguaccucuuga

SEQ ID NO: 1947950 - RNA, 16 nt, Human
auucucuccuguaccu

SEQ ID NO: 1947951 - RNA, 13 nt, Human
auucugagagcug

SEQ ID NO: 1947952 - RNA, 14 nt, Human
auucugagagcugu

SEQ ID NO: 1947953 - RNA, 18 nt, Human
auucugaccuuaaaugca

SEQ ID NO: 1947954 - RNA, 17 nt, Human
auucuugccaaauauaa

SEQ ID NO: 1947955 - RNA, 18 nt, Human
auucugaggcccugccca

SEQ ID NO: 1947956 - RNA, 15 nt, Human
auucugaggcccugc

SEQ ID NO: 1947957 - RNA, 17 nt, Human
auucugaggcccugccc

SEQ ID NO: 1947958 - RNA, 18 nt, Human
auuguaagcguauggcuu

SEQ ID NO: 1947959 - RNA, 19 nt, Human
auuguaagcguauggcuuu

SEQ ID NO: 1947960 - RNA, 16 nt, Human
auuguuccagagacaa

SEQ ID NO: 1947961 - RNA, 19 nt, Human
auuguucuuaguuugcagu

SEQ ID NO: 1947962 - RNA, 14 nt, Human
auuguucuuuucaa

SEQ ID NO: 1947963 - RNA, 13 nt, Human
auuguuuagauuu

SEQ ID NO: 1947964 - RNA, 16 nt, Human
auuguuuagauuuugu

SEQ ID NO: 1947965 - RNA, 16 nt, Human
auuguuuaucuagaug

SEQ ID NO: 1947966 - RNA, 17 nt, Human
auuguuuaucuagaugu

SEQ ID NO: 1947967 - RNA, 19 nt, Human
auuguuuaucuagauguaa

SEQ ID NO: 1947968 - RNA, 20 nt, Human
auuguuuaucuagauguaaa

SEQ ID NO: 1947969 - RNA, 21 nt, Human
auuguuuaucuagauguaaau

SEQ ID NO: 1947970 - RNA, 22 nt, Human
auuguuuaucuagauguaaauu

SEQ ID NO: 1947971 - RNA, 13 nt, Human
auuguaaaagcau

SEQ ID NO: 1947972 - RNA, 18 nt, Human
auugaugggauuugguca

SEQ ID NO: 1947973 - RNA, 13 nt, Human
auuguaaaauggu

SEQ ID NO: 1947974 - RNA, 19 nt, Human
auuguaaaagcauuuugua

SEQ ID NO: 1947975 - RNA, 20 nt, Human
auuguaaaagcauuuuguaa

SEQ ID NO: 1947976 - RNA, 21 nt, Human
auuguaaaagcauuuuguaau

SEQ ID NO: 1947977 - RNA, 23 nt, Human
auuguaaaagcauuuuguaauaa

SEQ ID NO: 1947978 - RNA, 22 nt, Human
auugauccagaaagaaaacuug

SEQ ID NO: 1947979 - RNA, 19 nt, Human
auugauccagaaagaaaac

SEQ ID NO: 1947980 - RNA, 18 nt, Human
auugauccagaaagaaaa

SEQ ID NO: 1947981 - RNA, 15 nt, Human
auuguaaggaaugau

SEQ ID NO: 1947982 - RNA, 17 nt, Human
auuguaagcguauggcu

SEQ ID NO: 1947983 - RNA, 18 nt, Human
auuguaagcaugcacaaa

SEQ ID NO: 1947984 - RNA, 16 nt, Human
auuguaaggaaugauu

SEQ ID NO: 1947985 - RNA, 15 nt, Human
auuucucauguugaa

SEQ ID NO: 1947986 - RNA, 12 nt, Human
auuucuguuuag

SEQ ID NO: 1947987 - RNA, 20 nt, Human
auuucuccugcguguucuca

SEQ ID NO: 1947988 - RNA, 10 nt, Human
auuucuccuu

SEQ ID NO: 1947989 - RNA, 11 nt, Human
auuucuccuuu

SEQ ID NO: 1947990 - RNA, 14 nt, Human
auuucuguuuagau

SEQ ID NO: 1947991 - RNA, 16 nt, Human
auuucuguuuagauaa

SEQ ID NO: 1947992 - RNA, 13 nt, Human
auuucuguucagc

SEQ ID NO: 1947993 - RNA, 17 nt, Human
auuuaauggggaggaca

SEQ ID NO: 1947994 - RNA, 12 nt, Human
auuuaauguuga

SEQ ID NO: 1947995 - RNA, 14 nt, Human
auuuaauguugaac

SEQ ID NO: 1947996 - RNA, 15 nt, Human
auuuaauguugaaca

SEQ ID NO: 1947997 - RNA, 19 nt, Human
auuuaauguugaacaaaau

SEQ ID NO: 1947998 - RNA, 14 nt, Human
auuuaaugaaagac

SEQ ID NO: 1947999 - RNA, 15 nt, Human
auuuauauuuauuga

SEQ ID NO: 1948000 - RNA, 16 nt, Human
auuuauauuuauugac

SEQ ID NO: 1948001 - RNA, 20 nt, Human
auuuauauuuauugacucuu

SEQ ID NO: 1948002 - RNA, 22 nt, Human
auuuauauuuauugacucuuga

SEQ ID NO: 1948003 - RNA, 21 nt, Human
auuucaagcuuauuuuggaga

SEQ ID NO: 1948004 - RNA, 22 nt, Human
auuucaagcuuauuuuggagag

SEQ ID NO: 1948005 - RNA, 12 nt, Human
auuucaagcuua

SEQ ID NO: 1948006 - RNA, 14 nt, Human
auuucaagcuuauu

SEQ ID NO: 1948007 - RNA, 19 nt, Human
auuucagagagaaucaaga

SEQ ID NO: 1948008 - RNA, 22 nt, Human
auuucaaucccacguacuuaua

SEQ ID NO: 1948009 - RNA, 17 nt, Human
auuucaaguacacugaa

SEQ ID NO: 1948010 - RNA, 19 nt, Human
auuucauccuuucacuucu

SEQ ID NO: 1948011 - RNA, 20 nt, Human
auuucauccuuucacuucuu

SEQ ID NO: 1948012 - RNA, 22 nt, Human
auuucauccuuucacuucuuuc

SEQ ID NO: 1948013 - RNA, 17 nt, Human
auuucaucagaacagcu

SEQ ID NO: 1948014 - RNA, 19 nt, Human
auuucaucagaacagcugu

SEQ ID NO: 1948015 - RNA, 18 nt, Human
auuucaucauauuauaca

SEQ ID NO: 1948016 - RNA, 20 nt, Human
auuucaucauauuauacaga

SEQ ID NO: 1948017 - RNA, 14 nt, Human
auuucauccagaag

SEQ ID NO: 1948018 - RNA, 24 nt, Human
cugcccugugaguacuacaguccu

SEQ ID NO: 1948019 - RNA, 21 nt, Human
cugcccugguuuccugcccug

SEQ ID NO: 1948020 - RNA, 23 nt, Human
cugcccuggugcugccacacuuc

SEQ ID NO: 1948021 - RNA, 17 nt, Human
cugcccugguuuccugc

SEQ ID NO: 1948022 - RNA, 18 nt, Human
cugcccugguuuccugcc

SEQ ID NO: 1948023 - RNA, 19 nt, Human
cugcccugguuuccugccc

SEQ ID NO: 1948024 - RNA, 12 nt, Human
cugcccuggugc

SEQ ID NO: 1948025 - RNA, 13 nt, Human
cugcccuggugcu

SEQ ID NO: 1948026 - RNA, 14 nt, Human
cugcccuggugcug

SEQ ID NO: 1948027 - RNA, 15 nt, Human
cugcccuggugcugc

SEQ ID NO: 1948028 - RNA, 23 nt, Human
cugcccuuaccugccaggaagcc

SEQ ID NO: 1948029 - RNA, 22 nt, Human
cugcccuuaccugccaggaagc

SEQ ID NO: 1948030 - RNA, 19 nt, Human
cugcccuuaccugccagga

SEQ ID NO: 1948031 - RNA, 20 nt, Human
cugcccugguuuccugcccu

SEQ ID NO: 1948032 - RNA, 12 nt, Human
cugcccuguggg

SEQ ID NO: 1948033 - RNA, 11 nt, Human
cugcccugugg

SEQ ID NO: 1948034 - RNA, 20 nt, Human
cugcugagacugcugaguga

SEQ ID NO: 1948035 - RNA, 18 nt, Human
cugcugagccgcagagaa

SEQ ID NO: 1948036 - RNA, 13 nt, Human
cugcugagccgca

SEQ ID NO: 1948037 - RNA, 14 nt, Human
cugcugagccgcag

SEQ ID NO: 1948038 - RNA, 15 nt, Human
cugcugagccgcaga

SEQ ID NO: 1948039 - RNA, 15 nt, Human
cugcuacugccaacc

SEQ ID NO: 1948040 - RNA, 17 nt, Human
cugcuacugccaaccuc

SEQ ID NO: 1948041 - RNA, 12 nt, Human
cugcuacugcca

SEQ ID NO: 1948042 - RNA, 20 nt, Human
cugccuguucagcuccagcu

SEQ ID NO: 1948043 - RNA, 23 nt, Human
cugccuguucagcuccagcucac

SEQ ID NO: 1948044 - RNA, 15 nt, Human
cugccuguucccauu

SEQ ID NO: 1948045 - RNA, 19 nt, Human
cugccuguucccauucuug

SEQ ID NO: 1948046 - RNA, 18 nt, Human
cugcugaaggcucgagca

SEQ ID NO: 1948047 - RNA, 23 nt, Human
cugcugaaggcucgagcaugccu

SEQ ID NO: 1948048 - RNA, 24 nt, Human
cugcugaaggcucgagcaugccug

SEQ ID NO: 1948049 - RNA, 17 nt, Human
cugcuaucaaagagguu

SEQ ID NO: 1948050 - RNA, 19 nt, Human
cugcuauuuuccuguucua

SEQ ID NO: 1948051 - RNA, 20 nt, Human
cugccucggauccccuuccu

SEQ ID NO: 1948052 - RNA, 19 nt, Human
cugccucgaacuggcugca

SEQ ID NO: 1948053 - RNA, 20 nt, Human
cugccucgaacuggcugcaa

SEQ ID NO: 1948054 - RNA, 21 nt, Human
cugccuccuuugugaggaagc

SEQ ID NO: 1948055 - RNA, 17 nt, Human
cugccuccuuugugagg

SEQ ID NO: 1948056 - RNA, 23 nt, Human
cugccuccuuugugaggaagccg

SEQ ID NO: 1948057 - RNA, 14 nt, Human
cugccucgaacugg

SEQ ID NO: 1948058 - RNA, 14 nt, Human
cugccuccuuugug

SEQ ID NO: 1948059 - RNA, 19 nt, Human
cugccuccuugauauuugu

SEQ ID NO: 1948060 - RNA, 15 nt, Human
cuggcagcaccgccu

SEQ ID NO: 1948061 - RNA, 22 nt, Human
cuggcagaguugaagacagagc

SEQ ID NO: 1948062 - RNA, 23 nt, Human
cuggcagccccuguucuggcaga

SEQ ID NO: 1948063 - RNA, 13 nt, Human
cuggcagccgugc

SEQ ID NO: 1948064 - RNA, 19 nt, Human
cuggcagcaccgccucuuc

SEQ ID NO: 1948065 - RNA, 20 nt, Human
cuggcagcaccgccucuucc

SEQ ID NO: 1948066 - RNA, 13 nt, Human
cuggcagcccgca

SEQ ID NO: 1948067 - RNA, 18 nt, Human
cuggcagcccgcaucagc

SEQ ID NO: 1948068 - RNA, 21 nt, Human
cuggcagaguugaagacagag

SEQ ID NO: 1948069 - RNA, 20 nt, Human
cuggcagaguugaagacaga

SEQ ID NO: 1948070 - RNA, 15 nt, Human
cuggcucuuccaggc

SEQ ID NO: 1948071 - RNA, 14 nt, Human
cuggcucuuccagg

SEQ ID NO: 1948072 - RNA, 13 nt, Human
cuggcucuuccag

SEQ ID NO: 1948073 - RNA, 21 nt, Human
cuggcucccucacucucagga

SEQ ID NO: 1948074 - RNA, 18 nt, Human
cuggcucccucacucuca

SEQ ID NO: 1948075 - RNA, 20 nt, Human
cuggcucccucacucucagg

SEQ ID NO: 1948076 - RNA, 17 nt, Human
cugggacuacaggcacc

SEQ ID NO: 1948077 - RNA, 21 nt, Human
cugggacuacaggcacccacc

SEQ ID NO: 1948078 - RNA, 17 nt, Human
cugggacuacaggugug

SEQ ID NO: 1948079 - RNA, 19 nt, Human
cuggcagcucagagagggu

SEQ ID NO: 1948080 - RNA, 17 nt, Human
cuggcagcucagagagg

SEQ ID NO: 1948081 - RNA, 16 nt, Human
cuggcagcucagagag

SEQ ID NO: 1948082 - RNA, 17 nt, Human
cuggcagccgugccuuc

SEQ ID NO: 1948083 - RNA, 18 nt, Human
cuggcagccgugccuuca

SEQ ID NO: 1948084 - RNA, 23 nt, Human
cuggcccuaugcuuccggccucc

SEQ ID NO: 1948085 - RNA, 19 nt, Human
cuggcagcccgcaucagcu

SEQ ID NO: 1948086 - RNA, 15 nt, Human
cuggcccucucugaa

SEQ ID NO: 1948087 - RNA, 16 nt, Human
cuggcccucucugaag

SEQ ID NO: 1948088 - RNA, 22 nt, Human
cuggcucccacaggcccuuccu

SEQ ID NO: 1948089 - RNA, 13 nt, Human
cuggcucccucac

SEQ ID NO: 1948090 - RNA, 14 nt, Human
cuggcucccucacu

SEQ ID NO: 1948091 - RNA, 19 nt, Human
cuggcucccacaggcccuu

SEQ ID NO: 1948092 - RNA, 18 nt, Human
cuggcucccacaggcccu

SEQ ID NO: 1948093 - RNA, 15 nt, Human
cuggaugcagccuca

SEQ ID NO: 1948094 - RNA, 18 nt, Human
cuggaugcagccucacag

SEQ ID NO: 1948095 - RNA, 17 nt, Human
cuggaugcagccucaca

SEQ ID NO: 1948096 - RNA, 16 nt, Human
cuggaugcagccucac

SEQ ID NO: 1948097 - RNA, 19 nt, Human
cuggauccaucaggccacu

SEQ ID NO: 1948098 - RNA, 20 nt, Human
cuggaucuccauucucucag

SEQ ID NO: 1948099 - RNA, 20 nt, Human
cugcuucaaggauccugagc

SEQ ID NO: 1948100 - RNA, 19 nt, Human
cugcuucaaggauccugag

SEQ ID NO: 1948101 - RNA, 16 nt, Human
cugcuucaaggauccu

SEQ ID NO: 1948102 - RNA, 14 nt, Human
cugcuucaaggauc

SEQ ID NO: 1948103 - RNA, 14 nt, Human
cugcuuccagugag

SEQ ID NO: 1948104 - RNA, 23 nt, Human
cugcuucagccucccgaguagcu

SEQ ID NO: 1948105 - RNA, 16 nt, Human
cuggaaaccugucuga

SEQ ID NO: 1948106 - RNA, 21 nt, Human
cuggagaaaauggacguguua

SEQ ID NO: 1948107 - RNA, 22 nt, Human
cuggacuccucuguccaggcac

SEQ ID NO: 1948108 - RNA, 23 nt, Human
cuggacuccucuguccaggcacu

SEQ ID NO: 1948109 - RNA, 23 nt, Human
cuggacucuaaagucuguugauu

SEQ ID NO: 1948110 - RNA, 20 nt, Human
cuggacuccucuguccaggc

SEQ ID NO: 1948111 - RNA, 14 nt, Human
cuggagaacuagag

SEQ ID NO: 1948112 - RNA, 15 nt, Human
cuggagaacuagaga

SEQ ID NO: 1948113 - RNA, 17 nt, Human
cuggauccaucaggcca

SEQ ID NO: 1948114 - RNA, 23 nt, Human
cuggaaauacuagauuugggaga

SEQ ID NO: 1948115 - RNA, 15 nt, Human
cugucguuaaaaaca

SEQ ID NO: 1948116 - RNA, 22 nt, Human
cugucuaaugaaaccugugucu

SEQ ID NO: 1948117 - RNA, 19 nt, Human
cugucauugcuucuucuga

SEQ ID NO: 1948118 - RNA, 14 nt, Human
cugucauuugagca

SEQ ID NO: 1948119 - RNA, 13 nt, Human
cuguccugggagu

SEQ ID NO: 1948120 - RNA, 14 nt, Human
cuguccugggagug

SEQ ID NO: 1948121 - RNA, 20 nt, Human
cuguccugggagugagcugg

SEQ ID NO: 1948122 - RNA, 14 nt, Human
cugucauugcuucu

SEQ ID NO: 1948123 - RNA, 16 nt, Human
cugucauugcuucuuc

SEQ ID NO: 1948124 - RNA, 18 nt, Human
cugucauugcuucuucug

SEQ ID NO: 1948125 - RNA, 20 nt, Human
cugucagggcaguacaaugu

SEQ ID NO: 1948126 - RNA, 18 nt, Human
cuguaggaagguuaaugu

SEQ ID NO: 1948127 - RNA, 12 nt, Human
cugucaggaggc

SEQ ID NO: 1948128 - RNA, 15 nt, Human
cugucaggaggcaga

SEQ ID NO: 1948129 - RNA, 15 nt, Human
cuguagagugggagc

SEQ ID NO: 1948130 - RNA, 16 nt, Human
cuguagauaauuaacc

SEQ ID NO: 1948131 - RNA, 17 nt, Human
cuguagauaauuaacca

SEQ ID NO: 1948132 - RNA, 20 nt, Human
cuguacuugcucuugaugcc

SEQ ID NO: 1948133 - RNA, 19 nt, Human
cuguacuugcucuugaugc

SEQ ID NO: 1948134 - RNA, 16 nt, Human
cuguacuugcucuuga

SEQ ID NO: 1948135 - RNA, 21 nt, Human
cuggucucgaacuccugaccu

SEQ ID NO: 1948136 - RNA, 18 nt, Human
cuggucuuauuuguaaag

SEQ ID NO: 1948137 - RNA, 22 nt, Human
cuggugaccuuccaagagccug

SEQ ID NO: 1948138 - RNA, 23 nt, Human
cuggugaccuuccaagagccuga

SEQ ID NO: 1948139 - RNA, 12 nt, Human
cuguuggccagu

SEQ ID NO: 1948140 - RNA, 14 nt, Human
cuguugcugauuuu

SEQ ID NO: 1948141 - RNA, 15 nt, Human
cuguugcugauuuua

SEQ ID NO: 1948142 - RNA, 16 nt, Human
cuguugcugauuuuau

SEQ ID NO: 1948143 - RNA, 21 nt, Human
cuguugcugauuuuauucuug

SEQ ID NO: 1948144 - RNA, 22 nt, Human
cuguugcugauuuuauucuuga

SEQ ID NO: 1948145 - RNA, 15 nt, Human
cuguuggccagugug

SEQ ID NO: 1948146 - RNA, 14 nt, Human
cuguugucucuucu

SEQ ID NO: 1948147 - RNA, 15 nt, Human
cuguugucucuucuc

SEQ ID NO: 1948148 - RNA, 17 nt, Human
cuguugucucuucuccu

SEQ ID NO: 1948149 - RNA, 18 nt, Human
cuguugucucuucuccuu

SEQ ID NO: 1948150 - RNA, 13 nt, Human
cuuaaauaaugug

SEQ ID NO: 1948151 - RNA, 14 nt, Human
cuuaaauaauguga

SEQ ID NO: 1948152 - RNA, 16 nt, Human
cuuaaauaaugugaaa

SEQ ID NO: 1948153 - RNA, 19 nt, Human
cuuaaauaaugugaaacug

SEQ ID NO: 1948154 - RNA, 13 nt, Human
cuuaaaaaugguu

SEQ ID NO: 1948155 - RNA, 20 nt, Human
cuuaaaaaugguuuaaaugg

SEQ ID NO: 1948156 - RNA, 12 nt, Human
cuuaaaaauggu

SEQ ID NO: 1948157 - RNA, 18 nt, Human
cuuaaaagaggaaaauga

SEQ ID NO: 1948158 - RNA, 23 nt, Human
cuuaaaauaaaacacuguuuccc

SEQ ID NO: 1948159 - RNA, 13 nt, Human
cugugaacugaac

SEQ ID NO: 1948160 - RNA, 15 nt, Human
cugugaacugaacuc

SEQ ID NO: 1948161 - RNA, 16 nt, Human
cugugaacugaacucu

SEQ ID NO: 1948162 - RNA, 17 nt, Human
cugugaauccagugaaa

SEQ ID NO: 1948163 - RNA, 23 nt, Human
cugugagaugcuagaacucccuu

SEQ ID NO: 1948164 - RNA, 17 nt, Human
cugugcucuggacaggc

SEQ ID NO: 1948165 - RNA, 15 nt, Human
cugugcucuggacag

SEQ ID NO: 1948166 - RNA, 18 nt, Human
cuguucagcugguugagg

SEQ ID NO: 1948167 - RNA, 12 nt, Human
cuguucagcugg

SEQ ID NO: 1948168 - RNA, 16 nt, Human
cuguucagcuccagcu

SEQ ID NO: 1948169 - RNA, 18 nt, Human
cuguucagcuccagcuca

SEQ ID NO: 1948170 - RNA, 19 nt, Human
cuguucagcuccagcucac

SEQ ID NO: 1948171 - RNA, 22 nt, Human
cuguucagcuccagcucaccag

SEQ ID NO: 1948172 - RNA, 15 nt, Human
cuguucagcuccagc

SEQ ID NO: 1948173 - RNA, 13 nt, Human
cuguucacucuac

SEQ ID NO: 1948174 - RNA, 19 nt, Human
cuguuaucccugccugguc

SEQ ID NO: 1948175 - RNA, 19 nt, Human
cuguuaucauuuuuuccug

SEQ ID NO: 1948176 - RNA, 20 nt, Human
cuguuaucauuuuuuccugu

SEQ ID NO: 1948177 - RNA, 21 nt, Human
cuguuaucauuuuuuccuguu

SEQ ID NO: 1948178 - RNA, 18 nt, Human
cuguuauagguccuuuag

SEQ ID NO: 1948179 - RNA, 21 nt, Human
cuguuauagguccuuuagaaa

SEQ ID NO: 1948180 - RNA, 17 nt, Human
cuguuacugucuucagu

SEQ ID NO: 1948181 - RNA, 19 nt, Human
cugugucaguuuauguuuu

SEQ ID NO: 1948182 - RNA, 20 nt, Human
cugugucaguuuauguuuug

SEQ ID NO: 1948183 - RNA, 22 nt, Human
cugugucagguggggcagcuug

SEQ ID NO: 1948184 - RNA, 15 nt, Human
cugugucaguuuaug

SEQ ID NO: 1948185 - RNA, 16 nt, Human
cugugucaguuuaugu

SEQ ID NO: 1948186 - RNA, 12 nt, Human
cuguguauauuu

SEQ ID NO: 1948187 - RNA, 15 nt, Human
cuguguauauuugau

SEQ ID NO: 1948188 - RNA, 16 nt, Human
cuguguauauuugauu

SEQ ID NO: 1948189 - RNA, 18 nt, Human
cuguguauauuugauuua

SEQ ID NO: 1948190 - RNA, 20 nt, Human
cuguguauauuugauuuauu

SEQ ID NO: 1948191 - RNA, 22 nt, Human
cuguguauauuugauuuauuaa

SEQ ID NO: 1948192 - RNA, 18 nt, Human
cugugcucuggacaggca

SEQ ID NO: 1948193 - RNA, 19 nt, Human
cugugcucuggacaggcau

SEQ ID NO: 1948194 - RNA, 22 nt, Human
cuuuuauuccugcccugcuguu

SEQ ID NO: 1948195 - RNA, 19 nt, Human
cuuuuaugugaaacauguu

SEQ ID NO: 1948196 - RNA, 18 nt, Human
cuuuuaugugaaacaugu

SEQ ID NO: 1948197 - RNA, 14 nt, Human
gaaaauuuuaaaaa

SEQ ID NO: 1948198 - RNA, 18 nt, Human
gaaaauuuugauguuuua

SEQ ID NO: 1948199 - RNA, 23 nt, Human
gaaacaaacaaaagcugaacaca

SEQ ID NO: 1948200 - RNA, 13 nt, Human
gaaaagagacagg

SEQ ID NO: 1948201 - RNA, 17 nt, Human
gaaaagagacaggcagg

SEQ ID NO: 1948202 - RNA, 19 nt, Human
gaaaacugcaacuuguaaa

SEQ ID NO: 1948203 - RNA, 13 nt, Human
gaaaacucuauuu

SEQ ID NO: 1948204 - RNA, 17 nt, Human
gaaaagcagcucucccc

SEQ ID NO: 1948205 - RNA, 14 nt, Human
gaaaagcagcucuc

SEQ ID NO: 1948206 - RNA, 18 nt, Human
gaaaagagacaggcaggu

SEQ ID NO: 1948207 - RNA, 18 nt, Human
gaaaagcggacaucagcu

SEQ ID NO: 1948208 - RNA, 18 nt, Human
gaaaauuaggauuucaug

SEQ ID NO: 1948209 - RNA, 22 nt, Human
gaaaauuaggauuucaugauuu

SEQ ID NO: 1948210 - RNA, 20 nt, Human
gaaaagcggacaucagcugg

SEQ ID NO: 1948211 - RNA, 14 nt, Human
gaaaauuaacauga

SEQ ID NO: 1948212 - RNA, 14 nt, Human
cuuuugcuuuaauu

SEQ ID NO: 1948213 - RNA, 18 nt, Human
cuuuugcuuuaauuccau

SEQ ID NO: 1948214 - RNA, 22 nt, Human
cuuuugcucgaugcagacaggg

SEQ ID NO: 1948215 - RNA, 18 nt, Human
cuuuugccguuauuaaaa

SEQ ID NO: 1948216 - RNA, 15 nt, Human
cuuuuggucugugug

SEQ ID NO: 1948217 - RNA, 16 nt, Human
cuuuuggucuguguga

SEQ ID NO: 1948218 - RNA, 14 nt, Human
cuuuugucccagaa

SEQ ID NO: 1948219 - RNA, 17 nt, Human
cuuuugucuaugggacu

SEQ ID NO: 1948220 - RNA, 19 nt, Human
cuuuuguagaagucacauu

SEQ ID NO: 1948221 - RNA, 21 nt, Human
cuuuuuuuuuuuuuuugacaa

SEQ ID NO: 1948222 - RNA, 17 nt, Human
gaaaaaaaaaaagaaag

SEQ ID NO: 1948223 - RNA, 18 nt, Human
gaaaaaaaaaaugcugaa

SEQ ID NO: 1948224 - RNA, 19 nt, Human
gaaaaaaaaaaugcugaac

SEQ ID NO: 1948225 - RNA, 20 nt, Human
gaaaaaaaaaaugcugaaca

SEQ ID NO: 1948226 - RNA, 19 nt, Human
gaaaaaaaaaaagaaagaa

SEQ ID NO: 1948227 - RNA, 12 nt, Human
gaaaaaaaaaga

SEQ ID NO: 1948228 - RNA, 13 nt, Human
gaaaaaaaaagaa

SEQ ID NO: 1948229 - RNA, 19 nt, Human
gaaaaaauauuuuccugcc

SEQ ID NO: 1948230 - RNA, 14 nt, Human
gaaaaaauauauau

SEQ ID NO: 1948231 - RNA, 15 nt, Human
gaaaaaaaaagaaaa

SEQ ID NO: 1948232 - RNA, 16 nt, Human
gaaaaaaaaagaaaaa

SEQ ID NO: 1948233 - RNA, 17 nt, Human
gaaaaaaaaagaaaaaa

SEQ ID NO: 1948234 - RNA, 18 nt, Human
gaaaaaaaaagaaaaaag

SEQ ID NO: 1948235 - RNA, 14 nt, Human
cuuuuguguuccaa

SEQ ID NO: 1948236 - RNA, 14 nt, Human
cuuuugugcauuau

SEQ ID NO: 1948237 - RNA, 18 nt, Human
cuuuugugcauuaucuag

SEQ ID NO: 1948238 - RNA, 22 nt, Human
cuuuuuuuugacagcuuccugu

SEQ ID NO: 1948239 - RNA, 23 nt, Human
cuuuuuuuugacagcuuccuguc

SEQ ID NO: 1948240 - RNA, 13 nt, Human
cuuuuuuugaaac

SEQ ID NO: 1948241 - RNA, 18 nt, Human
cuuuuguuacucuuggga

SEQ ID NO: 1948242 - RNA, 20 nt, Human
cuuuuguuacucuugggaca

SEQ ID NO: 1948243 - RNA, 21 nt, Human
gaacaaggcaaggcugucaau

SEQ ID NO: 1948244 - RNA, 22 nt, Human
gaacaagucccuguaauuguug

SEQ ID NO: 1948245 - RNA, 18 nt, Human
gaacaaggcaaggcuguc

SEQ ID NO: 1948246 - RNA, 17 nt, Human
gaacaaggcaaggcugu

SEQ ID NO: 1948247 - RNA, 15 nt, Human
gaacaaggcaaggcu

SEQ ID NO: 1948248 - RNA, 14 nt, Human
gaacaaggcaaggc

SEQ ID NO: 1948249 - RNA, 22 nt, Human
gaaacuguucccaccugcugga

SEQ ID NO: 1948250 - RNA, 21 nt, Human
gaaacuguucccaccugcugg

SEQ ID NO: 1948251 - RNA, 20 nt, Human
gaaacuguucccaccugcug

SEQ ID NO: 1948252 - RNA, 22 nt, Human
gaaacugucuagcacuuccuug

SEQ ID NO: 1948253 - RNA, 11 nt, Human
gaaacuuggau

SEQ ID NO: 1948254 - RNA, 16 nt, Human
gaaagaacuaucuuca

SEQ ID NO: 1948255 - RNA, 16 nt, Human
gaaacuuguucuucca

SEQ ID NO: 1948256 - RNA, 22 nt, Human
gaaacuuguucuuccaaagcag

SEQ ID NO: 1948257 - RNA, 17 nt, Human
gaaagaacuaucuucau

SEQ ID NO: 1948258 - RNA, 20 nt, Human
gaaagaacuaucuucaucug

SEQ ID NO: 1948259 - RNA, 21 nt, Human
gaaagaacuaucuucaucuga

SEQ ID NO: 1948260 - RNA, 15 nt, Human
gaaagaauguaaagc

SEQ ID NO: 1948261 - RNA, 14 nt, Human
gaaagaauguaaag

SEQ ID NO: 1948262 - RNA, 18 nt, Human
gaaagaaguggggacaga

SEQ ID NO: 1948263 - RNA, 18 nt, Human
gaaagacuaucuaaaugu

SEQ ID NO: 1948264 - RNA, 18 nt, Human
gaaaggcuccaggagcag

SEQ ID NO: 1948265 - RNA, 17 nt, Human
gaaaggcuccaggagca

SEQ ID NO: 1948266 - RNA, 19 nt, Human
gaaaggcuccaggagcagc

SEQ ID NO: 1948267 - RNA, 19 nt, Human
gaaaguaaauaaaaggacu

SEQ ID NO: 1948268 - RNA, 13 nt, Human
gaaaguacauuuu

SEQ ID NO: 1948269 - RNA, 20 nt, Human
gaaaguacauuuuuugaaau

SEQ ID NO: 1948270 - RNA, 22 nt, Human
gaaaguacuucuccacccugcu

SEQ ID NO: 1948271 - RNA, 13 nt, Human
gaaauauuuuaau

SEQ ID NO: 1948272 - RNA, 21 nt, Human
gaaaguacuucuccacccugc

SEQ ID NO: 1948273 - RNA, 22 nt, Human
gaaauauuuuaauuuuuaaaug

SEQ ID NO: 1948274 - RNA, 23 nt, Human
gaaauauuuuaauuuuuaaaugc

SEQ ID NO: 1948275 - RNA, 12 nt, Human
gaaaucaaagug

SEQ ID NO: 1948276 - RNA, 14 nt, Human
gaaaucaaagugcu

SEQ ID NO: 1948277 - RNA, 16 nt, Human
gaaaucaaagugcuau

SEQ ID NO: 1948278 - RNA, 18 nt, Human
gaaaugaaagcagggacu

SEQ ID NO: 1948279 - RNA, 14 nt, Human
gaaaugaacacaaa

SEQ ID NO: 1948280 - RNA, 15 nt, Human
gaaaugaacacaaau

SEQ ID NO: 1948281 - RNA, 18 nt, Human
gaaauuuuuauuaaauua

SEQ ID NO: 1948282 - RNA, 17 nt, Human
gaaaugaacacaaauua

SEQ ID NO: 1948283 - RNA, 13 nt, Human
gaaaugaagagcu

SEQ ID NO: 1948284 - RNA, 18 nt, Human
gaaaugaagagcuguuga

SEQ ID NO: 1948285 - RNA, 17 nt, Human
gaaaugaaagcagggac

SEQ ID NO: 1948286 - RNA, 17 nt, Human
gaaaucaccgaaaacgu

SEQ ID NO: 1948287 - RNA, 17 nt, Human
gaaaucaaagugcuauu

SEQ ID NO: 1948288 - RNA, 16 nt, Human
gaaaucaaauguaaag

SEQ ID NO: 1948289 - RNA, 17 nt, Human
gaaaucaaauguaaagu

SEQ ID NO: 1948290 - RNA, 23 nt, Human
gaaaucaauaauuuguggugauu

SEQ ID NO: 1948291 - RNA, 17 nt, Human
gaacaaauuuacagaga

SEQ ID NO: 1948292 - RNA, 18 nt, Human
gaacaaauuuacagagac

SEQ ID NO: 1948293 - RNA, 19 nt, Human
gaaauuuuuauuaaauuau

SEQ ID NO: 1948294 - RNA, 12 nt, Human
gaaauuuuucau

SEQ ID NO: 1948295 - RNA, 23 nt, Human
gaacaaauuuacagagacagaaa

SEQ ID NO: 1948296 - RNA, 19 nt, Human
gaaauuuuucauauuuuaa

SEQ ID NO: 1948297 - RNA, 13 nt, Human
gaaauuuuucaua

SEQ ID NO: 1948298 - RNA, 15 nt, Human
gaaauuuuucauauu

SEQ ID NO: 1948299 - RNA, 16 nt, Human
gaaauuuuucauauuu

SEQ ID NO: 1948300 - RNA, 17 nt, Human
gaaauuuuucauauuuu

SEQ ID NO: 1948301 - RNA, 15 nt, Human
gaacaacauauacaa

SEQ ID NO: 1948302 - RNA, 18 nt, Human
cuucccacaaagaauaua

SEQ ID NO: 1948303 - RNA, 15 nt, Human
cuuccauuucugccu

SEQ ID NO: 1948304 - RNA, 16 nt, Human
cuuccauuucugccuu

SEQ ID NO: 1948305 - RNA, 20 nt, Human
cuuccauuucugccuuuugu

SEQ ID NO: 1948306 - RNA, 20 nt, Human
cuucccaaaugugugcccag

SEQ ID NO: 1948307 - RNA, 23 nt, Human
cuucccaaaugugugcccagcuu

SEQ ID NO: 1948308 - RNA, 17 nt, Human
cuucccaacuugccuuu

SEQ ID NO: 1948309 - RNA, 20 nt, Human
cuuacauuagcaguuugcuu

SEQ ID NO: 1948310 - RNA, 21 nt, Human
cuuccaucugauuccagcaca

SEQ ID NO: 1948311 - RNA, 14 nt, Human
cuuacaggugauua

SEQ ID NO: 1948312 - RNA, 15 nt, Human
cuuaaauauagcagu

SEQ ID NO: 1948313 - RNA, 17 nt, Human
cuuacauaaacaucagg

SEQ ID NO: 1948314 - RNA, 19 nt, Human
cuuacauaaacaucagguu

SEQ ID NO: 1948315 - RNA, 18 nt, Human
cuuccucccucccucuuu

SEQ ID NO: 1948316 - RNA, 14 nt, Human
cuuccucccucccu

SEQ ID NO: 1948317 - RNA, 13 nt, Human
cuuccucccuccc

SEQ ID NO: 1948318 - RNA, 12 nt, Human
cuuccucccucc

SEQ ID NO: 1948319 - RNA, 16 nt, Human
cuuccucuccacugcc

SEQ ID NO: 1948320 - RNA, 17 nt, Human
cuuccucuccacugccu

SEQ ID NO: 1948321 - RNA, 19 nt, Human
cuuccucuccacugccuuc

SEQ ID NO: 1948322 - RNA, 21 nt, Human
cuuccucuccacugccuucga

SEQ ID NO: 1948323 - RNA, 11 nt, Human
cuuccucugcu

SEQ ID NO: 1948324 - RNA, 12 nt, Human
cuuccucugcug

SEQ ID NO: 1948325 - RNA, 13 nt, Human
cuuccucugcuga

SEQ ID NO: 1948326 - RNA, 14 nt, Human
cuuccucugcuaaa

SEQ ID NO: 1948327 - RNA, 16 nt, Human
cuuccucugcuaaauu

SEQ ID NO: 1948328 - RNA, 12 nt, Human
cuuccucugcuc

SEQ ID NO: 1948329 - RNA, 13 nt, Human
cuuccucugcucc

SEQ ID NO: 1948330 - RNA, 14 nt, Human
cuuccucugcuccc

SEQ ID NO: 1948331 - RNA, 15 nt, Human
cuuccucugcucccc

SEQ ID NO: 1948332 - RNA, 14 nt, Human
cuuccucuugaccc

SEQ ID NO: 1948333 - RNA, 15 nt, Human
cuuccucuugacccu

SEQ ID NO: 1948334 - RNA, 18 nt, Human
cuuccucuugacccugca

SEQ ID NO: 1948335 - RNA, 19 nt, Human
cuuccucuugacccugcac

SEQ ID NO: 1948336 - RNA, 20 nt, Human
cuuccucuugacccugcacc

SEQ ID NO: 1948337 - RNA, 21 nt, Human
cuuccucuugacccugcaccc

SEQ ID NO: 1948338 - RNA, 22 nt, Human
cuuccucuugacccugcacccu

SEQ ID NO: 1948339 - RNA, 17 nt, Human
cuucuaccucuuggcug

SEQ ID NO: 1948340 - RNA, 16 nt, Human
cuucuauagcaucacu

SEQ ID NO: 1948341 - RNA, 18 nt, Human
cuucuauagcaucacuua

SEQ ID NO: 1948342 - RNA, 17 nt, Human
cuucuaugaaagacuca

SEQ ID NO: 1948343 - RNA, 16 nt, Human
cuucuauuuauuuauu

SEQ ID NO: 1948344 - RNA, 22 nt, Human
cuucuauuuauuuauuuauuca

SEQ ID NO: 1948345 - RNA, 12 nt, Human
cuucucugccca

SEQ ID NO: 1948346 - RNA, 22 nt, Human
cuucugaacuuggcgcugcccc

SEQ ID NO: 1948347 - RNA, 15 nt, Human
cuucugacccaugcu

SEQ ID NO: 1948348 - RNA, 19 nt, Human
cuucugaacuuggcgcugc

SEQ ID NO: 1948349 - RNA, 19 nt, Human
cuucucugcccagcuuuuc

SEQ ID NO: 1948350 - RNA, 22 nt, Human
cuucuugaauggcaauguuuug

SEQ ID NO: 1948351 - RNA, 13 nt, Human
cuucuucugucca

SEQ ID NO: 1948352 - RNA, 19 nt, Human
cuucuucuguccaagcaga

SEQ ID NO: 1948353 - RNA, 21 nt, Human
cuucuucuguccaagcagauu

SEQ ID NO: 1948354 - RNA, 13 nt, Human
cuucuugaaaucc

SEQ ID NO: 1948355 - RNA, 16 nt, Human
cuucuuauacauuuga

SEQ ID NO: 1948356 - RNA, 13 nt, Human
cuucuuauacauu

SEQ ID NO: 1948357 - RNA, 17 nt, Human
cuucugacccaugcugc

SEQ ID NO: 1948358 - RNA, 16 nt, Human
cuucugacccaugcug

SEQ ID NO: 1948359 - RNA, 18 nt, Human
cuucugacccaugcugcc

SEQ ID NO: 1948360 - RNA, 23 nt, Human
cuucugaacuuggcgcugccccu

SEQ ID NO: 1948361 - RNA, 18 nt, Human
cuuucaauaggaaaaacu

SEQ ID NO: 1948362 - RNA, 17 nt, Human
cuuucaauaggaaaaac

SEQ ID NO: 1948363 - RNA, 21 nt, Human
cuuuaaugauaugcuuguaac

SEQ ID NO: 1948364 - RNA, 22 nt, Human
cuuuaaugauaugcuuguaacu

SEQ ID NO: 1948365 - RNA, 16 nt, Human
cuuuaaugauaugcuu

SEQ ID NO: 1948366 - RNA, 22 nt, Human
cuugucuuuggacccugaggcc

SEQ ID NO: 1948367 - RNA, 21 nt, Human
cuugucuuuggacccugaggc

SEQ ID NO: 1948368 - RNA, 18 nt, Human
cuuuaacuuaguuuugca

SEQ ID NO: 1948369 - RNA, 15 nt, Human
cuuuaagaacuaaaa

SEQ ID NO: 1948370 - RNA, 15 nt, Human
cuugugaaaauaauu

SEQ ID NO: 1948371 - RNA, 16 nt, Human
cuugugaaaauaauug

SEQ ID NO: 1948372 - RNA, 19 nt, Human
cuugucuuccuauuucaga

SEQ ID NO: 1948373 - RNA, 21 nt, Human
cuugucuuccuauuucagaag

SEQ ID NO: 1948374 - RNA, 15 nt, Human
cuuucaauaggaaaa

SEQ ID NO: 1948375 - RNA, 14 nt, Human
cuuucaauaggaaa

SEQ ID NO: 1948376 - RNA, 18 nt, Human
cuugugaaaauaauugac

SEQ ID NO: 1948377 - RNA, 22 nt, Human
cuuuaaugucacaggcaggucc

SEQ ID NO: 1948378 - RNA, 17 nt, Human
cuuuaaugucacaggca

SEQ ID NO: 1948379 - RNA, 18 nt, Human
cuuuaaugucacaggcag

SEQ ID NO: 1948380 - RNA, 19 nt, Human
cuuuaaugucacaggcagg

SEQ ID NO: 1948381 - RNA, 20 nt, Human
cuuuaaugucacaggcaggu

SEQ ID NO: 1948382 - RNA, 15 nt, Human
cuugguccugcugca

SEQ ID NO: 1948383 - RNA, 20 nt, Human
cuugguccugcugcaguugc

SEQ ID NO: 1948384 - RNA, 18 nt, Human
cuugguccugcugcaguu

SEQ ID NO: 1948385 - RNA, 17 nt, Human
cuugguccugcugcagu

SEQ ID NO: 1948386 - RNA, 16 nt, Human
cuugguccugcugcag

SEQ ID NO: 1948387 - RNA, 17 nt, Human
cuugguuccagccugcc

SEQ ID NO: 1948388 - RNA, 19 nt, Human
cuugguuccagccugccac

SEQ ID NO: 1948389 - RNA, 16 nt, Human
cuugguucccauuugc

SEQ ID NO: 1948390 - RNA, 20 nt, Human
cuugguuccagccugccacu

SEQ ID NO: 1948391 - RNA, 20 nt, Human
cuugguucccauuugcuccu

SEQ ID NO: 1948392 - RNA, 23 nt, Human
cuuggucucagugucaaugcagc

SEQ ID NO: 1948393 - RNA, 22 nt, Human
cuugguccugcugcaguugcca

SEQ ID NO: 1948394 - RNA, 13 nt, Human
cuugguuccuggg

SEQ ID NO: 1948395 - RNA, 19 nt, Human
cuugguuccuggggcaucc

SEQ ID NO: 1948396 - RNA, 15 nt, Human
cuugguuccuggggc

SEQ ID NO: 1948397 - RNA, 16 nt, Human
cuugguuccuggggca

SEQ ID NO: 1948398 - RNA, 17 nt, Human
cuugguuccuggggcau

SEQ ID NO: 1948399 - RNA, 18 nt, Human
cuugguuccuggggcauc

SEQ ID NO: 1948400 - RNA, 20 nt, Human
cuugucuuuggacccugagg

SEQ ID NO: 1948401 - RNA, 17 nt, Human
cuugucuuccuauuuca

SEQ ID NO: 1948402 - RNA, 21 nt, Human
cuugucuguagcgucuguaua

SEQ ID NO: 1948403 - RNA, 13 nt, Human
cuugucuguagau

SEQ ID NO: 1948404 - RNA, 15 nt, Human
cuugauguguuaucu

SEQ ID NO: 1948405 - RNA, 15 nt, Human
cuugauggauuuuca

SEQ ID NO: 1948406 - RNA, 21 nt, Human
cuugccgcgucgcccucccag

SEQ ID NO: 1948407 - RNA, 18 nt, Human
cuugccgcgucgcccucc

SEQ ID NO: 1948408 - RNA, 18 nt, Human
cuugccgucuaccugagg

SEQ ID NO: 1948409 - RNA, 23 nt, Human
cuugccgcgucgcccucccaggc

SEQ ID NO: 1948410 - RNA, 19 nt, Human
cuugccgucuaccugaggg

SEQ ID NO: 1948411 - RNA, 12 nt, Human
cuugauuggaag

SEQ ID NO: 1948412 - RNA, 13 nt, Human
cuugauuggaagg

SEQ ID NO: 1948413 - RNA, 17 nt, Human
cuugauucccuuguuau

SEQ ID NO: 1948414 - RNA, 22 nt, Human
cuugauucguagauuuaauaac

SEQ ID NO: 1948415 - RNA, 19 nt, Human
cuugauucauaaugacuua

SEQ ID NO: 1948416 - RNA, 15 nt, Human
cuuggauuguccccg

SEQ ID NO: 1948417 - RNA, 20 nt, Human
cuugccucagcuuccccagu

SEQ ID NO: 1948418 - RNA, 20 nt, Human
cuuggauuguccccgacccu

SEQ ID NO: 1948419 - RNA, 18 nt, Human
cuuggauuguccccgacc

SEQ ID NO: 1948420 - RNA, 22 nt, Human
cuuggauuguccccgacccuug

SEQ ID NO: 1948421 - RNA, 22 nt, Human
cuuggcgcugccccuggcagcc

SEQ ID NO: 1948422 - RNA, 21 nt, Human
cuuggcgcugccccuggcagc

SEQ ID NO: 1948423 - RNA, 23 nt, Human
cuuggcgcugccccuggcagccc

SEQ ID NO: 1948424 - RNA, 15 nt, Human
cuuggcccuuuccuu

SEQ ID NO: 1948425 - RNA, 20 nt, Human
cuuggcccuuuccuuccaga

SEQ ID NO: 1948426 - RNA, 13 nt, Human
cuuggcccuggca

SEQ ID NO: 1948427 - RNA, 16 nt, Human
cuuggcccuggcagcc

SEQ ID NO: 1948428 - RNA, 14 nt, Human
cuuggcccuuuccu

SEQ ID NO: 1948429 - RNA, 15 nt, Human
cuuggcccagggggc

SEQ ID NO: 1948430 - RNA, 18 nt, Human
cuuggcccagggggcuuc

SEQ ID NO: 1948431 - RNA, 21 nt, Human
cuuggcccagggggcuuccug

SEQ ID NO: 1948432 - RNA, 22 nt, Human
cuuggcccagggggcuuccuga

SEQ ID NO: 1948433 - RNA, 23 nt, Human
cuuggcccagggggcuuccugag

SEQ ID NO: 1948434 - RNA, 20 nt, Human
gcaaccuucgccaccugggu

SEQ ID NO: 1948435 - RNA, 20 nt, Human
gcaaccuccgccucuugggu

SEQ ID NO: 1948436 - RNA, 15 nt, Human
gcaaccaaacuccca

SEQ ID NO: 1948437 - RNA, 14 nt, Human
gcaaccauuugaaa

SEQ ID NO: 1948438 - RNA, 18 nt, Human
gcaaccauauagaaagcu

SEQ ID NO: 1948439 - RNA, 14 nt, Human
gcaacccccagccu

SEQ ID NO: 1948440 - RNA, 15 nt, Human
gcaacccccagccug

SEQ ID NO: 1948441 - RNA, 16 nt, Human
gcaacccccagccugc

SEQ ID NO: 1948442 - RNA, 19 nt, Human
gcaaccuccgccucuuggg

SEQ ID NO: 1948443 - RNA, 18 nt, Human
gcaaccaccaccaaccac

SEQ ID NO: 1948444 - RNA, 16 nt, Human
gcaaccaccaccaacc

SEQ ID NO: 1948445 - RNA, 13 nt, Human
gcaaccaccacca

SEQ ID NO: 1948446 - RNA, 15 nt, Human
gcaaccaaaaagaaa

SEQ ID NO: 1948447 - RNA, 16 nt, Human
gcaacaggcugggcuu

SEQ ID NO: 1948448 - RNA, 19 nt, Human
gcaacaggcugggcuucag

SEQ ID NO: 1948449 - RNA, 23 nt, Human
gcaaaagugcugcagggcuuuaa

SEQ ID NO: 1948450 - RNA, 15 nt, Human
gcaaaaucaagagau

SEQ ID NO: 1948451 - RNA, 18 nt, Human
gcaaaauacaugaugauu

SEQ ID NO: 1948452 - RNA, 21 nt, Human
gcaaaauacaugaugauuuca

SEQ ID NO: 1948453 - RNA, 14 nt, Human
gcaacaggcugggc

SEQ ID NO: 1948454 - RNA, 15 nt, Human
gcaacaggcugggcu

SEQ ID NO: 1948455 - RNA, 13 nt, Human
gcaacaggcuggg

SEQ ID NO: 1948456 - RNA, 13 nt, Human
gcaaaauuccuga

SEQ ID NO: 1948457 - RNA, 16 nt, Human
gcaagugagagcuggg

SEQ ID NO: 1948458 - RNA, 15 nt, Human
gcaagugagagcugg

SEQ ID NO: 1948459 - RNA, 12 nt, Human
gauucuucugcu

SEQ ID NO: 1948460 - RNA, 13 nt, Human
gauucuucugcuu

SEQ ID NO: 1948461 - RNA, 15 nt, Human
gauucuucugcuuca

SEQ ID NO: 1948462 - RNA, 19 nt, Human
gauuuaacagaaauguaca

SEQ ID NO: 1948463 - RNA, 17 nt, Human
gauuuaacagaaaugua

SEQ ID NO: 1948464 - RNA, 18 nt, Human
gauuuaacagaaauguac

SEQ ID NO: 1948465 - RNA, 16 nt, Human
gauuuaacagaaaugu

SEQ ID NO: 1948466 - RNA, 20 nt, Human
gauucuucugcuucagccuc

SEQ ID NO: 1948467 - RNA, 21 nt, Human
gauuuuuuuuuccuucagugc

SEQ ID NO: 1948468 - RNA, 19 nt, Human
gauuucacaaauauuaaaa

SEQ ID NO: 1948469 - RNA, 13 nt, Human
gauuucacaaaua

SEQ ID NO: 1948470 - RNA, 14 nt, Human
gauuucacaaauau

SEQ ID NO: 1948471 - RNA, 15 nt, Human
gauuucacaaauauu

SEQ ID NO: 1948472 - RNA, 14 nt, Human
gcaaaaaggcagga

SEQ ID NO: 1948473 - RNA, 22 nt, Human
gcaaaaaaucuuaauacuguua

SEQ ID NO: 1948474 - RNA, 12 nt, Human
gcaaaaaaucuu

SEQ ID NO: 1948475 - RNA, 22 nt, Human
gcaaaagaugcuucucacugcc

SEQ ID NO: 1948476 - RNA, 17 nt, Human
gcaaaagaugcuucuca

SEQ ID NO: 1948477 - RNA, 15 nt, Human
gcaaaaacauguaug

SEQ ID NO: 1948478 - RNA, 22 nt, Human
gcaaaaacauguaugugcauuu

SEQ ID NO: 1948479 - RNA, 18 nt, Human
gauuuuuuuuuccuucag

SEQ ID NO: 1948480 - RNA, 17 nt, Human
gauuuuuuuuuccuuca

SEQ ID NO: 1948481 - RNA, 12 nt, Human
gauuucacucuc

SEQ ID NO: 1948482 - RNA, 16 nt, Human
gauuuuuuuuuccuuc

SEQ ID NO: 1948483 - RNA, 11 nt, Human
gauuucacucu

SEQ ID NO: 1948484 - RNA, 18 nt, Human
gauuuauuucaucauauu

SEQ ID NO: 1948485 - RNA, 22 nt, Human
gauuuauuucaucauauuauac

SEQ ID NO: 1948486 - RNA, 16 nt, Human
gauuuaauuugaaaua

SEQ ID NO: 1948487 - RNA, 20 nt, Human
gauuuauuaacuuaauaauc

SEQ ID NO: 1948488 - RNA, 20 nt, Human
gauggaauuuuuuuguacga

SEQ ID NO: 1948489 - RNA, 13 nt, Human
gauggaauuuuuu

SEQ ID NO: 1948490 - RNA, 13 nt, Human
gauggaaugaugg

SEQ ID NO: 1948491 - RNA, 16 nt, Human
gauacaguuacucaga

SEQ ID NO: 1948492 - RNA, 19 nt, Human
gauacaguuacucagaauu

SEQ ID NO: 1948493 - RNA, 23 nt, Human
gauacaguuacucagaauucucu

SEQ ID NO: 1948494 - RNA, 17 nt, Human
gauacugccucccccag

SEQ ID NO: 1948495 - RNA, 12 nt, Human
gauacugaaaua

SEQ ID NO: 1948496 - RNA, 13 nt, Human
gauacugccuccc

SEQ ID NO: 1948497 - RNA, 17 nt, Human
gauacuguaucaugaca

SEQ ID NO: 1948498 - RNA, 21 nt, Human
gauacuguaucaugacaaaga

SEQ ID NO: 1948499 - RNA, 22 nt, Human
gaucaaaccccgaccaccugcc

SEQ ID NO: 1948500 - RNA, 23 nt, Human
gaucaaaagguuaauaaaguaau

SEQ ID NO: 1948501 - RNA, 14 nt, Human
gaucaaaaaggcuu

SEQ ID NO: 1948502 - RNA, 20 nt, Human
gaucaaaaaggcuuauaaaa

SEQ ID NO: 1948503 - RNA, 23 nt, Human
gaucaaaaaggcuuauaaaacag

SEQ ID NO: 1948504 - RNA, 20 nt, Human
gaucaaaagguuaauaaagu

SEQ ID NO: 1948505 - RNA, 17 nt, Human
gauauuuuuuucuuuuc

SEQ ID NO: 1948506 - RNA, 15 nt, Human
gauauuuugcuuugu

SEQ ID NO: 1948507 - RNA, 21 nt, Human
gauauuuucaacgcagcccug

SEQ ID NO: 1948508 - RNA, 22 nt, Human
gauauuuucaacgcagcccugc

SEQ ID NO: 1948509 - RNA, 23 nt, Human
gauauuuucaacgcagcccugcu

SEQ ID NO: 1948510 - RNA, 20 nt, Human
gauauuuguauuuauucuuu

SEQ ID NO: 1948511 - RNA, 20 nt, Human
gauauuuuauuuugaaaugg

SEQ ID NO: 1948512 - RNA, 19 nt, Human
gauauuuucaacgcagccc

SEQ ID NO: 1948513 - RNA, 11 nt, Human
gauauuucaga

SEQ ID NO: 1948514 - RNA, 16 nt, Human
gauauuucagaaauac

SEQ ID NO: 1948515 - RNA, 17 nt, Human
gauauuucagaaauaca

SEQ ID NO: 1948516 - RNA, 18 nt, Human
gauacuuugauauuuuca

SEQ ID NO: 1948517 - RNA, 22 nt, Human
gauacuuggucacagccaggcg

SEQ ID NO: 1948518 - RNA, 16 nt, Human
gauacuuuguauuguc

SEQ ID NO: 1948519 - RNA, 19 nt, Human
gauacuuuguauuguccua

SEQ ID NO: 1948520 - RNA, 23 nt, Human
gauacuuuguauuguccuauuag

SEQ ID NO: 1948521 - RNA, 22 nt, Human
gauccacccaccucagccuccc

SEQ ID NO: 1948522 - RNA, 20 nt, Human
gauccacccaccucagccuc

SEQ ID NO: 1948523 - RNA, 21 nt, Human
gauccacccaccucagccucc

SEQ ID NO: 1948524 - RNA, 21 nt, Human
gauccaagcuggucccacuca

SEQ ID NO: 1948525 - RNA, 18 nt, Human
gauccacccaccucagcc

SEQ ID NO: 1948526 - RNA, 19 nt, Human
gauccacccaccucagccu

SEQ ID NO: 1948527 - RNA, 12 nt, Human
gauccaagcugg

SEQ ID NO: 1948528 - RNA, 16 nt, Human
gauccaagcugguccc

SEQ ID NO: 1948529 - RNA, 17 nt, Human
gauccaagcugguccca

SEQ ID NO: 1948530 - RNA, 19 nt, Human
gauccaagcuggucccacu

SEQ ID NO: 1948531 - RNA, 14 nt, Human
gaugauccuaggca

SEQ ID NO: 1948532 - RNA, 13 nt, Human
gaugauccuaggc

SEQ ID NO: 1948533 - RNA, 22 nt, Human
gaugauuggaggggggaggugg

SEQ ID NO: 1948534 - RNA, 19 nt, Human
gaugauugaagaaacagcu

SEQ ID NO: 1948535 - RNA, 12 nt, Human
gaugauuucaga

SEQ ID NO: 1948536 - RNA, 20 nt, Human
gaugcuucuucagagacucc

SEQ ID NO: 1948537 - RNA, 17 nt, Human
gaugcuucuucagagac

SEQ ID NO: 1948538 - RNA, 21 nt, Human
gaugcuucuucagagacuccu

SEQ ID NO: 1948539 - RNA, 17 nt, Human
gaucugcugcagagcag

SEQ ID NO: 1948540 - RNA, 18 nt, Human
gaucugcugcagagcagu

SEQ ID NO: 1948541 - RNA, 16 nt, Human
gaucugcugcagagca

SEQ ID NO: 1948542 - RNA, 23 nt, Human
gauccagcccugaguuccuagcc

SEQ ID NO: 1948543 - RNA, 15 nt, Human
gaucccaguagaaaa

SEQ ID NO: 1948544 - RNA, 15 nt, Human
gaucucuaacuucac

SEQ ID NO: 1948545 - RNA, 12 nt, Human
gaucucugcagg

SEQ ID NO: 1948546 - RNA, 18 nt, Human
gaucucuugagccuggga

SEQ ID NO: 1948547 - RNA, 23 nt, Human
gaucucugcaggaaauggcugug

SEQ ID NO: 1948548 - RNA, 17 nt, Human
gaucugaugcaagcaag

SEQ ID NO: 1948549 - RNA, 19 nt, Human
gaucucuugagccugggag

SEQ ID NO: 1948550 - RNA, 18 nt, Human
gcaagugagagcugggug

SEQ ID NO: 1948551 - RNA, 19 nt, Human
gcaagugagagcugggugu

SEQ ID NO: 1948552 - RNA, 20 nt, Human
gcacucagaagacacugaug

SEQ ID NO: 1948553 - RNA, 15 nt, Human
gcacuccagccuggg

SEQ ID NO: 1948554 - RNA, 14 nt, Human
gcacuccagccugg

SEQ ID NO: 1948555 - RNA, 14 nt, Human
gcacuccccugcug

SEQ ID NO: 1948556 - RNA, 13 nt, Human
gcacuccccugcu

SEQ ID NO: 1948557 - RNA, 19 nt, Human
gcacuuuguucuggcucuu

SEQ ID NO: 1948558 - RNA, 18 nt, Human
gcacuuuguucuggcucu

SEQ ID NO: 1948559 - RNA, 15 nt, Human
gcacuccccugcugg

SEQ ID NO: 1948560 - RNA, 12 nt, Human
gcacuccccugc

SEQ ID NO: 1948561 - RNA, 22 nt, Human
gcacuuuguucuggcucuucca

SEQ ID NO: 1948562 - RNA, 23 nt, Human
gcacuuuucuaaacuaggcuccu

SEQ ID NO: 1948563 - RNA, 16 nt, Human
gcacuuuuuaaaaaac

SEQ ID NO: 1948564 - RNA, 22 nt, Human
gcacuuuuucuuaaucauuuuu

SEQ ID NO: 1948565 - RNA, 20 nt, Human
gcagaaagcaaaauuauguu

SEQ ID NO: 1948566 - RNA, 12 nt, Human
gcagaacaguga

SEQ ID NO: 1948567 - RNA, 13 nt, Human
gcagaacagugau

SEQ ID NO: 1948568 - RNA, 14 nt, Human
gcagagggcacaga

SEQ ID NO: 1948569 - RNA, 17 nt, Human
gcagcauaaagaauuug

SEQ ID NO: 1948570 - RNA, 23 nt, Human
gcagcauauucaggaagcucagg

SEQ ID NO: 1948571 - RNA, 19 nt, Human
gcagcauauucaggaagcu

SEQ ID NO: 1948572 - RNA, 18 nt, Human
gcagcauauucaggaagc

SEQ ID NO: 1948573 - RNA, 17 nt, Human
gcagcauauucaggaag

SEQ ID NO: 1948574 - RNA, 20 nt, Human
gcagaggaaagcaaaggaga

SEQ ID NO: 1948575 - RNA, 18 nt, Human
gcagaggaaagcaaagga

SEQ ID NO: 1948576 - RNA, 14 nt, Human
gcagaggaaagcaa

SEQ ID NO: 1948577 - RNA, 13 nt, Human
gcagaggaaagca

SEQ ID NO: 1948578 - RNA, 19 nt, Human
gcagaggagaacuugcugc

SEQ ID NO: 1948579 - RNA, 21 nt, Human
gcagaggagaacuugcugccu

SEQ ID NO: 1948580 - RNA, 22 nt, Human
gcagaggagaacuugcugccuc

SEQ ID NO: 1948581 - RNA, 21 nt, Human
gcagaggaaagcaaaggagau

SEQ ID NO: 1948582 - RNA, 17 nt, Human
gcagagcugcgggcugg

SEQ ID NO: 1948583 - RNA, 19 nt, Human
gcagagcugcgggcugggu

SEQ ID NO: 1948584 - RNA, 19 nt, Human
gcagaacugcagucacugc

SEQ ID NO: 1948585 - RNA, 18 nt, Human
gcagaacagugauuacca

SEQ ID NO: 1948586 - RNA, 22 nt, Human
gcagaacagugauuaccaggga

SEQ ID NO: 1948587 - RNA, 20 nt, Human
gcagcuccuuccuagccuug

SEQ ID NO: 1948588 - RNA, 12 nt, Human
gcagcucccuca

SEQ ID NO: 1948589 - RNA, 18 nt, Human
gcagcccaccccucaaca

SEQ ID NO: 1948590 - RNA, 15 nt, Human
gcagccacauuccug

SEQ ID NO: 1948591 - RNA, 21 nt, Human
gcagccagccaaacacacaga

SEQ ID NO: 1948592 - RNA, 20 nt, Human
gcagccaggccacuggcccc

SEQ ID NO: 1948593 - RNA, 18 nt, Human
gcauacguacacauuuua

SEQ ID NO: 1948594 - RNA, 13 nt, Human
gcaguuguuaagu

SEQ ID NO: 1948595 - RNA, 23 nt, Human
gcaguugcugguaaaaugaagaa

SEQ ID NO: 1948596 - RNA, 15 nt, Human
gcauacguacacauu

SEQ ID NO: 1948597 - RNA, 16 nt, Human
gcauacguacacauuu

SEQ ID NO: 1948598 - RNA, 17 nt, Human
gcauacguacacauuuu

SEQ ID NO: 1948599 - RNA, 16 nt, Human
gcaguugcccagccuc

SEQ ID NO: 1948600 - RNA, 23 nt, Human
gcaguugcccagccucuuucccu

SEQ ID NO: 1948601 - RNA, 18 nt, Human
gcaguugcugguaaaaug

SEQ ID NO: 1948602 - RNA, 19 nt, Human
gcaguugcugguaaaauga

SEQ ID NO: 1948603 - RNA, 17 nt, Human
gcagugauauucuuugu

SEQ ID NO: 1948604 - RNA, 18 nt, Human
gcagugauauucuuuguu

SEQ ID NO: 1948605 - RNA, 14 nt, Human
gcagugagagcaga

SEQ ID NO: 1948606 - RNA, 17 nt, Human
gcagucuuaugcuucca

SEQ ID NO: 1948607 - RNA, 18 nt, Human
gcagucuuaugcuuccag

SEQ ID NO: 1948608 - RNA, 19 nt, Human
gcagucuuaugcuuccaga

SEQ ID NO: 1948609 - RNA, 21 nt, Human
gcagucuuaugcuuccagaaa

SEQ ID NO: 1948610 - RNA, 22 nt, Human
gcagucuuaugcuuccagaaac

SEQ ID NO: 1948611 - RNA, 12 nt, Human
gcagucugccug

SEQ ID NO: 1948612 - RNA, 14 nt, Human
gcagucugccugga

SEQ ID NO: 1948613 - RNA, 12 nt, Human
gcagcugaaauu

SEQ ID NO: 1948614 - RNA, 18 nt, Human
gcagcugaaauugaaaag

SEQ ID NO: 1948615 - RNA, 12 nt, Human
gcagcucucccc

SEQ ID NO: 1948616 - RNA, 12 nt, Human
gcagcucuuccu

SEQ ID NO: 1948617 - RNA, 13 nt, Human
gcagcucuuccug

SEQ ID NO: 1948618 - RNA, 14 nt, Human
gcagcucuuccugg

SEQ ID NO: 1948619 - RNA, 23 nt, Human
gcagcucuuccuggacaggccag

SEQ ID NO: 1948620 - RNA, 17 nt, Human
gcauccaguaucuugaa

SEQ ID NO: 1948621 - RNA, 14 nt, Human
gcauccaguaucuu

SEQ ID NO: 1948622 - RNA, 18 nt, Human
gcauccaguaucuugaag

SEQ ID NO: 1948623 - RNA, 11 nt, Human
gcauccauggg

SEQ ID NO: 1948624 - RNA, 12 nt, Human
gcauccaugggg

SEQ ID NO: 1948625 - RNA, 21 nt, Human
gcauccauggggucucucaca

SEQ ID NO: 1948626 - RNA, 22 nt, Human
gcauccauggggucucucacag

SEQ ID NO: 1948627 - RNA, 23 nt, Human
gcauccauggggucucucacaga

SEQ ID NO: 1948628 - RNA, 16 nt, Human
gcauccgaccagguug

SEQ ID NO: 1948629 - RNA, 14 nt, Human
gcauccgaccaggu

SEQ ID NO: 1948630 - RNA, 15 nt, Human
gcauugugggaaggg

SEQ ID NO: 1948631 - RNA, 13 nt, Human
gcauugugggaag

SEQ ID NO: 1948632 - RNA, 21 nt, Human
gcaugugaugagaggaaauca

SEQ ID NO: 1948633 - RNA, 18 nt, Human
gcaugugaugagaggaaa

SEQ ID NO: 1948634 - RNA, 19 nt, Human
gcaugugaugagaggaaau

SEQ ID NO: 1948635 - RNA, 22 nt, Human
gcauguaaaagccuaggucuau

SEQ ID NO: 1948636 - RNA, 18 nt, Human
gcauugugggaaggggag

SEQ ID NO: 1948637 - RNA, 16 nt, Human
gcauugugggaagggg

SEQ ID NO: 1948638 - RNA, 16 nt, Human
gcauuuaaaagauaca

SEQ ID NO: 1948639 - RNA, 17 nt, Human
gcauuuaaaagauacag

SEQ ID NO: 1948640 - RNA, 18 nt, Human
gcauuuaaaagauacagu

SEQ ID NO: 1948641 - RNA, 22 nt, Human
gcauuuaaaagauacaguuacu

SEQ ID NO: 1948642 - RNA, 15 nt, Human
gcauuuacuuugugu

SEQ ID NO: 1948643 - RNA, 20 nt, Human
gcauggugguugggacccag

SEQ ID NO: 1948644 - RNA, 22 nt, Human
gcauggugguugggacccagug

SEQ ID NO: 1948645 - RNA, 13 nt, Human
gcauggugguugg

SEQ ID NO: 1948646 - RNA, 22 nt, Human
gcaugguccauucucaagggac

SEQ ID NO: 1948647 - RNA, 15 nt, Human
gcaugguccauucuc

SEQ ID NO: 1948648 - RNA, 21 nt, Human
gcauggcugccaaugggagcu

SEQ ID NO: 1948649 - RNA, 14 nt, Human
gcauccuggcaccc

SEQ ID NO: 1948650 - RNA, 13 nt, Human
gcauccuggcacc

SEQ ID NO: 1948651 - RNA, 17 nt, Human
gcauccuccgccucccg

SEQ ID NO: 1948652 - RNA, 20 nt, Human
gcaucuagcaugucgucaaa

SEQ ID NO: 1948653 - RNA, 21 nt, Human
gacacagcucuucuccaggcu

SEQ ID NO: 1948654 - RNA, 14 nt, Human
gacaaauaguaggc

SEQ ID NO: 1948655 - RNA, 15 nt, Human
gacaaauaguaggca

SEQ ID NO: 1948656 - RNA, 17 nt, Human
gacaaauaguaggcaag

SEQ ID NO: 1948657 - RNA, 21 nt, Human
gacaaauaguaggcaagaugg

SEQ ID NO: 1948658 - RNA, 15 nt, Human
gacaaagucaagcca

SEQ ID NO: 1948659 - RNA, 12 nt, Human
gacacagcucuu

SEQ ID NO: 1948660 - RNA, 19 nt, Human
gacacagcucuucuccagg

SEQ ID NO: 1948661 - RNA, 20 nt, Human
gacacagcucuucuccaggc

SEQ ID NO: 1948662 - RNA, 14 nt, Human
gaauuaugaaacuu

SEQ ID NO: 1948663 - RNA, 14 nt, Human
gaauuacuaacuuc

SEQ ID NO: 1948664 - RNA, 15 nt, Human
gaauuacuaacuucu

SEQ ID NO: 1948665 - RNA, 16 nt, Human
gaauuacuaacuucua

SEQ ID NO: 1948666 - RNA, 18 nt, Human
gaauuacuaacuucuaaa

SEQ ID NO: 1948667 - RNA, 23 nt, Human
gaauuacuaacuucuaaaacugu

SEQ ID NO: 1948668 - RNA, 13 nt, Human
gaauuauuuuaaa

SEQ ID NO: 1948669 - RNA, 16 nt, Human
gaauuauuuuaaaaga

SEQ ID NO: 1948670 - RNA, 18 nt, Human
gaauuauuuuaaaagaua

SEQ ID NO: 1948671 - RNA, 14 nt, Human
gacaaaaagcuacu

SEQ ID NO: 1948672 - RNA, 13 nt, Human
gaauuuuuuugua

SEQ ID NO: 1948673 - RNA, 17 nt, Human
gacaaacugccaguuuu

SEQ ID NO: 1948674 - RNA, 20 nt, Human
gacaaacugccaguuuuguu

SEQ ID NO: 1948675 - RNA, 15 nt, Human
gaaugaauggcuaag

SEQ ID NO: 1948676 - RNA, 20 nt, Human
gaaugaauggcuaagcaaaa

SEQ ID NO: 1948677 - RNA, 16 nt, Human
gaaugaguuucuuaga

SEQ ID NO: 1948678 - RNA, 18 nt, Human
gaaugaguuucuuagacu

SEQ ID NO: 1948679 - RNA, 14 nt, Human
gaaugaguuucuua

SEQ ID NO: 1948680 - RNA, 14 nt, Human
gaaugauuaauuaa

SEQ ID NO: 1948681 - RNA, 14 nt, Human
gaaugaugccauga

SEQ ID NO: 1948682 - RNA, 20 nt, Human
gaaugaugauccuaggcauu

SEQ ID NO: 1948683 - RNA, 15 nt, Human
gaauguuugccucug

SEQ ID NO: 1948684 - RNA, 19 nt, Human
gaaugcacaaacagaggcc

SEQ ID NO: 1948685 - RNA, 16 nt, Human
gaauguuugccucugc

SEQ ID NO: 1948686 - RNA, 17 nt, Human
gaauguuugccucugcc

SEQ ID NO: 1948687 - RNA, 18 nt, Human
gaaugcacaaacagaggc

SEQ ID NO: 1948688 - RNA, 21 nt, Human
gaaugaugguuuccaauuuca

SEQ ID NO: 1948689 - RNA, 23 nt, Human
gaauuacaauuacuccuuuuauu

SEQ ID NO: 1948690 - RNA, 14 nt, Human
gaauuaacacauga

SEQ ID NO: 1948691 - RNA, 15 nt, Human
gaauuaacacaugau

SEQ ID NO: 1948692 - RNA, 17 nt, Human
gaauguuuucaaauguu

SEQ ID NO: 1948693 - RNA, 17 nt, Human
gaauguuuuagcacagc

SEQ ID NO: 1948694 - RNA, 20 nt, Human
gaauguuuuagcacagcguu

SEQ ID NO: 1948695 - RNA, 18 nt, Human
gaauguuugccucugccu

SEQ ID NO: 1948696 - RNA, 19 nt, Human
gaauguuugccucugccuc

SEQ ID NO: 1948697 - RNA, 14 nt, Human
gaaugaauggcuaa

SEQ ID NO: 1948698 - RNA, 24 nt, Human
gaauauugcugauggugcaaugac

SEQ ID NO: 1948699 - RNA, 19 nt, Human
gaauauugccauuaugcuu

SEQ ID NO: 1948700 - RNA, 23 nt, Human
gaauauugcugauggugcaauga

SEQ ID NO: 1948701 - RNA, 22 nt, Human
gaauauugcugauggugcaaug

SEQ ID NO: 1948702 - RNA, 15 nt, Human
gaauauauaaccagu

SEQ ID NO: 1948703 - RNA, 17 nt, Human
gaauauagauuaaauca

SEQ ID NO: 1948704 - RNA, 22 nt, Human
gaauaucuccgucaacucauau

SEQ ID NO: 1948705 - RNA, 20 nt, Human
gaauaugaaagucuuauuaa

SEQ ID NO: 1948706 - RNA, 17 nt, Human
gaauaugggagaaauag

SEQ ID NO: 1948707 - RNA, 19 nt, Human
gaauaugauuaaaaauauc

SEQ ID NO: 1948708 - RNA, 21 nt, Human
gaauaugauuaaaaauaucaa

SEQ ID NO: 1948709 - RNA, 13 nt, Human
gaauauugcugau

SEQ ID NO: 1948710 - RNA, 12 nt, Human
gaauauugcuga

SEQ ID NO: 1948711 - RNA, 11 nt, Human
gaauauugcug

SEQ ID NO: 1948712 - RNA, 18 nt, Human
gaauaugggagaaauagu

SEQ ID NO: 1948713 - RNA, 17 nt, Human
gacauugcggacagcca

SEQ ID NO: 1948714 - RNA, 23 nt, Human
gacauugcggacagccacggcca

SEQ ID NO: 1948715 - RNA, 16 nt, Human
gacauuuuaugucuuu

SEQ ID NO: 1948716 - RNA, 20 nt, Human
gacauuuuaugucuuucuug

SEQ ID NO: 1948717 - RNA, 17 nt, Human
gacauuugucauuuuca

SEQ ID NO: 1948718 - RNA, 19 nt, Human
gacauuugucauuuucauu

SEQ ID NO: 1948719 - RNA, 20 nt, Human
gacauuugucauuuucauua

SEQ ID NO: 1948720 - RNA, 13 nt, Human
gacauuuguuugg

SEQ ID NO: 1948721 - RNA, 12 nt, Human
gacauuugucau

SEQ ID NO: 1948722 - RNA, 15 nt, Human
gacauuugucauuuu

SEQ ID NO: 1948723 - RNA, 16 nt, Human
gacauuugucauuuuc

SEQ ID NO: 1948724 - RNA, 20 nt, Human
gacagucccugccaauggac

SEQ ID NO: 1948725 - RNA, 16 nt, Human
gacagucccugccaau

SEQ ID NO: 1948726 - RNA, 15 nt, Human
gacagucccugccaa

SEQ ID NO: 1948727 - RNA, 14 nt, Human
gacagucccugcca

SEQ ID NO: 1948728 - RNA, 11 nt, Human
gacagcucuua

SEQ ID NO: 1948729 - RNA, 12 nt, Human
gacagucccugc

SEQ ID NO: 1948730 - RNA, 10 nt, Human
gacagcucuu

SEQ ID NO: 1948731 - RNA, 15 nt, Human
gacagccccucccuc

SEQ ID NO: 1948732 - RNA, 17 nt, Human
gacagccccucccuccu

SEQ ID NO: 1948733 - RNA, 19 nt, Human
gacagcccgauccuccccu

SEQ ID NO: 1948734 - RNA, 24 nt, Human
gacagcccgauccuccccuggacu

SEQ ID NO: 1948735 - RNA, 12 nt, Human
gacagcucugca

SEQ ID NO: 1948736 - RNA, 19 nt, Human
gacagcuccuucuguccua

SEQ ID NO: 1948737 - RNA, 14 nt, Human
gacagcccgggcuc

SEQ ID NO: 1948738 - RNA, 16 nt, Human
gacagcccgggcucug

SEQ ID NO: 1948739 - RNA, 16 nt, Human
gacagcuccuucuguc

SEQ ID NO: 1948740 - RNA, 17 nt, Human
gacagcuccuucugucc

SEQ ID NO: 1948741 - RNA, 18 nt, Human
gacagcuccuucuguccu

SEQ ID NO: 1948742 - RNA, 20 nt, Human
gacacuggugccaugucagc

SEQ ID NO: 1948743 - RNA, 20 nt, Human
gacacuuccgucacauccca

SEQ ID NO: 1948744 - RNA, 14 nt, Human
gacgcucucuggcc

SEQ ID NO: 1948745 - RNA, 23 nt, Human
gacgcuacccgggaagggggcug

SEQ ID NO: 1948746 - RNA, 22 nt, Human
gacgcuacccgggaagggggcu

SEQ ID NO: 1948747 - RNA, 17 nt, Human
gacgcugugcugcccug

SEQ ID NO: 1948748 - RNA, 16 nt, Human
gacgcugugcugcccu

SEQ ID NO: 1948749 - RNA, 18 nt, Human
gacgcugugcugcccugc

SEQ ID NO: 1948750 - RNA, 15 nt, Human
gacgcugugcugccc

SEQ ID NO: 1948751 - RNA, 21 nt, Human
gacgccaucccagccccaaug

SEQ ID NO: 1948752 - RNA, 15 nt, Human
gacgccaucccagcc

SEQ ID NO: 1948753 - RNA, 19 nt, Human
gacgccaucccagccccaa

SEQ ID NO: 1948754 - RNA, 13 nt, Human
gacgccaucccag

SEQ ID NO: 1948755 - RNA, 12 nt, Human
gacgccauccca

SEQ ID NO: 1948756 - RNA, 13 nt, Human
gaccucugccuga

SEQ ID NO: 1948757 - RNA, 16 nt, Human
gaccucugcagcaaua

SEQ ID NO: 1948758 - RNA, 18 nt, Human
gaccucugcagcaauaaa

SEQ ID NO: 1948759 - RNA, 22 nt, Human
gaccucugcagcaauaaagcag

SEQ ID NO: 1948760 - RNA, 18 nt, Human
gacccggaggggccuggc

SEQ ID NO: 1948761 - RNA, 19 nt, Human
gacccggaggggccuggca

SEQ ID NO: 1948762 - RNA, 20 nt, Human
gacccggaggggccuggcag

SEQ ID NO: 1948763 - RNA, 16 nt, Human
gaccccugagcuugca

SEQ ID NO: 1948764 - RNA, 17 nt, Human
gacccggaggggccugg

SEQ ID NO: 1948765 - RNA, 12 nt, Human
gaccccugccca

SEQ ID NO: 1948766 - RNA, 23 nt, Human
gaccccugcccagaucagccaga

SEQ ID NO: 1948767 - RNA, 20 nt, Human
gaccccugcaguuccccugg

SEQ ID NO: 1948768 - RNA, 20 nt, Human
gacccugaaaugugugugau

SEQ ID NO: 1948769 - RNA, 13 nt, Human
gacccugaaaugu

SEQ ID NO: 1948770 - RNA, 14 nt, Human
gacccugaaaugug

SEQ ID NO: 1948771 - RNA, 15 nt, Human
gacccugaaaugugu

SEQ ID NO: 1948772 - RNA, 16 nt, Human
gacccugaaaugugug

SEQ ID NO: 1948773 - RNA, 14 nt, Human
gaccucaggccugg

SEQ ID NO: 1948774 - RNA, 11 nt, Human
gacccuccaag

SEQ ID NO: 1948775 - RNA, 13 nt, Human
gacccuccaaggc

SEQ ID NO: 1948776 - RNA, 20 nt, Human
gacccuccaaggccaggccu

SEQ ID NO: 1948777 - RNA, 15 nt, Human
gacccuccaaggcca

SEQ ID NO: 1948778 - RNA, 19 nt, Human
gaccucaggugagaagcag

SEQ ID NO: 1948779 - RNA, 18 nt, Human
gaccucaggugagaagca

SEQ ID NO: 1948780 - RNA, 19 nt, Human
gaccucaggccugggggcu

SEQ ID NO: 1948781 - RNA, 22 nt, Human
gaccucagguaaucgaccugcc

SEQ ID NO: 1948782 - RNA, 23 nt, Human
gaccucagguaaucgaccugccu

SEQ ID NO: 1948783 - RNA, 21 nt, Human
gaccucaggugagaagcagag

SEQ ID NO: 1948784 - RNA, 19 nt, Human
gaccucaggugauccaccc

SEQ ID NO: 1948785 - RNA, 20 nt, Human
gaccucaggugauccaccca

SEQ ID NO: 1948786 - RNA, 21 nt, Human
gaccucaggugauccacccac

SEQ ID NO: 1948787 - RNA, 14 nt, Human
gagcaucaggccag

SEQ ID NO: 1948788 - RNA, 17 nt, Human
gagcaguaucaugaagc

SEQ ID NO: 1948789 - RNA, 16 nt, Human
gagcaguaucaugaag

SEQ ID NO: 1948790 - RNA, 13 nt, Human
gagcaucaggcca

SEQ ID NO: 1948791 - RNA, 16 nt, Human
gagcaucaggccaggc

SEQ ID NO: 1948792 - RNA, 15 nt, Human
gagcaucaggccagg

SEQ ID NO: 1948793 - RNA, 13 nt, Human
gagcaugccugga

SEQ ID NO: 1948794 - RNA, 21 nt, Human
gagcaugccuggauggggcug

SEQ ID NO: 1948795 - RNA, 18 nt, Human
gagcccauuuggagggcc

SEQ ID NO: 1948796 - RNA, 20 nt, Human
gagcccugggaggcucugga

SEQ ID NO: 1948797 - RNA, 19 nt, Human
gagcccugggaggcucugg

SEQ ID NO: 1948798 - RNA, 18 nt, Human
gagcccugggaggcucug

SEQ ID NO: 1948799 - RNA, 16 nt, Human
gagcccugggaggcuc

SEQ ID NO: 1948800 - RNA, 22 nt, Human
gagcccugccucuccgccccug

SEQ ID NO: 1948801 - RNA, 18 nt, Human
gagcccugccucuccgcc

SEQ ID NO: 1948802 - RNA, 12 nt, Human
gagcccugggag

SEQ ID NO: 1948803 - RNA, 13 nt, Human
gagccccgaggcc

SEQ ID NO: 1948804 - RNA, 14 nt, Human
gagccccgaggccu

SEQ ID NO: 1948805 - RNA, 17 nt, Human
gagccccgaggccuucu

SEQ ID NO: 1948806 - RNA, 19 nt, Human
gagcuggcuccagccugga

SEQ ID NO: 1948807 - RNA, 18 nt, Human
gagcuguugaugggauga

SEQ ID NO: 1948808 - RNA, 14 nt, Human
gagcuggcuccagc

SEQ ID NO: 1948809 - RNA, 13 nt, Human
gagcccugguggc

SEQ ID NO: 1948810 - RNA, 14 nt, Human
gagcccugguggca

SEQ ID NO: 1948811 - RNA, 14 nt, Human
gagcccugcucccu

SEQ ID NO: 1948812 - RNA, 21 nt, Human
gagggccugcaagggagugag

SEQ ID NO: 1948813 - RNA, 17 nt, Human
gagggccugcaagggag

SEQ ID NO: 1948814 - RNA, 14 nt, Human
gagggccugcaagg

SEQ ID NO: 1948815 - RNA, 14 nt, Human
gaggggagccagga

SEQ ID NO: 1948816 - RNA, 17 nt, Human
gaggggagccaggaggg

SEQ ID NO: 1948817 - RNA, 20 nt, Human
gaggggagacuuugauguca

SEQ ID NO: 1948818 - RNA, 17 nt, Human
gaggggauggggcuggg

SEQ ID NO: 1948819 - RNA, 21 nt, Human
gaggggaugugugugugcaga

SEQ ID NO: 1948820 - RNA, 23 nt, Human
gaggggaugugugugugcagagc

SEQ ID NO: 1948821 - RNA, 12 nt, Human
gagggccugggc

SEQ ID NO: 1948822 - RNA, 18 nt, Human
gaggcugagaugggagaa

SEQ ID NO: 1948823 - RNA, 20 nt, Human
gaggcucuggagcccacugu

SEQ ID NO: 1948824 - RNA, 17 nt, Human
gaggcuccacuuggucu

SEQ ID NO: 1948825 - RNA, 19 nt, Human
gaggccaagaguggcccca

SEQ ID NO: 1948826 - RNA, 20 nt, Human
gaggccaagaguggccccac

SEQ ID NO: 1948827 - RNA, 21 nt, Human
gaggccaagaguggccccacc

SEQ ID NO: 1948828 - RNA, 22 nt, Human
gaggccaagaguggccccaccu

SEQ ID NO: 1948829 - RNA, 15 nt, Human
gaggcuccacuuggu

SEQ ID NO: 1948830 - RNA, 21 nt, Human
gaggcauuuguuugaacugau

SEQ ID NO: 1948831 - RNA, 17 nt, Human
gaggccaaacaggcccu

SEQ ID NO: 1948832 - RNA, 18 nt, Human
gaggccaaacaggcccuc

SEQ ID NO: 1948833 - RNA, 16 nt, Human
gaggccaagaguggcc

SEQ ID NO: 1948834 - RNA, 17 nt, Human
gaggccaagaguggccc

SEQ ID NO: 1948835 - RNA, 21 nt, Human
gaggcaugugaugagaggaaa

SEQ ID NO: 1948836 - RNA, 20 nt, Human
gaggcaugugaugagaggaa

SEQ ID NO: 1948837 - RNA, 22 nt, Human
gaggcaugugaugagaggaaau

SEQ ID NO: 1948838 - RNA, 19 nt, Human
gaggcauuuguuugaacug

SEQ ID NO: 1948839 - RNA, 16 nt, Human
gaggacauggcuucug

SEQ ID NO: 1948840 - RNA, 22 nt, Human
gaggacaguauuuguggggagg

SEQ ID NO: 1948841 - RNA, 21 nt, Human
gaggacgcucucuggccuucg

SEQ ID NO: 1948842 - RNA, 20 nt, Human
gaggacgcucucuggccuuc

SEQ ID NO: 1948843 - RNA, 13 nt, Human
gaggaccagcaca

SEQ ID NO: 1948844 - RNA, 14 nt, Human
gaggaccagcacac

SEQ ID NO: 1948845 - RNA, 13 nt, Human
gaggaccagggcu

SEQ ID NO: 1948846 - RNA, 16 nt, Human
gaggacuuuucuuugu

SEQ ID NO: 1948847 - RNA, 20 nt, Human
gaggacuuuucuuuguggcu

SEQ ID NO: 1948848 - RNA, 23 nt, Human
gaggacuuuucuuuguggcuucc

SEQ ID NO: 1948849 - RNA, 22 nt, Human
gaggcagggucucacucugucg

SEQ ID NO: 1948850 - RNA, 17 nt, Human
gaggcaucgcaauguaa

SEQ ID NO: 1948851 - RNA, 19 nt, Human
gaggcagggucucacucug

SEQ ID NO: 1948852 - RNA, 20 nt, Human
gaggcagggucucacucugu

SEQ ID NO: 1948853 - RNA, 18 nt, Human
gaggcagggucucacucu

SEQ ID NO: 1948854 - RNA, 15 nt, Human
gaggagagaggaccc

SEQ ID NO: 1948855 - RNA, 14 nt, Human
gaggagagaggacc

SEQ ID NO: 1948856 - RNA, 12 nt, Human
gaggagagagga

SEQ ID NO: 1948857 - RNA, 12 nt, Human
gaggagaaacug

SEQ ID NO: 1948858 - RNA, 14 nt, Human
gaggagaaacugga

SEQ ID NO: 1948859 - RNA, 18 nt, Human
gaggagaacuugcugccu

SEQ ID NO: 1948860 - RNA, 14 nt, Human
gaggagaagaaaau

SEQ ID NO: 1948861 - RNA, 16 nt, Human
gaggagaacuugcugc

SEQ ID NO: 1948862 - RNA, 21 nt, Human
gagauugugccccugcacucc

SEQ ID NO: 1948863 - RNA, 14 nt, Human
gagauuggaaggaa

SEQ ID NO: 1948864 - RNA, 23 nt, Human
gagauugcuguguguugccuggg

SEQ ID NO: 1948865 - RNA, 20 nt, Human
gagaugcuagaacucccuuu

SEQ ID NO: 1948866 - RNA, 16 nt, Human
gagaugcuagaacucc

SEQ ID NO: 1948867 - RNA, 15 nt, Human
gagauuauguucuuu

SEQ ID NO: 1948868 - RNA, 20 nt, Human
gagauguguaauuuuucugu

SEQ ID NO: 1948869 - RNA, 17 nt, Human
gagauguguaauuuuuc

SEQ ID NO: 1948870 - RNA, 16 nt, Human
gagagccuuccagggg

SEQ ID NO: 1948871 - RNA, 15 nt, Human
gagagccuuccaggg

SEQ ID NO: 1948872 - RNA, 14 nt, Human
gagacuccugcagg

SEQ ID NO: 1948873 - RNA, 13 nt, Human
gagacuccugcag

SEQ ID NO: 1948874 - RNA, 20 nt, Human
gagagccuuccagggguggg

SEQ ID NO: 1948875 - RNA, 18 nt, Human
gagagccuuccaggggug

SEQ ID NO: 1948876 - RNA, 21 nt, Human
gagagcuagcagcagggaggg

SEQ ID NO: 1948877 - RNA, 15 nt, Human
gagagcuagcagcag

SEQ ID NO: 1948878 - RNA, 13 nt, Human
gagagcugggugu

SEQ ID NO: 1948879 - RNA, 23 nt, Human
gagagcuauggacagcauugcca

SEQ ID NO: 1948880 - RNA, 13 nt, Human
gagaggccgggac

SEQ ID NO: 1948881 - RNA, 13 nt, Human
gagaggcuguggu

SEQ ID NO: 1948882 - RNA, 21 nt, Human
gagaggcugugguuuggggga

SEQ ID NO: 1948883 - RNA, 16 nt, Human
gagaggcuaaaauguu

SEQ ID NO: 1948884 - RNA, 20 nt, Human
gagaggcuaaaauguuuuca

SEQ ID NO: 1948885 - RNA, 21 nt, Human
gagaggcuaaaauguuuucag

SEQ ID NO: 1948886 - RNA, 22 nt, Human
gagaggcuaaaauguuuucagc

SEQ ID NO: 1948887 - RNA, 15 nt, Human
gagaggagcccugcc

SEQ ID NO: 1948888 - RNA, 15 nt, Human
gagaggacccccuga

SEQ ID NO: 1948889 - RNA, 12 nt, Human
gagaggaaauca

SEQ ID NO: 1948890 - RNA, 22 nt, Human
gagagcuucuguugcugccuca

SEQ ID NO: 1948891 - RNA, 20 nt, Human
gagagcugggugucaagagg

SEQ ID NO: 1948892 - RNA, 17 nt, Human
gagaaaaccccuuccca

SEQ ID NO: 1948893 - RNA, 22 nt, Human
gacuuuucaaguauuuaagccu

SEQ ID NO: 1948894 - RNA, 20 nt, Human
gacuuuuccaacccucauca

SEQ ID NO: 1948895 - RNA, 19 nt, Human
gacuuuuccaacccucauc

SEQ ID NO: 1948896 - RNA, 14 nt, Human
gacuuuuccaaccc

SEQ ID NO: 1948897 - RNA, 18 nt, Human
gacuuuuauuuccaguga

SEQ ID NO: 1948898 - RNA, 14 nt, Human
gacuuuucaaguau

SEQ ID NO: 1948899 - RNA, 19 nt, Human
gacuuuucaaguauuuaag

SEQ ID NO: 1948900 - RNA, 21 nt, Human
gagaagggcagaguuacuuga

SEQ ID NO: 1948901 - RNA, 15 nt, Human
gagaaucacaggcug

SEQ ID NO: 1948902 - RNA, 14 nt, Human
gagaaucacaggcu

SEQ ID NO: 1948903 - RNA, 15 nt, Human
gagaaugaaagggcc

SEQ ID NO: 1948904 - RNA, 23 nt, Human
gagaaugaaagggcccagagagg

SEQ ID NO: 1948905 - RNA, 13 nt, Human
gagaaugaacaaa

SEQ ID NO: 1948906 - RNA, 17 nt, Human
gagaaucucaacauguc

SEQ ID NO: 1948907 - RNA, 11 nt, Human
gagaaugaaca

SEQ ID NO: 1948908 - RNA, 17 nt, Human
gagaaugaacaaagacc

SEQ ID NO: 1948909 - RNA, 20 nt, Human
gagaccgugaagauacuuug

SEQ ID NO: 1948910 - RNA, 22 nt, Human
gagaccgugaagauacuuugua

SEQ ID NO: 1948911 - RNA, 14 nt, Human
gagacggaguccca

SEQ ID NO: 1948912 - RNA, 16 nt, Human
gagacggagucccacc

SEQ ID NO: 1948913 - RNA, 19 nt, Human
gagacggagucccaccuug

SEQ ID NO: 1948914 - RNA, 18 nt, Human
gagacgggggcagagagg

SEQ ID NO: 1948915 - RNA, 17 nt, Human
gcccaggagaaugcugc

SEQ ID NO: 1948916 - RNA, 11 nt, Human
gcccaggcagg

SEQ ID NO: 1948917 - RNA, 16 nt, Human
gcccaggauauauuuu

SEQ ID NO: 1948918 - RNA, 18 nt, Human
gcccaggauauauuuuau

SEQ ID NO: 1948919 - RNA, 11 nt, Human
gcccaggcccc

SEQ ID NO: 1948920 - RNA, 12 nt, Human
gcccaggccccu

SEQ ID NO: 1948921 - RNA, 20 nt, Human
gcccaggccccugccacccu

SEQ ID NO: 1948922 - RNA, 21 nt, Human
gcccaggccccugccacccug

SEQ ID NO: 1948923 - RNA, 22 nt, Human
gcccaggccccugccacccugg

SEQ ID NO: 1948924 - RNA, 11 nt, Human
gcccacuggcc

SEQ ID NO: 1948925 - RNA, 22 nt, Human
gcccacuguacuugcucuugau

SEQ ID NO: 1948926 - RNA, 20 nt, Human
gcccacuguacuugcucuug

SEQ ID NO: 1948927 - RNA, 15 nt, Human
gcccacuguacuugc

SEQ ID NO: 1948928 - RNA, 23 nt, Human
gcccacgcuggagugcagugagc

SEQ ID NO: 1948929 - RNA, 15 nt, Human
gccauugcuuaccuu

SEQ ID NO: 1948930 - RNA, 19 nt, Human
gcccacgcuggagugcagu

SEQ ID NO: 1948931 - RNA, 21 nt, Human
gcccacgcuggagugcaguga

SEQ ID NO: 1948932 - RNA, 23 nt, Human
gcccaggaaaggcuccaggagca

SEQ ID NO: 1948933 - RNA, 22 nt, Human
gcccaggaaaggcuccaggagc

SEQ ID NO: 1948934 - RNA, 24 nt, Human
gcccaggaaaggcuccaggagcag

SEQ ID NO: 1948935 - RNA, 16 nt, Human
gcccacuucccugggu

SEQ ID NO: 1948936 - RNA, 11 nt, Human
gcccacuuccc

SEQ ID NO: 1948937 - RNA, 15 nt, Human
gcccacuucccuggg

SEQ ID NO: 1948938 - RNA, 13 nt, Human
gcccacuucugcc

SEQ ID NO: 1948939 - RNA, 16 nt, Human
gcccacugugcguggg

SEQ ID NO: 1948940 - RNA, 23 nt, Human
gcccacugugcguggggcucccg

SEQ ID NO: 1948941 - RNA, 21 nt, Human
gcccacgcccccacuggugac

SEQ ID NO: 1948942 - RNA, 17 nt, Human
gcccacgcccccacugg

SEQ ID NO: 1948943 - RNA, 16 nt, Human
gcccacgcccccacug

SEQ ID NO: 1948944 - RNA, 15 nt, Human
gcccacgcccccacu

SEQ ID NO: 1948945 - RNA, 17 nt, Human
gccauugacuucuuccc

SEQ ID NO: 1948946 - RNA, 18 nt, Human
gcauuuagggaguauucu

SEQ ID NO: 1948947 - RNA, 19 nt, Human
gcauuuagggaguauucua

SEQ ID NO: 1948948 - RNA, 19 nt, Human
gcauuuaggccaugggaca

SEQ ID NO: 1948949 - RNA, 18 nt, Human
gcauuuacuuuguguuca

SEQ ID NO: 1948950 - RNA, 20 nt, Human
gccccaaaacucuccucugc

SEQ ID NO: 1948951 - RNA, 11 nt, Human
gccccaaaagg

SEQ ID NO: 1948952 - RNA, 21 nt, Human
gccccaaaacucuccucugcu

SEQ ID NO: 1948953 - RNA, 22 nt, Human
gccccaaauugucaccugcuuc

SEQ ID NO: 1948954 - RNA, 18 nt, Human
gcccccagcuuccagcag

SEQ ID NO: 1948955 - RNA, 19 nt, Human
gcccccagcuuccagcagg

SEQ ID NO: 1948956 - RNA, 12 nt, Human
gcccccagcuuc

SEQ ID NO: 1948957 - RNA, 15 nt, Human
gcccccucugcccug

SEQ ID NO: 1948958 - RNA, 16 nt, Human
gcccccucugcccugc

SEQ ID NO: 1948959 - RNA, 17 nt, Human
gcccccucuucccuggu

SEQ ID NO: 1948960 - RNA, 17 nt, Human
gcccccucugcccugcg

SEQ ID NO: 1948961 - RNA, 12 nt, Human
gccccugcuggu

SEQ ID NO: 1948962 - RNA, 15 nt, Human
gccccuggcagcccc

SEQ ID NO: 1948963 - RNA, 12 nt, Human
gccccuggcagc

SEQ ID NO: 1948964 - RNA, 15 nt, Human
gccccugcugguuca

SEQ ID NO: 1948965 - RNA, 16 nt, Human
gccccugcugguucag

SEQ ID NO: 1948966 - RNA, 22 nt, Human
gccucauguccacugguucuuc

SEQ ID NO: 1948967 - RNA, 19 nt, Human
gccucaugucaaauauuua

SEQ ID NO: 1948968 - RNA, 19 nt, Human
gccucaugcuaagacucag

SEQ ID NO: 1948969 - RNA, 13 nt, Human
gccuccauccuga

SEQ ID NO: 1948970 - RNA, 14 nt, Human
gccuccauccugag

SEQ ID NO: 1948971 - RNA, 15 nt, Human
gccuccauccugagg

SEQ ID NO: 1948972 - RNA, 19 nt, Human
gccuccugaguagcuggga

SEQ ID NO: 1948973 - RNA, 14 nt, Human
gccucugggacugg

SEQ ID NO: 1948974 - RNA, 16 nt, Human
gccucgaacuggcugc

SEQ ID NO: 1948975 - RNA, 22 nt, Human
gccuccuuugugaggaagccgc

SEQ ID NO: 1948976 - RNA, 13 nt, Human
gccucgaacuggc

SEQ ID NO: 1948977 - RNA, 17 nt, Human
gccuacaggagugagca

SEQ ID NO: 1948978 - RNA, 12 nt, Human
gccuagcauacg

SEQ ID NO: 1948979 - RNA, 19 nt, Human
gccuagcauacguacacau

SEQ ID NO: 1948980 - RNA, 17 nt, Human
gccccuggcagccccug

SEQ ID NO: 1948981 - RNA, 16 nt, Human
gccccuggcagccccu

SEQ ID NO: 1948982 - RNA, 21 nt, Human
gccccugcugguucaggguug

SEQ ID NO: 1948983 - RNA, 16 nt, Human
gccuacaggagugagc

SEQ ID NO: 1948984 - RNA, 22 nt, Human
gccggcaauaaaagcccaggag

SEQ ID NO: 1948985 - RNA, 23 nt, Human
gccggcaauaaaagcccaggagc

SEQ ID NO: 1948986 - RNA, 18 nt, Human
gccggcaauaaaagccca

SEQ ID NO: 1948987 - RNA, 19 nt, Human
gccggcaauaaaagcccag

SEQ ID NO: 1948988 - RNA, 20 nt, Human
gccggcaauaaaagcccagg

SEQ ID NO: 1948989 - RNA, 21 nt, Human
gccggcaauaaaagcccagga

SEQ ID NO: 1948990 - RNA, 12 nt, Human
gccgcuccagag

SEQ ID NO: 1948991 - RNA, 13 nt, Human
gccgcuccagagu

SEQ ID NO: 1948992 - RNA, 16 nt, Human
gccgcuccagagucag

SEQ ID NO: 1948993 - RNA, 22 nt, Human
gccggacacccgacuccagucc

SEQ ID NO: 1948994 - RNA, 14 nt, Human
gcccuuccucucca

SEQ ID NO: 1948995 - RNA, 15 nt, Human
gcccuuccucuccac

SEQ ID NO: 1948996 - RNA, 13 nt, Human
gccgcuagguaga

SEQ ID NO: 1948997 - RNA, 23 nt, Human
gccgcuagguagagucugagggc

SEQ ID NO: 1948998 - RNA, 11 nt, Human
gccgcuccaga

SEQ ID NO: 1948999 - RNA, 22 nt, Human
gcccuuccaugucgccucugca

SEQ ID NO: 1949000 - RNA, 12 nt, Human
gcccuuccucuc

SEQ ID NO: 1949001 - RNA, 12 nt, Human
gcccuuccaugu

SEQ ID NO: 1949002 - RNA, 21 nt, Human
gcccuuccaugucgccucugc

SEQ ID NO: 1949003 - RNA, 22 nt, Human
gcccuuaccugccaggaagcca

SEQ ID NO: 1949004 - RNA, 21 nt, Human
gcccuuaccugccaggaagcc

SEQ ID NO: 1949005 - RNA, 17 nt, Human
gcccugugggcccccaa

SEQ ID NO: 1949006 - RNA, 16 nt, Human
gcccugugggccccca

SEQ ID NO: 1949007 - RNA, 19 nt, Human
gcccuuagcagggaaacag

SEQ ID NO: 1949008 - RNA, 23 nt, Human
gcccuuaccugccaggaagccag

SEQ ID NO: 1949009 - RNA, 21 nt, Human
gcccugugggcccccaaaugg

SEQ ID NO: 1949010 - RNA, 15 nt, Human
gcccugcccaccugg

SEQ ID NO: 1949011 - RNA, 14 nt, Human
gcccugcccaccug

SEQ ID NO: 1949012 - RNA, 20 nt, Human
gcccugcgggucacaggagg

SEQ ID NO: 1949013 - RNA, 20 nt, Human
gcucagggccuggcucaggu

SEQ ID NO: 1949014 - RNA, 19 nt, Human
gcucagggccuggcucagg

SEQ ID NO: 1949015 - RNA, 18 nt, Human
gcucagggccuggcucag

SEQ ID NO: 1949016 - RNA, 13 nt, Human
gcucaggaguuug

SEQ ID NO: 1949017 - RNA, 23 nt, Human
gcucaggagcccugggaggcucu

SEQ ID NO: 1949018 - RNA, 22 nt, Human
gcucaggagcccugggaggcuc

SEQ ID NO: 1949019 - RNA, 21 nt, Human
gcucacugcuaagaauauuug

SEQ ID NO: 1949020 - RNA, 17 nt, Human
gcucacuguggugucug

SEQ ID NO: 1949021 - RNA, 18 nt, Human
gcucacuguggugucugu

SEQ ID NO: 1949022 - RNA, 19 nt, Human
gcucacuguggugucugug

SEQ ID NO: 1949023 - RNA, 16 nt, Human
gcucagagcaguguuu

SEQ ID NO: 1949024 - RNA, 15 nt, Human
gcucagaaccacagc

SEQ ID NO: 1949025 - RNA, 17 nt, Human
gcucagaaccacagcaa

SEQ ID NO: 1949026 - RNA, 21 nt, Human
gcuaggaauuguguuuauaau

SEQ ID NO: 1949027 - RNA, 18 nt, Human
gcuaggaauauagauuaa

SEQ ID NO: 1949028 - RNA, 16 nt, Human
gcuaggaaugaaaucu

SEQ ID NO: 1949029 - RNA, 22 nt, Human
gcuaggaccccuccaugugggc

SEQ ID NO: 1949030 - RNA, 20 nt, Human
gcuaggaccccuccaugugg

SEQ ID NO: 1949031 - RNA, 18 nt, Human
gcuauucaguaauaacuc

SEQ ID NO: 1949032 - RNA, 23 nt, Human
gcuauuacgaaguucaagaucaa

SEQ ID NO: 1949033 - RNA, 19 nt, Human
gcuaguugaauacuugaac

SEQ ID NO: 1949034 - RNA, 22 nt, Human
gcuaguugaauacuugaaccau

SEQ ID NO: 1949035 - RNA, 14 nt, Human
gcuaguugggcuuc

SEQ ID NO: 1949036 - RNA, 16 nt, Human
gcuaguugggcuuccu

SEQ ID NO: 1949037 - RNA, 19 nt, Human
gcuaguguucuuucucuuu

SEQ ID NO: 1949038 - RNA, 13 nt, Human
gcuaguugaauac

SEQ ID NO: 1949039 - RNA, 15 nt, Human
gcuaguugaauacuu

SEQ ID NO: 1949040 - RNA, 16 nt, Human
gcuaguugaauacuug

SEQ ID NO: 1949041 - RNA, 18 nt, Human
gcuaguugaauacuugaa

SEQ ID NO: 1949042 - RNA, 18 nt, Human
gcuaagugauccucccac

SEQ ID NO: 1949043 - RNA, 22 nt, Human
gcuaagugauccucccaccuca

SEQ ID NO: 1949044 - RNA, 18 nt, Human
gcuaaguaaaucucuucu

SEQ ID NO: 1949045 - RNA, 19 nt, Human
gcuaaguaaaucucuucug

SEQ ID NO: 1949046 - RNA, 15 nt, Human
gcgcaggcuggcccu

SEQ ID NO: 1949047 - RNA, 16 nt, Human
gcgcaggcuggcccug

SEQ ID NO: 1949048 - RNA, 17 nt, Human
gcgcagcauccgaccag

SEQ ID NO: 1949049 - RNA, 21 nt, Human
gcgcagcauauucaggaagcu

SEQ ID NO: 1949050 - RNA, 14 nt, Human
gcgcaggcuggccc

SEQ ID NO: 1949051 - RNA, 23 nt, Human
gcgauucuucugcuucagccucc

SEQ ID NO: 1949052 - RNA, 22 nt, Human
gccuugaccauucuccaccugc

SEQ ID NO: 1949053 - RNA, 16 nt, Human
gccuugaccauucucc

SEQ ID NO: 1949054 - RNA, 23 nt, Human
gccuugaacuuugaccucugcag

SEQ ID NO: 1949055 - RNA, 23 nt, Human
gccuugaccauucuccaccugcc

SEQ ID NO: 1949056 - RNA, 20 nt, Human
gccuugauucccuuguuauu

SEQ ID NO: 1949057 - RNA, 22 nt, Human
gcgauucuucugcuucagccuc

SEQ ID NO: 1949058 - RNA, 15 nt, Human
gccuucuuuuucugg

SEQ ID NO: 1949059 - RNA, 16 nt, Human
gccuucuuuuucugga

SEQ ID NO: 1949060 - RNA, 17 nt, Human
gccuucuuuuucuggac

SEQ ID NO: 1949061 - RNA, 14 nt, Human
gccuugaacuuuga

SEQ ID NO: 1949062 - RNA, 19 nt, Human
gccuucgguacccaccaca

SEQ ID NO: 1949063 - RNA, 18 nt, Human
gccuucgguacccaccac

SEQ ID NO: 1949064 - RNA, 15 nt, Human
gccuucucugaagga

SEQ ID NO: 1949065 - RNA, 16 nt, Human
gccuucucugaaggac

SEQ ID NO: 1949066 - RNA, 15 nt, Human
gccuguucagcucca

SEQ ID NO: 1949067 - RNA, 14 nt, Human
gccuguucagcucc

SEQ ID NO: 1949068 - RNA, 16 nt, Human
gccuguucagcuccag

SEQ ID NO: 1949069 - RNA, 17 nt, Human
gccuguucagcuccagc

SEQ ID NO: 1949070 - RNA, 19 nt, Human
gccugugccucugggacug

SEQ ID NO: 1949071 - RNA, 15 nt, Human
gccugggcaauaaag

SEQ ID NO: 1949072 - RNA, 22 nt, Human
gccugggcaauaaagugagacc

SEQ ID NO: 1949073 - RNA, 11 nt, Human
gccugggcaga

SEQ ID NO: 1949074 - RNA, 23 nt, Human
gccugggaucccucauccucaua

SEQ ID NO: 1949075 - RNA, 12 nt, Human
gccuggcucccu

SEQ ID NO: 1949076 - RNA, 16 nt, Human
gccuggcucccucacu

SEQ ID NO: 1949077 - RNA, 19 nt, Human
gccuggcucccucacucuc

SEQ ID NO: 1949078 - RNA, 21 nt, Human
gccuggcucccucacucucag

SEQ ID NO: 1949079 - RNA, 22 nt, Human
gccuggcucccucacucucagg

SEQ ID NO: 1949080 - RNA, 23 nt, Human
gccuggcucccucacucucagga

SEQ ID NO: 1949081 - RNA, 16 nt, Human
gcggccuuuggcuuca

SEQ ID NO: 1949082 - RNA, 18 nt, Human
gcggcucaagcccaggag

SEQ ID NO: 1949083 - RNA, 15 nt, Human
gcggcuggacuugga

SEQ ID NO: 1949084 - RNA, 16 nt, Human
gcggcuggacuuggag

SEQ ID NO: 1949085 - RNA, 15 nt, Human
gcggcuggcagccca

SEQ ID NO: 1949086 - RNA, 19 nt, Human
gcgggaauggcagcugcca

SEQ ID NO: 1949087 - RNA, 15 nt, Human
gcguguucucagagg

SEQ ID NO: 1949088 - RNA, 17 nt, Human
gcguucaccagugaccu

SEQ ID NO: 1949089 - RNA, 17 nt, Human
gcuguaucccaugagcc

SEQ ID NO: 1949090 - RNA, 19 nt, Human
gcuguaucccaugagccuc

SEQ ID NO: 1949091 - RNA, 14 nt, Human
gcugugcugcccug

SEQ ID NO: 1949092 - RNA, 18 nt, Human
gcugugcucuggacaggc

SEQ ID NO: 1949093 - RNA, 15 nt, Human
gcugugcucuggaca

SEQ ID NO: 1949094 - RNA, 16 nt, Human
gcugugcucuggacag

SEQ ID NO: 1949095 - RNA, 16 nt, Human
gcugugccucugccug

SEQ ID NO: 1949096 - RNA, 14 nt, Human
gcugugccucugcc

SEQ ID NO: 1949097 - RNA, 15 nt, Human
gcugugccucugccu

SEQ ID NO: 1949098 - RNA, 13 nt, Human
gcugugcucugga

SEQ ID NO: 1949099 - RNA, 16 nt, Human
gcugugcugcccugcc

SEQ ID NO: 1949100 - RNA, 15 nt, Human
gcugugcugcccugc

SEQ ID NO: 1949101 - RNA, 17 nt, Human
gcugugcugcccugccc

SEQ ID NO: 1949102 - RNA, 15 nt, Human
gcuguuggcuggggg

SEQ ID NO: 1949103 - RNA, 16 nt, Human
gcuguuggcugggggc

SEQ ID NO: 1949104 - RNA, 20 nt, Human
gcuguuggcugggggccuca

SEQ ID NO: 1949105 - RNA, 17 nt, Human
gcuguugucucuucucc

SEQ ID NO: 1949106 - RNA, 16 nt, Human
gcuguugucucuucuc

SEQ ID NO: 1949107 - RNA, 21 nt, Human
gcuggguucuacccaggugcu

SEQ ID NO: 1949108 - RNA, 20 nt, Human
gcuggguucuacccaggugc

SEQ ID NO: 1949109 - RNA, 14 nt, Human
gcugguaaaaugaa

SEQ ID NO: 1949110 - RNA, 16 nt, Human
gcugguaaaaugaaga

SEQ ID NO: 1949111 - RNA, 18 nt, Human
gcugguaaaaugaagaau

SEQ ID NO: 1949112 - RNA, 23 nt, Human
gcugguaaaaugaagaauuuaaa

SEQ ID NO: 1949113 - RNA, 17 nt, Human
gcuggguucuacccagg

SEQ ID NO: 1949114 - RNA, 18 nt, Human
gcuggguucuacccaggu

SEQ ID NO: 1949115 - RNA, 23 nt, Human
gcugggguggggaccucaggccu

SEQ ID NO: 1949116 - RNA, 22 nt, Human
gcugggguggggaccucaggcc

SEQ ID NO: 1949117 - RNA, 19 nt, Human
gcugggguggggaccucag

SEQ ID NO: 1949118 - RNA, 17 nt, Human
gcugggguggggaccuc

SEQ ID NO: 1949119 - RNA, 20 nt, Human
gcugggccccugccucucug

SEQ ID NO: 1949120 - RNA, 18 nt, Human
gcugggccccugccucuc

SEQ ID NO: 1949121 - RNA, 14 nt, Human
gcugggccccugcc

SEQ ID NO: 1949122 - RNA, 13 nt, Human
gcugggccccugc

SEQ ID NO: 1949123 - RNA, 12 nt, Human
gcugggccccug

SEQ ID NO: 1949124 - RNA, 20 nt, Human
gcugggcccacccaagcagg

SEQ ID NO: 1949125 - RNA, 20 nt, Human
gcugggaauaagugccagga

SEQ ID NO: 1949126 - RNA, 14 nt, Human
gcugggcagguugg

SEQ ID NO: 1949127 - RNA, 20 nt, Human
gcuggcuguuggcugggggc

SEQ ID NO: 1949128 - RNA, 23 nt, Human
gcuggcuguuggcugggggccuc

SEQ ID NO: 1949129 - RNA, 12 nt, Human
gcugcugaaggc

SEQ ID NO: 1949130 - RNA, 13 nt, Human
gcuggacuuggag

SEQ ID NO: 1949131 - RNA, 14 nt, Human
gcuggcgugcagug

SEQ ID NO: 1949132 - RNA, 15 nt, Human
gcuggagaggagccc

SEQ ID NO: 1949133 - RNA, 14 nt, Human
gcuggagaaaaaua

SEQ ID NO: 1949134 - RNA, 15 nt, Human
gcuggcgugcagugg

SEQ ID NO: 1949135 - RNA, 18 nt, Human
gcuggcgugcaguggugc

SEQ ID NO: 1949136 - RNA, 16 nt, Human
gcuggagaggagcccu

SEQ ID NO: 1949137 - RNA, 17 nt, Human
gcuggagaggagcccug

SEQ ID NO: 1949138 - RNA, 18 nt, Human
gcuggagaggagcccugc

SEQ ID NO: 1949139 - RNA, 18 nt, Human
gcuggcuguuggcugggg

SEQ ID NO: 1949140 - RNA, 19 nt, Human
gcuggcuguuggcuggggg

SEQ ID NO: 1949141 - RNA, 14 nt, Human
gcuggcugccuuag

SEQ ID NO: 1949142 - RNA, 20 nt, Human
gcuggcugccuuagaaccuu

SEQ ID NO: 1949143 - RNA, 11 nt, Human
gcuggcugccu

SEQ ID NO: 1949144 - RNA, 14 nt, Human
gcugaggugggagg

SEQ ID NO: 1949145 - RNA, 23 nt, Human
gcugagggugagugggugaauaa

SEQ ID NO: 1949146 - RNA, 16 nt, Human
gcugagaggagagaga

SEQ ID NO: 1949147 - RNA, 13 nt, Human
gcugcaccggcug

SEQ ID NO: 1949148 - RNA, 19 nt, Human
gcugcacccucaggcaggu

SEQ ID NO: 1949149 - RNA, 18 nt, Human
gcugcacccucaggcagg

SEQ ID NO: 1949150 - RNA, 15 nt, Human
gcugcagccaggcca

SEQ ID NO: 1949151 - RNA, 20 nt, Human
gcugcagauaaguggccuug

SEQ ID NO: 1949152 - RNA, 22 nt, Human
gcugcagauacuacugaccaga

SEQ ID NO: 1949153 - RNA, 23 nt, Human
gcugcagccaggccacuggcccc

SEQ ID NO: 1949154 - RNA, 19 nt, Human
gcugccccuggcagccccu

SEQ ID NO: 1949155 - RNA, 18 nt, Human
gcugccccuggcagcccc

SEQ ID NO: 1949156 - RNA, 20 nt, Human
gcugccccuggcagccccug

SEQ ID NO: 1949157 - RNA, 17 nt, Human
gcugccuaggauucaca

SEQ ID NO: 1949158 - RNA, 21 nt, Human
gcugccugggaucccucaucc

SEQ ID NO: 1949159 - RNA, 17 nt, Human
gcugccuguucagcucc

SEQ ID NO: 1949160 - RNA, 23 nt, Human
gcugcucuugaacuccugaccuc

SEQ ID NO: 1949161 - RNA, 12 nt, Human
gcugccuguuca

SEQ ID NO: 1949162 - RNA, 13 nt, Human
gcugccuguucag

SEQ ID NO: 1949163 - RNA, 20 nt, Human
gcugccugggaucccucauc

SEQ ID NO: 1949164 - RNA, 16 nt, Human
gcugccugaaaaucaa

SEQ ID NO: 1949165 - RNA, 16 nt, Human
gcugccucucccauca

SEQ ID NO: 1949166 - RNA, 22 nt, Human
gcugccucggauccccuuccua

SEQ ID NO: 1949167 - RNA, 19 nt, Human
gcugccucggauccccuuc

SEQ ID NO: 1949168 - RNA, 20 nt, Human
gcugccucggauccccuucc

SEQ ID NO: 1949169 - RNA, 21 nt, Human
gcugccucggauccccuuccu

SEQ ID NO: 1949170 - RNA, 21 nt, Human
gcugccuccccucuccuuccu

SEQ ID NO: 1949171 - RNA, 13 nt, Human
gcugccucaugcu

SEQ ID NO: 1949172 - RNA, 23 nt, Human
ggaaaucaccgaaaacguggcug

SEQ ID NO: 1949173 - RNA, 16 nt, Human
ggaaauccaggguggu

SEQ ID NO: 1949174 - RNA, 21 nt, Human
ggaagccagcaggcucucagg

SEQ ID NO: 1949175 - RNA, 23 nt, Human
ggaagccagcaggcucucaggcc

SEQ ID NO: 1949176 - RNA, 22 nt, Human
ggaagccagcaggcucucaggc

SEQ ID NO: 1949177 - RNA, 18 nt, Human
ggaagccgcuggggccag

SEQ ID NO: 1949178 - RNA, 21 nt, Human
ggacauccugucaucugagaa

SEQ ID NO: 1949179 - RNA, 20 nt, Human
ggacauccccugcuggccgg

SEQ ID NO: 1949180 - RNA, 14 nt, Human
ggacauggacaagg

SEQ ID NO: 1949181 - RNA, 13 nt, Human
ggacauggacaag

SEQ ID NO: 1949182 - RNA, 20 nt, Human
ggacauccccccgccaaaag

SEQ ID NO: 1949183 - RNA, 14 nt, Human
ggacaucagcuggu

SEQ ID NO: 1949184 - RNA, 14 nt, Human
ggacauccccugcu

SEQ ID NO: 1949185 - RNA, 22 nt, Human
ggacaguggagugcaaaaggcu

SEQ ID NO: 1949186 - RNA, 19 nt, Human
ggacaguauuuguggggag

SEQ ID NO: 1949187 - RNA, 15 nt, Human
ggacagggguuccuu

SEQ ID NO: 1949188 - RNA, 17 nt, Human
ggacaggggcaggagga

SEQ ID NO: 1949189 - RNA, 18 nt, Human
ggacaguauuugugggga

SEQ ID NO: 1949190 - RNA, 15 nt, Human
ggacagggcauggcc

SEQ ID NO: 1949191 - RNA, 22 nt, Human
ggacagggcauggccagguggc

SEQ ID NO: 1949192 - RNA, 17 nt, Human
ggacagggaggugaccc

SEQ ID NO: 1949193 - RNA, 23 nt, Human
ggacacccugugauggggcccug

SEQ ID NO: 1949194 - RNA, 13 nt, Human
ggacacccuguga

SEQ ID NO: 1949195 - RNA, 17 nt, Human
ggaagcucagggccugg

SEQ ID NO: 1949196 - RNA, 16 nt, Human
ggaagcucagggccug

SEQ ID NO: 1949197 - RNA, 15 nt, Human
ggaauaccugucccc

SEQ ID NO: 1949198 - RNA, 21 nt, Human
ggaagcucagggccuggcuca

SEQ ID NO: 1949199 - RNA, 22 nt, Human
ggaagcucagggccuggcucag

SEQ ID NO: 1949200 - RNA, 19 nt, Human
ggaauacucuuauaucuau

SEQ ID NO: 1949201 - RNA, 19 nt, Human
ggaauaccugucccccuga

SEQ ID NO: 1949202 - RNA, 16 nt, Human
ggaauaccuguccccc

SEQ ID NO: 1949203 - RNA, 16 nt, Human
ggaauauauaaccagu

SEQ ID NO: 1949204 - RNA, 17 nt, Human
ggaauaugggagaaaua

SEQ ID NO: 1949205 - RNA, 15 nt, Human
ggaauauuauauuug

SEQ ID NO: 1949206 - RNA, 19 nt, Human
ggaauauuauauuuggaug

SEQ ID NO: 1949207 - RNA, 12 nt, Human
ggacacagcucu

SEQ ID NO: 1949208 - RNA, 19 nt, Human
ggaaugaaugucaguguga

SEQ ID NO: 1949209 - RNA, 18 nt, Human
ggaaugaagcaaugcuuc

SEQ ID NO: 1949210 - RNA, 21 nt, Human
ggaauauuauauuuggaugca

SEQ ID NO: 1949211 - RNA, 12 nt, Human
ggacacccugug

SEQ ID NO: 1949212 - RNA, 13 nt, Human
ggacacagcucuu

SEQ ID NO: 1949213 - RNA, 14 nt, Human
gcuuuggaaguuuu

SEQ ID NO: 1949214 - RNA, 16 nt, Human
gcuuugccaugugcuu

SEQ ID NO: 1949215 - RNA, 21 nt, Human
gcuuggggaccagagcugcca

SEQ ID NO: 1949216 - RNA, 20 nt, Human
gcuuggggaccagagcugcc

SEQ ID NO: 1949217 - RNA, 18 nt, Human
gcuuggggaccagagcug

SEQ ID NO: 1949218 - RNA, 17 nt, Human
gcuuggggaccagagcu

SEQ ID NO: 1949219 - RNA, 22 nt, Human
gcuuggggaccagagcugccac

SEQ ID NO: 1949220 - RNA, 13 nt, Human
gcuuuccugugcc

SEQ ID NO: 1949221 - RNA, 13 nt, Human
gcuuucuacccag

SEQ ID NO: 1949222 - RNA, 14 nt, Human
gcuuuccugugcca

SEQ ID NO: 1949223 - RNA, 17 nt, Human
gcuuuccugugccaggu

SEQ ID NO: 1949224 - RNA, 18 nt, Human
gcuuuccugugccaggug

SEQ ID NO: 1949225 - RNA, 18 nt, Human
gcuuuccuguuucucagu

SEQ ID NO: 1949226 - RNA, 19 nt, Human
gcuuucuacccagcgagcc

SEQ ID NO: 1949227 - RNA, 22 nt, Human
gcuuucuacccagcgagcccug

SEQ ID NO: 1949228 - RNA, 13 nt, Human
gcuuugcacuuuu

SEQ ID NO: 1949229 - RNA, 23 nt, Human
gcuuucuacccagcgagcccugg

SEQ ID NO: 1949230 - RNA, 16 nt, Human
gcuuggggaccagagc

SEQ ID NO: 1949231 - RNA, 23 nt, Human
gcuugggcuucauccuccucaga

SEQ ID NO: 1949232 - RNA, 19 nt, Human
gcuugaccgugaggccaga

SEQ ID NO: 1949233 - RNA, 18 nt, Human
gcuugaccgugaggccag

SEQ ID NO: 1949234 - RNA, 17 nt, Human
gcuugaccgugaggcca

SEQ ID NO: 1949235 - RNA, 23 nt, Human
gcuucuucagagacuccugcagg

SEQ ID NO: 1949236 - RNA, 16 nt, Human
gcuugaccgugaggcc

SEQ ID NO: 1949237 - RNA, 21 nt, Human
gcuucuucagagacuccugca

SEQ ID NO: 1949238 - RNA, 19 nt, Human
gcuucuucagagacuccug

SEQ ID NO: 1949239 - RNA, 17 nt, Human
gcuuaacuucacauauu

SEQ ID NO: 1949240 - RNA, 17 nt, Human
gcuguuuggguuuccaa

SEQ ID NO: 1949241 - RNA, 12 nt, Human
gcuuaagaaaaa

SEQ ID NO: 1949242 - RNA, 13 nt, Human
gcuuaagaaaaaa

SEQ ID NO: 1949243 - RNA, 16 nt, Human
gcuucuucagagacuc

SEQ ID NO: 1949244 - RNA, 19 nt, Human
gcuguuuaucccuuaagaa

SEQ ID NO: 1949245 - RNA, 16 nt, Human
gcuuaacuucacauau

SEQ ID NO: 1949246 - RNA, 17 nt, Human
gcuuuucuuucuaccaa

SEQ ID NO: 1949247 - RNA, 15 nt, Human
gcuuuuccugggaca

SEQ ID NO: 1949248 - RNA, 22 nt, Human
gcuuuuccucaaagggagagag

SEQ ID NO: 1949249 - RNA, 21 nt, Human
gcuuuucccuuuuuuuaagua

SEQ ID NO: 1949250 - RNA, 20 nt, Human
gcuuuucccuuuuuuuaagu

SEQ ID NO: 1949251 - RNA, 14 nt, Human
ggaaagaggcucug

SEQ ID NO: 1949252 - RNA, 20 nt, Human
ggaaagacuuuuccaacccu

SEQ ID NO: 1949253 - RNA, 21 nt, Human
ggaaacuugauuugagauuuu

SEQ ID NO: 1949254 - RNA, 17 nt, Human
ggaaagaguaggaagac

SEQ ID NO: 1949255 - RNA, 16 nt, Human
ggaaagaguaggaaga

SEQ ID NO: 1949256 - RNA, 19 nt, Human
ggaaagcaaaggagauugg

SEQ ID NO: 1949257 - RNA, 14 nt, Human
ggaaagcauuuaaa

SEQ ID NO: 1949258 - RNA, 12 nt, Human
ggaaagcacaga

SEQ ID NO: 1949259 - RNA, 14 nt, Human
ggaaagcacagagg

SEQ ID NO: 1949260 - RNA, 21 nt, Human
ggaaagcacagaggccuccug

SEQ ID NO: 1949261 - RNA, 21 nt, Human
ggaaacuaggugcauauuuau

SEQ ID NO: 1949262 - RNA, 15 nt, Human
ggaaacccagcucug

SEQ ID NO: 1949263 - RNA, 13 nt, Human
ggaaacagaggcu

SEQ ID NO: 1949264 - RNA, 20 nt, Human
ggaaacagcuaaugggacac

SEQ ID NO: 1949265 - RNA, 14 nt, Human
gcuuuuguuuugcu

SEQ ID NO: 1949266 - RNA, 15 nt, Human
gcuuuuuaauauuga

SEQ ID NO: 1949267 - RNA, 13 nt, Human
gcuuuugugcauu

SEQ ID NO: 1949268 - RNA, 19 nt, Human
gcuuuugugcauuaucuag

SEQ ID NO: 1949269 - RNA, 16 nt, Human
ggaaaaaauaacaaug

SEQ ID NO: 1949270 - RNA, 20 nt, Human
gcuuuuuuugaaacuuugag

SEQ ID NO: 1949271 - RNA, 16 nt, Human
gcuuuuguuuugcuuu

SEQ ID NO: 1949272 - RNA, 21 nt, Human
gcuuuuuuugaaacuuugaga

SEQ ID NO: 1949273 - RNA, 20 nt, Human
gcuuuuuuuuuuuaauuuug

SEQ ID NO: 1949274 - RNA, 13 nt, Human
ggcucacugcagc

SEQ ID NO: 1949275 - RNA, 14 nt, Human
ggcucacugcagcc

SEQ ID NO: 1949276 - RNA, 15 nt, Human
ggcucacugcagccu

SEQ ID NO: 1949277 - RNA, 14 nt, Human
ggcugacugggcca

SEQ ID NO: 1949278 - RNA, 16 nt, Human
ggcugacugggccagg

SEQ ID NO: 1949279 - RNA, 12 nt, Human
ggcugcccuggu

SEQ ID NO: 1949280 - RNA, 10 nt, Human
ggcugcccuu

SEQ ID NO: 1949281 - RNA, 11 nt, Human
ggcugcccuuu

SEQ ID NO: 1949282 - RNA, 14 nt, Human
ggcugcccuuucug

SEQ ID NO: 1949283 - RNA, 18 nt, Human
ggcugcccuuucugggca

SEQ ID NO: 1949284 - RNA, 20 nt, Human
ggcucuugaacugagcuugg

SEQ ID NO: 1949285 - RNA, 18 nt, Human
ggcucuugaacugagcuu

SEQ ID NO: 1949286 - RNA, 19 nt, Human
ggcucuugaacugagcuug

SEQ ID NO: 1949287 - RNA, 12 nt, Human
ggcucuacacau

SEQ ID NO: 1949288 - RNA, 14 nt, Human
ggcucuacacauau

SEQ ID NO: 1949289 - RNA, 18 nt, Human
ggcucuuccaggcuggga

SEQ ID NO: 1949290 - RNA, 17 nt, Human
ggcucuuccaggcuggg

SEQ ID NO: 1949291 - RNA, 15 nt, Human
ggcucuuccaggcug

SEQ ID NO: 1949292 - RNA, 13 nt, Human
ggcucuaauuucc

SEQ ID NO: 1949293 - RNA, 14 nt, Human
ggcucuuccaggcu

SEQ ID NO: 1949294 - RNA, 13 nt, Human
ggcucccuuccca

SEQ ID NO: 1949295 - RNA, 21 nt, Human
ggcucccgccuccaaccccuc

SEQ ID NO: 1949296 - RNA, 15 nt, Human
ggcucccgccuccaa

SEQ ID NO: 1949297 - RNA, 17 nt, Human
ggcucccgccuccaacc

SEQ ID NO: 1949298 - RNA, 20 nt, Human
ggcucccgccuccaaccccu

SEQ ID NO: 1949299 - RNA, 18 nt, Human
ggcucccucacucucagg

SEQ ID NO: 1949300 - RNA, 19 nt, Human
ggcucccucacucucagga

SEQ ID NO: 1949301 - RNA, 22 nt, Human
ggcucccguguaucuggacacu

SEQ ID NO: 1949302 - RNA, 15 nt, Human
ggcucccucacucuc

SEQ ID NO: 1949303 - RNA, 16 nt, Human
ggcucccucacucuca

SEQ ID NO: 1949304 - RNA, 17 nt, Human
ggcucccucacucucag

SEQ ID NO: 1949305 - RNA, 15 nt, Human
ggcuggccuggcccc

SEQ ID NO: 1949306 - RNA, 14 nt, Human
ggcuggccuggccc

SEQ ID NO: 1949307 - RNA, 13 nt, Human
ggcuggccuggcc

SEQ ID NO: 1949308 - RNA, 17 nt, Human
ggcuggcccugcccugg

SEQ ID NO: 1949309 - RNA, 11 nt, Human
aaaaaaagaca

SEQ ID NO: 1949310 - RNA, 11 nt, Human
aaaaaaagaaa

SEQ ID NO: 1949311 - RNA, 10 nt, Human
aaaaaaagaa

SEQ ID NO: 1949312 - RNA, 9 nt, Human
aaaaaaaga

SEQ ID NO: 1949313 - RNA, 12 nt, Human
aaaaaaacucuu

SEQ ID NO: 1949314 - RNA, 11 nt, Human
aaaaaacucuu

SEQ ID NO: 1949315 - RNA, 9 nt, Human
aaaaaagaa

SEQ ID NO: 1949316 - RNA, 14 nt, Human
aaaaagcaguucuu

SEQ ID NO: 1949317 - RNA, 22 nt, Human
aaaaaacugcugacuguuuucu

SEQ ID NO: 1949318 - RNA, 13 nt, Human
aaaaaaaugcuga

SEQ ID NO: 1949319 - RNA, 12 nt, Human
aaaaaaaguugu

SEQ ID NO: 1949320 - RNA, 14 nt, Human
aaaaaggaggaaga

SEQ ID NO: 1949321 - RNA, 12 nt, Human
aaaaaggcagga

SEQ ID NO: 1949322 - RNA, 21 nt, Human
aaaaaggaugcacagaguugu

SEQ ID NO: 1949323 - RNA, 23 nt, Human
aaaaaguuguaugaucugugccu

SEQ ID NO: 1949324 - RNA, 21 nt, Human
aaaaaguuguaugaucugugc

SEQ ID NO: 1949325 - RNA, 14 nt, Human
aaaaauaaaaaaca

SEQ ID NO: 1949326 - RNA, 22 nt, Human
ggcuggguucuacccaggugcu

SEQ ID NO: 1949327 - RNA, 14 nt, Human
ggcuggguuggagg

SEQ ID NO: 1949328 - RNA, 13 nt, Human
aaaaauacaaaaa

SEQ ID NO: 1949329 - RNA, 20 nt, Human
aaaaaggcuuauaaaacaga

SEQ ID NO: 1949330 - RNA, 17 nt, Human
ggccucccacagacuca

SEQ ID NO: 1949331 - RNA, 19 nt, Human
ggccccugccucucugcag

SEQ ID NO: 1949332 - RNA, 18 nt, Human
ggccccugccucucugca

SEQ ID NO: 1949333 - RNA, 17 nt, Human
ggccccugccucucugc

SEQ ID NO: 1949334 - RNA, 13 nt, Human
ggccccugccucu

SEQ ID NO: 1949335 - RNA, 21 nt, Human
ggccccugccucucugcaggu

SEQ ID NO: 1949336 - RNA, 22 nt, Human
ggccagagggagugacagaggc

SEQ ID NO: 1949337 - RNA, 15 nt, Human
ggccagaugcaccag

SEQ ID NO: 1949338 - RNA, 16 nt, Human
ggccagaugcaccagc

SEQ ID NO: 1949339 - RNA, 22 nt, Human
ggccucccaacucaccccagcc

SEQ ID NO: 1949340 - RNA, 20 nt, Human
ggccucccaacucaccccag

SEQ ID NO: 1949341 - RNA, 16 nt, Human
ggccucccacagacuc

SEQ ID NO: 1949342 - RNA, 14 nt, Human
ggccucccacagac

SEQ ID NO: 1949343 - RNA, 23 nt, Human
ggccucccaacucaccccagccc

SEQ ID NO: 1949344 - RNA, 19 nt, Human
ggccucccaacucacccca

SEQ ID NO: 1949345 - RNA, 18 nt, Human
ggccucccaacucacccc

SEQ ID NO: 1949346 - RNA, 17 nt, Human
ggccucccaacucaccc

SEQ ID NO: 1949347 - RNA, 13 nt, Human
ggccucagugcca

SEQ ID NO: 1949348 - RNA, 16 nt, Human
ggccgcgggggcaggg

SEQ ID NO: 1949349 - RNA, 22 nt, Human
ggccgccggcaauaaaagccca

SEQ ID NO: 1949350 - RNA, 23 nt, Human
ggccgccggcaauaaaagcccag

SEQ ID NO: 1949351 - RNA, 16 nt, Human
ggccugcaagggagug

SEQ ID NO: 1949352 - RNA, 11 nt, Human
ggccugccugu

SEQ ID NO: 1949353 - RNA, 16 nt, Human
ggccuggccagaugca

SEQ ID NO: 1949354 - RNA, 17 nt, Human
ggccuucagggagugag

SEQ ID NO: 1949355 - RNA, 12 nt, Human
ggccuggccaga

SEQ ID NO: 1949356 - RNA, 15 nt, Human
ggccuggccagaugc

SEQ ID NO: 1949357 - RNA, 14 nt, Human
ggccuggcagccgu

SEQ ID NO: 1949358 - RNA, 15 nt, Human
ggccuggcagccgug

SEQ ID NO: 1949359 - RNA, 16 nt, Human
ggcuagagguucaaag

SEQ ID NO: 1949360 - RNA, 15 nt, Human
ggcuacuugcuuuga

SEQ ID NO: 1949361 - RNA, 14 nt, Human
ggcuaccuuuguau

SEQ ID NO: 1949362 - RNA, 13 nt, Human
ggcuaccuuugua

SEQ ID NO: 1949363 - RNA, 17 nt, Human
ggcuacccgugagcccu

SEQ ID NO: 1949364 - RNA, 22 nt, Human
ggcuacaccuuagccugcccuc

SEQ ID NO: 1949365 - RNA, 23 nt, Human
ggcuacaccuuagccugcccucc

SEQ ID NO: 1949366 - RNA, 16 nt, Human
ggcuaauguacugcau

SEQ ID NO: 1949367 - RNA, 20 nt, Human
ggcuaagugauccucccacc

SEQ ID NO: 1949368 - RNA, 18 nt, Human
ggcuaauuuuuguuuugu

SEQ ID NO: 1949369 - RNA, 18 nt, Human
ggccuucggccuccaucc

SEQ ID NO: 1949370 - RNA, 22 nt, Human
ggccuucggccuccauccugag

SEQ ID NO: 1949371 - RNA, 16 nt, Human
ggccuucggccuccau

SEQ ID NO: 1949372 - RNA, 18 nt, Human
ggcgaggacgacuucugc

SEQ ID NO: 1949373 - RNA, 14 nt, Human
ggcgugagaccugc

SEQ ID NO: 1949374 - RNA, 16 nt, Human
ggcgugagaccugccc

SEQ ID NO: 1949375 - RNA, 17 nt, Human
ggcgugagaccugcccc

SEQ ID NO: 1949376 - RNA, 18 nt, Human
ggcgugagaccugccccu

SEQ ID NO: 1949377 - RNA, 18 nt, Human
ggcuaaaauguuuucagc

SEQ ID NO: 1949378 - RNA, 20 nt, Human
ggcuaagcuucacuguaaaa

SEQ ID NO: 1949379 - RNA, 18 nt, Human
ggcacaccgggcacucag

SEQ ID NO: 1949380 - RNA, 16 nt, Human
ggcacaccuccuccca

SEQ ID NO: 1949381 - RNA, 17 nt, Human
ggcacaccuccucccac

SEQ ID NO: 1949382 - RNA, 20 nt, Human
ggcacaccuccucccacugc

SEQ ID NO: 1949383 - RNA, 21 nt, Human
ggcacaccuccucccacugcc

SEQ ID NO: 1949384 - RNA, 22 nt, Human
ggcacaccuccucccacugccc

SEQ ID NO: 1949385 - RNA, 16 nt, Human
ggcacugcuuccagug

SEQ ID NO: 1949386 - RNA, 11 nt, Human
ggcacugcucu

SEQ ID NO: 1949387 - RNA, 18 nt, Human
ggcacacgcugcucugcc

SEQ ID NO: 1949388 - RNA, 20 nt, Human
ggcacacgcugcucugcccc

SEQ ID NO: 1949389 - RNA, 21 nt, Human
ggcacacgcugcucugcccca

SEQ ID NO: 1949390 - RNA, 22 nt, Human
ggcacacgcugcucugccccag

SEQ ID NO: 1949391 - RNA, 18 nt, Human
ggcacaucagcacgauuu

SEQ ID NO: 1949392 - RNA, 11 nt, Human
ggcaaaaacaa

SEQ ID NO: 1949393 - RNA, 13 nt, Human
ggcaaaaacaaag

SEQ ID NO: 1949394 - RNA, 15 nt, Human
ggcaaaaaggcagga

SEQ ID NO: 1949395 - RNA, 13 nt, Human
ggcagccaggcca

SEQ ID NO: 1949396 - RNA, 20 nt, Human
ggcacugcuuccagugaggc

SEQ ID NO: 1949397 - RNA, 22 nt, Human
ggcacugcuuccagugaggcuc

SEQ ID NO: 1949398 - RNA, 22 nt, Human
ggcagccccauucugccugccc

SEQ ID NO: 1949399 - RNA, 23 nt, Human
ggcagccucugggcccacauccg

SEQ ID NO: 1949400 - RNA, 16 nt, Human
ggcagccucuucaaaa

SEQ ID NO: 1949401 - RNA, 13 nt, Human
ggcagccugagag

SEQ ID NO: 1949402 - RNA, 14 nt, Human
ggcagccugagagu

SEQ ID NO: 1949403 - RNA, 19 nt, Human
ggcagccugccuugcccac

SEQ ID NO: 1949404 - RNA, 23 nt, Human
ggcagccugccuugcccacuccu

SEQ ID NO: 1949405 - RNA, 16 nt, Human
ggcagccccauucugc

SEQ ID NO: 1949406 - RNA, 20 nt, Human
ggcagccccauucugccugc

SEQ ID NO: 1949407 - RNA, 21 nt, Human
ggcagccccauucugccugcc

SEQ ID NO: 1949408 - RNA, 10 nt, Human
ggcagggagg

SEQ ID NO: 1949409 - RNA, 17 nt, Human
ggcagggagggccuggg

SEQ ID NO: 1949410 - RNA, 18 nt, Human
ggcagggagggccugggc

SEQ ID NO: 1949411 - RNA, 19 nt, Human
ggcagggagggccugggcc

SEQ ID NO: 1949412 - RNA, 20 nt, Human
ggcagggagggccugggccc

SEQ ID NO: 1949413 - RNA, 16 nt, Human
ggcagggacagggccg

SEQ ID NO: 1949414 - RNA, 14 nt, Human
ggcagggcacaggg

SEQ ID NO: 1949415 - RNA, 15 nt, Human
ggcagggcacagggc

SEQ ID NO: 1949416 - RNA, 16 nt, Human
ggcagggcacagggcc

SEQ ID NO: 1949417 - RNA, 17 nt, Human
ggcagggcacagggccu

SEQ ID NO: 1949418 - RNA, 19 nt, Human
ggcaggggcccugcagcuc

SEQ ID NO: 1949419 - RNA, 20 nt, Human
ggcaggggcccugcagcucu

SEQ ID NO: 1949420 - RNA, 21 nt, Human
ggcaggggcccugcagcucuc

SEQ ID NO: 1949421 - RNA, 15 nt, Human
ggcagggcaggacca

SEQ ID NO: 1949422 - RNA, 16 nt, Human
ggcagggcaggaccag

SEQ ID NO: 1949423 - RNA, 18 nt, Human
ggcagggcacagggccug

SEQ ID NO: 1949424 - RNA, 19 nt, Human
ggcagggcacagggccugg

SEQ ID NO: 1949425 - RNA, 22 nt, Human
ggcagggcacagggccuggccc

SEQ ID NO: 1949426 - RNA, 23 nt, Human
ggcagggcacagggccuggccca

SEQ ID NO: 1949427 - RNA, 19 nt, Human
ggcaggggaggccaucugg

SEQ ID NO: 1949428 - RNA, 20 nt, Human
ggcaggggaggccaucugga

SEQ ID NO: 1949429 - RNA, 18 nt, Human
ggcaggaggaucacuuga

SEQ ID NO: 1949430 - RNA, 14 nt, Human
ggcauuugcugaau

SEQ ID NO: 1949431 - RNA, 15 nt, Human
ggcauuugcaauaaa

SEQ ID NO: 1949432 - RNA, 20 nt, Human
ggcaucgcaauguaagacuc

SEQ ID NO: 1949433 - RNA, 12 nt, Human
ggcaucauucca

SEQ ID NO: 1949434 - RNA, 15 nt, Human
ggcauccacuucaca

SEQ ID NO: 1949435 - RNA, 19 nt, Human
ggccaaaggaagcacaugc

SEQ ID NO: 1949436 - RNA, 17 nt, Human
ggcauuuguuucuuucu

SEQ ID NO: 1949437 - RNA, 23 nt, Human
ggcauuuguuucuuucucugagg

SEQ ID NO: 1949438 - RNA, 23 nt, Human
ggccaagagguuuggcuccugcc

SEQ ID NO: 1949439 - RNA, 14 nt, Human
ggccaagaguggcc

SEQ ID NO: 1949440 - RNA, 17 nt, Human
ggccaagaguggcccca

SEQ ID NO: 1949441 - RNA, 19 nt, Human
ggccaagaguggccccacc

SEQ ID NO: 1949442 - RNA, 16 nt, Human
ggccaaaggaagcaca

SEQ ID NO: 1949443 - RNA, 14 nt, Human
ggccaaaggaagca

SEQ ID NO: 1949444 - RNA, 17 nt, Human
ggcauuuguuugaacug

SEQ ID NO: 1949445 - RNA, 13 nt, Human
ggccaaaggaagc

SEQ ID NO: 1949446 - RNA, 17 nt, Human
ggccagagacacaagcc

SEQ ID NO: 1949447 - RNA, 20 nt, Human
ggccaagaguggccccaccu

SEQ ID NO: 1949448 - RNA, 21 nt, Human
ggccaagaguggccccaccug

SEQ ID NO: 1949449 - RNA, 22 nt, Human
ggccaagaguggccccaccugg

SEQ ID NO: 1949450 - RNA, 17 nt, Human
ggccagagggagugaca

SEQ ID NO: 1949451 - RNA, 19 nt, Human
ggccagagggagugacaga

SEQ ID NO: 1949452 - RNA, 18 nt, Human
ggccagagacacaagccu

SEQ ID NO: 1949453 - RNA, 14 nt, Human
ggagguggcauccc

SEQ ID NO: 1949454 - RNA, 23 nt, Human
ggaggugggauccuccaggugca

SEQ ID NO: 1949455 - RNA, 22 nt, Human
ggaggugggauccuccaggugc

SEQ ID NO: 1949456 - RNA, 21 nt, Human
ggagggugacgggggugaacu

SEQ ID NO: 1949457 - RNA, 22 nt, Human
ggagguaaggaauaccuguccc

SEQ ID NO: 1949458 - RNA, 14 nt, Human
ggaggggggaggug

SEQ ID NO: 1949459 - RNA, 13 nt, Human
ggaggggggaggu

SEQ ID NO: 1949460 - RNA, 13 nt, Human
ggagggggcaaag

SEQ ID NO: 1949461 - RNA, 15 nt, Human
ggaggcucuggagcc

SEQ ID NO: 1949462 - RNA, 15 nt, Human
ggaggcuccaggcag

SEQ ID NO: 1949463 - RNA, 16 nt, Human
ggaggcuccaggcagc

SEQ ID NO: 1949464 - RNA, 15 nt, Human
ggaguggccacagaa

SEQ ID NO: 1949465 - RNA, 22 nt, Human
ggagugggcccaaugcacuuug

SEQ ID NO: 1949466 - RNA, 12 nt, Human
ggagugggccca

SEQ ID NO: 1949467 - RNA, 16 nt, Human
ggaguggccacagaaa

SEQ ID NO: 1949468 - RNA, 17 nt, Human
ggagugggucuggagga

SEQ ID NO: 1949469 - RNA, 22 nt, Human
ggaguguguaauuuaaaauugu

SEQ ID NO: 1949470 - RNA, 11 nt, Human
ggaguguguaa

SEQ ID NO: 1949471 - RNA, 14 nt, Human
ggaugaaaaaauaa

SEQ ID NO: 1949472 - RNA, 13 nt, Human
ggauuguccccga

SEQ ID NO: 1949473 - RNA, 14 nt, Human
ggauuguaguccca

SEQ ID NO: 1949474 - RNA, 22 nt, Human
ggauuuaacagaaauguacagc

SEQ ID NO: 1949475 - RNA, 16 nt, Human
ggauuuaacagaaaug

SEQ ID NO: 1949476 - RNA, 17 nt, Human
ggauuuaacagaaaugu

SEQ ID NO: 1949477 - RNA, 20 nt, Human
ggauuguccccgacccuugc

SEQ ID NO: 1949478 - RNA, 16 nt, Human
ggauuguccccgaccc

SEQ ID NO: 1949479 - RNA, 15 nt, Human
ggaugguguucaaaa

SEQ ID NO: 1949480 - RNA, 23 nt, Human
ggauugugccuaauguguuugag

SEQ ID NO: 1949481 - RNA, 12 nt, Human
ggauuuaacaga

SEQ ID NO: 1949482 - RNA, 23 nt, Human
ggauccugagccagauuucacuc

SEQ ID NO: 1949483 - RNA, 20 nt, Human
ggauccugagccagauuuca

SEQ ID NO: 1949484 - RNA, 19 nt, Human
ggauccugagccagauuuc

SEQ ID NO: 1949485 - RNA, 18 nt, Human
ggauccugagccagauuu

SEQ ID NO: 1949486 - RNA, 16 nt, Human
ggauccugagccagau

SEQ ID NO: 1949487 - RNA, 15 nt, Human
ggauccugagccaga

SEQ ID NO: 1949488 - RNA, 16 nt, Human
ggaguucaucuugaau

SEQ ID NO: 1949489 - RNA, 19 nt, Human
ggaguucauucauauuaca

SEQ ID NO: 1949490 - RNA, 20 nt, Human
ggaguucauucauauuacaa

SEQ ID NO: 1949491 - RNA, 20 nt, Human
ggauccugcacugacucugg

SEQ ID NO: 1949492 - RNA, 18 nt, Human
ggaucucuugagccuggg

SEQ ID NO: 1949493 - RNA, 21 nt, Human
aaagugggcccucauacacaa

SEQ ID NO: 1949494 - RNA, 14 nt, Human
aaaguguauuuuuu

SEQ ID NO: 1949495 - RNA, 21 nt, Human
aaaguguauuuuuuuacuaau

SEQ ID NO: 1949496 - RNA, 19 nt, Human
aaaguacacuguuucaaac

SEQ ID NO: 1949497 - RNA, 15 nt, Human
aaaguagaacuuugu

SEQ ID NO: 1949498 - RNA, 18 nt, Human
aaaguacacuguuucaaa

SEQ ID NO: 1949499 - RNA, 15 nt, Human
aaaguaauauuuauu

SEQ ID NO: 1949500 - RNA, 18 nt, Human
aaaguaauauuuauuaaa

SEQ ID NO: 1949501 - RNA, 22 nt, Human
aaaguagaagucuuagauguau

SEQ ID NO: 1949502 - RNA, 20 nt, Human
aaaguagaagucuuagaugu

SEQ ID NO: 1949503 - RNA, 21 nt, Human
aaaguaucccuacuguaauuu

SEQ ID NO: 1949504 - RNA, 16 nt, Human
aaaguagaacuuugua

SEQ ID NO: 1949505 - RNA, 17 nt, Human
aaaguagaacuuuguau

SEQ ID NO: 1949506 - RNA, 18 nt, Human
aaaguagaacuuuguaua

SEQ ID NO: 1949507 - RNA, 21 nt, Human
aaaguagaacuuuguauaguu

SEQ ID NO: 1949508 - RNA, 23 nt, Human
aaaguagaacuuuguauaguuau

SEQ ID NO: 1949509 - RNA, 15 nt, Human
gguuucagaaaugug

SEQ ID NO: 1949510 - RNA, 18 nt, Human
gguuuccaacaauucagc

SEQ ID NO: 1949511 - RNA, 12 nt, Human
gguuuccugccc

SEQ ID NO: 1949512 - RNA, 20 nt, Human
gguuuccaacaauucagcau

SEQ ID NO: 1949513 - RNA, 13 nt, Human
gguuuccugcccu

SEQ ID NO: 1949514 - RNA, 15 nt, Human
gguuuccugcccugg

SEQ ID NO: 1949515 - RNA, 16 nt, Human
gguuucuaaagcugcc

SEQ ID NO: 1949516 - RNA, 16 nt, Human
gguuuccugcccuggg

SEQ ID NO: 1949517 - RNA, 19 nt, Human
gguuuccugcccugggagg

SEQ ID NO: 1949518 - RNA, 22 nt, Human
gguuucuaaagcugccagccga

SEQ ID NO: 1949519 - RNA, 14 nt, Human
gguuugggaccccu

SEQ ID NO: 1949520 - RNA, 17 nt, Human
gguuuucacauuggaaa

SEQ ID NO: 1949521 - RNA, 11 nt, Human
gguuuuaugau

SEQ ID NO: 1949522 - RNA, 17 nt, Human
gguuuuauuuauuucuu

SEQ ID NO: 1949523 - RNA, 22 nt, Human
gguuuguuuagaagaagugugu

SEQ ID NO: 1949524 - RNA, 12 nt, Human
gguuuuaaaaua

SEQ ID NO: 1949525 - RNA, 20 nt, Human
gguuuuaaaauacuguagau

SEQ ID NO: 1949526 - RNA, 20 nt, Human
gguuuguaaauuaacuuuua

SEQ ID NO: 1949527 - RNA, 19 nt, Human
gguuugguuuuguuuuuug

SEQ ID NO: 1949528 - RNA, 12 nt, Human
gguguggagaag

SEQ ID NO: 1949529 - RNA, 15 nt, Human
ggugggggggcagag

SEQ ID NO: 1949530 - RNA, 19 nt, Human
ggugggggggcagagcccu

SEQ ID NO: 1949531 - RNA, 23 nt, Human
gguguggagaagcggcuggcagc

SEQ ID NO: 1949532 - RNA, 14 nt, Human
gguguggagaagcg

SEQ ID NO: 1949533 - RNA, 16 nt, Human
gguggggggcuucaua

SEQ ID NO: 1949534 - RNA, 18 nt, Human
gguggggggcuucauaca

SEQ ID NO: 1949535 - RNA, 13 nt, Human
ggugggggccucg

SEQ ID NO: 1949536 - RNA, 22 nt, Human
ggugggcuugucauagccagug

SEQ ID NO: 1949537 - RNA, 23 nt, Human
gguguuccgaaaccaaagaagaa

SEQ ID NO: 1949538 - RNA, 13 nt, Human
ggugugggggaag

SEQ ID NO: 1949539 - RNA, 11 nt, Human
gguguggggga

SEQ ID NO: 1949540 - RNA, 23 nt, Human
ggugugggggccccgucucaggu

SEQ ID NO: 1949541 - RNA, 15 nt, Human
ggugugggggccccg

SEQ ID NO: 1949542 - RNA, 17 nt, Human
gguguuuccuggcacug

SEQ ID NO: 1949543 - RNA, 19 nt, Human
gguguuuccuggcacugcu

SEQ ID NO: 1949544 - RNA, 15 nt, Human
gguuccagccugcca

SEQ ID NO: 1949545 - RNA, 16 nt, Human
gguuccagccugccac

SEQ ID NO: 1949546 - RNA, 13 nt, Human
gguguuugaaaau

SEQ ID NO: 1949547 - RNA, 14 nt, Human
gguguuugaaaaua

SEQ ID NO: 1949548 - RNA, 14 nt, Human
gguuccagccugcc

SEQ ID NO: 1949549 - RNA, 20 nt, Human
gguguuugaaaauaguuuau

SEQ ID NO: 1949550 - RNA, 17 nt, Human
gguucccauuugcuccu

SEQ ID NO: 1949551 - RNA, 16 nt, Human
gguuccuucugggcau

SEQ ID NO: 1949552 - RNA, 23 nt, Human
gguucccuuugacgccaucccag

SEQ ID NO: 1949553 - RNA, 22 nt, Human
gguucccuuuuuuggcugcuga

SEQ ID NO: 1949554 - RNA, 20 nt, Human
ggugggaggaucucuugagc

SEQ ID NO: 1949555 - RNA, 17 nt, Human
ggugggacacccuguga

SEQ ID NO: 1949556 - RNA, 16 nt, Human
ggugggacacccugug

SEQ ID NO: 1949557 - RNA, 13 nt, Human
ggugggacacccu

SEQ ID NO: 1949558 - RNA, 19 nt, Human
gguggggaccucaggccug

SEQ ID NO: 1949559 - RNA, 21 nt, Human
aaaguaaaaacaaagaaauua

SEQ ID NO: 1949560 - RNA, 15 nt, Human
aaaguaaaagcagca

SEQ ID NO: 1949561 - RNA, 19 nt, Human
aaaguaaaagcagcauaaa

SEQ ID NO: 1949562 - RNA, 18 nt, Human
gguggcuggguuggaggg

SEQ ID NO: 1949563 - RNA, 12 nt, Human
gguggcuggguu

SEQ ID NO: 1949564 - RNA, 14 nt, Human
aaaggugauaaaau

SEQ ID NO: 1949565 - RNA, 17 nt, Human
aaaggugauaaaaucau

SEQ ID NO: 1949566 - RNA, 18 nt, Human
aaaggugauaaaaucaua

SEQ ID NO: 1949567 - RNA, 13 nt, Human
aaaggugauaaaa

SEQ ID NO: 1949568 - RNA, 16 nt, Human
aaagguucuuugugua

SEQ ID NO: 1949569 - RNA, 13 nt, Human
aaaggugugcugu

SEQ ID NO: 1949570 - RNA, 18 nt, Human
aaagguucaugcaaacuu

SEQ ID NO: 1949571 - RNA, 20 nt, Human
aaagggcccagagagggugg

SEQ ID NO: 1949572 - RNA, 14 nt, Human
aaagcuguucuucc

SEQ ID NO: 1949573 - RNA, 16 nt, Human
aaagcuguucuuccug

SEQ ID NO: 1949574 - RNA, 17 nt, Human
aaagcuguucuuccugg

SEQ ID NO: 1949575 - RNA, 12 nt, Human
aaacuuuaugcu

SEQ ID NO: 1949576 - RNA, 19 nt, Human
aaacuuuaugcuaagugaa

SEQ ID NO: 1949577 - RNA, 20 nt, Human
ggugcugcuaauucuuugca

SEQ ID NO: 1949578 - RNA, 22 nt, Human
ggugcugcuaauucuuugcaaa

SEQ ID NO: 1949579 - RNA, 16 nt, Human
aaagcagaacagugau

SEQ ID NO: 1949580 - RNA, 20 nt, Human
gguggcaccagcagccugga

SEQ ID NO: 1949581 - RNA, 14 nt, Human
gguggcaccagcag

SEQ ID NO: 1949582 - RNA, 14 nt, Human
gguggagaaaggag

SEQ ID NO: 1949583 - RNA, 13 nt, Human
aaagcuguucuuc

SEQ ID NO: 1949584 - RNA, 14 nt, Human
aaagcuguguggca

SEQ ID NO: 1949585 - RNA, 22 nt, Human
aaagcugccagccgagauagcc

SEQ ID NO: 1949586 - RNA, 13 nt, Human
aaagcugccagcc

SEQ ID NO: 1949587 - RNA, 12 nt, Human
aaagcugccagc

SEQ ID NO: 1949588 - RNA, 17 nt, Human
aaagcuaggccuggcca

SEQ ID NO: 1949589 - RNA, 19 nt, Human
aaagcuagaacacugccaa

SEQ ID NO: 1949590 - RNA, 23 nt, Human
aaagcugaacacauuucuuuuua

SEQ ID NO: 1949591 - RNA, 16 nt, Human
aaagcagugcaugcug

SEQ ID NO: 1949592 - RNA, 13 nt, Human
aaagcagugcaug

SEQ ID NO: 1949593 - RNA, 14 nt, Human
aaagcuaggccugg

SEQ ID NO: 1949594 - RNA, 16 nt, Human
aaagcuaggccuggcc

SEQ ID NO: 1949595 - RNA, 21 nt, Human
aaauaucuaguaauauauuua

SEQ ID NO: 1949596 - RNA, 23 nt, Human
aaauaucuguaagaguguuuaua

SEQ ID NO: 1949597 - RNA, 23 nt, Human
aaauaucugaaaauguaugugua

SEQ ID NO: 1949598 - RNA, 22 nt, Human
aaauaucugaaaauguaugugu

SEQ ID NO: 1949599 - RNA, 21 nt, Human
aaauaucugaaaauguaugug

SEQ ID NO: 1949600 - RNA, 19 nt, Human
aaauaucugaaaauguaug

SEQ ID NO: 1949601 - RNA, 18 nt, Human
aaauaucugaaaauguau

SEQ ID NO: 1949602 - RNA, 17 nt, Human
aaauaucugaaaaugua

SEQ ID NO: 1949603 - RNA, 14 nt, Human
aaauaucugaaaau

SEQ ID NO: 1949604 - RNA, 12 nt, Human
aaauaucugaaa

SEQ ID NO: 1949605 - RNA, 13 nt, Human
aaauaugcacuaa

SEQ ID NO: 1949606 - RNA, 16 nt, Human
aaauaugcacuaaguc

SEQ ID NO: 1949607 - RNA, 19 nt, Human
aaauaugcacuaagucucu

SEQ ID NO: 1949608 - RNA, 21 nt, Human
aaauaugcacuaagucucuuu

SEQ ID NO: 1949609 - RNA, 19 nt, Human
aaauauggucuuuugguua

SEQ ID NO: 1949610 - RNA, 12 nt, Human
aaauauguauua

SEQ ID NO: 1949611 - RNA, 13 nt, Human
aaauauguauuaa

SEQ ID NO: 1949612 - RNA, 18 nt, Human
aaauaugucccagaaaug

SEQ ID NO: 1949613 - RNA, 12 nt, Human
aaauaugugaag

SEQ ID NO: 1949614 - RNA, 15 nt, Human
aaauaugugaaggac

SEQ ID NO: 1949615 - RNA, 20 nt, Human
aaauaugugaaggaccuuca

SEQ ID NO: 1949616 - RNA, 23 nt, Human
aaaucagccugcuccagcuguuc

SEQ ID NO: 1949617 - RNA, 21 nt, Human
aaaucagccugcuccagcugu

SEQ ID NO: 1949618 - RNA, 19 nt, Human
aaaucagccugcuccagcu

SEQ ID NO: 1949619 - RNA, 21 nt, Human
aaauauugaaaggcaaacauu

SEQ ID NO: 1949620 - RNA, 23 nt, Human
aaauauucuucuauaaaugaauc

SEQ ID NO: 1949621 - RNA, 19 nt, Human
aaauauuaagaaagacuau

SEQ ID NO: 1949622 - RNA, 12 nt, Human
aaauauuaaaaa

SEQ ID NO: 1949623 - RNA, 14 nt, Human
aaauauuaaaaagu

SEQ ID NO: 1949624 - RNA, 17 nt, Human
aaauauuaaaaagucuu

SEQ ID NO: 1949625 - RNA, 20 nt, Human
aaauauuccugcauuuguga

SEQ ID NO: 1949626 - RNA, 22 nt, Human
aaauauuaaaaagucuuuuaaa

SEQ ID NO: 1949627 - RNA, 20 nt, Human
aaauacgugggcauucaaau

SEQ ID NO: 1949628 - RNA, 21 nt, Human
aaauacgugggcauucaaaug

SEQ ID NO: 1949629 - RNA, 15 nt, Human
aaauaccauuauuau

SEQ ID NO: 1949630 - RNA, 17 nt, Human
aaauaccauuauuauca

SEQ ID NO: 1949631 - RNA, 15 nt, Human
aaauauaggaacuua

SEQ ID NO: 1949632 - RNA, 20 nt, Human
aaauaccagccaguaaaugg

SEQ ID NO: 1949633 - RNA, 21 nt, Human
aaauaccagccaguaaauggg

SEQ ID NO: 1949634 - RNA, 22 nt, Human
guacaaugugacuuugaaaaua

SEQ ID NO: 1949635 - RNA, 19 nt, Human
aaauaccagccaguaaaug

SEQ ID NO: 1949636 - RNA, 16 nt, Human
guacacacacauacac

SEQ ID NO: 1949637 - RNA, 21 nt, Human
guacaaugacuuuauugcauc

SEQ ID NO: 1949638 - RNA, 20 nt, Human
guacaaugacuuuauugcau

SEQ ID NO: 1949639 - RNA, 14 nt, Human
aaauauauaucaaa

SEQ ID NO: 1949640 - RNA, 18 nt, Human
aaauauaugcuaagucuu

SEQ ID NO: 1949641 - RNA, 20 nt, Human
aaauauauggucuaauguuu

SEQ ID NO: 1949642 - RNA, 21 nt, Human
aaauauauggucuaauguuua

SEQ ID NO: 1949643 - RNA, 22 nt, Human
aaauauauggucuaauguuuaa

SEQ ID NO: 1949644 - RNA, 22 nt, Human
aaauauauuuuaagacgaaaca

SEQ ID NO: 1949645 - RNA, 16 nt, Human
aaauauauuuuaagac

SEQ ID NO: 1949646 - RNA, 12 nt, Human
aaauaucaaauu

SEQ ID NO: 1949647 - RNA, 13 nt, Human
aaauaucaaauua

SEQ ID NO: 1949648 - RNA, 16 nt, Human
aaauaucaaauuaauu

SEQ ID NO: 1949649 - RNA, 20 nt, Human
aaauaucaaauuaauugugu

SEQ ID NO: 1949650 - RNA, 19 nt, Human
aaauaucuaguaauauauu

SEQ ID NO: 1949651 - RNA, 20 nt, Human
aaauaucuaguaauauauuu

SEQ ID NO: 1949652 - RNA, 22 nt, Human
aaauaucccuuggacauuuuau

SEQ ID NO: 1949653 - RNA, 23 nt, Human
aaauaucccuuggacauuuuaug

SEQ ID NO: 1949654 - RNA, 21 nt, Human
aaauaucauauaaauauugag

SEQ ID NO: 1949655 - RNA, 23 nt, Human
aaauaucaaauuaauugugugaa

SEQ ID NO: 1949656 - RNA, 19 nt, Human
guaacaggaaaauuuuaaa

SEQ ID NO: 1949657 - RNA, 16 nt, Human
guaacaagccacccca

SEQ ID NO: 1949658 - RNA, 20 nt, Human
guaacaggaaaauuuuaaaa

SEQ ID NO: 1949659 - RNA, 17 nt, Human
guaacauucuauuucaa

SEQ ID NO: 1949660 - RNA, 11 nt, Human
guaaacacugu

SEQ ID NO: 1949661 - RNA, 13 nt, Human
guaaaccuuuuau

SEQ ID NO: 1949662 - RNA, 13 nt, Human
guaaaauuuuagg

SEQ ID NO: 1949663 - RNA, 13 nt, Human
aaauaauucuuuu

SEQ ID NO: 1949664 - RNA, 14 nt, Human
aaauaauucuuuuu

SEQ ID NO: 1949665 - RNA, 18 nt, Human
aaauaauucuuuuuuauu

SEQ ID NO: 1949666 - RNA, 19 nt, Human
aaauaauucuuuuuuauua

SEQ ID NO: 1949667 - RNA, 21 nt, Human
aaauaauucuuuuuuauuaau

SEQ ID NO: 1949668 - RNA, 22 nt, Human
aaaguguauuuuuuuacuaaua

SEQ ID NO: 1949669 - RNA, 20 nt, Human
aaaguguucuguuacaaaau

SEQ ID NO: 1949670 - RNA, 22 nt, Human
aaauaaugugaaacuggauuaa

SEQ ID NO: 1949671 - RNA, 14 nt, Human
aaauaaugugaaac

SEQ ID NO: 1949672 - RNA, 22 nt, Human
aaaguuaacaggcaaacauuuu

SEQ ID NO: 1949673 - RNA, 20 nt, Human
aaaguuaaacgugaugugcu

SEQ ID NO: 1949674 - RNA, 13 nt, Human
guaacuaaaauaa

SEQ ID NO: 1949675 - RNA, 15 nt, Human
guaacuaaaauaauu

SEQ ID NO: 1949676 - RNA, 20 nt, Human
guaacuaaaauaauuuugua

SEQ ID NO: 1949677 - RNA, 22 nt, Human
guaacuaaaauaauuuuguaau

SEQ ID NO: 1949678 - RNA, 18 nt, Human
guaacgugugcuguguuu

SEQ ID NO: 1949679 - RNA, 14 nt, Human
guaacuauguuuua

SEQ ID NO: 1949680 - RNA, 12 nt, Human
guaauaauaaag

SEQ ID NO: 1949681 - RNA, 16 nt, Human
guaauaauaaagaaua

SEQ ID NO: 1949682 - RNA, 18 nt, Human
guaauaagggaaaaauca

SEQ ID NO: 1949683 - RNA, 19 nt, Human
guaauaagggaaaaaucaa

SEQ ID NO: 1949684 - RNA, 13 nt, Human
guaauauuuauua

SEQ ID NO: 1949685 - RNA, 14 nt, Human
guaauauuuauuaa

SEQ ID NO: 1949686 - RNA, 15 nt, Human
guaauauuuauuaaa

SEQ ID NO: 1949687 - RNA, 16 nt, Human
guaauauuuauuaaau

SEQ ID NO: 1949688 - RNA, 17 nt, Human
guaauauuuauuaaauu

SEQ ID NO: 1949689 - RNA, 18 nt, Human
guaauauuuauuaaauuu

SEQ ID NO: 1949690 - RNA, 21 nt, Human
guaauauuuauuaaauuuuuu

SEQ ID NO: 1949691 - RNA, 21 nt, Human
guaauuuuuuuaucgucacug

SEQ ID NO: 1949692 - RNA, 22 nt, Human
guacaaaaaauucagugaugug

SEQ ID NO: 1949693 - RNA, 22 nt, Human
guacaaccuguucugcuuuccu

SEQ ID NO: 1949694 - RNA, 17 nt, Human
guacaaguaguucugua

SEQ ID NO: 1949695 - RNA, 21 nt, Human
guacaaguaguucuguauuug

SEQ ID NO: 1949696 - RNA, 22 nt, Human
guacaaguaguucuguauuuga

SEQ ID NO: 1949697 - RNA, 15 nt, Human
guacaagaucucagg

SEQ ID NO: 1949698 - RNA, 13 nt, Human
guacaaguaguuc

SEQ ID NO: 1949699 - RNA, 14 nt, Human
guacaaguaguucu

SEQ ID NO: 1949700 - RNA, 15 nt, Human
guacaaguaguucug

SEQ ID NO: 1949701 - RNA, 16 nt, Human
guacaaguaguucugu

SEQ ID NO: 1949702 - RNA, 15 nt, Human
guaauuugugauaca

SEQ ID NO: 1949703 - RNA, 17 nt, Human
guaaucgaccugccucg

SEQ ID NO: 1949704 - RNA, 17 nt, Human
guaauuugugauacaau

SEQ ID NO: 1949705 - RNA, 20 nt, Human
guaauuugugauacaaugcu

SEQ ID NO: 1949706 - RNA, 15 nt, Human
guaaucgaccugccu

SEQ ID NO: 1949707 - RNA, 23 nt, Human
guaauccuagcacuuugggaggc

SEQ ID NO: 1949708 - RNA, 15 nt, Human
guaaucauauuagac

SEQ ID NO: 1949709 - RNA, 12 nt, Human
guaaucauauua

SEQ ID NO: 1949710 - RNA, 20 nt, Human
aaacuguucccaccugcugg

SEQ ID NO: 1949711 - RNA, 19 nt, Human
aaacuguuaauaguucagg

SEQ ID NO: 1949712 - RNA, 21 nt, Human
aaacuguucccaccugcugga

SEQ ID NO: 1949713 - RNA, 16 nt, Human
aaacguguauguuuuu

SEQ ID NO: 1949714 - RNA, 18 nt, Human
aaacguguauguuuuuca

SEQ ID NO: 1949715 - RNA, 20 nt, Human
aaacguguauguuuuucagu

SEQ ID NO: 1949716 - RNA, 21 nt, Human
aaacguggcugcuucaaggau

SEQ ID NO: 1949717 - RNA, 18 nt, Human
gggugggacacccuguga

SEQ ID NO: 1949718 - RNA, 15 nt, Human
gggugggacacccug

SEQ ID NO: 1949719 - RNA, 18 nt, Human
ggguggcgcuagaggcca

SEQ ID NO: 1949720 - RNA, 19 nt, Human
aaacuuaaucuaaauggaa

SEQ ID NO: 1949721 - RNA, 20 nt, Human
aaacuuagcaucuaauuuca

SEQ ID NO: 1949722 - RNA, 15 nt, Human
gggugguggugauag

SEQ ID NO: 1949723 - RNA, 23 nt, Human
ggguuuugccauguuggccaggc

SEQ ID NO: 1949724 - RNA, 10 nt, Human
ggguuuuucu

SEQ ID NO: 1949725 - RNA, 12 nt, Human
ggguuuucucuc

SEQ ID NO: 1949726 - RNA, 12 nt, Human
ggguuuucuuaa

SEQ ID NO: 1949727 - RNA, 20 nt, Human
ggguuuugccauguuggcca

SEQ ID NO: 1949728 - RNA, 22 nt, Human
gguaaaucagacuaugaaguuu

SEQ ID NO: 1949729 - RNA, 13 nt, Human
gguaacaggcaga

SEQ ID NO: 1949730 - RNA, 12 nt, Human
gguaaaaugaag

SEQ ID NO: 1949731 - RNA, 13 nt, Human
gguaaaaugaaga

SEQ ID NO: 1949732 - RNA, 14 nt, Human
gguaaaaugaagaa

SEQ ID NO: 1949733 - RNA, 20 nt, Human
gguaaaaugaagaauuuaaa

SEQ ID NO: 1949734 - RNA, 13 nt, Human
gguaaaauuuugu

SEQ ID NO: 1949735 - RNA, 18 nt, Human
gguaggaacugcugggcu

SEQ ID NO: 1949736 - RNA, 21 nt, Human
gguaggaauauuauauuugga

SEQ ID NO: 1949737 - RNA, 14 nt, Human
gguagggcucugac

SEQ ID NO: 1949738 - RNA, 20 nt, Human
gguaaggaauaccugucccc

SEQ ID NO: 1949739 - RNA, 16 nt, Human
gguaggaacugcuggg

SEQ ID NO: 1949740 - RNA, 12 nt, Human
gguaagaaaaag

SEQ ID NO: 1949741 - RNA, 21 nt, Human
gguaagaaaaagcaaaaggca

SEQ ID NO: 1949742 - RNA, 20 nt, Human
gguaggguaagugagagagg

SEQ ID NO: 1949743 - RNA, 11 nt, Human
gguaggguggg

SEQ ID NO: 1949744 - RNA, 23 nt, Human
gguagggugggccuucagggagu

SEQ ID NO: 1949745 - RNA, 14 nt, Human
gguaucaggugcug

SEQ ID NO: 1949746 - RNA, 19 nt, Human
gguauauccuuuucugugu

SEQ ID NO: 1949747 - RNA, 21 nt, Human
gguauauccuuuucuguguuu

SEQ ID NO: 1949748 - RNA, 17 nt, Human
gguauaucauucuaaag

SEQ ID NO: 1949749 - RNA, 19 nt, Human
gguauaauugugugauauu

SEQ ID NO: 1949750 - RNA, 22 nt, Human
gguccaggccuacuccugucuu

SEQ ID NO: 1949751 - RNA, 20 nt, Human
gguccaggccuacuccuguc

SEQ ID NO: 1949752 - RNA, 22 nt, Human
gguccagccucguuggaagagg

SEQ ID NO: 1949753 - RNA, 22 nt, Human
aaacuugauguguuaucucuua

SEQ ID NO: 1949754 - RNA, 19 nt, Human
gguaucaggugcugccauc

SEQ ID NO: 1949755 - RNA, 17 nt, Human
gguaucuaauucuuuaa

SEQ ID NO: 1949756 - RNA, 20 nt, Human
gguaucuaauucuuuaauga

SEQ ID NO: 1949757 - RNA, 14 nt, Human
ggucagugcaaaua

SEQ ID NO: 1949758 - RNA, 22 nt, Human
ggucauauguuugcuuguauuu

SEQ ID NO: 1949759 - RNA, 15 nt, Human
ggggcccugccuccu

SEQ ID NO: 1949760 - RNA, 17 nt, Human
gggggaucacagccucu

SEQ ID NO: 1949761 - RNA, 11 nt, Human
gggggcuggga

SEQ ID NO: 1949762 - RNA, 16 nt, Human
gggggcucagcaaggc

SEQ ID NO: 1949763 - RNA, 19 nt, Human
gggggcucagcaaggccac

SEQ ID NO: 1949764 - RNA, 20 nt, Human
gggggcucagcaaggccacc

SEQ ID NO: 1949765 - RNA, 22 nt, Human
gggggcuucauacacaugagau

SEQ ID NO: 1949766 - RNA, 15 nt, Human
gggggcugggcagag

SEQ ID NO: 1949767 - RNA, 13 nt, Human
ggggguggccucc

SEQ ID NO: 1949768 - RNA, 22 nt, Human
ggggucacucaauucugcagua

SEQ ID NO: 1949769 - RNA, 22 nt, Human
ggggucaggccgggcagagcac

SEQ ID NO: 1949770 - RNA, 21 nt, Human
ggggucacucuggcagcucag

SEQ ID NO: 1949771 - RNA, 13 nt, Human
ggggaccagagcu

SEQ ID NO: 1949772 - RNA, 12 nt, Human
ggggaccagagc

SEQ ID NO: 1949773 - RNA, 14 nt, Human
aaaaugucaaaagu

SEQ ID NO: 1949774 - RNA, 15 nt, Human
aaaaugucaaaagua

SEQ ID NO: 1949775 - RNA, 21 nt, Human
aaaaugucaaaaguagaacuu

SEQ ID NO: 1949776 - RNA, 22 nt, Human
aaaaugucaaaaguagaacuuu

SEQ ID NO: 1949777 - RNA, 23 nt, Human
aaaaugucaaaaguagaacuuug

SEQ ID NO: 1949778 - RNA, 23 nt, Human
aaaauguccaguaagaucacugu

SEQ ID NO: 1949779 - RNA, 18 nt, Human
aaaauguaacuguuacca

SEQ ID NO: 1949780 - RNA, 12 nt, Human
aaaauguaacug

SEQ ID NO: 1949781 - RNA, 13 nt, Human
aaaauguaacugu

SEQ ID NO: 1949782 - RNA, 15 nt, Human
aaaauguaacuguua

SEQ ID NO: 1949783 - RNA, 16 nt, Human
aaaauguaacuguuac

SEQ ID NO: 1949784 - RNA, 18 nt, Human
aaaauguauguguaagua

SEQ ID NO: 1949785 - RNA, 16 nt, Human
ggggccccgucucagg

SEQ ID NO: 1949786 - RNA, 20 nt, Human
ggggccccgucucaggucug

SEQ ID NO: 1949787 - RNA, 14 nt, Human
ggggaccagagcug

SEQ ID NO: 1949788 - RNA, 15 nt, Human
aaaccaccagaagcc

SEQ ID NO: 1949789 - RNA, 18 nt, Human
aaaccaccagaagcccag

SEQ ID NO: 1949790 - RNA, 15 nt, Human
aaaccaaaaacugaa

SEQ ID NO: 1949791 - RNA, 19 nt, Human
aaacauuuucucuuagaaa

SEQ ID NO: 1949792 - RNA, 20 nt, Human
aaacauuuucucuuagaaaa

SEQ ID NO: 1949793 - RNA, 19 nt, Human
aaaccaccagaagcccaga

SEQ ID NO: 1949794 - RNA, 17 nt, Human
aaaccaggcuuucuaga

SEQ ID NO: 1949795 - RNA, 18 nt, Human
aaacgacaaaucugucug

SEQ ID NO: 1949796 - RNA, 19 nt, Human
aaacgacaaaucugucugc

SEQ ID NO: 1949797 - RNA, 22 nt, Human
aaaccugugucucugagaguag

SEQ ID NO: 1949798 - RNA, 12 nt, Human
aaaccugugaag

SEQ ID NO: 1949799 - RNA, 21 nt, Human
aaaccaggcuuucuagaaaga

SEQ ID NO: 1949800 - RNA, 18 nt, Human
aaaccugggauuauauau

SEQ ID NO: 1949801 - RNA, 12 nt, Human
aaaccugucuga

SEQ ID NO: 1949802 - RNA, 17 nt, Human
aaaccuucacuuaggaa

SEQ ID NO: 1949803 - RNA, 18 nt, Human
gggguccccuccaggagu

SEQ ID NO: 1949804 - RNA, 20 nt, Human
gggucacucuggcagcucag

SEQ ID NO: 1949805 - RNA, 14 nt, Human
gggucacucuggca

SEQ ID NO: 1949806 - RNA, 21 nt, Human
gggucaucuguaccucugccu

SEQ ID NO: 1949807 - RNA, 19 nt, Human
gggucagguugacaggagg

SEQ ID NO: 1949808 - RNA, 20 nt, Human
gggucagguugacaggaggu

SEQ ID NO: 1949809 - RNA, 18 nt, Human
gggucauucauggccugg

SEQ ID NO: 1949810 - RNA, 22 nt, Human
gggucacucuggcagcucagag

SEQ ID NO: 1949811 - RNA, 18 nt, Human
gggucagguugacaggag

SEQ ID NO: 1949812 - RNA, 19 nt, Human
aaacauuuugucauauaag

SEQ ID NO: 1949813 - RNA, 14 nt, Human
aaaaggaugcacag

SEQ ID NO: 1949814 - RNA, 15 nt, Human
aaaaggaugcacaga

SEQ ID NO: 1949815 - RNA, 19 nt, Human
aaaaggaugcacagaguug

SEQ ID NO: 1949816 - RNA, 22 nt, Human
aaaaggaugcacagaguuguua

SEQ ID NO: 1949817 - RNA, 13 nt, Human
aaaaggaugcaca

SEQ ID NO: 1949818 - RNA, 22 nt, Human
aaaaggagccaauuuaaagaaa

SEQ ID NO: 1949819 - RNA, 21 nt, Human
aaaaggaagguaguucaagaa

SEQ ID NO: 1949820 - RNA, 16 nt, Human
aaaagguuaauaaagu

SEQ ID NO: 1949821 - RNA, 11 nt, Human
aaaaggcccag

SEQ ID NO: 1949822 - RNA, 18 nt, Human
aaaaggugauaaaaucau

SEQ ID NO: 1949823 - RNA, 17 nt, Human
aaaagguuaauaaagua

SEQ ID NO: 1949824 - RNA, 11 nt, Human
aaaaggcagga

SEQ ID NO: 1949825 - RNA, 22 nt, Human
aaaauaagaaaagauguagauu

SEQ ID NO: 1949826 - RNA, 18 nt, Human
aaaauaaccuugcagaag

SEQ ID NO: 1949827 - RNA, 12 nt, Human
aaaauaacugua

SEQ ID NO: 1949828 - RNA, 13 nt, Human
aaaauaacuguaa

SEQ ID NO: 1949829 - RNA, 14 nt, Human
aaaauaacuguaau

SEQ ID NO: 1949830 - RNA, 15 nt, Human
aaaauaacuguaauu

SEQ ID NO: 1949831 - RNA, 12 nt, Human
aaaauaagaaaa

SEQ ID NO: 1949832 - RNA, 14 nt, Human
aaaauaagaaaaga

SEQ ID NO: 1949833 - RNA, 15 nt, Human
aaaauaagaaaagau

SEQ ID NO: 1949834 - RNA, 13 nt, Human
aaaauaccaagga

SEQ ID NO: 1949835 - RNA, 12 nt, Human
aaaauacauucu

SEQ ID NO: 1949836 - RNA, 13 nt, Human
aaaauaauuuugu

SEQ ID NO: 1949837 - RNA, 14 nt, Human
aaaauaauuuugua

SEQ ID NO: 1949838 - RNA, 19 nt, Human
aaaaucucucauuugugug

SEQ ID NO: 1949839 - RNA, 13 nt, Human
aaaaucugaagau

SEQ ID NO: 1949840 - RNA, 14 nt, Human
aaaaucugaagauu

SEQ ID NO: 1949841 - RNA, 15 nt, Human
aaaaucugaagauug

SEQ ID NO: 1949842 - RNA, 16 nt, Human
aaaaucugaagauugu

SEQ ID NO: 1949843 - RNA, 18 nt, Human
aaaaucugaagauuguuu

SEQ ID NO: 1949844 - RNA, 22 nt, Human
aaaaucugaagauuguuuaucu

SEQ ID NO: 1949845 - RNA, 12 nt, Human
aaaaugagaaau

SEQ ID NO: 1949846 - RNA, 11 nt, Human
aaaaugagaaa

SEQ ID NO: 1949847 - RNA, 16 nt, Human
aaaaugcaugauugca

SEQ ID NO: 1949848 - RNA, 16 nt, Human
aaaaugcauguaauca

SEQ ID NO: 1949849 - RNA, 16 nt, Human
aaaaugcaaaaaaucu

SEQ ID NO: 1949850 - RNA, 17 nt, Human
aaaaugcaaaaaaucuu

SEQ ID NO: 1949851 - RNA, 23 nt, Human
aaaaugcuguauuagucacagag

SEQ ID NO: 1949852 - RNA, 21 nt, Human
aaaaugcuguauuagucacag

SEQ ID NO: 1949853 - RNA, 20 nt, Human
aaaauggaagacagcucuua

SEQ ID NO: 1949854 - RNA, 14 nt, Human
aaaauauuuaaagg

SEQ ID NO: 1949855 - RNA, 12 nt, Human
aaaauaugcacu

SEQ ID NO: 1949856 - RNA, 14 nt, Human
aaaauaugcacuaa

SEQ ID NO: 1949857 - RNA, 14 nt, Human
aaaauauuuaugaa

SEQ ID NO: 1949858 - RNA, 15 nt, Human
aaaauauuuaugaag

SEQ ID NO: 1949859 - RNA, 17 nt, Human
aaaauauuuaugaagaa

SEQ ID NO: 1949860 - RNA, 14 nt, Human
aaaauauuuaaugu

SEQ ID NO: 1949861 - RNA, 20 nt, Human
aaaauauuuaugaagaaaau

SEQ ID NO: 1949862 - RNA, 16 nt, Human
aaaauauuuuccugcc

SEQ ID NO: 1949863 - RNA, 11 nt, Human
aaaauacugua

SEQ ID NO: 1949864 - RNA, 15 nt, Human
aaaauacuguagaua

SEQ ID NO: 1949865 - RNA, 14 nt, Human
aaaauacuuaaaug

SEQ ID NO: 1949866 - RNA, 15 nt, Human
aaaauacuuaaaugu

SEQ ID NO: 1949867 - RNA, 20 nt, Human
aaaauacuuaaauguuaugu

SEQ ID NO: 1949868 - RNA, 12 nt, Human
aaaauacuucuu

SEQ ID NO: 1949869 - RNA, 19 nt, Human
aaaauaucuaguaauauau

SEQ ID NO: 1949870 - RNA, 13 nt, Human
aaaauaucaaauu

SEQ ID NO: 1949871 - RNA, 22 nt, Human
aaaauaugaccacacuccagcu

SEQ ID NO: 1949872 - RNA, 15 nt, Human
aaaauauuccugcau

SEQ ID NO: 1949873 - RNA, 19 nt, Human
gggcugcaccggcuggccu

SEQ ID NO: 1949874 - RNA, 17 nt, Human
gggcugcaccggcuggc

SEQ ID NO: 1949875 - RNA, 19 nt, Human
gggcucccgccuccaaccc

SEQ ID NO: 1949876 - RNA, 13 nt, Human
gggcucccgccuc

SEQ ID NO: 1949877 - RNA, 18 nt, Human
gggcucccgccuccaacc

SEQ ID NO: 1949878 - RNA, 12 nt, Human
gggcuccccucu

SEQ ID NO: 1949879 - RNA, 13 nt, Human
gggcuccccucuu

SEQ ID NO: 1949880 - RNA, 16 nt, Human
gggcuccccucuuccu

SEQ ID NO: 1949881 - RNA, 18 nt, Human
gggcuccccucuuccucu

SEQ ID NO: 1949882 - RNA, 13 nt, Human
gggcuccagacac

SEQ ID NO: 1949883 - RNA, 10 nt, Human
gggcuccaga

SEQ ID NO: 1949884 - RNA, 21 nt, Human
gggcucagcggggacagcucc

SEQ ID NO: 1949885 - RNA, 21 nt, Human
gggcucagcaaggccaccucu

SEQ ID NO: 1949886 - RNA, 15 nt, Human
gggcuaguugggcuu

SEQ ID NO: 1949887 - RNA, 20 nt, Human
gggcuaggaaauccagggug

SEQ ID NO: 1949888 - RNA, 22 nt, Human
gggcucagcaaaagaugcuucu

SEQ ID NO: 1949889 - RNA, 18 nt, Human
gggcuaguugggcuuccu

SEQ ID NO: 1949890 - RNA, 17 nt, Human
gggcucagcggggacag

SEQ ID NO: 1949891 - RNA, 19 nt, Human
gggcucagcggggacagcu

SEQ ID NO: 1949892 - RNA, 13 nt, Human
gggcucagcaagg

SEQ ID NO: 1949893 - RNA, 15 nt, Human
gggcucagcaaggcc

SEQ ID NO: 1949894 - RNA, 16 nt, Human
gggcucagcaaggcca

SEQ ID NO: 1949895 - RNA, 17 nt, Human
gggcucagcaaggccac

SEQ ID NO: 1949896 - RNA, 18 nt, Human
gggcucagcaaggccacc

SEQ ID NO: 1949897 - RNA, 19 nt, Human
gggcucagcaaggccaccu

SEQ ID NO: 1949898 - RNA, 20 nt, Human
gggcucagcaaggccaccuc

SEQ ID NO: 1949899 - RNA, 15 nt, Human
gggcugggcagagga

SEQ ID NO: 1949900 - RNA, 12 nt, Human
gggcugggcaga

SEQ ID NO: 1949901 - RNA, 21 nt, Human
gggcugcaccggcuggccugg

SEQ ID NO: 1949902 - RNA, 20 nt, Human
gggcugcaccggcuggccug

SEQ ID NO: 1949903 - RNA, 14 nt, Human
aaaaugggagaucu

SEQ ID NO: 1949904 - RNA, 16 nt, Human
aaaaugguuuaaaugg

SEQ ID NO: 1949905 - RNA, 18 nt, Human
aaaaugguuuaaaugguc

SEQ ID NO: 1949906 - RNA, 17 nt, Human
gggcuggguucuaccca

SEQ ID NO: 1949907 - RNA, 22 nt, Human
gggcugggcccacccaagcagg

SEQ ID NO: 1949908 - RNA, 19 nt, Human
gggcugggggaugggccug

SEQ ID NO: 1949909 - RNA, 21 nt, Human
gggcugggggaugggccugag

SEQ ID NO: 1949910 - RNA, 15 nt, Human
gggccucagugccac

SEQ ID NO: 1949911 - RNA, 13 nt, Human
gggccucagugcc

SEQ ID NO: 1949912 - RNA, 14 nt, Human
gggccucagugcca

SEQ ID NO: 1949913 - RNA, 22 nt, Human
gggccucgguguggagaagcgg

SEQ ID NO: 1949914 - RNA, 18 nt, Human
gggccucuuaugggcugg

SEQ ID NO: 1949915 - RNA, 21 nt, Human
gggcggugagaggggaacaga

SEQ ID NO: 1949916 - RNA, 18 nt, Human
gggcgugagaccugcccc

SEQ ID NO: 1949917 - RNA, 19 nt, Human
gggcgugagaccugccccu

SEQ ID NO: 1949918 - RNA, 15 nt, Human
gggcgugguggugag

SEQ ID NO: 1949919 - RNA, 14 nt, Human
gggccaggagccuc

SEQ ID NO: 1949920 - RNA, 13 nt, Human
gggccaggagccu

SEQ ID NO: 1949921 - RNA, 12 nt, Human
gggccaggagcc

SEQ ID NO: 1949922 - RNA, 14 nt, Human
gggccgccuguccu

SEQ ID NO: 1949923 - RNA, 19 nt, Human
gggccauugaacucugaga

SEQ ID NO: 1949924 - RNA, 17 nt, Human
uuuugugcauuaucuag

SEQ ID NO: 1949925 - RNA, 20 nt, Human
uuuugugcauuaucuagaua

SEQ ID NO: 1949926 - RNA, 21 nt, Human
uuuugugaugucccaacuugu

SEQ ID NO: 1949927 - RNA, 13 nt, Human
uuuugcucuaaaa

SEQ ID NO: 1949928 - RNA, 15 nt, Human
uuuugcucuaaaaua

SEQ ID NO: 1949929 - RNA, 16 nt, Human
uuuugcucuaaaauau

SEQ ID NO: 1949930 - RNA, 22 nt, Human
uuuugcucuaaaauauuuauga

SEQ ID NO: 1949931 - RNA, 22 nt, Human
uuuugcuaaguaaaucucuucu

SEQ ID NO: 1949932 - RNA, 21 nt, Human
uuuuguuccacaaguuaaaua

SEQ ID NO: 1949933 - RNA, 15 nt, Human
uuuuguuccacaagu

SEQ ID NO: 1949934 - RNA, 24 nt, Human
uuuuguucauuucauccuuucacu

SEQ ID NO: 1949935 - RNA, 23 nt, Human
uuuuuauacauaaacaagaccac

SEQ ID NO: 1949936 - RNA, 20 nt, Human
uuuuuagaugugcugcuuug

SEQ ID NO: 1949937 - RNA, 12 nt, Human
uuuuuauggcuu

SEQ ID NO: 1949938 - RNA, 20 nt, Human
uuuuuaucgucacugcuuaa

SEQ ID NO: 1949939 - RNA, 12 nt, Human
uuuuuaucaugu

SEQ ID NO: 1949940 - RNA, 11 nt, Human
uuuuuacuaau

SEQ ID NO: 1949941 - RNA, 22 nt, Human
uuuuuagacagagucucacugu

SEQ ID NO: 1949942 - RNA, 12 nt, Human
uuuuuagaauuu

SEQ ID NO: 1949943 - RNA, 16 nt, Human
uuuugagcccuuguuu

SEQ ID NO: 1949944 - RNA, 22 nt, Human
auuaagcaugacagaaaauaug

SEQ ID NO: 1949945 - RNA, 17 nt, Human
uuuugagugccuuacac

SEQ ID NO: 1949946 - RNA, 17 nt, Human
uuuugauccaagcuggu

SEQ ID NO: 1949947 - RNA, 19 nt, Human
uuuugauagcauuguaagc

SEQ ID NO: 1949948 - RNA, 23 nt, Human
uuuugagucuuuuuuuuuuaagu

SEQ ID NO: 1949949 - RNA, 13 nt, Human
auuaagauuauaa

SEQ ID NO: 1949950 - RNA, 19 nt, Human
auuaaagaaauaauuuuau

SEQ ID NO: 1949951 - RNA, 16 nt, Human
auuaaagaaauaauuu

SEQ ID NO: 1949952 - RNA, 20 nt, Human
auuaagcaugacagaaaaua

SEQ ID NO: 1949953 - RNA, 15 nt, Human
auuaagauuauaauu

SEQ ID NO: 1949954 - RNA, 16 nt, Human
auuaagauuauaauug

SEQ ID NO: 1949955 - RNA, 17 nt, Human
auuaagauuauaauugu

SEQ ID NO: 1949956 - RNA, 18 nt, Human
auuaagauuauaauuguu

SEQ ID NO: 1949957 - RNA, 14 nt, Human
uuuugaucucacau

SEQ ID NO: 1949958 - RNA, 16 nt, Human
uuuugauguaaagaug

SEQ ID NO: 1949959 - RNA, 18 nt, Human
uuuugauguaaagauguu

SEQ ID NO: 1949960 - RNA, 17 nt, Human
uuuugcaagguaaaauu

SEQ ID NO: 1949961 - RNA, 18 nt, Human
uuuugcaagguaaaauuu

SEQ ID NO: 1949962 - RNA, 21 nt, Human
uuuugcaagguaaaauuuuag

SEQ ID NO: 1949963 - RNA, 21 nt, Human
uuuugcauaguucuagugcag

SEQ ID NO: 1949964 - RNA, 13 nt, Human
uuuugcaggagca

SEQ ID NO: 1949965 - RNA, 23 nt, Human
uuuugccauguuggccaggcugg

SEQ ID NO: 1949966 - RNA, 13 nt, Human
uuuugccagccca

SEQ ID NO: 1949967 - RNA, 21 nt, Human
auuacaguggggaaugaagau

SEQ ID NO: 1949968 - RNA, 18 nt, Human
auuaauagcauucgaaga

SEQ ID NO: 1949969 - RNA, 16 nt, Human
auuaaguacuauguau

SEQ ID NO: 1949970 - RNA, 14 nt, Human
auuaaguacuaugu

SEQ ID NO: 1949971 - RNA, 15 nt, Human
uuuuuauuaaucacu

SEQ ID NO: 1949972 - RNA, 19 nt, Human
uuuuuauuaaucacugugu

SEQ ID NO: 1949973 - RNA, 21 nt, Human
uuuuuauuaaucacuguguau

SEQ ID NO: 1949974 - RNA, 20 nt, Human
uuuuuauggcuuuugugcau

SEQ ID NO: 1949975 - RNA, 21 nt, Human
uuuuuauggcuuuugugcauu

SEQ ID NO: 1949976 - RNA, 22 nt, Human
uuuuuauggcuuuugugcauua

SEQ ID NO: 1949977 - RNA, 12 nt, Human
uuuuuaugugug

SEQ ID NO: 1949978 - RNA, 19 nt, Human
uuuuuguagagccaggguc

SEQ ID NO: 1949979 - RNA, 20 nt, Human
uuuuuguagagccagggucu

SEQ ID NO: 1949980 - RNA, 19 nt, Human
uuuuugugaaaagcuccau

SEQ ID NO: 1949981 - RNA, 18 nt, Human
auuacguacuaaggauac

SEQ ID NO: 1949982 - RNA, 22 nt, Human
auuacgaaguucaagaucaaaa

SEQ ID NO: 1949983 - RNA, 17 nt, Human
auuacgaaguucaagau

SEQ ID NO: 1949984 - RNA, 12 nt, Human
auuacuaacuuc

SEQ ID NO: 1949985 - RNA, 14 nt, Human
auuacuaacuucua

SEQ ID NO: 1949986 - RNA, 15 nt, Human
auuacuaacuucuaa

SEQ ID NO: 1949987 - RNA, 16 nt, Human
auuacuaacuucuaaa

SEQ ID NO: 1949988 - RNA, 21 nt, Human
auuacuaacuucuaaaacugu

SEQ ID NO: 1949989 - RNA, 22 nt, Human
auuacuaacuucuaaaacugua

SEQ ID NO: 1949990 - RNA, 21 nt, Human
auuacuagacugccacaagga

SEQ ID NO: 1949991 - RNA, 14 nt, Human
auuacuagaguugg

SEQ ID NO: 1949992 - RNA, 13 nt, Human
auuagucccuggc

SEQ ID NO: 1949993 - RNA, 21 nt, Human
auuaguacuuuauagaagaau

SEQ ID NO: 1949994 - RNA, 18 nt, Human
auuaguacuuuauagaag

SEQ ID NO: 1949995 - RNA, 22 nt, Human
auguggaagugugggucugugu

SEQ ID NO: 1949996 - RNA, 23 nt, Human
auguggaagugugggucugugug

SEQ ID NO: 1949997 - RNA, 15 nt, Human
auguggaaguguggg

SEQ ID NO: 1949998 - RNA, 16 nt, Human
auguggaagugugggu

SEQ ID NO: 1949999 - RNA, 13 nt, Human
auguggaagugug

SEQ ID NO: 1950000 - RNA, 20 nt, Human
auguggaguucaucuugaau

SEQ ID NO: 1950001 - RNA, 16 nt, Human
auguggacuuaggaag

SEQ ID NO: 1950002 - RNA, 17 nt, Human
auguggacuuaggaagg

SEQ ID NO: 1950003 - RNA, 19 nt, Human
auguggagucagccucgca

SEQ ID NO: 1950004 - RNA, 24 nt, Human
auguggaguucaucuugaauugua

SEQ ID NO: 1950005 - RNA, 18 nt, Human
auguguguguguugugug

SEQ ID NO: 1950006 - RNA, 23 nt, Human
auguguguuuuaaaaugagaaau

SEQ ID NO: 1950007 - RNA, 10 nt, Human
augugugugu

SEQ ID NO: 1950008 - RNA, 12 nt, Human
augugugugugc

SEQ ID NO: 1950009 - RNA, 18 nt, Human
augugugugaugugacau

SEQ ID NO: 1950010 - RNA, 19 nt, Human
augugugugaugugacauu

SEQ ID NO: 1950011 - RNA, 20 nt, Human
augugugugaugugacauuu

SEQ ID NO: 1950012 - RNA, 20 nt, Human
auggggcccugccuccuuug

SEQ ID NO: 1950013 - RNA, 21 nt, Human
auggggaggcaaguguggggg

SEQ ID NO: 1950014 - RNA, 14 nt, Human
uuuuaauaaacacu

SEQ ID NO: 1950015 - RNA, 13 nt, Human
uuuuaaguuugca

SEQ ID NO: 1950016 - RNA, 15 nt, Human
uuuuaaguuugcacu

SEQ ID NO: 1950017 - RNA, 16 nt, Human
uuuuaaguuugcacuc

SEQ ID NO: 1950018 - RNA, 14 nt, Human
augugccuaaauaa

SEQ ID NO: 1950019 - RNA, 18 nt, Human
augugccuaaauaaguua

SEQ ID NO: 1950020 - RNA, 15 nt, Human
augugccugcuucag

SEQ ID NO: 1950021 - RNA, 23 nt, Human
augugccugcuucagccucccac

SEQ ID NO: 1950022 - RNA, 22 nt, Human
augugccagguuuuuggucuga

SEQ ID NO: 1950023 - RNA, 20 nt, Human
auguugcccuguugcugccu

SEQ ID NO: 1950024 - RNA, 20 nt, Human
auguugcccaggcaggucuu

SEQ ID NO: 1950025 - RNA, 22 nt, Human
uuuuacuuuuuuuuuauuuuau

SEQ ID NO: 1950026 - RNA, 18 nt, Human
uuuuagaaacaauaugga

SEQ ID NO: 1950027 - RNA, 18 nt, Human
uuuuagaauuuugugaaa

SEQ ID NO: 1950028 - RNA, 18 nt, Human
auguucaucaaugaauga

SEQ ID NO: 1950029 - RNA, 18 nt, Human
auguugcauagaauaaaa

SEQ ID NO: 1950030 - RNA, 17 nt, Human
auguugcauagaauaaa

SEQ ID NO: 1950031 - RNA, 17 nt, Human
auguugcccaggcaggu

SEQ ID NO: 1950032 - RNA, 22 nt, Human
auguugccaaaaugguggccug

SEQ ID NO: 1950033 - RNA, 12 nt, Human
auguugcccagg

SEQ ID NO: 1950034 - RNA, 15 nt, Human
auguugcauagaaua

SEQ ID NO: 1950035 - RNA, 16 nt, Human
auguugccaaaauggu

SEQ ID NO: 1950036 - RNA, 13 nt, Human
auguuaauauuuc

SEQ ID NO: 1950037 - RNA, 13 nt, Human
auguuaauauuuu

SEQ ID NO: 1950038 - RNA, 22 nt, Human
auguuaauauuuuagguguaaa

SEQ ID NO: 1950039 - RNA, 19 nt, Human
auguuaauugauagaauaa

SEQ ID NO: 1950040 - RNA, 12 nt, Human
auguguuuagaa

SEQ ID NO: 1950041 - RNA, 11 nt, Human
auguguuuaga

SEQ ID NO: 1950042 - RNA, 19 nt, Human
auguguugccacuuuccaa

SEQ ID NO: 1950043 - RNA, 13 nt, Human
auguguugccacu

SEQ ID NO: 1950044 - RNA, 17 nt, Human
uuuucaugcuuuaucaa

SEQ ID NO: 1950045 - RNA, 14 nt, Human
uuuucauugcugug

SEQ ID NO: 1950046 - RNA, 13 nt, Human
uuuucauuuuaca

SEQ ID NO: 1950047 - RNA, 15 nt, Human
uuuucauauuuuaau

SEQ ID NO: 1950048 - RNA, 16 nt, Human
uuuucauauuuuaauu

SEQ ID NO: 1950049 - RNA, 19 nt, Human
uuuucauauuuuaauuuca

SEQ ID NO: 1950050 - RNA, 22 nt, Human
uuuucauauuuuaauuucaagc

SEQ ID NO: 1950051 - RNA, 20 nt, Human
uuuucauuuaggugaggaag

SEQ ID NO: 1950052 - RNA, 16 nt, Human
uuuucaugcuuuauca

SEQ ID NO: 1950053 - RNA, 18 nt, Human
uuuucugauauguuugua

SEQ ID NO: 1950054 - RNA, 16 nt, Human
uuuucuggacucugga

SEQ ID NO: 1950055 - RNA, 20 nt, Human
uuuucuggacucuggacuuu

SEQ ID NO: 1950056 - RNA, 22 nt, Human
uuuucuggacucuggacuuucu

SEQ ID NO: 1950057 - RNA, 14 nt, Human
uuuucugaaguugu

SEQ ID NO: 1950058 - RNA, 15 nt, Human
uuuucugaaucuucu

SEQ ID NO: 1950059 - RNA, 16 nt, Human
uuuucugaaucuucug

SEQ ID NO: 1950060 - RNA, 17 nt, Human
uuuucugaaucuucuga

SEQ ID NO: 1950061 - RNA, 13 nt, Human
uuuuauuaugcau

SEQ ID NO: 1950062 - RNA, 14 nt, Human
uuuuauuuauaugu

SEQ ID NO: 1950063 - RNA, 16 nt, Human
uuuuauuuauauguau

SEQ ID NO: 1950064 - RNA, 15 nt, Human
uuuuaggcaaguuuu

SEQ ID NO: 1950065 - RNA, 17 nt, Human
uuuuagguuuaucuuuu

SEQ ID NO: 1950066 - RNA, 11 nt, Human
uuuuauuuuau

SEQ ID NO: 1950067 - RNA, 14 nt, Human
uuuuauuucuccuu

SEQ ID NO: 1950068 - RNA, 16 nt, Human
uuuuauuucuccuuuu

SEQ ID NO: 1950069 - RNA, 18 nt, Human
uuuuauuucuccuuuugu

SEQ ID NO: 1950070 - RNA, 16 nt, Human
uuuuauuuucuaaagu

SEQ ID NO: 1950071 - RNA, 15 nt, Human
uuuucaguucaaagu

SEQ ID NO: 1950072 - RNA, 23 nt, Human
uuuucaguucaaagucaugaugu

SEQ ID NO: 1950073 - RNA, 24 nt, Human
uuuucaguucaaagucaugauguu

SEQ ID NO: 1950074 - RNA, 16 nt, Human
uuuucauaagauauuu

SEQ ID NO: 1950075 - RNA, 17 nt, Human
uuuucauaagauauuuu

SEQ ID NO: 1950076 - RNA, 19 nt, Human
uuuucauaagauauuuuau

SEQ ID NO: 1950077 - RNA, 21 nt, Human
auuaaaaccugggauuauaua

SEQ ID NO: 1950078 - RNA, 23 nt, Human
auuaaaagaaaauaaaaaaaaga

SEQ ID NO: 1950079 - RNA, 15 nt, Human
auuaaaaaucucaaa

SEQ ID NO: 1950080 - RNA, 19 nt, Human
auuaaaaaucucaaauuuc

SEQ ID NO: 1950081 - RNA, 15 nt, Human
auguuuuguaaacuu

SEQ ID NO: 1950082 - RNA, 16 nt, Human
auguuuuguaaacuuu

SEQ ID NO: 1950083 - RNA, 17 nt, Human
auguuuuguaaacuuug

SEQ ID NO: 1950084 - RNA, 18 nt, Human
auguuuuguaaacuuuga

SEQ ID NO: 1950085 - RNA, 20 nt, Human
auguuuuguaaacuuugaaa

SEQ ID NO: 1950086 - RNA, 21 nt, Human
auguuuuguaaacuuugaaau

SEQ ID NO: 1950087 - RNA, 20 nt, Human
auuaaaaaucucaaauuucu

SEQ ID NO: 1950088 - RNA, 22 nt, Human
auuaaaaaucucaaauuucuaa

SEQ ID NO: 1950089 - RNA, 23 nt, Human
auuaaaacacaacaucuuuuucu

SEQ ID NO: 1950090 - RNA, 12 nt, Human
auguuuuuaaaa

SEQ ID NO: 1950091 - RNA, 17 nt, Human
auguuuaguaaucauau

SEQ ID NO: 1950092 - RNA, 18 nt, Human
auguuguuuuguacagau

SEQ ID NO: 1950093 - RNA, 19 nt, Human
auguuguuuuguacagaug

SEQ ID NO: 1950094 - RNA, 21 nt, Human
auguuguuuuguacagaugug

SEQ ID NO: 1950095 - RNA, 12 nt, Human
auguuuaaaaca

SEQ ID NO: 1950096 - RNA, 14 nt, Human
auguuuaaaacacc

SEQ ID NO: 1950097 - RNA, 16 nt, Human
auguuuaaaacaccuu

SEQ ID NO: 1950098 - RNA, 21 nt, Human
auguuuaaaacaccuucuaua

SEQ ID NO: 1950099 - RNA, 15 nt, Human
auguuguuuuguaca

SEQ ID NO: 1950100 - RNA, 17 nt, Human
auguuguuuuguacaga

SEQ ID NO: 1950101 - RNA, 12 nt, Human
auguuuauguaa

SEQ ID NO: 1950102 - RNA, 13 nt, Human
auguuuauguaaa

SEQ ID NO: 1950103 - RNA, 22 nt, Human
auguuuaaaacaccuucuauag

SEQ ID NO: 1950104 - RNA, 23 nt, Human
auguuuauguaaacaaaucuuuc

SEQ ID NO: 1950105 - RNA, 21 nt, Human
auguuuauguaaacaaaucuu

SEQ ID NO: 1950106 - RNA, 23 nt, Human
auguuuugcauguaaaagccuag

SEQ ID NO: 1950107 - RNA, 17 nt, Human
auguuuugguccacuuu

SEQ ID NO: 1950108 - RNA, 22 nt, Human
auguuuugguccacuuuuccag

SEQ ID NO: 1950109 - RNA, 23 nt, Human
auguuuugguccacuuuuccagu

SEQ ID NO: 1950110 - RNA, 20 nt, Human
auucagauaugauucaaaug

SEQ ID NO: 1950111 - RNA, 12 nt, Human
auugaaaucuuu

SEQ ID NO: 1950112 - RNA, 20 nt, Human
auuauauacuuguuguuuaa

SEQ ID NO: 1950113 - RNA, 14 nt, Human
auucaggaagcuca

SEQ ID NO: 1950114 - RNA, 17 nt, Human
auucagaguugaugguu

SEQ ID NO: 1950115 - RNA, 19 nt, Human
auucaggaagcucagggcc

SEQ ID NO: 1950116 - RNA, 17 nt, Human
auucaggaagcucaggg

SEQ ID NO: 1950117 - RNA, 18 nt, Human
auucagauaugauucaaa

SEQ ID NO: 1950118 - RNA, 20 nt, Human
auucaggaagcucagggccu

SEQ ID NO: 1950119 - RNA, 19 nt, Human
auucaguaauaacucuacc

SEQ ID NO: 1950120 - RNA, 15 nt, Human
auucaguaauaacuc

SEQ ID NO: 1950121 - RNA, 20 nt, Human
auuccagucaggcucucugg

SEQ ID NO: 1950122 - RNA, 15 nt, Human
auuccauauuagaaa

SEQ ID NO: 1950123 - RNA, 19 nt, Human
auuccauauuagaaaacuu

SEQ ID NO: 1950124 - RNA, 20 nt, Human
auuccauauuagaaaacuuu

SEQ ID NO: 1950125 - RNA, 21 nt, Human
auuccauauuagaaaacuuug

SEQ ID NO: 1950126 - RNA, 22 nt, Human
auuccauauuagaaaacuuugu

SEQ ID NO: 1950127 - RNA, 23 nt, Human
auuccauauuagaaaacuuuguu

SEQ ID NO: 1950128 - RNA, 16 nt, Human
auucccaagcucugcu

SEQ ID NO: 1950129 - RNA, 14 nt, Human
auucccaagcucug

SEQ ID NO: 1950130 - RNA, 15 nt, Human
auucccaagcucugc

SEQ ID NO: 1950131 - RNA, 17 nt, Human
auucccucgucuuuccc

SEQ ID NO: 1950132 - RNA, 18 nt, Human
auucccucgucuuuccca

SEQ ID NO: 1950133 - RNA, 16 nt, Human
auucuccuuguguuac

SEQ ID NO: 1950134 - RNA, 20 nt, Human
auucuccugccucagccucc

SEQ ID NO: 1950135 - RNA, 19 nt, Human
auucuccugccucagccuc

SEQ ID NO: 1950136 - RNA, 15 nt, Human
auucuccugccucag

SEQ ID NO: 1950137 - RNA, 17 nt, Human
auucuccugccucagcc

SEQ ID NO: 1950138 - RNA, 17 nt, Human
auucucccgggacucug

SEQ ID NO: 1950139 - RNA, 18 nt, Human
auucucccgggacucugc

SEQ ID NO: 1950140 - RNA, 23 nt, Human
auucucccgggacucugcauauu

SEQ ID NO: 1950141 - RNA, 21 nt, Human
auucuccaccugccagggaca

SEQ ID NO: 1950142 - RNA, 14 nt, Human
auucucaguuuuuc

SEQ ID NO: 1950143 - RNA, 18 nt, Human
auucucaguuuuucuuaa

SEQ ID NO: 1950144 - RNA, 11 nt, Human
auucuccugcc

SEQ ID NO: 1950145 - RNA, 12 nt, Human
auucuccugccu

SEQ ID NO: 1950146 - RNA, 14 nt, Human
auucuccugccuca

SEQ ID NO: 1950147 - RNA, 13 nt, Human
auucuccugccuc

SEQ ID NO: 1950148 - RNA, 12 nt, Human
auucuauuucaa

SEQ ID NO: 1950149 - RNA, 21 nt, Human
auucuauuucaacuucaggaa

SEQ ID NO: 1950150 - RNA, 13 nt, Human
auucuauuuuaca

SEQ ID NO: 1950151 - RNA, 21 nt, Human
auucucaagggacguccucca

SEQ ID NO: 1950152 - RNA, 20 nt, Human
auucuccaccugccagggac

SEQ ID NO: 1950153 - RNA, 19 nt, Human
auucuccaccugccaggga

SEQ ID NO: 1950154 - RNA, 14 nt, Human
auucucaugccuca

SEQ ID NO: 1950155 - RNA, 15 nt, Human
auucucaugccucag

SEQ ID NO: 1950156 - RNA, 13 nt, Human
auucucaguuuuu

SEQ ID NO: 1950157 - RNA, 17 nt, Human
auucuauggagcuauuu

SEQ ID NO: 1950158 - RNA, 15 nt, Human
auucuauguuaauau

SEQ ID NO: 1950159 - RNA, 18 nt, Human
auucuauguuaauauuuu

SEQ ID NO: 1950160 - RNA, 12 nt, Human
auucuaaagaua

SEQ ID NO: 1950161 - RNA, 14 nt, Human
auuuauucugcuca

SEQ ID NO: 1950162 - RNA, 15 nt, Human
auuuagaaauauaau

SEQ ID NO: 1950163 - RNA, 11 nt, Human
auuuagaaugg

SEQ ID NO: 1950164 - RNA, 17 nt, Human
auuuagaauggugauuu

SEQ ID NO: 1950165 - RNA, 21 nt, Human
auuuagaauggugauuuuaaa

SEQ ID NO: 1950166 - RNA, 16 nt, Human
auuuacuucuuauaca

SEQ ID NO: 1950167 - RNA, 14 nt, Human
auuuacuucuuaua

SEQ ID NO: 1950168 - RNA, 21 nt, Human
auuuacugcuagucuuaagaa

SEQ ID NO: 1950169 - RNA, 17 nt, Human
auuuacuucuuauacau

SEQ ID NO: 1950170 - RNA, 19 nt, Human
auuuaaaaagcccaaccuc

SEQ ID NO: 1950171 - RNA, 20 nt, Human
auuuaaaaacaaaaggcaau

SEQ ID NO: 1950172 - RNA, 15 nt, Human
auuuaaaaagcccaa

SEQ ID NO: 1950173 - RNA, 16 nt, Human
auuuaaaaagcccaac

SEQ ID NO: 1950174 - RNA, 18 nt, Human
auuuaaaaagcccaaccu

SEQ ID NO: 1950175 - RNA, 14 nt, Human
auuuaacagaaaug

SEQ ID NO: 1950176 - RNA, 17 nt, Human
auuuacugcauucuucu

SEQ ID NO: 1950177 - RNA, 21 nt, Human
auuuacugcauucuucugauc

SEQ ID NO: 1950178 - RNA, 12 nt, Human
auuuaacagaaa

SEQ ID NO: 1950179 - RNA, 16 nt, Human
auuuagaugcauauua

SEQ ID NO: 1950180 - RNA, 18 nt, Human
auuuaguauuuuguuuca

SEQ ID NO: 1950181 - RNA, 20 nt, Human
auuuaguaucuuuuuauuca

SEQ ID NO: 1950182 - RNA, 13 nt, Human
auuuaguguucau

SEQ ID NO: 1950183 - RNA, 22 nt, Human
auuuauaaaaauaaaaaacacu

SEQ ID NO: 1950184 - RNA, 17 nt, Human
auuuauaaaaauaaaaa

SEQ ID NO: 1950185 - RNA, 14 nt, Human
auuuauuaaauuuu

SEQ ID NO: 1950186 - RNA, 21 nt, Human
auuuauuaaauuuuuuuguau

SEQ ID NO: 1950187 - RNA, 24 nt, Human
auuuauuaaauuuuuuuguaugaa

SEQ ID NO: 1950188 - RNA, 22 nt, Human
auuuauuaacugcucaguguuu

SEQ ID NO: 1950189 - RNA, 13 nt, Human
auuuauuaacuua

SEQ ID NO: 1950190 - RNA, 14 nt, Human
auuuauuaacuuaa

SEQ ID NO: 1950191 - RNA, 16 nt, Human
auuuauuaacuuaaua

SEQ ID NO: 1950192 - RNA, 20 nt, Human
auuuauuaagguuacagauu

SEQ ID NO: 1950193 - RNA, 17 nt, Human
auuuauuaacuuaauaa

SEQ ID NO: 1950194 - RNA, 20 nt, Human
auuuauuaacuuaauaauca

SEQ ID NO: 1950195 - RNA, 21 nt, Human
auuuauuaacuuaauaaucaa

SEQ ID NO: 1950196 - RNA, 23 nt, Human
auuuauuaacuuaauaaucaaga

SEQ ID NO: 1950197 - RNA, 17 nt, Human
auuuauuuacugcuagu

SEQ ID NO: 1950198 - RNA, 14 nt, Human
auuuauuuauucau

SEQ ID NO: 1950199 - RNA, 14 nt, Human
auuuauucauuagu

SEQ ID NO: 1950200 - RNA, 13 nt, Human
auuuauucugcuc

SEQ ID NO: 1950201 - RNA, 14 nt, Human
auuuauucuaauua

SEQ ID NO: 1950202 - RNA, 16 nt, Human
auuucccuuuagcugu

SEQ ID NO: 1950203 - RNA, 20 nt, Human
auuucccuuuagcuguguua

SEQ ID NO: 1950204 - RNA, 21 nt, Human
auuucccuuuagcuguguuau

SEQ ID NO: 1950205 - RNA, 22 nt, Human
auuucccuuuagcuguguuauu

SEQ ID NO: 1950206 - RNA, 17 nt, Human
auuuccccuaaucuuuu

SEQ ID NO: 1950207 - RNA, 15 nt, Human
auuuccguuaaaaua

SEQ ID NO: 1950208 - RNA, 16 nt, Human
auuuccguuaaaauac

SEQ ID NO: 1950209 - RNA, 18 nt, Human
auuuccguaauucuuauu

SEQ ID NO: 1950210 - RNA, 23 nt, Human
auuucccuuuagcuguguuauua

SEQ ID NO: 1950211 - RNA, 14 nt, Human
auuuccguaauucu

SEQ ID NO: 1950212 - RNA, 16 nt, Human
auuuccguaauucuua

SEQ ID NO: 1950213 - RNA, 22 nt, Human
auuugaacauguggcuugaauu

SEQ ID NO: 1950214 - RNA, 20 nt, Human
auuugaaagugccuuugcag

SEQ ID NO: 1950215 - RNA, 22 nt, Human
auuugaaagugccuuugcagcu

SEQ ID NO: 1950216 - RNA, 18 nt, Human
auuugaaaaugauaaaag

SEQ ID NO: 1950217 - RNA, 17 nt, Human
auuugaaagugccuuug

SEQ ID NO: 1950218 - RNA, 14 nt, Human
auuugaaaauuuug

SEQ ID NO: 1950219 - RNA, 17 nt, Human
auuugaaaacagaaauu

SEQ ID NO: 1950220 - RNA, 19 nt, Human
auuugaaaacagaaauugg

SEQ ID NO: 1950221 - RNA, 20 nt, Human
auuugaaaacagaaauuggu

SEQ ID NO: 1950222 - RNA, 15 nt, Human
auuuccccagggcac

SEQ ID NO: 1950223 - RNA, 14 nt, Human
auuuccccagggca

SEQ ID NO: 1950224 - RNA, 17 nt, Human
auuucccccuuucuucc

SEQ ID NO: 1950225 - RNA, 14 nt, Human
auuucccccuuucu

SEQ ID NO: 1950226 - RNA, 18 nt, Human
auuucccccuuucuuccu

SEQ ID NO: 1950227 - RNA, 19 nt, Human
auuucccccuuucuuccuc

SEQ ID NO: 1950228 - RNA, 20 nt, Human
auuucccccuuucuuccuca

SEQ ID NO: 1950229 - RNA, 16 nt, Human
auuuccccuaaucuuu

SEQ ID NO: 1950230 - RNA, 20 nt, Human
auuuccagugaaaucaguua

SEQ ID NO: 1950231 - RNA, 17 nt, Human
auuuccagccaaagccu

SEQ ID NO: 1950232 - RNA, 22 nt, Human
auuucauuugugccagaaugcu

SEQ ID NO: 1950233 - RNA, 16 nt, Human
auuucaaacggccuca

SEQ ID NO: 1950234 - RNA, 21 nt, Human
auuucauucgggccccaccug

SEQ ID NO: 1950235 - RNA, 15 nt, Human
auugggccccugcca

SEQ ID NO: 1950236 - RNA, 16 nt, Human
auugggccccugccag

SEQ ID NO: 1950237 - RNA, 21 nt, Human
auuggguggggggcuucauac

SEQ ID NO: 1950238 - RNA, 22 nt, Human
auuggguggggggcuucauaca

SEQ ID NO: 1950239 - RNA, 20 nt, Human
auuggguggggggcuucaua

SEQ ID NO: 1950240 - RNA, 18 nt, Human
auugacccacaagaaaug

SEQ ID NO: 1950241 - RNA, 17 nt, Human
auugacaggcgaaagaa

SEQ ID NO: 1950242 - RNA, 18 nt, Human
auugaaagaauguaaagc

SEQ ID NO: 1950243 - RNA, 20 nt, Human
auugaaagaauguaaagcaa

SEQ ID NO: 1950244 - RNA, 13 nt, Human
auugaaagaaugu

SEQ ID NO: 1950245 - RNA, 14 nt, Human
auugaaagaaugua

SEQ ID NO: 1950246 - RNA, 17 nt, Human
auugaaagaauguaaag

SEQ ID NO: 1950247 - RNA, 20 nt, Human
auugaaaauuauuaaucaga

SEQ ID NO: 1950248 - RNA, 22 nt, Human
auugaaaauuauuaaucagaag

SEQ ID NO: 1950249 - RNA, 21 nt, Human
auugaaaaguuauuucccuuu

SEQ ID NO: 1950250 - RNA, 16 nt, Human
auucuuuuugaaaugu

SEQ ID NO: 1950251 - RNA, 23 nt, Human
auucuuauuccauauuagaaaac

SEQ ID NO: 1950252 - RNA, 18 nt, Human
auucuuauuuaaugaaag

SEQ ID NO: 1950253 - RNA, 14 nt, Human
auucuuauuuaaug

SEQ ID NO: 1950254 - RNA, 13 nt, Human
auucuuauuccau

SEQ ID NO: 1950255 - RNA, 21 nt, Human
auucuuauuccauauuagaaa

SEQ ID NO: 1950256 - RNA, 22 nt, Human
auucuuauuccauauuagaaaa

SEQ ID NO: 1950257 - RNA, 13 nt, Human
auucuuauuacua

SEQ ID NO: 1950258 - RNA, 13 nt, Human
auucuuauuuaau

SEQ ID NO: 1950259 - RNA, 18 nt, Human
auucuuuucugaaguugu

SEQ ID NO: 1950260 - RNA, 15 nt, Human
auucuuugcaaaaau

SEQ ID NO: 1950261 - RNA, 21 nt, Human
auucuuugcacuuuuucuuaa

SEQ ID NO: 1950262 - RNA, 17 nt, Human
auucuuuguuaauuugg

SEQ ID NO: 1950263 - RNA, 13 nt, Human
auucuucuccacu

SEQ ID NO: 1950264 - RNA, 22 nt, Human
auucuuccucccucccucuuuc

SEQ ID NO: 1950265 - RNA, 19 nt, Human
auucuguuuuuaaaaauua

SEQ ID NO: 1950266 - RNA, 23 nt, Human
auucugucuucauccccucagaa

SEQ ID NO: 1950267 - RNA, 24 nt, Human
auucugucucuggauuauauuaug

SEQ ID NO: 1950268 - RNA, 19 nt, Human
auucugggaauguauagua

SEQ ID NO: 1950269 - RNA, 16 nt, Human
auucugggaauguaua

SEQ ID NO: 1950270 - RNA, 17 nt, Human
auucugggaauguauag

SEQ ID NO: 1950271 - RNA, 22 nt, Human
auucugggaauguauaguauuu

SEQ ID NO: 1950272 - RNA, 15 nt, Human
auucugggaauguau

SEQ ID NO: 1950273 - RNA, 14 nt, Human
auucugauuucuuu

SEQ ID NO: 1950274 - RNA, 20 nt, Human
auucugauuucuuuucacca

SEQ ID NO: 1950275 - RNA, 14 nt, Human
auugugucucuugg

SEQ ID NO: 1950276 - RNA, 18 nt, Human
auugugucucuugguccu

SEQ ID NO: 1950277 - RNA, 12 nt, Human
auugguguugac

SEQ ID NO: 1950278 - RNA, 19 nt, Human
auugguguaagguacuuuc

SEQ ID NO: 1950279 - RNA, 18 nt, Human
auuggucuaucuacuggc

SEQ ID NO: 1950280 - RNA, 17 nt, Human
auuggugaguuaggaac

SEQ ID NO: 1950281 - RNA, 13 nt, Human
auuguauucagag

SEQ ID NO: 1950282 - RNA, 20 nt, Human
auuguccccgacccuugccg

SEQ ID NO: 1950283 - RNA, 19 nt, Human
auuguccccgacccuugcc

SEQ ID NO: 1950284 - RNA, 17 nt, Human
auuguccccgacccuug

SEQ ID NO: 1950285 - RNA, 13 nt, Human
auuguccagagcu

SEQ ID NO: 1950286 - RNA, 19 nt, Human
auuguccagagcugcuucc

SEQ ID NO: 1950287 - RNA, 23 nt, Human
auuguccagagcugcuuccccgu

SEQ ID NO: 1950288 - RNA, 13 nt, Human
auugugauguguc

SEQ ID NO: 1950289 - RNA, 14 nt, Human
auugugaugugucc

SEQ ID NO: 1950290 - RNA, 15 nt, Human
auugugauguguccu

SEQ ID NO: 1950291 - RNA, 17 nt, Human
auugugaauaaugauuu

SEQ ID NO: 1950292 - RNA, 14 nt, Human
auuuucaaugugau

SEQ ID NO: 1950293 - RNA, 18 nt, Human
auuuucaacgcagcccug

SEQ ID NO: 1950294 - RNA, 20 nt, Human
auuuucaacgcagcccugcu

SEQ ID NO: 1950295 - RNA, 20 nt, Human
auuuucaagacugaauucca

SEQ ID NO: 1950296 - RNA, 21 nt, Human
auuuuauuuuuuucugaauua

SEQ ID NO: 1950297 - RNA, 18 nt, Human
auuuuauuuuuagaauuu

SEQ ID NO: 1950298 - RNA, 23 nt, Human
auuuuagcaaagcggguuauaau

SEQ ID NO: 1950299 - RNA, 11 nt, Human
auuuuauucuu

SEQ ID NO: 1950300 - RNA, 12 nt, Human
auuuuauucuug

SEQ ID NO: 1950301 - RNA, 13 nt, Human
auuuuauucuuga

SEQ ID NO: 1950302 - RNA, 14 nt, Human
auuuuauucuugau

SEQ ID NO: 1950303 - RNA, 15 nt, Human
auuuuauucuugauc

SEQ ID NO: 1950304 - RNA, 15 nt, Human
auuuuauuuuuagaa

SEQ ID NO: 1950305 - RNA, 19 nt, Human
auuuuccaucuaaaaauau

SEQ ID NO: 1950306 - RNA, 15 nt, Human
auuuuccaucuaaaa

SEQ ID NO: 1950307 - RNA, 18 nt, Human
auuuuccaucuaaaaaua

SEQ ID NO: 1950308 - RNA, 13 nt, Human
auuuucauuagca

SEQ ID NO: 1950309 - RNA, 14 nt, Human
auuuucauuagcaa

SEQ ID NO: 1950310 - RNA, 15 nt, Human
auuuucauuagcaaa

SEQ ID NO: 1950311 - RNA, 16 nt, Human
auuuucauuagcaaaa

SEQ ID NO: 1950312 - RNA, 14 nt, Human
auuuucauuuuaca

SEQ ID NO: 1950313 - RNA, 17 nt, Human
auuuucauuuuacaguu

SEQ ID NO: 1950314 - RNA, 17 nt, Human
auuuucauuagcaaaaa

SEQ ID NO: 1950315 - RNA, 22 nt, Human
auuuucauuagcaaaaaaaguu

SEQ ID NO: 1950316 - RNA, 22 nt, Human
auuuucaguuauuauauuuaca

SEQ ID NO: 1950317 - RNA, 13 nt, Human
auuuucagauuca

SEQ ID NO: 1950318 - RNA, 12 nt, Human
auuuucagauuu

SEQ ID NO: 1950319 - RNA, 13 nt, Human
auuuucagauuug

SEQ ID NO: 1950320 - RNA, 20 nt, Human
auuuucagauuugcacaaaa

SEQ ID NO: 1950321 - RNA, 18 nt, Human
auuuucagauuugcacaa

SEQ ID NO: 1950322 - RNA, 19 nt, Human
auuuucagauuugcacaaa

SEQ ID NO: 1950323 - RNA, 14 nt, Human
auuuucagauuugc

SEQ ID NO: 1950324 - RNA, 15 nt, Human
auuuucagauuugca

SEQ ID NO: 1950325 - RNA, 16 nt, Human
auuuucagauuugcac

SEQ ID NO: 1950326 - RNA, 17 nt, Human
auuuucagauuugcaca

SEQ ID NO: 1950327 - RNA, 14 nt, Human
auuugugauacaau

SEQ ID NO: 1950328 - RNA, 23 nt, Human
auuugugaagguggaaauaaacu

SEQ ID NO: 1950329 - RNA, 23 nt, Human
auuugaagguagaauguuuucaa

SEQ ID NO: 1950330 - RNA, 18 nt, Human
auuugaagguagaauguu

SEQ ID NO: 1950331 - RNA, 17 nt, Human
auuuuaccuuugacaaa

SEQ ID NO: 1950332 - RNA, 16 nt, Human
auuuuacauaaauuua

SEQ ID NO: 1950333 - RNA, 17 nt, Human
auuuuacauaaauuuag

SEQ ID NO: 1950334 - RNA, 13 nt, Human
auuuuacauaaau

SEQ ID NO: 1950335 - RNA, 15 nt, Human
auuuuaauucaguug

SEQ ID NO: 1950336 - RNA, 16 nt, Human
auuuuaauguaauuga

SEQ ID NO: 1950337 - RNA, 15 nt, Human
auuuuaaacagagga

SEQ ID NO: 1950338 - RNA, 15 nt, Human
uugggcagagaggcu

SEQ ID NO: 1950339 - RNA, 19 nt, Human
uuggggaagaacgaagcca

SEQ ID NO: 1950340 - RNA, 17 nt, Human
uugggguacccacugcu

SEQ ID NO: 1950341 - RNA, 12 nt, Human
uugggcucccaa

SEQ ID NO: 1950342 - RNA, 13 nt, Human
uugggcucugcug

SEQ ID NO: 1950343 - RNA, 20 nt, Human
augaaccacaucuugcucug

SEQ ID NO: 1950344 - RNA, 13 nt, Human
augaaccacaucu

SEQ ID NO: 1950345 - RNA, 12 nt, Human
augaacagacuu

SEQ ID NO: 1950346 - RNA, 13 nt, Human
augaacagugcac

SEQ ID NO: 1950347 - RNA, 16 nt, Human
augaacauacaaaugc

SEQ ID NO: 1950348 - RNA, 15 nt, Human
augaacauguuuuag

SEQ ID NO: 1950349 - RNA, 19 nt, Human
uugguuuuuauuucuccuu

SEQ ID NO: 1950350 - RNA, 17 nt, Human
uuguaacuaaaauaauu

SEQ ID NO: 1950351 - RNA, 18 nt, Human
uuguaacuaaaauaauuu

SEQ ID NO: 1950352 - RNA, 21 nt, Human
uuguaacuaaaauaauuuugu

SEQ ID NO: 1950353 - RNA, 13 nt, Human
uuguaaaaaugua

SEQ ID NO: 1950354 - RNA, 14 nt, Human
uuguaaggaaugau

SEQ ID NO: 1950355 - RNA, 22 nt, Human
uuguaagcaugcacaaauucug

SEQ ID NO: 1950356 - RNA, 13 nt, Human
uuguaagaaauac

SEQ ID NO: 1950357 - RNA, 14 nt, Human
uuguaagaaauacu

SEQ ID NO: 1950358 - RNA, 22 nt, Human
uuguaacuaaaauaauuuugua

SEQ ID NO: 1950359 - RNA, 23 nt, Human
uuguaacuaaaauaauuuuguaa

SEQ ID NO: 1950360 - RNA, 22 nt, Human
uuguaacuauguuuaaaguaau

SEQ ID NO: 1950361 - RNA, 21 nt, Human
uuguaacuguuuagaugaaug

SEQ ID NO: 1950362 - RNA, 22 nt, Human
uuguaacuguuuagaugaaugu

SEQ ID NO: 1950363 - RNA, 11 nt, Human
uuguaagaaau

SEQ ID NO: 1950364 - RNA, 21 nt, Human
uugguuccaagucuuugcuau

SEQ ID NO: 1950365 - RNA, 22 nt, Human
uugguuccaagucuuugcuauu

SEQ ID NO: 1950366 - RNA, 18 nt, Human
uugguucauuuucagauu

SEQ ID NO: 1950367 - RNA, 19 nt, Human
uugguuaggcauuguggga

SEQ ID NO: 1950368 - RNA, 20 nt, Human
uugguuauagugcaauauau

SEQ ID NO: 1950369 - RNA, 23 nt, Human
uugguuauagugcaauauauuuu

SEQ ID NO: 1950370 - RNA, 13 nt, Human
uugguucaaaugu

SEQ ID NO: 1950371 - RNA, 15 nt, Human
uugguucaaaugugu

SEQ ID NO: 1950372 - RNA, 22 nt, Human
uugggguacccacugcucuggu

SEQ ID NO: 1950373 - RNA, 20 nt, Human
uuguaaggaaugauuaauua

SEQ ID NO: 1950374 - RNA, 16 nt, Human
uuguaagcguauggcu

SEQ ID NO: 1950375 - RNA, 17 nt, Human
uuguaagcguauggcuu

SEQ ID NO: 1950376 - RNA, 18 nt, Human
uuguaagcguauggcuuu

SEQ ID NO: 1950377 - RNA, 22 nt, Human
uuguaagcguauggcuuuauuu

SEQ ID NO: 1950378 - RNA, 13 nt, Human
uuguaaugaaaac

SEQ ID NO: 1950379 - RNA, 13 nt, Human
uuguaauguaacu

SEQ ID NO: 1950380 - RNA, 14 nt, Human
uuguaauguaacug

SEQ ID NO: 1950381 - RNA, 12 nt, Human
uuguaauguugu

SEQ ID NO: 1950382 - RNA, 19 nt, Human
uuguaauguugugaauaau

SEQ ID NO: 1950383 - RNA, 21 nt, Human
uuguaauguugugaauaauua

SEQ ID NO: 1950384 - RNA, 23 nt, Human
uuguaauguugugaauaauuaca

SEQ ID NO: 1950385 - RNA, 15 nt, Human
uuguaauguaacugc

SEQ ID NO: 1950386 - RNA, 20 nt, Human
uuguaauguaacugcucuug

SEQ ID NO: 1950387 - RNA, 21 nt, Human
uuguaauuaauaauagauugu

SEQ ID NO: 1950388 - RNA, 15 nt, Human
uuguaguucuuuaaa

SEQ ID NO: 1950389 - RNA, 12 nt, Human
uuguauaaauuu

SEQ ID NO: 1950390 - RNA, 19 nt, Human
uuguauaaauuuauuuacu

SEQ ID NO: 1950391 - RNA, 17 nt, Human
uuguaguucuuuaaacu

SEQ ID NO: 1950392 - RNA, 23 nt, Human
uuguauaaauuuauuuacugcua

SEQ ID NO: 1950393 - RNA, 22 nt, Human
uuguauaguuauguaaauaauu

SEQ ID NO: 1950394 - RNA, 16 nt, Human
augacaaauguuucua

SEQ ID NO: 1950395 - RNA, 16 nt, Human
augacaaaauucuuuc

SEQ ID NO: 1950396 - RNA, 13 nt, Human
augacaaauguuu

SEQ ID NO: 1950397 - RNA, 15 nt, Human
augacaaauguuucu

SEQ ID NO: 1950398 - RNA, 19 nt, Human
augacacgaauauugcuga

SEQ ID NO: 1950399 - RNA, 20 nt, Human
augacacgaauauugcugau

SEQ ID NO: 1950400 - RNA, 15 nt, Human
augacaggccugucc

SEQ ID NO: 1950401 - RNA, 23 nt, Human
augacagaaaauauguauuaaca

SEQ ID NO: 1950402 - RNA, 14 nt, Human
augacagaaaauau

SEQ ID NO: 1950403 - RNA, 18 nt, Human
augacagaaaauauguau

SEQ ID NO: 1950404 - RNA, 19 nt, Human
augacagaaaauauguauu

SEQ ID NO: 1950405 - RNA, 20 nt, Human
augacagaaaauauguauua

SEQ ID NO: 1950406 - RNA, 16 nt, Human
uugcuuuuaaaaucca

SEQ ID NO: 1950407 - RNA, 12 nt, Human
uugcuuuaauuu

SEQ ID NO: 1950408 - RNA, 21 nt, Human
uugcuuuaauuccaugaaugu

SEQ ID NO: 1950409 - RNA, 18 nt, Human
uugcuuuuaaaauuuuaa

SEQ ID NO: 1950410 - RNA, 15 nt, Human
uugcuuuuaaaauuu

SEQ ID NO: 1950411 - RNA, 17 nt, Human
uuggaaagaguaggaag

SEQ ID NO: 1950412 - RNA, 19 nt, Human
uuggaaacacuaaauguua

SEQ ID NO: 1950413 - RNA, 20 nt, Human
uuggaaacacuaaauguuaa

SEQ ID NO: 1950414 - RNA, 21 nt, Human
uuggaaacacuaaauguuaaa

SEQ ID NO: 1950415 - RNA, 14 nt, Human
uugcuuuugagaga

SEQ ID NO: 1950416 - RNA, 15 nt, Human
uugcuuuugagagaa

SEQ ID NO: 1950417 - RNA, 19 nt, Human
uugcugauggugcaaugac

SEQ ID NO: 1950418 - RNA, 18 nt, Human
uugcugauggugcaauga

SEQ ID NO: 1950419 - RNA, 17 nt, Human
uugcugauggugcaaug

SEQ ID NO: 1950420 - RNA, 20 nt, Human
uugcugaccccacuuggacu

SEQ ID NO: 1950421 - RNA, 12 nt, Human
uugcugacuuag

SEQ ID NO: 1950422 - RNA, 14 nt, Human
uugcugacuuagaa

SEQ ID NO: 1950423 - RNA, 15 nt, Human
uugcugacuuagaau

SEQ ID NO: 1950424 - RNA, 17 nt, Human
uugcugaacauuggaga

SEQ ID NO: 1950425 - RNA, 18 nt, Human
uugcugaacauuggagaa

SEQ ID NO: 1950426 - RNA, 19 nt, Human
uugcugaauacagaggcaa

SEQ ID NO: 1950427 - RNA, 14 nt, Human
uugcuccccuuccc

SEQ ID NO: 1950428 - RNA, 16 nt, Human
uugcuccccuuccccu

SEQ ID NO: 1950429 - RNA, 17 nt, Human
uugcuccccuuccccuu

SEQ ID NO: 1950430 - RNA, 20 nt, Human
uugcuccccuuccccuuccu

SEQ ID NO: 1950431 - RNA, 21 nt, Human
uugcuccccuuccccuuccuu

SEQ ID NO: 1950432 - RNA, 22 nt, Human
uugcuccccuuccccuuccuuc

SEQ ID NO: 1950433 - RNA, 20 nt, Human
uugcuaugagcuggggaugu

SEQ ID NO: 1950434 - RNA, 14 nt, Human
uugcuaucucuauu

SEQ ID NO: 1950435 - RNA, 13 nt, Human
uugcuaucauugu

SEQ ID NO: 1950436 - RNA, 20 nt, Human
uugcuaagugaggaugaaaa

SEQ ID NO: 1950437 - RNA, 17 nt, Human
uugcuaaguaaaucucu

SEQ ID NO: 1950438 - RNA, 19 nt, Human
uugcuaaguaaaucucuuc

SEQ ID NO: 1950439 - RNA, 21 nt, Human
uugcuaaguaaaucucuucug

SEQ ID NO: 1950440 - RNA, 22 nt, Human
uugcuaaguaaaucucuucugu

SEQ ID NO: 1950441 - RNA, 23 nt, Human
uugcuaccacggccuccuuuccg

SEQ ID NO: 1950442 - RNA, 23 nt, Human
uuggaaagaguaggaagacuuug

SEQ ID NO: 1950443 - RNA, 18 nt, Human
uuggaaagaguaggaaga

SEQ ID NO: 1950444 - RNA, 21 nt, Human
uuggcuagagguucaaagaua

SEQ ID NO: 1950445 - RNA, 22 nt, Human
uuggcuagagguucaaagauau

SEQ ID NO: 1950446 - RNA, 22 nt, Human
uuggcuaggaccccuccaugug

SEQ ID NO: 1950447 - RNA, 15 nt, Human
uuggcugcugaaggc

SEQ ID NO: 1950448 - RNA, 11 nt, Human
uuggcugcuga

SEQ ID NO: 1950449 - RNA, 23 nt, Human
uuggcuauuagagaucaaccccu

SEQ ID NO: 1950450 - RNA, 14 nt, Human
uuggcugcagggag

SEQ ID NO: 1950451 - RNA, 22 nt, Human
uuggcgcugccccuggcagccc

SEQ ID NO: 1950452 - RNA, 17 nt, Human
aucuuuccauauccaua

SEQ ID NO: 1950453 - RNA, 14 nt, Human
augaaaugagguca

SEQ ID NO: 1950454 - RNA, 14 nt, Human
augaaaugaacaca

SEQ ID NO: 1950455 - RNA, 16 nt, Human
augaaaugaacacaaa

SEQ ID NO: 1950456 - RNA, 19 nt, Human
augaaagauggcugugccu

SEQ ID NO: 1950457 - RNA, 20 nt, Human
augaaagauggcugugccuc

SEQ ID NO: 1950458 - RNA, 23 nt, Human
augaaagauggcugugccucugc

SEQ ID NO: 1950459 - RNA, 20 nt, Human
augaaagacuguacaaagua

SEQ ID NO: 1950460 - RNA, 10 nt, Human
uugugugugg

SEQ ID NO: 1950461 - RNA, 13 nt, Human
uugugugugggag

SEQ ID NO: 1950462 - RNA, 16 nt, Human
uuguguguccccuugc

SEQ ID NO: 1950463 - RNA, 16 nt, Human
uugugugugggagugu

SEQ ID NO: 1950464 - RNA, 22 nt, Human
uugugaaggcaggggaauguau

SEQ ID NO: 1950465 - RNA, 23 nt, Human
uugugaagugaaggauuuguguu

SEQ ID NO: 1950466 - RNA, 16 nt, Human
uugugaauaaugauuu

SEQ ID NO: 1950467 - RNA, 18 nt, Human
uugugaagguggaaauaa

SEQ ID NO: 1950468 - RNA, 17 nt, Human
uugugaagguggaaaua

SEQ ID NO: 1950469 - RNA, 19 nt, Human
uugugaacaagucccugua

SEQ ID NO: 1950470 - RNA, 14 nt, Human
uugucggcuccagu

SEQ ID NO: 1950471 - RNA, 20 nt, Human
uugucggcuccaguccccag

SEQ ID NO: 1950472 - RNA, 14 nt, Human
uugugaaauuuuuc

SEQ ID NO: 1950473 - RNA, 15 nt, Human
uugugaaauuuuuca

SEQ ID NO: 1950474 - RNA, 17 nt, Human
uugugaaauuuuucaua

SEQ ID NO: 1950475 - RNA, 19 nt, Human
uugugaaauuuuucauauu

SEQ ID NO: 1950476 - RNA, 21 nt, Human
uugugaaauuuuucauauuuu

SEQ ID NO: 1950477 - RNA, 23 nt, Human
uugugaaauuuuucauauuuuaa

SEQ ID NO: 1950478 - RNA, 14 nt, Human
augaucuucuuuau

SEQ ID NO: 1950479 - RNA, 15 nt, Human
augauccuaaugaau

SEQ ID NO: 1950480 - RNA, 16 nt, Human
augauccuaggcauuu

SEQ ID NO: 1950481 - RNA, 23 nt, Human
augaucacggcucacugcagccu

SEQ ID NO: 1950482 - RNA, 18 nt, Human
augaucacggcucacugc

SEQ ID NO: 1950483 - RNA, 19 nt, Human
augaucacggcucacugca

SEQ ID NO: 1950484 - RNA, 15 nt, Human
augaucacggcucac

SEQ ID NO: 1950485 - RNA, 14 nt, Human
uuguugcacugaag

SEQ ID NO: 1950486 - RNA, 15 nt, Human
uuguugcacugaagu

SEQ ID NO: 1950487 - RNA, 17 nt, Human
uuguugcacugaaguuu

SEQ ID NO: 1950488 - RNA, 20 nt, Human
uuguugcacugaaguuugau

SEQ ID NO: 1950489 - RNA, 15 nt, Human
uuguugauucucucc

SEQ ID NO: 1950490 - RNA, 17 nt, Human
uuguugauucucuccau

SEQ ID NO: 1950491 - RNA, 22 nt, Human
augcaaaccaucauugaaaucu

SEQ ID NO: 1950492 - RNA, 21 nt, Human
augcaaaccaucauugaaauc

SEQ ID NO: 1950493 - RNA, 20 nt, Human
augcaaaccaucauugaaau

SEQ ID NO: 1950494 - RNA, 19 nt, Human
augcaaaccaucauugaaa

SEQ ID NO: 1950495 - RNA, 18 nt, Human
augcaaaccaucauugaa

SEQ ID NO: 1950496 - RNA, 16 nt, Human
augcaaaccaucauug

SEQ ID NO: 1950497 - RNA, 18 nt, Human
augaucuucuuuauaauu

SEQ ID NO: 1950498 - RNA, 15 nt, Human
augaucuucuuuaua

SEQ ID NO: 1950499 - RNA, 14 nt, Human
augcaaggucauuu

SEQ ID NO: 1950500 - RNA, 16 nt, Human
augcaaggucauuuuu

SEQ ID NO: 1950501 - RNA, 22 nt, Human
augcaaacuuuauuuuguguuu

SEQ ID NO: 1950502 - RNA, 15 nt, Human
augaucugugccuuu

SEQ ID NO: 1950503 - RNA, 19 nt, Human
augaucugugccuuuuuua

SEQ ID NO: 1950504 - RNA, 23 nt, Human
augaucugugccuuuuuuauauc

SEQ ID NO: 1950505 - RNA, 16 nt, Human
augcaccuggaauaua

SEQ ID NO: 1950506 - RNA, 14 nt, Human
augcaccuggaaua

SEQ ID NO: 1950507 - RNA, 16 nt, Human
augcaaguauucucau

SEQ ID NO: 1950508 - RNA, 22 nt, Human
augcaaggucauuuuuuuuaag

SEQ ID NO: 1950509 - RNA, 19 nt, Human
augcaccuggaauauauaa

SEQ ID NO: 1950510 - RNA, 16 nt, Human
augcaaguuuuuuuuc

SEQ ID NO: 1950511 - RNA, 13 nt, Human
uuguuuuguacag

SEQ ID NO: 1950512 - RNA, 14 nt, Human
uuguuuuguugcac

SEQ ID NO: 1950513 - RNA, 21 nt, Human
uuguuuuguugcacugaaguu

SEQ ID NO: 1950514 - RNA, 18 nt, Human
uuguuuuuuuuuuccacu

SEQ ID NO: 1950515 - RNA, 15 nt, Human
uuguuuuuguauauu

SEQ ID NO: 1950516 - RNA, 12 nt, Human
uuguuuuuugaa

SEQ ID NO: 1950517 - RNA, 14 nt, Human
uuguuuuuugaagu

SEQ ID NO: 1950518 - RNA, 16 nt, Human
uuguuuuuugaagugu

SEQ ID NO: 1950519 - RNA, 13 nt, Human
uuguuuuucugau

SEQ ID NO: 1950520 - RNA, 12 nt, Human
uuguuuuucugc

SEQ ID NO: 1950521 - RNA, 18 nt, Human
uuguuuuucugcuuuaga

SEQ ID NO: 1950522 - RNA, 15 nt, Human
uuguuuuuguaaaga

SEQ ID NO: 1950523 - RNA, 13 nt, Human
uuguuuuuguaua

SEQ ID NO: 1950524 - RNA, 19 nt, Human
uuguuuuuaaguuugcacu

SEQ ID NO: 1950525 - RNA, 17 nt, Human
uuuaaaaaauuaaucug

SEQ ID NO: 1950526 - RNA, 18 nt, Human
uuuaaacuucuuaacugg

SEQ ID NO: 1950527 - RNA, 17 nt, Human
uuuaaagaaaaaaaugu

SEQ ID NO: 1950528 - RNA, 18 nt, Human
uuuaaagaaaaaaauguc

SEQ ID NO: 1950529 - RNA, 19 nt, Human
uuguuuuuuuuuuccacuu

SEQ ID NO: 1950530 - RNA, 17 nt, Human
uuguuuuuugaaguguu

SEQ ID NO: 1950531 - RNA, 12 nt, Human
uuguuuuuugag

SEQ ID NO: 1950532 - RNA, 13 nt, Human
uuguuuuuugagu

SEQ ID NO: 1950533 - RNA, 17 nt, Human
augagccucagcauccu

SEQ ID NO: 1950534 - RNA, 18 nt, Human
augagccucagcauccug

SEQ ID NO: 1950535 - RNA, 13 nt, Human
augagugagaaua

SEQ ID NO: 1950536 - RNA, 15 nt, Human
augauaaaacacaaa

SEQ ID NO: 1950537 - RNA, 18 nt, Human
uugucacacacuuuggcu

SEQ ID NO: 1950538 - RNA, 19 nt, Human
uugucaccugcuucucugc

SEQ ID NO: 1950539 - RNA, 15 nt, Human
uugucaccugcuucu

SEQ ID NO: 1950540 - RNA, 23 nt, Human
augagugugauccaguuuuucau

SEQ ID NO: 1950541 - RNA, 17 nt, Human
uugucacugagaagaug

SEQ ID NO: 1950542 - RNA, 14 nt, Human
uugucacugcuuca

SEQ ID NO: 1950543 - RNA, 13 nt, Human
uugucauuuucau

SEQ ID NO: 1950544 - RNA, 14 nt, Human
uugucauuuucauu

SEQ ID NO: 1950545 - RNA, 19 nt, Human
uugucauuuucauuagcaa

SEQ ID NO: 1950546 - RNA, 20 nt, Human
uugucauuuucauuagcaaa

SEQ ID NO: 1950547 - RNA, 18 nt, Human
uugucccuggcuuccuua

SEQ ID NO: 1950548 - RNA, 19 nt, Human
uugucccuggcuuccuuac

SEQ ID NO: 1950549 - RNA, 18 nt, Human
uugucccugaagagaagg

SEQ ID NO: 1950550 - RNA, 16 nt, Human
uuguccuauuaguguu

SEQ ID NO: 1950551 - RNA, 15 nt, Human
uuguccgguuuacuu

SEQ ID NO: 1950552 - RNA, 17 nt, Human
uuguccgguuuacuuua

SEQ ID NO: 1950553 - RNA, 21 nt, Human
uuguccgguuuacuuuaacuu

SEQ ID NO: 1950554 - RNA, 13 nt, Human
uugugaaauuauu

SEQ ID NO: 1950555 - RNA, 15 nt, Human
uuguccuuugauucc

SEQ ID NO: 1950556 - RNA, 16 nt, Human
uuguccuccugcugcc

SEQ ID NO: 1950557 - RNA, 17 nt, Human
uuguccuccugcugcca

SEQ ID NO: 1950558 - RNA, 19 nt, Human
uuguccuccugcugccagu

SEQ ID NO: 1950559 - RNA, 17 nt, Human
uuguccuauuaguguua

SEQ ID NO: 1950560 - RNA, 19 nt, Human
uuguccuauuaguguuaua

SEQ ID NO: 1950561 - RNA, 20 nt, Human
uuguccuauuaguguuauau

SEQ ID NO: 1950562 - RNA, 13 nt, Human
uuguccuccugcu

SEQ ID NO: 1950563 - RNA, 15 nt, Human
uuguccuccugcugc

SEQ ID NO: 1950564 - RNA, 21 nt, Human
augagcaucaggccaggcccu

SEQ ID NO: 1950565 - RNA, 20 nt, Human
augagcaucaggccaggccc

SEQ ID NO: 1950566 - RNA, 19 nt, Human
augagcaucaggccaggcc

SEQ ID NO: 1950567 - RNA, 18 nt, Human
augagcaucaggccaggc

SEQ ID NO: 1950568 - RNA, 17 nt, Human
augagcaucaggccagg

SEQ ID NO: 1950569 - RNA, 16 nt, Human
augagcaucaggccag

SEQ ID NO: 1950570 - RNA, 15 nt, Human
augagcaucaggcca

SEQ ID NO: 1950571 - RNA, 22 nt, Human
augagcaucaggccaggcccuc

SEQ ID NO: 1950572 - RNA, 17 nt, Human
augagcaauaucugcua

SEQ ID NO: 1950573 - RNA, 13 nt, Human
augagcacuucua

SEQ ID NO: 1950574 - RNA, 14 nt, Human
augagcacuucuaa

SEQ ID NO: 1950575 - RNA, 12 nt, Human
augagccucagc

SEQ ID NO: 1950576 - RNA, 15 nt, Human
augagccucagcauc

SEQ ID NO: 1950577 - RNA, 16 nt, Human
augagccucagcaucc

SEQ ID NO: 1950578 - RNA, 13 nt, Human
augagaggaaauc

SEQ ID NO: 1950579 - RNA, 12 nt, Human
augagaggaaau

SEQ ID NO: 1950580 - RNA, 15 nt, Human
augagaggaaaucac

SEQ ID NO: 1950581 - RNA, 14 nt, Human
augagaggaaauca

SEQ ID NO: 1950582 - RNA, 16 nt, Human
augagaggaaaucacc

SEQ ID NO: 1950583 - RNA, 20 nt, Human
augagaggggagagcugaac

SEQ ID NO: 1950584 - RNA, 21 nt, Human
uuucuaggacugaauuaugaa

SEQ ID NO: 1950585 - RNA, 17 nt, Human
uuucuaggacugaauua

SEQ ID NO: 1950586 - RNA, 22 nt, Human
uuucuaggacugaauuaugaaa

SEQ ID NO: 1950587 - RNA, 20 nt, Human
uuucuaggccuacaugcuuu

SEQ ID NO: 1950588 - RNA, 14 nt, Human
uuucuaguuauuua

SEQ ID NO: 1950589 - RNA, 15 nt, Human
uuucuaguuauuuau

SEQ ID NO: 1950590 - RNA, 18 nt, Human
uuucuauaauuuuacaag

SEQ ID NO: 1950591 - RNA, 15 nt, Human
uuucuaugacacaug

SEQ ID NO: 1950592 - RNA, 21 nt, Human
uuucuaugacacaugcaaggu

SEQ ID NO: 1950593 - RNA, 14 nt, Human
uuucuauuuucucu

SEQ ID NO: 1950594 - RNA, 16 nt, Human
uuucuauuuucucuga

SEQ ID NO: 1950595 - RNA, 22 nt, Human
uuucucaaagccccauuaacug

SEQ ID NO: 1950596 - RNA, 16 nt, Human
uuucugccgcagcccu

SEQ ID NO: 1950597 - RNA, 14 nt, Human
uuucugccgcagcc

SEQ ID NO: 1950598 - RNA, 22 nt, Human
uuucucauuugccaauaauaau

SEQ ID NO: 1950599 - RNA, 13 nt, Human
uuucucauguuga

SEQ ID NO: 1950600 - RNA, 15 nt, Human
uuucucauguugaaa

SEQ ID NO: 1950601 - RNA, 23 nt, Human
augggcuggguucuacccaggug

SEQ ID NO: 1950602 - RNA, 16 nt, Human
uuugaaauauggucuu

SEQ ID NO: 1950603 - RNA, 13 nt, Human
uuugaaauauaug

SEQ ID NO: 1950604 - RNA, 21 nt, Human
uuugaaauauauggucuaaug

SEQ ID NO: 1950605 - RNA, 22 nt, Human
uuugaaauauauggucuaaugu

SEQ ID NO: 1950606 - RNA, 13 nt, Human
auggggcccugcc

SEQ ID NO: 1950607 - RNA, 14 nt, Human
auggggcccugccu

SEQ ID NO: 1950608 - RNA, 13 nt, Human
auggggaggacaa

SEQ ID NO: 1950609 - RNA, 17 nt, Human
auggggaggacaaaaug

SEQ ID NO: 1950610 - RNA, 17 nt, Human
auggggaggcaagugug

SEQ ID NO: 1950611 - RNA, 23 nt, Human
uuugaaacauugcuuuuaaaacu

SEQ ID NO: 1950612 - RNA, 22 nt, Human
uuugaaaccccuguaggccuca

SEQ ID NO: 1950613 - RNA, 15 nt, Human
uuugaaacauugcuu

SEQ ID NO: 1950614 - RNA, 18 nt, Human
uuugaaacauugcuuuua

SEQ ID NO: 1950615 - RNA, 21 nt, Human
uuugaaacaugcuuguguuuc

SEQ ID NO: 1950616 - RNA, 12 nt, Human
uuugaaacauug

SEQ ID NO: 1950617 - RNA, 13 nt, Human
uuugaaacauugc

SEQ ID NO: 1950618 - RNA, 14 nt, Human
uuugaaagugccuu

SEQ ID NO: 1950619 - RNA, 18 nt, Human
uuugaaagugccuuugca

SEQ ID NO: 1950620 - RNA, 21 nt, Human
uuugaaagugccuuugcagcu

SEQ ID NO: 1950621 - RNA, 23 nt, Human
uuugaaagugccuuugcagcuca

SEQ ID NO: 1950622 - RNA, 19 nt, Human
uuugaaacacuuugcauaa

SEQ ID NO: 1950623 - RNA, 17 nt, Human
uuugaaacacuuugcau

SEQ ID NO: 1950624 - RNA, 15 nt, Human
uuugaaaauaguuua

SEQ ID NO: 1950625 - RNA, 18 nt, Human
uuugaaaauaguuuauuu

SEQ ID NO: 1950626 - RNA, 11 nt, Human
uuugaaaagua

SEQ ID NO: 1950627 - RNA, 12 nt, Human
uuugaaaaguaa

SEQ ID NO: 1950628 - RNA, 14 nt, Human
uuugaaaaguaaua

SEQ ID NO: 1950629 - RNA, 17 nt, Human
uuugaaaaguaauauuu

SEQ ID NO: 1950630 - RNA, 22 nt, Human
uuugaaaaguaauauuuauuaa

SEQ ID NO: 1950631 - RNA, 11 nt, Human
uuugaaaauag

SEQ ID NO: 1950632 - RNA, 18 nt, Human
uuugaaaauaguuauuca

SEQ ID NO: 1950633 - RNA, 20 nt, Human
uuugaaaauaguuauucagu

SEQ ID NO: 1950634 - RNA, 14 nt, Human
uuugaaaauaguuu

SEQ ID NO: 1950635 - RNA, 13 nt, Human
uuucuuuguggcu

SEQ ID NO: 1950636 - RNA, 17 nt, Human
uuucugcuuuagacuug

SEQ ID NO: 1950637 - RNA, 19 nt, Human
uuucugcuuuagacuugaa

SEQ ID NO: 1950638 - RNA, 20 nt, Human
uuucugcuuuagacuugaaa

SEQ ID NO: 1950639 - RNA, 16 nt, Human
uuucugccuuuuguuc

SEQ ID NO: 1950640 - RNA, 17 nt, Human
uuucuggacucuggacu

SEQ ID NO: 1950641 - RNA, 18 nt, Human
uuucuggacucuggacuu

SEQ ID NO: 1950642 - RNA, 18 nt, Human
auggccucuucagaucuc

SEQ ID NO: 1950643 - RNA, 19 nt, Human
auggacaugaucuucuuua

SEQ ID NO: 1950644 - RNA, 23 nt, Human
auggaccaugcugucuggcacag

SEQ ID NO: 1950645 - RNA, 21 nt, Human
auggacccaauauuuaccaga

SEQ ID NO: 1950646 - RNA, 15 nt, Human
augggacuggccucu

SEQ ID NO: 1950647 - RNA, 12 nt, Human
augggagccggg

SEQ ID NO: 1950648 - RNA, 13 nt, Human
augggagcucaug

SEQ ID NO: 1950649 - RNA, 18 nt, Human
augggcaacccccagccu

SEQ ID NO: 1950650 - RNA, 15 nt, Human
augggagccgggcaa

SEQ ID NO: 1950651 - RNA, 19 nt, Human
augggcaacccccagccug

SEQ ID NO: 1950652 - RNA, 21 nt, Human
augggcaacccccagccugcu

SEQ ID NO: 1950653 - RNA, 14 nt, Human
augggcagagcaga

SEQ ID NO: 1950654 - RNA, 13 nt, Human
augggcagagcag

SEQ ID NO: 1950655 - RNA, 15 nt, Human
augggcagagcagag

SEQ ID NO: 1950656 - RNA, 15 nt, Human
augggccuccugugu

SEQ ID NO: 1950657 - RNA, 12 nt, Human
augggcaggaga

SEQ ID NO: 1950658 - RNA, 13 nt, Human
augggcaggagac

SEQ ID NO: 1950659 - RNA, 20 nt, Human
augggcagucauuuugcaga

SEQ ID NO: 1950660 - RNA, 15 nt, Human
augggcaguuucagu

SEQ ID NO: 1950661 - RNA, 14 nt, Human
uuucguuuguuugu

SEQ ID NO: 1950662 - RNA, 13 nt, Human
uuucguggcuuca

SEQ ID NO: 1950663 - RNA, 22 nt, Human
uuucgauucguuaagagagcaa

SEQ ID NO: 1950664 - RNA, 22 nt, Human
uuucgcaggauucuuccucccu

SEQ ID NO: 1950665 - RNA, 18 nt, Human
uuucgcaggauucuuccu

SEQ ID NO: 1950666 - RNA, 15 nt, Human
uuucgauguuuuuga

SEQ ID NO: 1950667 - RNA, 15 nt, Human
uuucgacuugcauuu

SEQ ID NO: 1950668 - RNA, 19 nt, Human
uuucgacuugcauuuuugc

SEQ ID NO: 1950669 - RNA, 17 nt, Human
uuuccuuuaauaugaaa

SEQ ID NO: 1950670 - RNA, 20 nt, Human
uuuccuugaggggagccagg

SEQ ID NO: 1950671 - RNA, 16 nt, Human
uuuccuugcauacaaa

SEQ ID NO: 1950672 - RNA, 19 nt, Human
uuuccuugcauacaaacaa

SEQ ID NO: 1950673 - RNA, 21 nt, Human
uuuccuuuuaaaacacuucca

SEQ ID NO: 1950674 - RNA, 15 nt, Human
uuuccuucagugccu

SEQ ID NO: 1950675 - RNA, 12 nt, Human
uuuccuucagug

SEQ ID NO: 1950676 - RNA, 16 nt, Human
uuuccuuacauaaaca

SEQ ID NO: 1950677 - RNA, 17 nt, Human
uuuccuuacauaaacau

SEQ ID NO: 1950678 - RNA, 11 nt, Human
uuuccuucagu

SEQ ID NO: 1950679 - RNA, 15 nt, Human
uuuccuguuugggaa

SEQ ID NO: 1950680 - RNA, 17 nt, Human
augggccuccugugugu

SEQ ID NO: 1950681 - RNA, 12 nt, Human
uuuccugugucu

SEQ ID NO: 1950682 - RNA, 21 nt, Human
uuuccuucauucaacccaccu

SEQ ID NO: 1950683 - RNA, 22 nt, Human
uuuccuucagugccuuauggaa

SEQ ID NO: 1950684 - RNA, 21 nt, Human
uuuccuucagugccuuaugga

SEQ ID NO: 1950685 - RNA, 18 nt, Human
uuuccuucagugccuuau

SEQ ID NO: 1950686 - RNA, 23 nt, Human
uuuccuucauucaacccaccugc

SEQ ID NO: 1950687 - RNA, 18 nt, Human
uuuccuuacauaaacauc

SEQ ID NO: 1950688 - RNA, 11 nt, Human
uuuccuucccu

SEQ ID NO: 1950689 - RNA, 16 nt, Human
uuuaaagcuuccauug

SEQ ID NO: 1950690 - RNA, 17 nt, Human
uuuaaaggcccuaucug

SEQ ID NO: 1950691 - RNA, 18 nt, Human
uuuaaagaaacaugguuu

SEQ ID NO: 1950692 - RNA, 20 nt, Human
uuuaaagaaaaaaaugucaa

SEQ ID NO: 1950693 - RNA, 15 nt, Human
augcgcaguugcugu

SEQ ID NO: 1950694 - RNA, 23 nt, Human
augcgcaggcuggcccugcccug

SEQ ID NO: 1950695 - RNA, 13 nt, Human
augcuaagugaaa

SEQ ID NO: 1950696 - RNA, 17 nt, Human
uuuaccuugucauuuug

SEQ ID NO: 1950697 - RNA, 21 nt, Human
uuuaccuuuuuuauacauaaa

SEQ ID NO: 1950698 - RNA, 14 nt, Human
uuuacuaauagaca

SEQ ID NO: 1950699 - RNA, 17 nt, Human
uuuacuaauagacaauu

SEQ ID NO: 1950700 - RNA, 18 nt, Human
uuuacuaauagacaauuu

SEQ ID NO: 1950701 - RNA, 14 nt, Human
uuuaccuuuuuuau

SEQ ID NO: 1950702 - RNA, 19 nt, Human
uuuaccuuuuuuauacaua

SEQ ID NO: 1950703 - RNA, 20 nt, Human
uuuaccuuuuuuauacauaa

SEQ ID NO: 1950704 - RNA, 17 nt, Human
augcuacacacugcaug

SEQ ID NO: 1950705 - RNA, 17 nt, Human
augcuaaucuugugaaa

SEQ ID NO: 1950706 - RNA, 18 nt, Human
augcuacacacugcaugu

SEQ ID NO: 1950707 - RNA, 15 nt, Human
uuuagauaauacacc

SEQ ID NO: 1950708 - RNA, 17 nt, Human
uuuagaugaaugucagu

SEQ ID NO: 1950709 - RNA, 18 nt, Human
uuuagaguugauacuaca

SEQ ID NO: 1950710 - RNA, 13 nt, Human
uuuagauaauaca

SEQ ID NO: 1950711 - RNA, 19 nt, Human
uuuacuacaauauguacau

SEQ ID NO: 1950712 - RNA, 21 nt, Human
uuuacuacaauauguacauuu

SEQ ID NO: 1950713 - RNA, 13 nt, Human
uuuagccuguguc

SEQ ID NO: 1950714 - RNA, 22 nt, Human
uuuagccugugucauugcccca

SEQ ID NO: 1950715 - RNA, 14 nt, Human
uuuaggugaaaaua

SEQ ID NO: 1950716 - RNA, 15 nt, Human
uuuaugugaaacaug

SEQ ID NO: 1950717 - RNA, 14 nt, Human
uuuaugugaaacau

SEQ ID NO: 1950718 - RNA, 19 nt, Human
uuuauuaaaugcccagccc

SEQ ID NO: 1950719 - RNA, 12 nt, Human
uuuauuaaauuu

SEQ ID NO: 1950720 - RNA, 13 nt, Human
uuuauuaaauuuu

SEQ ID NO: 1950721 - RNA, 23 nt, Human
uuuauuaaauuuuuuuguaugaa

SEQ ID NO: 1950722 - RNA, 17 nt, Human
uuuauuaacuuaauaau

SEQ ID NO: 1950723 - RNA, 14 nt, Human
uuuauaucuuggca

SEQ ID NO: 1950724 - RNA, 21 nt, Human
uuuauaucuuggcagguagga

SEQ ID NO: 1950725 - RNA, 15 nt, Human
uuuauauauauaucu

SEQ ID NO: 1950726 - RNA, 14 nt, Human
uuuauauauaugca

SEQ ID NO: 1950727 - RNA, 13 nt, Human
uuuauauccauuu

SEQ ID NO: 1950728 - RNA, 16 nt, Human
uuuauauccauuuuua

SEQ ID NO: 1950729 - RNA, 21 nt, Human
uuuauaucuccuuuguauucu

SEQ ID NO: 1950730 - RNA, 15 nt, Human
uuucacccuucuacu

SEQ ID NO: 1950731 - RNA, 14 nt, Human
uuucacucuccuug

SEQ ID NO: 1950732 - RNA, 17 nt, Human
uuuauuuuuuucugaau

SEQ ID NO: 1950733 - RNA, 16 nt, Human
uuuauuuuuugggaaa

SEQ ID NO: 1950734 - RNA, 13 nt, Human
uuuauuuuuuggu

SEQ ID NO: 1950735 - RNA, 23 nt, Human
uuucaaaaacaccccccccccac

SEQ ID NO: 1950736 - RNA, 21 nt, Human
uuuauuuuuuuuaauuguauu

SEQ ID NO: 1950737 - RNA, 12 nt, Human
uuucauaaagca

SEQ ID NO: 1950738 - RNA, 13 nt, Human
uuucacugucugu

SEQ ID NO: 1950739 - RNA, 15 nt, Human
uuucacugucugucu

SEQ ID NO: 1950740 - RNA, 14 nt, Human
uuucacuucuuucc

SEQ ID NO: 1950741 - RNA, 16 nt, Human
uuucacuucuuucccu

SEQ ID NO: 1950742 - RNA, 23 nt, Human
uuucacuucuuucccuuccucca

SEQ ID NO: 1950743 - RNA, 15 nt, Human
uuucacucuccuugg

SEQ ID NO: 1950744 - RNA, 24 nt, Human
uuucacucuuauugcccacgcugg

SEQ ID NO: 1950745 - RNA, 24 nt, Human
uuucacugcuggcugccuuagaac

SEQ ID NO: 1950746 - RNA, 12 nt, Human
uuucacucacau

SEQ ID NO: 1950747 - RNA, 23 nt, Human
uuucacuggccacaguuguuuga

SEQ ID NO: 1950748 - RNA, 18 nt, Human
uuuccagguucugaaaga

SEQ ID NO: 1950749 - RNA, 12 nt, Human
uuuccaguauuu

SEQ ID NO: 1950750 - RNA, 15 nt, Human
uuuccaguauuuuag

SEQ ID NO: 1950751 - RNA, 16 nt, Human
uuuccaguauuuuagu

SEQ ID NO: 1950752 - RNA, 17 nt, Human
uuuccaguauuuuagug

SEQ ID NO: 1950753 - RNA, 21 nt, Human
uuuccauauuuuuuuccuuac

SEQ ID NO: 1950754 - RNA, 11 nt, Human
uuucccacccu

SEQ ID NO: 1950755 - RNA, 21 nt, Human
uuuccauauccauagugacuu

SEQ ID NO: 1950756 - RNA, 17 nt, Human
uuuccauauuuuuacaa

SEQ ID NO: 1950757 - RNA, 19 nt, Human
uuuccauauuuuuuuccuu

SEQ ID NO: 1950758 - RNA, 15 nt, Human
uuucauaagauauuu

SEQ ID NO: 1950759 - RNA, 18 nt, Human
uuucauaagauauuuuau

SEQ ID NO: 1950760 - RNA, 19 nt, Human
uuucauaagauauuuuauu

SEQ ID NO: 1950761 - RNA, 21 nt, Human
uuucauauaggaauagaaaca

SEQ ID NO: 1950762 - RNA, 19 nt, Human
uuuccagguuuaagcuguu

SEQ ID NO: 1950763 - RNA, 23 nt, Human
uuucauauaggaauagaaacaug

SEQ ID NO: 1950764 - RNA, 17 nt, Human
augcugugccccuggcc

SEQ ID NO: 1950765 - RNA, 18 nt, Human
augcugugccccuggccu

SEQ ID NO: 1950766 - RNA, 13 nt, Human
augcugugccccu

SEQ ID NO: 1950767 - RNA, 14 nt, Human
augcugugccccug

SEQ ID NO: 1950768 - RNA, 23 nt, Human
augcugucuuucuugcucccuga

SEQ ID NO: 1950769 - RNA, 22 nt, Human
augcugucuggcacagccugca

SEQ ID NO: 1950770 - RNA, 18 nt, Human
augcugucuuucuugcuc

SEQ ID NO: 1950771 - RNA, 20 nt, Human
augcugucuuucuugcuccc

SEQ ID NO: 1950772 - RNA, 21 nt, Human
augcugucuuucuugcucccu

SEQ ID NO: 1950773 - RNA, 19 nt, Human
augcugugcccuaaagugu

SEQ ID NO: 1950774 - RNA, 14 nt, Human
augcuguauauguu

SEQ ID NO: 1950775 - RNA, 16 nt, Human
augcugucuggcacag

SEQ ID NO: 1950776 - RNA, 17 nt, Human
augcugucuggcacagc

SEQ ID NO: 1950777 - RNA, 19 nt, Human
augcugucuggcacagccu

SEQ ID NO: 1950778 - RNA, 15 nt, Human
augcugggcucccgu

SEQ ID NO: 1950779 - RNA, 22 nt, Human
augcuggcuguuggcugggggc

SEQ ID NO: 1950780 - RNA, 20 nt, Human
uuuauuaacuuaauaaucaa

SEQ ID NO: 1950781 - RNA, 15 nt, Human
auggaauaacaugua

SEQ ID NO: 1950782 - RNA, 14 nt, Human
auggaauaacaugu

SEQ ID NO: 1950783 - RNA, 13 nt, Human
uuuauuuuuuggg

SEQ ID NO: 1950784 - RNA, 18 nt, Human
uuuauuuugaaauggaaa

SEQ ID NO: 1950785 - RNA, 17 nt, Human
auggaacacucugagac

SEQ ID NO: 1950786 - RNA, 18 nt, Human
auggaacacucugagacu

SEQ ID NO: 1950787 - RNA, 21 nt, Human
auggaaguacuauaauuuacc

SEQ ID NO: 1950788 - RNA, 14 nt, Human
uucaggguuggccc

SEQ ID NO: 1950789 - RNA, 22 nt, Human
uucagcuaggaacaaaucuucc

SEQ ID NO: 1950790 - RNA, 14 nt, Human
uucagcuaggaaca

SEQ ID NO: 1950791 - RNA, 20 nt, Human
uucagcuaggaacaaaucuu

SEQ ID NO: 1950792 - RNA, 16 nt, Human
uucaggguuggccccu

SEQ ID NO: 1950793 - RNA, 17 nt, Human
uucaggguuggccccug

SEQ ID NO: 1950794 - RNA, 19 nt, Human
uucaggguuggccccugcc

SEQ ID NO: 1950795 - RNA, 22 nt, Human
uucaggguuggccccugcccgg

SEQ ID NO: 1950796 - RNA, 15 nt, Human
uucagguaacaggca

SEQ ID NO: 1950797 - RNA, 16 nt, Human
uucagguaacaggcag

SEQ ID NO: 1950798 - RNA, 21 nt, Human
uucagcaucugaccucuaccu

SEQ ID NO: 1950799 - RNA, 13 nt, Human
uucagccuucuuu

SEQ ID NO: 1950800 - RNA, 20 nt, Human
uucagccuucuuuuucugga

SEQ ID NO: 1950801 - RNA, 21 nt, Human
uucagccuucuuuuucuggac

SEQ ID NO: 1950802 - RNA, 16 nt, Human
uucagcguuuugcaag

SEQ ID NO: 1950803 - RNA, 12 nt, Human
uucagcaucuga

SEQ ID NO: 1950804 - RNA, 13 nt, Human
uucagcaucugac

SEQ ID NO: 1950805 - RNA, 12 nt, Human
uucagcaggcag

SEQ ID NO: 1950806 - RNA, 13 nt, Human
uucagcaggcagc

SEQ ID NO: 1950807 - RNA, 16 nt, Human
uucagauuugccuuau

SEQ ID NO: 1950808 - RNA, 17 nt, Human
uucagauuucucuuuga

SEQ ID NO: 1950809 - RNA, 19 nt, Human
uucagauuucucuuugaaa

SEQ ID NO: 1950810 - RNA, 15 nt, Human
uucagauuugcacaa

SEQ ID NO: 1950811 - RNA, 16 nt, Human
uucagauuugcacaaa

SEQ ID NO: 1950812 - RNA, 17 nt, Human
uucagauuugcacaaaa

SEQ ID NO: 1950813 - RNA, 18 nt, Human
uucagauuugcacaaaaa

SEQ ID NO: 1950814 - RNA, 19 nt, Human
uucagauuugcacaaaaag

SEQ ID NO: 1950815 - RNA, 19 nt, Human
uucagauaugauucaaaug

SEQ ID NO: 1950816 - RNA, 15 nt, Human
uucagauuucucuuu

SEQ ID NO: 1950817 - RNA, 16 nt, Human
uucagauaugauucaa

SEQ ID NO: 1950818 - RNA, 17 nt, Human
uucagauaugauucaaa

SEQ ID NO: 1950819 - RNA, 18 nt, Human
uucagauaugauucaaau

SEQ ID NO: 1950820 - RNA, 16 nt, Human
uucagaaauguguuau

SEQ ID NO: 1950821 - RNA, 11 nt, Human
uucagaaaaaa

SEQ ID NO: 1950822 - RNA, 22 nt, Human
uucagaaaacugagcugcaauc

SEQ ID NO: 1950823 - RNA, 19 nt, Human
uucacuucugacucuuccc

SEQ ID NO: 1950824 - RNA, 13 nt, Human
uucacuucuuucc

SEQ ID NO: 1950825 - RNA, 15 nt, Human
uucacuucuuucccu

SEQ ID NO: 1950826 - RNA, 16 nt, Human
uucacuucuuucccuu

SEQ ID NO: 1950827 - RNA, 22 nt, Human
uucacuucuuucccuuccucca

SEQ ID NO: 1950828 - RNA, 15 nt, Human
uucagugaugugccu

SEQ ID NO: 1950829 - RNA, 23 nt, Human
uucagugcauuaucuacuugugu

SEQ ID NO: 1950830 - RNA, 22 nt, Human
uucauauuuuaaacagaggaua

SEQ ID NO: 1950831 - RNA, 17 nt, Human
uucauauuuuaauuuca

SEQ ID NO: 1950832 - RNA, 18 nt, Human
uucauauuuuaauuucaa

SEQ ID NO: 1950833 - RNA, 20 nt, Human
uucauauuuuaauuucaagc

SEQ ID NO: 1950834 - RNA, 22 nt, Human
uucauauuuuaauuucaagcuu

SEQ ID NO: 1950835 - RNA, 17 nt, Human
uucauauuuuucaaaau

SEQ ID NO: 1950836 - RNA, 19 nt, Human
uucauauuuuucaaaauag

SEQ ID NO: 1950837 - RNA, 17 nt, Human
uucagguaacaggcaga

SEQ ID NO: 1950838 - RNA, 14 nt, Human
uucagguagaggug

SEQ ID NO: 1950839 - RNA, 20 nt, Human
uucagguagaggugcaugcc

SEQ ID NO: 1950840 - RNA, 14 nt, Human
uucaguaagccgug

SEQ ID NO: 1950841 - RNA, 9 nt, Human
auauauuuc

SEQ ID NO: 1950842 - RNA, 15 nt, Human
auauauuuuaagacg

SEQ ID NO: 1950843 - RNA, 21 nt, Human
auauauguuuuaagaggcagg

SEQ ID NO: 1950844 - RNA, 22 nt, Human
auauauguuuuaagaggcaggg

SEQ ID NO: 1950845 - RNA, 17 nt, Human
auauauguuuuugaagg

SEQ ID NO: 1950846 - RNA, 15 nt, Human
uucaucaaugaauga

SEQ ID NO: 1950847 - RNA, 16 nt, Human
uucaucagaacagcug

SEQ ID NO: 1950848 - RNA, 22 nt, Human
uucaucagaacagcuguugacu

SEQ ID NO: 1950849 - RNA, 18 nt, Human
uucaucagggaggaaagu

SEQ ID NO: 1950850 - RNA, 13 nt, Human
auauaugcuaagu

SEQ ID NO: 1950851 - RNA, 16 nt, Human
auauauggucuaaugu

SEQ ID NO: 1950852 - RNA, 18 nt, Human
auauauggucuaauguuu

SEQ ID NO: 1950853 - RNA, 13 nt, Human
auauaugcauaua

SEQ ID NO: 1950854 - RNA, 19 nt, Human
uucaucauauuauacagac

SEQ ID NO: 1950855 - RNA, 16 nt, Human
auauaugcauauauau

SEQ ID NO: 1950856 - RNA, 20 nt, Human
auauaugcauauauauaugu

SEQ ID NO: 1950857 - RNA, 11 nt, Human
uuccaguauuu

SEQ ID NO: 1950858 - RNA, 12 nt, Human
uuccaguauuuu

SEQ ID NO: 1950859 - RNA, 14 nt, Human
uuccaggggaaccu

SEQ ID NO: 1950860 - RNA, 15 nt, Human
uuccaggggaaccug

SEQ ID NO: 1950861 - RNA, 17 nt, Human
uuccaggggaaccugcc

SEQ ID NO: 1950862 - RNA, 18 nt, Human
uuccaggggaaccugcca

SEQ ID NO: 1950863 - RNA, 17 nt, Human
uuccagguuuaagcugu

SEQ ID NO: 1950864 - RNA, 18 nt, Human
uuccagguuuaagcuguu

SEQ ID NO: 1950865 - RNA, 17 nt, Human
uuccaggcugggagagc

SEQ ID NO: 1950866 - RNA, 15 nt, Human
uuccaggcugggaga

SEQ ID NO: 1950867 - RNA, 13 nt, Human
uuccaggcuggga

SEQ ID NO: 1950868 - RNA, 18 nt, Human
uuccaccaucaagccacc

SEQ ID NO: 1950869 - RNA, 13 nt, Human
uuccaccugcucu

SEQ ID NO: 1950870 - RNA, 15 nt, Human
uuccaccugcucugc

SEQ ID NO: 1950871 - RNA, 16 nt, Human
uuccaccugcucugcu

SEQ ID NO: 1950872 - RNA, 15 nt, Human
uuccaccuucccaug

SEQ ID NO: 1950873 - RNA, 17 nt, Human
uuccaccugcucugcug

SEQ ID NO: 1950874 - RNA, 21 nt, Human
uuccacaagagcccaggccuc

SEQ ID NO: 1950875 - RNA, 14 nt, Human
uuccacagaggaca

SEQ ID NO: 1950876 - RNA, 13 nt, Human
uuccacagaggac

SEQ ID NO: 1950877 - RNA, 22 nt, Human
uuccacagaggacacagagaag

SEQ ID NO: 1950878 - RNA, 20 nt, Human
uucauuagcaaaaaaaguug

SEQ ID NO: 1950879 - RNA, 21 nt, Human
uucauuagcaaaaaaaguugu

SEQ ID NO: 1950880 - RNA, 14 nt, Human
uucauuaguuuuga

SEQ ID NO: 1950881 - RNA, 22 nt, Human
uucauuagcaaaaaaaguugua

SEQ ID NO: 1950882 - RNA, 19 nt, Human
uucauuaguuuugaagauu

SEQ ID NO: 1950883 - RNA, 19 nt, Human
uucauucuuuuugaaaugu

SEQ ID NO: 1950884 - RNA, 22 nt, Human
uuccaauuuacauacucugcuu

SEQ ID NO: 1950885 - RNA, 13 nt, Human
uuccaauuuuccu

SEQ ID NO: 1950886 - RNA, 14 nt, Human
uuccaauuuuccuu

SEQ ID NO: 1950887 - RNA, 19 nt, Human
uucauugguacugccuuaa

SEQ ID NO: 1950888 - RNA, 22 nt, Human
uucauugguacugccuuaaaga

SEQ ID NO: 1950889 - RNA, 13 nt, Human
uucauugcuguga

SEQ ID NO: 1950890 - RNA, 20 nt, Human
uucaugcuguucaugaaaga

SEQ ID NO: 1950891 - RNA, 23 nt, Human
auauguguguguguguguugcuu

SEQ ID NO: 1950892 - RNA, 14 nt, Human
uucaugcuuuauca

SEQ ID NO: 1950893 - RNA, 22 nt, Human
uucaugcuguucaugaaagauu

SEQ ID NO: 1950894 - RNA, 15 nt, Human
auauguauacaugug

SEQ ID NO: 1950895 - RNA, 14 nt, Human
auaugggagaaaua

SEQ ID NO: 1950896 - RNA, 15 nt, Human
auaugggagaaauag

SEQ ID NO: 1950897 - RNA, 23 nt, Human
auauguaccuaacgaaguauccu

SEQ ID NO: 1950898 - RNA, 21 nt, Human
auauguggaguucaucuugaa

SEQ ID NO: 1950899 - RNA, 20 nt, Human
auauguggaguucaucuuga

SEQ ID NO: 1950900 - RNA, 23 nt, Human
auaugaccaaauaucaccaggac

SEQ ID NO: 1950901 - RNA, 19 nt, Human
auaugaacauacaaaugca

SEQ ID NO: 1950902 - RNA, 14 nt, Human
auaugacaaauguu

SEQ ID NO: 1950903 - RNA, 16 nt, Human
auaugacaaauguuuc

SEQ ID NO: 1950904 - RNA, 17 nt, Human
auaugacaaauguuucu

SEQ ID NO: 1950905 - RNA, 18 nt, Human
auaugacaaauguuucua

SEQ ID NO: 1950906 - RNA, 17 nt, Human
auaugaacauacaaaug

SEQ ID NO: 1950907 - RNA, 18 nt, Human
auaugaacauacaaaugc

SEQ ID NO: 1950908 - RNA, 20 nt, Human
auaugaaagucuuauuaaaa

SEQ ID NO: 1950909 - RNA, 16 nt, Human
auaugaacauacaaau

SEQ ID NO: 1950910 - RNA, 11 nt, Human
auauauuuuag

SEQ ID NO: 1950911 - RNA, 18 nt, Human
auauauuuuauuuuuaga

SEQ ID NO: 1950912 - RNA, 22 nt, Human
auauauuuuauuuuuagaauuu

SEQ ID NO: 1950913 - RNA, 13 nt, Human
auauauuuuguau

SEQ ID NO: 1950914 - RNA, 14 nt, Human
auauauuuuguaug

SEQ ID NO: 1950915 - RNA, 16 nt, Human
auauauuuuguaugca

SEQ ID NO: 1950916 - RNA, 17 nt, Human
auauauuuuguaugcaa

SEQ ID NO: 1950917 - RNA, 19 nt, Human
auauauuuuguaugcaagc

SEQ ID NO: 1950918 - RNA, 20 nt, Human
auauauuuuguaugcaagca

SEQ ID NO: 1950919 - RNA, 22 nt, Human
auauauuuuguaugcaagcagu

SEQ ID NO: 1950920 - RNA, 23 nt, Human
auauauuuuguaugcaagcaguu

SEQ ID NO: 1950921 - RNA, 21 nt, Human
uuccuaaauauauuuuaagac

SEQ ID NO: 1950922 - RNA, 13 nt, Human
uuccucugagccu

SEQ ID NO: 1950923 - RNA, 19 nt, Human
uuccucuccacugccuucg

SEQ ID NO: 1950924 - RNA, 16 nt, Human
uuccucuccacugccu

SEQ ID NO: 1950925 - RNA, 18 nt, Human
uuccucuccacugccuuc

SEQ ID NO: 1950926 - RNA, 12 nt, Human
uuccugaacagg

SEQ ID NO: 1950927 - RNA, 19 nt, Human
uuccuggcacugcuuccag

SEQ ID NO: 1950928 - RNA, 22 nt, Human
uuccucuuuuuauuuaguuccu

SEQ ID NO: 1950929 - RNA, 22 nt, Human
uuccuggcacugcuuccaguga

SEQ ID NO: 1950930 - RNA, 20 nt, Human
uuccuggcacugcuuccagu

SEQ ID NO: 1950931 - RNA, 17 nt, Human
uuccuguugucaagaau

SEQ ID NO: 1950932 - RNA, 13 nt, Human
uuccuguuucaag

SEQ ID NO: 1950933 - RNA, 17 nt, Human
uuccuguuugggaagag

SEQ ID NO: 1950934 - RNA, 23 nt, Human
auauuugauuuauuaacuuaaua

SEQ ID NO: 1950935 - RNA, 14 nt, Human
auauuuggaauaaa

SEQ ID NO: 1950936 - RNA, 12 nt, Human
auauuugauuua

SEQ ID NO: 1950937 - RNA, 14 nt, Human
auauuugauuuauu

SEQ ID NO: 1950938 - RNA, 15 nt, Human
auauuugauuuauua

SEQ ID NO: 1950939 - RNA, 16 nt, Human
auauuugauuuauuaa

SEQ ID NO: 1950940 - RNA, 18 nt, Human
auauuugauuuauuaacu

SEQ ID NO: 1950941 - RNA, 21 nt, Human
auauuugaauguaugcuucau

SEQ ID NO: 1950942 - RNA, 23 nt, Human
auauuuggaauaaaaauuccaga

SEQ ID NO: 1950943 - RNA, 17 nt, Human
auauuuggaugcagagu

SEQ ID NO: 1950944 - RNA, 20 nt, Human
auauuuggaugcagaguuca

SEQ ID NO: 1950945 - RNA, 14 nt, Human
uucccgcucagccc

SEQ ID NO: 1950946 - RNA, 15 nt, Human
uucccgcucagcccu

SEQ ID NO: 1950947 - RNA, 12 nt, Human
uucccgcucagc

SEQ ID NO: 1950948 - RNA, 19 nt, Human
uucccgccgcccagcccac

SEQ ID NO: 1950949 - RNA, 15 nt, Human
uucccuuuuuuuaag

SEQ ID NO: 1950950 - RNA, 20 nt, Human
uuccgaaaccaaagaagaaa

SEQ ID NO: 1950951 - RNA, 18 nt, Human
uuccgcauucuuuguaca

SEQ ID NO: 1950952 - RNA, 15 nt, Human
auauuuuucuuaaaa

SEQ ID NO: 1950953 - RNA, 17 nt, Human
auauuuuucuuaaaaag

SEQ ID NO: 1950954 - RNA, 18 nt, Human
auauuuuucuuaaaaagu

SEQ ID NO: 1950955 - RNA, 19 nt, Human
auauuuuucuuaaaaagua

SEQ ID NO: 1950956 - RNA, 17 nt, Human
uuccuuacauaaacauc

SEQ ID NO: 1950957 - RNA, 13 nt, Human
auauuuuucuuaa

SEQ ID NO: 1950958 - RNA, 14 nt, Human
auauuuuucuuaaa

SEQ ID NO: 1950959 - RNA, 13 nt, Human
uuccuuacauaaa

SEQ ID NO: 1950960 - RNA, 16 nt, Human
uuccuuacauaaacau

SEQ ID NO: 1950961 - RNA, 17 nt, Human
uuccuguuuguugaagg

SEQ ID NO: 1950962 - RNA, 21 nt, Human
aucaacugcaucaagauguga

SEQ ID NO: 1950963 - RNA, 13 nt, Human
aucaacucauguu

SEQ ID NO: 1950964 - RNA, 12 nt, Human
aucaacuaaagu

SEQ ID NO: 1950965 - RNA, 18 nt, Human
aucaacuaaaguuguacu

SEQ ID NO: 1950966 - RNA, 20 nt, Human
aucaacuaaaguuguacuuu

SEQ ID NO: 1950967 - RNA, 21 nt, Human
aucaacuaaaguuguacuuua

SEQ ID NO: 1950968 - RNA, 22 nt, Human
aucaacuaaaguuguacuuuaa

SEQ ID NO: 1950969 - RNA, 15 nt, Human
aucaacuaguauuug

SEQ ID NO: 1950970 - RNA, 18 nt, Human
aucacucagagcagucug

SEQ ID NO: 1950971 - RNA, 14 nt, Human
aucacucagagcag

SEQ ID NO: 1950972 - RNA, 15 nt, Human
aucacgccacugcac

SEQ ID NO: 1950973 - RNA, 17 nt, Human
aucacgccacugcacua

SEQ ID NO: 1950974 - RNA, 19 nt, Human
aucaaguagacuacuguuc

SEQ ID NO: 1950975 - RNA, 17 nt, Human
aucaaguagacuacugu

SEQ ID NO: 1950976 - RNA, 18 nt, Human
aucaaguagacuacuguu

SEQ ID NO: 1950977 - RNA, 13 nt, Human
aucaauuuaaaaa

SEQ ID NO: 1950978 - RNA, 18 nt, Human
auauguugcuauaauaaa

SEQ ID NO: 1950979 - RNA, 20 nt, Human
auauguugcuauaauaaaga

SEQ ID NO: 1950980 - RNA, 12 nt, Human
auauuaaaaagu

SEQ ID NO: 1950981 - RNA, 13 nt, Human
auauuaaaaaguc

SEQ ID NO: 1950982 - RNA, 15 nt, Human
auauuaaaaagucuu

SEQ ID NO: 1950983 - RNA, 16 nt, Human
auauuaaaaagucuuu

SEQ ID NO: 1950984 - RNA, 17 nt, Human
auauuaaaaagucuuuu

SEQ ID NO: 1950985 - RNA, 19 nt, Human
auauuaaaaagucuuuuaa

SEQ ID NO: 1950986 - RNA, 20 nt, Human
auauuaaaaagucuuuuaaa

SEQ ID NO: 1950987 - RNA, 15 nt, Human
auauuacaauauuug

SEQ ID NO: 1950988 - RNA, 17 nt, Human
auauuacaauauuugug

SEQ ID NO: 1950989 - RNA, 13 nt, Human
auauuacaauauu

SEQ ID NO: 1950990 - RNA, 17 nt, Human
auauuaccacagacaua

SEQ ID NO: 1950991 - RNA, 22 nt, Human
auauuaagaaagacuaucuaaa

SEQ ID NO: 1950992 - RNA, 17 nt, Human
auauuaagaaagacuau

SEQ ID NO: 1950993 - RNA, 15 nt, Human
auauuaagaaagacu

SEQ ID NO: 1950994 - RNA, 16 nt, Human
auauuaagaaagacua

SEQ ID NO: 1950995 - RNA, 19 nt, Human
uucccaggaaagaagcauu

SEQ ID NO: 1950996 - RNA, 16 nt, Human
uuccagugaggcucug

SEQ ID NO: 1950997 - RNA, 15 nt, Human
uuccagugaggcucu

SEQ ID NO: 1950998 - RNA, 22 nt, Human
uuccagucgggggaacugaggc

SEQ ID NO: 1950999 - RNA, 14 nt, Human
uuccaguauuuuag

SEQ ID NO: 1951000 - RNA, 22 nt, Human
uuccagucaggcucucugggcu

SEQ ID NO: 1951001 - RNA, 22 nt, Human
uuccagugaaaucaguuacucu

SEQ ID NO: 1951002 - RNA, 17 nt, Human
auauguuauuuuaaaca

SEQ ID NO: 1951003 - RNA, 16 nt, Human
auauguucugacauaa

SEQ ID NO: 1951004 - RNA, 21 nt, Human
auauugaggagcacugaaagu

SEQ ID NO: 1951005 - RNA, 22 nt, Human
auauugcugauggugcaaugac

SEQ ID NO: 1951006 - RNA, 17 nt, Human
auauugguuuuaugaug

SEQ ID NO: 1951007 - RNA, 18 nt, Human
auauugguuuuaugauga

SEQ ID NO: 1951008 - RNA, 12 nt, Human
auauuguaagaa

SEQ ID NO: 1951009 - RNA, 21 nt, Human
auauugguauauccuuuucug

SEQ ID NO: 1951010 - RNA, 12 nt, Human
auauugguuuua

SEQ ID NO: 1951011 - RNA, 13 nt, Human
auauugguuuuau

SEQ ID NO: 1951012 - RNA, 15 nt, Human
auauugguuuuauga

SEQ ID NO: 1951013 - RNA, 19 nt, Human
auauugguuuuaugaugac

SEQ ID NO: 1951014 - RNA, 13 nt, Human
auauuguaagaaa

SEQ ID NO: 1951015 - RNA, 14 nt, Human
auauuguaagaaau

SEQ ID NO: 1951016 - RNA, 15 nt, Human
auauuguaagaaaua

SEQ ID NO: 1951017 - RNA, 16 nt, Human
auauuguaagaaauac

SEQ ID NO: 1951018 - RNA, 18 nt, Human
auauucucacagcuccaa

SEQ ID NO: 1951019 - RNA, 14 nt, Human
auauucuauuuuac

SEQ ID NO: 1951020 - RNA, 16 nt, Human
auauucuauuuuacaa

SEQ ID NO: 1951021 - RNA, 19 nt, Human
auauucuaguaauaaagac

SEQ ID NO: 1951022 - RNA, 13 nt, Human
auauucuauuuua

SEQ ID NO: 1951023 - RNA, 21 nt, Human
auauucuaguaauaaagacuc

SEQ ID NO: 1951024 - RNA, 21 nt, Human
auauuccugcauuugugaaau

SEQ ID NO: 1951025 - RNA, 15 nt, Human
auauugauaugcuua

SEQ ID NO: 1951026 - RNA, 21 nt, Human
auauugacaaguuuaaaggcu

SEQ ID NO: 1951027 - RNA, 17 nt, Human
auauuguuuucagugua

SEQ ID NO: 1951028 - RNA, 13 nt, Human
auauuguuuucag

SEQ ID NO: 1951029 - RNA, 20 nt, Human
auauugucucuuuuuuaagu

SEQ ID NO: 1951030 - RNA, 13 nt, Human
auauuuacaaaug

SEQ ID NO: 1951031 - RNA, 15 nt, Human
auauuuaauguugaa

SEQ ID NO: 1951032 - RNA, 16 nt, Human
auauuuaauguugaac

SEQ ID NO: 1951033 - RNA, 20 nt, Human
auauuuaauguugaacaaaa

SEQ ID NO: 1951034 - RNA, 21 nt, Human
auauuuaauguugaacaaaau

SEQ ID NO: 1951035 - RNA, 22 nt, Human
auauuuaauguugaacaaaaua

SEQ ID NO: 1951036 - RNA, 22 nt, Human
auauuuacaacacuuuaauggg

SEQ ID NO: 1951037 - RNA, 13 nt, Human
auauuuacaaccu

SEQ ID NO: 1951038 - RNA, 12 nt, Human
auauuuaaaggg

SEQ ID NO: 1951039 - RNA, 13 nt, Human
auauuuaaagucu

SEQ ID NO: 1951040 - RNA, 14 nt, Human
auauuuaaagggaa

SEQ ID NO: 1951041 - RNA, 19 nt, Human
auauuuaaagggaaauuga

SEQ ID NO: 1951042 - RNA, 15 nt, Human
auccuggaguucugg

SEQ ID NO: 1951043 - RNA, 17 nt, Human
auccuggcacccggccc

SEQ ID NO: 1951044 - RNA, 19 nt, Human
auccuggcacccggccccu

SEQ ID NO: 1951045 - RNA, 20 nt, Human
auccuggcacccggccccug

SEQ ID NO: 1951046 - RNA, 21 nt, Human
auccuggcacccggccccugc

SEQ ID NO: 1951047 - RNA, 22 nt, Human
auccuggcacccggccccugcu

SEQ ID NO: 1951048 - RNA, 23 nt, Human
auccuggcacccggccccugcug

SEQ ID NO: 1951049 - RNA, 21 nt, Human
auccugggcuuuuguuuugcu

SEQ ID NO: 1951050 - RNA, 22 nt, Human
auccugggcuuuuguuuugcuu

SEQ ID NO: 1951051 - RNA, 17 nt, Human
aucguaaaauuaagaaa

SEQ ID NO: 1951052 - RNA, 15 nt, Human
aucgguuaacaaaua

SEQ ID NO: 1951053 - RNA, 16 nt, Human
aucgguuaacaaauaa

SEQ ID NO: 1951054 - RNA, 23 nt, Human
aucgguuaacaaauaacaacuuu

SEQ ID NO: 1951055 - RNA, 14 nt, Human
aucguaaaauuaag

SEQ ID NO: 1951056 - RNA, 13 nt, Human
aucguaaaauuaa

SEQ ID NO: 1951057 - RNA, 12 nt, Human
aucguaaaauua

SEQ ID NO: 1951058 - RNA, 21 nt, Human
aucggggagguuuucuccccc

SEQ ID NO: 1951059 - RNA, 12 nt, Human
auccuuacaaau

SEQ ID NO: 1951060 - RNA, 14 nt, Human
auccuuacaaauga

SEQ ID NO: 1951061 - RNA, 16 nt, Human
auccugucaucugaga

SEQ ID NO: 1951062 - RNA, 17 nt, Human
auccugucaucugagaa

SEQ ID NO: 1951063 - RNA, 18 nt, Human
auccugucaucugagaau

SEQ ID NO: 1951064 - RNA, 20 nt, Human
auccugucaucugagaauga

SEQ ID NO: 1951065 - RNA, 16 nt, Human
auccugcaauuccacu

SEQ ID NO: 1951066 - RNA, 15 nt, Human
auccugcacugacuc

SEQ ID NO: 1951067 - RNA, 16 nt, Human
auccugcacugacucu

SEQ ID NO: 1951068 - RNA, 17 nt, Human
auccugcacugacucug

SEQ ID NO: 1951069 - RNA, 22 nt, Human
auccugaggcuccacuuggucu

SEQ ID NO: 1951070 - RNA, 13 nt, Human
auccugccccuga

SEQ ID NO: 1951071 - RNA, 18 nt, Human
auccugcacugacucugg

SEQ ID NO: 1951072 - RNA, 19 nt, Human
auccugcacugacucugga

SEQ ID NO: 1951073 - RNA, 11 nt, Human
auccugaggcu

SEQ ID NO: 1951074 - RNA, 13 nt, Human
auccugaggcucc

SEQ ID NO: 1951075 - RNA, 16 nt, Human
auccugaggcuccacu

SEQ ID NO: 1951076 - RNA, 18 nt, Human
auccugaggcuccacuug

SEQ ID NO: 1951077 - RNA, 21 nt, Human
auccugagccagauuucacuc

SEQ ID NO: 1951078 - RNA, 17 nt, Human
auccugagccagauuuc

SEQ ID NO: 1951079 - RNA, 15 nt, Human
auccugagccagauu

SEQ ID NO: 1951080 - RNA, 14 nt, Human
auccugagccagau

SEQ ID NO: 1951081 - RNA, 13 nt, Human
auccugagccaga

SEQ ID NO: 1951082 - RNA, 12 nt, Human
auccugagccag

SEQ ID NO: 1951083 - RNA, 11 nt, Human
auccugagcca

SEQ ID NO: 1951084 - RNA, 17 nt, Human
auccucuuugagugaag

SEQ ID NO: 1951085 - RNA, 20 nt, Human
auccucuguacagagcccac

SEQ ID NO: 1951086 - RNA, 18 nt, Human
auccucuguacagagccc

SEQ ID NO: 1951087 - RNA, 20 nt, Human
uucuuuugccguuauuaaaa

SEQ ID NO: 1951088 - RNA, 15 nt, Human
uucuuugccaucucu

SEQ ID NO: 1951089 - RNA, 18 nt, Human
uucuuugccaucucugcu

SEQ ID NO: 1951090 - RNA, 19 nt, Human
uucuuugccaucucugcuc

SEQ ID NO: 1951091 - RNA, 21 nt, Human
uucuuugccaucucugcucca

SEQ ID NO: 1951092 - RNA, 16 nt, Human
aucguauucaccuuca

SEQ ID NO: 1951093 - RNA, 18 nt, Human
aucgucacugcuuaacuu

SEQ ID NO: 1951094 - RNA, 14 nt, Human
aucgucacugcuua

SEQ ID NO: 1951095 - RNA, 14 nt, Human
aucgugacaacacu

SEQ ID NO: 1951096 - RNA, 15 nt, Human
aucgugacaacacuu

SEQ ID NO: 1951097 - RNA, 19 nt, Human
aucuaaauggaaccacucu

SEQ ID NO: 1951098 - RNA, 18 nt, Human
aucuaaaaauauacaugu

SEQ ID NO: 1951099 - RNA, 23 nt, Human
aucuaaaaauauacauguuuaug

SEQ ID NO: 1951100 - RNA, 13 nt, Human
aucuaaaaauaua

SEQ ID NO: 1951101 - RNA, 14 nt, Human
aucuaaaaauauac

SEQ ID NO: 1951102 - RNA, 16 nt, Human
aucuaaaaauauacau

SEQ ID NO: 1951103 - RNA, 17 nt, Human
aucuaaaaauauacaug

SEQ ID NO: 1951104 - RNA, 15 nt, Human
aucuaaacugccccc

SEQ ID NO: 1951105 - RNA, 15 nt, Human
aucuaaauguugaaa

SEQ ID NO: 1951106 - RNA, 16 nt, Human
uugaaggaaaaauuca

SEQ ID NO: 1951107 - RNA, 14 nt, Human
uugaagguuuuuga

SEQ ID NO: 1951108 - RNA, 16 nt, Human
uugaagguuuuugaua

SEQ ID NO: 1951109 - RNA, 15 nt, Human
uugaagguagaaugu

SEQ ID NO: 1951110 - RNA, 16 nt, Human
uugaagguagaauguu

SEQ ID NO: 1951111 - RNA, 19 nt, Human
uugaagguagaauguuuuc

SEQ ID NO: 1951112 - RNA, 15 nt, Human
uugaagucaugcucc

SEQ ID NO: 1951113 - RNA, 23 nt, Human
uugaauagggcuaggaauauaga

SEQ ID NO: 1951114 - RNA, 23 nt, Human
uugaaguugacucugcucuugca

SEQ ID NO: 1951115 - RNA, 20 nt, Human
uugaagugagaaaaugaaca

SEQ ID NO: 1951116 - RNA, 14 nt, Human
uugaauaugauuaa

SEQ ID NO: 1951117 - RNA, 15 nt, Human
uugaauaugauuaaa

SEQ ID NO: 1951118 - RNA, 23 nt, Human
uugaauaugauuaaaaauaucaa

SEQ ID NO: 1951119 - RNA, 17 nt, Human
uugacacuuaaaaaugg

SEQ ID NO: 1951120 - RNA, 22 nt, Human
uugauaagggacugauguuugu

SEQ ID NO: 1951121 - RNA, 18 nt, Human
uugauaacaauguuuuaa

SEQ ID NO: 1951122 - RNA, 22 nt, Human
uugauaaauaguguuauugaga

SEQ ID NO: 1951123 - RNA, 13 nt, Human
uugauaaauagug

SEQ ID NO: 1951124 - RNA, 15 nt, Human
uugauaaauaguguu

SEQ ID NO: 1951125 - RNA, 21 nt, Human
uugauaagggacugauguuug

SEQ ID NO: 1951126 - RNA, 20 nt, Human
uugauaagggacugauguuu

SEQ ID NO: 1951127 - RNA, 22 nt, Human
uugauaacagggauugauuuua

SEQ ID NO: 1951128 - RNA, 16 nt, Human
uugaggucuguucuuu

SEQ ID NO: 1951129 - RNA, 15 nt, Human
uugaggucuguucuu

SEQ ID NO: 1951130 - RNA, 12 nt, Human
uugauaaaguaa

SEQ ID NO: 1951131 - RNA, 19 nt, Human
uugacacuuaaaaaugguu

SEQ ID NO: 1951132 - RNA, 19 nt, Human
uugacagggcacaccgggc

SEQ ID NO: 1951133 - RNA, 19 nt, Human
uugaccauucuccaccugc

SEQ ID NO: 1951134 - RNA, 18 nt, Human
uugaccauucuccaccug

SEQ ID NO: 1951135 - RNA, 21 nt, Human
uugagaacuaccuggauuugu

SEQ ID NO: 1951136 - RNA, 24 nt, Human
uugaccauucuccaccugccaggg

SEQ ID NO: 1951137 - RNA, 22 nt, Human
uugagagagauguguaauuuuu

SEQ ID NO: 1951138 - RNA, 23 nt, Human
uugagagagauguguaauuuuuc

SEQ ID NO: 1951139 - RNA, 14 nt, Human
uugagagagaugug

SEQ ID NO: 1951140 - RNA, 15 nt, Human
uugagagagaugugu

SEQ ID NO: 1951141 - RNA, 18 nt, Human
uugagagagauguguaau

SEQ ID NO: 1951142 - RNA, 21 nt, Human
uugagagagauguguaauuuu

SEQ ID NO: 1951143 - RNA, 13 nt, Human
uugagagagaugu

SEQ ID NO: 1951144 - RNA, 12 nt, Human
aucacugaaaua

SEQ ID NO: 1951145 - RNA, 17 nt, Human
aucacuguuuagauuug

SEQ ID NO: 1951146 - RNA, 18 nt, Human
aucacuguuuagauuugc

SEQ ID NO: 1951147 - RNA, 18 nt, Human
aucacuuaaaacacguuu

SEQ ID NO: 1951148 - RNA, 14 nt, Human
aucacuuaaaacac

SEQ ID NO: 1951149 - RNA, 15 nt, Human
aucacuuaaaacacg

SEQ ID NO: 1951150 - RNA, 22 nt, Human
aucacuguuuagauuugccaua

SEQ ID NO: 1951151 - RNA, 12 nt, Human
aucacuuaaaac

SEQ ID NO: 1951152 - RNA, 13 nt, Human
aucacuuaaaaca

SEQ ID NO: 1951153 - RNA, 17 nt, Human
aucaggugcugccaucc

SEQ ID NO: 1951154 - RNA, 19 nt, Human
aucaggugcugccauccag

SEQ ID NO: 1951155 - RNA, 23 nt, Human
aucacuugaacccgggaggcaga

SEQ ID NO: 1951156 - RNA, 15 nt, Human
aucaggugcugccau

SEQ ID NO: 1951157 - RNA, 19 nt, Human
aucagucugauucccaagc

SEQ ID NO: 1951158 - RNA, 17 nt, Human
aucagugcccuccagga

SEQ ID NO: 1951159 - RNA, 13 nt, Human
aucagugcccucc

SEQ ID NO: 1951160 - RNA, 15 nt, Human
aucagugcccuccag

SEQ ID NO: 1951161 - RNA, 20 nt, Human
aucauuaucagccugugcca

SEQ ID NO: 1951162 - RNA, 14 nt, Human
aucauucuaaagau

SEQ ID NO: 1951163 - RNA, 15 nt, Human
aucauucuaaagaua

SEQ ID NO: 1951164 - RNA, 16 nt, Human
aucauuaggugugacu

SEQ ID NO: 1951165 - RNA, 21 nt, Human
aucauccacugugccaugugc

SEQ ID NO: 1951166 - RNA, 23 nt, Human
aucauccacugugccaugugcca

SEQ ID NO: 1951167 - RNA, 15 nt, Human
aucauaaaacuugau

SEQ ID NO: 1951168 - RNA, 13 nt, Human
aucauauaaauau

SEQ ID NO: 1951169 - RNA, 19 nt, Human
aucauaguuuuauuuauau

SEQ ID NO: 1951170 - RNA, 23 nt, Human
aucauaguuuuauuuauauuuau

SEQ ID NO: 1951171 - RNA, 14 nt, Human
aucauaguuuuauu

SEQ ID NO: 1951172 - RNA, 16 nt, Human
aucauaguuuuauuua

SEQ ID NO: 1951173 - RNA, 17 nt, Human
aucauaguuuuauuuau

SEQ ID NO: 1951174 - RNA, 19 nt, Human
uucugcagccacuauuguu

SEQ ID NO: 1951175 - RNA, 16 nt, Human
uucugaaucuucugaa

SEQ ID NO: 1951176 - RNA, 13 nt, Human
uucugaaguuaua

SEQ ID NO: 1951177 - RNA, 15 nt, Human
uucugaaguuauauu

SEQ ID NO: 1951178 - RNA, 17 nt, Human
uucugaaguuauauuuc

SEQ ID NO: 1951179 - RNA, 18 nt, Human
uucugaaguuauauuucc

SEQ ID NO: 1951180 - RNA, 19 nt, Human
uucugaaguuauauuuccu

SEQ ID NO: 1951181 - RNA, 20 nt, Human
uucugaaguuauauuuccua

SEQ ID NO: 1951182 - RNA, 22 nt, Human
uucugaaguuauauuuccuaua

SEQ ID NO: 1951183 - RNA, 18 nt, Human
uucuccuuucacaaccuu

SEQ ID NO: 1951184 - RNA, 22 nt, Human
uucuccuuucacaaccuucugu

SEQ ID NO: 1951185 - RNA, 21 nt, Human
uucucuaguuugauuaaauuc

SEQ ID NO: 1951186 - RNA, 19 nt, Human
aucauugugaaauuauuca

SEQ ID NO: 1951187 - RNA, 23 nt, Human
aucauuguccagagcugcuuccc

SEQ ID NO: 1951188 - RNA, 18 nt, Human
aucauuguucuuuucaau

SEQ ID NO: 1951189 - RNA, 19 nt, Human
aucauuguuggacauuugg

SEQ ID NO: 1951190 - RNA, 15 nt, Human
aucauugugaaauua

SEQ ID NO: 1951191 - RNA, 13 nt, Human
aucauugugaaau

SEQ ID NO: 1951192 - RNA, 13 nt, Human
aucauugaaaucu

SEQ ID NO: 1951193 - RNA, 17 nt, Human
aucauucuaaagauaga

SEQ ID NO: 1951194 - RNA, 14 nt, Human
aucauuguccagag

SEQ ID NO: 1951195 - RNA, 16 nt, Human
aucauuguccagagcu

SEQ ID NO: 1951196 - RNA, 12 nt, Human
aucauugaaauc

SEQ ID NO: 1951197 - RNA, 13 nt, Human
uucuccccuucca

SEQ ID NO: 1951198 - RNA, 18 nt, Human
uucuccccuuccauuucu

SEQ ID NO: 1951199 - RNA, 22 nt, Human
uucuccccuuccauuucugccu

SEQ ID NO: 1951200 - RNA, 17 nt, Human
uucucccgggacucugc

SEQ ID NO: 1951201 - RNA, 17 nt, Human
uucuccuuucacaaccu

SEQ ID NO: 1951202 - RNA, 20 nt, Human
auccauggggcugauuguau

SEQ ID NO: 1951203 - RNA, 18 nt, Human
auccauggggucucucac

SEQ ID NO: 1951204 - RNA, 11 nt, Human
aucccagcccc

SEQ ID NO: 1951205 - RNA, 16 nt, Human
aucccaugagccucag

SEQ ID NO: 1951206 - RNA, 17 nt, Human
aucccugaaggccccgc

SEQ ID NO: 1951207 - RNA, 22 nt, Human
aucccugaaggccccgcccagg

SEQ ID NO: 1951208 - RNA, 17 nt, Human
aucccaugagccucagc

SEQ ID NO: 1951209 - RNA, 18 nt, Human
aucccaugagccucagca

SEQ ID NO: 1951210 - RNA, 14 nt, Human
auccaguaucuuga

SEQ ID NO: 1951211 - RNA, 15 nt, Human
auccaguaucuugaa

SEQ ID NO: 1951212 - RNA, 17 nt, Human
auccagguucagcuugu

SEQ ID NO: 1951213 - RNA, 20 nt, Human
auccacagucucccccaccc

SEQ ID NO: 1951214 - RNA, 19 nt, Human
auccaaaguccccauucag

SEQ ID NO: 1951215 - RNA, 13 nt, Human
auccaaauauugu

SEQ ID NO: 1951216 - RNA, 15 nt, Human
uucugccugcccagg

SEQ ID NO: 1951217 - RNA, 16 nt, Human
uucugccugcccaggc

SEQ ID NO: 1951218 - RNA, 16 nt, Human
auccaagcaaauguga

SEQ ID NO: 1951219 - RNA, 22 nt, Human
aucccugauaaauauucacacu

SEQ ID NO: 1951220 - RNA, 15 nt, Human
aucccugaucccuuc

SEQ ID NO: 1951221 - RNA, 13 nt, Human
uucuguuuagaua

SEQ ID NO: 1951222 - RNA, 18 nt, Human
uucuguuuagauaauaca

SEQ ID NO: 1951223 - RNA, 12 nt, Human
uucuguuuucaa

SEQ ID NO: 1951224 - RNA, 13 nt, Human
uucuguuuucaau

SEQ ID NO: 1951225 - RNA, 23 nt, Human
uucuuaaccagaucauugugaaa

SEQ ID NO: 1951226 - RNA, 22 nt, Human
uucuuaaccagaucauugugaa

SEQ ID NO: 1951227 - RNA, 14 nt, Human
uucuguuuucaauc

SEQ ID NO: 1951228 - RNA, 16 nt, Human
uucuuaccgacaagca

SEQ ID NO: 1951229 - RNA, 17 nt, Human
uucuuucuggcuaugca

SEQ ID NO: 1951230 - RNA, 20 nt, Human
uucuuucuggcuaugcauuu

SEQ ID NO: 1951231 - RNA, 12 nt, Human
uucuuucuggcu

SEQ ID NO: 1951232 - RNA, 22 nt, Human
uucuugcgauaguuuacugaga

SEQ ID NO: 1951233 - RNA, 15 nt, Human
uucuuugaauuuuca

SEQ ID NO: 1951234 - RNA, 16 nt, Human
uucuuugaauuuucau

SEQ ID NO: 1951235 - RNA, 17 nt, Human
uucuuugaauuuucauu

SEQ ID NO: 1951236 - RNA, 18 nt, Human
uucuuugaauuuucauuu

SEQ ID NO: 1951237 - RNA, 22 nt, Human
uucuuugaauuuucauuuuaca

SEQ ID NO: 1951238 - RNA, 15 nt, Human
uucuuugaucaugaa

SEQ ID NO: 1951239 - RNA, 16 nt, Human
uucuuugaucaugaau

SEQ ID NO: 1951240 - RNA, 17 nt, Human
uucuuugaucaugaaua

SEQ ID NO: 1951241 - RNA, 22 nt, Human
uucuuugaucaugaauaacuga

SEQ ID NO: 1951242 - RNA, 14 nt, Human
uucuuugauucugu

SEQ ID NO: 1951243 - RNA, 15 nt, Human
uucuuugcaaaaauc

SEQ ID NO: 1951244 - RNA, 16 nt, Human
uucuuugcaaaaaucc

SEQ ID NO: 1951245 - RNA, 19 nt, Human
uucuuugcacuuuuucuua

SEQ ID NO: 1951246 - RNA, 17 nt, Human
uucuucucccccauccu

SEQ ID NO: 1951247 - RNA, 11 nt, Human
uucuucucccu

SEQ ID NO: 1951248 - RNA, 22 nt, Human
uucuucuccacuuucuagccag

SEQ ID NO: 1951249 - RNA, 18 nt, Human
uucuuagacuuuuccaau

SEQ ID NO: 1951250 - RNA, 16 nt, Human
ugggaaaggggaaguu

SEQ ID NO: 1951251 - RNA, 17 nt, Human
uggcuucccgcucagcc

SEQ ID NO: 1951252 - RNA, 15 nt, Human
uggcuucccgcucag

SEQ ID NO: 1951253 - RNA, 16 nt, Human
uggcuucccgcucagc

SEQ ID NO: 1951254 - RNA, 23 nt, Human
uggcuucccaaaugugugcccag

SEQ ID NO: 1951255 - RNA, 15 nt, Human
ugggaaguuaaaggg

SEQ ID NO: 1951256 - RNA, 23 nt, Human
ugggaaguuaaagggaagaaaac

SEQ ID NO: 1951257 - RNA, 17 nt, Human
ugggaagagcuuagaaa

SEQ ID NO: 1951258 - RNA, 20 nt, Human
ugggaagagcuuagaaacug

SEQ ID NO: 1951259 - RNA, 13 nt, Human
ugggaacuagacu

SEQ ID NO: 1951260 - RNA, 23 nt, Human
uggcuucacggaagagccuugcg

SEQ ID NO: 1951261 - RNA, 22 nt, Human
uggcuucacggaagagccuugc

SEQ ID NO: 1951262 - RNA, 13 nt, Human
uggcuuacacugg

SEQ ID NO: 1951263 - RNA, 11 nt, Human
uggcuuaauuc

SEQ ID NO: 1951264 - RNA, 19 nt, Human
uggcuuaaaaaaaacucuu

SEQ ID NO: 1951265 - RNA, 14 nt, Human
uggcugugucuccc

SEQ ID NO: 1951266 - RNA, 13 nt, Human
uggcuguuggcug

SEQ ID NO: 1951267 - RNA, 15 nt, Human
uggcuguuggcuggg

SEQ ID NO: 1951268 - RNA, 17 nt, Human
uggcuuaaaacaacacu

SEQ ID NO: 1951269 - RNA, 22 nt, Human
uggcugccuugugaaggaauua

SEQ ID NO: 1951270 - RNA, 22 nt, Human
uggcugcggggcgggcacaccu

SEQ ID NO: 1951271 - RNA, 20 nt, Human
uggcugccaaugggagcuca

SEQ ID NO: 1951272 - RNA, 18 nt, Human
uggcugccaaugggagcu

SEQ ID NO: 1951273 - RNA, 15 nt, Human
uggcugcagggaguc

SEQ ID NO: 1951274 - RNA, 19 nt, Human
uggcugaguagcucugccu

SEQ ID NO: 1951275 - RNA, 13 nt, Human
uggcugcagggag

SEQ ID NO: 1951276 - RNA, 14 nt, Human
uggcugcagggagu

SEQ ID NO: 1951277 - RNA, 16 nt, Human
uggcucuugaacugag

SEQ ID NO: 1951278 - RNA, 22 nt, Human
uggcucuugaacugagcuugga

SEQ ID NO: 1951279 - RNA, 12 nt, Human
uggcugcaaagg

SEQ ID NO: 1951280 - RNA, 21 nt, Human
uggcucuuccaggcugggaga

SEQ ID NO: 1951281 - RNA, 20 nt, Human
uggcucuuccaggcugggag

SEQ ID NO: 1951282 - RNA, 19 nt, Human
uggcucuuccaggcuggga

SEQ ID NO: 1951283 - RNA, 18 nt, Human
uggcucaaguccucuuuu

SEQ ID NO: 1951284 - RNA, 15 nt, Human
uggcuaugcauuuga

SEQ ID NO: 1951285 - RNA, 17 nt, Human
uggcuaugcauuugaaa

SEQ ID NO: 1951286 - RNA, 14 nt, Human
uggcuaugcauuug

SEQ ID NO: 1951287 - RNA, 16 nt, Human
uggcuaugagggccuu

SEQ ID NO: 1951288 - RNA, 19 nt, Human
uggcuaugcauuugaaaau

SEQ ID NO: 1951289 - RNA, 22 nt, Human
uggcuauuagagaucaaccccu

SEQ ID NO: 1951290 - RNA, 19 nt, Human
aggcugggacgcucugcug

SEQ ID NO: 1951291 - RNA, 18 nt, Human
aggcugggacgcucugcu

SEQ ID NO: 1951292 - RNA, 14 nt, Human
aggcugggagagcc

SEQ ID NO: 1951293 - RNA, 22 nt, Human
uggcuagagguucaaagauauu

SEQ ID NO: 1951294 - RNA, 18 nt, Human
aggcuggcgugcaguggu

SEQ ID NO: 1951295 - RNA, 20 nt, Human
aggcuggcgugcaguggugc

SEQ ID NO: 1951296 - RNA, 20 nt, Human
aggcucucaggccagcugcu

SEQ ID NO: 1951297 - RNA, 19 nt, Human
aggcucucaggccagcugc

SEQ ID NO: 1951298 - RNA, 18 nt, Human
aggcucucaggccagcug

SEQ ID NO: 1951299 - RNA, 16 nt, Human
aggcucucaggccagc

SEQ ID NO: 1951300 - RNA, 15 nt, Human
aggcucucaggccag

SEQ ID NO: 1951301 - RNA, 14 nt, Human
aggcucucaggcca

SEQ ID NO: 1951302 - RNA, 12 nt, Human
aggcucucaggc

SEQ ID NO: 1951303 - RNA, 11 nt, Human
aggcucucagg

SEQ ID NO: 1951304 - RNA, 15 nt, Human
aggcucugcccuugg

SEQ ID NO: 1951305 - RNA, 14 nt, Human
aggcucugcccuug

SEQ ID NO: 1951306 - RNA, 13 nt, Human
aggcucugcccuu

SEQ ID NO: 1951307 - RNA, 12 nt, Human
aggcucugcccu

SEQ ID NO: 1951308 - RNA, 11 nt, Human
aggcucugccc

SEQ ID NO: 1951309 - RNA, 21 nt, Human
aggcucucaggccagcugcuu

SEQ ID NO: 1951310 - RNA, 15 nt, Human
aggcucucugggcug

SEQ ID NO: 1951311 - RNA, 19 nt, Human
aggcucgagcaugccugga

SEQ ID NO: 1951312 - RNA, 18 nt, Human
aggcucgagcaugccugg

SEQ ID NO: 1951313 - RNA, 17 nt, Human
aggcucgagcaugccug

SEQ ID NO: 1951314 - RNA, 15 nt, Human
aggcucgagcaugcc

SEQ ID NO: 1951315 - RNA, 20 nt, Human
aggcucucaacaggggagag

SEQ ID NO: 1951316 - RNA, 21 nt, Human
aggcucgagcaugccuggaug

SEQ ID NO: 1951317 - RNA, 20 nt, Human
aggcuccuucaacaaggcuu

SEQ ID NO: 1951318 - RNA, 12 nt, Human
aggcucgagcau

SEQ ID NO: 1951319 - RNA, 19 nt, Human
aggcuccuuuagcgcccag

SEQ ID NO: 1951320 - RNA, 20 nt, Human
aggcuccugccaccacgccc

SEQ ID NO: 1951321 - RNA, 13 nt, Human
aggcuccugcccc

SEQ ID NO: 1951322 - RNA, 22 nt, Human
aggcuccuuaggguuuucucuc

SEQ ID NO: 1951323 - RNA, 23 nt, Human
aggcuccuuaggguuuucucucu

SEQ ID NO: 1951324 - RNA, 14 nt, Human
aggcuccugccacc

SEQ ID NO: 1951325 - RNA, 15 nt, Human
aggcugcuuuccaaa

SEQ ID NO: 1951326 - RNA, 17 nt, Human
aggcugcuuuccaaagc

SEQ ID NO: 1951327 - RNA, 18 nt, Human
aggcugcuuuccaaagcc

SEQ ID NO: 1951328 - RNA, 19 nt, Human
aggcugcuuuccaaagcca

SEQ ID NO: 1951329 - RNA, 21 nt, Human
aggcugcuuuccaaagccaau

SEQ ID NO: 1951330 - RNA, 13 nt, Human
aggcugcuuucca

SEQ ID NO: 1951331 - RNA, 14 nt, Human
aggcugcuuuccaa

SEQ ID NO: 1951332 - RNA, 23 nt, Human
aggcugcucuugaacuccugacc

SEQ ID NO: 1951333 - RNA, 16 nt, Human
aggcucugcccuuggu

SEQ ID NO: 1951334 - RNA, 13 nt, Human
aggcucuggagcc

SEQ ID NO: 1951335 - RNA, 15 nt, Human
aggcucuggagccca

SEQ ID NO: 1951336 - RNA, 14 nt, Human
aggcucuggagccc

SEQ ID NO: 1951337 - RNA, 19 nt, Human
aggcucuggagcccacugu

SEQ ID NO: 1951338 - RNA, 18 nt, Human
aggcucuggagcccacug

SEQ ID NO: 1951339 - RNA, 13 nt, Human
aggcuggcgugca

SEQ ID NO: 1951340 - RNA, 17 nt, Human
aggcuggcgugcagugg

SEQ ID NO: 1951341 - RNA, 19 nt, Human
aggcuggcccugcccuggu

SEQ ID NO: 1951342 - RNA, 15 nt, Human
aggcuggcccugccc

SEQ ID NO: 1951343 - RNA, 16 nt, Human
aggcuggcccugcccu

SEQ ID NO: 1951344 - RNA, 17 nt, Human
aggcuggcccugcccug

SEQ ID NO: 1951345 - RNA, 18 nt, Human
aggcuggcccugcccugg

SEQ ID NO: 1951346 - RNA, 12 nt, Human
aggcuggcccug

SEQ ID NO: 1951347 - RNA, 14 nt, Human
aggcuggcccugcc

SEQ ID NO: 1951348 - RNA, 17 nt, Human
aggcuggaguuggggca

SEQ ID NO: 1951349 - RNA, 19 nt, Human
aggccaaguacacugagag

SEQ ID NO: 1951350 - RNA, 23 nt, Human
aggccaaguccgcagaagcccug

SEQ ID NO: 1951351 - RNA, 15 nt, Human
aggccacaagacccu

SEQ ID NO: 1951352 - RNA, 16 nt, Human
aggccaaucagaagcu

SEQ ID NO: 1951353 - RNA, 20 nt, Human
aggccaaucagaagcuaaca

SEQ ID NO: 1951354 - RNA, 16 nt, Human
uggagucauuucugau

SEQ ID NO: 1951355 - RNA, 17 nt, Human
uggagucauuucugauu

SEQ ID NO: 1951356 - RNA, 22 nt, Human
uggaguccaggacaggagaugc

SEQ ID NO: 1951357 - RNA, 19 nt, Human
uggagucagacagaugugg

SEQ ID NO: 1951358 - RNA, 14 nt, Human
uggagucagccucg

SEQ ID NO: 1951359 - RNA, 20 nt, Human
uggaguucaucuugaauugu

SEQ ID NO: 1951360 - RNA, 15 nt, Human
uggaugccugguggc

SEQ ID NO: 1951361 - RNA, 17 nt, Human
uggaguucaucuugaau

SEQ ID NO: 1951362 - RNA, 16 nt, Human
uggaguucaucuugaa

SEQ ID NO: 1951363 - RNA, 17 nt, Human
uggaguucauucauauu

SEQ ID NO: 1951364 - RNA, 18 nt, Human
uggaguucauucauauua

SEQ ID NO: 1951365 - RNA, 20 nt, Human
uggaguucauucauauuaca

SEQ ID NO: 1951366 - RNA, 20 nt, Human
uggaugccugguggcagcug

SEQ ID NO: 1951367 - RNA, 18 nt, Human
uggaugccugguggcagc

SEQ ID NO: 1951368 - RNA, 19 nt, Human
uggaugccugguggcagcu

SEQ ID NO: 1951369 - RNA, 18 nt, Human
aggccaaggugggaggau

SEQ ID NO: 1951370 - RNA, 20 nt, Human
aggccaaaggaagcacaugc

SEQ ID NO: 1951371 - RNA, 23 nt, Human
aggccaaaggaagcacaugccuc

SEQ ID NO: 1951372 - RNA, 15 nt, Human
aggccaaaggaagca

SEQ ID NO: 1951373 - RNA, 15 nt, Human
aggccaaagacaaau

SEQ ID NO: 1951374 - RNA, 17 nt, Human
aggccaaagacaaauag

SEQ ID NO: 1951375 - RNA, 18 nt, Human
aggccaaagacaaauagu

SEQ ID NO: 1951376 - RNA, 19 nt, Human
aggccaaagacaaauagua

SEQ ID NO: 1951377 - RNA, 14 nt, Human
aggccaaaggaagc

SEQ ID NO: 1951378 - RNA, 20 nt, Human
aggccaaacucaccugcccc

SEQ ID NO: 1951379 - RNA, 13 nt, Human
aggccaaagacaa

SEQ ID NO: 1951380 - RNA, 18 nt, Human
aggcauuuguuugaacug

SEQ ID NO: 1951381 - RNA, 21 nt, Human
aggcauuuucccccuuggcuc

SEQ ID NO: 1951382 - RNA, 16 nt, Human
aggccaaacucaccug

SEQ ID NO: 1951383 - RNA, 17 nt, Human
aggccaaacaggcccuc

SEQ ID NO: 1951384 - RNA, 22 nt, Human
uggaccuuuccugaggaagagg

SEQ ID NO: 1951385 - RNA, 18 nt, Human
uggacgagaaaacaauaa

SEQ ID NO: 1951386 - RNA, 12 nt, Human
uggcagccccug

SEQ ID NO: 1951387 - RNA, 16 nt, Human
uggcagccgugccuuc

SEQ ID NO: 1951388 - RNA, 17 nt, Human
uggcagcccgcaucagc

SEQ ID NO: 1951389 - RNA, 20 nt, Human
uggcagcccgcaucagcugc

SEQ ID NO: 1951390 - RNA, 20 nt, Human
aggccacaagacccuugugg

SEQ ID NO: 1951391 - RNA, 15 nt, Human
uggcagccucuucaa

SEQ ID NO: 1951392 - RNA, 16 nt, Human
uggcagccucuucaaa

SEQ ID NO: 1951393 - RNA, 23 nt, Human
uggcagccgugccuucagcucua

SEQ ID NO: 1951394 - RNA, 12 nt, Human
aggccagagaca

SEQ ID NO: 1951395 - RNA, 20 nt, Human
aggccacauccacagucucc

SEQ ID NO: 1951396 - RNA, 13 nt, Human
uggcagccuuggc

SEQ ID NO: 1951397 - RNA, 24 nt, Human
aggccacauuacuagaguuggcau

SEQ ID NO: 1951398 - RNA, 15 nt, Human
aggccacccugugca

SEQ ID NO: 1951399 - RNA, 20 nt, Human
aggccacccugugcagaagg

SEQ ID NO: 1951400 - RNA, 22 nt, Human
aggccacccugugcagaaggga

SEQ ID NO: 1951401 - RNA, 18 nt, Human
uggcaccagcagccugga

SEQ ID NO: 1951402 - RNA, 20 nt, Human
uggcacaucagcacgauuuc

SEQ ID NO: 1951403 - RNA, 22 nt, Human
uggauuaaacuuaaucuaaaug

SEQ ID NO: 1951404 - RNA, 12 nt, Human
uggauguucuga

SEQ ID NO: 1951405 - RNA, 22 nt, Human
uggcagaguugaagacagagcu

SEQ ID NO: 1951406 - RNA, 21 nt, Human
uggcagaguugaagacagagc

SEQ ID NO: 1951407 - RNA, 16 nt, Human
uggcacccggccccug

SEQ ID NO: 1951408 - RNA, 15 nt, Human
uggcacccggccccu

SEQ ID NO: 1951409 - RNA, 21 nt, Human
uggcacaucagcacgauuucu

SEQ ID NO: 1951410 - RNA, 14 nt, Human
uggccaguggcugg

SEQ ID NO: 1951411 - RNA, 15 nt, Human
uggccaguggcugga

SEQ ID NO: 1951412 - RNA, 16 nt, Human
uggccaguggcuggau

SEQ ID NO: 1951413 - RNA, 23 nt, Human
uggccaguggcuggaucugugag

SEQ ID NO: 1951414 - RNA, 21 nt, Human
uggccccugcccggcugcgga

SEQ ID NO: 1951415 - RNA, 18 nt, Human
uggcccgacagccuggca

SEQ ID NO: 1951416 - RNA, 19 nt, Human
uggcccgacagccuggcac

SEQ ID NO: 1951417 - RNA, 14 nt, Human
uggcccgacagccu

SEQ ID NO: 1951418 - RNA, 15 nt, Human
uggcccgacagccug

SEQ ID NO: 1951419 - RNA, 16 nt, Human
uggcccgacagccugg

SEQ ID NO: 1951420 - RNA, 17 nt, Human
uggcccgacagccuggc

SEQ ID NO: 1951421 - RNA, 15 nt, Human
uggccgggagccuga

SEQ ID NO: 1951422 - RNA, 16 nt, Human
uggccggacacccgac

SEQ ID NO: 1951423 - RNA, 23 nt, Human
aggccugggggcugggcagagga

SEQ ID NO: 1951424 - RNA, 12 nt, Human
uggccuggcccc

SEQ ID NO: 1951425 - RNA, 22 nt, Human
aggccuggccagaugcaccagc

SEQ ID NO: 1951426 - RNA, 23 nt, Human
aggccuggccagaugcaccagcc

SEQ ID NO: 1951427 - RNA, 15 nt, Human
aggccuggccagaug

SEQ ID NO: 1951428 - RNA, 16 nt, Human
aggccuggccagaugc

SEQ ID NO: 1951429 - RNA, 17 nt, Human
aggccuggccagaugca

SEQ ID NO: 1951430 - RNA, 21 nt, Human
aggccuggccagaugcaccag

SEQ ID NO: 1951431 - RNA, 18 nt, Human
uggccucugcacuccccu

SEQ ID NO: 1951432 - RNA, 17 nt, Human
uggccucugcacucccc

SEQ ID NO: 1951433 - RNA, 15 nt, Human
uggccucugcacucc

SEQ ID NO: 1951434 - RNA, 14 nt, Human
uggccucugcacuc

SEQ ID NO: 1951435 - RNA, 20 nt, Human
aggccugcuuugucuccucu

SEQ ID NO: 1951436 - RNA, 19 nt, Human
aggccugcuuugucuccuc

SEQ ID NO: 1951437 - RNA, 13 nt, Human
aggccugccuguu

SEQ ID NO: 1951438 - RNA, 15 nt, Human
uggcaugggaaugaa

SEQ ID NO: 1951439 - RNA, 12 nt, Human
uggcaugggaau

SEQ ID NO: 1951440 - RNA, 20 nt, Human
uggccaggcuggucucgaac

SEQ ID NO: 1951441 - RNA, 15 nt, Human
uggccaggcuggucu

SEQ ID NO: 1951442 - RNA, 17 nt, Human
uggccaggcuggucuca

SEQ ID NO: 1951443 - RNA, 14 nt, Human
aggcccucugccca

SEQ ID NO: 1951444 - RNA, 13 nt, Human
aggcccucugccc

SEQ ID NO: 1951445 - RNA, 15 nt, Human
aggcccucugcccac

SEQ ID NO: 1951446 - RNA, 12 nt, Human
aggcccaaagcc

SEQ ID NO: 1951447 - RNA, 13 nt, Human
aggcccaaagccu

SEQ ID NO: 1951448 - RNA, 15 nt, Human
aggcccaaagccucg

SEQ ID NO: 1951449 - RNA, 14 nt, Human
aggccucccugcca

SEQ ID NO: 1951450 - RNA, 15 nt, Human
aggccucccugccag

SEQ ID NO: 1951451 - RNA, 16 nt, Human
aggccucccugccagu

SEQ ID NO: 1951452 - RNA, 18 nt, Human
aggccucugccucacaac

SEQ ID NO: 1951453 - RNA, 21 nt, Human
aggccucucauuccagaggaa

SEQ ID NO: 1951454 - RNA, 22 nt, Human
aggccuccuguggccugccagu

SEQ ID NO: 1951455 - RNA, 23 nt, Human
aggccuccuguggccugccaguc

SEQ ID NO: 1951456 - RNA, 21 nt, Human
aggccuccuguggccugccag

SEQ ID NO: 1951457 - RNA, 17 nt, Human
aggccucccugccagua

SEQ ID NO: 1951458 - RNA, 15 nt, Human
ugcugucuggcacag

SEQ ID NO: 1951459 - RNA, 19 nt, Human
ugcugucuggcacagccug

SEQ ID NO: 1951460 - RNA, 18 nt, Human
ugcugucagucuugaccu

SEQ ID NO: 1951461 - RNA, 13 nt, Human
ugcugucauugcu

SEQ ID NO: 1951462 - RNA, 14 nt, Human
ugcugucauugcuu

SEQ ID NO: 1951463 - RNA, 20 nt, Human
ugcugucauugcuucuucug

SEQ ID NO: 1951464 - RNA, 21 nt, Human
ugcugucauugcuucuucuga

SEQ ID NO: 1951465 - RNA, 24 nt, Human
ugcugucauugcuucuucugaggc

SEQ ID NO: 1951466 - RNA, 13 nt, Human
ugcuggagcucug

SEQ ID NO: 1951467 - RNA, 14 nt, Human
ugcuggagcucugc

SEQ ID NO: 1951468 - RNA, 15 nt, Human
ugcugcccugugagu

SEQ ID NO: 1951469 - RNA, 20 nt, Human
aggaauuuuauuuuuuucug

SEQ ID NO: 1951470 - RNA, 14 nt, Human
ugcugcccugugag

SEQ ID NO: 1951471 - RNA, 13 nt, Human
ugcugcccuguga

SEQ ID NO: 1951472 - RNA, 12 nt, Human
ugcugcccugug

SEQ ID NO: 1951473 - RNA, 16 nt, Human
ugcuggcugguuagag

SEQ ID NO: 1951474 - RNA, 18 nt, Human
ugcuggcuguuggcuggg

SEQ ID NO: 1951475 - RNA, 15 nt, Human
ugcuggcugccuuag

SEQ ID NO: 1951476 - RNA, 14 nt, Human
ugcuggcugccuua

SEQ ID NO: 1951477 - RNA, 21 nt, Human
ugcuggcugccuuagaaccuu

SEQ ID NO: 1951478 - RNA, 14 nt, Human
aggacauggcuucu

SEQ ID NO: 1951479 - RNA, 15 nt, Human
aggacauggcuucug

SEQ ID NO: 1951480 - RNA, 21 nt, Human
aggacauggcuucugaaccug

SEQ ID NO: 1951481 - RNA, 20 nt, Human
aggacauccccccgccaaaa

SEQ ID NO: 1951482 - RNA, 22 nt, Human
aggacagggaggugaccccagg

SEQ ID NO: 1951483 - RNA, 16 nt, Human
aggacaggagaugcug

SEQ ID NO: 1951484 - RNA, 20 nt, Human
aggacaggaaaguggcaccu

SEQ ID NO: 1951485 - RNA, 22 nt, Human
aggacaggaaaguggcaccugu

SEQ ID NO: 1951486 - RNA, 11 nt, Human
ugcuucauaca

SEQ ID NO: 1951487 - RNA, 14 nt, Human
ugcuucauacaggg

SEQ ID NO: 1951488 - RNA, 15 nt, Human
ugcuucauacaggga

SEQ ID NO: 1951489 - RNA, 16 nt, Human
ugcuucauacagggau

SEQ ID NO: 1951490 - RNA, 14 nt, Human
ugcuucaucccuuu

SEQ ID NO: 1951491 - RNA, 12 nt, Human
aggacacucccg

SEQ ID NO: 1951492 - RNA, 23 nt, Human
aggacacuaaccacgcuggaccu

SEQ ID NO: 1951493 - RNA, 19 nt, Human
aggacacuaaccacgcugg

SEQ ID NO: 1951494 - RNA, 19 nt, Human
ugcuucaaggauccugagc

SEQ ID NO: 1951495 - RNA, 18 nt, Human
ugcuucaaggauccugag

SEQ ID NO: 1951496 - RNA, 16 nt, Human
ugcuucaaggauccug

SEQ ID NO: 1951497 - RNA, 19 nt, Human
ugcuuauguuguuuuguac

SEQ ID NO: 1951498 - RNA, 12 nt, Human
ugcuuauguugu

SEQ ID NO: 1951499 - RNA, 13 nt, Human
ugcuucagccucc

SEQ ID NO: 1951500 - RNA, 14 nt, Human
ugcuucagccuccc

SEQ ID NO: 1951501 - RNA, 12 nt, Human
ugcuucaaggau

SEQ ID NO: 1951502 - RNA, 17 nt, Human
ugcugugaagcuggaac

SEQ ID NO: 1951503 - RNA, 14 nt, Human
ugcugugaaaaaaa

SEQ ID NO: 1951504 - RNA, 22 nt, Human
ugcugugaaaaaaaaaaugcug

SEQ ID NO: 1951505 - RNA, 18 nt, Human
ugcugugaagcuggaacu

SEQ ID NO: 1951506 - RNA, 13 nt, Human
ugcugucuuucuu

SEQ ID NO: 1951507 - RNA, 21 nt, Human
ugcugucuuucuugcucccug

SEQ ID NO: 1951508 - RNA, 14 nt, Human
ugcugucuuuucuu

SEQ ID NO: 1951509 - RNA, 22 nt, Human
ugcugucuuuucuuugccaucu

SEQ ID NO: 1951510 - RNA, 23 nt, Human
ugcugucuuuucuuugccaucuc

SEQ ID NO: 1951511 - RNA, 12 nt, Human
ugcugugaaaaa

SEQ ID NO: 1951512 - RNA, 13 nt, Human
ugcugugaaaaaa

SEQ ID NO: 1951513 - RNA, 13 nt, Human
ugcuuauacacuu

SEQ ID NO: 1951514 - RNA, 17 nt, Human
ugcuuauauuguuuuca

SEQ ID NO: 1951515 - RNA, 21 nt, Human
ugcucugcugacagacacagg

SEQ ID NO: 1951516 - RNA, 22 nt, Human
ugcucugcugacagacacaggc

SEQ ID NO: 1951517 - RNA, 13 nt, Human
ugcucccugacug

SEQ ID NO: 1951518 - RNA, 14 nt, Human
ugcucccugacugg

SEQ ID NO: 1951519 - RNA, 21 nt, Human
ugcucccugacugggggcaga

SEQ ID NO: 1951520 - RNA, 21 nt, Human
ugcucccuccgggucuuccua

SEQ ID NO: 1951521 - RNA, 15 nt, Human
ugcucugcugaugac

SEQ ID NO: 1951522 - RNA, 15 nt, Human
ugcugacccaugggc

SEQ ID NO: 1951523 - RNA, 16 nt, Human
ugcugacccaugggca

SEQ ID NO: 1951524 - RNA, 18 nt, Human
ugcugacccaugggcagg

SEQ ID NO: 1951525 - RNA, 19 nt, Human
ugcugacccaugggcagga

SEQ ID NO: 1951526 - RNA, 21 nt, Human
ugcugacccaugggcaggaga

SEQ ID NO: 1951527 - RNA, 23 nt, Human
ugcugacccaugggcaggagacu

SEQ ID NO: 1951528 - RNA, 14 nt, Human
ugcugagucugaag

SEQ ID NO: 1951529 - RNA, 15 nt, Human
ugcugagucugaagg

SEQ ID NO: 1951530 - RNA, 12 nt, Human
ugcuccagcucu

SEQ ID NO: 1951531 - RNA, 13 nt, Human
ugcuccagcucug

SEQ ID NO: 1951532 - RNA, 17 nt, Human
ugcuccagcucuggcau

SEQ ID NO: 1951533 - RNA, 19 nt, Human
ugcuccagcucuggcaugg

SEQ ID NO: 1951534 - RNA, 19 nt, Human
ugcuccagcuguucagcug

SEQ ID NO: 1951535 - RNA, 16 nt, Human
ugcuccagcuguucag

SEQ ID NO: 1951536 - RNA, 22 nt, Human
ugcuauuguagagccagagguc

SEQ ID NO: 1951537 - RNA, 16 nt, Human
ugcuauugugaauagu

SEQ ID NO: 1951538 - RNA, 19 nt, Human
agcugggacuacaggcacc

SEQ ID NO: 1951539 - RNA, 16 nt, Human
agcugggacuacaggc

SEQ ID NO: 1951540 - RNA, 18 nt, Human
agcugggacuacaggcac

SEQ ID NO: 1951541 - RNA, 19 nt, Human
aggaagacuucaucccucu

SEQ ID NO: 1951542 - RNA, 13 nt, Human
aggaagacuucau

SEQ ID NO: 1951543 - RNA, 23 nt, Human
ugcugagucugaaggcuggguuc

SEQ ID NO: 1951544 - RNA, 22 nt, Human
ugcugagucugaaggcuggguu

SEQ ID NO: 1951545 - RNA, 21 nt, Human
ugcugagucugaaggcugggu

SEQ ID NO: 1951546 - RNA, 18 nt, Human
ugcugagucugaaggcug

SEQ ID NO: 1951547 - RNA, 17 nt, Human
ugcugagucugaaggcu

SEQ ID NO: 1951548 - RNA, 16 nt, Human
ugcugagucugaaggc

SEQ ID NO: 1951549 - RNA, 24 nt, Human
aggaagcacaugccucucucaggc

SEQ ID NO: 1951550 - RNA, 23 nt, Human
aggaagcacaugccucucucagg

SEQ ID NO: 1951551 - RNA, 14 nt, Human
aggaagacuuugga

SEQ ID NO: 1951552 - RNA, 13 nt, Human
aggaagacuuugg

SEQ ID NO: 1951553 - RNA, 15 nt, Human
aggaagccagcaggc

SEQ ID NO: 1951554 - RNA, 14 nt, Human
aggaagccagcagg

SEQ ID NO: 1951555 - RNA, 18 nt, Human
aggaagccagcaggcucu

SEQ ID NO: 1951556 - RNA, 17 nt, Human
aggaagccagcaggcuc

SEQ ID NO: 1951557 - RNA, 18 nt, Human
aggaaggaaacccagcuc

SEQ ID NO: 1951558 - RNA, 15 nt, Human
aggaaggagaggaga

SEQ ID NO: 1951559 - RNA, 19 nt, Human
aggaaggaaacccagcucu

SEQ ID NO: 1951560 - RNA, 23 nt, Human
aggaauuguguuuauaauuuuaa

SEQ ID NO: 1951561 - RNA, 23 nt, Human
aggaauugacccacaagaaauga

SEQ ID NO: 1951562 - RNA, 11 nt, Human
aggaauuuaaa

SEQ ID NO: 1951563 - RNA, 14 nt, Human
aggaggcaggaccu

SEQ ID NO: 1951564 - RNA, 11 nt, Human
aggaggccacc

SEQ ID NO: 1951565 - RNA, 13 nt, Human
aggaggccaccuc

SEQ ID NO: 1951566 - RNA, 21 nt, Human
aggaggcugggacgcucugcu

SEQ ID NO: 1951567 - RNA, 22 nt, Human
aggaggcugggacgcucugcug

SEQ ID NO: 1951568 - RNA, 19 nt, Human
aggagggacagucucacca

SEQ ID NO: 1951569 - RNA, 18 nt, Human
uggaaauuaagaagaaac

SEQ ID NO: 1951570 - RNA, 20 nt, Human
uggaaauuaagaagaaacua

SEQ ID NO: 1951571 - RNA, 23 nt, Human
uggaaaugggcagagcagagacc

SEQ ID NO: 1951572 - RNA, 20 nt, Human
uggaaauauuaagaaagacu

SEQ ID NO: 1951573 - RNA, 16 nt, Human
aggauccugagccaga

SEQ ID NO: 1951574 - RNA, 15 nt, Human
aggauccugagccag

SEQ ID NO: 1951575 - RNA, 21 nt, Human
aggauacaaaagcaugugaga

SEQ ID NO: 1951576 - RNA, 14 nt, Human
aggagggaggggga

SEQ ID NO: 1951577 - RNA, 21 nt, Human
aggagggagcaucagugcccu

SEQ ID NO: 1951578 - RNA, 22 nt, Human
aggaucucuugagccugggagg

SEQ ID NO: 1951579 - RNA, 21 nt, Human
aggaucucuugagccugggag

SEQ ID NO: 1951580 - RNA, 18 nt, Human
aggauccugagccagauu

SEQ ID NO: 1951581 - RNA, 17 nt, Human
aggauccugagccagau

SEQ ID NO: 1951582 - RNA, 17 nt, Human
aggaugaucuaggaaga

SEQ ID NO: 1951583 - RNA, 16 nt, Human
aggaugaucuaggaag

SEQ ID NO: 1951584 - RNA, 14 nt, Human
uggaccauuuuccu

SEQ ID NO: 1951585 - RNA, 22 nt, Human
uggaccaugcugucuggcacag

SEQ ID NO: 1951586 - RNA, 15 nt, Human
uggaccauuuuccug

SEQ ID NO: 1951587 - RNA, 15 nt, Human
uggacacagcucuuc

SEQ ID NO: 1951588 - RNA, 16 nt, Human
uggacacagcucuucu

SEQ ID NO: 1951589 - RNA, 18 nt, Human
uggacacagcucuucucc

SEQ ID NO: 1951590 - RNA, 13 nt, Human
uggacccugaggc

SEQ ID NO: 1951591 - RNA, 12 nt, Human
uggacccugagg

SEQ ID NO: 1951592 - RNA, 14 nt, Human
uggacccugaggcc

SEQ ID NO: 1951593 - RNA, 18 nt, Human
uggacccugaaaugugug

SEQ ID NO: 1951594 - RNA, 22 nt, Human
uggaauuggguggggggcuuca

SEQ ID NO: 1951595 - RNA, 17 nt, Human
aggcaacucaucuuagg

SEQ ID NO: 1951596 - RNA, 14 nt, Human
aggaugcccaaaga

SEQ ID NO: 1951597 - RNA, 20 nt, Human
aggaugaucuaggaagacuu

SEQ ID NO: 1951598 - RNA, 19 nt, Human
aggaugcccaaagaugcag

SEQ ID NO: 1951599 - RNA, 15 nt, Human
aggcaaaaaaggaug

SEQ ID NO: 1951600 - RNA, 15 nt, Human
aggcaaaaacaaaga

SEQ ID NO: 1951601 - RNA, 19 nt, Human
aggauuuugauccaagcug

SEQ ID NO: 1951602 - RNA, 17 nt, Human
aggaugccccguccccc

SEQ ID NO: 1951603 - RNA, 19 nt, Human
aggagcccugggaggcucu

SEQ ID NO: 1951604 - RNA, 15 nt, Human
aggagcccugccucu

SEQ ID NO: 1951605 - RNA, 17 nt, Human
aggagcccugccucucc

SEQ ID NO: 1951606 - RNA, 14 nt, Human
aggagccugcccag

SEQ ID NO: 1951607 - RNA, 14 nt, Human
aggagcgcucccuu

SEQ ID NO: 1951608 - RNA, 22 nt, Human
aggagcgcucccuugaccugcu

SEQ ID NO: 1951609 - RNA, 16 nt, Human
ugcuugggcuucaucc

SEQ ID NO: 1951610 - RNA, 12 nt, Human
ugcuugggcuuc

SEQ ID NO: 1951611 - RNA, 13 nt, Human
ugcuuggcccagg

SEQ ID NO: 1951612 - RNA, 14 nt, Human
ugcuuggcccaggg

SEQ ID NO: 1951613 - RNA, 15 nt, Human
ugcuuggcccagggg

SEQ ID NO: 1951614 - RNA, 21 nt, Human
ugcuuggaggaaggaaaccca

SEQ ID NO: 1951615 - RNA, 15 nt, Human
uggaaauauuaagaa

SEQ ID NO: 1951616 - RNA, 15 nt, Human
uggaaauacuagauu

SEQ ID NO: 1951617 - RNA, 19 nt, Human
ugcuugggcuucauccucc

SEQ ID NO: 1951618 - RNA, 17 nt, Human
ugcuuugggcugcccug

SEQ ID NO: 1951619 - RNA, 18 nt, Human
ugcuuugggcugcccugg

SEQ ID NO: 1951620 - RNA, 19 nt, Human
ugcuuugggcugcccuggu

SEQ ID NO: 1951621 - RNA, 20 nt, Human
ugcuuugggcugcccuggug

SEQ ID NO: 1951622 - RNA, 21 nt, Human
ugcuuugggcugcccuggugc

SEQ ID NO: 1951623 - RNA, 19 nt, Human
ugcuuuuaaggaaaggcaa

SEQ ID NO: 1951624 - RNA, 19 nt, Human
ugcuuuuaaaauuuuaagc

SEQ ID NO: 1951625 - RNA, 19 nt, Human
ugcuuuggucacuuuuaga

SEQ ID NO: 1951626 - RNA, 21 nt, Human
ugcuuuggucacuuuuagaug

SEQ ID NO: 1951627 - RNA, 12 nt, Human
ugcuuugucucc

SEQ ID NO: 1951628 - RNA, 13 nt, Human
ugcuuuuaaaacu

SEQ ID NO: 1951629 - RNA, 14 nt, Human
ugcuuuuaaaacua

SEQ ID NO: 1951630 - RNA, 17 nt, Human
ugcuuuuaaaacuacuu

SEQ ID NO: 1951631 - RNA, 13 nt, Human
ugcuuuuaaaauu

SEQ ID NO: 1951632 - RNA, 17 nt, Human
ugcuuuuaaaauuuuaa

SEQ ID NO: 1951633 - RNA, 14 nt, Human
aggagcagccacau

SEQ ID NO: 1951634 - RNA, 19 nt, Human
aggagcaguaucaugaagc

SEQ ID NO: 1951635 - RNA, 18 nt, Human
aggagcauauguccuaga

SEQ ID NO: 1951636 - RNA, 18 nt, Human
aggagcccugggaggcuc

SEQ ID NO: 1951637 - RNA, 11 nt, Human
aggagcccugc

SEQ ID NO: 1951638 - RNA, 13 nt, Human
aggagcccugccu

SEQ ID NO: 1951639 - RNA, 14 nt, Human
aggagcccugccuc

SEQ ID NO: 1951640 - RNA, 22 nt, Human
aggagccccgaggccuucucug

SEQ ID NO: 1951641 - RNA, 17 nt, Human
aggagauuggaaggaac

SEQ ID NO: 1951642 - RNA, 23 nt, Human
aggacuuuucuuuguggcuuccu

SEQ ID NO: 1951643 - RNA, 11 nt, Human
aggagaaacug

SEQ ID NO: 1951644 - RNA, 19 nt, Human
aggacugaauuaugaaacu

SEQ ID NO: 1951645 - RNA, 20 nt, Human
aggacugaauuaugaaacuu

SEQ ID NO: 1951646 - RNA, 19 nt, Human
aggacucugccuccucuuc

SEQ ID NO: 1951647 - RNA, 22 nt, Human
aggacauugauuugauuuuuau

SEQ ID NO: 1951648 - RNA, 19 nt, Human
aggacauugcggacagcca

SEQ ID NO: 1951649 - RNA, 23 nt, Human
aggacauugcggacagccacggc

SEQ ID NO: 1951650 - RNA, 15 nt, Human
aggacauugcggaca

SEQ ID NO: 1951651 - RNA, 17 nt, Human
aggacauugcggacagc

SEQ ID NO: 1951652 - RNA, 18 nt, Human
aggacauugcggacagcc

SEQ ID NO: 1951653 - RNA, 22 nt, Human
aggacuguuacucaaugugugc

SEQ ID NO: 1951654 - RNA, 18 nt, Human
aggacugacugaggcagu

SEQ ID NO: 1951655 - RNA, 22 nt, Human
aggacugacugaggcaguuuga

SEQ ID NO: 1951656 - RNA, 15 nt, Human
aggacugacugaggc

SEQ ID NO: 1951657 - RNA, 16 nt, Human
aggacugacugaggca

SEQ ID NO: 1951658 - RNA, 17 nt, Human
aggacugacugaggcag

SEQ ID NO: 1951659 - RNA, 17 nt, Human
agcuaucguaaaauuaa

SEQ ID NO: 1951660 - RNA, 15 nt, Human
agcuaguugaauacu

SEQ ID NO: 1951661 - RNA, 16 nt, Human
agcuaguugaauacuu

SEQ ID NO: 1951662 - RNA, 17 nt, Human
agcuaguugaauacuug

SEQ ID NO: 1951663 - RNA, 18 nt, Human
agcuaguugaauacuuga

SEQ ID NO: 1951664 - RNA, 16 nt, Human
agcuacaucuacuuaa

SEQ ID NO: 1951665 - RNA, 21 nt, Human
agcuaggccuggccagaugca

SEQ ID NO: 1951666 - RNA, 14 nt, Human
agcuagucaacagu

SEQ ID NO: 1951667 - RNA, 13 nt, Human
agcgugagccacu

SEQ ID NO: 1951668 - RNA, 19 nt, Human
agcgugaagccagggcccg

SEQ ID NO: 1951669 - RNA, 13 nt, Human
agcucagggccug

SEQ ID NO: 1951670 - RNA, 12 nt, Human
agcucagggccu

SEQ ID NO: 1951671 - RNA, 19 nt, Human
agcuauucaguaauaacuc

SEQ ID NO: 1951672 - RNA, 19 nt, Human
agcucagggccuggcucag

SEQ ID NO: 1951673 - RNA, 14 nt, Human
agcucagggccugg

SEQ ID NO: 1951674 - RNA, 20 nt, Human
agcucagggccuggcucagg

SEQ ID NO: 1951675 - RNA, 16 nt, Human
agcuccaagcucccag

SEQ ID NO: 1951676 - RNA, 18 nt, Human
agcuccaagaauuucuag

SEQ ID NO: 1951677 - RNA, 15 nt, Human
agcuccaagcuccca

SEQ ID NO: 1951678 - RNA, 15 nt, Human
agcuccaagaauuuc

SEQ ID NO: 1951679 - RNA, 17 nt, Human
agcucaggugucccugc

SEQ ID NO: 1951680 - RNA, 17 nt, Human
ugcccagccccuucuga

SEQ ID NO: 1951681 - RNA, 16 nt, Human
ugcccagccccuucug

SEQ ID NO: 1951682 - RNA, 12 nt, Human
ugcccagccccu

SEQ ID NO: 1951683 - RNA, 13 nt, Human
ugcccagccccuu

SEQ ID NO: 1951684 - RNA, 15 nt, Human
ugccauuuuucaaaa

SEQ ID NO: 1951685 - RNA, 20 nt, Human
ugcccaaagaugcagccggu

SEQ ID NO: 1951686 - RNA, 17 nt, Human
ugcccaaagaugcagcc

SEQ ID NO: 1951687 - RNA, 23 nt, Human
ugcccagcuuuucauugcuguga

SEQ ID NO: 1951688 - RNA, 19 nt, Human
ugcccagcuuuucauugcu

SEQ ID NO: 1951689 - RNA, 20 nt, Human
ugcccagcuuuucauugcug

SEQ ID NO: 1951690 - RNA, 15 nt, Human
ugcccaggccccugc

SEQ ID NO: 1951691 - RNA, 17 nt, Human
ugcccaggccccugcca

SEQ ID NO: 1951692 - RNA, 18 nt, Human
ugcccaggccccugccac

SEQ ID NO: 1951693 - RNA, 23 nt, Human
ugccccccaugaggaaggaacag

SEQ ID NO: 1951694 - RNA, 22 nt, Human
ugcccccaauaguagucucugu

SEQ ID NO: 1951695 - RNA, 23 nt, Human
ugccccgaacauguuuuucuucu

SEQ ID NO: 1951696 - RNA, 20 nt, Human
ugcccuaaaguguauuuuuu

SEQ ID NO: 1951697 - RNA, 14 nt, Human
ugcccccucugccc

SEQ ID NO: 1951698 - RNA, 15 nt, Human
ugcccccucugcccu

SEQ ID NO: 1951699 - RNA, 16 nt, Human
ugcccccucugcccug

SEQ ID NO: 1951700 - RNA, 17 nt, Human
ugcccccucugcccugc

SEQ ID NO: 1951701 - RNA, 18 nt, Human
ugcccccucugcccugcg

SEQ ID NO: 1951702 - RNA, 22 nt, Human
ugccagcucuuccuagcuggag

SEQ ID NO: 1951703 - RNA, 23 nt, Human
ugccagcucuuccuagcuggaga

SEQ ID NO: 1951704 - RNA, 15 nt, Human
ugccagcugcugagc

SEQ ID NO: 1951705 - RNA, 16 nt, Human
ugccagcugcugagcc

SEQ ID NO: 1951706 - RNA, 17 nt, Human
ugccagcugcugagccg

SEQ ID NO: 1951707 - RNA, 15 nt, Human
ugccagcucuuccua

SEQ ID NO: 1951708 - RNA, 18 nt, Human
ugccagcucuuccuagcu

SEQ ID NO: 1951709 - RNA, 20 nt, Human
ugccagcucuuccuagcugg

SEQ ID NO: 1951710 - RNA, 17 nt, Human
ugccagccacugugaua

SEQ ID NO: 1951711 - RNA, 21 nt, Human
ugccagauguccuaaugguga

SEQ ID NO: 1951712 - RNA, 20 nt, Human
ugcauuugaggucuguucuu

SEQ ID NO: 1951713 - RNA, 21 nt, Human
ugcauuugaggucuguucuuu

SEQ ID NO: 1951714 - RNA, 13 nt, Human
ugccacugccucu

SEQ ID NO: 1951715 - RNA, 17 nt, Human
ugccacugccucuuccu

SEQ ID NO: 1951716 - RNA, 21 nt, Human
ugcauuuagggaguauucuaa

SEQ ID NO: 1951717 - RNA, 12 nt, Human
ugcauuucagaa

SEQ ID NO: 1951718 - RNA, 17 nt, Human
ugcauuucagaaagccu

SEQ ID NO: 1951719 - RNA, 20 nt, Human
ugccacugccucuuccuccc

SEQ ID NO: 1951720 - RNA, 18 nt, Human
ugccacugccucuuccuc

SEQ ID NO: 1951721 - RNA, 19 nt, Human
ugccacugccucuuccucc

SEQ ID NO: 1951722 - RNA, 18 nt, Human
ugccagcuuaucucaggg

SEQ ID NO: 1951723 - RNA, 14 nt, Human
ugccaggaaccugu

SEQ ID NO: 1951724 - RNA, 19 nt, Human
ugccagcugcugagccgca

SEQ ID NO: 1951725 - RNA, 20 nt, Human
ugccagcugcugagccgcag

SEQ ID NO: 1951726 - RNA, 20 nt, Human
ugccagucccccugccccag

SEQ ID NO: 1951727 - RNA, 21 nt, Human
ugccaggaaccuguccuaagg

SEQ ID NO: 1951728 - RNA, 22 nt, Human
ugccaggaaccuguccuaagga

SEQ ID NO: 1951729 - RNA, 13 nt, Human
agcggcuggcagc

SEQ ID NO: 1951730 - RNA, 22 nt, Human
agcggggacagcuccuucuguc

SEQ ID NO: 1951731 - RNA, 17 nt, Human
agcguagugcagcaggg

SEQ ID NO: 1951732 - RNA, 20 nt, Human
agcguagugcagcagggcag

SEQ ID NO: 1951733 - RNA, 16 nt, Human
agcguauggcuuuauu

SEQ ID NO: 1951734 - RNA, 21 nt, Human
agcggcuggacuuggagguag

SEQ ID NO: 1951735 - RNA, 20 nt, Human
agcgggaauggcagcugcca

SEQ ID NO: 1951736 - RNA, 23 nt, Human
agcggcuggcagcccaccccuca

SEQ ID NO: 1951737 - RNA, 19 nt, Human
agcggggacagcuccuucu

SEQ ID NO: 1951738 - RNA, 20 nt, Human
agcggggacagcuccuucug

SEQ ID NO: 1951739 - RNA, 22 nt, Human
agccuugaccauucuccaccug

SEQ ID NO: 1951740 - RNA, 16 nt, Human
agccuugaacuuugac

SEQ ID NO: 1951741 - RNA, 22 nt, Human
agccuugaacuuugaccucugc

SEQ ID NO: 1951742 - RNA, 21 nt, Human
agccuugauucccuuguuauu

SEQ ID NO: 1951743 - RNA, 23 nt, Human
agccuugaccauucuccaccugc

SEQ ID NO: 1951744 - RNA, 22 nt, Human
agcgauucuucugcuucagccu

SEQ ID NO: 1951745 - RNA, 15 nt, Human
agccuugaacuuuga

SEQ ID NO: 1951746 - RNA, 18 nt, Human
agccuuccagggguggga

SEQ ID NO: 1951747 - RNA, 18 nt, Human
ugcagcucuuccuggaca

SEQ ID NO: 1951748 - RNA, 15 nt, Human
ugcagcugaaauuga

SEQ ID NO: 1951749 - RNA, 18 nt, Human
ugcagcugaaauugaaaa

SEQ ID NO: 1951750 - RNA, 19 nt, Human
ugcagcugaaauugaaaag

SEQ ID NO: 1951751 - RNA, 21 nt, Human
ugcagcugaaauugaaaaguu

SEQ ID NO: 1951752 - RNA, 22 nt, Human
ugcagcugaaauugaaaaguua

SEQ ID NO: 1951753 - RNA, 18 nt, Human
ugcagcucagaaccacag

SEQ ID NO: 1951754 - RNA, 19 nt, Human
ugcagcucagaaccacagc

SEQ ID NO: 1951755 - RNA, 20 nt, Human
ugcagcucagaaccacagca

SEQ ID NO: 1951756 - RNA, 14 nt, Human
ugcagcucuuccug

SEQ ID NO: 1951757 - RNA, 15 nt, Human
ugcagcucuuccugg

SEQ ID NO: 1951758 - RNA, 16 nt, Human
ugcagcucuuccugga

SEQ ID NO: 1951759 - RNA, 15 nt, Human
agcgcacagcugcuc

SEQ ID NO: 1951760 - RNA, 21 nt, Human
agcgcagccgccuucacagca

SEQ ID NO: 1951761 - RNA, 13 nt, Human
agcgcacagcugc

SEQ ID NO: 1951762 - RNA, 14 nt, Human
agcgcacagcugcu

SEQ ID NO: 1951763 - RNA, 19 nt, Human
agcggacaucagcugguca

SEQ ID NO: 1951764 - RNA, 19 nt, Human
ugcauuugaggucuguucu

SEQ ID NO: 1951765 - RNA, 18 nt, Human
ugcauuugaggucuguuc

SEQ ID NO: 1951766 - RNA, 19 nt, Human
ugcauuuagggaguauucu

SEQ ID NO: 1951767 - RNA, 20 nt, Human
ugcauuuaaaagauacaguu

SEQ ID NO: 1951768 - RNA, 23 nt, Human
ugccucucugcaggucccuaaua

SEQ ID NO: 1951769 - RNA, 15 nt, Human
ugccucucugcaggu

SEQ ID NO: 1951770 - RNA, 14 nt, Human
ugccucugacacac

SEQ ID NO: 1951771 - RNA, 16 nt, Human
ugccucugacacacag

SEQ ID NO: 1951772 - RNA, 21 nt, Human
ugccucucugcaggucccuaa

SEQ ID NO: 1951773 - RNA, 11 nt, Human
ugccucugccu

SEQ ID NO: 1951774 - RNA, 17 nt, Human
ugccucugauguauuuu

SEQ ID NO: 1951775 - RNA, 19 nt, Human
ugccucugauguauuuugu

SEQ ID NO: 1951776 - RNA, 12 nt, Human
ugccucugccuc

SEQ ID NO: 1951777 - RNA, 17 nt, Human
ugccugcccaggccccu

SEQ ID NO: 1951778 - RNA, 18 nt, Human
ugccugcccaggccccug

SEQ ID NO: 1951779 - RNA, 19 nt, Human
ugccugcccaggccccugc

SEQ ID NO: 1951780 - RNA, 22 nt, Human
ugccucugauguauuuugugag

SEQ ID NO: 1951781 - RNA, 11 nt, Human
ugccugccuua

SEQ ID NO: 1951782 - RNA, 19 nt, Human
ugccugccuuaagugagga

SEQ ID NO: 1951783 - RNA, 11 nt, Human
ugccugcucuu

SEQ ID NO: 1951784 - RNA, 12 nt, Human
ugccugcucuuu

SEQ ID NO: 1951785 - RNA, 23 nt, Human
ugccugcucuuuggccugaugac

SEQ ID NO: 1951786 - RNA, 14 nt, Human
agcugccugugccu

SEQ ID NO: 1951787 - RNA, 17 nt, Human
agcugcuuuuuuugaaa

SEQ ID NO: 1951788 - RNA, 22 nt, Human
agcugcuuuuuuugaaacuuug

SEQ ID NO: 1951789 - RNA, 23 nt, Human
agcugcuuuuuuugaaacuuuga

SEQ ID NO: 1951790 - RNA, 22 nt, Human
agcuggagaggagcccugccuc

SEQ ID NO: 1951791 - RNA, 23 nt, Human
agcuggagaggagcccugccucu

SEQ ID NO: 1951792 - RNA, 21 nt, Human
agcuggagaggagcccugccu

SEQ ID NO: 1951793 - RNA, 23 nt, Human
agcugcuuuugucuaugggacuc

SEQ ID NO: 1951794 - RNA, 24 nt, Human
agcugcuuuugucuaugggacuca

SEQ ID NO: 1951795 - RNA, 13 nt, Human
agcugccuguuca

SEQ ID NO: 1951796 - RNA, 22 nt, Human
agcugcuuuugucuaugggacu

SEQ ID NO: 1951797 - RNA, 12 nt, Human
ugccugcuucag

SEQ ID NO: 1951798 - RNA, 21 nt, Human
ugccugcuucagccucccaca

SEQ ID NO: 1951799 - RNA, 22 nt, Human
ugcccuuaccugccaggaagcc

SEQ ID NO: 1951800 - RNA, 18 nt, Human
ugcccugugggcccccaa

SEQ ID NO: 1951801 - RNA, 15 nt, Human
ugcccugugggcccc

SEQ ID NO: 1951802 - RNA, 15 nt, Human
agcucuucuccaggc

SEQ ID NO: 1951803 - RNA, 20 nt, Human
agcucuuccuggacaggcca

SEQ ID NO: 1951804 - RNA, 22 nt, Human
agcucuuccuggacaggccagg

SEQ ID NO: 1951805 - RNA, 14 nt, Human
agcucuuccuagcu

SEQ ID NO: 1951806 - RNA, 12 nt, Human
agcucuuccugg

SEQ ID NO: 1951807 - RNA, 16 nt, Human
agcucuucuccaggcu

SEQ ID NO: 1951808 - RNA, 17 nt, Human
agcucuucuccaggcug

SEQ ID NO: 1951809 - RNA, 23 nt, Human
ugcccugugaguacuacaguccu

SEQ ID NO: 1951810 - RNA, 15 nt, Human
ugccucaccccuugc

SEQ ID NO: 1951811 - RNA, 22 nt, Human
ugccgccgcuagguagagucug

SEQ ID NO: 1951812 - RNA, 16 nt, Human
ugccgcaucucacagc

SEQ ID NO: 1951813 - RNA, 18 nt, Human
ugccgccgcuagguagag

SEQ ID NO: 1951814 - RNA, 20 nt, Human
ugccgcagcccugcagaggg

SEQ ID NO: 1951815 - RNA, 19 nt, Human
ugcccuuaccugccaggaa

SEQ ID NO: 1951816 - RNA, 17 nt, Human
ugccucucucaggccaa

SEQ ID NO: 1951817 - RNA, 12 nt, Human
ugccucucugca

SEQ ID NO: 1951818 - RNA, 11 nt, Human
ugccucucugc

SEQ ID NO: 1951819 - RNA, 15 nt, Human
ugccucagccucccg

SEQ ID NO: 1951820 - RNA, 15 nt, Human
ugccucagccuccug

SEQ ID NO: 1951821 - RNA, 18 nt, Human
ugccucaggaggcaggac

SEQ ID NO: 1951822 - RNA, 15 nt, Human
ugccucagcuucccc

SEQ ID NO: 1951823 - RNA, 17 nt, Human
ugccucagcuuccccag

SEQ ID NO: 1951824 - RNA, 18 nt, Human
ugccucagcuuccccagu

SEQ ID NO: 1951825 - RNA, 21 nt, Human
ugccucaggaggcaggaccuu

SEQ ID NO: 1951826 - RNA, 22 nt, Human
ugccucccaucacccgcuaaga

SEQ ID NO: 1951827 - RNA, 19 nt, Human
agcuccaagcucccaggca

SEQ ID NO: 1951828 - RNA, 18 nt, Human
agcuccaagcucccaggc

SEQ ID NO: 1951829 - RNA, 17 nt, Human
agcuccaagcucccagg

SEQ ID NO: 1951830 - RNA, 13 nt, Human
agcuccagcucac

SEQ ID NO: 1951831 - RNA, 17 nt, Human
agcuccagcucaccagc

SEQ ID NO: 1951832 - RNA, 21 nt, Human
agcuccaccccgcaagcacca

SEQ ID NO: 1951833 - RNA, 23 nt, Human
ugcccuaaugcgcaggcuggccc

SEQ ID NO: 1951834 - RNA, 20 nt, Human
ugcccuaaugcgcaggcugg

SEQ ID NO: 1951835 - RNA, 23 nt, Human
agcucugcccauccugccccuga

SEQ ID NO: 1951836 - RNA, 21 nt, Human
agcucugcagagcaggaaaca

SEQ ID NO: 1951837 - RNA, 23 nt, Human
agcucugaguuccggcaccagua

SEQ ID NO: 1951838 - RNA, 21 nt, Human
agcuccagcucaccagcccca

SEQ ID NO: 1951839 - RNA, 18 nt, Human
agcuccagcucaccagcc

SEQ ID NO: 1951840 - RNA, 19 nt, Human
agcuccagcucaccagccc

SEQ ID NO: 1951841 - RNA, 21 nt, Human
agcuccaucuccacuccagau

SEQ ID NO: 1951842 - RNA, 17 nt, Human
agcucccacuucugcca

SEQ ID NO: 1951843 - RNA, 18 nt, Human
agcucccacuucugccag

SEQ ID NO: 1951844 - RNA, 19 nt, Human
agcucccacuucugccaga

SEQ ID NO: 1951845 - RNA, 22 nt, Human
agcuccuucuguccuacucugu

SEQ ID NO: 1951846 - RNA, 23 nt, Human
agcuccuucuguccuacucugug

SEQ ID NO: 1951847 - RNA, 20 nt, Human
agcuccccccaccuccccca

SEQ ID NO: 1951848 - RNA, 14 nt, Human
agcucccccagcuc

SEQ ID NO: 1951849 - RNA, 15 nt, Human
agcucccccagcucc

SEQ ID NO: 1951850 - RNA, 16 nt, Human
agcucccccagcuccc

SEQ ID NO: 1951851 - RNA, 14 nt, Human
agcuccccccaccu

SEQ ID NO: 1951852 - RNA, 15 nt, Human
agcuccccccaccuc

SEQ ID NO: 1951853 - RNA, 21 nt, Human
ugcacacaccagagcccaccu

SEQ ID NO: 1951854 - RNA, 17 nt, Human
ugcacacaccagagccc

SEQ ID NO: 1951855 - RNA, 18 nt, Human
ugcacacaccagagccca

SEQ ID NO: 1951856 - RNA, 14 nt, Human
agcccugguggcag

SEQ ID NO: 1951857 - RNA, 15 nt, Human
agcccugguggcagu

SEQ ID NO: 1951858 - RNA, 16 nt, Human
agcccugguggcagug

SEQ ID NO: 1951859 - RNA, 19 nt, Human
agcccugcuuugggcugcc

SEQ ID NO: 1951860 - RNA, 20 nt, Human
agcccugcuuugggcugccc

SEQ ID NO: 1951861 - RNA, 17 nt, Human
agcccugcuuugggcug

SEQ ID NO: 1951862 - RNA, 12 nt, Human
agcccugcuccc

SEQ ID NO: 1951863 - RNA, 13 nt, Human
agcccugcucccu

SEQ ID NO: 1951864 - RNA, 14 nt, Human
agcccugcucccuc

SEQ ID NO: 1951865 - RNA, 11 nt, Human
agcccugcucc

SEQ ID NO: 1951866 - RNA, 21 nt, Human
agcccgauccuccccuggacu

SEQ ID NO: 1951867 - RNA, 14 nt, Human
agcccgcaucagcu

SEQ ID NO: 1951868 - RNA, 15 nt, Human
agcccgcaucagcug

SEQ ID NO: 1951869 - RNA, 14 nt, Human
agcccccucuuccc

SEQ ID NO: 1951870 - RNA, 15 nt, Human
agcccccucuucccu

SEQ ID NO: 1951871 - RNA, 23 nt, Human
agccccauucugccugcccaggc

SEQ ID NO: 1951872 - RNA, 21 nt, Human
agcccauuuggagggccuggg

SEQ ID NO: 1951873 - RNA, 22 nt, Human
agcccauuugggcagagaggcu

SEQ ID NO: 1951874 - RNA, 23 nt, Human
agcccauuugggcagagaggcug

SEQ ID NO: 1951875 - RNA, 22 nt, Human
agcccccagcuuccagcaggag

SEQ ID NO: 1951876 - RNA, 21 nt, Human
agcccaggccuccuacagcuu

SEQ ID NO: 1951877 - RNA, 22 nt, Human
agcccaggagucccacuccaag

SEQ ID NO: 1951878 - RNA, 20 nt, Human
agcccaggagucccacucca

SEQ ID NO: 1951879 - RNA, 18 nt, Human
agcccaggauauauuuua

SEQ ID NO: 1951880 - RNA, 21 nt, Human
agcccauguggagucagccuc

SEQ ID NO: 1951881 - RNA, 17 nt, Human
agccccaaaacucuccu

SEQ ID NO: 1951882 - RNA, 16 nt, Human
agccccaaaacucucc

SEQ ID NO: 1951883 - RNA, 17 nt, Human
agcccauuuggagggcc

SEQ ID NO: 1951884 - RNA, 19 nt, Human
agcccauuuggagggccug

SEQ ID NO: 1951885 - RNA, 20 nt, Human
agcccauuuggagggccugg

SEQ ID NO: 1951886 - RNA, 20 nt, Human
agccccauucugccugccca

SEQ ID NO: 1951887 - RNA, 18 nt, Human
agccccaaaacucuccuc

SEQ ID NO: 1951888 - RNA, 21 nt, Human
agccccauucugccugcccag

SEQ ID NO: 1951889 - RNA, 22 nt, Human
agccccauucugccugcccagg

SEQ ID NO: 1951890 - RNA, 16 nt, Human
agcccaggagcccauu

SEQ ID NO: 1951891 - RNA, 12 nt, Human
agcccaggagcc

SEQ ID NO: 1951892 - RNA, 14 nt, Human
agcccaggagccca

SEQ ID NO: 1951893 - RNA, 15 nt, Human
agcccaggagcccau

SEQ ID NO: 1951894 - RNA, 12 nt, Human
agcccaggaggg

SEQ ID NO: 1951895 - RNA, 19 nt, Human
agcccaggagggagcagag

SEQ ID NO: 1951896 - RNA, 20 nt, Human
agcccaggagggagcagagg

SEQ ID NO: 1951897 - RNA, 21 nt, Human
ugcaaaccaucauugaaaucu

SEQ ID NO: 1951898 - RNA, 15 nt, Human
ugauuugucacugcu

SEQ ID NO: 1951899 - RNA, 13 nt, Human
ugauuuuaaaaug

SEQ ID NO: 1951900 - RNA, 14 nt, Human
ugauuuuaaaaugu

SEQ ID NO: 1951901 - RNA, 17 nt, Human
ugauuuuaaaauguaca

SEQ ID NO: 1951902 - RNA, 20 nt, Human
ugauuuuaaaauguacaugu

SEQ ID NO: 1951903 - RNA, 22 nt, Human
ugauuuuaaaauguacauguau

SEQ ID NO: 1951904 - RNA, 19 nt, Human
ugcaaacugggcuggaaga

SEQ ID NO: 1951905 - RNA, 15 nt, Human
ugcaaguauucucau

SEQ ID NO: 1951906 - RNA, 14 nt, Human
ugcaaguauucuca

SEQ ID NO: 1951907 - RNA, 18 nt, Human
agccucacaguccuuacc

SEQ ID NO: 1951908 - RNA, 20 nt, Human
agccucacccggugaccucu

SEQ ID NO: 1951909 - RNA, 21 nt, Human
agccucacgcuccuuucugau

SEQ ID NO: 1951910 - RNA, 23 nt, Human
agccucacgcuccuuucugaucu

SEQ ID NO: 1951911 - RNA, 17 nt, Human
agccucacaguccuuac

SEQ ID NO: 1951912 - RNA, 20 nt, Human
agccucaaccuccugggcua

SEQ ID NO: 1951913 - RNA, 19 nt, Human
agccucaaccuccugggcu

SEQ ID NO: 1951914 - RNA, 18 nt, Human
agccgagaucacgccacu

SEQ ID NO: 1951915 - RNA, 22 nt, Human
agccucagucucccucccuugg

SEQ ID NO: 1951916 - RNA, 13 nt, Human
agccucagucucc

SEQ ID NO: 1951917 - RNA, 16 nt, Human
agccucagucucccuc

SEQ ID NO: 1951918 - RNA, 19 nt, Human
agccucagucucccucccu

SEQ ID NO: 1951919 - RNA, 20 nt, Human
agccucagucucccucccuu

SEQ ID NO: 1951920 - RNA, 13 nt, Human
agccucugggccc

SEQ ID NO: 1951921 - RNA, 20 nt, Human
ugcagccucaaccuccuggg

SEQ ID NO: 1951922 - RNA, 21 nt, Human
ugcagccucaaccuccugggc

SEQ ID NO: 1951923 - RNA, 22 nt, Human
ugcagccucaaccuccugggcu

SEQ ID NO: 1951924 - RNA, 23 nt, Human
ugcagccucaaccuccugggcua

SEQ ID NO: 1951925 - RNA, 15 nt, Human
ugcagcucagaacca

SEQ ID NO: 1951926 - RNA, 23 nt, Human
agccucugaaaaccaauguucuc

SEQ ID NO: 1951927 - RNA, 17 nt, Human
agccuccaugcugccuc

SEQ ID NO: 1951928 - RNA, 23 nt, Human
agccuccacuuuggaucaggaaa

SEQ ID NO: 1951929 - RNA, 21 nt, Human
agccuccaagcuccaucucca

SEQ ID NO: 1951930 - RNA, 14 nt, Human
agccuccaauuuuu

SEQ ID NO: 1951931 - RNA, 18 nt, Human
ugcagacucuacagaggc

SEQ ID NO: 1951932 - RNA, 16 nt, Human
ugcagacucuacagag

SEQ ID NO: 1951933 - RNA, 17 nt, Human
ugcagacucuacagagg

SEQ ID NO: 1951934 - RNA, 16 nt, Human
agcccuuagcagggaa

SEQ ID NO: 1951935 - RNA, 22 nt, Human
agcccuugcccaugcugggcuc

SEQ ID NO: 1951936 - RNA, 21 nt, Human
agcccuuagcagggaaacagc

SEQ ID NO: 1951937 - RNA, 20 nt, Human
agccgagauagccaaggcca

SEQ ID NO: 1951938 - RNA, 21 nt, Human
agccgagauagccaaggccaa

SEQ ID NO: 1951939 - RNA, 17 nt, Human
agccgagaucacgccac

SEQ ID NO: 1951940 - RNA, 11 nt, Human
ugcacacauuu

SEQ ID NO: 1951941 - RNA, 12 nt, Human
ugcacacauuuu

SEQ ID NO: 1951942 - RNA, 13 nt, Human
ugcacacauuuuu

SEQ ID NO: 1951943 - RNA, 15 nt, Human
ugcacacauuuuuua

SEQ ID NO: 1951944 - RNA, 17 nt, Human
ugcacuccccugcuggg

SEQ ID NO: 1951945 - RNA, 16 nt, Human
ugcacuccccugcugg

SEQ ID NO: 1951946 - RNA, 19 nt, Human
ugcacuccccugcugggug

SEQ ID NO: 1951947 - RNA, 14 nt, Human
ugcagaacucccaa

SEQ ID NO: 1951948 - RNA, 15 nt, Human
ugcagaacucccaag

SEQ ID NO: 1951949 - RNA, 14 nt, Human
ugcagaagacagua

SEQ ID NO: 1951950 - RNA, 15 nt, Human
ugcagaagacaguau

SEQ ID NO: 1951951 - RNA, 22 nt, Human
ugcagacaggcaagcaccuccu

SEQ ID NO: 1951952 - RNA, 14 nt, Human
ugcagacccucaga

SEQ ID NO: 1951953 - RNA, 22 nt, Human
ugcagacagggggccagaacac

SEQ ID NO: 1951954 - RNA, 21 nt, Human
ugcagacagggggccagaaca

SEQ ID NO: 1951955 - RNA, 21 nt, Human
ugcagaacuugaagccugcuc

SEQ ID NO: 1951956 - RNA, 22 nt, Human
ugcagaacuugaagccugcucc

SEQ ID NO: 1951957 - RNA, 23 nt, Human
ugcagaacuugaagccugcuccu

SEQ ID NO: 1951958 - RNA, 14 nt, Human
agccaugagaaugu

SEQ ID NO: 1951959 - RNA, 16 nt, Human
agcccacuguacuugc

SEQ ID NO: 1951960 - RNA, 14 nt, Human
agcccacuguacuu

SEQ ID NO: 1951961 - RNA, 17 nt, Human
agcccagagucccccca

SEQ ID NO: 1951962 - RNA, 20 nt, Human
agcccagaguccccccacuc

SEQ ID NO: 1951963 - RNA, 13 nt, Human
agcccacuucugc

SEQ ID NO: 1951964 - RNA, 14 nt, Human
agcccacuucugcc

SEQ ID NO: 1951965 - RNA, 15 nt, Human
agcccacuucugcca

SEQ ID NO: 1951966 - RNA, 21 nt, Human
agccagggaaagacuggcaag

SEQ ID NO: 1951967 - RNA, 16 nt, Human
agccagggaaagacug

SEQ ID NO: 1951968 - RNA, 22 nt, Human
agccagcgggaauggcagcugc

SEQ ID NO: 1951969 - RNA, 19 nt, Human
agccagggcccgggaagca

SEQ ID NO: 1951970 - RNA, 21 nt, Human
agccagggcccgggaagcaaa

SEQ ID NO: 1951971 - RNA, 13 nt, Human
agccaguaaaugg

SEQ ID NO: 1951972 - RNA, 18 nt, Human
agccagguuccacagagg

SEQ ID NO: 1951973 - RNA, 22 nt, Human
agccaguaaaugggggugcauu

SEQ ID NO: 1951974 - RNA, 21 nt, Human
agccaguaaaugggggugcau

SEQ ID NO: 1951975 - RNA, 19 nt, Human
ugauucccuuguuauucaa

SEQ ID NO: 1951976 - RNA, 20 nt, Human
ugauucccuuguuauucaac

SEQ ID NO: 1951977 - RNA, 18 nt, Human
ugauucccuuguuauuca

SEQ ID NO: 1951978 - RNA, 22 nt, Human
ugauucccaagcucugcuccuc

SEQ ID NO: 1951979 - RNA, 23 nt, Human
ugauucccaagcucugcuccucu

SEQ ID NO: 1951980 - RNA, 13 nt, Human
ugauucucaugcc

SEQ ID NO: 1951981 - RNA, 14 nt, Human
ugauucucaugccu

SEQ ID NO: 1951982 - RNA, 15 nt, Human
ugauucucaugccuc

SEQ ID NO: 1951983 - RNA, 13 nt, Human
ugauucuccugcc

SEQ ID NO: 1951984 - RNA, 16 nt, Human
ugauucucaugccuca

SEQ ID NO: 1951985 - RNA, 16 nt, Human
ugauucauaaugacuu

SEQ ID NO: 1951986 - RNA, 18 nt, Human
agcccaggaaaggcucca

SEQ ID NO: 1951987 - RNA, 21 nt, Human
agcccagcuuggcccuuuccu

SEQ ID NO: 1951988 - RNA, 23 nt, Human
agcccagcuuggcccuuuccuuc

SEQ ID NO: 1951989 - RNA, 21 nt, Human
agcccagcuuuuccugggaca

SEQ ID NO: 1951990 - RNA, 21 nt, Human
ugauucauaaugacuuaagca

SEQ ID NO: 1951991 - RNA, 14 nt, Human
agcccaggaaaggc

SEQ ID NO: 1951992 - RNA, 23 nt, Human
agcccagcuugaaaccuucacuu

SEQ ID NO: 1951993 - RNA, 23 nt, Human
ugauuucuaguuauuuauucugg

SEQ ID NO: 1951994 - RNA, 23 nt, Human
ugauuuguacagauucuuuauua

SEQ ID NO: 1951995 - RNA, 18 nt, Human
ugauuuggggauucagau

SEQ ID NO: 1951996 - RNA, 21 nt, Human
ugauuuggggauucagauuuc

SEQ ID NO: 1951997 - RNA, 22 nt, Human
ugauuuggggauucagauuucu

SEQ ID NO: 1951998 - RNA, 17 nt, Human
ugauuuggggauauuuu

SEQ ID NO: 1951999 - RNA, 23 nt, Human
ugauuucuuuucaccauucguac

SEQ ID NO: 1952000 - RNA, 17 nt, Human
ugauuucagcucacugc

SEQ ID NO: 1952001 - RNA, 22 nt, Human
ugauuuccguuaaaauaccagc

SEQ ID NO: 1952002 - RNA, 18 nt, Human
ugauuuccguuaaaauac

SEQ ID NO: 1952003 - RNA, 14 nt, Human
ugaugggauuuggu

SEQ ID NO: 1952004 - RNA, 19 nt, Human
ugaugggaugauugaagaa

SEQ ID NO: 1952005 - RNA, 20 nt, Human
ugaugggaugauugaagaaa

SEQ ID NO: 1952006 - RNA, 21 nt, Human
ugaugggaugauugaagaaac

SEQ ID NO: 1952007 - RNA, 19 nt, Human
ugauggggcccugccuccu

SEQ ID NO: 1952008 - RNA, 16 nt, Human
ugauggggcccugccu

SEQ ID NO: 1952009 - RNA, 15 nt, Human
ugauggggcccugcc

SEQ ID NO: 1952010 - RNA, 14 nt, Human
ugauggggcccugc

SEQ ID NO: 1952011 - RNA, 23 nt, Human
ugaugcuucuucagagacuccug

SEQ ID NO: 1952012 - RNA, 20 nt, Human
ugauggaauuuuuuuguacg

SEQ ID NO: 1952013 - RNA, 16 nt, Human
ugaugagaggaaauca

SEQ ID NO: 1952014 - RNA, 15 nt, Human
ugaugagaggaaauc

SEQ ID NO: 1952015 - RNA, 14 nt, Human
ugaugagaggaaau

SEQ ID NO: 1952016 - RNA, 13 nt, Human
ugaugagaggaaa

SEQ ID NO: 1952017 - RNA, 16 nt, Human
ugauccuaguuccacc

SEQ ID NO: 1952018 - RNA, 15 nt, Human
ugauccucccaccuc

SEQ ID NO: 1952019 - RNA, 22 nt, Human
ugauccuaaugaaugcauaaaa

SEQ ID NO: 1952020 - RNA, 22 nt, Human
ugauccucccaccucagccucc

SEQ ID NO: 1952021 - RNA, 16 nt, Human
ugauccucccaccuca

SEQ ID NO: 1952022 - RNA, 21 nt, Human
ugauccucccaccucagccuc

SEQ ID NO: 1952023 - RNA, 22 nt, Human
ugaugacuaugcuuugcuauca

SEQ ID NO: 1952024 - RNA, 21 nt, Human
ugaugacguacaaguaguucu

SEQ ID NO: 1952025 - RNA, 22 nt, Human
ugaugacguacaaguaguucug

SEQ ID NO: 1952026 - RNA, 18 nt, Human
ugaugacccccccagcuu

SEQ ID NO: 1952027 - RNA, 19 nt, Human
ugaugacguacaaguaguu

SEQ ID NO: 1952028 - RNA, 16 nt, Human
ugaugaccaauuuuaa

SEQ ID NO: 1952029 - RNA, 18 nt, Human
ugaugaccaauuuuaacu

SEQ ID NO: 1952030 - RNA, 19 nt, Human
ugauuaaccacuucagcug

SEQ ID NO: 1952031 - RNA, 20 nt, Human
ugauuaaauucuugcaaagu

SEQ ID NO: 1952032 - RNA, 17 nt, Human
ugauggugaugaaaugu

SEQ ID NO: 1952033 - RNA, 13 nt, Human
ugauggugcaaug

SEQ ID NO: 1952034 - RNA, 15 nt, Human
ugauggugaugaaau

SEQ ID NO: 1952035 - RNA, 16 nt, Human
ugauggugaugaaaug

SEQ ID NO: 1952036 - RNA, 15 nt, Human
ugauggugcaaugac

SEQ ID NO: 1952037 - RNA, 19 nt, Human
ugauuaaauucuugcaaag

SEQ ID NO: 1952038 - RNA, 15 nt, Human
agccacgguguucug

SEQ ID NO: 1952039 - RNA, 17 nt, Human
ugauuaauggaaauguu

SEQ ID NO: 1952040 - RNA, 16 nt, Human
agccacugcaccgggc

SEQ ID NO: 1952041 - RNA, 23 nt, Human
agccacuccccagccagccuggc

SEQ ID NO: 1952042 - RNA, 17 nt, Human
agccacuccccagccag

SEQ ID NO: 1952043 - RNA, 22 nt, Human
agccacuccccagccagccugg

SEQ ID NO: 1952044 - RNA, 11 nt, Human
agccacucccc

SEQ ID NO: 1952045 - RNA, 13 nt, Human
agccacuccccag

SEQ ID NO: 1952046 - RNA, 14 nt, Human
agccacuccccagc

SEQ ID NO: 1952047 - RNA, 20 nt, Human
agccacugcaccgggccaca

SEQ ID NO: 1952048 - RNA, 18 nt, Human
agccacugcaccgggcca

SEQ ID NO: 1952049 - RNA, 19 nt, Human
agccacugcaccgggccac

SEQ ID NO: 1952050 - RNA, 11 nt, Human
agccagaggag

SEQ ID NO: 1952051 - RNA, 10 nt, Human
agccagagga

SEQ ID NO: 1952052 - RNA, 14 nt, Human
agccagcaucggaa

SEQ ID NO: 1952053 - RNA, 22 nt, Human
agccagccaaacacacagaagg

SEQ ID NO: 1952054 - RNA, 23 nt, Human
agccagccaaacacacagaaggg

SEQ ID NO: 1952055 - RNA, 15 nt, Human
agccagccuggcugg

SEQ ID NO: 1952056 - RNA, 17 nt, Human
agccagccuggcuggga

SEQ ID NO: 1952057 - RNA, 22 nt, Human
agccagccuggcugggacuggg

SEQ ID NO: 1952058 - RNA, 17 nt, Human
uuaaaccgccaaggcug

SEQ ID NO: 1952059 - RNA, 16 nt, Human
uuaaaauauuccugca

SEQ ID NO: 1952060 - RNA, 19 nt, Human
uuaaaauauuccugcauuu

SEQ ID NO: 1952061 - RNA, 16 nt, Human
uuaaaauaugcacuaa

SEQ ID NO: 1952062 - RNA, 19 nt, Human
uuaaaauaugcacuaaguc

SEQ ID NO: 1952063 - RNA, 12 nt, Human
uuaaaauauaau

SEQ ID NO: 1952064 - RNA, 15 nt, Human
uuaaaaauuuacuac

SEQ ID NO: 1952065 - RNA, 23 nt, Human
uuaaaaauuuacuacaauaugua

SEQ ID NO: 1952066 - RNA, 22 nt, Human
uuaaaauauagauguguuuuau

SEQ ID NO: 1952067 - RNA, 14 nt, Human
uuaaaauaugcacu

SEQ ID NO: 1952068 - RNA, 15 nt, Human
uuaaaauaugcacua

SEQ ID NO: 1952069 - RNA, 15 nt, Human
uuaaauaaaucauaa

SEQ ID NO: 1952070 - RNA, 13 nt, Human
uuaaauaaaucau

SEQ ID NO: 1952071 - RNA, 20 nt, Human
uuaaauaaugugaaacugga

SEQ ID NO: 1952072 - RNA, 21 nt, Human
uuaaauaaugugaaacuggau

SEQ ID NO: 1952073 - RNA, 19 nt, Human
uuaaauaaugugaaacugg

SEQ ID NO: 1952074 - RNA, 22 nt, Human
uuaaauaaugugaaacuggauu

SEQ ID NO: 1952075 - RNA, 18 nt, Human
uuaaaaaguggaaaaaua

SEQ ID NO: 1952076 - RNA, 17 nt, Human
uuaaaaagucuuuuaaa

SEQ ID NO: 1952077 - RNA, 23 nt, Human
uuaaaaagucuuuuaaaaaguau

SEQ ID NO: 1952078 - RNA, 22 nt, Human
uuaaaaaacuuucuacucauuu

SEQ ID NO: 1952079 - RNA, 16 nt, Human
uuaaaaagucuuuuaa

SEQ ID NO: 1952080 - RNA, 13 nt, Human
uuaaaaaguguuu

SEQ ID NO: 1952081 - RNA, 15 nt, Human
uuaaaaauaaagcaa

SEQ ID NO: 1952082 - RNA, 20 nt, Human
uuaaaaaugguuuaaauggu

SEQ ID NO: 1952083 - RNA, 13 nt, Human
uuaaaaauaucaa

SEQ ID NO: 1952084 - RNA, 18 nt, Human
uuaaaaauaucaaauuaa

SEQ ID NO: 1952085 - RNA, 19 nt, Human
uuaaaaauaucaaauuaau

SEQ ID NO: 1952086 - RNA, 17 nt, Human
uuaaaacaacacucaca

SEQ ID NO: 1952087 - RNA, 20 nt, Human
aguugccagucaccccggcc

SEQ ID NO: 1952088 - RNA, 22 nt, Human
aguugcauagguuuaauaauuu

SEQ ID NO: 1952089 - RNA, 20 nt, Human
aguuuucccuugaggaaaca

SEQ ID NO: 1952090 - RNA, 18 nt, Human
aguuuucccuugaggaaa

SEQ ID NO: 1952091 - RNA, 14 nt, Human
aguuuucaugugcu

SEQ ID NO: 1952092 - RNA, 22 nt, Human
aguuuucaugugcucagaauua

SEQ ID NO: 1952093 - RNA, 21 nt, Human
aguuuuauuuucuaaaguacu

SEQ ID NO: 1952094 - RNA, 13 nt, Human
aguuuuauuuucu

SEQ ID NO: 1952095 - RNA, 20 nt, Human
aguuuuauuuucuaaaguac

SEQ ID NO: 1952096 - RNA, 22 nt, Human
aguuuucacucuuauugcccac

SEQ ID NO: 1952097 - RNA, 14 nt, Human
aguuuuauuuauau

SEQ ID NO: 1952098 - RNA, 15 nt, Human
aguuuuauuuauauu

SEQ ID NO: 1952099 - RNA, 17 nt, Human
aguuuuauuuauauuua

SEQ ID NO: 1952100 - RNA, 18 nt, Human
aguuuuauuuauauuuau

SEQ ID NO: 1952101 - RNA, 19 nt, Human
aguuuuauuuauauuuauu

SEQ ID NO: 1952102 - RNA, 20 nt, Human
aguuuuauuuauauuuauug

SEQ ID NO: 1952103 - RNA, 22 nt, Human
aguuuuauuuauauuuauugac

SEQ ID NO: 1952104 - RNA, 23 nt, Human
aguuuuauuuauauuuauugacu

SEQ ID NO: 1952105 - RNA, 15 nt, Human
aguuucaauaaaguu

SEQ ID NO: 1952106 - RNA, 16 nt, Human
aguuucaauaaaguuu

SEQ ID NO: 1952107 - RNA, 17 nt, Human
aguuucaauaaaguuug

SEQ ID NO: 1952108 - RNA, 18 nt, Human
aguuucaauaaaguuuga

SEQ ID NO: 1952109 - RNA, 21 nt, Human
aguuucaauaaaguuugaucu

SEQ ID NO: 1952110 - RNA, 23 nt, Human
aguuucaauaaaguuugaucuuc

SEQ ID NO: 1952111 - RNA, 14 nt, Human
aguuucaaaaaucu

SEQ ID NO: 1952112 - RNA, 23 nt, Human
aguuuauuuuaaaacaauaggau

SEQ ID NO: 1952113 - RNA, 16 nt, Human
aguuuauuuuaaaaca

SEQ ID NO: 1952114 - RNA, 15 nt, Human
aguuucaaaaaucug

SEQ ID NO: 1952115 - RNA, 16 nt, Human
aguuucaaaaaucuga

SEQ ID NO: 1952116 - RNA, 18 nt, Human
aguuucaaaaaucugaag

SEQ ID NO: 1952117 - RNA, 21 nt, Human
aguuucaaaaaucugaagauu

SEQ ID NO: 1952118 - RNA, 22 nt, Human
aguuucaaaaaucugaagauug

SEQ ID NO: 1952119 - RNA, 23 nt, Human
aguuucaaaaaucugaagauugu

SEQ ID NO: 1952120 - RNA, 14 nt, Human
aguuucaacaugaa

SEQ ID NO: 1952121 - RNA, 13 nt, Human
uuaaauucuugca

SEQ ID NO: 1952122 - RNA, 16 nt, Human
uuaaauucuugcaaag

SEQ ID NO: 1952123 - RNA, 15 nt, Human
aguuucuccaagcag

SEQ ID NO: 1952124 - RNA, 13 nt, Human
aguuucuccaagc

SEQ ID NO: 1952125 - RNA, 21 nt, Human
aguuucuccaagcaggacaug

SEQ ID NO: 1952126 - RNA, 16 nt, Human
aguuucucagcuccca

SEQ ID NO: 1952127 - RNA, 16 nt, Human
aguuucguuuucaaaa

SEQ ID NO: 1952128 - RNA, 15 nt, Human
aguuucucagcuccc

SEQ ID NO: 1952129 - RNA, 15 nt, Human
aguuucguuuucaaa

SEQ ID NO: 1952130 - RNA, 12 nt, Human
aguucucuccuu

SEQ ID NO: 1952131 - RNA, 13 nt, Human
aguucucuccuuc

SEQ ID NO: 1952132 - RNA, 20 nt, Human
aguucucuucacucaaggau

SEQ ID NO: 1952133 - RNA, 16 nt, Human
aguucucuccuucuuc

SEQ ID NO: 1952134 - RNA, 15 nt, Human
uguuuucucuugaga

SEQ ID NO: 1952135 - RNA, 17 nt, Human
uguuuucaguguacaug

SEQ ID NO: 1952136 - RNA, 15 nt, Human
uguuuucaguguaca

SEQ ID NO: 1952137 - RNA, 13 nt, Human
uguuuucaaaugu

SEQ ID NO: 1952138 - RNA, 14 nt, Human
uguuuucaaauguu

SEQ ID NO: 1952139 - RNA, 22 nt, Human
uguuuucaaucucguauagaag

SEQ ID NO: 1952140 - RNA, 13 nt, Human
uguuuucaaaugg

SEQ ID NO: 1952141 - RNA, 14 nt, Human
uguuuucaaaugga

SEQ ID NO: 1952142 - RNA, 16 nt, Human
uguuuuagcacagcgu

SEQ ID NO: 1952143 - RNA, 15 nt, Human
uguuugcaucugaaa

SEQ ID NO: 1952144 - RNA, 14 nt, Human
uguuugccucugcc

SEQ ID NO: 1952145 - RNA, 16 nt, Human
uguuugccucugccuc

SEQ ID NO: 1952146 - RNA, 17 nt, Human
uguuguccgguuuacuu

SEQ ID NO: 1952147 - RNA, 14 nt, Human
uguugucagcugaa

SEQ ID NO: 1952148 - RNA, 19 nt, Human
uguuuggggaugagaaagg

SEQ ID NO: 1952149 - RNA, 20 nt, Human
uguuugggaagagcuuagaa

SEQ ID NO: 1952150 - RNA, 15 nt, Human
uguuuggggaugaga

SEQ ID NO: 1952151 - RNA, 12 nt, Human
uguuugcucccc

SEQ ID NO: 1952152 - RNA, 23 nt, Human
uguuugcuccccuuccccuuccu

SEQ ID NO: 1952153 - RNA, 18 nt, Human
aguugauucagcucugca

SEQ ID NO: 1952154 - RNA, 17 nt, Human
aguugauucagcucugc

SEQ ID NO: 1952155 - RNA, 15 nt, Human
aguugauucagcucu

SEQ ID NO: 1952156 - RNA, 14 nt, Human
aguugauucagcuc

SEQ ID NO: 1952157 - RNA, 23 nt, Human
aguugauucagcucugcaagaau

SEQ ID NO: 1952158 - RNA, 19 nt, Human
aguugcaacuuuguauaaa

SEQ ID NO: 1952159 - RNA, 14 nt, Human
aguugaucucccca

SEQ ID NO: 1952160 - RNA, 13 nt, Human
aguugauucagcu

SEQ ID NO: 1952161 - RNA, 23 nt, Human
aguugauagcacagacccugccc

SEQ ID NO: 1952162 - RNA, 22 nt, Human
aguugauagcacagacccugcc

SEQ ID NO: 1952163 - RNA, 21 nt, Human
aguugauagcacagacccugc

SEQ ID NO: 1952164 - RNA, 20 nt, Human
aguugauagcacagacccug

SEQ ID NO: 1952165 - RNA, 19 nt, Human
aguugauagcacagacccu

SEQ ID NO: 1952166 - RNA, 15 nt, Human
aguugauagcacaga

SEQ ID NO: 1952167 - RNA, 15 nt, Human
aguucuuuaaacugu

SEQ ID NO: 1952168 - RNA, 19 nt, Human
aguucuuuccauaauaaaa

SEQ ID NO: 1952169 - RNA, 16 nt, Human
aguucuuugauucugu

SEQ ID NO: 1952170 - RNA, 18 nt, Human
aguucuuugauucuguaa

SEQ ID NO: 1952171 - RNA, 14 nt, Human
aguugauagcacag

SEQ ID NO: 1952172 - RNA, 13 nt, Human
aguucuguauuug

SEQ ID NO: 1952173 - RNA, 14 nt, Human
aguucuguauuuga

SEQ ID NO: 1952174 - RNA, 15 nt, Human
aguucuguauuugaa

SEQ ID NO: 1952175 - RNA, 16 nt, Human
aguucuguauuugaaa

SEQ ID NO: 1952176 - RNA, 17 nt, Human
aguucuguauuugaaag

SEQ ID NO: 1952177 - RNA, 18 nt, Human
aguucuguauuugaaagu

SEQ ID NO: 1952178 - RNA, 20 nt, Human
aguucuguauuugaaagugc

SEQ ID NO: 1952179 - RNA, 21 nt, Human
aguucuguauuugaaagugcc

SEQ ID NO: 1952180 - RNA, 22 nt, Human
aguucuguauuugaaagugccu

SEQ ID NO: 1952181 - RNA, 23 nt, Human
aguucuguauuugaaagugccuu

SEQ ID NO: 1952182 - RNA, 11 nt, Human
aguucugugac

SEQ ID NO: 1952183 - RNA, 19 nt, Human
aguucugugacuaggaaaa

SEQ ID NO: 1952184 - RNA, 21 nt, Human
aguucugugacuaggaaaaaa

SEQ ID NO: 1952185 - RNA, 20 nt, Human
agugggggaguggccacaga

SEQ ID NO: 1952186 - RNA, 19 nt, Human
agugggggaguggccacag

SEQ ID NO: 1952187 - RNA, 18 nt, Human
agugggugaauaauacag

SEQ ID NO: 1952188 - RNA, 13 nt, Human
agugggugaauaa

SEQ ID NO: 1952189 - RNA, 18 nt, Human
agugggggaucacagccu

SEQ ID NO: 1952190 - RNA, 12 nt, Human
aguggcagggca

SEQ ID NO: 1952191 - RNA, 13 nt, Human
aguggcagggcac

SEQ ID NO: 1952192 - RNA, 15 nt, Human
aguggcagggcacag

SEQ ID NO: 1952193 - RNA, 16 nt, Human
aguggcagggcacagg

SEQ ID NO: 1952194 - RNA, 17 nt, Human
aguggcagggcacaggg

SEQ ID NO: 1952195 - RNA, 20 nt, Human
aguggcagggcacagggccu

SEQ ID NO: 1952196 - RNA, 22 nt, Human
aguggcagggcacagggccugg

SEQ ID NO: 1952197 - RNA, 14 nt, Human
aguggcagcugcuu

SEQ ID NO: 1952198 - RNA, 20 nt, Human
aguggcagcugcuuuugucu

SEQ ID NO: 1952199 - RNA, 12 nt, Human
aguggcagcugc

SEQ ID NO: 1952200 - RNA, 13 nt, Human
aguggcagcugcu

SEQ ID NO: 1952201 - RNA, 11 nt, Human
aguggcagcug

SEQ ID NO: 1952202 - RNA, 22 nt, Human
aguguacauggaauaacaugua

SEQ ID NO: 1952203 - RNA, 21 nt, Human
aguguacauggaauaacaugu

SEQ ID NO: 1952204 - RNA, 16 nt, Human
agugguuuuaauaaaa

SEQ ID NO: 1952205 - RNA, 13 nt, Human
agugguugaauau

SEQ ID NO: 1952206 - RNA, 14 nt, Human
agugguugaauaug

SEQ ID NO: 1952207 - RNA, 15 nt, Human
agugguugaauauga

SEQ ID NO: 1952208 - RNA, 18 nt, Human
agugguugaauaugauua

SEQ ID NO: 1952209 - RNA, 19 nt, Human
agugggugaauaauacagu

SEQ ID NO: 1952210 - RNA, 21 nt, Human
agugguuccuaauccucuagg

SEQ ID NO: 1952211 - RNA, 16 nt, Human
aguggugcgaucuggg

SEQ ID NO: 1952212 - RNA, 19 nt, Human
uguucuugguuuguaaauu

SEQ ID NO: 1952213 - RNA, 16 nt, Human
uguucuuggcaauaaa

SEQ ID NO: 1952214 - RNA, 17 nt, Human
uguucuuggcaauaaau

SEQ ID NO: 1952215 - RNA, 20 nt, Human
uguucuuggcaauaaauuuu

SEQ ID NO: 1952216 - RNA, 22 nt, Human
uguucuuggcaauaaauuuuga

SEQ ID NO: 1952217 - RNA, 23 nt, Human
uguucuuggcaauaaauuuugaa

SEQ ID NO: 1952218 - RNA, 13 nt, Human
uguucuuuccaaa

SEQ ID NO: 1952219 - RNA, 14 nt, Human
uguucuuuccaaag

SEQ ID NO: 1952220 - RNA, 17 nt, Human
uguucuugguuuguaaa

SEQ ID NO: 1952221 - RNA, 18 nt, Human
uguucuugguuuguaaau

SEQ ID NO: 1952222 - RNA, 14 nt, Human
uguucuuaauucuu

SEQ ID NO: 1952223 - RNA, 16 nt, Human
uguucuuaauucuuag

SEQ ID NO: 1952224 - RNA, 14 nt, Human
uguucugggacaca

SEQ ID NO: 1952225 - RNA, 15 nt, Human
uguucugggacacag

SEQ ID NO: 1952226 - RNA, 12 nt, Human
uguucugggaca

SEQ ID NO: 1952227 - RNA, 13 nt, Human
uguucugggacac

SEQ ID NO: 1952228 - RNA, 18 nt, Human
aguguaccauuaaaauau

SEQ ID NO: 1952229 - RNA, 19 nt, Human
aguguaccauuaaaauaug

SEQ ID NO: 1952230 - RNA, 21 nt, Human
aguguaccauuaaaauaugca

SEQ ID NO: 1952231 - RNA, 20 nt, Human
aguguagauuccauuuacug

SEQ ID NO: 1952232 - RNA, 23 nt, Human
aguguacauggaauaacauguaa

SEQ ID NO: 1952233 - RNA, 12 nt, Human
aguguaccauua

SEQ ID NO: 1952234 - RNA, 13 nt, Human
uguuaugagccag

SEQ ID NO: 1952235 - RNA, 15 nt, Human
uguuauguauauggu

SEQ ID NO: 1952236 - RNA, 19 nt, Human
uguuauuuuaaucucagaa

SEQ ID NO: 1952237 - RNA, 21 nt, Human
uguucaaaggagcaagaacuu

SEQ ID NO: 1952238 - RNA, 16 nt, Human
uguucccauucuugca

SEQ ID NO: 1952239 - RNA, 20 nt, Human
uguuauuuuuauaagaaaac

SEQ ID NO: 1952240 - RNA, 16 nt, Human
aguuacuaccuccucu

SEQ ID NO: 1952241 - RNA, 21 nt, Human
aguuacuaccuccucuccuga

SEQ ID NO: 1952242 - RNA, 15 nt, Human
aguuaguuccacuga

SEQ ID NO: 1952243 - RNA, 17 nt, Human
aguuaguuccacugaga

SEQ ID NO: 1952244 - RNA, 19 nt, Human
aguuaguuccacugagacc

SEQ ID NO: 1952245 - RNA, 13 nt, Human
aguuaguguagau

SEQ ID NO: 1952246 - RNA, 16 nt, Human
aguuaggcuuucucuu

SEQ ID NO: 1952247 - RNA, 18 nt, Human
aguuacccaaauuaagag

SEQ ID NO: 1952248 - RNA, 17 nt, Human
aguuacccaaauuaaga

SEQ ID NO: 1952249 - RNA, 15 nt, Human
aguuaccagugccuu

SEQ ID NO: 1952250 - RNA, 16 nt, Human
aguuaccagugccuua

SEQ ID NO: 1952251 - RNA, 12 nt, Human
aguguuuaaaug

SEQ ID NO: 1952252 - RNA, 18 nt, Human
uguucuuuccaaaguaca

SEQ ID NO: 1952253 - RNA, 20 nt, Human
uguucuuuccaaaguacacu

SEQ ID NO: 1952254 - RNA, 15 nt, Human
aguuauagaaagcaa

SEQ ID NO: 1952255 - RNA, 20 nt, Human
aguuauuauauuuacaaaug

SEQ ID NO: 1952256 - RNA, 13 nt, Human
aguuauguaaaua

SEQ ID NO: 1952257 - RNA, 14 nt, Human
aguuauguaaauaa

SEQ ID NO: 1952258 - RNA, 17 nt, Human
aguuauguaaauaauuc

SEQ ID NO: 1952259 - RNA, 18 nt, Human
aguuauguaaauaauucu

SEQ ID NO: 1952260 - RNA, 20 nt, Human
aguuauguaaauaauucuuu

SEQ ID NO: 1952261 - RNA, 12 nt, Human
aguuauguguau

SEQ ID NO: 1952262 - RNA, 14 nt, Human
aguuauguguaugu

SEQ ID NO: 1952263 - RNA, 19 nt, Human
aguuauguguaugugagua

SEQ ID NO: 1952264 - RNA, 22 nt, Human
aguuauuaauuuuuaaggaugu

SEQ ID NO: 1952265 - RNA, 22 nt, Human
aguuauguguaugugaguauuc

SEQ ID NO: 1952266 - RNA, 13 nt, Human
aguuauuaaaauu

SEQ ID NO: 1952267 - RNA, 14 nt, Human
aguuauuaaaauug

SEQ ID NO: 1952268 - RNA, 15 nt, Human
aguuauuaaaauugu

SEQ ID NO: 1952269 - RNA, 16 nt, Human
aguuauuaaaauuguu

SEQ ID NO: 1952270 - RNA, 17 nt, Human
aguuauuaaaauuguug

SEQ ID NO: 1952271 - RNA, 18 nt, Human
aguuauuaaaauuguugu

SEQ ID NO: 1952272 - RNA, 14 nt, Human
aguuccugucccug

SEQ ID NO: 1952273 - RNA, 15 nt, Human
aguucaagaaaugaa

SEQ ID NO: 1952274 - RNA, 17 nt, Human
aguuccuagccaccgcc

SEQ ID NO: 1952275 - RNA, 17 nt, Human
aguuccuagagaacugu

SEQ ID NO: 1952276 - RNA, 17 nt, Human
aguucccuacuuccugu

SEQ ID NO: 1952277 - RNA, 21 nt, Human
aguuauuuuuauuuauuuaaa

SEQ ID NO: 1952278 - RNA, 15 nt, Human
aguucaaagucauga

SEQ ID NO: 1952279 - RNA, 20 nt, Human
aguucaaagucaugauguuu

SEQ ID NO: 1952280 - RNA, 19 nt, Human
aguuauuucccuuuagcug

SEQ ID NO: 1952281 - RNA, 22 nt, Human
aguuauugucccuggcuuccuu

SEQ ID NO: 1952282 - RNA, 23 nt, Human
aguuauugucccuggcuuccuua

SEQ ID NO: 1952283 - RNA, 14 nt, Human
aguucaagaaauga

SEQ ID NO: 1952284 - RNA, 13 nt, Human
aguucaagaaaug

SEQ ID NO: 1952285 - RNA, 22 nt, Human
aguucaaagucaugauguuuuu

SEQ ID NO: 1952286 - RNA, 16 nt, Human
uguugggccaggagcc

SEQ ID NO: 1952287 - RNA, 18 nt, Human
uguugggagugaggaugu

SEQ ID NO: 1952288 - RNA, 13 nt, Human
uguugggccagga

SEQ ID NO: 1952289 - RNA, 20 nt, Human
uguugucaagaauagcauug

SEQ ID NO: 1952290 - RNA, 11 nt, Human
uguugucaaga

SEQ ID NO: 1952291 - RNA, 16 nt, Human
uguugucaagaauagc

SEQ ID NO: 1952292 - RNA, 13 nt, Human
uguugucagcuga

SEQ ID NO: 1952293 - RNA, 14 nt, Human
uguuguauucauug

SEQ ID NO: 1952294 - RNA, 14 nt, Human
uguuguauaaauuu

SEQ ID NO: 1952295 - RNA, 11 nt, Human
uguuguauaaa

SEQ ID NO: 1952296 - RNA, 13 nt, Human
uguuguauaaauu

SEQ ID NO: 1952297 - RNA, 13 nt, Human
uguuguaaaaugu

SEQ ID NO: 1952298 - RNA, 22 nt, Human
auacuagauuugggagaagggc

SEQ ID NO: 1952299 - RNA, 15 nt, Human
auacuagauuuggga

SEQ ID NO: 1952300 - RNA, 13 nt, Human
auacuacaguuug

SEQ ID NO: 1952301 - RNA, 15 nt, Human
auacuacaguuuguu

SEQ ID NO: 1952302 - RNA, 16 nt, Human
auacuacaguuuguua

SEQ ID NO: 1952303 - RNA, 20 nt, Human
auacuacaguuuguuaguau

SEQ ID NO: 1952304 - RNA, 21 nt, Human
auacuaaccagcagaaaugcc

SEQ ID NO: 1952305 - RNA, 19 nt, Human
auaccagccaguaaauggg

SEQ ID NO: 1952306 - RNA, 22 nt, Human
uuaucaugugaaaucauucauu

SEQ ID NO: 1952307 - RNA, 20 nt, Human
uuaucaugugaaaucauuca

SEQ ID NO: 1952308 - RNA, 18 nt, Human
uuaucaugugaaaucauu

SEQ ID NO: 1952309 - RNA, 17 nt, Human
uuaucaugugaaaucau

SEQ ID NO: 1952310 - RNA, 14 nt, Human
uuaucaacauuugu

SEQ ID NO: 1952311 - RNA, 17 nt, Human
auaccaagcauguggau

SEQ ID NO: 1952312 - RNA, 16 nt, Human
auacauuugauaaagu

SEQ ID NO: 1952313 - RNA, 16 nt, Human
auacauuuaaaacauu

SEQ ID NO: 1952314 - RNA, 21 nt, Human
auacauuuaaaacauuaaaau

SEQ ID NO: 1952315 - RNA, 21 nt, Human
auacauucuuuuugcucuaaa

SEQ ID NO: 1952316 - RNA, 16 nt, Human
auacauucuuuuugcu

SEQ ID NO: 1952317 - RNA, 12 nt, Human
auacauucuuuu

SEQ ID NO: 1952318 - RNA, 20 nt, Human
auacagucucugagaacugg

SEQ ID NO: 1952319 - RNA, 23 nt, Human
auacagcaaaccuaauugcacaa

SEQ ID NO: 1952320 - RNA, 17 nt, Human
auacaacaccaaaaaau

SEQ ID NO: 1952321 - RNA, 21 nt, Human
auacaaaugcaucuuugaugu

SEQ ID NO: 1952322 - RNA, 22 nt, Human
auacaaaugcaucuuugaugug

SEQ ID NO: 1952323 - RNA, 17 nt, Human
auacaaaugcaucuuug

SEQ ID NO: 1952324 - RNA, 18 nt, Human
auacaaaugcaucuuuga

SEQ ID NO: 1952325 - RNA, 19 nt, Human
auacaaaugcaucuuugau

SEQ ID NO: 1952326 - RNA, 20 nt, Human
auacaaaugcaucuuugaug

SEQ ID NO: 1952327 - RNA, 15 nt, Human
auacaaaugcaucuu

SEQ ID NO: 1952328 - RNA, 16 nt, Human
auacaaacaagcauau

SEQ ID NO: 1952329 - RNA, 14 nt, Human
auacaggaaaagcu

SEQ ID NO: 1952330 - RNA, 19 nt, Human
auacaggaaaagcugcuga

SEQ ID NO: 1952331 - RNA, 20 nt, Human
auacaggaaaagcugcugac

SEQ ID NO: 1952332 - RNA, 22 nt, Human
auacaggaaaagcugcugacag

SEQ ID NO: 1952333 - RNA, 21 nt, Human
auacaguucggugagcuacaa

SEQ ID NO: 1952334 - RNA, 13 nt, Human
uuauagugcaaua

SEQ ID NO: 1952335 - RNA, 14 nt, Human
uuauagugcaauau

SEQ ID NO: 1952336 - RNA, 15 nt, Human
uuauagugcaauaua

SEQ ID NO: 1952337 - RNA, 17 nt, Human
uuauagugcaauauauu

SEQ ID NO: 1952338 - RNA, 19 nt, Human
uuauagugcaauauauuuu

SEQ ID NO: 1952339 - RNA, 22 nt, Human
uuauagugcaauauauuuugua

SEQ ID NO: 1952340 - RNA, 13 nt, Human
uuauaguuaaucu

SEQ ID NO: 1952341 - RNA, 16 nt, Human
uuauaguacugacaga

SEQ ID NO: 1952342 - RNA, 18 nt, Human
uuauaguacugacagaua

SEQ ID NO: 1952343 - RNA, 18 nt, Human
uuauagguccuuuagaaa

SEQ ID NO: 1952344 - RNA, 14 nt, Human
uuauaccuguugcu

SEQ ID NO: 1952345 - RNA, 12 nt, Human
uuauaccuguuu

SEQ ID NO: 1952346 - RNA, 14 nt, Human
uuauaccuguuuaa

SEQ ID NO: 1952347 - RNA, 15 nt, Human
uuauaccuguuuaaa

SEQ ID NO: 1952348 - RNA, 15 nt, Human
uuauagagcagaaau

SEQ ID NO: 1952349 - RNA, 17 nt, Human
uuauagagcagaaauuc

SEQ ID NO: 1952350 - RNA, 22 nt, Human
uuauagagcagaaauucuguuu

SEQ ID NO: 1952351 - RNA, 23 nt, Human
uuauagagcagaaauucuguuuu

SEQ ID NO: 1952352 - RNA, 12 nt, Human
uuauagaagaau

SEQ ID NO: 1952353 - RNA, 15 nt, Human
uuauagaagaaugca

SEQ ID NO: 1952354 - RNA, 22 nt, Human
uuauagaagaaugcaugcuuuc

SEQ ID NO: 1952355 - RNA, 17 nt, Human
uuauagaagaaugcaug

SEQ ID NO: 1952356 - RNA, 19 nt, Human
uuauagaagaaugcaugcu

SEQ ID NO: 1952357 - RNA, 14 nt, Human
uuagccggagaucc

SEQ ID NO: 1952358 - RNA, 15 nt, Human
uuagccuaagauaua

SEQ ID NO: 1952359 - RNA, 16 nt, Human
uuagccuaagauauac

SEQ ID NO: 1952360 - RNA, 19 nt, Human
uuagccuaagauauacuug

SEQ ID NO: 1952361 - RNA, 16 nt, Human
uuagcaguuugcuuug

SEQ ID NO: 1952362 - RNA, 14 nt, Human
uuagccccauaauu

SEQ ID NO: 1952363 - RNA, 18 nt, Human
uuauacccccugcaaagc

SEQ ID NO: 1952364 - RNA, 21 nt, Human
uuauaaauuggugaugcuugu

SEQ ID NO: 1952365 - RNA, 22 nt, Human
auacaaaaaaaaaaaaaaauua

SEQ ID NO: 1952366 - RNA, 12 nt, Human
auacaaaagcau

SEQ ID NO: 1952367 - RNA, 13 nt, Human
auacaaaagcaug

SEQ ID NO: 1952368 - RNA, 15 nt, Human
auacaaaagcaugug

SEQ ID NO: 1952369 - RNA, 12 nt, Human
auaauuuuguaa

SEQ ID NO: 1952370 - RNA, 13 nt, Human
auaauuuuguaau

SEQ ID NO: 1952371 - RNA, 23 nt, Human
auaauuuuguaauguaucaaaua

SEQ ID NO: 1952372 - RNA, 13 nt, Human
auaauuuugauag

SEQ ID NO: 1952373 - RNA, 16 nt, Human
uuauauacuuguuguu

SEQ ID NO: 1952374 - RNA, 18 nt, Human
uuauauacuuguuguuua

SEQ ID NO: 1952375 - RNA, 22 nt, Human
uuauauacuuguuguuuaaugu

SEQ ID NO: 1952376 - RNA, 19 nt, Human
uuauauauauauauauuuc

SEQ ID NO: 1952377 - RNA, 22 nt, Human
uuauauauauuuuuuucugaaa

SEQ ID NO: 1952378 - RNA, 14 nt, Human
uuauauauauaucu

SEQ ID NO: 1952379 - RNA, 13 nt, Human
uuauauaucccug

SEQ ID NO: 1952380 - RNA, 18 nt, Human
uuauauaucccugauaaa

SEQ ID NO: 1952381 - RNA, 19 nt, Human
uuauauaucccugauaaau

SEQ ID NO: 1952382 - RNA, 12 nt, Human
auaauuuuacaa

SEQ ID NO: 1952383 - RNA, 12 nt, Human
auaauuuuccuu

SEQ ID NO: 1952384 - RNA, 13 nt, Human
auaauuuuccuuu

SEQ ID NO: 1952385 - RNA, 19 nt, Human
auaauuuuccuuuaauaug

SEQ ID NO: 1952386 - RNA, 22 nt, Human
auaauuuuccuuuaauaugaaa

SEQ ID NO: 1952387 - RNA, 14 nt, Human
uuauaguuaaucua

SEQ ID NO: 1952388 - RNA, 17 nt, Human
uuauaguuaaucuauaa

SEQ ID NO: 1952389 - RNA, 16 nt, Human
auaaaccgaacugaug

SEQ ID NO: 1952390 - RNA, 19 nt, Human
auaaacaucagguuaggca

SEQ ID NO: 1952391 - RNA, 22 nt, Human
auaaacaucagguuaggcagua

SEQ ID NO: 1952392 - RNA, 18 nt, Human
auaaacacucuugaaaaa

SEQ ID NO: 1952393 - RNA, 12 nt, Human
auaaacacuguu

SEQ ID NO: 1952394 - RNA, 20 nt, Human
auaaacauacgugugcaugu

SEQ ID NO: 1952395 - RNA, 22 nt, Human
auaaacauacgugugcaugugu

SEQ ID NO: 1952396 - RNA, 23 nt, Human
auaaacacucuugaaaaaugcau

SEQ ID NO: 1952397 - RNA, 16 nt, Human
aguuuucccugaaguu

SEQ ID NO: 1952398 - RNA, 13 nt, Human
auaaacuuuaccu

SEQ ID NO: 1952399 - RNA, 15 nt, Human
auaaacuuuaccuuu

SEQ ID NO: 1952400 - RNA, 16 nt, Human
auaaaguaguaaaaga

SEQ ID NO: 1952401 - RNA, 18 nt, Human
auaaacuggcagcucagc

SEQ ID NO: 1952402 - RNA, 17 nt, Human
auaaacucauuuugcuu

SEQ ID NO: 1952403 - RNA, 13 nt, Human
auaaacucuuuua

SEQ ID NO: 1952404 - RNA, 15 nt, Human
auaaacgucuuaaau

SEQ ID NO: 1952405 - RNA, 16 nt, Human
auaaacgucuuaaaua

SEQ ID NO: 1952406 - RNA, 18 nt, Human
auaaacgucuuaaauauu

SEQ ID NO: 1952407 - RNA, 22 nt, Human
auaaacguggagaaucacaggc

SEQ ID NO: 1952408 - RNA, 17 nt, Human
auaaacuagauuacauu

SEQ ID NO: 1952409 - RNA, 19 nt, Human
auaaacuagauuacauuca

SEQ ID NO: 1952410 - RNA, 18 nt, Human
auaacuguaauuauuuga

SEQ ID NO: 1952411 - RNA, 17 nt, Human
auaacuguaauuauuug

SEQ ID NO: 1952412 - RNA, 19 nt, Human
auaacuguaauuauuugaa

SEQ ID NO: 1952413 - RNA, 22 nt, Human
auaacuguaauuauuugaauga

SEQ ID NO: 1952414 - RNA, 16 nt, Human
uuacaggaaguacugg

SEQ ID NO: 1952415 - RNA, 15 nt, Human
uuacaggaaguacug

SEQ ID NO: 1952416 - RNA, 22 nt, Human
uuacaggaaguacuggagaaaa

SEQ ID NO: 1952417 - RNA, 18 nt, Human
uuacaggaaguacuggag

SEQ ID NO: 1952418 - RNA, 16 nt, Human
uuacccacacacagau

SEQ ID NO: 1952419 - RNA, 18 nt, Human
uuaccauuggaaauuuca

SEQ ID NO: 1952420 - RNA, 15 nt, Human
uuaccauuggaaauu

SEQ ID NO: 1952421 - RNA, 16 nt, Human
uuaccauuggaaauuu

SEQ ID NO: 1952422 - RNA, 20 nt, Human
uuaccgacaagcacagucag

SEQ ID NO: 1952423 - RNA, 23 nt, Human
uuaccauuuugggguacccacug

SEQ ID NO: 1952424 - RNA, 13 nt, Human
uuaccauuggaaa

SEQ ID NO: 1952425 - RNA, 22 nt, Human
uuacaugcagccacuuaggaca

SEQ ID NO: 1952426 - RNA, 20 nt, Human
auaaccaguguuguggauuu

SEQ ID NO: 1952427 - RNA, 14 nt, Human
auaaccagacacaa

SEQ ID NO: 1952428 - RNA, 16 nt, Human
auaaccagacacaaac

SEQ ID NO: 1952429 - RNA, 14 nt, Human
auaaauuauauucc

SEQ ID NO: 1952430 - RNA, 13 nt, Human
auaaauuauggua

SEQ ID NO: 1952431 - RNA, 21 nt, Human
auaaauuaugguaaaauuuug

SEQ ID NO: 1952432 - RNA, 19 nt, Human
auaacaugugaaaagaaua

SEQ ID NO: 1952433 - RNA, 19 nt, Human
auaaauaaaguuuguugaa

SEQ ID NO: 1952434 - RNA, 13 nt, Human
auaaauaaaguuu

SEQ ID NO: 1952435 - RNA, 22 nt, Human
auaauugacaggcgaaagaaaa

SEQ ID NO: 1952436 - RNA, 17 nt, Human
auaauucugaaguuaua

SEQ ID NO: 1952437 - RNA, 18 nt, Human
auaauucugaaguuauau

SEQ ID NO: 1952438 - RNA, 19 nt, Human
auaauucugaaguuauauu

SEQ ID NO: 1952439 - RNA, 20 nt, Human
auaauucugaaguuauauuu

SEQ ID NO: 1952440 - RNA, 22 nt, Human
auaauucugaaguuauauuucc

SEQ ID NO: 1952441 - RNA, 21 nt, Human
uuagcacuucagggcagauuu

SEQ ID NO: 1952442 - RNA, 21 nt, Human
uuagcagcugacuuucaaagu

SEQ ID NO: 1952443 - RNA, 21 nt, Human
uuagauuugccauagaguaca

SEQ ID NO: 1952444 - RNA, 23 nt, Human
uuagauuugccauagaguacacu

SEQ ID NO: 1952445 - RNA, 16 nt, Human
uuagauuuuguguuua

SEQ ID NO: 1952446 - RNA, 16 nt, Human
uuagaugcauauuacu

SEQ ID NO: 1952447 - RNA, 19 nt, Human
uuagaugcauauuacugua

SEQ ID NO: 1952448 - RNA, 15 nt, Human
uuagaugugagaaaa

SEQ ID NO: 1952449 - RNA, 16 nt, Human
uuagauguaauuuugu

SEQ ID NO: 1952450 - RNA, 16 nt, Human
uuagauuugccauaga

SEQ ID NO: 1952451 - RNA, 19 nt, Human
auaauacaguaucucaggg

SEQ ID NO: 1952452 - RNA, 14 nt, Human
auaauaaucucagu

SEQ ID NO: 1952453 - RNA, 15 nt, Human
auaaucaccagggcc

SEQ ID NO: 1952454 - RNA, 14 nt, Human
auaauucuacuuug

SEQ ID NO: 1952455 - RNA, 14 nt, Human
auaaugaauacuuu

SEQ ID NO: 1952456 - RNA, 12 nt, Human
auaaugaagccc

SEQ ID NO: 1952457 - RNA, 17 nt, Human
auaaguuaacuuccaau

SEQ ID NO: 1952458 - RNA, 12 nt, Human
auaagcaacaau

SEQ ID NO: 1952459 - RNA, 13 nt, Human
auaagcaacaauu

SEQ ID NO: 1952460 - RNA, 17 nt, Human
auaagcaacaauuuuca

SEQ ID NO: 1952461 - RNA, 18 nt, Human
auaagcaacaauuuucag

SEQ ID NO: 1952462 - RNA, 19 nt, Human
auaagcaacaauuuucaga

SEQ ID NO: 1952463 - RNA, 20 nt, Human
auaagcaacaauuuucagau

SEQ ID NO: 1952464 - RNA, 22 nt, Human
auaagcaacaauuuucagauuu

SEQ ID NO: 1952465 - RNA, 23 nt, Human
auaagaaccuuuugagugccuua

SEQ ID NO: 1952466 - RNA, 13 nt, Human
uuaccucuuugga

SEQ ID NO: 1952467 - RNA, 15 nt, Human
uuaccucuuuggaaa

SEQ ID NO: 1952468 - RNA, 16 nt, Human
uuaccucuuuggaaaa

SEQ ID NO: 1952469 - RNA, 22 nt, Human
auaagaaccuuuugagugccuu

SEQ ID NO: 1952470 - RNA, 21 nt, Human
uuaccugaagggguuuucuug

SEQ ID NO: 1952471 - RNA, 22 nt, Human
uuaccugaagggguuuucuuga

SEQ ID NO: 1952472 - RNA, 18 nt, Human
uuaccugaguugaagagg

SEQ ID NO: 1952473 - RNA, 22 nt, Human
auaaguuaacuuccaauuuaca

SEQ ID NO: 1952474 - RNA, 13 nt, Human
auaaguuggaaac

SEQ ID NO: 1952475 - RNA, 16 nt, Human
auaaguuggaaacacu

SEQ ID NO: 1952476 - RNA, 17 nt, Human
auaaguuggaaacacua

SEQ ID NO: 1952477 - RNA, 18 nt, Human
auaaguuggaaacacuaa

SEQ ID NO: 1952478 - RNA, 19 nt, Human
auaaguuggaaacacuaaa

SEQ ID NO: 1952479 - RNA, 21 nt, Human
auaaguuggaaacacuaaaug

SEQ ID NO: 1952480 - RNA, 22 nt, Human
auaaguuggaaacacuaaaugu

SEQ ID NO: 1952481 - RNA, 23 nt, Human
auaauacaccacuacauucuguu

SEQ ID NO: 1952482 - RNA, 21 nt, Human
auaauacaccacuacauucug

SEQ ID NO: 1952483 - RNA, 23 nt, Human
auaaguuggaaacacuaaauguu

SEQ ID NO: 1952484 - RNA, 17 nt, Human
auaauaaaaaauuucag

SEQ ID NO: 1952485 - RNA, 13 nt, Human
ugggucugugugu

SEQ ID NO: 1952486 - RNA, 15 nt, Human
ugggucugugugugu

SEQ ID NO: 1952487 - RNA, 21 nt, Human
agggugaguccuccagaacuc

SEQ ID NO: 1952488 - RNA, 12 nt, Human
agggugagccca

SEQ ID NO: 1952489 - RNA, 18 nt, Human
agggugaguccuccagaa

SEQ ID NO: 1952490 - RNA, 23 nt, Human
uggguggaugccugguggcagcu

SEQ ID NO: 1952491 - RNA, 16 nt, Human
uggguuuuguucuugu

SEQ ID NO: 1952492 - RNA, 15 nt, Human
ugguaaaaugaagaa

SEQ ID NO: 1952493 - RNA, 18 nt, Human
ugguaaaaugaagaauuu

SEQ ID NO: 1952494 - RNA, 14 nt, Human
uggguggaugccug

SEQ ID NO: 1952495 - RNA, 22 nt, Human
ugggucuuguuuuuuuuuucca

SEQ ID NO: 1952496 - RNA, 21 nt, Human
uggucaccaaaucagcugcua

SEQ ID NO: 1952497 - RNA, 23 nt, Human
uggucaccaaaucagcugcuacu

SEQ ID NO: 1952498 - RNA, 19 nt, Human
ugguaaaaugaagaauuua

SEQ ID NO: 1952499 - RNA, 22 nt, Human
ugguaauuuaagauuccagaga

SEQ ID NO: 1952500 - RNA, 16 nt, Human
ugguccauagagagca

SEQ ID NO: 1952501 - RNA, 15 nt, Human
ugguccauagagagc

SEQ ID NO: 1952502 - RNA, 14 nt, Human
ugguccacuuuucc

SEQ ID NO: 1952503 - RNA, 15 nt, Human
ugguccacuuuucca

SEQ ID NO: 1952504 - RNA, 16 nt, Human
ugguccacuuuuccag

SEQ ID NO: 1952505 - RNA, 19 nt, Human
aggguacuaaggaaucuuu

SEQ ID NO: 1952506 - RNA, 12 nt, Human
aggguacaugug

SEQ ID NO: 1952507 - RNA, 22 nt, Human
aggguaauaaccagacacaaac

SEQ ID NO: 1952508 - RNA, 21 nt, Human
aggguacaaaaaauucaguga

SEQ ID NO: 1952509 - RNA, 22 nt, Human
agggucuugguuccagccugcc

SEQ ID NO: 1952510 - RNA, 21 nt, Human
agggucuugguuccagccugc

SEQ ID NO: 1952511 - RNA, 18 nt, Human
aggguaucaggugcugcc

SEQ ID NO: 1952512 - RNA, 16 nt, Human
aggguaucaggugcug

SEQ ID NO: 1952513 - RNA, 12 nt, Human
aggguagggugg

SEQ ID NO: 1952514 - RNA, 18 nt, Human
aggguaggcagccugaga

SEQ ID NO: 1952515 - RNA, 12 nt, Human
agggggcuuccu

SEQ ID NO: 1952516 - RNA, 20 nt, Human
agggguccccuccaggagua

SEQ ID NO: 1952517 - RNA, 12 nt, Human
aggguaaguauu

SEQ ID NO: 1952518 - RNA, 22 nt, Human
aggggucuugcaaaauuccuga

SEQ ID NO: 1952519 - RNA, 13 nt, Human
agggggcugggac

SEQ ID NO: 1952520 - RNA, 21 nt, Human
aggggcuuaauuauugauguu

SEQ ID NO: 1952521 - RNA, 20 nt, Human
aggggaggccaucuggagag

SEQ ID NO: 1952522 - RNA, 15 nt, Human
aggggaggccaucug

SEQ ID NO: 1952523 - RNA, 16 nt, Human
aggggaggccaucugg

SEQ ID NO: 1952524 - RNA, 17 nt, Human
aggggagggggcaaagg

SEQ ID NO: 1952525 - RNA, 16 nt, Human
aggggauagagagaga

SEQ ID NO: 1952526 - RNA, 12 nt, Human
aggggaggccaa

SEQ ID NO: 1952527 - RNA, 23 nt, Human
ugggaauaagugccaggauggaa

SEQ ID NO: 1952528 - RNA, 20 nt, Human
ugggaauauaauauugucuc

SEQ ID NO: 1952529 - RNA, 15 nt, Human
agguagagucugagg

SEQ ID NO: 1952530 - RNA, 17 nt, Human
agguagcccccucuucc

SEQ ID NO: 1952531 - RNA, 18 nt, Human
agguagcccccucuuccc

SEQ ID NO: 1952532 - RNA, 17 nt, Human
aggguuucagagagccu

SEQ ID NO: 1952533 - RNA, 17 nt, Human
aggguuggcaccuuccc

SEQ ID NO: 1952534 - RNA, 20 nt, Human
aggguuggcaccuucccccu

SEQ ID NO: 1952535 - RNA, 17 nt, Human
aggguugggcugguguc

SEQ ID NO: 1952536 - RNA, 20 nt, Human
aggguuuauguuuaggaugu

SEQ ID NO: 1952537 - RNA, 23 nt, Human
agguagcuuugagguggaagagg

SEQ ID NO: 1952538 - RNA, 20 nt, Human
agguaggaauauuauauuug

SEQ ID NO: 1952539 - RNA, 23 nt, Human
agguagcugcagauaaguggccu

SEQ ID NO: 1952540 - RNA, 22 nt, Human
agguauaucauucuaaagauag

SEQ ID NO: 1952541 - RNA, 20 nt, Human
agguauaucauucuaaagau

SEQ ID NO: 1952542 - RNA, 21 nt, Human
agguauaucauucuaaagaua

SEQ ID NO: 1952543 - RNA, 15 nt, Human
agguauaucauucua

SEQ ID NO: 1952544 - RNA, 18 nt, Human
agguauaucauucuaaag

SEQ ID NO: 1952545 - RNA, 19 nt, Human
agguauaucauucuaaaga

SEQ ID NO: 1952546 - RNA, 17 nt, Human
agguaugcaaucaaauc

SEQ ID NO: 1952547 - RNA, 22 nt, Human
aggucuugaacuccuggccuca

SEQ ID NO: 1952548 - RNA, 19 nt, Human
aggugaaacuccagaugcc

SEQ ID NO: 1952549 - RNA, 20 nt, Human
aggugaaacuccagaugcca

SEQ ID NO: 1952550 - RNA, 21 nt, Human
aggugaaacuccagaugccac

SEQ ID NO: 1952551 - RNA, 22 nt, Human
aggugaaacuccagaugccaca

SEQ ID NO: 1952552 - RNA, 20 nt, Human
aggucuugaacuccuggccu

SEQ ID NO: 1952553 - RNA, 21 nt, Human
aggucuugaacuccuggccuc

SEQ ID NO: 1952554 - RNA, 17 nt, Human
agguccacaacacacag

SEQ ID NO: 1952555 - RNA, 22 nt, Human
aggucauuuuuuuuaagaaaaa

SEQ ID NO: 1952556 - RNA, 23 nt, Human
aggucauuuuuuuuaagaaaaag

SEQ ID NO: 1952557 - RNA, 21 nt, Human
aggucaaggcugcagugagcc

SEQ ID NO: 1952558 - RNA, 15 nt, Human
aggucagugcaaaua

SEQ ID NO: 1952559 - RNA, 13 nt, Human
aggguuggccccu

SEQ ID NO: 1952560 - RNA, 14 nt, Human
aggguuggccccug

SEQ ID NO: 1952561 - RNA, 13 nt, Human
aggguugggcugg

SEQ ID NO: 1952562 - RNA, 15 nt, Human
aggguugggcuggug

SEQ ID NO: 1952563 - RNA, 17 nt, Human
aggguggugaccucugc

SEQ ID NO: 1952564 - RNA, 18 nt, Human
aggguggugaccucugcc

SEQ ID NO: 1952565 - RNA, 19 nt, Human
aggguggugaccucugccu

SEQ ID NO: 1952566 - RNA, 21 nt, Human
aggguggugaccucugccuga

SEQ ID NO: 1952567 - RNA, 19 nt, Human
uggugaacagaacaaaagg

SEQ ID NO: 1952568 - RNA, 14 nt, Human
uggucuuuugguua

SEQ ID NO: 1952569 - RNA, 17 nt, Human
uggucuuuuccucgcuu

SEQ ID NO: 1952570 - RNA, 19 nt, Human
uggucuuuuccucgcuucu

SEQ ID NO: 1952571 - RNA, 20 nt, Human
uggucuuuuccucgcuucuu

SEQ ID NO: 1952572 - RNA, 12 nt, Human
uggucuuuuccu

SEQ ID NO: 1952573 - RNA, 13 nt, Human
uggucuuauauuu

SEQ ID NO: 1952574 - RNA, 16 nt, Human
uggucugggacucucu

SEQ ID NO: 1952575 - RNA, 18 nt, Human
uggucugacccacugcuu

SEQ ID NO: 1952576 - RNA, 16 nt, Human
uggucuuauuuguaaa

SEQ ID NO: 1952577 - RNA, 22 nt, Human
uggucugugagaugcuagaacu

SEQ ID NO: 1952578 - RNA, 12 nt, Human
uggucuguguga

SEQ ID NO: 1952579 - RNA, 13 nt, Human
uggucccacccca

SEQ ID NO: 1952580 - RNA, 15 nt, Human
uggucucgaacuccu

SEQ ID NO: 1952581 - RNA, 19 nt, Human
uggucucgaacuccugacc

SEQ ID NO: 1952582 - RNA, 20 nt, Human
uggucucgaacuccugaccu

SEQ ID NO: 1952583 - RNA, 21 nt, Human
uggucucgaacuccugaccuu

SEQ ID NO: 1952584 - RNA, 19 nt, Human
ugguccauagagagcaaga

SEQ ID NO: 1952585 - RNA, 20 nt, Human
ugguccaucugguuuucucu

SEQ ID NO: 1952586 - RNA, 22 nt, Human
ugguccaugggccauaugaaaa

SEQ ID NO: 1952587 - RNA, 23 nt, Human
ugguggcagcucaccucucccuu

SEQ ID NO: 1952588 - RNA, 20 nt, Human
ugguggcagcucaccucucc

SEQ ID NO: 1952589 - RNA, 19 nt, Human
ugguggcagcucaccucuc

SEQ ID NO: 1952590 - RNA, 16 nt, Human
ugguggcagcucaccu

SEQ ID NO: 1952591 - RNA, 12 nt, Human
ugguggcagcuc

SEQ ID NO: 1952592 - RNA, 15 nt, Human
ugguggcagagugga

SEQ ID NO: 1952593 - RNA, 14 nt, Human
aggugaacauuggu

SEQ ID NO: 1952594 - RNA, 16 nt, Human
aggugaacaaucaacu

SEQ ID NO: 1952595 - RNA, 21 nt, Human
aggugaacauugguucuuuca

SEQ ID NO: 1952596 - RNA, 13 nt, Human
aggugaaggaggc

SEQ ID NO: 1952597 - RNA, 18 nt, Human
aggugaaggaggcuccag

SEQ ID NO: 1952598 - RNA, 19 nt, Human
aggugaaggaggcuccagg

SEQ ID NO: 1952599 - RNA, 21 nt, Human
aggugaaggaggcuccaggca

SEQ ID NO: 1952600 - RNA, 21 nt, Human
ugguguucaaaaaacuuguaa

SEQ ID NO: 1952601 - RNA, 22 nt, Human
ugguguucaaaaaacuuguaaa

SEQ ID NO: 1952602 - RNA, 15 nt, Human
ugguguguguaugcg

SEQ ID NO: 1952603 - RNA, 12 nt, Human
ugguggcagcug

SEQ ID NO: 1952604 - RNA, 20 nt, Human
ugguucacucuuggagccug

SEQ ID NO: 1952605 - RNA, 21 nt, Human
ugguucacucuuggagccugc

SEQ ID NO: 1952606 - RNA, 22 nt, Human
ugguucacucuuggagccugca

SEQ ID NO: 1952607 - RNA, 21 nt, Human
ugguucaaauguguuuugguc

SEQ ID NO: 1952608 - RNA, 20 nt, Human
ugguucaggguuggccccug

SEQ ID NO: 1952609 - RNA, 22 nt, Human
ugguucaggguuggccccugcc

SEQ ID NO: 1952610 - RNA, 23 nt, Human
ugguucaggguuggccccugccc

SEQ ID NO: 1952611 - RNA, 17 nt, Human
ugguucacucuuggagc

SEQ ID NO: 1952612 - RNA, 19 nt, Human
ugguguuuuggauuuggag

SEQ ID NO: 1952613 - RNA, 17 nt, Human
ugguguuuccuggcacu

SEQ ID NO: 1952614 - RNA, 15 nt, Human
ugguguuuccuggca

SEQ ID NO: 1952615 - RNA, 18 nt, Human
ugguguuuuggauuugga

SEQ ID NO: 1952616 - RNA, 13 nt, Human
ugguuucucuucu

SEQ ID NO: 1952617 - RNA, 14 nt, Human
ugguuucucuucuc

SEQ ID NO: 1952618 - RNA, 15 nt, Human
ugguuucucuucucc

SEQ ID NO: 1952619 - RNA, 19 nt, Human
ugguuucucuucuccccuu

SEQ ID NO: 1952620 - RNA, 22 nt, Human
ugguuuauuggugaguuaggaa

SEQ ID NO: 1952621 - RNA, 14 nt, Human
ugguuucagaaaug

SEQ ID NO: 1952622 - RNA, 15 nt, Human
ugguuucagaaaugu

SEQ ID NO: 1952623 - RNA, 21 nt, Human
ugguuuuaaaauacuguagau

SEQ ID NO: 1952624 - RNA, 12 nt, Human
ugguuuuaaaau

SEQ ID NO: 1952625 - RNA, 13 nt, Human
ugguuuuaaaaua

SEQ ID NO: 1952626 - RNA, 14 nt, Human
ugguuuuaaaauac

SEQ ID NO: 1952627 - RNA, 16 nt, Human
ugguuuuaaaauacug

SEQ ID NO: 1952628 - RNA, 21 nt, Human
ugguuuguaaauuaacuuuua

SEQ ID NO: 1952629 - RNA, 15 nt, Human
ugguuucuuuuugaa

SEQ ID NO: 1952630 - RNA, 23 nt, Human
ugguuugaaaauauuuucauuau

SEQ ID NO: 1952631 - RNA, 12 nt, Human
ugguuuucuguu

SEQ ID NO: 1952632 - RNA, 18 nt, Human
ugguuuuaguugcaacuu

SEQ ID NO: 1952633 - RNA, 12 nt, Human
ugguuuuaugau

SEQ ID NO: 1952634 - RNA, 15 nt, Human
ugguuuuaugaugac

SEQ ID NO: 1952635 - RNA, 21 nt, Human
aggugauccacccaccucagc

SEQ ID NO: 1952636 - RNA, 23 nt, Human
aggugauccacccaccucagccu

SEQ ID NO: 1952637 - RNA, 13 nt, Human
ugguuuucuguuc

SEQ ID NO: 1952638 - RNA, 15 nt, Human
ugguuuucuguucuu

SEQ ID NO: 1952639 - RNA, 15 nt, Human
uguaaagauuucugu

SEQ ID NO: 1952640 - RNA, 16 nt, Human
uguaaagauuucuguu

SEQ ID NO: 1952641 - RNA, 18 nt, Human
uguaaagauuucuguuca

SEQ ID NO: 1952642 - RNA, 19 nt, Human
uguaaagauuucuguucag

SEQ ID NO: 1952643 - RNA, 22 nt, Human
uguaagcucuacugaggugcua

SEQ ID NO: 1952644 - RNA, 15 nt, Human
uguaagaaauacaga

SEQ ID NO: 1952645 - RNA, 12 nt, Human
uguaagaaauac

SEQ ID NO: 1952646 - RNA, 17 nt, Human
uguaagaaauacagacu

SEQ ID NO: 1952647 - RNA, 18 nt, Human
uguaagaaauacuguaca

SEQ ID NO: 1952648 - RNA, 15 nt, Human
uguaaggaaugauua

SEQ ID NO: 1952649 - RNA, 14 nt, Human
uguaaggaaugauu

SEQ ID NO: 1952650 - RNA, 13 nt, Human
uguaaggaaugau

SEQ ID NO: 1952651 - RNA, 15 nt, Human
aggugugaggcagga

SEQ ID NO: 1952652 - RNA, 17 nt, Human
aggugugaggcaggaga

SEQ ID NO: 1952653 - RNA, 16 nt, Human
agguugucugaaguca

SEQ ID NO: 1952654 - RNA, 20 nt, Human
agguugucugaagucacugc

SEQ ID NO: 1952655 - RNA, 17 nt, Human
agguugucacugagaag

SEQ ID NO: 1952656 - RNA, 16 nt, Human
agguggggcagcuuga

SEQ ID NO: 1952657 - RNA, 15 nt, Human
aggugggugucugcg

SEQ ID NO: 1952658 - RNA, 23 nt, Human
agguggggucacucuggcagcuc

SEQ ID NO: 1952659 - RNA, 14 nt, Human
agguggggcagcuu

SEQ ID NO: 1952660 - RNA, 16 nt, Human
aggugauuaacuugga

SEQ ID NO: 1952661 - RNA, 22 nt, Human
aggugaucugcugcagagcagu

SEQ ID NO: 1952662 - RNA, 16 nt, Human
aggugaugaagacagc

SEQ ID NO: 1952663 - RNA, 22 nt, Human
aggugauccacucgccuucauc

SEQ ID NO: 1952664 - RNA, 13 nt, Human
agguggggcagcu

SEQ ID NO: 1952665 - RNA, 18 nt, Human
aggugugacugaauuucu

SEQ ID NO: 1952666 - RNA, 23 nt, Human
aggugugaaccaccacacccagc

SEQ ID NO: 1952667 - RNA, 22 nt, Human
aggugugaaccaccacacccag

SEQ ID NO: 1952668 - RNA, 20 nt, Human
aggugugacugaauuucuuu

SEQ ID NO: 1952669 - RNA, 20 nt, Human
aggugugagccaccacgccc

SEQ ID NO: 1952670 - RNA, 14 nt, Human
aggugugagucacc

SEQ ID NO: 1952671 - RNA, 20 nt, Human
aggugugagucaccaagccc

SEQ ID NO: 1952672 - RNA, 21 nt, Human
uguacauauuagcgacaacag

SEQ ID NO: 1952673 - RNA, 22 nt, Human
uguacauauuagcgacaacaga

SEQ ID NO: 1952674 - RNA, 23 nt, Human
uguacaaaguagaagucuuagau

SEQ ID NO: 1952675 - RNA, 19 nt, Human
uguacaaaguagaagucuu

SEQ ID NO: 1952676 - RNA, 14 nt, Human
uguacauauaagug

SEQ ID NO: 1952677 - RNA, 14 nt, Human
uguaaggcaugaag

SEQ ID NO: 1952678 - RNA, 15 nt, Human
uguaaggcaugaagg

SEQ ID NO: 1952679 - RNA, 17 nt, Human
uguaauuugugauacaa

SEQ ID NO: 1952680 - RNA, 21 nt, Human
uguaauuugugauacaaugcu

SEQ ID NO: 1952681 - RNA, 18 nt, Human
uguaaggaaugauuaauu

SEQ ID NO: 1952682 - RNA, 23 nt, Human
uguaagcuguuugguuuuaaaau

SEQ ID NO: 1952683 - RNA, 16 nt, Human
uguaauuugugauaca

SEQ ID NO: 1952684 - RNA, 15 nt, Human
uguaaggcaaucaug

SEQ ID NO: 1952685 - RNA, 21 nt, Human
uguagaagucacauuccugaa

SEQ ID NO: 1952686 - RNA, 15 nt, Human
uguacuugcucuuga

SEQ ID NO: 1952687 - RNA, 17 nt, Human
uguacaugaaaacacau

SEQ ID NO: 1952688 - RNA, 18 nt, Human
uguacaugaaaacacauu

SEQ ID NO: 1952689 - RNA, 19 nt, Human
uguacaugaaaacacauuu

SEQ ID NO: 1952690 - RNA, 20 nt, Human
uguacaugaaaacacauuuu

SEQ ID NO: 1952691 - RNA, 19 nt, Human
uguacauuucuaagucaaa

SEQ ID NO: 1952692 - RNA, 12 nt, Human
uguacauuucua

SEQ ID NO: 1952693 - RNA, 15 nt, Human
uguacauuucuaagu

SEQ ID NO: 1952694 - RNA, 13 nt, Human
agucuuaagaacu

SEQ ID NO: 1952695 - RNA, 12 nt, Human
agucucugugag

SEQ ID NO: 1952696 - RNA, 19 nt, Human
agucuuagaucauaguuuu

SEQ ID NO: 1952697 - RNA, 20 nt, Human
agucuuagaucauaguuuua

SEQ ID NO: 1952698 - RNA, 13 nt, Human
agucuuagaucau

SEQ ID NO: 1952699 - RNA, 18 nt, Human
agucuuagaucauaguuu

SEQ ID NO: 1952700 - RNA, 14 nt, Human
agucuucuauuuau

SEQ ID NO: 1952701 - RNA, 23 nt, Human
agugaaaaaggaggaagagaaaa

SEQ ID NO: 1952702 - RNA, 20 nt, Human
agugaaaaaggaggaagaga

SEQ ID NO: 1952703 - RNA, 17 nt, Human
agugaaaaaggaggaag

SEQ ID NO: 1952704 - RNA, 11 nt, Human
agugaaaaagg

SEQ ID NO: 1952705 - RNA, 19 nt, Human
agucuuuuaaaaaguauug

SEQ ID NO: 1952706 - RNA, 20 nt, Human
agucuuuuaaaaaguauugc

SEQ ID NO: 1952707 - RNA, 21 nt, Human
agucuuagaucauaguuuuau

SEQ ID NO: 1952708 - RNA, 13 nt, Human
agucuuuuaaaaa

SEQ ID NO: 1952709 - RNA, 18 nt, Human
agucuuuuaaaaaguauu

SEQ ID NO: 1952710 - RNA, 19 nt, Human
ugugagcacaaagguagcu

SEQ ID NO: 1952711 - RNA, 22 nt, Human
ugugagaugcuagaacucccuu

SEQ ID NO: 1952712 - RNA, 14 nt, Human
ugugaacugaacuc

SEQ ID NO: 1952713 - RNA, 23 nt, Human
ugugaacugaacucugacaacag

SEQ ID NO: 1952714 - RNA, 23 nt, Human
agucucccccacccuuguuccag

SEQ ID NO: 1952715 - RNA, 15 nt, Human
ugugagcagcaccca

SEQ ID NO: 1952716 - RNA, 19 nt, Human
agucuccaaagucucugga

SEQ ID NO: 1952717 - RNA, 14 nt, Human
agucucccucccuu

SEQ ID NO: 1952718 - RNA, 18 nt, Human
agucucccucccuugggg

SEQ ID NO: 1952719 - RNA, 22 nt, Human
agugagacucugucucaaaaaa

SEQ ID NO: 1952720 - RNA, 16 nt, Human
agugagacucugucuc

SEQ ID NO: 1952721 - RNA, 17 nt, Human
agugagacucugucuca

SEQ ID NO: 1952722 - RNA, 13 nt, Human
agugagacagacu

SEQ ID NO: 1952723 - RNA, 17 nt, Human
agugagacccugucuca

SEQ ID NO: 1952724 - RNA, 21 nt, Human
agugagacccugucucaaaaa

SEQ ID NO: 1952725 - RNA, 13 nt, Human
agugagacucugu

SEQ ID NO: 1952726 - RNA, 17 nt, Human
agucuuuuuuuuuuaag

SEQ ID NO: 1952727 - RNA, 18 nt, Human
agucuuuuuuuuuuaagu

SEQ ID NO: 1952728 - RNA, 20 nt, Human
agugaaaaauguuaggacau

SEQ ID NO: 1952729 - RNA, 15 nt, Human
agugaaaacuuugua

SEQ ID NO: 1952730 - RNA, 16 nt, Human
agugaaaacuuuguag

SEQ ID NO: 1952731 - RNA, 14 nt, Human
agugaaaauauagc

SEQ ID NO: 1952732 - RNA, 18 nt, Human
agugaaacaucauagaaa

SEQ ID NO: 1952733 - RNA, 14 nt, Human
agugagacagcucu

SEQ ID NO: 1952734 - RNA, 17 nt, Human
agugaaagaaaauaaca

SEQ ID NO: 1952735 - RNA, 19 nt, Human
ugugaugugacauuuguca

SEQ ID NO: 1952736 - RNA, 11 nt, Human
ugugauguguc

SEQ ID NO: 1952737 - RNA, 15 nt, Human
ugugaugugacauuu

SEQ ID NO: 1952738 - RNA, 16 nt, Human
ugugaugugacauuug

SEQ ID NO: 1952739 - RNA, 17 nt, Human
ugugaugugacauuugu

SEQ ID NO: 1952740 - RNA, 18 nt, Human
ugugaugugacauuuguc

SEQ ID NO: 1952741 - RNA, 18 nt, Human
ugugauggggcccugccu

SEQ ID NO: 1952742 - RNA, 17 nt, Human
ugugauggggcccugcc

SEQ ID NO: 1952743 - RNA, 14 nt, Human
agugagagcugggu

SEQ ID NO: 1952744 - RNA, 12 nt, Human
agugagagcaga

SEQ ID NO: 1952745 - RNA, 14 nt, Human
agugagagcagaug

SEQ ID NO: 1952746 - RNA, 16 nt, Human
ugugauggggcccugc

SEQ ID NO: 1952747 - RNA, 15 nt, Human
ugugauggggcccug

SEQ ID NO: 1952748 - RNA, 16 nt, Human
agugagccgagauugu

SEQ ID NO: 1952749 - RNA, 13 nt, Human
ugucucuucuccu

SEQ ID NO: 1952750 - RNA, 14 nt, Human
ugucucuucuccuu

SEQ ID NO: 1952751 - RNA, 12 nt, Human
ugucucuucugg

SEQ ID NO: 1952752 - RNA, 21 nt, Human
ugucucuugguccugcugcag

SEQ ID NO: 1952753 - RNA, 20 nt, Human
ugucucuugguccugcugca

SEQ ID NO: 1952754 - RNA, 19 nt, Human
ugucucuugguccugcugc

SEQ ID NO: 1952755 - RNA, 18 nt, Human
ugucucuugguccugcug

SEQ ID NO: 1952756 - RNA, 16 nt, Human
ugucucuuuuuuaagu

SEQ ID NO: 1952757 - RNA, 17 nt, Human
ugucucuuuuuuaaguu

SEQ ID NO: 1952758 - RNA, 22 nt, Human
ugucucuuuaaugucacaggca

SEQ ID NO: 1952759 - RNA, 22 nt, Human
ugucucuugguccugcugcagu

SEQ ID NO: 1952760 - RNA, 21 nt, Human
ugucucuuuaaugucacaggc

SEQ ID NO: 1952761 - RNA, 18 nt, Human
ugucuuaauuuucuuuca

SEQ ID NO: 1952762 - RNA, 14 nt, Human
ugucuuauugacag

SEQ ID NO: 1952763 - RNA, 17 nt, Human
ugucucuacuaaaaaua

SEQ ID NO: 1952764 - RNA, 19 nt, Human
ugucucggaaccugugagc

SEQ ID NO: 1952765 - RNA, 13 nt, Human
ugucucugagagu

SEQ ID NO: 1952766 - RNA, 22 nt, Human
ugucucuggauuauauuaugaa

SEQ ID NO: 1952767 - RNA, 21 nt, Human
ugucuccucuauccugggcuu

SEQ ID NO: 1952768 - RNA, 17 nt, Human
ugucuccucuucuuugu

SEQ ID NO: 1952769 - RNA, 17 nt, Human
ugucuccuacugaggau

SEQ ID NO: 1952770 - RNA, 16 nt, Human
agucccugccaaugga

SEQ ID NO: 1952771 - RNA, 14 nt, Human
agucccugccaaug

SEQ ID NO: 1952772 - RNA, 13 nt, Human
agucccugccaau

SEQ ID NO: 1952773 - RNA, 23 nt, Human
aguccccuguuuguuucugaaag

SEQ ID NO: 1952774 - RNA, 15 nt, Human
ugucuugcaauggca

SEQ ID NO: 1952775 - RNA, 11 nt, Human
ugucuucugcu

SEQ ID NO: 1952776 - RNA, 13 nt, Human
ugucuucugcuuu

SEQ ID NO: 1952777 - RNA, 14 nt, Human
ugucuucugcuuug

SEQ ID NO: 1952778 - RNA, 15 nt, Human
ugucuucugcuuugu

SEQ ID NO: 1952779 - RNA, 23 nt, Human
ugucuucugcuuuguugugugcc

SEQ ID NO: 1952780 - RNA, 17 nt, Human
ugucuugcaauggcagc

SEQ ID NO: 1952781 - RNA, 18 nt, Human
ugucuugcaauggcagcc

SEQ ID NO: 1952782 - RNA, 20 nt, Human
ugucuugcaauggcagccuu

SEQ ID NO: 1952783 - RNA, 21 nt, Human
ugucuugcaauggcagccuug

SEQ ID NO: 1952784 - RNA, 19 nt, Human
ugucuuauugacaguugug

SEQ ID NO: 1952785 - RNA, 22 nt, Human
ugucuuccuaucaaaaagauau

SEQ ID NO: 1952786 - RNA, 16 nt, Human
ugucuuccuauuucag

SEQ ID NO: 1952787 - RNA, 17 nt, Human
ugucuuccuauuucaga

SEQ ID NO: 1952788 - RNA, 19 nt, Human
ugucuuccuauuucagaag

SEQ ID NO: 1952789 - RNA, 20 nt, Human
ugucuuccuauuucagaagu

SEQ ID NO: 1952790 - RNA, 21 nt, Human
ugucuuuccacuccuccuagc

SEQ ID NO: 1952791 - RNA, 14 nt, Human
ugugaacuauguuu

SEQ ID NO: 1952792 - RNA, 16 nt, Human
ugugaaccaccacacc

SEQ ID NO: 1952793 - RNA, 17 nt, Human
ugugaaccaccacaccc

SEQ ID NO: 1952794 - RNA, 22 nt, Human
ugugaaccaccacacccagccc

SEQ ID NO: 1952795 - RNA, 23 nt, Human
ugugaaccaccacacccagccca

SEQ ID NO: 1952796 - RNA, 22 nt, Human
ugugaacaguuguguuugaagc

SEQ ID NO: 1952797 - RNA, 15 nt, Human
ugugaaccaccacac

SEQ ID NO: 1952798 - RNA, 14 nt, Human
ugucuugcugucau

SEQ ID NO: 1952799 - RNA, 13 nt, Human
aguagcugggacu

SEQ ID NO: 1952800 - RNA, 14 nt, Human
aguagcugggacua

SEQ ID NO: 1952801 - RNA, 14 nt, Human
aguagcucugccuu

SEQ ID NO: 1952802 - RNA, 22 nt, Human
aguagcucugccuuugcucugg

SEQ ID NO: 1952803 - RNA, 20 nt, Human
ugucaaccccaaguuaguuc

SEQ ID NO: 1952804 - RNA, 19 nt, Human
ugucaaauauuuagaugua

SEQ ID NO: 1952805 - RNA, 19 nt, Human
ugucaaaguggugagaggc

SEQ ID NO: 1952806 - RNA, 16 nt, Human
ugucaaaguggugaga

SEQ ID NO: 1952807 - RNA, 15 nt, Human
ugucaaaguggugag

SEQ ID NO: 1952808 - RNA, 14 nt, Human
ugucaaagugguga

SEQ ID NO: 1952809 - RNA, 11 nt, Human
uguauuaugug

SEQ ID NO: 1952810 - RNA, 17 nt, Human
uguauuauauguaacua

SEQ ID NO: 1952811 - RNA, 19 nt, Human
uguauuauacuuagucaaa

SEQ ID NO: 1952812 - RNA, 15 nt, Human
uguauuagucacaga

SEQ ID NO: 1952813 - RNA, 21 nt, Human
uguaugugggggucugugugu

SEQ ID NO: 1952814 - RNA, 22 nt, Human
uguaugugggggucuguguguu

SEQ ID NO: 1952815 - RNA, 14 nt, Human
uguauguguaagua

SEQ ID NO: 1952816 - RNA, 15 nt, Human
uguaucccaugagcc

SEQ ID NO: 1952817 - RNA, 16 nt, Human
uguaucccaugagccu

SEQ ID NO: 1952818 - RNA, 21 nt, Human
uguauuaacacuacucaaagc

SEQ ID NO: 1952819 - RNA, 22 nt, Human
uguauuaacacuacucaaagca

SEQ ID NO: 1952820 - RNA, 14 nt, Human
uguauuaaauuaca

SEQ ID NO: 1952821 - RNA, 17 nt, Human
uguauuaaauuacauuu

SEQ ID NO: 1952822 - RNA, 18 nt, Human
uguauuaaauuacauuug

SEQ ID NO: 1952823 - RNA, 19 nt, Human
uguauuaaauuacauuugu

SEQ ID NO: 1952824 - RNA, 21 nt, Human
uguauuaaauuacauuuguaa

SEQ ID NO: 1952825 - RNA, 23 nt, Human
uguauuaaauuacauuuguaauu

SEQ ID NO: 1952826 - RNA, 16 nt, Human
agguuugggaccccug

SEQ ID NO: 1952827 - RNA, 14 nt, Human
agguuuggcuccug

SEQ ID NO: 1952828 - RNA, 16 nt, Human
agguuuggcuccugcc

SEQ ID NO: 1952829 - RNA, 18 nt, Human
agguuuggcuccugccca

SEQ ID NO: 1952830 - RNA, 20 nt, Human
agguuuggcuccugcccacu

SEQ ID NO: 1952831 - RNA, 21 nt, Human
agguuugggaccccugguggu

SEQ ID NO: 1952832 - RNA, 22 nt, Human
uguauccauccauggggcugau

SEQ ID NO: 1952833 - RNA, 23 nt, Human
agguuuggacaaaauggaauacu

SEQ ID NO: 1952834 - RNA, 12 nt, Human
agguuugaaucu

SEQ ID NO: 1952835 - RNA, 12 nt, Human
uguagagccagg

SEQ ID NO: 1952836 - RNA, 15 nt, Human
uguagagccaggguc

SEQ ID NO: 1952837 - RNA, 15 nt, Human
aguauuauaccuuuu

SEQ ID NO: 1952838 - RNA, 14 nt, Human
aguauuauaccuuu

SEQ ID NO: 1952839 - RNA, 13 nt, Human
aguauuauaaaca

SEQ ID NO: 1952840 - RNA, 14 nt, Human
aguauugccaaaca

SEQ ID NO: 1952841 - RNA, 15 nt, Human
aguauugccaaacau

SEQ ID NO: 1952842 - RNA, 16 nt, Human
aguauugccaaacauu

SEQ ID NO: 1952843 - RNA, 17 nt, Human
aguauugccaaacauua

SEQ ID NO: 1952844 - RNA, 18 nt, Human
aguauugccaaacauuaa

SEQ ID NO: 1952845 - RNA, 11 nt, Human
aguauuguaca

SEQ ID NO: 1952846 - RNA, 22 nt, Human
aguagcugggacuacaggcacc

SEQ ID NO: 1952847 - RNA, 19 nt, Human
aguagcugggacuacaggc

SEQ ID NO: 1952848 - RNA, 21 nt, Human
aguagcugggacuacaggcac

SEQ ID NO: 1952849 - RNA, 21 nt, Human
aguauuuaauucauguugccu

SEQ ID NO: 1952850 - RNA, 22 nt, Human
agucacagagauaauucuagcu

SEQ ID NO: 1952851 - RNA, 14 nt, Human
aguauuuaagccua

SEQ ID NO: 1952852 - RNA, 18 nt, Human
aguauuuaagccuaaaga

SEQ ID NO: 1952853 - RNA, 19 nt, Human
aguauuuaagccuaaagau

SEQ ID NO: 1952854 - RNA, 20 nt, Human
aguauuuaagccuaaagauu

SEQ ID NO: 1952855 - RNA, 22 nt, Human
aguauugccaaacauuaauguu

SEQ ID NO: 1952856 - RNA, 15 nt, Human
ugucagcauagaagu

SEQ ID NO: 1952857 - RNA, 17 nt, Human
agucacugagacagccc

SEQ ID NO: 1952858 - RNA, 16 nt, Human
agucacugagacagcc

SEQ ID NO: 1952859 - RNA, 15 nt, Human
agucacugagacagc

SEQ ID NO: 1952860 - RNA, 20 nt, Human
agucacauuccaagccucau

SEQ ID NO: 1952861 - RNA, 21 nt, Human
aguauuuaagccuaaagauuu

SEQ ID NO: 1952862 - RNA, 17 nt, Human
agucaucgaguggccca

SEQ ID NO: 1952863 - RNA, 15 nt, Human
agucagucauucaga

SEQ ID NO: 1952864 - RNA, 21 nt, Human
agucagucauucagauaugau

SEQ ID NO: 1952865 - RNA, 22 nt, Human
agucagucgccuuucagcaggc

SEQ ID NO: 1952866 - RNA, 23 nt, Human
agucagucgccuuucagcaggca

SEQ ID NO: 1952867 - RNA, 19 nt, Human
agucagggguucccuuuuu

SEQ ID NO: 1952868 - RNA, 19 nt, Human
ugucuaagaaacauuggaa

SEQ ID NO: 1952869 - RNA, 21 nt, Human
ugucuaagauuaauagcauuc

SEQ ID NO: 1952870 - RNA, 14 nt, Human
ugucuaagaaacau

SEQ ID NO: 1952871 - RNA, 15 nt, Human
ugucuaagaaacauu

SEQ ID NO: 1952872 - RNA, 16 nt, Human
ugucuaagaaacauug

SEQ ID NO: 1952873 - RNA, 14 nt, Human
agucccacuccaag

SEQ ID NO: 1952874 - RNA, 20 nt, Human
agucccaggcugagccucag

SEQ ID NO: 1952875 - RNA, 18 nt, Human
agucccacuccaagccag

SEQ ID NO: 1952876 - RNA, 19 nt, Human
agucccacuccaagccagc

SEQ ID NO: 1952877 - RNA, 13 nt, Human
aguccccagaacu

SEQ ID NO: 1952878 - RNA, 14 nt, Human
aguccccagaacuc

SEQ ID NO: 1952879 - RNA, 19 nt, Human
aguccccuguuuguuucug

SEQ ID NO: 1952880 - RNA, 14 nt, Human
aguccccuguuugu

SEQ ID NO: 1952881 - RNA, 21 nt, Human
agucccaccuuggcugcaggg

SEQ ID NO: 1952882 - RNA, 23 nt, Human
agucccaccuuggcugcagggag

SEQ ID NO: 1952883 - RNA, 20 nt, Human
agucccaccuuggcugcagg

SEQ ID NO: 1952884 - RNA, 16 nt, Human
ugucagccauuccugu

SEQ ID NO: 1952885 - RNA, 22 nt, Human
ugucagcgcucuggugcugcag

SEQ ID NO: 1952886 - RNA, 19 nt, Human
uguccaggcacugcugccc

SEQ ID NO: 1952887 - RNA, 20 nt, Human
uguccaggcacugcugccca

SEQ ID NO: 1952888 - RNA, 21 nt, Human
uguccaggcacugcugcccag

SEQ ID NO: 1952889 - RNA, 20 nt, Human
ugucccuaccgagucucuuc

SEQ ID NO: 1952890 - RNA, 21 nt, Human
ugucccuaccgagucucuucu

SEQ ID NO: 1952891 - RNA, 22 nt, Human
ugucccuaccgagucucuucuc

SEQ ID NO: 1952892 - RNA, 15 nt, Human
ugucccugaaaccua

SEQ ID NO: 1952893 - RNA, 14 nt, Human
ugucccugcacuug

SEQ ID NO: 1952894 - RNA, 12 nt, Human
ugucccuuucuu

SEQ ID NO: 1952895 - RNA, 14 nt, Human
ugucccuuucuucu

SEQ ID NO: 1952896 - RNA, 15 nt, Human
ugucccuuucuucuc

SEQ ID NO: 1952897 - RNA, 16 nt, Human
ugucccuuucuucucc

SEQ ID NO: 1952898 - RNA, 17 nt, Human
ugucccuuucuucuccc

SEQ ID NO: 1952899 - RNA, 12 nt, Human
ugucccuuuucc

SEQ ID NO: 1952900 - RNA, 21 nt, Human
uguccugugucaguuuauguu

SEQ ID NO: 1952901 - RNA, 19 nt, Human
uguccugugucaguuuaug

SEQ ID NO: 1952902 - RNA, 16 nt, Human
uguccugugucaguuu

SEQ ID NO: 1952903 - RNA, 17 nt, Human
uguccugugucaguuua

SEQ ID NO: 1952904 - RNA, 18 nt, Human
uguccugugucaguuuau

SEQ ID NO: 1952905 - RNA, 22 nt, Human
ugaaagaaaauaccaaggaaca

SEQ ID NO: 1952906 - RNA, 15 nt, Human
ugaaagaaaacuuuu

SEQ ID NO: 1952907 - RNA, 16 nt, Human
ugaaagacuguacaaa

SEQ ID NO: 1952908 - RNA, 18 nt, Human
ugaaagaaaacuuuuaug

SEQ ID NO: 1952909 - RNA, 17 nt, Human
ugaaagaggaaugaagu

SEQ ID NO: 1952910 - RNA, 22 nt, Human
ugaaagacuguacaaaguagaa

SEQ ID NO: 1952911 - RNA, 19 nt, Human
ugaaagacuguacaaagua

SEQ ID NO: 1952912 - RNA, 18 nt, Human
ugaaagacuguacaaagu

SEQ ID NO: 1952913 - RNA, 18 nt, Human
agagaccaucccugaagg

SEQ ID NO: 1952914 - RNA, 18 nt, Human
ugaaagaggaaugaagua

SEQ ID NO: 1952915 - RNA, 21 nt, Human
agagaccaucccugaaggccc

SEQ ID NO: 1952916 - RNA, 19 nt, Human
agagaccaucccugaaggc

SEQ ID NO: 1952917 - RNA, 23 nt, Human
agagaccaucccugaaggccccg

SEQ ID NO: 1952918 - RNA, 22 nt, Human
agagaccaucccugaaggcccc

SEQ ID NO: 1952919 - RNA, 22 nt, Human
agagauaggaaggucauuucca

SEQ ID NO: 1952920 - RNA, 23 nt, Human
agagauaggaaggucauuuccau

SEQ ID NO: 1952921 - RNA, 17 nt, Human
agagaguggcuccuccc

SEQ ID NO: 1952922 - RNA, 14 nt, Human
agagauacucuggg

SEQ ID NO: 1952923 - RNA, 20 nt, Human
agagauaggaaggucauuuc

SEQ ID NO: 1952924 - RNA, 14 nt, Human
agagacuccugcag

SEQ ID NO: 1952925 - RNA, 13 nt, Human
agagacuccugca

SEQ ID NO: 1952926 - RNA, 12 nt, Human
agagacuccugc

SEQ ID NO: 1952927 - RNA, 11 nt, Human
agagacuccug

SEQ ID NO: 1952928 - RNA, 14 nt, Human
ugaaaauaagccau

SEQ ID NO: 1952929 - RNA, 18 nt, Human
ugaaaauaagccaugaga

SEQ ID NO: 1952930 - RNA, 19 nt, Human
ugaaaauaagccaugagaa

SEQ ID NO: 1952931 - RNA, 20 nt, Human
ugaaaauaagccaugagaau

SEQ ID NO: 1952932 - RNA, 17 nt, Human
ugaaaauaaugcuguuc

SEQ ID NO: 1952933 - RNA, 12 nt, Human
ugaaaauaauug

SEQ ID NO: 1952934 - RNA, 15 nt, Human
ugaaaacacauuuuu

SEQ ID NO: 1952935 - RNA, 17 nt, Human
ugaaaacacauuuuucu

SEQ ID NO: 1952936 - RNA, 19 nt, Human
ugaaaacacauuuuucuua

SEQ ID NO: 1952937 - RNA, 20 nt, Human
ugaaaacacauuuuucuuag

SEQ ID NO: 1952938 - RNA, 14 nt, Human
ugaaaacacauuuu

SEQ ID NO: 1952939 - RNA, 12 nt, Human
ugaaaacacauu

SEQ ID NO: 1952940 - RNA, 13 nt, Human
ugaaaacacauuu

SEQ ID NO: 1952941 - RNA, 18 nt, Human
ugaaaaaaaaaaugcuga

SEQ ID NO: 1952942 - RNA, 19 nt, Human
ucuuuuuuuuuuaagugaa

SEQ ID NO: 1952943 - RNA, 23 nt, Human
ucuuuuuuuuuuaagugaaauuu

SEQ ID NO: 1952944 - RNA, 22 nt, Human
ugaaaaaaaaaaugcugaacau

SEQ ID NO: 1952945 - RNA, 20 nt, Human
ugaaaaaaaaaaugcugaac

SEQ ID NO: 1952946 - RNA, 21 nt, Human
ugaaaaaaaaaaugcugaaca

SEQ ID NO: 1952947 - RNA, 14 nt, Human
ucuuuuuuugugau

SEQ ID NO: 1952948 - RNA, 16 nt, Human
ucuuuuuuugugaugu

SEQ ID NO: 1952949 - RNA, 18 nt, Human
ugaaaauaguuuauuuua

SEQ ID NO: 1952950 - RNA, 14 nt, Human
ugaaaauuaacaug

SEQ ID NO: 1952951 - RNA, 17 nt, Human
ugaaacuggauuaaacu

SEQ ID NO: 1952952 - RNA, 18 nt, Human
ugaaacuggauuaaacuu

SEQ ID NO: 1952953 - RNA, 13 nt, Human
ugaaagaaaauaa

SEQ ID NO: 1952954 - RNA, 19 nt, Human
agagacacaagccuucggc

SEQ ID NO: 1952955 - RNA, 16 nt, Human
agagacacaagccuuc

SEQ ID NO: 1952956 - RNA, 19 nt, Human
agacuuuucuuucagccaa

SEQ ID NO: 1952957 - RNA, 15 nt, Human
agagacacaagccuu

SEQ ID NO: 1952958 - RNA, 19 nt, Human
agacuuuuccaauauguga

SEQ ID NO: 1952959 - RNA, 19 nt, Human
agacuuuggaaagaguagg

SEQ ID NO: 1952960 - RNA, 12 nt, Human
agacuuuuauga

SEQ ID NO: 1952961 - RNA, 15 nt, Human
agacuuuuccaaccc

SEQ ID NO: 1952962 - RNA, 15 nt, Human
agacuuuuaugauac

SEQ ID NO: 1952963 - RNA, 15 nt, Human
agacuuuggaaagag

SEQ ID NO: 1952964 - RNA, 17 nt, Human
agacuuuggaaagacuu

SEQ ID NO: 1952965 - RNA, 14 nt, Human
agacuguacaaagu

SEQ ID NO: 1952966 - RNA, 20 nt, Human
agacugguuccauggccucu

SEQ ID NO: 1952967 - RNA, 14 nt, Human
agagacagaaagca

SEQ ID NO: 1952968 - RNA, 15 nt, Human
agagacagaaagcag

SEQ ID NO: 1952969 - RNA, 21 nt, Human
agacuuuuccaauaugugauu

SEQ ID NO: 1952970 - RNA, 20 nt, Human
ucuuuguacagacaacaaac

SEQ ID NO: 1952971 - RNA, 15 nt, Human
ucuuuguacagacaa

SEQ ID NO: 1952972 - RNA, 14 nt, Human
ucuuuguacagaca

SEQ ID NO: 1952973 - RNA, 16 nt, Human
ucuuuguaaugaaaac

SEQ ID NO: 1952974 - RNA, 14 nt, Human
ucuuuguggcuucc

SEQ ID NO: 1952975 - RNA, 22 nt, Human
ucuuuuuucuaaaguaaaaaca

SEQ ID NO: 1952976 - RNA, 21 nt, Human
ucuuuuuucuaaaguaaaaac

SEQ ID NO: 1952977 - RNA, 16 nt, Human
ucuuuuuuucucuaga

SEQ ID NO: 1952978 - RNA, 12 nt, Human
agacuccaccaa

SEQ ID NO: 1952979 - RNA, 16 nt, Human
agacuccaccaagccu

SEQ ID NO: 1952980 - RNA, 16 nt, Human
ucuuucccuuccucca

SEQ ID NO: 1952981 - RNA, 17 nt, Human
ucuuucccuuccuccau

SEQ ID NO: 1952982 - RNA, 12 nt, Human
ucuuuccugagg

SEQ ID NO: 1952983 - RNA, 19 nt, Human
ucuuucuaaugugugaauc

SEQ ID NO: 1952984 - RNA, 17 nt, Human
ucuuuaaugauuccuau

SEQ ID NO: 1952985 - RNA, 18 nt, Human
ucuuuaaugauuccuaua

SEQ ID NO: 1952986 - RNA, 20 nt, Human
ucuuuaaugauuccuauaaa

SEQ ID NO: 1952987 - RNA, 15 nt, Human
ucuuucccuuccagu

SEQ ID NO: 1952988 - RNA, 16 nt, Human
ucuuucccuuccaguu

SEQ ID NO: 1952989 - RNA, 14 nt, Human
ucuuucccuuccuc

SEQ ID NO: 1952990 - RNA, 15 nt, Human
ucuuucccuuccucc

SEQ ID NO: 1952991 - RNA, 18 nt, Human
ucuuuaaugucacaggca

SEQ ID NO: 1952992 - RNA, 19 nt, Human
ucuuuaaugucacaggcag

SEQ ID NO: 1952993 - RNA, 20 nt, Human
agacaggcaagcaccuccug

SEQ ID NO: 1952994 - RNA, 19 nt, Human
agacagagcgacagagcag

SEQ ID NO: 1952995 - RNA, 14 nt, Human
agacaggaccccug

SEQ ID NO: 1952996 - RNA, 15 nt, Human
agacaggaccccugc

SEQ ID NO: 1952997 - RNA, 22 nt, Human
agacaggaccccugcaguuccc

SEQ ID NO: 1952998 - RNA, 22 nt, Human
agacaggcaagcaccuccugcc

SEQ ID NO: 1952999 - RNA, 18 nt, Human
agacaggagaagaaagaa

SEQ ID NO: 1953000 - RNA, 21 nt, Human
agacaggagaagaaagaacua

SEQ ID NO: 1953001 - RNA, 15 nt, Human
ucuuuaaugucacag

SEQ ID NO: 1953002 - RNA, 20 nt, Human
agacuggccugaaccacagg

SEQ ID NO: 1953003 - RNA, 13 nt, Human
agacucucucugg

SEQ ID NO: 1953004 - RNA, 15 nt, Human
agacucuagggucca

SEQ ID NO: 1953005 - RNA, 16 nt, Human
agacucccaagcugga

SEQ ID NO: 1953006 - RNA, 21 nt, Human
agacuccagcuggguuggaaa

SEQ ID NO: 1953007 - RNA, 22 nt, Human
agacuccagaaaugucccuuuc

SEQ ID NO: 1953008 - RNA, 13 nt, Human
agacuccugcagg

SEQ ID NO: 1953009 - RNA, 23 nt, Human
agaggccuccuguggccugccag

SEQ ID NO: 1953010 - RNA, 18 nt, Human
agaggccgagagcuaugg

SEQ ID NO: 1953011 - RNA, 18 nt, Human
agaggccacauuacuaga

SEQ ID NO: 1953012 - RNA, 16 nt, Human
agaggccaaacaggcc

SEQ ID NO: 1953013 - RNA, 19 nt, Human
agaggccaaacaggcccuc

SEQ ID NO: 1953014 - RNA, 18 nt, Human
agaggcaguugcccagcc

SEQ ID NO: 1953015 - RNA, 22 nt, Human
agaggcaguugcccagccucuu

SEQ ID NO: 1953016 - RNA, 21 nt, Human
agaggcaugggcuugcugugg

SEQ ID NO: 1953017 - RNA, 21 nt, Human
agaggcagccccauucugccu

SEQ ID NO: 1953018 - RNA, 22 nt, Human
agaggcagccccauucugccug

SEQ ID NO: 1953019 - RNA, 21 nt, Human
agaggcagggucucacucugu

SEQ ID NO: 1953020 - RNA, 23 nt, Human
agaggcagccccauucugccugc

SEQ ID NO: 1953021 - RNA, 22 nt, Human
agagcugugggcaaaagagugu

SEQ ID NO: 1953022 - RNA, 16 nt, Human
agaggcugcagccagg

SEQ ID NO: 1953023 - RNA, 22 nt, Human
agaggcugccucucccaucacu

SEQ ID NO: 1953024 - RNA, 13 nt, Human
agagguucaaaga

SEQ ID NO: 1953025 - RNA, 20 nt, Human
agagggagugacagaggcag

SEQ ID NO: 1953026 - RNA, 15 nt, Human
agagggagguaagga

SEQ ID NO: 1953027 - RNA, 15 nt, Human
agagggagugacaga

SEQ ID NO: 1953028 - RNA, 16 nt, Human
agagguucaaagauau

SEQ ID NO: 1953029 - RNA, 19 nt, Human
agagguucaaagauauuuu

SEQ ID NO: 1953030 - RNA, 20 nt, Human
agagguucaaagauauuuug

SEQ ID NO: 1953031 - RNA, 18 nt, Human
agaguaauccaagcaaau

SEQ ID NO: 1953032 - RNA, 20 nt, Human
agaguaauccaagcaaaugu

SEQ ID NO: 1953033 - RNA, 13 nt, Human
ugaagauuguuua

SEQ ID NO: 1953034 - RNA, 16 nt, Human
ugaagauuguuuaucu

SEQ ID NO: 1953035 - RNA, 13 nt, Human
ugaagguuuuuga

SEQ ID NO: 1953036 - RNA, 14 nt, Human
ugaagguuuuugau

SEQ ID NO: 1953037 - RNA, 18 nt, Human
ugaagguuuuugauagca

SEQ ID NO: 1953038 - RNA, 19 nt, Human
ugaagguuuuugauagcau

SEQ ID NO: 1953039 - RNA, 13 nt, Human
ugaagguuuuugu

SEQ ID NO: 1953040 - RNA, 15 nt, Human
ugaagguuuuuguaa

SEQ ID NO: 1953041 - RNA, 16 nt, Human
ugaagguuuuuguaaa

SEQ ID NO: 1953042 - RNA, 22 nt, Human
ugaagauuguuuaucuagaugu

SEQ ID NO: 1953043 - RNA, 24 nt, Human
ugaagauuguuuaucuagauguaa

SEQ ID NO: 1953044 - RNA, 15 nt, Human
ugaaguaauaugcac

SEQ ID NO: 1953045 - RNA, 13 nt, Human
ugaaguaagcaaa

SEQ ID NO: 1953046 - RNA, 14 nt, Human
ugaaguaagcaaag

SEQ ID NO: 1953047 - RNA, 17 nt, Human
ugaagguuuuuguaaag

SEQ ID NO: 1953048 - RNA, 18 nt, Human
ugaagguuuuuguaaaga

SEQ ID NO: 1953049 - RNA, 19 nt, Human
ugaagguuuuuguaaagau

SEQ ID NO: 1953050 - RNA, 21 nt, Human
ugaagguuuuuguaaagauuu

SEQ ID NO: 1953051 - RNA, 16 nt, Human
ugaaguaauaugcaca

SEQ ID NO: 1953052 - RNA, 20 nt, Human
ugaaguaauaugcacacauu

SEQ ID NO: 1953053 - RNA, 21 nt, Human
ugaaguaauaugcacacauuu

SEQ ID NO: 1953054 - RNA, 22 nt, Human
ugaaguaauaugcacacauuuu

SEQ ID NO: 1953055 - RNA, 18 nt, Human
ugaauauuuaguguucau

SEQ ID NO: 1953056 - RNA, 13 nt, Human
ugaauaauacagu

SEQ ID NO: 1953057 - RNA, 17 nt, Human
ugaauaagccauucuga

SEQ ID NO: 1953058 - RNA, 22 nt, Human
ugaauaagccauucugacucau

SEQ ID NO: 1953059 - RNA, 13 nt, Human
ugaauaaugauuu

SEQ ID NO: 1953060 - RNA, 23 nt, Human
ugaauaauguaagacaaauaugu

SEQ ID NO: 1953061 - RNA, 13 nt, Human
ugaauaauuacag

SEQ ID NO: 1953062 - RNA, 17 nt, Human
ugaauaauuacagugcc

SEQ ID NO: 1953063 - RNA, 18 nt, Human
ugaauaauuacagugccu

SEQ ID NO: 1953064 - RNA, 12 nt, Human
ugaauaauacag

SEQ ID NO: 1953065 - RNA, 23 nt, Human
ugaauaacugauuaguaagucuu

SEQ ID NO: 1953066 - RNA, 12 nt, Human
ugaauaagcacu

SEQ ID NO: 1953067 - RNA, 13 nt, Human
ugaauaagcacuu

SEQ ID NO: 1953068 - RNA, 15 nt, Human
ugaauaagcacuuuu

SEQ ID NO: 1953069 - RNA, 13 nt, Human
ugaagucacacag

SEQ ID NO: 1953070 - RNA, 17 nt, Human
ugaaguacucauacaug

SEQ ID NO: 1953071 - RNA, 15 nt, Human
ugaaguaagcaaaga

SEQ ID NO: 1953072 - RNA, 21 nt, Human
ugaaauuuuucauauuuuaau

SEQ ID NO: 1953073 - RNA, 16 nt, Human
ugaaauuuuucauauu

SEQ ID NO: 1953074 - RNA, 17 nt, Human
ugaaauuuuucauauuu

SEQ ID NO: 1953075 - RNA, 18 nt, Human
ugaaauuuuucauauuuu

SEQ ID NO: 1953076 - RNA, 20 nt, Human
ugaaauuuuucauauuuuaa

SEQ ID NO: 1953077 - RNA, 23 nt, Human
ugaaauuuuuuuucaugcuuuau

SEQ ID NO: 1953078 - RNA, 14 nt, Human
ugaacaaaauaaau

SEQ ID NO: 1953079 - RNA, 16 nt, Human
ugaacaaaauaaauug

SEQ ID NO: 1953080 - RNA, 18 nt, Human
ugaacaaaauaaauugga

SEQ ID NO: 1953081 - RNA, 15 nt, Human
ugaacaaagaccaau

SEQ ID NO: 1953082 - RNA, 19 nt, Human
ugaacaaagaccaauuuuu

SEQ ID NO: 1953083 - RNA, 15 nt, Human
ugaaauuuccuggga

SEQ ID NO: 1953084 - RNA, 19 nt, Human
ugaaauuuuuauuaaauua

SEQ ID NO: 1953085 - RNA, 21 nt, Human
ugaaauuuccugggagcuuuu

SEQ ID NO: 1953086 - RNA, 12 nt, Human
ugaaauuuuuca

SEQ ID NO: 1953087 - RNA, 13 nt, Human
ugaaauuuuucau

SEQ ID NO: 1953088 - RNA, 14 nt, Human
ugaaauuuuucaua

SEQ ID NO: 1953089 - RNA, 20 nt, Human
ugaaauuuuuauuaaauuau

SEQ ID NO: 1953090 - RNA, 23 nt, Human
ugaaauagacccacaagaggcag

SEQ ID NO: 1953091 - RNA, 16 nt, Human
ugaaauugaaaaguua

SEQ ID NO: 1953092 - RNA, 18 nt, Human
ugaaauugaaaaguuauu

SEQ ID NO: 1953093 - RNA, 23 nt, Human
ugaaauuuauugaggaaaaauau

SEQ ID NO: 1953094 - RNA, 13 nt, Human
ugaaauuuauuga

SEQ ID NO: 1953095 - RNA, 15 nt, Human
ugaaauuuauugagg

SEQ ID NO: 1953096 - RNA, 17 nt, Human
ugaaauuuauugaggaa

SEQ ID NO: 1953097 - RNA, 22 nt, Human
ugaaauuuauugaggaaaaaua

SEQ ID NO: 1953098 - RNA, 14 nt, Human
ugaaauaagccaga

SEQ ID NO: 1953099 - RNA, 21 nt, Human
ugaaauaaagacccaggggga

SEQ ID NO: 1953100 - RNA, 17 nt, Human
ugaaauaacacagcagu

SEQ ID NO: 1953101 - RNA, 16 nt, Human
ugaaauaccauuauua

SEQ ID NO: 1953102 - RNA, 13 nt, Human
ugaaauaaacguc

SEQ ID NO: 1953103 - RNA, 18 nt, Human
ugaaauaaacgucuuaaa

SEQ ID NO: 1953104 - RNA, 22 nt, Human
ugaaauaaacgucuuaaauauu

SEQ ID NO: 1953105 - RNA, 23 nt, Human
ugaaauaaacgucuuaaauauuc

SEQ ID NO: 1953106 - RNA, 16 nt, Human
ugaaauaacauggccu

SEQ ID NO: 1953107 - RNA, 17 nt, Human
ugaaauaacauggccuu

SEQ ID NO: 1953108 - RNA, 14 nt, Human
ugaaauaaaagcua

SEQ ID NO: 1953109 - RNA, 16 nt, Human
agagauugugguuuca

SEQ ID NO: 1953110 - RNA, 13 nt, Human
ugaacaaauuuac

SEQ ID NO: 1953111 - RNA, 21 nt, Human
ugaaccaccacacccagccca

SEQ ID NO: 1953112 - RNA, 22 nt, Human
ugaaccaccacacccagcccac

SEQ ID NO: 1953113 - RNA, 18 nt, Human
ugaaccauaaaaugucca

SEQ ID NO: 1953114 - RNA, 18 nt, Human
ugaaccauaguuacugua

SEQ ID NO: 1953115 - RNA, 19 nt, Human
ugaaccauaguuacuguaa

SEQ ID NO: 1953116 - RNA, 13 nt, Human
ugaaccacuugua

SEQ ID NO: 1953117 - RNA, 14 nt, Human
ugaaccacuuguag

SEQ ID NO: 1953118 - RNA, 15 nt, Human
ugaaccacuuguaga

SEQ ID NO: 1953119 - RNA, 16 nt, Human
ugaaccacuuguagau

SEQ ID NO: 1953120 - RNA, 20 nt, Human
ugaaccacuuguagauuuga

SEQ ID NO: 1953121 - RNA, 21 nt, Human
ugaaccacuuguagauuugau

SEQ ID NO: 1953122 - RNA, 23 nt, Human
ugaaccacuuguagauuugauuu

SEQ ID NO: 1953123 - RNA, 18 nt, Human
ugaaccagaaccagucuu

SEQ ID NO: 1953124 - RNA, 13 nt, Human
ugaaccauaaaau

SEQ ID NO: 1953125 - RNA, 15 nt, Human
ugaaccauaaaaugu

SEQ ID NO: 1953126 - RNA, 16 nt, Human
ugaaccauaaaauguc

SEQ ID NO: 1953127 - RNA, 22 nt, Human
ugaacccauauuuguacaccaa

SEQ ID NO: 1953128 - RNA, 18 nt, Human
ugaacccgggaggcagag

SEQ ID NO: 1953129 - RNA, 21 nt, Human
ugaacguuugguucaaaugug

SEQ ID NO: 1953130 - RNA, 17 nt, Human
ugaacguuugguucaaa

SEQ ID NO: 1953131 - RNA, 19 nt, Human
ugaacguuugguucaaaug

SEQ ID NO: 1953132 - RNA, 20 nt, Human
ugaacguuugguucaaaugu

SEQ ID NO: 1953133 - RNA, 11 nt, Human
ugaacuccugg

SEQ ID NO: 1953134 - RNA, 15 nt, Human
ugaacuccugaccuc

SEQ ID NO: 1953135 - RNA, 22 nt, Human
ugaagacaaugacuuacuguac

SEQ ID NO: 1953136 - RNA, 23 nt, Human
ugaagacaaugacuuacuguaca

SEQ ID NO: 1953137 - RNA, 13 nt, Human
ugaagacagagcu

SEQ ID NO: 1953138 - RNA, 16 nt, Human
ugaagaauuuaaagaa

SEQ ID NO: 1953139 - RNA, 11 nt, Human
ugaagaauuua

SEQ ID NO: 1953140 - RNA, 13 nt, Human
ugaagaauuuaaa

SEQ ID NO: 1953141 - RNA, 15 nt, Human
ugaagaauuuaaaga

SEQ ID NO: 1953142 - RNA, 14 nt, Human
ugagauguguucac

SEQ ID NO: 1953143 - RNA, 20 nt, Human
ugagaugguaugcacaauuc

SEQ ID NO: 1953144 - RNA, 22 nt, Human
ugagaugguaugcacaauucca

SEQ ID NO: 1953145 - RNA, 23 nt, Human
ugagauguagccccucuccugga

SEQ ID NO: 1953146 - RNA, 17 nt, Human
ugagaggaaaucaccga

SEQ ID NO: 1953147 - RNA, 23 nt, Human
ugagaggacuuuucuuuguggcu

SEQ ID NO: 1953148 - RNA, 16 nt, Human
ugagaggacacucccg

SEQ ID NO: 1953149 - RNA, 14 nt, Human
ugagaggaaaucac

SEQ ID NO: 1953150 - RNA, 13 nt, Human
ugagaggaaauca

SEQ ID NO: 1953151 - RNA, 12 nt, Human
ugagaggaaauc

SEQ ID NO: 1953152 - RNA, 11 nt, Human
ugagaggaaau

SEQ ID NO: 1953153 - RNA, 17 nt, Human
ugagagcugugcaucag

SEQ ID NO: 1953154 - RNA, 10 nt, Human
ugagaggaaa

SEQ ID NO: 1953155 - RNA, 14 nt, Human
ugagagcugggugu

SEQ ID NO: 1953156 - RNA, 20 nt, Human
ugagagaggcuaaaauguuu

SEQ ID NO: 1953157 - RNA, 21 nt, Human
ugagagaggcuaaaauguuuu

SEQ ID NO: 1953158 - RNA, 22 nt, Human
ugagagagauguguaauuuuuc

SEQ ID NO: 1953159 - RNA, 18 nt, Human
ugagagaggcuaaaaugu

SEQ ID NO: 1953160 - RNA, 19 nt, Human
ugagagaggcuaaaauguu

SEQ ID NO: 1953161 - RNA, 14 nt, Human
ugagagagaugugu

SEQ ID NO: 1953162 - RNA, 16 nt, Human
ugagagagauguguaa

SEQ ID NO: 1953163 - RNA, 15 nt, Human
ugagacagcagucuu

SEQ ID NO: 1953164 - RNA, 20 nt, Human
ugagacagcccgggcucugc

SEQ ID NO: 1953165 - RNA, 19 nt, Human
ugagacagcccgggcucug

SEQ ID NO: 1953166 - RNA, 18 nt, Human
ugagacagcccgggcucu

SEQ ID NO: 1953167 - RNA, 17 nt, Human
ugagacagcccgggcuc

SEQ ID NO: 1953168 - RNA, 12 nt, Human
ugagacagcucu

SEQ ID NO: 1953169 - RNA, 22 nt, Human
ugagacagcccgggcucugccu

SEQ ID NO: 1953170 - RNA, 20 nt, Human
ugagacucugucucagucca

SEQ ID NO: 1953171 - RNA, 20 nt, Human
ugagacucugucucaaaaaa

SEQ ID NO: 1953172 - RNA, 13 nt, Human
ugagaaugaacaa

SEQ ID NO: 1953173 - RNA, 14 nt, Human
ugagaaugaacaaa

SEQ ID NO: 1953174 - RNA, 15 nt, Human
ugagaaugaacaaag

SEQ ID NO: 1953175 - RNA, 17 nt, Human
ugagaaugaacaaagac

SEQ ID NO: 1953176 - RNA, 20 nt, Human
ugagacagaaucucgcucug

SEQ ID NO: 1953177 - RNA, 11 nt, Human
ugagacagagu

SEQ ID NO: 1953178 - RNA, 13 nt, Human
ugagacagcccgg

SEQ ID NO: 1953179 - RNA, 21 nt, Human
ugagacagaguuuucacucuu

SEQ ID NO: 1953180 - RNA, 17 nt, Human
agcaccuagccucgcuc

SEQ ID NO: 1953181 - RNA, 13 nt, Human
agcaccuccugcc

SEQ ID NO: 1953182 - RNA, 14 nt, Human
agcaccuccugccu

SEQ ID NO: 1953183 - RNA, 16 nt, Human
agcaccuccugccucg

SEQ ID NO: 1953184 - RNA, 16 nt, Human
agcaccgccucuuccc

SEQ ID NO: 1953185 - RNA, 18 nt, Human
agcaccgccucuucccgc

SEQ ID NO: 1953186 - RNA, 23 nt, Human
agcacaugccucucucaggccaa

SEQ ID NO: 1953187 - RNA, 14 nt, Human
agcaccauccccuc

SEQ ID NO: 1953188 - RNA, 15 nt, Human
agcaccauccccucc

SEQ ID NO: 1953189 - RNA, 16 nt, Human
agcaccaucucuccuc

SEQ ID NO: 1953190 - RNA, 16 nt, Human
agcaccauccccuccg

SEQ ID NO: 1953191 - RNA, 23 nt, Human
agcacccauccaccguccccucc

SEQ ID NO: 1953192 - RNA, 22 nt, Human
agcacaugccucucucaggcca

SEQ ID NO: 1953193 - RNA, 21 nt, Human
agcacaugccucucucaggcc

SEQ ID NO: 1953194 - RNA, 20 nt, Human
agcacaugccucucucaggc

SEQ ID NO: 1953195 - RNA, 19 nt, Human
agcacaugccucucucagg

SEQ ID NO: 1953196 - RNA, 16 nt, Human
agcacaugccucucuc

SEQ ID NO: 1953197 - RNA, 23 nt, Human
agcacaggcugagugcaggccca

SEQ ID NO: 1953198 - RNA, 18 nt, Human
agcacaugccucucucag

SEQ ID NO: 1953199 - RNA, 18 nt, Human
agcacaggcugagugcag

SEQ ID NO: 1953200 - RNA, 12 nt, Human
agcacaggcuga

SEQ ID NO: 1953201 - RNA, 19 nt, Human
agcacaggcugagugcagg

SEQ ID NO: 1953202 - RNA, 20 nt, Human
agcacaggcugagugcaggc

SEQ ID NO: 1953203 - RNA, 21 nt, Human
agcacaggcugagugcaggcc

SEQ ID NO: 1953204 - RNA, 22 nt, Human
agcacaggcugagugcaggccc

SEQ ID NO: 1953205 - RNA, 21 nt, Human
agcacagcuucauuuccugug

SEQ ID NO: 1953206 - RNA, 13 nt, Human
agcaauaucugcu

SEQ ID NO: 1953207 - RNA, 12 nt, Human
agcaauauucuu

SEQ ID NO: 1953208 - RNA, 21 nt, Human
agcaauauucuuggagauuga

SEQ ID NO: 1953209 - RNA, 17 nt, Human
agcaagugagagcuggg

SEQ ID NO: 1953210 - RNA, 12 nt, Human
agcaauaauuuc

SEQ ID NO: 1953211 - RNA, 16 nt, Human
agcaauaauuucugua

SEQ ID NO: 1953212 - RNA, 21 nt, Human
ugagccagauuucacucuccu

SEQ ID NO: 1953213 - RNA, 20 nt, Human
ugagccagauuucacucucc

SEQ ID NO: 1953214 - RNA, 19 nt, Human
ugagccagauuucacucuc

SEQ ID NO: 1953215 - RNA, 18 nt, Human
ugagccagauuucacucu

SEQ ID NO: 1953216 - RNA, 14 nt, Human
ugagccacugcacc

SEQ ID NO: 1953217 - RNA, 12 nt, Human
ugagccacugca

SEQ ID NO: 1953218 - RNA, 13 nt, Human
ugagccacugcac

SEQ ID NO: 1953219 - RNA, 16 nt, Human
ugagcauuagauuucu

SEQ ID NO: 1953220 - RNA, 16 nt, Human
ugagcauuacaggcaa

SEQ ID NO: 1953221 - RNA, 14 nt, Human
ugagcauuagauuu

SEQ ID NO: 1953222 - RNA, 17 nt, Human
agcaaggagauuuacaa

SEQ ID NO: 1953223 - RNA, 19 nt, Human
agcaaggagauuuacaacu

SEQ ID NO: 1953224 - RNA, 14 nt, Human
agcaaggagauuua

SEQ ID NO: 1953225 - RNA, 22 nt, Human
agcaagcuuuuacaacagugcu

SEQ ID NO: 1953226 - RNA, 23 nt, Human
agcaagcuuuuacaacagugcug

SEQ ID NO: 1953227 - RNA, 16 nt, Human
agcaaggaagguaaaa

SEQ ID NO: 1953228 - RNA, 21 nt, Human
agcaaggaagguaaaaaguua

SEQ ID NO: 1953229 - RNA, 22 nt, Human
agcaaggaagguaaaaaguuaa

SEQ ID NO: 1953230 - RNA, 17 nt, Human
agcaaggcgcuaacuug

SEQ ID NO: 1953231 - RNA, 20 nt, Human
agcaaggcgcuaacuugcuu

SEQ ID NO: 1953232 - RNA, 22 nt, Human
agcaaggccaccucuuccuggc

SEQ ID NO: 1953233 - RNA, 19 nt, Human
agcaaggccaccucuuccu

SEQ ID NO: 1953234 - RNA, 21 nt, Human
agcaaggccaccucuuccugg

SEQ ID NO: 1953235 - RNA, 12 nt, Human
agcaaggccacc

SEQ ID NO: 1953236 - RNA, 14 nt, Human
agcaaggccaccuc

SEQ ID NO: 1953237 - RNA, 15 nt, Human
agcaaggccaccucu

SEQ ID NO: 1953238 - RNA, 19 nt, Human
agcaaggucuugcucuccu

SEQ ID NO: 1953239 - RNA, 20 nt, Human
agcaaggucuugcucuccua

SEQ ID NO: 1953240 - RNA, 15 nt, Human
agcaagucagaauag

SEQ ID NO: 1953241 - RNA, 15 nt, Human
agcaagugagagcug

SEQ ID NO: 1953242 - RNA, 16 nt, Human
agcaagugagagcugg

SEQ ID NO: 1953243 - RNA, 16 nt, Human
agcaagugagacccug

SEQ ID NO: 1953244 - RNA, 18 nt, Human
agaucucuaacuucacca

SEQ ID NO: 1953245 - RNA, 13 nt, Human
agaucucaggucc

SEQ ID NO: 1953246 - RNA, 21 nt, Human
agaucucccacaugccagggg

SEQ ID NO: 1953247 - RNA, 13 nt, Human
agaucuaaaaaua

SEQ ID NO: 1953248 - RNA, 20 nt, Human
agaucuaaaaauaacuguaa

SEQ ID NO: 1953249 - RNA, 18 nt, Human
agauccccaagccuggca

SEQ ID NO: 1953250 - RNA, 20 nt, Human
ugacauuugucauuuucauu

SEQ ID NO: 1953251 - RNA, 15 nt, Human
ugacauuuguuuggu

SEQ ID NO: 1953252 - RNA, 22 nt, Human
ugacauuuguuugguuauagug

SEQ ID NO: 1953253 - RNA, 21 nt, Human
agaugcuagaacucccuuuca

SEQ ID NO: 1953254 - RNA, 22 nt, Human
agaugcuagaacucccuuucaa

SEQ ID NO: 1953255 - RNA, 22 nt, Human
agauguagccccucuccuggaa

SEQ ID NO: 1953256 - RNA, 21 nt, Human
agauguagccccucuccugga

SEQ ID NO: 1953257 - RNA, 20 nt, Human
agaugcaaugacucaggaca

SEQ ID NO: 1953258 - RNA, 19 nt, Human
agaugcuagaacucccuuu

SEQ ID NO: 1953259 - RNA, 14 nt, Human
agaugcauuuggaa

SEQ ID NO: 1953260 - RNA, 19 nt, Human
ugacacgaauauugcugau

SEQ ID NO: 1953261 - RNA, 15 nt, Human
ugacacuuaaaaaug

SEQ ID NO: 1953262 - RNA, 22 nt, Human
ugacagagugagacucugucuc

SEQ ID NO: 1953263 - RNA, 16 nt, Human
ugacacgaauauugcu

SEQ ID NO: 1953264 - RNA, 13 nt, Human
ugacauuugucau

SEQ ID NO: 1953265 - RNA, 14 nt, Human
ugacauuugucauu

SEQ ID NO: 1953266 - RNA, 15 nt, Human
ugacauuugucauuu

SEQ ID NO: 1953267 - RNA, 16 nt, Human
ugacauuugucauuuu

SEQ ID NO: 1953268 - RNA, 17 nt, Human
ugacauuugucauuuuc

SEQ ID NO: 1953269 - RNA, 18 nt, Human
ugacauuugucauuuuca

SEQ ID NO: 1953270 - RNA, 19 nt, Human
ugacauuugucauuuucau

SEQ ID NO: 1953271 - RNA, 14 nt, Human
ugacagccagaacu

SEQ ID NO: 1953272 - RNA, 11 nt, Human
ugacagccccu

SEQ ID NO: 1953273 - RNA, 19 nt, Human
ugacagccccucccuccuc

SEQ ID NO: 1953274 - RNA, 17 nt, Human
ugacaggcaaugcuggc

SEQ ID NO: 1953275 - RNA, 19 nt, Human
ugacaggcaaugcuggcug

SEQ ID NO: 1953276 - RNA, 15 nt, Human
ugacagguuugggac

SEQ ID NO: 1953277 - RNA, 22 nt, Human
ugacagggcacaccgggcacuc

SEQ ID NO: 1953278 - RNA, 22 nt, Human
agauuucauccagaagucaaca

SEQ ID NO: 1953279 - RNA, 20 nt, Human
agauuuuaaaacuucaucug

SEQ ID NO: 1953280 - RNA, 15 nt, Human
agauuucauccagaa

SEQ ID NO: 1953281 - RNA, 17 nt, Human
agauuucacucuccuug

SEQ ID NO: 1953282 - RNA, 21 nt, Human
agauuuaaacucugaauuuau

SEQ ID NO: 1953283 - RNA, 19 nt, Human
agauuucacucuccuuggu

SEQ ID NO: 1953284 - RNA, 21 nt, Human
agauuguuuaucuagauguaa

SEQ ID NO: 1953285 - RNA, 22 nt, Human
agauuguuuaucuagauguaaa

SEQ ID NO: 1953286 - RNA, 19 nt, Human
agauuuaaacucugaauuu

SEQ ID NO: 1953287 - RNA, 20 nt, Human
agauuuaaacucugaauuua

SEQ ID NO: 1953288 - RNA, 14 nt, Human
agauuguuuaucua

SEQ ID NO: 1953289 - RNA, 16 nt, Human
agauuguuuaucuaga

SEQ ID NO: 1953290 - RNA, 18 nt, Human
agauuguuuaucuagaug

SEQ ID NO: 1953291 - RNA, 19 nt, Human
agauuguuuaucuagaugu

SEQ ID NO: 1953292 - RNA, 19 nt, Human
agauucauauuuacuucuu

SEQ ID NO: 1953293 - RNA, 21 nt, Human
agauuccagagaguggcuccu

SEQ ID NO: 1953294 - RNA, 22 nt, Human
agauuccagagaguggcuccuc

SEQ ID NO: 1953295 - RNA, 19 nt, Human
agauuccagagaguggcuc

SEQ ID NO: 1953296 - RNA, 16 nt, Human
agauucauauuuacuu

SEQ ID NO: 1953297 - RNA, 13 nt, Human
agauucauauuua

SEQ ID NO: 1953298 - RNA, 14 nt, Human
agauucaggcauuu

SEQ ID NO: 1953299 - RNA, 13 nt, Human
agauuauaauugu

SEQ ID NO: 1953300 - RNA, 18 nt, Human
agauuauaauuguugcau

SEQ ID NO: 1953301 - RNA, 18 nt, Human
agauuaauagcauucgaa

SEQ ID NO: 1953302 - RNA, 14 nt, Human
agauuaagaaauag

SEQ ID NO: 1953303 - RNA, 15 nt, Human
agauuaagaaauaga

SEQ ID NO: 1953304 - RNA, 12 nt, Human
ugacuuacugua

SEQ ID NO: 1953305 - RNA, 20 nt, Human
ugacuuacuguacaugaaaa

SEQ ID NO: 1953306 - RNA, 13 nt, Human
ugacuuagaaucc

SEQ ID NO: 1953307 - RNA, 19 nt, Human
ugacuuagaaucccugugu

SEQ ID NO: 1953308 - RNA, 20 nt, Human
ugacuuagaaucccuguguu

SEQ ID NO: 1953309 - RNA, 21 nt, Human
ugacuuagaaucccuguguua

SEQ ID NO: 1953310 - RNA, 22 nt, Human
ugacuuagaaucccuguguuaa

SEQ ID NO: 1953311 - RNA, 23 nt, Human
ugacuuagaaucccuguguuaau

SEQ ID NO: 1953312 - RNA, 12 nt, Human
ugaccuuguaau

SEQ ID NO: 1953313 - RNA, 13 nt, Human
ugaccuuguaaug

SEQ ID NO: 1953314 - RNA, 14 nt, Human
ugaccuuguaaugu

SEQ ID NO: 1953315 - RNA, 16 nt, Human
ugaccuuguaauguaa

SEQ ID NO: 1953316 - RNA, 15 nt, Human
ugaccuuuaagagaa

SEQ ID NO: 1953317 - RNA, 20 nt, Human
ugaccuggaaggcccagcac

SEQ ID NO: 1953318 - RNA, 13 nt, Human
ugaccuggucagg

SEQ ID NO: 1953319 - RNA, 21 nt, Human
ugacucguauaugucucaggu

SEQ ID NO: 1953320 - RNA, 19 nt, Human
ugacucuaguacugugaau

SEQ ID NO: 1953321 - RNA, 23 nt, Human
ugacucuaguacugugaauccag

SEQ ID NO: 1953322 - RNA, 21 nt, Human
ugacuguuuucucuugagagg

SEQ ID NO: 1953323 - RNA, 19 nt, Human
ugacuuaacauagccaaaa

SEQ ID NO: 1953324 - RNA, 20 nt, Human
ugacuuaacauagccaaaau

SEQ ID NO: 1953325 - RNA, 22 nt, Human
ugacuuaacauagccaaaaugu

SEQ ID NO: 1953326 - RNA, 13 nt, Human
ugaccuuucaaua

SEQ ID NO: 1953327 - RNA, 18 nt, Human
ugaccuuguaauguaacu

SEQ ID NO: 1953328 - RNA, 21 nt, Human
ugaccuuguaauguaacugcu

SEQ ID NO: 1953329 - RNA, 12 nt, Human
ugaccuuucaau

SEQ ID NO: 1953330 - RNA, 20 nt, Human
acuuucugaaauaacauggc

SEQ ID NO: 1953331 - RNA, 14 nt, Human
acuuucugaaauaa

SEQ ID NO: 1953332 - RNA, 12 nt, Human
acuuuaccuuuu

SEQ ID NO: 1953333 - RNA, 14 nt, Human
acuuucuucaaaau

SEQ ID NO: 1953334 - RNA, 23 nt, Human
acuuugaauuuuagcacauugca

SEQ ID NO: 1953335 - RNA, 17 nt, Human
acuuucuucaaaauaua

SEQ ID NO: 1953336 - RNA, 19 nt, Human
acuuugacagcgcacagcu

SEQ ID NO: 1953337 - RNA, 19 nt, Human
acuuucugaaauucacaaa

SEQ ID NO: 1953338 - RNA, 12 nt, Human
acuuucuguuaa

SEQ ID NO: 1953339 - RNA, 13 nt, Human
acuuucuguuaaa

SEQ ID NO: 1953340 - RNA, 16 nt, Human
acuuucuguuaaaaug

SEQ ID NO: 1953341 - RNA, 17 nt, Human
acuuucuguuaaaaugc

SEQ ID NO: 1953342 - RNA, 19 nt, Human
acuuucuguuaaaaugcau

SEQ ID NO: 1953343 - RNA, 22 nt, Human
acuuucuguuaaaaugcaugau

SEQ ID NO: 1953344 - RNA, 23 nt, Human
acuuucuguuaaaaugcaugauu

SEQ ID NO: 1953345 - RNA, 16 nt, Human
ucuccucugcugcugg

SEQ ID NO: 1953346 - RNA, 15 nt, Human
ucuccucugcugcug

SEQ ID NO: 1953347 - RNA, 15 nt, Human
ucuccuccagaguca

SEQ ID NO: 1953348 - RNA, 18 nt, Human
ucuccucugcugcuggcu

SEQ ID NO: 1953349 - RNA, 17 nt, Human
ucuccucugcugcuggc

SEQ ID NO: 1953350 - RNA, 19 nt, Human
ucuccaagcaggacaugga

SEQ ID NO: 1953351 - RNA, 18 nt, Human
ucuccaagcaggacaugg

SEQ ID NO: 1953352 - RNA, 23 nt, Human
ucuccccagcaagugagagcugg

SEQ ID NO: 1953353 - RNA, 12 nt, Human
ucuccacccugc

SEQ ID NO: 1953354 - RNA, 15 nt, Human
ucucccuuuuccaug

SEQ ID NO: 1953355 - RNA, 17 nt, Human
ucuccgaaaugcugucu

SEQ ID NO: 1953356 - RNA, 16 nt, Human
ucuccucauguucugc

SEQ ID NO: 1953357 - RNA, 10 nt, Human
ucuccucagg

SEQ ID NO: 1953358 - RNA, 14 nt, Human
ucuccucaggacca

SEQ ID NO: 1953359 - RNA, 20 nt, Human
ucuccgaaaugcugucuuuc

SEQ ID NO: 1953360 - RNA, 23 nt, Human
ucuccgaaaugcugucuuucuug

SEQ ID NO: 1953361 - RNA, 17 nt, Human
ucuccgaccagacaccu

SEQ ID NO: 1953362 - RNA, 23 nt, Human
ucuccgaccagacaccuugacag

SEQ ID NO: 1953363 - RNA, 12 nt, Human
acuuugaccucu

SEQ ID NO: 1953364 - RNA, 13 nt, Human
acuuugaccucug

SEQ ID NO: 1953365 - RNA, 21 nt, Human
acuuugacagcgcacagcugc

SEQ ID NO: 1953366 - RNA, 16 nt, Human
acuuuggaucaggaaa

SEQ ID NO: 1953367 - RNA, 20 nt, Human
acuuuguuaguuucuccaag

SEQ ID NO: 1953368 - RNA, 14 nt, Human
acuuuguuaggcca

SEQ ID NO: 1953369 - RNA, 18 nt, Human
acuuuguuaggccaaaga

SEQ ID NO: 1953370 - RNA, 14 nt, Human
acuuuguaaauucu

SEQ ID NO: 1953371 - RNA, 21 nt, Human
acuuuguaaauucugauuucu

SEQ ID NO: 1953372 - RNA, 23 nt, Human
acuuuguaaauucugauuucuuu

SEQ ID NO: 1953373 - RNA, 16 nt, Human
acuuuguaaauucuga

SEQ ID NO: 1953374 - RNA, 17 nt, Human
acuuuguaaauucugau

SEQ ID NO: 1953375 - RNA, 18 nt, Human
acuuuguaaauucugauu

SEQ ID NO: 1953376 - RNA, 19 nt, Human
acuuuguaaauucugauuu

SEQ ID NO: 1953377 - RNA, 14 nt, Human
acuuuguucuggcu

SEQ ID NO: 1953378 - RNA, 21 nt, Human
acuuuguuaguuucuccaagc

SEQ ID NO: 1953379 - RNA, 12 nt, Human
acuuuuguucuu

SEQ ID NO: 1953380 - RNA, 13 nt, Human
acuuuuguucuug

SEQ ID NO: 1953381 - RNA, 17 nt, Human
agaaaaaagagaaaaga

SEQ ID NO: 1953382 - RNA, 18 nt, Human
agaaaaaagagaaaagaa

SEQ ID NO: 1953383 - RNA, 10 nt, Human
agaaaaaagu

SEQ ID NO: 1953384 - RNA, 12 nt, Human
agaaaaaaguug

SEQ ID NO: 1953385 - RNA, 14 nt, Human
agaaaaaaguugua

SEQ ID NO: 1953386 - RNA, 22 nt, Human
acuuuguuaggccaaagacaaa

SEQ ID NO: 1953387 - RNA, 18 nt, Human
acuuuuuaaaaaacuuuc

SEQ ID NO: 1953388 - RNA, 15 nt, Human
acuuuuguucuuggu

SEQ ID NO: 1953389 - RNA, 23 nt, Human
acuuuuguucuugguuuguaaau

SEQ ID NO: 1953390 - RNA, 16 nt, Human
ucuccuucaccuuugu

SEQ ID NO: 1953391 - RNA, 13 nt, Human
ucuccuuguguua

SEQ ID NO: 1953392 - RNA, 21 nt, Human
ucuccuuguguuacuaaguuu

SEQ ID NO: 1953393 - RNA, 15 nt, Human
ucuccuucaccuuug

SEQ ID NO: 1953394 - RNA, 14 nt, Human
ucuccuucaccuuu

SEQ ID NO: 1953395 - RNA, 17 nt, Human
agaaaaaauauuuuccc

SEQ ID NO: 1953396 - RNA, 22 nt, Human
agaaaaaagguucuuuguguau

SEQ ID NO: 1953397 - RNA, 19 nt, Human
ucucauuguucaauuccca

SEQ ID NO: 1953398 - RNA, 21 nt, Human
ucucaugccucagccuccuga

SEQ ID NO: 1953399 - RNA, 13 nt, Human
ucucaugcugccc

SEQ ID NO: 1953400 - RNA, 19 nt, Human
ucucaugcugccccugccu

SEQ ID NO: 1953401 - RNA, 18 nt, Human
ucucaggccagcugcuug

SEQ ID NO: 1953402 - RNA, 17 nt, Human
ucucaggccagcugcuu

SEQ ID NO: 1953403 - RNA, 21 nt, Human
ucucaggccagcugcuugggc

SEQ ID NO: 1953404 - RNA, 20 nt, Human
ucucaugccucagccuccug

SEQ ID NO: 1953405 - RNA, 16 nt, Human
ucuccaagcaggacau

SEQ ID NO: 1953406 - RNA, 15 nt, Human
ucuccaagcaggaca

SEQ ID NO: 1953407 - RNA, 13 nt, Human
ucuccaaaauaaa

SEQ ID NO: 1953408 - RNA, 16 nt, Human
ucucauuugucacaca

SEQ ID NO: 1953409 - RNA, 19 nt, Human
ucucauuugccaauaauaa

SEQ ID NO: 1953410 - RNA, 14 nt, Human
ucucauuugucaca

SEQ ID NO: 1953411 - RNA, 10 nt, Human
ucucaggcca

SEQ ID NO: 1953412 - RNA, 13 nt, Human
ucucaggccagcu

SEQ ID NO: 1953413 - RNA, 12 nt, Human
ucucaggccagc

SEQ ID NO: 1953414 - RNA, 12 nt, Human
ucucaggccaaa

SEQ ID NO: 1953415 - RNA, 21 nt, Human
ucucagcauuaccucuuugga

SEQ ID NO: 1953416 - RNA, 19 nt, Human
acuuguauuauguguguuu

SEQ ID NO: 1953417 - RNA, 18 nt, Human
acuuguauuauguguguu

SEQ ID NO: 1953418 - RNA, 19 nt, Human
acuugcuuuggucacuuuu

SEQ ID NO: 1953419 - RNA, 23 nt, Human
acuugcuuuggucacuuuuagau

SEQ ID NO: 1953420 - RNA, 14 nt, Human
acuugcuuuuaaaa

SEQ ID NO: 1953421 - RNA, 18 nt, Human
acuugcuuaaaugugaau

SEQ ID NO: 1953422 - RNA, 16 nt, Human
acuugcuuaaauguga

SEQ ID NO: 1953423 - RNA, 17 nt, Human
acuugcuuaaaugugaa

SEQ ID NO: 1953424 - RNA, 13 nt, Human
acuugcugccucg

SEQ ID NO: 1953425 - RNA, 14 nt, Human
acuugcugugacuu

SEQ ID NO: 1953426 - RNA, 14 nt, Human
acuugcuuaaaugu

SEQ ID NO: 1953427 - RNA, 15 nt, Human
acuugcuuaaaugug

SEQ ID NO: 1953428 - RNA, 11 nt, Human
acuugcugccu

SEQ ID NO: 1953429 - RNA, 12 nt, Human
acuugcugccuc

SEQ ID NO: 1953430 - RNA, 21 nt, Human
acuugucuuuggacccugagg

SEQ ID NO: 1953431 - RNA, 18 nt, Human
acuugucuuuggacccug

SEQ ID NO: 1953432 - RNA, 20 nt, Human
acuugucuuuggacccugag

SEQ ID NO: 1953433 - RNA, 19 nt, Human
acuuguggacacagcucuu

SEQ ID NO: 1953434 - RNA, 22 nt, Human
acuuguggacacagcucuucuc

SEQ ID NO: 1953435 - RNA, 20 nt, Human
acuugcucuugaugccuggc

SEQ ID NO: 1953436 - RNA, 16 nt, Human
acuugcacucuucuac

SEQ ID NO: 1953437 - RNA, 18 nt, Human
acuugcucuugaugccug

SEQ ID NO: 1953438 - RNA, 17 nt, Human
acuugcucuugaugccu

SEQ ID NO: 1953439 - RNA, 16 nt, Human
acuugcucuugaugcc

SEQ ID NO: 1953440 - RNA, 23 nt, Human
acuugcagacucuacagaggcca

SEQ ID NO: 1953441 - RNA, 19 nt, Human
acuugcagacucuacagag

SEQ ID NO: 1953442 - RNA, 22 nt, Human
acuugcagacucuacagaggcc

SEQ ID NO: 1953443 - RNA, 20 nt, Human
ucucacuauguugcccaggc

SEQ ID NO: 1953444 - RNA, 21 nt, Human
ucucacuauguugcccaggca

SEQ ID NO: 1953445 - RNA, 22 nt, Human
ucucacuauguugcccaggcag

SEQ ID NO: 1953446 - RNA, 23 nt, Human
ucucacuauguugcccaggcagg

SEQ ID NO: 1953447 - RNA, 15 nt, Human
acuugcacucuucua

SEQ ID NO: 1953448 - RNA, 17 nt, Human
acuugauuugagauuuu

SEQ ID NO: 1953449 - RNA, 13 nt, Human
acuuaagcacacu

SEQ ID NO: 1953450 - RNA, 17 nt, Human
acuuaaucuaaauggaa

SEQ ID NO: 1953451 - RNA, 19 nt, Human
acuuaaucuaaauggaacc

SEQ ID NO: 1953452 - RNA, 22 nt, Human
acuuaaucuaaauggaaccacu

SEQ ID NO: 1953453 - RNA, 16 nt, Human
acuuacacuuuaugca

SEQ ID NO: 1953454 - RNA, 20 nt, Human
acuuaaauaaugugaaacug

SEQ ID NO: 1953455 - RNA, 14 nt, Human
acuuaaauguuaug

SEQ ID NO: 1953456 - RNA, 16 nt, Human
acuuaaauguuaugua

SEQ ID NO: 1953457 - RNA, 22 nt, Human
acuuaaauguuauguauauggu

SEQ ID NO: 1953458 - RNA, 20 nt, Human
acuuaacauagccaaaaugu

SEQ ID NO: 1953459 - RNA, 17 nt, Human
acuuacacuuuaugcac

SEQ ID NO: 1953460 - RNA, 19 nt, Human
acuuacauauuuauuuuua

SEQ ID NO: 1953461 - RNA, 21 nt, Human
acuuacuguacaugaaaacac

SEQ ID NO: 1953462 - RNA, 16 nt, Human
acuuacuguacaugaa

SEQ ID NO: 1953463 - RNA, 22 nt, Human
acuuacuguacaugaaaacaca

SEQ ID NO: 1953464 - RNA, 14 nt, Human
acuuagcugggaga

SEQ ID NO: 1953465 - RNA, 19 nt, Human
acuuagcuggagaugucuc

SEQ ID NO: 1953466 - RNA, 21 nt, Human
acuuagcuggagaugucucua

SEQ ID NO: 1953467 - RNA, 23 nt, Human
acuuaggaagguggccuuccugc

SEQ ID NO: 1953468 - RNA, 15 nt, Human
acuuagguguggggg

SEQ ID NO: 1953469 - RNA, 15 nt, Human
acuucaguuaucuug

SEQ ID NO: 1953470 - RNA, 14 nt, Human
ucuacccuggcacu

SEQ ID NO: 1953471 - RNA, 19 nt, Human
ucuacccuggcacuauaau

SEQ ID NO: 1953472 - RNA, 14 nt, Human
ucuacccaggugcu

SEQ ID NO: 1953473 - RNA, 20 nt, Human
ucuacccagcgagcccuggu

SEQ ID NO: 1953474 - RNA, 21 nt, Human
ucuacccuggcacuauaaugu

SEQ ID NO: 1953475 - RNA, 18 nt, Human
acuguucucugcccucca

SEQ ID NO: 1953476 - RNA, 19 nt, Human
acuguucucugcccuccaa

SEQ ID NO: 1953477 - RNA, 18 nt, Human
acuguucccaccugcugg

SEQ ID NO: 1953478 - RNA, 17 nt, Human
acuguucagcuuuuauu

SEQ ID NO: 1953479 - RNA, 17 nt, Human
acuguucucugcccucc

SEQ ID NO: 1953480 - RNA, 16 nt, Human
acuguucucugcccuc

SEQ ID NO: 1953481 - RNA, 18 nt, Human
uccugggagugagcuggu

SEQ ID NO: 1953482 - RNA, 15 nt, Human
uccugggcacacgcu

SEQ ID NO: 1953483 - RNA, 18 nt, Human
uccugggcacacgcugcu

SEQ ID NO: 1953484 - RNA, 19 nt, Human
uccugggcacacgcugcuc

SEQ ID NO: 1953485 - RNA, 21 nt, Human
uccugggcacacgcugcucug

SEQ ID NO: 1953486 - RNA, 23 nt, Human
uccugggcacacgcugcucugcc

SEQ ID NO: 1953487 - RNA, 21 nt, Human
ucuacagaggccaugggccuc

SEQ ID NO: 1953488 - RNA, 22 nt, Human
ucuaaguuuuaggguacaugug

SEQ ID NO: 1953489 - RNA, 23 nt, Human
ucuaaguuuuaggguacaugugc

SEQ ID NO: 1953490 - RNA, 18 nt, Human
ucuaauaagcuaguugaa

SEQ ID NO: 1953491 - RNA, 11 nt, Human
ucuaauaauaa

SEQ ID NO: 1953492 - RNA, 13 nt, Human
ucuaauaauaaau

SEQ ID NO: 1953493 - RNA, 14 nt, Human
ucuaauaauaaaua

SEQ ID NO: 1953494 - RNA, 15 nt, Human
ucuaauaauaaauag

SEQ ID NO: 1953495 - RNA, 22 nt, Human
ucuaauaauaaauaguucuucu

SEQ ID NO: 1953496 - RNA, 19 nt, Human
ucuacccagcgagcccugg

SEQ ID NO: 1953497 - RNA, 23 nt, Human
ucuacagcuaaucagcauucuca

SEQ ID NO: 1953498 - RNA, 12 nt, Human
ucuacagcuccc

SEQ ID NO: 1953499 - RNA, 15 nt, Human
ucuacagcuccccca

SEQ ID NO: 1953500 - RNA, 16 nt, Human
ucuacagcucccccag

SEQ ID NO: 1953501 - RNA, 20 nt, Human
ucuacagcucccccagcucc

SEQ ID NO: 1953502 - RNA, 20 nt, Human
ucuacagcuaaucagcauuc

SEQ ID NO: 1953503 - RNA, 21 nt, Human
ucuagagaaguggacuggagg

SEQ ID NO: 1953504 - RNA, 22 nt, Human
ucuagaguagagguauaauugu

SEQ ID NO: 1953505 - RNA, 18 nt, Human
ucuagcauggcugccaau

SEQ ID NO: 1953506 - RNA, 13 nt, Human
ucuagauacugua

SEQ ID NO: 1953507 - RNA, 16 nt, Human
acuucaucccucuggg

SEQ ID NO: 1953508 - RNA, 13 nt, Human
acuuccccuuccu

SEQ ID NO: 1953509 - RNA, 19 nt, Human
acuuccccuuccuaauucc

SEQ ID NO: 1953510 - RNA, 23 nt, Human
ucuagacacuuuuucuuuacaaa

SEQ ID NO: 1953511 - RNA, 15 nt, Human
ucuagacacuuuuuc

SEQ ID NO: 1953512 - RNA, 16 nt, Human
ucuagacacuuuuucu

SEQ ID NO: 1953513 - RNA, 22 nt, Human
acuucccuggguuagacugcca

SEQ ID NO: 1953514 - RNA, 23 nt, Human
acuucccuggguuagacugccag

SEQ ID NO: 1953515 - RNA, 17 nt, Human
ucuagaauuuuaagccu

SEQ ID NO: 1953516 - RNA, 19 nt, Human
ucuagaauuuuaagccuuu

SEQ ID NO: 1953517 - RNA, 21 nt, Human
acuucccuggguuagacugcc

SEQ ID NO: 1953518 - RNA, 19 nt, Human
ucuagcauuagguauaucu

SEQ ID NO: 1953519 - RNA, 13 nt, Human
ucuagccagagga

SEQ ID NO: 1953520 - RNA, 12 nt, Human
ucuaggaagacu

SEQ ID NO: 1953521 - RNA, 22 nt, Human
ucuaguuguuugauucagacag

SEQ ID NO: 1953522 - RNA, 13 nt, Human
ucuauaaaccgaa

SEQ ID NO: 1953523 - RNA, 22 nt, Human
ucuaguuugauuaaauucuugc

SEQ ID NO: 1953524 - RNA, 21 nt, Human
ucuaguuugauuaaauucuug

SEQ ID NO: 1953525 - RNA, 23 nt, Human
ucuaguuguuugauucagacagc

SEQ ID NO: 1953526 - RNA, 19 nt, Human
ucuauuuucucugauacuu

SEQ ID NO: 1953527 - RNA, 11 nt, Human
ucuauuuuaca

SEQ ID NO: 1953528 - RNA, 13 nt, Human
ucuauuuuacaac

SEQ ID NO: 1953529 - RNA, 13 nt, Human
ucuauuuauuuau

SEQ ID NO: 1953530 - RNA, 14 nt, Human
ucuauuuauuuauu

SEQ ID NO: 1953531 - RNA, 20 nt, Human
ucuauuuucucugauacuuu

SEQ ID NO: 1953532 - RNA, 21 nt, Human
ucucaccauuuccccagggca

SEQ ID NO: 1953533 - RNA, 17 nt, Human
ucucacuauguugccca

SEQ ID NO: 1953534 - RNA, 19 nt, Human
ucucacuauguugcccagg

SEQ ID NO: 1953535 - RNA, 19 nt, Human
ucuauagaaaguguucugu

SEQ ID NO: 1953536 - RNA, 21 nt, Human
ucuauagaaaguguucuguua

SEQ ID NO: 1953537 - RNA, 22 nt, Human
ucuauagaaaguguucuguuac

SEQ ID NO: 1953538 - RNA, 23 nt, Human
ucuauagaaaguguucuguuaca

SEQ ID NO: 1953539 - RNA, 12 nt, Human
ucuauagaaagu

SEQ ID NO: 1953540 - RNA, 13 nt, Human
ucuauagaaagug

SEQ ID NO: 1953541 - RNA, 14 nt, Human
ucuauagaaagugu

SEQ ID NO: 1953542 - RNA, 15 nt, Human
ucuauagaaaguguu

SEQ ID NO: 1953543 - RNA, 16 nt, Human
ucuauagaaaguguuc

SEQ ID NO: 1953544 - RNA, 16 nt, Human
ucuauguuaauauuuu

SEQ ID NO: 1953545 - RNA, 14 nt, Human
ucuauguuaauauu

SEQ ID NO: 1953546 - RNA, 15 nt, Human
ucuauagcaucacuu

SEQ ID NO: 1953547 - RNA, 17 nt, Human
ucuauagcaucacuuaa

SEQ ID NO: 1953548 - RNA, 24 nt, Human
ucuauagaaaguguucuguuacaa

SEQ ID NO: 1953549 - RNA, 23 nt, Human
ucuaugggacucaaugcacugac

SEQ ID NO: 1953550 - RNA, 18 nt, Human
ucuauuagcuuacugauu

SEQ ID NO: 1953551 - RNA, 20 nt, Human
ucuauuagcuuacugauuaa

SEQ ID NO: 1953552 - RNA, 13 nt, Human
agacacaggggac

SEQ ID NO: 1953553 - RNA, 20 nt, Human
agacacauguccaagaagcc

SEQ ID NO: 1953554 - RNA, 16 nt, Human
agacacauguccaaga

SEQ ID NO: 1953555 - RNA, 18 nt, Human
agacaccuugacagggca

SEQ ID NO: 1953556 - RNA, 17 nt, Human
agacaccuugacagggc

SEQ ID NO: 1953557 - RNA, 16 nt, Human
agacaggaccagggau

SEQ ID NO: 1953558 - RNA, 20 nt, Human
agacagagcaaccccuggac

SEQ ID NO: 1953559 - RNA, 13 nt, Human
agacacuuccguc

SEQ ID NO: 1953560 - RNA, 20 nt, Human
agacacuuccgucacauccc

SEQ ID NO: 1953561 - RNA, 22 nt, Human
agaauuugauaugugaacaguu

SEQ ID NO: 1953562 - RNA, 20 nt, Human
agaauugcaaucuauaauau

SEQ ID NO: 1953563 - RNA, 16 nt, Human
agaauuugucacagga

SEQ ID NO: 1953564 - RNA, 21 nt, Human
agaauuugauaugugaacagu

SEQ ID NO: 1953565 - RNA, 15 nt, Human
agaauugcaaucuau

SEQ ID NO: 1953566 - RNA, 17 nt, Human
agaauugcaaucuauaa

SEQ ID NO: 1953567 - RNA, 14 nt, Human
agaauuuuaagccu

SEQ ID NO: 1953568 - RNA, 16 nt, Human
agaauuuuaagccuuu

SEQ ID NO: 1953569 - RNA, 22 nt, Human
agaauuuuaagccuuuguugaa

SEQ ID NO: 1953570 - RNA, 12 nt, Human
agaauugaaggu

SEQ ID NO: 1953571 - RNA, 13 nt, Human
agaauugaagguu

SEQ ID NO: 1953572 - RNA, 14 nt, Human
agaauugaagguuu

SEQ ID NO: 1953573 - RNA, 15 nt, Human
agaauugaagguuuu

SEQ ID NO: 1953574 - RNA, 16 nt, Human
agaauugaagguuuuu

SEQ ID NO: 1953575 - RNA, 18 nt, Human
agaauugaagguuuuuga

SEQ ID NO: 1953576 - RNA, 20 nt, Human
agaauugaagguuuuugaua

SEQ ID NO: 1953577 - RNA, 21 nt, Human
agaauugaagguuuuugauag

SEQ ID NO: 1953578 - RNA, 12 nt, Human
agacacaggccc

SEQ ID NO: 1953579 - RNA, 13 nt, Human
agacacaggcccg

SEQ ID NO: 1953580 - RNA, 16 nt, Human
agacacaggcccggcu

SEQ ID NO: 1953581 - RNA, 14 nt, Human
ucugugagaugcua

SEQ ID NO: 1953582 - RNA, 19 nt, Human
ucugugacuuaguggacag

SEQ ID NO: 1953583 - RNA, 23 nt, Human
ucugugagaugcuagaacucccu

SEQ ID NO: 1953584 - RNA, 17 nt, Human
ucugugagaugcuagaa

SEQ ID NO: 1953585 - RNA, 22 nt, Human
ucugugagaugcuagaacuccc

SEQ ID NO: 1953586 - RNA, 14 nt, Human
ucugggccagaauu

SEQ ID NO: 1953587 - RNA, 15 nt, Human
ucugggccagaauuu

SEQ ID NO: 1953588 - RNA, 22 nt, Human
ucugugaaaggaaagagggagg

SEQ ID NO: 1953589 - RNA, 14 nt, Human
ucuguauuugaaag

SEQ ID NO: 1953590 - RNA, 15 nt, Human
ucuguauuugaaagu

SEQ ID NO: 1953591 - RNA, 18 nt, Human
ucuguauuugaaagugcc

SEQ ID NO: 1953592 - RNA, 22 nt, Human
ucuguauuugaaagugccuuug

SEQ ID NO: 1953593 - RNA, 15 nt, Human
ucugucaaagucaga

SEQ ID NO: 1953594 - RNA, 14 nt, Human
ucuguuuacagugu

SEQ ID NO: 1953595 - RNA, 16 nt, Human
ucuguuguauucauug

SEQ ID NO: 1953596 - RNA, 13 nt, Human
ucuguuuagauaa

SEQ ID NO: 1953597 - RNA, 13 nt, Human
ucuguucuuucca

SEQ ID NO: 1953598 - RNA, 22 nt, Human
ucuguucuuuccaaaguacacu

SEQ ID NO: 1953599 - RNA, 15 nt, Human
ucuguugcugccuca

SEQ ID NO: 1953600 - RNA, 13 nt, Human
ucuguugcccagg

SEQ ID NO: 1953601 - RNA, 12 nt, Human
ucuguuggccag

SEQ ID NO: 1953602 - RNA, 17 nt, Human
ucuguuggccaguguga

SEQ ID NO: 1953603 - RNA, 21 nt, Human
agaauacugauggaauuuuuu

SEQ ID NO: 1953604 - RNA, 17 nt, Human
agaauacugauggaauu

SEQ ID NO: 1953605 - RNA, 17 nt, Human
agaauaaaauuuuuaau

SEQ ID NO: 1953606 - RNA, 14 nt, Human
agaauaaaauuuuu

SEQ ID NO: 1953607 - RNA, 12 nt, Human
agaauaaaauuu

SEQ ID NO: 1953608 - RNA, 19 nt, Human
agaauagaacaacauauac

SEQ ID NO: 1953609 - RNA, 21 nt, Human
agaauagaacaacauauacaa

SEQ ID NO: 1953610 - RNA, 16 nt, Human
agaauagaugcugacu

SEQ ID NO: 1953611 - RNA, 20 nt, Human
agaauaugcaucuuaaaaug

SEQ ID NO: 1953612 - RNA, 23 nt, Human
agaaguuucugccgcagcccugc

SEQ ID NO: 1953613 - RNA, 22 nt, Human
agaaguuucugccgcagcccug

SEQ ID NO: 1953614 - RNA, 21 nt, Human
agaaguuucugccgcagcccu

SEQ ID NO: 1953615 - RNA, 20 nt, Human
agaaguggggacagagcaga

SEQ ID NO: 1953616 - RNA, 17 nt, Human
agaaguggacuggagga

SEQ ID NO: 1953617 - RNA, 12 nt, Human
ucugcuuuccuc

SEQ ID NO: 1953618 - RNA, 13 nt, Human
ucugcuuuccucu

SEQ ID NO: 1953619 - RNA, 18 nt, Human
ucugcuuuccucuuccug

SEQ ID NO: 1953620 - RNA, 12 nt, Human
ucugcuuuagac

SEQ ID NO: 1953621 - RNA, 16 nt, Human
ucugcuuuagacuuga

SEQ ID NO: 1953622 - RNA, 17 nt, Human
ucugcuuuagacuugaa

SEQ ID NO: 1953623 - RNA, 18 nt, Human
ucugcuuuagacuugaaa

SEQ ID NO: 1953624 - RNA, 19 nt, Human
ucugcuuuagacuugaaaa

SEQ ID NO: 1953625 - RNA, 15 nt, Human
agaaucccuguguua

SEQ ID NO: 1953626 - RNA, 17 nt, Human
agaaucccuguguuaau

SEQ ID NO: 1953627 - RNA, 18 nt, Human
agaaucccuguguuaauu

SEQ ID NO: 1953628 - RNA, 19 nt, Human
agaaucccuguguuaauuu

SEQ ID NO: 1953629 - RNA, 21 nt, Human
agaaucccuguguuaauuuaa

SEQ ID NO: 1953630 - RNA, 15 nt, Human
agaauguaaagcaac

SEQ ID NO: 1953631 - RNA, 12 nt, Human
agaauguaaagc

SEQ ID NO: 1953632 - RNA, 17 nt, Human
agaauggggcugggccc

SEQ ID NO: 1953633 - RNA, 14 nt, Human
agaauggugauuuu

SEQ ID NO: 1953634 - RNA, 16 nt, Human
agaauggugauuuuaa

SEQ ID NO: 1953635 - RNA, 18 nt, Human
agaauggugauuuuaaau

SEQ ID NO: 1953636 - RNA, 19 nt, Human
agaauggugauuuuaaaug

SEQ ID NO: 1953637 - RNA, 20 nt, Human
agaauggugauuuuaaaugu

SEQ ID NO: 1953638 - RNA, 21 nt, Human
agaauggugauuuuaaaugug

SEQ ID NO: 1953639 - RNA, 23 nt, Human
agaauggugauuuuaaaugugug

SEQ ID NO: 1953640 - RNA, 18 nt, Human
agaaucauguuucuuuga

SEQ ID NO: 1953641 - RNA, 19 nt, Human
agaaucauguuucuuugau

SEQ ID NO: 1953642 - RNA, 21 nt, Human
agaaucauguuucuuugauca

SEQ ID NO: 1953643 - RNA, 21 nt, Human
agaaucaugugcgucagucca

SEQ ID NO: 1953644 - RNA, 13 nt, Human
agaaucauguuuc

SEQ ID NO: 1953645 - RNA, 14 nt, Human
agaaucauguuucu

SEQ ID NO: 1953646 - RNA, 15 nt, Human
agaaucauguuucuu

SEQ ID NO: 1953647 - RNA, 16 nt, Human
agaaucauguuucuuu

SEQ ID NO: 1953648 - RNA, 13 nt, Human
agaaugucaguau

SEQ ID NO: 1953649 - RNA, 15 nt, Human
agaauguuuucaaau

SEQ ID NO: 1953650 - RNA, 21 nt, Human
agaauguuuucaaauguucuc

SEQ ID NO: 1953651 - RNA, 19 nt, Human
agaauguaagguauaucau

SEQ ID NO: 1953652 - RNA, 21 nt, Human
agaauguaagguauaucauuc

SEQ ID NO: 1953653 - RNA, 23 nt, Human
agaauguaagguauaucauucua

SEQ ID NO: 1953654 - RNA, 18 nt, Human
agaauguaguuugaggaa

SEQ ID NO: 1953655 - RNA, 14 nt, Human
agaauguaguuuga

SEQ ID NO: 1953656 - RNA, 23 nt, Human
agaauuaacacaugauccugcaa

SEQ ID NO: 1953657 - RNA, 15 nt, Human
agaauuaacacauga

SEQ ID NO: 1953658 - RNA, 14 nt, Human
ucugggagcuggag

SEQ ID NO: 1953659 - RNA, 19 nt, Human
ucugcccuccaagaccuuc

SEQ ID NO: 1953660 - RNA, 18 nt, Human
ucugcccuccaagaccuu

SEQ ID NO: 1953661 - RNA, 21 nt, Human
ucugcccacucccugcaaccu

SEQ ID NO: 1953662 - RNA, 18 nt, Human
ucugcccacucccugcaa

SEQ ID NO: 1953663 - RNA, 15 nt, Human
ucugccgcagcccug

SEQ ID NO: 1953664 - RNA, 14 nt, Human
ucugccgcagcccu

SEQ ID NO: 1953665 - RNA, 10 nt, Human
ucugcccugc

SEQ ID NO: 1953666 - RNA, 11 nt, Human
ucugcccugcg

SEQ ID NO: 1953667 - RNA, 12 nt, Human
ucugcccugcgg

SEQ ID NO: 1953668 - RNA, 12 nt, Human
ucugccugcccu

SEQ ID NO: 1953669 - RNA, 22 nt, Human
ucugccgcagcccugcagaggg

SEQ ID NO: 1953670 - RNA, 23 nt, Human
ucugccgcagcccugcagagggc

SEQ ID NO: 1953671 - RNA, 21 nt, Human
ucugccugcccaggccccugc

SEQ ID NO: 1953672 - RNA, 22 nt, Human
ucugccugcccaggccccugcc

SEQ ID NO: 1953673 - RNA, 15 nt, Human
ucugcuaaauugaug

SEQ ID NO: 1953674 - RNA, 17 nt, Human
ucugcuaaauugauguu

SEQ ID NO: 1953675 - RNA, 19 nt, Human
ucugcuaaauugauguuga

SEQ ID NO: 1953676 - RNA, 20 nt, Human
ucugcuaaauugauguugau

SEQ ID NO: 1953677 - RNA, 21 nt, Human
ucugcuaaauugauguugaug

SEQ ID NO: 1953678 - RNA, 19 nt, Human
ucugcucacauaucuguca

SEQ ID NO: 1953679 - RNA, 20 nt, Human
ucugcucacauaucugucau

SEQ ID NO: 1953680 - RNA, 15 nt, Human
ucugcuaaauuucaa

SEQ ID NO: 1953681 - RNA, 17 nt, Human
ucugcuaaauuucaaau

SEQ ID NO: 1953682 - RNA, 14 nt, Human
ucugcuucagccuc

SEQ ID NO: 1953683 - RNA, 15 nt, Human
ucugcuucagccucc

SEQ ID NO: 1953684 - RNA, 13 nt, Human
ucugcuucagccu

SEQ ID NO: 1953685 - RNA, 14 nt, Human
ucugcuccagcucu

SEQ ID NO: 1953686 - RNA, 15 nt, Human
ucugcuccagcucug

SEQ ID NO: 1953687 - RNA, 20 nt, Human
ucugcuccagcucuggcaug

SEQ ID NO: 1953688 - RNA, 12 nt, Human
agaagcccagaa

SEQ ID NO: 1953689 - RNA, 13 nt, Human
agaagcccagaau

SEQ ID NO: 1953690 - RNA, 11 nt, Human
agaagcccaga

SEQ ID NO: 1953691 - RNA, 18 nt, Human
agaagauuuugaaauuuu

SEQ ID NO: 1953692 - RNA, 17 nt, Human
ucugcccacucccugca

SEQ ID NO: 1953693 - RNA, 16 nt, Human
ucugcccacucccugc

SEQ ID NO: 1953694 - RNA, 22 nt, Human
agaagcccaggaaaggcuccag

SEQ ID NO: 1953695 - RNA, 21 nt, Human
agaagcccaggaaaggcucca

SEQ ID NO: 1953696 - RNA, 20 nt, Human
agaagcccaggaaaggcucc

SEQ ID NO: 1953697 - RNA, 18 nt, Human
agaagcccaggaaaggcu

SEQ ID NO: 1953698 - RNA, 16 nt, Human
agaagcccaggaaagg

SEQ ID NO: 1953699 - RNA, 12 nt, Human
agaagcccagga

SEQ ID NO: 1953700 - RNA, 14 nt, Human
agaagaaguguguc

SEQ ID NO: 1953701 - RNA, 18 nt, Human
agaagaaauaguucugug

SEQ ID NO: 1953702 - RNA, 15 nt, Human
agaagaaugcaugcu

SEQ ID NO: 1953703 - RNA, 22 nt, Human
agaagaaugcaugcuuuccaua

SEQ ID NO: 1953704 - RNA, 23 nt, Human
agaacugcuuucuuucguuuguu

SEQ ID NO: 1953705 - RNA, 18 nt, Human
agaacuuccccauacaaa

SEQ ID NO: 1953706 - RNA, 20 nt, Human
agaacuuccccauacaaaua

SEQ ID NO: 1953707 - RNA, 24 nt, Human
agaacuuccccauacaaauaagca

SEQ ID NO: 1953708 - RNA, 16 nt, Human
agaaauucuguuuuua

SEQ ID NO: 1953709 - RNA, 17 nt, Human
agaaauugcauuuccug

SEQ ID NO: 1953710 - RNA, 20 nt, Human
agaaauugcauuuccugaca

SEQ ID NO: 1953711 - RNA, 19 nt, Human
agaaauucuguuuuuaaaa

SEQ ID NO: 1953712 - RNA, 21 nt, Human
agaaauucuguuuuuaaaaau

SEQ ID NO: 1953713 - RNA, 21 nt, Human
ucugagacucgcgacaaugca

SEQ ID NO: 1953714 - RNA, 12 nt, Human
ucugagaaugaa

SEQ ID NO: 1953715 - RNA, 14 nt, Human
ucugagaaugaaca

SEQ ID NO: 1953716 - RNA, 16 nt, Human
ucugagaaugaacaaa

SEQ ID NO: 1953717 - RNA, 16 nt, Human
ucugacucuuccccag

SEQ ID NO: 1953718 - RNA, 13 nt, Human
ucugacugacaug

SEQ ID NO: 1953719 - RNA, 17 nt, Human
ucugaucauccacugug

SEQ ID NO: 1953720 - RNA, 21 nt, Human
ucugaucauccacugugccau

SEQ ID NO: 1953721 - RNA, 16 nt, Human
ucugaugcaagcaaga

SEQ ID NO: 1953722 - RNA, 18 nt, Human
ucugcagauaaacaguag

SEQ ID NO: 1953723 - RNA, 15 nt, Human
ucugcagauaaacag

SEQ ID NO: 1953724 - RNA, 17 nt, Human
ucugcagcaauaaagca

SEQ ID NO: 1953725 - RNA, 15 nt, Human
ucugcacuccccugc

SEQ ID NO: 1953726 - RNA, 14 nt, Human
ucugcacuccccug

SEQ ID NO: 1953727 - RNA, 16 nt, Human
ucugcacuccccugcu

SEQ ID NO: 1953728 - RNA, 17 nt, Human
ucugcacuccccugcug

SEQ ID NO: 1953729 - RNA, 21 nt, Human
ucugaugcaagcaagaaacac

SEQ ID NO: 1953730 - RNA, 14 nt, Human
agaaauguacagca

SEQ ID NO: 1953731 - RNA, 15 nt, Human
agaaauguacagcaa

SEQ ID NO: 1953732 - RNA, 12 nt, Human
ucugcagguccc

SEQ ID NO: 1953733 - RNA, 11 nt, Human
ucugcaggucc

SEQ ID NO: 1953734 - RNA, 13 nt, Human
ucugcaggucccu

SEQ ID NO: 1953735 - RNA, 15 nt, Human
ucugaauuauuuucu

SEQ ID NO: 1953736 - RNA, 13 nt, Human
ucugacacacagc

SEQ ID NO: 1953737 - RNA, 14 nt, Human
ucugacacacagcu

SEQ ID NO: 1953738 - RNA, 15 nt, Human
ucugacacacagcuc

SEQ ID NO: 1953739 - RNA, 19 nt, Human
ucugacucauauccccuau

SEQ ID NO: 1953740 - RNA, 10 nt, Human
ucugaauuau

SEQ ID NO: 1953741 - RNA, 22 nt, Human
ucugaaggacauugcggacagc

SEQ ID NO: 1953742 - RNA, 21 nt, Human
ucugaaggacauugcggacag

SEQ ID NO: 1953743 - RNA, 15 nt, Human
ucuccuuuguauucu

SEQ ID NO: 1953744 - RNA, 17 nt, Human
ucuccuuuguauucugu

SEQ ID NO: 1953745 - RNA, 22 nt, Human
ucuccuuuguauucugucuuca

SEQ ID NO: 1953746 - RNA, 16 nt, Human
ucuccuuucacaaccu

SEQ ID NO: 1953747 - RNA, 20 nt, Human
ucuccuuuagggacagcuua

SEQ ID NO: 1953748 - RNA, 14 nt, Human
agaaauauuuuaau

SEQ ID NO: 1953749 - RNA, 21 nt, Human
agaaauauuuuaauuuuuaaa

SEQ ID NO: 1953750 - RNA, 23 nt, Human
agaaauauuuuaauuuuuaaaug

SEQ ID NO: 1953751 - RNA, 17 nt, Human
agaaauauguauucugu

SEQ ID NO: 1953752 - RNA, 19 nt, Human
ucccuuuuuuggcugcuga

SEQ ID NO: 1953753 - RNA, 17 nt, Human
ucccuuuuuuggcugcu

SEQ ID NO: 1953754 - RNA, 19 nt, Human
ucccuuugacgccauccca

SEQ ID NO: 1953755 - RNA, 21 nt, Human
ucccuuugacgccaucccagc

SEQ ID NO: 1953756 - RNA, 22 nt, Human
ucccuuuuuuggcugcugaagg

SEQ ID NO: 1953757 - RNA, 20 nt, Human
ucccuuuuuuggcugcugaa

SEQ ID NO: 1953758 - RNA, 23 nt, Human
ucccuuuuuuggcugcugaaggc

SEQ ID NO: 1953759 - RNA, 13 nt, Human
ucccuuuuuuuaa

SEQ ID NO: 1953760 - RNA, 20 nt, Human
ucccuuggauuguccccgac

SEQ ID NO: 1953761 - RNA, 19 nt, Human
ucccuuggauuguccccga

SEQ ID NO: 1953762 - RNA, 23 nt, Human
ucccugguggcagcucaccucuc

SEQ ID NO: 1953763 - RNA, 22 nt, Human
ucccugguggcagcucaccucu

SEQ ID NO: 1953764 - RNA, 18 nt, Human
ucccuuugacgccauccc

SEQ ID NO: 1953765 - RNA, 16 nt, Human
ucccuuugacgccauc

SEQ ID NO: 1953766 - RNA, 21 nt, Human
ucccuuuuuuuaaguaaggaa

SEQ ID NO: 1953767 - RNA, 16 nt, Human
ucccuuuuuuuaagua

SEQ ID NO: 1953768 - RNA, 18 nt, Human
uccgguguuuaagacauu

SEQ ID NO: 1953769 - RNA, 13 nt, Human
uccuacucugugu

SEQ ID NO: 1953770 - RNA, 14 nt, Human
uccuacucuguguc

SEQ ID NO: 1953771 - RNA, 15 nt, Human
uccgguuuacuuuaa

SEQ ID NO: 1953772 - RNA, 16 nt, Human
uccgguuuacuuuaac

SEQ ID NO: 1953773 - RNA, 15 nt, Human
uccuacucuguguca

SEQ ID NO: 1953774 - RNA, 13 nt, Human
uccuacucuucuc

SEQ ID NO: 1953775 - RNA, 16 nt, Human
uccuacucuucucucu

SEQ ID NO: 1953776 - RNA, 21 nt, Human
uccuagcuggagaggagcccu

SEQ ID NO: 1953777 - RNA, 22 nt, Human
uccuagcuggagaggagcccug

SEQ ID NO: 1953778 - RNA, 23 nt, Human
uccuagcuggagaggagcccugc

SEQ ID NO: 1953779 - RNA, 24 nt, Human
uccuagcuggagaggagcccugcc

SEQ ID NO: 1953780 - RNA, 13 nt, Human
uccuaggcauuug

SEQ ID NO: 1953781 - RNA, 12 nt, Human
acuccuggccuc

SEQ ID NO: 1953782 - RNA, 13 nt, Human
acuccuggccuca

SEQ ID NO: 1953783 - RNA, 14 nt, Human
acuccuggccucaa

SEQ ID NO: 1953784 - RNA, 14 nt, Human
acuccugcaggcag

SEQ ID NO: 1953785 - RNA, 12 nt, Human
acuccugcaggc

SEQ ID NO: 1953786 - RNA, 12 nt, Human
acuccucccagg

SEQ ID NO: 1953787 - RNA, 16 nt, Human
acuccugcaggcagcc

SEQ ID NO: 1953788 - RNA, 15 nt, Human
acuccugcaggcagc

SEQ ID NO: 1953789 - RNA, 22 nt, Human
acuccugcaggcagccaggcca

SEQ ID NO: 1953790 - RNA, 21 nt, Human
ucccugguggcagcucaccuc

SEQ ID NO: 1953791 - RNA, 20 nt, Human
ucccugguggcagcucaccu

SEQ ID NO: 1953792 - RNA, 19 nt, Human
ucccugguggcagcucacc

SEQ ID NO: 1953793 - RNA, 18 nt, Human
ucccugguggcagcucac

SEQ ID NO: 1953794 - RNA, 17 nt, Human
ucccugguggcagcuca

SEQ ID NO: 1953795 - RNA, 16 nt, Human
ucccugguggcagcuc

SEQ ID NO: 1953796 - RNA, 10 nt, Human
acuccugcuc

SEQ ID NO: 1953797 - RNA, 13 nt, Human
acuccugcucugc

SEQ ID NO: 1953798 - RNA, 15 nt, Human
acuccugcucugcuc

SEQ ID NO: 1953799 - RNA, 16 nt, Human
acuccugcucugcucg

SEQ ID NO: 1953800 - RNA, 11 nt, Human
acuccuggccu

SEQ ID NO: 1953801 - RNA, 15 nt, Human
acucaccccagcccc

SEQ ID NO: 1953802 - RNA, 14 nt, Human
acucaccccagccc

SEQ ID NO: 1953803 - RNA, 16 nt, Human
acucaccccagcccca

SEQ ID NO: 1953804 - RNA, 13 nt, Human
acuccagaccccu

SEQ ID NO: 1953805 - RNA, 15 nt, Human
acuccagaccccugg

SEQ ID NO: 1953806 - RNA, 13 nt, Human
acucaccccagcc

SEQ ID NO: 1953807 - RNA, 13 nt, Human
acucacagccagc

SEQ ID NO: 1953808 - RNA, 18 nt, Human
acucacagccagcgaacu

SEQ ID NO: 1953809 - RNA, 22 nt, Human
acucacagccagcgaacugaca

SEQ ID NO: 1953810 - RNA, 19 nt, Human
acuccagugagacagcucu

SEQ ID NO: 1953811 - RNA, 18 nt, Human
acuccagaccccuggcuu

SEQ ID NO: 1953812 - RNA, 19 nt, Human
acuccagaccccuggcuuu

SEQ ID NO: 1953813 - RNA, 21 nt, Human
acuccagaccccuggcuuuuc

SEQ ID NO: 1953814 - RNA, 14 nt, Human
acucacaucuuuuu

SEQ ID NO: 1953815 - RNA, 22 nt, Human
acuccuaguagggguaccacug

SEQ ID NO: 1953816 - RNA, 14 nt, Human
acuccuaugcuuua

SEQ ID NO: 1953817 - RNA, 21 nt, Human
acucucugaaccccucccucc

SEQ ID NO: 1953818 - RNA, 19 nt, Human
acucucugaaccccucccu

SEQ ID NO: 1953819 - RNA, 19 nt, Human
acucucucuuguucuuacu

SEQ ID NO: 1953820 - RNA, 22 nt, Human
acucugagacucgcgacaaugc

SEQ ID NO: 1953821 - RNA, 11 nt, Human
acucugagacu

SEQ ID NO: 1953822 - RNA, 18 nt, Human
acucucugaaccccuccc

SEQ ID NO: 1953823 - RNA, 23 nt, Human
acucuccuuggugucgggcauga

SEQ ID NO: 1953824 - RNA, 16 nt, Human
acucuccuuggugucg

SEQ ID NO: 1953825 - RNA, 15 nt, Human
acucuggcagcucag

SEQ ID NO: 1953826 - RNA, 13 nt, Human
acucuggcagcuc

SEQ ID NO: 1953827 - RNA, 15 nt, Human
acucuggcagcaccg

SEQ ID NO: 1953828 - RNA, 20 nt, Human
acucuggcagcaccgccucu

SEQ ID NO: 1953829 - RNA, 17 nt, Human
acucuggauucagccuu

SEQ ID NO: 1953830 - RNA, 20 nt, Human
acucuggauucagccuucuu

SEQ ID NO: 1953831 - RNA, 21 nt, Human
acucuggauucagccuucuuu

SEQ ID NO: 1953832 - RNA, 16 nt, Human
acucugccuccucuuc

SEQ ID NO: 1953833 - RNA, 12 nt, Human
acucugccuccu

SEQ ID NO: 1953834 - RNA, 15 nt, Human
acucuccuugguguc

SEQ ID NO: 1953835 - RNA, 18 nt, Human
acucuccuggaaauauua

SEQ ID NO: 1953836 - RNA, 16 nt, Human
acucuccucugcugcu

SEQ ID NO: 1953837 - RNA, 14 nt, Human
acucuccucugcug

SEQ ID NO: 1953838 - RNA, 13 nt, Human
acucuccucugcu

SEQ ID NO: 1953839 - RNA, 12 nt, Human
acucuccucugc

SEQ ID NO: 1953840 - RNA, 17 nt, Human
acucuccuccagaguca

SEQ ID NO: 1953841 - RNA, 14 nt, Human
acucuccuccagag

SEQ ID NO: 1953842 - RNA, 24 nt, Human
acuccuugaaaacacuguucucug

SEQ ID NO: 1953843 - RNA, 23 nt, Human
acuccuugaaaacacuguucucu

SEQ ID NO: 1953844 - RNA, 12 nt, Human
uccucaggacca

SEQ ID NO: 1953845 - RNA, 21 nt, Human
uccucagggagcagggaaggc

SEQ ID NO: 1953846 - RNA, 23 nt, Human
uccucauacccacccccacccaa

SEQ ID NO: 1953847 - RNA, 22 nt, Human
uccucauaguaugguggcuggg

SEQ ID NO: 1953848 - RNA, 13 nt, Human
uccucccaggcgc

SEQ ID NO: 1953849 - RNA, 19 nt, Human
uccucccaggcgccccuuc

SEQ ID NO: 1953850 - RNA, 21 nt, Human
uccucccaggcgccccuuccc

SEQ ID NO: 1953851 - RNA, 22 nt, Human
acucuuggagccugcagagcug

SEQ ID NO: 1953852 - RNA, 23 nt, Human
acucuuggagccugcagagcugc

SEQ ID NO: 1953853 - RNA, 15 nt, Human
acucuuggagccugc

SEQ ID NO: 1953854 - RNA, 16 nt, Human
acucuuggagccugca

SEQ ID NO: 1953855 - RNA, 14 nt, Human
acucuuggagccug

SEQ ID NO: 1953856 - RNA, 22 nt, Human
acucuugaguuguuuuuguaua

SEQ ID NO: 1953857 - RNA, 15 nt, Human
acucuugaguuguuu

SEQ ID NO: 1953858 - RNA, 16 nt, Human
acucuugaguuguuuu

SEQ ID NO: 1953859 - RNA, 20 nt, Human
acucuugaguuguuuuugua

SEQ ID NO: 1953860 - RNA, 21 nt, Human
acucuugaguuguuuuuguau

SEQ ID NO: 1953861 - RNA, 19 nt, Human
acucuuauaucuauauuuu

SEQ ID NO: 1953862 - RNA, 12 nt, Human
acucuugacagc

SEQ ID NO: 1953863 - RNA, 15 nt, Human
acucuugacucuugc

SEQ ID NO: 1953864 - RNA, 15 nt, Human
acucuugaccucagg

SEQ ID NO: 1953865 - RNA, 16 nt, Human
acucuugaccucaggu

SEQ ID NO: 1953866 - RNA, 16 nt, Human
acucuuauaucuauau

SEQ ID NO: 1953867 - RNA, 17 nt, Human
acucuuauaucuauauu

SEQ ID NO: 1953868 - RNA, 18 nt, Human
acucuuauaucuauauuu

SEQ ID NO: 1953869 - RNA, 14 nt, Human
acucuugaccucag

SEQ ID NO: 1953870 - RNA, 22 nt, Human
acucuggcagcaccgccucuuc

SEQ ID NO: 1953871 - RNA, 18 nt, Human
acugagagccuuuuugaa

SEQ ID NO: 1953872 - RNA, 18 nt, Human
acugagagugaacaaauu

SEQ ID NO: 1953873 - RNA, 15 nt, Human
acugagagccuuuuu

SEQ ID NO: 1953874 - RNA, 16 nt, Human
acugagagagcgcagc

SEQ ID NO: 1953875 - RNA, 23 nt, Human
acugagacagcccgggcucugcc

SEQ ID NO: 1953876 - RNA, 22 nt, Human
acugagacagcccgggcucugc

SEQ ID NO: 1953877 - RNA, 21 nt, Human
acugagacagcccgggcucug

SEQ ID NO: 1953878 - RNA, 18 nt, Human
acugagacagcccgggcu

SEQ ID NO: 1953879 - RNA, 15 nt, Human
acugagacagcccgg

SEQ ID NO: 1953880 - RNA, 21 nt, Human
acugagaaauuuauaaacuuu

SEQ ID NO: 1953881 - RNA, 17 nt, Human
acugagaaauuuauaaa

SEQ ID NO: 1953882 - RNA, 12 nt, Human
acugagaaauuu

SEQ ID NO: 1953883 - RNA, 21 nt, Human
acugacugaggcaguuugagg

SEQ ID NO: 1953884 - RNA, 12 nt, Human
acugacucugga

SEQ ID NO: 1953885 - RNA, 21 nt, Human
acugacucuggaaaaggcaua

SEQ ID NO: 1953886 - RNA, 12 nt, Human
acugacugaggc

SEQ ID NO: 1953887 - RNA, 15 nt, Human
acugacugaggcagu

SEQ ID NO: 1953888 - RNA, 12 nt, Human
uccucuuuccau

SEQ ID NO: 1953889 - RNA, 11 nt, Human
uccucuuucca

SEQ ID NO: 1953890 - RNA, 14 nt, Human
uccucccucccucu

SEQ ID NO: 1953891 - RNA, 11 nt, Human
uccucccuccc

SEQ ID NO: 1953892 - RNA, 21 nt, Human
uccucuuuggucuacacugug

SEQ ID NO: 1953893 - RNA, 19 nt, Human
uccucuuuggucuacacug

SEQ ID NO: 1953894 - RNA, 19 nt, Human
uccucuuuccaucuacccu

SEQ ID NO: 1953895 - RNA, 15 nt, Human
uccucccucccagcu

SEQ ID NO: 1953896 - RNA, 13 nt, Human
uccucccucccag

SEQ ID NO: 1953897 - RNA, 22 nt, Human
uccucuuuggucuacacugugc

SEQ ID NO: 1953898 - RNA, 21 nt, Human
uccugaauuuuauuuuuuggg

SEQ ID NO: 1953899 - RNA, 15 nt, Human
uccugacaccccacu

SEQ ID NO: 1953900 - RNA, 16 nt, Human
uccugacaccccacuu

SEQ ID NO: 1953901 - RNA, 19 nt, Human
uccugacaccccacuuagc

SEQ ID NO: 1953902 - RNA, 20 nt, Human
acugaacucugacaacagac

SEQ ID NO: 1953903 - RNA, 16 nt, Human
acugaaccacuuguag

SEQ ID NO: 1953904 - RNA, 18 nt, Human
acugaaccacuuguagau

SEQ ID NO: 1953905 - RNA, 19 nt, Human
acugaaccacuuguagauu

SEQ ID NO: 1953906 - RNA, 20 nt, Human
acugaaccacuuguagauuu

SEQ ID NO: 1953907 - RNA, 21 nt, Human
acugaaccacuuguagauuug

SEQ ID NO: 1953908 - RNA, 22 nt, Human
acugaaccugggaaagagauuu

SEQ ID NO: 1953909 - RNA, 15 nt, Human
acucuuguuuccuua

SEQ ID NO: 1953910 - RNA, 15 nt, Human
acucuuuaacuugua

SEQ ID NO: 1953911 - RNA, 20 nt, Human
uccugacaccccacuuagcc

SEQ ID NO: 1953912 - RNA, 19 nt, Human
acucuuucuauuguuucuu

SEQ ID NO: 1953913 - RNA, 19 nt, Human
acucuuuaacuuguaauaa

SEQ ID NO: 1953914 - RNA, 21 nt, Human
acucuuuuccaaacacaggca

SEQ ID NO: 1953915 - RNA, 14 nt, Human
uccugcaggcagcc

SEQ ID NO: 1953916 - RNA, 13 nt, Human
uccugcaggcagc

SEQ ID NO: 1953917 - RNA, 12 nt, Human
uccugcaggcag

SEQ ID NO: 1953918 - RNA, 21 nt, Human
uccugcugcaguugccaguca

SEQ ID NO: 1953919 - RNA, 21 nt, Human
uccugcugccaguaccagccc

SEQ ID NO: 1953920 - RNA, 13 nt, Human
uccugcugccagu

SEQ ID NO: 1953921 - RNA, 13 nt, Human
uccugcuuccuca

SEQ ID NO: 1953922 - RNA, 14 nt, Human
uccugcuguuacau

SEQ ID NO: 1953923 - RNA, 14 nt, Human
uccugcgaggcuau

SEQ ID NO: 1953924 - RNA, 17 nt, Human
uccugcgaggcuaugag

SEQ ID NO: 1953925 - RNA, 15 nt, Human
uccugggagcuuuug

SEQ ID NO: 1953926 - RNA, 12 nt, Human
uccugggaguga

SEQ ID NO: 1953927 - RNA, 14 nt, Human
uccugggagugagc

SEQ ID NO: 1953928 - RNA, 17 nt, Human
uccugggagugagcugg

SEQ ID NO: 1953929 - RNA, 22 nt, Human
uccuggaauaucuccgucaacu

SEQ ID NO: 1953930 - RNA, 23 nt, Human
uccuggaagugcuaauuuugaaa

SEQ ID NO: 1953931 - RNA, 15 nt, Human
uccuggaaauauuaa

SEQ ID NO: 1953932 - RNA, 20 nt, Human
acugcacuccagccugggug

SEQ ID NO: 1953933 - RNA, 19 nt, Human
acugcacuccagccugggu

SEQ ID NO: 1953934 - RNA, 18 nt, Human
acugcacuccagccuggg

SEQ ID NO: 1953935 - RNA, 17 nt, Human
acugcacuccagccugg

SEQ ID NO: 1953936 - RNA, 14 nt, Human
acugcacguuuuca

SEQ ID NO: 1953937 - RNA, 14 nt, Human
acugcacuccagcc

SEQ ID NO: 1953938 - RNA, 21 nt, Human
acugcacuauagccuagguga

SEQ ID NO: 1953939 - RNA, 21 nt, Human
uccugaugcuucuucagagac

SEQ ID NO: 1953940 - RNA, 20 nt, Human
uccugaugcuucuucagaga

SEQ ID NO: 1953941 - RNA, 19 nt, Human
uccugaugcuucuucagag

SEQ ID NO: 1953942 - RNA, 14 nt, Human
uccugcacacgcuc

SEQ ID NO: 1953943 - RNA, 21 nt, Human
uccugcacacgcuccuuccuc

SEQ ID NO: 1953944 - RNA, 22 nt, Human
uccugcacacgcuccuuccucu

SEQ ID NO: 1953945 - RNA, 22 nt, Human
acugcacagugcaucucagccc

SEQ ID NO: 1953946 - RNA, 23 nt, Human
acugcacagugcaucucagccca

SEQ ID NO: 1953947 - RNA, 15 nt, Human
acugcacaugauuuc

SEQ ID NO: 1953948 - RNA, 16 nt, Human
acugcacaugauuuca

SEQ ID NO: 1953949 - RNA, 17 nt, Human
acugcacaugauuucac

SEQ ID NO: 1953950 - RNA, 18 nt, Human
acugcacaugauuucaca

SEQ ID NO: 1953951 - RNA, 19 nt, Human
acugcacaugauuucacaa

SEQ ID NO: 1953952 - RNA, 20 nt, Human
acugcacaugauuucacaaa

SEQ ID NO: 1953953 - RNA, 21 nt, Human
acugcacaugauuucacaaau

SEQ ID NO: 1953954 - RNA, 22 nt, Human
acugcacaugauuucacaaaua

SEQ ID NO: 1953955 - RNA, 23 nt, Human
acugcacaugauuucacaaauau

SEQ ID NO: 1953956 - RNA, 16 nt, Human
acugcaccgggccaca

SEQ ID NO: 1953957 - RNA, 20 nt, Human
acugcacuauagccuaggug

SEQ ID NO: 1953958 - RNA, 14 nt, Human
acugcaccgggcca

SEQ ID NO: 1953959 - RNA, 13 nt, Human
acugauaaagaug

SEQ ID NO: 1953960 - RNA, 21 nt, Human
acugauaaagaugagugagca

SEQ ID NO: 1953961 - RNA, 16 nt, Human
acugagcagugauauu

SEQ ID NO: 1953962 - RNA, 20 nt, Human
acugcaacuuguaaaugugg

SEQ ID NO: 1953963 - RNA, 19 nt, Human
acugauauauuuaaaaaca

SEQ ID NO: 1953964 - RNA, 17 nt, Human
acguggcugcuucaagg

SEQ ID NO: 1953965 - RNA, 18 nt, Human
acguggcugcuucaagga

SEQ ID NO: 1953966 - RNA, 15 nt, Human
acgucagauguuuaa

SEQ ID NO: 1953967 - RNA, 17 nt, Human
acgucagauguuuaaaa

SEQ ID NO: 1953968 - RNA, 18 nt, Human
acgucagauguuuaaaac

SEQ ID NO: 1953969 - RNA, 20 nt, Human
acgucagauguuuaaaacac

SEQ ID NO: 1953970 - RNA, 22 nt, Human
acgucauaggaaguuagccuuu

SEQ ID NO: 1953971 - RNA, 21 nt, Human
acguggcugcuucaaggaucc

SEQ ID NO: 1953972 - RNA, 19 nt, Human
acguggcugcuucaaggau

SEQ ID NO: 1953973 - RNA, 15 nt, Human
acguuucuaaaggcu

SEQ ID NO: 1953974 - RNA, 16 nt, Human
acguuucuaaaggcua

SEQ ID NO: 1953975 - RNA, 14 nt, Human
acguugugcauuug

SEQ ID NO: 1953976 - RNA, 15 nt, Human
acguugugcauuugg

SEQ ID NO: 1953977 - RNA, 13 nt, Human
acguugugcauuu

SEQ ID NO: 1953978 - RNA, 15 nt, Human
acguuaccaggcagg

SEQ ID NO: 1953979 - RNA, 18 nt, Human
acguaaugaaacuuggau

SEQ ID NO: 1953980 - RNA, 15 nt, Human
acguacaaguaguuc

SEQ ID NO: 1953981 - RNA, 16 nt, Human
acguacaaguaguucu

SEQ ID NO: 1953982 - RNA, 17 nt, Human
acguacaaguaguucug

SEQ ID NO: 1953983 - RNA, 22 nt, Human
acguacaaguaguucuguauuu

SEQ ID NO: 1953984 - RNA, 24 nt, Human
acguacaaguaguucuguauuuga

SEQ ID NO: 1953985 - RNA, 18 nt, Human
acguacaaguaguucugu

SEQ ID NO: 1953986 - RNA, 19 nt, Human
acguacaaguaguucugua

SEQ ID NO: 1953987 - RNA, 20 nt, Human
acguacaaguaguucuguau

SEQ ID NO: 1953988 - RNA, 21 nt, Human
acguacaaguaguucuguauu

SEQ ID NO: 1953989 - RNA, 12 nt, Human
uccauccugagg

SEQ ID NO: 1953990 - RNA, 15 nt, Human
uccauccugaggcuc

SEQ ID NO: 1953991 - RNA, 19 nt, Human
uccauccugaggcuccacu

SEQ ID NO: 1953992 - RNA, 23 nt, Human
acuacacgguucaaaccugugaa

SEQ ID NO: 1953993 - RNA, 16 nt, Human
ucccacuuuugccaga

SEQ ID NO: 1953994 - RNA, 16 nt, Human
ucccagauacuugggg

SEQ ID NO: 1953995 - RNA, 20 nt, Human
ucccagagcucccucugccc

SEQ ID NO: 1953996 - RNA, 18 nt, Human
ucccagauacuugggggg

SEQ ID NO: 1953997 - RNA, 19 nt, Human
acguuugguucaaaugugu

SEQ ID NO: 1953998 - RNA, 12 nt, Human
acguuuuaagga

SEQ ID NO: 1953999 - RNA, 14 nt, Human
acguuuuaaggacu

SEQ ID NO: 1954000 - RNA, 18 nt, Human
acguuuuaaggacugacu

SEQ ID NO: 1954001 - RNA, 22 nt, Human
acguuucuaaaggcuaccuuug

SEQ ID NO: 1954002 - RNA, 16 nt, Human
acguugggacagggag

SEQ ID NO: 1954003 - RNA, 11 nt, Human
acuaaauguua

SEQ ID NO: 1954004 - RNA, 12 nt, Human
acuaaauguuaa

SEQ ID NO: 1954005 - RNA, 13 nt, Human
acuaaauguuaaa

SEQ ID NO: 1954006 - RNA, 14 nt, Human
acuaaauguuaaag

SEQ ID NO: 1954007 - RNA, 15 nt, Human
acuaaauguuaaaga

SEQ ID NO: 1954008 - RNA, 23 nt, Human
acuaauuuugcaugcguauuuau

SEQ ID NO: 1954009 - RNA, 15 nt, Human
acuaauuuuaaaaug

SEQ ID NO: 1954010 - RNA, 18 nt, Human
acuaaauguuaaagaugu

SEQ ID NO: 1954011 - RNA, 19 nt, Human
acuaaauguuaaagaugua

SEQ ID NO: 1954012 - RNA, 20 nt, Human
acuaacaaaguuuucaugug

SEQ ID NO: 1954013 - RNA, 21 nt, Human
uccccaggaggccagccuuga

SEQ ID NO: 1954014 - RNA, 20 nt, Human
uccccaggaggccagccuug

SEQ ID NO: 1954015 - RNA, 12 nt, Human
uccccagggcac

SEQ ID NO: 1954016 - RNA, 13 nt, Human
uccccagggcacg

SEQ ID NO: 1954017 - RNA, 21 nt, Human
uccccagggcacgugguugag

SEQ ID NO: 1954018 - RNA, 11 nt, Human
ucccccagccc

SEQ ID NO: 1954019 - RNA, 15 nt, Human
ucccccagccccauc

SEQ ID NO: 1954020 - RNA, 13 nt, Human
ucccccagcccca

SEQ ID NO: 1954021 - RNA, 16 nt, Human
ucccccagccccaucc

SEQ ID NO: 1954022 - RNA, 19 nt, Human
acuagacucccaagcugga

SEQ ID NO: 1954023 - RNA, 20 nt, Human
acuacuguucagcuuuuauu

SEQ ID NO: 1954024 - RNA, 19 nt, Human
acuacugaccagacaagcu

SEQ ID NO: 1954025 - RNA, 18 nt, Human
acuacugggacucuucag

SEQ ID NO: 1954026 - RNA, 15 nt, Human
ucccagcuccacccc

SEQ ID NO: 1954027 - RNA, 14 nt, Human
ucccagcuccaccc

SEQ ID NO: 1954028 - RNA, 16 nt, Human
ucccagcuaccucaac

SEQ ID NO: 1954029 - RNA, 12 nt, Human
uccccacccuga

SEQ ID NO: 1954030 - RNA, 23 nt, Human
ucccauuuagaauggugauuuua

SEQ ID NO: 1954031 - RNA, 15 nt, Human
ucccauuuagaaugg

SEQ ID NO: 1954032 - RNA, 21 nt, Human
ucccauuuagaauggugauuu

SEQ ID NO: 1954033 - RNA, 18 nt, Human
uccccaggaggccagccu

SEQ ID NO: 1954034 - RNA, 16 nt, Human
uccccaccgcagacag

SEQ ID NO: 1954035 - RNA, 15 nt, Human
uccccaccgcagaca

SEQ ID NO: 1954036 - RNA, 23 nt, Human
uccccacccugaaagcccugagc

SEQ ID NO: 1954037 - RNA, 17 nt, Human
acuauguugcccaggca

SEQ ID NO: 1954038 - RNA, 15 nt, Human
acuauguugcccagg

SEQ ID NO: 1954039 - RNA, 16 nt, Human
acuauguugcccaggc

SEQ ID NO: 1954040 - RNA, 22 nt, Human
acuauggcccuggccuagcaua

SEQ ID NO: 1954041 - RNA, 14 nt, Human
acuauguugcccag

SEQ ID NO: 1954042 - RNA, 16 nt, Human
acucaaugcacugaca

SEQ ID NO: 1954043 - RNA, 19 nt, Human
acucaaugugugccgagcc

SEQ ID NO: 1954044 - RNA, 18 nt, Human
acuauagccuaggugaca

SEQ ID NO: 1954045 - RNA, 19 nt, Human
acuagagggaccucuccca

SEQ ID NO: 1954046 - RNA, 18 nt, Human
acuagagggaccucuccc

SEQ ID NO: 1954047 - RNA, 20 nt, Human
acuauagccuaggugacaga

SEQ ID NO: 1954048 - RNA, 22 nt, Human
acuauagccuaggugacagagu

SEQ ID NO: 1954049 - RNA, 21 nt, Human
acuaucuaaauguugaaagau

SEQ ID NO: 1954050 - RNA, 16 nt, Human
acuaucuaaauguuga

SEQ ID NO: 1954051 - RNA, 16 nt, Human
uccagucuaucauugu

SEQ ID NO: 1954052 - RNA, 22 nt, Human
uccaguccccagaacucugccu

SEQ ID NO: 1954053 - RNA, 16 nt, Human
uccaguccccagaacu

SEQ ID NO: 1954054 - RNA, 21 nt, Human
uccaguccccagaacucugcc

SEQ ID NO: 1954055 - RNA, 13 nt, Human
uccagucaggcuc

SEQ ID NO: 1954056 - RNA, 20 nt, Human
uccagucaggcucucugggc

SEQ ID NO: 1954057 - RNA, 14 nt, Human
uccagucauuaugu

SEQ ID NO: 1954058 - RNA, 15 nt, Human
uccagucauuauguu

SEQ ID NO: 1954059 - RNA, 21 nt, Human
uccagucauuauguuaauauu

SEQ ID NO: 1954060 - RNA, 23 nt, Human
uccagucauuauguuaauauuuc

SEQ ID NO: 1954061 - RNA, 12 nt, Human
uccaguccccag

SEQ ID NO: 1954062 - RNA, 14 nt, Human
uccaguccccagaa

SEQ ID NO: 1954063 - RNA, 15 nt, Human
uccaguccccagaac

SEQ ID NO: 1954064 - RNA, 18 nt, Human
uccaguaucuugaagacu

SEQ ID NO: 1954065 - RNA, 16 nt, Human
uccaguaucuugaaga

SEQ ID NO: 1954066 - RNA, 12 nt, Human
uccagucaggcu

SEQ ID NO: 1954067 - RNA, 14 nt, Human
uccaguauuuuagu

SEQ ID NO: 1954068 - RNA, 22 nt, Human
uccaguaagaucacuguuuaga

SEQ ID NO: 1954069 - RNA, 18 nt, Human
uccagugagacagcucug

SEQ ID NO: 1954070 - RNA, 15 nt, Human
uccagugaggcucug

SEQ ID NO: 1954071 - RNA, 16 nt, Human
uccagugaggcucugc

SEQ ID NO: 1954072 - RNA, 23 nt, Human
uccagugaggcucugcccuuggu

SEQ ID NO: 1954073 - RNA, 22 nt, Human
uccagugaggcucugcccuugg

SEQ ID NO: 1954074 - RNA, 16 nt, Human
acggcucacugcagcc

SEQ ID NO: 1954075 - RNA, 17 nt, Human
acggcucacugcagccu

SEQ ID NO: 1954076 - RNA, 18 nt, Human
acggcucacugcagccuc

SEQ ID NO: 1954077 - RNA, 12 nt, Human
acggccaggcca

SEQ ID NO: 1954078 - RNA, 22 nt, Human
acggauccugcacugacucugg

SEQ ID NO: 1954079 - RNA, 23 nt, Human
acggauccugcacugacucugga

SEQ ID NO: 1954080 - RNA, 23 nt, Human
uccaguaagaucacuguuuagau

SEQ ID NO: 1954081 - RNA, 15 nt, Human
uccaguaucuugaag

SEQ ID NO: 1954082 - RNA, 14 nt, Human
uccaguaucuugaa

SEQ ID NO: 1954083 - RNA, 18 nt, Human
acggcuuuuacuuaaacc

SEQ ID NO: 1954084 - RNA, 23 nt, Human
acggagucccaccuuggcugcag

SEQ ID NO: 1954085 - RNA, 17 nt, Human
acgcuggagugcaguga

SEQ ID NO: 1954086 - RNA, 18 nt, Human
acgcuggagugcagugag

SEQ ID NO: 1954087 - RNA, 20 nt, Human
acgcuggaccuugaacuggg

SEQ ID NO: 1954088 - RNA, 23 nt, Human
acgcuggaccuugaacuggguac

SEQ ID NO: 1954089 - RNA, 15 nt, Human
acgcuggagugcagu

SEQ ID NO: 1954090 - RNA, 16 nt, Human
acgcuggagugcagug

SEQ ID NO: 1954091 - RNA, 11 nt, Human
acgcucucugg

SEQ ID NO: 1954092 - RNA, 14 nt, Human
acgcucucuggccu

SEQ ID NO: 1954093 - RNA, 13 nt, Human
acgcuggaccuug

SEQ ID NO: 1954094 - RNA, 14 nt, Human
acgcuccuuccucu

SEQ ID NO: 1954095 - RNA, 15 nt, Human
acgcuccuuccucug

SEQ ID NO: 1954096 - RNA, 14 nt, Human
acgcuccuuucuga

SEQ ID NO: 1954097 - RNA, 20 nt, Human
acgcuccuuucugaucuuca

SEQ ID NO: 1954098 - RNA, 17 nt, Human
acgccuagccucacgcu

SEQ ID NO: 1954099 - RNA, 21 nt, Human
acgaauauugcugauggugca

SEQ ID NO: 1954100 - RNA, 12 nt, Human
acgccugccuuu

SEQ ID NO: 1954101 - RNA, 21 nt, Human
acgcuacccgggaagggggcu

SEQ ID NO: 1954102 - RNA, 17 nt, Human
accuuuguccccaccgc

SEQ ID NO: 1954103 - RNA, 18 nt, Human
accuuugacaaagguaaa

SEQ ID NO: 1954104 - RNA, 17 nt, Human
accuuugacaaagguaa

SEQ ID NO: 1954105 - RNA, 18 nt, Human
accuuuguccccaccgca

SEQ ID NO: 1954106 - RNA, 22 nt, Human
accuuuguuugcaucugaaaau

SEQ ID NO: 1954107 - RNA, 20 nt, Human
ucauucccucgucuuuccca

SEQ ID NO: 1954108 - RNA, 19 nt, Human
ucauucccucgucuuuccc

SEQ ID NO: 1954109 - RNA, 19 nt, Human
accuugaaaacuuuaugcu

SEQ ID NO: 1954110 - RNA, 20 nt, Human
accuuucuauaauuuuacaa

SEQ ID NO: 1954111 - RNA, 15 nt, Human
accuugaacugaagg

SEQ ID NO: 1954112 - RNA, 20 nt, Human
accuugaacuggguacuugu

SEQ ID NO: 1954113 - RNA, 13 nt, Human
accuuuuuuauac

SEQ ID NO: 1954114 - RNA, 16 nt, Human
accuuuuuauuucaaa

SEQ ID NO: 1954115 - RNA, 22 nt, Human
uccacugguucuucuuggucuc

SEQ ID NO: 1954116 - RNA, 22 nt, Human
uccagaauguauagacaggaaa

SEQ ID NO: 1954117 - RNA, 18 nt, Human
uccagaauggucuuucua

SEQ ID NO: 1954118 - RNA, 21 nt, Human
uccacugugccaugugccagg

SEQ ID NO: 1954119 - RNA, 17 nt, Human
uccacugggguggccug

SEQ ID NO: 1954120 - RNA, 18 nt, Human
uccacugggguggccuga

SEQ ID NO: 1954121 - RNA, 11 nt, Human
uccagccuggg

SEQ ID NO: 1954122 - RNA, 22 nt, Human
uccagccuggaaaccugucuga

SEQ ID NO: 1954123 - RNA, 13 nt, Human
uccagccugccac

SEQ ID NO: 1954124 - RNA, 20 nt, Human
uccagccugcugccugcuuu

SEQ ID NO: 1954125 - RNA, 20 nt, Human
uccagcccugaguuccuagc

SEQ ID NO: 1954126 - RNA, 22 nt, Human
uccagcccugaguuccuagcca

SEQ ID NO: 1954127 - RNA, 13 nt, Human
uccagaccccugg

SEQ ID NO: 1954128 - RNA, 15 nt, Human
uccagaauuucccaa

SEQ ID NO: 1954129 - RNA, 14 nt, Human
uccagaauuuccca

SEQ ID NO: 1954130 - RNA, 10 nt, Human
uccaggcucc

SEQ ID NO: 1954131 - RNA, 21 nt, Human
uccaggcugggagagccuucc

SEQ ID NO: 1954132 - RNA, 20 nt, Human
uccaggcugggagagccuuc

SEQ ID NO: 1954133 - RNA, 12 nt, Human
uccaggcuccuu

SEQ ID NO: 1954134 - RNA, 22 nt, Human
uccaggcuccuuuagcgcccag

SEQ ID NO: 1954135 - RNA, 23 nt, Human
uccaggcugggagagccuuccag

SEQ ID NO: 1954136 - RNA, 18 nt, Human
acgaauauugcugauggu

SEQ ID NO: 1954137 - RNA, 15 nt, Human
acgaauauugcugau

SEQ ID NO: 1954138 - RNA, 15 nt, Human
ucauauuuucaugcu

SEQ ID NO: 1954139 - RNA, 22 nt, Human
ucauauuuguacuuucuguuaa

SEQ ID NO: 1954140 - RNA, 16 nt, Human
ucauauuuuaauuuca

SEQ ID NO: 1954141 - RNA, 17 nt, Human
ucauauuuuaauuucaa

SEQ ID NO: 1954142 - RNA, 21 nt, Human
ucauauuuuaauuucaagcuu

SEQ ID NO: 1954143 - RNA, 20 nt, Human
ucauauuuuaaacagaggau

SEQ ID NO: 1954144 - RNA, 14 nt, Human
ucauauuuguacuu

SEQ ID NO: 1954145 - RNA, 19 nt, Human
ucauauuuguacuuucugu

SEQ ID NO: 1954146 - RNA, 16 nt, Human
accgagucucuucucc

SEQ ID NO: 1954147 - RNA, 17 nt, Human
accgagucucuucucca

SEQ ID NO: 1954148 - RNA, 23 nt, Human
ucauauuuacuucuuauacauuu

SEQ ID NO: 1954149 - RNA, 15 nt, Human
ucauauuuacuucuu

SEQ ID NO: 1954150 - RNA, 21 nt, Human
ucauauugguauauccuuuuc

SEQ ID NO: 1954151 - RNA, 22 nt, Human
ucauauugguauauccuuuucu

SEQ ID NO: 1954152 - RNA, 13 nt, Human
ucauauuuaauau

SEQ ID NO: 1954153 - RNA, 16 nt, Human
ucauauauuuuaugaa

SEQ ID NO: 1954154 - RNA, 22 nt, Human
ucauauauuuuaugaaucagaa

SEQ ID NO: 1954155 - RNA, 18 nt, Human
ucauauccccuauuuaac

SEQ ID NO: 1954156 - RNA, 16 nt, Human
ucauaaauuuaugguu

SEQ ID NO: 1954157 - RNA, 13 nt, Human
ucauaaauucaaa

SEQ ID NO: 1954158 - RNA, 14 nt, Human
ucauaaccuagccu

SEQ ID NO: 1954159 - RNA, 15 nt, Human
ucauaguaugguggc

SEQ ID NO: 1954160 - RNA, 24 nt, Human
ucauaaauucaaaccuaaguugcu

SEQ ID NO: 1954161 - RNA, 20 nt, Human
ucauaguagaacuuuauaaa

SEQ ID NO: 1954162 - RNA, 18 nt, Human
ucauaguaugguggcugg

SEQ ID NO: 1954163 - RNA, 19 nt, Human
ucauaguaugguggcuggg

SEQ ID NO: 1954164 - RNA, 21 nt, Human
ucauaguaugguggcuggguu

SEQ ID NO: 1954165 - RNA, 17 nt, Human
ucauaguuuuauuuaua

SEQ ID NO: 1954166 - RNA, 15 nt, Human
ucauaguuuuauuua

SEQ ID NO: 1954167 - RNA, 16 nt, Human
ucauaguuuuauuuau

SEQ ID NO: 1954168 - RNA, 18 nt, Human
ucauauaagauucauauu

SEQ ID NO: 1954169 - RNA, 15 nt, Human
ucagugccuuaugga

SEQ ID NO: 1954170 - RNA, 14 nt, Human
ucagugccuuaugg

SEQ ID NO: 1954171 - RNA, 12 nt, Human
ucagugccuuau

SEQ ID NO: 1954172 - RNA, 11 nt, Human
ucagugccuua

SEQ ID NO: 1954173 - RNA, 10 nt, Human
ucagugccuu

SEQ ID NO: 1954174 - RNA, 9 nt, Human
ucagugccu

SEQ ID NO: 1954175 - RNA, 20 nt, Human
ucagugcccuccaggauaga

SEQ ID NO: 1954176 - RNA, 23 nt, Human
ucagugccccgucuacagcuccc

SEQ ID NO: 1954177 - RNA, 22 nt, Human
ucaguaguuugcauuucagaaa

SEQ ID NO: 1954178 - RNA, 19 nt, Human
ucaguaguuugcauuucag

SEQ ID NO: 1954179 - RNA, 20 nt, Human
ucaguaguuugcauuucaga

SEQ ID NO: 1954180 - RNA, 21 nt, Human
ucaguaguuugcauuucagaa

SEQ ID NO: 1954181 - RNA, 13 nt, Human
ucaguauccaggc

SEQ ID NO: 1954182 - RNA, 17 nt, Human
ucaguauccaggcuuug

SEQ ID NO: 1954183 - RNA, 19 nt, Human
accgaaaacguggcugcuu

SEQ ID NO: 1954184 - RNA, 17 nt, Human
accgaaaacguggcugc

SEQ ID NO: 1954185 - RNA, 14 nt, Human
ucaguauguggaag

SEQ ID NO: 1954186 - RNA, 16 nt, Human
ucaguauguggaagug

SEQ ID NO: 1954187 - RNA, 12 nt, Human
ucaguaugugga

SEQ ID NO: 1954188 - RNA, 16 nt, Human
ucagugccaaaaacaa

SEQ ID NO: 1954189 - RNA, 12 nt, Human
ucagugccacua

SEQ ID NO: 1954190 - RNA, 16 nt, Human
ucaguggggaggggcu

SEQ ID NO: 1954191 - RNA, 12 nt, Human
ucaguggcagcu

SEQ ID NO: 1954192 - RNA, 18 nt, Human
ucagugccuuauggaaca

SEQ ID NO: 1954193 - RNA, 16 nt, Human
ucagugccuuauggaa

SEQ ID NO: 1954194 - RNA, 11 nt, Human
ucaguggcagc

SEQ ID NO: 1954195 - RNA, 15 nt, Human
ucaguuuuucuuaau

SEQ ID NO: 1954196 - RNA, 17 nt, Human
ucaguuuuugugaaaag

SEQ ID NO: 1954197 - RNA, 15 nt, Human
ucaguuuuugugaaa

SEQ ID NO: 1954198 - RNA, 20 nt, Human
accucccacaaaggagagcu

SEQ ID NO: 1954199 - RNA, 22 nt, Human
accuccauguggacuuaggaag

SEQ ID NO: 1954200 - RNA, 21 nt, Human
accucacucagaaguccagag

SEQ ID NO: 1954201 - RNA, 14 nt, Human
accucacucagcac

SEQ ID NO: 1954202 - RNA, 15 nt, Human
accucacucagcacc

SEQ ID NO: 1954203 - RNA, 16 nt, Human
accucacucagcacca

SEQ ID NO: 1954204 - RNA, 17 nt, Human
accucacucagcaccac

SEQ ID NO: 1954205 - RNA, 19 nt, Human
accucacucagcaccacuc

SEQ ID NO: 1954206 - RNA, 20 nt, Human
accucacucagcaccacuca

SEQ ID NO: 1954207 - RNA, 22 nt, Human
accucacucagcaccacucaag

SEQ ID NO: 1954208 - RNA, 13 nt, Human
accuccucuccug

SEQ ID NO: 1954209 - RNA, 14 nt, Human
accuccucuccuga

SEQ ID NO: 1954210 - RNA, 15 nt, Human
accuccccuugccag

SEQ ID NO: 1954211 - RNA, 16 nt, Human
accuccccuugccagc

SEQ ID NO: 1954212 - RNA, 17 nt, Human
accuccccuugccagcu

SEQ ID NO: 1954213 - RNA, 19 nt, Human
accuccccuugccagcugc

SEQ ID NO: 1954214 - RNA, 21 nt, Human
accucacgugcaaagccacca

SEQ ID NO: 1954215 - RNA, 12 nt, Human
accuagaaaaca

SEQ ID NO: 1954216 - RNA, 16 nt, Human
accgcagacaggacca

SEQ ID NO: 1954217 - RNA, 12 nt, Human
accgcagacagg

SEQ ID NO: 1954218 - RNA, 17 nt, Human
accgcagacaggaccag

SEQ ID NO: 1954219 - RNA, 17 nt, Human
ucauguuuacagaggac

SEQ ID NO: 1954220 - RNA, 11 nt, Human
ucauguuucuu

SEQ ID NO: 1954221 - RNA, 12 nt, Human
ucauguuucuuu

SEQ ID NO: 1954222 - RNA, 14 nt, Human
ucauguuucuuuga

SEQ ID NO: 1954223 - RNA, 15 nt, Human
ucauguuucuuugau

SEQ ID NO: 1954224 - RNA, 21 nt, Human
ucauguuucuuugaucaugaa

SEQ ID NO: 1954225 - RNA, 22 nt, Human
ucaugugggccacacaagugca

SEQ ID NO: 1954226 - RNA, 23 nt, Human
ucaugcaaacuuuauuuuguguu

SEQ ID NO: 1954227 - RNA, 17 nt, Human
ucaugcagaguauuucu

SEQ ID NO: 1954228 - RNA, 21 nt, Human
ucaugcagaguauuucuaaag

SEQ ID NO: 1954229 - RNA, 16 nt, Human
ucaugcagguuagaaa

SEQ ID NO: 1954230 - RNA, 16 nt, Human
ucaugugaaaucauuc

SEQ ID NO: 1954231 - RNA, 17 nt, Human
ucaugugaaaucauuca

SEQ ID NO: 1954232 - RNA, 13 nt, Human
ucauccauccagg

SEQ ID NO: 1954233 - RNA, 23 nt, Human
ucauccuuucacuucuuucccuu

SEQ ID NO: 1954234 - RNA, 13 nt, Human
ucaucuaggauuu

SEQ ID NO: 1954235 - RNA, 16 nt, Human
ucaugaaagauucaau

SEQ ID NO: 1954236 - RNA, 17 nt, Human
ucaugaaagauucaaug

SEQ ID NO: 1954237 - RNA, 18 nt, Human
ucaugaaaugcuauguca

SEQ ID NO: 1954238 - RNA, 20 nt, Human
ucaugaaaugcuaugucauu

SEQ ID NO: 1954239 - RNA, 21 nt, Human
ucaugaaaugcuaugucauuu

SEQ ID NO: 1954240 - RNA, 15 nt, Human
ucaugaaauuacccu

SEQ ID NO: 1954241 - RNA, 14 nt, Human
ucaugcaaacuuua

SEQ ID NO: 1954242 - RNA, 11 nt, Human
ucaugauuuuu

SEQ ID NO: 1954243 - RNA, 13 nt, Human
ucagcccucccug

SEQ ID NO: 1954244 - RNA, 14 nt, Human
ucagcccucccugc

SEQ ID NO: 1954245 - RNA, 15 nt, Human
ucagcccucccugcc

SEQ ID NO: 1954246 - RNA, 16 nt, Human
ucagcccucccugccc

SEQ ID NO: 1954247 - RNA, 19 nt, Human
acccaggagccccgaggcc

SEQ ID NO: 1954248 - RNA, 23 nt, Human
acccaggagccccgaggccuucu

SEQ ID NO: 1954249 - RNA, 17 nt, Human
ucagcccucccugcccc

SEQ ID NO: 1954250 - RNA, 17 nt, Human
accccacacacgccaga

SEQ ID NO: 1954251 - RNA, 13 nt, Human
accccagccccaa

SEQ ID NO: 1954252 - RNA, 22 nt, Human
accccagccccaaaacucuccu

SEQ ID NO: 1954253 - RNA, 12 nt, Human
accccagccuca

SEQ ID NO: 1954254 - RNA, 17 nt, Human
ucagauuugccuuauug

SEQ ID NO: 1954255 - RNA, 15 nt, Human
ucagauuugcacaaa

SEQ ID NO: 1954256 - RNA, 16 nt, Human
ucagauuugcacaaaa

SEQ ID NO: 1954257 - RNA, 19 nt, Human
ucagauuugcacaaaaaga

SEQ ID NO: 1954258 - RNA, 20 nt, Human
ucagauuugcacaaaaagau

SEQ ID NO: 1954259 - RNA, 22 nt, Human
ucagauuugccuuauuggcagc

SEQ ID NO: 1954260 - RNA, 21 nt, Human
ucagccagaagccacccaaag

SEQ ID NO: 1954261 - RNA, 15 nt, Human
ucagccacugaggga

SEQ ID NO: 1954262 - RNA, 15 nt, Human
ucagcaaaagaugcu

SEQ ID NO: 1954263 - RNA, 18 nt, Human
accaguguuguggauuua

SEQ ID NO: 1954264 - RNA, 21 nt, Human
ucagauuugaacucuucaauc

SEQ ID NO: 1954265 - RNA, 14 nt, Human
ucagauuugcacaa

SEQ ID NO: 1954266 - RNA, 12 nt, Human
ucagauuugaac

SEQ ID NO: 1954267 - RNA, 15 nt, Human
accccuggaccccag

SEQ ID NO: 1954268 - RNA, 17 nt, Human
accccuggaccccagcc

SEQ ID NO: 1954269 - RNA, 16 nt, Human
accccuggugguucac

SEQ ID NO: 1954270 - RNA, 18 nt, Human
accccuggcuuuucacug

SEQ ID NO: 1954271 - RNA, 19 nt, Human
accccuggcuuuucacugc

SEQ ID NO: 1954272 - RNA, 20 nt, Human
accccuggcuuuucacugcu

SEQ ID NO: 1954273 - RNA, 21 nt, Human
accccuggcuuuucacugcug

SEQ ID NO: 1954274 - RNA, 12 nt, Human
ucagccuucuuu

SEQ ID NO: 1954275 - RNA, 15 nt, Human
ucagccuucuuuuuc

SEQ ID NO: 1954276 - RNA, 18 nt, Human
ucagccuucuuuuucugg

SEQ ID NO: 1954277 - RNA, 19 nt, Human
ucagccuucuuuuucugga

SEQ ID NO: 1954278 - RNA, 12 nt, Human
ucagcucaugga

SEQ ID NO: 1954279 - RNA, 12 nt, Human
ucagcuccagcu

SEQ ID NO: 1954280 - RNA, 14 nt, Human
ucagcguuuugcaa

SEQ ID NO: 1954281 - RNA, 19 nt, Human
ucagcggggacagcuccuu

SEQ ID NO: 1954282 - RNA, 20 nt, Human
ucagcggggacagcuccuuc

SEQ ID NO: 1954283 - RNA, 21 nt, Human
ucagcggggacagcuccuucu

SEQ ID NO: 1954284 - RNA, 23 nt, Human
ucagcggggacagcuccuucugu

SEQ ID NO: 1954285 - RNA, 18 nt, Human
accccauccuccagggcu

SEQ ID NO: 1954286 - RNA, 18 nt, Human
accccaucucuacaaaaa

SEQ ID NO: 1954287 - RNA, 20 nt, Human
accccagccucaaauccagg

SEQ ID NO: 1954288 - RNA, 21 nt, Human
accccagccucaaauccagga

SEQ ID NO: 1954289 - RNA, 15 nt, Human
accccugagcuugca

SEQ ID NO: 1954290 - RNA, 22 nt, Human
accccugcaguuccccuggaag

SEQ ID NO: 1954291 - RNA, 16 nt, Human
accccugcccagauca

SEQ ID NO: 1954292 - RNA, 11 nt, Human
accccugcccc

SEQ ID NO: 1954293 - RNA, 14 nt, Human
accccucgcccagu

SEQ ID NO: 1954294 - RNA, 18 nt, Human
accccucgcccaguccca

SEQ ID NO: 1954295 - RNA, 19 nt, Human
accccucgcccagucccag

SEQ ID NO: 1954296 - RNA, 22 nt, Human
accccucgcccagucccagcag

SEQ ID NO: 1954297 - RNA, 23 nt, Human
accccucgcccagucccagcagc

SEQ ID NO: 1954298 - RNA, 24 nt, Human
accccucgcccagucccagcagcc

SEQ ID NO: 1954299 - RNA, 12 nt, Human
accccuggaccc

SEQ ID NO: 1954300 - RNA, 14 nt, Human
accccuggacccca

SEQ ID NO: 1954301 - RNA, 20 nt, Human
ucaggccaggcccucugccc

SEQ ID NO: 1954302 - RNA, 22 nt, Human
ucaggccaggcccucugcccac

SEQ ID NO: 1954303 - RNA, 21 nt, Human
ucaggccaggcccucugccca

SEQ ID NO: 1954304 - RNA, 14 nt, Human
ucagcuccagcuca

SEQ ID NO: 1954305 - RNA, 15 nt, Human
ucagcuccagcucac

SEQ ID NO: 1954306 - RNA, 21 nt, Human
ucagcuuguaaauagcucagg

SEQ ID NO: 1954307 - RNA, 22 nt, Human
ucagcuuguaaauagcucaggu

SEQ ID NO: 1954308 - RNA, 23 nt, Human
ucaggccaggcccucugcccacu

SEQ ID NO: 1954309 - RNA, 19 nt, Human
ucagggucccugguggcag

SEQ ID NO: 1954310 - RNA, 16 nt, Human
ucaggguuggccccug

SEQ ID NO: 1954311 - RNA, 23 nt, Human
ucagguaacaggcagauacagga

SEQ ID NO: 1954312 - RNA, 21 nt, Human
ucagguaacaggcagauacag

SEQ ID NO: 1954313 - RNA, 22 nt, Human
ucagguaacaggcagauacagg

SEQ ID NO: 1954314 - RNA, 14 nt, Human
acccggccccugcu

SEQ ID NO: 1954315 - RNA, 18 nt, Human
acccggaggggccuggca

SEQ ID NO: 1954316 - RNA, 21 nt, Human
acccggaggggccuggcagcc

SEQ ID NO: 1954317 - RNA, 15 nt, Human
acccggccccugcug

SEQ ID NO: 1954318 - RNA, 16 nt, Human
acccggccccugcugg

SEQ ID NO: 1954319 - RNA, 22 nt, Human
acccggccccugcugguucagg

SEQ ID NO: 1954320 - RNA, 17 nt, Human
acccggccccugcuggu

SEQ ID NO: 1954321 - RNA, 20 nt, Human
acccggccccugcugguuca

SEQ ID NO: 1954322 - RNA, 13 nt, Human
acccgggaagggg

SEQ ID NO: 1954323 - RNA, 12 nt, Human
acccgggaaggg

SEQ ID NO: 1954324 - RNA, 17 nt, Human
acccgggaggcagaggu

SEQ ID NO: 1954325 - RNA, 23 nt, Human
acccuuguggucccaccccacac

SEQ ID NO: 1954326 - RNA, 20 nt, Human
acccuuguggucccacccca

SEQ ID NO: 1954327 - RNA, 17 nt, Human
acccuugccgucuaccu

SEQ ID NO: 1954328 - RNA, 19 nt, Human
acccuuucuacuuccaaga

SEQ ID NO: 1954329 - RNA, 15 nt, Human
accgaaaacguggcu

SEQ ID NO: 1954330 - RNA, 13 nt, Human
acccuuguuccag

SEQ ID NO: 1954331 - RNA, 21 nt, Human
acccuuuccagguucugaaag

SEQ ID NO: 1954332 - RNA, 18 nt, Human
acccuuucuacuuccaag

SEQ ID NO: 1954333 - RNA, 15 nt, Human
acccugcccuguggg

SEQ ID NO: 1954334 - RNA, 17 nt, Human
acccugaggcccagagg

SEQ ID NO: 1954335 - RNA, 16 nt, Human
acccugaggcccagag

SEQ ID NO: 1954336 - RNA, 15 nt, Human
acccugaggcccaga

SEQ ID NO: 1954337 - RNA, 22 nt, Human
acccugcccugugggcccccaa

SEQ ID NO: 1954338 - RNA, 17 nt, Human
acccugcccugugggcc

SEQ ID NO: 1954339 - RNA, 13 nt, Human
acccugaaaugug

SEQ ID NO: 1954340 - RNA, 14 nt, Human
acccugaaaugugu

SEQ ID NO: 1954341 - RNA, 15 nt, Human
acccugaaaugugug

SEQ ID NO: 1954342 - RNA, 23 nt, Human
acccugaacaacgagccuuuuca

SEQ ID NO: 1954343 - RNA, 11 nt, Human
acccugaaaug

SEQ ID NO: 1954344 - RNA, 12 nt, Human
acccugaaaugu

SEQ ID NO: 1954345 - RNA, 14 nt, Human
acccugaggcccag

SEQ ID NO: 1954346 - RNA, 18 nt, Human
acccugaaagcccugagc

SEQ ID NO: 1954347 - RNA, 16 nt, Human
acccugaaagcccuga

SEQ ID NO: 1954348 - RNA, 14 nt, Human
acccgguccccacu

SEQ ID NO: 1954349 - RNA, 14 nt, Human
acccgguucagugu

SEQ ID NO: 1954350 - RNA, 22 nt, Human
acccgguucaguguuucugggg

SEQ ID NO: 1954351 - RNA, 19 nt, Human
acauguccaagaagcccag

SEQ ID NO: 1954352 - RNA, 15 nt, Human
acauguccaagaagc

SEQ ID NO: 1954353 - RNA, 23 nt, Human
acauguaauuaaguacuauguau

SEQ ID NO: 1954354 - RNA, 15 nt, Human
acauguaauuugugu

SEQ ID NO: 1954355 - RNA, 14 nt, Human
acauuccugaacag

SEQ ID NO: 1954356 - RNA, 15 nt, Human
acauuccugaacagg

SEQ ID NO: 1954357 - RNA, 14 nt, Human
acauuccugaugcu

SEQ ID NO: 1954358 - RNA, 18 nt, Human
acauucuauuucaacuuc

SEQ ID NO: 1954359 - RNA, 13 nt, Human
acauucucaguuu

SEQ ID NO: 1954360 - RNA, 14 nt, Human
acauucucaguuuu

SEQ ID NO: 1954361 - RNA, 15 nt, Human
acauucucaguuuuu

SEQ ID NO: 1954362 - RNA, 17 nt, Human
acauucucaguuuuucu

SEQ ID NO: 1954363 - RNA, 19 nt, Human
acauucucaguuuuucuua

SEQ ID NO: 1954364 - RNA, 14 nt, Human
ucaaccagcagaug

SEQ ID NO: 1954365 - RNA, 12 nt, Human
ucaaccacaaaa

SEQ ID NO: 1954366 - RNA, 14 nt, Human
ucaaccacaaaacu

SEQ ID NO: 1954367 - RNA, 15 nt, Human
ucaaccauuccccau

SEQ ID NO: 1954368 - RNA, 18 nt, Human
ucaaccauuccccauggg

SEQ ID NO: 1954369 - RNA, 20 nt, Human
ucaacugcaucaagauguga

SEQ ID NO: 1954370 - RNA, 21 nt, Human
ucaacaacauuccucaaaaug

SEQ ID NO: 1954371 - RNA, 21 nt, Human
ucaacaaggcaaaaacaaaga

SEQ ID NO: 1954372 - RNA, 16 nt, Human
ucaacaaggcuugcug

SEQ ID NO: 1954373 - RNA, 20 nt, Human
ucaacaaggcuugcugcaga

SEQ ID NO: 1954374 - RNA, 17 nt, Human
ucaaccaaugccaaaaa

SEQ ID NO: 1954375 - RNA, 20 nt, Human
ucaaccaaaugguacaaaac

SEQ ID NO: 1954376 - RNA, 14 nt, Human
ucaaccaaauggua

SEQ ID NO: 1954377 - RNA, 16 nt, Human
ucaaccaaaugguaca

SEQ ID NO: 1954378 - RNA, 17 nt, Human
ucaaccaaaugguacaa

SEQ ID NO: 1954379 - RNA, 18 nt, Human
ucaaccaaaugguacaaa

SEQ ID NO: 1954380 - RNA, 17 nt, Human
ucaacauuucucauguu

SEQ ID NO: 1954381 - RNA, 13 nt, Human
ucaaccaaauggu

SEQ ID NO: 1954382 - RNA, 13 nt, Human
ucaaauuucuaaa

SEQ ID NO: 1954383 - RNA, 22 nt, Human
acauggcuggagcuagaauuug

SEQ ID NO: 1954384 - RNA, 22 nt, Human
acaugcuuguugacagagagag

SEQ ID NO: 1954385 - RNA, 13 nt, Human
acaugcuuuguga

SEQ ID NO: 1954386 - RNA, 12 nt, Human
acauggaacagu

SEQ ID NO: 1954387 - RNA, 18 nt, Human
acaugggacuaugcuuuu

SEQ ID NO: 1954388 - RNA, 20 nt, Human
acaugggacuaugcuuuucu

SEQ ID NO: 1954389 - RNA, 17 nt, Human
acaugggacuaugcuuu

SEQ ID NO: 1954390 - RNA, 22 nt, Human
acauguaauuaaguacuaugua

SEQ ID NO: 1954391 - RNA, 21 nt, Human
acauguaauuaaguacuaugu

SEQ ID NO: 1954392 - RNA, 19 nt, Human
acauguaauuaaguacuau

SEQ ID NO: 1954393 - RNA, 17 nt, Human
acauguaauuaaguacu

SEQ ID NO: 1954394 - RNA, 11 nt, Human
acauggugaug

SEQ ID NO: 1954395 - RNA, 15 nt, Human
acauguaauuaagua

SEQ ID NO: 1954396 - RNA, 20 nt, Human
acaugcuuguguuucuuagu

SEQ ID NO: 1954397 - RNA, 23 nt, Human
acaugagguacugagagugaaca

SEQ ID NO: 1954398 - RNA, 15 nt, Human
acaugcuacacacug

SEQ ID NO: 1954399 - RNA, 21 nt, Human
acaugcuacacacugcauguu

SEQ ID NO: 1954400 - RNA, 15 nt, Human
acagucagguugaag

SEQ ID NO: 1954401 - RNA, 16 nt, Human
acagucagguugaaga

SEQ ID NO: 1954402 - RNA, 12 nt, Human
acagucccugcc

SEQ ID NO: 1954403 - RNA, 20 nt, Human
acaugaauauuuaguguuca

SEQ ID NO: 1954404 - RNA, 20 nt, Human
acaugagguacugagaguga

SEQ ID NO: 1954405 - RNA, 13 nt, Human
acauuuucucuua

SEQ ID NO: 1954406 - RNA, 16 nt, Human
acauuuucucuuagaa

SEQ ID NO: 1954407 - RNA, 17 nt, Human
acauuuucucuuagaaa

SEQ ID NO: 1954408 - RNA, 18 nt, Human
acauuuucucuuagaaaa

SEQ ID NO: 1954409 - RNA, 17 nt, Human
acauuuucuuaauccag

SEQ ID NO: 1954410 - RNA, 18 nt, Human
acauuuuauuuuauuaug

SEQ ID NO: 1954411 - RNA, 14 nt, Human
acauuuuauuuuau

SEQ ID NO: 1954412 - RNA, 19 nt, Human
acauuuuauuuuauuaugc

SEQ ID NO: 1954413 - RNA, 20 nt, Human
acauuuuauuuuauuaugca

SEQ ID NO: 1954414 - RNA, 16 nt, Human
acauugauuugauuuu

SEQ ID NO: 1954415 - RNA, 19 nt, Human
acauugcauauaacuuaua

SEQ ID NO: 1954416 - RNA, 21 nt, Human
acauuuuuaagugcugcauuu

SEQ ID NO: 1954417 - RNA, 22 nt, Human
acauuuuuaagugcugcauuua

SEQ ID NO: 1954418 - RNA, 23 nt, Human
acauuuuuaagugcugcauuuaa

SEQ ID NO: 1954419 - RNA, 19 nt, Human
acauuuuuaagugcugcau

SEQ ID NO: 1954420 - RNA, 14 nt, Human
acauuuuuuaaaug

SEQ ID NO: 1954421 - RNA, 16 nt, Human
acauuuuuuaaaugca

SEQ ID NO: 1954422 - RNA, 17 nt, Human
acauuuuuuaaaugcac

SEQ ID NO: 1954423 - RNA, 21 nt, Human
acauuuuuuaaaugcaccugg

SEQ ID NO: 1954424 - RNA, 16 nt, Human
accaaaaguuauuaaa

SEQ ID NO: 1954425 - RNA, 18 nt, Human
accaaaaguuauuaaaau

SEQ ID NO: 1954426 - RNA, 19 nt, Human
accaaaaguuauuaaaauu

SEQ ID NO: 1954427 - RNA, 13 nt, Human
accaaaauaagaa

SEQ ID NO: 1954428 - RNA, 15 nt, Human
accaaaauaagaaaa

SEQ ID NO: 1954429 - RNA, 16 nt, Human
accaaaauaagaaaag

SEQ ID NO: 1954430 - RNA, 17 nt, Human
accaaaauaagaaaaga

SEQ ID NO: 1954431 - RNA, 18 nt, Human
accaaaauaagaaaagau

SEQ ID NO: 1954432 - RNA, 22 nt, Human
accaaaaguuauuaaaauuguu

SEQ ID NO: 1954433 - RNA, 13 nt, Human
accaaagaagaaa

SEQ ID NO: 1954434 - RNA, 14 nt, Human
accaaaccuucuga

SEQ ID NO: 1954435 - RNA, 15 nt, Human
accaaacucccauca

SEQ ID NO: 1954436 - RNA, 18 nt, Human
accaaacuggaucacugg

SEQ ID NO: 1954437 - RNA, 12 nt, Human
accaaagaagaa

SEQ ID NO: 1954438 - RNA, 19 nt, Human
accaaacccacccuuucua

SEQ ID NO: 1954439 - RNA, 20 nt, Human
accaaacccacccuuucuac

SEQ ID NO: 1954440 - RNA, 22 nt, Human
accaaacccacccuuucuacuu

SEQ ID NO: 1954441 - RNA, 21 nt, Human
accaaaauuugggguauuuau

SEQ ID NO: 1954442 - RNA, 19 nt, Human
ucaaucuggauucauauuu

SEQ ID NO: 1954443 - RNA, 22 nt, Human
ucaaucucguauagaagucuuc

SEQ ID NO: 1954444 - RNA, 24 nt, Human
ucaaucucguauagaagucuucau

SEQ ID NO: 1954445 - RNA, 17 nt, Human
ucaaucucguauagaag

SEQ ID NO: 1954446 - RNA, 18 nt, Human
ucaaucucguauagaagu

SEQ ID NO: 1954447 - RNA, 20 nt, Human
ucaaucucguauagaagucu

SEQ ID NO: 1954448 - RNA, 21 nt, Human
ucaaucucguauagaagucuu

SEQ ID NO: 1954449 - RNA, 16 nt, Human
ucaaucucguauagaa

SEQ ID NO: 1954450 - RNA, 23 nt, Human
ucaaugaaugaaugaauggcuaa

SEQ ID NO: 1954451 - RNA, 17 nt, Human
ucaaugaacaagcauuc

SEQ ID NO: 1954452 - RNA, 14 nt, Human
acauucuuuuugcu

SEQ ID NO: 1954453 - RNA, 18 nt, Human
acauucuuuuugcucuaa

SEQ ID NO: 1954454 - RNA, 19 nt, Human
acauucuuuuugcucuaaa

SEQ ID NO: 1954455 - RNA, 23 nt, Human
acauucuuuuugcucuaaaauau

SEQ ID NO: 1954456 - RNA, 15 nt, Human
ucaauauauuuguau

SEQ ID NO: 1954457 - RNA, 13 nt, Human
ucaauaguaauau

SEQ ID NO: 1954458 - RNA, 14 nt, Human
ucaauaguaauaua

SEQ ID NO: 1954459 - RNA, 22 nt, Human
ucaauaucuuuuuuuuaauaaa

SEQ ID NO: 1954460 - RNA, 14 nt, Human
ucaacuucaggaaa

SEQ ID NO: 1954461 - RNA, 22 nt, Human
ucaaguccucuuuucugagagg

SEQ ID NO: 1954462 - RNA, 19 nt, Human
accagcuuggcucaggcug

SEQ ID NO: 1954463 - RNA, 20 nt, Human
accagcuuggcucaggcuga

SEQ ID NO: 1954464 - RNA, 15 nt, Human
accagcuuugacccg

SEQ ID NO: 1954465 - RNA, 18 nt, Human
accagcuguguccggccc

SEQ ID NO: 1954466 - RNA, 13 nt, Human
accagcugugucc

SEQ ID NO: 1954467 - RNA, 17 nt, Human
accacuacauucuguua

SEQ ID NO: 1954468 - RNA, 16 nt, Human
accacuacauucuguu

SEQ ID NO: 1954469 - RNA, 13 nt, Human
accaccagaagcc

SEQ ID NO: 1954470 - RNA, 15 nt, Human
accacuacauucugu

SEQ ID NO: 1954471 - RNA, 22 nt, Human
accagcgugugacuacuccccc

SEQ ID NO: 1954472 - RNA, 14 nt, Human
ucacgugcaaagcc

SEQ ID NO: 1954473 - RNA, 17 nt, Human
ucacgucauaggaaguu

SEQ ID NO: 1954474 - RNA, 14 nt, Human
ucacgucauaggaa

SEQ ID NO: 1954475 - RNA, 16 nt, Human
ucacgucauaggaagu

SEQ ID NO: 1954476 - RNA, 13 nt, Human
ucacuaaacucug

SEQ ID NO: 1954477 - RNA, 22 nt, Human
ucacuaagaacaaaagaagcag

SEQ ID NO: 1954478 - RNA, 16 nt, Human
ucacuaggcuucuggu

SEQ ID NO: 1954479 - RNA, 18 nt, Human
ucacuacagguuaaaaga

SEQ ID NO: 1954480 - RNA, 23 nt, Human
ucacuugaacccgggaggcagag

SEQ ID NO: 1954481 - RNA, 21 nt, Human
ucacuguuuagauuugccaua

SEQ ID NO: 1954482 - RNA, 15 nt, Human
ucacuguuuagauuu

SEQ ID NO: 1954483 - RNA, 16 nt, Human
ucacuguuuagauuug

SEQ ID NO: 1954484 - RNA, 17 nt, Human
ucacuguuuagauuugc

SEQ ID NO: 1954485 - RNA, 13 nt, Human
ucacuguuuagau

SEQ ID NO: 1954486 - RNA, 12 nt, Human
ucacuguuuaga

SEQ ID NO: 1954487 - RNA, 10 nt, Human
ucacuugagu

SEQ ID NO: 1954488 - RNA, 18 nt, Human
accaguacauucucaguu

SEQ ID NO: 1954489 - RNA, 20 nt, Human
accagucuuucaacucauug

SEQ ID NO: 1954490 - RNA, 15 nt, Human
accaguguuguggau

SEQ ID NO: 1954491 - RNA, 17 nt, Human
accaguguuguggauuu

SEQ ID NO: 1954492 - RNA, 16 nt, Human
ucacugagacagcccg

SEQ ID NO: 1954493 - RNA, 19 nt, Human
ucacuaucccggcugcccu

SEQ ID NO: 1954494 - RNA, 20 nt, Human
ucacuaucccggcugcccuu

SEQ ID NO: 1954495 - RNA, 21 nt, Human
ucacugagacagcccgggcuc

SEQ ID NO: 1954496 - RNA, 17 nt, Human
ucacugagacagcccgg

SEQ ID NO: 1954497 - RNA, 22 nt, Human
ucacugagacagcccgggcucu

SEQ ID NO: 1954498 - RNA, 14 nt, Human
ucacugcagccuca

SEQ ID NO: 1954499 - RNA, 23 nt, Human
ucacuguugcccaggcuggcgug

SEQ ID NO: 1954500 - RNA, 16 nt, Human
ucacuguggugucugu

SEQ ID NO: 1954501 - RNA, 12 nt, Human
ucacuguguaua

SEQ ID NO: 1954502 - RNA, 14 nt, Human
ucacuguguauauu

SEQ ID NO: 1954503 - RNA, 15 nt, Human
ucacuguguauauuu

SEQ ID NO: 1954504 - RNA, 17 nt, Human
ucacuguguauauuuga

SEQ ID NO: 1954505 - RNA, 18 nt, Human
ucacuguguauauuugau

SEQ ID NO: 1954506 - RNA, 19 nt, Human
ucacuguguauauuugauu

SEQ ID NO: 1954507 - RNA, 21 nt, Human
ucacuguguauauuugauuua

SEQ ID NO: 1954508 - RNA, 15 nt, Human
ucacugcagccucaa

SEQ ID NO: 1954509 - RNA, 14 nt, Human
ucacugcagccucc

SEQ ID NO: 1954510 - RNA, 22 nt, Human
ucacugcagccuccgcuucccu

SEQ ID NO: 1954511 - RNA, 23 nt, Human
ucacugcagccuccgcuucccug

SEQ ID NO: 1954512 - RNA, 13 nt, Human
ucacugcauccuc

SEQ ID NO: 1954513 - RNA, 15 nt, Human
accaccacacccagc

SEQ ID NO: 1954514 - RNA, 20 nt, Human
accaccacacccagcccacu

SEQ ID NO: 1954515 - RNA, 24 nt, Human
accacauuggagauguuuaguaau

SEQ ID NO: 1954516 - RNA, 19 nt, Human
accaccaacuacuaccugu

SEQ ID NO: 1954517 - RNA, 18 nt, Human
accacaugugcacaugca

SEQ ID NO: 1954518 - RNA, 21 nt, Human
accacaguguaccauuaaaau

SEQ ID NO: 1954519 - RNA, 17 nt, Human
accacaucuugcucugc

SEQ ID NO: 1954520 - RNA, 15 nt, Human
accacaggugcccgc

SEQ ID NO: 1954521 - RNA, 18 nt, Human
accacaucuugcucugcu

SEQ ID NO: 1954522 - RNA, 19 nt, Human
accacaucuugcucugcug

SEQ ID NO: 1954523 - RNA, 12 nt, Human
accacagcuccu

SEQ ID NO: 1954524 - RNA, 15 nt, Human
accacagcuccuuuu

SEQ ID NO: 1954525 - RNA, 17 nt, Human
accacagcuccuuuucc

SEQ ID NO: 1954526 - RNA, 21 nt, Human
accacagcuccuuuuccagag

SEQ ID NO: 1954527 - RNA, 20 nt, Human
ucacagcuaugcaaaaagcu

SEQ ID NO: 1954528 - RNA, 19 nt, Human
ucaccauguuggccaggcu

SEQ ID NO: 1954529 - RNA, 22 nt, Human
ucaccauguuggccaggcuggu

SEQ ID NO: 1954530 - RNA, 21 nt, Human
ucaccauucguacauaauacu

SEQ ID NO: 1954531 - RNA, 16 nt, Human
ucaccauuuccccagg

SEQ ID NO: 1954532 - RNA, 17 nt, Human
ucaccauuuccccaggg

SEQ ID NO: 1954533 - RNA, 19 nt, Human
ucaccauuuccccagggca

SEQ ID NO: 1954534 - RNA, 20 nt, Human
ucaccauuuccccagggcac

SEQ ID NO: 1954535 - RNA, 16 nt, Human
ucacccaccagacuuu

SEQ ID NO: 1954536 - RNA, 20 nt, Human
ucacaguucucuccuucuuc

SEQ ID NO: 1954537 - RNA, 16 nt, Human
ucacaguucucuccuu

SEQ ID NO: 1954538 - RNA, 13 nt, Human
ucacagccucuga

SEQ ID NO: 1954539 - RNA, 23 nt, Human
ucacagcaagucacuggccagug

SEQ ID NO: 1954540 - RNA, 23 nt, Human
ucacagaugugugauucacagug

SEQ ID NO: 1954541 - RNA, 21 nt, Human
ucacagaugugugauucacag

SEQ ID NO: 1954542 - RNA, 20 nt, Human
ucacagaugggugcuuggag

SEQ ID NO: 1954543 - RNA, 14 nt, Human
ucacaaccuucugu

SEQ ID NO: 1954544 - RNA, 19 nt, Human
ucaauuucaauuuugucug

SEQ ID NO: 1954545 - RNA, 17 nt, Human
ucacaaaggaugcccaa

SEQ ID NO: 1954546 - RNA, 16 nt, Human
accaaagcgaauuuua

SEQ ID NO: 1954547 - RNA, 16 nt, Human
ucaauucuugccaaau

SEQ ID NO: 1954548 - RNA, 22 nt, Human
aauauugaauuuuuauuuuuga

SEQ ID NO: 1954549 - RNA, 20 nt, Human
aauauugaaaggcaaacauu

SEQ ID NO: 1954550 - RNA, 21 nt, Human
aauauuugaauguaugcuuca

SEQ ID NO: 1954551 - RNA, 23 nt, Human
aauauuugaauguaugcuucaua

SEQ ID NO: 1954552 - RNA, 14 nt, Human
aauauuugaaugua

SEQ ID NO: 1954553 - RNA, 15 nt, Human
aauauuuaauguuga

SEQ ID NO: 1954554 - RNA, 12 nt, Human
aauauuuagugu

SEQ ID NO: 1954555 - RNA, 13 nt, Human
aauauuuaauguu

SEQ ID NO: 1954556 - RNA, 14 nt, Human
aauauuuaauguug

SEQ ID NO: 1954557 - RNA, 22 nt, Human
aauaugcacacauuuuuuaaau

SEQ ID NO: 1954558 - RNA, 17 nt, Human
aauaugcacuaagucuc

SEQ ID NO: 1954559 - RNA, 18 nt, Human
aauaugcacuaagucucu

SEQ ID NO: 1954560 - RNA, 16 nt, Human
aauaugcacacauuuu

SEQ ID NO: 1954561 - RNA, 17 nt, Human
aauaugcacacauuuuu

SEQ ID NO: 1954562 - RNA, 15 nt, Human
uaagagaaaugagcu

SEQ ID NO: 1954563 - RNA, 21 nt, Human
aauauucucuguacauauuag

SEQ ID NO: 1954564 - RNA, 17 nt, Human
aauauucucuguacaua

SEQ ID NO: 1954565 - RNA, 18 nt, Human
aauauucucuguacauau

SEQ ID NO: 1954566 - RNA, 14 nt, Human
aauauucucuguac

SEQ ID NO: 1954567 - RNA, 15 nt, Human
aauauucucuguaca

SEQ ID NO: 1954568 - RNA, 15 nt, Human
aauauuccugcauuu

SEQ ID NO: 1954569 - RNA, 19 nt, Human
aauauucauaguagaacuu

SEQ ID NO: 1954570 - RNA, 20 nt, Human
aauaugcacuaagucucuuu

SEQ ID NO: 1954571 - RNA, 22 nt, Human
aauaugcacuaagucucuuuuu

SEQ ID NO: 1954572 - RNA, 18 nt, Human
uaagcacacuugacauca

SEQ ID NO: 1954573 - RNA, 13 nt, Human
uaagcaacaauuu

SEQ ID NO: 1954574 - RNA, 16 nt, Human
uaagcaacaauuuuca

SEQ ID NO: 1954575 - RNA, 18 nt, Human
uaagcaacaauuuucaga

SEQ ID NO: 1954576 - RNA, 21 nt, Human
uaagcagaauuggaaaagacu

SEQ ID NO: 1954577 - RNA, 22 nt, Human
uaagcuguuacugucuucagua

SEQ ID NO: 1954578 - RNA, 17 nt, Human
uaagcagaauuggaaaa

SEQ ID NO: 1954579 - RNA, 21 nt, Human
uaagcacuuuuuaaaaaacuu

SEQ ID NO: 1954580 - RNA, 13 nt, Human
uaagcacuuuuua

SEQ ID NO: 1954581 - RNA, 15 nt, Human
uaagcacuuuuuaaa

SEQ ID NO: 1954582 - RNA, 16 nt, Human
uaagcacuuuuuaaaa

SEQ ID NO: 1954583 - RNA, 17 nt, Human
aauauuugugugcuaaa

SEQ ID NO: 1954584 - RNA, 21 nt, Human
aauauuugugugcuaaacgug

SEQ ID NO: 1954585 - RNA, 14 nt, Human
uaagauuccagaga

SEQ ID NO: 1954586 - RNA, 21 nt, Human
uaagauuccagagaguggcuc

SEQ ID NO: 1954587 - RNA, 18 nt, Human
aaucagguccugcucagc

SEQ ID NO: 1954588 - RNA, 19 nt, Human
uaagaugaucaucuaauuu

SEQ ID NO: 1954589 - RNA, 16 nt, Human
uaacuucauaagcaaa

SEQ ID NO: 1954590 - RNA, 13 nt, Human
uaacuugcuuaaa

SEQ ID NO: 1954591 - RNA, 14 nt, Human
uaacuugcuuaaau

SEQ ID NO: 1954592 - RNA, 15 nt, Human
uaacuugcuuaaaug

SEQ ID NO: 1954593 - RNA, 16 nt, Human
uaacuugcuuaaaugu

SEQ ID NO: 1954594 - RNA, 17 nt, Human
uaacuugcuuaaaugug

SEQ ID NO: 1954595 - RNA, 16 nt, Human
uaacuuucugaaauaa

SEQ ID NO: 1954596 - RNA, 18 nt, Human
uaacuugcuuaaauguga

SEQ ID NO: 1954597 - RNA, 19 nt, Human
uaacuugcuuaaaugugaa

SEQ ID NO: 1954598 - RNA, 20 nt, Human
uaacuugcuuaaaugugaau

SEQ ID NO: 1954599 - RNA, 17 nt, Human
uaacuuggaugaguuuu

SEQ ID NO: 1954600 - RNA, 23 nt, Human
uaacuuggaugaguuuugggaag

SEQ ID NO: 1954601 - RNA, 15 nt, Human
uaagaauauuugaau

SEQ ID NO: 1954602 - RNA, 14 nt, Human
uaagacacuuccgu

SEQ ID NO: 1954603 - RNA, 14 nt, Human
uaagaauauuugaa

SEQ ID NO: 1954604 - RNA, 13 nt, Human
uaagacaaauaug

SEQ ID NO: 1954605 - RNA, 13 nt, Human
uaagaauauuuga

SEQ ID NO: 1954606 - RNA, 19 nt, Human
uaagaauagaacaacauau

SEQ ID NO: 1954607 - RNA, 18 nt, Human
uaacuuugguuaaaaucu

SEQ ID NO: 1954608 - RNA, 18 nt, Human
uaagaagugaaaaucuac

SEQ ID NO: 1954609 - RNA, 22 nt, Human
uaacuuaaaagaacauguauau

SEQ ID NO: 1954610 - RNA, 13 nt, Human
uaacuuaauaauc

SEQ ID NO: 1954611 - RNA, 14 nt, Human
uaacuuaauaauca

SEQ ID NO: 1954612 - RNA, 16 nt, Human
uaacuuaauaaucaag

SEQ ID NO: 1954613 - RNA, 17 nt, Human
uaacuuaauaaucaaga

SEQ ID NO: 1954614 - RNA, 21 nt, Human
uaacuucacauauugauuucc

SEQ ID NO: 1954615 - RNA, 13 nt, Human
uaacuucacauau

SEQ ID NO: 1954616 - RNA, 21 nt, Human
uaacuuaauaaucaagagccu

SEQ ID NO: 1954617 - RNA, 17 nt, Human
uaacuuccaauuuacau

SEQ ID NO: 1954618 - RNA, 14 nt, Human
uaacuucaccauau

SEQ ID NO: 1954619 - RNA, 17 nt, Human
uaaccuuaucauaaauu

SEQ ID NO: 1954620 - RNA, 20 nt, Human
uaacgauaaaagacagugaa

SEQ ID NO: 1954621 - RNA, 16 nt, Human
aauaguggugugauuu

SEQ ID NO: 1954622 - RNA, 22 nt, Human
aauaguggugugauuuggggau

SEQ ID NO: 1954623 - RNA, 12 nt, Human
aauaguguggaa

SEQ ID NO: 1954624 - RNA, 21 nt, Human
uaaaauuuccccuaaucuuuu

SEQ ID NO: 1954625 - RNA, 16 nt, Human
uaaaauuucuuagaaa

SEQ ID NO: 1954626 - RNA, 18 nt, Human
uaaaauuucuuagaaaac

SEQ ID NO: 1954627 - RNA, 12 nt, Human
uaaaauuugaaa

SEQ ID NO: 1954628 - RNA, 14 nt, Human
uaaaauuugaaaca

SEQ ID NO: 1954629 - RNA, 15 nt, Human
uaaaauuugaaacau

SEQ ID NO: 1954630 - RNA, 16 nt, Human
uaaaauuugaaacauu

SEQ ID NO: 1954631 - RNA, 17 nt, Human
uaaaauuugaaacauug

SEQ ID NO: 1954632 - RNA, 21 nt, Human
uaaaauuugaaacauugcuuu

SEQ ID NO: 1954633 - RNA, 15 nt, Human
aauauauuuuaagac

SEQ ID NO: 1954634 - RNA, 14 nt, Human
aauauauuuuaaga

SEQ ID NO: 1954635 - RNA, 17 nt, Human
aauaguuuauuuuaaaa

SEQ ID NO: 1954636 - RNA, 14 nt, Human
aauaguuguugauu

SEQ ID NO: 1954637 - RNA, 22 nt, Human
aauaguguggaaauuaagaaga

SEQ ID NO: 1954638 - RNA, 19 nt, Human
aauaguguggaaauuaaga

SEQ ID NO: 1954639 - RNA, 20 nt, Human
aauaguguggaaauuaagaa

SEQ ID NO: 1954640 - RNA, 11 nt, Human
aauaguucugu

SEQ ID NO: 1954641 - RNA, 13 nt, Human
aauaguuggcuag

SEQ ID NO: 1954642 - RNA, 18 nt, Human
uaacauggacaugaucuu

SEQ ID NO: 1954643 - RNA, 17 nt, Human
uaacauguaauuaagua

SEQ ID NO: 1954644 - RNA, 23 nt, Human
uaacauggacaugaucuucuuua

SEQ ID NO: 1954645 - RNA, 19 nt, Human
uaacauagccaaaauguga

SEQ ID NO: 1954646 - RNA, 18 nt, Human
aauauauuuuaagacgaa

SEQ ID NO: 1954647 - RNA, 19 nt, Human
aauaguuuauuuuaaaaca

SEQ ID NO: 1954648 - RNA, 17 nt, Human
uaacaguggacaaaguu

SEQ ID NO: 1954649 - RNA, 15 nt, Human
aaucauuagguguga

SEQ ID NO: 1954650 - RNA, 16 nt, Human
aaucauguuucuuuga

SEQ ID NO: 1954651 - RNA, 17 nt, Human
aaucauguuucuuugau

SEQ ID NO: 1954652 - RNA, 18 nt, Human
aaucauguuucuuugauc

SEQ ID NO: 1954653 - RNA, 19 nt, Human
aaucauguuucuuugauca

SEQ ID NO: 1954654 - RNA, 17 nt, Human
aaucauuaggugugacu

SEQ ID NO: 1954655 - RNA, 23 nt, Human
aaucauuaggugugacugaauuu

SEQ ID NO: 1954656 - RNA, 12 nt, Human
aauccgcccauc

SEQ ID NO: 1954657 - RNA, 15 nt, Human
aaucgaccugccucg

SEQ ID NO: 1954658 - RNA, 21 nt, Human
aaucgagugccgcaucucaca

SEQ ID NO: 1954659 - RNA, 16 nt, Human
aaucuggauucauauu

SEQ ID NO: 1954660 - RNA, 17 nt, Human
aaucuggauucauauuu

SEQ ID NO: 1954661 - RNA, 19 nt, Human
aaucuacacuccagugaga

SEQ ID NO: 1954662 - RNA, 13 nt, Human
aaucuaaugacau

SEQ ID NO: 1954663 - RNA, 17 nt, Human
aaucuaaugacauucaa

SEQ ID NO: 1954664 - RNA, 18 nt, Human
aaucuaaugacauucaau

SEQ ID NO: 1954665 - RNA, 16 nt, Human
aaucugggccagaauu

SEQ ID NO: 1954666 - RNA, 17 nt, Human
aaucugggccagaauuu

SEQ ID NO: 1954667 - RNA, 18 nt, Human
aaucuggauucauauuua

SEQ ID NO: 1954668 - RNA, 19 nt, Human
aaucuggauucauauuuaa

SEQ ID NO: 1954669 - RNA, 19 nt, Human
aaucuuauaauuuaaaaua

SEQ ID NO: 1954670 - RNA, 22 nt, Human
aaucuuaauacuguuauucuuu

SEQ ID NO: 1954671 - RNA, 13 nt, Human
aaucuuacuuugu

SEQ ID NO: 1954672 - RNA, 14 nt, Human
aaucuuacuuugua

SEQ ID NO: 1954673 - RNA, 15 nt, Human
aaucuuacuuuguaa

SEQ ID NO: 1954674 - RNA, 16 nt, Human
aaucuuacuuuguaaa

SEQ ID NO: 1954675 - RNA, 17 nt, Human
aaucuuacuuuguaaau

SEQ ID NO: 1954676 - RNA, 18 nt, Human
aaucuuacuuuguaaauu

SEQ ID NO: 1954677 - RNA, 19 nt, Human
aaucuuacuuuguaaauuc

SEQ ID NO: 1954678 - RNA, 20 nt, Human
aaucuuacuuuguaaauucu

SEQ ID NO: 1954679 - RNA, 12 nt, Human
aaucuuaauacu

SEQ ID NO: 1954680 - RNA, 14 nt, Human
aaucuuaauacugu

SEQ ID NO: 1954681 - RNA, 15 nt, Human
aaucuuaauacuguu

SEQ ID NO: 1954682 - RNA, 16 nt, Human
aaucuuaauacuguua

SEQ ID NO: 1954683 - RNA, 17 nt, Human
aaucuuaauacuguuau

SEQ ID NO: 1954684 - RNA, 18 nt, Human
aaucuuaauacuguuauu

SEQ ID NO: 1954685 - RNA, 21 nt, Human
aaucuuaauacuguuauucuu

SEQ ID NO: 1954686 - RNA, 15 nt, Human
aaucuuaagaaauaa

SEQ ID NO: 1954687 - RNA, 13 nt, Human
aaucuuaagaaau

SEQ ID NO: 1954688 - RNA, 14 nt, Human
aaucuuaagaaaua

SEQ ID NO: 1954689 - RNA, 21 nt, Human
aaucuguuuuauaccuugcuu

SEQ ID NO: 1954690 - RNA, 18 nt, Human
uaagcuguuugguuuuaa

SEQ ID NO: 1954691 - RNA, 21 nt, Human
uaagcuguuugguuuuaaaau

SEQ ID NO: 1954692 - RNA, 22 nt, Human
uaagcuguuugguuuuaaaaua

SEQ ID NO: 1954693 - RNA, 16 nt, Human
uaaguaaaucucuucu

SEQ ID NO: 1954694 - RNA, 18 nt, Human
uaaguaaaucucuucugu

SEQ ID NO: 1954695 - RNA, 22 nt, Human
uaaguaaaucucuucuguguuu

SEQ ID NO: 1954696 - RNA, 19 nt, Human
uaaguauucuuauuuaaug

SEQ ID NO: 1954697 - RNA, 20 nt, Human
uaaguauucuuauuuaauga

SEQ ID NO: 1954698 - RNA, 19 nt, Human
uaaguacuauguaucaaug

SEQ ID NO: 1954699 - RNA, 17 nt, Human
uaaguacuauguaucaa

SEQ ID NO: 1954700 - RNA, 16 nt, Human
uaaguacuauguauca

SEQ ID NO: 1954701 - RNA, 13 nt, Human
uaaguacuaugua

SEQ ID NO: 1954702 - RNA, 15 nt, Human
uaaguuggaaacacu

SEQ ID NO: 1954703 - RNA, 16 nt, Human
uaaguuggaaacacua

SEQ ID NO: 1954704 - RNA, 17 nt, Human
uaaguuggaaacacuaa

SEQ ID NO: 1954705 - RNA, 18 nt, Human
uaaguuggaaacacuaaa

SEQ ID NO: 1954706 - RNA, 21 nt, Human
uaaguuggaaacacuaaaugu

SEQ ID NO: 1954707 - RNA, 22 nt, Human
uaaguuggaaacacuaaauguu

SEQ ID NO: 1954708 - RNA, 23 nt, Human
uaaguuggaaacacuaaauguua

SEQ ID NO: 1954709 - RNA, 12 nt, Human
uaaguugaguau

SEQ ID NO: 1954710 - RNA, 12 nt, Human
uaaguuggaaac

SEQ ID NO: 1954711 - RNA, 13 nt, Human
uaaguuggaaaca

SEQ ID NO: 1954712 - RNA, 18 nt, Human
uaauaaacacucuugaaa

SEQ ID NO: 1954713 - RNA, 12 nt, Human
uaauaaacacuc

SEQ ID NO: 1954714 - RNA, 17 nt, Human
aaucauauuagacuucu

SEQ ID NO: 1954715 - RNA, 20 nt, Human
aaucauacuccuaugcuuua

SEQ ID NO: 1954716 - RNA, 14 nt, Human
aaucauaaguauuu

SEQ ID NO: 1954717 - RNA, 15 nt, Human
aaucauaaguauuug

SEQ ID NO: 1954718 - RNA, 16 nt, Human
aaucauaaguauuugg

SEQ ID NO: 1954719 - RNA, 19 nt, Human
aaucauacuccuaugcuuu

SEQ ID NO: 1954720 - RNA, 12 nt, Human
aaucauaaguau

SEQ ID NO: 1954721 - RNA, 16 nt, Human
aaucuuuaauuuuaca

SEQ ID NO: 1954722 - RNA, 15 nt, Human
aaucuuuaauuuuac

SEQ ID NO: 1954723 - RNA, 13 nt, Human
aaucuuuaauuaa

SEQ ID NO: 1954724 - RNA, 14 nt, Human
aaucuuuaauuaaa

SEQ ID NO: 1954725 - RNA, 17 nt, Human
aaucuuuagaaaaggca

SEQ ID NO: 1954726 - RNA, 19 nt, Human
uaaugugucaucuagcauu

SEQ ID NO: 1954727 - RNA, 13 nt, Human
uaauguacugcau

SEQ ID NO: 1954728 - RNA, 19 nt, Human
uaauguaucaaauacauuu

SEQ ID NO: 1954729 - RNA, 15 nt, Human
uaaugaaugcauaaa

SEQ ID NO: 1954730 - RNA, 19 nt, Human
uaauguauucauauuugua

SEQ ID NO: 1954731 - RNA, 20 nt, Human
uaauguauucauauuuguac

SEQ ID NO: 1954732 - RNA, 18 nt, Human
uaaugucacaggcagguc

SEQ ID NO: 1954733 - RNA, 14 nt, Human
uaauguauucauau

SEQ ID NO: 1954734 - RNA, 15 nt, Human
uaauguauucauauu

SEQ ID NO: 1954735 - RNA, 16 nt, Human
uaauguauucauauuu

SEQ ID NO: 1954736 - RNA, 17 nt, Human
uaauguauucauauuug

SEQ ID NO: 1954737 - RNA, 18 nt, Human
uaauguauucauauuugu

SEQ ID NO: 1954738 - RNA, 14 nt, Human
aaugaaacuuggau

SEQ ID NO: 1954739 - RNA, 17 nt, Human
aaugaaaccugugucuc

SEQ ID NO: 1954740 - RNA, 17 nt, Human
aaugaaagacuguacaa

SEQ ID NO: 1954741 - RNA, 16 nt, Human
aaugaaagacuguaca

SEQ ID NO: 1954742 - RNA, 17 nt, Human
aaugaaacauuuuguca

SEQ ID NO: 1954743 - RNA, 17 nt, Human
aaucuuuccauauccau

SEQ ID NO: 1954744 - RNA, 13 nt, Human
aaugaaugucagu

SEQ ID NO: 1954745 - RNA, 22 nt, Human
aaugaauggcuaagcaaaaugu

SEQ ID NO: 1954746 - RNA, 17 nt, Human
aaugaaugcauaaaaug

SEQ ID NO: 1954747 - RNA, 22 nt, Human
aaugaaugucagugugacugau

SEQ ID NO: 1954748 - RNA, 17 nt, Human
aaucuuauuaaaguuuc

SEQ ID NO: 1954749 - RNA, 18 nt, Human
aaucuuauuaaaguuuca

SEQ ID NO: 1954750 - RNA, 18 nt, Human
uaauagacaauuuauuau

SEQ ID NO: 1954751 - RNA, 22 nt, Human
uaauagacaauuuauuauggca

SEQ ID NO: 1954752 - RNA, 18 nt, Human
uaauagauugugaauaau

SEQ ID NO: 1954753 - RNA, 13 nt, Human
uaauauuuauuaa

SEQ ID NO: 1954754 - RNA, 16 nt, Human
uaauauuuauuaaauu

SEQ ID NO: 1954755 - RNA, 17 nt, Human
uaauauuuauuaaauuu

SEQ ID NO: 1954756 - RNA, 16 nt, Human
uaauacaccacuacau

SEQ ID NO: 1954757 - RNA, 13 nt, Human
aaucuuauuaaag

SEQ ID NO: 1954758 - RNA, 14 nt, Human
aaucuuauuaaagu

SEQ ID NO: 1954759 - RNA, 15 nt, Human
aaucuuauuaaaguu

SEQ ID NO: 1954760 - RNA, 16 nt, Human
aaucuuauuaaaguuu

SEQ ID NO: 1954761 - RNA, 19 nt, Human
aaucuuauuaaaguuucaa

SEQ ID NO: 1954762 - RNA, 14 nt, Human
uaauacaccacuac

SEQ ID NO: 1954763 - RNA, 18 nt, Human
uaauacaccacuacauuc

SEQ ID NO: 1954764 - RNA, 19 nt, Human
uaauacaccacuacauucu

SEQ ID NO: 1954765 - RNA, 14 nt, Human
uaauagacaauuua

SEQ ID NO: 1954766 - RNA, 16 nt, Human
uaauagacaauuuauu

SEQ ID NO: 1954767 - RNA, 17 nt, Human
uaauauuuuuacaugca

SEQ ID NO: 1954768 - RNA, 22 nt, Human
uaaucacuguguauauuugauu

SEQ ID NO: 1954769 - RNA, 20 nt, Human
uaaucacuguguauauuuga

SEQ ID NO: 1954770 - RNA, 21 nt, Human
uaaucacuguguauauuugau

SEQ ID NO: 1954771 - RNA, 10 nt, Human
uaaucacugu

SEQ ID NO: 1954772 - RNA, 16 nt, Human
uaaucacucagagcag

SEQ ID NO: 1954773 - RNA, 12 nt, Human
uaaucacugugu

SEQ ID NO: 1954774 - RNA, 13 nt, Human
uaaucacugugua

SEQ ID NO: 1954775 - RNA, 14 nt, Human
uaaucacuguguau

SEQ ID NO: 1954776 - RNA, 15 nt, Human
uaaucacuguguaua

SEQ ID NO: 1954777 - RNA, 16 nt, Human
uaaucacuguguauau

SEQ ID NO: 1954778 - RNA, 17 nt, Human
uaaugaaugaaacauuu

SEQ ID NO: 1954779 - RNA, 12 nt, Human
uaaugaaugacu

SEQ ID NO: 1954780 - RNA, 15 nt, Human
uaaucuuuucugaau

SEQ ID NO: 1954781 - RNA, 14 nt, Human
uaaucuuuucugaa

SEQ ID NO: 1954782 - RNA, 17 nt, Human
uaccugucccccugaca

SEQ ID NO: 1954783 - RNA, 16 nt, Human
uaccugucccccugac

SEQ ID NO: 1954784 - RNA, 14 nt, Human
uaccugucccccug

SEQ ID NO: 1954785 - RNA, 13 nt, Human
uaccugucccccu

SEQ ID NO: 1954786 - RNA, 10 nt, Human
uaccuguccc

SEQ ID NO: 1954787 - RNA, 16 nt, Human
uaccugcgcuuguuuu

SEQ ID NO: 1954788 - RNA, 20 nt, Human
uaccugcgcuuguuuuaaag

SEQ ID NO: 1954789 - RNA, 17 nt, Human
uaccuggguccccagcc

SEQ ID NO: 1954790 - RNA, 19 nt, Human
uaccuggguccccagcccu

SEQ ID NO: 1954791 - RNA, 20 nt, Human
uaccuggguccccagcccuu

SEQ ID NO: 1954792 - RNA, 20 nt, Human
uaccugccaggaagccagca

SEQ ID NO: 1954793 - RNA, 18 nt, Human
uaccugccaggaagccag

SEQ ID NO: 1954794 - RNA, 23 nt, Human
uaccugccaggaagccagcaggc

SEQ ID NO: 1954795 - RNA, 22 nt, Human
aauuaauugugugaacuuggaa

SEQ ID NO: 1954796 - RNA, 16 nt, Human
uaccacgaaauacuua

SEQ ID NO: 1954797 - RNA, 18 nt, Human
uaccacggccuccuuucc

SEQ ID NO: 1954798 - RNA, 19 nt, Human
uaccacggccuccuuuccg

SEQ ID NO: 1954799 - RNA, 18 nt, Human
uaccacccgguccccacu

SEQ ID NO: 1954800 - RNA, 23 nt, Human
uaccaccucacuuuuucauuucc

SEQ ID NO: 1954801 - RNA, 22 nt, Human
uacauucuuuuugcucuaaaau

SEQ ID NO: 1954802 - RNA, 21 nt, Human
uaccaccaucccgugcuuuua

SEQ ID NO: 1954803 - RNA, 22 nt, Human
aauuagccuaagauauacuugu

SEQ ID NO: 1954804 - RNA, 19 nt, Human
aauuagccuaagauauacu

SEQ ID NO: 1954805 - RNA, 20 nt, Human
aauuagccuaagauauacuu

SEQ ID NO: 1954806 - RNA, 15 nt, Human
aauuagccaagugug

SEQ ID NO: 1954807 - RNA, 15 nt, Human
aauuagccuaagaua

SEQ ID NO: 1954808 - RNA, 13 nt, Human
aauuagauuuuaa

SEQ ID NO: 1954809 - RNA, 21 nt, Human
aauuagauuuuaaaacuucau

SEQ ID NO: 1954810 - RNA, 20 nt, Human
uaccuguauacguuucaaaa

SEQ ID NO: 1954811 - RNA, 12 nt, Human
aauuaauuucag

SEQ ID NO: 1954812 - RNA, 13 nt, Human
aauuaauuucagu

SEQ ID NO: 1954813 - RNA, 11 nt, Human
aauuacaggaa

SEQ ID NO: 1954814 - RNA, 16 nt, Human
aauuacaauauuucug

SEQ ID NO: 1954815 - RNA, 20 nt, Human
aauuacacucuuccuccauu

SEQ ID NO: 1954816 - RNA, 17 nt, Human
aauuacccuuuugcagg

SEQ ID NO: 1954817 - RNA, 13 nt, Human
aauuacuaacuuc

SEQ ID NO: 1954818 - RNA, 14 nt, Human
aauuacuaacuucu

SEQ ID NO: 1954819 - RNA, 15 nt, Human
aauuacuaacuucua

SEQ ID NO: 1954820 - RNA, 16 nt, Human
aauuacuaacuucuaa

SEQ ID NO: 1954821 - RNA, 17 nt, Human
aauuacuaacuucuaaa

SEQ ID NO: 1954822 - RNA, 18 nt, Human
aauuacuaacuucuaaaa

SEQ ID NO: 1954823 - RNA, 20 nt, Human
aauuacuaacuucuaaaacu

SEQ ID NO: 1954824 - RNA, 21 nt, Human
aauuacuaacuucuaaaacug

SEQ ID NO: 1954825 - RNA, 23 nt, Human
aauuacuaacuucuaaaacugua

SEQ ID NO: 1954826 - RNA, 24 nt, Human
aauuccaucaagccaagccuccug

SEQ ID NO: 1954827 - RNA, 14 nt, Human
aauuccaugaaugu

SEQ ID NO: 1954828 - RNA, 16 nt, Human
aauuccaugaauguuc

SEQ ID NO: 1954829 - RNA, 14 nt, Human
aauuccccacccug

SEQ ID NO: 1954830 - RNA, 12 nt, Human
aauuccccagau

SEQ ID NO: 1954831 - RNA, 22 nt, Human
aauuccacuuauaggaauugac

SEQ ID NO: 1954832 - RNA, 14 nt, Human
aauuccagaaugaa

SEQ ID NO: 1954833 - RNA, 14 nt, Human
aauuccaaacaugg

SEQ ID NO: 1954834 - RNA, 17 nt, Human
aauuccaaacaugguuu

SEQ ID NO: 1954835 - RNA, 15 nt, Human
aauucacaaaguuaa

SEQ ID NO: 1954836 - RNA, 17 nt, Human
aauucaccacagacuuu

SEQ ID NO: 1954837 - RNA, 18 nt, Human
aauucaccacagacuuua

SEQ ID NO: 1954838 - RNA, 18 nt, Human
aauuccaagugauugaaa

SEQ ID NO: 1954839 - RNA, 16 nt, Human
aauucauuuucucuuu

SEQ ID NO: 1954840 - RNA, 14 nt, Human
aauucaaagaauca

SEQ ID NO: 1954841 - RNA, 13 nt, Human
aauucaaaccuaa

SEQ ID NO: 1954842 - RNA, 16 nt, Human
aauucaaaccuaaguu

SEQ ID NO: 1954843 - RNA, 15 nt, Human
aauuauuuuuaagug

SEQ ID NO: 1954844 - RNA, 17 nt, Human
aauuauugauguuuuca

SEQ ID NO: 1954845 - RNA, 14 nt, Human
aauuauugauugcu

SEQ ID NO: 1954846 - RNA, 15 nt, Human
aauuauugaugaaaa

SEQ ID NO: 1954847 - RNA, 16 nt, Human
aauuauugaugaaaau

SEQ ID NO: 1954848 - RNA, 18 nt, Human
aauuagggcucuaauuuc

SEQ ID NO: 1954849 - RNA, 19 nt, Human
aauuagggcucuaauuucc

SEQ ID NO: 1954850 - RNA, 20 nt, Human
aauuagggcucuaauuuccu

SEQ ID NO: 1954851 - RNA, 16 nt, Human
aauuauuauuuggccc

SEQ ID NO: 1954852 - RNA, 18 nt, Human
uacuguaaggcaaucaug

SEQ ID NO: 1954853 - RNA, 19 nt, Human
uacuguaauuugugauaca

SEQ ID NO: 1954854 - RNA, 20 nt, Human
uacuguaauuugugauacaa

SEQ ID NO: 1954855 - RNA, 18 nt, Human
uacuguaauuugugauac

SEQ ID NO: 1954856 - RNA, 19 nt, Human
uacuguaaggcaaucaugg

SEQ ID NO: 1954857 - RNA, 11 nt, Human
uacucugggaa

SEQ ID NO: 1954858 - RNA, 12 nt, Human
uacucugggaac

SEQ ID NO: 1954859 - RNA, 13 nt, Human
uacucugggaacu

SEQ ID NO: 1954860 - RNA, 16 nt, Human
uacuggagaaaaugga

SEQ ID NO: 1954861 - RNA, 12 nt, Human
uacucuguguca

SEQ ID NO: 1954862 - RNA, 22 nt, Human
aauugacccacaagaaaugaaa

SEQ ID NO: 1954863 - RNA, 23 nt, Human
aauugaccgacagcuuuccagua

SEQ ID NO: 1954864 - RNA, 21 nt, Human
aauugacccacaagaaaugaa

SEQ ID NO: 1954865 - RNA, 22 nt, Human
uacuguacaugaaaacacauuu

SEQ ID NO: 1954866 - RNA, 18 nt, Human
uacuguacaugaaaacac

SEQ ID NO: 1954867 - RNA, 15 nt, Human
uacuguacaugggac

SEQ ID NO: 1954868 - RNA, 21 nt, Human
uacuguacaugaaaacacauu

SEQ ID NO: 1954869 - RNA, 23 nt, Human
uacuguaauuugugauacaaugc

SEQ ID NO: 1954870 - RNA, 19 nt, Human
aauugaugggauuugguca

SEQ ID NO: 1954871 - RNA, 12 nt, Human
aauugcauuucc

SEQ ID NO: 1954872 - RNA, 16 nt, Human
aauugcauuugcuuuu

SEQ ID NO: 1954873 - RNA, 14 nt, Human
aauugccuuucugu

SEQ ID NO: 1954874 - RNA, 13 nt, Human
uacguacacauuu

SEQ ID NO: 1954875 - RNA, 14 nt, Human
uacguacacauuuu

SEQ ID NO: 1954876 - RNA, 15 nt, Human
uacguugugcauuug

SEQ ID NO: 1954877 - RNA, 16 nt, Human
uacguugugcauuugg

SEQ ID NO: 1954878 - RNA, 12 nt, Human
uacguacacauu

SEQ ID NO: 1954879 - RNA, 22 nt, Human
uacguaaaaaucucucauuugu

SEQ ID NO: 1954880 - RNA, 18 nt, Human
uacgggaggguaaggcug

SEQ ID NO: 1954881 - RNA, 20 nt, Human
uacgaguaauugcauuugcu

SEQ ID NO: 1954882 - RNA, 20 nt, Human
uacgagcaagcuuuuacaac

SEQ ID NO: 1954883 - RNA, 22 nt, Human
uacgccaggggaaaaucagccu

SEQ ID NO: 1954884 - RNA, 13 nt, Human
uacuauguaucaa

SEQ ID NO: 1954885 - RNA, 12 nt, Human
uacuauguauca

SEQ ID NO: 1954886 - RNA, 17 nt, Human
uacuaucuuaucucaga

SEQ ID NO: 1954887 - RNA, 21 nt, Human
uacuaucuuaucucagauauu

SEQ ID NO: 1954888 - RNA, 23 nt, Human
uacuauggcccuggccuagcaua

SEQ ID NO: 1954889 - RNA, 23 nt, Human
uacucuccuggaaauauuaagaa

SEQ ID NO: 1954890 - RNA, 22 nt, Human
uacucuccuggaaauauuaaga

SEQ ID NO: 1954891 - RNA, 22 nt, Human
uacuaucuuaucucagauauuu

SEQ ID NO: 1954892 - RNA, 14 nt, Human
uacuauguaucaau

SEQ ID NO: 1954893 - RNA, 17 nt, Human
uacuacuccuguaggaa

SEQ ID NO: 1954894 - RNA, 13 nt, Human
uacuacuccugua

SEQ ID NO: 1954895 - RNA, 20 nt, Human
uacuaucaugucaaacguga

SEQ ID NO: 1954896 - RNA, 16 nt, Human
uacuacugaccagaca

SEQ ID NO: 1954897 - RNA, 20 nt, Human
uacuacugaccagacaagcu

SEQ ID NO: 1954898 - RNA, 21 nt, Human
aaugcacuuuguucuggcucu

SEQ ID NO: 1954899 - RNA, 17 nt, Human
aaugaccuuucaauagg

SEQ ID NO: 1954900 - RNA, 16 nt, Human
aaugaccuuucaauag

SEQ ID NO: 1954901 - RNA, 18 nt, Human
aaugaccuuucaauagga

SEQ ID NO: 1954902 - RNA, 21 nt, Human
uacaaugcugugcccuaaagu

SEQ ID NO: 1954903 - RNA, 12 nt, Human
aaugcagaacuc

SEQ ID NO: 1954904 - RNA, 13 nt, Human
uacaaugugacuu

SEQ ID NO: 1954905 - RNA, 14 nt, Human
uacaaugugacuuu

SEQ ID NO: 1954906 - RNA, 22 nt, Human
aaugcacuuuguucuggcucuu

SEQ ID NO: 1954907 - RNA, 20 nt, Human
aauggacuaacuugucuuug

SEQ ID NO: 1954908 - RNA, 23 nt, Human
aauggacguguuaugacuccaga

SEQ ID NO: 1954909 - RNA, 14 nt, Human
aauggaaccacucu

SEQ ID NO: 1954910 - RNA, 21 nt, Human
aauggaaaugggcagagcaga

SEQ ID NO: 1954911 - RNA, 20 nt, Human
aauggaaaugggcagagcag

SEQ ID NO: 1954912 - RNA, 16 nt, Human
aaugcuucaucccuuu

SEQ ID NO: 1954913 - RNA, 12 nt, Human
aaugcccagccc

SEQ ID NO: 1954914 - RNA, 11 nt, Human
aaugcccagcc

SEQ ID NO: 1954915 - RNA, 13 nt, Human
aaugcccagcccc

SEQ ID NO: 1954916 - RNA, 22 nt, Human
aaugcuguauuagucacagaga

SEQ ID NO: 1954917 - RNA, 15 nt, Human
aauggcauuugcaau

SEQ ID NO: 1954918 - RNA, 14 nt, Human
aauggcugaagcca

SEQ ID NO: 1954919 - RNA, 11 nt, Human
aauguaacugc

SEQ ID NO: 1954920 - RNA, 15 nt, Human
aauguaacugcucuu

SEQ ID NO: 1954921 - RNA, 16 nt, Human
aauguaacugcucuug

SEQ ID NO: 1954922 - RNA, 12 nt, Human
aauguaacuguu

SEQ ID NO: 1954923 - RNA, 13 nt, Human
aauguaacuguua

SEQ ID NO: 1954924 - RNA, 20 nt, Human
aauguaacuguuaccauugg

SEQ ID NO: 1954925 - RNA, 22 nt, Human
aauguaacuguuaccauuggaa

SEQ ID NO: 1954926 - RNA, 16 nt, Human
aauggcagccuuggca

SEQ ID NO: 1954927 - RNA, 20 nt, Human
aauggcaauguuuugcuuuu

SEQ ID NO: 1954928 - RNA, 12 nt, Human
aauggcagccuu

SEQ ID NO: 1954929 - RNA, 23 nt, Human
aauggcacaaucucggcucacug

SEQ ID NO: 1954930 - RNA, 14 nt, Human
aauggcaaguuuuc

SEQ ID NO: 1954931 - RNA, 17 nt, Human
aauggcaaguuuuccau

SEQ ID NO: 1954932 - RNA, 14 nt, Human
aauggcaacaaacu

SEQ ID NO: 1954933 - RNA, 17 nt, Human
aauggcaacaaacugca

SEQ ID NO: 1954934 - RNA, 20 nt, Human
aauggcaacaaacugcacau

SEQ ID NO: 1954935 - RNA, 21 nt, Human
aauggcaacaaacugcacaug

SEQ ID NO: 1954936 - RNA, 15 nt, Human
uacacuaaaagguga

SEQ ID NO: 1954937 - RNA, 23 nt, Human
uacacauuuuauuuuauuaugca

SEQ ID NO: 1954938 - RNA, 21 nt, Human
uacacauuuuauuuuauuaug

SEQ ID NO: 1954939 - RNA, 22 nt, Human
uacacauuuuauuuuauuaugc

SEQ ID NO: 1954940 - RNA, 19 nt, Human
uacacauuuuauuuuauua

SEQ ID NO: 1954941 - RNA, 23 nt, Human
aauguaacuguuaccauuggaaa

SEQ ID NO: 1954942 - RNA, 22 nt, Human
uacagacaacaaaccuguuucu

SEQ ID NO: 1954943 - RNA, 19 nt, Human
uacagaccgaacuguugua

SEQ ID NO: 1954944 - RNA, 20 nt, Human
uacagaccgaacuguuguau

SEQ ID NO: 1954945 - RNA, 21 nt, Human
uacagaccgaacuguuguaua

SEQ ID NO: 1954946 - RNA, 23 nt, Human
uacagaccgaacuguuguauaaa

SEQ ID NO: 1954947 - RNA, 20 nt, Human
uacagauccccaagccuggc

SEQ ID NO: 1954948 - RNA, 21 nt, Human
uacagauaaaugauucaaaaa

SEQ ID NO: 1954949 - RNA, 13 nt, Human
uacagauaaauga

SEQ ID NO: 1954950 - RNA, 15 nt, Human
uacagauaaaugauu

SEQ ID NO: 1954951 - RNA, 16 nt, Human
uacagauaaaugauuc

SEQ ID NO: 1954952 - RNA, 20 nt, Human
uacagauaaaugauucaaaa

SEQ ID NO: 1954953 - RNA, 22 nt, Human
aauguauuacaguggggaauga

SEQ ID NO: 1954954 - RNA, 18 nt, Human
aauguaucaaauacauuu

SEQ ID NO: 1954955 - RNA, 20 nt, Human
aauguauguguaaguauucu

SEQ ID NO: 1954956 - RNA, 19 nt, Human
aauguauguguaaguauuc

SEQ ID NO: 1954957 - RNA, 14 nt, Human
aauguauaguauuu

SEQ ID NO: 1954958 - RNA, 15 nt, Human
aauguauaguauuug

SEQ ID NO: 1954959 - RNA, 16 nt, Human
aauguauaguauuuga

SEQ ID NO: 1954960 - RNA, 17 nt, Human
aauguauaguauuugaa

SEQ ID NO: 1954961 - RNA, 18 nt, Human
aauguauaguauuugaaa

SEQ ID NO: 1954962 - RNA, 19 nt, Human
aauguauaguauuugaaaa

SEQ ID NO: 1954963 - RNA, 21 nt, Human
aauguauaguauuugaaaaca

SEQ ID NO: 1954964 - RNA, 22 nt, Human
aauguauaguauuugaaaacag

SEQ ID NO: 1954965 - RNA, 11 nt, Human
aaugugugugu

SEQ ID NO: 1954966 - RNA, 19 nt, Human
aaugugaaaagaaaaauga

SEQ ID NO: 1954967 - RNA, 14 nt, Human
aaugugaaacugga

SEQ ID NO: 1954968 - RNA, 15 nt, Human
aaugugaaacuggau

SEQ ID NO: 1954969 - RNA, 18 nt, Human
aauguaguuugaggaaau

SEQ ID NO: 1954970 - RNA, 20 nt, Human
aauguaguuugaggaaauuu

SEQ ID NO: 1954971 - RNA, 23 nt, Human
aauguaguuugaggaaauuugca

SEQ ID NO: 1954972 - RNA, 22 nt, Human
uacauauaagugauugcugguu

SEQ ID NO: 1954973 - RNA, 15 nt, Human
uacauaugauaaauu

SEQ ID NO: 1954974 - RNA, 21 nt, Human
uacauaaugcgugcauaccac

SEQ ID NO: 1954975 - RNA, 23 nt, Human
uacauaaugcgugcauaccacuu

SEQ ID NO: 1954976 - RNA, 24 nt, Human
uacauaaugcgugcauaccacuuu

SEQ ID NO: 1954977 - RNA, 16 nt, Human
uacagguaccaguucu

SEQ ID NO: 1954978 - RNA, 16 nt, Human
uacagaugugggccac

SEQ ID NO: 1954979 - RNA, 16 nt, Human
uacaggugugagucac

SEQ ID NO: 1954980 - RNA, 20 nt, Human
uacagguacuuugucuaaga

SEQ ID NO: 1954981 - RNA, 14 nt, Human
uacagguacuuugu

SEQ ID NO: 1954982 - RNA, 15 nt, Human
uacagguacuuuguc

SEQ ID NO: 1954983 - RNA, 22 nt, Human
aauguuaagcaucuaaggacaa

SEQ ID NO: 1954984 - RNA, 21 nt, Human
aauguuaaagauguagcaaac

SEQ ID NO: 1954985 - RNA, 13 nt, Human
aauguuaaagaug

SEQ ID NO: 1954986 - RNA, 14 nt, Human
aauguuaaagaugu

SEQ ID NO: 1954987 - RNA, 15 nt, Human
aauguuaaagaugua

SEQ ID NO: 1954988 - RNA, 16 nt, Human
aauguuaaagauguag

SEQ ID NO: 1954989 - RNA, 19 nt, Human
aauguuaaagauguagcaa

SEQ ID NO: 1954990 - RNA, 20 nt, Human
aauguuaaagauguagcaaa

SEQ ID NO: 1954991 - RNA, 15 nt, Human
aauguguuuuggucc

SEQ ID NO: 1954992 - RNA, 11 nt, Human
aauuaacuuuu

SEQ ID NO: 1954993 - RNA, 15 nt, Human
aauguugaacaaaau

SEQ ID NO: 1954994 - RNA, 20 nt, Human
aauuaaccaagguagaauga

SEQ ID NO: 1954995 - RNA, 21 nt, Human
aauguucucucuucuccaccu

SEQ ID NO: 1954996 - RNA, 14 nt, Human
aauguucuuccagu

SEQ ID NO: 1954997 - RNA, 19 nt, Human
aauguucugcuaaauuuca

SEQ ID NO: 1954998 - RNA, 12 nt, Human
aauguucuucca

SEQ ID NO: 1954999 - RNA, 15 nt, Human
aauuaagaagaaaau

SEQ ID NO: 1955000 - RNA, 16 nt, Human
aauuaagaagaaacua

SEQ ID NO: 1955001 - RNA, 21 nt, Human
aauuaagaaaggauaaaguug

SEQ ID NO: 1955002 - RNA, 20 nt, Human
aauuaagaaaggauaaaguu

SEQ ID NO: 1955003 - RNA, 12 nt, Human
aauuaagaagaa

SEQ ID NO: 1955004 - RNA, 22 nt, Human
aauuaaucugggccagaauuuc

SEQ ID NO: 1955005 - RNA, 13 nt, Human
aauuaauugugug

SEQ ID NO: 1955006 - RNA, 13 nt, Human
uacauucuguuaa

SEQ ID NO: 1955007 - RNA, 16 nt, Human
uacauucuuuuugcuc

SEQ ID NO: 1955008 - RNA, 15 nt, Human
uacauucuuuuugcu

SEQ ID NO: 1955009 - RNA, 18 nt, Human
uacauucuuuuugcucua

SEQ ID NO: 1955010 - RNA, 21 nt, Human
uacauucuuuuugcucuaaaa

SEQ ID NO: 1955011 - RNA, 16 nt, Human
uacaugugcacauugu

SEQ ID NO: 1955012 - RNA, 20 nt, Human
uacaugugcacauugugcag

SEQ ID NO: 1955013 - RNA, 15 nt, Human
aauuaauugugugaa

SEQ ID NO: 1955014 - RNA, 17 nt, Human
uauuagaaaacuuuguu

SEQ ID NO: 1955015 - RNA, 18 nt, Human
uauuagaaaacuuuguua

SEQ ID NO: 1955016 - RNA, 19 nt, Human
uauuagaaaacuuuguuag

SEQ ID NO: 1955017 - RNA, 14 nt, Human
uauuagaaaacuuu

SEQ ID NO: 1955018 - RNA, 16 nt, Human
uauuagaaaacuuugu

SEQ ID NO: 1955019 - RNA, 21 nt, Human
uauuagugaccucagcuuuga

SEQ ID NO: 1955020 - RNA, 14 nt, Human
uauucaaacugaaa

SEQ ID NO: 1955021 - RNA, 19 nt, Human
uauuagugaccucagcuuu

SEQ ID NO: 1955022 - RNA, 14 nt, Human
uauuacuucugcua

SEQ ID NO: 1955023 - RNA, 18 nt, Human
uauuaaaauuguuguccg

SEQ ID NO: 1955024 - RNA, 13 nt, Human
uauuacuucugcu

SEQ ID NO: 1955025 - RNA, 22 nt, Human
uauuacuagacugccacaagga

SEQ ID NO: 1955026 - RNA, 11 nt, Human
uauuaaaauug

SEQ ID NO: 1955027 - RNA, 10 nt, Human
uauuaaaauu

SEQ ID NO: 1955028 - RNA, 15 nt, Human
uauuaaaauuguugu

SEQ ID NO: 1955029 - RNA, 16 nt, Human
uauuaaaauuguuguc

SEQ ID NO: 1955030 - RNA, 20 nt, Human
uauucaguaauaacucuacc

SEQ ID NO: 1955031 - RNA, 14 nt, Human
uauucaggaagcuc

SEQ ID NO: 1955032 - RNA, 16 nt, Human
uauucaggaagcucag

SEQ ID NO: 1955033 - RNA, 22 nt, Human
acaggcgugagccaccgugccu

SEQ ID NO: 1955034 - RNA, 12 nt, Human
acaggcuccugc

SEQ ID NO: 1955035 - RNA, 17 nt, Human
uauucaauuaaagaaau

SEQ ID NO: 1955036 - RNA, 15 nt, Human
uauucaccuucaguu

SEQ ID NO: 1955037 - RNA, 21 nt, Human
uauucagcucauggacuucug

SEQ ID NO: 1955038 - RNA, 17 nt, Human
uauucaccuucaguuuu

SEQ ID NO: 1955039 - RNA, 21 nt, Human
uauucagcuugcacauuuggu

SEQ ID NO: 1955040 - RNA, 13 nt, Human
acagucacaaauu

SEQ ID NO: 1955041 - RNA, 12 nt, Human
acagggcacacc

SEQ ID NO: 1955042 - RNA, 20 nt, Human
acagggcacaccgggcacuc

SEQ ID NO: 1955043 - RNA, 16 nt, Human
acagggauugauuuua

SEQ ID NO: 1955044 - RNA, 22 nt, Human
acagggauugauuuuaaaaugu

SEQ ID NO: 1955045 - RNA, 20 nt, Human
acaguacccugguugugugu

SEQ ID NO: 1955046 - RNA, 14 nt, Human
acaguacuuugaau

SEQ ID NO: 1955047 - RNA, 22 nt, Human
acaguaccccucuagcuuuguu

SEQ ID NO: 1955048 - RNA, 19 nt, Human
acaguacccugguugugug

SEQ ID NO: 1955049 - RNA, 13 nt, Human
acaguaaucaguu

SEQ ID NO: 1955050 - RNA, 22 nt, Human
acagggacugaaaaccucuccu

SEQ ID NO: 1955051 - RNA, 20 nt, Human
acagggaggacgcucucugg

SEQ ID NO: 1955052 - RNA, 21 nt, Human
acagggaggacgcucucuggc

SEQ ID NO: 1955053 - RNA, 12 nt, Human
acaggcugggcu

SEQ ID NO: 1955054 - RNA, 22 nt, Human
acaggcugggcuucaguggcag

SEQ ID NO: 1955055 - RNA, 23 nt, Human
acaggcugggcuucaguggcagc

SEQ ID NO: 1955056 - RNA, 23 nt, Human
acaggcugagugcaggcccaccc

SEQ ID NO: 1955057 - RNA, 13 nt, Human
acaggcuccugcc

SEQ ID NO: 1955058 - RNA, 15 nt, Human
acaggcuccugccac

SEQ ID NO: 1955059 - RNA, 21 nt, Human
acaggcuccugccaccacgcc

SEQ ID NO: 1955060 - RNA, 22 nt, Human
acaggcuccugccaccacgccc

SEQ ID NO: 1955061 - RNA, 15 nt, Human
acaggcugagugcag

SEQ ID NO: 1955062 - RNA, 16 nt, Human
acaggcugagugcagg

SEQ ID NO: 1955063 - RNA, 17 nt, Human
acaggcugagugcaggc

SEQ ID NO: 1955064 - RNA, 18 nt, Human
acaggcugagugcaggcc

SEQ ID NO: 1955065 - RNA, 19 nt, Human
acaggcugagugcaggccc

SEQ ID NO: 1955066 - RNA, 20 nt, Human
acaggcugagugcaggccca

SEQ ID NO: 1955067 - RNA, 21 nt, Human
acaggcugagugcaggcccac

SEQ ID NO: 1955068 - RNA, 22 nt, Human
acaggcugagugcaggcccacc

SEQ ID NO: 1955069 - RNA, 18 nt, Human
acaggacagggguuccuu

SEQ ID NO: 1955070 - RNA, 23 nt, Human
acaggaccagggauuuccaugau

SEQ ID NO: 1955071 - RNA, 14 nt, Human
acaggacucugccu

SEQ ID NO: 1955072 - RNA, 15 nt, Human
acaggaccccugcag

SEQ ID NO: 1955073 - RNA, 16 nt, Human
acaggaccccugcagu

SEQ ID NO: 1955074 - RNA, 20 nt, Human
acaggaccccugcaguuccc

SEQ ID NO: 1955075 - RNA, 14 nt, Human
acaggcauguucuc

SEQ ID NO: 1955076 - RNA, 14 nt, Human
acaggcagguccag

SEQ ID NO: 1955077 - RNA, 16 nt, Human
acaggcagguccaggg

SEQ ID NO: 1955078 - RNA, 16 nt, Human
acaggagugagcacua

SEQ ID NO: 1955079 - RNA, 15 nt, Human
acaggagguuggagg

SEQ ID NO: 1955080 - RNA, 17 nt, Human
acaggagguuggaggga

SEQ ID NO: 1955081 - RNA, 14 nt, Human
acaggaucagucug

SEQ ID NO: 1955082 - RNA, 13 nt, Human
acaggcaggucca

SEQ ID NO: 1955083 - RNA, 13 nt, Human
acagcuaacaugg

SEQ ID NO: 1955084 - RNA, 16 nt, Human
acagcguuaugugucu

SEQ ID NO: 1955085 - RNA, 22 nt, Human
acagcggcuggacuuggaggua

SEQ ID NO: 1955086 - RNA, 21 nt, Human
acagcggcuggacuuggaggu

SEQ ID NO: 1955087 - RNA, 11 nt, Human
acagccuggca

SEQ ID NO: 1955088 - RNA, 17 nt, Human
acaggaaguagaggagg

SEQ ID NO: 1955089 - RNA, 13 nt, Human
acaggaaguacug

SEQ ID NO: 1955090 - RNA, 19 nt, Human
acaggaaaagcaugucuua

SEQ ID NO: 1955091 - RNA, 21 nt, Human
acaggaaaagcaugucuuauu

SEQ ID NO: 1955092 - RNA, 15 nt, Human
acaggaaaagcugcu

SEQ ID NO: 1955093 - RNA, 16 nt, Human
acaggaaaagcugcug

SEQ ID NO: 1955094 - RNA, 17 nt, Human
acaggaaaagcugcuga

SEQ ID NO: 1955095 - RNA, 12 nt, Human
uauuaaaaaguc

SEQ ID NO: 1955096 - RNA, 13 nt, Human
uauuaaaaagucu

SEQ ID NO: 1955097 - RNA, 14 nt, Human
uauuaaaaagucuu

SEQ ID NO: 1955098 - RNA, 15 nt, Human
uauuaaaaagucuuu

SEQ ID NO: 1955099 - RNA, 17 nt, Human
uauuaaaaagucuuuua

SEQ ID NO: 1955100 - RNA, 19 nt, Human
uauuaaaaagucuuuuaaa

SEQ ID NO: 1955101 - RNA, 22 nt, Human
uauuaaaaagucuuuuaaaaag

SEQ ID NO: 1955102 - RNA, 18 nt, Human
uauguuuuucaguucaaa

SEQ ID NO: 1955103 - RNA, 19 nt, Human
uauguuuuucaguucaaag

SEQ ID NO: 1955104 - RNA, 20 nt, Human
uauguuuuucaguucaaagu

SEQ ID NO: 1955105 - RNA, 14 nt, Human
uauguuuuugaagg

SEQ ID NO: 1955106 - RNA, 16 nt, Human
uauguuuuugaaggca

SEQ ID NO: 1955107 - RNA, 12 nt, Human
uauguguaugug

SEQ ID NO: 1955108 - RNA, 16 nt, Human
uauguguccauuuccu

SEQ ID NO: 1955109 - RNA, 22 nt, Human
uauguguccauuuccuuaugcu

SEQ ID NO: 1955110 - RNA, 11 nt, Human
uauguuuuuca

SEQ ID NO: 1955111 - RNA, 13 nt, Human
uauguuuuucagu

SEQ ID NO: 1955112 - RNA, 14 nt, Human
uauguuuuucaguu

SEQ ID NO: 1955113 - RNA, 15 nt, Human
uauguuuuucaguuc

SEQ ID NO: 1955114 - RNA, 16 nt, Human
uauguuuuucaguuca

SEQ ID NO: 1955115 - RNA, 12 nt, Human
uauguuuugguc

SEQ ID NO: 1955116 - RNA, 12 nt, Human
uauguggaagug

SEQ ID NO: 1955117 - RNA, 16 nt, Human
uauguggaaguguggg

SEQ ID NO: 1955118 - RNA, 20 nt, Human
uauguggaguucaucuugaa

SEQ ID NO: 1955119 - RNA, 23 nt, Human
uaugugccagauuuaugcauauu

SEQ ID NO: 1955120 - RNA, 17 nt, Human
uaugugaguauucucau

SEQ ID NO: 1955121 - RNA, 18 nt, Human
uaugugaguauucucauu

SEQ ID NO: 1955122 - RNA, 14 nt, Human
uaugugaguauucu

SEQ ID NO: 1955123 - RNA, 12 nt, Human
uaugugaacagu

SEQ ID NO: 1955124 - RNA, 22 nt, Human
uaugugaacaguuguguuugaa

SEQ ID NO: 1955125 - RNA, 17 nt, Human
uaugugaaacauguuuc

SEQ ID NO: 1955126 - RNA, 15 nt, Human
acaggcauguucucu

SEQ ID NO: 1955127 - RNA, 18 nt, Human
acaggcauguucucugag

SEQ ID NO: 1955128 - RNA, 19 nt, Human
acaggcauguucucugagg

SEQ ID NO: 1955129 - RNA, 20 nt, Human
acaggcauguucucugagga

SEQ ID NO: 1955130 - RNA, 22 nt, Human
acaggcauguucucugaggaca

SEQ ID NO: 1955131 - RNA, 16 nt, Human
acaggccacccugugc

SEQ ID NO: 1955132 - RNA, 19 nt, Human
acaggccacccugugcaga

SEQ ID NO: 1955133 - RNA, 21 nt, Human
acaggccacccugugcagaag

SEQ ID NO: 1955134 - RNA, 14 nt, Human
uaugugaaacaugu

SEQ ID NO: 1955135 - RNA, 17 nt, Human
acagaaaauucuucucc

SEQ ID NO: 1955136 - RNA, 20 nt, Human
acagaaaauggaagacagcu

SEQ ID NO: 1955137 - RNA, 14 nt, Human
acagaaauguacag

SEQ ID NO: 1955138 - RNA, 16 nt, Human
acagaaauguacagca

SEQ ID NO: 1955139 - RNA, 17 nt, Human
acagaaauguacagcaa

SEQ ID NO: 1955140 - RNA, 12 nt, Human
acagaaaauaug

SEQ ID NO: 1955141 - RNA, 13 nt, Human
acagaaaauaugu

SEQ ID NO: 1955142 - RNA, 14 nt, Human
acagaaaauaugua

SEQ ID NO: 1955143 - RNA, 15 nt, Human
acagaaaauauguau

SEQ ID NO: 1955144 - RNA, 12 nt, Human
acagaaauuggu

SEQ ID NO: 1955145 - RNA, 20 nt, Human
acagaaauugguaccuugca

SEQ ID NO: 1955146 - RNA, 13 nt, Human
uauacaacaccaa

SEQ ID NO: 1955147 - RNA, 18 nt, Human
uauacaacaccaaaaaau

SEQ ID NO: 1955148 - RNA, 21 nt, Human
uauacaacaccaaaaaauauc

SEQ ID NO: 1955149 - RNA, 23 nt, Human
uauacaacaccaaaaaauaucua

SEQ ID NO: 1955150 - RNA, 23 nt, Human
uauaaguguguguuuuucauaaa

SEQ ID NO: 1955151 - RNA, 17 nt, Human
uauaaguguguguuuuu

SEQ ID NO: 1955152 - RNA, 20 nt, Human
uauauuguaagaaauacugu

SEQ ID NO: 1955153 - RNA, 22 nt, Human
uauauuguaagaaauacuguac

SEQ ID NO: 1955154 - RNA, 23 nt, Human
uauauugguuuuaugaugacgua

SEQ ID NO: 1955155 - RNA, 12 nt, Human
uauauuguaaga

SEQ ID NO: 1955156 - RNA, 15 nt, Human
uauauuguaagaaau

SEQ ID NO: 1955157 - RNA, 19 nt, Human
uauauuguaagaaauacug

SEQ ID NO: 1955158 - RNA, 14 nt, Human
uauauuuaaaaaca

SEQ ID NO: 1955159 - RNA, 16 nt, Human
uauauuuaguaucuuu

SEQ ID NO: 1955160 - RNA, 15 nt, Human
acagacccugcccug

SEQ ID NO: 1955161 - RNA, 21 nt, Human
acagaaauugguaccuugcac

SEQ ID NO: 1955162 - RNA, 14 nt, Human
acagacccugcccu

SEQ ID NO: 1955163 - RNA, 13 nt, Human
acagacccugccc

SEQ ID NO: 1955164 - RNA, 13 nt, Human
uauauuauaauag

SEQ ID NO: 1955165 - RNA, 23 nt, Human
uaucuauauuuuacauaaauuua

SEQ ID NO: 1955166 - RNA, 14 nt, Human
uaucucccccagcc

SEQ ID NO: 1955167 - RNA, 16 nt, Human
uaucucccccagcccc

SEQ ID NO: 1955168 - RNA, 15 nt, Human
uaucuccaagaccag

SEQ ID NO: 1955169 - RNA, 13 nt, Human
uaucucccccagc

SEQ ID NO: 1955170 - RNA, 11 nt, Human
acagagaaagu

SEQ ID NO: 1955171 - RNA, 18 nt, Human
acagagaaaguacuucuc

SEQ ID NO: 1955172 - RNA, 14 nt, Human
acagagaaagaaau

SEQ ID NO: 1955173 - RNA, 15 nt, Human
uaucuauauuuuaca

SEQ ID NO: 1955174 - RNA, 17 nt, Human
uaucccuuggacauuuu

SEQ ID NO: 1955175 - RNA, 18 nt, Human
uaucccuuggacauuuua

SEQ ID NO: 1955176 - RNA, 19 nt, Human
uaucccuuggacauuuuau

SEQ ID NO: 1955177 - RNA, 22 nt, Human
uauccauagugacuuuucaagu

SEQ ID NO: 1955178 - RNA, 19 nt, Human
uauccauagugacuuuuca

SEQ ID NO: 1955179 - RNA, 13 nt, Human
uauccacuugucc

SEQ ID NO: 1955180 - RNA, 15 nt, Human
uauccagaauggaau

SEQ ID NO: 1955181 - RNA, 21 nt, Human
uauccagaauggaauuuugcu

SEQ ID NO: 1955182 - RNA, 17 nt, Human
uauccacgagagcgcag

SEQ ID NO: 1955183 - RNA, 18 nt, Human
uauccacgagagcgcagc

SEQ ID NO: 1955184 - RNA, 22 nt, Human
uaucaagccuagauguuuuaua

SEQ ID NO: 1955185 - RNA, 19 nt, Human
uaucaaauuaauuguguga

SEQ ID NO: 1955186 - RNA, 20 nt, Human
uaucaaauuaauugugugaa

SEQ ID NO: 1955187 - RNA, 21 nt, Human
uaucaaauuaauugugugaac

SEQ ID NO: 1955188 - RNA, 15 nt, Human
uaucauuuuuuccug

SEQ ID NO: 1955189 - RNA, 16 nt, Human
uaucauuuuuuccugu

SEQ ID NO: 1955190 - RNA, 18 nt, Human
uaucauuuuuuccuguuu

SEQ ID NO: 1955191 - RNA, 20 nt, Human
acagaugccauauaguguua

SEQ ID NO: 1955192 - RNA, 18 nt, Human
acagaugaccccugccca

SEQ ID NO: 1955193 - RNA, 17 nt, Human
acagcaaggagauuuac

SEQ ID NO: 1955194 - RNA, 14 nt, Human
acagauuugagcuc

SEQ ID NO: 1955195 - RNA, 15 nt, Human
acagauuugagcuca

SEQ ID NO: 1955196 - RNA, 23 nt, Human
acagauuggauuuuauguugaca

SEQ ID NO: 1955197 - RNA, 13 nt, Human
acagauuggauuu

SEQ ID NO: 1955198 - RNA, 15 nt, Human
acagauuggauuuua

SEQ ID NO: 1955199 - RNA, 17 nt, Human
acagauuggauuuuaug

SEQ ID NO: 1955200 - RNA, 21 nt, Human
acagauuggauuuuauguuga

SEQ ID NO: 1955201 - RNA, 22 nt, Human
acagauuggauuuuauguugac

SEQ ID NO: 1955202 - RNA, 19 nt, Human
acagagcccacgcccccac

SEQ ID NO: 1955203 - RNA, 18 nt, Human
acagagcccacgccccca

SEQ ID NO: 1955204 - RNA, 15 nt, Human
acagagcccacgccc

SEQ ID NO: 1955205 - RNA, 14 nt, Human
acagagcccacgcc

SEQ ID NO: 1955206 - RNA, 18 nt, Human
acagauccccaagccugg

SEQ ID NO: 1955207 - RNA, 22 nt, Human
acagaucucugcuuuggaaauc

SEQ ID NO: 1955208 - RNA, 17 nt, Human
acagauccccaagccug

SEQ ID NO: 1955209 - RNA, 17 nt, Human
acagcccgggcucugcc

SEQ ID NO: 1955210 - RNA, 21 nt, Human
acagcaaggagauuuacaacu

SEQ ID NO: 1955211 - RNA, 16 nt, Human
acagcaaggagauuua

SEQ ID NO: 1955212 - RNA, 20 nt, Human
acagcccgggcucugccucc

SEQ ID NO: 1955213 - RNA, 13 nt, Human
acagccgcuccag

SEQ ID NO: 1955214 - RNA, 14 nt, Human
acagccgcuccaga

SEQ ID NO: 1955215 - RNA, 19 nt, Human
acagcccgggcucugccuc

SEQ ID NO: 1955216 - RNA, 18 nt, Human
acagcccgggcucugccu

SEQ ID NO: 1955217 - RNA, 18 nt, Human
acagccguuuguucccca

SEQ ID NO: 1955218 - RNA, 15 nt, Human
acagccgcuccagag

SEQ ID NO: 1955219 - RNA, 14 nt, Human
uaugaacagacuuu

SEQ ID NO: 1955220 - RNA, 20 nt, Human
uaugaaauuuuuuuucaugc

SEQ ID NO: 1955221 - RNA, 18 nt, Human
uauggcuuuugugcauua

SEQ ID NO: 1955222 - RNA, 21 nt, Human
uauggcuuuugugcauuaucu

SEQ ID NO: 1955223 - RNA, 17 nt, Human
uauggcuuuugugcauu

SEQ ID NO: 1955224 - RNA, 15 nt, Human
uaugcuuauacacuu

SEQ ID NO: 1955225 - RNA, 22 nt, Human
uaugcuggaagucucaaauaau

SEQ ID NO: 1955226 - RNA, 16 nt, Human
uaugcuguaaaagcaa

SEQ ID NO: 1955227 - RNA, 20 nt, Human
uauggggauagaugugugga

SEQ ID NO: 1955228 - RNA, 23 nt, Human
uauggcuuuugugcauuaucuag

SEQ ID NO: 1955229 - RNA, 14 nt, Human
uaugguaaucauau

SEQ ID NO: 1955230 - RNA, 12 nt, Human
acagccuggcac

SEQ ID NO: 1955231 - RNA, 18 nt, Human
uaugguaaucauauuaga

SEQ ID NO: 1955232 - RNA, 16 nt, Human
uaugguaaucauauua

SEQ ID NO: 1955233 - RNA, 11 nt, Human
uaugcauuuga

SEQ ID NO: 1955234 - RNA, 23 nt, Human
uaugcauuugaaaauuuugaugu

SEQ ID NO: 1955235 - RNA, 24 nt, Human
uaugcauuugaaaauuuugauguu

SEQ ID NO: 1955236 - RNA, 17 nt, Human
uaugaacauacaaaugc

SEQ ID NO: 1955237 - RNA, 18 nt, Human
uaugaacucaucauuuuu

SEQ ID NO: 1955238 - RNA, 17 nt, Human
uaugccugggcagaagg

SEQ ID NO: 1955239 - RNA, 14 nt, Human
uaugccugcucuuu

SEQ ID NO: 1955240 - RNA, 16 nt, Human
uaugccugcucuuugg

SEQ ID NO: 1955241 - RNA, 14 nt, Human
uaugcuaagaauuu

SEQ ID NO: 1955242 - RNA, 16 nt, Human
uaugcuaagaauuuuu

SEQ ID NO: 1955243 - RNA, 19 nt, Human
acacacagcucuguccugg

SEQ ID NO: 1955244 - RNA, 17 nt, Human
acacacagcucuguccu

SEQ ID NO: 1955245 - RNA, 13 nt, Human
acacacagcucug

SEQ ID NO: 1955246 - RNA, 14 nt, Human
acacacagcucugu

SEQ ID NO: 1955247 - RNA, 22 nt, Human
acacacacgcgugcacacacca

SEQ ID NO: 1955248 - RNA, 21 nt, Human
acacacugcauguuugugauu

SEQ ID NO: 1955249 - RNA, 14 nt, Human
acacacgcugccuu

SEQ ID NO: 1955250 - RNA, 13 nt, Human
acacacgcugccu

SEQ ID NO: 1955251 - RNA, 14 nt, Human
acacaccagagccc

SEQ ID NO: 1955252 - RNA, 15 nt, Human
acacaccagagccca

SEQ ID NO: 1955253 - RNA, 20 nt, Human
acacaccagagcccaccuug

SEQ ID NO: 1955254 - RNA, 21 nt, Human
acacacgcgugcacacaccag

SEQ ID NO: 1955255 - RNA, 21 nt, Human
acaaugcugugcccuaaagug

SEQ ID NO: 1955256 - RNA, 22 nt, Human
acaaugcugugcccuaaagugu

SEQ ID NO: 1955257 - RNA, 23 nt, Human
acaaugcugugcccuaaagugua

SEQ ID NO: 1955258 - RNA, 24 nt, Human
acaaugcugugcccuaaaguguau

SEQ ID NO: 1955259 - RNA, 19 nt, Human
acaauggauaggcacagga

SEQ ID NO: 1955260 - RNA, 13 nt, Human
acacacaaagcag

SEQ ID NO: 1955261 - RNA, 17 nt, Human
acaaugugaaaagaaaa

SEQ ID NO: 1955262 - RNA, 19 nt, Human
acaaugugaaaagaaaaau

SEQ ID NO: 1955263 - RNA, 18 nt, Human
uagugaagacuccagaaa

SEQ ID NO: 1955264 - RNA, 17 nt, Human
uagugaagacuccagaa

SEQ ID NO: 1955265 - RNA, 14 nt, Human
uaguuaaucuauaa

SEQ ID NO: 1955266 - RNA, 19 nt, Human
acacaguauuacuucugcu

SEQ ID NO: 1955267 - RNA, 22 nt, Human
acacaguauuacuucugcuaca

SEQ ID NO: 1955268 - RNA, 18 nt, Human
acacaguauuacuucugc

SEQ ID NO: 1955269 - RNA, 16 nt, Human
acacaguauuacuucu

SEQ ID NO: 1955270 - RNA, 16 nt, Human
uaguaaauguaguuca

SEQ ID NO: 1955271 - RNA, 12 nt, Human
acacauaaauau

SEQ ID NO: 1955272 - RNA, 15 nt, Human
acacauaauuaacac

SEQ ID NO: 1955273 - RNA, 12 nt, Human
acaccuucuaua

SEQ ID NO: 1955274 - RNA, 21 nt, Human
acaccuuagccugcccuccuu

SEQ ID NO: 1955275 - RNA, 20 nt, Human
acacuaaccacgcuggaccu

SEQ ID NO: 1955276 - RNA, 21 nt, Human
acaccucugcacaagcugcac

SEQ ID NO: 1955277 - RNA, 16 nt, Human
acaccugacagccccu

SEQ ID NO: 1955278 - RNA, 16 nt, Human
acaccgggcacucaga

SEQ ID NO: 1955279 - RNA, 14 nt, Human
acaccgggccugga

SEQ ID NO: 1955280 - RNA, 18 nt, Human
acacccuuggagcucuga

SEQ ID NO: 1955281 - RNA, 14 nt, Human
acacccuuggagcu

SEQ ID NO: 1955282 - RNA, 19 nt, Human
acacccugugauggggccc

SEQ ID NO: 1955283 - RNA, 15 nt, Human
acacucaaaagcugg

SEQ ID NO: 1955284 - RNA, 15 nt, Human
uauaaguguguguuu

SEQ ID NO: 1955285 - RNA, 16 nt, Human
uauaagaaaaauguga

SEQ ID NO: 1955286 - RNA, 19 nt, Human
uauaacuuauauuguaaga

SEQ ID NO: 1955287 - RNA, 21 nt, Human
uauaacuuauauuguaagaaa

SEQ ID NO: 1955288 - RNA, 22 nt, Human
uauaacuuauauuguaagaaau

SEQ ID NO: 1955289 - RNA, 24 nt, Human
uauaacuuauauuguaagaaauac

SEQ ID NO: 1955290 - RNA, 20 nt, Human
acacucacauuuauucugcu

SEQ ID NO: 1955291 - RNA, 22 nt, Human
acacucacauuuauucugcuca

SEQ ID NO: 1955292 - RNA, 17 nt, Human
uauaacuuauauuguaa

SEQ ID NO: 1955293 - RNA, 20 nt, Human
acacaucagccaucaacuaa

SEQ ID NO: 1955294 - RNA, 20 nt, Human
acaccaucgaucaugaugua

SEQ ID NO: 1955295 - RNA, 18 nt, Human
acacaugauccugcaauu

SEQ ID NO: 1955296 - RNA, 21 nt, Human
acacaugagcaucaggccagg

SEQ ID NO: 1955297 - RNA, 14 nt, Human
acacauuuuauuuu

SEQ ID NO: 1955298 - RNA, 19 nt, Human
acacauuuuauuuuauuau

SEQ ID NO: 1955299 - RNA, 20 nt, Human
acacauuuuauuuuauuaug

SEQ ID NO: 1955300 - RNA, 20 nt, Human
uaguucaucccuucucuucc

SEQ ID NO: 1955301 - RNA, 12 nt, Human
uaguuacuguaa

SEQ ID NO: 1955302 - RNA, 20 nt, Human
uaguuccaccaucaagccac

SEQ ID NO: 1955303 - RNA, 14 nt, Human
uaguuccacugaga

SEQ ID NO: 1955304 - RNA, 15 nt, Human
uaguuccacugagac

SEQ ID NO: 1955305 - RNA, 20 nt, Human
uauaaaagccuguuuaagag

SEQ ID NO: 1955306 - RNA, 19 nt, Human
uauaaaaauaaaaaacacu

SEQ ID NO: 1955307 - RNA, 22 nt, Human
uauaaaagggacugagaaauuu

SEQ ID NO: 1955308 - RNA, 19 nt, Human
uauaaaagccuguuuaaga

SEQ ID NO: 1955309 - RNA, 23 nt, Human
acacauauaaauugucuuaaugg

SEQ ID NO: 1955310 - RNA, 17 nt, Human
acaaugacuuacuguac

SEQ ID NO: 1955311 - RNA, 18 nt, Human
acaaugacuuacuguaca

SEQ ID NO: 1955312 - RNA, 19 nt, Human
uagcuaauaacaugugaaa

SEQ ID NO: 1955313 - RNA, 12 nt, Human
acaaugacuuac

SEQ ID NO: 1955314 - RNA, 13 nt, Human
acaaucauguaca

SEQ ID NO: 1955315 - RNA, 18 nt, Human
acaagaccacguuucuaa

SEQ ID NO: 1955316 - RNA, 22 nt, Human
acaaggacagccccuccuccau

SEQ ID NO: 1955317 - RNA, 21 nt, Human
acaaggacagccccuccucca

SEQ ID NO: 1955318 - RNA, 18 nt, Human
acaaggacuaggguccug

SEQ ID NO: 1955319 - RNA, 19 nt, Human
acaaggacuaggguccugg

SEQ ID NO: 1955320 - RNA, 17 nt, Human
uaggcaagauggcacag

SEQ ID NO: 1955321 - RNA, 17 nt, Human
uaggcaaguuuucccug

SEQ ID NO: 1955322 - RNA, 19 nt, Human
uaggcaagauggcacaggg

SEQ ID NO: 1955323 - RNA, 20 nt, Human
uaggcauuugcugaauacag

SEQ ID NO: 1955324 - RNA, 16 nt, Human
uaggcauuugcugaau

SEQ ID NO: 1955325 - RNA, 14 nt, Human
uaggcauuguggga

SEQ ID NO: 1955326 - RNA, 14 nt, Human
uagggaccagaacc

SEQ ID NO: 1955327 - RNA, 16 nt, Human
uaggcagccugagagu

SEQ ID NO: 1955328 - RNA, 21 nt, Human
uagggaaggauacaaaagcau

SEQ ID NO: 1955329 - RNA, 15 nt, Human
uaggccaaagacaaa

SEQ ID NO: 1955330 - RNA, 15 nt, Human
uagggaccagaacca

SEQ ID NO: 1955331 - RNA, 16 nt, Human
uaggaaauccagggug

SEQ ID NO: 1955332 - RNA, 11 nt, Human
uagcuguguua

SEQ ID NO: 1955333 - RNA, 12 nt, Human
uagcuuaagaaa

SEQ ID NO: 1955334 - RNA, 14 nt, Human
uagcuuaagaaaaa

SEQ ID NO: 1955335 - RNA, 15 nt, Human
uagcuuaagaaaaaa

SEQ ID NO: 1955336 - RNA, 20 nt, Human
uaggagaagucuucuauuua

SEQ ID NO: 1955337 - RNA, 17 nt, Human
uaggacuuguuuuuguu

SEQ ID NO: 1955338 - RNA, 16 nt, Human
uagcauuuugcuaaau

SEQ ID NO: 1955339 - RNA, 14 nt, Human
uagccaaggccaaa

SEQ ID NO: 1955340 - RNA, 15 nt, Human
uagcauuuuggcgcu

SEQ ID NO: 1955341 - RNA, 22 nt, Human
uagcauuuugcuaaaugugaau

SEQ ID NO: 1955342 - RNA, 21 nt, Human
uagccaaggccaaaggaagca

SEQ ID NO: 1955343 - RNA, 23 nt, Human
uagaugcugacuguacuccuccc

SEQ ID NO: 1955344 - RNA, 14 nt, Human
uagaugcugacugu

SEQ ID NO: 1955345 - RNA, 19 nt, Human
uagcauggcugccaauggg

SEQ ID NO: 1955346 - RNA, 20 nt, Human
acaagacccaaaaggcagaa

SEQ ID NO: 1955347 - RNA, 19 nt, Human
acaagacccuugugguccc

SEQ ID NO: 1955348 - RNA, 19 nt, Human
acaagaccacguuucuaaa

SEQ ID NO: 1955349 - RNA, 22 nt, Human
acaacagagacugaaauguguu

SEQ ID NO: 1955350 - RNA, 13 nt, Human
acaacagauugga

SEQ ID NO: 1955351 - RNA, 18 nt, Human
acaacagauuggauuuua

SEQ ID NO: 1955352 - RNA, 20 nt, Human
acaacagauuggauuuuaug

SEQ ID NO: 1955353 - RNA, 22 nt, Human
acaacagauuggauuuuauguu

SEQ ID NO: 1955354 - RNA, 23 nt, Human
acaacagauuggauuuuauguug

SEQ ID NO: 1955355 - RNA, 16 nt, Human
acaaauuuuucugugg

SEQ ID NO: 1955356 - RNA, 14 nt, Human
acaaauuuuucugu

SEQ ID NO: 1955357 - RNA, 15 nt, Human
acaacacuuuaaugg

SEQ ID NO: 1955358 - RNA, 21 nt, Human
acaacacucauugaccugagg

SEQ ID NO: 1955359 - RNA, 23 nt, Human
acaacacucauugaccugaggcc

SEQ ID NO: 1955360 - RNA, 13 nt, Human
uagccaaaaugug

SEQ ID NO: 1955361 - RNA, 15 nt, Human
uagccagaggagaga

SEQ ID NO: 1955362 - RNA, 11 nt, Human
uagccagagga

SEQ ID NO: 1955363 - RNA, 20 nt, Human
acaaauuucucuguuccaua

SEQ ID NO: 1955364 - RNA, 19 nt, Human
acaaauuuacagagacaga

SEQ ID NO: 1955365 - RNA, 18 nt, Human
acaaauuuacagagacag

SEQ ID NO: 1955366 - RNA, 19 nt, Human
uagauauaugcucugcaug

SEQ ID NO: 1955367 - RNA, 15 nt, Human
uagauauccucugcu

SEQ ID NO: 1955368 - RNA, 22 nt, Human
uagaggagaaacuggaacucuc

SEQ ID NO: 1955369 - RNA, 23 nt, Human
uagaggcaguucgaccagccagg

SEQ ID NO: 1955370 - RNA, 15 nt, Human
uagauauaugcucug

SEQ ID NO: 1955371 - RNA, 16 nt, Human
uagauauagagucauu

SEQ ID NO: 1955372 - RNA, 19 nt, Human
uagauauagagucauugua

SEQ ID NO: 1955373 - RNA, 20 nt, Human
uagaggcaugggcuugcugu

SEQ ID NO: 1955374 - RNA, 19 nt, Human
uagaggagaaacuggaacu

SEQ ID NO: 1955375 - RNA, 16 nt, Human
aauuguuacaaauugu

SEQ ID NO: 1955376 - RNA, 16 nt, Human
aauuguuacuccauau

SEQ ID NO: 1955377 - RNA, 20 nt, Human
aauuguguuuauaauuuuaa

SEQ ID NO: 1955378 - RNA, 19 nt, Human
aauugccuuucuguguuua

SEQ ID NO: 1955379 - RNA, 21 nt, Human
aauuguguuuauaauuuuaaa

SEQ ID NO: 1955380 - RNA, 11 nt, Human
acaaaagcaug

SEQ ID NO: 1955381 - RNA, 22 nt, Human
acaaaagcaugugagacugguu

SEQ ID NO: 1955382 - RNA, 18 nt, Human
acaaaaggauaaugaaua

SEQ ID NO: 1955383 - RNA, 17 nt, Human
acaaaggggcuuaauua

SEQ ID NO: 1955384 - RNA, 20 nt, Human
acaaaggcuguauucagcaa

SEQ ID NO: 1955385 - RNA, 16 nt, Human
acaaaggcuguauuca

SEQ ID NO: 1955386 - RNA, 19 nt, Human
acaaaggcuguauucagca

SEQ ID NO: 1955387 - RNA, 22 nt, Human
acaaaggaugcccaaagaugca

SEQ ID NO: 1955388 - RNA, 22 nt, Human
acaaaagcugaacacauuucuu

SEQ ID NO: 1955389 - RNA, 21 nt, Human
acaaaagcauucggagggagg

SEQ ID NO: 1955390 - RNA, 21 nt, Human
acaaaagcugaacacauuucu

SEQ ID NO: 1955391 - RNA, 21 nt, Human
aacuugagccugucaagaggc

SEQ ID NO: 1955392 - RNA, 13 nt, Human
aacuucuuucacu

SEQ ID NO: 1955393 - RNA, 18 nt, Human
aacuugaagccugcuccu

SEQ ID NO: 1955394 - RNA, 13 nt, Human
aacuucagacaua

SEQ ID NO: 1955395 - RNA, 13 nt, Human
aacuucuaaaacu

SEQ ID NO: 1955396 - RNA, 15 nt, Human
aacuucuaaaacugu

SEQ ID NO: 1955397 - RNA, 16 nt, Human
aacuucuaaaacugua

SEQ ID NO: 1955398 - RNA, 23 nt, Human
aacuucuaaaacuguacuuugau

SEQ ID NO: 1955399 - RNA, 14 nt, Human
aacuucacauauug

SEQ ID NO: 1955400 - RNA, 22 nt, Human
aacuucacauauugauuuccgu

SEQ ID NO: 1955401 - RNA, 22 nt, Human
aacuucaccauauuaccacaga

SEQ ID NO: 1955402 - RNA, 18 nt, Human
aacugcccccucugcccu

SEQ ID NO: 1955403 - RNA, 19 nt, Human
aacugcccccucugcccug

SEQ ID NO: 1955404 - RNA, 20 nt, Human
aacugcccccucugcccugc

SEQ ID NO: 1955405 - RNA, 21 nt, Human
aacugcccccucugcccugcg

SEQ ID NO: 1955406 - RNA, 16 nt, Human
aacugcccccucugcc

SEQ ID NO: 1955407 - RNA, 17 nt, Human
aacugcccccucugccc

SEQ ID NO: 1955408 - RNA, 14 nt, Human
aacugccaguuuug

SEQ ID NO: 1955409 - RNA, 19 nt, Human
aacugccaguuuuguuucc

SEQ ID NO: 1955410 - RNA, 15 nt, Human
aacugucgugucaua

SEQ ID NO: 1955411 - RNA, 20 nt, Human
aacugucgugucauacucga

SEQ ID NO: 1955412 - RNA, 19 nt, Human
aacugucuagcacuuccuu

SEQ ID NO: 1955413 - RNA, 15 nt, Human
aacugucauuacaga

SEQ ID NO: 1955414 - RNA, 16 nt, Human
aacugcccaguuucca

SEQ ID NO: 1955415 - RNA, 13 nt, Human
gugcaauauauuu

SEQ ID NO: 1955416 - RNA, 14 nt, Human
gugcaauauauuuu

SEQ ID NO: 1955417 - RNA, 15 nt, Human
gugcaauauauuuug

SEQ ID NO: 1955418 - RNA, 11 nt, Human
gugauuaccag

SEQ ID NO: 1955419 - RNA, 16 nt, Human
gugauuaccagggacu

SEQ ID NO: 1955420 - RNA, 17 nt, Human
gugauuaccagggacug

SEQ ID NO: 1955421 - RNA, 13 nt, Human
gugaugugacauu

SEQ ID NO: 1955422 - RNA, 16 nt, Human
gugaugugacauuugu

SEQ ID NO: 1955423 - RNA, 18 nt, Human
gugaugugacauuuguca

SEQ ID NO: 1955424 - RNA, 10 nt, Human
gugauguguc

SEQ ID NO: 1955425 - RNA, 23 nt, Human
gugaucucauuguucaauuccca

SEQ ID NO: 1955426 - RNA, 23 nt, Human
gugaugguuccccuguucacucu

SEQ ID NO: 1955427 - RNA, 19 nt, Human
gugaucugcugcagagcag

SEQ ID NO: 1955428 - RNA, 20 nt, Human
gugaucugcugcagagcagu

SEQ ID NO: 1955429 - RNA, 21 nt, Human
gugcacaagcuccaagcuccc

SEQ ID NO: 1955430 - RNA, 16 nt, Human
gugcacaagcuccaag

SEQ ID NO: 1955431 - RNA, 13 nt, Human
gugcacaagcucc

SEQ ID NO: 1955432 - RNA, 18 nt, Human
gugcaaugaccuuucaau

SEQ ID NO: 1955433 - RNA, 23 nt, Human
gugcacaagcuccaagcucccag

SEQ ID NO: 1955434 - RNA, 21 nt, Human
gugcacaugcacgugugugca

SEQ ID NO: 1955435 - RNA, 16 nt, Human
gugcaauauauuuugu

SEQ ID NO: 1955436 - RNA, 20 nt, Human
gugcaauauauuuuguaugc

SEQ ID NO: 1955437 - RNA, 23 nt, Human
gugcaauauauuuuguaugcaag

SEQ ID NO: 1955438 - RNA, 22 nt, Human
gugcaccugggacagggagcag

SEQ ID NO: 1955439 - RNA, 23 nt, Human
gugcaccugggacagggagcagc

SEQ ID NO: 1955440 - RNA, 17 nt, Human
gugcauuugaggucugu

SEQ ID NO: 1955441 - RNA, 19 nt, Human
gugcauuugaggucuguuc

SEQ ID NO: 1955442 - RNA, 23 nt, Human
gugccaaaaacaacaacaaaaug

SEQ ID NO: 1955443 - RNA, 21 nt, Human
gugcauuuggugguuucagaa

SEQ ID NO: 1955444 - RNA, 21 nt, Human
aacuuuaccuuuuuuauacau

SEQ ID NO: 1955445 - RNA, 22 nt, Human
aacuuuaccuuuuuuauacaua

SEQ ID NO: 1955446 - RNA, 23 nt, Human
aacuuuaccuuuuuuauacauaa

SEQ ID NO: 1955447 - RNA, 19 nt, Human
gugccagauuuaugcauau

SEQ ID NO: 1955448 - RNA, 18 nt, Human
aagaaaaagaaaaagaaa

SEQ ID NO: 1955449 - RNA, 13 nt, Human
aagaaaaagaaaa

SEQ ID NO: 1955450 - RNA, 19 nt, Human
aagaaaaaauauuuucccu

SEQ ID NO: 1955451 - RNA, 18 nt, Human
aagaaaaaugagccuggc

SEQ ID NO: 1955452 - RNA, 12 nt, Human
aagaaaaaugug

SEQ ID NO: 1955453 - RNA, 22 nt, Human
aagaaaacaaaaccaaaaguua

SEQ ID NO: 1955454 - RNA, 17 nt, Human
aagaaaaaugagccugg

SEQ ID NO: 1955455 - RNA, 14 nt, Human
aagaaaaacuguuu

SEQ ID NO: 1955456 - RNA, 14 nt, Human
aagaaagaaaauca

SEQ ID NO: 1955457 - RNA, 13 nt, Human
aagaaagaaaauc

SEQ ID NO: 1955458 - RNA, 16 nt, Human
aagaaagaaaaucagg

SEQ ID NO: 1955459 - RNA, 12 nt, Human
aagaaagaaaga

SEQ ID NO: 1955460 - RNA, 12 nt, Human
aagaaagaaaua

SEQ ID NO: 1955461 - RNA, 12 nt, Human
aagaaagaggaa

SEQ ID NO: 1955462 - RNA, 17 nt, Human
aagaaagaggaaaagaa

SEQ ID NO: 1955463 - RNA, 16 nt, Human
aagaaaauaccaagga

SEQ ID NO: 1955464 - RNA, 13 nt, Human
aagaaaacacugu

SEQ ID NO: 1955465 - RNA, 15 nt, Human
aagaaaacacuguua

SEQ ID NO: 1955466 - RNA, 15 nt, Human
aagaaaauaguggug

SEQ ID NO: 1955467 - RNA, 21 nt, Human
aagaaaauaguggugugauuu

SEQ ID NO: 1955468 - RNA, 22 nt, Human
aagaaaauaguggugugauuug

SEQ ID NO: 1955469 - RNA, 13 nt, Human
aagaaaauacuua

SEQ ID NO: 1955470 - RNA, 16 nt, Human
aagaaaauacuuaaau

SEQ ID NO: 1955471 - RNA, 20 nt, Human
aagaaaauacuuaaauguua

SEQ ID NO: 1955472 - RNA, 14 nt, Human
aagaaacauuggaa

SEQ ID NO: 1955473 - RNA, 17 nt, Human
aagaaacauuggaagca

SEQ ID NO: 1955474 - RNA, 19 nt, Human
aagaaacagcuaugagagg

SEQ ID NO: 1955475 - RNA, 11 nt, Human
aagaaacauug

SEQ ID NO: 1955476 - RNA, 16 nt, Human
aagaauaaaggcagcu

SEQ ID NO: 1955477 - RNA, 14 nt, Human
aagaaguuuaagga

SEQ ID NO: 1955478 - RNA, 17 nt, Human
aagaaguuuaaggaaua

SEQ ID NO: 1955479 - RNA, 14 nt, Human
aagaaguucuuuga

SEQ ID NO: 1955480 - RNA, 20 nt, Human
aagaaguucuuugauucugu

SEQ ID NO: 1955481 - RNA, 11 nt, Human
aagaauaauuu

SEQ ID NO: 1955482 - RNA, 11 nt, Human
gugcuacagaa

SEQ ID NO: 1955483 - RNA, 18 nt, Human
gugcuaucucccccagcc

SEQ ID NO: 1955484 - RNA, 15 nt, Human
gugcuaucuccccca

SEQ ID NO: 1955485 - RNA, 17 nt, Human
gugcuaggaacacuccu

SEQ ID NO: 1955486 - RNA, 15 nt, Human
gugcugcccugccca

SEQ ID NO: 1955487 - RNA, 14 nt, Human
gugcugcccugccc

SEQ ID NO: 1955488 - RNA, 13 nt, Human
gugcugcccugcc

SEQ ID NO: 1955489 - RNA, 12 nt, Human
gugcugcccugc

SEQ ID NO: 1955490 - RNA, 15 nt, Human
gugcucuccaagccc

SEQ ID NO: 1955491 - RNA, 16 nt, Human
gugcucugaucaucca

SEQ ID NO: 1955492 - RNA, 13 nt, Human
gugcucuggacag

SEQ ID NO: 1955493 - RNA, 14 nt, Human
gugcucuggacagg

SEQ ID NO: 1955494 - RNA, 16 nt, Human
gugcucaggagcccug

SEQ ID NO: 1955495 - RNA, 19 nt, Human
gugcuaucucccccagccc

SEQ ID NO: 1955496 - RNA, 18 nt, Human
gugcucaggagcccuggg

SEQ ID NO: 1955497 - RNA, 19 nt, Human
gugcucaggagcccuggga

SEQ ID NO: 1955498 - RNA, 22 nt, Human
gugcucaucagaaacaauuucu

SEQ ID NO: 1955499 - RNA, 15 nt, Human
gugcucaucagaaac

SEQ ID NO: 1955500 - RNA, 18 nt, Human
gugaggcucugcccuugg

SEQ ID NO: 1955501 - RNA, 23 nt, Human
gugaguacuacaguccucccauc

SEQ ID NO: 1955502 - RNA, 17 nt, Human
gugagucaccaagccca

SEQ ID NO: 1955503 - RNA, 21 nt, Human
aacucuccucugcugcuggcu

SEQ ID NO: 1955504 - RNA, 19 nt, Human
aacucuccucugcugcugg

SEQ ID NO: 1955505 - RNA, 19 nt, Human
gugagucaccaagcccagu

SEQ ID NO: 1955506 - RNA, 17 nt, Human
gugaggcucugcccuug

SEQ ID NO: 1955507 - RNA, 16 nt, Human
gugaggcucugcccuu

SEQ ID NO: 1955508 - RNA, 15 nt, Human
gugaggcucugcccu

SEQ ID NO: 1955509 - RNA, 14 nt, Human
gugaggcucugccc

SEQ ID NO: 1955510 - RNA, 13 nt, Human
gugaggcucugcc

SEQ ID NO: 1955511 - RNA, 12 nt, Human
gugaggcucugc

SEQ ID NO: 1955512 - RNA, 18 nt, Human
gugagacucugucucaaa

SEQ ID NO: 1955513 - RNA, 12 nt, Human
aacucucugaac

SEQ ID NO: 1955514 - RNA, 23 nt, Human
aacucuccucugcugcuggcugg

SEQ ID NO: 1955515 - RNA, 22 nt, Human
aacucuccucugcugcuggcug

SEQ ID NO: 1955516 - RNA, 16 nt, Human
aacucuucucauuacu

SEQ ID NO: 1955517 - RNA, 17 nt, Human
aacucuucucauuacuu

SEQ ID NO: 1955518 - RNA, 11 nt, Human
aacucuuccuc

SEQ ID NO: 1955519 - RNA, 12 nt, Human
aacucuuccucc

SEQ ID NO: 1955520 - RNA, 13 nt, Human
aacucuucucauu

SEQ ID NO: 1955521 - RNA, 21 nt, Human
aacucuugacagcuauaauua

SEQ ID NO: 1955522 - RNA, 11 nt, Human
aacucuuuaac

SEQ ID NO: 1955523 - RNA, 13 nt, Human
aacucuuuaacuu

SEQ ID NO: 1955524 - RNA, 16 nt, Human
aacucugacaacagac

SEQ ID NO: 1955525 - RNA, 12 nt, Human
aacucugaauaa

SEQ ID NO: 1955526 - RNA, 15 nt, Human
aacucugaauaagca

SEQ ID NO: 1955527 - RNA, 18 nt, Human
aacucugaauaagcacuu

SEQ ID NO: 1955528 - RNA, 16 nt, Human
aacucugaauuuaucu

SEQ ID NO: 1955529 - RNA, 19 nt, Human
aacucugaauuuaucuuug

SEQ ID NO: 1955530 - RNA, 21 nt, Human
aacucugaauuuaucuuugau

SEQ ID NO: 1955531 - RNA, 22 nt, Human
aacucugaauuuaucuuugaua

SEQ ID NO: 1955532 - RNA, 23 nt, Human
aacucugaauuuaucuuugauaa

SEQ ID NO: 1955533 - RNA, 16 nt, Human
aacugcauuggcuuug

SEQ ID NO: 1955534 - RNA, 23 nt, Human
aacugauuuuuuuuuccuucagu

SEQ ID NO: 1955535 - RNA, 22 nt, Human
aacugauuuuuuuuuccuucag

SEQ ID NO: 1955536 - RNA, 23 nt, Human
aacucuuuuaucuccugaaaaaa

SEQ ID NO: 1955537 - RNA, 21 nt, Human
aacugauuuuuuuuuccuuca

SEQ ID NO: 1955538 - RNA, 20 nt, Human
aacugauuuuuuuuuccuuc

SEQ ID NO: 1955539 - RNA, 14 nt, Human
gugaauaaugauuu

SEQ ID NO: 1955540 - RNA, 14 nt, Human
gugaauaauuacag

SEQ ID NO: 1955541 - RNA, 23 nt, Human
gugacagaggcagccccauucug

SEQ ID NO: 1955542 - RNA, 20 nt, Human
gugacagagugagacucugu

SEQ ID NO: 1955543 - RNA, 22 nt, Human
gugacagagugagacucugucu

SEQ ID NO: 1955544 - RNA, 12 nt, Human
gugacaguguug

SEQ ID NO: 1955545 - RNA, 23 nt, Human
gugaauaauacaguaucucaggg

SEQ ID NO: 1955546 - RNA, 12 nt, Human
aacuccugaccu

SEQ ID NO: 1955547 - RNA, 14 nt, Human
aacuccugaccuca

SEQ ID NO: 1955548 - RNA, 19 nt, Human
aacuccaacauccacucuc

SEQ ID NO: 1955549 - RNA, 19 nt, Human
gugacaugucuuuucuugc

SEQ ID NO: 1955550 - RNA, 22 nt, Human
gugacauguguuggcagccucu

SEQ ID NO: 1955551 - RNA, 17 nt, Human
gugacauuugucauuuu

SEQ ID NO: 1955552 - RNA, 19 nt, Human
gugacauuugucauuuuca

SEQ ID NO: 1955553 - RNA, 20 nt, Human
gugacauuugucauuuucau

SEQ ID NO: 1955554 - RNA, 16 nt, Human
gugacuucagcucugu

SEQ ID NO: 1955555 - RNA, 12 nt, Human
gugacuuugaaa

SEQ ID NO: 1955556 - RNA, 22 nt, Human
gugagacccugucucaaaaaaa

SEQ ID NO: 1955557 - RNA, 13 nt, Human
gugagaccugccc

SEQ ID NO: 1955558 - RNA, 14 nt, Human
gugagaccugcccc

SEQ ID NO: 1955559 - RNA, 15 nt, Human
gugagaccugccccu

SEQ ID NO: 1955560 - RNA, 16 nt, Human
gugagaccugccccuc

SEQ ID NO: 1955561 - RNA, 23 nt, Human
gugagaccugccccuccucucug

SEQ ID NO: 1955562 - RNA, 14 nt, Human
gugagacucugucu

SEQ ID NO: 1955563 - RNA, 16 nt, Human
gugagacucugucuca

SEQ ID NO: 1955564 - RNA, 13 nt, Human
aacgucugugcca

SEQ ID NO: 1955565 - RNA, 12 nt, Human
aaccuucuggcc

SEQ ID NO: 1955566 - RNA, 12 nt, Human
aacgucuuaaau

SEQ ID NO: 1955567 - RNA, 14 nt, Human
aacgucuuaaauau

SEQ ID NO: 1955568 - RNA, 21 nt, Human
aaccuucgccaccuggguucc

SEQ ID NO: 1955569 - RNA, 19 nt, Human
aaccuuccuuccugcuuga

SEQ ID NO: 1955570 - RNA, 17 nt, Human
aaccuucuggccuccca

SEQ ID NO: 1955571 - RNA, 23 nt, Human
aacgugaugugcucaucagaaac

SEQ ID NO: 1955572 - RNA, 15 nt, Human
aacgucuuaaauauu

SEQ ID NO: 1955573 - RNA, 12 nt, Human
aacgugaaaaug

SEQ ID NO: 1955574 - RNA, 20 nt, Human
aacguggagaaucacaggcu

SEQ ID NO: 1955575 - RNA, 10 nt, Human
gucuuuccca

SEQ ID NO: 1955576 - RNA, 16 nt, Human
aaccugggaaagagau

SEQ ID NO: 1955577 - RNA, 21 nt, Human
aaccugggaaagagauuuaaa

SEQ ID NO: 1955578 - RNA, 12 nt, Human
gucuuucugggg

SEQ ID NO: 1955579 - RNA, 19 nt, Human
gucuuucugggguuuuucu

SEQ ID NO: 1955580 - RNA, 15 nt, Human
gucuuucuucuucaa

SEQ ID NO: 1955581 - RNA, 16 nt, Human
gucuuucuugcucccu

SEQ ID NO: 1955582 - RNA, 23 nt, Human
aaccuggucacaggacucugccu

SEQ ID NO: 1955583 - RNA, 17 nt, Human
aacuagggaagauaaua

SEQ ID NO: 1955584 - RNA, 21 nt, Human
aacuaggugcauauuuauaaa

SEQ ID NO: 1955585 - RNA, 15 nt, Human
aacuaaaauaauuuu

SEQ ID NO: 1955586 - RNA, 19 nt, Human
aacuaaaauaauuuuguaa

SEQ ID NO: 1955587 - RNA, 17 nt, Human
aacuaaaauaauuuugu

SEQ ID NO: 1955588 - RNA, 15 nt, Human
aacuaaaauguucua

SEQ ID NO: 1955589 - RNA, 20 nt, Human
aacguuugguucaaaugugu

SEQ ID NO: 1955590 - RNA, 13 nt, Human
aacguggcugcuu

SEQ ID NO: 1955591 - RNA, 12 nt, Human
aacguggcugcu

SEQ ID NO: 1955592 - RNA, 12 nt, Human
aacuauggccug

SEQ ID NO: 1955593 - RNA, 15 nt, Human
aacuaggcuccuuca

SEQ ID NO: 1955594 - RNA, 22 nt, Human
aacuaggucugauauucaaaug

SEQ ID NO: 1955595 - RNA, 15 nt, Human
aacuauguugauaaa

SEQ ID NO: 1955596 - RNA, 17 nt, Human
aacuauguuuaaaguaa

SEQ ID NO: 1955597 - RNA, 18 nt, Human
aacuauguuuaaaguaau

SEQ ID NO: 1955598 - RNA, 16 nt, Human
aacuccaacauccacu

SEQ ID NO: 1955599 - RNA, 22 nt, Human
gucuuuccacuccuccuagcca

SEQ ID NO: 1955600 - RNA, 13 nt, Human
gucuuuccacucu

SEQ ID NO: 1955601 - RNA, 14 nt, Human
gucuuuccacucug

SEQ ID NO: 1955602 - RNA, 22 nt, Human
gucuuguuuuuuuuuuccacuu

SEQ ID NO: 1955603 - RNA, 17 nt, Human
gucuuaauggaugaaau

SEQ ID NO: 1955604 - RNA, 21 nt, Human
gucuuauauuuacaacacuuu

SEQ ID NO: 1955605 - RNA, 14 nt, Human
gucuuaugcuucca

SEQ ID NO: 1955606 - RNA, 15 nt, Human
gucuuaugcuuccag

SEQ ID NO: 1955607 - RNA, 21 nt, Human
gucuuaugcuuccagaaacac

SEQ ID NO: 1955608 - RNA, 23 nt, Human
gucuuauuaaaacacuucauuga

SEQ ID NO: 1955609 - RNA, 18 nt, Human
gucuggaaugcaguggua

SEQ ID NO: 1955610 - RNA, 15 nt, Human
gucuggaaugcagug

SEQ ID NO: 1955611 - RNA, 16 nt, Human
gucuggaaugcagugg

SEQ ID NO: 1955612 - RNA, 19 nt, Human
gucuuauauauuguagaua

SEQ ID NO: 1955613 - RNA, 23 nt, Human
gucugacaagguggucaacaaca

SEQ ID NO: 1955614 - RNA, 20 nt, Human
gucugacaggcaaugcuggc

SEQ ID NO: 1955615 - RNA, 15 nt, Human
gucugacaggcaaug

SEQ ID NO: 1955616 - RNA, 18 nt, Human
gucugacaggcaaugcug

SEQ ID NO: 1955617 - RNA, 12 nt, Human
gucugacaggca

SEQ ID NO: 1955618 - RNA, 13 nt, Human
gucugacaggcaa

SEQ ID NO: 1955619 - RNA, 14 nt, Human
gucugacaggcaau

SEQ ID NO: 1955620 - RNA, 19 nt, Human
gucucaaaaaaagaaaaag

SEQ ID NO: 1955621 - RNA, 17 nt, Human
gucucaaaaaaagaaaa

SEQ ID NO: 1955622 - RNA, 20 nt, Human
gucuauuucaucagaacagc

SEQ ID NO: 1955623 - RNA, 22 nt, Human
gucuauuucaucagaacagcug

SEQ ID NO: 1955624 - RNA, 14 nt, Human
gucucaaaaaaaca

SEQ ID NO: 1955625 - RNA, 20 nt, Human
gucuauuuggauuauucuuu

SEQ ID NO: 1955626 - RNA, 15 nt, Human
gucucuuuuuuacaa

SEQ ID NO: 1955627 - RNA, 20 nt, Human
gucucuuuuuuacaaaggcu

SEQ ID NO: 1955628 - RNA, 16 nt, Human
gucucuuuuuuacaaa

SEQ ID NO: 1955629 - RNA, 18 nt, Human
gucucuuuuuuacaaagg

SEQ ID NO: 1955630 - RNA, 17 nt, Human
aaauucaauaguaauau

SEQ ID NO: 1955631 - RNA, 14 nt, Human
aaauucaauaguaa

SEQ ID NO: 1955632 - RNA, 23 nt, Human
aaauuaugugccagauuuaugca

SEQ ID NO: 1955633 - RNA, 18 nt, Human
aaauuaggauuucaugau

SEQ ID NO: 1955634 - RNA, 19 nt, Human
aaauuaggauuucaugauu

SEQ ID NO: 1955635 - RNA, 17 nt, Human
aaauuaugcuaagaauu

SEQ ID NO: 1955636 - RNA, 21 nt, Human
aaauuaugcuaagaauuuuuu

SEQ ID NO: 1955637 - RNA, 14 nt, Human
aaauuaugguaaaa

SEQ ID NO: 1955638 - RNA, 15 nt, Human
aaauguggcuccugg

SEQ ID NO: 1955639 - RNA, 14 nt, Human
aaauuaaucugggc

SEQ ID NO: 1955640 - RNA, 13 nt, Human
aaauuaauugugu

SEQ ID NO: 1955641 - RNA, 19 nt, Human
aaauuagccuaagauauac

SEQ ID NO: 1955642 - RNA, 20 nt, Human
aaauuagccuaagauauacu

SEQ ID NO: 1955643 - RNA, 21 nt, Human
aaauuagccuaagauauacuu

SEQ ID NO: 1955644 - RNA, 22 nt, Human
aaauuagccuaagauauacuug

SEQ ID NO: 1955645 - RNA, 20 nt, Human
aaauuacauuuguaauuuaa

SEQ ID NO: 1955646 - RNA, 23 nt, Human
aaauuacauuuguaauuuaaggu

SEQ ID NO: 1955647 - RNA, 13 nt, Human
aaauuacauuugu

SEQ ID NO: 1955648 - RNA, 15 nt, Human
aaauuacauuuguaa

SEQ ID NO: 1955649 - RNA, 16 nt, Human
aaauuacauuuguaau

SEQ ID NO: 1955650 - RNA, 18 nt, Human
aaauuacauuuguaauuu

SEQ ID NO: 1955651 - RNA, 15 nt, Human
aaauuaauuguguga

SEQ ID NO: 1955652 - RNA, 16 nt, Human
aaauuaauugugugaa

SEQ ID NO: 1955653 - RNA, 18 nt, Human
aaauuaauugugugaacu

SEQ ID NO: 1955654 - RNA, 13 nt, Human
aaauuacauuucg

SEQ ID NO: 1955655 - RNA, 12 nt, Human
aaauuacauuug

SEQ ID NO: 1955656 - RNA, 13 nt, Human
aaauuccagaaug

SEQ ID NO: 1955657 - RNA, 16 nt, Human
aaauucacaaaguuaa

SEQ ID NO: 1955658 - RNA, 16 nt, Human
aaauuccccacccuga

SEQ ID NO: 1955659 - RNA, 17 nt, Human
aaauuccaagugauuga

SEQ ID NO: 1955660 - RNA, 17 nt, Human
aaauuguauuacaaauc

SEQ ID NO: 1955661 - RNA, 18 nt, Human
aaauugucagaugcugug

SEQ ID NO: 1955662 - RNA, 19 nt, Human
aaauugucaccugcuucuc

SEQ ID NO: 1955663 - RNA, 18 nt, Human
aaauuuaaaaagcccaac

SEQ ID NO: 1955664 - RNA, 18 nt, Human
guauucucuccuguaccu

SEQ ID NO: 1955665 - RNA, 21 nt, Human
guauucucuccuguaccucuu

SEQ ID NO: 1955666 - RNA, 22 nt, Human
guauucuaauaagcuaguugaa

SEQ ID NO: 1955667 - RNA, 14 nt, Human
guauucucauucuu

SEQ ID NO: 1955668 - RNA, 19 nt, Human
guauucuaauaagcuaguu

SEQ ID NO: 1955669 - RNA, 16 nt, Human
aaaucauucauuuucu

SEQ ID NO: 1955670 - RNA, 19 nt, Human
aaaucauauuuggaauaaa

SEQ ID NO: 1955671 - RNA, 13 nt, Human
guauuguccuauu

SEQ ID NO: 1955672 - RNA, 21 nt, Human
guauuguccuauuaguguuau

SEQ ID NO: 1955673 - RNA, 10 nt, Human
guauuguaca

SEQ ID NO: 1955674 - RNA, 17 nt, Human
guauuguaggugguguu

SEQ ID NO: 1955675 - RNA, 21 nt, Human
aaaugucucuuuaaugucaca

SEQ ID NO: 1955676 - RNA, 14 nt, Human
aaaugucuuccugg

SEQ ID NO: 1955677 - RNA, 21 nt, Human
guauuuauaagaaaaauguga

SEQ ID NO: 1955678 - RNA, 11 nt, Human
guauuuauuca

SEQ ID NO: 1955679 - RNA, 13 nt, Human
aaauguaguucau

SEQ ID NO: 1955680 - RNA, 23 nt, Human
gucacugagacagcccgggcucu

SEQ ID NO: 1955681 - RNA, 21 nt, Human
gucacugagacagcccgggcu

SEQ ID NO: 1955682 - RNA, 18 nt, Human
gucacugagacagcccgg

SEQ ID NO: 1955683 - RNA, 17 nt, Human
gucacugagacagcccg

SEQ ID NO: 1955684 - RNA, 10 nt, Human
gucacugcuu

SEQ ID NO: 1955685 - RNA, 20 nt, Human
gucacugcacagugcaucuc

SEQ ID NO: 1955686 - RNA, 23 nt, Human
gucacugcacagugcaucucagc

SEQ ID NO: 1955687 - RNA, 16 nt, Human
gucacugagacagccc

SEQ ID NO: 1955688 - RNA, 15 nt, Human
gucacugagacagcc

SEQ ID NO: 1955689 - RNA, 14 nt, Human
gucacugagacagc

SEQ ID NO: 1955690 - RNA, 12 nt, Human
gucaccaagccc

SEQ ID NO: 1955691 - RNA, 15 nt, Human
gucaccaagcccagu

SEQ ID NO: 1955692 - RNA, 23 nt, Human
gucacucuggcagcucagagagg

SEQ ID NO: 1955693 - RNA, 22 nt, Human
gucaauuacaggaaguacugga

SEQ ID NO: 1955694 - RNA, 13 nt, Human
gucacaggaagua

SEQ ID NO: 1955695 - RNA, 15 nt, Human
gucacaggaaguaga

SEQ ID NO: 1955696 - RNA, 21 nt, Human
gucaauuuuguuauguauauu

SEQ ID NO: 1955697 - RNA, 20 nt, Human
gucacaggaaguagaggagg

SEQ ID NO: 1955698 - RNA, 17 nt, Human
gucacaggacucugccu

SEQ ID NO: 1955699 - RNA, 18 nt, Human
gucacaggacucugccuc

SEQ ID NO: 1955700 - RNA, 12 nt, Human
gucacaggcagg

SEQ ID NO: 1955701 - RNA, 19 nt, Human
gucacaggacucugccucc

SEQ ID NO: 1955702 - RNA, 16 nt, Human
gucacaggagggaggg

SEQ ID NO: 1955703 - RNA, 22 nt, Human
gucaccaaaucagcugcuacua

SEQ ID NO: 1955704 - RNA, 18 nt, Human
gucacauuccugaacagg

SEQ ID NO: 1955705 - RNA, 22 nt, Human
gucacaucccaccccauccucc

SEQ ID NO: 1955706 - RNA, 21 nt, Human
gucaguccaagggguccccuc

SEQ ID NO: 1955707 - RNA, 15 nt, Human
gucagggugagccca

SEQ ID NO: 1955708 - RNA, 13 nt, Human
gucagguugacag

SEQ ID NO: 1955709 - RNA, 18 nt, Human
gucagguugacaggaggu

SEQ ID NO: 1955710 - RNA, 14 nt, Human
gucagucgccuuuc

SEQ ID NO: 1955711 - RNA, 23 nt, Human
gucagucgccuuucagcaggcag

SEQ ID NO: 1955712 - RNA, 12 nt, Human
gucagucuuuag

SEQ ID NO: 1955713 - RNA, 13 nt, Human
aaauuucuaaauc

SEQ ID NO: 1955714 - RNA, 15 nt, Human
aaauuucuaaaucuc

SEQ ID NO: 1955715 - RNA, 12 nt, Human
aaauuucuaaau

SEQ ID NO: 1955716 - RNA, 16 nt, Human
gucaguguagaucaac

SEQ ID NO: 1955717 - RNA, 16 nt, Human
gucagguggggcagcu

SEQ ID NO: 1955718 - RNA, 17 nt, Human
gucagguggggcagcuu

SEQ ID NO: 1955719 - RNA, 18 nt, Human
gucagguggggcagcuug

SEQ ID NO: 1955720 - RNA, 22 nt, Human
gucagguggggcagcuugaggg

SEQ ID NO: 1955721 - RNA, 15 nt, Human
gucaggaggcagaag

SEQ ID NO: 1955722 - RNA, 17 nt, Human
gucaggaggcagaagga

SEQ ID NO: 1955723 - RNA, 22 nt, Human
gucacugcugcuucauguuugc

SEQ ID NO: 1955724 - RNA, 15 nt, Human
gucacugcuuaacuu

SEQ ID NO: 1955725 - RNA, 21 nt, Human
gucacugcuuaacuucacaua

SEQ ID NO: 1955726 - RNA, 22 nt, Human
gucacuggggcccaagagucug

SEQ ID NO: 1955727 - RNA, 17 nt, Human
gucacuggggcccaaga

SEQ ID NO: 1955728 - RNA, 21 nt, Human
gucagaaguuucugccgcagc

SEQ ID NO: 1955729 - RNA, 22 nt, Human
gucagaagagagggugaguccu

SEQ ID NO: 1955730 - RNA, 15 nt, Human
gucagaaacuaaaac

SEQ ID NO: 1955731 - RNA, 11 nt, Human
gucacuuuuag

SEQ ID NO: 1955732 - RNA, 17 nt, Human
gucacuuuguuuuacug

SEQ ID NO: 1955733 - RNA, 19 nt, Human
gucacuucuucuguccaag

SEQ ID NO: 1955734 - RNA, 13 nt, Human
gucacuucuucug

SEQ ID NO: 1955735 - RNA, 14 nt, Human
gucacuucuucugu

SEQ ID NO: 1955736 - RNA, 17 nt, Human
gucacuucuucugucca

SEQ ID NO: 1955737 - RNA, 23 nt, Human
guccccagaacucugccugcccu

SEQ ID NO: 1955738 - RNA, 22 nt, Human
guccccagcccuuccucugcuc

SEQ ID NO: 1955739 - RNA, 18 nt, Human
guccccuguuuguuucug

SEQ ID NO: 1955740 - RNA, 22 nt, Human
guccccuguuuguuucugaaag

SEQ ID NO: 1955741 - RNA, 12 nt, Human
gucccuaauaaa

SEQ ID NO: 1955742 - RNA, 19 nt, Human
gucccuuacgugaguccug

SEQ ID NO: 1955743 - RNA, 18 nt, Human
gucccuuacgugaguccu

SEQ ID NO: 1955744 - RNA, 18 nt, Human
gucccugguggcagcuca

SEQ ID NO: 1955745 - RNA, 15 nt, Human
gucccuaauaaagcu

SEQ ID NO: 1955746 - RNA, 19 nt, Human
gucccugguggcagcucac

SEQ ID NO: 1955747 - RNA, 18 nt, Human
guccccaccgcagacagg

SEQ ID NO: 1955748 - RNA, 20 nt, Human
gucccaccccacacacgcca

SEQ ID NO: 1955749 - RNA, 22 nt, Human
guccccagacuccaccaagccu

SEQ ID NO: 1955750 - RNA, 22 nt, Human
guccccaccgcagacaggacca

SEQ ID NO: 1955751 - RNA, 15 nt, Human
gucccaccccacaca

SEQ ID NO: 1955752 - RNA, 17 nt, Human
gucccaagguucugggu

SEQ ID NO: 1955753 - RNA, 18 nt, Human
gucccaagguucugggug

SEQ ID NO: 1955754 - RNA, 19 nt, Human
gucauuugagcagggcuca

SEQ ID NO: 1955755 - RNA, 12 nt, Human
gucauuucugau

SEQ ID NO: 1955756 - RNA, 22 nt, Human
guccaugaagauguagaggaga

SEQ ID NO: 1955757 - RNA, 23 nt, Human
guccaugaagauguagaggagaa

SEQ ID NO: 1955758 - RNA, 19 nt, Human
aaauuucuaaaucuccaaa

SEQ ID NO: 1955759 - RNA, 12 nt, Human
aaauuucucugu

SEQ ID NO: 1955760 - RNA, 20 nt, Human
aaauuugaaacauugcuuuu

SEQ ID NO: 1955761 - RNA, 23 nt, Human
aaauuugaaacauugcuuuuaaa

SEQ ID NO: 1955762 - RNA, 13 nt, Human
aaauuugaaacau

SEQ ID NO: 1955763 - RNA, 14 nt, Human
aaauuugaaacauu

SEQ ID NO: 1955764 - RNA, 15 nt, Human
aaauuugaaacauug

SEQ ID NO: 1955765 - RNA, 16 nt, Human
aaauuugaaacauugc

SEQ ID NO: 1955766 - RNA, 19 nt, Human
aacacaaacgggcucagca

SEQ ID NO: 1955767 - RNA, 22 nt, Human
aacacacagaaggggacugcca

SEQ ID NO: 1955768 - RNA, 17 nt, Human
aacacucauugaccuga

SEQ ID NO: 1955769 - RNA, 21 nt, Human
aacacugggagaaaugaaaaa

SEQ ID NO: 1955770 - RNA, 21 nt, Human
aacacucacauuuauucugcu

SEQ ID NO: 1955771 - RNA, 19 nt, Human
aacacuguucucugcccuc

SEQ ID NO: 1955772 - RNA, 17 nt, Human
gucauuugagcagggcu

SEQ ID NO: 1955773 - RNA, 13 nt, Human
gucauuucauguc

SEQ ID NO: 1955774 - RNA, 11 nt, Human
gucauuuccau

SEQ ID NO: 1955775 - RNA, 12 nt, Human
gucauuuccaug

SEQ ID NO: 1955776 - RNA, 18 nt, Human
gucauuuccauguaugca

SEQ ID NO: 1955777 - RNA, 21 nt, Human
gucauuuccauguaugcauaa

SEQ ID NO: 1955778 - RNA, 22 nt, Human
gucauuuccauguaugcauaau

SEQ ID NO: 1955779 - RNA, 18 nt, Human
aacacuguucucugcccu

SEQ ID NO: 1955780 - RNA, 17 nt, Human
aacacuguucucugccc

SEQ ID NO: 1955781 - RNA, 16 nt, Human
aacacuguucucugcc

SEQ ID NO: 1955782 - RNA, 16 nt, Human
gucgaggacagggagg

SEQ ID NO: 1955783 - RNA, 12 nt, Human
gucgaggcagga

SEQ ID NO: 1955784 - RNA, 16 nt, Human
guccuggcaugggaau

SEQ ID NO: 1955785 - RNA, 19 nt, Human
guccugcugcaguugccag

SEQ ID NO: 1955786 - RNA, 14 nt, Human
guccucuuuucuga

SEQ ID NO: 1955787 - RNA, 16 nt, Human
gucuaccugaggggcc

SEQ ID NO: 1955788 - RNA, 15 nt, Human
gucuaccugaggggc

SEQ ID NO: 1955789 - RNA, 13 nt, Human
gucuaccugaggg

SEQ ID NO: 1955790 - RNA, 14 nt, Human
gucuaccugagggg

SEQ ID NO: 1955791 - RNA, 20 nt, Human
gucgccuuucagcaggcagc

SEQ ID NO: 1955792 - RNA, 21 nt, Human
gucgccuuucagcaggcagcc

SEQ ID NO: 1955793 - RNA, 12 nt, Human
gucgccucugca

SEQ ID NO: 1955794 - RNA, 21 nt, Human
gucuagcguagugcagcaggg

SEQ ID NO: 1955795 - RNA, 20 nt, Human
gucuauuuacggaacucaaa

SEQ ID NO: 1955796 - RNA, 22 nt, Human
gucuaugggacucaaugcacug

SEQ ID NO: 1955797 - RNA, 15 nt, Human
guccgguuuacuuua

SEQ ID NO: 1955798 - RNA, 17 nt, Human
guccgguuuacuuuaac

SEQ ID NO: 1955799 - RNA, 18 nt, Human
aacaguccauugaaaggg

SEQ ID NO: 1955800 - RNA, 20 nt, Human
gucccuugaacuacugggug

SEQ ID NO: 1955801 - RNA, 17 nt, Human
aacauagccaaaaugug

SEQ ID NO: 1955802 - RNA, 11 nt, Human
aacauguaugu

SEQ ID NO: 1955803 - RNA, 16 nt, Human
aacauguaugugcauu

SEQ ID NO: 1955804 - RNA, 17 nt, Human
aacaugugaaaagaaua

SEQ ID NO: 1955805 - RNA, 22 nt, Human
aacauguggcuugaauuaagaa

SEQ ID NO: 1955806 - RNA, 18 nt, Human
aacauucaugcucauugc

SEQ ID NO: 1955807 - RNA, 16 nt, Human
aacauuccucaaaaug

SEQ ID NO: 1955808 - RNA, 14 nt, Human
guccuccugcugcc

SEQ ID NO: 1955809 - RNA, 15 nt, Human
guccuccugcugcca

SEQ ID NO: 1955810 - RNA, 16 nt, Human
guccuccugcugccag

SEQ ID NO: 1955811 - RNA, 17 nt, Human
guccuccugcugccagu

SEQ ID NO: 1955812 - RNA, 24 nt, Human
aacauuggaagcagguuaaauguu

SEQ ID NO: 1955813 - RNA, 14 nt, Human
aacauugcuuuuaa

SEQ ID NO: 1955814 - RNA, 15 nt, Human
aacauugcuuuuaaa

SEQ ID NO: 1955815 - RNA, 17 nt, Human
aacauugcuuuuaaaac

SEQ ID NO: 1955816 - RNA, 19 nt, Human
aacauugcuuuuaaaacua

SEQ ID NO: 1955817 - RNA, 12 nt, Human
aacauuggaagc

SEQ ID NO: 1955818 - RNA, 16 nt, Human
aacauuggaagcaggu

SEQ ID NO: 1955819 - RNA, 22 nt, Human
aacauuggaagcagguuaaaug

SEQ ID NO: 1955820 - RNA, 23 nt, Human
aacauuggaagcagguuaaaugu

SEQ ID NO: 1955821 - RNA, 23 nt, Human
uaaaacuguacuuugauucacau

SEQ ID NO: 1955822 - RNA, 15 nt, Human
uaaaacuguacuuug

SEQ ID NO: 1955823 - RNA, 16 nt, Human
uaaaacuguacuuuga

SEQ ID NO: 1955824 - RNA, 17 nt, Human
uaaaacuguacuuugau

SEQ ID NO: 1955825 - RNA, 19 nt, Human
uaaaacuguacuuugauuc

SEQ ID NO: 1955826 - RNA, 20 nt, Human
uaaaacuguacuuugauuca

SEQ ID NO: 1955827 - RNA, 22 nt, Human
uaaaacuguacuuugauucaca

SEQ ID NO: 1955828 - RNA, 12 nt, Human
uaaaacuuuuua

SEQ ID NO: 1955829 - RNA, 15 nt, Human
uaaaacuuuuuaaaa

SEQ ID NO: 1955830 - RNA, 14 nt, Human
uaaaacuguacuuu

SEQ ID NO: 1955831 - RNA, 13 nt, Human
uaaaacuguacuu

SEQ ID NO: 1955832 - RNA, 17 nt, Human
uaaaaccaggcuuucua

SEQ ID NO: 1955833 - RNA, 17 nt, Human
uaaaacuacuuagcacu

SEQ ID NO: 1955834 - RNA, 13 nt, Human
uaaaacccaagug

SEQ ID NO: 1955835 - RNA, 23 nt, Human
uaaaaaucucaaauuucuaaauc

SEQ ID NO: 1955836 - RNA, 15 nt, Human
uaaaaaugagguacu

SEQ ID NO: 1955837 - RNA, 23 nt, Human
uaaaaauaucaaauuaauugugu

SEQ ID NO: 1955838 - RNA, 16 nt, Human
uaaaaaucucucauuu

SEQ ID NO: 1955839 - RNA, 22 nt, Human
uaaaaaugagguacucuccugg

SEQ ID NO: 1955840 - RNA, 21 nt, Human
uaaaaaaaaaccugagcccca

SEQ ID NO: 1955841 - RNA, 22 nt, Human
uaaaaagcuccaaaugcagcuu

SEQ ID NO: 1955842 - RNA, 21 nt, Human
uaaaaauauacauguuuaugu

SEQ ID NO: 1955843 - RNA, 13 nt, Human
uaaaaauauacau

SEQ ID NO: 1955844 - RNA, 15 nt, Human
uaaaaauauacaugu

SEQ ID NO: 1955845 - RNA, 16 nt, Human
uaaaaauauacauguu

SEQ ID NO: 1955846 - RNA, 17 nt, Human
uaaaaauauacauguuu

SEQ ID NO: 1955847 - RNA, 21 nt, Human
uaaaaaguauugccaaacauu

SEQ ID NO: 1955848 - RNA, 14 nt, Human
uaaaaagucuuuua

SEQ ID NO: 1955849 - RNA, 16 nt, Human
uaaaaagucuuuuaaa

SEQ ID NO: 1955850 - RNA, 18 nt, Human
uaaaaaggaauaugaaag

SEQ ID NO: 1955851 - RNA, 23 nt, Human
uaaaaagguccucacaggugucu

SEQ ID NO: 1955852 - RNA, 13 nt, Human
uaaaaaguauugc

SEQ ID NO: 1955853 - RNA, 20 nt, Human
uaaaaaguauugccaaacau

SEQ ID NO: 1955854 - RNA, 22 nt, Human
uaaaauaagaauagaacaacau

SEQ ID NO: 1955855 - RNA, 13 nt, Human
uaaaauaaacuuu

SEQ ID NO: 1955856 - RNA, 14 nt, Human
uaaaauaaacuuuc

SEQ ID NO: 1955857 - RNA, 15 nt, Human
uaaaauaaacuuucu

SEQ ID NO: 1955858 - RNA, 16 nt, Human
uaaaauaaacuuucuu

SEQ ID NO: 1955859 - RNA, 14 nt, Human
uaaaagaaaauaaa

SEQ ID NO: 1955860 - RNA, 17 nt, Human
uaaaagaaaauaaaaaa

SEQ ID NO: 1955861 - RNA, 22 nt, Human
uaaaagaaaauaaaaaaaagaa

SEQ ID NO: 1955862 - RNA, 21 nt, Human
uaaaagaagaaauaguucugu

SEQ ID NO: 1955863 - RNA, 13 nt, Human
uaaaagucuugug

SEQ ID NO: 1955864 - RNA, 22 nt, Human
uaaaagaagaaauaguucugug

SEQ ID NO: 1955865 - RNA, 21 nt, Human
uaaaauaccagccaguaaaug

SEQ ID NO: 1955866 - RNA, 12 nt, Human
uaaaauaauaaa

SEQ ID NO: 1955867 - RNA, 13 nt, Human
aagugauccuccc

SEQ ID NO: 1955868 - RNA, 19 nt, Human
aagugauccucccaccuca

SEQ ID NO: 1955869 - RNA, 20 nt, Human
aagugauccucccaccucag

SEQ ID NO: 1955870 - RNA, 19 nt, Human
aagugcagaacugcaguca

SEQ ID NO: 1955871 - RNA, 17 nt, Human
aagugauucucaugccu

SEQ ID NO: 1955872 - RNA, 23 nt, Human
aagugauccucccaccucagccu

SEQ ID NO: 1955873 - RNA, 13 nt, Human
aagugauucucau

SEQ ID NO: 1955874 - RNA, 16 nt, Human
aagugauucucaugcc

SEQ ID NO: 1955875 - RNA, 19 nt, Human
aagugauucucaugccuca

SEQ ID NO: 1955876 - RNA, 23 nt, Human
aaguuauauuuccuauaccauuu

SEQ ID NO: 1955877 - RNA, 14 nt, Human
aaguuauguguaug

SEQ ID NO: 1955878 - RNA, 15 nt, Human
aaguuauguguaugu

SEQ ID NO: 1955879 - RNA, 14 nt, Human
aaguuauauuuccu

SEQ ID NO: 1955880 - RNA, 22 nt, Human
aaguuauauuuccuauaccauu

SEQ ID NO: 1955881 - RNA, 16 nt, Human
aaguuauguguaugug

SEQ ID NO: 1955882 - RNA, 14 nt, Human
aaguuauuaaaauu

SEQ ID NO: 1955883 - RNA, 16 nt, Human
aaguuauuaaaauugu

SEQ ID NO: 1955884 - RNA, 17 nt, Human
aaguuauuaaaauuguu

SEQ ID NO: 1955885 - RNA, 18 nt, Human
aaguuaguuccacugaga

SEQ ID NO: 1955886 - RNA, 19 nt, Human
aaguuaguuccacugagac

SEQ ID NO: 1955887 - RNA, 14 nt, Human
aaguuaguuucagu

SEQ ID NO: 1955888 - RNA, 15 nt, Human
aaguuaguaggauau

SEQ ID NO: 1955889 - RNA, 21 nt, Human
aaguuagccuuuaucuaccaa

SEQ ID NO: 1955890 - RNA, 19 nt, Human
aaguuaguaggauaugccu

SEQ ID NO: 1955891 - RNA, 16 nt, Human
aaguuaguaggauaug

SEQ ID NO: 1955892 - RNA, 21 nt, Human
aaguguguguuuuucauaaag

SEQ ID NO: 1955893 - RNA, 16 nt, Human
aaguguguguuuuuca

SEQ ID NO: 1955894 - RNA, 11 nt, Human
aaguuaagaau

SEQ ID NO: 1955895 - RNA, 16 nt, Human
aaguuagccuuuaucu

SEQ ID NO: 1955896 - RNA, 17 nt, Human
aaguuagccuuuaucua

SEQ ID NO: 1955897 - RNA, 23 nt, Human
aaguuaagaauguucuuauguug

SEQ ID NO: 1955898 - RNA, 10 nt, Human
aagugugggu

SEQ ID NO: 1955899 - RNA, 17 nt, Human
aagugugggucugugug

SEQ ID NO: 1955900 - RNA, 18 nt, Human
aagugugggucugugugu

SEQ ID NO: 1955901 - RNA, 20 nt, Human
aagugugaauacugcuugaa

SEQ ID NO: 1955902 - RNA, 20 nt, Human
aagugugggucugugugugu

SEQ ID NO: 1955903 - RNA, 13 nt, Human
aagugugguagag

SEQ ID NO: 1955904 - RNA, 12 nt, Human
aaguguguguuu

SEQ ID NO: 1955905 - RNA, 23 nt, Human
aaguguauuuuuuuacuaauaga

SEQ ID NO: 1955906 - RNA, 14 nt, Human
aagugugaauacug

SEQ ID NO: 1955907 - RNA, 15 nt, Human
aagugugaauacugc

SEQ ID NO: 1955908 - RNA, 16 nt, Human
aagugugaauacugcu

SEQ ID NO: 1955909 - RNA, 18 nt, Human
aagugugaauacugcuug

SEQ ID NO: 1955910 - RNA, 15 nt, Human
uaaaauugugaugug

SEQ ID NO: 1955911 - RNA, 19 nt, Human
uaaaauuguacaugaacau

SEQ ID NO: 1955912 - RNA, 16 nt, Human
uaaaauugugaugugu

SEQ ID NO: 1955913 - RNA, 15 nt, Human
uaaaauucucuucca

SEQ ID NO: 1955914 - RNA, 15 nt, Human
uaaaauguacaugua

SEQ ID NO: 1955915 - RNA, 17 nt, Human
uaaaauguacauguauu

SEQ ID NO: 1955916 - RNA, 18 nt, Human
uaaaauguacauguauua

SEQ ID NO: 1955917 - RNA, 22 nt, Human
uaaaauguacauguauuaaauu

SEQ ID NO: 1955918 - RNA, 14 nt, Human
uaaaauguacaugu

SEQ ID NO: 1955919 - RNA, 21 nt, Human
uaaaauguccaguaagaucac

SEQ ID NO: 1955920 - RNA, 22 nt, Human
uaaaauguccaguaagaucacu

SEQ ID NO: 1955921 - RNA, 19 nt, Human
uaaaauguccaguaagauc

SEQ ID NO: 1955922 - RNA, 20 nt, Human
uaaaauguccaguaagauca

SEQ ID NO: 1955923 - RNA, 20 nt, Human
aaguuugagaucagccuggg

SEQ ID NO: 1955924 - RNA, 12 nt, Human
aaguuugauaaa

SEQ ID NO: 1955925 - RNA, 17 nt, Human
aaguuugauaaauagug

SEQ ID NO: 1955926 - RNA, 20 nt, Human
aaguuugauaaauaguguua

SEQ ID NO: 1955927 - RNA, 21 nt, Human
aaguuugauaaauaguguuau

SEQ ID NO: 1955928 - RNA, 12 nt, Human
aaguuugaucuu

SEQ ID NO: 1955929 - RNA, 15 nt, Human
aaguuugaucuuccu

SEQ ID NO: 1955930 - RNA, 18 nt, Human
aaguuugaucuuccucug

SEQ ID NO: 1955931 - RNA, 9 nt, Human
uaaaauggu

SEQ ID NO: 1955932 - RNA, 23 nt, Human
aaguuugaucuuccucugcuaaa

SEQ ID NO: 1955933 - RNA, 13 nt, Human
uaaaauguaaaaa

SEQ ID NO: 1955934 - RNA, 21 nt, Human
aaguuucugccgcagcccugc

SEQ ID NO: 1955935 - RNA, 19 nt, Human
aaguuucugccgcagcccu

SEQ ID NO: 1955936 - RNA, 22 nt, Human
aaguuucuuugaaaauaguuau

SEQ ID NO: 1955937 - RNA, 19 nt, Human
aaguuauuuuuaauuuggu

SEQ ID NO: 1955938 - RNA, 15 nt, Human
aaguuauuucccuuu

SEQ ID NO: 1955939 - RNA, 14 nt, Human
aaguucccuacuuc

SEQ ID NO: 1955940 - RNA, 17 nt, Human
aaguucccuacuuccug

SEQ ID NO: 1955941 - RNA, 20 nt, Human
aaguucccuacuuccuguga

SEQ ID NO: 1955942 - RNA, 18 nt, Human
aaguaacuggugauauau

SEQ ID NO: 1955943 - RNA, 23 nt, Human
aagguuucagaaagaagugggga

SEQ ID NO: 1955944 - RNA, 21 nt, Human
aagguauuaagauuauaauug

SEQ ID NO: 1955945 - RNA, 22 nt, Human
aagguauuaagauuauaauugu

SEQ ID NO: 1955946 - RNA, 16 nt, Human
aagguauaucauucua

SEQ ID NO: 1955947 - RNA, 22 nt, Human
aagguauaucauucuaaagaua

SEQ ID NO: 1955948 - RNA, 23 nt, Human
aagguauaucauucuaaagauag

SEQ ID NO: 1955949 - RNA, 21 nt, Human
aagggguaggauuacuaggug

SEQ ID NO: 1955950 - RNA, 20 nt, Human
aagguagaaugaccuuguaa

SEQ ID NO: 1955951 - RNA, 15 nt, Human
aaggggguagggaaa

SEQ ID NO: 1955952 - RNA, 14 nt, Human
aagguagaauguuu

SEQ ID NO: 1955953 - RNA, 13 nt, Human
aagguagaauguu

SEQ ID NO: 1955954 - RNA, 22 nt, Human
aagguagaaugaccuuguaaug

SEQ ID NO: 1955955 - RNA, 22 nt, Human
aagguaggguaggcagccugag

SEQ ID NO: 1955956 - RNA, 15 nt, Human
aagguaguucaagaa

SEQ ID NO: 1955957 - RNA, 22 nt, Human
aagguaguucaagaaaugaaga

SEQ ID NO: 1955958 - RNA, 23 nt, Human
aagggggcugggacaugggaaag

SEQ ID NO: 1955959 - RNA, 12 nt, Human
aagggggcuggg

SEQ ID NO: 1955960 - RNA, 13 nt, Human
aaggggagaguaa

SEQ ID NO: 1955961 - RNA, 14 nt, Human
aaggcuuauaaaac

SEQ ID NO: 1955962 - RNA, 15 nt, Human
aaggcuuauaaaaca

SEQ ID NO: 1955963 - RNA, 17 nt, Human
aaggggacugccaccuc

SEQ ID NO: 1955964 - RNA, 19 nt, Human
aaggggacugccaccuccc

SEQ ID NO: 1955965 - RNA, 20 nt, Human
aaggggacaaguagccaccu

SEQ ID NO: 1955966 - RNA, 20 nt, Human
aaggcugucaauuacaggaa

SEQ ID NO: 1955967 - RNA, 12 nt, Human
aaggcuguauuc

SEQ ID NO: 1955968 - RNA, 16 nt, Human
aaggcuguauucagca

SEQ ID NO: 1955969 - RNA, 17 nt, Human
aaggcuguauucagcaa

SEQ ID NO: 1955970 - RNA, 18 nt, Human
aaggcugucucagauaaa

SEQ ID NO: 1955971 - RNA, 22 nt, Human
aaggcugggggaagaagcucuc

SEQ ID NO: 1955972 - RNA, 19 nt, Human
aaggcugggggaagaagcu

SEQ ID NO: 1955973 - RNA, 11 nt, Human
guuucagaaau

SEQ ID NO: 1955974 - RNA, 13 nt, Human
guuucagaaaugu

SEQ ID NO: 1955975 - RNA, 14 nt, Human
aaggcugggggaag

SEQ ID NO: 1955976 - RNA, 16 nt, Human
aaggcugggggaagaa

SEQ ID NO: 1955977 - RNA, 23 nt, Human
guuguuugauucagacagcugcc

SEQ ID NO: 1955978 - RNA, 13 nt, Human
guuguuuguaugu

SEQ ID NO: 1955979 - RNA, 13 nt, Human
aaggaaaaauuca

SEQ ID NO: 1955980 - RNA, 22 nt, Human
aaggaaacccagcucuggucca

SEQ ID NO: 1955981 - RNA, 17 nt, Human
aaggaaacccagcucug

SEQ ID NO: 1955982 - RNA, 21 nt, Human
guuuaagugacugauggcuaa

SEQ ID NO: 1955983 - RNA, 22 nt, Human
guuuaauaaagcgaaaaacuca

SEQ ID NO: 1955984 - RNA, 15 nt, Human
guuguuuuguacaga

SEQ ID NO: 1955985 - RNA, 17 nt, Human
guuguuuuguacagaug

SEQ ID NO: 1955986 - RNA, 14 nt, Human
guuguuuuuguaua

SEQ ID NO: 1955987 - RNA, 21 nt, Human
guuguuuuuguauauugguuu

SEQ ID NO: 1955988 - RNA, 17 nt, Human
guuguuuguauguauaa

SEQ ID NO: 1955989 - RNA, 14 nt, Human
guuuaugauuccac

SEQ ID NO: 1955990 - RNA, 19 nt, Human
guuuauguaaacaaaucuu

SEQ ID NO: 1955991 - RNA, 20 nt, Human
guuuauguaaacaaaucuuu

SEQ ID NO: 1955992 - RNA, 17 nt, Human
guuucaaacuuuacuau

SEQ ID NO: 1955993 - RNA, 18 nt, Human
guuuauucuugaugaaaa

SEQ ID NO: 1955994 - RNA, 16 nt, Human
guuuauucuugaugaa

SEQ ID NO: 1955995 - RNA, 17 nt, Human
guuuauucuugaugaaa

SEQ ID NO: 1955996 - RNA, 14 nt, Human
guuuauucaaacug

SEQ ID NO: 1955997 - RNA, 19 nt, Human
guuuauucaaacugaaaag

SEQ ID NO: 1955998 - RNA, 20 nt, Human
guuuauuccagagcugccag

SEQ ID NO: 1955999 - RNA, 15 nt, Human
guuuauuccagagcu

SEQ ID NO: 1956000 - RNA, 12 nt, Human
guuucaauaaag

SEQ ID NO: 1956001 - RNA, 14 nt, Human
guuucaauaaaguu

SEQ ID NO: 1956002 - RNA, 16 nt, Human
guuucaauaaaguuug

SEQ ID NO: 1956003 - RNA, 17 nt, Human
guuucaauaaaguuuga

SEQ ID NO: 1956004 - RNA, 18 nt, Human
guuucaauaaaguuugau

SEQ ID NO: 1956005 - RNA, 22 nt, Human
guuucaccauguuggccaggcu

SEQ ID NO: 1956006 - RNA, 15 nt, Human
guuuuaaagcuucca

SEQ ID NO: 1956007 - RNA, 19 nt, Human
guuuggacaaaauggaaua

SEQ ID NO: 1956008 - RNA, 20 nt, Human
guuugcuuuguaugcacuuu

SEQ ID NO: 1956009 - RNA, 13 nt, Human
guuuggagacaga

SEQ ID NO: 1956010 - RNA, 21 nt, Human
aaguaauaugcacacauuuuu

SEQ ID NO: 1956011 - RNA, 23 nt, Human
guuugcuccccuuccccuuccuu

SEQ ID NO: 1956012 - RNA, 20 nt, Human
guuugcugaacauuggagaa

SEQ ID NO: 1956013 - RNA, 14 nt, Human
guuugcuguugcug

SEQ ID NO: 1956014 - RNA, 17 nt, Human
aaguaauaugcacacau

SEQ ID NO: 1956015 - RNA, 18 nt, Human
aaguaauaugcacacauu

SEQ ID NO: 1956016 - RNA, 20 nt, Human
aaguaauaugcacacauuuu

SEQ ID NO: 1956017 - RNA, 14 nt, Human
guuuucuguucuuu

SEQ ID NO: 1956018 - RNA, 18 nt, Human
guuuuauuuauauuuauu

SEQ ID NO: 1956019 - RNA, 22 nt, Human
guuuuauuuauauuuauugacu

SEQ ID NO: 1956020 - RNA, 21 nt, Human
guuuuauuuucuaaaguacug

SEQ ID NO: 1956021 - RNA, 15 nt, Human
guuuucuguucuuuc

SEQ ID NO: 1956022 - RNA, 16 nt, Human
guuuucuguucuuucu

SEQ ID NO: 1956023 - RNA, 19 nt, Human
guuuucuguucuuucuggc

SEQ ID NO: 1956024 - RNA, 20 nt, Human
guuuuauuuucuaaaguacu

SEQ ID NO: 1956025 - RNA, 12 nt, Human
guuuugagcccu

SEQ ID NO: 1956026 - RNA, 21 nt, Human
guuuuaucguccagugacuuu

SEQ ID NO: 1956027 - RNA, 12 nt, Human
guuuuauuuaua

SEQ ID NO: 1956028 - RNA, 14 nt, Human
guuuuauuuauauu

SEQ ID NO: 1956029 - RNA, 17 nt, Human
guuuuauuuauauuuau

SEQ ID NO: 1956030 - RNA, 17 nt, Human
guuuuaacaagaagcaa

SEQ ID NO: 1956031 - RNA, 22 nt, Human
guuuuaaggaugcuuguacaua

SEQ ID NO: 1956032 - RNA, 13 nt, Human
aaguacuauguau

SEQ ID NO: 1956033 - RNA, 17 nt, Human
aaguacuauaauuuacc

SEQ ID NO: 1956034 - RNA, 14 nt, Human
aaguacuauaauuu

SEQ ID NO: 1956035 - RNA, 15 nt, Human
aaguaauuguuccag

SEQ ID NO: 1956036 - RNA, 15 nt, Human
aaguauuauaccuuu

SEQ ID NO: 1956037 - RNA, 20 nt, Human
aaguauuauaaacaagaaug

SEQ ID NO: 1956038 - RNA, 18 nt, Human
aaguacuucuccacccug

SEQ ID NO: 1956039 - RNA, 19 nt, Human
aaguacuucuccacccugc

SEQ ID NO: 1956040 - RNA, 20 nt, Human
aaguacuucuccacccugcu

SEQ ID NO: 1956041 - RNA, 18 nt, Human
aaguauugccaaacauua

SEQ ID NO: 1956042 - RNA, 17 nt, Human
aaguauuguacaaauaa

SEQ ID NO: 1956043 - RNA, 13 nt, Human
aaguauuuaagcc

SEQ ID NO: 1956044 - RNA, 19 nt, Human
aaguauuuaagccuaaaga

SEQ ID NO: 1956045 - RNA, 15 nt, Human
aaguauuuuccuguu

SEQ ID NO: 1956046 - RNA, 23 nt, Human
aaguauucuuauuuaaugaaaga

SEQ ID NO: 1956047 - RNA, 13 nt, Human
aaguauugccaaa

SEQ ID NO: 1956048 - RNA, 17 nt, Human
aaguauugccaaacauu

SEQ ID NO: 1956049 - RNA, 16 nt, Human
aaguauuauaccuuuu

SEQ ID NO: 1956050 - RNA, 19 nt, Human
aaguauuauaccuuuuuua

SEQ ID NO: 1956051 - RNA, 21 nt, Human
aaguauucuuauuuaaugaaa

SEQ ID NO: 1956052 - RNA, 21 nt, Human
aagucacuggccaguggcugg

SEQ ID NO: 1956053 - RNA, 22 nt, Human
aagucacugcacagugcaucuc

SEQ ID NO: 1956054 - RNA, 19 nt, Human
aagucaaacacuugugacu

SEQ ID NO: 1956055 - RNA, 20 nt, Human
aagucaaacacuugugacuu

SEQ ID NO: 1956056 - RNA, 16 nt, Human
aagucaaacacuugug

SEQ ID NO: 1956057 - RNA, 20 nt, Human
aagucagaaacuaaaacaaa

SEQ ID NO: 1956058 - RNA, 22 nt, Human
guucccuuuuuuggcugcugaa

SEQ ID NO: 1956059 - RNA, 21 nt, Human
guucccuuuuuuggcugcuga

SEQ ID NO: 1956060 - RNA, 21 nt, Human
guuccgaaaccaaagaagaaa

SEQ ID NO: 1956061 - RNA, 21 nt, Human
aagcuuuuaugugaaacaugu

SEQ ID NO: 1956062 - RNA, 19 nt, Human
aagcuuuuaugugaaacau

SEQ ID NO: 1956063 - RNA, 14 nt, Human
aagcuuuuccuaau

SEQ ID NO: 1956064 - RNA, 18 nt, Human
guucccccuguuucagag

SEQ ID NO: 1956065 - RNA, 15 nt, Human
guuccccaagacauu

SEQ ID NO: 1956066 - RNA, 19 nt, Human
aagcuguuugguuuuaaaa

SEQ ID NO: 1956067 - RNA, 20 nt, Human
aagcuguuugguuuuaaaau

SEQ ID NO: 1956068 - RNA, 21 nt, Human
aagcuguuugguuuuaaaaua

SEQ ID NO: 1956069 - RNA, 17 nt, Human
aagcuucccucccugcu

SEQ ID NO: 1956070 - RNA, 14 nt, Human
aagcuauaaauuau

SEQ ID NO: 1956071 - RNA, 16 nt, Human
aagcucacuugcuuua

SEQ ID NO: 1956072 - RNA, 17 nt, Human
aagcucugcuccucucc

SEQ ID NO: 1956073 - RNA, 22 nt, Human
guugacucuaguacugugaauc

SEQ ID NO: 1956074 - RNA, 19 nt, Human
guugauagcacagacccug

SEQ ID NO: 1956075 - RNA, 14 nt, Human
guugauagcacaga

SEQ ID NO: 1956076 - RNA, 15 nt, Human
guucuugguuuguaa

SEQ ID NO: 1956077 - RNA, 18 nt, Human
guucuugguuuguaaauu

SEQ ID NO: 1956078 - RNA, 12 nt, Human
guugacauuugu

SEQ ID NO: 1956079 - RNA, 21 nt, Human
guucuuggcaauaaauuuuga

SEQ ID NO: 1956080 - RNA, 22 nt, Human
guucuuggcaauaaauuuugaa

SEQ ID NO: 1956081 - RNA, 23 nt, Human
guucuuggcaauaaauuuugaaa

SEQ ID NO: 1956082 - RNA, 19 nt, Human
guugacucuaguacuguga

SEQ ID NO: 1956083 - RNA, 21 nt, Human
guugacucuaguacugugaau

SEQ ID NO: 1956084 - RNA, 20 nt, Human
guucuuggcaauaaauuuug

SEQ ID NO: 1956085 - RNA, 14 nt, Human
guucuugguuugua

SEQ ID NO: 1956086 - RNA, 14 nt, Human
guucuuaauucuua

SEQ ID NO: 1956087 - RNA, 17 nt, Human
guucuuaauucuuagcu

SEQ ID NO: 1956088 - RNA, 14 nt, Human
guucuuccaaagca

SEQ ID NO: 1956089 - RNA, 15 nt, Human
guucuuccaaagcag

SEQ ID NO: 1956090 - RNA, 19 nt, Human
guucuuccaguuacuuucc

SEQ ID NO: 1956091 - RNA, 18 nt, Human
guucucugcccuccaaga

SEQ ID NO: 1956092 - RNA, 17 nt, Human
guucucugcccuccaag

SEQ ID NO: 1956093 - RNA, 13 nt, Human
guucuuaauucuu

SEQ ID NO: 1956094 - RNA, 15 nt, Human
guucucucuucucca

SEQ ID NO: 1956095 - RNA, 12 nt, Human
guucucugagga

SEQ ID NO: 1956096 - RNA, 15 nt, Human
guucucugcccucca

SEQ ID NO: 1956097 - RNA, 14 nt, Human
guucucugaggaca

SEQ ID NO: 1956098 - RNA, 13 nt, Human
guucucugcccuc

SEQ ID NO: 1956099 - RNA, 19 nt, Human
guucuagcauggcugccaa

SEQ ID NO: 1956100 - RNA, 20 nt, Human
guuccgaaaccaaagaagaa

SEQ ID NO: 1956101 - RNA, 21 nt, Human
guucucucuacugguccucuu

SEQ ID NO: 1956102 - RNA, 13 nt, Human
guucucuccuucu

SEQ ID NO: 1956103 - RNA, 17 nt, Human
guucagguaacaggcag

SEQ ID NO: 1956104 - RNA, 18 nt, Human
guucagguaacaggcaga

SEQ ID NO: 1956105 - RNA, 15 nt, Human
aagccguggcuuccc

SEQ ID NO: 1956106 - RNA, 13 nt, Human
aagccguggcuuc

SEQ ID NO: 1956107 - RNA, 14 nt, Human
aagccguggcuucc

SEQ ID NO: 1956108 - RNA, 21 nt, Human
aagccgugauuuucauugcug

SEQ ID NO: 1956109 - RNA, 20 nt, Human
guucaggguuggccccugcc

SEQ ID NO: 1956110 - RNA, 19 nt, Human
guucagggaagauaaguug

SEQ ID NO: 1956111 - RNA, 23 nt, Human
guucagggaagauaaguuggaaa

SEQ ID NO: 1956112 - RNA, 21 nt, Human
guucaggguuggccccugccc

SEQ ID NO: 1956113 - RNA, 22 nt, Human
guucaggguuggccccugcccg

SEQ ID NO: 1956114 - RNA, 12 nt, Human
guucagcuuggg

SEQ ID NO: 1956115 - RNA, 23 nt, Human
guucagcuuguaaauagcucagg

SEQ ID NO: 1956116 - RNA, 18 nt, Human
guuauuuugauguaaaga

SEQ ID NO: 1956117 - RNA, 17 nt, Human
aagccuuaagcugcagg

SEQ ID NO: 1956118 - RNA, 14 nt, Human
aagccuuagggaag

SEQ ID NO: 1956119 - RNA, 15 nt, Human
aagcuagucaacagu

SEQ ID NO: 1956120 - RNA, 17 nt, Human
aagcuagucaacaguac

SEQ ID NO: 1956121 - RNA, 13 nt, Human
aagcuaguugaau

SEQ ID NO: 1956122 - RNA, 15 nt, Human
aagcuaguugaauac

SEQ ID NO: 1956123 - RNA, 17 nt, Human
aagcuaguugaauacuu

SEQ ID NO: 1956124 - RNA, 19 nt, Human
aagcuaguugaauacuuga

SEQ ID NO: 1956125 - RNA, 20 nt, Human
aagcuaguugaauacuugaa

SEQ ID NO: 1956126 - RNA, 21 nt, Human
aagcuaguugaauacuugaac

SEQ ID NO: 1956127 - RNA, 18 nt, Human
aagccuguuuaagagaca

SEQ ID NO: 1956128 - RNA, 15 nt, Human
aagccuguuuaagag

SEQ ID NO: 1956129 - RNA, 18 nt, Human
aagccuggucagcccaaa

SEQ ID NO: 1956130 - RNA, 15 nt, Human
aagccuccuccagcc

SEQ ID NO: 1956131 - RNA, 16 nt, Human
aagccucccacgacug

SEQ ID NO: 1956132 - RNA, 18 nt, Human
guuaaucauuagguguga

SEQ ID NO: 1956133 - RNA, 19 nt, Human
guuaauauuuauaggucac

SEQ ID NO: 1956134 - RNA, 23 nt, Human
guuaauuuaaguuuugacaagcu

SEQ ID NO: 1956135 - RNA, 13 nt, Human
guuaauuuaaguu

SEQ ID NO: 1956136 - RNA, 19 nt, Human
guuaauuuaaguuuugaca

SEQ ID NO: 1956137 - RNA, 12 nt, Human
guuaauuuaagu

SEQ ID NO: 1956138 - RNA, 17 nt, Human
guuaauugauagaauaa

SEQ ID NO: 1956139 - RNA, 23 nt, Human
guuacucuucaguuaagccuuug

SEQ ID NO: 1956140 - RNA, 15 nt, Human
guuacucuugggaca

SEQ ID NO: 1956141 - RNA, 12 nt, Human
guuaauuuggac

SEQ ID NO: 1956142 - RNA, 17 nt, Human
guuaauuuggaccauuu

SEQ ID NO: 1956143 - RNA, 20 nt, Human
guuaauuuggaccauuuucc

SEQ ID NO: 1956144 - RNA, 22 nt, Human
guuaauuuggaccauuuuccug

SEQ ID NO: 1956145 - RNA, 12 nt, Human
aagcccaaccuc

SEQ ID NO: 1956146 - RNA, 14 nt, Human
guuaauauggcuga

SEQ ID NO: 1956147 - RNA, 13 nt, Human
aagcccagcuuga

SEQ ID NO: 1956148 - RNA, 20 nt, Human
guuauuauauuuacaaaugg

SEQ ID NO: 1956149 - RNA, 22 nt, Human
guuauugguguaagguacuuuc

SEQ ID NO: 1956150 - RNA, 14 nt, Human
guuacuguaaaaug

SEQ ID NO: 1956151 - RNA, 17 nt, Human
guuacuguaaaaugcaa

SEQ ID NO: 1956152 - RNA, 19 nt, Human
guuacuguaaaaugcaaaa

SEQ ID NO: 1956153 - RNA, 12 nt, Human
guuagacugcca

SEQ ID NO: 1956154 - RNA, 14 nt, Human
guuagacugccagc

SEQ ID NO: 1956155 - RNA, 15 nt, Human
guuagacugccagcu

SEQ ID NO: 1956156 - RNA, 22 nt, Human
guuagacugccagcucuuccua

SEQ ID NO: 1956157 - RNA, 19 nt, Human
guuagagguucccuuugac

SEQ ID NO: 1956158 - RNA, 17 nt, Human
guuagacugccagcucu

SEQ ID NO: 1956159 - RNA, 19 nt, Human
guuauuauauuuacaaaug

SEQ ID NO: 1956160 - RNA, 12 nt, Human
aagcaugugaga

SEQ ID NO: 1956161 - RNA, 23 nt, Human
aagcaugcacaaauucugucucu

SEQ ID NO: 1956162 - RNA, 12 nt, Human
aagcaugaacag

SEQ ID NO: 1956163 - RNA, 20 nt, Human
aagcaugaacagugcaccug

SEQ ID NO: 1956164 - RNA, 18 nt, Human
aagcaugacagaaaauau

SEQ ID NO: 1956165 - RNA, 19 nt, Human
aagcaugacagaaaauaug

SEQ ID NO: 1956166 - RNA, 20 nt, Human
aagcaugacagaaaauaugu

SEQ ID NO: 1956167 - RNA, 22 nt, Human
aagcaugacagaaaauauguau

SEQ ID NO: 1956168 - RNA, 16 nt, Human
aagcaugccaauuucu

SEQ ID NO: 1956169 - RNA, 19 nt, Human
aagcaugccaauuucucuu

SEQ ID NO: 1956170 - RNA, 14 nt, Human
aagcauauaaaaug

SEQ ID NO: 1956171 - RNA, 15 nt, Human
aagcauauaaaaugg

SEQ ID NO: 1956172 - RNA, 16 nt, Human
aagcauauaaaauggc

SEQ ID NO: 1956173 - RNA, 17 nt, Human
aagcauauaaaauggca

SEQ ID NO: 1956174 - RNA, 22 nt, Human
aagcauauaaaauggcaacaaa

SEQ ID NO: 1956175 - RNA, 13 nt, Human
aagcauuuuguaa

SEQ ID NO: 1956176 - RNA, 12 nt, Human
aagcauuuugua

SEQ ID NO: 1956177 - RNA, 20 nt, Human
aagcauuugguuuuucacau

SEQ ID NO: 1956178 - RNA, 13 nt, Human
aagcauguuuugc

SEQ ID NO: 1956179 - RNA, 14 nt, Human
aagcauguuuugca

SEQ ID NO: 1956180 - RNA, 15 nt, Human
aagcauguuuugcau

SEQ ID NO: 1956181 - RNA, 17 nt, Human
aagcauguuuugcaugu

SEQ ID NO: 1956182 - RNA, 13 nt, Human
aagcauuuaaagg

SEQ ID NO: 1956183 - RNA, 17 nt, Human
aagccaaagcuaggccu

SEQ ID NO: 1956184 - RNA, 18 nt, Human
aagccaaagcuaggccug

SEQ ID NO: 1956185 - RNA, 20 nt, Human
aagccaaagcuaggccuggc

SEQ ID NO: 1956186 - RNA, 20 nt, Human
aagcacaugccucucucagg

SEQ ID NO: 1956187 - RNA, 19 nt, Human
aagcacaugccucucucag

SEQ ID NO: 1956188 - RNA, 16 nt, Human
aagcacaugccucucu

SEQ ID NO: 1956189 - RNA, 15 nt, Human
aagcacaugccucuc

SEQ ID NO: 1956190 - RNA, 23 nt, Human
aagcacaccaaucuuacuuugua

SEQ ID NO: 1956191 - RNA, 13 nt, Human
aagcacagucagg

SEQ ID NO: 1956192 - RNA, 14 nt, Human
aagcacaugccucu

SEQ ID NO: 1956193 - RNA, 12 nt, Human
guguuugaagca

SEQ ID NO: 1956194 - RNA, 19 nt, Human
guguuugcuccccuucccc

SEQ ID NO: 1956195 - RNA, 13 nt, Human
aagcacaaaggaa

SEQ ID NO: 1956196 - RNA, 19 nt, Human
aagcacacucauccccuca

SEQ ID NO: 1956197 - RNA, 18 nt, Human
aagcacaccaaucuuacu

SEQ ID NO: 1956198 - RNA, 19 nt, Human
aagcacaccaaucuuacuu

SEQ ID NO: 1956199 - RNA, 22 nt, Human
aagcacaccaaucuuacuuugu

SEQ ID NO: 1956200 - RNA, 16 nt, Human
aagcacacuugacauc

SEQ ID NO: 1956201 - RNA, 12 nt, Human
guguuucugggg

SEQ ID NO: 1956202 - RNA, 21 nt, Human
aagcacaugccucucucaggc

SEQ ID NO: 1956203 - RNA, 16 nt, Human
aagcaccaaaauaaga

SEQ ID NO: 1956204 - RNA, 17 nt, Human
aagcaccaaaauaagaa

SEQ ID NO: 1956205 - RNA, 19 nt, Human
aagcaccaaaauaagaaaa

SEQ ID NO: 1956206 - RNA, 21 nt, Human
aagcaccaaaauaagaaaaga

SEQ ID NO: 1956207 - RNA, 22 nt, Human
aagcaccaaaauaagaaaagau

SEQ ID NO: 1956208 - RNA, 15 nt, Human
aagcaccauccccuc

SEQ ID NO: 1956209 - RNA, 16 nt, Human
aagcaccauccccucc

SEQ ID NO: 1956210 - RNA, 13 nt, Human
aagcaccuccugc

SEQ ID NO: 1956211 - RNA, 14 nt, Human
aagcaccuccugcc

SEQ ID NO: 1956212 - RNA, 15 nt, Human
aagcaccuccugccu

SEQ ID NO: 1956213 - RNA, 16 nt, Human
aagcaccuccugccuc

SEQ ID NO: 1956214 - RNA, 17 nt, Human
aagcaccuccugccucg

SEQ ID NO: 1956215 - RNA, 16 nt, Human
aagcacuaaacaaaga

SEQ ID NO: 1956216 - RNA, 16 nt, Human
aagaggugugcaagag

SEQ ID NO: 1956217 - RNA, 18 nt, Human
aagaggugugcaagagag

SEQ ID NO: 1956218 - RNA, 17 nt, Human
aagaggugggagggccc

SEQ ID NO: 1956219 - RNA, 15 nt, Human
aagaggugggagggc

SEQ ID NO: 1956220 - RNA, 16 nt, Human
aagaggugggagggcc

SEQ ID NO: 1956221 - RNA, 17 nt, Human
aagauagcuucacccca

SEQ ID NO: 1956222 - RNA, 11 nt, Human
aagaggcaggg

SEQ ID NO: 1956223 - RNA, 18 nt, Human
guguaagaaauacagacu

SEQ ID NO: 1956224 - RNA, 14 nt, Human
aagaggcagggucu

SEQ ID NO: 1956225 - RNA, 19 nt, Human
aagaggcaguugcccagcc

SEQ ID NO: 1956226 - RNA, 22 nt, Human
aagaggcaguugcccagccucu

SEQ ID NO: 1956227 - RNA, 22 nt, Human
aagagggagggagggcuccaga

SEQ ID NO: 1956228 - RNA, 21 nt, Human
aagagggagggagggcuccag

SEQ ID NO: 1956229 - RNA, 15 nt, Human
gugcugcuaauucuu

SEQ ID NO: 1956230 - RNA, 17 nt, Human
gugcugcuaauucuuug

SEQ ID NO: 1956231 - RNA, 18 nt, Human
gugcugcuaauucuuugc

SEQ ID NO: 1956232 - RNA, 19 nt, Human
gugcugcuaauucuuugca

SEQ ID NO: 1956233 - RNA, 23 nt, Human
gugcugcccugcccaccuggccu

SEQ ID NO: 1956234 - RNA, 18 nt, Human
gugguugaauaugauuaa

SEQ ID NO: 1956235 - RNA, 16 nt, Human
gugguugaauaugauu

SEQ ID NO: 1956236 - RNA, 15 nt, Human
gugguuucagaaaug

SEQ ID NO: 1956237 - RNA, 22 nt, Human
gugguucacucuuggagccugc

SEQ ID NO: 1956238 - RNA, 23 nt, Human
gugguucacucuuggagccugca

SEQ ID NO: 1956239 - RNA, 20 nt, Human
aagaucaaaagguuaauaaa

SEQ ID NO: 1956240 - RNA, 23 nt, Human
aagaucaaaagguuaauaaagua

SEQ ID NO: 1956241 - RNA, 21 nt, Human
aagaucaaaaaggcuuauaaa

SEQ ID NO: 1956242 - RNA, 23 nt, Human
aagaucaaaaaggcuuauaaaac

SEQ ID NO: 1956243 - RNA, 16 nt, Human
aagauggcugugccuc

SEQ ID NO: 1956244 - RNA, 13 nt, Human
guguauguggggg

SEQ ID NO: 1956245 - RNA, 21 nt, Human
guguaugugggggucugugug

SEQ ID NO: 1956246 - RNA, 17 nt, Human
aagcaacccaaauguuc

SEQ ID NO: 1956247 - RNA, 22 nt, Human
aagcaacaauuuucagauuugc

SEQ ID NO: 1956248 - RNA, 15 nt, Human
aagcaaccaaaaaga

SEQ ID NO: 1956249 - RNA, 12 nt, Human
aagcaacaauuu

SEQ ID NO: 1956250 - RNA, 13 nt, Human
aagcaacaauuuu

SEQ ID NO: 1956251 - RNA, 17 nt, Human
aagcaacaauuuucaga

SEQ ID NO: 1956252 - RNA, 18 nt, Human
aagcaacaauuuucagau

SEQ ID NO: 1956253 - RNA, 20 nt, Human
aagcaacaauuuucagauuu

SEQ ID NO: 1956254 - RNA, 12 nt, Human
aagcaaaaggca

SEQ ID NO: 1956255 - RNA, 20 nt, Human
aagcaaaugugaaucauuuu

SEQ ID NO: 1956256 - RNA, 14 nt, Human
gugucaccugaaga

SEQ ID NO: 1956257 - RNA, 15 nt, Human
guguauguuuuucag

SEQ ID NO: 1956258 - RNA, 16 nt, Human
guguauguuuuucagu

SEQ ID NO: 1956259 - RNA, 21 nt, Human
guguauguuuuucaguucaaa

SEQ ID NO: 1956260 - RNA, 13 nt, Human
guguauguuuuuc

SEQ ID NO: 1956261 - RNA, 19 nt, Human
aagcaaccauauagaaagc

SEQ ID NO: 1956262 - RNA, 22 nt, Human
gugucaccugaagacucauucu

SEQ ID NO: 1956263 - RNA, 14 nt, Human
gugucagguggggc

SEQ ID NO: 1956264 - RNA, 18 nt, Human
gugucagguggggcagcu

SEQ ID NO: 1956265 - RNA, 23 nt, Human
gugugaaccaccacacccagccc

SEQ ID NO: 1956266 - RNA, 15 nt, Human
gugugaacuuggaag

SEQ ID NO: 1956267 - RNA, 17 nt, Human
gugugaacuuggaagca

SEQ ID NO: 1956268 - RNA, 19 nt, Human
gugucagguggggcagcuu

SEQ ID NO: 1956269 - RNA, 22 nt, Human
caaagccaaagcuaggccuggc

SEQ ID NO: 1956270 - RNA, 21 nt, Human
caaagccaccaacagccacuc

SEQ ID NO: 1956271 - RNA, 18 nt, Human
caaagcccuuccaugucg

SEQ ID NO: 1956272 - RNA, 14 nt, Human
caaagcgaauuuua

SEQ ID NO: 1956273 - RNA, 19 nt, Human
caaagcgaauuuuaaaaga

SEQ ID NO: 1956274 - RNA, 18 nt, Human
caaagccuccuccagccg

SEQ ID NO: 1956275 - RNA, 17 nt, Human
caaagccuccuccagcc

SEQ ID NO: 1956276 - RNA, 17 nt, Human
caaacugguuauuuaaa

SEQ ID NO: 1956277 - RNA, 16 nt, Human
caaacugguuauuuaa

SEQ ID NO: 1956278 - RNA, 17 nt, Human
caaacucaccugccccu

SEQ ID NO: 1956279 - RNA, 23 nt, Human
caaaggcacauggaauauauuuu

SEQ ID NO: 1956280 - RNA, 14 nt, Human
caaaggaagcacau

SEQ ID NO: 1956281 - RNA, 23 nt, Human
caaaggccuaauucuaugccugu

SEQ ID NO: 1956282 - RNA, 16 nt, Human
caaaggguaucaggug

SEQ ID NO: 1956283 - RNA, 18 nt, Human
caaaggguaucaggugcu

SEQ ID NO: 1956284 - RNA, 13 nt, Human
caaaggaagcaca

SEQ ID NO: 1956285 - RNA, 12 nt, Human
caaaggaagcac

SEQ ID NO: 1956286 - RNA, 13 nt, Human
caaagcuaggccu

SEQ ID NO: 1956287 - RNA, 14 nt, Human
caaagcuaggccug

SEQ ID NO: 1956288 - RNA, 19 nt, Human
caaagcuaggccuggccag

SEQ ID NO: 1956289 - RNA, 20 nt, Human
caaagcgaauuuuaaaagau

SEQ ID NO: 1956290 - RNA, 13 nt, Human
caaaccuaaguug

SEQ ID NO: 1956291 - RNA, 15 nt, Human
caaaccuaauugcac

SEQ ID NO: 1956292 - RNA, 20 nt, Human
caaacccuucagugccaaaa

SEQ ID NO: 1956293 - RNA, 14 nt, Human
caaacccuucagug

SEQ ID NO: 1956294 - RNA, 15 nt, Human
caaacacacagaagg

SEQ ID NO: 1956295 - RNA, 12 nt, Human
caaacacaggca

SEQ ID NO: 1956296 - RNA, 15 nt, Human
caaacacauacagga

SEQ ID NO: 1956297 - RNA, 16 nt, Human
caaaauuguuacaaau

SEQ ID NO: 1956298 - RNA, 19 nt, Human
caaaauuaagguguuugaa

SEQ ID NO: 1956299 - RNA, 20 nt, Human
caaaauuaagguguuugaaa

SEQ ID NO: 1956300 - RNA, 16 nt, Human
caaaauuaagguguuu

SEQ ID NO: 1956301 - RNA, 12 nt, Human
caaaauaaaacu

SEQ ID NO: 1956302 - RNA, 14 nt, Human
caaaauaaaacuuu

SEQ ID NO: 1956303 - RNA, 20 nt, Human
caaaaugggagaucuucuca

SEQ ID NO: 1956304 - RNA, 11 nt, Human
caaaauguaac

SEQ ID NO: 1956305 - RNA, 12 nt, Human
caaaauguaacu

SEQ ID NO: 1956306 - RNA, 13 nt, Human
caaaauguaacug

SEQ ID NO: 1956307 - RNA, 14 nt, Human
caaaauguaacugu

SEQ ID NO: 1956308 - RNA, 15 nt, Human
caaaauguaggguua

SEQ ID NO: 1956309 - RNA, 12 nt, Human
caaaaugugagu

SEQ ID NO: 1956310 - RNA, 19 nt, Human
caaaaugugagugguugaa

SEQ ID NO: 1956311 - RNA, 21 nt, Human
caaaaugugagugguugaaua

SEQ ID NO: 1956312 - RNA, 15 nt, Human
caaaauguaacuguu

SEQ ID NO: 1956313 - RNA, 16 nt, Human
caaaauguaacuguua

SEQ ID NO: 1956314 - RNA, 18 nt, Human
caaaauguaacuguuacc

SEQ ID NO: 1956315 - RNA, 19 nt, Human
caaaauguaacuguuacca

SEQ ID NO: 1956316 - RNA, 13 nt, Human
caaaugguacaaa

SEQ ID NO: 1956317 - RNA, 15 nt, Human
caaaugguacaaaac

SEQ ID NO: 1956318 - RNA, 24 nt, Human
caaaugguacaaaaccacagugua

SEQ ID NO: 1956319 - RNA, 13 nt, Human
caaauauuaaaaa

SEQ ID NO: 1956320 - RNA, 19 nt, Human
caaauauuaaaaagucuuu

SEQ ID NO: 1956321 - RNA, 22 nt, Human
caaauauuaaaaagucuuuuaa

SEQ ID NO: 1956322 - RNA, 23 nt, Human
caaauauuaaaaagucuuuuaaa

SEQ ID NO: 1956323 - RNA, 18 nt, Human
caaauacugaaauauuag

SEQ ID NO: 1956324 - RNA, 21 nt, Human
caaauacgugggcauucaaau

SEQ ID NO: 1956325 - RNA, 22 nt, Human
caaauacgugggcauucaaaug

SEQ ID NO: 1956326 - RNA, 20 nt, Human
caaauacgugggcauucaaa

SEQ ID NO: 1956327 - RNA, 22 nt, Human
caaagggggaggagaagaaaau

SEQ ID NO: 1956328 - RNA, 23 nt, Human
caaagugcugggauuacaggugu

SEQ ID NO: 1956329 - RNA, 19 nt, Human
caaagugcugggauuacag

SEQ ID NO: 1956330 - RNA, 19 nt, Human
caaaggguaucaggugcug

SEQ ID NO: 1956331 - RNA, 21 nt, Human
caaauuguaagcaugcacaaa

SEQ ID NO: 1956332 - RNA, 15 nt, Human
caaauuguaauuaau

SEQ ID NO: 1956333 - RNA, 16 nt, Human
caaauuguaauuaaua

SEQ ID NO: 1956334 - RNA, 18 nt, Human
caaauuguaauuaauaau

SEQ ID NO: 1956335 - RNA, 20 nt, Human
caaauuguaauuaauaauag

SEQ ID NO: 1956336 - RNA, 21 nt, Human
caaauuguaauuaauaauaga

SEQ ID NO: 1956337 - RNA, 19 nt, Human
caaauugucaccugcuucu

SEQ ID NO: 1956338 - RNA, 12 nt, Human
caaauuucuaaa

SEQ ID NO: 1956339 - RNA, 14 nt, Human
caaauuucuaaauc

SEQ ID NO: 1956340 - RNA, 11 nt, Human
caaauuucuaa

SEQ ID NO: 1956341 - RNA, 20 nt, Human
caaauugucaccugcuucuc

SEQ ID NO: 1956342 - RNA, 21 nt, Human
caaauugucaccugcuucucu

SEQ ID NO: 1956343 - RNA, 12 nt, Human
caaauguaaagu

SEQ ID NO: 1956344 - RNA, 12 nt, Human
caaauguaacua

SEQ ID NO: 1956345 - RNA, 19 nt, Human
caaauguaacuauguuuua

SEQ ID NO: 1956346 - RNA, 22 nt, Human
caaauguaauguggcuucugga

SEQ ID NO: 1956347 - RNA, 15 nt, Human
caaaugucuauaaac

SEQ ID NO: 1956348 - RNA, 14 nt, Human
caaaugucuauaaa

SEQ ID NO: 1956349 - RNA, 19 nt, Human
caaauuaugcuaagaauuu

SEQ ID NO: 1956350 - RNA, 20 nt, Human
caaauuaugcuaagaauuuu

SEQ ID NO: 1956351 - RNA, 21 nt, Human
caaauuaugcuaagaauuuuu

SEQ ID NO: 1956352 - RNA, 18 nt, Human
caaauuauaauguauuca

SEQ ID NO: 1956353 - RNA, 20 nt, Human
caaauuauaauguauucaua

SEQ ID NO: 1956354 - RNA, 13 nt, Human
caaauuauaaugu

SEQ ID NO: 1956355 - RNA, 14 nt, Human
caaauuauaaugua

SEQ ID NO: 1956356 - RNA, 15 nt, Human
caaauuauaauguau

SEQ ID NO: 1956357 - RNA, 17 nt, Human
caaauuauaauguauuc

SEQ ID NO: 1956358 - RNA, 13 nt, Human
caaaaaggcuuau

SEQ ID NO: 1956359 - RNA, 14 nt, Human
caaaaagcuucugu

SEQ ID NO: 1956360 - RNA, 15 nt, Human
caaaaagcuucugug

SEQ ID NO: 1956361 - RNA, 21 nt, Human
caaaaaucugaagauuguuua

SEQ ID NO: 1956362 - RNA, 19 nt, Human
caaaaauguuaagcaucua

SEQ ID NO: 1956363 - RNA, 15 nt, Human
caaaaauccaaauau

SEQ ID NO: 1956364 - RNA, 20 nt, Human
caaaaauccaaauauuguua

SEQ ID NO: 1956365 - RNA, 15 nt, Human
caaaaaucugaagau

SEQ ID NO: 1956366 - RNA, 17 nt, Human
caaaaaucugaagauug

SEQ ID NO: 1956367 - RNA, 18 nt, Human
caaaaaucugaagauugu

SEQ ID NO: 1956368 - RNA, 20 nt, Human
caaaaaucugaagauuguuu

SEQ ID NO: 1956369 - RNA, 16 nt, Human
caaaaauucucaguuc

SEQ ID NO: 1956370 - RNA, 12 nt, Human
caaaacaaaggc

SEQ ID NO: 1956371 - RNA, 15 nt, Human
caaaacaaaggccua

SEQ ID NO: 1956372 - RNA, 16 nt, Human
caaaacaaaggccuaa

SEQ ID NO: 1956373 - RNA, 13 nt, Human
caaaacccagcug

SEQ ID NO: 1956374 - RNA, 14 nt, Human
caaaacccagcugc

SEQ ID NO: 1956375 - RNA, 15 nt, Human
caaaacccagcugca

SEQ ID NO: 1956376 - RNA, 18 nt, Human
caaaacccagcugcaccc

SEQ ID NO: 1956377 - RNA, 21 nt, Human
caaaacccagcugcaccccuu

SEQ ID NO: 1956378 - RNA, 20 nt, Human
caaaacaccugacagccccu

SEQ ID NO: 1956379 - RNA, 17 nt, Human
caaaaccaaaaguuauu

SEQ ID NO: 1956380 - RNA, 18 nt, Human
caaaaccaaaaguuauua

SEQ ID NO: 1956381 - RNA, 23 nt, Human
caaaaccaaaaguuauuaaaauu

SEQ ID NO: 1956382 - RNA, 22 nt, Human
caaaacaaaggccuaauucuau

SEQ ID NO: 1956383 - RNA, 23 nt, Human
caaaacuucagacauagaauuaa

SEQ ID NO: 1956384 - RNA, 17 nt, Human
caaaauaaaaaugaggu

SEQ ID NO: 1956385 - RNA, 12 nt, Human
caaaagaaaaac

SEQ ID NO: 1956386 - RNA, 21 nt, Human
caaaacucuccucugcugcug

SEQ ID NO: 1956387 - RNA, 20 nt, Human
caaaacucuccucugcugcu

SEQ ID NO: 1956388 - RNA, 22 nt, Human
caaaacucuccucugcugcugg

SEQ ID NO: 1956389 - RNA, 22 nt, Human
caaaacugccucaggaggcagg

SEQ ID NO: 1956390 - RNA, 15 nt, Human
caaaaacauguaugu

SEQ ID NO: 1956391 - RNA, 22 nt, Human
caaaaacauguaugugcauuuc

SEQ ID NO: 1956392 - RNA, 23 nt, Human
caaaaacauguaugugcauuuca

SEQ ID NO: 1956393 - RNA, 13 nt, Human
caaaaaggcagga

SEQ ID NO: 1956394 - RNA, 19 nt, Human
caaaaagauaccuuaaaau

SEQ ID NO: 1956395 - RNA, 20 nt, Human
caaaaagauaccuuaaaauu

SEQ ID NO: 1956396 - RNA, 22 nt, Human
caaaaagauaccuuaaaauuug

SEQ ID NO: 1956397 - RNA, 23 nt, Human
caaaaagauaccuuaaaauuuga

SEQ ID NO: 1956398 - RNA, 18 nt, Human
caaaaagauaccuuaaaa

SEQ ID NO: 1956399 - RNA, 22 nt, Human
caaaaagaaaaaaaaaaagaaa

SEQ ID NO: 1956400 - RNA, 20 nt, Human
caaaaacauggccuuugcuu

SEQ ID NO: 1956401 - RNA, 18 nt, Human
auuuuggagagauaggaa

SEQ ID NO: 1956402 - RNA, 19 nt, Human
auuuuggagagauaggaag

SEQ ID NO: 1956403 - RNA, 17 nt, Human
auuuuggagagauagga

SEQ ID NO: 1956404 - RNA, 21 nt, Human
auuuuggccaugaaagcaugg

SEQ ID NO: 1956405 - RNA, 21 nt, Human
auuuugggguacccacugcuc

SEQ ID NO: 1956406 - RNA, 13 nt, Human
auuuuccuuuaau

SEQ ID NO: 1956407 - RNA, 16 nt, Human
auuuucuaaaguacug

SEQ ID NO: 1956408 - RNA, 20 nt, Human
auuuucuaaaguacugagca

SEQ ID NO: 1956409 - RNA, 15 nt, Human
auuuucuaaaguacu

SEQ ID NO: 1956410 - RNA, 23 nt, Human
auuuuccuuuaauaugaaauuuu

SEQ ID NO: 1956411 - RNA, 17 nt, Human
auuuuggugucuuucuc

SEQ ID NO: 1956412 - RNA, 10 nt, Human
auuuuggucu

SEQ ID NO: 1956413 - RNA, 16 nt, Human
caaaaaaugcuugcuu

SEQ ID NO: 1956414 - RNA, 22 nt, Human
auuuugggguacccacugcucu

SEQ ID NO: 1956415 - RNA, 23 nt, Human
auuuugggguacccacugcucug

SEQ ID NO: 1956416 - RNA, 20 nt, Human
auuuuggagagauaggaagg

SEQ ID NO: 1956417 - RNA, 15 nt, Human
caaccuccugggcua

SEQ ID NO: 1956418 - RNA, 13 nt, Human
caaccucgcucca

SEQ ID NO: 1956419 - RNA, 16 nt, Human
caaccucgcuccaacu

SEQ ID NO: 1956420 - RNA, 17 nt, Human
caaccucgcuccaacuc

SEQ ID NO: 1956421 - RNA, 20 nt, Human
caaccucgcuccaacuccaa

SEQ ID NO: 1956422 - RNA, 21 nt, Human
caaccucgcuccaacuccaac

SEQ ID NO: 1956423 - RNA, 14 nt, Human
caaccucuuccucc

SEQ ID NO: 1956424 - RNA, 19 nt, Human
caaccucuagaauuuuaag

SEQ ID NO: 1956425 - RNA, 14 nt, Human
caaccuccugggcu

SEQ ID NO: 1956426 - RNA, 21 nt, Human
caaccgggaugggagccgggc

SEQ ID NO: 1956427 - RNA, 14 nt, Human
caacgucugugcca

SEQ ID NO: 1956428 - RNA, 13 nt, Human
caacgucugugcc

SEQ ID NO: 1956429 - RNA, 15 nt, Human
caacugaccagccuc

SEQ ID NO: 1956430 - RNA, 17 nt, Human
caacugaccagccucca

SEQ ID NO: 1956431 - RNA, 20 nt, Human
caaccuguucugcuuuccuc

SEQ ID NO: 1956432 - RNA, 19 nt, Human
caaccuucgccaccugggu

SEQ ID NO: 1956433 - RNA, 14 nt, Human
caaccuucaagcug

SEQ ID NO: 1956434 - RNA, 20 nt, Human
caacacugggaaacagaggc

SEQ ID NO: 1956435 - RNA, 22 nt, Human
caaccccuucgcuccugugucu

SEQ ID NO: 1956436 - RNA, 22 nt, Human
caacacucauugaccugaggcc

SEQ ID NO: 1956437 - RNA, 20 nt, Human
caacacucauugaccugagg

SEQ ID NO: 1956438 - RNA, 18 nt, Human
caacacucauugaccuga

SEQ ID NO: 1956439 - RNA, 22 nt, Human
caacacucacauuuauucugcu

SEQ ID NO: 1956440 - RNA, 17 nt, Human
caacccuggcacccagg

SEQ ID NO: 1956441 - RNA, 13 nt, Human
caacccucagagc

SEQ ID NO: 1956442 - RNA, 17 nt, Human
caagacgcugugcugcc

SEQ ID NO: 1956443 - RNA, 16 nt, Human
caagacgcugugcugc

SEQ ID NO: 1956444 - RNA, 18 nt, Human
caagaccuucuccuucac

SEQ ID NO: 1956445 - RNA, 17 nt, Human
caagaccuucuccuuca

SEQ ID NO: 1956446 - RNA, 16 nt, Human
caagaccuucuccuuc

SEQ ID NO: 1956447 - RNA, 14 nt, Human
caagaccuucuccu

SEQ ID NO: 1956448 - RNA, 20 nt, Human
caagaacuuuccaggaaggc

SEQ ID NO: 1956449 - RNA, 13 nt, Human
caagaacuuguuu

SEQ ID NO: 1956450 - RNA, 14 nt, Human
caagaacuuguuua

SEQ ID NO: 1956451 - RNA, 15 nt, Human
caagaacuuguuuaa

SEQ ID NO: 1956452 - RNA, 17 nt, Human
caagaacuuguuuaaua

SEQ ID NO: 1956453 - RNA, 19 nt, Human
caacugaccagccuccaug

SEQ ID NO: 1956454 - RNA, 15 nt, Human
caacuuuuuuuucuu

SEQ ID NO: 1956455 - RNA, 17 nt, Human
caacuuuuuuuucuuuu

SEQ ID NO: 1956456 - RNA, 16 nt, Human
caacuuuuuuuuuccc

SEQ ID NO: 1956457 - RNA, 18 nt, Human
caagacucuuuggacacu

SEQ ID NO: 1956458 - RNA, 13 nt, Human
caagagcccaggc

SEQ ID NO: 1956459 - RNA, 15 nt, Human
caagagcccaggccu

SEQ ID NO: 1956460 - RNA, 14 nt, Human
caagagcccaggcc

SEQ ID NO: 1956461 - RNA, 23 nt, Human
caagacgcugugcugcccugccc

SEQ ID NO: 1956462 - RNA, 18 nt, Human
caagacgcugugcugccc

SEQ ID NO: 1956463 - RNA, 19 nt, Human
caagacgcugugcugcccu

SEQ ID NO: 1956464 - RNA, 16 nt, Human
caagaggcugcagcca

SEQ ID NO: 1956465 - RNA, 16 nt, Human
caagagcccaggccuc

SEQ ID NO: 1956466 - RNA, 13 nt, Human
caagagggcacug

SEQ ID NO: 1956467 - RNA, 15 nt, Human
caagcaccuccugcc

SEQ ID NO: 1956468 - RNA, 14 nt, Human
caagagggcacugg

SEQ ID NO: 1956469 - RNA, 15 nt, Human
caagagggcacuggu

SEQ ID NO: 1956470 - RNA, 16 nt, Human
caagcaccuccugccu

SEQ ID NO: 1956471 - RNA, 17 nt, Human
caagcaccuccugccuc

SEQ ID NO: 1956472 - RNA, 14 nt, Human
caacugaucuguua

SEQ ID NO: 1956473 - RNA, 23 nt, Human
caaggcugucaauuacaggaagu

SEQ ID NO: 1956474 - RNA, 21 nt, Human
caaggcugucaauuacaggaa

SEQ ID NO: 1956475 - RNA, 15 nt, Human
caaggcugcagugag

SEQ ID NO: 1956476 - RNA, 12 nt, Human
caaggcugcagu

SEQ ID NO: 1956477 - RNA, 17 nt, Human
caaggggcccaaauucu

SEQ ID NO: 1956478 - RNA, 18 nt, Human
caaggggcccaaauucuu

SEQ ID NO: 1956479 - RNA, 14 nt, Human
caaggucauuuuuu

SEQ ID NO: 1956480 - RNA, 20 nt, Human
caaggucauuuuuuuuaaga

SEQ ID NO: 1956481 - RNA, 18 nt, Human
caaggguagggugggccu

SEQ ID NO: 1956482 - RNA, 20 nt, Human
caagggguccccuccaggag

SEQ ID NO: 1956483 - RNA, 11 nt, Human
caagucccugu

SEQ ID NO: 1956484 - RNA, 20 nt, Human
caagucccuguaauuguugu

SEQ ID NO: 1956485 - RNA, 14 nt, Human
caaguccucuuuuc

SEQ ID NO: 1956486 - RNA, 16 nt, Human
caaguccgcagaagcc

SEQ ID NO: 1956487 - RNA, 19 nt, Human
caaguccgcagaagcccug

SEQ ID NO: 1956488 - RNA, 14 nt, Human
caaguuaaauaaau

SEQ ID NO: 1956489 - RNA, 14 nt, Human
caagugugaauacu

SEQ ID NO: 1956490 - RNA, 15 nt, Human
caagugugaauacug

SEQ ID NO: 1956491 - RNA, 16 nt, Human
caagugugaauacugc

SEQ ID NO: 1956492 - RNA, 18 nt, Human
caaguggagccugacagc

SEQ ID NO: 1956493 - RNA, 21 nt, Human
caaguggagccugacagccag

SEQ ID NO: 1956494 - RNA, 20 nt, Human
caaguggcaaagcuguucuu

SEQ ID NO: 1956495 - RNA, 23 nt, Human
caaguggcaaagcuguucuuccu

SEQ ID NO: 1956496 - RNA, 19 nt, Human
caaguggcucccacacccu

SEQ ID NO: 1956497 - RNA, 17 nt, Human
caaguggcauaaagcau

SEQ ID NO: 1956498 - RNA, 18 nt, Human
caaguggcauaaagcaua

SEQ ID NO: 1956499 - RNA, 18 nt, Human
caagugagagcugggugu

SEQ ID NO: 1956500 - RNA, 17 nt, Human
caagugauucucaugcc

SEQ ID NO: 1956501 - RNA, 18 nt, Human
caagugauucucaugccu

SEQ ID NO: 1956502 - RNA, 20 nt, Human
caagugauucucaugccuca

SEQ ID NO: 1956503 - RNA, 21 nt, Human
caagugauucucaugccucag

SEQ ID NO: 1956504 - RNA, 21 nt, Human
caaguccucuuuucugagagg

SEQ ID NO: 1956505 - RNA, 14 nt, Human
caagugagagcugg

SEQ ID NO: 1956506 - RNA, 15 nt, Human
caagugagagcuggg

SEQ ID NO: 1956507 - RNA, 17 nt, Human
caagugagagcugggug

SEQ ID NO: 1956508 - RNA, 18 nt, Human
caagccguggcuucccgc

SEQ ID NO: 1956509 - RNA, 12 nt, Human
caagccagcaag

SEQ ID NO: 1956510 - RNA, 19 nt, Human
caagcgauucuucugcuuc

SEQ ID NO: 1956511 - RNA, 15 nt, Human
caagccuggaaaaaa

SEQ ID NO: 1956512 - RNA, 14 nt, Human
caagcgcccuggcc

SEQ ID NO: 1956513 - RNA, 14 nt, Human
caagccuggcaagg

SEQ ID NO: 1956514 - RNA, 15 nt, Human
caagcgcccuggccc

SEQ ID NO: 1956515 - RNA, 16 nt, Human
caagcgcccuggcccc

SEQ ID NO: 1956516 - RNA, 17 nt, Human
caagcuggcuuacacug

SEQ ID NO: 1956517 - RNA, 20 nt, Human
caagcgauucuucugcuuca

SEQ ID NO: 1956518 - RNA, 22 nt, Human
caagcgauucuucugcuucagc

SEQ ID NO: 1956519 - RNA, 14 nt, Human
caagcaggacaugg

SEQ ID NO: 1956520 - RNA, 18 nt, Human
caagcaggacauggacaa

SEQ ID NO: 1956521 - RNA, 12 nt, Human
caagcaggaggc

SEQ ID NO: 1956522 - RNA, 13 nt, Human
caagcaggaggcu

SEQ ID NO: 1956523 - RNA, 22 nt, Human
caagccagcgggaauggcagcu

SEQ ID NO: 1956524 - RNA, 17 nt, Human
caagccguggcuucccg

SEQ ID NO: 1956525 - RNA, 22 nt, Human
caagccaccaacauacucccau

SEQ ID NO: 1956526 - RNA, 21 nt, Human
caagccaccagaugugacagu

SEQ ID NO: 1956527 - RNA, 17 nt, Human
caagcuggucccacuca

SEQ ID NO: 1956528 - RNA, 19 nt, Human
caagcuggucccacucagu

SEQ ID NO: 1956529 - RNA, 15 nt, Human
caaggacugcaggga

SEQ ID NO: 1956530 - RNA, 18 nt, Human
caaggacagaaggcuccu

SEQ ID NO: 1956531 - RNA, 21 nt, Human
caaggacagaaggcuccugcc

SEQ ID NO: 1956532 - RNA, 22 nt, Human
caaggacugcagggacugccag

SEQ ID NO: 1956533 - RNA, 14 nt, Human
caaggagccaaaca

SEQ ID NO: 1956534 - RNA, 17 nt, Human
caaggcugauuaaacca

SEQ ID NO: 1956535 - RNA, 20 nt, Human
caaggagggugagugcaagg

SEQ ID NO: 1956536 - RNA, 19 nt, Human
caaggagggugagugcaag

SEQ ID NO: 1956537 - RNA, 14 nt, Human
caauaggaaaaacu

SEQ ID NO: 1956538 - RNA, 14 nt, Human
caauguucucucuu

SEQ ID NO: 1956539 - RNA, 15 nt, Human
caaugacuuacugua

SEQ ID NO: 1956540 - RNA, 15 nt, Human
caaucuuacuuugua

SEQ ID NO: 1956541 - RNA, 14 nt, Human
caaucuuacuuugu

SEQ ID NO: 1956542 - RNA, 21 nt, Human
caaugaccuuucaauaggaaa

SEQ ID NO: 1956543 - RNA, 17 nt, Human
caaugacuuacuguaca

SEQ ID NO: 1956544 - RNA, 18 nt, Human
caaugacuuacuguacau

SEQ ID NO: 1956545 - RNA, 23 nt, Human
caaugaccuuucaauaggaaaaa

SEQ ID NO: 1956546 - RNA, 19 nt, Human
caaucuggggaaauaauaa

SEQ ID NO: 1956547 - RNA, 20 nt, Human
caaucuggauucauauuuaa

SEQ ID NO: 1956548 - RNA, 16 nt, Human
caaucuggauucauau

SEQ ID NO: 1956549 - RNA, 18 nt, Human
caauauucucuguacaua

SEQ ID NO: 1956550 - RNA, 19 nt, Human
caauauucucuguacauau

SEQ ID NO: 1956551 - RNA, 22 nt, Human
caauauucucuguacauauuag

SEQ ID NO: 1956552 - RNA, 16 nt, Human
caauauauuuuguaug

SEQ ID NO: 1956553 - RNA, 22 nt, Human
caauauauuuuguaugcaagca

SEQ ID NO: 1956554 - RNA, 12 nt, Human
caauauucucug

SEQ ID NO: 1956555 - RNA, 15 nt, Human
caauauucucuguac

SEQ ID NO: 1956556 - RNA, 16 nt, Human
caauauucucuguaca

SEQ ID NO: 1956557 - RNA, 17 nt, Human
caauauucucuguacau

SEQ ID NO: 1956558 - RNA, 14 nt, Human
caauauaagagcuu

SEQ ID NO: 1956559 - RNA, 17 nt, Human
caauauucgcuguguca

SEQ ID NO: 1956560 - RNA, 13 nt, Human
caauauauuuugu

SEQ ID NO: 1956561 - RNA, 14 nt, Human
caauauauuuugua

SEQ ID NO: 1956562 - RNA, 15 nt, Human
caauauauuuuguau

SEQ ID NO: 1956563 - RNA, 18 nt, Human
caauaauuuguggugauu

SEQ ID NO: 1956564 - RNA, 20 nt, Human
caauaauuuguggugauuug

SEQ ID NO: 1956565 - RNA, 21 nt, Human
caauaauuauuugucucagau

SEQ ID NO: 1956566 - RNA, 16 nt, Human
caaguuaguucaaucu

SEQ ID NO: 1956567 - RNA, 13 nt, Human
caauaggaaaaac

SEQ ID NO: 1956568 - RNA, 12 nt, Human
caauaggaaaaa

SEQ ID NO: 1956569 - RNA, 21 nt, Human
caauagcccaggauauauuuu

SEQ ID NO: 1956570 - RNA, 18 nt, Human
caagugugggggguccuu

SEQ ID NO: 1956571 - RNA, 19 nt, Human
caauguagaggggaaaaga

SEQ ID NO: 1956572 - RNA, 18 nt, Human
caaugucaaugaacaagc

SEQ ID NO: 1956573 - RNA, 15 nt, Human
caaugguaauuauaa

SEQ ID NO: 1956574 - RNA, 16 nt, Human
caaugguaauuauaaa

SEQ ID NO: 1956575 - RNA, 14 nt, Human
caaugguaguuucu

SEQ ID NO: 1956576 - RNA, 16 nt, Human
caaugguaguuucugu

SEQ ID NO: 1956577 - RNA, 17 nt, Human
caaugguaguuucugug

SEQ ID NO: 1956578 - RNA, 20 nt, Human
caaugguaguuucugugguu

SEQ ID NO: 1956579 - RNA, 23 nt, Human
caauggugaacugucauuacaga

SEQ ID NO: 1956580 - RNA, 21 nt, Human
caauggugucaguauccaggc

SEQ ID NO: 1956581 - RNA, 21 nt, Human
caaugcacuuuguucuggcuc

SEQ ID NO: 1956582 - RNA, 20 nt, Human
caaugcacuuuguucuggcu

SEQ ID NO: 1956583 - RNA, 22 nt, Human
caaugcacuuuguucuggcucu

SEQ ID NO: 1956584 - RNA, 19 nt, Human
caaugagaucauugugaag

SEQ ID NO: 1956585 - RNA, 21 nt, Human
caaugagacucuaggguccag

SEQ ID NO: 1956586 - RNA, 17 nt, Human
caaugcacuuuguucug

SEQ ID NO: 1956587 - RNA, 16 nt, Human
caauuacaggaaguac

SEQ ID NO: 1956588 - RNA, 23 nt, Human
caauucucauuugucacacacuu

SEQ ID NO: 1956589 - RNA, 13 nt, Human
caauucuccugcc

SEQ ID NO: 1956590 - RNA, 19 nt, Human
caauucucccgggacucug

SEQ ID NO: 1956591 - RNA, 14 nt, Human
caauucuccugccu

SEQ ID NO: 1956592 - RNA, 15 nt, Human
caauucuccugccuc

SEQ ID NO: 1956593 - RNA, 16 nt, Human
caauucuccugccuca

SEQ ID NO: 1956594 - RNA, 20 nt, Human
caauucucccgggacucugc

SEQ ID NO: 1956595 - RNA, 17 nt, Human
caaugugauaaaacccc

SEQ ID NO: 1956596 - RNA, 15 nt, Human
caaugugauaaaacc

SEQ ID NO: 1956597 - RNA, 16 nt, Human
caaugugacuuugaaa

SEQ ID NO: 1956598 - RNA, 18 nt, Human
caaugugauauaaacagc

SEQ ID NO: 1956599 - RNA, 20 nt, Human
caaugugauauaaacagcuu

SEQ ID NO: 1956600 - RNA, 22 nt, Human
caaugugauauaaacagcuucu

SEQ ID NO: 1956601 - RNA, 22 nt, Human
cacaguccuuaccagcagagca

SEQ ID NO: 1956602 - RNA, 21 nt, Human
cacaguccuuaccagcagagc

SEQ ID NO: 1956603 - RNA, 15 nt, Human
cacaguccuuaccag

SEQ ID NO: 1956604 - RNA, 13 nt, Human
cacaguccuuacc

SEQ ID NO: 1956605 - RNA, 19 nt, Human
cacagugaucaaguuauuu

SEQ ID NO: 1956606 - RNA, 14 nt, Human
cacagugcaucuca

SEQ ID NO: 1956607 - RNA, 22 nt, Human
cacaggcagggcaggaccagcc

SEQ ID NO: 1956608 - RNA, 22 nt, Human
cacagugagucgaggacaggga

SEQ ID NO: 1956609 - RNA, 21 nt, Human
cacagugagucgaggacaggg

SEQ ID NO: 1956610 - RNA, 22 nt, Human
cacaguguaccauuaaaauaug

SEQ ID NO: 1956611 - RNA, 17 nt, Human
cacaguguaccauuaaa

SEQ ID NO: 1956612 - RNA, 18 nt, Human
cacaguguaccauuaaaa

SEQ ID NO: 1956613 - RNA, 19 nt, Human
cacaguguaccauuaaaau

SEQ ID NO: 1956614 - RNA, 21 nt, Human
cacaguguaccauuaaaauau

SEQ ID NO: 1956615 - RNA, 15 nt, Human
cacaguguaccauua

SEQ ID NO: 1956616 - RNA, 15 nt, Human
cacaguucucuccuu

SEQ ID NO: 1956617 - RNA, 14 nt, Human
cacaguucucuccu

SEQ ID NO: 1956618 - RNA, 21 nt, Human
cacaguguguggucaacauuu

SEQ ID NO: 1956619 - RNA, 14 nt, Human
cacagugugauuuu

SEQ ID NO: 1956620 - RNA, 23 nt, Human
cacaguguguggucaacauuucu

SEQ ID NO: 1956621 - RNA, 11 nt, Human
cacaggcaggu

SEQ ID NO: 1956622 - RNA, 14 nt, Human
cacaggcaggucca

SEQ ID NO: 1956623 - RNA, 15 nt, Human
cacaggcagguccag

SEQ ID NO: 1956624 - RNA, 19 nt, Human
cacaggagggagggggaag

SEQ ID NO: 1956625 - RNA, 21 nt, Human
cacaggagggagggggaaggc

SEQ ID NO: 1956626 - RNA, 14 nt, Human
cacaggagggaggg

SEQ ID NO: 1956627 - RNA, 19 nt, Human
cacaggagaggauggccca

SEQ ID NO: 1956628 - RNA, 23 nt, Human
cacagcugggguggggaccucag

SEQ ID NO: 1956629 - RNA, 22 nt, Human
cacagcugggguggggaccuca

SEQ ID NO: 1956630 - RNA, 21 nt, Human
cacagcuucauuuccuguguc

SEQ ID NO: 1956631 - RNA, 22 nt, Human
cacagcuucauuuccugugucu

SEQ ID NO: 1956632 - RNA, 21 nt, Human
cacauaccaacucaacuuuuu

SEQ ID NO: 1956633 - RNA, 21 nt, Human
cacauagaaaguaaauaaaag

SEQ ID NO: 1956634 - RNA, 15 nt, Human
cacauagacugugcg

SEQ ID NO: 1956635 - RNA, 21 nt, Human
cacauagugaugguuccccug

SEQ ID NO: 1956636 - RNA, 16 nt, Human
cacauagacugugcgc

SEQ ID NO: 1956637 - RNA, 16 nt, Human
uuauggcuuuugugca

SEQ ID NO: 1956638 - RNA, 14 nt, Human
uuauggcacaucag

SEQ ID NO: 1956639 - RNA, 17 nt, Human
uuauguugcauagaaua

SEQ ID NO: 1956640 - RNA, 14 nt, Human
uuauggcugcauag

SEQ ID NO: 1956641 - RNA, 18 nt, Human
uuauguuguuuuguacag

SEQ ID NO: 1956642 - RNA, 18 nt, Human
uuauggcuuuugugcauu

SEQ ID NO: 1956643 - RNA, 17 nt, Human
uuauggauaugaaaaau

SEQ ID NO: 1956644 - RNA, 17 nt, Human
uuauggcuuuugugcau

SEQ ID NO: 1956645 - RNA, 20 nt, Human
uuauggaacacucugagacu

SEQ ID NO: 1956646 - RNA, 18 nt, Human
uuauggaacacucugaga

SEQ ID NO: 1956647 - RNA, 21 nt, Human
uuauggacaaugacccagugg

SEQ ID NO: 1956648 - RNA, 17 nt, Human
uuauggaacacucugag

SEQ ID NO: 1956649 - RNA, 18 nt, Human
uuaucuugaaggaaaaau

SEQ ID NO: 1956650 - RNA, 12 nt, Human
uuauuaaucacu

SEQ ID NO: 1956651 - RNA, 13 nt, Human
uuauuaaucacug

SEQ ID NO: 1956652 - RNA, 18 nt, Human
uuauuaagguuacagauu

SEQ ID NO: 1956653 - RNA, 20 nt, Human
uuauuaaauuuuuuuguaug

SEQ ID NO: 1956654 - RNA, 21 nt, Human
uuauuaaauuuuuuuguauga

SEQ ID NO: 1956655 - RNA, 18 nt, Human
uuauguuuuuguacucug

SEQ ID NO: 1956656 - RNA, 17 nt, Human
uuauguuuuuguacucu

SEQ ID NO: 1956657 - RNA, 22 nt, Human
uuauuaaauuuuuuuguaugaa

SEQ ID NO: 1956658 - RNA, 19 nt, Human
uuauuaacuuaauaaucaa

SEQ ID NO: 1956659 - RNA, 14 nt, Human
uuauuaacuuaaua

SEQ ID NO: 1956660 - RNA, 17 nt, Human
uuauuaacuuaauaauc

SEQ ID NO: 1956661 - RNA, 21 nt, Human
uuauuaaaugcccagccccuu

SEQ ID NO: 1956662 - RNA, 19 nt, Human
uuauuaaaugcccagcccc

SEQ ID NO: 1956663 - RNA, 23 nt, Human
uuauuaaaaaucucaaauuucua

SEQ ID NO: 1956664 - RNA, 18 nt, Human
uuauguuuugguccacuu

SEQ ID NO: 1956665 - RNA, 20 nt, Human
uuauguuuugguccacuuuu

SEQ ID NO: 1956666 - RNA, 23 nt, Human
uuauguuuugguccacuuuucca

SEQ ID NO: 1956667 - RNA, 11 nt, Human
uuauguuugcc

SEQ ID NO: 1956668 - RNA, 20 nt, Human
uuauguuugccacuuugcaa

SEQ ID NO: 1956669 - RNA, 16 nt, Human
uuaucuugaauaaugu

SEQ ID NO: 1956670 - RNA, 14 nt, Human
uuaucuugaauaau

SEQ ID NO: 1956671 - RNA, 17 nt, Human
uuaucuugaaggaaaaa

SEQ ID NO: 1956672 - RNA, 19 nt, Human
uuaucucagauauuugcac

SEQ ID NO: 1956673 - RNA, 18 nt, Human
uuaucucagauauuugca

SEQ ID NO: 1956674 - RNA, 14 nt, Human
uuaucuagauacug

SEQ ID NO: 1956675 - RNA, 14 nt, Human
uuaucuaccaacuu

SEQ ID NO: 1956676 - RNA, 17 nt, Human
uuaucuaccaacuuuca

SEQ ID NO: 1956677 - RNA, 18 nt, Human
uuaucuaccaacuuucaa

SEQ ID NO: 1956678 - RNA, 20 nt, Human
uuaucuaccaacuuucaaga

SEQ ID NO: 1956679 - RNA, 17 nt, Human
uuaucguccagugacuu

SEQ ID NO: 1956680 - RNA, 18 nt, Human
uuaucguccagugacuuu

SEQ ID NO: 1956681 - RNA, 19 nt, Human
uuaucgcccuggcaggcag

SEQ ID NO: 1956682 - RNA, 20 nt, Human
uuaucgcccuggcaggcagg

SEQ ID NO: 1956683 - RNA, 19 nt, Human
uuauauuucaaguacacug

SEQ ID NO: 1956684 - RNA, 14 nt, Human
uuaucccuuaagaa

SEQ ID NO: 1956685 - RNA, 15 nt, Human
uuaucccuuaagaau

SEQ ID NO: 1956686 - RNA, 16 nt, Human
uuaucccuuaagaaug

SEQ ID NO: 1956687 - RNA, 16 nt, Human
uuauauuuacaaaugg

SEQ ID NO: 1956688 - RNA, 24 nt, Human
uuauauuguaagaaauacuguaca

SEQ ID NO: 1956689 - RNA, 16 nt, Human
uuauauuguaagaaau

SEQ ID NO: 1956690 - RNA, 22 nt, Human
uuauauuguaagaaauacugua

SEQ ID NO: 1956691 - RNA, 14 nt, Human
uuauauuguaagaa

SEQ ID NO: 1956692 - RNA, 15 nt, Human
uuauauuuauugacu

SEQ ID NO: 1956693 - RNA, 11 nt, Human
uuauauuucca

SEQ ID NO: 1956694 - RNA, 20 nt, Human
uuauauuuauugacucuuga

SEQ ID NO: 1956695 - RNA, 10 nt, Human
uuauauuuca

SEQ ID NO: 1956696 - RNA, 11 nt, Human
uuauauuucaa

SEQ ID NO: 1956697 - RNA, 18 nt, Human
uuauauuucaaguacacu

SEQ ID NO: 1956698 - RNA, 22 nt, Human
uuauacagaccgaacuguugua

SEQ ID NO: 1956699 - RNA, 19 nt, Human
uuauaucuauauuuuacau

SEQ ID NO: 1956700 - RNA, 23 nt, Human
uuauaucuauauuuuacauaaau

SEQ ID NO: 1956701 - RNA, 18 nt, Human
uuauauccaguaacacau

SEQ ID NO: 1956702 - RNA, 17 nt, Human
uuauauccauuuuuauc

SEQ ID NO: 1956703 - RNA, 17 nt, Human
uuauaucagacugcuuu

SEQ ID NO: 1956704 - RNA, 22 nt, Human
uuauaucagacugcuuugagaa

SEQ ID NO: 1956705 - RNA, 11 nt, Human
uuauacauaaa

SEQ ID NO: 1956706 - RNA, 13 nt, Human
uuauacauaaaca

SEQ ID NO: 1956707 - RNA, 21 nt, Human
uuauaugaacauacaaaugca

SEQ ID NO: 1956708 - RNA, 13 nt, Human
uuauaugaacaua

SEQ ID NO: 1956709 - RNA, 15 nt, Human
uuauaugaacauaca

SEQ ID NO: 1956710 - RNA, 17 nt, Human
uuauaugaacauacaaa

SEQ ID NO: 1956711 - RNA, 23 nt, Human
uuauaucuccuuuguauucuguc

SEQ ID NO: 1956712 - RNA, 21 nt, Human
uuauauguauguguuuagaau

SEQ ID NO: 1956713 - RNA, 19 nt, Human
uuauauguauguguuuaga

SEQ ID NO: 1956714 - RNA, 20 nt, Human
uuauauguauguguuuagaa

SEQ ID NO: 1956715 - RNA, 12 nt, Human
uuauauguaugu

SEQ ID NO: 1956716 - RNA, 14 nt, Human
uuauauguaugugu

SEQ ID NO: 1956717 - RNA, 15 nt, Human
uuauauguauguguu

SEQ ID NO: 1956718 - RNA, 16 nt, Human
uuauauguauguguuu

SEQ ID NO: 1956719 - RNA, 17 nt, Human
uuauauguauguguuua

SEQ ID NO: 1956720 - RNA, 16 nt, Human
uuauauuaugaagcuu

SEQ ID NO: 1956721 - RNA, 15 nt, Human
ugugaaaagaaaaau

SEQ ID NO: 1956722 - RNA, 13 nt, Human
ugugaaaagaaaa

SEQ ID NO: 1956723 - RNA, 17 nt, Human
ugugaaaagaaaaauga

SEQ ID NO: 1956724 - RNA, 21 nt, Human
ugugaaaagaaaaaugagccu

SEQ ID NO: 1956725 - RNA, 19 nt, Human
ugucuuaauggaugaaauc

SEQ ID NO: 1956726 - RNA, 19 nt, Human
uuagugaccucagcuuuga

SEQ ID NO: 1956727 - RNA, 14 nt, Human
uuagucuuuauacu

SEQ ID NO: 1956728 - RNA, 16 nt, Human
uuagugagacauauuu

SEQ ID NO: 1956729 - RNA, 16 nt, Human
uuaguggacccugaaa

SEQ ID NO: 1956730 - RNA, 19 nt, Human
uuaguggacccugaaaugu

SEQ ID NO: 1956731 - RNA, 21 nt, Human
uuaguggacccugaaaugugu

SEQ ID NO: 1956732 - RNA, 13 nt, Human
uuauaagaaaaau

SEQ ID NO: 1956733 - RNA, 20 nt, Human
uuauaagaaaaaugugaauu

SEQ ID NO: 1956734 - RNA, 21 nt, Human
uuauaauuuuaaauguuuuuu

SEQ ID NO: 1956735 - RNA, 17 nt, Human
uuauaauuuuaaauguu

SEQ ID NO: 1956736 - RNA, 12 nt, Human
uuauaauuuuaa

SEQ ID NO: 1956737 - RNA, 14 nt, Human
uuauaauuguugca

SEQ ID NO: 1956738 - RNA, 15 nt, Human
uuauaauuguugcau

SEQ ID NO: 1956739 - RNA, 12 nt, Human
uuauaauuuaaa

SEQ ID NO: 1956740 - RNA, 15 nt, Human
uuauaaugaaugaaa

SEQ ID NO: 1956741 - RNA, 14 nt, Human
uuauaaugaaugac

SEQ ID NO: 1956742 - RNA, 19 nt, Human
uuauaauguauucauauuu

SEQ ID NO: 1956743 - RNA, 22 nt, Human
uuauaauguauucauauuugua

SEQ ID NO: 1956744 - RNA, 12 nt, Human
uuauaauguauu

SEQ ID NO: 1956745 - RNA, 13 nt, Human
uuauaauguauuc

SEQ ID NO: 1956746 - RNA, 15 nt, Human
uuauaauaauguuaa

SEQ ID NO: 1956747 - RNA, 18 nt, Human
uuauaauaauguuaacau

SEQ ID NO: 1956748 - RNA, 14 nt, Human
uuauaaucaccagg

SEQ ID NO: 1956749 - RNA, 17 nt, Human
uuccaaccauuuaucuu

SEQ ID NO: 1956750 - RNA, 18 nt, Human
uuccaaccauuuaucuug

SEQ ID NO: 1956751 - RNA, 19 nt, Human
uuccaaccauuuaucuuga

SEQ ID NO: 1956752 - RNA, 16 nt, Human
uuccaaaguacacugu

SEQ ID NO: 1956753 - RNA, 20 nt, Human
uuccaaagcagagagcauua

SEQ ID NO: 1956754 - RNA, 13 nt, Human
uuccaaaguacac

SEQ ID NO: 1956755 - RNA, 15 nt, Human
uuccauggacuuugu

SEQ ID NO: 1956756 - RNA, 14 nt, Human
uuccauggacuuug

SEQ ID NO: 1956757 - RNA, 16 nt, Human
uuccauauuagaaaac

SEQ ID NO: 1956758 - RNA, 17 nt, Human
uuccauauuagaaaacu

SEQ ID NO: 1956759 - RNA, 18 nt, Human
uuccauauuagaaaacuu

SEQ ID NO: 1956760 - RNA, 21 nt, Human
uuccauauuagaaaacuuugu

SEQ ID NO: 1956761 - RNA, 18 nt, Human
uuccauauuuuuuuccuu

SEQ ID NO: 1956762 - RNA, 23 nt, Human
uuccauauuuuuuuccuuacaua

SEQ ID NO: 1956763 - RNA, 13 nt, Human
uuccagagcauuc

SEQ ID NO: 1956764 - RNA, 11 nt, Human
uuccagagcau

SEQ ID NO: 1956765 - RNA, 21 nt, Human
uuccagagcauuccagucagg

SEQ ID NO: 1956766 - RNA, 15 nt, Human
uuccagagcugccag

SEQ ID NO: 1956767 - RNA, 19 nt, Human
uuccaacccucaucaccaa

SEQ ID NO: 1956768 - RNA, 20 nt, Human
uuccaaccauuuaucuugaa

SEQ ID NO: 1956769 - RNA, 21 nt, Human
uuccaaccauuuaucuugaag

SEQ ID NO: 1956770 - RNA, 14 nt, Human
uuccagaaucugua

SEQ ID NO: 1956771 - RNA, 22 nt, Human
uucagcuuguaaauagcucagg

SEQ ID NO: 1956772 - RNA, 13 nt, Human
uucagcuugggga

SEQ ID NO: 1956773 - RNA, 14 nt, Human
uucaguggcagcug

SEQ ID NO: 1956774 - RNA, 22 nt, Human
uucagcuccagcucaccagccc

SEQ ID NO: 1956775 - RNA, 12 nt, Human
uucagcuccagc

SEQ ID NO: 1956776 - RNA, 15 nt, Human
uucagcuccagcuca

SEQ ID NO: 1956777 - RNA, 13 nt, Human
uucaguguacaug

SEQ ID NO: 1956778 - RNA, 12 nt, Human
uucaguguacau

SEQ ID NO: 1956779 - RNA, 17 nt, Human
uucaguggcagcugcuu

SEQ ID NO: 1956780 - RNA, 15 nt, Human
uucaguggcagcugc

SEQ ID NO: 1956781 - RNA, 16 nt, Human
uucaguggcagcugcu

SEQ ID NO: 1956782 - RNA, 12 nt, Human
uucauccuuuca

SEQ ID NO: 1956783 - RNA, 15 nt, Human
uucauccuuucacuu

SEQ ID NO: 1956784 - RNA, 18 nt, Human
uucaucccuucucuucca

SEQ ID NO: 1956785 - RNA, 12 nt, Human
uucauccuuccc

SEQ ID NO: 1956786 - RNA, 17 nt, Human
uucauccuucccacucu

SEQ ID NO: 1956787 - RNA, 16 nt, Human
uucaucccuucucuuc

SEQ ID NO: 1956788 - RNA, 20 nt, Human
uucauccuuucacuucuuuc

SEQ ID NO: 1956789 - RNA, 20 nt, Human
uucaucugagagaggcuaaa

SEQ ID NO: 1956790 - RNA, 19 nt, Human
uucauccuccucagaucuu

SEQ ID NO: 1956791 - RNA, 15 nt, Human
uucauccuccucaga

SEQ ID NO: 1956792 - RNA, 15 nt, Human
uucauaaccuagccu

SEQ ID NO: 1956793 - RNA, 20 nt, Human
uucauaaauaaaguuuguug

SEQ ID NO: 1956794 - RNA, 16 nt, Human
uucaguuuuuguguuu

SEQ ID NO: 1956795 - RNA, 13 nt, Human
uucaguucaaagu

SEQ ID NO: 1956796 - RNA, 16 nt, Human
uucaguucaaagucau

SEQ ID NO: 1956797 - RNA, 17 nt, Human
uucaguucaaagucaug

SEQ ID NO: 1956798 - RNA, 22 nt, Human
uucaguucaaagucaugauguu

SEQ ID NO: 1956799 - RNA, 23 nt, Human
uucaguuauuauauuuacaaaug

SEQ ID NO: 1956800 - RNA, 10 nt, Human
uucaguguuu

SEQ ID NO: 1956801 - RNA, 13 nt, Human
uucaguguuucug

SEQ ID NO: 1956802 - RNA, 21 nt, Human
uucaguguuucuggggagcug

SEQ ID NO: 1956803 - RNA, 14 nt, Human
uuauuugaaugacu

SEQ ID NO: 1956804 - RNA, 23 nt, Human
uuauuagcagcugacuuucaaag

SEQ ID NO: 1956805 - RNA, 21 nt, Human
uuauuagcagcugacuuucaa

SEQ ID NO: 1956806 - RNA, 13 nt, Human
uuauuuuaaaaga

SEQ ID NO: 1956807 - RNA, 15 nt, Human
uuauuugucagugua

SEQ ID NO: 1956808 - RNA, 19 nt, Human
uuauuugugauguacugua

SEQ ID NO: 1956809 - RNA, 17 nt, Human
uuauuuuaauucaguug

SEQ ID NO: 1956810 - RNA, 18 nt, Human
uuauuuuauuaugcauga

SEQ ID NO: 1956811 - RNA, 18 nt, Human
uucaaaugcuguaacuuu

SEQ ID NO: 1956812 - RNA, 17 nt, Human
uucaaauggaguuggag

SEQ ID NO: 1956813 - RNA, 22 nt, Human
uuauuuuggaaaauaaauuauu

SEQ ID NO: 1956814 - RNA, 21 nt, Human
uuauuuuggagagauaggaag

SEQ ID NO: 1956815 - RNA, 18 nt, Human
uucaaauguauuacagug

SEQ ID NO: 1956816 - RNA, 18 nt, Human
uucaaauguguuuugguc

SEQ ID NO: 1956817 - RNA, 21 nt, Human
uucaaauguguuuugguccug

SEQ ID NO: 1956818 - RNA, 21 nt, Human
uucaacagguuuuccugaaga

SEQ ID NO: 1956819 - RNA, 17 nt, Human
uucaacaguuucaaaau

SEQ ID NO: 1956820 - RNA, 15 nt, Human
uucaaccauucccca

SEQ ID NO: 1956821 - RNA, 16 nt, Human
uucaauaaaguuugau

SEQ ID NO: 1956822 - RNA, 18 nt, Human
uucaauaaaguuugaucu

SEQ ID NO: 1956823 - RNA, 19 nt, Human
uucaauaaaguuugaucuu

SEQ ID NO: 1956824 - RNA, 21 nt, Human
uucaauaaaguuugaucuucc

SEQ ID NO: 1956825 - RNA, 14 nt, Human
uucagcucacugca

SEQ ID NO: 1956826 - RNA, 17 nt, Human
uucagacagcugccugg

SEQ ID NO: 1956827 - RNA, 16 nt, Human
uucagacagcugccug

SEQ ID NO: 1956828 - RNA, 15 nt, Human
uucagacagcugccu

SEQ ID NO: 1956829 - RNA, 14 nt, Human
uucagacagcugcc

SEQ ID NO: 1956830 - RNA, 17 nt, Human
uucacggaagagccuug

SEQ ID NO: 1956831 - RNA, 22 nt, Human
uucaccuuuguccccaccgcag

SEQ ID NO: 1956832 - RNA, 13 nt, Human
uucacggaagagc

SEQ ID NO: 1956833 - RNA, 22 nt, Human
uucacaagacccaaaaggcaga

SEQ ID NO: 1956834 - RNA, 22 nt, Human
uucacaaauauuaaaaagucuu

SEQ ID NO: 1956835 - RNA, 21 nt, Human
uucacaaccuucuguggcuca

SEQ ID NO: 1956836 - RNA, 13 nt, Human
uucacccuuuucu

SEQ ID NO: 1956837 - RNA, 20 nt, Human
uucaccuuuguccccaccgc

SEQ ID NO: 1956838 - RNA, 19 nt, Human
uucaccuuuguccccaccg

SEQ ID NO: 1956839 - RNA, 14 nt, Human
uucaccuuuguccc

SEQ ID NO: 1956840 - RNA, 22 nt, Human
uucaauaggaaaaacugauuuu

SEQ ID NO: 1956841 - RNA, 18 nt, Human
uucaauaguaauauaaua

SEQ ID NO: 1956842 - RNA, 21 nt, Human
uucaauaggaaaaacugauuu

SEQ ID NO: 1956843 - RNA, 16 nt, Human
uucaauauauuuguau

SEQ ID NO: 1956844 - RNA, 19 nt, Human
uucacaaauauuaaaaagu

SEQ ID NO: 1956845 - RNA, 20 nt, Human
uucacaaauauuaaaaaguc

SEQ ID NO: 1956846 - RNA, 11 nt, Human
uucacaaauau

SEQ ID NO: 1956847 - RNA, 12 nt, Human
uucacaaauauu

SEQ ID NO: 1956848 - RNA, 14 nt, Human
uucacaaauauuaa

SEQ ID NO: 1956849 - RNA, 15 nt, Human
uucacaaauauuaaa

SEQ ID NO: 1956850 - RNA, 13 nt, Human
uugauuugauuuu

SEQ ID NO: 1956851 - RNA, 19 nt, Human
uugauuugucacugcuuca

SEQ ID NO: 1956852 - RNA, 13 nt, Human
uugauuugagauu

SEQ ID NO: 1956853 - RNA, 18 nt, Human
uugauuuuccaucuaaaa

SEQ ID NO: 1956854 - RNA, 11 nt, Human
uugcaaagcaa

SEQ ID NO: 1956855 - RNA, 12 nt, Human
uugcaaagcaaa

SEQ ID NO: 1956856 - RNA, 15 nt, Human
uugauuuuaaaaugu

SEQ ID NO: 1956857 - RNA, 18 nt, Human
uugauuuuaaaauguaca

SEQ ID NO: 1956858 - RNA, 19 nt, Human
uugauuuuaaaauguacau

SEQ ID NO: 1956859 - RNA, 22 nt, Human
uugauuuuaaaauguacaugua

SEQ ID NO: 1956860 - RNA, 21 nt, Human
uugcaaaguaucccuacugua

SEQ ID NO: 1956861 - RNA, 22 nt, Human
uugcaaaggagcucacuguggu

SEQ ID NO: 1956862 - RNA, 12 nt, Human
uugauugcuuuu

SEQ ID NO: 1956863 - RNA, 13 nt, Human
uugauugcuuuuu

SEQ ID NO: 1956864 - RNA, 14 nt, Human
uugauucucuccau

SEQ ID NO: 1956865 - RNA, 16 nt, Human
uugaugaucuuugcag

SEQ ID NO: 1956866 - RNA, 17 nt, Human
uugaugacccccaacca

SEQ ID NO: 1956867 - RNA, 17 nt, Human
uugaugcaauccuuaca

SEQ ID NO: 1956868 - RNA, 19 nt, Human
uugaugcaauccuuacaaa

SEQ ID NO: 1956869 - RNA, 20 nt, Human
uugaugcaauccuuacaaau

SEQ ID NO: 1956870 - RNA, 22 nt, Human
uugaugcaauccuuacaaauga

SEQ ID NO: 1956871 - RNA, 19 nt, Human
uugaugcauuaaaagaaaa

SEQ ID NO: 1956872 - RNA, 20 nt, Human
uugaugcauuaaaagaaaau

SEQ ID NO: 1956873 - RNA, 13 nt, Human
uugauucucucca

SEQ ID NO: 1956874 - RNA, 16 nt, Human
uugaggguugggcugg

SEQ ID NO: 1956875 - RNA, 13 nt, Human
uugaggguugggc

SEQ ID NO: 1956876 - RNA, 14 nt, Human
uugagccuaaaaau

SEQ ID NO: 1956877 - RNA, 17 nt, Human
uugagccuaaaaauaaa

SEQ ID NO: 1956878 - RNA, 21 nt, Human
uugagccuaaaaauaaagcac

SEQ ID NO: 1956879 - RNA, 11 nt, Human
uugagccuggg

SEQ ID NO: 1956880 - RNA, 18 nt, Human
uugagcccuuguuucagg

SEQ ID NO: 1956881 - RNA, 20 nt, Human
uugacuguuauuuguugaga

SEQ ID NO: 1956882 - RNA, 23 nt, Human
uugauauccucuuugagugaagc

SEQ ID NO: 1956883 - RNA, 12 nt, Human
uugauaguggga

SEQ ID NO: 1956884 - RNA, 23 nt, Human
uugauagcacagacccugcccug

SEQ ID NO: 1956885 - RNA, 14 nt, Human
uugaauuguaagga

SEQ ID NO: 1956886 - RNA, 17 nt, Human
uugaacuguuagaaugu

SEQ ID NO: 1956887 - RNA, 18 nt, Human
uugaacuguuagaaugua

SEQ ID NO: 1956888 - RNA, 23 nt, Human
uugaauuuauuuuuaagaaagaa

SEQ ID NO: 1956889 - RNA, 14 nt, Human
uugaacuguuagaa

SEQ ID NO: 1956890 - RNA, 15 nt, Human
uugaacuguuagaau

SEQ ID NO: 1956891 - RNA, 13 nt, Human
uugaacuuugacc

SEQ ID NO: 1956892 - RNA, 18 nt, Human
uugaacuggguacuugug

SEQ ID NO: 1956893 - RNA, 17 nt, Human
uugaacuccugaccuca

SEQ ID NO: 1956894 - RNA, 15 nt, Human
uugaacucugagaga

SEQ ID NO: 1956895 - RNA, 12 nt, Human
uugaauuuuaca

SEQ ID NO: 1956896 - RNA, 24 nt, Human
uugaauuuauuuuuaagaaagaaa

SEQ ID NO: 1956897 - RNA, 11 nt, Human
uugaauuuuca

SEQ ID NO: 1956898 - RNA, 12 nt, Human
uugaauuuucau

SEQ ID NO: 1956899 - RNA, 13 nt, Human
uugaauuuucauu

SEQ ID NO: 1956900 - RNA, 14 nt, Human
uugaauuuucauuu

SEQ ID NO: 1956901 - RNA, 15 nt, Human
uugaauuuucauuuu

SEQ ID NO: 1956902 - RNA, 16 nt, Human
uugaauuuucauuuua

SEQ ID NO: 1956903 - RNA, 17 nt, Human
uugaauuuucauuuuac

SEQ ID NO: 1956904 - RNA, 23 nt, Human
uugaauuuucauuuuacaguuac

SEQ ID NO: 1956905 - RNA, 19 nt, Human
uugacaaagucaagccaca

SEQ ID NO: 1956906 - RNA, 20 nt, Human
uugacaaagucaagccacau

SEQ ID NO: 1956907 - RNA, 14 nt, Human
uugaccucugcagc

SEQ ID NO: 1956908 - RNA, 15 nt, Human
uugaccucugcagca

SEQ ID NO: 1956909 - RNA, 12 nt, Human
uugacccugcac

SEQ ID NO: 1956910 - RNA, 15 nt, Human
uugacccugcacccu

SEQ ID NO: 1956911 - RNA, 17 nt, Human
uugacccugcacccucc

SEQ ID NO: 1956912 - RNA, 15 nt, Human
uugaccgacagcuuu

SEQ ID NO: 1956913 - RNA, 15 nt, Human
uugacaagcuggcuu

SEQ ID NO: 1956914 - RNA, 20 nt, Human
uugacaaacuucuuucacuc

SEQ ID NO: 1956915 - RNA, 21 nt, Human
uugaccucaggugauccaccc

SEQ ID NO: 1956916 - RNA, 17 nt, Human
uugacccacaagaaaug

SEQ ID NO: 1956917 - RNA, 17 nt, Human
uugaccgugaggccaga

SEQ ID NO: 1956918 - RNA, 14 nt, Human
uugacccacaagaa

SEQ ID NO: 1956919 - RNA, 14 nt, Human
uugacaagcuggcu

SEQ ID NO: 1956920 - RNA, 19 nt, Human
uugacgccaucccagcccc

SEQ ID NO: 1956921 - RNA, 18 nt, Human
uugacgccaucccagccc

SEQ ID NO: 1956922 - RNA, 17 nt, Human
uugacgccaucccagcc

SEQ ID NO: 1956923 - RNA, 16 nt, Human
uugaccucugcagcaa

SEQ ID NO: 1956924 - RNA, 21 nt, Human
uugacucuaguacugugaauc

SEQ ID NO: 1956925 - RNA, 23 nt, Human
uugaaaacacuguucucugcccu

SEQ ID NO: 1956926 - RNA, 21 nt, Human
uucuuuccaaaguacacuguu

SEQ ID NO: 1956927 - RNA, 20 nt, Human
uugaaaaaccauuuugcugu

SEQ ID NO: 1956928 - RNA, 14 nt, Human
uugaaaagaggugu

SEQ ID NO: 1956929 - RNA, 21 nt, Human
uugaaaagaggugugcaagag

SEQ ID NO: 1956930 - RNA, 13 nt, Human
uugaaaagagaca

SEQ ID NO: 1956931 - RNA, 13 nt, Human
uugaaaagaggug

SEQ ID NO: 1956932 - RNA, 15 nt, Human
uugaaaacagaaauu

SEQ ID NO: 1956933 - RNA, 15 nt, Human
uugaacuccuggccu

SEQ ID NO: 1956934 - RNA, 16 nt, Human
uugaacuccuggccuc

SEQ ID NO: 1956935 - RNA, 17 nt, Human
uugaaaaguaauauuua

SEQ ID NO: 1956936 - RNA, 22 nt, Human
uugaaaaguaauauuuauuaaa

SEQ ID NO: 1956937 - RNA, 13 nt, Human
uucuuguuuugcu

SEQ ID NO: 1956938 - RNA, 16 nt, Human
uucuuguuuugcuucc

SEQ ID NO: 1956939 - RNA, 12 nt, Human
uucuuucagcca

SEQ ID NO: 1956940 - RNA, 13 nt, Human
uucuuuaaacugu

SEQ ID NO: 1956941 - RNA, 14 nt, Human
uucuuuccaaagua

SEQ ID NO: 1956942 - RNA, 13 nt, Human
uucuuccucccuc

SEQ ID NO: 1956943 - RNA, 15 nt, Human
uucuuccucauuccc

SEQ ID NO: 1956944 - RNA, 21 nt, Human
uucuuguguguuuauugucaa

SEQ ID NO: 1956945 - RNA, 17 nt, Human
uucuucccuuaucccug

SEQ ID NO: 1956946 - RNA, 19 nt, Human
uucuucccaacuugccuuu

SEQ ID NO: 1956947 - RNA, 21 nt, Human
uucuucccaacuugccuuuga

SEQ ID NO: 1956948 - RNA, 21 nt, Human
uucuucccacccccuugcccu

SEQ ID NO: 1956949 - RNA, 11 nt, Human
uucuuccaguu

SEQ ID NO: 1956950 - RNA, 12 nt, Human
uucuuccaguua

SEQ ID NO: 1956951 - RNA, 22 nt, Human
uucuuccaguuacuuuccaauu

SEQ ID NO: 1956952 - RNA, 21 nt, Human
uucuuauacauuugauaaagu

SEQ ID NO: 1956953 - RNA, 21 nt, Human
uucuuccacaagagcccaggc

SEQ ID NO: 1956954 - RNA, 14 nt, Human
uucuuccaaagcag

SEQ ID NO: 1956955 - RNA, 14 nt, Human
uucuguguuuacag

SEQ ID NO: 1956956 - RNA, 17 nt, Human
uucuguguuuacagaga

SEQ ID NO: 1956957 - RNA, 22 nt, Human
uucugucuucauccccucagaa

SEQ ID NO: 1956958 - RNA, 21 nt, Human
uucugucuucauccccucaga

SEQ ID NO: 1956959 - RNA, 18 nt, Human
uucuguauuuuguuuuug

SEQ ID NO: 1956960 - RNA, 16 nt, Human
uucuguauuugaaagu

SEQ ID NO: 1956961 - RNA, 17 nt, Human
uucuguauuugaaagug

SEQ ID NO: 1956962 - RNA, 19 nt, Human
uucuguauuugaaagugcc

SEQ ID NO: 1956963 - RNA, 22 nt, Human
uucugucaaagucagaacaaau

SEQ ID NO: 1956964 - RNA, 23 nt, Human
uucugucaaagucagaacaaauu

SEQ ID NO: 1956965 - RNA, 14 nt, Human
uucuggaugggaca

SEQ ID NO: 1956966 - RNA, 14 nt, Human
uucuguauuugaaa

SEQ ID NO: 1956967 - RNA, 15 nt, Human
uucuguauuugaaag

SEQ ID NO: 1956968 - RNA, 14 nt, Human
uucugucucucccu

SEQ ID NO: 1956969 - RNA, 19 nt, Human
uucuguccuacucuguguc

SEQ ID NO: 1956970 - RNA, 17 nt, Human
uucugcuggcaucaaga

SEQ ID NO: 1956971 - RNA, 14 nt, Human
uucugcuucagccu

SEQ ID NO: 1956972 - RNA, 15 nt, Human
uucugcuucagccuc

SEQ ID NO: 1956973 - RNA, 16 nt, Human
uucugcuucagccucc

SEQ ID NO: 1956974 - RNA, 19 nt, Human
uucugcuucagccucccga

SEQ ID NO: 1956975 - RNA, 22 nt, Human
uucuggaaucauuguccagagc

SEQ ID NO: 1956976 - RNA, 15 nt, Human
uucuggacucuggac

SEQ ID NO: 1956977 - RNA, 18 nt, Human
uucugcuuuccucuuccu

SEQ ID NO: 1956978 - RNA, 13 nt, Human
uucugcuuuagac

SEQ ID NO: 1956979 - RNA, 17 nt, Human
uucugcuuuagacuuga

SEQ ID NO: 1956980 - RNA, 19 nt, Human
uucugcuuuagacuugaaa

SEQ ID NO: 1956981 - RNA, 11 nt, Human
uucugcuuugu

SEQ ID NO: 1956982 - RNA, 12 nt, Human
uucugcuuuguu

SEQ ID NO: 1956983 - RNA, 19 nt, Human
uucugcuuuguugugugcc

SEQ ID NO: 1956984 - RNA, 20 nt, Human
uucugcuuuguugugugccu

SEQ ID NO: 1956985 - RNA, 22 nt, Human
uucugcuuuguugugugccucu

SEQ ID NO: 1956986 - RNA, 23 nt, Human
uucugcuuuguugugugccucua

SEQ ID NO: 1956987 - RNA, 16 nt, Human
uucucuccagccccug

SEQ ID NO: 1956988 - RNA, 15 nt, Human
uucucuccagccccu

SEQ ID NO: 1956989 - RNA, 14 nt, Human
uucucuccuguacc

SEQ ID NO: 1956990 - RNA, 18 nt, Human
uucucuccuguaccucuu

SEQ ID NO: 1956991 - RNA, 14 nt, Human
uucucuccagcccc

SEQ ID NO: 1956992 - RNA, 13 nt, Human
uucucuccagccc

SEQ ID NO: 1956993 - RNA, 13 nt, Human
uucucugaggaca

SEQ ID NO: 1956994 - RNA, 16 nt, Human
uucucugaggacaaga

SEQ ID NO: 1956995 - RNA, 20 nt, Human
uucucugaggacaagagaaa

SEQ ID NO: 1956996 - RNA, 19 nt, Human
uucucuccuguaccucuug

SEQ ID NO: 1956997 - RNA, 12 nt, Human
uucucugcccuc

SEQ ID NO: 1956998 - RNA, 11 nt, Human
uucucugcccu

SEQ ID NO: 1956999 - RNA, 14 nt, Human
uucucugaggacac

SEQ ID NO: 1957000 - RNA, 20 nt, Human
uucucugaggacacuaacca

SEQ ID NO: 1957001 - RNA, 15 nt, Human
uucuccaccugccag

SEQ ID NO: 1957002 - RNA, 14 nt, Human
uucuccaccugcca

SEQ ID NO: 1957003 - RNA, 12 nt, Human
uucuccaccugc

SEQ ID NO: 1957004 - RNA, 21 nt, Human
uucuccaccucccacaaagga

SEQ ID NO: 1957005 - RNA, 18 nt, Human
uucuccaccugccaggga

SEQ ID NO: 1957006 - RNA, 16 nt, Human
uucuccaccugccagg

SEQ ID NO: 1957007 - RNA, 20 nt, Human
uucuccaccugccagggaca

SEQ ID NO: 1957008 - RNA, 12 nt, Human
uucuccacugga

SEQ ID NO: 1957009 - RNA, 15 nt, Human
uucucauuacuuguu

SEQ ID NO: 1957010 - RNA, 21 nt, Human
uucucauuacuuguugccuau

SEQ ID NO: 1957011 - RNA, 20 nt, Human
uucucauuugccaauaauaa

SEQ ID NO: 1957012 - RNA, 16 nt, Human
uucuccacccugcucu

SEQ ID NO: 1957013 - RNA, 16 nt, Human
uucuaugaaagacuca

SEQ ID NO: 1957014 - RNA, 22 nt, Human
uucucauguugaaacuuuaaga

SEQ ID NO: 1957015 - RNA, 13 nt, Human
uucugauuucuuu

SEQ ID NO: 1957016 - RNA, 20 nt, Human
uucugauuucuuuucaccau

SEQ ID NO: 1957017 - RNA, 19 nt, Human
uucugauccuaguuccacc

SEQ ID NO: 1957018 - RNA, 15 nt, Human
uucugaucacugaaa

SEQ ID NO: 1957019 - RNA, 19 nt, Human
uucugaucacugaaauaaa

SEQ ID NO: 1957020 - RNA, 20 nt, Human
uucugaucacugaaauaaaa

SEQ ID NO: 1957021 - RNA, 14 nt, Human
uucugaucuucacu

SEQ ID NO: 1957022 - RNA, 19 nt, Human
uucugcucacauaucuguc

SEQ ID NO: 1957023 - RNA, 16 nt, Human
uucugcuaaauuucaa

SEQ ID NO: 1957024 - RNA, 18 nt, Human
uucugauaaccauagcau

SEQ ID NO: 1957025 - RNA, 13 nt, Human
uucugagagcugu

SEQ ID NO: 1957026 - RNA, 19 nt, Human
uucugagagcugugcauca

SEQ ID NO: 1957027 - RNA, 21 nt, Human
uucucugcccagcuuuucauu

SEQ ID NO: 1957028 - RNA, 21 nt, Human
uucugaggccugaauccaaaa

SEQ ID NO: 1957029 - RNA, 21 nt, Human
uucugacccugcuucaaauau

SEQ ID NO: 1957030 - RNA, 18 nt, Human
uucugacccugcuucaaa

SEQ ID NO: 1957031 - RNA, 22 nt, Human
uucugacccaugcugcccugug

SEQ ID NO: 1957032 - RNA, 23 nt, Human
uucugacccaugcugcccuguga

SEQ ID NO: 1957033 - RNA, 17 nt, Human
uucucugcccuccaaga

SEQ ID NO: 1957034 - RNA, 16 nt, Human
uucucugcccuccaag

SEQ ID NO: 1957035 - RNA, 16 nt, Human
uucuacuuccaagacu

SEQ ID NO: 1957036 - RNA, 22 nt, Human
uucuacucgaguuacagacaaa

SEQ ID NO: 1957037 - RNA, 14 nt, Human
uucuauagcuuuuc

SEQ ID NO: 1957038 - RNA, 20 nt, Human
uucuauagcaucacuuaaaa

SEQ ID NO: 1957039 - RNA, 22 nt, Human
uucuauagcaucacuuaaaaca

SEQ ID NO: 1957040 - RNA, 16 nt, Human
uucuauaauuuuacaa

SEQ ID NO: 1957041 - RNA, 19 nt, Human
uucuauagcaucacuuaaa

SEQ ID NO: 1957042 - RNA, 13 nt, Human
uucuacgccaggg

SEQ ID NO: 1957043 - RNA, 20 nt, Human
uucuaccggcuuugccaugu

SEQ ID NO: 1957044 - RNA, 13 nt, Human
uucuacuauuuau

SEQ ID NO: 1957045 - RNA, 14 nt, Human
uucuacccaggugc

SEQ ID NO: 1957046 - RNA, 20 nt, Human
uucuacccagcgagcccugg

SEQ ID NO: 1957047 - RNA, 21 nt, Human
uucuacccagcgagcccuggu

SEQ ID NO: 1957048 - RNA, 18 nt, Human
uucguacauaauacugaa

SEQ ID NO: 1957049 - RNA, 18 nt, Human
uucgugacaauguuuaca

SEQ ID NO: 1957050 - RNA, 23 nt, Human
uucuaaugugugaaucagagcac

SEQ ID NO: 1957051 - RNA, 19 nt, Human
uucgugacaauguuuacaa

SEQ ID NO: 1957052 - RNA, 18 nt, Human
uucuaauuggcuuuacua

SEQ ID NO: 1957053 - RNA, 16 nt, Human
uucuaauuagauuaac

SEQ ID NO: 1957054 - RNA, 17 nt, Human
uucuaauuccuguuugu

SEQ ID NO: 1957055 - RNA, 20 nt, Human
uucuaauuggcuuuacuauu

SEQ ID NO: 1957056 - RNA, 12 nt, Human
uucuacccagcg

SEQ ID NO: 1957057 - RNA, 19 nt, Human
uucuacccagcgagcccug

SEQ ID NO: 1957058 - RNA, 21 nt, Human
uuccugcaggccaggccagcu

SEQ ID NO: 1957059 - RNA, 20 nt, Human
uuccugauugguuucucuuc

SEQ ID NO: 1957060 - RNA, 16 nt, Human
uuccugauugguuucu

SEQ ID NO: 1957061 - RNA, 19 nt, Human
uuccugauugguuucucuu

SEQ ID NO: 1957062 - RNA, 22 nt, Human
uuccugauagcauaugacaaau

SEQ ID NO: 1957063 - RNA, 22 nt, Human
uuccugaguuaggcuuucucuu

SEQ ID NO: 1957064 - RNA, 20 nt, Human
uuccugauagcauaugacaa

SEQ ID NO: 1957065 - RNA, 23 nt, Human
uuccugaugcuucuucagagacu

SEQ ID NO: 1957066 - RNA, 15 nt, Human
uuccugaggcugggc

SEQ ID NO: 1957067 - RNA, 19 nt, Human
uuccugacgagauaagcag

SEQ ID NO: 1957068 - RNA, 21 nt, Human
uuccugaggaagagggacugu

SEQ ID NO: 1957069 - RNA, 20 nt, Human
uuccugaguuaggcuuucuc

SEQ ID NO: 1957070 - RNA, 20 nt, Human
uuccugaggcugggcucccu

SEQ ID NO: 1957071 - RNA, 16 nt, Human
uuccauggccucuuca

SEQ ID NO: 1957072 - RNA, 12 nt, Human
uuccauggccuc

SEQ ID NO: 1957073 - RNA, 14 nt, Human
uuccauguaugcau

SEQ ID NO: 1957074 - RNA, 21 nt, Human
uuccuugaguugauucagcuc

SEQ ID NO: 1957075 - RNA, 13 nt, Human
uuccuugcauaca

SEQ ID NO: 1957076 - RNA, 17 nt, Human
uuccuugcauacaaaca

SEQ ID NO: 1957077 - RNA, 14 nt, Human
uuccuugccagucu

SEQ ID NO: 1957078 - RNA, 15 nt, Human
uuccuugccagucuu

SEQ ID NO: 1957079 - RNA, 16 nt, Human
uuccugcuuccucaga

SEQ ID NO: 1957080 - RNA, 17 nt, Human
uuccugcuuccucagag

SEQ ID NO: 1957081 - RNA, 18 nt, Human
uuccugcuuccucagagg

SEQ ID NO: 1957082 - RNA, 18 nt, Human
uucggugagcuacaaaug

SEQ ID NO: 1957083 - RNA, 15 nt, Human
uucgguacccaccac

SEQ ID NO: 1957084 - RNA, 16 nt, Human
uuuauugacucuugag

SEQ ID NO: 1957085 - RNA, 12 nt, Human
uuuauucuugau

SEQ ID NO: 1957086 - RNA, 16 nt, Human
uuuauuuacugcuagu

SEQ ID NO: 1957087 - RNA, 19 nt, Human
uuuauuuaguuccuugagu

SEQ ID NO: 1957088 - RNA, 18 nt, Human
uuuauugaggaaaaauau

SEQ ID NO: 1957089 - RNA, 20 nt, Human
uuuauugaggaaaaauaugu

SEQ ID NO: 1957090 - RNA, 18 nt, Human
uuucaacucauugcauca

SEQ ID NO: 1957091 - RNA, 21 nt, Human
uuucaacgcagcccugcuuug

SEQ ID NO: 1957092 - RNA, 13 nt, Human
uuucaacucauug

SEQ ID NO: 1957093 - RNA, 16 nt, Human
uuucaacucauugcau

SEQ ID NO: 1957094 - RNA, 15 nt, Human
uuucaacgcagcccu

SEQ ID NO: 1957095 - RNA, 15 nt, Human
uuucaaccucuagaa

SEQ ID NO: 1957096 - RNA, 22 nt, Human
uuucaaccucuagaauuuuaag

SEQ ID NO: 1957097 - RNA, 16 nt, Human
uuucaacgcagcccug

SEQ ID NO: 1957098 - RNA, 20 nt, Human
uuucaacgcagcccugcuuu

SEQ ID NO: 1957099 - RNA, 16 nt, Human
uuucaagaacuuguuu

SEQ ID NO: 1957100 - RNA, 13 nt, Human
uuucaagaacuug

SEQ ID NO: 1957101 - RNA, 18 nt, Human
uuucaagacugaauucca

SEQ ID NO: 1957102 - RNA, 18 nt, Human
uuucaagcuuauuuugga

SEQ ID NO: 1957103 - RNA, 20 nt, Human
uuucaagcgucacuuuauuu

SEQ ID NO: 1957104 - RNA, 14 nt, Human
uuucaagcuuauuu

SEQ ID NO: 1957105 - RNA, 17 nt, Human
uuuauaaggacuuccug

SEQ ID NO: 1957106 - RNA, 14 nt, Human
uuuauggcuuuugu

SEQ ID NO: 1957107 - RNA, 16 nt, Human
uuuauggcuuuugugc

SEQ ID NO: 1957108 - RNA, 13 nt, Human
uuuauuaugcaug

SEQ ID NO: 1957109 - RNA, 13 nt, Human
uuuauuauggcac

SEQ ID NO: 1957110 - RNA, 14 nt, Human
uuucaguguacaug

SEQ ID NO: 1957111 - RNA, 13 nt, Human
uuucaguguacau

SEQ ID NO: 1957112 - RNA, 11 nt, Human
uuucagugagg

SEQ ID NO: 1957113 - RNA, 20 nt, Human
uuucaguuauugucccuggc

SEQ ID NO: 1957114 - RNA, 13 nt, Human
uuucaguucaaag

SEQ ID NO: 1957115 - RNA, 14 nt, Human
uuucaguucaaagu

SEQ ID NO: 1957116 - RNA, 17 nt, Human
uuucaguucaaagucau

SEQ ID NO: 1957117 - RNA, 15 nt, Human
uuucagauuugcaca

SEQ ID NO: 1957118 - RNA, 16 nt, Human
uuucagauuugcacaa

SEQ ID NO: 1957119 - RNA, 17 nt, Human
uuucagauuugcacaaa

SEQ ID NO: 1957120 - RNA, 19 nt, Human
uuucagauuugcacaaaaa

SEQ ID NO: 1957121 - RNA, 22 nt, Human
uuucagauuugcacaaaaagau

SEQ ID NO: 1957122 - RNA, 14 nt, Human
uuucauuuagguga

SEQ ID NO: 1957123 - RNA, 18 nt, Human
uuucauuuaggugaggaa

SEQ ID NO: 1957124 - RNA, 15 nt, Human
uuucaaguauuuaag

SEQ ID NO: 1957125 - RNA, 16 nt, Human
uuucaaguauuuaagc

SEQ ID NO: 1957126 - RNA, 17 nt, Human
uuucaaguauuuaagcc

SEQ ID NO: 1957127 - RNA, 23 nt, Human
uuucaaguauuuaagccuaaaga

SEQ ID NO: 1957128 - RNA, 19 nt, Human
uuucaagggcuuuccugug

SEQ ID NO: 1957129 - RNA, 18 nt, Human
uuucaaguacacugaauu

SEQ ID NO: 1957130 - RNA, 13 nt, Human
uuucaauaaaguu

SEQ ID NO: 1957131 - RNA, 14 nt, Human
uuucaauaaaguuu

SEQ ID NO: 1957132 - RNA, 15 nt, Human
uuucaauaaaguuug

SEQ ID NO: 1957133 - RNA, 18 nt, Human
uuucaauaaaguuugauc

SEQ ID NO: 1957134 - RNA, 21 nt, Human
uuucaauaaaguuugaucuuc

SEQ ID NO: 1957135 - RNA, 19 nt, Human
uuucaauaggaaaaacuga

SEQ ID NO: 1957136 - RNA, 17 nt, Human
uuucaauaggaaaaacu

SEQ ID NO: 1957137 - RNA, 14 nt, Human
uuucaauaggaaaa

SEQ ID NO: 1957138 - RNA, 12 nt, Human
uuucaauaggaa

SEQ ID NO: 1957139 - RNA, 12 nt, Human
uuucacaaauau

SEQ ID NO: 1957140 - RNA, 13 nt, Human
uuucacaaauauu

SEQ ID NO: 1957141 - RNA, 16 nt, Human
uuucacaaauauuaaa

SEQ ID NO: 1957142 - RNA, 17 nt, Human
uuucacaaauauuaaaa

SEQ ID NO: 1957143 - RNA, 18 nt, Human
uuucacaaauauuaaaaa

SEQ ID NO: 1957144 - RNA, 20 nt, Human
uuucacaaauauuaaaaagu

SEQ ID NO: 1957145 - RNA, 22 nt, Human
uuucacaaccuucuguggcuca

SEQ ID NO: 1957146 - RNA, 16 nt, Human
uuucacaaccuucugu

SEQ ID NO: 1957147 - RNA, 22 nt, Human
uuucacaaauauuaaaaagucu

SEQ ID NO: 1957148 - RNA, 23 nt, Human
uuuauaaaaauaaaaaacacugg

SEQ ID NO: 1957149 - RNA, 21 nt, Human
uuuauaaaaauaaaaaacacu

SEQ ID NO: 1957150 - RNA, 14 nt, Human
uuuaguuuugcuuu

SEQ ID NO: 1957151 - RNA, 13 nt, Human
uuuaguuuuauuu

SEQ ID NO: 1957152 - RNA, 17 nt, Human
uuuaguuuuauuuucua

SEQ ID NO: 1957153 - RNA, 19 nt, Human
uuuaguuuuauuuucuaaa

SEQ ID NO: 1957154 - RNA, 12 nt, Human
uuuaguuuuucu

SEQ ID NO: 1957155 - RNA, 12 nt, Human
uuuagacagagu

SEQ ID NO: 1957156 - RNA, 18 nt, Human
uuuagaauggugauuuua

SEQ ID NO: 1957157 - RNA, 20 nt, Human
uuuagaauggugauuuuaaa

SEQ ID NO: 1957158 - RNA, 21 nt, Human
uuuagaauggugauuuuaaau

SEQ ID NO: 1957159 - RNA, 11 nt, Human
uuuagaauuga

SEQ ID NO: 1957160 - RNA, 13 nt, Human
uuuagaauugaag

SEQ ID NO: 1957161 - RNA, 15 nt, Human
uuuagaauugaaggu

SEQ ID NO: 1957162 - RNA, 17 nt, Human
uuuagaauugaagguuu

SEQ ID NO: 1957163 - RNA, 18 nt, Human
uuuagaauugaagguuuu

SEQ ID NO: 1957164 - RNA, 21 nt, Human
uuuagaauugaagguuuuuga

SEQ ID NO: 1957165 - RNA, 22 nt, Human
uuuacuucuuauacauuugaua

SEQ ID NO: 1957166 - RNA, 19 nt, Human
uuuacuucuuauacauuug

SEQ ID NO: 1957167 - RNA, 14 nt, Human
uuuagaaauauaau

SEQ ID NO: 1957168 - RNA, 17 nt, Human
uuuacaguguuucuggc

SEQ ID NO: 1957169 - RNA, 15 nt, Human
uuuacagcugccugc

SEQ ID NO: 1957170 - RNA, 16 nt, Human
uuuacagcugccugca

SEQ ID NO: 1957171 - RNA, 21 nt, Human
uuuaauagguuuggacaaaau

SEQ ID NO: 1957172 - RNA, 22 nt, Human
uuuacacggagcggauugcaaa

SEQ ID NO: 1957173 - RNA, 15 nt, Human
uuuaacuuguaauaa

SEQ ID NO: 1957174 - RNA, 17 nt, Human
uuuaacuuaguuuugca

SEQ ID NO: 1957175 - RNA, 20 nt, Human
uuuaacuuaguuuugcauag

SEQ ID NO: 1957176 - RNA, 18 nt, Human
uuuaagaaaaaggaugca

SEQ ID NO: 1957177 - RNA, 22 nt, Human
uuuaagaaaaaggaugcacaga

SEQ ID NO: 1957178 - RNA, 12 nt, Human
uuuaagaaagaa

SEQ ID NO: 1957179 - RNA, 19 nt, Human
uuuaagacauuuuuggaag

SEQ ID NO: 1957180 - RNA, 17 nt, Human
uuuaagaacuaaaaugu

SEQ ID NO: 1957181 - RNA, 17 nt, Human
uuuaagacacuuccguc

SEQ ID NO: 1957182 - RNA, 20 nt, Human
uuuaagacgaaacauuuguu

SEQ ID NO: 1957183 - RNA, 18 nt, Human
uuuaaguguacuggauuu

SEQ ID NO: 1957184 - RNA, 12 nt, Human
uuuaaguuugca

SEQ ID NO: 1957185 - RNA, 14 nt, Human
uuuaaguuugcacu

SEQ ID NO: 1957186 - RNA, 18 nt, Human
uuuaaguuugcacucaaa

SEQ ID NO: 1957187 - RNA, 19 nt, Human
uuuaaguuugcacucaaau

SEQ ID NO: 1957188 - RNA, 23 nt, Human
uuuaaguuugcacucaaaucuua

SEQ ID NO: 1957189 - RNA, 13 nt, Human
uuuaaguuuugac

SEQ ID NO: 1957190 - RNA, 18 nt, Human
uuuaaguuuugacaagcu

SEQ ID NO: 1957191 - RNA, 19 nt, Human
uuuaauaaagcgaaaaacu

SEQ ID NO: 1957192 - RNA, 21 nt, Human
uuuaauaaagcgaaaaacuca

SEQ ID NO: 1957193 - RNA, 16 nt, Human
uuuaauaaaauaauaa

SEQ ID NO: 1957194 - RNA, 14 nt, Human
uuuaacagggucuc

SEQ ID NO: 1957195 - RNA, 23 nt, Human
uuuaacagggucucuagugcugu

SEQ ID NO: 1957196 - RNA, 18 nt, Human
uuuaacagaaauguacag

SEQ ID NO: 1957197 - RNA, 23 nt, Human
uuuaacaacuaugauuuggaaaa

SEQ ID NO: 1957198 - RNA, 18 nt, Human
uuguuuggagacagaguc

SEQ ID NO: 1957199 - RNA, 21 nt, Human
uuuaacauauaauuucuuuaa

SEQ ID NO: 1957200 - RNA, 19 nt, Human
uuuaacucuauaauguguu

SEQ ID NO: 1957201 - RNA, 19 nt, Human
uuguuaguaugaggcauuu

SEQ ID NO: 1957202 - RNA, 21 nt, Human
uuguuaguaugaggcauuugu

SEQ ID NO: 1957203 - RNA, 15 nt, Human
uuguuacucuuggga

SEQ ID NO: 1957204 - RNA, 14 nt, Human
uuguuacauuuuua

SEQ ID NO: 1957205 - RNA, 13 nt, Human
uuguuaauuugga

SEQ ID NO: 1957206 - RNA, 17 nt, Human
uuguuaaguccuuggcu

SEQ ID NO: 1957207 - RNA, 21 nt, Human
uuguguuuauucuugaugaaa

SEQ ID NO: 1957208 - RNA, 16 nt, Human
uuguguuuauucuuga

SEQ ID NO: 1957209 - RNA, 18 nt, Human
uuguguuuauucuugaug

SEQ ID NO: 1957210 - RNA, 22 nt, Human
uuguuaggccaaagacaaauag

SEQ ID NO: 1957211 - RNA, 22 nt, Human
uuguuagcauuuucaaugugau

SEQ ID NO: 1957212 - RNA, 20 nt, Human
uuguuaggccaaagacaaau

SEQ ID NO: 1957213 - RNA, 21 nt, Human
uuguuaggccaaagacaaaua

SEQ ID NO: 1957214 - RNA, 20 nt, Human
uuguuagugugucuuagugu

SEQ ID NO: 1957215 - RNA, 22 nt, Human
uuguuaguaugaggcauuuguu

SEQ ID NO: 1957216 - RNA, 14 nt, Human
uuguugugugccuc

SEQ ID NO: 1957217 - RNA, 15 nt, Human
uuguuguuuguaugu

SEQ ID NO: 1957218 - RNA, 20 nt, Human
uuguuucuuucucugaggac

SEQ ID NO: 1957219 - RNA, 14 nt, Human
uuguuucuuugaau

SEQ ID NO: 1957220 - RNA, 20 nt, Human
uuguuucuuugaauuuucau

SEQ ID NO: 1957221 - RNA, 23 nt, Human
uuguuugaugcauuaaaagaaaa

SEQ ID NO: 1957222 - RNA, 20 nt, Human
uuguuucagggcuguggccu

SEQ ID NO: 1957223 - RNA, 15 nt, Human
uuguuuccuuucacu

SEQ ID NO: 1957224 - RNA, 17 nt, Human
uuguggacacagcucuu

SEQ ID NO: 1957225 - RNA, 16 nt, Human
uuguggacacagcucu

SEQ ID NO: 1957226 - RNA, 21 nt, Human
uuguggaaaaugaaaauuagg

SEQ ID NO: 1957227 - RNA, 20 nt, Human
uuguggauuuaacagaaaug

SEQ ID NO: 1957228 - RNA, 21 nt, Human
uuguggauuuaacagaaaugu

SEQ ID NO: 1957229 - RNA, 22 nt, Human
uuguggauuuaacagaaaugua

SEQ ID NO: 1957230 - RNA, 23 nt, Human
uuguggauuuaacagaaauguac

SEQ ID NO: 1957231 - RNA, 12 nt, Human
uuguguugaaga

SEQ ID NO: 1957232 - RNA, 13 nt, Human
uuguguugaagag

SEQ ID NO: 1957233 - RNA, 18 nt, Human
uuguguugaagagcagcu

SEQ ID NO: 1957234 - RNA, 20 nt, Human
uuguguugaagagguuuuaa

SEQ ID NO: 1957235 - RNA, 21 nt, Human
uuguguuuauauauaagccaa

SEQ ID NO: 1957236 - RNA, 14 nt, Human
uuguguuuauucuu

SEQ ID NO: 1957237 - RNA, 17 nt, Human
uugugcauuaucuagau

SEQ ID NO: 1957238 - RNA, 15 nt, Human
uugugcacaggcaga

SEQ ID NO: 1957239 - RNA, 22 nt, Human
uugugcauuaucuagauacugu

SEQ ID NO: 1957240 - RNA, 23 nt, Human
uugugcauuaucuagauacugua

SEQ ID NO: 1957241 - RNA, 17 nt, Human
uugugcaguaacuuggg

SEQ ID NO: 1957242 - RNA, 20 nt, Human
uugugcaguaacuugggagu

SEQ ID NO: 1957243 - RNA, 12 nt, Human
uugugcauuugg

SEQ ID NO: 1957244 - RNA, 18 nt, Human
uugugccuaauguguuug

SEQ ID NO: 1957245 - RNA, 15 nt, Human
uugugccuaaugugu

SEQ ID NO: 1957246 - RNA, 12 nt, Human
uugugccccugc

SEQ ID NO: 1957247 - RNA, 16 nt, Human
uugugccagaaugcuu

SEQ ID NO: 1957248 - RNA, 21 nt, Human
uugugccagaaugcuuuagga

SEQ ID NO: 1957249 - RNA, 17 nt, Human
uugugccuuaaagacaa

SEQ ID NO: 1957250 - RNA, 15 nt, Human
uuguaaauuaacuuu

SEQ ID NO: 1957251 - RNA, 16 nt, Human
uuguaaauuaacuuuu

SEQ ID NO: 1957252 - RNA, 18 nt, Human
uuguaaauuaacuuuuau

SEQ ID NO: 1957253 - RNA, 23 nt, Human
uuguaaauuaacuuuuauaaacu

SEQ ID NO: 1957254 - RNA, 18 nt, Human
uuguacauaaugcgugca

SEQ ID NO: 1957255 - RNA, 15 nt, Human
uuguaaauucugauu

SEQ ID NO: 1957256 - RNA, 14 nt, Human
uuguacauaaugcg

SEQ ID NO: 1957257 - RNA, 12 nt, Human
uuguaaauucug

SEQ ID NO: 1957258 - RNA, 13 nt, Human
uuguaaauucuga

SEQ ID NO: 1957259 - RNA, 14 nt, Human
uuguaaauucugau

SEQ ID NO: 1957260 - RNA, 17 nt, Human
uuguaaaagcauuuugu

SEQ ID NO: 1957261 - RNA, 18 nt, Human
uuguaaaagcauuuugua

SEQ ID NO: 1957262 - RNA, 19 nt, Human
uuguaaaagcauuuuguaa

SEQ ID NO: 1957263 - RNA, 20 nt, Human
uuguaaaagcauuuuguaau

SEQ ID NO: 1957264 - RNA, 17 nt, Human
uuguaaauagcucaggu

SEQ ID NO: 1957265 - RNA, 16 nt, Human
uuguaaaugugguaaa

SEQ ID NO: 1957266 - RNA, 21 nt, Human
uuguaaaugugguaaagaguu

SEQ ID NO: 1957267 - RNA, 22 nt, Human
uuguaaaaauuaaaaguuaugg

SEQ ID NO: 1957268 - RNA, 16 nt, Human
uuggucugugagaugc

SEQ ID NO: 1957269 - RNA, 13 nt, Human
uuggucuguguga

SEQ ID NO: 1957270 - RNA, 13 nt, Human
uugguacuguaau

SEQ ID NO: 1957271 - RNA, 17 nt, Human
uugguauauccuuuucu

SEQ ID NO: 1957272 - RNA, 13 nt, Human
uugguauccuuau

SEQ ID NO: 1957273 - RNA, 14 nt, Human
uugguccacuuuuc

SEQ ID NO: 1957274 - RNA, 17 nt, Human
uugguccacuuuuccag

SEQ ID NO: 1957275 - RNA, 16 nt, Human
uugcacucaaaucuua

SEQ ID NO: 1957276 - RNA, 21 nt, Human
uugcacuauugagucuucaug

SEQ ID NO: 1957277 - RNA, 17 nt, Human
uugcacucaaaucuuaa

SEQ ID NO: 1957278 - RNA, 18 nt, Human
uugcacucaaaucuuaag

SEQ ID NO: 1957279 - RNA, 20 nt, Human
uugcacucaaaucuuaagaa

SEQ ID NO: 1957280 - RNA, 21 nt, Human
uugcacucaaaucuuaagaaa

SEQ ID NO: 1957281 - RNA, 22 nt, Human
uuggguucaagcgauucuucug

SEQ ID NO: 1957282 - RNA, 13 nt, Human
uugguaccuugca

SEQ ID NO: 1957283 - RNA, 14 nt, Human
uugguaccuugcac

SEQ ID NO: 1957284 - RNA, 16 nt, Human
uugguaccuugcacac

SEQ ID NO: 1957285 - RNA, 17 nt, Human
uugguaccuugcacaca

SEQ ID NO: 1957286 - RNA, 21 nt, Human
uugucugccccaaguuuugug

SEQ ID NO: 1957287 - RNA, 19 nt, Human
uugugaaacagacuuguau

SEQ ID NO: 1957288 - RNA, 19 nt, Human
uugugaaagaggucccaag

SEQ ID NO: 1957289 - RNA, 16 nt, Human
uugugaaaauaauuga

SEQ ID NO: 1957290 - RNA, 20 nt, Human
uugugaaaggaaagaggcuc

SEQ ID NO: 1957291 - RNA, 16 nt, Human
uugugauuuuuguaau

SEQ ID NO: 1957292 - RNA, 17 nt, Human
uugugauuuuuguaauu

SEQ ID NO: 1957293 - RNA, 12 nt, Human
uugugauuuuug

SEQ ID NO: 1957294 - RNA, 14 nt, Human
uugugaaaugaugg

SEQ ID NO: 1957295 - RNA, 15 nt, Human
uugucuuaaaaagug

SEQ ID NO: 1957296 - RNA, 21 nt, Human
uugucugaagucacugcacag

SEQ ID NO: 1957297 - RNA, 17 nt, Human
uugucugccccaaguuu

SEQ ID NO: 1957298 - RNA, 18 nt, Human
uugucugccccaaguuuu

SEQ ID NO: 1957299 - RNA, 20 nt, Human
uugucugccccaaguuuugu

SEQ ID NO: 1957300 - RNA, 20 nt, Human
uugucugaagucacugcaca

SEQ ID NO: 1957301 - RNA, 11 nt, Human
uugucucagau

SEQ ID NO: 1957302 - RNA, 19 nt, Human
uuguauucucuccuguacc

SEQ ID NO: 1957303 - RNA, 16 nt, Human
uugucuaagaaacauu

SEQ ID NO: 1957304 - RNA, 17 nt, Human
uugucuaagaaacauug

SEQ ID NO: 1957305 - RNA, 18 nt, Human
uugucuaagaaacauugg

SEQ ID NO: 1957306 - RNA, 20 nt, Human
uugucuaagaaacauuggaa

SEQ ID NO: 1957307 - RNA, 23 nt, Human
uugucuaagaaacauuggaagca

SEQ ID NO: 1957308 - RNA, 15 nt, Human
uuguauucucuccug

SEQ ID NO: 1957309 - RNA, 16 nt, Human
uuguauucucuccugu

SEQ ID NO: 1957310 - RNA, 21 nt, Human
uuguauucagaguugaugguu

SEQ ID NO: 1957311 - RNA, 20 nt, Human
uuguauggggaggcaagugu

SEQ ID NO: 1957312 - RNA, 13 nt, Human
uuguacaugaaca

SEQ ID NO: 1957313 - RNA, 18 nt, Human
uuguacgacgucagaugu

SEQ ID NO: 1957314 - RNA, 21 nt, Human
uuguacgacgucagauguuua

SEQ ID NO: 1957315 - RNA, 13 nt, Human
uuuuuuuugacaa

SEQ ID NO: 1957316 - RNA, 13 nt, Human
uuuuuuuucccau

SEQ ID NO: 1957317 - RNA, 15 nt, Human
uuuugaccuuugaua

SEQ ID NO: 1957318 - RNA, 21 nt, Human
uuuugaagauucuauguuaau

SEQ ID NO: 1957319 - RNA, 17 nt, Human
uuuugaacucuucucau

SEQ ID NO: 1957320 - RNA, 18 nt, Human
uuuugaagugagaaaaug

SEQ ID NO: 1957321 - RNA, 19 nt, Human
uuuugaagugagaaaauga

SEQ ID NO: 1957322 - RNA, 12 nt, Human
uuuuuaagaaaa

SEQ ID NO: 1957323 - RNA, 23 nt, Human
uuuuuaagaaaaaggaugcacag

SEQ ID NO: 1957324 - RNA, 16 nt, Human
uuuuuaagugcugcau

SEQ ID NO: 1957325 - RNA, 17 nt, Human
uuuuuaagugcugcauu

SEQ ID NO: 1957326 - RNA, 18 nt, Human
uuuuuaagugcugcauuu

SEQ ID NO: 1957327 - RNA, 19 nt, Human
uuuuuaagugcugcauuua

SEQ ID NO: 1957328 - RNA, 22 nt, Human
uuuuuaagugcugcauuuaaaa

SEQ ID NO: 1957329 - RNA, 23 nt, Human
uuuuuaagugcugcauuuaaaag

SEQ ID NO: 1957330 - RNA, 20 nt, Human
uuuuuaaugcuaaucuugug

SEQ ID NO: 1957331 - RNA, 22 nt, Human
uuuuuaaucuacugcauuuagg

SEQ ID NO: 1957332 - RNA, 21 nt, Human
uuuuuaaugcuaaucuuguga

SEQ ID NO: 1957333 - RNA, 13 nt, Human
uuuuuaaucuuua

SEQ ID NO: 1957334 - RNA, 17 nt, Human
uuuuuaaccucuguuca

SEQ ID NO: 1957335 - RNA, 16 nt, Human
uuuuuaagugaaauuu

SEQ ID NO: 1957336 - RNA, 13 nt, Human
uuuuucaguucaa

SEQ ID NO: 1957337 - RNA, 14 nt, Human
uuuuucaguucaaa

SEQ ID NO: 1957338 - RNA, 16 nt, Human
uuuuucaguucaaagu

SEQ ID NO: 1957339 - RNA, 12 nt, Human
uuuuucauauuu

SEQ ID NO: 1957340 - RNA, 13 nt, Human
uuuuuuacaaagg

SEQ ID NO: 1957341 - RNA, 18 nt, Human
uuuuuuaaucuacugcau

SEQ ID NO: 1957342 - RNA, 12 nt, Human
uuuuuuaaucua

SEQ ID NO: 1957343 - RNA, 15 nt, Human
uuuuucccauuuaga

SEQ ID NO: 1957344 - RNA, 16 nt, Human
uuuuucccauuuagaa

SEQ ID NO: 1957345 - RNA, 14 nt, Human
uuuuuuugaaacuu

SEQ ID NO: 1957346 - RNA, 12 nt, Human
uuuuuuuccuua

SEQ ID NO: 1957347 - RNA, 11 nt, Human
uuuuuuuccuu

SEQ ID NO: 1957348 - RNA, 12 nt, Human
uuuuuuuuaaga

SEQ ID NO: 1957349 - RNA, 14 nt, Human
uuuuuuuguacgac

SEQ ID NO: 1957350 - RNA, 13 nt, Human
uuuuuuccacuua

SEQ ID NO: 1957351 - RNA, 12 nt, Human
uuuuuuccuguu

SEQ ID NO: 1957352 - RNA, 13 nt, Human
uuuuuuguuuguu

SEQ ID NO: 1957353 - RNA, 11 nt, Human
uuuuuuuacua

SEQ ID NO: 1957354 - RNA, 20 nt, Human
uuuuuuccuuacauaaacau

SEQ ID NO: 1957355 - RNA, 14 nt, Human
uuuuuuccuuacau

SEQ ID NO: 1957356 - RNA, 12 nt, Human
uuuuuuuaagug

SEQ ID NO: 1957357 - RNA, 14 nt, Human
uuuuaaaauccacu

SEQ ID NO: 1957358 - RNA, 12 nt, Human
uuuuaaaauacu

SEQ ID NO: 1957359 - RNA, 19 nt, Human
uuuuaaaauacuguagaua

SEQ ID NO: 1957360 - RNA, 23 nt, Human
uuuuaaaauccacuuuaucuuga

SEQ ID NO: 1957361 - RNA, 13 nt, Human
uuuuaaaaucuua

SEQ ID NO: 1957362 - RNA, 12 nt, Human
uuuuaaaaucuu

SEQ ID NO: 1957363 - RNA, 20 nt, Human
uuuuaaacccuauugguaaa

SEQ ID NO: 1957364 - RNA, 22 nt, Human
uuuguuaguaugaggcauuugu

SEQ ID NO: 1957365 - RNA, 16 nt, Human
uuuguuacucuuggga

SEQ ID NO: 1957366 - RNA, 20 nt, Human
uuuguuaauuuggaccauuu

SEQ ID NO: 1957367 - RNA, 19 nt, Human
uuuguguguucacuaaacu

SEQ ID NO: 1957368 - RNA, 23 nt, Human
uuuguguguucacuaaacucuga

SEQ ID NO: 1957369 - RNA, 15 nt, Human
uuuguugucagcuga

SEQ ID NO: 1957370 - RNA, 20 nt, Human
uuuguugccagauuucagaa

SEQ ID NO: 1957371 - RNA, 23 nt, Human
uuuguugcacugaaguuugauaa

SEQ ID NO: 1957372 - RNA, 19 nt, Human
uuuguugccagauuucaga

SEQ ID NO: 1957373 - RNA, 16 nt, Human
uuuguugauucucucc

SEQ ID NO: 1957374 - RNA, 10 nt, Human
uuuguugcac

SEQ ID NO: 1957375 - RNA, 17 nt, Human
uuuguugcacugaaguu

SEQ ID NO: 1957376 - RNA, 18 nt, Human
uuuguugcacugaaguuu

SEQ ID NO: 1957377 - RNA, 21 nt, Human
uuuguugcacugaaguuugau

SEQ ID NO: 1957378 - RNA, 22 nt, Human
uuuguugcacugaaguuugaua

SEQ ID NO: 1957379 - RNA, 14 nt, Human
uuuguauuuuuagu

SEQ ID NO: 1957380 - RNA, 18 nt, Human
uuuguguguuacaaugua

SEQ ID NO: 1957381 - RNA, 20 nt, Human
uuuguguggagucauuucug

SEQ ID NO: 1957382 - RNA, 18 nt, Human
uuugugugcuaaacgugu

SEQ ID NO: 1957383 - RNA, 13 nt, Human
uuuguauuuauuc

SEQ ID NO: 1957384 - RNA, 16 nt, Human
uuuguauuuauucuuu

SEQ ID NO: 1957385 - RNA, 17 nt, Human
uuuguauucugucuuca

SEQ ID NO: 1957386 - RNA, 13 nt, Human
uuuguauuguccu

SEQ ID NO: 1957387 - RNA, 15 nt, Human
uuuguauuguccuau

SEQ ID NO: 1957388 - RNA, 22 nt, Human
uuuguauuguccuauuaguguu

SEQ ID NO: 1957389 - RNA, 12 nt, Human
uuuguauucugu

SEQ ID NO: 1957390 - RNA, 17 nt, Human
uuuggucuacacugugc

SEQ ID NO: 1957391 - RNA, 17 nt, Human
uuuggaccauuuuccug

SEQ ID NO: 1957392 - RNA, 15 nt, Human
uuuggucaacacuaa

SEQ ID NO: 1957393 - RNA, 20 nt, Human
uuuggucaguuggguuuuua

SEQ ID NO: 1957394 - RNA, 18 nt, Human
uuugguccacuuuuccag

SEQ ID NO: 1957395 - RNA, 19 nt, Human
uuugguccacuuuuccagu

SEQ ID NO: 1957396 - RNA, 18 nt, Human
uuugcauaacguauaaaa

SEQ ID NO: 1957397 - RNA, 19 nt, Human
uuuggacaaaauggaauac

SEQ ID NO: 1957398 - RNA, 15 nt, Human
uuuggaaaucucuuu

SEQ ID NO: 1957399 - RNA, 20 nt, Human
uuuggacacauuuaaggugu

SEQ ID NO: 1957400 - RNA, 13 nt, Human
uuuggacccugag

SEQ ID NO: 1957401 - RNA, 12 nt, Human
uuuggaaaauaa

SEQ ID NO: 1957402 - RNA, 16 nt, Human
uuugcauucuuauuca

SEQ ID NO: 1957403 - RNA, 18 nt, Human
uuugcauucuuauucauc

SEQ ID NO: 1957404 - RNA, 13 nt, Human
uuugcauuucaga

SEQ ID NO: 1957405 - RNA, 16 nt, Human
uuuggaaagacuggac

SEQ ID NO: 1957406 - RNA, 16 nt, Human
uuuggaaaguagaaaa

SEQ ID NO: 1957407 - RNA, 13 nt, Human
uuucccuuugcca

SEQ ID NO: 1957408 - RNA, 17 nt, Human
uuuccgccacaucccuc

SEQ ID NO: 1957409 - RNA, 18 nt, Human
uuucccuuuagcuguguu

SEQ ID NO: 1957410 - RNA, 19 nt, Human
uuucccuuuagcuguguua

SEQ ID NO: 1957411 - RNA, 21 nt, Human
uuucccuuuagcuguguuauu

SEQ ID NO: 1957412 - RNA, 15 nt, Human
uuuccguuaaaauac

SEQ ID NO: 1957413 - RNA, 17 nt, Human
uuuccguuaaaauacca

SEQ ID NO: 1957414 - RNA, 13 nt, Human
uuugagugccuua

SEQ ID NO: 1957415 - RNA, 14 nt, Human
uuuccaauauguga

SEQ ID NO: 1957416 - RNA, 15 nt, Human
uuuccaauaugugau

SEQ ID NO: 1957417 - RNA, 17 nt, Human
uuuccaauaugugauuu

SEQ ID NO: 1957418 - RNA, 14 nt, Human
uuuccaauucuccu

SEQ ID NO: 1957419 - RNA, 15 nt, Human
uuuccaauucuccuu

SEQ ID NO: 1957420 - RNA, 17 nt, Human
uuuccaauucuccuuua

SEQ ID NO: 1957421 - RNA, 16 nt, Human
uuugcacucaaaucuu

SEQ ID NO: 1957422 - RNA, 19 nt, Human
uuugcacucaaaucuuaag

SEQ ID NO: 1957423 - RNA, 21 nt, Human
uuugcacucaaaucuuaagaa

SEQ ID NO: 1957424 - RNA, 15 nt, Human
uuugcacucuuguuu

SEQ ID NO: 1957425 - RNA, 23 nt, Human
uuugcacucuuguuucucccgug

SEQ ID NO: 1957426 - RNA, 21 nt, Human
uuugagugccuuacacaaugg

SEQ ID NO: 1957427 - RNA, 23 nt, Human
uuuccguuugauuugucacugcu

SEQ ID NO: 1957428 - RNA, 15 nt, Human
uuuuauaccuguuua

SEQ ID NO: 1957429 - RNA, 16 nt, Human
uuuuauaccuguuuaa

SEQ ID NO: 1957430 - RNA, 17 nt, Human
uuuuauaccuguuuaaa

SEQ ID NO: 1957431 - RNA, 13 nt, Human
uuuuauacauaaa

SEQ ID NO: 1957432 - RNA, 21 nt, Human
uuuuauacauaaacaagacca

SEQ ID NO: 1957433 - RNA, 19 nt, Human
uuuuauagaaaaacaaauc

SEQ ID NO: 1957434 - RNA, 11 nt, Human
uuuuauauuuc

SEQ ID NO: 1957435 - RNA, 15 nt, Human
uuuuauauuucaagu

SEQ ID NO: 1957436 - RNA, 17 nt, Human
uuuucaaaauaaaaaug

SEQ ID NO: 1957437 - RNA, 17 nt, Human
uuuuauuuuuagaauuu

SEQ ID NO: 1957438 - RNA, 21 nt, Human
uuuuauuuuucucaugaugag

SEQ ID NO: 1957439 - RNA, 18 nt, Human
uuuuauuuuuagacagag

SEQ ID NO: 1957440 - RNA, 19 nt, Human
uuuuaucgucacugcuuaa

SEQ ID NO: 1957441 - RNA, 18 nt, Human
uuuuauauuucaaguaca

SEQ ID NO: 1957442 - RNA, 14 nt, Human
uuuuaugaagaaaa

SEQ ID NO: 1957443 - RNA, 15 nt, Human
uuuuacuaauagaca

SEQ ID NO: 1957444 - RNA, 19 nt, Human
uuuuacguccaucucuugu

SEQ ID NO: 1957445 - RNA, 19 nt, Human
uuuuacccuauaucuauaa

SEQ ID NO: 1957446 - RNA, 21 nt, Human
uuuuaaaguaacccuacaaaa

SEQ ID NO: 1957447 - RNA, 19 nt, Human
uuuuacaaaaaagaaaaga

SEQ ID NO: 1957448 - RNA, 18 nt, Human
uuuuacaaaggcuguauu

SEQ ID NO: 1957449 - RNA, 17 nt, Human
uuuuacaauaaaaucuu

SEQ ID NO: 1957450 - RNA, 23 nt, Human
uuuuacaaaggcuguauucagca

SEQ ID NO: 1957451 - RNA, 15 nt, Human
uuuucuucacugucc

SEQ ID NO: 1957452 - RNA, 17 nt, Human
uuuucuuaaccaucuuu

SEQ ID NO: 1957453 - RNA, 13 nt, Human
uuuucuucucccu

SEQ ID NO: 1957454 - RNA, 22 nt, Human
uuuucuuguguguuuauuguca

SEQ ID NO: 1957455 - RNA, 13 nt, Human
uuuucuucaucaa

SEQ ID NO: 1957456 - RNA, 16 nt, Human
uuuucuuucagccaag

SEQ ID NO: 1957457 - RNA, 22 nt, Human
uuuucuuuacaaacaaaagcau

SEQ ID NO: 1957458 - RNA, 23 nt, Human
uuuucuacucgaguuacagacaa

SEQ ID NO: 1957459 - RNA, 22 nt, Human
uuuucuacucgaguuacagaca

SEQ ID NO: 1957460 - RNA, 20 nt, Human
uuuucuacucgaguuacaga

SEQ ID NO: 1957461 - RNA, 13 nt, Human
uuuucuacucgag

SEQ ID NO: 1957462 - RNA, 16 nt, Human
uuuucccucagaaaau

SEQ ID NO: 1957463 - RNA, 15 nt, Human
uuuucccugaaguua

SEQ ID NO: 1957464 - RNA, 21 nt, Human
uuuucccugaaguuaugugua

SEQ ID NO: 1957465 - RNA, 18 nt, Human
uuuuccgcauucuuugua

SEQ ID NO: 1957466 - RNA, 22 nt, Human
uuuucccugaaguuauguguau

SEQ ID NO: 1957467 - RNA, 15 nt, Human
uuuucccaggaaaga

SEQ ID NO: 1957468 - RNA, 22 nt, Human
uuuucccuauuagagaagagau

SEQ ID NO: 1957469 - RNA, 18 nt, Human
uuuucccuauuagagaag

SEQ ID NO: 1957470 - RNA, 17 nt, Human
uuuucacccuucuacuc

SEQ ID NO: 1957471 - RNA, 16 nt, Human
uuuucacauuggaaac

SEQ ID NO: 1957472 - RNA, 23 nt, Human
uuuucaccauucguacauaauac

SEQ ID NO: 1957473 - RNA, 21 nt, Human
uuuucaaaauuguuacaaauu

SEQ ID NO: 1957474 - RNA, 18 nt, Human
uuuucaaauggaguugga

SEQ ID NO: 1957475 - RNA, 15 nt, Human
uuuucaaauguucuc

SEQ ID NO: 1957476 - RNA, 17 nt, Human
uuuucaaccucuagaau

SEQ ID NO: 1957477 - RNA, 15 nt, Human
uuuucacauccuuga

SEQ ID NO: 1957478 - RNA, 18 nt, Human
uuuucacauccuugacuu

SEQ ID NO: 1957479 - RNA, 12 nt, Human
ugcauuaucuag

SEQ ID NO: 1957480 - RNA, 17 nt, Human
ugcauuaucuagauacu

SEQ ID NO: 1957481 - RNA, 21 nt, Human
ugcauuauauuuguaaauuua

SEQ ID NO: 1957482 - RNA, 18 nt, Human
ugcauuaucuagauacug

SEQ ID NO: 1957483 - RNA, 14 nt, Human
ugcauuaaaagaaa

SEQ ID NO: 1957484 - RNA, 15 nt, Human
ugcauuaaaagaaaa

SEQ ID NO: 1957485 - RNA, 16 nt, Human
ugcauuaaaagaaaau

SEQ ID NO: 1957486 - RNA, 17 nt, Human
ugcauuaaaagaaaaua

SEQ ID NO: 1957487 - RNA, 19 nt, Human
ugcauuaaaagaaaauaaa

SEQ ID NO: 1957488 - RNA, 15 nt, Human
ugccaccacgcccgg

SEQ ID NO: 1957489 - RNA, 16 nt, Human
ugccacauuuucuuaa

SEQ ID NO: 1957490 - RNA, 14 nt, Human
ugcauccuccgccu

SEQ ID NO: 1957491 - RNA, 19 nt, Human
ugcagauaaacaguaguga

SEQ ID NO: 1957492 - RNA, 14 nt, Human
ugcagaguauuucu

SEQ ID NO: 1957493 - RNA, 19 nt, Human
ugcagaguauuucuaaagu

SEQ ID NO: 1957494 - RNA, 19 nt, Human
ugcagauacuacugaccag

SEQ ID NO: 1957495 - RNA, 23 nt, Human
ugcagauacuacugaccagacaa

SEQ ID NO: 1957496 - RNA, 14 nt, Human
ugcagaugccuggg

SEQ ID NO: 1957497 - RNA, 17 nt, Human
ugcaugguuuagaaagc

SEQ ID NO: 1957498 - RNA, 15 nt, Human
ugcauccuccgccuc

SEQ ID NO: 1957499 - RNA, 12 nt, Human
ugcauguaauca

SEQ ID NO: 1957500 - RNA, 13 nt, Human
ugcauguaaucaa

SEQ ID NO: 1957501 - RNA, 21 nt, Human
ugcauguaaucaacauggcua

SEQ ID NO: 1957502 - RNA, 15 nt, Human
ugcauguacuaucuu

SEQ ID NO: 1957503 - RNA, 16 nt, Human
ugcauguacuaucuua

SEQ ID NO: 1957504 - RNA, 15 nt, Human
ugcauguuugugauu

SEQ ID NO: 1957505 - RNA, 20 nt, Human
ugccaugaggaacaaggcaa

SEQ ID NO: 1957506 - RNA, 23 nt, Human
ugccaugaggaacaaggcaaggc

SEQ ID NO: 1957507 - RNA, 14 nt, Human
ugccaugugccagg

SEQ ID NO: 1957508 - RNA, 20 nt, Human
ugccaugucagcgcucuggu

SEQ ID NO: 1957509 - RNA, 18 nt, Human
ugccaugucagcgcucug

SEQ ID NO: 1957510 - RNA, 15 nt, Human
ugccaugugccaggu

SEQ ID NO: 1957511 - RNA, 20 nt, Human
ugccaugugcuucugccacc

SEQ ID NO: 1957512 - RNA, 13 nt, Human
ugcccacucccug

SEQ ID NO: 1957513 - RNA, 14 nt, Human
ugcccacuccugcu

SEQ ID NO: 1957514 - RNA, 18 nt, Human
ugcccacuccugcucugc

SEQ ID NO: 1957515 - RNA, 19 nt, Human
ugcccacuccugcucugcu

SEQ ID NO: 1957516 - RNA, 20 nt, Human
ugcccacuccugcucugcuc

SEQ ID NO: 1957517 - RNA, 19 nt, Human
ugcccaccuggccucugca

SEQ ID NO: 1957518 - RNA, 18 nt, Human
ugcccacgcuggagugca

SEQ ID NO: 1957519 - RNA, 12 nt, Human
ugccauguuggc

SEQ ID NO: 1957520 - RNA, 15 nt, Human
ugccauguuggccag

SEQ ID NO: 1957521 - RNA, 20 nt, Human
ugcccaccuggccucugcac

SEQ ID NO: 1957522 - RNA, 16 nt, Human
ugccauguuggccagg

SEQ ID NO: 1957523 - RNA, 17 nt, Human
ugccagguuuuuggucu

SEQ ID NO: 1957524 - RNA, 22 nt, Human
ugccaggugaaggaggcuccag

SEQ ID NO: 1957525 - RNA, 18 nt, Human
ugccaggucccuuucauu

SEQ ID NO: 1957526 - RNA, 22 nt, Human
ugccaggucccuuucauuugcu

SEQ ID NO: 1957527 - RNA, 15 nt, Human
ugccauccagguuca

SEQ ID NO: 1957528 - RNA, 22 nt, Human
ugccaucauguuuacagaggac

SEQ ID NO: 1957529 - RNA, 12 nt, Human
ugccauccaggu

SEQ ID NO: 1957530 - RNA, 19 nt, Human
ugccaggaagccagcaggc

SEQ ID NO: 1957531 - RNA, 18 nt, Human
ugccaggaagccagcagg

SEQ ID NO: 1957532 - RNA, 16 nt, Human
ugccaggaagccagca

SEQ ID NO: 1957533 - RNA, 12 nt, Human
ugccaggaagcc

SEQ ID NO: 1957534 - RNA, 17 nt, Human
ugcccagaaugaggcug

SEQ ID NO: 1957535 - RNA, 18 nt, Human
ugcccagaaugaggcugc

SEQ ID NO: 1957536 - RNA, 14 nt, Human
ugcccagaauacug

SEQ ID NO: 1957537 - RNA, 19 nt, Human
ugcccagaaugaggcugcu

SEQ ID NO: 1957538 - RNA, 19 nt, Human
ugcccagaauacugaugga

SEQ ID NO: 1957539 - RNA, 16 nt, Human
ugcccagaauacugau

SEQ ID NO: 1957540 - RNA, 18 nt, Human
ugcccagaauacugaugg

SEQ ID NO: 1957541 - RNA, 18 nt, Human
ugcccggggaaaggcaag

SEQ ID NO: 1957542 - RNA, 21 nt, Human
ugcccggggaaaggcaagguc

SEQ ID NO: 1957543 - RNA, 23 nt, Human
ugcccugcccaccuggccucugc

SEQ ID NO: 1957544 - RNA, 22 nt, Human
ugcccugcccaccuggccucug

SEQ ID NO: 1957545 - RNA, 17 nt, Human
ugcccuaaaguguauuu

SEQ ID NO: 1957546 - RNA, 19 nt, Human
ugcccuaaaguguauuuuu

SEQ ID NO: 1957547 - RNA, 21 nt, Human
ugcccugcccaccuggccucu

SEQ ID NO: 1957548 - RNA, 19 nt, Human
ugcccugcgggucacagga

SEQ ID NO: 1957549 - RNA, 18 nt, Human
ugcccugcugagucccag

SEQ ID NO: 1957550 - RNA, 22 nt, Human
ugcccugcugagucccaggcug

SEQ ID NO: 1957551 - RNA, 23 nt, Human
ugcccugcugagucccaggcuga

SEQ ID NO: 1957552 - RNA, 19 nt, Human
ugccgucuaccugaggggc

SEQ ID NO: 1957553 - RNA, 17 nt, Human
ugccgucuaccugaggg

SEQ ID NO: 1957554 - RNA, 21 nt, Human
ugccggucuugacagcucagu

SEQ ID NO: 1957555 - RNA, 16 nt, Human
ugccgucuaccugagg

SEQ ID NO: 1957556 - RNA, 15 nt, Human
ugccgucuaccugag

SEQ ID NO: 1957557 - RNA, 15 nt, Human
ugcccugguuuccug

SEQ ID NO: 1957558 - RNA, 20 nt, Human
ugcccuggugcugccacacu

SEQ ID NO: 1957559 - RNA, 18 nt, Human
ugcccuggugcugccaca

SEQ ID NO: 1957560 - RNA, 21 nt, Human
ugcccuggugcugccacacuu

SEQ ID NO: 1957561 - RNA, 18 nt, Human
ugcccuggauccaucagg

SEQ ID NO: 1957562 - RNA, 14 nt, Human
ugcccugcuguuua

SEQ ID NO: 1957563 - RNA, 13 nt, Human
ugcccugcuguuu

SEQ ID NO: 1957564 - RNA, 21 nt, Human
ugccucuucucuacucuaggg

SEQ ID NO: 1957565 - RNA, 13 nt, Human
ugccucuuccucc

SEQ ID NO: 1957566 - RNA, 21 nt, Human
ugccucuggcucuacacauau

SEQ ID NO: 1957567 - RNA, 13 nt, Human
ugccugcccaggc

SEQ ID NO: 1957568 - RNA, 17 nt, Human
ugccugguggcagcugc

SEQ ID NO: 1957569 - RNA, 18 nt, Human
ugccugguggcagcugcg

SEQ ID NO: 1957570 - RNA, 17 nt, Human
ugccugguccucacacu

SEQ ID NO: 1957571 - RNA, 19 nt, Human
ugccugguggcagcugcgg

SEQ ID NO: 1957572 - RNA, 13 nt, Human
ugccucugggacu

SEQ ID NO: 1957573 - RNA, 20 nt, Human
ugccucuggcucuacacaua

SEQ ID NO: 1957574 - RNA, 18 nt, Human
ugccucugccugucuccc

SEQ ID NO: 1957575 - RNA, 13 nt, Human
ugccucugccugu

SEQ ID NO: 1957576 - RNA, 14 nt, Human
ugccucugccuguc

SEQ ID NO: 1957577 - RNA, 20 nt, Human
ugccuccuuugugaggaagc

SEQ ID NO: 1957578 - RNA, 21 nt, Human
ugccuccuuugugaggaagcc

SEQ ID NO: 1957579 - RNA, 22 nt, Human
ugccuccuuugugaggaagccg

SEQ ID NO: 1957580 - RNA, 22 nt, Human
ugccuccgcgugaucaaagcca

SEQ ID NO: 1957581 - RNA, 22 nt, Human
ugcaacucugaaggguaauuau

SEQ ID NO: 1957582 - RNA, 22 nt, Human
ugcaaccugauugugucucuug

SEQ ID NO: 1957583 - RNA, 18 nt, Human
ugcaaccuucgccaccug

SEQ ID NO: 1957584 - RNA, 21 nt, Human
ugcaaccuucgccaccugggu

SEQ ID NO: 1957585 - RNA, 18 nt, Human
ugcaacuuuguauaaaag

SEQ ID NO: 1957586 - RNA, 18 nt, Human
ugcaacuuguaaaugugg

SEQ ID NO: 1957587 - RNA, 16 nt, Human
ugcaacuuguaaaugu

SEQ ID NO: 1957588 - RNA, 20 nt, Human
ugcaaccugauugugucucu

SEQ ID NO: 1957589 - RNA, 19 nt, Human
ugcaaccugauugugucuc

SEQ ID NO: 1957590 - RNA, 18 nt, Human
ugcaaccuccgccucuug

SEQ ID NO: 1957591 - RNA, 20 nt, Human
ugcaaccuccgccucuuggg

SEQ ID NO: 1957592 - RNA, 21 nt, Human
ugcaaccuccgccucuugggu

SEQ ID NO: 1957593 - RNA, 16 nt, Human
ugcaaccauuugaaac

SEQ ID NO: 1957594 - RNA, 13 nt, Human
ugcaaccuccgcc

SEQ ID NO: 1957595 - RNA, 14 nt, Human
ugcaaccuccgccu

SEQ ID NO: 1957596 - RNA, 19 nt, Human
ugcaacaggcugggcuuca

SEQ ID NO: 1957597 - RNA, 20 nt, Human
ugcaacaggcugggcuucag

SEQ ID NO: 1957598 - RNA, 13 nt, Human
ugcaaacauugga

SEQ ID NO: 1957599 - RNA, 20 nt, Human
ugcaaccaaacucccaucag

SEQ ID NO: 1957600 - RNA, 14 nt, Human
ugcaacaggcuggg

SEQ ID NO: 1957601 - RNA, 15 nt, Human
ugcaacaggcugggc

SEQ ID NO: 1957602 - RNA, 16 nt, Human
ugcaacaggcugggcu

SEQ ID NO: 1957603 - RNA, 17 nt, Human
ugcaacaggcugggcuu

SEQ ID NO: 1957604 - RNA, 23 nt, Human
ugcaaaauacaugaugauuucag

SEQ ID NO: 1957605 - RNA, 14 nt, Human
ugcaaaauuccuga

SEQ ID NO: 1957606 - RNA, 16 nt, Human
ugcaaacauuggaaga

SEQ ID NO: 1957607 - RNA, 12 nt, Human
ugaugugacauu

SEQ ID NO: 1957608 - RNA, 13 nt, Human
ugaugugacauuu

SEQ ID NO: 1957609 - RNA, 19 nt, Human
ugaugugcucaucagaaac

SEQ ID NO: 1957610 - RNA, 18 nt, Human
ugaugugcucaucagaaa

SEQ ID NO: 1957611 - RNA, 20 nt, Human
ugaugugccuaaauaaguua

SEQ ID NO: 1957612 - RNA, 16 nt, Human
ugaugugccugcuuca

SEQ ID NO: 1957613 - RNA, 14 nt, Human
ugaugugacauuug

SEQ ID NO: 1957614 - RNA, 15 nt, Human
ugaugugacauuugu

SEQ ID NO: 1957615 - RNA, 16 nt, Human
ugaugugacauuuguc

SEQ ID NO: 1957616 - RNA, 18 nt, Human
ugaugugacauuugucau

SEQ ID NO: 1957617 - RNA, 13 nt, Human
ugauuuuaaaugu

SEQ ID NO: 1957618 - RNA, 15 nt, Human
ugauuuuaaaugugu

SEQ ID NO: 1957619 - RNA, 17 nt, Human
ugauuuuaaauguguga

SEQ ID NO: 1957620 - RNA, 13 nt, Human
ugauuuucauugc

SEQ ID NO: 1957621 - RNA, 12 nt, Human
ugauuuuauucu

SEQ ID NO: 1957622 - RNA, 13 nt, Human
ugauuuuauucuu

SEQ ID NO: 1957623 - RNA, 14 nt, Human
ugauuuuauucuug

SEQ ID NO: 1957624 - RNA, 15 nt, Human
ugauuuuauucuuga

SEQ ID NO: 1957625 - RNA, 15 nt, Human
ugauuuucauugcug

SEQ ID NO: 1957626 - RNA, 16 nt, Human
ugauuuuauucuugau

SEQ ID NO: 1957627 - RNA, 17 nt, Human
ugauuuuccaucuaaaa

SEQ ID NO: 1957628 - RNA, 19 nt, Human
ugauuuuccaucuaaaaau

SEQ ID NO: 1957629 - RNA, 22 nt, Human
ugauuuuccaucuaaaaauaua

SEQ ID NO: 1957630 - RNA, 20 nt, Human
ugauuuuuuuuuccuucagu

SEQ ID NO: 1957631 - RNA, 19 nt, Human
ugauuuuuuuuuccuucag

SEQ ID NO: 1957632 - RNA, 17 nt, Human
ugauuuuuuuuuccuuc

SEQ ID NO: 1957633 - RNA, 16 nt, Human
ugauuuuuuuuuccuu

SEQ ID NO: 1957634 - RNA, 22 nt, Human
ugauuuuuuuucccauuuagaa

SEQ ID NO: 1957635 - RNA, 23 nt, Human
ugauuuuuuuucccauuuagaau

SEQ ID NO: 1957636 - RNA, 23 nt, Human
ugauuuuugagcccuuguuucag

SEQ ID NO: 1957637 - RNA, 21 nt, Human
ugauuuuugagcccuuguuuc

SEQ ID NO: 1957638 - RNA, 18 nt, Human
ugcaaaaagcuucugugg

SEQ ID NO: 1957639 - RNA, 21 nt, Human
ugcaaaaagcuagucaacagu

SEQ ID NO: 1957640 - RNA, 16 nt, Human
ugcaaaaagcuucugu

SEQ ID NO: 1957641 - RNA, 21 nt, Human
ugcaaaaaaucuuaauacugu

SEQ ID NO: 1957642 - RNA, 14 nt, Human
ugcaaaaaaucuua

SEQ ID NO: 1957643 - RNA, 16 nt, Human
ugcaaaaaaucuuaau

SEQ ID NO: 1957644 - RNA, 19 nt, Human
ugcaaaaaaucuuaauacu

SEQ ID NO: 1957645 - RNA, 17 nt, Human
ugcaaaaauccaaauau

SEQ ID NO: 1957646 - RNA, 18 nt, Human
ugcaaaaauccaaauauu

SEQ ID NO: 1957647 - RNA, 21 nt, Human
ugcaaaaauccaaauauuguu

SEQ ID NO: 1957648 - RNA, 22 nt, Human
ugcaaaaauccaaauauuguua

SEQ ID NO: 1957649 - RNA, 23 nt, Human
ugauuuuuuuuuccuucagugcc

SEQ ID NO: 1957650 - RNA, 22 nt, Human
ugauuuuuuuuuccuucagugc

SEQ ID NO: 1957651 - RNA, 16 nt, Human
ugauuuuuuuuuuuca

SEQ ID NO: 1957652 - RNA, 20 nt, Human
ugauuuuuuuuuuuaaucua

SEQ ID NO: 1957653 - RNA, 19 nt, Human
ugcacaaacagaggccgcc

SEQ ID NO: 1957654 - RNA, 17 nt, Human
ugcacaaacagaggccg

SEQ ID NO: 1957655 - RNA, 22 nt, Human
ugcaauuuuauaaggacuuccu

SEQ ID NO: 1957656 - RNA, 22 nt, Human
ugcaauuuuucuuucuuuuguu

SEQ ID NO: 1957657 - RNA, 20 nt, Human
ugcacaaacagaggccgcca

SEQ ID NO: 1957658 - RNA, 17 nt, Human
ugcacagaguuguuaca

SEQ ID NO: 1957659 - RNA, 15 nt, Human
ugcacaaagcccuuc

SEQ ID NO: 1957660 - RNA, 17 nt, Human
ugcacaaagcccuucca

SEQ ID NO: 1957661 - RNA, 18 nt, Human
ugcacagaguuguuacau

SEQ ID NO: 1957662 - RNA, 19 nt, Human
ugcacagaguuguuacauu

SEQ ID NO: 1957663 - RNA, 16 nt, Human
ugcacaaacagaggcc

SEQ ID NO: 1957664 - RNA, 15 nt, Human
ugcacaaacagaggc

SEQ ID NO: 1957665 - RNA, 16 nt, Human
ugcaaugacucaggac

SEQ ID NO: 1957666 - RNA, 22 nt, Human
ugcaauguagaggggaaaagag

SEQ ID NO: 1957667 - RNA, 13 nt, Human
ugcaauggcagcc

SEQ ID NO: 1957668 - RNA, 14 nt, Human
ugcaauggcagccu

SEQ ID NO: 1957669 - RNA, 15 nt, Human
ugcaauggcagccuu

SEQ ID NO: 1957670 - RNA, 16 nt, Human
ugcaauggcagccuug

SEQ ID NO: 1957671 - RNA, 23 nt, Human
ugcaaugaccuuucaauaggaaa

SEQ ID NO: 1957672 - RNA, 22 nt, Human
ugcaaugaccuuucaauaggaa

SEQ ID NO: 1957673 - RNA, 19 nt, Human
ugcaaugaccuuucaauag

SEQ ID NO: 1957674 - RNA, 17 nt, Human
ugcaaugaccuuucaau

SEQ ID NO: 1957675 - RNA, 16 nt, Human
ugcaaugaccuuucaa

SEQ ID NO: 1957676 - RNA, 13 nt, Human
ugcaaugaccuuu

SEQ ID NO: 1957677 - RNA, 16 nt, Human
ugcacugaaguuugau

SEQ ID NO: 1957678 - RNA, 19 nt, Human
ugcacugaaguuugauaaa

SEQ ID NO: 1957679 - RNA, 24 nt, Human
ugcacugaaguuugauaaauagug

SEQ ID NO: 1957680 - RNA, 23 nt, Human
ugcacucuuguuucucccgugcu

SEQ ID NO: 1957681 - RNA, 10 nt, Human
ugcacugaag

SEQ ID NO: 1957682 - RNA, 13 nt, Human
ugcacugaaguuu

SEQ ID NO: 1957683 - RNA, 12 nt, Human
ugcacucuucua

SEQ ID NO: 1957684 - RNA, 16 nt, Human
ugcacucucuuggcug

SEQ ID NO: 1957685 - RNA, 18 nt, Human
ugcacugacauuguuggc

SEQ ID NO: 1957686 - RNA, 21 nt, Human
ugcacugacauuguuggccaa

SEQ ID NO: 1957687 - RNA, 19 nt, Human
ugcagagguccacaacaca

SEQ ID NO: 1957688 - RNA, 20 nt, Human
ugcaccggcuggccuggccc

SEQ ID NO: 1957689 - RNA, 19 nt, Human
ugcaccggcuggccuggcc

SEQ ID NO: 1957690 - RNA, 18 nt, Human
ugcaccggcuggccuggc

SEQ ID NO: 1957691 - RNA, 16 nt, Human
ugcacagugcaucuca

SEQ ID NO: 1957692 - RNA, 17 nt, Human
ugcacagugcaucucag

SEQ ID NO: 1957693 - RNA, 21 nt, Human
ugcacaaauacggauccugca

SEQ ID NO: 1957694 - RNA, 20 nt, Human
ugcacagaguuguuacauuu

SEQ ID NO: 1957695 - RNA, 15 nt, Human
ugcacagugcaucuc

SEQ ID NO: 1957696 - RNA, 21 nt, Human
ugcaccggcuggccuggcccc

SEQ ID NO: 1957697 - RNA, 17 nt, Human
ugcaccuggaauauaua

SEQ ID NO: 1957698 - RNA, 20 nt, Human
ugcaccuggaauauauaacc

SEQ ID NO: 1957699 - RNA, 22 nt, Human
ugcaccuggaauauauaaccag

SEQ ID NO: 1957700 - RNA, 13 nt, Human
ugcaccugggaca

SEQ ID NO: 1957701 - RNA, 16 nt, Human
ugacgccaucccagcc

SEQ ID NO: 1957702 - RNA, 15 nt, Human
ugacgccaucccagc

SEQ ID NO: 1957703 - RNA, 14 nt, Human
ugacgccaucccag

SEQ ID NO: 1957704 - RNA, 13 nt, Human
ugacgccauccca

SEQ ID NO: 1957705 - RNA, 22 nt, Human
ugaccuuucaauaggaaaaacu

SEQ ID NO: 1957706 - RNA, 18 nt, Human
ugaccuuucaauaggaaa

SEQ ID NO: 1957707 - RNA, 20 nt, Human
ugacgccaucccagccccaa

SEQ ID NO: 1957708 - RNA, 19 nt, Human
ugacgccaucccagcccca

SEQ ID NO: 1957709 - RNA, 18 nt, Human
ugacgccaucccagcccc

SEQ ID NO: 1957710 - RNA, 17 nt, Human
ugacgccaucccagccc

SEQ ID NO: 1957711 - RNA, 12 nt, Human
ugacucugcucu

SEQ ID NO: 1957712 - RNA, 16 nt, Human
ugacucugcucuugca

SEQ ID NO: 1957713 - RNA, 13 nt, Human
ugacugaauuucu

SEQ ID NO: 1957714 - RNA, 22 nt, Human
ugacguacaaguaguucuguau

SEQ ID NO: 1957715 - RNA, 23 nt, Human
ugacguacaaguaguucuguauu

SEQ ID NO: 1957716 - RNA, 12 nt, Human
ugacgguuccua

SEQ ID NO: 1957717 - RNA, 18 nt, Human
ugacgguuccuacacagg

SEQ ID NO: 1957718 - RNA, 20 nt, Human
ugacgguuccuacacaggac

SEQ ID NO: 1957719 - RNA, 23 nt, Human
ugacgguuccuacacaggacagg

SEQ ID NO: 1957720 - RNA, 18 nt, Human
ugacguacaaguaguucu

SEQ ID NO: 1957721 - RNA, 19 nt, Human
ugacguacaaguaguucug

SEQ ID NO: 1957722 - RNA, 21 nt, Human
ugacguacaaguaguucugua

SEQ ID NO: 1957723 - RNA, 14 nt, Human
ugacugaauuucuu

SEQ ID NO: 1957724 - RNA, 15 nt, Human
ugacugaauuucuuu

SEQ ID NO: 1957725 - RNA, 19 nt, Human
ugacugaggcaguuugagg

SEQ ID NO: 1957726 - RNA, 13 nt, Human
ugacugaggcagu

SEQ ID NO: 1957727 - RNA, 18 nt, Human
ugacugaggcaguuugag

SEQ ID NO: 1957728 - RNA, 13 nt, Human
ugaccucugcagc

SEQ ID NO: 1957729 - RNA, 16 nt, Human
ugaccucugcagcaau

SEQ ID NO: 1957730 - RNA, 22 nt, Human
ugaccucaggugauccacccac

SEQ ID NO: 1957731 - RNA, 18 nt, Human
ugaccucaccuaggaagu

SEQ ID NO: 1957732 - RNA, 14 nt, Human
ugaccucacgugca

SEQ ID NO: 1957733 - RNA, 16 nt, Human
ugaccucacucagaag

SEQ ID NO: 1957734 - RNA, 16 nt, Human
ugaccuuucaauagga

SEQ ID NO: 1957735 - RNA, 15 nt, Human
ugaccuuucaauagg

SEQ ID NO: 1957736 - RNA, 14 nt, Human
ugaccuuucaauag

SEQ ID NO: 1957737 - RNA, 19 nt, Human
ugaccucuagcccugcccg

SEQ ID NO: 1957738 - RNA, 20 nt, Human
ugaccucuagcccugcccgg

SEQ ID NO: 1957739 - RNA, 18 nt, Human
ugaccucugcagcaauaa

SEQ ID NO: 1957740 - RNA, 21 nt, Human
ugaccucugcagcaauaaagc

SEQ ID NO: 1957741 - RNA, 23 nt, Human
ugaccucugcagcaauaaagcag

SEQ ID NO: 1957742 - RNA, 12 nt, Human
ugaccucugccu

SEQ ID NO: 1957743 - RNA, 22 nt, Human
ugaccauucuccaccugccagg

SEQ ID NO: 1957744 - RNA, 21 nt, Human
ugaccauucuccaccugccag

SEQ ID NO: 1957745 - RNA, 20 nt, Human
ugaccauucuccaccugcca

SEQ ID NO: 1957746 - RNA, 17 nt, Human
ucuugaauuguaaggaa

SEQ ID NO: 1957747 - RNA, 22 nt, Human
ucuugaauggcaauguuuugcu

SEQ ID NO: 1957748 - RNA, 23 nt, Human
ucuugaauggcaauguuuugcuu

SEQ ID NO: 1957749 - RNA, 16 nt, Human
ucuugaauaauguaag

SEQ ID NO: 1957750 - RNA, 16 nt, Human
ucuugaaccagaacca

SEQ ID NO: 1957751 - RNA, 15 nt, Human
ucuugaacuccuggc

SEQ ID NO: 1957752 - RNA, 22 nt, Human
ucuugaauguugaagaacucau

SEQ ID NO: 1957753 - RNA, 14 nt, Human
ugacccugcacccu

SEQ ID NO: 1957754 - RNA, 17 nt, Human
ugaccucaauuucaauu

SEQ ID NO: 1957755 - RNA, 23 nt, Human
ugaccucaauuucaauuuugucu

SEQ ID NO: 1957756 - RNA, 21 nt, Human
ugaccucaaaugaugugccug

SEQ ID NO: 1957757 - RNA, 14 nt, Human
ugagacagcucugc

SEQ ID NO: 1957758 - RNA, 16 nt, Human
ugagacagcucugcau

SEQ ID NO: 1957759 - RNA, 12 nt, Human
ugagacccuguc

SEQ ID NO: 1957760 - RNA, 13 nt, Human
ugagaaaucuaaa

SEQ ID NO: 1957761 - RNA, 17 nt, Human
ugagaaaucuaaaaaac

SEQ ID NO: 1957762 - RNA, 16 nt, Human
ugacuguacuccuccc

SEQ ID NO: 1957763 - RNA, 17 nt, Human
ugacuguacuccuccca

SEQ ID NO: 1957764 - RNA, 18 nt, Human
ugacuguacuccucccag

SEQ ID NO: 1957765 - RNA, 22 nt, Human
ugacuguacuccucccaggcgc

SEQ ID NO: 1957766 - RNA, 22 nt, Human
ugagaggcauccaguaucuuga

SEQ ID NO: 1957767 - RNA, 21 nt, Human
ugagacucuaggguccagugg

SEQ ID NO: 1957768 - RNA, 22 nt, Human
ugagacucuaggguccagugga

SEQ ID NO: 1957769 - RNA, 23 nt, Human
ugagaggcauccaguaucuugaa

SEQ ID NO: 1957770 - RNA, 12 nt, Human
ugagacucuguc

SEQ ID NO: 1957771 - RNA, 20 nt, Human
ugagaccgugaagauacuuu

SEQ ID NO: 1957772 - RNA, 23 nt, Human
ugagaccgugaagauacuuugua

SEQ ID NO: 1957773 - RNA, 13 nt, Human
ugagacucugucu

SEQ ID NO: 1957774 - RNA, 14 nt, Human
ugagacucugucuc

SEQ ID NO: 1957775 - RNA, 17 nt, Human
ugagaugagaggggaga

SEQ ID NO: 1957776 - RNA, 12 nt, Human
ugagaucuaaaa

SEQ ID NO: 1957777 - RNA, 15 nt, Human
ugagaucuaaaaaua

SEQ ID NO: 1957778 - RNA, 16 nt, Human
ugagaucuaaaaauaa

SEQ ID NO: 1957779 - RNA, 22 nt, Human
ugagaucuaaaaauaacuguaa

SEQ ID NO: 1957780 - RNA, 23 nt, Human
ugagaucuaaaaauaacuguaau

SEQ ID NO: 1957781 - RNA, 14 nt, Human
ugagaggggagagc

SEQ ID NO: 1957782 - RNA, 19 nt, Human
ugagaggggagagcugaac

SEQ ID NO: 1957783 - RNA, 21 nt, Human
ugagaggggagagcugaacag

SEQ ID NO: 1957784 - RNA, 17 nt, Human
ugagaggggaggccaag

SEQ ID NO: 1957785 - RNA, 17 nt, Human
ugagaguagagucacug

SEQ ID NO: 1957786 - RNA, 12 nt, Human
ugagaggggaag

SEQ ID NO: 1957787 - RNA, 16 nt, Human
ugagaggggaagcggc

SEQ ID NO: 1957788 - RNA, 13 nt, Human
ugagaggggagag

SEQ ID NO: 1957789 - RNA, 19 nt, Human
ugagaggggaacagacugg

SEQ ID NO: 1957790 - RNA, 15 nt, Human
ugagcaucaggccag

SEQ ID NO: 1957791 - RNA, 14 nt, Human
ugagcaucaggcca

SEQ ID NO: 1957792 - RNA, 12 nt, Human
ugagcccacugu

SEQ ID NO: 1957793 - RNA, 19 nt, Human
ugagcccacugugcguggg

SEQ ID NO: 1957794 - RNA, 13 nt, Human
ugagccccaaaag

SEQ ID NO: 1957795 - RNA, 21 nt, Human
ugagcccauguggagucagcc

SEQ ID NO: 1957796 - RNA, 22 nt, Human
ugagcccauguggagucagccu

SEQ ID NO: 1957797 - RNA, 13 nt, Human
ugagcaucaggcc

SEQ ID NO: 1957798 - RNA, 14 nt, Human
ugagaugcuagaac

SEQ ID NO: 1957799 - RNA, 16 nt, Human
ugagaugcuagaacuc

SEQ ID NO: 1957800 - RNA, 20 nt, Human
ugagaugcuagaacucccuu

SEQ ID NO: 1957801 - RNA, 13 nt, Human
ugagccucagcau

SEQ ID NO: 1957802 - RNA, 15 nt, Human
ugagccucagcaucc

SEQ ID NO: 1957803 - RNA, 13 nt, Human
ugagccuaaaaau

SEQ ID NO: 1957804 - RNA, 14 nt, Human
ugagccuaaaaaua

SEQ ID NO: 1957805 - RNA, 16 nt, Human
ugagccuaaaaauaaa

SEQ ID NO: 1957806 - RNA, 18 nt, Human
ugagccuaaaaauaaagc

SEQ ID NO: 1957807 - RNA, 20 nt, Human
ugagccuaaaaauaaagcac

SEQ ID NO: 1957808 - RNA, 20 nt, Human
ugagcucccacuucugccag

SEQ ID NO: 1957809 - RNA, 21 nt, Human
ugagcucccacuucugccaga

SEQ ID NO: 1957810 - RNA, 19 nt, Human
ugagcucccacuucugcca

SEQ ID NO: 1957811 - RNA, 15 nt, Human
ugauagcauaugaca

SEQ ID NO: 1957812 - RNA, 23 nt, Human
ugauagcauaugacaaauguuuc

SEQ ID NO: 1957813 - RNA, 17 nt, Human
ugauaaauuugacuguu

SEQ ID NO: 1957814 - RNA, 14 nt, Human
ugauagcauuguaa

SEQ ID NO: 1957815 - RNA, 16 nt, Human
ugauagcauuguaagc

SEQ ID NO: 1957816 - RNA, 21 nt, Human
ugauagccccucuccccgcag

SEQ ID NO: 1957817 - RNA, 23 nt, Human
ugauagcacagacccugcccugu

SEQ ID NO: 1957818 - RNA, 22 nt, Human
ugauagcacagacccugcccug

SEQ ID NO: 1957819 - RNA, 22 nt, Human
ugauagguuauuuugauguaaa

SEQ ID NO: 1957820 - RNA, 18 nt, Human
ugauagguauaaguggug

SEQ ID NO: 1957821 - RNA, 21 nt, Human
ugauagcacagacccugcccu

SEQ ID NO: 1957822 - RNA, 20 nt, Human
ugauagcacagacccugccc

SEQ ID NO: 1957823 - RNA, 18 nt, Human
ugauagcacagacccugc

SEQ ID NO: 1957824 - RNA, 17 nt, Human
ugauagcacagacccug

SEQ ID NO: 1957825 - RNA, 16 nt, Human
ugauagcacagacccu

SEQ ID NO: 1957826 - RNA, 15 nt, Human
ugauagcacagaccc

SEQ ID NO: 1957827 - RNA, 21 nt, Human
ugauaaauauucacacuugaa

SEQ ID NO: 1957828 - RNA, 17 nt, Human
ugauaaauaguguuauu

SEQ ID NO: 1957829 - RNA, 19 nt, Human
ugauaaauaguguuauuga

SEQ ID NO: 1957830 - RNA, 14 nt, Human
ugauaaauaguguu

SEQ ID NO: 1957831 - RNA, 23 nt, Human
ugaguugauagcacagacccugc

SEQ ID NO: 1957832 - RNA, 21 nt, Human
ugaguugauagcacagacccu

SEQ ID NO: 1957833 - RNA, 15 nt, Human
ugagucgaggacagg

SEQ ID NO: 1957834 - RNA, 16 nt, Human
ugagucgaggacaggg

SEQ ID NO: 1957835 - RNA, 19 nt, Human
ugaguugauucagcucugc

SEQ ID NO: 1957836 - RNA, 16 nt, Human
ugaguugauucagcuc

SEQ ID NO: 1957837 - RNA, 14 nt, Human
ugaguuggcuggga

SEQ ID NO: 1957838 - RNA, 16 nt, Human
ugaguuggcugggaau

SEQ ID NO: 1957839 - RNA, 18 nt, Human
ugagucgaggacagggag

SEQ ID NO: 1957840 - RNA, 17 nt, Human
ugaguuggcugggaaua

SEQ ID NO: 1957841 - RNA, 14 nt, Human
ugaggagaaugaaa

SEQ ID NO: 1957842 - RNA, 22 nt, Human
ugaguuguuaccccaagcgccc

SEQ ID NO: 1957843 - RNA, 14 nt, Human
ugaguuguuuuugu

SEQ ID NO: 1957844 - RNA, 15 nt, Human
ugaguuguuuuugua

SEQ ID NO: 1957845 - RNA, 16 nt, Human
ugaguuguuuuuguau

SEQ ID NO: 1957846 - RNA, 17 nt, Human
ugaguuguuuuuguaua

SEQ ID NO: 1957847 - RNA, 18 nt, Human
ugaguuguuuuuguauau

SEQ ID NO: 1957848 - RNA, 20 nt, Human
ugaguuguuuuuguauauug

SEQ ID NO: 1957849 - RNA, 12 nt, Human
ugauaaaaucau

SEQ ID NO: 1957850 - RNA, 13 nt, Human
ugauaaaaucaua

SEQ ID NO: 1957851 - RNA, 20 nt, Human
ugaggucuguucuuuccaaa

SEQ ID NO: 1957852 - RNA, 14 nt, Human
ugaggucuguucuu

SEQ ID NO: 1957853 - RNA, 15 nt, Human
ugaggucuguucuuu

SEQ ID NO: 1957854 - RNA, 16 nt, Human
ugaggcugcuuuccaa

SEQ ID NO: 1957855 - RNA, 20 nt, Human
ugaggcugcuuuccaaagcc

SEQ ID NO: 1957856 - RNA, 23 nt, Human
ugaggcugcuuuccaaagccaau

SEQ ID NO: 1957857 - RNA, 11 nt, Human
ugaggcugggc

SEQ ID NO: 1957858 - RNA, 23 nt, Human
ugaggacuuaaaauauuccugca

SEQ ID NO: 1957859 - RNA, 19 nt, Human
ugagguggaagagggcugc

SEQ ID NO: 1957860 - RNA, 15 nt, Human
ugaggugcuauguuc

SEQ ID NO: 1957861 - RNA, 16 nt, Human
ugaggugcuauguucu

SEQ ID NO: 1957862 - RNA, 21 nt, Human
ugaguccccuguuuguuucug

SEQ ID NO: 1957863 - RNA, 19 nt, Human
ugagguuucaaaccucccu

SEQ ID NO: 1957864 - RNA, 22 nt, Human
ugaguccuggcaugggaaugaa

SEQ ID NO: 1957865 - RNA, 19 nt, Human
ugaguccuggcaugggaau

SEQ ID NO: 1957866 - RNA, 14 nt, Human
ugagucgaggacag

SEQ ID NO: 1957867 - RNA, 23 nt, Human
ugaguccuccagaacucuuccuc

SEQ ID NO: 1957868 - RNA, 18 nt, Human
ugaguccuggcaugggaa

SEQ ID NO: 1957869 - RNA, 11 nt, Human
ugaguccuggc

SEQ ID NO: 1957870 - RNA, 12 nt, Human
ugaguccuccag

SEQ ID NO: 1957871 - RNA, 14 nt, Human
ugaguccuccagaa

SEQ ID NO: 1957872 - RNA, 15 nt, Human
ugaguccuccagaac

SEQ ID NO: 1957873 - RNA, 16 nt, Human
ugaguccuccagaacu

SEQ ID NO: 1957874 - RNA, 17 nt, Human
ugaguccuccagaacuc

SEQ ID NO: 1957875 - RNA, 22 nt, Human
ugaugaaaagcuuuguuuguuc

SEQ ID NO: 1957876 - RNA, 23 nt, Human
ugaugaaaagcuuuguuuguucu

SEQ ID NO: 1957877 - RNA, 14 nt, Human
ugaugaaaagcuuu

SEQ ID NO: 1957878 - RNA, 16 nt, Human
ugaugaaaagcuuugu

SEQ ID NO: 1957879 - RNA, 21 nt, Human
ugaucuuugcagacaggcaag

SEQ ID NO: 1957880 - RNA, 23 nt, Human
ugaucuuugcagacaggcaagca

SEQ ID NO: 1957881 - RNA, 21 nt, Human
ugaucugaugcaagcaagaaa

SEQ ID NO: 1957882 - RNA, 19 nt, Human
ugaucuuugcagacaggca

SEQ ID NO: 1957883 - RNA, 20 nt, Human
ugaucuuugcagacaggcaa

SEQ ID NO: 1957884 - RNA, 15 nt, Human
ugaugaaaauauuua

SEQ ID NO: 1957885 - RNA, 14 nt, Human
ugaugccaugagga

SEQ ID NO: 1957886 - RNA, 14 nt, Human
ugaugaaaauauuu

SEQ ID NO: 1957887 - RNA, 22 nt, Human
ugaugaucuuugcagacaggca

SEQ ID NO: 1957888 - RNA, 23 nt, Human
ugaugaucuuugcagacaggcaa

SEQ ID NO: 1957889 - RNA, 20 nt, Human
ugaugaugaaaugaggucag

SEQ ID NO: 1957890 - RNA, 21 nt, Human
ugaugguuguacauauaagug

SEQ ID NO: 1957891 - RNA, 18 nt, Human
ugaugguuuccaauuuca

SEQ ID NO: 1957892 - RNA, 13 nt, Human
ugauguacaugua

SEQ ID NO: 1957893 - RNA, 12 nt, Human
ugauguacugua

SEQ ID NO: 1957894 - RNA, 22 nt, Human
ugaugcuucuucagagacuccu

SEQ ID NO: 1957895 - RNA, 21 nt, Human
ugaugcuucuucagagacucc

SEQ ID NO: 1957896 - RNA, 19 nt, Human
ugaugcuucuucagagacu

SEQ ID NO: 1957897 - RNA, 18 nt, Human
ugaugcuggaacucuuga

SEQ ID NO: 1957898 - RNA, 22 nt, Human
ugaugcuggaacucuugacagc

SEQ ID NO: 1957899 - RNA, 22 nt, Human
ugaugcucuuucccacccagcc

SEQ ID NO: 1957900 - RNA, 15 nt, Human
ugaugcucuuuccca

SEQ ID NO: 1957901 - RNA, 19 nt, Human
ugaugcucuuucccaccca

SEQ ID NO: 1957902 - RNA, 19 nt, Human
ugaugcuaucaguuuuaua

SEQ ID NO: 1957903 - RNA, 20 nt, Human
ugaucugaugcaagcaagaa

SEQ ID NO: 1957904 - RNA, 21 nt, Human
ugaucuaggaagacuuuggaa

SEQ ID NO: 1957905 - RNA, 19 nt, Human
ugaucuaggaagacuuugg

SEQ ID NO: 1957906 - RNA, 21 nt, Human
ugauccacccaccucagccuc

SEQ ID NO: 1957907 - RNA, 22 nt, Human
ugauccacccaccucagccucc

SEQ ID NO: 1957908 - RNA, 13 nt, Human
ugaucauccacug

SEQ ID NO: 1957909 - RNA, 23 nt, Human
ugaucaguaguuugcauuucaga

SEQ ID NO: 1957910 - RNA, 21 nt, Human
ugaucaguaguuugcauuuca

SEQ ID NO: 1957911 - RNA, 22 nt, Human
ugaucaguaguuugcauuucag

SEQ ID NO: 1957912 - RNA, 24 nt, Human
ugaucauccacugugccaugugcc

SEQ ID NO: 1957913 - RNA, 17 nt, Human
ugauccaagcugguccc

SEQ ID NO: 1957914 - RNA, 21 nt, Human
ugauccaagcuggucccacuc

SEQ ID NO: 1957915 - RNA, 15 nt, Human
ugauccacccaccuc

SEQ ID NO: 1957916 - RNA, 16 nt, Human
ugauccacccaccuca

SEQ ID NO: 1957917 - RNA, 20 nt, Human
ugauccacccaccucagccu

SEQ ID NO: 1957918 - RNA, 17 nt, Human
ugauauauuuaaaaaca

SEQ ID NO: 1957919 - RNA, 15 nt, Human
ugauauaucucaaau

SEQ ID NO: 1957920 - RNA, 16 nt, Human
ugauauaucucaaauu

SEQ ID NO: 1957921 - RNA, 21 nt, Human
ugauauaucucaaauuguaau

SEQ ID NO: 1957922 - RNA, 13 nt, Human
ugauauaaacagc

SEQ ID NO: 1957923 - RNA, 15 nt, Human
ugauauaaacagcuu

SEQ ID NO: 1957924 - RNA, 24 nt, Human
ugauaguuguaccgcaaugugacu

SEQ ID NO: 1957925 - RNA, 23 nt, Human
ugauauaaguguguguuuuucau

SEQ ID NO: 1957926 - RNA, 17 nt, Human
ugauauaaguguguguu

SEQ ID NO: 1957927 - RNA, 22 nt, Human
ugaucacggcucacugcagccu

SEQ ID NO: 1957928 - RNA, 14 nt, Human
ugaucacugaaaua

SEQ ID NO: 1957929 - RNA, 16 nt, Human
ugaucacugaaauaaa

SEQ ID NO: 1957930 - RNA, 24 nt, Human
ugaucacuuucugaaauucacaaa

SEQ ID NO: 1957931 - RNA, 21 nt, Human
ugaucagaccaaacagugcug

SEQ ID NO: 1957932 - RNA, 19 nt, Human
uggaacagugcuacugaaa

SEQ ID NO: 1957933 - RNA, 12 nt, Human
uggaacagugcu

SEQ ID NO: 1957934 - RNA, 17 nt, Human
uggaacacucugagacu

SEQ ID NO: 1957935 - RNA, 15 nt, Human
uggaacacucugaga

SEQ ID NO: 1957936 - RNA, 19 nt, Human
uggaaaccugucugagguu

SEQ ID NO: 1957937 - RNA, 14 nt, Human
uggaaaaggcauau

SEQ ID NO: 1957938 - RNA, 13 nt, Human
ugcuucuucagag

SEQ ID NO: 1957939 - RNA, 18 nt, Human
ugcuugugaaaggaaaga

SEQ ID NO: 1957940 - RNA, 16 nt, Human
ugcuuguuaacugagu

SEQ ID NO: 1957941 - RNA, 14 nt, Human
ugcuuguuaacuga

SEQ ID NO: 1957942 - RNA, 22 nt, Human
ugcuuugaggcucaccagaauu

SEQ ID NO: 1957943 - RNA, 12 nt, Human
ugcuuugauaua

SEQ ID NO: 1957944 - RNA, 13 nt, Human
ugcuuugauauau

SEQ ID NO: 1957945 - RNA, 16 nt, Human
uggaaaagccaagagg

SEQ ID NO: 1957946 - RNA, 19 nt, Human
uggaaaagccaagaggcug

SEQ ID NO: 1957947 - RNA, 17 nt, Human
ugcuuuggaaaacccag

SEQ ID NO: 1957948 - RNA, 13 nt, Human
ugcuuuggaaauc

SEQ ID NO: 1957949 - RNA, 16 nt, Human
ugcuguuuugccagcc

SEQ ID NO: 1957950 - RNA, 12 nt, Human
ugcuuaaaugug

SEQ ID NO: 1957951 - RNA, 13 nt, Human
ugcuuaaauguga

SEQ ID NO: 1957952 - RNA, 14 nt, Human
ugcuuaaaugugaa

SEQ ID NO: 1957953 - RNA, 15 nt, Human
ugcuuaaaugugaau

SEQ ID NO: 1957954 - RNA, 16 nt, Human
ugcuuaaaugugaauu

SEQ ID NO: 1957955 - RNA, 17 nt, Human
ugcuuaaaugugaauua

SEQ ID NO: 1957956 - RNA, 20 nt, Human
ugcuuaaaugugaauuacua

SEQ ID NO: 1957957 - RNA, 23 nt, Human
ugcuuaaaugugaauuacuaacu

SEQ ID NO: 1957958 - RNA, 22 nt, Human
ugcuguuuugccagcccauuug

SEQ ID NO: 1957959 - RNA, 20 nt, Human
ugcuuaaccuuuuuauuuca

SEQ ID NO: 1957960 - RNA, 20 nt, Human
ugcuuaauuacaauauuucu

SEQ ID NO: 1957961 - RNA, 19 nt, Human
ugcuuaacuucacauauug

SEQ ID NO: 1957962 - RNA, 13 nt, Human
ugcuuaacuucac

SEQ ID NO: 1957963 - RNA, 14 nt, Human
ugcuuaacuucaca

SEQ ID NO: 1957964 - RNA, 17 nt, Human
ugcuuaacuucacauau

SEQ ID NO: 1957965 - RNA, 18 nt, Human
ugcuuaacuucacauauu

SEQ ID NO: 1957966 - RNA, 20 nt, Human
ugcuuaccuugguuggaagg

SEQ ID NO: 1957967 - RNA, 23 nt, Human
ugcuuccagugaggcucugcccu

SEQ ID NO: 1957968 - RNA, 22 nt, Human
ugcuuccagugaggcucugccc

SEQ ID NO: 1957969 - RNA, 13 nt, Human
ugcuuccuuucuu

SEQ ID NO: 1957970 - RNA, 18 nt, Human
ugcuuccuauaauuuuga

SEQ ID NO: 1957971 - RNA, 19 nt, Human
ugcuuccuauaauuuugau

SEQ ID NO: 1957972 - RNA, 21 nt, Human
uggacauuuggguugguucca

SEQ ID NO: 1957973 - RNA, 23 nt, Human
uggacguguuaugacuccagaau

SEQ ID NO: 1957974 - RNA, 19 nt, Human
uggacguguuaugacucca

SEQ ID NO: 1957975 - RNA, 20 nt, Human
uggacuaacuugucuuugga

SEQ ID NO: 1957976 - RNA, 19 nt, Human
uggacuaacuugucuuugg

SEQ ID NO: 1957977 - RNA, 18 nt, Human
uggacaggcauguucucu

SEQ ID NO: 1957978 - RNA, 22 nt, Human
uggacaggcauguucucugagg

SEQ ID NO: 1957979 - RNA, 18 nt, Human
uggacauuucuaauuccu

SEQ ID NO: 1957980 - RNA, 17 nt, Human
uggacaggcauguucuc

SEQ ID NO: 1957981 - RNA, 23 nt, Human
uggacaggcauguucucugagga

SEQ ID NO: 1957982 - RNA, 16 nt, Human
uggacauuuuaugucu

SEQ ID NO: 1957983 - RNA, 17 nt, Human
uggacauuuuaugucuu

SEQ ID NO: 1957984 - RNA, 11 nt, Human
uggacauuuua

SEQ ID NO: 1957985 - RNA, 13 nt, Human
uggacauuuuaug

SEQ ID NO: 1957986 - RNA, 15 nt, Human
uggagaggagcccug

SEQ ID NO: 1957987 - RNA, 16 nt, Human
uggagaggagcccugc

SEQ ID NO: 1957988 - RNA, 17 nt, Human
uggagaggagcccugcc

SEQ ID NO: 1957989 - RNA, 18 nt, Human
uggagaggagcccugccu

SEQ ID NO: 1957990 - RNA, 18 nt, Human
uggacucuggacuuucuc

SEQ ID NO: 1957991 - RNA, 23 nt, Human
uggaggggggaggugggauccuc

SEQ ID NO: 1957992 - RNA, 19 nt, Human
uggaucaaauccagccugc

SEQ ID NO: 1957993 - RNA, 18 nt, Human
uggauauauguuuuugaa

SEQ ID NO: 1957994 - RNA, 21 nt, Human
uggaugcagccucacaguccu

SEQ ID NO: 1957995 - RNA, 13 nt, Human
uggaugcagccuc

SEQ ID NO: 1957996 - RNA, 22 nt, Human
uggaugcagccucacaguccuu

SEQ ID NO: 1957997 - RNA, 21 nt, Human
uggcacuauaauguaagcucu

SEQ ID NO: 1957998 - RNA, 23 nt, Human
uggcaaggacgcuucacaggaca

SEQ ID NO: 1957999 - RNA, 17 nt, Human
uggauuuaacagaaaug

SEQ ID NO: 1958000 - RNA, 15 nt, Human
uggauuuaacagaaa

SEQ ID NO: 1958001 - RNA, 19 nt, Human
uggauugugccuaaugugu

SEQ ID NO: 1958002 - RNA, 20 nt, Human
uggauugugccuaauguguu

SEQ ID NO: 1958003 - RNA, 23 nt, Human
uggauugugccuaauguguuuga

SEQ ID NO: 1958004 - RNA, 22 nt, Human
uggcacugcuuccagugaggcu

SEQ ID NO: 1958005 - RNA, 22 nt, Human
uggcacuauaauguaagcucua

SEQ ID NO: 1958006 - RNA, 19 nt, Human
uggcacugcuuccagugag

SEQ ID NO: 1958007 - RNA, 13 nt, Human
ugggccugaguga

SEQ ID NO: 1958008 - RNA, 15 nt, Human
ugggcuucauccucc

SEQ ID NO: 1958009 - RNA, 22 nt, Human
ugggcuucauccuccucagauc

SEQ ID NO: 1958010 - RNA, 22 nt, Human
ugggcuucaguggcagcugcuu

SEQ ID NO: 1958011 - RNA, 21 nt, Human
ugggcuucaguggcagcugcu

SEQ ID NO: 1958012 - RNA, 22 nt, Human
ugggcuuggggaccagagcugc

SEQ ID NO: 1958013 - RNA, 21 nt, Human
ugggcuugucuguagauuuua

SEQ ID NO: 1958014 - RNA, 17 nt, Human
ugggcuugucuguagau

SEQ ID NO: 1958015 - RNA, 23 nt, Human
ugggcuuggggaccagagcugcc

SEQ ID NO: 1958016 - RNA, 13 nt, Human
uggggcagcuuga

SEQ ID NO: 1958017 - RNA, 18 nt, Human
uggggcacagggagaggc

SEQ ID NO: 1958018 - RNA, 18 nt, Human
uggggcagaaaucugagg

SEQ ID NO: 1958019 - RNA, 19 nt, Human
uggggcagaaaucugagga

SEQ ID NO: 1958020 - RNA, 16 nt, Human
uggggcagaggagaac

SEQ ID NO: 1958021 - RNA, 17 nt, Human
uggggcagaggagaacu

SEQ ID NO: 1958022 - RNA, 17 nt, Human
uggggccaggcuggguc

SEQ ID NO: 1958023 - RNA, 18 nt, Human
ugggggccccgucucagg

SEQ ID NO: 1958024 - RNA, 19 nt, Human
ugggggccccgucucaggu

SEQ ID NO: 1958025 - RNA, 16 nt, Human
ugggggccucagugcc

SEQ ID NO: 1958026 - RNA, 22 nt, Human
ugggggccccgucucaggucug

SEQ ID NO: 1958027 - RNA, 23 nt, Human
ugggggccccgucucaggucuga

SEQ ID NO: 1958028 - RNA, 17 nt, Human
uggggggcuucauacac

SEQ ID NO: 1958029 - RNA, 21 nt, Human
uggggggaacgcccacuuccc

SEQ ID NO: 1958030 - RNA, 19 nt, Human
uggggggcugaggugggag

SEQ ID NO: 1958031 - RNA, 13 nt, Human
uggggggaacgcc

SEQ ID NO: 1958032 - RNA, 19 nt, Human
uggggggaacgcccacuuc

SEQ ID NO: 1958033 - RNA, 20 nt, Human
uggggggaacgcccacuucc

SEQ ID NO: 1958034 - RNA, 13 nt, Human
ugggggggcagag

SEQ ID NO: 1958035 - RNA, 18 nt, Human
ugggccguagcuugucug

SEQ ID NO: 1958036 - RNA, 17 nt, Human
ugggcagagcagagacc

SEQ ID NO: 1958037 - RNA, 15 nt, Human
ugggcagagcagaga

SEQ ID NO: 1958038 - RNA, 14 nt, Human
ugggcagagcagag

SEQ ID NO: 1958039 - RNA, 14 nt, Human
ugggacagggagga

SEQ ID NO: 1958040 - RNA, 19 nt, Human
ugggacagggagcagcccc

SEQ ID NO: 1958041 - RNA, 16 nt, Human
ugggaggaucucuuga

SEQ ID NO: 1958042 - RNA, 15 nt, Human
ugggacacccuguga

SEQ ID NO: 1958043 - RNA, 14 nt, Human
ugggacacccugug

SEQ ID NO: 1958044 - RNA, 21 nt, Human
ugggaaugaaugucaguguga

SEQ ID NO: 1958045 - RNA, 16 nt, Human
ugggaaugaaugucag

SEQ ID NO: 1958046 - RNA, 18 nt, Human
ugggaugauuggaggggg

SEQ ID NO: 1958047 - RNA, 14 nt, Human
ugggaugauugaag

SEQ ID NO: 1958048 - RNA, 16 nt, Human
ugggaugauugaagaa

SEQ ID NO: 1958049 - RNA, 17 nt, Human
ugggaugauugaagaaa

SEQ ID NO: 1958050 - RNA, 18 nt, Human
ugggaugauugaagaaac

SEQ ID NO: 1958051 - RNA, 23 nt, Human
ugggaugauugaagaaacagcua

SEQ ID NO: 1958052 - RNA, 16 nt, Human
ugggauaggggcagag

SEQ ID NO: 1958053 - RNA, 14 nt, Human
ugggaaugaagcaa

SEQ ID NO: 1958054 - RNA, 18 nt, Human
uggcuuuucacugcuggc

SEQ ID NO: 1958055 - RNA, 19 nt, Human
uggcuuuucacugcuggcu

SEQ ID NO: 1958056 - RNA, 21 nt, Human
uggcuuuucacugcuggcugc

SEQ ID NO: 1958057 - RNA, 22 nt, Human
uggcuuuucacugcuggcugcc

SEQ ID NO: 1958058 - RNA, 16 nt, Human
uggcuuuucacugcug

SEQ ID NO: 1958059 - RNA, 13 nt, Human
uggcuuggcccug

SEQ ID NO: 1958060 - RNA, 16 nt, Human
uggcuuggcccuggca

SEQ ID NO: 1958061 - RNA, 19 nt, Human
uggcuuggcccuggcagcc

SEQ ID NO: 1958062 - RNA, 17 nt, Human
uggcugggacugggaac

SEQ ID NO: 1958063 - RNA, 18 nt, Human
uggcugggacugggaaca

SEQ ID NO: 1958064 - RNA, 22 nt, Human
uggcuuccuaaaauucagugga

SEQ ID NO: 1958065 - RNA, 22 nt, Human
uggcuucccgcucagcccuccc

SEQ ID NO: 1958066 - RNA, 20 nt, Human
uggcuugccauuuuucaaaa

SEQ ID NO: 1958067 - RNA, 23 nt, Human
uggcuuggauuaauauucauagu

SEQ ID NO: 1958068 - RNA, 18 nt, Human
uggcuucccgcucagccc

SEQ ID NO: 1958069 - RNA, 19 nt, Human
uggcuucccgcucagcccu

SEQ ID NO: 1958070 - RNA, 20 nt, Human
uggcuucccgcucagcccuc

SEQ ID NO: 1958071 - RNA, 21 nt, Human
uggcuucccgcucagcccucc

SEQ ID NO: 1958072 - RNA, 23 nt, Human
uggccuucggccuccauccugag

SEQ ID NO: 1958073 - RNA, 13 nt, Human
uggccucugcacu

SEQ ID NO: 1958074 - RNA, 18 nt, Human
uggccucugcaaaggaaa

SEQ ID NO: 1958075 - RNA, 17 nt, Human
uggcuccacacacacaa

SEQ ID NO: 1958076 - RNA, 22 nt, Human
uggccuucggccuccauccuga

SEQ ID NO: 1958077 - RNA, 20 nt, Human
uggccuucggccuccauccu

SEQ ID NO: 1958078 - RNA, 15 nt, Human
uggcuccaggccagg

SEQ ID NO: 1958079 - RNA, 13 nt, Human
uggcuccagccug

SEQ ID NO: 1958080 - RNA, 15 nt, Human
uggcuccagccugga

SEQ ID NO: 1958081 - RNA, 20 nt, Human
uggcuccauugguguugaca

SEQ ID NO: 1958082 - RNA, 18 nt, Human
uggcuccacacacacaaa

SEQ ID NO: 1958083 - RNA, 23 nt, Human
uggcuccacacacacaaaaaaag

SEQ ID NO: 1958084 - RNA, 17 nt, Human
uggcuccagcuggccgg

SEQ ID NO: 1958085 - RNA, 16 nt, Human
uggcugcugaaggcuc

SEQ ID NO: 1958086 - RNA, 14 nt, Human
uggcugcugaaggc

SEQ ID NO: 1958087 - RNA, 13 nt, Human
uggcugcugaagg

SEQ ID NO: 1958088 - RNA, 11 nt, Human
uggcugcugaa

SEQ ID NO: 1958089 - RNA, 14 nt, Human
uggcucccucacuc

SEQ ID NO: 1958090 - RNA, 16 nt, Human
uggcucccucacucuc

SEQ ID NO: 1958091 - RNA, 17 nt, Human
uggcucccucacucuca

SEQ ID NO: 1958092 - RNA, 18 nt, Human
uggcucccucacucucag

SEQ ID NO: 1958093 - RNA, 19 nt, Human
uggcucccucacucucagg

SEQ ID NO: 1958094 - RNA, 20 nt, Human
uggcucccucacucucagga

SEQ ID NO: 1958095 - RNA, 22 nt, Human
uggccccucagggucccuggug

SEQ ID NO: 1958096 - RNA, 21 nt, Human
uggccccucagggucccuggu

SEQ ID NO: 1958097 - RNA, 17 nt, Human
uggcccccacaugguga

SEQ ID NO: 1958098 - RNA, 14 nt, Human
uggccccugagauc

SEQ ID NO: 1958099 - RNA, 20 nt, Human
uggccuagcauacguacaca

SEQ ID NO: 1958100 - RNA, 20 nt, Human
uggccccucagggucccugg

SEQ ID NO: 1958101 - RNA, 13 nt, Human
uggccccucaggg

SEQ ID NO: 1958102 - RNA, 16 nt, Human
uggcagcugccacgcc

SEQ ID NO: 1958103 - RNA, 17 nt, Human
uggcagcugcgguccac

SEQ ID NO: 1958104 - RNA, 19 nt, Human
uggcagcugcgguccaccc

SEQ ID NO: 1958105 - RNA, 16 nt, Human
uggccucccugcucua

SEQ ID NO: 1958106 - RNA, 20 nt, Human
uggccucucacugccucccc

SEQ ID NO: 1958107 - RNA, 22 nt, Human
uggccucccaacucaccccagc

SEQ ID NO: 1958108 - RNA, 21 nt, Human
uggccucccaacucaccccag

SEQ ID NO: 1958109 - RNA, 20 nt, Human
uggccucccaacucacccca

SEQ ID NO: 1958110 - RNA, 19 nt, Human
uggccucccaacucacccc

SEQ ID NO: 1958111 - RNA, 18 nt, Human
uggccucaagugauucuc

SEQ ID NO: 1958112 - RNA, 23 nt, Human
uggccucaagugauucuccugcc

SEQ ID NO: 1958113 - RNA, 23 nt, Human
uggccuagcauacguacacauuu

SEQ ID NO: 1958114 - RNA, 14 nt, Human
uggccucccaacuc

SEQ ID NO: 1958115 - RNA, 11 nt, Human
uggccucccaa

SEQ ID NO: 1958116 - RNA, 14 nt, Human
ugucagugugacug

SEQ ID NO: 1958117 - RNA, 15 nt, Human
ugucagugugacuga

SEQ ID NO: 1958118 - RNA, 19 nt, Human
ugucagugugacugaucuc

SEQ ID NO: 1958119 - RNA, 16 nt, Human
ugucagugugacugau

SEQ ID NO: 1958120 - RNA, 17 nt, Human
ugucacagggacugaaa

SEQ ID NO: 1958121 - RNA, 13 nt, Human
ugucacaggcagg

SEQ ID NO: 1958122 - RNA, 18 nt, Human
ugucacaggguguucuuu

SEQ ID NO: 1958123 - RNA, 15 nt, Human
ugucacaggcagguc

SEQ ID NO: 1958124 - RNA, 16 nt, Human
ugucacaggcaggucc

SEQ ID NO: 1958125 - RNA, 17 nt, Human
ugucacaggcaggucca

SEQ ID NO: 1958126 - RNA, 21 nt, Human
ugucacaggcagguccagggu

SEQ ID NO: 1958127 - RNA, 15 nt, Human
uguauggccaggaag

SEQ ID NO: 1958128 - RNA, 13 nt, Human
uguauggggaggc

SEQ ID NO: 1958129 - RNA, 22 nt, Human
uguaugguccauagcacuguau

SEQ ID NO: 1958130 - RNA, 13 nt, Human
uguaugcuucaua

SEQ ID NO: 1958131 - RNA, 14 nt, Human
uguaugcuucauac

SEQ ID NO: 1958132 - RNA, 16 nt, Human
uguaugcuucauacag

SEQ ID NO: 1958133 - RNA, 19 nt, Human
uguaugcuucauacaggga

SEQ ID NO: 1958134 - RNA, 13 nt, Human
uguaugcgugugu

SEQ ID NO: 1958135 - RNA, 21 nt, Human
ugucaauuacaggaaguacug

SEQ ID NO: 1958136 - RNA, 13 nt, Human
ugucacacacuuu

SEQ ID NO: 1958137 - RNA, 14 nt, Human
ugucacaggcaggu

SEQ ID NO: 1958138 - RNA, 19 nt, Human
uguauuuuacuaauaaaau

SEQ ID NO: 1958139 - RNA, 12 nt, Human
uguauguauaau

SEQ ID NO: 1958140 - RNA, 13 nt, Human
uguaucugagcag

SEQ ID NO: 1958141 - RNA, 15 nt, Human
uguaucugaaaguca

SEQ ID NO: 1958142 - RNA, 12 nt, Human
uguaucugucuu

SEQ ID NO: 1958143 - RNA, 14 nt, Human
uguaucugucuuuc

SEQ ID NO: 1958144 - RNA, 15 nt, Human
uguaucugucuuucc

SEQ ID NO: 1958145 - RNA, 16 nt, Human
uguaucugucuuucca

SEQ ID NO: 1958146 - RNA, 19 nt, Human
uguaucugucuuuccacuc

SEQ ID NO: 1958147 - RNA, 20 nt, Human
uguaucugucuuuccacucu

SEQ ID NO: 1958148 - RNA, 22 nt, Human
uguaucugucuuuccacucugg

SEQ ID NO: 1958149 - RNA, 22 nt, Human
uguaugaaagauggcugugccu

SEQ ID NO: 1958150 - RNA, 13 nt, Human
uguaugaaaacau

SEQ ID NO: 1958151 - RNA, 19 nt, Human
uguaugaaaacauggaaca

SEQ ID NO: 1958152 - RNA, 23 nt, Human
uguauagccaaaugacugaaagc

SEQ ID NO: 1958153 - RNA, 18 nt, Human
uguauagcucuuuuccua

SEQ ID NO: 1958154 - RNA, 14 nt, Human
uguauaaggacagu

SEQ ID NO: 1958155 - RNA, 19 nt, Human
uguauaaaggugugcugug

SEQ ID NO: 1958156 - RNA, 14 nt, Human
uguauaaauuuauu

SEQ ID NO: 1958157 - RNA, 23 nt, Human
uguacagcaaggagauuuacaac

SEQ ID NO: 1958158 - RNA, 12 nt, Human
uguacagagccc

SEQ ID NO: 1958159 - RNA, 21 nt, Human
uguacagagcccacgccccca

SEQ ID NO: 1958160 - RNA, 22 nt, Human
uguacagcaaggagauuuacaa

SEQ ID NO: 1958161 - RNA, 21 nt, Human
uguacagagccguaaaaacug

SEQ ID NO: 1958162 - RNA, 22 nt, Human
uguacagagccguaaaaacuga

SEQ ID NO: 1958163 - RNA, 19 nt, Human
uguacagagugcuuuucug

SEQ ID NO: 1958164 - RNA, 21 nt, Human
ugucucaaaaaaagaaaaaga

SEQ ID NO: 1958165 - RNA, 17 nt, Human
ugucucaagagggcacu

SEQ ID NO: 1958166 - RNA, 18 nt, Human
ugucucaagagggcacug

SEQ ID NO: 1958167 - RNA, 23 nt, Human
ugucuaguuguuugauucagaca

SEQ ID NO: 1958168 - RNA, 15 nt, Human
ugucuaguuguuuga

SEQ ID NO: 1958169 - RNA, 15 nt, Human
ugucuagcacuuccu

SEQ ID NO: 1958170 - RNA, 16 nt, Human
ugucuagcacuuccuu

SEQ ID NO: 1958171 - RNA, 18 nt, Human
ugucuagcacuuccuugc

SEQ ID NO: 1958172 - RNA, 21 nt, Human
ugucuagcacuuccuugccag

SEQ ID NO: 1958173 - RNA, 14 nt, Human
ugucuaugggacuc

SEQ ID NO: 1958174 - RNA, 15 nt, Human
ugucuaugggacuca

SEQ ID NO: 1958175 - RNA, 16 nt, Human
ugucuaugggacucaa

SEQ ID NO: 1958176 - RNA, 23 nt, Human
ugucuuuggacccugaggcccag

SEQ ID NO: 1958177 - RNA, 16 nt, Human
ugucuuaauggaugaa

SEQ ID NO: 1958178 - RNA, 18 nt, Human
ugucuuaauggaugaaau

SEQ ID NO: 1958179 - RNA, 16 nt, Human
ugucuuuucuugcaug

SEQ ID NO: 1958180 - RNA, 16 nt, Human
ugucuguuguauucau

SEQ ID NO: 1958181 - RNA, 15 nt, Human
ugucugaguuuggua

SEQ ID NO: 1958182 - RNA, 20 nt, Human
ugucugaagucacugcacag

SEQ ID NO: 1958183 - RNA, 16 nt, Human
ugucugucugguccau

SEQ ID NO: 1958184 - RNA, 14 nt, Human
ugucuaaugaaacc

SEQ ID NO: 1958185 - RNA, 12 nt, Human
uguccugggagu

SEQ ID NO: 1958186 - RNA, 19 nt, Human
uguccugggagugagcugg

SEQ ID NO: 1958187 - RNA, 20 nt, Human
uguccugggagugagcuggu

SEQ ID NO: 1958188 - RNA, 22 nt, Human
uguccugccuaaggcugaacuu

SEQ ID NO: 1958189 - RNA, 19 nt, Human
uguccccgcacugggcuug

SEQ ID NO: 1958190 - RNA, 17 nt, Human
uguccccgcacugggcu

SEQ ID NO: 1958191 - RNA, 13 nt, Human
ugucaucucagcu

SEQ ID NO: 1958192 - RNA, 13 nt, Human
uguccccuauccu

SEQ ID NO: 1958193 - RNA, 14 nt, Human
ugucaucugagaau

SEQ ID NO: 1958194 - RNA, 13 nt, Human
ugucaucugagaa

SEQ ID NO: 1958195 - RNA, 16 nt, Human
uguccuauuaguguua

SEQ ID NO: 1958196 - RNA, 17 nt, Human
uguccuauuaguguuau

SEQ ID NO: 1958197 - RNA, 17 nt, Human
uguccuccaagccagcg

SEQ ID NO: 1958198 - RNA, 15 nt, Human
uguccuauuauauuc

SEQ ID NO: 1958199 - RNA, 15 nt, Human
ugguuccagccugcc

SEQ ID NO: 1958200 - RNA, 16 nt, Human
ugguuccagccugcca

SEQ ID NO: 1958201 - RNA, 17 nt, Human
ugguucauuuucagauu

SEQ ID NO: 1958202 - RNA, 19 nt, Human
uggugucgggcaugacacg

SEQ ID NO: 1958203 - RNA, 18 nt, Human
uggugucgggcaugacac

SEQ ID NO: 1958204 - RNA, 11 nt, Human
ugguuccccug

SEQ ID NO: 1958205 - RNA, 18 nt, Human
ugguuccccuguucacuc

SEQ ID NO: 1958206 - RNA, 19 nt, Human
ugguuccccuguucacucu

SEQ ID NO: 1958207 - RNA, 20 nt, Human
ugguuccccuguucacucua

SEQ ID NO: 1958208 - RNA, 20 nt, Human
ugguuccaagucuuugcuau

SEQ ID NO: 1958209 - RNA, 15 nt, Human
uggugucgggcauga

SEQ ID NO: 1958210 - RNA, 18 nt, Human
uggugucaguauccaggc

SEQ ID NO: 1958211 - RNA, 16 nt, Human
uggugucaccugaaga

SEQ ID NO: 1958212 - RNA, 14 nt, Human
ugguuccuggggca

SEQ ID NO: 1958213 - RNA, 18 nt, Human
ugguuccuggggcaucca

SEQ ID NO: 1958214 - RNA, 12 nt, Human
ugguuccucccc

SEQ ID NO: 1958215 - RNA, 18 nt, Human
ugguuccuccccuccucc

SEQ ID NO: 1958216 - RNA, 23 nt, Human
ugguuccuccccuccuccuggac

SEQ ID NO: 1958217 - RNA, 23 nt, Human
ugguuccccuguucacucuacuu

SEQ ID NO: 1958218 - RNA, 18 nt, Human
ugguugaugaucuuugca

SEQ ID NO: 1958219 - RNA, 16 nt, Human
ugguugagugggggga

SEQ ID NO: 1958220 - RNA, 12 nt, Human
ugguugaauaaa

SEQ ID NO: 1958221 - RNA, 12 nt, Human
ugguugaauaug

SEQ ID NO: 1958222 - RNA, 18 nt, Human
ugguugaauaaacuagau

SEQ ID NO: 1958223 - RNA, 20 nt, Human
uggugguugggacccagugg

SEQ ID NO: 1958224 - RNA, 23 nt, Human
uggugguugggacccaguggcag

SEQ ID NO: 1958225 - RNA, 18 nt, Human
ugguguaagguacuuuca

SEQ ID NO: 1958226 - RNA, 19 nt, Human
uggugguuuucuguucuuu

SEQ ID NO: 1958227 - RNA, 17 nt, Human
uggugguuucagaaaug

SEQ ID NO: 1958228 - RNA, 18 nt, Human
uggugguuucagaaaugu

SEQ ID NO: 1958229 - RNA, 17 nt, Human
ugguggggucuccucag

SEQ ID NO: 1958230 - RNA, 23 nt, Human
ugguggggucuccucaggaccag

SEQ ID NO: 1958231 - RNA, 17 nt, Human
uggugggcauucucucu

SEQ ID NO: 1958232 - RNA, 23 nt, Human
uggugggcuugucauagccagug

SEQ ID NO: 1958233 - RNA, 18 nt, Human
uggugggggccucggugu

SEQ ID NO: 1958234 - RNA, 16 nt, Human
uggugggggccucggu

SEQ ID NO: 1958235 - RNA, 13 nt, Human
ugguggcuggguu

SEQ ID NO: 1958236 - RNA, 21 nt, Human
ugguggcccgacagccuggca

SEQ ID NO: 1958237 - RNA, 20 nt, Human
uggugcaaugaccuuucaau

SEQ ID NO: 1958238 - RNA, 19 nt, Human
uggugcaaugaccuuucaa

SEQ ID NO: 1958239 - RNA, 14 nt, Human
uggugcaaugaccu

SEQ ID NO: 1958240 - RNA, 15 nt, Human
uggugauuuuaaaug

SEQ ID NO: 1958241 - RNA, 16 nt, Human
uggugauuuuaaaugu

SEQ ID NO: 1958242 - RNA, 18 nt, Human
uggugauuuuaaaugugu

SEQ ID NO: 1958243 - RNA, 19 nt, Human
uggugauuuuaaaugugug

SEQ ID NO: 1958244 - RNA, 20 nt, Human
ugguggcagugggagcugcc

SEQ ID NO: 1958245 - RNA, 19 nt, Human
ugguggcccgacagccugg

SEQ ID NO: 1958246 - RNA, 13 nt, Human
ugguggcaguggg

SEQ ID NO: 1958247 - RNA, 18 nt, Human
ugguggcagugggagcug

SEQ ID NO: 1958248 - RNA, 14 nt, Human
uggugagaggcauc

SEQ ID NO: 1958249 - RNA, 12 nt, Human
uggugauuuuaa

SEQ ID NO: 1958250 - RNA, 20 nt, Human
uggguacuuguggacacagc

SEQ ID NO: 1958251 - RNA, 23 nt, Human
uggguacuuguggacacagcucu

SEQ ID NO: 1958252 - RNA, 20 nt, Human
uguaaaaaggaauaugaaag

SEQ ID NO: 1958253 - RNA, 17 nt, Human
uguaaaagcauuuugua

SEQ ID NO: 1958254 - RNA, 18 nt, Human
uguaaaagcauuuuguaa

SEQ ID NO: 1958255 - RNA, 19 nt, Human
uguaaaagcauuuuguaau

SEQ ID NO: 1958256 - RNA, 12 nt, Human
uguaaaagcaag

SEQ ID NO: 1958257 - RNA, 12 nt, Human
uguaaaauggug

SEQ ID NO: 1958258 - RNA, 13 nt, Human
uguaaaaugcaaa

SEQ ID NO: 1958259 - RNA, 18 nt, Human
uguaaaaugcaaaaaauc

SEQ ID NO: 1958260 - RNA, 21 nt, Human
uguaaaaugcaaaaaaucuua

SEQ ID NO: 1958261 - RNA, 11 nt, Human
uguaaaauggu

SEQ ID NO: 1958262 - RNA, 21 nt, Human
ugguuuuuaaaaaacugcuga

SEQ ID NO: 1958263 - RNA, 19 nt, Human
ugguuuucuuguguguuua

SEQ ID NO: 1958264 - RNA, 22 nt, Human
ugguuuucuugggggaaaauac

SEQ ID NO: 1958265 - RNA, 20 nt, Human
ugguuguguguccccuugca

SEQ ID NO: 1958266 - RNA, 19 nt, Human
ugguuuuuauuucuccuuu

SEQ ID NO: 1958267 - RNA, 17 nt, Human
ugguuuuuauuucuccu

SEQ ID NO: 1958268 - RNA, 23 nt, Human
ugguuuuuaaaaaacugcugacu

SEQ ID NO: 1958269 - RNA, 20 nt, Human
ugguuguacauauaagugau

SEQ ID NO: 1958270 - RNA, 14 nt, Human
ugguuguaucugug

SEQ ID NO: 1958271 - RNA, 16 nt, Human
ugguuuucuguucuuu

SEQ ID NO: 1958272 - RNA, 18 nt, Human
ugguuggcugggaaaucg

SEQ ID NO: 1958273 - RNA, 14 nt, Human
ugguugggacccag

SEQ ID NO: 1958274 - RNA, 21 nt, Human
ugguugggacccaguggcagg

SEQ ID NO: 1958275 - RNA, 23 nt, Human
ugguugggacccaguggcagggc

SEQ ID NO: 1958276 - RNA, 13 nt, Human
ugguugcauccua

SEQ ID NO: 1958277 - RNA, 17 nt, Human
uguaaauuuaugugaug

SEQ ID NO: 1958278 - RNA, 14 nt, Human
uguaacaagccacc

SEQ ID NO: 1958279 - RNA, 17 nt, Human
uguaacaagccacccca

SEQ ID NO: 1958280 - RNA, 14 nt, Human
uguaacaagaaaau

SEQ ID NO: 1958281 - RNA, 13 nt, Human
uguaacaagaaaa

SEQ ID NO: 1958282 - RNA, 17 nt, Human
uguaacauucuauuuca

SEQ ID NO: 1958283 - RNA, 17 nt, Human
uguaaugaaaaccacau

SEQ ID NO: 1958284 - RNA, 12 nt, Human
uguaauaaugga

SEQ ID NO: 1958285 - RNA, 13 nt, Human
uguaaugaaaacc

SEQ ID NO: 1958286 - RNA, 12 nt, Human
uguaaugaaaac

SEQ ID NO: 1958287 - RNA, 11 nt, Human
uguaaugaaaa

SEQ ID NO: 1958288 - RNA, 19 nt, Human
uguaauaauaaagaauagc

SEQ ID NO: 1958289 - RNA, 11 nt, Human
uguacagagcc

SEQ ID NO: 1958290 - RNA, 14 nt, Human
uguacagacaacaa

SEQ ID NO: 1958291 - RNA, 16 nt, Human
ucccuaauaaagcugu

SEQ ID NO: 1958292 - RNA, 16 nt, Human
ucccuauuagagaaga

SEQ ID NO: 1958293 - RNA, 20 nt, Human
ucccucggaguucuucuuga

SEQ ID NO: 1958294 - RNA, 16 nt, Human
ucccucgucuuuccca

SEQ ID NO: 1958295 - RNA, 17 nt, Human
ucccucuacugggagcc

SEQ ID NO: 1958296 - RNA, 15 nt, Human
ucccucuacugggag

SEQ ID NO: 1958297 - RNA, 19 nt, Human
ucccuccugggaaugaagc

SEQ ID NO: 1958298 - RNA, 11 nt, Human
ucccuccuggg

SEQ ID NO: 1958299 - RNA, 20 nt, Human
uccccuguuuguuucugaaa

SEQ ID NO: 1958300 - RNA, 18 nt, Human
uccccuguuuguuucuga

SEQ ID NO: 1958301 - RNA, 18 nt, Human
uccagguuuaagcuguua

SEQ ID NO: 1958302 - RNA, 17 nt, Human
uccagguuuaagcuguu

SEQ ID NO: 1958303 - RNA, 21 nt, Human
uccccuguuuguuucugaaag

SEQ ID NO: 1958304 - RNA, 14 nt, Human
ucccgggacucugc

SEQ ID NO: 1958305 - RNA, 15 nt, Human
ucccuaauaaagcug

SEQ ID NO: 1958306 - RNA, 14 nt, Human
ucccuaauaaagcu

SEQ ID NO: 1958307 - RNA, 22 nt, Human
ucccuuccaguuuauuccagag

SEQ ID NO: 1958308 - RNA, 23 nt, Human
ucccuuccaguuuauuccagagc

SEQ ID NO: 1958309 - RNA, 23 nt, Human
ucccuugaggaaacaacagcuuu

SEQ ID NO: 1958310 - RNA, 18 nt, Human
uccgaccacuuccagggg

SEQ ID NO: 1958311 - RNA, 13 nt, Human
ucccuucccaccu

SEQ ID NO: 1958312 - RNA, 14 nt, Human
ucccuuccaccugc

SEQ ID NO: 1958313 - RNA, 15 nt, Human
ucccuuccaccugcu

SEQ ID NO: 1958314 - RNA, 17 nt, Human
ucccuuccaccugcucu

SEQ ID NO: 1958315 - RNA, 19 nt, Human
ucccuuccaccugcucugc

SEQ ID NO: 1958316 - RNA, 20 nt, Human
ucccuuccaccugcucugcu

SEQ ID NO: 1958317 - RNA, 21 nt, Human
ucccuuccaccugcucugcug

SEQ ID NO: 1958318 - RNA, 19 nt, Human
ucccuuccaguuuauucca

SEQ ID NO: 1958319 - RNA, 23 nt, Human
ucccugccugguccucacacuca

SEQ ID NO: 1958320 - RNA, 20 nt, Human
ucccugccccucccuucaac

SEQ ID NO: 1958321 - RNA, 15 nt, Human
ucccugcucacugca

SEQ ID NO: 1958322 - RNA, 22 nt, Human
ucccugcugucauugcuucuuc

SEQ ID NO: 1958323 - RNA, 23 nt, Human
ucccugcugucauugcuucuucu

SEQ ID NO: 1958324 - RNA, 14 nt, Human
ucccugcacuugca

SEQ ID NO: 1958325 - RNA, 19 nt, Human
ucccugccccucccuucaa

SEQ ID NO: 1958326 - RNA, 13 nt, Human
ucccugcacuugc

SEQ ID NO: 1958327 - RNA, 16 nt, Human
uccucugcugcuggcu

SEQ ID NO: 1958328 - RNA, 15 nt, Human
uccucugcugcuggc

SEQ ID NO: 1958329 - RNA, 14 nt, Human
uccucugcugcugg

SEQ ID NO: 1958330 - RNA, 12 nt, Human
uccucugcugcu

SEQ ID NO: 1958331 - RNA, 18 nt, Human
uccucuguacagagccca

SEQ ID NO: 1958332 - RNA, 17 nt, Human
uccucuguacagagccc

SEQ ID NO: 1958333 - RNA, 16 nt, Human
uccucuguacagagcc

SEQ ID NO: 1958334 - RNA, 21 nt, Human
uccucuuccugaauuuuauuu

SEQ ID NO: 1958335 - RNA, 19 nt, Human
uccuccuuuucacaguucu

SEQ ID NO: 1958336 - RNA, 15 nt, Human
uccucgcuucuuuca

SEQ ID NO: 1958337 - RNA, 20 nt, Human
uccucggcuggcuguccacc

SEQ ID NO: 1958338 - RNA, 14 nt, Human
uccucuaggagguc

SEQ ID NO: 1958339 - RNA, 10 nt, Human
uccuccagaa

SEQ ID NO: 1958340 - RNA, 11 nt, Human
uccuccagaac

SEQ ID NO: 1958341 - RNA, 12 nt, Human
uccuccagaacu

SEQ ID NO: 1958342 - RNA, 13 nt, Human
uccuccagaacuc

SEQ ID NO: 1958343 - RNA, 16 nt, Human
uccuccagaacucuuc

SEQ ID NO: 1958344 - RNA, 18 nt, Human
uccuccagaacucuuccu

SEQ ID NO: 1958345 - RNA, 21 nt, Human
uccuccagaacucuuccucca

SEQ ID NO: 1958346 - RNA, 17 nt, Human
uccucauguucugcuuu

SEQ ID NO: 1958347 - RNA, 20 nt, Human
uccuaauaaucauuggauuc

SEQ ID NO: 1958348 - RNA, 16 nt, Human
uccuaaucuucugaac

SEQ ID NO: 1958349 - RNA, 13 nt, Human
uccgaccagacac

SEQ ID NO: 1958350 - RNA, 17 nt, Human
uccgaccagacaccuug

SEQ ID NO: 1958351 - RNA, 18 nt, Human
uccuacccacccuccuuu

SEQ ID NO: 1958352 - RNA, 21 nt, Human
uccuaccacccgguccccacu

SEQ ID NO: 1958353 - RNA, 15 nt, Human
uccuacaagacacag

SEQ ID NO: 1958354 - RNA, 22 nt, Human
uccuaaugaaugcauaaaaugu

SEQ ID NO: 1958355 - RNA, 15 nt, Human
uccuaaucacucaga

SEQ ID NO: 1958356 - RNA, 16 nt, Human
uccuaaucacucagag

SEQ ID NO: 1958357 - RNA, 18 nt, Human
uccuaaucacucagagca

SEQ ID NO: 1958358 - RNA, 15 nt, Human
uccuaauuccacagc

SEQ ID NO: 1958359 - RNA, 14 nt, Human
uccuaauggugaug

SEQ ID NO: 1958360 - RNA, 17 nt, Human
uccuaauggugaugcag

SEQ ID NO: 1958361 - RNA, 16 nt, Human
uccuaauuccacagcu

SEQ ID NO: 1958362 - RNA, 17 nt, Human
uccuaauuccacagcug

SEQ ID NO: 1958363 - RNA, 18 nt, Human
uccuaauuccacagcugc

SEQ ID NO: 1958364 - RNA, 20 nt, Human
uccuaauggugaugcagucu

SEQ ID NO: 1958365 - RNA, 24 nt, Human
uccuaauggugaugcagucuuaga

SEQ ID NO: 1958366 - RNA, 22 nt, Human
uccuaguuccaccaucaagcca

SEQ ID NO: 1958367 - RNA, 18 nt, Human
uccuauauuguuuucagu

SEQ ID NO: 1958368 - RNA, 13 nt, Human
uccuauaccauuu

SEQ ID NO: 1958369 - RNA, 20 nt, Human
uccuauaccauuuccguaau

SEQ ID NO: 1958370 - RNA, 23 nt, Human
uccuauaauuuugauagugggac

SEQ ID NO: 1958371 - RNA, 17 nt, Human
uccucauuagcauuuug

SEQ ID NO: 1958372 - RNA, 21 nt, Human
uccuauauuguuuucagugua

SEQ ID NO: 1958373 - RNA, 12 nt, Human
uccuauuauauu

SEQ ID NO: 1958374 - RNA, 12 nt, Human
uccuauuagugu

SEQ ID NO: 1958375 - RNA, 13 nt, Human
uccuauuaguguu

SEQ ID NO: 1958376 - RNA, 14 nt, Human
uccuauuaguguua

SEQ ID NO: 1958377 - RNA, 17 nt, Human
uccuauuaguguuauau

SEQ ID NO: 1958378 - RNA, 19 nt, Human
uccuauuaguguuauauga

SEQ ID NO: 1958379 - RNA, 22 nt, Human
uccuguaccucuugagccuuga

SEQ ID NO: 1958380 - RNA, 20 nt, Human
uccuguaccucuugagccuu

SEQ ID NO: 1958381 - RNA, 22 nt, Human
uccuggcacugcuuccagugag

SEQ ID NO: 1958382 - RNA, 18 nt, Human
uccuggcacugcuuccag

SEQ ID NO: 1958383 - RNA, 20 nt, Human
uccuggcacccggccccugc

SEQ ID NO: 1958384 - RNA, 21 nt, Human
uccuggcacccggccccugcu

SEQ ID NO: 1958385 - RNA, 17 nt, Human
uccuggcacugcuucca

SEQ ID NO: 1958386 - RNA, 22 nt, Human
uccuggcacccggccccugcug

SEQ ID NO: 1958387 - RNA, 17 nt, Human
uccugccucagccuccc

SEQ ID NO: 1958388 - RNA, 16 nt, Human
uccugccucagccucc

SEQ ID NO: 1958389 - RNA, 13 nt, Human
uccugccucagcc

SEQ ID NO: 1958390 - RNA, 15 nt, Human
uccugccucagccuc

SEQ ID NO: 1958391 - RNA, 14 nt, Human
uccuggcacccggc

SEQ ID NO: 1958392 - RNA, 16 nt, Human
uccuggcacccggccc

SEQ ID NO: 1958393 - RNA, 19 nt, Human
uccuggcacccggccccug

SEQ ID NO: 1958394 - RNA, 13 nt, Human
uccugagccagau

SEQ ID NO: 1958395 - RNA, 16 nt, Human
uccucuugacccugca

SEQ ID NO: 1958396 - RNA, 17 nt, Human
uccucuugacccugcac

SEQ ID NO: 1958397 - RNA, 17 nt, Human
uccucuugcauuucacu

SEQ ID NO: 1958398 - RNA, 20 nt, Human
uccugccuaagugcagcccc

SEQ ID NO: 1958399 - RNA, 14 nt, Human
uccugagccagauu

SEQ ID NO: 1958400 - RNA, 14 nt, Human
uccugccucagccu

SEQ ID NO: 1958401 - RNA, 13 nt, Human
uccuuuuccagag

SEQ ID NO: 1958402 - RNA, 14 nt, Human
uccuuuuccagagc

SEQ ID NO: 1958403 - RNA, 15 nt, Human
uccuuuuccagagca

SEQ ID NO: 1958404 - RNA, 23 nt, Human
uccuuuuccagagcauuccaguc

SEQ ID NO: 1958405 - RNA, 18 nt, Human
uccuuuucgcaggauucu

SEQ ID NO: 1958406 - RNA, 15 nt, Human
ucgaacuccugaccu

SEQ ID NO: 1958407 - RNA, 20 nt, Human
ucgaaaguuaguaggauaug

SEQ ID NO: 1958408 - RNA, 23 nt, Human
uccuuuucacaguucucuccuuc

SEQ ID NO: 1958409 - RNA, 19 nt, Human
uccuuuuaaaacacuucca

SEQ ID NO: 1958410 - RNA, 20 nt, Human
uccuuggaaaucaaauguaa

SEQ ID NO: 1958411 - RNA, 22 nt, Human
uccuuggaaaucaaauguaaag

SEQ ID NO: 1958412 - RNA, 23 nt, Human
uccuuggaaaucaaauguaaagu

SEQ ID NO: 1958413 - RNA, 20 nt, Human
uccuucaccuuuguccccac

SEQ ID NO: 1958414 - RNA, 18 nt, Human
uccuucaccuuugucccc

SEQ ID NO: 1958415 - RNA, 19 nt, Human
uccuucacagaugggugcu

SEQ ID NO: 1958416 - RNA, 18 nt, Human
uccuucacagaugggugc

SEQ ID NO: 1958417 - RNA, 18 nt, Human
uccuuaccagcagagcac

SEQ ID NO: 1958418 - RNA, 17 nt, Human
uccuuaccagcagagca

SEQ ID NO: 1958419 - RNA, 16 nt, Human
uccuuaccagcagagc

SEQ ID NO: 1958420 - RNA, 13 nt, Human
uccuugauauuug

SEQ ID NO: 1958421 - RNA, 17 nt, Human
uccuugauauuuguauu

SEQ ID NO: 1958422 - RNA, 19 nt, Human
uccuugauauuuguauuua

SEQ ID NO: 1958423 - RNA, 19 nt, Human
uccuugaggggagccagga

SEQ ID NO: 1958424 - RNA, 22 nt, Human
uccuugaggggagccaggaggg

SEQ ID NO: 1958425 - RNA, 22 nt, Human
uccuucaccuuuguccccaccg

SEQ ID NO: 1958426 - RNA, 21 nt, Human
uccuucaccuuuguccccacc

SEQ ID NO: 1958427 - RNA, 21 nt, Human
ucuaucaaguauuauaccuuu

SEQ ID NO: 1958428 - RNA, 22 nt, Human
ucuaucaaguauuauaccuuuu

SEQ ID NO: 1958429 - RNA, 19 nt, Human
ucuagugcagcugaaauug

SEQ ID NO: 1958430 - RNA, 20 nt, Human
ucuagugcagcugaaauuga

SEQ ID NO: 1958431 - RNA, 15 nt, Human
ucuaucaaguauuau

SEQ ID NO: 1958432 - RNA, 22 nt, Human
ucuaugauuccagguggcauca

SEQ ID NO: 1958433 - RNA, 13 nt, Human
ucuaugccugucu

SEQ ID NO: 1958434 - RNA, 17 nt, Human
ucucaaauaacuaaaag

SEQ ID NO: 1958435 - RNA, 17 nt, Human
ucucaaagaccuggggc

SEQ ID NO: 1958436 - RNA, 19 nt, Human
ucucaaagccccauuaacu

SEQ ID NO: 1958437 - RNA, 21 nt, Human
ucucaaagccccauuaacugc

SEQ ID NO: 1958438 - RNA, 23 nt, Human
ucuaggacugaauuaugaaacuu

SEQ ID NO: 1958439 - RNA, 16 nt, Human
ucuaggacugaauuau

SEQ ID NO: 1958440 - RNA, 15 nt, Human
ucuaggaccuguguc

SEQ ID NO: 1958441 - RNA, 17 nt, Human
ucuagugcagcugaaau

SEQ ID NO: 1958442 - RNA, 13 nt, Human
ucuaauuccuguu

SEQ ID NO: 1958443 - RNA, 16 nt, Human
ucuaauuccuguuugu

SEQ ID NO: 1958444 - RNA, 11 nt, Human
ucuagaaagaa

SEQ ID NO: 1958445 - RNA, 13 nt, Human
ucuagaaagaaua

SEQ ID NO: 1958446 - RNA, 14 nt, Human
ucuaauauguaaca

SEQ ID NO: 1958447 - RNA, 14 nt, Human
ucuaaugugugaau

SEQ ID NO: 1958448 - RNA, 18 nt, Human
ucuaauguuuaagcagaa

SEQ ID NO: 1958449 - RNA, 11 nt, Human
ucuaauguuua

SEQ ID NO: 1958450 - RNA, 12 nt, Human
ucuaauguuuaa

SEQ ID NO: 1958451 - RNA, 16 nt, Human
ucgugauugauaagaa

SEQ ID NO: 1958452 - RNA, 22 nt, Human
ucggccucccaaagugcuggga

SEQ ID NO: 1958453 - RNA, 18 nt, Human
ucggccuccauccugagg

SEQ ID NO: 1958454 - RNA, 21 nt, Human
ucgugaugcuaugauguuagu

SEQ ID NO: 1958455 - RNA, 21 nt, Human
ucuaaaucuccaaaauaaaac

SEQ ID NO: 1958456 - RNA, 18 nt, Human
ucguuaggauacugccuc

SEQ ID NO: 1958457 - RNA, 22 nt, Human
ucuaaauaucccuuggacauuu

SEQ ID NO: 1958458 - RNA, 16 nt, Human
ucuaaccacagcuccu

SEQ ID NO: 1958459 - RNA, 17 nt, Human
ucuaaccacagcuccuu

SEQ ID NO: 1958460 - RNA, 19 nt, Human
ucuaaccacagcuccuuuu

SEQ ID NO: 1958461 - RNA, 20 nt, Human
ucuaaccacagcuccuuuuc

SEQ ID NO: 1958462 - RNA, 22 nt, Human
ucuaaccacagcuccuuuucca

SEQ ID NO: 1958463 - RNA, 16 nt, Human
ucuaauauauccacac

SEQ ID NO: 1958464 - RNA, 11 nt, Human
ucucugaaccc

SEQ ID NO: 1958465 - RNA, 16 nt, Human
ucucuaguuugauuaa

SEQ ID NO: 1958466 - RNA, 16 nt, Human
ucucuagugcugugaa

SEQ ID NO: 1958467 - RNA, 17 nt, Human
ucucuagugcugugaaa

SEQ ID NO: 1958468 - RNA, 19 nt, Human
ucucuagugcugugaaaaa

SEQ ID NO: 1958469 - RNA, 15 nt, Human
ucucuaguuugauua

SEQ ID NO: 1958470 - RNA, 14 nt, Human
ucucuagugcugug

SEQ ID NO: 1958471 - RNA, 14 nt, Human
ucucugcagguccc

SEQ ID NO: 1958472 - RNA, 13 nt, Human
ucucugcaggucc

SEQ ID NO: 1958473 - RNA, 15 nt, Human
ucucugauacagaaa

SEQ ID NO: 1958474 - RNA, 17 nt, Human
ucucugaggacacuaac

SEQ ID NO: 1958475 - RNA, 14 nt, Human
ucucugaggacacu

SEQ ID NO: 1958476 - RNA, 15 nt, Human
ucucugaaggaggcc

SEQ ID NO: 1958477 - RNA, 18 nt, Human
ucucugaaggaggccacc

SEQ ID NO: 1958478 - RNA, 20 nt, Human
ucucugaaggaggccaccuc

SEQ ID NO: 1958479 - RNA, 21 nt, Human
ucucugaaggaggccaccucc

SEQ ID NO: 1958480 - RNA, 23 nt, Human
ucucugaaggaggccaccuccua

SEQ ID NO: 1958481 - RNA, 14 nt, Human
ucucuguacauauu

SEQ ID NO: 1958482 - RNA, 18 nt, Human
ucucugcaggucccuaau

SEQ ID NO: 1958483 - RNA, 23 nt, Human
ucucugauacuuuuuugaaauca

SEQ ID NO: 1958484 - RNA, 16 nt, Human
ucucugcaggucccua

SEQ ID NO: 1958485 - RNA, 15 nt, Human
ucucugcaggucccu

SEQ ID NO: 1958486 - RNA, 19 nt, Human
ucucuaacuucaccauauu

SEQ ID NO: 1958487 - RNA, 11 nt, Human
ucucuaauaau

SEQ ID NO: 1958488 - RNA, 12 nt, Human
ucucuaauaaua

SEQ ID NO: 1958489 - RNA, 14 nt, Human
ucucuaauaauaaa

SEQ ID NO: 1958490 - RNA, 15 nt, Human
ucucuaauaauaaau

SEQ ID NO: 1958491 - RNA, 17 nt, Human
ucucuaauaauaaauag

SEQ ID NO: 1958492 - RNA, 18 nt, Human
ucucuaauaauaaauagu

SEQ ID NO: 1958493 - RNA, 22 nt, Human
ucucuaauaauaaauaguucuu

SEQ ID NO: 1958494 - RNA, 23 nt, Human
ucucuaauauccacuuguccaug

SEQ ID NO: 1958495 - RNA, 14 nt, Human
ucucuaacagugga

SEQ ID NO: 1958496 - RNA, 12 nt, Human
ucucuaacuuca

SEQ ID NO: 1958497 - RNA, 20 nt, Human
ucucuaacaguggacaaagu

SEQ ID NO: 1958498 - RNA, 22 nt, Human
ucucgugauugauaagaaccuu

SEQ ID NO: 1958499 - RNA, 14 nt, Human
ucucgugauugaua

SEQ ID NO: 1958500 - RNA, 24 nt, Human
ucucguauagaagucuucaugaaa

SEQ ID NO: 1958501 - RNA, 23 nt, Human
ucucguguuauuuuaaucucaga

SEQ ID NO: 1958502 - RNA, 19 nt, Human
ucuccuguaccucuugagc

SEQ ID NO: 1958503 - RNA, 14 nt, Human
ucucguauagaagu

SEQ ID NO: 1958504 - RNA, 16 nt, Human
ucuccuguaccucuug

SEQ ID NO: 1958505 - RNA, 17 nt, Human
ucuccuguaccucuuga

SEQ ID NO: 1958506 - RNA, 15 nt, Human
ucuccuguaccucuu

SEQ ID NO: 1958507 - RNA, 21 nt, Human
ucuccuggaaauauuaagaaa

SEQ ID NO: 1958508 - RNA, 21 nt, Human
ucuccuggaagugcuaauuuu

SEQ ID NO: 1958509 - RNA, 19 nt, Human
ucuccugccucagccuccc

SEQ ID NO: 1958510 - RNA, 17 nt, Human
ucuccugccucagccuc

SEQ ID NO: 1958511 - RNA, 15 nt, Human
ucuccugccucagcc

SEQ ID NO: 1958512 - RNA, 12 nt, Human
ucuccugccuca

SEQ ID NO: 1958513 - RNA, 18 nt, Human
ucucaaguuuaugucuca

SEQ ID NO: 1958514 - RNA, 19 nt, Human
ucucaagagggcacuggug

SEQ ID NO: 1958515 - RNA, 17 nt, Human
ucucaagagggcacugg

SEQ ID NO: 1958516 - RNA, 18 nt, Human
ucucaagagggcacuggu

SEQ ID NO: 1958517 - RNA, 23 nt, Human
ucucaaauuguaauuaauaauag

SEQ ID NO: 1958518 - RNA, 17 nt, Human
ucugcauucaggaucaa

SEQ ID NO: 1958519 - RNA, 20 nt, Human
ucugccacagggacuugccu

SEQ ID NO: 1958520 - RNA, 17 nt, Human
ucugccacccugcugag

SEQ ID NO: 1958521 - RNA, 20 nt, Human
ucugcacauaaacucuuuua

SEQ ID NO: 1958522 - RNA, 14 nt, Human
ucugacccacugcu

SEQ ID NO: 1958523 - RNA, 15 nt, Human
ucugacccacugcuu

SEQ ID NO: 1958524 - RNA, 23 nt, Human
ucugaggaauccagacccggcug

SEQ ID NO: 1958525 - RNA, 21 nt, Human
ucugaggaauggacauuucua

SEQ ID NO: 1958526 - RNA, 14 nt, Human
ucugaggcccugcc

SEQ ID NO: 1958527 - RNA, 14 nt, Human
ucugcaacucugaa

SEQ ID NO: 1958528 - RNA, 15 nt, Human
ucugcaacucugaag

SEQ ID NO: 1958529 - RNA, 11 nt, Human
ucugaggcuga

SEQ ID NO: 1958530 - RNA, 23 nt, Human
ucugaggcugaaauucagaauau

SEQ ID NO: 1958531 - RNA, 17 nt, Human
ucugaggccguugcuga

SEQ ID NO: 1958532 - RNA, 21 nt, Human
ucugaggccguugcugacuua

SEQ ID NO: 1958533 - RNA, 22 nt, Human
ucugaggccguugcugacuuag

SEQ ID NO: 1958534 - RNA, 21 nt, Human
ucugcaagaauugaagcagga

SEQ ID NO: 1958535 - RNA, 20 nt, Human
ucugcaagaauugaagcagg

SEQ ID NO: 1958536 - RNA, 19 nt, Human
ucugcacauaaacucuuuu

SEQ ID NO: 1958537 - RNA, 14 nt, Human
ucugcacacagcac

SEQ ID NO: 1958538 - RNA, 17 nt, Human
ucugaaauuuccuggga

SEQ ID NO: 1958539 - RNA, 18 nt, Human
ucugaaauuuccugggag

SEQ ID NO: 1958540 - RNA, 20 nt, Human
ucugaaauuuccugggagcu

SEQ ID NO: 1958541 - RNA, 16 nt, Human
ucugacacacagcucu

SEQ ID NO: 1958542 - RNA, 17 nt, Human
ucugacacacagcucug

SEQ ID NO: 1958543 - RNA, 18 nt, Human
ucugacacacagcucugu

SEQ ID NO: 1958544 - RNA, 19 nt, Human
ucugacacacagcucuguc

SEQ ID NO: 1958545 - RNA, 12 nt, Human
ucugacaggcaa

SEQ ID NO: 1958546 - RNA, 21 nt, Human
ucugacaggcaaugcuggcug

SEQ ID NO: 1958547 - RNA, 22 nt, Human
ucugacaggcaaugcuggcugu

SEQ ID NO: 1958548 - RNA, 15 nt, Human
ucugacauaaguauu

SEQ ID NO: 1958549 - RNA, 13 nt, Human
ucugacccacugc

SEQ ID NO: 1958550 - RNA, 13 nt, Human
ucucuuaucugug

SEQ ID NO: 1958551 - RNA, 14 nt, Human
ucucuuuuuuaagu

SEQ ID NO: 1958552 - RNA, 12 nt, Human
ucucuuagaaaa

SEQ ID NO: 1958553 - RNA, 16 nt, Human
ucucuuagaaaaggug

SEQ ID NO: 1958554 - RNA, 14 nt, Human
ucucuguuccauag

SEQ ID NO: 1958555 - RNA, 22 nt, Human
ucugaaaauugaugggauuugg

SEQ ID NO: 1958556 - RNA, 16 nt, Human
ucugaaaccaaaugua

SEQ ID NO: 1958557 - RNA, 18 nt, Human
ucugaaagagucuuucuu

SEQ ID NO: 1958558 - RNA, 22 nt, Human
ucugaaagagucuuucuucuuc

SEQ ID NO: 1958559 - RNA, 13 nt, Human
ucugaaaauguau

SEQ ID NO: 1958560 - RNA, 14 nt, Human
ucugaaaauugaug

SEQ ID NO: 1958561 - RNA, 15 nt, Human
ucucuuuuuuacaaa

SEQ ID NO: 1958562 - RNA, 16 nt, Human
ucucuuuuuuacaaag

SEQ ID NO: 1958563 - RNA, 17 nt, Human
ucucuuuuuuacaaagg

SEQ ID NO: 1958564 - RNA, 22 nt, Human
ucuuaaauauguggaguucauc

SEQ ID NO: 1958565 - RNA, 17 nt, Human
ucuuaaccagaucauug

SEQ ID NO: 1958566 - RNA, 16 nt, Human
ucuuaaccagaucauu

SEQ ID NO: 1958567 - RNA, 22 nt, Human
ucuuaaccagaucauugugaaa

SEQ ID NO: 1958568 - RNA, 12 nt, Human
ucuuaaccaucu

SEQ ID NO: 1958569 - RNA, 13 nt, Human
ucuuaagaaauaa

SEQ ID NO: 1958570 - RNA, 14 nt, Human
ucuuaagaaauaaa

SEQ ID NO: 1958571 - RNA, 16 nt, Human
ucuuaagaaauaaauc

SEQ ID NO: 1958572 - RNA, 9 nt, Human
ucugucugc

SEQ ID NO: 1958573 - RNA, 12 nt, Human
ucugucugcugg

SEQ ID NO: 1958574 - RNA, 13 nt, Human
ucugucugcuggu

SEQ ID NO: 1958575 - RNA, 22 nt, Human
ucugucugcuggucacuucuuc

SEQ ID NO: 1958576 - RNA, 13 nt, Human
ucugucuggucca

SEQ ID NO: 1958577 - RNA, 14 nt, Human
ucuguuuuuaaaaa

SEQ ID NO: 1958578 - RNA, 13 nt, Human
ucuuaaaaagugg

SEQ ID NO: 1958579 - RNA, 15 nt, Human
ucuguuuuuaaaaau

SEQ ID NO: 1958580 - RNA, 12 nt, Human
ucuuaaaaagua

SEQ ID NO: 1958581 - RNA, 13 nt, Human
ucuuaaaaaguaa

SEQ ID NO: 1958582 - RNA, 15 nt, Human
ucuucucauuacuug

SEQ ID NO: 1958583 - RNA, 17 nt, Human
ucuucucauuacuuguu

SEQ ID NO: 1958584 - RNA, 12 nt, Human
ucuucuccacug

SEQ ID NO: 1958585 - RNA, 12 nt, Human
ucuucuccccca

SEQ ID NO: 1958586 - RNA, 13 nt, Human
ucuucucccccau

SEQ ID NO: 1958587 - RNA, 16 nt, Human
ucuucucccccauccu

SEQ ID NO: 1958588 - RNA, 16 nt, Human
ucuucuuuuuuuguga

SEQ ID NO: 1958589 - RNA, 17 nt, Human
ucuucuuuuuuugugau

SEQ ID NO: 1958590 - RNA, 18 nt, Human
ucuucuuuuuuugugaug

SEQ ID NO: 1958591 - RNA, 14 nt, Human
ucuucuccuuucac

SEQ ID NO: 1958592 - RNA, 13 nt, Human
ucuucuccuuuca

SEQ ID NO: 1958593 - RNA, 16 nt, Human
ucuucuccccuuccau

SEQ ID NO: 1958594 - RNA, 21 nt, Human
ucuucuccccuuccauuucug

SEQ ID NO: 1958595 - RNA, 13 nt, Human
ucuugaaaaaugc

SEQ ID NO: 1958596 - RNA, 12 nt, Human
ucuugaacuccu

SEQ ID NO: 1958597 - RNA, 17 nt, Human
ucuugaacuccugaccu

SEQ ID NO: 1958598 - RNA, 19 nt, Human
ucuugaacuccugaccuca

SEQ ID NO: 1958599 - RNA, 18 nt, Human
ucuucagaucucuaacuu

SEQ ID NO: 1958600 - RNA, 23 nt, Human
ucuucagaucucuaacuucacca

SEQ ID NO: 1958601 - RNA, 17 nt, Human
ucuucagcacaaaagga

SEQ ID NO: 1958602 - RNA, 17 nt, Human
ucuuaggccaggcgugg

SEQ ID NO: 1958603 - RNA, 17 nt, Human
ucuuccuggauuauuca

SEQ ID NO: 1958604 - RNA, 13 nt, Human
ucuuccuggacag

SEQ ID NO: 1958605 - RNA, 19 nt, Human
ucuuccuggacaggccagg

SEQ ID NO: 1958606 - RNA, 12 nt, Human
ucuuccuggccg

SEQ ID NO: 1958607 - RNA, 20 nt, Human
ucuuccuggucgaaaguuag

SEQ ID NO: 1958608 - RNA, 21 nt, Human
ucuuccuggucgaaaguuagu

SEQ ID NO: 1958609 - RNA, 16 nt, Human
ucuuccuggugacccu

SEQ ID NO: 1958610 - RNA, 13 nt, Human
ucuucaugaaaug

SEQ ID NO: 1958611 - RNA, 14 nt, Human
ucuucaugaaaugc

SEQ ID NO: 1958612 - RNA, 16 nt, Human
ucuucaugaaaugcua

SEQ ID NO: 1958613 - RNA, 14 nt, Human
ucugccugcccagg

SEQ ID NO: 1958614 - RNA, 13 nt, Human
ucugccugcccag

SEQ ID NO: 1958615 - RNA, 22 nt, Human
ucugccagauguccuaauggug

SEQ ID NO: 1958616 - RNA, 23 nt, Human
ucugccagauguccuaaugguga

SEQ ID NO: 1958617 - RNA, 22 nt, Human
ucugcuccccuaaagccucaaa

SEQ ID NO: 1958618 - RNA, 16 nt, Human
ucugcucccccuuuuc

SEQ ID NO: 1958619 - RNA, 20 nt, Human
ucugcucccccuuuucccuc

SEQ ID NO: 1958620 - RNA, 15 nt, Human
ucugccugcccaggc

SEQ ID NO: 1958621 - RNA, 16 nt, Human
ucugccugcccaggcc

SEQ ID NO: 1958622 - RNA, 18 nt, Human
ucugcuccucuccccagc

SEQ ID NO: 1958623 - RNA, 21 nt, Human
ucugcuccucuccccagcaag

SEQ ID NO: 1958624 - RNA, 18 nt, Human
ucugcugacagacacagg

SEQ ID NO: 1958625 - RNA, 17 nt, Human
ucugcugacagacacag

SEQ ID NO: 1958626 - RNA, 23 nt, Human
ucuggaaucauuguccagagcug

SEQ ID NO: 1958627 - RNA, 21 nt, Human
ucuggacaggcauguucucug

SEQ ID NO: 1958628 - RNA, 16 nt, Human
ucuggaaugcaguggu

SEQ ID NO: 1958629 - RNA, 14 nt, Human
ucuggacaggcaug

SEQ ID NO: 1958630 - RNA, 19 nt, Human
ucuggaauaaggagaauga

SEQ ID NO: 1958631 - RNA, 15 nt, Human
ucuggaaugcagugg

SEQ ID NO: 1958632 - RNA, 20 nt, Human
ucugcuggucacuucuucug

SEQ ID NO: 1958633 - RNA, 21 nt, Human
ucugcuggucacuucuucugu

SEQ ID NO: 1958634 - RNA, 19 nt, Human
ucugcugacagacacaggc

SEQ ID NO: 1958635 - RNA, 20 nt, Human
ucugcugacagacacaggcc

SEQ ID NO: 1958636 - RNA, 21 nt, Human
ucugcugacagacacaggccc

SEQ ID NO: 1958637 - RNA, 22 nt, Human
ucugcugacagacacaggcccg

SEQ ID NO: 1958638 - RNA, 22 nt, Human
ucugcugauccucccaggcuuc

SEQ ID NO: 1958639 - RNA, 23 nt, Human
ucugcuggcaucaagagguggga

SEQ ID NO: 1958640 - RNA, 17 nt, Human
ucuggccuucggccucc

SEQ ID NO: 1958641 - RNA, 14 nt, Human
ucuggaccccaucu

SEQ ID NO: 1958642 - RNA, 17 nt, Human
ucuggaccccaucugug

SEQ ID NO: 1958643 - RNA, 18 nt, Human
ucuggaccccaucuguga

SEQ ID NO: 1958644 - RNA, 19 nt, Human
ucuggaccccaucugugaa

SEQ ID NO: 1958645 - RNA, 18 nt, Human
ucuggccuucggccucca

SEQ ID NO: 1958646 - RNA, 23 nt, Human
ucuggccuucggccuccauccug

SEQ ID NO: 1958647 - RNA, 19 nt, Human
ucuggcuaugcauuugaaa

SEQ ID NO: 1958648 - RNA, 22 nt, Human
ucuggcuaugcauuugaaaauu

SEQ ID NO: 1958649 - RNA, 15 nt, Human
ucuggcuccagcugg

SEQ ID NO: 1958650 - RNA, 21 nt, Human
ucuggaccccaucugugaaua

SEQ ID NO: 1958651 - RNA, 20 nt, Human
ucuggaccccaucugugaau

SEQ ID NO: 1958652 - RNA, 23 nt, Human
ucuggcucuuccaggcugggaga

SEQ ID NO: 1958653 - RNA, 18 nt, Human
ucuggcucuuccaggcug

SEQ ID NO: 1958654 - RNA, 14 nt, Human
ucuggcugcagagc

SEQ ID NO: 1958655 - RNA, 14 nt, Human
ucugggacacaguu

SEQ ID NO: 1958656 - RNA, 23 nt, Human
ucuggugacuuuccucuuugguc

SEQ ID NO: 1958657 - RNA, 22 nt, Human
ucugucucuggauuauauuaug

SEQ ID NO: 1958658 - RNA, 16 nt, Human
ucugucgcccagucug

SEQ ID NO: 1958659 - RNA, 14 nt, Human
ucugucgcccaguc

SEQ ID NO: 1958660 - RNA, 21 nt, Human
ucuguccugggagugagcugg

SEQ ID NO: 1958661 - RNA, 20 nt, Human
ucuguccuacucugugucag

SEQ ID NO: 1958662 - RNA, 15 nt, Human
ucuguccuacucugu

SEQ ID NO: 1958663 - RNA, 19 nt, Human
ucuguccuacucuguguca

SEQ ID NO: 1958664 - RNA, 14 nt, Human
ucuguccuacucug

SEQ ID NO: 1958665 - RNA, 20 nt, Human
ucugguuccuccccuccucc

SEQ ID NO: 1958666 - RNA, 21 nt, Human
ucugguuccuccccuccuccu

SEQ ID NO: 1958667 - RNA, 13 nt, Human
ucugguuccuccc

SEQ ID NO: 1958668 - RNA, 23 nt, Human
ucaaauauauucagccuggcuuc

SEQ ID NO: 1958669 - RNA, 22 nt, Human
ucaaauauauucagccuggcuu

SEQ ID NO: 1958670 - RNA, 21 nt, Human
ucaaauauauucagccuggcu

SEQ ID NO: 1958671 - RNA, 23 nt, Human
ucaaagaccuggggcugcuguga

SEQ ID NO: 1958672 - RNA, 23 nt, Human
ucaaagaaucaccuaauuaauuu

SEQ ID NO: 1958673 - RNA, 21 nt, Human
ucaaagaccuggggcugcugu

SEQ ID NO: 1958674 - RNA, 14 nt, Human
ucaaauccaggacc

SEQ ID NO: 1958675 - RNA, 18 nt, Human
ucaaaaaucaauaugcag

SEQ ID NO: 1958676 - RNA, 11 nt, Human
ucaaaaaucug

SEQ ID NO: 1958677 - RNA, 14 nt, Human
ucaaaaaacuugua

SEQ ID NO: 1958678 - RNA, 15 nt, Human
ucaaaaaacuuguaa

SEQ ID NO: 1958679 - RNA, 20 nt, Human
ucaaaaaucugaagauuguu

SEQ ID NO: 1958680 - RNA, 22 nt, Human
ucaaaacaaacagaugcucuga

SEQ ID NO: 1958681 - RNA, 17 nt, Human
ucaaaaaucugaagauu

SEQ ID NO: 1958682 - RNA, 18 nt, Human
ucaaaaaucugaagauug

SEQ ID NO: 1958683 - RNA, 13 nt, Human
ucaaaaaucugaa

SEQ ID NO: 1958684 - RNA, 14 nt, Human
ucaaaaaucugaag

SEQ ID NO: 1958685 - RNA, 15 nt, Human
ucaaaaaucugaaga

SEQ ID NO: 1958686 - RNA, 16 nt, Human
ucaaaaaucugaagau

SEQ ID NO: 1958687 - RNA, 16 nt, Human
ucaaaacaaaggccua

SEQ ID NO: 1958688 - RNA, 21 nt, Human
ucaaaugcucagaccagcucu

SEQ ID NO: 1958689 - RNA, 10 nt, Human
ucaaauuaau

SEQ ID NO: 1958690 - RNA, 13 nt, Human
ucaaauuaauugu

SEQ ID NO: 1958691 - RNA, 15 nt, Human
ucaaauuaauugugu

SEQ ID NO: 1958692 - RNA, 16 nt, Human
ucaaauuaauugugug

SEQ ID NO: 1958693 - RNA, 17 nt, Human
ucaaauuaauuguguga

SEQ ID NO: 1958694 - RNA, 18 nt, Human
ucaaauuaauugugugaa

SEQ ID NO: 1958695 - RNA, 19 nt, Human
ucaaaugcucagaccagcu

SEQ ID NO: 1958696 - RNA, 14 nt, Human
ucaaaugcucagac

SEQ ID NO: 1958697 - RNA, 22 nt, Human
ucaaaugaugugccugcuucag

SEQ ID NO: 1958698 - RNA, 17 nt, Human
ucaaaugcuagaaaaau

SEQ ID NO: 1958699 - RNA, 18 nt, Human
ucaaaugcuagaaaaauu

SEQ ID NO: 1958700 - RNA, 18 nt, Human
ucaaaugaugugccugcu

SEQ ID NO: 1958701 - RNA, 19 nt, Human
ucaaaugaugugccugcuu

SEQ ID NO: 1958702 - RNA, 22 nt, Human
ucaaauccaggacccugccagg

SEQ ID NO: 1958703 - RNA, 15 nt, Human
ucaaauccaggaccc

SEQ ID NO: 1958704 - RNA, 16 nt, Human
ucaaauccaggacccu

SEQ ID NO: 1958705 - RNA, 19 nt, Human
ucaaauccaggacccugcc

SEQ ID NO: 1958706 - RNA, 21 nt, Human
ucaaauccaggacccugccag

SEQ ID NO: 1958707 - RNA, 23 nt, Human
ucaaccccuucgcuccugugucu

SEQ ID NO: 1958708 - RNA, 16 nt, Human
ucaaauuguaauuaau

SEQ ID NO: 1958709 - RNA, 20 nt, Human
ucaaauuguaagcaugcaca

SEQ ID NO: 1958710 - RNA, 17 nt, Human
ucaaauuguaagcaugc

SEQ ID NO: 1958711 - RNA, 13 nt, Human
ucaaauuguaauu

SEQ ID NO: 1958712 - RNA, 15 nt, Human
ucaaaaaaagaaaaa

SEQ ID NO: 1958713 - RNA, 14 nt, Human
ucaaaaaaagaaaa

SEQ ID NO: 1958714 - RNA, 18 nt, Human
uauuuuuuuuaauuguau

SEQ ID NO: 1958715 - RNA, 19 nt, Human
uauuuuuuuuaauuguauu

SEQ ID NO: 1958716 - RNA, 16 nt, Human
uauuuuuuuuaauugu

SEQ ID NO: 1958717 - RNA, 14 nt, Human
uauuuuuuuacuaa

SEQ ID NO: 1958718 - RNA, 17 nt, Human
uauuuuuuucuuuucuu

SEQ ID NO: 1958719 - RNA, 13 nt, Human
uauuuuuuugaac

SEQ ID NO: 1958720 - RNA, 22 nt, Human
uauuuucccuauuagagaagag

SEQ ID NO: 1958721 - RNA, 14 nt, Human
uauuuuccugauag

SEQ ID NO: 1958722 - RNA, 18 nt, Human
uauuuuccugauagcaua

SEQ ID NO: 1958723 - RNA, 19 nt, Human
uauuuuccugauagcauau

SEQ ID NO: 1958724 - RNA, 14 nt, Human
uauuuucuaaagua

SEQ ID NO: 1958725 - RNA, 21 nt, Human
uauuuucucugauacuuuuuu

SEQ ID NO: 1958726 - RNA, 14 nt, Human
uauuuuauuaugca

SEQ ID NO: 1958727 - RNA, 17 nt, Human
uauuuuauuaugcauga

SEQ ID NO: 1958728 - RNA, 13 nt, Human
uauuuuauuaaua

SEQ ID NO: 1958729 - RNA, 20 nt, Human
uauuuuauuuuuagaauuuu

SEQ ID NO: 1958730 - RNA, 19 nt, Human
uauuuucaacgcagcccug

SEQ ID NO: 1958731 - RNA, 16 nt, Human
uauuuauaagaaaaau

SEQ ID NO: 1958732 - RNA, 20 nt, Human
uauuuauaagaaaaauguga

SEQ ID NO: 1958733 - RNA, 17 nt, Human
uauuuuauguugcauag

SEQ ID NO: 1958734 - RNA, 18 nt, Human
ucacauuuauucugcuca

SEQ ID NO: 1958735 - RNA, 19 nt, Human
ucacauuuauucugcucac

SEQ ID NO: 1958736 - RNA, 16 nt, Human
ucacagugugauuuug

SEQ ID NO: 1958737 - RNA, 17 nt, Human
ucacagugugauuuuga

SEQ ID NO: 1958738 - RNA, 17 nt, Human
ucacauuuauucugcuc

SEQ ID NO: 1958739 - RNA, 14 nt, Human
ucaccacagacuuu

SEQ ID NO: 1958740 - RNA, 22 nt, Human
ucacauuuuuauaccuguuuaa

SEQ ID NO: 1958741 - RNA, 20 nt, Human
ucaccaaaucagcugcuacu

SEQ ID NO: 1958742 - RNA, 19 nt, Human
ucaccaaaucagcugcuac

SEQ ID NO: 1958743 - RNA, 14 nt, Human
ucaccaaggcugau

SEQ ID NO: 1958744 - RNA, 20 nt, Human
ucacauuuuuauaccuguuu

SEQ ID NO: 1958745 - RNA, 17 nt, Human
ucacaccccaccugcgc

SEQ ID NO: 1958746 - RNA, 18 nt, Human
ucacaccccaccugcgcu

SEQ ID NO: 1958747 - RNA, 20 nt, Human
ucacaccccaccugcgcuuc

SEQ ID NO: 1958748 - RNA, 13 nt, Human
ucacaccccaccu

SEQ ID NO: 1958749 - RNA, 14 nt, Human
ucacaccccaccug

SEQ ID NO: 1958750 - RNA, 15 nt, Human
ucacaccccaccugc

SEQ ID NO: 1958751 - RNA, 16 nt, Human
ucacaccccaccugcg

SEQ ID NO: 1958752 - RNA, 12 nt, Human
ucacaccccacc

SEQ ID NO: 1958753 - RNA, 13 nt, Human
ucacaagacccaa

SEQ ID NO: 1958754 - RNA, 14 nt, Human
ucaauuacauguuu

SEQ ID NO: 1958755 - RNA, 20 nt, Human
ucaauuacaggaaguacugg

SEQ ID NO: 1958756 - RNA, 17 nt, Human
ucacaagacccaaaagg

SEQ ID NO: 1958757 - RNA, 18 nt, Human
ucacaagacccaaaaggc

SEQ ID NO: 1958758 - RNA, 16 nt, Human
ucacagucacauucca

SEQ ID NO: 1958759 - RNA, 19 nt, Human
ucacaguccuuaccagcag

SEQ ID NO: 1958760 - RNA, 23 nt, Human
ucacaguccuuaccagcagagca

SEQ ID NO: 1958761 - RNA, 22 nt, Human
ucacaguccuuaccagcagagc

SEQ ID NO: 1958762 - RNA, 16 nt, Human
ucacaggcagguccag

SEQ ID NO: 1958763 - RNA, 17 nt, Human
ucacaggcagguccagg

SEQ ID NO: 1958764 - RNA, 18 nt, Human
ucacaggcagguccaggg

SEQ ID NO: 1958765 - RNA, 19 nt, Human
ucacaggcagguccagggu

SEQ ID NO: 1958766 - RNA, 20 nt, Human
ucaagugauucuccugccuc

SEQ ID NO: 1958767 - RNA, 18 nt, Human
ucaagugauucuccugcc

SEQ ID NO: 1958768 - RNA, 21 nt, Human
ucaagugauucuccugccuca

SEQ ID NO: 1958769 - RNA, 14 nt, Human
ucaacgcagcccug

SEQ ID NO: 1958770 - RNA, 15 nt, Human
ucaacgcagcccugc

SEQ ID NO: 1958771 - RNA, 18 nt, Human
ucaacgcagcccugcuuu

SEQ ID NO: 1958772 - RNA, 13 nt, Human
ucaaguucacacc

SEQ ID NO: 1958773 - RNA, 16 nt, Human
ucaaguucacaccugc

SEQ ID NO: 1958774 - RNA, 17 nt, Human
ucaaugccccugaauuu

SEQ ID NO: 1958775 - RNA, 18 nt, Human
ucaaugccccugaauuua

SEQ ID NO: 1958776 - RNA, 20 nt, Human
ucaaugccccugaauuuaaa

SEQ ID NO: 1958777 - RNA, 21 nt, Human
ucaaugugauauaaacagcuu

SEQ ID NO: 1958778 - RNA, 23 nt, Human
ucaauuacaggaaguacuggaga

SEQ ID NO: 1958779 - RNA, 21 nt, Human
ucaauuacaggaaguacugga

SEQ ID NO: 1958780 - RNA, 13 nt, Human
ucaaugcagcccc

SEQ ID NO: 1958781 - RNA, 23 nt, Human
ucaauaauuuguggugauuugga

SEQ ID NO: 1958782 - RNA, 14 nt, Human
ucaauaacagccgc

SEQ ID NO: 1958783 - RNA, 16 nt, Human
ucaauaacagccgcuc

SEQ ID NO: 1958784 - RNA, 18 nt, Human
ucaauaacagccgcucca

SEQ ID NO: 1958785 - RNA, 20 nt, Human
ucaauaacagccgcuccaga

SEQ ID NO: 1958786 - RNA, 21 nt, Human
ucaauaacagccgcuccagag

SEQ ID NO: 1958787 - RNA, 24 nt, Human
ucaauaacagccgcuccagaguca

SEQ ID NO: 1958788 - RNA, 15 nt, Human
ucaauaaaguuugau

SEQ ID NO: 1958789 - RNA, 17 nt, Human
ucaauaaaguuugaucu

SEQ ID NO: 1958790 - RNA, 18 nt, Human
ucaauaaaguuugaucuu

SEQ ID NO: 1958791 - RNA, 19 nt, Human
ucaauaaaguuugaucuuc

SEQ ID NO: 1958792 - RNA, 12 nt, Human
ucaauaaaguuu

SEQ ID NO: 1958793 - RNA, 13 nt, Human
ucaauaaaguuug

SEQ ID NO: 1958794 - RNA, 14 nt, Human
ucaauaaaguuuga

SEQ ID NO: 1958795 - RNA, 21 nt, Human
uauugauaugcuuauacacuu

SEQ ID NO: 1958796 - RNA, 22 nt, Human
uauucuccuucugucaaaguca

SEQ ID NO: 1958797 - RNA, 18 nt, Human
uauucucuccuguaccuc

SEQ ID NO: 1958798 - RNA, 17 nt, Human
uauucucuccuguaccu

SEQ ID NO: 1958799 - RNA, 13 nt, Human
uauucucauucuu

SEQ ID NO: 1958800 - RNA, 14 nt, Human
uauugauugcuuuu

SEQ ID NO: 1958801 - RNA, 12 nt, Human
uauugaugaaaa

SEQ ID NO: 1958802 - RNA, 13 nt, Human
uauugaugaaaau

SEQ ID NO: 1958803 - RNA, 13 nt, Human
uauugauguuuuc

SEQ ID NO: 1958804 - RNA, 14 nt, Human
uauugauguuuuca

SEQ ID NO: 1958805 - RNA, 20 nt, Human
uauuggccauaagcaacaau

SEQ ID NO: 1958806 - RNA, 22 nt, Human
uauuggccauaagcaacaauuu

SEQ ID NO: 1958807 - RNA, 17 nt, Human
uauugcugauggugcaa

SEQ ID NO: 1958808 - RNA, 22 nt, Human
uauuggaaauuuguuauaauga

SEQ ID NO: 1958809 - RNA, 12 nt, Human
uauuguuuucag

SEQ ID NO: 1958810 - RNA, 20 nt, Human
uauuguuuucaguguacaug

SEQ ID NO: 1958811 - RNA, 18 nt, Human
uauuguuuucaguguaca

SEQ ID NO: 1958812 - RNA, 22 nt, Human
uauuguuuucaguguacaugga

SEQ ID NO: 1958813 - RNA, 19 nt, Human
uauuuaaaaacaaaaggca

SEQ ID NO: 1958814 - RNA, 13 nt, Human
uauuuaaaaacaa

SEQ ID NO: 1958815 - RNA, 15 nt, Human
uauuuaaaauguaaa

SEQ ID NO: 1958816 - RNA, 13 nt, Human
uauuuaaaaugua

SEQ ID NO: 1958817 - RNA, 24 nt, Human
uauuuauaaaaauaaaaaacacug

SEQ ID NO: 1958818 - RNA, 13 nt, Human
uauuuaaagaaau

SEQ ID NO: 1958819 - RNA, 19 nt, Human
uauuuaaagaaauauguau

SEQ ID NO: 1958820 - RNA, 19 nt, Human
uauuccugcccugcuguuu

SEQ ID NO: 1958821 - RNA, 17 nt, Human
uauuccugcauuuguga

SEQ ID NO: 1958822 - RNA, 19 nt, Human
uauuccugcauuugugaaa

SEQ ID NO: 1958823 - RNA, 20 nt, Human
uauuccugcauuugugaaau

SEQ ID NO: 1958824 - RNA, 21 nt, Human
uauuccugcauuugugaaaug

SEQ ID NO: 1958825 - RNA, 20 nt, Human
uauuccucuugcauuucacu

SEQ ID NO: 1958826 - RNA, 13 nt, Human
uauucuaauaagc

SEQ ID NO: 1958827 - RNA, 15 nt, Human
uauucuaauaagcua

SEQ ID NO: 1958828 - RNA, 17 nt, Human
uauucuaauaagcuagu

SEQ ID NO: 1958829 - RNA, 20 nt, Human
uauucuaauaagcuaguuga

SEQ ID NO: 1958830 - RNA, 12 nt, Human
uauucuauuuua

SEQ ID NO: 1958831 - RNA, 14 nt, Human
uauucuauuuuaca

SEQ ID NO: 1958832 - RNA, 15 nt, Human
uauucuauuuuacaa

SEQ ID NO: 1958833 - RNA, 17 nt, Human
uauucuauuuuacaacu

SEQ ID NO: 1958834 - RNA, 12 nt, Human
uauucccaugag

SEQ ID NO: 1958835 - RNA, 19 nt, Human
uauuccccacccuccccuu

SEQ ID NO: 1958836 - RNA, 22 nt, Human
uauuccccacccuccccuuccc

SEQ ID NO: 1958837 - RNA, 14 nt, Human
uauuccauauuaga

SEQ ID NO: 1958838 - RNA, 19 nt, Human
uauuccauauuagaaaacu

SEQ ID NO: 1958839 - RNA, 20 nt, Human
uauuccauauuagaaaacuu

SEQ ID NO: 1958840 - RNA, 23 nt, Human
uauuccauauuagaaaacuuugu

SEQ ID NO: 1958841 - RNA, 12 nt, Human
uauuccagagcu

SEQ ID NO: 1958842 - RNA, 17 nt, Human
uauuccagagcugccag

SEQ ID NO: 1958843 - RNA, 15 nt, Human
uauuacaauauuugu

SEQ ID NO: 1958844 - RNA, 19 nt, Human
uauuacaauauuugugugc

SEQ ID NO: 1958845 - RNA, 12 nt, Human
uauuacaauauu

SEQ ID NO: 1958846 - RNA, 13 nt, Human
uauuacaauauuu

SEQ ID NO: 1958847 - RNA, 14 nt, Human
uauuacaauauuug

SEQ ID NO: 1958848 - RNA, 11 nt, Human
uauuauuaaug

SEQ ID NO: 1958849 - RNA, 14 nt, Human
uauuauuaaugcuu

SEQ ID NO: 1958850 - RNA, 15 nt, Human
uauuauuaaugcuuu

SEQ ID NO: 1958851 - RNA, 16 nt, Human
uauuauuaaugcuuug

SEQ ID NO: 1958852 - RNA, 15 nt, Human
gggaguggccacaga

SEQ ID NO: 1958853 - RNA, 13 nt, Human
gggaguggccaca

SEQ ID NO: 1958854 - RNA, 23 nt, Human
uauguaaaaauaaccuugcagaa

SEQ ID NO: 1958855 - RNA, 20 nt, Human
uauguaaaugguaugucauu

SEQ ID NO: 1958856 - RNA, 15 nt, Human
uauguaaauaauucu

SEQ ID NO: 1958857 - RNA, 21 nt, Human
uauguaaaugguaugucauuc

SEQ ID NO: 1958858 - RNA, 16 nt, Human
uauguaaacaaaucuu

SEQ ID NO: 1958859 - RNA, 17 nt, Human
uauguaaacaaaucuuu

SEQ ID NO: 1958860 - RNA, 21 nt, Human
uauguaaacaaaucuuuccau

SEQ ID NO: 1958861 - RNA, 23 nt, Human
uauguaaacaaaucuuuccauau

SEQ ID NO: 1958862 - RNA, 13 nt, Human
uauguaaauaauu

SEQ ID NO: 1958863 - RNA, 14 nt, Human
uauguaaauaauuc

SEQ ID NO: 1958864 - RNA, 17 nt, Human
uauguaaauaauucuuu

SEQ ID NO: 1958865 - RNA, 15 nt, Human
uauguauaauucaaa

SEQ ID NO: 1958866 - RNA, 13 nt, Human
uauguauacaugu

SEQ ID NO: 1958867 - RNA, 14 nt, Human
uauguauacaugug

SEQ ID NO: 1958868 - RNA, 21 nt, Human
uauguauacaugugccaugcu

SEQ ID NO: 1958869 - RNA, 16 nt, Human
uauguaugguuugaaa

SEQ ID NO: 1958870 - RNA, 17 nt, Human
uauguaugguuugaaaa

SEQ ID NO: 1958871 - RNA, 13 nt, Human
uauguauguguuu

SEQ ID NO: 1958872 - RNA, 15 nt, Human
uauguauguguuuag

SEQ ID NO: 1958873 - RNA, 16 nt, Human
uauguauguguuuaga

SEQ ID NO: 1958874 - RNA, 17 nt, Human
uauguauguguuuagaa

SEQ ID NO: 1958875 - RNA, 20 nt, Human
uauguauguguuuagaauug

SEQ ID NO: 1958876 - RNA, 21 nt, Human
uauguauguguuuagaauuga

SEQ ID NO: 1958877 - RNA, 22 nt, Human
uauguauguguuuagaauugaa

SEQ ID NO: 1958878 - RNA, 14 nt, Human
uauguacuacauga

SEQ ID NO: 1958879 - RNA, 15 nt, Human
uauguagacaauaua

SEQ ID NO: 1958880 - RNA, 17 nt, Human
uauguacauuucuaagu

SEQ ID NO: 1958881 - RNA, 21 nt, Human
uauguacauuucuaagucaaa

SEQ ID NO: 1958882 - RNA, 13 nt, Human
uauguacauuucu

SEQ ID NO: 1958883 - RNA, 14 nt, Human
uauguacauuucua

SEQ ID NO: 1958884 - RNA, 15 nt, Human
uauguacauuucuaa

SEQ ID NO: 1958885 - RNA, 16 nt, Human
uauguacauuucuaag

SEQ ID NO: 1958886 - RNA, 16 nt, Human
uauguugcauagaaua

SEQ ID NO: 1958887 - RNA, 13 nt, Human
uauguugcccagg

SEQ ID NO: 1958888 - RNA, 16 nt, Human
uauguugcccaggcag

SEQ ID NO: 1958889 - RNA, 19 nt, Human
uauguugcccaggcagguc

SEQ ID NO: 1958890 - RNA, 23 nt, Human
uauguuuaaaguaauuguuccag

SEQ ID NO: 1958891 - RNA, 16 nt, Human
uauguuguuuuguaca

SEQ ID NO: 1958892 - RNA, 22 nt, Human
uauguuuaaaguaauuguucca

SEQ ID NO: 1958893 - RNA, 20 nt, Human
uauguugcccaggcaggucu

SEQ ID NO: 1958894 - RNA, 13 nt, Human
uauguugacauuu

SEQ ID NO: 1958895 - RNA, 14 nt, Human
uauguugacauuug

SEQ ID NO: 1958896 - RNA, 16 nt, Human
uaugucauuucauguc

SEQ ID NO: 1958897 - RNA, 12 nt, Human
uaugucauuuca

SEQ ID NO: 1958898 - RNA, 13 nt, Human
uaugucauuucau

SEQ ID NO: 1958899 - RNA, 15 nt, Human
uaugucauuucaugu

SEQ ID NO: 1958900 - RNA, 12 nt, Human
uauguugcauag

SEQ ID NO: 1958901 - RNA, 15 nt, Human
uauguugacauuugu

SEQ ID NO: 1958902 - RNA, 16 nt, Human
uauguugacauuuguu

SEQ ID NO: 1958903 - RNA, 14 nt, Human
uauguugauaaaag

SEQ ID NO: 1958904 - RNA, 22 nt, Human
uauguauuaacacuacucaaag

SEQ ID NO: 1958905 - RNA, 13 nt, Human
uauguauucugua

SEQ ID NO: 1958906 - RNA, 16 nt, Human
uauguauucuguaaaa

SEQ ID NO: 1958907 - RNA, 14 nt, Human
uauguauuaacacu

SEQ ID NO: 1958908 - RNA, 22 nt, Human
uauguuugccacuuugcaaagg

SEQ ID NO: 1958909 - RNA, 19 nt, Human
uauguuuguacaagauugu

SEQ ID NO: 1958910 - RNA, 12 nt, Human
uauuaaauuaug

SEQ ID NO: 1958911 - RNA, 12 nt, Human
uauuaaauuaca

SEQ ID NO: 1958912 - RNA, 14 nt, Human
uauuaaauuacauu

SEQ ID NO: 1958913 - RNA, 20 nt, Human
uauuaaauuacauuuguaau

SEQ ID NO: 1958914 - RNA, 22 nt, Human
uauuaaauuacauuuguaauuu

SEQ ID NO: 1958915 - RNA, 24 nt, Human
uauuaagaaagacuaucuaaaugu

SEQ ID NO: 1958916 - RNA, 23 nt, Human
uauuaaauuuuuuuguaugaaaa

SEQ ID NO: 1958917 - RNA, 17 nt, Human
uauuaaauuuuuuugua

SEQ ID NO: 1958918 - RNA, 18 nt, Human
uauuaaauuuuuuuguau

SEQ ID NO: 1958919 - RNA, 20 nt, Human
uauuaaauuuuuuuguauga

SEQ ID NO: 1958920 - RNA, 21 nt, Human
uauuaaauuuuuuuguaugaa

SEQ ID NO: 1958921 - RNA, 22 nt, Human
uauuaaauuuuuuuguaugaaa

SEQ ID NO: 1958922 - RNA, 18 nt, Human
uauuaagauuauaauugu

SEQ ID NO: 1958923 - RNA, 17 nt, Human
uauuaagauuauaauug

SEQ ID NO: 1958924 - RNA, 12 nt, Human
uauuaaucacug

SEQ ID NO: 1958925 - RNA, 13 nt, Human
uauuaaucacugu

SEQ ID NO: 1958926 - RNA, 14 nt, Human
uauuaaucacugug

SEQ ID NO: 1958927 - RNA, 15 nt, Human
uauuaaucacugugu

SEQ ID NO: 1958928 - RNA, 16 nt, Human
uauuaaucacugugua

SEQ ID NO: 1958929 - RNA, 17 nt, Human
uauuaaucacuguguau

SEQ ID NO: 1958930 - RNA, 19 nt, Human
uauuaaucacuguguauau

SEQ ID NO: 1958931 - RNA, 20 nt, Human
uauuaaucacuguguauauu

SEQ ID NO: 1958932 - RNA, 22 nt, Human
uauuaaucacuguguauauuug

SEQ ID NO: 1958933 - RNA, 23 nt, Human
uauuaaucacuguguauauuuga

SEQ ID NO: 1958934 - RNA, 17 nt, Human
uauuaaucagaagaaaa

SEQ ID NO: 1958935 - RNA, 18 nt, Human
uccaggagcagccacauu

SEQ ID NO: 1958936 - RNA, 17 nt, Human
uccaggagcagccacau

SEQ ID NO: 1958937 - RNA, 22 nt, Human
uccaggagcagccacauuccug

SEQ ID NO: 1958938 - RNA, 23 nt, Human
uccaggggugggacacccuguga

SEQ ID NO: 1958939 - RNA, 15 nt, Human
uccaggugcacaagc

SEQ ID NO: 1958940 - RNA, 22 nt, Human
uccaggugcacaagcuccaagc

SEQ ID NO: 1958941 - RNA, 21 nt, Human
uccaggugcacaagcuccaag

SEQ ID NO: 1958942 - RNA, 20 nt, Human
uccaggugcacaagcuccaa

SEQ ID NO: 1958943 - RNA, 18 nt, Human
uccaggugcacaagcucc

SEQ ID NO: 1958944 - RNA, 14 nt, Human
uccagguggcauca

SEQ ID NO: 1958945 - RNA, 11 nt, Human
uccaggguggu

SEQ ID NO: 1958946 - RNA, 15 nt, Human
uccagguucagcuug

SEQ ID NO: 1958947 - RNA, 16 nt, Human
uccagguucagcuugu

SEQ ID NO: 1958948 - RNA, 18 nt, Human
uccagcucaccagcccca

SEQ ID NO: 1958949 - RNA, 16 nt, Human
uccagcucaccagccc

SEQ ID NO: 1958950 - RNA, 17 nt, Human
uccagcucaccagcccc

SEQ ID NO: 1958951 - RNA, 16 nt, Human
uccaggagcagccaca

SEQ ID NO: 1958952 - RNA, 17 nt, Human
uccagcuguucagcugg

SEQ ID NO: 1958953 - RNA, 15 nt, Human
uccacuuggucugug

SEQ ID NO: 1958954 - RNA, 16 nt, Human
uccacuuggucuguga

SEQ ID NO: 1958955 - RNA, 15 nt, Human
uccaccuucccaugc

SEQ ID NO: 1958956 - RNA, 15 nt, Human
uccaccugccaggga

SEQ ID NO: 1958957 - RNA, 17 nt, Human
uccaccugccagggaca

SEQ ID NO: 1958958 - RNA, 21 nt, Human
uccaccugccagggacagagg

SEQ ID NO: 1958959 - RNA, 18 nt, Human
uccaccugccagggacag

SEQ ID NO: 1958960 - RNA, 18 nt, Human
uccaccugcucugcugau

SEQ ID NO: 1958961 - RNA, 14 nt, Human
uccaccugcucugc

SEQ ID NO: 1958962 - RNA, 15 nt, Human
uccaccugcucugcu

SEQ ID NO: 1958963 - RNA, 16 nt, Human
uccaccugcucugcug

SEQ ID NO: 1958964 - RNA, 17 nt, Human
uccaccugcucugcuga

SEQ ID NO: 1958965 - RNA, 17 nt, Human
uccacagaggacacaga

SEQ ID NO: 1958966 - RNA, 19 nt, Human
uccacagaggacacagaga

SEQ ID NO: 1958967 - RNA, 15 nt, Human
uccacagaggacaca

SEQ ID NO: 1958968 - RNA, 12 nt, Human
uccacccugcuc

SEQ ID NO: 1958969 - RNA, 18 nt, Human
uccacaagagcccaggcc

SEQ ID NO: 1958970 - RNA, 15 nt, Human
uccacaagagcccag

SEQ ID NO: 1958971 - RNA, 17 nt, Human
uccacaagagcccaggc

SEQ ID NO: 1958972 - RNA, 16 nt, Human
uccacaagagcccagg

SEQ ID NO: 1958973 - RNA, 13 nt, Human
uccacacacacaa

SEQ ID NO: 1958974 - RNA, 14 nt, Human
uccacacacacaaa

SEQ ID NO: 1958975 - RNA, 18 nt, Human
uccacacacacaaaaaaa

SEQ ID NO: 1958976 - RNA, 21 nt, Human
uccacacacacaaaaaaagac

SEQ ID NO: 1958977 - RNA, 18 nt, Human
uccacaaguuaaauaaau

SEQ ID NO: 1958978 - RNA, 17 nt, Human
uccacaaguuaaauaaa

SEQ ID NO: 1958979 - RNA, 20 nt, Human
uccaaaauaaaacuuuuuaa

SEQ ID NO: 1958980 - RNA, 18 nt, Human
uccaaaauaaaacuuuuu

SEQ ID NO: 1958981 - RNA, 18 nt, Human
uccaauuuacauacucug

SEQ ID NO: 1958982 - RNA, 17 nt, Human
uccaauuuacauacucu

SEQ ID NO: 1958983 - RNA, 13 nt, Human
uccaauucuccuu

SEQ ID NO: 1958984 - RNA, 15 nt, Human
uccaauucuccuuua

SEQ ID NO: 1958985 - RNA, 13 nt, Human
uccaauuuuccuu

SEQ ID NO: 1958986 - RNA, 15 nt, Human
uccaauuuuccuuca

SEQ ID NO: 1958987 - RNA, 21 nt, Human
ucaucaccaacgucugugcca

SEQ ID NO: 1958988 - RNA, 20 nt, Human
ucaucaccaacgucugugcc

SEQ ID NO: 1958989 - RNA, 19 nt, Human
ucaucaccaacgucugugc

SEQ ID NO: 1958990 - RNA, 15 nt, Human
ucauaggaaguuagc

SEQ ID NO: 1958991 - RNA, 15 nt, Human
ucauacucaccucac

SEQ ID NO: 1958992 - RNA, 21 nt, Human
ucauagcccucacccuggggc

SEQ ID NO: 1958993 - RNA, 16 nt, Human
ucauagcauugucuau

SEQ ID NO: 1958994 - RNA, 20 nt, Human
ucauagcauugucuauuuuu

SEQ ID NO: 1958995 - RNA, 22 nt, Human
ucauagcauugucuauuuuucu

SEQ ID NO: 1958996 - RNA, 21 nt, Human
ucaggugagaagcagaggaag

SEQ ID NO: 1958997 - RNA, 23 nt, Human
ucaggugccucaagagaaggcaa

SEQ ID NO: 1958998 - RNA, 13 nt, Human
ucaggugcugcca

SEQ ID NO: 1958999 - RNA, 14 nt, Human
ucaggugcugccau

SEQ ID NO: 1959000 - RNA, 15 nt, Human
ucaggugcugccauc

SEQ ID NO: 1959001 - RNA, 23 nt, Human
ucaucugagagaggcuaaaaugu

SEQ ID NO: 1959002 - RNA, 13 nt, Human
ucaucugagaaug

SEQ ID NO: 1959003 - RNA, 14 nt, Human
ucaucugagaauga

SEQ ID NO: 1959004 - RNA, 15 nt, Human
ucaucugagaaugaa

SEQ ID NO: 1959005 - RNA, 16 nt, Human
ucaucugagaaugaac

SEQ ID NO: 1959006 - RNA, 19 nt, Human
ucaucugagaaugaacaaa

SEQ ID NO: 1959007 - RNA, 11 nt, Human
ucaucugagag

SEQ ID NO: 1959008 - RNA, 20 nt, Human
ucaucagggaggaaaguuuc

SEQ ID NO: 1959009 - RNA, 15 nt, Human
ucaucagaacagcug

SEQ ID NO: 1959010 - RNA, 16 nt, Human
ucaucagaacagcugu

SEQ ID NO: 1959011 - RNA, 18 nt, Human
ucaucagaacagcuguug

SEQ ID NO: 1959012 - RNA, 21 nt, Human
ucaucagaacagcuguugacu

SEQ ID NO: 1959013 - RNA, 16 nt, Human
ucauaggaaguuagcc

SEQ ID NO: 1959014 - RNA, 13 nt, Human
ucaucagaacagc

SEQ ID NO: 1959015 - RNA, 19 nt, Human
ucaucuugaauuguaagga

SEQ ID NO: 1959016 - RNA, 23 nt, Human
ucaugcuccccugugccagccca

SEQ ID NO: 1959017 - RNA, 24 nt, Human
ucaugcuccccugugccagcccag

SEQ ID NO: 1959018 - RNA, 23 nt, Human
ucaucuuagguuggcaaaaaggc

SEQ ID NO: 1959019 - RNA, 17 nt, Human
ucauuguucaauuccca

SEQ ID NO: 1959020 - RNA, 12 nt, Human
ucauuucaccug

SEQ ID NO: 1959021 - RNA, 18 nt, Human
ucauuucaccugcugcuu

SEQ ID NO: 1959022 - RNA, 15 nt, Human
ucauuguuaaaguaa

SEQ ID NO: 1959023 - RNA, 18 nt, Human
ucauugugaaauuauuca

SEQ ID NO: 1959024 - RNA, 17 nt, Human
ucauugugaaauuauuc

SEQ ID NO: 1959025 - RNA, 15 nt, Human
ucauugugaaauuau

SEQ ID NO: 1959026 - RNA, 12 nt, Human
ucauugugaaau

SEQ ID NO: 1959027 - RNA, 13 nt, Human
ucauuuccugugu

SEQ ID NO: 1959028 - RNA, 16 nt, Human
ucauuuccugugucuu

SEQ ID NO: 1959029 - RNA, 18 nt, Human
ucauuucauccuuucacu

SEQ ID NO: 1959030 - RNA, 15 nt, Human
ucauuucauguccug

SEQ ID NO: 1959031 - RNA, 20 nt, Human
ucauuucauguccuguguca

SEQ ID NO: 1959032 - RNA, 23 nt, Human
ucauuucauguccugugucaguu

SEQ ID NO: 1959033 - RNA, 12 nt, Human
ucauuuccaugu

SEQ ID NO: 1959034 - RNA, 16 nt, Human
ucauuuccauguaugc

SEQ ID NO: 1959035 - RNA, 17 nt, Human
ucauuuccauguaugca

SEQ ID NO: 1959036 - RNA, 21 nt, Human
ucauuuccauguaugcauaau

SEQ ID NO: 1959037 - RNA, 21 nt, Human
ucauucaacccaccugcgucu

SEQ ID NO: 1959038 - RNA, 14 nt, Human
ucauuccagaggaa

SEQ ID NO: 1959039 - RNA, 22 nt, Human
ucauucaccaguacauucucag

SEQ ID NO: 1959040 - RNA, 17 nt, Human
ucauucaccaguacauu

SEQ ID NO: 1959041 - RNA, 23 nt, Human
ucauuccaccuucccaugcccug

SEQ ID NO: 1959042 - RNA, 14 nt, Human
ucauuaguuuugaa

SEQ ID NO: 1959043 - RNA, 23 nt, Human
ucauuaguuuugaagauucuaug

SEQ ID NO: 1959044 - RNA, 13 nt, Human
ucaugcugccccu

SEQ ID NO: 1959045 - RNA, 17 nt, Human
ucaugcugccccugccu

SEQ ID NO: 1959046 - RNA, 18 nt, Human
ucaugcugccccugccuu

SEQ ID NO: 1959047 - RNA, 16 nt, Human
ucauuauguuaauauu

SEQ ID NO: 1959048 - RNA, 17 nt, Human
ucauuauguuaauauuu

SEQ ID NO: 1959049 - RNA, 15 nt, Human
ucagauaugauucaa

SEQ ID NO: 1959050 - RNA, 17 nt, Human
ucagcauucucacuccu

SEQ ID NO: 1959051 - RNA, 20 nt, Human
ucagcauucucacuccuacc

SEQ ID NO: 1959052 - RNA, 19 nt, Human
ucagcauuaccucuuugga

SEQ ID NO: 1959053 - RNA, 20 nt, Human
ucagcauuaccucuuuggaa

SEQ ID NO: 1959054 - RNA, 20 nt, Human
ucagccucccgaguagcugg

SEQ ID NO: 1959055 - RNA, 18 nt, Human
ucagccucccgaguagcu

SEQ ID NO: 1959056 - RNA, 21 nt, Human
ucagccucccgaauagcuggg

SEQ ID NO: 1959057 - RNA, 22 nt, Human
ucagccucccgaauagcuggga

SEQ ID NO: 1959058 - RNA, 14 nt, Human
ucagccucccaaag

SEQ ID NO: 1959059 - RNA, 23 nt, Human
ucagcauucucacuccuaccugg

SEQ ID NO: 1959060 - RNA, 19 nt, Human
ucagccucccaaagugcug

SEQ ID NO: 1959061 - RNA, 21 nt, Human
ucagccucccaaagugcuggg

SEQ ID NO: 1959062 - RNA, 13 nt, Human
ucagccucgcagg

SEQ ID NO: 1959063 - RNA, 23 nt, Human
ucagccucgcaggccucccugcc

SEQ ID NO: 1959064 - RNA, 16 nt, Human
ucagcugaaccugggu

SEQ ID NO: 1959065 - RNA, 15 nt, Human
ucagcugaaccuggg

SEQ ID NO: 1959066 - RNA, 19 nt, Human
ucagccugcuccagcuguu

SEQ ID NO: 1959067 - RNA, 18 nt, Human
ucagccugcuccagcugu

SEQ ID NO: 1959068 - RNA, 22 nt, Human
ucagccuccugaguagcuggga

SEQ ID NO: 1959069 - RNA, 20 nt, Human
ucagccuccugaguagcugg

SEQ ID NO: 1959070 - RNA, 17 nt, Human
ucagcauuagugggaaa

SEQ ID NO: 1959071 - RNA, 23 nt, Human
ucagcauuagugggaaaaagugg

SEQ ID NO: 1959072 - RNA, 21 nt, Human
ucagccucccgaguagcuggg

SEQ ID NO: 1959073 - RNA, 22 nt, Human
ucagccucccgaguagcuggga

SEQ ID NO: 1959074 - RNA, 23 nt, Human
ucaggagcccugggaggcucugg

SEQ ID NO: 1959075 - RNA, 20 nt, Human
ucaggagcccugggaggcuc

SEQ ID NO: 1959076 - RNA, 18 nt, Human
ucaggagcuccauacaca

SEQ ID NO: 1959077 - RNA, 18 nt, Human
ucaggagcccugggaggc

SEQ ID NO: 1959078 - RNA, 19 nt, Human
ucaggagcccugggaggcu

SEQ ID NO: 1959079 - RNA, 14 nt, Human
ucagcugagccuuc

SEQ ID NO: 1959080 - RNA, 18 nt, Human
ucagcugagccuucugag

SEQ ID NO: 1959081 - RNA, 12 nt, Human
ucagcugagccu

SEQ ID NO: 1959082 - RNA, 21 nt, Human
ucagcugagccuucugagcug

SEQ ID NO: 1959083 - RNA, 12 nt, Human
ucaggcucccag

SEQ ID NO: 1959084 - RNA, 13 nt, Human
ucaggcucccagg

SEQ ID NO: 1959085 - RNA, 15 nt, Human
ucaggcucucugggc

SEQ ID NO: 1959086 - RNA, 17 nt, Human
ucaggcucucugggcug

SEQ ID NO: 1959087 - RNA, 17 nt, Human
ucaggauuuccucuuga

SEQ ID NO: 1959088 - RNA, 18 nt, Human
ucaggauuuccucuugaa

SEQ ID NO: 1959089 - RNA, 16 nt, Human
ucaggugagaagcaga

SEQ ID NO: 1959090 - RNA, 15 nt, Human
ucaggugagaagcag

SEQ ID NO: 1959091 - RNA, 16 nt, Human
ucagggccuggcucag

SEQ ID NO: 1959092 - RNA, 14 nt, Human
ucagggccuggcuc

SEQ ID NO: 1959093 - RNA, 14 nt, Human
ucagggcagauuuu

SEQ ID NO: 1959094 - RNA, 18 nt, Human
ucagggcagauuuuaguu

SEQ ID NO: 1959095 - RNA, 23 nt, Human
ucagggaaaagcagcucuccccu

SEQ ID NO: 1959096 - RNA, 19 nt, Human
ucagggaaaagcagcucuc

SEQ ID NO: 1959097 - RNA, 18 nt, Human
ucagggaaaagcagcucu

SEQ ID NO: 1959098 - RNA, 16 nt, Human
ucagggaaaagcagcu

SEQ ID NO: 1959099 - RNA, 23 nt, Human
ucaggcugucaguguuuggugca

SEQ ID NO: 1959100 - RNA, 21 nt, Human
ucagggagcagggaaggccug

SEQ ID NO: 1959101 - RNA, 23 nt, Human
ucagggagcagggaaggccugac

SEQ ID NO: 1959102 - RNA, 13 nt, Human
ucagggaaagcau

SEQ ID NO: 1959103 - RNA, 22 nt, Human
ucagggaaagcauuuaaagggu

SEQ ID NO: 1959104 - RNA, 22 nt, Human
ucagaguaauccaagcaaaugu

SEQ ID NO: 1959105 - RNA, 21 nt, Human
ucagaguaauccaagcaaaug

SEQ ID NO: 1959106 - RNA, 16 nt, Human
ucagagaaaugucugu

SEQ ID NO: 1959107 - RNA, 17 nt, Human
ucagagaaaugucuguc

SEQ ID NO: 1959108 - RNA, 12 nt, Human
ucagacuguaua

SEQ ID NO: 1959109 - RNA, 16 nt, Human
ucagacugcuuugaga

SEQ ID NO: 1959110 - RNA, 17 nt, Human
ucagacgacagccccug

SEQ ID NO: 1959111 - RNA, 13 nt, Human
ucagacagcugcc

SEQ ID NO: 1959112 - RNA, 14 nt, Human
ucagacagcugccu

SEQ ID NO: 1959113 - RNA, 15 nt, Human
ucagaaauguguuau

SEQ ID NO: 1959114 - RNA, 23 nt, Human
ucagaauucucuaguuugauuaa

SEQ ID NO: 1959115 - RNA, 16 nt, Human
ucagaauucucuaguu

SEQ ID NO: 1959116 - RNA, 20 nt, Human
ucacuuguuuuauuuaaccu

SEQ ID NO: 1959117 - RNA, 24 nt, Human
ucagaaacaaagcauuugacuuuc

SEQ ID NO: 1959118 - RNA, 14 nt, Human
ucacuuuauuucau

SEQ ID NO: 1959119 - RNA, 15 nt, Human
ucacuuuauuucauu

SEQ ID NO: 1959120 - RNA, 10 nt, Human
ucagaaaugu

SEQ ID NO: 1959121 - RNA, 16 nt, Human
ucagaaacaauuucug

SEQ ID NO: 1959122 - RNA, 16 nt, Human
ucagaaacuaaaacaa

SEQ ID NO: 1959123 - RNA, 11 nt, Human
ucacugcuuca

SEQ ID NO: 1959124 - RNA, 14 nt, Human
ucacugcuuaacuu

SEQ ID NO: 1959125 - RNA, 17 nt, Human
ucacugcuggcugccuu

SEQ ID NO: 1959126 - RNA, 18 nt, Human
ucacugcuggcugccuua

SEQ ID NO: 1959127 - RNA, 22 nt, Human
ucacugcuggcugccuuagaac

SEQ ID NO: 1959128 - RNA, 13 nt, Human
ucacugcuggcug

SEQ ID NO: 1959129 - RNA, 14 nt, Human
ucacugcuggcugc

SEQ ID NO: 1959130 - RNA, 15 nt, Human
ucacugcuggcugcc

SEQ ID NO: 1959131 - RNA, 16 nt, Human
ucacugcuggcugccu

SEQ ID NO: 1959132 - RNA, 12 nt, Human
ucacugcuggcu

SEQ ID NO: 1959133 - RNA, 17 nt, Human
ucacucuuauugcccac

SEQ ID NO: 1959134 - RNA, 13 nt, Human
ucaccagccccag

SEQ ID NO: 1959135 - RNA, 16 nt, Human
ucaccagccccagugc

SEQ ID NO: 1959136 - RNA, 18 nt, Human
ucacugcauccuccgccu

SEQ ID NO: 1959137 - RNA, 20 nt, Human
ucacucuuauugcccacgcu

SEQ ID NO: 1959138 - RNA, 19 nt, Human
ucacugcauccuccgccuc

SEQ ID NO: 1959139 - RNA, 19 nt, Human
ucacugcuaagaauauuug

SEQ ID NO: 1959140 - RNA, 13 nt, Human
ucacugccucccc

SEQ ID NO: 1959141 - RNA, 18 nt, Human
ucacugccaugccagcuu

SEQ ID NO: 1959142 - RNA, 23 nt, Human
gcuccuggggguucuuucuuccu

SEQ ID NO: 1959143 - RNA, 14 nt, Human
gcuccucccggugc

SEQ ID NO: 1959144 - RNA, 24 nt, Human
gcuccgcuuucuacccagcgagcc

SEQ ID NO: 1959145 - RNA, 22 nt, Human
gcuccggcguguguucaguguu

SEQ ID NO: 1959146 - RNA, 23 nt, Human
gcuccggcguguguucaguguua

SEQ ID NO: 1959147 - RNA, 21 nt, Human
gcuccgggacguggcaccucc

SEQ ID NO: 1959148 - RNA, 22 nt, Human
gcuccgggacguggcaccuccu

SEQ ID NO: 1959149 - RNA, 15 nt, Human
gcuccgggcuccgac

SEQ ID NO: 1959150 - RNA, 12 nt, Human
gcuccgucugac

SEQ ID NO: 1959151 - RNA, 12 nt, Human
gcuccugugucu

SEQ ID NO: 1959152 - RNA, 13 nt, Human
gcuccugugucuu

SEQ ID NO: 1959153 - RNA, 20 nt, Human
gcuccuuccucugaggcuga

SEQ ID NO: 1959154 - RNA, 22 nt, Human
gcuccuuccucugaggcugaaa

SEQ ID NO: 1959155 - RNA, 18 nt, Human
gcuccuuccucugaggcu

SEQ ID NO: 1959156 - RNA, 15 nt, Human
gcuccuucccuugcu

SEQ ID NO: 1959157 - RNA, 19 nt, Human
gcuccuucccuugcuacca

SEQ ID NO: 1959158 - RNA, 22 nt, Human
gcuccuucaacaaggcuugcug

SEQ ID NO: 1959159 - RNA, 19 nt, Human
gcuccuuaggguuuucucu

SEQ ID NO: 1959160 - RNA, 21 nt, Human
gcuccuuaggguuuucucucu

SEQ ID NO: 1959161 - RNA, 22 nt, Human
gcuccuuaggguuuucucucua

SEQ ID NO: 1959162 - RNA, 21 nt, Human
gcuccuucaacaaggcuugcu

SEQ ID NO: 1959163 - RNA, 13 nt, Human
gcuccuucugucc

SEQ ID NO: 1959164 - RNA, 17 nt, Human
gcuccuuuagcgcccag

SEQ ID NO: 1959165 - RNA, 19 nt, Human
gcucgagcaugccuggaug

SEQ ID NO: 1959166 - RNA, 21 nt, Human
gcucgagcaugccuggauggg

SEQ ID NO: 1959167 - RNA, 12 nt, Human
gcuccuuucuga

SEQ ID NO: 1959168 - RNA, 18 nt, Human
gcucauucagcaucugac

SEQ ID NO: 1959169 - RNA, 22 nt, Human
gcucauucagcaucugaccucu

SEQ ID NO: 1959170 - RNA, 16 nt, Human
gcucauucagcaucug

SEQ ID NO: 1959171 - RNA, 21 nt, Human
gcuccagcuguucagcugguu

SEQ ID NO: 1959172 - RNA, 14 nt, Human
gcuccaggagcagc

SEQ ID NO: 1959173 - RNA, 12 nt, Human
gcuccaggagca

SEQ ID NO: 1959174 - RNA, 11 nt, Human
gcuccaggagc

SEQ ID NO: 1959175 - RNA, 18 nt, Human
gcuccaggagcagccaca

SEQ ID NO: 1959176 - RNA, 17 nt, Human
gcuccaggagcagccac

SEQ ID NO: 1959177 - RNA, 16 nt, Human
gcuccaggagcagcca

SEQ ID NO: 1959178 - RNA, 15 nt, Human
gcuccaggagcagcc

SEQ ID NO: 1959179 - RNA, 17 nt, Human
gcuccaggccagggggc

SEQ ID NO: 1959180 - RNA, 12 nt, Human
gcuccaggcagc

SEQ ID NO: 1959181 - RNA, 15 nt, Human
gcuccaggcagcacc

SEQ ID NO: 1959182 - RNA, 20 nt, Human
gcuccaggcagcacccaggu

SEQ ID NO: 1959183 - RNA, 18 nt, Human
gcuccaggccagggggcc

SEQ ID NO: 1959184 - RNA, 22 nt, Human
gcuccaggcagcacccagguuu

SEQ ID NO: 1959185 - RNA, 12 nt, Human
gcuccaggcucc

SEQ ID NO: 1959186 - RNA, 20 nt, Human
gcucccuucccaccucucuc

SEQ ID NO: 1959187 - RNA, 18 nt, Human
gcucccuugaccugcuga

SEQ ID NO: 1959188 - RNA, 22 nt, Human
gcuccgacuugugcacaggcag

SEQ ID NO: 1959189 - RNA, 23 nt, Human
gcuccgacuugugcacaggcaga

SEQ ID NO: 1959190 - RNA, 18 nt, Human
gcuccgcuuucuacccag

SEQ ID NO: 1959191 - RNA, 21 nt, Human
gcuccgcuuucuacccagcga

SEQ ID NO: 1959192 - RNA, 22 nt, Human
gcuccgcuuucuacccagcgag

SEQ ID NO: 1959193 - RNA, 23 nt, Human
gcuccgcuuucuacccagcgagc

SEQ ID NO: 1959194 - RNA, 15 nt, Human
gcucccacaggcccu

SEQ ID NO: 1959195 - RNA, 18 nt, Human
gcuccaguccccagaacu

SEQ ID NO: 1959196 - RNA, 18 nt, Human
gcucaccucucccuugga

SEQ ID NO: 1959197 - RNA, 17 nt, Human
gcucaccucucccuugg

SEQ ID NO: 1959198 - RNA, 16 nt, Human
gcucaccucucccuug

SEQ ID NO: 1959199 - RNA, 14 nt, Human
gcucaccucucccu

SEQ ID NO: 1959200 - RNA, 15 nt, Human
gcucagcccucccug

SEQ ID NO: 1959201 - RNA, 16 nt, Human
gcucagcccucccugc

SEQ ID NO: 1959202 - RNA, 12 nt, Human
gcucagcccucc

SEQ ID NO: 1959203 - RNA, 22 nt, Human
gcucacagaacccuuggagcca

SEQ ID NO: 1959204 - RNA, 16 nt, Human
gcucacauaucuguca

SEQ ID NO: 1959205 - RNA, 12 nt, Human
gcucaccagccc

SEQ ID NO: 1959206 - RNA, 13 nt, Human
gcucaccagcccc

SEQ ID NO: 1959207 - RNA, 14 nt, Human
gcucaccagcccca

SEQ ID NO: 1959208 - RNA, 15 nt, Human
gcucaccagccccag

SEQ ID NO: 1959209 - RNA, 16 nt, Human
gcucagcggggacagc

SEQ ID NO: 1959210 - RNA, 17 nt, Human
gcucagcccucccugcc

SEQ ID NO: 1959211 - RNA, 18 nt, Human
gcucagcccucccugccc

SEQ ID NO: 1959212 - RNA, 19 nt, Human
gcucagcccucccugcccc

SEQ ID NO: 1959213 - RNA, 21 nt, Human
gcucagcccucccugccccuc

SEQ ID NO: 1959214 - RNA, 17 nt, Human
gcucagcggggacagcu

SEQ ID NO: 1959215 - RNA, 18 nt, Human
gcucagcggggacagcuc

SEQ ID NO: 1959216 - RNA, 19 nt, Human
gcucagcggggacagcucc

SEQ ID NO: 1959217 - RNA, 23 nt, Human
gcucagcggggacagcuccuucu

SEQ ID NO: 1959218 - RNA, 19 nt, Human
gcucagcugucaaggcuca

SEQ ID NO: 1959219 - RNA, 15 nt, Human
gcucaucagaaacaa

SEQ ID NO: 1959220 - RNA, 22 nt, Human
gcucaucagaaacaauuucugu

SEQ ID NO: 1959221 - RNA, 18 nt, Human
gcucauggacuucugcca

SEQ ID NO: 1959222 - RNA, 13 nt, Human
gcuaucuccccca

SEQ ID NO: 1959223 - RNA, 17 nt, Human
gcuaucguaaaauuaag

SEQ ID NO: 1959224 - RNA, 16 nt, Human
gcuaucguaaaauuaa

SEQ ID NO: 1959225 - RNA, 15 nt, Human
gcuaucguaaaauua

SEQ ID NO: 1959226 - RNA, 15 nt, Human
gcuaucucccccagc

SEQ ID NO: 1959227 - RNA, 14 nt, Human
gcuaucucccccag

SEQ ID NO: 1959228 - RNA, 16 nt, Human
gcucaagcccaggagg

SEQ ID NO: 1959229 - RNA, 17 nt, Human
gcucaagcccaggaggg

SEQ ID NO: 1959230 - RNA, 18 nt, Human
gcucaaguccucuuuucu

SEQ ID NO: 1959231 - RNA, 19 nt, Human
gcucaaguccucuuuucug

SEQ ID NO: 1959232 - RNA, 22 nt, Human
gcucaaguccucuuuucugaga

SEQ ID NO: 1959233 - RNA, 20 nt, Human
gcuauaacuauguugauaaa

SEQ ID NO: 1959234 - RNA, 22 nt, Human
gcggugcuaucucccccagccc

SEQ ID NO: 1959235 - RNA, 19 nt, Human
gcggugcuaucucccccag

SEQ ID NO: 1959236 - RNA, 21 nt, Human
gcuaguugggcuuccucauag

SEQ ID NO: 1959237 - RNA, 17 nt, Human
gcuauaaauuauauucc

SEQ ID NO: 1959238 - RNA, 13 nt, Human
gccugaggcuccu

SEQ ID NO: 1959239 - RNA, 12 nt, Human
gccugagcuggg

SEQ ID NO: 1959240 - RNA, 19 nt, Human
gcccaguuggguggaugcc

SEQ ID NO: 1959241 - RNA, 21 nt, Human
gcccaguuggguggaugccug

SEQ ID NO: 1959242 - RNA, 22 nt, Human
gcccaguuggguggaugccugg

SEQ ID NO: 1959243 - RNA, 16 nt, Human
gccugaagucacacag

SEQ ID NO: 1959244 - RNA, 17 nt, Human
gccugagcgacagugag

SEQ ID NO: 1959245 - RNA, 20 nt, Human
gccugagcgacagugagacu

SEQ ID NO: 1959246 - RNA, 17 nt, Human
gccugaagucacacagu

SEQ ID NO: 1959247 - RNA, 18 nt, Human
gccugaagucacacagug

SEQ ID NO: 1959248 - RNA, 18 nt, Human
gccuggauggggcugcac

SEQ ID NO: 1959249 - RNA, 16 nt, Human
gccuggauggggcugc

SEQ ID NO: 1959250 - RNA, 20 nt, Human
gccuggauggggcugcaccg

SEQ ID NO: 1959251 - RNA, 13 nt, Human
gccuggcacaggg

SEQ ID NO: 1959252 - RNA, 14 nt, Human
gccuggcacagggc

SEQ ID NO: 1959253 - RNA, 12 nt, Human
gccugcuccuuc

SEQ ID NO: 1959254 - RNA, 13 nt, Human
gccugcuccuucc

SEQ ID NO: 1959255 - RNA, 14 nt, Human
gccugcuccuuccc

SEQ ID NO: 1959256 - RNA, 15 nt, Human
gccugcuccuucccu

SEQ ID NO: 1959257 - RNA, 20 nt, Human
gccugcuccuucccuugcua

SEQ ID NO: 1959258 - RNA, 18 nt, Human
gccugcucuuuggccuga

SEQ ID NO: 1959259 - RNA, 17 nt, Human
gccuggaaaccugucug

SEQ ID NO: 1959260 - RNA, 18 nt, Human
gccuggaaaccugucuga

SEQ ID NO: 1959261 - RNA, 14 nt, Human
gccuggucagccca

SEQ ID NO: 1959262 - RNA, 15 nt, Human
gccuggucagcccaa

SEQ ID NO: 1959263 - RNA, 13 nt, Human
gccuggucagccc

SEQ ID NO: 1959264 - RNA, 21 nt, Human
gccugggccguagcuugucug

SEQ ID NO: 1959265 - RNA, 11 nt, Human
gccugggccug

SEQ ID NO: 1959266 - RNA, 13 nt, Human
gccugggccuggc

SEQ ID NO: 1959267 - RNA, 14 nt, Human
gccugggccuggcu

SEQ ID NO: 1959268 - RNA, 15 nt, Human
gccugggccuggcuc

SEQ ID NO: 1959269 - RNA, 16 nt, Human
gccugggccuggcucc

SEQ ID NO: 1959270 - RNA, 17 nt, Human
gccugggccuggcuccc

SEQ ID NO: 1959271 - RNA, 15 nt, Human
gccuguaauccuagc

SEQ ID NO: 1959272 - RNA, 20 nt, Human
gccuguaauccuagcacuuu

SEQ ID NO: 1959273 - RNA, 20 nt, Human
gccugucucggaaccuguga

SEQ ID NO: 1959274 - RNA, 14 nt, Human
gccuggccccucag

SEQ ID NO: 1959275 - RNA, 13 nt, Human
gccuggccccuca

SEQ ID NO: 1959276 - RNA, 12 nt, Human
gccuggcccaug

SEQ ID NO: 1959277 - RNA, 22 nt, Human
gccuggcccauguauggccagg

SEQ ID NO: 1959278 - RNA, 20 nt, Human
gccuggccagaugcaccagc

SEQ ID NO: 1959279 - RNA, 22 nt, Human
gccuggcagccgugccuucagc

SEQ ID NO: 1959280 - RNA, 16 nt, Human
gccuggccagaugcac

SEQ ID NO: 1959281 - RNA, 21 nt, Human
gccuggccagaugcaccagcc

SEQ ID NO: 1959282 - RNA, 22 nt, Human
gccuggccagaugcaccagccc

SEQ ID NO: 1959283 - RNA, 18 nt, Human
gccuggcacagggcagug

SEQ ID NO: 1959284 - RNA, 19 nt, Human
gccuggcacagggcagugg

SEQ ID NO: 1959285 - RNA, 12 nt, Human
gccuggcagccg

SEQ ID NO: 1959286 - RNA, 20 nt, Human
gccuggcagccgugccuuca

SEQ ID NO: 1959287 - RNA, 21 nt, Human
gccuggcagccgugccuucag

SEQ ID NO: 1959288 - RNA, 14 nt, Human
gcgaauuuuaaaag

SEQ ID NO: 1959289 - RNA, 14 nt, Human
gcgaaucauuuguu

SEQ ID NO: 1959290 - RNA, 15 nt, Human
gcgaauuuuaaaaga

SEQ ID NO: 1959291 - RNA, 16 nt, Human
gcgaauuuuaaaagau

SEQ ID NO: 1959292 - RNA, 15 nt, Human
gccuuucuguguuua

SEQ ID NO: 1959293 - RNA, 15 nt, Human
gccuuucauuuugcu

SEQ ID NO: 1959294 - RNA, 18 nt, Human
gccuuucauuuugcuuua

SEQ ID NO: 1959295 - RNA, 22 nt, Human
gccuuucauuuugcuuuaauuu

SEQ ID NO: 1959296 - RNA, 21 nt, Human
gcgacaaugcaaaccaucauu

SEQ ID NO: 1959297 - RNA, 20 nt, Human
gcgacaaugcaaaccaucau

SEQ ID NO: 1959298 - RNA, 13 nt, Human
gcgacaaugcaaa

SEQ ID NO: 1959299 - RNA, 12 nt, Human
gcgacaaugcaa

SEQ ID NO: 1959300 - RNA, 18 nt, Human
gcgcaggcuggcccugcc

SEQ ID NO: 1959301 - RNA, 19 nt, Human
gcgcaggcuggcccugccc

SEQ ID NO: 1959302 - RNA, 17 nt, Human
gcgcaggcuggcccugc

SEQ ID NO: 1959303 - RNA, 17 nt, Human
gccuuucuuuucuuucu

SEQ ID NO: 1959304 - RNA, 13 nt, Human
gcgacaacagauu

SEQ ID NO: 1959305 - RNA, 20 nt, Human
gcgcaggcuggcccugcccu

SEQ ID NO: 1959306 - RNA, 21 nt, Human
gcgcaggcuggcccugcccug

SEQ ID NO: 1959307 - RNA, 22 nt, Human
gcgcaggcuggcccugcccugg

SEQ ID NO: 1959308 - RNA, 15 nt, Human
gccuuacacaauggu

SEQ ID NO: 1959309 - RNA, 13 nt, Human
gccuuaaagacaa

SEQ ID NO: 1959310 - RNA, 22 nt, Human
gccuuaaagacaagacagcauu

SEQ ID NO: 1959311 - RNA, 14 nt, Human
gccuuaagcugcag

SEQ ID NO: 1959312 - RNA, 20 nt, Human
gccuuaagugaggaaaucaa

SEQ ID NO: 1959313 - RNA, 21 nt, Human
gccuuaagugaggaaaucaaa

SEQ ID NO: 1959314 - RNA, 16 nt, Human
gccugucuuaauuuuc

SEQ ID NO: 1959315 - RNA, 19 nt, Human
gccugucugugaagagcaa

SEQ ID NO: 1959316 - RNA, 17 nt, Human
gccugucuuaauuuucu

SEQ ID NO: 1959317 - RNA, 16 nt, Human
gccuuacacaaugguu

SEQ ID NO: 1959318 - RNA, 22 nt, Human
gccuuaagugaggaaaucaaag

SEQ ID NO: 1959319 - RNA, 15 nt, Human
gccuuguuuaauggu

SEQ ID NO: 1959320 - RNA, 23 nt, Human
gccuuguuuaaugguaguuuuac

SEQ ID NO: 1959321 - RNA, 17 nt, Human
gccuuggggucagguug

SEQ ID NO: 1959322 - RNA, 21 nt, Human
gcgcugccccuggcagccccu

SEQ ID NO: 1959323 - RNA, 18 nt, Human
gcgcugccccuggcagcc

SEQ ID NO: 1959324 - RNA, 16 nt, Human
gcggagaaaggaaggg

SEQ ID NO: 1959325 - RNA, 20 nt, Human
gcggacauccccugcuggcc

SEQ ID NO: 1959326 - RNA, 22 nt, Human
gcggacauccccugcuggccgg

SEQ ID NO: 1959327 - RNA, 19 nt, Human
gcggagacggagucccacc

SEQ ID NO: 1959328 - RNA, 14 nt, Human
gcggggacagcucc

SEQ ID NO: 1959329 - RNA, 19 nt, Human
gcggguuauaaugaaugac

SEQ ID NO: 1959330 - RNA, 15 nt, Human
gcggggacagcuccu

SEQ ID NO: 1959331 - RNA, 17 nt, Human
gcggggacagcuccuuc

SEQ ID NO: 1959332 - RNA, 18 nt, Human
gcggugcccaaccacacu

SEQ ID NO: 1959333 - RNA, 19 nt, Human
gcggugagaggggaacaga

SEQ ID NO: 1959334 - RNA, 13 nt, Human
gcgguccacccag

SEQ ID NO: 1959335 - RNA, 14 nt, Human
gcgguccacccagg

SEQ ID NO: 1959336 - RNA, 21 nt, Human
gcgccuuaaggauguucuagc

SEQ ID NO: 1959337 - RNA, 13 nt, Human
gcgcccuggcccc

SEQ ID NO: 1959338 - RNA, 14 nt, Human
gcgcccuggccccc

SEQ ID NO: 1959339 - RNA, 15 nt, Human
gcgcccuggccccca

SEQ ID NO: 1959340 - RNA, 16 nt, Human
gcgcccuggcccccac

SEQ ID NO: 1959341 - RNA, 12 nt, Human
gcgcccuggccc

SEQ ID NO: 1959342 - RNA, 23 nt, Human
gcgcccaguuggguggaugccug

SEQ ID NO: 1959343 - RNA, 13 nt, Human
gcgccccuucccc

SEQ ID NO: 1959344 - RNA, 22 nt, Human
gcgccccgaaaggucaccucac

SEQ ID NO: 1959345 - RNA, 23 nt, Human
gcgcauaggccugcuuugucucc

SEQ ID NO: 1959346 - RNA, 16 nt, Human
gcgcaguugcugucag

SEQ ID NO: 1959347 - RNA, 15 nt, Human
gcuggccuggccccu

SEQ ID NO: 1959348 - RNA, 14 nt, Human
gcuggccuggcccc

SEQ ID NO: 1959349 - RNA, 12 nt, Human
gcuggccuggcc

SEQ ID NO: 1959350 - RNA, 13 nt, Human
gcuggccuggccc

SEQ ID NO: 1959351 - RNA, 21 nt, Human
gcugggcucccuucccaccuc

SEQ ID NO: 1959352 - RNA, 19 nt, Human
gcugggaugauuggagggg

SEQ ID NO: 1959353 - RNA, 15 nt, Human
gcuggccggacaccc

SEQ ID NO: 1959354 - RNA, 22 nt, Human
gcugggcuuggcagcccggguc

SEQ ID NO: 1959355 - RNA, 13 nt, Human
gcugggcugggca

SEQ ID NO: 1959356 - RNA, 14 nt, Human
gcugggcugggcac

SEQ ID NO: 1959357 - RNA, 23 nt, Human
gcuggggaagaauuuacuuugga

SEQ ID NO: 1959358 - RNA, 13 nt, Human
gcuggggaagaau

SEQ ID NO: 1959359 - RNA, 21 nt, Human
gcugggcuucaguggcagcug

SEQ ID NO: 1959360 - RNA, 22 nt, Human
gcugggcuucaguggcagcugc

SEQ ID NO: 1959361 - RNA, 20 nt, Human
gcugggcuucaguggcagcu

SEQ ID NO: 1959362 - RNA, 14 nt, Human
gcuggggaugucuc

SEQ ID NO: 1959363 - RNA, 14 nt, Human
gcugggggccucag

SEQ ID NO: 1959364 - RNA, 15 nt, Human
gcugggggccucagu

SEQ ID NO: 1959365 - RNA, 22 nt, Human
gcuggucaaacaaacucucuga

SEQ ID NO: 1959366 - RNA, 18 nt, Human
gcugggggccucagugcc

SEQ ID NO: 1959367 - RNA, 15 nt, Human
gcuggggcagccucu

SEQ ID NO: 1959368 - RNA, 22 nt, Human
gcuggucguaaacaucucagag

SEQ ID NO: 1959369 - RNA, 14 nt, Human
gcuggucccacuca

SEQ ID NO: 1959370 - RNA, 14 nt, Human
gcuggucacuucuu

SEQ ID NO: 1959371 - RNA, 20 nt, Human
gcuggucacuucuucugucc

SEQ ID NO: 1959372 - RNA, 21 nt, Human
gcuggucacuucuucugucca

SEQ ID NO: 1959373 - RNA, 22 nt, Human
gcuggucacuucuucuguccaa

SEQ ID NO: 1959374 - RNA, 19 nt, Human
gcuggucucgaacuccuga

SEQ ID NO: 1959375 - RNA, 22 nt, Human
gcuggucucgaacuccugaccu

SEQ ID NO: 1959376 - RNA, 23 nt, Human
gcuggucucgaacuccugaccuu

SEQ ID NO: 1959377 - RNA, 23 nt, Human
gcuggucguaaacaucucagaga

SEQ ID NO: 1959378 - RNA, 15 nt, Human
gcugugucucccuuc

SEQ ID NO: 1959379 - RNA, 16 nt, Human
gcugugugcucuccaa

SEQ ID NO: 1959380 - RNA, 16 nt, Human
gcuguguggcagucug

SEQ ID NO: 1959381 - RNA, 23 nt, Human
gcuguuagggguuauugguguaa

SEQ ID NO: 1959382 - RNA, 17 nt, Human
gcuguuacaguuuucuu

SEQ ID NO: 1959383 - RNA, 19 nt, Human
gcuguuacaguuuucuuca

SEQ ID NO: 1959384 - RNA, 14 nt, Human
gcuguguguggcuu

SEQ ID NO: 1959385 - RNA, 17 nt, Human
gcuguguuugcuccccu

SEQ ID NO: 1959386 - RNA, 14 nt, Human
gcuguguuugcucc

SEQ ID NO: 1959387 - RNA, 16 nt, Human
gcuguguuugcucccc

SEQ ID NO: 1959388 - RNA, 15 nt, Human
gcugucauugcuucu

SEQ ID NO: 1959389 - RNA, 16 nt, Human
gcugucauugcuucuu

SEQ ID NO: 1959390 - RNA, 18 nt, Human
gcugucauugcuucuucu

SEQ ID NO: 1959391 - RNA, 20 nt, Human
gcugucauugcuucuucuga

SEQ ID NO: 1959392 - RNA, 14 nt, Human
gcuguccacccgcc

SEQ ID NO: 1959393 - RNA, 16 nt, Human
gcugucccuuuuccuu

SEQ ID NO: 1959394 - RNA, 23 nt, Human
gcugucccuuacgugaguccugg

SEQ ID NO: 1959395 - RNA, 17 nt, Human
gcugucagccauuccug

SEQ ID NO: 1959396 - RNA, 16 nt, Human
gcugucacugcugcuu

SEQ ID NO: 1959397 - RNA, 13 nt, Human
gcugucaucucag

SEQ ID NO: 1959398 - RNA, 15 nt, Human
gcugucaguguuugg

SEQ ID NO: 1959399 - RNA, 14 nt, Human
gcuggugucaccug

SEQ ID NO: 1959400 - RNA, 15 nt, Human
gcuggugucaccuga

SEQ ID NO: 1959401 - RNA, 13 nt, Human
gcuuguggcucca

SEQ ID NO: 1959402 - RNA, 19 nt, Human
gcuuguggcuccacacaca

SEQ ID NO: 1959403 - RNA, 22 nt, Human
gcuuguggcuccacacacacaa

SEQ ID NO: 1959404 - RNA, 13 nt, Human
gcuuguugacaga

SEQ ID NO: 1959405 - RNA, 14 nt, Human
gcuuuccaaagcca

SEQ ID NO: 1959406 - RNA, 14 nt, Human
gcuuuaaaauucuc

SEQ ID NO: 1959407 - RNA, 20 nt, Human
gcuuuaaaauucucuuccaa

SEQ ID NO: 1959408 - RNA, 15 nt, Human
gcuuuuaugugaaac

SEQ ID NO: 1959409 - RNA, 13 nt, Human
gcuuuuaugugaa

SEQ ID NO: 1959410 - RNA, 15 nt, Human
gcuuuuaguuuuucu

SEQ ID NO: 1959411 - RNA, 19 nt, Human
gcuuuuaguuuuucugucc

SEQ ID NO: 1959412 - RNA, 20 nt, Human
gcuuuuaguuuuucuguccc

SEQ ID NO: 1959413 - RNA, 17 nt, Human
gcuuuggucacuuuuag

SEQ ID NO: 1959414 - RNA, 18 nt, Human
gcuuugggcugcccuggu

SEQ ID NO: 1959415 - RNA, 19 nt, Human
gcuuugggcugcccuggug

SEQ ID NO: 1959416 - RNA, 21 nt, Human
gcuuuccauauuuuuuuccuu

SEQ ID NO: 1959417 - RNA, 14 nt, Human
gcuuuccauauuuu

SEQ ID NO: 1959418 - RNA, 16 nt, Human
gcuucucagcucgcug

SEQ ID NO: 1959419 - RNA, 16 nt, Human
gcuucuggaugggaca

SEQ ID NO: 1959420 - RNA, 19 nt, Human
gcuucuguugcugccucau

SEQ ID NO: 1959421 - RNA, 17 nt, Human
gcuucuguugcugccuc

SEQ ID NO: 1959422 - RNA, 18 nt, Human
gcuucuguugcugccuca

SEQ ID NO: 1959423 - RNA, 18 nt, Human
gcuucauuuccugugucu

SEQ ID NO: 1959424 - RNA, 16 nt, Human
gcuuccaauuuuccuu

SEQ ID NO: 1959425 - RNA, 22 nt, Human
gcuucucacugccaugccagcu

SEQ ID NO: 1959426 - RNA, 14 nt, Human
gcuuacguaguucu

SEQ ID NO: 1959427 - RNA, 15 nt, Human
gcuuacguaguucua

SEQ ID NO: 1959428 - RNA, 22 nt, Human
gcuuacguaguucuaccggcuu

SEQ ID NO: 1959429 - RNA, 15 nt, Human
gcuuagaaacuggaa

SEQ ID NO: 1959430 - RNA, 15 nt, Human
gcuuauauuugugua

SEQ ID NO: 1959431 - RNA, 10 nt, Human
gcuucauaca

SEQ ID NO: 1959432 - RNA, 11 nt, Human
gcuucauacac

SEQ ID NO: 1959433 - RNA, 22 nt, Human
gcuucauguucccaaaaucacc

SEQ ID NO: 1959434 - RNA, 19 nt, Human
gcuucaguggcagcugcuu

SEQ ID NO: 1959435 - RNA, 13 nt, Human
gcuuaucucaggg

SEQ ID NO: 1959436 - RNA, 20 nt, Human
gcuucaguggcagcugcuuu

SEQ ID NO: 1959437 - RNA, 21 nt, Human
gcucucaggccagcugcuugg

SEQ ID NO: 1959438 - RNA, 17 nt, Human
gcucucaugcugccccu

SEQ ID NO: 1959439 - RNA, 17 nt, Human
gcucgaugcagacaggg

SEQ ID NO: 1959440 - RNA, 19 nt, Human
gcuccuuucugaucuucac

SEQ ID NO: 1959441 - RNA, 16 nt, Human
gcucgaugcagacagg

SEQ ID NO: 1959442 - RNA, 15 nt, Human
gcucuccaagcccag

SEQ ID NO: 1959443 - RNA, 14 nt, Human
gcucuugaacuccu

SEQ ID NO: 1959444 - RNA, 16 nt, Human
gcucuugaacuccuga

SEQ ID NO: 1959445 - RNA, 19 nt, Human
gcucuugaacuccugaccu

SEQ ID NO: 1959446 - RNA, 21 nt, Human
gcucuugaacuccugaccuca

SEQ ID NO: 1959447 - RNA, 24 nt, Human
gcucuuuggccugaugaccaauuu

SEQ ID NO: 1959448 - RNA, 23 nt, Human
gcucuugggcaauauucucugua

SEQ ID NO: 1959449 - RNA, 19 nt, Human
gcucuugaugccuggcggg

SEQ ID NO: 1959450 - RNA, 19 nt, Human
gcucuuggcagguacucag

SEQ ID NO: 1959451 - RNA, 22 nt, Human
gcucuugcauaguaaauguagu

SEQ ID NO: 1959452 - RNA, 13 nt, Human
gcugacuuagaau

SEQ ID NO: 1959453 - RNA, 22 nt, Human
gcugacuguuuucucuugagag

SEQ ID NO: 1959454 - RNA, 20 nt, Human
gcugacagacacaggcccgg

SEQ ID NO: 1959455 - RNA, 17 nt, Human
gcugacagacacaggcc

SEQ ID NO: 1959456 - RNA, 18 nt, Human
gcugacagacacaggccc

SEQ ID NO: 1959457 - RNA, 19 nt, Human
gcugacagacacaggcccg

SEQ ID NO: 1959458 - RNA, 13 nt, Human
gcugccaccugcc

SEQ ID NO: 1959459 - RNA, 12 nt, Human
gcugccaccugc

SEQ ID NO: 1959460 - RNA, 20 nt, Human
gcugccaaugggagcucaug

SEQ ID NO: 1959461 - RNA, 15 nt, Human
gcugccacacuucag

SEQ ID NO: 1959462 - RNA, 17 nt, Human
gcugccacacuucaggc

SEQ ID NO: 1959463 - RNA, 18 nt, Human
gcugccacacuucaggcu

SEQ ID NO: 1959464 - RNA, 21 nt, Human
gcugccacacuucaggcucuu

SEQ ID NO: 1959465 - RNA, 22 nt, Human
gcugccacacuucaggcucuuc

SEQ ID NO: 1959466 - RNA, 23 nt, Human
gcugccacacuucaggcucuucu

SEQ ID NO: 1959467 - RNA, 18 nt, Human
gcugauuuuauucuugau

SEQ ID NO: 1959468 - RNA, 20 nt, Human
gcugauuuuauucuugauca

SEQ ID NO: 1959469 - RNA, 14 nt, Human
gcugcaguugccag

SEQ ID NO: 1959470 - RNA, 13 nt, Human
gcugcaguugcca

SEQ ID NO: 1959471 - RNA, 17 nt, Human
gcugcaguugccaguca

SEQ ID NO: 1959472 - RNA, 17 nt, Human
gcugcauuuaaaagaua

SEQ ID NO: 1959473 - RNA, 18 nt, Human
gcugcauuuaaaagauac

SEQ ID NO: 1959474 - RNA, 19 nt, Human
gcugcauuuaaaagauaca

SEQ ID NO: 1959475 - RNA, 14 nt, Human
gcugauuguauuua

SEQ ID NO: 1959476 - RNA, 21 nt, Human
gcugaugacccccccagcuuc

SEQ ID NO: 1959477 - RNA, 14 nt, Human
gcugaucuaaaaau

SEQ ID NO: 1959478 - RNA, 21 nt, Human
gcugauuaaaccaaggcuaga

SEQ ID NO: 1959479 - RNA, 12 nt, Human
gcugauuuuauu

SEQ ID NO: 1959480 - RNA, 16 nt, Human
gcugauuuuauucuug

SEQ ID NO: 1959481 - RNA, 17 nt, Human
gcugauuuuauucuuga

SEQ ID NO: 1959482 - RNA, 22 nt, Human
gcugcaaaggguaucaggugcu

SEQ ID NO: 1959483 - RNA, 23 nt, Human
gcugcaaaggguaucaggugcug

SEQ ID NO: 1959484 - RNA, 12 nt, Human
gcugcccugccc

SEQ ID NO: 1959485 - RNA, 14 nt, Human
gcugcccugcccac

SEQ ID NO: 1959486 - RNA, 13 nt, Human
gcugcccugccca

SEQ ID NO: 1959487 - RNA, 24 nt, Human
gcugcccugcccaccuggccucug

SEQ ID NO: 1959488 - RNA, 23 nt, Human
gcugcccugcccaccuggccucu

SEQ ID NO: 1959489 - RNA, 22 nt, Human
gcugcccugcccaccuggccuc

SEQ ID NO: 1959490 - RNA, 21 nt, Human
gcugcccugcccaccuggccu

SEQ ID NO: 1959491 - RNA, 20 nt, Human
gcugcccugcccaccuggcc

SEQ ID NO: 1959492 - RNA, 18 nt, Human
gcugcccugcccaccugg

SEQ ID NO: 1959493 - RNA, 16 nt, Human
gcugcccugcccaccu

SEQ ID NO: 1959494 - RNA, 20 nt, Human
gcugccuguucagcuccagc

SEQ ID NO: 1959495 - RNA, 22 nt, Human
gcugccuguucagcuccagcuc

SEQ ID NO: 1959496 - RNA, 20 nt, Human
gcugccuuagaaccuuucuu

SEQ ID NO: 1959497 - RNA, 17 nt, Human
gcugcccuggugcugcc

SEQ ID NO: 1959498 - RNA, 15 nt, Human
gcugccuuagaaccu

SEQ ID NO: 1959499 - RNA, 18 nt, Human
gcugccuguucagcucca

SEQ ID NO: 1959500 - RNA, 19 nt, Human
gcugccuguucagcuccag

SEQ ID NO: 1959501 - RNA, 12 nt, Human
gcugcccuggug

SEQ ID NO: 1959502 - RNA, 13 nt, Human
gcugcccuggugc

SEQ ID NO: 1959503 - RNA, 14 nt, Human
gcugcccuggugcu

SEQ ID NO: 1959504 - RNA, 15 nt, Human
gcugcccuggugcug

SEQ ID NO: 1959505 - RNA, 21 nt, Human
gcugccuucgguacccaccac

SEQ ID NO: 1959506 - RNA, 20 nt, Human
gcugccuucgguacccacca

SEQ ID NO: 1959507 - RNA, 14 nt, Human
gcugcgguccaccc

SEQ ID NO: 1959508 - RNA, 15 nt, Human
gcugcgguccaccca

SEQ ID NO: 1959509 - RNA, 22 nt, Human
gcugcgguccacccaggagccc

SEQ ID NO: 1959510 - RNA, 21 nt, Human
gcugcgguccacccaggagcc

SEQ ID NO: 1959511 - RNA, 22 nt, Human
gcugcuuuugucuaugggacuc

SEQ ID NO: 1959512 - RNA, 15 nt, Human
gcugcuuugauauau

SEQ ID NO: 1959513 - RNA, 16 nt, Human
gcugcuaauucuuugc

SEQ ID NO: 1959514 - RNA, 17 nt, Human
gcugcuaauucuuugca

SEQ ID NO: 1959515 - RNA, 14 nt, Human
gcugcuuuuuuuga

SEQ ID NO: 1959516 - RNA, 22 nt, Human
gcugcuuuuuuugaaacuuuga

SEQ ID NO: 1959517 - RNA, 23 nt, Human
gcuggaaugauuucagcucacug

SEQ ID NO: 1959518 - RNA, 21 nt, Human
gcuggaacucuugacagcuau

SEQ ID NO: 1959519 - RNA, 14 nt, Human
gcuggaacucuuga

SEQ ID NO: 1959520 - RNA, 16 nt, Human
gcuggaccuugaacug

SEQ ID NO: 1959521 - RNA, 15 nt, Human
gcuggaccuugaacu

SEQ ID NO: 1959522 - RNA, 14 nt, Human
gcuggcccugcccu

SEQ ID NO: 1959523 - RNA, 15 nt, Human
gcuggcccugcccug

SEQ ID NO: 1959524 - RNA, 16 nt, Human
gcuggcccugcccugg

SEQ ID NO: 1959525 - RNA, 19 nt, Human
gcuggcccuggcucccaca

SEQ ID NO: 1959526 - RNA, 14 nt, Human
gcuggccggacacc

SEQ ID NO: 1959527 - RNA, 15 nt, Human
ggcugggagcucugc

SEQ ID NO: 1959528 - RNA, 21 nt, Human
ggcugggcucccuucccaccu

SEQ ID NO: 1959529 - RNA, 20 nt, Human
ggcugggcucccuucccacc

SEQ ID NO: 1959530 - RNA, 14 nt, Human
ggcugggcacugcu

SEQ ID NO: 1959531 - RNA, 19 nt, Human
ggcugggcacugcucucac

SEQ ID NO: 1959532 - RNA, 20 nt, Human
ggcugggcacugcucucacc

SEQ ID NO: 1959533 - RNA, 16 nt, Human
ggcuggaguuggggca

SEQ ID NO: 1959534 - RNA, 11 nt, Human
ggcugggcuuc

SEQ ID NO: 1959535 - RNA, 21 nt, Human
ggcugggcuucaguggcagcu

SEQ ID NO: 1959536 - RNA, 22 nt, Human
ggcugggcuucaguggcagcug

SEQ ID NO: 1959537 - RNA, 14 nt, Human
ggcugggcugggca

SEQ ID NO: 1959538 - RNA, 15 nt, Human
ggcugggcugggcac

SEQ ID NO: 1959539 - RNA, 18 nt, Human
ggcugggcugggcacugc

SEQ ID NO: 1959540 - RNA, 16 nt, Human
ggcugggggaagaagc

SEQ ID NO: 1959541 - RNA, 12 nt, Human
ggcuggggcagc

SEQ ID NO: 1959542 - RNA, 14 nt, Human
ggcuggggcagccu

SEQ ID NO: 1959543 - RNA, 20 nt, Human
ggcuggggcagccucugggc

SEQ ID NO: 1959544 - RNA, 23 nt, Human
ggcuggggcagccucugggccca

SEQ ID NO: 1959545 - RNA, 14 nt, Human
ggcugggggccuca

SEQ ID NO: 1959546 - RNA, 18 nt, Human
ggcugggggaugggccug

SEQ ID NO: 1959547 - RNA, 19 nt, Human
ggcugggggaugggccuga

SEQ ID NO: 1959548 - RNA, 19 nt, Human
ggcugcuucaaggauccug

SEQ ID NO: 1959549 - RNA, 15 nt, Human
ggcugcuucaaggau

SEQ ID NO: 1959550 - RNA, 23 nt, Human
ggcucuggagcccacuguacuug

SEQ ID NO: 1959551 - RNA, 18 nt, Human
ggcuggacuuggagguag

SEQ ID NO: 1959552 - RNA, 18 nt, Human
ggcuggagcuagaauuug

SEQ ID NO: 1959553 - RNA, 13 nt, Human
ggcuggacuugga

SEQ ID NO: 1959554 - RNA, 20 nt, Human
ggcugcuucaaggauccuga

SEQ ID NO: 1959555 - RNA, 21 nt, Human
ggcugcuucaaggauccugag

SEQ ID NO: 1959556 - RNA, 15 nt, Human
ggcuugcacucucuu

SEQ ID NO: 1959557 - RNA, 12 nt, Human
ggcuucacagau

SEQ ID NO: 1959558 - RNA, 21 nt, Human
ggcuucacggaagagccuugc

SEQ ID NO: 1959559 - RNA, 20 nt, Human
ggcuucacggaagagccuug

SEQ ID NO: 1959560 - RNA, 15 nt, Human
ggcuuagucacugag

SEQ ID NO: 1959561 - RNA, 14 nt, Human
ggcuuaaaaaaaac

SEQ ID NO: 1959562 - RNA, 14 nt, Human
ggcuuagucacuga

SEQ ID NO: 1959563 - RNA, 18 nt, Human
ggcuuggggaccagagcu

SEQ ID NO: 1959564 - RNA, 17 nt, Human
ggcuuggggaccagagc

SEQ ID NO: 1959565 - RNA, 11 nt, Human
ggcuugcugcc

SEQ ID NO: 1959566 - RNA, 13 nt, Human
ggcuugcugcaga

SEQ ID NO: 1959567 - RNA, 12 nt, Human
ggcuuggcccug

SEQ ID NO: 1959568 - RNA, 13 nt, Human
ggcuuggcccugg

SEQ ID NO: 1959569 - RNA, 15 nt, Human
ggcuuggcccuggca

SEQ ID NO: 1959570 - RNA, 16 nt, Human
ggcuuggcccuggcag

SEQ ID NO: 1959571 - RNA, 14 nt, Human
ggcuguuggcuggg

SEQ ID NO: 1959572 - RNA, 15 nt, Human
ggcuguuggcugggg

SEQ ID NO: 1959573 - RNA, 16 nt, Human
ggcuguuggcuggggg

SEQ ID NO: 1959574 - RNA, 20 nt, Human
ggcuguuggcugggggccuc

SEQ ID NO: 1959575 - RNA, 15 nt, Human
ggcuuaaaacaacac

SEQ ID NO: 1959576 - RNA, 13 nt, Human
ggcugugccucug

SEQ ID NO: 1959577 - RNA, 16 nt, Human
ggcugugccucugccu

SEQ ID NO: 1959578 - RNA, 17 nt, Human
ggcugucuguuguauuc

SEQ ID NO: 1959579 - RNA, 21 nt, Human
ggcuguggccucccugcucua

SEQ ID NO: 1959580 - RNA, 20 nt, Human
gggacccaguggcagggcac

SEQ ID NO: 1959581 - RNA, 15 nt, Human
gggacccaguggcag

SEQ ID NO: 1959582 - RNA, 17 nt, Human
gggacccaguggcaggg

SEQ ID NO: 1959583 - RNA, 20 nt, Human
gggacgcggccggcggccuc

SEQ ID NO: 1959584 - RNA, 17 nt, Human
gggacucaaugcacuga

SEQ ID NO: 1959585 - RNA, 19 nt, Human
gggacucaaugcacugaca

SEQ ID NO: 1959586 - RNA, 18 nt, Human
gggacugccaccuccccu

SEQ ID NO: 1959587 - RNA, 22 nt, Human
gggacugccaccuccccuugcc

SEQ ID NO: 1959588 - RNA, 23 nt, Human
gggacugccagucccccugcccc

SEQ ID NO: 1959589 - RNA, 14 nt, Human
gggacugccaccuc

SEQ ID NO: 1959590 - RNA, 16 nt, Human
gggacugccaccuccc

SEQ ID NO: 1959591 - RNA, 21 nt, Human
gggacugaggggaggggagca

SEQ ID NO: 1959592 - RNA, 15 nt, Human
gggacugagaaauuu

SEQ ID NO: 1959593 - RNA, 23 nt, Human
gggacucaaugcacugacauugu

SEQ ID NO: 1959594 - RNA, 14 nt, Human
gggacacccagaaa

SEQ ID NO: 1959595 - RNA, 19 nt, Human
gggacacacuuagcuggag

SEQ ID NO: 1959596 - RNA, 20 nt, Human
gggacaccaagccuuggcuc

SEQ ID NO: 1959597 - RNA, 14 nt, Human
gggacacccuguga

SEQ ID NO: 1959598 - RNA, 19 nt, Human
gggaauguuugccucugcc

SEQ ID NO: 1959599 - RNA, 21 nt, Human
gggaauguuugccucugccuc

SEQ ID NO: 1959600 - RNA, 18 nt, Human
ggcuuugccauuaaaaug

SEQ ID NO: 1959601 - RNA, 13 nt, Human
ggcuuuucacugc

SEQ ID NO: 1959602 - RNA, 14 nt, Human
gggaaguuaaaggg

SEQ ID NO: 1959603 - RNA, 17 nt, Human
gggaaguuaaagggaag

SEQ ID NO: 1959604 - RNA, 22 nt, Human
gggaaguuaaagggaagaaaac

SEQ ID NO: 1959605 - RNA, 20 nt, Human
gggaggugggauccuccagg

SEQ ID NO: 1959606 - RNA, 18 nt, Human
gggaggcaaguguggggg

SEQ ID NO: 1959607 - RNA, 23 nt, Human
gggaggauugcuugagcucagga

SEQ ID NO: 1959608 - RNA, 21 nt, Human
gggagugaguugauagcacag

SEQ ID NO: 1959609 - RNA, 19 nt, Human
gggagguuuucucccccag

SEQ ID NO: 1959610 - RNA, 17 nt, Human
gggaguagacuugcuuu

SEQ ID NO: 1959611 - RNA, 17 nt, Human
gggagugacagaggcag

SEQ ID NO: 1959612 - RNA, 17 nt, Human
gggaggacgcucucugg

SEQ ID NO: 1959613 - RNA, 20 nt, Human
gggaggacgcucucuggccu

SEQ ID NO: 1959614 - RNA, 12 nt, Human
gggaggagaaga

SEQ ID NO: 1959615 - RNA, 23 nt, Human
gggaggagaagaaaauguucuuc

SEQ ID NO: 1959616 - RNA, 23 nt, Human
gggaggaucucuugagccuggga

SEQ ID NO: 1959617 - RNA, 21 nt, Human
gggaggauugcuugagcucag

SEQ ID NO: 1959618 - RNA, 22 nt, Human
gggaggauguucugggacacag

SEQ ID NO: 1959619 - RNA, 13 nt, Human
gggagcugccugu

SEQ ID NO: 1959620 - RNA, 21 nt, Human
gggagcugccuguucagcucc

SEQ ID NO: 1959621 - RNA, 22 nt, Human
gggagcugccuguucagcucca

SEQ ID NO: 1959622 - RNA, 11 nt, Human
gggagcuggag

SEQ ID NO: 1959623 - RNA, 22 nt, Human
gggagcuggcuccagccuggaa

SEQ ID NO: 1959624 - RNA, 12 nt, Human
gggagcucugca

SEQ ID NO: 1959625 - RNA, 20 nt, Human
gggagccgggcaaacuggcc

SEQ ID NO: 1959626 - RNA, 21 nt, Human
gggagccugaucaccugcccu

SEQ ID NO: 1959627 - RNA, 20 nt, Human
ggcuaguaucaaaagaaaga

SEQ ID NO: 1959628 - RNA, 20 nt, Human
ggcgggcacaccuccuccca

SEQ ID NO: 1959629 - RNA, 15 nt, Human
ggcgcgguggcucac

SEQ ID NO: 1959630 - RNA, 12 nt, Human
ggcgcuaacuug

SEQ ID NO: 1959631 - RNA, 23 nt, Human
ggcgcuaacuugcuuaaauguga

SEQ ID NO: 1959632 - RNA, 21 nt, Human
ggcgcuagaggccauggaggc

SEQ ID NO: 1959633 - RNA, 19 nt, Human
ggcgcuagcacagcucccu

SEQ ID NO: 1959634 - RNA, 22 nt, Human
ggcgcuagcacagcucccuucu

SEQ ID NO: 1959635 - RNA, 23 nt, Human
ggcgcucgaaguugaucucccca

SEQ ID NO: 1959636 - RNA, 11 nt, Human
ggcgcugcccc

SEQ ID NO: 1959637 - RNA, 17 nt, Human
ggcgcugccccuggcag

SEQ ID NO: 1959638 - RNA, 16 nt, Human
ggcuccaggagcagcc

SEQ ID NO: 1959639 - RNA, 14 nt, Human
ggcuccaggagcag

SEQ ID NO: 1959640 - RNA, 10 nt, Human
ggcuccagac

SEQ ID NO: 1959641 - RNA, 17 nt, Human
ggcuccaggagcagcca

SEQ ID NO: 1959642 - RNA, 18 nt, Human
ggcuccaggagcagccac

SEQ ID NO: 1959643 - RNA, 12 nt, Human
ggcuccaggcuc

SEQ ID NO: 1959644 - RNA, 13 nt, Human
ggcuccaggcucc

SEQ ID NO: 1959645 - RNA, 12 nt, Human
ggcuaugcauuu

SEQ ID NO: 1959646 - RNA, 13 nt, Human
ggcuaugcauuug

SEQ ID NO: 1959647 - RNA, 21 nt, Human
ggcucacacuuggcucugagg

SEQ ID NO: 1959648 - RNA, 14 nt, Human
ggcuaugcauuuga

SEQ ID NO: 1959649 - RNA, 16 nt, Human
ggcuccacuuggucug

SEQ ID NO: 1959650 - RNA, 9 nt, Human
ggcuccaga

SEQ ID NO: 1959651 - RNA, 13 nt, Human
ggcucaccagaau

SEQ ID NO: 1959652 - RNA, 12 nt, Human
ggcucugcccuu

SEQ ID NO: 1959653 - RNA, 19 nt, Human
ggcucugacaaagcuuccc

SEQ ID NO: 1959654 - RNA, 20 nt, Human
ggcucugacaaagcuucccg

SEQ ID NO: 1959655 - RNA, 16 nt, Human
ggcucucugggcugac

SEQ ID NO: 1959656 - RNA, 15 nt, Human
ggcucugccucccau

SEQ ID NO: 1959657 - RNA, 13 nt, Human
ggcucugccuccc

SEQ ID NO: 1959658 - RNA, 15 nt, Human
ggcucugcccuuggu

SEQ ID NO: 1959659 - RNA, 14 nt, Human
ggcucugcccuugg

SEQ ID NO: 1959660 - RNA, 16 nt, Human
ggcucugccucccauc

SEQ ID NO: 1959661 - RNA, 16 nt, Human
ggcucuggagcccacu

SEQ ID NO: 1959662 - RNA, 19 nt, Human
ggcucuggagcccacugua

SEQ ID NO: 1959663 - RNA, 17 nt, Human
ggcucuggagcccacug

SEQ ID NO: 1959664 - RNA, 20 nt, Human
ggcucucaggccagcugcuu

SEQ ID NO: 1959665 - RNA, 19 nt, Human
ggcucucaggccagcugcu

SEQ ID NO: 1959666 - RNA, 18 nt, Human
ggcucucaggccagcugc

SEQ ID NO: 1959667 - RNA, 17 nt, Human
ggcucucaggccagcug

SEQ ID NO: 1959668 - RNA, 16 nt, Human
ggcucucaggccagcu

SEQ ID NO: 1959669 - RNA, 15 nt, Human
ggcucucaggccagc

SEQ ID NO: 1959670 - RNA, 12 nt, Human
ggcuccccucuu

SEQ ID NO: 1959671 - RNA, 15 nt, Human
ggcuccccucuuccu

SEQ ID NO: 1959672 - RNA, 17 nt, Human
ggcuccccucuuccucu

SEQ ID NO: 1959673 - RNA, 18 nt, Human
ggcuccccucuuccucuu

SEQ ID NO: 1959674 - RNA, 19 nt, Human
ggcuccccucuuccucuug

SEQ ID NO: 1959675 - RNA, 14 nt, Human
ggcuccaggcuccu

SEQ ID NO: 1959676 - RNA, 15 nt, Human
ggcuccaggcuccuu

SEQ ID NO: 1959677 - RNA, 20 nt, Human
ggcucccaggagccugccca

SEQ ID NO: 1959678 - RNA, 21 nt, Human
ggcucccaggagccugcccag

SEQ ID NO: 1959679 - RNA, 22 nt, Human
ggcucccaggagccugcccagc

SEQ ID NO: 1959680 - RNA, 14 nt, Human
ggccuggccugagc

SEQ ID NO: 1959681 - RNA, 13 nt, Human
ggccuggccugag

SEQ ID NO: 1959682 - RNA, 10 nt, Human
ggccuggccu

SEQ ID NO: 1959683 - RNA, 23 nt, Human
ggccuggccccucagggucccug

SEQ ID NO: 1959684 - RNA, 18 nt, Human
ggccuggccccucagggu

SEQ ID NO: 1959685 - RNA, 17 nt, Human
ggccuggccccucaggg

SEQ ID NO: 1959686 - RNA, 15 nt, Human
ggccuggccccucag

SEQ ID NO: 1959687 - RNA, 14 nt, Human
ggccuggccccuca

SEQ ID NO: 1959688 - RNA, 19 nt, Human
ggccucugcacuccccugc

SEQ ID NO: 1959689 - RNA, 18 nt, Human
ggccucugcacuccccug

SEQ ID NO: 1959690 - RNA, 16 nt, Human
ggccugacucucagca

SEQ ID NO: 1959691 - RNA, 22 nt, Human
ggccucugcacuccccugcugg

SEQ ID NO: 1959692 - RNA, 18 nt, Human
ggccugagaggggaagcg

SEQ ID NO: 1959693 - RNA, 13 nt, Human
ggccuggccccuc

SEQ ID NO: 1959694 - RNA, 20 nt, Human
ggcgcaagggaggcccagcg

SEQ ID NO: 1959695 - RNA, 18 nt, Human
ggcgcaagggaggcccag

SEQ ID NO: 1959696 - RNA, 24 nt, Human
ggcgcagcauauucaggaagcuca

SEQ ID NO: 1959697 - RNA, 23 nt, Human
ggcgcagcauauucaggaagcuc

SEQ ID NO: 1959698 - RNA, 15 nt, Human
ggccuggcccaugua

SEQ ID NO: 1959699 - RNA, 16 nt, Human
ggccuggccugagcug

SEQ ID NO: 1959700 - RNA, 15 nt, Human
ggccuggccugagcu

SEQ ID NO: 1959701 - RNA, 23 nt, Human
ggccugggggcugggcagaggaa

SEQ ID NO: 1959702 - RNA, 15 nt, Human
ggccugggccuggcu

SEQ ID NO: 1959703 - RNA, 17 nt, Human
ggccugggccuggcucc

SEQ ID NO: 1959704 - RNA, 18 nt, Human
ggccugggccuggcuccc

SEQ ID NO: 1959705 - RNA, 11 nt, Human
ggccugggccc

SEQ ID NO: 1959706 - RNA, 12 nt, Human
ggccugggccug

SEQ ID NO: 1959707 - RNA, 20 nt, Human
ggccucucauuccagaggaa

SEQ ID NO: 1959708 - RNA, 14 nt, Human
ggccuccugugugu

SEQ ID NO: 1959709 - RNA, 20 nt, Human
ggccuagcauacguacacau

SEQ ID NO: 1959710 - RNA, 15 nt, Human
ggccuacuccugucu

SEQ ID NO: 1959711 - RNA, 17 nt, Human
ggccuacuccugucuuc

SEQ ID NO: 1959712 - RNA, 20 nt, Human
ggccuacuccugucuucugc

SEQ ID NO: 1959713 - RNA, 23 nt, Human
ggccuacuccugucuucugcuuu

SEQ ID NO: 1959714 - RNA, 22 nt, Human
ggccuagcauacguacacauuu

SEQ ID NO: 1959715 - RNA, 14 nt, Human
ggccucaagugauu

SEQ ID NO: 1959716 - RNA, 22 nt, Human
ggccucaagugauucuccugcc

SEQ ID NO: 1959717 - RNA, 12 nt, Human
ggccgggcagag

SEQ ID NO: 1959718 - RNA, 15 nt, Human
ggccgggagccugau

SEQ ID NO: 1959719 - RNA, 18 nt, Human
ggccggcuuucaggagcu

SEQ ID NO: 1959720 - RNA, 19 nt, Human
ggccggcuuucaggagcuc

SEQ ID NO: 1959721 - RNA, 18 nt, Human
ggccggcggccucagagu

SEQ ID NO: 1959722 - RNA, 12 nt, Human
ggccuacuccug

SEQ ID NO: 1959723 - RNA, 14 nt, Human
ggccuacuccuguc

SEQ ID NO: 1959724 - RNA, 16 nt, Human
ggccguugcugacuua

SEQ ID NO: 1959725 - RNA, 19 nt, Human
ggcccagagggccugcaag

SEQ ID NO: 1959726 - RNA, 17 nt, Human
ggcccagagggccugca

SEQ ID NO: 1959727 - RNA, 20 nt, Human
ggcccagagggccugcaagg

SEQ ID NO: 1959728 - RNA, 14 nt, Human
ggcccagagggccu

SEQ ID NO: 1959729 - RNA, 20 nt, Human
ggauucacaccccaccugcg

SEQ ID NO: 1959730 - RNA, 12 nt, Human
ggauucagccuu

SEQ ID NO: 1959731 - RNA, 13 nt, Human
ggauucagccuuc

SEQ ID NO: 1959732 - RNA, 16 nt, Human
ggauucagccuucuuu

SEQ ID NO: 1959733 - RNA, 23 nt, Human
ggauucagccuucuuuuucugga

SEQ ID NO: 1959734 - RNA, 17 nt, Human
ggauucacaccccaccu

SEQ ID NO: 1959735 - RNA, 19 nt, Human
ggauucacaccccaccugc

SEQ ID NO: 1959736 - RNA, 23 nt, Human
ggauuccuaaucacucagagcag

SEQ ID NO: 1959737 - RNA, 16 nt, Human
ggauucugagagcugu

SEQ ID NO: 1959738 - RNA, 20 nt, Human
ggauucugaggcccugccca

SEQ ID NO: 1959739 - RNA, 16 nt, Human
ggauucucaccagcug

SEQ ID NO: 1959740 - RNA, 19 nt, Human
ggauuagucccuggccucu

SEQ ID NO: 1959741 - RNA, 14 nt, Human
ggauuaguuuagaa

SEQ ID NO: 1959742 - RNA, 17 nt, Human
ggauuaguuuagaacag

SEQ ID NO: 1959743 - RNA, 18 nt, Human
ggauuaguuuagaacagg

SEQ ID NO: 1959744 - RNA, 12 nt, Human
ggauuauauuau

SEQ ID NO: 1959745 - RNA, 18 nt, Human
ggaugccugguggcagcu

SEQ ID NO: 1959746 - RNA, 19 nt, Human
ggaugccugguggcagcug

SEQ ID NO: 1959747 - RNA, 20 nt, Human
ggaugccugguggcagcugc

SEQ ID NO: 1959748 - RNA, 21 nt, Human
ggaugccugguggcagcugcg

SEQ ID NO: 1959749 - RNA, 18 nt, Human
ggaugcccaaagaugcag

SEQ ID NO: 1959750 - RNA, 18 nt, Human
ggaugaugacuauggaaa

SEQ ID NO: 1959751 - RNA, 19 nt, Human
ggaugcccaaagaugcagc

SEQ ID NO: 1959752 - RNA, 17 nt, Human
ggaugccccgucccccu

SEQ ID NO: 1959753 - RNA, 14 nt, Human
ggaugauugaagaa

SEQ ID NO: 1959754 - RNA, 13 nt, Human
ggaugccuggugg

SEQ ID NO: 1959755 - RNA, 17 nt, Human
ggaugccugguggcagc

SEQ ID NO: 1959756 - RNA, 22 nt, Human
ggaugaucuaggaagacuuugg

SEQ ID NO: 1959757 - RNA, 18 nt, Human
ggaugaucuaggaagacu

SEQ ID NO: 1959758 - RNA, 16 nt, Human
ggaugaucuaggaaga

SEQ ID NO: 1959759 - RNA, 23 nt, Human
ggagucccaccuuggcugcaggg

SEQ ID NO: 1959760 - RNA, 20 nt, Human
ggagucccacuccaagccag

SEQ ID NO: 1959761 - RNA, 21 nt, Human
ggauucuuccucccucccucu

SEQ ID NO: 1959762 - RNA, 21 nt, Human
ggauucugaggcccugcccaa

SEQ ID NO: 1959763 - RNA, 18 nt, Human
ggauucuuguuuugcuuc

SEQ ID NO: 1959764 - RNA, 19 nt, Human
ggauucuuguuuugcuucc

SEQ ID NO: 1959765 - RNA, 17 nt, Human
ggcaagcaccuccugcc

SEQ ID NO: 1959766 - RNA, 19 nt, Human
ggcaagaaaagaguuaagg

SEQ ID NO: 1959767 - RNA, 18 nt, Human
ggcaagcaccuccugccu

SEQ ID NO: 1959768 - RNA, 19 nt, Human
ggcaagcaccuccugccuc

SEQ ID NO: 1959769 - RNA, 23 nt, Human
ggcaaggacgcuucacaggacag

SEQ ID NO: 1959770 - RNA, 17 nt, Human
ggcaccagcagccugga

SEQ ID NO: 1959771 - RNA, 24 nt, Human
ggcaaggacgcuucacaggacagg

SEQ ID NO: 1959772 - RNA, 19 nt, Human
ggcaccaguagcaggcccg

SEQ ID NO: 1959773 - RNA, 20 nt, Human
ggcacccaccaucaugucug

SEQ ID NO: 1959774 - RNA, 18 nt, Human
ggcacccggccccugcug

SEQ ID NO: 1959775 - RNA, 19 nt, Human
ggcacccggccccugcugg

SEQ ID NO: 1959776 - RNA, 20 nt, Human
ggcacccggccccugcuggu

SEQ ID NO: 1959777 - RNA, 18 nt, Human
ggcacucagaagacacug

SEQ ID NO: 1959778 - RNA, 19 nt, Human
ggcacucagaagacacuga

SEQ ID NO: 1959779 - RNA, 20 nt, Human
ggcacucagaagacacugau

SEQ ID NO: 1959780 - RNA, 21 nt, Human
ggcagagguugcagugagccg

SEQ ID NO: 1959781 - RNA, 22 nt, Human
ggcagagcagagaccaucccug

SEQ ID NO: 1959782 - RNA, 20 nt, Human
ggcagagcccugcucccucc

SEQ ID NO: 1959783 - RNA, 14 nt, Human
ggcagagcccugcu

SEQ ID NO: 1959784 - RNA, 16 nt, Human
ggccaggcccucugcc

SEQ ID NO: 1959785 - RNA, 15 nt, Human
ggccaggcccucugc

SEQ ID NO: 1959786 - RNA, 17 nt, Human
ggccaggcccucugccc

SEQ ID NO: 1959787 - RNA, 14 nt, Human
ggccaggcccucug

SEQ ID NO: 1959788 - RNA, 13 nt, Human
ggccaggagccuc

SEQ ID NO: 1959789 - RNA, 11 nt, Human
ggccaggagcc

SEQ ID NO: 1959790 - RNA, 18 nt, Human
ggcccaccaggccccccu

SEQ ID NO: 1959791 - RNA, 20 nt, Human
ggcccacccaagcaggaggc

SEQ ID NO: 1959792 - RNA, 21 nt, Human
ggcccacccgguucaguguuu

SEQ ID NO: 1959793 - RNA, 12 nt, Human
ggcccacccugc

SEQ ID NO: 1959794 - RNA, 21 nt, Human
ggcccacccugcuuggcccag

SEQ ID NO: 1959795 - RNA, 22 nt, Human
ggcccacccugcuuggcccagg

SEQ ID NO: 1959796 - RNA, 23 nt, Human
ggcccacccugcuuggcccaggg

SEQ ID NO: 1959797 - RNA, 19 nt, Human
ggccagaaguagcuuugca

SEQ ID NO: 1959798 - RNA, 20 nt, Human
ggccaggaaguagcacaggc

SEQ ID NO: 1959799 - RNA, 21 nt, Human
ggccaggaaguagcacaggcu

SEQ ID NO: 1959800 - RNA, 22 nt, Human
ggccaggaaguagcacaggcug

SEQ ID NO: 1959801 - RNA, 23 nt, Human
ggccaggaaguagcacaggcuga

SEQ ID NO: 1959802 - RNA, 15 nt, Human
ggccagaaguagcuu

SEQ ID NO: 1959803 - RNA, 17 nt, Human
ggccagaaguagcuuug

SEQ ID NO: 1959804 - RNA, 20 nt, Human
ggccacugugaagagaacca

SEQ ID NO: 1959805 - RNA, 15 nt, Human
ggccaccucuuccug

SEQ ID NO: 1959806 - RNA, 16 nt, Human
ggccaccucuuccugg

SEQ ID NO: 1959807 - RNA, 19 nt, Human
ggccaccucuuccuggccg

SEQ ID NO: 1959808 - RNA, 20 nt, Human
ggccaccucuuccuggccgg

SEQ ID NO: 1959809 - RNA, 22 nt, Human
ggccaccucuuccuggccggug

SEQ ID NO: 1959810 - RNA, 16 nt, Human
ggccacaguuguuuga

SEQ ID NO: 1959811 - RNA, 14 nt, Human
ggccacaguuguuu

SEQ ID NO: 1959812 - RNA, 11 nt, Human
ggccaccuccu

SEQ ID NO: 1959813 - RNA, 21 nt, Human
ggccaccuccuaaaaggccca

SEQ ID NO: 1959814 - RNA, 22 nt, Human
ggccaccuccuaaaaggcccag

SEQ ID NO: 1959815 - RNA, 23 nt, Human
ggccaccuccuaaaaggcccaga

SEQ ID NO: 1959816 - RNA, 22 nt, Human
ggccacagaaaauucuucucca

SEQ ID NO: 1959817 - RNA, 20 nt, Human
ggcauguucucugaggacac

SEQ ID NO: 1959818 - RNA, 17 nt, Human
ggcagguuggugggggc

SEQ ID NO: 1959819 - RNA, 17 nt, Human
ggcagggucucacucug

SEQ ID NO: 1959820 - RNA, 18 nt, Human
ggcagggucucacucugu

SEQ ID NO: 1959821 - RNA, 12 nt, Human
ggcaggguccua

SEQ ID NO: 1959822 - RNA, 23 nt, Human
ggcagcugcgguccacccaggag

SEQ ID NO: 1959823 - RNA, 24 nt, Human
ggcagcugcgguccacccaggagc

SEQ ID NO: 1959824 - RNA, 21 nt, Human
ggcagaguugaagacagagcu

SEQ ID NO: 1959825 - RNA, 19 nt, Human
ggcagaguugaagacagag

SEQ ID NO: 1959826 - RNA, 17 nt, Human
ggcagaguugaagacag

SEQ ID NO: 1959827 - RNA, 13 nt, Human
ggcagaguuacuu

SEQ ID NO: 1959828 - RNA, 12 nt, Human
ggcagcugccac

SEQ ID NO: 1959829 - RNA, 14 nt, Human
ggcagaguuacuug

SEQ ID NO: 1959830 - RNA, 21 nt, Human
ggcagcugcgguccacccagg

SEQ ID NO: 1959831 - RNA, 22 nt, Human
ggcaugacacgaauauugcuga

SEQ ID NO: 1959832 - RNA, 23 nt, Human
ggcaugugaugagaggaaaucac

SEQ ID NO: 1959833 - RNA, 18 nt, Human
ggcaugugaugagaggaa

SEQ ID NO: 1959834 - RNA, 17 nt, Human
ggagguuggagggaaag

SEQ ID NO: 1959835 - RNA, 14 nt, Human
ggaggggccuggca

SEQ ID NO: 1959836 - RNA, 18 nt, Human
ggaggggccuggcagccg

SEQ ID NO: 1959837 - RNA, 21 nt, Human
ggaggggccuggcagccgugc

SEQ ID NO: 1959838 - RNA, 22 nt, Human
ggagucccaccuuggcugcagg

SEQ ID NO: 1959839 - RNA, 20 nt, Human
ggaguagugaagacuccaga

SEQ ID NO: 1959840 - RNA, 13 nt, Human
ggaggggccuggc

SEQ ID NO: 1959841 - RNA, 19 nt, Human
ggaggggagcaugggaagu

SEQ ID NO: 1959842 - RNA, 13 nt, Human
ggagggccugggc

SEQ ID NO: 1959843 - RNA, 16 nt, Human
ggagggccugggccug

SEQ ID NO: 1959844 - RNA, 22 nt, Human
ggagggccugggccuggcuccc

SEQ ID NO: 1959845 - RNA, 23 nt, Human
ggagggccugggccuggcucccu

SEQ ID NO: 1959846 - RNA, 16 nt, Human
ggagggagggcuccag

SEQ ID NO: 1959847 - RNA, 13 nt, Human
ggagggagggcuc

SEQ ID NO: 1959848 - RNA, 17 nt, Human
ggagggagggcuccaga

SEQ ID NO: 1959849 - RNA, 17 nt, Human
ggaggcaggaguuucgu

SEQ ID NO: 1959850 - RNA, 16 nt, Human
ggaggacgcucucugg

SEQ ID NO: 1959851 - RNA, 14 nt, Human
ggaggaccugcccg

SEQ ID NO: 1959852 - RNA, 18 nt, Human
ggaggauguucugggaca

SEQ ID NO: 1959853 - RNA, 21 nt, Human
ggaggauguucugggacacag

SEQ ID NO: 1959854 - RNA, 16 nt, Human
ggagccuacccacccc

SEQ ID NO: 1959855 - RNA, 20 nt, Human
ggagcccugggaggcucugg

SEQ ID NO: 1959856 - RNA, 14 nt, Human
ggagccuccugccc

SEQ ID NO: 1959857 - RNA, 19 nt, Human
ggagcccugggaggcucug

SEQ ID NO: 1959858 - RNA, 16 nt, Human
ggagcccugggaggcu

SEQ ID NO: 1959859 - RNA, 17 nt, Human
ggagccugcagagcugc

SEQ ID NO: 1959860 - RNA, 15 nt, Human
ggagccuccugcccu

SEQ ID NO: 1959861 - RNA, 13 nt, Human
ggagccugacagc

SEQ ID NO: 1959862 - RNA, 16 nt, Human
ggagccugacagccag

SEQ ID NO: 1959863 - RNA, 17 nt, Human
ggagccugacagccaga

SEQ ID NO: 1959864 - RNA, 19 nt, Human
ggagcggauugcaaagcaa

SEQ ID NO: 1959865 - RNA, 20 nt, Human
ggagcucacuguggugucug

SEQ ID NO: 1959866 - RNA, 23 nt, Human
ggagcucacuguggugucugugu

SEQ ID NO: 1959867 - RNA, 12 nt, Human
ggagcuauuuua

SEQ ID NO: 1959868 - RNA, 14 nt, Human
ggagcuagaauuug

SEQ ID NO: 1959869 - RNA, 16 nt, Human
ggacagaggggguggc

SEQ ID NO: 1959870 - RNA, 22 nt, Human
ggacacuuauccacgagagcgc

SEQ ID NO: 1959871 - RNA, 18 nt, Human
ggacagaaggcuccugcc

SEQ ID NO: 1959872 - RNA, 20 nt, Human
ggacagaaggcuccugcccc

SEQ ID NO: 1959873 - RNA, 21 nt, Human
gcuuuuaugugaaacauguuu

SEQ ID NO: 1959874 - RNA, 20 nt, Human
gcuuuuaugugaaacauguu

SEQ ID NO: 1959875 - RNA, 19 nt, Human
gcuuuuaugugaaacaugu

SEQ ID NO: 1959876 - RNA, 19 nt, Human
ggacacuuauccacgagag

SEQ ID NO: 1959877 - RNA, 21 nt, Human
ggacacuguaacgugugcugu

SEQ ID NO: 1959878 - RNA, 12 nt, Human
gcuuuucacugc

SEQ ID NO: 1959879 - RNA, 20 nt, Human
ggacagaggggguggccucc

SEQ ID NO: 1959880 - RNA, 15 nt, Human
ggacagccccuccuc

SEQ ID NO: 1959881 - RNA, 16 nt, Human
ggacagccccuccucc

SEQ ID NO: 1959882 - RNA, 11 nt, Human
ggacagcuccu

SEQ ID NO: 1959883 - RNA, 15 nt, Human
ggacagcuccuucug

SEQ ID NO: 1959884 - RNA, 16 nt, Human
ggacagcuccuucugu

SEQ ID NO: 1959885 - RNA, 17 nt, Human
ggacagcuccuucuguc

SEQ ID NO: 1959886 - RNA, 14 nt, Human
ggaccagagcugcc

SEQ ID NO: 1959887 - RNA, 16 nt, Human
ggaccagcccacgcug

SEQ ID NO: 1959888 - RNA, 12 nt, Human
ggaccagcccac

SEQ ID NO: 1959889 - RNA, 13 nt, Human
ggaccagcccacg

SEQ ID NO: 1959890 - RNA, 15 nt, Human
ggaccagcccacgcu

SEQ ID NO: 1959891 - RNA, 19 nt, Human
ggaccagagcugccaccug

SEQ ID NO: 1959892 - RNA, 15 nt, Human
ggacauuuuaugucu

SEQ ID NO: 1959893 - RNA, 15 nt, Human
ggaccagcacacucc

SEQ ID NO: 1959894 - RNA, 19 nt, Human
ggagaagaaagaacuaucu

SEQ ID NO: 1959895 - RNA, 18 nt, Human
ggagaacuugcugccucg

SEQ ID NO: 1959896 - RNA, 12 nt, Human
ggagaagaaaau

SEQ ID NO: 1959897 - RNA, 18 nt, Human
ggacugagaaauuuauaa

SEQ ID NO: 1959898 - RNA, 11 nt, Human
ggacugacuga

SEQ ID NO: 1959899 - RNA, 15 nt, Human
ggacugacugaggca

SEQ ID NO: 1959900 - RNA, 16 nt, Human
ggacugacugaggcag

SEQ ID NO: 1959901 - RNA, 17 nt, Human
ggacugacugaggcagu

SEQ ID NO: 1959902 - RNA, 15 nt, Human
ggagaaucacaggcu

SEQ ID NO: 1959903 - RNA, 16 nt, Human
ggagaaucacaggcug

SEQ ID NO: 1959904 - RNA, 17 nt, Human
ggagaaucacaggcugg

SEQ ID NO: 1959905 - RNA, 18 nt, Human
ggagaaucacaggcuggg

SEQ ID NO: 1959906 - RNA, 22 nt, Human
ggagaaucacaggcugggcugg

SEQ ID NO: 1959907 - RNA, 19 nt, Human
ggagaaucacaggcugggc

SEQ ID NO: 1959908 - RNA, 13 nt, Human
ggagaaucacagg

SEQ ID NO: 1959909 - RNA, 19 nt, Human
ggagaagucuucuauuuau

SEQ ID NO: 1959910 - RNA, 20 nt, Human
ggagaagucuucuauuuauu

SEQ ID NO: 1959911 - RNA, 18 nt, Human
ggacugaaaaccucuccu

SEQ ID NO: 1959912 - RNA, 17 nt, Human
ggacugaaaaccucucc

SEQ ID NO: 1959913 - RNA, 16 nt, Human
ggacugaaaaccucuc

SEQ ID NO: 1959914 - RNA, 17 nt, Human
ggacugaauuaugaaac

SEQ ID NO: 1959915 - RNA, 19 nt, Human
ggacugaauuaugaaacuu

SEQ ID NO: 1959916 - RNA, 14 nt, Human
ggacugagaaauuu

SEQ ID NO: 1959917 - RNA, 16 nt, Human
ggacgcucucuggccu

SEQ ID NO: 1959918 - RNA, 19 nt, Human
ggacgcucucuggccuucg

SEQ ID NO: 1959919 - RNA, 13 nt, Human
ggacgcucugcug

SEQ ID NO: 1959920 - RNA, 18 nt, Human
ggaccuugaacuggguac

SEQ ID NO: 1959921 - RNA, 16 nt, Human
ggaccaugcugucugg

SEQ ID NO: 1959922 - RNA, 19 nt, Human
ggaccaugcugucuggcac

SEQ ID NO: 1959923 - RNA, 20 nt, Human
ggaccaugcugucuggcaca

SEQ ID NO: 1959924 - RNA, 21 nt, Human
ggaccaugcugucuggcacag

SEQ ID NO: 1959925 - RNA, 22 nt, Human
ggaccaugcugucuggcacagc

SEQ ID NO: 1959926 - RNA, 23 nt, Human
ggaccaugcugucuggcacagcc

SEQ ID NO: 1959927 - RNA, 14 nt, Human
ggaccauuuuccug

SEQ ID NO: 1959928 - RNA, 16 nt, Human
ggaccauuuuccugca

SEQ ID NO: 1959929 - RNA, 17 nt, Human
ggaccaggguuggcacc

SEQ ID NO: 1959930 - RNA, 21 nt, Human
gccaaguccgcagaagcccug

SEQ ID NO: 1959931 - RNA, 20 nt, Human
gccaauaauaauaccucccu

SEQ ID NO: 1959932 - RNA, 15 nt, Human
gccaaucagaagcua

SEQ ID NO: 1959933 - RNA, 16 nt, Human
gccaauggagacuguc

SEQ ID NO: 1959934 - RNA, 19 nt, Human
gccaauggagacugucuca

SEQ ID NO: 1959935 - RNA, 21 nt, Human
gccaauggagacugucucaag

SEQ ID NO: 1959936 - RNA, 21 nt, Human
gccaaggcugggggaagaagc

SEQ ID NO: 1959937 - RNA, 12 nt, Human
gcauuugugaaa

SEQ ID NO: 1959938 - RNA, 19 nt, Human
gcauuugaggucuguucuu

SEQ ID NO: 1959939 - RNA, 20 nt, Human
gcauuugaggucuguucuuu

SEQ ID NO: 1959940 - RNA, 22 nt, Human
gcauuuggugguuucagaaaug

SEQ ID NO: 1959941 - RNA, 23 nt, Human
gcauuuggugguuucagaaaugu

SEQ ID NO: 1959942 - RNA, 23 nt, Human
gccaaggugggaggauugcuuga

SEQ ID NO: 1959943 - RNA, 15 nt, Human
gccaaggugggagga

SEQ ID NO: 1959944 - RNA, 14 nt, Human
gccaaggugggagg

SEQ ID NO: 1959945 - RNA, 23 nt, Human
gccacaaggaagaaauuaacuua

SEQ ID NO: 1959946 - RNA, 20 nt, Human
gccaauuucucuuaaguacu

SEQ ID NO: 1959947 - RNA, 20 nt, Human
gccaaugugaacagcggcug

SEQ ID NO: 1959948 - RNA, 22 nt, Human
gccacaagacccuugugguccc

SEQ ID NO: 1959949 - RNA, 15 nt, Human
gccacaaggaagaaa

SEQ ID NO: 1959950 - RNA, 17 nt, Human
gccacaaggaagaaauu

SEQ ID NO: 1959951 - RNA, 22 nt, Human
gccacaaggaagaaauuaacuu

SEQ ID NO: 1959952 - RNA, 16 nt, Human
gccacaagacccuugu

SEQ ID NO: 1959953 - RNA, 22 nt, Human
gccacacucugggcuccagagu

SEQ ID NO: 1959954 - RNA, 20 nt, Human
gccacacuucaggcucuucu

SEQ ID NO: 1959955 - RNA, 22 nt, Human
gccacacuucaggcucuucucc

SEQ ID NO: 1959956 - RNA, 13 nt, Human
gccacagagaaag

SEQ ID NO: 1959957 - RNA, 23 nt, Human
gccacacuucaggcucuucuccu

SEQ ID NO: 1959958 - RNA, 14 nt, Human
gccacagagaaagu

SEQ ID NO: 1959959 - RNA, 20 nt, Human
gccacagagaaaguacuucu

SEQ ID NO: 1959960 - RNA, 23 nt, Human
gccacagagaaaguacuucucca

SEQ ID NO: 1959961 - RNA, 17 nt, Human
gccagaggagagaggac

SEQ ID NO: 1959962 - RNA, 15 nt, Human
gccagaggagagagg

SEQ ID NO: 1959963 - RNA, 13 nt, Human
gccagaggagaga

SEQ ID NO: 1959964 - RNA, 12 nt, Human
gccagaggagag

SEQ ID NO: 1959965 - RNA, 22 nt, Human
gccagaggagagaggacccccu

SEQ ID NO: 1959966 - RNA, 19 nt, Human
gccagaggagagaggaccc

SEQ ID NO: 1959967 - RNA, 21 nt, Human
gccagagggagugacagaggc

SEQ ID NO: 1959968 - RNA, 22 nt, Human
gccagagggagugacagaggca

SEQ ID NO: 1959969 - RNA, 23 nt, Human
gccagagggagugacagaggcag

SEQ ID NO: 1959970 - RNA, 16 nt, Human
gccagaugcaccagcc

SEQ ID NO: 1959971 - RNA, 17 nt, Human
gccagaugcaccagccc

SEQ ID NO: 1959972 - RNA, 18 nt, Human
gccagaugcaccagcccu

SEQ ID NO: 1959973 - RNA, 16 nt, Human
gccagagacacaagcc

SEQ ID NO: 1959974 - RNA, 19 nt, Human
gccagagacacaagccuuc

SEQ ID NO: 1959975 - RNA, 17 nt, Human
gccagagacacaagccu

SEQ ID NO: 1959976 - RNA, 10 nt, Human
gccagaggag

SEQ ID NO: 1959977 - RNA, 20 nt, Human
gccagagacacaagccuucg

SEQ ID NO: 1959978 - RNA, 23 nt, Human
gccacauccacagucucccccac

SEQ ID NO: 1959979 - RNA, 14 nt, Human
gccacaucccccaa

SEQ ID NO: 1959980 - RNA, 12 nt, Human
gccacaguuguu

SEQ ID NO: 1959981 - RNA, 19 nt, Human
gccaccgccuccuacagcc

SEQ ID NO: 1959982 - RNA, 13 nt, Human
gccacaucccucu

SEQ ID NO: 1959983 - RNA, 17 nt, Human
gccaccgugccuggcca

SEQ ID NO: 1959984 - RNA, 22 nt, Human
gccaccgugccuggccacgccc

SEQ ID NO: 1959985 - RNA, 17 nt, Human
gccaccugccuguuggg

SEQ ID NO: 1959986 - RNA, 17 nt, Human
gccaccugaguuccuga

SEQ ID NO: 1959987 - RNA, 21 nt, Human
gccaccugaguuccugaggug

SEQ ID NO: 1959988 - RNA, 14 nt, Human
gccaccucuuccug

SEQ ID NO: 1959989 - RNA, 15 nt, Human
gccaccucuuccugg

SEQ ID NO: 1959990 - RNA, 18 nt, Human
gccaccucuuccuggccg

SEQ ID NO: 1959991 - RNA, 16 nt, Human
gccaccugaguuccug

SEQ ID NO: 1959992 - RNA, 23 nt, Human
gccaccuccuaaaaggcccagag

SEQ ID NO: 1959993 - RNA, 21 nt, Human
gccaccuccuaaaaggcccag

SEQ ID NO: 1959994 - RNA, 22 nt, Human
gccaccuccuaaaaggcccaga

SEQ ID NO: 1959995 - RNA, 18 nt, Human
gccaccuccccuugccag

SEQ ID NO: 1959996 - RNA, 20 nt, Human
gccaccuccccuugccagcu

SEQ ID NO: 1959997 - RNA, 21 nt, Human
gccaccuccccuugccagcug

SEQ ID NO: 1959998 - RNA, 22 nt, Human
gccaccuccccuugccagcugc

SEQ ID NO: 1959999 - RNA, 24 nt, Human
gccaccuccccuugccagcugcug

SEQ ID NO: 1960000 - RNA, 20 nt, Human
gccaccuccuaaaaggccca

SEQ ID NO: 1960001 - RNA, 20 nt, Human
gccaccugcggugcuaucuc

SEQ ID NO: 1960002 - RNA, 14 nt, Human
gccaccugcggugc

SEQ ID NO: 1960003 - RNA, 22 nt, Human
gccaccugcggugcuaucuccc

SEQ ID NO: 1960004 - RNA, 15 nt, Human
gccacgauugcagga

SEQ ID NO: 1960005 - RNA, 11 nt, Human
gccaccugggu

SEQ ID NO: 1960006 - RNA, 18 nt, Human
gccacggccaggccagag

SEQ ID NO: 1960007 - RNA, 17 nt, Human
gccacggccaggccaga

SEQ ID NO: 1960008 - RNA, 20 nt, Human
gccacgcccaacuaauuuuu

SEQ ID NO: 1960009 - RNA, 19 nt, Human
gccacggccaggccagagg

SEQ ID NO: 1960010 - RNA, 23 nt, Human
gccaugggacagggaggacgcuc

SEQ ID NO: 1960011 - RNA, 22 nt, Human
gccaugggacagggaggacgcu

SEQ ID NO: 1960012 - RNA, 10 nt, Human
gcccaaccuc

SEQ ID NO: 1960013 - RNA, 13 nt, Human
gcccaacaggggc

SEQ ID NO: 1960014 - RNA, 21 nt, Human
gcccaacaggggcuccaugcc

SEQ ID NO: 1960015 - RNA, 22 nt, Human
gcccaacaggggcuccaugcca

SEQ ID NO: 1960016 - RNA, 13 nt, Human
gcccaaccacacu

SEQ ID NO: 1960017 - RNA, 14 nt, Human
gcccaaccugcucu

SEQ ID NO: 1960018 - RNA, 15 nt, Human
gcccaaccucuuccu

SEQ ID NO: 1960019 - RNA, 21 nt, Human
gcccaaccucuuccuccugac

SEQ ID NO: 1960020 - RNA, 23 nt, Human
gcccaaccucuuccuccugacac

SEQ ID NO: 1960021 - RNA, 21 nt, Human
gcccaaaccaccagaagccca

SEQ ID NO: 1960022 - RNA, 22 nt, Human
gcccaaaccaccagaagcccag

SEQ ID NO: 1960023 - RNA, 23 nt, Human
gcccaaaccaccagaagcccaga

SEQ ID NO: 1960024 - RNA, 16 nt, Human
gcccaaaccuuucccc

SEQ ID NO: 1960025 - RNA, 19 nt, Human
gcccaaaccuuucccccau

SEQ ID NO: 1960026 - RNA, 20 nt, Human
gccaugagaauguuuuagca

SEQ ID NO: 1960027 - RNA, 22 nt, Human
gccaugagaauguuuuagcaca

SEQ ID NO: 1960028 - RNA, 18 nt, Human
gccaugaggaacaaggca

SEQ ID NO: 1960029 - RNA, 18 nt, Human
gccaugccagcuuaucuc

SEQ ID NO: 1960030 - RNA, 13 nt, Human
gccaugccagcuu

SEQ ID NO: 1960031 - RNA, 19 nt, Human
gccaugccagcuuaucuca

SEQ ID NO: 1960032 - RNA, 15 nt, Human
gccaugccaggaacc

SEQ ID NO: 1960033 - RNA, 12 nt, Human
gccaucucugcu

SEQ ID NO: 1960034 - RNA, 13 nt, Human
gccaucucugcuc

SEQ ID NO: 1960035 - RNA, 14 nt, Human
gccaucucugcucc

SEQ ID NO: 1960036 - RNA, 15 nt, Human
gccaucucugcucca

SEQ ID NO: 1960037 - RNA, 13 nt, Human
gccaggcugcucu

SEQ ID NO: 1960038 - RNA, 14 nt, Human
gccaggcugcucuu

SEQ ID NO: 1960039 - RNA, 13 nt, Human
gccaggcuggguc

SEQ ID NO: 1960040 - RNA, 22 nt, Human
gccaggcugcucuugaacuccu

SEQ ID NO: 1960041 - RNA, 21 nt, Human
gccagauuucacucuccuugg

SEQ ID NO: 1960042 - RNA, 18 nt, Human
gccagauuucacucuccu

SEQ ID NO: 1960043 - RNA, 16 nt, Human
gccagauuucacucuc

SEQ ID NO: 1960044 - RNA, 18 nt, Human
gccagggacagagggggu

SEQ ID NO: 1960045 - RNA, 16 nt, Human
gccagggacagagggg

SEQ ID NO: 1960046 - RNA, 13 nt, Human
gccagggacagag

SEQ ID NO: 1960047 - RNA, 22 nt, Human
gccaggcuggucucgaacuccu

SEQ ID NO: 1960048 - RNA, 23 nt, Human
gccagggacagaggggguggccu

SEQ ID NO: 1960049 - RNA, 19 nt, Human
gccagggaaagacuggcaa

SEQ ID NO: 1960050 - RNA, 20 nt, Human
gccagggaaagacuggcaag

SEQ ID NO: 1960051 - RNA, 16 nt, Human
gccagggaccccagaa

SEQ ID NO: 1960052 - RNA, 22 nt, Human
gccagggaccccagaaucaugu

SEQ ID NO: 1960053 - RNA, 18 nt, Human
gccagucaccccggccac

SEQ ID NO: 1960054 - RNA, 17 nt, Human
gccagucaccccggcca

SEQ ID NO: 1960055 - RNA, 20 nt, Human
gccagucaccccggccaccu

SEQ ID NO: 1960056 - RNA, 12 nt, Human
gccaguaaaugg

SEQ ID NO: 1960057 - RNA, 14 nt, Human
gccagguugcuaag

SEQ ID NO: 1960058 - RNA, 18 nt, Human
gccagguugcuaagaaac

SEQ ID NO: 1960059 - RNA, 17 nt, Human
gccagguuuuuggucug

SEQ ID NO: 1960060 - RNA, 18 nt, Human
gccagguggccacuccag

SEQ ID NO: 1960061 - RNA, 17 nt, Human
gccaggggaccuccugg

SEQ ID NO: 1960062 - RNA, 22 nt, Human
gccaggggagguuacagguacc

SEQ ID NO: 1960063 - RNA, 17 nt, Human
gcccagccccuucugac

SEQ ID NO: 1960064 - RNA, 16 nt, Human
gcccagccccuucuga

SEQ ID NO: 1960065 - RNA, 14 nt, Human
gcccagccccuucu

SEQ ID NO: 1960066 - RNA, 13 nt, Human
gcccagccccuuc

SEQ ID NO: 1960067 - RNA, 24 nt, Human
gcccagccccuucugacccaugcu

SEQ ID NO: 1960068 - RNA, 20 nt, Human
gcccagccccuucugaccca

SEQ ID NO: 1960069 - RNA, 19 nt, Human
gcccagcgcggacaucccc

SEQ ID NO: 1960070 - RNA, 17 nt, Human
gcccagcgcggacaucc

SEQ ID NO: 1960071 - RNA, 15 nt, Human
gcccagccucuuucc

SEQ ID NO: 1960072 - RNA, 21 nt, Human
gcccagccucuuucccuucca

SEQ ID NO: 1960073 - RNA, 21 nt, Human
gcccagcuugaaaccuucacu

SEQ ID NO: 1960074 - RNA, 21 nt, Human
gcccaggaaaggcuccaggag

SEQ ID NO: 1960075 - RNA, 20 nt, Human
gcccaggaaaggcuccagga

SEQ ID NO: 1960076 - RNA, 19 nt, Human
gcccaggaaaggcuccagg

SEQ ID NO: 1960077 - RNA, 18 nt, Human
gcccaggaaaggcuccag

SEQ ID NO: 1960078 - RNA, 22 nt, Human
gcccaggcuggcgugcaguggu

SEQ ID NO: 1960079 - RNA, 19 nt, Human
gcccaggcuggcgugcagu

SEQ ID NO: 1960080 - RNA, 20 nt, Human
gcccaggcuggcgugcagug

SEQ ID NO: 1960081 - RNA, 21 nt, Human
gcccaggcuuagucacugaga

SEQ ID NO: 1960082 - RNA, 19 nt, Human
gcccaggcuuagucacuga

SEQ ID NO: 1960083 - RNA, 23 nt, Human
gcccaggcuuagucacugagaca

SEQ ID NO: 1960084 - RNA, 19 nt, Human
gcccagucuggaaugcagu

SEQ ID NO: 1960085 - RNA, 20 nt, Human
gcccagucuggaaugcagug

SEQ ID NO: 1960086 - RNA, 15 nt, Human
gcccaguugggugga

SEQ ID NO: 1960087 - RNA, 16 nt, Human
gcccagaucagccaga

SEQ ID NO: 1960088 - RNA, 18 nt, Human
gcccagaucagccagaag

SEQ ID NO: 1960089 - RNA, 16 nt, Human
gcccagagucccccca

SEQ ID NO: 1960090 - RNA, 18 nt, Human
gcccagaguccccccacu

SEQ ID NO: 1960091 - RNA, 23 nt, Human
gcccagaguccccccacucccag

SEQ ID NO: 1960092 - RNA, 21 nt, Human
gcccagcaccacccuccuucc

SEQ ID NO: 1960093 - RNA, 21 nt, Human
gcccagagggccugcaaggga

SEQ ID NO: 1960094 - RNA, 20 nt, Human
gcccagagggccugcaaggg

SEQ ID NO: 1960095 - RNA, 22 nt, Human
gcccagagggccugcaagggag

SEQ ID NO: 1960096 - RNA, 11 nt, Human
gcccagccccu

SEQ ID NO: 1960097 - RNA, 16 nt, Human
gcccagcccaccccau

SEQ ID NO: 1960098 - RNA, 12 nt, Human
gcccagccccuu

SEQ ID NO: 1960099 - RNA, 9 nt, Human
gcccagccc

SEQ ID NO: 1960100 - RNA, 20 nt, Human
gcccaaugagacucuagggu

SEQ ID NO: 1960101 - RNA, 14 nt, Human
gcccagacccugga

SEQ ID NO: 1960102 - RNA, 17 nt, Human
gcccagacccuggagga

SEQ ID NO: 1960103 - RNA, 18 nt, Human
gcccagacccuggaggaa

SEQ ID NO: 1960104 - RNA, 21 nt, Human
gcccaaugcacuuuguucugg

SEQ ID NO: 1960105 - RNA, 19 nt, Human
gcccagagacccaagcugc

SEQ ID NO: 1960106 - RNA, 21 nt, Human
gcccagagagaagagccccac

SEQ ID NO: 1960107 - RNA, 22 nt, Human
gcccagagagaagagccccacu

SEQ ID NO: 1960108 - RNA, 17 nt, Human
gcccagagagaagagcc

SEQ ID NO: 1960109 - RNA, 19 nt, Human
gcccagagagaagagcccc

SEQ ID NO: 1960110 - RNA, 20 nt, Human
gcccagagagaagagcccca

SEQ ID NO: 1960111 - RNA, 19 nt, Human
gcccagagggccugcaagg

SEQ ID NO: 1960112 - RNA, 18 nt, Human
gcccagagggccugcaag

SEQ ID NO: 1960113 - RNA, 15 nt, Human
gcccagagggccugc

SEQ ID NO: 1960114 - RNA, 14 nt, Human
gcccagagggccug

SEQ ID NO: 1960115 - RNA, 12 nt, Human
gcccagagggcc

SEQ ID NO: 1960116 - RNA, 23 nt, Human
gcccagagagaagagccccacuc

SEQ ID NO: 1960117 - RNA, 21 nt, Human
gcauuccccaggaggccagcc

SEQ ID NO: 1960118 - RNA, 20 nt, Human
gcauuccccaggaggccagc

SEQ ID NO: 1960119 - RNA, 19 nt, Human
gcauuccccaggaggccag

SEQ ID NO: 1960120 - RNA, 18 nt, Human
gcauuccccaggaggcca

SEQ ID NO: 1960121 - RNA, 17 nt, Human
gcauuccccaggaggcc

SEQ ID NO: 1960122 - RNA, 16 nt, Human
gcauuccccaggaggc

SEQ ID NO: 1960123 - RNA, 15 nt, Human
gcauuccccaggagg

SEQ ID NO: 1960124 - RNA, 14 nt, Human
gcauuccccaggag

SEQ ID NO: 1960125 - RNA, 22 nt, Human
gcauuccccaggaggccagccu

SEQ ID NO: 1960126 - RNA, 18 nt, Human
gcauuugaggucuguucu

SEQ ID NO: 1960127 - RNA, 13 nt, Human
gcauuacaggcaa

SEQ ID NO: 1960128 - RNA, 19 nt, Human
gcauuaucuagauacugua

SEQ ID NO: 1960129 - RNA, 16 nt, Human
gcauuaccucuuugga

SEQ ID NO: 1960130 - RNA, 18 nt, Human
gcauuaccucuuuggaaa

SEQ ID NO: 1960131 - RNA, 22 nt, Human
gcauuaucuagauacuguauca

SEQ ID NO: 1960132 - RNA, 24 nt, Human
gcauuaucuagauacuguaucaug

SEQ ID NO: 1960133 - RNA, 15 nt, Human
gcaugccuggauggg

SEQ ID NO: 1960134 - RNA, 13 nt, Human
gcauguuacauaa

SEQ ID NO: 1960135 - RNA, 14 nt, Human
gcauguucucugag

SEQ ID NO: 1960136 - RNA, 17 nt, Human
gcaugacagaaaauaug

SEQ ID NO: 1960137 - RNA, 18 nt, Human
gcaugacagaaaauaugu

SEQ ID NO: 1960138 - RNA, 19 nt, Human
gcaugacagaaaauaugua

SEQ ID NO: 1960139 - RNA, 21 nt, Human
gcaugacagaaaauauguauu

SEQ ID NO: 1960140 - RNA, 14 nt, Human
gcaugccuggaugg

SEQ ID NO: 1960141 - RNA, 22 nt, Human
gcaugacacgaauauugcugau

SEQ ID NO: 1960142 - RNA, 15 nt, Human
gcaugacagaaaaua

SEQ ID NO: 1960143 - RNA, 21 nt, Human
gcaugacacgaauauugcuga

SEQ ID NO: 1960144 - RNA, 20 nt, Human
gcaugacacgaauauugcug

SEQ ID NO: 1960145 - RNA, 21 nt, Human
gcaugaaguaauaugcacaca

SEQ ID NO: 1960146 - RNA, 22 nt, Human
gcaugaaguaauaugcacacau

SEQ ID NO: 1960147 - RNA, 20 nt, Human
gcaugaaguaauaugcacac

SEQ ID NO: 1960148 - RNA, 17 nt, Human
gcaucuggguagcugua

SEQ ID NO: 1960149 - RNA, 15 nt, Human
gcaucucagcccaca

SEQ ID NO: 1960150 - RNA, 21 nt, Human
gcaucucacagcuaugcaaaa

SEQ ID NO: 1960151 - RNA, 23 nt, Human
gcaucuggaagagcuaggcaggg

SEQ ID NO: 1960152 - RNA, 12 nt, Human
gcaucaggccag

SEQ ID NO: 1960153 - RNA, 22 nt, Human
gcauacugccuuguuuaauggu

SEQ ID NO: 1960154 - RNA, 18 nt, Human
gcaucaggccaggcccuc

SEQ ID NO: 1960155 - RNA, 19 nt, Human
gcaucagcugcucagaucc

SEQ ID NO: 1960156 - RNA, 23 nt, Human
gcaucaggccaggcccucugccc

SEQ ID NO: 1960157 - RNA, 15 nt, Human
gcaucagugcccucc

SEQ ID NO: 1960158 - RNA, 13 nt, Human
gcaucucagccca

SEQ ID NO: 1960159 - RNA, 14 nt, Human
gcaucucagcccac

SEQ ID NO: 1960160 - RNA, 12 nt, Human
gcaucucagccc

SEQ ID NO: 1960161 - RNA, 23 nt, Human
gcaucagugcccuccaggauaga

SEQ ID NO: 1960162 - RNA, 15 nt, Human
gcaucauuccaggcc

SEQ ID NO: 1960163 - RNA, 17 nt, Human
gcaucauuccaggcccg

SEQ ID NO: 1960164 - RNA, 16 nt, Human
gcaucauucucuaaua

SEQ ID NO: 1960165 - RNA, 23 nt, Human
gcaggucccuaauaaagcugugu

SEQ ID NO: 1960166 - RNA, 21 nt, Human
gcaggucccuaauaaagcugu

SEQ ID NO: 1960167 - RNA, 20 nt, Human
gcaggucccuaauaaagcug

SEQ ID NO: 1960168 - RNA, 19 nt, Human
gcaggucccuaauaaagcu

SEQ ID NO: 1960169 - RNA, 18 nt, Human
gcaggucccuaauaaagc

SEQ ID NO: 1960170 - RNA, 17 nt, Human
gcaggucccuaauaaag

SEQ ID NO: 1960171 - RNA, 16 nt, Human
gcaggucccuaauaaa

SEQ ID NO: 1960172 - RNA, 11 nt, Human
gcagugggagc

SEQ ID NO: 1960173 - RNA, 16 nt, Human
gcagugggccuggcca

SEQ ID NO: 1960174 - RNA, 21 nt, Human
gcagugggacagggcauggcc

SEQ ID NO: 1960175 - RNA, 17 nt, Human
gcagugggccuggccag

SEQ ID NO: 1960176 - RNA, 18 nt, Human
gcaguggugcgaucuggg

SEQ ID NO: 1960177 - RNA, 19 nt, Human
gcaguggugcgaucugggu

SEQ ID NO: 1960178 - RNA, 19 nt, Human
gcauacguacacauuuuau

SEQ ID NO: 1960179 - RNA, 20 nt, Human
gcaguggugguuuucuguuc

SEQ ID NO: 1960180 - RNA, 21 nt, Human
gcaguggugguuuucuguucu

SEQ ID NO: 1960181 - RNA, 19 nt, Human
gcaguggugguuuucuguu

SEQ ID NO: 1960182 - RNA, 22 nt, Human
gcaguggugcgaucuggguuca

SEQ ID NO: 1960183 - RNA, 20 nt, Human
gcaguggugcgaucuggguu

SEQ ID NO: 1960184 - RNA, 21 nt, Human
gcaguggugcgaucuggguuc

SEQ ID NO: 1960185 - RNA, 15 nt, Human
gcaggucccuaauaa

SEQ ID NO: 1960186 - RNA, 14 nt, Human
gcaggucccuaaua

SEQ ID NO: 1960187 - RNA, 19 nt, Human
gcaggguccuagaaauucc

SEQ ID NO: 1960188 - RNA, 16 nt, Human
gcagggucucacucug

SEQ ID NO: 1960189 - RNA, 22 nt, Human
gcaggggaggguagagcggaga

SEQ ID NO: 1960190 - RNA, 21 nt, Human
gcaggggaggccaucuggaga

SEQ ID NO: 1960191 - RNA, 14 nt, Human
gcagggcuuuaaaa

SEQ ID NO: 1960192 - RNA, 18 nt, Human
gcaggggaggccaucugg

SEQ ID NO: 1960193 - RNA, 19 nt, Human
gcaggggaggccaucugga

SEQ ID NO: 1960194 - RNA, 17 nt, Human
gcagggcuuuaaaauuc

SEQ ID NO: 1960195 - RNA, 15 nt, Human
gcaggggaggccauc

SEQ ID NO: 1960196 - RNA, 17 nt, Human
gcaggggaggccaucug

SEQ ID NO: 1960197 - RNA, 22 nt, Human
gcaggcgcaagggaggcccagc

SEQ ID NO: 1960198 - RNA, 13 nt, Human
gcaggccucccug

SEQ ID NO: 1960199 - RNA, 17 nt, Human
gcaggccucccugccag

SEQ ID NO: 1960200 - RNA, 18 nt, Human
gcaggccucccugccagu

SEQ ID NO: 1960201 - RNA, 21 nt, Human
gcagggcaggaccagcccacg

SEQ ID NO: 1960202 - RNA, 17 nt, Human
gcagggcaggaccagcc

SEQ ID NO: 1960203 - RNA, 18 nt, Human
gcagggcaggaccagccc

SEQ ID NO: 1960204 - RNA, 19 nt, Human
gcagggcaggaccagccca

SEQ ID NO: 1960205 - RNA, 14 nt, Human
gcagggcaggacca

SEQ ID NO: 1960206 - RNA, 15 nt, Human
gcagggcaggaccag

SEQ ID NO: 1960207 - RNA, 16 nt, Human
gcagggcaggaccagc

SEQ ID NO: 1960208 - RNA, 16 nt, Human
gcagggcacagggccu

SEQ ID NO: 1960209 - RNA, 19 nt, Human
gcagggcacagggccuggc

SEQ ID NO: 1960210 - RNA, 22 nt, Human
gcagggcacagggccuggccca

SEQ ID NO: 1960211 - RNA, 12 nt, Human
gcagggcacagg

SEQ ID NO: 1960212 - RNA, 13 nt, Human
gcagggcacaggg

SEQ ID NO: 1960213 - RNA, 14 nt, Human
gcagggcacagggc

SEQ ID NO: 1960214 - RNA, 17 nt, Human
gcaggcagccaggccac

SEQ ID NO: 1960215 - RNA, 18 nt, Human
gcaggcagccaggccaca

SEQ ID NO: 1960216 - RNA, 13 nt, Human
gcaggcagccuug

SEQ ID NO: 1960217 - RNA, 12 nt, Human
gcaggcaggcug

SEQ ID NO: 1960218 - RNA, 16 nt, Human
gcaggccaggccagcu

SEQ ID NO: 1960219 - RNA, 15 nt, Human
gcaggccaggccagc

SEQ ID NO: 1960220 - RNA, 17 nt, Human
gcaggccaggccagcug

SEQ ID NO: 1960221 - RNA, 11 nt, Human
gcaggcccacc

SEQ ID NO: 1960222 - RNA, 14 nt, Human
gcaggcccacccug

SEQ ID NO: 1960223 - RNA, 15 nt, Human
gcaggcccacccugc

SEQ ID NO: 1960224 - RNA, 16 nt, Human
gcaggcccacccugcu

SEQ ID NO: 1960225 - RNA, 20 nt, Human
gcaggcccacccugcuuggc

SEQ ID NO: 1960226 - RNA, 14 nt, Human
gcaggcccauggga

SEQ ID NO: 1960227 - RNA, 17 nt, Human
gcaggcccaugggaggc

SEQ ID NO: 1960228 - RNA, 22 nt, Human
gcaggcccaugggaggcuggag

SEQ ID NO: 1960229 - RNA, 11 nt, Human
gcaggcagggg

SEQ ID NO: 1960230 - RNA, 17 nt, Human
gcaccacacucagcccu

SEQ ID NO: 1960231 - RNA, 15 nt, Human
gcaccacacucagcc

SEQ ID NO: 1960232 - RNA, 14 nt, Human
gcacagggccuggc

SEQ ID NO: 1960233 - RNA, 16 nt, Human
gcacagggccuggccc

SEQ ID NO: 1960234 - RNA, 17 nt, Human
gcacagggccuggccca

SEQ ID NO: 1960235 - RNA, 18 nt, Human
gcacagggccuggcccau

SEQ ID NO: 1960236 - RNA, 19 nt, Human
gcacagggccuggcccaug

SEQ ID NO: 1960237 - RNA, 13 nt, Human
gcacaggucaggc

SEQ ID NO: 1960238 - RNA, 19 nt, Human
gcaccaaaauaagaaaaga

SEQ ID NO: 1960239 - RNA, 20 nt, Human
gcaccaaaauaagaaaagau

SEQ ID NO: 1960240 - RNA, 15 nt, Human
gcaccaucucuccuc

SEQ ID NO: 1960241 - RNA, 14 nt, Human
gcaccaucucuccu

SEQ ID NO: 1960242 - RNA, 13 nt, Human
gcaccagcagccu

SEQ ID NO: 1960243 - RNA, 14 nt, Human
gcaccagcagccug

SEQ ID NO: 1960244 - RNA, 17 nt, Human
gcaccaucucuccuccu

SEQ ID NO: 1960245 - RNA, 20 nt, Human
gauugugucucuugguccug

SEQ ID NO: 1960246 - RNA, 21 nt, Human
gauugugugguguuuuggauu

SEQ ID NO: 1960247 - RNA, 22 nt, Human
gcacaggcugagugcaggccca

SEQ ID NO: 1960248 - RNA, 16 nt, Human
gcacagggagaggccg

SEQ ID NO: 1960249 - RNA, 23 nt, Human
gcacaggcugagugcaggcccac

SEQ ID NO: 1960250 - RNA, 16 nt, Human
gcacagggcaguggga

SEQ ID NO: 1960251 - RNA, 16 nt, Human
gcacagggcaugaaau

SEQ ID NO: 1960252 - RNA, 18 nt, Human
gcacagggcaugaaauga

SEQ ID NO: 1960253 - RNA, 22 nt, Human
gcacagggcaugaaaugaacac

SEQ ID NO: 1960254 - RNA, 23 nt, Human
gcacagggcaugaaaugaacaca

SEQ ID NO: 1960255 - RNA, 11 nt, Human
gcacagggccu

SEQ ID NO: 1960256 - RNA, 23 nt, Human
gcacagcuucauuuccugugucu

SEQ ID NO: 1960257 - RNA, 21 nt, Human
gcacagcuucauuuccugugu

SEQ ID NO: 1960258 - RNA, 19 nt, Human
gcacccucaggcagguggg

SEQ ID NO: 1960259 - RNA, 16 nt, Human
gcacccucaggcaggu

SEQ ID NO: 1960260 - RNA, 14 nt, Human
gcaccccuuccugg

SEQ ID NO: 1960261 - RNA, 15 nt, Human
gcaccccuuccuggg

SEQ ID NO: 1960262 - RNA, 23 nt, Human
gcaccccuuccugggcacacgcu

SEQ ID NO: 1960263 - RNA, 14 nt, Human
gcacgugugugcac

SEQ ID NO: 1960264 - RNA, 20 nt, Human
gcacuaaggugugcucugau

SEQ ID NO: 1960265 - RNA, 15 nt, Human
gcacuaagucucuuu

SEQ ID NO: 1960266 - RNA, 19 nt, Human
gcacuaagucucuuuuuua

SEQ ID NO: 1960267 - RNA, 20 nt, Human
gcacuaagucucuuuuuuac

SEQ ID NO: 1960268 - RNA, 22 nt, Human
gcacuaagucucuuuuuuacaa

SEQ ID NO: 1960269 - RNA, 23 nt, Human
gcacuaagucucuuuuuuacaaa

SEQ ID NO: 1960270 - RNA, 15 nt, Human
gcacugcuuccagug

SEQ ID NO: 1960271 - RNA, 14 nt, Human
gcacugcuuccagu

SEQ ID NO: 1960272 - RNA, 13 nt, Human
gcacugcuuccag

SEQ ID NO: 1960273 - RNA, 12 nt, Human
gcacugcuucca

SEQ ID NO: 1960274 - RNA, 15 nt, Human
gcacuauaauguaag

SEQ ID NO: 1960275 - RNA, 14 nt, Human
gcacuauaauguaa

SEQ ID NO: 1960276 - RNA, 20 nt, Human
gcacuauaauguaagcucua

SEQ ID NO: 1960277 - RNA, 22 nt, Human
gcacuauaauguaagcucuacu

SEQ ID NO: 1960278 - RNA, 12 nt, Human
gcacugggcuug

SEQ ID NO: 1960279 - RNA, 19 nt, Human
gcacuguuuuauuuuaauu

SEQ ID NO: 1960280 - RNA, 22 nt, Human
gcagaucucccacaugccaggg

SEQ ID NO: 1960281 - RNA, 23 nt, Human
gcagagguugcagugagccgaga

SEQ ID NO: 1960282 - RNA, 18 nt, Human
gcagagguugcagugagc

SEQ ID NO: 1960283 - RNA, 21 nt, Human
gcagagguccacaacacacag

SEQ ID NO: 1960284 - RNA, 18 nt, Human
gcagauguccuugaugcu

SEQ ID NO: 1960285 - RNA, 18 nt, Human
gcagauggagaccccuug

SEQ ID NO: 1960286 - RNA, 23 nt, Human
gcagaugaggugaaaaggccaag

SEQ ID NO: 1960287 - RNA, 17 nt, Human
gcagacucuacagaggc

SEQ ID NO: 1960288 - RNA, 18 nt, Human
gcagacucuacagaggcc

SEQ ID NO: 1960289 - RNA, 19 nt, Human
gcagacucuacagaggcca

SEQ ID NO: 1960290 - RNA, 22 nt, Human
gcagacucuacagaggccaugg

SEQ ID NO: 1960291 - RNA, 22 nt, Human
gcacuucgggaggucgaggcag

SEQ ID NO: 1960292 - RNA, 14 nt, Human
gcacuucugccuga

SEQ ID NO: 1960293 - RNA, 21 nt, Human
gcacuucugccugaggggcag

SEQ ID NO: 1960294 - RNA, 14 nt, Human
gcacuugcagacuc

SEQ ID NO: 1960295 - RNA, 16 nt, Human
gcacuugcagacucua

SEQ ID NO: 1960296 - RNA, 21 nt, Human
gcagagaccaucccugaaggc

SEQ ID NO: 1960297 - RNA, 20 nt, Human
gcagagaccaucccugaagg

SEQ ID NO: 1960298 - RNA, 22 nt, Human
gcagagaccaucccugaaggcc

SEQ ID NO: 1960299 - RNA, 20 nt, Human
gcagagaagugacgguuccu

SEQ ID NO: 1960300 - RNA, 19 nt, Human
gcagacuuuuaaagacuug

SEQ ID NO: 1960301 - RNA, 20 nt, Human
gcagacuuuuaaagacuugc

SEQ ID NO: 1960302 - RNA, 17 nt, Human
gcagacuuuuaaagacu

SEQ ID NO: 1960303 - RNA, 19 nt, Human
gcagcagggagggcuucug

SEQ ID NO: 1960304 - RNA, 18 nt, Human
gcagcagggagggcuucu

SEQ ID NO: 1960305 - RNA, 20 nt, Human
gcagcagggagggcuucugc

SEQ ID NO: 1960306 - RNA, 14 nt, Human
gcagcccugcuuug

SEQ ID NO: 1960307 - RNA, 24 nt, Human
gcagcccugcuuugggcugcccug

SEQ ID NO: 1960308 - RNA, 19 nt, Human
gcagccucacaguccuuac

SEQ ID NO: 1960309 - RNA, 17 nt, Human
gcagccucacaguccuu

SEQ ID NO: 1960310 - RNA, 15 nt, Human
gcagccucacagucc

SEQ ID NO: 1960311 - RNA, 18 nt, Human
gcagccgccuucacagca

SEQ ID NO: 1960312 - RNA, 19 nt, Human
gcagccgccuucacagcag

SEQ ID NO: 1960313 - RNA, 14 nt, Human
gcagccgccuucac

SEQ ID NO: 1960314 - RNA, 14 nt, Human
gcagcucagagagg

SEQ ID NO: 1960315 - RNA, 21 nt, Human
gcagcucaccucucccuugga

SEQ ID NO: 1960316 - RNA, 20 nt, Human
gcagcucaccucucccuugg

SEQ ID NO: 1960317 - RNA, 17 nt, Human
gcagcucaccucucccu

SEQ ID NO: 1960318 - RNA, 16 nt, Human
gcagcucaccucuccc

SEQ ID NO: 1960319 - RNA, 13 nt, Human
gcagccucugggc

SEQ ID NO: 1960320 - RNA, 17 nt, Human
gcagccuccgcuucccu

SEQ ID NO: 1960321 - RNA, 19 nt, Human
gcagccuccgcuucccugg

SEQ ID NO: 1960322 - RNA, 19 nt, Human
gcagcucagagaggguggg

SEQ ID NO: 1960323 - RNA, 18 nt, Human
gcagcucagagagggugg

SEQ ID NO: 1960324 - RNA, 20 nt, Human
gcagcucagaaccacagcaa

SEQ ID NO: 1960325 - RNA, 18 nt, Human
gcaggaaauggcugugga

SEQ ID NO: 1960326 - RNA, 21 nt, Human
gcaggaccuucgggcugugcc

SEQ ID NO: 1960327 - RNA, 13 nt, Human
gcaggacgacugu

SEQ ID NO: 1960328 - RNA, 19 nt, Human
gauguugaaaaaguucugc

SEQ ID NO: 1960329 - RNA, 21 nt, Human
gauguucuuucacccuuuucu

SEQ ID NO: 1960330 - RNA, 14 nt, Human
gauguuuuccauga

SEQ ID NO: 1960331 - RNA, 23 nt, Human
gauguuuuccaugaguccccugu

SEQ ID NO: 1960332 - RNA, 15 nt, Human
gauguuuuccaugag

SEQ ID NO: 1960333 - RNA, 12 nt, Human
gauuaaauucuu

SEQ ID NO: 1960334 - RNA, 19 nt, Human
gauuaaauucuugcaaagu

SEQ ID NO: 1960335 - RNA, 21 nt, Human
gauuaaccacuucagcugacu

SEQ ID NO: 1960336 - RNA, 19 nt, Human
gauuaaccacuucagcuga

SEQ ID NO: 1960337 - RNA, 18 nt, Human
gauuaaccacuucagcug

SEQ ID NO: 1960338 - RNA, 22 nt, Human
gauuaagaucucagugguuaag

SEQ ID NO: 1960339 - RNA, 12 nt, Human
gauuaacuugga

SEQ ID NO: 1960340 - RNA, 18 nt, Human
gauuaacuuggaugaguu

SEQ ID NO: 1960341 - RNA, 20 nt, Human
gauuaacugaaauaaaaaau

SEQ ID NO: 1960342 - RNA, 19 nt, Human
gauucaacagguuuuccug

SEQ ID NO: 1960343 - RNA, 10 nt, Human
gaugggccug

SEQ ID NO: 1960344 - RNA, 20 nt, Human
gauggugcaaugaccuuuca

SEQ ID NO: 1960345 - RNA, 12 nt, Human
gaugggccugag

SEQ ID NO: 1960346 - RNA, 13 nt, Human
gaugggccugagu

SEQ ID NO: 1960347 - RNA, 18 nt, Human
gaugggccugagugagag

SEQ ID NO: 1960348 - RNA, 23 nt, Human
gauggugcaaugaccuuucaaua

SEQ ID NO: 1960349 - RNA, 19 nt, Human
gaugugcuuguuaacugag

SEQ ID NO: 1960350 - RNA, 15 nt, Human
gaugugcugcagugc

SEQ ID NO: 1960351 - RNA, 15 nt, Human
gaugugcugcuuuga

SEQ ID NO: 1960352 - RNA, 12 nt, Human
gaugugccuaaa

SEQ ID NO: 1960353 - RNA, 21 nt, Human
gauguggaaaagccaagaggc

SEQ ID NO: 1960354 - RNA, 23 nt, Human
gauguggaaaagccaagaggcug

SEQ ID NO: 1960355 - RNA, 20 nt, Human
gaugugcuuguuaacugagu

SEQ ID NO: 1960356 - RNA, 13 nt, Human
gauguguaauuuu

SEQ ID NO: 1960357 - RNA, 17 nt, Human
gauguguaauuuuucug

SEQ ID NO: 1960358 - RNA, 19 nt, Human
gauguguaauuuuucugua

SEQ ID NO: 1960359 - RNA, 18 nt, Human
gauguguccucagggagc

SEQ ID NO: 1960360 - RNA, 20 nt, Human
gauguguaauuuuucuguau

SEQ ID NO: 1960361 - RNA, 13 nt, Human
gauguguccucag

SEQ ID NO: 1960362 - RNA, 21 nt, Human
gauguguccugauaagcugag

SEQ ID NO: 1960363 - RNA, 14 nt, Human
gauguucugggaca

SEQ ID NO: 1960364 - RNA, 16 nt, Human
gauguucugggacaca

SEQ ID NO: 1960365 - RNA, 16 nt, Human
gauuccuguuucaagu

SEQ ID NO: 1960366 - RNA, 16 nt, Human
gauucccuuguuauuc

SEQ ID NO: 1960367 - RNA, 19 nt, Human
gauucccuuguuauucaac

SEQ ID NO: 1960368 - RNA, 22 nt, Human
gauuccuaaucacucagagcag

SEQ ID NO: 1960369 - RNA, 13 nt, Human
gauucccuuguua

SEQ ID NO: 1960370 - RNA, 12 nt, Human
gauucagacagc

SEQ ID NO: 1960371 - RNA, 22 nt, Human
gauucccaagcucugcuccucu

SEQ ID NO: 1960372 - RNA, 19 nt, Human
gauucacaccccaccugcg

SEQ ID NO: 1960373 - RNA, 13 nt, Human
gauucacauguuu

SEQ ID NO: 1960374 - RNA, 16 nt, Human
gauucacauguuuuca

SEQ ID NO: 1960375 - RNA, 17 nt, Human
gauucacauguuuucaa

SEQ ID NO: 1960376 - RNA, 18 nt, Human
gauucacauguuuucaaa

SEQ ID NO: 1960377 - RNA, 19 nt, Human
gauucacauguuuucaaau

SEQ ID NO: 1960378 - RNA, 20 nt, Human
gauucacauguuuucaaaug

SEQ ID NO: 1960379 - RNA, 22 nt, Human
gauucacauguuuucaaaugga

SEQ ID NO: 1960380 - RNA, 17 nt, Human
gauugaagaaacagcua

SEQ ID NO: 1960381 - RNA, 17 nt, Human
gauugaaaauaaugcug

SEQ ID NO: 1960382 - RNA, 20 nt, Human
gauucuauguuaauauuuua

SEQ ID NO: 1960383 - RNA, 13 nt, Human
gauucuaggaccu

SEQ ID NO: 1960384 - RNA, 17 nt, Human
gauucuauguuaauauu

SEQ ID NO: 1960385 - RNA, 23 nt, Human
gauugacgggacuguugguauug

SEQ ID NO: 1960386 - RNA, 18 nt, Human
gauugcuuuuaaaauuuu

SEQ ID NO: 1960387 - RNA, 18 nt, Human
gauugcuugagcucagga

SEQ ID NO: 1960388 - RNA, 13 nt, Human
gauugcuuuuaaa

SEQ ID NO: 1960389 - RNA, 14 nt, Human
gauugcuuuuaaaa

SEQ ID NO: 1960390 - RNA, 16 nt, Human
gauugcuuuuaaaauu

SEQ ID NO: 1960391 - RNA, 15 nt, Human
gauuguccccgaccc

SEQ ID NO: 1960392 - RNA, 23 nt, Human
gauuguaauauguaaaugguaug

SEQ ID NO: 1960393 - RNA, 19 nt, Human
gauuggauuuuauguugac

SEQ ID NO: 1960394 - RNA, 20 nt, Human
gauuguccccgacccuugcc

SEQ ID NO: 1960395 - RNA, 20 nt, Human
gauugucaaugcuggagaaa

SEQ ID NO: 1960396 - RNA, 21 nt, Human
gauugucaaugcuggagaaaa

SEQ ID NO: 1960397 - RNA, 13 nt, Human
gauugugccccug

SEQ ID NO: 1960398 - RNA, 18 nt, Human
gauugugccuaauguguu

SEQ ID NO: 1960399 - RNA, 11 nt, Human
gauccuccagg

SEQ ID NO: 1960400 - RNA, 18 nt, Human
gauccuaguuccaccauc

SEQ ID NO: 1960401 - RNA, 15 nt, Human
gaucacgccacugca

SEQ ID NO: 1960402 - RNA, 23 nt, Human
gaucaaccccuucgcuccugugu

SEQ ID NO: 1960403 - RNA, 13 nt, Human
gaucacgccacug

SEQ ID NO: 1960404 - RNA, 14 nt, Human
gaucacgccacugc

SEQ ID NO: 1960405 - RNA, 19 nt, Human
gauccugagccagauuuca

SEQ ID NO: 1960406 - RNA, 15 nt, Human
gauccugagccagau

SEQ ID NO: 1960407 - RNA, 14 nt, Human
gauccugagccaga

SEQ ID NO: 1960408 - RNA, 13 nt, Human
gauccugagccag

SEQ ID NO: 1960409 - RNA, 12 nt, Human
gauccuccaggu

SEQ ID NO: 1960410 - RNA, 19 nt, Human
gauccucccaccucagccu

SEQ ID NO: 1960411 - RNA, 20 nt, Human
gauccucccaccucagccuc

SEQ ID NO: 1960412 - RNA, 21 nt, Human
gauccucccaccucagccucc

SEQ ID NO: 1960413 - RNA, 15 nt, Human
gauccuuuuggaguc

SEQ ID NO: 1960414 - RNA, 17 nt, Human
gauccuuuuggagucag

SEQ ID NO: 1960415 - RNA, 18 nt, Human
gauccucccaccucagcc

SEQ ID NO: 1960416 - RNA, 20 nt, Human
gauccuuguguuuaucagaa

SEQ ID NO: 1960417 - RNA, 15 nt, Human
gaugaaaaaauaaca

SEQ ID NO: 1960418 - RNA, 17 nt, Human
gaugaaaagcuuuguuu

SEQ ID NO: 1960419 - RNA, 16 nt, Human
gaucuuugcagacagg

SEQ ID NO: 1960420 - RNA, 20 nt, Human
gaugcauggagauagcccca

SEQ ID NO: 1960421 - RNA, 15 nt, Human
gaugcauuaaaagaa

SEQ ID NO: 1960422 - RNA, 16 nt, Human
gaugcauuaaaagaaa

SEQ ID NO: 1960423 - RNA, 17 nt, Human
gaugcauuaaaagaaaa

SEQ ID NO: 1960424 - RNA, 13 nt, Human
gaugcauggagau

SEQ ID NO: 1960425 - RNA, 17 nt, Human
gaugcaauguagagggg

SEQ ID NO: 1960426 - RNA, 18 nt, Human
gaugcaauccuuacaaau

SEQ ID NO: 1960427 - RNA, 19 nt, Human
gaugcaauccuuacaaaug

SEQ ID NO: 1960428 - RNA, 20 nt, Human
gaugcaauccuuacaaauga

SEQ ID NO: 1960429 - RNA, 14 nt, Human
gaugacuauggaaa

SEQ ID NO: 1960430 - RNA, 21 nt, Human
gaugacguacaaguaguucug

SEQ ID NO: 1960431 - RNA, 11 nt, Human
gaugagaaagg

SEQ ID NO: 1960432 - RNA, 22 nt, Human
gaugagaaagguugaagcacca

SEQ ID NO: 1960433 - RNA, 22 nt, Human
gaugggcaacccccagccugcu

SEQ ID NO: 1960434 - RNA, 22 nt, Human
gauggcacagggcaugaaauga

SEQ ID NO: 1960435 - RNA, 14 nt, Human
gaugcucacagggc

SEQ ID NO: 1960436 - RNA, 21 nt, Human
gaugccuggcgggguggggug

SEQ ID NO: 1960437 - RNA, 18 nt, Human
gaugccgagguaaaaguu

SEQ ID NO: 1960438 - RNA, 18 nt, Human
gaugcauuaaaagaaaau

SEQ ID NO: 1960439 - RNA, 18 nt, Human
gaggugggauccuccagg

SEQ ID NO: 1960440 - RNA, 20 nt, Human
gaggucccaagguucugggu

SEQ ID NO: 1960441 - RNA, 22 nt, Human
gaggugggauccuccaggugca

SEQ ID NO: 1960442 - RNA, 21 nt, Human
gaggugggauccuccaggugc

SEQ ID NO: 1960443 - RNA, 15 nt, Human
gaggggggagguggg

SEQ ID NO: 1960444 - RNA, 15 nt, Human
gaggggguggccucc

SEQ ID NO: 1960445 - RNA, 18 nt, Human
gagguccacaacacacag

SEQ ID NO: 1960446 - RNA, 22 nt, Human
gaggggggaggugggauccucc

SEQ ID NO: 1960447 - RNA, 19 nt, Human
gaguacuacaguccuccca

SEQ ID NO: 1960448 - RNA, 18 nt, Human
gaguacuacaguccuccc

SEQ ID NO: 1960449 - RNA, 17 nt, Human
gaguacguugugcauuu

SEQ ID NO: 1960450 - RNA, 18 nt, Human
gaguacguugugcauuug

SEQ ID NO: 1960451 - RNA, 15 nt, Human
gaguacuacaguccu

SEQ ID NO: 1960452 - RNA, 20 nt, Human
gaguacguugugcauuuggu

SEQ ID NO: 1960453 - RNA, 22 nt, Human
gagguuuguuuagaagaagugu

SEQ ID NO: 1960454 - RNA, 14 nt, Human
gagguucccuuuga

SEQ ID NO: 1960455 - RNA, 19 nt, Human
gagguucaaagauauuuug

SEQ ID NO: 1960456 - RNA, 21 nt, Human
gagguuacagguaccaguucu

SEQ ID NO: 1960457 - RNA, 19 nt, Human
gagguuuuaaaaaaauccc

SEQ ID NO: 1960458 - RNA, 15 nt, Human
gagguuuucuccccc

SEQ ID NO: 1960459 - RNA, 16 nt, Human
gagguuuucuccccca

SEQ ID NO: 1960460 - RNA, 16 nt, Human
gaguaaaaagaaaaca

SEQ ID NO: 1960461 - RNA, 16 nt, Human
gaguacguugugcauu

SEQ ID NO: 1960462 - RNA, 21 nt, Human
gagucugaaggcuggguucug

SEQ ID NO: 1960463 - RNA, 18 nt, Human
gagucucuucuccacugg

SEQ ID NO: 1960464 - RNA, 14 nt, Human
gagucucuucucca

SEQ ID NO: 1960465 - RNA, 15 nt, Human
gagucucuucuccac

SEQ ID NO: 1960466 - RNA, 16 nt, Human
gagucucuucuccacu

SEQ ID NO: 1960467 - RNA, 17 nt, Human
gagucucuucuccacug

SEQ ID NO: 1960468 - RNA, 22 nt, Human
gagucucacuguugcccaggcu

SEQ ID NO: 1960469 - RNA, 23 nt, Human
gagucucacuguugcccaggcug

SEQ ID NO: 1960470 - RNA, 23 nt, Human
gagucucgcuauugucaccaggg

SEQ ID NO: 1960471 - RNA, 12 nt, Human
gagucucuucuc

SEQ ID NO: 1960472 - RNA, 21 nt, Human
gagucucgcucuguugcccag

SEQ ID NO: 1960473 - RNA, 19 nt, Human
gagucucacuguugcccag

SEQ ID NO: 1960474 - RNA, 20 nt, Human
gagucucacuguugcccagg

SEQ ID NO: 1960475 - RNA, 21 nt, Human
gagucucacuguugcccaggc

SEQ ID NO: 1960476 - RNA, 17 nt, Human
gagucgaggacagggag

SEQ ID NO: 1960477 - RNA, 12 nt, Human
gaguccccuguu

SEQ ID NO: 1960478 - RNA, 22 nt, Human
gaguccccccacucccagcauc

SEQ ID NO: 1960479 - RNA, 18 nt, Human
gagucccaggcugagccu

SEQ ID NO: 1960480 - RNA, 19 nt, Human
gagucccaggcugagccuc

SEQ ID NO: 1960481 - RNA, 14 nt, Human
gagucccugccauc

SEQ ID NO: 1960482 - RNA, 23 nt, Human
gaguccccuguuuguuucugaaa

SEQ ID NO: 1960483 - RNA, 14 nt, Human
gaguccccuguuug

SEQ ID NO: 1960484 - RNA, 13 nt, Human
gaguauuuuugua

SEQ ID NO: 1960485 - RNA, 12 nt, Human
gaguagcuggga

SEQ ID NO: 1960486 - RNA, 14 nt, Human
gaguagcugggacu

SEQ ID NO: 1960487 - RNA, 19 nt, Human
gauagcacagacccugccc

SEQ ID NO: 1960488 - RNA, 12 nt, Human
gauagccaaggc

SEQ ID NO: 1960489 - RNA, 21 nt, Human
gauagaguaaaaagaaaacaa

SEQ ID NO: 1960490 - RNA, 16 nt, Human
gauagcauaugacaaa

SEQ ID NO: 1960491 - RNA, 15 nt, Human
gauagcauuguaagc

SEQ ID NO: 1960492 - RNA, 13 nt, Human
gauagccaaggcc

SEQ ID NO: 1960493 - RNA, 21 nt, Human
gauauaaguguguguuuuuca

SEQ ID NO: 1960494 - RNA, 17 nt, Human
gauauaaguguguguuu

SEQ ID NO: 1960495 - RNA, 13 nt, Human
gauauacuuguuu

SEQ ID NO: 1960496 - RNA, 15 nt, Human
gauauacuuguuuuu

SEQ ID NO: 1960497 - RNA, 17 nt, Human
gauauacuuguuuuugu

SEQ ID NO: 1960498 - RNA, 22 nt, Human
gauauacuuguuuuuguaaaga

SEQ ID NO: 1960499 - RNA, 23 nt, Human
gauauaugcucugcauguuacau

SEQ ID NO: 1960500 - RNA, 14 nt, Human
gauauagagucauu

SEQ ID NO: 1960501 - RNA, 19 nt, Human
gauauauguuuuugaaggc

SEQ ID NO: 1960502 - RNA, 23 nt, Human
gauauauuuaaaaacaaaaggca

SEQ ID NO: 1960503 - RNA, 20 nt, Human
gauauauuuuauuuuuagaa

SEQ ID NO: 1960504 - RNA, 21 nt, Human
gaucaaccccuucgcuccugu

SEQ ID NO: 1960505 - RNA, 22 nt, Human
gaucaaccccuucgcuccugug

SEQ ID NO: 1960506 - RNA, 16 nt, Human
gauaaaaaaacagcuu

SEQ ID NO: 1960507 - RNA, 21 nt, Human
gaguuuugggaaguuaaaggg

SEQ ID NO: 1960508 - RNA, 14 nt, Human
gauaauuaaccaag

SEQ ID NO: 1960509 - RNA, 17 nt, Human
gauacaaaagcauguga

SEQ ID NO: 1960510 - RNA, 13 nt, Human
gauacaaugcugu

SEQ ID NO: 1960511 - RNA, 18 nt, Human
gauacaaugcugugcccu

SEQ ID NO: 1960512 - RNA, 18 nt, Human
gauagcacagacccugcc

SEQ ID NO: 1960513 - RNA, 17 nt, Human
gauagcacagacccugc

SEQ ID NO: 1960514 - RNA, 15 nt, Human
gauagaguaaaaaga

SEQ ID NO: 1960515 - RNA, 20 nt, Human
gauagaguaaaaagaaaaca

SEQ ID NO: 1960516 - RNA, 21 nt, Human
gaguggccccaccuggcccuc

SEQ ID NO: 1960517 - RNA, 15 nt, Human
gaguggcuccucccg

SEQ ID NO: 1960518 - RNA, 13 nt, Human
gaguggcuccucc

SEQ ID NO: 1960519 - RNA, 23 nt, Human
gagugggggaucacagccucuga

SEQ ID NO: 1960520 - RNA, 12 nt, Human
gagugggcccaa

SEQ ID NO: 1960521 - RNA, 19 nt, Human
gagugaacaaauuuacaga

SEQ ID NO: 1960522 - RNA, 23 nt, Human
gagucugaggccguugcugacuu

SEQ ID NO: 1960523 - RNA, 20 nt, Human
gagucugagggcuuguaguu

SEQ ID NO: 1960524 - RNA, 12 nt, Human
gagucugaggcc

SEQ ID NO: 1960525 - RNA, 19 nt, Human
gagucugaggccguugcug

SEQ ID NO: 1960526 - RNA, 13 nt, Human
gaguggccccacc

SEQ ID NO: 1960527 - RNA, 17 nt, Human
gaguggccccaccuggc

SEQ ID NO: 1960528 - RNA, 19 nt, Human
gaguggccccaccuggccc

SEQ ID NO: 1960529 - RNA, 20 nt, Human
gaguggccccaccuggcccu

SEQ ID NO: 1960530 - RNA, 22 nt, Human
gagugaacaaauuuacagagac

SEQ ID NO: 1960531 - RNA, 23 nt, Human
gagugaacaaauuuacagagaca

SEQ ID NO: 1960532 - RNA, 15 nt, Human
gaguucauucauauu

SEQ ID NO: 1960533 - RNA, 23 nt, Human
gaguucaucuugaauuguaagga

SEQ ID NO: 1960534 - RNA, 11 nt, Human
gaguuaggaac

SEQ ID NO: 1960535 - RNA, 17 nt, Human
gagugugccugaagucc

SEQ ID NO: 1960536 - RNA, 14 nt, Human
gaguugaagacaga

SEQ ID NO: 1960537 - RNA, 12 nt, Human
gaguuuguuucu

SEQ ID NO: 1960538 - RNA, 14 nt, Human
gaguuuguuucuuu

SEQ ID NO: 1960539 - RNA, 18 nt, Human
gaguuuguuucuuugaau

SEQ ID NO: 1960540 - RNA, 21 nt, Human
gaguugaaaaucuuauaauuu

SEQ ID NO: 1960541 - RNA, 13 nt, Human
gaguuccuagcca

SEQ ID NO: 1960542 - RNA, 17 nt, Human
gaguuccuaccauggag

SEQ ID NO: 1960543 - RNA, 16 nt, Human
gaguucauucauauua

SEQ ID NO: 1960544 - RNA, 18 nt, Human
gaguucauucauauuaca

SEQ ID NO: 1960545 - RNA, 11 nt, Human
gagcccacgcc

SEQ ID NO: 1960546 - RNA, 22 nt, Human
gagccacugcaccgggccacag

SEQ ID NO: 1960547 - RNA, 12 nt, Human
gagcccaggccu

SEQ ID NO: 1960548 - RNA, 16 nt, Human
gagcccacgcccccac

SEQ ID NO: 1960549 - RNA, 15 nt, Human
gagcccacgccccca

SEQ ID NO: 1960550 - RNA, 12 nt, Human
gagcccacgccc

SEQ ID NO: 1960551 - RNA, 14 nt, Human
gagcccaggccucc

SEQ ID NO: 1960552 - RNA, 13 nt, Human
gagcccaggccuc

SEQ ID NO: 1960553 - RNA, 18 nt, Human
gagcagccacauuccuga

SEQ ID NO: 1960554 - RNA, 22 nt, Human
gagcagaugaggugaaaaggcc

SEQ ID NO: 1960555 - RNA, 21 nt, Human
gagcagcaaggucuugcucuc

SEQ ID NO: 1960556 - RNA, 17 nt, Human
gagcagcacccauccac

SEQ ID NO: 1960557 - RNA, 14 nt, Human
gagcagaaauucug

SEQ ID NO: 1960558 - RNA, 17 nt, Human
gagcagaaauucuguuu

SEQ ID NO: 1960559 - RNA, 20 nt, Human
gagcagacacccuuggagcu

SEQ ID NO: 1960560 - RNA, 14 nt, Human
gagccaccgugccu

SEQ ID NO: 1960561 - RNA, 20 nt, Human
gagccaccgugccuggccac

SEQ ID NO: 1960562 - RNA, 16 nt, Human
gagaucagccugggca

SEQ ID NO: 1960563 - RNA, 14 nt, Human
gagaucagccuggg

SEQ ID NO: 1960564 - RNA, 13 nt, Human
gagaucagccugg

SEQ ID NO: 1960565 - RNA, 18 nt, Human
gagauccuuguguuuauc

SEQ ID NO: 1960566 - RNA, 15 nt, Human
gagaucuaaaaauaa

SEQ ID NO: 1960567 - RNA, 20 nt, Human
gagaucaaccccuucgcucc

SEQ ID NO: 1960568 - RNA, 19 nt, Human
gagcaaaaucgaugcagug

SEQ ID NO: 1960569 - RNA, 18 nt, Human
gagcaaaaugcauguaau

SEQ ID NO: 1960570 - RNA, 20 nt, Human
gagcaaaaugcauguaauca

SEQ ID NO: 1960571 - RNA, 23 nt, Human
gagcaagacgcugugcugcccug

SEQ ID NO: 1960572 - RNA, 22 nt, Human
gagcaagacgcugugcugcccu

SEQ ID NO: 1960573 - RNA, 18 nt, Human
gagcaagacgcugugcug

SEQ ID NO: 1960574 - RNA, 21 nt, Human
gagcaagacgcugugcugccc

SEQ ID NO: 1960575 - RNA, 17 nt, Human
gagcaccuuagacaguc

SEQ ID NO: 1960576 - RNA, 19 nt, Human
gagcaccuuagacaguccc

SEQ ID NO: 1960577 - RNA, 23 nt, Human
gagcuacacaggggaaaagagga

SEQ ID NO: 1960578 - RNA, 17 nt, Human
gagcguucaccagugac

SEQ ID NO: 1960579 - RNA, 14 nt, Human
gagcuacaaaugca

SEQ ID NO: 1960580 - RNA, 17 nt, Human
gagcuccccccaggucu

SEQ ID NO: 1960581 - RNA, 11 nt, Human
gagcugccagu

SEQ ID NO: 1960582 - RNA, 21 nt, Human
gagcugccaguggggccugag

SEQ ID NO: 1960583 - RNA, 16 nt, Human
gagcugccaccugccu

SEQ ID NO: 1960584 - RNA, 15 nt, Human
gagcugccaccugcc

SEQ ID NO: 1960585 - RNA, 13 nt, Human
gagcugccaccug

SEQ ID NO: 1960586 - RNA, 16 nt, Human
gagcugcaccagguag

SEQ ID NO: 1960587 - RNA, 16 nt, Human
gagcucugcagagcag

SEQ ID NO: 1960588 - RNA, 14 nt, Human
gagcuucuggcacu

SEQ ID NO: 1960589 - RNA, 18 nt, Human
gagcuucuguugcugccu

SEQ ID NO: 1960590 - RNA, 12 nt, Human
gagcuuagaaac

SEQ ID NO: 1960591 - RNA, 15 nt, Human
gagcuuaacagugug

SEQ ID NO: 1960592 - RNA, 14 nt, Human
gagccuccugcccu

SEQ ID NO: 1960593 - RNA, 20 nt, Human
gagccucagcauccuggcac

SEQ ID NO: 1960594 - RNA, 21 nt, Human
gagccucagcauccuggcacc

SEQ ID NO: 1960595 - RNA, 15 nt, Human
gagcccugguggcag

SEQ ID NO: 1960596 - RNA, 16 nt, Human
gagcccugguggcagu

SEQ ID NO: 1960597 - RNA, 19 nt, Human
gagccucagcauccuggca

SEQ ID NO: 1960598 - RNA, 17 nt, Human
gagcccugguggcagug

SEQ ID NO: 1960599 - RNA, 15 nt, Human
gagccugcagagcug

SEQ ID NO: 1960600 - RNA, 12 nt, Human
gagccugcagag

SEQ ID NO: 1960601 - RNA, 22 nt, Human
gagccuccugcccuuaccugcc

SEQ ID NO: 1960602 - RNA, 20 nt, Human
gagccuccugcccuuaccug

SEQ ID NO: 1960603 - RNA, 12 nt, Human
gagcuacaaaug

SEQ ID NO: 1960604 - RNA, 13 nt, Human
gagcuacaaaugc

SEQ ID NO: 1960605 - RNA, 10 nt, Human
gagccuggca

SEQ ID NO: 1960606 - RNA, 15 nt, Human
gagccuggcaagaau

SEQ ID NO: 1960607 - RNA, 21 nt, Human
gagccugggaggucaaggcug

SEQ ID NO: 1960608 - RNA, 13 nt, Human
gagccugggaggu

SEQ ID NO: 1960609 - RNA, 15 nt, Human
gaggaugucugggcc

SEQ ID NO: 1960610 - RNA, 12 nt, Human
gaggauguucug

SEQ ID NO: 1960611 - RNA, 14 nt, Human
gaggauggcccagg

SEQ ID NO: 1960612 - RNA, 17 nt, Human
gaggauguucugggaca

SEQ ID NO: 1960613 - RNA, 20 nt, Human
gaggauguucugggacacag

SEQ ID NO: 1960614 - RNA, 16 nt, Human
gaggauugcuugagcu

SEQ ID NO: 1960615 - RNA, 14 nt, Human
gaggauuaguuuag

SEQ ID NO: 1960616 - RNA, 23 nt, Human
gaggaguuugggguaugggagag

SEQ ID NO: 1960617 - RNA, 13 nt, Human
gaggcagccccau

SEQ ID NO: 1960618 - RNA, 23 nt, Human
gaggcagccccauucugccugcc

SEQ ID NO: 1960619 - RNA, 22 nt, Human
gaggcagccccauucugccugc

SEQ ID NO: 1960620 - RNA, 12 nt, Human
gaggccagccuu

SEQ ID NO: 1960621 - RNA, 13 nt, Human
gaggccagccuug

SEQ ID NO: 1960622 - RNA, 22 nt, Human
gaggaaggaaacccagcucugg

SEQ ID NO: 1960623 - RNA, 21 nt, Human
gagcuucuguugcugccucau

SEQ ID NO: 1960624 - RNA, 20 nt, Human
gagcuuccaauuuuccuuca

SEQ ID NO: 1960625 - RNA, 19 nt, Human
gaggaaggaacagcaaugg

SEQ ID NO: 1960626 - RNA, 14 nt, Human
gaggaauccagacc

SEQ ID NO: 1960627 - RNA, 15 nt, Human
gaggaauccagaccc

SEQ ID NO: 1960628 - RNA, 18 nt, Human
gaggaauggacauuucua

SEQ ID NO: 1960629 - RNA, 18 nt, Human
gaggacaagagaaaaaag

SEQ ID NO: 1960630 - RNA, 13 nt, Human
gaggacacagaga

SEQ ID NO: 1960631 - RNA, 13 nt, Human
gaggacagggagg

SEQ ID NO: 1960632 - RNA, 13 nt, Human
gaggacacucccg

SEQ ID NO: 1960633 - RNA, 22 nt, Human
gaggacagggaggugaccccag

SEQ ID NO: 1960634 - RNA, 23 nt, Human
gaggacagggaggugaccccagg

SEQ ID NO: 1960635 - RNA, 13 nt, Human
gaggagcccugcc

SEQ ID NO: 1960636 - RNA, 15 nt, Human
gaggagcccugccuc

SEQ ID NO: 1960637 - RNA, 18 nt, Human
gaggagcccugccucucc

SEQ ID NO: 1960638 - RNA, 21 nt, Human
gaggaggccuugggcucugcu

SEQ ID NO: 1960639 - RNA, 22 nt, Human
gaggaggccuugggcucugcug

SEQ ID NO: 1960640 - RNA, 15 nt, Human
gaggcugggcucccu

SEQ ID NO: 1960641 - RNA, 21 nt, Human
gaggcugggacgcucugcugu

SEQ ID NO: 1960642 - RNA, 17 nt, Human
gaggcuuauauuugugu

SEQ ID NO: 1960643 - RNA, 18 nt, Human
gaggcugggacgcucugc

SEQ ID NO: 1960644 - RNA, 19 nt, Human
gaggcugggacgcucugcu

SEQ ID NO: 1960645 - RNA, 20 nt, Human
gaggcugggacgcucugcug

SEQ ID NO: 1960646 - RNA, 13 nt, Human
gaggcuaaaaugu

SEQ ID NO: 1960647 - RNA, 14 nt, Human
gaggcuaaaauguu

SEQ ID NO: 1960648 - RNA, 16 nt, Human
gaggcuaaaauguuuu

SEQ ID NO: 1960649 - RNA, 18 nt, Human
gaggcuaaaauguuuuca

SEQ ID NO: 1960650 - RNA, 14 nt, Human
gaggcugggcuccc

SEQ ID NO: 1960651 - RNA, 13 nt, Human
gaggcugggcucc

SEQ ID NO: 1960652 - RNA, 21 nt, Human
gaggcggagagugcugacugu

SEQ ID NO: 1960653 - RNA, 14 nt, Human
gaggccuucucuga

SEQ ID NO: 1960654 - RNA, 23 nt, Human
gaggcccuucucuccagccccug

SEQ ID NO: 1960655 - RNA, 14 nt, Human
gaggcccuucucuc

SEQ ID NO: 1960656 - RNA, 24 nt, Human
gaggcccuucucuccagccccugg

SEQ ID NO: 1960657 - RNA, 18 nt, Human
gaggcccugcccaaugag

SEQ ID NO: 1960658 - RNA, 13 nt, Human
gaggcccggccuc

SEQ ID NO: 1960659 - RNA, 16 nt, Human
gagggcacugguggcc

SEQ ID NO: 1960660 - RNA, 18 nt, Human
gagggcacugguggcccg

SEQ ID NO: 1960661 - RNA, 22 nt, Human
gaggggccucuuaugggcuggg

SEQ ID NO: 1960662 - RNA, 13 nt, Human
gaggggccuggca

SEQ ID NO: 1960663 - RNA, 14 nt, Human
gaggggccuggcag

SEQ ID NO: 1960664 - RNA, 18 nt, Human
gaggggccuggcagccgu

SEQ ID NO: 1960665 - RNA, 20 nt, Human
gaggggccuggcagccgugc

SEQ ID NO: 1960666 - RNA, 22 nt, Human
gagggcacagaaaauggaagac

SEQ ID NO: 1960667 - RNA, 14 nt, Human
gagggcacagaaaa

SEQ ID NO: 1960668 - RNA, 23 nt, Human
gagggcacagaaaauggaagaca

SEQ ID NO: 1960669 - RNA, 12 nt, Human
gagggcacuggu

SEQ ID NO: 1960670 - RNA, 14 nt, Human
gagggagguaagga

SEQ ID NO: 1960671 - RNA, 13 nt, Human
gagggagugacag

SEQ ID NO: 1960672 - RNA, 14 nt, Human
gagggagugacaga

SEQ ID NO: 1960673 - RNA, 16 nt, Human
gagggagggcuccaga

SEQ ID NO: 1960674 - RNA, 16 nt, Human
gagggagugacagagg

SEQ ID NO: 1960675 - RNA, 22 nt, Human
gagggaaagccuuaagcugcag

SEQ ID NO: 1960676 - RNA, 16 nt, Human
gagggacagucucacc

SEQ ID NO: 1960677 - RNA, 23 nt, Human
gagggacagucucaccauuuccc

SEQ ID NO: 1960678 - RNA, 15 nt, Human
gagggagggcuccag

SEQ ID NO: 1960679 - RNA, 15 nt, Human
gagggagggagggcu

SEQ ID NO: 1960680 - RNA, 14 nt, Human
gagggagggagggc

SEQ ID NO: 1960681 - RNA, 15 nt, Human
gagggaccucuccca

SEQ ID NO: 1960682 - RNA, 14 nt, Human
gagggaccucuccc

SEQ ID NO: 1960683 - RNA, 13 nt, Human
gagggaccucucc

SEQ ID NO: 1960684 - RNA, 18 nt, Human
gagggaccucucccaggg

SEQ ID NO: 1960685 - RNA, 17 nt, Human
gagggaccucucccagg

SEQ ID NO: 1960686 - RNA, 16 nt, Human
cucagauauuugcacc

SEQ ID NO: 1960687 - RNA, 20 nt, Human
cucagaucccacuuuugcca

SEQ ID NO: 1960688 - RNA, 22 nt, Human
cucagaucccacuuuugccaga

SEQ ID NO: 1960689 - RNA, 14 nt, Human
cucagagagggugg

SEQ ID NO: 1960690 - RNA, 13 nt, Human
cucagagugcaag

SEQ ID NO: 1960691 - RNA, 18 nt, Human
cucagagagggugggagu

SEQ ID NO: 1960692 - RNA, 21 nt, Human
cucacuguugcccaggcuggc

SEQ ID NO: 1960693 - RNA, 22 nt, Human
cucacuguugcccaggcuggcg

SEQ ID NO: 1960694 - RNA, 13 nt, Human
cucacugccuccc

SEQ ID NO: 1960695 - RNA, 22 nt, Human
cucacugccaugccagcuuauc

SEQ ID NO: 1960696 - RNA, 19 nt, Human
cucacugccaugccagcuu

SEQ ID NO: 1960697 - RNA, 20 nt, Human
cucacuguugcccaggcugg

SEQ ID NO: 1960698 - RNA, 13 nt, Human
cucagcaccacuc

SEQ ID NO: 1960699 - RNA, 14 nt, Human
cucagcaccacuca

SEQ ID NO: 1960700 - RNA, 16 nt, Human
cucagcaccacucaag

SEQ ID NO: 1960701 - RNA, 13 nt, Human
cucagcaaggcca

SEQ ID NO: 1960702 - RNA, 15 nt, Human
cucagcaaggccacc

SEQ ID NO: 1960703 - RNA, 16 nt, Human
cucagcaaggccaccu

SEQ ID NO: 1960704 - RNA, 17 nt, Human
cucagcaaggccaccuc

SEQ ID NO: 1960705 - RNA, 18 nt, Human
cucagcaaggccaccucu

SEQ ID NO: 1960706 - RNA, 21 nt, Human
cucagcaaggccaccucuucc

SEQ ID NO: 1960707 - RNA, 22 nt, Human
cucagcaaggccaccucuuccu

SEQ ID NO: 1960708 - RNA, 15 nt, Human
cucagaucuucugug

SEQ ID NO: 1960709 - RNA, 15 nt, Human
cucagauuguaauau

SEQ ID NO: 1960710 - RNA, 22 nt, Human
cucagauuguaauauguaaaug

SEQ ID NO: 1960711 - RNA, 16 nt, Human
cucagcauccuggcac

SEQ ID NO: 1960712 - RNA, 17 nt, Human
cucagcauccuggcacc

SEQ ID NO: 1960713 - RNA, 17 nt, Human
cucagcaccacucaaga

SEQ ID NO: 1960714 - RNA, 18 nt, Human
cucagcaccacucaagac

SEQ ID NO: 1960715 - RNA, 21 nt, Human
cucagcaccacucaagaccaa

SEQ ID NO: 1960716 - RNA, 22 nt, Human
cucagcaccacucaagaccaaa

SEQ ID NO: 1960717 - RNA, 13 nt, Human
cucacuccuugaa

SEQ ID NO: 1960718 - RNA, 16 nt, Human
cucacuccuaccuggu

SEQ ID NO: 1960719 - RNA, 17 nt, Human
cucacuccuaccuggua

SEQ ID NO: 1960720 - RNA, 19 nt, Human
cucacuccuaccugguaau

SEQ ID NO: 1960721 - RNA, 11 nt, Human
cucacucuguc

SEQ ID NO: 1960722 - RNA, 12 nt, Human
cucacucugucg

SEQ ID NO: 1960723 - RNA, 10 nt, Human
cucacucuca

SEQ ID NO: 1960724 - RNA, 12 nt, Human
cucacucucagg

SEQ ID NO: 1960725 - RNA, 13 nt, Human
cucacucucagga

SEQ ID NO: 1960726 - RNA, 14 nt, Human
cucacucucaggaa

SEQ ID NO: 1960727 - RNA, 21 nt, Human
cucacucucaggaaaugcuga

SEQ ID NO: 1960728 - RNA, 22 nt, Human
cucacucugucgcccagucugg

SEQ ID NO: 1960729 - RNA, 13 nt, Human
cucacucugucgc

SEQ ID NO: 1960730 - RNA, 21 nt, Human
cucacucugucgcccagucug

SEQ ID NO: 1960731 - RNA, 12 nt, Human
cucacugcagcc

SEQ ID NO: 1960732 - RNA, 13 nt, Human
cucacugcagccu

SEQ ID NO: 1960733 - RNA, 15 nt, Human
cucaccccagcccca

SEQ ID NO: 1960734 - RNA, 20 nt, Human
cucaccauuuccccagggca

SEQ ID NO: 1960735 - RNA, 21 nt, Human
cucaccauuuccccagggcac

SEQ ID NO: 1960736 - RNA, 16 nt, Human
cucaccauuuccccag

SEQ ID NO: 1960737 - RNA, 18 nt, Human
cucaccauuuccccaggg

SEQ ID NO: 1960738 - RNA, 19 nt, Human
cucaccauuuccccagggc

SEQ ID NO: 1960739 - RNA, 19 nt, Human
cucacuauguugcccaggc

SEQ ID NO: 1960740 - RNA, 20 nt, Human
cucacuauguugcccaggca

SEQ ID NO: 1960741 - RNA, 21 nt, Human
cucacuauguugcccaggcag

SEQ ID NO: 1960742 - RNA, 22 nt, Human
cucacuauguugcccaggcagg

SEQ ID NO: 1960743 - RNA, 23 nt, Human
cucacuauguugcccaggcaggu

SEQ ID NO: 1960744 - RNA, 20 nt, Human
cucacucagaaguccagagu

SEQ ID NO: 1960745 - RNA, 21 nt, Human
cucacucagaaguccagaguc

SEQ ID NO: 1960746 - RNA, 13 nt, Human
cucacuccuaccu

SEQ ID NO: 1960747 - RNA, 15 nt, Human
cucacuccuaccugg

SEQ ID NO: 1960748 - RNA, 18 nt, Human
cucacucagcaccacuca

SEQ ID NO: 1960749 - RNA, 13 nt, Human
cucacucagcacc

SEQ ID NO: 1960750 - RNA, 14 nt, Human
cucacucagcacca

SEQ ID NO: 1960751 - RNA, 15 nt, Human
cucacucagcaccac

SEQ ID NO: 1960752 - RNA, 16 nt, Human
cucacucagcaccacu

SEQ ID NO: 1960753 - RNA, 23 nt, Human
cuauuccccacccuccccuuccc

SEQ ID NO: 1960754 - RNA, 14 nt, Human
cuauuguagagcca

SEQ ID NO: 1960755 - RNA, 19 nt, Human
cuauugucaccagggcugg

SEQ ID NO: 1960756 - RNA, 17 nt, Human
cuauuaguguuauauga

SEQ ID NO: 1960757 - RNA, 22 nt, Human
cuauuuaugugauccuuuugga

SEQ ID NO: 1960758 - RNA, 15 nt, Human
cuauuuagacaugua

SEQ ID NO: 1960759 - RNA, 15 nt, Human
cuauuuagaugcaua

SEQ ID NO: 1960760 - RNA, 16 nt, Human
cucaaaugcucagacc

SEQ ID NO: 1960761 - RNA, 15 nt, Human
cucaaaucugaggga

SEQ ID NO: 1960762 - RNA, 15 nt, Human
cucaaaucuuaagaa

SEQ ID NO: 1960763 - RNA, 16 nt, Human
cucaaaucuuaagaaa

SEQ ID NO: 1960764 - RNA, 23 nt, Human
cucaaauacgugggcauucaaau

SEQ ID NO: 1960765 - RNA, 13 nt, Human
cucaaauccagga

SEQ ID NO: 1960766 - RNA, 14 nt, Human
cucaaauccaggac

SEQ ID NO: 1960767 - RNA, 23 nt, Human
cucaaauccaggacccugccagg

SEQ ID NO: 1960768 - RNA, 15 nt, Human
cucaaauccaggacc

SEQ ID NO: 1960769 - RNA, 16 nt, Human
cucaaauccaggaccc

SEQ ID NO: 1960770 - RNA, 20 nt, Human
cucaaauccaggacccugcc

SEQ ID NO: 1960771 - RNA, 22 nt, Human
cucaaauccaggacccugccag

SEQ ID NO: 1960772 - RNA, 23 nt, Human
cuauuucaucagaacagcuguug

SEQ ID NO: 1960773 - RNA, 11 nt, Human
cuauuucagaa

SEQ ID NO: 1960774 - RNA, 12 nt, Human
cuauuucagaag

SEQ ID NO: 1960775 - RNA, 19 nt, Human
cuauuucagaaguuuaaau

SEQ ID NO: 1960776 - RNA, 16 nt, Human
cuauuucccccuuucu

SEQ ID NO: 1960777 - RNA, 18 nt, Human
cuauuucccccuuucuuc

SEQ ID NO: 1960778 - RNA, 19 nt, Human
cuauuucccccuuucuucc

SEQ ID NO: 1960779 - RNA, 21 nt, Human
cuauuucccccuuucuuccuc

SEQ ID NO: 1960780 - RNA, 22 nt, Human
cucaaaugcucagaccagcucu

SEQ ID NO: 1960781 - RNA, 14 nt, Human
cucaaauuuugagu

SEQ ID NO: 1960782 - RNA, 19 nt, Human
cucaaaugcucagaccagc

SEQ ID NO: 1960783 - RNA, 20 nt, Human
cucaaaugaugugccugcuu

SEQ ID NO: 1960784 - RNA, 20 nt, Human
cucaacaaggcaaaaacaaa

SEQ ID NO: 1960785 - RNA, 21 nt, Human
cucaacaccucugcacaagcu

SEQ ID NO: 1960786 - RNA, 13 nt, Human
cucaaccuccugg

SEQ ID NO: 1960787 - RNA, 15 nt, Human
cucaaccuccugggc

SEQ ID NO: 1960788 - RNA, 17 nt, Human
cucaaccuccugggcua

SEQ ID NO: 1960789 - RNA, 17 nt, Human
cucaccagccccagugc

SEQ ID NO: 1960790 - RNA, 18 nt, Human
cucaccagccccagugcc

SEQ ID NO: 1960791 - RNA, 13 nt, Human
cucaccagcugug

SEQ ID NO: 1960792 - RNA, 13 nt, Human
cucaccagcccca

SEQ ID NO: 1960793 - RNA, 16 nt, Human
cucaccagaauuauuu

SEQ ID NO: 1960794 - RNA, 14 nt, Human
cucaccagccccag

SEQ ID NO: 1960795 - RNA, 15 nt, Human
cucaccagccccagu

SEQ ID NO: 1960796 - RNA, 23 nt, Human
cucacaguccuuaccagcagagc

SEQ ID NO: 1960797 - RNA, 22 nt, Human
cucacaguccuuaccagcagag

SEQ ID NO: 1960798 - RNA, 19 nt, Human
cucacaguccuuaccagca

SEQ ID NO: 1960799 - RNA, 17 nt, Human
cucacaguccuuaccag

SEQ ID NO: 1960800 - RNA, 15 nt, Human
cucacauuuauucug

SEQ ID NO: 1960801 - RNA, 19 nt, Human
cucacauuuauucugcuca

SEQ ID NO: 1960802 - RNA, 22 nt, Human
cucacauuuauucugcucacau

SEQ ID NO: 1960803 - RNA, 14 nt, Human
cucacauuuuuaua

SEQ ID NO: 1960804 - RNA, 22 nt, Human
cucacagcuaugcaaaaagcua

SEQ ID NO: 1960805 - RNA, 15 nt, Human
cucacagcuaugcaa

SEQ ID NO: 1960806 - RNA, 16 nt, Human
cucacagcuaugcaaa

SEQ ID NO: 1960807 - RNA, 12 nt, Human
cucacagccagc

SEQ ID NO: 1960808 - RNA, 15 nt, Human
cucacaguccuuacc

SEQ ID NO: 1960809 - RNA, 24 nt, Human
cucacacaugagcaucaggccagg

SEQ ID NO: 1960810 - RNA, 22 nt, Human
cucacacaugagcaucaggcca

SEQ ID NO: 1960811 - RNA, 17 nt, Human
cucaagugauucuccug

SEQ ID NO: 1960812 - RNA, 21 nt, Human
cucaaguccucuuuucugaga

SEQ ID NO: 1960813 - RNA, 21 nt, Human
cucaagaccaaauggaaacag

SEQ ID NO: 1960814 - RNA, 18 nt, Human
cucaagaccaaauggaaa

SEQ ID NO: 1960815 - RNA, 14 nt, Human
cuaggugacagagu

SEQ ID NO: 1960816 - RNA, 18 nt, Human
cuaggugacagagugaga

SEQ ID NO: 1960817 - RNA, 20 nt, Human
cuagguagcccccucuuccc

SEQ ID NO: 1960818 - RNA, 16 nt, Human
cuagguagagucugag

SEQ ID NO: 1960819 - RNA, 17 nt, Human
cuagguagagucugagg

SEQ ID NO: 1960820 - RNA, 19 nt, Human
cuagguagcccccucuucc

SEQ ID NO: 1960821 - RNA, 24 nt, Human
cuaggugacagagugagacucugu

SEQ ID NO: 1960822 - RNA, 12 nt, Human
cuaggucugaua

SEQ ID NO: 1960823 - RNA, 22 nt, Human
cuagguaaauuacaguuccuag

SEQ ID NO: 1960824 - RNA, 23 nt, Human
cgcccaguuggguggaugccugg

SEQ ID NO: 1960825 - RNA, 15 nt, Human
cgccaugcuccuggc

SEQ ID NO: 1960826 - RNA, 20 nt, Human
cgccaucccagccccaauga

SEQ ID NO: 1960827 - RNA, 22 nt, Human
cgcccaguuggguggaugccug

SEQ ID NO: 1960828 - RNA, 17 nt, Human
cgccaucccagccccaa

SEQ ID NO: 1960829 - RNA, 19 nt, Human
cgccagggaccccagaauc

SEQ ID NO: 1960830 - RNA, 16 nt, Human
cuaguaauauauuuaa

SEQ ID NO: 1960831 - RNA, 20 nt, Human
cuaguaauauauuuaaaggg

SEQ ID NO: 1960832 - RNA, 16 nt, Human
cuaguaauaaagacuc

SEQ ID NO: 1960833 - RNA, 12 nt, Human
cuaguaauauau

SEQ ID NO: 1960834 - RNA, 13 nt, Human
cuauagaaagugu

SEQ ID NO: 1960835 - RNA, 14 nt, Human
cuauagaaaguguu

SEQ ID NO: 1960836 - RNA, 15 nt, Human
cuauagaaaguguuc

SEQ ID NO: 1960837 - RNA, 16 nt, Human
cuauagaaaguguucu

SEQ ID NO: 1960838 - RNA, 17 nt, Human
cuauagaaaguguucug

SEQ ID NO: 1960839 - RNA, 19 nt, Human
cuauagaaaguguucuguu

SEQ ID NO: 1960840 - RNA, 20 nt, Human
cuauagaaaguguucuguua

SEQ ID NO: 1960841 - RNA, 22 nt, Human
cuauagaaaguguucuguuaca

SEQ ID NO: 1960842 - RNA, 20 nt, Human
cuauagcaucacuuaaaaca

SEQ ID NO: 1960843 - RNA, 15 nt, Human
cuauagcaucacuua

SEQ ID NO: 1960844 - RNA, 17 nt, Human
cuauagcaucacuuaaa

SEQ ID NO: 1960845 - RNA, 22 nt, Human
cuauaauuuaccugaagucuuu

SEQ ID NO: 1960846 - RNA, 14 nt, Human
cuauaauuuuacaa

SEQ ID NO: 1960847 - RNA, 14 nt, Human
cuauaauuuugaua

SEQ ID NO: 1960848 - RNA, 16 nt, Human
cuauaauuuugauagu

SEQ ID NO: 1960849 - RNA, 20 nt, Human
cuauaauuuugauaguggga

SEQ ID NO: 1960850 - RNA, 23 nt, Human
cuauaauuuugauagugggacca

SEQ ID NO: 1960851 - RNA, 21 nt, Human
cuauaauguaagcucuacuga

SEQ ID NO: 1960852 - RNA, 16 nt, Human
cuauaauguaagcucu

SEQ ID NO: 1960853 - RNA, 17 nt, Human
cuauaagccaaaauuaa

SEQ ID NO: 1960854 - RNA, 15 nt, Human
cuauaauaaagaagu

SEQ ID NO: 1960855 - RNA, 22 nt, Human
cuagugcugugaaaaaaaaaau

SEQ ID NO: 1960856 - RNA, 13 nt, Human
cuagugcugugaa

SEQ ID NO: 1960857 - RNA, 14 nt, Human
cuagugcugugaaa

SEQ ID NO: 1960858 - RNA, 17 nt, Human
cuagugcugugaaaaaa

SEQ ID NO: 1960859 - RNA, 17 nt, Human
cuauauuuuacauaaau

SEQ ID NO: 1960860 - RNA, 17 nt, Human
cuauagccuaggugaca

SEQ ID NO: 1960861 - RNA, 18 nt, Human
cuaugggacucaaugcac

SEQ ID NO: 1960862 - RNA, 22 nt, Human
cuaugggacucaaugcacugac

SEQ ID NO: 1960863 - RNA, 23 nt, Human
cuaugggacucaaugcacugaca

SEQ ID NO: 1960864 - RNA, 22 nt, Human
cuaugguguaaucaugaaggag

SEQ ID NO: 1960865 - RNA, 11 nt, Human
cuauggucuua

SEQ ID NO: 1960866 - RNA, 17 nt, Human
cuauggucuuauauuua

SEQ ID NO: 1960867 - RNA, 15 nt, Human
cuauuagagaagaga

SEQ ID NO: 1960868 - RNA, 18 nt, Human
cuauuacgaaguucaaga

SEQ ID NO: 1960869 - RNA, 14 nt, Human
cuauuaguguuaua

SEQ ID NO: 1960870 - RNA, 15 nt, Human
cuauuaguguuauau

SEQ ID NO: 1960871 - RNA, 16 nt, Human
cuauuaguguuauaug

SEQ ID NO: 1960872 - RNA, 21 nt, Human
cuauuagcuuacugauuaacu

SEQ ID NO: 1960873 - RNA, 22 nt, Human
cuauuacgaaguucaagaucaa

SEQ ID NO: 1960874 - RNA, 23 nt, Human
cuauuacgaaguucaagaucaaa

SEQ ID NO: 1960875 - RNA, 13 nt, Human
cuauggccugugg

SEQ ID NO: 1960876 - RNA, 14 nt, Human
cuauggccugugcg

SEQ ID NO: 1960877 - RNA, 21 nt, Human
cuauggacagcauugccagua

SEQ ID NO: 1960878 - RNA, 16 nt, Human
cuaucuguuuacagug

SEQ ID NO: 1960879 - RNA, 13 nt, Human
cuaugagggccuu

SEQ ID NO: 1960880 - RNA, 15 nt, Human
cuaugagggccuuga

SEQ ID NO: 1960881 - RNA, 17 nt, Human
cuaugagggccuugagu

SEQ ID NO: 1960882 - RNA, 20 nt, Human
cuaugcagagguccacaaca

SEQ ID NO: 1960883 - RNA, 15 nt, Human
cucauacccaccccc

SEQ ID NO: 1960884 - RNA, 14 nt, Human
cucauacucaccuc

SEQ ID NO: 1960885 - RNA, 22 nt, Human
cucauacucaccucaccccacu

SEQ ID NO: 1960886 - RNA, 21 nt, Human
cucauaguaugguggcugggu

SEQ ID NO: 1960887 - RNA, 20 nt, Human
cucauagcccucacccuggg

SEQ ID NO: 1960888 - RNA, 21 nt, Human
cucauagcccucacccugggg

SEQ ID NO: 1960889 - RNA, 13 nt, Human
cucauagcccuca

SEQ ID NO: 1960890 - RNA, 17 nt, Human
cucauagcccucacccu

SEQ ID NO: 1960891 - RNA, 21 nt, Human
cucauacccacccccacccaa

SEQ ID NO: 1960892 - RNA, 19 nt, Human
cucauacccacccccaccc

SEQ ID NO: 1960893 - RNA, 18 nt, Human
cucauacccacccccacc

SEQ ID NO: 1960894 - RNA, 16 nt, Human
cucauacccaccccca

SEQ ID NO: 1960895 - RNA, 20 nt, Human
cucaggugauccacccaccu

SEQ ID NO: 1960896 - RNA, 18 nt, Human
cucaggugauccacccac

SEQ ID NO: 1960897 - RNA, 19 nt, Human
cucaggugauccacccacc

SEQ ID NO: 1960898 - RNA, 22 nt, Human
cucaucaccaacgucugugcca

SEQ ID NO: 1960899 - RNA, 20 nt, Human
cucaucagaaacaauuucug

SEQ ID NO: 1960900 - RNA, 21 nt, Human
cucaucaccaacgucugugcc

SEQ ID NO: 1960901 - RNA, 20 nt, Human
cucauauccccuauuuaaca

SEQ ID NO: 1960902 - RNA, 23 nt, Human
cucauaguaugguggcuggguug

SEQ ID NO: 1960903 - RNA, 15 nt, Human
cucauccucauaccc

SEQ ID NO: 1960904 - RNA, 18 nt, Human
cucagggagcagggaagg

SEQ ID NO: 1960905 - RNA, 19 nt, Human
cucagggagcagggaaggc

SEQ ID NO: 1960906 - RNA, 21 nt, Human
cucagggagcagggaaggccu

SEQ ID NO: 1960907 - RNA, 22 nt, Human
cucagggagcagggaaggccug

SEQ ID NO: 1960908 - RNA, 23 nt, Human
cucagggagcagggaaggccuga

SEQ ID NO: 1960909 - RNA, 23 nt, Human
cucaggaguuugagaccaaccug

SEQ ID NO: 1960910 - RNA, 18 nt, Human
cucaggaguuugagacca

SEQ ID NO: 1960911 - RNA, 19 nt, Human
cucagcccacauagugaug

SEQ ID NO: 1960912 - RNA, 21 nt, Human
cucagcccacauagugauggu

SEQ ID NO: 1960913 - RNA, 18 nt, Human
cucagcauccuggcaccc

SEQ ID NO: 1960914 - RNA, 13 nt, Human
cucagggccuggc

SEQ ID NO: 1960915 - RNA, 15 nt, Human
cucagggccuggcuc

SEQ ID NO: 1960916 - RNA, 14 nt, Human
cucagggccuggcu

SEQ ID NO: 1960917 - RNA, 15 nt, Human
cucagggccuggucg

SEQ ID NO: 1960918 - RNA, 16 nt, Human
cucagggccuggcuca

SEQ ID NO: 1960919 - RNA, 20 nt, Human
cucaggugagaagcagagga

SEQ ID NO: 1960920 - RNA, 19 nt, Human
cucaggugagaagcagagg

SEQ ID NO: 1960921 - RNA, 16 nt, Human
cucaggugagaagcag

SEQ ID NO: 1960922 - RNA, 18 nt, Human
cucagggucccugguggc

SEQ ID NO: 1960923 - RNA, 17 nt, Human
cucagggucccuggugg

SEQ ID NO: 1960924 - RNA, 16 nt, Human
cucagggucccuggug

SEQ ID NO: 1960925 - RNA, 15 nt, Human
cucagggucccuggu

SEQ ID NO: 1960926 - RNA, 13 nt, Human
cuccaccugccag

SEQ ID NO: 1960927 - RNA, 12 nt, Human
cuccaccugcca

SEQ ID NO: 1960928 - RNA, 14 nt, Human
cuccaccugccagg

SEQ ID NO: 1960929 - RNA, 13 nt, Human
cuccaccugcucu

SEQ ID NO: 1960930 - RNA, 15 nt, Human
cuccagccccuggau

SEQ ID NO: 1960931 - RNA, 17 nt, Human
cuccagccccuggaugc

SEQ ID NO: 1960932 - RNA, 16 nt, Human
cuccagccccuggaug

SEQ ID NO: 1960933 - RNA, 20 nt, Human
cuccagccccuggaugcagc

SEQ ID NO: 1960934 - RNA, 12 nt, Human
cuccagccuggg

SEQ ID NO: 1960935 - RNA, 14 nt, Human
cuccagcucaccag

SEQ ID NO: 1960936 - RNA, 17 nt, Human
cuccaggagcagccaca

SEQ ID NO: 1960937 - RNA, 16 nt, Human
cuccaggagcagccac

SEQ ID NO: 1960938 - RNA, 15 nt, Human
cuccaggagcagcca

SEQ ID NO: 1960939 - RNA, 14 nt, Human
cuccaggagcagcc

SEQ ID NO: 1960940 - RNA, 13 nt, Human
cuccaggagcagc

SEQ ID NO: 1960941 - RNA, 11 nt, Human
cuccaggagca

SEQ ID NO: 1960942 - RNA, 23 nt, Human
cuccaggagcagccacauuccug

SEQ ID NO: 1960943 - RNA, 18 nt, Human
cuccaggagcagccacau

SEQ ID NO: 1960944 - RNA, 11 nt, Human
cuccaggcagc

SEQ ID NO: 1960945 - RNA, 12 nt, Human
cuccaggcagca

SEQ ID NO: 1960946 - RNA, 12 nt, Human
cuccauccugag

SEQ ID NO: 1960947 - RNA, 15 nt, Human
cuccacccugcucuc

SEQ ID NO: 1960948 - RNA, 23 nt, Human
cuccaccaagccuggucagccca

SEQ ID NO: 1960949 - RNA, 13 nt, Human
cuccacccugcuc

SEQ ID NO: 1960950 - RNA, 14 nt, Human
cuccacacacacaa

SEQ ID NO: 1960951 - RNA, 15 nt, Human
cuccacacacacaaa

SEQ ID NO: 1960952 - RNA, 21 nt, Human
cuccacacacacaaaaaaaga

SEQ ID NO: 1960953 - RNA, 13 nt, Human
cuccacacccgcg

SEQ ID NO: 1960954 - RNA, 19 nt, Human
cuccacacccgcgccccgc

SEQ ID NO: 1960955 - RNA, 23 nt, Human
cuccaauuuuuuaagugaaaaua

SEQ ID NO: 1960956 - RNA, 15 nt, Human
cuccaauuuuuuaag

SEQ ID NO: 1960957 - RNA, 21 nt, Human
cuccaaugcuguuaucccugc

SEQ ID NO: 1960958 - RNA, 22 nt, Human
cuccaaucccaccaacccucag

SEQ ID NO: 1960959 - RNA, 17 nt, Human
cucauguugaaacuuua

SEQ ID NO: 1960960 - RNA, 17 nt, Human
cucauuugucacacacu

SEQ ID NO: 1960961 - RNA, 19 nt, Human
cucauuacuuguugccuau

SEQ ID NO: 1960962 - RNA, 15 nt, Human
cuccaaaauaaaacu

SEQ ID NO: 1960963 - RNA, 16 nt, Human
cuccaaaauaaaacuu

SEQ ID NO: 1960964 - RNA, 18 nt, Human
cucauuugucacacacuu

SEQ ID NO: 1960965 - RNA, 12 nt, Human
cuccucaggacc

SEQ ID NO: 1960966 - RNA, 13 nt, Human
cuccucaggacca

SEQ ID NO: 1960967 - RNA, 15 nt, Human
cuccuccagagucag

SEQ ID NO: 1960968 - RNA, 13 nt, Human
cuccuccagaguc

SEQ ID NO: 1960969 - RNA, 15 nt, Human
cuccuccagccgcca

SEQ ID NO: 1960970 - RNA, 19 nt, Human
cuccuccuggacuccugca

SEQ ID NO: 1960971 - RNA, 14 nt, Human
cuccuccuggacuc

SEQ ID NO: 1960972 - RNA, 15 nt, Human
cuccuccuggacucc

SEQ ID NO: 1960973 - RNA, 12 nt, Human
cuccuccuagcc

SEQ ID NO: 1960974 - RNA, 22 nt, Human
cuccucccaggcgccccuuccc

SEQ ID NO: 1960975 - RNA, 23 nt, Human
cuccucccaggcgccccuucccc

SEQ ID NO: 1960976 - RNA, 17 nt, Human
cuccucccaggcgcccc

SEQ ID NO: 1960977 - RNA, 17 nt, Human
cuccucccacugcccac

SEQ ID NO: 1960978 - RNA, 18 nt, Human
cuccucccacugcccacu

SEQ ID NO: 1960979 - RNA, 12 nt, Human
cuccucccacug

SEQ ID NO: 1960980 - RNA, 13 nt, Human
cuccucccacugc

SEQ ID NO: 1960981 - RNA, 14 nt, Human
cuccucccacugcc

SEQ ID NO: 1960982 - RNA, 15 nt, Human
cuccucccacugccc

SEQ ID NO: 1960983 - RNA, 18 nt, Human
cuccucagaucuucugug

SEQ ID NO: 1960984 - RNA, 13 nt, Human
cuccuaugcuuua

SEQ ID NO: 1960985 - RNA, 18 nt, Human
cuccuaugcuuuagcuua

SEQ ID NO: 1960986 - RNA, 22 nt, Human
cuccuaucagaaguuucucagc

SEQ ID NO: 1960987 - RNA, 22 nt, Human
cuccgacuugugcacaggcaga

SEQ ID NO: 1960988 - RNA, 12 nt, Human
cucccuuucaac

SEQ ID NO: 1960989 - RNA, 19 nt, Human
cucccuuggggccuaugca

SEQ ID NO: 1960990 - RNA, 18 nt, Human
cuccccugugccagccca

SEQ ID NO: 1960991 - RNA, 23 nt, Human
cuccccugugccagcccagaggc

SEQ ID NO: 1960992 - RNA, 14 nt, Human
cuccccuuccauuu

SEQ ID NO: 1960993 - RNA, 16 nt, Human
cuccccuuccauuucu

SEQ ID NO: 1960994 - RNA, 12 nt, Human
cuccccuuccca

SEQ ID NO: 1960995 - RNA, 18 nt, Human
cuccccuucccagggcaa

SEQ ID NO: 1960996 - RNA, 12 nt, Human
cuccccuucccc

SEQ ID NO: 1960997 - RNA, 17 nt, Human
cuccccuuccccuuccu

SEQ ID NO: 1960998 - RNA, 19 nt, Human
cuccccuuccccuuccuuc

SEQ ID NO: 1960999 - RNA, 23 nt, Human
cuccccuuccccuuccuucuuug

SEQ ID NO: 1961000 - RNA, 14 nt, Human
cuccauccugaggc

SEQ ID NO: 1961001 - RNA, 13 nt, Human
cuccauccugagg

SEQ ID NO: 1961002 - RNA, 22 nt, Human
cuccccagcaagugagagcugg

SEQ ID NO: 1961003 - RNA, 23 nt, Human
cuccccagcaagugagagcuggg

SEQ ID NO: 1961004 - RNA, 12 nt, Human
cuccccuccucc

SEQ ID NO: 1961005 - RNA, 20 nt, Human
cuccccuccuccuggacucc

SEQ ID NO: 1961006 - RNA, 21 nt, Human
cuccccagcaagugagagcug

SEQ ID NO: 1961007 - RNA, 17 nt, Human
cucccugccccucccuu

SEQ ID NO: 1961008 - RNA, 18 nt, Human
cucccugccccucccuuc

SEQ ID NO: 1961009 - RNA, 20 nt, Human
cucccugccccucccuucaa

SEQ ID NO: 1961010 - RNA, 21 nt, Human
cucccugccccucccuucaac

SEQ ID NO: 1961011 - RNA, 12 nt, Human
cucccugccagu

SEQ ID NO: 1961012 - RNA, 22 nt, Human
cucccguguaggaaccugcaca

SEQ ID NO: 1961013 - RNA, 21 nt, Human
cucccguguaucuggacacug

SEQ ID NO: 1961014 - RNA, 17 nt, Human
cucccugccccccagcc

SEQ ID NO: 1961015 - RNA, 23 nt, Human
cucccugccccccagcccuccuu

SEQ ID NO: 1961016 - RNA, 13 nt, Human
cucccugccccuc

SEQ ID NO: 1961017 - RNA, 14 nt, Human
cucccugccccucc

SEQ ID NO: 1961018 - RNA, 19 nt, Human
cucccgaguagcugggacu

SEQ ID NO: 1961019 - RNA, 20 nt, Human
cucccgaguagcugggacua

SEQ ID NO: 1961020 - RNA, 17 nt, Human
cuccccuugccagcugc

SEQ ID NO: 1961021 - RNA, 13 nt, Human
cuccccuugccag

SEQ ID NO: 1961022 - RNA, 14 nt, Human
cuccccuugccagc

SEQ ID NO: 1961023 - RNA, 15 nt, Human
cuccccuugccagcu

SEQ ID NO: 1961024 - RNA, 16 nt, Human
cuccccuugccagcug

SEQ ID NO: 1961025 - RNA, 15 nt, Human
cucccggugcccaag

SEQ ID NO: 1961026 - RNA, 21 nt, Human
cucccggugcccaagaauaga

SEQ ID NO: 1961027 - RNA, 16 nt, Human
cucccgccuccaaccc

SEQ ID NO: 1961028 - RNA, 21 nt, Human
cucccgcccaaaccuuucccc

SEQ ID NO: 1961029 - RNA, 23 nt, Human
cucccgcccaaaccuuuccccca

SEQ ID NO: 1961030 - RNA, 14 nt, Human
cuccuucccuugcu

SEQ ID NO: 1961031 - RNA, 20 nt, Human
cuccuucccacucuucucau

SEQ ID NO: 1961032 - RNA, 15 nt, Human
cuccuucccacucuu

SEQ ID NO: 1961033 - RNA, 16 nt, Human
cuccuucccacucuuc

SEQ ID NO: 1961034 - RNA, 17 nt, Human
cuccuucccacucuucu

SEQ ID NO: 1961035 - RNA, 18 nt, Human
cuccuucccacucuucuc

SEQ ID NO: 1961036 - RNA, 19 nt, Human
cuccuucccacucuucuca

SEQ ID NO: 1961037 - RNA, 23 nt, Human
cuccuuauggguagggcucugac

SEQ ID NO: 1961038 - RNA, 22 nt, Human
cuccuucaacaaggcuugcugc

SEQ ID NO: 1961039 - RNA, 10 nt, Human
cuccuuccca

SEQ ID NO: 1961040 - RNA, 12 nt, Human
cuccuggacucc

SEQ ID NO: 1961041 - RNA, 17 nt, Human
cuccuuaucaaaggaca

SEQ ID NO: 1961042 - RNA, 22 nt, Human
cuccuuaucaaaggacaccauu

SEQ ID NO: 1961043 - RNA, 18 nt, Human
cuccuuaggguuuucucu

SEQ ID NO: 1961044 - RNA, 20 nt, Human
cuccuuaggguuuucucucu

SEQ ID NO: 1961045 - RNA, 14 nt, Human
cuccuggaaauauu

SEQ ID NO: 1961046 - RNA, 21 nt, Human
cuccugugugugcgccuacag

SEQ ID NO: 1961047 - RNA, 11 nt, Human
cuccuggacuc

SEQ ID NO: 1961048 - RNA, 23 nt, Human
cuccugugugugcgccuacagga

SEQ ID NO: 1961049 - RNA, 24 nt, Human
cuccugugugugcgccuacaggag

SEQ ID NO: 1961050 - RNA, 17 nt, Human
cuccugccucagccucc

SEQ ID NO: 1961051 - RNA, 16 nt, Human
cuccugccucagccuc

SEQ ID NO: 1961052 - RNA, 12 nt, Human
cuccugccucag

SEQ ID NO: 1961053 - RNA, 11 nt, Human
cuccugccuca

SEQ ID NO: 1961054 - RNA, 13 nt, Human
cuccucuccccag

SEQ ID NO: 1961055 - RNA, 15 nt, Human
cuccucuccccagca

SEQ ID NO: 1961056 - RNA, 22 nt, Human
cuccugccucgaacuggcugca

SEQ ID NO: 1961057 - RNA, 14 nt, Human
cuccugcucugcuc

SEQ ID NO: 1961058 - RNA, 15 nt, Human
cuccugcucugcucg

SEQ ID NO: 1961059 - RNA, 14 nt, Human
cuccugcugccagu

SEQ ID NO: 1961060 - RNA, 13 nt, Human
cuccugcugccag

SEQ ID NO: 1961061 - RNA, 12 nt, Human
cuccugcugcca

SEQ ID NO: 1961062 - RNA, 19 nt, Human
cuccugccucagccucccg

SEQ ID NO: 1961063 - RNA, 18 nt, Human
cuccugccucgaacuggc

SEQ ID NO: 1961064 - RNA, 20 nt, Human
cuccugccucgaacuggcug

SEQ ID NO: 1961065 - RNA, 21 nt, Human
cuccugccucgaacuggcugc

SEQ ID NO: 1961066 - RNA, 22 nt, Human
cucgagcaugccuggauggggc

SEQ ID NO: 1961067 - RNA, 18 nt, Human
cucgcaggccucccugcc

SEQ ID NO: 1961068 - RNA, 15 nt, Human
cucgccuucaucucc

SEQ ID NO: 1961069 - RNA, 18 nt, Human
cucgccucggaucagcug

SEQ ID NO: 1961070 - RNA, 23 nt, Human
cucgcucugucgcccaggcugga

SEQ ID NO: 1961071 - RNA, 16 nt, Human
cucgcucuguugccca

SEQ ID NO: 1961072 - RNA, 20 nt, Human
cucgcucuguugcccaggcu

SEQ ID NO: 1961073 - RNA, 17 nt, Human
cucgcuccaacuccaac

SEQ ID NO: 1961074 - RNA, 24 nt, Human
cucgcuccaacuccaacauccacu

SEQ ID NO: 1961075 - RNA, 22 nt, Human
cucgcuauugucaccagggcug

SEQ ID NO: 1961076 - RNA, 16 nt, Human
cucgcuccaacuccaa

SEQ ID NO: 1961077 - RNA, 13 nt, Human
cuccuuccugugu

SEQ ID NO: 1961078 - RNA, 17 nt, Human
cuccuucccuugcuacc

SEQ ID NO: 1961079 - RNA, 20 nt, Human
cuccuuccuaguucaucccu

SEQ ID NO: 1961080 - RNA, 15 nt, Human
cuccuuccugugugu

SEQ ID NO: 1961081 - RNA, 23 nt, Human
cuccuuggugucgggcaugacac

SEQ ID NO: 1961082 - RNA, 19 nt, Human
cucgagcaugccuggaugg

SEQ ID NO: 1961083 - RNA, 16 nt, Human
cucgagcaugccugga

SEQ ID NO: 1961084 - RNA, 15 nt, Human
cucgagcaugccugg

SEQ ID NO: 1961085 - RNA, 13 nt, Human
cucgagcaugccu

SEQ ID NO: 1961086 - RNA, 21 nt, Human
cugaccagccuccaugcugcc

SEQ ID NO: 1961087 - RNA, 23 nt, Human
cugaccagccuccaugcugccuc

SEQ ID NO: 1961088 - RNA, 16 nt, Human
cugaauuaugaaacuu

SEQ ID NO: 1961089 - RNA, 14 nt, Human
cugaauuucuuuug

SEQ ID NO: 1961090 - RNA, 16 nt, Human
cugacagacacaggcc

SEQ ID NO: 1961091 - RNA, 17 nt, Human
cugaccagccuccaugc

SEQ ID NO: 1961092 - RNA, 17 nt, Human
cugacagacacaggccc

SEQ ID NO: 1961093 - RNA, 18 nt, Human
cugacagacacaggcccg

SEQ ID NO: 1961094 - RNA, 17 nt, Human
cugacuguacuccuccc

SEQ ID NO: 1961095 - RNA, 14 nt, Human
cugacugggccagg

SEQ ID NO: 1961096 - RNA, 15 nt, Human
cugacugggccaggg

SEQ ID NO: 1961097 - RNA, 14 nt, Human
cugacugggggcag

SEQ ID NO: 1961098 - RNA, 15 nt, Human
cugacugggggcaga

SEQ ID NO: 1961099 - RNA, 17 nt, Human
cugacugggggcagaca

SEQ ID NO: 1961100 - RNA, 18 nt, Human
cugacugucacaacuccu

SEQ ID NO: 1961101 - RNA, 14 nt, Human
cugacuacagggcc

SEQ ID NO: 1961102 - RNA, 15 nt, Human
cugacuacagggccg

SEQ ID NO: 1961103 - RNA, 13 nt, Human
cugacugacauga

SEQ ID NO: 1961104 - RNA, 11 nt, Human
cugacugaggc

SEQ ID NO: 1961105 - RNA, 14 nt, Human
cugacugaggcagu

SEQ ID NO: 1961106 - RNA, 17 nt, Human
cugacugaggcaguuug

SEQ ID NO: 1961107 - RNA, 17 nt, Human
cugacucccccaguccc

SEQ ID NO: 1961108 - RNA, 22 nt, Human
cugagacagcccgggcucugcc

SEQ ID NO: 1961109 - RNA, 21 nt, Human
cugagacagcccgggcucugc

SEQ ID NO: 1961110 - RNA, 19 nt, Human
cugagacagcccgggcucu

SEQ ID NO: 1961111 - RNA, 20 nt, Human
cugagacagcccgggcucug

SEQ ID NO: 1961112 - RNA, 15 nt, Human
cugagcaaauguggc

SEQ ID NO: 1961113 - RNA, 17 nt, Human
cugagcaaauguggcuc

SEQ ID NO: 1961114 - RNA, 20 nt, Human
cugagcaaauguggcuccug

SEQ ID NO: 1961115 - RNA, 21 nt, Human
cugagcaaauguggcuccugg

SEQ ID NO: 1961116 - RNA, 23 nt, Human
cugagauuauaggcaccuaccac

SEQ ID NO: 1961117 - RNA, 12 nt, Human
cugagcaggugu

SEQ ID NO: 1961118 - RNA, 17 nt, Human
cugagcagugauauucu

SEQ ID NO: 1961119 - RNA, 22 nt, Human
cugagcagugauauucuuuguu

SEQ ID NO: 1961120 - RNA, 14 nt, Human
cugagccagauuuc

SEQ ID NO: 1961121 - RNA, 13 nt, Human
cugagccagauuu

SEQ ID NO: 1961122 - RNA, 10 nt, Human
cugagcccac

SEQ ID NO: 1961123 - RNA, 11 nt, Human
cugagcccacu

SEQ ID NO: 1961124 - RNA, 12 nt, Human
cugagcccacug

SEQ ID NO: 1961125 - RNA, 13 nt, Human
cugagcccacugu

SEQ ID NO: 1961126 - RNA, 20 nt, Human
cugaagucuuuguacagaca

SEQ ID NO: 1961127 - RNA, 17 nt, Human
cugaagucuuuguacag

SEQ ID NO: 1961128 - RNA, 22 nt, Human
cugaagucccagauacuugggg

SEQ ID NO: 1961129 - RNA, 14 nt, Human
cugaagucaguucu

SEQ ID NO: 1961130 - RNA, 14 nt, Human
cugaagucuguauu

SEQ ID NO: 1961131 - RNA, 19 nt, Human
cugaaguucugccucugau

SEQ ID NO: 1961132 - RNA, 20 nt, Human
cugaaguucugccucugaug

SEQ ID NO: 1961133 - RNA, 23 nt, Human
cugaaguucugccucugauguau

SEQ ID NO: 1961134 - RNA, 13 nt, Human
cugaaguuugaua

SEQ ID NO: 1961135 - RNA, 21 nt, Human
cugaaguuugauaaauagugu

SEQ ID NO: 1961136 - RNA, 22 nt, Human
cugaaguuugauaaauaguguu

SEQ ID NO: 1961137 - RNA, 17 nt, Human
cugaaguucagcugcau

SEQ ID NO: 1961138 - RNA, 14 nt, Human
cugaaguuauauuu

SEQ ID NO: 1961139 - RNA, 17 nt, Human
cugaaguuauauuuccu

SEQ ID NO: 1961140 - RNA, 20 nt, Human
cugaaguuauauuuccuaua

SEQ ID NO: 1961141 - RNA, 14 nt, Human
cugaaguuaugugu

SEQ ID NO: 1961142 - RNA, 21 nt, Human
cugaagucacacagugagucg

SEQ ID NO: 1961143 - RNA, 13 nt, Human
cugaagucacugc

SEQ ID NO: 1961144 - RNA, 14 nt, Human
cugaagucacugca

SEQ ID NO: 1961145 - RNA, 15 nt, Human
cugaagucacugcac

SEQ ID NO: 1961146 - RNA, 18 nt, Human
cugaagucacacagugag

SEQ ID NO: 1961147 - RNA, 19 nt, Human
cugaagucacacagugagu

SEQ ID NO: 1961148 - RNA, 17 nt, Human
cugaagucacacaguga

SEQ ID NO: 1961149 - RNA, 13 nt, Human
cugaauuaugaaa

SEQ ID NO: 1961150 - RNA, 14 nt, Human
cugaauuaugaaac

SEQ ID NO: 1961151 - RNA, 15 nt, Human
cugaauuaugaaacu

SEQ ID NO: 1961152 - RNA, 12 nt, Human
cugaauuucuuu

SEQ ID NO: 1961153 - RNA, 12 nt, Human
cugaauuauuuu

SEQ ID NO: 1961154 - RNA, 20 nt, Human
cugaaugguuuucaaaauaa

SEQ ID NO: 1961155 - RNA, 19 nt, Human
cugaaugguuuucaaaaua

SEQ ID NO: 1961156 - RNA, 23 nt, Human
cugaauggcuugcaguuguuccu

SEQ ID NO: 1961157 - RNA, 20 nt, Human
cugaaauaaacgucuuaaau

SEQ ID NO: 1961158 - RNA, 13 nt, Human
cugaaauaaaagc

SEQ ID NO: 1961159 - RNA, 15 nt, Human
cugaaauaaaagcua

SEQ ID NO: 1961160 - RNA, 11 nt, Human
cugaaaugugu

SEQ ID NO: 1961161 - RNA, 13 nt, Human
cugaaaugugugu

SEQ ID NO: 1961162 - RNA, 16 nt, Human
cugaaaugugugugau

SEQ ID NO: 1961163 - RNA, 17 nt, Human
cugaaaugugugugaug

SEQ ID NO: 1961164 - RNA, 18 nt, Human
cugaaaugugugugaugu

SEQ ID NO: 1961165 - RNA, 19 nt, Human
cugaaaugugugugaugug

SEQ ID NO: 1961166 - RNA, 20 nt, Human
cugaaaugugugugauguga

SEQ ID NO: 1961167 - RNA, 22 nt, Human
cugaaaugugugugaugugaca

SEQ ID NO: 1961168 - RNA, 16 nt, Human
cugaaauguguuuccu

SEQ ID NO: 1961169 - RNA, 16 nt, Human
cugaaccccucccucc

SEQ ID NO: 1961170 - RNA, 17 nt, Human
cugaaccacuuguagau

SEQ ID NO: 1961171 - RNA, 18 nt, Human
cugaaccacuuguagauu

SEQ ID NO: 1961172 - RNA, 22 nt, Human
cugaaccacuuguagauuugau

SEQ ID NO: 1961173 - RNA, 13 nt, Human
cugaacacauuuc

SEQ ID NO: 1961174 - RNA, 14 nt, Human
cugaacacauuucu

SEQ ID NO: 1961175 - RNA, 17 nt, Human
cugaacacauuucuuuu

SEQ ID NO: 1961176 - RNA, 22 nt, Human
cugaacacauuucuuuuuaaaa

SEQ ID NO: 1961177 - RNA, 12 nt, Human
cugaacauugga

SEQ ID NO: 1961178 - RNA, 14 nt, Human
cugaacauugcaua

SEQ ID NO: 1961179 - RNA, 14 nt, Human
cugaacauuggaga

SEQ ID NO: 1961180 - RNA, 14 nt, Human
cugaaccacuugua

SEQ ID NO: 1961181 - RNA, 15 nt, Human
cugaaccacuuguag

SEQ ID NO: 1961182 - RNA, 23 nt, Human
cucuuuggucuacacugugcuga

SEQ ID NO: 1961183 - RNA, 22 nt, Human
cucuuuggucuacacugugcug

SEQ ID NO: 1961184 - RNA, 16 nt, Human
cucuucuccaggcugu

SEQ ID NO: 1961185 - RNA, 18 nt, Human
cucuucucauuacuuguu

SEQ ID NO: 1961186 - RNA, 23 nt, Human
cugaaagugaaaguccagaaacu

SEQ ID NO: 1961187 - RNA, 12 nt, Human
cugaaagugaug

SEQ ID NO: 1961188 - RNA, 19 nt, Human
cugaaagugaaaguccaga

SEQ ID NO: 1961189 - RNA, 22 nt, Human
cucuuuuaucuccugaaaaaag

SEQ ID NO: 1961190 - RNA, 16 nt, Human
cucuuuuccaaacaca

SEQ ID NO: 1961191 - RNA, 20 nt, Human
cucuuuuccaaacacaggca

SEQ ID NO: 1961192 - RNA, 23 nt, Human
cugaaagggacgcuacccgggaa

SEQ ID NO: 1961193 - RNA, 14 nt, Human
cucuuuucaaaaca

SEQ ID NO: 1961194 - RNA, 16 nt, Human
cucuuuuagauauugu

SEQ ID NO: 1961195 - RNA, 17 nt, Human
cucuuuuaucuccugaa

SEQ ID NO: 1961196 - RNA, 12 nt, Human
cucugaggacaa

SEQ ID NO: 1961197 - RNA, 23 nt, Human
cucugagacucgcgacaaugcaa

SEQ ID NO: 1961198 - RNA, 16 nt, Human
cucugaggacacuaac

SEQ ID NO: 1961199 - RNA, 22 nt, Human
cucugaguagggcaauggaaau

SEQ ID NO: 1961200 - RNA, 12 nt, Human
cucugaggacac

SEQ ID NO: 1961201 - RNA, 14 nt, Human
cucugaggacacua

SEQ ID NO: 1961202 - RNA, 21 nt, Human
cucugagacucgcgacaaugc

SEQ ID NO: 1961203 - RNA, 14 nt, Human
cucugaauuuuaaa

SEQ ID NO: 1961204 - RNA, 13 nt, Human
cucugacaaagcu

SEQ ID NO: 1961205 - RNA, 15 nt, Human
cucugaccccugccu

SEQ ID NO: 1961206 - RNA, 14 nt, Human
cucugacacacagc

SEQ ID NO: 1961207 - RNA, 21 nt, Human
cucugacaacagacuucugaa

SEQ ID NO: 1961208 - RNA, 22 nt, Human
cucugacaacagacuucugaaa

SEQ ID NO: 1961209 - RNA, 15 nt, Human
cucugacacacagcu

SEQ ID NO: 1961210 - RNA, 16 nt, Human
cucugacacacagcuc

SEQ ID NO: 1961211 - RNA, 17 nt, Human
cucugacacacagcucu

SEQ ID NO: 1961212 - RNA, 18 nt, Human
cucugacacacagcucug

SEQ ID NO: 1961213 - RNA, 23 nt, Human
cucugacagaagaaccccagggu

SEQ ID NO: 1961214 - RNA, 19 nt, Human
cucugacacacagcucugu

SEQ ID NO: 1961215 - RNA, 19 nt, Human
cucugaaggguaauuauau

SEQ ID NO: 1961216 - RNA, 19 nt, Human
cucugaauaagcacuuuuu

SEQ ID NO: 1961217 - RNA, 15 nt, Human
cucugaauuuaucuu

SEQ ID NO: 1961218 - RNA, 22 nt, Human
cucugaauuuaucuuugauaac

SEQ ID NO: 1961219 - RNA, 16 nt, Human
cucugacaacagacuu

SEQ ID NO: 1961220 - RNA, 21 nt, Human
cucugaauaagcacuuuuuaa

SEQ ID NO: 1961221 - RNA, 22 nt, Human
cucugaaggacauugcggacag

SEQ ID NO: 1961222 - RNA, 14 nt, Human
cucugaaggaggcc

SEQ ID NO: 1961223 - RNA, 15 nt, Human
cucugaaggaggcca

SEQ ID NO: 1961224 - RNA, 16 nt, Human
cucugaaggaggccac

SEQ ID NO: 1961225 - RNA, 17 nt, Human
cucugaaggaggccacc

SEQ ID NO: 1961226 - RNA, 18 nt, Human
cucugaaggaggccaccu

SEQ ID NO: 1961227 - RNA, 19 nt, Human
cucugaaggaggccaccuc

SEQ ID NO: 1961228 - RNA, 20 nt, Human
cucugaaggaggccaccucc

SEQ ID NO: 1961229 - RNA, 21 nt, Human
cucugaaggaggccaccuccu

SEQ ID NO: 1961230 - RNA, 17 nt, Human
cucugccucccaucacc

SEQ ID NO: 1961231 - RNA, 16 nt, Human
cucugccucccaucac

SEQ ID NO: 1961232 - RNA, 14 nt, Human
cucugccucccauc

SEQ ID NO: 1961233 - RNA, 13 nt, Human
cucugccucccau

SEQ ID NO: 1961234 - RNA, 22 nt, Human
cucugcccuaaugcgcaggcug

SEQ ID NO: 1961235 - RNA, 20 nt, Human
cucugcccuaaugcgcaggc

SEQ ID NO: 1961236 - RNA, 17 nt, Human
cucugcccacucccugc

SEQ ID NO: 1961237 - RNA, 16 nt, Human
cucugcccacucccug

SEQ ID NO: 1961238 - RNA, 15 nt, Human
cucugcccacucccu

SEQ ID NO: 1961239 - RNA, 13 nt, Human
cucugcccacucc

SEQ ID NO: 1961240 - RNA, 20 nt, Human
cucugcccacucccugcaac

SEQ ID NO: 1961241 - RNA, 18 nt, Human
cucugcccacucccugca

SEQ ID NO: 1961242 - RNA, 15 nt, Human
cucugcacaagcugc

SEQ ID NO: 1961243 - RNA, 14 nt, Human
cucugcacaagcug

SEQ ID NO: 1961244 - RNA, 20 nt, Human
cucugcaggucccuaauaaa

SEQ ID NO: 1961245 - RNA, 19 nt, Human
cucugcaggucccuaauaa

SEQ ID NO: 1961246 - RNA, 13 nt, Human
cucugcacaagcu

SEQ ID NO: 1961247 - RNA, 23 nt, Human
cucugaguuccggcaccaguagc

SEQ ID NO: 1961248 - RNA, 15 nt, Human
cucugauacagaaaa

SEQ ID NO: 1961249 - RNA, 20 nt, Human
cucugaguuccggcaccagu

SEQ ID NO: 1961250 - RNA, 21 nt, Human
cucugaguuccggcaccagua

SEQ ID NO: 1961251 - RNA, 19 nt, Human
cucugaguuccggcaccag

SEQ ID NO: 1961252 - RNA, 18 nt, Human
cucugcaggucccuaaua

SEQ ID NO: 1961253 - RNA, 14 nt, Human
cucugauacuuuuu

SEQ ID NO: 1961254 - RNA, 16 nt, Human
cucugauacuuuuuug

SEQ ID NO: 1961255 - RNA, 22 nt, Human
cucugcaggucccuaauaaagc

SEQ ID NO: 1961256 - RNA, 21 nt, Human
cucugcaggucccuaauaaag

SEQ ID NO: 1961257 - RNA, 18 nt, Human
cucugucgcccagucugg

SEQ ID NO: 1961258 - RNA, 19 nt, Human
cucugucgcccagucugga

SEQ ID NO: 1961259 - RNA, 16 nt, Human
cucugucgagccuggg

SEQ ID NO: 1961260 - RNA, 17 nt, Human
cucugucgcccagucug

SEQ ID NO: 1961261 - RNA, 18 nt, Human
cucugucgcccaggcugg

SEQ ID NO: 1961262 - RNA, 22 nt, Human
cucugucgcccaggcuggagug

SEQ ID NO: 1961263 - RNA, 13 nt, Human
cucugucgcccag

SEQ ID NO: 1961264 - RNA, 15 nt, Human
cucugucgcccaggc

SEQ ID NO: 1961265 - RNA, 14 nt, Human
cucugggaacuucu

SEQ ID NO: 1961266 - RNA, 14 nt, Human
cucuguccugggag

SEQ ID NO: 1961267 - RNA, 13 nt, Human
cucuguccuggga

SEQ ID NO: 1961268 - RNA, 15 nt, Human
cucuguccugggagu

SEQ ID NO: 1961269 - RNA, 22 nt, Human
cucuguccugggagugagcugg

SEQ ID NO: 1961270 - RNA, 21 nt, Human
cucuggccuucggccuccauc

SEQ ID NO: 1961271 - RNA, 22 nt, Human
cucuggccuucggccuccaucc

SEQ ID NO: 1961272 - RNA, 23 nt, Human
cucuggcagcucagagagggugg

SEQ ID NO: 1961273 - RNA, 22 nt, Human
cucuggcagcaccgccucuucc

SEQ ID NO: 1961274 - RNA, 23 nt, Human
cucuggcagcaccgccucuuccc

SEQ ID NO: 1961275 - RNA, 15 nt, Human
cucuggauucagccu

SEQ ID NO: 1961276 - RNA, 16 nt, Human
cucuggauucagccuu

SEQ ID NO: 1961277 - RNA, 17 nt, Human
cucuggauucagccuuc

SEQ ID NO: 1961278 - RNA, 18 nt, Human
cucuggauucagccuucu

SEQ ID NO: 1961279 - RNA, 20 nt, Human
cucuggauucagccuucuuu

SEQ ID NO: 1961280 - RNA, 21 nt, Human
cucuggauucagccuucuuuu

SEQ ID NO: 1961281 - RNA, 13 nt, Human
cucuggcagcacc

SEQ ID NO: 1961282 - RNA, 14 nt, Human
cucuggcagcaccg

SEQ ID NO: 1961283 - RNA, 16 nt, Human
cucuggcagcaccgcc

SEQ ID NO: 1961284 - RNA, 20 nt, Human
cucuggauuauauuaugaag

SEQ ID NO: 1961285 - RNA, 19 nt, Human
cucuggauuauauuaugaa

SEQ ID NO: 1961286 - RNA, 10 nt, Human
cucugccuga

SEQ ID NO: 1961287 - RNA, 21 nt, Human
cucugccucccaucacccgcu

SEQ ID NO: 1961288 - RNA, 19 nt, Human
cucugccucugacacacag

SEQ ID NO: 1961289 - RNA, 20 nt, Human
cucugccucugacacacagc

SEQ ID NO: 1961290 - RNA, 15 nt, Human
cucuuccuggacagg

SEQ ID NO: 1961291 - RNA, 19 nt, Human
cucuuccuggacaggccag

SEQ ID NO: 1961292 - RNA, 12 nt, Human
cucuucuccacu

SEQ ID NO: 1961293 - RNA, 13 nt, Human
cucuucuccacug

SEQ ID NO: 1961294 - RNA, 15 nt, Human
cucuucuccaggcug

SEQ ID NO: 1961295 - RNA, 13 nt, Human
cucuucuccaggc

SEQ ID NO: 1961296 - RNA, 12 nt, Human
cucuuccucuug

SEQ ID NO: 1961297 - RNA, 14 nt, Human
cucuuccucuugac

SEQ ID NO: 1961298 - RNA, 16 nt, Human
cucuuccucuugaccc

SEQ ID NO: 1961299 - RNA, 17 nt, Human
cucuuccucuugacccu

SEQ ID NO: 1961300 - RNA, 19 nt, Human
cucuuccucuugacccugc

SEQ ID NO: 1961301 - RNA, 23 nt, Human
cucuuccucuugacccugcaccc

SEQ ID NO: 1961302 - RNA, 23 nt, Human
cucuuccuccugacaccccacuu

SEQ ID NO: 1961303 - RNA, 21 nt, Human
cucuucccgccgcccagccca

SEQ ID NO: 1961304 - RNA, 23 nt, Human
cucuucccgccgcccagcccacc

SEQ ID NO: 1961305 - RNA, 20 nt, Human
cucugugucagguggggcag

SEQ ID NO: 1961306 - RNA, 21 nt, Human
cucugugucagguggggcagc

SEQ ID NO: 1961307 - RNA, 22 nt, Human
cucugugucagguggggcagcu

SEQ ID NO: 1961308 - RNA, 23 nt, Human
cucugugucagguggggcagcuu

SEQ ID NO: 1961309 - RNA, 22 nt, Human
cucuguugcccaggcuggagug

SEQ ID NO: 1961310 - RNA, 17 nt, Human
cucuguugcccaggcug

SEQ ID NO: 1961311 - RNA, 22 nt, Human
cugccuccagaauggucuuucu

SEQ ID NO: 1961312 - RNA, 14 nt, Human
cugccuccagaaug

SEQ ID NO: 1961313 - RNA, 18 nt, Human
cugccucucugcaggucc

SEQ ID NO: 1961314 - RNA, 17 nt, Human
cugccucucugcagguc

SEQ ID NO: 1961315 - RNA, 16 nt, Human
cugccucucugcaggu

SEQ ID NO: 1961316 - RNA, 15 nt, Human
cugccucucugcagg

SEQ ID NO: 1961317 - RNA, 15 nt, Human
cugccucagccuccc

SEQ ID NO: 1961318 - RNA, 17 nt, Human
cugccucagccucccga

SEQ ID NO: 1961319 - RNA, 19 nt, Human
cugccucagccucccaaag

SEQ ID NO: 1961320 - RNA, 21 nt, Human
cugccuaggauucacacccca

SEQ ID NO: 1961321 - RNA, 23 nt, Human
cugccuaggauucacaccccacc

SEQ ID NO: 1961322 - RNA, 22 nt, Human
cugccgcagcccugcagagggc

SEQ ID NO: 1961323 - RNA, 21 nt, Human
cugccgcagcccugcagaggg

SEQ ID NO: 1961324 - RNA, 20 nt, Human
cugccgcagcccugcagagg

SEQ ID NO: 1961325 - RNA, 19 nt, Human
cugccgcagcccugcagag

SEQ ID NO: 1961326 - RNA, 23 nt, Human
cugccgcagcccugcagagggca

SEQ ID NO: 1961327 - RNA, 20 nt, Human
cugccgccgcuagguagagu

SEQ ID NO: 1961328 - RNA, 12 nt, Human
cugccccugccu

SEQ ID NO: 1961329 - RNA, 22 nt, Human
cugccccugccuuggggucagg

SEQ ID NO: 1961330 - RNA, 22 nt, Human
cugccccugcuacugccaaccu

SEQ ID NO: 1961331 - RNA, 18 nt, Human
cugccccugcuacugcca

SEQ ID NO: 1961332 - RNA, 13 nt, Human
cugccgcagcccu

SEQ ID NO: 1961333 - RNA, 12 nt, Human
cugccgcagccc

SEQ ID NO: 1961334 - RNA, 21 nt, Human
cugccccuccucucugcccua

SEQ ID NO: 1961335 - RNA, 20 nt, Human
cugccccuccucucugcccu

SEQ ID NO: 1961336 - RNA, 13 nt, Human
cugccccugcccc

SEQ ID NO: 1961337 - RNA, 18 nt, Human
cugccuggacuagaggga

SEQ ID NO: 1961338 - RNA, 18 nt, Human
cugccuucgguacccacc

SEQ ID NO: 1961339 - RNA, 19 nt, Human
cugccuucgguacccacca

SEQ ID NO: 1961340 - RNA, 20 nt, Human
cugccuucgguacccaccac

SEQ ID NO: 1961341 - RNA, 17 nt, Human
cugccucugacacacag

SEQ ID NO: 1961342 - RNA, 18 nt, Human
cugccucugacacacagc

SEQ ID NO: 1961343 - RNA, 21 nt, Human
cugccucugacacacagcucu

SEQ ID NO: 1961344 - RNA, 21 nt, Human
cugccugcccugucaggaggc

SEQ ID NO: 1961345 - RNA, 11 nt, Human
cugccugcccu

SEQ ID NO: 1961346 - RNA, 21 nt, Human
cugccugcccaggccccugcc

SEQ ID NO: 1961347 - RNA, 22 nt, Human
cugccugcccaggccccugcca

SEQ ID NO: 1961348 - RNA, 21 nt, Human
cugccuuuggcacucugacuu

SEQ ID NO: 1961349 - RNA, 13 nt, Human
cugccuuuuguuc

SEQ ID NO: 1961350 - RNA, 19 nt, Human
cugcgguccacccaggagc

SEQ ID NO: 1961351 - RNA, 20 nt, Human
cugcgguccacccaggagcc

SEQ ID NO: 1961352 - RNA, 22 nt, Human
cugcgggcuggguguggucucc

SEQ ID NO: 1961353 - RNA, 18 nt, Human
cugcgguccacccaggag

SEQ ID NO: 1961354 - RNA, 19 nt, Human
cugccaaugggagcucaug

SEQ ID NO: 1961355 - RNA, 18 nt, Human
cugccaaugggagcucau

SEQ ID NO: 1961356 - RNA, 18 nt, Human
cugccacaaggaagaaau

SEQ ID NO: 1961357 - RNA, 19 nt, Human
cugccacaaggaagaaauu

SEQ ID NO: 1961358 - RNA, 22 nt, Human
cugcaugcgggcuuccuccugg

SEQ ID NO: 1961359 - RNA, 18 nt, Human
cugcaugcgggcuuccuc

SEQ ID NO: 1961360 - RNA, 16 nt, Human
cugcaucguuucaucu

SEQ ID NO: 1961361 - RNA, 20 nt, Human
cugcauccuccgccucccgg

SEQ ID NO: 1961362 - RNA, 19 nt, Human
cugcauccuccgccucccg

SEQ ID NO: 1961363 - RNA, 22 nt, Human
cugcaucguuucaucuuccaac

SEQ ID NO: 1961364 - RNA, 22 nt, Human
cugcaguugccagucaccccgg

SEQ ID NO: 1961365 - RNA, 21 nt, Human
cugcaguugccagucaccccg

SEQ ID NO: 1961366 - RNA, 17 nt, Human
cugcaguugccagucac

SEQ ID NO: 1961367 - RNA, 19 nt, Human
cugcaguugccagucaccc

SEQ ID NO: 1961368 - RNA, 17 nt, Human
cugcagaacagcuucau

SEQ ID NO: 1961369 - RNA, 23 nt, Human
cugcacuugggggcucagcaagg

SEQ ID NO: 1961370 - RNA, 24 nt, Human
cugcacuugggggcucagcaaggc

SEQ ID NO: 1961371 - RNA, 23 nt, Human
cugcacuugcagacucuacagag

SEQ ID NO: 1961372 - RNA, 15 nt, Human
cugcacuugggggcu

SEQ ID NO: 1961373 - RNA, 19 nt, Human
cugcacuugggggcucagc

SEQ ID NO: 1961374 - RNA, 20 nt, Human
cugcacuugggggcucagca

SEQ ID NO: 1961375 - RNA, 21 nt, Human
cugcacuugggggcucagcaa

SEQ ID NO: 1961376 - RNA, 16 nt, Human
cugcccacucccugca

SEQ ID NO: 1961377 - RNA, 15 nt, Human
cugcccacucccugc

SEQ ID NO: 1961378 - RNA, 14 nt, Human
cugcccacucccug

SEQ ID NO: 1961379 - RNA, 22 nt, Human
cugcccaccuggccucugcacu

SEQ ID NO: 1961380 - RNA, 20 nt, Human
cugcccaccuggccucugca

SEQ ID NO: 1961381 - RNA, 19 nt, Human
cugcccaccuggccucugc

SEQ ID NO: 1961382 - RNA, 18 nt, Human
cugcccaccuggccucug

SEQ ID NO: 1961383 - RNA, 17 nt, Human
cugcccaccuggccucu

SEQ ID NO: 1961384 - RNA, 22 nt, Human
cugcccagaucagccagaagcc

SEQ ID NO: 1961385 - RNA, 17 nt, Human
cugcccagcccccuggu

SEQ ID NO: 1961386 - RNA, 18 nt, Human
cugcccacucccugcaac

SEQ ID NO: 1961387 - RNA, 16 nt, Human
cugcccacuggccggc

SEQ ID NO: 1961388 - RNA, 17 nt, Human
cugcccagccuccaagc

SEQ ID NO: 1961389 - RNA, 18 nt, Human
cugcccagaucagccaga

SEQ ID NO: 1961390 - RNA, 20 nt, Human
cugcccagaucagccagaag

SEQ ID NO: 1961391 - RNA, 21 nt, Human
cugcccagaucagccagaagc

SEQ ID NO: 1961392 - RNA, 15 nt, Human
cugcccaccuggccu

SEQ ID NO: 1961393 - RNA, 14 nt, Human
cugcccaccuggcc

SEQ ID NO: 1961394 - RNA, 13 nt, Human
cugcccaccuggc

SEQ ID NO: 1961395 - RNA, 15 nt, Human
cugccaugccagcuu

SEQ ID NO: 1961396 - RNA, 14 nt, Human
cugccaugccagcu

SEQ ID NO: 1961397 - RNA, 16 nt, Human
cugccacucaggccca

SEQ ID NO: 1961398 - RNA, 23 nt, Human
cugccacucaggcccaaagccuc

SEQ ID NO: 1961399 - RNA, 13 nt, Human
cugccaggcaugg

SEQ ID NO: 1961400 - RNA, 11 nt, Human
cugccaggcau

SEQ ID NO: 1961401 - RNA, 20 nt, Human
cugauuuuuuuuuccuucag

SEQ ID NO: 1961402 - RNA, 19 nt, Human
cugauuuuuuuuuccuuca

SEQ ID NO: 1961403 - RNA, 18 nt, Human
cugauuuuuuuuuccuuc

SEQ ID NO: 1961404 - RNA, 16 nt, Human
cugauuuuuuuuuccu

SEQ ID NO: 1961405 - RNA, 16 nt, Human
cugauuuuauucuuga

SEQ ID NO: 1961406 - RNA, 17 nt, Human
cugauuuuauucuugau

SEQ ID NO: 1961407 - RNA, 10 nt, Human
cugauuuuau

SEQ ID NO: 1961408 - RNA, 12 nt, Human
cugauuuuauuc

SEQ ID NO: 1961409 - RNA, 15 nt, Human
cugauuuuauucuug

SEQ ID NO: 1961410 - RNA, 16 nt, Human
cugauuuguuccuucu

SEQ ID NO: 1961411 - RNA, 22 nt, Human
cugauuuuuuuuuccuucagug

SEQ ID NO: 1961412 - RNA, 21 nt, Human
cugauuuuuuuuuccuucagu

SEQ ID NO: 1961413 - RNA, 18 nt, Human
cugauuuuauucuugauc

SEQ ID NO: 1961414 - RNA, 23 nt, Human
cugauuuuuuuuuccuucagugc

SEQ ID NO: 1961415 - RNA, 13 nt, Human
cugcaaagcccag

SEQ ID NO: 1961416 - RNA, 15 nt, Human
cugcaaagcccagcu

SEQ ID NO: 1961417 - RNA, 14 nt, Human
cugcaaaaccaggu

SEQ ID NO: 1961418 - RNA, 16 nt, Human
cugcaaaaccagguuu

SEQ ID NO: 1961419 - RNA, 21 nt, Human
cugauggugcaaugaccuuuc

SEQ ID NO: 1961420 - RNA, 20 nt, Human
cugauggugcaaugaccuuu

SEQ ID NO: 1961421 - RNA, 19 nt, Human
cugauggugcaaugaccuu

SEQ ID NO: 1961422 - RNA, 17 nt, Human
cugauggugcaaugacc

SEQ ID NO: 1961423 - RNA, 16 nt, Human
cugauugguuucucuu

SEQ ID NO: 1961424 - RNA, 18 nt, Human
cugauugguuucucuucu

SEQ ID NO: 1961425 - RNA, 19 nt, Human
cugauugguuucucuucuc

SEQ ID NO: 1961426 - RNA, 21 nt, Human
cugauugguuucucuucuccc

SEQ ID NO: 1961427 - RNA, 13 nt, Human
cugauuguauuua

SEQ ID NO: 1961428 - RNA, 17 nt, Human
cugauugugucucuugg

SEQ ID NO: 1961429 - RNA, 14 nt, Human
cugauuucuccugc

SEQ ID NO: 1961430 - RNA, 13 nt, Human
cugauuucuuuuc

SEQ ID NO: 1961431 - RNA, 21 nt, Human
cugauugugucucuugguccu

SEQ ID NO: 1961432 - RNA, 15 nt, Human
cugcacucucauugu

SEQ ID NO: 1961433 - RNA, 17 nt, Human
cugcacuccccugcugg

SEQ ID NO: 1961434 - RNA, 16 nt, Human
cugcacuccccugcug

SEQ ID NO: 1961435 - RNA, 18 nt, Human
cugcacuugcagacucua

SEQ ID NO: 1961436 - RNA, 14 nt, Human
cugcacugacucug

SEQ ID NO: 1961437 - RNA, 15 nt, Human
cugcacugacucugg

SEQ ID NO: 1961438 - RNA, 16 nt, Human
cugcacugacucugga

SEQ ID NO: 1961439 - RNA, 18 nt, Human
cugcacugacucuggaaa

SEQ ID NO: 1961440 - RNA, 22 nt, Human
cugcaccggcuggccuggcccc

SEQ ID NO: 1961441 - RNA, 16 nt, Human
cugcacccucaggcag

SEQ ID NO: 1961442 - RNA, 14 nt, Human
cugcacccucaggc

SEQ ID NO: 1961443 - RNA, 13 nt, Human
cugcacccucagg

SEQ ID NO: 1961444 - RNA, 15 nt, Human
cugcacuccccugcu

SEQ ID NO: 1961445 - RNA, 17 nt, Human
cugcaccccuuccuggg

SEQ ID NO: 1961446 - RNA, 19 nt, Human
cugcaccccuuccugggca

SEQ ID NO: 1961447 - RNA, 20 nt, Human
cugcaccccuuccugggcac

SEQ ID NO: 1961448 - RNA, 21 nt, Human
cugcaccccuuccugggcaca

SEQ ID NO: 1961449 - RNA, 23 nt, Human
cugcaccggcuggccuggccccu

SEQ ID NO: 1961450 - RNA, 12 nt, Human
cugcaccgggcc

SEQ ID NO: 1961451 - RNA, 22 nt, Human
cugcacaagcugcacccucagg

SEQ ID NO: 1961452 - RNA, 13 nt, Human
cugcacacagcac

SEQ ID NO: 1961453 - RNA, 18 nt, Human
cugcaauaaggggagagu

SEQ ID NO: 1961454 - RNA, 13 nt, Human
cugcaaagcaugu

SEQ ID NO: 1961455 - RNA, 15 nt, Human
cugcacaugauuuca

SEQ ID NO: 1961456 - RNA, 16 nt, Human
cugcacaugauuucac

SEQ ID NO: 1961457 - RNA, 17 nt, Human
cugcacaugauuucaca

SEQ ID NO: 1961458 - RNA, 18 nt, Human
cugcacaugauuucacaa

SEQ ID NO: 1961459 - RNA, 14 nt, Human
cugcaccccuuccu

SEQ ID NO: 1961460 - RNA, 15 nt, Human
cugcaccccuuccug

SEQ ID NO: 1961461 - RNA, 16 nt, Human
cugcaccccuuccugg

SEQ ID NO: 1961462 - RNA, 21 nt, Human
cugcacaugauuucacaaaua

SEQ ID NO: 1961463 - RNA, 22 nt, Human
cugcacaugauuucacaaauau

SEQ ID NO: 1961464 - RNA, 14 nt, Human
cugcacacagcacg

SEQ ID NO: 1961465 - RNA, 20 nt, Human
cugcacacgcuccuuccucu

SEQ ID NO: 1961466 - RNA, 22 nt, Human
cugcacacgcuccuuccucuga

SEQ ID NO: 1961467 - RNA, 22 nt, Human
cugcacagugcaucucagccca

SEQ ID NO: 1961468 - RNA, 22 nt, Human
cugaguugaagucaugcucccc

SEQ ID NO: 1961469 - RNA, 14 nt, Human
cugaguugaagagg

SEQ ID NO: 1961470 - RNA, 17 nt, Human
cugaguugaagagggga

SEQ ID NO: 1961471 - RNA, 19 nt, Human
cugaguuaggcuuucucuu

SEQ ID NO: 1961472 - RNA, 19 nt, Human
cugaguuccggcaccagua

SEQ ID NO: 1961473 - RNA, 13 nt, Human
cugaguuccugag

SEQ ID NO: 1961474 - RNA, 16 nt, Human
cugaguuguuacccca

SEQ ID NO: 1961475 - RNA, 17 nt, Human
cugaguuguuaccccaa

SEQ ID NO: 1961476 - RNA, 22 nt, Human
cugauaaauauucacacuugaa

SEQ ID NO: 1961477 - RNA, 15 nt, Human
cugaguuccuagcca

SEQ ID NO: 1961478 - RNA, 16 nt, Human
cugaguuccuagccac

SEQ ID NO: 1961479 - RNA, 17 nt, Human
cugaguuccuagccacc

SEQ ID NO: 1961480 - RNA, 18 nt, Human
cugaguuccuagccaccg

SEQ ID NO: 1961481 - RNA, 20 nt, Human
cugagucuguucugguaauc

SEQ ID NO: 1961482 - RNA, 19 nt, Human
cugagucugaaggcugggu

SEQ ID NO: 1961483 - RNA, 18 nt, Human
cugagucugaaggcuggg

SEQ ID NO: 1961484 - RNA, 20 nt, Human
cugagucccaggcugagccu

SEQ ID NO: 1961485 - RNA, 17 nt, Human
cugagucugaaggcugg

SEQ ID NO: 1961486 - RNA, 22 nt, Human
cugauacagaaaaguugaauuu

SEQ ID NO: 1961487 - RNA, 14 nt, Human
cugauauauuuaaa

SEQ ID NO: 1961488 - RNA, 15 nt, Human
cugaucaccugcccu

SEQ ID NO: 1961489 - RNA, 15 nt, Human
cugaucacugaaaua

SEQ ID NO: 1961490 - RNA, 16 nt, Human
cugauauugaaguaaa

SEQ ID NO: 1961491 - RNA, 13 nt, Human
cugauauguuugu

SEQ ID NO: 1961492 - RNA, 20 nt, Human
cugauauucaaauggacaaa

SEQ ID NO: 1961493 - RNA, 14 nt, Human
cugauauugaagua

SEQ ID NO: 1961494 - RNA, 16 nt, Human
cugauggugcaaugac

SEQ ID NO: 1961495 - RNA, 15 nt, Human
cugauggugcaauga

SEQ ID NO: 1961496 - RNA, 21 nt, Human
cugaucccuuccaccugcucu

SEQ ID NO: 1961497 - RNA, 14 nt, Human
cugauggugcaaug

SEQ ID NO: 1961498 - RNA, 21 nt, Human
cugauccuaguuccaccauca

SEQ ID NO: 1961499 - RNA, 20 nt, Human
cugauccuaguuccaccauc

SEQ ID NO: 1961500 - RNA, 17 nt, Human
cugaucccugaucccuu

SEQ ID NO: 1961501 - RNA, 20 nt, Human
cugaucccugaucccuucca

SEQ ID NO: 1961502 - RNA, 14 nt, Human
cugaucccuuccac

SEQ ID NO: 1961503 - RNA, 18 nt, Human
cugaucccuuccaccugc

SEQ ID NO: 1961504 - RNA, 15 nt, Human
cugaggcuccacuug

SEQ ID NO: 1961505 - RNA, 21 nt, Human
cugaggcuccacuuggucugu

SEQ ID NO: 1961506 - RNA, 14 nt, Human
cugagcccccagcu

SEQ ID NO: 1961507 - RNA, 15 nt, Human
cugagcccccagcuu

SEQ ID NO: 1961508 - RNA, 17 nt, Human
cugagcccccagcuucc

SEQ ID NO: 1961509 - RNA, 18 nt, Human
cugagcccccagcuucca

SEQ ID NO: 1961510 - RNA, 22 nt, Human
cugagcccccagcuuccagcag

SEQ ID NO: 1961511 - RNA, 23 nt, Human
cugagcccccagcuuccagcagg

SEQ ID NO: 1961512 - RNA, 24 nt, Human
cugaggcccuucucuccagccccu

SEQ ID NO: 1961513 - RNA, 20 nt, Human
cugaggccguugcugacuua

SEQ ID NO: 1961514 - RNA, 22 nt, Human
cugaggcugggcucccuuccca

SEQ ID NO: 1961515 - RNA, 17 nt, Human
cugaggcugggcucccu

SEQ ID NO: 1961516 - RNA, 16 nt, Human
cugaggcugggcuccc

SEQ ID NO: 1961517 - RNA, 15 nt, Human
cugaggcugggcucc

SEQ ID NO: 1961518 - RNA, 13 nt, Human
cugaggcugggcu

SEQ ID NO: 1961519 - RNA, 16 nt, Human
gaacuuggcgcugccc

SEQ ID NO: 1961520 - RNA, 15 nt, Human
gaacuuggcgcugcc

SEQ ID NO: 1961521 - RNA, 13 nt, Human
gaacuuggcgcug

SEQ ID NO: 1961522 - RNA, 14 nt, Human
gaacuugcugccuc

SEQ ID NO: 1961523 - RNA, 12 nt, Human
gaacuugcugcc

SEQ ID NO: 1961524 - RNA, 13 nt, Human
gaacuugcugccu

SEQ ID NO: 1961525 - RNA, 23 nt, Human
gaacuugguucccauuugcuccu

SEQ ID NO: 1961526 - RNA, 21 nt, Human
gaacuuguaaaggaauuuaaa

SEQ ID NO: 1961527 - RNA, 16 nt, Human
gaagaaacagcuauga

SEQ ID NO: 1961528 - RNA, 20 nt, Human
gaagaaacagcuaugagagg

SEQ ID NO: 1961529 - RNA, 19 nt, Human
gaagaaaacacuguuauca

SEQ ID NO: 1961530 - RNA, 17 nt, Human
gaagaaaacacuguuau

SEQ ID NO: 1961531 - RNA, 18 nt, Human
gaagaaaacacuguuauc

SEQ ID NO: 1961532 - RNA, 13 nt, Human
gaacuuggaagca

SEQ ID NO: 1961533 - RNA, 15 nt, Human
gaacuuggaagcaca

SEQ ID NO: 1961534 - RNA, 12 nt, Human
gaagaaaauacu

SEQ ID NO: 1961535 - RNA, 13 nt, Human
gaagaaaauacuu

SEQ ID NO: 1961536 - RNA, 17 nt, Human
gaagaaaauacuuaaau

SEQ ID NO: 1961537 - RNA, 21 nt, Human
gaagaaaauguucuuccaguu

SEQ ID NO: 1961538 - RNA, 19 nt, Human
gaagaaaauacuuaaaugu

SEQ ID NO: 1961539 - RNA, 20 nt, Human
gaagaaaauacuuaaauguu

SEQ ID NO: 1961540 - RNA, 19 nt, Human
gaacuugagccugucaaga

SEQ ID NO: 1961541 - RNA, 15 nt, Human
gaacucccuuucaac

SEQ ID NO: 1961542 - RNA, 22 nt, Human
gaacuggguacuuguggacaca

SEQ ID NO: 1961543 - RNA, 22 nt, Human
gaacucaucuagguaaauuaca

SEQ ID NO: 1961544 - RNA, 14 nt, Human
gaacucccuuucaa

SEQ ID NO: 1961545 - RNA, 16 nt, Human
gaacucaugugauuua

SEQ ID NO: 1961546 - RNA, 13 nt, Human
gaacuauuagagc

SEQ ID NO: 1961547 - RNA, 14 nt, Human
gaacuaucuucauc

SEQ ID NO: 1961548 - RNA, 16 nt, Human
gaacuaucuucaucug

SEQ ID NO: 1961549 - RNA, 13 nt, Human
gaacguucucuuu

SEQ ID NO: 1961550 - RNA, 12 nt, Human
gaacuaucuuca

SEQ ID NO: 1961551 - RNA, 13 nt, Human
gaacuaucuucau

SEQ ID NO: 1961552 - RNA, 20 nt, Human
gaacuaggaaggcacuucug

SEQ ID NO: 1961553 - RNA, 23 nt, Human
gaacguagucggcacagccuggu

SEQ ID NO: 1961554 - RNA, 17 nt, Human
gaaccugcacacgagca

SEQ ID NO: 1961555 - RNA, 23 nt, Human
gaaccugggaaagagauuuaaac

SEQ ID NO: 1961556 - RNA, 22 nt, Human
gaaccugggaaagagauuuaaa

SEQ ID NO: 1961557 - RNA, 19 nt, Human
gaaccugugagcugcacca

SEQ ID NO: 1961558 - RNA, 16 nt, Human
gaaccuguccuaagga

SEQ ID NO: 1961559 - RNA, 17 nt, Human
gaaccugugagcugcac

SEQ ID NO: 1961560 - RNA, 21 nt, Human
gaaccuucuggccucccacag

SEQ ID NO: 1961561 - RNA, 18 nt, Human
gaaccuucuggccuccca

SEQ ID NO: 1961562 - RNA, 15 nt, Human
gaaccuuccuuccug

SEQ ID NO: 1961563 - RNA, 19 nt, Human
gaaccuuccuuccugcuug

SEQ ID NO: 1961564 - RNA, 22 nt, Human
gaacagaacucgguguccccac

SEQ ID NO: 1961565 - RNA, 15 nt, Human
gaacagacuggaagc

SEQ ID NO: 1961566 - RNA, 16 nt, Human
gaacagacuggaagca

SEQ ID NO: 1961567 - RNA, 21 nt, Human
gaaccacaucuugcucugcug

SEQ ID NO: 1961568 - RNA, 12 nt, Human
gaaccugacccc

SEQ ID NO: 1961569 - RNA, 11 nt, Human
gaaccugaccc

SEQ ID NO: 1961570 - RNA, 16 nt, Human
gaaccaccacacccag

SEQ ID NO: 1961571 - RNA, 17 nt, Human
gaaccaccacacccagc

SEQ ID NO: 1961572 - RNA, 18 nt, Human
gaaacauuggaagcaggu

SEQ ID NO: 1961573 - RNA, 20 nt, Human
gaaacaugacucguauaugu

SEQ ID NO: 1961574 - RNA, 21 nt, Human
gaaacauguugccaaaauggu

SEQ ID NO: 1961575 - RNA, 23 nt, Human
gaaacauguugccaaaauggugg

SEQ ID NO: 1961576 - RNA, 13 nt, Human
gaaacauugcuuu

SEQ ID NO: 1961577 - RNA, 16 nt, Human
gaaacauugcuuuuaa

SEQ ID NO: 1961578 - RNA, 17 nt, Human
gaaacauugcuuuuaaa

SEQ ID NO: 1961579 - RNA, 18 nt, Human
gaaacauugcuuuuaaaa

SEQ ID NO: 1961580 - RNA, 21 nt, Human
gaaacauugcuuuuaaaacua

SEQ ID NO: 1961581 - RNA, 13 nt, Human
gaaacauuggaag

SEQ ID NO: 1961582 - RNA, 14 nt, Human
gaaacauuggaagc

SEQ ID NO: 1961583 - RNA, 15 nt, Human
gaaacaucauagaaa

SEQ ID NO: 1961584 - RNA, 18 nt, Human
gaaauaauuuuauuccag

SEQ ID NO: 1961585 - RNA, 13 nt, Human
gaaauaauaaaaa

SEQ ID NO: 1961586 - RNA, 15 nt, Human
gaaauaauaaaaaau

SEQ ID NO: 1961587 - RNA, 19 nt, Human
gaaauaauaaaaaauuuca

SEQ ID NO: 1961588 - RNA, 20 nt, Human
gaaauaauaaaaaauuucag

SEQ ID NO: 1961589 - RNA, 17 nt, Human
gaaauaacacagcaguu

SEQ ID NO: 1961590 - RNA, 20 nt, Human
gaaauacuagauuugggaga

SEQ ID NO: 1961591 - RNA, 18 nt, Human
gaaauagacagcaugaga

SEQ ID NO: 1961592 - RNA, 17 nt, Human
gaaauacagacuggaug

SEQ ID NO: 1961593 - RNA, 19 nt, Human
gaaauacagauaaaugauu

SEQ ID NO: 1961594 - RNA, 22 nt, Human
gaaauacagauaaaugauucaa

SEQ ID NO: 1961595 - RNA, 13 nt, Human
gaaauaguucugu

SEQ ID NO: 1961596 - RNA, 17 nt, Human
gaaauaguucugugacu

SEQ ID NO: 1961597 - RNA, 23 nt, Human
gaaauaguucugugacuaggaaa

SEQ ID NO: 1961598 - RNA, 13 nt, Human
gaaauauaauuga

SEQ ID NO: 1961599 - RNA, 19 nt, Human
gaaauagucauuugugaau

SEQ ID NO: 1961600 - RNA, 20 nt, Human
gaaauagucauuugugaauu

SEQ ID NO: 1961601 - RNA, 22 nt, Human
gaaauaguguggaaauuaagaa

SEQ ID NO: 1961602 - RNA, 21 nt, Human
gaaauaucugaaaauguaugu

SEQ ID NO: 1961603 - RNA, 16 nt, Human
gaaauauguauucugu

SEQ ID NO: 1961604 - RNA, 20 nt, Human
gaaauauguauucuguaaaa

SEQ ID NO: 1961605 - RNA, 17 nt, Human
gaaauuuguuauaauga

SEQ ID NO: 1961606 - RNA, 21 nt, Human
gaaauugguaccuugcacaca

SEQ ID NO: 1961607 - RNA, 15 nt, Human
gaaauugaaaaguua

SEQ ID NO: 1961608 - RNA, 17 nt, Human
gaaauugaaaaguuauu

SEQ ID NO: 1961609 - RNA, 18 nt, Human
gaaauucuguuuuuaaaa

SEQ ID NO: 1961610 - RNA, 13 nt, Human
gaaauucuguuuu

SEQ ID NO: 1961611 - RNA, 14 nt, Human
gaaauucuguuuuu

SEQ ID NO: 1961612 - RNA, 15 nt, Human
gaaauucuguuuuua

SEQ ID NO: 1961613 - RNA, 16 nt, Human
gaaauucuguuuuuaa

SEQ ID NO: 1961614 - RNA, 12 nt, Human
gaaauucuguuu

SEQ ID NO: 1961615 - RNA, 19 nt, Human
gaaauugcauuuccugaca

SEQ ID NO: 1961616 - RNA, 17 nt, Human
gaaauugagcugcuuuu

SEQ ID NO: 1961617 - RNA, 23 nt, Human
gaaauugagcugcuuuuuuugaa

SEQ ID NO: 1961618 - RNA, 16 nt, Human
gaaauugguaccuugc

SEQ ID NO: 1961619 - RNA, 20 nt, Human
gaaauugguaccuugcacac

SEQ ID NO: 1961620 - RNA, 17 nt, Human
gaaaugguauccagaau

SEQ ID NO: 1961621 - RNA, 20 nt, Human
gaaaugggcagagcagagac

SEQ ID NO: 1961622 - RNA, 14 nt, Human
gaaaugggcagagc

SEQ ID NO: 1961623 - RNA, 23 nt, Human
gaaauuaacuuacccuguauauc

SEQ ID NO: 1961624 - RNA, 13 nt, Human
gaaauuaagaaga

SEQ ID NO: 1961625 - RNA, 15 nt, Human
gaaauuaagaagaaa

SEQ ID NO: 1961626 - RNA, 16 nt, Human
gaaauuaagaagaaac

SEQ ID NO: 1961627 - RNA, 16 nt, Human
gaaauguuugcugaac

SEQ ID NO: 1961628 - RNA, 19 nt, Human
gaaucauuguccagagcug

SEQ ID NO: 1961629 - RNA, 17 nt, Human
gaauccaaaagaaaaac

SEQ ID NO: 1961630 - RNA, 16 nt, Human
gaauccaaaagaaaaa

SEQ ID NO: 1961631 - RNA, 21 nt, Human
gaaucauuguccagagcugcu

SEQ ID NO: 1961632 - RNA, 14 nt, Human
gaaucauuuguuca

SEQ ID NO: 1961633 - RNA, 23 nt, Human
gaaucauuuguucaaagcuguug

SEQ ID NO: 1961634 - RNA, 17 nt, Human
gaaucccuguguuaauu

SEQ ID NO: 1961635 - RNA, 15 nt, Human
gaauagcugggacua

SEQ ID NO: 1961636 - RNA, 14 nt, Human
gaauagcugaugug

SEQ ID NO: 1961637 - RNA, 11 nt, Human
gaaucacaggc

SEQ ID NO: 1961638 - RNA, 12 nt, Human
gaaucacaggcu

SEQ ID NO: 1961639 - RNA, 23 nt, Human
gaaucaccuaauuaauuucagua

SEQ ID NO: 1961640 - RNA, 14 nt, Human
gaaucacaggcugg

SEQ ID NO: 1961641 - RNA, 15 nt, Human
gaaucacaggcuggg

SEQ ID NO: 1961642 - RNA, 17 nt, Human
gaaucacaggcugggcu

SEQ ID NO: 1961643 - RNA, 18 nt, Human
gaaucacaggcugggcug

SEQ ID NO: 1961644 - RNA, 22 nt, Human
gaaucacaggcugggcugggca

SEQ ID NO: 1961645 - RNA, 18 nt, Human
gaaucaccuaauuaauuu

SEQ ID NO: 1961646 - RNA, 19 nt, Human
gaaucaccuaauuaauuuc

SEQ ID NO: 1961647 - RNA, 20 nt, Human
gaaucaccuaauuaauuuca

SEQ ID NO: 1961648 - RNA, 14 nt, Human
gaauagcugggacu

SEQ ID NO: 1961649 - RNA, 15 nt, Human
gaauagaugcugacu

SEQ ID NO: 1961650 - RNA, 18 nt, Human
gaauagaagcuaagguuu

SEQ ID NO: 1961651 - RNA, 14 nt, Human
gaaugaaagggccc

SEQ ID NO: 1961652 - RNA, 14 nt, Human
gaaugccuccugca

SEQ ID NO: 1961653 - RNA, 19 nt, Human
gaaugaaagggcccagaga

SEQ ID NO: 1961654 - RNA, 17 nt, Human
gaaucuguaugauucua

SEQ ID NO: 1961655 - RNA, 18 nt, Human
gaaucuguaugauucuau

SEQ ID NO: 1961656 - RNA, 16 nt, Human
gaaucuguaugauucu

SEQ ID NO: 1961657 - RNA, 17 nt, Human
gaaucucaacaugucuc

SEQ ID NO: 1961658 - RNA, 21 nt, Human
gaaucucaacaugucuccuac

SEQ ID NO: 1961659 - RNA, 16 nt, Human
gaaucucaaauaacua

SEQ ID NO: 1961660 - RNA, 12 nt, Human
gaaguuucugcc

SEQ ID NO: 1961661 - RNA, 12 nt, Human
gaauaaaauuuu

SEQ ID NO: 1961662 - RNA, 19 nt, Human
gaagguuuuuguaaagauu

SEQ ID NO: 1961663 - RNA, 14 nt, Human
gaagguuuuugaua

SEQ ID NO: 1961664 - RNA, 22 nt, Human
gaagguuggugaauuucacaag

SEQ ID NO: 1961665 - RNA, 18 nt, Human
gaauaaaggcagcuguug

SEQ ID NO: 1961666 - RNA, 14 nt, Human
gaauaaaggcagcu

SEQ ID NO: 1961667 - RNA, 14 nt, Human
gaauaaagacaccu

SEQ ID NO: 1961668 - RNA, 12 nt, Human
gaauaaacuaga

SEQ ID NO: 1961669 - RNA, 14 nt, Human
gaauaaacaccacu

SEQ ID NO: 1961670 - RNA, 16 nt, Human
gaauaaacuagauuac

SEQ ID NO: 1961671 - RNA, 19 nt, Human
gaauaaacuagauuacauu

SEQ ID NO: 1961672 - RNA, 14 nt, Human
gaauaacauguaau

SEQ ID NO: 1961673 - RNA, 21 nt, Human
gaauaagccauucugacucau

SEQ ID NO: 1961674 - RNA, 22 nt, Human
gaauaagccauucugacucaua

SEQ ID NO: 1961675 - RNA, 15 nt, Human
gaauaaauugcuccu

SEQ ID NO: 1961676 - RNA, 20 nt, Human
gaauaagugccaggauggaa

SEQ ID NO: 1961677 - RNA, 20 nt, Human
gaauaauccuaaacauauga

SEQ ID NO: 1961678 - RNA, 12 nt, Human
gaauacuugaac

SEQ ID NO: 1961679 - RNA, 14 nt, Human
gaauacuugaacca

SEQ ID NO: 1961680 - RNA, 15 nt, Human
gaauacuugaaccau

SEQ ID NO: 1961681 - RNA, 22 nt, Human
gaauacuugaaccauaaaaugu

SEQ ID NO: 1961682 - RNA, 16 nt, Human
gaauacugauggaauu

SEQ ID NO: 1961683 - RNA, 15 nt, Human
gaauacugauggaau

SEQ ID NO: 1961684 - RNA, 13 nt, Human
gaauacugcuuga

SEQ ID NO: 1961685 - RNA, 14 nt, Human
gaauacugcuugaa

SEQ ID NO: 1961686 - RNA, 17 nt, Human
gaauacugcuugaauaa

SEQ ID NO: 1961687 - RNA, 24 nt, Human
gaauacuuugcagcacagcugaga

SEQ ID NO: 1961688 - RNA, 17 nt, Human
gaauagaagcuaagguu

SEQ ID NO: 1961689 - RNA, 14 nt, Human
gaauaauuacagug

SEQ ID NO: 1961690 - RNA, 14 nt, Human
gaauacuuuauaaa

SEQ ID NO: 1961691 - RNA, 23 nt, Human
gaagcccaggaaaggcuccagga

SEQ ID NO: 1961692 - RNA, 22 nt, Human
gaagcccaggaaaggcuccagg

SEQ ID NO: 1961693 - RNA, 21 nt, Human
gaagcccaggaaaggcuccag

SEQ ID NO: 1961694 - RNA, 20 nt, Human
gaagcccaggaaaggcucca

SEQ ID NO: 1961695 - RNA, 20 nt, Human
gaagcggcccuaagggagug

SEQ ID NO: 1961696 - RNA, 13 nt, Human
gaaggaaaaauuc

SEQ ID NO: 1961697 - RNA, 15 nt, Human
gaaggaaaaauucaa

SEQ ID NO: 1961698 - RNA, 11 nt, Human
gaaggaaaaau

SEQ ID NO: 1961699 - RNA, 18 nt, Human
gaagcuuuuaugugaaac

SEQ ID NO: 1961700 - RNA, 10 nt, Human
gaagccuuug

SEQ ID NO: 1961701 - RNA, 11 nt, Human
gaagccuuugu

SEQ ID NO: 1961702 - RNA, 10 nt, Human
gaagcccaga

SEQ ID NO: 1961703 - RNA, 12 nt, Human
gaagcccagaau

SEQ ID NO: 1961704 - RNA, 14 nt, Human
gaagccagggcccg

SEQ ID NO: 1961705 - RNA, 18 nt, Human
gaagccagcugccuagga

SEQ ID NO: 1961706 - RNA, 23 nt, Human
gaagccagcugccuaggauucac

SEQ ID NO: 1961707 - RNA, 23 nt, Human
gaagccagcaggcucucaggcca

SEQ ID NO: 1961708 - RNA, 16 nt, Human
gaagccagcaggcucu

SEQ ID NO: 1961709 - RNA, 15 nt, Human
gaagccagcaggcuc

SEQ ID NO: 1961710 - RNA, 22 nt, Human
gaagccacgguguucugugaua

SEQ ID NO: 1961711 - RNA, 14 nt, Human
gaagaagcucucuc

SEQ ID NO: 1961712 - RNA, 14 nt, Human
gaagacuccagaaa

SEQ ID NO: 1961713 - RNA, 15 nt, Human
gaagacuccagaaau

SEQ ID NO: 1961714 - RNA, 19 nt, Human
gaagacucauucuucugua

SEQ ID NO: 1961715 - RNA, 21 nt, Human
gaagacucauucuucuguacg

SEQ ID NO: 1961716 - RNA, 12 nt, Human
gaaggauacaaa

SEQ ID NO: 1961717 - RNA, 19 nt, Human
gaaggauacaaaagcaugu

SEQ ID NO: 1961718 - RNA, 21 nt, Human
gaaggauacaaaagcauguga

SEQ ID NO: 1961719 - RNA, 18 nt, Human
gaaggaaacccagcucug

SEQ ID NO: 1961720 - RNA, 23 nt, Human
gaaggacccggaggggccuggca

SEQ ID NO: 1961721 - RNA, 17 nt, Human
gaaggaaacccagcucu

SEQ ID NO: 1961722 - RNA, 14 nt, Human
gaaggaaacccagc

SEQ ID NO: 1961723 - RNA, 16 nt, Human
gaaggaccuucacucu

SEQ ID NO: 1961724 - RNA, 24 nt, Human
gaaggaccuucacucuaagauguu

SEQ ID NO: 1961725 - RNA, 15 nt, Human
gaaggccccgcccag

SEQ ID NO: 1961726 - RNA, 14 nt, Human
gaaggccccgccca

SEQ ID NO: 1961727 - RNA, 16 nt, Human
gaaggccccgcccagg

SEQ ID NO: 1961728 - RNA, 14 nt, Human
gaagggguuuucuu

SEQ ID NO: 1961729 - RNA, 15 nt, Human
gaagguagaauguuu

SEQ ID NO: 1961730 - RNA, 16 nt, Human
gaagguagaauguuuu

SEQ ID NO: 1961731 - RNA, 17 nt, Human
gaagguagaauguuuuc

SEQ ID NO: 1961732 - RNA, 20 nt, Human
gaagguagaauguuuucaaa

SEQ ID NO: 1961733 - RNA, 13 nt, Human
gaagguaaaaagu

SEQ ID NO: 1961734 - RNA, 18 nt, Human
gaaggcagaaagcaaaau

SEQ ID NO: 1961735 - RNA, 15 nt, Human
gaaggcagaaagcaa

SEQ ID NO: 1961736 - RNA, 13 nt, Human
gaaggcagggagg

SEQ ID NO: 1961737 - RNA, 14 nt, Human
gaaggcagggaggg

SEQ ID NO: 1961738 - RNA, 14 nt, Human
gaaggcccagcacc

SEQ ID NO: 1961739 - RNA, 22 nt, Human
gaaggcccagcaccacccuccu

SEQ ID NO: 1961740 - RNA, 23 nt, Human
gaaggcccagcaccacccuccuu

SEQ ID NO: 1961741 - RNA, 15 nt, Human
cuuuuuugaaaucag

SEQ ID NO: 1961742 - RNA, 22 nt, Human
cuuuuuucucugauacagaaaa

SEQ ID NO: 1961743 - RNA, 15 nt, Human
cuuuuuuggcugcug

SEQ ID NO: 1961744 - RNA, 14 nt, Human
cuuuuuuggcugcu

SEQ ID NO: 1961745 - RNA, 23 nt, Human
gaaaaaggaugcacagaguuguu

SEQ ID NO: 1961746 - RNA, 17 nt, Human
gaaaaaggaugcacaga

SEQ ID NO: 1961747 - RNA, 21 nt, Human
cuuuugagugccuuacacaau

SEQ ID NO: 1961748 - RNA, 16 nt, Human
cuuuugagcauuuaga

SEQ ID NO: 1961749 - RNA, 20 nt, Human
cuuuuuucucugauacagaa

SEQ ID NO: 1961750 - RNA, 14 nt, Human
cuuuuuucuaaagu

SEQ ID NO: 1961751 - RNA, 14 nt, Human
cuuuugauaagaaa

SEQ ID NO: 1961752 - RNA, 15 nt, Human
cuuuuuucacuacau

SEQ ID NO: 1961753 - RNA, 16 nt, Human
gaaaacguggcugcuu

SEQ ID NO: 1961754 - RNA, 15 nt, Human
gaaaacguggcugcu

SEQ ID NO: 1961755 - RNA, 18 nt, Human
gaaaacguggcugcuuca

SEQ ID NO: 1961756 - RNA, 21 nt, Human
gaaaaccaagccguggcuucc

SEQ ID NO: 1961757 - RNA, 13 nt, Human
gaaaaccaaacaa

SEQ ID NO: 1961758 - RNA, 18 nt, Human
gaaaaccaagccguggcu

SEQ ID NO: 1961759 - RNA, 19 nt, Human
gaaaaccaagccguggcuu

SEQ ID NO: 1961760 - RNA, 14 nt, Human
gaaaacaugcuaca

SEQ ID NO: 1961761 - RNA, 15 nt, Human
gaaaacaugcuacac

SEQ ID NO: 1961762 - RNA, 12 nt, Human
gaaaacaugcua

SEQ ID NO: 1961763 - RNA, 14 nt, Human
gaaaacacauuuuu

SEQ ID NO: 1961764 - RNA, 14 nt, Human
gaaaacaucuccuu

SEQ ID NO: 1961765 - RNA, 15 nt, Human
gaaaacaucuccuua

SEQ ID NO: 1961766 - RNA, 19 nt, Human
gaaaacaucuccuuagaaa

SEQ ID NO: 1961767 - RNA, 13 nt, Human
gaaaacacauuuu

SEQ ID NO: 1961768 - RNA, 22 nt, Human
gaaaacaauaacgauaaaagac

SEQ ID NO: 1961769 - RNA, 14 nt, Human
gaaaaucagccugc

SEQ ID NO: 1961770 - RNA, 13 nt, Human
gaaaauauguauu

SEQ ID NO: 1961771 - RNA, 18 nt, Human
gaaaauauguauuaacac

SEQ ID NO: 1961772 - RNA, 19 nt, Human
gaaaauauguauuaacacu

SEQ ID NO: 1961773 - RNA, 18 nt, Human
gaaaaucagccugcucca

SEQ ID NO: 1961774 - RNA, 16 nt, Human
gaaaaucagccugcuc

SEQ ID NO: 1961775 - RNA, 19 nt, Human
gaaaaucuuauaauuuaaa

SEQ ID NO: 1961776 - RNA, 11 nt, Human
gaaaauaauug

SEQ ID NO: 1961777 - RNA, 15 nt, Human
gaaaauaauugacag

SEQ ID NO: 1961778 - RNA, 19 nt, Human
gaaaauaagccaugagaau

SEQ ID NO: 1961779 - RNA, 20 nt, Human
gaaaauaauugacaggcgaa

SEQ ID NO: 1961780 - RNA, 13 nt, Human
gaaaagcugcuga

SEQ ID NO: 1961781 - RNA, 17 nt, Human
gaaaagcugcugacagu

SEQ ID NO: 1961782 - RNA, 19 nt, Human
gaaaauaacgauaaaagac

SEQ ID NO: 1961783 - RNA, 12 nt, Human
gaaacagaggcu

SEQ ID NO: 1961784 - RNA, 21 nt, Human
gaaacagaggaccagcacacu

SEQ ID NO: 1961785 - RNA, 23 nt, Human
gaaacagaggaccagcacacucc

SEQ ID NO: 1961786 - RNA, 22 nt, Human
gaaacagacuuguauauucuau

SEQ ID NO: 1961787 - RNA, 16 nt, Human
gaaacacuuugcauaa

SEQ ID NO: 1961788 - RNA, 15 nt, Human
gaaacagcucgacuu

SEQ ID NO: 1961789 - RNA, 20 nt, Human
gaaacagcucgacuuuaaaa

SEQ ID NO: 1961790 - RNA, 18 nt, Human
gaaacagcuaaugggaca

SEQ ID NO: 1961791 - RNA, 17 nt, Human
gaaaauaugucccagaa

SEQ ID NO: 1961792 - RNA, 15 nt, Human
gaaacacauaauuaa

SEQ ID NO: 1961793 - RNA, 19 nt, Human
gaaacacauaauuaacacu

SEQ ID NO: 1961794 - RNA, 20 nt, Human
gaaacacauaauuaacacuu

SEQ ID NO: 1961795 - RNA, 16 nt, Human
gaaacaccaaaaaaau

SEQ ID NO: 1961796 - RNA, 23 nt, Human
gaaacaccaaaaaaauccagaaa

SEQ ID NO: 1961797 - RNA, 20 nt, Human
gaaaaucuuauaauuuaaaa

SEQ ID NO: 1961798 - RNA, 22 nt, Human
gaaacacugggcuucuagaacc

SEQ ID NO: 1961799 - RNA, 17 nt, Human
gaaacacccacaggcau

SEQ ID NO: 1961800 - RNA, 15 nt, Human
gaaacacuaaauguu

SEQ ID NO: 1961801 - RNA, 16 nt, Human
gaaacacuaaauguua

SEQ ID NO: 1961802 - RNA, 17 nt, Human
gaaacacuaaauguuaa

SEQ ID NO: 1961803 - RNA, 18 nt, Human
gaaacacuaaauguuaaa

SEQ ID NO: 1961804 - RNA, 19 nt, Human
gaaacacuaaauguuaaag

SEQ ID NO: 1961805 - RNA, 23 nt, Human
gaaacacuaaauguuaaagaugu

SEQ ID NO: 1961806 - RNA, 16 nt, Human
cuuuggacccugaggc

SEQ ID NO: 1961807 - RNA, 15 nt, Human
cuuuggacccugagg

SEQ ID NO: 1961808 - RNA, 18 nt, Human
cuuuggacccugaggccc

SEQ ID NO: 1961809 - RNA, 17 nt, Human
cuuuggacccugaggcc

SEQ ID NO: 1961810 - RNA, 19 nt, Human
cuuuggacccugaggccca

SEQ ID NO: 1961811 - RNA, 16 nt, Human
cuuuggcuuaauucca

SEQ ID NO: 1961812 - RNA, 21 nt, Human
cuuuggcuuaauuccaaucau

SEQ ID NO: 1961813 - RNA, 16 nt, Human
cuuucccaucuuccaa

SEQ ID NO: 1961814 - RNA, 19 nt, Human
cuuucccacccagccuggg

SEQ ID NO: 1961815 - RNA, 17 nt, Human
cuuucccacccagccug

SEQ ID NO: 1961816 - RNA, 18 nt, Human
cuuucccacccagccugg

SEQ ID NO: 1961817 - RNA, 12 nt, Human
cuuugcucuggu

SEQ ID NO: 1961818 - RNA, 14 nt, Human
cuuugugauuuuug

SEQ ID NO: 1961819 - RNA, 13 nt, Human
cuuuguccuccug

SEQ ID NO: 1961820 - RNA, 15 nt, Human
cuuuguccuccugcu

SEQ ID NO: 1961821 - RNA, 16 nt, Human
cuuuguccuccugcug

SEQ ID NO: 1961822 - RNA, 17 nt, Human
cuuuguccuccugcugc

SEQ ID NO: 1961823 - RNA, 18 nt, Human
cuuuguccuccugcugcc

SEQ ID NO: 1961824 - RNA, 22 nt, Human
cuuuguccccaccgcagacagg

SEQ ID NO: 1961825 - RNA, 18 nt, Human
cuuuguccccaccgcaga

SEQ ID NO: 1961826 - RNA, 13 nt, Human
cuuugggaggcca

SEQ ID NO: 1961827 - RNA, 17 nt, Human
cuuugugauuuuuguaa

SEQ ID NO: 1961828 - RNA, 18 nt, Human
cuuugugauuuuuguaau

SEQ ID NO: 1961829 - RNA, 19 nt, Human
cuuugugauuuuuguaauu

SEQ ID NO: 1961830 - RNA, 19 nt, Human
cuuugucuaagaaacauug

SEQ ID NO: 1961831 - RNA, 17 nt, Human
cuuugucuaagaaacau

SEQ ID NO: 1961832 - RNA, 18 nt, Human
cuuugucuaagaaacauu

SEQ ID NO: 1961833 - RNA, 21 nt, Human
cuuuguccuccugcugccagu

SEQ ID NO: 1961834 - RNA, 15 nt, Human
cuuuguucuggcucu

SEQ ID NO: 1961835 - RNA, 14 nt, Human
cuuuguucuggcuc

SEQ ID NO: 1961836 - RNA, 20 nt, Human
cuuuuacguccaucucuugu

SEQ ID NO: 1961837 - RNA, 15 nt, Human
cuuuuacccuuuuuc

SEQ ID NO: 1961838 - RNA, 21 nt, Human
cuuuguuuguucuuguuuuua

SEQ ID NO: 1961839 - RNA, 11 nt, Human
cuuuuaauuuu

SEQ ID NO: 1961840 - RNA, 13 nt, Human
cuuuguuuguucu

SEQ ID NO: 1961841 - RNA, 14 nt, Human
cuuuguuuguucuu

SEQ ID NO: 1961842 - RNA, 15 nt, Human
cuuuguuuguucuug

SEQ ID NO: 1961843 - RNA, 20 nt, Human
cuuuguuuguugucagcuga

SEQ ID NO: 1961844 - RNA, 18 nt, Human
cuuuguuuguugucagcu

SEQ ID NO: 1961845 - RNA, 22 nt, Human
cuuuucauaaccuagccuuaga

SEQ ID NO: 1961846 - RNA, 17 nt, Human
cuuuucacugcuggcug

SEQ ID NO: 1961847 - RNA, 18 nt, Human
cuuuucacugcuggcugc

SEQ ID NO: 1961848 - RNA, 20 nt, Human
cuuuucacugcuggcugccu

SEQ ID NO: 1961849 - RNA, 20 nt, Human
cuuuucauaaccuagccuua

SEQ ID NO: 1961850 - RNA, 14 nt, Human
cuuuucauugcugu

SEQ ID NO: 1961851 - RNA, 22 nt, Human
cuuuucccucggaguucuucuu

SEQ ID NO: 1961852 - RNA, 23 nt, Human
cuuuucuugcaugaggcuagugu

SEQ ID NO: 1961853 - RNA, 18 nt, Human
cuuuucuugcaugaggcu

SEQ ID NO: 1961854 - RNA, 16 nt, Human
cuuuucuuucagccaa

SEQ ID NO: 1961855 - RNA, 23 nt, Human
cuuuucuguccgagcuuugaaaa

SEQ ID NO: 1961856 - RNA, 18 nt, Human
cuuuucuguccgagcuuu

SEQ ID NO: 1961857 - RNA, 12 nt, Human
cuuggagggcau

SEQ ID NO: 1961858 - RNA, 23 nt, Human
cuuggagggcaugaagacagaua

SEQ ID NO: 1961859 - RNA, 22 nt, Human
cuuggaggaaggaaacccagcu

SEQ ID NO: 1961860 - RNA, 17 nt, Human
cuuggagguagcuuuga

SEQ ID NO: 1961861 - RNA, 16 nt, Human
cuuggcugcagggagu

SEQ ID NO: 1961862 - RNA, 14 nt, Human
cuuggcugcaggga

SEQ ID NO: 1961863 - RNA, 17 nt, Human
cuuggcugcagggaguc

SEQ ID NO: 1961864 - RNA, 13 nt, Human
cuugggaauuuua

SEQ ID NO: 1961865 - RNA, 15 nt, Human
cuugggacauccugu

SEQ ID NO: 1961866 - RNA, 20 nt, Human
cuuggggacaggggcaggag

SEQ ID NO: 1961867 - RNA, 22 nt, Human
cuugggcuucauccuccucaga

SEQ ID NO: 1961868 - RNA, 21 nt, Human
cuuggggaccagagcugccac

SEQ ID NO: 1961869 - RNA, 20 nt, Human
cuuggggaccagagcugcca

SEQ ID NO: 1961870 - RNA, 14 nt, Human
cuugggccacugug

SEQ ID NO: 1961871 - RNA, 14 nt, Human
cuugggcagaucuc

SEQ ID NO: 1961872 - RNA, 19 nt, Human
cuugggcagaucucccaca

SEQ ID NO: 1961873 - RNA, 23 nt, Human
cuugggcagaucucccacaugcc

SEQ ID NO: 1961874 - RNA, 13 nt, Human
cuugggcuucauc

SEQ ID NO: 1961875 - RNA, 15 nt, Human
cuuggggggcugagg

SEQ ID NO: 1961876 - RNA, 22 nt, Human
cuuggggaccagagcugccacc

SEQ ID NO: 1961877 - RNA, 22 nt, Human
cuuggggacaaccuuggcuugg

SEQ ID NO: 1961878 - RNA, 22 nt, Human
cuuggggggcugaggugggagg

SEQ ID NO: 1961879 - RNA, 16 nt, Human
cuuggggggcugaggu

SEQ ID NO: 1961880 - RNA, 19 nt, Human
cuuguaaaggaauuuaaaa

SEQ ID NO: 1961881 - RNA, 13 nt, Human
cuugcucugcuga

SEQ ID NO: 1961882 - RNA, 14 nt, Human
cuugcucugcugac

SEQ ID NO: 1961883 - RNA, 15 nt, Human
cuugcccacuccugc

SEQ ID NO: 1961884 - RNA, 16 nt, Human
cuugcccacuccugcu

SEQ ID NO: 1961885 - RNA, 22 nt, Human
cuugcccacuccugcucugcuc

SEQ ID NO: 1961886 - RNA, 23 nt, Human
cuugcccacuccugcucugcucg

SEQ ID NO: 1961887 - RNA, 17 nt, Human
cuucuccacccugcucu

SEQ ID NO: 1961888 - RNA, 18 nt, Human
cuucuccacccugcucuc

SEQ ID NO: 1961889 - RNA, 21 nt, Human
cuucuccacccugcucuccga

SEQ ID NO: 1961890 - RNA, 13 nt, Human
cuugccacugccu

SEQ ID NO: 1961891 - RNA, 12 nt, Human
cuugccagcugc

SEQ ID NO: 1961892 - RNA, 16 nt, Human
cuugccagcugcugag

SEQ ID NO: 1961893 - RNA, 18 nt, Human
cuugccagcugcugagcc

SEQ ID NO: 1961894 - RNA, 19 nt, Human
cuugccagcugcugagccg

SEQ ID NO: 1961895 - RNA, 21 nt, Human
cuugccagcugcugagccgca

SEQ ID NO: 1961896 - RNA, 22 nt, Human
cuugccagcugcugagccgcag

SEQ ID NO: 1961897 - RNA, 14 nt, Human
cuugccacugccuc

SEQ ID NO: 1961898 - RNA, 15 nt, Human
cuugccacugccucu

SEQ ID NO: 1961899 - RNA, 20 nt, Human
cuugcuucaaccccaugaga

SEQ ID NO: 1961900 - RNA, 14 nt, Human
cuugcuuaaaugug

SEQ ID NO: 1961901 - RNA, 15 nt, Human
cuugcuuaaauguga

SEQ ID NO: 1961902 - RNA, 16 nt, Human
cuugcuuaaaugugaa

SEQ ID NO: 1961903 - RNA, 22 nt, Human
cuugcuuaaaugugaauuacua

SEQ ID NO: 1961904 - RNA, 13 nt, Human
cuugcuuaaaugu

SEQ ID NO: 1961905 - RNA, 16 nt, Human
cuugcucugcugacag

SEQ ID NO: 1961906 - RNA, 17 nt, Human
cuugcucugcugacaga

SEQ ID NO: 1961907 - RNA, 15 nt, Human
cuugcugugacuuau

SEQ ID NO: 1961908 - RNA, 16 nt, Human
cuuggaaaugggagac

SEQ ID NO: 1961909 - RNA, 20 nt, Human
cuuggaaaucaaauguaaag

SEQ ID NO: 1961910 - RNA, 13 nt, Human
cuuggaggaagga

SEQ ID NO: 1961911 - RNA, 13 nt, Human
cuuggaagcuccg

SEQ ID NO: 1961912 - RNA, 21 nt, Human
cuuggaaaucaaauguaaagu

SEQ ID NO: 1961913 - RNA, 21 nt, Human
cuuguguguuuauugucaaag

SEQ ID NO: 1961914 - RNA, 22 nt, Human
cuuguugguucaccauugagac

SEQ ID NO: 1961915 - RNA, 21 nt, Human
cuuguuguuuguaacaagaaa

SEQ ID NO: 1961916 - RNA, 16 nt, Human
cuuguuuaaugguagu

SEQ ID NO: 1961917 - RNA, 20 nt, Human
cuugggggcucagcaaggcc

SEQ ID NO: 1961918 - RNA, 21 nt, Human
cuugggggcucagcaaggcca

SEQ ID NO: 1961919 - RNA, 15 nt, Human
cuugggggcucagca

SEQ ID NO: 1961920 - RNA, 17 nt, Human
cuugggggcucagcaag

SEQ ID NO: 1961921 - RNA, 22 nt, Human
cuuguggcuccacacacacaaa

SEQ ID NO: 1961922 - RNA, 20 nt, Human
cuuguguguuuauugucaaa

SEQ ID NO: 1961923 - RNA, 18 nt, Human
cuuuagaaacacauaauu

SEQ ID NO: 1961924 - RNA, 15 nt, Human
cuuuagaaaaggcau

SEQ ID NO: 1961925 - RNA, 20 nt, Human
cuuuagaaacacauaauuaa

SEQ ID NO: 1961926 - RNA, 20 nt, Human
cuuuacuugucuuucugggg

SEQ ID NO: 1961927 - RNA, 14 nt, Human
cuuuagaaaaggca

SEQ ID NO: 1961928 - RNA, 14 nt, Human
cuuuaaacugucgu

SEQ ID NO: 1961929 - RNA, 20 nt, Human
cuuuaaacugucgugucaua

SEQ ID NO: 1961930 - RNA, 16 nt, Human
cuuuacuugucuuucu

SEQ ID NO: 1961931 - RNA, 18 nt, Human
cuuuacuugucuuucugg

SEQ ID NO: 1961932 - RNA, 14 nt, Human
cuuguuuucuggga

SEQ ID NO: 1961933 - RNA, 23 nt, Human
cuuguuuugcuuccccucccccc

SEQ ID NO: 1961934 - RNA, 13 nt, Human
cuuguuuugcuuc

SEQ ID NO: 1961935 - RNA, 14 nt, Human
cuuguuuugcuucc

SEQ ID NO: 1961936 - RNA, 15 nt, Human
cuuguuuugcuuccc

SEQ ID NO: 1961937 - RNA, 17 nt, Human
cuuguuuugcuuccccu

SEQ ID NO: 1961938 - RNA, 12 nt, Human
cuuguuuuuaag

SEQ ID NO: 1961939 - RNA, 14 nt, Human
cuuguuuuuaaguu

SEQ ID NO: 1961940 - RNA, 16 nt, Human
cuuguuuuuaaguuug

SEQ ID NO: 1961941 - RNA, 20 nt, Human
cuuguuuuuaaguuugcacu

SEQ ID NO: 1961942 - RNA, 19 nt, Human
cuuguuuuuuuuuuccacu

SEQ ID NO: 1961943 - RNA, 20 nt, Human
cuuguuuuuuuuuuccacuu

SEQ ID NO: 1961944 - RNA, 14 nt, Human
cuuguuuuuguaaa

SEQ ID NO: 1961945 - RNA, 15 nt, Human
cuuguuuuuguaaag

SEQ ID NO: 1961946 - RNA, 16 nt, Human
cuuguuuuuguaaaga

SEQ ID NO: 1961947 - RNA, 20 nt, Human
cuuguuuuuguaaagaaaaa

SEQ ID NO: 1961948 - RNA, 21 nt, Human
cuuguuuuuguaaagaaaaau

SEQ ID NO: 1961949 - RNA, 22 nt, Human
cuuguuuuuguaaagaaaaaua

SEQ ID NO: 1961950 - RNA, 23 nt, Human
cuuguuuuuguaaagaaaaauau

SEQ ID NO: 1961951 - RNA, 17 nt, Human
cuuguuuuuguuuuugu

SEQ ID NO: 1961952 - RNA, 21 nt, Human
cuuguuuuuuuuuuccacuua

SEQ ID NO: 1961953 - RNA, 23 nt, Human
cuuguuuuuguuuuuguuuuguu

SEQ ID NO: 1961954 - RNA, 15 nt, Human
cuuguuguuuaaugu

SEQ ID NO: 1961955 - RNA, 19 nt, Human
cuuuaguuauaaaggaauc

SEQ ID NO: 1961956 - RNA, 12 nt, Human
cuuuauuauuua

SEQ ID NO: 1961957 - RNA, 13 nt, Human
cuuuauuauuuau

SEQ ID NO: 1961958 - RNA, 14 nt, Human
cuuuauuauuuauu

SEQ ID NO: 1961959 - RNA, 20 nt, Human
cuuuauucuggcagaggagg

SEQ ID NO: 1961960 - RNA, 19 nt, Human
cuuuauugccaaaacccag

SEQ ID NO: 1961961 - RNA, 21 nt, Human
cuuuauugccaaaacccagcu

SEQ ID NO: 1961962 - RNA, 22 nt, Human
cuuuauugccaaaacccagcug

SEQ ID NO: 1961963 - RNA, 23 nt, Human
cuuuauugccaaaacccagcugc

SEQ ID NO: 1961964 - RNA, 21 nt, Human
cuuuauuuucuauaauuuaaa

SEQ ID NO: 1961965 - RNA, 20 nt, Human
cuuuauuuguacuuuuuccu

SEQ ID NO: 1961966 - RNA, 23 nt, Human
cuuuauuuguguucuuuuuuccc

SEQ ID NO: 1961967 - RNA, 17 nt, Human
cuuuccaauucuccuuu

SEQ ID NO: 1961968 - RNA, 18 nt, Human
cuuuccaauucuccuuua

SEQ ID NO: 1961969 - RNA, 15 nt, Human
cuuuccaauucuccu

SEQ ID NO: 1961970 - RNA, 16 nt, Human
cuuuccaauucuccuu

SEQ ID NO: 1961971 - RNA, 22 nt, Human
cuuuccaaaugcccagcuuaaa

SEQ ID NO: 1961972 - RNA, 19 nt, Human
cuuuccaaaugcccagcuu

SEQ ID NO: 1961973 - RNA, 18 nt, Human
cuuuccaaaugcccagcu

SEQ ID NO: 1961974 - RNA, 21 nt, Human
cuuucauuuugcuuuaauuuu

SEQ ID NO: 1961975 - RNA, 20 nt, Human
cuuuccaaagccaaugugaa

SEQ ID NO: 1961976 - RNA, 14 nt, Human
cuuucauuugcuuu

SEQ ID NO: 1961977 - RNA, 18 nt, Human
cuuucauuugcuuuggaa

SEQ ID NO: 1961978 - RNA, 14 nt, Human
cuuucauuuugcuu

SEQ ID NO: 1961979 - RNA, 15 nt, Human
cuuucauuuugcuuu

SEQ ID NO: 1961980 - RNA, 16 nt, Human
cuuucauuuugcuuua

SEQ ID NO: 1961981 - RNA, 17 nt, Human
cuuucauuuugcuuuaa

SEQ ID NO: 1961982 - RNA, 19 nt, Human
cuuucauuuugcuuuaauu

SEQ ID NO: 1961983 - RNA, 16 nt, Human
cuuucauauuuuaaac

SEQ ID NO: 1961984 - RNA, 19 nt, Human
cuuucauauuuuaaacaga

SEQ ID NO: 1961985 - RNA, 23 nt, Human
cuuucauauuuuaaacagaggau

SEQ ID NO: 1961986 - RNA, 14 nt, Human
cuuucauuugcuau

SEQ ID NO: 1961987 - RNA, 14 nt, Human
cuguugaccaggca

SEQ ID NO: 1961988 - RNA, 15 nt, Human
cuguugaccaggcac

SEQ ID NO: 1961989 - RNA, 17 nt, Human
cuguugaccaggcaccu

SEQ ID NO: 1961990 - RNA, 11 nt, Human
cuguugacucu

SEQ ID NO: 1961991 - RNA, 19 nt, Human
cuguugacucuaguacugu

SEQ ID NO: 1961992 - RNA, 22 nt, Human
cuguugacucuaguacugugaa

SEQ ID NO: 1961993 - RNA, 23 nt, Human
cuguugaugggaugauugaagaa

SEQ ID NO: 1961994 - RNA, 23 nt, Human
cuguucuuucuggcuaugcauuu

SEQ ID NO: 1961995 - RNA, 12 nt, Human
cuguucuuccug

SEQ ID NO: 1961996 - RNA, 13 nt, Human
cuguucuuccugg

SEQ ID NO: 1961997 - RNA, 12 nt, Human
cuguugcccagg

SEQ ID NO: 1961998 - RNA, 13 nt, Human
cuguugcccaggc

SEQ ID NO: 1961999 - RNA, 14 nt, Human
cuguugcccaggcu

SEQ ID NO: 1962000 - RNA, 15 nt, Human
cuguugcccaggcug

SEQ ID NO: 1962001 - RNA, 16 nt, Human
cuguugcccaggcugg

SEQ ID NO: 1962002 - RNA, 15 nt, Human
cuguucuuuccaaag

SEQ ID NO: 1962003 - RNA, 16 nt, Human
cuguucuuuccaaagu

SEQ ID NO: 1962004 - RNA, 19 nt, Human
cuguucuuuccaaaguaca

SEQ ID NO: 1962005 - RNA, 21 nt, Human
cuguucuuuccaaaguacacu

SEQ ID NO: 1962006 - RNA, 13 nt, Human
cuguucuuucugg

SEQ ID NO: 1962007 - RNA, 14 nt, Human
cuguucuuucuggc

SEQ ID NO: 1962008 - RNA, 21 nt, Human
cuguucuuucuggcuaugcau

SEQ ID NO: 1962009 - RNA, 16 nt, Human
cuguuaauaguucagg

SEQ ID NO: 1962010 - RNA, 21 nt, Human
cuguuaaggcauccacuucac

SEQ ID NO: 1962011 - RNA, 11 nt, Human
cuguuacaaaa

SEQ ID NO: 1962012 - RNA, 13 nt, Human
cuguuacaaaaug

SEQ ID NO: 1962013 - RNA, 15 nt, Human
cuguuacaaaaugua

SEQ ID NO: 1962014 - RNA, 16 nt, Human
cuguuuuuaaaaauua

SEQ ID NO: 1962015 - RNA, 14 nt, Human
cuguuuuuaaaaau

SEQ ID NO: 1962016 - RNA, 17 nt, Human
cuuaaaaaguggaaaaa

SEQ ID NO: 1962017 - RNA, 16 nt, Human
cuuaaaaaguggaaaa

SEQ ID NO: 1962018 - RNA, 12 nt, Human
cuuaaaaacuca

SEQ ID NO: 1962019 - RNA, 22 nt, Human
cuguuuuacaaaaaagaaaaga

SEQ ID NO: 1962020 - RNA, 21 nt, Human
cuguuugguuuuaaaauacug

SEQ ID NO: 1962021 - RNA, 21 nt, Human
cuguuugggaagagcuuagaa

SEQ ID NO: 1962022 - RNA, 20 nt, Human
cuguuugggaagagcuuaga

SEQ ID NO: 1962023 - RNA, 22 nt, Human
cuguuugggaagagcuuagaaa

SEQ ID NO: 1962024 - RNA, 17 nt, Human
cuguuugguuuuaaaau

SEQ ID NO: 1962025 - RNA, 14 nt, Human
cuguuuagauaaua

SEQ ID NO: 1962026 - RNA, 17 nt, Human
cuguuuagauaauacac

SEQ ID NO: 1962027 - RNA, 18 nt, Human
cuguugcccaggcuggcg

SEQ ID NO: 1962028 - RNA, 17 nt, Human
cuguugcccaggcuggc

SEQ ID NO: 1962029 - RNA, 15 nt, Human
cuguuucaaacuuua

SEQ ID NO: 1962030 - RNA, 17 nt, Human
cuguuucaaacuuuacu

SEQ ID NO: 1962031 - RNA, 19 nt, Human
cuguuuagauuugccauag

SEQ ID NO: 1962032 - RNA, 21 nt, Human
cuguuuagauuugccauagag

SEQ ID NO: 1962033 - RNA, 22 nt, Human
cuguuuagauuugccauagagu

SEQ ID NO: 1962034 - RNA, 18 nt, Human
cuguuuagauaauacacc

SEQ ID NO: 1962035 - RNA, 19 nt, Human
cuguuugcuaagugaggau

SEQ ID NO: 1962036 - RNA, 17 nt, Human
cuguuugcuaagugagg

SEQ ID NO: 1962037 - RNA, 22 nt, Human
cuguuugcuguugcugauuuua

SEQ ID NO: 1962038 - RNA, 15 nt, Human
cuguuugcuguugcu

SEQ ID NO: 1962039 - RNA, 16 nt, Human
cuguuucagaggcuca

SEQ ID NO: 1962040 - RNA, 21 nt, Human
cuguuucaaguucacaccugc

SEQ ID NO: 1962041 - RNA, 21 nt, Human
cuuaauaaucaagagccuuaa

SEQ ID NO: 1962042 - RNA, 17 nt, Human
cuuaauacuguuauucu

SEQ ID NO: 1962043 - RNA, 19 nt, Human
cuuaauacuguuauucuuu

SEQ ID NO: 1962044 - RNA, 21 nt, Human
cuuaauacuguuauucuuugc

SEQ ID NO: 1962045 - RNA, 13 nt, Human
cuuaauaaucaag

SEQ ID NO: 1962046 - RNA, 14 nt, Human
cuuaauaaucaaga

SEQ ID NO: 1962047 - RNA, 15 nt, Human
cuuaauaaucaagag

SEQ ID NO: 1962048 - RNA, 20 nt, Human
cuuaauaaucaagagccuua

SEQ ID NO: 1962049 - RNA, 22 nt, Human
cuuaagcugcaggauucucacc

SEQ ID NO: 1962050 - RNA, 12 nt, Human
cuuaagcugcag

SEQ ID NO: 1962051 - RNA, 13 nt, Human
cuuaagcugcagg

SEQ ID NO: 1962052 - RNA, 14 nt, Human
cuuaagcugcagga

SEQ ID NO: 1962053 - RNA, 15 nt, Human
cuuaagcugcaggau

SEQ ID NO: 1962054 - RNA, 11 nt, Human
cuuaaaaagua

SEQ ID NO: 1962055 - RNA, 14 nt, Human
cuuaaaaaguaacu

SEQ ID NO: 1962056 - RNA, 15 nt, Human
cuuaacauagccaaa

SEQ ID NO: 1962057 - RNA, 19 nt, Human
cuuaacauagccaaaaugu

SEQ ID NO: 1962058 - RNA, 20 nt, Human
cuuaacauagccaaaaugug

SEQ ID NO: 1962059 - RNA, 17 nt, Human
cuuaaccagaucauugu

SEQ ID NO: 1962060 - RNA, 12 nt, Human
cuuaaccaucuu

SEQ ID NO: 1962061 - RNA, 18 nt, Human
cuuaagaauuuugagcag

SEQ ID NO: 1962062 - RNA, 19 nt, Human
cuuaagaaugaguuucuua

SEQ ID NO: 1962063 - RNA, 22 nt, Human
cuuaagaaugaguuucuuagac

SEQ ID NO: 1962064 - RNA, 20 nt, Human
cuuaauucuuagcucauucu

SEQ ID NO: 1962065 - RNA, 16 nt, Human
cuuaauuauugauguu

SEQ ID NO: 1962066 - RNA, 10 nt, Human
cuuaauuauu

SEQ ID NO: 1962067 - RNA, 20 nt, Human
cuuaauauauagcauuuaug

SEQ ID NO: 1962068 - RNA, 19 nt, Human
cuuaauauauagcauuuau

SEQ ID NO: 1962069 - RNA, 19 nt, Human
cuuagaauuaguggcacuu

SEQ ID NO: 1962070 - RNA, 19 nt, Human
cuuagaaucccuguguuaa

SEQ ID NO: 1962071 - RNA, 20 nt, Human
cuuagaaucccuguguuaau

SEQ ID NO: 1962072 - RNA, 16 nt, Human
cuuagaauuauuugca

SEQ ID NO: 1962073 - RNA, 18 nt, Human
cuuagaauuauuugcacu

SEQ ID NO: 1962074 - RNA, 15 nt, Human
cuuagaaucccugug

SEQ ID NO: 1962075 - RNA, 18 nt, Human
cuuagaaucccuguguua

SEQ ID NO: 1962076 - RNA, 18 nt, Human
cuuagaaguuuguuguga

SEQ ID NO: 1962077 - RNA, 21 nt, Human
cuuagacuuuuccaauaugug

SEQ ID NO: 1962078 - RNA, 22 nt, Human
cuuagacuuuuccaauauguga

SEQ ID NO: 1962079 - RNA, 21 nt, Human
cuuagguuggcaaaaaggcag

SEQ ID NO: 1962080 - RNA, 23 nt, Human
cuuagguuggcaaaaaggcagga

SEQ ID NO: 1962081 - RNA, 14 nt, Human
cuuagagcuuuuuu

SEQ ID NO: 1962082 - RNA, 21 nt, Human
cuuagaggcaugggcuugcug

SEQ ID NO: 1962083 - RNA, 23 nt, Human
cuuaguaagcggcucaagcccag

SEQ ID NO: 1962084 - RNA, 20 nt, Human
cuuagaaaaaccaccaccau

SEQ ID NO: 1962085 - RNA, 13 nt, Human
cuuacuguacaug

SEQ ID NO: 1962086 - RNA, 22 nt, Human
cuuagaaaacaauggaaugaga

SEQ ID NO: 1962087 - RNA, 21 nt, Human
cuuagaaaaggugauaaaauc

SEQ ID NO: 1962088 - RNA, 22 nt, Human
cuuagaaaaggugauaaaauca

SEQ ID NO: 1962089 - RNA, 23 nt, Human
cuuagaaaaggugauaaaaucau

SEQ ID NO: 1962090 - RNA, 16 nt, Human
cuuagaaauugcauuu

SEQ ID NO: 1962091 - RNA, 17 nt, Human
cuuagaagucacacagu

SEQ ID NO: 1962092 - RNA, 20 nt, Human
cuuagaagucacacaguauu

SEQ ID NO: 1962093 - RNA, 20 nt, Human
cuuaccugccaggaagccag

SEQ ID NO: 1962094 - RNA, 19 nt, Human
cuuaccuugaacugaaggc

SEQ ID NO: 1962095 - RNA, 18 nt, Human
cuuaccuugguuggaagg

SEQ ID NO: 1962096 - RNA, 15 nt, Human
cuuacugauuaacuc

SEQ ID NO: 1962097 - RNA, 20 nt, Human
cuucaaggauccugagccag

SEQ ID NO: 1962098 - RNA, 19 nt, Human
cuucaaggauccugagcca

SEQ ID NO: 1962099 - RNA, 18 nt, Human
cuucaaggauccugagcc

SEQ ID NO: 1962100 - RNA, 17 nt, Human
cuucaaggauccugagc

SEQ ID NO: 1962101 - RNA, 20 nt, Human
cuucaacugaccagccucca

SEQ ID NO: 1962102 - RNA, 23 nt, Human
cuucaacugaccagccuccaugc

SEQ ID NO: 1962103 - RNA, 17 nt, Human
cuucaacugaccagccu

SEQ ID NO: 1962104 - RNA, 16 nt, Human
cuucaacucccugccc

SEQ ID NO: 1962105 - RNA, 22 nt, Human
cuucaacaaggcuugcugcaga

SEQ ID NO: 1962106 - RNA, 22 nt, Human
cuuagucacugagacagcccgg

SEQ ID NO: 1962107 - RNA, 17 nt, Human
cuuagucaaauguaaug

SEQ ID NO: 1962108 - RNA, 20 nt, Human
cuuagucacugagacagccc

SEQ ID NO: 1962109 - RNA, 21 nt, Human
cuuagucacugagacagcccg

SEQ ID NO: 1962110 - RNA, 15 nt, Human
cuucaaauauuuccc

SEQ ID NO: 1962111 - RNA, 12 nt, Human
cuucaacaaggc

SEQ ID NO: 1962112 - RNA, 19 nt, Human
cuucaacaaggcuugcugc

SEQ ID NO: 1962113 - RNA, 21 nt, Human
cuucaacaaggcuugcugcag

SEQ ID NO: 1962114 - RNA, 23 nt, Human
cuucaaggauccugagccagauu

SEQ ID NO: 1962115 - RNA, 22 nt, Human
cuucaaggauccugagccagau

SEQ ID NO: 1962116 - RNA, 21 nt, Human
cuucaaggauccugagccaga

SEQ ID NO: 1962117 - RNA, 14 nt, Human
cuucacauauugau

SEQ ID NO: 1962118 - RNA, 23 nt, Human
cuucacauauugauuuccguuaa

SEQ ID NO: 1962119 - RNA, 19 nt, Human
cuucagcugacuuuucugu

SEQ ID NO: 1962120 - RNA, 15 nt, Human
cuucagcugacuuuu

SEQ ID NO: 1962121 - RNA, 14 nt, Human
cuucaguaagccgu

SEQ ID NO: 1962122 - RNA, 21 nt, Human
cuucaggaaagcagcaguuuu

SEQ ID NO: 1962123 - RNA, 16 nt, Human
cuucagccucccgagu

SEQ ID NO: 1962124 - RNA, 20 nt, Human
cuucagccucccgaguagcu

SEQ ID NO: 1962125 - RNA, 15 nt, Human
cuucagccugaaaga

SEQ ID NO: 1962126 - RNA, 15 nt, Human
cuucagccucccaca

SEQ ID NO: 1962127 - RNA, 17 nt, Human
cuucagccucccacagu

SEQ ID NO: 1962128 - RNA, 14 nt, Human
cuucagccucccga

SEQ ID NO: 1962129 - RNA, 13 nt, Human
cuucagccuccca

SEQ ID NO: 1962130 - RNA, 14 nt, Human
cuucagccucccac

SEQ ID NO: 1962131 - RNA, 15 nt, Human
cuuccacaagagccc

SEQ ID NO: 1962132 - RNA, 14 nt, Human
cuuccacaagagcc

SEQ ID NO: 1962133 - RNA, 13 nt, Human
cuuccacaagagc

SEQ ID NO: 1962134 - RNA, 12 nt, Human
cuuccaaagcag

SEQ ID NO: 1962135 - RNA, 20 nt, Human
cuucauguucccacuucaaa

SEQ ID NO: 1962136 - RNA, 15 nt, Human
cuucauguucccacu

SEQ ID NO: 1962137 - RNA, 14 nt, Human
cuucagugccaaaa

SEQ ID NO: 1962138 - RNA, 15 nt, Human
cuucaguaagccgug

SEQ ID NO: 1962139 - RNA, 15 nt, Human
cuuccugugugucca

SEQ ID NO: 1962140 - RNA, 23 nt, Human
cuuccuguguguccaaaacugcc

SEQ ID NO: 1962141 - RNA, 17 nt, Human
cuucgcuccugugucuu

SEQ ID NO: 1962142 - RNA, 15 nt, Human
cuucgccaccugggu

SEQ ID NO: 1962143 - RNA, 22 nt, Human
cuucgccaagguuguagcaugg

SEQ ID NO: 1962144 - RNA, 14 nt, Human
cuucgccaccuggg

SEQ ID NO: 1962145 - RNA, 21 nt, Human
cuucgauacaccgggccugga

SEQ ID NO: 1962146 - RNA, 16 nt, Human
cuucgauacaccgggc

SEQ ID NO: 1962147 - RNA, 13 nt, Human
cuuccuuucuuga

SEQ ID NO: 1962148 - RNA, 16 nt, Human
cuucgggcugugcccg

SEQ ID NO: 1962149 - RNA, 16 nt, Human
cuucgguacccaccac

SEQ ID NO: 1962150 - RNA, 19 nt, Human
cuucgguacccaccacaca

SEQ ID NO: 1962151 - RNA, 19 nt, Human
cuucgugacaauguuuaca

SEQ ID NO: 1962152 - RNA, 20 nt, Human
cuucggccuccauccugagg

SEQ ID NO: 1962153 - RNA, 19 nt, Human
cuucgggaggucgaggcag

SEQ ID NO: 1962154 - RNA, 16 nt, Human
cuucggaggaccaggg

SEQ ID NO: 1962155 - RNA, 17 nt, Human
cuucggaggaccagggc

SEQ ID NO: 1962156 - RNA, 14 nt, Human
cuucucauuacuug

SEQ ID NO: 1962157 - RNA, 22 nt, Human
cuucucauuacuuguugccuau

SEQ ID NO: 1962158 - RNA, 17 nt, Human
cuucucaucuugacaga

SEQ ID NO: 1962159 - RNA, 20 nt, Human
cuucucaucuugacagagcc

SEQ ID NO: 1962160 - RNA, 23 nt, Human
cuucucaucuugacagagccugc

SEQ ID NO: 1962161 - RNA, 21 nt, Human
cuucucacugccaugccagcu

SEQ ID NO: 1962162 - RNA, 16 nt, Human
cuucucacugccaugc

SEQ ID NO: 1962163 - RNA, 11 nt, Human
cuuccccauac

SEQ ID NO: 1962164 - RNA, 16 nt, Human
cuuccccauacaaaua

SEQ ID NO: 1962165 - RNA, 12 nt, Human
cuucccccucca

SEQ ID NO: 1962166 - RNA, 15 nt, Human
cuucccccuccaauc

SEQ ID NO: 1962167 - RNA, 12 nt, Human
cuucccauucca

SEQ ID NO: 1962168 - RNA, 16 nt, Human
cuucccauuccauggc

SEQ ID NO: 1962169 - RNA, 12 nt, Human
cuuccagauccu

SEQ ID NO: 1962170 - RNA, 16 nt, Human
cuuccugugacuucag

SEQ ID NO: 1962171 - RNA, 13 nt, Human
cuuccugugacuu

SEQ ID NO: 1962172 - RNA, 14 nt, Human
cuuccucagagggc

SEQ ID NO: 1962173 - RNA, 19 nt, Human
cuuccugcuuccucagagg

SEQ ID NO: 1962174 - RNA, 18 nt, Human
cuuccugcuuccucagag

SEQ ID NO: 1962175 - RNA, 18 nt, Human
cuuccuauaauuuugaua

SEQ ID NO: 1962176 - RNA, 20 nt, Human
cuuccuauaauuuugauagu

SEQ ID NO: 1962177 - RNA, 14 nt, Human
cuuccuauuucaga

SEQ ID NO: 1962178 - RNA, 21 nt, Human
cuuccuauaauuuugauagug

SEQ ID NO: 1962179 - RNA, 16 nt, Human
cuuccuauuucagaag

SEQ ID NO: 1962180 - RNA, 22 nt, Human
cuucccuggguuagacugccag

SEQ ID NO: 1962181 - RNA, 23 nt, Human
cuucccuggguuagacugccagc

SEQ ID NO: 1962182 - RNA, 18 nt, Human
cuucccugguaagaaaaa

SEQ ID NO: 1962183 - RNA, 12 nt, Human
cuucccugguuc

SEQ ID NO: 1962184 - RNA, 13 nt, Human
cuucccugguuca

SEQ ID NO: 1962185 - RNA, 17 nt, Human
cuuccuaguucaucccu

SEQ ID NO: 1962186 - RNA, 24 nt, Human
cuuccuaguucaucccuucucuuc

SEQ ID NO: 1962187 - RNA, 23 nt, Human
cuucccugaacuuccugcuuccu

SEQ ID NO: 1962188 - RNA, 17 nt, Human
cugucugugaagagcaa

SEQ ID NO: 1962189 - RNA, 19 nt, Human
cugucugucccaguuaacu

SEQ ID NO: 1962190 - RNA, 16 nt, Human
cugucugucuggucca

SEQ ID NO: 1962191 - RNA, 12 nt, Human
cugucugcucca

SEQ ID NO: 1962192 - RNA, 14 nt, Human
cugucugcuccagc

SEQ ID NO: 1962193 - RNA, 19 nt, Human
cugucugcuggucacuucu

SEQ ID NO: 1962194 - RNA, 17 nt, Human
cugucugcuccagcucu

SEQ ID NO: 1962195 - RNA, 19 nt, Human
cugucugcuccagcucugg

SEQ ID NO: 1962196 - RNA, 13 nt, Human
cugucuggcacag

SEQ ID NO: 1962197 - RNA, 15 nt, Human
cugucuggcacagcc

SEQ ID NO: 1962198 - RNA, 18 nt, Human
cugucuggcacagccugc

SEQ ID NO: 1962199 - RNA, 23 nt, Human
cugucauuugagcagggcucagc

SEQ ID NO: 1962200 - RNA, 18 nt, Human
cugucugagguugggaga

SEQ ID NO: 1962201 - RNA, 18 nt, Human
cugucaauuacaggaagu

SEQ ID NO: 1962202 - RNA, 21 nt, Human
cugucauuugagcagggcuca

SEQ ID NO: 1962203 - RNA, 22 nt, Human
cugucauuugagcagggcucag

SEQ ID NO: 1962204 - RNA, 11 nt, Human
cugucuuucca

SEQ ID NO: 1962205 - RNA, 13 nt, Human
cugucuuuccacu

SEQ ID NO: 1962206 - RNA, 15 nt, Human
cugucuuuccacucu

SEQ ID NO: 1962207 - RNA, 16 nt, Human
cugucuuuccacucug

SEQ ID NO: 1962208 - RNA, 17 nt, Human
cugucuuuccacucugg

SEQ ID NO: 1962209 - RNA, 18 nt, Human
cugucuuuccacucugga

SEQ ID NO: 1962210 - RNA, 19 nt, Human
cugucuuuccacucuggau

SEQ ID NO: 1962211 - RNA, 23 nt, Human
cugucuucugcuuuguugugugc

SEQ ID NO: 1962212 - RNA, 16 nt, Human
cugucuucugcuuugu

SEQ ID NO: 1962213 - RNA, 18 nt, Human
cugucuucugcuuuguug

SEQ ID NO: 1962214 - RNA, 14 nt, Human
cugucuuucuugcu

SEQ ID NO: 1962215 - RNA, 15 nt, Human
cugucuuucuugcuc

SEQ ID NO: 1962216 - RNA, 17 nt, Human
cugucuuucuugcuccc

SEQ ID NO: 1962217 - RNA, 18 nt, Human
cugucuuucuugcucccu

SEQ ID NO: 1962218 - RNA, 20 nt, Human
cugucuuucuugcucccuga

SEQ ID NO: 1962219 - RNA, 22 nt, Human
cugucuuucuugcucccugacu

SEQ ID NO: 1962220 - RNA, 23 nt, Human
cugucuuucuugcucccugacug

SEQ ID NO: 1962221 - RNA, 15 nt, Human
cugugaaaggaaaga

SEQ ID NO: 1962222 - RNA, 21 nt, Human
cugucuuuuuucuaaaguaaa

SEQ ID NO: 1962223 - RNA, 18 nt, Human
cugucuucaguaagccgu

SEQ ID NO: 1962224 - RNA, 14 nt, Human
cugucuuaauuuuc

SEQ ID NO: 1962225 - RNA, 18 nt, Human
cugucuguuguauucauu

SEQ ID NO: 1962226 - RNA, 19 nt, Human
cugucuguuguauucauug

SEQ ID NO: 1962227 - RNA, 20 nt, Human
cugucuucauccccucagaa

SEQ ID NO: 1962228 - RNA, 13 nt, Human
cugucuucugcuu

SEQ ID NO: 1962229 - RNA, 14 nt, Human
cugucuucugcuuu

SEQ ID NO: 1962230 - RNA, 15 nt, Human
cugucuucugcuuug

SEQ ID NO: 1962231 - RNA, 23 nt, Human
cugugcagaagggagcuggcucc

SEQ ID NO: 1962232 - RNA, 14 nt, Human
cugugccaugugcc

SEQ ID NO: 1962233 - RNA, 14 nt, Human
cugugccagcccag

SEQ ID NO: 1962234 - RNA, 16 nt, Human
cugugccagcccagag

SEQ ID NO: 1962235 - RNA, 14 nt, Human
cugugccaggugaa

SEQ ID NO: 1962236 - RNA, 19 nt, Human
cugugcccuaaaguguauu

SEQ ID NO: 1962237 - RNA, 18 nt, Human
cugugccccuggccuugg

SEQ ID NO: 1962238 - RNA, 22 nt, Human
cugugccccuggccuugggauc

SEQ ID NO: 1962239 - RNA, 15 nt, Human
cugugccccuggccu

SEQ ID NO: 1962240 - RNA, 17 nt, Human
cugugcccacccuccac

SEQ ID NO: 1962241 - RNA, 23 nt, Human
cugugcccacccuccacucuccu

SEQ ID NO: 1962242 - RNA, 19 nt, Human
cugugcccagaauacugau

SEQ ID NO: 1962243 - RNA, 22 nt, Human
cugugccauuuuguauuuuacu

SEQ ID NO: 1962244 - RNA, 15 nt, Human
cugugccaugugcca

SEQ ID NO: 1962245 - RNA, 17 nt, Human
cugucuuuucuuugcca

SEQ ID NO: 1962246 - RNA, 21 nt, Human
cugucuuuucuuugccaucuc

SEQ ID NO: 1962247 - RNA, 19 nt, Human
cugugaaaaaaaaaaugcu

SEQ ID NO: 1962248 - RNA, 22 nt, Human
cugugaaaggaaagagggaggu

SEQ ID NO: 1962249 - RNA, 16 nt, Human
cugugaaaggaaagag

SEQ ID NO: 1962250 - RNA, 13 nt, Human
cugugagcugcac

SEQ ID NO: 1962251 - RNA, 21 nt, Human
cugugauggggcccugccucc

SEQ ID NO: 1962252 - RNA, 16 nt, Human
cugugauggggcccug

SEQ ID NO: 1962253 - RNA, 23 nt, Human
cugugauggggcccugccuccuu

SEQ ID NO: 1962254 - RNA, 15 nt, Human
cugugauggggcccu

SEQ ID NO: 1962255 - RNA, 15 nt, Human
cuguguguccaaaac

SEQ ID NO: 1962256 - RNA, 19 nt, Human
cuguguguccaaaacugcc

SEQ ID NO: 1962257 - RNA, 21 nt, Human
cuguguguccaaaacugccuc

SEQ ID NO: 1962258 - RNA, 22 nt, Human
cuguguguccaaaacugccuca

SEQ ID NO: 1962259 - RNA, 14 nt, Human
cugugugcucagga

SEQ ID NO: 1962260 - RNA, 20 nt, Human
cugugucuuuuuucacuaca

SEQ ID NO: 1962261 - RNA, 17 nt, Human
cugugguuggcugggaa

SEQ ID NO: 1962262 - RNA, 18 nt, Human
cugugguuggcugggaaa

SEQ ID NO: 1962263 - RNA, 19 nt, Human
cugugguuggcugggaaau

SEQ ID NO: 1962264 - RNA, 20 nt, Human
cugugguuugggggagaaga

SEQ ID NO: 1962265 - RNA, 21 nt, Human
cuguguguguguauguggggg

SEQ ID NO: 1962266 - RNA, 15 nt, Human
cuguguuaauuuaag

SEQ ID NO: 1962267 - RNA, 16 nt, Human
cuguguuaauuuaagu

SEQ ID NO: 1962268 - RNA, 21 nt, Human
cuguguuaauuuaaguuuuga

SEQ ID NO: 1962269 - RNA, 21 nt, Human
cuguguuauuauagagcagaa

SEQ ID NO: 1962270 - RNA, 22 nt, Human
cuguguuauuauagagcagaaa

SEQ ID NO: 1962271 - RNA, 23 nt, Human
cuguguuauuauagagcagaaau

SEQ ID NO: 1962272 - RNA, 18 nt, Human
cuguguguguguaugugg

SEQ ID NO: 1962273 - RNA, 20 nt, Human
cuguguguguguaugugggg

SEQ ID NO: 1962274 - RNA, 18 nt, Human
cuguguguuuaugugugu

SEQ ID NO: 1962275 - RNA, 20 nt, Human
cuguguguuuaugugugugu

SEQ ID NO: 1962276 - RNA, 15 nt, Human
cuguguguguguaug

SEQ ID NO: 1962277 - RNA, 16 nt, Human
cuguguguguguaugu

SEQ ID NO: 1962278 - RNA, 14 nt, Human
cuguguguguguau

SEQ ID NO: 1962279 - RNA, 18 nt, Human
cugugugugcgccuacag

SEQ ID NO: 1962280 - RNA, 24 nt, Human
cuguggaucaaauccagccugcug

SEQ ID NO: 1962281 - RNA, 14 nt, Human
cuguggaucaaauc

SEQ ID NO: 1962282 - RNA, 23 nt, Human
cuguggagacugcuccugagccc

SEQ ID NO: 1962283 - RNA, 12 nt, Human
cugugccucugc

SEQ ID NO: 1962284 - RNA, 13 nt, Human
cugugccucugcc

SEQ ID NO: 1962285 - RNA, 14 nt, Human
cugugccucugccu

SEQ ID NO: 1962286 - RNA, 15 nt, Human
cugugccucugccug

SEQ ID NO: 1962287 - RNA, 16 nt, Human
cugugccucugccugu

SEQ ID NO: 1962288 - RNA, 17 nt, Human
cugugccucugccuguc

SEQ ID NO: 1962289 - RNA, 14 nt, Human
cuguggagacugcu

SEQ ID NO: 1962290 - RNA, 17 nt, Human
cuguggagacugcuccu

SEQ ID NO: 1962291 - RNA, 19 nt, Human
cuguggagacugcuccuga

SEQ ID NO: 1962292 - RNA, 21 nt, Human
cuguggagacugcuccugagc

SEQ ID NO: 1962293 - RNA, 22 nt, Human
cuguggagacugcuccugagcc

SEQ ID NO: 1962294 - RNA, 22 nt, Human
cuguggguuucuaaagcugcca

SEQ ID NO: 1962295 - RNA, 19 nt, Human
cuguggucggugccagagg

SEQ ID NO: 1962296 - RNA, 21 nt, Human
cuguggguuucuaaagcugcc

SEQ ID NO: 1962297 - RNA, 17 nt, Human
cugugggcacaggucag

SEQ ID NO: 1962298 - RNA, 18 nt, Human
cugugggcaaaagagugu

SEQ ID NO: 1962299 - RNA, 21 nt, Human
cugugggcacaggucaggcua

SEQ ID NO: 1962300 - RNA, 19 nt, Human
cuguggccucccugcucua

SEQ ID NO: 1962301 - RNA, 14 nt, Human
cuguggccugccag

SEQ ID NO: 1962302 - RNA, 16 nt, Human
cuguggccugccaguc

SEQ ID NO: 1962303 - RNA, 20 nt, Human
cugggcuuuuguuuugcuuu

SEQ ID NO: 1962304 - RNA, 21 nt, Human
cugggcuuuuguuuugcuuuu

SEQ ID NO: 1962305 - RNA, 16 nt, Human
cugggggccucuucug

SEQ ID NO: 1962306 - RNA, 14 nt, Human
cugggggcugggca

SEQ ID NO: 1962307 - RNA, 18 nt, Human
cugggggcugggcagagg

SEQ ID NO: 1962308 - RNA, 18 nt, Human
cugggcuugucuguagau

SEQ ID NO: 1962309 - RNA, 22 nt, Human
cugggcuuggggaccagagcug

SEQ ID NO: 1962310 - RNA, 15 nt, Human
cugggcuucaguggc

SEQ ID NO: 1962311 - RNA, 13 nt, Human
cugggcugggcac

SEQ ID NO: 1962312 - RNA, 22 nt, Human
cugggcugggcacugcucucac

SEQ ID NO: 1962313 - RNA, 12 nt, Human
cugggcugggca

SEQ ID NO: 1962314 - RNA, 17 nt, Human
cugguaagaaaaagcaa

SEQ ID NO: 1962315 - RNA, 18 nt, Human
cugguaagaaaaagcaaa

SEQ ID NO: 1962316 - RNA, 23 nt, Human
cugguaagaaaaagcaaaaggca

SEQ ID NO: 1962317 - RNA, 19 nt, Human
cugguaucuaauucuuuaa

SEQ ID NO: 1962318 - RNA, 16 nt, Human
cugggucgcccuggac

SEQ ID NO: 1962319 - RNA, 15 nt, Human
cugggucgcccugga

SEQ ID NO: 1962320 - RNA, 13 nt, Human
cugguaaaaugaa

SEQ ID NO: 1962321 - RNA, 15 nt, Human
cugguaaaaugaaga

SEQ ID NO: 1962322 - RNA, 20 nt, Human
cuggguuuucuuaaccaucu

SEQ ID NO: 1962323 - RNA, 16 nt, Human
cugguaaaaugaagaa

SEQ ID NO: 1962324 - RNA, 17 nt, Human
cugguaaaaugaagaau

SEQ ID NO: 1962325 - RNA, 19 nt, Human
cugguaaaaugaagaauuu

SEQ ID NO: 1962326 - RNA, 22 nt, Human
cugguaaaaugaagaauuuaaa

SEQ ID NO: 1962327 - RNA, 14 nt, Human
cugguaagaaaaag

SEQ ID NO: 1962328 - RNA, 20 nt, Human
cuggggguucuuucuuccuc

SEQ ID NO: 1962329 - RNA, 23 nt, Human
cuggggguucuuucuuccucugc

SEQ ID NO: 1962330 - RNA, 13 nt, Human
cugggucgcccug

SEQ ID NO: 1962331 - RNA, 16 nt, Human
cuggguccccagcccu

SEQ ID NO: 1962332 - RNA, 23 nt, Human
cugggccccugccucucugcagg

SEQ ID NO: 1962333 - RNA, 20 nt, Human
cugggccccugccucucugc

SEQ ID NO: 1962334 - RNA, 19 nt, Human
cugggccccugccucucug

SEQ ID NO: 1962335 - RNA, 23 nt, Human
cugcuccaaccgggaugggagcc

SEQ ID NO: 1962336 - RNA, 18 nt, Human
cugggauuacaggcguga

SEQ ID NO: 1962337 - RNA, 21 nt, Human
cugggauuacaagcgugagcc

SEQ ID NO: 1962338 - RNA, 17 nt, Human
cugggcccgauuuggua

SEQ ID NO: 1962339 - RNA, 12 nt, Human
cugggccuggcu

SEQ ID NO: 1962340 - RNA, 14 nt, Human
cugggccuggcucc

SEQ ID NO: 1962341 - RNA, 20 nt, Human
cugggccuggcucccucacu

SEQ ID NO: 1962342 - RNA, 22 nt, Human
cugggccuggcucccucacucu

SEQ ID NO: 1962343 - RNA, 23 nt, Human
cugggccuggcucccucacucuc

SEQ ID NO: 1962344 - RNA, 20 nt, Human
cugggcugacugggccaggg

SEQ ID NO: 1962345 - RNA, 12 nt, Human
cuggugguucac

SEQ ID NO: 1962346 - RNA, 20 nt, Human
cuggugguucacucuuggag

SEQ ID NO: 1962347 - RNA, 21 nt, Human
cuggugguucacucuuggagc

SEQ ID NO: 1962348 - RNA, 23 nt, Human
cuggugguucacucuuggagccu

SEQ ID NO: 1962349 - RNA, 18 nt, Human
cugguggcagcucaccuc

SEQ ID NO: 1962350 - RNA, 17 nt, Human
cugguggcagcucaccu

SEQ ID NO: 1962351 - RNA, 20 nt, Human
cugguggcagcucaccucuc

SEQ ID NO: 1962352 - RNA, 15 nt, Human
cugguggcagcugcg

SEQ ID NO: 1962353 - RNA, 14 nt, Human
cugguggcaguggg

SEQ ID NO: 1962354 - RNA, 18 nt, Human
cugguggcagugggagcu

SEQ ID NO: 1962355 - RNA, 22 nt, Human
cuguacagagcccacgccccca

SEQ ID NO: 1962356 - RNA, 18 nt, Human
cuguacagagcccacgcc

SEQ ID NO: 1962357 - RNA, 15 nt, Human
cuguacagagcccac

SEQ ID NO: 1962358 - RNA, 14 nt, Human
cuguacagagccca

SEQ ID NO: 1962359 - RNA, 14 nt, Human
cuguaauuugugau

SEQ ID NO: 1962360 - RNA, 15 nt, Human
cuguaauuugugaua

SEQ ID NO: 1962361 - RNA, 17 nt, Human
cuguaauuauuugaaug

SEQ ID NO: 1962362 - RNA, 16 nt, Human
cuguaauuauuugaau

SEQ ID NO: 1962363 - RNA, 21 nt, Human
cugguuagagguucccuuuga

SEQ ID NO: 1962364 - RNA, 22 nt, Human
cugguuagagguucccuuugac

SEQ ID NO: 1962365 - RNA, 19 nt, Human
cuguaauccuagcacuuug

SEQ ID NO: 1962366 - RNA, 21 nt, Human
cuguaucccaugagccucagc

SEQ ID NO: 1962367 - RNA, 22 nt, Human
cuguaucccaugagccucagca

SEQ ID NO: 1962368 - RNA, 17 nt, Human
cuguauuagucacagag

SEQ ID NO: 1962369 - RNA, 19 nt, Human
cuguauuagucacagagau

SEQ ID NO: 1962370 - RNA, 18 nt, Human
cuguauucccauaucaaa

SEQ ID NO: 1962371 - RNA, 12 nt, Human
cuguauucagca

SEQ ID NO: 1962372 - RNA, 20 nt, Human
cuguaucccaugagccucag

SEQ ID NO: 1962373 - RNA, 19 nt, Human
cuguauaaaggugugcugu

SEQ ID NO: 1962374 - RNA, 20 nt, Human
cuguauaaaggugugcugug

SEQ ID NO: 1962375 - RNA, 21 nt, Human
cuguauaaaggugugcugugu

SEQ ID NO: 1962376 - RNA, 13 nt, Human
cugucaauuacag

SEQ ID NO: 1962377 - RNA, 16 nt, Human
cugucaauuacaggaa

SEQ ID NO: 1962378 - RNA, 15 nt, Human
cugucaauuacagga

SEQ ID NO: 1962379 - RNA, 20 nt, Human
cuguauuuuguuuuugucuu

SEQ ID NO: 1962380 - RNA, 14 nt, Human
cuguauuguaacua

SEQ ID NO: 1962381 - RNA, 17 nt, Human
cuguacaugaaaacaca

SEQ ID NO: 1962382 - RNA, 20 nt, Human
cuguacaugaaaacacauuu

SEQ ID NO: 1962383 - RNA, 21 nt, Human
cuguacaugaaaacacauuuu

SEQ ID NO: 1962384 - RNA, 14 nt, Human
cuguacgucugaca

SEQ ID NO: 1962385 - RNA, 15 nt, Human
cuguacgucugacag

SEQ ID NO: 1962386 - RNA, 16 nt, Human
cuguacgucugacagg

SEQ ID NO: 1962387 - RNA, 18 nt, Human
cuguacgucugacaggca

SEQ ID NO: 1962388 - RNA, 14 nt, Human
cuguacuccuccca

SEQ ID NO: 1962389 - RNA, 19 nt, Human
cuguacgucugacaggcaa

SEQ ID NO: 1962390 - RNA, 20 nt, Human
cuguacgucugacaggcaau

SEQ ID NO: 1962391 - RNA, 15 nt, Human
cuguacuccucccag

SEQ ID NO: 1962392 - RNA, 16 nt, Human
cuguacuccucccagg

SEQ ID NO: 1962393 - RNA, 19 nt, Human
cuguacuccucccaggcgc

SEQ ID NO: 1962394 - RNA, 21 nt, Human
cuguacuccucccaggcgccc

SEQ ID NO: 1962395 - RNA, 15 nt, Human
ccuaaaauaagaaua

SEQ ID NO: 1962396 - RNA, 13 nt, Human
ccuaaaaggccca

SEQ ID NO: 1962397 - RNA, 14 nt, Human
ccuaaaaggcccag

SEQ ID NO: 1962398 - RNA, 15 nt, Human
ccuaaaaggcccaga

SEQ ID NO: 1962399 - RNA, 17 nt, Human
ccuaaaaggcccagaga

SEQ ID NO: 1962400 - RNA, 18 nt, Human
ccuaaaagcacacucauc

SEQ ID NO: 1962401 - RNA, 17 nt, Human
ccuaaaagcacacucau

SEQ ID NO: 1962402 - RNA, 18 nt, Human
ccguguaggaaccugcac

SEQ ID NO: 1962403 - RNA, 18 nt, Human
ccuaaauauauuuuaaga

SEQ ID NO: 1962404 - RNA, 14 nt, Human
ccuaaaguguauuu

SEQ ID NO: 1962405 - RNA, 16 nt, Human
ccuaaauauauuuuaa

SEQ ID NO: 1962406 - RNA, 15 nt, Human
ccuaaaauucagugg

SEQ ID NO: 1962407 - RNA, 15 nt, Human
ccuacaagacacagu

SEQ ID NO: 1962408 - RNA, 11 nt, Human
ccuacacagga

SEQ ID NO: 1962409 - RNA, 15 nt, Human
ccuacacaggacagg

SEQ ID NO: 1962410 - RNA, 17 nt, Human
ccuacacaggacagggg

SEQ ID NO: 1962411 - RNA, 23 nt, Human
ccuacacaggacagggguuccuu

SEQ ID NO: 1962412 - RNA, 23 nt, Human
ccuaguuccaccaucaagccacc

SEQ ID NO: 1962413 - RNA, 21 nt, Human
ccuaguuccaccaucaagcca

SEQ ID NO: 1962414 - RNA, 13 nt, Human
ccuaguuccacca

SEQ ID NO: 1962415 - RNA, 18 nt, Human
ccuaguucaucccuucuc

SEQ ID NO: 1962416 - RNA, 21 nt, Human
ccuaguucaucccuucucuuc

SEQ ID NO: 1962417 - RNA, 22 nt, Human
ccuaguucaucccuucucuucc

SEQ ID NO: 1962418 - RNA, 14 nt, Human
ccuauaaaucuaau

SEQ ID NO: 1962419 - RNA, 18 nt, Human
ccuauaaaucuaaugaca

SEQ ID NO: 1962420 - RNA, 18 nt, Human
ccuauaacacugugaaga

SEQ ID NO: 1962421 - RNA, 20 nt, Human
ccuauaacacugugaagagc

SEQ ID NO: 1962422 - RNA, 12 nt, Human
ccuauaccauuu

SEQ ID NO: 1962423 - RNA, 23 nt, Human
ccuauaccauuuccguaauucuu

SEQ ID NO: 1962424 - RNA, 22 nt, Human
ccuauauuguuuucaguguaca

SEQ ID NO: 1962425 - RNA, 18 nt, Human
ccuauauuguuuucagug

SEQ ID NO: 1962426 - RNA, 13 nt, Human
ccuacuuccugug

SEQ ID NO: 1962427 - RNA, 21 nt, Human
ccuacuuccccuuccuaauuc

SEQ ID NO: 1962428 - RNA, 19 nt, Human
ccuaccuaacccagaaaau

SEQ ID NO: 1962429 - RNA, 15 nt, Human
ccuacuuccugugac

SEQ ID NO: 1962430 - RNA, 22 nt, Human
ccuagggcauuguaucugucuu

SEQ ID NO: 1962431 - RNA, 17 nt, Human
ccuacuuuuaaagaauu

SEQ ID NO: 1962432 - RNA, 22 nt, Human
ccuaccgagucucuucuccacu

SEQ ID NO: 1962433 - RNA, 23 nt, Human
ccuaccgagucucuucuccacug

SEQ ID NO: 1962434 - RNA, 20 nt, Human
ccuaccacccgguccccacu

SEQ ID NO: 1962435 - RNA, 15 nt, Human
ccggcuuucaggagc

SEQ ID NO: 1962436 - RNA, 20 nt, Human
ccgggaagggggcugggaca

SEQ ID NO: 1962437 - RNA, 18 nt, Human
ccggcuggccuggccccu

SEQ ID NO: 1962438 - RNA, 17 nt, Human
ccggcuggccuggcccc

SEQ ID NO: 1962439 - RNA, 19 nt, Human
ccgcuuucuacccagcgag

SEQ ID NO: 1962440 - RNA, 15 nt, Human
ccggcuggccuggcc

SEQ ID NO: 1962441 - RNA, 12 nt, Human
ccgcuuucuacc

SEQ ID NO: 1962442 - RNA, 15 nt, Human
ccgcucagcccuccc

SEQ ID NO: 1962443 - RNA, 19 nt, Human
ccgcucagcccucccugcc

SEQ ID NO: 1962444 - RNA, 21 nt, Human
ccgcucagcccucccugcccc

SEQ ID NO: 1962445 - RNA, 22 nt, Human
ccgcucagcccucccugccccu

SEQ ID NO: 1962446 - RNA, 11 nt, Human
ccgcuccagag

SEQ ID NO: 1962447 - RNA, 12 nt, Human
ccgcuccagagu

SEQ ID NO: 1962448 - RNA, 15 nt, Human
ccgcuccagagucag

SEQ ID NO: 1962449 - RNA, 15 nt, Human
ccggggaaaggcaag

SEQ ID NO: 1962450 - RNA, 13 nt, Human
ccgggucuuccua

SEQ ID NO: 1962451 - RNA, 21 nt, Human
ccgggucuuccuacucuucuc

SEQ ID NO: 1962452 - RNA, 12 nt, Human
ccggguuccagc

SEQ ID NO: 1962453 - RNA, 15 nt, Human
ccggguuccagcacc

SEQ ID NO: 1962454 - RNA, 22 nt, Human
ccgggcucugccucccaucacc

SEQ ID NO: 1962455 - RNA, 13 nt, Human
ccgggcugggagc

SEQ ID NO: 1962456 - RNA, 18 nt, Human
ccgggcugggagcucugc

SEQ ID NO: 1962457 - RNA, 19 nt, Human
ccgggcugggagcucugca

SEQ ID NO: 1962458 - RNA, 16 nt, Human
ccgggcguggugguga

SEQ ID NO: 1962459 - RNA, 19 nt, Human
ccgggacguggcaccuccu

SEQ ID NO: 1962460 - RNA, 20 nt, Human
ccgggcuacccgugagcccu

SEQ ID NO: 1962461 - RNA, 20 nt, Human
ccgggcgcgguggcucacgc

SEQ ID NO: 1962462 - RNA, 16 nt, Human
cccugguuuccugccc

SEQ ID NO: 1962463 - RNA, 17 nt, Human
cccugguuuccugcccu

SEQ ID NO: 1962464 - RNA, 20 nt, Human
cccugguggcagcucaccuc

SEQ ID NO: 1962465 - RNA, 14 nt, Human
ccgaggccuucucu

SEQ ID NO: 1962466 - RNA, 18 nt, Human
cccugguuuccugcccug

SEQ ID NO: 1962467 - RNA, 19 nt, Human
cccugguuuccugcccugg

SEQ ID NO: 1962468 - RNA, 14 nt, Human
ccgcaagcaccauc

SEQ ID NO: 1962469 - RNA, 12 nt, Human
ccgauuuuucca

SEQ ID NO: 1962470 - RNA, 20 nt, Human
ccgaguagcugggacuacag

SEQ ID NO: 1962471 - RNA, 17 nt, Human
ccgaguagcugggacua

SEQ ID NO: 1962472 - RNA, 23 nt, Human
ccgcuaagagggagggagggcuc

SEQ ID NO: 1962473 - RNA, 11 nt, Human
ccgcucagccc

SEQ ID NO: 1962474 - RNA, 12 nt, Human
ccgcucagcccu

SEQ ID NO: 1962475 - RNA, 13 nt, Human
ccgcucagcccuc

SEQ ID NO: 1962476 - RNA, 22 nt, Human
ccgcgugaucaaagccacacuc

SEQ ID NO: 1962477 - RNA, 19 nt, Human
ccgcgucgcccucccaggc

SEQ ID NO: 1962478 - RNA, 16 nt, Human
ccgcgggcacugccgc

SEQ ID NO: 1962479 - RNA, 17 nt, Human
ccgcgucgcccucccag

SEQ ID NO: 1962480 - RNA, 21 nt, Human
ccgcuaagagggagggagggc

SEQ ID NO: 1962481 - RNA, 17 nt, Human
ccgcgcgcgccccgaaa

SEQ ID NO: 1962482 - RNA, 14 nt, Human
ccgcacugggcuug

SEQ ID NO: 1962483 - RNA, 19 nt, Human
ccgcacugggcuuggggac

SEQ ID NO: 1962484 - RNA, 17 nt, Human
ccucccgaauagcuggg

SEQ ID NO: 1962485 - RNA, 18 nt, Human
ccucucauuccagaggaa

SEQ ID NO: 1962486 - RNA, 16 nt, Human
ccucuaggaggucucu

SEQ ID NO: 1962487 - RNA, 11 nt, Human
ccucuagcuga

SEQ ID NO: 1962488 - RNA, 12 nt, Human
ccucuagcugaa

SEQ ID NO: 1962489 - RNA, 23 nt, Human
ccucuagcugaauugagccuaaa

SEQ ID NO: 1962490 - RNA, 14 nt, Human
ccuccuguggccug

SEQ ID NO: 1962491 - RNA, 17 nt, Human
ccuccuguggccugcca

SEQ ID NO: 1962492 - RNA, 12 nt, Human
ccuccuucccac

SEQ ID NO: 1962493 - RNA, 14 nt, Human
ccucgguguggaga

SEQ ID NO: 1962494 - RNA, 16 nt, Human
ccucggugccuuccuc

SEQ ID NO: 1962495 - RNA, 15 nt, Human
ccucguuggaagagg

SEQ ID NO: 1962496 - RNA, 20 nt, Human
ccucguuggaagaggaacag

SEQ ID NO: 1962497 - RNA, 18 nt, Human
ccucgguguggagaagcg

SEQ ID NO: 1962498 - RNA, 13 nt, Human
ccucuagcccugc

SEQ ID NO: 1962499 - RNA, 17 nt, Human
ccucuagcccugcccgg

SEQ ID NO: 1962500 - RNA, 18 nt, Human
ccucuagcccugcccgga

SEQ ID NO: 1962501 - RNA, 10 nt, Human
ccucuagcug

SEQ ID NO: 1962502 - RNA, 19 nt, Human
ccucuagaauuuuaagccu

SEQ ID NO: 1962503 - RNA, 23 nt, Human
ccuccugccucgaacuggcugca

SEQ ID NO: 1962504 - RNA, 17 nt, Human
ccuccugacaccccacu

SEQ ID NO: 1962505 - RNA, 14 nt, Human
ccuccugggcuaag

SEQ ID NO: 1962506 - RNA, 14 nt, Human
ccuccugcugccag

SEQ ID NO: 1962507 - RNA, 16 nt, Human
ccuccugcugccagua

SEQ ID NO: 1962508 - RNA, 19 nt, Human
ccuccugcugccaguacca

SEQ ID NO: 1962509 - RNA, 15 nt, Human
ccuccugacacccca

SEQ ID NO: 1962510 - RNA, 10 nt, Human
ccucccuccc

SEQ ID NO: 1962511 - RNA, 18 nt, Human
ccucccugccccucccuu

SEQ ID NO: 1962512 - RNA, 21 nt, Human
ccucccugccccucccuucaa

SEQ ID NO: 1962513 - RNA, 14 nt, Human
ccuccucagaucuu

SEQ ID NO: 1962514 - RNA, 22 nt, Human
ccucccugcugucauugcuucu

SEQ ID NO: 1962515 - RNA, 14 nt, Human
ccucccugcuguca

SEQ ID NO: 1962516 - RNA, 13 nt, Human
ccucccugccccu

SEQ ID NO: 1962517 - RNA, 22 nt, Human
ccucccugccccucccuucaac

SEQ ID NO: 1962518 - RNA, 24 nt, Human
ccucccugccccucccuucaacca

SEQ ID NO: 1962519 - RNA, 19 nt, Human
ccucccgaguagcugggac

SEQ ID NO: 1962520 - RNA, 14 nt, Human
ccucccggcccugc

SEQ ID NO: 1962521 - RNA, 15 nt, Human
ccucccggcccugcc

SEQ ID NO: 1962522 - RNA, 20 nt, Human
ccucccgaguagcugggacu

SEQ ID NO: 1962523 - RNA, 21 nt, Human
ccucccgaguagcugggacua

SEQ ID NO: 1962524 - RNA, 18 nt, Human
ccucccccagccacuccc

SEQ ID NO: 1962525 - RNA, 14 nt, Human
ccuccccuucccag

SEQ ID NO: 1962526 - RNA, 14 nt, Human
ccuccccuugccag

SEQ ID NO: 1962527 - RNA, 22 nt, Human
ccuccccuugccagcugcugag

SEQ ID NO: 1962528 - RNA, 22 nt, Human
ccuccagagcugcggugucucc

SEQ ID NO: 1962529 - RNA, 21 nt, Human
ccuccaggugcacaagcucca

SEQ ID NO: 1962530 - RNA, 19 nt, Human
ccuccaggugcacaagcuc

SEQ ID NO: 1962531 - RNA, 22 nt, Human
ccuccagggcucaacacuguga

SEQ ID NO: 1962532 - RNA, 22 nt, Human
ccuccaggugcacaagcuccaa

SEQ ID NO: 1962533 - RNA, 14 nt, Human
ccuccauccugagg

SEQ ID NO: 1962534 - RNA, 18 nt, Human
ccuccaucuaaacugccc

SEQ ID NO: 1962535 - RNA, 23 nt, Human
ccuccaugugggcuaguugggcu

SEQ ID NO: 1962536 - RNA, 14 nt, Human
ccuccaugcugccu

SEQ ID NO: 1962537 - RNA, 15 nt, Human
ccucccaaagugcug

SEQ ID NO: 1962538 - RNA, 15 nt, Human
ccuccaugcugccuc

SEQ ID NO: 1962539 - RNA, 16 nt, Human
ccucccaaagugcugg

SEQ ID NO: 1962540 - RNA, 23 nt, Human
ccuccaaucccaccaacccucag

SEQ ID NO: 1962541 - RNA, 19 nt, Human
ccuccacacccgcgccccg

SEQ ID NO: 1962542 - RNA, 20 nt, Human
ccucauccucauacccaccc

SEQ ID NO: 1962543 - RNA, 13 nt, Human
ccucauccucaua

SEQ ID NO: 1962544 - RNA, 21 nt, Human
ccucaucuccccaucauuggu

SEQ ID NO: 1962545 - RNA, 13 nt, Human
ccucauacccacc

SEQ ID NO: 1962546 - RNA, 17 nt, Human
ccucauagcccucaccc

SEQ ID NO: 1962547 - RNA, 18 nt, Human
ccucauagcccucacccu

SEQ ID NO: 1962548 - RNA, 20 nt, Human
ccucauaguaugguggcugg

SEQ ID NO: 1962549 - RNA, 21 nt, Human
ccucauagcccucacccuggg

SEQ ID NO: 1962550 - RNA, 22 nt, Human
ccucauagcccucacccugggg

SEQ ID NO: 1962551 - RNA, 14 nt, Human
ccucaucaccaacg

SEQ ID NO: 1962552 - RNA, 13 nt, Human
ccucaucaccaac

SEQ ID NO: 1962553 - RNA, 21 nt, Human
ccucauaguaugguggcuggg

SEQ ID NO: 1962554 - RNA, 22 nt, Human
ccucauaguaugguggcugggu

SEQ ID NO: 1962555 - RNA, 20 nt, Human
ccucagucuggcccuuccuu

SEQ ID NO: 1962556 - RNA, 11 nt, Human
ccucagugcca

SEQ ID NO: 1962557 - RNA, 12 nt, Human
ccucauacccac

SEQ ID NO: 1962558 - RNA, 19 nt, Human
ccucagucuggcccuuccu

SEQ ID NO: 1962559 - RNA, 19 nt, Human
ccuaugcagagguccacaa

SEQ ID NO: 1962560 - RNA, 17 nt, Human
cccugguggcagcucac

SEQ ID NO: 1962561 - RNA, 16 nt, Human
cccugguggcagcuca

SEQ ID NO: 1962562 - RNA, 15 nt, Human
cccugguggcagcuc

SEQ ID NO: 1962563 - RNA, 20 nt, Human
cccugguaagaaaaagcaaa

SEQ ID NO: 1962564 - RNA, 23 nt, Human
cccuggguuagacugccagcucu

SEQ ID NO: 1962565 - RNA, 15 nt, Human
cccugguaagaaaaa

SEQ ID NO: 1962566 - RNA, 15 nt, Human
cccuggacugugugc

SEQ ID NO: 1962567 - RNA, 18 nt, Human
cccuggcuuuucacugcu

SEQ ID NO: 1962568 - RNA, 17 nt, Human
cccuggcuuuucacugc

SEQ ID NO: 1962569 - RNA, 19 nt, Human
cccuggcuuuucacugcug

SEQ ID NO: 1962570 - RNA, 22 nt, Human
cccuggcuuuucacugcuggcu

SEQ ID NO: 1962571 - RNA, 18 nt, Human
cccugggaggcagugaug

SEQ ID NO: 1962572 - RNA, 19 nt, Human
cccuggaccccagccucaa

SEQ ID NO: 1962573 - RNA, 17 nt, Human
cccugcccaccuggccu

SEQ ID NO: 1962574 - RNA, 14 nt, Human
cccugcccaccugg

SEQ ID NO: 1962575 - RNA, 13 nt, Human
cccugccagaccc

SEQ ID NO: 1962576 - RNA, 21 nt, Human
cccugccagacccccuggaga

SEQ ID NO: 1962577 - RNA, 13 nt, Human
cccugcccaccug

SEQ ID NO: 1962578 - RNA, 21 nt, Human
cccugcuggguguggcgcagc

SEQ ID NO: 1962579 - RNA, 16 nt, Human
cccugcuggguguggc

SEQ ID NO: 1962580 - RNA, 18 nt, Human
cccugcccaccuggccuc

SEQ ID NO: 1962581 - RNA, 22 nt, Human
cccugcuggguguggcgcagca

SEQ ID NO: 1962582 - RNA, 16 nt, Human
cccugcuggccggaca

SEQ ID NO: 1962583 - RNA, 18 nt, Human
cccugcuuugggcugccc

SEQ ID NO: 1962584 - RNA, 19 nt, Human
cccugcuuugggcugcccu

SEQ ID NO: 1962585 - RNA, 17 nt, Human
cccugcuuugggcugcc

SEQ ID NO: 1962586 - RNA, 20 nt, Human
cccugcuuugggcugcccug

SEQ ID NO: 1962587 - RNA, 14 nt, Human
cccuggaccccagc

SEQ ID NO: 1962588 - RNA, 15 nt, Human
cccuggaccccagcc

SEQ ID NO: 1962589 - RNA, 16 nt, Human
cccuggaccccagccu

SEQ ID NO: 1962590 - RNA, 17 nt, Human
cccuggaccccagccuc

SEQ ID NO: 1962591 - RNA, 18 nt, Human
cccuggaccccagccuca

SEQ ID NO: 1962592 - RNA, 19 nt, Human
cccuauaucuauaaacacu

SEQ ID NO: 1962593 - RNA, 13 nt, Human
cccuccaccugcu

SEQ ID NO: 1962594 - RNA, 23 nt, Human
cccuccacucuccucuuccaggc

SEQ ID NO: 1962595 - RNA, 15 nt, Human
cccucccccagccac

SEQ ID NO: 1962596 - RNA, 13 nt, Human
cccucccagggag

SEQ ID NO: 1962597 - RNA, 14 nt, Human
cccucccagggagc

SEQ ID NO: 1962598 - RNA, 18 nt, Human
cccucucugaaggaggcc

SEQ ID NO: 1962599 - RNA, 23 nt, Human
cccucucugaaggaggccaccuc

SEQ ID NO: 1962600 - RNA, 12 nt, Human
cccucuggggcu

SEQ ID NO: 1962601 - RNA, 23 nt, Human
cccugaggcccagagggccugca

SEQ ID NO: 1962602 - RNA, 20 nt, Human
cccugaggcccagagggccu

SEQ ID NO: 1962603 - RNA, 19 nt, Human
cccugaggcccagagggcc

SEQ ID NO: 1962604 - RNA, 18 nt, Human
cccugaggcccagagggc

SEQ ID NO: 1962605 - RNA, 17 nt, Human
cccugaggcccagaggg

SEQ ID NO: 1962606 - RNA, 16 nt, Human
cccugaggcccagagg

SEQ ID NO: 1962607 - RNA, 15 nt, Human
cccugaggcccagag

SEQ ID NO: 1962608 - RNA, 14 nt, Human
cccugaggcccaga

SEQ ID NO: 1962609 - RNA, 16 nt, Human
cccugaaagcccugag

SEQ ID NO: 1962610 - RNA, 21 nt, Human
cccugaaaccuaguacugccc

SEQ ID NO: 1962611 - RNA, 13 nt, Human
cccugaggcccag

SEQ ID NO: 1962612 - RNA, 15 nt, Human
cccugaaagcccuga

SEQ ID NO: 1962613 - RNA, 16 nt, Human
cccucuggggcuguuc

SEQ ID NO: 1962614 - RNA, 22 nt, Human
cccugcacuugcagacucuaca

SEQ ID NO: 1962615 - RNA, 19 nt, Human
cccugcacuugcagacucu

SEQ ID NO: 1962616 - RNA, 12 nt, Human
cccugcacuugc

SEQ ID NO: 1962617 - RNA, 13 nt, Human
cccugcacccucc

SEQ ID NO: 1962618 - RNA, 14 nt, Human
cccugcacccuccu

SEQ ID NO: 1962619 - RNA, 15 nt, Human
cccugcacccuccua

SEQ ID NO: 1962620 - RNA, 17 nt, Human
cccugcacccuccuagg

SEQ ID NO: 1962621 - RNA, 23 nt, Human
cccugcacaaagcccuuccaugu

SEQ ID NO: 1962622 - RNA, 16 nt, Human
cccugcaaagcccagc

SEQ ID NO: 1962623 - RNA, 17 nt, Human
cccugcaaagcccagcu

SEQ ID NO: 1962624 - RNA, 19 nt, Human
cccugcaaagcccagcuug

SEQ ID NO: 1962625 - RNA, 20 nt, Human
cccugcaaagcccagcuuga

SEQ ID NO: 1962626 - RNA, 15 nt, Human
cccugcaaagcccag

SEQ ID NO: 1962627 - RNA, 20 nt, Human
cccuacaguugaaaaacagc

SEQ ID NO: 1962628 - RNA, 23 nt, Human
cccuaaugcgcaggcuggcccug

SEQ ID NO: 1962629 - RNA, 21 nt, Human
cccuaaugcgcaggcuggccc

SEQ ID NO: 1962630 - RNA, 22 nt, Human
cccuaaugcgcaggcuggcccu

SEQ ID NO: 1962631 - RNA, 17 nt, Human
cccuaaugcgcaggcug

SEQ ID NO: 1962632 - RNA, 20 nt, Human
cccguguaggaaccugcaca

SEQ ID NO: 1962633 - RNA, 21 nt, Human
cccuaccgagucucuucucca

SEQ ID NO: 1962634 - RNA, 18 nt, Human
cccuaccgagucucuucu

SEQ ID NO: 1962635 - RNA, 15 nt, Human
cccgugggguuccuc

SEQ ID NO: 1962636 - RNA, 22 nt, Human
cccgucucugguuccuccccuc

SEQ ID NO: 1962637 - RNA, 12 nt, Human
cccgucucaggu

SEQ ID NO: 1962638 - RNA, 22 nt, Human
cccggggaaaggcaagguccgg

SEQ ID NO: 1962639 - RNA, 16 nt, Human
cccgggcucugccucc

SEQ ID NO: 1962640 - RNA, 18 nt, Human
cccggugcccaagaauag

SEQ ID NO: 1962641 - RNA, 14 nt, Human
cccagagggccugc

SEQ ID NO: 1962642 - RNA, 15 nt, Human
cccagagggccugca

SEQ ID NO: 1962643 - RNA, 21 nt, Human
cccgaggccuucucugaagga

SEQ ID NO: 1962644 - RNA, 14 nt, Human
cccagaacucugcc

SEQ ID NO: 1962645 - RNA, 17 nt, Human
cccagaacucugccugc

SEQ ID NO: 1962646 - RNA, 21 nt, Human
cccagaacucugccugcccuu

SEQ ID NO: 1962647 - RNA, 13 nt, Human
cccgaguagcugg

SEQ ID NO: 1962648 - RNA, 14 nt, Human
cccgaguagcuggg

SEQ ID NO: 1962649 - RNA, 15 nt, Human
cccgaguagcuggga

SEQ ID NO: 1962650 - RNA, 16 nt, Human
cccgaguagcugggac

SEQ ID NO: 1962651 - RNA, 17 nt, Human
cccgaguagcugggacu

SEQ ID NO: 1962652 - RNA, 18 nt, Human
cccgaguagcugggacua

SEQ ID NO: 1962653 - RNA, 21 nt, Human
cccgaguagcugggacuacag

SEQ ID NO: 1962654 - RNA, 20 nt, Human
cccgcugucagccauuccug

SEQ ID NO: 1962655 - RNA, 19 nt, Human
cccgcugucagccauuccu

SEQ ID NO: 1962656 - RNA, 14 nt, Human
cccgccuccaaccc

SEQ ID NO: 1962657 - RNA, 19 nt, Human
cccgccuccaaccccucgc

SEQ ID NO: 1962658 - RNA, 17 nt, Human
cccgccgcccagcccac

SEQ ID NO: 1962659 - RNA, 22 nt, Human
cccgaguagcugggacuacagg

SEQ ID NO: 1962660 - RNA, 15 nt, Human
cccgggcucugccuc

SEQ ID NO: 1962661 - RNA, 14 nt, Human
cccgggcucugccu

SEQ ID NO: 1962662 - RNA, 12 nt, Human
cccgggcucugc

SEQ ID NO: 1962663 - RNA, 16 nt, Human
cccaccugcagcuccc

SEQ ID NO: 1962664 - RNA, 19 nt, Human
cccaccucccccacuccca

SEQ ID NO: 1962665 - RNA, 22 nt, Human
cccaccucucucacuccuugaa

SEQ ID NO: 1962666 - RNA, 17 nt, Human
cccaccucagccucccg

SEQ ID NO: 1962667 - RNA, 23 nt, Human
cccaccgggcugggagcucugca

SEQ ID NO: 1962668 - RNA, 17 nt, Human
cccaccacacccucccu

SEQ ID NO: 1962669 - RNA, 20 nt, Human
cccaccgcagacaggaccag

SEQ ID NO: 1962670 - RNA, 19 nt, Human
cccaccgcagacaggacca

SEQ ID NO: 1962671 - RNA, 19 nt, Human
cccacgcuggagugcagug

SEQ ID NO: 1962672 - RNA, 20 nt, Human
cccacgcuggagugcaguga

SEQ ID NO: 1962673 - RNA, 21 nt, Human
cccacgcuggagugcagugag

SEQ ID NO: 1962674 - RNA, 23 nt, Human
cccacuugagaauuacccuuuug

SEQ ID NO: 1962675 - RNA, 12 nt, Human
cccacuucugcc

SEQ ID NO: 1962676 - RNA, 14 nt, Human
cccacuucugccag

SEQ ID NO: 1962677 - RNA, 17 nt, Human
cccacuugguuagauga

SEQ ID NO: 1962678 - RNA, 16 nt, Human
cccaccuggccucugc

SEQ ID NO: 1962679 - RNA, 21 nt, Human
cccacgacugcccggcagggu

SEQ ID NO: 1962680 - RNA, 20 nt, Human
cccacgacugcccggcaggg

SEQ ID NO: 1962681 - RNA, 21 nt, Human
cccaccuggccucugcacucc

SEQ ID NO: 1962682 - RNA, 19 nt, Human
cccaccuggccucugcacu

SEQ ID NO: 1962683 - RNA, 17 nt, Human
cccaccuggccucugca

SEQ ID NO: 1962684 - RNA, 13 nt, Human
cccacaagaaaug

SEQ ID NO: 1962685 - RNA, 20 nt, Human
cccaaugcacuuuguucugg

SEQ ID NO: 1962686 - RNA, 16 nt, Human
cccaaugcacuuuguu

SEQ ID NO: 1962687 - RNA, 20 nt, Human
cccacaagaaaugaaagcag

SEQ ID NO: 1962688 - RNA, 13 nt, Human
cccacacacagau

SEQ ID NO: 1962689 - RNA, 16 nt, Human
cccacaggaggugguc

SEQ ID NO: 1962690 - RNA, 21 nt, Human
cccacaggagguggucuggga

SEQ ID NO: 1962691 - RNA, 13 nt, Human
cccaccacacaac

SEQ ID NO: 1962692 - RNA, 14 nt, Human
cccaccacacaaca

SEQ ID NO: 1962693 - RNA, 20 nt, Human
cgagcaggcuucuucccccc

SEQ ID NO: 1962694 - RNA, 17 nt, Human
cgagcaugccuggaugg

SEQ ID NO: 1962695 - RNA, 16 nt, Human
cgagcaugccuggaug

SEQ ID NO: 1962696 - RNA, 13 nt, Human
cgagcaugccugg

SEQ ID NO: 1962697 - RNA, 14 nt, Human
cgagcaugccugga

SEQ ID NO: 1962698 - RNA, 18 nt, Human
cgagaucacgccacugca

SEQ ID NO: 1962699 - RNA, 20 nt, Human
cgagaucacgccacugcacu

SEQ ID NO: 1962700 - RNA, 20 nt, Human
cgagauugcaccacugcacu

SEQ ID NO: 1962701 - RNA, 21 nt, Human
cgagcagacacccuuggagcu

SEQ ID NO: 1962702 - RNA, 18 nt, Human
cgagauagccaaggccaa

SEQ ID NO: 1962703 - RNA, 17 nt, Human
cgagaucacgccacugc

SEQ ID NO: 1962704 - RNA, 13 nt, Human
cgaauagcuggga

SEQ ID NO: 1962705 - RNA, 14 nt, Human
cgaauagcugggac

SEQ ID NO: 1962706 - RNA, 18 nt, Human
cgacuugugcacaggcag

SEQ ID NO: 1962707 - RNA, 19 nt, Human
cgacuugugcacaggcaga

SEQ ID NO: 1962708 - RNA, 16 nt, Human
cgacuugcauuuuugc

SEQ ID NO: 1962709 - RNA, 22 nt, Human
cgaaacucuaaguguuugcugc

SEQ ID NO: 1962710 - RNA, 16 nt, Human
cgaaaccaaagaagaa

SEQ ID NO: 1962711 - RNA, 20 nt, Human
cgaaaacguggcugcuucaa

SEQ ID NO: 1962712 - RNA, 12 nt, Human
cgaaaaucauug

SEQ ID NO: 1962713 - RNA, 19 nt, Human
cgaaaacguggcugcuuca

SEQ ID NO: 1962714 - RNA, 18 nt, Human
cgaaaacguggcugcuuc

SEQ ID NO: 1962715 - RNA, 22 nt, Human
cgaaaaccaggccuuaucucca

SEQ ID NO: 1962716 - RNA, 13 nt, Human
cgaaaaccaggcc

SEQ ID NO: 1962717 - RNA, 12 nt, Human
ccuuuuuuuuga

SEQ ID NO: 1962718 - RNA, 15 nt, Human
cgaaaacguggcugc

SEQ ID NO: 1962719 - RNA, 16 nt, Human
ccuuuucacccuucua

SEQ ID NO: 1962720 - RNA, 20 nt, Human
ccuuuucacccuucuacucu

SEQ ID NO: 1962721 - RNA, 21 nt, Human
ccuuugacgccaucccagccc

SEQ ID NO: 1962722 - RNA, 20 nt, Human
ccuuugacgccaucccagcc

SEQ ID NO: 1962723 - RNA, 22 nt, Human
ccuuugacgccaucccagcccc

SEQ ID NO: 1962724 - RNA, 12 nt, Human
cgaaagaacagu

SEQ ID NO: 1962725 - RNA, 21 nt, Human
cgaaagaacaguccauugaaa

SEQ ID NO: 1962726 - RNA, 23 nt, Human
cgaaagaggcacccuuccaucug

SEQ ID NO: 1962727 - RNA, 12 nt, Human
cgaaagaggcac

SEQ ID NO: 1962728 - RNA, 19 nt, Human
cgaaagaggcacccuucca

SEQ ID NO: 1962729 - RNA, 20 nt, Human
cgaaagaggcacccuuccau

SEQ ID NO: 1962730 - RNA, 18 nt, Human
cgaaagaaaacucuauuu

SEQ ID NO: 1962731 - RNA, 22 nt, Human
cgaaagggacuuggaagcuccg

SEQ ID NO: 1962732 - RNA, 20 nt, Human
cgaaaggaugaaagugacca

SEQ ID NO: 1962733 - RNA, 19 nt, Human
cgaaagggacuuggaagcu

SEQ ID NO: 1962734 - RNA, 12 nt, Human
cgaacuggcugc

SEQ ID NO: 1962735 - RNA, 14 nt, Human
cgaacuggcugcaa

SEQ ID NO: 1962736 - RNA, 14 nt, Human
cgaacuccugaccu

SEQ ID NO: 1962737 - RNA, 18 nt, Human
cgaaguucaagaucaaaa

SEQ ID NO: 1962738 - RNA, 16 nt, Human
cgaaguucaagaucaa

SEQ ID NO: 1962739 - RNA, 17 nt, Human
cgaaguucaagaucaaa

SEQ ID NO: 1962740 - RNA, 16 nt, Human
cgaacuguuguauaaa

SEQ ID NO: 1962741 - RNA, 21 nt, Human
cgaacugggcauauuucuaau

SEQ ID NO: 1962742 - RNA, 17 nt, Human
cgccaugcuccuggccc

SEQ ID NO: 1962743 - RNA, 20 nt, Human
cgauuucuguuuagauaaua

SEQ ID NO: 1962744 - RNA, 19 nt, Human
cgcaagcaccauccccucc

SEQ ID NO: 1962745 - RNA, 21 nt, Human
cgcaagcaccauccccuccgg

SEQ ID NO: 1962746 - RNA, 17 nt, Human
cgcaccagcccagaagu

SEQ ID NO: 1962747 - RNA, 13 nt, Human
cgcacagcugcuc

SEQ ID NO: 1962748 - RNA, 18 nt, Human
cgagcaugccuggauggg

SEQ ID NO: 1962749 - RNA, 15 nt, Human
cgagcccugguggca

SEQ ID NO: 1962750 - RNA, 16 nt, Human
cgagcccugguggcag

SEQ ID NO: 1962751 - RNA, 16 nt, Human
cgcagacaggaccagg

SEQ ID NO: 1962752 - RNA, 15 nt, Human
cgcagacaggaccag

SEQ ID NO: 1962753 - RNA, 21 nt, Human
cgcagagaagugacgguuccu

SEQ ID NO: 1962754 - RNA, 14 nt, Human
cgcagcccugcaga

SEQ ID NO: 1962755 - RNA, 10 nt, Human
cgcagcccug

SEQ ID NO: 1962756 - RNA, 22 nt, Human
cgcagagaagugacgguuccua

SEQ ID NO: 1962757 - RNA, 21 nt, Human
cgccagauucuuuccugaggc

SEQ ID NO: 1962758 - RNA, 20 nt, Human
cgccagauucuuuccugagg

SEQ ID NO: 1962759 - RNA, 19 nt, Human
cgccagauucuuuccugag

SEQ ID NO: 1962760 - RNA, 17 nt, Human
cgccagauucuuuccug

SEQ ID NO: 1962761 - RNA, 22 nt, Human
cgccaggggaaaaucagccugc

SEQ ID NO: 1962762 - RNA, 16 nt, Human
cgccagggaccccaga

SEQ ID NO: 1962763 - RNA, 17 nt, Human
cgccagggaccccagaa

SEQ ID NO: 1962764 - RNA, 12 nt, Human
ccuucagugccu

SEQ ID NO: 1962765 - RNA, 19 nt, Human
ccuuaccugccaggaagcc

SEQ ID NO: 1962766 - RNA, 19 nt, Human
ccuuacccucauguucuua

SEQ ID NO: 1962767 - RNA, 17 nt, Human
ccuuagaagucacacag

SEQ ID NO: 1962768 - RNA, 23 nt, Human
ccuuacugaccucaccuaggaag

SEQ ID NO: 1962769 - RNA, 18 nt, Human
ccuuagaagucacacagu

SEQ ID NO: 1962770 - RNA, 20 nt, Human
ccuuaccagcagagcaccuu

SEQ ID NO: 1962771 - RNA, 20 nt, Human
ccuuaccacugcucugauga

SEQ ID NO: 1962772 - RNA, 15 nt, Human
ccuuacccucauguu

SEQ ID NO: 1962773 - RNA, 13 nt, Human
ccuuaccagcaga

SEQ ID NO: 1962774 - RNA, 17 nt, Human
ccuuaccacugcucuga

SEQ ID NO: 1962775 - RNA, 17 nt, Human
ccuuacaaaugauugcu

SEQ ID NO: 1962776 - RNA, 21 nt, Human
ccuuacaaaugauugcuuuua

SEQ ID NO: 1962777 - RNA, 23 nt, Human
ccuuacaaaugauugcuuuuaaa

SEQ ID NO: 1962778 - RNA, 20 nt, Human
ccuuacacaaugguuuucuu

SEQ ID NO: 1962779 - RNA, 14 nt, Human
ccuuacacaauggu

SEQ ID NO: 1962780 - RNA, 22 nt, Human
ccuuaagugaggaaaucaaagu

SEQ ID NO: 1962781 - RNA, 20 nt, Human
ccuuaagugaggaaaucaaa

SEQ ID NO: 1962782 - RNA, 19 nt, Human
ccuuaagugaggaaaucaa

SEQ ID NO: 1962783 - RNA, 15 nt, Human
ccuuaagaaugccaa

SEQ ID NO: 1962784 - RNA, 12 nt, Human
ccuuaagaauga

SEQ ID NO: 1962785 - RNA, 20 nt, Human
ccuuaagaaugaguuucuua

SEQ ID NO: 1962786 - RNA, 14 nt, Human
ccuuaagcugcagg

SEQ ID NO: 1962787 - RNA, 15 nt, Human
ccuuaagcugcagga

SEQ ID NO: 1962788 - RNA, 16 nt, Human
ccuguuuugagcccug

SEQ ID NO: 1962789 - RNA, 20 nt, Human
ccuuaaaacaucauuccuuu

SEQ ID NO: 1962790 - RNA, 17 nt, Human
ccuuaaaauuugaaaca

SEQ ID NO: 1962791 - RNA, 18 nt, Human
ccuuaaaauuugaaacau

SEQ ID NO: 1962792 - RNA, 15 nt, Human
ccuuaaaauuugaaa

SEQ ID NO: 1962793 - RNA, 16 nt, Human
ccuuaaaauuugaaac

SEQ ID NO: 1962794 - RNA, 20 nt, Human
ccuguguguccaaaacugcc

SEQ ID NO: 1962795 - RNA, 21 nt, Human
ccuguguguccaaaacugccu

SEQ ID NO: 1962796 - RNA, 20 nt, Human
ccugugugugcgccuacagg

SEQ ID NO: 1962797 - RNA, 21 nt, Human
ccugugugugcgccuacagga

SEQ ID NO: 1962798 - RNA, 22 nt, Human
ccugugucuugcaauggcagcc

SEQ ID NO: 1962799 - RNA, 17 nt, Human
ccugugucuugcaaugg

SEQ ID NO: 1962800 - RNA, 21 nt, Human
ccuguguccaugugaucucau

SEQ ID NO: 1962801 - RNA, 19 nt, Human
ccugugucuugcaauggca

SEQ ID NO: 1962802 - RNA, 21 nt, Human
ccugugucuugcaauggcagc

SEQ ID NO: 1962803 - RNA, 17 nt, Human
ccugugucaguuuaugu

SEQ ID NO: 1962804 - RNA, 22 nt, Human
ccugugucaguuuauguuuugg

SEQ ID NO: 1962805 - RNA, 16 nt, Human
ccuguuucugcagcca

SEQ ID NO: 1962806 - RNA, 18 nt, Human
ccuguuucagaggcucag

SEQ ID NO: 1962807 - RNA, 23 nt, Human
ccuguuucaaguucacaccugca

SEQ ID NO: 1962808 - RNA, 18 nt, Human
ccuguuuguuucugaaag

SEQ ID NO: 1962809 - RNA, 23 nt, Human
ccuguuugggaagagcuuagaaa

SEQ ID NO: 1962810 - RNA, 14 nt, Human
ccuguuuguuucug

SEQ ID NO: 1962811 - RNA, 22 nt, Human
ccuguuugggaagagcuuagaa

SEQ ID NO: 1962812 - RNA, 15 nt, Human
ccuguuuaagagaca

SEQ ID NO: 1962813 - RNA, 12 nt, Human
ccuguuuaagag

SEQ ID NO: 1962814 - RNA, 23 nt, Human
ccuguugggccaggagccuccug

SEQ ID NO: 1962815 - RNA, 13 nt, Human
ccuguguuaauuu

SEQ ID NO: 1962816 - RNA, 14 nt, Human
ccuguguuaauuua

SEQ ID NO: 1962817 - RNA, 17 nt, Human
ccuguguuaauuuaagu

SEQ ID NO: 1962818 - RNA, 23 nt, Human
ccuguguuaauuuaaguuuugac

SEQ ID NO: 1962819 - RNA, 12 nt, Human
ccuucagccuga

SEQ ID NO: 1962820 - RNA, 14 nt, Human
ccuucagugccaaa

SEQ ID NO: 1962821 - RNA, 19 nt, Human
ccuucauuuggcauucccc

SEQ ID NO: 1962822 - RNA, 10 nt, Human
ccuucagugc

SEQ ID NO: 1962823 - RNA, 11 nt, Human
ccuucagugcc

SEQ ID NO: 1962824 - RNA, 20 nt, Human
ccuucaccuuuguccccacc

SEQ ID NO: 1962825 - RNA, 19 nt, Human
ccuucaccuuuguccccac

SEQ ID NO: 1962826 - RNA, 17 nt, Human
ccuucacagaugggugc

SEQ ID NO: 1962827 - RNA, 14 nt, Human
ccuuagacaguccc

SEQ ID NO: 1962828 - RNA, 21 nt, Human
ccuucaccuuuguccccaccg

SEQ ID NO: 1962829 - RNA, 14 nt, Human
ccuucacuuaggaa

SEQ ID NO: 1962830 - RNA, 14 nt, Human
ccuucggccuccau

SEQ ID NO: 1962831 - RNA, 19 nt, Human
ccuucggccuccauccuga

SEQ ID NO: 1962832 - RNA, 20 nt, Human
ccuucggccuccauccugag

SEQ ID NO: 1962833 - RNA, 15 nt, Human
ccuuccaagagccug

SEQ ID NO: 1962834 - RNA, 16 nt, Human
ccuuccaagagccuga

SEQ ID NO: 1962835 - RNA, 17 nt, Human
ccuuccaagagccugag

SEQ ID NO: 1962836 - RNA, 22 nt, Human
ccuucauuuggcauuccccacu

SEQ ID NO: 1962837 - RNA, 21 nt, Human
ccuuccucuccacugccuucg

SEQ ID NO: 1962838 - RNA, 15 nt, Human
ccuuccucugagccu

SEQ ID NO: 1962839 - RNA, 16 nt, Human
ccuuccucugagccuu

SEQ ID NO: 1962840 - RNA, 20 nt, Human
ccuuccucugagccuuggga

SEQ ID NO: 1962841 - RNA, 13 nt, Human
ccuuccucugagg

SEQ ID NO: 1962842 - RNA, 22 nt, Human
ccuuggggucagguugacagga

SEQ ID NO: 1962843 - RNA, 22 nt, Human
ccuugguuaggcauugugggaa

SEQ ID NO: 1962844 - RNA, 21 nt, Human
ccuugguuaggcauuguggga

SEQ ID NO: 1962845 - RNA, 22 nt, Human
ccuuggugucgggcaugacacg

SEQ ID NO: 1962846 - RNA, 13 nt, Human
ccuugauuggaag

SEQ ID NO: 1962847 - RNA, 22 nt, Human
ccuugauuggaagggcuuuuca

SEQ ID NO: 1962848 - RNA, 19 nt, Human
ccuugauucccuuguuauu

SEQ ID NO: 1962849 - RNA, 20 nt, Human
ccuuggcuuggcccuggcag

SEQ ID NO: 1962850 - RNA, 21 nt, Human
ccuuggcuuggcccuggcagc

SEQ ID NO: 1962851 - RNA, 12 nt, Human
ccuugggacccc

SEQ ID NO: 1962852 - RNA, 19 nt, Human
ccuuggcuuggcccuggca

SEQ ID NO: 1962853 - RNA, 14 nt, Human
ccuugggauccagg

SEQ ID NO: 1962854 - RNA, 22 nt, Human
ccuuggcuuggcccuggcagcc

SEQ ID NO: 1962855 - RNA, 13 nt, Human
ccuuguuuaaugg

SEQ ID NO: 1962856 - RNA, 13 nt, Human
ccuuguuccaguu

SEQ ID NO: 1962857 - RNA, 17 nt, Human
ccuugucauuuuggucu

SEQ ID NO: 1962858 - RNA, 11 nt, Human
ccuuguuucag

SEQ ID NO: 1962859 - RNA, 16 nt, Human
ccuuucuacuuccaag

SEQ ID NO: 1962860 - RNA, 17 nt, Human
ccuuucuauaauuuuac

SEQ ID NO: 1962861 - RNA, 16 nt, Human
ccuuucuauaauuuua

SEQ ID NO: 1962862 - RNA, 18 nt, Human
ccuuugacgccaucccag

SEQ ID NO: 1962863 - RNA, 17 nt, Human
ccuuugacgccauccca

SEQ ID NO: 1962864 - RNA, 16 nt, Human
ccuuugacgccauccc

SEQ ID NO: 1962865 - RNA, 14 nt, Human
ccuucuguggcuca

SEQ ID NO: 1962866 - RNA, 21 nt, Human
ccuucuguggcucacagaacc

SEQ ID NO: 1962867 - RNA, 17 nt, Human
ccuucuguugaugcugu

SEQ ID NO: 1962868 - RNA, 21 nt, Human
ccuucuauagcaucacuuaaa

SEQ ID NO: 1962869 - RNA, 19 nt, Human
ccuucuauagcaucacuua

SEQ ID NO: 1962870 - RNA, 19 nt, Human
ccuucuccuucaccuuugu

SEQ ID NO: 1962871 - RNA, 15 nt, Human
ccuucuccuucaccu

SEQ ID NO: 1962872 - RNA, 15 nt, Human
ccuucggcgccuuaa

SEQ ID NO: 1962873 - RNA, 20 nt, Human
ccuugaguugauucagcucu

SEQ ID NO: 1962874 - RNA, 13 nt, Human
ccuugacuuuuua

SEQ ID NO: 1962875 - RNA, 16 nt, Human
ccuugaggggagccag

SEQ ID NO: 1962876 - RNA, 18 nt, Human
ccuugaggggagccagga

SEQ ID NO: 1962877 - RNA, 21 nt, Human
ccuugaggggagccaggaggg

SEQ ID NO: 1962878 - RNA, 22 nt, Human
ccuugaggggagccaggagggg

SEQ ID NO: 1962879 - RNA, 23 nt, Human
ccuugaccauucuccaccugcca

SEQ ID NO: 1962880 - RNA, 22 nt, Human
ccuugaccauucuccaccugcc

SEQ ID NO: 1962881 - RNA, 13 nt, Human
ccuugacucuuuc

SEQ ID NO: 1962882 - RNA, 20 nt, Human
ccuugaaaacuuuaugcuaa

SEQ ID NO: 1962883 - RNA, 13 nt, Human
ccuugaacuagga

SEQ ID NO: 1962884 - RNA, 22 nt, Human
ccugccaggaagccagcaggcu

SEQ ID NO: 1962885 - RNA, 21 nt, Human
ccugccaggaagccagcaggc

SEQ ID NO: 1962886 - RNA, 19 nt, Human
ccugccaggaagccagcag

SEQ ID NO: 1962887 - RNA, 18 nt, Human
ccugccaggaagccagca

SEQ ID NO: 1962888 - RNA, 11 nt, Human
ccugccaggga

SEQ ID NO: 1962889 - RNA, 16 nt, Human
ccugccaggcauggug

SEQ ID NO: 1962890 - RNA, 23 nt, Human
ccugccaggaagccagcaggcuc

SEQ ID NO: 1962891 - RNA, 15 nt, Human
ccugccagggacaga

SEQ ID NO: 1962892 - RNA, 14 nt, Human
ccugccagggacag

SEQ ID NO: 1962893 - RNA, 13 nt, Human
ccugccagggaca

SEQ ID NO: 1962894 - RNA, 12 nt, Human
ccugccagggac

SEQ ID NO: 1962895 - RNA, 16 nt, Human
ccugccagggacagag

SEQ ID NO: 1962896 - RNA, 22 nt, Human
ccugcaguuccccuggaagcag

SEQ ID NO: 1962897 - RNA, 13 nt, Human
ccugcaguucccc

SEQ ID NO: 1962898 - RNA, 22 nt, Human
ccugccacucaggcccaaagcc

SEQ ID NO: 1962899 - RNA, 23 nt, Human
ccugccacucaggcccaaagccu

SEQ ID NO: 1962900 - RNA, 14 nt, Human
ccugccagaccccc

SEQ ID NO: 1962901 - RNA, 14 nt, Human
ccugccacucaggc

SEQ ID NO: 1962902 - RNA, 17 nt, Human
ccugccaggaagccagc

SEQ ID NO: 1962903 - RNA, 15 nt, Human
ccugccaggaagcca

SEQ ID NO: 1962904 - RNA, 14 nt, Human
ccugccaggaagcc

SEQ ID NO: 1962905 - RNA, 13 nt, Human
ccugccaggaagc

SEQ ID NO: 1962906 - RNA, 14 nt, Human
ccugcaagaacaag

SEQ ID NO: 1962907 - RNA, 18 nt, Human
ccugcaggccaggccagc

SEQ ID NO: 1962908 - RNA, 12 nt, Human
ccugcaggccag

SEQ ID NO: 1962909 - RNA, 16 nt, Human
ccugcaggccaggcca

SEQ ID NO: 1962910 - RNA, 15 nt, Human
ccugcagggccaagc

SEQ ID NO: 1962911 - RNA, 18 nt, Human
ccugcaguacuuuaccuc

SEQ ID NO: 1962912 - RNA, 20 nt, Human
ccugcaguacuuuaccuccu

SEQ ID NO: 1962913 - RNA, 15 nt, Human
ccugauugugucucu

SEQ ID NO: 1962914 - RNA, 14 nt, Human
ccugaggcccuucu

SEQ ID NO: 1962915 - RNA, 22 nt, Human
ccugaugcuucuucagagacuc

SEQ ID NO: 1962916 - RNA, 21 nt, Human
ccugaugcuucuucagagacu

SEQ ID NO: 1962917 - RNA, 20 nt, Human
ccugaugcuucuucagagac

SEQ ID NO: 1962918 - RNA, 19 nt, Human
ccugaugcuucuucagaga

SEQ ID NO: 1962919 - RNA, 12 nt, Human
ccugaggcccuu

SEQ ID NO: 1962920 - RNA, 11 nt, Human
ccugaggcccu

SEQ ID NO: 1962921 - RNA, 19 nt, Human
ccugauugugucucuuggu

SEQ ID NO: 1962922 - RNA, 17 nt, Human
ccugauugugucucuug

SEQ ID NO: 1962923 - RNA, 18 nt, Human
ccugauugguuucucuuc

SEQ ID NO: 1962924 - RNA, 20 nt, Human
ccugauugguuucucuucuc

SEQ ID NO: 1962925 - RNA, 21 nt, Human
ccugcaaccugauugugucuc

SEQ ID NO: 1962926 - RNA, 22 nt, Human
ccugcaaccugauugugucucu

SEQ ID NO: 1962927 - RNA, 15 nt, Human
ccugaggcagguccc

SEQ ID NO: 1962928 - RNA, 11 nt, Human
ccugagcccca

SEQ ID NO: 1962929 - RNA, 12 nt, Human
ccugagcccacu

SEQ ID NO: 1962930 - RNA, 13 nt, Human
ccugagcccacug

SEQ ID NO: 1962931 - RNA, 15 nt, Human
ccugagcccacugug

SEQ ID NO: 1962932 - RNA, 16 nt, Human
ccugagcccacugugc

SEQ ID NO: 1962933 - RNA, 14 nt, Human
ccugagcuuucugc

SEQ ID NO: 1962934 - RNA, 12 nt, Human
ccugagccagau

SEQ ID NO: 1962935 - RNA, 20 nt, Human
ccugagccagauuucacucu

SEQ ID NO: 1962936 - RNA, 11 nt, Human
ccugagcccac

SEQ ID NO: 1962937 - RNA, 21 nt, Human
ccugaggcccagagggccugc

SEQ ID NO: 1962938 - RNA, 20 nt, Human
ccugaggacauggcuucuga

SEQ ID NO: 1962939 - RNA, 18 nt, Human
ccugaggacauggcuucu

SEQ ID NO: 1962940 - RNA, 19 nt, Human
ccugaggaagagggacugu

SEQ ID NO: 1962941 - RNA, 16 nt, Human
ccugagcuuucugcua

SEQ ID NO: 1962942 - RNA, 20 nt, Human
ccugacagccccucccuccu

SEQ ID NO: 1962943 - RNA, 14 nt, Human
ccugacagccagaa

SEQ ID NO: 1962944 - RNA, 20 nt, Human
ccugacagccagaacucugu

SEQ ID NO: 1962945 - RNA, 23 nt, Human
ccugacagagggauggaggaaga

SEQ ID NO: 1962946 - RNA, 13 nt, Human
ccugacagccaga

SEQ ID NO: 1962947 - RNA, 16 nt, Human
ccugacagaaggacuc

SEQ ID NO: 1962948 - RNA, 14 nt, Human
ccugacaccccacu

SEQ ID NO: 1962949 - RNA, 18 nt, Human
ccugacaccccacuuagc

SEQ ID NO: 1962950 - RNA, 23 nt, Human
ccugacaacacucauugaccuga

SEQ ID NO: 1962951 - RNA, 22 nt, Human
ccugcggugcuaucucccccag

SEQ ID NO: 1962952 - RNA, 21 nt, Human
ccugcucagcagugagagcag

SEQ ID NO: 1962953 - RNA, 22 nt, Human
ccugcucagcagugagagcaga

SEQ ID NO: 1962954 - RNA, 21 nt, Human
ccugcucuccgaccagacacc

SEQ ID NO: 1962955 - RNA, 13 nt, Human
ccugcuccuuccc

SEQ ID NO: 1962956 - RNA, 16 nt, Human
ccugcuccuucccuug

SEQ ID NO: 1962957 - RNA, 18 nt, Human
ccugcuccuucccuugcu

SEQ ID NO: 1962958 - RNA, 21 nt, Human
ccugcucgaugcucacagggc

SEQ ID NO: 1962959 - RNA, 22 nt, Human
ccugcucuccgaccagacaccu

SEQ ID NO: 1962960 - RNA, 16 nt, Human
ccugcucuccucuugc

SEQ ID NO: 1962961 - RNA, 18 nt, Human
ccugcucuccucuugcca

SEQ ID NO: 1962962 - RNA, 19 nt, Human
ccugcucuccucuugccac

SEQ ID NO: 1962963 - RNA, 21 nt, Human
ccugcucuccucuugccacug

SEQ ID NO: 1962964 - RNA, 22 nt, Human
ccugcucuccucuugccacugc

SEQ ID NO: 1962965 - RNA, 12 nt, Human
ccugcucugcuc

SEQ ID NO: 1962966 - RNA, 12 nt, Human
ccugcucugcug

SEQ ID NO: 1962967 - RNA, 13 nt, Human
ccugcucugcuga

SEQ ID NO: 1962968 - RNA, 15 nt, Human
ccugcucuuuggccu

SEQ ID NO: 1962969 - RNA, 15 nt, Human
ccuggaagcagugcc

SEQ ID NO: 1962970 - RNA, 16 nt, Human
ccuggaagcagugccc

SEQ ID NO: 1962971 - RNA, 17 nt, Human
ccuggaagcagugccca

SEQ ID NO: 1962972 - RNA, 18 nt, Human
ccuggaagcagugcccag

SEQ ID NO: 1962973 - RNA, 19 nt, Human
ccuggaagcagugcccagg

SEQ ID NO: 1962974 - RNA, 20 nt, Human
ccuggaagcagugcccaggu

SEQ ID NO: 1962975 - RNA, 23 nt, Human
ccuggaagcagugcccagguggc

SEQ ID NO: 1962976 - RNA, 14 nt, Human
ccugcuucaaauau

SEQ ID NO: 1962977 - RNA, 21 nt, Human
ccugcuguuuaucccuuaaga

SEQ ID NO: 1962978 - RNA, 17 nt, Human
ccugcuucagccuccca

SEQ ID NO: 1962979 - RNA, 20 nt, Human
ccugcuucagccucccacag

SEQ ID NO: 1962980 - RNA, 15 nt, Human
ccugcugagucccag

SEQ ID NO: 1962981 - RNA, 20 nt, Human
ccugcuuugggcugcccugg

SEQ ID NO: 1962982 - RNA, 19 nt, Human
ccugcuuugggcugcccug

SEQ ID NO: 1962983 - RNA, 23 nt, Human
ccugcuucagccucccacagugc

SEQ ID NO: 1962984 - RNA, 21 nt, Human
ccugcuuugggcugcccuggu

SEQ ID NO: 1962985 - RNA, 22 nt, Human
ccugcuuugggcugcccuggug

SEQ ID NO: 1962986 - RNA, 23 nt, Human
ccugcuuugggcugcccuggugc

SEQ ID NO: 1962987 - RNA, 22 nt, Human
ccugcuuugucuccucuauccu

SEQ ID NO: 1962988 - RNA, 18 nt, Human
ccugccugguccucacac

SEQ ID NO: 1962989 - RNA, 23 nt, Human
ccugccuguugggccaggagccu

SEQ ID NO: 1962990 - RNA, 14 nt, Human
ccugccuuaaguga

SEQ ID NO: 1962991 - RNA, 11 nt, Human
ccugccucagc

SEQ ID NO: 1962992 - RNA, 22 nt, Human
ccugccccucaacucuccucca

SEQ ID NO: 1962993 - RNA, 20 nt, Human
ccugcgccaccgcccagaga

SEQ ID NO: 1962994 - RNA, 17 nt, Human
ccugcgaggcuaugagu

SEQ ID NO: 1962995 - RNA, 21 nt, Human
ccugccuugcccacuccugcu

SEQ ID NO: 1962996 - RNA, 17 nt, Human
ccugcggugcuaucucc

SEQ ID NO: 1962997 - RNA, 16 nt, Human
ccugcggugcuaucuc

SEQ ID NO: 1962998 - RNA, 21 nt, Human
ccugcgcgggaccaucuggaa

SEQ ID NO: 1962999 - RNA, 18 nt, Human
ccugcgggucacaggagg

SEQ ID NO: 1963000 - RNA, 22 nt, Human
ccugcgggucacaggagggagg

SEQ ID NO: 1963001 - RNA, 21 nt, Human
ccuggcugggacugggaacag

SEQ ID NO: 1963002 - RNA, 18 nt, Human
ccuggcugggacugggaa

SEQ ID NO: 1963003 - RNA, 13 nt, Human
ccuggcuuccuua

SEQ ID NO: 1963004 - RNA, 15 nt, Human
ccuggcuuccuuacu

SEQ ID NO: 1963005 - RNA, 20 nt, Human
ccuggcuuuucacugcuggc

SEQ ID NO: 1963006 - RNA, 18 nt, Human
ccuggcuuuucacugcug

SEQ ID NO: 1963007 - RNA, 21 nt, Human
ccuggcuuuucacugcuggcu

SEQ ID NO: 1963008 - RNA, 22 nt, Human
ccuggcuuuucacugcuggcug

SEQ ID NO: 1963009 - RNA, 23 nt, Human
ccuggcuuuucacugcuggcugc

SEQ ID NO: 1963010 - RNA, 24 nt, Human
ccuggcuuuucacugcuggcugcc

SEQ ID NO: 1963011 - RNA, 18 nt, Human
ccuggggguucuuucuuc

SEQ ID NO: 1963012 - RNA, 21 nt, Human
ccuggggguucuuucuuccuc

SEQ ID NO: 1963013 - RNA, 22 nt, Human
ccuggggguucuuucuuccucu

SEQ ID NO: 1963014 - RNA, 23 nt, Human
ccuggggguucuuucuuccucug

SEQ ID NO: 1963015 - RNA, 15 nt, Human
ccuggguccccagcc

SEQ ID NO: 1963016 - RNA, 14 nt, Human
ccugguaagaaaaa

SEQ ID NO: 1963017 - RNA, 15 nt, Human
ccugguaagaaaaag

SEQ ID NO: 1963018 - RNA, 19 nt, Human
ccugguaagaaaaagcaaa

SEQ ID NO: 1963019 - RNA, 12 nt, Human
ccuggucagccc

SEQ ID NO: 1963020 - RNA, 14 nt, Human
ccuggucagcccaa

SEQ ID NO: 1963021 - RNA, 20 nt, Human
ccuggucagggugagcccau

SEQ ID NO: 1963022 - RNA, 22 nt, Human
ccuggucacaggacucugccuc

SEQ ID NO: 1963023 - RNA, 23 nt, Human
ccuggucacaggacucugccucc

SEQ ID NO: 1963024 - RNA, 21 nt, Human
ccuggucacaggacucugccu

SEQ ID NO: 1963025 - RNA, 16 nt, Human
ccuggcuccaggccag

SEQ ID NO: 1963026 - RNA, 17 nt, Human
ccuggcuccaggccagg

SEQ ID NO: 1963027 - RNA, 15 nt, Human
ccuggcuccaggcca

SEQ ID NO: 1963028 - RNA, 18 nt, Human
ccuggcugcagccugcgc

SEQ ID NO: 1963029 - RNA, 23 nt, Human
ccuggcucccacaggcccuuccu

SEQ ID NO: 1963030 - RNA, 17 nt, Human
ccuggcucccacaggcc

SEQ ID NO: 1963031 - RNA, 22 nt, Human
ccuggcugcggggcgggcacac

SEQ ID NO: 1963032 - RNA, 15 nt, Human
ccuggccagaugcac

SEQ ID NO: 1963033 - RNA, 21 nt, Human
ccuggcagccgugccuucagc

SEQ ID NO: 1963034 - RNA, 22 nt, Human
ccuggcagccgugccuucagcu

SEQ ID NO: 1963035 - RNA, 13 nt, Human
ccuggcagccccu

SEQ ID NO: 1963036 - RNA, 12 nt, Human
ccuggcagcccc

SEQ ID NO: 1963037 - RNA, 22 nt, Human
ccuggcacccggccccugcugg

SEQ ID NO: 1963038 - RNA, 22 nt, Human
ccuggcacuauaauguaagcuc

SEQ ID NO: 1963039 - RNA, 23 nt, Human
ccuggcacccggccccugcuggu

SEQ ID NO: 1963040 - RNA, 18 nt, Human
ccuggaauauauaaccag

SEQ ID NO: 1963041 - RNA, 17 nt, Human
ccuggaaggcccagcac

SEQ ID NO: 1963042 - RNA, 18 nt, Human
ccuggaaggcccagcacc

SEQ ID NO: 1963043 - RNA, 19 nt, Human
ccuggagacuaaccccacc

SEQ ID NO: 1963044 - RNA, 13 nt, Human
ccacguuucuaaa

SEQ ID NO: 1963045 - RNA, 17 nt, Human
ccacgugcguguuuucu

SEQ ID NO: 1963046 - RNA, 13 nt, Human
ccacguuuugaaa

SEQ ID NO: 1963047 - RNA, 13 nt, Human
ccacucccugcaa

SEQ ID NO: 1963048 - RNA, 12 nt, Human
ccacucccugca

SEQ ID NO: 1963049 - RNA, 17 nt, Human
ccacuccagaccccugg

SEQ ID NO: 1963050 - RNA, 19 nt, Human
ccacuccagaccccuggcu

SEQ ID NO: 1963051 - RNA, 18 nt, Human
ccacuaagaacaccugca

SEQ ID NO: 1963052 - RNA, 19 nt, Human
ccacuccccagccagccug

SEQ ID NO: 1963053 - RNA, 22 nt, Human
ccacuccccagccagccuggcu

SEQ ID NO: 1963054 - RNA, 16 nt, Human
ccacuccaagccagca

SEQ ID NO: 1963055 - RNA, 14 nt, Human
ccacuccaagccag

SEQ ID NO: 1963056 - RNA, 16 nt, Human
ccacuaccccuugauu

SEQ ID NO: 1963057 - RNA, 13 nt, Human
ccacucaagacca

SEQ ID NO: 1963058 - RNA, 15 nt, Human
ccacucaagaccaaa

SEQ ID NO: 1963059 - RNA, 17 nt, Human
ccacucaagaccaaaug

SEQ ID NO: 1963060 - RNA, 20 nt, Human
ccacucaagaccaaauggaa

SEQ ID NO: 1963061 - RNA, 23 nt, Human
ccacucaagaccaaauggaaaca

SEQ ID NO: 1963062 - RNA, 23 nt, Human
ccacuacggaauaguuggcuagg

SEQ ID NO: 1963063 - RNA, 18 nt, Human
ccacuacauucuguuaau

SEQ ID NO: 1963064 - RNA, 22 nt, Human
ccacuacggaauaguuggcuag

SEQ ID NO: 1963065 - RNA, 20 nt, Human
ccacugcacuccagccuggg

SEQ ID NO: 1963066 - RNA, 19 nt, Human
ccacugcacuccagccugg

SEQ ID NO: 1963067 - RNA, 15 nt, Human
ccacucccugcaacc

SEQ ID NO: 1963068 - RNA, 18 nt, Human
ccacugcacuccagccug

SEQ ID NO: 1963069 - RNA, 23 nt, Human
ccacugcacuccagccuggguga

SEQ ID NO: 1963070 - RNA, 15 nt, Human
ccacugcccacuggc

SEQ ID NO: 1963071 - RNA, 16 nt, Human
ccacugcccacuggcc

SEQ ID NO: 1963072 - RNA, 17 nt, Human
ccacugcccacuggccg

SEQ ID NO: 1963073 - RNA, 16 nt, Human
ccacugcgaccacaag

SEQ ID NO: 1963074 - RNA, 11 nt, Human
ccacugccucu

SEQ ID NO: 1963075 - RNA, 15 nt, Human
ccacccuccacucuc

SEQ ID NO: 1963076 - RNA, 19 nt, Human
ccacccgugguggcucaag

SEQ ID NO: 1963077 - RNA, 19 nt, Human
ccaccccucaacaccucug

SEQ ID NO: 1963078 - RNA, 16 nt, Human
ccacccgccccugccc

SEQ ID NO: 1963079 - RNA, 17 nt, Human
ccacccgguucaguguu

SEQ ID NO: 1963080 - RNA, 20 nt, Human
ccacccgguucaguguuucu

SEQ ID NO: 1963081 - RNA, 17 nt, Human
ccacccugaaagcccug

SEQ ID NO: 1963082 - RNA, 16 nt, Human
ccacccugaaagcccu

SEQ ID NO: 1963083 - RNA, 18 nt, Human
ccacccugaaagcccuga

SEQ ID NO: 1963084 - RNA, 12 nt, Human
ccaccucagccu

SEQ ID NO: 1963085 - RNA, 13 nt, Human
ccaccucagccuc

SEQ ID NO: 1963086 - RNA, 14 nt, Human
ccaccucagccucc

SEQ ID NO: 1963087 - RNA, 15 nt, Human
ccaccucagccuccc

SEQ ID NO: 1963088 - RNA, 12 nt, Human
ccacccaggagc

SEQ ID NO: 1963089 - RNA, 14 nt, Human
ccacccaggagccc

SEQ ID NO: 1963090 - RNA, 17 nt, Human
ccaccucccacaaagga

SEQ ID NO: 1963091 - RNA, 18 nt, Human
ccaccucccccacuccca

SEQ ID NO: 1963092 - RNA, 14 nt, Human
ccaccuccccuugc

SEQ ID NO: 1963093 - RNA, 15 nt, Human
ccaccuccccuugcc

SEQ ID NO: 1963094 - RNA, 17 nt, Human
ccaccuccccuugccag

SEQ ID NO: 1963095 - RNA, 18 nt, Human
ccaccuccccuugccagc

SEQ ID NO: 1963096 - RNA, 19 nt, Human
ccaccuccccuugccagcu

SEQ ID NO: 1963097 - RNA, 20 nt, Human
ccaccuccccuugccagcug

SEQ ID NO: 1963098 - RNA, 16 nt, Human
ccaccugccagggaca

SEQ ID NO: 1963099 - RNA, 14 nt, Human
ccaccugaguuccu

SEQ ID NO: 1963100 - RNA, 15 nt, Human
ccaccugaguuccug

SEQ ID NO: 1963101 - RNA, 14 nt, Human
ccaccugcccaacc

SEQ ID NO: 1963102 - RNA, 16 nt, Human
ccaccugaguuccuga

SEQ ID NO: 1963103 - RNA, 12 nt, Human
ccaccugcagcu

SEQ ID NO: 1963104 - RNA, 15 nt, Human
ccaccugcagcuccc

SEQ ID NO: 1963105 - RNA, 17 nt, Human
ccaccugcagcucccuc

SEQ ID NO: 1963106 - RNA, 20 nt, Human
ccaccugccuguugggccag

SEQ ID NO: 1963107 - RNA, 17 nt, Human
ccaccugccuguugggc

SEQ ID NO: 1963108 - RNA, 12 nt, Human
ccacggccaggc

SEQ ID NO: 1963109 - RNA, 13 nt, Human
ccacggccaggcc

SEQ ID NO: 1963110 - RNA, 14 nt, Human
ccacggccaggcca

SEQ ID NO: 1963111 - RNA, 15 nt, Human
ccacggccaggccag

SEQ ID NO: 1963112 - RNA, 23 nt, Human
ccacgucuauuucaucagaacag

SEQ ID NO: 1963113 - RNA, 16 nt, Human
ccaccuggccucugca

SEQ ID NO: 1963114 - RNA, 15 nt, Human
ccaccuggccucugc

SEQ ID NO: 1963115 - RNA, 22 nt, Human
ccaccugcggugcuaucucccc

SEQ ID NO: 1963116 - RNA, 14 nt, Human
ccaccugcucugcu

SEQ ID NO: 1963117 - RNA, 14 nt, Human
ccaccuggccucug

SEQ ID NO: 1963118 - RNA, 17 nt, Human
ccaccuggccucugcac

SEQ ID NO: 1963119 - RNA, 19 nt, Human
ccacccaagggccuggccu

SEQ ID NO: 1963120 - RNA, 17 nt, Human
ccacccaagggccuggc

SEQ ID NO: 1963121 - RNA, 16 nt, Human
ccacccaagggccugg

SEQ ID NO: 1963122 - RNA, 22 nt, Human
ccaccaagccuggucagcccaa

SEQ ID NO: 1963123 - RNA, 20 nt, Human
ccaccaacauacucccaucu

SEQ ID NO: 1963124 - RNA, 14 nt, Human
ccaccacacccagc

SEQ ID NO: 1963125 - RNA, 16 nt, Human
ccaccacacccagccc

SEQ ID NO: 1963126 - RNA, 16 nt, Human
ccacccaccucagccu

SEQ ID NO: 1963127 - RNA, 14 nt, Human
ccacccaccucagc

SEQ ID NO: 1963128 - RNA, 15 nt, Human
ccacccaccucagcc

SEQ ID NO: 1963129 - RNA, 21 nt, Human
ccacccaagggccuggccuga

SEQ ID NO: 1963130 - RNA, 20 nt, Human
ccacccaagggccuggccug

SEQ ID NO: 1963131 - RNA, 22 nt, Human
ccacccaagggccuggccugag

SEQ ID NO: 1963132 - RNA, 13 nt, Human
ccacccaccucag

SEQ ID NO: 1963133 - RNA, 22 nt, Human
ccacacugauccagcccugagu

SEQ ID NO: 1963134 - RNA, 19 nt, Human
ccacacugauccagcccug

SEQ ID NO: 1963135 - RNA, 19 nt, Human
ccacauagugaugguuccc

SEQ ID NO: 1963136 - RNA, 21 nt, Human
ccacauagugaugguuccccu

SEQ ID NO: 1963137 - RNA, 22 nt, Human
ccacauagugaugguuccccug

SEQ ID NO: 1963138 - RNA, 23 nt, Human
ccacauagugaugguuccccugu

SEQ ID NO: 1963139 - RNA, 14 nt, Human
ccacaucuugcucu

SEQ ID NO: 1963140 - RNA, 18 nt, Human
ccaccaacauacucccau

SEQ ID NO: 1963141 - RNA, 14 nt, Human
ccaccaacauacuc

SEQ ID NO: 1963142 - RNA, 16 nt, Human
ccacaugccaggggcc

SEQ ID NO: 1963143 - RNA, 16 nt, Human
ccacaucuugcucugc

SEQ ID NO: 1963144 - RNA, 22 nt, Human
ccacaucuugcucugcugacag

SEQ ID NO: 1963145 - RNA, 23 nt, Human
ccacaucuugcucugcugacaga

SEQ ID NO: 1963146 - RNA, 20 nt, Human
ccaaaccaccagaagcccag

SEQ ID NO: 1963147 - RNA, 16 nt, Human
ccaaacccacccuuuc

SEQ ID NO: 1963148 - RNA, 20 nt, Human
ccaaacccacccuuucuacu

SEQ ID NO: 1963149 - RNA, 16 nt, Human
ccaaacccccauucug

SEQ ID NO: 1963150 - RNA, 19 nt, Human
ccaaacccccauucugucc

SEQ ID NO: 1963151 - RNA, 12 nt, Human
ccacacccagcc

SEQ ID NO: 1963152 - RNA, 13 nt, Human
ccacacccagccc

SEQ ID NO: 1963153 - RNA, 14 nt, Human
ccacacccagccca

SEQ ID NO: 1963154 - RNA, 13 nt, Human
ccacacuccagcu

SEQ ID NO: 1963155 - RNA, 14 nt, Human
ccacacuccagcug

SEQ ID NO: 1963156 - RNA, 17 nt, Human
ccacacuccagcuggga

SEQ ID NO: 1963157 - RNA, 12 nt, Human
ccagauuucacu

SEQ ID NO: 1963158 - RNA, 22 nt, Human
ccagauuuaugcauauuauuuu

SEQ ID NO: 1963159 - RNA, 13 nt, Human
ccagauuuaugca

SEQ ID NO: 1963160 - RNA, 21 nt, Human
ccagauugcaacaggcugggc

SEQ ID NO: 1963161 - RNA, 23 nt, Human
ccagauucuuuccugaggcuggg

SEQ ID NO: 1963162 - RNA, 19 nt, Human
ccagauugcaacaggcugg

SEQ ID NO: 1963163 - RNA, 20 nt, Human
ccagauugcaacaggcuggg

SEQ ID NO: 1963164 - RNA, 22 nt, Human
ccagauucuuuccugaggcugg

SEQ ID NO: 1963165 - RNA, 21 nt, Human
ccagauucuuuccugaggcug

SEQ ID NO: 1963166 - RNA, 20 nt, Human
ccagauucuuuccugaggcu

SEQ ID NO: 1963167 - RNA, 19 nt, Human
ccagauucuuuccugaggc

SEQ ID NO: 1963168 - RNA, 18 nt, Human
ccagaugugacaguguug

SEQ ID NO: 1963169 - RNA, 18 nt, Human
ccagauucuuuccugagg

SEQ ID NO: 1963170 - RNA, 22 nt, Human
ccagauggcuggaaggggucca

SEQ ID NO: 1963171 - RNA, 23 nt, Human
ccagaugcaccagcccuuagcag

SEQ ID NO: 1963172 - RNA, 16 nt, Human
ccagagggccugcaag

SEQ ID NO: 1963173 - RNA, 15 nt, Human
ccagagggccugcaa

SEQ ID NO: 1963174 - RNA, 13 nt, Human
ccagagggccugc

SEQ ID NO: 1963175 - RNA, 22 nt, Human
ccagagggagugacagaggcag

SEQ ID NO: 1963176 - RNA, 23 nt, Human
ccagagggagugacagaggcagc

SEQ ID NO: 1963177 - RNA, 12 nt, Human
ccagacccccug

SEQ ID NO: 1963178 - RNA, 16 nt, Human
ccagacccccuggaga

SEQ ID NO: 1963179 - RNA, 20 nt, Human
ccagacaccuugacagggca

SEQ ID NO: 1963180 - RNA, 21 nt, Human
ccagagaggguggugaccucu

SEQ ID NO: 1963181 - RNA, 23 nt, Human
ccagagaggguggugaccucugc

SEQ ID NO: 1963182 - RNA, 18 nt, Human
ccagacccccuggagacu

SEQ ID NO: 1963183 - RNA, 14 nt, Human
ccagagaggguggu

SEQ ID NO: 1963184 - RNA, 20 nt, Human
ccacuguacuugcucuugau

SEQ ID NO: 1963185 - RNA, 17 nt, Human
ccagacaccuugacagg

SEQ ID NO: 1963186 - RNA, 19 nt, Human
ccagacaccuugacagggc

SEQ ID NO: 1963187 - RNA, 19 nt, Human
ccacuguacuugcucuuga

SEQ ID NO: 1963188 - RNA, 18 nt, Human
ccacuguacuugcucuug

SEQ ID NO: 1963189 - RNA, 17 nt, Human
ccacuguacuugcucuu

SEQ ID NO: 1963190 - RNA, 13 nt, Human
ccagagcugccac

SEQ ID NO: 1963191 - RNA, 12 nt, Human
ccagagcugcca

SEQ ID NO: 1963192 - RNA, 11 nt, Human
ccagagcugcc

SEQ ID NO: 1963193 - RNA, 19 nt, Human
ccagagcugccaccugccu

SEQ ID NO: 1963194 - RNA, 16 nt, Human
ccagagcugccaccug

SEQ ID NO: 1963195 - RNA, 15 nt, Human
ccagagcugccaccu

SEQ ID NO: 1963196 - RNA, 14 nt, Human
ccagagcugccacc

SEQ ID NO: 1963197 - RNA, 13 nt, Human
ccagagcugccag

SEQ ID NO: 1963198 - RNA, 14 nt, Human
ccagagcugccagu

SEQ ID NO: 1963199 - RNA, 23 nt, Human
ccagagcugcuuccccgucaccu

SEQ ID NO: 1963200 - RNA, 16 nt, Human
ccagagggagugacag

SEQ ID NO: 1963201 - RNA, 17 nt, Human
ccagagggagugacaga

SEQ ID NO: 1963202 - RNA, 18 nt, Human
ccagagggagugacagag

SEQ ID NO: 1963203 - RNA, 19 nt, Human
ccagagggagugacagagg

SEQ ID NO: 1963204 - RNA, 20 nt, Human
ccagagggagugacagaggc

SEQ ID NO: 1963205 - RNA, 21 nt, Human
ccagagggagugacagaggca

SEQ ID NO: 1963206 - RNA, 21 nt, Human
ccagaggagagaggacccccu

SEQ ID NO: 1963207 - RNA, 22 nt, Human
ccagaggagagaggacccccug

SEQ ID NO: 1963208 - RNA, 16 nt, Human
ccagcaagugagagcu

SEQ ID NO: 1963209 - RNA, 20 nt, Human
ccagcaagugagagcugggu

SEQ ID NO: 1963210 - RNA, 21 nt, Human
ccagcaagugagagcugggug

SEQ ID NO: 1963211 - RNA, 22 nt, Human
ccagcaagugagagcugggugu

SEQ ID NO: 1963212 - RNA, 19 nt, Human
ccagcaauucuccugccuc

SEQ ID NO: 1963213 - RNA, 20 nt, Human
ccagcaauucuccugccuca

SEQ ID NO: 1963214 - RNA, 21 nt, Human
ccagcaauucuccugccucag

SEQ ID NO: 1963215 - RNA, 16 nt, Human
ccagcaauucuccugc

SEQ ID NO: 1963216 - RNA, 18 nt, Human
ccagcaauucuccugccu

SEQ ID NO: 1963217 - RNA, 14 nt, Human
ccagauuucacucu

SEQ ID NO: 1963218 - RNA, 15 nt, Human
ccagcaagugagagc

SEQ ID NO: 1963219 - RNA, 19 nt, Human
ccagccgccaugcuccugg

SEQ ID NO: 1963220 - RNA, 18 nt, Human
ccagccgccaugcuccug

SEQ ID NO: 1963221 - RNA, 23 nt, Human
ccagccgagauagccaaggccaa

SEQ ID NO: 1963222 - RNA, 18 nt, Human
ccagcccuuccucugcuc

SEQ ID NO: 1963223 - RNA, 14 nt, Human
ccagccgccaugcu

SEQ ID NO: 1963224 - RNA, 21 nt, Human
ccagccuccaagcuccaucuc

SEQ ID NO: 1963225 - RNA, 23 nt, Human
ccagccucaaauccaggacccug

SEQ ID NO: 1963226 - RNA, 17 nt, Human
ccagccucaaauccagg

SEQ ID NO: 1963227 - RNA, 18 nt, Human
ccagccucaaauccagga

SEQ ID NO: 1963228 - RNA, 19 nt, Human
ccagccucaaauccaggac

SEQ ID NO: 1963229 - RNA, 20 nt, Human
ccagccucaaauccaggacc

SEQ ID NO: 1963230 - RNA, 16 nt, Human
ccagccccagugccca

SEQ ID NO: 1963231 - RNA, 16 nt, Human
ccagcccuuagcaggg

SEQ ID NO: 1963232 - RNA, 21 nt, Human
ccagcccuccuuaucaaagga

SEQ ID NO: 1963233 - RNA, 17 nt, Human
ccagcccuuagcaggga

SEQ ID NO: 1963234 - RNA, 13 nt, Human
ccagcccuuccuc

SEQ ID NO: 1963235 - RNA, 15 nt, Human
ccagcccuuccucug

SEQ ID NO: 1963236 - RNA, 17 nt, Human
ccagcccuuccucugcu

SEQ ID NO: 1963237 - RNA, 23 nt, Human
ccagccccaaaacucuccucugc

SEQ ID NO: 1963238 - RNA, 13 nt, Human
ccagccccagugc

SEQ ID NO: 1963239 - RNA, 15 nt, Human
ccagccccagugccc

SEQ ID NO: 1963240 - RNA, 19 nt, Human
ccagccccacccuguuuug

SEQ ID NO: 1963241 - RNA, 18 nt, Human
ccagcaucgcacucuggc

SEQ ID NO: 1963242 - RNA, 23 nt, Human
ccagcauaauacuugcuuuggaa

SEQ ID NO: 1963243 - RNA, 17 nt, Human
ccagcagucugccugga

SEQ ID NO: 1963244 - RNA, 19 nt, Human
ccagccaaagccuccucca

SEQ ID NO: 1963245 - RNA, 18 nt, Human
ccagccaaagccuccucc

SEQ ID NO: 1963246 - RNA, 15 nt, Human
ccagccaaagccucc

SEQ ID NO: 1963247 - RNA, 16 nt, Human
ccagccaaacacacag

SEQ ID NO: 1963248 - RNA, 18 nt, Human
ccagccaaacacacagaa

SEQ ID NO: 1963249 - RNA, 20 nt, Human
ccagccaaacacacagaagg

SEQ ID NO: 1963250 - RNA, 21 nt, Human
ccagccaaacacacagaaggg

SEQ ID NO: 1963251 - RNA, 14 nt, Human
ccagccagccuggc

SEQ ID NO: 1963252 - RNA, 16 nt, Human
ccagccagccuggcug

SEQ ID NO: 1963253 - RNA, 16 nt, Human
ccagccacuccccagc

SEQ ID NO: 1963254 - RNA, 22 nt, Human
ccagccacuccccagccagccu

SEQ ID NO: 1963255 - RNA, 19 nt, Human
ccauauucuguuggccagu

SEQ ID NO: 1963256 - RNA, 14 nt, Human
ccaucuaaacugcc

SEQ ID NO: 1963257 - RNA, 21 nt, Human
ccaugggaaaugucaacaagu

SEQ ID NO: 1963258 - RNA, 22 nt, Human
ccauggccggcuuucaggagcu

SEQ ID NO: 1963259 - RNA, 18 nt, Human
ccauggccggcuuucagg

SEQ ID NO: 1963260 - RNA, 21 nt, Human
ccauggccggcuuucaggagc

SEQ ID NO: 1963261 - RNA, 15 nt, Human
ccaucuaaacugccc

SEQ ID NO: 1963262 - RNA, 16 nt, Human
ccaucuaaacugcccc

SEQ ID NO: 1963263 - RNA, 15 nt, Human
ccaucuaaaaauaua

SEQ ID NO: 1963264 - RNA, 16 nt, Human
ccaugggacagggagg

SEQ ID NO: 1963265 - RNA, 19 nt, Human
ccaugggacagggaggacg

SEQ ID NO: 1963266 - RNA, 17 nt, Human
ccaugggaggcuggagu

SEQ ID NO: 1963267 - RNA, 17 nt, Human
ccauguuggccaggcug

SEQ ID NO: 1963268 - RNA, 16 nt, Human
ccauguuggccaggcu

SEQ ID NO: 1963269 - RNA, 18 nt, Human
ccauguuggccaggcugc

SEQ ID NO: 1963270 - RNA, 20 nt, Human
ccauguuggccaggcugcuc

SEQ ID NO: 1963271 - RNA, 21 nt, Human
ccauguuggccaggcugcucu

SEQ ID NO: 1963272 - RNA, 23 nt, Human
ccauguuggccaggcugcucuca

SEQ ID NO: 1963273 - RNA, 12 nt, Human
ccauguuucugu

SEQ ID NO: 1963274 - RNA, 18 nt, Human
ccauucuccaccugccag

SEQ ID NO: 1963275 - RNA, 18 nt, Human
cccaaaacucuccucugc

SEQ ID NO: 1963276 - RNA, 16 nt, Human
cccaaaacucuccucu

SEQ ID NO: 1963277 - RNA, 21 nt, Human
cccaaaacaccggguuccagc

SEQ ID NO: 1963278 - RNA, 20 nt, Human
cccaaaacucuccucugcug

SEQ ID NO: 1963279 - RNA, 13 nt, Human
cccaaagugcugg

SEQ ID NO: 1963280 - RNA, 15 nt, Human
cccaaagugcuggga

SEQ ID NO: 1963281 - RNA, 19 nt, Human
cccaaaacaccggguucca

SEQ ID NO: 1963282 - RNA, 14 nt, Human
ccauuuguguuuau

SEQ ID NO: 1963283 - RNA, 17 nt, Human
ccauuugggcagagagg

SEQ ID NO: 1963284 - RNA, 20 nt, Human
ccauucuccaccugccaggg

SEQ ID NO: 1963285 - RNA, 19 nt, Human
ccauucuccaccugccagg

SEQ ID NO: 1963286 - RNA, 15 nt, Human
cccaacccuggcacc

SEQ ID NO: 1963287 - RNA, 21 nt, Human
cccaaccucuuccuccugaca

SEQ ID NO: 1963288 - RNA, 23 nt, Human
cccaaccucuuccuccugacacc

SEQ ID NO: 1963289 - RNA, 14 nt, Human
cccaaccucuuccu

SEQ ID NO: 1963290 - RNA, 18 nt, Human
cccaaccucuuccuccug

SEQ ID NO: 1963291 - RNA, 19 nt, Human
cccaaccucuuccuccuga

SEQ ID NO: 1963292 - RNA, 22 nt, Human
cccaaugagacucuagggucca

SEQ ID NO: 1963293 - RNA, 23 nt, Human
cccaaucccagcuaccucaacca

SEQ ID NO: 1963294 - RNA, 12 nt, Human
cccaaucccuga

SEQ ID NO: 1963295 - RNA, 17 nt, Human
cccaaggcucugagcaa

SEQ ID NO: 1963296 - RNA, 19 nt, Human
cccaaggcccccugccugc

SEQ ID NO: 1963297 - RNA, 22 nt, Human
cccaaggcccccugccugcccu

SEQ ID NO: 1963298 - RNA, 22 nt, Human
cccaaauggaaaugggcagagc

SEQ ID NO: 1963299 - RNA, 18 nt, Human
cccaaauggaaaugggca

SEQ ID NO: 1963300 - RNA, 16 nt, Human
cccaaagugcugggau

SEQ ID NO: 1963301 - RNA, 13 nt, Human
ccaucuacccucc

SEQ ID NO: 1963302 - RNA, 20 nt, Human
ccagugccgagaaggaagcc

SEQ ID NO: 1963303 - RNA, 22 nt, Human
ccagugguuccuaauccucuag

SEQ ID NO: 1963304 - RNA, 15 nt, Human
ccagugaggcucugc

SEQ ID NO: 1963305 - RNA, 14 nt, Human
ccagugaggcucug

SEQ ID NO: 1963306 - RNA, 16 nt, Human
ccagugaggcucugcc

SEQ ID NO: 1963307 - RNA, 18 nt, Human
ccaguguccauggacuca

SEQ ID NO: 1963308 - RNA, 22 nt, Human
ccaguguuguggauuuaacaga

SEQ ID NO: 1963309 - RNA, 12 nt, Human
ccauaggucacc

SEQ ID NO: 1963310 - RNA, 14 nt, Human
ccauaggcccuuuc

SEQ ID NO: 1963311 - RNA, 12 nt, Human
ccauaggcccuu

SEQ ID NO: 1963312 - RNA, 23 nt, Human
ccauauucuguuggccaguguga

SEQ ID NO: 1963313 - RNA, 21 nt, Human
ccauaguaugggacuggccuc

SEQ ID NO: 1963314 - RNA, 15 nt, Human
ccauagcuguggugu

SEQ ID NO: 1963315 - RNA, 23 nt, Human
ccaguuacuuuccaauucuccuu

SEQ ID NO: 1963316 - RNA, 15 nt, Human
ccagccuccaugcug

SEQ ID NO: 1963317 - RNA, 16 nt, Human
ccagccuccaugcugc

SEQ ID NO: 1963318 - RNA, 15 nt, Human
ccaggccagcugccu

SEQ ID NO: 1963319 - RNA, 21 nt, Human
ccaggcauuccccaggaggcc

SEQ ID NO: 1963320 - RNA, 19 nt, Human
ccaggcauuccccaggagg

SEQ ID NO: 1963321 - RNA, 18 nt, Human
ccaggcauuccccaggag

SEQ ID NO: 1963322 - RNA, 17 nt, Human
ccaggcauuccccagga

SEQ ID NO: 1963323 - RNA, 16 nt, Human
ccaggagccccgaggc

SEQ ID NO: 1963324 - RNA, 19 nt, Human
ccaggagccccgaggccuu

SEQ ID NO: 1963325 - RNA, 12 nt, Human
ccaggagccucc

SEQ ID NO: 1963326 - RNA, 20 nt, Human
ccaggagccccgaggccuuc

SEQ ID NO: 1963327 - RNA, 16 nt, Human
ccaggagccugcccag

SEQ ID NO: 1963328 - RNA, 17 nt, Human
ccaggagccugcccagc

SEQ ID NO: 1963329 - RNA, 19 nt, Human
ccaggccagggggccaguc

SEQ ID NO: 1963330 - RNA, 21 nt, Human
ccaggcccucugcccacuccc

SEQ ID NO: 1963331 - RNA, 20 nt, Human
ccaggcccucugcccacucc

SEQ ID NO: 1963332 - RNA, 23 nt, Human
ccaggcccucugcccacucccug

SEQ ID NO: 1963333 - RNA, 22 nt, Human
ccaggcccucugcccacucccu

SEQ ID NO: 1963334 - RNA, 19 nt, Human
ccaggcgccccuucccccu

SEQ ID NO: 1963335 - RNA, 18 nt, Human
ccaggcgccccuuccccc

SEQ ID NO: 1963336 - RNA, 16 nt, Human
ccaggccuacuccugu

SEQ ID NO: 1963337 - RNA, 17 nt, Human
ccaggcuuagucacuga

SEQ ID NO: 1963338 - RNA, 24 nt, Human
ccaggcuguaucccaugagccuca

SEQ ID NO: 1963339 - RNA, 17 nt, Human
ccaggccuacuccuguc

SEQ ID NO: 1963340 - RNA, 16 nt, Human
ccaggcgcuagcacag

SEQ ID NO: 1963341 - RNA, 23 nt, Human
ccaggcgcuagcacagcucccuu

SEQ ID NO: 1963342 - RNA, 24 nt, Human
ccaggugcacaagcuccaagcucc

SEQ ID NO: 1963343 - RNA, 15 nt, Human
ccagguuccacagag

SEQ ID NO: 1963344 - RNA, 18 nt, Human
ccagguuccacagaggac

SEQ ID NO: 1963345 - RNA, 15 nt, Human
ccagguucagcuugu

SEQ ID NO: 1963346 - RNA, 17 nt, Human
ccagguuuuuggucuga

SEQ ID NO: 1963347 - RNA, 18 nt, Human
ccagucuggaaugcagug

SEQ ID NO: 1963348 - RNA, 19 nt, Human
ccagucuggaaugcagugg

SEQ ID NO: 1963349 - RNA, 20 nt, Human
ccagucuggaaugcaguggu

SEQ ID NO: 1963350 - RNA, 13 nt, Human
ccagggccagaag

SEQ ID NO: 1963351 - RNA, 21 nt, Human
ccagggcuggaaugauuucag

SEQ ID NO: 1963352 - RNA, 19 nt, Human
ccaggguuggcaccuuccc

SEQ ID NO: 1963353 - RNA, 21 nt, Human
ccaggguuggcaccuuccccc

SEQ ID NO: 1963354 - RNA, 18 nt, Human
ccaggugcacaagcucca

SEQ ID NO: 1963355 - RNA, 20 nt, Human
ccaggugcacaagcuccaag

SEQ ID NO: 1963356 - RNA, 19 nt, Human
ccaggugcacaagcuccaa

SEQ ID NO: 1963357 - RNA, 22 nt, Human
ccagggacagaggggguggccu

SEQ ID NO: 1963358 - RNA, 21 nt, Human
ccagggacagaggggguggcc

SEQ ID NO: 1963359 - RNA, 15 nt, Human
ccagggacagagggg

SEQ ID NO: 1963360 - RNA, 14 nt, Human
ccagggacagaggg

SEQ ID NO: 1963361 - RNA, 20 nt, Human
ccaggcuuagucacugagac

SEQ ID NO: 1963362 - RNA, 14 nt, Human
cauucuucccuuau

SEQ ID NO: 1963363 - RNA, 22 nt, Human
cauucuucugaucacugaaaua

SEQ ID NO: 1963364 - RNA, 23 nt, Human
cauucuucuguacgucugacagg

SEQ ID NO: 1963365 - RNA, 13 nt, Human
cauucuucugauc

SEQ ID NO: 1963366 - RNA, 19 nt, Human
cauucuucugaucacugaa

SEQ ID NO: 1963367 - RNA, 14 nt, Human
cauuccugaacagg

SEQ ID NO: 1963368 - RNA, 22 nt, Human
cauuccugaugcuucuucagag

SEQ ID NO: 1963369 - RNA, 19 nt, Human
cauuccugaugcuucuuca

SEQ ID NO: 1963370 - RNA, 16 nt, Human
cauuccugaugcuucu

SEQ ID NO: 1963371 - RNA, 14 nt, Human
cauuccugaugcuu

SEQ ID NO: 1963372 - RNA, 23 nt, Human
cauuccugaugcuucuucagaga

SEQ ID NO: 1963373 - RNA, 15 nt, Human
cauucugacucauau

SEQ ID NO: 1963374 - RNA, 12 nt, Human
cauucugccugc

SEQ ID NO: 1963375 - RNA, 13 nt, Human
cauucugccugcc

SEQ ID NO: 1963376 - RNA, 15 nt, Human
cauucugccugccca

SEQ ID NO: 1963377 - RNA, 16 nt, Human
cauucugccugcccag

SEQ ID NO: 1963378 - RNA, 17 nt, Human
cauucugccugcccagg

SEQ ID NO: 1963379 - RNA, 18 nt, Human
cauucugccugcccaggc

SEQ ID NO: 1963380 - RNA, 19 nt, Human
cauucugccugcccaggcc

SEQ ID NO: 1963381 - RNA, 20 nt, Human
cauucugccugcccaggccc

SEQ ID NO: 1963382 - RNA, 17 nt, Human
cauucuguuaaucauua

SEQ ID NO: 1963383 - RNA, 21 nt, Human
cauucuucccaacuugccuuu

SEQ ID NO: 1963384 - RNA, 13 nt, Human
cauucuggaauaa

SEQ ID NO: 1963385 - RNA, 11 nt, Human
cauucuguccu

SEQ ID NO: 1963386 - RNA, 20 nt, Human
cauuacaagccuggaaaaaa

SEQ ID NO: 1963387 - RNA, 21 nt, Human
cauuacaagccuggaaaaaaa

SEQ ID NO: 1963388 - RNA, 17 nt, Human
cauuaaggccacaucca

SEQ ID NO: 1963389 - RNA, 16 nt, Human
cauuaaaauaugcacu

SEQ ID NO: 1963390 - RNA, 18 nt, Human
cauuaaaauaugcacuaa

SEQ ID NO: 1963391 - RNA, 15 nt, Human
cauuaacugcuuccu

SEQ ID NO: 1963392 - RNA, 13 nt, Human
cauuaacugcuuc

SEQ ID NO: 1963393 - RNA, 20 nt, Human
cauucaaauguauuacagug

SEQ ID NO: 1963394 - RNA, 17 nt, Human
cauuacuuguugccuau

SEQ ID NO: 1963395 - RNA, 18 nt, Human
cauuacuuguugccuaua

SEQ ID NO: 1963396 - RNA, 20 nt, Human
cauuacuguuuaagacacuu

SEQ ID NO: 1963397 - RNA, 19 nt, Human
cauuccccaggaggccagc

SEQ ID NO: 1963398 - RNA, 18 nt, Human
cauuccccaggaggccag

SEQ ID NO: 1963399 - RNA, 20 nt, Human
cauuccccaggaggccagcc

SEQ ID NO: 1963400 - RNA, 13 nt, Human
cauuccccauggg

SEQ ID NO: 1963401 - RNA, 17 nt, Human
cauuccccgucucuggu

SEQ ID NO: 1963402 - RNA, 18 nt, Human
cauucccucgucuuuccc

SEQ ID NO: 1963403 - RNA, 19 nt, Human
cauucccucgucuuuccca

SEQ ID NO: 1963404 - RNA, 14 nt, Human
cauuccagaggaag

SEQ ID NO: 1963405 - RNA, 12 nt, Human
cauuccaggccc

SEQ ID NO: 1963406 - RNA, 17 nt, Human
cauuccaggcccgaagc

SEQ ID NO: 1963407 - RNA, 16 nt, Human
cauuccagucaggcuc

SEQ ID NO: 1963408 - RNA, 17 nt, Human
cauuccccaggaggcca

SEQ ID NO: 1963409 - RNA, 15 nt, Human
cauuccccaggaggc

SEQ ID NO: 1963410 - RNA, 13 nt, Human
cauuccccaggag

SEQ ID NO: 1963411 - RNA, 13 nt, Human
cauuccagaggaa

SEQ ID NO: 1963412 - RNA, 22 nt, Human
cauuccaccuucccaugcccug

SEQ ID NO: 1963413 - RNA, 17 nt, Human
cauuccaccuucccaug

SEQ ID NO: 1963414 - RNA, 19 nt, Human
cauucauauuacaauauuu

SEQ ID NO: 1963415 - RNA, 19 nt, Human
cauucauuuucuggguguu

SEQ ID NO: 1963416 - RNA, 21 nt, Human
cauucagauaugauucaaaug

SEQ ID NO: 1963417 - RNA, 17 nt, Human
cauucauauuacaauau

SEQ ID NO: 1963418 - RNA, 18 nt, Human
cauucauauuacaauauu

SEQ ID NO: 1963419 - RNA, 23 nt, Human
cauuuuaccuuugacaaagguaa

SEQ ID NO: 1963420 - RNA, 20 nt, Human
cauuuuacagagaaagaaau

SEQ ID NO: 1963421 - RNA, 19 nt, Human
cauuuuacaguuacuuuuc

SEQ ID NO: 1963422 - RNA, 23 nt, Human
cauuuuauuuuauuaugcaugaa

SEQ ID NO: 1963423 - RNA, 22 nt, Human
cauuuuauuuuauuaugcauga

SEQ ID NO: 1963424 - RNA, 22 nt, Human
cauuuuacaguuacuuuuccuu

SEQ ID NO: 1963425 - RNA, 20 nt, Human
cauuuuacccacacacagau

SEQ ID NO: 1963426 - RNA, 14 nt, Human
cauuugcuuuggaa

SEQ ID NO: 1963427 - RNA, 15 nt, Human
cauuugcuuuggaag

SEQ ID NO: 1963428 - RNA, 13 nt, Human
cauuugauuugua

SEQ ID NO: 1963429 - RNA, 18 nt, Human
cauuucuuuuuaaaaaaa

SEQ ID NO: 1963430 - RNA, 16 nt, Human
ccaaacccuucagugc

SEQ ID NO: 1963431 - RNA, 17 nt, Human
ccaaaccaccagaagcc

SEQ ID NO: 1963432 - RNA, 14 nt, Human
ccaaacacaggcaa

SEQ ID NO: 1963433 - RNA, 18 nt, Human
ccaaacauuaauguugau

SEQ ID NO: 1963434 - RNA, 21 nt, Human
ccaaacauuaauguugauuuc

SEQ ID NO: 1963435 - RNA, 22 nt, Human
ccaaacauuaauguugauuucu

SEQ ID NO: 1963436 - RNA, 18 nt, Human
ccaaacacacagaagggg

SEQ ID NO: 1963437 - RNA, 13 nt, Human
ccaaacacaggca

SEQ ID NO: 1963438 - RNA, 15 nt, Human
ccaaacauuaauguu

SEQ ID NO: 1963439 - RNA, 13 nt, Human
ccaaacacacaga

SEQ ID NO: 1963440 - RNA, 15 nt, Human
ccaaacacacagaag

SEQ ID NO: 1963441 - RNA, 17 nt, Human
ccaaacacacagaaggg

SEQ ID NO: 1963442 - RNA, 14 nt, Human
ccaaaauuaaggug

SEQ ID NO: 1963443 - RNA, 15 nt, Human
ccaaaauuaaggugu

SEQ ID NO: 1963444 - RNA, 16 nt, Human
cauuuuuagccugugu

SEQ ID NO: 1963445 - RNA, 20 nt, Human
ccaaaaugugagugguugaa

SEQ ID NO: 1963446 - RNA, 17 nt, Human
cauuuuuaguagagaca

SEQ ID NO: 1963447 - RNA, 15 nt, Human
cauuuucauuagcaa

SEQ ID NO: 1963448 - RNA, 19 nt, Human
cauuuucagauucaggcau

SEQ ID NO: 1963449 - RNA, 21 nt, Human
cauuuucagauucaggcauuu

SEQ ID NO: 1963450 - RNA, 17 nt, Human
cauuuucauuagcaaaa

SEQ ID NO: 1963451 - RNA, 21 nt, Human
cauuuuuaagugcugcauuua

SEQ ID NO: 1963452 - RNA, 12 nt, Human
cauuuucucuua

SEQ ID NO: 1963453 - RNA, 14 nt, Human
cauuuucucuuaga

SEQ ID NO: 1963454 - RNA, 15 nt, Human
cauuuucucuuagaa

SEQ ID NO: 1963455 - RNA, 16 nt, Human
cauuuucucuuagaaa

SEQ ID NO: 1963456 - RNA, 12 nt, Human
cauuuucucuuu

SEQ ID NO: 1963457 - RNA, 13 nt, Human
cauucuuuuugaa

SEQ ID NO: 1963458 - RNA, 14 nt, Human
cauucuuuuugaaa

SEQ ID NO: 1963459 - RNA, 16 nt, Human
cauucuuuuugaaaug

SEQ ID NO: 1963460 - RNA, 17 nt, Human
cauugaaaaauguccac

SEQ ID NO: 1963461 - RNA, 17 nt, Human
cauucuuuuugcucuaa

SEQ ID NO: 1963462 - RNA, 19 nt, Human
cauucuuuuugcucuaaaa

SEQ ID NO: 1963463 - RNA, 23 nt, Human
cauucuuuuugcucuaaaauauu

SEQ ID NO: 1963464 - RNA, 15 nt, Human
cauugaacucugaga

SEQ ID NO: 1963465 - RNA, 20 nt, Human
cauugauacaaucauagcau

SEQ ID NO: 1963466 - RNA, 18 nt, Human
cauugaccugaggcccuu

SEQ ID NO: 1963467 - RNA, 17 nt, Human
cauugaccugaggcccu

SEQ ID NO: 1963468 - RNA, 15 nt, Human
cauugaccugaggcc

SEQ ID NO: 1963469 - RNA, 14 nt, Human
cauugaccugaggc

SEQ ID NO: 1963470 - RNA, 13 nt, Human
cauugugggaagg

SEQ ID NO: 1963471 - RNA, 15 nt, Human
cauugugggaagggg

SEQ ID NO: 1963472 - RNA, 21 nt, Human
cauuguaagcguauggcuuua

SEQ ID NO: 1963473 - RNA, 13 nt, Human
cauuguaauguug

SEQ ID NO: 1963474 - RNA, 14 nt, Human
cauuguaauguugu

SEQ ID NO: 1963475 - RNA, 19 nt, Human
cauuguaauguugugaaua

SEQ ID NO: 1963476 - RNA, 23 nt, Human
cauuguaauguugugaauaauua

SEQ ID NO: 1963477 - RNA, 17 nt, Human
cauuguuuuucugauau

SEQ ID NO: 1963478 - RNA, 15 nt, Human
cauuuaaaaaaaauc

SEQ ID NO: 1963479 - RNA, 19 nt, Human
cauuuaaaacauuaaaaua

SEQ ID NO: 1963480 - RNA, 12 nt, Human
cauuuaaaacau

SEQ ID NO: 1963481 - RNA, 22 nt, Human
cauuuaauggggaggacaaaau

SEQ ID NO: 1963482 - RNA, 20 nt, Human
cauuuacugcauucuucuga

SEQ ID NO: 1963483 - RNA, 22 nt, Human
cauuuacugcauucuucugauc

SEQ ID NO: 1963484 - RNA, 17 nt, Human
cauuugaaaauuuugau

SEQ ID NO: 1963485 - RNA, 19 nt, Human
cauuugaaaauuuugaugu

SEQ ID NO: 1963486 - RNA, 23 nt, Human
caugggacagggaggacgcucuc

SEQ ID NO: 1963487 - RNA, 15 nt, Human
cauggcagcccucgg

SEQ ID NO: 1963488 - RNA, 18 nt, Human
caugggccuccugugugu

SEQ ID NO: 1963489 - RNA, 14 nt, Human
caugggcaggagac

SEQ ID NO: 1963490 - RNA, 14 nt, Human
caugggccaccacg

SEQ ID NO: 1963491 - RNA, 16 nt, Human
caugcuguucaugaaa

SEQ ID NO: 1963492 - RNA, 18 nt, Human
caugcuguucaugaaaga

SEQ ID NO: 1963493 - RNA, 16 nt, Human
caugcuuuccauauuu

SEQ ID NO: 1963494 - RNA, 17 nt, Human
caugcuuuccauauuuu

SEQ ID NO: 1963495 - RNA, 17 nt, Human
caugcuuugugaacaag

SEQ ID NO: 1963496 - RNA, 18 nt, Human
caugcuuguguuucuuag

SEQ ID NO: 1963497 - RNA, 19 nt, Human
caugcuuguguuucuuagu

SEQ ID NO: 1963498 - RNA, 15 nt, Human
cauggacuuccacug

SEQ ID NO: 1963499 - RNA, 22 nt, Human
cauggacuucugccagcauaau

SEQ ID NO: 1963500 - RNA, 13 nt, Human
cauggaccaugcu

SEQ ID NO: 1963501 - RNA, 14 nt, Human
cauggaccaugcug

SEQ ID NO: 1963502 - RNA, 20 nt, Human
cauggaccaugcugucuggc

SEQ ID NO: 1963503 - RNA, 17 nt, Human
caugcgggcuuccuccu

SEQ ID NO: 1963504 - RNA, 15 nt, Human
caugcugucccuuac

SEQ ID NO: 1963505 - RNA, 13 nt, Human
caugcugucccuu

SEQ ID NO: 1963506 - RNA, 15 nt, Human
caugcuguucaugaa

SEQ ID NO: 1963507 - RNA, 17 nt, Human
caugcugucccuuacgu

SEQ ID NO: 1963508 - RNA, 14 nt, Human
caugcagcaucuaa

SEQ ID NO: 1963509 - RNA, 17 nt, Human
caugcagaguauuucua

SEQ ID NO: 1963510 - RNA, 19 nt, Human
caugcagccacuuaggaca

SEQ ID NO: 1963511 - RNA, 20 nt, Human
cauguuuuucuucucccuca

SEQ ID NO: 1963512 - RNA, 19 nt, Human
cauguuuuucuucucccuc

SEQ ID NO: 1963513 - RNA, 12 nt, Human
cauguuugugau

SEQ ID NO: 1963514 - RNA, 14 nt, Human
cauguuugugauug

SEQ ID NO: 1963515 - RNA, 11 nt, Human
cauguuucuuu

SEQ ID NO: 1963516 - RNA, 20 nt, Human
cauguuucuuugaucaugaa

SEQ ID NO: 1963517 - RNA, 22 nt, Human
cauguuucuuugaucaugaaua

SEQ ID NO: 1963518 - RNA, 11 nt, Human
cauuaaaauau

SEQ ID NO: 1963519 - RNA, 14 nt, Human
cauuaaaauauaau

SEQ ID NO: 1963520 - RNA, 20 nt, Human
cauuaaaagaaaauaaaaaa

SEQ ID NO: 1963521 - RNA, 12 nt, Human
cauuaaaagaaa

SEQ ID NO: 1963522 - RNA, 13 nt, Human
cauuaaaagaaaa

SEQ ID NO: 1963523 - RNA, 14 nt, Human
cauuaaaagaaaau

SEQ ID NO: 1963524 - RNA, 17 nt, Human
cauuaaaagaaaauaaa

SEQ ID NO: 1963525 - RNA, 17 nt, Human
cauggucggaaaacaug

SEQ ID NO: 1963526 - RNA, 19 nt, Human
cauggucggaaaacaugcu

SEQ ID NO: 1963527 - RNA, 23 nt, Human
cauggucggaaaacaugcuacac

SEQ ID NO: 1963528 - RNA, 21 nt, Human
caugguggggucuccucagga

SEQ ID NO: 1963529 - RNA, 23 nt, Human
caugguggggucuccucaggacc

SEQ ID NO: 1963530 - RNA, 15 nt, Human
caugguggggucucc

SEQ ID NO: 1963531 - RNA, 18 nt, Human
caugguggggucuccuca

SEQ ID NO: 1963532 - RNA, 20 nt, Human
caugguggggucuccucagg

SEQ ID NO: 1963533 - RNA, 19 nt, Human
cauggugguugggacccag

SEQ ID NO: 1963534 - RNA, 22 nt, Human
cauggugguugggacccagugg

SEQ ID NO: 1963535 - RNA, 16 nt, Human
caugguuugacucugg

SEQ ID NO: 1963536 - RNA, 14 nt, Human
cauguaaaagccua

SEQ ID NO: 1963537 - RNA, 14 nt, Human
cauguacuaucuua

SEQ ID NO: 1963538 - RNA, 15 nt, Human
cauguacuaucuuau

SEQ ID NO: 1963539 - RNA, 21 nt, Human
cauguacuaucuuaucucaga

SEQ ID NO: 1963540 - RNA, 16 nt, Human
caugucuccuacugag

SEQ ID NO: 1963541 - RNA, 18 nt, Human
caugucuccuacugagga

SEQ ID NO: 1963542 - RNA, 20 nt, Human
caugucuccuacugaggaua

SEQ ID NO: 1963543 - RNA, 18 nt, Human
cauguguuggcagccucu

SEQ ID NO: 1963544 - RNA, 22 nt, Human
caugugccagguuuuuggucug

SEQ ID NO: 1963545 - RNA, 14 nt, Human
caugugcacaugca

SEQ ID NO: 1963546 - RNA, 18 nt, Human
caugugaucucauuguuc

SEQ ID NO: 1963547 - RNA, 21 nt, Human
caugugcaaacccacucagag

SEQ ID NO: 1963548 - RNA, 21 nt, Human
caugugaugagaggaaaucac

SEQ ID NO: 1963549 - RNA, 17 nt, Human
caugugaucucauuguu

SEQ ID NO: 1963550 - RNA, 20 nt, Human
caugugaugagaggaaauca

SEQ ID NO: 1963551 - RNA, 18 nt, Human
caugugaugagaggaaau

SEQ ID NO: 1963552 - RNA, 17 nt, Human
caugugaugagaggaaa

SEQ ID NO: 1963553 - RNA, 16 nt, Human
caugugaugagaggaa

SEQ ID NO: 1963554 - RNA, 15 nt, Human
caugugaugagagga

SEQ ID NO: 1963555 - RNA, 18 nt, Human
caugugagcugcugccau

SEQ ID NO: 1963556 - RNA, 20 nt, Human
caugugagcugcugccauga

SEQ ID NO: 1963557 - RNA, 14 nt, Human
caugucucgacuca

SEQ ID NO: 1963558 - RNA, 12 nt, Human
caugucuggcua

SEQ ID NO: 1963559 - RNA, 14 nt, Human
caugucuuauuuaa

SEQ ID NO: 1963560 - RNA, 15 nt, Human
caugucuuauuuaaa

SEQ ID NO: 1963561 - RNA, 19 nt, Human
caucaucuguaagcuguuu

SEQ ID NO: 1963562 - RNA, 13 nt, Human
caucaucuguaag

SEQ ID NO: 1963563 - RNA, 16 nt, Human
caucauccuaagcuau

SEQ ID NO: 1963564 - RNA, 14 nt, Human
caucauauuauaca

SEQ ID NO: 1963565 - RNA, 16 nt, Human
caucauauuauacaga

SEQ ID NO: 1963566 - RNA, 13 nt, Human
caucauagaaacu

SEQ ID NO: 1963567 - RNA, 13 nt, Human
caucaugucuggc

SEQ ID NO: 1963568 - RNA, 13 nt, Human
caucauguuuaca

SEQ ID NO: 1963569 - RNA, 19 nt, Human
caucauguuuacagaggac

SEQ ID NO: 1963570 - RNA, 21 nt, Human
caucauguuuacagaggacag

SEQ ID NO: 1963571 - RNA, 14 nt, Human
caucaugucuggcu

SEQ ID NO: 1963572 - RNA, 15 nt, Human
caucaugucuggcua

SEQ ID NO: 1963573 - RNA, 12 nt, Human
caucacccgcua

SEQ ID NO: 1963574 - RNA, 20 nt, Human
caucaccaacgucugugcca

SEQ ID NO: 1963575 - RNA, 12 nt, Human
caucagugccaa

SEQ ID NO: 1963576 - RNA, 15 nt, Human
caucaguacuuguuu

SEQ ID NO: 1963577 - RNA, 23 nt, Human
caucagguuaggcaguauaaaga

SEQ ID NO: 1963578 - RNA, 13 nt, Human
caucccuccuggg

SEQ ID NO: 1963579 - RNA, 15 nt, Human
caucccucuggggcu

SEQ ID NO: 1963580 - RNA, 15 nt, Human
caucccuucucuucc

SEQ ID NO: 1963581 - RNA, 16 nt, Human
caucccuucucuucca

SEQ ID NO: 1963582 - RNA, 18 nt, Human
caucccuucucuuccagg

SEQ ID NO: 1963583 - RNA, 22 nt, Human
caucccuucucuuccaggcagc

SEQ ID NO: 1963584 - RNA, 23 nt, Human
caucccuucucuuccaggcagcc

SEQ ID NO: 1963585 - RNA, 16 nt, Human
cauccgaccagguugu

SEQ ID NO: 1963586 - RNA, 20 nt, Human
cauccgaccagguugucacu

SEQ ID NO: 1963587 - RNA, 15 nt, Human
caucauuccuuuuua

SEQ ID NO: 1963588 - RNA, 19 nt, Human
caucauuccuuuuuauuua

SEQ ID NO: 1963589 - RNA, 20 nt, Human
caucauuccuuuuuauuuau

SEQ ID NO: 1963590 - RNA, 15 nt, Human
caucauuccaggccc

SEQ ID NO: 1963591 - RNA, 14 nt, Human
cauccacugugcca

SEQ ID NO: 1963592 - RNA, 17 nt, Human
cauccacugugccaugu

SEQ ID NO: 1963593 - RNA, 23 nt, Human
cauccacugugccaugugccagg

SEQ ID NO: 1963594 - RNA, 17 nt, Human
cauccagguucagcuug

SEQ ID NO: 1963595 - RNA, 22 nt, Human
caucauuccuuuuuauuuauau

SEQ ID NO: 1963596 - RNA, 12 nt, Human
cauccauccagg

SEQ ID NO: 1963597 - RNA, 14 nt, Human
caucaacaucuugg

SEQ ID NO: 1963598 - RNA, 16 nt, Human
caucaacuaaaguugu

SEQ ID NO: 1963599 - RNA, 19 nt, Human
caucaacuaaaguuguacu

SEQ ID NO: 1963600 - RNA, 22 nt, Human
caucaacuaaaguuguacuuua

SEQ ID NO: 1963601 - RNA, 23 nt, Human
caucaacuaaaguuguacuuuaa

SEQ ID NO: 1963602 - RNA, 16 nt, Human
cauauuuuaaacagag

SEQ ID NO: 1963603 - RNA, 17 nt, Human
cauauuuuaaacagagg

SEQ ID NO: 1963604 - RNA, 23 nt, Human
cauauuuggaauaaaaauuccag

SEQ ID NO: 1963605 - RNA, 17 nt, Human
cauauuuaauuugaagg

SEQ ID NO: 1963606 - RNA, 14 nt, Human
cauauuuguacuuu

SEQ ID NO: 1963607 - RNA, 18 nt, Human
cauauuuguacuuucugu

SEQ ID NO: 1963608 - RNA, 20 nt, Human
cauauuuguacuuucuguua

SEQ ID NO: 1963609 - RNA, 21 nt, Human
cauauuuguacuuucuguuaa

SEQ ID NO: 1963610 - RNA, 23 nt, Human
cauauuuguacuuucuguuaaaa

SEQ ID NO: 1963611 - RNA, 19 nt, Human
cauauuguuacugguacca

SEQ ID NO: 1963612 - RNA, 13 nt, Human
cauauuguuacug

SEQ ID NO: 1963613 - RNA, 20 nt, Human
cauauugguauauccuuuuc

SEQ ID NO: 1963614 - RNA, 21 nt, Human
cauauugauuuccguuaaaau

SEQ ID NO: 1963615 - RNA, 17 nt, Human
cauauugauuuccguua

SEQ ID NO: 1963616 - RNA, 22 nt, Human
cauauucuguuggccaguguga

SEQ ID NO: 1963617 - RNA, 14 nt, Human
cauaugacaaaugu

SEQ ID NO: 1963618 - RNA, 14 nt, Human
cauaugaacuuuca

SEQ ID NO: 1963619 - RNA, 17 nt, Human
cauaugacaaauguuuc

SEQ ID NO: 1963620 - RNA, 19 nt, Human
cauaugacaaauguuucua

SEQ ID NO: 1963621 - RNA, 21 nt, Human
cauauccuuuuagucugcaua

SEQ ID NO: 1963622 - RNA, 15 nt, Human
cauauagaaagcuuu

SEQ ID NO: 1963623 - RNA, 21 nt, Human
cauauauguguccauuuccuu

SEQ ID NO: 1963624 - RNA, 23 nt, Human
cauauaagauucauauuuacuuc

SEQ ID NO: 1963625 - RNA, 16 nt, Human
cauauaagugauugcu

SEQ ID NO: 1963626 - RNA, 17 nt, Human
cauauaagcccuugauu

SEQ ID NO: 1963627 - RNA, 18 nt, Human
cauagugaugguuccccu

SEQ ID NO: 1963628 - RNA, 19 nt, Human
cauagugaugguuccccug

SEQ ID NO: 1963629 - RNA, 20 nt, Human
cauagugacuuuucaaguau

SEQ ID NO: 1963630 - RNA, 17 nt, Human
cauauaaauugucuuaa

SEQ ID NO: 1963631 - RNA, 20 nt, Human
cauauaacuuauauuguaag

SEQ ID NO: 1963632 - RNA, 22 nt, Human
cauauaacuuauauuguaagaa

SEQ ID NO: 1963633 - RNA, 23 nt, Human
cauauaacuuauauuguaagaaa

SEQ ID NO: 1963634 - RNA, 21 nt, Human
cauauaaauugucuuaaugga

SEQ ID NO: 1963635 - RNA, 18 nt, Human
cagugcugggauuacagg

SEQ ID NO: 1963636 - RNA, 16 nt, Human
cagugcugaucuaaaa

SEQ ID NO: 1963637 - RNA, 15 nt, Human
cauaguaugguggcu

SEQ ID NO: 1963638 - RNA, 15 nt, Human
cauaguaaauguagu

SEQ ID NO: 1963639 - RNA, 19 nt, Human
cauaguaaauguaguucau

SEQ ID NO: 1963640 - RNA, 20 nt, Human
cauaguaaauguaguucaua

SEQ ID NO: 1963641 - RNA, 16 nt, Human
cauaguaugguggcug

SEQ ID NO: 1963642 - RNA, 17 nt, Human
cauaguaugguggcugg

SEQ ID NO: 1963643 - RNA, 20 nt, Human
cauaguagaacuuuauaaaa

SEQ ID NO: 1963644 - RNA, 15 nt, Human
caucuuugauguguu

SEQ ID NO: 1963645 - RNA, 16 nt, Human
caucuuugauguguug

SEQ ID NO: 1963646 - RNA, 18 nt, Human
caucuuugauguguuguu

SEQ ID NO: 1963647 - RNA, 12 nt, Human
caucuuugaugu

SEQ ID NO: 1963648 - RNA, 13 nt, Human
caucuuugaugug

SEQ ID NO: 1963649 - RNA, 14 nt, Human
caucuuugaugugu

SEQ ID NO: 1963650 - RNA, 13 nt, Human
caugaaaacacau

SEQ ID NO: 1963651 - RNA, 21 nt, Human
caucuuuuguuacucuuggga

SEQ ID NO: 1963652 - RNA, 23 nt, Human
caucuuuuguuacucuugggaca

SEQ ID NO: 1963653 - RNA, 14 nt, Human
caugaaaacacauu

SEQ ID NO: 1963654 - RNA, 15 nt, Human
caugaaaacacauuu

SEQ ID NO: 1963655 - RNA, 16 nt, Human
caugaaaacacauuuu

SEQ ID NO: 1963656 - RNA, 17 nt, Human
caugaaaacacauuuuu

SEQ ID NO: 1963657 - RNA, 14 nt, Human
caugaaagauucaa

SEQ ID NO: 1963658 - RNA, 12 nt, Human
caugaaagaaaa

SEQ ID NO: 1963659 - RNA, 19 nt, Human
caugaaaacacauuuuucu

SEQ ID NO: 1963660 - RNA, 21 nt, Human
caugaaaacacauuuuucuua

SEQ ID NO: 1963661 - RNA, 15 nt, Human
caugaaaauagcaau

SEQ ID NO: 1963662 - RNA, 12 nt, Human
caugaagacaga

SEQ ID NO: 1963663 - RNA, 13 nt, Human
caugaaaugaaca

SEQ ID NO: 1963664 - RNA, 15 nt, Human
caugaaaugaacaca

SEQ ID NO: 1963665 - RNA, 19 nt, Human
caugaaaugaacacaaauu

SEQ ID NO: 1963666 - RNA, 20 nt, Human
caugaaaugaacacaaauua

SEQ ID NO: 1963667 - RNA, 19 nt, Human
caugaaaugcuaugucauu

SEQ ID NO: 1963668 - RNA, 21 nt, Human
caugaaaugcuaugucauuuc

SEQ ID NO: 1963669 - RNA, 23 nt, Human
caugagcaucaggccaggcccuc

SEQ ID NO: 1963670 - RNA, 22 nt, Human
caugagcaucaggccaggcccu

SEQ ID NO: 1963671 - RNA, 21 nt, Human
caugagcaucaggccaggccc

SEQ ID NO: 1963672 - RNA, 20 nt, Human
caugagcaucaggccaggcc

SEQ ID NO: 1963673 - RNA, 18 nt, Human
caugagcaucaggccagg

SEQ ID NO: 1963674 - RNA, 17 nt, Human
caugagcaucaggccag

SEQ ID NO: 1963675 - RNA, 16 nt, Human
caugagcaucaggcca

SEQ ID NO: 1963676 - RNA, 15 nt, Human
caugagcaucaggcc

SEQ ID NO: 1963677 - RNA, 12 nt, Human
caugagccucag

SEQ ID NO: 1963678 - RNA, 15 nt, Human
caugagccucagcau

SEQ ID NO: 1963679 - RNA, 17 nt, Human
caugagccucagcaucc

SEQ ID NO: 1963680 - RNA, 18 nt, Human
caugagccucagcauccu

SEQ ID NO: 1963681 - RNA, 19 nt, Human
caugagccucagcauccug

SEQ ID NO: 1963682 - RNA, 20 nt, Human
caugagccucagcauccugg

SEQ ID NO: 1963683 - RNA, 21 nt, Human
caugagccucagcauccuggc

SEQ ID NO: 1963684 - RNA, 18 nt, Human
caugaagauguagaggag

SEQ ID NO: 1963685 - RNA, 19 nt, Human
caugaagauguagaggaga

SEQ ID NO: 1963686 - RNA, 23 nt, Human
caugacucguauaugucucaggu

SEQ ID NO: 1963687 - RNA, 18 nt, Human
caugacucuugacucuug

SEQ ID NO: 1963688 - RNA, 20 nt, Human
caugacucguauaugucuca

SEQ ID NO: 1963689 - RNA, 22 nt, Human
caugagaauguuuuagcacagc

SEQ ID NO: 1963690 - RNA, 13 nt, Human
caugagcaucagg

SEQ ID NO: 1963691 - RNA, 18 nt, Human
caugagauaauaugcaga

SEQ ID NO: 1963692 - RNA, 18 nt, Human
caugagacuauguaaaaa

SEQ ID NO: 1963693 - RNA, 21 nt, Human
caugaggaacaaggcaaggcu

SEQ ID NO: 1963694 - RNA, 20 nt, Human
caugaggaacaaggcaaggc

SEQ ID NO: 1963695 - RNA, 17 nt, Human
caugaggaacaaggcaa

SEQ ID NO: 1963696 - RNA, 16 nt, Human
caugaggaacaaggca

SEQ ID NO: 1963697 - RNA, 22 nt, Human
caugagccucagcauccuggca

SEQ ID NO: 1963698 - RNA, 23 nt, Human
caugagccucagcauccuggcac

SEQ ID NO: 1963699 - RNA, 23 nt, Human
caugaggaacaaggcaaggcugu

SEQ ID NO: 1963700 - RNA, 15 nt, Human
caugaggaaggaaca

SEQ ID NO: 1963701 - RNA, 16 nt, Human
caugagguacugagag

SEQ ID NO: 1963702 - RNA, 19 nt, Human
caugagggaagaauaaaga

SEQ ID NO: 1963703 - RNA, 15 nt, Human
caugagggaagaaua

SEQ ID NO: 1963704 - RNA, 19 nt, Human
caugagguacugagaguga

SEQ ID NO: 1963705 - RNA, 15 nt, Human
caugagguucucucu

SEQ ID NO: 1963706 - RNA, 13 nt, Human
caugaguccccug

SEQ ID NO: 1963707 - RNA, 15 nt, Human
caugaguccccuguu

SEQ ID NO: 1963708 - RNA, 14 nt, Human
caugaguccccugu

SEQ ID NO: 1963709 - RNA, 23 nt, Human
caugaguccccuguuuguuucug

SEQ ID NO: 1963710 - RNA, 16 nt, Human
caugcacucagcucuu

SEQ ID NO: 1963711 - RNA, 15 nt, Human
caugcacucagcucu

SEQ ID NO: 1963712 - RNA, 16 nt, Human
caugaugauuucagaa

SEQ ID NO: 1963713 - RNA, 19 nt, Human
caugaguuggcugggaaua

SEQ ID NO: 1963714 - RNA, 16 nt, Human
caucucuacaaaaagc

SEQ ID NO: 1963715 - RNA, 16 nt, Human
caucuccuuagaaaag

SEQ ID NO: 1963716 - RNA, 17 nt, Human
caucucccuuuuccaug

SEQ ID NO: 1963717 - RNA, 18 nt, Human
cauccuacaagacacagu

SEQ ID NO: 1963718 - RNA, 17 nt, Human
cauccuacaagacacag

SEQ ID NO: 1963719 - RNA, 19 nt, Human
cauccuacaagacacagug

SEQ ID NO: 1963720 - RNA, 17 nt, Human
caucugaccucuaccuu

SEQ ID NO: 1963721 - RNA, 13 nt, Human
caucucugcucca

SEQ ID NO: 1963722 - RNA, 12 nt, Human
caucucugcucc

SEQ ID NO: 1963723 - RNA, 15 nt, Human
caucucuccuccuuu

SEQ ID NO: 1963724 - RNA, 19 nt, Human
caucuugcucugcugacag

SEQ ID NO: 1963725 - RNA, 15 nt, Human
caucuugcucugcug

SEQ ID NO: 1963726 - RNA, 16 nt, Human
caucuugcucugcuga

SEQ ID NO: 1963727 - RNA, 17 nt, Human
caucuugcucugcugac

SEQ ID NO: 1963728 - RNA, 21 nt, Human
caucuugaauuguaaggaaug

SEQ ID NO: 1963729 - RNA, 16 nt, Human
caucuugaauuguaag

SEQ ID NO: 1963730 - RNA, 13 nt, Human
cagggaaagacug

SEQ ID NO: 1963731 - RNA, 19 nt, Human
cagggaacuaggaaggcac

SEQ ID NO: 1963732 - RNA, 19 nt, Human
cagggaagauaaguuggaa

SEQ ID NO: 1963733 - RNA, 16 nt, Human
cagggaagccuugugg

SEQ ID NO: 1963734 - RNA, 21 nt, Human
cagggaaaagcagcucucccc

SEQ ID NO: 1963735 - RNA, 20 nt, Human
cagggaaaagcagcucuccc

SEQ ID NO: 1963736 - RNA, 19 nt, Human
cagggaaaagcagcucucc

SEQ ID NO: 1963737 - RNA, 17 nt, Human
cagggaaaagcagcucu

SEQ ID NO: 1963738 - RNA, 16 nt, Human
cagggaaacagcuaau

SEQ ID NO: 1963739 - RNA, 22 nt, Human
cagggaaacagcuaaugggaca

SEQ ID NO: 1963740 - RNA, 20 nt, Human
cagggacagaggggguggcc

SEQ ID NO: 1963741 - RNA, 14 nt, Human
cagggacagagggg

SEQ ID NO: 1963742 - RNA, 13 nt, Human
cagggacagaggg

SEQ ID NO: 1963743 - RNA, 15 nt, Human
cagggaaggggacaa

SEQ ID NO: 1963744 - RNA, 17 nt, Human
cagggaaggggacaagg

SEQ ID NO: 1963745 - RNA, 15 nt, Human
cagggaaggccugac

SEQ ID NO: 1963746 - RNA, 16 nt, Human
cagggaaggccugacu

SEQ ID NO: 1963747 - RNA, 23 nt, Human
cagggaaggccugacuucugcug

SEQ ID NO: 1963748 - RNA, 15 nt, Human
cagggggcuuccuga

SEQ ID NO: 1963749 - RNA, 22 nt, Human
cagggggcuuccugaggggaga

SEQ ID NO: 1963750 - RNA, 12 nt, Human
cagggggcuucc

SEQ ID NO: 1963751 - RNA, 13 nt, Human
cagggggcuuccu

SEQ ID NO: 1963752 - RNA, 22 nt, Human
cagggggccagucccugaggca

SEQ ID NO: 1963753 - RNA, 16 nt, Human
cagggggagaaugggu

SEQ ID NO: 1963754 - RNA, 15 nt, Human
cagggccuggcucag

SEQ ID NO: 1963755 - RNA, 14 nt, Human
cagggccuggcuca

SEQ ID NO: 1963756 - RNA, 13 nt, Human
cagggccuggcuc

SEQ ID NO: 1963757 - RNA, 11 nt, Human
cagggccuggc

SEQ ID NO: 1963758 - RNA, 12 nt, Human
cagggccuggcc

SEQ ID NO: 1963759 - RNA, 13 nt, Human
cagggccuggccc

SEQ ID NO: 1963760 - RNA, 14 nt, Human
cagggccuggccca

SEQ ID NO: 1963761 - RNA, 19 nt, Human
cagggccuggcucaggugg

SEQ ID NO: 1963762 - RNA, 16 nt, Human
cagggccuggcucagg

SEQ ID NO: 1963763 - RNA, 15 nt, Human
cagggccuggcccau

SEQ ID NO: 1963764 - RNA, 16 nt, Human
cagggccuggcccaug

SEQ ID NO: 1963765 - RNA, 17 nt, Human
cagggccuggcccaugu

SEQ ID NO: 1963766 - RNA, 18 nt, Human
cagggccuggcccaugua

SEQ ID NO: 1963767 - RNA, 16 nt, Human
caggggagauccuugu

SEQ ID NO: 1963768 - RNA, 16 nt, Human
caggggaccuccuggg

SEQ ID NO: 1963769 - RNA, 14 nt, Human
caggggaggccauc

SEQ ID NO: 1963770 - RNA, 15 nt, Human
caggggcccugcagc

SEQ ID NO: 1963771 - RNA, 16 nt, Human
caggggcccugcagcu

SEQ ID NO: 1963772 - RNA, 17 nt, Human
caggggcccugcagcuc

SEQ ID NO: 1963773 - RNA, 18 nt, Human
caggggcccugcagcucu

SEQ ID NO: 1963774 - RNA, 19 nt, Human
caggggcccugcagcucuc

SEQ ID NO: 1963775 - RNA, 14 nt, Human
caggggcaggagga

SEQ ID NO: 1963776 - RNA, 17 nt, Human
caggggagggggcaaag

SEQ ID NO: 1963777 - RNA, 16 nt, Human
caggggaggccaucug

SEQ ID NO: 1963778 - RNA, 17 nt, Human
caggggaggccaucugg

SEQ ID NO: 1963779 - RNA, 21 nt, Human
caggggaggccaucuggagag

SEQ ID NO: 1963780 - RNA, 19 nt, Human
caggggaggguagagcgga

SEQ ID NO: 1963781 - RNA, 22 nt, Human
caggggccuuugggugcuguuu

SEQ ID NO: 1963782 - RNA, 18 nt, Human
caggggcuccaugccagc

SEQ ID NO: 1963783 - RNA, 17 nt, Human
caggggcuccaugccag

SEQ ID NO: 1963784 - RNA, 19 nt, Human
cagggccaaaagcuucccu

SEQ ID NO: 1963785 - RNA, 19 nt, Human
cagggccagaaguagcuuu

SEQ ID NO: 1963786 - RNA, 22 nt, Human
cagggcaggaccagcccacgcu

SEQ ID NO: 1963787 - RNA, 13 nt, Human
cagggcaggacca

SEQ ID NO: 1963788 - RNA, 16 nt, Human
cagggcaggaccagcc

SEQ ID NO: 1963789 - RNA, 17 nt, Human
cagggcaggaccagccc

SEQ ID NO: 1963790 - RNA, 18 nt, Human
cagggcaggaccagccca

SEQ ID NO: 1963791 - RNA, 19 nt, Human
cagggcaggaccagcccac

SEQ ID NO: 1963792 - RNA, 20 nt, Human
cagggcaggaccagcccacg

SEQ ID NO: 1963793 - RNA, 20 nt, Human
cagggcauggccagguggcc

SEQ ID NO: 1963794 - RNA, 14 nt, Human
cagggcaugaaaug

SEQ ID NO: 1963795 - RNA, 15 nt, Human
cagggcaugaaauga

SEQ ID NO: 1963796 - RNA, 23 nt, Human
cagggcaugaaaugaacacaaau

SEQ ID NO: 1963797 - RNA, 24 nt, Human
cagggcaugaaaugaacacaaauu

SEQ ID NO: 1963798 - RNA, 19 nt, Human
cagggcccgggaagcaaau

SEQ ID NO: 1963799 - RNA, 21 nt, Human
cagggcccccagcgagagucc

SEQ ID NO: 1963800 - RNA, 21 nt, Human
cagggccggucgggggggacc

SEQ ID NO: 1963801 - RNA, 19 nt, Human
cagggccgauggggcaguc

SEQ ID NO: 1963802 - RNA, 20 nt, Human
cagggcccgggaagcaaaug

SEQ ID NO: 1963803 - RNA, 23 nt, Human
cagggacugaaaaccucuccuca

SEQ ID NO: 1963804 - RNA, 21 nt, Human
cagggacugaaaaccucuccu

SEQ ID NO: 1963805 - RNA, 20 nt, Human
cagggacugaaaaccucucc

SEQ ID NO: 1963806 - RNA, 14 nt, Human
cagggaccccagaa

SEQ ID NO: 1963807 - RNA, 15 nt, Human
cagggaccccagaau

SEQ ID NO: 1963808 - RNA, 23 nt, Human
cagggacagaggggguggccucc

SEQ ID NO: 1963809 - RNA, 18 nt, Human
cagggauugauuuuaaaa

SEQ ID NO: 1963810 - RNA, 20 nt, Human
cagggauugauuuuaaaaug

SEQ ID NO: 1963811 - RNA, 21 nt, Human
cagggauugauuuuaaaaugu

SEQ ID NO: 1963812 - RNA, 22 nt, Human
cagggauugauuuuaaaaugua

SEQ ID NO: 1963813 - RNA, 16 nt, Human
cagggauugauuuuaa

SEQ ID NO: 1963814 - RNA, 22 nt, Human
cagggcaauaaaaugaccaugg

SEQ ID NO: 1963815 - RNA, 14 nt, Human
cagggcacaccggg

SEQ ID NO: 1963816 - RNA, 12 nt, Human
cagggcacaggg

SEQ ID NO: 1963817 - RNA, 14 nt, Human
cagggcacagggcc

SEQ ID NO: 1963818 - RNA, 15 nt, Human
cagggcacagggccu

SEQ ID NO: 1963819 - RNA, 16 nt, Human
cagggcacagggccug

SEQ ID NO: 1963820 - RNA, 22 nt, Human
cagggcacaccgggcacucaga

SEQ ID NO: 1963821 - RNA, 23 nt, Human
cagggcacaccgggcacucagaa

SEQ ID NO: 1963822 - RNA, 15 nt, Human
cagggcacaccgggc

SEQ ID NO: 1963823 - RNA, 17 nt, Human
cagggcacaccgggcac

SEQ ID NO: 1963824 - RNA, 19 nt, Human
cagggcacaccgggcacuc

SEQ ID NO: 1963825 - RNA, 21 nt, Human
cagggcacaccgggcacucag

SEQ ID NO: 1963826 - RNA, 12 nt, Human
cagggcacgugg

SEQ ID NO: 1963827 - RNA, 17 nt, Human
cagggcacagggccugg

SEQ ID NO: 1963828 - RNA, 18 nt, Human
cagggcacagggccuggc

SEQ ID NO: 1963829 - RNA, 19 nt, Human
cagggcacagggccuggcc

SEQ ID NO: 1963830 - RNA, 20 nt, Human
cagggcacagggccuggccc

SEQ ID NO: 1963831 - RNA, 21 nt, Human
cagggcacagggccuggccca

SEQ ID NO: 1963832 - RNA, 22 nt, Human
cagggcacagggccuggcccau

SEQ ID NO: 1963833 - RNA, 22 nt, Human
cagggcagauuuuaguuuuauu

SEQ ID NO: 1963834 - RNA, 22 nt, Human
caggcccucugcccacucccug

SEQ ID NO: 1963835 - RNA, 21 nt, Human
caggcccucugcccacucccu

SEQ ID NO: 1963836 - RNA, 18 nt, Human
caggcccuccucccuccc

SEQ ID NO: 1963837 - RNA, 20 nt, Human
caggcccuccucccucccag

SEQ ID NO: 1963838 - RNA, 23 nt, Human
caggcccuccucccucccagcuc

SEQ ID NO: 1963839 - RNA, 20 nt, Human
caggcccucugcccacuccc

SEQ ID NO: 1963840 - RNA, 19 nt, Human
caggcccucugcccacucc

SEQ ID NO: 1963841 - RNA, 17 nt, Human
caggcccucugcccacu

SEQ ID NO: 1963842 - RNA, 16 nt, Human
caggcccucugcccac

SEQ ID NO: 1963843 - RNA, 19 nt, Human
caggcccuuccucuccacu

SEQ ID NO: 1963844 - RNA, 20 nt, Human
caggcccuuccucuccacug

SEQ ID NO: 1963845 - RNA, 21 nt, Human
caggcccuuccucuccacugc

SEQ ID NO: 1963846 - RNA, 23 nt, Human
caggcccuuccucuccacugccu

SEQ ID NO: 1963847 - RNA, 16 nt, Human
caggcccuuccucucc

SEQ ID NO: 1963848 - RNA, 17 nt, Human
caggcccuuccucucca

SEQ ID NO: 1963849 - RNA, 15 nt, Human
caggcccuuccucuc

SEQ ID NO: 1963850 - RNA, 15 nt, Human
caggcccucugccca

SEQ ID NO: 1963851 - RNA, 14 nt, Human
caggcccucugccc

SEQ ID NO: 1963852 - RNA, 11 nt, Human
caggcccuccu

SEQ ID NO: 1963853 - RNA, 13 nt, Human
caggcccucugcc

SEQ ID NO: 1963854 - RNA, 22 nt, Human
caggcccggcuccaggcuccuu

SEQ ID NO: 1963855 - RNA, 23 nt, Human
caggccccucccucuccagcagg

SEQ ID NO: 1963856 - RNA, 18 nt, Human
caggcccgaaagaggcac

SEQ ID NO: 1963857 - RNA, 20 nt, Human
caggcccggcuccaggcucc

SEQ ID NO: 1963858 - RNA, 21 nt, Human
caggcccggcuccaggcuccu

SEQ ID NO: 1963859 - RNA, 17 nt, Human
caggcccggcuccaggc

SEQ ID NO: 1963860 - RNA, 16 nt, Human
caggcccggcuccagg

SEQ ID NO: 1963861 - RNA, 18 nt, Human
caggcccggcuccaggcu

SEQ ID NO: 1963862 - RNA, 19 nt, Human
caggcccggcuccaggcuc

SEQ ID NO: 1963863 - RNA, 20 nt, Human
caggcucucaggccagcugc

SEQ ID NO: 1963864 - RNA, 19 nt, Human
caggcucucaggccagcug

SEQ ID NO: 1963865 - RNA, 18 nt, Human
caggcucucaggccagcu

SEQ ID NO: 1963866 - RNA, 17 nt, Human
caggcucucaggccagc

SEQ ID NO: 1963867 - RNA, 14 nt, Human
caggcucucaacag

SEQ ID NO: 1963868 - RNA, 15 nt, Human
caggcucucugggcu

SEQ ID NO: 1963869 - RNA, 13 nt, Human
caggcucucaaca

SEQ ID NO: 1963870 - RNA, 16 nt, Human
caggcucucugggcug

SEQ ID NO: 1963871 - RNA, 23 nt, Human
caggcucucaggccagcugcuug

SEQ ID NO: 1963872 - RNA, 21 nt, Human
caggcucucaggccagcugcu

SEQ ID NO: 1963873 - RNA, 16 nt, Human
caggcucucaggccag

SEQ ID NO: 1963874 - RNA, 15 nt, Human
caggcucucaggcca

SEQ ID NO: 1963875 - RNA, 14 nt, Human
caggcucucaggcc

SEQ ID NO: 1963876 - RNA, 13 nt, Human
caggcucucaggc

SEQ ID NO: 1963877 - RNA, 12 nt, Human
caggcucucagg

SEQ ID NO: 1963878 - RNA, 20 nt, Human
caggcucgggcuccccagcc

SEQ ID NO: 1963879 - RNA, 21 nt, Human
caggcuccuuuagcgcccagu

SEQ ID NO: 1963880 - RNA, 14 nt, Human
caggcuccuuuagc

SEQ ID NO: 1963881 - RNA, 18 nt, Human
caggcuccugccaccacg

SEQ ID NO: 1963882 - RNA, 19 nt, Human
caggcuccuuuagcgccca

SEQ ID NO: 1963883 - RNA, 20 nt, Human
caggcuccuuuagcgcccag

SEQ ID NO: 1963884 - RNA, 13 nt, Human
caggcuccugcca

SEQ ID NO: 1963885 - RNA, 14 nt, Human
caggcuccugccac

SEQ ID NO: 1963886 - RNA, 15 nt, Human
caggcuccugccacc

SEQ ID NO: 1963887 - RNA, 16 nt, Human
caggcuccugccacca

SEQ ID NO: 1963888 - RNA, 23 nt, Human
caggcucccaggagccugcccag

SEQ ID NO: 1963889 - RNA, 24 nt, Human
caggcucccaggagccugcccagc

SEQ ID NO: 1963890 - RNA, 15 nt, Human
caggcucccaggagc

SEQ ID NO: 1963891 - RNA, 22 nt, Human
caggcucccaggagccugccca

SEQ ID NO: 1963892 - RNA, 18 nt, Human
caggcucuucuccuuuca

SEQ ID NO: 1963893 - RNA, 22 nt, Human
caggcucuucuccuuucacaac

SEQ ID NO: 1963894 - RNA, 12 nt, Human
caggcugagccu

SEQ ID NO: 1963895 - RNA, 14 nt, Human
caggcucuucuccu

SEQ ID NO: 1963896 - RNA, 15 nt, Human
caggcucuucuccuu

SEQ ID NO: 1963897 - RNA, 12 nt, Human
caggcucuucuc

SEQ ID NO: 1963898 - RNA, 13 nt, Human
caggcugagccuc

SEQ ID NO: 1963899 - RNA, 14 nt, Human
caggcugagccuca

SEQ ID NO: 1963900 - RNA, 15 nt, Human
caggcugagccucag

SEQ ID NO: 1963901 - RNA, 16 nt, Human
caggcugagccucagu

SEQ ID NO: 1963902 - RNA, 17 nt, Human
caggcugagccucaguc

SEQ ID NO: 1963903 - RNA, 21 nt, Human
caggcugagccucagucuccc

SEQ ID NO: 1963904 - RNA, 14 nt, Human
caggcugagugcag

SEQ ID NO: 1963905 - RNA, 13 nt, Human
caggcugagcuga

SEQ ID NO: 1963906 - RNA, 15 nt, Human
caggcugagugcagg

SEQ ID NO: 1963907 - RNA, 16 nt, Human
caggcugagugcaggc

SEQ ID NO: 1963908 - RNA, 17 nt, Human
caggcugagugcaggcc

SEQ ID NO: 1963909 - RNA, 18 nt, Human
caggcugagugcaggccc

SEQ ID NO: 1963910 - RNA, 19 nt, Human
caggcugagugcaggccca

SEQ ID NO: 1963911 - RNA, 20 nt, Human
caggcugagugcaggcccac

SEQ ID NO: 1963912 - RNA, 21 nt, Human
caggcugagugcaggcccacc

SEQ ID NO: 1963913 - RNA, 22 nt, Human
caggcugagugcaggcccaccc

SEQ ID NO: 1963914 - RNA, 23 nt, Human
caggcugagugcaggcccacccu

SEQ ID NO: 1963915 - RNA, 23 nt, Human
caggcugggucgcccuggacugu

SEQ ID NO: 1963916 - RNA, 21 nt, Human
caggcugggucgcccuggacu

SEQ ID NO: 1963917 - RNA, 23 nt, Human
caggcugggcuucaguggcagcu

SEQ ID NO: 1963918 - RNA, 12 nt, Human
caggcuggcccu

SEQ ID NO: 1963919 - RNA, 14 nt, Human
caggcuggcccugc

SEQ ID NO: 1963920 - RNA, 15 nt, Human
caggcuggcccugcc

SEQ ID NO: 1963921 - RNA, 16 nt, Human
caggcuggcccugccc

SEQ ID NO: 1963922 - RNA, 23 nt, Human
caggcugcucuugaacuccugac

SEQ ID NO: 1963923 - RNA, 12 nt, Human
caggcugcucuu

SEQ ID NO: 1963924 - RNA, 20 nt, Human
caggcugcucuugaacuccu

SEQ ID NO: 1963925 - RNA, 15 nt, Human
caggcugcucucaaa

SEQ ID NO: 1963926 - RNA, 22 nt, Human
caggcugcucucaaaccccuga

SEQ ID NO: 1963927 - RNA, 21 nt, Human
caggcuuagucacugagacag

SEQ ID NO: 1963928 - RNA, 20 nt, Human
caggcuuagucacugagaca

SEQ ID NO: 1963929 - RNA, 17 nt, Human
caggcuuagucacugag

SEQ ID NO: 1963930 - RNA, 16 nt, Human
caggcuuagucacuga

SEQ ID NO: 1963931 - RNA, 22 nt, Human
caggcuguaucccaugagccuc

SEQ ID NO: 1963932 - RNA, 23 nt, Human
caggcuguaucccaugagccuca

SEQ ID NO: 1963933 - RNA, 14 nt, Human
caggcugugaguuu

SEQ ID NO: 1963934 - RNA, 12 nt, Human
caggcuggucuc

SEQ ID NO: 1963935 - RNA, 19 nt, Human
caggcuggucucaaacucu

SEQ ID NO: 1963936 - RNA, 20 nt, Human
caggcuggucucgaacuccu

SEQ ID NO: 1963937 - RNA, 22 nt, Human
caggcuggucucgaacuccuga

SEQ ID NO: 1963938 - RNA, 14 nt, Human
caggcuguauccca

SEQ ID NO: 1963939 - RNA, 23 nt, Human
caggcuggucucgaacuccugac

SEQ ID NO: 1963940 - RNA, 20 nt, Human
caggcuguaucccaugagcc

SEQ ID NO: 1963941 - RNA, 21 nt, Human
caggcuguaucccaugagccu

SEQ ID NO: 1963942 - RNA, 23 nt, Human
caggcuuagucacugagacagcc

SEQ ID NO: 1963943 - RNA, 22 nt, Human
caggcuuagucacugagacagc

SEQ ID NO: 1963944 - RNA, 23 nt, Human
caggcuuuuuuaucaugugaaau

SEQ ID NO: 1963945 - RNA, 15 nt, Human
cagggaaaagcagcu

SEQ ID NO: 1963946 - RNA, 13 nt, Human
caggcuuucuaga

SEQ ID NO: 1963947 - RNA, 18 nt, Human
caggcuuucuagaaagaa

SEQ ID NO: 1963948 - RNA, 19 nt, Human
caggcuuuguacagagugc

SEQ ID NO: 1963949 - RNA, 18 nt, Human
caggauucuuccucccuc

SEQ ID NO: 1963950 - RNA, 17 nt, Human
caggauucuuccucccu

SEQ ID NO: 1963951 - RNA, 19 nt, Human
caggauucucaccagcugu

SEQ ID NO: 1963952 - RNA, 22 nt, Human
caggauucucaccagcuguguc

SEQ ID NO: 1963953 - RNA, 19 nt, Human
caggauguacaaggacagc

SEQ ID NO: 1963954 - RNA, 23 nt, Human
caggauggccgggcgcgguggcu

SEQ ID NO: 1963955 - RNA, 22 nt, Human
caggaugaugacuauggaaaga

SEQ ID NO: 1963956 - RNA, 20 nt, Human
caggaugaugacuauggaaa

SEQ ID NO: 1963957 - RNA, 18 nt, Human
caggaugaugacuaugga

SEQ ID NO: 1963958 - RNA, 21 nt, Human
caggauauucucacagcucca

SEQ ID NO: 1963959 - RNA, 16 nt, Human
caggauauauuuuauu

SEQ ID NO: 1963960 - RNA, 17 nt, Human
caggauauauuuuauuu

SEQ ID NO: 1963961 - RNA, 13 nt, Human
caggaucagucug

SEQ ID NO: 1963962 - RNA, 14 nt, Human
caggaucagucuga

SEQ ID NO: 1963963 - RNA, 17 nt, Human
caggcagccaggccaca

SEQ ID NO: 1963964 - RNA, 16 nt, Human
caggcagccaggccac

SEQ ID NO: 1963965 - RNA, 22 nt, Human
caggcagcugucacugcugcuu

SEQ ID NO: 1963966 - RNA, 20 nt, Human
caggcaggaaggcugagagg

SEQ ID NO: 1963967 - RNA, 16 nt, Human
caggcagggcaggacc

SEQ ID NO: 1963968 - RNA, 17 nt, Human
caggcagggcaggacca

SEQ ID NO: 1963969 - RNA, 18 nt, Human
caggcagggcaggaccag

SEQ ID NO: 1963970 - RNA, 22 nt, Human
caggcagggcaggaccagccca

SEQ ID NO: 1963971 - RNA, 12 nt, Human
caggcagggcag

SEQ ID NO: 1963972 - RNA, 14 nt, Human
caggcagggcagga

SEQ ID NO: 1963973 - RNA, 13 nt, Human
caggcagguccag

SEQ ID NO: 1963974 - RNA, 16 nt, Human
caggcaggggcccugc

SEQ ID NO: 1963975 - RNA, 17 nt, Human
caggcaggggcccugca

SEQ ID NO: 1963976 - RNA, 23 nt, Human
caggcaggggcccugcagcucuc

SEQ ID NO: 1963977 - RNA, 18 nt, Human
caggcaggggcccugcag

SEQ ID NO: 1963978 - RNA, 20 nt, Human
caggcaggggcccugcagcu

SEQ ID NO: 1963979 - RNA, 21 nt, Human
caggcaggggcccugcagcuc

SEQ ID NO: 1963980 - RNA, 22 nt, Human
caggcaggggcccugcagcucu

SEQ ID NO: 1963981 - RNA, 15 nt, Human
caggcagccaggcca

SEQ ID NO: 1963982 - RNA, 14 nt, Human
caggcagccaggcc

SEQ ID NO: 1963983 - RNA, 21 nt, Human
caggcaaggggaaucuggagg

SEQ ID NO: 1963984 - RNA, 14 nt, Human
caggcaagcaccuc

SEQ ID NO: 1963985 - RNA, 15 nt, Human
caggcaagcaccucc

SEQ ID NO: 1963986 - RNA, 16 nt, Human
caggcaagcaccuccu

SEQ ID NO: 1963987 - RNA, 21 nt, Human
caggcaagcaccuccugccuc

SEQ ID NO: 1963988 - RNA, 20 nt, Human
caggauucuuccucccuccc

SEQ ID NO: 1963989 - RNA, 21 nt, Human
caggcaaacauuuucucuuag

SEQ ID NO: 1963990 - RNA, 23 nt, Human
caggcaaacauuuucucuuagaa

SEQ ID NO: 1963991 - RNA, 21 nt, Human
caggcauuccccaggaggcca

SEQ ID NO: 1963992 - RNA, 20 nt, Human
caggcauuccccaggaggcc

SEQ ID NO: 1963993 - RNA, 19 nt, Human
caggcauuccccaggaggc

SEQ ID NO: 1963994 - RNA, 18 nt, Human
caggcauuccccaggagg

SEQ ID NO: 1963995 - RNA, 23 nt, Human
caggcauuccccaggaggccagc

SEQ ID NO: 1963996 - RNA, 22 nt, Human
caggcauuccccaggaggccag

SEQ ID NO: 1963997 - RNA, 24 nt, Human
caggcauuccccaggaggccagcc

SEQ ID NO: 1963998 - RNA, 17 nt, Human
caggcauuccccaggag

SEQ ID NO: 1963999 - RNA, 16 nt, Human
caggcauuccccagga

SEQ ID NO: 1964000 - RNA, 15 nt, Human
caggcauuccccagg

SEQ ID NO: 1964001 - RNA, 13 nt, Human
caggcauucccca

SEQ ID NO: 1964002 - RNA, 15 nt, Human
caggcauguucucug

SEQ ID NO: 1964003 - RNA, 18 nt, Human
caggcauguucucugagg

SEQ ID NO: 1964004 - RNA, 19 nt, Human
caggcauguucucugagga

SEQ ID NO: 1964005 - RNA, 20 nt, Human
caggcauguucucugaggac

SEQ ID NO: 1964006 - RNA, 14 nt, Human
caggcagguccagg

SEQ ID NO: 1964007 - RNA, 15 nt, Human
caggcagguccaggg

SEQ ID NO: 1964008 - RNA, 19 nt, Human
caggcagguccaggguuug

SEQ ID NO: 1964009 - RNA, 12 nt, Human
caggcaggucuu

SEQ ID NO: 1964010 - RNA, 13 nt, Human
caggcaggucuug

SEQ ID NO: 1964011 - RNA, 22 nt, Human
caggcaggucuugaacuccugg

SEQ ID NO: 1964012 - RNA, 15 nt, Human
caggcaggugggaug

SEQ ID NO: 1964013 - RNA, 23 nt, Human
caggcaggucuugaacuccuggc

SEQ ID NO: 1964014 - RNA, 17 nt, Human
caggcaugguggcccac

SEQ ID NO: 1964015 - RNA, 15 nt, Human
caggcaugggccacc

SEQ ID NO: 1964016 - RNA, 16 nt, Human
caggcaugggccacca

SEQ ID NO: 1964017 - RNA, 22 nt, Human
caggcaugucccaugugagcug

SEQ ID NO: 1964018 - RNA, 14 nt, Human
caggccccucccuc

SEQ ID NO: 1964019 - RNA, 17 nt, Human
caggccccucccucucc

SEQ ID NO: 1964020 - RNA, 13 nt, Human
caggcccggcucc

SEQ ID NO: 1964021 - RNA, 14 nt, Human
caggcccggcucca

SEQ ID NO: 1964022 - RNA, 15 nt, Human
caggcccggcuccag

SEQ ID NO: 1964023 - RNA, 15 nt, Human
caggccccugccacc

SEQ ID NO: 1964024 - RNA, 17 nt, Human
caggccccugccacccu

SEQ ID NO: 1964025 - RNA, 19 nt, Human
caggccccugccacccugg

SEQ ID NO: 1964026 - RNA, 20 nt, Human
caggccccugccacccuggg

SEQ ID NO: 1964027 - RNA, 22 nt, Human
caggccaggcccucugcccacu

SEQ ID NO: 1964028 - RNA, 21 nt, Human
caggccaggcccucugcccac

SEQ ID NO: 1964029 - RNA, 20 nt, Human
caggccacaagacccuugug

SEQ ID NO: 1964030 - RNA, 21 nt, Human
caggccagggggccagucccu

SEQ ID NO: 1964031 - RNA, 15 nt, Human
caggccacccugugc

SEQ ID NO: 1964032 - RNA, 18 nt, Human
caggccauuccccgucuc

SEQ ID NO: 1964033 - RNA, 18 nt, Human
caggccacaagacccuug

SEQ ID NO: 1964034 - RNA, 17 nt, Human
caggccacaagacccuu

SEQ ID NO: 1964035 - RNA, 13 nt, Human
caggccacaagac

SEQ ID NO: 1964036 - RNA, 23 nt, Human
caggccaaacucaccugccccuc

SEQ ID NO: 1964037 - RNA, 18 nt, Human
caggccaaacucaccugc

SEQ ID NO: 1964038 - RNA, 16 nt, Human
caggcauuuucccccu

SEQ ID NO: 1964039 - RNA, 21 nt, Human
caggcccccagaaccccuggc

SEQ ID NO: 1964040 - RNA, 13 nt, Human
caggccccugcca

SEQ ID NO: 1964041 - RNA, 14 nt, Human
caggccccccuguc

SEQ ID NO: 1964042 - RNA, 15 nt, Human
caggccccaggaaag

SEQ ID NO: 1964043 - RNA, 21 nt, Human
caggcccaugggaggcuggag

SEQ ID NO: 1964044 - RNA, 22 nt, Human
caggcccaugggaggcuggagu

SEQ ID NO: 1964045 - RNA, 21 nt, Human
caggccauuccccgucucugg

SEQ ID NO: 1964046 - RNA, 13 nt, Human
caggcccacccug

SEQ ID NO: 1964047 - RNA, 14 nt, Human
caggcccacccugc

SEQ ID NO: 1964048 - RNA, 15 nt, Human
caggcccacccugcu

SEQ ID NO: 1964049 - RNA, 23 nt, Human
caggcccacccugcuuggcccag

SEQ ID NO: 1964050 - RNA, 24 nt, Human
caggcccacccugcuuggcccagg

SEQ ID NO: 1964051 - RNA, 19 nt, Human
caggagcccugggaggcuc

SEQ ID NO: 1964052 - RNA, 18 nt, Human
caggagcccugggaggcu

SEQ ID NO: 1964053 - RNA, 16 nt, Human
caggagcccugggagg

SEQ ID NO: 1964054 - RNA, 14 nt, Human
caggagcccuggga

SEQ ID NO: 1964055 - RNA, 11 nt, Human
caggagcccug

SEQ ID NO: 1964056 - RNA, 23 nt, Human
caggagccccgaggccuucucug

SEQ ID NO: 1964057 - RNA, 20 nt, Human
caggagccccgaggccuucu

SEQ ID NO: 1964058 - RNA, 22 nt, Human
caggagccccgaggccuucucu

SEQ ID NO: 1964059 - RNA, 19 nt, Human
caggagcagccacauuccu

SEQ ID NO: 1964060 - RNA, 14 nt, Human
caggagcagccaca

SEQ ID NO: 1964061 - RNA, 13 nt, Human
caggagcagccac

SEQ ID NO: 1964062 - RNA, 12 nt, Human
caggagcagcca

SEQ ID NO: 1964063 - RNA, 15 nt, Human
caggagccccgaggc

SEQ ID NO: 1964064 - RNA, 16 nt, Human
caggagcaguaucaug

SEQ ID NO: 1964065 - RNA, 20 nt, Human
caggagcaguaucaugaagc

SEQ ID NO: 1964066 - RNA, 16 nt, Human
caggagccccgaggcc

SEQ ID NO: 1964067 - RNA, 18 nt, Human
caggagccccgaggccuu

SEQ ID NO: 1964068 - RNA, 21 nt, Human
caggagcccugggaggcucug

SEQ ID NO: 1964069 - RNA, 12 nt, Human
caggagcccauu

SEQ ID NO: 1964070 - RNA, 23 nt, Human
caggagcccauuuggagggccug

SEQ ID NO: 1964071 - RNA, 11 nt, Human
caggagcccau

SEQ ID NO: 1964072 - RNA, 17 nt, Human
caggagccuccugcccu

SEQ ID NO: 1964073 - RNA, 14 nt, Human
caggagccuccugc

SEQ ID NO: 1964074 - RNA, 20 nt, Human
caggagccuccugcccuuac

SEQ ID NO: 1964075 - RNA, 16 nt, Human
caggagccugcccagc

SEQ ID NO: 1964076 - RNA, 16 nt, Human
caggagcgcucccuug

SEQ ID NO: 1964077 - RNA, 22 nt, Human
caggagcgcucccuugaccugc

SEQ ID NO: 1964078 - RNA, 14 nt, Human
caggagucccugcc

SEQ ID NO: 1964079 - RNA, 15 nt, Human
caggagucccugcca

SEQ ID NO: 1964080 - RNA, 21 nt, Human
caggagucccugccaucaugu

SEQ ID NO: 1964081 - RNA, 12 nt, Human
caggagugagca

SEQ ID NO: 1964082 - RNA, 19 nt, Human
caggagcuccauacacacg

SEQ ID NO: 1964083 - RNA, 20 nt, Human
caggaguaaaagagucaagu

SEQ ID NO: 1964084 - RNA, 15 nt, Human
caggaguagugaaga

SEQ ID NO: 1964085 - RNA, 22 nt, Human
caggaguagugaagacuccaga

SEQ ID NO: 1964086 - RNA, 23 nt, Human
caggaguagugaagacuccagaa

SEQ ID NO: 1964087 - RNA, 12 nt, Human
caggacucugcc

SEQ ID NO: 1964088 - RNA, 13 nt, Human
caggacucugccu

SEQ ID NO: 1964089 - RNA, 15 nt, Human
caggacucugccucc

SEQ ID NO: 1964090 - RNA, 16 nt, Human
caggacucugccuccu

SEQ ID NO: 1964091 - RNA, 12 nt, Human
caggagaagaaa

SEQ ID NO: 1964092 - RNA, 16 nt, Human
caggagaagaaagaac

SEQ ID NO: 1964093 - RNA, 19 nt, Human
caggagaagaaagaacuau

SEQ ID NO: 1964094 - RNA, 21 nt, Human
caggagacuguggagacugcu

SEQ ID NO: 1964095 - RNA, 19 nt, Human
caggagaugcugugccccu

SEQ ID NO: 1964096 - RNA, 23 nt, Human
caggagaugcugugccccuggcc

SEQ ID NO: 1964097 - RNA, 16 nt, Human
caggagaugcugugcc

SEQ ID NO: 1964098 - RNA, 17 nt, Human
caggagaugcugugccc

SEQ ID NO: 1964099 - RNA, 18 nt, Human
caggagaggauggcccag

SEQ ID NO: 1964100 - RNA, 23 nt, Human
caggaguuugagaccaaccuggg

SEQ ID NO: 1964101 - RNA, 22 nt, Human
caggaguuugagaccaaccugg

SEQ ID NO: 1964102 - RNA, 13 nt, Human
caggauagacuuu

SEQ ID NO: 1964103 - RNA, 21 nt, Human
caggaguuugagaccaaccug

SEQ ID NO: 1964104 - RNA, 19 nt, Human
caggaguuucguuuucaaa

SEQ ID NO: 1964105 - RNA, 16 nt, Human
caggaguuggaagugu

SEQ ID NO: 1964106 - RNA, 13 nt, Human
cagguggggcagc

SEQ ID NO: 1964107 - RNA, 14 nt, Human
cagguggggcagcu

SEQ ID NO: 1964108 - RNA, 15 nt, Human
cagguggggcagcuu

SEQ ID NO: 1964109 - RNA, 16 nt, Human
cagguggggcagcuug

SEQ ID NO: 1964110 - RNA, 18 nt, Human
cagguggggucacucugg

SEQ ID NO: 1964111 - RNA, 17 nt, Human
cagguggggcagcuuga

SEQ ID NO: 1964112 - RNA, 22 nt, Human
cagguggggucacucuggcagc

SEQ ID NO: 1964113 - RNA, 21 nt, Human
cagguggggucacucuggcag

SEQ ID NO: 1964114 - RNA, 20 nt, Human
cagguggggucacucuggca

SEQ ID NO: 1964115 - RNA, 19 nt, Human
cagguggggucacucuggc

SEQ ID NO: 1964116 - RNA, 23 nt, Human
cagguggggucacucuggcagcu

SEQ ID NO: 1964117 - RNA, 18 nt, Human
caggugguuauggagagg

SEQ ID NO: 1964118 - RNA, 16 nt, Human
caggugggugucugcg

SEQ ID NO: 1964119 - RNA, 20 nt, Human
caggugguuauggagagggu

SEQ ID NO: 1964120 - RNA, 11 nt, Human
caggugucccu

SEQ ID NO: 1964121 - RNA, 14 nt, Human
caggugucccugca

SEQ ID NO: 1964122 - RNA, 13 nt, Human
caguaauaacucu

SEQ ID NO: 1964123 - RNA, 12 nt, Human
caguaauaacuc

SEQ ID NO: 1964124 - RNA, 19 nt, Human
caguaagaucacuguuuag

SEQ ID NO: 1964125 - RNA, 20 nt, Human
caguaagaucacuguuuaga

SEQ ID NO: 1964126 - RNA, 21 nt, Human
caguaagaucacuguuuagau

SEQ ID NO: 1964127 - RNA, 21 nt, Human
caguacaaugugacuuugaaa

SEQ ID NO: 1964128 - RNA, 23 nt, Human
caguaccauuuaauggggaggac

SEQ ID NO: 1964129 - RNA, 19 nt, Human
caguacccauggggcuagg

SEQ ID NO: 1964130 - RNA, 19 nt, Human
caguacauucucaguuuuu

SEQ ID NO: 1964131 - RNA, 21 nt, Human
caguacauucucaguuuuucu

SEQ ID NO: 1964132 - RNA, 23 nt, Human
caguaccuggguccccagcccuu

SEQ ID NO: 1964133 - RNA, 22 nt, Human
caguaccuggguccccagcccu

SEQ ID NO: 1964134 - RNA, 16 nt, Human
caguacccugguugug

SEQ ID NO: 1964135 - RNA, 17 nt, Human
caguacccugguugugu

SEQ ID NO: 1964136 - RNA, 12 nt, Human
cagguucagcuu

SEQ ID NO: 1964137 - RNA, 23 nt, Human
cagguuaggcaguauaaagaaua

SEQ ID NO: 1964138 - RNA, 22 nt, Human
cagguuaggcaguauaaagaau

SEQ ID NO: 1964139 - RNA, 19 nt, Human
cagguuccacagaggacac

SEQ ID NO: 1964140 - RNA, 15 nt, Human
cagguuccacagagg

SEQ ID NO: 1964141 - RNA, 13 nt, Human
cagguucagcuug

SEQ ID NO: 1964142 - RNA, 22 nt, Human
caguaaaugggggugcauuuga

SEQ ID NO: 1964143 - RNA, 13 nt, Human
caguaacacaggc

SEQ ID NO: 1964144 - RNA, 21 nt, Human
caguaaaugggggugcauuug

SEQ ID NO: 1964145 - RNA, 20 nt, Human
caguaaaugggggugcauuu

SEQ ID NO: 1964146 - RNA, 22 nt, Human
caguaacacauagacugugcgc

SEQ ID NO: 1964147 - RNA, 15 nt, Human
caguaagaucacugu

SEQ ID NO: 1964148 - RNA, 16 nt, Human
caguaagaucacuguu

SEQ ID NO: 1964149 - RNA, 17 nt, Human
caguaagaucacuguuu

SEQ ID NO: 1964150 - RNA, 15 nt, Human
caggugucccugcac

SEQ ID NO: 1964151 - RNA, 16 nt, Human
caggugucccugcacu

SEQ ID NO: 1964152 - RNA, 18 nt, Human
caggugucccugcacuug

SEQ ID NO: 1964153 - RNA, 19 nt, Human
caggugucccugcacuugc

SEQ ID NO: 1964154 - RNA, 12 nt, Human
caggugugaacc

SEQ ID NO: 1964155 - RNA, 12 nt, Human
cagguguucuuc

SEQ ID NO: 1964156 - RNA, 20 nt, Human
cagguguuuauaucuccuuu

SEQ ID NO: 1964157 - RNA, 16 nt, Human
cagguuaaauguuuug

SEQ ID NO: 1964158 - RNA, 20 nt, Human
cagguuaaauguuuuguaaa

SEQ ID NO: 1964159 - RNA, 13 nt, Human
cagguuaaauguu

SEQ ID NO: 1964160 - RNA, 14 nt, Human
cagguuaaauguuu

SEQ ID NO: 1964161 - RNA, 15 nt, Human
cagguuaaauguuuu

SEQ ID NO: 1964162 - RNA, 22 nt, Human
caggugugagucaccaagccca

SEQ ID NO: 1964163 - RNA, 23 nt, Human
caggugugagucaccaagcccag

SEQ ID NO: 1964164 - RNA, 21 nt, Human
caggugugagccaccacgccc

SEQ ID NO: 1964165 - RNA, 16 nt, Human
caggugugagggcagu

SEQ ID NO: 1964166 - RNA, 20 nt, Human
caggugugagggcagugcaa

SEQ ID NO: 1964167 - RNA, 16 nt, Human
caggugugaaccacca

SEQ ID NO: 1964168 - RNA, 19 nt, Human
caggugugaaccaccacac

SEQ ID NO: 1964169 - RNA, 22 nt, Human
caggugugaaccaccacaccca

SEQ ID NO: 1964170 - RNA, 23 nt, Human
caggugugaaccaccacacccag

SEQ ID NO: 1964171 - RNA, 20 nt, Human
caggugugagucaccaagcc

SEQ ID NO: 1964172 - RNA, 21 nt, Human
caggugugagucaccaagccc

SEQ ID NO: 1964173 - RNA, 16 nt, Human
caggugugagucacca

SEQ ID NO: 1964174 - RNA, 18 nt, Human
caggugugagccaccacg

SEQ ID NO: 1964175 - RNA, 21 nt, Human
caggggugggacacccuguga

SEQ ID NO: 1964176 - RNA, 20 nt, Human
caggggugggacacccugug

SEQ ID NO: 1964177 - RNA, 15 nt, Human
caggggugggacacc

SEQ ID NO: 1964178 - RNA, 14 nt, Human
caggggugggacac

SEQ ID NO: 1964179 - RNA, 16 nt, Human
caggguuuugccaugu

SEQ ID NO: 1964180 - RNA, 16 nt, Human
cagggucucacucugu

SEQ ID NO: 1964181 - RNA, 14 nt, Human
cagguaacaggcag

SEQ ID NO: 1964182 - RNA, 15 nt, Human
cagguaacaggcaga

SEQ ID NO: 1964183 - RNA, 16 nt, Human
cagguaacaggcagau

SEQ ID NO: 1964184 - RNA, 17 nt, Human
cagguaacaggcagaua

SEQ ID NO: 1964185 - RNA, 18 nt, Human
caggguccuguagcccua

SEQ ID NO: 1964186 - RNA, 23 nt, Human
cagggucccugguggcagcucac

SEQ ID NO: 1964187 - RNA, 21 nt, Human
cagggucucacuauguugccc

SEQ ID NO: 1964188 - RNA, 22 nt, Human
cagggucucacuauguugccca

SEQ ID NO: 1964189 - RNA, 23 nt, Human
cagggucucacuauguugcccag

SEQ ID NO: 1964190 - RNA, 15 nt, Human
cagggucucacucug

SEQ ID NO: 1964191 - RNA, 12 nt, Human
cagggguuccuu

SEQ ID NO: 1964192 - RNA, 19 nt, Human
cagggguuccuucugggca

SEQ ID NO: 1964193 - RNA, 20 nt, Human
cagggguuccuucugggcau

SEQ ID NO: 1964194 - RNA, 21 nt, Human
cagggguuccuucugggcauu

SEQ ID NO: 1964195 - RNA, 15 nt, Human
caggguacaaaaaau

SEQ ID NO: 1964196 - RNA, 20 nt, Human
caggguauuccagagugggg

SEQ ID NO: 1964197 - RNA, 21 nt, Human
caggguauuccagagugggga

SEQ ID NO: 1964198 - RNA, 22 nt, Human
cagggucccugguggcagcuca

SEQ ID NO: 1964199 - RNA, 19 nt, Human
cagggucccugguggcagc

SEQ ID NO: 1964200 - RNA, 18 nt, Human
cagggucccugguggcag

SEQ ID NO: 1964201 - RNA, 15 nt, Human
cagggucccuggugg

SEQ ID NO: 1964202 - RNA, 14 nt, Human
cagggucccuggug

SEQ ID NO: 1964203 - RNA, 12 nt, Human
cagggucccugg

SEQ ID NO: 1964204 - RNA, 18 nt, Human
cagguagaggugcaugcc

SEQ ID NO: 1964205 - RNA, 21 nt, Human
cagguagaacgccagggaccc

SEQ ID NO: 1964206 - RNA, 17 nt, Human
cagguagaacgccaggg

SEQ ID NO: 1964207 - RNA, 19 nt, Human
cagguagaacgccagggac

SEQ ID NO: 1964208 - RNA, 21 nt, Human
cagguagcauagcucuguaca

SEQ ID NO: 1964209 - RNA, 13 nt, Human
cagguaggaauau

SEQ ID NO: 1964210 - RNA, 15 nt, Human
cagguaggaauauua

SEQ ID NO: 1964211 - RNA, 20 nt, Human
cagguaggaauauuauauuu

SEQ ID NO: 1964212 - RNA, 23 nt, Human
cagguaggaauauuauauuugga

SEQ ID NO: 1964213 - RNA, 20 nt, Human
cagguaacaggcagauacag

SEQ ID NO: 1964214 - RNA, 21 nt, Human
cagguaacaggcagauacagg

SEQ ID NO: 1964215 - RNA, 17 nt, Human
cagguaaucgaccugcc

SEQ ID NO: 1964216 - RNA, 18 nt, Human
cagguaaucgaccugccu

SEQ ID NO: 1964217 - RNA, 19 nt, Human
cagguaaucgaccugccuc

SEQ ID NO: 1964218 - RNA, 20 nt, Human
cagguaaucgaccugccucg

SEQ ID NO: 1964219 - RNA, 12 nt, Human
cagguacuuugu

SEQ ID NO: 1964220 - RNA, 13 nt, Human
cagguacuuuguc

SEQ ID NO: 1964221 - RNA, 23 nt, Human
cagguacuuugucuaagaaacau

SEQ ID NO: 1964222 - RNA, 14 nt, Human
cagguaccaguucu

SEQ ID NO: 1964223 - RNA, 15 nt, Human
cagguaccaguucuu

SEQ ID NO: 1964224 - RNA, 13 nt, Human
cagguccccagac

SEQ ID NO: 1964225 - RNA, 18 nt, Human
cagguccccagcuuuggc

SEQ ID NO: 1964226 - RNA, 12 nt, Human
cagguccccaga

SEQ ID NO: 1964227 - RNA, 18 nt, Human
caggucccuaauaaagcu

SEQ ID NO: 1964228 - RNA, 17 nt, Human
caggucccuaauaaagc

SEQ ID NO: 1964229 - RNA, 16 nt, Human
caggucccuaauaaag

SEQ ID NO: 1964230 - RNA, 15 nt, Human
caggucccuaauaaa

SEQ ID NO: 1964231 - RNA, 14 nt, Human
caggucccuaauaa

SEQ ID NO: 1964232 - RNA, 13 nt, Human
caggucccuaaua

SEQ ID NO: 1964233 - RNA, 12 nt, Human
caggucccuaau

SEQ ID NO: 1964234 - RNA, 11 nt, Human
caggucccuaa

SEQ ID NO: 1964235 - RNA, 22 nt, Human
caggucccuaauaaagcugugu

SEQ ID NO: 1964236 - RNA, 21 nt, Human
caggucccuaauaaagcugug

SEQ ID NO: 1964237 - RNA, 20 nt, Human
caggucccuaauaaagcugu

SEQ ID NO: 1964238 - RNA, 19 nt, Human
caggucccuaauaaagcug

SEQ ID NO: 1964239 - RNA, 14 nt, Human
cagguccucccugc

SEQ ID NO: 1964240 - RNA, 17 nt, Human
cagguccugcucagcag

SEQ ID NO: 1964241 - RNA, 12 nt, Human
cagguccugcuc

SEQ ID NO: 1964242 - RNA, 13 nt, Human
cagguccugcuca

SEQ ID NO: 1964243 - RNA, 15 nt, Human
cagguccugcucagc

SEQ ID NO: 1964244 - RNA, 21 nt, Human
caggucuaccccucccggccc

SEQ ID NO: 1964245 - RNA, 18 nt, Human
caggucuugaacuccugg

SEQ ID NO: 1964246 - RNA, 19 nt, Human
caggucuugaacuccuggc

SEQ ID NO: 1964247 - RNA, 20 nt, Human
caggucuugaacuccuggcc

SEQ ID NO: 1964248 - RNA, 21 nt, Human
caggucuugaacuccuggccu

SEQ ID NO: 1964249 - RNA, 22 nt, Human
caggucuugaacuccuggccuc

SEQ ID NO: 1964250 - RNA, 23 nt, Human
caggucuugaacuccuggccuca

SEQ ID NO: 1964251 - RNA, 16 nt, Human
cagguggccacuccag

SEQ ID NO: 1964252 - RNA, 19 nt, Human
cagguggccacuccagacc

SEQ ID NO: 1964253 - RNA, 21 nt, Human
cagguggccacuccagacccc

SEQ ID NO: 1964254 - RNA, 15 nt, Human
cagguggccacucca

SEQ ID NO: 1964255 - RNA, 17 nt, Human
cagguggagguggcauc

SEQ ID NO: 1964256 - RNA, 20 nt, Human
cagguggagguggcaucccc

SEQ ID NO: 1964257 - RNA, 20 nt, Human
caggugagaagcagaggaag

SEQ ID NO: 1964258 - RNA, 13 nt, Human
caggugagaagca

SEQ ID NO: 1964259 - RNA, 21 nt, Human
caggugagaagcagaggaagg

SEQ ID NO: 1964260 - RNA, 14 nt, Human
caggugaaggaggc

SEQ ID NO: 1964261 - RNA, 18 nt, Human
caggugaaggaggcucca

SEQ ID NO: 1964262 - RNA, 19 nt, Human
caggugaaggaggcuccag

SEQ ID NO: 1964263 - RNA, 23 nt, Human
caggugaaggaggcuccaggcag

SEQ ID NO: 1964264 - RNA, 23 nt, Human
cagugccuuauggaacacucuga

SEQ ID NO: 1964265 - RNA, 16 nt, Human
cagugcgggugcagac

SEQ ID NO: 1964266 - RNA, 13 nt, Human
cagugcuacugaa

SEQ ID NO: 1964267 - RNA, 15 nt, Human
cagugcuacugaaag

SEQ ID NO: 1964268 - RNA, 22 nt, Human
cagugccuuauggaacacucug

SEQ ID NO: 1964269 - RNA, 21 nt, Human
cagugccuuauggaacacucu

SEQ ID NO: 1964270 - RNA, 20 nt, Human
cagugccuuauggaacacuc

SEQ ID NO: 1964271 - RNA, 19 nt, Human
cagugccuuauggaacacu

SEQ ID NO: 1964272 - RNA, 18 nt, Human
cagugccuuauggaacac

SEQ ID NO: 1964273 - RNA, 17 nt, Human
cagugccuuauggaaca

SEQ ID NO: 1964274 - RNA, 16 nt, Human
cagugccuuauggaac

SEQ ID NO: 1964275 - RNA, 15 nt, Human
cagugccuuauggaa

SEQ ID NO: 1964276 - RNA, 13 nt, Human
cagugccuuaugg

SEQ ID NO: 1964277 - RNA, 11 nt, Human
cagugccuuau

SEQ ID NO: 1964278 - RNA, 18 nt, Human
cagugccgagaaggaagc

SEQ ID NO: 1964279 - RNA, 15 nt, Human
cagugccgagaagga

SEQ ID NO: 1964280 - RNA, 15 nt, Human
cagugccuaaaauaa

SEQ ID NO: 1964281 - RNA, 19 nt, Human
cagugccuaaaauaagaau

SEQ ID NO: 1964282 - RNA, 19 nt, Human
cagugagucgaggacaggg

SEQ ID NO: 1964283 - RNA, 20 nt, Human
cagugagucgaggacaggga

SEQ ID NO: 1964284 - RNA, 22 nt, Human
cagugagucgaggacagggagg

SEQ ID NO: 1964285 - RNA, 23 nt, Human
cagugagucgaggacagggaggu

SEQ ID NO: 1964286 - RNA, 12 nt, Human
cagugauauucu

SEQ ID NO: 1964287 - RNA, 14 nt, Human
cagugauauucuuu

SEQ ID NO: 1964288 - RNA, 15 nt, Human
cagugauauucuuug

SEQ ID NO: 1964289 - RNA, 18 nt, Human
cagugauauucuuuguua

SEQ ID NO: 1964290 - RNA, 22 nt, Human
cagugccccgucuacagcuccc

SEQ ID NO: 1964291 - RNA, 15 nt, Human
cagugcccuccagga

SEQ ID NO: 1964292 - RNA, 17 nt, Human
cagugauuaccagggac

SEQ ID NO: 1964293 - RNA, 22 nt, Human
cagugauauucuuuguuaauuu

SEQ ID NO: 1964294 - RNA, 18 nt, Human
cagugauuaccagggacu

SEQ ID NO: 1964295 - RNA, 22 nt, Human
cagugaugugccuaaauaaguu

SEQ ID NO: 1964296 - RNA, 18 nt, Human
cagucuggaaugcagugg

SEQ ID NO: 1964297 - RNA, 21 nt, Human
caguccuuaccagcagagcac

SEQ ID NO: 1964298 - RNA, 20 nt, Human
caguccuuaccagcagagca

SEQ ID NO: 1964299 - RNA, 19 nt, Human
caguccuuaccagcagagc

SEQ ID NO: 1964300 - RNA, 18 nt, Human
caguccuuaccagcagag

SEQ ID NO: 1964301 - RNA, 15 nt, Human
caguccuuaccagca

SEQ ID NO: 1964302 - RNA, 17 nt, Human
caguccucccaucucac

SEQ ID NO: 1964303 - RNA, 16 nt, Human
caguccucccaucuca

SEQ ID NO: 1964304 - RNA, 22 nt, Human
cagucuuagaucauaguuuuau

SEQ ID NO: 1964305 - RNA, 16 nt, Human
cagucuuaugcuucca

SEQ ID NO: 1964306 - RNA, 17 nt, Human
cagucuuaugcuuccag

SEQ ID NO: 1964307 - RNA, 19 nt, Human
cagucuggaaugcaguggu

SEQ ID NO: 1964308 - RNA, 20 nt, Human
cagucuuaugcuuccagaaa

SEQ ID NO: 1964309 - RNA, 18 nt, Human
cagucuuaugcuuccaga

SEQ ID NO: 1964310 - RNA, 19 nt, Human
cagucuuaugcuuccagaa

SEQ ID NO: 1964311 - RNA, 22 nt, Human
cagucuuuaaucugagaggcca

SEQ ID NO: 1964312 - RNA, 20 nt, Human
cagucuuucaacucauugca

SEQ ID NO: 1964313 - RNA, 16 nt, Human
cagugaaagaaaauaa

SEQ ID NO: 1964314 - RNA, 20 nt, Human
cagugaaagaaaauaacaau

SEQ ID NO: 1964315 - RNA, 22 nt, Human
cagugaaaauaagccaugagaa

SEQ ID NO: 1964316 - RNA, 23 nt, Human
cagugaaaauaagccaugagaau

SEQ ID NO: 1964317 - RNA, 15 nt, Human
cagugagacagcucu

SEQ ID NO: 1964318 - RNA, 13 nt, Human
cagugagagcaga

SEQ ID NO: 1964319 - RNA, 15 nt, Human
cagugagagcagaug

SEQ ID NO: 1964320 - RNA, 20 nt, Human
cagugaccuggaaggcccag

SEQ ID NO: 1964321 - RNA, 23 nt, Human
cagugaccuggaaggcccagcac

SEQ ID NO: 1964322 - RNA, 20 nt, Human
cagugaggcucugcccuugg

SEQ ID NO: 1964323 - RNA, 19 nt, Human
cagugaggcucugcccuug

SEQ ID NO: 1964324 - RNA, 18 nt, Human
cagugaggcucugcccuu

SEQ ID NO: 1964325 - RNA, 17 nt, Human
cagugaggcucugcccu

SEQ ID NO: 1964326 - RNA, 23 nt, Human
cagugaggguaaguauuuuccug

SEQ ID NO: 1964327 - RNA, 21 nt, Human
cagugaggcucugcccuuggu

SEQ ID NO: 1964328 - RNA, 17 nt, Human
cagugagucgaggacag

SEQ ID NO: 1964329 - RNA, 18 nt, Human
cagugagucgaggacagg

SEQ ID NO: 1964330 - RNA, 16 nt, Human
cagugaggcucugccc

SEQ ID NO: 1964331 - RNA, 15 nt, Human
cagugaggcucugcc

SEQ ID NO: 1964332 - RNA, 14 nt, Human
cagugaggcucugc

SEQ ID NO: 1964333 - RNA, 13 nt, Human
cagugaggcucug

SEQ ID NO: 1964334 - RNA, 12 nt, Human
cagugaggcucu

SEQ ID NO: 1964335 - RNA, 23 nt, Human
cagugagcuggagauacuugguc

SEQ ID NO: 1964336 - RNA, 14 nt, Human
cagugagcuggaga

SEQ ID NO: 1964337 - RNA, 24 nt, Human
cagugagccgagauugcaccacug

SEQ ID NO: 1964338 - RNA, 16 nt, Human
cagucccugccaaugg

SEQ ID NO: 1964339 - RNA, 15 nt, Human
cagucccugccaaug

SEQ ID NO: 1964340 - RNA, 14 nt, Human
cagucccugccaau

SEQ ID NO: 1964341 - RNA, 13 nt, Human
cagucccugccaa

SEQ ID NO: 1964342 - RNA, 14 nt, Human
cagucccugaggca

SEQ ID NO: 1964343 - RNA, 22 nt, Human
caguccccuucccgugaccugg

SEQ ID NO: 1964344 - RNA, 14 nt, Human
caguccccuucccg

SEQ ID NO: 1964345 - RNA, 20 nt, Human
cagucccugaggcagguccc

SEQ ID NO: 1964346 - RNA, 23 nt, Human
cagucccugaggcagguccccag

SEQ ID NO: 1964347 - RNA, 12 nt, Human
cagucccugcca

SEQ ID NO: 1964348 - RNA, 15 nt, Human
caguccucccaucuc

SEQ ID NO: 1964349 - RNA, 14 nt, Human
caguccucccaucu

SEQ ID NO: 1964350 - RNA, 13 nt, Human
caguccucccauc

SEQ ID NO: 1964351 - RNA, 12 nt, Human
caguccucccau

SEQ ID NO: 1964352 - RNA, 17 nt, Human
cagucccugccaaugga

SEQ ID NO: 1964353 - RNA, 16 nt, Human
cagucccuuuaaagaa

SEQ ID NO: 1964354 - RNA, 13 nt, Human
caguccccagaac

SEQ ID NO: 1964355 - RNA, 15 nt, Human
caguccccagaacuc

SEQ ID NO: 1964356 - RNA, 19 nt, Human
caguccccagaacucugcc

SEQ ID NO: 1964357 - RNA, 20 nt, Human
caguccccagaacucugccu

SEQ ID NO: 1964358 - RNA, 21 nt, Human
caguccccagaacucugccug

SEQ ID NO: 1964359 - RNA, 23 nt, Human
caguccccgugaaggagagcccu

SEQ ID NO: 1964360 - RNA, 16 nt, Human
cagucccccugcccca

SEQ ID NO: 1964361 - RNA, 17 nt, Human
cagucccccugccccag

SEQ ID NO: 1964362 - RNA, 14 nt, Human
caguagcaggcccg

SEQ ID NO: 1964363 - RNA, 14 nt, Human
caguagcugggacc

SEQ ID NO: 1964364 - RNA, 19 nt, Human
caguagcugggaccacagg

SEQ ID NO: 1964365 - RNA, 20 nt, Human
caguagcugggaccacaggu

SEQ ID NO: 1964366 - RNA, 18 nt, Human
caguagcuuaagaaaaaa

SEQ ID NO: 1964367 - RNA, 22 nt, Human
caguaggacaaggugcaggcag

SEQ ID NO: 1964368 - RNA, 23 nt, Human
caguaggacaaggugcaggcagg

SEQ ID NO: 1964369 - RNA, 24 nt, Human
caguaggacaaggugcaggcaggc

SEQ ID NO: 1964370 - RNA, 13 nt, Human
caguagaaaauau

SEQ ID NO: 1964371 - RNA, 13 nt, Human
caguauaaagaau

SEQ ID NO: 1964372 - RNA, 20 nt, Human
caguaguuugcauuucagaa

SEQ ID NO: 1964373 - RNA, 15 nt, Human
caguaguuugcauuu

SEQ ID NO: 1964374 - RNA, 19 nt, Human
caguaguuugcauuucaga

SEQ ID NO: 1964375 - RNA, 21 nt, Human
caguaguuugcauuucagaaa

SEQ ID NO: 1964376 - RNA, 14 nt, Human
caguauaaagaaua

SEQ ID NO: 1964377 - RNA, 15 nt, Human
caguauaaagaauag

SEQ ID NO: 1964378 - RNA, 17 nt, Human
caguauaaagaauagga

SEQ ID NO: 1964379 - RNA, 18 nt, Human
caguauaaagaauaggac

SEQ ID NO: 1964380 - RNA, 21 nt, Human
caguauaaagaauaggacuug

SEQ ID NO: 1964381 - RNA, 12 nt, Human
caguagugauag

SEQ ID NO: 1964382 - RNA, 12 nt, Human
caguauggcagc

SEQ ID NO: 1964383 - RNA, 21 nt, Human
caguaucuugaagacuuuucu

SEQ ID NO: 1964384 - RNA, 18 nt, Human
caguaucuugaagacuuu

SEQ ID NO: 1964385 - RNA, 12 nt, Human
caguaucuugaa

SEQ ID NO: 1964386 - RNA, 15 nt, Human
caguaucucagggcc

SEQ ID NO: 1964387 - RNA, 14 nt, Human
caguaucaugaagc

SEQ ID NO: 1964388 - RNA, 15 nt, Human
caguaucaugaagcc

SEQ ID NO: 1964389 - RNA, 13 nt, Human
caguaucucaggg

SEQ ID NO: 1964390 - RNA, 17 nt, Human
cagucauucagauauga

SEQ ID NO: 1964391 - RNA, 19 nt, Human
cagucauuauguuaauauu

SEQ ID NO: 1964392 - RNA, 20 nt, Human
cagucauucagauaugauuc

SEQ ID NO: 1964393 - RNA, 22 nt, Human
caguccaagggguccccuccag

SEQ ID NO: 1964394 - RNA, 13 nt, Human
caguccaugaaga

SEQ ID NO: 1964395 - RNA, 14 nt, Human
caguccauugaaag

SEQ ID NO: 1964396 - RNA, 16 nt, Human
caguccauagcagaga

SEQ ID NO: 1964397 - RNA, 12 nt, Human
cagucccagcag

SEQ ID NO: 1964398 - RNA, 13 nt, Human
cagucccagcagc

SEQ ID NO: 1964399 - RNA, 14 nt, Human
cagucccagcagcc

SEQ ID NO: 1964400 - RNA, 15 nt, Human
cagucccagcagcca

SEQ ID NO: 1964401 - RNA, 17 nt, Human
cagucccagcagccagc

SEQ ID NO: 1964402 - RNA, 18 nt, Human
cagucccagcagccagcc

SEQ ID NO: 1964403 - RNA, 19 nt, Human
cagucccagcagccagcca

SEQ ID NO: 1964404 - RNA, 12 nt, Human
caguauguggaa

SEQ ID NO: 1964405 - RNA, 16 nt, Human
caguauuacuucugcu

SEQ ID NO: 1964406 - RNA, 18 nt, Human
caguauuacuucugcuac

SEQ ID NO: 1964407 - RNA, 19 nt, Human
caguauuacuucugcuaca

SEQ ID NO: 1964408 - RNA, 19 nt, Human
cagucaggcucucugggcu

SEQ ID NO: 1964409 - RNA, 22 nt, Human
cagucaggcucucugggcugac

SEQ ID NO: 1964410 - RNA, 15 nt, Human
cagucagguugaaga

SEQ ID NO: 1964411 - RNA, 22 nt, Human
cagucaucgaguggcccaacag

SEQ ID NO: 1964412 - RNA, 16 nt, Human
cagucaggcucucugg

SEQ ID NO: 1964413 - RNA, 18 nt, Human
cagucaggcucucugggc

SEQ ID NO: 1964414 - RNA, 22 nt, Human
caggaagcucagggccuggcuc

SEQ ID NO: 1964415 - RNA, 15 nt, Human
caggaaggcuaaagg

SEQ ID NO: 1964416 - RNA, 19 nt, Human
caggaaggcugagaggaga

SEQ ID NO: 1964417 - RNA, 16 nt, Human
caggaaguacuggaga

SEQ ID NO: 1964418 - RNA, 14 nt, Human
caggaaguacugga

SEQ ID NO: 1964419 - RNA, 12 nt, Human
caggaaguacug

SEQ ID NO: 1964420 - RNA, 15 nt, Human
caggaaguagaggag

SEQ ID NO: 1964421 - RNA, 20 nt, Human
caggaaguacuggagaaaau

SEQ ID NO: 1964422 - RNA, 18 nt, Human
caggaaguacuggagaaa

SEQ ID NO: 1964423 - RNA, 17 nt, Human
caggaaguacuggagaa

SEQ ID NO: 1964424 - RNA, 16 nt, Human
caggaaguagaggagg

SEQ ID NO: 1964425 - RNA, 15 nt, Human
caggaaguagcacag

SEQ ID NO: 1964426 - RNA, 16 nt, Human
caggaaguagcacagg

SEQ ID NO: 1964427 - RNA, 17 nt, Human
caggaaguagcacaggc

SEQ ID NO: 1964428 - RNA, 18 nt, Human
caggaaguagcacaggcu

SEQ ID NO: 1964429 - RNA, 20 nt, Human
caggaaguagcacaggcuga

SEQ ID NO: 1964430 - RNA, 21 nt, Human
caggaaguagcacaggcugag

SEQ ID NO: 1964431 - RNA, 22 nt, Human
caggaaguagcacaggcugagu

SEQ ID NO: 1964432 - RNA, 21 nt, Human
caggaaguccuuaucuagcug

SEQ ID NO: 1964433 - RNA, 21 nt, Human
caggaccuucgggcugugccc

SEQ ID NO: 1964434 - RNA, 22 nt, Human
caggaccuucgggcugugcccg

SEQ ID NO: 1964435 - RNA, 20 nt, Human
caggaccuucgggcugugcc

SEQ ID NO: 1964436 - RNA, 23 nt, Human
caggacgacuguuuucccaacac

SEQ ID NO: 1964437 - RNA, 19 nt, Human
caggaagcucagggccugg

SEQ ID NO: 1964438 - RNA, 18 nt, Human
caggaagcucagggccug

SEQ ID NO: 1964439 - RNA, 17 nt, Human
caggaagcucagggccu

SEQ ID NO: 1964440 - RNA, 16 nt, Human
caggaagcucagggcc

SEQ ID NO: 1964441 - RNA, 15 nt, Human
caggaagcucagggc

SEQ ID NO: 1964442 - RNA, 14 nt, Human
caggaagcucaggg

SEQ ID NO: 1964443 - RNA, 13 nt, Human
caggaagcucagg

SEQ ID NO: 1964444 - RNA, 21 nt, Human
caggaagcucagggccuggcu

SEQ ID NO: 1964445 - RNA, 20 nt, Human
caggaagcucagggccuggc

SEQ ID NO: 1964446 - RNA, 23 nt, Human
caggaagcucagggccuggcuca

SEQ ID NO: 1964447 - RNA, 18 nt, Human
caggaagccagcaggcuc

SEQ ID NO: 1964448 - RNA, 17 nt, Human
caggaagccagcaggcu

SEQ ID NO: 1964449 - RNA, 16 nt, Human
caggaagccagcaggc

SEQ ID NO: 1964450 - RNA, 14 nt, Human
caggaagccagcag

SEQ ID NO: 1964451 - RNA, 21 nt, Human
caggaagccagcaggcucuca

SEQ ID NO: 1964452 - RNA, 19 nt, Human
caggaagccagcaggcucu

SEQ ID NO: 1964453 - RNA, 22 nt, Human
caggaagccagcaggcucucag

SEQ ID NO: 1964454 - RNA, 23 nt, Human
caggaaccauaguugacaguucc

SEQ ID NO: 1964455 - RNA, 21 nt, Human
caggaaccuguccuaaggaac

SEQ ID NO: 1964456 - RNA, 14 nt, Human
caggaagcagcuuu

SEQ ID NO: 1964457 - RNA, 16 nt, Human
cagcuugcacauuugg

SEQ ID NO: 1964458 - RNA, 18 nt, Human
cagcuugcacauuuggua

SEQ ID NO: 1964459 - RNA, 17 nt, Human
cagcuuggcccuuuccu

SEQ ID NO: 1964460 - RNA, 13 nt, Human
cagcuuggcucag

SEQ ID NO: 1964461 - RNA, 13 nt, Human
cagcuugggcaga

SEQ ID NO: 1964462 - RNA, 17 nt, Human
cagcuugggcagaucuc

SEQ ID NO: 1964463 - RNA, 20 nt, Human
cagcuugggcagaucuccca

SEQ ID NO: 1964464 - RNA, 18 nt, Human
cagcuugaggguugggcu

SEQ ID NO: 1964465 - RNA, 19 nt, Human
cagcuugaggguugggcug

SEQ ID NO: 1964466 - RNA, 20 nt, Human
cagcuugaggguugggcugg

SEQ ID NO: 1964467 - RNA, 21 nt, Human
cagcuugaggguugggcuggu

SEQ ID NO: 1964468 - RNA, 21 nt, Human
cagcuugaccgugaggccaga

SEQ ID NO: 1964469 - RNA, 20 nt, Human
cagcuugaccgugaggccag

SEQ ID NO: 1964470 - RNA, 19 nt, Human
cagcuugaccgugaggcca

SEQ ID NO: 1964471 - RNA, 18 nt, Human
cagcuugaccgugaggcc

SEQ ID NO: 1964472 - RNA, 14 nt, Human
cagcuugaggguug

SEQ ID NO: 1964473 - RNA, 15 nt, Human
cagcuugaggguugg

SEQ ID NO: 1964474 - RNA, 20 nt, Human
cagcuucauuuccugugucu

SEQ ID NO: 1964475 - RNA, 21 nt, Human
cagcuucauuuccugugucuu

SEQ ID NO: 1964476 - RNA, 18 nt, Human
cagcuuccugucaagcaa

SEQ ID NO: 1964477 - RNA, 11 nt, Human
cagcuuccagc

SEQ ID NO: 1964478 - RNA, 12 nt, Human
cagcuuccagca

SEQ ID NO: 1964479 - RNA, 13 nt, Human
cagcuuccagcag

SEQ ID NO: 1964480 - RNA, 14 nt, Human
cagcuuccagcagg

SEQ ID NO: 1964481 - RNA, 15 nt, Human
cagcuuccagcagga

SEQ ID NO: 1964482 - RNA, 16 nt, Human
cagcuuccagcaggag

SEQ ID NO: 1964483 - RNA, 17 nt, Human
cagcuuccagcaggagg

SEQ ID NO: 1964484 - RNA, 17 nt, Human
cagcuuccccaguagcu

SEQ ID NO: 1964485 - RNA, 18 nt, Human
cagcuuccccaguagcug

SEQ ID NO: 1964486 - RNA, 13 nt, Human
caggaaaaagaac

SEQ ID NO: 1964487 - RNA, 16 nt, Human
caggaaaacacccagg

SEQ ID NO: 1964488 - RNA, 19 nt, Human
caggaaaacacccagggaa

SEQ ID NO: 1964489 - RNA, 15 nt, Human
cagcuuuucauugcu

SEQ ID NO: 1964490 - RNA, 20 nt, Human
cagcuuuucauugcugugac

SEQ ID NO: 1964491 - RNA, 23 nt, Human
cagcuuuucauugcugugacagu

SEQ ID NO: 1964492 - RNA, 17 nt, Human
cagcuuuuccugggaca

SEQ ID NO: 1964493 - RNA, 14 nt, Human
cagcuuugauauuu

SEQ ID NO: 1964494 - RNA, 13 nt, Human
cagcuuuccagua

SEQ ID NO: 1964495 - RNA, 13 nt, Human
cagcuuugacccg

SEQ ID NO: 1964496 - RNA, 23 nt, Human
cagcuuuguuuguugucagcuga

SEQ ID NO: 1964497 - RNA, 22 nt, Human
cagcuuuguuuguugucagcug

SEQ ID NO: 1964498 - RNA, 21 nt, Human
cagcuuuguuuguugucagcu

SEQ ID NO: 1964499 - RNA, 12 nt, Human
cagcuuuguuug

SEQ ID NO: 1964500 - RNA, 23 nt, Human
cagcuuuccucaaaacuucagac

SEQ ID NO: 1964501 - RNA, 23 nt, Human
cagcuuuccccaugucucgacuc

SEQ ID NO: 1964502 - RNA, 22 nt, Human
cagcuuuaaaaaauuaaucugg

SEQ ID NO: 1964503 - RNA, 21 nt, Human
cagcuuguaaauagcucaggu

SEQ ID NO: 1964504 - RNA, 22 nt, Human
cagcuuguaaauagcucaggug

SEQ ID NO: 1964505 - RNA, 18 nt, Human
cagcuuguaaauagcuca

SEQ ID NO: 1964506 - RNA, 19 nt, Human
cagcuuguaaauagcucag

SEQ ID NO: 1964507 - RNA, 20 nt, Human
cagcuuguaaauagcucagg

SEQ ID NO: 1964508 - RNA, 15 nt, Human
cagcugcucagaucc

SEQ ID NO: 1964509 - RNA, 17 nt, Human
cagcugcuacuacuccu

SEQ ID NO: 1964510 - RNA, 21 nt, Human
cagcugcucaauaaaguacaa

SEQ ID NO: 1964511 - RNA, 16 nt, Human
cagcugacuuucaaag

SEQ ID NO: 1964512 - RNA, 13 nt, Human
cagcugcugagcc

SEQ ID NO: 1964513 - RNA, 14 nt, Human
cagcugcugagccg

SEQ ID NO: 1964514 - RNA, 16 nt, Human
cagcugcugagccgca

SEQ ID NO: 1964515 - RNA, 17 nt, Human
cagcugcugagccgcag

SEQ ID NO: 1964516 - RNA, 18 nt, Human
cagcugcugagccgcaga

SEQ ID NO: 1964517 - RNA, 19 nt, Human
cagcugcugagccgcagag

SEQ ID NO: 1964518 - RNA, 20 nt, Human
cagcugcugagccgcagaga

SEQ ID NO: 1964519 - RNA, 22 nt, Human
cagcugcuugggcuucauccuc

SEQ ID NO: 1964520 - RNA, 21 nt, Human
cagcugcuugggcuucauccu

SEQ ID NO: 1964521 - RNA, 19 nt, Human
cagcugcuugggcuucauc

SEQ ID NO: 1964522 - RNA, 18 nt, Human
cagcugcuugggcuucau

SEQ ID NO: 1964523 - RNA, 16 nt, Human
cagcugcuugggcuuc

SEQ ID NO: 1964524 - RNA, 15 nt, Human
cagcugcuugggcuu

SEQ ID NO: 1964525 - RNA, 14 nt, Human
cagcugcuugggcu

SEQ ID NO: 1964526 - RNA, 13 nt, Human
cagcugcuugggc

SEQ ID NO: 1964527 - RNA, 13 nt, Human
cagcugaaauuga

SEQ ID NO: 1964528 - RNA, 16 nt, Human
cagcugaaauugaaaa

SEQ ID NO: 1964529 - RNA, 17 nt, Human
cagcugaaauugaaaag

SEQ ID NO: 1964530 - RNA, 20 nt, Human
cagcugaaauugaaaaguua

SEQ ID NO: 1964531 - RNA, 18 nt, Human
cagcucuuggcuccacug

SEQ ID NO: 1964532 - RNA, 17 nt, Human
cagcucuuggcuccacu

SEQ ID NO: 1964533 - RNA, 16 nt, Human
cagcucuuggcuccac

SEQ ID NO: 1964534 - RNA, 23 nt, Human
cagcugccugggaucccucaucc

SEQ ID NO: 1964535 - RNA, 18 nt, Human
cagcugccugggaucccu

SEQ ID NO: 1964536 - RNA, 18 nt, Human
cagcugcgguccacccag

SEQ ID NO: 1964537 - RNA, 15 nt, Human
cagcugccugggauc

SEQ ID NO: 1964538 - RNA, 19 nt, Human
cagcugcgguccacccagg

SEQ ID NO: 1964539 - RNA, 20 nt, Human
cagcugcgguccacccagga

SEQ ID NO: 1964540 - RNA, 21 nt, Human
cagcugcgguccacccaggag

SEQ ID NO: 1964541 - RNA, 22 nt, Human
cagcugcgguccacccaggagc

SEQ ID NO: 1964542 - RNA, 23 nt, Human
cagcugcgguccacccaggagcc

SEQ ID NO: 1964543 - RNA, 24 nt, Human
cagcugcgguccacccaggagccc

SEQ ID NO: 1964544 - RNA, 18 nt, Human
cagcugguugagguuuca

SEQ ID NO: 1964545 - RNA, 16 nt, Human
cagcuggguuggaaaa

SEQ ID NO: 1964546 - RNA, 17 nt, Human
cagcuggguuggaaaac

SEQ ID NO: 1964547 - RNA, 23 nt, Human
cagcugggguggggaccucaggc

SEQ ID NO: 1964548 - RNA, 22 nt, Human
cagcugggguggggaccucagg

SEQ ID NO: 1964549 - RNA, 21 nt, Human
cagcugggguggggaccucag

SEQ ID NO: 1964550 - RNA, 22 nt, Human
cagcuggggccaggcugggucg

SEQ ID NO: 1964551 - RNA, 21 nt, Human
cagcuggggccaggcuggguc

SEQ ID NO: 1964552 - RNA, 20 nt, Human
cagcuggggccaggcugggu

SEQ ID NO: 1964553 - RNA, 19 nt, Human
cagcuggggccaggcuggg

SEQ ID NO: 1964554 - RNA, 18 nt, Human
cagcuggggccaggcugg

SEQ ID NO: 1964555 - RNA, 23 nt, Human
cagcugggaucacauguggacuu

SEQ ID NO: 1964556 - RNA, 19 nt, Human
cagcuggccgggagccuga

SEQ ID NO: 1964557 - RNA, 23 nt, Human
cagcugcuuuugucuaugggacu

SEQ ID NO: 1964558 - RNA, 22 nt, Human
cagcugcuuuugucuaugggac

SEQ ID NO: 1964559 - RNA, 21 nt, Human
cagcucugguccauagagagc

SEQ ID NO: 1964560 - RNA, 18 nt, Human
cagcucugguccauagag

SEQ ID NO: 1964561 - RNA, 17 nt, Human
cagcucugguccauaga

SEQ ID NO: 1964562 - RNA, 16 nt, Human
cagcucugguccauag

SEQ ID NO: 1964563 - RNA, 18 nt, Human
cagcucuggcauggcuag

SEQ ID NO: 1964564 - RNA, 14 nt, Human
cagcucuggcaugg

SEQ ID NO: 1964565 - RNA, 13 nt, Human
cagcucuggucca

SEQ ID NO: 1964566 - RNA, 10 nt, Human
cagcucuggu

SEQ ID NO: 1964567 - RNA, 23 nt, Human
cagcucugguccauagagagcaa

SEQ ID NO: 1964568 - RNA, 22 nt, Human
cagcucugguccauagagagca

SEQ ID NO: 1964569 - RNA, 12 nt, Human
cagcucuguccu

SEQ ID NO: 1964570 - RNA, 13 nt, Human
cagcucuguccug

SEQ ID NO: 1964571 - RNA, 14 nt, Human
cagcucuguccugg

SEQ ID NO: 1964572 - RNA, 16 nt, Human
cagcucuguccuggga

SEQ ID NO: 1964573 - RNA, 17 nt, Human
cagcucuguccugggag

SEQ ID NO: 1964574 - RNA, 18 nt, Human
cagcucuguccugggagu

SEQ ID NO: 1964575 - RNA, 21 nt, Human
cagcucuuauauugccauuuc

SEQ ID NO: 1964576 - RNA, 10 nt, Human
cagcucuuau

SEQ ID NO: 1964577 - RNA, 23 nt, Human
cagcucuguccugggagugagcu

SEQ ID NO: 1964578 - RNA, 13 nt, Human
cagcucuucucca

SEQ ID NO: 1964579 - RNA, 14 nt, Human
cagcucuucuccag

SEQ ID NO: 1964580 - RNA, 15 nt, Human
cagcucuucuccagg

SEQ ID NO: 1964581 - RNA, 16 nt, Human
cagcucuucuccaggc

SEQ ID NO: 1964582 - RNA, 17 nt, Human
cagcucuucuccaggcu

SEQ ID NO: 1964583 - RNA, 18 nt, Human
cagcucuucuccaggcug

SEQ ID NO: 1964584 - RNA, 19 nt, Human
cagcucuucuccaggcugu

SEQ ID NO: 1964585 - RNA, 23 nt, Human
cagcucuucuccaggcuguaucc

SEQ ID NO: 1964586 - RNA, 13 nt, Human
cagcucuuccuag

SEQ ID NO: 1964587 - RNA, 19 nt, Human
cagcucuuccuagcuggag

SEQ ID NO: 1964588 - RNA, 20 nt, Human
cagcucuuccuagcuggaga

SEQ ID NO: 1964589 - RNA, 22 nt, Human
cagcucuuccuagcuggagagg

SEQ ID NO: 1964590 - RNA, 12 nt, Human
cagcucuuccug

SEQ ID NO: 1964591 - RNA, 13 nt, Human
cagcucuuccugg

SEQ ID NO: 1964592 - RNA, 23 nt, Human
cagcucuuccuggacaggccagg

SEQ ID NO: 1964593 - RNA, 12 nt, Human
cagcucuccccu

SEQ ID NO: 1964594 - RNA, 15 nt, Human
cagcucucaugcugc

SEQ ID NO: 1964595 - RNA, 19 nt, Human
cagcucucaugcugccccu

SEQ ID NO: 1964596 - RNA, 23 nt, Human
cagcucucaugcugccccugccu

SEQ ID NO: 1964597 - RNA, 13 nt, Human
cagcuccuuuucc

SEQ ID NO: 1964598 - RNA, 16 nt, Human
cagcuccuuuuccaga

SEQ ID NO: 1964599 - RNA, 20 nt, Human
cagcuccuuuuccagagcau

SEQ ID NO: 1964600 - RNA, 21 nt, Human
cagcuccuuuuccagagcauu

SEQ ID NO: 1964601 - RNA, 22 nt, Human
cagcucgcuggauggcggaagc

SEQ ID NO: 1964602 - RNA, 20 nt, Human
cagcucugcauacucauuag

SEQ ID NO: 1964603 - RNA, 21 nt, Human
cagcucugcaagaauugaagc

SEQ ID NO: 1964604 - RNA, 16 nt, Human
cagcucugcaagaauu

SEQ ID NO: 1964605 - RNA, 15 nt, Human
cagcucugcaagaau

SEQ ID NO: 1964606 - RNA, 15 nt, Human
cagcuccuuccuagc

SEQ ID NO: 1964607 - RNA, 20 nt, Human
cagcuccuuccuagccuugc

SEQ ID NO: 1964608 - RNA, 12 nt, Human
cagcucagugag

SEQ ID NO: 1964609 - RNA, 16 nt, Human
cagcuccuucuguccu

SEQ ID NO: 1964610 - RNA, 17 nt, Human
cagcuccuucuguccua

SEQ ID NO: 1964611 - RNA, 21 nt, Human
cagcuccuucuguccuacucu

SEQ ID NO: 1964612 - RNA, 23 nt, Human
cagcuccuucuguccuacucugu

SEQ ID NO: 1964613 - RNA, 20 nt, Human
cagcucagagagggugggag

SEQ ID NO: 1964614 - RNA, 19 nt, Human
cagcucagagaggguggga

SEQ ID NO: 1964615 - RNA, 17 nt, Human
cagcucagagagggugg

SEQ ID NO: 1964616 - RNA, 13 nt, Human
cagcucagagagg

SEQ ID NO: 1964617 - RNA, 20 nt, Human
cagcucaccucucccuugga

SEQ ID NO: 1964618 - RNA, 19 nt, Human
cagcucaccucucccuugg

SEQ ID NO: 1964619 - RNA, 12 nt, Human
cagcucacugca

SEQ ID NO: 1964620 - RNA, 14 nt, Human
cagcucacugcaac

SEQ ID NO: 1964621 - RNA, 12 nt, Human
cagcucagagag

SEQ ID NO: 1964622 - RNA, 21 nt, Human
cagcucacugcaaccuucgcc

SEQ ID NO: 1964623 - RNA, 13 nt, Human
cagcucagaacca

SEQ ID NO: 1964624 - RNA, 15 nt, Human
cagcucagaaccaca

SEQ ID NO: 1964625 - RNA, 17 nt, Human
cagcucagaaccacagc

SEQ ID NO: 1964626 - RNA, 15 nt, Human
cagcucacugcaacc

SEQ ID NO: 1964627 - RNA, 17 nt, Human
cagcucaccucucccuu

SEQ ID NO: 1964628 - RNA, 16 nt, Human
cagcucaccucucccu

SEQ ID NO: 1964629 - RNA, 15 nt, Human
cagcucaccucuccc

SEQ ID NO: 1964630 - RNA, 13 nt, Human
cagcucaccucuc

SEQ ID NO: 1964631 - RNA, 22 nt, Human
cagcucaccagccccagugccc

SEQ ID NO: 1964632 - RNA, 20 nt, Human
cagcucaccagccccagugc

SEQ ID NO: 1964633 - RNA, 21 nt, Human
cagcucaccagccccagugcc

SEQ ID NO: 1964634 - RNA, 17 nt, Human
cagcuaggaacaaaucu

SEQ ID NO: 1964635 - RNA, 18 nt, Human
cagcuaggaacaaaucuu

SEQ ID NO: 1964636 - RNA, 19 nt, Human
cagcuaggaacaaaucuuc

SEQ ID NO: 1964637 - RNA, 20 nt, Human
cagcuaggaacaaaucuucc

SEQ ID NO: 1964638 - RNA, 21 nt, Human
cagcuaggaacaaaucuuccu

SEQ ID NO: 1964639 - RNA, 14 nt, Human
cagcuaugagagga

SEQ ID NO: 1964640 - RNA, 13 nt, Human
cagcuaugcaaaa

SEQ ID NO: 1964641 - RNA, 13 nt, Human
cagcucaccagcc

SEQ ID NO: 1964642 - RNA, 15 nt, Human
cagcucaccagcccc

SEQ ID NO: 1964643 - RNA, 16 nt, Human
cagcucaccagcccca

SEQ ID NO: 1964644 - RNA, 17 nt, Human
cagcucaccagccccag

SEQ ID NO: 1964645 - RNA, 19 nt, Human
cagcucaccagccccagug

SEQ ID NO: 1964646 - RNA, 18 nt, Human
cagcuaacauggaaguac

SEQ ID NO: 1964647 - RNA, 19 nt, Human
cagcuaacauggaaguacu

SEQ ID NO: 1964648 - RNA, 13 nt, Human
cagcgcacagcug

SEQ ID NO: 1964649 - RNA, 14 nt, Human
cagcgcacagcugc

SEQ ID NO: 1964650 - RNA, 15 nt, Human
cagcgcacagcugcu

SEQ ID NO: 1964651 - RNA, 21 nt, Human
cagcgagcccugguggcagug

SEQ ID NO: 1964652 - RNA, 12 nt, Human
cagcgagggccc

SEQ ID NO: 1964653 - RNA, 13 nt, Human
cagcgagcccugg

SEQ ID NO: 1964654 - RNA, 16 nt, Human
cagcgagcccuggugg

SEQ ID NO: 1964655 - RNA, 17 nt, Human
cagcgagcccugguggc

SEQ ID NO: 1964656 - RNA, 19 nt, Human
cagcgagcccugguggcag

SEQ ID NO: 1964657 - RNA, 20 nt, Human
cagcgagcccugguggcagu

SEQ ID NO: 1964658 - RNA, 21 nt, Human
cagcuaccucaaccaaugcca

SEQ ID NO: 1964659 - RNA, 19 nt, Human
cagcuacuugggaggcuga

SEQ ID NO: 1964660 - RNA, 20 nt, Human
cagcuaacauggaaguacua

SEQ ID NO: 1964661 - RNA, 15 nt, Human
cagcuaaugggacac

SEQ ID NO: 1964662 - RNA, 16 nt, Human
cagcuaaugggacacu

SEQ ID NO: 1964663 - RNA, 19 nt, Human
cagcuaaucagcauucuca

SEQ ID NO: 1964664 - RNA, 14 nt, Human
cagccuggucgccu

SEQ ID NO: 1964665 - RNA, 19 nt, Human
cagccuggucgccuuccac

SEQ ID NO: 1964666 - RNA, 23 nt, Human
cagccuggucgccuuccaccucu

SEQ ID NO: 1964667 - RNA, 19 nt, Human
cagccugggcaaugugaua

SEQ ID NO: 1964668 - RNA, 16 nt, Human
cagccugggcaaugug

SEQ ID NO: 1964669 - RNA, 20 nt, Human
cagccuggcugggacuggga

SEQ ID NO: 1964670 - RNA, 20 nt, Human
cagccugggauaggggcaga

SEQ ID NO: 1964671 - RNA, 21 nt, Human
cagccugggauaggggcagag

SEQ ID NO: 1964672 - RNA, 21 nt, Human
cagccuugaccauucuccacc

SEQ ID NO: 1964673 - RNA, 20 nt, Human
cagccuugaccauucuccac

SEQ ID NO: 1964674 - RNA, 17 nt, Human
cagccuugaccauucuc

SEQ ID NO: 1964675 - RNA, 24 nt, Human
cagccuugaccauucuccaccugc

SEQ ID NO: 1964676 - RNA, 17 nt, Human
cagccuucuuuuucugg

SEQ ID NO: 1964677 - RNA, 18 nt, Human
cagccuucuuuuucugga

SEQ ID NO: 1964678 - RNA, 19 nt, Human
cagccuucuuuuucuggac

SEQ ID NO: 1964679 - RNA, 21 nt, Human
cagccuucuuuuucuggacuc

SEQ ID NO: 1964680 - RNA, 23 nt, Human
cagccuugaccauucuccaccug

SEQ ID NO: 1964681 - RNA, 22 nt, Human
cagccuugaccauucuccaccu

SEQ ID NO: 1964682 - RNA, 16 nt, Human
cagccuccgcuucccu

SEQ ID NO: 1964683 - RNA, 18 nt, Human
cagccuccgcuucccugg

SEQ ID NO: 1964684 - RNA, 20 nt, Human
cagccuccgcuucccugguu

SEQ ID NO: 1964685 - RNA, 21 nt, Human
cagccuccgcuucccugguuc

SEQ ID NO: 1964686 - RNA, 20 nt, Human
cagccugcuccagcuguuca

SEQ ID NO: 1964687 - RNA, 18 nt, Human
cagccucguuggaagagg

SEQ ID NO: 1964688 - RNA, 22 nt, Human
cagccucguuggaagaggaaca

SEQ ID NO: 1964689 - RNA, 23 nt, Human
cagccucguuggaagaggaacag

SEQ ID NO: 1964690 - RNA, 15 nt, Human
cagccuccugaguag

SEQ ID NO: 1964691 - RNA, 21 nt, Human
cagccucgcaggccucccugc

SEQ ID NO: 1964692 - RNA, 22 nt, Human
cagccucgcaggccucccugcc

SEQ ID NO: 1964693 - RNA, 19 nt, Human
cagccucgcaggccucccu

SEQ ID NO: 1964694 - RNA, 23 nt, Human
cagccucccgaauagcugggacu

SEQ ID NO: 1964695 - RNA, 19 nt, Human
cagccucccgaguagcugg

SEQ ID NO: 1964696 - RNA, 20 nt, Human
cagccucccgaguagcuggg

SEQ ID NO: 1964697 - RNA, 21 nt, Human
cagccucccgaguagcuggga

SEQ ID NO: 1964698 - RNA, 22 nt, Human
cagccucccgaguagcugggac

SEQ ID NO: 1964699 - RNA, 23 nt, Human
cagccucccgaguagcugggacu

SEQ ID NO: 1964700 - RNA, 16 nt, Human
cagccucccacagugc

SEQ ID NO: 1964701 - RNA, 19 nt, Human
cagccuggacccuguggau

SEQ ID NO: 1964702 - RNA, 15 nt, Human
cagccuggacccugu

SEQ ID NO: 1964703 - RNA, 19 nt, Human
cagccuggaaaccugucug

SEQ ID NO: 1964704 - RNA, 20 nt, Human
cagccuggaaaccugucuga

SEQ ID NO: 1964705 - RNA, 21 nt, Human
cagccuggcacagggcagugg

SEQ ID NO: 1964706 - RNA, 13 nt, Human
cagccuggcacag

SEQ ID NO: 1964707 - RNA, 20 nt, Human
cagccuggcacagggcagug

SEQ ID NO: 1964708 - RNA, 10 nt, Human
cagccuggca

SEQ ID NO: 1964709 - RNA, 14 nt, Human
cagccuggcuggga

SEQ ID NO: 1964710 - RNA, 16 nt, Human
cagcccgggcucugcc

SEQ ID NO: 1964711 - RNA, 15 nt, Human
cagcccgggcucugc

SEQ ID NO: 1964712 - RNA, 14 nt, Human
cagcccgggcucug

SEQ ID NO: 1964713 - RNA, 13 nt, Human
cagcccgggcucu

SEQ ID NO: 1964714 - RNA, 17 nt, Human
cagcccgauccuccccu

SEQ ID NO: 1964715 - RNA, 19 nt, Human
cagcccgauccuccccugg

SEQ ID NO: 1964716 - RNA, 20 nt, Human
cagcccgauccuccccugga

SEQ ID NO: 1964717 - RNA, 22 nt, Human
cagcccgauccuccccuggacu

SEQ ID NO: 1964718 - RNA, 23 nt, Human
cagcccgauccuccccuggacuc

SEQ ID NO: 1964719 - RNA, 24 nt, Human
cagcccgauccuccccuggacucc

SEQ ID NO: 1964720 - RNA, 14 nt, Human
cagcccgcaucagc

SEQ ID NO: 1964721 - RNA, 21 nt, Human
cagcccgcaucagcugcucag

SEQ ID NO: 1964722 - RNA, 22 nt, Human
cagcccgcaucagcugcucaga

SEQ ID NO: 1964723 - RNA, 21 nt, Human
cagccccuucugacccaugcu

SEQ ID NO: 1964724 - RNA, 19 nt, Human
cagccccuucugacccaug

SEQ ID NO: 1964725 - RNA, 17 nt, Human
cagccccuucugaccca

SEQ ID NO: 1964726 - RNA, 16 nt, Human
cagccccuucugaccc

SEQ ID NO: 1964727 - RNA, 23 nt, Human
cagccccuucugacccaugcugc

SEQ ID NO: 1964728 - RNA, 22 nt, Human
cagccccuucugacccaugcug

SEQ ID NO: 1964729 - RNA, 24 nt, Human
cagccccuucugacccaugcugcc

SEQ ID NO: 1964730 - RNA, 20 nt, Human
cagcccgggcucugccuccc

SEQ ID NO: 1964731 - RNA, 19 nt, Human
cagcccgggcucugccucc

SEQ ID NO: 1964732 - RNA, 18 nt, Human
cagcccgggcucugccuc

SEQ ID NO: 1964733 - RNA, 17 nt, Human
cagcccgggcucugccu

SEQ ID NO: 1964734 - RNA, 22 nt, Human
cagcccgggcucugccucccau

SEQ ID NO: 1964735 - RNA, 21 nt, Human
cagcccgggcucugccuccca

SEQ ID NO: 1964736 - RNA, 23 nt, Human
cagcccuccaucuaaacugcccc

SEQ ID NO: 1964737 - RNA, 13 nt, Human
cagcccucccugc

SEQ ID NO: 1964738 - RNA, 15 nt, Human
cagcccucccugccc

SEQ ID NO: 1964739 - RNA, 18 nt, Human
cagcccucauuggcucuu

SEQ ID NO: 1964740 - RNA, 22 nt, Human
cagcccuccaucuaaacugccc

SEQ ID NO: 1964741 - RNA, 13 nt, Human
cagccccagugcc

SEQ ID NO: 1964742 - RNA, 14 nt, Human
cagccccagugccc

SEQ ID NO: 1964743 - RNA, 15 nt, Human
cagccccagugccca

SEQ ID NO: 1964744 - RNA, 16 nt, Human
cagccccagugcccac

SEQ ID NO: 1964745 - RNA, 21 nt, Human
cagccccaucccaaacccuuc

SEQ ID NO: 1964746 - RNA, 11 nt, Human
cagccccaucc

SEQ ID NO: 1964747 - RNA, 17 nt, Human
cagccccagugcccaca

SEQ ID NO: 1964748 - RNA, 18 nt, Human
cagccccagugcccacag

SEQ ID NO: 1964749 - RNA, 14 nt, Human
cagccccacccugu

SEQ ID NO: 1964750 - RNA, 17 nt, Human
cagccccacccuguuuu

SEQ ID NO: 1964751 - RNA, 21 nt, Human
cagccccuguucuggcagagu

SEQ ID NO: 1964752 - RNA, 20 nt, Human
cagccccuguucuggcagag

SEQ ID NO: 1964753 - RNA, 16 nt, Human
cagccccauucugccu

SEQ ID NO: 1964754 - RNA, 17 nt, Human
cagccccauucugccug

SEQ ID NO: 1964755 - RNA, 23 nt, Human
cagccccuggaugcagccucaca

SEQ ID NO: 1964756 - RNA, 18 nt, Human
cagccccauucugccugc

SEQ ID NO: 1964757 - RNA, 14 nt, Human
cagccccauccucu

SEQ ID NO: 1964758 - RNA, 13 nt, Human
cagccccauccuc

SEQ ID NO: 1964759 - RNA, 12 nt, Human
cagccccauccu

SEQ ID NO: 1964760 - RNA, 22 nt, Human
cagccccaucccaaacccuuca

SEQ ID NO: 1964761 - RNA, 22 nt, Human
cagccccauccucuguacagag

SEQ ID NO: 1964762 - RNA, 16 nt, Human
cagccccauccucugu

SEQ ID NO: 1964763 - RNA, 13 nt, Human
cagccccauucug

SEQ ID NO: 1964764 - RNA, 14 nt, Human
cagccccauucugc

SEQ ID NO: 1964765 - RNA, 19 nt, Human
cagccucccaaagugcugg

SEQ ID NO: 1964766 - RNA, 20 nt, Human
cagccucccaaagugcuggg

SEQ ID NO: 1964767 - RNA, 21 nt, Human
cagccucccaaagugcuggga

SEQ ID NO: 1964768 - RNA, 23 nt, Human
cagccucccaaagugcugggauu

SEQ ID NO: 1964769 - RNA, 15 nt, Human
cagccuccaugcugc

SEQ ID NO: 1964770 - RNA, 17 nt, Human
cagccuccaugcugccu

SEQ ID NO: 1964771 - RNA, 20 nt, Human
cagccuccaugcugccucca

SEQ ID NO: 1964772 - RNA, 14 nt, Human
cagccuccaugcug

SEQ ID NO: 1964773 - RNA, 13 nt, Human
cagccucccacag

SEQ ID NO: 1964774 - RNA, 15 nt, Human
cagccucccacagug

SEQ ID NO: 1964775 - RNA, 20 nt, Human
cagccucccgaauagcuggg

SEQ ID NO: 1964776 - RNA, 21 nt, Human
cagccucccgaauagcuggga

SEQ ID NO: 1964777 - RNA, 22 nt, Human
cagccucccgaauagcugggac

SEQ ID NO: 1964778 - RNA, 20 nt, Human
cagccucacaguccuuacca

SEQ ID NO: 1964779 - RNA, 15 nt, Human
cagccucacaguccu

SEQ ID NO: 1964780 - RNA, 14 nt, Human
cagccucacagucc

SEQ ID NO: 1964781 - RNA, 14 nt, Human
cagccuccaagcuc

SEQ ID NO: 1964782 - RNA, 20 nt, Human
cagccuccaagcuccaucuc

SEQ ID NO: 1964783 - RNA, 19 nt, Human
cagccucaaccuccugggc

SEQ ID NO: 1964784 - RNA, 20 nt, Human
cagccucaaccuccugggcu

SEQ ID NO: 1964785 - RNA, 21 nt, Human
cagccucaaccuccugggcua

SEQ ID NO: 1964786 - RNA, 18 nt, Human
cagccucaaauccaggac

SEQ ID NO: 1964787 - RNA, 19 nt, Human
cagccucaaauccaggacc

SEQ ID NO: 1964788 - RNA, 20 nt, Human
cagccucaaauccaggaccc

SEQ ID NO: 1964789 - RNA, 21 nt, Human
cagccucaaauccaggacccu

SEQ ID NO: 1964790 - RNA, 17 nt, Human
cagccucaaccuccugg

SEQ ID NO: 1964791 - RNA, 18 nt, Human
cagccucaaccuccuggg

SEQ ID NO: 1964792 - RNA, 17 nt, Human
cagccucaaauccagga

SEQ ID NO: 1964793 - RNA, 16 nt, Human
cagcccugcagagggc

SEQ ID NO: 1964794 - RNA, 15 nt, Human
cagcccugcagaggg

SEQ ID NO: 1964795 - RNA, 14 nt, Human
cagcccugcagagg

SEQ ID NO: 1964796 - RNA, 13 nt, Human
cagcccugcagag

SEQ ID NO: 1964797 - RNA, 20 nt, Human
cagcccugcagagggcacag

SEQ ID NO: 1964798 - RNA, 18 nt, Human
cagcccugcagagggcac

SEQ ID NO: 1964799 - RNA, 18 nt, Human
cagcccucggcgcuccgg

SEQ ID NO: 1964800 - RNA, 21 nt, Human
cagcccucggcgcuccgggac

SEQ ID NO: 1964801 - RNA, 18 nt, Human
cagcccugaguuccuagc

SEQ ID NO: 1964802 - RNA, 19 nt, Human
cagcccugaguuccuagcc

SEQ ID NO: 1964803 - RNA, 21 nt, Human
cagcccugaguuccuagccac

SEQ ID NO: 1964804 - RNA, 16 nt, Human
cagcccucccugcccc

SEQ ID NO: 1964805 - RNA, 17 nt, Human
cagcccucccugccccu

SEQ ID NO: 1964806 - RNA, 18 nt, Human
cagcccucccugccccuc

SEQ ID NO: 1964807 - RNA, 22 nt, Human
cagcccucccugccccucccuu

SEQ ID NO: 1964808 - RNA, 21 nt, Human
cagccguguaaccauggaccc

SEQ ID NO: 1964809 - RNA, 14 nt, Human
cagccuaagagacu

SEQ ID NO: 1964810 - RNA, 9 nt, Human
cagccgugc

SEQ ID NO: 1964811 - RNA, 14 nt, Human
cagccgugccuuca

SEQ ID NO: 1964812 - RNA, 16 nt, Human
cagccgugccuucagc

SEQ ID NO: 1964813 - RNA, 18 nt, Human
cagccgugccuucagcuc

SEQ ID NO: 1964814 - RNA, 20 nt, Human
cagccgugccuucagcucua

SEQ ID NO: 1964815 - RNA, 11 nt, Human
cagcccugcuu

SEQ ID NO: 1964816 - RNA, 13 nt, Human
cagcccugcuuug

SEQ ID NO: 1964817 - RNA, 19 nt, Human
cagcccugcuuugggcugc

SEQ ID NO: 1964818 - RNA, 20 nt, Human
cagcccugcuuugggcugcc

SEQ ID NO: 1964819 - RNA, 21 nt, Human
cagcccugcuuugggcugccc

SEQ ID NO: 1964820 - RNA, 22 nt, Human
cagcccugcuuugggcugcccu

SEQ ID NO: 1964821 - RNA, 23 nt, Human
cagcccugcuuugggcugcccug

SEQ ID NO: 1964822 - RNA, 14 nt, Human
cagcucaccagccc

SEQ ID NO: 1964823 - RNA, 18 nt, Human
cagccuccaugcugccuc

SEQ ID NO: 1964824 - RNA, 18 nt, Human
cagcagggagggcuucug

SEQ ID NO: 1964825 - RNA, 14 nt, Human
cagcaggcccaugg

SEQ ID NO: 1964826 - RNA, 22 nt, Human
cagcaggcucucaggccagcug

SEQ ID NO: 1964827 - RNA, 20 nt, Human
cagcaggcucucaggccagc

SEQ ID NO: 1964828 - RNA, 19 nt, Human
cagcaggcucucaggccag

SEQ ID NO: 1964829 - RNA, 18 nt, Human
cagcaggcucucaggcca

SEQ ID NO: 1964830 - RNA, 17 nt, Human
cagcaggcucucaggcc

SEQ ID NO: 1964831 - RNA, 16 nt, Human
cagcaggcucucaggc

SEQ ID NO: 1964832 - RNA, 11 nt, Human
cagcagggcag

SEQ ID NO: 1964833 - RNA, 15 nt, Human
cagcagggcaguagc

SEQ ID NO: 1964834 - RNA, 20 nt, Human
cagcagggagggcuucugcc

SEQ ID NO: 1964835 - RNA, 14 nt, Human
cagcauccuggcac

SEQ ID NO: 1964836 - RNA, 15 nt, Human
cagcauccuggcacc

SEQ ID NO: 1964837 - RNA, 16 nt, Human
cagcauccuggcaccc

SEQ ID NO: 1964838 - RNA, 17 nt, Human
cagcauccuggcacccg

SEQ ID NO: 1964839 - RNA, 18 nt, Human
cagcagccuggacccugu

SEQ ID NO: 1964840 - RNA, 15 nt, Human
cagcagccuggaccc

SEQ ID NO: 1964841 - RNA, 14 nt, Human
cagcagccuggacc

SEQ ID NO: 1964842 - RNA, 12 nt, Human
cagcagccugga

SEQ ID NO: 1964843 - RNA, 22 nt, Human
cagcagccuggacccuguggau

SEQ ID NO: 1964844 - RNA, 19 nt, Human
cagcagccuggacccugug

SEQ ID NO: 1964845 - RNA, 15 nt, Human
cagcaggcucucagg

SEQ ID NO: 1964846 - RNA, 14 nt, Human
cagcaggcucucag

SEQ ID NO: 1964847 - RNA, 12 nt, Human
cagcaggcucuc

SEQ ID NO: 1964848 - RNA, 11 nt, Human
cagcaggccca

SEQ ID NO: 1964849 - RNA, 19 nt, Human
cagcaggcagccuuggcgg

SEQ ID NO: 1964850 - RNA, 11 nt, Human
cagcaggcagc

SEQ ID NO: 1964851 - RNA, 12 nt, Human
cagcaggcagcc

SEQ ID NO: 1964852 - RNA, 13 nt, Human
cagcaggcagccu

SEQ ID NO: 1964853 - RNA, 15 nt, Human
cagcaggcagccuug

SEQ ID NO: 1964854 - RNA, 11 nt, Human
cagcaggaggg

SEQ ID NO: 1964855 - RNA, 23 nt, Human
cagcaggagggacagucucacca

SEQ ID NO: 1964856 - RNA, 12 nt, Human
cagcaggaggga

SEQ ID NO: 1964857 - RNA, 15 nt, Human
cagcaggagggacag

SEQ ID NO: 1964858 - RNA, 19 nt, Human
cagcaggagggacagucuc

SEQ ID NO: 1964859 - RNA, 22 nt, Human
cagcaggagggacagucucacc

SEQ ID NO: 1964860 - RNA, 18 nt, Human
cagccaacuauggccugu

SEQ ID NO: 1964861 - RNA, 23 nt, Human
cagccaaacacacagaaggggac

SEQ ID NO: 1964862 - RNA, 21 nt, Human
cagccaaagccuccuccagcc

SEQ ID NO: 1964863 - RNA, 18 nt, Human
cagccaaagccuccucca

SEQ ID NO: 1964864 - RNA, 22 nt, Human
cagcauuuguguguuacaaugu

SEQ ID NO: 1964865 - RNA, 16 nt, Human
cagcauuuguguguua

SEQ ID NO: 1964866 - RNA, 12 nt, Human
cagcauuucaag

SEQ ID NO: 1964867 - RNA, 16 nt, Human
cagccaaacacacaga

SEQ ID NO: 1964868 - RNA, 18 nt, Human
cagccaaacacacagaag

SEQ ID NO: 1964869 - RNA, 19 nt, Human
cagccaaacacacagaagg

SEQ ID NO: 1964870 - RNA, 16 nt, Human
cagccaaagccuccuc

SEQ ID NO: 1964871 - RNA, 15 nt, Human
cagccaaagccuccu

SEQ ID NO: 1964872 - RNA, 15 nt, Human
cagcauucucacucc

SEQ ID NO: 1964873 - RNA, 14 nt, Human
cagcauucucacuc

SEQ ID NO: 1964874 - RNA, 18 nt, Human
cagcauuaccucuuugga

SEQ ID NO: 1964875 - RNA, 19 nt, Human
cagcauuaccucuuuggaa

SEQ ID NO: 1964876 - RNA, 16 nt, Human
cagcauuagugggaaa

SEQ ID NO: 1964877 - RNA, 14 nt, Human
cagcaucuggaaga

SEQ ID NO: 1964878 - RNA, 24 nt, Human
cagcaucuggaagagcuaggcagg

SEQ ID NO: 1964879 - RNA, 18 nt, Human
cagcaucgcacucuggca

SEQ ID NO: 1964880 - RNA, 19 nt, Human
cagcaucgcacucuggcag

SEQ ID NO: 1964881 - RNA, 21 nt, Human
cagcaucgcacucuggcagca

SEQ ID NO: 1964882 - RNA, 21 nt, Human
cagcauccuggcacccggccc

SEQ ID NO: 1964883 - RNA, 19 nt, Human
cagcauccuggcacccggc

SEQ ID NO: 1964884 - RNA, 20 nt, Human
cagcauccuggcacccggcc

SEQ ID NO: 1964885 - RNA, 20 nt, Human
cagccauaggcccuuucagu

SEQ ID NO: 1964886 - RNA, 21 nt, Human
cagccauaggcccuuucagug

SEQ ID NO: 1964887 - RNA, 18 nt, Human
cagccauaggcccuuuca

SEQ ID NO: 1964888 - RNA, 13 nt, Human
cagccaguaaaug

SEQ ID NO: 1964889 - RNA, 22 nt, Human
cagccaguaaaugggggugcau

SEQ ID NO: 1964890 - RNA, 23 nt, Human
cagccacggccaggccagaggga

SEQ ID NO: 1964891 - RNA, 14 nt, Human
cagccacucagaaa

SEQ ID NO: 1964892 - RNA, 14 nt, Human
cagccacuccccag

SEQ ID NO: 1964893 - RNA, 16 nt, Human
cagccacuccccagcc

SEQ ID NO: 1964894 - RNA, 17 nt, Human
cagccacuccccagcca

SEQ ID NO: 1964895 - RNA, 20 nt, Human
cagccacuccccagccagcc

SEQ ID NO: 1964896 - RNA, 16 nt, Human
cagccacuuaggacaa

SEQ ID NO: 1964897 - RNA, 12 nt, Human
cagccagaacuc

SEQ ID NO: 1964898 - RNA, 16 nt, Human
cagccagaacucugug

SEQ ID NO: 1964899 - RNA, 18 nt, Human
cagccagaacucuguguc

SEQ ID NO: 1964900 - RNA, 14 nt, Human
cagccacggccagg

SEQ ID NO: 1964901 - RNA, 15 nt, Human
cagccacggccaggc

SEQ ID NO: 1964902 - RNA, 16 nt, Human
cagccacggccaggcc

SEQ ID NO: 1964903 - RNA, 17 nt, Human
cagccacggccaggcca

SEQ ID NO: 1964904 - RNA, 18 nt, Human
cagccacggccaggccag

SEQ ID NO: 1964905 - RNA, 19 nt, Human
cagccacggccaggccaga

SEQ ID NO: 1964906 - RNA, 21 nt, Human
cagccacggccaggccagagg

SEQ ID NO: 1964907 - RNA, 22 nt, Human
cagccacggccaggccagaggg

SEQ ID NO: 1964908 - RNA, 14 nt, Human
cagccacauuccug

SEQ ID NO: 1964909 - RNA, 15 nt, Human
cagccaauauuuaaa

SEQ ID NO: 1964910 - RNA, 17 nt, Human
cagccacauuccugaug

SEQ ID NO: 1964911 - RNA, 15 nt, Human
cagccacauuccuga

SEQ ID NO: 1964912 - RNA, 19 nt, Human
cagccacauuccugaugcu

SEQ ID NO: 1964913 - RNA, 21 nt, Human
cagccaccgaagccgccugug

SEQ ID NO: 1964914 - RNA, 16 nt, Human
cagcccaaaccaccag

SEQ ID NO: 1964915 - RNA, 19 nt, Human
cagcccaaaccaccagaag

SEQ ID NO: 1964916 - RNA, 20 nt, Human
cagcccaaaccaccagaagc

SEQ ID NO: 1964917 - RNA, 21 nt, Human
cagcccaaaccaccagaagcc

SEQ ID NO: 1964918 - RNA, 23 nt, Human
cagcccaaaccaccagaagccca

SEQ ID NO: 1964919 - RNA, 14 nt, Human
cagccaucaacuaa

SEQ ID NO: 1964920 - RNA, 15 nt, Human
cagcccaccccucaa

SEQ ID NO: 1964921 - RNA, 17 nt, Human
cagcccaccccauggcc

SEQ ID NO: 1964922 - RNA, 19 nt, Human
cagcccacauagugauggu

SEQ ID NO: 1964923 - RNA, 11 nt, Human
cagcccacccc

SEQ ID NO: 1964924 - RNA, 16 nt, Human
cagcccaaucccugau

SEQ ID NO: 1964925 - RNA, 17 nt, Human
cagcccaaucccugauc

SEQ ID NO: 1964926 - RNA, 23 nt, Human
cagccagaagccacccaaagcag

SEQ ID NO: 1964927 - RNA, 16 nt, Human
cagcccaccuggcuuu

SEQ ID NO: 1964928 - RNA, 15 nt, Human
cagcccacuucugcc

SEQ ID NO: 1964929 - RNA, 13 nt, Human
cagcccacgcuga

SEQ ID NO: 1964930 - RNA, 15 nt, Human
cagcccacgcugacu

SEQ ID NO: 1964931 - RNA, 22 nt, Human
cagcccacgcugacuacagggc

SEQ ID NO: 1964932 - RNA, 21 nt, Human
cagccccaaaacucuccucug

SEQ ID NO: 1964933 - RNA, 20 nt, Human
cagccccaaaacucuccucu

SEQ ID NO: 1964934 - RNA, 22 nt, Human
cagccccaaaacucuccucugc

SEQ ID NO: 1964935 - RNA, 22 nt, Human
cagccccaaauugucaccugcu

SEQ ID NO: 1964936 - RNA, 17 nt, Human
cagcccauuugggcaga

SEQ ID NO: 1964937 - RNA, 22 nt, Human
cagcccauuugggcagagaggc

SEQ ID NO: 1964938 - RNA, 17 nt, Human
cagcccagaagugcaga

SEQ ID NO: 1964939 - RNA, 18 nt, Human
cagcccacuucugccaua

SEQ ID NO: 1964940 - RNA, 20 nt, Human
cagcccagaagugcagaacu

SEQ ID NO: 1964941 - RNA, 22 nt, Human
cagcccagaggccgagagcuau

SEQ ID NO: 1964942 - RNA, 23 nt, Human
cagcccagcuuggcccuuuccuu

SEQ ID NO: 1964943 - RNA, 18 nt, Human
cagaugggugcuuggagg

SEQ ID NO: 1964944 - RNA, 12 nt, Human
cagaugccuggg

SEQ ID NO: 1964945 - RNA, 15 nt, Human
cagaugcugugcaaa

SEQ ID NO: 1964946 - RNA, 12 nt, Human
cagaugcucuga

SEQ ID NO: 1964947 - RNA, 13 nt, Human
cagaugcucugag

SEQ ID NO: 1964948 - RNA, 14 nt, Human
cagaugcucugaga

SEQ ID NO: 1964949 - RNA, 17 nt, Human
cagauguuuaaaacacc

SEQ ID NO: 1964950 - RNA, 21 nt, Human
cagauucguggucuuuuccuc

SEQ ID NO: 1964951 - RNA, 20 nt, Human
cagauucuaggaccuguguc

SEQ ID NO: 1964952 - RNA, 19 nt, Human
cagauucguggucuuuucc

SEQ ID NO: 1964953 - RNA, 13 nt, Human
cagauucaggcau

SEQ ID NO: 1964954 - RNA, 14 nt, Human
cagauucaggcauu

SEQ ID NO: 1964955 - RNA, 15 nt, Human
cagauucaggcauuu

SEQ ID NO: 1964956 - RNA, 15 nt, Human
cagauguuuaaaaca

SEQ ID NO: 1964957 - RNA, 16 nt, Human
cagauguuuaaaacac

SEQ ID NO: 1964958 - RNA, 22 nt, Human
cagaugugggccaccauugcaa

SEQ ID NO: 1964959 - RNA, 23 nt, Human
cagaugugggccaccauugcaac

SEQ ID NO: 1964960 - RNA, 14 nt, Human
cagauguuuaaaac

SEQ ID NO: 1964961 - RNA, 23 nt, Human
cagaugggugcuuggaggaagga

SEQ ID NO: 1964962 - RNA, 19 nt, Human
cagauguccuaauggugau

SEQ ID NO: 1964963 - RNA, 22 nt, Human
cagauguccuaauggugaugca

SEQ ID NO: 1964964 - RNA, 16 nt, Human
cagcaacgaucacaaa

SEQ ID NO: 1964965 - RNA, 18 nt, Human
cagcaacgaucacaaaug

SEQ ID NO: 1964966 - RNA, 19 nt, Human
cagcaacgaucacaaauga

SEQ ID NO: 1964967 - RNA, 20 nt, Human
cagcaacgaucacaaaugac

SEQ ID NO: 1964968 - RNA, 21 nt, Human
cagcaacgaucacaaaugacu

SEQ ID NO: 1964969 - RNA, 22 nt, Human
cagcaacgaucacaaaugacuu

SEQ ID NO: 1964970 - RNA, 23 nt, Human
cagcaacgaucacaaaugacuuu

SEQ ID NO: 1964971 - RNA, 18 nt, Human
cagcaaaagaugcuucuc

SEQ ID NO: 1964972 - RNA, 21 nt, Human
cagcaaaccuaauugcacaac

SEQ ID NO: 1964973 - RNA, 12 nt, Human
cagauuuuaguu

SEQ ID NO: 1964974 - RNA, 13 nt, Human
cagauuuuaguuu

SEQ ID NO: 1964975 - RNA, 15 nt, Human
cagauuuuaguuuua

SEQ ID NO: 1964976 - RNA, 17 nt, Human
cagauuuuaguuuuauu

SEQ ID NO: 1964977 - RNA, 22 nt, Human
cagauuuuaguuuuauuuucua

SEQ ID NO: 1964978 - RNA, 14 nt, Human
cagauucuuuccug

SEQ ID NO: 1964979 - RNA, 22 nt, Human
cagauuuuuuacagcugccugc

SEQ ID NO: 1964980 - RNA, 17 nt, Human
cagauuuuggccaugaa

SEQ ID NO: 1964981 - RNA, 19 nt, Human
cagauuuuuuacagcugcc

SEQ ID NO: 1964982 - RNA, 19 nt, Human
cagcacuuucuucuuccca

SEQ ID NO: 1964983 - RNA, 15 nt, Human
cagcagaaaugccuu

SEQ ID NO: 1964984 - RNA, 17 nt, Human
cagcagaaaugccuuac

SEQ ID NO: 1964985 - RNA, 23 nt, Human
cagcagaauugaccgacagcuuu

SEQ ID NO: 1964986 - RNA, 19 nt, Human
cagcagaaaugccuuaccc

SEQ ID NO: 1964987 - RNA, 22 nt, Human
cagcagaaaugccuuacccuca

SEQ ID NO: 1964988 - RNA, 13 nt, Human
cagcagagcaccu

SEQ ID NO: 1964989 - RNA, 11 nt, Human
cagcagagcac

SEQ ID NO: 1964990 - RNA, 13 nt, Human
cagcagccccugc

SEQ ID NO: 1964991 - RNA, 16 nt, Human
cagcagccccugcaca

SEQ ID NO: 1964992 - RNA, 23 nt, Human
cagcagccccugcacaaagcccu

SEQ ID NO: 1964993 - RNA, 12 nt, Human
cagcagccagcc

SEQ ID NO: 1964994 - RNA, 13 nt, Human
cagcagccagcca

SEQ ID NO: 1964995 - RNA, 14 nt, Human
cagcagccagccaa

SEQ ID NO: 1964996 - RNA, 16 nt, Human
cagcagccagccaaac

SEQ ID NO: 1964997 - RNA, 23 nt, Human
cagcagccagccaaacacacaga

SEQ ID NO: 1964998 - RNA, 18 nt, Human
cagcacaaccuucaagcu

SEQ ID NO: 1964999 - RNA, 21 nt, Human
cagcacaaccuucaagcugcu

SEQ ID NO: 1965000 - RNA, 15 nt, Human
cagcaauucuccugc

SEQ ID NO: 1965001 - RNA, 16 nt, Human
cagcaauucuccugcc

SEQ ID NO: 1965002 - RNA, 17 nt, Human
cagcaauucuccugccu

SEQ ID NO: 1965003 - RNA, 18 nt, Human
cagcaauucuccugccuc

SEQ ID NO: 1965004 - RNA, 19 nt, Human
cagcaauucuccugccuca

SEQ ID NO: 1965005 - RNA, 20 nt, Human
cagcaauucuccugccucag

SEQ ID NO: 1965006 - RNA, 22 nt, Human
cagcaauaaagcagcguuucua

SEQ ID NO: 1965007 - RNA, 20 nt, Human
cagcaaguuagagaaucugg

SEQ ID NO: 1965008 - RNA, 15 nt, Human
cagcaagugugaaua

SEQ ID NO: 1965009 - RNA, 13 nt, Human
cagcaauaaagca

SEQ ID NO: 1965010 - RNA, 21 nt, Human
cagcaauaaagcagcguuucu

SEQ ID NO: 1965011 - RNA, 19 nt, Human
cagcaagugagagcugggu

SEQ ID NO: 1965012 - RNA, 21 nt, Human
cagcaagugagagcugggugu

SEQ ID NO: 1965013 - RNA, 18 nt, Human
cagcaaggagauuuacaa

SEQ ID NO: 1965014 - RNA, 17 nt, Human
cagcaaggagauuuaca

SEQ ID NO: 1965015 - RNA, 20 nt, Human
cagcaagccgaauagcugau

SEQ ID NO: 1965016 - RNA, 18 nt, Human
cagcaaggcgcuaacuug

SEQ ID NO: 1965017 - RNA, 19 nt, Human
cagcaaggcgcuaacuugc

SEQ ID NO: 1965018 - RNA, 20 nt, Human
cagcaaggcgcuaacuugcu

SEQ ID NO: 1965019 - RNA, 21 nt, Human
cagcaaggccaccucuuccug

SEQ ID NO: 1965020 - RNA, 23 nt, Human
cagcaaggccaccucuuccuggc

SEQ ID NO: 1965021 - RNA, 13 nt, Human
cagcaaggccacc

SEQ ID NO: 1965022 - RNA, 14 nt, Human
cagcaaggccaccu

SEQ ID NO: 1965023 - RNA, 15 nt, Human
cagcaaggccaccuc

SEQ ID NO: 1965024 - RNA, 16 nt, Human
cagcaaggccaccucu

SEQ ID NO: 1965025 - RNA, 17 nt, Human
cagcaaggccaccucuu

SEQ ID NO: 1965026 - RNA, 19 nt, Human
cagcaaggccaccucuucc

SEQ ID NO: 1965027 - RNA, 20 nt, Human
cagcaaggccaccucuuccu

SEQ ID NO: 1965028 - RNA, 14 nt, Human
cagcaagugagagc

SEQ ID NO: 1965029 - RNA, 15 nt, Human
cagcaagugagagcu

SEQ ID NO: 1965030 - RNA, 16 nt, Human
cagcaagugagagcug

SEQ ID NO: 1965031 - RNA, 17 nt, Human
cagcaagugagagcugg

SEQ ID NO: 1965032 - RNA, 12 nt, Human
cagcaagugaga

SEQ ID NO: 1965033 - RNA, 15 nt, Human
cagcaaggucuugcu

SEQ ID NO: 1965034 - RNA, 16 nt, Human
cagcaaggucuugcuc

SEQ ID NO: 1965035 - RNA, 18 nt, Human
cagcaaggucuugcucuc

SEQ ID NO: 1965036 - RNA, 16 nt, Human
cagacaacaaaccugu

SEQ ID NO: 1965037 - RNA, 15 nt, Human
cagaauucucuaguu

SEQ ID NO: 1965038 - RNA, 18 nt, Human
cagaauucucuaguuuga

SEQ ID NO: 1965039 - RNA, 11 nt, Human
cagaauucuca

SEQ ID NO: 1965040 - RNA, 13 nt, Human
cagaauuggaaaa

SEQ ID NO: 1965041 - RNA, 14 nt, Human
cagaauuggaaaag

SEQ ID NO: 1965042 - RNA, 17 nt, Human
cagaauuggaaaagacu

SEQ ID NO: 1965043 - RNA, 14 nt, Human
cagaauuucccaaa

SEQ ID NO: 1965044 - RNA, 13 nt, Human
cagaauggcauuu

SEQ ID NO: 1965045 - RNA, 14 nt, Human
cagaaugaggcugc

SEQ ID NO: 1965046 - RNA, 15 nt, Human
cagaaugaggcugcu

SEQ ID NO: 1965047 - RNA, 15 nt, Human
cagaaucucgcucug

SEQ ID NO: 1965048 - RNA, 16 nt, Human
cagaaucucugaauuu

SEQ ID NO: 1965049 - RNA, 12 nt, Human
cagaaucuguau

SEQ ID NO: 1965050 - RNA, 16 nt, Human
cagaaucuguaugauu

SEQ ID NO: 1965051 - RNA, 18 nt, Human
cagaaucuguaugauucu

SEQ ID NO: 1965052 - RNA, 20 nt, Human
cagaauuucccaaagcagug

SEQ ID NO: 1965053 - RNA, 19 nt, Human
cagaauuucccaaagcagu

SEQ ID NO: 1965054 - RNA, 18 nt, Human
cagaauuucccaaagcag

SEQ ID NO: 1965055 - RNA, 17 nt, Human
cagaauuucccaaagca

SEQ ID NO: 1965056 - RNA, 12 nt, Human
cagacaaagcgu

SEQ ID NO: 1965057 - RNA, 24 nt, Human
cagaauuucccaaagcagugcaug

SEQ ID NO: 1965058 - RNA, 20 nt, Human
cagacaacaaaccuguuucu

SEQ ID NO: 1965059 - RNA, 22 nt, Human
cagacaaagcgugguggacaug

SEQ ID NO: 1965060 - RNA, 15 nt, Human
cagacaagcuguuga

SEQ ID NO: 1965061 - RNA, 19 nt, Human
cagacaagcuguugaccag

SEQ ID NO: 1965062 - RNA, 14 nt, Human
cagacaaucuucug

SEQ ID NO: 1965063 - RNA, 15 nt, Human
cagacaaucuucugu

SEQ ID NO: 1965064 - RNA, 23 nt, Human
cagacacauguccaagaagccca

SEQ ID NO: 1965065 - RNA, 22 nt, Human
cagacacauguccaagaagccc

SEQ ID NO: 1965066 - RNA, 21 nt, Human
cagacacauguccaagaagcc

SEQ ID NO: 1965067 - RNA, 17 nt, Human
cagacacauguccaaga

SEQ ID NO: 1965068 - RNA, 14 nt, Human
cagacacaugucca

SEQ ID NO: 1965069 - RNA, 13 nt, Human
cagacacaggccc

SEQ ID NO: 1965070 - RNA, 14 nt, Human
cagacacaggcccg

SEQ ID NO: 1965071 - RNA, 15 nt, Human
cagacacaggcccgg

SEQ ID NO: 1965072 - RNA, 17 nt, Human
cagacacaggcccggcu

SEQ ID NO: 1965073 - RNA, 18 nt, Human
cagacacaggcccggcuc

SEQ ID NO: 1965074 - RNA, 21 nt, Human
cagacacaggcccggcuccag

SEQ ID NO: 1965075 - RNA, 22 nt, Human
cagacacaggcccggcuccagg

SEQ ID NO: 1965076 - RNA, 23 nt, Human
cagacacaggcccggcuccaggc

SEQ ID NO: 1965077 - RNA, 22 nt, Human
cagacaugguggggucuccuca

SEQ ID NO: 1965078 - RNA, 23 nt, Human
cagacaugguggggucuccucag

SEQ ID NO: 1965079 - RNA, 17 nt, Human
cagacaugguggggucu

SEQ ID NO: 1965080 - RNA, 17 nt, Human
cagacauagaauuaaca

SEQ ID NO: 1965081 - RNA, 19 nt, Human
cagacauagaauuaacaca

SEQ ID NO: 1965082 - RNA, 19 nt, Human
cagacauacuaaccagcag

SEQ ID NO: 1965083 - RNA, 20 nt, Human
cagacaguuaagagaaauga

SEQ ID NO: 1965084 - RNA, 15 nt, Human
cagacacccuuggag

SEQ ID NO: 1965085 - RNA, 19 nt, Human
cagacaccuugacagggca

SEQ ID NO: 1965086 - RNA, 20 nt, Human
cagacaccuugacagggcac

SEQ ID NO: 1965087 - RNA, 22 nt, Human
cagacaccuugacagggcacac

SEQ ID NO: 1965088 - RNA, 23 nt, Human
cagacucaaaugcucagaccagc

SEQ ID NO: 1965089 - RNA, 22 nt, Human
cagacucaaaugcucagaccag

SEQ ID NO: 1965090 - RNA, 19 nt, Human
cagacgcucauucagcauc

SEQ ID NO: 1965091 - RNA, 20 nt, Human
cagacgcucauucagcaucu

SEQ ID NO: 1965092 - RNA, 21 nt, Human
cagacgcucauucagcaucug

SEQ ID NO: 1965093 - RNA, 22 nt, Human
cagacgcucauucagcaucuga

SEQ ID NO: 1965094 - RNA, 17 nt, Human
cagacuuuuaaagacuu

SEQ ID NO: 1965095 - RNA, 17 nt, Human
cagacuuguauauucua

SEQ ID NO: 1965096 - RNA, 23 nt, Human
cagacuuguauauucuauuuuac

SEQ ID NO: 1965097 - RNA, 15 nt, Human
cagacuuguauauuc

SEQ ID NO: 1965098 - RNA, 16 nt, Human
cagacuuguauauucu

SEQ ID NO: 1965099 - RNA, 19 nt, Human
cagagaaaguacuucucca

SEQ ID NO: 1965100 - RNA, 23 nt, Human
cagagaaaguacuucuccacccu

SEQ ID NO: 1965101 - RNA, 20 nt, Human
cagacuuuuuuuaaauagua

SEQ ID NO: 1965102 - RNA, 19 nt, Human
cagacuuuuaaagacuugc

SEQ ID NO: 1965103 - RNA, 21 nt, Human
cagacuuuuuuaaacaucaaa

SEQ ID NO: 1965104 - RNA, 14 nt, Human
cagacccugcccug

SEQ ID NO: 1965105 - RNA, 13 nt, Human
cagacccugcccu

SEQ ID NO: 1965106 - RNA, 12 nt, Human
cagacccugccc

SEQ ID NO: 1965107 - RNA, 16 nt, Human
cagacccggcugcgug

SEQ ID NO: 1965108 - RNA, 12 nt, Human
cagacccggcug

SEQ ID NO: 1965109 - RNA, 14 nt, Human
cagacccggcugcg

SEQ ID NO: 1965110 - RNA, 23 nt, Human
cagaccccuggcuuuucacugcu

SEQ ID NO: 1965111 - RNA, 21 nt, Human
cagaccccuggcuuuucacug

SEQ ID NO: 1965112 - RNA, 22 nt, Human
cagaccccuggcuuuucacugc

SEQ ID NO: 1965113 - RNA, 21 nt, Human
cagacccugcccugugggccc

SEQ ID NO: 1965114 - RNA, 17 nt, Human
cagacccugcccugugg

SEQ ID NO: 1965115 - RNA, 16 nt, Human
cagacccugcccugug

SEQ ID NO: 1965116 - RNA, 15 nt, Human
cagacccugcccugu

SEQ ID NO: 1965117 - RNA, 22 nt, Human
cagacccugcccugugggcccc

SEQ ID NO: 1965118 - RNA, 14 nt, Human
cagacccuggagga

SEQ ID NO: 1965119 - RNA, 21 nt, Human
cagaccgaacuguuguauaaa

SEQ ID NO: 1965120 - RNA, 20 nt, Human
cagaccgcgggcacugccgc

SEQ ID NO: 1965121 - RNA, 15 nt, Human
cagacccccuggaga

SEQ ID NO: 1965122 - RNA, 13 nt, Human
cagaccccuggcu

SEQ ID NO: 1965123 - RNA, 14 nt, Human
cagaccccuggcuu

SEQ ID NO: 1965124 - RNA, 15 nt, Human
cagaccccuggcuuu

SEQ ID NO: 1965125 - RNA, 16 nt, Human
cagaccccuggcuuuu

SEQ ID NO: 1965126 - RNA, 18 nt, Human
cagaccccuggcuuuuca

SEQ ID NO: 1965127 - RNA, 20 nt, Human
cagaccacaaaacuuuucua

SEQ ID NO: 1965128 - RNA, 14 nt, Human
cagaccacaaaacu

SEQ ID NO: 1965129 - RNA, 13 nt, Human
cagaccagcucuu

SEQ ID NO: 1965130 - RNA, 11 nt, Human
cagaagcccag

SEQ ID NO: 1965131 - RNA, 19 nt, Human
cagaagccacccaaagcag

SEQ ID NO: 1965132 - RNA, 18 nt, Human
cagaagccacccaaagca

SEQ ID NO: 1965133 - RNA, 12 nt, Human
cagaagcccaga

SEQ ID NO: 1965134 - RNA, 14 nt, Human
cagaagcccagaau

SEQ ID NO: 1965135 - RNA, 23 nt, Human
cagaagcccugauguguccucag

SEQ ID NO: 1965136 - RNA, 19 nt, Human
cagaagcaacccaaauguu

SEQ ID NO: 1965137 - RNA, 20 nt, Human
cagaagcaacccaaauguuc

SEQ ID NO: 1965138 - RNA, 20 nt, Human
cagaagauagcuucacccca

SEQ ID NO: 1965139 - RNA, 21 nt, Human
cagaagacacugaugggcaac

SEQ ID NO: 1965140 - RNA, 18 nt, Human
cagaacucggugucccca

SEQ ID NO: 1965141 - RNA, 19 nt, Human
cagaacucgguguccccac

SEQ ID NO: 1965142 - RNA, 21 nt, Human
cagaacucgguguccccacca

SEQ ID NO: 1965143 - RNA, 22 nt, Human
cagaacucgguguccccaccau

SEQ ID NO: 1965144 - RNA, 13 nt, Human
cagaacucuuccu

SEQ ID NO: 1965145 - RNA, 14 nt, Human
cagaacucuuccuc

SEQ ID NO: 1965146 - RNA, 15 nt, Human
cagaacucuuccucc

SEQ ID NO: 1965147 - RNA, 16 nt, Human
cagaacucuuccucca

SEQ ID NO: 1965148 - RNA, 15 nt, Human
cagaacucugccugc

SEQ ID NO: 1965149 - RNA, 16 nt, Human
cagaacucugccugcc

SEQ ID NO: 1965150 - RNA, 17 nt, Human
cagaacucugccugccc

SEQ ID NO: 1965151 - RNA, 18 nt, Human
cagaacucugccugcccu

SEQ ID NO: 1965152 - RNA, 22 nt, Human
cagaacucugccugcccuuugu

SEQ ID NO: 1965153 - RNA, 13 nt, Human
cagaacucugugu

SEQ ID NO: 1965154 - RNA, 14 nt, Human
cagaacucuguguc

SEQ ID NO: 1965155 - RNA, 18 nt, Human
cagaacuuagcaauuucc

SEQ ID NO: 1965156 - RNA, 19 nt, Human
cagaacugcagucacugca

SEQ ID NO: 1965157 - RNA, 18 nt, Human
cagaacuugaagccugcu

SEQ ID NO: 1965158 - RNA, 19 nt, Human
cagaacuugaagccugcuc

SEQ ID NO: 1965159 - RNA, 20 nt, Human
cagaacuugaagccugcucc

SEQ ID NO: 1965160 - RNA, 21 nt, Human
cagaacuugaagccugcuccu

SEQ ID NO: 1965161 - RNA, 22 nt, Human
cagaacuugaagccugcuccuu

SEQ ID NO: 1965162 - RNA, 22 nt, Human
cagaacucuuccuccaaggaca

SEQ ID NO: 1965163 - RNA, 23 nt, Human
cagaaccccuggcuccaggccag

SEQ ID NO: 1965164 - RNA, 22 nt, Human
cagaacccuuggagccaaugga

SEQ ID NO: 1965165 - RNA, 16 nt, Human
cagaaccagucuuuca

SEQ ID NO: 1965166 - RNA, 17 nt, Human
cagaaccagucuuucaa

SEQ ID NO: 1965167 - RNA, 18 nt, Human
cagaaggaagacuucauc

SEQ ID NO: 1965168 - RNA, 17 nt, Human
cagaaggaagacuucau

SEQ ID NO: 1965169 - RNA, 16 nt, Human
cagaaggaagacuuca

SEQ ID NO: 1965170 - RNA, 19 nt, Human
cagaaggaagacuucaucc

SEQ ID NO: 1965171 - RNA, 12 nt, Human
cagaaggcuccu

SEQ ID NO: 1965172 - RNA, 14 nt, Human
cagaaggcuccugc

SEQ ID NO: 1965173 - RNA, 15 nt, Human
cagaaggcuccugcc

SEQ ID NO: 1965174 - RNA, 16 nt, Human
cagaaggcuccugccc

SEQ ID NO: 1965175 - RNA, 18 nt, Human
cagaaucucaaauaacua

SEQ ID NO: 1965176 - RNA, 17 nt, Human
cagaaucucaaauaacu

SEQ ID NO: 1965177 - RNA, 16 nt, Human
cagaaguagcuuugca

SEQ ID NO: 1965178 - RNA, 13 nt, Human
cagaaguagggga

SEQ ID NO: 1965179 - RNA, 18 nt, Human
cagaaguaggggaagaau

SEQ ID NO: 1965180 - RNA, 22 nt, Human
cagaaguaggggaagaauaauu

SEQ ID NO: 1965181 - RNA, 23 nt, Human
cagaaguaggggaagaauaauuu

SEQ ID NO: 1965182 - RNA, 23 nt, Human
cagaaggggacugccaccucccc

SEQ ID NO: 1965183 - RNA, 19 nt, Human
cagaaggggacugccaccu

SEQ ID NO: 1965184 - RNA, 20 nt, Human
cagaaggggacugccaccuc

SEQ ID NO: 1965185 - RNA, 21 nt, Human
cagaaggggacugccaccucc

SEQ ID NO: 1965186 - RNA, 22 nt, Human
cagaaggggacugccaccuccc

SEQ ID NO: 1965187 - RNA, 15 nt, Human
cagaaggucuguuuu

SEQ ID NO: 1965188 - RNA, 17 nt, Human
cagaaggcuccugcccc

SEQ ID NO: 1965189 - RNA, 19 nt, Human
cagaaggcuccugccccca

SEQ ID NO: 1965190 - RNA, 19 nt, Human
cagaagggagcuggcucca

SEQ ID NO: 1965191 - RNA, 20 nt, Human
cagaagggagcuggcuccag

SEQ ID NO: 1965192 - RNA, 21 nt, Human
cagaagggagcuggcuccagc

SEQ ID NO: 1965193 - RNA, 15 nt, Human
cagaaggggacugcc

SEQ ID NO: 1965194 - RNA, 16 nt, Human
cagaaggggacugcca

SEQ ID NO: 1965195 - RNA, 17 nt, Human
cagaaggggacugccac

SEQ ID NO: 1965196 - RNA, 23 nt, Human
cacuuuguucuggcucuuccagg

SEQ ID NO: 1965197 - RNA, 16 nt, Human
cacuuuguucuggcuc

SEQ ID NO: 1965198 - RNA, 14 nt, Human
cacuuuguucuggc

SEQ ID NO: 1965199 - RNA, 13 nt, Human
cacuuuguucugg

SEQ ID NO: 1965200 - RNA, 13 nt, Human
cacuuugggaggc

SEQ ID NO: 1965201 - RNA, 12 nt, Human
cacuuugggagg

SEQ ID NO: 1965202 - RNA, 16 nt, Human
cacuuugggaggccaa

SEQ ID NO: 1965203 - RNA, 22 nt, Human
cacuuucuagccagaggagaga

SEQ ID NO: 1965204 - RNA, 22 nt, Human
cacuuggguccaggccuacucc

SEQ ID NO: 1965205 - RNA, 12 nt, Human
cacuuugcauaa

SEQ ID NO: 1965206 - RNA, 11 nt, Human
cagaaaaaagg

SEQ ID NO: 1965207 - RNA, 12 nt, Human
cagaaaaaaggu

SEQ ID NO: 1965208 - RNA, 22 nt, Human
cagaaaaaagguucuuugugua

SEQ ID NO: 1965209 - RNA, 20 nt, Human
cacuuuuucuuuacaaacaa

SEQ ID NO: 1965210 - RNA, 21 nt, Human
cacuuuuucuuuacaaacaaa

SEQ ID NO: 1965211 - RNA, 18 nt, Human
cacuuuuauuuagcacca

SEQ ID NO: 1965212 - RNA, 11 nt, Human
cacuuuuccag

SEQ ID NO: 1965213 - RNA, 17 nt, Human
cacuuuuccaguauuuu

SEQ ID NO: 1965214 - RNA, 15 nt, Human
cacuuuuccaguauu

SEQ ID NO: 1965215 - RNA, 16 nt, Human
cacuuuuccaguauuu

SEQ ID NO: 1965216 - RNA, 22 nt, Human
cacuuuuguucuugguuuguaa

SEQ ID NO: 1965217 - RNA, 12 nt, Human
cacuuuugccag

SEQ ID NO: 1965218 - RNA, 17 nt, Human
cacuuuuuaaaaaacuu

SEQ ID NO: 1965219 - RNA, 20 nt, Human
cacuuuuuaaaaaacuuucu

SEQ ID NO: 1965220 - RNA, 14 nt, Human
cacuuuuguucuug

SEQ ID NO: 1965221 - RNA, 15 nt, Human
cagaaacacccacag

SEQ ID NO: 1965222 - RNA, 11 nt, Human
cagaaaaugag

SEQ ID NO: 1965223 - RNA, 23 nt, Human
cagaaaauggaagacagcucuua

SEQ ID NO: 1965224 - RNA, 22 nt, Human
cagaaaauggaagacagcucuu

SEQ ID NO: 1965225 - RNA, 21 nt, Human
cagaaaauggaagacagcucu

SEQ ID NO: 1965226 - RNA, 20 nt, Human
cagaaaauggaagacagcuc

SEQ ID NO: 1965227 - RNA, 16 nt, Human
cagaaaauggaagaca

SEQ ID NO: 1965228 - RNA, 17 nt, Human
cagaaaaguugaauuuu

SEQ ID NO: 1965229 - RNA, 20 nt, Human
cagaaaaguugaauuuuaca

SEQ ID NO: 1965230 - RNA, 22 nt, Human
cagaaaaguugaauuuuacaug

SEQ ID NO: 1965231 - RNA, 14 nt, Human
cagaaaauauguau

SEQ ID NO: 1965232 - RNA, 15 nt, Human
cagaaaauauguauu

SEQ ID NO: 1965233 - RNA, 16 nt, Human
cagaaaauauguauua

SEQ ID NO: 1965234 - RNA, 20 nt, Human
cagaaaauauguauuaacac

SEQ ID NO: 1965235 - RNA, 21 nt, Human
cagaaaauauguauuaacacu

SEQ ID NO: 1965236 - RNA, 22 nt, Human
cagaaaauauguauuaacacua

SEQ ID NO: 1965237 - RNA, 23 nt, Human
cagaacagugauuaccagggacu

SEQ ID NO: 1965238 - RNA, 19 nt, Human
cagaaagcagaacagugau

SEQ ID NO: 1965239 - RNA, 19 nt, Human
cagaaacuguucccaccug

SEQ ID NO: 1965240 - RNA, 17 nt, Human
cagaaacgccacauccc

SEQ ID NO: 1965241 - RNA, 16 nt, Human
cagaaacuuguucuuc

SEQ ID NO: 1965242 - RNA, 18 nt, Human
cagaaagcagaacaguga

SEQ ID NO: 1965243 - RNA, 24 nt, Human
cagaaagaaguggggacagagcag

SEQ ID NO: 1965244 - RNA, 18 nt, Human
cagaaacuuguucuucca

SEQ ID NO: 1965245 - RNA, 19 nt, Human
cagaaacacccacaggcau

SEQ ID NO: 1965246 - RNA, 17 nt, Human
cagaaacacccacaggc

SEQ ID NO: 1965247 - RNA, 18 nt, Human
cagaaacacccacaggca

SEQ ID NO: 1965248 - RNA, 12 nt, Human
cagaggccuccu

SEQ ID NO: 1965249 - RNA, 13 nt, Human
cagaggccuccug

SEQ ID NO: 1965250 - RNA, 23 nt, Human
cagaggccccaauaccccaugga

SEQ ID NO: 1965251 - RNA, 21 nt, Human
cagaggcucagauuguaauau

SEQ ID NO: 1965252 - RNA, 13 nt, Human
cagaggcugccuc

SEQ ID NO: 1965253 - RNA, 16 nt, Human
cagaggccuccugugg

SEQ ID NO: 1965254 - RNA, 21 nt, Human
cagaggccuccuguggccugc

SEQ ID NO: 1965255 - RNA, 23 nt, Human
cagaggcgcaugaauuugugaag

SEQ ID NO: 1965256 - RNA, 23 nt, Human
cagaggcugccucucccaucacu

SEQ ID NO: 1965257 - RNA, 14 nt, Human
cagagggagugaca

SEQ ID NO: 1965258 - RNA, 16 nt, Human
cagagggagugacaga

SEQ ID NO: 1965259 - RNA, 18 nt, Human
cagagggagugacagagg

SEQ ID NO: 1965260 - RNA, 19 nt, Human
cagagggagugacagaggc

SEQ ID NO: 1965261 - RNA, 23 nt, Human
cagaggcagccccauucugccug

SEQ ID NO: 1965262 - RNA, 19 nt, Human
cagaggccaugggccuccu

SEQ ID NO: 1965263 - RNA, 16 nt, Human
cagaggccaugggccu

SEQ ID NO: 1965264 - RNA, 20 nt, Human
cagaggccaugggccuccug

SEQ ID NO: 1965265 - RNA, 21 nt, Human
cagaggccaugggccuccugu

SEQ ID NO: 1965266 - RNA, 11 nt, Human
cagaggcccca

SEQ ID NO: 1965267 - RNA, 22 nt, Human
cagaggccccaauaccccaugg

SEQ ID NO: 1965268 - RNA, 12 nt, Human
cagaggcagccc

SEQ ID NO: 1965269 - RNA, 13 nt, Human
cagaggcagcccc

SEQ ID NO: 1965270 - RNA, 14 nt, Human
cagaggcagcccca

SEQ ID NO: 1965271 - RNA, 15 nt, Human
cagaggcagccccau

SEQ ID NO: 1965272 - RNA, 18 nt, Human
cagaggcagccccauucu

SEQ ID NO: 1965273 - RNA, 19 nt, Human
cagaggcagccccauucug

SEQ ID NO: 1965274 - RNA, 20 nt, Human
cagaggcagccccauucugc

SEQ ID NO: 1965275 - RNA, 22 nt, Human
cagaggcagccccauucugccu

SEQ ID NO: 1965276 - RNA, 13 nt, Human
cagagucucacug

SEQ ID NO: 1965277 - RNA, 13 nt, Human
cagagucccccca

SEQ ID NO: 1965278 - RNA, 14 nt, Human
cagaguccccccac

SEQ ID NO: 1965279 - RNA, 15 nt, Human
cagaguccccccacu

SEQ ID NO: 1965280 - RNA, 22 nt, Human
cagaguccccccacucccagca

SEQ ID NO: 1965281 - RNA, 23 nt, Human
cagagggccauugaacucugaga

SEQ ID NO: 1965282 - RNA, 17 nt, Human
cagagucucacuguugc

SEQ ID NO: 1965283 - RNA, 19 nt, Human
cagagucucacuguugccc

SEQ ID NO: 1965284 - RNA, 20 nt, Human
cagagucucacuguugccca

SEQ ID NO: 1965285 - RNA, 21 nt, Human
cagagucucacuguugcccag

SEQ ID NO: 1965286 - RNA, 19 nt, Human
cagagggccugcaagggag

SEQ ID NO: 1965287 - RNA, 15 nt, Human
cagagggccugcaag

SEQ ID NO: 1965288 - RNA, 20 nt, Human
cagagggagugacagaggca

SEQ ID NO: 1965289 - RNA, 21 nt, Human
cagagggagugacagaggcag

SEQ ID NO: 1965290 - RNA, 22 nt, Human
cagagggagugacagaggcagc

SEQ ID NO: 1965291 - RNA, 23 nt, Human
cagagggagugacagaggcagcc

SEQ ID NO: 1965292 - RNA, 20 nt, Human
cagagucuagcguagugcag

SEQ ID NO: 1965293 - RNA, 22 nt, Human
cagagucucacuguugcccagg

SEQ ID NO: 1965294 - RNA, 23 nt, Human
cagagucucacuguugcccaggc

SEQ ID NO: 1965295 - RNA, 16 nt, Human
cagagugagacucugu

SEQ ID NO: 1965296 - RNA, 17 nt, Human
cagagugagacucuguc

SEQ ID NO: 1965297 - RNA, 18 nt, Human
cagagugagacucugucu

SEQ ID NO: 1965298 - RNA, 20 nt, Human
cagagugcaagccccugcuc

SEQ ID NO: 1965299 - RNA, 15 nt, Human
cagagugcuuuucug

SEQ ID NO: 1965300 - RNA, 23 nt, Human
cagagugcaagccccugcuccag

SEQ ID NO: 1965301 - RNA, 18 nt, Human
cagagugcaagccccugc

SEQ ID NO: 1965302 - RNA, 19 nt, Human
cagagugagacucugucuc

SEQ ID NO: 1965303 - RNA, 20 nt, Human
cagagugagacucugucuca

SEQ ID NO: 1965304 - RNA, 16 nt, Human
cagaguugaagacaga

SEQ ID NO: 1965305 - RNA, 15 nt, Human
cagaguugaagacag

SEQ ID NO: 1965306 - RNA, 14 nt, Human
cagaguugaagaca

SEQ ID NO: 1965307 - RNA, 12 nt, Human
cagaguuacuug

SEQ ID NO: 1965308 - RNA, 20 nt, Human
cagaguugaagacagagcua

SEQ ID NO: 1965309 - RNA, 19 nt, Human
cagaguugaagacagagcu

SEQ ID NO: 1965310 - RNA, 18 nt, Human
cagaguugaagacagagc

SEQ ID NO: 1965311 - RNA, 17 nt, Human
cagaguugaagacagag

SEQ ID NO: 1965312 - RNA, 14 nt, Human
cagaguuguuacau

SEQ ID NO: 1965313 - RNA, 22 nt, Human
cagaguugaagacagagcuaca

SEQ ID NO: 1965314 - RNA, 23 nt, Human
cagauaaauaguuuaugauucca

SEQ ID NO: 1965315 - RNA, 22 nt, Human
cagauaaagguucaugcaaacu

SEQ ID NO: 1965316 - RNA, 14 nt, Human
cagauaaacaguag

SEQ ID NO: 1965317 - RNA, 21 nt, Human
cagauaaaccuagauaaagag

SEQ ID NO: 1965318 - RNA, 12 nt, Human
cagauaaagauu

SEQ ID NO: 1965319 - RNA, 16 nt, Human
cagauaaagauugugu

SEQ ID NO: 1965320 - RNA, 15 nt, Human
cagaguuguuacauu

SEQ ID NO: 1965321 - RNA, 18 nt, Human
cagaguuguuacauuuuu

SEQ ID NO: 1965322 - RNA, 19 nt, Human
cagaguuguuacauuuuua

SEQ ID NO: 1965323 - RNA, 23 nt, Human
cagauaaaugauucaaaaaguca

SEQ ID NO: 1965324 - RNA, 17 nt, Human
cagauaaagauugugug

SEQ ID NO: 1965325 - RNA, 21 nt, Human
cagauaaaugauucaaaaagu

SEQ ID NO: 1965326 - RNA, 20 nt, Human
cagaucucuaacuucaccau

SEQ ID NO: 1965327 - RNA, 13 nt, Human
cagaucucccaca

SEQ ID NO: 1965328 - RNA, 23 nt, Human
cagaucucccacaugccaggggc

SEQ ID NO: 1965329 - RNA, 23 nt, Human
cagauccuggguacugaaagccu

SEQ ID NO: 1965330 - RNA, 20 nt, Human
cagauacaggaaaagcugcu

SEQ ID NO: 1965331 - RNA, 21 nt, Human
cagauacaggaaaagcugcug

SEQ ID NO: 1965332 - RNA, 22 nt, Human
cagauacaggaaaagcugcuga

SEQ ID NO: 1965333 - RNA, 19 nt, Human
cagaugaggugaaaaggcc

SEQ ID NO: 1965334 - RNA, 23 nt, Human
cagaugaccccugcccagaucag

SEQ ID NO: 1965335 - RNA, 16 nt, Human
cagaugaccccugccc

SEQ ID NO: 1965336 - RNA, 17 nt, Human
cagaugaccccugccca

SEQ ID NO: 1965337 - RNA, 18 nt, Human
cagaugaccccugcccag

SEQ ID NO: 1965338 - RNA, 19 nt, Human
cagaugaccccugcccaga

SEQ ID NO: 1965339 - RNA, 17 nt, Human
cagaugcagcucuuccu

SEQ ID NO: 1965340 - RNA, 18 nt, Human
cagaugcagcucuuccug

SEQ ID NO: 1965341 - RNA, 19 nt, Human
cagaugcagcucuuccugg

SEQ ID NO: 1965342 - RNA, 23 nt, Human
cagaugcagcucuuccuggacag

SEQ ID NO: 1965343 - RNA, 13 nt, Human
cagaugcagcucu

SEQ ID NO: 1965344 - RNA, 14 nt, Human
cagaugcagcucuu

SEQ ID NO: 1965345 - RNA, 15 nt, Human
cagaugcagcucuuc

SEQ ID NO: 1965346 - RNA, 12 nt, Human
cagaugcagcuc

SEQ ID NO: 1965347 - RNA, 17 nt, Human
cagaugcaccagcccuu

SEQ ID NO: 1965348 - RNA, 22 nt, Human
cagaugcaccagcccuuagcag

SEQ ID NO: 1965349 - RNA, 14 nt, Human
cagaugcaaugacu

SEQ ID NO: 1965350 - RNA, 13 nt, Human
cagaugcaccagc

SEQ ID NO: 1965351 - RNA, 14 nt, Human
cagaugcaccagcc

SEQ ID NO: 1965352 - RNA, 16 nt, Human
cagaugcaccagcccu

SEQ ID NO: 1965353 - RNA, 19 nt, Human
cagagacuccugcaggcag

SEQ ID NO: 1965354 - RNA, 18 nt, Human
cagagacuccugcaggca

SEQ ID NO: 1965355 - RNA, 17 nt, Human
cagagacuccugcaggc

SEQ ID NO: 1965356 - RNA, 16 nt, Human
cagagacuccugcagg

SEQ ID NO: 1965357 - RNA, 15 nt, Human
cagagacuccugcag

SEQ ID NO: 1965358 - RNA, 14 nt, Human
cagagacuccugca

SEQ ID NO: 1965359 - RNA, 13 nt, Human
cagagacuccugc

SEQ ID NO: 1965360 - RNA, 20 nt, Human
cagagaccaucccugaaggc

SEQ ID NO: 1965361 - RNA, 19 nt, Human
cagagaccaucccugaagg

SEQ ID NO: 1965362 - RNA, 18 nt, Human
cagagaccaucccugaag

SEQ ID NO: 1965363 - RNA, 17 nt, Human
cagagaccaucccugaa

SEQ ID NO: 1965364 - RNA, 21 nt, Human
cagagaccaucccugaaggcc

SEQ ID NO: 1965365 - RNA, 21 nt, Human
cagagcaaccccuggacccca

SEQ ID NO: 1965366 - RNA, 22 nt, Human
cagagcaaccccuggaccccag

SEQ ID NO: 1965367 - RNA, 23 nt, Human
cagagcaaccccuggaccccagc

SEQ ID NO: 1965368 - RNA, 15 nt, Human
cagagcaaccccugg

SEQ ID NO: 1965369 - RNA, 18 nt, Human
cagagcaaccccuggacc

SEQ ID NO: 1965370 - RNA, 20 nt, Human
cagagcaagugagacccugu

SEQ ID NO: 1965371 - RNA, 14 nt, Human
cagagcaagugaga

SEQ ID NO: 1965372 - RNA, 16 nt, Human
cagagcaccuuagaca

SEQ ID NO: 1965373 - RNA, 18 nt, Human
cagagcacagcagccccu

SEQ ID NO: 1965374 - RNA, 20 nt, Human
cagagauggucauauuuaaa

SEQ ID NO: 1965375 - RNA, 22 nt, Human
cagagauaguggggagacuucu

SEQ ID NO: 1965376 - RNA, 15 nt, Human
cagagaguggcuccu

SEQ ID NO: 1965377 - RNA, 18 nt, Human
cagagaguggcuccuccc

SEQ ID NO: 1965378 - RNA, 13 nt, Human
cagagaguggcuc

SEQ ID NO: 1965379 - RNA, 14 nt, Human
cagagaguggcucc

SEQ ID NO: 1965380 - RNA, 19 nt, Human
cagagaaugaaagggccca

SEQ ID NO: 1965381 - RNA, 15 nt, Human
cagagaauucucuua

SEQ ID NO: 1965382 - RNA, 20 nt, Human
cagagaagugacgguuccua

SEQ ID NO: 1965383 - RNA, 20 nt, Human
cagagaaugaaagggcccag

SEQ ID NO: 1965384 - RNA, 21 nt, Human
cagagaaugaaagggcccaga

SEQ ID NO: 1965385 - RNA, 16 nt, Human
cagagaaaugucuguc

SEQ ID NO: 1965386 - RNA, 16 nt, Human
cagagaccaucccuga

SEQ ID NO: 1965387 - RNA, 14 nt, Human
cagagaccaucccu

SEQ ID NO: 1965388 - RNA, 13 nt, Human
cagagaccauccc

SEQ ID NO: 1965389 - RNA, 17 nt, Human
cagagacacaagccuuc

SEQ ID NO: 1965390 - RNA, 16 nt, Human
cagagacacaagccuu

SEQ ID NO: 1965391 - RNA, 15 nt, Human
cagagacacaagccu

SEQ ID NO: 1965392 - RNA, 14 nt, Human
cagagacacaagcc

SEQ ID NO: 1965393 - RNA, 22 nt, Human
cagagacaaauauuucuagaca

SEQ ID NO: 1965394 - RNA, 21 nt, Human
cagagcagagaccaucccuga

SEQ ID NO: 1965395 - RNA, 19 nt, Human
cagagcagagaccaucccu

SEQ ID NO: 1965396 - RNA, 18 nt, Human
cagagcagagaccauccc

SEQ ID NO: 1965397 - RNA, 17 nt, Human
cagagcagagaccaucc

SEQ ID NO: 1965398 - RNA, 15 nt, Human
cagagcagagaccau

SEQ ID NO: 1965399 - RNA, 14 nt, Human
cagagcagagacca

SEQ ID NO: 1965400 - RNA, 13 nt, Human
cagagcagagacc

SEQ ID NO: 1965401 - RNA, 22 nt, Human
cagagcaccuuagacagucccu

SEQ ID NO: 1965402 - RNA, 21 nt, Human
cagagcaccuuagacaguccc

SEQ ID NO: 1965403 - RNA, 19 nt, Human
cagagcaccuuagacaguc

SEQ ID NO: 1965404 - RNA, 18 nt, Human
cagagcaccuuagacagu

SEQ ID NO: 1965405 - RNA, 12 nt, Human
cagagcagagac

SEQ ID NO: 1965406 - RNA, 11 nt, Human
cagagcagaga

SEQ ID NO: 1965407 - RNA, 23 nt, Human
cagagcaccuuagacagucccug

SEQ ID NO: 1965408 - RNA, 15 nt, Human
cagagcagugggccu

SEQ ID NO: 1965409 - RNA, 17 nt, Human
cagagcagugggccugg

SEQ ID NO: 1965410 - RNA, 20 nt, Human
cagagcagugggccuggcca

SEQ ID NO: 1965411 - RNA, 21 nt, Human
cagagcagugggccuggccag

SEQ ID NO: 1965412 - RNA, 22 nt, Human
cagagcagugggccuggccagc

SEQ ID NO: 1965413 - RNA, 12 nt, Human
cagagcagucug

SEQ ID NO: 1965414 - RNA, 19 nt, Human
cagagcaguugagaggaca

SEQ ID NO: 1965415 - RNA, 17 nt, Human
cagagcauuccagucag

SEQ ID NO: 1965416 - RNA, 18 nt, Human
cagagcauuccagucagg

SEQ ID NO: 1965417 - RNA, 19 nt, Human
cagagcauuccagucaggc

SEQ ID NO: 1965418 - RNA, 22 nt, Human
cagagccaccccuaaagagaua

SEQ ID NO: 1965419 - RNA, 22 nt, Human
cagagcauuccagucaggcucu

SEQ ID NO: 1965420 - RNA, 20 nt, Human
cagagcauuccagucaggcu

SEQ ID NO: 1965421 - RNA, 21 nt, Human
cagagcauuccagucaggcuc

SEQ ID NO: 1965422 - RNA, 15 nt, Human
cagagcccaccuugg

SEQ ID NO: 1965423 - RNA, 17 nt, Human
cagagcccaccuuggcu

SEQ ID NO: 1965424 - RNA, 19 nt, Human
cagagcccaccuuggcuca

SEQ ID NO: 1965425 - RNA, 16 nt, Human
cagagcccacgccccc

SEQ ID NO: 1965426 - RNA, 20 nt, Human
cagagcccaccuuggcucaa

SEQ ID NO: 1965427 - RNA, 21 nt, Human
cagagcccacgcccccacugg

SEQ ID NO: 1965428 - RNA, 20 nt, Human
cagagcccacgcccccacug

SEQ ID NO: 1965429 - RNA, 19 nt, Human
cagagcccacgcccccacu

SEQ ID NO: 1965430 - RNA, 17 nt, Human
cagagcccacgccccca

SEQ ID NO: 1965431 - RNA, 20 nt, Human
cagagcccagacccuggagg

SEQ ID NO: 1965432 - RNA, 14 nt, Human
cagagcccagaccc

SEQ ID NO: 1965433 - RNA, 23 nt, Human
cagagcccacgcccccacuggug

SEQ ID NO: 1965434 - RNA, 12 nt, Human
cagagccugcag

SEQ ID NO: 1965435 - RNA, 21 nt, Human
cagagccguaaaaacugaagu

SEQ ID NO: 1965436 - RNA, 20 nt, Human
cagagccguaaaaacugaag

SEQ ID NO: 1965437 - RNA, 10 nt, Human
cagagcccug

SEQ ID NO: 1965438 - RNA, 14 nt, Human
cagagcccugcucc

SEQ ID NO: 1965439 - RNA, 15 nt, Human
cagagcccugcuccc

SEQ ID NO: 1965440 - RNA, 17 nt, Human
cagagcccugcucccuc

SEQ ID NO: 1965441 - RNA, 13 nt, Human
cagaggaaggaga

SEQ ID NO: 1965442 - RNA, 13 nt, Human
cagagccugcagu

SEQ ID NO: 1965443 - RNA, 23 nt, Human
cagagccguaaaaacugaaguuc

SEQ ID NO: 1965444 - RNA, 22 nt, Human
cagaggacaguauuugugggga

SEQ ID NO: 1965445 - RNA, 13 nt, Human
cagaggaccagca

SEQ ID NO: 1965446 - RNA, 15 nt, Human
cagaggacacagaga

SEQ ID NO: 1965447 - RNA, 17 nt, Human
cagaggacacagagaag

SEQ ID NO: 1965448 - RNA, 19 nt, Human
cagaggagagaggaccccc

SEQ ID NO: 1965449 - RNA, 15 nt, Human
cagaggagagaggac

SEQ ID NO: 1965450 - RNA, 13 nt, Human
cagaggagagagg

SEQ ID NO: 1965451 - RNA, 16 nt, Human
cagaggaccagcacac

SEQ ID NO: 1965452 - RNA, 20 nt, Human
cagaggaccagcacacuccc

SEQ ID NO: 1965453 - RNA, 18 nt, Human
cagaggaggcgaggaggc

SEQ ID NO: 1965454 - RNA, 11 nt, Human
cagaggcagcc

SEQ ID NO: 1965455 - RNA, 20 nt, Human
cagaggagagaggacccccu

SEQ ID NO: 1965456 - RNA, 20 nt, Human
cagaggagaacuugcugccu

SEQ ID NO: 1965457 - RNA, 21 nt, Human
cagaggagaacuugcugccuc

SEQ ID NO: 1965458 - RNA, 16 nt, Human
cacgccagauucuuuc

SEQ ID NO: 1965459 - RNA, 17 nt, Human
caccucucccuuggauu

SEQ ID NO: 1965460 - RNA, 14 nt, Human
caccucucccuugg

SEQ ID NO: 1965461 - RNA, 13 nt, Human
caccucucccuug

SEQ ID NO: 1965462 - RNA, 17 nt, Human
caccuccuaaaaggccc

SEQ ID NO: 1965463 - RNA, 18 nt, Human
caccuccuaaaaggccca

SEQ ID NO: 1965464 - RNA, 22 nt, Human
caccuccuaaaaggcccagaga

SEQ ID NO: 1965465 - RNA, 19 nt, Human
caccuccuaaaaggcccag

SEQ ID NO: 1965466 - RNA, 20 nt, Human
caccuccuaaaaggcccaga

SEQ ID NO: 1965467 - RNA, 16 nt, Human
caccuccucccacugc

SEQ ID NO: 1965468 - RNA, 14 nt, Human
caccuccugccucg

SEQ ID NO: 1965469 - RNA, 22 nt, Human
caccuccucggcuggcugucca

SEQ ID NO: 1965470 - RNA, 13 nt, Human
caccuccugccuc

SEQ ID NO: 1965471 - RNA, 11 nt, Human
caccuccugcc

SEQ ID NO: 1965472 - RNA, 20 nt, Human
caccuccccuugccagcugc

SEQ ID NO: 1965473 - RNA, 22 nt, Human
caccuccccuugccagcugcug

SEQ ID NO: 1965474 - RNA, 16 nt, Human
caccuccccuugccag

SEQ ID NO: 1965475 - RNA, 17 nt, Human
caccuccccuugccagc

SEQ ID NO: 1965476 - RNA, 18 nt, Human
caccuccccuugccagcu

SEQ ID NO: 1965477 - RNA, 19 nt, Human
caccuccccuugccagcug

SEQ ID NO: 1965478 - RNA, 14 nt, Human
caccuccccuugcc

SEQ ID NO: 1965479 - RNA, 15 nt, Human
caccuccccuugcca

SEQ ID NO: 1965480 - RNA, 14 nt, Human
caccucccccaucu

SEQ ID NO: 1965481 - RNA, 21 nt, Human
caccucccccaucucuucugg

SEQ ID NO: 1965482 - RNA, 11 nt, Human
caccuccccca

SEQ ID NO: 1965483 - RNA, 17 nt, Human
caccucccccacuccca

SEQ ID NO: 1965484 - RNA, 21 nt, Human
caccucccccacucccaacca

SEQ ID NO: 1965485 - RNA, 17 nt, Human
caccgccuccuacagcc

SEQ ID NO: 1965486 - RNA, 13 nt, Human
caccgccucuucc

SEQ ID NO: 1965487 - RNA, 15 nt, Human
caccgccucuucccg

SEQ ID NO: 1965488 - RNA, 16 nt, Human
caccgccucuucccgc

SEQ ID NO: 1965489 - RNA, 17 nt, Human
caccgccucuucccgcc

SEQ ID NO: 1965490 - RNA, 21 nt, Human
caccgcagacaggaccaggga

SEQ ID NO: 1965491 - RNA, 18 nt, Human
caccggcuggccuggccc

SEQ ID NO: 1965492 - RNA, 17 nt, Human
caccggcuggccuggcc

SEQ ID NO: 1965493 - RNA, 20 nt, Human
caccggcuggccuggccccu

SEQ ID NO: 1965494 - RNA, 14 nt, Human
caccgggcacucag

SEQ ID NO: 1965495 - RNA, 16 nt, Human
caccggcuggccuggc

SEQ ID NO: 1965496 - RNA, 15 nt, Human
caccggcuggccugg

SEQ ID NO: 1965497 - RNA, 14 nt, Human
caccggcuggccug

SEQ ID NO: 1965498 - RNA, 13 nt, Human
caccguccccucc

SEQ ID NO: 1965499 - RNA, 15 nt, Human
caccgugccuggcca

SEQ ID NO: 1965500 - RNA, 16 nt, Human
caccguccccucccag

SEQ ID NO: 1965501 - RNA, 20 nt, Human
caccgugccuggccacgccc

SEQ ID NO: 1965502 - RNA, 15 nt, Human
caccgggcacucaga

SEQ ID NO: 1965503 - RNA, 22 nt, Human
caccgggcacucagaagacacu

SEQ ID NO: 1965504 - RNA, 15 nt, Human
caccgggccacagag

SEQ ID NO: 1965505 - RNA, 18 nt, Human
caccgggccacagagaaa

SEQ ID NO: 1965506 - RNA, 13 nt, Human
caccgggccugga

SEQ ID NO: 1965507 - RNA, 15 nt, Human
caccggggccucgga

SEQ ID NO: 1965508 - RNA, 20 nt, Human
caccuguaauuccagcacuu

SEQ ID NO: 1965509 - RNA, 18 nt, Human
caccugggcgucaucugg

SEQ ID NO: 1965510 - RNA, 16 nt, Human
caccugggggccuggc

SEQ ID NO: 1965511 - RNA, 11 nt, Human
caccugucugc

SEQ ID NO: 1965512 - RNA, 14 nt, Human
caccugucugcucc

SEQ ID NO: 1965513 - RNA, 15 nt, Human
caccugucugcucca

SEQ ID NO: 1965514 - RNA, 20 nt, Human
caccugucugcuccagcucu

SEQ ID NO: 1965515 - RNA, 21 nt, Human
caccugucugcuccagcucug

SEQ ID NO: 1965516 - RNA, 23 nt, Human
caccugucugcuccagcucuggc

SEQ ID NO: 1965517 - RNA, 15 nt, Human
caccuggccucugca

SEQ ID NO: 1965518 - RNA, 14 nt, Human
caccuggccucugc

SEQ ID NO: 1965519 - RNA, 13 nt, Human
caccuggccucug

SEQ ID NO: 1965520 - RNA, 12 nt, Human
caccuggccucu

SEQ ID NO: 1965521 - RNA, 19 nt, Human
caccuggcccucucugaag

SEQ ID NO: 1965522 - RNA, 16 nt, Human
caccuggcccucucug

SEQ ID NO: 1965523 - RNA, 17 nt, Human
caccuggcccucucuga

SEQ ID NO: 1965524 - RNA, 20 nt, Human
caccuggccucugcacuccc

SEQ ID NO: 1965525 - RNA, 19 nt, Human
caccuggccucugcacucc

SEQ ID NO: 1965526 - RNA, 18 nt, Human
caccuggccucugcacuc

SEQ ID NO: 1965527 - RNA, 17 nt, Human
caccuggccucugcacu

SEQ ID NO: 1965528 - RNA, 23 nt, Human
caccuggccucugcacuccccug

SEQ ID NO: 1965529 - RNA, 21 nt, Human
caccugggacagggagcagcc

SEQ ID NO: 1965530 - RNA, 19 nt, Human
caccucugcacaagcugca

SEQ ID NO: 1965531 - RNA, 18 nt, Human
caccucugcacaagcugc

SEQ ID NO: 1965532 - RNA, 19 nt, Human
caccucucucacuccuuga

SEQ ID NO: 1965533 - RNA, 18 nt, Human
caccucucucacuccuug

SEQ ID NO: 1965534 - RNA, 17 nt, Human
caccucucucacuccuu

SEQ ID NO: 1965535 - RNA, 15 nt, Human
caccucucucacucc

SEQ ID NO: 1965536 - RNA, 16 nt, Human
caccucuuccuggccg

SEQ ID NO: 1965537 - RNA, 17 nt, Human
caccucuuccuggccgg

SEQ ID NO: 1965538 - RNA, 15 nt, Human
caccucuuccuggcc

SEQ ID NO: 1965539 - RNA, 23 nt, Human
caccugaagacucauucuucugu

SEQ ID NO: 1965540 - RNA, 14 nt, Human
caccugaagacuca

SEQ ID NO: 1965541 - RNA, 15 nt, Human
caccugaagacucau

SEQ ID NO: 1965542 - RNA, 15 nt, Human
caccugcuggaguga

SEQ ID NO: 1965543 - RNA, 12 nt, Human
caccugcugcuu

SEQ ID NO: 1965544 - RNA, 20 nt, Human
caccuggaauauauaaccag

SEQ ID NO: 1965545 - RNA, 19 nt, Human
caccugcuucucugcccag

SEQ ID NO: 1965546 - RNA, 16 nt, Human
caccugcuucucugcc

SEQ ID NO: 1965547 - RNA, 18 nt, Human
caccugcuucucugccca

SEQ ID NO: 1965548 - RNA, 23 nt, Human
caccugcggugcuaucuccccca

SEQ ID NO: 1965549 - RNA, 13 nt, Human
caccugcucugcu

SEQ ID NO: 1965550 - RNA, 14 nt, Human
caccugcucugcug

SEQ ID NO: 1965551 - RNA, 12 nt, Human
caccugcucugc

SEQ ID NO: 1965552 - RNA, 15 nt, Human
caccugcauucuucc

SEQ ID NO: 1965553 - RNA, 15 nt, Human
caccugcagcucccu

SEQ ID NO: 1965554 - RNA, 16 nt, Human
caccugcagcucccuc

SEQ ID NO: 1965555 - RNA, 11 nt, Human
caccugacagc

SEQ ID NO: 1965556 - RNA, 18 nt, Human
caccugacagccccuccc

SEQ ID NO: 1965557 - RNA, 19 nt, Human
caccugacagccccucccu

SEQ ID NO: 1965558 - RNA, 15 nt, Human
caccugaguuccuga

SEQ ID NO: 1965559 - RNA, 23 nt, Human
caccugcagauucuaggaccugu

SEQ ID NO: 1965560 - RNA, 11 nt, Human
caccugcagcu

SEQ ID NO: 1965561 - RNA, 12 nt, Human
caccugcagcuc

SEQ ID NO: 1965562 - RNA, 14 nt, Human
caccugcagcuccc

SEQ ID NO: 1965563 - RNA, 20 nt, Human
cacauauugauuuccguuaa

SEQ ID NO: 1965564 - RNA, 23 nt, Human
cacccugugauggggcccugccu

SEQ ID NO: 1965565 - RNA, 22 nt, Human
cacccugugauggggcccugcc

SEQ ID NO: 1965566 - RNA, 21 nt, Human
cacccugugauggggcccugc

SEQ ID NO: 1965567 - RNA, 20 nt, Human
cacccugugauggggcccug

SEQ ID NO: 1965568 - RNA, 18 nt, Human
cacccugugauggggccc

SEQ ID NO: 1965569 - RNA, 15 nt, Human
cacccugugaugggg

SEQ ID NO: 1965570 - RNA, 12 nt, Human
cacccugugaug

SEQ ID NO: 1965571 - RNA, 11 nt, Human
cacccugugau

SEQ ID NO: 1965572 - RNA, 15 nt, Human
cacccugugcagaag

SEQ ID NO: 1965573 - RNA, 19 nt, Human
cacccuuccaucugauucc

SEQ ID NO: 1965574 - RNA, 15 nt, Human
cacccuuggagcucu

SEQ ID NO: 1965575 - RNA, 16 nt, Human
cacccuuggagcucug

SEQ ID NO: 1965576 - RNA, 20 nt, Human
cacccuuggagcucugaguu

SEQ ID NO: 1965577 - RNA, 18 nt, Human
caccgcagacaggaccag

SEQ ID NO: 1965578 - RNA, 17 nt, Human
caccgcagacaggacca

SEQ ID NO: 1965579 - RNA, 15 nt, Human
caccgcagacaggac

SEQ ID NO: 1965580 - RNA, 14 nt, Human
caccgcagacagga

SEQ ID NO: 1965581 - RNA, 13 nt, Human
caccgcagacagg

SEQ ID NO: 1965582 - RNA, 12 nt, Human
caccgcagacag

SEQ ID NO: 1965583 - RNA, 20 nt, Human
caccgacuagacacacaaag

SEQ ID NO: 1965584 - RNA, 18 nt, Human
caccgaaaacguggcugc

SEQ ID NO: 1965585 - RNA, 15 nt, Human
caccgaaaacguggc

SEQ ID NO: 1965586 - RNA, 13 nt, Human
cacccuuguucca

SEQ ID NO: 1965587 - RNA, 22 nt, Human
cacccuuucuacuuccaagacu

SEQ ID NO: 1965588 - RNA, 21 nt, Human
caccgaaaacguggcugcuuc

SEQ ID NO: 1965589 - RNA, 19 nt, Human
caccgaaaacguggcugcu

SEQ ID NO: 1965590 - RNA, 22 nt, Human
caccgaaaacguggcugcuuca

SEQ ID NO: 1965591 - RNA, 17 nt, Human
cacccgugguggcucaa

SEQ ID NO: 1965592 - RNA, 16 nt, Human
cacccguguuuguaaa

SEQ ID NO: 1965593 - RNA, 23 nt, Human
cacccgguccccacuuuauugcc

SEQ ID NO: 1965594 - RNA, 19 nt, Human
cacccggugaccucuagcc

SEQ ID NO: 1965595 - RNA, 22 nt, Human
cacccggugaccucuagcccug

SEQ ID NO: 1965596 - RNA, 19 nt, Human
cacccgcuaagagggaggg

SEQ ID NO: 1965597 - RNA, 12 nt, Human
cacccggccccu

SEQ ID NO: 1965598 - RNA, 13 nt, Human
cacccggccccug

SEQ ID NO: 1965599 - RNA, 14 nt, Human
cacccggccccugc

SEQ ID NO: 1965600 - RNA, 16 nt, Human
cacccggccccugcug

SEQ ID NO: 1965601 - RNA, 17 nt, Human
cacccggccccugcugg

SEQ ID NO: 1965602 - RNA, 18 nt, Human
cacccggccccugcuggu

SEQ ID NO: 1965603 - RNA, 21 nt, Human
cacccggccccugcugguuca

SEQ ID NO: 1965604 - RNA, 15 nt, Human
caccccuuccugggc

SEQ ID NO: 1965605 - RNA, 16 nt, Human
caccccuuccugggca

SEQ ID NO: 1965606 - RNA, 19 nt, Human
caccccuuccugggcacac

SEQ ID NO: 1965607 - RNA, 14 nt, Human
cacccgacuccagu

SEQ ID NO: 1965608 - RNA, 16 nt, Human
cacccgacuccagucc

SEQ ID NO: 1965609 - RNA, 20 nt, Human
caccccucaacaccucugca

SEQ ID NO: 1965610 - RNA, 13 nt, Human
cacauauugauuu

SEQ ID NO: 1965611 - RNA, 17 nt, Human
cacucagagcagucugu

SEQ ID NO: 1965612 - RNA, 21 nt, Human
cacucagagcagucugugacu

SEQ ID NO: 1965613 - RNA, 12 nt, Human
cacucagagcag

SEQ ID NO: 1965614 - RNA, 13 nt, Human
cacucagcaccac

SEQ ID NO: 1965615 - RNA, 14 nt, Human
cacucagcaccacu

SEQ ID NO: 1965616 - RNA, 15 nt, Human
cacucagcaccacuc

SEQ ID NO: 1965617 - RNA, 16 nt, Human
cacucagcaccacuca

SEQ ID NO: 1965618 - RNA, 18 nt, Human
cacucagcaccacucaag

SEQ ID NO: 1965619 - RNA, 22 nt, Human
cacucagaagacacugaugggc

SEQ ID NO: 1965620 - RNA, 24 nt, Human
cacucagaaaagacgcaccagccc

SEQ ID NO: 1965621 - RNA, 21 nt, Human
cacucagaaaagacgcaccag

SEQ ID NO: 1965622 - RNA, 18 nt, Human
cacucagaagacacugau

SEQ ID NO: 1965623 - RNA, 19 nt, Human
cacucagaagacacugaug

SEQ ID NO: 1965624 - RNA, 19 nt, Human
cacucacauuuauucugcu

SEQ ID NO: 1965625 - RNA, 20 nt, Human
cacucacauuuauucugcuc

SEQ ID NO: 1965626 - RNA, 12 nt, Human
cacucagaagac

SEQ ID NO: 1965627 - RNA, 16 nt, Human
cacucagaagacacug

SEQ ID NO: 1965628 - RNA, 17 nt, Human
cacucagaagacacuga

SEQ ID NO: 1965629 - RNA, 16 nt, Human
cacucaaaucuuaaga

SEQ ID NO: 1965630 - RNA, 17 nt, Human
cacucaaaucuuaagaa

SEQ ID NO: 1965631 - RNA, 18 nt, Human
cacucaaaucuuaagaaa

SEQ ID NO: 1965632 - RNA, 20 nt, Human
cacucaaaagcugggcaggu

SEQ ID NO: 1965633 - RNA, 14 nt, Human
cacucaagaccaaa

SEQ ID NO: 1965634 - RNA, 22 nt, Human
cacucaagaccaaauggaaaca

SEQ ID NO: 1965635 - RNA, 19 nt, Human
cacucaaaagcugggcagg

SEQ ID NO: 1965636 - RNA, 18 nt, Human
cacucaaaagcugggcag

SEQ ID NO: 1965637 - RNA, 17 nt, Human
cacucaaaagcugggca

SEQ ID NO: 1965638 - RNA, 15 nt, Human
cacucaaaagcuggg

SEQ ID NO: 1965639 - RNA, 20 nt, Human
cacuauguugcccaggcagg

SEQ ID NO: 1965640 - RNA, 21 nt, Human
cacuauguugcccaggcaggu

SEQ ID NO: 1965641 - RNA, 15 nt, Human
cacuauguugcccag

SEQ ID NO: 1965642 - RNA, 18 nt, Human
cacuaucccggcugcccu

SEQ ID NO: 1965643 - RNA, 19 nt, Human
cacuaucccggcugcccuu

SEQ ID NO: 1965644 - RNA, 16 nt, Human
cacuauguugcccagg

SEQ ID NO: 1965645 - RNA, 17 nt, Human
cacuauguugcccaggc

SEQ ID NO: 1965646 - RNA, 18 nt, Human
cacuauguugcccaggca

SEQ ID NO: 1965647 - RNA, 19 nt, Human
cacuauguugcccaggcag

SEQ ID NO: 1965648 - RNA, 14 nt, Human
cacuauaauguaag

SEQ ID NO: 1965649 - RNA, 18 nt, Human
cacuauaauguaagcucu

SEQ ID NO: 1965650 - RNA, 14 nt, Human
cacuauagccuagg

SEQ ID NO: 1965651 - RNA, 21 nt, Human
cacuauagccuaggugacaga

SEQ ID NO: 1965652 - RNA, 17 nt, Human
cacuaagaacaccugca

SEQ ID NO: 1965653 - RNA, 21 nt, Human
cacuaaauugacacuuaaaaa

SEQ ID NO: 1965654 - RNA, 16 nt, Human
cacuaacaugauuugg

SEQ ID NO: 1965655 - RNA, 11 nt, Human
cacuaaauguu

SEQ ID NO: 1965656 - RNA, 12 nt, Human
cacuaaauguua

SEQ ID NO: 1965657 - RNA, 13 nt, Human
cacuaaauguuaa

SEQ ID NO: 1965658 - RNA, 14 nt, Human
cacuaaauguuaaa

SEQ ID NO: 1965659 - RNA, 14 nt, Human
cacuaaccacgcug

SEQ ID NO: 1965660 - RNA, 16 nt, Human
cacuaaauguuaaaga

SEQ ID NO: 1965661 - RNA, 19 nt, Human
cacuaaauguuaaagaugu

SEQ ID NO: 1965662 - RNA, 20 nt, Human
cacuaaauguuaaagaugua

SEQ ID NO: 1965663 - RNA, 23 nt, Human
cacuaaauguuaaagauguagca

SEQ ID NO: 1965664 - RNA, 15 nt, Human
cacuaaccacgcugg

SEQ ID NO: 1965665 - RNA, 16 nt, Human
cacuaaccacgcugga

SEQ ID NO: 1965666 - RNA, 17 nt, Human
cacuaaggugugcucug

SEQ ID NO: 1965667 - RNA, 16 nt, Human
cacuaagucucuuuuu

SEQ ID NO: 1965668 - RNA, 20 nt, Human
cacuaagucucuuuuuuaca

SEQ ID NO: 1965669 - RNA, 21 nt, Human
cacuaagucucuuuuuuacaa

SEQ ID NO: 1965670 - RNA, 22 nt, Human
cacuaagucucuuuuuuacaaa

SEQ ID NO: 1965671 - RNA, 18 nt, Human
cacuaaggugugcucuga

SEQ ID NO: 1965672 - RNA, 18 nt, Human
cacuaaccacgcuggacc

SEQ ID NO: 1965673 - RNA, 13 nt, Human
cacuaagaacaaa

SEQ ID NO: 1965674 - RNA, 20 nt, Human
cacuaagaacaaaagaagca

SEQ ID NO: 1965675 - RNA, 16 nt, Human
cacucccugcaaccug

SEQ ID NO: 1965676 - RNA, 13 nt, Human
cacucccugcaac

SEQ ID NO: 1965677 - RNA, 12 nt, Human
cacucccugcaa

SEQ ID NO: 1965678 - RNA, 19 nt, Human
cacucccgagacggcacug

SEQ ID NO: 1965679 - RNA, 22 nt, Human
cacucccgagacggcacugaga

SEQ ID NO: 1965680 - RNA, 22 nt, Human
cacucauugaccugaggcccuu

SEQ ID NO: 1965681 - RNA, 20 nt, Human
cacucauugaccugaggccc

SEQ ID NO: 1965682 - RNA, 19 nt, Human
cacucauugaccugaggcc

SEQ ID NO: 1965683 - RNA, 18 nt, Human
cacucauugaccugaggc

SEQ ID NO: 1965684 - RNA, 16 nt, Human
cacucauccccucacu

SEQ ID NO: 1965685 - RNA, 15 nt, Human
cacucauugaccuga

SEQ ID NO: 1965686 - RNA, 22 nt, Human
cacucagcucuuggcuccacug

SEQ ID NO: 1965687 - RNA, 16 nt, Human
cacucaguccauagca

SEQ ID NO: 1965688 - RNA, 17 nt, Human
cacucccugcaaccuga

SEQ ID NO: 1965689 - RNA, 16 nt, Human
cacucccguuuucggu

SEQ ID NO: 1965690 - RNA, 13 nt, Human
cacuccuaccugg

SEQ ID NO: 1965691 - RNA, 14 nt, Human
cacuccuaccuggu

SEQ ID NO: 1965692 - RNA, 13 nt, Human
cacuccuccuagc

SEQ ID NO: 1965693 - RNA, 18 nt, Human
cacuccuccuagccaccc

SEQ ID NO: 1965694 - RNA, 12 nt, Human
cacuccugcucu

SEQ ID NO: 1965695 - RNA, 14 nt, Human
cacuccugcucugc

SEQ ID NO: 1965696 - RNA, 15 nt, Human
cacuccugcucugcu

SEQ ID NO: 1965697 - RNA, 16 nt, Human
cacuccugcucugcuc

SEQ ID NO: 1965698 - RNA, 11 nt, Human
cacuccugcuc

SEQ ID NO: 1965699 - RNA, 21 nt, Human
cacuccuucacagaugggugc

SEQ ID NO: 1965700 - RNA, 14 nt, Human
cacuccuucacaga

SEQ ID NO: 1965701 - RNA, 23 nt, Human
cacucugagacucgcgacaaugc

SEQ ID NO: 1965702 - RNA, 12 nt, Human
cacucugagacu

SEQ ID NO: 1965703 - RNA, 12 nt, Human
cacucuccuugg

SEQ ID NO: 1965704 - RNA, 14 nt, Human
cacucucucuuguu

SEQ ID NO: 1965705 - RNA, 14 nt, Human
cacucuggcagcuc

SEQ ID NO: 1965706 - RNA, 13 nt, Human
cacucuggcagcu

SEQ ID NO: 1965707 - RNA, 12 nt, Human
cacucuggcagc

SEQ ID NO: 1965708 - RNA, 13 nt, Human
cacucuggcagca

SEQ ID NO: 1965709 - RNA, 14 nt, Human
cacucuggcagcac

SEQ ID NO: 1965710 - RNA, 16 nt, Human
cacucuggcagcaccg

SEQ ID NO: 1965711 - RNA, 22 nt, Human
cacucuggcagcaccgccucuu

SEQ ID NO: 1965712 - RNA, 18 nt, Human
cacucuggauucagccuu

SEQ ID NO: 1965713 - RNA, 19 nt, Human
cacucuggauucagccuuc

SEQ ID NO: 1965714 - RNA, 22 nt, Human
cacucuggauucagccuucuuu

SEQ ID NO: 1965715 - RNA, 13 nt, Human
cacucuaagaugu

SEQ ID NO: 1965716 - RNA, 16 nt, Human
cacucuaagauguuau

SEQ ID NO: 1965717 - RNA, 18 nt, Human
cacucuaagauguuauau

SEQ ID NO: 1965718 - RNA, 19 nt, Human
cacucuaagauguuauauu

SEQ ID NO: 1965719 - RNA, 21 nt, Human
cacucuaagauguuauauuuu

SEQ ID NO: 1965720 - RNA, 13 nt, Human
cacucucagaggc

SEQ ID NO: 1965721 - RNA, 14 nt, Human
cacucucagaggcc

SEQ ID NO: 1965722 - RNA, 15 nt, Human
cacucucagaggccc

SEQ ID NO: 1965723 - RNA, 16 nt, Human
cacucucagaggcccc

SEQ ID NO: 1965724 - RNA, 17 nt, Human
cacucucagaggcccca

SEQ ID NO: 1965725 - RNA, 22 nt, Human
cacucucaggaaaugcugaccc

SEQ ID NO: 1965726 - RNA, 14 nt, Human
cacucuacuuagca

SEQ ID NO: 1965727 - RNA, 18 nt, Human
cacguacacacacauaca

SEQ ID NO: 1965728 - RNA, 19 nt, Human
cacguacacacacauacac

SEQ ID NO: 1965729 - RNA, 16 nt, Human
cacguaaugaaacuug

SEQ ID NO: 1965730 - RNA, 19 nt, Human
cacguaaugaaacuuggau

SEQ ID NO: 1965731 - RNA, 14 nt, Human
cacguacacacaca

SEQ ID NO: 1965732 - RNA, 16 nt, Human
cacguccucgcucccg

SEQ ID NO: 1965733 - RNA, 13 nt, Human
cacgugacagccg

SEQ ID NO: 1965734 - RNA, 19 nt, Human
cacgucuauuucaucagaa

SEQ ID NO: 1965735 - RNA, 23 nt, Human
cacgucuauuucaucagaacagc

SEQ ID NO: 1965736 - RNA, 12 nt, Human
cacguuucuaaa

SEQ ID NO: 1965737 - RNA, 14 nt, Human
cacguuucuaaagg

SEQ ID NO: 1965738 - RNA, 23 nt, Human
cacguuucuaaaggcuaccuuug

SEQ ID NO: 1965739 - RNA, 13 nt, Human
cacguuuuaagga

SEQ ID NO: 1965740 - RNA, 14 nt, Human
cacguuuuaaggac

SEQ ID NO: 1965741 - RNA, 15 nt, Human
cacguuuuaaggacu

SEQ ID NO: 1965742 - RNA, 16 nt, Human
cacguuuuaaggacug

SEQ ID NO: 1965743 - RNA, 14 nt, Human
cacguuuugaaaua

SEQ ID NO: 1965744 - RNA, 22 nt, Human
cacguuuuaaggacugacugag

SEQ ID NO: 1965745 - RNA, 18 nt, Human
cacguuuucaucucuagg

SEQ ID NO: 1965746 - RNA, 12 nt, Human
cacuaaacucug

SEQ ID NO: 1965747 - RNA, 16 nt, Human
cacuaaacucugaaua

SEQ ID NO: 1965748 - RNA, 22 nt, Human
cacuaaacucugaauaagcacu

SEQ ID NO: 1965749 - RNA, 13 nt, Human
cacuaaacaaaga

SEQ ID NO: 1965750 - RNA, 22 nt, Human
cacguucuuacuaguuucccuu

SEQ ID NO: 1965751 - RNA, 19 nt, Human
cacgugguccuaaucuucu

SEQ ID NO: 1965752 - RNA, 16 nt, Human
cacgugguccuaaucu

SEQ ID NO: 1965753 - RNA, 19 nt, Human
cacguguggccuguucuuc

SEQ ID NO: 1965754 - RNA, 16 nt, Human
cacgugggcuccccuc

SEQ ID NO: 1965755 - RNA, 17 nt, Human
cacgugggcuccccucu

SEQ ID NO: 1965756 - RNA, 18 nt, Human
cacgugggcuccccucuu

SEQ ID NO: 1965757 - RNA, 19 nt, Human
cacgugggcuccccucuuc

SEQ ID NO: 1965758 - RNA, 21 nt, Human
cacgugggcuccccucuuccu

SEQ ID NO: 1965759 - RNA, 15 nt, Human
cacgccuagccucac

SEQ ID NO: 1965760 - RNA, 16 nt, Human
cacgccuagccucacg

SEQ ID NO: 1965761 - RNA, 17 nt, Human
cacgccuagccucacgc

SEQ ID NO: 1965762 - RNA, 20 nt, Human
cacgccuguaauccuagcac

SEQ ID NO: 1965763 - RNA, 19 nt, Human
cacgccuguaauccuagca

SEQ ID NO: 1965764 - RNA, 18 nt, Human
cacgccuagccucacgcu

SEQ ID NO: 1965765 - RNA, 23 nt, Human
cacgcgugcacacaccagagccc

SEQ ID NO: 1965766 - RNA, 15 nt, Human
cacgcgugcacacac

SEQ ID NO: 1965767 - RNA, 16 nt, Human
cacgcgugcacacacc

SEQ ID NO: 1965768 - RNA, 21 nt, Human
cacgcgugcacacaccagagc

SEQ ID NO: 1965769 - RNA, 20 nt, Human
cacgcuggaccuugaacugg

SEQ ID NO: 1965770 - RNA, 19 nt, Human
cacgcugacuacagggccg

SEQ ID NO: 1965771 - RNA, 22 nt, Human
cacgcugccuucgguacccacc

SEQ ID NO: 1965772 - RNA, 16 nt, Human
cacgcugcucugcccc

SEQ ID NO: 1965773 - RNA, 17 nt, Human
cacgcuggaccuugaac

SEQ ID NO: 1965774 - RNA, 14 nt, Human
cacgcuccuuccuc

SEQ ID NO: 1965775 - RNA, 22 nt, Human
cacgcuccuuucugaucuucac

SEQ ID NO: 1965776 - RNA, 12 nt, Human
cacgcuccuuuc

SEQ ID NO: 1965777 - RNA, 15 nt, Human
cacgcuccuuucuga

SEQ ID NO: 1965778 - RNA, 16 nt, Human
cacggcucacugcagc

SEQ ID NO: 1965779 - RNA, 17 nt, Human
cacggcucacugcagcc

SEQ ID NO: 1965780 - RNA, 19 nt, Human
cacggcucacugcagccuc

SEQ ID NO: 1965781 - RNA, 20 nt, Human
cacggcucacugcagccuca

SEQ ID NO: 1965782 - RNA, 17 nt, Human
cacgcugcucugcccca

SEQ ID NO: 1965783 - RNA, 21 nt, Human
cacgcugcucugccccagcuu

SEQ ID NO: 1965784 - RNA, 15 nt, Human
cacgggggccaagga

SEQ ID NO: 1965785 - RNA, 21 nt, Human
cacggguaaaucuaguaccau

SEQ ID NO: 1965786 - RNA, 19 nt, Human
caccuuagacagucccugc

SEQ ID NO: 1965787 - RNA, 18 nt, Human
caccuuagacagucccug

SEQ ID NO: 1965788 - RNA, 16 nt, Human
caccuuagacaguccc

SEQ ID NO: 1965789 - RNA, 14 nt, Human
caccuuagacaguc

SEQ ID NO: 1965790 - RNA, 23 nt, Human
caccuuagacagucccugccaau

SEQ ID NO: 1965791 - RNA, 21 nt, Human
caccuuagacagucccugcca

SEQ ID NO: 1965792 - RNA, 22 nt, Human
caccuuagccugcccuccuuuc

SEQ ID NO: 1965793 - RNA, 19 nt, Human
caccuucaguuuuuguguu

SEQ ID NO: 1965794 - RNA, 22 nt, Human
cacgaauauugcugauggugca

SEQ ID NO: 1965795 - RNA, 19 nt, Human
cacgaauauugcugauggu

SEQ ID NO: 1965796 - RNA, 16 nt, Human
cacgaauauugcugau

SEQ ID NO: 1965797 - RNA, 16 nt, Human
cacgacugcccggcag

SEQ ID NO: 1965798 - RNA, 17 nt, Human
cacgacugcccggcagg

SEQ ID NO: 1965799 - RNA, 13 nt, Human
caccuugacaggg

SEQ ID NO: 1965800 - RNA, 13 nt, Human
caccuucccaugc

SEQ ID NO: 1965801 - RNA, 14 nt, Human
caccuucccaugcc

SEQ ID NO: 1965802 - RNA, 19 nt, Human
caccuucccccucccccag

SEQ ID NO: 1965803 - RNA, 15 nt, Human
caccuugacagggca

SEQ ID NO: 1965804 - RNA, 16 nt, Human
caccuugacagggcac

SEQ ID NO: 1965805 - RNA, 18 nt, Human
caccuugacagggcacac

SEQ ID NO: 1965806 - RNA, 21 nt, Human
caccuucuauagcaucacuua

SEQ ID NO: 1965807 - RNA, 12 nt, Human
cacgauuucugu

SEQ ID NO: 1965808 - RNA, 14 nt, Human
cacgauuucuguuu

SEQ ID NO: 1965809 - RNA, 16 nt, Human
cacgauuucuguuuag

SEQ ID NO: 1965810 - RNA, 17 nt, Human
cacgcacuucgggaggu

SEQ ID NO: 1965811 - RNA, 18 nt, Human
cacgagucagucgccuuu

SEQ ID NO: 1965812 - RNA, 17 nt, Human
cacgacuucuguuucac

SEQ ID NO: 1965813 - RNA, 15 nt, Human
cacgagagcgcagca

SEQ ID NO: 1965814 - RNA, 18 nt, Human
cacgagagcgcagcaucc

SEQ ID NO: 1965815 - RNA, 23 nt, Human
cacgagcagacacccuuggagcu

SEQ ID NO: 1965816 - RNA, 18 nt, Human
cacgcccccacuggugac

SEQ ID NO: 1965817 - RNA, 17 nt, Human
cacgcccccacugguga

SEQ ID NO: 1965818 - RNA, 15 nt, Human
cacgcccccacuggu

SEQ ID NO: 1965819 - RNA, 13 nt, Human
cacgcccccacug

SEQ ID NO: 1965820 - RNA, 23 nt, Human
cacgccagauucuuuccugaggc

SEQ ID NO: 1965821 - RNA, 22 nt, Human
cacgccagauucuuuccugagg

SEQ ID NO: 1965822 - RNA, 20 nt, Human
cacgccagauucuuuccuga

SEQ ID NO: 1965823 - RNA, 19 nt, Human
cacgccagauucuuuccug

SEQ ID NO: 1965824 - RNA, 15 nt, Human
cacgccacugcacua

SEQ ID NO: 1965825 - RNA, 13 nt, Human
cacgccacugcac

SEQ ID NO: 1965826 - RNA, 12 nt, Human
cacuucuucugu

SEQ ID NO: 1965827 - RNA, 14 nt, Human
cacuucuucugucc

SEQ ID NO: 1965828 - RNA, 15 nt, Human
cacuucuucugucca

SEQ ID NO: 1965829 - RNA, 16 nt, Human
cacuucuucuguccaa

SEQ ID NO: 1965830 - RNA, 20 nt, Human
cacuucuucuguccaagcag

SEQ ID NO: 1965831 - RNA, 13 nt, Human
cacuucuuucccu

SEQ ID NO: 1965832 - RNA, 15 nt, Human
cacuucuuucccuuc

SEQ ID NO: 1965833 - RNA, 17 nt, Human
cacuucuuucccuuccu

SEQ ID NO: 1965834 - RNA, 19 nt, Human
cacuucuuucccuuccucc

SEQ ID NO: 1965835 - RNA, 21 nt, Human
cacuucuuucccuuccuccau

SEQ ID NO: 1965836 - RNA, 20 nt, Human
cacuugaacccgggaggcag

SEQ ID NO: 1965837 - RNA, 21 nt, Human
cacuugaacccgggaggcaga

SEQ ID NO: 1965838 - RNA, 23 nt, Human
cacuugaacccgggaggcagagg

SEQ ID NO: 1965839 - RNA, 16 nt, Human
cacuugacaucaacug

SEQ ID NO: 1965840 - RNA, 20 nt, Human
cacuugagaauuacccuuuu

SEQ ID NO: 1965841 - RNA, 21 nt, Human
cacuugaaccauaguuacugu

SEQ ID NO: 1965842 - RNA, 17 nt, Human
cacuugagaauuacccu

SEQ ID NO: 1965843 - RNA, 19 nt, Human
cacuugacaucaacugcau

SEQ ID NO: 1965844 - RNA, 13 nt, Human
cacuugaguccag

SEQ ID NO: 1965845 - RNA, 19 nt, Human
cacuugaugacccccaacc

SEQ ID NO: 1965846 - RNA, 23 nt, Human
cacuugaguggagguuuauaguu

SEQ ID NO: 1965847 - RNA, 13 nt, Human
cacuugcagacuc

SEQ ID NO: 1965848 - RNA, 15 nt, Human
cacuuggucugugag

SEQ ID NO: 1965849 - RNA, 18 nt, Human
cacuuucuagccagagga

SEQ ID NO: 1965850 - RNA, 20 nt, Human
cacuuucuagccagaggaga

SEQ ID NO: 1965851 - RNA, 19 nt, Human
cacuuucuagccagaggag

SEQ ID NO: 1965852 - RNA, 17 nt, Human
cacuugggggcucagca

SEQ ID NO: 1965853 - RNA, 18 nt, Human
cacuugggggcucagcaa

SEQ ID NO: 1965854 - RNA, 19 nt, Human
cacuugggggcucagcaag

SEQ ID NO: 1965855 - RNA, 19 nt, Human
cacuuggguccaggccuac

SEQ ID NO: 1965856 - RNA, 20 nt, Human
cacuugggggcucagcaagg

SEQ ID NO: 1965857 - RNA, 21 nt, Human
cacuugggggcucagcaaggc

SEQ ID NO: 1965858 - RNA, 22 nt, Human
cacuuggaguuugcauucuuau

SEQ ID NO: 1965859 - RNA, 22 nt, Human
cacuugccgcgucgcccuccca

SEQ ID NO: 1965860 - RNA, 24 nt, Human
cacuugcagacucuacagaggcca

SEQ ID NO: 1965861 - RNA, 14 nt, Human
cacuugcagacucu

SEQ ID NO: 1965862 - RNA, 18 nt, Human
cacuugcagacucuacag

SEQ ID NO: 1965863 - RNA, 19 nt, Human
cacuugcagacucuacaga

SEQ ID NO: 1965864 - RNA, 22 nt, Human
cacuugcagacucuacagaggc

SEQ ID NO: 1965865 - RNA, 16 nt, Human
cacuucccuacaugga

SEQ ID NO: 1965866 - RNA, 20 nt, Human
cacuuccaggggaaccugcc

SEQ ID NO: 1965867 - RNA, 20 nt, Human
cacuuccauaaucuggacuc

SEQ ID NO: 1965868 - RNA, 12 nt, Human
cacuuccagggg

SEQ ID NO: 1965869 - RNA, 14 nt, Human
cacuuccaggggaa

SEQ ID NO: 1965870 - RNA, 17 nt, Human
cacuuccaggggaaccu

SEQ ID NO: 1965871 - RNA, 17 nt, Human
cacuuccgucacauccc

SEQ ID NO: 1965872 - RNA, 17 nt, Human
cacuucugacucuuccc

SEQ ID NO: 1965873 - RNA, 22 nt, Human
cacuucugccauauucuguugg

SEQ ID NO: 1965874 - RNA, 13 nt, Human
cacuucugccaga

SEQ ID NO: 1965875 - RNA, 17 nt, Human
cacuucugccagauguc

SEQ ID NO: 1965876 - RNA, 23 nt, Human
cacuucgggaggucgaggcagga

SEQ ID NO: 1965877 - RNA, 21 nt, Human
cacuucgggaggucgaggcag

SEQ ID NO: 1965878 - RNA, 12 nt, Human
cacuuccuugcc

SEQ ID NO: 1965879 - RNA, 20 nt, Human
cacuucuaaguugaguauau

SEQ ID NO: 1965880 - RNA, 21 nt, Human
cacuucuaaguugaguauauu

SEQ ID NO: 1965881 - RNA, 23 nt, Human
cacuucuaaguugaguauauuau

SEQ ID NO: 1965882 - RNA, 21 nt, Human
cacuucagcugacuuuucugu

SEQ ID NO: 1965883 - RNA, 12 nt, Human
cacuucagcuga

SEQ ID NO: 1965884 - RNA, 14 nt, Human
cacuucaggcucuu

SEQ ID NO: 1965885 - RNA, 15 nt, Human
cacuucaggcucuuc

SEQ ID NO: 1965886 - RNA, 16 nt, Human
cacuucaggcucuucu

SEQ ID NO: 1965887 - RNA, 20 nt, Human
cacuucaggcucuucuccuu

SEQ ID NO: 1965888 - RNA, 13 nt, Human
cacuucauugaaa

SEQ ID NO: 1965889 - RNA, 23 nt, Human
cacuucaggcucuucuccuuuca

SEQ ID NO: 1965890 - RNA, 17 nt, Human
cacuucagggcagauuu

SEQ ID NO: 1965891 - RNA, 18 nt, Human
cacuucagggcagauuuu

SEQ ID NO: 1965892 - RNA, 19 nt, Human
cacuucagggcagauuuua

SEQ ID NO: 1965893 - RNA, 23 nt, Human
cacuucagggcagauuuuaguuu

SEQ ID NO: 1965894 - RNA, 21 nt, Human
cacuucagggcagauuuuagu

SEQ ID NO: 1965895 - RNA, 22 nt, Human
cacuucagggcagauuuuaguu

SEQ ID NO: 1965896 - RNA, 13 nt, Human
cacuucaaaacaa

SEQ ID NO: 1965897 - RNA, 22 nt, Human
cacugugcugagucugaaggcu

SEQ ID NO: 1965898 - RNA, 21 nt, Human
cacugugcugagucugaaggc

SEQ ID NO: 1965899 - RNA, 20 nt, Human
cacugugcugagucugaagg

SEQ ID NO: 1965900 - RNA, 17 nt, Human
cacugugcugagucuga

SEQ ID NO: 1965901 - RNA, 21 nt, Human
cacuguggaacugcuauuuuc

SEQ ID NO: 1965902 - RNA, 15 nt, Human
cacugugcugagucu

SEQ ID NO: 1965903 - RNA, 13 nt, Human
cacugugcugagu

SEQ ID NO: 1965904 - RNA, 22 nt, Human
cacugugcguggggcucccgcc

SEQ ID NO: 1965905 - RNA, 15 nt, Human
cacugugccaugugc

SEQ ID NO: 1965906 - RNA, 16 nt, Human
cacugugccaugugcc

SEQ ID NO: 1965907 - RNA, 18 nt, Human
cacugugccaugugccag

SEQ ID NO: 1965908 - RNA, 22 nt, Human
cacuguucucugcccuccaaga

SEQ ID NO: 1965909 - RNA, 21 nt, Human
cacuguucucugcccuccaag

SEQ ID NO: 1965910 - RNA, 19 nt, Human
cacuguucucugcccucca

SEQ ID NO: 1965911 - RNA, 17 nt, Human
cacuguucucugcccuc

SEQ ID NO: 1965912 - RNA, 16 nt, Human
cacuguucucugcccu

SEQ ID NO: 1965913 - RNA, 15 nt, Human
cacuguucucugccc

SEQ ID NO: 1965914 - RNA, 14 nt, Human
cacuguucucugcc

SEQ ID NO: 1965915 - RNA, 13 nt, Human
cacuguucucugc

SEQ ID NO: 1965916 - RNA, 18 nt, Human
cacuguguauauuugauu

SEQ ID NO: 1965917 - RNA, 20 nt, Human
cacuguguauauuugauuua

SEQ ID NO: 1965918 - RNA, 21 nt, Human
cacuguguauauuugauuuau

SEQ ID NO: 1965919 - RNA, 14 nt, Human
cacuguguauuguu

SEQ ID NO: 1965920 - RNA, 21 nt, Human
cacuguuaucauuuuuuccug

SEQ ID NO: 1965921 - RNA, 14 nt, Human
cacuguggugucug

SEQ ID NO: 1965922 - RNA, 15 nt, Human
cacuguggugucugu

SEQ ID NO: 1965923 - RNA, 13 nt, Human
cacuguguauauu

SEQ ID NO: 1965924 - RNA, 14 nt, Human
cacuguguauauuu

SEQ ID NO: 1965925 - RNA, 15 nt, Human
cacuguguauauuug

SEQ ID NO: 1965926 - RNA, 16 nt, Human
cacuguguauauuuga

SEQ ID NO: 1965927 - RNA, 17 nt, Human
cacuguguauauuugau

SEQ ID NO: 1965928 - RNA, 18 nt, Human
cacuguccuccaagccag

SEQ ID NO: 1965929 - RNA, 17 nt, Human
cacuguccuccaagcca

SEQ ID NO: 1965930 - RNA, 14 nt, Human
cacuguccuccaag

SEQ ID NO: 1965931 - RNA, 16 nt, Human
cacuguccuauuauau

SEQ ID NO: 1965932 - RNA, 10 nt, Human
cacugucugu

SEQ ID NO: 1965933 - RNA, 13 nt, Human
cacugucugucug

SEQ ID NO: 1965934 - RNA, 18 nt, Human
cacugucugucuggucca

SEQ ID NO: 1965935 - RNA, 13 nt, Human
cacugugaagagc

SEQ ID NO: 1965936 - RNA, 13 nt, Human
cacugugaagaga

SEQ ID NO: 1965937 - RNA, 14 nt, Human
cacugugccaugug

SEQ ID NO: 1965938 - RNA, 17 nt, Human
cacuggccccugagauc

SEQ ID NO: 1965939 - RNA, 18 nt, Human
cacuguacuugcucuuga

SEQ ID NO: 1965940 - RNA, 15 nt, Human
cacuguacuugcucu

SEQ ID NO: 1965941 - RNA, 19 nt, Human
cacuguacuugcucuugau

SEQ ID NO: 1965942 - RNA, 20 nt, Human
cacuguacccagucucaaag

SEQ ID NO: 1965943 - RNA, 23 nt, Human
cacugcaaccuucgccaccuggg

SEQ ID NO: 1965944 - RNA, 14 nt, Human
cacugcaaccuucg

SEQ ID NO: 1965945 - RNA, 22 nt, Human
cacugcaaccuucgccaccugg

SEQ ID NO: 1965946 - RNA, 18 nt, Human
cacugcacagugcaucuc

SEQ ID NO: 1965947 - RNA, 19 nt, Human
cacugcacagugcaucuca

SEQ ID NO: 1965948 - RNA, 21 nt, Human
cacugcacagugcaucucagc

SEQ ID NO: 1965949 - RNA, 22 nt, Human
cacugcacagugcaucucagcc

SEQ ID NO: 1965950 - RNA, 23 nt, Human
cacugcaaccuccgccucuuggg

SEQ ID NO: 1965951 - RNA, 14 nt, Human
cacugcaaccuccg

SEQ ID NO: 1965952 - RNA, 16 nt, Human
cacugcaaccuccgcc

SEQ ID NO: 1965953 - RNA, 22 nt, Human
cacugauuauaguacugacaga

SEQ ID NO: 1965954 - RNA, 22 nt, Human
cacugcaaaaccagguuuuguu

SEQ ID NO: 1965955 - RNA, 13 nt, Human
cacugcaaccucc

SEQ ID NO: 1965956 - RNA, 14 nt, Human
cacugauccagccc

SEQ ID NO: 1965957 - RNA, 15 nt, Human
cacugauccagcccu

SEQ ID NO: 1965958 - RNA, 16 nt, Human
cacugauccagcccug

SEQ ID NO: 1965959 - RNA, 16 nt, Human
cacugauauauuuaaa

SEQ ID NO: 1965960 - RNA, 14 nt, Human
cacugaugggcaac

SEQ ID NO: 1965961 - RNA, 18 nt, Human
cacugaugggcaaccccc

SEQ ID NO: 1965962 - RNA, 24 nt, Human
cacugaugggcaacccccagccug

SEQ ID NO: 1965963 - RNA, 23 nt, Human
cacugagaccccaggcuguuagg

SEQ ID NO: 1965964 - RNA, 18 nt, Human
cacugagagagcgcagcc

SEQ ID NO: 1965965 - RNA, 17 nt, Human
cacugagagccuuuuug

SEQ ID NO: 1965966 - RNA, 21 nt, Human
cacugagagccuuuuugaaag

SEQ ID NO: 1965967 - RNA, 23 nt, Human
cacugagacagcccgggcucugc

SEQ ID NO: 1965968 - RNA, 19 nt, Human
cacucuggcagcucagaga

SEQ ID NO: 1965969 - RNA, 17 nt, Human
cacucuggcagcucaga

SEQ ID NO: 1965970 - RNA, 16 nt, Human
cacucuggcagcucag

SEQ ID NO: 1965971 - RNA, 15 nt, Human
cacucuggcagcuca

SEQ ID NO: 1965972 - RNA, 21 nt, Human
cacucuggcagcucagagagg

SEQ ID NO: 1965973 - RNA, 20 nt, Human
cacucuggcagcucagagag

SEQ ID NO: 1965974 - RNA, 15 nt, Human
cacucugggcuccag

SEQ ID NO: 1965975 - RNA, 14 nt, Human
cacucugggcucca

SEQ ID NO: 1965976 - RNA, 23 nt, Human
cacucuggcagcucagagagggu

SEQ ID NO: 1965977 - RNA, 17 nt, Human
cacucugggcuccagag

SEQ ID NO: 1965978 - RNA, 16 nt, Human
cacucugggcuccaga

SEQ ID NO: 1965979 - RNA, 15 nt, Human
cacucugucgcccag

SEQ ID NO: 1965980 - RNA, 16 nt, Human
cacucugucgcccagu

SEQ ID NO: 1965981 - RNA, 19 nt, Human
cacucugucgcccagucug

SEQ ID NO: 1965982 - RNA, 23 nt, Human
cacugacauuguuggccaaagcc

SEQ ID NO: 1965983 - RNA, 18 nt, Human
cacucugucgagccuggg

SEQ ID NO: 1965984 - RNA, 12 nt, Human
cacugacucugg

SEQ ID NO: 1965985 - RNA, 13 nt, Human
cacugacucugga

SEQ ID NO: 1965986 - RNA, 14 nt, Human
cacugacucuggaa

SEQ ID NO: 1965987 - RNA, 22 nt, Human
cacugagacagcccgggcucug

SEQ ID NO: 1965988 - RNA, 19 nt, Human
cacugagacagcccgggcu

SEQ ID NO: 1965989 - RNA, 17 nt, Human
cacugagacagcccggg

SEQ ID NO: 1965990 - RNA, 14 nt, Human
cacugagacagccc

SEQ ID NO: 1965991 - RNA, 13 nt, Human
cacugagacagcc

SEQ ID NO: 1965992 - RNA, 12 nt, Human
cacugagacagc

SEQ ID NO: 1965993 - RNA, 20 nt, Human
cacugacugaacuguaaugu

SEQ ID NO: 1965994 - RNA, 13 nt, Human
cacugcccacugg

SEQ ID NO: 1965995 - RNA, 17 nt, Human
cacugcacguuuucauc

SEQ ID NO: 1965996 - RNA, 18 nt, Human
cacugcacguuuucaucu

SEQ ID NO: 1965997 - RNA, 16 nt, Human
cacugccucuuccucc

SEQ ID NO: 1965998 - RNA, 23 nt, Human
cacugccuccccaaggcccccug

SEQ ID NO: 1965999 - RNA, 14 nt, Human
cacugcaccgggcc

SEQ ID NO: 1966000 - RNA, 15 nt, Human
cacugcaccgggcca

SEQ ID NO: 1966001 - RNA, 23 nt, Human
cacugcacagugcaucucagccc

SEQ ID NO: 1966002 - RNA, 16 nt, Human
cacugcaccgggccac

SEQ ID NO: 1966003 - RNA, 18 nt, Human
cacugcaccgggccacag

SEQ ID NO: 1966004 - RNA, 19 nt, Human
cacugcaccgggccacaga

SEQ ID NO: 1966005 - RNA, 18 nt, Human
cacugcacuauagccuag

SEQ ID NO: 1966006 - RNA, 18 nt, Human
cacugcuaagaauauuug

SEQ ID NO: 1966007 - RNA, 20 nt, Human
cacugccuucgauacaccgg

SEQ ID NO: 1966008 - RNA, 22 nt, Human
cacugccuucgauacaccgggc

SEQ ID NO: 1966009 - RNA, 16 nt, Human
cacugccugccuuaag

SEQ ID NO: 1966010 - RNA, 20 nt, Human
cacugccugccuuaagugag

SEQ ID NO: 1966011 - RNA, 14 nt, Human
cacugccugccuua

SEQ ID NO: 1966012 - RNA, 15 nt, Human
cacugccugccuuaa

SEQ ID NO: 1966013 - RNA, 12 nt, Human
cacugcucuggu

SEQ ID NO: 1966014 - RNA, 20 nt, Human
cacugcucugaugaagagga

SEQ ID NO: 1966015 - RNA, 15 nt, Human
cacugcucucaccuu

SEQ ID NO: 1966016 - RNA, 23 nt, Human
cacugcucucaccuugguuccug

SEQ ID NO: 1966017 - RNA, 15 nt, Human
cacugcugcccagcc

SEQ ID NO: 1966018 - RNA, 17 nt, Human
cacugcugcccagccuc

SEQ ID NO: 1966019 - RNA, 13 nt, Human
cacugcucucacc

SEQ ID NO: 1966020 - RNA, 14 nt, Human
cacugcucucaccu

SEQ ID NO: 1966021 - RNA, 16 nt, Human
cacugcuuccagugag

SEQ ID NO: 1966022 - RNA, 15 nt, Human
cacugcuuccaguga

SEQ ID NO: 1966023 - RNA, 14 nt, Human
cacugcuuccagug

SEQ ID NO: 1966024 - RNA, 13 nt, Human
cacugcuuaacuu

SEQ ID NO: 1966025 - RNA, 12 nt, Human
cacugcuggcug

SEQ ID NO: 1966026 - RNA, 13 nt, Human
cacugcuggcugc

SEQ ID NO: 1966027 - RNA, 14 nt, Human
cacugcuggcugcc

SEQ ID NO: 1966028 - RNA, 15 nt, Human
cacugcuggcugccu

SEQ ID NO: 1966029 - RNA, 16 nt, Human
cacugcuggcugccuu

SEQ ID NO: 1966030 - RNA, 21 nt, Human
cacugcuggcugccuuagaac

SEQ ID NO: 1966031 - RNA, 21 nt, Human
cacugcuuccagugaggcucu

SEQ ID NO: 1966032 - RNA, 20 nt, Human
cacugcuuccagugaggcuc

SEQ ID NO: 1966033 - RNA, 19 nt, Human
cacugcuuccagugaggcu

SEQ ID NO: 1966034 - RNA, 18 nt, Human
cacugcuuccagugaggc

SEQ ID NO: 1966035 - RNA, 22 nt, Human
cacugcuuccagugaggcucug

SEQ ID NO: 1966036 - RNA, 20 nt, Human
cacugcuuuuggucugugug

SEQ ID NO: 1966037 - RNA, 17 nt, Human
cacuggaacacuaauga

SEQ ID NO: 1966038 - RNA, 21 nt, Human
cacugcuuuuggucuguguga

SEQ ID NO: 1966039 - RNA, 18 nt, Human
cacuggacucaccucccc

SEQ ID NO: 1966040 - RNA, 15 nt, Human
cacuggacucaccuc

SEQ ID NO: 1966041 - RNA, 18 nt, Human
cacuggcaaugguaguuu

SEQ ID NO: 1966042 - RNA, 17 nt, Human
cacuggccacaguuguu

SEQ ID NO: 1966043 - RNA, 15 nt, Human
aaaaaauauuuuccu

SEQ ID NO: 1966044 - RNA, 12 nt, Human
aaaaaauaucua

SEQ ID NO: 1966045 - RNA, 20 nt, Human
aaaaaaugcugaacauugca

SEQ ID NO: 1966046 - RNA, 22 nt, Human
aaaaaaugcugaacauugcaua

SEQ ID NO: 1966047 - RNA, 22 nt, Human
aaaaaccguguuugucucuucu

SEQ ID NO: 1966048 - RNA, 18 nt, Human
aaaaacagauuuggaaag

SEQ ID NO: 1966049 - RNA, 18 nt, Human
aaaaacucaaccaaaugg

SEQ ID NO: 1966050 - RNA, 22 nt, Human
aaaaacucaaccaaaugguaca

SEQ ID NO: 1966051 - RNA, 21 nt, Human
aaaaaauucagugaugugccu

SEQ ID NO: 1966052 - RNA, 14 nt, Human
auuaaauauauuuu

SEQ ID NO: 1966053 - RNA, 15 nt, Human
auuaaaucauacucc

SEQ ID NO: 1966054 - RNA, 18 nt, Human
auuaaaugaacaucuaua

SEQ ID NO: 1966055 - RNA, 18 nt, Human
auguuuucaaauguucuc

SEQ ID NO: 1966056 - RNA, 12 nt, Human
auguuuucagcu

SEQ ID NO: 1966057 - RNA, 19 nt, Human
auguuuucagcuaggaaca

SEQ ID NO: 1966058 - RNA, 20 nt, Human
auguuugcugaacauuggag

SEQ ID NO: 1966059 - RNA, 17 nt, Human
auguuuuagcacagcgu

SEQ ID NO: 1966060 - RNA, 22 nt, Human
auguuuuaucguccagugacuu

SEQ ID NO: 1966061 - RNA, 12 nt, Human
auguuuucaaau

SEQ ID NO: 1966062 - RNA, 13 nt, Human
auguuuucaaaug

SEQ ID NO: 1966063 - RNA, 15 nt, Human
auguuuucaaaugga

SEQ ID NO: 1966064 - RNA, 15 nt, Human
auguuuucaaauguu

SEQ ID NO: 1966065 - RNA, 22 nt, Human
auguuugccucugccucugaca

SEQ ID NO: 1966066 - RNA, 15 nt, Human
auguuugccuucugc

SEQ ID NO: 1966067 - RNA, 19 nt, Human
auguuugccucugccucug

SEQ ID NO: 1966068 - RNA, 13 nt, Human
auguucugggaca

SEQ ID NO: 1966069 - RNA, 13 nt, Human
auguucugcuuuc

SEQ ID NO: 1966070 - RNA, 11 nt, Human
auguucuggga

SEQ ID NO: 1966071 - RNA, 12 nt, Human
auguucugggac

SEQ ID NO: 1966072 - RNA, 20 nt, Human
auguucuccagucauuaugu

SEQ ID NO: 1966073 - RNA, 17 nt, Human
auguucuaagaagugaa

SEQ ID NO: 1966074 - RNA, 21 nt, Human
augugugauucaaugccucug

SEQ ID NO: 1966075 - RNA, 13 nt, Human
augugugcccagc

SEQ ID NO: 1966076 - RNA, 14 nt, Human
augugugcccagcu

SEQ ID NO: 1966077 - RNA, 15 nt, Human
augugugcccagcuu

SEQ ID NO: 1966078 - RNA, 20 nt, Human
augugggcuaguugggcuuc

SEQ ID NO: 1966079 - RNA, 16 nt, Human
augugugagugcaugu

SEQ ID NO: 1966080 - RNA, 11 nt, Human
augugaacagu

SEQ ID NO: 1966081 - RNA, 21 nt, Human
augugaacaguuguguuugaa

SEQ ID NO: 1966082 - RNA, 23 nt, Human
augugaacaguuguguuugaagc

SEQ ID NO: 1966083 - RNA, 22 nt, Human
augugaaacuggauuaaacuua

SEQ ID NO: 1966084 - RNA, 15 nt, Human
augugaaacauguuu

SEQ ID NO: 1966085 - RNA, 14 nt, Human
augucuuuucuugc

SEQ ID NO: 1966086 - RNA, 13 nt, Human
augucuuccugga

SEQ ID NO: 1966087 - RNA, 23 nt, Human
augucaaaaguagaacuuuguau

SEQ ID NO: 1966088 - RNA, 15 nt, Human
augucaaaaguagaa

SEQ ID NO: 1966089 - RNA, 17 nt, Human
augucaaaaguagaacu

SEQ ID NO: 1966090 - RNA, 20 nt, Human
augucaaaaguagaacuuug

SEQ ID NO: 1966091 - RNA, 22 nt, Human
augucaaaaguagaacuuugua

SEQ ID NO: 1966092 - RNA, 21 nt, Human
augugaauuacuaacuucuaa

SEQ ID NO: 1966093 - RNA, 22 nt, Human
augugaauuacuaacuucuaaa

SEQ ID NO: 1966094 - RNA, 13 nt, Human
augugaauuacua

SEQ ID NO: 1966095 - RNA, 14 nt, Human
augugaauuacuaa

SEQ ID NO: 1966096 - RNA, 16 nt, Human
augugaauuacuaacu

SEQ ID NO: 1966097 - RNA, 17 nt, Human
augugaauuacuaacuu

SEQ ID NO: 1966098 - RNA, 18 nt, Human
augugaauuacuaacuuc

SEQ ID NO: 1966099 - RNA, 20 nt, Human
augugaauuacuaacuucua

SEQ ID NO: 1966100 - RNA, 20 nt, Human
augugaaggaccuucacucu

SEQ ID NO: 1966101 - RNA, 18 nt, Human
augguaugcacaauucca

SEQ ID NO: 1966102 - RNA, 19 nt, Human
augguaugcacaauuccau

SEQ ID NO: 1966103 - RNA, 14 nt, Human
augguauccagaau

SEQ ID NO: 1966104 - RNA, 19 nt, Human
auggucaccaaaucagcug

SEQ ID NO: 1966105 - RNA, 15 nt, Human
auggucauauuuaaa

SEQ ID NO: 1966106 - RNA, 17 nt, Human
auguaauuaaguacuau

SEQ ID NO: 1966107 - RNA, 15 nt, Human
auguaauuaaguacu

SEQ ID NO: 1966108 - RNA, 15 nt, Human
auggucggaaaacau

SEQ ID NO: 1966109 - RNA, 12 nt, Human
auguauuuugug

SEQ ID NO: 1966110 - RNA, 13 nt, Human
auguauuuuguga

SEQ ID NO: 1966111 - RNA, 14 nt, Human
auguauuuugugag

SEQ ID NO: 1966112 - RNA, 15 nt, Human
auguauuuugugagu

SEQ ID NO: 1966113 - RNA, 16 nt, Human
auguauuuugugaguu

SEQ ID NO: 1966114 - RNA, 17 nt, Human
auguauuuugugaguuu

SEQ ID NO: 1966115 - RNA, 19 nt, Human
auguauuuugugaguuugu

SEQ ID NO: 1966116 - RNA, 20 nt, Human
auguauuuugugaguuuguu

SEQ ID NO: 1966117 - RNA, 23 nt, Human
auguauuuugugaguuuguuucu

SEQ ID NO: 1966118 - RNA, 17 nt, Human
augucaaaaauauuuag

SEQ ID NO: 1966119 - RNA, 23 nt, Human
augucaaaaauauuuaggaauuu

SEQ ID NO: 1966120 - RNA, 23 nt, Human
auguaauuaaguacuauguauca

SEQ ID NO: 1966121 - RNA, 21 nt, Human
auguauucauauuuguacuuu

SEQ ID NO: 1966122 - RNA, 18 nt, Human
auguauucuguaaaagaa

SEQ ID NO: 1966123 - RNA, 17 nt, Human
augcacagaguuguuac

SEQ ID NO: 1966124 - RNA, 18 nt, Human
augcacagaguuguuaca

SEQ ID NO: 1966125 - RNA, 15 nt, Human
augcauauauauaug

SEQ ID NO: 1966126 - RNA, 16 nt, Human
augcauauauauaugu

SEQ ID NO: 1966127 - RNA, 17 nt, Human
augcacaaacagaggcc

SEQ ID NO: 1966128 - RNA, 16 nt, Human
augcacaaacagaggc

SEQ ID NO: 1966129 - RNA, 16 nt, Human
augcacagaguuguua

SEQ ID NO: 1966130 - RNA, 19 nt, Human
augccucucucaggccaaa

SEQ ID NO: 1966131 - RNA, 15 nt, Human
augcaucuuugaugu

SEQ ID NO: 1966132 - RNA, 16 nt, Human
augcaucuuugaugug

SEQ ID NO: 1966133 - RNA, 19 nt, Human
augcaucuuugauguguug

SEQ ID NO: 1966134 - RNA, 21 nt, Human
augcaucuuugauguguuguu

SEQ ID NO: 1966135 - RNA, 16 nt, Human
augcaugaaguaauau

SEQ ID NO: 1966136 - RNA, 17 nt, Human
augccucucucaggcca

SEQ ID NO: 1966137 - RNA, 20 nt, Human
augcauauauauaugugugu

SEQ ID NO: 1966138 - RNA, 16 nt, Human
augcauauuauuuuau

SEQ ID NO: 1966139 - RNA, 12 nt, Human
augcaucuuuga

SEQ ID NO: 1966140 - RNA, 13 nt, Human
augcaucuuugau

SEQ ID NO: 1966141 - RNA, 20 nt, Human
augcaucuggcucaccgggu

SEQ ID NO: 1966142 - RNA, 13 nt, Human
augcauauuacug

SEQ ID NO: 1966143 - RNA, 14 nt, Human
augcauauuacugu

SEQ ID NO: 1966144 - RNA, 17 nt, Human
augaugccaugaggaac

SEQ ID NO: 1966145 - RNA, 16 nt, Human
augaugccaugaggaa

SEQ ID NO: 1966146 - RNA, 15 nt, Human
augcacaaacagagg

SEQ ID NO: 1966147 - RNA, 17 nt, Human
augcaauuuuucuuucu

SEQ ID NO: 1966148 - RNA, 13 nt, Human
augauguuuuuaa

SEQ ID NO: 1966149 - RNA, 17 nt, Human
augauguuuuuaaaauc

SEQ ID NO: 1966150 - RNA, 17 nt, Human
augauuaaaaauaucaa

SEQ ID NO: 1966151 - RNA, 22 nt, Human
augauguuuuuaaaaucuuauu

SEQ ID NO: 1966152 - RNA, 14 nt, Human
augauuaaaaauau

SEQ ID NO: 1966153 - RNA, 18 nt, Human
augauguuuuuaaaaucu

SEQ ID NO: 1966154 - RNA, 19 nt, Human
augauguuuuuaaaaucuu

SEQ ID NO: 1966155 - RNA, 20 nt, Human
augauguuuuuaaaaucuua

SEQ ID NO: 1966156 - RNA, 21 nt, Human
augauguuuuuaaaaucuuau

SEQ ID NO: 1966157 - RNA, 16 nt, Human
augaugcucuuuccca

SEQ ID NO: 1966158 - RNA, 24 nt, Human
augauguuuuccaugaguccccug

SEQ ID NO: 1966159 - RNA, 19 nt, Human
augauguuaguuuuccuua

SEQ ID NO: 1966160 - RNA, 17 nt, Human
augauguuaguuuuccu

SEQ ID NO: 1966161 - RNA, 16 nt, Human
auggcuguggagugug

SEQ ID NO: 1966162 - RNA, 19 nt, Human
auggcugugccucugccug

SEQ ID NO: 1966163 - RNA, 20 nt, Human
auggcugugccucugccugu

SEQ ID NO: 1966164 - RNA, 18 nt, Human
auggaaacagaggaccag

SEQ ID NO: 1966165 - RNA, 20 nt, Human
auggaaacagaggaccagca

SEQ ID NO: 1966166 - RNA, 12 nt, Human
augcugcccugu

SEQ ID NO: 1966167 - RNA, 16 nt, Human
augcugccccugccuu

SEQ ID NO: 1966168 - RNA, 12 nt, Human
augcuuguacau

SEQ ID NO: 1966169 - RNA, 13 nt, Human
augcuuguacaua

SEQ ID NO: 1966170 - RNA, 14 nt, Human
augcuuguacauaa

SEQ ID NO: 1966171 - RNA, 15 nt, Human
auggauuuccagcca

SEQ ID NO: 1966172 - RNA, 18 nt, Human
auggcugugccucugccu

SEQ ID NO: 1966173 - RNA, 23 nt, Human
auggauuggguaucaaaaugaau

SEQ ID NO: 1966174 - RNA, 16 nt, Human
auggaggaaaaccaag

SEQ ID NO: 1966175 - RNA, 22 nt, Human
auggaggaaaaccaagccgugg

SEQ ID NO: 1966176 - RNA, 18 nt, Human
auggaggaagaacugaaa

SEQ ID NO: 1966177 - RNA, 20 nt, Human
auggaggaagaacugaaagg

SEQ ID NO: 1966178 - RNA, 22 nt, Human
auggaggaccacgucuauuuca

SEQ ID NO: 1966179 - RNA, 17 nt, Human
auggaggagaguguuua

SEQ ID NO: 1966180 - RNA, 16 nt, Human
augcucuuuacuucau

SEQ ID NO: 1966181 - RNA, 12 nt, Human
augcucuuuccc

SEQ ID NO: 1966182 - RNA, 15 nt, Human
augcucuuucccacc

SEQ ID NO: 1966183 - RNA, 21 nt, Human
augcucuuucccacccagccu

SEQ ID NO: 1966184 - RNA, 22 nt, Human
augcucuuucccacccagccug

SEQ ID NO: 1966185 - RNA, 23 nt, Human
augcucuuucccacccagccugg

SEQ ID NO: 1966186 - RNA, 14 nt, Human
augcugaaaauugc

SEQ ID NO: 1966187 - RNA, 22 nt, Human
augcugaaaauugccuuucugu

SEQ ID NO: 1966188 - RNA, 17 nt, Human
augcugaacauugcaua

SEQ ID NO: 1966189 - RNA, 23 nt, Human
augcugaacauugcauauaacuu

SEQ ID NO: 1966190 - RNA, 11 nt, Human
augcugccccu

SEQ ID NO: 1966191 - RNA, 15 nt, Human
augcugccccugccu

SEQ ID NO: 1966192 - RNA, 11 nt, Human
augcugcccug

SEQ ID NO: 1966193 - RNA, 23 nt, Human
augaccuuucaauaggaaaaacu

SEQ ID NO: 1966194 - RNA, 22 nt, Human
augaccuuucaauaggaaaaac

SEQ ID NO: 1966195 - RNA, 21 nt, Human
augaccuuucaauaggaaaaa

SEQ ID NO: 1966196 - RNA, 20 nt, Human
augaggcagcacgugcacaa

SEQ ID NO: 1966197 - RNA, 17 nt, Human
augaagguuuuuguaaa

SEQ ID NO: 1966198 - RNA, 18 nt, Human
augaagguuuuuguaaag

SEQ ID NO: 1966199 - RNA, 22 nt, Human
augaagcuuuuaugugaaacau

SEQ ID NO: 1966200 - RNA, 19 nt, Human
augaaguuuuuuuuauaca

SEQ ID NO: 1966201 - RNA, 21 nt, Human
augaagguuuuuguaaagauu

SEQ ID NO: 1966202 - RNA, 23 nt, Human
augaaaaaauauauaucaaauau

SEQ ID NO: 1966203 - RNA, 19 nt, Human
augaaagacuguacaaagu

SEQ ID NO: 1966204 - RNA, 17 nt, Human
augaaagacuguacaaa

SEQ ID NO: 1966205 - RNA, 16 nt, Human
augaaagacuguacaa

SEQ ID NO: 1966206 - RNA, 13 nt, Human
augaaagacugua

SEQ ID NO: 1966207 - RNA, 14 nt, Human
aucuauauuuuaca

SEQ ID NO: 1966208 - RNA, 17 nt, Human
aucuauauuuuacauaa

SEQ ID NO: 1966209 - RNA, 21 nt, Human
aucuauauuuuacauaaauuu

SEQ ID NO: 1966210 - RNA, 21 nt, Human
aucucccccagccccauccuc

SEQ ID NO: 1966211 - RNA, 22 nt, Human
aucuggaccccaucugugaaua

SEQ ID NO: 1966212 - RNA, 22 nt, Human
aucugcuuuuuaaagaaugcuc

SEQ ID NO: 1966213 - RNA, 15 nt, Human
aucuggacuccucug

SEQ ID NO: 1966214 - RNA, 16 nt, Human
aucuggacuccucugu

SEQ ID NO: 1966215 - RNA, 17 nt, Human
aucuggacuccucuguc

SEQ ID NO: 1966216 - RNA, 18 nt, Human
aucuggacuccucugucc

SEQ ID NO: 1966217 - RNA, 19 nt, Human
aucuggacuccucugucca

SEQ ID NO: 1966218 - RNA, 18 nt, Human
aucuccuuuguauucugu

SEQ ID NO: 1966219 - RNA, 16 nt, Human
aucuccuuagaaaagc

SEQ ID NO: 1966220 - RNA, 16 nt, Human
aucucggcucacugca

SEQ ID NO: 1966221 - RNA, 15 nt, Human
aucucguauagaagu

SEQ ID NO: 1966222 - RNA, 19 nt, Human
aucucguauagaagucuuc

SEQ ID NO: 1966223 - RNA, 14 nt, Human
aucucggcucacug

SEQ ID NO: 1966224 - RNA, 15 nt, Human
aucucggcucacugc

SEQ ID NO: 1966225 - RNA, 17 nt, Human
aucucugcuuuggaaau

SEQ ID NO: 1966226 - RNA, 17 nt, Human
aucuugaauuguaagga

SEQ ID NO: 1966227 - RNA, 22 nt, Human
aucuugaaggaaaaauucaaua

SEQ ID NO: 1966228 - RNA, 18 nt, Human
aucuugaauaauguaaga

SEQ ID NO: 1966229 - RNA, 14 nt, Human
aucuucuuuauaau

SEQ ID NO: 1966230 - RNA, 18 nt, Human
aucuugaagacuuuucuu

SEQ ID NO: 1966231 - RNA, 17 nt, Human
aucuugaaggaaaaauu

SEQ ID NO: 1966232 - RNA, 18 nt, Human
aucuugaaggaaaaauuc

SEQ ID NO: 1966233 - RNA, 20 nt, Human
aucuugaaggaaaaauucaa

SEQ ID NO: 1966234 - RNA, 22 nt, Human
aucuucugaacuuggcgcugcc

SEQ ID NO: 1966235 - RNA, 16 nt, Human
auccagaaagaaaacu

SEQ ID NO: 1966236 - RNA, 10 nt, Human
auccagaaac

SEQ ID NO: 1966237 - RNA, 19 nt, Human
auccagaaacuuguucuuc

SEQ ID NO: 1966238 - RNA, 20 nt, Human
auccagaaacuuguucuucc

SEQ ID NO: 1966239 - RNA, 18 nt, Human
auccagaaagaaaacuug

SEQ ID NO: 1966240 - RNA, 15 nt, Human
auccagacccggcug

SEQ ID NO: 1966241 - RNA, 19 nt, Human
auccaggacccugccaggc

SEQ ID NO: 1966242 - RNA, 20 nt, Human
auccaggacccugccaggca

SEQ ID NO: 1966243 - RNA, 22 nt, Human
auccaggacccugccaggcaca

SEQ ID NO: 1966244 - RNA, 23 nt, Human
auccaggacccugccaggcacag

SEQ ID NO: 1966245 - RNA, 21 nt, Human
auccagaaacuuguucuucca

SEQ ID NO: 1966246 - RNA, 11 nt, Human
auccaggaccc

SEQ ID NO: 1966247 - RNA, 13 nt, Human
auccaggacccug

SEQ ID NO: 1966248 - RNA, 15 nt, Human
auccaggacccugcc

SEQ ID NO: 1966249 - RNA, 18 nt, Human
auccaggacccugccagg

SEQ ID NO: 1966250 - RNA, 15 nt, Human
aucccauuuaaaaaa

SEQ ID NO: 1966251 - RNA, 13 nt, Human
auccccaagccug

SEQ ID NO: 1966252 - RNA, 14 nt, Human
aucccauuuaaaaa

SEQ ID NO: 1966253 - RNA, 11 nt, Human
auccccuuccu

SEQ ID NO: 1966254 - RNA, 18 nt, Human
auccccuuccuaccaccc

SEQ ID NO: 1966255 - RNA, 15 nt, Human
auccccuguagagug

SEQ ID NO: 1966256 - RNA, 16 nt, Human
auccccaagccuggca

SEQ ID NO: 1966257 - RNA, 11 nt, Human
auccuccaggu

SEQ ID NO: 1966258 - RNA, 23 nt, Human
auccuccaggugcacaagcucca

SEQ ID NO: 1966259 - RNA, 12 nt, Human
auccuccagggc

SEQ ID NO: 1966260 - RNA, 13 nt, Human
auccuccagggcu

SEQ ID NO: 1966261 - RNA, 15 nt, Human
auccucccaccucag

SEQ ID NO: 1966262 - RNA, 15 nt, Human
aucggcauuuguuuc

SEQ ID NO: 1966263 - RNA, 20 nt, Human
auccucccaccucagccucc

SEQ ID NO: 1966264 - RNA, 18 nt, Human
auccucccaccucagccu

SEQ ID NO: 1966265 - RNA, 19 nt, Human
auccucccaccucagccuc

SEQ ID NO: 1966266 - RNA, 19 nt, Human
aucaccaacgucugugcca

SEQ ID NO: 1966267 - RNA, 18 nt, Human
aucaccaacgucugugcc

SEQ ID NO: 1966268 - RNA, 15 nt, Human
aucacauguggacuu

SEQ ID NO: 1966269 - RNA, 21 nt, Human
aucacagccucugaaaaccaa

SEQ ID NO: 1966270 - RNA, 13 nt, Human
aucacaggcuggg

SEQ ID NO: 1966271 - RNA, 14 nt, Human
aucacaggcugggc

SEQ ID NO: 1966272 - RNA, 15 nt, Human
aucacaggcugggcu

SEQ ID NO: 1966273 - RNA, 20 nt, Human
aucacaggcugggcugggca

SEQ ID NO: 1966274 - RNA, 21 nt, Human
aucacaggcugggcugggcac

SEQ ID NO: 1966275 - RNA, 22 nt, Human
aucacaggcugggcugggcacu

SEQ ID NO: 1966276 - RNA, 23 nt, Human
aucacaggcugggcugggcacug

SEQ ID NO: 1966277 - RNA, 21 nt, Human
aucaccgaaaacguggcugcu

SEQ ID NO: 1966278 - RNA, 19 nt, Human
aucaccgaaaacguggcug

SEQ ID NO: 1966279 - RNA, 14 nt, Human
aucaccgaaaacgu

SEQ ID NO: 1966280 - RNA, 19 nt, Human
aucagcacgauuucuguuu

SEQ ID NO: 1966281 - RNA, 20 nt, Human
aucagcacgauuucuguuua

SEQ ID NO: 1966282 - RNA, 23 nt, Human
aucagcacgauuucuguuuagau

SEQ ID NO: 1966283 - RNA, 14 nt, Human
aucagccugugcca

SEQ ID NO: 1966284 - RNA, 23 nt, Human
aucagcgccggccuccagaacuu

SEQ ID NO: 1966285 - RNA, 18 nt, Human
aucagccugcuccagcug

SEQ ID NO: 1966286 - RNA, 17 nt, Human
aucagccugcuccagcu

SEQ ID NO: 1966287 - RNA, 19 nt, Human
aucagccugcuccagcugu

SEQ ID NO: 1966288 - RNA, 20 nt, Human
aucagccugcuccagcuguu

SEQ ID NO: 1966289 - RNA, 16 nt, Human
aucaugugaaaucauu

SEQ ID NO: 1966290 - RNA, 14 nt, Human
aucaugugaaauca

SEQ ID NO: 1966291 - RNA, 18 nt, Human
aucaugugcgucagucca

SEQ ID NO: 1966292 - RNA, 22 nt, Human
aucagcuggucaaacaaacucu

SEQ ID NO: 1966293 - RNA, 18 nt, Human
aucagcugagccuucuga

SEQ ID NO: 1966294 - RNA, 15 nt, Human
aucaugugaaaucau

SEQ ID NO: 1966295 - RNA, 15 nt, Human
aguaucuugaagacu

SEQ ID NO: 1966296 - RNA, 12 nt, Human
aguaucuugaag

SEQ ID NO: 1966297 - RNA, 11 nt, Human
aguaucuugaa

SEQ ID NO: 1966298 - RNA, 14 nt, Human
aguaucugugaacu

SEQ ID NO: 1966299 - RNA, 16 nt, Human
aguaucuuuuuauuca

SEQ ID NO: 1966300 - RNA, 16 nt, Human
aguaugaauaaagaca

SEQ ID NO: 1966301 - RNA, 15 nt, Human
aguaugaggcauuug

SEQ ID NO: 1966302 - RNA, 16 nt, Human
aguaugaggcauuugu

SEQ ID NO: 1966303 - RNA, 12 nt, Human
agucaacaguac

SEQ ID NO: 1966304 - RNA, 19 nt, Human
agucaacaguacccugguu

SEQ ID NO: 1966305 - RNA, 23 nt, Human
agucaaauguaauguggcuucug

SEQ ID NO: 1966306 - RNA, 22 nt, Human
agucaaauguaauguggcuucu

SEQ ID NO: 1966307 - RNA, 14 nt, Human
aguaugguggcugg

SEQ ID NO: 1966308 - RNA, 19 nt, Human
agucaaacacuugugacuu

SEQ ID NO: 1966309 - RNA, 22 nt, Human
agucaaacacuugugacuuuug

SEQ ID NO: 1966310 - RNA, 17 nt, Human
aguaugggacuggccuc

SEQ ID NO: 1966311 - RNA, 20 nt, Human
aguaugggacuggccucugc

SEQ ID NO: 1966312 - RNA, 17 nt, Human
agugaagacuccagaaa

SEQ ID NO: 1966313 - RNA, 14 nt, Human
agugaagacaauga

SEQ ID NO: 1966314 - RNA, 16 nt, Human
agugaagacaaugacu

SEQ ID NO: 1966315 - RNA, 16 nt, Human
agugaagacuccagaa

SEQ ID NO: 1966316 - RNA, 15 nt, Human
agugaagacuccaga

SEQ ID NO: 1966317 - RNA, 20 nt, Human
agucugauucccaagcucug

SEQ ID NO: 1966318 - RNA, 14 nt, Human
agucugcauauauu

SEQ ID NO: 1966319 - RNA, 16 nt, Human
agucugauucccaagc

SEQ ID NO: 1966320 - RNA, 18 nt, Human
agucugauucccaagcuc

SEQ ID NO: 1966321 - RNA, 17 nt, Human
agucuggaaugcagugg

SEQ ID NO: 1966322 - RNA, 20 nt, Human
agugaacuugggccacugug

SEQ ID NO: 1966323 - RNA, 18 nt, Human
agucuggaaugcaguggu

SEQ ID NO: 1966324 - RNA, 21 nt, Human
aguccuggcaugggaaugaau

SEQ ID NO: 1966325 - RNA, 20 nt, Human
aguccuggcaugggaaugaa

SEQ ID NO: 1966326 - RNA, 22 nt, Human
aguccuggcaugggaaugaaug

SEQ ID NO: 1966327 - RNA, 15 nt, Human
agucugaaggcuggg

SEQ ID NO: 1966328 - RNA, 13 nt, Human
agucugaaggcug

SEQ ID NO: 1966329 - RNA, 16 nt, Human
agucugaaggcugggu

SEQ ID NO: 1966330 - RNA, 17 nt, Human
agucugaaggcuggguu

SEQ ID NO: 1966331 - RNA, 12 nt, Human
aguccuguaaug

SEQ ID NO: 1966332 - RNA, 18 nt, Human
agugaccauacuaauuau

SEQ ID NO: 1966333 - RNA, 18 nt, Human
agugaccauugcaugccg

SEQ ID NO: 1966334 - RNA, 16 nt, Human
aguggcuggaucugug

SEQ ID NO: 1966335 - RNA, 13 nt, Human
aguggcuccuccc

SEQ ID NO: 1966336 - RNA, 17 nt, Human
aguggcuccucccggug

SEQ ID NO: 1966337 - RNA, 21 nt, Human
aguggcuccucccggugccca

SEQ ID NO: 1966338 - RNA, 23 nt, Human
aguggcuuaaaacaacacucaca

SEQ ID NO: 1966339 - RNA, 18 nt, Human
aguggcgaaaucccugcu

SEQ ID NO: 1966340 - RNA, 21 nt, Human
aguggcgaaaucccugcucac

SEQ ID NO: 1966341 - RNA, 23 nt, Human
aguggcgaaaucccugcucacug

SEQ ID NO: 1966342 - RNA, 17 nt, Human
aguguauuuuuuuacua

SEQ ID NO: 1966343 - RNA, 18 nt, Human
aguguauuuuuuuacuaa

SEQ ID NO: 1966344 - RNA, 16 nt, Human
agugggagcugccugu

SEQ ID NO: 1966345 - RNA, 15 nt, Human
agugggagcugccug

SEQ ID NO: 1966346 - RNA, 14 nt, Human
agugggagcugccu

SEQ ID NO: 1966347 - RNA, 14 nt, Human
aguguauuaaauga

SEQ ID NO: 1966348 - RNA, 17 nt, Human
aguguauuaaaugaaca

SEQ ID NO: 1966349 - RNA, 18 nt, Human
aguuacacuaaaagguga

SEQ ID NO: 1966350 - RNA, 13 nt, Human
aguuaaucuauaa

SEQ ID NO: 1966351 - RNA, 16 nt, Human
aguuacagacaaagcg

SEQ ID NO: 1966352 - RNA, 14 nt, Human
aguuacagacaaag

SEQ ID NO: 1966353 - RNA, 12 nt, Human
aguuaaauaaau

SEQ ID NO: 1966354 - RNA, 13 nt, Human
aguuaagccuuug

SEQ ID NO: 1966355 - RNA, 23 nt, Human
aguuaaagggaagaaaacacugu

SEQ ID NO: 1966356 - RNA, 14 nt, Human
aguuaagccuuugg

SEQ ID NO: 1966357 - RNA, 18 nt, Human
aguuaaggagaaucaugu

SEQ ID NO: 1966358 - RNA, 21 nt, Human
aguuaaggagaaucauguuuc

SEQ ID NO: 1966359 - RNA, 22 nt, Human
aguuaaggagaaucauguuucu

SEQ ID NO: 1966360 - RNA, 18 nt, Human
aguuaaaagcacaaagga

SEQ ID NO: 1966361 - RNA, 21 nt, Human
aguuaaagaagacauuugcca

SEQ ID NO: 1966362 - RNA, 13 nt, Human
aguuaaagggaag

SEQ ID NO: 1966363 - RNA, 17 nt, Human
aguuaaagggaagaaaa

SEQ ID NO: 1966364 - RNA, 18 nt, Human
aguuaaagggaagaaaac

SEQ ID NO: 1966365 - RNA, 18 nt, Human
aguucauaaauuuauggu

SEQ ID NO: 1966366 - RNA, 20 nt, Human
aguucagguaacaggcagau

SEQ ID NO: 1966367 - RNA, 17 nt, Human
aguuacagacaaagcgu

SEQ ID NO: 1966368 - RNA, 19 nt, Human
aguucagguaacaggcaga

SEQ ID NO: 1966369 - RNA, 16 nt, Human
aguucauucagggccg

SEQ ID NO: 1966370 - RNA, 14 nt, Human
aguucauucauauu

SEQ ID NO: 1966371 - RNA, 15 nt, Human
aguucauucauauua

SEQ ID NO: 1966372 - RNA, 16 nt, Human
aguucauucauauuac

SEQ ID NO: 1966373 - RNA, 17 nt, Human
aguucauucauauuaca

SEQ ID NO: 1966374 - RNA, 23 nt, Human
aguucauucauauuacaauauuu

SEQ ID NO: 1966375 - RNA, 22 nt, Human
aguugaaaaucuuauaauuuaa

SEQ ID NO: 1966376 - RNA, 11 nt, Human
aguuguuugau

SEQ ID NO: 1966377 - RNA, 13 nt, Human
aguuguuugaugc

SEQ ID NO: 1966378 - RNA, 20 nt, Human
aguuguuugauucagacagc

SEQ ID NO: 1966379 - RNA, 16 nt, Human
aguuguguuugaagca

SEQ ID NO: 1966380 - RNA, 14 nt, Human
aguugaagacagag

SEQ ID NO: 1966381 - RNA, 23 nt, Human
aguugaaaaucuuauaauuuaaa

SEQ ID NO: 1966382 - RNA, 17 nt, Human
auaaaacuuuuuaaaau

SEQ ID NO: 1966383 - RNA, 21 nt, Human
auaaacuuuaccuuuuuuaua

SEQ ID NO: 1966384 - RNA, 16 nt, Human
auaaacuuuaccuuuu

SEQ ID NO: 1966385 - RNA, 24 nt, Human
auaaacuuuaccuuuuuuauacau

SEQ ID NO: 1966386 - RNA, 20 nt, Human
auaaacuuuuuucuuacugu

SEQ ID NO: 1966387 - RNA, 15 nt, Human
auaaaacuuuuuaaa

SEQ ID NO: 1966388 - RNA, 11 nt, Human
auaaaacuuuu

SEQ ID NO: 1966389 - RNA, 15 nt, Human
auaaaggaaucuagc

SEQ ID NO: 1966390 - RNA, 18 nt, Human
auaaagcuguguggcagu

SEQ ID NO: 1966391 - RNA, 22 nt, Human
auaaagcgaaaaacucaaccaa

SEQ ID NO: 1966392 - RNA, 15 nt, Human
auaaagcaggcagaa

SEQ ID NO: 1966393 - RNA, 17 nt, Human
auaaagcagacaggugu

SEQ ID NO: 1966394 - RNA, 14 nt, Human
auaaagcagcguuu

SEQ ID NO: 1966395 - RNA, 18 nt, Human
auaaagcagcguuucuau

SEQ ID NO: 1966396 - RNA, 19 nt, Human
auaaagcagcguuucuaug

SEQ ID NO: 1966397 - RNA, 20 nt, Human
auaaagcagcguuucuauga

SEQ ID NO: 1966398 - RNA, 13 nt, Human
auaaagcagcguu

SEQ ID NO: 1966399 - RNA, 12 nt, Human
auaaagacaccu

SEQ ID NO: 1966400 - RNA, 19 nt, Human
auaaagaauaggacuuguu

SEQ ID NO: 1966401 - RNA, 23 nt, Human
auaaagaauaggacuuguuuuug

SEQ ID NO: 1966402 - RNA, 15 nt, Human
auaaagaauaggacu

SEQ ID NO: 1966403 - RNA, 22 nt, Human
auaaauuuugaaaaguaauauu

SEQ ID NO: 1966404 - RNA, 18 nt, Human
auaaaggauuaaugucaa

SEQ ID NO: 1966405 - RNA, 13 nt, Human
auaacaacuuuuu

SEQ ID NO: 1966406 - RNA, 14 nt, Human
auaacaacuuuuuu

SEQ ID NO: 1966407 - RNA, 13 nt, Human
auaacaaagaacc

SEQ ID NO: 1966408 - RNA, 23 nt, Human
auaacaaagaaccuaacauuuau

SEQ ID NO: 1966409 - RNA, 22 nt, Human
auaacauagaauugcaaucuau

SEQ ID NO: 1966410 - RNA, 12 nt, Human
auaacauagaau

SEQ ID NO: 1966411 - RNA, 16 nt, Human
auaaggccucauccuc

SEQ ID NO: 1966412 - RNA, 15 nt, Human
auaaggacuuccuga

SEQ ID NO: 1966413 - RNA, 14 nt, Human
auaauguaagcucu

SEQ ID NO: 1966414 - RNA, 20 nt, Human
auaaugcgugcauaccacuu

SEQ ID NO: 1966415 - RNA, 21 nt, Human
auaaugcgugcauaccacuuu

SEQ ID NO: 1966416 - RNA, 18 nt, Human
auacaccacuacauucug

SEQ ID NO: 1966417 - RNA, 11 nt, Human
auacacacgcu

SEQ ID NO: 1966418 - RNA, 14 nt, Human
auacacacgcugcc

SEQ ID NO: 1966419 - RNA, 15 nt, Human
auacacacgcugccu

SEQ ID NO: 1966420 - RNA, 21 nt, Human
auacaccacuacauucuguua

SEQ ID NO: 1966421 - RNA, 23 nt, Human
auaccauuauauguucccccugu

SEQ ID NO: 1966422 - RNA, 16 nt, Human
auacacacgcugccuu

SEQ ID NO: 1966423 - RNA, 20 nt, Human
auaccauuauuaucaaguag

SEQ ID NO: 1966424 - RNA, 13 nt, Human
auaccauuuccgu

SEQ ID NO: 1966425 - RNA, 15 nt, Human
auaccauuuccguaa

SEQ ID NO: 1966426 - RNA, 19 nt, Human
auacaccacuacauucugu

SEQ ID NO: 1966427 - RNA, 20 nt, Human
auacaccacuacauucuguu

SEQ ID NO: 1966428 - RNA, 12 nt, Human
auaauuaacacu

SEQ ID NO: 1966429 - RNA, 18 nt, Human
auaauuaacacuuaaggu

SEQ ID NO: 1966430 - RNA, 19 nt, Human
auaauuaacacuuaagguu

SEQ ID NO: 1966431 - RNA, 23 nt, Human
auaauguauucauauuuguacuu

SEQ ID NO: 1966432 - RNA, 15 nt, Human
auaauguaagcucua

SEQ ID NO: 1966433 - RNA, 15 nt, Human
auaauguauucauau

SEQ ID NO: 1966434 - RNA, 18 nt, Human
auaauguauucauauuug

SEQ ID NO: 1966435 - RNA, 19 nt, Human
auaauguauucauauuugu

SEQ ID NO: 1966436 - RNA, 12 nt, Human
auacccaccccc

SEQ ID NO: 1966437 - RNA, 11 nt, Human
auacccacccc

SEQ ID NO: 1966438 - RNA, 18 nt, Human
auaccugucccccugaca

SEQ ID NO: 1966439 - RNA, 17 nt, Human
auaccugucccccugac

SEQ ID NO: 1966440 - RNA, 12 nt, Human
auaccuguugcu

SEQ ID NO: 1966441 - RNA, 15 nt, Human
auaccuguuuaaauu

SEQ ID NO: 1966442 - RNA, 17 nt, Human
auaccuguuuaaauugc

SEQ ID NO: 1966443 - RNA, 13 nt, Human
auaccuuaaaauu

SEQ ID NO: 1966444 - RNA, 15 nt, Human
auaccuuaaaauuug

SEQ ID NO: 1966445 - RNA, 16 nt, Human
auaccuuaaaauuuga

SEQ ID NO: 1966446 - RNA, 17 nt, Human
auaccuuaaaauuugaa

SEQ ID NO: 1966447 - RNA, 18 nt, Human
auaccuuaaaauuugaaa

SEQ ID NO: 1966448 - RNA, 19 nt, Human
auaccuuaaaauuugaaac

SEQ ID NO: 1966449 - RNA, 21 nt, Human
auaccuuaaaauuugaaacau

SEQ ID NO: 1966450 - RNA, 22 nt, Human
auaccuuaaaauuugaaacauu

SEQ ID NO: 1966451 - RNA, 23 nt, Human
auaccuuaaaauuugaaacauug

SEQ ID NO: 1966452 - RNA, 14 nt, Human
auaccuuagaaggu

SEQ ID NO: 1966453 - RNA, 14 nt, Human
auaccuugcuuauu

SEQ ID NO: 1966454 - RNA, 21 nt, Human
auauacuuguuuuuguaaaga

SEQ ID NO: 1966455 - RNA, 15 nt, Human
auauagauuaaauca

SEQ ID NO: 1966456 - RNA, 17 nt, Human
auauagagucauuguaa

SEQ ID NO: 1966457 - RNA, 18 nt, Human
auauagagucauuguaau

SEQ ID NO: 1966458 - RNA, 19 nt, Human
auauagagucauuguaaug

SEQ ID NO: 1966459 - RNA, 22 nt, Human
auauagagucauuguaauguug

SEQ ID NO: 1966460 - RNA, 19 nt, Human
auauacuuguuguuuaaug

SEQ ID NO: 1966461 - RNA, 20 nt, Human
auauacuuguuguuuaaugu

SEQ ID NO: 1966462 - RNA, 14 nt, Human
auauacuuguuuuu

SEQ ID NO: 1966463 - RNA, 18 nt, Human
auauacuuguuuuuguaa

SEQ ID NO: 1966464 - RNA, 20 nt, Human
auauacuuguuuuuguaaag

SEQ ID NO: 1966465 - RNA, 17 nt, Human
auaguaugguggcuggg

SEQ ID NO: 1966466 - RNA, 18 nt, Human
auaguaugguggcugggu

SEQ ID NO: 1966467 - RNA, 13 nt, Human
auaguauuugaaa

SEQ ID NO: 1966468 - RNA, 14 nt, Human
auaguauuugaaaa

SEQ ID NO: 1966469 - RNA, 18 nt, Human
auaguauuugaaaacaga

SEQ ID NO: 1966470 - RNA, 19 nt, Human
auaguauuugaaaacagaa

SEQ ID NO: 1966471 - RNA, 20 nt, Human
auaguauuugaaaacagaaa

SEQ ID NO: 1966472 - RNA, 22 nt, Human
auaguauuugaaaacagaaauu

SEQ ID NO: 1966473 - RNA, 14 nt, Human
auagguuuggacaa

SEQ ID NO: 1966474 - RNA, 12 nt, Human
auagguuauuuu

SEQ ID NO: 1966475 - RNA, 17 nt, Human
auagguuagauauagag

SEQ ID NO: 1966476 - RNA, 15 nt, Human
auagguuuaauaauu

SEQ ID NO: 1966477 - RNA, 21 nt, Human
auagguauaaguggugugugu

SEQ ID NO: 1966478 - RNA, 15 nt, Human
auagccccucucccc

SEQ ID NO: 1966479 - RNA, 16 nt, Human
auagguccuuuagaaa

SEQ ID NO: 1966480 - RNA, 17 nt, Human
auagguccuuuagaaac

SEQ ID NO: 1966481 - RNA, 14 nt, Human
auagguuagauaua

SEQ ID NO: 1966482 - RNA, 18 nt, Human
auagcagcuuauucacaa

SEQ ID NO: 1966483 - RNA, 16 nt, Human
auagcaguagucuuuu

SEQ ID NO: 1966484 - RNA, 20 nt, Human
auagcaucacuuaaaacacg

SEQ ID NO: 1966485 - RNA, 15 nt, Human
auagcaucacuuaaa

SEQ ID NO: 1966486 - RNA, 16 nt, Human
auagcaucacuuaaaa

SEQ ID NO: 1966487 - RNA, 17 nt, Human
auagcaucacuuaaaac

SEQ ID NO: 1966488 - RNA, 18 nt, Human
auagcaucacuuaaaaca

SEQ ID NO: 1966489 - RNA, 17 nt, Human
auagcauaugacaaaug

SEQ ID NO: 1966490 - RNA, 18 nt, Human
auagcauaugacaaaugu

SEQ ID NO: 1966491 - RNA, 19 nt, Human
auagcauaugacaaauguu

SEQ ID NO: 1966492 - RNA, 20 nt, Human
auagcauaugacaaauguuu

SEQ ID NO: 1966493 - RNA, 22 nt, Human
auagcauaugacaaauguuucu

SEQ ID NO: 1966494 - RNA, 23 nt, Human
auagcauaugacaaauguuucua

SEQ ID NO: 1966495 - RNA, 13 nt, Human
auagcaucacuua

SEQ ID NO: 1966496 - RNA, 18 nt, Human
auagcccaggauauauuu

SEQ ID NO: 1966497 - RNA, 20 nt, Human
auagcccaggauauauuuua

SEQ ID NO: 1966498 - RNA, 21 nt, Human
auagcccaggauauauuuuau

SEQ ID NO: 1966499 - RNA, 21 nt, Human
auagccaaggccaaaggaagc

SEQ ID NO: 1966500 - RNA, 15 nt, Human
auagccaaggccaaa

SEQ ID NO: 1966501 - RNA, 23 nt, Human
auauuaugaagcuuuuaugugaa

SEQ ID NO: 1966502 - RNA, 22 nt, Human
auauuauauuuggaugcagagu

SEQ ID NO: 1966503 - RNA, 15 nt, Human
auauuauauuuggau

SEQ ID NO: 1966504 - RNA, 16 nt, Human
auauuauauuuggaug

SEQ ID NO: 1966505 - RNA, 13 nt, Human
auauuauaucaga

SEQ ID NO: 1966506 - RNA, 16 nt, Human
auauuagaaaacuuug

SEQ ID NO: 1966507 - RNA, 17 nt, Human
auauuagaaaacuuugu

SEQ ID NO: 1966508 - RNA, 18 nt, Human
auauuagaaaacuuuguu

SEQ ID NO: 1966509 - RNA, 20 nt, Human
auauuagaaaacuuuguuag

SEQ ID NO: 1966510 - RNA, 12 nt, Human
auauuauauuug

SEQ ID NO: 1966511 - RNA, 13 nt, Human
auauuauauuugg

SEQ ID NO: 1966512 - RNA, 14 nt, Human
auauuauauuugga

SEQ ID NO: 1966513 - RNA, 19 nt, Human
auauuuacuucuuauacau

SEQ ID NO: 1966514 - RNA, 13 nt, Human
auauuuauugacu

SEQ ID NO: 1966515 - RNA, 16 nt, Human
auauuuauugacucuu

SEQ ID NO: 1966516 - RNA, 18 nt, Human
auauuuauugacucuuga

SEQ ID NO: 1966517 - RNA, 19 nt, Human
auauuaccacagacauacu

SEQ ID NO: 1966518 - RNA, 22 nt, Human
auauuaccacagacauacuaac

SEQ ID NO: 1966519 - RNA, 17 nt, Human
auauuacuguacauggg

SEQ ID NO: 1966520 - RNA, 21 nt, Human
auauuacuguacaugggacua

SEQ ID NO: 1966521 - RNA, 14 nt, Human
auauuagaaaacuu

SEQ ID NO: 1966522 - RNA, 15 nt, Human
auauuagaaaacuuu

SEQ ID NO: 1966523 - RNA, 21 nt, Human
auaugcuuauacacuuacacu

SEQ ID NO: 1966524 - RNA, 13 nt, Human
auaucauucuaaa

SEQ ID NO: 1966525 - RNA, 15 nt, Human
auaucauucuaaaga

SEQ ID NO: 1966526 - RNA, 17 nt, Human
auaucauucuaaagaua

SEQ ID NO: 1966527 - RNA, 14 nt, Human
auauccacacauuu

SEQ ID NO: 1966528 - RNA, 20 nt, Human
auaucccuuggacauuuuau

SEQ ID NO: 1966529 - RNA, 22 nt, Human
auaucccuuggacauuuuaugu

SEQ ID NO: 1966530 - RNA, 23 nt, Human
auaucccuuggacauuuuauguc

SEQ ID NO: 1966531 - RNA, 19 nt, Human
auauauuuuuuucugaaau

SEQ ID NO: 1966532 - RNA, 14 nt, Human
auaucaaaagacac

SEQ ID NO: 1966533 - RNA, 16 nt, Human
auaucaaaagacacag

SEQ ID NO: 1966534 - RNA, 16 nt, Human
auaucaaauauauuca

SEQ ID NO: 1966535 - RNA, 17 nt, Human
auaucaaaagacacagg

SEQ ID NO: 1966536 - RNA, 13 nt, Human
auaucaaauuaau

SEQ ID NO: 1966537 - RNA, 18 nt, Human
auaucaaauuaauugugu

SEQ ID NO: 1966538 - RNA, 19 nt, Human
auaucaaauuaauugugug

SEQ ID NO: 1966539 - RNA, 20 nt, Human
auaucaaauuaauuguguga

SEQ ID NO: 1966540 - RNA, 21 nt, Human
auaucaaauuaauugugugaa

SEQ ID NO: 1966541 - RNA, 22 nt, Human
agguggagcguucaccagugac

SEQ ID NO: 1966542 - RNA, 13 nt, Human
agguguuugaaaa

SEQ ID NO: 1966543 - RNA, 22 nt, Human
agguguuugaacagaggccaca

SEQ ID NO: 1966544 - RNA, 14 nt, Human
agguguuugaaaau

SEQ ID NO: 1966545 - RNA, 15 nt, Human
agguguuugaaaaua

SEQ ID NO: 1966546 - RNA, 17 nt, Human
agguguuugaaaauagu

SEQ ID NO: 1966547 - RNA, 15 nt, Human
agguguuugaacaga

SEQ ID NO: 1966548 - RNA, 22 nt, Human
agguuaaaagaccauaagcaaa

SEQ ID NO: 1966549 - RNA, 11 nt, Human
agguuaaaugu

SEQ ID NO: 1966550 - RNA, 12 nt, Human
agguuaaauguu

SEQ ID NO: 1966551 - RNA, 13 nt, Human
agguuaaauguuu

SEQ ID NO: 1966552 - RNA, 14 nt, Human
agguuaaauguuuu

SEQ ID NO: 1966553 - RNA, 17 nt, Human
agguuaaauguuuugua

SEQ ID NO: 1966554 - RNA, 18 nt, Human
agguuaaauguuuuguaa

SEQ ID NO: 1966555 - RNA, 19 nt, Human
agguuaaauguuuuguaaa

SEQ ID NO: 1966556 - RNA, 22 nt, Human
aggugcuaggaacacuccuuca

SEQ ID NO: 1966557 - RNA, 19 nt, Human
aggugcuaggaacacuccu

SEQ ID NO: 1966558 - RNA, 17 nt, Human
agguggaauuauuuuaa

SEQ ID NO: 1966559 - RNA, 21 nt, Human
agguggaauuauuuuaaaaga

SEQ ID NO: 1966560 - RNA, 17 nt, Human
aggugcucaaaaugcaa

SEQ ID NO: 1966561 - RNA, 23 nt, Human
aggugcuaggaacacuccuucac

SEQ ID NO: 1966562 - RNA, 16 nt, Human
aggugcucaaaaugca

SEQ ID NO: 1966563 - RNA, 17 nt, Human
aggucuguuugcuguug

SEQ ID NO: 1966564 - RNA, 23 nt, Human
agguucccuuugacgccauccca

SEQ ID NO: 1966565 - RNA, 13 nt, Human
agguucccuuuga

SEQ ID NO: 1966566 - RNA, 22 nt, Human
agguucccuuugacgccauccc

SEQ ID NO: 1966567 - RNA, 14 nt, Human
agguucaaagauau

SEQ ID NO: 1966568 - RNA, 15 nt, Human
agguucaaagauauu

SEQ ID NO: 1966569 - RNA, 23 nt, Human
agguuaggcaguauaaagaauag

SEQ ID NO: 1966570 - RNA, 20 nt, Human
agguuagaaauaaugucaaa

SEQ ID NO: 1966571 - RNA, 23 nt, Human
agguuagaaauaaugucaaaaau

SEQ ID NO: 1966572 - RNA, 19 nt, Human
agguuaggcaguauaaaga

SEQ ID NO: 1966573 - RNA, 21 nt, Human
agguuaggcaguauaaagaau

SEQ ID NO: 1966574 - RNA, 22 nt, Human
aggucuguucuuuccaaaguac

SEQ ID NO: 1966575 - RNA, 23 nt, Human
aggucuguucuuuccaaaguaca

SEQ ID NO: 1966576 - RNA, 14 nt, Human
aggucuguuugcug

SEQ ID NO: 1966577 - RNA, 15 nt, Human
aggucuguuugcugu

SEQ ID NO: 1966578 - RNA, 16 nt, Human
aggucuguuugcuguu

SEQ ID NO: 1966579 - RNA, 18 nt, Human
aggucuguucuuuccaaa

SEQ ID NO: 1966580 - RNA, 13 nt, Human
aggucugaguugu

SEQ ID NO: 1966581 - RNA, 20 nt, Human
aggucugaguuguuacccca

SEQ ID NO: 1966582 - RNA, 23 nt, Human
aggucugaguuguuaccccaagc

SEQ ID NO: 1966583 - RNA, 16 nt, Human
aggucccuaauaaagc

SEQ ID NO: 1966584 - RNA, 15 nt, Human
aggucccuaauaaag

SEQ ID NO: 1966585 - RNA, 13 nt, Human
aggucccuaauaa

SEQ ID NO: 1966586 - RNA, 11 nt, Human
aggucccuaau

SEQ ID NO: 1966587 - RNA, 12 nt, Human
aggucccuaaua

SEQ ID NO: 1966588 - RNA, 17 nt, Human
agguacaaccuguucug

SEQ ID NO: 1966589 - RNA, 23 nt, Human
agguaaaucagacuaugaaguuu

SEQ ID NO: 1966590 - RNA, 23 nt, Human
agguaacaagaugagaacagaua

SEQ ID NO: 1966591 - RNA, 19 nt, Human
agguaaucgaccugccucg

SEQ ID NO: 1966592 - RNA, 21 nt, Human
agguaaucgaccugccucggc

SEQ ID NO: 1966593 - RNA, 18 nt, Human
agguaaaucagacuauga

SEQ ID NO: 1966594 - RNA, 12 nt, Human
agguaaaaaguu

SEQ ID NO: 1966595 - RNA, 20 nt, Human
agguaaaagcaucacaugaa

SEQ ID NO: 1966596 - RNA, 12 nt, Human
agggucccuggg

SEQ ID NO: 1966597 - RNA, 12 nt, Human
aggguccugggg

SEQ ID NO: 1966598 - RNA, 15 nt, Human
aggguccuggggaac

SEQ ID NO: 1966599 - RNA, 21 nt, Human
aggguccuggggaaccugacc

SEQ ID NO: 1966600 - RNA, 23 nt, Human
aggguccuggggaaccugacccc

SEQ ID NO: 1966601 - RNA, 11 nt, Human
agggucccugg

SEQ ID NO: 1966602 - RNA, 21 nt, Human
aggggccucuuaugggcuggg

SEQ ID NO: 1966603 - RNA, 20 nt, Human
aggggccucuuaugggcugg

SEQ ID NO: 1966604 - RNA, 19 nt, Human
aggggccucuuaugggcug

SEQ ID NO: 1966605 - RNA, 19 nt, Human
aggguaucaggugcugcca

SEQ ID NO: 1966606 - RNA, 15 nt, Human
aggguaucuggugac

SEQ ID NO: 1966607 - RNA, 21 nt, Human
aggguaucaggugcugccauc

SEQ ID NO: 1966608 - RNA, 21 nt, Human
aggcccuucucuccagccccu

SEQ ID NO: 1966609 - RNA, 20 nt, Human
aggcccuucucuccagcccc

SEQ ID NO: 1966610 - RNA, 13 nt, Human
aggcccuuccucu

SEQ ID NO: 1966611 - RNA, 15 nt, Human
aggcccuuccucucc

SEQ ID NO: 1966612 - RNA, 17 nt, Human
aggcccuuccucuccac

SEQ ID NO: 1966613 - RNA, 18 nt, Human
aggcccuuccucuccacu

SEQ ID NO: 1966614 - RNA, 23 nt, Human
aggcccuucucuccagccccugg

SEQ ID NO: 1966615 - RNA, 22 nt, Human
aggcccuucucuccagccccug

SEQ ID NO: 1966616 - RNA, 19 nt, Human
aggcccuuccucuccacug

SEQ ID NO: 1966617 - RNA, 21 nt, Human
aggcuagaaccaccugccuau

SEQ ID NO: 1966618 - RNA, 23 nt, Human
aggcuacuguaaggcaaucaugg

SEQ ID NO: 1966619 - RNA, 21 nt, Human
aggcgugagccaccgugccug

SEQ ID NO: 1966620 - RNA, 12 nt, Human
aggcuaaaaugu

SEQ ID NO: 1966621 - RNA, 13 nt, Human
aggcuaaaauguu

SEQ ID NO: 1966622 - RNA, 14 nt, Human
aggcuaaaauguuu

SEQ ID NO: 1966623 - RNA, 15 nt, Human
aggcuaaaauguuuu

SEQ ID NO: 1966624 - RNA, 16 nt, Human
aggcuaaaauguuuuc

SEQ ID NO: 1966625 - RNA, 17 nt, Human
aggcuaaaauguuuuca

SEQ ID NO: 1966626 - RNA, 18 nt, Human
aggcuaaaauguuuucag

SEQ ID NO: 1966627 - RNA, 19 nt, Human
aggcuaaaauguuuucagc

SEQ ID NO: 1966628 - RNA, 16 nt, Human
agggaccucucccagg

SEQ ID NO: 1966629 - RNA, 15 nt, Human
agggaccucucccag

SEQ ID NO: 1966630 - RNA, 13 nt, Human
agggaccucuccc

SEQ ID NO: 1966631 - RNA, 23 nt, Human
agggacagaggggguggccuccc

SEQ ID NO: 1966632 - RNA, 22 nt, Human
agggacagaggggguggccucc

SEQ ID NO: 1966633 - RNA, 22 nt, Human
aggcugucucagauaaauuaug

SEQ ID NO: 1966634 - RNA, 21 nt, Human
aggcugucaauuacaggaagu

SEQ ID NO: 1966635 - RNA, 20 nt, Human
aggcugucaguguuuggugc

SEQ ID NO: 1966636 - RNA, 20 nt, Human
aggcugucaauuacaggaag

SEQ ID NO: 1966637 - RNA, 13 nt, Human
aggcuguauccca

SEQ ID NO: 1966638 - RNA, 18 nt, Human
aggcuguaucccaugagc

SEQ ID NO: 1966639 - RNA, 13 nt, Human
agcugaaauugaa

SEQ ID NO: 1966640 - RNA, 16 nt, Human
agcugaaauugaaaag

SEQ ID NO: 1966641 - RNA, 19 nt, Human
agcugaaauugaaaaguua

SEQ ID NO: 1966642 - RNA, 12 nt, Human
agcugaaauuga

SEQ ID NO: 1966643 - RNA, 15 nt, Human
agcucuuuuccuaga

SEQ ID NO: 1966644 - RNA, 14 nt, Human
agcugagcaggugu

SEQ ID NO: 1966645 - RNA, 21 nt, Human
agcugcgguccacccaggagc

SEQ ID NO: 1966646 - RNA, 23 nt, Human
agcugagauuauaggcaccuacc

SEQ ID NO: 1966647 - RNA, 12 nt, Human
agcuccuucugu

SEQ ID NO: 1966648 - RNA, 19 nt, Human
agcuccuuccuagccuugc

SEQ ID NO: 1966649 - RNA, 13 nt, Human
agcuccuucuguc

SEQ ID NO: 1966650 - RNA, 20 nt, Human
agcuccgcuuucuacccagc

SEQ ID NO: 1966651 - RNA, 21 nt, Human
agcuccgcuuucuacccagcg

SEQ ID NO: 1966652 - RNA, 23 nt, Human
agcuccgcuuucuacccagcgag

SEQ ID NO: 1966653 - RNA, 19 nt, Human
agcuccggcguguguucag

SEQ ID NO: 1966654 - RNA, 18 nt, Human
agcucccgcuccgggcuc

SEQ ID NO: 1966655 - RNA, 20 nt, Human
agcucccucaaagaggcagu

SEQ ID NO: 1966656 - RNA, 21 nt, Human
agcugcucagggaaaagcagc

SEQ ID NO: 1966657 - RNA, 19 nt, Human
agcugcucagaucccacuu

SEQ ID NO: 1966658 - RNA, 16 nt, Human
agcugcucagggaaaa

SEQ ID NO: 1966659 - RNA, 21 nt, Human
agcugcuacucgugagcgcca

SEQ ID NO: 1966660 - RNA, 23 nt, Human
agcugcgguccacccaggagccc

SEQ ID NO: 1966661 - RNA, 18 nt, Human
agcugcggugucucccug

SEQ ID NO: 1966662 - RNA, 21 nt, Human
agcuucuggugaccuuccaag

SEQ ID NO: 1966663 - RNA, 22 nt, Human
agcuucuggugaccuuccaaga

SEQ ID NO: 1966664 - RNA, 19 nt, Human
agcuucuguugcugccuca

SEQ ID NO: 1966665 - RNA, 17 nt, Human
agcuuccagcaggaggg

SEQ ID NO: 1966666 - RNA, 19 nt, Human
agcuuccagcaggagggac

SEQ ID NO: 1966667 - RNA, 18 nt, Human
agcuuccaauuuuccuuc

SEQ ID NO: 1966668 - RNA, 12 nt, Human
agcuuccagcag

SEQ ID NO: 1966669 - RNA, 13 nt, Human
agcuuccagcagg

SEQ ID NO: 1966670 - RNA, 14 nt, Human
agcuuccagcagga

SEQ ID NO: 1966671 - RNA, 16 nt, Human
agcuuccagcaggagg

SEQ ID NO: 1966672 - RNA, 18 nt, Human
agcuuccccaguagcugg

SEQ ID NO: 1966673 - RNA, 12 nt, Human
agcuucccuccc

SEQ ID NO: 1966674 - RNA, 15 nt, Human
agcuucccucccugc

SEQ ID NO: 1966675 - RNA, 16 nt, Human
agcuucccucccugcu

SEQ ID NO: 1966676 - RNA, 18 nt, Human
agcuucccucccugcugu

SEQ ID NO: 1966677 - RNA, 14 nt, Human
aggauuauuggaaa

SEQ ID NO: 1966678 - RNA, 20 nt, Human
aggauuaaauaauguaaaua

SEQ ID NO: 1966679 - RNA, 18 nt, Human
aggauguucugggacaca

SEQ ID NO: 1966680 - RNA, 14 nt, Human
aggauuaaauaaug

SEQ ID NO: 1966681 - RNA, 17 nt, Human
aggauucacaccccacc

SEQ ID NO: 1966682 - RNA, 14 nt, Human
aggauucacacccc

SEQ ID NO: 1966683 - RNA, 17 nt, Human
aggauuaguuuagaaca

SEQ ID NO: 1966684 - RNA, 15 nt, Human
aggauuaguuuagaa

SEQ ID NO: 1966685 - RNA, 16 nt, Human
aggauuaguuuagaac

SEQ ID NO: 1966686 - RNA, 18 nt, Human
aggauuaguuuagaacag

SEQ ID NO: 1966687 - RNA, 22 nt, Human
aggauguucuagcauggcugcc

SEQ ID NO: 1966688 - RNA, 22 nt, Human
aggauguacaaggacagccccu

SEQ ID NO: 1966689 - RNA, 15 nt, Human
aggauguucugggac

SEQ ID NO: 1966690 - RNA, 16 nt, Human
aggauguucugggaca

SEQ ID NO: 1966691 - RNA, 13 nt, Human
aggaccucaggug

SEQ ID NO: 1966692 - RNA, 22 nt, Human
aggagaagucuucuauuuauuu

SEQ ID NO: 1966693 - RNA, 23 nt, Human
aggagaagucuucuauuuauuua

SEQ ID NO: 1966694 - RNA, 16 nt, Human
aggagaaugaaaugua

SEQ ID NO: 1966695 - RNA, 23 nt, Human
aggagaauuaaguccuacuuuua

SEQ ID NO: 1966696 - RNA, 17 nt, Human
aggagaaucauguuucu

SEQ ID NO: 1966697 - RNA, 19 nt, Human
aggagaaucauguuucuuu

SEQ ID NO: 1966698 - RNA, 21 nt, Human
aggagucccugccaucauguu

SEQ ID NO: 1966699 - RNA, 23 nt, Human
aggagucccacuccaagccagca

SEQ ID NO: 1966700 - RNA, 21 nt, Human
aggagucccacuccaagccag

SEQ ID NO: 1966701 - RNA, 22 nt, Human
aggagucccacuccaagccagc

SEQ ID NO: 1966702 - RNA, 21 nt, Human
aggaugcuuguacauaaugcg

SEQ ID NO: 1966703 - RNA, 23 nt, Human
aggaugcuuguacauaaugcgug

SEQ ID NO: 1966704 - RNA, 21 nt, Human
agcuuuucccuuuuuuuaagu

SEQ ID NO: 1966705 - RNA, 20 nt, Human
aggaauccagacccggcugc

SEQ ID NO: 1966706 - RNA, 21 nt, Human
aggaaucaugugccaagcaga

SEQ ID NO: 1966707 - RNA, 17 nt, Human
aggaauccagacccggc

SEQ ID NO: 1966708 - RNA, 18 nt, Human
aggacccugccaggcaca

SEQ ID NO: 1966709 - RNA, 19 nt, Human
aggacccugccaggcacag

SEQ ID NO: 1966710 - RNA, 21 nt, Human
aggacccugccaggcacaggc

SEQ ID NO: 1966711 - RNA, 22 nt, Human
aggacccugccaggcacaggca

SEQ ID NO: 1966712 - RNA, 23 nt, Human
aggacccugccaggcacaggcag

SEQ ID NO: 1966713 - RNA, 14 nt, Human
agagcccaggccuc

SEQ ID NO: 1966714 - RNA, 13 nt, Human
agagcccaggccu

SEQ ID NO: 1966715 - RNA, 15 nt, Human
agagcccaggccucc

SEQ ID NO: 1966716 - RNA, 16 nt, Human
agaggaaggagaggag

SEQ ID NO: 1966717 - RNA, 21 nt, Human
agaggaacagcacuggggagu

SEQ ID NO: 1966718 - RNA, 12 nt, Human
agaggaccagca

SEQ ID NO: 1966719 - RNA, 20 nt, Human
agaggacaguauuugugggg

SEQ ID NO: 1966720 - RNA, 16 nt, Human
agaggagagaggaccc

SEQ ID NO: 1966721 - RNA, 15 nt, Human
agaggagagaggacc

SEQ ID NO: 1966722 - RNA, 19 nt, Human
agaggagaacuugcugccu

SEQ ID NO: 1966723 - RNA, 20 nt, Human
agaggagaacuugcugccuc

SEQ ID NO: 1966724 - RNA, 17 nt, Human
agagggaugcauggaga

SEQ ID NO: 1966725 - RNA, 12 nt, Human
agagggcacaga

SEQ ID NO: 1966726 - RNA, 22 nt, Human
agagggccauugaacucugaga

SEQ ID NO: 1966727 - RNA, 20 nt, Human
agaggguggugaccucugcc

SEQ ID NO: 1966728 - RNA, 22 nt, Human
agaggguggugaccucugccug

SEQ ID NO: 1966729 - RNA, 19 nt, Human
agaggguggugaccucugc

SEQ ID NO: 1966730 - RNA, 19 nt, Human
agaguggggauaugauuua

SEQ ID NO: 1966731 - RNA, 23 nt, Human
agaguggcuccucccggugccca

SEQ ID NO: 1966732 - RNA, 11 nt, Human
agagugggagc

SEQ ID NO: 1966733 - RNA, 19 nt, Human
agaguggcuccucccggug

SEQ ID NO: 1966734 - RNA, 14 nt, Human
agagugugccugaa

SEQ ID NO: 1966735 - RNA, 13 nt, Human
agaguuacuugau

SEQ ID NO: 1966736 - RNA, 21 nt, Human
agaugaaauaaagacccaggg

SEQ ID NO: 1966737 - RNA, 14 nt, Human
agauggcugugccu

SEQ ID NO: 1966738 - RNA, 21 nt, Human
agauggcuggaagggguccag

SEQ ID NO: 1966739 - RNA, 14 nt, Human
agaucuucuguggg

SEQ ID NO: 1966740 - RNA, 19 nt, Human
agauauaugcucugcaugu

SEQ ID NO: 1966741 - RNA, 17 nt, Human
agauauccacuuaccug

SEQ ID NO: 1966742 - RNA, 17 nt, Human
agauauccucugcuuaa

SEQ ID NO: 1966743 - RNA, 18 nt, Human
agauauccucugcuuaaa

SEQ ID NO: 1966744 - RNA, 19 nt, Human
agauauccucugcuuaaaa

SEQ ID NO: 1966745 - RNA, 14 nt, Human
agaguuacuugaua

SEQ ID NO: 1966746 - RNA, 17 nt, Human
agaguuacuugauaagg

SEQ ID NO: 1966747 - RNA, 16 nt, Human
agaguucagggaagau

SEQ ID NO: 1966748 - RNA, 18 nt, Human
agaguucagggaagauaa

SEQ ID NO: 1966749 - RNA, 23 nt, Human
agacagagucucacuguugccca

SEQ ID NO: 1966750 - RNA, 15 nt, Human
agacaaccaaguaug

SEQ ID NO: 1966751 - RNA, 15 nt, Human
agacagcccgggcuc

SEQ ID NO: 1966752 - RNA, 14 nt, Human
agacagcccgggcu

SEQ ID NO: 1966753 - RNA, 22 nt, Human
agacagcccgauccuccccugg

SEQ ID NO: 1966754 - RNA, 21 nt, Human
agacagauacuccuccaaggu

SEQ ID NO: 1966755 - RNA, 15 nt, Human
agacagauacuccuc

SEQ ID NO: 1966756 - RNA, 22 nt, Human
agacgcugugcugcccugccca

SEQ ID NO: 1966757 - RNA, 18 nt, Human
agacggagucccaccuug

SEQ ID NO: 1966758 - RNA, 12 nt, Human
agacagcucuua

SEQ ID NO: 1966759 - RNA, 11 nt, Human
agacagcucuu

SEQ ID NO: 1966760 - RNA, 12 nt, Human
agacagcugccu

SEQ ID NO: 1966761 - RNA, 21 nt, Human
agacgcugugcugcccugccc

SEQ ID NO: 1966762 - RNA, 16 nt, Human
agagcccacgccccca

SEQ ID NO: 1966763 - RNA, 23 nt, Human
agagagggugaguccuccagaac

SEQ ID NO: 1966764 - RNA, 17 nt, Human
agagcccacgcccccac

SEQ ID NO: 1966765 - RNA, 13 nt, Human
agagcccacgccc

SEQ ID NO: 1966766 - RNA, 19 nt, Human
agagcccaccuuggcucaa

SEQ ID NO: 1966767 - RNA, 22 nt, Human
agagaggguggugaccucugcc

SEQ ID NO: 1966768 - RNA, 20 nt, Human
agagaggguggugaccucug

SEQ ID NO: 1966769 - RNA, 21 nt, Human
agagaggguggugaccucugc

SEQ ID NO: 1966770 - RNA, 13 nt, Human
agagagcgcagcc

SEQ ID NO: 1966771 - RNA, 20 nt, Human
agagagcgcagccgccuuca

SEQ ID NO: 1966772 - RNA, 22 nt, Human
agagagcgcagccgccuucaca

SEQ ID NO: 1966773 - RNA, 10 nt, Human
agagaaaaga

SEQ ID NO: 1966774 - RNA, 11 nt, Human
agagaaaagaa

SEQ ID NO: 1966775 - RNA, 21 nt, Human
agagaaaagaaaaaaaaagaa

SEQ ID NO: 1966776 - RNA, 12 nt, Human
agagaaaagaaa

SEQ ID NO: 1966777 - RNA, 13 nt, Human
agagaaaagaaaa

SEQ ID NO: 1966778 - RNA, 14 nt, Human
agagaaaagaaaaa

SEQ ID NO: 1966779 - RNA, 15 nt, Human
agagaaaagaaaaaa

SEQ ID NO: 1966780 - RNA, 19 nt, Human
agacuggaagcacagcuuc

SEQ ID NO: 1966781 - RNA, 17 nt, Human
agacuggaagcacagcu

SEQ ID NO: 1966782 - RNA, 16 nt, Human
agacuggaagcacagc

SEQ ID NO: 1966783 - RNA, 15 nt, Human
agacugccacaagga

SEQ ID NO: 1966784 - RNA, 22 nt, Human
agacugccacaaggaagaaauu

SEQ ID NO: 1966785 - RNA, 11 nt, Human
agacugccagc

SEQ ID NO: 1966786 - RNA, 12 nt, Human
agacugccagcu

SEQ ID NO: 1966787 - RNA, 13 nt, Human
agacugccagcuc

SEQ ID NO: 1966788 - RNA, 14 nt, Human
agacugccagcucu

SEQ ID NO: 1966789 - RNA, 18 nt, Human
agacugccagcucuuccu

SEQ ID NO: 1966790 - RNA, 22 nt, Human
agacugccagcucuuccuagcu

SEQ ID NO: 1966791 - RNA, 16 nt, Human
agacugcuccugagcc

SEQ ID NO: 1966792 - RNA, 17 nt, Human
agacugcuccugagccc

SEQ ID NO: 1966793 - RNA, 19 nt, Human
agacugcuccugagccccc

SEQ ID NO: 1966794 - RNA, 20 nt, Human
agacugcuccugagccccca

SEQ ID NO: 1966795 - RNA, 21 nt, Human
agacugcuccugagcccccag

SEQ ID NO: 1966796 - RNA, 23 nt, Human
agacugcuccugagcccccagcu

SEQ ID NO: 1966797 - RNA, 17 nt, Human
agcacagacccugcccu

SEQ ID NO: 1966798 - RNA, 14 nt, Human
agcacacucauccc

SEQ ID NO: 1966799 - RNA, 22 nt, Human
agcacaccaaucuuacuuugua

SEQ ID NO: 1966800 - RNA, 20 nt, Human
agcacacucauccccucacu

SEQ ID NO: 1966801 - RNA, 23 nt, Human
agcacacuugacaucaacugcau

SEQ ID NO: 1966802 - RNA, 19 nt, Human
agcacaccaaucuuacuuu

SEQ ID NO: 1966803 - RNA, 21 nt, Human
agcacaccaaucuuacuuugu

SEQ ID NO: 1966804 - RNA, 19 nt, Human
agcacagacccugcccugu

SEQ ID NO: 1966805 - RNA, 18 nt, Human
agcacagacccugcccug

SEQ ID NO: 1966806 - RNA, 20 nt, Human
agcacagacccugcccugug

SEQ ID NO: 1966807 - RNA, 20 nt, Human
agcacugaaaguauguuuua

SEQ ID NO: 1966808 - RNA, 16 nt, Human
agcacugaaccuggga

SEQ ID NO: 1966809 - RNA, 18 nt, Human
agcacugaaccugggaaa

SEQ ID NO: 1966810 - RNA, 13 nt, Human
agcagcguuucua

SEQ ID NO: 1966811 - RNA, 21 nt, Human
agcagcuccuuccuagccuug

SEQ ID NO: 1966812 - RNA, 22 nt, Human
agcagcuccuuccuagccuugc

SEQ ID NO: 1966813 - RNA, 14 nt, Human
agcagcucuccccu

SEQ ID NO: 1966814 - RNA, 12 nt, Human
agcagcucuccc

SEQ ID NO: 1966815 - RNA, 19 nt, Human
agcagcugacuuucaaagu

SEQ ID NO: 1966816 - RNA, 20 nt, Human
agcagugcaugcugucccuu

SEQ ID NO: 1966817 - RNA, 19 nt, Human
agcagugcaugcugucccu

SEQ ID NO: 1966818 - RNA, 12 nt, Human
agcagugcccag

SEQ ID NO: 1966819 - RNA, 13 nt, Human
agcagugcccagg

SEQ ID NO: 1966820 - RNA, 18 nt, Human
agcagugcaugcuguccc

SEQ ID NO: 1966821 - RNA, 14 nt, Human
agcagugcccaggu

SEQ ID NO: 1966822 - RNA, 16 nt, Human
agcagugcccaggugg

SEQ ID NO: 1966823 - RNA, 20 nt, Human
agcagugcccagguggcugu

SEQ ID NO: 1966824 - RNA, 23 nt, Human
agcagugcccagguggcugugga

SEQ ID NO: 1966825 - RNA, 18 nt, Human
agcagugggccuggccag

SEQ ID NO: 1966826 - RNA, 22 nt, Human
agcagugggucaugaugcucuu

SEQ ID NO: 1966827 - RNA, 21 nt, Human
agcaguuaugugaccucacgu

SEQ ID NO: 1966828 - RNA, 21 nt, Human
agcaguucuuaacccaguguc

SEQ ID NO: 1966829 - RNA, 22 nt, Human
agcaugagacuauguaaaaaua

SEQ ID NO: 1966830 - RNA, 23 nt, Human
agcaugccuggauggggcugcac

SEQ ID NO: 1966831 - RNA, 20 nt, Human
agcaugccuggauggggcug

SEQ ID NO: 1966832 - RNA, 23 nt, Human
agccaagugugguagagugugcc

SEQ ID NO: 1966833 - RNA, 23 nt, Human
agcaugacagaaaauauguauua

SEQ ID NO: 1966834 - RNA, 18 nt, Human
agcaugacagaaaauaug

SEQ ID NO: 1966835 - RNA, 21 nt, Human
agcaugacagaaaauauguau

SEQ ID NO: 1966836 - RNA, 14 nt, Human
agcaugacagaaaa

SEQ ID NO: 1966837 - RNA, 14 nt, Human
agcaucgcacucug

SEQ ID NO: 1966838 - RNA, 19 nt, Human
agcaucgcacucuggcagc

SEQ ID NO: 1966839 - RNA, 19 nt, Human
agcaucgcuuaggagaagu

SEQ ID NO: 1966840 - RNA, 22 nt, Human
agcauccuggcacccggccccu

SEQ ID NO: 1966841 - RNA, 23 nt, Human
agcauccuggcacccggccccug

SEQ ID NO: 1966842 - RNA, 20 nt, Human
agccagcaggcucucaggcc

SEQ ID NO: 1966843 - RNA, 17 nt, Human
agccagcaggcucucag

SEQ ID NO: 1966844 - RNA, 19 nt, Human
agccagcaggcucucaggc

SEQ ID NO: 1966845 - RNA, 18 nt, Human
agccagcaggcucucagg

SEQ ID NO: 1966846 - RNA, 13 nt, Human
agccccagugccc

SEQ ID NO: 1966847 - RNA, 14 nt, Human
agccccagugccca

SEQ ID NO: 1966848 - RNA, 15 nt, Human
agccccagugcccac

SEQ ID NO: 1966849 - RNA, 14 nt, Human
agccccauuaacug

SEQ ID NO: 1966850 - RNA, 15 nt, Human
agccccauuaacugc

SEQ ID NO: 1966851 - RNA, 17 nt, Human
agcccucacccuggggc

SEQ ID NO: 1966852 - RNA, 13 nt, Human
agccccauucugc

SEQ ID NO: 1966853 - RNA, 16 nt, Human
agccccauucugccug

SEQ ID NO: 1966854 - RNA, 16 nt, Human
agccuccgcuucccug

SEQ ID NO: 1966855 - RNA, 17 nt, Human
agccuccgcuucccugg

SEQ ID NO: 1966856 - RNA, 18 nt, Human
agccuccgcuucccuggu

SEQ ID NO: 1966857 - RNA, 20 nt, Human
agccuccgcuucccugguuc

SEQ ID NO: 1966858 - RNA, 14 nt, Human
agccuccuccagcc

SEQ ID NO: 1966859 - RNA, 22 nt, Human
agccuccgcuucccugguucaa

SEQ ID NO: 1966860 - RNA, 20 nt, Human
agccucccgaguagcuggga

SEQ ID NO: 1966861 - RNA, 18 nt, Human
agccucccgaguagcugg

SEQ ID NO: 1966862 - RNA, 19 nt, Human
agccucccgaguagcuggg

SEQ ID NO: 1966863 - RNA, 14 nt, Human
agccucccacagug

SEQ ID NO: 1966864 - RNA, 18 nt, Human
agccucccacagugcugg

SEQ ID NO: 1966865 - RNA, 22 nt, Human
agccucccacgacugcccggca

SEQ ID NO: 1966866 - RNA, 21 nt, Human
agccucccaaagugcugggau

SEQ ID NO: 1966867 - RNA, 17 nt, Human
agccgugccuucagcuc

SEQ ID NO: 1966868 - RNA, 15 nt, Human
agccgugccuucagc

SEQ ID NO: 1966869 - RNA, 16 nt, Human
agccgugccuucagcu

SEQ ID NO: 1966870 - RNA, 21 nt, Human
agccgggcgugguggugagug

SEQ ID NO: 1966871 - RNA, 21 nt, Human
agccgccaugcuccuggccca

SEQ ID NO: 1966872 - RNA, 13 nt, Human
agccgcuggggcc

SEQ ID NO: 1966873 - RNA, 16 nt, Human
agccgccuucacagca

SEQ ID NO: 1966874 - RNA, 17 nt, Human
agccgccuucacagcag

SEQ ID NO: 1966875 - RNA, 22 nt, Human
agccgcggugcccaaccacacu

SEQ ID NO: 1966876 - RNA, 13 nt, Human
agccgcuccagag

SEQ ID NO: 1966877 - RNA, 18 nt, Human
aauccaagcaaaugugaa

SEQ ID NO: 1966878 - RNA, 17 nt, Human
aauccaagcaaauguga

SEQ ID NO: 1966879 - RNA, 16 nt, Human
aaucucaaauuucuaa

SEQ ID NO: 1966880 - RNA, 15 nt, Human
aaucucaaauuucua

SEQ ID NO: 1966881 - RNA, 13 nt, Human
aauccagccugcu

SEQ ID NO: 1966882 - RNA, 19 nt, Human
aauccagacccggcugcgu

SEQ ID NO: 1966883 - RNA, 17 nt, Human
aauccagacccggcugc

SEQ ID NO: 1966884 - RNA, 15 nt, Human
aauccaaugaaauga

SEQ ID NO: 1966885 - RNA, 17 nt, Human
aaucucaaauuucuaaa

SEQ ID NO: 1966886 - RNA, 18 nt, Human
aaucucaaauuucuaaau

SEQ ID NO: 1966887 - RNA, 22 nt, Human
aaucucaacaugucuccuacug

SEQ ID NO: 1966888 - RNA, 19 nt, Human
aauccaggacccugccagg

SEQ ID NO: 1966889 - RNA, 23 nt, Human
aauccaggacccugccaggcaca

SEQ ID NO: 1966890 - RNA, 16 nt, Human
aaucucuucuguguuu

SEQ ID NO: 1966891 - RNA, 11 nt, Human
aaucucuucug

SEQ ID NO: 1966892 - RNA, 12 nt, Human
aaucucuucugu

SEQ ID NO: 1966893 - RNA, 19 nt, Human
aaugaagguuuuuguaaag

SEQ ID NO: 1966894 - RNA, 20 nt, Human
aaugaagguuuuuguaaaga

SEQ ID NO: 1966895 - RNA, 22 nt, Human
aaugaagguuuuuguaaagauu

SEQ ID NO: 1966896 - RNA, 15 nt, Human
aaugaagguuuuugu

SEQ ID NO: 1966897 - RNA, 23 nt, Human
aauacuuugcagcacagcugaga

SEQ ID NO: 1966898 - RNA, 13 nt, Human
aauacugcuugaa

SEQ ID NO: 1966899 - RNA, 22 nt, Human
aauacuguacaaugacuuuauu

SEQ ID NO: 1966900 - RNA, 14 nt, Human
aauacuguuauucu

SEQ ID NO: 1966901 - RNA, 15 nt, Human
aauacuguuauucuu

SEQ ID NO: 1966902 - RNA, 16 nt, Human
aauacuguuauucuuu

SEQ ID NO: 1966903 - RNA, 18 nt, Human
aauacugaaccacuugua

SEQ ID NO: 1966904 - RNA, 18 nt, Human
aauacugauggaauuuuu

SEQ ID NO: 1966905 - RNA, 20 nt, Human
aauacugaaccacuuguaga

SEQ ID NO: 1966906 - RNA, 21 nt, Human
aauacucagggaaagcauuua

SEQ ID NO: 1966907 - RNA, 23 nt, Human
aauacucagggaaagcauuuaaa

SEQ ID NO: 1966908 - RNA, 13 nt, Human
aauacugaaccac

SEQ ID NO: 1966909 - RNA, 14 nt, Human
aauacugaaccacu

SEQ ID NO: 1966910 - RNA, 15 nt, Human
aauacugaaccacuu

SEQ ID NO: 1966911 - RNA, 13 nt, Human
aauacucuuauau

SEQ ID NO: 1966912 - RNA, 22 nt, Human
aauacucuacccucuuagaaaa

SEQ ID NO: 1966913 - RNA, 20 nt, Human
aauacucuacccucuuagaa

SEQ ID NO: 1966914 - RNA, 14 nt, Human
aaguugcuggaaag

SEQ ID NO: 1966915 - RNA, 16 nt, Human
aauauauaucaaauau

SEQ ID NO: 1966916 - RNA, 13 nt, Human
aauagacaauuua

SEQ ID NO: 1966917 - RNA, 18 nt, Human
aauauacauguuuaugua

SEQ ID NO: 1966918 - RNA, 20 nt, Human
aauauacauguuuauguaaa

SEQ ID NO: 1966919 - RNA, 14 nt, Human
aaucaccgaaaacg

SEQ ID NO: 1966920 - RNA, 19 nt, Human
aaucacauucgaguguuuc

SEQ ID NO: 1966921 - RNA, 17 nt, Human
aaucaaguauuauaaac

SEQ ID NO: 1966922 - RNA, 15 nt, Human
aaucaccgaaaacgu

SEQ ID NO: 1966923 - RNA, 20 nt, Human
aaucaccagggccaaaagcu

SEQ ID NO: 1966924 - RNA, 21 nt, Human
aaucaagagccuuaaaacauc

SEQ ID NO: 1966925 - RNA, 22 nt, Human
aaucaagagccuuaaaacauca

SEQ ID NO: 1966926 - RNA, 13 nt, Human
aauauuauauuug

SEQ ID NO: 1966927 - RNA, 17 nt, Human
aauauuauauuuggaug

SEQ ID NO: 1966928 - RNA, 19 nt, Human
aauauuauauuuggaugca

SEQ ID NO: 1966929 - RNA, 17 nt, Human
aaucaagagccuuaaaa

SEQ ID NO: 1966930 - RNA, 19 nt, Human
aaucaagagccuuaaaaca

SEQ ID NO: 1966931 - RNA, 21 nt, Human
aauauuagugaccucagcuuu

SEQ ID NO: 1966932 - RNA, 13 nt, Human
aauauuaaaaagu

SEQ ID NO: 1966933 - RNA, 16 nt, Human
aauauuaaaaagucuu

SEQ ID NO: 1966934 - RNA, 17 nt, Human
aauauuaaaaagucuuu

SEQ ID NO: 1966935 - RNA, 19 nt, Human
aauauuaaaaagucuuuua

SEQ ID NO: 1966936 - RNA, 21 nt, Human
aauauuaaaaagucuuuuaaa

SEQ ID NO: 1966937 - RNA, 20 nt, Human
aauauuaaaaagucuuuuaa

SEQ ID NO: 1966938 - RNA, 22 nt, Human
aauguuuuuuuuuaaagacuuu

SEQ ID NO: 1966939 - RNA, 20 nt, Human
aauguuuuuuuuuaaagacu

SEQ ID NO: 1966940 - RNA, 15 nt, Human
aauguuuuuuuuuaa

SEQ ID NO: 1966941 - RNA, 19 nt, Human
aaugcgugcauaccacuuu

SEQ ID NO: 1966942 - RNA, 18 nt, Human
aaugcgugcauaccacuu

SEQ ID NO: 1966943 - RNA, 16 nt, Human
aaugcggccuuuucau

SEQ ID NO: 1966944 - RNA, 22 nt, Human
aaugcgcaggcuggcccugccc

SEQ ID NO: 1966945 - RNA, 21 nt, Human
aaugcgcaggcuggcccugcc

SEQ ID NO: 1966946 - RNA, 23 nt, Human
aaugccuuacccucauguucuua

SEQ ID NO: 1966947 - RNA, 13 nt, Human
aaugucaguaugu

SEQ ID NO: 1966948 - RNA, 15 nt, Human
aaugucaguaugugg

SEQ ID NO: 1966949 - RNA, 17 nt, Human
aauguccaguaagauca

SEQ ID NO: 1966950 - RNA, 23 nt, Human
aaugcuauaacuauguugauaaa

SEQ ID NO: 1966951 - RNA, 15 nt, Human
aaugcuaugucauuu

SEQ ID NO: 1966952 - RNA, 16 nt, Human
aaugcuaugucauuuc

SEQ ID NO: 1966953 - RNA, 17 nt, Human
aaugcuaugucauuuca

SEQ ID NO: 1966954 - RNA, 18 nt, Human
aaugcuaugucauuucau

SEQ ID NO: 1966955 - RNA, 15 nt, Human
aaugcugagguuaug

SEQ ID NO: 1966956 - RNA, 13 nt, Human
aaugcugauuuaa

SEQ ID NO: 1966957 - RNA, 15 nt, Human
aaugcugacccaugg

SEQ ID NO: 1966958 - RNA, 17 nt, Human
aaugcugacccaugggc

SEQ ID NO: 1966959 - RNA, 22 nt, Human
aaugcugacccaugggcaggag

SEQ ID NO: 1966960 - RNA, 23 nt, Human
aaugcugacccaugggcaggaga

SEQ ID NO: 1966961 - RNA, 21 nt, Human
aaugcuaugucauuucauguc

SEQ ID NO: 1966962 - RNA, 15 nt, Human
aaugcugaaaauugc

SEQ ID NO: 1966963 - RNA, 18 nt, Human
aaugcugaacauugcaua

SEQ ID NO: 1966964 - RNA, 20 nt, Human
aauggugucaguauccaggc

SEQ ID NO: 1966965 - RNA, 22 nt, Human
aaugcuggagaaaaauaucugu

SEQ ID NO: 1966966 - RNA, 15 nt, Human
aaugugaaaagaaaa

SEQ ID NO: 1966967 - RNA, 17 nt, Human
aaugugaaaagaaaaau

SEQ ID NO: 1966968 - RNA, 15 nt, Human
aauguuuaagcagaa

SEQ ID NO: 1966969 - RNA, 20 nt, Human
aauguuuaagcagaauugga

SEQ ID NO: 1966970 - RNA, 21 nt, Human
aauguuuaagcagaauuggaa

SEQ ID NO: 1966971 - RNA, 22 nt, Human
aauguuuaagcagaauuggaaa

SEQ ID NO: 1966972 - RNA, 19 nt, Human
aauguccaguaagaucacu

SEQ ID NO: 1966973 - RNA, 20 nt, Human
aauguccaguaagaucacug

SEQ ID NO: 1966974 - RNA, 22 nt, Human
aauguccaguaagaucacuguu

SEQ ID NO: 1966975 - RNA, 22 nt, Human
aauguuuacagauccccaagcc

SEQ ID NO: 1966976 - RNA, 12 nt, Human
aauguuuacaaa

SEQ ID NO: 1966977 - RNA, 15 nt, Human
aauguuugccucugc

SEQ ID NO: 1966978 - RNA, 16 nt, Human
aauguuugccucugcc

SEQ ID NO: 1966979 - RNA, 12 nt, Human
aauguuucuaag

SEQ ID NO: 1966980 - RNA, 18 nt, Human
aaggucauuuuuuuuaag

SEQ ID NO: 1966981 - RNA, 19 nt, Human
aaggucauuuuuuuuaaga

SEQ ID NO: 1966982 - RNA, 18 nt, Human
aagggacgcuacccggga

SEQ ID NO: 1966983 - RNA, 21 nt, Human
aagggaccagggagaugccac

SEQ ID NO: 1966984 - RNA, 18 nt, Human
aagggagcuggcuccagc

SEQ ID NO: 1966985 - RNA, 16 nt, Human
aagggaggcccagcgc

SEQ ID NO: 1966986 - RNA, 21 nt, Human
aagggaauagaaauguuugcu

SEQ ID NO: 1966987 - RNA, 21 nt, Human
aaguagaagucuuagauguau

SEQ ID NO: 1966988 - RNA, 21 nt, Human
aaguagaacuuuguauaguua

SEQ ID NO: 1966989 - RNA, 23 nt, Human
aaguagaacuuuguauaguuaug

SEQ ID NO: 1966990 - RNA, 17 nt, Human
aaguaggggaagaauaa

SEQ ID NO: 1966991 - RNA, 19 nt, Human
aaguaggggaagaauaauu

SEQ ID NO: 1966992 - RNA, 20 nt, Human
aaguaggggaagaauaauuu

SEQ ID NO: 1966993 - RNA, 18 nt, Human
aaguaucccuacuguaau

SEQ ID NO: 1966994 - RNA, 23 nt, Human
aaguaucccuacuguaauuugug

SEQ ID NO: 1966995 - RNA, 17 nt, Human
aaguaucccuacuguaa

SEQ ID NO: 1966996 - RNA, 15 nt, Human
aaggugauaaaauca

SEQ ID NO: 1966997 - RNA, 20 nt, Human
aaggugaggagcuugaaacc

SEQ ID NO: 1966998 - RNA, 20 nt, Human
aaguagaagucuuagaugua

SEQ ID NO: 1966999 - RNA, 19 nt, Human
aaguagaagucuuagaugu

SEQ ID NO: 1967000 - RNA, 17 nt, Human
aaguagaacuuuguaua

SEQ ID NO: 1967001 - RNA, 18 nt, Human
aaguagaacuuuguauag

SEQ ID NO: 1967002 - RNA, 22 nt, Human
aaggugauaaaaucauaaguau

SEQ ID NO: 1967003 - RNA, 14 nt, Human
aaggugcaggcagg

SEQ ID NO: 1967004 - RNA, 14 nt, Human
aagucuccaaaguc

SEQ ID NO: 1967005 - RNA, 13 nt, Human
aagucucaaggua

SEQ ID NO: 1967006 - RNA, 20 nt, Human
aaguccuuugagcuccuggg

SEQ ID NO: 1967007 - RNA, 22 nt, Human
aaguccuuggcuugccauuuuu

SEQ ID NO: 1967008 - RNA, 18 nt, Human
aaguccuuugagcuccug

SEQ ID NO: 1967009 - RNA, 16 nt, Human
aagucgguuaaaaugg

SEQ ID NO: 1967010 - RNA, 22 nt, Human
aaguccucuuuucugagaggac

SEQ ID NO: 1967011 - RNA, 21 nt, Human
aaguauccugagagcccagaa

SEQ ID NO: 1967012 - RNA, 22 nt, Human
aagucccuguaauuguuguuug

SEQ ID NO: 1967013 - RNA, 18 nt, Human
aaguccucuuuucugaga

SEQ ID NO: 1967014 - RNA, 18 nt, Human
aaguccgcagaagcccug

SEQ ID NO: 1967015 - RNA, 19 nt, Human
aaguccgcagaagcccuga

SEQ ID NO: 1967016 - RNA, 19 nt, Human
aaguccuacuuuuaaagaa

SEQ ID NO: 1967017 - RNA, 20 nt, Human
aaguccuacuuuuaaagaau

SEQ ID NO: 1967018 - RNA, 16 nt, Human
aaguugaguauauuau

SEQ ID NO: 1967019 - RNA, 18 nt, Human
aaguugaguauauuauaa

SEQ ID NO: 1967020 - RNA, 19 nt, Human
aaguugagcuaugacuuaa

SEQ ID NO: 1967021 - RNA, 20 nt, Human
aaguugagcuaugacuuaac

SEQ ID NO: 1967022 - RNA, 16 nt, Human
aaguugagcaaacauu

SEQ ID NO: 1967023 - RNA, 16 nt, Human
aaguugagcuaugacu

SEQ ID NO: 1967024 - RNA, 18 nt, Human
aaguugagcuaugacuua

SEQ ID NO: 1967025 - RNA, 12 nt, Human
aaguugaauuuu

SEQ ID NO: 1967026 - RNA, 20 nt, Human
aaguugacucugcucuugca

SEQ ID NO: 1967027 - RNA, 21 nt, Human
aaguugacucugcucuugcau

SEQ ID NO: 1967028 - RNA, 15 nt, Human
aaguguacuggauuu

SEQ ID NO: 1967029 - RNA, 19 nt, Human
aaguggaaaaauagccugc

SEQ ID NO: 1967030 - RNA, 21 nt, Human
aaguggaaaaauagccugccu

SEQ ID NO: 1967031 - RNA, 15 nt, Human
aagucuccaaagucu

SEQ ID NO: 1967032 - RNA, 14 nt, Human
aagucucuuuuuua

SEQ ID NO: 1967033 - RNA, 15 nt, Human
aagucucuuuuuuac

SEQ ID NO: 1967034 - RNA, 16 nt, Human
aagucucuuuuuuaca

SEQ ID NO: 1967035 - RNA, 18 nt, Human
aagucucuuuuuuacaaa

SEQ ID NO: 1967036 - RNA, 20 nt, Human
aagucuguugauuaaagaug

SEQ ID NO: 1967037 - RNA, 20 nt, Human
aagcggcccuaagggagugu

SEQ ID NO: 1967038 - RNA, 21 nt, Human
aagcgcccuggcccccacaug

SEQ ID NO: 1967039 - RNA, 21 nt, Human
aagcgauucuucugcuucagc

SEQ ID NO: 1967040 - RNA, 13 nt, Human
aagcgcccuggcc

SEQ ID NO: 1967041 - RNA, 14 nt, Human
aagcgcccuggccc

SEQ ID NO: 1967042 - RNA, 15 nt, Human
aagcgcccuggcccc

SEQ ID NO: 1967043 - RNA, 19 nt, Human
aagcgcccuggcccccaca

SEQ ID NO: 1967044 - RNA, 12 nt, Human
aaggcagggagg

SEQ ID NO: 1967045 - RNA, 18 nt, Human
aaggcagcuguugucucu

SEQ ID NO: 1967046 - RNA, 21 nt, Human
aaggcagcuguugucucuucu

SEQ ID NO: 1967047 - RNA, 22 nt, Human
aaggcagcuguugucucuucuc

SEQ ID NO: 1967048 - RNA, 15 nt, Human
aaggauguucuagca

SEQ ID NO: 1967049 - RNA, 15 nt, Human
aaggauugcuacugu

SEQ ID NO: 1967050 - RNA, 22 nt, Human
aaggacuuccugauugguuucu

SEQ ID NO: 1967051 - RNA, 21 nt, Human
aaggacaguccuauuuagaca

SEQ ID NO: 1967052 - RNA, 13 nt, Human
aaggacuuccuga

SEQ ID NO: 1967053 - RNA, 21 nt, Human
aagcugugugcucuccaagcc

SEQ ID NO: 1967054 - RNA, 13 nt, Human
aaggacacuagaa

SEQ ID NO: 1967055 - RNA, 13 nt, Human
aaggacagccccu

SEQ ID NO: 1967056 - RNA, 19 nt, Human
aaggacagccccuccucca

SEQ ID NO: 1967057 - RNA, 18 nt, Human
aagcuguguggcagucug

SEQ ID NO: 1967058 - RNA, 18 nt, Human
aagcuggucccacucagu

SEQ ID NO: 1967059 - RNA, 21 nt, Human
aagcuggucccacucagucca

SEQ ID NO: 1967060 - RNA, 15 nt, Human
aagauguucuggaua

SEQ ID NO: 1967061 - RNA, 20 nt, Human
aagauguucuggauaccauu

SEQ ID NO: 1967062 - RNA, 12 nt, Human
aagauguuauau

SEQ ID NO: 1967063 - RNA, 14 nt, Human
aagauguuauauuu

SEQ ID NO: 1967064 - RNA, 22 nt, Human
aagauguuauauuuuucuuaaa

SEQ ID NO: 1967065 - RNA, 16 nt, Human
aagauguuauauuuuu

SEQ ID NO: 1967066 - RNA, 18 nt, Human
aagauguuauauuuuucu

SEQ ID NO: 1967067 - RNA, 13 nt, Human
aagauacugaaau

SEQ ID NO: 1967068 - RNA, 18 nt, Human
aagauaccuuaaaauuug

SEQ ID NO: 1967069 - RNA, 19 nt, Human
aagauaccuuaaaauuuga

SEQ ID NO: 1967070 - RNA, 20 nt, Human
aagauaccuuaaaauuugaa

SEQ ID NO: 1967071 - RNA, 21 nt, Human
aagauaccuuaaaauuugaaa

SEQ ID NO: 1967072 - RNA, 23 nt, Human
aagauaccuuaaaauuugaaaca

SEQ ID NO: 1967073 - RNA, 18 nt, Human
aagauaccuuuuuuuuuc

SEQ ID NO: 1967074 - RNA, 20 nt, Human
aagauaccuuuuuuuuucuu

SEQ ID NO: 1967075 - RNA, 21 nt, Human
aagauaccuuuuuuuuucuuu

SEQ ID NO: 1967076 - RNA, 14 nt, Human
aagauaccuuaaaa

SEQ ID NO: 1967077 - RNA, 15 nt, Human
aagauaccuuaaaau

SEQ ID NO: 1967078 - RNA, 16 nt, Human
aagauaccuuaaaauu

SEQ ID NO: 1967079 - RNA, 17 nt, Human
aagauaccuuaaaauuu

SEQ ID NO: 1967080 - RNA, 23 nt, Human
aagauacaguuacucagaauucu

SEQ ID NO: 1967081 - RNA, 13 nt, Human
aagauaaaugugc

SEQ ID NO: 1967082 - RNA, 12 nt, Human
aagauaaaugug

SEQ ID NO: 1967083 - RNA, 18 nt, Human
aagauaaaaaaacagcuu

SEQ ID NO: 1967084 - RNA, 16 nt, Human
aacuuucaagaacuug

SEQ ID NO: 1967085 - RNA, 19 nt, Human
aacuuucaagaacuuguuu

SEQ ID NO: 1967086 - RNA, 21 nt, Human
aacuuucaagaacuuguuuaa

SEQ ID NO: 1967087 - RNA, 22 nt, Human
aagaguggcagcuauaggaaau

SEQ ID NO: 1967088 - RNA, 15 nt, Human
aagaguggccccacc

SEQ ID NO: 1967089 - RNA, 16 nt, Human
aagaguggccccaccu

SEQ ID NO: 1967090 - RNA, 17 nt, Human
aagaguggccccaccug

SEQ ID NO: 1967091 - RNA, 19 nt, Human
aagaguggccccaccuggc

SEQ ID NO: 1967092 - RNA, 21 nt, Human
aagaguggccccaccuggccc

SEQ ID NO: 1967093 - RNA, 19 nt, Human
aagaguuugccuuauaaau

SEQ ID NO: 1967094 - RNA, 15 nt, Human
aagaguguaaaauau

SEQ ID NO: 1967095 - RNA, 17 nt, Human
aagaguguaaaauauuu

SEQ ID NO: 1967096 - RNA, 22 nt, Human
aagaguggccccaccuggcccu

SEQ ID NO: 1967097 - RNA, 17 nt, Human
aagagucuggggaccag

SEQ ID NO: 1967098 - RNA, 13 nt, Human
aagagucuuucuu

SEQ ID NO: 1967099 - RNA, 16 nt, Human
aagagucuuucuucuu

SEQ ID NO: 1967100 - RNA, 22 nt, Human
aagagugaaauaccauuauuau

SEQ ID NO: 1967101 - RNA, 23 nt, Human
aagccagcaggcucucaggccag

SEQ ID NO: 1967102 - RNA, 20 nt, Human
aagccagcaggcucucaggc

SEQ ID NO: 1967103 - RNA, 13 nt, Human
aagcagcucuccc

SEQ ID NO: 1967104 - RNA, 14 nt, Human
aagccaccaacagc

SEQ ID NO: 1967105 - RNA, 19 nt, Human
aagccagcaggcucucagg

SEQ ID NO: 1967106 - RNA, 21 nt, Human
aagcagcguuucuaugacaca

SEQ ID NO: 1967107 - RNA, 22 nt, Human
aagcagcguuucuaugacacau

SEQ ID NO: 1967108 - RNA, 14 nt, Human
aagcagcguuucua

SEQ ID NO: 1967109 - RNA, 17 nt, Human
aagcagcguuucuauga

SEQ ID NO: 1967110 - RNA, 20 nt, Human
aagcagcguuucuaugacac

SEQ ID NO: 1967111 - RNA, 17 nt, Human
aagcagcauaaagaauu

SEQ ID NO: 1967112 - RNA, 19 nt, Human
aagauucuauguuaauauu

SEQ ID NO: 1967113 - RNA, 11 nt, Human
aagauucuaug

SEQ ID NO: 1967114 - RNA, 19 nt, Human
aagauuaauagcauucgaa

SEQ ID NO: 1967115 - RNA, 18 nt, Human
aaaaguucugcagauaaa

SEQ ID NO: 1967116 - RNA, 11 nt, Human
aaaaguucuuu

SEQ ID NO: 1967117 - RNA, 15 nt, Human
aaaaguuauuaaaau

SEQ ID NO: 1967118 - RNA, 17 nt, Human
aaaaguuauuaaaauug

SEQ ID NO: 1967119 - RNA, 13 nt, Human
aaaaguugaauuu

SEQ ID NO: 1967120 - RNA, 17 nt, Human
aaaauaaaacuuuuuaa

SEQ ID NO: 1967121 - RNA, 19 nt, Human
aaaauaaaauuaaagcuga

SEQ ID NO: 1967122 - RNA, 18 nt, Human
aaaaguugaagaucguga

SEQ ID NO: 1967123 - RNA, 15 nt, Human
aaaauaaaauaaaua

SEQ ID NO: 1967124 - RNA, 22 nt, Human
aaaaucccuuaccucggugccu

SEQ ID NO: 1967125 - RNA, 21 nt, Human
aaaaucuacacuccagugaga

SEQ ID NO: 1967126 - RNA, 14 nt, Human
aaaauaaacuuucu

SEQ ID NO: 1967127 - RNA, 22 nt, Human
aaaauaaacuuucuuaauauuu

SEQ ID NO: 1967128 - RNA, 22 nt, Human
aaaagugcugcagggcuuuaaa

SEQ ID NO: 1967129 - RNA, 18 nt, Human
aaaaagaaagaaagagga

SEQ ID NO: 1967130 - RNA, 13 nt, Human
aaaaagaacuucc

SEQ ID NO: 1967131 - RNA, 15 nt, Human
aaaaagaaaggaggg

SEQ ID NO: 1967132 - RNA, 19 nt, Human
aaaaacucuuuaacuugua

SEQ ID NO: 1967133 - RNA, 20 nt, Human
aaaaacucuuuaacuuguaa

SEQ ID NO: 1967134 - RNA, 12 nt, Human
aaaaacugaagu

SEQ ID NO: 1967135 - RNA, 13 nt, Human
aaaaacugaaguu

SEQ ID NO: 1967136 - RNA, 11 nt, Human
aaaaagaaaaa

SEQ ID NO: 1967137 - RNA, 13 nt, Human
aaaaagaaaaaag

SEQ ID NO: 1967138 - RNA, 15 nt, Human
aaacagaaauuggua

SEQ ID NO: 1967139 - RNA, 14 nt, Human
aaacagaaauuggu

SEQ ID NO: 1967140 - RNA, 17 nt, Human
aaacacguuuuaaggac

SEQ ID NO: 1967141 - RNA, 18 nt, Human
aaacacguuuuaaggacu

SEQ ID NO: 1967142 - RNA, 22 nt, Human
aaacacguuuuaaggacugacu

SEQ ID NO: 1967143 - RNA, 13 nt, Human
aaacacuaaaugu

SEQ ID NO: 1967144 - RNA, 14 nt, Human
aaacacuaaauguu

SEQ ID NO: 1967145 - RNA, 15 nt, Human
aaacacuaaauguua

SEQ ID NO: 1967146 - RNA, 16 nt, Human
aaacacuaaauguuaa

SEQ ID NO: 1967147 - RNA, 17 nt, Human
aaacacuaaauguuaaa

SEQ ID NO: 1967148 - RNA, 19 nt, Human
aaacacuaaauguuaaaga

SEQ ID NO: 1967149 - RNA, 20 nt, Human
aaacacuaaauguuaaagau

SEQ ID NO: 1967150 - RNA, 21 nt, Human
aaacacuaaauguuaaagaug

SEQ ID NO: 1967151 - RNA, 22 nt, Human
aaacacuaaauguuaaagaugu

SEQ ID NO: 1967152 - RNA, 21 nt, Human
aaacacugggagaaaugaaaa

SEQ ID NO: 1967153 - RNA, 22 nt, Human
aaacacugggagaaaugaaaaa

SEQ ID NO: 1967154 - RNA, 16 nt, Human
aaacacuguucucugc

SEQ ID NO: 1967155 - RNA, 16 nt, Human
aaacacuugugacuuu

SEQ ID NO: 1967156 - RNA, 20 nt, Human
aaacacuugugacuuuugcu

SEQ ID NO: 1967157 - RNA, 19 nt, Human
aaaaucucaaauuucuaaa

SEQ ID NO: 1967158 - RNA, 22 nt, Human
aaaaucucaaauuucuaaaucu

SEQ ID NO: 1967159 - RNA, 14 nt, Human
aaacaccuucuaua

SEQ ID NO: 1967160 - RNA, 21 nt, Human
aaaauugaugggauuugguca

SEQ ID NO: 1967161 - RNA, 17 nt, Human
aaagauauuuugcuuug

SEQ ID NO: 1967162 - RNA, 20 nt, Human
aaagauauuuugcuuuguga

SEQ ID NO: 1967163 - RNA, 12 nt, Human
aaagauauuuug

SEQ ID NO: 1967164 - RNA, 16 nt, Human
aaagauauuuugcuuu

SEQ ID NO: 1967165 - RNA, 18 nt, Human
aaagaguguaaaauauuu

SEQ ID NO: 1967166 - RNA, 16 nt, Human
aaagaguguaaaauau

SEQ ID NO: 1967167 - RNA, 23 nt, Human
aaagaaaucuauagaaaguguuc

SEQ ID NO: 1967168 - RNA, 14 nt, Human
aaagaguaggaaga

SEQ ID NO: 1967169 - RNA, 20 nt, Human
aaagaagguuucagaaagaa

SEQ ID NO: 1967170 - RNA, 14 nt, Human
aaagagucuuucuu

SEQ ID NO: 1967171 - RNA, 18 nt, Human
aaacucugaauuuaucuu

SEQ ID NO: 1967172 - RNA, 15 nt, Human
aaacucugaauuuau

SEQ ID NO: 1967173 - RNA, 17 nt, Human
aaacucugaauuuaucu

SEQ ID NO: 1967174 - RNA, 15 nt, Human
aaagaaaucuauaga

SEQ ID NO: 1967175 - RNA, 18 nt, Human
aaagaaaucuauagaaag

SEQ ID NO: 1967176 - RNA, 21 nt, Human
aaagaaaucuauagaaagugu

SEQ ID NO: 1967177 - RNA, 22 nt, Human
aaagaaaucuauagaaaguguu

SEQ ID NO: 1967178 - RNA, 17 nt, Human
aaagaaauauaccuaaa

SEQ ID NO: 1967179 - RNA, 15 nt, Human
aaagaaauauaccua

SEQ ID NO: 1967180 - RNA, 18 nt, Human
aaaccaucauugaaaucu

SEQ ID NO: 1967181 - RNA, 13 nt, Human
aaacucucugaac

SEQ ID NO: 1967182 - RNA, 12 nt, Human
aaacucucugaa

SEQ ID NO: 1967183 - RNA, 15 nt, Human
aaacccugucaaaca

SEQ ID NO: 1967184 - RNA, 18 nt, Human
aaacucuccucugcugcu

SEQ ID NO: 1967185 - RNA, 14 nt, Human
aaacccugucaaac

SEQ ID NO: 1967186 - RNA, 16 nt, Human
aaacccugucaaacau

SEQ ID NO: 1967187 - RNA, 18 nt, Human
aaaccccuguaggccuca

SEQ ID NO: 1967188 - RNA, 16 nt, Human
aaacccuauugguaaa

SEQ ID NO: 1967189 - RNA, 15 nt, Human
aaagccaaugugaac

SEQ ID NO: 1967190 - RNA, 17 nt, Human
aaagccaaugugaacag

SEQ ID NO: 1967191 - RNA, 16 nt, Human
aaagccuccuccagcc

SEQ ID NO: 1967192 - RNA, 22 nt, Human
aaagcccuuccaugucgccucu

SEQ ID NO: 1967193 - RNA, 23 nt, Human
aaagcccuuccaugucgccucug

SEQ ID NO: 1967194 - RNA, 13 nt, Human
aaaggcaaggucc

SEQ ID NO: 1967195 - RNA, 16 nt, Human
aaaggcaaacauuuga

SEQ ID NO: 1967196 - RNA, 16 nt, Human
aaaggcuccaggagca

SEQ ID NO: 1967197 - RNA, 15 nt, Human
aaaggcuccaggagc

SEQ ID NO: 1967198 - RNA, 21 nt, Human
aaaggccuaauucuaugccug

SEQ ID NO: 1967199 - RNA, 12 nt, Human
aaaggcccagag

SEQ ID NO: 1967200 - RNA, 14 nt, Human
aaaggcagaagcaa

SEQ ID NO: 1967201 - RNA, 20 nt, Human
aaaggcacauggaauauauu

SEQ ID NO: 1967202 - RNA, 21 nt, Human
aaaggcacauggaauauauuu

SEQ ID NO: 1967203 - RNA, 20 nt, Human
aaaggcuccaggagcagcca

SEQ ID NO: 1967204 - RNA, 19 nt, Human
aaaggcuccaggagcagcc

SEQ ID NO: 1967205 - RNA, 13 nt, Human
aaaguggaaaaau

SEQ ID NO: 1967206 - RNA, 19 nt, Human
aaauaaaacuuuuuaaaau

SEQ ID NO: 1967207 - RNA, 13 nt, Human
aaauaaaacuuuu

SEQ ID NO: 1967208 - RNA, 16 nt, Human
aaauaaaacuuuuuaa

SEQ ID NO: 1967209 - RNA, 22 nt, Human
aaaguggcaccugucugcucca

SEQ ID NO: 1967210 - RNA, 18 nt, Human
aaaguggcaccugucugc

SEQ ID NO: 1967211 - RNA, 20 nt, Human
aaaguggcaccugucugcuc

SEQ ID NO: 1967212 - RNA, 17 nt, Human
aaauaaaucuacuguuu

SEQ ID NO: 1967213 - RNA, 16 nt, Human
aaaucaauaugcagaa

SEQ ID NO: 1967214 - RNA, 23 nt, Human
aaaucaaguauuauaaacaagaa

SEQ ID NO: 1967215 - RNA, 19 nt, Human
aaaucaaugcuauaacuau

SEQ ID NO: 1967216 - RNA, 17 nt, Human
aaaucaauaugcagaau

SEQ ID NO: 1967217 - RNA, 15 nt, Human
aaaucuuaauacugu

SEQ ID NO: 1967218 - RNA, 16 nt, Human
aaaucuuaauacuguu

SEQ ID NO: 1967219 - RNA, 17 nt, Human
aaaucuuaauacuguua

SEQ ID NO: 1967220 - RNA, 12 nt, Human
aaaucugucugc

SEQ ID NO: 1967221 - RNA, 14 nt, Human
aaaucugucugcug

SEQ ID NO: 1967222 - RNA, 13 nt, Human
aaaucaaagugcu

SEQ ID NO: 1967223 - RNA, 21 nt, Human
aaauaguuuauuuuaaaacaa

SEQ ID NO: 1967224 - RNA, 12 nt, Human
aaauaguuuauu

SEQ ID NO: 1967225 - RNA, 17 nt, Human
aaauaguuuauuuuaaa

SEQ ID NO: 1967226 - RNA, 20 nt, Human
aaauaguuuauuuuaaaaca

SEQ ID NO: 1967227 - RNA, 14 nt, Human
aaaucaaagugcua

SEQ ID NO: 1967228 - RNA, 15 nt, Human
aaaucaaagugcuau

SEQ ID NO: 1967229 - RNA, 22 nt, Human
aaaucaaauaauaccuuagaag

SEQ ID NO: 1967230 - RNA, 17 nt, Human
aaaucaaguauuauaaa

SEQ ID NO: 1967231 - RNA, 24 nt, Human
aaauagcucaggugucccugcacu

SEQ ID NO: 1967232 - RNA, 20 nt, Human
aaauagcuuuuuucucugau

SEQ ID NO: 1967233 - RNA, 17 nt, Human
aaauagcuuuuuucucu

SEQ ID NO: 1967234 - RNA, 19 nt, Human
aaauaguguuauugagaga

SEQ ID NO: 1967235 - RNA, 21 nt, Human
aaauaguguggaaauuaagaa

SEQ ID NO: 1967236 - RNA, 16 nt, Human
aaauaguucugugacu

SEQ ID NO: 1967237 - RNA, 22 nt, Human
aaauaguucugugacuaggaaa

SEQ ID NO: 1967238 - RNA, 23 nt, Human
aaauaguucugugacuaggaaaa

SEQ ID NO: 1967239 - RNA, 13 nt, Human
aaauaguucuucu

SEQ ID NO: 1967240 - RNA, 19 nt, Human
aaauaguggugugauuugg

SEQ ID NO: 1967241 - RNA, 20 nt, Human
aaauaguguggaaauuaaga

SEQ ID NO: 1967242 - RNA, 13 nt, Human
aaauucuuucauu

SEQ ID NO: 1967243 - RNA, 21 nt, Human
aaauucuugcaaaguaucccu

SEQ ID NO: 1967244 - RNA, 21 nt, Human
aaauugaaaaguuauuucccu

SEQ ID NO: 1967245 - RNA, 14 nt, Human
aaauugaaaaguua

SEQ ID NO: 1967246 - RNA, 13 nt, Human
aaauuaaagcuga

SEQ ID NO: 1967247 - RNA, 17 nt, Human
aaauuaaagcugaaaac

SEQ ID NO: 1967248 - RNA, 19 nt, Human
aaauugacacuuaaaaaug

SEQ ID NO: 1967249 - RNA, 13 nt, Human
aaauugcuccuug

SEQ ID NO: 1967250 - RNA, 15 nt, Human
aaauugcucacaguu

SEQ ID NO: 1967251 - RNA, 18 nt, Human
aaauugcucacaguuauu

SEQ ID NO: 1967252 - RNA, 23 nt, Human
aaauugcucacaguuauuacaua

SEQ ID NO: 1967253 - RNA, 14 nt, Human
aaauugcuccuuga

SEQ ID NO: 1967254 - RNA, 20 nt, Human
aaauugccuuucuguguuua

SEQ ID NO: 1967255 - RNA, 21 nt, Human
aaauugccuuucuguguuuau

SEQ ID NO: 1967256 - RNA, 14 nt, Human
aaauugccuuucug

SEQ ID NO: 1967257 - RNA, 16 nt, Human
aaauugccuuucugug

SEQ ID NO: 1967258 - RNA, 19 nt, Human
aaauugccuuucuguguuu

SEQ ID NO: 1967259 - RNA, 15 nt, Human
aaaugccuuuguacu

SEQ ID NO: 1967260 - RNA, 14 nt, Human
aaaucuuauuaaag

SEQ ID NO: 1967261 - RNA, 16 nt, Human
aaaucuuauuaaaguu

SEQ ID NO: 1967262 - RNA, 19 nt, Human
aaaucuuauuaaaguuuca

SEQ ID NO: 1967263 - RNA, 23 nt, Human
aaaugccuuacccucauguucuu

SEQ ID NO: 1967264 - RNA, 12 nt, Human
aaaucuuauuaa

SEQ ID NO: 1967265 - RNA, 19 nt, Human
aaaucuuaauacuguuauu

SEQ ID NO: 1967266 - RNA, 23 nt, Human
aaaucuuaauacuguuauucuuu

SEQ ID NO: 1967267 - RNA, 17 nt, Human
aaaucuuauaauuuaaa

SEQ ID NO: 1967268 - RNA, 12 nt, Human
aaauguuucuaa

SEQ ID NO: 1967269 - RNA, 14 nt, Human
aacaacauauacaa

SEQ ID NO: 1967270 - RNA, 18 nt, Human
aacaaauuuacagagaca

SEQ ID NO: 1967271 - RNA, 23 nt, Human
aaauuuuuuuucaugcuuuauca

SEQ ID NO: 1967272 - RNA, 12 nt, Human
aacacauuucuu

SEQ ID NO: 1967273 - RNA, 15 nt, Human
aacacauuucuuuuu

SEQ ID NO: 1967274 - RNA, 22 nt, Human
aacacauuucuuuuuaaaaaaa

SEQ ID NO: 1967275 - RNA, 15 nt, Human
aacacccacaggcau

SEQ ID NO: 1967276 - RNA, 13 nt, Human
aacacguuuuaag

SEQ ID NO: 1967277 - RNA, 13 nt, Human
aacacuaaauguu

SEQ ID NO: 1967278 - RNA, 14 nt, Human
aacacuaaauguua

SEQ ID NO: 1967279 - RNA, 15 nt, Human
aacacuaaauguuaa

SEQ ID NO: 1967280 - RNA, 22 nt, Human
aacacuaaauguuaaagaugua

SEQ ID NO: 1967281 - RNA, 16 nt, Human
aacacuaaauguuaaa

SEQ ID NO: 1967282 - RNA, 18 nt, Human
aacacuaaauguuaaaga

SEQ ID NO: 1967283 - RNA, 19 nt, Human
aacacuaaauguuaaagau

SEQ ID NO: 1967284 - RNA, 21 nt, Human
aacacuaaauguuaaagaugu

SEQ ID NO: 1967285 - RNA, 21 nt, Human
aaccgaacugauguaaguaaa

SEQ ID NO: 1967286 - RNA, 16 nt, Human
aacccuugccaggucc

SEQ ID NO: 1967287 - RNA, 21 nt, Human
aacccuuggagccaauggaga

SEQ ID NO: 1967288 - RNA, 15 nt, Human
aacccuauugguaaa

SEQ ID NO: 1967289 - RNA, 13 nt, Human
aacauccacucuc

SEQ ID NO: 1967290 - RNA, 15 nt, Human
aacauccacucucuc

SEQ ID NO: 1967291 - RNA, 16 nt, Human
aacauccaaguggccu

SEQ ID NO: 1967292 - RNA, 17 nt, Human
aacauccaaguggccuc

SEQ ID NO: 1967293 - RNA, 24 nt, Human
aacauccaaguggccuccgucacu

SEQ ID NO: 1967294 - RNA, 22 nt, Human
aacagcuucauguucccaaaau

SEQ ID NO: 1967295 - RNA, 17 nt, Human
aacaucauuccuuuuua

SEQ ID NO: 1967296 - RNA, 20 nt, Human
aacaucauuccuuuuuauuu

SEQ ID NO: 1967297 - RNA, 21 nt, Human
aacaucauuccuuuuuauuua

SEQ ID NO: 1967298 - RNA, 22 nt, Human
aacaucauuccuuuuuauuuau

SEQ ID NO: 1967299 - RNA, 15 nt, Human
aacagcuguugacuc

SEQ ID NO: 1967300 - RNA, 15 nt, Human
aacagcuucauguuc

SEQ ID NO: 1967301 - RNA, 18 nt, Human
aaccaccagaagcccaga

SEQ ID NO: 1967302 - RNA, 19 nt, Human
aaccaccagaagcccagaa

SEQ ID NO: 1967303 - RNA, 16 nt, Human
aacauccacucucucu

SEQ ID NO: 1967304 - RNA, 13 nt, Human
aaccacgcuggac

SEQ ID NO: 1967305 - RNA, 15 nt, Human
aaccacuucagcuga

SEQ ID NO: 1967306 - RNA, 22 nt, Human
aaccacuggaaaguuuaugguu

SEQ ID NO: 1967307 - RNA, 12 nt, Human
aaccagacacaa

SEQ ID NO: 1967308 - RNA, 22 nt, Human
aaccacuuguagauuugauuuu

SEQ ID NO: 1967309 - RNA, 12 nt, Human
aaccacuuguag

SEQ ID NO: 1967310 - RNA, 17 nt, Human
aaccacuuguagauuug

SEQ ID NO: 1967311 - RNA, 18 nt, Human
aaccacuuguagauuuga

SEQ ID NO: 1967312 - RNA, 20 nt, Human
aaccacuuguagauuugauu

SEQ ID NO: 1967313 - RNA, 21 nt, Human
aaccacuuguagauuugauuu

SEQ ID NO: 1967314 - RNA, 18 nt, Human
aacagcaguuucagguag

SEQ ID NO: 1967315 - RNA, 16 nt, Human
aacagcaagugugaau

SEQ ID NO: 1967316 - RNA, 15 nt, Human
aacagcaagugugaa

SEQ ID NO: 1967317 - RNA, 21 nt, Human
aacuuuaugcuaagugaaaua

SEQ ID NO: 1967318 - RNA, 20 nt, Human
aacuuuaugcuaagugaaau

SEQ ID NO: 1967319 - RNA, 15 nt, Human
aacuuaaucuaaaug

SEQ ID NO: 1967320 - RNA, 16 nt, Human
aacuuaaucuaaaugg

SEQ ID NO: 1967321 - RNA, 18 nt, Human
aacuuaaucuaaauggaa

SEQ ID NO: 1967322 - RNA, 20 nt, Human
aacuuaauaaucaagagccu

SEQ ID NO: 1967323 - RNA, 13 nt, Human
aacugacuugcug

SEQ ID NO: 1967324 - RNA, 13 nt, Human
aacuuaauaauca

SEQ ID NO: 1967325 - RNA, 15 nt, Human
aacuuaauaaucaag

SEQ ID NO: 1967326 - RNA, 17 nt, Human
aacuuaauaaucaagag

SEQ ID NO: 1967327 - RNA, 16 nt, Human
aacugagugccuuuug

SEQ ID NO: 1967328 - RNA, 14 nt, Human
aacugauaaagaug

SEQ ID NO: 1967329 - RNA, 15 nt, Human
aacgauuuaauuuau

SEQ ID NO: 1967330 - RNA, 11 nt, Human
aacgcagcccu

SEQ ID NO: 1967331 - RNA, 15 nt, Human
aacgcugauuuaaag

SEQ ID NO: 1967332 - RNA, 14 nt, Human
aacggccccagcuu

SEQ ID NO: 1967333 - RNA, 15 nt, Human
aacggccccagcuuc

SEQ ID NO: 1967334 - RNA, 17 nt, Human
aacggccccagcuucuc

SEQ ID NO: 1967335 - RNA, 15 nt, Human
aacuauuuaaagaaa

SEQ ID NO: 1967336 - RNA, 17 nt, Human
aacuauuuaaagaaaua

SEQ ID NO: 1967337 - RNA, 21 nt, Human
accccucccggcccugccugc

SEQ ID NO: 1967338 - RNA, 19 nt, Human
accccucccggcccugccu

SEQ ID NO: 1967339 - RNA, 20 nt, Human
accccucccggcccugccug

SEQ ID NO: 1967340 - RNA, 18 nt, Human
accccucccggcccugcc

SEQ ID NO: 1967341 - RNA, 16 nt, Human
accccuccaugugggc

SEQ ID NO: 1967342 - RNA, 19 nt, Human
accccuccaugugggcuag

SEQ ID NO: 1967343 - RNA, 17 nt, Human
accccucauagcccuca

SEQ ID NO: 1967344 - RNA, 14 nt, Human
accauauuaccaca

SEQ ID NO: 1967345 - RNA, 16 nt, Human
accauauuaccacaga

SEQ ID NO: 1967346 - RNA, 22 nt, Human
acccaagggccuggccugagcu

SEQ ID NO: 1967347 - RNA, 19 nt, Human
acccaagggccuggccuga

SEQ ID NO: 1967348 - RNA, 18 nt, Human
acccaagggccuggccug

SEQ ID NO: 1967349 - RNA, 20 nt, Human
accauauuaccacagacaua

SEQ ID NO: 1967350 - RNA, 21 nt, Human
acccacaagaaaugaaagcag

SEQ ID NO: 1967351 - RNA, 17 nt, Human
acccacaagaaaugaaa

SEQ ID NO: 1967352 - RNA, 23 nt, Human
acccaagggccuggccugagcug

SEQ ID NO: 1967353 - RNA, 13 nt, Human
acccaccucagcc

SEQ ID NO: 1967354 - RNA, 14 nt, Human
acccaccucagccu

SEQ ID NO: 1967355 - RNA, 15 nt, Human
acccaccucagccuc

SEQ ID NO: 1967356 - RNA, 16 nt, Human
acccaccucagccucc

SEQ ID NO: 1967357 - RNA, 11 nt, Human
acccaguggca

SEQ ID NO: 1967358 - RNA, 13 nt, Human
acccaguggcagg

SEQ ID NO: 1967359 - RNA, 14 nt, Human
acccaguggcaggg

SEQ ID NO: 1967360 - RNA, 15 nt, Human
acccaguggcagggc

SEQ ID NO: 1967361 - RNA, 16 nt, Human
acccaguggcagggca

SEQ ID NO: 1967362 - RNA, 17 nt, Human
acccaguggcagggcac

SEQ ID NO: 1967363 - RNA, 18 nt, Human
acccaguggcagggcaca

SEQ ID NO: 1967364 - RNA, 19 nt, Human
acccaguggcagggcacag

SEQ ID NO: 1967365 - RNA, 20 nt, Human
acccaguggcagggcacagg

SEQ ID NO: 1967366 - RNA, 22 nt, Human
acccaguggcagggcacagggc

SEQ ID NO: 1967367 - RNA, 24 nt, Human
acccaguggcagggcacagggccu

SEQ ID NO: 1967368 - RNA, 16 nt, Human
acccaugggcaggaga

SEQ ID NO: 1967369 - RNA, 17 nt, Human
acccaugggcaggagac

SEQ ID NO: 1967370 - RNA, 11 nt, Human
acccccugaau

SEQ ID NO: 1967371 - RNA, 14 nt, Human
acccccugcaaagc

SEQ ID NO: 1967372 - RNA, 17 nt, Human
acccccugcaaagccca

SEQ ID NO: 1967373 - RNA, 22 nt, Human
acccccugcaaagcccagcuug

SEQ ID NO: 1967374 - RNA, 18 nt, Human
acccccugcaaagcccag

SEQ ID NO: 1967375 - RNA, 20 nt, Human
acccccugcaaagcccagcu

SEQ ID NO: 1967376 - RNA, 13 nt, Human
acccauucagaga

SEQ ID NO: 1967377 - RNA, 21 nt, Human
acccauucagagacugucccu

SEQ ID NO: 1967378 - RNA, 18 nt, Human
acccaugggcaggagacu

SEQ ID NO: 1967379 - RNA, 17 nt, Human
accagccaguaaauggg

SEQ ID NO: 1967380 - RNA, 22 nt, Human
accagcccacgcugacuacagg

SEQ ID NO: 1967381 - RNA, 19 nt, Human
accagccccaauccaaaac

SEQ ID NO: 1967382 - RNA, 19 nt, Human
accagccagggaaagacug

SEQ ID NO: 1967383 - RNA, 11 nt, Human
accagcccacg

SEQ ID NO: 1967384 - RNA, 17 nt, Human
accagcccacgcugacu

SEQ ID NO: 1967385 - RNA, 21 nt, Human
accagcccacgcugacuacag

SEQ ID NO: 1967386 - RNA, 18 nt, Human
accagcacacucccgaga

SEQ ID NO: 1967387 - RNA, 14 nt, Human
accagcacacuccc

SEQ ID NO: 1967388 - RNA, 15 nt, Human
accagcacacucccg

SEQ ID NO: 1967389 - RNA, 16 nt, Human
accagcacacucccga

SEQ ID NO: 1967390 - RNA, 17 nt, Human
accagcacacucccgag

SEQ ID NO: 1967391 - RNA, 13 nt, Human
accagcagaaaug

SEQ ID NO: 1967392 - RNA, 14 nt, Human
accagaugugacag

SEQ ID NO: 1967393 - RNA, 13 nt, Human
accagcacacucc

SEQ ID NO: 1967394 - RNA, 19 nt, Human
accagagcugccaccugcc

SEQ ID NO: 1967395 - RNA, 13 nt, Human
accagaucauugu

SEQ ID NO: 1967396 - RNA, 12 nt, Human
accaagcccagu

SEQ ID NO: 1967397 - RNA, 20 nt, Human
accaagguagaaugaccuug

SEQ ID NO: 1967398 - RNA, 23 nt, Human
accaagguagaaugaccuuguaa

SEQ ID NO: 1967399 - RNA, 19 nt, Human
acauuuguucuauagcuuu

SEQ ID NO: 1967400 - RNA, 17 nt, Human
acauuugucauuuucau

SEQ ID NO: 1967401 - RNA, 18 nt, Human
acauuugucauuuucauu

SEQ ID NO: 1967402 - RNA, 19 nt, Human
acauuugucauuuucauua

SEQ ID NO: 1967403 - RNA, 22 nt, Human
acauuugucauuuucauuagca

SEQ ID NO: 1967404 - RNA, 23 nt, Human
acauuugucauuuucauuagcaa

SEQ ID NO: 1967405 - RNA, 23 nt, Human
acauuuguuugguuauagugcaa

SEQ ID NO: 1967406 - RNA, 15 nt, Human
acauuuauucugcuc

SEQ ID NO: 1967407 - RNA, 15 nt, Human
acauuucacugucug

SEQ ID NO: 1967408 - RNA, 16 nt, Human
acauuucacugucugu

SEQ ID NO: 1967409 - RNA, 22 nt, Human
acauuucacugucugucugguc

SEQ ID NO: 1967410 - RNA, 11 nt, Human
acauuugucau

SEQ ID NO: 1967411 - RNA, 14 nt, Human
acauuugucauuuu

SEQ ID NO: 1967412 - RNA, 16 nt, Human
acauuugucauuuuca

SEQ ID NO: 1967413 - RNA, 14 nt, Human
acauuuauucugcu

SEQ ID NO: 1967414 - RNA, 23 nt, Human
acauaaugcgugcauaccacuuu

SEQ ID NO: 1967415 - RNA, 22 nt, Human
acauaaugcgugcauaccacuu

SEQ ID NO: 1967416 - RNA, 21 nt, Human
acauaaugcgugcauaccacu

SEQ ID NO: 1967417 - RNA, 19 nt, Human
acaggcaaugcuggcuguu

SEQ ID NO: 1967418 - RNA, 23 nt, Human
acaggcaaugcuggcuguuggcu

SEQ ID NO: 1967419 - RNA, 19 nt, Human
acaggguuuugccauguug

SEQ ID NO: 1967420 - RNA, 22 nt, Human
acauguuucuuuguaaugaaaa

SEQ ID NO: 1967421 - RNA, 19 nt, Human
acauguuucuuuguaauga

SEQ ID NO: 1967422 - RNA, 21 nt, Human
acauguuuauguaaacaaauc

SEQ ID NO: 1967423 - RNA, 23 nt, Human
acauguuuauguaaacaaaucuu

SEQ ID NO: 1967424 - RNA, 23 nt, Human
acauguuucuuuguaaugaaaac

SEQ ID NO: 1967425 - RNA, 15 nt, Human
acaucagcacgauuu

SEQ ID NO: 1967426 - RNA, 17 nt, Human
acaucagcacgauuucu

SEQ ID NO: 1967427 - RNA, 18 nt, Human
acaucagcacgauuucug

SEQ ID NO: 1967428 - RNA, 16 nt, Human
acaugaugauuucaga

SEQ ID NO: 1967429 - RNA, 12 nt, Human
acaugauuucac

SEQ ID NO: 1967430 - RNA, 13 nt, Human
acaugauuucaca

SEQ ID NO: 1967431 - RNA, 14 nt, Human
acaugauuucacaa

SEQ ID NO: 1967432 - RNA, 15 nt, Human
acaugauuucacaaa

SEQ ID NO: 1967433 - RNA, 21 nt, Human
acaugauuucacaaauauuaa

SEQ ID NO: 1967434 - RNA, 22 nt, Human
acaugauuucacaaauauuaaa

SEQ ID NO: 1967435 - RNA, 17 nt, Human
acaugauuucacaaaua

SEQ ID NO: 1967436 - RNA, 18 nt, Human
acaugauuucacaaauau

SEQ ID NO: 1967437 - RNA, 19 nt, Human
acaugauuucacaaauauu

SEQ ID NO: 1967438 - RNA, 20 nt, Human
acaugauuucacaaauauua

SEQ ID NO: 1967439 - RNA, 19 nt, Human
acaugaucuucuuuauaau

SEQ ID NO: 1967440 - RNA, 16 nt, Human
acaugugcacaugcac

SEQ ID NO: 1967441 - RNA, 18 nt, Human
acaugugcacaugcacgu

SEQ ID NO: 1967442 - RNA, 14 nt, Human
acaggauuauugga

SEQ ID NO: 1967443 - RNA, 21 nt, Human
acaggaugaugacuauggaaa

SEQ ID NO: 1967444 - RNA, 18 nt, Human
acaggcaaugcuggcugu

SEQ ID NO: 1967445 - RNA, 12 nt, Human
acaggcaagcac

SEQ ID NO: 1967446 - RNA, 14 nt, Human
acaggcaaacauuu

SEQ ID NO: 1967447 - RNA, 15 nt, Human
acaggcaaacauuuu

SEQ ID NO: 1967448 - RNA, 14 nt, Human
acaggauuauuuug

SEQ ID NO: 1967449 - RNA, 15 nt, Human
acaggauuauuuuga

SEQ ID NO: 1967450 - RNA, 23 nt, Human
acaggcaaauccgaaaucagcag

SEQ ID NO: 1967451 - RNA, 16 nt, Human
acagcucuucuccagg

SEQ ID NO: 1967452 - RNA, 17 nt, Human
acagcucuucuccaggc

SEQ ID NO: 1967453 - RNA, 15 nt, Human
acaggaucagucuga

SEQ ID NO: 1967454 - RNA, 18 nt, Human
acagcucuucuccaggcu

SEQ ID NO: 1967455 - RNA, 18 nt, Human
acagccacggccaggcca

SEQ ID NO: 1967456 - RNA, 15 nt, Human
acagccacggccagg

SEQ ID NO: 1967457 - RNA, 16 nt, Human
acagccacggccaggc

SEQ ID NO: 1967458 - RNA, 17 nt, Human
acagccacggccaggcc

SEQ ID NO: 1967459 - RNA, 20 nt, Human
acacuggcaaugguaguuuc

SEQ ID NO: 1967460 - RNA, 21 nt, Human
acacuggcaaugguaguuucu

SEQ ID NO: 1967461 - RNA, 21 nt, Human
acacugccaacugaucuguua

SEQ ID NO: 1967462 - RNA, 14 nt, Human
acacugcauguuug

SEQ ID NO: 1967463 - RNA, 15 nt, Human
acacugcauguuugu

SEQ ID NO: 1967464 - RNA, 15 nt, Human
acacuguacugcaau

SEQ ID NO: 1967465 - RNA, 13 nt, Human
acagacaaagcgu

SEQ ID NO: 1967466 - RNA, 11 nt, Human
acagacacagg

SEQ ID NO: 1967467 - RNA, 15 nt, Human
acagacacaggcccg

SEQ ID NO: 1967468 - RNA, 19 nt, Human
acagaggcagccccauucu

SEQ ID NO: 1967469 - RNA, 23 nt, Human
acagaggcagccccauucugccu

SEQ ID NO: 1967470 - RNA, 13 nt, Human
acagacacaggcc

SEQ ID NO: 1967471 - RNA, 14 nt, Human
acagacacaggccc

SEQ ID NO: 1967472 - RNA, 14 nt, Human
acagaggcagcccc

SEQ ID NO: 1967473 - RNA, 15 nt, Human
acagaggcagcccca

SEQ ID NO: 1967474 - RNA, 16 nt, Human
acagcaguuucaggua

SEQ ID NO: 1967475 - RNA, 17 nt, Human
acagccaacuauggccu

SEQ ID NO: 1967476 - RNA, 19 nt, Human
acagccaacuauggccugu

SEQ ID NO: 1967477 - RNA, 14 nt, Human
acagaggggguggc

SEQ ID NO: 1967478 - RNA, 15 nt, Human
acagagugagacucu

SEQ ID NO: 1967479 - RNA, 17 nt, Human
acagaggcuauuguccc

SEQ ID NO: 1967480 - RNA, 23 nt, Human
acagagucucacuguugcccagg

SEQ ID NO: 1967481 - RNA, 19 nt, Human
acagagugagacucugucu

SEQ ID NO: 1967482 - RNA, 20 nt, Human
acacagcucuguccugggag

SEQ ID NO: 1967483 - RNA, 17 nt, Human
acacagauuugagcuca

SEQ ID NO: 1967484 - RNA, 14 nt, Human
acacagcucugucc

SEQ ID NO: 1967485 - RNA, 19 nt, Human
acacagaggcugccucucc

SEQ ID NO: 1967486 - RNA, 12 nt, Human
acacauuuuucu

SEQ ID NO: 1967487 - RNA, 20 nt, Human
acacauuuuuuaaaugcacc

SEQ ID NO: 1967488 - RNA, 22 nt, Human
acacauuuuuuaaaugcaccug

SEQ ID NO: 1967489 - RNA, 21 nt, Human
acacauuuuauuuuauuaugc

SEQ ID NO: 1967490 - RNA, 22 nt, Human
acacauuuuauuuuauuaugca

SEQ ID NO: 1967491 - RNA, 11 nt, Human
acacagcucuu

SEQ ID NO: 1967492 - RNA, 13 nt, Human
acacagcucuucu

SEQ ID NO: 1967493 - RNA, 15 nt, Human
acacgcgugcacaca

SEQ ID NO: 1967494 - RNA, 17 nt, Human
acacgcgugcacacacc

SEQ ID NO: 1967495 - RNA, 14 nt, Human
acaccaaaaaauau

SEQ ID NO: 1967496 - RNA, 15 nt, Human
acaccaaaaaauauc

SEQ ID NO: 1967497 - RNA, 19 nt, Human
acaccaaaaaaauccagaa

SEQ ID NO: 1967498 - RNA, 16 nt, Human
acacgcuccuuccucu

SEQ ID NO: 1967499 - RNA, 14 nt, Human
acacgcuccuuccu

SEQ ID NO: 1967500 - RNA, 21 nt, Human
acaauucucccgggacucugc

SEQ ID NO: 1967501 - RNA, 15 nt, Human
acaaggcaaggcugu

SEQ ID NO: 1967502 - RNA, 15 nt, Human
acaaggcaaaaacaa

SEQ ID NO: 1967503 - RNA, 17 nt, Human
acaaggcaaaaacaaag

SEQ ID NO: 1967504 - RNA, 20 nt, Human
acaaggcaaggcugucaauu

SEQ ID NO: 1967505 - RNA, 23 nt, Human
acaagggaaaauaaaaaaagaaa

SEQ ID NO: 1967506 - RNA, 17 nt, Human
acaaggcuugcugcaga

SEQ ID NO: 1967507 - RNA, 22 nt, Human
acaaggcuugcugcagauacua

SEQ ID NO: 1967508 - RNA, 23 nt, Human
acaaccuuggcuuggcccuggca

SEQ ID NO: 1967509 - RNA, 16 nt, Human
acaacgagccuuuuca

SEQ ID NO: 1967510 - RNA, 13 nt, Human
acaaacaaaagca

SEQ ID NO: 1967511 - RNA, 14 nt, Human
acaaacaaaagcau

SEQ ID NO: 1967512 - RNA, 16 nt, Human
acaaaauucuuucugg

SEQ ID NO: 1967513 - RNA, 11 nt, Human
acaaacaaaag

SEQ ID NO: 1967514 - RNA, 22 nt, Human
acaaaauguaggguuauaauaa

SEQ ID NO: 1967515 - RNA, 14 nt, Human
acaaggcaaggcug

SEQ ID NO: 1967516 - RNA, 12 nt, Human
acaaggcaaggc

SEQ ID NO: 1967517 - RNA, 17 nt, Human
acaaggauugcuacugu

SEQ ID NO: 1967518 - RNA, 13 nt, Human
acaagaaaugaaa

SEQ ID NO: 1967519 - RNA, 15 nt, Human
acaacuuuuuuuucu

SEQ ID NO: 1967520 - RNA, 18 nt, Human
acaacuuuuuuuucuuuu

SEQ ID NO: 1967521 - RNA, 20 nt, Human
acaacuuuuuuuucuuuuuu

SEQ ID NO: 1967522 - RNA, 10 nt, Human
acaagaaaau

SEQ ID NO: 1967523 - RNA, 18 nt, Human
aauuuuguaauguaucaa

SEQ ID NO: 1967524 - RNA, 21 nt, Human
aauuuugucugccccaaguuu

SEQ ID NO: 1967525 - RNA, 22 nt, Human
aauuuugucugccccaaguuuu

SEQ ID NO: 1967526 - RNA, 14 nt, Human
aauuuuguguaaga

SEQ ID NO: 1967527 - RNA, 23 nt, Human
aauuuugugaaacagacuuguau

SEQ ID NO: 1967528 - RNA, 15 nt, Human
aauuuuguguaagaa

SEQ ID NO: 1967529 - RNA, 17 nt, Human
aauuuuguguaagaaau

SEQ ID NO: 1967530 - RNA, 18 nt, Human
aauuuuguguaagaaaua

SEQ ID NO: 1967531 - RNA, 22 nt, Human
aauuuuguguaagaaauacaga

SEQ ID NO: 1967532 - RNA, 20 nt, Human
aauuuuccuucagauauuuu

SEQ ID NO: 1967533 - RNA, 11 nt, Human
aauuuuccuuu

SEQ ID NO: 1967534 - RNA, 20 nt, Human
aauuuuccuuuaauaugaaa

SEQ ID NO: 1967535 - RNA, 23 nt, Human
aauuuuccuuuaauaugaaauuu

SEQ ID NO: 1967536 - RNA, 15 nt, Human
acucauauuuucaug

SEQ ID NO: 1967537 - RNA, 22 nt, Human
acucauauccccuauuuaacag

SEQ ID NO: 1967538 - RNA, 17 nt, Human
acucuagggaaaaacca

SEQ ID NO: 1967539 - RNA, 15 nt, Human
acucuagggaaaaac

SEQ ID NO: 1967540 - RNA, 21 nt, Human
acucuaucaaguauuauaccu

SEQ ID NO: 1967541 - RNA, 17 nt, Human
acucuauguucuaagaa

SEQ ID NO: 1967542 - RNA, 16 nt, Human
acucuaguacugugaa

SEQ ID NO: 1967543 - RNA, 17 nt, Human
acucuaguacugugaau

SEQ ID NO: 1967544 - RNA, 23 nt, Human
acucuaucaaguauuauaccuuu

SEQ ID NO: 1967545 - RNA, 19 nt, Human
acucugucgcccagucugg

SEQ ID NO: 1967546 - RNA, 13 nt, Human
acucuauggucuu

SEQ ID NO: 1967547 - RNA, 15 nt, Human
acuagauuugggaga

SEQ ID NO: 1967548 - RNA, 13 nt, Human
acuagauuacauu

SEQ ID NO: 1967549 - RNA, 18 nt, Human
acuagauuacauucaguu

SEQ ID NO: 1967550 - RNA, 23 nt, Human
acucaaaugcucagaccagcucu

SEQ ID NO: 1967551 - RNA, 21 nt, Human
acucaaaugcucagaccagcu

SEQ ID NO: 1967552 - RNA, 22 nt, Human
acucaaaucuuaagaaauaaau

SEQ ID NO: 1967553 - RNA, 18 nt, Human
acucaaaugcucagacca

SEQ ID NO: 1967554 - RNA, 13 nt, Human
acucaaaaagcug

SEQ ID NO: 1967555 - RNA, 18 nt, Human
acucaaaucuuaagaaau

SEQ ID NO: 1967556 - RNA, 17 nt, Human
acucagcccucauuggc

SEQ ID NO: 1967557 - RNA, 21 nt, Human
acucagcccucauuggcucuu

SEQ ID NO: 1967558 - RNA, 16 nt, Human
acucaggcccaaagcc

SEQ ID NO: 1967559 - RNA, 19 nt, Human
acucaguccauagcagaga

SEQ ID NO: 1967560 - RNA, 13 nt, Human
acucaaaagcugg

SEQ ID NO: 1967561 - RNA, 16 nt, Human
acuaguauuuguugag

SEQ ID NO: 1967562 - RNA, 21 nt, Human
accucugcagcaauaaagcag

SEQ ID NO: 1967563 - RNA, 19 nt, Human
accucugccuuugugguga

SEQ ID NO: 1967564 - RNA, 18 nt, Human
accucugcagcaauaaag

SEQ ID NO: 1967565 - RNA, 20 nt, Human
accucugcagcaauaaagca

SEQ ID NO: 1967566 - RNA, 15 nt, Human
accucugcagcaaua

SEQ ID NO: 1967567 - RNA, 20 nt, Human
accugcccugcugaguccca

SEQ ID NO: 1967568 - RNA, 14 nt, Human
accucugggagcug

SEQ ID NO: 1967569 - RNA, 13 nt, Human
accucugggagcu

SEQ ID NO: 1967570 - RNA, 11 nt, Human
accugucugcu

SEQ ID NO: 1967571 - RNA, 13 nt, Human
accugucugcucc

SEQ ID NO: 1967572 - RNA, 14 nt, Human
accugucugcucca

SEQ ID NO: 1967573 - RNA, 19 nt, Human
accugucugcuccagcucu

SEQ ID NO: 1967574 - RNA, 20 nt, Human
accugucugcuccagcucug

SEQ ID NO: 1967575 - RNA, 17 nt, Human
accuguuaaaauuauac

SEQ ID NO: 1967576 - RNA, 15 nt, Human
accugucccccugac

SEQ ID NO: 1967577 - RNA, 12 nt, Human
accugucccccu

SEQ ID NO: 1967578 - RNA, 16 nt, Human
accugucccccugaca

SEQ ID NO: 1967579 - RNA, 22 nt, Human
accuguccuaaggaaccuuccu

SEQ ID NO: 1967580 - RNA, 15 nt, Human
accuuuaagagaaau

SEQ ID NO: 1967581 - RNA, 22 nt, Human
accuuuaaucagguccugcuca

SEQ ID NO: 1967582 - RNA, 16 nt, Human
accuuuaaucuguuuu

SEQ ID NO: 1967583 - RNA, 18 nt, Human
accuuucccaucuuccaa

SEQ ID NO: 1967584 - RNA, 13 nt, Human
accuuucccaucu

SEQ ID NO: 1967585 - RNA, 17 nt, Human
accuuggcugcagggag

SEQ ID NO: 1967586 - RNA, 18 nt, Human
accuuggcugcagggagu

SEQ ID NO: 1967587 - RNA, 12 nt, Human
accuuggcuugg

SEQ ID NO: 1967588 - RNA, 17 nt, Human
accuuggcuuggcccug

SEQ ID NO: 1967589 - RNA, 20 nt, Human
accuuggcuuggcccuggca

SEQ ID NO: 1967590 - RNA, 21 nt, Human
accuuggcuuggcccuggcag

SEQ ID NO: 1967591 - RNA, 13 nt, Human
accuugguuccug

SEQ ID NO: 1967592 - RNA, 15 nt, Human
accuugguuccuggg

SEQ ID NO: 1967593 - RNA, 15 nt, Human
accuugguuggaagg

SEQ ID NO: 1967594 - RNA, 14 nt, Human
accuuguaauguaa

SEQ ID NO: 1967595 - RNA, 15 nt, Human
accuuguaauguaac

SEQ ID NO: 1967596 - RNA, 22 nt, Human
acuaagucucuuuuuuacaaag

SEQ ID NO: 1967597 - RNA, 23 nt, Human
acuaagucucuuuuuuacaaagg

SEQ ID NO: 1967598 - RNA, 15 nt, Human
acuaagucucuuuuu

SEQ ID NO: 1967599 - RNA, 18 nt, Human
acuaagucucuuuuuuac

SEQ ID NO: 1967600 - RNA, 19 nt, Human
acuaagucucuuuuuuaca

SEQ ID NO: 1967601 - RNA, 20 nt, Human
acuaagucucuuuuuuacaa

SEQ ID NO: 1967602 - RNA, 21 nt, Human
acuaagucucuuuuuuacaaa

SEQ ID NO: 1967603 - RNA, 21 nt, Human
acgugaugugcucaucagaaa

SEQ ID NO: 1967604 - RNA, 18 nt, Human
acuaacuucuaaaacugu

SEQ ID NO: 1967605 - RNA, 19 nt, Human
acuaacuucuaaaacugua

SEQ ID NO: 1967606 - RNA, 22 nt, Human
acuaacuucuaaaacuguacuu

SEQ ID NO: 1967607 - RNA, 11 nt, Human
acgugaguccu

SEQ ID NO: 1967608 - RNA, 21 nt, Human
acgucuauuucaucagaacag

SEQ ID NO: 1967609 - RNA, 22 nt, Human
acgucuauuucaucagaacagc

SEQ ID NO: 1967610 - RNA, 14 nt, Human
acggaacucaaaua

SEQ ID NO: 1967611 - RNA, 13 nt, Human
acgucugacaggc

SEQ ID NO: 1967612 - RNA, 14 nt, Human
acgucugacaggca

SEQ ID NO: 1967613 - RNA, 18 nt, Human
acgucuauuucaucagaa

SEQ ID NO: 1967614 - RNA, 14 nt, Human
acgcugugcugccc

SEQ ID NO: 1967615 - RNA, 12 nt, Human
acgcugugcugc

SEQ ID NO: 1967616 - RNA, 11 nt, Human
acgcugugcug

SEQ ID NO: 1967617 - RNA, 12 nt, Human
acgccacauccc

SEQ ID NO: 1967618 - RNA, 15 nt, Human
acgccacauccccca

SEQ ID NO: 1967619 - RNA, 14 nt, Human
agaaaguguucugu

SEQ ID NO: 1967620 - RNA, 16 nt, Human
agaaaguguucuguua

SEQ ID NO: 1967621 - RNA, 18 nt, Human
agaaaguguucuguuaca

SEQ ID NO: 1967622 - RNA, 19 nt, Human
agaaaguguucuguuacaa

SEQ ID NO: 1967623 - RNA, 20 nt, Human
agaaaguguucuguuacaaa

SEQ ID NO: 1967624 - RNA, 23 nt, Human
agaaaguguucuguuacaaaaug

SEQ ID NO: 1967625 - RNA, 21 nt, Human
agaaauaaauccacccauguu

SEQ ID NO: 1967626 - RNA, 19 nt, Human
agaaauaaugucaaaaaua

SEQ ID NO: 1967627 - RNA, 14 nt, Human
agaaauaauaaaaa

SEQ ID NO: 1967628 - RNA, 17 nt, Human
agaaaguaaauaaaagg

SEQ ID NO: 1967629 - RNA, 23 nt, Human
agaaaguacuucuccacccugcu

SEQ ID NO: 1967630 - RNA, 22 nt, Human
agaaaguacuucuccacccugc

SEQ ID NO: 1967631 - RNA, 16 nt, Human
agaaaggauaaaguug

SEQ ID NO: 1967632 - RNA, 23 nt, Human
agaaaaucugaauuggaaugcac

SEQ ID NO: 1967633 - RNA, 17 nt, Human
acuuuuccaauauguga

SEQ ID NO: 1967634 - RNA, 20 nt, Human
acuuuuccaauaugugauuu

SEQ ID NO: 1967635 - RNA, 16 nt, Human
acuuuucaaguauuua

SEQ ID NO: 1967636 - RNA, 21 nt, Human
acuuuuccaauaugugauuuu

SEQ ID NO: 1967637 - RNA, 11 nt, Human
acuuuuccagu

SEQ ID NO: 1967638 - RNA, 14 nt, Human
acuuuuccaguauu

SEQ ID NO: 1967639 - RNA, 15 nt, Human
acuuuuccaguauuu

SEQ ID NO: 1967640 - RNA, 16 nt, Human
acuuuuccaguauuuu

SEQ ID NO: 1967641 - RNA, 18 nt, Human
acuuuuccaguauuuuag

SEQ ID NO: 1967642 - RNA, 19 nt, Human
acuuuuccaguauuuuagu

SEQ ID NO: 1967643 - RNA, 16 nt, Human
acuuuucuuucagcca

SEQ ID NO: 1967644 - RNA, 23 nt, Human
acuuuuaugauacuugaaaauua

SEQ ID NO: 1967645 - RNA, 23 nt, Human
acuuuuauuuccagugaaaucag

SEQ ID NO: 1967646 - RNA, 22 nt, Human
acuuuuagaugugguuaauuuu

SEQ ID NO: 1967647 - RNA, 20 nt, Human
acuuuucauaaccuagccuu

SEQ ID NO: 1967648 - RNA, 14 nt, Human
agaaaauaacaaua

SEQ ID NO: 1967649 - RNA, 13 nt, Human
acuuuugcuuuaa

SEQ ID NO: 1967650 - RNA, 12 nt, Human
acuuuugcuuua

SEQ ID NO: 1967651 - RNA, 14 nt, Human
acuuuucuuugugg

SEQ ID NO: 1967652 - RNA, 15 nt, Human
agaaaauaccaagga

SEQ ID NO: 1967653 - RNA, 19 nt, Human
agaaaauaguggugugauu

SEQ ID NO: 1967654 - RNA, 16 nt, Human
agaaaaucaggcuggc

SEQ ID NO: 1967655 - RNA, 19 nt, Human
agaaaauacuuaaauguua

SEQ ID NO: 1967656 - RNA, 17 nt, Human
agaaaauacuuaaaugu

SEQ ID NO: 1967657 - RNA, 18 nt, Human
agaaaauacuuaaauguu

SEQ ID NO: 1967658 - RNA, 13 nt, Human
acuuuuauaaacu

SEQ ID NO: 1967659 - RNA, 12 nt, Human
acuuuuagaugu

SEQ ID NO: 1967660 - RNA, 16 nt, Human
acuuuuaugauacuug

SEQ ID NO: 1967661 - RNA, 12 nt, Human
acuuuuaugaua

SEQ ID NO: 1967662 - RNA, 19 nt, Human
acuuuguucuggcucuucc

SEQ ID NO: 1967663 - RNA, 20 nt, Human
acuuuguucuggcucuucca

SEQ ID NO: 1967664 - RNA, 21 nt, Human
acuuuuaaagaauuucuuuau

SEQ ID NO: 1967665 - RNA, 17 nt, Human
acuuuguucuggcucuu

SEQ ID NO: 1967666 - RNA, 16 nt, Human
acuuuguucuggcucu

SEQ ID NO: 1967667 - RNA, 22 nt, Human
acuuuauuuucuauaauuuaaa

SEQ ID NO: 1967668 - RNA, 13 nt, Human
acuuuauugcauc

SEQ ID NO: 1967669 - RNA, 17 nt, Human
acuuuauugccaaaacc

SEQ ID NO: 1967670 - RNA, 16 nt, Human
acuuuauuagcagcug

SEQ ID NO: 1967671 - RNA, 22 nt, Human
acuuuaucuugaauaauguaag

SEQ ID NO: 1967672 - RNA, 17 nt, Human
acuuuauagaagaaugc

SEQ ID NO: 1967673 - RNA, 18 nt, Human
acuuuauagaagaaugca

SEQ ID NO: 1967674 - RNA, 19 nt, Human
acuuuauaguuguuuuaua

SEQ ID NO: 1967675 - RNA, 20 nt, Human
acugugcugagucugaaggc

SEQ ID NO: 1967676 - RNA, 17 nt, Human
acugugcguggggcucc

SEQ ID NO: 1967677 - RNA, 23 nt, Human
acugugcguggggcucccgccuc

SEQ ID NO: 1967678 - RNA, 22 nt, Human
acugugcugagucugaaggcug

SEQ ID NO: 1967679 - RNA, 17 nt, Human
acuuggggcacagggag

SEQ ID NO: 1967680 - RNA, 16 nt, Human
acuugguuuuuaaaaa

SEQ ID NO: 1967681 - RNA, 11 nt, Human
acuucuucugu

SEQ ID NO: 1967682 - RNA, 20 nt, Human
acuucuucuguccaagcaga

SEQ ID NO: 1967683 - RNA, 14 nt, Human
acuugggccacugu

SEQ ID NO: 1967684 - RNA, 15 nt, Human
acuugggccacugug

SEQ ID NO: 1967685 - RNA, 19 nt, Human
acuucaaaacaaacagaug

SEQ ID NO: 1967686 - RNA, 12 nt, Human
acuucagacaua

SEQ ID NO: 1967687 - RNA, 16 nt, Human
acuuauuucacuuuag

SEQ ID NO: 1967688 - RNA, 21 nt, Human
acucugucgagccugggggcu

SEQ ID NO: 1967689 - RNA, 18 nt, Human
acucugucucaguccaug

SEQ ID NO: 1967690 - RNA, 20 nt, Human
acucugucucaguccaugaa

SEQ ID NO: 1967691 - RNA, 15 nt, Human
acuggagaaaaugga

SEQ ID NO: 1967692 - RNA, 13 nt, Human
acugguccaucug

SEQ ID NO: 1967693 - RNA, 18 nt, Human
acugguaggaaacuaggu

SEQ ID NO: 1967694 - RNA, 17 nt, Human
acugccagcucuuccua

SEQ ID NO: 1967695 - RNA, 12 nt, Human
acugccagcucu

SEQ ID NO: 1967696 - RNA, 16 nt, Human
acugccagcucuuccu

SEQ ID NO: 1967697 - RNA, 19 nt, Human
acugccccccaugaggaag

SEQ ID NO: 1967698 - RNA, 22 nt, Human
acugccccccaugaggaaggaa

SEQ ID NO: 1967699 - RNA, 14 nt, Human
acugcccccucugc

SEQ ID NO: 1967700 - RNA, 15 nt, Human
acugcccccucugcc

SEQ ID NO: 1967701 - RNA, 19 nt, Human
acuggaagcacagcuucau

SEQ ID NO: 1967702 - RNA, 17 nt, Human
acuggaagcacagcuuc

SEQ ID NO: 1967703 - RNA, 16 nt, Human
acugcccccucugccc

SEQ ID NO: 1967704 - RNA, 17 nt, Human
acugcccccucugcccu

SEQ ID NO: 1967705 - RNA, 18 nt, Human
acugguuccauggccucu

SEQ ID NO: 1967706 - RNA, 14 nt, Human
acugguuauuuaaa

SEQ ID NO: 1967707 - RNA, 19 nt, Human
acugucucaagagggcacu

SEQ ID NO: 1967708 - RNA, 12 nt, Human
acugugaagagc

SEQ ID NO: 1967709 - RNA, 15 nt, Human
acugugaagagcugg

SEQ ID NO: 1967710 - RNA, 20 nt, Human
acugucucaagagggcacug

SEQ ID NO: 1967711 - RNA, 21 nt, Human
acugucucaagagggcacugg

SEQ ID NO: 1967712 - RNA, 23 nt, Human
acugucucaagagggcacuggug

SEQ ID NO: 1967713 - RNA, 14 nt, Human
acugugacaucucu

SEQ ID NO: 1967714 - RNA, 22 nt, Human
acugugcgcauaggccugcuuu

SEQ ID NO: 1967715 - RNA, 13 nt, Human
cucucccuuggau

SEQ ID NO: 1967716 - RNA, 20 nt, Human
cucuccuccuuuucacaguu

SEQ ID NO: 1967717 - RNA, 13 nt, Human
cucuccuccuuuu

SEQ ID NO: 1967718 - RNA, 16 nt, Human
cucuccgaccagacac

SEQ ID NO: 1967719 - RNA, 20 nt, Human
cucucuugauuaagaucuca

SEQ ID NO: 1967720 - RNA, 19 nt, Human
cucucuggccuucggccuc

SEQ ID NO: 1967721 - RNA, 22 nt, Human
cucucuggccuucggccuccau

SEQ ID NO: 1967722 - RNA, 17 nt, Human
cucucuggccuucggcc

SEQ ID NO: 1967723 - RNA, 10 nt, Human
cucuccucug

SEQ ID NO: 1967724 - RNA, 16 nt, Human
cucugcacaagcugca

SEQ ID NO: 1967725 - RNA, 16 nt, Human
cucgaacuccugaccu

SEQ ID NO: 1967726 - RNA, 17 nt, Human
cucgaacuccugaccuu

SEQ ID NO: 1967727 - RNA, 13 nt, Human
cucgaacuccuga

SEQ ID NO: 1967728 - RNA, 16 nt, Human
cuccuuuuccagagca

SEQ ID NO: 1967729 - RNA, 17 nt, Human
cuccuuuuccagagcau

SEQ ID NO: 1967730 - RNA, 19 nt, Human
cuccuuuuccagagcauuc

SEQ ID NO: 1967731 - RNA, 13 nt, Human
cuccuuuuguguu

SEQ ID NO: 1967732 - RNA, 17 nt, Human
cuccuuuuguguuccaa

SEQ ID NO: 1967733 - RNA, 23 nt, Human
cuccuuugugaggaagccgcugg

SEQ ID NO: 1967734 - RNA, 24 nt, Human
cuccuuuucacaguucucuccuuc

SEQ ID NO: 1967735 - RNA, 16 nt, Human
cuccuagccacccacc

SEQ ID NO: 1967736 - RNA, 22 nt, Human
cuccuagccugugccucuggga

SEQ ID NO: 1967737 - RNA, 16 nt, Human
cuccuuuagcgcccag

SEQ ID NO: 1967738 - RNA, 17 nt, Human
cuccuuuagcgcccagu

SEQ ID NO: 1967739 - RNA, 22 nt, Human
cuccuuuagcgcccaguugggu

SEQ ID NO: 1967740 - RNA, 17 nt, Human
cuccuuuagggacagcu

SEQ ID NO: 1967741 - RNA, 11 nt, Human
cucggugccuu

SEQ ID NO: 1967742 - RNA, 18 nt, Human
cucguauaugucucaggu

SEQ ID NO: 1967743 - RNA, 16 nt, Human
cucguauagaagucuu

SEQ ID NO: 1967744 - RNA, 20 nt, Human
cucguauaugucucaggucc

SEQ ID NO: 1967745 - RNA, 23 nt, Human
cucguauagaagucuucaugaaa

SEQ ID NO: 1967746 - RNA, 16 nt, Human
cuccgucacuaccugg

SEQ ID NO: 1967747 - RNA, 17 nt, Human
cuccgucacuaccuggc

SEQ ID NO: 1967748 - RNA, 19 nt, Human
cuccgucacuaccuggcug

SEQ ID NO: 1967749 - RNA, 14 nt, Human
cuccgucaacucau

SEQ ID NO: 1967750 - RNA, 14 nt, Human
cuccgucacuaccu

SEQ ID NO: 1967751 - RNA, 22 nt, Human
cuccgcuuucuacccagcgagc

SEQ ID NO: 1967752 - RNA, 15 nt, Human
cuccgggucuuccua

SEQ ID NO: 1967753 - RNA, 21 nt, Human
cuccgcuuucuacccagcgag

SEQ ID NO: 1967754 - RNA, 20 nt, Human
cuccgcuuucuacccagcga

SEQ ID NO: 1967755 - RNA, 19 nt, Human
cucccucuuucccucccuu

SEQ ID NO: 1967756 - RNA, 15 nt, Human
cucccucuuucccuc

SEQ ID NO: 1967757 - RNA, 16 nt, Human
cucccucccucuuucc

SEQ ID NO: 1967758 - RNA, 18 nt, Human
cucccagcuccaccccgc

SEQ ID NO: 1967759 - RNA, 21 nt, Human
cuccagaauuucccaaagcag

SEQ ID NO: 1967760 - RNA, 17 nt, Human
cucagaaucucaaauaa

SEQ ID NO: 1967761 - RNA, 16 nt, Human
cucagaaucucaaaua

SEQ ID NO: 1967762 - RNA, 11 nt, Human
cuccagacaca

SEQ ID NO: 1967763 - RNA, 22 nt, Human
cuccagaauuucccaaagcagu

SEQ ID NO: 1967764 - RNA, 16 nt, Human
cuccagacacaugucc

SEQ ID NO: 1967765 - RNA, 23 nt, Human
cuccaggcuguaucccaugagcc

SEQ ID NO: 1967766 - RNA, 22 nt, Human
cuccaggcuguaucccaugagc

SEQ ID NO: 1967767 - RNA, 20 nt, Human
cuccaggugcacaagcucca

SEQ ID NO: 1967768 - RNA, 19 nt, Human
cuccaggugcacaagcucc

SEQ ID NO: 1967769 - RNA, 18 nt, Human
cuccaggugcacaagcuc

SEQ ID NO: 1967770 - RNA, 22 nt, Human
cuccaggugcacaagcuccaag

SEQ ID NO: 1967771 - RNA, 14 nt, Human
cucccaccucagcc

SEQ ID NO: 1967772 - RNA, 17 nt, Human
cuccauacacacgcugc

SEQ ID NO: 1967773 - RNA, 19 nt, Human
cuccauacacacgcugccu

SEQ ID NO: 1967774 - RNA, 20 nt, Human
cuccauacacacgcugccuu

SEQ ID NO: 1967775 - RNA, 16 nt, Human
cucccaccucagccuc

SEQ ID NO: 1967776 - RNA, 17 nt, Human
cucccaccucagccucc

SEQ ID NO: 1967777 - RNA, 13 nt, Human
cucccagcaucgc

SEQ ID NO: 1967778 - RNA, 19 nt, Human
cucccagcaucgcacucug

SEQ ID NO: 1967779 - RNA, 14 nt, Human
cucuugagccuggg

SEQ ID NO: 1967780 - RNA, 13 nt, Human
cucuugagccugg

SEQ ID NO: 1967781 - RNA, 16 nt, Human
cucuugagccugggag

SEQ ID NO: 1967782 - RNA, 15 nt, Human
cucuugagccuggga

SEQ ID NO: 1967783 - RNA, 22 nt, Human
cucuugauucauaaugacuuaa

SEQ ID NO: 1967784 - RNA, 23 nt, Human
cucuugaguuguuuuuguauauu

SEQ ID NO: 1967785 - RNA, 21 nt, Human
cucuugaguuguuuuuguaua

SEQ ID NO: 1967786 - RNA, 22 nt, Human
cucuugaguuguuuuuguauau

SEQ ID NO: 1967787 - RNA, 13 nt, Human
cucuugaguuguu

SEQ ID NO: 1967788 - RNA, 16 nt, Human
cucuugaguuguuuuu

SEQ ID NO: 1967789 - RNA, 18 nt, Human
cucuugaguuguuuuugu

SEQ ID NO: 1967790 - RNA, 20 nt, Human
cucuugaguuguuuuuguau

SEQ ID NO: 1967791 - RNA, 24 nt, Human
cucuugauucauaaugacuuaagc

SEQ ID NO: 1967792 - RNA, 22 nt, Human
cucuugccacugccucuuccuc

SEQ ID NO: 1967793 - RNA, 21 nt, Human
cucuugccucagcuuccccag

SEQ ID NO: 1967794 - RNA, 19 nt, Human
cucuugccucagcuucccc

SEQ ID NO: 1967795 - RNA, 22 nt, Human
cucuugccucagcuuccccagu

SEQ ID NO: 1967796 - RNA, 13 nt, Human
cucuuuuuuaagu

SEQ ID NO: 1967797 - RNA, 14 nt, Human
cucuuuuuuacaaa

SEQ ID NO: 1967798 - RNA, 13 nt, Human
cugaaagaggaau

SEQ ID NO: 1967799 - RNA, 17 nt, Human
cugaaagaggaaugaag

SEQ ID NO: 1967800 - RNA, 15 nt, Human
cucuuuuuuacaaag

SEQ ID NO: 1967801 - RNA, 19 nt, Human
cucugcacaagcugcaccc

SEQ ID NO: 1967802 - RNA, 18 nt, Human
cucugcacaagcugcacc

SEQ ID NO: 1967803 - RNA, 17 nt, Human
cucugcacaagcugcac

SEQ ID NO: 1967804 - RNA, 20 nt, Human
cugaccccucauagcccuca

SEQ ID NO: 1967805 - RNA, 21 nt, Human
cugaccccucauagcccucac

SEQ ID NO: 1967806 - RNA, 17 nt, Human
cugaccccucauagccc

SEQ ID NO: 1967807 - RNA, 17 nt, Human
cugacaccccacuuagc

SEQ ID NO: 1967808 - RNA, 18 nt, Human
cugacaccccacuuagcc

SEQ ID NO: 1967809 - RNA, 14 nt, Human
cugacaccccacuu

SEQ ID NO: 1967810 - RNA, 14 nt, Human
cugaaaauguaugu

SEQ ID NO: 1967811 - RNA, 17 nt, Human
cugaaagagucuuucuu

SEQ ID NO: 1967812 - RNA, 18 nt, Human
cugaaagaggccaaacag

SEQ ID NO: 1967813 - RNA, 13 nt, Human
cugacacacagcu

SEQ ID NO: 1967814 - RNA, 15 nt, Human
cugacacacagcucu

SEQ ID NO: 1967815 - RNA, 16 nt, Human
cugacacacagcucug

SEQ ID NO: 1967816 - RNA, 17 nt, Human
cugacacacagcucugu

SEQ ID NO: 1967817 - RNA, 18 nt, Human
cugacacacagcucuguc

SEQ ID NO: 1967818 - RNA, 19 nt, Human
cugacacacagcucugucc

SEQ ID NO: 1967819 - RNA, 20 nt, Human
cugacacacagcucuguccu

SEQ ID NO: 1967820 - RNA, 21 nt, Human
cugacacacagcucuguccug

SEQ ID NO: 1967821 - RNA, 22 nt, Human
cugacacacagcucuguccugg

SEQ ID NO: 1967822 - RNA, 23 nt, Human
cugacacacagcucuguccuggg

SEQ ID NO: 1967823 - RNA, 21 nt, Human
cugaguaaaaaagcugugugc

SEQ ID NO: 1967824 - RNA, 20 nt, Human
cugagguugggagaggugca

SEQ ID NO: 1967825 - RNA, 21 nt, Human
cugagguugggagaggugcac

SEQ ID NO: 1967826 - RNA, 19 nt, Human
cugacccugcuucaaauau

SEQ ID NO: 1967827 - RNA, 12 nt, Human
cugagcugggau

SEQ ID NO: 1967828 - RNA, 22 nt, Human
cugagcugggaugauuggaggg

SEQ ID NO: 1967829 - RNA, 17 nt, Human
cugagcuggccucucac

SEQ ID NO: 1967830 - RNA, 22 nt, Human
cugagcuggccucucacugccu

SEQ ID NO: 1967831 - RNA, 14 nt, Human
cugagcuggccucu

SEQ ID NO: 1967832 - RNA, 16 nt, Human
cugagcuggccucuca

SEQ ID NO: 1967833 - RNA, 14 nt, Human
cugagcuuggaagc

SEQ ID NO: 1967834 - RNA, 20 nt, Human
cugagcuuggaagcuucugg

SEQ ID NO: 1967835 - RNA, 21 nt, Human
cugagcuuggaagcuucuggu

SEQ ID NO: 1967836 - RNA, 12 nt, Human
cugagcuuggaa

SEQ ID NO: 1967837 - RNA, 22 nt, Human
cugagcuugcagagaugaggcc

SEQ ID NO: 1967838 - RNA, 18 nt, Human
cugaggaagagggacugu

SEQ ID NO: 1967839 - RNA, 23 nt, Human
cugaggaagagggacuguucuuu

SEQ ID NO: 1967840 - RNA, 21 nt, Human
cugaggugggagauguggaaa

SEQ ID NO: 1967841 - RNA, 22 nt, Human
cugaggugggaggaucucuuga

SEQ ID NO: 1967842 - RNA, 13 nt, Human
cugaggugggagg

SEQ ID NO: 1967843 - RNA, 14 nt, Human
cugaggggccucuu

SEQ ID NO: 1967844 - RNA, 19 nt, Human
cugaggggagacagagcaa

SEQ ID NO: 1967845 - RNA, 15 nt, Human
cugaggggcagccug

SEQ ID NO: 1967846 - RNA, 16 nt, Human
cugaggggcagccugc

SEQ ID NO: 1967847 - RNA, 17 nt, Human
cugaggggcagccugcc

SEQ ID NO: 1967848 - RNA, 18 nt, Human
cugaggggcagccugccu

SEQ ID NO: 1967849 - RNA, 19 nt, Human
cugaggggcagccugccuu

SEQ ID NO: 1967850 - RNA, 23 nt, Human
cugaggggcagccugccuugccc

SEQ ID NO: 1967851 - RNA, 23 nt, Human
cugaggaauccagacccggcugc

SEQ ID NO: 1967852 - RNA, 18 nt, Human
cugaggggagacagagca

SEQ ID NO: 1967853 - RNA, 18 nt, Human
cugaucucucgugauuga

SEQ ID NO: 1967854 - RNA, 17 nt, Human
cugaucucucgugauug

SEQ ID NO: 1967855 - RNA, 15 nt, Human
cggagacggaguccc

SEQ ID NO: 1967856 - RNA, 15 nt, Human
cgguguccccaccau

SEQ ID NO: 1967857 - RNA, 16 nt, Human
cgguguccccaccauc

SEQ ID NO: 1967858 - RNA, 19 nt, Human
cgguguccccaccaucugc

SEQ ID NO: 1967859 - RNA, 22 nt, Human
cgguguccccaccaucugcugu

SEQ ID NO: 1967860 - RNA, 14 nt, Human
cgguguccccacca

SEQ ID NO: 1967861 - RNA, 16 nt, Human
cggugggggggcagag

SEQ ID NO: 1967862 - RNA, 13 nt, Human
cguacacauuuua

SEQ ID NO: 1967863 - RNA, 16 nt, Human
cguacacauuuuauuu

SEQ ID NO: 1967864 - RNA, 20 nt, Human
cgguuuaucgcccuggcagg

SEQ ID NO: 1967865 - RNA, 14 nt, Human
cguaauucuuauuc

SEQ ID NO: 1967866 - RNA, 23 nt, Human
cguaauucuuauuccauauuaga

SEQ ID NO: 1967867 - RNA, 17 nt, Human
cgguuccuacacaggac

SEQ ID NO: 1967868 - RNA, 16 nt, Human
cgguuccuacacagga

SEQ ID NO: 1967869 - RNA, 19 nt, Human
cgguucaguguuucugggg

SEQ ID NO: 1967870 - RNA, 13 nt, Human
cgguucaguguuu

SEQ ID NO: 1967871 - RNA, 18 nt, Human
cgguucaaaccugugaag

SEQ ID NO: 1967872 - RNA, 18 nt, Human
cguacaaguaguucugua

SEQ ID NO: 1967873 - RNA, 19 nt, Human
cguacaaguaguucuguau

SEQ ID NO: 1967874 - RNA, 21 nt, Human
cguacaaguaguucuguauuu

SEQ ID NO: 1967875 - RNA, 22 nt, Human
cguacaaguaguucuguauuug

SEQ ID NO: 1967876 - RNA, 22 nt, Human
cuaaaguguauuuuuuuacuaa

SEQ ID NO: 1967877 - RNA, 17 nt, Human
cuaaaggcuaccuuugu

SEQ ID NO: 1967878 - RNA, 19 nt, Human
cuaaaggcuaccuuuguau

SEQ ID NO: 1967879 - RNA, 15 nt, Human
cuaaaguuguacuuu

SEQ ID NO: 1967880 - RNA, 19 nt, Human
cuaaaguuguacuuuaaaa

SEQ ID NO: 1967881 - RNA, 20 nt, Human
cuaaaguuguacuuuaaaaa

SEQ ID NO: 1967882 - RNA, 14 nt, Human
cuaaagcugccagc

SEQ ID NO: 1967883 - RNA, 21 nt, Human
cuaaagaagguuucagaaaga

SEQ ID NO: 1967884 - RNA, 15 nt, Human
cuaaaggcuaccuuu

SEQ ID NO: 1967885 - RNA, 16 nt, Human
cuaaaggcuaccuuug

SEQ ID NO: 1967886 - RNA, 15 nt, Human
cuaaagcugccagcc

SEQ ID NO: 1967887 - RNA, 17 nt, Human
cguguuugucucuucug

SEQ ID NO: 1967888 - RNA, 18 nt, Human
cguguuugucucuucugg

SEQ ID NO: 1967889 - RNA, 14 nt, Human
cguuaaaaacagau

SEQ ID NO: 1967890 - RNA, 21 nt, Human
cguuaaaaacagauuuggaaa

SEQ ID NO: 1967891 - RNA, 13 nt, Human
cguuaaaauacca

SEQ ID NO: 1967892 - RNA, 14 nt, Human
cguuaccaggcagg

SEQ ID NO: 1967893 - RNA, 22 nt, Human
cguguccccuauccuacuuccc

SEQ ID NO: 1967894 - RNA, 16 nt, Human
cguguuugucucuucu

SEQ ID NO: 1967895 - RNA, 19 nt, Human
cgaguagcugagauuauag

SEQ ID NO: 1967896 - RNA, 20 nt, Human
cgaguaauugcauuugcuuu

SEQ ID NO: 1967897 - RNA, 18 nt, Human
cgauacaccgggccugga

SEQ ID NO: 1967898 - RNA, 20 nt, Human
cgauacaccgggccuggaga

SEQ ID NO: 1967899 - RNA, 21 nt, Human
cgauacaccgggccuggagaa

SEQ ID NO: 1967900 - RNA, 15 nt, Human
cgcaucagcugcuca

SEQ ID NO: 1967901 - RNA, 16 nt, Human
cgcaucagcugcucag

SEQ ID NO: 1967902 - RNA, 16 nt, Human
cgcauaggccugcuuu

SEQ ID NO: 1967903 - RNA, 13 nt, Human
cgcaucucacagc

SEQ ID NO: 1967904 - RNA, 16 nt, Human
cgccuuaaggauguuc

SEQ ID NO: 1967905 - RNA, 18 nt, Human
cgcugccccuggcagccc

SEQ ID NO: 1967906 - RNA, 14 nt, Human
cgccuucacagcag

SEQ ID NO: 1967907 - RNA, 20 nt, Human
cgccuuccaccucugggagc

SEQ ID NO: 1967908 - RNA, 12 nt, Human
cgcugcucugcc

SEQ ID NO: 1967909 - RNA, 15 nt, Human
cgcugcucugcccca

SEQ ID NO: 1967910 - RNA, 19 nt, Human
cgcuggaccuugaacuggg

SEQ ID NO: 1967911 - RNA, 23 nt, Human
cgcuggaccuugaacuggguacu

SEQ ID NO: 1967912 - RNA, 17 nt, Human
cgcugccccuggcagcc

SEQ ID NO: 1967913 - RNA, 16 nt, Human
cgcugccccuggcagc

SEQ ID NO: 1967914 - RNA, 13 nt, Human
cgcugccccuggc

SEQ ID NO: 1967915 - RNA, 13 nt, Human
cgccuucacagca

SEQ ID NO: 1967916 - RNA, 20 nt, Human
cgcuggggccaguugguccc

SEQ ID NO: 1967917 - RNA, 17 nt, Human
cgcuggggccaguuggu

SEQ ID NO: 1967918 - RNA, 16 nt, Human
cuacucaaagcaaaag

SEQ ID NO: 1967919 - RNA, 20 nt, Human
cuacuagggaaaugccuuug

SEQ ID NO: 1967920 - RNA, 23 nt, Human
cuaccugaggggccucuuauggg

SEQ ID NO: 1967921 - RNA, 19 nt, Human
cuaccugaggggccucuua

SEQ ID NO: 1967922 - RNA, 16 nt, Human
cuaccugaggggccuc

SEQ ID NO: 1967923 - RNA, 22 nt, Human
cuaccuuuaaucagguccugcu

SEQ ID NO: 1967924 - RNA, 20 nt, Human
cuaccuuuggcuuaauucca

SEQ ID NO: 1967925 - RNA, 21 nt, Human
cuaccuuuggcuuaauuccaa

SEQ ID NO: 1967926 - RNA, 17 nt, Human
cuacuaccuguaaugac

SEQ ID NO: 1967927 - RNA, 18 nt, Human
cuaccuuccaguuccuca

SEQ ID NO: 1967928 - RNA, 14 nt, Human
cuagggaagauaau

SEQ ID NO: 1967929 - RNA, 13 nt, Human
cuaggcuccuuca

SEQ ID NO: 1967930 - RNA, 12 nt, Human
cuaggcuccuuc

SEQ ID NO: 1967931 - RNA, 17 nt, Human
cuaguuugauuaaauuc

SEQ ID NO: 1967932 - RNA, 19 nt, Human
cuaguuugauuaaauucuu

SEQ ID NO: 1967933 - RNA, 13 nt, Human
cuaggguccuggg

SEQ ID NO: 1967934 - RNA, 14 nt, Human
cuaggguccugggg

SEQ ID NO: 1967935 - RNA, 15 nt, Human
cuaggguccugggga

SEQ ID NO: 1967936 - RNA, 20 nt, Human
cuaguuugauuaaauucuug

SEQ ID NO: 1967937 - RNA, 16 nt, Human
cuauaaaauguaucaa

SEQ ID NO: 1967938 - RNA, 12 nt, Human
cuauaaacacug

SEQ ID NO: 1967939 - RNA, 14 nt, Human
cuauaaacacuguu

SEQ ID NO: 1967940 - RNA, 21 nt, Human
cuauaaacacuguuuguucca

SEQ ID NO: 1967941 - RNA, 16 nt, Human
cuagcauacguacaca

SEQ ID NO: 1967942 - RNA, 18 nt, Human
cuagcauacguacacauu

SEQ ID NO: 1967943 - RNA, 19 nt, Human
cuagcauacguacacauuu

SEQ ID NO: 1967944 - RNA, 20 nt, Human
cuagcauacguacacauuuu

SEQ ID NO: 1967945 - RNA, 17 nt, Human
cuagccagaggagagag

SEQ ID NO: 1967946 - RNA, 19 nt, Human
cuagccagaggagagagga

SEQ ID NO: 1967947 - RNA, 13 nt, Human
cuaggccuggcca

SEQ ID NO: 1967948 - RNA, 14 nt, Human
cuaggccuggccag

SEQ ID NO: 1967949 - RNA, 15 nt, Human
cuaggccuggccaga

SEQ ID NO: 1967950 - RNA, 18 nt, Human
cuaggccuggccagaugc

SEQ ID NO: 1967951 - RNA, 19 nt, Human
cuaggccuggccagaugca

SEQ ID NO: 1967952 - RNA, 13 nt, Human
cuaggccugggga

SEQ ID NO: 1967953 - RNA, 12 nt, Human
cuaggccugggg

SEQ ID NO: 1967954 - RNA, 21 nt, Human
cucacacaugagcaucaggcc

SEQ ID NO: 1967955 - RNA, 14 nt, Human
cucacacaugagca

SEQ ID NO: 1967956 - RNA, 18 nt, Human
cucacaaaugaaaccuga

SEQ ID NO: 1967957 - RNA, 12 nt, Human
cucaaauaacua

SEQ ID NO: 1967958 - RNA, 21 nt, Human
cucaaauaauauuuuuuuccu

SEQ ID NO: 1967959 - RNA, 14 nt, Human
cucacaaaggaugc

SEQ ID NO: 1967960 - RNA, 22 nt, Human
cucaaaggccagguugcuaaga

SEQ ID NO: 1967961 - RNA, 19 nt, Human
cucaaagccccauuaacug

SEQ ID NO: 1967962 - RNA, 22 nt, Human
cucaaagccccauuaacugcuu

SEQ ID NO: 1967963 - RNA, 12 nt, Human
cucaaagcaaaa

SEQ ID NO: 1967964 - RNA, 15 nt, Human
cucaaagcaaaagug

SEQ ID NO: 1967965 - RNA, 14 nt, Human
cucaaagaggcagu

SEQ ID NO: 1967966 - RNA, 14 nt, Human
cucaaaacaaaggc

SEQ ID NO: 1967967 - RNA, 19 nt, Human
cucaaaaagcugccuggga

SEQ ID NO: 1967968 - RNA, 18 nt, Human
cucaaaaaaagaaaaaga

SEQ ID NO: 1967969 - RNA, 13 nt, Human
cucaaaacaaagg

SEQ ID NO: 1967970 - RNA, 16 nt, Human
cuauguugcccaggca

SEQ ID NO: 1967971 - RNA, 17 nt, Human
cuauguugcccaggcag

SEQ ID NO: 1967972 - RNA, 20 nt, Human
cuaucucccccagccccauc

SEQ ID NO: 1967973 - RNA, 19 nt, Human
cuauguaucaaugaguaac

SEQ ID NO: 1967974 - RNA, 19 nt, Human
cuaucucuauuauuggaaa

SEQ ID NO: 1967975 - RNA, 22 nt, Human
cuauguguagggcgggaggaug

SEQ ID NO: 1967976 - RNA, 15 nt, Human
cuauguugcccaggc

SEQ ID NO: 1967977 - RNA, 14 nt, Human
cuaugugugugcuu

SEQ ID NO: 1967978 - RNA, 13 nt, Human
cuauguuaauauu

SEQ ID NO: 1967979 - RNA, 23 nt, Human
cuaugucauuugcuggagcucug

SEQ ID NO: 1967980 - RNA, 13 nt, Human
cuaugucauuuca

SEQ ID NO: 1967981 - RNA, 14 nt, Human
cuaugucauuucau

SEQ ID NO: 1967982 - RNA, 16 nt, Human
cuaugucauuucaugu

SEQ ID NO: 1967983 - RNA, 17 nt, Human
cucaccucucccuugga

SEQ ID NO: 1967984 - RNA, 16 nt, Human
cucaccucucccuugg

SEQ ID NO: 1967985 - RNA, 15 nt, Human
cucaccucucccuug

SEQ ID NO: 1967986 - RNA, 14 nt, Human
cucaccucucccuu

SEQ ID NO: 1967987 - RNA, 13 nt, Human
cucaccucucccu

SEQ ID NO: 1967988 - RNA, 16 nt, Human
cucaccucccccaucu

SEQ ID NO: 1967989 - RNA, 16 nt, Human
cucaccugccccucaa

SEQ ID NO: 1967990 - RNA, 14 nt, Human
cucaccugccccuc

SEQ ID NO: 1967991 - RNA, 18 nt, Human
cucaccugccccucaacu

SEQ ID NO: 1967992 - RNA, 13 nt, Human
cucaccugccccu

SEQ ID NO: 1967993 - RNA, 17 nt, Human
cucagaaggucuguuuu

SEQ ID NO: 1967994 - RNA, 18 nt, Human
cucagaaacuccaugaug

SEQ ID NO: 1967995 - RNA, 13 nt, Human
cucacuuuuucau

SEQ ID NO: 1967996 - RNA, 22 nt, Human
cucagaaaagacgcaccagccc

SEQ ID NO: 1967997 - RNA, 18 nt, Human
cucacuuguuuuauuuaa

SEQ ID NO: 1967998 - RNA, 16 nt, Human
cucaccuugguuccug

SEQ ID NO: 1967999 - RNA, 14 nt, Human
cucacccuggggcu

SEQ ID NO: 1968000 - RNA, 22 nt, Human
ccugguuuccugcccugggagg

SEQ ID NO: 1968001 - RNA, 17 nt, Human
ccugucucuacuaaaaa

SEQ ID NO: 1968002 - RNA, 13 nt, Human
ccuggugguucac

SEQ ID NO: 1968003 - RNA, 22 nt, Human
ccuggugguucacucuuggagc

SEQ ID NO: 1968004 - RNA, 12 nt, Human
ccuggugguuca

SEQ ID NO: 1968005 - RNA, 15 nt, Human
ccuggugguuucugu

SEQ ID NO: 1968006 - RNA, 13 nt, Human
ccugguguggaag

SEQ ID NO: 1968007 - RNA, 18 nt, Human
ccugguuuccugcccugg

SEQ ID NO: 1968008 - RNA, 19 nt, Human
ccugguuuccugcccuggg

SEQ ID NO: 1968009 - RNA, 20 nt, Human
ccugguuuccugcccuggga

SEQ ID NO: 1968010 - RNA, 21 nt, Human
ccugguuuccugcccugggag

SEQ ID NO: 1968011 - RNA, 16 nt, Human
ccugguuuccugcccu

SEQ ID NO: 1968012 - RNA, 23 nt, Human
ccugguucaagcgauucucuugc

SEQ ID NO: 1968013 - RNA, 20 nt, Human
ccugguggcagugggagcug

SEQ ID NO: 1968014 - RNA, 18 nt, Human
ccugguggcagugggagc

SEQ ID NO: 1968015 - RNA, 19 nt, Human
ccugguggcagugggagcu

SEQ ID NO: 1968016 - RNA, 15 nt, Human
ccuggggagaaagua

SEQ ID NO: 1968017 - RNA, 22 nt, Human
ccugggcuuuuguuuugcuuuu

SEQ ID NO: 1968018 - RNA, 18 nt, Human
ccuggggaaccugacccc

SEQ ID NO: 1968019 - RNA, 13 nt, Human
ccuggccugucuc

SEQ ID NO: 1968020 - RNA, 17 nt, Human
ccuggccugucucggaa

SEQ ID NO: 1968021 - RNA, 13 nt, Human
ccuggccugucug

SEQ ID NO: 1968022 - RNA, 17 nt, Human
ccuggccugucugugaa

SEQ ID NO: 1968023 - RNA, 20 nt, Human
ccuggccuugggauccaggc

SEQ ID NO: 1968024 - RNA, 22 nt, Human
ccuggccuugggauccaggccc

SEQ ID NO: 1968025 - RNA, 18 nt, Human
ccuggccccucagggucc

SEQ ID NO: 1968026 - RNA, 21 nt, Human
ccuggccccucagggucccug

SEQ ID NO: 1968027 - RNA, 20 nt, Human
ccuggccccucagggucccu

SEQ ID NO: 1968028 - RNA, 22 nt, Human
ccuggccucaagugauucuccu

SEQ ID NO: 1968029 - RNA, 15 nt, Human
ccuggauggggcugc

SEQ ID NO: 1968030 - RNA, 18 nt, Human
ccuggauggggcugcacc

SEQ ID NO: 1968031 - RNA, 17 nt, Human
ccuggauggggcugcac

SEQ ID NO: 1968032 - RNA, 15 nt, Human
ccugccucucugcag

SEQ ID NO: 1968033 - RNA, 14 nt, Human
ccugccucucugca

SEQ ID NO: 1968034 - RNA, 18 nt, Human
ccugcugagucccaggcu

SEQ ID NO: 1968035 - RNA, 22 nt, Human
ccugccucuccgccccugagcc

SEQ ID NO: 1968036 - RNA, 23 nt, Human
ccugccucuccgccccugagccc

SEQ ID NO: 1968037 - RNA, 19 nt, Human
ccugcugagucccaggcug

SEQ ID NO: 1968038 - RNA, 20 nt, Human
ccugcugagucccaggcuga

SEQ ID NO: 1968039 - RNA, 13 nt, Human
ccugccucucugc

SEQ ID NO: 1968040 - RNA, 13 nt, Human
ccugccucuccgc

SEQ ID NO: 1968041 - RNA, 16 nt, Human
ccugccucuccgcccc

SEQ ID NO: 1968042 - RNA, 17 nt, Human
ccugccucuccgccccu

SEQ ID NO: 1968043 - RNA, 18 nt, Human
ccugccucuccgccccug

SEQ ID NO: 1968044 - RNA, 21 nt, Human
ccugccucuccgccccugagc

SEQ ID NO: 1968045 - RNA, 17 nt, Human
ccugccucagccucccg

SEQ ID NO: 1968046 - RNA, 16 nt, Human
ccugccucagccuccc

SEQ ID NO: 1968047 - RNA, 15 nt, Human
ccugccucagccucc

SEQ ID NO: 1968048 - RNA, 21 nt, Human
ccugcccaggccccugccacc

SEQ ID NO: 1968049 - RNA, 22 nt, Human
ccugcccaggccccugccaccc

SEQ ID NO: 1968050 - RNA, 19 nt, Human
ccugcccaccuggccucug

SEQ ID NO: 1968051 - RNA, 18 nt, Human
ccugcccaccuggccucu

SEQ ID NO: 1968052 - RNA, 18 nt, Human
ccugcccaggccccugcc

SEQ ID NO: 1968053 - RNA, 19 nt, Human
ccugccaugccaggaaccu

SEQ ID NO: 1968054 - RNA, 23 nt, Human
ccugcccaaugagacucuagggu

SEQ ID NO: 1968055 - RNA, 19 nt, Human
ccugcccaggccccugcca

SEQ ID NO: 1968056 - RNA, 18 nt, Human
ccugccaucauguuuaca

SEQ ID NO: 1968057 - RNA, 20 nt, Human
ccugccaucauguuuacaga

SEQ ID NO: 1968058 - RNA, 17 nt, Human
ccugcccaccuggccuc

SEQ ID NO: 1968059 - RNA, 15 nt, Human
ccugcccaccuggcc

SEQ ID NO: 1968060 - RNA, 15 nt, Human
ccugccaugccagga

SEQ ID NO: 1968061 - RNA, 20 nt, Human
ccucggaucagcugagccuu

SEQ ID NO: 1968062 - RNA, 16 nt, Human
ccucggauccccuucc

SEQ ID NO: 1968063 - RNA, 15 nt, Human
ccucggaucagcuga

SEQ ID NO: 1968064 - RNA, 17 nt, Human
ccucggaucagcugagc

SEQ ID NO: 1968065 - RNA, 17 nt, Human
ccucggauccccuuccu

SEQ ID NO: 1968066 - RNA, 19 nt, Human
ccucuuucccucccuuccu

SEQ ID NO: 1968067 - RNA, 15 nt, Human
ccucuuucccuucca

SEQ ID NO: 1968068 - RNA, 16 nt, Human
ccucuuucccuuccag

SEQ ID NO: 1968069 - RNA, 18 nt, Human
ccucuuucccuuccaguu

SEQ ID NO: 1968070 - RNA, 15 nt, Human
ccucuuugagugaag

SEQ ID NO: 1968071 - RNA, 23 nt, Human
ccucuugccacugccucuuccuc

SEQ ID NO: 1968072 - RNA, 22 nt, Human
ccucuugccacugccucuuccu

SEQ ID NO: 1968073 - RNA, 14 nt, Human
ccucuugccacugc

SEQ ID NO: 1968074 - RNA, 20 nt, Human
ccugaguuccuagccaccgc

SEQ ID NO: 1968075 - RNA, 21 nt, Human
ccugaguuccuagccaccgcc

SEQ ID NO: 1968076 - RNA, 13 nt, Human
ccugaguuccuga

SEQ ID NO: 1968077 - RNA, 14 nt, Human
ccugaguuccugag

SEQ ID NO: 1968078 - RNA, 22 nt, Human
ccugaguuccugaggugaugaa

SEQ ID NO: 1968079 - RNA, 13 nt, Human
ccugaguugaaga

SEQ ID NO: 1968080 - RNA, 15 nt, Human
ccugaguugaagagg

SEQ ID NO: 1968081 - RNA, 18 nt, Human
ccugaguugaagagggga

SEQ ID NO: 1968082 - RNA, 22 nt, Human
ccugauauugaaguaaaaaauu

SEQ ID NO: 1968083 - RNA, 13 nt, Human
ccugcaggcagcc

SEQ ID NO: 1968084 - RNA, 12 nt, Human
ccugcaggcagc

SEQ ID NO: 1968085 - RNA, 14 nt, Human
ccugcaggcagcca

SEQ ID NO: 1968086 - RNA, 18 nt, Human
ccugagaucucugcagga

SEQ ID NO: 1968087 - RNA, 22 nt, Human
ccugagaugguaugcacaauuc

SEQ ID NO: 1968088 - RNA, 17 nt, Human
ccugagaucucugcagg

SEQ ID NO: 1968089 - RNA, 18 nt, Human
ccugaccccucauagccc

SEQ ID NO: 1968090 - RNA, 19 nt, Human
ccugaguuccuagccaccg

SEQ ID NO: 1968091 - RNA, 23 nt, Human
ccugaggugaugaagacagcccg

SEQ ID NO: 1968092 - RNA, 12 nt, Human
ccuagccaccca

SEQ ID NO: 1968093 - RNA, 17 nt, Human
ccuaauuaauuucagua

SEQ ID NO: 1968094 - RNA, 16 nt, Human
ccuagccacccaccac

SEQ ID NO: 1968095 - RNA, 21 nt, Human
ccuagcauacguacacauuuu

SEQ ID NO: 1968096 - RNA, 14 nt, Human
ccuaauuaauuuca

SEQ ID NO: 1968097 - RNA, 15 nt, Human
ccuaauggugaugca

SEQ ID NO: 1968098 - RNA, 12 nt, Human
ccuaauguguuu

SEQ ID NO: 1968099 - RNA, 21 nt, Human
ccuaaugcgcaggcuggcccu

SEQ ID NO: 1968100 - RNA, 20 nt, Human
ccuaaugcgcaggcuggccc

SEQ ID NO: 1968101 - RNA, 17 nt, Human
ccgugaagauacuuugu

SEQ ID NO: 1968102 - RNA, 18 nt, Human
ccgugaagauacuuugua

SEQ ID NO: 1968103 - RNA, 20 nt, Human
ccgugaagauacuuuguauu

SEQ ID NO: 1968104 - RNA, 13 nt, Human
ccuaauaaagcug

SEQ ID NO: 1968105 - RNA, 12 nt, Human
ccgugagcccuu

SEQ ID NO: 1968106 - RNA, 12 nt, Human
ccuaauaaagcu

SEQ ID NO: 1968107 - RNA, 22 nt, Human
ccuagccuuagaagucacacag

SEQ ID NO: 1968108 - RNA, 23 nt, Human
ccuagccugugccucugggacug

SEQ ID NO: 1968109 - RNA, 19 nt, Human
ccuagccuuagaagucaca

SEQ ID NO: 1968110 - RNA, 12 nt, Human
ccguaaaaacug

SEQ ID NO: 1968111 - RNA, 16 nt, Human
ccguaaaaacugaagu

SEQ ID NO: 1968112 - RNA, 20 nt, Human
ccguaaaaacugaaguucug

SEQ ID NO: 1968113 - RNA, 23 nt, Human
ccguacgacucuuuuccaaacac

SEQ ID NO: 1968114 - RNA, 14 nt, Human
ccgucccccucugg

SEQ ID NO: 1968115 - RNA, 11 nt, Human
ccguccccucc

SEQ ID NO: 1968116 - RNA, 14 nt, Human
ccguccccucccag

SEQ ID NO: 1968117 - RNA, 15 nt, Human
ccguccccucccagg

SEQ ID NO: 1968118 - RNA, 16 nt, Human
ccguccccucccaggg

SEQ ID NO: 1968119 - RNA, 17 nt, Human
ccguccccucccaggga

SEQ ID NO: 1968120 - RNA, 14 nt, Human
ccggcccaguuuug

SEQ ID NO: 1968121 - RNA, 18 nt, Human
ccggccaccugcggugcu

SEQ ID NO: 1968122 - RNA, 17 nt, Human
ccggccaccugcggugc

SEQ ID NO: 1968123 - RNA, 20 nt, Human
ccggcaauaaaagcccagga

SEQ ID NO: 1968124 - RNA, 23 nt, Human
ccggcaauaaaagcccaggagcc

SEQ ID NO: 1968125 - RNA, 19 nt, Human
ccggcaauaaaagcccagg

SEQ ID NO: 1968126 - RNA, 23 nt, Human
ccgcagcccugcagagggcacag

SEQ ID NO: 1968127 - RNA, 18 nt, Human
ccgcagcccugcagaggg

SEQ ID NO: 1968128 - RNA, 14 nt, Human
ccgcagcccugcag

SEQ ID NO: 1968129 - RNA, 15 nt, Human
cccugugggccccca

SEQ ID NO: 1968130 - RNA, 15 nt, Human
cccugugauggggcc

SEQ ID NO: 1968131 - RNA, 23 nt, Human
cccugugaguacuacaguccucc

SEQ ID NO: 1968132 - RNA, 21 nt, Human
cccugugaguacuacaguccu

SEQ ID NO: 1968133 - RNA, 13 nt, Human
cccuccuucccac

SEQ ID NO: 1968134 - RNA, 19 nt, Human
cccuccuucccacucuucu

SEQ ID NO: 1968135 - RNA, 14 nt, Human
cccuccuuucacca

SEQ ID NO: 1968136 - RNA, 23 nt, Human
cccuuuuuuggcugcugaaggcu

SEQ ID NO: 1968137 - RNA, 22 nt, Human
cccuuuuuuggcugcugaaggc

SEQ ID NO: 1968138 - RNA, 21 nt, Human
cccuuuuuuggcugcugaagg

SEQ ID NO: 1968139 - RNA, 19 nt, Human
cccuucucuccagccccug

SEQ ID NO: 1968140 - RNA, 14 nt, Human
cccuucucuccagc

SEQ ID NO: 1968141 - RNA, 18 nt, Human
ccgaagccgccuguggac

SEQ ID NO: 1968142 - RNA, 17 nt, Human
ccgaacuguuguauaaa

SEQ ID NO: 1968143 - RNA, 18 nt, Human
ccgaacugggcauauuuc

SEQ ID NO: 1968144 - RNA, 15 nt, Human
ccgaaaugcugucuu

SEQ ID NO: 1968145 - RNA, 23 nt, Human
ccgaaaggucaccucacucagca

SEQ ID NO: 1968146 - RNA, 22 nt, Human
ccgaaaggucaccucacucagc

SEQ ID NO: 1968147 - RNA, 15 nt, Human
ccgacagccuggcac

SEQ ID NO: 1968148 - RNA, 22 nt, Human
ccgacagccuggcacagggcag

SEQ ID NO: 1968149 - RNA, 15 nt, Human
ccgacagcuuuccag

SEQ ID NO: 1968150 - RNA, 17 nt, Human
ccgacagcuuuccagua

SEQ ID NO: 1968151 - RNA, 23 nt, Human
ccgcagagaagugacgguuccua

SEQ ID NO: 1968152 - RNA, 13 nt, Human
ccgacagccuggc

SEQ ID NO: 1968153 - RNA, 14 nt, Human
ccgacagccuggca

SEQ ID NO: 1968154 - RNA, 12 nt, Human
ccgacagccugg

SEQ ID NO: 1968155 - RNA, 24 nt, Human
ccucaaauccaggacccugccagg

SEQ ID NO: 1968156 - RNA, 19 nt, Human
ccucaaaugaugugccugc

SEQ ID NO: 1968157 - RNA, 16 nt, Human
ccucaaauccaggacc

SEQ ID NO: 1968158 - RNA, 17 nt, Human
ccucaaauccaggaccc

SEQ ID NO: 1968159 - RNA, 18 nt, Human
ccucaaauccaggacccu

SEQ ID NO: 1968160 - RNA, 19 nt, Human
ccucaaauccaggacccug

SEQ ID NO: 1968161 - RNA, 23 nt, Human
ccucaaauccaggacccugccag

SEQ ID NO: 1968162 - RNA, 14 nt, Human
ccucaaauccagga

SEQ ID NO: 1968163 - RNA, 16 nt, Human
ccucaacaccucugca

SEQ ID NO: 1968164 - RNA, 23 nt, Human
ccucaaaugaugugccugcuuca

SEQ ID NO: 1968165 - RNA, 23 nt, Human
ccucaacucuccuccagagucag

SEQ ID NO: 1968166 - RNA, 21 nt, Human
ccucaacucuccuccagaguc

SEQ ID NO: 1968167 - RNA, 19 nt, Human
ccucaacucuccuccagag

SEQ ID NO: 1968168 - RNA, 15 nt, Human
ccucaaccuccuggg

SEQ ID NO: 1968169 - RNA, 18 nt, Human
ccucaggcaggugggaug

SEQ ID NO: 1968170 - RNA, 12 nt, Human
ccucaggcaggu

SEQ ID NO: 1968171 - RNA, 10 nt, Human
ccucaggccu

SEQ ID NO: 1968172 - RNA, 21 nt, Human
ccucauuccaccuucccaugc

SEQ ID NO: 1968173 - RNA, 15 nt, Human
ccucauucccucguc

SEQ ID NO: 1968174 - RNA, 21 nt, Human
ccucauucccucgucuuuccc

SEQ ID NO: 1968175 - RNA, 22 nt, Human
ccucauucccucgucuuuccca

SEQ ID NO: 1968176 - RNA, 23 nt, Human
ccucaagugauucuccugccuca

SEQ ID NO: 1968177 - RNA, 20 nt, Human
ccucaagugauucuccugcc

SEQ ID NO: 1968178 - RNA, 19 nt, Human
ccuccaagaccuucuccuu

SEQ ID NO: 1968179 - RNA, 17 nt, Human
ccuccaagaccuucucc

SEQ ID NO: 1968180 - RNA, 16 nt, Human
ccuccaagaccuucuc

SEQ ID NO: 1968181 - RNA, 12 nt, Human
ccucccaucacc

SEQ ID NO: 1968182 - RNA, 20 nt, Human
ccuccaagaccuucuccuuc

SEQ ID NO: 1968183 - RNA, 15 nt, Human
ccucccaggcucuca

SEQ ID NO: 1968184 - RNA, 18 nt, Human
ccucccagggagcaaggg

SEQ ID NO: 1968185 - RNA, 21 nt, Human
ccucccagggagcaagggcag

SEQ ID NO: 1968186 - RNA, 17 nt, Human
ccucccaucacccgcua

SEQ ID NO: 1968187 - RNA, 23 nt, Human
ccuccuuugugaggaagccgcug

SEQ ID NO: 1968188 - RNA, 19 nt, Human
ccuccuaucagaaguuucu

SEQ ID NO: 1968189 - RNA, 18 nt, Human
ccuccuuuucacaguucu

SEQ ID NO: 1968190 - RNA, 19 nt, Human
ccucgcaggccucccugcc

SEQ ID NO: 1968191 - RNA, 16 nt, Human
ccucgaacuccuggca

SEQ ID NO: 1968192 - RNA, 14 nt, Human
ccucgcuucuuuca

SEQ ID NO: 1968193 - RNA, 19 nt, Human
ccucggacuuagcugggag

SEQ ID NO: 1968194 - RNA, 20 nt, Human
ccucggacuuagcugggaga

SEQ ID NO: 1968195 - RNA, 20 nt, Human
ccucgcccagucccagcagc

SEQ ID NO: 1968196 - RNA, 23 nt, Human
ccucgcccagucccagcagccag

SEQ ID NO: 1968197 - RNA, 12 nt, Human
ccucgcccaguc

SEQ ID NO: 1968198 - RNA, 13 nt, Human
ccucgcccagucc

SEQ ID NO: 1968199 - RNA, 15 nt, Human
ccucgcccaguccca

SEQ ID NO: 1968200 - RNA, 16 nt, Human
ccucgcccagucccag

SEQ ID NO: 1968201 - RNA, 17 nt, Human
ccucgcccagucccagc

SEQ ID NO: 1968202 - RNA, 18 nt, Human
ccucgcccagucccagca

SEQ ID NO: 1968203 - RNA, 19 nt, Human
ccucgcccagucccagcag

SEQ ID NO: 1968204 - RNA, 21 nt, Human
ccucgcaggccucccugccag

SEQ ID NO: 1968205 - RNA, 22 nt, Human
ccucgcaggccucccugccagu

SEQ ID NO: 1968206 - RNA, 23 nt, Human
ccucgcaggccucccugccagua

SEQ ID NO: 1968207 - RNA, 16 nt, Human
ccucccuucucuucac

SEQ ID NO: 1968208 - RNA, 20 nt, Human
ccucccuuggggccuaugca

SEQ ID NO: 1968209 - RNA, 15 nt, Human
ccuccuagccaccca

SEQ ID NO: 1968210 - RNA, 20 nt, Human
ccuccuagggcauuguaucu

SEQ ID NO: 1968211 - RNA, 20 nt, Human
ccuccgcgugaucaaagcca

SEQ ID NO: 1968212 - RNA, 14 nt, Human
ccuccgcuucccug

SEQ ID NO: 1968213 - RNA, 14 nt, Human
ccuccgccucuugg

SEQ ID NO: 1968214 - RNA, 20 nt, Human
ccuccgaccacuuccagggg

SEQ ID NO: 1968215 - RNA, 22 nt, Human
ccuccgaccacuuccaggggaa

SEQ ID NO: 1968216 - RNA, 13 nt, Human
ccuccgccucuug

SEQ ID NO: 1968217 - RNA, 22 nt, Human
cccauccucuguacagagccca

SEQ ID NO: 1968218 - RNA, 21 nt, Human
cccauccucuguacagagccc

SEQ ID NO: 1968219 - RNA, 16 nt, Human
cccaggaaaggcucca

SEQ ID NO: 1968220 - RNA, 15 nt, Human
cccaggaaaggcucc

SEQ ID NO: 1968221 - RNA, 16 nt, Human
cccacuggacucaccu

SEQ ID NO: 1968222 - RNA, 13 nt, Human
cccacuggccggc

SEQ ID NO: 1968223 - RNA, 16 nt, Human
cccacugguuagaugu

SEQ ID NO: 1968224 - RNA, 12 nt, Human
cccaucagccca

SEQ ID NO: 1968225 - RNA, 18 nt, Human
cccaucagcccaaucccu

SEQ ID NO: 1968226 - RNA, 18 nt, Human
cccaggaaaggcuccagg

SEQ ID NO: 1968227 - RNA, 17 nt, Human
cccaggaaaggcuccag

SEQ ID NO: 1968228 - RNA, 15 nt, Human
cccaggcugagccuc

SEQ ID NO: 1968229 - RNA, 16 nt, Human
cccaggcugagccuca

SEQ ID NO: 1968230 - RNA, 17 nt, Human
cccaggcugagccucag

SEQ ID NO: 1968231 - RNA, 22 nt, Human
cccaggcuuagucacugagaca

SEQ ID NO: 1968232 - RNA, 13 nt, Human
cccaggcuggagu

SEQ ID NO: 1968233 - RNA, 18 nt, Human
cccaggcugagccucagu

SEQ ID NO: 1968234 - RNA, 14 nt, Human
ccccgcacugggcu

SEQ ID NO: 1968235 - RNA, 15 nt, Human
cccccuuucuuccuc

SEQ ID NO: 1968236 - RNA, 16 nt, Human
cccccuuucuuccuca

SEQ ID NO: 1968237 - RNA, 15 nt, Human
ccccagauugcaaca

SEQ ID NO: 1968238 - RNA, 17 nt, Human
ccccagaggcuggguga

SEQ ID NO: 1968239 - RNA, 20 nt, Human
ccccagauugcaacaggcug

SEQ ID NO: 1968240 - RNA, 24 nt, Human
ccccauggccggcuuucaggagcu

SEQ ID NO: 1968241 - RNA, 19 nt, Human
ccccauggccggcuuucag

SEQ ID NO: 1968242 - RNA, 15 nt, Human
cccauuugcuccuuu

SEQ ID NO: 1968243 - RNA, 14 nt, Human
cccauuuggagggc

SEQ ID NO: 1968244 - RNA, 19 nt, Human
cccauuuggagggccuggg

SEQ ID NO: 1968245 - RNA, 13 nt, Human
cccauuugggcag

SEQ ID NO: 1968246 - RNA, 20 nt, Human
cccauuugggcagagaggcu

SEQ ID NO: 1968247 - RNA, 13 nt, Human
ccccagaggcugg

SEQ ID NO: 1968248 - RNA, 19 nt, Human
cccauucugccugcccagg

SEQ ID NO: 1968249 - RNA, 14 nt, Human
cccauucugccugc

SEQ ID NO: 1968250 - RNA, 15 nt, Human
cccauucugccugcc

SEQ ID NO: 1968251 - RNA, 16 nt, Human
cccuccucucugcccu

SEQ ID NO: 1968252 - RNA, 15 nt, Human
cccuccucucugccc

SEQ ID NO: 1968253 - RNA, 17 nt, Human
cccuccucugagaggcg

SEQ ID NO: 1968254 - RNA, 16 nt, Human
cccuccucccucccag

SEQ ID NO: 1968255 - RNA, 15 nt, Human
cccucacucucagga

SEQ ID NO: 1968256 - RNA, 13 nt, Human
cccucacucucag

SEQ ID NO: 1968257 - RNA, 14 nt, Human
cccucacucucagg

SEQ ID NO: 1968258 - RNA, 21 nt, Human
cccgggaagggggcugggaca

SEQ ID NO: 1968259 - RNA, 18 nt, Human
cccgggaagggggcuggg

SEQ ID NO: 1968260 - RNA, 16 nt, Human
cccucaacaccucugc

SEQ ID NO: 1968261 - RNA, 22 nt, Human
cccgggaagggggcugggacau

SEQ ID NO: 1968262 - RNA, 16 nt, Human
cccucaacucuccucc

SEQ ID NO: 1968263 - RNA, 20 nt, Human
cccucaacucuccuccagag

SEQ ID NO: 1968264 - RNA, 16 nt, Human
cccucacccuggggcu

SEQ ID NO: 1968265 - RNA, 15 nt, Human
cccucacccuggggc

SEQ ID NO: 1968266 - RNA, 16 nt, Human
ccccuucugacccaug

SEQ ID NO: 1968267 - RNA, 14 nt, Human
ccccuucugaccca

SEQ ID NO: 1968268 - RNA, 13 nt, Human
ccccuucugaccc

SEQ ID NO: 1968269 - RNA, 16 nt, Human
cccgaauagcugggac

SEQ ID NO: 1968270 - RNA, 17 nt, Human
cccgaauagcugggacu

SEQ ID NO: 1968271 - RNA, 18 nt, Human
cccgaauagcugggacua

SEQ ID NO: 1968272 - RNA, 22 nt, Human
cccgaauagcugggacuacagg

SEQ ID NO: 1968273 - RNA, 15 nt, Human
cccgggaagggggcu

SEQ ID NO: 1968274 - RNA, 20 nt, Human
cccggcuaauuuuuguauuu

SEQ ID NO: 1968275 - RNA, 15 nt, Human
cccggccccugcugg

SEQ ID NO: 1968276 - RNA, 16 nt, Human
cccggccccugcuggu

SEQ ID NO: 1968277 - RNA, 16 nt, Human
cccggcccugccugcu

SEQ ID NO: 1968278 - RNA, 23 nt, Human
ccccugcccagaucagccagaag

SEQ ID NO: 1968279 - RNA, 10 nt, Human
ccccugccag

SEQ ID NO: 1968280 - RNA, 14 nt, Human
ccccugccacccug

SEQ ID NO: 1968281 - RNA, 16 nt, Human
ccccugccacccuggg

SEQ ID NO: 1968282 - RNA, 13 nt, Human
ccccugcacucca

SEQ ID NO: 1968283 - RNA, 21 nt, Human
ccccugcaaagcccagcuuga

SEQ ID NO: 1968284 - RNA, 17 nt, Human
ccccugaauuuaaauag

SEQ ID NO: 1968285 - RNA, 18 nt, Human
ccccugcaaagcccagcu

SEQ ID NO: 1968286 - RNA, 20 nt, Human
ccccugcaaagcccagcuug

SEQ ID NO: 1968287 - RNA, 13 nt, Human
ccccugaauuuaa

SEQ ID NO: 1968288 - RNA, 15 nt, Human
ccccugacaacacuc

SEQ ID NO: 1968289 - RNA, 16 nt, Human
ccccucuggcuccagc

SEQ ID NO: 1968290 - RNA, 18 nt, Human
ccccucuggcuccagcug

SEQ ID NO: 1968291 - RNA, 15 nt, Human
ccccucugcccugcg

SEQ ID NO: 1968292 - RNA, 20 nt, Human
ccccucugcccugcggguca

SEQ ID NO: 1968293 - RNA, 23 nt, Human
ccccucugcccugcgggucacag

SEQ ID NO: 1968294 - RNA, 14 nt, Human
ccccucugcccugc

SEQ ID NO: 1968295 - RNA, 23 nt, Human
ccagggggccagucccugaggca

SEQ ID NO: 1968296 - RNA, 13 nt, Human
ccagggggcuucc

SEQ ID NO: 1968297 - RNA, 22 nt, Human
ccagggggcuuccugaggggag

SEQ ID NO: 1968298 - RNA, 23 nt, Human
ccagggggcuuccugaggggaga

SEQ ID NO: 1968299 - RNA, 22 nt, Human
ccaggggucuugcaaaauuccu

SEQ ID NO: 1968300 - RNA, 21 nt, Human
ccagucauuauguuaauauuu

SEQ ID NO: 1968301 - RNA, 22 nt, Human
ccagucauuauguuaauauuuc

SEQ ID NO: 1968302 - RNA, 14 nt, Human
ccagucaggcucuc

SEQ ID NO: 1968303 - RNA, 15 nt, Human
ccagucccugaggca

SEQ ID NO: 1968304 - RNA, 14 nt, Human
ccaguccccuuccc

SEQ ID NO: 1968305 - RNA, 18 nt, Human
ccagucccccugccccag

SEQ ID NO: 1968306 - RNA, 18 nt, Human
ccaguccccuucccguga

SEQ ID NO: 1968307 - RNA, 16 nt, Human
ccaggauauauuuuau

SEQ ID NO: 1968308 - RNA, 23 nt, Human
ccaggauauauuuuauuuuuaga

SEQ ID NO: 1968309 - RNA, 23 nt, Human
ccaggcaggucuugaacuccugg

SEQ ID NO: 1968310 - RNA, 12 nt, Human
ccaggcaggucu

SEQ ID NO: 1968311 - RNA, 14 nt, Human
ccaggcaggucuug

SEQ ID NO: 1968312 - RNA, 21 nt, Human
ccaggcugcucuugaacuccu

SEQ ID NO: 1968313 - RNA, 14 nt, Human
ccaggcugcucuca

SEQ ID NO: 1968314 - RNA, 24 nt, Human
ccaggggaaccugccaugccagga

SEQ ID NO: 1968315 - RNA, 17 nt, Human
ccaggggaccuccuggg

SEQ ID NO: 1968316 - RNA, 21 nt, Human
ccaggggaaaaucagccugcu

SEQ ID NO: 1968317 - RNA, 12 nt, Human
ccaggggaaccu

SEQ ID NO: 1968318 - RNA, 13 nt, Human
ccaggggaaccug

SEQ ID NO: 1968319 - RNA, 15 nt, Human
ccaggggaaccugcc

SEQ ID NO: 1968320 - RNA, 16 nt, Human
ccaggggaaccugcca

SEQ ID NO: 1968321 - RNA, 17 nt, Human
ccaggggaaccugccau

SEQ ID NO: 1968322 - RNA, 12 nt, Human
ccaggcuggcgu

SEQ ID NO: 1968323 - RNA, 23 nt, Human
ccaggcugcucucaaaccccuga

SEQ ID NO: 1968324 - RNA, 15 nt, Human
ccagcuccaccccgc

SEQ ID NO: 1968325 - RNA, 14 nt, Human
ccagcuccccccac

SEQ ID NO: 1968326 - RNA, 19 nt, Human
ccagcuccccccaccuccc

SEQ ID NO: 1968327 - RNA, 12 nt, Human
ccagcuccaccc

SEQ ID NO: 1968328 - RNA, 13 nt, Human
ccagcuccacccc

SEQ ID NO: 1968329 - RNA, 24 nt, Human
ccagccccuucugacccaugcugc

SEQ ID NO: 1968330 - RNA, 23 nt, Human
ccagccccuucugacccaugcug

SEQ ID NO: 1968331 - RNA, 12 nt, Human
ccagcagaaaug

SEQ ID NO: 1968332 - RNA, 13 nt, Human
ccacuccugcucu

SEQ ID NO: 1968333 - RNA, 16 nt, Human
ccacuccugcucugcu

SEQ ID NO: 1968334 - RNA, 17 nt, Human
ccacuccugcucugcuc

SEQ ID NO: 1968335 - RNA, 17 nt, Human
ccagcacuucaggaggc

SEQ ID NO: 1968336 - RNA, 17 nt, Human
ccagccccauccucugu

SEQ ID NO: 1968337 - RNA, 15 nt, Human
ccagccccauccucu

SEQ ID NO: 1968338 - RNA, 18 nt, Human
ccagccccauccucugua

SEQ ID NO: 1968339 - RNA, 13 nt, Human
ccagcagagcacc

SEQ ID NO: 1968340 - RNA, 12 nt, Human
ccagcagagcac

SEQ ID NO: 1968341 - RNA, 14 nt, Human
ccagcagagcaccu

SEQ ID NO: 1968342 - RNA, 17 nt, Human
ccagccccagugcccac

SEQ ID NO: 1968343 - RNA, 16 nt, Human
ccagcuuuucauugcu

SEQ ID NO: 1968344 - RNA, 14 nt, Human
ccaggaaaaagaac

SEQ ID NO: 1968345 - RNA, 21 nt, Human
ccaucccauaugccugggcag

SEQ ID NO: 1968346 - RNA, 20 nt, Human
ccaucccauaugccugggca

SEQ ID NO: 1968347 - RNA, 19 nt, Human
ccaucccauaugccugggc

SEQ ID NO: 1968348 - RNA, 20 nt, Human
ccaucccaaacccuucagug

SEQ ID NO: 1968349 - RNA, 20 nt, Human
ccaguuggucccccuuccau

SEQ ID NO: 1968350 - RNA, 18 nt, Human
ccaguuggucccccuucc

SEQ ID NO: 1968351 - RNA, 19 nt, Human
ccauaauaaaaggcuuuga

SEQ ID NO: 1968352 - RNA, 18 nt, Human
ccauccagguucagcuug

SEQ ID NO: 1968353 - RNA, 19 nt, Human
ccauccagguucagcuugu

SEQ ID NO: 1968354 - RNA, 14 nt, Human
ccauaaucuggacu

SEQ ID NO: 1968355 - RNA, 21 nt, Human
ccauaaucuggacuccucugu

SEQ ID NO: 1968356 - RNA, 16 nt, Human
ccauaauguucugcua

SEQ ID NO: 1968357 - RNA, 13 nt, Human
ccaguuggucccc

SEQ ID NO: 1968358 - RNA, 23 nt, Human
ccaguuggguggaugccuggugg

SEQ ID NO: 1968359 - RNA, 20 nt, Human
ccaugaggaacaaggcaagg

SEQ ID NO: 1968360 - RNA, 23 nt, Human
ccaugaggaacaaggcaaggcug

SEQ ID NO: 1968361 - RNA, 17 nt, Human
ccaugaggaaggaacag

SEQ ID NO: 1968362 - RNA, 18 nt, Human
ccaugaguccccuguuug

SEQ ID NO: 1968363 - RNA, 12 nt, Human
ccaugucgccuc

SEQ ID NO: 1968364 - RNA, 15 nt, Human
ccaugucgccucugc

SEQ ID NO: 1968365 - RNA, 16 nt, Human
ccaugucgccucugca

SEQ ID NO: 1968366 - RNA, 17 nt, Human
ccaugucgccucugcau

SEQ ID NO: 1968367 - RNA, 19 nt, Human
ccaugucgccucugcauuc

SEQ ID NO: 1968368 - RNA, 12 nt, Human
cccacucccugc

SEQ ID NO: 1968369 - RNA, 15 nt, Human
cccacccuccccuuc

SEQ ID NO: 1968370 - RNA, 13 nt, Human
cccacucccugca

SEQ ID NO: 1968371 - RNA, 13 nt, Human
cccaccccauccu

SEQ ID NO: 1968372 - RNA, 23 nt, Human
cccacugcuuuuggucuguguga

SEQ ID NO: 1968373 - RNA, 12 nt, Human
cccacuccugcu

SEQ ID NO: 1968374 - RNA, 14 nt, Human
cccacuccugcucu

SEQ ID NO: 1968375 - RNA, 18 nt, Human
cccacuccugcucugcuc

SEQ ID NO: 1968376 - RNA, 21 nt, Human
cccacucgugauaagucaaca

SEQ ID NO: 1968377 - RNA, 11 nt, Human
cccacucucag

SEQ ID NO: 1968378 - RNA, 12 nt, Human
cccacucucaga

SEQ ID NO: 1968379 - RNA, 13 nt, Human
cccacucucagag

SEQ ID NO: 1968380 - RNA, 14 nt, Human
cccacucucagagg

SEQ ID NO: 1968381 - RNA, 15 nt, Human
cccacucucagaggc

SEQ ID NO: 1968382 - RNA, 17 nt, Human
cccacucucagaggccc

SEQ ID NO: 1968383 - RNA, 20 nt, Human
cccaacucaccccagcccca

SEQ ID NO: 1968384 - RNA, 17 nt, Human
cccaacucaccccagcc

SEQ ID NO: 1968385 - RNA, 20 nt, Human
cccaacuaauuuuuguauuu

SEQ ID NO: 1968386 - RNA, 13 nt, Human
cccaagcucugcu

SEQ ID NO: 1968387 - RNA, 14 nt, Human
cccaagcucugcuc

SEQ ID NO: 1968388 - RNA, 12 nt, Human
cccaagcucugc

SEQ ID NO: 1968389 - RNA, 15 nt, Human
cccaagcucugcucc

SEQ ID NO: 1968390 - RNA, 13 nt, Human
cccacccagccug

SEQ ID NO: 1968391 - RNA, 16 nt, Human
cccaacucaccccagc

SEQ ID NO: 1968392 - RNA, 15 nt, Human
cccaacucaccccag

SEQ ID NO: 1968393 - RNA, 21 nt, Human
ccauuucauuugugccagaau

SEQ ID NO: 1968394 - RNA, 22 nt, Human
ccauuucauuugugccagaaug

SEQ ID NO: 1968395 - RNA, 11 nt, Human
ccauuggaaau

SEQ ID NO: 1968396 - RNA, 14 nt, Human
ccauuggaaauuuc

SEQ ID NO: 1968397 - RNA, 15 nt, Human
ccauuggaaauuuca

SEQ ID NO: 1968398 - RNA, 21 nt, Human
ccauuucaguaaaccugucug

SEQ ID NO: 1968399 - RNA, 22 nt, Human
ccauuucaguaaaccugucuga

SEQ ID NO: 1968400 - RNA, 15 nt, Human
ccauuuaucuugaag

SEQ ID NO: 1968401 - RNA, 19 nt, Human
ccauucuguccuaccuuua

SEQ ID NO: 1968402 - RNA, 14 nt, Human
caccaacgucugug

SEQ ID NO: 1968403 - RNA, 13 nt, Human
caccaacccucag

SEQ ID NO: 1968404 - RNA, 16 nt, Human
caccaacgucugugcc

SEQ ID NO: 1968405 - RNA, 18 nt, Human
caccaaaauaagaaaaga

SEQ ID NO: 1968406 - RNA, 19 nt, Human
caccaaaauaagaaaagau

SEQ ID NO: 1968407 - RNA, 19 nt, Human
cacauuuuauuuuauuaug

SEQ ID NO: 1968408 - RNA, 20 nt, Human
cacauuuuauuuuauuaugc

SEQ ID NO: 1968409 - RNA, 15 nt, Human
cacaucuguuuugua

SEQ ID NO: 1968410 - RNA, 12 nt, Human
caccaaaauaag

SEQ ID NO: 1968411 - RNA, 17 nt, Human
caccaaaauaagaaaag

SEQ ID NO: 1968412 - RNA, 21 nt, Human
cacauuuuauuuuauuaugca

SEQ ID NO: 1968413 - RNA, 17 nt, Human
cacauuuuauuuuauua

SEQ ID NO: 1968414 - RNA, 13 nt, Human
caccagggaaggg

SEQ ID NO: 1968415 - RNA, 18 nt, Human
caccagggaaggggacaa

SEQ ID NO: 1968416 - RNA, 21 nt, Human
caccagggaaggggacaagga

SEQ ID NO: 1968417 - RNA, 17 nt, Human
cacccaccucagccucc

SEQ ID NO: 1968418 - RNA, 13 nt, Human
caccagccccagu

SEQ ID NO: 1968419 - RNA, 14 nt, Human
caccagcccagaag

SEQ ID NO: 1968420 - RNA, 15 nt, Human
caccagcccagaagu

SEQ ID NO: 1968421 - RNA, 16 nt, Human
caccagccccaaucca

SEQ ID NO: 1968422 - RNA, 16 nt, Human
caccagccccagugcc

SEQ ID NO: 1968423 - RNA, 18 nt, Human
cacccaccucagccuccc

SEQ ID NO: 1968424 - RNA, 16 nt, Human
cacccaggagccccga

SEQ ID NO: 1968425 - RNA, 11 nt, Human
cacccagccug

SEQ ID NO: 1968426 - RNA, 12 nt, Human
cacccagccugg

SEQ ID NO: 1968427 - RNA, 22 nt, Human
cacagggacugaaaaccucucc

SEQ ID NO: 1968428 - RNA, 19 nt, Human
cacaggcugggcugggcac

SEQ ID NO: 1968429 - RNA, 22 nt, Human
cacaggcugggcugggcacugc

SEQ ID NO: 1968430 - RNA, 13 nt, Human
cacaggcugggcu

SEQ ID NO: 1968431 - RNA, 16 nt, Human
cacaggcugggcuggg

SEQ ID NO: 1968432 - RNA, 17 nt, Human
cacaggcugggcugggc

SEQ ID NO: 1968433 - RNA, 18 nt, Human
cacaggcugggcugggca

SEQ ID NO: 1968434 - RNA, 14 nt, Human
cacaggcugagugc

SEQ ID NO: 1968435 - RNA, 17 nt, Human
cacaggcugagugcagg

SEQ ID NO: 1968436 - RNA, 18 nt, Human
cacaggcugagugcaggc

SEQ ID NO: 1968437 - RNA, 20 nt, Human
cacaggcugagugcaggccc

SEQ ID NO: 1968438 - RNA, 21 nt, Human
cacaggcugagugcaggccca

SEQ ID NO: 1968439 - RNA, 22 nt, Human
cacaggcugagugcaggcccac

SEQ ID NO: 1968440 - RNA, 12 nt, Human
cacacauuuuuu

SEQ ID NO: 1968441 - RNA, 16 nt, Human
cacacauuuuuuaaau

SEQ ID NO: 1968442 - RNA, 19 nt, Human
cacacauuuuuuaaaugca

SEQ ID NO: 1968443 - RNA, 20 nt, Human
cacacauuuuuuaaaugcac

SEQ ID NO: 1968444 - RNA, 10 nt, Human
cacacauuuu

SEQ ID NO: 1968445 - RNA, 11 nt, Human
cacacauuuuu

SEQ ID NO: 1968446 - RNA, 14 nt, Human
cacacauuucacug

SEQ ID NO: 1968447 - RNA, 16 nt, Human
cacacauuucacuguc

SEQ ID NO: 1968448 - RNA, 19 nt, Human
cacacauuucacugucugu

SEQ ID NO: 1968449 - RNA, 22 nt, Human
cacacauuucacugucugucug

SEQ ID NO: 1968450 - RNA, 13 nt, Human
cacagaacccuug

SEQ ID NO: 1968451 - RNA, 13 nt, Human
cacacauuugccu

SEQ ID NO: 1968452 - RNA, 21 nt, Human
cacaccaaucuuacuuuguaa

SEQ ID NO: 1968453 - RNA, 17 nt, Human
cacagcucuucuccagg

SEQ ID NO: 1968454 - RNA, 22 nt, Human
cacagcuccuuuuccagagcau

SEQ ID NO: 1968455 - RNA, 14 nt, Human
cacagcucuucucc

SEQ ID NO: 1968456 - RNA, 15 nt, Human
cacagcucuucucca

SEQ ID NO: 1968457 - RNA, 15 nt, Human
cacagcucuguccug

SEQ ID NO: 1968458 - RNA, 16 nt, Human
cacagcucuguccugg

SEQ ID NO: 1968459 - RNA, 18 nt, Human
cacagcucuguccuggga

SEQ ID NO: 1968460 - RNA, 19 nt, Human
cacagcucuguccugggag

SEQ ID NO: 1968461 - RNA, 18 nt, Human
cacagacccugcccugug

SEQ ID NO: 1968462 - RNA, 12 nt, Human
cacagcuccuuu

SEQ ID NO: 1968463 - RNA, 13 nt, Human
cacagcuccuuuu

SEQ ID NO: 1968464 - RNA, 21 nt, Human
cacagcuccuuuuccagagca

SEQ ID NO: 1968465 - RNA, 11 nt, Human
cacagcucugu

SEQ ID NO: 1968466 - RNA, 14 nt, Human
cacagcucuguccu

SEQ ID NO: 1968467 - RNA, 17 nt, Human
cacagacccugcccugu

SEQ ID NO: 1968468 - RNA, 16 nt, Human
cacagacccugcccug

SEQ ID NO: 1968469 - RNA, 14 nt, Human
cacagacccugccc

SEQ ID NO: 1968470 - RNA, 20 nt, Human
caaggccaaaggaagcacau

SEQ ID NO: 1968471 - RNA, 19 nt, Human
caaggccaaaggaagcaca

SEQ ID NO: 1968472 - RNA, 21 nt, Human
caaggccaaaggaagcacaug

SEQ ID NO: 1968473 - RNA, 12 nt, Human
caaggccaccuc

SEQ ID NO: 1968474 - RNA, 13 nt, Human
caaggccaccucu

SEQ ID NO: 1968475 - RNA, 14 nt, Human
caaggccaccucuu

SEQ ID NO: 1968476 - RNA, 19 nt, Human
caaggccaccucuuccugg

SEQ ID NO: 1968477 - RNA, 20 nt, Human
caaggccaccucuuccuggc

SEQ ID NO: 1968478 - RNA, 17 nt, Human
caaggcccccugccugc

SEQ ID NO: 1968479 - RNA, 20 nt, Human
caaggcccccugccugcccu

SEQ ID NO: 1968480 - RNA, 21 nt, Human
caaggccaccucuuccuggcc

SEQ ID NO: 1968481 - RNA, 22 nt, Human
caaggccaccucuuccuggccg

SEQ ID NO: 1968482 - RNA, 18 nt, Human
caaggcaaggcugucaau

SEQ ID NO: 1968483 - RNA, 16 nt, Human
caaggcaaggcuguca

SEQ ID NO: 1968484 - RNA, 17 nt, Human
caaggcaaggcugucaa

SEQ ID NO: 1968485 - RNA, 16 nt, Human
caagauugucauuagu

SEQ ID NO: 1968486 - RNA, 21 nt, Human
caagucagucauucagauaug

SEQ ID NO: 1968487 - RNA, 15 nt, Human
caaggcucugagcaa

SEQ ID NO: 1968488 - RNA, 15 nt, Human
caaggcgcuaacuug

SEQ ID NO: 1968489 - RNA, 17 nt, Human
caaguuuuccauauuuu

SEQ ID NO: 1968490 - RNA, 16 nt, Human
caaguuuucccugaag

SEQ ID NO: 1968491 - RNA, 18 nt, Human
caaguuuucccugaaguu

SEQ ID NO: 1968492 - RNA, 14 nt, Human
caauaaaagcccag

SEQ ID NO: 1968493 - RNA, 15 nt, Human
caauaaaagcccagg

SEQ ID NO: 1968494 - RNA, 16 nt, Human
caauaaaagcccagga

SEQ ID NO: 1968495 - RNA, 17 nt, Human
caauaaaagcccaggag

SEQ ID NO: 1968496 - RNA, 18 nt, Human
caauaaaagcccaggagc

SEQ ID NO: 1968497 - RNA, 19 nt, Human
caauaaaagcccaggagcc

SEQ ID NO: 1968498 - RNA, 22 nt, Human
caauaaaagcccaggagcccau

SEQ ID NO: 1968499 - RNA, 20 nt, Human
caauaaaaucuugaaaaugc

SEQ ID NO: 1968500 - RNA, 11 nt, Human
caaguuuugug

SEQ ID NO: 1968501 - RNA, 21 nt, Human
cacaagcuccaagcucccagg

SEQ ID NO: 1968502 - RNA, 20 nt, Human
cacaagcuccaagcucccag

SEQ ID NO: 1968503 - RNA, 15 nt, Human
caaugggagcucaug

SEQ ID NO: 1968504 - RNA, 19 nt, Human
cacaagcuccaagcuccca

SEQ ID NO: 1968505 - RNA, 18 nt, Human
cacaagcuccaagcuccc

SEQ ID NO: 1968506 - RNA, 20 nt, Human
cacaagagcccaggccuccu

SEQ ID NO: 1968507 - RNA, 19 nt, Human
cacaagagcccaggccucc

SEQ ID NO: 1968508 - RNA, 18 nt, Human
cacaagagcccaggccuc

SEQ ID NO: 1968509 - RNA, 17 nt, Human
caaucccagcuaccuca

SEQ ID NO: 1968510 - RNA, 12 nt, Human
caaucccagcua

SEQ ID NO: 1968511 - RNA, 23 nt, Human
caaucccaccaacccucagagcc

SEQ ID NO: 1968512 - RNA, 16 nt, Human
caaucccugaucccug

SEQ ID NO: 1968513 - RNA, 13 nt, Human
caaugcuggcugu

SEQ ID NO: 1968514 - RNA, 20 nt, Human
caaugcuggcuguuggcugg

SEQ ID NO: 1968515 - RNA, 21 nt, Human
caaugcuggcuguuggcuggg

SEQ ID NO: 1968516 - RNA, 16 nt, Human
caauggcagccuuggc

SEQ ID NO: 1968517 - RNA, 17 nt, Human
caaucaguagcuuaaga

SEQ ID NO: 1968518 - RNA, 21 nt, Human
caaucaguagcuuaagaaaaa

SEQ ID NO: 1968519 - RNA, 22 nt, Human
caaucaguagcuuaagaaaaaa

SEQ ID NO: 1968520 - RNA, 16 nt, Human
caauccaucagugcca

SEQ ID NO: 1968521 - RNA, 16 nt, Human
caaucccaccaacccu

SEQ ID NO: 1968522 - RNA, 17 nt, Human
caaucccaccaacccuc

SEQ ID NO: 1968523 - RNA, 22 nt, Human
caaucccaccaacccucagagc

SEQ ID NO: 1968524 - RNA, 15 nt, Human
cagaaauaauaaaaa

SEQ ID NO: 1968525 - RNA, 11 nt, Human
cagaaauacag

SEQ ID NO: 1968526 - RNA, 19 nt, Human
cagaaauacagauaaauga

SEQ ID NO: 1968527 - RNA, 16 nt, Human
cagaaauguacagcaa

SEQ ID NO: 1968528 - RNA, 23 nt, Human
cagaaaugucaugagauugcugu

SEQ ID NO: 1968529 - RNA, 16 nt, Human
cagaaaugucccuuuc

SEQ ID NO: 1968530 - RNA, 17 nt, Human
cagaaaugucccuuucu

SEQ ID NO: 1968531 - RNA, 22 nt, Human
cagaaaugucccuuucuucucc

SEQ ID NO: 1968532 - RNA, 12 nt, Human
cagaacagcugu

SEQ ID NO: 1968533 - RNA, 13 nt, Human
cagaacagcuguu

SEQ ID NO: 1968534 - RNA, 20 nt, Human
cagaacagcuguugacucua

SEQ ID NO: 1968535 - RNA, 14 nt, Human
cagaaaucugagga

SEQ ID NO: 1968536 - RNA, 15 nt, Human
cagaaaucugaggaa

SEQ ID NO: 1968537 - RNA, 18 nt, Human
cagaacagugauuaccag

SEQ ID NO: 1968538 - RNA, 15 nt, Human
cagaaguuucucagc

SEQ ID NO: 1968539 - RNA, 19 nt, Human
cagaaguuucucagcuccc

SEQ ID NO: 1968540 - RNA, 16 nt, Human
cagaaguuucugccgc

SEQ ID NO: 1968541 - RNA, 14 nt, Human
cagaaguuucugcc

SEQ ID NO: 1968542 - RNA, 12 nt, Human
cagaacagugau

SEQ ID NO: 1968543 - RNA, 17 nt, Human
cagaacagugauuacca

SEQ ID NO: 1968544 - RNA, 11 nt, Human
cagaacaguga

SEQ ID NO: 1968545 - RNA, 14 nt, Human
cagaacagcuucau

SEQ ID NO: 1968546 - RNA, 13 nt, Human
cacuuucuagcca

SEQ ID NO: 1968547 - RNA, 17 nt, Human
cacuuucuagccagagg

SEQ ID NO: 1968548 - RNA, 16 nt, Human
cacuuucuagccagag

SEQ ID NO: 1968549 - RNA, 18 nt, Human
cacuuguguuaugaagca

SEQ ID NO: 1968550 - RNA, 19 nt, Human
cacuuguugauuaauggaa

SEQ ID NO: 1968551 - RNA, 12 nt, Human
cacuuuaauggg

SEQ ID NO: 1968552 - RNA, 20 nt, Human
cacuuaaguuaguuccacug

SEQ ID NO: 1968553 - RNA, 22 nt, Human
cacuuaaguuaguuccacugag

SEQ ID NO: 1968554 - RNA, 15 nt, Human
cacuuaaaaaugguu

SEQ ID NO: 1968555 - RNA, 16 nt, Human
cacuuaaaacacguuu

SEQ ID NO: 1968556 - RNA, 22 nt, Human
cacuuaaaacacguuuuaagga

SEQ ID NO: 1968557 - RNA, 18 nt, Human
cacuguugcccaggcugg

SEQ ID NO: 1968558 - RNA, 19 nt, Human
cacuguugcccaggcuggc

SEQ ID NO: 1968559 - RNA, 23 nt, Human
cacuguugcccaggcuggcgugc

SEQ ID NO: 1968560 - RNA, 20 nt, Human
cacugggcuuggggaccaga

SEQ ID NO: 1968561 - RNA, 13 nt, Human
cacugggcuucua

SEQ ID NO: 1968562 - RNA, 19 nt, Human
cacugggagaaaugaaaaa

SEQ ID NO: 1968563 - RNA, 19 nt, Human
cacugcagccucaaccucc

SEQ ID NO: 1968564 - RNA, 14 nt, Human
cacugcagccucaa

SEQ ID NO: 1968565 - RNA, 20 nt, Human
cacugcagccucaaccuccu

SEQ ID NO: 1968566 - RNA, 21 nt, Human
cacugcagccucaaccuccug

SEQ ID NO: 1968567 - RNA, 22 nt, Human
cacugcagccucaaccuccugg

SEQ ID NO: 1968568 - RNA, 23 nt, Human
cacugcagccucaaccuccuggg

SEQ ID NO: 1968569 - RNA, 17 nt, Human
cacugccaugccagcuu

SEQ ID NO: 1968570 - RNA, 19 nt, Human
cacugcagccuccgcuucc

SEQ ID NO: 1968571 - RNA, 21 nt, Human
cacugcagccuccgcuucccu

SEQ ID NO: 1968572 - RNA, 22 nt, Human
cacugcagccuccgcuucccug

SEQ ID NO: 1968573 - RNA, 23 nt, Human
cacugcagccuccgcuucccugg

SEQ ID NO: 1968574 - RNA, 15 nt, Human
cacggcucacugcag

SEQ ID NO: 1968575 - RNA, 12 nt, Human
cacggccuccuu

SEQ ID NO: 1968576 - RNA, 14 nt, Human
cacggccuccuuuc

SEQ ID NO: 1968577 - RNA, 14 nt, Human
cacggcucacugca

SEQ ID NO: 1968578 - RNA, 17 nt, Human
cacggccaggccagagg

SEQ ID NO: 1968579 - RNA, 12 nt, Human
cacggccaggcc

SEQ ID NO: 1968580 - RNA, 13 nt, Human
cacggccaggcca

SEQ ID NO: 1968581 - RNA, 20 nt, Human
cacucugucgcccagucugg

SEQ ID NO: 1968582 - RNA, 23 nt, Human
cacuccagccugagcgacaguga

SEQ ID NO: 1968583 - RNA, 16 nt, Human
cacuaccccuugauuu

SEQ ID NO: 1968584 - RNA, 14 nt, Human
cacuccagccuggg

SEQ ID NO: 1968585 - RNA, 13 nt, Human
cacuccagccugg

SEQ ID NO: 1968586 - RNA, 13 nt, Human
cacuccagccuga

SEQ ID NO: 1968587 - RNA, 12 nt, Human
cacuccagccug

SEQ ID NO: 1968588 - RNA, 21 nt, Human
cacuacauucuguuaaucauu

SEQ ID NO: 1968589 - RNA, 17 nt, Human
cacuaccaaaggacacu

SEQ ID NO: 1968590 - RNA, 22 nt, Human
cacuaccaaaggacacuuaucc

SEQ ID NO: 1968591 - RNA, 15 nt, Human
cacuaccccuugauu

SEQ ID NO: 1968592 - RNA, 16 nt, Human
cacuacauucuguuaa

SEQ ID NO: 1968593 - RNA, 17 nt, Human
cacuacauucuguuaau

SEQ ID NO: 1968594 - RNA, 21 nt, Human
cacuacauuauaaaugucucu

SEQ ID NO: 1968595 - RNA, 20 nt, Human
cacucuuauugcccacgcug

SEQ ID NO: 1968596 - RNA, 21 nt, Human
cacucuuauugcccacgcugg

SEQ ID NO: 1968597 - RNA, 22 nt, Human
cacucuuauugcccacgcugga

SEQ ID NO: 1968598 - RNA, 18 nt, Human
caccugcccaaccugcuc

SEQ ID NO: 1968599 - RNA, 19 nt, Human
caccugcccaaccugcucu

SEQ ID NO: 1968600 - RNA, 13 nt, Human
caccugcccaacc

SEQ ID NO: 1968601 - RNA, 18 nt, Human
caccuuggcugcagggag

SEQ ID NO: 1968602 - RNA, 23 nt, Human
caccuuuauucuggcagaggagg

SEQ ID NO: 1968603 - RNA, 15 nt, Human
caccuuggcugcagg

SEQ ID NO: 1968604 - RNA, 16 nt, Human
caccuuggcugcaggg

SEQ ID NO: 1968605 - RNA, 14 nt, Human
caccuuucccaucu

SEQ ID NO: 1968606 - RNA, 12 nt, Human
caccucagccuc

SEQ ID NO: 1968607 - RNA, 13 nt, Human
caccucacucagc

SEQ ID NO: 1968608 - RNA, 14 nt, Human
caccucacucagca

SEQ ID NO: 1968609 - RNA, 15 nt, Human
caccucacucagcac

SEQ ID NO: 1968610 - RNA, 16 nt, Human
caccucacucagcacc

SEQ ID NO: 1968611 - RNA, 17 nt, Human
caccucacucagcacca

SEQ ID NO: 1968612 - RNA, 19 nt, Human
caccucacucagcaccacu

SEQ ID NO: 1968613 - RNA, 20 nt, Human
caccucacucagcaccacuc

SEQ ID NO: 1968614 - RNA, 21 nt, Human
caccucacucagcaccacuca

SEQ ID NO: 1968615 - RNA, 12 nt, Human
caccuacugagu

SEQ ID NO: 1968616 - RNA, 15 nt, Human
caacaccaaaaaaua

SEQ ID NO: 1968617 - RNA, 17 nt, Human
caacaccaaaaaauauc

SEQ ID NO: 1968618 - RNA, 23 nt, Human
caacaccaaaaaauaucuaguaa

SEQ ID NO: 1968619 - RNA, 19 nt, Human
caacaagaauaaaggcagc

SEQ ID NO: 1968620 - RNA, 18 nt, Human
caacaagaauaaaggcag

SEQ ID NO: 1968621 - RNA, 21 nt, Human
caacacacagauuugagcuca

SEQ ID NO: 1968622 - RNA, 22 nt, Human
caacacacagauuugagcucag

SEQ ID NO: 1968623 - RNA, 13 nt, Human
caaaucugucugc

SEQ ID NO: 1968624 - RNA, 14 nt, Human
caaaucuuaagaaa

SEQ ID NO: 1968625 - RNA, 13 nt, Human
caaaucuuccugg

SEQ ID NO: 1968626 - RNA, 14 nt, Human
caaaucugucugcu

SEQ ID NO: 1968627 - RNA, 13 nt, Human
caaaucuuaagaa

SEQ ID NO: 1968628 - RNA, 20 nt, Human
caaaucuuuccauauccaua

SEQ ID NO: 1968629 - RNA, 13 nt, Human
caaaugacuuuau

SEQ ID NO: 1968630 - RNA, 22 nt, Human
caaaucuuccuggucgaaaguu

SEQ ID NO: 1968631 - RNA, 23 nt, Human
caaaugcuguaacuuucugaaau

SEQ ID NO: 1968632 - RNA, 21 nt, Human
caaaugcuagaaaaauuguua

SEQ ID NO: 1968633 - RNA, 15 nt, Human
caaaugcaucuuuga

SEQ ID NO: 1968634 - RNA, 16 nt, Human
caaaugcaucuuugau

SEQ ID NO: 1968635 - RNA, 17 nt, Human
caaaugcaucuuugaug

SEQ ID NO: 1968636 - RNA, 21 nt, Human
caaaugcaucuuugauguguu

SEQ ID NO: 1968637 - RNA, 22 nt, Human
caaaugcaucuuugauguguug

SEQ ID NO: 1968638 - RNA, 18 nt, Human
caaaugacuuuauuauuu

SEQ ID NO: 1968639 - RNA, 20 nt, Human
caaaugacuuuauuauuuau

SEQ ID NO: 1968640 - RNA, 21 nt, Human
caaaugacuuuauuauuuauu

SEQ ID NO: 1968641 - RNA, 17 nt, Human
caaaugagacagcaguc

SEQ ID NO: 1968642 - RNA, 14 nt, Human
caaaugacuuuauu

SEQ ID NO: 1968643 - RNA, 15 nt, Human
caaaugacuuuauua

SEQ ID NO: 1968644 - RNA, 16 nt, Human
caaaugacuuuauuau

SEQ ID NO: 1968645 - RNA, 17 nt, Human
caaaugacuuuauuauu

SEQ ID NO: 1968646 - RNA, 21 nt, Human
caaagcagugcaugcuguccc

SEQ ID NO: 1968647 - RNA, 18 nt, Human
caaagcagugcaugcugu

SEQ ID NO: 1968648 - RNA, 14 nt, Human
caaagauauuuugc

SEQ ID NO: 1968649 - RNA, 16 nt, Human
caaagauauuuugcuu

SEQ ID NO: 1968650 - RNA, 22 nt, Human
caaagcagugcaugcugucccu

SEQ ID NO: 1968651 - RNA, 15 nt, Human
caaagcaguggagcc

SEQ ID NO: 1968652 - RNA, 21 nt, Human
caaagcaguggagcccaggag

SEQ ID NO: 1968653 - RNA, 14 nt, Human
caaagcaguugaau

SEQ ID NO: 1968654 - RNA, 19 nt, Human
caaaguaucccuacuguaa

SEQ ID NO: 1968655 - RNA, 21 nt, Human
caaaguaucccuacuguaauu

SEQ ID NO: 1968656 - RNA, 20 nt, Human
caaagucagaacaaauucag

SEQ ID NO: 1968657 - RNA, 15 nt, Human
caaagucaugauguu

SEQ ID NO: 1968658 - RNA, 17 nt, Human
caaagucaugauguuuu

SEQ ID NO: 1968659 - RNA, 18 nt, Human
caaagucaugauguuuuu

SEQ ID NO: 1968660 - RNA, 19 nt, Human
caaagucaugauguuuuua

SEQ ID NO: 1968661 - RNA, 22 nt, Human
caaagucaugauguuuuuaaaa

SEQ ID NO: 1968662 - RNA, 22 nt, Human
caaaguagaagucuuagaugua

SEQ ID NO: 1968663 - RNA, 14 nt, Human
caaagguaaaucag

SEQ ID NO: 1968664 - RNA, 22 nt, Human
caaagguaaaucagacuaugaa

SEQ ID NO: 1968665 - RNA, 22 nt, Human
caagaaugaagguuuuuguaaa

SEQ ID NO: 1968666 - RNA, 23 nt, Human
caacucuaaagugcuaauaauaa

SEQ ID NO: 1968667 - RNA, 22 nt, Human
caagaauugaagcaggacuaaa

SEQ ID NO: 1968668 - RNA, 14 nt, Human
caacucuccuccag

SEQ ID NO: 1968669 - RNA, 14 nt, Human
caacucauugcauc

SEQ ID NO: 1968670 - RNA, 17 nt, Human
caacuccaacauccacu

SEQ ID NO: 1968671 - RNA, 18 nt, Human
caacuccaacauccacuc

SEQ ID NO: 1968672 - RNA, 20 nt, Human
caacuccaacauccacucuc

SEQ ID NO: 1968673 - RNA, 17 nt, Human
caagaccacguuucuaa

SEQ ID NO: 1968674 - RNA, 18 nt, Human
caagaccacguuucuaaa

SEQ ID NO: 1968675 - RNA, 20 nt, Human
caagaauuucuaggacugaa

SEQ ID NO: 1968676 - RNA, 19 nt, Human
caagacccaaaaggcagaa

SEQ ID NO: 1968677 - RNA, 13 nt, Human
caagauggcacag

SEQ ID NO: 1968678 - RNA, 16 nt, Human
caagauggcacagggc

SEQ ID NO: 1968679 - RNA, 20 nt, Human
caagauggcacagggcauga

SEQ ID NO: 1968680 - RNA, 23 nt, Human
caagauggcacagggcaugaaau

SEQ ID NO: 1968681 - RNA, 17 nt, Human
caacucauauuuucaug

SEQ ID NO: 1968682 - RNA, 17 nt, Human
caacucaccccagcccc

SEQ ID NO: 1968683 - RNA, 18 nt, Human
caacucaccccagcccca

SEQ ID NO: 1968684 - RNA, 15 nt, Human
caacuaauuuuugua

SEQ ID NO: 1968685 - RNA, 19 nt, Human
caacuacuaccuguaauga

SEQ ID NO: 1968686 - RNA, 18 nt, Human
caacuaauuuuuguauuu

SEQ ID NO: 1968687 - RNA, 12 nt, Human
caaccccuggac

SEQ ID NO: 1968688 - RNA, 17 nt, Human
caaccccuggaccccag

SEQ ID NO: 1968689 - RNA, 18 nt, Human
caaccccuggaccccagc

SEQ ID NO: 1968690 - RNA, 22 nt, Human
caaccccuggaccccagccuca

SEQ ID NO: 1968691 - RNA, 15 nt, Human
caaccccucgcccag

SEQ ID NO: 1968692 - RNA, 17 nt, Human
caaccccucgcccaguc

SEQ ID NO: 1968693 - RNA, 21 nt, Human
caaccccucgcccagucccag

SEQ ID NO: 1968694 - RNA, 22 nt, Human
caaccccucgcccagucccagc

SEQ ID NO: 1968695 - RNA, 23 nt, Human
caaccccucgcccagucccagca

SEQ ID NO: 1968696 - RNA, 20 nt, Human
auuuugaagugagaaaauga

SEQ ID NO: 1968697 - RNA, 19 nt, Human
auuuuagggguagcauuug

SEQ ID NO: 1968698 - RNA, 15 nt, Human
auuuuaggcaaguuu

SEQ ID NO: 1968699 - RNA, 21 nt, Human
auuuuauaucaauuuaaaaaa

SEQ ID NO: 1968700 - RNA, 15 nt, Human
auuuuagcuaauuua

SEQ ID NO: 1968701 - RNA, 16 nt, Human
auuuuagcuaauuuag

SEQ ID NO: 1968702 - RNA, 13 nt, Human
auuuuaugucuuu

SEQ ID NO: 1968703 - RNA, 15 nt, Human
auuuuauguugacau

SEQ ID NO: 1968704 - RNA, 17 nt, Human
auuuuauguugacauuu

SEQ ID NO: 1968705 - RNA, 18 nt, Human
auuuuauguugacauuug

SEQ ID NO: 1968706 - RNA, 19 nt, Human
auuuuauguugacauuugu

SEQ ID NO: 1968707 - RNA, 13 nt, Human
auuuuauguugac

SEQ ID NO: 1968708 - RNA, 14 nt, Human
auuuuauguugaca

SEQ ID NO: 1968709 - RNA, 20 nt, Human
auuuuauguugacauuuguu

SEQ ID NO: 1968710 - RNA, 22 nt, Human
auuuuauguugacauuuguuug

SEQ ID NO: 1968711 - RNA, 16 nt, Human
auuuuuaagugcugca

SEQ ID NO: 1968712 - RNA, 18 nt, Human
auuuuuaagugcugcauu

SEQ ID NO: 1968713 - RNA, 19 nt, Human
auuuuuaagugcugcauuu

SEQ ID NO: 1968714 - RNA, 14 nt, Human
auuuuuaagugguu

SEQ ID NO: 1968715 - RNA, 16 nt, Human
auuuuuagccuguguc

SEQ ID NO: 1968716 - RNA, 22 nt, Human
auuuuuagccugugucauugcc

SEQ ID NO: 1968717 - RNA, 14 nt, Human
auuuuuauaagaaa

SEQ ID NO: 1968718 - RNA, 17 nt, Human
auuuuuaggacaugaaa

SEQ ID NO: 1968719 - RNA, 14 nt, Human
auuuuuagacagag

SEQ ID NO: 1968720 - RNA, 15 nt, Human
caaaagagaugaaag

SEQ ID NO: 1968721 - RNA, 19 nt, Human
caaaagcugggcagguugg

SEQ ID NO: 1968722 - RNA, 14 nt, Human
auuuuuuuguauga

SEQ ID NO: 1968723 - RNA, 17 nt, Human
auuuuuuuguaugaaaa

SEQ ID NO: 1968724 - RNA, 23 nt, Human
auuuuuuuuuccuucagugccuu

SEQ ID NO: 1968725 - RNA, 22 nt, Human
auuuuuuuuuccuucagugccu

SEQ ID NO: 1968726 - RNA, 20 nt, Human
auuuuuuuuuccuucagugc

SEQ ID NO: 1968727 - RNA, 18 nt, Human
auuuuuuuuuccuucagu

SEQ ID NO: 1968728 - RNA, 13 nt, Human
auuuuuuuguaug

SEQ ID NO: 1968729 - RNA, 16 nt, Human
auuuuuuugagacaga

SEQ ID NO: 1968730 - RNA, 21 nt, Human
auuuuuuugaacucuucucau

SEQ ID NO: 1968731 - RNA, 22 nt, Human
auuuuuuugaacucuucucauu

SEQ ID NO: 1968732 - RNA, 23 nt, Human
auuuuuuugaacucuucucauua

SEQ ID NO: 1968733 - RNA, 16 nt, Human
auuuuuauaccuguuu

SEQ ID NO: 1968734 - RNA, 14 nt, Human
caaacauuaauguu

SEQ ID NO: 1968735 - RNA, 15 nt, Human
caaacauuaauguug

SEQ ID NO: 1968736 - RNA, 14 nt, Human
caaaaggaauagau

SEQ ID NO: 1968737 - RNA, 21 nt, Human
caaaaggauaaugaauacuuu

SEQ ID NO: 1968738 - RNA, 13 nt, Human
caaaagcuucccu

SEQ ID NO: 1968739 - RNA, 20 nt, Human
caaaagcuucccucccugcu

SEQ ID NO: 1968740 - RNA, 18 nt, Human
caaaccccgaccaccugc

SEQ ID NO: 1968741 - RNA, 14 nt, Human
caaacccccauucu

SEQ ID NO: 1968742 - RNA, 19 nt, Human
caaacccccauucuguccu

SEQ ID NO: 1968743 - RNA, 21 nt, Human
caaaccccgaccaccugccca

SEQ ID NO: 1968744 - RNA, 13 nt, Human
caaaccccugacc

SEQ ID NO: 1968745 - RNA, 18 nt, Human
caaacccugucaaacauu

SEQ ID NO: 1968746 - RNA, 21 nt, Human
caaacccugucaaacauuagu

SEQ ID NO: 1968747 - RNA, 13 nt, Human
caaacccugucaa

SEQ ID NO: 1968748 - RNA, 17 nt, Human
caaacccugucaaacau

SEQ ID NO: 1968749 - RNA, 20 nt, Human
caaacauuuucucuuagaaa

SEQ ID NO: 1968750 - RNA, 21 nt, Human
caaacauuuucucuuagaaaa

SEQ ID NO: 1968751 - RNA, 17 nt, Human
caaacauuaauguugau

SEQ ID NO: 1968752 - RNA, 18 nt, Human
caaacauuaauguugauu

SEQ ID NO: 1968753 - RNA, 19 nt, Human
caaacauuaauguugauuu

SEQ ID NO: 1968754 - RNA, 20 nt, Human
caaacauuaauguugauuuc

SEQ ID NO: 1968755 - RNA, 21 nt, Human
caaacauuaauguugauuucu

SEQ ID NO: 1968756 - RNA, 22 nt, Human
caaacauuaauguugauuucua

SEQ ID NO: 1968757 - RNA, 15 nt, Human
caaacauuaguacuu

SEQ ID NO: 1968758 - RNA, 16 nt, Human
caaacauuaguacuuu

SEQ ID NO: 1968759 - RNA, 17 nt, Human
caaacauuaguacuuua

SEQ ID NO: 1968760 - RNA, 18 nt, Human
caaacauuaguacuuuau

SEQ ID NO: 1968761 - RNA, 19 nt, Human
caaacauuaguacuuuaua

SEQ ID NO: 1968762 - RNA, 14 nt, Human
caaacauuggaaga

SEQ ID NO: 1968763 - RNA, 19 nt, Human
caaacauuuucucuuagaa

SEQ ID NO: 1968764 - RNA, 19 nt, Human
auuccugcccugcuguuua

SEQ ID NO: 1968765 - RNA, 18 nt, Human
auuccugcauuugugaaa

SEQ ID NO: 1968766 - RNA, 18 nt, Human
auuccugcccugcuguuu

SEQ ID NO: 1968767 - RNA, 15 nt, Human
auuccugcauuugug

SEQ ID NO: 1968768 - RNA, 17 nt, Human
auucuccuuguguuacu

SEQ ID NO: 1968769 - RNA, 18 nt, Human
auucuccuuguguuacua

SEQ ID NO: 1968770 - RNA, 19 nt, Human
auucuccuuguguuacuaa

SEQ ID NO: 1968771 - RNA, 21 nt, Human
auucuccuuguguuacuaagu

SEQ ID NO: 1968772 - RNA, 22 nt, Human
auucuccuuguguuacuaaguu

SEQ ID NO: 1968773 - RNA, 17 nt, Human
auucucuaguuugauua

SEQ ID NO: 1968774 - RNA, 18 nt, Human
auucucuaguuugauuaa

SEQ ID NO: 1968775 - RNA, 19 nt, Human
auucucuaguuugauuaaa

SEQ ID NO: 1968776 - RNA, 11 nt, Human
auucucuguac

SEQ ID NO: 1968777 - RNA, 14 nt, Human
auucucuguacaua

SEQ ID NO: 1968778 - RNA, 19 nt, Human
auucuucugcuucagccuc

SEQ ID NO: 1968779 - RNA, 17 nt, Human
auucucuguacauauua

SEQ ID NO: 1968780 - RNA, 20 nt, Human
auucuucugcuucagccucc

SEQ ID NO: 1968781 - RNA, 22 nt, Human
auucuucuguacgucugacagg

SEQ ID NO: 1968782 - RNA, 15 nt, Human
auucuugcaaaguau

SEQ ID NO: 1968783 - RNA, 16 nt, Human
auucuugcaaaguauc

SEQ ID NO: 1968784 - RNA, 14 nt, Human
auucuugcaaagua

SEQ ID NO: 1968785 - RNA, 19 nt, Human
auuaaaugcccagccccuu

SEQ ID NO: 1968786 - RNA, 17 nt, Human
auuaaaugcccagcccc

SEQ ID NO: 1968787 - RNA, 12 nt, Human
auuaaauuacau

SEQ ID NO: 1968788 - RNA, 14 nt, Human
auuaaauuacauuu

SEQ ID NO: 1968789 - RNA, 15 nt, Human
auuaaauuacauuug

SEQ ID NO: 1968790 - RNA, 17 nt, Human
auuaaauuacauuugua

SEQ ID NO: 1968791 - RNA, 18 nt, Human
auuaaauuacauuuguaa

SEQ ID NO: 1968792 - RNA, 14 nt, Human
auuaggauuucaug

SEQ ID NO: 1968793 - RNA, 16 nt, Human
auuaggauuucaugau

SEQ ID NO: 1968794 - RNA, 16 nt, Human
auuaggcaugguuuug

SEQ ID NO: 1968795 - RNA, 17 nt, Human
auuaguacuggauuauu

SEQ ID NO: 1968796 - RNA, 13 nt, Human
auuaguacuuuau

SEQ ID NO: 1968797 - RNA, 15 nt, Human
auuaguacuuuauag

SEQ ID NO: 1968798 - RNA, 20 nt, Human
auuaguacuccccuccuuga

SEQ ID NO: 1968799 - RNA, 16 nt, Human
auucaaaugucuauaa

SEQ ID NO: 1968800 - RNA, 18 nt, Human
auucaacagguuuuccug

SEQ ID NO: 1968801 - RNA, 18 nt, Human
auucaacagcaaguguga

SEQ ID NO: 1968802 - RNA, 21 nt, Human
auucaacagcaagugugaaua

SEQ ID NO: 1968803 - RNA, 22 nt, Human
auucaacagcaagugugaauac

SEQ ID NO: 1968804 - RNA, 18 nt, Human
auucaaauguauuacagu

SEQ ID NO: 1968805 - RNA, 19 nt, Human
auuaugguaaaauuuugua

SEQ ID NO: 1968806 - RNA, 17 nt, Human
auuauggcauauauuaa

SEQ ID NO: 1968807 - RNA, 22 nt, Human
auuauggcauauauuaaaagca

SEQ ID NO: 1968808 - RNA, 11 nt, Human
auuaugcuaag

SEQ ID NO: 1968809 - RNA, 13 nt, Human
auuaugcuaagaa

SEQ ID NO: 1968810 - RNA, 16 nt, Human
auuaugcuaagaauuu

SEQ ID NO: 1968811 - RNA, 17 nt, Human
auucaauaguaauauaa

SEQ ID NO: 1968812 - RNA, 21 nt, Human
auucaauaguaauauaauaca

SEQ ID NO: 1968813 - RNA, 16 nt, Human
auuguugucugcaacu

SEQ ID NO: 1968814 - RNA, 15 nt, Human
auuguuaauugcuga

SEQ ID NO: 1968815 - RNA, 16 nt, Human
auuguuaauugcugag

SEQ ID NO: 1968816 - RNA, 19 nt, Human
auuguuaauugcugaggca

SEQ ID NO: 1968817 - RNA, 12 nt, Human
auuguaagaaau

SEQ ID NO: 1968818 - RNA, 14 nt, Human
auuguaagaaauac

SEQ ID NO: 1968819 - RNA, 20 nt, Human
auuguaagaaauacuguaca

SEQ ID NO: 1968820 - RNA, 21 nt, Human
auuguaagaaauacuguacaa

SEQ ID NO: 1968821 - RNA, 14 nt, Human
auugcuuucuuuca

SEQ ID NO: 1968822 - RNA, 17 nt, Human
auuguuguuuguaugua

SEQ ID NO: 1968823 - RNA, 18 nt, Human
auuguuguuuguauguau

SEQ ID NO: 1968824 - RNA, 20 nt, Human
auuguuguuuguauguauaa

SEQ ID NO: 1968825 - RNA, 21 nt, Human
auuguuguuuguauguauaau

SEQ ID NO: 1968826 - RNA, 19 nt, Human
auuucagaaguuuaaauau

SEQ ID NO: 1968827 - RNA, 22 nt, Human
auuucaguuauugucccuggcu

SEQ ID NO: 1968828 - RNA, 21 nt, Human
auuucaguuauugucccuggc

SEQ ID NO: 1968829 - RNA, 13 nt, Human
auuucagaaguuu

SEQ ID NO: 1968830 - RNA, 15 nt, Human
auuucagaaguuuaa

SEQ ID NO: 1968831 - RNA, 16 nt, Human
auuucagaaguuuaaa

SEQ ID NO: 1968832 - RNA, 18 nt, Human
auuucuguguccuguuuu

SEQ ID NO: 1968833 - RNA, 21 nt, Human
auuuaaugaaagacuguacaa

SEQ ID NO: 1968834 - RNA, 20 nt, Human
auuuaaugaaagacuguaca

SEQ ID NO: 1968835 - RNA, 15 nt, Human
auuuaaugaaagacu

SEQ ID NO: 1968836 - RNA, 16 nt, Human
auuuaaugaaagacug

SEQ ID NO: 1968837 - RNA, 19 nt, Human
auuuauaagaaaaauguga

SEQ ID NO: 1968838 - RNA, 11 nt, Human
auuuauaugua

SEQ ID NO: 1968839 - RNA, 21 nt, Human
auuuauauguauguguuuaga

SEQ ID NO: 1968840 - RNA, 17 nt, Human
auuuauauguauguguu

SEQ ID NO: 1968841 - RNA, 18 nt, Human
auuuauauguauguguuu

SEQ ID NO: 1968842 - RNA, 13 nt, Human
auuuauauguaug

SEQ ID NO: 1968843 - RNA, 14 nt, Human
auuuauauguaugu

SEQ ID NO: 1968844 - RNA, 16 nt, Human
auuuauauguaugugu

SEQ ID NO: 1968845 - RNA, 19 nt, Human
auuuaucuugaaggaaaaa

SEQ ID NO: 1968846 - RNA, 20 nt, Human
auuuaucuugaaggaaaaau

SEQ ID NO: 1968847 - RNA, 12 nt, Human
auuuaucuugaa

SEQ ID NO: 1968848 - RNA, 16 nt, Human
auuuaucuugaaggaa

SEQ ID NO: 1968849 - RNA, 16 nt, Human
auuuaugaagaaaaua

SEQ ID NO: 1968850 - RNA, 19 nt, Human
auuuaugaagaaaauacuu

SEQ ID NO: 1968851 - RNA, 23 nt, Human
auuuaucuugaaggaaaaauuca

SEQ ID NO: 1968852 - RNA, 13 nt, Human
auuuaucuuugau

SEQ ID NO: 1968853 - RNA, 15 nt, Human
auuuaugaagaaaau

SEQ ID NO: 1968854 - RNA, 14 nt, Human
auuuaucuuugaua

SEQ ID NO: 1968855 - RNA, 16 nt, Human
auuuaucuuugauaac

SEQ ID NO: 1968856 - RNA, 22 nt, Human
auuuaugcauauuauuuuaugu

SEQ ID NO: 1968857 - RNA, 16 nt, Human
auuuaugcauauuauu

SEQ ID NO: 1968858 - RNA, 14 nt, Human
auuucacugucugu

SEQ ID NO: 1968859 - RNA, 15 nt, Human
auuucacuugagugg

SEQ ID NO: 1968860 - RNA, 23 nt, Human
auuucacuugaguggagguuuau

SEQ ID NO: 1968861 - RNA, 13 nt, Human
auuucagaaauac

SEQ ID NO: 1968862 - RNA, 21 nt, Human
auuucagaaauacagauaaau

SEQ ID NO: 1968863 - RNA, 21 nt, Human
auuucagaaagccuuucauuu

SEQ ID NO: 1968864 - RNA, 19 nt, Human
cagucgccuuucagcaggc

SEQ ID NO: 1968865 - RNA, 21 nt, Human
cagucgccuuucagcaggcag

SEQ ID NO: 1968866 - RNA, 19 nt, Human
cagucucccccacccuugu

SEQ ID NO: 1968867 - RNA, 14 nt, Human
cagucucccucccu

SEQ ID NO: 1968868 - RNA, 21 nt, Human
cagucucaccauuuccccagg

SEQ ID NO: 1968869 - RNA, 22 nt, Human
cagucgccuuucagcaggcagc

SEQ ID NO: 1968870 - RNA, 23 nt, Human
cagucgccuuucagcaggcagcc

SEQ ID NO: 1968871 - RNA, 19 nt, Human
cagucgggggaacugaggc

SEQ ID NO: 1968872 - RNA, 23 nt, Human
cagugcaugcugucccuuacgug

SEQ ID NO: 1968873 - RNA, 22 nt, Human
cagugcaugcugucccuuacgu

SEQ ID NO: 1968874 - RNA, 19 nt, Human
cagugcaugcugucccuua

SEQ ID NO: 1968875 - RNA, 15 nt, Human
cagugcaccugggac

SEQ ID NO: 1968876 - RNA, 22 nt, Human
cagugcacuaauguguaagaca

SEQ ID NO: 1968877 - RNA, 19 nt, Human
cagucugauucccaagcuc

SEQ ID NO: 1968878 - RNA, 20 nt, Human
cagucugauucccaagcucu

SEQ ID NO: 1968879 - RNA, 11 nt, Human
cagugggagcu

SEQ ID NO: 1968880 - RNA, 12 nt, Human
cagugcccacag

SEQ ID NO: 1968881 - RNA, 19 nt, Human
cagugggacagggcauggc

SEQ ID NO: 1968882 - RNA, 16 nt, Human
cagugggacagggcau

SEQ ID NO: 1968883 - RNA, 15 nt, Human
cagugccaaaaacaa

SEQ ID NO: 1968884 - RNA, 18 nt, Human
cagguuugggaccccugg

SEQ ID NO: 1968885 - RNA, 23 nt, Human
cagguuugggaccccuggugguu

SEQ ID NO: 1968886 - RNA, 15 nt, Human
cagguuugggacccc

SEQ ID NO: 1968887 - RNA, 18 nt, Human
cagguuuaagcuguuacu

SEQ ID NO: 1968888 - RNA, 16 nt, Human
cagguuuaagcuguua

SEQ ID NO: 1968889 - RNA, 22 nt, Human
cagucaccccggccaccugcgg

SEQ ID NO: 1968890 - RNA, 19 nt, Human
cagucaccccggccaccug

SEQ ID NO: 1968891 - RNA, 20 nt, Human
cagucaccccggccaccugc

SEQ ID NO: 1968892 - RNA, 22 nt, Human
cagggucucacucugucgccca

SEQ ID NO: 1968893 - RNA, 21 nt, Human
cagggucucacucugucgccc

SEQ ID NO: 1968894 - RNA, 17 nt, Human
cagggucucacucuguc

SEQ ID NO: 1968895 - RNA, 18 nt, Human
cagggucucacucugucg

SEQ ID NO: 1968896 - RNA, 13 nt, Human
caggguuggcacc

SEQ ID NO: 1968897 - RNA, 20 nt, Human
caggguuggcaccuuccccc

SEQ ID NO: 1968898 - RNA, 23 nt, Human
cagggugucugcccccuccugag

SEQ ID NO: 1968899 - RNA, 24 nt, Human
cagggugucugcccccuccugagu

SEQ ID NO: 1968900 - RNA, 16 nt, Human
cagggugucugccccc

SEQ ID NO: 1968901 - RNA, 20 nt, Human
caggugcuaggaacacuccu

SEQ ID NO: 1968902 - RNA, 18 nt, Human
caggugcuaggaacacuc

SEQ ID NO: 1968903 - RNA, 14 nt, Human
caggugcgaaagga

SEQ ID NO: 1968904 - RNA, 14 nt, Human
cagguugguggggg

SEQ ID NO: 1968905 - RNA, 16 nt, Human
caggugauccacccac

SEQ ID NO: 1968906 - RNA, 17 nt, Human
caggugauccacccacc

SEQ ID NO: 1968907 - RNA, 12 nt, Human
caggguuggccc

SEQ ID NO: 1968908 - RNA, 14 nt, Human
caggguuggccccu

SEQ ID NO: 1968909 - RNA, 20 nt, Human
caggugauccacccaccuca

SEQ ID NO: 1968910 - RNA, 22 nt, Human
cagggaguccgaaagggacuug

SEQ ID NO: 1968911 - RNA, 18 nt, Human
cagggaggugaccccagg

SEQ ID NO: 1968912 - RNA, 14 nt, Human
cagggagggccugg

SEQ ID NO: 1968913 - RNA, 16 nt, Human
cagggagggccugggc

SEQ ID NO: 1968914 - RNA, 20 nt, Human
cagggaggugugaggcagga

SEQ ID NO: 1968915 - RNA, 22 nt, Human
cagggaggugugaggcaggaga

SEQ ID NO: 1968916 - RNA, 23 nt, Human
cagggaggugugaggcaggagag

SEQ ID NO: 1968917 - RNA, 15 nt, Human
caggccugacucuca

SEQ ID NO: 1968918 - RNA, 13 nt, Human
caggccucccugc

SEQ ID NO: 1968919 - RNA, 16 nt, Human
caggccucccugccag

SEQ ID NO: 1968920 - RNA, 17 nt, Human
caggccucccugccagu

SEQ ID NO: 1968921 - RNA, 18 nt, Human
caggccucccugccagua

SEQ ID NO: 1968922 - RNA, 20 nt, Human
caggccugccuguucccauu

SEQ ID NO: 1968923 - RNA, 15 nt, Human
caggcgccccuuccc

SEQ ID NO: 1968924 - RNA, 22 nt, Human
caggcgcaagggaggcccagcg

SEQ ID NO: 1968925 - RNA, 23 nt, Human
caggcgcaagggaggcccagcgc

SEQ ID NO: 1968926 - RNA, 20 nt, Human
caggccuacuccugucuucu

SEQ ID NO: 1968927 - RNA, 17 nt, Human
caggcuggcccugcccu

SEQ ID NO: 1968928 - RNA, 18 nt, Human
caggcuggcccugcccug

SEQ ID NO: 1968929 - RNA, 19 nt, Human
caggcuggcccugcccugg

SEQ ID NO: 1968930 - RNA, 17 nt, Human
caggcgccccuuccccc

SEQ ID NO: 1968931 - RNA, 16 nt, Human
caggcgcuagcacagc

SEQ ID NO: 1968932 - RNA, 20 nt, Human
caggcgcuagcacagcuccc

SEQ ID NO: 1968933 - RNA, 22 nt, Human
caggcgcuagcacagcucccuu

SEQ ID NO: 1968934 - RNA, 21 nt, Human
caggcuggccuggggucaggc

SEQ ID NO: 1968935 - RNA, 20 nt, Human
caggcuggcccugcccuggu

SEQ ID NO: 1968936 - RNA, 15 nt, Human
caggcuggcgugcag

SEQ ID NO: 1968937 - RNA, 16 nt, Human
caggcugggcuucagu

SEQ ID NO: 1968938 - RNA, 19 nt, Human
cagggaggacgcucucugg

SEQ ID NO: 1968939 - RNA, 12 nt, Human
cagggagggccu

SEQ ID NO: 1968940 - RNA, 13 nt, Human
cagggagggccug

SEQ ID NO: 1968941 - RNA, 17 nt, Human
cagggaggacgcucucu

SEQ ID NO: 1968942 - RNA, 18 nt, Human
cagggaggacgcucucug

SEQ ID NO: 1968943 - RNA, 17 nt, Human
caggcugggcuucagug

SEQ ID NO: 1968944 - RNA, 19 nt, Human
caggcugggcuucaguggc

SEQ ID NO: 1968945 - RNA, 23 nt, Human
caggccagagggagugacagagg

SEQ ID NO: 1968946 - RNA, 19 nt, Human
caggccagagggagugaca

SEQ ID NO: 1968947 - RNA, 21 nt, Human
caggccagagggagugacaga

SEQ ID NO: 1968948 - RNA, 17 nt, Human
caggagguuggagggaa

SEQ ID NO: 1968949 - RNA, 14 nt, Human
caggaguaaaagag

SEQ ID NO: 1968950 - RNA, 15 nt, Human
caggagguggucugg

SEQ ID NO: 1968951 - RNA, 18 nt, Human
caggcacccaccaucaug

SEQ ID NO: 1968952 - RNA, 22 nt, Human
caggcacccaccaucaugucug

SEQ ID NO: 1968953 - RNA, 23 nt, Human
caggcacccaccaucaugucugg

SEQ ID NO: 1968954 - RNA, 17 nt, Human
caggaggccagccuuga

SEQ ID NO: 1968955 - RNA, 12 nt, Human
caggagggacag

SEQ ID NO: 1968956 - RNA, 15 nt, Human
caggagggaggggga

SEQ ID NO: 1968957 - RNA, 20 nt, Human
caggagggacagucucacca

SEQ ID NO: 1968958 - RNA, 15 nt, Human
caggagggagcagag

SEQ ID NO: 1968959 - RNA, 16 nt, Human
caggagggacagucuc

SEQ ID NO: 1968960 - RNA, 17 nt, Human
caggagggacagucuca

SEQ ID NO: 1968961 - RNA, 19 nt, Human
caggagggacagucucacc

SEQ ID NO: 1968962 - RNA, 23 nt, Human
caggagggagggggaaggcaggg

SEQ ID NO: 1968963 - RNA, 12 nt, Human
caggaccccuga

SEQ ID NO: 1968964 - RNA, 14 nt, Human
caggaccccugagu

SEQ ID NO: 1968965 - RNA, 15 nt, Human
caggaccccugcagu

SEQ ID NO: 1968966 - RNA, 20 nt, Human
caggaccccugcaguucccc

SEQ ID NO: 1968967 - RNA, 16 nt, Human
caggaggccagccuug

SEQ ID NO: 1968968 - RNA, 15 nt, Human
caggaggccagccuu

SEQ ID NO: 1968969 - RNA, 14 nt, Human
caggaggccagccu

SEQ ID NO: 1968970 - RNA, 13 nt, Human
caggaggaagggg

SEQ ID NO: 1968971 - RNA, 15 nt, Human
cagauaugauucaaa

SEQ ID NO: 1968972 - RNA, 16 nt, Human
cagauaugauucaaau

SEQ ID NO: 1968973 - RNA, 17 nt, Human
cagauaugauucaaaug

SEQ ID NO: 1968974 - RNA, 19 nt, Human
cagauaugauucaaauguc

SEQ ID NO: 1968975 - RNA, 20 nt, Human
cagaggggguggccucccaa

SEQ ID NO: 1968976 - RNA, 19 nt, Human
cagaggggguggccuccca

SEQ ID NO: 1968977 - RNA, 17 nt, Human
cagaggggguggccucc

SEQ ID NO: 1968978 - RNA, 18 nt, Human
cagaggggguggccuccc

SEQ ID NO: 1968979 - RNA, 20 nt, Human
cagagucagaaguuucugcc

SEQ ID NO: 1968980 - RNA, 18 nt, Human
cagaguauuuuuguauuc

SEQ ID NO: 1968981 - RNA, 12 nt, Human
cagagcugccag

SEQ ID NO: 1968982 - RNA, 13 nt, Human
cagagcugccagu

SEQ ID NO: 1968983 - RNA, 18 nt, Human
cagagcugccaccugccu

SEQ ID NO: 1968984 - RNA, 16 nt, Human
cagagcugccaccugc

SEQ ID NO: 1968985 - RNA, 23 nt, Human
cagaaguuugagaucagccuggg

SEQ ID NO: 1968986 - RNA, 22 nt, Human
cagaaguuugagaucagccugg

SEQ ID NO: 1968987 - RNA, 20 nt, Human
cagaaguuugagaucagccu

SEQ ID NO: 1968988 - RNA, 19 nt, Human
cagaaguuucugccgcagc

SEQ ID NO: 1968989 - RNA, 23 nt, Human
cagaaguuucugccgcagcccug

SEQ ID NO: 1968990 - RNA, 22 nt, Human
cagagggccugcaagggaguga

SEQ ID NO: 1968991 - RNA, 23 nt, Human
cagcauauucaggaagcucaggg

SEQ ID NO: 1968992 - RNA, 22 nt, Human
cagcauauucaggaagcucagg

SEQ ID NO: 1968993 - RNA, 19 nt, Human
cagcauauucaggaagcuc

SEQ ID NO: 1968994 - RNA, 20 nt, Human
cagcagucuuaugcuuccag

SEQ ID NO: 1968995 - RNA, 21 nt, Human
cagcagucuuaugcuuccaga

SEQ ID NO: 1968996 - RNA, 22 nt, Human
cagcagucuuaugcuuccagaa

SEQ ID NO: 1968997 - RNA, 13 nt, Human
cagccaggccaca

SEQ ID NO: 1968998 - RNA, 12 nt, Human
cagccaggccac

SEQ ID NO: 1968999 - RNA, 22 nt, Human
cagccaggccacaagacccuug

SEQ ID NO: 1969000 - RNA, 13 nt, Human
cagcaccgccucu

SEQ ID NO: 1969001 - RNA, 14 nt, Human
cagcaccgccucuu

SEQ ID NO: 1969002 - RNA, 15 nt, Human
cagcaccgccucuuc

SEQ ID NO: 1969003 - RNA, 21 nt, Human
cagcagguccccagcuuuggc

SEQ ID NO: 1969004 - RNA, 17 nt, Human
cagcagucuuaugcuuc

SEQ ID NO: 1969005 - RNA, 19 nt, Human
cagcagucuuaugcuucca

SEQ ID NO: 1969006 - RNA, 15 nt, Human
cagcggggacagcuc

SEQ ID NO: 1969007 - RNA, 16 nt, Human
cagcggggacagcucc

SEQ ID NO: 1969008 - RNA, 17 nt, Human
cagcggggacagcuccu

SEQ ID NO: 1969009 - RNA, 19 nt, Human
cagccugagcgacagugag

SEQ ID NO: 1969010 - RNA, 22 nt, Human
cagccugagcgacagugagacu

SEQ ID NO: 1969011 - RNA, 18 nt, Human
cagccugagcgacaguga

SEQ ID NO: 1969012 - RNA, 20 nt, Human
cagccucuuucccuuccagu

SEQ ID NO: 1969013 - RNA, 13 nt, Human
cagccugagaguc

SEQ ID NO: 1969014 - RNA, 14 nt, Human
cagccccuggaugc

SEQ ID NO: 1969015 - RNA, 13 nt, Human
cagccccuggaug

SEQ ID NO: 1969016 - RNA, 12 nt, Human
cagccccuggau

SEQ ID NO: 1969017 - RNA, 21 nt, Human
cagccccuggaugcagccuca

SEQ ID NO: 1969018 - RNA, 19 nt, Human
cagccccuggaugcagccu

SEQ ID NO: 1969019 - RNA, 18 nt, Human
cagccccuggaugcagcc

SEQ ID NO: 1969020 - RNA, 17 nt, Human
cagccccuggaugcagc

SEQ ID NO: 1969021 - RNA, 15 nt, Human
cagcccuuagcaggg

SEQ ID NO: 1969022 - RNA, 22 nt, Human
cagccccuggaugcagccucac

SEQ ID NO: 1969023 - RNA, 16 nt, Human
cagcccuuagcaggga

SEQ ID NO: 1969024 - RNA, 21 nt, Human
cagcccuuagcagggaaacag

SEQ ID NO: 1969025 - RNA, 21 nt, Human
cagccgagauagccaaggcca

SEQ ID NO: 1969026 - RNA, 19 nt, Human
cagcccuuccucugcuccc

SEQ ID NO: 1969027 - RNA, 23 nt, Human
cagcccuuccucugcucccccuu

SEQ ID NO: 1969028 - RNA, 21 nt, Human
cagccgagcuuuuacucccug

SEQ ID NO: 1969029 - RNA, 13 nt, Human
cagcccuuccucu

SEQ ID NO: 1969030 - RNA, 16 nt, Human
cagcccuuccucugcu

SEQ ID NO: 1969031 - RNA, 17 nt, Human
cagcccuuccucugcuc

SEQ ID NO: 1969032 - RNA, 18 nt, Human
cagcccuuccucugcucc

SEQ ID NO: 1969033 - RNA, 18 nt, Human
cagccucuuucccuucca

SEQ ID NO: 1969034 - RNA, 19 nt, Human
cagccucuuucccuuccag

SEQ ID NO: 1969035 - RNA, 15 nt, Human
cagccucuuucccuu

SEQ ID NO: 1969036 - RNA, 16 nt, Human
cagccucuuucccuuc

SEQ ID NO: 1969037 - RNA, 16 nt, Human
cagcuccaagaauuuc

SEQ ID NO: 1969038 - RNA, 19 nt, Human
cagcuccaagaauuucuag

SEQ ID NO: 1969039 - RNA, 13 nt, Human
cagcuccagcuca

SEQ ID NO: 1969040 - RNA, 14 nt, Human
cagcuccagcucac

SEQ ID NO: 1969041 - RNA, 15 nt, Human
cagcuccagcucacc

SEQ ID NO: 1969042 - RNA, 22 nt, Human
cagcuccagcucaccagcccca

SEQ ID NO: 1969043 - RNA, 21 nt, Human
cagcucccaaggcucugagca

SEQ ID NO: 1969044 - RNA, 16 nt, Human
cagcuccagcucacca

SEQ ID NO: 1969045 - RNA, 17 nt, Human
cagcuccagcucaccag

SEQ ID NO: 1969046 - RNA, 18 nt, Human
cagcuccagcucaccagc

SEQ ID NO: 1969047 - RNA, 20 nt, Human
cagcuccagcucaccagccc

SEQ ID NO: 1969048 - RNA, 18 nt, Human
cagcugugcucuggacag

SEQ ID NO: 1969049 - RNA, 15 nt, Human
cagcuucauuuccug

SEQ ID NO: 1969050 - RNA, 22 nt, Human
cagcuucacuucugacucuucc

SEQ ID NO: 1969051 - RNA, 18 nt, Human
cagcuucauuuccugugu

SEQ ID NO: 1969052 - RNA, 19 nt, Human
cagcuucauuuccuguguc

SEQ ID NO: 1969053 - RNA, 18 nt, Human
caggaaaggcccagccac

SEQ ID NO: 1969054 - RNA, 15 nt, Human
caggaaaggcuccag

SEQ ID NO: 1969055 - RNA, 14 nt, Human
caggaaaggcucca

SEQ ID NO: 1969056 - RNA, 16 nt, Human
caggaaaugcugaccc

SEQ ID NO: 1969057 - RNA, 20 nt, Human
caggaaaugcugacccaugg

SEQ ID NO: 1969058 - RNA, 21 nt, Human
caggaaaugcugacccauggg

SEQ ID NO: 1969059 - RNA, 22 nt, Human
caggaaaugcugacccaugggc

SEQ ID NO: 1969060 - RNA, 23 nt, Human
caggaaaugcugacccaugggca

SEQ ID NO: 1969061 - RNA, 23 nt, Human
cagcugcaccccuuccugggcac

SEQ ID NO: 1969062 - RNA, 12 nt, Human
cagcugcacccc

SEQ ID NO: 1969063 - RNA, 14 nt, Human
cagcugcaccccuu

SEQ ID NO: 1969064 - RNA, 16 nt, Human
cagcugcaccccuucc

SEQ ID NO: 1969065 - RNA, 17 nt, Human
cagcugcaccccuuccu

SEQ ID NO: 1969066 - RNA, 20 nt, Human
cagcugcaccccuuccuggg

SEQ ID NO: 1969067 - RNA, 16 nt, Human
caucuggguagcugua

SEQ ID NO: 1969068 - RNA, 18 nt, Human
caucuggguagcuguaag

SEQ ID NO: 1969069 - RNA, 20 nt, Human
caucuggguagcuguaaggc

SEQ ID NO: 1969070 - RNA, 15 nt, Human
caucaggccaggccc

SEQ ID NO: 1969071 - RNA, 19 nt, Human
cauccauggggcugauugu

SEQ ID NO: 1969072 - RNA, 11 nt, Human
cauccaugggg

SEQ ID NO: 1969073 - RNA, 19 nt, Human
cauccauggggucucucac

SEQ ID NO: 1969074 - RNA, 20 nt, Human
cauccauggggucucucaca

SEQ ID NO: 1969075 - RNA, 21 nt, Human
cauccauggggucucucacag

SEQ ID NO: 1969076 - RNA, 22 nt, Human
cauccauggggucucucacaga

SEQ ID NO: 1969077 - RNA, 19 nt, Human
caucaggccaggcccucug

SEQ ID NO: 1969078 - RNA, 16 nt, Human
caucaggccaggcccu

SEQ ID NO: 1969079 - RNA, 17 nt, Human
cauccuucccacucugu

SEQ ID NO: 1969080 - RNA, 15 nt, Human
cauccuucccacucu

SEQ ID NO: 1969081 - RNA, 16 nt, Human
cauccuucccacucug

SEQ ID NO: 1969082 - RNA, 19 nt, Human
caucccauaugccugggca

SEQ ID NO: 1969083 - RNA, 14 nt, Human
cauccccuguagag

SEQ ID NO: 1969084 - RNA, 15 nt, Human
cauauucaggaagcu

SEQ ID NO: 1969085 - RNA, 14 nt, Human
cauauucaggaagc

SEQ ID NO: 1969086 - RNA, 20 nt, Human
cauauucaggaagcucaggg

SEQ ID NO: 1969087 - RNA, 22 nt, Human
cauauucaggaagcucagggcc

SEQ ID NO: 1969088 - RNA, 20 nt, Human
cauaugccugggcagaagga

SEQ ID NO: 1969089 - RNA, 15 nt, Human
cauaugccugggcag

SEQ ID NO: 1969090 - RNA, 22 nt, Human
cauaugccugggcagaaggaag

SEQ ID NO: 1969091 - RNA, 16 nt, Human
cauagcucuguacauc

SEQ ID NO: 1969092 - RNA, 19 nt, Human
cauagcagagaaugaaagg

SEQ ID NO: 1969093 - RNA, 22 nt, Human
cauagcagagaaugaaagggcc

SEQ ID NO: 1969094 - RNA, 22 nt, Human
cauagcaccuaacaacauugua

SEQ ID NO: 1969095 - RNA, 19 nt, Human
cauacacacgcugccuucg

SEQ ID NO: 1969096 - RNA, 16 nt, Human
cauacacacgcugccu

SEQ ID NO: 1969097 - RNA, 17 nt, Human
cauacacacgcugccuu

SEQ ID NO: 1969098 - RNA, 13 nt, Human
cauacacacgcug

SEQ ID NO: 1969099 - RNA, 15 nt, Human
cagugggagcugccu

SEQ ID NO: 1969100 - RNA, 17 nt, Human
cauaauucugaaguuau

SEQ ID NO: 1969101 - RNA, 18 nt, Human
cauaauucugaaguuaua

SEQ ID NO: 1969102 - RNA, 22 nt, Human
cauaauucugaaguuauauuuc

SEQ ID NO: 1969103 - RNA, 13 nt, Human
cauaauucuuauu

SEQ ID NO: 1969104 - RNA, 14 nt, Human
cauaauucuuauua

SEQ ID NO: 1969105 - RNA, 19 nt, Human
cauaauugccaauugaaac

SEQ ID NO: 1969106 - RNA, 15 nt, Human
caugcugcccuguga

SEQ ID NO: 1969107 - RNA, 14 nt, Human
caugcugcccugug

SEQ ID NO: 1969108 - RNA, 16 nt, Human
caugcugccccugccu

SEQ ID NO: 1969109 - RNA, 14 nt, Human
cauggccagguggc

SEQ ID NO: 1969110 - RNA, 13 nt, Human
cauggccaggugg

SEQ ID NO: 1969111 - RNA, 15 nt, Human
caugaaguaauaugc

SEQ ID NO: 1969112 - RNA, 19 nt, Human
caugaaguaauaugcacac

SEQ ID NO: 1969113 - RNA, 22 nt, Human
caugaaguaauaugcacacauu

SEQ ID NO: 1969114 - RNA, 23 nt, Human
caugaaguaauaugcacacauuu

SEQ ID NO: 1969115 - RNA, 23 nt, Human
caugacacgaauauugcugaugg

SEQ ID NO: 1969116 - RNA, 21 nt, Human
caugacacgaauauugcugau

SEQ ID NO: 1969117 - RNA, 14 nt, Human
caugaaggagugaa

SEQ ID NO: 1969118 - RNA, 22 nt, Human
caugaaggaugccaagaaguuu

SEQ ID NO: 1969119 - RNA, 24 nt, Human
caugauuaaccacuucagcugacu

SEQ ID NO: 1969120 - RNA, 12 nt, Human
caugcacaaauu

SEQ ID NO: 1969121 - RNA, 19 nt, Human
caugcacacucaugugcaa

SEQ ID NO: 1969122 - RNA, 14 nt, Human
caugcacacucaug

SEQ ID NO: 1969123 - RNA, 18 nt, Human
caugauguuuuuaaaauc

SEQ ID NO: 1969124 - RNA, 19 nt, Human
caugauguuuuuaaaaucu

SEQ ID NO: 1969125 - RNA, 20 nt, Human
caugauguuuuuaaaaucuu

SEQ ID NO: 1969126 - RNA, 21 nt, Human
caugauguuuuuaaaaucuua

SEQ ID NO: 1969127 - RNA, 22 nt, Human
caugauguuuuuaaaaucuuau

SEQ ID NO: 1969128 - RNA, 23 nt, Human
caugauuaaccacuucagcugac

SEQ ID NO: 1969129 - RNA, 22 nt, Human
caugauuaaccacuucagcuga

SEQ ID NO: 1969130 - RNA, 23 nt, Human
caugacaguucauucagggccga

SEQ ID NO: 1969131 - RNA, 17 nt, Human
caugauguuuuuaaaau

SEQ ID NO: 1969132 - RNA, 19 nt, Human
caugacagaaaauauguau

SEQ ID NO: 1969133 - RNA, 21 nt, Human
caugacagaaaauauguauua

SEQ ID NO: 1969134 - RNA, 14 nt, Human
caugacagaaaaua

SEQ ID NO: 1969135 - RNA, 15 nt, Human
caugacagaaaauau

SEQ ID NO: 1969136 - RNA, 16 nt, Human
caugacagaaaauaug

SEQ ID NO: 1969137 - RNA, 13 nt, Human
caugcugcccugu

SEQ ID NO: 1969138 - RNA, 12 nt, Human
caugcugcccug

SEQ ID NO: 1969139 - RNA, 13 nt, Human
caugcuccuggcc

SEQ ID NO: 1969140 - RNA, 18 nt, Human
caugcuccccugugccag

SEQ ID NO: 1969141 - RNA, 19 nt, Human
caugcuccccugugccagc

SEQ ID NO: 1969142 - RNA, 16 nt, Human
caugcacgugugugca

SEQ ID NO: 1969143 - RNA, 15 nt, Human
caugcuccccugugc

SEQ ID NO: 1969144 - RNA, 16 nt, Human
caugcuccccugugcc

SEQ ID NO: 1969145 - RNA, 16 nt, Human
cauguauccuuucaca

SEQ ID NO: 1969146 - RNA, 20 nt, Human
cauguccaagaagcccagga

SEQ ID NO: 1969147 - RNA, 19 nt, Human
cauguccaagaagcccagg

SEQ ID NO: 1969148 - RNA, 18 nt, Human
cauguccaagaagcccag

SEQ ID NO: 1969149 - RNA, 12 nt, Human
cauguuggccag

SEQ ID NO: 1969150 - RNA, 13 nt, Human
cauguuggccagg

SEQ ID NO: 1969151 - RNA, 17 nt, Human
cauguugccaaaauggu

SEQ ID NO: 1969152 - RNA, 23 nt, Human
cauuaucuagauacuguaucaug

SEQ ID NO: 1969153 - RNA, 21 nt, Human
cauuagugagacauauuuaca

SEQ ID NO: 1969154 - RNA, 13 nt, Human
cauuaguuuugaa

SEQ ID NO: 1969155 - RNA, 15 nt, Human
cauuaguacuuuaua

SEQ ID NO: 1969156 - RNA, 20 nt, Human
cauuaguacuuuauagaaga

SEQ ID NO: 1969157 - RNA, 22 nt, Human
cauuaguacuuuauagaagaau

SEQ ID NO: 1969158 - RNA, 14 nt, Human
cauuaguacuuuau

SEQ ID NO: 1969159 - RNA, 22 nt, Human
cauuaggugugacugaauuucu

SEQ ID NO: 1969160 - RNA, 13 nt, Human
cauuagugggaaa

SEQ ID NO: 1969161 - RNA, 12 nt, Human
cauuccuguucc

SEQ ID NO: 1969162 - RNA, 22 nt, Human
cauucgcuacuaugauuuaauu

SEQ ID NO: 1969163 - RNA, 18 nt, Human
cauuccuuuuuauuuaua

SEQ ID NO: 1969164 - RNA, 22 nt, Human
cauucgaagauccccagacuuc

SEQ ID NO: 1969165 - RNA, 13 nt, Human
cauucucacuccu

SEQ ID NO: 1969166 - RNA, 22 nt, Human
cauucucaagggacguccucca

SEQ ID NO: 1969167 - RNA, 16 nt, Human
cauucucaagggacgu

SEQ ID NO: 1969168 - RNA, 21 nt, Human
cauucucaagggacguccucc

SEQ ID NO: 1969169 - RNA, 22 nt, Human
cauucgggccccaccugcagcu

SEQ ID NO: 1969170 - RNA, 14 nt, Human
cauucucaagggac

SEQ ID NO: 1969171 - RNA, 18 nt, Human
cauucuagguuugcaaga

SEQ ID NO: 1969172 - RNA, 21 nt, Human
cauucgggccccaccugcagc

SEQ ID NO: 1969173 - RNA, 14 nt, Human
cauucucacuccua

SEQ ID NO: 1969174 - RNA, 15 nt, Human
ccaaggccaaaggaa

SEQ ID NO: 1969175 - RNA, 18 nt, Human
ccaaggaugccccguccc

SEQ ID NO: 1969176 - RNA, 14 nt, Human
ccaagaagcccagg

SEQ ID NO: 1969177 - RNA, 12 nt, Human
ccaagcuggucc

SEQ ID NO: 1969178 - RNA, 19 nt, Human
ccaagcuggucccacucag

SEQ ID NO: 1969179 - RNA, 15 nt, Human
ccaacgucugugcca

SEQ ID NO: 1969180 - RNA, 13 nt, Human
ccaacgucugugc

SEQ ID NO: 1969181 - RNA, 22 nt, Human
ccaaauggaaaugggcagagca

SEQ ID NO: 1969182 - RNA, 17 nt, Human
ccaaauggaaacagagg

SEQ ID NO: 1969183 - RNA, 15 nt, Human
ccaacggccccagcu

SEQ ID NO: 1969184 - RNA, 21 nt, Human
ccaaauggaaacagaggacca

SEQ ID NO: 1969185 - RNA, 16 nt, Human
ccaacgucugugccau

SEQ ID NO: 1969186 - RNA, 13 nt, Human
ccaagaagcccag

SEQ ID NO: 1969187 - RNA, 21 nt, Human
ccaaauaauauguuuccuucc

SEQ ID NO: 1969188 - RNA, 23 nt, Human
ccaaauaauauguuuccuucccu

SEQ ID NO: 1969189 - RNA, 12 nt, Human
ccaaaugcagcu

SEQ ID NO: 1969190 - RNA, 13 nt, Human
ccaaaugcagcuu

SEQ ID NO: 1969191 - RNA, 15 nt, Human
ccaaaugcagcuuua

SEQ ID NO: 1969192 - RNA, 18 nt, Human
ccaaaugcagcuuuaaaa

SEQ ID NO: 1969193 - RNA, 18 nt, Human
ccaaauaucaccaggacu

SEQ ID NO: 1969194 - RNA, 18 nt, Human
ccaaucccagcuaccuca

SEQ ID NO: 1969195 - RNA, 16 nt, Human
ccaaggccaaaggaag

SEQ ID NO: 1969196 - RNA, 14 nt, Human
ccaaucuuacuuug

SEQ ID NO: 1969197 - RNA, 15 nt, Human
ccaaucccugauccc

SEQ ID NO: 1969198 - RNA, 20 nt, Human
ccaaucuuacuuuguaaauu

SEQ ID NO: 1969199 - RNA, 21 nt, Human
ccaaucuuacuuuguaaauuc

SEQ ID NO: 1969200 - RNA, 15 nt, Human
ccaaucuuacuuugu

SEQ ID NO: 1969201 - RNA, 16 nt, Human
ccaaucuuacuuugua

SEQ ID NO: 1969202 - RNA, 17 nt, Human
ccaaucuuacuuuguaa

SEQ ID NO: 1969203 - RNA, 21 nt, Human
cauugcuuuuaaaacuacuua

SEQ ID NO: 1969204 - RNA, 17 nt, Human
cauugcuuuuaaaacua

SEQ ID NO: 1969205 - RNA, 13 nt, Human
cauugcuucuucu

SEQ ID NO: 1969206 - RNA, 15 nt, Human
cauugcuucuucuga

SEQ ID NO: 1969207 - RNA, 16 nt, Human
cauugcuucuucugag

SEQ ID NO: 1969208 - RNA, 15 nt, Human
cauuguaaaagcauu

SEQ ID NO: 1969209 - RNA, 20 nt, Human
cauuguaaaagcauuuugua

SEQ ID NO: 1969210 - RNA, 21 nt, Human
cauuguaaaagcauuuuguaa

SEQ ID NO: 1969211 - RNA, 22 nt, Human
cauuguaaaagcauuuuguaau

SEQ ID NO: 1969212 - RNA, 23 nt, Human
cauuguaaaagcauuuuguaaua

SEQ ID NO: 1969213 - RNA, 13 nt, Human
cauuggaaauuuc

SEQ ID NO: 1969214 - RNA, 19 nt, Human
cauuggaaauuucacguca

SEQ ID NO: 1969215 - RNA, 14 nt, Human
cauuggaaauuuca

SEQ ID NO: 1969216 - RNA, 16 nt, Human
cauuggaaauuucacg

SEQ ID NO: 1969217 - RNA, 14 nt, Human
cauuuauucugcuc

SEQ ID NO: 1969218 - RNA, 15 nt, Human
cauuuauucugcuca

SEQ ID NO: 1969219 - RNA, 16 nt, Human
cauuuaugguaaucau

SEQ ID NO: 1969220 - RNA, 19 nt, Human
cauuuaugguaaucauauu

SEQ ID NO: 1969221 - RNA, 20 nt, Human
cauuuaugguaaucauauua

SEQ ID NO: 1969222 - RNA, 22 nt, Human
cauuuaugguaaucauauuaga

SEQ ID NO: 1969223 - RNA, 21 nt, Human
cauuucaguaaaccugucuga

SEQ ID NO: 1969224 - RNA, 14 nt, Human
cauuucauccuuuc

SEQ ID NO: 1969225 - RNA, 17 nt, Human
cauuucauccuuucacu

SEQ ID NO: 1969226 - RNA, 16 nt, Human
cauuucauguccugug

SEQ ID NO: 1969227 - RNA, 17 nt, Human
cauuuggagggccuggg

SEQ ID NO: 1969228 - RNA, 18 nt, Human
cauuuggagggccugggc

SEQ ID NO: 1969229 - RNA, 15 nt, Human
cauuuggauuggaug

SEQ ID NO: 1969230 - RNA, 17 nt, Human
cauuugucacacacuuu

SEQ ID NO: 1969231 - RNA, 12 nt, Human
cauuugucauuu

SEQ ID NO: 1969232 - RNA, 14 nt, Human
cauuugucauuuuc

SEQ ID NO: 1969233 - RNA, 15 nt, Human
cauuugucauuuuca

SEQ ID NO: 1969234 - RNA, 17 nt, Human
cauuugucauuuucauu

SEQ ID NO: 1969235 - RNA, 18 nt, Human
cauuugucauuuucauua

SEQ ID NO: 1969236 - RNA, 20 nt, Human
cauuugucauuuucauuagc

SEQ ID NO: 1969237 - RNA, 16 nt, Human
cauuugugaaaugaug

SEQ ID NO: 1969238 - RNA, 14 nt, Human
cauuugugaaauga

SEQ ID NO: 1969239 - RNA, 15 nt, Human
cauuuuuuaaaugca

SEQ ID NO: 1969240 - RNA, 16 nt, Human
cauuuuuuaaaugcac

SEQ ID NO: 1969241 - RNA, 19 nt, Human
cauuuuuuaaaugcaccug

SEQ ID NO: 1969242 - RNA, 16 nt, Human
ccacacuucaggcucu

SEQ ID NO: 1969243 - RNA, 20 nt, Human
ccacacuucaggcucuucuc

SEQ ID NO: 1969244 - RNA, 21 nt, Human
ccacacuucaggcucuucucc

SEQ ID NO: 1969245 - RNA, 22 nt, Human
ccacagagaaaguacuucucca

SEQ ID NO: 1969246 - RNA, 13 nt, Human
ccacagaggacac

SEQ ID NO: 1969247 - RNA, 15 nt, Human
ccaccacgcccggcu

SEQ ID NO: 1969248 - RNA, 16 nt, Human
ccaccacgccuagccu

SEQ ID NO: 1969249 - RNA, 18 nt, Human
ccaccaucaugucuggcu

SEQ ID NO: 1969250 - RNA, 19 nt, Human
ccaccaucaugucuggcua

SEQ ID NO: 1969251 - RNA, 19 nt, Human
ccaccgggcugggagcucu

SEQ ID NO: 1969252 - RNA, 11 nt, Human
ccaccaucugc

SEQ ID NO: 1969253 - RNA, 13 nt, Human
ccaccaucugcug

SEQ ID NO: 1969254 - RNA, 14 nt, Human
ccaccaucugcugu

SEQ ID NO: 1969255 - RNA, 15 nt, Human
ccaccaucugcuguc

SEQ ID NO: 1969256 - RNA, 18 nt, Human
ccaccaucugcugucuuu

SEQ ID NO: 1969257 - RNA, 22 nt, Human
ccaccgggcugggagcucugca

SEQ ID NO: 1969258 - RNA, 12 nt, Human
ccaccuuggcug

SEQ ID NO: 1969259 - RNA, 14 nt, Human
ccaccuuggcugca

SEQ ID NO: 1969260 - RNA, 15 nt, Human
ccaccuuggcugcag

SEQ ID NO: 1969261 - RNA, 16 nt, Human
ccaccuuggcugcagg

SEQ ID NO: 1969262 - RNA, 13 nt, Human
ccacgcuggagug

SEQ ID NO: 1969263 - RNA, 19 nt, Human
ccacgcugacuacagggcc

SEQ ID NO: 1969264 - RNA, 20 nt, Human
ccacgcugacuacagggccg

SEQ ID NO: 1969265 - RNA, 18 nt, Human
ccacgcuggaccuugaac

SEQ ID NO: 1969266 - RNA, 15 nt, Human
ccacgccuagccuca

SEQ ID NO: 1969267 - RNA, 13 nt, Human
ccacgcugacuac

SEQ ID NO: 1969268 - RNA, 18 nt, Human
ccaccuuggcugcaggga

SEQ ID NO: 1969269 - RNA, 19 nt, Human
ccaccuuggcugcagggag

SEQ ID NO: 1969270 - RNA, 16 nt, Human
ccacgagagcgcagca

SEQ ID NO: 1969271 - RNA, 15 nt, Human
ccacgagagcgcagc

SEQ ID NO: 1969272 - RNA, 13 nt, Human
ccacgcccccacu

SEQ ID NO: 1969273 - RNA, 22 nt, Human
cugcuaguguucuuucucuuuc

SEQ ID NO: 1969274 - RNA, 22 nt, Human
cugccuguugggccaggagccu

SEQ ID NO: 1969275 - RNA, 21 nt, Human
cugccuguugggccaggagcc

SEQ ID NO: 1969276 - RNA, 23 nt, Human
cugccuguugggccaggagccuc

SEQ ID NO: 1969277 - RNA, 22 nt, Human
cugcucagggaaaagcagcucu

SEQ ID NO: 1969278 - RNA, 23 nt, Human
cugcucagggaaaagcagcucuc

SEQ ID NO: 1969279 - RNA, 21 nt, Human
cugcugacuguuuucucuuga

SEQ ID NO: 1969280 - RNA, 18 nt, Human
cugcugacuguuuucucu

SEQ ID NO: 1969281 - RNA, 20 nt, Human
cugccuccccucuccuuccu

SEQ ID NO: 1969282 - RNA, 20 nt, Human
cugaucugaugcaagcaaga

SEQ ID NO: 1969283 - RNA, 13 nt, Human
cugaucuguuaua

SEQ ID NO: 1969284 - RNA, 14 nt, Human
cugaucuguuauag

SEQ ID NO: 1969285 - RNA, 22 nt, Human
cugccucucccaucacuucccu

SEQ ID NO: 1969286 - RNA, 15 nt, Human
cugccucucccauca

SEQ ID NO: 1969287 - RNA, 23 nt, Human
cugccucucccaucacuucccua

SEQ ID NO: 1969288 - RNA, 23 nt, Human
cugccuccgcgugaucaaagcca

SEQ ID NO: 1969289 - RNA, 13 nt, Human
cugccuccucuuc

SEQ ID NO: 1969290 - RNA, 14 nt, Human
cugccuccucuuca

SEQ ID NO: 1969291 - RNA, 15 nt, Human
cugccuccucuucaa

SEQ ID NO: 1969292 - RNA, 24 nt, Human
cugccuccucuucaacugaccagc

SEQ ID NO: 1969293 - RNA, 17 nt, Human
cugccugguccucacac

SEQ ID NO: 1969294 - RNA, 19 nt, Human
cugccugguccucacacuc

SEQ ID NO: 1969295 - RNA, 23 nt, Human
cugccugguccucacacucaccc

SEQ ID NO: 1969296 - RNA, 17 nt, Human
cugccuguucagcucca

SEQ ID NO: 1969297 - RNA, 18 nt, Human
cugccuguucagcuccag

SEQ ID NO: 1969298 - RNA, 20 nt, Human
cugccuguugggccaggagc

SEQ ID NO: 1969299 - RNA, 19 nt, Human
cugccuguucagcuccagc

SEQ ID NO: 1969300 - RNA, 20 nt, Human
cugcuuuugucuaugggacu

SEQ ID NO: 1969301 - RNA, 23 nt, Human
cugcuucaaggauccugagccag

SEQ ID NO: 1969302 - RNA, 22 nt, Human
cugcuucaaggauccugagcca

SEQ ID NO: 1969303 - RNA, 21 nt, Human
cugcuucaaggauccugagcc

SEQ ID NO: 1969304 - RNA, 13 nt, Human
cugcuucaaggau

SEQ ID NO: 1969305 - RNA, 12 nt, Human
cugcuucaagga

SEQ ID NO: 1969306 - RNA, 19 nt, Human
cugcuucaaauauuucccu

SEQ ID NO: 1969307 - RNA, 14 nt, Human
cugcuucaaauauu

SEQ ID NO: 1969308 - RNA, 16 nt, Human
cuggaguuggggcaga

SEQ ID NO: 1969309 - RNA, 13 nt, Human
cuggauagugaag

SEQ ID NO: 1969310 - RNA, 14 nt, Human
cuggaagcacagcu

SEQ ID NO: 1969311 - RNA, 14 nt, Human
cuggacucuggacu

SEQ ID NO: 1969312 - RNA, 16 nt, Human
cuggacucuggacuuu

SEQ ID NO: 1969313 - RNA, 21 nt, Human
cuggacucuggacuuucucua

SEQ ID NO: 1969314 - RNA, 17 nt, Human
cuggaagagcuaggcag

SEQ ID NO: 1969315 - RNA, 19 nt, Human
cuggaagagcuaggcaggg

SEQ ID NO: 1969316 - RNA, 19 nt, Human
cugcuuuuuaaagaaugcu

SEQ ID NO: 1969317 - RNA, 21 nt, Human
cugcuuuugucuaugggacuc

SEQ ID NO: 1969318 - RNA, 14 nt, Human
cuggagaaaaauau

SEQ ID NO: 1969319 - RNA, 13 nt, Human
cuggacuuucucu

SEQ ID NO: 1969320 - RNA, 18 nt, Human
cuggacuuucucuaauaa

SEQ ID NO: 1969321 - RNA, 19 nt, Human
cuggacuuucucuaauaau

SEQ ID NO: 1969322 - RNA, 21 nt, Human
cuggacuuucucuaauaauaa

SEQ ID NO: 1969323 - RNA, 22 nt, Human
cuggacuuucucuaauaauaaa

SEQ ID NO: 1969324 - RNA, 13 nt, Human
cuggagaaaaaua

SEQ ID NO: 1969325 - RNA, 14 nt, Human
cuggagaaaaugga

SEQ ID NO: 1969326 - RNA, 13 nt, Human
cuggacuuggagg

SEQ ID NO: 1969327 - RNA, 20 nt, Human
cugggcaccggggccucgga

SEQ ID NO: 1969328 - RNA, 15 nt, Human
cugggcagaaggaag

SEQ ID NO: 1969329 - RNA, 12 nt, Human
cugggcagaagg

SEQ ID NO: 1969330 - RNA, 17 nt, Human
cugggcacugcucucac

SEQ ID NO: 1969331 - RNA, 18 nt, Human
cugggcacugcucucacc

SEQ ID NO: 1969332 - RNA, 19 nt, Human
cugggcacugcucucaccu

SEQ ID NO: 1969333 - RNA, 16 nt, Human
cuggggaugucucuca

SEQ ID NO: 1969334 - RNA, 17 nt, Human
cuggggaugucucucau

SEQ ID NO: 1969335 - RNA, 14 nt, Human
cuggggcagccucu

SEQ ID NO: 1969336 - RNA, 19 nt, Human
cuggggcagccucugggcc

SEQ ID NO: 1969337 - RNA, 14 nt, Human
cuggggagaaagua

SEQ ID NO: 1969338 - RNA, 20 nt, Human
cugggccaggggagguuaca

SEQ ID NO: 1969339 - RNA, 23 nt, Human
cuggggagaauggggcugggccc

SEQ ID NO: 1969340 - RNA, 14 nt, Human
cugggccagaauuu

SEQ ID NO: 1969341 - RNA, 12 nt, Human
cugggccagaau

SEQ ID NO: 1969342 - RNA, 15 nt, Human
cuggggccaggcugg

SEQ ID NO: 1969343 - RNA, 19 nt, Human
cuggggcauccaugggguc

SEQ ID NO: 1969344 - RNA, 17 nt, Human
cuggggcauccaugggg

SEQ ID NO: 1969345 - RNA, 15 nt, Human
cuggguucacugcaa

SEQ ID NO: 1969346 - RNA, 18 nt, Human
cuggguucacugcaaccu

SEQ ID NO: 1969347 - RNA, 20 nt, Human
cuggguucacugcaaccucc

SEQ ID NO: 1969348 - RNA, 18 nt, Human
cuggcagaguugaagaca

SEQ ID NO: 1969349 - RNA, 17 nt, Human
cuggcagaguugaagac

SEQ ID NO: 1969350 - RNA, 13 nt, Human
cuggcagccccug

SEQ ID NO: 1969351 - RNA, 19 nt, Human
cuggcagccgugccuucag

SEQ ID NO: 1969352 - RNA, 20 nt, Human
cuggcagccgugccuucagc

SEQ ID NO: 1969353 - RNA, 21 nt, Human
cuggcagccgugccuucagcu

SEQ ID NO: 1969354 - RNA, 22 nt, Human
cuggcagccgugccuucagcuc

SEQ ID NO: 1969355 - RNA, 12 nt, Human
cuggcagccccu

SEQ ID NO: 1969356 - RNA, 11 nt, Human
cuggcagccca

SEQ ID NO: 1969357 - RNA, 19 nt, Human
cuggcagaguugaagacag

SEQ ID NO: 1969358 - RNA, 14 nt, Human
cuggcagaggaggg

SEQ ID NO: 1969359 - RNA, 21 nt, Human
cuggcagcaccgccucuuccc

SEQ ID NO: 1969360 - RNA, 18 nt, Human
cugggaauaagugccagg

SEQ ID NO: 1969361 - RNA, 14 nt, Human
cugggaauguauag

SEQ ID NO: 1969362 - RNA, 11 nt, Human
cugggacacag

SEQ ID NO: 1969363 - RNA, 19 nt, Human
cugggaauguauaguauuu

SEQ ID NO: 1969364 - RNA, 20 nt, Human
cugggaauguauaguauuug

SEQ ID NO: 1969365 - RNA, 21 nt, Human
cugggaauguauaguauuuga

SEQ ID NO: 1969366 - RNA, 23 nt, Human
cugggaauguauaguauuugaaa

SEQ ID NO: 1969367 - RNA, 13 nt, Human
cugggacugggaa

SEQ ID NO: 1969368 - RNA, 18 nt, Human
cuggccccugagaucucu

SEQ ID NO: 1969369 - RNA, 22 nt, Human
cuggccccugagaucucugcag

SEQ ID NO: 1969370 - RNA, 23 nt, Human
cuggccccugagaucucugcagg

SEQ ID NO: 1969371 - RNA, 22 nt, Human
cuggccccucagggucccuggu

SEQ ID NO: 1969372 - RNA, 11 nt, Human
cuggcccugcc

SEQ ID NO: 1969373 - RNA, 13 nt, Human
cuggcccugcccu

SEQ ID NO: 1969374 - RNA, 14 nt, Human
cuggcccugcccug

SEQ ID NO: 1969375 - RNA, 21 nt, Human
cuggcccucucugaaggaggc

SEQ ID NO: 1969376 - RNA, 22 nt, Human
cuggcccucucugaaggaggcc

SEQ ID NO: 1969377 - RNA, 23 nt, Human
cuggcccucucugaaggaggcca

SEQ ID NO: 1969378 - RNA, 15 nt, Human
cuggcccugcccugg

SEQ ID NO: 1969379 - RNA, 16 nt, Human
cuggccgggagccuga

SEQ ID NO: 1969380 - RNA, 14 nt, Human
cuggccuagcauac

SEQ ID NO: 1969381 - RNA, 20 nt, Human
cuggccggugugggggcccc

SEQ ID NO: 1969382 - RNA, 20 nt, Human
cuuagggaagcuggccugag

SEQ ID NO: 1969383 - RNA, 13 nt, Human
cuuagggaagcug

SEQ ID NO: 1969384 - RNA, 17 nt, Human
cuuagggaagcuggccu

SEQ ID NO: 1969385 - RNA, 21 nt, Human
cuuagggaaggauacaaaagc

SEQ ID NO: 1969386 - RNA, 19 nt, Human
cuuagggaaggauacaaaa

SEQ ID NO: 1969387 - RNA, 15 nt, Human
cuuaggccagcacca

SEQ ID NO: 1969388 - RNA, 23 nt, Human
cuuaggcaauggugaacugucau

SEQ ID NO: 1969389 - RNA, 23 nt, Human
cuuagcucauucuccuuguguua

SEQ ID NO: 1969390 - RNA, 13 nt, Human
cuuagcugggaga

SEQ ID NO: 1969391 - RNA, 14 nt, Human
cuuagcuggagaug

SEQ ID NO: 1969392 - RNA, 16 nt, Human
cuuaccagcagagcac

SEQ ID NO: 1969393 - RNA, 22 nt, Human
cuuagcucauucuccuuguguu

SEQ ID NO: 1969394 - RNA, 14 nt, Human
cuuagccuuucuuu

SEQ ID NO: 1969395 - RNA, 14 nt, Human
cuguuauucuuugc

SEQ ID NO: 1969396 - RNA, 15 nt, Human
cuguuauucuuugca

SEQ ID NO: 1969397 - RNA, 16 nt, Human
cuguuauucuuugcac

SEQ ID NO: 1969398 - RNA, 14 nt, Human
cuguuggcuggggg

SEQ ID NO: 1969399 - RNA, 19 nt, Human
cuguuggcugggggccuca

SEQ ID NO: 1969400 - RNA, 22 nt, Human
cuguuggcugggggccucagug

SEQ ID NO: 1969401 - RNA, 22 nt, Human
cuguuguauaaauuuauuuacu

SEQ ID NO: 1969402 - RNA, 21 nt, Human
cuuaaaaaugguuuaaauggu

SEQ ID NO: 1969403 - RNA, 14 nt, Human
cuguuuaagagaca

SEQ ID NO: 1969404 - RNA, 12 nt, Human
cuguuuaagaga

SEQ ID NO: 1969405 - RNA, 11 nt, Human
cuguuuaaauu

SEQ ID NO: 1969406 - RNA, 14 nt, Human
cuguuuaaauugcu

SEQ ID NO: 1969407 - RNA, 21 nt, Human
cuguuuaaauugcucacaguu

SEQ ID NO: 1969408 - RNA, 18 nt, Human
cuguuuaagacacuuccg

SEQ ID NO: 1969409 - RNA, 15 nt, Human
cuuaccagcagagca

SEQ ID NO: 1969410 - RNA, 20 nt, Human
cuuacaaaugauugcuuuua

SEQ ID NO: 1969411 - RNA, 21 nt, Human
cuuacaaaugauugcuuuuaa

SEQ ID NO: 1969412 - RNA, 22 nt, Human
cuuacaaaugauugcuuuuaaa

SEQ ID NO: 1969413 - RNA, 21 nt, Human
cuuacauuagcaguuugcuuu

SEQ ID NO: 1969414 - RNA, 22 nt, Human
cuuacauuagcaguuugcuuug

SEQ ID NO: 1969415 - RNA, 14 nt, Human
cuuaaaacaacacu

SEQ ID NO: 1969416 - RNA, 13 nt, Human
cuuaaaacaucau

SEQ ID NO: 1969417 - RNA, 17 nt, Human
cuuaaaacaucauuccu

SEQ ID NO: 1969418 - RNA, 18 nt, Human
cuuaaaacaucauuccuu

SEQ ID NO: 1969419 - RNA, 18 nt, Human
cuuacaaaugauugcuuu

SEQ ID NO: 1969420 - RNA, 16 nt, Human
cuuacaaaugauugcu

SEQ ID NO: 1969421 - RNA, 19 nt, Human
cuuaaaacaucauuccuuu

SEQ ID NO: 1969422 - RNA, 20 nt, Human
cuuaaaacaucauuccuuuu

SEQ ID NO: 1969423 - RNA, 22 nt, Human
cuggugacaugucuuuucuugc

SEQ ID NO: 1969424 - RNA, 19 nt, Human
cuggucuuugagcucccac

SEQ ID NO: 1969425 - RNA, 12 nt, Human
cuggucuuugag

SEQ ID NO: 1969426 - RNA, 18 nt, Human
cuggucuuugagcuccca

SEQ ID NO: 1969427 - RNA, 13 nt, Human
cugguuuccugcc

SEQ ID NO: 1969428 - RNA, 14 nt, Human
cugguuuccugccc

SEQ ID NO: 1969429 - RNA, 14 nt, Human
cuguaacaguucuu

SEQ ID NO: 1969430 - RNA, 18 nt, Human
cuguaacaguucuuuuug

SEQ ID NO: 1969431 - RNA, 15 nt, Human
cuguaacgugugcug

SEQ ID NO: 1969432 - RNA, 16 nt, Human
cuguaacgugugcugu

SEQ ID NO: 1969433 - RNA, 12 nt, Human
cuguaacugucc

SEQ ID NO: 1969434 - RNA, 13 nt, Human
cuguagaguggga

SEQ ID NO: 1969435 - RNA, 15 nt, Human
cugucgcccagucug

SEQ ID NO: 1969436 - RNA, 16 nt, Human
cugucgcccagucugg

SEQ ID NO: 1969437 - RNA, 17 nt, Human
cuguccuccaagccagc

SEQ ID NO: 1969438 - RNA, 22 nt, Human
cugucaucugagaaugaacaaa

SEQ ID NO: 1969439 - RNA, 15 nt, Human
cuguccuccaagcca

SEQ ID NO: 1969440 - RNA, 19 nt, Human
cugucaucugagaaugaac

SEQ ID NO: 1969441 - RNA, 15 nt, Human
cugucaucugagaau

SEQ ID NO: 1969442 - RNA, 16 nt, Human
cugucaucugagaaug

SEQ ID NO: 1969443 - RNA, 17 nt, Human
cugucaucugagaauga

SEQ ID NO: 1969444 - RNA, 21 nt, Human
cuguccugggagugagcuggu

SEQ ID NO: 1969445 - RNA, 22 nt, Human
cugucaguuaugacauccacaa

SEQ ID NO: 1969446 - RNA, 23 nt, Human
cugucaauuacaggaaguacugg

SEQ ID NO: 1969447 - RNA, 20 nt, Human
cugucaauuacaggaaguac

SEQ ID NO: 1969448 - RNA, 19 nt, Human
cugucaauuacaggaagua

SEQ ID NO: 1969449 - RNA, 16 nt, Human
cugugccuuuugccau

SEQ ID NO: 1969450 - RNA, 14 nt, Human
cugugcugcccugc

SEQ ID NO: 1969451 - RNA, 13 nt, Human
cugugcugcccug

SEQ ID NO: 1969452 - RNA, 12 nt, Human
cugugcugcccu

SEQ ID NO: 1969453 - RNA, 20 nt, Human
cugugccuuuuuuauaucuu

SEQ ID NO: 1969454 - RNA, 20 nt, Human
cugugcgcauaggccugcuu

SEQ ID NO: 1969455 - RNA, 21 nt, Human
cugugcgcauaggccugcuuu

SEQ ID NO: 1969456 - RNA, 19 nt, Human
cugugcugcccugcccacc

SEQ ID NO: 1969457 - RNA, 18 nt, Human
cugugcugcccugcccac

SEQ ID NO: 1969458 - RNA, 17 nt, Human
cugugcugcccugccca

SEQ ID NO: 1969459 - RNA, 15 nt, Human
cugugcugcccugcc

SEQ ID NO: 1969460 - RNA, 19 nt, Human
cugugucagcauagaagua

SEQ ID NO: 1969461 - RNA, 17 nt, Human
cugugucagcauagaag

SEQ ID NO: 1969462 - RNA, 21 nt, Human
cugugcugcccugcccaccug

SEQ ID NO: 1969463 - RNA, 17 nt, Human
cuguuagugcacugauu

SEQ ID NO: 1969464 - RNA, 15 nt, Human
cuguguccggcccag

SEQ ID NO: 1969465 - RNA, 17 nt, Human
cuuucuaaugugugaau

SEQ ID NO: 1969466 - RNA, 15 nt, Human
cuuucuacccagcga

SEQ ID NO: 1969467 - RNA, 16 nt, Human
cuuucuacccagcgag

SEQ ID NO: 1969468 - RNA, 14 nt, Human
cuuugaccuguugg

SEQ ID NO: 1969469 - RNA, 17 nt, Human
cuuugacgccaucccag

SEQ ID NO: 1969470 - RNA, 16 nt, Human
cuuugacgccauccca

SEQ ID NO: 1969471 - RNA, 16 nt, Human
cuuuguauucugucuu

SEQ ID NO: 1969472 - RNA, 19 nt, Human
cuuuguauucugucuucau

SEQ ID NO: 1969473 - RNA, 20 nt, Human
cuuuuauaaacuuuaccuuu

SEQ ID NO: 1969474 - RNA, 21 nt, Human
cuuuuauaaacuuuaccuuuu

SEQ ID NO: 1969475 - RNA, 19 nt, Human
cuuuuauaaacuuuaccuu

SEQ ID NO: 1969476 - RNA, 19 nt, Human
cuuuguacagagugcuuuu

SEQ ID NO: 1969477 - RNA, 22 nt, Human
cuuuguauucucuccuguaccu

SEQ ID NO: 1969478 - RNA, 17 nt, Human
cuuuguauucucuccug

SEQ ID NO: 1969479 - RNA, 12 nt, Human
cuuuguaugcac

SEQ ID NO: 1969480 - RNA, 22 nt, Human
cuuuguacacccaugaaagaaa

SEQ ID NO: 1969481 - RNA, 15 nt, Human
cuuuguacagagugc

SEQ ID NO: 1969482 - RNA, 16 nt, Human
cuuuguaaugaaaacc

SEQ ID NO: 1969483 - RNA, 20 nt, Human
cuuuguacacccaugaaaga

SEQ ID NO: 1969484 - RNA, 21 nt, Human
cuuugguucuggguuguuucc

SEQ ID NO: 1969485 - RNA, 15 nt, Human
cuuuguaaugaaaac

SEQ ID NO: 1969486 - RNA, 14 nt, Human
cuuuguaaugaaaa

SEQ ID NO: 1969487 - RNA, 15 nt, Human
cuuugcaaaggagcu

SEQ ID NO: 1969488 - RNA, 16 nt, Human
cuuugcaaaggagcuc

SEQ ID NO: 1969489 - RNA, 14 nt, Human
cuuucagcaggcag

SEQ ID NO: 1969490 - RNA, 15 nt, Human
cuuucagcaggcagc

SEQ ID NO: 1969491 - RNA, 16 nt, Human
cuuucagcaggcagcc

SEQ ID NO: 1969492 - RNA, 18 nt, Human
cuuucagcaggcagccuu

SEQ ID NO: 1969493 - RNA, 20 nt, Human
cuuucacccuuuucuguuug

SEQ ID NO: 1969494 - RNA, 15 nt, Human
cuuucacccuuuucu

SEQ ID NO: 1969495 - RNA, 14 nt, Human
cuuucacccuuuuc

SEQ ID NO: 1969496 - RNA, 23 nt, Human
cuuuaaugucacaggcaggucca

SEQ ID NO: 1969497 - RNA, 15 nt, Human
cuuuaauuccaugaa

SEQ ID NO: 1969498 - RNA, 16 nt, Human
cuuuaauuccaugaau

SEQ ID NO: 1969499 - RNA, 23 nt, Human
cuuuaauuccaugaauguuccug

SEQ ID NO: 1969500 - RNA, 22 nt, Human
cuuuaauuaaaaccugggauua

SEQ ID NO: 1969501 - RNA, 13 nt, Human
cuuuaauuuuagc

SEQ ID NO: 1969502 - RNA, 13 nt, Human
cuuggggucaggu

SEQ ID NO: 1969503 - RNA, 22 nt, Human
cuuggggucagguugacaggag

SEQ ID NO: 1969504 - RNA, 19 nt, Human
cuuggucugugagaugcua

SEQ ID NO: 1969505 - RNA, 17 nt, Human
cuuggucacagccaggc

SEQ ID NO: 1969506 - RNA, 16 nt, Human
cuuggucugugagaug

SEQ ID NO: 1969507 - RNA, 14 nt, Human
cuugguccugcugc

SEQ ID NO: 1969508 - RNA, 22 nt, Human
cuugguagaagcccuucuaccu

SEQ ID NO: 1969509 - RNA, 16 nt, Human
cuuggucacagccagg

SEQ ID NO: 1969510 - RNA, 20 nt, Human
cuuggugucgggcaugacac

SEQ ID NO: 1969511 - RNA, 19 nt, Human
cuuggugucgggcaugaca

SEQ ID NO: 1969512 - RNA, 19 nt, Human
cuuggugccuaauguucca

SEQ ID NO: 1969513 - RNA, 17 nt, Human
cuuggugccucugcagu

SEQ ID NO: 1969514 - RNA, 14 nt, Human
cuugucggcuccag
